United States Patent Application Publication US 2017/0204474 A1 - sequence listing, part 2

SEQ ID NO: 3945 - DNA, 937 bp, Avena sativa
acagctgtgatgcgggcacatgccgagcgtggcttaatagatggtgctgatagggtgaaatagcaatggcattgctggattcccgctcacgttggagtgcttcacatcgcttgtagaagcatatggacaggctggctcctgtggtagtgcaaggggaatgtttgatcagatgaggaagagcgggcatgaaccaaatgaccgctgcctggctggtatggtgactggatacatgaagaagaaccaactggaccaggctttgatgttgctgctgagcttagagaaggagggatttaaacctggtgttaagactaatctcgtcttgctggattggctatccaggttgcatttggtgcaagaggctgaacaggttcttcagaagataaaaaaggctggagaagagcccgtagagatccatgtttaccttgttggtatgtatgcggagtcaggccaggaagagaaagtccgcaaatccctcaagattgtggaagagaagaagaaactgctgaagtctgagcactttgagcggattatagaaggccttgtcaatgggggtttctcggatgatgcaaacaaatatttcaagatgatgaaatcttgtggctttgctccaccagatacacttgaggctacggtaagagccagctttgggatcaagaagcaccgttcggccgattgacaggcattgaggatgaagcttgtacgtactagttatcagctggtcatgactgcactgattctggtgtgaaaatctagaagtggcaccgaccacggcaagccagtttagacgaactgatatgatgaactcctccgttatcaggtgaattttggttgctaccgtatgtctgtagaccatagctcatatcaaactgctgagtgcgtgttttagtgccatggatttcttttgctctaataaatcaggactaagatgacttgcacg

SEQ ID NO: 3946 - DNA, 828 bp, Avena sativa
caaggtactgaccatgctgccgagtcatctgcacaagggaacggtcatggttggcagtggctcaaagatccccggcttgatattcttggctacagaggaatctttccagctgatacaataccaccacttgttgagtcggacaaagaagcagatgaacgccattatcaactttggcggatagagaacggtgttgcagagggctcaactgagataccaaaaggtgaagcaattccactcgagtacaactttgcaggcctgaatgctatttcatttgaaaagggctgctatattggccaggagcttatcgcacggacgcaccaccgcggtaccattagaaagcgcctgctacccttgaagtttgtagatgaaaacgataaagaactcgagcaagctgttgctccaggctctgatgtcgtggacgtggtttccggtaagaaagtcggtacagtaagcaccgctctcggcagccatggaatgggcctgttgcgactcgaagaagcactgaagcgaaactcatcccttgccatcagcgaaaacagggatgtgagggtcaaggcgattaaaccagactggtggccggctgagtggacacaggtcctacaacagaagagtgcagtcgcttgatccttccaacgttccagtacctgatccaaaacttccagtgaagcgaagttctttggagtttatagaggcactgttagggaagtagttccagacagttcagcaaagatacctggccggctgggcatgttctgtggtgtatcagttgctagacctaatttcttctccactcccatcacatgtactgtatcagttatagatcatgaa

SEQ ID NO: 3947 - DNA, 778 bp, Avena sativa
cgattcttaaaaaagaaaaggaggaacaagagaaagctgacaaagaatttgaagacctggaaaactgggataatgtcgggtcttttagtaaacctattgaagactctgaacttatgttaatcaataaaatcaagaaacaggtcaagaaatcaacctcaaaaggtgtctccagccaaagcagttttacaaccggtaccagtgttcatgttctggctgggccttttgcaggcttcactggctctctcctagaagcgaatcgaaaaactaagaaggttactgtgcagatgacactttttggcaaggagagctttgtagatctagattttgatcaaattgaggcagtcaatacttaacggcatcacaggcatcttgtgtctgtgtaccacacagttttataagttgcctcctggcggtatatgaacaaacagttcagtgcgtggatatgttgaagatcacctgattgagtgaccaacacaccgagatggctagtgcgcgagctacagtaaacattaaccagtgctttgcagtgcgggttcatgaatcaggattggatttactgaaccagggatatctccgatttccacttagttgatcatattccacatagacatagttttatcatatacagtgttcatgtttgtttttccctcttctaatagaaaaggcagtgctcctgccggttgctccaaaaaaaatgtttatcatatagaaagcaatgttccaacattttgtattcttgtagcaccataggctattcatttcataattatgatctggt

SEQ ID NO: 3948 - DNA, 834 bp, Avena sativa
gtccgaagcctgcacacggcgagcgctgtcgatgctgtgggtggtgtgcaggatggtgcctgaagagtctgcaccagctgccctggaggttggtctggctgccaagcttctcctggttatccaaagtgggtgcgggccggagctgaagcagcaagcgtcggaattgctcaagctctgcaccatgaattgcacatccaccatgttcctcgcaaagtgcaagctcacaaagacaatccaatgagaagggacagaaattgcagttgttctgtttgtgattcgattcggttcgatgatgcaatctccatcggccagccttgcctaatctggatcaagcaatggatgggatttggccaattggtggatgaagacctatgtaaatattcttgcaattagccgaacttgctgtgtcatctgaaaacacaagaagagtgggtgaatggatggcctgccatcgacaggaaagcttggagcgacaatgcagcagcatcagcacggcccgagttggtggctagccggcggatgtacatgcgaattggtgtgaaatttggtgtcagctcaataagcactcaaagaatgggggttgtggtaagtacagccagttttgctataagtagtagctgaggaattaagcaaaaaccctgcaattttaggttcttggcaatgtgggtctgtagttcttcctttttttctgggtttcgggtgtaattgatgatataaatcaggtagaattgtatacactgctgttgcttcagaactactagtgtgcacattgccacatcgccatagctagggaaaagttttgaattcttcctgcatcttgattattggattctc

SEQ ID NO: 3949 - DNA, 711 bp, Avena sativa
ggaggctggtggagctcaccttctacaaaccgccaaagttcatgccgtcctgcttcatcagggattacatcacggttatgtgcactgaaaatgtaaaagagaagactgagttgttatatgccttgatcagtggtaggaagctctcggaccttcctaaaattaaccagcaaaccttgataatttggggagagcaggacagagtatttccgttagaacttggcctacggctgcaaagacatttgggagatacatcggaattaattgtcgtcaagaacgctggtcatgccataaaccgtgaaaagccagcagagctttgcagacttataaagaactacatcattgatccctcggttaaatatagggatggtcacaagggatgttggaagtttgtgttaagaagatttgctgggtccagcctgaagaagatggactcgagccgaccgctgatatgatgcatatgtatgctgatttatatacagtatatcatgtaagaaatgtcaactctctgatacacatctatctcatcattggttactggtaagtcttaccaacgcagagttcacagtgtgaattgtgtcagaatgctagtcacaatataggaaaagtaagggcataagaaaaaaaacctaaggaccaaggccagctatgtttggcactgaccttcacacatatttgaattcaactagtcgaaatatttggtacctggactta

SEQ ID NO: 3950 - DNA, 751 bp, Avena sativa
ccgttacacgagttcgtgaacgtgttgcttgtttgtgggcgtttgcaggcccctgtgacgccaaacaagcagatagagaagatggtggaggaggccggcaggcttgccaaggtcttctgcgacaggaactggccggtcttcgcgttcctcgacacccactacccggacaagcccgagccgccttttcggccgcactgcatcatcggctccggcgaagagaatttcgttccagctctggagtggctggaagatgatccgaatgtgaccatcaggaggaaggactgcatcgacggttatcttgcctcctttgagaaggacgggtccaatgtttttagcgattgggttgcaaagtttcagatacagaccgttctggtcgtaggaatatgcacggactactgcgttttggacttcgcgagctcgacgttggctgccagaaatattggccgagtgccgccgttggaagatgttgtcatctattccgaggggtgtgctacgtttgacctacctgttgaagtagccatgaatatcaaaggagctttggctcatccacaggatcttatgcatcacatgggactttacatggccaaatcaaggggtgcgaagatagttgatagaattattcttgaatagtcaagactggatcattcatccaagtctgactatattgttgtccttcagtccttctgtttattggtctgatgtgcaataatagatgttgtacactgttcttggcgctactcatggttacgtg

SEQ ID NO: 3951 - DNA, 847 bp, Avena sativa
tgctgctcttgcagttgcttttgattttacagacatggattctggagcaagcaaaatacagtaaggatgctatttcacagtactaccggttcatctggaacctcttctacgctgagtatatcttcttcccgttaatatagaggtgtggcgtctgacctgggctgcatgatcggagcaacagaaaacatgaatctgttggaagttggaagaacagaaggttgttttgggcctatgaagcgtaagcatttttgtacatatttattgactggtagggggaagtagagcagcagccgtgctacggtgatgttggagatgccatgggggagtttccggtggagcttggcgtttgaaagcccgtggatggagcatgtcaggttttcatggttgtttccgccaaagaaataggaaagtcagttccaagtgatttcggtgcaagggaagcgtgagtctgacccaggttcaaaacagagtcggtttttgtttgactagtctctgccaattctgtataaattccagtcagtctggaagagaactgcaagtctaagattcgctgaggaaatgaaatggtgacccctagtttgaagtccatggaagcttcttagcctccagccacaaaacagctgagcggctaaggcttcttaaatggacccacccctctgaaagcagagcagaccgatgctggtgtgctcaaatcagactgcattatatcatctgtttgctgccttaggctgcatatatcctatatgtgttgatctcctattcccagaatccatccttgtgaagtgtgaactgtacctcctattgcaaatattgcacgctgttctatatcgcaagaatttcgacttgc

SEQ ID NO: 3952 - DNA, 552 bp, Avena sativa
agtagcaaggaagatggcgtggtgactcgtggtggcaaaagatatatgaagctgcggcgccatgtcatgaccatctgtctcgagaaaatgctcgcaattaagtttgttactatgaagggctgtcgtcagtgtggtcgtgctacccggaatgctactagtggtggtcgtgctacccggaatgctactagtgaacgaatagagacattcaccccgcagcgccgtagcgaggagaaagcaaaaataagttttggtgctggtaagtttgagttgaagtttgtctggtccttgatggacatatcaggccgtgataaatattaggatgctcgggcatgatatttatatatctatttggtgcctgcatcagcgtcgtatgggctaacattatgtttgcatctgtactctcaaaatgtcaagttttctgctacttgtaacaatggaagcctagtttattattatttgaagcacattagcaatctgggtaatatatggttttgtcagaatgtttctgccactcagctggagtaacccttttgtacatgtgctcatcctagg

SEQ ID NO: 3953 - DNA, 652 bp, Avena sativa
gatacatgacgaaaaatctggtggagatatctatctggcattcaatgcccatgactattttgtggatgctgtaattcccccagcacctcatcttaaacgctggaaccgtgtggtggatactaacctggaatcaccaaatgatattgtaccggaaggggcgccgtttactggatcagggtacaggattgctccgtactcttccatcctgctcaaagcaaccccatagattggattagagtagtcagtcaagcatcagaataatgtcagcctcgctcattttggtgagctgttggctgatctcactttccgagattttgacaaacttcgagctgggagtcgggcgcatctctgtgaaaatcgaccggcggggagctagtggcaactggtacataaggctttgtctaataataacacacgcagatgacacttttctttccacaaataagaagcatgaagagcatgtagactgaagttgctagccatttagttgggacaggaacctagtccatagacctgtgaattgtctaccaagctcttgtttctacaataatgtggcatggaaatgccatccttcacaactttatttgtgtttttgtggcacaacaaacagtcccataatggaacatatgagggattcatggctactggaaaa

SEQ ID NO: 3954 - DNA, 802 bp, Avena sativa
tgatgaggatggtgaatcttggcccagctcctggcagtgcagtgttcaactttgttatcacggggttgtctaaagagggagaaatggatgaagcaaagggtttgataagagtgatggagagccgtggactgcgccctgatatttatacatacagtgtgatcatgagtggctacactaaaggaggcatgattgatgaagcccattcactactccgcgaagccaagaagatccacccaaaactaagcagggtctcgtatcacatactaattcgtggttactgcaagatggagcagttcgagaaggccctggaatgcctgaaggagatgaaggaagatggattgctgccaaatatggatgagtataacaaacttatccagtcattatgtctcaaggctatggactggagaacagctgagaagctcctggaggaaatggagggtagtggattacgccttaagggtatcacgcgcagcctcgtagtagcagtcaaggaattagaaatggaagaggcgtcaaaagacagccaagaagcatagtttctttaggatacgcttgaaggacacaaccactaatcagttctggcgcattgcttttttgctctctgcatctctggtgaggttatgaaaacaccatcttttgtacgtctctgtttgttgtttgatccttaaataatgttgcatttatattccaaatgctggataggcaggaatgcatatttagttgtgttcaagactttctccttctgtagaactgggaatttttgcgatttttgatctaatctcctcccttgccaactagaaaa

SEQ ID NO: 3955 - DNA, 739 bp, Avena sativa
gcgatgcatcttctctcgatcgcgctactcccgaaaaggcattgcatactgcaaacctttgtctgaagcttttattgtcaagagatagcattgtgataaggagacttatattgacagcaaacacaaagtctcttgcccgggacctgatctccaaagacgcggcgattttcagggtcctcctgagtcggattctcgccgatgtcgtctgccagtggatggtgaaggtgactggactggaacgagtcaggaggccgacttcaaccgtggtgtcgtcgttgcaggcggccgtgggagaccgaagactgaaggtcatattctcaaagtttctcagggatctaagggaggagccaatactgatggtaaaggtgagctggaacgctttcgttgtctcagccgtatctgctgccattggcgcgcaccggttcgttgtcctcttgtctgaggaatacttgccgatgctgtggacgcctgcgcctgcgccgtcacgtctagttcaggtttagagtttatagaagaccaagcgagaagcaaccgggctgggtacatgtaaaagatactacttgcttgcacatcagtattaaataaagaggtgtatatagatgttgtgagtatcaccatccttttgtagccagtttctgtataattgtttaggacagacagtaggtctgtaggtgagtgacctttttgtatgattaattttccctacttatataactagttctcccaattgctcttacaa

SEQ ID NO: 3956 - DNA, 961 bp, Avena sativa
gacatcttggaggatatctatgtgagatatcctcaagtaaagctctacatgaagagcaagcaaatgaacggaattgccgatttaatcaggactgggaacggtgacaccgaaaaggaatctgtggagctgagcattgaagagtttaagaaggctctttcactcgtggattcgcaagtcaagaatctacctgcaacagctcaggttgctgcacagcaaggacaatatcttgcaaaatgctttaacaagatggagtatgctgaagaaaatcctgaaggtccaatccgcattaggggagaaggtcgacatcgcttcctccccttcaggtacaggcatttaggccagtttgccccactaggaggtgagcaaaccgctgcacagctccctggagattgggtttccattggccacagctctcagtggctctggtactcagtctacgcaaccaaacaaataagctggcgcacgagggcgctggtgatatctgactggggccgtcgcttcatcttcggtagagactcgagcggcatatagtcaaaggatgataagattttgtttgtgaaattttcagaagctaaaggcagtagtggtacctcccacctaagtctggttattgcagatgcatatattcttcttttttttgtcaggggaaagaataaaagtaaccctgcacttccctagtgctccacagagaaaattcctatgtagaagtaccttttactgctgagagttttacttgtgcggcatacgcaaactcgcggattaatttcagttccttttaccacaatgatcagcagaaggaccactttgtcctgattttgtttccagaatccctgtttatgtaaagatctggttttgtgacgtggaatcagaaaccagatgttcttctgtgaaatcatgtttatgtgaagtatgtatgtggcgagcagtcctttttttctcccaatgttcagaagctctgtta

SEQ ID NO: 3957 - DNA, 621 bp, Avena sativa
ggaagaggatggggaagatgcttcaaatggaagtggtgatgtgtgggacgagtcacttgaagctccattttgaattatgactcacaccctaattggttggatatggatgacattagttgggaagaagtgtaaaggttttggcgagcctgtggaggtcattgcggctccagcagtttcagtaacaccaaagactacttatgagttttactgtgcaggtctgattcgattttatcagttcagttgtgcaaacatttttgcttggaagaatgggaagttagtgtgagggtgtcctgcatactgacaaggcaacaacatcagcaagcctcaaacgataccgaagtgtgggtggggggatgttagtgatccacctttttctcttcgtgttctgattgttactttagggagggatgtcggtttattcaattgctgtgctcaaattttggagctgaactgtcaatgtttactgtttggctgccattttctttgttaatttgtggatgtgcaagccagcaaaattccatcagtaactttgatcatggcatgtaactttctggttctgctttctgtttagtccactacgttgttttggtgtgaaaaaaaaaaaaaagttaaattaatcgc

SEQ ID NO: 3958 - DNA, 567 bp, Avena sativa
gtcatatttcgttggtgggaggaactatgtaatgggttgcgctgtgtgggatgagatgcatcggaaggggatttgtcctgatgtgaacttgtacacagtgttcattaatggtcatatacgacatggcagacctgaggaagcatgtaagtttatcgaagagatgattaaaaaagggatggaggctccacagatagactacaataaatttgccgcagatttctccaaggctgggaagccggacatattgtttgaattggctcagaaggtgaggtttacagggaaagttgatgaatctaatgtgttccatcagtggggagagagaatgagaagtcgggtcaagcagactgtcccaaatgagactaggggcaggacgttctaagattacgatgttgtttgtaacgatgcttggaacattagactgtgctcctgctatttaggaaagaggtgctatagtttctctgatgctgtatagtaacacttcattaaagattatgtctcttatttgtttgacccaacaatatgcagtcaataatggttaagtgcttcagttctagattatgtagaaaa

SEQ ID NO: 3959 - DNA, 799 bp, Avena sativa
cctacctcgcccacatgaccactccactcggcatactgcttgccaaggcattcgttgggagaggtcatctctgttctcggtgtggcggagttcgatccagtagcgcctgcggtgacgaacctcatcaaggagttgtgccgccatcctggaacgaattgctacgacctcctcagagatttcacagggaagaattactgcctgaataattcggccgtcgacgtcttcctcgactacgagccccagccgacatccaccaagaccatggtccatctcgcccagacgtaccgcgacggcgtgctgtcgaaatacgactacatgtggccgaacataaacgaggagaagtacgggcagcccgacccgccggcgtacaacatgtccaacatcccggccactttcccgctcttcctcagctacggcggccgggacgagctggccgaccccgccgacgtcggcctcctcatcggcgacctcatgggccacgaccgcgacaagatcaccgtgcagtacctggagcagttcgcgcacgcagacttcgtcataggcacctgcgcaaaggactacgtctacaacgacgtcatatccttctttaaccgcttcaactagcgacaagaaacaaggaagagcagaaaacacgaaggctatatatagttggtgcaagattatggaggtggatgtgaatatgtgattagtaagtattggagcctcctaattgtattagaggtgatcgctcaaacagcggcctctcgaataactgtgtactgtgataacgtctrtaagaaaaacgaaaatcctaacgtaa

SEQ ID NO: 3960 - DNA, 482 bp, Avena sativa
tctaggaacgcacacaaaatgtctactgaggagaagcaaaatcaaaagcaagatctgcctcgcccaccctccgcgctgtccctgtgcgaccaatcggctgagaccatgactcacctcctccaaggcgacctggcgatgaggtgctctcatggacccgatccacagcacaacccccggatggagaagacgattgcgtggactggtggctacaggcgtcaagatctacccctcgagctcttcgcaagggtactatctcgctcatcgtgtggacggcgtggtggatttagaagctgaggaatgcagtggtgttcgacgatgcggaacctaacctgggtggtcttctggatacaattcggtctgaggctagggcttgggctggtgctggagcgattgggctacgtgtcttgatccccgcggttccgtagatctagtggatagagttgtatgaggtgttggctctcaatgagcctttgtatatatta

SEQ ID NO: 3961 - DNA, 465 bp, Avena sativa
gtttctggtgttataaattctctgtattccttctactgggatataaagcgcgattgggatttgagcatattaaccaggatattcatgttcaaaagcccaagtacatggacaaatcttctttatgggcggagctgggtgtattactggttgttaggcagcaatctcgttctccgctgtacatggacatacaagctgtcatcacatcttcggcacaactacatcacagtgttcacaataacagctctggaaatggtgaggcggtttcagtgggtctttttccgtgtcgagaatgagtggaacaagatgacagccaagcaaaattttgaaatgtcgtctgatatgccttcagaagcggacaggctactggagtctaatagtcacacggtatgaatagcttgagaatcrtgtagtttgtgactctctattcatcatattcttttcacgtgaccctttacaggcttagag

SEQ ID NO: 3962 - DNA, 716 bp, Avena sativa
catatctgctgagcttgaaatccatgttgtatattttgaggcggcctcctatgcactttgaggattttgtgaagaaccacttctgcaagcgtggccactacattctcaaagcttgtgaggcctaccttcaaggagatgtggttggcacgctcaacgacgatgcctgctctactgagaggaacaaagagtactcttgctccatgggtttcaagcttgcattagggaaaatattgccacggttgatcacagccttgaaggacatgggagcagactgcagccagtacgagcacctggggaaacagaagctgggaaacagaactgttcaagaagctgaacactcagccgagtttgtattcaaatcttcttttggcttcagaaacatgataaaacttcacccctactgttttcatatagtgtacattcaacatttgttgtttctatcttaacatttggaaaatgtggttccaaatgaatcctgtctcttccaaactgtggaatagaggtgtgccctgcgcagtttatgtttttgttaagcttgtggggctatacaagggctagttagcatgcaagattggatcaagcctagaaatgctagaatagagatgcaatgcaaagccaactaatcgatggtgttccttgcctctgcctggccatgtgaacctgagaacttgataactagatggacatgctctccttttatacccttgtgaagttac

SEQ ID NO: 3963 - DNA, 737 bp, Avena sativa
gattatagatcattcggctacttacaacatatttctgtctctctagtgtgtagtgtagtaacttgttccagtccacaccacaattgcccgctattaatctcaacgaacaaaaaagaccaatggtggatcgcgagttaacaaccacattagacctgctgtgataacatgcttttcaagtcacagctgggaagaacacacagaaaatataaattcagatggtacgtcatgcctgatgaggggagctgctaagcacaaccatgtaacaaaagcaagatacaacagaatccgactccaaatgatagtcggggaagctgagattccctggattaggtactcaaagaatcttgctacattagaaattaaagctggactacgacacgatgagtttttgcttcagataacatgtaaacactgccaaccacacatgaccaacgcgacaaactaagtgagaactgcagcagccatcccttcacctgtttaaccattttagcacattagcacatcaaaccagattgtcattctatctgcaacattgcagctccaaatcgaccagcaatggctgcacctggtgtaaagaaactcttgaaaggaaaacagcgatttccggtagaatggatttcgttaagtttcttggactgcatggatttgatttgaaccatgtagacacttccatcataacatagaaatacagcatcatcctcatcgtaccccagcagctgtacactcatttcatcatc

SEQ ID NO: 3964 - DNA, 654 bp, Avena sativa
gatgatgatgcactggttggagaagctgcagacaatctccaagcttacttcagaacagtattcaaaaaggttactgaggctgatattgaagattttgaagcaaagtacagagggtcagattctgagaaaaaggatttgaaggacctctataccaaatttaagggcaagatgaacagacttttctgttcaatgatttgttcagatgccaagcttgattcccaccgctttaaagatataattgaccaggccattgctgaaggcgagctgaagtccacaaaggcgtatgagaaatgggctaaaaagatctctgagatagagccacccacaaatccattagagaggagagtgaagaaaaagaaaagccaggagagcgatctcatgttggcaatctcgcagcgcagggagcagaggaaggggcaatttgactcgttggtctcatccataatgtccaagtgcgagtccaaggcgtccaaggcaagcagctcggagcccacggaggaagagttcgaacgtgctaggcagaggctggagaagaaacgttcgaaagggcgcaaatgatactgctcttggagtgcaggtcagtctttgccatctggctgatgtcggtggttatgcttggaatttgtccttgttgaagaaaactggaagtaggag

SEQ ID NO: 3965 - DNA, 893 bp, Avena sativa
gaaaatttgaagcaagacaagctgaggctgacagaagagaaggatgggctggaaatacacagccaaaagctggctgaagaatcatactatgctaaagaattggcagctgcagctgcagttgaactaaaaaatttaggctgaagaagtcaccaggctttcttatgaaaatgcaaagctggttgcagacttaactgcagcaaaagagcttactgcatcggttacaaggggcagcatccacaatgacacgaaacgccgtgatcacgaaaatggaattttagttgaagagatgcagaaagagttggttgcaagttgtgagagggaggctgccttagaggacacattatcccaaaagtcccggcgagaaaatgagcttttgaagataattgatgatgggaagtgccatgagcacgatttggaaaatgagctggcaaacatgtgggcccttgtttcgaagatgaagaaacaaaactctcaggatgatttgtttgaattcaagtcaaaggaaaatggcttccattcagcgaagaatgatgctggcagaaccctaagcgaaatggaagcttcagataattggaaatatgatggcgtcagtactctagaagaagcaaaagctgcgtacagttttgaaagaaggcgctgcaaagagttggaaaacgcaatgtctagattgaagggcgaaaacatcagaggcttagaggttaaagtccttgaagagctacaaaattttcatgtggaagcactgtcaaggatttgccaagaaaagatggcaaaacagatgctatagcaggcccttttcaagtctagaggctgcttccatgtctcgtcatgtttgtcggctgctgtttattcacaccatattgttgcttacagccgaagcaatgctgatcctaatg

SEQ ID NO: 3966 - DNA, 856 bp, Avena sativa
ggaccctgggggagaactataacgagagagttttgccttcaatcattcatgaaacactcaaagctgtggttgcacaatacaatgccagtcagcttatcacacagagagaggctgtgagcagggagatcaggaagattctgacagacagggccaagaatttcaacattgctcttgatgatgtgtccattaccagcctcagctttggtaaagagttcactcatgccattgaagccaaacaggttgctgcgcaggaagctgagcgtgccaagttcattgttgagaaggctgagcaagacaagaaaagtgcaattatcagggcacagggtgaggctaagagtgcagagctgataggccaggccatcgccaacaaccctgctttcgtcgcactcaggcagattgaagctgccagggagatcgcccataccatctcaagctcccacaacaaggtgttcctggactcgagcgacctgctgcttgggctccagcagctcaacatcgctggcaagggaaagaaatgagaccattaacttgccattcatgtcgtggttaccgtcggtcggttggtttgtctccatggaagaagactactttttgtgaggaacgaacactgtagtttctgttaatggttctatctgggtctaggattcgtgcgcaggtaacaagaaagggccgtcataatggacgcagatttttcttttgcaatttgcaattgaaacttgtcagctactcactgcttttcctgtgcgagaagcactgggagaagtttttaatacgaatgttggcttagcttatatatctactctccggtatcagtttcttgtagttggtgcctagtagtactagctctgtctgtcat

SEQ ID NO: 3967 - DNA, 645 bp, Avena sativa
cgatctgagcaggaggagaaacatgagcgccatggtcgcgtcgtcgtcgctgaacccggacgcgccgctcttcgtcccggcggcgttcaggcaggtggaggacttctccccgcagtggtgggacctcgtcaagtccactgcctggttccgcgaccactggtacaacgagcgccagcagctcgacgacatggccgactcgctcctcgccttcgaggccgagcaagacctcgcaggcctcctccccgacgccatcgacgacgaagccgacctcttctacgagaacaacacctccaccgtcggggccgcgcagccacctgtgtctctcaagactggtacgaacccaacccactatcctctactactagtattagtttccccgtcaaatttgagagctcaaataaagctcattcccatgtctctgttcctgtctgtgcagatgcagtgctcaaggcgctggtgtctccgaagggaggcgacaacgtcaaggtcttcccggagaagcccaggtactctgagaaggccaccaagtacgccggcagcccgagaagccttggtggcgctgcctccccgcttcatccaccagcctcgctaggctgtgaccacaagtcttttcttcaagaaaccagcgaatgctcctgcgccgtc

SEQ ID NO: 3968 - DNA, 641 bp, Avena sativa
ggcgaccatgctggtgccgcgcgagaccatacgggacatccaggtcggtggctacgacgtgccggcaaagacacggatctacgtcaacgcatgggcgatcggcagggacccggcaaactggcctgacgacccggaggagttcaaccctgataggttcgaggcgagcgacatagacttgaaaggggagcaccctcagctgctgcccttcggcacggggcggcggatctgcccgggcatctccatgggcctagccacggtcgagttcacgctcgccaatctgctctgctacttccagtggacacttcccgaagggatgctaccggaggacgtgagcatggaggagcaaggaaaaatcaacttccatcgcaagacgccgcttctactcgtgcccaccgcataccgttgcccataacacctcgttaccgcactttgctttgaagtctttatattcgcatttgtgatccgtggtaataggttttcgccccataggggatgttccatggtgaacatctttcagtgggtttcctgttattgcaccaactcgtttcttgttttctttcccttatccctctatttgtaacaaggctatatatttccgttgcttaatggaaaggggtgtgaagctcgtttggaaaaaaaaa

SEQ ID NO: 3969 - DNA, 600 bp, Avena sativa
aaagctgtgaagctacagagcctgatcacatggtaattgtgaaagaggaggaacgcaggaaagcaggcctacttggccgacctccttccatacttgaggcccacgacttgaaccaggcatgctggcagccgaatgttccggtttcatcatctccaaaatcggaccgtgacaatacagaaacgagcatccgtgggtttaaccttaatgaagagtcatgtccaatggattctgaaaagacagatgcaacaatcaagccacactttactgatcgatggtcaacagagccgaaggtgctttcatctcctcccagtaggcagcctgcaccatggcagcctaagcaaccggcaccagcagctggttcatcgtatcctagaggtcgtgagttgccgttggggctgggcatggaccttctggctgcacgtgggaaaaggagtgctggggatggtggcgatggccgtgataaagagggcaagtgaaggttgcagctgcatatgtttgtaatgaaattagaagagatcagttctgtaaatatagatgtttatctctgggtccagattaatttgacaactccgtcttactctctctgtttaaaatataaga

SEQ ID NO: 3970 - DNA, 766 bp, Avena sativa
ccagcgtctgaccaaatggaagaccaggctgctgctgcacgacacattgactttctacttggatggtacctggacccaatatactttgggattacccagaaagcatgcgcaagagattgggcgaccgtcttcctaaattctcagagaaagatcgtgaatttatcaggaacaaaattgatttcattggattaaatcactatacatcaaaattcattgctaatcaaccaaacccgcgaccaaaagagatccattttttccaagctcggcaaattgagacaatggaaaaacggagtagcggtgaaagaattggtgaaagagctgcgtctgagtggcttcttatagttccttggggtattcggaaaacgattaattatatagctaagaaatatgacaatccaataatatatataacagagaatggcatggacgacgaagacgatccatcagcaacagttgatcagttcttaaatgatacaaagagggttggtttcttcaaaggatatgttggtgcagttgcagaagcaataaaggacggtgccgatgttcgtggatactttgcatggtcattcttggacaactttgagtgggcgcagggattcaccaagaggtttgggatcgtctacgtcgattacaagaacgggctctcccgacaccctaaagcgtcagccaagtggttctcacgcttcctgaacggcgaggctgctgctgacagtaaacctgagacaaactaagcgccgccttcaccaaggtgctaaagaatcatact

SEQ ID NO: 3971 - DNA, 439 bp, Avena sativa
  modified_base (2)..(2): a, c, t, g, unknown or other
tnttttttttttttttttttgtaccattcaaaagccaatcgatgagaaagtggtctagtttttggagggcacacacatctaggttcggaagagcacatcccaaaaaagaatacaaataacattcaggaaaatacattagttgttgagcgcacattgatgcccagacagtgaatactgctcaacattctgtggttacagtgttttaagaccgacccacacacgagatccataagcaaaacaggtgatgcttgggagacaacagttttacccatcccgagtcttagcatccagctcaaaacggttggttacaccttaggctttcagcaccgccttgtggatcatcgtctccttgtgtatttggtggcagctcttctcgacaggtcaagaagcttctcgaggttcgatgcccacgagttgacgtaccccgttgctgtcctgg

SEQ ID NO: 3972 - DNA, 1249 bp, Avena sativa
gcgtcgtcatggtaacgtcgctcgccgcggggaggcggtggatgggggaggagatggaggcaccggtcgtgggctctgcatcgaggaccttctggactgcctgttcggcgtgctccgcgcgcttggcatcccgtgggccgcgcgcccgcaggggcagccaagcacgttgctgccacgctgtgccatcccggcggcggcggacagtcggagcttggcggcggagctgcggcagatccctgggcggatcgccggcaacggcgcctgcgctgtcgcatcgctctatacgatgcagggcaaaaagggcgtcaatcaggacgcgatgatcgtctgggagaacttctgttcaagagatgataccattttttgtggcgtgtttgatggtcatggaccttatggccatttggttgctaagagagtgagagatcttctgcctgtaaaacttggtgcggatttggagaaagataagggcagagagacacatactagcaacatgaaaaacaacacaaatgaagtaagcttgcctctaaaccctgagacaacagaaactaccacttccgctagagctgagcagaatgcagagcacccagagatattcacaacattcaggacttctttcttgcgggcctttcacataatggacagggatctgaaattacacaagaatattgattgctttttcagtggaactacagcagtggcagtgctcaaacaggggcacaatctaataataggcaacttgggggactcaagagctgtcttatgcactcgaaatgaaaatgatcagctcattgctgtccaattgacagttgatctcaaacctaacattccaagcgaagcacaacgtatcaggcaacgcagggggagaatatttgcacttcctgaggagccagaggttgctcgtgtttggcttcctaagtataactcacctggattggccatggcaagggcatttggggacttctgtctgaaggagtatggtctaatttctatgcctgaagtctcatgtcaccgtatcacagaaaaggatgaatttattgtgttggcgaccgatggggtgtgggatgttctttcaaacaccgaagttgttagcatcatcagcagagccacttctcgggcttctgcagcacgcttcctagttgaatcagctaatcgtgcctggcgtactaggtaccctacttctaaaattgatgactgcgctgttgtctgtctcttcctgaatacacaggaagcaaataaaacatccagttcg

SEQ ID NO: 3973 - DNA, 974 bp, Avena sativa
tgttgatgtcgatgaagttcttggaagcttcttgctgccctcaacagatttattgcggagcgttactcatggaatcactcggtgtcagaataccatgtgtatgagttctttaagatatggaactgttctcgagaaaaagctaattttcttgtccacgagttcttttacaaccccattacttccaagatggtatacatcctatccccaggcgctcgagatgctctccaaaatctttcttctttctgtagccttatctgtagtaacatctcggcaggatgcaataaaaccacacattagagtggatagagaagttttatccaggtttatttgagcagatccatttcggaaaccattttgctttggaaggtcaatcaaggccaaaatcagagatttgcagatcgtttggtgctcaggttttaatagacgacaacccgagatatgctctagaatgcgctgaggatggcatgagggtcctgctgtttgattacgacaactcgtatccctggtgcaaaactggcgtggaccaatcacatccgctggtgaccaaggttcataactggcaagaagtcgaggagaagcttctttcttgggtagcacctgagagctgacattctttgtgaggtgtgatcagcagaactgtgatcagcagataatagcacagtttctgaagcaacatgctgggtcactccctcaacagctcaatacatgagcatgtgaaagggtaaagtagaatactccatttgttccgtgagaggatgacgagtgagcatcgcctcacttgtaaaatgctgggtataggcatgaaaggtaatgagaccgagcctagtgcgctcttcgatgattcaagatcagcacatgctcacgagttgaagattcaaattctccccatagtatgctatatgcgtccgttggatcgaagagttcatatgaatatatatctgatacacataatcttatgaattggatgctatgtc

SEQ ID NO: 3974 - DNA, 925 bp, Avena sativa
tcctggcctacttccacggcggcggcttctgcatcggctccggccgctggccttgcttccacgcctggtgcctccgcctcgcctcggagctccccgccgtcgtgctctccttcgactaccgcctcgcgccggagcaccgtctccccgcggcgcaggaggacggcgccaaggccatgtcctggctccgctcgaccgccgcctcggacccctggctcgccagcgccgtcgacttgtcccgcgtgttcgtcgccggcgactcggccggcggaaatatcacccatcacgtcgcggccaggttcggcaagacgggcctcggcccgacggtccggcttcgcgggtacgtcctcctcatgccagccatggccggtgagacccgcacgcgcgccgagctggagtgcctgcccgacgcctttctaaccaccgagatgagcgacatgtacgcccggctcatcctccccgacggcgcgacgagggactacccagcgatcaaccctgctgggccagaggccccggggctggaggccgtggcgatgggccccatgctcgtcgtcgcggccgagcacgacatcctccgtgaccggaacgcgcactacgtcaagcggatgaaggaggagtgggggaaggaagtggagctcgtggagttcgccgacgaacagcacgatttcttcgcggtggacccttggtcggagcacaccgacgagctcgtacgcctcgtcaggaagttcgtggtcgaccacatggacacggagtagccgaccggagtgattcgatttgctggctcaatagtcttttcttaacgtgcttggtcaataatggcgacgccatctggatgcatgtgcttctactaggtgggatgccagttgttaaactttcttttccggatggaatttttttctttttttcgctttatgtaaaggctgactct

SEQ ID NO: 3975 - DNA, 975 bp, Avena sativa
tttttttccattcaaaccaagaacatacattgatatagatatcttgtatattgagcatagcaaaaggttaatcataacaaaaaaaaaaaaattaccctgttacacatgttcttgcaagtacatttgctacagggattgcagaactttatcactacttgatgctttgtaatgtcaaactactgcactcttccgctcattctagtatatgcttgtatacatctgtcaacaaaacggaactaccttaaatttgctttctatatatgaatgtatgagtaagactatagggtacagatcattccagaaaaaagaatgatcaggtctgtccctgctcctatgatgttagtcctgtaacttcccttgggatcagaaacaaaaacccgatcggtaagagagtgccaatcagctgaacagtcaagccaaggcccagattatcaaactgtactgatgagatgttcaaagctgatgtcaatgcagctcccaggaatgaacctaatgtcgaactgaggttgttaatggacatgaatagagcgaacagtgtgccctcgattccaggtgggcaaagctgtcctgagaggattaggaatggcatcatcttgaattggttgattgcatcggccaaagcagaaccccacagcaccatgtatttgtctgcaattccatactggctatgtaatcctgacaccaacaaaatgtccagtacggtaattatggcaaggccaacatgtgcaaacattagaatattcctgagtttcttatgctttaagtagcggttgtagatatatgtgccaagcattagactgaaccacccgattacacgtgcagtccctagaaaggatgcctccagatgtagaacctccgtttgataatagaacatgactgttgagatatttggcattgctgcattcgaaatagaaaaaccatgccatgggtcgacaaaatggttggctgcttaaaagctgtgcataaactgaagaa

SEQ ID NO: 3976 - DNA, 1128 bp, Avena sativa
tgtgggcatcggtggtgcttccatcaaacagggcttgagcaactttgcagccacacattcaataacaaatgataatggtactatgtacaagagcccaatacgtaggtctctgacaacagaaactgatagatatggtaggtatgatccaagtgaaattcaaggtgagagccgtgccacatctggtgcttcaaagaatgcgagttctggttcttggggtgcaagtccgtcaagttcagcatcggttggcgatactggctcaagtcaatcaggagttaagactcgtgaggagagacttttggagacaatagttactgcaagcggcgttcggttgcaaccaactcgagatgctctgcagatatttctaacagaagcctccaaattggatgcagttgctttgagccgtgcccttgagaacaaactcaattctccattgtggcaggttcgcatgaaggctatctgtgtactggaagccgttgtaaggaaacaggataccgacccttattctgttgttgcttcatatttcagtgagaacagtgcttctgttgtcagatgttgtgaactgcctcaagtttctctcagggaaaaggcttcaaaagtattaaatctgctggttggggaacaacctactggaaacaaacatctttcagaatcaaaaactacactaccaactgttcagatgcccgacttgattgatacgggggatcaggatgatctaggaactcagagttcagctcaagaaatcagtgagcagataatagggaatagcacacatgtttcttcagttgatgatttgcttggcggggaacctattggtaatatcagtgtgactagcaatagtaatggaagtgatccatttgcggatgtatcattccatgaggaagaggttaaggagacaaatgacctattctcaggaatgacagtagaggaaaaatccccagcatttgtgcatgataactctgtgatggacaaaattgaaatgccagatatatttggcagcagccctgagccattgttccaagaaagagttgatgataaaggaactgtcgacgacctaatggctggtttgaaccttaatggcactgcccaagctcagccaggactaaaagcagagactaatagtaatctcag

SEQ ID NO: 3977 - DNA, 990 bp, Avena sativa
ttgcacacgttgctcacgagtgccttcagccatacagacacaggttatctcttcagcaatatgcttggtctctacttcttcggttcaagcatttccagcatgtttggtccttcttttctgttgaatttgtacgtagctggagcgcttgttggatccacattcttcttgatagaaaaggcttttagagctccacggaaacaggtttatttagggtgggagagttcaagacagtccgggcttggtgcaagtggtgcagttaatgccattatgcttcttcagatttttctcaatccaaagggactaatctatctttacttcgtccttcctgttccagctgccttagtgggggctgcttggattggtcttgatttgttgagggtcaacaaggggcagggtcagacaacagcttctactcatttaggaggtgccgtagtggctgcccttgggtgggctcgaattaggaagggttggatctgaggagcaattcggaccggcctccccccagcagctggtggcctatccggctgagattggtcgacaaagttacgtcttggtagagagataactctgccacttgtcatccaagtttctgatctccaagtcatcaaacaaattctagatagcatcatgggcgatattgcgaacttgttggctgaaatttacatacttattctttctggggtcatccttaaacatggcacaactagattagcaatatcagttgctatagtgccactacttcagtaggccaaatttgagtgcaaatgagactaggcaacctgtgccatccggaagtaggaaaagtcaggacgtcgagggaatgaagatgtgatggctaatattcatggatatctgagatcatccttggttcctgtcatcgccacttgattggtccaatatgacgatccaagtcggtgactgtatctagattccttttagtgtttaggttcgttgtaggtttaggtatgaacctatcaatagaatgtgtct

SEQ ID NO: 3978 - DNA, 988 bp, Avena sativa
  modified_base (92)..(92): a, c, t, g, unknown or other
cgtacccgacgatactcgcccgaccgggctgggttgcgccgagatccatccatccatccggagccgattgatttctgctcctgaaagatganaaacctttttaagatcaagggacagaggaaggaggaggcggcaaactcaaacggaggccctcctgttaagaagcaaagtccaggggaattacgtctccataaagatattgctgagcttaaccttccaaagacaacgaaaatttccttcccaaatggaaaggatgatctcatgaacttcgaagctactctacgacctgatgaaggatactatttaggtggggcatttactttcaccttccaagtatctgcttcataccctcatgaggctccgaaggtcaagtgcaagactaaggtttatcatcctaatattgacctagaaggaaatgtgtgcctgaacattctgcgtgaagactggaagcctgtcttgaatatcaacaccataatatatggtctaaaccttcttttctctcaacccaatgacgaagatcccttgaaccacgaagccgcggctgtcctccgagacaacccacaaaagttccagagaaatgttcagatggcgatgtcgggaggttatgttgataacacccatttcccaaggtgcaagtaatgcttgctaggtgcatccagcttactgcctgcccacccacctagtacccccctgctgaaccatgtggcatacataatagccaggagaaattgtatcactgtcgtgtcagatgtgactgttatcatgctttgtttggtgggatgtactggaatcatatgtaagttgaagcaaaacatggtgacattaagcagcaaaaactcgcctgtattgagctgaaaagtcggctacgcagcaaccctaagtcaagcaccgaattatctttctgctaahtattgcgtttcttatctatcwwwtgtggtgagaaaaaaagtagccctcccagcctaccagcttgtggtttgtctagttg

SEQ ID NO: 3979 - DNA, 1131 bp, Avena sativa
ccgggatgagaatgcttctggcgcttgtgcacagcttgtctttgcacctatcgatgaatcttttgctgatgacgcaccgctgctgccctcgggcttccgtgtgataccactggacacgaaaacggacttgccatctgccacacgcacgcttgaccttgcgtcttcccttgaggttggatcaggtggagctctgcgtggttcaggtgacgccaccaacacgagatcggtcctgaccattgccttccagttctcattcgagaaccacctccgtgagagtgtggcagcaatggccaggcagtatgtgagggctgtgatggcatctgtgcagagggtggccatggcgatagctccatctcgccttggctcacagatcgaaatgaaacacccaccagggtctcctgaggcgcttacacttgcaagctggattggccggagctatagggctcacactggagaagagatccgctggtcagacaccgaacaagcagattctcccctgaagctcctgtggaaccacagcgatgccatactctgctgttctctgaagcctgctcccatgttcacctttggcaacaacgctgccctggacatgctggagacgacgctggtgaacctgcaggacatctcgctggaggcgatcctggatgaggaagggcggaaggcactgtgtaccgagttcgccaaggtcatgcagcagggtttcgcgtacctgcccggtggcatgtgcaagtcgagcatggggcggcaggcgtcgtacgagcaggcggtggcttggaaggtgctgagcgacgacgtgtccggcgcccctcactgcctcgccttcatgttcgtcaactggaccttcctgtgatcgcctgtcgccaccagcatcgagatcgtcttcagtttgtgttgtgttgtactatcatgcggtgcaatcatgtatcctagctatcgatcgcttgcacctttcgcatgtgcgtggccgagagacctgatctgtatgtgtttcctgtgatgcaaaacctagttggctttcacgtgtagtgatcaagattcaagacctatgtttattatctatctactattgcaccttgtggatcttgtgattttcttatgaattgaactatcgcgtgtgctttaccaaaaaaa

SEQ ID NO: 3980 - DNA, 871 bp, Avena sativa
gcctacttcttcctcctcgacgtcgccgccttcgggctcgtcgccgtcatcaccgtctacggcatcgcccccacgcaccgggagaagttcctcggaggagtgtgcctggccttctccatggcggtcttcgtcgcgccgctctccatcatcttcaaggtgatcaagaccaagagcgtggagtacatgccggtgggcctctccttctgcctcgtcctcagctccgtcgcctggttctgctacggcttcttcacccacgaccccttcgtcatgtacccgaacgtggggggtttcttcttcagctgcgcccagatggggctctacttccgctaccgcaaccaccccagcaacgccgtgctgcccaccaccaccgacgccagcgacggcggcgccgcagtgcagcagcagcagcagcagacgcaggtgatcgagctccccgtgcacaccgtcgccattctgtccgtgggccccgtcccggtggtcggcatgcacaagatcgaggtcgtggccaccgagcagcagaccatcgtcgccaacaagtctgcggaggtcatcgagatcgctgctgccgtgtgagtgtgagtccgagacatcgacaaggaccggaacatgatggatgacatgatgctagctgacggagaacactggacaaatgatggatggggtttggttggttaaattatcgtcgtagtactactgcaggtgtgctcgtgtgtgtgggtcgattagtttaagtattatacttgttggatttgtagtagcactgtgtggtcgttgttatcaccttcaggtgtgcctctgtcggtcttcctagtagtctgcaggtttggtaaggcactaataataagacgagctactcctamttatgcatgaa

SEQ ID NO: 3981 - DNA, 1051 bp, Avena sativa
taaatatacagatgccacaaacttatgttgttcacctcgggaatagtaaagagttaacagaagttgccgaagataatgtcgcaagaagagtcctacgtgaacatatacgcgagtcccttggagttaggagtgaagatctcctatttgcaataataaacagtgtctcgcgaggaaaaggacaggacttatttcttcaagcattttatcagagtctgcaactcatccaacatcagaagttaaaaagtgcccagaatgcacgctgtagtcgtgggaagtgatatcaatgctcagacaaagtttgagacacaattacgtgaatttgtggcaaagaatgggatccaagaccgtgttcactttataaacaagaccctggcagtggcaccttatttgtctgcaattgatgtgcttgtccagaactctcaggcacgtggagaatgctttggaaggataacaatcgaagcaatggcgttcaagttgccagtattgggcacggccgctggagggaccaccgaaattgtcttggatggctcgactggccttctgcaccctgctgggaaggagggcgtcatgcctctcgcgaagaacatggtaaggcttgcgagccatgtcgaggagagggtctccatggggaacaggggctatgccagagtgaaggagaggttcatggaacaccacatggccggccgtatcgccgcggtgttgaaggaagttctgcagagatcgcggcagcattcccattcttgagctttgtcactgcccgtatccagtggcaccgttgtgttgatatatcttgccctagcatgttgatccggattttagcaaggctgaacccgaacacagagtcaactgtaaggtcgctgcttcctgtgccactcacgtctgttgttatccgtggctgttgtttgcttacctagtagtagtatcatgtaggatcggcaccatggaaatgtaaatggtactgtcacagcaacgactattccctgattctcttgttcagcttacttatactaacagaaatggattccatgcatgtgtctggaagacaaaaaaa

SEQ ID NO: 3982 - DNA, 903 bp, Avena sativa
  modified_base (210)..(210): a, c, t, g, unknown or other
  modified_base (217)..(217): a, c, t, g, unknown or other
agtaagctgggggctcacggatgtctcccctcggaggtccctgcgcccgggtggttactgtgctgccgctcgtcttcgatctggttcctgctccggccagccgtgatggcgaggggagcggaccatgtcgcggagtgagggggcttcgccctccactcctgagctactcttgcttgcgtgtgagcggcagcaggaggtcgccaggttccnccccttntcccttcttcagtggttggagttagcagaaatgggtgtgtaccttgcggctcgatttgcataaagctcgtcggcctcttcattgcgtctaaggtgctcggcgcttcttccatctttcggcctgccgtggtggtgagggacagatgggggatgggccagttgtcgaggatgaaacgaaggtcgaaggttcctgaagctgagcccgcatgttcttcttcgcagcggtcctctagtggcgataaggctgccgggccgctgaatgttctggtcgaatggcgaccctggggttcaaccaccttcggaggctcttcttcaaagctcaccgccagtgctcatcgcctcgtcgttagcaagtggtgtgtccccgcggactgcctggcggccggtggtggtgcttcttctccggttcgtggagcgtcaccagcaagagtctcatgacctcgccgttggatggaggtcgccggagatcggtggcggaggcactcgaggacccgattgctttttatgttttgtccgagggtgttgtttgcaagggagaggcccctttctgttttgtctagttttgctagaggtctttatgatgtgggcctttccatctttttaattgcagcttctctggtcctttggaccttttattgttcaaaaaaacaaaaacaccgcccactgctccccatccccatcctacac

SEQ ID NO: 3983 - DNA, 1003 bp, Avena sativa
agtcaacctgtgtgtcatagattaagcacatgccaagctatcgttataatgataatttactcctgcttcgttggagcagtcaatagcttgtataacaacattgattcaggttagatgcattttgttgcaaattttgttgtggatacttttgtggccgactgacatatggctattaacctgtgagttgacagtctctgaaaatactagcttccatttgagcatccaacatatagttctcttcagagctaattttgcaatttagggaactcgacggggttatgttgagcagattattggccttcaactctatttgagcaacgtcaagcatattcccttatgtgttgttttcctgttcctacaactgcaagttcatcagaccgcagctctaacatacatcatgattacaggtatacaagatctcagtcatgccccttctgccgcggaagtctgaaaagggttcgatctacggacctctgggtgctcacccgcgacgaggacgtgatcgacactgtcgccctagagaaggagaatgtgaggcacttccacagcttcatcgacagcctgcctctgattgtcccggacaacctcctgctggtctactacgactacctagtctagggacgttcctgttggaagaggaaatataacatgaatgtacaagggttttctggcagccgaccatcctccttggatcgagtccggcaaacgaagccgaagccgtcgatcggtctgttgcgaagcagcattatttgttacactggctttgcgcaatcgcattgttgtggtaataataattgtacagaaaaggaagtgtactaagtctggcatctatgctctggcaaattgccaagatattcaaaaactagcggtgtgggtacttactttgctgcaccaatggtcaagctatgtacggaagtgttctcaagcctccatcgtggatatggatatgttaagcaactctataaggtaggaaatgattatctgctatttctttggaaaaaaa

SEQ ID NO: 3984 - DNA, 843 bp, Avena sativa
gttgcaccgcgcctaacgaagaaagaagcttggattctaatagagtaagcacctaatgtcatatgattcattactacttcactggtcagcgttgagtggtgtggatactgagcttatgaacgtccaaggtcactaagggagaagctccaaggaaattctaggtttgctatagttggtggatttcaatgagatgtaatctgctaggaactaaagattgggcaaaagatgatgaaaatatccacagagtaggtgctcccaacacgataaataagcaagcatatcacaagcttcagtcgaatgtggcaatcgtcagatgaaaggaactacctacaagcaacatttgcttctacaatttgttttctgacttaaaatggagagaacaagagcaatttttcagagcatgaggcatgaaagagcagcacataaggaaatatcaacgatagtctaaatcaaatgacagtggcaatccaccgacgcctacgagctcatcttggattaaacagttgacaaacaagttgagggtgaatgcaggcatcgatgccttggcgagatggacgtaccagacaggggtatcaacatgaaagttccattgcagaggaagctccaagacaagataaaggatctgcccgtgtacaagctcaaaaacgatctgatcaagacatcgaggagaggagtaccaggtgttgatcatagacagatagacaggctttggcaaggtcacaccatagtacctacaggaacctccaaatatccaattgttatagatggaaattaaaaacaagggaacaatgtctttccaaagtctaaattgtaacttaataatcacacttctcgaataggaaa

SEQ ID NO: 3985 - DNA, 940 bp, Avena sativa
tttggcctatacatttttgtgtgatcaagattcaaaatatgcggccgatcttattaaaattctggaaggggcagaccaagatgttcctcctgaactaatggacatggtctctcggggcgggcgtggtaagaaacgtaacaaatgggcaactcgctctgagaggggtggtgattcaaggtatggtgggaggttcgagagtggtcgcagtggccgtggaaaggatgattatgggggccgtagcaggcatgattgtggtgtatctgatggacggtctcgcaggtctggcagaggtcgcagtagaagccgtagcaggagtgatagtgataggcgtaccccaagccccaagaggcgccggcatgacgtgcaggctagccggagcaggactagaagtcagagccgaagcaggagcaggagcaggagttacactaggaaccgtcgtgccagccgcagcaggagtcgtagccctggtgctggacataggactgaaagaagagctggctctggatctgcacatcctgaccctggccactcggtggagcacaaaggtcacccttcaaatgatcataggaaccactctgaccagaaagatgacttctgtgtggaggatggtaagatgggaaaggttgatcttgatcgctcgctcagtccgcaggatgacaagtctgctccgtacagccctgtttataatggcaaaggcagggactcaacaagccctaatggccacccagtggtggatggcaaagctgttgaagtctcggagaagcctgatcccgtgtctccacctcactgcagcaagaacagggaggaagaggaaggcatgatagacgatgagggagaggaaggtatgatagctgatgatgatcatcgggccagtgcagctgtgcagaatgctgataagtgaaaaaaatcgagcagcagctggcatctgcagtgaagcttt

SEQ ID NO: 3986 - DNA, 1074 bp, Avena sativa
tactgatcagtatgctgtacttatatcataccgctgcaattacacagaatcgaaacttttttctaagcaggccacgagctggcaaccctgtgcagctagtgatcttatgatttctgtatcttctgaactgtcattacgaaatcctaccccgagtgttcgagttcctcaacttcccgtgcaggtcttaacccttgaagctactaatatgacatcagaaaacctcacgttaactgttctcgctccagaagcatctggttcttcttcagttgtatccttgaactcagctccaaccacgccgaatggttcttatgataatcttaatgagtctgcgagaagatctggtttgggaaagcacacaactggttttcagagactgaattcagtcgtcgctggctctccaaaagaaagtgacaatggaggaaatagaattagtacttctgcaggttgtactcatttgtggttgcagagtgcagttcctctagggtgtattcctgcacgttcaagcaccaccgtcaaactcgagctacttccgttaacagatgggatcattacactggatacactgcaaataaccataaaggagaaaggtcttacatacataccggagcactccttggagatacacgcatcctctggcatttcagcgggaaggtcgtaggattcagcagtgcattattatatgcctttagtttctggctcaacctcagcgtggagtaaagtggtcataggattcacttgtattggatgttggacatgggagttctcgtggcaggatcctggagcccgagccagataactccgtttgggcgcaagatgatagtctccacatcaactggagaaacgagactgatgctttgtgtgacgacgttcacaaatccattcatacacggagtgctgagctattgcctattgggcatgctcatcgggaacctgtaatgttatgttgcatagtgttgattcatttttctggttttcatttttgtctgttacatgtaaacatggcctttgaccttcttttagttggcaaggcagatgtatcatgcgatgtatcagaaaatgagaaatttacggatc

SEQ ID NO: 3987 - DNA, 1067 bp, Avena sativa
atctcgtcgatgcactccgcgaaatcaaggccagtgcaaatgagaagcggaattttactgaaacagtggaagctcatgtaatgttaggtgttgatccacgtcgtggtgaccagatggtccgtggagccataactttgcctcatggcactggcaagactgtcagggtagcagtatttgctgaaggtcctgcagcagaagaagctagagctgctggagcagatgttgttggtgctgatgagctaattgaggagattcggaaaggaggaggcaaactaagcttcgacaagtgcatagcaaccccaatgttcatgcctcggctttcaaagattgctagaatattgggtcctcgtggtttgatgccaaacccaaagctcgggtctgttacaaatgacgtttctggtgctgtcaaagcggcaaaatcaggccgtattgatttcaaaatagacaaaactgctatagtgcatgttggtcttggaaaggtgaatttttccgaggagagtttacgtgaaaatattggcgcttttgtaaacgcacttttacttgctaagccggtcggcttaaagaaaacttcgaaatatgttggatacgtgaagaagtttacgttgagtagcacaatgggacctggattttctgttaccataccctcactatcggcggcggctgataattataccaaagtgcaagtcagctaattaaccgttttatctgcgggcacttgcaaccagtgccttgcaagtggctgtggcctattgcagctgagcataacgttttaaccaggccgaggccgagcacagttgggtggtaactgttgggccacactcaggatgatagttttgtggtaaagacctttcagcaaacagtatctccttaaatttcttatggccaccgaaattatgtgattgcttttgatggtccactcatgtcattcctcagccgctctgcagtttgttgtatgcaatgtaatttcgtgttcattatgaaaaatgattgtaggagtaggttattcttatttgaaaggaggttataattgagaggttggagtcactgacactggagtgatcagtgac

SEQ ID NO: 3988 - DNA, 1130 bp, Avena sativa
ggtgcagcaacaacaggagcaaatgggatcaagaaggattatgacgagaccaatctttatatcggatatttgccgcctatgtttgatgattcagggctgatcagtctattctcgcaatttggggagattgtcatggcaaaggttatcaaggatcgcaacactgggcagagtaaaggttatggatttgtgaagtatgcagatgtctcacaggctaatgctgcaattgctgcgatgagtggttaccatcttgatgggagaaccatcgcagttagagttgcaggcaagccaccacagccggctgctccacctccatatggtatgcagtacccaccagctcctgctccggtacctccaccaggtaccacatcaactgatggagcgcagaactaccctccgggtgtaacgccaccaagttctggtgcacctactcagcctgtccaagcaccatatggaacttctggtacgcaaaacatgccacacatgtaccctccaccttatagttatgccccatattatccatctgtcacaccggttcagcccccgcctccaccaccagctagtgttgatccgtcgcaaagcattgcaacagcaccttgggccacccacaatgcaccgcctccaccaccaccaccggttagtgttgattcctcgcagagcaattcaagtgcaccttgggccaatcaccatgtaccgccaccaccacctctgccatcttccaatgacgcgcccactgctccgtatggtgctgatgcagagtatgagaaatttatgtcagaaatgaagtgatatgtgtgaagctggtgcgttctttcaacagtgggaaaggcttaaggtttcttggagctaatgccaacatgatttatttgttgttggaagtttgggactcatatctttaaccttgctgtgctgttatgaccattgcagaggttggatgatgaggacgtttagcatttaccggcttattgggcaacataatatctgctttatcaccgtttctcagaactatttgaacgaaccctttactaatactcttgtttcgatgttattcttgtcatcacttgagatttgttattcgatgtcacttaatgctctgtttgctgtgatattaattttattattctcacctgtaa

SEQ ID NO: 3989 - DNA, 1007 bp, Avena sativa
ctatgaacagcttgtgctccttttgtagctcagttaacgattacgacagtgttgtgaagatcattgatgacttcagggaaacaggtcgccctgtgtcagccttcttgtgtaatgttcttctgttgcacacactgaggggcagtgatcttctgaaggcttggacgcgttcagaagatagatcaacatctattgaagcaagagccgaagagatcaaaggtcgtgaggcaggacgaatcttgattggacaacttattgagttgtttgcaagtggtatccgaaacaggagtgacttggaggttttagaagaaggtttggaacagttctttcctgtggacatttttacttataacatgctgctacgaggattgagcatggcagggagaatggatactgcctgtaacatgtttgaaaggctatgcagaaaggggtatcaaccaaatagatttacttttgatataatgatacatggcttctgcaagcatggcatccgaagtgaggctgaaaggtggatggaggcaatgtaccgaaatgggttctatcctacttggtacactatgaggttatacaacaatacatccttgcgagtacatgatcagaaagtcatttcatttgtataagcaattacctatcttggcctcgcatccgtctgctggtctactgtaatcctatgactttgctgaaacaggcactctttttgaggttcagacatatccatgtggagaatatttgtaaacttaacattagtgcatcctgaaccacatctcacgtggcacgacgtagcgtcgaagatgtagctagggtatcaatttacctgtaacattgatctattttccttggcccatgatgtattctactagtcctacacagttttgctgtttatctggtgtaacaatagtaattcagtagtccccactgaatcagtatattatggagcaatggagattcattgtcatgatatcgtcatctagaagtttggcatggtatagcattttcaatggactaaaggc

SEQ ID NO: 3990 - DNA, 826 bp, Avena sativa
agacttttggagtggtgcctcttccaggtggaatgggaagggcggttaaaggctgtcttgaatatactgctggacctcattcggaaggagatttggcagtagttcatctcgagaagggaaggcttgttaggtgggtgcttacacggaacggagacacggtggattggaacaaggaggcgaggattggtttggttggtgcacttggggactatatgaatgaaaacatcctccacgcattttcgtttgagccatcagagtggtgttctttccagctacgatctgtatctccagatggccggtatgtgcttatatcagtcggtgtgatccatggtctgtttgtggttgacatgctttatgaaacagcagaagcttatccaagtcctaagaagatgggccgtgtgtttcccttgtcagaatactggccgtcaaagcctttgattcagtaggggaaagacgtaatatcgtaggcttcctgtagcacgtagctttaattagaaataaatcacatgcgccttggtaccatcagagcgatgatctgtgctggacatgctagagagacagaccgagtgttccgaaagaagggcaaagtggcttcattgggtggtttcttagggtctcaggccatggcacctaaggcatttagctggaactaatttagtgttttatttctagtatgtatgctgaatcaatatgttcaggttagtactgtgtgttgttttatttagaacaaaagaccaaatcctgtaatattctatgactgaagatatgtgctgccaatgttatgtatgttatgtgtaataaatcatgttgtatatacctagaaaaa

SEQ ID NO: 3991 - DNA, 901 bp, Avena sativa
gatcaacaccatatgccaattctgcaccttcaggagtttcatattttccaacgatggctccaccatttgctgggccaacaggtgcattacctgcccagcatgcaaggcagtatgcaataagccttcctgaaggtagcagtagtgatggacatgacagtaattggagatggagaagacaggggcttgatcttaattctggccctggaagtatagatgtagaagggaaggatgaacgggtaccactatcggttagacaaaatttgatcacaccaccacaggcctttgtggaggagcaaacaaggatgtaccagatgccaggtgtaggaataaagaggaaggaacctgaaggcagttgggatgctgaaagatcgtcatacaagcatttatcatggcaataagaactttaaggagatctccttgcagtgacttcagtgtctggtgagcttaggctttgcatgtgaaagccaggcttgtattgcacccctgtggccgtgctgggatatacaactcacatggattcatcttcctgatgatgtgaactgtgagaggaacaatcttcgctgtaattgctgtaaatgtaaatcatatccatagtttcctggaaacagttttcatcggcttcagcagttgctttgctagagttctgtgtctgccaggcttggcttctattctacccaggaggaatgttaatggcccttggcatcttcaaacatctgaaaccgttgtaattagtgttggcttgtttcttttgataaacagttttcaccttgttgaggacatcgtcagcttaacatatgatttagatgtgacatgtattctgctgggaagcattacatcagtagagcagggacaaaataatttgccgtgatgaacttattgcgtcaacctaacaaagaaccaa

SEQ ID NO: 3992 - DNA, 1082 bp, Avena sativa
ctagcgcttcagagggcgaagccatggagagcgtcgagctcgcctccctcctgcaaaataagctcgattggccccctttcctggtcgatttgatgctgaagttccttgtgccctcctttgccgtccggggttgcttctttgttggatgtggagcagatcagggacatgaggcggccatggagttgatttggtggaccgattggggtgttgcgcgattccatcttggtgaggggaggaactgttcctcggtgtcttgcctggctggccatggtggcagggggaaaggtgctttggtggggagtggtggctctgtcttcctcctccagctggccgtggtggcgaggggatgagggagacgggagctatttctggttcctctacctcaagatggcttcctttggggcaaagctttattctgaaaataatctgccttgcacatcatggtgatggtgaaggcagtgatgctccaattttatatagcccgtgttggagatcggaggagacggtgtttcaatcttctgctgctccaaaaggttttcatcgaccaatgtttctcatatttttggagctagctcttcggtctagctactactcaaaggatcaactgcgtattgctgtcaaggttgtctttgttgtcttcatttcgctcgggtgtgtgcgccggagacaggtgagatcgtctccgctgtggctccttagatttggcgatgaagacccgtctgtgttgagctcggtgaagcttcctcgacatctacatctcaactttcaacctcgtggccttgcgccttctcaatggctggttgagcctctggctatctggttagccgggctctgtgaggctcttgatgatcatatttgcaggtgttgcaagtccatgatcttgatggataacctggtaggctcttttgtgttctttggcgaaggcagctttcagctttattttctcttgtgtgtcgctaggctgtaggttcgattctgatctacagatcttttgttgtatgagctattttatatcctggatcagtgcttaatctaatagctcttccgttcaaaataaaaaaaataccatggaaggaaaaaaa

SEQ ID NO: 3993 - DNA, 1210 bp, Avena sativa
atatctgcatcgtttattttgctctaaacaggtgatacatgatgatttcacttattacaatactgatgatgacatagtacaatgctatgaaactgaagcagggatttgttgctttccctctaaaaaaacatagtgcaatgctgacttcagaatacatagaaaattcagccttcagatatttggtcactaggtgtgtatcagtatcatgtcaaaccgactagctttgaacggcgatttgcttcgatatcagcatggtgagcagagtagatgaaattatgctgcacacaccgaaatatcttcacagcctgcttgcggattttacgttgcttatgaaagaagaaatcctctcggggtcttttcgaattccatcagcagcacatatgccactgctgacgtccacaccatctggcttcagaacagacactgcttcacaaacattatcagcatgaaggcctccagccagcagccatccatttttgctcctaacagatggcatctgaaatctctgccagttgaatcccttgccgcttccgcctttcacactgtccactaagaaccaatcaggcacatattcttcatgaggaggagcattaataagttttccatcatcatcggcattaaggacataaatgattcgtttattcttcgaaagcaaatgaagcaatgcacgggattcatctccatggagctggactaaattaaggtcacatgaatcagagactcttaatattgtctcttcgtcatcatccacaaaaacaccaactgattcagccccataagattgcgctactcttgatatttcttttgcttctgataatgcgacagagcgtttagagttgggccaaagtatcatgccaataagtttagcacctgccttcacagcgatttctgcatctttagctgatgtgatgccacacattttgactacaggctggataactttggtaccatcgtaacttagtgaagacataatggtgtttgatccatgagcgctcttcctcgccaagcataaagttttaactagaggaaatcttgtatgtgcactgctatgcaatatagaaatttgctggggctgtcttactgataccgatggcgccattaacatggacgctgcaggtggacgggagtagaagaaatcaatccagtacgtgtaggcctggattgttggttgccgttgccgttgcagatccttgagggaaagaagaagaac

SEQ ID NO: 3994 - DNA, 981 bp, Avena sativa
gtacgaggagagcctggagttcagcgatgagatcccacaaaaaaggctttccatgacttaccaacggaagttgctgcctgtgaacagcaaagctattgatgagtatggagacatagcagatatatacccaactgctgatggctcaggtagcatgatgacgagcctgctttagcaactgaaagagaccagtcgtactgaagctgcaggtaacaatgtcaacctggagagtgctcctctgcaagcttgttataccatgaaccaggtgcacgccacagttaatctacagaaagataccatgtcccaggcgcaggccgcagttaatctacagaaagatgccatgaaccaggtgcacaccgcagttgctctgcgcggaaacgccatgaatggggtgcacgctgcagccatggtcaatggtggtgcggtggatctagggagcaaggtcccgcttggtggtacaggcaataaccgctccactgcagagaggacgccgtctgatccttttagtagctgggaagaagtggaggcattttggatgagccatctggaaggactacaaaagcaaggctttggatcagacgacctgctacaggtagacgatgcttggaaccaggcgcttcagcaggcgaacgaagatgacgctcccgtggctcaaaggggtgacgcgcgtgctgctgctcaagaacccgctggtggtgctgctctggcacatgatgctgagttcagcattgatgatgtgcaggtctggatcccttagtttgcaggtgacgactttggcatgccgttctagtccaggaagagaggtaactgaataactgatggtggcataatataagaactgatgaatagtactaataagagttgctggggaggaaaccccgggagaaataagggagagctgcagataactgtgctcaggcaaagcatatgttgttgtatgcagacttatatccagtgcttcgtgactttggttaaacctattta

SEQ ID NO: 3995 - DNA, 893 bp, Avena sativa
ataaccatttaaacggtgcctcaaatggtttctctgatgacgatatcagcttcaaacttcatgagagtagaagaggtgcaagctatagtcgaaagaagctcctccctctctttgatgatgctactgtgcaaaatgatagcagcctccttacgaagcaatataccgaggcagatccttcagcagaagtcgtgctggaacttgctaaagagcaagataaaatcgcaattgccagtgaaattgatcaagtccatgagcgcttgcacgctctcgaggcagataaggagttcataaaacagtgtgtgaggtctttgaataaaggaggcaaagggtttgctctccttcaggagatcttgcagcatcttcgggacctcagaaggattgagcagcgtgcaaggaactctggagaactttcgccagattatgtgcatccttacactgattaaagatcagcaccagcaaagccctgggatcatgttcgacagcaatgcatcaagatgaaaacagcaccaacaagaagaaaaagaaaagtttgcattacaccaacagcgcgagagaagggaaagcacatcgactagttagaagtatagccatgccagaagcttggctttgtctcaggaggagaaggagctcctcctggcgctctcacggcatcgccatcggaattcggaaggcggatcgtgctgcaaatatctgccttgtaaggttttctttgtggaccacctccccacgctgtgccctcttaaattttgattctggtttcattttggatgtgtggggaggggtttccaaactttggcgcaatagggttggtgagccgcccacccgtccccccatgaggtgtgtttcgtggcagaaatcatggcttttgggcgagctgcctttgggatgatgca

SEQ ID NO: 3996 - DNA, 1099 bp, Avena sativa
caatggcatcctgcctcgcggcccgccacctcctttcccgcgcctccgccgcccgacgcgtcctcccctgcgcctctccgctgtattccttccccctctattctccgcaggctctccacccacgcctcgccgccaccgccaccgcctcttccgcctccgcctctcgagccgacagtcgatccggcgacgtccgaaggcgcctcctcctacgctggcgccggcgaaggcgccggtgctggggagtcctaccggtcgggacagggagcttcatcggagggccgccgcccggctggcgcgggctacgaggaggagcaggagaaggtcctccgcgcgtcgctgctccacgtgccgaggatgggatggagcgagtctgccatgatcgctggggcgagggacgtgggcgtgtcgccggccatcgtcggtgccttccaaaggaaggaggctgcgcttgtggagtttttcatggatgactgccttcaacaactcatggaccgcgttgatgctggtgagagagagcagttgaaaaacttgatactcaccgagagactctccaggcttatccgtatgagacttgagatgcagacaccttacatttctaagtggcctcaagcgctgagtatccagtctcaaccggcagacgtgtcgacaagtctaaaacagagagcagtccttgttgatgagatttggcatgctgctggggattctggatcagatattgattggtatgtcaagcgtgctgtgcttggtggtatctactcaacctcggaggtgtacatgttaacagataattttccagagtttcgggacacatggacatttgtgaatcgccgcatcaaagaggctctcgatctgcagaaatctgttaaagaggtcggatatctagctgaagccatgggagcaggcctgggtgtgggccccatacagggcatcctgaacaggttttccagaaatgaggaaaatgcgtgaacttgtctttaataccttccactcccgacgtttccaccaccacctaattatgtcacgttaagattctctgaagttgtatatactactagcacttccacaaataaaagctgtcatgatagacttgcgtgacaaa

SEQ ID NO: 3997 - DNA, 1039 bp, Avena sativa
actagccaatctctagaatctcaaggatggaagtactgtatgcaggcatcaatgttggaaatatataatgagacaattcgtgacttgttagcaccaggacgctccaacaatgttgagatgtctgccggtaaacagtacaccatcaagcatgatgcccagggaaacacaacggtctccgatcttacaactactaatgttttctagtacagctgatgtgacgtcgcttctagacaaagcatctcatagcaggtccgtcggtaagacccagatgaacgagcaatcttcacggagtcattttgttttcactctaaagatatttggatcaaatgagagcacgggccaacaagtacaaggcgtgcttaacctgattgatttggccgggagtgagcgtctcgctaaaagtggctcaacaggtgatcgcttgaaggaaactcaggcaatcaacaaaagcctgtcagccctcagcgatgtcatctttgcgatcgcgaagaacgatgaccatgtgcccttcaggaactcgaaacttacatacctcttgcagccttgcctcggcggggactcgaagacgctcatgttcgtcaacatcgcgccagaagcgtcctccgtcaatgaaacagtctgctccctgaggttcgcctcgagggtgaacgcctgcgagatcggggtagcgagacgtcaaacacaggctcgatcctcggacaacaggctgagctacgggtgaagctcctccccttagtggccgtcataacgtgatacctaatgggggataatgcgatacataatgggtcggcttgttggctgacttggccatgagctggcgacgcgcgcgcggcggctggcctcttgtaacatgtacagtagggagagtggcagagcgtgcgccgtggcggcgagcgagcaggagagcagagagcctgctttgctgccacgttttctgttgtagtagtagctgatttgagtatttttttgggtaatgtaactgggcgtcgtttacgctgtattctttttcttgagtgacagaccgcgtgttgcaggccgc

SEQ ID NO: 3998 - DNA, 1088 bp, Avena sativa
cagtaatgggttgagtgttctatatgccttctcatcagagatttcagcgaaatcatgtttgctagtatgtgtagacttgttagttgagaatgttacgacagaccagttggtagatataaccatcaaacctgaagaggcttccactagcgaggatggcatggaccaagcatcagaaggatctgcaagcataccaactcttgttccagtggaagagatacggtccctggctccgcaacagacagtaaagatggttcttcaggttcacttccatcaccatctcttgcccatgaagctatctgtcctttgcaatgggaaaaagcatccagtcaaacttcacccagacattgcttattttgtacggccactacccatggatctaaatgcttttctgtgcaaggaaaaccagctaaggggaatgttcgagtatgctagaaggtgcaccttcaaagatcaccttcaaaagcacgagcacaccgaagagagtacagaccagactgataagaaccttatagtggcccagagtcttgcatcaaaagtactcagcaatgccaacgttcacctagtgtcgatggacatgccggtaaccttcagcatcgacgatgcctccggcctgtgctggcgatttagcagcgaggtcctgagcacttcaaacccctgcctgattaccatcatggcagaagggcatgcctcaggaccactggatatcacaatcaaggtgaactctgaagacacggtgtttggcctaaacctccttaacagagttgtagcgatcatagagtgaccggacactttgatttttgcatgtttggtttgaaataccactttgtcgatactgtaaattgttgtacattattgtgaatgctgagtctgagggcttagagtggcacaacagtgtgttactgctgtagtatgttgttattctcaccagacgagacttgttccggttccgaaacatttacaagagtttagcaagaatttgatctcttttcaaattacccatgtacttgtagagcatgactgtattcctgctatgtaatgaaactattgctcttgttactcaagaagaaaaaatgtcttaatgaaaaaaa

SEQ ID NO: 3999 - DNA, 718 bp, Avena sativa
tgatggtcctggcgaaggaagtcaaagacttggtatgcgaaccaccgttgctattatctttgcacggttgatcttggttccaattgctggggttggcatcgtcatgctagttgataaactcggtttcattcccaaagatgacaaaatgttcaagtttgtcctactacttcagcattctatgcccacatcggtgttgtcaggtgctgttgcaaatctgagagggtgtggaaaagaatcagcctcaattttattctgggtgcacatttttgctgtattttccatggcaggatggattattttctacttgaccttgctcttctaaatactgaacggcaatatccggaaaaactatgtaccatcaaaacatatagaagatggtggtcatgatttgtacaataccaactaaatcatggtgacagcgccggagacacgagctgtatccgtacagatatggttcctcgtgcccgcctctgtaaatgtcacagttatgttaattttggcctcgcctcgctcctccaagcaacgagcagtgagaaaaccgcagcagctagtgccctgcccatattaattaggttaccctgaactctttagatcgggcagagccgagtctcataatcaccacctctattttctctgtatacttcgaataccgtggcactccatgttcttcatccaatgatctactcagttggaagtgtaawttgtattgtaacaaaaa

SEQ ID NO: 4000 - DNA, 577 bp, Avena sativa
tttgatccaaatatatatctttataggtagatagcacatagagaacagaggtcccaacagtacatcatacatcaagcggaaaacgtggcataacatccgagtacgaataggacccaaatgggcataagatgccaataaataagcaagtgagctccatgcccacacgtctcaggacttcctggtaggatcccgactactgctcgtagtagtcctcatcagcataatcgacgtagtaagaaccagactcatccacctgatcacacgtacctgagtgatcaaaggacggagttggttcaagatcgagagggtactcataagactattcaaactcctgctggtactcgtcgggctcgccttagtggatcggcgaggcgggttcggcggtgttgacggtgacgagcggcagcgacggtgagcgcggcgacgacctggacgcgtccttgctcctcctcgctgctgctccggtagaccacgtcgagggcggggctgaggacggctggtggctacgctaggaaggaggagaggacgacggcgaggctgccatggcgtggcggcggcggtctggtcttcccgggaa

SEQ ID NO: 4001 - DNA, 950 bp, Avena sativa
attcatgtcatggtcacatattcaacatggtttatggcaatgacttggttattttgcgccttttcttttcaatcctgctggttttgcttggcataagattgttgacgactgggcagattggaatagatggatgagaaaccaagggggaataggagtgcagcctgaaaaaagctgggagtcatggtggaatgctgagaatgcacatctccgttactcggtgctgagttctaggattcttgaagtattgctctgtttacgcttctttgtttatcaatatggacttgtctatcatctcaagatatctcatgacaacaaaaatttccttgtctacttgctttcttgggttgtaataattgccattgttggattggtcaagctcgtgaattgtgctagccgtcagttgagctcaaagcaccaactcgtgttcaggttcattaagttgttgacattcctggcagttgtgacttcatttatccttctctcttgcctgtgcaaactatccatcatggatttgatcatctgctgccttgcatttataccaactggttggggtctcctccttattgttcaggttttgaggccaaaaatagaatactatgcaatctgggagcctattcaggtcattgcgcatgcttacgactacggaatgggttctctgctctttttccaattgctatactagcatggatgcctattatctcagccatccagactcgggttctgttcaacagggccttttcacgccaacttcagatccaaccttttattgttggcaaaactaaacggaagtagttgatggtttcaagcggatgggaaccagagttgtgaatatgatacaggttgctcaggattataacaaacctctgtattcttgtgtacatatatattaggtgagattacagtgtgatcggtcattctttggtacatgcgattgacgaatctaactgctc

SEQ ID NO: 4002 - DNA, 1029 bp, Avena sativa
gctgacgtcgtggtattcaatacctaccttggtggatgaccggacaaagatgaaaattctgcatggttcttttgaagataaaagcaaggacattagtgaaatggaaacagaggaagcctatgggatggtactgaatgccgttgtgaaatgggccgagaacaacatgaaccctagaaattcaagggcgttctttgtcactatgtcacctactcataccaggagcaaagattggggcgacgattctgatgggaactgctacaaccaaaccactccaattaaagatttgtcttactggggaccgggcactagcaagggcctgatgcgggtcatcggagaagtgttcagcgcatccaaggtccctgtgggtgtggtcaacatcacccagctgtccgagtaccgcaaagacgcgcacacccagatatacaagaagcagtggagcccgctgaccccggagcagatcgccagccctaagagctacgcggactgcacccattggtgcctcccaggactccaggacacctggaacgagctgctctactcgaagctattcttcccttgagcgaaggaagatcttctgattcggaacatttaacatgcagcaaggcgcccatcgtcccttcacctgaaaaggatcccatgaacataacgcccaggttcctccgaatataggagtatatcacctcacctgggaaaggtggagaagggctagtgtgtaggtaacaacaacgtacaggttctcacactctttgagggatttacagggcacacgcaggctgcagtagctgaggtgttgaatggccatttgctgatcactgtaccatgttcctctcggctgagtggaaagtggcactgaacatatgaatgttaatttggttgaggcgatcaccgatatgcagaaggttttttatggccttccgagtaccctttttatttgcgtcgaagttaactagtgtagtagtatgacgcatgatgtattgatgtcactgcaattcagcaagatgtgcttagtaactgtattctttctcagca

SEQ ID NO: 4003 - DNA, 1160 bp, Avena sativa
gaatctctgggtggccggctcctccctcaccctttctcgcgtcctcggtaggtcggagggccaccgatcgcggaaccagctcggccccgcctatctctctctccggacgccttgacagttaagcgattacttcactggtgaaggaagccggctagagcaatgttctccttggcccatggtctatggaagtacatatttaacaagacggagttccatgttcttattcttggtgttgacaaggcaggcaagacaacattattggaaaaggtgaaatcgacttatctgaaaggggaaggaattccacctgatcgtattgttcctactgttggacttaacattggaagaattgaggattcaaatgcaaaactaatattctgggatctgggaggtcaggttggtctacgcacaatctgggaaaagtattaccaagaggcccatgctataatatatgtcatggatgctgccgctgaatcatcatttgaagatgccaaatctgctttggaaaaggttcttcgccatgaggatctgaaaggggcaccggtcctgttatttgccaacaaacaggatttacctggagttatctctgacgaagaattgagtagacgtatgcatcttaaggagctaaatgataggccatatagatgccaggctgtatctgcttatgatgggagggggattaaatccggcatagactggctggtggaacagatggaaagaagtaaacgtactgaggttctaagggagcgtgcaggtgtaaccgggcagatttagaacgttgaccggcatttcttatcatctcttttctgaaagagcatgtaaatttgatgcggatggcttctattaatctgcatgattatgccatcccagcagcaagttttggttacaaggttaacccttccagactgtccagaaacgcagagcaaattgtttaggttgtgcagctcttgtgatgtgttgatggtgaggtgattaatttggtttttgttcatggcaattttctgtatcgaaagatcctttgaggagtatgtgttcatatgattgcttttggaaagtgtcggtatagaggtgtcatacagcagcgtgcttcagtcatgttctttgtgaataggtaaaagaaaagatctattgtaattggcagttagatggcatgacctctggac

SEQ ID NO: 4004 - DNA, 1292 bp, Avena sativa
ttatacccctctccttcgttttccttgcggcttgagcaggagcagcagcagaggaggtggcggaagaagagcgaggcgaagcaaatgcacagctctggactctttggtgtagaatcaacttgatacagaattataggcgcaggcaaaagtaacgatagagagggaaatggcttcatatgaaccaaaaaagaacagtgaaataaggatattcgagagttcagatgagatggcaacagatctggctgagtatatctcgcaagtttcagaaatctctgttaaagaaaggggatactttgctattgccctatctggaggcccccttgtcagtttcttgaggaaactctgtgacgcgccatataacaagacacttgattggtcaaagtggtacatattctggtctgatgaacgtgctgtagcaaagaatcatgcagatagtaactataagttaacgaaagaaggattcctatcaaaggtacctattctcagtagtcatgtctactcgataaatgacaatgccacggtggaggatgcagcgacagattacgaatttgtcatcaggcagctggtcaaggtccgcacaataggagtctcagagagcaccgactgtcccaagtttgatctcattcttcttggtatggggtctgacggacatgttgcctcactgttccctaaccaccaagcccttgagctgaaagacgactgggtcacctacatcactgactctccgcagcctccacctgagagaatcaccttcacccttccggtgataaactcggcatcaaacatagcaatccttgcgacaggcgtcgacaaagcaactgctgtgcatttagctgtgtctgacagcagtgatggaccagacacctccgcatcactgcctgcccatatggttcagccgacagacggtaagctggtgtggtttttggataaggcagccgcctcatcgctcgacacgtcggatggcgcctaccagcagcaccgtgagtactaactcggaatgaccgaagattcttttgctgtggatgaaggcgtgtaagtaggtggtgaatcatatgatggtggaaggtttgctctcccctttagctctcagtacctctagccttcgtcttagtccaacgaagggtttgctccaggaaatcaaaagcccagttagttttcgtaaacggagatggttttgtgcggcacaatgttttatgtgatgttgaggggatcagagacgagaacactaaacctgatttgtgatgcagttatgatgtttatgtaatccattccatatctagttagaaaaaaaa

SEQ ID NO: 4005 - DNA, 967 bp, Avena sativa
agcaaagcatcttcgtctaatccaaaagtgcgcgtgttgccttgtctcgtctgtacggagctgcggaggaggaagagatggacgccatggccacgctcgccagaacgggcccttcttccctcgccgccgccggccaccggagctccgcctcgccccgtccgtcggcgtccctctccttcgccgccgcttactcgaggaaccgcggccacgtcgggctgagcacggtggggtggagcgggagggcgaacagggcagctcgcgtcaccaccaaccgcatcgtcgcctcctcggaagtcgagcagtcatacattatgatcaaacctgacggtgttcagcgtggtcttgttggagagattatttctcgctttgagaagaagggatttttgctgaaggggctgaagctttttcagtgccccaaggagttggctcaggagcactacaaggatctcagcgagagacctttctttcccaaacttatagagtacataacctctggacctgtagtttgcatggcctgggagggcgccggtgttgttgcatcagctcgcaaactgataggagctactaacccccttcaagctgaaccagggaccattaggggtgatcttgcagttcaaacaggaaggaatgttgtccatggaagtgatagccctgataatggcaagcgtgaaatcgcactatggttcaaagaaggagagctcgctcagtgggaatcagttcacacaccctggcttatagagtgaacttcgtttatcactgcaagaacctgatccagtggtcatttggttaacttgattcgacaggtcatgtataaatttgcttctgctgattgtggctcctaaattttcaccattgtccagctgtatgttctttctttctttgttatgttgaatgggttcggaactcttacatttttggtgtattattaattatgtgttaagaattttcttattattcactatgttaa

SEQ ID NO: 4006 - DNA, 810 bp, Avena sativa
cgaatcctaagctcgaagcgtcagtattgtccatctgcctaaacacaggtcattagcattcatgatcccttcgggctggggcagccataagcacccgagttcaaacgagcttggtgctgggcggccacaagctgcccgtctggctactcatgtgaccatggttctgggtctcgtgacgggtgtattgttagggcttattatgattttggtgcgcaatgtatgggggtatgcgtacagcaacgagaaggaagtcgtggaatacatttccagaatgatgccaattctgggcatggcatttgttttcgatgatatgcaatgtgttctttcaggtgttgttaggggctgtggtttgcaaaagattggtgcttgtgtcaatctcagtgcatactaccttgtcggtgttccagcagcgttattttttgccttcttctaccattttggcggaatgggattgtggttcggaataatgtgtggactcatcgtgcagatgctactgctgctgtccattaccctgtgcaccaactgggagaaagaagcttccaaggcaaaggacagagttttcagttcttccctccctctagacatgacgacatgaacatgcaagatgcatcttggtaagaacacggtgcaaaggagagacacggaactcatgaagaatttgtcgcgaagaaaactgccgcgcgtctcgatgtcaccagcagcatgggcttccttcagagacatcgtcagaccgttctgctctggtgatttttgtcgatggagcggcatacgatgtattggcaagcaaacgcattgccttgatatgattag

SEQ ID NO: 4007 - DNA, 862 bp, Avena sativa
aaggtggttcgatccctaccaagattctttagtttctctgagcgacttaagaaaatgcatggccatcatgcattgtagcatgaataaactgaaaattttactaacatgcaaattctttagtagaagatattttaggcagcagtgtcaatctacttccatgcaaaatacttttgtacaaaattatgtttttctgtaaatgtgcatttgaaataatttattcattttgcattccatatttttgtgcaggttattaggacagctttgactcgatacggaagcacttccgtctagccagattattagaacaaaaataaaagcctgtattaactaggtatggtgtcaatagatatgaattagtttcacaaccccaatataataaggatctggtttgggaacagttcatctagcagcggatgcaaaggagaaagcatgattcatcagagacgctaatcttgatcaagattagtgaacttggtgaagaaattgtaaaagaaaaactgatgccaaattttttactaggaagttcttatgcaggtcctcccactcatgaccaaggaccatccgcttacaaattgcatcaaaggcaaaaagaactgttgtgggttatgtgttcacggggaaggtgcaaatctcacagttcgtcacctggtcgagattaatcaactggaatctcagcttgaggtgggaatctgtatagacaaatttattcttagttgaattatcacaagctcaaaaaaatgacgttggagattttggctagattcacatgtgtataaacatgttttagtgtataggtatatataaaattagaaaaacctttgacatccttgttatttgttggacgagggataaattaatgaag

SEQ ID NO: 4008 - DNA, 808 bp, Avena sativa
tactacgctgggagccatggaatggacatcatggggcctgttaggaagtctgagtccagtggtcaccatgttgaatgtgttacatccactgattcagagggtaaggaggtcaatctcttccaacctgcgagtgagttcttacctatgatagccgaggtgttcgataatcttagtgagagtatcaaggacatcgaaggtgccaggatggaggataataagttttgtgtgtctgtgcattaccgaaatgtcgcgccacatgactacgaaaaagttcaccaacgtgtaactgctgttctgaaggattacccttttcttaggcttacccatgggaggaaggttcttgaagttcgccctgtgattgactggaacaaggggaaagctgtggaatttttgcttgaatcgcttggactaagcgagagtgaagatgttcttcctatctatgttggagatgacaagacggatgaagatgcattcaaggttctaaaggccaataaccgcggctttggaatcctggtgtcatctgtgcccaaggacagtgatgccttctactccttgagagatacagctgaggtaatggagttcctgagaacattggcagcatggaaggaggaatccagctgagcaaaagggaagaacactggttttgctgacctggagaagcacccaactataaatacaagctaacccatatgttggctgataaggagttaggccaaagcttttttgatttggcattttgtgaaagaggttgtcacattgtttggccccaccttttgtctttgttaatgggattatcaatccattccat

SEQ ID NO: 4009 - DNA, 780 bp, Avena sativa
tcaggcgcagagacttggcatatcgtaccacgtcggagaggataacaccgtagggcagaattctagaggtcatcagaatcctgatgaatcttatgtggtccaatccagtgtccaggctcaatcaagttctgttgtattgatttctcatccagttacaagccaacctgatgagtccttgatgaccaggtcaggaactcaacatcatgaaaacattgtggtagttgctgactccgagtccttgagggagcccacgagcactgatactattggcggctcgtccgaagaacttgccgtggatactgatgaagaaattgtgtctctagaccaaaatgaagatagtaccagctgacccttagagtaggtaccaatttttgtacatgacttggagcacctccatggtcagagctggccgtgttacactcggaaactgtcagcatgggaagcaagcagtgttgggtcagtggttaatgagctggaatcagtggttgaaatggggccattctttgagtcgtgcaatgagctgggatcagtggttgaaatggggccatttctttgagtcgtgcaatgagctgggcccaagcagtatttaccaccataaacaatctagtaattgaatttcctatggcaaatgaacctgggaatcgacatttgttaatttattctgttgtaccgatttagttttttttggggtactatatatacttctgatcaaatagcagatgtaagtcgtatacactagaggcaaacaatgaactatatggccaaatggtgcattgcata

SEQ ID NO: 4010 - DNA, 800 bp, Avena sativa
ggatgagattcacggttttctgttgattgtgtcaacaccttcctcaaccgcgactccggcaccgctcttgatgtgatggattatatatggaatgagatggttgcggctgctcactctcggagggtcccgccatttgctccctacattatggctctcattgttgccaagtgccctcccattgccaggaccctctccacacatcctctcattgtgcataggcctaaggcactcaagctcaagaaacattctaagcctcgcaatgtgaagggtcaggaggtggatgaagaagagaatgtgattgaggctgattctgaggatgctgacagtggtcgcgatgcagattttgttgtctcctggcgcaagaatgcccagccatcttgggccaagaggatggaggccaagctcaagaagatcttttacttccaagttgacaatcagaagcgcatgtatgaggctcatgtgtatgccaagaaggcttgtgctcgacagaaggaaatgatggaagctcaaggattgaccatctctgcgggttccgagaccaacatcacccctgaagaacaatggatctccaagcacagccactgggatgatgatgtctcttcctcgcaccgcgctccatccacctatgatgaggaggactttgatgacgaggaggattgacagtcggggcgatagtcttgcacttgtcctttttggtcgtcttgatgccaaggggagaagttgcaccttagggcatgcaggtgttgcatgggaagtcacaagctcgttcttgctttgatctttaattgcttgtgtaactt

SEQ ID NO: 4011 - DNA, 699 bp, Avena sativa
acgggtgcgccatggccgtgcagctggcattcggggctctggtggtggacgacaggatgggactcggcgtctggcttcgggtggccgtggggacggtgatggctgcggctctgtgggccatggctgtggcggtgctggtgacgcaggtggtggtgtgcttcgtgtgcaagagctatcgccgccgctgccacagctccgacggcgccgcggcgaagagcctcaccgacgtcggccggaagggacgagccactcggaaccggaagtgacagtgacgtcgatcgagtctcactgcacacggcaactgcctacctattaagctagtacagtactaataatcagttaatccacggtagtactccctccgtttcagaaatataagacattctagctttgtgaaacgaacgtatctagacacattttagtgtataggttcacttcaaacctctacgaacctatacactaaaacacgtctagatacgttcgattcacaaagtaaaaacgtcttatattttcgaagcggagggaatatatattaagctaattgcatgcatggtattgtctgtgatcaggtacgtataacttctgattgagcttgtacatacatggtattctctacttaggagtactcgcattctactaccttgtacgtacatttcaaggagctagatgtatgagtaccgtatgcaccaaamcaagcca

SEQ ID NO: 4012 - DNA, 1021 bp, Avena sativa
ttctaaatatagatgaatccatttcaataaaactgaaaaatagcaacaagcagcaaattgaccatcaggttgcatccttactagtaacttttcaacatggtgcatccttacagtaacttttcaaaaattgacaaccatggtgcatattagttgctagtcaccacatcaacatccaagttccaagttacattctcaaatattagttccattctccaaacacaaactcaaaaggataagttccaacttctccaagttccattctccaatacaaacatcaacatgagtcattagttgctagtcaccgcacttataggcaacttgatgctctccacatcctcctcctcatcatccatgcttacctccatcacattcaagtctttatgggcacccttaatgtagcttccaccacaaaccaaagcttccaccatataaggttttagagaacttctatagtcatccaacacccttccaccggtgctaaaagtggattccgaagacacggaactagctggaatagtcaagaaacgccttgccatctttgccaataccggatatctaagtgaattcactttccaccaattaagcaagtcaaagttgggagcattttcctcaccggcatcttctaggtagtttctcaactcactctttgatgattttgtggtggtgttggcacgccaattgtggaagtcactatccgatgtcggcattgaactactaactataggaagcttggatgatgattggccaactttttcggcttgcttcttttcattttcaaacttctcaaacaaggtgaacaactcactttcaatggaatccgtctccatttcagccgtgagatcatcatagagctcattaaaggcccaccttatgtacaacaacttgtaccttggatctaggatagttgcaagcaccatgacattgtttttttctcccaatacttgttgaacttttccatcatcgcttctcccatcttcttgtaggttgcattcttgtgtttcattgctttcaccaatgcaat

SEQ ID NO: 4013 - DNA, 1050 bp, Avena sativa
ctcagctctttattaggaccatctaatcaaactgacagtctaactgctgctaattagagcaaagaaaatggtgtggtttatgccctattttatttgtccaatttgttggacatgtctgccaatggaaagtaataccaaccagatagaaatttgctggaccattgctctgaatttaacttcacaattgcttcaagttatcattttacttgagctagagtctcatgagttggatgttagataagttggatgtttacttagtgcagttagtgtagtcctattcctcctcataggacctgaatttctccatcgaagattctgctctatgcacttatttttctatttgtgtatactttatttctggcaaatgagttgtcgattcagttagtacattcaaaggaaatgatgcttactacagtagcgttgggtgcggaatttctgaaactacaatactattaataatacactatataccactactgtttagtagcatagttatgacctttataccctgtttcttgctgcaaggttggtatggttgactattaggcttctacacctgatcgcctcacttctagatccattcaagcatgatgagttcatcgcctccgatcccgtctacacccgcagatctacaagatgcctgagcatagggaaatcaacaagatgggcctcaccgacctctctggttgtggaaggttctttatcaggacggtggcctttcctggagctctagtagggaggtggcctttgtcatcgacaatttcaagctggcctccgatctctacgacgatcgtgacaaggtgcacatcaagctggaaagttgcattggctggcacagatgatctaggagaccagccaaacaccactcacacaacatttaggggtctccaggctggttactgcatgcattttgctgggttcatgcttccattttctcaagtgtgtgaattagagatacttgtttgctaggatatacttgtatataaaatgttgtcgtgtgtgacatgtgatctggcaatatgtcatggtgctatgtaatccaatattcgg

SEQ ID NO: 4014 - DNA, 952 bp, Avena sativa
tccatgtcccataagcacgttgctgctcacccatggcacgacctggagataggcccaggagctcctgcggttttcaactgtgtgattgagattcctagaggcagcaaggttaagtatgagttggacaaaggaactggtcttatcaaggttgatcgtgttctttactcctcagttgtttacccacacaactatggtttcattccacgcacactgtgtgaggataatgaccccatggacgtccttgtcctgatgcaggagcaagttgttcctggctgtttcctgcgtgcacgtgctattgggctaatgcctatgattgaccagggtgagaaagatgataagatcatagctgtctgtgctgatgaccctgaataccgtcacttcagagacatcagtgaacttcccaagcatcgcctgcaggagattcgtcgcttctttgaagactacaagaagaatgaaaacaaggaggttgcagtgaatgacttcctcccagcagaagacgccatcaacgcaatcaagtactcaatggacctgtacggttcgtacatcatcgagggcttaaggaagtgatctccagcagtgcaactgcagatgctacgcgattcactcgactaccaatagtacgacagacatttatgttaacatcacgattgaaaaccatggctcagggatatatgccatgtaaggtcaatgctgagacaacgcatcagaaccttttctttccatatatgccgtgtgaggtccaagtattcgacctcttgctggaacctttgttgtcaaaccgtcgtttaatagaacggttgcttgatagaacatcagcattatatcaaggatcatgctcctatgtctctgatgttatgtgttaagtatgcgttgttgcctggargtgcttggtatccgctcctttcacttttatcagtggaatatctaaagatatgtctttgttgctacgaaa

SEQ ID NO: 4015 - DNA, 1016 bp, Avena sativa
tcaacaagcacattgaccagattatactgtgcagcatgtatggagttgcaaagatatctcaactggcccttacgattcaaggagataattttcagctacagaaaacagcctcactgcaagccacaggttttccgtagtgtttatgttcattggcaatcaagaagccgcagtgggaaaataggagcggaccatgttgatataatcaccttctacaatgaagttttcattcctatcgtgaagcctctgttggtggaattgggaccttgtaccagtccaaacaaaaacagtgatgaaaaaagtgctgctgatgcagtcccatttccggaatctcctcggctggctaggtttccaaaccttcctgacatgtctccgaagaaagtttctgctactcgtaatgtctacgtttccccactacgaacatcaaagatggatactttgctttcaccgagctccaagagctactacgcgtgtgtcggggagagtacccacgcattccagagcccttccaaggacttgaaggcgatcaacacccgcctaaacagcgggaagaaagtcaatggaaggctcaactttgatgatgttgtcagcgatctggtggttgccagaagtctcggcgaccaaaaccaaaacggcagctcccctgctgatgctgcggtgacggttctcggcaccaagacgcctgtaaaatccgagcatccagagccagactcttagattctattggggtatcgcgtgtgtgccacgacctatcggtagaaatgccagtctattaggtgtcagcctgatctaatgttagatgtttagaagaagccctttttcaatttcactgacatggggagtccctctgcgagcagctcttgatttgtgtggcatgtaagaaaggctgccttgagagcctcctctaacctctcttgctcacacggctgttgagcctcttcgttgtaagtagcaatcttgtaaatgaaagctgcttgtttactttgtctgttcgccatgacctgacacttaactacgta

SEQ ID NO: 4016 - DNA, 1022 bp, Avena sativa
gtcagaactaaggagacaacttccagtagacctggctgaaggaaacctcaaagctcttagcctgcaagctctgggtcagggggttgatatgcagcttgggctggcaattgatagcccaaaagccactttagcagtaaaaaggcgcttagcttgtgagatggtcaaatattggaaccagattcaggagaacattccagagcttactgcgtccgatggatgggggaaaaaacatctactatttgtcaagtggaagtatgtcgaagcaaaggctgcagcatactatttccatggtttgattcttgatgaaggaaacagtgagaaatctcacggaatggcaatagcagccttgcaagcttcagaggagtttctgaaagaaagtaaaagggcttctgaagctttccatgcaactccgccaacatctaggagccccactccttttggaacagctaagtatctgttcgacaagatcccaaaggatgcttcaagcaaggtccggatcaaccaggacctgtatactcaagaaagggtcattggagcgccacccccattgccagatttctcattggcactaacacctgaagattatgatcttcctccactagacccactttggaacaaagaggacggccatcagtaagagtatattcagcaagagtgtcatctgacaaaacgatgttgcactaaagagagcaagaaccaggattctgccatgtcgaagcagaacatggcacaaatgaagtgtacaaaaatttgaatcgatgccgaaaaattgaagcaaaatttagaaaggcctgaagatatgtgaagagcattttacagttcaattttcttctgacaatggacatacattgtcgaaagctttccaacaattcctgtaaaaatatgtttccagcgggagccatgggtttcctttttttcctaggatctgaccacggcttggtgttggggctattctaagcctattcatgtggtaaatttaccaaatctgatcctgattttcagtgcttgaggcagacgcggtc

SEQ ID NO: 4017 - DNA, 970 bp, Avena sativa
gccgcggccacccgtccatcatcgagatcttcgatgtggcaacggacgccgagacaggagacttcttcctcgtcatggagctcgtcgacggtggccgtaccctccgcgaggagatctggaggcccttagacgaggacgtggcccgcaggatgatgcgcctgctcctcgacgcggcaaagaagattcacggagcaggcatcgtccatcgggacatcaagccggagaacgtcctggtcagcatcttcggagcgctcaaagtctgcgacttcggctcggcgacgaggcagaagccggccggtgtgccctacgaggagtgccgtgtcggcacgatgatctacacctcgccggagcagttcgcgggcaaccggcactacggccaggccgtggacatgtgggcgcttggatgcgtgatggccgagatcctggcgggcgagaccctgttcgtggggaagacagaggaggacatggtcgccgagatgtccaagctgcgagaccagatcagctctacggggaagctggatggcctggagttcttcgatgagctttcagaagccgggcgcgaggtcctgctcggcctgcttgccttcaaccccgacgagaggctcacggcgacggaagcgctccagcaccggtggttcaacgagccctctgcttccgccggccagcagtaccctggcttcgtcaatttgttcagctgattagctttgattttgcactagctgataggtgtactggaatcggtgactctgagtggtgtactggaatcggtgactctgagttatactagcttgatttagtcgttggctggtgtagtaatggtggacgacactgattattctttcatgtgttgttatttaagcttaatcaatgggcaggaactttaattctgggttcctcgttatgtaattctttgaacaatcagtgtggcatggagatcaattaatggaaatacagttttgctgattacaaa

SEQ ID NO: 4018 - DNA, 812 bp, Avena sativa
ggtgcccattccagagcaacctgctggcatccggcggtggcggaagtgatcgctgcatcaagttttggaacacacacacaggcgcatgtctcaactctgtcgacaccgggtcacaagtgtgcgcgctgctctggaacaagaatgacagagagcttttaagctcacatggattcacccagaatcagctcaccttatggaagtacccgtcgatggataagatggctgaactcactggccatacttcccgggtccttttcatggctcagagccctgatggttgcacagtagcatctgctgcaggagatgagactttgcgtttctggaatgtgtttgggactcctgatgctcctaaggctgcagtgaagacttcacacactggcatgttcaacagttacaatcatatccgataagcattgatacccgcgactggtgtggcattattctgacaaagagtagcaggttacgtgcaaaaagtaattgcatcgcaagttcttaggtgaccatcaggagttccagaactgttgatatgaatggagaccgccatgagctgattccagaactgtcaatatgaatggagaccgttaacaaagttgtaaatcatcggaggcgccatcatgagctgatttacttaggtgtttacattactttgattttagacagaactgaattatgtgtgtgtgcttcagttttcttgactgcttgtaactttggttgctgttttactatccagattgatgaacatcaagaccagtttgatgtatgtaaaaattatgtccgtgataatatattttatactttttatgtacaaaaaa

SEQ ID NO: 4019 - DNA, 1210 bp, Avena sativa
ttctgatctaattgcaatgataggttgaatttttattacttgtggtgaagagtttgcagggataacttaaccatattcttagttaacatcatagctcatgaatcttgatatgtgctaatttcagttacataaattgatttagatcatgtatacatatcacaatagaaatccatagtcaaagataggcttagagattgtcgacttcgaaaaactcacttgtttgtgaccggagggagtgtgttctaaagtacccagtagtactaaatgagaagaagtatttatttgagctgcttcatttggttagaaatatcatatgcgtgtaggatcttccaacttgaggcacatgaaggccaaagtttgcttctgccaaaatgtgggaacgctgttttgtatttccgggtgatattatgtattctcggttcaggtatttagtttgtccatcctatctctaacacatatatttatctatgctaatagctaagtatatgtctgttattcattcttctgcaggcagttcatattttgtagggaacatggtaacgaagctcttgccgatgaaacattttttctttagtccagtaccccagctgactaataaaatacacgtattgtggttttcatcagcattacgcctgattgggattagttctatccatggtggctggttcttctctccagagtttgtatttcatgtttcaggcgctcctggttcatgtcgatggcgacgaggcggagagttgagatgaaagtaggtagaatatatgctggttctgcccaaatgcatctatggcatattttattatttggtcgaccctgctccaaactcctcatgttctttctccaaaatagcatccctgcttgttgtgtacttccaacttggtggttagatcaggcctgaggttgttcctcctttcagacccctcgccgtgtcaaccgccatccctgatgcgcgtacgcgccactgcagcatgtccaggtcaatgcgtagcaggaaccaggggcatgtgctacaggcctacaacctccagcaggtcgacctcatccacggcatcaagagagacatggcctttcagcgctaccgtgtaccgtgtcggcatctctatcccttgacctgcgtgtgacaggaatgtgagcgagctacattatgctactgttgatatattaccttacgccgagagtgattgcgtgttctgaaagaaccaaaaaaaaa

SEQ ID NO: 4020 - DNA, 775 bp, Avena sativa
ccggcggaggcaagatcggtctcgcccatctcgccggctcccatcttcgtcctgcccaacggcagctgcatccgcgctcgcgagagacacgcaccgagaagaggagatctgcggcgctgctcctgctcttgctcgttcgatccgcgactgcggcggcgatggagacgggaggggaggcgggcggcggcaagccggagtacagcatcatcgtgcccacctacaacgagcgcctcaacgtcgccatcatcgtctacctcatcttcaagcacctcccggatgccaagtttgaaatcattattgtggatgacggaagccccgatggaactcaagacattgtaaagcagttgcagcaagtatatggtgaagagcgtgttctattgagagctagaccaaggaagctaggacttggtactgcatacgtacatggattaaagcatgcctcaggggactttgttgtcataatggatgcagatctatctcatcatccaaagtatttgccaagcttcattaggaagcaaaaggtaactggtgctgatattgtaaccggtacccgttatgttaacaacggtggtgtccatggctggaatcttatgcgcaaattgactagcaggggagcaaatgttctagcacagacattgctgcgtcccggagcttctgatttgacaggatcatttaggctatataagcggagtgttttggaagatgtaatatcctcgtgcgtcagcaagggctatgtattccaaatggaaatgattgtgagggctaccaggaaagg

SEQ ID NO: 4021 - DNA, 1167 bp, Avena sativa
tggtcagcccagatgacattgtgttcgggggctgggacatcagcagcatgaacatggctgatgccatgaccagggccaaggtgctcgacatcgaccttcagaagcagctcaggccctatatggagtccatcgttccacttcctggtatctatgacccggacttcatcgctgcaaaccaggggtcccgggccaacaacattatcaagggcaccaagaaggagcagatggagcaggttataaaagacataagggagttcaaggagaagagcaaagtggacaaggtagttgtgctgtggactgcaaacactgagaggtacagtggagtctctgttgggctaaatgacacgatggagaacctcttggcctctgtggacaagaacgaggcagagatctctccgtctacactgtatgccatcgcctgcgtcatggagggcgtaccgttcatcaacgggagccctcagaacacctttgtgcctggactaatcgatcttgctatcaaaaacaactgtttgattggcggggacgacttcaaaagtgggcagaccaagatgaagtctgtcttggttgacttccttgttggtgctggaatcaagcccacctcaattgtcagctacaaccatctggggaacaatgacgggatgaacctgtcagcaccgcagacattcaggtccaaggagatctccaagagcaacgtcgtagacgacatggtctcgagcaacgctatcctctacgagcccggggaacatcctgatcacgtcgttgtgatcaagtatgtgccgtacgttggagacagcaagagggccatggatgagtacacctcggagattttcatggggggcaagagcaccatcgtgctgcacaacacctgcgaggactcgctcctcgccgcgccgatcatccttgacctggtgctcctggccgagctcagcacaaggattcagctcaaggcagagggagaggacaagttccactccttccacccggttgccaccatcctcagctacctcaccaaggcgcccctcgttcctcctggcacaccggtggtgaatgctctggccaagcagagggcgatgctagagaacatcatgagggcctgcgttggcctggcgcctgagaacaacatgatcctcgagtacaagtgatgaggatcggagggcacagtcgacg

SEQ ID NO: 4022 - DNA, 976 bp, Avena sativa
gggccgccgctctattggaaggtcaccaaccccaccctcgcgcccgggcacctgcaagatttacccggcttcacacgtagtgtttacaaaaggatcatgctttaataacaccagaaagccatgtattcagtcctttgcctgattggaccaacacattaggagcatatttggtttagtccagctcttggggcacacttcactatgtacttggcaaacatgcaagatggatcaaaatctgccctaccaccgaaacatgttgaaaggcttatctttgtacttcaaggcagcatagcattgtccctggagagcggaataacccactctctgttggtagactcttatgcctatcttcctgcaaacatgaagcactctatgatttcagatgaaccaaccaccctggtcatctttgagaggaggtatacagccattggggatcaccatcctgatctagttgttggttcaacagataagcaaccccttcttgaaaccccaggagaggtatttgaactgaggaagctgctgcccacttctctaccttatgacttcaatatccatataatggactttcagccaggcgaatatctcaatgtgaaggaggttcattacaatcaacatgggctgctgcttttagaaggacaaggaatatatcgattggcagacagctggtatccggtgcaagcaggcgacaccatttggatggcgccatttgtgcctcagtggtatgctgcccttggtaaaaccaaatctaggtacttgctgtacaaagatgtcaacaggaatccactgatatgagcaatgagatcgctcttcatggatggaaaattggcaattactcagcatagagagctgtcctagttatgcagagacactgctccgattgcttgctggcgaactgccaagaaccccagaatgaatcaatgtatttaaagaaagaacccaatttggaaattgtgctagttcatggctttacaaaaaa

SEQ ID NO: 4023 - DNA, 1161 bp, Avena sativa
tgattagtgacgccgaagagaaaggactgatttctccagataagaccatcttggtagaaccaactacagggaatactggtataggcctagcttcagtagctgctgccagaggatacaaactcatagcaactatgccttcatcaatagatgttgagaggcgcattcttatacgcgcatttggagcggaaattgtgttaaccgatcctacaaagggactaaaaggagcttttgataaggctgaggaaatagtttcaaagacgccagatgcgcacatgtttcatcaattcaacaattcagctaacagtgaggcccagaaatatgggaggacacactgggtactgttgacatacttgttgcaagcattgggacaggcggtactattaccggcactgggcgctacttaaaaatgatgaacaaggatgttaaggtcattggggtagaacctgctgaaactagtgtgatttctggcgacagaccaggttatataccaagcatattagatgttgagctgctcgatgaggttgtgaaggttaccacgggagaggcagttgatgttgcgaggcaacttgcactgaaagagggattgctggttggcatttcctcaggtgctgcagcagtcgctgctatgaacattgccaaaagacctgaaaatgctggaaagctgattgtggttatattccccagctttggagagagatatatctccagcatattgttccgtccgatatataactccgttcgaagaatgaggaagagataactaacttctgccactccaaaaaggaccaacatcatcatttgtaaacctgacaagcttccgccgcacaacaaactttgaagcgtcaagtccctgttagatgaacatcaggcatggtctaagttttgtaatgctatcgccgaaggactggtcatggaagtttggaactgctcgcagctgccggcaagttgactgcaggactgcaacatggtttccaggaatacccaggcaaacatgatctttagtgtatactaatatctgcctcaaacgttcgaactgacaacaccttcatggtaaaatatgaagagttagatgctgtagttcgcttaggatctttctctagtagcctaggacctggaacaaagacatgatatttcagctgatcttactaaacaraatgtgtg

SEQ ID NO: 4024 - DNA, 959 bp, Avena sativa
  modified_base (28)..(28): a, c, t, g, unknown or other
  modified_base (50)..(50): a, c, t, g, unknown or other
gagtgcacatttgtgttcatcttcttcncctttttctgtggacctttcancctttatttaccatagcaaacggttctacaccatcctaatctggcgcagggtgctcgctttcttagttgcttcacaggttctaaggattattacattctattcaacccagcttccgggtccaaactatcactgtcgtgagggctcaagtatggccacccttccaccacccaataacgtgcttgaagtactcctgattaattttcctcgtggagtaaaccttggctgtggcgatctgatattttcatcccacatgattttcacccttgttttcgttcgaacatatcacaaatatggcacgaaaaggtttattaagcttctttcctggttgatggctatagttcagagtcttcttatcattgccgcccgcaagcactacactgtggatgttgttgtcgcttggtataccgttaatttagttgtatacttcgtggacagcaagctcccagaaatgccggaccgtacgaatggatcgcctctgctcccgttgagtaccaaggagaaagatggcaggctgaaggacgagaaagacagcaggctgaaggacgagttccacaagctgttgaacgggaaccatggggatcctactgatcggcggcagcgggtgcagatgaacgggcggcacgacgaggacatgaaccaccacggcgcgctcccggacgccaccaccaacagcgcatgagccttttccttccaccgggagttttgtcctcgtgggcgcccagggagaatcctgtgggcgctggatggcgagcaaaactgcccaaggcatttggatccttcataatgcgatggccttcccttccttcatcagacagacaggcagcgaaacattgaatatgatttgggtgtaatgtgtatatatatcgatcatcagcggcttatataatcttgatcttattgatgcaaaa

SEQ ID NO: 4025 - DNA, 925 bp, Avena sativa
aacacgggtaacagattatttaaagaagggaaatttgaacttgccaaggcaaaatatgagaagttgcttagggagtataaccatgtccatcctcaagatgacgaagaggggaaagtcttcgccaattcaagaaattctctacatcttaatgtagctgcttgctaccagaagattggtgagtacagaaaatctattgaagcatgcaataaggtgcttgatgcaaatcctgtgcatgtgaaagctctttaccgccgaggaatgtcatacatgttatgtggggactttgatgatgcaaggaatgattttgagaagatgatagctgtggacaagtcttcagagcctgatgctacagctgcccttcttaaactgaaacaaaaagaacaggaaattgaaaagaaggcaaggaaacagttcaaaggactttttgacaagaagccaggggagatttctgaagttggtgcggaatcggagggtgccaagaatgcgggcgacaaggcggtctctggtgaggcagtgacgagtaccgatagagatggaagcgagaagcctagtccgcgtgcagaacctgattacgcctttgaggaagagaggccaggactaattggccgcatatggccatcggcaaggcggattttctcctctcttggtctgaacaggtgcacaatactctgagcaggtcctctaaaaggaaagctctgagcggtgataacctgacgtgatgcggtaagcaacatttttgggggcttcctgacatatacagtccaggtgtagaaagaattaaatcttaaattgtttgaatttatttatggaaaaaactgtacccattatatatatgggctgtcaagaatgatatggacgagaaatggcgaggaagcacggcatgttgtaacactgaaaattagtccctgtttgtgtaccgaaaaaa

SEQ ID NO: 4026 - DNA, 1095 bp, Avena sativa
ctgctcggcgctctccctcggccgcctccctgaaaggctcgccagcaccgggcgaagcgagggttcttcgacaccgttgaagccaaaccacaaggttatgatcagaggcaacgagacagggaaggatgtgggaatgagttaacattaggtggaggaggtgagagcagcatgctgtcaggggagaggaagaaagggtgctgtcccccaccatcaacacatggctcagctgctgcacccgctgcacctctgcacagcagcagcagcccccaggggagagctgctgtccttccagtagtcgggtggcctccggtcagatccttcaggagaaacctcacgaatgggacttcatccaagcaatcccccgagcgacaaaacgacgaagctcccgacaaggcgaagctaatctgcaagaagaggccgcttgtcaagatcaacatggacgggatacctatcggaaggaaagtaaacctcacagcttacgacagctaccagaagctgtcgtcagccgtcgaagagctgttccgtggatttcttgaagcccagaacgatctatcttgcgctgaaagcggagagcaaagagcagaagagaaaatattttcaggattgctagatggaaccggtgaatacgctctagtgtacgaagatgatgatggagacaggctgctagtcggagacataccatggagtgcctttgtttcggctgcaaagagactgagggtgatgaggaggtcagagcttccgcaggatctcattggagctaactcagggagagtagcagactgctaaaacgagaacacatggatttccgtggtgcgaactgcagttcatcacatttttggagatcgccggtctttagcttgtagagatgaatctaataaggaaacagaatgcatattgcagttgcagtagacacactgcatcttgtaaattaacctaccctttgtcgaatatagtgctggtcagggaaattcaacatgttttagctttatcagaaccgccgaaagtgtgtccaacgtgttgcgataattctctactgagccgcaccgcaggatgcttacctaatgataagatcccaatggtgcacgacttgtcgag

SEQ ID NO: 4027 - DNA, 1041 bp, Avena sativa
ttactatcaaggtgatgctgttgattctgcattatggggtgtccaagatgatccgatcaatgatatgtggtcattgctgtcaccaacgcctgctccccaacatttatctggggctaaatccaatggggaaggcgttcatgttaccgatgcaggaactgttacccaaggagagattgattttttcaaagaggtcaaacaggtgttcatggcatcgatgcggtaactattacccaaggagagattgattttcttcaaagaagtccaacaccaggggggtattggggattgaccgagcaggtgacatcggaagcaactgctgcgccagtatcatcaatagatttgaacacaggattgttcggttggcaaccatcagccagtgagaggccaaacatgggtgccccatggagcactagccagaatccaaacttgtactatagttatgaagcagcagcaccctcagttaggacctctcaggaagcatcagtgacgcgggaattcactgatttcggcgcctctaatatgggagaggcggtagggaacaacacaaagaactgcaacacgtctgctggtaatgccaatcgaggcagccagcgccgtgacaggtactctcagatcagcgaatcctggctcctcagctcgaataactttaggagtaggtcagatggagttagcagcggtgggacatcacgaacagccccgagggggacatgtaaattccacgagagcgggtactgcaggaagggctcatcttgtaacaacctgcaccgttaataatgtctacggtagagaagaggttttgaagttctttgctccacttttgtatagtctaatcacgatggtagtcaacttagggcgcacacgatcttcttggctccgctcgaccgtagtaaggagtaccgagtatatatatgtgtagcgtaggagcatggctgagtgtcccagggtaggtttgtctactggggcatgaaatattcgaatgtatcttcatttgtaccaagaactatttcatcgtggccttgatttgcctgatgtattaggaaa

SEQ ID NO: 4028 - DNA, 815 bp, Avena sativa
gatggtgatattccaatgcaagaaccatctggaagtacatcagaacagaagggtcactcaactgtggataggttgtcctctgtttataagtcttattagagaactttgcttggaggatcagcatgtagtatttcgagatcaagtccggaatcctggctcggcaaccaatgaagaataccattttcaggttgaactagcaggacagattcttgggaatggcattggtgtgaacaaagattttgcaaagcttcaggctgcagaagaggcgctgaggttcttgaaaacaactactgacccacagatcaagaagcatttgagaccagtaagctgcaacagttgatctcctcacccacccaacccccatcccaccaagcaaatgaaacgagttggaagaaagttggaatgtgaaaccagcttcccatttaactgttccatgtacaaaatggttgcacgactgatttaccggaagcacctctccgtgagtatggttgcgacctcaaccaggatgtgtatccactgatagtacttgtggagcgggacatgatgctttttggagatgctacattatagagcgggaaatgatgctttgtggattcttttgactaccttccttagagaatcttctcgtagactatttgcctccgcagaattacagatgtactcgtctcggcaggacactttgagtggttggctgtaaacaggtaggaatgtagagttagccatgagtattattactggtttccctgacagatgcagttacttgtaaattgtttaggagcattaaaattgcaatggtagtgctgatgttttacaaa

SEQ ID NO: 4029 - DNA, 872 bp, Avena sativa
catcaagaacacccaaatcatcactacagtcgccatctgaggattcagcgtctagaagcccttggaaatcatattcaaatggtgaaagatctacggtatcagaatatgataataatgcaagtcttggaagtgctgctccattgcttaagtcctttgttacccaggttggcagcaaatttggggagaacacatcgaggtggggttccatgctctctgacggtcaggttggcaagctcagcgacattcttcccggaccagcagctgggttcttctcatctttcacatccggtgtccgatatgattcatagccaaagagctgtaagggcgttaaccttcccatcctatacgtcaaagggaaacgcgcatgtgtgagcaaggctgtggcagctgttgtgatgaatgaggcctgtcttcggaaatctgttgcttacacaacgataacacacggttgccgagtggtggttagcacatcctaccaagcctctaacgtttcattcgattgggtgggcactttgaggagagctcaagcagatccaatggcgctcaagattggctggctggcttaacctgcagagattgaacaggtgggaatcggatccttttctgcgtgcaatttgacagggtatataggagaaagcaagtacaacttgctacagatattagtcgctcttttggggtcgtctcgatcaacttgtggacactgacctactggaacccatggagagtatttttgcagtccattcatatatatttttttgttgttgttgttgtctctgggaggtttgggagcatgttatattggaacggagctgaagctgcagcggtttgtggtttcctcggcgtggtaaattctcatgtgtagttgttgtgta

SEQ ID NO: 4030 - DNA, 955 bp, Avena sativa
cccggtgatggacttcctgcccagcatcaccatgggcgacacgaagctgagcggctcggcgatgacgcccatgaggaccagcttcccgtccatcttgagcagcgccaggtagggctccagcgggtgcttgacgggcacggtgtcgatgatgtagtcgagcgagtccgtggcggcggccatctgggcctcgtcggagctgacgaggtacgcgtccgcgcccaggtcgtccatggcctcggcgcgcttcttgttggaggagctgatcaccgtgacgtggtggcccatggacttggccaccttcacgcccatgtggcccacgccgcccaggcccaggatgccgcctcgcaggcccggggtcatcagaccgaagtgcttcagcgggctgtacaccgtcacccccgcgcacagcagcggcgccgcctgctccggcgccagcccggctgggatcttcaccacgaacttctggtcgacgaccatggcggaggagaagccgccctgcgtgggcctgccgtcggtgtagacgtcgttgtaggaccagatcttcttgttgcagtactgctccacgttggccttgcacggccggcagtcgcggcagcacccgacgatcacccccacgccgaccacgtcgccgacgacgtacttgctcacctccggcccgacctccaccacctcgcccaccacctcatgcccgggaaccatggggtacttggaggcaccaaggtggttcttggcctggtggatgtcagtgtggcagatgccgcagtacagaaccttcaccaccacatcttcaagccctgtcttcctgagggtgtatgtgtagggggagaggtggccggcggcgtccctggtggcccacccggtgaccgtcctctcggaggcgtcgacgctacccattctcttggcaccgagcgaagcaacgggaggtgtgagcgcgagagatgccgccggtgaggaa

SEQ ID NO: 4031 - DNA, 1260 bp, Avena sativa
gtcaaaatgtagcttctcataggtcactttgaggaatcactaaattacatgctaacagttcagcttctaatttgaaaagacttagaaagggcttttacattatcaacgctaccaaaatcaactcaagaatttccataccggtaaaaaacccactaatttacggcaaaacaaaagtaccgaacaaaaactacgattgtacaagcaataagcactgcctaatgatcatccgctgaatgaacgctcctcttctttgatgcatctcgtgtttaaggctttcgcaactcgagggcaataaccatgcacattttgcgcagcaaggtatcaccagaaaagcaagtggcgccctggcaaattggcaatgctggtcatggcaaaagtgcacagatgcagaattccaagtgttttgactccagtctgtgctgcctgctgctcttagcacttgaaacttgattgatttgatggttctctctgcttctcactggatctgacctgttgccgggatgaccggttggtgaactaagccgagaggcatcttcacgttgttggagttctttgctgctccgctgccatcgcagttgggttccaataagcgtacaagagagagaaagatttccattctggttacgtccctgtttgcctcaacagtaaagcgtgcccagattttacttttgcgtgcttccattacacctctcaggatggtcaatccaagtcctttgataaaatcagctatctctaagaagatgcctctatcctcgcaaatcatctccacaagcatctgacgaggtctgtcaagatcctcaacgacgattgggcatgtcatagactgagagccaacatcaaaggcccaggttgcaccaccttcaaagtagtctttccatacgggtccgttctcactgccaagtatcttagattcagtagaatccttgagcttgtctgcatgctttgtcacgctttgcaagaagagcatgtgcttaactgtcttctccaacaaagcatcaatgctacacttagccccattaggcaccatttctcggagctcctttatacgatcctgtatcagctgccgatcttttggccgtgatttagaactctctccaggtcgagatctctttcgatttgacttgctcggtgcatcgagacctttgctgttagaagctgatacactctcacatctcatgttctgaccattctcaatcaaaagacgtaactgagatttctgtgctccgttattctgggaaaggcaaccatcctcagtcttat

SEQ ID NO: 4032 - DNA, 1236 bp, Avena sativa
gcaatattcctttgatattccttcaaaatattactggatttatggttgggtcgaaatctgaagcaagtggaattgcgaaagctggagcaaaatggttatggcagtttcctgtgccaaggttcctaaaattaccataattgtcggtgggagtttcggtgctggaaattatggaatgtgtggacgcgcatatagcccgaattttttgttcatgtggccaactgctagttgtgacattttgtgaaacagttgttgatacttcctctatgaaatgttttgctgaaacacccaacaagaggaacaaaattaccatgttagctgaaccattggagaagggcttggcagaagatattgagaatggccttgttagtcttgactcaaggcagaaagaagttaccgacttctttcgccaacgctaccagtgggatgtgcttgcagcaaggtcaatatgggcttttggacccgacaagcagggtcctaacattctactagatgactctctttcggtcgaggtggataagaacttgttgaatgctgtcaaagattcaattgttcaagggtttcagtggggtgctagagaaggtcccttgtgtgatgaaccaattaggaatgtgaagttcaagatcttaaatgcaaacatcgctccagaaccattgcaccgtggtggtggtcaaataatccccacagcccgtcgggtggtctactctgcgtttctgatggctaatcctcgtcttatggagcctgtttattatattgagatccaaactccaattgattgtgtctctgctatatatacggtcctgtcgaggcgacgtggtcatgtgacagccgatgtacccaagccaggcactccagtatatgttgttaaggcatttttacctgtcattgagtcttttgggtttgagacagatctcagataccatacacagggacaagccttctgtgtgtcagtgtttgatcactgggctattgttcctggtgatccccttgacaagagcattgtcctccggcctctggaaccagcacctatacagcaccttgcccgtgagttcatggtaaagaccaggcgaaggaagggcatgagcgaggatgttagcatcaacaagttctttgacgaggccatgatgaatgaactggcgcaacaggctgcagatcttcacctgcagatgatgtagtttgaagaacagaagccatggttgcctcttctgttagatatcatcatggcgtggtctttcagat

SEQ ID NO: 4033 - DNA, 1026 bp, Avena sativa
ttcacgacctccgtcaacaccaccgacgggaagaacccacttaaagaggtgtccttcgtggtgacgacgtcctgtgcgccggaatccttgttggcgaagctgccggagaacgccgtcggcgtcgtgggtctcgcgcgctctgcactcgcgctccacgcgcagatcgcgcgcacacagaaggtggcgaaaaagttcgcgctctgcctcccgagtggtggcggtgccgctggcgtggccatcttcggcggcggcccgctcttcctcctcccgccggggctcccggacctgatggcgacgctggttggttacacgccgctggtcaagcacggtaagtcccccggctacttcgtcagggcggaaaagggcatcgccgtgaaccaggcgcgggtgccactgggcgacgcgccactcatcattgggctctcctcgacaatcccgtacacggcgctccggacggacgtgtacggcgcgttcatcaaggcattcgacgcggcaacggcggacagggcgagggtcacgccgtcggtggcgccgttcgagctgtgctacgagtcgacgcagctggggtcgacgctgctggggtacgcggtgccgcagatcgacgtgatgctgcagggcggcaagaactggacggtgttcggcggcaactccatggcgcaggtgaacgaccacaccgcgtgtctcgcgttcgtcgagatgaaggggaagtacaagcgtgccccgtacggcggaggcttgacggaggcgccggcggtggtgatcggagggttccagttggaaaacaatctcctggtgttggacgaggagaagcagcagctcgggttcagctcgctgctctttggcaggcggacgacgtgcagcaacttcaattttacctcggctgcttcttagctactttgttcatcacattgatctcttgtactcctagcaattgcgtacgctgattctcggtcttggcatctgctaagaaaaataaaatgaaattttcacgcactggtttaaatcatacagtgagttgactaaaaa

SEQ ID NO: 4034 - DNA, 852 bp, Avena sativa
taccagtatgggcttgtttaccatctacacatcaccaaaaagacacagagcgtgctggtgtattgcttgtcatgggtggttatctttgtgattttgatggtgatgaagggtgtgtcggtggggaggctgaagttcagcgcggagttccagctggtgttccggctgatcaaggggctgatattcatcacattcataaccgtcgtgataatcctgatcgcgctcgcccacatgacggtccaggacatcttcgtgtgcatcctcgcattcatgcccaccgggtggggcctgctcctggtggcgcaggccatcaagccagcgatcgtgaagctccagctgtggggttcgatccgtgcgctggcgcgtggctacgagatcatcatggggctcctcctcttcaccccgatcgcgttccttgcgtggttccccttcgtgtcggagttccagacccggatgctgttcaaccaggcgtttagccgaggcctgcagatatctaggatccttggcgggcacaagaaggaccgcgccacacggaacaaggagtagtaataggagtaaggtggattatgtatggttaatatgggtgtgtagcaaccagccctttgtatgcgatggaggagttggtacgtagagaagcacctattcctgcctgcacagctagcttattgttctgactggcatggctccagtggagaatcttgatttgtagtggtaaagtaattggtggtagttgggaacagaagagaaggcagtatcctgtcctgattaattagtagctccatcagctagctgactttgcctttctccagtccacaggaagcaaaattttgtcatgtcttgtgtttttcaaaaaaa

SEQ ID NO: 4035 - DNA, 657 bp, Avena sativa
aaggtctagctgaacctgtgcttgctgtgtatgatcaactgttatcgaatggcgcaattgtgccctcacttaatctgaagctgcgccttctgagatcagttcttgtaattcttcgtgaatggggaatgtcggtcattgcacataagctaggcacaacaactgctggggcttcgttctttttggatgggacatttttgctgaatcaaacagggtctttgaacaaaggcgttcgagataaaataattagtttggccaacaggtatatgactgaggtgaggcgattaaaccttccgcagaaccaaacagaaaatgtctacagaggtttccgtgacctagaggagaaattgttgtctccttattagccattctttatgtcttctcggtattgtaaagcatgggatgcacatttgttgttgtaccaagtatgggaataaagccaaagacatcttgattctactggacatgatctctcatatgctgtcatccatgtagtggatcttttgtgcaagaacccaaggctacccaggagggcatcacgaatcagattgtacatgcaaaccatcttttatttcttcagaagttcgcttggatctgcagaactgtttgcttcaattggggaaacagcagggtactgaatctgatctctttgtgacaaaa

SEQ ID NO: 4036 - DNA, 976 bp, Avena sativa
agaagcttggtgcagattttcttgttgcatcctctcataagatgtgtggccctacaggcgtaggattcttgcatggaaaatttgagatcttgtcatctatggagcctttcttaggtggtggtgaaatgattgcagatgtgttccaagacaaatctacatatgctgagccgccttctagattcgaggctggaactcctgccattggagaagctataggattgggggcagcaatagattatttgtcaaactttggcatgcagaggatccatgagtacgagaaagagttgggggcgtatctttatgagagccttctttccgttccaaaggttcggatctatggtccagctccttctgaaagtgatcaccgtgctcctttatgttctttcaatgtcgagaatattcatccaacagatatcgcagaaattcttgatctccagcacggcgtagcaattcggtccggccatcattgcgcacagatcctgcaccgtaccctcggtatcaccgcaagtgcccgcgccagccttcacttttacaatacaaaagaggaggtggacgtcttcatccacgggcttaaagataccatcgatttccttacttcccagcactagtacagctcagttagcacacgttagcttcctcgccgtctctcgtcatatgaagcgtgatacagaaaacctattcctgctactgtctctcggaggcttctcttgtcaaatcaggcacgggaaagtaagtttgtgtaatgctctcgcgccctcctgaagttttggaataagcatagattggccatgtagatcgctcgggcaggtcaattttctcattctcttcttgtttatttatttacatcccacttgtggcagaaatcctaaatctgaaaccaagtggccaagatccatgcaacttttgttgactcctgggacatggcatggtgctgctgcacctgcctgcaatgcaacctcttttttggctaaaaaaa

SEQ ID NO: 4037 - DNA, 955 bp, Avena sativa
acagctgcaacaggtgcaatagctcttatgcagttgcaggaagacttaaagaagcatctcagttcggaatgtaattacactgaggagcaacttgaagcttacatgcggagtcataagagtgttatggttgattctttatggaagcttaatgttgctgatatagaggcaaccctgtcacatgtctgtcagatggtgcttcaagatagctttgtgaggagggaggaactaagagcccgagctaaaggattgaaaacattaggcaaaatattccagcgtgttaagctcaacagtgaaggggaagcaccaacagtcaataatacaataaataatttggatgataatgtccgtggttctcctgattcatcaccaaattctcccagggtgcagccatttgatgcaaacccccaatattcccagagtccatatgtggaggccccgcagttcggcggcgcttattattcgtacttcccgatgccaaccgctccgcccggtgcgcagagggatctggtcccatgattcgctccatggacagcaatatcgcttctgttgggtcaacctttttgtacaatatcgcttctgttggtagatgatcacatggtcttcatttatgctagcatagtagagcaaagaagcagctgggttttttatcctactgttttcttcggttgtgtaatctaagcaatcgattaaaatcatataccgaccgcagcatccctgttttgtgtgcaggcgtgctgtgctgcctctgatgtcaaggcagtggcaaggttggcattgttgtatgcataaactatatcacatcattttatttttctatgggtgcataattgttttagcctatggcccattgtgcgaaacagagtcgtgagttgtattccttaaatgttgaggctagcagtgccagattatgtatataaaatgtcccctgctagtgtatttgctatgtctatagttg

SEQ ID NO: 4038 - DNA, 975 bp, Avena sativa
cgggatgtcaactaactcgagagatcttatcgagcgagaattagtcgcgtttggtcaaagtttggagaatagcttatgcaggttaccggcgactcctcaggcccttttggaggctgtgggttctaatggtgctacaggttcagacgcactcgcagctgcagaaaaacatgctgccatgttaactgccagagctggtgctagagatccatctgccataccatccatatgccgcatttctactgctcttcagtataattctgtctcgccaggagaaggcacagattctggcttagcatcagttttgagttcactggagttttgcttaaaaccttgtggttctgaagccagtatactagaggatctatcaaaagctattaatttggtgcacacacgaagaaatcttgctgagaacgatcgtgttttgctaaaccgtgcacaccgtgctcagcaagaatatgaaagagtggccaactattgtctcaagttagccggtgaacaagaaaaggttgtggcggaacgttggctgccagaactgagaaatgcagttcaagaggctcaaaggtgtttcgaggattgcagacgtgtgaggggcttggttgatgagtggtacgagcaaccagccgcaacaatagttgactgggttaccattgacgggcaaagcgttggtgcctggatcaacctcgtaaagcaactccacatggagatctccaggcgaacacttgccatgtcctcggcaggtgacgattaggggacagctgcttgccgccgcagctttttattctttggaggccttgatgatcggttaggtttccggccgggtgtatctactccgatagctttgtgccatatggtgttttgtaattgtgatacacatctttcttggtttgctttgtaagtaatttatcatgtatgtgtttttgtatgttttcatgggctaaatgccaatttgttacatagtgcaccgttgttctgctt

SEQ ID NO: 4039 - DNA, 1249 bp, Avena sativa
gaaacacaggcaactttcgcgtggggtggaactatgagcaaaaagaagggccagaagtggggtatgaacaactcgaataagagaatggctgatattggcaatcttgggaaaatagttggaagtaatactgaagttaaccaccttatgataaataataaggatgagggaaatggtttttgccacgtcagcaatcaaaatgtcaatgggagcaatcatgaggaagggaagactaccagtgaaccgttggacttcgatagactttaccccttaacacgacttccagaggagggagatcttattgtatatcggttggttgagctgtcttcctcctggtgtccggagatttctccttaccgggtcggtaaagttcttgtatatgatttgatatcaatgcgcatcattctcttgcctgttccggagtatccaatcatcacgcaggaaatgacaattgaggacaagttagacacgccggtggatatttcaccctacaaggaagatggttccttggagatcgagtactcttcccttattgatgtaagactactgaagggtagtgagccagtatctgcagctcctagtactcccattcgagaagcaggaaagaaaggcgaaccaacggtcggagaaccagttaccttggagaaaaataaaggcatagctcacagccagattggaatcttggtgccaaataacactaaagatccagaagaggcaccagaaaagaaaaataataaggtttgggaggaaagcagcgagatcccaaagcctgatgaagttcaggagaatggctggggaacttggaaaccaaacggtagcacgtcggcctggtcatatagagcacaaagaagcagcgctcttggcccaacacttgcccttttgagaggcaaagatggcaagggaggcaaacctaaacctcccagtcggaagtatgccaggtgagatattagggaaatgatgataattctgtatttgatgtttggctgaacgaaccgaaccttgatcatgtacctaggactggggagctgaatgtttctgttgcaactcgtaagtattggtgactgcccaatgctgaatgtttctgttgcaacttgtaagtattggtgactgcccaatgctgctttgacagtggtactcctctttcttagcgatccaccctgcggagaactctttggttgactttctctcttttttttgattttctctgacttgacacagcgggtatatattctggaatgctatctattcccac

SEQ ID NO: 4040 - DNA, 1005 bp, Avena sativa
gcaggggagccggcgccgccattggaggggaaggagatggagctggtgtcctcctcccgctccatgaggccccgcctcccctccctgaacgatcctagttcttgttcatttgctcactttctcgcggttccagcaggattggtcgctccgtccaggacggtattggcagctgcgaagcgcgacgggaagagggggttagtatgtgtcttgcgtggcgagcaaggtggatgcaatggtgagatgaagggtgcggtggaggggagaatcaggaggcgggcagctcttgctctgctgctggctacaccagcgctgtcggtatcattctcggcccatgggaagaccaaaagcatgaccccctacgacgaaaggcggttgcttcaacagaacaagaagattcaggaagccaatcgtgcacctgatgatttcccaagcttcatcagagaaggttttcaggtcaaagtagtgacacctgacaactacataacacgggactccggattgatatatgaggatgtcaaagttggtacaggcgattgcccacaggatggtcagcaggttatatttcactatgtgggctacaacgaatcaggacgaaggatagatagcacctacattcagggctcgcctgccaaaattcgtctaggcaacaaatcattggttccagggtttgaagagggaattcgggacatgaaaccaggtggcaagagaaggcttattatacctcctgagcttggtcctcctgttgggccatcgacgttcttcagcgcgaagcagtttgaagtattcgatgtcgagctactctcggtgcaggactgccagcggaggacgataggattctactctgatgttgtctgcacttgatcatctgatatgttagccgttgttgtacatgccaacttaaaaaagaaaggtataaataaaacgaagaggtagagatgttgtatgtgtgcaagaaattgttagctgctgttgtacatgccaagtccaaatgccactatgccagtg

SEQ ID NO: 4041 - DNA, 884 bp, Avena sativa
gagcagcagccattgtcatgagggcaataaggaataccgtagatacaggaaggacagttgtttgcaccattcaccaaccaagcatcgacatttttgaatcttttgatgagctcttcctgatgaaacgaggaggcgaagagatttatgtaggtccactaggccggcactcgtgtgaactgatcagctattttgaggctattgaagatgtcagaaagataaaagatggctacaatccttcaacgtggatgctggaagtgactagtgcagcgcaagaacagataactgggattagcttcagccaagtatacaagaattctgaactatatcggaggaacaaaaatttaataaaggagctaagcacacctcctgaaggttcaagcgacctatcctttccaacacagtactcacaaaacttcctcactcaatgtttcgcttgcctgtggaagcaaagtctgtcatactggagaaatcctccatatactgcagtcaagttcttctatactacattaattgccctgttgtttggaacaatgttctggggcattggcagaaaaaggcacagtcaacaggacttgttcaatgccatgggttccatgtatgcctcagttttgttcatgggagtgcagaactcggcttcagttcagccagttgtggctgttgagcgcacagtcttttacagggaaagagcagcgcacatgtactcacctttaccatatgcactgggacaggttgcaattgaacttccgtacatctttgttcagaccttaatatatggggtgctagtatatgctatgattggattcgagtggacagttgccaagttcttttggtacctgttcttcatgtacttcactctagcttacttcacgttttacggaatgatg

SEQ ID NO: 4042 - DNA, 955 bp, Avena sativa
gctaaattgatcccagaatgtcgatgggataatgaaaactttgtgatgctatgccctttgcatcagtcttccaagttgcctaaagaaacttctgagccacaaaagcaatccaaaaggacatcagcaccaaaatgtccatctcaagtaaaatctagtgaagattgtagtaataactggaaatggccatctggatcaccacataagtgggttctctgctgttcagctctttctgctgctgagaagggagttgtatcagaatttgctaaattagccggtgtgcctatttccacaagctggagtcccagtgttacccatgttattgcatcgactgacctctccggtgcttgcaagcgcacgctgaagtttctgatggcaatcttgaatggcaaatggattgtctccatcgactgggttaaggcctgcatggatcacatggaacctgtagatgagcagaaatttgaagtcgctactgatgttcatggggtcacaggaggtcctagattaggaagacagagagtaatcaacaagcaacctaagctgttcgacagcatgcggttctacctccatggcgactacaccaagtcctacagaggcttcctgcaagaccttgtggttgctgctggcggcactgttctgcaccggaagcctgtatcgagggaccagcagaagttgctcgatgacacctctcctgtcatggtcatctacagcttggagaatcaggagaaggcgaagctcggtgatgatgatcgccacaggcaggctgatgatgctcaggccctggcctgcgcctccggtggcaaagctgcgagcagtgcttggataatcgactccgtggcagcctgcagccttcaacctctttgagctcgaagaagctctgctgctggccaactgttcacatgcttgcttcgggtgtatcgtgggttaagcagtggtataatcttaggatgggagagta

SEQ ID NO: 4043 - DNA, 1192 bp, Avena sativa
gggcaagggatttccaccttggatggttccttgagcccattatccatggtcgctacccagactcgatggtcaagattgtcgagcacaggttgccagccttcagcgccgacgagtccaggatggtgaagggctccattgactatgttggtatcaaccagtacacttcttactacatgaaggaccctggggcatggaacctcacgccagtcagttaccaggatgattggcatgtcggatttgcatatgaacggaatggtgtacctattggatctcgtgcaaactctgactggctttacattgtaccatggggaattaacaaggctgtgacctatgttaaagaaacatacggaaatcccacaatgatcctttctgaaaacggaatggaccagcccggcaatgtcagcatcgccgatggtgtgcacgacacagtaagggtccggtactacagagactacataactgagctgaagaaggcgatagacaatggagcacgggtggttgggtactttgcttggtctctgcttgacaacttcgagtggaggctcggttacactgcccgtttcggcatcgtctatgtggactacaagactctgaagcggtaccccaaggactcagccttctggttcaagaacatgctctccaagaagaagaggagctaggattgtgaacaacacaagagagaaccagttgattcagctttctgctaaggtcaacagagatttctaggccgtaatgcaaagcttcttccctttccttcacgaaagacgaaaagcattttgttatgttttctagaggagggagccgaaaagccgacgactaagcttttttattctccaaaaagaaaggtgataatcaagccgtaatccataggagagcagcacaccattattccaagctcgggcccaaatgatataggctgtttccacatacggaaatatacatgggcctggcgctctaagcagcaattcaaaacatttcatgtcactctagttttgtactgccctcaagaaaaaaactccatctttgtagtataagtttgatcgtctaccgtttttcatttgaatttcggaggaacattcatatgcagaatttggagtgagagatgacgattcaggtgatctttgacaacttttagttttatatcatggatctttggtgtatccgtgtgaatgattctgagtaatgaagttgt

SEQ ID NO: 4044 - DNA, 827 bp, Avena sativa
tccaagacttcaaatgcaaatgctcaaaatggcgcatcttcatctggctcccaggggaatctgtatccagacattgctctttcaggtgtgccaatggatgataaggttggcaacagtattgggaagcgccttgccaacatgctgcagtcgtacccagccccacctgcaatggctgaagaattcccgccagccaccggaaaatcggttgctgcaatgagcgaacctagcttgattcgtgtcactgcaggctttgtccaagttggaggtctcagtattactggtagcgaccgctggcccctacagaagaatggaaacttcagtgtacacctttctctcacggtggagagcagcgtgtctgcaaaatccattggcttcgacgaggagccagccacacagatgaacaccgtgccctcggtgctgcgtggtggcctgtaccttttctttgtatcggccatgatcctcgtgttgagtttcaaagtagggtcctgtatctacagcaggtaagttaaggcgctgttttattttggttttatagtggtgtcccctcaatgacaatgagggaagaacagcgcaagaaggttctcttttacgtgtttagttggcatacgaatctgacttggtgaaaaggtatagtagcaataattcttgaactggagaaagcacccttttggtgcctgagactttgtgcttcatttaggacctgtaatctattctttttatttggttgttgccacccagaggcttggagcccctaacgatgtaacgttgaatataaaccgtgatttgatccccgtgttgtttgttgtgtctgtttgtaagcactgatg

SEQ ID NO: 4045 - DNA, 809 bp, Avena sativa
agtattgagtctactgaaggtcaggaactgtcaacaattattgatccctcatgcaagatatgtggaactcctgaagaggatggcaagaggttcctcatatgtggtcacggccactgtccatacaagtactaccacatttgctgtctcaagtctaaacagatcgctagcgatgtgcagcaggataaaccgtgctggtactgtccatcgtgcctctgtcgagtttgtcttcgcgacggagacaacgacctgaccattctctgcgatggctgcgacgaggcttatcatctgtactgcataacacctcgccgtactttggtacccaaggggaagtggtattgctcatcgtgtagcgtagagagagcaaaggcggggatgagacggtatgagaagaagatgctgaagcaccactttaaggatgatgcggcttggctgcagagaagaaacttcgcagctgtggacttactactctctgccgcggagaagctgagcgaggatgagcaacaggtgactcctacagatcagtagagagagcgtagacatatgcagcatccctgcactgcatcctgtcctagctgttcttcagttagttctgtaactggatttctgttttatctgccatcagctcagactggaaagttattctgtttgcaagtgccttttctctccgcatcaaatcgcatgcgggaaattgagcggcactagtatcatcagtttctgatcaaagccgcactagtatcatcagtttctgatcaaacaaacgaggtgctcagaaccagaatggcgtgtgattcttggtagaggatatgcat

SEQ ID NO: 4046 - DNA, 966 bp, Avena sativa
gtggatcataatcgcaacataatcttcagacgcgaaagagatgcttgccagtgtctcgctaaacagttgtgtttaccgaccccgttgacattgaaattcaactaaaagtgaagggcacaacagagcaggaagataaagatttgatctccaaagtgttggtatacggacgtgattttggaaatgataattctggcgctgcaggtcaccttgtgcgtaccacttgctccagccagttgtgctcactggagctcacctcagcaccaattgccggagcggtcgaggccaccatcatctccattgaagtgatccagggccgatggcccaaaaacctgggaatccgtgtcgtctccggtaccgccggcacagacgaggatttcgtactacttgatgctcgggacggaaggtttcgggttgatctagccgatggtctcatacgccattccagacacattgtgtgtgtggaacaagatggaggactgaaactttccgtagaggcttacaaaagaaacggagatttctatgaaggatctgccgtcacagtcttgccacccaagagattctccgctagtcttggtatatgcaagcttaacttctgcactgttcgcttcaccgtcgcttggtcctgcctcgccaatgtgggtgatctcaaggcccatggtatctgatgcaaccaaccgaccattgcttgtgtcgtgtggaactagtgtacaagataccatttctatgccctctctaatgctggttagctgtatctacttagcgtttcgagctgtatgctaagtgatgtagaactagagtagttacgtagtatcgcaaacaagtcatgttatatctgtatccagatcaacatttatgttatgtttggtaaagtgcccaggccactatttgtatctctgcaaggaattcgtagtacaaacagcagtactcacgcagccatatgggcgatgcttttagtaaaaaaaaaaa

SEQ ID NO: 4047 - DNA, 1036 bp, Avena sativa
atgtctatcggaaacacagaagcagttctcaaccaaaactgatacattgtacagcgatactcatcatgcttcaaaatccacagcagggtttgcttcaacgtcaatacaaaaggaccgtggttgtccagactcagcaaaaactgaacgggtagtgtcatcatcgattaaaagagaatcaagctgctgtgaaggaaacgaaacaatcaacgtgagttcggagcatcaaaattcttattccaaggcaacttgcaccagcaagcaagaatggagcataccaaaaacatcgagcatgaatttagatctagttctttttcagataagcagaatgagaaatccaatttccaaggctctaactgagtcaccagtatgctcagatccaagtgacaagtggctcagacgcttgaaacgtgatgtttcagatcctcatgttccttgttccaagcgacccaagtctggagacagtccaactcctggaggagcatgtaccatgtacagacaagtgcttgatcacaacagggatagtacttgcatgataaaacatgtcaaggaggacatactgatgcatgatacactgctggaccaacaaaaccaagacgggtctcccatttcagcaaagagtcttaatcattggatagggaggtggtgccaaggtggcacacctaattttcatggaagtttgagtctaggaaagcaatcgcgcaagtctaatacaccacctgattgtcttgaaggtcagtttccaagcatcgcagcgatggctatgatggggcgtgtaatgaacaagctccgcccatgtgaacttgagaagaagggtccttctgtagtctggaagacagatgggttgtgaaatttgcagaagtgcctatgtggctgcattcaggctgaccatcgtcggttaaaatctgcagtcaaggatttaaattgctacactgatcacagtgtgtacgatcatagcctatatagaagtaaaagatcgaagtagtgaatagcattttcaacggagaaaaaattgtgtggttttatcaattgcatagtg

SEQ ID NO: 4048 - DNA, 730 bp, Avena sativa
aaaccacaaagacgttggtggtctacgaagattggagtgacgagaagaaccagaaagttgtcgaggagggagacgctccagttgaaatggtggaggcagttgttgcagatgatgatagaagcataaatgatgttgttttggcaaatgagctacaggtagatggcaaccaagagatcaaggaagatgaatcaagtataggcgatgatgagatctcaacggttgctgatattgcttctaccctaagggaaccagcgaatgcatgtgaagctgaccaaccagagtcagtgatggaggaacaggagattcaggatgagcttcgtgatgaagtagatgtggcactgcagaatgtcagcgccacaacgtatgttgatgatgcttatggtgaaaggactgacgacgacaatatcttgtccaaggatggtattctggttagaaatgagtggaccagagcttttgaacgtgagttgctttggggttggaaggccctgcaacagcttctgggcttcaaaatggataatacaacgtgaaagatgcatctggtactgattgctatatatatatgcactggcacaaggctgtctggtgatgtgccgctcctttgaaggatgtagtagtagagaacactagtagcaggtagcagctgctgggagttgctgcgacactctgttgtgtgtacatagtttcttttggagagatgctcgtatttggtaagttatcatagctatcatca

SEQ ID NO: 4049 - DNA, 1004 bp, Avena sativa
aaggccggaggttgtgctgtgctgatccatactcctctcctctcgctcgatccgttcgctccccagtcctctcccgcaagcaaagccaaatcggccgccgtctactcgcctccgcttcctcctccgccgccgccgtcggtgcctctctccagatcccgaccatggagggaaatctcgacgcggcgatcgagtcgctcctgaacgtggagaagcagtgccggctcgccggcgatgtggccggcaccaggaaggccgccgtcgacatcgtcgagctctgcttcaaggacgccaactggaagacgctcaatgaccagatcgtcgtcctctctaagcggaggggacagctcaagcaggccattactgctgtggttcagaaagcaatggagtacattgacgtgacaccagatgttgacacccgtattgagcttatcaagacattgagcagcgttgctgctggaaaaatatatgtcgagatagagagagctcgattgatcaaaagacttgctaaaatcaaagaagagcagggaaaaatcgacgaggctgccgatttgatgcaggaagttgctgttgaaacatttggctcaatggcgaagacagagaaaattgcattcattctggagcaggttcggctgtgcctggatcgtcaagattttgtgcgcgcacaaattttatccaggaaaattagcccgagggtcttcgatgcagatacaacaaaggaaaaaagaaaccaaaggaaggtgataatatggttcaggaagcccctgcagagataccttcactcctagaactgaagcgcatctactatgaactgatgattcgctattactcacacaacaatggttacctggaaatctgccgttgctacaagtcgatttatgaaattccatcaataaaagatgaccaagcaaagtggataccggttcttaggaagatctgttggtacctggtgctggcacctcatgatccaatgcagtcgagccttctcaatgctacactagaggata

SEQ ID NO: 4050 - DNA, 850 bp, Avena sativa
ctgcacctcttccctggacgcctaggctatctggttgacggcgatgacctcccagttgctgattatgtccttgtctgttggctcatcgagcgcacatcgcacccgatcagaagaggagccttggcaagtgcccagatgctgaagtgggagcggtactcagcttcagtcatcccaccattcccaacttcaagcatgtcaggatcgttccatccaccaggtccagcgtaggcggcccatttgtcgttcaggtccgcacgggatgtcatgctgtcccagttgtcggcgatgtcaccagttgtcctccagctattacccatgccacctgcccatgtagcagggttgctgtttccccattcacagagtgagaagaagatggtcttcccgtatttcttcatggcgttgctcatcttagtatatctttccaccacattcctgccagcatcattgcagttgtcatacttcagataatcaactccccaagatgtgaaggttttcacatcttgctcttcgtgatcgagtgatcctggcattctgttactgcatgttagtgtcccagcatcactgtaaacaccaagtttcaacccttttgcgtgcacataatctgcaagcgccttgatgccagaggggaatgattgcttatttggaaccatgttaccctggtaatccctgttctgctctgcccagcaatcatctatgttaacatatgtatagcccaatttcgccagaccagtgctgatcaatgcatcagccgtctccctgatgatctcctcgttcaccccgcagaagaaatggttccagctgttccaccccatctgcggcgtcctgcccaggccgttctcggtcgtcttcc

SEQ ID NO: 4051 - DNA, 699 bp, Avena sativa
gctgctgataacaagaaactggaattagctcgctctgggaatgatgaaagattaacgacgttacgcaactatcgtcgtgccaaaggcttatgcttcaaatgtggagaaagatggggtcaagagtatacatgtccgaccacggtgcagatgcatgtggttgaagaattactggcaatgttctcacaagaggagttaactggttctgatgctagtgaattgtttccaatggaatctgaaatcgcatgttcgatctcaatacatgctatgacagaggctctgacagaaaccaagggagtaattcaattacatgcttacattggtcagcatgacgtgctcattcttgttgattcaggtagctccacttccttcatcaacaaacagttggctgacaaattaccaggcgctcaagatctgcagaagtcatgcctagtcaaagttgctgatggatcacaacacaagtgtgacaaattcattccctcctgtcaatggactactcagggtgctacttttcacactgatctgaagatcttgccactgggtaactttgatgcaatactaggtatggactggttagaagaggacaatcctaatgtggattggatcttgaaaacattgcatattcaatctgagcaaggcgacattcatctccacggacattgtacaacaaaagctcagtgttcagccatctctgacaaaaaa

SEQ ID NO: 4052 - DNA, 938 bp, Avena sativa
aaggtgctactagtgttgaaaaggatgctcagcagcgtcctagggaatcatctccacgaagaaagccaccttcacctccccgaaagcggtctcctccaaatcgtcgtgctgattctccgattcgtcgtcgaccagacccatcccctgtcaggcgtggcgacagaagaccaggatctccaattagaaggcgttctccttcaccgcctagaaggcataggtcaccaatgcggaggggtcgtggcagcccttcaccgcgcagacgctctcctgggcctcttaggcgctcacctgggcctcctagaaggcggtcaccacccccaaggagactgaggagccctccgagaaggcccccaccaccaccgccgcgtcgtcacagtcgttcacctcctcctcgccgccctcttcactctcgctccagatcgatttctcctcgtaggggccgaggacctccattgaggcgtggaaggtcagattcatcctattctgcatcacccagtcctccaagaaagggaccaagaagagtatcaaggagccgcagtcctagaaggggtcctagaggaaggagctccagtggcagcgggagcagcagctcaccttctcccaggccacgcaagtagaacttcgtgacatgtgctcctggcaggtaagacttcttttctcttggcaggtaaaactggctgtgagctcaggtggtgattcgagggggtgccaacgatgagtgcttctgttagatcagctggcttagcattgctgtgctaaagttggttcctggaatttgtactcggagatcacacgctctgcgatgacttgtgtattgtttgataatactcggtactgaatgtacttttaaattctgaagctgttgctctcctgtacgaatccgaatatgaatattggtatggcacatttgaatcgatccttgtactagttgatctgca

SEQ ID NO: 4053 - DNA, 1051 bp, Avena sativa
cgccgcccgacccaagacctacgcgccctccgcgcgccgtggtttaggtctcctccagcgcgtctcctgcaaggcgaacaccgagcctgccatggcggcaatgcgtcgaacacgtcgccggcgccgcccaggtggcgcgtagcagtctccgcggcactcgccgccgccgtagtagcggcgatgccggcatacgcagatctcaacaagtacgaggcggagcagagaggcgagtttggcatcggttcagccgtgcagttcggcaatgccgacctcaaaaagactgtgcatgttaacgaaaacttcaggcggggaaacttcacatctgctgatatgagggagtcagatttttagtggttccacattcaatggtgcttatatggaaaaggctgttgcttatagagcaaattttacaggtgcagatttgagtgacactttaatggatcgcatggttctcaatgaagctaatctcacaaatgctgtgcttgcacgcactgtgcttacacgtagtgatctcggtggcgcaaccattgaaggtgctgacttcagcgatgctgttattgacctacaacagaagctggctttatgcaaatatgcaagcggaaccaaccctgtaacaggggtcagcacccggaaaagccttggatgtggcaacagtcgccggaatgcatatgggagcccttcctcccctcttttaagtgccccaccacctaaacttctggaccgtgatggtttctgtgatgaagctagtggtatgtgtgatacaaagtgaaagaggaatggtcgtgtatagggtgcaagttgagcatagcattatgtgctgtatagctattgaagatgagctgaaagacaaatcagaatggttcagagaaacctgacgtttcgtcctcttttcccgagagttgtaacatttcaacggagtcaggtaatctagggatggtagataaagtattgatactgaataaatgtttgatgccttatgtaactatgtacatgtattatgaatatatgaagatttgtagctagtaaaaaagtgtccatgtcttacaaaaaa

SEQ ID NO: 4054 - DNA, 1040 bp, Avena sativa
gttctccatcacttctgcacctggagatgactacctgagcgtgcatatccgcacactaggtgactggacatctgaactcagggacttattcggaaagtgttgcgaggcacaagttacttccaagaaggctaccctttcaagacttgaaactacagttgttgcagactctcagacagaggacactaggtttccaaaggtctatattgatggcccttatggtgcgcctgcgcaaaattacaagaaatatgacattcttttgcttgttggtcttgggatcggcgccactcctttcatcagcatactcaaagatctcttgaacaatataaagtctaatgaagaggtggaaagcgtacacggttctgagataggcagctttaaaaacaatgggccagggagagcttacttctactgggttaccagagagcaaggatcatttgactggttcaaaggagtcatgaatgaagttgctgacagcgatcacagcaatgtcatagagatgcacaattacctcaccagcgtgtatgaagaaggcgatgccaggtcagcattgatcgccatggttcagtcactccagcatgccaaaaatggtgtcgatatcgtctctggaagcaagattcggacacattttgcaagaccaaactggagaaaagtgttcgctgatttggccaacgcccataagaattcccgcataggtgttttttattgtggatctccaacgctcacaaaacaactcaaggatctttcaaaagaattcagtcagtcaaccacaactaggttccatttccacaaggaaaacttctaggaccgtcccagaagaaattaaagagattgcagatatacttgtatagggaaagaaatatgatatcattcgcatagtaaacatagttttacaagttttgctgtacgctgggttgtacaaagtacattgaaagctagtgtcaccagcatacatagaccggaatatttagagacatctatattggaacagtgagactgattgttagaataaattgagttccaggtgttgctccttgcacacg

SEQ ID NO: 4055 - DNA, 991 bp, Avena sativa
gcgcccttcttcctcctcctcatcctcttgctggctgctggctcgggagctgtgccgcaacacaagaggattgtcagagattacgatactcttgatgttgaaacaattgaggtcctagatattctcccaatcgacaaggatcaaattatgtctagcaaaattcctgtccctgctaagaggggccacccagtatgctcaacttgtgagaacgtcttaaataaagctgtaagttatcttagtgagaaagaaacgcaagatgatatcatggagatccttcatggtgcttgttctcagacattctccttagaacagaagtgtgttgagatggtggactcctacacaaatcttctctttaccaaggtcagcgagatcaagccagatgagttctgcaaacagtatggtctctgcagggatgtagcttttctctctgtcgcgaaaagcgaaagcacttgcacattttgccaccagctcgtcgatgaagttctatccaaaatgaaagatcctgatgcacagttcgagataattcaacttctaatcaaggagtgcaacaaggttcaaggccatgtccagcagtgcaagagaatggttcttgaatacgctcccctcatcctggtcaacggcgagaaattcctcgcgaagaacgatttgtgcacgcttatgcaagcatgcgacaccagcaaaaagacgatggtcagatcgttcttggatgggggcttgcggagcgatgtttgaatgcgagagacacgcactgcgtgtagccatgtagatgtggtgaaaacagggcgaccaagtggctgttgtacatatgtcggccaaatggtggctctgttctcttgcgcccttgcacgaagagatgatgcaacactctgtcaagctattgtgtatatgcattcctgctaccgtatgaaaaccaacaaatttcataccttctgtggagtgaattatgattttgtggcaaatatatcatcaacagataactttgtgaattaaa

SEQ ID NO: 4056 - DNA, 759 bp, Avena sativa
gtttatcgcattgtggtaaattaacagtgatgtggatagtacattttggggtaactcaattttagcatatcctatctgctcaaagcacagttacaatgtcctgatcctataactttatgtgactgctatgctgttaatcttcatcagaagctaaccttgtggtttctactttgtactttagatgagaatgtaccatataactgtcataacttctacaacattgcaccatttaccctgagtacagatggttattgacccatgctatttggtacttactatgattttggcaggcacaaaatagtgatagtcgagggaaattatttattactggaagaaaatatttggagggagattagagacttgtttgatgagaaatggttcattgacatcgacattgatgtatccatgcaaagagtgctccagagacatattggcacaggaaaagagccagatgtagcggcatggcggatttcatacaatgaccggccgaatgctgagcttatcatggagtcaagaaaggctgcagatcttgtaattagatcggtggacttctcatcctagactccatgtttctgattagattttctgtaataatagttgtcctatggtaatctttgtacatataataagttaatcgccctgtttctcaacatggcgattctgttcatgtaataagctgttccttcataaaagaatagctcaataaatgatacccttcaagtatttatcaaataaatctaattttcttattctagaaaa

SEQ ID NO: 4057 - DNA, 854 bp, Avena sativa
taatgtaatatatctatgtgcaactcatggtaataatccctatgtatttggcttagaagtgtatgttttatgtagttattatctgtgcgggagcgggcttatataactctttgacatgtatatacatttggtatatgctttgctgcgagcatttcatagccctgttgaagatttttgatgcataatcatgtttactttcataattattatatttttggtttatgccttcatcacaggtcacaagtatcagcatggaaggtgttttagtaggagaagatctaaatggttgtgcttttgtgtacggctcattaagttttgttgacaaagtgtcctgtggcgtagctttgtatattctggagtcatatcaaggaagtaccaaggtcagcgtgaatcaagaattggcgtatggctattcagttacgagactcggtttggggctagttccagcggtctgttcgctgctttcagcgatagtagcttataccatggacctcccggacactcggccaagacctctactggagcctcttcttgaataactcttgctcgtagcagttgcactgcaggcctttgatcatccatcctgtacatgttcttggagcttctaacaaccttatagggcacttgtgtgagcaaattcagagacatgatcaattcactatactgtacagtctggataaaatttagacgacggacagaggagggtactcagcaagtcgttgggtagaaatcaaaagtagcacaaagtagaaacctgctaatggtcatgtgtgtaaattaatctctcatgccttgtaactgcaaatgtagcctggttacattgttgaagaaaaatgcaaagcttgtatctatat

SEQ ID NO: 4058 - DNA, 1095 bp, Avena sativa
gaggctcagcgtgcaataaatgcagctcatgtggaagctggaagtgctgagaatggtatagggctggtaaagctaatgggtcgatacagtggtttcatcgcacattatgccaccctagctagcagagatgtggattgttgcctgattccggagtcacctttctatctggaaggtgaaggtggtctcttcaagttcatagaaaagcggctgaaggagaatggccatatggtcattgtggttgctgagggtgcagggcagaaacttattgccgaaaacatgaagcaaatggggcaagatgcttctggcaacgcactgcttcttgatgttggtctttggttatctcagaagataaatgagcatttcaagaaaaacaagacaaccataaatctgaagtacatagatcctacatacatgatacgcgccattcctagcaacgcatccgataatgtctattgcacactgttggctcacagtgtggtccatggagccatggctggatacaccggtttcaccgttggccaagtaaatggccggcactgctatattcccttttacaaaatcacggagaagcagaacaaagtctctataactgataggatgtgggcgaggcttctctcctccaccaaccagccgagcttcctcagcaagcaagacgtggaggatgccaaggctgaagacgagagagcagccaagctcttggacggctcgccttccaaccacaaggcttgagataatgtttgttgcatcttccaactccagtgctgtgaagtgagaccaccacggctactgatagctatgtgcagataaattagtacgtacagtactcactggcagtttctgttagctatggaaaaccatgttttagttcttcttccattcgaaattccagtgcttaataatcgtgcacagttggctgggaaattgtattcgcagctttgactttttcggtgacttttcggggtcctttctgtgtagcccagggttcacgtcccactggcgggagaaaaaaagggtcaaatcttggcttgttttagattaccaatttgtgaataaaacaagcattcattgtatcaatctagactacttccaaaaaaa

SEQ ID NO: 4059 - DNA, 705 bp, Avena sativa
gcagaaagcaaagcagaagatggtctttgtgatgaacaagctgatgtggctcgcgtgcatctgcatatcagcagccttcatagcattgacctacgttgtcgtgggccgcaatgatgagtggttggcttggtgcacgatggtgatcggcaccgtgattatgctgggcactattggttctatgtgctactgcatcatcactcacaggatggaagagaagaacctgaggaggatcaagaggtcctccatgagccaatcatggtccaaatcttttgactcggacaccgagctagaactgaccagtggaaacaagaggatgtacgctctgtaggatgatgagttgatatcagcactcgcgcccgagtcatgtatatatcgaagcccgtttgcctgaggtgactccacagcattcagcggacttgactcgagatacatgtagtaggcctaggaacatggcagctgtatctatctatgcgactgaagcctcctcgcagaaacagagatatctgaatgaaggttctgtgtagactgtagactggttccaggcagccactttttataggcactatataggagtatcagtgaagcaagatgttttgctcttgtagtcttatgcttaccactgtggatgatgatgatgatgatgacaaacgatacaattatatacactactagtatagtagaataaatttacattttgtacaaaaa

SEQ ID NO: 4060 - DNA, 1172 bp, Avena sativa
ggacactccacaccccaatcgccgacggacaccagaatgtcggcgatgctgggggcgcggctggacctcgcgtccttcctcctctccccgtcgccctcgccctcgccctcgccgccgtcctccaccctccgcgtccggccctcgctctccccagcggcagcggcgggcggggctcgcttccacgccccgcgggcggcggcggcggcgaccgcggtctccgtcaaaccggtggaggtggcgccgctgtccgccgaccgcacggccgtccgtctcgggatcgccagcaagggccgcatgtcagacctaacccgagacctcctcaagagctgccagttgaccgtcattcagtcgaacccgaggcagtacattgccgacatcccgcagatgccaaacttggaggtttggcttcagaggcccacggatattgttcgtaaactgtgttcaggggatcttgatcttggcattgtgggttatgacataatcagtgaaatcgggcagggcaatgatgatctagttattattcatgatgctctcgactttggacattgtcacttgtccctagcggtaccgaaggaaggtatttttcaaaacataaatactctagaggagttggtaaatatgcctcaatggacagaagaaagaccaatgcgggttgttacaggatttggatatgtaggtgctaagttcttgaaagaaaaaggtttcaagcatgtttcgtttctatctggcgatggtgctcttgagtcatatcctgctatgggcatggctgatgttattgtggatctcgtgagtagtggaacgactttgcgagagaataatttgaaggaaattgagggtggggtaattttggaaagccaggcagcacttgtagcaagtaggaaatctttgcacagacgtgaaggtgcattggagatttcacatgagatgcttgaaagactagaggctcacctcacagcgtctggcaagataatggtaacagcaaatatgaggggcaatagtgcagaagaagtggcagagagagttctcagccaaccatcattatgtggattacagggcccaactataagtccagtgtattgcagtcttgatggcaatgtcgctgtggactactatgctattaatatagtagttccacaaaaatcactttacaagtctattcagcaactgagatc

SEQ ID NO: 4061 - DNA, 987 bp, Avena sativa
tgatattcgaggagatgggaggtgacccaactggaatctcaatggtgaaaagaaccactggaagtgtctgtgctgatgtctctgagtggcagccatcaatgacgaattggcatacgaaggactacgagaaagctaaaatccacctacagtgtgatcatgggcggaaaatagctgaaataaaatttgccagctttggcacaccgaaggggtcctgcgggagctactcagaaggcgcatgtcacgcacacaagtcgtacgacatatttcagaagaagtgcattaatcaagaacattgtggggtaagcgtagttccagaggtatttggtggagatccttgccctgggataatgaaaagggctgtcgtggaagttacgtgcggttgaacggcacaaccgtttgggctctcatatgaccttgggtatgtccgactgcgccatagtccaaccaagtccatacaggcttctggcaaagagttgagtcaccgtgacacactggctgctagaagttacagaaattagttgtacgatagagtgaatcatcaacgtatgtatgtacagtacattagtctacacaagaattgactctgtaggtgcgaaaaagggttgtgaggctctagatgccactggtctcgtttggggagagcacagatcgagactctgctgaatacctgagtccatatgtgcaatggcttctggattttggaggaggccgtgcgatggttcatttttgcttcaacgtgcaaggacataccactcattcatgtactgctatgtttattattaagtacagtaccattccctcggatccaaattaatgttctcacatttgtctagatttagatgtatttagtcatgctaaatctgagaacattaatttagatcagagggagtagtaaaaacaggatactgtttagatcattgctatgttctgtccttatcatgtactccctctgtttagaaatataagacgttgggagtacgtatacaa

SEQ ID NO: 4062 - DNA, 882 bp, Avena sativa
tagagaagctgaagctgaggcacaaggagcacatcgccgcctaaggtgagggcaacaagcgccttctcacaggcaagcatgagactgctgatatccgactgtgtccgatgatccatcgacccggagaatcgtcagcttgcatgtggcggtcttgatggtgatctcctgcggtgttcctccccgaaggctgctggcggatggacggccctagaaggattggtctgcgtgcctggattataattccttaatttgcaccttctcggtcgcaggatcctcacggtggatggctagccgtggtaaccaagatttaccaggaagataaattgcacgttcaagtatccacgccttcagctggggtttcaccaacggtggcgcgtcaatccgggtcagccgcgagacagagtagaacggcaagggatccttcgagggtccatgccgatttcgttgctctccaaggtactactccactgccatcaaattcaagcgccacctcgtcctcatgctcgtcctcaaagaagaaggcgacgacctcttcggcatagcggcggcgcacggcaagggagctgcggagacaggggagaacgacgacggccgccaggtcaagcctccgagtccggcgtccgcgagatcctgcgcggcgcgatcaatcacctgcgtgtccgcgagctcggaccgccggctccggcgggagtctcgcgggatctctgcttgcctccggcgcgggcgagggcaccgggacagcgatgggccagtcgatcgacggaggcagcgatgggaaagattgcagtttggatttcgatttttcagcccaaattcaaacgttttaaatttgtcaggcacattttgcaaaaattaaaatgtactggagcgggcgacggctgc

SEQ ID NO: 4063 - DNA, 986 bp, Avena sativa
ccgggactgcaatggattgtgaaatggcgtttctcatggccaaccaagggctcgcacggcccgggaaacttgtgtatgatccttttgttggcaccgggagtattttggtggctgctgcgcattttggtgccatgactatgggtgcagatattgatataagggttgtgcgggatggtcgtggccctgattgcaatatttggagtaactttgagcagtacaagctgccggagcccttgtgtgtgctacgagcagataacaacctgccaccatggcgtccaggattgaaggagatatttgatgcaatcatttgcgaccctccatatggagtccgggctggtgggcgcaagtccggtggtcggaagctcctaaaaggcatcatccctccttacacagttccagatgagaagagggagaaccatattccatcaaccgcaccatacagtctcgctgaatgcgttcatgacctcctccaccttgctgcgagaatgctggtgatcggcggtagacttgtattcttctacccggtcttgcgggacgatgactttactgacgtagccaaattcccggagcacccctgcttcaagctggtcgcctcatgcgagcagatcctaagcttgcggtacagtcgggttctgctaaccatggtgaaggtcgagccctacacggaggagattgaaaagatgggtgaggaacgtcaccaggagttcagggagaaccaccagaaatggatggaggagggtaacctccactccgccgtgttcagcccctcggagcaggatgggaagccgaagtttgacaaggactccaagccaaagtacagaggcaagtacgtgtagtgatggaaaacactaactttcttgtggatttgatctcagtggaaaacagttttgtttatcttctgtaatatgtatctttcagtaaggtactacctgtatggctctgctagttttacaatctagctagctaattgatactaagaactgtat

SEQ ID NO: 4064 - DNA, 970 bp, Avena sativa
gcagcggtggctgccggccctgctccggcgcgggcagggcgcctctgctcctgcgcgccgcatgctcttctcctcgtcctccctcctattcgacgacacgcaggagcagtttaaggagagcgtgcaccggttcgcgcaggagcacatcgcgccgcacgccgccgccatcgacgcctccaactgcttcccaaaggaggtgaatctgtggaagctcatgggggacttcaacctgcacggcctcaccgcgcctgaggagtacggtgggctcgggcttggctacatgtaccactgcatcgctatggaggaaatcagcagggcgtccgggtcagtcggcgtatcctatggggtacactcaaatgtgtgcataaaccagttggtccgtcatggcagtgctgcgcaaaaggagaagtatttgcccaagctaatcactggggagcatattggggcattggccatgagtgaacccaactctggctctgatgtcgtcagcatgaagtgcaaagctgagaaagtagatggcggctacgtcattaacggaaataagatgtggtgcacgaatggtccgtgtgctcagacactggttgtttacgcgaaaacggatataagtgctggatcaaaaggaataactgcattcataattgagaaggggatgccaggattcagtactgcccagaagttggacaagctaggcatgcgaggaagcgacacatgtgagcttgtatttgtgaactgctttgtgcctcaagagaatgtccttggagaagtagggaaaggtgtttatgtcatgatgtctggtcttgatctggaaagacttgtattagctgggggtcctattggtctcatgcaggcatgccttgatgttgttcttccttatgttcgacagagggagcaatttggccgtcccattggggaatttcaattcatacaggggaaaatggcagacatgtacacctccttgcaggcatcaaga

SEQ ID NO: 4065 - DNA, 849 bp, Avena sativa
tggctttaaggagatctttcacgaaacacagttcagttttctctggaggtgataatttagttaggaggctccagaaaggtactgtagcccagggtgctagctcaaatcagacaaggtggatgcaatctgatccacacatattgactgaaggtgagattattgaagtgggtccttctaaaatggaatggtacaacgaacaagatactggtgctgttacctttgataaaagaagacagagtgtacgagaagcagcagctttgtcatcacaagaccaagaaaatataggtcctcgaggaggaataaatgtgaataatgaacatgatcgacaaaaaaacatagtaagaggtaaggtatctcttgctcatgttattaatagggcggaaggttgttctcaacaaggaggctggtcaagacaaaaagccatgtcaataacagagaagctagagaaagagaatttgagattggagcctaggtcgagtctgctttgctggaaagcttcaagcactactagacggaagctctcagcgttgaagatcagaacccgaagatcgcgagctctgtcaaggctcgtcctgtgcgggaggtgcatttcggtgaagtctcccaagtcgacacgctgacgcggaggtcccaccggatttacatgtagctaactcccatctccatggtttattttctgtaactgtagcaatcagtaagaatgtaggttattctgtacatcgtttaacatgtagtagtcctagaagaatgaaaggaattccttcatgtccattattttccctctgaaatatttgaatcccaacaacagttggcacgccccacggcaggcctgcatgctactaaaaaaaa

SEQ ID NO: 4066 - DNA, 1019 bp, Avena sativa
gaaacacagagagcttctcagcagcatgaagcactggaggtgcttcgtgttgctggaaagaagatgaaacctagagatttcaaggtattgtacaatctcagcctagaaaatgctgagcagaggaaactagatgcagcagctctttatgcaaaaaagctactgaaattggagaatggttcagaattaaggacctggctccttatagctcggatcatgagtgctcaaaaacgttttgaagatgctgaatctattgtaaatgctgcccttgatcagactgcgaagtggcgtcaaggagaattgttgcaaaccaaagccaggattcaggctgcaaacggtcaattcaagaaggcaattgaaacttatacccagcttcttgctgtcatcgaactaaggaagaaaaacttcagctctgggatattggtgttacagggcccgaaggatgatataagtatggaaacagagtcatggtatggtctgtcccttttgtacctaagcttgtcgcagtggagggatgcagaactttgcatatcgaaaataaaagctatagatgcatactctcccttggcttatcatgctacaggaaatctacatgaagcgagagggtttctgaaggaagctcttggagcatactccacagcattacacttcgaacctaagcacgtaccgagtttgatagcgtcagctgttgctcttcgtcagcttggcggcaggcccttgcctgctgtgaggtgcttcctgggtgatgcgttgagactggacagaacaaatcatgtcgcatggtttcacctcggtttaacctatgaagatgaagggagcagttcatcagtacttgaagctgctgaatgttttcagacggctgctcgtctcgaagaaactgccccgccggaacctttcagatgagatcgcatctctatctttatagggaataataaactgtgaggagttgtagatcacatatttaggatgaatagtggattacagaaaaaaacataccggtacagaaaatagtaacacacaca

SEQ ID NO: 4067 - DNA, 1094 bp, Avena sativa
tactccgccaagcacgacgctctcaccttcccgcgggtcctctccgtcgtgccgcgcgtatggaggcgcctcgcggccaccttcgtcgccgccttcggcctcctcttcgcctaccacgtcgtcttcgtcgccgtcttcatcggcctcctcgtcgccaccgacaacggctccagcctcgcggggctcctcgccttcctcgtcgccatcgcgtacctcatcggtctcgtctacctcagcatcgtctggcacctcgccagcgtcgtctccgtgctcgaggacctcaagggcttccaggcgatgcgcaagagcaaggcactcatccaggggaagctctggaccgccgccgccatcttcggcacgctcaacctcgtcttcgtcgtcgtggagcttctcttccgctcctgggtcgtccagggcgcgcgccacggcatcggcggcggagggaggtttctcctgggcctcgccatgctggccgcgctgtgcgccgtggtcatggtggcgctggtggtgcagacgatggtctacctggtgtgcaagagctaccaccacgagagcatcgacaggagcaacatctccgaccatctcgaggtctacctcggcgactatgtcccgctcaaggccagcgacgtgcagatggaacacttcgaggtgtgacccccaaaatcactctcttcgattgccctgtttgtaatactagcacgctaggcatagtcccacggaatttgcaattcccttgctggtcttgatattgatttgcacaaaacaatggaatgaaattaaggagaggtataagatcatttgatcagctgtttctcggcgatcatttgactagcctgctgtaagatgaggatcaactggatattgcttttgtgtagaagttatctgtaatgcggggatgggaatgatacaacactagtagatactcggatgagttgcatgttatattaattgtggatattaattctctactccagttagtactccatatcagggtttgaagattctgtaattaatgtactctaccctgtgattacgggtaaactggatgccgtaactaactttatgcacatgaattagatgagtaataactgtgt

SEQ ID NO: 4068 - DNA, 644 bp, Avena sativa
ggttaagggtacttgtggttaccttgatcctgaatacatgcaaacatgccatttaacagaaaaaagcgatgtgtacagcttcggagttatccttttagagatcctcacaggtcagttgccactgaaactggaggggtctgagaagcagagaagcttatcgttgattttcctatctgctatgaaggagaacgatcttgatgcagtgttggtgagccacgtgaaaggacaagagagcatggagctgttgagaggactcgcggaccttgctaaaagttgtctagatatgtgtggtgacaacaggccatcgatgaaagaggttgcggacgagcttaatagactaaggagactttctatgcatccttgggcacggttccatgtgcagacagatgcagaaacccttcttgtaggtgaatctaccgatggttatcaaaaagaattaagtgggtatcctatgggcaagagtgagaaccagcccataaaccaaacaagttcgtatttttgcaaggtgatttaaaatacctatagtgatctgtcaaagagaaatagaaacgtttcttcttgaacttattaccatgtcttttgtatttcgaggtttgcattgctgctagttgactctttgtaacatggactagtctctcttatac

SEQ ID NO: 4069 - DNA, 1238 bp, Avena sativa
agttcgtctctctctgatgaggcttccagcttccaatcgttgctctagatcttcagggagtacaatagctaagcagagccatggttgcttcatttcgcaatagaacttttgcttcagaaaatatactactgtgtccatgtgaggccgttgcatctttccgacttcaatgacacttgtatgcaggccccacatgtcagcaatcatgcttccaggatcaacaatggatgcgtgttcccaatcaagtaatcagggatcttcaataccaaggtacgaaaccaattcttgctcattttctggccaaatcttgctattaacttgtcaaatactgataaatcaatggtgggatcacggaagaagagaaagcttgcactcatttaaaaccttgatgatcatataatattggacatagagaaggctggaagagggatggatgacaatacattaacttccatagagccacaaaggcatcacactctaaacctaatacaaccagccatcacactcagaagagccacagaggcatttcttcttcttgatgttaccattggcatcataaacctgatctattgcatagttgtagtggtaagctagctcctgacagggtggaatatcctcacaggcaaagaacatgatatgaggcgcactcttgtcgtcatgatcatagaggacattttgtgcataaaggttgggggtacagctgtggttgataaattttgcaaagttgcccatctttgaagcatcaacagcaaaaccagcatcctcatcttcctcgggacccttctgaagcgccggtatagatcttgataggccctcccaaaggatttcatcataatagttatgccctatagcaaataagtactcatcggtcatccgtttctgtgcctcctcatcatacaacacctcgccgatatactcacatacgaaacttccagatggtataaactcgagagttttcacgccccaacccattgatttggttttgaagacttgcagcctaaatttcatgcccttttggccaactctgttatagcatgtaggaggacacttgcaagaaggtccacactcatagacaagaggtttcgctactatgatacggcctttatcattgaaagggatctccccacctatttttcactacacaagcacacagtttagagtccgagcatccgcccacacaagcacagccagctggaggagctggttgatagttacggggtattgcaggcgtgagatgtagg

SEQ ID NO: 4070 - DNA, 709 bp, Avena sativa
agtcacatatatagtgagttaaatgttgtggatgcctttcataaagctcttataacctggtccaagtggattgatgccaacgtgaatcccaagaaaaccaccgtgatgttcagagggtactcagcatctcatttcagcggagggcaatggaattcgggtggcagctgtgacaaggagaccgagccaataaaaacgagcaataccttcaacctaccctaccaaaaatgagcattctggaggatgtgatccacaagatgagaactccggttgtttacttgaacataacaagactgaccgactatcaaaaggacgcacacccttcaatctaccgcaagcaacacttgagcgaggaggagaggagatcgcctgagagataccaggactgcagccactggtgtctacccggagtaccggattcctggaacgagctggtttatgcccagcttttgatcagccagcatcaaatgcgccaacagtaaaggccagtatgaggcgctctggatgattgtatatgaaatgttgccaatgatcaaagtagaggtcatccggagacctagggtttttcaagacccacatatatagatagtaaagccgccagctggtgagatctctctatatacccacacacgtccttaggttagaggctaataggacttcatgttgtaaagttcatgcctaaatgagaataaaacaatagtgtaagaaaaaa

SEQ ID NO: 4071 - DNA, 915 bp, Avena sativa
ttttgtatgatcaactggcaaatccatacacaagaattaaaaacatcaaatatctgaaagcttcaaccatttgaatccatggtcacatatgacacaaatgccctgcgtaataatagccgagctgacttattacatagttaggatcacacgaacatataaattctacaagctaattcttcatattacaacagacagtacacagtgagaaagacagccagccgactttagctaattcaaaattgataggtcccaaaataaaacaggctggactattcaatcaaccgaggagattgaagtgcatgagaatgtaaaccagaagttgtctcattccatccttcgcagttctggtggaagccgcacactatgcaacaccgaatttgactcagtgcggtcttggatgttcattaattcccccctgctgtattttatcctttcatctgcgaaagagataccggaaagcctgccaggatcagtcaaaatatcaacagattttgcttttgcctttagaagttgcttggatttgtgaacttgcgaagtaccgccacgatttggttgaagttcctgcattagttcatgtctcacctcaatcactggatgatgtctacaaaatgttgagatggcatctcctgttaagatccagcatccacttaaatctaacacatgtagctgcgcagggggtacaaattgcagaagcccagagtttgacaatacattcccacagaaaccaagatgtatcaagtttgaggcagaagacagggcatgcaaggcaggatcagacaagaaatcactttttaggtacaatacttcagtgctctgaaggatgctaggggaggtataacttcatctgacagtgctgtatcctccagataagactttcgaggtatatgagatgctcaagtggaggcatagacaaat

SEQ ID NO: 4072 - DNA, 947 bp, Avena sativa
tcccgggatcccaaatccattcccatccgccccagcgcctcattcgtccccttccaatcgaacaaacgaatcttccactcctcccgtctgatccggtccagccccatagcatctccacccgatcggctccactgcagcatgctatagtccgtggagtccggggtgctgtcgattcccgcgggatctgccgggcggccggcggcttgatcggagaaagcaaggatgtcaactcctgcaagaaagagattgatgagggatttcaaacgactgatgcaggatccccctgctggtataagtggggcccctcaggacaacaatataatgtcttggaatgctgtcatttttggccctgatgatactccctgggatggaggtacgttcaagctgacacttcagtttacagaagattatcctaataagccacctacagtgcgatttgtttctcggatgtttcatcctaacatttatgctgatggaagcatatgcttagatatcctccagaaccagtggagcccaatatatgatgtagcggctatactcacatccattcagtcattgctttgtgatccgaacccaaattcacctgccaactcagaagctgcccgcctattcagtgagaacaagcgggagtacaaccgaaaagttcgtgagattgtggagcagagctggactgcggactaaaatcacaagcatccaggggtcttgcgtactgggctgcttgcaatgtaattaaaatgttataacatgtttgttgtgtactatgttcttccttgggcattggttggattcttcagcaattgagattatatccagtctacatgtgctttgctgagtttaagggtttgaatcagatgtaagtacagtatggacttggtttatctctattgctggttgtaagtgttaattagctccatgaactgaatggtgctcatgtgagcataacttgc

SEQ ID NO: 4073 - DNA, 1084 bp, Avena sativa
atgattctgctagctcgccattgccgcagcacaagatcacgccagctgcttccatctgttgttcaattgctcaagaagtatatgcccgggaagaaggtagatgatattaatcacaattatattgagtgcttgctatacgctttcaccatttggcccataagactccaaacactacaaacagtctctgtgggtataagattgttactggacagccatcagatagacttggagaggatttctccgaacataacaaagattttaccgagaggttaaccgggacagaagagacggttcgagcagcctcgaagaggctaacccagggaatggcagatttcagcaaggcattatcttcagcgaagacggcagaagagaaatctaaaattaaagaggatcagcagaaatcaacagtgacaatgcggtcctataataacatattggcaatgtcacagccattgcaagtgaaatctcctttattcattggtgataagaaaattactctctcatggatggaactgccaaagaaaccagcagctacaacagcaggagggaagaggacccaacctccttccaatgggattgcccctgtaagtaagaaggggcgaggagagggaggagtgcataataatcagcttgtgaacagagcttttgaagcattatcacgtggtggtggtagaggcagtggaagggggcggggcagaggagggcggggcagagggtggggctaccgctgagatcagtcagaagtctatatagttattccaagggagaagagatcagatttatgcttccattcgagaggagacattcaagaggagacttgcttatttgggttttccgtgcttcactagagttaagcttttctgtattcagcaaggtgcacaaatgcacaagaaagctcgaaagctcataccaaggatgttttctgtatctatttagctttcagaccgtttgttggttggctgaatttttttgaagtagattatttggttgtttggtggtctgaatagcacatttagttctagaatttgtccaagagtatttaatttatctgagattgtagaggttcatcctttagtttaaaaaa

SEQ ID NO: 4074 - DNA, 916 bp, Avena sativa
gatctccgtacctcctcctcgcacaggctggttgctaggctagctcgtcggcggcggtgccggcaagtggttcaggctattgctaacccagatccagcagtcgagctgccattgaccgctgaaaacgtggagatggtgttggatgaagtccgtccttaccttatggctgatgggggcaacgtcgtgttgcatgaaattgatggaaatgtggtgaggctgaagctgcaaggtgcttgtggatcatgcccatcctcggtgacaacaatgaagatgggtattgagcggcgtttgatggagaaaatacctgagattgttgcagttgaacccatcgctgatgaggagactggtcttgaattgaatcaagagaacatagaaaaggtactcgatgagatcaggccatacctttcaggcacaggtggtggtgagctcgagtttgtttcaatcgaggaacctatcgtcaaggttaggctcacaggcccggctgctggtgtgatgactgttagagtggccctcactcagaagctccgagagaagatccctaaaatcgcagctgtccagctattgtcataatctctgaagtacacataccttacaatttacaatgtgaatgtgccgatacagtaattgtcaggaagttgtaataacatttgtatgtgtagcctcccaaagagctgcacggatataaaatccagatagcaatggccgataccaattgtcgagaaggtgttcacatgctggattcacaaaagttttggtctgtacctgtatgtacaatcgacctgtagaaatgttttgcaaaatagagtagatacacttcatatgataccttgaaagttttctgatattatgtaaagtacttatattctgcaaagtcatttcagtatttgattattaattcctgatccatagaaaaaaa

SEQ ID NO: 4075 - DNA, 806 bp, Avena sativa
ccaagcaggtgcagcgcgccttaccggttttcgtttacccgtttctttgctcttcgacgtcctgtaccacggcgtcgtcacacctgccaggctcccgcgccgtcgcttctgctcggcccggagcagcagcagccacctgccttcggccaggatgagcagggatggccggccgcggcgctggaagggattcatcagtggccggtagagcccgtgacgctaccccaggccatcgacggctgcagctcgccggccagatactgctaccagcttgacggctacacggcggcaggcggcgtcggggcggacatggaattcgaggctcagctcgagttcttcttgaacacgtcccagtttttccaaccacagattcagagcctataggcatcgcggccagtatcctgctgtaccagcactagtattagattcagagttgtgtgatcacaggtggtacacttagcatatgaccagttatcactagggaagtgtatcccaattggtcatacaccggccaatggaatagccccagattgatctagtacaaaaactcacaactgcagtagctccataactccaatatattatggatcagcatatgcacaagagccaatccctgcagtttattacatcaggcctttataaactagaattgggcaaaagaaatgtacactcctaggctacaatgtcatcactgcacacacccgaagaaatcctcagggatatgcaagcacctttcagagaggaactattgagtgtgtctagacagaactcttttccttgctgtcccgaggagcttcagaattgctctc

SEQ ID NO: 4076 - DNA, 916 bp, Avena sativa
agaaattcagcaccacatgtttttctgaacactacactaggaagctaattatagcagccaacctagaatttttttgcatggttatcatcaaggccttggccaaatccttgccatcagaacatttttttttacacaaatcagaacattcttattaaaagttatcttgcatgactttaagtttttggtttgaagatgccaagactgaatctagccacttgtccaacagatttactggataatttagtttttggacaagacggatacaacaattgcaatatgagttttatgggctactttgggggagcagaaataaatataatcatggataagtatagtaactgccctgcaggtctatggagcttgttgatcaatcggtgaaaccaatggatttatggacaacggctggtcgtgctacaataactgaagatgtaaagtaataccaatgacaactgctcagtttgtgctaggttgggagttgttgccagaaatggtgatggactgttggctgtagtggaatgcaggaagtatatgaatgtcactgtcccattaatagctgaagttcttgcatgcatagatgctactctgttggggagagaagatgggtataccagagtatgggtggaaactgattgacaaacttttgtcacccatggcaaagtgaattgaaggagcgctcatcctgtgtccacttgttcagggagatgaaagaagcattcattctccaacctcgaggaattcagtttgcacttcactcatctagatggaaataaagcaacacatttatacacccgtgaagctcttagcttaaacccagtagtcatcaattttcgaattcccctgtttttatcagaatgtatatcatctatggaacataaactacagactggtgattctcagaaaaggaattgggcatgta

SEQ ID NO: 4077 - DNA, 945 bp, Avena sativa
ctgctgctgccggctcctgctcctgctcctgctcctgagatcaaaacagagccaaagaaaccagagaatccacctccagccgcaaagcaccagatgtgccaccagataatgagtttgaaaagcacatcagaccagaagtcatacctgcaaacgagattggagtttcatttgatgatatcggtgcattggatgatatcaaagaatctcttcaagagcttgtcatgctacccctccgaaggcctgatctcttcaaggggggtcttcttaagccctgcaggggtatactactttttggccctcctggaacaggaaagacgatgttagccaaggctatagcaaatgaagctcaagcaagtttcataaatgtgtcgatgtcgactatcacgtcaaagtggtttggtgaagacgaaaagaatgttagagcattgttcacattagctgccaaagtatcacccactatcatatttgtggatgaggtagacagcatgcttgggcagcgaaacagagctggagagcatgaggcgatgaggaagattaagaacgagttcatgacacactgggacggtctcctgtcaagaccggatcagaaaattctcgttcttgctgcgaccaaccgtcctttcgatcttgacgaggctatcatcagaaggtttgagcgcagaatcatggtcggcctgccatcagcgcaaaaccgggaaatgattatgaggaaccttttgtcaaaggagaaagttgatgaaggactagacttcaaggaaatagcaactatgactgaagggtacagtggcagtgatctcaagaacctgtgcacaacggcagcgtatcgccctgtaagggaactgatccagaaggaaacgaagaaggaactggagaagaagaaacttgaacaagggggcactccattagatccttcaaagatgaaagaaaaggacaaggagatcgttc

SEQ ID NO: 4078 - DNA, 652 bp, Avena sativa
agcaggccagatcattgtgacaacaataggaggtgaaacgggaaaggccaaagacagaaggtctcatacatggcagaacgtgttgtggggactggttcatttggtgtggtatatcaggccaagtgcttggaaactggagagactgttgccattaagaaggtactgcaggataagagatataagaacagagagctccaaacaatgcaaatacttgaccatccaagtgtggttcagctaaagcatcacttcttttcaacaactgagaggggtgaagtttacctaaaccttgtacttgagtatgtcccggagacagtttatcgtgttgccaaatactatagccggatgaaccagcgtgtacccatactatatgttaagttgtatacatatcagatgtgccgggcccttgcatatatccatcgtgttgtgggtgtatgccatcgagatattaagccacaaaatctattggtcaatcctcacacccatcaacttaagctttgtgattttgggagtgctaaaaaattggtccctggagagccaaacatctcatacatttgctcgcggtattatagggctcctgaactaatatttggagctacagagtatacaacggcaattgatatctggtctgttggctgtgtactagctgagcttc

SEQ ID NO: 4079 - DNA, 933 bp, Avena sativa
gcgtgcgaggccacgcactgcgagagcaacttgctggagatggaatgttgagcatgaactcatgtgcgttgcacttcgtcggtacagccaggtcgacagcgaggtggaccaaagatgcccctatctaaactagaggatcatactggaggcagacttcgccactctcgtacttgccggcaaagactacctccgttcagttcatgttcaaagccaattaatcggtggacacatcaaattctccatcgcttgctgccagttcgtaagtctgctttctcattaattttcattgctagtcagtcatgtttttttcgcaccaagatgatttgcctgaatcatagtttttcgcccctgccatggtacacgattgctgggtcctatacatgtgggacatggttgcccgagaaatccatgtgtttgacccactagccggccctcggggcccatcctctgaaaggaaacagtcactacagttcgtggcatcgagactgcatgatgcactcttccactgcctgcatgagtactttgctgggtggcctaagcagaaggatagttggtccaccatataccccaaaattgtggacacgctgtacagaaggcctgattctggtccaatcgtcctgcacctagtatgctactacgacggtgagcgtctgaagttcccaatcaccaagaacaacctggagaaaacccgctgcgatgcactccacgaggtgatgaaattacgcgagaaccgctcacccctaccaggagatgttctgtgggatgcactcgctccaagccagttcaactttggagaattcctcaacgaggagcaagcctgaatgcaacagagccaccgccttccatactatccaccctttttattctgacatctttgtaagcaaaatatgtagaactgccaccgcggaccagaagtttctagaacatgctgta

SEQ ID NO: 4080 - DNA, 925 bp, Avena sativa
atcaggaacgcccccgtccaggccgcgcccgtcgcacctgcattgatggacgccgccgtcgagcgcctcaagaccgggttcgagaagttcaagaccgatgtctacgacaagaagccagatttcttcgagccgctcaaggccggccaggcgcccaagtacatggtgttcgcgtgcgccgactcccgtgtgtgcccgtcggtgaccctgggcctggagcccggcgaagccttcactgtccgcaacatcgccaacatggtcccgtcctactgcaagaacaagtacgccggtgttgggtcggccatcgagtatgcagtctgcgctctcaaggttgaggtcatcgttgtgattggccacagccgctgcggtggaatcaaggcactcctgtcgctcaaggatggcgcagacgactccttccacttcgtcgaggactgggtcaggatcggattccctgccaagaagaaggtgcagaaggagtgctcctccttgtctttcgatgaccaatgcgccgtcttggagaaggaggccgttaacgtgtccctcgagaacctcaagacctacccgttcgtcaaggaaggtgtggccaacggaaccctcaagctcgtcggcggacactacgacttcgtctccggcaagttcgacacgtgggagctgtaaatcttcctacacatacatacctatacagacgtacatataccaagatatcgtccgaccgaccgtcgatgtggaagcagtggcatggagtgcgttacttgttattttgcagtaccggatgccggatggctcgatgtgaatttgtaataagcaatagttgtttctacccttttctgacgccggttgtaagtgtgatgcataatttgatcgccttctgatcaaaagacatcatataattttaataatattttcaccaagagtttacatttcaaaa

SEQ ID NO: 4081 - DNA, 830 bp, Avena sativa
agctaaattggttcttaatatccattctatcaatagtaataacacaggcaatataattcgaagctttggatgatataacagaaatcagttataactcttaagcagcgccacttgcacccttcccttctttttctgtagcttcttcatgtaaaactccagttccttacctccaagatgtaaccatcagcacggccacattggccaggtcgtgacgagattgcagccaatagacggccactagcaaattgctcttcaacatgtgggtcaatcttacgatcctgttgacgcttttgcagcttcctttggacatggttacttttcttctcctctgcagctggagcagcctcagcctcctctccttccttcttggtagcactcttcttcttgcgaccaatatcaactccatagtgctggagataccactgcttaaatggagctgcatcaacttgaacaattgcactcttcactagagtctgtgtcctaaccaactcattatttgaggcgttgtacaccacatccaataaacgggtcttcctagtaacagcctcactgccccaagagaagtttccagtgtccaacctcaaagcacgccacttcacattgcctcctcggacccttatcctcctaacagtcttagcattagtcaccagctttgtatttgcaggctgtcttccgagctcatactttctcttcttcctccacgccttcttcttgcctccagtggcacgtctcttgtgcatcgaatcccgagagatacccattgttgccggcgacgaaggatcctagggttccgacggttatgctctaagacaaaggccccgtactctgcg

SEQ ID NO: 4082 - DNA, 531 bp, Avena sativa
gagatgttgaggctgcagctcgtgcacaagacaaaagagctcgagactgagcaaatttggagactcagtcttgagttgcagctgaagaatttggaggtcatgtcactgaagaagcagaacgaagcgttgagagctgagaatgagcactacaggaagactgcaaagccatccagaaatccaaggctgtgcaggttctgtaacgaatatgtagttggccacgactaccgcaactgccccaagaggcgcgcctctgcttcttctgaacaagatgaagacgatgattttccagctaacactcgtgaagctatgctgtgttaatacctacacgataggatttgattagatataatatgttgctgtccttgagtcaagaacttaacattccttttgttgctactactactagagtactagtgatgcttttgtggctacacgagctcctaatgctagttagtagttacttggtaatgtatttattgcagaacatgaagatgtctgcactgcactagatctgttcagttcttctatgtt

SEQ ID NO: 4083 - DNA, 896 bp, Avena sativa
cctgtcctactatcacatatgaagaagctctcagaaggaactggaatatcgcaagaggctggaaagtacacatccacatctgttgattggtcttaatggagcccctgtactgtcaaaggagatctgtacagattcagcacctgatgttttgaagagaaagtttactcctgagagcagtatgccttcacaacagtcaagtttcagttatgctactgcacgaagccagccagcaaattggtacccctcaaagaagaaagtaatagttcgtcagccttcgtcgcaggccgctcaagtatccagaacaaactcagtaccttccttctggtgcaagatatgcaaggtggattgcgttaccgaatacaatttcagcgcccatattggagggaaaaagcacaaggccaggaagctgcagattcttggcgatagaaacactgcaagacctggcatccggttcgcggggaacacggatcgtggaccaagcgagaatgcagtttctagaagcagaaacagtgaaccaaatgcgggtagcagcagcattactggaccaagcagtgacatgtcctctggaagcagacccagtgaagcaggccctgaattatgaaactaggcaatcaaccttctgaaggagatggaagctgcgaacgagtctgagacgctgctgtttcgtgctctcaaagggtttgatgagcatctctcaccgagaagtcacatcaggcagaagagcttgtgcatgagaagccatgtcgtgcaattgcacaggttgagctgaggtgaccaaggagtaggagttgctcataagttctggaagaacgagagctagcattttgctcctgctaatcagcaggctgactctgccattgaaggcaagctcatggaacaaggcctgaactctagat

SEQ ID NO: 4084 - DNA, 935 bp, Avena sativa
tcgtcctctatatgcatcaccagatcccctcggtgttgcagaatcttgaaaatgaaatttgcaggtttaaaggaggaaatgatggaactggcagcagcatcagcagaactgaaaccttctgatcagagaaagtacaccacacgaaaaagagaggttagatgcagaatcaagaaacgggagaagttaatgaacggcatatctgccttactctctgctcttcagcaagcacttgatgaagttcctagcgttgaaggagttgccctgatcctgggggggagtcttgttcgaccattgtttgtctatgacattaaagttactcatggtcgatttgattctggaagtgccaaagagcatgccatgaccaagttagcacagtcggtttctcgaaaggccatccgagctcttatatcaggtggggcagggagtttatcttacacaggtcctaccaagttgtttctgctggtcagatgtccctgcaagttgaacttacccctggatttcgtgccaaaacgcgatttccgttacagtaagaaggttgtaccccagcacatgtctataaaatgtaatgcaccggacttccaaaacaaaaataagcatgttacatcaatcatggatgcgtcatgttgcagctcagaatctctttcttccgatgttatctggttccagtgcaagcacacgataagaggtttagcatgcaaggcgtcattagaagggtgataatcttgatgtatgttccaattgaaaaatgctgtagtgaggtggtctttctccgtacgaaagcatcagcattctcaatcttaaccatgtacccgtttccctagtactattattttgtactggaatggctcgtggtctcaacagttccctcgagcttgcaactgggaatagagckcgcctcatgtaaagttttttgttcgggtctactatgttaattg

SEQ ID NO: 4085 - DNA, 828 bp, Avena sativa
tgtcattcttcctagtcgacctggatctgataatggacgtgattcctggggacatggtggtgaacgccatgatggtggccatgacggcgcactcggaggaacagtcgtcagaccatctaccacgtgacgtcgtcgatgcgcaacccggcgccctacgccgtcctggcggagtcgggccaccgctacttcttcgacaacccgccgcgcacggggaggaacggcgagcccgtcaggctgaacaagatgcgcttcttcagcacggtcgcgcggttgagtctgtacatggccatcaagtacaggcttcccctcgagatgcttcgcctcgtgaacattgccttgtgcggtgtcttctcgcggcgctacaacgagctcagcagaaaatacagattcgtcatgcagctcatcgagctctacgcgccatacagcttgttcaaagggtgctttgatgacatgaacacggagagactaaggttggcgatgaacaaggagcgagaggacaatgcagcaaactattactttggtttcgaccccaagtccatcgactgggacgactatttctacagtgtccatatccccggtgtgcttaagtacatgcgtgattgagtacccaaatccccacatcctgcttgctagccttgaaaatacaattgtatccatttgttatgcaactctcgtgaatatgcatttattatgttcaatttgtcatgaaaccctgatgtatctacaattgatgttacgtttgtaatccaattgtaatccaattgtaatcagtttttacatttggaaatatgttaatattcgaatttttctttttggtacaaaaaaaaa

SEQ ID NO: 4086 - DNA, 675 bp, Avena sativa
cccgggatcttcgccaagaaaaacacaggccagccatggccatggtcatctcgccgccgtcgacttcaccaccctgtctcgccaccgcctagccatcgcaaccatctaccgggaagcaacaggagctcgacctgcccctgcaacgagcaggagccgccacacccgacgaggaggacgcacgctgcagctcaccgccgctcgccaccgttgccgcgctcatcgccgcctcgccatcctgcctcggccgccttctccaacacctcactaagggagcccgacgagtaccagcaggagtttgaacagtcttacgagtaccctctcgagtttgaaccgactccgtcctttgatcagtcaggtacatgtgacccggtggacaagtctggctcttactatgttgattgtgctgatgaggactactacgagcagtagccgggatcctaccaggaagtcctgagacgtgtgggcatggaactcacttgcttatgttttggcatcttatgcctatttggttcttgtccgtactcggatgttatatcacgttttccgcttgatgtatgatgtattgttgggacctctgtcctctatgtgctacctatctatatatttggatcttgttgactaaatattttctttctttgtacatggcatgctctgatatatggtttgaatgtcaaa

SEQ ID NO: 4087 - DNA, 799 bp, Avena sativa
tcctccccttctactgaaccaggatacgaacctcacaagacgcatgatccagaatctgtgaagcttggagtggtttcggaatctccttccaacaatcttggggggccttcccagcggccatacattttagcccggggggcaattctatctctgcaaatggagaggaaagttgaggagaaggtccatacaattcgatctgagcttcctatttatgtgaaagtgatgaccactggaagcgtttatcgcattggcatgaacctatgtggaatggttttctgtgcagaatatgtttcggcggcatgtctcccccaagggaaacgatctctcctccttcagatggagggggagacgaagctgtggagcaccacgttgagcattatgagaaacaaagtgagtcggatttacataggctggaaggaattcgcccagcagaatggcctggaggtgggcgacatctgtctcttcaaactggcagaccgcgacaccaagagtctcaagatgacggtctatctgatccgcaagtctgagatagagccacagctcaccagcgtgtagcgttcagtctatctgtgctctgtggttttacttagttaactctcttataccctgccatgagaagagagagctgagtagctgaccgatgaacaatttgtgttgttagacaactttctgttggagcactatgtgattgggggaaatactggaccatattctcctcctagaccatttctgattatctcttgttgagacaaattttatcttgctgatttggataaccttacttgttgaactttctacc

SEQ ID NO: 4088 - DNA, 1099 bp, Avena sativa
ctatgtatattcgtcattatccaggacaggggtgctcgggtaccacaatctgcttaagaacataggacagtcacccaatcacccactgcggttggcatactgtctttcggtacaccttcatctttatcttcatgcttctatgtcacctgttcattttcatttcgaggcgggtcagcgtaatcctgaccatgatcacggacatctctaaacatggagaagaaagaaactatgccatctgaagcactgccccctaacaaccccagcaaaagtgaacctaatggattcaaggaacccgagcctgcaggagcattgccagcttgctgaggattttgatcttcatactggagagggttgccagctgctgtctcaacattttcattgagctggccctcttgttggttcaacgcaggctcgtcctgaggcattacggtatctgtttcacgagcagcaccaaggccatcatcattaatagtgccagggtccctcacatttacccttgcaatatgtaatgtcgacgtatagatggtagaggatgtaatctgaacaccctgttggtgaatgtgagctcggctcctaatgaatctctgaagggctggcacctcaaaacgattccagaagtacaagattagatgctgcatgaatgctgccgtcgcagagaaagccaggtatgaaaagccgtaggtgtatgagaagaagtagatgtggaaaaccaggaaatacagcaagaaaaagcgaggaaagaactgcattgatatagatgtgcgcacgctgatcatcgtgaacagctcacataaccatacaagagtcaaaacaagaaacgcaaggagctggtcatcatagaactcgaacagaaaaaagaggatcccaatcataatcggaacaaaaaccaacgattcaatgacatggacaaatatcagttgaaatgtgggcagctggtggcgtgcatggtgttgaagctgcactgtgaatctaagcatgcgggattgtgtttctctcagggtaaatgacacagacatggtcgtagtgaagaatacaaagagtgacatcagaaggacaccacattttgtcacaaagtaatctccaaatcttgtaggacctg

SEQ ID NO: 4089 - DNA, 918 bp, Avena sativa
gacgccgtcgccatcgccgagagctacgcctctctattcgcctccctccgcatcgcactctcaaacgttaccacgacgtcagcggagaacatggagtgcttgggcgaagtcgtcggccgtctccaagaatcaggtgacgctgtttccaaatctactaagctctctgcagtatgtgtcgtctgtatctgaatatctgaactgacaaatgtttgcgttcgaagctcgcacccttttggtatagtttatactgtattcatttccttaggttgttttaaaattgaaagtgtccattcctcggcgtagagcatacacgcattagattagtttaccatatcacgagttttatcttttacttctcttttttctagcacttgaagcgtcttctaaaggaaataagtacatccattcgtgcctgaggctaaatgaggaaatgcgaggcttggaaagcctaagtattcagctaaagattatgcggaagaacattgattcactagacctggctgttgatcgcctgctccacctccccttgtcagttgatattatcgcaaccttatacaaggaatccaggaacttccaatgaaatttgttcaccaagtagctgtcacatttttgggaggcaaccaactactgtcattgtaaaggagaaggtctccccttccatggcaaccacatgagatggcctccacttcaacggcatgttgaaattccccaactcttgactttattacactccatgtgtttcagaagaatgttatgcatttgttaagaaatagcaatttgcaactctgccatcctttaccttcttttgatatgtgtctcagatatttgtagagttggtcattcaaccttatggccacacaagtttgtcattctctgtaagaggaaacaagtgaaataaagttttttcatttgtactgt

SEQ ID NO: 4090 - DNA, 824 bp, Avena sativa
ggtttatgatgaggaatatttgagaactcgcaaacatcagaagacatcaagtgcttctgaagatgatgaagagttccggttggaagaggatgttgaagatgacgatgaagaggaagaggaattttctgcaggcaccagcgaagatatagaggagccccaacggcatacaaagttgcgaagtcagaatggccgaagggctaataagctgagatctgtaggtgaaacccagacaggtctcaggcgcagcaagcgttcttctcgtccgcgtattaactatcagcagtatgattattcagacacagacgcagaggcaggaaaggcaggtaaatcagatgcatcggatcccgatgctaactccggtgaagaaaataatatggaactctcgacatcgagtcaggagcaacaggaagaagatgatggcaccgaggatttgaaaggtagtaatggcaataataaaatggctgaagaccatgcagtggcagcacataaagaggagcaagagcagccgcagctagagtctgtcgagaagacggatattcccagcagagagagtgaaagtgttggaagaacattcttagatctaaacgagcttgcccctggagggggctttgacgacgggccaatcctggcaatgaaagatgaggacatggataactgttaggaaataagttgtggtagaatcagcgtactaggggttgctgtttcgagaaggtgtaaatgctcaagtcatggaccataacaatcagtgggccacaccacgcagagtgtcagtgcaatgctgccgcacacgctcggcgcgtccagtggtttgtcgcgcgacgtgg

SEQ ID NO: 4091 - DNA, 930 bp, Avena sativa
aagctccatggcttctgcactagcggtgactacatgtatctggtgtatgagacttggaaaggggcagcttggcgaaggcattgtatggggaggaagggaagaagaagctggactgggacgtgaggatgaggttgatccagggggttgctcatgccctggcctacttgcatcatgactgcaacccacccatcgttcatcgagatatcactttgaataatatcctgcttgaatctgacttcgagccacggttgtgtgattttggcaccgcaaagttactcgggtctgcttcgacaaactggacttctgtggcgggatcgtacggctacatggctccagagtttgcatacacaatgagggtaactgaaaagtgcgatgtgtatagcttcggcgttgttgcactggaggtcatgatggggaagcacccaggtgacttgctaacctctctgccggccatctcttcatcggaagaagatgatttactcctcaaggacatactggaccagcggttggatcctccaactgaacagcttgcagaagaaattgtgttcatcgtcaggatagcacttgcttgcaccagggtaaatcctgaatccaggccctcaatgcgatctgtagcgcaagagatatcagcacatacccaggcctacctctcagaagcgttcagacttatcacaataagcaagctaacagactacgtgaagtgacgtacctctgtgcagagaatttgaacctacacagccacagttactgccaaagaccagtattgggagaccatattacgttaaatggctgataaaatataaacagccaaattatcctgaagattttcattagcaaaacaatgtctttgcagcgatgtttgtaataaaatagataacagccaaattatcttagaaaaaatagtactaagtattttcctttgtactatct

SEQ ID NO: 4092 - DNA, 814 bp, Avena sativa
tctctctctcctcttctccttctgctctctcccgttcctcccatggagtctgcctagttctgccccgttgagagcgctgctgatactatcctccaaacctccagatctgtggcctctcactcgctgcttcctcaaaaacaagccgtccagatggactccgccggaacggagacggagctgctcgccgacggcggcctcacggagctgcaacccaccggcaccgccgacgagcgtctgactgatttcatgatgggtggaacgaagagagatgaaactgctcctactgatgccggcgatgaagatggcgatgaggatgatgatgatggggatgaggatggcgactttggtgagggtgaagaggagatctctgaaggagaggagtatgacaatccgaagtccaatgataccaagaagaaacaagtaggtgagggtgaggagaatggtgaggaggaggacgaggaagtacccgaagagcaggagggtggaggaggtgatgatgatgacgatgacgacgacgatgacaatgaggatgatgacgatgaggaagatgttgctgaagacgatgaagacggagtagaagaggaagacgatgatgaccaggatgatgaggaggaagatgatgacgaggactcgctccagcccccgaagaagaggaagaagtgaagctctcttccacgcggctgtagtttctccatgcgatgagatctgtgcctctggttctgtcatgttatcagaatcgaactttcctttattagagtttaaaaaacacaccacacgatcacaacgtgtggagcttgtaggagctttatgattt

SEQ ID NO: 4093 - DNA, 965 bp, Avena sativa
actcttatgcagactttccagatcaaacggcttgctcatgctgtaaaggagggcaccctagacaaccttatcacagagctactactctggcttttagatgaaagggttcctcttatggatgatggcagtcaactactcaaggctcttaatgtcttgatgcttaaaatcctggataatgctgagagaacatcctcatttgttgtgctaatcaactttattgaggcctttagacccttcaagatggccatgccctactccatctgagtcccttgctgtaaaaatcaaaaagttctcagatttggttgtcaaatgtttaattaagttgacaaaggttcttcaaagtacgatatacgaagttgaccttgatcgcattcttcagagtgttcatatttatttacaagaacttgggatggaggagatacggaggagggctggagctgatgacaaaccactaagaatggtcaaaactgtgttgcatgaactcgtaaagcttcgaggtacagcaataaaaggtcacctttcaatggtccctatagacgctgaacctcaaccaatcattctggcatacattgatcttaatcttcagacccttgcagcagctaggatgttgacgccatctggacctatgggtcaaacccactggggcgatgctgcatcgaacaatccaaatccatcagttcattcaactgatgcacaattgaagcaagagcttgctgcagtattcaagaaaatcggtgataagcaaacatgtactattggtctttatgagctctacaggataacccagctgtacccaaaggttgatatattcgctcagcttcagaatgcaagtgaagcatttagaacgtacatcagagatgggcttgctcaggtggagaagaatgccgccgctggaagaacaccctctagtcttccattatcaacgcccccataccagaaccttgaactatattcttctgtgagag

SEQ ID NO: 4094 - DNA, 810 bp, Avena sativa
actgaaggatgatggagctgcctacttcgttcggtggtgtcagtcggccgcgtgctttctctgtctgtctaagaagagcagcagcccgtcttctgctcgactggttgcccgcggatctgcaccgtggctgggcgggcactgttcgcggctggctggctcgccatcctgtccttgattgaagcagacatggccatgaaagcctgctcgacatttaaggcgttcttcgcactggtctccatgaatgggatgccaatctcatcagcaaatgccttcgctgtctcagttgatacaacttttttgtcggtgagatcacttttgttccctacgagaagcttgttcacgttgtcactagcgtagcggtcgatctcgttcaaccactgcttcacgttgttgaagctgtcctggtctgtcacgtcatagacaatgatgataccatgagcccctcggtagtagctgctggtaatagttctgaagcgttcttgcccagcagtgtcccagatttgcagcttcatagtcttcccatcttgctccacagtccgtattttgaaatcgacaccgatagtactgatataactgtccaggtacgagtcatcggcgaatcttaagagaaggcatgacttgccaacacccgagtctccaataagcagaagcttaaagagatagtcatactcgggattcatggcgagatcgatcgatcgaccgagatcctcctaccgcggcgtggcgtggcgtggcgcgctccggttccaatctcgcggggaattcggtcttcggggatcgaggtcgaggtgcgcgcctcctcgatctcgc

SEQ ID NO: 4095 - DNA, 955 bp, Avena sativa
aatcccaaagcgcaaacctcttccgaactcttcctcctcatcgccgaacccacatcgcctccgtcctcctcgcgcgtcccagatccgccggggccatggcgtcgcgcaggcggatgctcctcaaggtcatcatcctcggcgacagcggggtcgggaagacgtcgctgatgaaccagtacgtgaacaacaagttcagcaaccagtacaaggcgacgatcggcgcggacttcctgaccaaggaggtgcagatcgacgaccggctcttcaccttgcagatatgggacacagcaggacaggaacgttttcagagtcttggcgtggcattttaccggggagctgactgttgtgttcttgtatatgatgtcaatgtaaccaagtcgtttgaaaaactcaacaactggcgtgaggaattcctaatccaagctagcccatcagatccagagaatttcccttttgttttacttggaaataagattgacgttgatggtggcaatagcaggactgtctctgagaagaaggctaaagcatggtgtgcttccaagggaaacatgccttatttcgagacgtctgctaaagaaggcttcaatgtggaagcggctttcgagtgtatagcaaggaatgctatcaagaatgaacctgaagaagatgtatatcttcctgatacaattgacatgggaggcactggaaggcaacaacgctcatcaggctgtgaatgctagaagatacgtgtcagctgattacctctgtcggttcttcattttctgagcttggtatatctagtttgaaagctgctatttgtatcggtcgctatatatggctgtttagtctctccaatgaaattggagaattcgtcgatatcttatgattctttgtatgagcgctagatggtagagagttggcatttcttttttagttttttgcgagcttatgattgttgtggtgcatatatatcttg

SEQ ID NO: 4096 - DNA, 1018 bp, Avena sativa
tccaataactacatgttcgaaagattgtacattggagaagctatttaaaatttccagaaaattcaaggctgtctcctgaagctaaggatctcatttgtcggttcttgtgtgatgttgataacaggattggcagtgaaggggcaaatcaaataaaggctcatccttggtttcatggagttgaatgggataagctttatgaattggaggcagcatttaagcctcaagtaaatgatgaacttgatacacagaattttcagaagttcgacgaagcagatcctgctcccccaagaacaggttctgggtcctcaaggaagatgattcccaattctaaagatcttagctttgtgggctatacatacaagaactttgaagctgtgaaaggttcacatctgtctgcagattttaaacgaagctcctcgtttacaagccagcctagtggtggccacacatctgatgcagcggacatggattcatcagcagaacccaatggaagcgacacagacatgcacactgagtcttctgtcgaccatatgatgcaataagctacccaaaagatgtcgatgccacaccagtaggatttcccttgctgatgtggctcatgcaaaacaatctgcttgcttatcgttgctggatattttgttgtaattgtacaatagtaggcaccgagggtttgacaacagtgcatgttccaggattggtcagatatatatggtgttagtatagcatatagtgttctgggtgagcctaaggcggactggtgttcgcttcttggcgctcgttccccaggttggcaggttaattttgcctcccttgcggcagctcgtagccctccaacatatgatcaacatgggataggaaagaagacggtgattgtggtaggctagccaattttgcttgttattggatcttttttagactgataatttgcaatgctgttggaacttgtgcacatgaatggtctgttcagtctctacctttgtctttaccttgttattacaaaaaaaaaaaaaaaaaaaaa

SEQ ID NO: 4097 - DNA, 906 bp, Avena sativa
cgacgttgccacccaaccgcaggtgatccacccggggaagaggaaccaggtgctcacctgcgacaaccccaaggaccacaccaagccttgcaacgccacctgccccaacgagtgccccgacgagtgcttagtcttctgcccaggctgccatacattctgcatgtgcgaattctaccctggtgcctgtggcgacccccgattcgtgggtgctgatggcaacaagttctacttccacggaaagaaggacgaggacttctgtattgtctctgatgttgacctccacatcaacgcccacttcatcggcaagcgtaaccctgccatgagccgtgacttcacctggatccaggcgctcggcatccgcttcgccgaccaccagctctacatgggcgcccagaagaccatcaagtgggacaacagcattgaccgcctcgagatgaccttcgacggcattcccgtcgaaatccccgccgggatcaacgggcagtggcaatccaccgaagttcctgcattgaccgtcacaaggacctccacgacgaacggcgtcagggtccagctcaagggtgtgttcgacatcatggccaaggtggtgcccatcacagagaaggactcacaaatccacaactatggagtcacggaggacgactccctcgcccacttcgaccttggattcaagttccacgacctcaccgatgacgtccacggcgtgcttggacagacctaccgcaccgactacgtcaacaagctcaatgtcagcgccaaaatgccactcatgggtggcgcacctacctatgtttcttcagacatctttgccaccgactgcaaggtggccaggttcggccgccacgccggaatctccatggttactagtcaggccaactaaattactggaacttctatgtggcttat

SEQ ID NO: 4098 - DNA, 891 bp, Avena sativa
gatggatacatggttgattcagtcctaatagttggaaacagtatcacagatacaagctttagcaagtcttataaaatgtctgaagagtgatagtagggttctcagaaaggaggcttcgtgggcattgtcaaatatagcagcgggcagctttgagcacaagaaattgattttcaccagtgaggcaacacctttgctgatacacctcctgacgagtgctcagtttgacattcgtaaggaagcagcttacaccctgggccatgtgtgtgttgtcccagcaggaagtaccgatcccccgaacataatcacggaacatttagtctcaatcataaatggtggagcccttccaggattcgtaaatttggtcaggtcagcagatatagagtgcgcaagacttggacttcagttccttgaactggtcatgaggggatatcccaatggacagggtccagcgctcgtggagaggcaggatggcatcgaggccatggagaggttccagttccacgagaacgaggcgatgaggaacatggccaatgggctggtcgataaatacttcggcgaggattatggccttgatcagtgagctgctgccattccggcgtctgttcgcagcaggtgcccgtcgatctgagactgtaaaatgcaaccttctgcgatcgtggaacagtctgtctgtctgaagtagcgtagtagtcgctgtgtaacttagccatcgccatggatgacaggtgatggttgctgtagcgggaacatgtgacgggtttgaagtgtacaaatggtgtaactgttgcatgtactgtacaagaagataaacttttttgagtgttgaactatatatattgcactggagaaatactgaaaatacgtgtgtctgcttatacctgaacaagacta

SEQ ID NO: 4099 - DNA, 845 bp, Avena sativa
ttttttctgagatgtaagctgtattcggtctagtccagctgtacatcttgcttagtagacgaaacagattaaaccaataagcactggataacaatgaccaggtccgagactgtctacatgaagcagaagccaaaatatcaatacatcatctcctgatagacaccaatgcttatgtgttaacactaaccgacgagaccatattaaaaaattatagccacacgtgcatgcaatagttctttgttgcaaagcacgcgatattgatttctgtcaaacttaacaaatttacagcaatcatttccacatgccccagatctcactcgggaccaaacggattacaaggcagcagctaaagggtaataaatccctctactaaccagtagcacctatttagtttttctccagtctcctcaacacagattctgcaaacatgcgctgcttctcctcggtgtgttttgggctagggcggttatgtttcagatagccatcccacggaaccttcttaagaccagctcgagcagctatcatgtcccttactctttcagtaaattctatcgatgtctctccttccctgagatactgaggttccaagaaccagacatcacaaacaacagcccacgatgtcataagacggaccaagtgcattgtaaaagattgcttcttactattccagaaggcatcaacaaatattttattatatttgatagctattgggcatacagcagagccaagctcaaaagcacccttcttaaacatcacagtgtactgattattgacacaagttccttctgggaaaatcaaragcggattgttgtctggatgttgcacatgctcacgtaactttcttc

SEQ ID NO: 4100 - DNA, 904 bp, Avena sativa
aaaggaacatctggcatctattccaaacttctaagctggcacaaaaaggatctgttacagagtagcaaggtgcagtgcaatcagtatagttcttcaacaaggggtgctgcgtcaaacacaatggcccagattttgaccctgtttccaaacaagacggtgggtccttgtccgttctcatatgatgagctgctgaagtgtggcttcctgatgaagatgcatgtaacggagtggcagcggacgagtttatgaaggctacagggcatatgatcaagtgcaaactgccaaaggacatgcccctcaatcttcatcaaaagcctatcgtgttccaaagctgtctgggcttcttattgcaaaaacagtttggttgtagtctttctgcaagagatcaccagcatgaagcaagacaattcttgagaaatcgtatgatggaccagcaaataagcaaagcgccctctatttctttgctagatagtgaacaatcggtttctggtgtctggaggtcacaatctccaatacggttttgtcttttggggcttccaagtactaaccagggcgtttagagtggagaaacaacaatggctgccccctccgcaccaaaaaggatgtcaccgttttttctttaaaagtatagatacatatgaacttagagaatctgcgacattctttttgggatggagggagtactatacattgtagcagtaacaatccagagtcaactgttcgatatatactcgagcttgtagtagtaacaatctaggtgctgccttaagttgatcaattggttgcagcatgaatatgtctatgctacgacctactatgacttatcaagtttgtgtaatccatccttcctaaataaattgactaagttttgtctagatacggaggaaattgcagtatctaccat

SEQ ID NO: 4101 - DNA, 993 bp, Avena sativa
ccgagatggaggaagggacgtggagatcggcatggagtataggacggtctctggtgtggcaggaccattggttatcttggacaaagtaaagggcccaaagtatcaggagatcgtcaatattcgactgggagatggcaccactcgtcgtggtcaagtcctggaagttgatggtgaaaaagctgttgtgcaggtctttgaaggtacttcagggatcgacaacaagtatactactgtgcagtttacaggcgaggttttgaaaactcctgtctcacttgatatgcttggacgcattttcaatggttctggaaaacctattgataacggcccccccatattacctgaggcttacttggatatttctggaagttctatcaaccctagtgagagaacctatccagaagagatgattcaaacaggaatatccaccattgacgttatgaactcgattgccagagggcaaaagattcctcttttttctgctgctggacttcctcacaatgaaattgctgctcaaatttgtcgtcaggccggtcttgttaaaagattggaaaaaagcaagcatgcagcagagggcggtgaagaagacaattttgcaattgtatttgctgctatgggagtaaacatggaaacagcccaatttttcaaacgtgactttgaagaaaatggttcaatggagcgagtcacccttttcctgaatttggcaaatgatcccactattgagcgtatcatcactcctcgaatagctctaacaacagctgaatatttggcatatgaatgtgggaagcatgttcttgtcattctgacagatatgagctcatacgcagatgcacttcgagaggtctcagcagcacgtgaagaggtgcctggtagacgtggttatcccgggtatatgtatactgatctggccaccatatatgagcgagctgggcgtattgagggaagaaaagggatcaatttacccaaaattcctattcttacaatgcctaatgatga

SEQ ID NO: 4102 - DNA, 755 bp, Avena sativa
tgaaggcgaaatcccctaagcatgcacctgcggggcggctgattttcaccattgtagcaagttaagatgcgctcaaagtacttcacatatcttatctgacttggaagaataagcccttttccatctacacatcttttctgattgtagtattcaatggactcctccgcggtaggaaagaacttcaggtatactagaaggctggagatcatcaatcctgtccttgcctttccagctttacaatggacaaccactacattttctatgtcctccttcaaccatgagtatgcactctggcaaaatgatatgacaagttgtatcggaggacaattatgatcatcaaaagggaagcatgcgacctttccctcaaatagagatgcatcatacagcctttctgaacagaggttgtacaccttatatttccccttgtgatgcatttcaaagaacctgatgacttcctccatgtggttgcggtagaagccctcaaaatatccaaaaatcccagagctcaaatcaccggcaggaaaacccatagcaattatgttctctgtaatatatgtcatatctagatcaaatccaccttcctgatatcgtcttttattctgcgagaccatgtggcgggccttaacttgcactgccttaacagcattcttagaggaatccacaataccttttgtcaaggaaccaaaaacaccagcttgtgccgacgttggggtcgtgctgcctacagcactctcatcttgctgtggacttttttg

SEQ ID NO: 4103 - DNA, 1083 bp, Avena sativa
gtcaaacccgccgcgacgaaggggggagaaggacgacgggcgtagtggcggtcgccttcaaatccccccgtcgtcttctctcctcttctcccctcttcactccaacttctcccccacccctcctccaccactgctcctgctgccgacctcggccgagacgtcccagtcagagccgcgcgggggagggatcggtcggaggctcctgcggtaaccggcgcggcggcggttttgctgggttgttgctggcggtgtagctacctagccgctcccgtatcatcctcccgcggttccgatggggcagggcgtcgttgagatccacccccgcgagctccagttcacctttgagctgaagaagcaaagttcatgttctgtccatctagtcaacaagtccgatgaatatgtcggttttaaggttaagacaacttcccctaaaagatattgtgtccgaccaaatactggagttatccttcccaagggaacatgtgatttcacagttaccatgcaagcacagcgtactgctccaccagacatgcaattaaaagacaagtttttggtgcagaccacagttgttcctcctggtacatcagatgaggacctcattcctgcttttttctccaaagaaactaacgcatatattgatgaaagcaaattgagagttgtccttgttgatgcatctcgtcctcctgtggagcaactgataaatagtgtccccaacactgatgcagcagttgaggttcctgtgtcaagacacacactgaatgttgagaatgaagtgccagttatggagaaagaggttcctgctcctcaggaacaaatttcagctcttgtgactgacataccttctcctgtcaagcagtctccaatccttcaagaagttccagtcatactgcatgaagaacctgctattttggcagaatctcctccacctctaaaaaatcaatctcatctccctggaaaagatgaatctccttcccctataaaagatacatctgcaattaccactgaacaacttcctcctctgaaagaaaacagtgtaacttcaaaggagtctcctgtagaagaaactctcccaaaagaagctgt

SEQ ID NO: 4104 - DNA, 935 bp, Avena sativa
actcaacagttttcccatgttattcttggtttggatggtacgctcgtaaatacagattatgttgtacatcaagtgctaaaatcatttcttgccaaggaagggaaaaaatagggatagcaagaaagctcagtgtttgttaggaaagggaccctatgaagctgcagttgctgttttcgaagactgcgaactcccttactcagcagaagagttcctcaacttgattactccaatgcttactgagaagtggggcaatataaaagctcttgcaggagctaatcgattagtagagcatttaaggagtaggggtatatgtgttgctctggcttccaactccccaagagcaaacattagagcaaagctctcttgtcatccaggatgggaagaattttttgcagcaattgttggtggtgatgaagtgacaaagggaaagccatctccaaacatttttctggaagctgcaaagagaatgaactctgatccatcaaactgcatcgtaattgaggattccttgccaggtttcctggctggtaacgctgcaggcatgcacgtgatagctgtaccttcaatacccaaaagcactgctgaatctggtgctgctgatgaagtgatcaattctctccttgacttacggcttgaaaaatggggcttgccaccgtttgtcgattggattgaggacaccttgccaatagagccatggtttatcagcggacctgtgataaaaggatatggccgtggttctggattactagggataccaacagccaacttacctgtagacaagttctctgacatactctcagagcatacttctggggtatactttggttgggctggactgagtaaaggaggtatctacaagatggtcatgagcgtcggttggaacccatattttcataactcggagaaaactattgagccatggatacttcatgact

SEQ ID NO: 4105 - DNA, 838 bp, Avena sativa
cactgagtgaacttcggaagatggaggcttctcctgagccaaacacaagctcaaggagggaaggattcagatggagcagtgctagcagctatgatttttggatatgatggagaggccattgacatttcagatcatatcagtgttgaatcccaaaggtccccaacaagttcagtgagtttcctcaagtgcggcttatgcgacagattccttcggcagaaatcaccatggagctcaaaccggatagttcggaatacaaacatgccagtagcagcagtgctcccatgccgacatgtcttccacgcagactgcctggaggaaagtactcccaagagcgaaatccatgaaccaccttgcccactgtgtgtacgagctactgatagtgaaggatgtgtatcattctcagaacctctccatgttgccctcagatccgctcgcaggaatcaaagcattagtttctcttcaggtggtgctggtgggagtagcagtgcaaaccatcctcgcaatgatcatgtcctgaagagaaatcagtccacgcttgtgcctaggcgcagcgggtcgctgttccggaaccgtttcaagaagcagttccccttcagggggaggatcgggaaggacctcttcggaggtagagttttcaggaaggttggctcatcatcgtcttcgggtcagcaggataatcatcaactaccagcgacgaagcctgaccaatctatgaaatagctagggcgaagggtcgcgcctctatggtgtgcactgctgctactctaagccttttaccccttcatgtccagcatccctagtacatgtatcataagctgtgaatgcagtgtccatgcgc

SEQ ID NO: 4106 - DNA, 1041 bp, Avena sativa
ttttttttgttttcacttgtttctgtacaatgttcattagaaagccaagcaaaccataatagtacaagggttaggtacaaattgagttactagcaacagatgttgacacgctgatcaaattctactgggcaactttttaagctaaagacaaccagttagtgtgttcataacctgccattcccagttaatacatagcttacatatgacactacataaataaaaccatcactcttttgtactactataataaacggaccatcctctcgcgtcttcatcgttggatagaaccatcattctactagtcgggcaaacactgtacaaactggacactatcatgtcacagtgagctgcataccgtactaaattcctagttacgttatatccttcgaggcggctcgacaagcactcctcatgtggcctgcttctttcaccatgtgaatttttcgatttctagtagtaagtcatcgttgaatgttgatgatgttgcctcatcagatgtacccagtttagcagttgcctgacggacctcctcgagcattcggcggtactgcatccttgcttcaggagagtctaccatggacagtactcttgacacagcctcctgcacagattcatcaaccttctgtcgacggaagatcttgactgcttcgtcatcagcgaagtcatcgtcatcctcctcctctccctcctctacttcaatcatcgctgattgatcagctcggaagccacgcaggccatgtcctttccgacgccaccttagtattactttctctagcacactaacagtgcttatgaaagtcttgtatttctttctcacttggtgacctcttacatgagcctgtattttaaccacatttctgcgcatgttgagaaagtttctgcgtcctttccaacccttgtatttcttctgaattgaaacagctgctttatcacaaaactggccatttgaaacatgatgttggttgtataaccttgatgcagctgcaagttcatctatatcttcttgcgtcatcccatattcatccttaagtcgagcatcct

SEQ ID NO: 4107 - DNA, 761 bp, Avena sativa
atcggtgcttatcacgattggtgcgaaccatttagcacatatcccaggtcctacgatcttcttcatgctgaccatctattctcacgcttgaagaacagatgtaaggaacctgtgacaattttggtcgagatggaccggatcctgaggcctggaggctgggtcatcatccgggaaaaactcgagatccttgacccactggaggcaattctgaaatcgctgcactgggaaatcgtgatgaccttcagaaaggacaaggagggcattatgtctgtaaagaaaacaacgtggcggccatgagctaatctgtcagaccagcacacgaatttttgaagtggtacagctgttgatatgggataaacacacgtgattggttcattcgttgccttacacgaccagctactactacccgagtctgagcacacggtttttggcgggttgcagtcgtcgttacactcgccagttcgtctttgacagcatccagttctatgtttcagacaaaggactccgtagaacctgagtcttgaattgcgtagacagggctgagggctgtagtatgttgtttctgaacattgtaacgatgtgtaaaggatgtagagtctcggaacattgtgacgatgtgtaaagggtgcaaagtctctgaacaattgtaaaaggacgtgtaaatgatgtaacagttgagcaattctttggtgcttctgaaagatgtaaaaacagcatgtaaagattgtagagtttgtattcttcttcaaatttgtgacagt

SEQ ID NO: 4108 - DNA, 735 bp, Avena sativa
ccagaatgccccaaactgcttgtccctgtgcttggcaagctacagatcgtgaagctggataatcttcgtgaaggatgtgatatcgcttggaccatgttcattcttgaagctgcaagctccctaaaggagctatccatctcggtgtgggatcattggtgcgaaatgcagacaaacaaggattttcgaagggaaaatggttactgcgagaaagcaaacgtggagtggcaaccctcggctgttcattttaagcacaagaacctggttaagctcaccatctatggcttccaacctgaggaaaactttgtgcgatatgttaggcgtgttatggaaattgcggtgaacatggaggagatatctctgcatgacagggaggtgtgtgagcactgcgggaacttggatcccagtatcaaggtttgtccttctaggtatccgcggataaatgaggagaaggatatgttgaggaaggagatcactaaggagttgcgagtggcatcgcctgctgtcattcacttcaggtcctaataattgaatagtctgatgcatgccatcactataatctagagtctgtaaatctttcatggcatttgtaaatcatctactatgtagatccaagtagtttttgtgctccataattgggtagtcactgcatttgtactcttatttattccttcaacagaaatttgtactgatgccttagggccaaaatataataatcaatgtgacgctccccattgg

SEQ ID NO: 4109 - DNA, 964 bp, Avena sativa
gctgctctcgtatcggtactttgcaattgtgtaagatccatgattcttaatattggcaaataattctgaatatttctgatactggatgctactttgtgcttgttgtcatttcgatttatttagataaatgtgctgttgttgcatagctgtcttccatctgtgcctctcagtagtttttattctatagagtactcctgatatgaatctatttcctctgtgcctctcagtagcttaaaatagccttggagaagattatccttgctcttatttacatgctaaaattgaaacaacatttcctttgttatggtatatatcagtgaatcataatatgtcatgtgatcataatattctggctgtattgagataaattttaaccacaaaaatcataaaatacaatctgtatagtatatttgagcagcttgcccaagcacactaaactataagtgtttcatcaaacccttgattactgtccaaatattttgcagtttgcctgccatagcctattatactgaaaacttagtcacaaaagagtgagtaacaagttttcccttgtttattgtgcaatgtaatgcatgtatcttcagaataacaagctgttggttgagtacgtggaccacttcgagtcatgctggctgcggctgctcgtctatgctggcgacaacacagatcagatcttcaagaaaccccatccaccacattgtcacaatcaggtggtttgtgcatctgtcaaactgtgctgatcttttgttcttcaggttatccgaacccggatgtcatgtgtatgctgatggagttgtacgttatgtgaaccctgatgtatttgtactgatggtcgtcttttgttgctgattcttgtgttggatggagttgtaacttaatataacatgctgagattaagtggtctgttgttttgttatgctgttaataaaatgatgaatgtctatactaggctgacaaaaaaaaa

SEQ ID NO: 4110 - DNA, 891 bp, Avena sativa
gacgacaacgtgctgctcgcgcacccgcagctcaactacacggcgttcgcgcccaccgccgccagctcggcggacacgttctactatgtccggctcaagggcgtcctcgtcggcggggagatgctggacatctcgtccgagacatggggcgtggccaaggatggctctggcggtacgatcatagactccggcaccacgctcagctacttcccggagccggcgtaccaggtgatcaggaaggcgttcatccaacgcatgtccaagacctacccactcatcgccgacttcccggtgctcagcccgtgctacaatgtctccggggtggaaaaatgttgaggtgccggagttctccctgctgttcaccgacggcgccatgtgggacttcccggcggagaactacttcatccggctcgaacgggagatcatgtgcctcgccgtcctcggcacgccgcattccgccatgtccatcatcggcaattaccaacagcagaatttccatgttctctacgatttgcagaacaaccggctcggcttcgcgccacggcggtgcgccgaggtctaaagtctccattttgattggttggttgattgtgttacaggtggctaactgggtgtgtacaaattttggagtaggatggaggatgctatttgctacacataatcatctagcacaaggttttcgtatctcaaaagagacgaaggaactatgtgtagtagttagggatactttttaccatttcagctgtatacagatttattggttaatattctttgcaagaatttttgtgagttttatcttcagagattatggattttgtccggctgtggttcccctttgtcggggctaatcttatacacaatcagaagctacttacagacggtcatacaaaa

SEQ ID NO: 4111 - DNA, 774 bp, Avena sativa
tgcttgtcattgtaccatggatcaacgcttggcatggcgatgcctagtttgccttggctgcaaatattgcgattcatgctataaacaaggtggtgaaaatttgcacgttcataacttaaacagatggactgtcgctaccaaactgtgccgaactacactctacaggactaccttgacggtctggtacatgcatcgaaatgcttctatgaaccgcgtaattgtactttcaaactttgtattgtgatgaagaagctgttcttccacggcgtacgatgtgatatccgtaaccgaggaggttgccggaagtgtatcttcatgtggaaacttctgctcacccattcgaaacattgtgttgatggggactgctcagttccaagatgcagggatataaaggtattcatgggcaaggcaaggatgctcactgtagctcgagctatagattgccagcggttccggaattagcgtcctgtgaaactagtagtacttgctaatcaagaagattcgttgatgaaaacgcaataagttggcggccgtcataaaaatgacgacttggtggcggcagcagcagcagcagagttaatttgttccgcaggtttccccggaatcgcatgaagaaggaaggcaggcagacttaattatgtggtcagtccatttttgatttgacatgggagaggggaaacgcctgcggaagcttacgtagacacagtctgacatatgtagtgttggtaggtacatacctgtatagcttagtttccttgcaagccatagcttgga

SEQ ID NO: 4112 - DNA, 809 bp, Avena sativa
ttgatagaagatggaagacatctaagacacatacataactggaatccattataacaaatagtaatttcccctgagtacagtatccacaacaagcaaccaaatttcaggatgatattaacagatggatgatcttgttccaaatctgtagtgatacgaaaagccatgactccagctgtcaacttcaaaacgtttaccattagggagctgactcgactatggtcccaaggggaagaaacttgaaacaacagcagtgactacggacacagatggaccccagacattcagactgaaacttgacgacgacgctgaaccatcttgaccctcataactgttctaggactcactgattgtcctgatctgtagccaaatcatcaggactgtttgcctgcaatggcttttcttccccacaacttggacggttgcattttgtccggaaaggatagtttatgttattgcacttatcgcacttccaactaccctctggcgtcttcggttttgaacctcgtgaactgtcaggtttgggtccctggttatcaggtcttggtgtgttgcatttcctcatgttacagactgcccgaaaggcaaagttgacgttgttgcaattagggcacttccaatcattatcacgcccagctcctgcagatttcttctgtgagccttcgtcagaataggaaccagcccttgtgaccattgcaccaggaccaccaggtgagcccaagccatatctgtcaatgggcatgctgatgctgtacataccacctggaccaatcatagaaccaccagaatatggaggtggcccagtcatgcac

SEQ ID NO: 4113 - DNA, 831 bp, Avena sativa
ctctgaagcaattggaacaggaaattaaatttcttagccaatttaagcatgaaaacattgtgcagtattacggcagtgaaactactgaagatagattctacatatacctggagtatgttcatccgggttcaattaataagtatattagccaacattgtggtgcaatgacagagtcagttgtccgcaacttcactcgccatatccttaagggtcttgctttcctacatagccaaaaaattatgcatagggatatcaaaggagctaatttgcttgttgatgtcaatggtgtagtgaaactggctgactttggaatggctaagcatttgagtactgcggctccaaatctttcgctcaagggaacaccatactggatggcccctgaggttgtccaggctacacttatcaaagatgtaggttatgatcttgctgttgatatctggagccttggttgcacaattattgagatgttcactggcaagcctccttggagtggtcttgaagggcctgctgcaatgtttaaggtgttgaataaagacccaccaattccagataatttatcattggaagggaaggattttctgagaggctgcttcaggagaaagccaacggagagacctacagcaaacaagctgcttgaacacccattcatccaaaattcaaatcacttcagccagaacacttcacattcacttgcaggaatcaaatccccagatgctggacactctgcgagagaaaagaagtcctggaagactgacacttgcctgagaggaaagcaaacaagcacagttggtgaaacaagcagctctagaactcctgggtcattgggtcatc

SEQ ID NO: 4114 - DNA, 978 bp, Avena sativa
ctgctgctatcagctcgggaacagattttggaagaccctggaccagtgtccagcacactccaaggttatgccatggccaatatgctcttcttctgtggtagtctactctggggctcagaaagaacctcttctgttatgaaactgtcattcctctcaaggaggccacgagtggtgggcacccacatggatttcattgctggcgtgttggacggacacatcctgctgggctgtgacccaggtacatggaaggcatatgtatcctgctttgtatttcttgtggtgaagtttgtcccgtcatggctgctggacataaaactggacacacttaagaagatcgcagctgggctccggagttggcacgagcatgatcttgctctatctctacttgagcgagcaggaccacagtcggtctccattgtagttgagaccttactgcaatgatctccgtcttccggagtttttgtccccacctaacatgtaggagttgttgcaattcgaagcctaaattccagttggtgagccatcagggcagctgtatttacttgtctggtagaaagttgagttcatctgtgaattagtgtcaggtcaaggtcatctcgtatgggtgtatggcctctttgctggatacttggctgccgttttgtaagctcggattcttagagcctactagaagtgtcttgggtaaagtaccccagcttttaacttgtacaacacaatatagtaacatggggcctgtatctactgttaatctggccctctcgaaggtcatcatgagcgagcaaatttggtaggtcggctatggaggagtctctgaatattgtgcccccctttcttcaacaaaacatgtattgttctaggttttggcacgatatttaccgcgcatttttatttgaaaaatgcctgtatggtcatacatatgttgcacacaaaacaaatttgttgtcactggtatcatgagtaatagtcagcgaatttctg

SEQ ID NO: 4115 - DNA, 975 bp, Avena sativa
aacctcctgatgctactactttgacacaaactttctaacttagcaaccaacaaatttccttcactcttgcttagagcacaccctctttcctaattgactgcctagctgcaaagatttccttcctaaacctgtctccctctgctcctgctgctgctggtttagctctccttctcacctacctaatttgcaagcaactgcaatgcaacaaccactctgtgattgattcatctatttctcctgcccctcctcaccctcctctatacaaagaaaaaatcttagggggaaccaattaagtaatagacaaagaaaaaaggtgaaaataaacccaaagaaaagccctactgaactaacgccagccaggatgaccgacgatggatggatgctgacagaaaaccaatgcatggcgatgatgatatggtggatggtttcatgaaagcaatgctggggcactgtccatgttcatggcgatgacgacgacgactgactgactaaaagcaagcatgcaatgcatacatactagcatgtatacatatattgtagctaagggggacgagaccgaccgtccagcaacgacgcccgcccgggcatgtcgccgcagcaggggcatcaatcccggcgacggatgaactgaaggagatcgtcgcccttgggttcaaccttctggcgcatctccaccaccttcttgtgggagttggaatggatagccggaacgaaggtggggctggccgcagggcggtattccgggaagaggcggccagacttgtagcgcacgccgcaggcgttgcagagcgtcttcggccccagagggccagcgcgccactgtggcgtcttctcgatctggcaatgcgtgcacctccggacagtgcccggtgggagagcagcaccgccgctgccttcctcatagtccgcgtcgccgtcgccctcggcgtccgaggtgaccggaggcgctggcttcttggccttcttttcttcttc

SEQ ID NO: 4116 - DNA, 978 bp, Avena sativa
gtgcagagcggctcgcaccaggcattgttgtgccagatactgacttccatttgcgcaggttgtggggagacccaagtgaggatctgcccttcaaaccaaagtaccttgtgactttcactgttggatatgctcaaaaagaaatataaacagagcagtgaagaagttttctgacaattttgctatcctgttattccactatgatggtcgcgtgatcgaatgggaagaatttgagtggtcaaagcgggccatccatgttagtgtcagtaaacaaactaagtggtggtatgccaaaaggtttttgcatcctgatattgtggcagcttacgagtatatattcatctgggatgaggaccttggggtggatcatttcgatgcggaggagtacatcagacttgttaaaaaatatggtctagatatctcccagcctggtttagagcctgaccgaggactaacttggcagatgaccaaaagaagaggtgacagagaggtccataaggtgacagaggaaaggcaaggctggtgctctgaccctcatcttccaccttgtgctgcgtttgttgaaataatggctcctgtcttctcaaggcacgcatggcgatgtgtatggcatatgattcagaatgatttggttcatggatggggcctcgatttcgccctcaggaaatgcgtagagcctgctcacgagaagatcggggtgatcgactctcagtggatcactcaccaggtggttccttctcttgggaaccagggcaaggcggagcgtgggaggccagcgtgggaaggggtgaggatgcgatgccggaaggagtggggcatgttccagacgaggttggcggacgccgagaaagcctactacaagatgatgggaatcacccctccgaactccacccttgtctagctagccgatgggcgatgacccatcttcgtcttcctcaattccaatgacttgacagccctgactcctgcgcttggatgatg

SEQ ID NO: 4117 - DNA, 939 bp, Avena sativa
gctgaatcttgtgagtctttaaaagatggtttcctctgagataccttctgttacaacaacccatacacatgggcccaagctctttagagggatgatacttctgccaaaagggcctccagatgtcatccttcctgaaagtgttgagttcgatttcaatgatgtttttggtcctgcggcggtccatacccccacagaagcaagcattgtcactcccgatagccctgcacctttcgctgagtctggtgaggaggtttacaatgaccctgtagtcattaccaagcgatcacattctcttgttggcccaactttacttgttagccagtccttgccacttagtaagcttactctacatgagtccgagagctcatcagatctcttggaatgtctttctaaacaaaaacaaagtaaccaggaggctctcagtgatgaagagctcagcaatacaaaggagaatgaggctgttggactagacaactttgaagtcttgaagcttgttggccaaggggcatttggcaaagtctatcaggtaagaatgaaaggtacttcagaaatatatgcaatgaaagtcatgaggaaggacaagattttggagaagaaccatgctgagtacatgaaagcagagagagacatactgacaaaagttgatcatccttttgttgtgcagctgaggtactccttccagacaaagtaccggctttaccttgtcttggactttgtaaatggtggccatctcttcttccagctttaccaacagggtttgtttagggaggagcttgcgcgcatatatactgctgaaattgtatctgctgtagcccaccttcatgccaatgggattatgcatagagatctgaagcctgagaacatcttactggatgctcgtggccatgctatgctgaccgattttggcctggcaaaggagttcgatgagaacactagatc

SEQ ID NO: 4118 - DNA, 830 bp, Avena sativa
gatgaaatctgtgattttgttgaattgactagacacaaacctattaatattagatttatcgagttcatgccatttgacggtaatgtttggaatgccaagaagcttgtcccttatgcagaaatactggataaagtgcgtcaacattttaaagctgtagagagacttcaagatcacccttcagagaccgcaaagaatttcaagattgatgggcatgttggaacaatttcatttattacatcaatgacagagcatttttgtgctggttgcaatagattgcgattattggctgatggcaacttcaaagtgtgcttatttggcccctcagaggtgagcttgagagagcctattcattcgggtattgatgatgctggattgaaggaaataattagtgctgcggttaaaaggaaaaaagctaagcatgctgggatgtttgatattgcgaagacagcaaatagacctatgatacatattggtggctaaggatcagcggctgagttccttctctcctgtgtgacagctaagataaagtgtgagcttgctgttgtttcctgagaaaagttacacatctagctctggaaagaggcaactcagaaggcaatacagatacggctgttaaaacatagtccaatacttgtgaaacagcatttcagaacctcacacctttcagtcttgacatgtttgtacttttgactgcacataccacagactaaagtgtttatgttgtactgtataatgtatccccctcaaatgccactattgtaaagttgtacaatattcattttgtaatgtatgattatggaatgaggaaattgattatatgccactaccaa

SEQ ID NO: 4119 - DNA, 809 bp, Avena sativa
catcaacggagactgtcttgctgtggtgaatacctctcagcttccttctgatctcatcttgtcagtggcgagcacaacacactcagattggcaagatacaaactggtacgtgacaggtcatcaaagcggtgctgtcaaggtatggaagatggtccactgcacgtctgatgaagcagcagacagcaaaagcaaatcgccaacaaccacctttggagggccaggcctgaatggccagacactggaatacaggctacttcttcagaaggttctcaagtcacacaagcacccggtcactgctctttgtctaacacctgacctgaagcagcttctgagcggggatgccagtggtcgcttgttttcgtggtcactgaaagatgacagctttaagggttcatagcgatagaggaatcaggattcacctgcacatatcaaaagcattgattagattatatctggtaagctgacaagcacctgcttgtgttgacaacaagagcacggggttgggctcggcttgaagaaacgtgctatatggggacccctcttgacgcccaaggccattcgaggatgtaaaggccaaatgcaacagagacacactactgaaatggggaagaagtggatgaggcgatcgaggcgtcgttgtgctgacaatataatcttatactgtgcattgtgtgctggttctacctcctgctcttgttatttttttttttctaggtagaaagagtaccatgtggggtagaggctagtgtttgtaaagtgtataggatgttttgtagtgatggttggggcggacgatgatgatgttgtac

SEQ ID NO: 4120 - DNA, 903 bp, Avena sativa
aggatgcacaaaggagatctttcatatagcgatgctgaccggaagccctctttccgtaaacaagaaaatgtattatacgcggcaaaggacccaaaggagtacattcaagcgaaggaagatgtttgatcgtcattcaactctagtatctgaagaatttgcaaaatcaaatgcaaggagaaccacaaaggttacagaaagagctgcttctttggaagcaaacaaagggagcaattcgatgccattccgtagatcttgtggatcaaacgattgccatgtgaaacttaagataaaatctttcaaggtgcctgaacttctaattgagatcccagaaactgcatctgttggttcgctaaagaaaactgttctggaggcggttaatgccatgcttggaggtggtctgcgtgtcggtgttcttcatcatggaaagaaaatcagagatgatagcaaaaccctattgcaggctgggattggtcatgatgatatgctggacaacctgggcttttcacttgaacccaactgtacacagcatccatcgcagtttgcagcttctgaagatgttgagttccttgaaaccgtcgataccactgaacccctagcaaggatcccaccatctgactcgtcttcgaagcatggtgaagttgatgcctcccaggagcttgcattgacccccttagcagcaaactaccatgggaatgatcacgactcggtgcactctcctggtggcatttcctcgcctgagaaggcttcagcgaactcgcgagcgatcgttccagttacacctgtagattccagtgcaggggcgatagtcccagtaaataaggcaaagaggtcatcagaacaggggcaacgtcgaatcagacgtccattctctgttgctgaagtagaagcacttgtgcttgcagt

SEQ ID NO: 4121 - DNA, 939 bp, Avena sativa
aagacgcggggagaccatggcgccggagccggaggacgacatcatgaacgagaagaacccgcgcccgctcgacgaggacgacatcgcgctcctcaagacctacgggcttggaccgtactccacgagcattaagagggtcgagaaggagatcaaggagaagtccaagaagatcaatgagctcattgggataaaagagtctgatactgggctggctccacctagccagtgggatctggtgtccgataaacagatgatgcaagaagaacaaccttacaggtagcaaggtgcaccaagattataagccctaataccgatgatgccaaatatatgattaatgtaaagcaaattgcaaagtttgtggttggattgggggataaagtctccccaactgatatcgaggaagggatgagagtcggtgttgatcgaaacaagtaccagattcaaattcctttgccaccaaagatcgacccaagtgttacaatgatgactgttgaggaaaaacccgatgtgacatataacgatgttggtggatgcaaagagcagattgagaagatgcgtgaggttgttgagctacctatgcttcacccagaaaagttcgtaaagcttggtattgaccctcctaaaggtgttctttgctatggtcctcctggcactggcaagactcttcttgctagagctgtagctaatcgcacagatgcttgttttatccgtgtaattggaagtgaactagttcaaaagtatgtgggcgaaggggctcgcatggttagagagttatttgagatggctcgctcgaagaaagcatgcattatcttctttgatgaagttgacgctattggtggtgctcgctttgatgatggggctgggggagataatgaggttcagcgtactatgctagaaattgttaaccagctggatgggtttgatgctagggggaatatc

SEQ ID NO: 4122 - DNA, 763 bp, Avena sativa
tcttgtacagcatcacagatttgtgccgtatgcaagttcttcgcattctctttgttttcttcaacaaaatggttgccacaataaccaaagggatgtgtactgaaatgctgtacaagtaaattaaaatacaaccaactatctgacaaaaacaatgaactacaaacctagaacaagcttgtttaattaaggctctaatatctccgtgcaacgcatataagctctgcagcttggcagagggattacacatcaaaatgtttctataacactataagaagcatagattgacgagatcggttttcatatatttgcattcctgtcgacggcggttctgctcagtaacccacttttgagctctaccaagttgctttgtcaagaaggacgcaattttgcatcaccggagagcaccaggcaagagtttgcgtattatagcagttggttgccttacattctctgttttccacagctcaaagaacagcagtcattaaacttccaagattaagatgccttcaaacgagtctgccgttttgcctttcctctttttgatttgtcagttttccagcaggggaagaggccatgacagccaggtgctccagactcagagactacactctcgttgtcacaattcgccaaatcgttattcctgtgcaagaggcttggtgaaatcacgaatccgttctcccttcctacattccggtcattctggggaccatgactgtcactgatctttaaagctttcaatccattactcaatccttgtcaaatt

SEQ ID NO: 4123 - DNA, 623 bp, Avena sativa
gtaacggtcaagaggaggcatatcgtctgatgcacgatatccacttgaatatacatagtcatgcccgacaggcttattgtctctgcctagataccttggctcatcagaaacactaacaggcaaagggtgatacgggatcacaggcggaaaacctgataaagcaccctctctttcaaagaagttggctttcagccttgtagttatttgcacaagagcgtttcttgcgacatcaaggtctccactgatctggaccatctcttcatcttcagatgctacttttggaacattctcctttgaaaagatgcgtatgtttgctcctgatgttcttcgtatctctgtaatgattgaaccacctttgccgatcaggcaccctatccgtgatgttgacaccaacaaacgtgttgtatatgacgtctcccctgattctgggtcagttttctcactgcattttggctgtaaacgaactgtagcatcaattgttggagagacaggatcttcaaagaactcttttgctgaaactgtaattatgcagtcatctacatgatttgaactatcgactttgatagaagctccagactcctgcctaatctgtttgataattccacctccttttccaattacac

SEQ ID NO: 4124 - DNA, 1132 bp, Avena sativa
ttttttttgtagattgagcttcagccgaactatcttaatcagctagatgtagcagattacattacattacaggagatattgtaaggaggaagaagcttaagctactgacgactgaacttgcagcgaacggggatcatcgggagattacaggaacagatggaatgagccggtagtagcagctcgaatcctgctatgtacattgggcgtgctctgccacgcatggcgtggcgaatgattgatcagtacaccttcttggagaagaaggtgcggcgcaggccgaacagcccgtgcggcgggttgcactcctcgccgtcggcttccgagcacgccgcgttgttccggcacggggccgtcgccgcgctcacgctgctcgccgccgatgctgacgccggcgcaggagcctccttgtcttcttcatcttctgctgtgccgccgggctggctcgtggcgacgtcgtcgtcggggacggactctttgttattattagccttggtgccgtctttctgcttctgctcggccgcggcctgctgctgctgcagcttgttgcgcctgagctgccacacggggctggcccggcccaggcggatgccgctggcgccgagccctgctcgaccctgcccgccgggcacccacctcctcagcatcgaggtggcggcggccttctcagctgccaccgcgatggcgaccgtcggcaatgccgccgtcggccccgaggtctcgccgcgggagttgctccgggagcagggcgcgctgctcaccttgcgcccagcagcaggcgccgccggtgcgctagcagcagcgacggcaccggtgttgctgttgctattgctggcgccgggattgcttggcttggccttgccgacggcgccagcgccggcggcggcggagtggcccgcggagcggctcctggagaagggccatatgttgatgttgatgagctccgagttcccgctgacgctgctgacgcgccgctccgccttcttgctgttccggtccttgtgctcgccggccgtcttgaagatgtccttccatttgaacgtcaccgcgggaggtccggcgccggaggtgcaggactccgcgaggggctgcgcggcaaactccccctcggcggcttcagaggactcctccgcgt

SEQ ID NO: 4125 - DNA, 876 bp, Avena sativa
caatgtgtcaagagcttcctgaaccactctactcgattcagattcgattgctgagctggcctcgtccaacagcaatatcggcgcattcttcaaaaccaccctagcaatggcaatccgttgcttctgcccaggtgtgagatcaacccctctcatccccacgtgagtgtcatagccatgtggcaagctactaatgaaatggtgagcgtttgctatccttgcagcttccttcatctcagcctcagttgcgttgtgccttgcatagataatgttctcccttattgttgtcgagaagatgacaggctcttgctgaattaggcccatgtggcttcgcaaccatctcaggttgaatgctttcagatctcggccatccagcagaacttggccagacattgggtcataaaatctctcaattaaggaaatgatagtgctctttccagaccctgaaacgcctaccactgcaactgtttgcccaccgcttaccttaagattaaaattgctcagcacaaggacttctggacgaactggataggagaaatcaacattcttgaattcaatgctcccatagacgttgggtggtttcaggccagtgttgtcatcaggatcaatctttggctctcggtcaataatttcaaacactgaagtgagagacttccgccgtttaagtatgtacggcgcgagtccaaatggctccaccaatgcaaaggatgcaaacgagaaaagaatgtactgttttagccctgtggctattgtcaggcgctgcttgtccactgaggtggaaatgtaccatagaagaagggcgttgcaggcaaaaagaagaaactgcgagaagccaaaaccgaagcctatagccaatccttgtacaagactttgcctcag

SEQ ID NO: 4126 - DNA, 807 bp, Avena sativa
tcgatagaggctgcacagggtggtttgttcttggaagagctgaatgcaaagtggatggatcacaacaaggcactgcagatgatccgggatattctaatgtacatggaccgaacttatgtcccaacatctcataggacacctgttcatgagcttggtctgaatttgtggagggatcatataattcactaccccatgatccatggtcggctgcttgacacccttcttgatcttattcacagagaaagaatgggtgaagtgatcaacagaggcctgatgaggagcgtaacaaagatgctaatggatcttggtcctgctgtgtatcaagatgattttgagaaaccatatttggaagtttcagctagcttctacagcggggagtctcaagagttcattgaatgctgtgattgtgggaactatattaagaaggctgagcggcggctcaatgaggaaatggagcgtgtctcacactacttggatgctggcagtgaggctaagatcactagcgtggtggagaaagagatgattgccaatcacatgaatagattggtccacatggaaaactcgggccttgtcaacatgcttatagatgacaaatatgaagatttgggtaggatgtacaccttattccgaagggttcctgatggtctatcaacaatcagagatatgatgacttcttacctgagggaaacagggaagcagttagtaacggatccagagagactgaaagacccagtggaatttgtccagtgcttgttgaatgagaaggacaagcatgacaagatcatcagtgttgcctttggcaatgat

SEQ ID NO: 4127 - DNA, 560 bp, Avena sativa
ccaagtccaccatgaggcctctcaaaagacctcatgaaagtcagatgcaaagctgcccagaaggaaccatgaggggtccgaaaagagtttctaaatatggggctatggctcctcagttcaaaggttcagttttgcccaaacctggggcagcagcattgaacttattcatgttccctccagataaattatccatgcgtccccctccgcagtacatggatggtgaatctgatcaagacttgctgctggaggttcctcgcaatgcacaacaaccagaggcggaacttctttgccaaccatttcagcttagctcagtaacccgcagctccacctcagaggacgtggtcgctgatggcgaggggcgcctcaagcaaccttagccgcagttcgactagcaaccaacttaggaacaggcggtagcagtagtttcatttaggttcctggatcgttatggtatccttatttaccgattaccggtagggcttctgcggtttgttcatccttgtgccgccatcgctgtcgcctgatttacattgacaatgtgcatctgccagctcaggcag

SEQ ID NO: 4128 - DNA, 799 bp, Avena sativa
aaatcaaatcaagatcgcgttgcttgccactgcactctcgcagcattgcatgttctgagctcatggccatgtctcttgccaacttgtcatgatagctgcccctaaactgcaatgttctcatctcttcctccctcgcctataaatccatgagcttggcaccaccatcacctcatcagttcatccacaaagcgtaagctaaagcatcacctctggaccacgacagcaccgaaaggagcagcctatgatgagtgctgctcgacattgtccgtcgcggcgaagggccacttcgtggtgtacaccgctgatgaggtacggttcgaggtgccgctgccataccttggcacggtggtcttcagcgagctcctaaggatgtctcaggaggagttcggattcgctggcgtccatgatgggaggatcacgctaccctgtgatgccgcggtcatggaatatggcatcttcttgctccagagagatgcctccgcagaggtggtgaaggcattcatgagctccgttgcaaggccgtgcagctttgatggttgtgcggtggcgtcatacgtagagcataaccagcaagcagctgtctgttagcttctgaagaatggcagttgtagtgctagctttagccctgttttgcttgttgcatgatgtgaatatacagttggaagtagtagactggacatgtaaacgaagattatgttgcaatctgcaacatggtgaactttgtaacaatagaaaacctcgggcatataggtaaatctttgaactagagaccatacaatacaacggcagctcatcaaaa

SEQ ID NO: 4129 - DNA, 487 bp, Avena sativa
gcacgctcgcctccgctcacgagctactagcatctgctggtgacagtattattacagtggtctggtctgacatcgacgggtagtactgagaaaaagaaaatctagtcgcctaaaaagattcagatacatagcctcaatctaactgatttagcacaaacaccctgccataagttctgccacgaaaagtgtcacgcctgatcgatgcaaatgttacaaaggaaatgaagaagaaagaaaatggtgatccacgctcgagaggtttcggccttccaagatcctgatcaaactgttgcgtgtgcctcgaggtggccggtcgatgtgtcggtggcatgatagcacgcacgccgagaaagaaccaatcgaccagtagctccgtagcacttgttcttggtctcgtgcgaatccaacaccctgcgcgcgcacgttgggatgattcattcaccgtggtggtagcgggaggtggtggttgttatgaggttaaagagct

SEQ ID NO: 4130 - DNA, 916 bp, Avena sativa
gtggagataactgtgagctaccttacggaactaggagtttctaaggaaaacattggcaagatcctgacacgatgtcctcatctcatgagctatagtgtcgatgacaacctcagaccaactgctgaatacttccggtcgatcggggcagatgctgcttctcttattcagaaatgcccccaggcttttggtctgaacgtagagtcaaagctgaaaccaatcacacagttttttccttggcaaggagttcagcatcgaagaaattggcattatggtaaatagatttgggatcattcacacacttagcttgcaagaaaatttgcttcccaaatacgaatatttcctgacaatgggatacccaaggaatgagcttgtgaaattcccgcagtactttgggtacagcttagagctgcggataaaacctcggtatgctcggatgactggttgcggggtgaggttgattctgaaccagatgttgtcagtctcggaaaccaggtttgaggaaattctgcagaagaagtcaggcggattttgagatgatcataatttcagacaagcacacagttggataagttcacttcaaaacaaccggttggtagccttgtgcatcagtcaaattataattttcagaggaaggttttctactttgccatgctcttcggtagttgcatgacagttggtggacgtgccgcatttggaaatgaccaattttgatatacaacctactggtggcttaggtagctagtttaggcgatttcagcttttttctgtcgcaagggtaggtattatatttgcaataccgaatgtggttggtactatttgatacagttcttgttgcccgattaggttttcgatatgcttactgatttacattttatgtagtactacttgattttcttccatcatgtattctattctc

SEQ ID NO: 4131 - DNA, 830 bp, Avena sativa
ggctgggcatgctcttaaactaggtacaaccattgatgctgctttcaggatggcactgcagacttgggcttcttgggtggaaaaaagagttgatttaaaccgaacacatgtcttcttccgcacatatgagccatctcattggagtgacttaaaccaaacgatatgtgaagtaacagaaaagccttcacctgaggccaaaggaaatgacaagagtgaacttggggatatacttgctgatgttgtggcgaacatgaatgttcccgttaatgttctaaatgtaactttgatgggagccttcagaaccgatgctcatgttggcgcgtggagttatcctcccactatacttgattgcagtcattggtgtctccctggagttcccgatgcttggaatgaacttatattttcgtacctttttacaaatggttggcgaaatatggcggggtgacctttgactgtatactcaattttcttttcttctgcacctacatatccgtcttgagattttgtcagctagaggagcaatgataccctggaaatagctctctcataggtggttaactggacctctgcattcttttctctctttgtacaaggtgacgtgttcattcagagatgtagattctgtatcgtttcttcttctgattatccatggaaagaaagcatagcactttgttgtatgcttcttacaattgaatttatacgttgccaaaccatgtgtttctacatgtatgtaatactaacaattcacttcataccttgtataaatatatgttctttgtcatgataagcggcaaaaaagcatgcattgttatgcatttttctaaaaaaaa

SEQ ID NO: 4132 - DNA, 640 bp, Avena sativa
gacagtctcgcgagctccgactataatcaagtcctacggccggcggcgcggcgtgcggaaagggcgagtctagctagggttgctggtgctccagcgagataactgggcacagacggcaacagagggcctctggactgcgaggaactgctccgtgcagcggcaccgggtcctcgttcatcatcaccgtctcgacagtcgtcaggaccgaggaaggcggtagaaggcatggcgaaggcaggagagagcagcttcagtgatgagattatggagtcagatatcgagtttgaaggggaagttgttgagcctgacaatgatcttccacagaagatgggagatccatcggttgaagtctctgaagagatgcgcgataaggcgcagctgtacaaaaagaagggtgttgacgcgctttcagaaggtaaactgaacgaagcaatcgagcacctgacagaaggcatcttgctgaaccccacttcagctatcctctatgcaaccagggctggtgtttttatgaagatgaagaaaccaaatgctgcaattcgtgatgcagatgcagcattacagattaatccagattctgctaaagggtataaatcacgagggatggcaaaagctatgcttgggaagtgggaagatgctgctc

SEQ ID NO: 4133 - DNA, 815 bp, Avena sativa
accagttgcagtgtccggccaggggttcatcacttaattttcatccgttggagcacttgcattctttgaaatttcaccggccaggtgaaaccgctcttcatcttgctgggtcgactattgatcttcggtcgcgtgatacaagcttagaggtggctgagttgcgtaatgcactctttgctgaggaggaatcgactgctttatccacatggtctattgcatccatatgtggatgcctcaggttggaacatgtaatgacactttttgctgcagcgctcctggagaaacagattgttattgtctgttctaatttgggagtgctttcggcttcagttctgtccatgatacctctaatacgaccataccagtggcagagtctactcataccggttttgccaaatgacatgctggattttctggatgcgcctgttccatacattgttggtgtacagaacaaaacatctgatctgcaatccaggctagcaaatgctgtgatcattgatgcgaacaggaatcagattaaatctgcttcagtcccgcaacttcctcaacagagagaattgctttctgccttgcgtccgtatcattcaagacttgtgggcgaaagttatctcgcaagaaaacgcccggtctatgaatgcacagatgcccaggttgaagcggccaaaaggtttccttgcagaacttagatcctatcttgattctctgtgctccaacctaagatctcactgttcatgttccagctagtgtgtgtgtgtgtgccgggaggataacaaaaaagtgtatactgtaacttgagagtattagagtggaggctg

SEQ ID NO: 4134 - DNA, 406 bp, Avena sativa
aggcaaacatctgcgaatctgatacgctgcttgcttacgaatcttaattctctgaggacggattgaatgccacctggtcagcacaatccaagttatctccggagtggtcacgaccgactcccatcaagtcgagataatgctggtagtgggatatagtgaaatccatctcaccgacgaaccctcgtccacagatacgatcgccatatatgatgttcattgtagcaccaaacccagggtacctcttggacagagtgtcactcttggttggtttccagttgccaacaaagacatcatgggctgatggctgcctcctcttcactggagtcatccacctccagattgctgcttcaaatgctatggtggcattctgttcaaagtaactccgggtggctcaacaggtcctgat

SEQ ID NO: 4135 - DNA, 1171 bp, Avena sativa
ctgtattttcttcaccttccttcagaaggtaatcaggatagcccggaagagtaaaatctaagcatagatcttcaatagaagcaccacggaaacgcaaatcttcaatttgttgattgttactagagcaggattccagaaatcgcttgcgttcaacaagaatttgcaactcttgcaatatctttccaagctcggcatcaaaagataatatgtcgtacaaatcaagttcttgtccaagtaaaagtttataaaatgctgttgacaaagataaatcgagaagcctcccatcttgcaatgcttttgccatgactcgaccaactaagcggaaataatcaacgactttgaagaatttactaccctctgaagaagcagtactaggtggccaagggcgaggaacaagccaagaggtgcttgtatcaagtttctggcatcacgaggtgaattggaatcaatctttttagcctctaaagtatcagaatcatttggagaatcagatctccataatcccaagccaaccctctgcaggtcatgacttaagagggtatagaactccaaagttggaccaagcccagttccaacttcaccgaagtattcaacttcaagaacagccttctgagtggagaacatttccataactttggaagcagaatccaagatacggttacgagaaacacgaactttctggcgctgcagtctaccaacccgtacttctctttcagttgctgagttattatcaccctgctggtgctgaagacggttcaatgcccgagataacccaaaagctgtagaataaaagtgctgccttctcgtttcaaaaggaaacagaaatggacaagctttggtcatctgataacaccaagaaggtaagctaccactacagagtgcaagaacatcctgaatttgacgagcaagctttggtgtcaacttgctgctgatgaactcctcagagggtaccttgactccagttccatagagcccgtccagtgtatcgacttttccttctgcaaaatcatcacagatcgcctgtaatctcagacgaggagataactgattcaatccctccaatacacgcagcaatgctaaaatattgtaagtttcagttgacttctcaaaatcataaggaagttggccttgcaaaatgctatcaagaagagaagtacgttgtacttcagat

SEQ ID NO: 4136 - DNA, 762 bp, Avena sativa
acattggcagaaccatgtcaagatatgaataaaactgcgactaagtcgcattcttcttcaagaaggaagaacacactcacgtctcttacttcattagtaagacccagttctttcatgtcaaaaaaagcccagttcttttagagctttttgaacagcttaatggtgaaaataagcttaagccggaaagaacttgattttaagccgcttcccgtggcagccagccagcttcaccaatttcttcacgattgggagaagccagggtacccagcttcccaagaatccgcgaaccagctatttacgtccaaatgccacgccagggtacccagcttcccaagaatccgcgaaccagctatttacgtccaaatgccaccgcgttgcacacggtgagactcttgtgccgaatgaactgttttctcggtacgacctgagcgagaacacaccaggtcgtcttctctccctcgattagggttctaacagtgcttaaggagagactgtatgaaaagataatggattttattgttcaaaaatatgcaagcttcttaaatgcactgcaggaaaatcctagttcgcctggccttcttggttaaaggggatgcggtgaggcagatctgagaaaccaatttacaggttcgcaaatgccgaaagcacaggctgatttggattttgggcttcagtataattgtaaagatatcctttaagcttcacaattcccccaaagttccatcaccctgcaaaatattccgtcactgaatcaacaccgta

SEQ ID NO: 4137 - DNA, 1122 bp, Avena sativa
caagttaacaacttaactgacagctgggatgttagaaatttttcctgtcgaaccaaaacttgtagcttgtaatttgatgccatggtttagaactgtcacatttagatctgtacaaatatgacaaatcttagatcaagatggccttgtttggtacaactgtttgacaaacagggacaatatgccaatcttagacattaatatgacaagttccactcaaaagttggatgaaacggttacacccaaaaacttttgttatgctctaagtatatatgactaactagaactatatattttcaggcttacatcatgtctcgtgagcaagttgatttaagcccagggcagctgcttaagctagctgatctgatccatctacaagaagtggagaagcttaaagagctcaagttcaattcatatgcagagcaacaaaagtatctcaaggacgccaaagacgcccgtgataaggtgtaccacatccttgacagtacacaagaaatgatagccgaggctgagaaggacgccagcaaggaaggtatcgctaaggatgtctacgaatactgcacaaagggcattgaaacatccctcaaattcatccgtagttacagcacccgtcgcacctaccttgacaagctcaagagccacagtgatgatctcatccatcagctaaagtggctcaatccagccacccaacagaaggaagctcagcgccttgctcttgaggccggcatgtataagaaagccacgcttgagaatgccaaaaagtttcagcattttttaccaaatcaattctcaaaatatctcaaagaaaacggtatcaagtttgaggatcttgtgcaaagtaatatggcaaagcttggttttacggggccttttaaaaacttggatgatgtccataagctacaggtgtatgagaacattattgcggacgcgggacaaggaaaatccgtggtgacttacacatttgaagctttgggaaaagccggggttgcgtttctggtttttactagcagccgcgatggtgtgggacatatacacagcagaggataagctgcaggcggcggttagggattcagtgaacgcgttaaccgaagtagttggccttgagatcggagaagtcgtcgatgc

SEQ ID NO: 4138 - DNA, 945 bp, Avena sativa
agccgtacctgccggacttccggatggcgttcgagcacttctgcatccacgcgggcgggcgagccgtgatcgacgagctgcagagcagcctcgggctgtcggacgagcacgtggaggcgtcgcgcatggcgctgcaccggttcggcaacacgtccagcagctcgctgtggtacgagctggcctacatcgaggccaaagggcggatgcgcaagggggaccgcgtgtggatgatcgggttcgggtcagggttcaagtgcaacagcgcggcgtgggagtgcatcgagccggcccgcgacgcacagggcccctgggccgagagcatctgccgctacccggtggacatcccggaggtgctcaagcattaacacgtctctgctacacacacacgccatctacaggatctctcgctcgctatctctttctatctcgatcgtacctgtaggtaattgccttgtcccatgctgcatttcttctatccatctcctgttacacctcatccgggcccgatcccgatggatggatcgacgggaacgcgcttgcttgcgtgcccataacgatcgggcaggacacggccggccggcgtaatggcagcggcggtggccgccttaaatatgcaggatctatctgacgcgcgcatgtgaggtgccaccccgacggccggtggttgtgctccgccacaatggggttaattttccgcccatttatttttatagatagacgtatactccaccgtggtcctcgctcttgtaccttttgttttcttactctctttgttgtttatttactattcttccttcccattccctcggatctctccacttttttgttattttttgggtattttacttgtatccactccacctgaaggaaaaacgaagaagtgaaatgtactagtactacgagtttgacaatcaattgatgtactcctaccagaaataatttact

SEQ ID NO: 4139 - DNA, 518 bp, Avena sativa
  modified_base (500)..(500): a, c, t, g, unknown or other
  modified_base (505)..(505): a, c, t, g, unknown or other
cacgacggcgacgagccagcggagaggaggagggcgccgatgatctgagcggctggacgcagcggcagccgcggccgtgcgagctgttcgtgtgcaacctgccgcgcaggtgcggcgtcgacgaactcatcgagctctttgggcccttcggcaccgtcctctccgtcgaggtttcacgcgatgctgagaccgggattagtcgcggatgcggttttgttacgatgcgttcttttacggaagctagaacagcattcaatgctctagatggatttgacctggatgggcgtgaaatgtttgtaagacttgcggctcacgtcgtttccaataggagaaatcccaccctgtcgcatacaccacccatgaaggaccatatctttgaaagtccgcacaagatctatgttggcaaccttgcatggtctgttcaacctcaacacttaagagaacacttcactcaatgcggaactgttgtcagtacaaggctgctgtcagatcgcaaaggnggganacaccgagcctat

SEQ ID NO: 4140 - DNA, 816 bp, Avena sativa
gctgaggtcgccaggctccgctgcctgctcgtcgacatcaggggcaggatcgagggggagatcggctccttcccgtacggccggcccgtgccgaagagcgccgtcgatttggtccctggtggtggtgttgacgcagcccaggtcatgagctcctgcgatttcagatgcaacgatcagctctactgcaatccggggatgcagatgaggaccatgggcgatgatgccgctatgggtggtcaggtgtttcgacagggcaccggtgatttccctaatgttcagtgcatagggaatgcgaaatctggatctacgatgcccccaagctgtgggggttcaatgccttcgggctgtttgcctaattctgaacagagatgaaggacctgcgaggtgcgtatcttctccctgccagagacttcgggtctccacatgcaaggaagactgtacaaattgctagcttctatctgtagggtcgtgttctttgtcgaactgtcggagtgttggtgatggcattgttgatgatgcctctacggtgcctgaggcactgcaagttcgttggttctgaagcctaccaggacagcctcttctgcctttttctgttcagttttgttcctggagttggacagcctttctcatataccctaggtactctctgacaaagagtagaggtgggcaggattcgacgggaccgtgaataagtagatgcttgccatccgtgttgtgtgccaggatcatgttcagttttgtgtaggcctcaagctggatatgaacctcgtgtaaactgtgccctgaatgaactcttccgagtttcgaagtaaaaaa

SEQ ID NO: 4141 - DNA, 973 bp, Avena sativa
  modified_base (49)..(49): a, c, t, g, unknown or other
gctgatatttcagggagctgtgtatatcaaaagcagaacttcgtcttgnttaaaaagctcttgcatacttttttaatcatcaatcccagagtcgctcagaggtggcgctgatggtcatcgtgatggagatgcagaaccactacatggtgctggacttatataaagaacacactgtttgttatagctccaaattctgaatttgtttttacctttgcaaactcctatattcctttctacacgtagttctgaattttgtttcagttaacgcatccaaagataattgttggacatggttaactccatgtatagttgtctttcgtacggtggcattgaacttggttttaccaatttgctatttagatgattattataggaaggtatttactaccacactactgtgtggagacaagaataggcaacatattttgcattggaaggttccttcaatcggattctaggtcagtatatgattattggtggaatatttcttggtggtgtatcattcaccgcatagttctccgaggaatctatctcatcgtgaatatactcgaagggttttcagctgctgtgccaggattgaagtattataacaaggataaagcacacaaatagtgagtgagtagattggatttacaaggatgctgctgatttgctatgatattttggaagtaaatgattccaagatgaacacgaaggatctgatgaaagagaacaatttgcattcttgcaaccctgcaattttggtggttccaccacatggattgtccactctgttagaaaatgtattactgccaatttaaattaaccactggttgcttaattgacttatgtacttggttgcatggaataacatgtgattccattgtgacgttggaagtatgctgacatgatctccatagctacttctttctgaaccatcaagtccaccatgaacagagcctataatttatccttggaatggcactgattacgt

SEQ ID NO: 4142 - DNA, 765 bp, Avena sativa
gacacacacccttgttttccatgtgctcactgtaacccctttcctccagctggtaggccaatgctaaaaccaccctgctttggtaaccctaagctgcctccatttgtgcactcaccacagccatccgttgttccaccctcttcagttcataaaccgcaccttcctccagcttttccaccaattcctggccatgtagttcctccccgtcccttaccatctcctgaccatgcgccgaatgcagatggaccagcttatcaaatgatgccaatacattcaccccgagtgcctaattttcgacatccagtgcctccacgaaagaaacaaagtagcaggacaaccaagtctcctccaatcgctccatctccatattctctcctccattcctgaagtggtgctcggattgcttcaaatgtttctcctgtgttggctacaaagctatccttactatgaggttgctgtggttgcaattttgctgcttggaacttcctgaaccagtaatgggagtttgatactgcaaagacgggttctgtttttctgtaacttttaactgcatgaagaattccgaaccattggaggtggaatgtaaccgtagatataggtctatattatgctaatttacagggttttatgtcacaaaggtggccgccctacgtctttaccaaattgtaagatctcaccgaaggttgagggcttatggtagagaacaatgtattactctcacgtgtaacatattgagcataatacaacacacgtctttgatgtggc

SEQ ID NO: 4143 - DNA, 866 bp, Avena sativa
tcaagattatgtgcaggagtacaatgagaaatatgaggtctactcttacttgaacagtcagctaaagaaaacacagtctgaattcctaaagattcaggaggatttcgatgctgctaaagaaagagacaagggtcagtactataacattgttgaaagaataagagacatgtatcatgaatcgggcacgaggcataaattgatgaagaaggtgttcctattgcttcacgaagagttgctgactatcaagcggagaattctagacttcgcagagacctactcatcaaatgaataatgggcgcaccgcagaatcatggcattctcaactgtttctgagaggctgtcgaccagcatctactctgaagatgccaggaacctcggcatcaagcctttgtaaaagcacgtctctgggcttgaacattcagctcaagccattcatcagtgacataaagctggagaagctcacggtatggtttcctggattgtgttctgctgaatctcatagtgatcacagcagctgcggtcgggggcgataccgtgcaaagagaagaccaacacctcccctccacacggagacatgcctgcggcagcgtgaacaggggaaactgaacttacggaacagaggtaatattgaaggcggttttacaacagcaattttgcaggtagtagatgggaaccgtgacaggatatggttcccttggtagagtagtttttccagtgagatcttctcccctcctggcgtttgactatgtaaagcggcttttgtatcgatgtgatcaactcaattctattttaactttgtacatatatctggatacgaatctatctagagtagtttgatggaggttaggttaatcaactcgagagcg

SEQ ID NO: 4144 - DNA, 345 bp, Avena sativa
attcccgggatgaaccagcaaataaatgatatgttggaggtatacgcgaaggaaataaaactagctgatgcaaagcgcataaatggtctgcgagctgtgtttggggagatctaccctgatcctgtaatagttgtatcaatcggtcgcaaagtggaagatcttcttgcagaccccgaaagcaaagtgtccatatcagttgagctgtgtggaggtacacacatttcaaatactagaaatgctgtggcatttgtcatcatttcggaagagggcattgctaaaggtgtacggaggataacagctgttaccggagaatgtgcgtcccaggctatgaagttggcatcgact

SEQ ID NO: 4145 - DNA, 999 bp, Avena sativa
acactatatcattacgtagtgcgcaagaaatttaaataaaattcacccaagagaaaaggcgcacactgactttcatgagttaacactcaacgtgaacaaactagcatgcactggtgtttgatctcagaaaggaaactgtacagtactacatggaaaatttatgcaaacctagtggtcgaaacctcgatgtcctattggaacatgatgctcatttcgcatgtagacaacattaaggtcaatgcctttttgatctggaaataacctcaccagcatgatccatgttcatcacttgcttctgcatgctgacaatttgtgccttaagtattcttatctccatctccatcctagttttctcggcaatgcgagcattttgcacatcttctaacatattaagtgcatattgttcttgtctccatcgaggtgtctcttctggtggacctgtcaccagctccagtgcacgatctcttccagaagcgcttacagtatcatgcgatggaactttgatatccttgctgactgtaaatggttcctgaactccatgtcgagaataatacccatcattgtttataggtgttctgtttgatggttcagaacgaattcttccctgagattcctttatgtctttcagatagacagacctgccactatgtattctcctaacctcttcaatacttggtctgccaaatttactggtctgacaatctgtgtttaccggatttgaagcatatttgacatagctttttatcggttcctcagcccattcgttgtcattctcacctcgatccatacctgaaggagcaatggtagtatcctctgtggaggtctgcttttgttcagacacttcatcattctctctaccaatggacatttctgttctatcctttaaaaatttcttgtttcacttctacctcgtgttcagagtctggttgaagagcccccttggactcctttcttgcagttttattttgatccagagccttcagcaactgatttattgtg

SEQ ID NO: 4146 - DNA, 759 bp, Avena sativa
gcacatacacaatcatgacctctcctataatacaacactgccagtcaaaacgcgctccagctgtctgttccatgtctcgtcgggctggaggcctccgacgtcttcgacgagggcttgaacggccccgtgccgaaagggtcgtcatcgtcgtcaaaggagtagcctcggtcatgggaggagtctgtggtgctcttcatcgagtcaaacctcgcgaacgtgttgtttctgtcgtggtcggcgttgctgctcatggagtcatacctcatgaagctgctgccgccctggtcagcgttgctgcggaaggaatcgaaccgcccgaacgcatcgctgctgttgccgccgagctcggcgctgctcccgaaggaatcgaatctcgagaagctatcacgctgcccaacgtactgttgtctttggcgccaagggtcattgccaccgagctcagcactgctcccaaaggaatcaaatcttgagaagctgtcacgctgcccgaacgaattgttgtctttggcgccaaaggtgtccatctgggagaagctgtcgtcccctgcttcgctgtacctcggcgagaagctggagttgttgtacatcggcgtgcttggaacggaagaatcaaagaatcccttttgctggccaccaccataggtgctgccagcggtaggagattctgctctgcctgagccagtatcaaagagtgaaccctgcatcggggtgctcgggaagagtcatagaatgaattctgcatcggtgtgcttggatgga

SEQ ID NO: 4147 - DNA, 977 bp, Avena sativa
tttttttctaaaggggggccaacggctggagatgctctaagaatcttttactccttcgtcatcctggtacaagaaacaaatacaaaacatctatgacaaaactggatctggtgtccgcagtctaccttatgcctaattcgatctggagaatcaacttggaggtggcaatatacatcagaggctgttacaggcacgcatccgtcaatatagccaatgctgttacaaactcacacgccgcaacaaatctgttagctaacaattgctgtataccatcttccgtggtgacgaagaatcaccgaactgcccaccaggttggctgatggtcaggtggtaacaaaattcttctactcacaggtagatgagtatgcgagtccgagtggctgaaacgtgccatgcgctatgatctcaatgtgcctcgtgagtatctccataaactggctgctaagaccagtgtggcggccatgccgaccaaaatcttcgcatctctgctaaatccaccagagctccaactcacaattgatatcaacgagttccaacgagatggctttggcataagaattactacggtgtactgttttttacaagggaaagatatgaccctttgcaaggccattttcatcgcctctggctttaaagcctctctaacttttagacgtccctcattctggaccttgaaggtggatcctacatctccagaataaattcttgattggtagctccgcagaattctatccaaccaatagtaattttcctgcaatccattttcatgcgctctttgttcaatttctaggatagccaatacatcttcttcagaagggccttctttctgtagatatgatatctcttccagaacaaattcaattgagtttagatgacatgtccggatcgcatgagaaattcacgcttatcgtccccacgaacatctccgcttcttgattggttttgtttccaccttaaaggcaagacgagcatgccga

SEQ ID NO: 4148 - DNA, 830 bp, Avena sativa
cggtaatttcccgggactttctccggctgacgcctaccaatccgaccccaacccccatcgcggctctgaatccttgcccaccagctaccgccgccgacgcctcaatcccgcccgcacacccctacgtccagcacccctgcctctcacgcgcgtcgccgacatcgccgttccccctttgcccctgttatctccaccccgcccgcaatctctggccggccaattgtgtctccagacacgttcttcgattgaggtccgtggtcatccattaagcagcagagatgcaggcatctagagctaggctttttcaaggagtacaaggaagtgcagcgagaaaagtcagccgaccctgatatccaattaatctgtgatgattcgaatatattcaagtggactgctctaatcaagggtccatcggagacaccttttgaaggtggtgtatttcaacttgcattctcaattcccgagcagtatcctctactgcctccacaagtccgcttcctgaccaaaattttccacccaaatgttcacttcaagacaggtgaaatatgcctggatatattgaagaatgcgtggagccctgcgtggaccctacaatccgtctgcagagccattattgcgttgatggcccatccagaagcagatagcccacttaactgtgactcaggcaatctcctgcgctcaggcgatatcagaggctatcagtccatggcgcggatgtatactaggttagctgccatgccaaagaaagagtartggaaccagagttgcaaaattaaagcagagaagtggcccgatggctgattcatgtatcactctctcttaagttacac

SEQ ID NO: 4149 - DNA, 422 bp, Avena sativa
tgccaatgtcaatagcataatcttacctacggatggtaccaggagcagactccaatgggtttgttgctccaatgatcttcctgccagtggtaactacacccttaccttcccagaccattgcaacaacggggccagaaataatataatcaacaagtccattaaagaaaggcttagcagacaagtctgagtaatgcttttcagcaaaggcgcgatccacggtgatgagcttcaagcctttcaaagagaatcctttcttctcaaatcttccaattatctcaccaaccaggccacgttggacaccatcaggcttgatcatgatgaaagtctgctccattttcgcttctttgatgttctgaaaaatggtctatggatttagaatagcagtacgcagccccycgtactctgcgttgataccactgctt

SEQ ID NO: 4150 - DNA, 817 bp, Avena sativa
atgcaggcttcatcctgaaaatgacatgtttcgggaacaagagcaacataagatgcattttgatattaacgagtggcgctgtggcttctgcaagaaatcctttcgagcagagaaatttatcgaccaacattttgcaaaccgacacagtaatctggtcgataatagtcaaggaaggtgcttggcagatctttgtggagcacttcactgtgatctgactatggagttcaagaaaccaaagagtaaatgcaatgcagctgcagctgcaaggaaccgtcacctttgtgagagccttgcagacagttgctttcctattaatcaagggcattctgccagccggcttcatgaatttttcttgcaccagttctgtgatgctcacacttgcaacgggcgttccaaacctttccccaaaggtggcaggaaacaaacaaacagattctacctggctctctgcatcttgacgttgcttcttttgccactgttctatctcatagtatttctgcaccagagggaaatgaagaaaggagataaagttttcgaacgaattgcaaaaactgcgcacaagaagaagccatcctagtattatacagccaaggagattacatccgcacaaccaatgccgttatccagcgtttctactgggtgtcgctttgctcggatggagtatctcccttgtaggttcccatgcatcccgagcagagagatcatgcatgtgcgtgggatacgatgatgatcctgcgattgtacatgatgatatttgcgtggggtacgatgatgatcctccgattgtacatgatgatatgtgcgtggggtacgatga

SEQ ID NO: 4151 - DNA, 527 bp, Avena sativa
ataaacacataaataaaaatctgcatgtagctggctttggtttaacccaatcaaccaatatgatgaagagcttatgtcaaagtatcataccactacttttggggtactagattgtattgagagatatgcaacaaaagatccggctttgagcaaggctttgacaacacggatgaggatttttagaaatgcggaaggggattttggtcgagtgacaaccattaatgatagatacacaatgcttcctgatgaatggtggttgacttatggttgtagtgctccgaacttgcaaaaacttgccattcgcgtcttaagtcaaacttgtagtgcttccgtttgtgaaagaaattggagtttgtttgagcacatacactccaacaagagaaatagacttgagcatcaagtgatgaatgatattgcttatgttcaatgcaactcaaggmtagaacagaagtccaaaatccgcactagaaactttgaccccatatgtatggaggatattagaacaagtttagatgctcaatggattc

SEQ ID NO: 4152 - DNA, 671 bp, Avena sativa
  modified_base (218)..(218): a, c, t, g, unknown or other
tctttcttgcgcaaaaggtcagaaaccaaacgcacgaaagaaaagagaggataatttggacttcccgtatcattttctttctaaaaggaaatcgaagcgaataggagtccgcgtccgcgagatggcgatggcgagcttggcgaggaggcgcgcggtggagacggtgcttctgcggcgtcctcacgcggcggcgtgggcctccgcgtgccgggggtacncggcgtcgggggagagagcgacgtcgtcgtgatcggcggcggccccggagggtacgtggcggccatcaaggcggcgcagctcgggctcaagaccacctgcatcgagaagaggggcgcgctcgggggcacctgcctcaacgtcggttgcatcccgtccaaggctcttctgcattcgtcacatatgtaccatgaggcgaaatcttctttttgcacaccatggtgtcaaattctccaatctggagatagatctgcctgcaatgatgtcccagaaagacaaggctgttgctgggcttacaaaaggcattgaaggccttttcaagaagaacaaggttgaatatgttaaaggtttggaagattgtctcccgtcagaggtatctgtggatttggtcgatggtggtagcactatcgtcaaagggaagaacataattgttgccactggctcagatgtgaaat

SEQ ID NO: 4153 - DNA, 873 bp, Avena sativa
attgtccagattcagtccctgattcagtgaaatcagttcaaatgcattcattgaggttggcttaagttcagtctcctctttcacatgctggtcctctgaaatctccaaatgcagcatatacatcatcgaagctagtttcatacttatcatcaaaaacaggtggcttaaatccctttttgaaccaagggtcttccagtatctgaggaatggtgatgcgagttgtagggttagggtccagaattctgttaatcagcttcttagctccagcagaaaaccaagagggacaggaaaactgagcctccgagatctttttataaagggcgatgatgttgtcatcctcaaatggtaaaaacccggcaagaagaatgaaaaggatgatcccacaagaccatatatctgcagctgcaccatcataacctctatcctcaatcacctcaggagcaacatagtttggagttccgcatgtcgtgtgcagcaacccgtccttcacttgctcagttaaagcacttaagccaaagtcagacactttcaggtttccagcagcatcaagcaacaagttctccaacttcaaatccctgtgatacacgcccctactgtggcaatagtcgacggcattgatcagttgctggaagtatttccttgcttcctcttcttttaatcttccattggtataaatggtttcaaacagttctcctccagtaatgtattccagaacaatgaaaattcttgctttacttcccatgacctcatgcagtcgaacaacattgggatgctttattaacttcatcgtgcaaatttcacgccgaatctgttcaaccaatctgagcttctgaaccttctccttctcgaggatcttgatggcaacaggctcca

SEQ ID NO: 4154 - DNA, 877 bp, Avena sativa
gatcgaaaagaggttaaagcttggcaacagaggcagaaagagcttgtgcatgataaatgtgaagtctacacgttgctcggacgttcacgccgctttcctaacatggcccatgcacttcatggccaaaaaggtcatgttaatcgtgctgctataaatgcaccagttcagggcagcgcagcagatgttgctatgtgtgcaatgctcgagatagaaagaaatgctcgccttaaggagcttggttggagactcctgttacaggtgcacgatgaagtgatactggaagggcctacagaatctgctgaaactgccagggccatcgtggtagagtgcatgtccaagcctttctatggaaccaacatcctgaaggtcgacctggctgtcgacgccaagtgtggaaaaagttggtatgacgccaagtagagaaggatctgtgcttttccacgctaaacgtggaaaaagttggtacatcagcaagtagaactgccccatctccatccacactgtcataagatgtccatgtttgtcagccacaccatgtcggtctgttcgatcagacacacacacggcgggtttgagcgagtgtagctctagaagcagctcaagcgcattgaagagcggaagactcatggcggtggtggcatcgacttgtgatgcacactagcaatctggtagcacgtggtttgggttgttctgtagtcccagtaggatgtgatgagtatcagatggattaatcttcagggcagcatgctcttttgttcataataacaccttggtgcttgctgctgttctgaggttaactactttggtgacaatttctattcactggcgaggcctaagattaccactggtaaaactgtgtatgttggcccaagggata

SEQ ID NO: 4155 - DNA, 835 bp, Avena sativa
  modified_base (713)..(713): a, c, t, g, unknown or other
aatgattgggctgggtctacaagcactaaggggtacacatggcagatgatacagctcatctattctgacacgtaatcgaaggaagcacaagatgtgctttggctcttaaatctgttcagctttccacagttaactagcggggtatctttgcaaagttgggagaagatccaagttaaattgctcgagaaatgtatatgtgcaagtttgaagatggggatatttttctactcgatgctgatgttctgtaagaatgacaccgaagaggaatccctagttattagatcccttgttgttactgaagtgtcaatatttgtgtgcattgagaacctacatcagtttggttgctttcctgatgattcacatcctccatatttttctcttgatgaatgttgttcaatcaacagtattaaagaagtggttgtggatcagcgtgacaagaaatgcttgacactgattttggacaaacatgtacatgaaggaatatctcatagtagcactagaaatccacagagcaagcaagcagatgaaatttacgcaatacatacatggaaactgaagtggttcgctgaagaaacacttttgaagttcatttctgtgcttaaggccctctactccgcagcagcagcagcttcaacgttacctgtaaagtgtatgtcctgatgtgtttgttcctgtaattacttagtgatttcattcattctttttggggggtntatgtagctgttagcctgtacagtttgttcattagctgtctataggtgagtgcttcctttgttcttctgagtgatcagtatttttgttccatctagtttgttcattagctgtctatataggt

SEQ ID NO: 4156 - DNA, 658 bp, Avena sativa
tatgatttgcctctgccgaacggcaccaacaccaaggtagtgttgctttcatgattggtttttcctatcccacaaatctcccaaattgataaactggagcagataatcttgaagaattcttacaatggcagaagcgtagatcattctgtcttaaaaagcagcttatctgcaggcgatgtctacactgaaacttaattgggtaggtccgctggtgagtgtagtatttatagttactttccttgagctgtactagtgctgctgccaagttctgcttctcatggaggaaacgacaggaaattagagagttaaagaatcctcttcatttccctgtgtgtaaggaatacttaccatcctgcactattttcaccttgattcatgtaattgctctggctgttttgtttgtcttggatcacaaaggttgaacatttataggcaacaacggtgagggcaacttggtatagtatttagcctcttatgtacactttcccttcttttaagtaagttccctggtaagggggtggtcagtgaattttcctacatgcgcgaatcagccagacttcatgtgttcatgtgtgctggatttcaatcctcatgtggaagctctacatatgcaaggtacgacttgtgactgacaaggtaacaaataaacctagaggat

SEQ ID NO: 4157 - DNA, 1113 bp, Avena sativa
cagttctccaaggagaagcttgataagcttgtcggagaaggtactttgcaccatgatattatacgttttcattactatatccaatatcatctatatacgcaattatcggacgcagctgcatatgcaaggaagaacaaggttattctgaaaggagatttacctattggtgttgataggaatagtgtggatacttgggtataccctactttatttcgcatgaatacagctactggtgcacctccagattattttgacaaaaatggacaaaactggggttttcctacatataactgggaggagatgtcaaaggataattatgggtggtggcgagctcgtctgacacagttggcaaaatacttcacagcatataggatagaccatattttgggtttctttaggatatgggagcttccagaccatgctgccacaggtttggtcgggaaatttagaccttcaattcctcttagtcaggaggagcttctaggggatggtatctgggattttgatcggttgagccgcccatatgttcgtcaggaattcctggagggaaagtttggatctttatggacagttattgcagctaactttctgaacgagtatcagaagcaatgctacgagttcaaagaggattgcaacactgagaaaaagattattgcaaagcttaaaaccagtcctgaaaaatcactctggctggagaaagaagacagtgttcggcgtggtctgttcgatctactacagaatatagtgctcatcagagatccagaggactctacaaagtattatcctcgttttaacctggaagatactacaaattttagggacttagatgaacatagcaaaaatgtcctaagaagattatactatgactattatttctctcgccaagaaaatctttggcgtcaaaatgcgctgaagactctacctgtcctgttggactgttcggatatgttggcatgtggggaagaccttggaatgatccctgcttgtgttcaccctgttatgcaagaactcgggttgattgggctgcgtatccagagaatgccaagtgaaccaaactgtgaatttggtattccatctcagtataactatatgacggtttgtgctccgtcatgt

SEQ ID NO: 4158 - DNA, 700 bp, Avena sativa
ctaattcgcctctccaccgccatattttttctcctgtttccaccggatctccgacccctcctccctcttccgcctggatctcgcctctgattctgcgatctccgttgcatccctactgcaagttggttgttgacaggaatcagtaatggcggggagggggaatatcgcgtcgaacaactccgcgctcatcgccatcatcgctgatgaggacactgttactggttttttgatggctggagttggcaatgttgatctgcgcaagaaaacaaactaccttcttgtggataacaaaacgacagtgaaacagattgaagacgcatttaaagagttcactgtgagggatgatattgcaattgtgcttatcagccaatatattgcaaacatgataagatttctggtggatagctacaacaagccaatccctgctatattggaaatcccatccaaggaccatccatatgatccagcgagtgattccgtcctttcccgtgtgaagtatctattttcttctgactcttctgctgataggcgttgaatagcgaccttggccttgacgataccgaacagggctatttaccgttggttggagtcttcctgtacttgatctatgtatctgtattaaactattcataccatttgtgttgcggggcacgagcaaaagggcgagaacgaataaggagtaaacaaattgagcctgtgg

SEQ ID NO: 4159 - DNA, 652 bp, Avena sativa
gttaagcagttcagggagcaatatatcaaataaacatgatgaacattcatggtcgcatgccaggaactctgaccatgaccaaattgctcaaattatcacttcagaattaagaacgggctacacagtacgatgctcaataccatcacccgaccaatatctggagcatttacatgcatcgacaagctacagttcaaccagacagtacagtagttgatcaagtggatctaagaatatctatggagggcagggcagaagccagagtacaccatgcagctcctacaattccagcctagttccacgagatctcttcaagcacttgttgatcatacgtgattagatattctccaagccgaaatcccgccatacatccccttgtggtggctggctttcctgatttgcgggcgctggttcctctgcgtcctcggtcttcacggccatggccggcggtacggggatatcgtcgggggggagggtgtcgcgcatccactgctcgtcgacgatgtcgatgaggatgcccaggctcaggctctggtcctgttccagcccgcccatcttctcctcggccgccgcgtctcgtctactcaaccgtcgatcgccgccgccgccgccgccgctccttggctaccggagtcgtgaccctggagtggatccc

SEQ ID NO: 4160 - DNA, 1073 bp, Avena sativa
atgatggcagaggtgatgctagcagatatggacaggcacagcagggcagtggcggctatccgggttatggtgctggaggctatggtagtgctccaactggatatggatacggacatgctaatcctggaacgacatatggaaattatgggtctgcaggatatggaggtgttcctgctgcatatgctggggcttatggcaatccaactgctgctgcttctggttaccagggtggccctccaggcactaatagaggaccctggggcagtcaagctccatctggttatggcactgggggctatgctggcagtgcaggttatggtgcatggaatagctcttctgctggtggaaatgcacccactagtcaggcacctggtgcagctgcaggttatggaaaccagggctatggttatggtggttatggaggggatgcatcatatggtaatcatggaggatacagtgcttatggggggcggggagatggtgctggcaatcctgctactggtgcagcgtctgggtatggtgctggatatggaagtgggaatggcaactctggatatccaaatgcgtggactgatccttcacaaggtggaggatttggtggttcagtcaatggagcttctgaaggccaatcaaattatggcagtggttatggtggtatgcagcctagggttgctcagtaagagaggccattataacgttatgaagtgaaccagcacatttgggcagcttatgtattatcgtggtactatggctttggtcccatcctcctgaagcttgtccattttgctggttaaatcagtatttctcctggttggaatgcttgatcctttcgtggcttactactagaacttctagtcaataagtagctattatgtcgagtagctgtatcttcgtaatgctttatttgagtttagcttatcctttggtgtgctttgagtggtgtttcaggttgcttcatctctagtttaaagctagagtagcttcactgcttatggaccaaattatctagttgtatctctattcgacagaatcatatatttgtgtttgactgtagtatttatgctggaaaaaaa

SEQ ID NO: 4161 - DNA, 638 bp, Avena sativa
  modified_base (37)..(37): a, c, t, g, unknown or other
gcagatggtatatcaacgaggatatagaagaactaangttttccagactagccttttgtccacattccggccgattgtacacctgccgccgccaaggcagatgaccctccgagcggcgcttgatttccaccagccagtcaggggactctctgagctattgaatagagatgacctccaacagcagccttctaggttccactgcatcgtacgaatttggaggctcgctcctggacagcgatggtggttcccctgttgtatggactgtggacgcgatgccacacctgctgctccttcaccagctcaggcagccaagtatgtatcctcagatgttgcgtgtccctgcacatcggcaaccttacaataccgtgtgcatctcctaggctctgacagcacgggagaagcagaattcactttacatgggaagctggcccaaaatttggttggcctttcagcacagcagcttatacttaataacctgcgagctgacattgaccgtatcgatttggtcactgcggctgcaactattacacatacaccacctgagctagctgctattgtcaactagagatataagcttgttctgtgtgtgacacccaactatttcaaaaagttgggcaagatttatgtctacgctgttg

SEQ ID NO: 4162 - DNA, 861 bp, Avena sativa
tgaaaatgaagggtgattaccacaggtaccttgcggagtttaaggcgggagctgagaggaaagaagcagccgagaacactcttgtagcatacaaggcagcccaggacattgcacttgctgacttgcctaccactcacccgataaggcttggacttgcactcaacttctcagtgttctactatgaaatcctgaactcgccagaccgcgcttgcaaccttgccaagcaggcatttgatgaagctattgctgagctggactcccttggtgaggagtcctacaaggacagcactttgatcatgcagcttctccgtgacaacttgactctctggacctctgataacgcggacgagggtggtgatgagatcaaggaggcctcgaagcctgaggaggggcactaacttgcccgcaagtctgctcaaagtttatttcaagagtccatttcgcagctacctgtattattcggatcataagatgtactagggttggttgcactatgtgaatcataagaagtagtaggatcgtgctatgcgaagcgtgtcgagctgaagtacctagtggactacagtcatgagggcatcatgtggacatcgtcgcttcaggaactgcgttattagccattagcagatttcaaactatttcctgtgttgcagcacattattagtactgctgtattagcaattttcattggcttgttaatgattgaagatgctggtgcctaaacgccttttttgtaatttcttagttgtcgttttgatattttctattgttgtgatccctgtctccaggacctggagagttgttcctttgcagatggtctgcactggtgtttgagttgatctcttgacatttcttcaaaaaaaa

SEQ ID NO: 4163 - DNA, 1020 bp, Avena sativa
ccggatcaattgctggaggaacggcagttatatgcacatatccgcttgatctggttcgcacaaagttggcctatcaggtaaaaggtgcagtgaaccttggtttaagagaatctaaggcctatgaacaggtttacaaagggatccttgattgtgtgaaaacaatatacaagcaaaatggcttgaaaggcttataccgtggcatggctccatcattatatggaatctttccttattccggtcttaaattctacttttatgagaagatgaagactcatgttcctgaagagcagagaagagatataataccaaaacttgcttgtggatcagttgctggtttgttaggacaaacaataacatatccccttgatgttgttaggcggcaaatgcaggttcaggctttctcatcatccaaccctctgaatgggaaaggaacatttggaagtcttgttatgatagcgaaacatcaaggttggaagcaactgttttcaggactatctatcaactatttgaaggttgtcccatcggtagccattggatttactgtttatgactcaatgaaggattggcttagtgttccatctagagagaaaacagccgtggttgtccctgtgctgacagaagacggaagtaacgctacccctgttcactctagttagacatattctggtggtgcgcgacgcccgtcatcactgccttaatattcataggcatgtagcatagtattctttcttgcagctacacccccacaattcttaggcttctctagaataataaaaataaattcgatattcagtaagccaataagcagcgcacctgctgacgccaaataagttcttgccatccatgcagagaagtagaagtagaatttcttcctgtcaaaaagtaggagaattccttgcaaatcactgattcttgtggaatatcaccttgtatagattctgtttatagaatcgaatagcttgtatcaaattgagaagtgattggtgaagtcaaaatccaaagcattgtcaacagaaccta

SEQ ID NO: 4164 - DNA, 1104 bp, Avena sativa
caagtctgcggagagcaacatgtgtgatctgctcaggatcaacactgacaggggtgtgatgattggcgatggcaagtcacggttctctatcgacggcaagccaatttaccatttcgttgggacttccaccttcagtgagtatactgtcatgcatgttggttgtgttgcgaagatcaaccctgaggctccccttgacaaagtctgtgttcttagctgttggttatttctactggtcttggtgcgtcgattaatgttgcaaaaccgccaaagggttcaacagtcgccatatttggtctaggagctgttggacttgctgctgcagaaggtgcaaggattgcaggagcatcaaggatcattggtattgacctgaacgccaacagatttgaagaagctagaaaatttggctgcacagaatttgtgaacccgaaagatcacaccaagccggttcaagaggtactcattgagatgacaaatggtggggttgaccgcagtgtcgaatgcactggcaacattaatgccatgatacaggcatttgaatgtgttcatgatggctggggtgtagctgtgctggttggtgtgccacacaaggacgcggaattcaagacccacccaatgaagttcctgaacgagaggactctgaagggcaccttcttcggcaacttcaagccacgcactgacctgcccaacgtcgtggagatgtacatgaagaaggagctggaggtggagaagttcatcacccacagcgtgccgttctcagagatcaacaaagccttcgacctgatggcgaagggggagggcatccgctgcatcatccgcatgtagaactaggtttcctcgcctgcttttgctcgctcctccaatggatgtaataagtgctagagggtggtttctggtttctgaacctgccttggttgagatcagacactcagtcggtgacgacataagcctccgtgtatgacataagcctccgtgtatcgaaccagtagtgtagtattagcctccagtgtttgtaattacctaccgatggaaccagtggtacgagcttcgttttggcttaatagtatatatgcttctgctgctacatctacgagttctaggtaaaaa

SEQ ID NO: 4165 - DNA, 863 bp, Avena sativa
cgtggtcgtggttggctgcggtcaatccggcatggaggtggccgctgacctgtccaactacggcgtggtcccgttcatggtggtccggaacgtgctcgacatctccgctttatatctcacagtattgctcatgcggtggctcccgctcttgctcgtggacaagatcatggtcctcctcgcctggctcgtgctcggcgaccttgccaggcttggcatccggaccccggtcgtcgaccctgtcacgctcaacaacaccaactggtgcatgaccgccaggaagatcaggtcaggcgagataactgccatccctgctgtgatgcgcttcaccaagtccagtgtcgagctctccgacggcaccgttctcaacatcgacgccgccatcctcgccactggctacacaaataatgtgacccagtggatccagggcaccaacctagaatttggcaagaacccaatgacctcgttccccaatggctggaaggctgactcagggctctacttagtcggcctcacccgccctagtctcttcggcgcctctgctgacgccgtgtgcgtcgccaatgacattggcagcacctggaaagaggacacgaagaaggccaaggaggatggcaggacccctctccacagaaggtccatcagcatgaatgcataatcttctaagggtctactagggaaggctaattaaaatgcaatcgaatttcagtcacttcagttctgttgtatctaaggggtttgatttggcgtagtagtgtgtcaccttgagagagctccgtcttgtttaacgagaagaaagatttgagtttgcagatgtgcacggaatatatatcaagctcttaatgcagtgaatatatcaagaaata

SEQ ID NO: 4166 - DNA, 937 bp, Avena sativa
tctcagaacagggcaggaccaaggtgaaaaatctagatagctcgaatactagtagtgtcttcttcatatgcaaaaaacatgtatccagatagtatgtctaggcattgccgatgacaagatagtagctttttagatcaggaggaggaattgaccaattttggatgtcctgttttcttgtcgatctccactctaaggcctatatctgcaatctctggagttaagataggttcttgcatctgaagttcagagacctccttctgattctccacattcccttcaagcaagttcttcacagcaaacagaccccactccctcaggtacgcatttccttcatcaatgacacactgctgcagtagcaatataatcccatttagctgcctaacctcatcctgcacctgtttccttccatgcaagcaattggcaatgacagcgactaaatctctcctgtaaccgttgtatgggcagacttttgcacttgcaagggctggttgttgatcgccttgttcctttgccatcgcttttctgattgtacttgggggctcaagatcacctaggtattttagaaggcgctttactagaccagtttgtaacagtgagtcaacaggagcttcagtctctgatgaagcgggttcccaagcacatatgtccttcaagagcagcaacgaatatccaaggacatcaattccagggcaaccagttggaagagcagagctagctcggcaagtaaaatccacaatctcagcagcatgcttctgtacattggaaacatgaagtgcaaaactgttcgagacaataacttcttcaggtcgttcagtcaaatattttgacagtgtacccagaagaaacgaatgcctagcagtaaacccactcccagattcaccaccatcactctgctcagcactatcagttgaacataaggctgtaaacaagatttcaa

SEQ ID NO: 4167 - DNA, 1054 bp, Avena sativa
tgttgcttgtctttcgactgatctactatggatgaagctttgtgtagggttctgcagggcatgcaattctaagttattttggcttatgttctttgagccacttagtattgcctttgagtcactgcagtctatcatggtgcatggatttcagttgtttgacatttggcagcgacatttgatggagagtggtgtggactacctggatttccagaagacttacaaacaagcagcaggatctttttctgagtggagaggcaaacttatcaggaattttggttttgtcattgacttgatgagcttgctgatgtcacttggtcattattctatgatcttttggctccgtggtatggcgtttcacctgattgatgcagttctcatattgaacttgcgtgctcttgtagtttcattttttaagaggattaagacctacattaagttaagaaaagcacttcgttcgctggatggagcacttccagatgctacatatgatgaaatctgcacatatgatgatgagtgtgccatatgccggggaccaatggctcgagctaaaaagttgtcctgcaaccatctatttcatctaccttgcctgcgatcttggttggatcaaggattaatggagggttactcttgtcctacttgtcgaaggccattctttctttcatctcaagggcatactaggtctgcaacagcagaggtagcaaatgttcagctcattgcggaacagctaaatatggggttaaatcagcagagggttcctggtcatgaacatcctgttgaacagcagaatccttcagatgctgtttggagaggtgctggtcttgattctagctgggcaccaccgtggtcgagccctggaatggatgatccgagttcctctagtgcagtgagatctgtggggcttagcggagttcaaatgatgatgaggcagtttgcttctgtgactgataattatgggcgtacagattccacctggaatctatggcctgaggcaatggcaggcccttcaattgttccggcatcttcctcaaggcctgatggtgcttctgccgctggc

SEQ ID NO: 4168 - DNA, 1140 bp, Avena sativa
gccaaggaggaggagcgatccgaggagactccatggagcgcctgcagcgaatcttcggccaaaccgggatggggcagccggggagcgactcgccgctgctcgactcctccgagcaggtctacatctcctccctcgcgctcctcaagatgctcaagcacgggagggccggcgtgccgatggaggtgatgggcctgatgctgggcgagttcgtcgacgactacacggtcagggtggtggatgtattcgccatgccgcagagcgggaccggggtcagcgtcgaggccgtcgaccacgccttccagaccaacatgctcgacatgctcaagcagaccgggagacctgaaatggtggtaggctggtaccactcacatcctggatttggttgctggctttcaggagttgacatcaatactcagcagagtttcgaagctttaaaccccagggcagttgctgttgtgattgatcccatccagagtgtcaaggggaaggtggtcattgatgcattccgcctcattaaccctcagaccatgatgcttgggcaggagccacgacagacaacatcgaatgttgggcacctaaacaagccatctattcaggctctcattcacgggctgaacaggcactactactccattgcaatcaattacaggaaaaatgagctcgaggagaagatgttgctgaacttacataaaaagaaatggactgatggtttgattttgcggaagtttgacacccattcaaagaccaatgaggagactgttcaggaaatgctgagcctggccatcaaatacaacaaggcagtgcaagaggaggatgaactgacgcctgagaaactggcgatagcaaatgttgggcggcaggacgcgaagaagcatctggaggagcatgtctcgaatttgatgtcgtcgaacatagttcagaccctagggaccatgctagacacagttgtcttttagtttgctttccaaatctttgcactgaactgtctgttaccataatgcaactcgagattgataccagctactggttaggtattttgtttgctgtaccactatgtggccatcttctgtacggtgtactgttactactcctattatttttttcgtcctaaaacaaatgtacaattaccatcaatgtgct

SEQ ID NO: 4169 - DNA, 1353 bp, Avena sativa
gtagtgaaaacagagatgagtatgaagcattctgggagaattatggcaaatttttaaagctcggttgcatggaagacaaggaaaatcacaagaggattgctcctttgctccgcttcttttcttctcaaagcaatgaggaactaatcagcttggatgaatatgttgaaagtatgaaacctgagcagaaggccatttactacattgctggagatagtttgagcagtgccaaaaatgcccctttcttggagaagctcaatgaaaagggttatgaggttttacttctgattgaccctatggatgaagtgtctctccaaaatctgacctcctacaaggataagagttttgtggatattagcaaggaagacttggatttaggtgataagaatgaggaaaaagagaaggaaataaagcaggaatacagtcaaacatgcgattggatcaagaaacgtttgggtgagaaggttgctcgtgttgatatttccaaccgtctcagctcatcaccatgtgtcctagttgcagctaagtttggctggtcagccaatatggaaaggttgatgagggcacagtctataggtgatacgtcttctctggacttcatgcggtcgaggaaagtatttgaaataaacccagagcatgagataatcaagggactgaatgctgcgtgcagaagcaaccctgatgactcggaagctctaaaggcaattgacatcctgtttgaaacttcaatgatttctagtggctttacacctgataacccgactgatctgagctcgaagatctacaacatgatgagtgcggctatggcgggcaaatgggcagcgcagtctcaacctgcccagacaagccagcagcagtctgccgcacctattggccttgagcctgagccgcttgaagctgaggtggtggaacccgtccgcgagcagaaataagaaaccctgtgttcgtttgccgctcccagcctagtcttgtttggtatatggctgaagaattcttggtagttgtagctcagcagtggtcaattccaactgaatattcaagctgctgtgcttgttccttgttattttggaacagggatttctgtttccacggcctgtaggatgagccgtgcgagtgctagtgtaatattatcctagatagtattctggtgataagctgataataagtaaacatttcccaactcataccaactacttagagcaacccattgtgcttgcaaaggacttaggtctcgcccccatgccattctccttgggcgacatgagcggctccccccacacaaaccctagcgttgcccgaccgggggggggggggggggttgtttaggcgtggtagcggtgcgttggtgggttgcgt

SEQ ID NO: 4170 - DNA, 1133 bp, Avena sativa
cgcgtgcggtctccttcccctccgtcagcccctgtccaggcacgggcgcaggccccgcccaccaacaggcgtgcgcgggctccttcccctccgtcaccacccgtcccggcccgggcgcaagccccgccggcggacaagcgtgtgctcgccaccaccggccggatcggcccccaggcacctgccgtcgtgccgactaagaagatcgtgtccgtcgccgtcaacgcggccacctacgccggcccggcgttctccgtcgcggccccggagccgagctccctccccctgccgggattcttccggcgcgccgaggaggaggccacccgtggcctccgctgcctgctccgcatcggcgagctctcatgatgacaggctctgcatcagccgtgtgcgccgctccctctaaaggccgcacctttctgcttcgtctccctctccctcaccgtctccgccgaagaagaagaagaggtggtaaatctccctggctgttggatatggacggatttgtggatggatggttggttggttggtcgatagatccggaggcaagcccgtcctggatcagatcccggcgatcgttccgatcaaacccctcggtattttttcagagggaaggtttgatggcgagtcgccggtggtaggatttggtggttgcttaggtttcacacgttgctgcaagctgtttggttcgtcttgatctcgttaggtagtagaggattaattgttcagagttggtgccttctccgttgtctttctgaagattaggtgatacgtcagtacttagtgggggcttcatcaggtataagttagtgcaataatccaaggttcaggttcaggttatgtgtgtgtgtgattccaaggttaagattaagaggtaatttatgtgtagttgcatcagctcaacctagtgtatagttgatttagcagcaaccgagagatgtgagaagagcagttgcatcatcagctaagctatgtgtagttgatttagcaactgtagagtattattatcgatcatggtcctatgtaagataatatgtgtgctcgtgttaattcgtgtctgtaccagtcagttcgttatcattcagtggtgaaataatatatcagtggtactactagtttggagaaattaacaaaaa

SEQ ID NO: 4171 - DNA, 1165 bp, Avena sativa
ttttttttttctaagataaaccatgacgaactgtcataccaaatgtgcatatataatgtaacatgtaaattatatgaactgtatgcaatccataaccgaccgaagcagcgaaaacacctgcagatcaaacccaaaatgttccaaactcaatacccatggactacatttcgagttcttgacaaaagcaagacaataccagatccaaaaggccaaccccagactgagcagatatcttgcttaacaatagatactcaaacccatgatcgcccaaagggtgaaaatggactctgctcaagacaaccttctgacttgttaccaactaccaacttccgtacaaaggaaggaccgacaaactgactctttccaccaagcagtgcttagcggtaccattgtgattggtgctgctctccccactactctgcgggggttgcatcggctttggtttctgtctccttgccagcatcagatgattcctcaggtttgctttcgcttacactgagtttctccagcagtccggcagcggaagaaccttcttcgctttcaccttcagtctttgcaagtgactccgcaatctcatcgaccaagtccttaaacttcttgcagttttccacagaaccaaaccggatggcaaacatctcatccttgagctctccatcagcaaagtctgccgcatgccagacgcaggacttgtcactgccggcgtgctcctgcatcttcgtggtcgagataactaggtgatttgcgcagatcttgagagtcttggcctggcgcataacaaggcggaccttgccgttctccttatgcttgagcagcttaactgtgcccgttcccctctccttccactggttcccatccttgtcgaacctgtatagctttgccttcatgtcgaggagagagtcctcgtcctcctcgccggtggtgacggcgacctcctcgagccgcacgatgggggcgacctgggcgccagtgtcctcctcctcgccggtggcggcagcggcggcggagtcctcgccttcctcctcggcgacatgacgctccacgacgggctccttgtccgccatctgaagggttggtcggcggcgcgcttgctccttttcgagtcgacgcggcggcgagaggggggagcgaagagagacgtctagagaagtttgggaggtcgatcgag

SEQ ID NO: 4172 - DNA, 1170 bp, Avena sativa
ggttctatcctgtcctgttcttcctcgagtggatcgagtggaatcgggtggagatagccatcgtctccgcaataatggatgcgccctgcgatgctctctcactctcgagcgcgctcagctgaatcctgccgtaggagccatggcgtcggtgcatctgtgcgggccgcaggtggcgtcggcggcgatggtgaagccagcgtccgcggacgggctgcgcattccggcctcgtcgtcgcgtgctgcgccgactgggcggaggttccgaggcctcgtcgtgagggccgccacggtcgtgtcgccgaagtatacatccgtcaaaccattgggagatagggtactagtgaagaccaagaccactgaggataaaactgccggagggatattgcttccaacaacagctcagtcaagaccacagggaggggaggttgttgcagttggagaggggagaagcataggcagcaacgtcgttgagatcagtgttccggttggtgccaaagttatttactccaagtatgctggcacagagttggaattcaatgatactaaccatctcatcatgaaagaagatgacatcattggtattcttgacaccgatgacgtgaaagatctgaagccactgggtgatcgtattctcattaaggttgcagagtctgaagaggaaactgctggcggtctgttactgacacaggccacgaaagagaagccttctgttggaacagttgtagctgttggccctgggccgttgggcgatgatggcagcaggactcccctgtcaatcactcctggaagcagcgtgctgtactccaaatatgcaggaagcgagttcaagggctctgaaggcgagtacattgttctgagggtgtccgagttgatagccgtgttgtcgtcgtaagcatatgttgttgttcacgtgaaataggaattttgatatcgatcgagtctgtaactttgtttcattacccttgcatggagttggtgaactgctggctcttctggctgtaccgtgttatggtttgaaatgctgtttcgtataataagaggactgcttagatttcagacgtgactctgtcgtgtgctatgctccctctatccacagttaggtcctactttgaccatcgatttgaccgttataacttggattaataatagatataaattttctaccgtaca

SEQ ID NO: 4173 - DNA, 1091 bp, Avena sativa
tcttactatccagccaaggtaccttgttacatttacagttgaatttcgcaaaaggcaaatattgatgcagcagtcaagaagttctcggagaacttcacaattatgctgttccactatgatggtcggactactgaatgggatgaatttgactggtcaaaaaagggctatccatgtgagtgtaagcaagcaaactaaatggtggtatgccaagcgatttttgcatcctgatgttgttgcccgttatgactacatttttatctgggacgaggatctaggtgttcaacattttaatgcagaggcgtacatcaagcttgttaggaagcatgggctggagatctctcaacctggtttggaacctgatagaggtctgacatggcaaatgactaagcggcgaggtgatcgagaagttcacaaagtaactgaggagagaccaggctggtgttccgatccccatctaccaccctgtgcagcattcgtggaaattatggcgactgtgttctctagggatgcatggcgctgtgtgtggcatatgattcagaacgacttggtccatggatggggtctcgattttgctcttaggaagtgtgtggagccagctcatgagaaaatcggagttgttgatgctcagtggattgttcatcagagtgttccatcacttggtaaccagggcaagtcggagaatggaagagcaccatgggaaggggtaagaggacgctgtagaaaagagtgggggatattccaggcgaggttggccgatgccgagaagaagtattacttggatcaagggatcacgccaccgaattcgactagatgaattagtgtggcatatgcaggagtcaacagtatggtttctgctacggaaacctggcccttacatgctcagcatgttcatgaaagcagcctgctcccttaatatagctgaagctccagggccagatatttgtacatgggaatatcgtgggaacggatagcatgttagcagagagtgagagctatgctaataatgaaacatctgtaatatatttattgtaccgacatgtttggtggatgcacagcatcgtcagttatttagacttaagattacatgwtaa

SEQ ID NO: 4174 - DNA, 928 bp, Avena sativa
ggaattcccgggatctgaaataagaaccacaccacgcataccaagagcaacacggaagcaaataggcaagaagcggccatgttactcgtgcaggagaatgccgccggcgtcgatgtgccagatgggtacgtgatgaagccggaggaccgcccttccgccgaggcacctgtcgcacaaatcccggtcatcgacgtcggccttctgtccggggagcgcaaagctgatggtggcgacgaggaggcagcgaaactccggtcggcactggagtcatggggaattttcatggtaagtaaccatggcgtcgagccctgtgtgatagacggcatgtgcagcgcatcgagggaattctttcaacgaccgctggaagagaagatgaaatacagccaagccaaagacggcgagaagtacgaggacttccaccaagggtacggaagcaaagagctaaagttggagcacaaatcaacccgcgactgggtggatcgcatgtttctccaggtggaaccgcaggagcaccgacagctccacctttggcctgaatcgttccgtgatattctgcatgagtttttcgtgcaacaaagcagcctagtgaataaaagcctccttccggcaatggcaaggctcctggggttcgatgatgatttctttggcgagaaactgcggggtcgagctctcaccttcgctagactaagccactacccgtcgtgtccgaggccagatcttgttcttggggtgaagtctcatacagacgcaacaattgtcaccgttctcatggtcgacaacaacgccagtggactgcaggttcaaaaagatgatgtctggtacgacgtcccttgtccgactgacccccacgcattgctcatcttcgtgggagacaataccgaggtgatcagcaacggggttttcaaggcctcggtgcaccgcgtcgtga

SEQ ID NO: 4175 - DNA, 1222 bp, Avena sativa
cgctcaagacgtggtccgcggcgtctccggactactgcaagtgggaccacgtccggtgcgacgatgccgggcgcgtgaacaacgtcttcatcgacggcgaggacgacgtgcacgggcagatcccgtcggccatcgcgggcctcacggcgctcatgtcgctgtccctcttccgcctccccggcctccagggctccatcccgacctgcctcaccaccctctccaacctggagttcctcaccatctcccacaccaacgtgtcgggccccatcccggagtccctggcgcggctgcacagcctcgactccgtggacctctcgaacaacaagctgacgggctccatcccgagctccttcgccgacctgcccaacctccggtccctggacctccgccgcaaccagctgaccgggtccatccccgccagcctcgtgcagggccagttccggtcgctcatcctctcctacaaccagctgacgggcccgatcccgcgcgacgacgcgcaggacgagatcaacacggtggacctgtcgcacaaccagctcaccggcgacgcctccttcctcttctccgagggccggcccatcggcaaggtggacctgtcgtggaacaacctcgacttcgacctcagcaagctcgtcttccccaaggacctcacgtacctggacctcagccacaaccacatcaggggcaccgtgcccaagtcgctcgaggcgctcaccacgctgcagacgctcgacctcagctacaaccagctctgcgggccgctgcccaagctgcacggcgtcatgcgccacggatgcaagccctacgagcacaaccagtgccacagcggggcgccgctcgagggcagctgccaccagctctgagcctgagcacggccgccgcctcgatctcgccggcagcggcaggcgtacgtatatggtgaatgtccttcgcgtgcgtgcgtgcgtacgtgtacgtggctgcatgtgtactagtacgaactacgaaggacgaccacggtgcttactttggggtttagtagagtgccgcgtagtggtaatgcctgacacgcggtccttaccatagagatgtgtgcagtgtgctgctgtgtaccgtctggagatgcccgcgggtcggtgtgctcctgtcctgtgtttggggtcgatcccagttattacctgatgtatcagatgttgaatggtaattatgtttgccttattttatatatagcgttttcgtaaaa

SEQ ID NO: 4176 - DNA, 1312 bp, Avena sativa
  modified_base (35)..(35): a, c, t, g, unknown or other
gcgattaatttaacttttttttttttttttttttnttttttttttttttggagggagtactatttcttcgtttgttgtatggactcagtattacattattacatctcaacttcttggcacaacaacatagtgccatactgaagtatatacatgttgaatattctagtatgcaaacaatatcagagtgtacacaaagtgtgacatataacagaagtaccaacaaatgacaagactctaaaatttgatcagtttttcattcttgagccataaaagcatctcagctagaccttcagttaagtttcgcggaccgtagcccagttccctctttgctttgtcacatgaatacgcccattgatgtctaagaacacacaccgtagggtaactgattagtgggagcttgccggttatgcgagaaatgaaaactgagatccacccatatatattgatcacccagagaggtacgtggaacaagggagcttttgtgtttgtgatgttagcagccatgttgaaaatctgcacgaatgacaggttttctccagtgaggagatatctttcgcccactctgcccttctccatagccgctatgtgtccgctaacaacatcatctacgtggcaaaatgattctctatcatacccatctccaatgtaaccaggtagacgtccattgaacctttcaattaaaatacgggagacaaggtttccagttgtaagttttccaggaccgtagataactcctgggtagacaatggttattggcacgccctctgctgctgcctgcaatgcaattttatctgctagcacttttgatctctcatactctgtgcaaaatgttttcccttgatgcatctgtgtctcgtcggcaacatacccatctgttggcccaagtgcgaaaaatgacgaagtgtatactatcttttttactgacggtgtcctctttgctgcctttagtacattttcaagccctcgcacgttgacggcagtgaagacggaggggtcggggagccagggctcgacagaggccgtggcgtggaacacggcgtcgcacccgtcgaaggctgcggcgagggactccgcgtcgccgacgtcgccgtaggcgagctcggcggcgggcggcagggcggaggcgtcgctggtgcggcgcacgaacgcgcgcacggcgtggcccgcgcccgccagcgccgcgcacagccgcccgcccaggtaccccgtcgcgcccgtcaccaccaccctcatcctcgctgccggcgaccagcctagctcgctcgcccgaagccgcagcagcagagcagccgatccaacccactacttcatc

SEQ ID NO: 4177 - DNA, 1389 bp, Avena sativa
caaatcatttcatcctcagttatatgaggattctgatcaatacctatcacaatgtctagcattatctattttagtagaccagcattgctttcctcatctgctttattctgttttaggatgacatataaccttcaaaatagtgcattgctgtgagaagatggaaccagctgttttcgagaccccactcttacatggtcttcctgatgaggttgctcttctttgcttagcaagggttcctcggcagtgtcataacgctctcagatgtgtctcaaggagatggaaggcattgttatgcagtgaagagtggcactcttaccgcaagaggaacagcttggatgagtcttggatatatgttatatgtaggggtacaggctacaaatgctatgttcttgctcctgaccctacaacacgtaccttgaaagtcatccaagtcatggaacctccatgctctgcgcgtgaaggaatttccatagaaaccttagacaagaggttattcctcttgggtggttgtagctggctaaaggatgctaatgatgaagtatattgttatgacgcttcttcaaattcttggagcaaagcagccccaatgcctactgctaggtgttattttgtatctgcatctctgggtgacaagctctatgttaccggtggccttggtttgacggacaagtcgcctaattcatgggacatatacaacaaaggcactgactcttggtttgcacacaagaaccccatgctgacccctgacatagtcaagtttgtcgctttggacagtgagctggtgaccatccacaaggcagcttggaacaggatgtactttgctggcatatacaacccggtcaaccagacctggaggggcacagcgaacgagatcgccctctgctggtctggcccgacggttgttatggacgatgggacgctctacatgcttgaccagtccctcggcacaaagctgatgatgtgggtcaaggagaccaaggagtgggtgatgctgggcaggctgtctgacaagctaacgcgccctccgtgtgagctcgttgccgtcgggagaaagatctacataattggcagagggctgagcacggtgacggttgatgtggacacggcagccagggtggatgggttcctggtgtcgacatcgacaggtcctttgatggagcatgacttcccgccggagcgatgcagagtcatcacaatctgaagactgcttgttgcacagatgaaataaagatcttctgactaaatttgctccatgtggtctgtaatagtggatgtacattgacttgtttatttgagatggctctatatcaatttttaattttaaccttattaacaaaaggaattttcaaattgtgcaatttcactgtgaaaaaaaaaaaaaaaaaaaaa

SEQ ID NO: 4178 - DNA, 1256 bp, Avena sativa
caaaccttctcagcttatttgaggacgagataaaagatagaaaagatatgcttaaaaccctgagtgcactagaggtcctctatgagcttgcagaacaccctcacagcaatatcttcttgctgaagagcagtttgcttcaacacataactgatgtgatcaatgattcctcaactgattctgttgtacggtcaagggcatcattgattagtgggagacttctttcttcagctgatgcttttatgactctagatcaatcttgtgttaaaaacctactcttggccatagacaaaatattgaggattgaggaaagtcaaaatactgatgaaattgagagcgcattggagacccttggtctaattggtgcaacaactcaaggagcatgtttattgttcactgattcatcaaatgttgccaaacacgtggtagaattgtcctttgagcgacagggcagaggtaaacagctggctgccttacatgcttttggaagcatatgtggtgttgatcgacaagaaggccagatgaaactggacgatcaagcagaagaacgtctgaagcgcttagtctatactgtagcatcaaacagtccaaaattaactccttcagctcttcttctgtcagttctacagcaagatccagatgttcggatagctgcttatagagtactatcaggactggttgtccgagaatggtgcctaagggaaatttgctcaaagtcagagataatcagagttgttacggatccaacaatggagacaacaaaacttggcatggaagcacggtatgcttgttgcgtggcaatcaacaaggccttgtcatcatcgcaccttgttcatgaatcgagtctttctgaagtcattggaaagttgaatgaagcggttagaaggggtccttaccttttggagaggaagcgtgtggaggcgcagccggtggttgataccatgcagaggttttaagttccgccttctatctcttgagctgcggcaaccctgagaaaccgagcaccctgtatgcttgatgcaacgccggctcaggtattagcgcgtatattactacatgagaagcacctgtcgttagcgtggtaactgaacttgcgagaggaggataatatcagtcgcaggttcttccgttgggctttctaatataaatgcttgatgtggtgaatgctgtttaatgtcaatccatctcaccattattatcagtgaaaaccaaaatgatgctgtcttttgcaatggaatgtggagacacatctctctcaa

SEQ ID NO: 4179 - DNA, 1195 bp, Avena sativa
ggcgttttacgcggtggggttctggatccgggagaccggtcaggccctcgaccgcctcggcagccgcctccagggcaactacttcttccacgagcagatttcaaggcatcgcacacttatgaacatcgttgataaagcccctgatgttcacaaagaggcatttgttgctccaagtgcatcccttattggtgatgttcaagttggacaagggtcttcaatttggtatggatgcgttttaagaggtgatgcaaataacgtccaaattggatctgggaccaatatacaggacaattctgttgtgcatgtggcaaagtctaatttaagtgggaaagtctttccaaccatcatcggggacaaggtcacagtaggacatagtgctgtattacaaggatgcactgttgagaatgaagcttttgttggtatgggggcaaccctgttagatggcgttgttgtggaaaagcatgggatggttgctgctggagcccttgtaagacagaacacaaggatcccttgcggagaggtatggggtggaaaccctgcaaaatttctgaggaaactgacagatgaggagatcgcttttatctcggaatcggctgccacatattccaccttagctaaggttcatgctgctgagaatgataagcctttcgaaaagattgattttgagaaggtgttgcgcaagaagtttgctcaccaggatgatgaacacgattccatgcttggtgtcactcaagaggtccctccggagctggcgccatccagtgctactcctgcccaataagcttttcttatctgctcctattttcctttggtgccttcaccatcttccatgagatcgttgaagtggacactgttcagtgagttcggcagtttatgtttacttccccaataattttgggtcaagcaatgttccaaaactggccatgtacttcttcagtttctgtattccatatgtttaagatgcgctctatggaacaatcagaatcattgcacacaaatttgcgagtaccatctaccatgcgttgctgagcgttgttgaaatagcgaggtgcacttgaggcagcatgtgcgctataagcctgtagttcagtgcttacatgatttatattctgataacaaaatgattgaagtcatggttctacaccatttttctctgaatttattaatgaactgattgttgttggattaaaaaaaa

SEQ ID NO: 4180 - DNA, 1212 bp, Avena sativa
gagcggatgcgataattctaagttaagtacttcttggtattgtcctactcccaagaggtctaagaagaaatttggtgatgatgtgtatccaagtagaaggggaaagcaagctcgggagtatgatagtgatgaagatatggaggatgaagaccaagctatgaagtctgatagtgaggaagacgcagatgaagctcctgatgaacatgaagatggctatgactttgcggaagaaaaggccagtaagaagtcctcggaaataaaagattattcacgtaaaaagaatgctgctgcaggaagcacccataagacaggttctcctaggacaacaagcaagactgctggcaaaacatcaccatcaaaagtttccaaggaaaaggggagccctgatgagagtgcaaaggtcttctctaggaagaagaaacccatcatgtcaaaacacactccaatctcggaaaaggagatagaagaaaagaagtcatcaggtaaagaggcggcaaaggacaaaggggaaccagctgaaacaggtctgcccagtaagactgagctgaaaaagaccattatccgaatccttaaaaaagttgacttcaatacgtctactttcagtgacattcttaagaagctcgttgaccaatacaagattgatctgtcgccaagaaaaggagctatcaaaattatgattcaagaagagctaaccaagttatcggaggcagataatgatgaagatgaagatggagatgtggagaagagacagcctcagcctcgagcgaaggtcatcgtttgaaggattgtgaaataccatagcagtagcgcccactgttaattattttgtacttgcaggcctacctctcttttgccttgatgggcacttgggcagccctatattaattactgttactcttgttcgcaaaggctaaaccccctatccttgtttgtgtatgctaaaacatagcctgtaggcagctccaccacatgtagctgactgatgggggacaattgtaggtaacttctgtctgtagatttgcatatggtgcctaaaactctcaatggttatggcagagcatgtaatggatagttggtcataggtttgaagagcatatggatggattggattatcataattctgtgaattgttttttattactagtactccctctgtccataaaagatgttggacgggtgaatttgacaaaaaaatctaagaaagtttacaaa

SEQ ID NO: 4181 - DNA, 1159 bp, Avena sativa
cgcacggccatgctactcacccaccgctcggcggcggcgcctggtcgtccgcgcacgccacctctacggcggcggtgacgctccggcaccatgggtggggcgtgcggctacgggaacctgtacagccagggctacggcaccaacacggcggcgctgagcaccgccctcttcaacaacgggctgagctgcggggcgtgcttcgaggtccgctgcgacccggccggcaccgaggtcggcgccccacacgcgtgccttcctggctcgaccgttgtgacagccaccaacttctgcccgcccaacttcggccagtcctctgacaacggtggctggtgcaaccctccccgcgcccacttcgacatgtcccagcccgtcttccagcgcatcgcgctctacagggccggcattgtccccgtctcctaccgcagggttgcgtgccagaagaagggaggcatccggttcaccatcaacggccactcctacttcaacctggtcctcgtcaccaacgtcggcggccccggagacgtccacgcggtggccgtcaagtctgagcgctctgcggcatggcaggccctgtcccgcaactggggccagaactggcagagcaacatgctcctcgacggccagtgcctgtccttccgcgtcacagccggcgacggccgctccgttgtctccaacagggcagtccctcacggctggtccttcggccagaccttcagcggcgcccagttcgcctgaacctcctccagcaccgtcggtccggcgtagtactatccagtagtagtagtagcaagtaattggagcgtgctaggaagcgccatggttttatggttggttcttcctcaagcattacgttcttcggggattagtagcagtagcaggtagttaagcctagtattatcatgggcttttaatgtcctggtgcgtccgtgtgttagtagtgtgagccgaagcatttgaacgagcttttggctaggatggcagcggtggtaaaggatggcctcattaactaaaagccaccttgtatcacccgccaaattagcgattgggcctcttggatgatggccttgtctcgaggatgtctttgtatggttttgtttgtgttggttgtatcgaacctgaactcaagtttagcctctggcttattatgattccaaaaaaa

SEQ ID NO: 4182 - DNA, 1196 bp, Avena sativa
cgggatcccaacccaaaccccgagcaactttagggttcgccgccatgccgcagggagattatatcgagctccaccagaagcgccatggcaagcgcccggacttcgaggagcgcaagcgcaagagggaggcccggtcggtcaagaagatctccaaggatgcccgcaatttgcttggtgctaaggggaagaggttcgccaagaagcggtatgccgagaaggcgcagatgaagaagaccctgaaaatgcatgatgagtcaacttcccgccagaaggttgatgatgatgtcgaagagggcgctctacctccgtatctgctggatcgtgatcagacacagcgtgccaaggttctcagcaacacaattaagcaaaagagaaaggaaaaggctggaaaatgggatgttcctttgcctaaggtcagacctgttgctgaagaagagatgttcaaagttctacggactggaaagaggaaaaccaagcagtggaagagaatggtaactaaggccacctttgttggtcctggatttacaaggaagccaccaaagtatgaaaggttcattcggcccactggtctgcgtttcaccaaagctcatgtgactcaccctgaactgaaatgtacgttcaacctcgacatcatttctgtgaagaagaatcctaatggtcaaatgtacacttctcttggtgttatgacaaggggaacaatcattgaggtgaatgtcagtgaactcggtcttgtcacccctgctggaaaagttgtttggggtaaatacgcacaggttacaaataacccggagaatgatggctgtatcaatgctgtcttacttgtgtgaagctgttatgcaattctagttaaggtgacatggcgcggtgtttgtatctggtccaaggagggtagttttgttttgttggcgttccagatcatgcttgtcttggaacacccactttccagtgtaatatcagggtgcaacagtcttctccccttaatgtaaccggctgtaaaatccgagctatagaacaagcaaagtgagagtctcctcgcataggtttccatgttcgtgttatgtcctgcttattttgttggtacctctgttccattttaaactgtctgtgacagttaatattgaacagagagtatttctgatatattttccaaagtgcaatatggaacagagggagtaccaagttaccaattaaaaaaa

SEQ ID NO: 4183 - DNA, 1090 bp, Avena sativa
tttttggtcgcacacaaacaatcacgtcacatggtttacccacagactgagcaacgaactgcgactgttgacattgttttgtttgattaatcaaaggctacatatcttgatcagaaaaaacaattgtcgaaatgacaagagacctataccagcatcaacaaatggtgatcagtttaacagaatccttctacgaccaaaaaaccactagagacaaaataggttaacagaaaacaacattctgccagtacatatatacaaacacacatctttttggcacggcctaatgctgactgaggtgaccaaaacatgctttgcattgctctatttaccatgtctatctttccaaacggccagacgattattccaggggggcggattctgagggcggaaccacagctttggcctcctgcaccttgtcattgttataacgagtgcaaatcagtcgcaaacccagcagcatttcctgatatggatacaatgtcaaatatatttttcctatgaccctaatgcttggctagaaatgaatggaagcgctgcacttttgcagcatccttttttgaggtgtgcaacttgtcaggcacaattccaccaggggaaagtctcctccgctttcttaaccgaaacaagaaatcttcagtgtcaaggacatacgagaccttggaggtcttgcaggatatcttgcattcaagaccattagcaacttggacgccatccatggtcttcaatgaatccaaagcctcgtcattacttgaatttttccgcttattccttccaaggaagataccgtcagacaacattgtgtccgacaaacttgacaaaaagtcactgaagagatatgaggaaaaatttggatcaatcgatactgcagtcacttcaggcttttcatgaccatattctatcagctgaacagacaacctagttggatctgagcagcattcaaatcgatacatgctctcgtcatgcagtaggacacgggcattttcatgataaactagatcaaagaacctcccaggagatcttgatttttcatacaaataaagctggagaagcttgttgtccatttcatctgttgctatagcttgaagctgct

SEQ ID NO: 4184 - DNA, 1059 bp, Avena sativa
gagtcattgggacggtatcttgtcgaagtcaggtgaaagaatcctcgttcttgcccgcaacaaatagaccgtttgaccttgatgaagccatcattaggagattcgagcgcagaatcatggttggccttccaactcaagagagcagagagctgatcttaaggacggttttgtcgaaggagaaagtcgatgaaaacattgaatacaaggagcttgcaacgatgactgaagggtacagcggcagtgatcttaagaatctttgtatgacagctgcttaccgcccggttagggagctcctgaagaaagaacggttaaaagagatggaaagaaggaaaaaggaggcagaacagaaggccactgtggcagcggattcagacaagacagagagtaagaaggtgagctcagataagaaagaggacagttcagagaaggcgaattccggtagcaaagaggaaagttcagaaagcaagacagatactacggaagcgaaggctgaaggtgagaaggaaccggcgatcgatctcaggccattgacgatggaggacctgaggcaggccaagaatcaggttgctgcgagcttcgccgctgagggcgccgtgatgagcgagctgaagcagtggaatgatctatatggcgaaggcggctccaggaagaaggagcagctgacatactttttgtagaaacgatgggttcttatttgaagattggtgatgcttcggcagagaaatgtcggctcagcgattggggagaattgccgtggatcagagagcagcttgatggcgataaaggacagaaggatttctggggagcagacgtgagttgtagcatcttgggatggatgagataggtggtgggtattggaacatgtaaaattcttttatacaaactagtagtatttagtatgtacacctctatattgtaattattcagagtttgttagtctctatgtatatcttgattggagaggctgtggtgcttgttcaatattgtcttagttgaacatttttagaatgaaccctttagtctgttggtaatgtgaagtataattagaaagaaaaaaaa

SEQ ID NO: 4185 - DNA, 1088 bp, Avena sativa
tttttttggagcgcggaaaatgaacaggttttcattccaacaaaagaagttagtagtagtagaaatactgacccgaactacgaacagctttttattccaaagaaacaatggtgaaatgaaaccacatgttttcgagtaaaaacaacagcaaatgacacatttcacatctctaaactctcagctatgcacacaaagcttcttcccggtggcatttgccatggctatagaaacctccttgtttgatgtttctacggtgccagattggctgactgcctatctactactgtatcatgtatcttgagtcacaacatggagaaaattgcagaaagcgagcaggcctagcaggcccgaacctcagtaaaccggcttggggctggttcacagttgctggtaagtttcaaagacccaaagagacaggatagtctcctcatgatgggctttcgactggctactacttccaatgacataacattcttcccggtatcaatgtgcatatcatagccatccagatctgcttctgttatgaacactgcatcaatacacccagtcggactgcttggcgtgggtagcataacttgacaaaggggtaaaccgccgtcttcgtaatcaaactccatagaataatcatccatctctctgtcagggatggagggtttgctgccttctacataacagttcaggtctgtactacgtactggaagacgtccagtagtgagagtgctaaatacgataacagcctgccactgtgatggtgccaaaagcactcggggcctaatggatcggacatgatccaaagctgcttcaggagtcatgctcctatatttaatcaaatagcacagaacaatagtggtgcttcttcctcttccagctttacagtgaacataagtagttccaccctgtgatgcattacggtggataaactcaatggctcgacagatatcctcaagagaaggtgcaaaacagtagtctcttgtggcaatcacaaggtgatcaatgccatgggcctggtacagggacattggtaccagagtctcgtaaggctcattcaatgttacaaccccctgaactccaagttgcttcaaacgtgg

SEQ ID NO: 4186 - DNA, 1288 bp, Avena sativa
aagagaactaatatacagagaaattctcgaatatcatccaaacatgctgagggaattccttgagggggctgagccaactggcttttatgtacccaagtgcagtagatcatttttaaaaagcaattttacattccttgaagagcattatgcaaagggatcaacagcagcgccgcctgacaggcaacataattcgttaccaaggccgagtgttatctactcggataaccgaccacaaggtgcagccaacatcactgatgatctttccaggtgtgtaatcagagataatatgcaaaaagcacagaaagatcctgcttcagttggtgcaaaccgttttcctcaagctgctgctgctgcaaggcctggtaaagtggttggttctgtgcttcgcaacggtaactgttcaacatctggtacggatcaatatgaacagcgaagggttgccagaagcccaggaatcggtccacacggtgttccttcgggcagctcatatccaagaagaaacaatacctgcaagagcgaaacaggtgaagccgaaaggatcgacgtgagccacgctgggccacctaagccatatgcaggaaacaaattacccgctactgttgatggccgcaacgggcactggtagactgctacagcagtaccagaaaatccttgtcagggcatcgggaagagttactcatctgaaattcacattcaaacacgtcattctgtacagagttgtattatttgtcaggttaacatccccttcctaaagactgtggaaccgcacgcgaagtccttgagataggtacttgcttctgcgtttcttgacagctcaacttctgaatgagctggtacagaagattacctgcatctgggtagattcggttcaactgttccagaagttagcataaactggaaaacctcgtggcactcgtgtcaaacggactactgactcgacttgtgttactcacttgtggctctgaagatggtgggtcagagaactcatttgtacactatctgatattgtaacttccaggttaattgagtttaaagtacgttcctgttgctagtagcgtgtcattcagctgcagcctgtagtaagtactgaactatttacatttctgataaacattatttggagacaactcactattaaaacagctgatgttgtatcgttatcccactgaatttgtaatatgacctgtaatatgcactattattcagttattactctggatgagaaaaccttgtagttttccgtagtgtgttcaggactgtgatgatatttgatttgtgaaatctacaa

SEQ ID NO: 4187 - DNA, 1120 bp, Avena sativa
tgcggacatcgggatcggcctcaggtacgactggggcaagtactacgcgtccaagtcattctacgaccagaccaagaaccggcgcgtcgtctgggcgttcgtcggcgagaccgaccccgagcaggccgacaaagccaaggggtgggcgtccgtcatgtcgattccgaggacggtggagctggacaagaagacccggacgaacctcatccaatggtccagtggaggagctcgacaccctccgcaggaatgccacggacctcggcggcatcaccgtagaagccggctccgtcgtccgccttcccctccaccaaggctcccagctcgacatcgaggcctccttccgcctcaactcttcggacgtcgacgccctcaacgaggccgacgtcagcttcaactgcagcagcagcgccggcgcagccacgcgcggcgcgctcgggcccttcggcctcctcgtcctcgccgacggccgctacgagcagacggccgtgtacttctacgtgtccaggggccttgacggcggcctccggacggacttctgccacgacgagtcgcggtcgacgcgggccaaggacgtcgtgaaccgggtggttggtgggcccgtgccggttctcgacggcgagaccttctcggtgagggtgctagtggaccactctatcgtgcagagcttcgtgatgggcgggaggaccacggcgacgtcgcggtcgtacccgacggaggccatctacgccgcggctggggtgtacctgtttaacaacgccacgagcgccaccatcaccgccgaggggctcgtcgtctacgacatggcctcggccgagaatcgggccttcagggaaaacgagatgtagatgaaaatactgtaaaggtcaatgccgacggccaagcttgcggagaagcttcttcgtcgccagatggggatcgtcaaggaaggagagaaggtcatggagatcgccattcgcaagttggcagacatgttctagctagggtcttctccctgccttggttgtggaagggtctcttttagctgtttttatgtccctgtttcgagtttgtaatattttaaatgtttgagttggactttagtattctttgctggaacgtgagaggcctcaacgatccagac

SEQ ID NO: 4188 - DNA, 1214 bp, Avena sativa
acgaggtccttagcgattcccagaaacgcgtagtgtatgaccagcttggtgaagaagggttgaagggacagcctcccccaggtgcgggaggttctggtgcatctcccttctacccaggtggtgcccagtccacctcattccactttaatccaaggagtccagatgatatatttgccgagttttttggattctctgggccattctctcacatgggtggcttgggtggcatgggtggcatgtccggtggcactggtggcatgagaggcgacccaagatcctatgggtctatgtttggcaatgagttcctctcttctcaatttggtgcgcagagttctgcaagtaatatgccacgcccagcacacaaacaagcatccatcgagaatcggcttccagttacccttgcagatctgtacaagggtgtagccaaaaagatgaaaatatcaagagaggtcatagaatccagcgggagagtctcgcaggtagaagaaattctgacaataaatgtgaagcccggttggaagaaggggactaagatcacctttcctgaaaaggggaatgaagctccaaacatgatacctgctgatattgttttcatcattgaagagaagccccatgacatcttcactagggaaggaaatgatctcgtcgtgacagagaaaatctccttggccgaagcgcttactggatatactgtgcgtgttgccacgcttgatgggcgcattctgtctgtacctgttagctcagtgatccatccaagctatgaagaggtgatccctggagaggggatgccaatacccaaggagccgaataagaaggggaacctgcgggttaaattcaacatcaagttcccttccaggctgacgtctgatcaaaaagctgggatcaaaaggcttctgggttcgtagatttaaaatgtggcattctctagactagcgaaagtggttgtgaatattgccaccgtgtggctaggtagatctctgtttgcctgaagaggccaatgagcggaattggtttaatgtgggtatattccgtgacatatacctgtaaaaattgtgttgttatgttgttgtttttaatctccataattagactcttttaaatatgcaaccgggtttggttgctggcagcaagccccatgtaccaaggtttgagtttatagagatgtttacaccctgccatcgtttaatgggaactacagtgctctgagtcggaga

SEQ ID NO: 4189 - DNA, 1307 bp, Avena sativa
acctgtttcattctaaatggacatatttgttttcaggttcaattaggataagaaatggcagtgctttggcattcacccaagaaagaaaaaaggtttgcatcaaaaggctaaaaccgcatgtctggtagtacataacaaacttacagtttttattcctccagttccaaaaaggaattgatgacaacaaagtattctactagttcccagtgcccatctactgtatatccaatatgagtaaatatcaaacatcgacacaacagggccccttcgcagctgaacaaacctgcacgggcacatgcttccgcaaacctccagccctcaacagcgcaaacccctcccaattcgggagggtaaccgctgtgccttgtgactcaaccaggtatacatctccttcctgtgctgatcaaacagcttgatcatcacaggttcacccatcagaccatcttggggctttgacggctttgacccaacttgtgcacactgaatatctgctgtatagttctagcctagcaaatccttgaaaagattaggattgttccctgttggtgtcacgccgacatgccgtgcagtggcgtccttctgcaaggcatcctgaagactatggcccttctttgcagttgctcctttttgggcaccaactgcgggttctgtggatccactggtggttccagtgtcatccgagaagatggacataaggtctggtgtgttggaagcgctgggagctgaagttccaggcagcaccggagaggctgatgttggcccaaggagcccatctaactgtgagaaggggtcagctgacgaagcacttgatggaattggctcacccagatccatcagatctggtggtgggacagctgggactacttgttccttggcaggctgaggtgttgcattagcaacagttactttctcagtggaggaactctcttttggtgccctccgaccagcatgtcccttccgatcagcttttgcagccgaaccaaaaagtgaagcagccaaccgttgcttttctgctgaaacttctgctacctgctgtttcttagagccatatgaggattcccgtgcctgtgaacttatcgaacctgccccatcagagatagaggccccgttggctgcttgttggctagaggtagagcttgaaggtgtagaagaggacgtataggattcccttccccatttcttctgaaccccatcaagacgaagtttagcaccaaattcaccagaaggtgcactgcccgactgttgggaccttgttatttgatgatcttccttatagtaacttgattctggaactggaacaaggtcag

SEQ ID NO: 4190 - DNA, 857 bp, Avena sativa
agcgcctcatctttgccggtaagcagcttgaggatggctgcaccctggccgactacaacatccagaaggagtccaccctccacctggtgctccgtctccgtggtggcatgcagatctttgtcaagaccctcactggaaagaccatcaccctggaggttgagtcttccgacaccatcgacaacgtgaaggccaagatccaggacaaggagggcatcccccggaccagcagcgtctcatctttgctggcaagcagcttgaggatggccgcaccttggcggactataatatccagaaggagtccacccttcacttggtgctccgcctccgtggtggccagtaagtgcctcctagccatggcgctgctttgttctttgggttcacaagtctggtgctgtcggtgtgctcctgtggagctgtcattgtgtcgtcgtctgatttggtcgtcactctatttgtgctgtcttattgtggtagtgtctacaaacttctgctgtggtgcagtagctctggatgaactaaacagtctttttttgcactatgtttgattctgtcctcggtttgaacagtaaggtaatatctttggtcagtgtgctataggctgctggagggcgtttccatccataataataagaagaaaagcaagttagcttattatttctccctaggcctgcaggggaggaactagctctgaatcccgatggtttctctcgaattaacctagtagtccacatgtttgtgtctgaattctgagtagcagcttagcatcctttcccttaatatggcgagtttgatcgtgcttcaaacagttccccttatgcttgtacatgaagaaccacataagcaaggatggagtcatt

SEQ ID NO: 4191 - DNA, 1058 bp, Avena sativa
cccggcgctcattcaccagtgcttacctgatgaactacttatcgagatctttgcgagaatgagcccatatactttaggtagggctgctagtgtctgccgcaagtggaaatatactgcacgcaatcctacgttgtggcgtaacgcttgcctgaaaacgtggcagaggagcggaatggaggcaaactacaagatggttcagtcgttatatgattcttcctggaggaaaatgtgggtgcagagaccaagaatccgaattgatggtctttatgttagtagaaacacatatattcataccggaattacagaatggcagttcaagaaaactgtcaatgtggtttgctactaccgttacttgagattttttccaaccgggaagttcctctacaagatttctccacagaaagttaaagatgttgtcaagtgcatgcatctccgagcatcaaaaggcgattctgtgtttaaaggcgactatacactgtcaggggatggacagatagaaatggcactgctatatccagggcatcggtacacgcttgttagaatgcggcttagggtcagaggcactacaattggcgcaaataacaggttggatgtcttgaagatcctaaccacgggagtgaatggaactgaactgggaaactggaaaggcaacatacttgaacttgttgagggctgggaggagaacgagacacatgacccggacgtgcctgctgtttcccacagcaggggtttgactccctttgtgtttgttccgtttgaggaggctgatacttcagttctaaacctgccagtagagaagatggattactttgtccccgggtgagcacctccagaagatgagcacgatgatgaggaatggagagatggcctttaatctcatggtgcggatggagacgacaagcatgtttcgttccagactgagctcatgttggagcgatatgtacatatgtagtacttgtcttgtttcgtttcaggtctgttgttgtatgctatgctgcttcttttaatgtggccagaaataaacaccatgtcaaacgggtggaaacaccctcctatac

SEQ ID NO: 4192 - DNA, 734 bp, Avena sativa
gtcaaggacagcgcagctccaacagtagcagtgagtacaactttaaagcgtgttgctgagaaggttgtattggagctcgtcggaagtgatagcttgggtggcaataaagcagatttgctgcagattgctgaaaaggacatgggaaatgtccttgctgaaaaagtgcactttgctgggaacggggtttctcagagcggcctccatgaagagctagaggtgtgaacttggatggataccagaagtcgtcattgagggttagtctgacatccagcatgaagttggagaatggagggaatggatggggggtctggtgtctctttggtaagttgctcaactcacaaactttccttttcgacacagatctgcaagcattgggggccttggaaggaagatggcggttaaatcatggcagtcaatgacatgatgaaaacaacattcaagcaaagtttccatcattggaggccatgagatgtctaccagctctagattatggcaagaaattttactagttcacttgcaacttccgcagttgcggtgtaactggctcttattgtaccagcaggctccctgggttgacttgttaacttcccagggttgccctgctcttctgctgtagatctaggttggaaatggattgtgatactatcctcctgtattctcaaggccccatttgtacccttccttccgttgtaatataagatttgcaagatggttcattgtactacaaaaaaaaa

SEQ ID NO: 4193 - DNA, 1313 bp, Avena sativa
gcataggcggcttattaatatggcattttaataactttatatgcttgaaccttcgaccaaacaaacagttgttagttttagttttaaatttgagggtttgatcattagttgggatttgtattctggaactgttgacaagggttgtatgaccttcacaaatatgtgaggtatttaccttcagtaatcttggttctattatctttaccaaacattatccatttttctttcttttacctgacctacttcggtccaaaccaggaccagccaccagatgatgatagaacatcaaatcacactatagaattatgtttgacaatggatctcaactagtaactgtaaaactgtacttgacaagggaacatacttgttttgatgctttggttagtattttattatctattgctatttgtttagcttcttaccaaatgcacataatggtttcactagacctactgcttaaataaatgctttaacttgtcacttttattgttgtttaaatataagcttagaattcatgcaactagtccagccatgagcatgttacttgattatcttaccgttggtttgacaagttactaagctagccattgtcatgcaaggcattaaatattttactaaatgcagctaccttggataggcttattgaaaattcttcatgattagtactagtattgtgtgtttgtgatgtactgtatggttttaacctagtgcattgcttgtatgtttgttttttatgatgacgcgtggcagtatttttcgttgaaaagctcttgataatcattactaatgtaccatttatatttacccatattgttatgcgcaaggaaaaacacgtccaggtccgtctggcaatacgaggtctggtgcaacaggtggcctaggaggatagggtggacttctacatcgacaagtatctaccaggagggagtgagggtgcctgacaagtacccgcaaagtctctgtagacctgatggagtgtgtgctggagcgcatcaaccctgaattactttgtattaggatgtgcaagaaggtttattcatagtctcggtgaacgacttgctcgcagcggcttctttttgatggtgctattgatggagttatttgtgattctacagttgttttgttgcttgctgatgtggtgtagtacatttgatgattttggcaatgatgtggtgtgatggagttagttgtgattgttgagtcggaagtgtaaagtttagacttatattggtatatattatctgaaatattgctgggctgatttggttgtagctttctcttagaaagcgctcgtgctatataatttgtgtcac

SEQ ID NO: 4194 - DNA, 1493 bp, Avena sativa
ggcacggaggggtggacggggctggtgatgctgcttctcatggtcatcgccttcacgctcgccacgccgtggttccgccgtggcaggctgcgcctccccaagccgctcaaccggctcaccgggttcaacgccttctggtactcgcaccacttcttcgtcatcgtgtacgcgctgctcatcgtccacggacacttcctctacctcaccaaggagtggcaaaagaagtcgacgtggatgtacctggcggtgccgatggtgttgtacgcgtgcgagcggctgacacgggcgctgcggtcgagcgttcggccggtgaagatactcaaggtggccgtgtaccccggtaacgtgctgtcgctgcacttctccaagccgcaagggttcagatacaagagcggacagtacatcttcgtcaactgcgcagctgtctcgccattccagtggcacccgttctccatcacgtcggcgccaaaggacgactacgttagcgtccacatcaggacgctgggcgactggacccgggagctcaagaacgtcttctcaaaggtttgccggccgccgacggaggggaagagcgggctgctccgggcagagtacgaccgcgacggcggcgccatgtccaacctgagctttccgagggtgctgatcgacgggccatacggtgcgccggcgcaggactacaagcaatacgacatcgtgttgctggtggggctcggcatcggcgccacgcccatgatctccatcctcaaggacatcatcaacaacatgaagcgtctcgatggcgacgtcgagtccggcaaccccagcgacgcgagcgcctcggcgtcgttccggacccggcgtgcctacttctactgggtcacccgtgagcaaggctccttcgagtggttccgtggcgtcatggacgaggtggcagagacggacaagaagggcgtcatcgagctgcacaactactgcaccagcgtctacgaagaaggcgacgcccggtccgcgctcatcgctatgctccagtccctcaaccacgccaagcacggcgtcgacgtcgtctccggcacacgcgtcaagacgcatttcgccagaccaaactggcgcaacgtctacaagcgcatcgccctcaaccaccgcgaacagcgcgtcggagtattctactgtggtgctccggtgctgacgaaggagctacgtgagcttgcgcaggatttctcaagaaagacaagtacaaaattcgagttccacaaggagaatttctaatttccagccacaagaagtttctctttttgtggaaacccatgttaatttagtacataccaagttctatacatatgaagaaagtagaggggctagatcatagtaggcattggttgattgtgaccagttcggtcatagtttcatcaatttttgctgtagaagaataatccattgcctcattgtacaaatattctcttcttcgatataatccatcgcatgttggggagattgatggcatgatcaaggaaaaa

SEQ ID NO: 4195 - DNA, 1086 bp, Avena sativa
caactgctacttcaagcttagcagcttcaggtggagcaaggaagttgtatgttgggaatcttcattccaatattacagaagaacaattgagacaggtctttgagccatttggactggttgagcttgtccagctgcctgtagatccacttactggactatgtaaaggttttggttttgttcagtttgcgcgtcttgaagatgccaaagctgctcagagtttaaatggtcaactcgatattgctggaagagtaatcaaggtttctgctgtgacggaacaagggggagtgcaagccagtggggcaactgcgggagatttggatgatgatgaaggtggaggtttggcactgaatgctagctcaagagctcttcttatgcagaaactggaccgtagtggagttacaaccagtttgacttctgggatgggtgctgctggtctgaacacttccatggcattagcacctgtatcagttcttggtgctcctacagccactcctttgctacagtctacagtccctggtctcggtctaattccaggagcatctcttccagttatccaatccattgacatggctccacctagtgaatgcctattgctcaagaatatgtttgatccagctgtggagacggatcctgattttgatttggatattagagatgatgttcgagaagaatgttctaagtatggccaagtacggcacatttacgtagacaaaaatactgccggatttgtgtacctgcggttcgatagcataactgctgctatgggtgcacagaaagcacttcagggaagatggtttgcggggaagatgattactgcaacctatatgtctactcagcagtatgaagcgaagttcccggagttaactggctagctgaagatatctgctttggcgtcgtgtactttcttctatacatggcatcatgctggcactgttgtattggctttactagagaaatttgtctcttgggcagttgtaaacattacaccatcaggcattcaatcaacgttgtagcatcggcaatcgagtgaaaattgtgtgttggcagttttgatctcataatctggatttggtgattgtgttgatg

SEQ ID NO: 4196 - DNA, 1086 bp, Avena sativa
taagctgcaggtcttcacctttgccgaagcttatgattttgaagatcttgaatctattattcaagaggttgccagaggatttaagacaaagataatgtttatatatgttgacactgccgaagaaaaccttgcaaaaccattcctgacactctatggccttgaaggagataaacctacagttacagcatttaataccaatgatggttccaaatatctgttggaggcagatattaacacgaagaacctaaaggagttctgcttaagccttttggatggtacacttcctccatacttccgatcagaaaaagtacccgaagaaaagggacttgttgaaaaggttgttgggcgcacattagattcttctgtcctagaaagccctcaacatgtgttcctcgaggcttatgcaccttggtgtgttgactgtgaagcgataagcaaaaacatcgagaagttggccaagcatttcagtggtttggacaatctaaaatttgcacgcattgatgcttctgtgaatgaacatcccaaattgaaggtaaacaattaccccaccctgttgctttatcccgccgacgacaagaccaacccgatcaagctttcaaagaagttaagtctaaaagacatgacgagattcatcaaggaaaagcttcagatttccgacgtcgaaatcaaggagagccttcaaacttctgacatcaaaatcaaggagatcccgcaaacctctgacgttgaaacggtggtggccgctgatggtgtgaaggatgagctgtagtagaatgctttcgttgtgtctccatagcttttgagcattcaccgaaggaaatacggtggcgcatttgcgctgctaaagactgatggtagagcatggctgtaacttacggcgacaggcaaggatatagagtagtggatggtcacaggtgacaatgaacatgtgaaatctaatttcgtgttacatatatacggatagtcagatcccaggtttacttcctgtaatgcaatcgttgtggcatgtcaattggcattttactgtgaattagcttgttcatgtataataatcaaataaaatcaggtactcgatgttgaaaaaaa

SEQ ID NO: 4197 - DNA, 963 bp, Avena sativa
atttcggatctaatatgccagaaatatcacctgacatgattaacatggcatctaacatgatgggcaagatgtctccagatgaactgcaaaatatgatgaaattggcttctaacattggtggacctagtactagtagtgcccctctgagaccagggagtaatttgcgtccctcatcaagagccacaactagtgagaataacttccagacctcatctccgctaaatgtcacagagaaacctgatgaaatagtaaataaccaaaggatggaccagccatcacccagttctccagctgatatgcaagacatcatgaaaaattccatgaaagaccctgcaatgcggcagatgtttgcatccatgatgaaaaacatgagtcctgatatgatggcaaacatgagtgagcagtttggtatgaagctgtcgaaggaggatgctgtcaaagcccaacaagctatgtcttcattatctcctgaagatttagacagaatgatgaaatggatggacagagcacagagaggagtagaagtcgcaaagaagacaaagaacttgctcataggcaggaaaggcttgatcatcgctattgtcatgctgatcgtggccttcatcctccagcggcttggattcatcggtaggtgatggcctaaacgtccataatggctgatcagaccgttcatccaaagatcggatacaaataacttttcagcagatgttcggtgctcttctctctgagcgagaagcggtagcacgcaaatgataatgtccttgggaagggcagagaaatagttggatccgtgcctttcttgtaccattgtttattctttggtcatatgtgcttatagattgtaacaaaatagaagggaatgcctagtcttgccatttgggcaataggttgacatgcaatgttatgaatggcttacgttattttgcaccattgagtttgggctaaataacgtaagccattcat

SEQ ID NO: 4198 - DNA, 908 bp, Avena sativa
ccgcctccccctcgcggtgagtcccccttcttctccacacgtagcctagggttcgccctccttcctcagtcctttccctccaacccccaccctcgtcttcgtcttcctgatcccagtcggctcctgcgcgtccccgcgacggcgcgatgaggttggagaagtgctggttctgctcctccaccgtctacccaggccacggcatccagttcgtccgcaacgacgccaaggtcttccgcttctgccgatcaaaatgccacaagaacttcaagatgaagaggaaccctcgcaaggttaagtggacgaaagcgtacaggcatctgcgcggcaaggacatgacacaggatgccacgtttgagttcgagaggaagaggaacaggccggaacgctacgaccggaacgtcaccgagcagactctgaaggccatcccgcttatcaccaagattaggcatgaacggcagaagacacacatcaataagagacagcaggcgggtaagagcatgtcacggaagaaggacgccaaggagctcgatcaggatcttcagatgcttcccaagaaggacatcgcgcattatgaacctaagacgaaggttctcgtttctcagctcaagaccgaagagaatcttatggaagagtaatggaatggatatgtcttgcttgtgcgtgcatgtagtcctttctatgcaatatgttgggtttcatcagattgtggatgacaatgcaatatgtttccgattgagtagaagaaagttctgcatgtgctgtaatcgtcagatttggtttcttatcattataatagaatcgtgcactttaccagtcattattaacgtgtaatcattttcgtttagtactatacctgaagtacttttgttctactatttaaaaagttcagttagttactgtttcaaaag

SEQ ID NO: 4199 - DNA, 1144 bp, Avena sativa
ggtgcccctattggatccggccatcaattactgtgtctaatcacaatggtatcttacatgataaattgtacttgaaatattcatatcatgccagaattcatagaagaatagcatgttgcgttttaaggttttctcctccattgaataataagcctattatgcaggtgttctttttttctacgaagaagcatccaagaacaaaagaactaatgccagaagatttctggtttagtgcaccaaagaagggaattatggttttcgcattgcctggggagcctggattagcagaggtagctggtgatttcaagattcagtttcacgaccgtcagggagatttctactgctggctaaatacaactatgatggagaacagagtgacaatgaatccaactgactttgatgattttgacaagagaaaattgccgtcacctgggttccaggtcgaggttgttctggtagattatgatggttcacaaccaccaaaacaaaaaacagctgaccgatctgctgataagaaatctgatgctgattcctccacgggcaccagccccaaagaaaattactctgcacatgcagagtccaacaaagaagctggaggcgatgataaggatgatgttttttctgacaatgaagcagaagatgggtcatccaagggcaagaaggaaaaggtccccagcagtggtcaaggtacagcgagtgcagcaaaagcttctgaaacaagtgttgcacaaaaggaggcatctgctgcttctgctggtatggaaaaactaactatgtctacggagcaaggaaatgcaagggcacctgatgccacttctctgaaaactgaagctagcagcaagagcagctccaccacgacacaaccccctgccatggaatcatccggcatgagcgagttcaaggccattgctgcagatgcttcggtcttctcgtttggagacgaagatgattacgaaagcgaataatcccatggcttttccatgtgttttgtttgtcatgtgtatagtgtcagctcctccaaaaacaacaggatagcaaagttgaaaataactgatttattcttgcattttgtgtttattttagcccttgtaccaagctgtgatgttgtacccagataataaacttattaaattagaacttggta

SEQ ID NO: 4200 - DNA, 1131 bp, Avena sativa
ggaaatgtgtgaatacaatggataccaatataagatatccaaaagagactgtagatgctgttcataggtacatttcttctgcccgtggttgttctgcaataaagaactcccaatccaggtatgaagctgcaactcttttaaagaaagcatgcttgaaacgccttgcgcttggtgaagttatccagctgtcgtatacgataactgataaaatgaagtggtttgttccccacccttctggctggcagccgttgtcaatgaacataatagtgattgatgctgatgctaaaggaaaatcttagcctctgcactttcctcggatcatatcggatggacaatttgagttctggttatatctagtatggtgactcatctacgttttgccaatatttccttctgaaaaactacattgcatcagtgtgtcttagtgggaatcaagctctcggtatgccactggttttgttcctagtactctgatgggaacagctcaggttgcgcgttactgttacaagattggtatgccagtcagttggttctgtaacctaagagacagagtgttatttctttcgttcaggcaagataatcatgcttgatagaggttatgacctggtctgctcttccctagtgggtctaaaatgcatgcccgaaatatcgagagttgatttcaagcaagtctgtggtagtgactcaagaagctgctgctgctcgagcttttcagcaaagcatctacatcgaagcccttttgtttgtaattgctcggtgttcagtgactcctggtggttccagtcttcatgtattgagtacttaattaaagctacctttgttactgctcctggcacacttcagtagcctgaagtgcattccaaatgccttcggcacagtaactgccttgccggacttgtcatgctgcgcgcagtactgtagatactggctctcggtgcttgccttggctgcaaggcttacctttgttacattccttacctttgttgcattcctatgatgggaaaaggtttggaatcagctgggtttatttgatattccatcattgtaaacccagatgctgggtctgtcttgtaatcataacagttatctttatcttcaatgcaatttaagtgtttgcttcttactaaaaaa

SEQ ID NO: 4201 - DNA, 1373 bp, Avena sativa
tttttttttttttttttttttttttttactttaacatttgttgcacacagtgctctcttttaacattagacattctgccgaaggtgtcataatcaattccgattaacagcttgagctctgactctgaactacttgcagaactccattttattcgtctaaacactggctccgttggaactgagatatactacgtccgtatgaccaaaactcaggcaatctcccatcgataaaagaattacatcaaagatggggctacagcgcaaaagaatcctaattaatatgtccaggattgcttccgtgtaacgtgggtatgatggcttagtaatccatcccacccatgccgcccattgcaggtgcctctttctcctctttaggaatctctacgatgatggcttctgtggtggtcatcagagatgatacactagcagcatccaccaatgcagttctgatcacctttagagggtcaatgataccgaccttaaccatgtccacgtattcacctttagctgcatcatatcctagatcagtgttatcttgctccaaaagcttgccaacaaccactgccccttctacacctgcattggaagcaatcgtatacactggtgtcttcaaagcattctgaatgatttgtacgccaatcttctgatcaaagtttgcagtctgcagtttatccagagcttttgatgcatatagaagtgcaacaccacctcctggcacgataccctcttcaacagcagctttagtggcattcagtgcatctgtcactctgtctttcttctcactaacctcagcttcactggctcctccaatctttagaacagcaacacctccagaaagcttggccaaccgctcctgcagcttttccttgtcataatcagaagtgctttgctcgattgcagatctaatctggtctgctctctcttcaatgttcttgtccccagctccatcaagaataacagtgtcatccttggaaacagtcacctttttgcaggtacctaacatctgagaatcaaagttctcgaggttcatcccaatctcttcagatatgacttctcccccggtaaggacagcaaggtcctgtaaatttgctttcctgttctccccaaaaccaggagctttaacagcacagactttaatgccagcacgaagcttgttaataatcagagtgcccaatgcttcgctttctaaatcttctgcaactataagtagaggcctttgcttcttcagagccatctccaacactttaactactgcatgcatgttcgatatcttcttgtcatgtatcaagatcaagggggtcttctaattcacatttctgggtctttgggttagtaacaaagtatggagagatgtaacctctgtcgagcttcatg

SEQ ID NO: 4202 - DNA, 1212 bp, Avena sativa
atatagttcaaggttctggtatgggggcgttggttgtttcggttgtttgttacattgcaacattctctttctcgggcctactctttcactggttcactccatcaggacaggactgcggactcaatatgttcttcattgtctccacattgattcttgtgtttgtattcgccattgttgcgctgcaccctaagatcaatggaagcctgttgcctgcatcagttatcggcctctactgcacgtacctgtgctacagcggactctcaagtgagccaagggactacgagtgcaacgggcttcacaaccactccaaagcaatgtcaactggtagccttacgttgggattgtgcaccaccatcctttctgtggtctattccgctgttcgtgctggctcgtccgcaactgtgctctcagcaccagactcgccacgcgctggtgcagacaagccactgctccccttcagcaaggctgatgaggaggaaaccaaggacgtggcgaagccagtgtcatactcctactctttcttccacctcattttctctctggcaagcatgtactcggcgatgctcttgactggatggtcgacctcagttggcgagagcggaaagcttgttgacgtcgggtggccatctgtctgggtcaggttagcaacccagtgggcaacggctggtctgttcatctggtctctcgtcactccgatcctgttccccgatagggaattctaggttgacctctttacctgctaagggtgacatcatcttcttggtgtacccatgtatcgaccgtgtcggctgtgatagctaaggtgactatgggccacttctttttagcttctccggcagcttctggaagaagcttctccccaccagcttgtaccaaaagcctggatcaaaaaattcttgatggcttatagtttagtttttatgatactaaactataagccatcaacatttttcttgttcaggcttctaggagaagctggtgggaagaagcttttcctagaagctgtcggagaagccgaaaagaagtccccctatatgtatttggtatatgatcttgtgtgagcaaacccatggcaaggagcaggtgtttgtgtaaaacgttgtcaagagtctggtctacataatctgtgacatcaggcattgtgccactatttgaacattggagaaacgatctttgattgtatatatatcgaagttgttttacttagagaaa

SEQ ID NO: 4203 - DNA, 983 bp, Avena sativa
cgcaaggtgaaggcgctccaccagtacgactgcttgcgcgccaacaaggcgacgtcggcctggggcctggaggtccgcgtgccgttcctcgacaaggagttcattgacgtcgccatgagcatggacccagagtggaaactgtacgaccctgagcagggccgcatcgagaagtgggtgatgaggaaggcgttcgacgacgaggaggatccttacctgcccaagcatatcctctacaggcagaaggagcagttcagtgacggcgttggctacagctggatcgacggcctcaaggctttcactgagcagcaggtcagtgatgcgatgatgaagaacgctgcggaagtgttcccctacaacacgcccatcaacaaggaggcgtactactaccgcatgatattcgagaggctctacccccaggagtcggcgagggagacggtgccgtggggcccgagcatcgcgtgcagcacgccggcggccatcgagtgggtggcgcagtggaagtcctccaacgacccctccggccggctcatcacctcccacaactctgcgacccccgctcacgccaacggcaacggagcggtggagaacggcaacggggcagtggcgaacggcaatggacacgcgaacggcaacggcaacggcatagtgacggcgaacgggaaagccaacgggactctggcataacgccggcaggatccgtgctagccgtcgtcggtggcgctagccagggccagccgtcgtgtgcgcgcgtatcctccgagagggtccgaccggtggcccatgcatgccattggcgcggccatgccggcgatgttgttgtgtactagtagtacgtgctgtagtttcttcggtgcggtgtatgtgtgtgcgtcagtgcgtgcgtgtacgtgtgtgttgggatgtggcagcggggggtgatcacctgtacaagatcgtgaaatgcattgagctatcgagtattggtcgatagataccaaaaaaaa

SEQ ID NO: 4204 - DNA, 1097 bp, Avena sativa
tcgacctcccgacctccccggccatgaccccgcagctctactacacctccgtgctccccatcggcgcgctctactccctctccctctggttctccaactccgcatacatctacctctccgtctccttcatccagatgctcaaggcgctcatgcccgtcgcggtgtactccatcggggtgctcttcaagaaggagaccttcaggtcctccgccatgctcaacatgctctccatctccttcggggtcgccatcgccgcctacggcgaggcccgcttcgacctccggggagtggcgctccagctcgccgcggtcgccttcgaggccacaaggctcgtgctcatccagatcctgctaacctccaaggggatctcgctcaaccccatcacctcgctctactacgtcgcgccatgctgcctctgcttcctcttcgtgccatgggtcttcgtcgagctgcccaggctgcaagccgtcggcatgttcgagccggatttcttcgtattcgggaccaactccctctgcgccttcgcgctcaacctcgccgtcttcttgctcgtcggcaagacctccgcgctcaccatgaacgtcgcgggcgtcgtcaaggactggctgctcatcgccttctcctggtccgtcatccgggacaccgtcactcccatcaacctcttcggatacgggatcgccttcctcggcgtcggatactacaaccacgtcaagctgcaggcgctcaaggccaaggaggcgcagaagaagctggcgcaggccgacgaggaggccggctccctgctgcaggagcgcgactcgcacgcagaacgcaagaccgacacccagtcctagaagagctctgcccatctcatcctcatatccaacaacattcatttgtggcccgatatgtgatccttacgagtttgatactatgtgatcctcacgagtttgatgatggtgatgcgaaatctcttcatttcttgtcctaatttggtactagtaggaaggcaataacaggaattaatacgcgatcttttggagtagtatatcggccgtgtgaataccgagtgattctttttgccaggagtagtagttcttcgtacttactatagacag

SEQ ID NO: 4205 - DNA, 896 bp, Avena sativa
cgataagtcaaaagacgtccaaagcaagtcccatggtgctccacaaggagtgcacaaaggtcataagcaaggtgttgcacttggtagatcagtggacctgtcaaagttcagtgactatgatgaactgaaagctgagctggacaagatgtttgaattcgacggtgaattgatgtcttcaagcaagaactggcagattgtttacactgataatgagggcgacatgatgctcgtgggagatgatccatgggaagagttctgcagcatagtgcgcaagatcttcatctacaccaaggaggaggtccagaagatgaactcgaagtcgtcgaccccaaggaaggaggaaggttcggctgatggcgacggcacgagcgagaaggctcatctccccgcgtcaagccatttagataactaggtttgcgtttgagctggggtgccgattgaggcatgaggtgaggtatcgcacagggacagggaagcgtcctgcctgcgggtcccagccaatgaagtaacagctcgtgatgatgtcttattgctatcggtgatcgccccctccttccccttgtttggattttagtagtcccagcctaggaactgtagagagagacttatgcttcttaattgtttatctccgctggtttggttggctcgttggcagaaagatttagggccaagattcgccctttgcctgaacgcttgctctttctcgcgacttgatgatgatgtaaatatatctatctatctatctatcctagccttagtggtaagtagtaagtgtagtagtacctgtattaacctaccggcagtagctattccgggagcgacaatggcagaacaatggtatatgtacgtctgatcctgtttaatgtattaatggctatagagtgagaagaaaaaaa

SEQ ID NO: 4206 - DNA, 754 bp, Avena sativa
gaatatggttccttctgccaatttggatttggggtattacatttcacctggcattttcacatcatgttcttccctccaacaaaaagcatcaaacaagtggtaaaggaagcagaagttctaaatatattgttgctagcttgctgttgcagggctggacgccgaggaaccacgtgtagctagcagttgtgacaaagagaaggctctgagcacagctaacagcatcttctctgcattgaaccgctatagcaaactaactggtttggtggtttgtgggaagagatgcagttctgttggtatcccagcactcagttcttccttaaatctctctctcggtagaatcaaacagagctttgtattgactgaccgccatttgcctgacatgccgattgtctacgcaagtgatgcttttctatcactgacaggttactctagagaagaaatattgggctgtaactgcagattcttaagtggtccaggcactagtgtggaggttttagaggagataaatcggaatatttgttctgagcaggcttgcacagtacatctactgaactacaggaaagatgggagtgcattccgtgatctgctacaagtatctcctattcgaaacgcatcaggcaaggtcgcatttcatgtgtgggttcaccttgacgagagcgcaaagtgtgattttaatgggttgacccctgagatatggcagctcggtgctgtgggtgcggtgagggttgcagtcaagaaagacttagtactagac

SEQ ID NO: 4207 - DNA, 981 bp, Avena sativa
atgttcaatgcaggttgtctacacttgcttattcatatattcactacagattacaatgcagaaactgtactgtcattctttagagaccattgccaaaaaaaatattgataaataaaatttacaagaggaaaattttgaaagtagtggtacctgatagaatttggcaagttgtggacaactttgcaaatttgtttgccagatctgaattgagaattagttcactatccctacacaattaaattaacatcacgggatatcggcgcgccgattttcctactagtatcttggatgcccattcattttatgttgactatcattcttggtttgtttgtgcttggtctcagattcatgaacatggttttgcaggattttacttgcaatgcttactgttttcgagagagttggggataatttcatatcatggttaccaatgtacagtgaagcaaaacatgaatctgagattggtcgcaatcttcttgagttgaggactagagctagtgacatggcagttgtttacttccataaggttgcagactacagccagacaaggttccatgaaatcctgcaatatattgcttctcagtcacaggctcaaagatctcgttctcaggcgcgctgaacgtctagagtttaatataatctcgtgatttgtcgggcaacagctaccaaggctatgagagtagagaggtggcggaagagaagtggaggaggcatggaaggaagaagtggaggaacttcctcgtgatcaccaccttgttgctcttcattgtaggttatgtgttctacttcatctaggtagagctacgtcgttggagttgtaatgtgaattgtgaacttgtactcgaaggtgtaatgtgattgtgaacttgtactcggaggtgtgaacttgtggtacaaacacttgatgtatgaacttgtatgtcatgattgatgtgtaatgtattgtattcatgttggttctattatrcttggacaaaaaaa

SEQ ID NO: 4208 - DNA, 920 bp, Avena sativa
ctgcccacaatgacataccttttgcagagaattctggtctccctccaatatctgaatttgaggctcaagctcttgagatgaacacttctgatctttacaacgaattggcaggtcttgcacaggcaggaagtacttccaatgttgattatcgtgctagcaatgtggatgttactgaaaacaatctggagaacacatattcttttgatgattatttagagcttgatgatctccttgctcctggtgaaacattttcctatggtttgccagatgatcagtttttgcagtatcccatggatccagcaacatacggcagtcacattgattttggttcttctctatctgccttcgatgcatgcacatcgcttccaccgctgcctagcttttttgatgatatgccttctgttcccaataaccttgcgaactccaactgattgaacccagccatcaaggcaccaatctcttagttggtgtacagcaatataaccgaggtataagtttgttagtatctgccgtttctgatttgctgatttgagccatcagtctttgatggactcttcatgaatcttcgatgttggcatctcctgtagatggcccaacaatgcttggcagtatggcaaagggacactcttctgaagccggaacttggttgtgactcaatcaggagcacaatactggacaagcgaccgagctggttactgtttgcttgcgcagacacactgtttactgctggtttggaagttatctatctggatggagctgctacgatccatcatagtttacatgtttgtaataactgttacgtactgcctgagggtgtatttgacaacatagtagcttatgtattcaatatttgtttacaatccaagtagtgtgtaataactttatctgaagcattattatttggcgtgttacaaaaaaaa

SEQ ID NO: 4209 - DNA, 992 bp, Avena sativa
agatggtgctcgttgcgtgcgggtggcgccactcggtgaccgtgtcgtcgtcgggtggcctctacacgtacggctggagcaagtatggccagctagggcacggcgacttcgaagaccacctggttccacgcaaggtggaggccctcaaagacacttccatttctcagattgcaggtgggtggaggcacacgatggcactcgccgcggacgggaaactctacggatgggggtggaacaagtttggccaggttggtgtcggcgacaacgtagatcattgttcccccgtccaggtgaactttcctgatgaacagaaaacaacacaggtagcctgtggatggaggcatactcttgctctgacagaaaataagaacatgttctcatggggaagaggcaccagtggacagctcggtcacggtgaaatagtcgacaggaacacaccaaagatgatcgatgctctaagcctggatggatatgcctgcaagcagctggagtcatcaaacggagttccaatgacaggtgaagcctgggccaaaccatcggcacgatacgcgatcgtccccgacgagaatgtttgtaaatcaggaaatggaactgacaccatgccgcacggcgatgcgaagaggatgcgcgtctgatctgagcatatgttccacccttcttgaccatctagcagtgtgcaataagctagcttgggcaactttctccttcaccatgctgcccagttttacttcaatgctcttatcatgaagtaatgatgtttgcttcctacttactactagtagtagtatcaccatggggagaataagcaatgtagccttagttgaaccgttacagggtaagcgtcatatcagttggctttgttgtcctactgaaagctagtatattgctcataaatacatggatccttgtgtgactggcattgtttatgtaagcatgatgattgccatatgtgccagttgaagtgtctgttaatcaagatgaattgactaaaa

SEQ ID NO: 4210 - DNA, 1016 bp, Avena sativa
tgcactaggtgctcagctgaattaccttcaaacagaccccagaattcagactacacggtggaatctggggctagtcgaaatttgaaccatggcgtgaagaggacgaggttgtggacaaagagaagagaaaacgagaagctgaggagatggggggatgcaatgagagcactggagaacagagcaaacgactcaaagcaggatatggacatacttgctgctttagaagagatgcggtccatgaagtcgagacacgcgggagtatctgttgaccagatgctcgaaattttgaagcactccgctcacctgaaggaggaaaaaacagtagcagaattagatgaagaagacgaagaactcatcaagtcaatcacttttcgaaactcgaaagattatgtgaaacggattgaagacgacgatgatgatgatgatgaagaatttggtataccaggccagtcaagtgtgacggcaaagattaatggatcttctagactagtgttgaatccaacagatgtcttgaccaaaactaattgtcccgagagtgcaaataaagaaggaaacaagaccgtggcatctaagatgcccaaattcatagtaaaaccaaagctcacagctgcaaatcctcagaagaaacagaagactgaaccggcagctgaccaagataatggcaaagcacctgttgcagaggaaaaaagtggagcttcggaggagaaaaccaatgttcttcagtccctctgccagtatgacagcgatgaaagtgatgactgaagactaaggttctcgagtcacaaggcgagcccctggaacacggacatgtaacccgatctgtaattgtctgctttcgcaaaatctctgttgccaactgtaagtctgcgctgttgcaaatctatgtcagctaatagtccagatatatccgtgtttgaggtattttttttgtaaaatcgtcaaattcggagcaattaaaaaattatatctgggggacatattgccgattccttgtacccctccaatccatatcactt

SEQ ID NO: 4211 - DNA, 1022 bp, Avena sativa
  modified_base (132)..(132): a, c, t, g, unknown or other
ggtatgtacatcaagttaacctcatgataatactaggatcattttttggttctttctttctgagtaactgttattctggcaggaacgaagcaaaactcctgatgcaccatctgaaatgtgtagggcgtggcnggaaagggagaggaatctcgatgcagccagtgaaggaagaaaaaacagaaactccaaaaagtgaaggaggggagcttccaaagaaaaggggccgtcctaaaggttggcgccccaacaatggtggcacaccgtcttctgcaacttcaagtaaatcgaaggggaaaactgctaccaaggatgccaaagtgacgcctaaaactggcagtgagcttaaaaaggaaggtgaaatgggagccaaggacaaagccactgacaagacaaatgatgctggtgctaaagacagcagcaaaccaaaggaagttagcatcaagggcaaggatttgaaagatgaaagcaaatccggtgatgtacctgtcaaaggtaggcctggccgtaaaccaaaatctcctgctactcccgcggctgtggttggatctgtgaaagagaagcggaaggagaaagaagaagaggcacctgaacctgaagtggagcaggaagcatcagtcaaagcatcatcaactggaaccggaaagaagcgcagaaggaaggcttaaactttgctggcccgtgtacatctcttgtaaatgggtttgctctctctttagtctcatcgtcggtgttgggacattgcaccgtgtatggattgtaactccttggtcggttacctattgaattgtgtgctgattgggcatcatgttgtagttaggtagctgtagccagaaacaatttgcagtagctgtaatgttaggcataacctgtgttgttggatgcatgatgttgcaaagcctcaggcgagattgtggaacctatgcttggcatgaggcccgtcacatctagttgctgttgtagccagtttattgatgttctactattttatatgggctatttgatcattgaattttagtaaaaaa

SEQ ID NO: 4212 - DNA, 1015 bp, Avena sativa
gccattcagctgtggcaaaaccagaggttacttgtcctgctggaactgttgaaagagatcagttcaggaggccagaattgacaaggcaagagccatcgacgaggcagacaaaccagcaaaaacctcaaagttcaagtttgcaagccaagccccatggtatgcttaacaggcaatccaggcccccgagttctgattctggatctatgagaccaataagggcggctcctcagcagaagcccattggtgagatgaaatacaaacagacccaagagcacttcgctgtcgaaagaaaacctgcaatgggtcatgtggataaatcaaggctccatgcacaatcttcagcaggagtcaggatagagtcggaaaagccgaagatccatgatggtttggaaagcaacgtaaggcttgaagcagccaagcgtaggctccaggaacggtaccaggaagctgaaaaagcaaagaagcagcgcacgatacaagtaatggagctgggcgacataccaaagcctaagaatcataacagacagcctatggtgaagtcaaggaataacattagaagtagggtacttggtcggcgctgattcttctgtgaaattttttccccttcatctgatgaactgtgttgccatgccttagctgtggtccaaaggaagcagctgaacttagctgccaggaccaaaaccgtatttttgaacataaacacctacctctgatggagagcttttccttggagttgcaagagctgcgctggatgcaatatcgctcttgcattcggcgaggctagtcgctgtctggacaatatagctcttgcactcggagggaggtctgagagttttagtctgtcatgtcttgataatctgagagtggacatgttagtccatcctgtatcggctgttttattttcttcctgtttactcgaaaggaagctgtagataccagatagaataatcatcaatattgggtacatgccttctagcctcaacttttttacattgaatttgtttggtggaaaaaa

SEQ ID NO: 4213 - DNA, 1125 bp, Avena sativa
  modified_base (8)..(8): a, c, t, g, unknown or other
ggacgtcnccgtcgtagaggtacttcaggacaacaggcacctccttcagggcctcagcgctgcacttgccacagaaggcctcaaatagcctggagcaggaacatctgggcagcctcatcaggcacagcagcagcaaggtacttcttgttcttcgcaacgtccttcgcaaaccccttggcagcaccatggaagagcgcctcaaacagagcacccatcacttccttcgggggtagggtagaggaggatagcacacccttgaggtgagctgctgtggcagcgttgcccaggcttgacttgatctctgcaaccagttcatcgaaaggagtggttttggccacagcatgattaccgttggaggatttatcttcactcttggctgtcccattggcactgccctcctccttatgtgcggcctgtttcttcttcttctctgtctcttcagtggcaagcataaccatctcagcagttgctgcactcagctgctcctgcatgcgctttctagcagcctctgctgatgtgtcagtctgccactccacatcatcctcgtcatcatctgcagcaactatgaagtccgcatcttggctgtgagttggtgaggttgcatgttcttcatcagatcctccaccagaacccttcttctttgaacctttagcagtgctctccttggacgaaccacctttcttctttgcatccttcttaattttcttcatctcctcatcagcagcctcaccttctttcagccgctccttctcagctctgcgcatagctttcttatctttgcctcccttctttgcttctggtgggttcttcaggatgaatgtagtgagcttgtccctcatgtcaacatccgagaggaagccacatgcagcacatttcagagttatcatctctttcttggagatcagaacctcagtctcaggattgccacatccatagcactggacatacttcttgatgaagttctcaagaagaccagccagctttgaagtgtcatgggcaccattaaccaaggagattccagtcttctcatcaaattttgattgtgccccaagctcacatccaaagtacttagttgtgtatgaagcaggcctggcaagtgcttttgctatatcaaccatgttgacg

SEQ ID NO: 4214 - DNA, 1077 bp, Avena sativa
ggagatgggatatcaggtcggtttggaatcttagaagctgggactttggtgttgcacagtccaggaaaagggctttcatttgggctgctgctcctggagagattcttcccgactggccagaaccgatgcatgtgtttgctagccctgaactgaaaataacattgcctgatggcaactactatgctgctgccaagagcactgctggtggggcacctttctgtgcaataactgttagagatacaatcggggatttgccaagagtggaaaatggtgcaagtaaactcatacttgagtatggaggtgaacctgtctcttggttccagaagaagataagaggtagcacaattgcattgaacgatcacatatcaaaggagatgaatgagctaaatctcataagatgcaaacacatcccaaagcgacctggctgtgactggcatgacctaccagatgagaaggtcaagctatcttctgggcagatggtggacctgataccttggtgcttgcctaacactgctaagaggcacaaccagtggaaagggctctatgggagattggattgggagggtaatttccccacatctgtgacagatccccagccgatgggcaaggttggtatgtgctttcaccctgaccaggacaggatcatcactgtccgtgaatgtgctcggtctcagggctttcctgacagctaccagtttgcgggtacaatccagaccaagcacagacagattggcaatgccgtgccacctccacttgccttcgcacttgggaggaagctgaaggaagccgttgatgcaaagcgccagcaggcataactgtctctagatgatcagcacatgctatgagtttatctcgattgctcgttgctagcattgtagccgactgtcagatgttagtggtctgactagtatggatttcctgagatgactgtaatttttatgggtcttattatggatgccttgttgtgtactatcttagatgtgtggtcactggcaccctgattcagggttgtctggttgtattcaaacaaatgcacaagttcatattggctcgaggcagccaccctattctgaccaa

SEQ ID NO: 4215 - DNA, 992 bp, Avena sativa
ccttgtcatggatcagatatctggcaaaagaaccaacagagtgcttgatgcactctacttctgtattgtcacgatgacatccgttggttatggagaccttttccctaacagtgacacatcaaagctgctcgctagtgctttcgtcttcattggcatggcggtcactgctctctttgtgagcaaagcagcagattacctcgtcgagaagcaggaggtgttgttctacaaagcactgcacatggatatgaagtctagtgaggccaaaatgctcagacgaattgagacaaacaagacaaagtacaaattttacacagccgctctgcttcttgtgacgaccatggtcgtggggactgtttttctgtggaagattgagaagctgagccttgttgattccttttattgtgtttgtgccacaatcactaccctgggttacggggataaaagcttcacatccgaattggggcgcacttttgcggtattttggataatcacgagcaccataatcctcgcgctgttcttcatgtaccttgctgagatctacaccgagcgacggcagaaaatgctggccaactgggttctcacgcggaggatgacaaccatggatcttgaagcagctgatctggataatgatcgacaagtgggtgctgctgaatttgtcgtgtacaagctcaaagaactggggaagatcaaccaagaggacatatcttcttttctagaggagtttaacaagctcgacgttgaccagtctggtactctctccgcgtatgaccttactatggcacaatccggtcagtgaagaacacttgggcttgtactttactttacagcctgaatagttgaatggctggatagtgtcttaattgatcctgtaatctagtaagtgtaaaaagagatgacagtgttggacccctgcatctagtataacggaagctcatgtacctgaacatgtgtaagaaacaagtcttccgtgaagttttgactaaagactaaaa

SEQ ID NO: 4216 - DNA, 1088 bp, Avena sativa
atggatttatggctaggaaatcggaggaggatcatagtgatgaaccgggaggacatggtgtcagctgatgaccgaaacgcatgggcaacttacttttctagtcagggtatgaaagttgtttactcaaatggccagctgggcatgggtacaatgaaattaggtagaatggcaaaatcagctgcatctactgtgaacacaaagcgaagagaaaaaggattgcttcctcgtccggttcgagctggaattgttggatacccaaatgttggcaaatcttccttggttaatcgcttgctaaaacgaagaatgtgtccagcagcacctcgaccaggtgtcacaagagagctcaagtgggttcgttttgggaaggatctagagctgctagactcacctggaattttgccaatgagaattagtgatcagacagcagcgcttaagcttgctatctgtgatgatattggagaaaggtcatatgattttgctgatgtggcagcgattcttgtgcagatattgtttagacatccggctgtgggtcctgaagcatttcgaaaacgatacaagatcgatgtagacagtgactgcggcaaaatgtttgtcacgaagctctcagtccacttgttcaatggagataccacccaagcagcttttcgcatcttgtctgacttccggaaaggcagatttggctgggtggccctggagagacctccagcatgagcaataaatgtaacggtatatcagagatacagaagatacagaattgctgtacgtcacacacagtgattacaatgtcctttgtagcaccataataggagaatttctctgtaccttagacagtgagagtgtgaggaacgaggaatcaattgaggataggatggttaatatcccagaggaaggaaaagttgacaacacattagagtttgccatgtagttgtttggctgtcgagaggcctgagctgatctgtataagcatgtgaaggttgggttaacttgcatctttttaagatgttacttcctctgtgccacaatataagacgttttagatattgtggcacagaaggagtacataataaatatggagaaatgaataataa

SEQ ID NO: 4217 - DNA, 1049 bp, Avena sativa
gtctggaactgtggtattacgctcttccaagagcgtctcaggtctactcagtagctcctaaccacaactctaagcctcccagcagattctcctcatatgaagatatgtcttccagtgggacgattgttaggaatcaaagtgaagaaccagaaactccacgatcgtcaaggtcaaggcttggggtacaagaaaaaacatcagatgcttcacttgaggatagtgctattaaccttgcggaggcaaaggctgctctacaagctggtttcagaaagggtaatgctcgagaaagaccagttatcaccaaacatgaaaaggaatcacatgaacctagattttctggggtaaacagtcatgaggatcgaagtgagaatgctgacttgcaaaaaggtcgcaaatcacggcagccatctgatgggcaatcagcttctcgagcttctgcagcctcgcctgcactctcatcgttgttaataccttctctgaaagagactactggtgacaagtttgaagaccctgttgtccatgcagtcctcagttctctgatggatctagaacatgagattcctggatcctgtgaggtattggttggtagattgctacatcggctagggagctcgaaagattcctcgctgcaaagtctacatgagacggcaatgtcgttttttacaaagaaacccgagcctctgtctgagcctataagcaacaagaaacctgctagtacgccaccattggctgctcctactgtaagccctctggcgaggttccttcttaccaggtggcagaaccaagtttcccaagaccttaactccgtttgatccaggcaatccaaaaaatttccatcttttttgattcagtgtataattaatgctgagtgtacataactcttatctttagaaccccctttctgctagatgttctttagcgccatctgcttgcttgatttgttgtgtcggacgtgaagaagttatttcctacccattttcgaatgtaactgctaccgatatacatgtattacagctgatagatgaataccatatccaaatcttgccagt

SEQ ID NO: 4218 - DNA, 1143 bp, Avena sativa
ctacgacctgcccacgctcagcgcccgcagctataactccgcgccaccgctcgccctgcatctcatcacagcagcccaaatcccggtccgaccggcgacgaccatggcggcggcactcaagcgcgcctacctcgccgtctacaactgggccgtcttcttcggatgggcgcaggtgctatactacgccgtcaccaccctgctccggacgggccaccaggacgtctatgccgccgtcgagaggccgctacagctcgcgcagaccgccgcagtcctagagatcctccacgggctcgtcgggctcgtgcgctcgccggtgtcggccacgctgccgcagatcggctcgcgcctcttcgtcacctggggcatcctctggagcttcccagagaccaggacacacatgctggtgagctccctggtcatcagctggtccgtcaccgagatcattaggtattcattcttcggcactaaagagcttctcggatctgccccatcatggcttctatggctcagatatagctctttcctaatcatgtacccaaccgggatcagcagcgagcttggactgatatacattgctttgcagtacattaaggcgtcagggaagtactcccttagattgccaaacacatggaattattcgttcgattatttctatgcatcaatcatggtactcctaatttacgttccaggaagcccacatatgtacacctatatgcttgggcagcgcaagaaagcgctctcaaagtcgaagaccatgtaaatcttgttgatatccctttcaaaagtgggtaaaaattgtcgtattcaatgtcgactcagcaaatcgggagcctgttattggtgagcactagctggagtagaggatcatcgaactctttgtcatgttgatgttgctgaattccgcatttacttgttcttagatacaatatccaaattatatggatatgtattgttgtaccatcattttgttgttcttaaaaaccttgcagagtgcacaatttattgaatgatgtattggatgtctatatgttgttttaagaattattatttttagattaacaaggaatatcgcaagtctcatgtccctatgattgggcaagcttgagtgaagacgttaggtgcggcagcctggggtgcggtgtt

SEQ ID NO: 4219 - DNA, 1602 bp, Avena sativa
atcgtcgatttaataacttttttttttttgtaaccatcttgcaaatcttatattacaacggaaggaagggtacaaatggggccttgagagtacaggagaatagtatcacatccatttccaatctagatctacagcagaagagcagggcaaccctgggaagttaacaagtcaacccagggagcctgctggtacaatagagccagtaacaacgcaactgcggaagttgcaagtgagctaagctccattaaattacttgccataatctagagctggtagacatctaatggcctcccatgatggaaactttgctggaatgttgttttcgtcatgtcattgcctggcatgattttaccaccatcttccttcaagggcccccaccaatgctcgcagatctgtgtcgaaaaggaaagtttgtgagttgagcaacttaccaaagagacacccaggccccccatccactccctccattctccaacttcatgctggatgtcagactaaccctcaatgacgacttctgggatccatccgagttcacacctgcaggagctctagctcttcatggaggccgctctgagaaaccccgttcccagcaaagtgcactttttcagcaaggacatttcccatgtccttttcagcgatctgcagcaaatctgcattattgccacccaagctatcacttccgacgagctccaatacaaccttctcagcaacacgctttaaagttgtactcactgctactgttggagctgcgctgtccttgacttgggaaaaacaattaacatgcttgctagtcacgtcaccggaacagacagcttccactttcacacatttggagcctgatgcaatcgaatccaagcttttctcagatgcctgtgatgaacttgagcactttgcttgctctaggttgccaatgctaggtgaattctggctcccaccacttgcattagaagtaccttttgtttggttgttgcttgttggctcatcactaacattcccagacaggggtgatgaagttttgggatgaactgggctgactgaagctctcttaacagatctacaaggttcagtatcatccattccagcagaagcatgctttctctttagctgaccatctggagatccattcaatggactctcagttgcacttttatcagactgttgctgatgactcacatgtctctgaggacgaggtctcctgtatccttctgggaatacataagctggaatctcctttctccgaacatgagaaacagccaactccatcccaggcttccaaaacatatacatgttgatttcatgcctaaactcgtcaacagtcccacgaatatcaaactgttgaccttcttgtattttcacaccttctttccttgataaacccatgaagaaagcacaatgagcacactgtctagaaggatccgcatactctgatgggtaaggatggcattgcaacttcccaaatgtatcccgttcaatctttaaagtcagttgcctcaaccgagactccacccatcccttccaaagtctaagatcctcatcatcctcggcgatgatgtcaacttgtagataatttttatatgcctcaaagaaattgaaagatcccgg

SEQ ID NO: 4220 - DNA, 1240 bp, Avena sativa
cgggatttcagctgtagtagcactcacctacccacactggcacggtctgagcaaccgacgaagcagatcatagccatacgctttgtcgggaagatgagccaggggcagccgaggaggccggcgtcctccgagcaggcgcagggccaggacggcgcgatccggtacggcgacgtgttcccggccgtgagcggcggcctcgcgaagaagcccgtggcgccgcaggacgcggcgacgatgcagtcggcagagaccctcatgttcggggagacggtcaagggcgggccggccgccacgatgcagtccgcggccacgcggaacgagcgcatgggtgtcgtcgcccacgaccaggccaccgacgccaccgccgagcacggcgtctccgtgtccgagaccagcgtccccggcgggcgcatcgtcaccgagctcgtcgctggacaggctgtgggtcagtacctcgcgccggacgaggatggtcccgctgttggaggtgtagctggaggaggcggcggcgcaggcgtggcggctggcacgaagataacgatcggcgaggcgctggaggcggcggggtacgcggcggggagcaggccggtggagctcagcgacgcggcggccatccaggcggcggaagtgagggctaccgggctggacgccaatattcccggcggcttggccgcggaggcgcagtcggccgcggagtacaacgccttggccgcgagcgacgaggtcaagaccaccctcggcgacgtcctctcggatgcgacgaggctgctggtggcggacaaggaggtggaggtggatgacgcggcgagggtggcgctggcggagacgcggaacaaggaggacgggacggcgaggcctggaggggtggcggcgtccatggctacagcagcgcggatcaacacctatacctatcctaggacgacctaaggacgcaataatatataggcaggagctgcgtgcgcgcgccttccctgccagagtactagtttgcgccgggccgagttcagcgttcccggcccgtttgcagtgtctctccagacttgatagtcctttgctagtactagctaccatctttgtacacgtacgtagtcgagcttagtcgtcgtacttctggtcgtgtattcgtgttagtttgtgtccggccgcatgtattgtagacatctcccgtgtaaatgtatatcagcatctatatacgcatatagcactgggtcgaggtcgatccagtcgcaagcacgtaaaa

SEQ ID NO: 4221 - DNA, 936 bp, Avena sativa
  modified_base (898)..(898): a, c, t, g, unknown or other
agattcgtggacaaagcaggcattttttgagagggtttcaacaacttataccaaaggaatggatcgatatgttcaatgaacatgaaattcagcttctcatatctggatctctggaaagtttggacattgatgacttgcgtttgaacaccaactattctggaggttatcacccggaccatgagattattgatatgctctgggaggttctaaagagcttcagttcggataatcagaaaaagtttctcaagtttgttactggatgttctcgtggaccactccttggatttgagtaccttgatccaaaattctgcattcaaagagctggtgtccctggcatggaggagcatggcgatcgcttgcccacctcagctacttgcatgaaccttctgaagctccctccatacaaaaccaaggagcagttgcaaaccaaattgttgtacgcaataaactcagaagccggtttcgacctgagctaattgccttgtggattcaaaaattgtgcagtgtagatagtttctagataatagcttaaaaggcacccagggctgaagcaccaaccatttgggctgaattcgaagcccccacaaacaaagaacagatgtttcttagagtggctgggaggaaattgaggggaggcacctgcaatagctgctgatagatagagctttggctgcaagtcggtaaaagcacgcggatgctgttgtaagcagccatgaacatgtacatatgtattttaaccgttgtggttcagtggcgccttgctgtggaataataatataaagtcagatgaaactggtagttcaaagttggttcaatttctgagttgtggcaggtagtctgaatgattggagttgctgttatcatgtatgccaggccaagaggtcggagatatttttanattgaccacctattgtaaactcctctgagccagtcgtt

SEQ ID NO: 4222 - DNA, 1330 bp, Avena sativa
aatcgattgaggggtagtggccacggtatagcagctgctagaatggatgctaagttaaacgcagctggatggatcggtgaacaaatgggtggtgttagttatcttgagtatttacgagacctggaaacaaagattgatcaagattgggacataatatcttcttcactcgaggaaatgaggacgtctttattttctaaggaaggttgtttaataaacataacaagtgactcaaaaaatcttgaaaaatctggtcaatatattgccaaatttcttgattcactgccaagtgctctatccctgggaagtgatccgtggctctctcgactgcattctgttaatgaagccattgttatccctactcaggttaactatgttggaaaagctggaaacctataccgaggtggatatcagcttaatggaagcgcgtatgtcatatccaagcacataagcaatacatggttatgggaccgtgttcgagttagtggtggagcatatggagggttttgtgactttgacactcattcaggtgtgttctcctatttgtcataccgtgacccaaacttactgaaaaccctagagatctatgatgggactgccaacttcctcagagaactagagatagatgatgatgctctcatgaaagctattattggcaccataggtgatgttgattcctaccagctaccagatgctaaaggttacagcagtttaatgcgatatttgttgggtatcactgaggaggaacgccagcaaagacgtgaagagatactcgcaaccagcgtgaaggatttcaaggagtttgctgatgctgttgaaaccatcaacgtcaatggagtcgtggttgctgttgcgtcacctgatgatgtcgaggcagcgaataaagagaaggcgctattttcagacgtcaagaagtgcttgtgagttgtgaggactccccattcctgccctcgttggatgttaaatctggacctgggatcagaggttcttccacgtttgcttcactggtgaacgatgagtgtgacgctgtaacatgagttcatgtggcgagagaactactcacttgactgtagcacagttacgatttttttcctcgctcattttttggggaaaataataattagtccagagtgttgagcgaatcagtgctcagagaagccggttgtacaccaagtttctgataggggattaagagctgatgatacctgcccaaattatagctttagattttgtaactggccatacgaaagatatataagagcttatgagactgcccaaatcatatgtttggagcatatgtatttttttaacttaaaaaaaaaaaaaataaaaa

SEQ ID NO: 4223 - DNA, 1055 bp, Avena sativa
aagattgctgtaaaacggttgactgattatttgaacggcctggtggggaggatgccttcttgcgtgaggttggagctaattagtgttgcagttcaccggaatctcctaaggttgattggcttctgtacgacacaaacagaacgccttctggtgtatccatttatgcagaatttaagtgttgcctaccgcgtacgagaatttaaggctggagaacccatcttagactggtcagcaagaaaacgggtggccataggtacagcgcgtggacttgagtatctacatgaacactgcaaccccaagatcatacaccgtgatgtaaaagctgcaaacgtcttgcttgacgagtactttgaacctgttgttggtgattttggccttgcgaagctagtggatgtgcagaagacttctgtgacaacccaagtccgtggaactatgggtcacatagcacctgagtatctgtccacagggaagtcgtcggaaaggacagatgtttttggttacgggatcatgcttcttgagcttgtgactggccagcgtgccattgacttctcacgcttggaggaagaagaagaggtgctattgctcgatcatgtaaagaaactacaaagagaagggcagctaggctccattgtggaccgcaacctgagtcaggattatgatgaggaggaggttgagatgatgatacagatagcattgctgtgcacgcaggcatcgcctgaggaccggccatcgatgtcagaagttgttcggatgctggaaggcgaaggccttgcagaacggtgggaagagtggcagcaggtggaagtgacgaggaggcaggattacgagcggatgcagcagcgtttcgactggggtgaggactccatgtacaaccaggaggcaatagagctgtccggagctagatgataagtactagcatcgttgtctatagagctagatattgatagaaatatgctcatcttgtaatgcagaaaaactcatggagtctggtgaatattgatcaattatacagagagagagagagagagagagagagagagagagagagagagaga

SEQ ID NO: 4224 - DNA, 1259 bp, Avena sativa
aagatgaatgctggatttctcgaccagagcactcgtatactagcagttcgggatgtacaacagggttgacccagcttacttctgaattggagcaaatagatgcgcttttggacagcaagcctggaatagaaggtcctggtgttaatagtcaggaaacaagagacggtagaactgattcagaatcagattcaagtagcaataagcagacattactaaacaatgtaacattgacacaagctagcaatgctcacgaggctgaaacctctttgggggagggaagaattgaaactgaggataacataggagccttcaaacaggttagaggacaagaatgtgacagcactgataataaatcctattcagatactcgaacgaacagaggtaaaatcctttgctctgtctatcctgaagcaactggagcataagttacatggacgggatatagatggtaccaggtccttgaaaatttcagagcaagtcgaccatcttcttaagcaggcaacaagcatcgacaatttgtgtaatatgtatgaaggatggacaccttggatatgattgaatcaatgtaccgctgtccagagtttgggcagaagacaatccatagcaaaagcaggattagcgtagcatgacggtgaaccaagttagagaggtcattttataatccagagaggctcaacttctccacagcctgctgcgtatggacgactatggatggctccaagcaaacaatacatcttcatctacaatatctgtagccatccacatgcatcctgggatctggacattgacattgtggaatgctgaatctgcagtatgggcagaatacagaatttgcatggacaccgcagcaacgctctaccactggatccaaaactgggagagctgcaattcccgggatgagcatgaagttgtgcaaggatgttttaagagcacagccatgcacagccccataacgacgaacttatcttgttcaagtaaaatgtacatactacttttccctgtacatgtgataatttagaagctcctttcaatgagacaattagcatcttgggaagaataggtactggactagcaagtctggaaatgcagttatagttctgttgtttccacatggactcagtgtaaatagaaatttctaatgtcagtgcggatgatcatagtccagatatcacagtatatattgattcgagtaaaatgcgagtgaaagaatattcggcgtacaagtaatgtgaatgcatcgattattaccccaaaaaaaa

SEQ ID NO: 4225 - DNA, 999 bp, Avena sativa
atacatacagagcttatgtctggaattccggccattttctcccacttcgtcactaatctgccagcatttcaccaggtactggtctttctctgtgttaaatcagttccagtgccacatgtcgagcctgaagaaagatttctagtgggtcgcattggtccgaaagagtacaggctatacagagtcattgtcagatatgggtaccgcgacgtgcagcaggatgacctagaatttgagaaggatctgatcaacagcatcgccgagttcatccgcggcgggggttctgaccagaatggctctgtggaaggttcagacaaactctcttccatcaggagcggcagcattccaccgtgggaggaggacggtgaagtaaatggattggtgtcccctaacaaggagataaatgagcagaccgtggcacagcagcggaagaagccgaggtttgttctaccaaagagcgcccaggtggacggcgagatacggaccgagctgcaggacctcatggacgcgagggaggccggcatgtccttcatcctggggcactcccacatgaaggcgaagagcgggtcgagtttcgtgaagcggatcgtaataaacttcatctacgagttcctgaggaggaacagccgtggtgcatcctatgccgctaacataccccatgcttccacgctggaggtgggaatggtgtaccaagtctgatagtagcagctgtatgaaaggtagagagaccagatgaagtgttgtttctccgtctgtatatatcccctcctgtcgcccgacactgctaacccgacacccgacgatggcagtagatgctggagcacaccgagggctaacaatacagggagctgcaggtctttggagagccctacttttaagtgtgcatttttgccaatcaagtgtcaagctttttgttgagttggcccttagtttttggtttcctggatctgtttgctgcttttgttgctttgctggtgggactgtaagtctgtaagatgacta

SEQ ID NO: 4226 - DNA, 1182 bp, Avena sativa
ttacgattcaagccaaacatcatgaaacaagcagtgagatagtgaataagctccgctcagaaggccctttcatgtcggttcatcttcggtttgagatggatatgcttgcttttgctggcaataagctatatgctgcactgctgctatgcacgaagacttacaaatgcagtggttattggttattgcataacttcatttttacattgctggttatgccttactttttaagtgaaaaatgcagggaaagacggctaatgggaaagtgccctttaactccagaagaggaaacacttcatgaggcccttcaaggctatgtttccacgcctagaaaaccatagctcggttggacctggaaagctggaagaaaatacacgaggattggcaggttctgcagttgattacatggtttgtctcctatcagacatttttatacccacatatgatggcccaagtaactttgcaaacaacctcatgggtcaccgcctatactatggtttccgcaccactgtcacgccaaacaggaaggcccttgctccgatattcatggacagggaagaagcccggacagctggctttgaggagcgagtgaggcaggtcatgttgaccacatattttagcggtcctcgcaagcgcattcatccagagtctttctatacaaactcatggccagagtgcttttgcgaggtgaatcctagaaatcaagcaaacaaatgcccaccagacaatatatatgaggttctgaagaatcaatttatgagtgaagagagtgaagaaggtataggagaagtgaaaatcactaatcagacaaactcaaccagccaaacagaagatactatgatttaactgtgcaaccaaaacggagagcatgccactgggtcatctatcacgtacttattgtattttcgttgatgtattgatgctccaagatttccacgttaacccgaactattaggatgtcatagactgaacgcagaattatgggagcagcgagttaaacattagattggtcaaaaatagggtttggtagaacacatgttctttcaaatagtatgtgtttttgttaacaatttcagtgtgggagtatgaatgatgaggtggcaatggctggaattttttctaagtacgtgattttatagcaccctatccgtttattaccaaaaaaaaaaaagttaaattaatcgc

SEQ ID NO: 4227 - DNA, 1149 bp, Avena sativa
ccgcccagagtatgcatccatccaagcagtgctgttcgggccacacctcctcgccggcctgacacacggcaacaaggccgtgaacggcagcgagcactccaacgacggcctgaccccgggcatgtgggaaatggacgccaggaacgccacctccatcgacgaatggatcgtccctctccctcagtcactcaactcgcagctcgtcaccctgacgcagcagctcggcgagcagaccttcgtcctgtcgttctccgccaccgacggcacgctgacaatggaggcgatgcccgtggccggcagcgacgcgtgcgtgcacgccacgttcttcgtggacacgatgtccccggtcgccgccgccgatgtccgcaccactaccaccgggccgctgcaagggccgaacgtgacgatcgcgccgatagacaagccgggcatggcgatcaccaactcgttgagcgtcaccctggagccgggaccagacgcccccttcaacgcggtgcccgggctggacgggcgccccggcacggtgtccctggagctcggcaccaggccagggtgcttcctgatggcacccggcggcgctggctacagtcccggcgacaaggcccaggtcggctgcctgacaagcggtggcggcgacgacgcggcgttcaggaaggccgcgagcttcacgcaggcgccaccgctgcgcacctaccacccgctgagcttcggggccaaggggacggagcggaacttcctgctggagccgctgcatagcctccgggacgagttctacaccgtgtacttcaacctggtcgccgacagctgaaatgtgctctgtgcagtgttgcttcatccacgtgagagtgatactgagactgagactgagacgacgacagaccagagtttcagtgattggtggcaggcagacacatcacatgtgctgcaggctgcacaattactactacgtgtgctgttgcagtagtatctcccatgaccaataatgctcttgcatcttttctttcagagaaaaaaaataatgtccttgcatcttgattcttgattgttgagatttctcgaggtttgttaagatcttgatccttgcattcatgtgtgtgccgcgggcgtggcataaatgtcgtccagttaggcgcacgtctatgctattat

SEQ ID NO: 4228 - DNA, 615 bp, Avena sativa
ttggtccttaagggcgtgcagtgcatgaactttctgctgtcttgggtgctttaaagcatcggcaacttttacgtctttcagcttgtcaactggcaaatccctgaaagcaccaccagatgccgtgagaataacgcgacgaagtgatccttcagataagccttgtatacactgaaatattgcagagtgctcagaatcagcaggaagtattttcacattgtgcttgtgggcaagaggaagcacaaaaggaccacctgcaatgagtgtctctttgttcgccaatgctatatctttcccagcttcaattgctgcaactgtaggcttcagtcctgcgcatcctactatgccggtaacaactgtaactgcgtccgggtggcgagcgacctctatgacaccttgctccccaggaataatttctggcatctcatcacaatcagctaaggcttccttcagttcattaagtaatgactcatttcttacagcaaccagctttggtttgaacgttttcacctgatcagctagaagagtcacattggagccagcagcaagagcaacaactcggaatttatcaggattctccgcaactatgtccagtgtctgtgttcctatggagccagt

SEQ ID NO: 4229 - DNA, 1080 bp, Avena sativa
tcgatgatggcgtcgctagcagcgcgcccgccgcagcagcaccggctgctgctgctgcagcggcgcccgcacgacggagcgtaccgcgctctgccttcggcggcgtccgacccgttgcggactccgaccatatgcgcgctgtcgacggaggcgctggtgccggtcaaggcgaagcgcagcaagaggtcccgggcatcggggtggtcgctctcgggccccgcgccagactccacgtcttcctcgtcaaccgcgaccacctcctcgtgctcctcgtccgcctccttctcgccctacttcctgctggactcgcaccagctgggcgcctcggacatcctcatggaggagtacaacctcttcaccccgccctccaagaagtccaagcacggcaagagcagcaagaacaagaccaagaagcggggccgcaagccgaagcacctccctccccaccccgccatgtcctcccccacgccaagcgaccgccgctgcagccactgcggcgtccagaagaccccgcagtggcgcgcggggccagaaggagccaagacgctctgcaacgcctgcggcgtccgctacaagtccgggcggctcctcccggagtaccgccccgcgtgcagcccgacgtacgtgagcaccatccactccaactcccaccgcaaggtgctcgagatgaggcgcaagaaggaggacgggccgctcgtcaccatcgctaccgcgccggccgtgccgtcgttctagctcagccagctagctagctagcttagccaccccgccgcggtggctgtacattttcccggccgtattagtcttgtaccgtaccgtaccagaactcctttccccattttctcttcctagtagtgtcagtcatgctagtagcagtcccggctggattaatcaaatcagagtctaggaggttttaggtcgtgttaggtttaggaagaaatcggctttgcttccaactcccaccaccttcattttagttcgttagtagagtactaagtagtagtaccgctacagctgcagcagtgcagcatcagctcagtcagaactttatttcgaccttttgcccaaaggaaaaaaaaa

SEQ ID NO: 4230 - DNA, 856 bp, Avena sativa
ccagtgatgctgacaaagaagaggttatcagttcgttagtcgctaatgtcgagtccatgatcaaagcagacaggaagattacgtcactgaaacaacttcagggtcatatatggaggactggatttgaaagcaaagaactgcaaggagttgtttttgaggatgttcccgaggcactgaaggactggcaatctcatggtgtgaaggtttacatatactcaagtggcagcagagaggcacagaggctactatttggcaactcatcctatggtgatctgcgacaatacttgtgtggtttttttgacaccacaactggaaacaaaagagaagcaaggagttactctgagatcacaaaatcgcttggggtggacaatccatctcaaatcttatttatcacagatgtgttcgaagaagccgttgctgcaaagagtgcaggtctcgaggtaataatctccattcgccctgggaatgcaccacttcctgagaatcatggttttaggacaatcagttctttcagcgagatctgacaaatgtgcaagagacaagcatgcaggagaatcacctttggacgtgtacgtggcagtgcttcacgggcccctggatcagttcttgtaatagcaggagagcgcttctacaagcatggcatcagattgcaataaaaccagagaataaaaggggggaaggattgtaagaaaaagagaacgatgtggagagcgtacgagtctgttcaagctcctgtgtttgtgaatatgcgtgcttgtacgtagtacattatggttttgcagctcactggatccggaccccggatggagaataatgtagccaccctcttcatgggtgtgtttgtttgacaaaaaaa

SEQ ID NO: 4231 - DNA, 1062 bp, Avena sativa
cgaggttgtgcagtacacggaggagcagattaagagggtggaggagtcgatccggattcgccgggaggcggagcccgtcgagctcgtccaggcggtgaagaagctgcggaaggttttcgcacgggaggagaaaaggcggaaggagctgccgttggagctgaaacagaaggtggcatatgacatcgtggggcggctgcacgatttaggggataacagcagcagcatccagcaacgagaagctttggaatcatggcgtgttgagacactaaaacataccaaaagtgcatctattcagaattcatcaaatttgggcctctccaatgaggaagcacgaatgttaaagcgaaccctggaattcaactggcatgcgctattggaggatattggtctttggataccagtagaagtcccacacaccgagcatgatgacaaacctcagaatgaaccagaagaagaagagataatagcaggtccacccttggacccacaatgcaatgccgagctacatgccgattatggtggcgctgccgtgaaatggggcttaacgcaccacaaaggatctgctgcagattgttgtcaagcatgtctagaccaggctaagaatgccaagccaggtgaaatgaagtgcaatatatgggtttattgtccatcagagtttggttgttattcgccagacaaatatgagcataaacatcaagagtgttggttgaaacaggatgaccggcctaaactgaacttcaaagacaagtacaccgagtcttacagagattctcatcctagagcccctgtcgttgtgtcctggatgtctggtgttaccagcgcatgagctgctaggccccatcggcatttgggtttatttgcactgatgcaacttcactgagaaaccttcatatatcattctttcatttgcctcgacacaccgttttgttttctggtgtatatgatgtaaaacgtagattagaccatttgagaaaggaaggtttctttgaggcatgttgaaggtgtaggggtcaagggatgtggtgtcgatgaactaaatccaatgattcagctcatggtcac

SEQ ID NO: 4232 - DNA, 937 bp, Avena sativa
tacaacaaggttcatccggtgagagaaaggcaagtgcaaaagataagcataaattctttgagttgctgcggagcaagtctttaaatggttcaagatctggcattcagtcctcatctagcttgattgatgagcagaagaacccttctcttgatttgtccttgtttaacaatggcatcaagtgtatcgaaactggaagtagttcatgggaggatgcaaattcttgtgatggatctcagcgacacctctctgacaatgaggaagtgaagccacattcagaacctcgtggtgttctttatgaggggttgcatgagattgttgctgacaacaaatatggcaactcttcatcagatcttggtgatgctgatgatgtttctacgatgcctcaggcagacaaggctaaagccactccttccattatacccacagataaaaatgatgcttccgtgaagtcggactccaactatgacaacactaatttgttggttgatcccattgtagcatgggaagaggaaccgtatcctactgaagatgagcctagtccagaagaagcggctttcctaaaatctcttggctggaaagaagatgaaatagttccgcctctgaaacaggaagaaattgctgattgtttaaggcacaacttgaggctgcagcagaagcttgaggaatgtaggggctaatgacagaactcaacaaacaaagttactggtgttgtcactgcgccgagaactagtgaagatcaagatgagatttggttggtaactacctcaattctcacatggggtgattgtctagcttaacaaatcgagttttcccccgttaatttcagctatgtcagggagtttccatgagtagagtgatgtttccctgctgaaaagaggttttagggtttcttcctcattttcccagaaggaaatagcgaatgcaaagcctgtatggt

SEQ ID NO: 4233 - DNA, 980 bp, Avena sativa
acacgcagacaattaatgactggtacgatcgagacattgatgctattaatgagccttatcgtcctattccttcaggagctatatcaggaaaatgaggttattactcagatctgggtattattgttaggaggtcttgggttgggtgctttgttagacatatgggcagggcatgattttcctattattttttaccttgctctgggtgggtccttgctttcttacatatattcagcaccacctcttaagctcaagcagaatggatggataggaaattttgctcttggcgcgagttatattggcttgccctggtgggctggccaggcactatttggaactcttactcctgatattgttgtcctaacttgcttgtacagcatagctgggctcgggattgctattgtaaatgattttaagagtattgagggggatagaactctgggacttcagtcacttcctgttgcttttggtatggaaaccgccaaatggatatgtgttggagcaattgacatcacccaattatctgttgcagcttacctcttgagcaccggcaagctgtattatgccctggcactacttggactaacaattccccaggtgatcttgcagttccagtacttcctgaaggaccctgtgaagtacgatgtcaaataccaggcgagcgcgcaaccgttcttcgtcttcggcctgctggttaccgccctggcgaccagccactgacgactaacctgaagcgaacctgggatgttgcggtcgaagaggcaggtggctttgtacgacagttagtggaataagatcgcagcaacacttatactatgtacaagctgttgggattgccggtagggtactagaatgaagaacgcctccttgaatgcagaaaggtagactgtagattgttccgatattgtcaggggctgtataacgtaattttgatcacattaccgttgtatgatcaaattgtttctccttgaaagtgcaaaaaa

SEQ ID NO: 4234 - DNA, 972 bp, Avena sativa
gatggaggcgtgtggcagtggatatttggaaaagcataaccagctccgttttcttcaatcctggtcctgatgatggatatgttgggatttctacgccatttccggggaggatactgcctatagatctagcgaactttggtggagaacttcttagccaggccgatgcttttctctgctcagtcaacgacgtgtcagtcgcaagtacacttgatcagaggccccgcaacattgaaattggcgcagagatgatcctcaaacagaaacttaggggtcaagggatggtctttcttgttggtggtggatcagtaatgcagaaaattcttgctcctcgggaggtaattactgttgatgctgcttgtattgtggctatgacaaccaccatcaactttcagttaaagaaccctacccaactgagaagagtagtctttgggggtgacaaccagctgagagcatctctcacaggacccggtgtcgttttcattcagagcctacccttcagtcggctctcacagcgtattgcaagtagatcagtggcggccccaagcttgagagacaaccccaagttcttcatccagatcgtcatgttcttcttcctggcctatgtcatgattgtatcgtcaataattctgacggatgtttagacgatgccgtgacaagcattctgtgtaatcctcttagagatgttcagtgaaagttggaagagtaaaagttgttacagcttacagaagcataagcattctccctccctccttgtagatgttctgggtctgagtaagcttgggaagaaatcggtcaactgtttgttagaaaaacataggtgggagctcatcagaatttttttgtaatatggttggcacattgcaccgttcatgtgtagagagacaagcaaggccaagttgcacatcgtatggtgaaatatactttgacattgacttaaatcctgtttaattctatggatatcgttgttagtaa

SEQ ID NO: 4235 - DNA, 1036 bp, Avena sativa
atgtagcggttgttcccaatgaaactgattctgttgccgaggaagtcgaacgatgtagatctactgatgatgcggtatttcttgttgggggacttgggcctcttcattcagatgtttcattggctggtattgcaaaagcatttggagttcgtctggctcctgatgaagagtttgaggagcatcttagtcaactcatagggaacagttacatcggtgatcgaaatgtgatggctttgttgccagaaggtattaccgaattattacatcacaaaaagctgccgttgccactgatcaaatgcaagaatgtgatcattcttgccgcaactaatgtggatgaactggacatggagtggaattgtattttggatacccatgagagtggtttggtgagggcgaaaacttttgtgtcaaaacatctcagcacttcgctcccagatgtcaaaattgctccggtgattgaaaagctatgcttagagttctctgatgtttacataggggctcatcggatttctagaactgggcctttggttgtgaatcttcttggaaaggataaccaaagggtagaaggggccatggagaagctgaaaagtagcttcgacggacaattttcccaagtctgacagttgcaaataaactgtccacacacttccatatttcttccacattctttctgctggaagttctgaaattgtgcagatctaatggtgcattgtggtgctcacatgccttaatccagtgctcgaataaacaccactaagctaccactctgaagctccagatattatttaggaaacatacaaattttgtattatgcttttagaaatgaatgaacaagtgagatgctggaggcttcagctagttacaaattaacgacggtagctttgcatggtctattttgactaggctaagagctcgcaattgtttcatggaaaatcaattgaagttgattgtagcataactttattattgattcaagtgtctggaatgcttgatttgattcttttaggcggggagtaatgcctgatttagttaaaaa

SEQ ID NO: 4236 - DNA, 923 bp, Avena sativa
acttgtctgttaatttgcagcctgaaccaggatcatatgttcgaattaatttggacgatgatgaattggcagcaatcttttccatgatgtgcatttaactcctatgaaattcctgaagtttcagtatctcttacgttttctttttgtgaatcactgtttccttaatgagttgtcatacttgtgtgcttacagcccgtcggtagcaatggcacaagagagctggaaggagtctgaggagactgtccaaacacctgaggcaccaatattgtgcgtaaacaactgcggattctttggcagcagcatgacaaacaacatgtgctccaagtgctacagggacttcattaaggtgaccacgctggccgcccctgtagtggagaagaaagtgttcacagcggcgtcatcttccacggcgccattggagccagcaaagccagacgaagcacctgcagctactgcggttgaaagccaagcagcacaggaacctccaaagcctcccagcaaccgatgcctttcatgccgcaagaaggttgggttgaccggtttccagtgccgctgcggtggaaccttctgctccatgcaccgctatgctgactcccatgaatgctccttcgactacaagaaggctggccgagagcagatagccaagcagaaccctgttgtgatagctgagaagatcaacaagatctgattgctggttacacaggggtcatttgcctcctattcgcggtggtacctgagtcgtcaagtttacttcagtcatgagtaggtttccttcaggtctgggctagtgtgttagggtctcaaattgtgtctatccttctccttaatcatggtttcattctctcgattatgaaataaaatgtaaatatatatattctattattcttgactgtattccactctattgcttgatgttccaaaaa

SEQ ID NO: 4237 - DNA, 968 bp, Avena sativa
ttttttttgtcgcaaaaattgttcatcatgaaattaattgctgatgtagcccatggggctgttcattcaaaaacaaaatatctcacagactaatgtccaaaaagatgaaaataaaaagcctaacatgtaagagtacaatggcaaacagcttcagcttcctagtacccactgaattcaaccagcgcggaataagatgtgttctcatctgttgcattttgaacgttaggagttctcatttgtttttgattctcagatttctgcggattggcgacaccaaaccctgccatctcattcaattctgacctcttgtgcctcgcttcctccacatctccttcccagcatgtctctgcaagaacatcctgggctttatccatactttcttccgagatcaaattgtcattttgcagcagtacaaggtagacctgatcagctgcagccttccggatcttggggtatctatggcctaggaacgtgagtagttgagagaatgccttggtgccagttctatctagttgtgaagaaatatatccgaggattgagaggcctgcacacaacttcgtgaagtcctttgatcccttcagttcagagcctagtaaatttatcagttcacagtagaagttaccatacccctccttgttcaagaaaacctttttactgagtaaagtctcaatagtcttcaatgtcggtgtaattacacggtcacacttctggtaacgctggagaacccacaaaatgtcatgactcagtagatactctctgctttttccttcatcagttgtattgatatttggatcttgcaagtatcctaccaaagctgatgttgaaactttcctcaaagactcttgcaacccaccggtagaaatcacaagccctgaaagcacaggcttgctgtaacaggtggcctgaagaatcttcaccaatcgtggatatgatactgcaggaactgcccactccaaatctgcattgct

SEQ ID NO: 4238 - DNA, 994 bp, Avena sativa
ttttttttttttcaacacaactgatcaagcctttgaaactctagtagtagtattcaagatgttacagaatacattagcaagttagaaccaactacaaaatcaatcccgggtctccattcgagtactacatgtctttgcctactgttgtacaacaatggatcacttctgtccgacgtgactgccggcattacgagactctcaaaccgagtaacagaactccgtccagtccacatatcaggttaaacatcaccaaatgtgatgacagcaatactggcaacgagcaccaatcttgattcaacaccgagctgctgtagggcaggaacgggagataaagcagggaattagctgtagcacacctgaatttcttgtcgatggactgctttctgaaggagcatcagacttaggtggacgactgactctgcactgtttggttcttggcttgcaagactttctggctttcactgaaatactgattaggatgattaattccagtatcacatgagacattgtgagttgcctcaaaggtcaatgtgcaagctagctggtaatgtctgttcttcactttatccaggatcccttccaaagcatttccgctgatacccatattgttgagagctgctctcaagttctcatcaccaaaatgtcgataagggcaaccatggtgatcaccaacaccaggagtcgagcagatgatcttttgacatgaatatggagtgtaatccgttcgtttcccttcttttccatacttatgtctgatactataagcatattccttgtcaaaccgctcagagccaacctttttgagagaactccgctctaaaaaatgcaagagcatcctccaactttagcccggcacccttaaggaaaagaccaaactgcattctacccccattcttcagatgatggttttctctcagtttctctagcatgtggcgcatacagagagggaaagaagttttagacagttgatcaatatccttcgaagaaatctcag

SEQ ID NO: 4239 - DNA, 703 bp, Avena sativa
gtccaaagtgctgacggttagattagattttctactagtagtatcttccggtaatagtaagaggtgccttaaaaacgccttataatgacacaggtaacgatatgttttaactcaagacaagactccggaagaacagggagcatctcagctccttcctctgacacatacagaccaaaagacgcacaaccagggtggtctcaatcgtcagacgccttaggggagttctcaggtgtcttcagcgcgtccgcagccttcttcgccttgtgcgtctccaccgcggctttgaagtcctccctgatgccagtgtccttgaacttcagagcaaacgtagtaagcgcgctcggtgattcgccgatgctgttgatgcaagcaaatgtcacgcccttcttgtccatgtccttcagcgtcatatcgtcatagaggcttgcgttcaggatgagccggtagttgcccttggccctcatgacgagccgagatctctcaccaccagaaactgggatgttgagcttcagttcacctctccccctttctttccagcccccgtcaaggtactcataaattgcagagtcagcagtaaatacagcctcttcgttctcttcgcctgtttcaactgggccctctggcatagcaaatttcttcggggcatctgctgcagtggcaagcgctgggacagaacctccattgttcagagcacatcccggga

SEQ ID NO: 4240 - DNA, 979 bp, Avena sativa
gagtgcctgtcctaatctgcgacaggttactgcccatcttgagaagttgaagctcccgacaaagcagtcagggataactggggattctagtcgccttggttcagatgatactgcccggaggccaccttctgtaaaggcttctctgtcggtctcttttggccagcgtgctccgcatcgtgcatccacaagggactcatccccagtccgaaagacattgccatcaatacgcgagagggaaaggagtcatgacggcggtcatgcaagatctccacccaggaagcaccggagtcaaagccgtgagcctagccgtgacactgagagggaccgttcagatcgtgacggtggcaggtacaaggacagggagcagggtcgccagagccgtgataacagagaccgtgattaccgccgctcgagctattcatcagaaagggatgttgatagacgaggccgtgataggagggacagggactctgaccgaaatggacgttcgagcgcccgcagaagcaggagcaggagtccgagccgcggcagagccaacggcgacagccatcgctctagcccatttggtaaagcgccagagtcgtccaacctggcaaagctgaaggatctatacggcgacgcgtcaaacgcaaaggacgacgctggtgatgacagagctcgcagggattccggaactgaagaggtgatcagattgggaggtgccaggtggaggtgactgtcaagaaccactgagactctcttctccctgtactagcattgcgagacgctgccagagacgcgccacctatgatgggattcttgttccctgagctgccattcctagagaaatgtctctgaccttagtgtgcacgacgcaaaatctgttagacagctaggcaatgtagctgcagtttcaagagaaacaaatgccactttggatagacaaagttctgtagtaagtacgtatctgttatggcgtatgcgttgtgatctagaaaaa

SEQ ID NO: 4241 - DNA, 1030 bp, Avena sativa
ctgctcgcggagcatctgcacttctgcaatacctgcggcaagggcttccgccgcgacgccaacctcaggatgcacatgcgtgcgcacggagacagattcaagaccctggacgccctctcccggccgggccaggcgaagccagctgctggccgcgatgtgcgattctcgtgccctttcacggggtgcaaccggaaccgtgcgcaccgccgcttccggccactcaagtcggcggtctgcgcgcgcaaccacttccgccgcagccactgccccaagctctatgcttgcgagcgttgtggtggaaagaagcgttttgctgttcttgccgatctccgcagccaccttcgccactgcggtgaggaggcacagtggcgctgctcctgcggcaccaccttctcccgcaaggacaagctgttcggccatctcgcgctctttgaaggtcatatgccagccatctccgcaccgaacaaggatgcagtggcagcgcctacagagggatcccttgatataatggatgaaggactaactgaaggggactgtgaccaggaggatggtgatgaatgtagttttgacccggagttcttcaaggagttgatggatgagctcaaagatggtgctgagcctgctggtggcacaagctggcctggacctgcagcagctgggcaatagccatgtagtaagtgctgtttgtggtgtacggtagcaacagcaagggccactcgcttgcggaagttgactgggaagatcagtgaggaaggaaggtgcttctgaagaacaacacggattttgtccgggcccatccctctccgtgttttgacggtgctcacttgttccgcctcacttctgttggtctcgttgttgttctgtacctatcgcctgctagtggaaatacttcccagatgttggttttgcacctctggaattgcaaggctcctctttctgtatcaactgatgaggagatagtgtatcccgtctctggtgcgccgcaggcaataataaagaaaaataaatgatgtactaaaaaaaaaaaaaa

SEQ ID NO: 4242 - DNA, 998 bp, Avena sativa
gcaacagaagcttgctctagcggcgagaactctccattgttttatgcaaccattgctggcagtgaacatgagaaccttgaagataacgattctgagagaagtagtatcacttctgctggtgataattaccgggatgagaaccttcaagatgagtcatccagctctaattttgacggcaaaactgttcaagattcggaagcagcaccttcttgataaaagtgcagaaccagatggatcctctgggagaactgtagtttctaatgaaaggaagccattcattagtaaaattcagtggttgttgaagctaggaagaccctcgggtgaaggaagcgtcgagaagggtagcggtgagacatcggatggtaaagatggtgttgatgcttcctgctctgatgcgaattcaagtaactcgcgtggtaacacaaagttggcttctggagataagaaggttgtgggcacattcaagaatcttggacaaagcatgcttgaaaatatccaggtgattgagtcagcatttcagcaagaccgcagccagcctggccccatggagaacttctcaaacaacatcctgggtggcaaaggacaggtcaccgcaacagcagctctgacggagctccggaagatcagcaacctgctcagcgagatgtagccacccaatgcaaaaccacaaccacccatccttgcccaaccctctctagctcagcagtcgaatggtctagtgataaacaagtaatgtgcctaggccatcctgttcaccagtgctcctgtggaacttccatatgtaaatataggttccattctattattccatttgagtccaatatgtaactaattaagcactgtatatccaaggaactcgtatcaatcaatgtaggtgtcacgacgatgaggaggtagttttcgtcgggattagagagctatttttgatggaagaattttgtaagatttaactggtcaaggaagaaataaatggaagaataagtttcagtaccaaaaaa

SEQ ID NO: 4243 - DNA, 968 bp, Avena sativa
aattgtacttgcaaccggacattggtcattggattgttcgctcatatctcctacactatggctaccaagatacattgaattcttttgatatggcaagtgaaactgatcctcctgccaatcatcaaaatggttacggggaacctcctgaaatttacggtcttagccacagaaaattgttgcgccagcttatcatgaatggggatatcgattctgcattcaaaaggcttgaagagtggtatccacaggtcataaaggacgaaacatcagttatttgcttcttactccattctcaaagattcattgaatacatcaggggtgagcacctggaggatgctgtaaaatacgcccgcgctaacctcgccagcttcttgacgcacaaagcttttgaggggttgctgaaggagagtgtggccctactcgcgtacgagaaaccttcagaatcttgcattggatatttgctggactctccacagcgtgaattcgtagcggatgcagtgaatgctgctgtcctgtcgacggaccctagcatgaaggaccccgagagctgcctttactcgtgcctcgagaagttactgaggcagctcacagtatgcagctccgagctacgtgctttcaacagcgatcaaggggactcgttcttacttcataaagagatgcagacctgcgaaagatccaggcggccctaggcacacgtcgaatgggcttatgagcagtggactcagaaatgaggacctcatccttcttggaagtaatgatcgcctggaacagtggactacgccatgaggaaacacatatttcttccctttgaggcacccaacactccacagggcgaacaggagatttcacagcgaccgtagctgaaacacttgactttgcacgactttcttccctgtaatcagaaaacttagtttctactcatggcccttaaccctccgtgtcttcataaacttgttggctgtgtgcagtta

SEQ ID NO: 4244 - DNA, 817 bp, Avena sativa
ttaaccagttcagcgacagggctctcacttacgcgagattcaattactatcctccatgtccaagacctgatcttgtactgggtatcaagcctcactctgatgtctttgctcttactgttcttctcatggataaagatgtcgctggactgcaagtccttcgggatggaacgtggtacagcgtcccagctatgtctaactacactttgatgatcaacgttggtattacaatggagataatgaccaatggggtcttcagagggccagtgcacagggttgtgacaaatgctgagaaagagaggatgtcggtggccgtgttctatggtatggatcctgagaaagagattggaccaatagctgatatgctgaatgaggagcagccggcgcgatacaggaaaatgaagaacaaggacttcctagttgcgcactacgaatatttcactcgaggcgagagagttgtcgatgcattaaggatatagctaaggtgatactgctttcatgctacaatatccatggaaaataaaggattggagaatctcaataaggggatgaacctggtgaaaataattaattgatccggtttgcactgaagtttgggttaacttgttcatgtgaaattgagcataaccacgaaatgcattggacgattgagtgcaagccatagatgccaaaggcagaagttgccaatgtcagggagaaatagatcactgaatcgatgctaatgaacacatcatttggtcctaaattgttcagaaaatgggatgcaggcgaaaattgtagcagaaagccagaaagatgcaaatttcatgaataaaaaaaa

SEQ ID NO: 4245 - DNA, 1060 bp, Avena sativa
gtgctcggagggcggcatcgggcacgccatggcgcgggcgttcgcggcggcggggtgcgcggtcgtggccacggcgcggtcgcgcgcgtccatgcgcgggctcgagggggacccgaggtacctgctgctggagctcgacgtgcgctcagacgagagcgcgcgccgcgccgtcggggacgccctgcgggagctcggccgcgtcgacgtgctcgtcaacaacgccggggtacacctcgtcgcgccgctcgccgaggtgcccatggactcattccaccaggttttcgacaccaatgtcaacggagcaatgaggatgattcaagctgttattccccacatgatggaaagacgagaaggtacaattgtgaatgttggaagcattacagccttggctccaggaccatgggctggcacgtattcagcatcaaaagctgctcttcatgcattgagcgatacattaagggtggaactacgaaattttggcataaatgtcatgattgttgcaccaggaggcacaaggtcgaatataggaagtaactctgcagacaagtatgatcaaataaacgactggaagtactataaaagttacgagaaatcacttcgagccaggaccgatatatcccagggcgccgggtgcgttccagcagaagaccttgcaaagagagttgtaaaattggttcttaagaagaatcctccggcctggttcgcttatggccagttctctgccattctgacgatcctgtattatgccccattgtggttcagagattacttctacaagcttgttatgaaagtgtaaacaacctgtaagataaatcgtcgcatgaaccagggagatggcctctcagattccaatttcagtcacatgctaatactagtcggtccgactgttgctacaggtatattttacgatacatgagtacgtacacttccagtccatatggaccgctcttttcaattgtaaagtcctctgaaatattgtaatgtgaaattatttcagagatgattggctacacagtttctcgtgctactgtgataggatgagatctgtggaaacaaaaaa

SEQ ID NO: 4246 - DNA, 1435 bp, Avena sativa
ctcgcaccgccgccgcgatggaggccctccacgaggagatgcccttcgacctcgacttccacccctccgcccccctcgtcgccacctccctcatcattggcgagctccacctgttccgctacgccgatgccttgcagcccgagaggttgttcgcggcaaaagctcataaggagtcatgtagggctgttcgttttgtggattcaggaactgtgattttgacgggatctgccgatagctcgattcttgcttctgatgtagaaacaggcaaagctattgcccgtttggaggatgcacatgataatgccataaaccgccttatctgtcttactgaaactacagttgcttcaggcgatgatgagggttgcattaaggtgtgggatactcggaaacgatcttgctgcaatacttttcattgccatgaagattacatatcagatatgacctatgtagctggctcaaatcaaatattggcaacaagtggtgacgggactttatctgtaaacaatcttcgtggtagcagagtaaaggcacaatctgaattttcagaagatgaattgctatctttggtagtaatgaagaatggtcaaaaagttgtctgtggaactccaagtggagctctattgttgtattcatggggacattttaaggactgcagtgaccgctttctggggcactcacagtctgttgatacactgctgaagctggatgaagaaactctgatatcaggtgcagcagatggtgtgatcagattagtgagtatcttacctaatcagatcaaacagccactagcagagcattcagaatatccgattgaggcgcttggtttctcgcatgataggaagtatctaggcagtatttcacatgacaaaatcctaaagctctgggacatggaagaactcttgggtggtccgcagttagatggtcacgatgagttgcccgaagctgcagctgctgctgatcacgatgaattgcccgaagccagcgtcgccgttgatcacaaagtggctgaagctgatagcgatgatgatgggatggatgtagacatggagccaagctcttcaaccgcgtcaaagagcaagaagaaaggcaagggcaagcgtgtgaatggattccaaccggacttctttgcagacttgtaggtctcgcccgtaaagctcaatccttccggtggccacttgatcactactactccgtacttgagcagttttgaccgcagaccaatagttcaagtcttgatctcctgcatcgaagcgcgaggtcgatgttgtatctgaatatattttggtccgtagaaatattagttagaggcctctcgtgtgtgacattttgtggctgaactggttgtcagtagttgagtgtatttcctgctgcaaatgacccgtgacccgtctcgatggcgtgaatctatgaagtgaagcatatgtacctgtactaa

SEQ ID NO: 4247 - DNA, 1162 bp, Avena sativa
  modified_base (1155)..(1155): a, c, t, g, unknown or other
gaagaagccgaggaggagggcgcaggcatacgaggatcatcacggccacatggtgagcggcatgatgaacccggctctgggtgttattaggacatgctccgactgcaacaccaccaagacccccttgtggaggagtggtccttgtggccccaagtcgctttgcaacgcgtgcggcatcaggcagcggaaggcgcgccgggcgatgatggcctcggtggcggcgcctgctgctggcacagacgtcggcgccaaggcggcagcctcgccgccgggtgacgccgccgccgcggtgaccgcgcaccccaaggtgaagaaggagaagatcagagctgtggacgtcgaccggtccctgccgttcaagaaacggtgcaaggtggtccaggatcacgctgccgcgacgaacactgctgtgaccggcgccgtcgccgctgccgtcgaggcttctgctgattcggctgtcgccttcactgctccagctgctgctgctgagccggcgagggatgatctcgtcgacaccatcagcgccaactggagcatgagccccgccgccgccgctgcctgcttccggccatcggcgccggcgcccttcgcggtgcaggcgcaggacgagatcacggacgccgccatgctgctcatgacgctgtcctgcgagcttgtccggagctgatcgaccgaccgatcgagcattcgagaggccacactactatctacactgcggtacccccacccaggctttttttgccttagtccgttagacagtcagtacgtactgtccgtgctgccgcgtttttggcttcttgttcatgttgctagtgtaaccctgcatgcgctactcttaaagtcttgtgattcgttttgtgtgtaagattaagacatagaggaagagagatctagagagagaggaagagaggtagaaacaaggagagaaaggagatgataataaggataagaatgtgatcagctagctagctaggatcgagatcgagtgtgagttcagttggagtacgtagctttttgttgccaaggctaattaagccagtgtggctactatatagcgtgtatgtttgttctttgttttgttcgaaccatttgtaccgttacccgtaataataccagaaactggaccatgaaatgttgctrtttaaaaaaaaaaanaaaaaaa

SEQ ID NO: 4248 - DNA, 962 bp, Avena sativa
ttttttctttccgaggagaagcctctagcaaattatcctcatgtgaaactagtgattactagaattaactcatgataatatgatcaatcatttcccacaagaactataactatacaaggcctctgggaaaatatatcctttacaccacattcttctgcttcatctatacatctgccccctgggaaatgccttatcattacacacttcccatttgcttacaactttacaacttcatctatacatctggcgagatggcccattatatgctgcagcttaacatgaggcagattcatctgcacattcttcggatctagcagcatgtatccgttgctgcgggcccggggttttgattagtgtgttgcaacattgtgcgtcatgttgggatgtcatctgctgctgaaccgtcatcatcgttctcttcagaatccaagctttggttcatcacaaacctcagactgtcgccctcttcaagctcccactgctttctgagttcatcaatggctcttgatgcagagctagctacggcgtaattggaatcttgagccaacctctgtaatgcgcccatcccagcattccccagggtccacatggacggagctgcagccaatgcattagccaaagctttcctggtgttaacatctggagagcttgaacattcagctatcaaggaaacactctttttcccatccatggcatccaggtcaataagagccgccactaataattcgagctcatcagggtctgtgtagtcgataccgtcagccttggacaaagcagatgccatactaaagtatgcatcctctatggcagcaatttgatcagtagaaacttcacgagggaacagctcaagagttatcccatttttctccaatgtgatgaaccttgttgaatcagtaggaggaaatgtaccatgggttggaagctgatcttgtaatttctttgccatcatgtcatgatcccgg

SEQ ID NO: 4249 - DNA, 884 bp, Avena sativa
gggctgttcgccgatgtgctggaggctaagaaggccatgtcctccgagcagctctctgagctcgcctccgtcgaccccaagcgtgccaaaagaattctagcaaacaggcagtctgcagctcggtcaaaaggaaagaaaggctcgatatataacagaattagagcggaaggttcaaactcttcaaaccgaggctactactctttcggcacaactcacgctatttcagagagacacaacaggactttcttcagaaaacacagagcttaaaataaggttgcaggccatggagcaacaagctcaactgcgtgatgctctgaatgatgcactgaagcaagaagtggagaggcttaagatcgctacaggcgagacaacaaagtctgatgaagcatataatacaggaatgcatcaagtctcatacagtccgtctttcttccaactttccgaacaacacgcaactcagcaccatgcaagtgtgcatcaactgccgccccaattccagtcatctcatcccaatgtcccaagccaccagatgctatcccaccccaataccttctcggatatgatgcagcaagactcgctagggcggctccaggggctggacattggcaaagggtcaatggctgtgaagttggaggcagaggttgctgctaagtcagatggcagctcgatatctgcaggttaaagcagtaccttctaagtatagaccaatctgcaaacacgtacttctttcatttagatttatttgttcatagtctgacatccttgaattgcttctgtcgcccctctaggcataatttttatctgagtttctgtttacttgcatttattggttgtaagaccttgatatgttttttgtgttcatttcctgtgtgttgtgtgtaaaa

SEQ ID NO: 4250 - DNA, 1172 bp, Avena sativa
gcacaattccatagttctagaattagccaaactggattttaaccttctacaacgtctccacttaaaggagctcaagactctctccagatggtgggaagaactttccaaagaagtggggctaacctactcacgggaccgtattgttgagtgctacttctggtcatatacggtatactatgaacaagagtttacacgtgcaagaatgattcttgccaagataatcgcaataggtgccatgacagatgacacttatgatgtacgtgctaccttgatggagtgtaaacaactcaatgaagctatacaaagatgggaggagaatgctgtttttcttttaccagactacctccagaagttttatctcaagctgataagcacatttgaagagtttggtgacgagctagaacctgatgagaagtaccgtgtctcttattgcagaaaagcgtttcaaatattatcaagtaactacctccaggaagcagaatggtttcaccaaaatgacaaaccaaaatttaaggatcaagtgaaggtatctactatatgctctggcgcaccatgggcatgtgttgggctgttagttggtatgggtgatactgcaaccaaggaggcattcgaatgggcactcggttgcacggatgctatcaaggcttgtgcagtggtgacacgttttatgaatgaccttgcttcatttaagcatggaaagaacaaatatgatgttcacagttcagtggaatgctacatttgcgaacatggtgtggcaaatgatgtcgtctttggcaagataggttctatgatcgaagatgcatggaagaccacaaatcaagcacgttttgagcaccctgggcttctttctgtgatacagcgagtcgtgaatttaacaacaagcatgccattcatgtacggtgaccagaaagacgcttttacattcagcaccagcctagatgaaactattaggcgcctgtttgttgatcctattcccttgtagacaacgagttggtgggtgcatgccaacaccagttacctcattccaataaaatttgtatcatccaacctactatagttgggctttacctcttgattattatttttctccataaaaattataattaacccaataaggctttgtatctttgcatgttacttaaatgcattaaagaagcatatatattacaatt

SEQ ID NO: 4251 - DNA, 1180 bp, Avena sativa
tgatggttctatatataatatgggcaatcttatatggaaaaggaactatcacgttttggaccgtagtgagactcggctggaggctatgatgttatcaaatcccacagattgcatcatcgatgatggaagatgcacagagcatataccttgtcacatgttgcagttttttcgataaagttggctaaactttttgtggctagtggcccagtggagttgtatggatatatagcagtgcgggatggtctggatccattgcttaattatgttgtcagtttaagcagggatgatcccatcatcgtggagcagggttccgtcatcaagatggctggcccaaagcgagggatagatttgggtggcagtattctaatcgagtatgatatgaggatcaagagaagcgggcacgaagatgatgatctacagctggttgatggtatatcggtcataggcgacctgggtggactatggaattgtatattcacgaatcgcatccttggcgatcatggtgagattgacttgaccgtgtcacgtgttcatcgtgcggttgaggcgaccgtagaagttgccatatcgcaagtgcaaagaggtttcaatctctgtcttggttgtttcatggattgctttgatgaagaagaagaaatccggctctttgatggcgccattggcgagtcacgtggcttaaagaggtctgtcattgctctaacgaagggttccactatggatttgaagttcagggtaggcgcggagtcatccggttcagctgaacattcttgttccttcgaggcggacacgcatgggcatgctactcgacggataaagactcgtttcgggttgatctcagtgaaggtgacttggtcgactttggttgggggctgctaaggtccatttccgtacatcctcccaaccttacatcaaaagtttgtgaccgtgaggagtgtgccaggattttagagttgtgtcaaaaagtggagtcgtggacttgcggcatttccctgctattccttccctgtcaatctacagtttaccggtagtagtcagcgtggtttttagtcatgttccgtcataaaacattatatatgtcctcatgtttgtacatggtacttgatttttctttttaaatgcaaaagcagtgctcctgcctgcctggcgaaggaggcactgcagcttaaaaaccaaaaaaaaa

SEQ ID NO: 4252 - DNA, 714 bp, Avena sativa
ctatgagccaaaacaccaccttggcagtcatatcagctaacagaacttgaaataacaaattttattccagtgtggaatagtacagtgttcagcgcaagcgaaaacccaatcgaacaatcatatgcataccactaccagcacgccagcgccagacaaagatgcaacgcaaataccattaccataaacctagattcttgcatgatgactgccgaagagtgagaatgacttattattaaatgaagtgctaccacttcaggttcacttaaggttcttgttaaaccagtcagtcatgtccgttagggcttcctcggcgctcttcacagcagctgcgtcgtcgctgtcgtatctaacagtccatccatgagaaaccccagggaaaatcttgacaaagtaaccaatctctgagttagtggataggacctgctcaaactgcctgaccagttctggtggggacgttctgtcagtttcagctccaagtacagcgatgggacatttaacctctttgatatcatcaacagtcacaaaagaagggtgcgacataacagctgcctggatctcattagctttcgccaactctgctactacctttgcaccccagcaataacctgcagcgccaacactagacaccccttgttccttcagagcagcaataactggttttgcctcttcaaatgccttgtgcggggcatgatcctttatccacacttgatcccg

SEQ ID NO: 4253 - DNA, 1036 bp, Avena sativa
  modified_base (9)..(9): a, c, t, g, unknown or other
acatacttntaaatgatgcccttgctattgcagggccacaatgcaagtcaacttaacaacataaacactaggatgagaccaaaatgactgcttaaatgtcaacagtaataacagtgtgacttcttaactacacataagaatgtttgctgtcaagcatcaaagatgtacaccaccagaaatctgtctttggaagcaatatgtatatacagcaacagcagactttacacacaaggcacactacacacttggacggatgaacaaaaaggaagcaagcaaccacggatgaacacttcacttttgccctgtttgtgaccagggaaagtttttctaggccccaaagcaccccatagctttcttgggagagttgccagtggcgcggtacttggcggccgtctcctcagctttgaggatttcctcgccacgcttcgcctcaaccatggctctcttctcctcagcttccttgtggatgagtgcagccttgttcttcatcttctctgcgtattcagccttcttcttttctaattgctcctcaatcttccttagttgagcttcaatgtttgctttcttggtgttctcccatgaaagaatagcagatacctttttagcagccttgttctcagcctttgtcttctcattctcctcccatgctttaattagagagttcctcttctctgtttccacccttgtgagagcaatatctctgtcatttgagcccccttgcggaggcttctcatcagcgggtttctcagcaacaggttcatctgcaaccttctcgacgacgacgagggccttggagtcgtcatcgacgggcggcttggagtcctcggcggggacgacggccttctcctcggtgacgtccttggcgggggcctccggctccgcggcggggacgggcgccgccacctcgggctcgggcgccgcctccacctccaccttcttggggtcctcggcagccatggcgatcgctggacgtttggtggccgctgaggtgttgctgttggcgcagctgtgcgtgtcgtgggactgtgggtagggg

SEQ ID NO: 4254 - DNA, 1012 bp, Avena sativa
  modified_base (1009)..(1009): a, c, t, g, unknown or other
gctgcatccaaactgcggcgatctttttcgtttttgtgctggagatgcgattgttgcggtgagcctgcacgttgctgtatgtagcttgcatgttttggtagtggaccaaaacaatcgaattattattgtgttggttttcaccaggctgcagcagttatacttgctggacccatctaaatactacacgctgacggtgatggtggagaaagaggcagatgaggacacggcaaggaaggctgatagctgagcaagagctatagtatggctcacaagttaaatgaatcagatgcaacaacaattactatatgatctctcgattaatacaccacttctcatatatttatcttttgattgtgtaatatcaccagatccatggatttcactattgcactgttacagagtctggatgaggaggagggctccgatcaggagagccttgcacagcttgtagaagctgcgtacaaggtctctcagaagccatggcatggctggattgcttaggcggcatatcacaaggaagctcatccccgagaggaagatctttgtaggctggcttgtcgggaaggacccgagctgcagtgttctcaaggacgagatcgaaaggctcgtcccgctgcttcagccctttcttgtcgacatctatgacatgctggccaagctcagactggataggctgaagcaaatctaagatggtctgagtttcagaattccgattctgtgaatacaaccttggggaaggtttattcatagcctggggtgaatgacagggttcacatctgcttctctttgatggtgcctctgatggattgatgtacatctatgatctggctatcgatgtcatggtgttagtagtttgttatgttttggtagctagatatctcacgtgttctgtgcatgattgtaatgtatactgctgttgtctgaaatttagtttgttattgcatcatttgaatcaaaagaacttcatgtattcttttgttcctgattaaattattgttcggtaaaaaanaaa

SEQ ID NO: 4255 - DNA, 1088 bp, Avena sativa
agcagcaagaatatacattcattgatgcgcatagagctttattgaagtaccggttacctctgagggagatcatcgtggacttctacaatgagttgaaaagcataacatctggctatgctacctttgactatgaagattctgagtatcaaaaatctgatcttgttaagatggatattctacttaatggacagcctgttgatgctatggcaactataatccataaccaaaaagctcagaaagttggaagagaattagtggacaagctcaagaaatttatagaaaggcaaatgtttgagatcactatacaagcagcaattggttcaaaggttatcgcaagggaaactctgtcagcaatgaggaagaatgttcttgcgaagtgctatggtggtgacattactcgcaaaaagaagttgctagagaagcaaaaggaagggaagaagcgcatgaaacgtgtaggatctgttgatattcctcaagaagcattccatgagcttctgaaggtctccagttcaaaatagatgagctgcagattagtgttgtagagcctcgtgtagtcatcttccggaaggtcttcatcctagttcagtggctacataccgctgtttcttgctaaaaactgcagcaggatgttgtagattgcaccactgcaatatttttgctccaggcaatgattacacgctgccccacagagcttatttcaatttgagaagtttcaccttccgtggtagtgacgcggtcgctggtgttgcaaaccttgtgtttacaggttgttttaattaatggcgtctacagcagagccacagtgcagaaggaccttcaccactgcatcctgtcaccctgttataatgattctgactggaaaattgacaaccatacgccgaataccgtgctttactttactgcacagttctggaagcacaatgccggagaatgctactaacagttttgtatactgaaattttcatgcacggaatgacgttgattgtatcatacttggttccattttgttaagtttctctgtagttcccttgtgtaatttccttggaataataagtgaataagtgagatcaccctcttaactatcaaaa

SEQ ID NO: 4256 - DNA, 948 bp, Avena sativa
acaagttcactatgatgtcctataggagggagttctatgcatatgagttctcttttttggctgattggtcttctatggaagagaagtgtataagctgtgtgtagcctagattcttggatccctgtttcattggccatttcttccggtggccggtgttctgttcattttcgacaaaccctcgcttcagttgtgctaggtggtgcgcttaatggaatactgggatcaggaaatatggtgaaacttatatgagctggatttcattgctgttgtcgtgggtgcgaggaaattctacaaagcaaaatgacccgtgttattgtagttgtatttccatatatgcttctcactatctagacttataaaattctcttcttactacataatttgtggctgacaaacttatttatttctgcacaaagcaatattcaagttccattttggtttcagggagccacaatggagtacccataggtgtagtgtgtatgcattcaggaggtcaagatttgcctctagctatattacttgagagcaacaaactgatcatcatggtcctatctcttcagtgttcaaatgagaccaatgagttaatagctgggcaaattaatagaccatttgtgttaatacatgttctgaggatggaatggtggtatttgctgcaaagagaatggaaatagtgccagctatcatgcggaattttctcttatttcattcaagtgtagcctctcattcaggtgggaatgattcatgggttgccttcttcctctcgcgttgcgctacatgcgattccactacaggcagtgaatggatggtgagctagatgggacttctattgtaattctattaataaagattacaatttttgtaattctgttagcactaaagattgcaaaacattgacaaggtgtaacattttctttacacagttgttatgtgaaatatctgaaaaaaaaa

SEQ ID NO: 4257 - DNA, 744 bp, Avena sativa
ttttttttaactttgcaaaataacttttgtaggctttgactgaaagacttttacacgaatcttcaagtaacttgcggtagagatgatgccggggacccctcctaggtgtgataaatccgttctcctcttctcggtcgcaatcaaggtctctatcggaatgtcgagagacatcatatcatggcgaatatgggggttgccgatagtgttgatttcaccagctccgtccacctcgattgagcatggcagctttccaccctgatagtttattggccacgctatccaccggtcgagctagtatgatgttccaaattgaacgctcactagctcgtagtagtacatatgatgcacacccgaaaacgcagcgcggttcctgatccatttctccttggaagttgggactgaatctactgcggctgttggtgcggcggcaggaacggcagcccgcggcgagcccgcttcatgaggttatactccaccagccccggcacgtccggcacgatctcccgcacgccgtccagagcgccgaaccgctccgcccaggccgccaccagcggcgtcctcgccgggtcgatcgtcctcacgccgcacatggcctccgacgcgcgcagccacccgatgaacccgcccagcgccacgtccaccagccccacgctctccccgccgaagaactccttctcccggagcaccccctcgaacgtctccagcacggaacgacgacctcccccgccgccctcacccgctcct

SEQ ID NO: 4258 - DNA, 866 bp, Avena sativa
ggacaagaataactgagccagttggaggaaggctatcctataagcctccaattcaggatatcaatgcaccagacctgtacatccctttgatggcgtttggcacctacattgtcattgctggatatgctctgggagttcttgggagatttacccctgaggcactgaccctacagttcacaagaggtctagttggctggtttctacaagtcgtcctcatcaaaggtttgctgtactccctgggcagtggtgaagcgccactgctagacattgtggcatacgccggatatggatttgctggcacatctcttgcaatgcttgcccgcatcttctggagctacttatactacttcattatgccatggttctgtctctgcactggtgtgttccttgtgaagaccatgaagaggattctcctgggtggaccaaggagttacgagaggcacccgagtcgaaaccactacttcctgctcttcctggcggtcgtgcagttcccgatgctgttctggcttggcaacatcagcggttgatcttttgtcttatagttgagctcggtgacttgaatcggtttttgggaggatgctgtgcaggataggctcgcggttaacttttctcggacaacttcataatagcatactgcctaatgcttagtctattgtgaagctgctagagatatacgcggataaacaaatgaaagacgcatgtaactacctttttatgttttctgttggaggtgacctatggccacttcagatgggatggagatgacatgtatgtgtttcgagtcctaccaaatgcaacttgttctagtgacctggttattttgttctgtccccttgtattcctgaaactactgccacattgatgat

SEQ ID NO: 4259 - DNA, 762 bp, Avena sativa
caaatgtatgcaggggcgaaaaaatgtcttgaagacattgaaagggctgcttgaggagaggaagaaaggggtacgtcaggaaagcattgactttcttgaccttttgatcgatgatctcaaggaggagaggcctgtaatgagcgagaaagttgcattggatttaatattcttgcttctattcgctagctttgaaaccacatcatctgggataatggttgcactcaagtttctaacagacaatcccaatgccttgcaggaacttatagaggagcatgagaacattctggaaaggaggaataatcctgacagtgaaataacatgggaggaatacaagtccatgaaatttacatctcatgttatacatgaagcattaaggttggccaacatcgctcatgtaatgtttagaaaagccattcaggatgttcatataaaaggttatactatcccaaaaggatccaaagtgatgatttgtccttccgctgctcacctagatcccgatatttacaaggaccccaatgtattcaacccttggaggtggaaggatattgtggaaccagtgggaggctcctccaaggacttcatggccttcggagggggagttaagattgtgtgttggtgctgactttgctaaattgcagatggctacctttcttcattgcttagttactaaatatagatggaaggtcgtcaagggtggaaccatggtgctctctcccgttccacgattttacgatggttttcaacatccagcttctccctaaa

SEQ ID NO: 4260 - DNA, 825 bp, Avena sativa
gtccttccaccgcgaggacatgcaaatcagcaagtgcaagaagaacgacccaaacgaccagatatacgtcttcttcccgaacgatgagaaggtggggatgaagcacatcaagaagtacgttgaaatgatgacctctgagaaggtctccagggccgtgctggttgtgcagcagaacctcaccccgtttgcaaagtccttcctccaagaactggagccaaagatacacttggaggttttccaggatgccgaaatgcttataaatatcaaggaacatgttcttattcctgaacatcaagtgcttactactgaggaaaagaagacattattggagcggtacactttaaaggaaactcagctaccgagaatacaaattaccgaccccatcgcgaggtactacggcctcaaacgaggacaagtcgtgaagatcatcaggcccagcgagacagctggcagatacgtcacatatcgctatgtcgtatgacaaagttacacaagtgaatgaaggaaccgtaaacatggtgatttttgcaggtatacacatggcatacacatacccatttgcttggcgaaactggcatttctcaatacagccattcttaaggatagcatggatgtacaagtggattcttaataagctgagtgtatggattataagtaaaatcctcatgttgttcaattgtttcaaagaactgtatacaacatacagaatagaaacatacctgtacggagatcagtaaaaggtcttgcggttctgcttgttacatcatttgcgaggatgaatctcgtacttcacaaataacgaacttattttatcgtgcaaaaaaa

SEQ ID NO: 4261 - DNA, 920 bp, Avena sativa
ttgcaaaataatactccaaaacatcagtagtacacaaaagtagcaccacaccaaatgttccagtcgttttctcttgaatagctacgttaaacagttgggaggggagttgtcctagcagaaattttttgtacgtatcttcctgcattagtctgacaggttttcaaacgaaggactgatggacaaaaaaaaaaaggtttcaaacgaaggacattcccagacatgttcctgtggcaggaccatacgttgttacatggcttggtttacccttatgaggccacccagttgaaaagttgtcccaaatcaaatatttgtagtgaagagtcagtgggagaacatgagggtgccactgccatttcttccaccatatctagtagtactaccagcgaagtactagatcagctcaatcaagctacacaccctcagacatagcattttcatcctccatcttgtccttaacctcagcagccttttctccctctttcttgtcttttccttccaccatattgtcctcgacagccacatcagcatttccttctaccatcttgtccttggctccatcagcatcttcttccaccgtatcttcaatagccacatcacctgcctcaccattaccttcatccatcttatttccttccttcatcatgtcatcatttgcctcaactgtatcttcctccatcttgtcattgtttaacacagcagtcacctcgccaatttcttcccccatgccctcttttgtattatgcaaaacaataccaccattggtagtttcaggaggggttgcattagcatctgcgtgaggtggataatactgcatggattgcatctgacgaagatgttccagtctgaagttcactaggtgtccaaatatcttcaacaccagtaaatgtaaatgaatatttccagcttctcccaaaaggtcg

SEQ ID NO: 4262 - DNA, 971 bp, Avena sativa
aggtacgataggagctattcgctagcatgaccgacataaccgcacagcacaggtggccagtagggcagattctacagcactaggaaggggcactggttcctcgcgtgctccgggaccagcttcgtcgcgacctccattggaagcccttcagcctcgtgagccttgaagttgaagagcggaggcaggaaccgaccgttggggaggcgggtgtttgggtcacggagctcatcaaagaacggatgagtcagagcatccagagctgaggaccgtaggtgtggtgagtactgaagaagcctggagaccagatccactgcttcaggtggcattcttttgctgaacaccttatgccaaggatgagctttgatttggggaaacttgaactctgtgtagttcgggttcatgcacttaatttcttccctagtaggtgtgcccagaatcttgataatttcaacgagctgatcaactccactttcaccaggaaagagaggctgtcctgttagaagttcagcaagaacacatccagcagaccagacgtcaattgctgatgtgtactcagtggcaccaaaaataagctcaggtgccctatagtacctagagcagatgtatgatatatttggttcacctttcaccagaacttttgcacttccaaaatcacagatctttagctgatgagtgtgtgggttaaccagaagattttgtggttttatgtccctgtgacaaacaccaacagtccgatggatataggccagtgccctaagaatctgataagtatatagcttcacatagatgagtggcatgcgttggttcatcttgttgtagtgtctgatgacacggtggactgtctcaggaacatactcaagcacaagattcagatagagttcgtcctttcagtggttgagaagaagcagtgtttcaaagcaatgacatttggatggtcaagcagacgcatcatctgcaactcacatcccggg

SEQ ID NO: 4263 - DNA, 1127 bp, Avena sativa
ggaatagaacaaatctttaaccagatgattgctgatgagtctgttgttgccaactggactacttacaccacactagctagcatgcatattaagctggagaactttgagaaggcagaagaatgcctgaaagaagctgagaagcgaactacaggcagggacaagaaatgcttccattttctcatcacactctatagccacctccaaaagaaggaagaagtgtatcgcatttggaactggtataaagcaactttcaaaacaatccacaacctgggttaccaggaggtactgtccgccctcgttaggctaggggatatcgagggagctgaacttctatacgaagaatgggcctccaaaagttctagctttgatcctaagaccatgaacattttattggcatggtactctagagaaggttttgttgtgaaggctgagcagactctgaacagattcctcgagaaaggtgggaaccccaaaccaaacacctgggaaatccttgcctccgcatacctgaaggataaccagttgtctgaagctctgtcgtgtatggagaaagccgcggcagttactagtgcaagcagatggagaccaaggccagccaatgttgagagtctgctggcgtatttcaaggagaagaatgacacggagagcgtagacaggctgaagactgtacttgaaagtagaggatgtgctgagaaggaagagtacaagtctctgattaacacctatgcttttgcgggcacgtgatggtgaaccgataacatgatcagtaagaagtccttgaaaaaagtgaatcgccttgcttgttgtaatctgaatctcatgataacccctgcagctgagaattcatgcggtacagttatgcttattgcagagcacggagcaggtaggcgcagctgtttcctagagaaaattgggcagtgaggtacatagatgatagatttaccttcttcgtgatcacttagttcagttagaaaattaacggtatcatcaagaagaggccgtttacagggttcctttgtactttgtacatgtatattgacattaccatattgaggatatgtaatcgtgccttctctgtcgaagagttcatttatcgcacacacttcttttgacttgtccaaaaaaaa

SEQ ID NO: 4264 - DNA, 775 bp, Avena sativa
ctcaattgcatggaactaagttgttgcggagagtttatggtatgtgctggtgatcatggacaaatcattctgcgctctatgcattctcttggtgttgtttggaggtatgagggagctgggaagacaataacttctttagctgtgactcccgaggagtgctttttggctggaaccaaggatggtggcctgattgtattttcaatagaaaatcctttacttcgcaaaggtggcatacaacggaacaagataaaatcttctttaggctagtggtgtatgaaggaacatttatcagccttccttgctctactttctgaacaaacggttaccggaagtaaatgtaaaagagaacattttgttgctcctgatacacatgtacatacagcattaggttgagtggttaggattctgcagaatgcccgagccggtcaccgtccacaagctgataattcttctaactgaagtagtggttacacaatacatttttcatttgactcccaattcaagcttggatacggacatcctcctagtagtgatgtgtaggtccatcacagttttcccttggtgctggactgctggttgcatagagtgtgtgagtgtaacataacctgttgcgatgttcttaccagttagggcgagcaactcgctccccaatagaatttgtctgtatgtattagaggctagtgccctgtagttacgatacagtacattgtacatggaagctcatcttagtgggacaataagcatcatgtgactcgtgtcattttgatctcttgtt

SEQ ID NO: 4265 - DNA, 912 bp, Avena sativa
gcgctttacgtgaacgtaaacctgtcaactacaattactctgattatgatcgttccataaaggaggcaataaaagctacagcgaaagcaaaggaatctgatccacctaaggaggcaggcaagaagagaaagcatgtctcagagcagggagacaatggagccaatgtaggatctgacatcagtccagagaataatgaagatagagaagaggaggaggccaaggacctagatgatcctagttctgacgacgatgaagcctcagattacaacgataaggatgatggctcctccagcagcgatgaagacagtgatgcctctgattcccacgagagcaactcggacgaggaagaggatgttgttgtgacgcgcaagacgactcgtcttgctgcccgtaaggtcgagagcaagcctcgaccagggcttcgccggagtcgaagaaacatgaaaagtgatgatgaagagatggtgcaagcaggacaggttacacctgaagcaatgacgaagaaaactacaaggcaacggccgacgcccatatccaagcagttctccatgtcaggctctgaagatgatgattcgcagtcagttgtggactctgagtcaggctctgaagatgatgcagctgtagaccttgcgtcaggctctgaagaggatgatcagtcagagcctgatgcagactctggggaggaatctggctcgccttaggtgagtacctatgctcctcttttgcaattggtgttgtggaagtcggcgaggcgagttcaacaggtttagggtcctcagccggtttgccagttataccagctggggaaaccagacagcagcgacttttccccattgtctagttagttgttgtcttcaaagtcatgggaatacatatatacattgttgtgactgtacatacttgtcatcgtgt

SEQ ID NO: 4266 - DNA, 884 bp, Avena sativa
accagttctatttgggaactacgaaactagcctttaaatctataacaatatccatcccataaacaatttgtatctttgttaaggacatggtcttattcttctttttatcatcataaaaatctcccaagcatgaagctgatatctgatattttcaatactggtgcttatgtgaaactttaggatgcatgggaagatgttgatccagacgaatactcttatgaggagctggttgcattgggtgaagtagtaggtacggaaagcagaggtgtctctgctgatactctggcttcattaccttcggtaacttaccaggcacaagataagcaagacagcaacatggaacaatgtgttatttgccgagtggaatttgaggaaggtgaatcattggttgcacttccttgcaagcattcataccattctgaatgcataaaccagtggctgcaattaaacaaggtatgccctatgtgcagtgctgaagttcctacttcagatagcagccaggcatgacattctggtgtagtcatcatcatggaagcttaatgggaagaaatagggtcagcttatattttctgctgttggtgagattcaagcattaggagctgctgcattgttccaacatactaatgaaacaatccttgagttggtttcccttgctagctcagcagactcggacaatatgcacttgtcgaatttcttcaccatgctgctgctttgtgtatcctgttaagacactcattgttaatgtataattcattgatgtaaaatagtttaaatttatagccattctttgttagacgcttgttgtccatgtatgattttcatggatgtagataattatcatatttataatcattcttatcacttggtcgcctgagtttaactta

SEQ ID NO: 4267 - DNA, 899 bp, Avena sativa
ccagtgtacgcaagattgctgtctgtcagaggaataatgcaatataccatattaagaagcatcaccttgatggtatagtgcactttgctgacgaagagcgctcatacatgggtgatgtatttgaagaaatgcggaaaatcaggcgcttcggcacatggcctgtagcaaaccatgatggaagtaagtacagggtggttttagaaggtcctacatgtaaaggtaaccgaatcactgggtggaacacgattcagaagaagggtgcgcctcgtcgattcccagtgggcttctctgggttcgctttcaacagtacaatgctctgggatcctcagaggtggaaccgcccggctatggattctgtcatcgtccactctgggggtagaggtggtttgcaggagtcacgatttattgagaagcttgttaaaagtgagcgtcaaatagagggccttccagacaattgcaaccgagttatggtctggaatttcaacttggaacctcctcaactcaactatcccgccggatggtcattgtggaacaaccttgaagccaacgtacctctaacataaaactatcgccgtcgttgccgcaccgtgtcttatcctacaggtcatttctcttgacaagacagaagcgtgataaacttttgtaatgggacagaggttctgaatatcggctttgtgttgtccacaagtgaccgcggcgctgctaactgatgtcctccctgaacagcctgcacaacaggatcccacaaaggcgtagtgccgtgatctgcctccagcatattcaactgcctgaccaaacttttcttctttttatgtactctccttattctttgtgtgctctcgatttccctctgtattcaccagctacatactttcccgtagtatttttttctacgtacc

SEQ ID NO: 4268 - DNA, 982 bp, Avena sativa
gttgttgttgtccttgctggaccataggcatcataaagtttggcatcggggctccacctggcctcatcccaggcataagaggttgctggaagccatatccaaggactgtggggttcataaaagcttgaggtggctgaccataaaatagttgctgaccaactccaggaacaccaggaggaaacatggccatccgaggaccaacagttggagccattggaacagggcgcatttgtgaaaattgttgctgcagccttgctttcctgtcttccttgcgctgtgcaagtgcaacataaagtggtttattgcctaccatcttgttgttcatttcagagagagctcgggaagcctcttcagcagatttaaaagcaacaaatccagaacctctgcttgcaccgtttgaatcacgcataaccttgcaggaagtaatagttccgtactcagcgaaaagttctcgtaacttttcatcatcaacagtatcatccaagttcttcagatacaagttggtgttttgatacttatctgctgcctcttgaaggttcttttcaaacttctctttcaactccatctccctttcagattttttctgagctcttccgacataccattccttatcactaaatttcttgccattcaagtcttgaacagccagagcagcagcatctggactttcaaaattgacaaatccaaaacacttggatcttccatccccgtctcgcattacaacaacacttgttaaggttccaaactttccaaagatttccttcaagtcatcttcagtggtagtctcagctagattctttacataaacattattgaacttcacattgcctggagaattgtccctctcctgcttacgaacgaatggcccgacatacaccttcttgtcattcataagcatcccattgagtttatcaatagcagcatgagcagcctcatccctctcatactgcacgaagccgtagccctttgattctcctcccgg

SEQ ID NO: 4269 - DNA, 1012 bp, Avena sativa
ggaattaggaatacgttcttcaagtggaaagtgatagcggtgtgggctttctttgccttctaccagtcaatagtgttctattatttcactgcagctgcaagtcagcatggtcatggctcctctgggaagatccttggtcaatgggatgttagcacgatggcctttacttgtgttgtggtgactgttaacctccgtctcctcatgtcgtgcaactctattacaagatggcattatttcagtgtagctggcagtatagctgcctggtttctgtttatctttatatactccgccataatgacatcatttgacagacaggaaaatgtatattttgttatttatgtcctgatgagcacctttttcttctacctcacactaatgcttgttccagtcatcgctctctttggtgacttcctatatctatcccttcagagatggctattcccctatgactaccaagtggttcaagagatgcacaaggatgacccccacgaatacagcatgatacatctgccagagaggagccatttgagccctgaagaagcgagaagctatgcgatctccatgcttccccgagagaactccaagcacaccggttttgctttcgactccccaggatatgagtcgttcttcgcgtcacagcaaggcgtctgtgtgcctcacaagccatgggacgtcgcaaggagagccagcatgaagcagcagcgacagcagccacaacggacgggaagatcctaatcccccttttcgtgtaaagttctgtacatcatgatcttttgcatgcagaccacatgagtgtgtataagtagccttctagcctttatttgttttgtcacccattatgctggccatgttagtaggtggccattgatccagttagctgaagaattaggtaggcacatgcttagttaacaaagtggacagtgaaatgcaggtgaaattcttttggatttttaacgtgcttgaatgtttatgaattttgtgatgcctcgtcaccttctttttgtttgacaaa

SEQ ID NO: 4270 - DNA, 902 bp, Avena sativa
gaggacctgctggacgtgctgctcaggctgcagaaggaggactcgctcacatccccattaacaacagagaatatatgcgccgtcttattgatatatttcaggaggtacagataccacaggaacaattttggagtgggctatgtcggagctcgtccgtcatcctagagtcatggctaaagcacaacaagagatcagagaggttcttggtgaagatcgagttgtcattactaatagtgaccttggcaaactccactacatgtgcatggtcgttaaagaggttcttaggttgcaccaacctgctcccctaataccccgcatggccagagaagattgtaaaatcatgggttatgacatgcctaaaggtactacagtattcattaatgtcttcgcggtttctagggatccaaagacctggaaaaaccctgaagagtttgtgccggagaggttcgagaacaacaatgtggattacattggcacacattatgagttcaccccattcggggcggggcgaaggcagtgtccggggatgctattcggcacgtcaaccctagagattgcattgacaaaccttctctaccacttcgattgggtgcttcctggcggggcgagcttagagtcactggacatgtctgagaaattcgggatcaccgtgggaaggaaatctgacctacaacttgtaggtattccacgtggacattttaacggcacatagacatgaatgtagacgcggcatgcagatggatacatctattatgtcttcatatactagtatgtctatatacacactgagtggaacctaccagaataagagataagagaatgttgcattcctatgcttctgtaccagaaatattttttcataaatataataagaaaatagtatgtaatacagagagaaaaaa

SEQ ID NO: 4271 - DNA, 900 bp, Avena sativa
aagatacacatcaaaatgttgaaaatttcgataaaaaatatccggctgtacatgttgacattctatgttcgtacaccaagtttcagaaaaaaaagatattttatgtgggttgtataaaaaagatattttttggtgttggaaaataattttccacaagacatttttttgtcttttttgtacagatctcaaaagatatattctcaccgcaaaactttgtgtgaggacatatcaagtccagatgcacacctgggattttgtttcagaattttttaacattttgaaattcaaatataatgcatttatcataataggtgcatttagacatgggagccaaatcgccatgtccatgttttgggggtttctaacattgagatcttttttattgacctgtgcaccaggctggaaaaaaagagaaaaccgcgacgatgggagctgcaatttgccaggagaagtttcttcccatggtggagatcagtattatctgcccggtctcctgtcaaggtgattcccacacaatgggctggttctactaaaggcatggatagtgggatagcttcgaagaaacctactctggagctggatcgtaagatagctttgaagaaagcgaccaccgacggatctactgcacctcctctgatgagtcgagttccccaagcagcattcaatcatcagccctgtatgctgttcagtacagcggctaattatcagcccagaaggctgtttggtgcagcggttaactatcaacccagaaggccgtttggtgcagctgttaactatcaacccagaaggctttttggtacagcggcactgatgctgctgaaagtattgaagaagaaggcatgagtaaaaggtgacgtgggggagttgtgctgtatggtcaatcttcctgcaatcaagttg

SEQ ID NO: 4272 - DNA, 1136 bp, Avena sativa
catcgccgagctggggccggcagagatggcggaggtggcggagggcctctacagcagcggcaaggcgttcctctgggtcgtgagggccttggagacgtccaagatccccgaaggcttcgccgacagggcaggcgggaggggactcatcgtcacctggacggcgcagctggaggtgctggcgcacggcgcggtcgggtgcttcgtgacgcactgcgggtggaactccacgacggaggcgctgggcgccggcgtgccgatggtggcgatgccgcactggtcggaccagccgactaacgccaagtacatcgtggatgtgtggcgcgtgggcgtgcgcgcgcggccggacgacggtggggtggtgcggagggaggaggtggagaggtgcgtgagggaggtgatggagggagagaggagcgaggagtacgcgcggaatgctgtcgagtggaaggagaaggccattaacgccatgggtgaaggtggcagctcggacaggaacatcacggagtttcttcgccaactcaggtccaagaaatctgagcaagactgcttccacacccatcagacagagccgatgccgacccggacgacgccctccgcgcggttctattcgcatcaaacatggatatggtgaaggtgctggcttggaagagcgtgatgggtatcatcgcgtggttaataagaccttcagaaatgatgaagaaggatgccagttctataatgactatactaatggttaaaagggtttagtgttagaaaggaagaggtgaaatacttgctaggcacgaggacatggttcagacagctttacacgtgttttaaaggacactatacatttcgaaaggcctaacctgaagagaacttcaaaggctcttactcgttgtggatgctcaattcatttagagatcgagctaagtgtagctaccggcgaatggttcatggatacgtttgaccacaagcataaccatccactcgctaagcataaccgtggattgataccattgctcattggattttaactccactaatatattttttctgcatactgtttgtagaaatgctgctacaagatgtcagcaaaattatcaatgtaaatagacaactccctttggattaatacattttgatttgaatccaaa

SEQ ID NO: 4273 - DNA, 1219 bp, Avena sativa
tccgtgacctgacctgcttgagttacatttcagctggaggtgttgttgcaacaatccttttagtcatctgcctattttggattggggttgttgacgatgtcggctttgagcacaaagggtctacgttaaacctcccaggaattcccattgcaattggattgtacggttattgctactcggggcatggggtgttcccaaacatctattcttctctgaagaatcgcaaccagtttccttccattttgttcacttgcattgggttgtctaccattttgtttgctgccactgctgtgatgggatataaaatgtttggtgaatccacggagtctcagttcacacttaacttaccacagaatctggtggtttcaaagattgccgtttgggctacggtggcaaatccaataaccaaatatgcgttaaccataacccctctggctatgagtttggaagagttgctgccacgaagtcagcagaagtactcaaacataatcatgcttagatcagccttggtgatatcaaccctcattgttgctctgtcggttcccttcttcgcacttgtgatggctctggttggttctttactcgccatgcttgtgacctacattctaccatgtgcctgctttttggctattcttaagacaaaagtggcttggcatcaggttgtggtatgctcattcatcattgtcgtaggggttacctgcgcttgcgttgggacatactcatccatctctgggattatccagaactactcatgactcctcagaattaaatacatataagggcttattcggtttgattggttttgaaacggattgagggggattaaacaattcattctgatccacttgggaagaggattaaccaagcaaggcccaaaagagaagattgcttgctcaaccacattattgtaagtgtaattatgcatatctatgagcggagcacataaattttgcccagcaatgaagccaaacccatcgatatatgatgtggaattaaatttgtatccttattttatttgtggcaactccatgcatgtatgataccaatgtctgttgatggatttttaccagtaccaattgctacttctgctagataattctcggttgtatggaatttccataaatctatatttagagagagtctagttgtagcaacatgtaacataaattactgttctctagatcatgattaggtatgcagcgtgtattatagaaaaaaa

SEQ ID NO: 4274 - DNA, 932 bp, Avena sativa
gctcaaactgttagccttgtaaaggaatatcagctacctcaagttcacatatcacaattttaccccagaccaggaacacctgctgctaggatgaagaaagtgcctagcattgaagtgaagaaacgaagtcgtgaattgacctcagttttcgaagctttttcaccatatgaaggactgaaaggcaaagtggagaagatatggattactgaaatagccaccgatggtgttcatttggtaggacataccaaaggttatatccaggtccttgtcattgctccagatagtatgttaggaacatcagcagatgcgaagatcacatctgtcggaagatggtctgtatttggtgaagtgatagaagggtctgttgcagtaaaggaagcagcaccaaagcaaaattgtgctgaagtgcaggaagaaaatagacaaaatcatgtggaggaagtcacttgttctacaaacacctgcgattcctgtgcatgctcgggtgcagaaagcgcagcacaacaatgtagccagcaatgtaaagatccatctgatgcacccacagattgcgctgatgatactcgcccggaagcacctcaatctacacttgtgagaagaaatgtggaagggacagtagaaacaaatgaaattggtgcagcaacaccaatagcaaaaggtcagcaggcaaatgtagttactaggagagcactaaatgttgacaggattctttggggtggtctggccgtaagctttgccacaacggcggccgtacttgtgctgcttacctacaagatttctaacacttcttcctattaggctggtgcttgtaactgtaattttcctctccattttgatgattttcctcatggaccgaaccattgtattgccaacttatgtgagcagaaatacaaattctcctgtaatagttttctgtgaattaccatattaca

SEQ ID NO: 4275 - DNA, 1135 bp, Avena sativa
agacaggagttgcacttggccaggaacttgaggataagatgcctatcaatgagtactatgaatactttggtccagattacactcttcatgtagcaccaagtaacatggagaacaaaaactcacaccaccagctggatgatataagaagcaaactgcttgacaatctttcaaaacttcggcatgcccctagcatccaatttcaagagcgacctcctgatacagatttacctgagctggatgaagatgaagagcatccagatgaaaggcacgatgaccctgattctgatatcgatatggattaccctgtatccggatatgcttttggtatggaagactcagcgaggagaagcagtattcaaggcacaagagttaagagagaatctgctggaactgagaccaaagatcaggacggtagcagatcaacagctgaacatagaggaccagaacccatggaagaagacggtggtccctccaagcaagttcatccggtccatgctaatgcaatggctgtggacgagccaggaaatgtcaagactgaacacgggagctctatcaagttggcagacccaccagccatctaccagaagccatgactgcattgctaggccagctcgattccttgtgctcctacatgttttgacggtcgaaaaacgaagtgaatcacccatacaattttttgcatttcggattgaactggcggtctacccatctgtagatgtgcttctgtaggcagtactttgaggtggagacaatatatagtctgacccatcaggtagcgtggatcaagttgtaatgtatagtcgaactatagtcgattaagtgtacgtttggtctggaaccaaacgagggatgggatgggatggtcccctttttagacatgtttggttgacgaaaaaaaaaaaaaagttattaatcgcgatctagaactagttcccttttttttttttttattgatgttacaaaaagaaaggagatgaagttattctacaatatttcttacaaacaactcccagtcccaaaattccatgtataaccgctatggaccgttccatgtaattttcatacatcaggttgggaaggactagcgtgacaaaaaaccacaaagcatttcaatctcctaggctcaaaccgttgc

SEQ ID NO: 4276 - DNA, 991 bp, Avena sativa
agccgaagattctactccaagaaggggtcggcaaaggttccttgcagcatatacagcatagctcaggtctcatacgagctgaacgtcctgggaacccgaggtcctaggcggatgcactgtgtaatgcagtccatccctgcctcatgccttgaggctggtggcagtgttccttgccaaccggatgtcctccattcccgttccctagacgaagaatctttcagcagcatgtcgatctcgaaatcgtctgccgtggaccattcggtgcgtttcagcagtgcccgtttctccgacctcttcggtggtgggtcggggatgagagggcaggcatcgagtgatgacgacgagtgcaagaacacggctttgattctccacaacaaggctccaagatggcacgagcagctgcagtgctggtgcctcaacttccgtggccgcgtgaccgtcgcttccgtgaagaacttccagctgaccgccgccacgcagcctcctgctggagccccaactccgccacaccctgctcctccaacaactccaccagagcatgataaggtgatactgcagttcggcaaggttgccaaggatatgttcaccatggacttccgctacccgctgtcggccttccaggccttcgccctctccctgagcagcttcgacaccaagttggcctgtgaatagaagaatcgccttattcgagaagctggtcatcggaaggtaaatgctggacgtccccaaaatagttggggatgccattgtgttgttgtatgtcgttgatgatgccattgcgacttaaaaacaactggaagcaaaggaaagtgctgtttgtttagcattgggaactgttgtgtgtgtgtgtttataatttatagcagacttcatggggttgttcatgtatttactgaatgaactgtaaacttgatgtaacctgatgtcgttcaaaaccaaactttggtaatttcgctggcgaggccgataaaatggaacatgtggtcattgc

SEQ ID NO: 4277 - DNA, 951 bp, Avena sativa
acagcgagaagatcgctcctcccaacgtcaccctccgccccaccgcctcaaggccatcaacgacctccgcgccctcctcgccaaggcctgcggcgccgtcgtctcctgcgccgacatcgccgcccttgctgctcgcgactccgtccaactcgctggcggcccgcactacccagtcccgctcggccgccgcgacgggctcgtcccggccaacctcacgaccatcttgggcgcgctcccgccgcccacatccaacgtgaccaccctcctacgcttcctcgccaagataagcctcgacgccgacgacctcgtggcgctctccggcgcgcacacgctcggcatcgcgcactgcacctccttccaggagcggctattccccaaccaagaccccaccatggacaagtggttcgccggccagctaaagctcacatgccccgccctcaacatcaccaacaccaccaacaacgacatccgcacccccaacgtgttcgacaataagtactacctcgacctgctcaaccgccagggcctcttcacctccgaccaggacatgcacaccgacgccaggaccaagcccaaagtcaccaagttcgccgtcgaccaggccgccttcttcgaccagtacgtcttctccgtcatcaagatggggcagatcaacgtgctcaccggcaaccagggacagatacgcaacgactgctccgcgcctaacgccgcccgcagcagcaacgacgagctgccgtggtccgtgctggagaccgtcgcagagactttggcgctgtagtttactgatactagtcgatcgaaaatctctagcttgttttatatattggcgatgttgcggtttgatcagcgaggttggtaataaaggtttgggcttcacaagtgtgcaagggtgtttagttcgttgagcacactttctcagttaataataatgagattgatggattttgtcga

SEQ ID NO: 4278 - DNA, 916 bp, Avena sativa
gatgttggccgcatccatccaccaacccaccctgctgccacctgctcattaattccctccccctccccctagccctgctccaagctaagaattcgtctgaagaaacccagcaccgtctgcgccatggcgtcggagcaagtgatcgggaagctcagcgtccgcgtggtgcgggggacacaacctcatcatcgccgacccgctcaccccacaccagcgaccccctacgtcgtcctctcctacggttccccagagggtgatcaagactagtgttcagaagaagaatgccaatcctgtatggaatgaagtactgctgcttcctgtaacaaatcctacaaagccagtgaaactcgaggttttcgacgaggatagattcacggccgatgacagcatgggaaccgctgagttcaatgtaactgacatctacgatgctgcaaagctggatctgaagcatgcctctgacgggacaaggatcaaaaccatctaccctgttggcacaaactaccttggcggtgagagccacgtctcgtggaagaatggcaaggtcgtacaggacttgattctgaagttgaagaacgtcgacagcggctctgtcgtgctgcagctggagtgggtccatgtccctggcgttacgctgtaagctgcttccgactgaagaatgttactgcaacctggtttcatgaggctacagctatggtcggtacatgttcctggtgtcacaatcgtaaacaatgcgtggatgtttggtttgcagtgtataaggtgtgtgtgtgtgcgatgttatttcggtgtgatttgtgtactgtatttgtagtacatcctggtgtggttgtgaacttgtggaaattggctcgtgtggaaatcttcatgtgaaattcagcctccgttaggatgcacttctatgtaattcaatggaaat

SEQ ID NO: 4279 - DNA, 1001 bp, Avena sativa
tatctacaatgtcaaacttatagtattggaagcttcataagttacattttcataatatatgaatttgaactaataagtgttgatatattttttcttatatttttggtcaaaagttgataaagtttgactctgcaaaaatattagaacacgaagtaataaaagacgaagggagtactatcaaacaagatggcggagccaatagcagcatacttccggcgcaaacaaacactataccgtcagaaacaacatactagataaaaatatcttgttacaccaccacgagcccagtcagggctaaacatgtcttagaataactgacgtattaagatgcatgcgtacatgtcgggccacacttagaatcccgcatgtgtatatgcgacaagtcacatatgtatttatgcagctgattaattggaagatgatcatgcatcagtcgtcaacccattgccagcttatcattttccgcacgagaaaacacaacctggcattctccaactgttttccccttgaaaccagctgcactgtataggaagtagtactcccatgtacgtatgaacttgtcatcaaagccaagtgccaaaatttcatctttgttatccatcaagttgtccctccaacatcccagagttcggtagtactggtcccaactaatatcctcgaggcgctttatgcacaacccatttgaagcggaaaccgtctttatcctagacaaagaaggaagtgaacccccagggaagatgaactcttttatgaagtctgtgcttctaatgtattcctcatagagttcatcgtgcattgtgatggcctgcatggatcacatatgtacatatgcacatagaactggtagttagttgctttattccactaagttaaagtatgttgagaactggaccaagctgtttccctataactgaaggatgcactgcgtgttgcaccgggaatcttgtcaagaactctacctgaatgacaaataagccaatcttcagttaggtgagagtggc

SEQ ID NO: 4280 - DNA, 1514 bp, Avena sativa
gcatcctcataggactggcaagtggattggaaactatttgtgggcaggcgtacggagcagaacagtatcataagttatccttgtacacctataggtccatcatcgtactactttttgtgagtgtacccatcgccattctatgggctttcattccagaagtacttcctctcataggcgaggaaccacaaataacaaatgaggctgggaaatatgcattatggcttatccctggtttatttgccttcagtgttgcccaatgcttttcaaagtttctgcagtgtcaaagtctaatctttcctatggttcttagctccttgattacactttctgtatttattcctttgtgttggttcatggtttataaagctgggatgggtaatgctggagctgctttatccgtgagcatctgtgactgggttgaagtgactgttcttggtctttacattaatttctcaccttcttgtgagaaaacgcgcgctccaccctcgtgggaagcttttagcgggattggcagtttcatgcgtttggctgtaccgtccgctcttatgatttgccttgagtggtggtcttacgagctgcttgttctgctttctgggatcttaccaaatccagcacttgagacttccgtgctttcaatatgcatatctacagtggtactgttgtacaatcttccttacggtatcggaacagctgcaagtgtgcgtgtctcaaatgaactaggtgctggcaatccgaacggtgcccgcttggtggtaggtgttgcactgtctattgtagcttgttcagcagtcgtggtgagcgtaagtcttctagcattgcgccacttcattggaattgcattcagcaatgaggaggaggttataagttatgtcaccagaatggtacctgtgatctccatttcagtaattacggacagcctccagggagtgctttcaggtgttgctcggggcggtggatggcagcatctaggggcgtatgttaacttgggcgcgttctatcttgtcgggatccccgttgcgctcttttttggttttgcaatgcaactaagaggaatgggattttggattggcatgatagctggtggagccatacaggtcactctcctatctgtgattactgctacgacaaagtgggacaagatggctgacaaggctaaggagagagtatttgaggaaaggctcccaacacaataaaccttgaacaactaccatgccaaacttttgaaaggatgaaaatgaataagattctgtaacttcctacttgtaggatgacaccggcatttgcttggctagatgacttccccagcagagccacacaggaatacatggcatcttacaatactgtttttggatcttggaaacaaagatgagggaatgatccgttagctatttcagacttagtagctcaaatggcccctatccaagggcatggttaatcaactaggttgacactctacagaggttgcacattttctccacgtgacacgatcaatatttttgtttgttacacaagtg

SEQ ID NO: 4281 - DNA, 949 bp, Avena sativa
tatctgtcgtttagtggattgcaactagtgagttgtcatcatgatacgaaattcattgttctttctaaaatcaaatcatgtagaggatttttgctcggcttgcatcaagtctcgtatgtttgtgcctgtgttactatttgttatggtgtatgtagcagctgttgtgattactgtgattaccttctcggttctcttatgaatttctttttgcttagcctcctgaactgcttgatgctgaagctttatgtaggtttttcacaggctcttggtgtcgcacgaattaatgactgagcacttatatttggacttccctttcatttcctgtcttgagtttaatgttctgtttctggagaaacttacaatcgatgttaaattctgcaggtcgctttcaaaacaaaggtgttccatccaaacgttaacagcaatggcagcatctgccttgatatcttgaaggagcagtggagtcctgcactgacaatctcaaaggtcagcttgctactcttccattctaattcctagtaaatcataacagcttcacacgttgaattcaagaacggaactaaacttaatctgtcgggccaaggttgcaaccccatgttctctatgctggcttagtaccaaattctatagcaaatttactttaatgactccagttgttaactaactaattttatgtggacgttcattcaggtgctcctctcaatctgctccctactgacggacccaaaccccgacgatccactggttccggagattgctcacatgtacaaagcggatcgaacaaagtacgagtctaccgcgaggagctggacccagaagtacgccatgggttaacattcttcaacatgaagaatttggtgcacttttcagagatcctactgtatcacctaggattctcatgtgatattcagcatttaagaaacagcagcatgaaccaaactgaatctaa

SEQ ID NO: 4282 - DNA, 954 bp, Avena sativa
cggatgtgtaatccttttcccgatcgcagttacattttacataacatggtggttcttttgctttgtggacggctttttctctccaatatatgctcatcttggaatcaacataattggccttggttttgtaacttccatatcgttcatttttgtggttggagtgttcatgtcttcttggcttggggcttctgttcttggtctgggagagtggtttataaaacgaatgccatttgtccgccatatttacaatgcatctaaacaaatcagtgctgccatttcacctgatcaaaacaagcaggcattcaaggaagtggtcatcataaggcatcctcgagttggtgaatacgcatttggatttatcacttcagaagttctacttcagagttattctagagaggaagagttgtactgtgtgtatgtcccaacaaaccatctttacattggggacatgtttctggtcacctcgagcgatgttatgagaccaaacttatctgttcgtgaaggcatcgagattgttgtctctggcggcatgtcaatgcctcaagtattatcaatactggaaacagaggacaaccaattgaacagaatgagatacagtcgaagctgagatagctctaacatgtcagattgtttttgtactctgccattgaaccattgatggtcacagtaagcaccagaattggatctgatctgatggataggttgtacaattattctgataggaatgtgcaatcttgtgtacactctctcgagcattcagtcattgcatactccctcgagcggtcactcagaccataatctgaatgtgtgtgggctcgcttgtgcaagaagttaagagtcgtggtatgtttagtaagttagagttgactcctgagtgacaggcccggcttacccggtgtaatagaattttgtagcataatttctttggtaatgagcagatttaggtcaaaaaaa

SEQ ID NO: 4283 - DNA, 1001 bp, Avena sativa
ccaagccctttcatgccgccaccgtcgccgtggatgaatcagagaccactgggggttgatgtgaacgttgcttacgaggagagccgtgaggaccctgacagaatggtgcaacccccgccactgactcaggattttctgatgatgtcttctggaaagcgcaagagggatgaatatcctggtcagctcccttcgggttctttcgtgccacaacaggatggaagtgcagaccaggttctcgaatttgtggcatcaaaggataatgcacggcagttatggaattccattatgaacaggcaagagtcagcaactaatgtatcttcgatcaaagaaacggccatgagtccagttcttcctcaatgtgatgggatacaagatgactataataatgatcagtttttcttcccaggagttccaacagaagactataacacccctggcgaatcttcggagtatcgaactcccacgcctgctgttgcaacaccaagaccaagaaacgatacaggggatgatgatgatgatgatgagcctcctcttaatgaagatgatgacgatgacgatgaggcagatgacttcacggacgataatgatgaacctaacacacaacaccttgtccttgcacaatttgacaaagtgacaaggacaaagaatcgctggaagtgcacattgaaggatggtatcatgcatttgaatggcagagatgttctattcaacaaggcttcaggggagtttgatttttgaattttgtggtaaagatgatattttaggaaatcctgtatcgactctctgtcttttaacataagaagaatggggaggtgacaaagctggtgcggtggcaagtttggcactattatcatgtgtcgtgttttgctgttgaggcttgcttcacccagttaggttgttaccataactgctgtcactgtaaaaatgatacacatggcactgttgtgggcattttcttgagatggtcacttgaagctggtgcgaatctattcgtatctgat

SEQ ID NO: 4284 - DNA, 1081 bp, Avena sativa
gcatacacaagaggaaccattgaggaaagcaaggaagaagtcgtgggtagcagggataaccacagggctgtcaccttgcctcacattcctatcatgggcactggacttctggtatggcgggaaattggcacagtccggggagatcaccgcgggcgatgtcttcaaaacctttttcgtcttggtgagcacaggaaagctgattgcggatgctggcagtatgacatccgacctggcaaagggtgcaaatgctgttgcttcagtgttcgaggtcctagataggaaatctatctccccgcaaaatccacaggtggaaaaggacaacccgaagagcaaaatacaaggaagaatagagttcaaaaaggtagattttgcatatccaacaagaccagaatgcctaatcctgcaggattttagcttggacgtcaaggcaggaacaagtattggcctggtgggtagaagtggatgtggtaaatctactatcataggtttgatccagaggttctacgacgttgatagaggtgcagtaaggattgatggtatggatgtgagggagatgaatattctttggtttcgaggatttacagctctagtcagtcaggagccggcgatgttttctggtagtgtcagggacaacattgccttcggtaaaccagaagctgatgaagaagagattgtggaagctgctaaatccgcaaatgcacatgaattcatctcatctctgaaggacggatatgatactgattgtggagagcatggtatccaactatcaggaggacagaagcaaagaatagcaattgcgagggcaataatccgcaatccagctatactactacttgatgaagcaacaagtgctcttgacgcacagtcggagcaagtggtgcaggaggcacttgatcgaatcatgtcagggaggaccacaatcgtggtggcacatcgactaaacacgatcaagaacgcagactcaatagccttcttaggagagggcaaggtgattgagcgtggtacttatccacagctcatgaacaagaaggtgcattcataacctggcaaccttcagaaataaactgattgtataatgtaa

SEQ ID NO: 4285 - DNA, 404 bp, Avena sativa
gagtgcatcaatacaggacggtttgtagaaagcttattccagctggattaacgcctccaagccgtccgcctacgacgattcaaaccacagtttgtcaaagaactgaccgctgatatatcaaaaacgaacttgattgcatgtgtgtaacaattgttcttggcatacttggcaagattctggccccatgagattgagaatctgtacgagttgacgcccagcttatgcatgatttccacatcttcctgtttcggggacaatggcagcagtacacattggtatttggtacaattaagacgcatgatatggggattactagggattgtctgtctgctgaatctgtaccatgtaccggtggtagtgattgtctgctacatccccattacgtccatccctgatgttcccag

SEQ ID NO: 4286 - DNA, 309 bp, Avena sativa
taaccatgccagcagctgcatccatccaacattgcattgtatagttttggacttgtagcagggaaaaggagataaaagaaggatattgaacccgccacgaatgctaccgacgtcactcctggaacacgaagaaacaccaggcaaacggttggtttcttacaccagggaaaagttctacaactctgcacgagttcagttttcatgagaaaaaaacaaaaatatacatacctctagttcgtggtgatgagaaagcaggcaaacccatcatgttacaaaatatgtgagcaacaataggagacacaagattac

SEQ ID NO: 4287 - DNA, 294 bp, Avena sativa
taggcgaagtaactcaagtagctaatggatatagacaaaattaagggctattattagcaagtgaaatatgaattagcaatagttgtgtctagctgactaccttattgaaattgatcaatgcattatcaagaccacctaaagtactaaggaaatagctatcaagataatacatatctacatattggataatgcataaattcatcacaattcagttcaaatcttgcttttataggcaccccactattttttgagactctagagtttaaatagaaatggaactgtagccatgttaac

SEQ ID NO: 4288 - DNA, 313 bp, Avena sativa
cccatgaagactagaatcttgaagattagcagggtaccaactcccttttttcctaccaatgagaggccacattacaccccacgagaggatgccgcctagcagaacagacacattcacaatgtgtgggcagatcatgccaaccccaacatatgtaggagagaaatcaaagaagaacctggaagatgataagtcaagttcagtataggagaccaatgccttgggactaacttttagtgaacggaaatggtaagaaaatgttaggacactagacgcagatagccatgacaagagaagagaaacataatgttgcaaa

SEQ ID NO: 4289 - DNA, 352 bp, Avena sativa
tagtagtgaagctagttaattgtggctttgcgcaccgctgtgtaaataattttactaccaattaattatacaggtaatctggtaccataccttggcatccatgctgttcgtaagggttgccttggtagccatgccaacactggcatctgtaaccttgtgttgaatcatctgtaacgtcaaggcactcacgggtgtacgtgtcgctgaggcatccgaagtcacttgaattactagcctcagcacatgacaaggtactgaacacccaactgacagtcgtcctgactggtgcccctggtatggtgtgtagtacgccgtcggggacaccaaggcggctgtaagccgataccgcctt

SEQ ID NO: 4290 - DNA, 544 bp, Avena sativa
agtgcaggagaagcttcattctttgtgcaagcagctgtccagtgagcctaatcacttaaggtgtgagaaaaaggaaccaaaaggaactgacactgacaatgctatccaaactacagcccatgtctcaacagcagaagcatctgaggaactaggtttcattttcttctatattgtttgctaatcttagtatggtttctttaatggcacaaaggataatctaaactagtttttctccttaagtcaactagtagtatatcacaaattaatccagccacttgtatacacaaaacgcatgcgtagtatactatagtactccaacaataggcgtcaagaggaggggatgagtaagttgcatgattgatgatctcgctcaagtcaaacacacctcctcaatcctcatccaccctttcttgctcttaccaatcaatggctccggctctgatcaaggtcgccgccgtggttgctgccctcgccgccctgctcacgctgagcacggggcagcagacacacgaagaagattgcggcgtaaggtgctacatcagct

SEQ ID NO: 4291 - DNA, 284 bp, Avena sativa
taataacaatctttagtatatgtgtgctgaaatacatagtagtacagttttcacatcattcgtaacatatgctagtactactgctagtcggttaaatctcacgtaatttggaagaaaatttacggttgagtatactgaaatagtatgtgtcatatttttatgtgcgtgtttcgttgcagagcttgccggtgcaggtgcgagcccaagcggcggacactatggcgacagaggcgcggtgccgggtgcaggacccggtgtacggatgcgccgggatcatcagcagg

SEQ ID NO: 4292 - DNA, 394 bp, Avena sativa
catctccgagatctgtccttctccggccaggtttcctcctccatcctccgttcgtcgcgagtggtggcggaagaaggaccacaccgccttgaaccaggctgcaacactggaagtagaagcagagaccattggcatgtgcacctctccctgtctctgttacgcacacacaaacacacacatctaatctcctccctccctctctgcatctcaatctcaactcgcctcacctcattgatccgctctgagcaagcaccaacattcacatgcagatctttctcctctgcgaaagggtaggcctgcacatgatccttccggtagatagtgggcgggtagaaagccacgtacccgccgatctcccacaagatccgctgagcccagtacccccggatcacat

SEQ ID NO: 4293 - DNA, 367 bp, Avena sativa
atccacgctcaaggaccgtgatgctctttatgcccgaatcttccttggcttctgataaatagtccgaaaacattcttgcacaagttggaccgcgcacctgcactggatccatcgatggatccagtgcaggccaaaagcatgtgatgcagctctgaaagtaagagttgtagggaactgaactcttccatgtctaaaccaaccatcttaccttcaggaggagttcagttttctccaacatcttatcttcagccctgtctaaaccagtgcagtgtgttagctcggctagccaccatcgtagtcagagaatttggcagatgaatgtgagtgttggatgggaccagatctttacttactgcactgatccatc

SEQ ID NO: 4294 - DNA, 478 bp, Avena sativa
gcacacattcgccgatcaaatctccaatagaacatcattttctcaacaagatatatataacatatgcagttaacattaaggaattaattatcgttggtactgatcaccagtttaaaagtttaagtttcaagatatgaaggatcaaatgtgcagttgtgcactaagcttcttgaagtgccaatattgacagggatacaatggaacatagagatggcaaaaactcgcaaatggaacagtctcacgcagcaataccataaggtcactcgcacatacttctatcagaaagctattgtgtctatttccaaaatcatattaagagagctagatagtcaatttatggacaagacaatggggcaggcagactataggttgagatgagaagacaaaacaatgtaatcaaactacagatgacaatattcaaacatgagcagccgagctaacaaatgcgaattatttagaacttacctttatatgcttc

SEQ ID NO: 4295 - DNA, 488 bp, Avena sativa
atttacacttgcaaatgaaatcagacgtgtatgattggagaagacaagttgaagagtattctaacataatttccagaaaaggaaaagatacatcaatcacgaattttgaacaatgaagcgcctattgtttcttgccggctcactgctgtaagaatccacagtacaaaacagctgaaccggtcgccttaaatgtgcctcaggagctgcatctgcaaagatcagtgtgctattcttgtataactcatgattgcatggaagtatgcgaacagaatctccctcttcatattcaacaaggcaaatatagcatctgcattgtggaggaaggattattagtaaaaaaagacatggttgtttaaatttattcaatagatatgtacaaacatcaaagaaacccaaaaggcaatatttacaaataaatacatgaaaaaataagggtcaaacgctccattgttgtaacatgtatcagtgctagacggctggaaatgatc

SEQ ID NO: 4296 - DNA, 605 bp, Avena sativa
gccacagacaaaggaaaagcaaagatatctccattaacgaggtgtgcacaaggattaggcgcgtgtgcagatgatggattatgttaagatgccatatgttgttctgtagtccaatactgtgttgttatgtcaccggtaaagtagcgtgtttccttccgtatctctgatttctcggaagtgttaattagtttttctatggcaacgagcactgctggacaacaaaaaatttaacaaatttgatgataaccagacgtcaaaattttactagatattctcttctatagctatttcctttgtctgtttgcatgtttccttactttattcaatgtatttagttgaatttgatttgtgcaccgagccaagagtgatgttctccaagtacttggattactatatattgtacattctcttttcttgcatctgatcctgttatattacgttcagtcgtgggaacctgggtgcttcgtttaaataatctgaaggaaatgcctcttgctacacaccgcatcacatgtactcatgtctcatcttcaaggaattcaaggttgagttcctaaactcttcttctcctccttttccctttgcctctaatcttcactttatct

SEQ ID NO: 4297 - DNA, 264 bp, Avena sativa
gttcgtagcacaatttttttcatttactctctgtatggtactcaataaattggcaagttgaaaacattatatgcagccaactggcgtacgatacgccaccatcaagtagcctcctgatcatcctaaataaatcatgattgcccagaacaaaggttttacagttctaaacagcaattcctacttcttatttttccctaaaattgattcttgtcaggttccacactatctcagtatgtaaggttaacacaatgttcacaccgatac

SEQ ID NO: 4298 - DNA, 371 bp, Avena sativa
ctacatgtgttgccacatgatcacaatgtactaccacatttttggactttaaaatactgaatactacatatctctttttcttttgttctacctattcacgattcttctttttaaattgatcgttttgtccccttcaaaaaaaagttttagatccttttgtttcttcatatagatatctgcatgatgtttaaattcttccaactccaacgtcgttgtattatcacattatgaagtcattttggagttggggacactgtcttaaactaaaacatatacttcatgtcctgtcttacgatgtgacttatctcagtgaatattatatgttcttttgagcatgggacatctgacagcttaaacgtgtatctgcactg

SEQ ID NO: 4299 - DNA, 342 bp, Avena sativa
ttgtagttaactaattctagtggttcagacttcttttttttattcagtggaagctgtgagtgttttatctcagaatctagagagtgatattgagctagcaggttgggactcgtaagcgacgcgattcctcttttgataggcaagcagacacatcaacatcctgtaccgagagtatgcaggtttttctacacaaagatttgcctgtgagacataattgcttcctgatgtacctcaactatatatagctgacatatttggatatttggaattcactgaaaggccatggactgcatttcagagctgcacctactctgtaaccgtgaagagtcaaaatgctgcact

SEQ ID NO: 4300 - DNA, 310 bp, Avena sativa
aagatagatgtgtgccgagcgagggcggtgcctcctgttttcccggtcaatgaagagttgtgttgcgctctatgtagctagctagacttccagaccttgactccagccatgaacatgtactcctactccgtgctatctagctgtccgagagaagaaaaaaaatacattctgcgggcagcccatgatcgtctacgagaaagaaacggaaatctgagcgttggtcttgcgtgcaatgaggttattacgctggcgctaacgaacgccacacagtgcctgcacacacacacactcacaaacacgaccctgcact

SEQ ID NO: 4301 - DNA, 480 bp, Avena sativa
gtgcaggactgggcggatggcctccaggttggccgcgtccacgcggctggtcgcgtacaccccgagctgctccgacgttcagagttagtgtcagccatcagagctcgtctaatcttgagagcagagtagcctacgtcgtagactcgcagtgggtagcgttgcaggcgaatccattgtccgcgttgcgctcggcgctcctcgccggtagcggtgggcttcgccttcgccgccgcggcagcccacctcacgtcgtgcgctctttccctcccactcgtgtacccgctgcacacaagccgctcgcggaaatacctgaaagaaacacctggcactcagcatcttgatctgtgtcgtttacagccttgcagattagttttgttgtatctggcgcttacgaattctccttttcatgtgtccacaggagaaactgatccaagcagcctgggtcaacatctgcgagcttactcctctgtcactttgtaa

SEQ ID NO: 4302 - DNA, 375 bp, Avena sativa
ttgaggtgctgatatgagaagaatcagggaggttggatttggggacaaagagaaattgaggttgaggaggacctctgatctggttggagatgggcagatacagaggcgatgcaaggcatggagagagatctgtaaagatattgtgcagagcccagagttctgcgggaaactcacatttccgctgtctcttaagcaggtaaagatccaactgacatttaatatcctgacgtgtattttgttctcatctcacgtcctaaaataactgcaactgagaaacgactgtcgcccgattatttaagaaatcaacatagtatttgttggtatgcttaacaagtggtagtttgcaattttctcctaggtaattgaaaagtagct

SEQ ID NO: 4303 - DNA, 280 bp, Avena sativa
tccagtgcagatgcagtcggcaaggagaatgcgcaaacagagatcagcaggatgcagaaagagatattagtgctgcaaactgagaaagagttcataaagagctcctatgagagtggaattgcaaagtattgggatcttgaaaaggaaatcaatgaaaaacatgaagaagtctgctacttccaagaggagttcaacgaaagcgctgtgattgaagatgatgaggccagagctttgatgacagcaagtgctcttaaatcttgtgaagacaccatttccaaaa

SEQ ID NO: 4304 - DNA, 265 bp, Avena sativa
gatgggatcccagtgcaggggattacgaagtggctgtcatatagcagattttgtacaaccaaaataatcacattgcatagcaaaacttttcaagcattaaccattttcaatccatttaaattcagcaaacttgatgttccataatagtatgcatcagctccatgaccagcgatgcattacagtacttgaggcaccagaaccaagagtaacgagcaacaaaggaaacaatacggcaactaaatactgatagataggtatgacttgc

SEQ ID NO: 4305 - DNA, 256 bp, Avena sativa
attacgcaactactcggcagcgtctgggcatcctgcgctcccggcaggtgtgcacgccccactatttcaagtccgcacattttcgcgattccaccactcgccgccccagcaatcacccgacacctgctctctctttctctgtctctctctaggcgcaggggagacccgtgaccgatcgtctcgccgcgtccccgagcagtggtggtggcagagcggccggccagcaatggaggcgggcgtggggctggcgctgcac

SEQ ID NO: 4306 - DNA, 230 bp, Avena sativa
gcctatagtccctgatggtgggaacgacaaggttacttggacactagaaccttcagggaggttctcagtgagcgacaaccctggcactttgcaaaaactatctgaaaatctaggataccactaaaagtaaagatcttctgttggtagctggccaaagatagattaccatcacatcagcaaatcaactacagacatggcccctcggatcgcaagtgtgccctctgcactgg

SEQ ID NO: 4307 - DNA, 341 bp, Avena sativa
acgacagaaagatcctttattatctcaaaatcctagggaagagcatacacctcaatatccaagtaagcaattaaaactctatacatctgattctttgaacaaaattgctagaaataaagatagacatgtaaatctgatccttcaacttaatcttacaattacatctaaagtaacaaatctgcacatgccaatgaacctccatactgtatgggaatataatgtgatttgatttaatctaaaattctaaacaatgtatcggaacaagcgtgtatagtttggagacctcccctatggcggcggcggcgacaccggcggtagcggggtgcagagataataaagga

SEQ ID NO: 4308 - DNA, 272 bp, Avena sativa
ttagaagaagaaaatacggatacggtggacccgcacttgcctggcgacacgatctaatcagtcaacgtcaggccagactgggtcctggttctgtttttagggcgagggctttttttggactaataactagccctcggaggctctcttggactgactagcccttcagtaacatgcttcgccaaaaatccaaaaatatttgcctagaaacacggtgtttttgacctgcaaatcgtctctctttagagctctctttctctaggtacgccccgata

SEQ ID NO: 4309 - DNA, 401 bp, Avena sativa
gcagtgacctgagatgcttaaacttttgaattcaagatgtctcaaggaggtgagaagtagaagtgctacaatggcttcttttgaaggtcttaaatcccttgtcagtctggaggagttgaaagttgagaactctccaggcttcacaacatcctggctctccgcagcggcagaagttgggagcgaacacagccacttcatgggaacacttcaggtccttgatactgatgacattggtttcctatgtatgcccatatgcagccagttaacttctctgaagaaattgatcgttcatggagcctgtatggtgggagtattcacagatgacaatgagaaagcacttctacttctcacctccttgagacatcttgaattcaaaaagtttaagcatctcaggtcactgc

SEQ ID NO: 4310 - DNA, 258 bp, Avena sativa
gcaggtgagctcgtgagccggttaatctccttcctcctgaagtaccactcctccttgagccatgcagaatcagagggcaatgggcggaggggacactaaattctccaatctttctcgggcatggaaaaaacctgaagtatctagctctaagctggtgtcaccttggggaagatccactggggatgctcgcaccccacctgccgaacctcacatatctgaaacttaacaacatgtgtggtgcaaatactttggttctct

SEQ ID NO: 4311 - DNA, 512 bp, Avena sativa
cccttatagaggagccctcgggagctgcccgagcgtctgtattatctgcaagtggtttcgtctctgagtgtgtggcagccacttgtgcagaagattgacattggcggagaccagatgatgcattgccgttactcgttgcaccaccagagttggaattcatccccccagctgcatcaggaagtacggtcaaaatgactatgttacttcattaaagtgaccggccaggattactcttaaagaacttgaacaaatcatgacatatatacagttgcatgtttggaactagttatgtgcttccatacatacttcagataagtctcttacacctcatatgcctagcaaactatttagcgagcatatgaagcacgtttgcggaagctgatagcttaactaactatagagaccgataatccatagggcagcggccatctatgaaccgctggatagaatgtgaccaaagccaccatctttccttctgcggccctgacagtgctgtacatgggaatgggcag

SEQ ID NO: 4312 - DNA, 308 bp, Avena sativa
tttgtgtttttctgcacgagtacctgcttcatcacacatccaattcaaatcagctgaccttttcttttgctcaacccgttttctgtcacctgccagcttgtgtggttagctatgcacgacaccaatccacaatctgtttgtctttttaaaataatcatgcaccctaacctgtacatcaacaccaaacagtctcacttgctggaacctggcgcctctacctggaagtccaagatcaaatactctcaggagttaagctctcctttttgcctttttgtttccactccggtgcgcagaactctggacatagt

SEQ ID NO: 4313 - DNA, 265 bp, Avena sativa
cacatacaacaaacagtttctgacgtctcctggtaggtcactgtagctcacagttaaaactgcttgaacgtgatgattttctgacaactcgctttgaagctgcttgtacttttgtgcccaaatgtctaatcgctgtgtggaagacaacatgctgccaatgataacggttgctagaggcatgccttgacacctgttaactatagaaccagcaatttccacaaactctacgggacacatgtggccctttttgttgcaaaatgccctt

SEQ ID NO: 4314 - DNA, 292 bp, Avena sativa
gatggtccagtgcagtattgcttagtagtgaactaatcagacagctttcaacctgatagctcatgaatagtgttatgctataactttcttatgtcataattttaagtttacagtaatatttgcatggcctgtcatgtttgaccataggcaatagcccatggagagagtgcagcactgtatgcaaacaggagtctctgtaagctgctcatgggcgatggtgatggcgctttgtcagatgctctcaagtgcagaatgctgcgacctaagtgggcaaaagcttgctaccgtcaag

SEQ ID NO: 4315 - DNA, 399 bp, Avena sativa
cagtgcagcggtacctagaggacgacttccatccccgtacaacagaatttgacatccttaagtggtgggatgtgaattctgcaagatatccaacgcttggcagaattgtccgtgatgtgttggctatttcggcatcatcagttgcctccaaatcttcatttagcacatgtggtagagttattacagaccataggagtagcctagcacttgaaacggttgaggctttgatgttctatggagactggattaaacctgacagtaagtacctatttgatcccgtagttgttgcataaatgtctcttgtggcatatattaacttgtagttcttgcatgttcttccgaaagaagcacatcacatgttttttgacagttgatgagttggaccattgaagacgctat

SEQ ID NO: 4316 - DNA, 320 bp, Avena sativa
ctaaaaccatacaaagagcactttcttcactcatagcctttatttcctgtaaaagaacagaatgataaagaacggaataccaataaaacaaatgatgctgagtgaactgggacagcatagcataagatgcatatgcttgcaggttgaatctttgttagggtagatggttgagcacagtacaatctggccacatgccaaaaagatttctacccaacgaacataatagttacctgagatttcacttgcaggctagtccagcaaagagtgtgaatacaaaatcggccaaaagtgtacaagcatcactgtaatttagagtgaat

SEQ ID NO: 4317 - DNA, 505 bp, Avena sativa
agtgcagcatctagtagcttttgtgcatctgacgatgatttgttactgatatagattgttattcgttactgatatagattgttaaattgcttatgctgttcttggtgcttaagtttttctgttatttcgttgggtacctttcaaagtcagggtcatgttcaagcagcatttgagatatcctcaagcgtttaacgttgtgctaggttggacacatgttggccatattcctgggttagctcacttttgtgtcaacaggtaggtgaccacaaactcatcaaagttaattgtccgtgctggttcttacgaagattcatattcgtatgtgcatccacattcttatagtttccctttcccatcctattctttgcccccttgtacactagccaaaaagagagtaagaatattagttcttcgttgtgcttaattaataccgctgaaggatttgtagatgcaatagctagaacccttgctagatggatcatttgtaaccagatgatgagctaca

SEQ ID NO: 4318 - DNA, 387 bp, Avena sativa
attccaaacatgatcatggaccaaaggttgattcggaactaccttgattctgctgcaagcaaggaccgcttagaagtagagtagcgccttatgtgaatttgaaggaagttggttgtttttgtaatcccgtatggaggtttggattcatttgaaacccttcggtacatgagaatccaaaaggatggtttactaggagctcgttaagatggaaattagtagttagccttcggattaatggatgctgcttcaagcaagtaccatttggaaagttggatgtttgcctattcatatgccctatctggcacatctaactttcctaaaatatttggaaagttgaaacatctgcacgccttttgatccgtaaggaagaagtgcagatcttctgaa

SEQ ID NO: 4319 - DNA, 427 bp, Avena sativa
gtgcagcagaccaggaagaaccaaggaaccttctcacgatgtttcttgtaactgaaggttggagtgatccaataaaagacacaagcaaactaacccctttactaaggagagatgacctgacgtgtccatttgagaagacaaacttcagaaaaagggaattggtaatttgtgaatggacaggataattgcttcaacattgaactcaaacgctaggtactcattaacctcgcacaagataacaattacaaaaaatagctttagacatctattaatcggtaattcgttgtatgcctacgtggattacttgctaaatagaaaagccattctagattttccttatcgctggacttgcctatcaatgctcatgttgtcatgcaagcacatcaccttatttgaattagatagaagtttctgcactggaaccatc

SEQ ID NO: 4320 - DNA, 352 bp, Avena sativa
gtgcaggacacacttttgaaaaacagaatgtaatcaggatctactggctccatatcaatgcaacacattaagaacacaatatatatgccagccagctaaaacagtctggttcagagcgtgggggtaatttgcactggttttgatggttgggtagtgcaaagtggacgatttggagttattaaggatattttctgggctactcaagagttaaaggggagtggacttatcccataaacatataaacatgaagaaatatattctgagcacaccatgcttccttatcaatctggaaatttccatcctcaacatgttcaacaggcaaacagtccatctgcaaaactggagcaggtgc

SEQ ID NO: 4321 - DNA, 343 bp, Avena sativa
ggacaacatcgcaaactgaacacacaaataaagctgccaaaactaaaccagcactgcaaaaatttgcccaagaaaacttaaaacagtgccacagtatctcaggcgacatcagatgtacatacaaagtaataacataaagacaactgggcagaatcaggataacgggatttgtagaaacaacaataagagaaatcaggaaagctgttgagaaaagctaatcattgccattttgtcagcaaagctgctcaaaagtttaagagtcaattagctgtcacacatcagcaaactagctaaatgtaacaattcaataaacacatgaactgtcagattattattatgggat

SEQ ID NO: 4322 - DNA, 404 bp, Avena sativa
cctggtacacctgtcaggtcaccttgctaacgaatgatgcccaagaatcgcacaccatcggtgttgctgatgaacacattggtgcagttgtaggacgtgcagggaagaacataacagagatcattcaggtattttcttgcactgcatgcatttgatattatagcaattgcattggcgttcttttactgcaaatggtcaattactcaaagccttttgcatatacatatgtatgcgtgcagtatagatatgcagagttgtgcatcatattagctcaagtgaccggatacataatcttgttaggatctatcaccctctgttataagtcattgaggtattattaaaaaaatgataactgccatcattttttaagttaaaaaacgaagtaatccatgtttagggaagat

SEQ ID NO: 4323 - DNA, 387 bp, Avena sativa
ttgaaacaatatttgaaacatgataatagtcaaaattactggcagcacaatgcacaactggagatgaggcggtgagtattctcagttagtaaacatgataagattaatcatttgtaagcaacactcagtcaaccaaaaaggaggattaagcttacagaaaataaataacgccatgccagctcaacctgggagaacgttcccaagatgctagatcttaagattaagacatgaacaaaagaacgttacagcatgcagtctaaaggagaaagatttcctgactctaaaacgtcaatatagacatgtatgcatcagtagtagaacatgacactgccactactgcttccctgacttttcgggtgttgttgccaaaatagaagtgctacaacc

SEQ ID NO: 4324 - DNA, 382 bp, Avena sativa
atggccgatctgactaataagcacttgggaagattgtccatcgtcggcgaagtcaaatgcagagagcacctgaataaggtacaagcatcctatatagacactacactacatacttcaggaaaagttcgttgcaataggctacttctttttacctatcttgattcagtttccttttttcttcatttaaactatatgagtatgagatgtaaaatattactgtagaacacccgctcattttctttaagataataaaaaaattggatgatccctcatgcaaccataccacaatggaattgcatctttaacacagcctacatggccatgcttaaacaagatcactgaacaacattgcaaaatgatagttcagttaggattagatcat

SEQ ID NO: 4325 - DNA, 350 bp, Avena sativa
cagcatcctccattacagaattgaagaagtcagttgaaataacatttgcagcacggagcttttctccagaataggctaaatatgactcccggtcagcaccagcctgtcatagaaaagtgttgttacagatctgtcctcaagatgacctgggtaacatttcatacttgcagcactttcaagaatgaataacaaactaagagccactgcgtcttcctggagtagataatttggttagatagttgtcaccgtacgtgtggacttgttgcgaaaaaattgatggtcagaagtttgggttaaaaatggcttaagagtctaaagtaaagttggtcacaagtagcaaggcgacatta

SEQ ID NO: 4326 - DNA, 308 bp, Avena sativa
ttccatgttgttatcaattgcaagtggtaaaattgatgtaaaccatatttgttgttttgagattatctagaagaaagtattaatttaaagaagcgtgcaatttcatcatattcatttatagtcatatgaagtcatagtgtcatgtatgctgatcttcagagagttttctagagcacattgctattcagacaaagttctacaataccttgtgaatcagacctttactgtcagttgttttttacagttagtacttggtacatactacatacattgatacaccctctgggccagcaaactctgtttagacg

SEQ ID NO: 4327 - DNA, 338 bp, Avena sativa
tgcaaaccctgaaagacatgccaccccagaccccctgcatggtggccatcattgtttgttaatatatcatcattctttttttttttgcagtggttcttgagatatagtattaattaccccaactccgtagttgaatttgtagccgagaaggtaccccaatggcagtccaaatgcgtagtagcagcctaggttgatgtatgcaacaaggccttgccatcctcctccgatagcaacccctgaagcatgcttgcagagacgttggaggctcaggctggtgacatgaagaaaacaaacacacatcatcaaaatttaggtgtgtgtatacctgaaatcacagg

SEQ ID NO: 4328 - DNA, 373 bp, Avena sativa
aagaacttcggttgccatccgatactccggggacgctcatttcacccactttatcagcaattctggagacctggttatgtccgtagttgatgacagcacccactttatcagcaattctggagacctggttatgtccgtagttgatgacaggatatacagtgtgcgtgcttgtcatggatggattagtgtctctgatgggaaactgtataacttgctgtgccaccgtatattgtgcctccactgggttgccatctcgcaattttgcggcagcagctagccttctcctcttcattctctcctcattgcggacctgattatgatttagcgcggagcatcaagtgagtgacattttgttccgatgaggtactgagta

SEQ ID NO: 4329 - DNA, 384 bp, Avena sativa
gtggaggtatttttcaggttagtgcacctgatggcttgccagtaattgtggatttttctacaaggtcatgtgactgcaagaggtggcagctaagtggaataccctgtgggcatgccattgcttgctgtagacacgataggattaatccagaggacctagtacactcttgttacacagttgagacatatctgaaagcctatggatcctacgttgttcctctgagaagcaaagagcattgggaaaagatgaatggcatttttgtgcatccacccttgtacacaaaaaccattgggaggccaaaaaagaacaggaagaaagatcctagtgagaagaatggaaaactaacaaaacatggtgtcacaatgcattgttcattgtgcaact

SEQ ID NO: 4330 - DNA, 454 bp, Avena sativa
  modified_base (60)..(60): a, c, t, g, unknown or other
acccaccccaacttcagggctaatttataggtgaacttacctcatctgacgtcaaaaggngaacatcgctgagccttgagtagcgtgctcaagtgctctctgttcatccaggttcccatgtaagagagatcttccacgaggcccaggatcaaagaatactgatgttcccgtgtcaatcgcacaatcaatagcagatgcaataacatcaggggataactcatcaaaagcatagccattgctaaacaatattttggagtggtgaatagctgtcttagtttctgctggaagtttctgtatccaactgaaagctggctctttactaaagtctgcccggctgacattgcaaagaaggaaagagcgataagtattaaataagtaaatagcatgcagaacacatgaacaagaatattagctagtctacttttaatataatagggagtgtgtgacaactgac

SEQ ID NO: 4331 - DNA, 441 bp, Avena sativa
gttccctctgtagacaacacctgctaggagaaagatgagataggtcagtcaaacttcacagagggcagtaggctaaatgttactacctccgttgcataatgtaagcctttctagcagttcaatggaacggaggtagtagtaatgttgtatctggaaatggacaactcacttctgatagatgtttatcgttcagcgtttctgcttacgactgtccagacgtttcttcagctgcatagataaaaatcaatacctcagattcaaacagtaagtatgcggcacaaactaaagtaaaatatgatgatccgacaatcttgcataaggccctatagttagatttcttcagacaccggtacttttggaatacagaaactatacaccagtaacaaacacaggaaaactataagcatcgtgcaatatttgcaactggacatcactttacat

SEQ ID NO: 4332 - DNA, 346 bp, Avena sativa
gttatagtacaactcttctttccatagttccttggaatgttcactgttttaggctctctatggatatgagccaaatcttggcatggtacctacggaaccagcagatccatcttcaccagtggcgcaagtggtagcttcctgatgaacattcaggagttggcactgattcgcattgagaacctcccagttaaggtgatgatactgaacaaccaacatctgggaatggtggtgcagtgggaggacaggttttacaaggccaaccgggcgcacacgtaccttgggaacccagaaaatgagagcgagatatatccagattttgtgacaattgctaaaggtttcaatgttc

SEQ ID NO: 4333 - DNA, 418 bp, Avena sativa
gtttgttgtctcgttctcgccatcaagttgaattgtacagtagtattgactactaggacactctttgtcctattagtattgatgatatttggcagtatgagagtactactactaataagaattgggatgttgggaaatcattttgataacacggtaaaaatagctaaatcttgaagattccgattgtaaatgcaggcattgatgatgaattatgttgggtgaattagaatacccccgttgctagatgctcttccaaaagagatgctacttacacaatgacactgttacacaattcagttcataaccctgttacatggacacaaaccggattaaaccaacactcagtaaacagcctgcaatgaccatctcagcaattgcaactcattgcagtgtcaacacaaacaaaggcttctgcact

SEQ ID NO: 4334 - DNA, 311 bp, Avena sativa
cacactacacctgtacctgcaatactatgcacataataaataagtatgcactgcgttcctataattcataaaggtaacgtgcgtatggttcaaaataaggcgccaaggcaaaccaataaccctgcaatgtgcactgcacctaaaatttaaagtaccacgcactgctcctgtaacaaatactgacacccactgcctccgaaataactatgcactgcggtgctatgcttcttaaagcagctttgtgatcggtgtaagataaggaccggccgcagtgcactgaccgtgcaatacactgcaccagtcatgaagtg

SEQ ID NO: 4335 - DNA, 350 bp, Avena sativa
gaaaaataaatgtggggtttcgttctgaaaagtttctgatactttcaggtttctgatgatgctgatccttccttgctttcccttatgatggagctggactcaaccgttggtgaaatcatgtcatctccacctataactctgacactttagaagactgtcttgggtaacttccgcttccctctactccacagcttacaacctctagaacatactagttaatagagaaaagtaaagtgttttcttcgtaagatgcgctaatctgcattttttcataactgcttacatgagcagatgccgctgcactaatgctcaagcacaaagtccacaggatacctgtcctgaatgagcaa

SEQ ID NO: 4336 - DNA, 283 bp, Avena sativa
gaggtagaacctacagtttaaaacctttattttattggagtaaataagtgccagttctcacaattggagtgttctgtgatgtcaggaagccaacgaaaaatttcagcagttgcagaaggtgatatctattcttggagacgaggagaaaagagcattgtatgatgagactggcattactgatgatgatgtgagcttctaatcctagtattttgcttcccttcgttcagtttctgtgaaatattctggaaccttatctttcctcttaggcactggttggagaaga

SEQ ID NO: 4337 - DNA, 407 bp, Avena sativa
acttcactcattatgcaagttgaagatagaaaacgatacttctacttcacttcttttttgtattataagaacaaatattgctgaagaaacaaaatagtactaaaggtagtcaataaagtattaagctgcaaacaaatcaatttttgttttgattaacaaacacacatcattgaatggatgtgaggtgctaagaagaaatcagaactctgaagtaactccatgtctcagtaacctcatcatcataagcatcatggaccacaagtacctgcatcatcataagcatcatggaccacaagtacctgcatgcctaaagatgtttgccagtgtatccatctgtactttacaatgtcatcatatggctgttattgaacttctatcttttttatttgataaatatagaaatgtaa

SEQ ID NO: 4338 - DNA, 432 bp, Avena sativa
ttccataatacgttaatactaaactaggtgttttgtggcaattaagaattaggaatgtagtcttggaagttgacagacgtgggagtatttaattttttgtcctttgtcttgcctatacatttggggacaaactgcacattatattaatacagtaggattgcaaaaaattcagtgactgaaaaaacaagagtattgtgccgcagaatacacaaaatggaatagataatagtagcacgaacacggtcagcaactcttctctggctactccgaagatgcaaaacttgtatgtacaaacttctgtatcacaagcagattcagtcaatatatcgttgccagttgaaaagtatctgcccattgagcatggttagctactagccgctgagagtttttattaccttgcttgatagtgagtcatgccatgtatgtcctctt

SEQ ID NO: 4339 - DNA, 444 bp, Avena sativa
agcatctccgaggccgcgggccagagcagcaacagcagcagtatctctgaatccgctgcgagctgattgccggataagcagtctgattttctccttttcttttcttttcttttgtttttcttagtataaagcgcttggtgttgggacctacctgaaaaaaaaacttgtaaaaaatcagagtaccagagcagcagcaataggaagcttgtttcatctcccgtgtagtgtaattgccatggtgaaactgtgatgagtgttttccatggcgtggcctgctgcgacttggcagtctcaaagccctgttttgaacgcaggagtttgtccaattctttcgcaatctcggaagtgccatttggaacgcaagaatctccccgattattattgcaacttcctaaactgaatgccctgtttggaccgcagaaatttcgccgattggcacggcga

SEQ ID NO: 4340 - DNA, 334 bp, Avena sativa
gatggatccagtgcagacatgggaagtatcgcgatgctcatgttgacctggcagcaggatacagttagcacattatgacattatgcagaagcagcaacttgaaacagctcaaccaccggcgtagcccgaaacttggaaggacgtgaggtaagtaagtaagtaactcacacggtccatgttgcatagcaggaatgagaagaagcagaggacgacgatggtccagcgcttgggtaactgctgccaccaggaggacgcgtctccgaccaggacggcgtcggtggctgggacgtcggacggcgacccggccatctcgtactgctcggccctgcactgg

SEQ ID NO: 4341 - DNA, 320 bp, Avena sativa
acaaaatagtgttgtctagtatagacctttccattttgctctattcaacagatgattgcatgcactcatgcaatatatgcacgcatttaccacctacaattagacatattatttagaataaattaagttcggtataattgtttggacattgatatgtaagtaatggtacttctgatgttggctacagcgtcagacaagaaaccatcgtcacgtgtaagacatgccaagtcgttattagatagttccgcatcaccgatgtccaagaacatagttttttaggtgcggacatgattgattcaataacaacaacatcttcagcg

SEQ ID NO: 4342 - DNA, 326 bp, Avena sativa
aatgaatcaatcttgactttgttgggtatattcatagtaccagctgttttggtatatttgtttgtccatttcgtaagctgatgaaatattttgtttttcttgtttattcagggtttgcaaacatgcttggtggctttgttgtcaaggtacatttgtggctctgcaagatacatttgcatttttctctgggttaagatgcacaatgtagatatgtcttggttgttcctttcatatgtggttttacagtcattgcttaaaagaaaagaaaaaaaaagaaacagacagtactgaccttaaattgtgccatctttcagatggtttaaacc

SEQ ID NO: 4343 - DNA, 310 bp, Avena sativa
gtgcagtacaacaatgatgtgtgttagaagtgaaacaaggattagtttatgttgtgcaaatattgcctgatctacaattgtctagtagaaggtgcatacactgtccatacagtaaagaccgattatctaatggagtaatattaagttgaccagtgactgcttcgcatgatgcagtaccttgcggagcatctggagctggagctggagctggagctgggctagtcttagatgtcgtgagttcttgatcagtggagggtggtcttggtgactccaacttttccaagaaaacagtaggtacattcagagtccc

SEQ ID NO: 4344 - DNA, 167 bp, Avena sativa
cattggtttccaactaggcgaactaaagcttgccgcaaaagcaaacataacgccggttcattcaggcacagagccacaatcaggacattgcatcttgacatatctagtggatagaaaagtaagtcgttaagtttcaaaccaaagtctaactcccgaagccacacaca

SEQ ID NO: 4345 - DNA, 426 bp, Avena sativa
  modified_base (7)..(7): a, c, t, g, unknown or other
gatgganccagtgcaggaactgaagctgtcattcagtcaatacaggacaacgaaaggcaaattgaagaaactgaggcacaagacaatgtatcttacaagcccaaaaagaaaaggcctgattcagcacaaatcagtggtgatgctcgtcgtacaagtgatgatgacctagccacaagtttacgtgactcacgggcacagcctcctgcacgaactctgaatggacctgctgttttcttggaaaatatcaaatcaccaagaccaccctccactgatcaagaacccatgacacttatgactagcccaacaccagctccaggtgctctgcaaggtacctcaccacgttctattggaccatttttagatcagacaacttttacacagtataaattagtcattgtttcactgtttatactaatcattgatgta

SEQ ID NO: 4346 - DNA, 437 bp, Avena sativa
  modified_base (254)..(254): a, c, t, g, unknown or other
cactatagtgctctagtcttcttctgttttttacttgcctggtataatgattcacaggtattgtcaggacagggaatatctcagaaacaacttaaaacttgcagattcaaaaaaatgggtgcaatgtgttgcaatgaatttgttgctccatacctggaccaatatattaagatacggcgaagtttagcctcatggagttagcataaagacataatccagttctggcctaggcattccatattggtagtaaaacnctataattgcaaaagagaaaacatgacaaaaggttacagaagtccaaaacaaaatagctccggaccaaactacaatgtcagtggtccaccacaactcggtcgctgctgacaatatccatgacgcatgcaagcaacgtgcgccactaagggctgatacatccatggcgcagagggacagcggcc

SEQ ID NO: 4347 - DNA, 383 bp, Avena sativa
ggagtacttttcatgtgttatccttgcaagtctagcgcagttttagttttaatttcgtgtgcagtgcaagtctcgcaatgttttgatctaattaagaatatgcagcatacgaggttcaggctacttttgtgtagggtgcaattcaggcaaaacgcggccagtaagctgttactagtaaccaacaaagtcaatgatgttgggtctgtattaaaatggttttgtgaagattgtcacttggctctgaaatttctgtctaagactgtgtcaggccgtaattatatgggtgcacacattcaggcataatcgctaacaacatccaccaataatcactcgttctactatacatgtaggaaccatcaatctccaagttgttaggccaaact

SEQ ID NO: 4348 - DNA, 515 bp, Avena sativa
gggagagatgtggcgcccggacaaacacaagctgcctcggattatccatgtgtgctgcctgtgtttgtccgggcgccacatctctccctgcactagtagattatttattgatgttcagatatagtgtagtacatcacaatgaacacgccgtggagcttcctaggtttggttgttttaaatatttagatgctgcaaaacttgtaaacggtggggatggtaatatgaattcaagcttaccgttaacattcagcaacatgaatatcacaacgaatatccacaggtaccacctaaatgcaaacagacatagcagctcatcagtcacgctcccacgactgctcgtaaatgaacaaaaaagtacctaaaagatgagctagaaattatgaaaaaaaagatagctgtaatttctgagtttggattaccttattccaaccaccttcttgaaatcagtctccaaagctcgtaccatgtatcggtgaaaatcaaattttggacttcctcggcaatgtgtctgcact

SEQ ID NO: 4349 - DNA, 429 bp, Avena sativa
caactcatggccatttgcatcagttgcatgagtactttcacctgcaatggcgttgtcggtgtttgcatctctcaactcagatgaagcatactgagtgctgtcattgttcttatctgctattgtgcttgtttcctcctttgtgctaccttctatgatatcatcttctgatgttgacccaaattatatatatgtgtcaaatgattaccaggttgtgtgtttttataggttctcggacagtattttctaaggtaccaagcctgattaattagcaaaagaagtcccacatgtatacgtatatgtgaacgattccaaagttctgtaaccatggactataactcagatcatcccaccgtaaccttcatctcagcacgttcttgagattacaggtcacgcacaatgagccgaaccgttgcctggtcattgttcttg

SEQ ID NO: 4350 - DNA, 408 bp, Avena sativa
agtgcagtaacataggaaatgtcttaacagcctggaagaggcatacatcgtgcaatgaaaaattgaaaagataacccccagtaatacttacaggaatggatcttttgacccttatcaaccatatcgtctctatcatgatccaccagaaatgccgcagggggcaaactggctttctccaatgaagtagaggccttggactacaggggcaaacaatcagataagaagttcaaagaataaactgaacactatatagacaagtttgcatgcttcatgcttactttttggatggtatccatttcctgaaggagaatgccactgacatgattctcacaaacttgatctctgtacaagaaacgatcagtcaacatacatattacactaatgggcagtataatacaatttaaatct

SEQ ID NO: 4351 - DNA, 291 bp, Avena sativa
gcaatgtccttggactttctcagcacatccggatcccttagacacagcaatggccacctcagcatctgaccacatgagtgttttcttcaagttgtccactttggcagcaatattctcctcactgtgaaatccaatagcgctaagtgcatgcttgaacatcccagacccacggggtatgccgagaccttcggcacatgccaccatggccctgaggcgttccgcgttggtcggtgaggcaaccttgcttgacacaggcacaggttggtaatctcacaagcacctagcccgcac

SEQ ID NO: 4352 - DNA, 342 bp, Avena sativa
agtgcagttacacacaatagaagtggcaaaagaaactaagcatgcattcagcccgtggacttggaaaaagctagtactccctttgtctcaaaataagtgatttcggtttatgtagtaaaataaatgactatcatttgtttacatttagacggatagagtaccgtatattgcacaaatgttagagaactgaaattttcatcaggatacacaactccagcaccagctcccttattctgatttttccattagaacagtattgtcatagaaccaatatcggatattgcaaggacgcacaacatgtatatttggtctgtcccatgcattgcgcactgattttctgca

SEQ ID NO: 4353 - DNA, 396 bp, Avena sativa
aaacacgaccttagtatttggtgaattgcttttagtcttcggagacaaaatttggttgtttggttctcgtacgctagggatgatttctcatctctaatcatctctaacaccagtaataactgctcgctgtttggttcttgttccgccgctctcgggcgagccgaataccaacaacgccgacgacgctaacggcaagctccccatagtttttacatgccaatgctcaccaccgcaaatccgcgccgaccagagcagcgacagaggccgtcatggccgcaaagctcatgcccaccgtgtttgcgctgttcttttcttgggccttgtccaacggctcatcttcttcttctcgtgcttgggagagggcgcaggcgcgcggacctagctagtggtgtactc

SEQ ID NO: 4354 - DNA, 478 bp, Avena sativa
tgtgtgctgttccaaaccttttgtcatctacgaagagccagactgctgctttctgacatgtcgtgcgcgccgaaaactgaatctagttatttcagcctgcaactcccaaacccgttttgttgctcggctgcgtttgtttttcctcccaagttgctccatcgctggagatatccacttcatcaagatagagctccctcagattgctcagatttgctatgaaaatttgaaaacttggttcactgaaatacacttcaacaggattgtaggagagatcaagtgtacgcaaattcttgaggtgggaaatcccaatgggtatctgaccagcaaacctcgtattgtagaaatcaaggctgacgaggttggtcagctgctcaaacccggaattgggaaggctggcatggtaaaagtggttaccagcgaggctgaggtttgtgagagaggtgaggttgaatagtgctggactaagaccacctttgct

SEQ ID NO: 4355 - DNA, 388 bp, Avena sativa
acttggtgttctaaggatcacctttaactggacataaatgaatgctagcatgtgccacttgaattgattgacaagggtagttcataaatgtgatatggatatgcacgtgagactaaacattgatcttaatagtatattgctattttcttttatgagagtgttggttataatatttcttccatgtaaggtttactggtgtgatttttgcccacaaagcatatttatgtgaaaatggacaactgatattacgctattcaccggtgtactggttagtgacctattttgttttttactaaagtgctggaagaaataccatcatttttgggctccagtgttgtgtgagtagataatctccaatgttcttttgggtacagaagcttgtgttctc

SEQ ID NO: 4356 - DNA, 491 bp, Avena sativa
tgcagcatgttatcctaattgtcattagttacttgtttgatttgaagagaaattgattgcacgaatggtacagaaattcaaatggttaccaactcaatcacagtattcaagataacgctagaaagattgcatgaatggtacagaaggttacaaagatagccattaaatcacattctaattctgagcatctatagaaagtgtcaacacagggatgacaggtgcaggtaagtggaaatacagaaacatgtcccaagtacttacaatctcagttgacgccctttggcagatgctactgcttctgggtctgaaaattagtaacattttcagacggcaaatcagatcaaaataccgcagtatatagtctctgtttaggactaaaagaattgtttaccagtctggagagctgtgtgcacaaacagaggcccaaggaagctaccgccaattccgaccgagacaacatttgtcaatggtttcccagtagcaccaacctg

SEQ ID NO: 4357 - DNA, 303 bp, Avena sativa
cacttacatagaaattttaaagatattccagcataaagattgtacttcatgttccacattacttttcctcaacagattttttttaaacgaggcaaaagacttgcctcggcagattcttacaaatatgtcttgttcttattgtatgcagtaggaacaacagtgtgcgaaaaaggaaccgcaagaaaagcatctacaacaggggaggaaagtagtggtttgatacaacaattaacaatagagatttcaaagatttggcaataaaataaaccttttagcaggcctaatttagaggactcatatttt

SEQ ID NO: 4358 - DNA, 403 bp, Avena sativa
cacatcctttcaacgttgtcctacgtggatggtaatcattgtctctgccttattttaagggccatgatgtcggattctgtcatactgtgccagttatcactgcagcacgtcctttcaatgttggactccttgattacctccctagccacgatcttccgttaccgcttcacatcatgtaaccgtgtgtgtggcacgatcccacgattaccttgcaggatacacgcgcacgtggcagtccgcacagcacaaactgatcccactaccaccacctaggtgtggttaaaataggggagaggggaagttctagctcactccccccccgcgcacccatctcttcttctttctcgtagcgtcgccgccaccgctgctattttcttagtgatagcgccaccgccgctgctcc

SEQ ID NO: 4359 - DNA, 365 bp, Avena sativa
ctcatcacggtgctcctgaagaatcttagcagaacctaattgcatagcaacaaaatgtgcatcatggccacatccgtgcatcttgccaggcactttgctcttatgttcccattccacgctttcctgaaaatacatgagggcaacttaagtaacatggcccttgaaaaagatacaagtgatagccatgacagtgttacttcggtgtagctagaggacgcttacaacacttaaaattgacaccaacaaacaattcaaccatatactacatacaaatgtccaataattgggtatatcatttatgctacccccttcaagctaatgcacagttgtacacggtaaaaactaaaagcaggttggcagaaatt

SEQ ID NO: 4360 - DNA, 431 bp, Avena sativa
cttcagtgccacatgtttgtcctcacacaccggctgtaggaggtcgccatcacacagccgctgaactaattaaccaatctcctcctccactgtgatcacaaagaaaatgacacaacagaaaacaatactccaaggcttggtatatcattcataccgagccatgtcatacaccaagaagaacatatacccatgggaaaagcacccatggacacgcttcagctctcctgcatccagatagccatagccttgctcttgctcactcaaactgggagcaccatagacgacacatctacccatccagacgatccaatcaccaactgtatcgccactgagagaactgcccttctcgccttcagggcaggtctatcagaccctgccaacctcctttcatcatggaagggtgatgactgctgccgatggaagggcatcta

SEQ ID NO: 4361 - DNA, 394 bp, Avena sativa
acagaccctcaacagcatatgaaagtccagacatcaactgccaggtaagcaaatgttacattagcttcaactttaattttttaatgtcaaagtataaatgaggtagtgcagttgatgtacaaatatgagtggaaagttgtaataacgccccttttttctgcatgatatgaaccatcttgtataaataatgtgactaggctatccccatgtcttctgaaaatttatcatctgcgtttgaaaatggtttgtcatcacaggacggataagagagcctctatgactcttcagcatatatactcgttgtggcttaatggtgaggagaaactgcaagcgatcatcagttttctgcgttctcagaaggcatccattaaagaaggtgacagaagcaatggtg

SEQ ID NO: 4362 - DNA, 300 bp, Avena sativa
cagtattgccaaagctggaacgccaagtaaagtcacaggttggtttgtctaacaaagtaaaaatattatcaaatagaactttacacaatttttaacagaattttcactagtctttttaaaatttgtttgcttcattgtgtgtagggatgacaatgctgttatttagatagttggcaagcttatttaatgctgctattgtgacataatcatctatgatcttgcaggaggggcaacttgtgcaacttagatcactccaacaagtgattcatgagaagtgcgaactggagcagttgaagcttc

SEQ ID NO: 4363 - DNA, 316 bp, Avena sativa
agtgcagacgctaggagttcaacctctgaaaataccaagcaaaacgacatgactcctccagcaacagtagcagctgggaggccaccaaacagcgcgacgccagagcagcctccattgaggacgcttgggtccctgacaacgatgaggacaaacagcaccagcgacatgaagaagagcatgatggaagacatgccaatggtctcttccaaaattgaagggcctggcgggaagaagattgatggcttcctatacaggtataggaaaggcggcgagggcgtcaggatagtctgcgtctgccatggtagcttcctcaccc

SEQ ID NO: 4364 - DNA, 307 bp, Avena sativa
ataagaaattgccgaacagttcatcaccagttgaaaaagaaatttaattttctctgtgttttcttgctattcccactgtttgatcatatgtaacttcaagtccaaaatactagtcgtgatcatacattattacaatacccaaatagtctgtgcaaaacaccttgggcaatatgcaagaatttaagcaggggaaagagcaactgcatggtttgtgaagttacctgccgtaggaaattttctagggtgccaagttttcccatagccattgccatctgtcccatgtagtttgcaacattaccagaagatc

SEQ ID NO: 4365 - DNA, 241 bp, Avena sativa
gatggatctagtgcagcccgcgatccacccgaaccggtactgtccagttaaaacacgacgcgtggccagataggtttaaaacagaagtttgaaatctgattaagttgtgaatttcaaacccttgtaactttggattcacacgtccaaaaattacaaattttatgtcgttggattcaggagagcaagacctagccaaccatacccttggtttagcaaataatatctgttagtttgcttgttt

SEQ ID NO: 4366 - DNA, 285 bp, Avena sativa
agtgcagagccacgagcagcagatccggcgacccggccgccggtcgtggttccataaaggttatcgcgcgaccacctcagagaggacatgacaatgcgatgcatgcctgcaaattaactcccctgaaaccgccattgccaacctcattcttgttcttcttctcaacaggaagcaaaagggagcagtagcactgagaaagaggtactacacacgtagtaggccatgatcacacacacaagttcatctgctgatgcaaccaaatcttggcagcgatgcgcgccacgc

SEQ ID NO: 4367 - DNA, 283 bp, Avena sativa
gatggtccagtgcagcacgatggccacccgccgtagctgtactgcggccacagcccatctgtccgtccgtccccagcaaacaaaatgaaattattattttttgtttctgaactccaatcctcaatgattggagcaacaagcgaaagccaagatgcatttcaggttaacatagcaaataataaggcagacagattagtatagctgaatgcttcccgttgccatctgaaatcaaaccaagaggctgaaatacttacggattgtgaacgagttcagagggtttgac

SEQ ID NO: 4368 - DNA, 353 bp, Avena sativa
ctggaatctcagctcatgtcggcgcaagctgaaaatcaagagcttgaaggagaatgccggcctgttagaaaccaatacaaaagtaaagttagtgggacctggaggatacctggagacatttacctccattaacaattatcccaatgactcttgatttgacaagtctgggcaagacatctgtggtgtaaaattctgaagtggcagtattcctaggagataccgtggggaattttatagttttcctagcctctctaagatcctttggcaaaccccgcacaatagtgacatcactggaaagtgcagcaatgaagtggtcttcatcatagagatatgaaaaacttttgaaatttgaa

SEQ ID NO: 4369 - DNA, 389 bp, Avena sativa
agtgtgttgtatacttgcatgtaggtttccataatagcaagggaccacgaattggaatatttcaacttgtgaaatgtgagcttgtgacccattggggatatttaagtgatttgcaaagtccaagcgtatctgttccttatactggtagcactatttttgcaagagaaaatcctaaccgagaagcagtcaccattctagatttctacattgcagaatttaataattaatcaaatagtgcacctgttcattaacagggatatagatgtaatcttcagcagaggttatgttcacaactcggtcaacaattgttgctccctgaaaaaggaaaatagaacatattgtttatactgtatcacactagcatgcacgagggaggcctttgttttgat

SEQ ID NO: 4370 - DNA, 208 bp, Avena sativa
ggacgcttcaatctctttgcctctcaaattgcacttctcatccatcgctaacttttgcttgtaacagaagcttaacgtgtagatctgaagtcaattcgcgtttccaaggagttgggcagttggggcagtttctttccaattgctttgctttagacaaattggtaattttaggttatacaccacagacgacgtcgcagtactgccgggg

SEQ ID NO: 4371 - DNA, 441 bp, Avena sativa
acgacagaaacatcctttttttttggaacgggacagaagcatcctattaattcacacccttgcacgtcgatatgcctcaaacctagaccacaaaagggttaacacttaccacaatgactgcaaagggtgctcgtgaaagaccataaccaagcttttccactatctcctcttcaatggctgttttatcagtgaagcaacggacaaacacagctataccaaccccacactcaaccgcgagctttatacataatgaaaaattataattagaaacatgaaaaatgctttcagaacatcaaattcacactcaacatattcttatcggcatttagacagatagaaagatcaacatccaataatatttctacatacccaaacaagactcacagccataaggcacaaaaatgtgatgtagtttttccttccaacacagttgttcagcca

SEQ ID NO: 4372 - DNA, 397 bp, Avena sativa
tccagtgcagcgtgctgatgaagaacatgagggcggtgctggagtagatggctgggtacttcttggtcagcctggtttgcagcagcagccagaaggagaagcacaggcagttggccagcagcgccatggtacccagcatccagctgctgtcgcggctgccatcagcgtggtgagcagccgggctcagtgcagcggcctcctggtggtgcgtcagcggcacgcccttgtagagactcagcagcagcaggccagcgagcgacatgagcgttccggcgatcttcgcggctcccgccgtgctcttcaccttcagcggctccatcctcagcacgacggcgatgaggaaggtgagcacgggggagaggttgatgaaggtgatggcgaaggtggcggtggtata

SEQ ID NO: 4373 - DNA, 352 bp, Avena sativa
gtaggcaggacaagtcatatgtgctctcagcacatatggacaacaacacgacaaacttcatgcagagttaccattttggagaagctacaccgagttgacctagagcggcgtcattgaacctgtataaaccatttaggtcaaaccataaacctgtttaattttctgagttggtttgagtttacgtcaaatcagcttgcacggggatgcacaggtctaggcagaaccaagctttgaaaactgacaacattccgattaggttggcaatccagtttcggttctcataaattttccagacagtatgcttcgtaaccttgtccaggcctatgcgtggtgcagcactgaccaaaaattg

SEQ ID NO: 4374 - DNA, 318 bp, Avena sativa
gatggatcccgtgcagggtcttacatggctctcagtacagcacggttttcaagcagaaaagactcatccattgttataaacctgcacaccacagccacgtcatgagacaaccaatcatcatctgcatgtgttatgaatttataatcccaaaacgtatatcttattgtttattcagacattaccgtatcaaatttgctttggtagacatgttccggaactttgccgatggtgatttcaactggcctccttcaattaatatagctttctcgtcatccttcaaagtttcattctccaaagcagtatctgagtgactgcact

SEQ ID NO: 4375 - DNA, 453 bp, Avena sativa
  modified_base (287)..(287): a, c, t, g, unknown or other
aagctataataagttggttgctagggacaaaggtattgcgatactgaaacaaactgcaaacatgaaacggtgtctcttgaaacaacaatttgctacatacaggatccacaggtaaacgctaaaaaatgaaacatggaccccgtaggggcacataattagtttgcctacaaacaagcaaaaacaataactaagcctaatcatataaatctcaggaacagggtaaaacagttcagcagattgtttttagaggttcgtcaaggatgaattttcaaagggctttgacaagntaaaaaagaggagcagcgggacatgctgctagagctgcgccagggaatgcagctctcagctgaacctgacaagctacagtggttgccaactgcttctaacaaactcggtgccaagtctgttcacatgactttgcagggaggtgggtcaggctgtaagtgggacaac

SEQ ID NO: 4376 - DNA, 379 bp, Avena sativa
ctgtgcgtgcccatggatcgcaccagacattccaccgcctctcagacacacacggctgcctgcgtgagctgaaggacgcacgggcccgcccttttactgccaccgcgtgacccacgaatcttgtgtaagtactgtacttgcattggcaacacctgttcttcttcagggttctgaaccacaaacggacacgccgcgacgttggacgcatccgacacggcacgacaagcgtccacctcgccgcgccgggccgggggccacggtagcttcgccctgcccggccctgaacacctggcctggatctttgttccccggacgatccaacgccctccaggctccagcaagcgaacgaggcgcaccggccgcagaattagctagctag

SEQ ID NO: 4377 - DNA, 325 bp, Avena sativa
ctaatttagaaattgaaggtctttgctatttcaggtactataattcacttccaccaataagcaaggcatttgggacattgtgtttctttaccactgtgctggttcagctccaaatactgaacccaggccttctgttcttatcttatccctatgtgttcaagaattttgaggtcagtatttgcttatctctcccttttcttctgattgcaccatatgtatacaatttcattttctcacttagcaatggtatgaatactgtttgtctggtttgttggtcttcagtccctctcctcttggaaggattagctattgcagcccgtgcaga

SEQ ID NO: 4378 - DNA, 384 bp, Avena sativa
ggattcagtgcagaatacaaacataaaagttatgatccaagttccagttgtattgcttgcaaaaaaaaaatcgcttaatacctgatatagctggagtaaggatcccatctccaatggcggtacatgtaccaataagaacaagaataagaagacaattctttttataagaatgtccctctagccatctcttcacttttgctgcaagtgaattctcctcataagtttgtcggctatatgttgttagttcttcatcggtcttatgttggttcggtatagtgctgacctttgcgtgccggcaaagtagagaataaagtgcaaatgtgccacctgtaaagatagcagatgttagctgaaattgtgcaaacaaamtgcactgaatccatc

SEQ ID NO: 4379 - DNA, 337 bp, Avena sativa
agtgcagtttcctggatgggggaaatgagaaaagcaggggtgtgacaccaccggacattcaccaccaactctcatttatataatagcaaagataaataaaacaatgtgttgaagtgtttggcaactagcactggcaacaaacactcgtaaccataaagcctacagataagtaatttcaatagttgatacgcaagcgcaataattcatgacaaatctagtatacattgacatggatctatgtaggagaactgggaatgcaaacagatgtttatacagacattcaaatgcaacaatacttgtcaatccccttataaattattttcccttggtaaggatt

SEQ ID NO: 4380 - DNA, 423 bp, Avena sativa
tattctacctcggtcttccttgcaagaaagcttgcatagagaaattgttgtcggtcactgattggttctccacaggataagagtctacttgttgaattaaactttcttcagatggttgtattccttgagaatactaacataacattaacacatggatgagaacaaactaattatagatatatgatgcctcacttacctgcctcacgctcattggtatcctctccaacagcaattgatgccgagacagcagaggcaagtgcagtagcagtatcttttgtggcctctggcttttgaagaagagaaatgttggataaatcctcaaccatatccttcctcattttcaagtcggtatctggtttcatcttcagctccggttcatcgtcttcactttgatgcatggtggtttacgcaggctgacatcta

SEQ ID NO: 4381 - DNA, 320 bp, Avena sativa
agaaacaggggaagcgacatgtacaaaataggatgtgttccaaatgtataggggtcatccatgataacatttcagttgaaatggtcccactgaagccgagcaacaattacatataagttcactccagaatgtgtgtcttaaaaagtattttctaagcttgaggattaccagaaagaactacttggtgggttatgtttattccgacggccaaaatatcagcaccgcaggtgaaaactatatcggcagcgtcagggtcgccaaatatctggcaatgaacataacagattagttagtgaaggcaagatgaagaattttgggaa

SEQ ID NO: 4382 - DNA, 324 bp, Avena sativa
tgcagtcagcgaatcgcacccgagattcagtccagtactagtctgagtctgaaattttgaggtgcgcaaaagggcgaatacgacctcgcgatctccgccaccgcgcccaccggttccgtcttaccaccaccaccgcaccacctacctccggtctcgcaggtcgcagctaacccgctccaccatatctagacccagctaagttcccacaccagacaccgcagaccaagtgaagcgcccaaccaaccaacagaccccctgcccgagcgagcgcccaaccagacgtcgtcgcgagggagacaccggcgcgggccatggatttcctgc

SEQ ID NO: 4383 - DNA, 530 bp, Avena sativa
tgaatgcaagtcctgaggaacttgagagttggagatggtacttggccacagttaggtctcttccccagtcaaatgaacctgagattttgcaggtaactatccctgattccacttcttacctagcaggggcagaggtagggcgatcaggatccacggcagcagcagctctaccaccagcactaaggtcaccttccattacttcttccaatgtctgccgtgacccacatgcagcacggagatagttcatgacataccgagtgatggggtgtatacctcctccaggggtggctacccgggcagggtcacggcggatgagattttccaattccatgaatatacctttgattgaggaaccaagagtgttgcacactgcagagacctcggcacggagtgcggctgagtaagggtcagagaacacagggtcaaggtccgggaggatatcccgcacagcctcatacatgtcaacgacgcggaagaggcgctccggtgaccggctagaggaagaaatagcgtcgccgaatgatatgagc

SEQ ID NO: 4384 - DNA, 364 bp, Avena sativa
tcagcatagctctaactaaagagtacactaaccattgttcaaaacgttaagaggaaccaatgtataacattctaaccagctggtacaccgtgcaggcgtcatgaaaatcaagtagatatcctgttagaagtaggagccacgcgacacagtctctatgcagtgaagattggttccaggtctcgtaaaaaaatgtcaccaggcttattccatgaggatcgtaatacaagacacatgactcttgcatattctagatatgagaaaagctgaacataaaggatgaaaaaatggaaagtaaaatggtgacttcagaatcaccgcaagcaggcttccctaaacacgatgacgcatggtgacaatagcagag

SEQ ID NO: 4385 - DNA, 358 bp, Avena sativa
gaagaggtagctttaagacatagtatagtattgctagctttgaattaatgcggaaagttggctaacaatcagtgttttaaactctaatacgcttcatgcaccaccaagatacttagctactctttcttgttcaagctttcactacgtaaaccaatgccaatgatcataatgaatacaaagtgtaggatatgccctcaggagattctgataaaacatctacaaaattatagtgccaacatgggcacaaaccagtaagaaaaaaacttaacagtcctctcatttaaaaaatctaccttggctatcaacatactagagtaggtatgtcattacacgcaaatatgcattggctaaagcaaag

SEQ ID NO: 4386 - DNA, 322 bp, Avena sativa
gtgcagatatcaaggtacgacaatctgccgatttagatggttgcttgagaatgattaccaaaaggattgaagttgccaaacctgaagcttctgtcaatcagctgacacttaaatactttaccctgtttgactgacaattagattgcctatccaattgccacctccagcctccaatctctggctgcgctcagccgaagcttatgtcaatcagctgacacctaaatactttaccctatttgactgacaatcggataatcataagaccatcgcatcagagaagtacatgatgtcacggggatcgcccgcggtgccctactgcact

SEQ ID NO: 4387 - DNA, 218 bp, Avena sativa
aatccaagtgatccttcatacttcatgtgtgatcctcagttaaagaaggtatttggggaggacaagatgaggtttgtgatgctgtcgcagaagatatcgcaacatctggcacctccaccacccatcaacttagagcataagatcaagctatcagggaatggagcaaattccagtgcttgctatgatatattggtagatgttcctttcccgctgcactg

SEQ ID NO: 4388 - DNA, 243 bp, Avena sativa
ccaacacgaacaggttggcagttgccatgctgcgctataagaagttggatatctgttaatgcagcataggagaagatatctgcaagcataaagtgatgtctagagaaattttacaactgtagttagttgtactgccatgaaatagaactggcgatgtaccttttattaggtgatgcagctcttgcattgtattctttctttatttgcatcttgctatggagtttctgtctttctgaaagaaac

SEQ ID NO: 4389 - DNA, 282 bp, Avena sativa
aggtcggacgtcagtctttacatccacctctcgtttcaggtacgccaactttttagtttgctcaagcagctcaggatgcgtttcctgaggtacaaaccctgggttcacattaggattggaagctctgaatttgaacgtgtccttgtgcatataaatgtacaagaccatttacaggctacagtccagcaacacttatttgaaggtgttgaagcatcttcttattgttcttttcgttcttggatacaggttgatctccatttgcagagccacgccactcttgct

SEQ ID NO: 4390 - DNA, 335 bp, Avena sativa
gatggattcagtgcagcggctgagatttggcttctcagcaatgaggaaccctggggaaaatgtgaaacacaaagtaaatacatacaaaggtgcggactaacacactactagtgtattgctcatcatatacaaacaaggatcttgttccctcccagggaaaacaggccaccagggcacattacacagcaaaacattgttcatgatttagcgagaattaaaactgtatcttgatcagcaaacatatcctaaacaatttacaatgggagaagaaacaaactgttacctttgaattcgtgaacaagctcgtcgccatataacaacacggattggtgaat

SEQ ID NO: 4391 - DNA, 322 bp, Avena sativa
ctggccgtccggtcaccgcaccagtacgacgggcaactcttgtagtcctgttatgacatgataattgaagcgattagtgtggtggttgcaacatcatccctgcactgtcacggcaactcttgtagtcctgttatgacataacaattcatttgggtggccccagtagtagcacccatgacggccgaaatagctggtgcctgccgtgccggtagctgggagccctgggcagaaaggcaagaggggtgctccaaaccgaatgatccagtccatccgtacttgcctgcttgtcatggagcgctcatgatatactgtatgatttttt

SEQ ID NO: 4392 - DNA, 237 bp, Avena sativa
gaacaaataatagcagtattagctggcagtgcgaccactgacacaaagatagctccaactcacagtttcataaaattgcaatggaacagaaaatgcatctcaaaattccagtgattgactccttataatttttaacaagttgtcctaactaaactgactaccacgagccacccaatccttgagcattattgatgaaaaccatggaacttgagctttataaaaccatgttagaagtgt

SEQ ID NO: 4393 - DNA, 363 bp, Avena sativa
taccggcaaattgtagttctcaacctgtggtattggaggcatagcctgaagtagtggagacatagcgctcggcaatccttgcaaattgtagttctcaccatatggtagttgaggcatagcacgcgggaatactcggaaattgtagttctcatttgacatggtgaaagtaggatttgcttgagaagatgcaatagcacaatcatcattcttgtacgttgttgcttgccctatttagaaaataattgttagtataatattaacaggctgtaagtatatagccatttatttgctgtagcatacctttctttggtttgttcttcttgttctgttcaagtccagatttcgtcctcttgctgctagttc

SEQ ID NO: 4394 - DNA, 305 bp, Avena sativa
tgtgtaggatagggctagcttaactctactgttctactgtatggtatgttttatggttttgtgattgtgtcctcagttcagttgatatacttgttgcagatgtttttgcaaggttggtgatgtagatgttttcccccaccgggcaagatgaagaaattttccacaaaatgttctgccgaaagcaatcttacctgaattgttgattgcgaaggtgccaacctcctcttcatatttacaccattcagtgattttgctccttgtaacagctatttaaaccacgtgcttatttttttttgttctgcact

SEQ ID NO: 4395 - DNA, 341 bp, Avena sativa
cttcgttgaagcagacgactaccactcccaggcgaacaaaggtactgaatattcttctgtgacttctttgatttgccatctcccaagtttcacctgaaaaccggttctgtacttctctgctctctttgcttttccaacggcaaacaaacagcaaagatgagcatgggcatcccgctgaccgacgcggaccgcgccccatggctggagtcgctccgggacgccatcagggaccggctggaccgcggcgaggacgtcaccgtcagctgctcggcgttacggctaaagtacagggaggtcctccgtgaaggggacatcagctacaaggcagggtgctactcaac

SEQ ID NO: 4396 - DNA, 415 bp, Avena sativa
ttgtgttagtactgtacatgtgttgtagctcttaaaatctaccatccagtccaatctaaagaccctccttcctcctgcttaattctatgactaatgggaaagaacaccttgatggcggtggttctcacttaggctcctctcgccggcagcaggacaactcggttgtcggcacaaccactcatgcgaagtccgcacgcacaacaccagcacgatggcgccgccgtaggtcatcatagagtagttgcagaaaagaaccttccgcggctggtaagaaaggcttagctcaacgcgcagtaataggttgtcaatcttattcgtagttaaccaatgagttctcttcttaaaaggtaggcgggcatacaatgaagatggtctcctagacttctagtctccttaatgatcttgtgttccagtc

SEQ ID NO: 4397 - DNA, 290 bp, Avena sativa
gttggaaagttcattcagctagtggtgacattcttcggaggcttcattgttgccttcgcgcaaggctggcttctcaccctagtcatgatggcaaccatccccccactcgtcatagcaggagcagtcatgtccaacgtcgtcgcaaagatggcgtccctcgggcaggcggcttacgcagagtcatctgtggtggtggagcaaaccatcgggtccatcagaacagtaagcacacatggaaataacacacaaattttgtatcagagttgaagtgcgcactaagatagcatgga

SEQ ID NO: 4398 - DNA, 288 bp, Avena sativa
gatggatcagtgcagaagaacaacagctaattcagctggaggtacgcgtacatccaagtaattcggggacagttctaccatcacaactaaaaccactgattacctaaaccttaaatctagaccagcgacgcgtacatccagtaattctgggacaggcgcgacccaaatcacgcgcgactaagcctcgcatcagatcaaccagggagaagaagcatcacatcagatcgggacaaatacctctccggtgctcgcgaagcagctgtagatgtagttctcgtccatccagta

SEQ ID NO: 4399 - DNA, 613 bp, Avena sativa
cagtgcagtgggaacaatggtggctagggttaggaggaggaacctagctctgataccatagcaggttttgggggaaagtttctggatgggcttagtcccttggtacctccacaccctcttatatatagtcacaatctagccttacatcttcactcgtacactggaatgatctagactctagtaggacattactactatactaacactccctagaatactctagactctacaagagtagtactactacactaactcagactccaacactcactggaatactctagactctcctaggacgatactactatgctaacctagactccaacagttaatgatgccgggtaaagaatgatatggtttctgctatgacaagatatatcgtttttgtattattggttatcatttagcacatgttttctaccttctagtgtaaagaaacctcttgtgatttctctaataaactaaattcactttttactcatgattgtggtttacagctgtttcgtgggtatgtacttagcatatagtcggtaatctacttattgttttctgttggttgttacactttcttggacaattatgtaaaagcttttcttagagagaacttcttaag

SEQ ID NO: 4400 - DNA, 318 bp, Avena sativa
tgcaggaagagtcggagtagtcccaggttgccgattccaccaagtcgctgcccatcttcttcttcttctaccgggcaagtcggaccatcatcgccactgccgccgagcatgaggtgagcaaccgccttcttcccgctctcctccttcgtcctctgcgtctgcacgctgtctaccttgggcaagtgtttgaatccaagagcgtatacaccgtgtctgaaactggaacgtaccctccccgacttggtcgtcgtcgcattcatcacggtcgccggaacagagcagcgtccacctgctgcatcttgctttggcgcctgagca

SEQ ID NO: 4401 - DNA, 300 bp, Avena sativa
tgcagcatactttgaaacggtccaagtcttcccgcttacctgtcgccctcatgcgttggctgtggcctaagtggccattggtgctgatgatgatgatgacgacgataatggctgccttgttgtggaggaacaagacctggaaaaaagaggtcattagcgacgacgcgacgacattcttccaaccagagaaaatttgggacatgataattaagatgctgtggctttacctgtgcgagtgccagtgtgacaacatggcacctggtctgaagataggaaacagggaccgaagcttcctcagct

SEQ ID NO: 4402 - DNA, 422 bp, Avena sativa
tcatggtctgatctcacactatcttagttccaatacgtaggatgacaagttcataaccatgccatgctttcttctcatgtaaatgatggcgtggacataccaggtctcatgaatctagttactaccttcatcaagtgttagcaacgaccaaaccgatgttacacgcgtactataaagacaacaacatccagttaggcatgaacactgagatcaaagccaaccagcttactgcacagagcgaaatctttgtgggcgcagtaaatatttatcagattttaataccatgttctcggttcatgcaaatctgagtctcatgggcacttgtcccctgcaagcatcagcatagtcttcagcaaggtgtggtgcagcttccttgtgagggcatatgtagttctccacaaataccttctcggtgaccacga

SEQ ID NO: 4403 - DNA, 469 bp, Avena sativa
ccgcccactccgcctggtgatcctccgcatagaggcgacaggacttgtcgtggacaaaaggtatgtggcactgcacgtggactaccttcgcaaggtccactccgggatctgcttgccgacggcggcgaggagcaaggcgtcggtgctgcagccacccgccccggtgctcttaagcgctgaggagacgagacttcccgcggacgtgcatgacctgggttgatgcggaacgcctctaaacctaggcctgagattcagtgtcgtcctccagtaaccgcaccgcaccagatgcacgacctcccctgtccacacctcgtggccagagtcggaggggccggcgggcatcaacagctggccagaggccagcttagaaggatccggcgtttgcctccagtctggaggccggagcagccggagctagcatcttccttaaatccagcgtccggagcacgcatccaggcctccctcaatt

SEQ ID NO: 4404 - DNA, 408 bp, Avena sativa
acacattgaccagcaatgaggagaagagtcaaacgtgccgttgcaactgggtccggcctgcccttttcttccctactactccgtacttcgtggtgagcagctgcagcagccagcagagagtgctgcgatagatagaagtgtgcacgatttgcggcgcgtttttggtcactggtgcgtgccaacttgtgttagtgtgcgcacgacgatccacgatccacggccttggtcgtcaacgacgggtgccgtgcttcccctttcacgtcgcaatttcggatgcgcgtcgcaattttccgtactgggcaatggtgacggcaccaaagctaggcgcgtttcgtgtgattcgcggcgcgatggccgtgtgtgtactacactactactcatgctcgtcgttgccaccaatttggcact

SEQ ID NO: 4405 - DNA, 373 bp, Avena sativa
ccaagccagacagactacaagatagcacaagaaactttataccattggtgaggtgaggtgaggagaagattggttgataccactaactaaatcatcttggcattatttaacatggcagattagtgagcaaatgtgaggtgtctctagggagctggaggaagaagaggatggaacatgggaacatggaacatggaacatggagggaatgtgtttgttctaaagccatggctttcctggaaagcttttggccatctaatctaccattgtttaattaacatggaacatggagtattgttgtaactttatgccagcctattagattagttggtgaaagtacatgattcatcttacattccctacctgtgcagactga

SEQ ID NO: 4406 - DNA, 342 bp, Avena sativa
tagaaaaacaaacctatagcaaaaacagcaaaaatagacctacagcgaaaacagcaaaaacagatctgtgacctacagcaaaaacagatttgtgacctacagcaaaaatagatctgtgtacagcaaaaacagacctacatcaaaaatagacctacagcaaaaacagatctgtgtaccgctgatcatgtagtatagcggccacgattatggaactgctcgtatattgctagttaccacaagtgctgtcagtacgaagtaggaaaggcaggcagtatgccacaaaaagatgcgagaatcaaataatatttatgatcaaataaccaactattaagcatgctgctt

SEQ ID NO: 4407 - DNA, 332 bp, Avena sativa
gcagcagattctccttctcaatttttgagtcctccaacttctgcaagagctcacacattttcgcctccattgtgcctgtactgccagagtttttcttgtcggtaacatgatcacgtcctaagcttgattggtggacaagatcagatggtggaaccaaatgttctcggtaattttctttcatctgtccaagctgaacaccttccttgaggttctcaatcacacgatgaatagcccctatatcagcaagaaggaaatcaagatcacttgcttggaagtccatggagagcattatttctggtctgctgcaatttactttcaagaagaagcaagcc

SEQ ID NO: 4408 - DNA, 473 bp, Avena sativa
gaacctttggtttagaggctcctcaatgcttaacacacttgatagtaaaaattacatgccttcatcagattgtttggatgtttggattagttcttcaaacttgttgcgaactgttgaaatattcttcctcgcagccgcatccaaggagtcagcgggcttctcttctagaagattaccttgtgcatcataaacactttctctagaaagtaagagtagtgatggttatggtttgtgaaaggagtgtatctagaccatttgtagtgtttagattcggagtgaacctacacactaaaatgggtctatatacactccttgcacaaagctaaaacatcttatattttgaaacaaagggagtaattagcaccatattgatttggatgatcatataggaatgggacggatccaaacaacatgaagtgtatataaactaataaggagacgaacgaactattagtggtatagaaactattcat

SEQ ID NO: 4409 - DNA, 351 bp, Avena sativa
cggtgcaagtgcaatcacaacaagtatgcggctcttcccacattttatgtggcggcgcctattgctactagtcaagggcaagcaattggtcctcaaactctagcagcaaccagcaatcatctcccaaagttcctctttttccttttcttttaccttcacagaattcagttctttctaaaactttttctttatcgttttgtatcattcagctacattcatcatattctttgtgtggaatttgactcttctgtttgctatgatacttttacatgaacctaaagatatgcgtccaggagtacagtcagccaatatgtgctggtcttggtgttcaggcaataatttccttgttaa

SEQ ID NO: 4410 - DNA, 326 bp, Avena sativa
agttgttcagcacgcacgtttcaagtgctactgacagagccccactatttagttagtaagttagttacagaacaaaataccattcagtcagggatacattacttttgtctgactagttgcatggcatgagaaagccatggctatgtttttagagacaaatttttgttttgcaagccacaccaattcaccaactagtttacctgtcaaagaggacagcatcagacgctacagacatctcactgacaaggactttatggttttccttgtctgacagagaggtttcaggcactagttgtcacgggccaacctctgtttcaattcaagtt

SEQ ID NO: 4411 - DNA, 418 bp, Avena sativa
tgcagggctggcctgttccattaatgcggattctcacaaaagaaaatacaataaattggttaaaacaagcaaattttgactaaagccaaaagctagaaatacacatattattgaattttggttgaatatttgcattaagcgttcagattgtcggtgaaaccgggcagaccacgatgtatatgacaatgtagagtacattcattaatgtagagcagccctatggtcacggatgaaaaccatcatcggtgatgaatatatcacgccaatggaatcttatcttctctactatctaaaaagcacgaaggtgttccgttttctgccgacgcagtgctacgttgcactttgatcgctcgcatccgcacccttcatcgtttgtattcgtcctcttcgtcgcgcattaaccacacctaagatcagg

SEQ ID NO: 4412 - DNA, 281 bp, Avena sativa
agatgtaaacttacgtccaagttgaaaaggtaccagaagtagaacagagttgcaaaatatcaaataagaacttacagcccatgtaaaaagcaaaagtcacatcagcaggtgtgtttcctgaatttgttacctgtttttgtgataaaagaagtcagcttaagatgtactggtgtggtgtatcattaagctgaaaccattttttttaacaaactgaaaccaattatttataaatgcatataaggaaatccagggaaaggaccatattactgtgaaagtgaaca

SEQ ID NO: 4413 - DNA, 417 bp, Avena sativa
tgttgataaacgatgcacttctctgctaattaattattgcgcatgatttgctcaatcatatattgtgtctattggaatacgaatccttcttgtaataagtgacaggccaagtaacatgacatgataaatgaagaatgatagaaactagattaatggagacatggatagacttaattgcaaatccaacttggattttgaagaacaagggaagttcacggcgtgtctctgaattcagtcagcatcctcttgatgtaaacgggctagtccaggaaacactgtaaaacacatgtacccagcaaatgcaaagcagcctgctattagatgatatgcaaaatagaacaaccataggaaaattgtgtatgataagagcatgcttttgacgcttgacttagcttgtgatccatacagcatgaatct

SEQ ID NO: 4414 - DNA, 342 bp, Avena sativa
gatggatcccagtgcagcacttatcttctggagagagttgtgaccatctatgagtgaagctaagccctcagaagtcacatgatcacatcttgacacatcaacactctgcaatgaaagtcaacatatagattggatcagtgcttgataagattgaagaaaatagccaaatagtcaagtgctggtgaagttgcacactatagttatccacatgccatgtttgactagagtcagcaatatccaattgctaggaaaccagaaactcagtaagttcagatttgagatgattgaagacatgataacgcgcatgaaactaaaaacagcatccctggaacatgattacct

SEQ ID NO: 4415 - DNA, 313 bp, Avena sativa
ccagtgcagtgtatccacaatttgaccccgctcaaccaagaagtccttcagctgctcaaccagataatacaatgtaacattaacaattgaaatcaaacaaagattattcttctagcagtactaagaaaacaagacatggatgaactccagaagaataaaagtattcataaaataatttattagactgagtaagtagtgacaatcagtatcaaacataaagcaacatatcttagggaacaagaaataacacaggaaagacagcaagaacataaaggctgcacactcaaaccttcaaattctcctcggcttcttt

SEQ ID NO: 4416 - DNA, 579 bp, Avena sativa
ggacatgggaatggaggtcgccggagctgaaatcgcgccagtgcaggttaatgtagctgatgtagaagtgacccttttccaagacaaggaaagtaaagcgactgcaaaggaccgtgaggaagcagctgtttttggttcagacaatggcaaagctgcagcaaatgacatggcacctccaaaggatgcagtagaggagtggcctgaacctaagcaaacttacaccttctacttcgtcaagatccgctcatttgaggaccctaagctgagagcaaaacttgagcaggctgataaggagttccaaaataagatccaagctcggtcaaagatttttgaggctataaaagctaagaaggtattttcttaaagcttattcgcatatacgtagaatctaccccccttagtctttatttattccttttttttgaagtagtctttatttattctaatttgacaagtttcgtagaagtgagtgtttgtgctattgctttcctgtatgttttctagtttaagtagacaactaggagatcaacgtgtgaggtttaagtatagtgatgtaacttaatatgcacacttcctctg

SEQ ID NO: 4417 - DNA, 262 bp, Avena sativa
gctgctgcatagtcttcagcgaggtacggtgcagcttccttgtgagggcatatgaacttatccaaaaataccttttcggtgaacatcaatgtactatagtaatctcggtcacacttaagcaatccattttccttaaggaactttagaatgtagtaccgaggcctgagccgaccctccaggctaagaccaagcattgatgaccgatgagcaatgtacgctggttccaaccccatctcagagataagaaactgcgcttttctct

SEQ ID NO: 4418 - DNA, 208 bp, Avena sativa
gccaaagaacagtggcaagaacaaaaagatctgttccccaaaacttatggagcaaatgttacttgacgcacttagagcacttgctatagcaaccttgtcaagttgcacaccaaggcgatgcatctcgcagaacagctccatggcatcaatagcatgcccattctggctcaacggcaacattccagattcagtaggtgagctcacgaga

SEQ ID NO: 4419 - DNA, 251 bp, Avena sativa
agtgcagagtaggtcagagttccttatctctgaggtggcgttggaacccgcctacattgctcatcggccagcactgctcaattatagcttggaggggcggctcaggccaaggtactatgtagtgaagtttcttaaggcaaatggattgctagatcatgaccgggactactatactgtagtcacctacaccgagaaggcatttgtggagaagttcatatgccctcacgaggaagctgcaccacaccttgctg

SEQ ID NO: 4420 - DNA, 331 bp, Avena sativa
ctgatcaattgaagcaatattttatggttaaggtcattcattaaagcgcgcattctcatagattggcacaagggtatcagtttcatcattaattaacatactgaaagtaaagcaacttgtccaaacaggcaaacatggattatctctgcatttactggaaggagcccacaataggtggagcaccttgtagaggccgatctagtcatctagttaatgggaactttacagcttgtgatatggtcattgcaatgaagaaagtaaaacactgaaaaggggcaacaggagtcactgcggtacaagaaacagcaaaaagcccctgaacacagatcac

SEQ ID NO: 4421 - DNA, 344 bp, Avena sativa
  modified_base (27)..(27): a, c, t, g, unknown or other
ctgttcatctaggagcgtatttttttntaaagtcaattttaactgttcatccagtgcagtagccataagctgtggtctccattcgtttaagtcaatattgtgtagtcctggggttttgtacacttctttgttggcttgtatgcagaatcgtagtgtaaaaggtatgttctgtcggactagcatatctctggcgcatgttcctaacttgttcctagcctcgtgcttatctctgagcaagtttgttactgacagtttttggtggcaacatataaaagccacttggcatggatggatatagcagcactaacaaagacagaggctcctgccgctgcactagatccatc

SEQ ID NO: 4422 - DNA, 343 bp, Avena sativa
atggggtatcagacggaaacccaagaaggaggcttttaaagcgctgagtttaggactcaaaaggccaaggggctacctgtaaaaagggctgaacggtgctggtggttgaatcccgatctgaaactgaattcttccccgtcagttagagacagagaagacgcccgaattggcgagacgatggcgaggggtgcagagcgaaactgggcaaggcgcaaatatgaaagttggaaagggggtttcggtctccaagttggttcatacggtctcgtcggaaaaggcctaggttcaccggaaaacaggtcggaatagaaggtgcgcgaagctgctgctgctgctgccagat

SEQ ID NO: 4423 - DNA, 346 bp, Avena sativa
gtgcagctgtgtccatagcacgaagaataggcttgcggattccttcagttaatttctatgctattgctcaacgctacttgaacgagttgtctctgccggtagaaagaatcctccctcacgcttgccgcatctatgagtgggcaatgcccgcggaactatggttgtctagtaatgcagctagggtcccttcacgggtctgtgtaatggctatactaattgtggccctaagagttcaatataacatcaatggccaagggatgtgggaggtgagcattccatattcgcttaagtcatctactatgttaggtctgtaataaatatgatagattgaacttcttttttttct

SEQ ID NO: 4424 - DNA, 449 bp, Avena sativa
aattgcacaaaggcgctaaaagttcgagttttgggtgaaatgtttacttcccctctctgctggatgaaagctaagtgtgatgaaaggaacaaatggtgatgatgatggtgatttgtttagtgctaaattctacctttggtcactgtcagtgtgaggactggtggaatcgccggaggattcatccttatcagctccgttgaccgccttcctgtgaggaaaaaggaagccgcagccatggccttgctctcccactgtcgcaaaatcagcacaagaaacattagctataacactgcatcagttgttccagcaagtgatactatggtgtacgaagtcctaccggaatcaggcggtgaatcgttaggcgtgccaacagcggtgtgcttgggactgaacgggttgccgatgggggtcggcgctgctgcggcggagcgcgacttgaggtccagcag

SEQ ID NO: 4425 - DNA, 359 bp, Avena sativa
cagtgatacaagaggtgatggggcagacacttctgtgggtgatcatgaatcgggtatccgtactgttcgtgggagggatcccgtctcgcacgcaagggaattgggagcttgcaaggcagaaaacctcgtccatgaaaatacaggtagctagctcttttacctcataatgctgattctatgaaagatgcataaagaatacaaaagttagctccaagatattgtatggttctttctggctgagtgtacctatgttatccataagctccttacagttagatattgacgctgctgaattctgctaatccatgttctgaagcagcatcctgtgatgaacaaatttgtgattccatttttttctt

SEQ ID NO: 4426 - DNA, 501 bp, Avena sativa
gatggaccagtgcagccagtaatattacgaacacaagatattacagaaaatgtagagactgctgatgcccacagctggcccaatgcaagtgaagacaaaaaaaacagagggatcaattgtttagttatccaaacatgacagattccgaatacagtcacttggagtttgagattattattgattgccacttgccgctaacgaatgagagaactcgtgggcattctagcatttccgaacatgtgagttctttttgtcttgttatagaatcaatcaatagtttagttatccaaacaatattcttttctatttgaggtccttggcctatgtcgtttgtatcacattaattcacataaacacaatttcgtggtagctgctagtacatactaatcttattgctaatccgaacaaaataatgaaactcctaggagaaattgaggagccaagtgcatgtagggtgaatttaaacaaaactggcactgtgaaatggtcgcgattttgact

SEQ ID NO: 4427 - DNA, 423 bp, Avena sativa
gtgctatagttggccatgtgtctgaaacaacggcttgattgaactagaacagtgacgtgttattatccagatgtattggctattaagagaataccactagctaggcagccttgagaaagacacataggcatctattcagtccgtttctgtcgtaccgtgcctcttctccgctctcatcctcaaggtgggttatatacttacaggaccatgccagctcatctaatgggccggagataaatgtttatagaaactctgaaaggtagaggcaccacccaagatcacgtttgaaactctggaagtgctgataattatggtgggcattgagataccactctgcacgcgcttgttgaatgcccacagacgagaatgatctggcaggcatttcagggagatgtatggaactaaggagctgggagaaatact

SEQ ID NO: 4428 - DNA, 386 bp, Avena sativa
ccagtgcagcttcagcacaatcttcttggtggttttggcctgaagaaagtcacaaaatcagaatcacacaacctccagtaagtagatggcactgagatgataggccaatcagacaaatcctaaacatatgttgtgtttgaatcacacaagaactatgttgcggtaccttcttgtggaagacaggcttggtctgaccaccatatcccgactgcttcctgtcataacgacgctttccctgggcagacaggctgtctttacccttcttgtactgagtgaccttgtgaagggtgtgcttcttgcattccttgttcttgcagtaggtcttcctggtcttcggaacattcacctacatagcatttgacacattaaactgatgtaaatatggt

SEQ ID NO: 4429 - DNA, 310 bp, Avena sativa
agtgcaggagtcttgaaacgctggattaggaaaaaggcagtgaaaatgaaagaataggataggaatgcatgtgcttttggtgtgttcagctcattagcttttgtcttgatttaaatacatttgtttgtcttcatttaaatccattctcatgtgagattcatattcactgtatgtgactgcactgtttggtgctatataggtcttcttaaactaaattcctcgtttgtatgctggaactggaccctaaattctggattctgaacctgcgacagattggttgagtggagggttactatctaatgtccatatg

SEQ ID NO: 4430 - DNA, 443 bp, Avena sativa
cagaagggacgaaggcttccagcttagaagaactacagcaggcaagcaatattagaactgcatccaaagagaaattttgagacttcatcatcttcatggccataatgagaaccttctttcatgaagagatagagcgaggattgcactgtaaactgcaatggccactgagaacaaagatatagagcatgctgatataatcctcactgatacttgaaagctttgtggcgccatacagtttagcaattctcataatccctgttcttggctcatgtaaatctgaaattagtcagcacttcccctctttgtagcgtttgacacaacatcaagataccagccaccaccagcaactctttctcttgaaacatgaaaacccgaattatgtcttgtccttagggcaacaacaaagccatctttgagcctctcaggaggttttctaccaagtc

SEQ ID NO: 4431 - DNA, 405 bp, Avena sativa
gatggatctagtgcaggcagtgcctggcacagcaggaccactatttggctcacacgttggcatccgagcctagatggcatgtaggacagcacgtctagagctaccggttggccatgcccttactcagtcattgtgactagtctaaactaaacataaacatattaatttcctaagactagccacactgtggtgtaaaagcgattcatagcttagtttgaaccggttccacacggtgtagagcatcggttcaattgatctgacaagaaaagcgattctagtttttggttcgcttcttgcatgcatgtgcacccccgtgtggcagagttgtgaagaaaaataatggagaaagtagcaaaaggacaagaaagagtggggtctggtaggacccacaaccgattccacaca

SEQ ID NO: 4432 - DNA, 402 bp, Avena sativa
cgagaacgttcggcttgcagcaccgccgccgctcctcctcacctcatcacaccgcgccgcgctccaccgccaaccggtcacgggctcacggcggtgtagtgggtggctcatgccgacgcgaattggtaggtgcgctccggcgctccctttccgccccggtaattttctggtagcacttggtccaggccggcaaatggctcgtctgcgtagttagattgtgggtgacaggattaggactaggagacatcttgaagcctgatttggtattgccactaattgaatctttgcccattgagcagttggcatcacatcttcctgaggtttgtatttggtgtcctggctttcagttcaactaaacttgttatctcattctggtaattacttggttacagggatcatgga

SEQ ID NO: 4433 - DNA, 432 bp, Avena sativa
gatggagtccagtgcagcgactcggcaccctcggcaacatgtcaaccatatgtagaacatatttatcatggagctgaaaggagtgactcgtcagccaaccaagaataacttccttaaatcaagaagtatctttttgcatgttggttaacatttacaccggttgcattcctcttttagaagtccagtgatagtttttcattctagttcacttccctatcttctctcgcaagcatcttgagagtcttccatttacggtactcgtctggtggctatcagagaacttcttgagcattgtctttatgtcatcaagtgtgattgcctcaatacaattcgtgttgcttgcatgtcttcattatttcaacctctttgctagtagccaaatgtagactttgaacatatgtacctctggaagataattgtgcgttgcaaatt

SEQ ID NO: 4434 - DNA, 526 bp, Avena sativa
tcaacctaagttaattagcacagagtcaaccaaagtaattaggtactatttaattgttgtacacaccattctcctctggcatgcattttattgttttcaaaatccataacccgagaggattgctaggatttagttaaaacgagaggtaagacccaaccaaatcatgaactaaatcccaaccaaacttcctcatccgaacataaggtattggcccttctatataagatcctctgaaccttcccagcaacaattttataccggcaagagttggcgcatagcaatcccagtcctacaccattattagccatggtgatttcttatcgtagcaaatcatcctctctagcgtccaagataagaagagaagcactcgccatccagttgttctgcctgctcgtgttcgcgcacgggacgattgttgatcaggctgcccgactcctgcactggatccatcatgcatgatcctggtccaccttttccattagttctattgaagcactttgtagcagtgcgtatgcctcttcgtttt

SEQ ID NO: 4435 - DNA, 384 bp, Avena sativa
actgtatggtgactatgctgagctgaacaacctttttttttttgcttggatgtaggttcctggtgttcctgtgatatatggtctgaagaactctttgtttattgagcaaccttccgtgcagcaacgtaagtttgctcaattggatgaggagaagcgtatacatatggaaaaatcagaatttaagaagctactgaaggcgtcatctgaaggaaaggcatctggtgatgtaaacgcacccggagtggcagagaaaagcaagtttaaaaggaacagagcaaaggtaatatttacagctactctgtttcaggatattcaatctttagtggcagtcaccaacgtttactgtatctccgctttttgtatgaattgttaatgcttgtcctt

SEQ ID NO: 4436 - DNA, 526 bp, Avena sativa
gatggatctagtgcaggtaactgctattgtccagggagatggaactaaataattaacaaatgagctcaaaaatatggtgtaagaaccattatcattctattcaggagcaatgctgatttgatggccatggtcagacattaacatgctccaattgcaccaatcagaaaccatgcaacatagcattattagacaagaaaatcaccaagtacttctctaaattctctgtagcagcttatcatatcagaaacatgtgaagcaatcccagactgataactgaaaaagaaaaagctacaacaagtgaaataatttccatagttccataccattgccaaccaaccactcttggtccagcatttcatttccagggattaaaccccgccggtttcagccgggatctctccatcaaagataccttaagaccaccatgaaaattggaggggccttacaagcagtggaaacaaaaagcagcagcggtgcacggagcaaatttacacatcggaagttcggcaatgtacaactggtccta

SEQ ID NO: 4437 - DNA, 366 bp, Avena sativa
cctgcttaccggctttccatgaccgagatcaatgattgggagtttttgaggcaatatggtaggcactctatggtttttctttacccttagaccgccgtctgtaggcatgcaccagtagctggtttcttcagcttgtgccccagattgtttacaacaacacaatgactgaacagcatgaggagtccaggaaggaatccacatctttctgctgcttccaatgagcaatatactactatctagttctgccgccgcaagcagaaaaaacatccactgtaagtagacaaggacgactgtgcctgtatggaagcatgcgatttgtttattgatctcggtcatggaaaaccggtaagcaggcaggtgaggtag

SEQ ID NO: 4438 - DNA, 483 bp, Avena sativa
  modified_base (382)..(382): a, c, t, g, unknown or other
gactagcataatgtttttgaaagttaggattgtaactcttcttccaagcagggttataatcattacgagctctgaagtctatttcttcaatatttgtttcagaggtggctcttacccgggtttccttacctttaacggctagcatgagcagcggggaagacagctccgtcgtcatcctgattagcaaaccggttgagagtgagactcctgtccatatcccgcagtttttatttgagaatcaagagcattgtatttcttcatttcacagcatgagaatcatgctgaatacaagggagcataaagtcagtgtgagctatttcagaccattttctcctatgcatcttccttttctctcatctccacacctaccgagagagggaanatgtaattttgtacatgtgggcttggatagcataaagcaactcatagagtatgtaggcactaggcactgatttgcctgcgacagtgataaggatttccctg

SEQ ID NO: 4439 - DNA, 392 bp, Avena sativa
gatgggcattcctgccaggtgacgacggcagaggagccagtgatgcaccgctcccagtctccctgctctgcgatggtaactccaggatacgtggtagctttggtcacgcacagagtgggcgtcagtctcagggtacatttcagccatcagtgaaataattagacaagctgggaaaaacagcagtgaaatgatgctccccaatgcactagtataacctaagtcacaagcaacattaggttacgttatgtgtatctttccactgaatacatacatcaggcagacagcagtttcatgtggaaacacaatggcaagaatatgatttacaaaagttcaccttagaagaatcacctgccattggtgaagcaaaatgtctcaactggtcgccgaaggat

SEQ ID NO: 4440 - DNA, 299 bp, Avena sativa
acaaagacccacaaaggacacagccccacaaagaccaacagtacagaggcttattcatcactattaacctagagagtgtgcaccttcacttgcacatcctgtaaatggtgatttgtttatttgatcagtgaaacagctgtactgtatgtttcaaccaagcacacctctgtggtaatttgacactctagtttgacatgtctacagggcttcctctaatacagtcacttctaattttttttgagttatatctgtcagactgcatttgaaattagaattagtttgaaacatcctaaacagag

SEQ ID NO: 4441 - DNA, 385 bp, Avena sativa
aacatacataacactgaaggaatacaaaaaataccgtcgtaccattgcatcattcattcatccctcgttgggcctgttcactcctttctgacctcagatccgccacctctcgtccaaagtgctccagaagtgtgacaacaagcgacttctcaaggatctggttctgcttcacatcctgggcatcagaaatagtattcagcaagcacttgatctcatgcaagatgagctgcacaactacgtcaagcttcatcagatccaaggatccatatttctcatcaaactgtagtacttccatcacagaaccaatcccttcagtaagcttctggttgtttcctgacaaacaggtcagtttctcttgaagaaccttctgtgactcatgttgctt

SEQ ID NO: 4442 - DNA, 340 bp, Avena sativa
agaatcaagcagcagcggcagcaatcacgcaagcaagcaacagcggtaaggcatgcaaaaaactgattcatatgcccatccatctacatgtaccttctccactttaaattggactcaaaattattagtttttgttgagtgcttgatgaaatatgttagcaatacatggtatatagatgaaataaagttagcagtacatggtattgatgttagctgtacatgttattaatgttttctcatgcaattgttttgttcatctatgcatttggtaatttataatagaataaatgcattgtagatgggcaagttgatggataaaatgaaaaagatgattaggggag

SEQ ID NO: 4443 - DNA, 317 bp, Avena sativa
gatggattccagtgcaggtatgtcatccatgtaaaagtaaattcatgaatccttaaagggtttaaaacattcttatgggaaatgaattggagctatggcaataaataattcttgtattggacaaaaacttactggcagtctttgctttcatggtgggtggacagttggacacaattactttcttcccaagtttgttgcttgtgtttggtctaagtaaaatgatttgcagctgcaactaacagggttcattacacattttgttgtttgatctttccacatgccattgggcatggttgtcttgcatattgtctagtagc

SEQ ID NO: 4444 - DNA, 350 bp, Avena sativa
cagtgcagctccctgttgatgaccagatcctaattccggtgggagtgttacaacgcctctttaacattccaattgagcagggagttaatcctgaagatggtacagtcccaatgcacaatgtggtggatgacctgtctgatgttgttttcaacacccctgagttggatactgaatcagatatttctcttctaagcacaggtgtgatgatttttctgtctgctccactagttgagacacttcagaaccttctgtatcagcagttgaggtacgtacaagatgtgatggatgacagtttggctttgatccctgtctcagcgccacaagtgtagtgggtgtcagttctggatggt

SEQ ID NO: 4445 - DNA, 359 bp, Avena sativa
cagtgcagcggcggagtcaaatctgtgtgggaaaccctcatgtgccgtgcatgggtcaagcgttggcaatgtggatgtaattaagccaagccatgcatgtgcagagggtggctcaaacatgagtttggttcttggtgcttgcatgcaaacaggaagagataatctggtacatgcaatttttagaagctatctttcagattggaaagaaaagcacgatagttattctacatgcatgagaacaaactcagatgagattcatgctggctccagctatttctcttttcttacagaaaaaatcgcttccataaaacagcaaatagcttcaggtggtttgcatggcgtccaccagatgaactagt

SEQ ID NO: 4446 - DNA, 486 bp, Avena sativa
gatggccgtcacgtcctgcgtgccggacggtgtcaccgagggcgccggcgccctgccgcgtgcggacaccgccgcgatggccgaggaacgccgccgccaccacggcaatgacggtcctcatcgctgccattgtttttggctagctgtgggttgcaggatggagctagtagctaggctgtaggagagagggtggtggtgcagtgcgtgtgatcggtcctggaggcggtagtggtggttgatatagggaggtggacgtgggggtggggcaggggtcacggctggaggtgagctggtctgacggtgcgtaccgagcggtggttgccggagaggctatgatgatgcgcccgtggaatgatcaagggaaacatgcgctgcgctgtgcgcagtgagagtgaggacaagggaatggatattgatcaagagagctaggttaactgtccggtacgcgcgcgacggcggggcacacgagaaagtcggcgctgccaa

SEQ ID NO: 4447 - DNA, 367 bp, Avena sativa
taattagagcacgtactactagttaattaattctgccatgcatgcatgcagcgacgatccagctacgtggcttttttcttgaagaggaggttaaggcccctgggcctctgcattgaaaagatgcatatgacatttatttatattttatgcaacaaagatatgacgagaacatatattacatcaaaatacccgaaaccactatgcaacacctacgacaacgggggaagaacatgccacggggccttatatgccctaaaaacacaggcaacggcccaccagctaggtatcggggcatcaccgagtcaacatatggcgaaccaggagcacacatccggtccagaccctcagtgtgcacctcatgcacatg

SEQ ID NO: 4448 - DNA, 370 bp, Avena sativa
gatcctatggtcgacattacataattcttctggattttactggtgtgtgtattttaagacatgaaattggcagtcttaagaaaactgagagggatatccgtggtaattggatgagtatgtttttgcctgttttcttgcagtgagattcaagctagccgggcaaaagcatgcggcaagataatcgcaacgacggcggttctgcctccatggctccggcgctacagagaggcaagatcaaaacgttacggcaccaccactcttcaagtagacgtacgtataccacgcgtggatgcataacaccacccctgtatttttggagttgcacccaatctttgcgtctacctcatcaacctgaacatctgcgtccata

SEQ ID NO: 4449 - DNA, 285 bp, Avena sativa
gtgcagcccagctacaacaataccatagctactaccaccaactgagtgctgatcaaggcaacacagatgcaggtggcatgcaggcccttcccttctcctcatggtagttatatcttgatcaaccagatcctaggcagtttgtgttgatcatcagttaccaagtatgcaccccctgataatagtagtatgatcctgaaaacatcaccaagatgctgctcattttcctaacttccttgattcatctaacctatcaaaaatacccctctatttgtgattcagaattgc

SEQ ID NO: 4450 - DNA, 321 bp, Avena sativa
ctggaggaagtacggacagaaggacatcctcggttccccgcacccaaggttggtttttcgcacttttttgtttttctgaaagtggaattttttcagagttcagaaatgaacaagccattggtttatttgccgtgcctgatctagatcctacaacattgcaggggatactaccgttgcacgtaccggaaatctcagggatgcgcggcgacgaagcaggtgcagcgcgccgaggaggatccgtcgctctacgacgtgatctacaacggcgagcacacctgcgtgcacaaggccaaggcgcagccgggggaggcacgcaacctt

SEQ ID NO: 4451 - DNA, 466 bp, Avena sativa
cgcctccctgcggggctaaccaagcttaccaacctcaagagattacaggtccggggttgtctcgccatccagttgctgcccaaggtaccaactcccaagttactctgcaagaattagatatctacaattgtccggccatcaaatctctgcccaaggacgtcctgccaagttctctgcaagaattagtaatctacgattgtccagccatcaaatctctgcccaaggacgcccttccaagttcactacgagaattacatgtttatggtgacaccagcgaggagctaaaaagacagtgccgcaaattaaaaggaaccatcccaatagtcgcagactacagagcaaagggctactaatccaaggtaacaaacaactccttgtctgtcccagtttctacccacgattttctgttgcttttcctaattaacacggaagtgccggaatcattctccttttgtgtgcttcactg

SEQ ID NO: 4452 - DNA, 298 bp, Avena sativa
atatggtgccattcatgcggtgtccaactttagatccaaaggtggtgatggcaacttcgccctgtccatgggtttgacgattctgtgtcctatgcagcacaaggggatgacggtagcagacatttccagctacaatgaactgacatgcgtgcaactcccctgttagattagcccacatcagccaacaccacgataatcatcattgcagccactgagaaggatgtggagacataaaggtataatgtgttaatcaaactccatgcacagatggcatctgatcatgcagatgcccctgtag

SEQ ID NO: 4453 - DNA, 378 bp, Avena sativa
gtgcagtgtaatgttgcttcattaatattaacttgtaaagatagacacataatacctcactgttttcagaaatcagaactgcatactaacaaagaatgcaatattatttgacacgacgtgcttacaaacctcagtgcaattattctggccacaggaacaccaaaaagcagccacccaaacaggcattcaatattttgaaagcttatcctatcaactttcacctttaaactaaatgttcttcatgaattaactgtctataaaggttgtttctcttaatatattggttgaatatattgctcagctcaaagatatgtagcctttatgcttttgctagccggtgagatgcaccttttggcttttgtatatatctcttagcta

SEQ ID NO: 4454 - DNA, 458 bp, Avena sativa
cccacacagagacggtcactttgagtactcaatcccatagccactgggatacccacttcaactcttccaaaagcttcacagattatggtgcctccatttgccaaaacagctgcacgtacagtctaatggtgcaacaggtcagtaaaataaatatgtcacacatccaaactcaaaactgaacgaggcttatacatgtaaagcgttaaatagaatgcttcaacagcaaggtgctaaatatgaatgaccgaaatgttataatgtaaactatagcaatgacaaaagaaacacacgtgcatgtagtgcagcaatgtgcaccatctttcctgctgagagagctagatccgacactggctccattgtggaaaaaggtgaagatgaccaggcaccaccggatgcggcacggccagtaatacctgacatactgctggccaacgcacccagggaaaactgtgagcaga

SEQ ID NO: 4455 - DNA, 350 bp, Avena sativa
gatggatccggtgcagatcctgtatggaccgagagctactggaacactatcagcctcagggtctacgcggtgcagtctacgagttctgactggctcgtcctcctcgccgggctcagcgtcaccgcagtctcataccttggggtgattgtcggcagaacgtacatatcaaagatgacaaagcgagactgagtaccaacacttgggagtactggcccactagttctggggaccttgtaatgtggtaccctaatgccgctttaggaatcctaccatttgaccctgtaattttgagctggaaaacatgggtagttggcctaacatgaatttgagttgtcaaatttgtgatccca

SEQ ID NO: 4456 - DNA, 334 bp, Avena sativa
gatggatccgagtgcaggtcgctgcattctgagaacatatgtggcttacagcctgagataccactcccagaacatgacaagtgcgaatggactttctgtggtaaagcaaaatacttttgttccccgaatggttacaaaaggaatacccggccacaaaacgacccatcacgttcagtcagggtcatatcttgtcctggtttgtcttaactggtcataacatctttttcccaaatttacatcatgaaagataatgtgcacggaccgcacctatgctgcacatgatttttgtgcaaagaaaaggcacacaacgctggaatcatacattcatttattt

SEQ ID NO: 4457 - DNA, 415 bp, Avena sativa
atagttgtagcttggagggtcctgcccactcgccgatgaccagctccctcagctaccttttttatttgtacttgtactgctttttattcaacatcacgtgagagatgatttacataaattgggagtgttggatttgatctgatctctgtgcactaggaaattatgtcaacagaaatatgttatcgcattgatttaaccatacaacacaactgttcggacagtataaaagtagggaagatgagatatatatgcccctgcaaatgcaaagcggtgcatcttctaaaaaacgcccctgcaaagttagatttgtcatctcattattttgtatgaaccaaattgtccctgaactttcttcttctattaatatacctgaatttcatattttcttgttttgagcagattgttggatgcattg

SEQ ID NO: 4458 - DNA, 371 bp, Avena sativa
cagtgcaggtgaaaaggtacataacttggatcaggacaaaaaaatcacagtagttccacatagcaaattagcaccacaatggagatgagcaactagacaaaagatagcctgcaaaacttaactgaaaactacgctatatgaacttggcaaagttttcactgatttgaaaaatgtaaatgagaaatagactactcatagatttgtattccagttagaggagagtaaagagctgcccttacattcacattctctaacagaaaattagcagtatttgccaaaattgtatattaatgaagaaagaataatgtgaactgcacaaatcttgacacagatctcacctaaactttgccagacgattcatacagcttgct

SEQ ID NO: 4459 - DNA, 442 bp, Avena sativa
tagtagttcgtcggcaggtaccaccgcccttgcatcaacgctgccttcctcatccagcaggtttctagacttctgcggaggtcgtcgcctagttggtgttcaggtgcctagagagattggaaaacttacggcattgcacacccttggtgttgtcaacatcagtgcttcagggggggaggtcgtgaaagggctgaagaagctgacccaactgcgcaagctcggagtatccggaatcaacaagaataatagcaaggatttcttcaatgcaacatcggggcatgtgcatttggaatccttgttagttcggcttgacaatgacagtcaaggttgcttggatggcagctccctgccttgggagaaccttcagagtctaaaattatatggtcttcaagacaagctgccactatcagggagccgtcttgacaaactcaggaagttggat

SEQ ID NO: 4460 - DNA, 330 bp, Avena sativa
cttgcattgatgatgaaaccaccgggttaacttatgttgatccatgtatggcagaatcagaatcttctgactctggatcttctgatgaggatgaccatggtcagatgtccgtctgtgccgatattgaagagaactgtgctccagagcctaaatttttcaggagtatctcgtccaaatcagacttcttcagatctaacagaactccagaggatttcgcaacatggcagcgcattatacgtctagatgctatccgggcaaacacagactgggctttatactcccataaccaggctgaagtctcaaaggagaaggcactgcactgaatccatc

SEQ ID NO: 4461 - DNA, 761 bp, Avena sativa
gggaagagacgcgtgtaccagaaatgaaggctgttaataacgggtttgtggtacgaggtaacctagatttctaatttggtaccttgccataatgtcttggaatgactgctttttggattttgtttgttatgcatgaatgtgtaaacttcaatgctttctcttcctgattctagcaatgagaacgcgttcttattattccccttttgttgaatctttgtagggacatgaggagcaccagatcatgctgcgctttccagcaagctcgccagtgatttggtagcagccatggaggaggagcaggaagctccgggctttcctgatgtgcccaaggatatccccgtcgccaccaagtccctcaccatcaggaccagcaatgccgggtacggcagcggctccgaccggtccaaccccattgactcgccggccatctccttcacgccgcacctctactcgccttcgccgccctcctccgcgttcgtgtcggcgctgcactggatccatcgatggatccagtgcagttcctgtggactgcggagagaatctaggcatctacccatgtgattcagtgcaggggaattggacgcttctttagcttctgctgatcatgtccatgaactttaattaattagcgatgtggccagataagccgcaaggtaaatcacatggacatggggggatctaggcatctaattgaggcctcccaactgctattactaggcgagcacgttcttttctaagcatggcattggtgctcctgcact

SEQ ID NO: 4462 - DNA, 453 bp, Avena sativa
cagtgcagatacataagtgagcacttacaaaaagaacggtaaatgcataatactttgcttctgttcaattttggtccttgattttctcccttgtaatttgacttgttaaacctgttcaggagaaacttgctcaattagctatggctctgggtgaattgctggtttcttcagtgaggacaaggcgctaaattcggttcaacaacattaggagaaaggagaaaacagaccttgccggcgatgaggcttgggactcaggtgaacatcacgagaaaggagaaaacagaacatagcaagaacaggaccaattaactccctatggaaccgaatttaagaatagtcgcgccccccacctcactgtgtagagagagaactgctggggcaggagagatggcgcgatgctcacgcactactctgcctcgtgtcgtcgcccagctcctccttggcccctgggag

SEQ ID NO: 4463 - DNA, 382 bp, Avena sativa
gggccgtgttcggcaaccctcctcgtccatggaactattgtttttctagttttactcttttttactgttcaaatgggcccatatatatccagcatatccatgcatgtcaacatctaatcggcatgtagaaaatgggatgattatgactgatcgcatttttttacgccggcatacataccttcaaattgcatggaagaagccccgctgatcaatgaccaactcttttgggatcaaggagtttactgatcggtcgttttcactatgtgcagagacctaactggtcgcacgtgaagcccatatggcgaagaagacgggcgcgcggccatcagctatagcctgttgttgggctacacacgataaaaagtgatcgggtggagagcga

SEQ ID NO: 4464 - DNA, 343 bp, Avena sativa
tccagtgcagcaatataattcagcgaatcaagagaagtcaaaagacaaagaggaaagtatagtagcttataaaaacaatgaacatggtatgtgcacggctatcatatgcctaggtcacagtgctactgaacaattaagagtgaatcactgactactggacacataccatggtcctcagctgagcacagtaagataactttgggttcaaatgacgtaaagcttagatcactggataagcatgtaccttgtgaaaatacaatgtgcaggtaacactgaactgaggaagtaaatggagatattgctcgtcaccaatttccagctgtgtgaggactgtcaaaagaac

SEQ ID NO: 4465 - DNA, 467 bp, Avena sativa
tgaacttctgtagtggtccgtacgtgacagtcattcggtgaagatgcggctacgagaatcggaccggtgagaagctggcgtgtgactgactttcgtcgtgtgtgctgctgcgccagcagtcaaaaagtgtcccttgttcaaatattagtatgagtttgcctttggctgcactggatccatcgatggatccagtgcagtgcatgatcactaactcgtcaaactacatgcagttcaactttagaacaggggactacaactaaaaatcagcaactagtacatgatgactgaatagcatttattcgtgccacagctacttaacactggttggataatgcatttcctttttaagtgacaaatacattgagctgtgaacattagttaccagaatagccatgcgcggccggtacgacgtcttgcggagctcccggaccacctgggtgatctgcgagtgagtcctcctgcactgt

SEQ ID NO: 4466 - DNA, 590 bp, Avena sativa
gccatacttgtagaagacatggacgctcaagttttcgggaaaatgctggcgttcatttacagtgactctgagccagggaacaagcgcgagcctcctaggctagctatcggccaaaatagttgctctcgcggaaaagtaaacgtgggcagcaaacagagcttggcatgaccatgtagtgcttgtgttgatcgtgtgcactgcaagggatcaaggatcaaagcaaagagtagcttgacatttggggcaaggaaaaggagaagcgggacatgttgtgtaggcctggagaatatgcacgggagcaaggcaaagttggcgtttggagctttcctagctaggtgcaggtagtgatggggactggtggagccgtacggagcttgacctgcacgagctggtggtggggtgaatctgcactggatccatcgatggatccagtgcagatataaatattcatttcttcatttaccttttgcaacacatctgcattttataggtttaactggcaacaagacaatgttctcatgcattcaagcttttgttacatgtagacaaacgaaccgagcatcgccccacgtgggtttgggtcctggact

SEQ ID NO: 4467 - DNA, 356 bp, Avena sativa
gatggatctagtgcaggctgcgggagcacggtggagtcgtttccaaattaagcgctaatccgacagacggtttccaaaataagcgctaatctgataggtggtttccaaattagtgggcggttagtatggaaagatgcgcaatgtcattggagcatcctaggccaccctatctaagaggatggacgggtgagatcaaatgttcctgccatacttcttgcttttataagtagtggagataaataactgttgtttatatgtatgattatactccgaaaaccagaagttatatttgtgacagaaaccagcgactaaactcaacgaacccgtcttgacattgtgcactgcacggatccatc

SEQ ID NO: 4468 - DNA, 409 bp, Avena sativa
acgtaatggcaggcagccactggtgaccatgctggagatctaccgctgcggccagcaagaacagcagtgctcaaaagcctggtgtgtgtccacggatgatgctcgttgatggtgttgagctgaaagttgggtctagagaaagccatcaggatatggattgtagtccagcatgcatgcagtcactcctaggttcttctcaccagcagttagtggatttagttattccacacatctcattggcttcaaatatagggtggacccgacaaagatagctgaacctacatcttcacggggaactcaacttttccatccatatagcatcacgccttgtgagaggatagggaagagaacccgaagtaccaaagacagcacctaatagactacccgcatagtagactaatagaagaca

SEQ ID NO: 4469 - DNA, 333 bp, Avena sativa
aggtccaaccagctattcaagccaccccgcacaccagctggcacttgtatattctgtgaaaagcttctccactcaatagatagaatgcatgtatttagtagagaaagcaatcaagtgattgttcaaagcatgaatgattacactattaataatagcttgcattggtaaaaaatgttctcatgagagtaatcacttcagctttcgtcagcaccagtgtattgcttgatcactactgtcaagaaaaatgaaacgaaatttcttctgctccaaagatagttactctgggacggttggggtgggcatttgcttcattccttacagaaactgctgcac

SEQ ID NO: 4470 - DNA, 296 bp, Avena sativa
cgcgtcttctcccgtctaagaacttagcaagagcaatggtgtcaggacaaagcggagggaatgagctcttaaaaaatgaagccaatctgtaaaatcaacctgttgaagttgagggccctagcacaacaaaacggatgccttaaccactgttggaaataatgcataggctaacattaatataattccaacaaccactaggtcaatagttcaatacatgatttcaacaagtaaaacttattggcattctattttagataataatgttcaaatttcagaaaataacttctagaccagaa

SEQ ID NO: 4471 - DNA, 333 bp, Avena sativa
cgccaccgctcacctccagcaaccccagtaagtacagtacagacgctcaccctttccacagttcgcaacttcgccattgctcgttcacccgaatcacacggtggagtggaggagctattcctactccgctactcccgggagttcgctttcgccgcgcacggatactttgtttacccaggagcaggagcaggttggattctcggaacctgtgggctggagagatcattattttcgtcctctaattcgtctcctaagtttctccgtgtttgttgcaggccaagtgctgtctgtgctgaaatttcgccaacctggtgccgttggggccatttctgc

SEQ ID NO: 4472 - DNA, 396 bp, Avena sativa
gactggtcaactcgtctgctgactgggcgctgactgggtgtctgactagtcaagcctgggtgctgaccagtcaacgaacgatctaagccgctgatctgaaatctgacggtggctgcactggatccatcgatggatccagtgcagtcccgcaagactaaaaatccacaccaactagactctggactgcggatgcgcagtgcagccaatcactctgctcgcaagacatctttgttcatttgttgagatcgggagtacgtatatataatgctgaagttttcggcggcacccgcaagaggctaagtaatctatccacaccataagctagacgctgaaagtctgaatatgcagttttacacccactctgcttttaaaaacttcctccgttcattaatccag

SEQ ID NO: 4473 - DNA, 341 bp, Avena sativa
ggaaatgggacgttgtagctgaaattaggagaaaaatcagaggaatggtggttgagaaggaaccaggactgagctggattgagattaaaaatatggttcatgtgttctctgcggatgatgaattccacacccagatagatgactgtcgtggcgagttgcttagacttaagggaaacatggaattgttggataattctgaaaatgaattgctgtcaagtggctaacttgccatgaacagaatttcagttaaagagcatttgacttgcatttctttgaggactgatggttcataaaaccctggcgtgagctttcttaagcttaaaaatatgattctggtcttt

SEQ ID NO: 4474 - DNA, 360 bp, Avena sativa
gtgcagactgcctgtttgctagaattctgaaacaaagaaagctcaggaatttaattggcctttactaaatgcagccaactaacacaatgcactggctaataaccattgtagaatgatgggaagtacagcatagctttaaaggaaaaactctctcttttggagatggaaagaatcacatctcaaatgaagttttgctacatcagctggccagttgggacaaatttgattggccaaggaaaactagttcataatcagtaaagcttcactattacgatgaagattggttgacgctagaaaacagcacatttgaggaagtatcatcaacatcaatgcgtggactgcactgggatccatcatacg

SEQ ID NO: 4475 - DNA, 635 bp, Avena sativa
tcgcagcggcggcggctcccaagaacgactccgcgtctgcggtggcaggcgacggaaaggaggactccaaggggctcttcacggataatatccagaccagcggcgcctacagcgcccgcgaggagggcctcaagcgcgaggtgaagatttagtttccagtttcctgtttgattatcggtaaccgcttgctggagcaatctagtgtttcattatgcgcatttgctaaggtataggttaatttgatctgcactggatccatcgatggatccagtgcagtctgcaattctacggaccaaagcagagtacgacagtggttagaaggcgggtgcaagatgacttgtgaagggattccccataagatcagttagcgtagtgctgtcatccgtggcttcgttaataaagatccactttcacagacacattagggtatcttgatatgacaactgtgattaccatggtcttgacggaggtgggtatgtcaagatggtttgatggacaaaggatatctatgctcatgttgggtgagtccgctaggtgctggcggtggtttgaataaaaaagatgaggtgaagacatatgtttatgtggcgatcaacactttgtttgcggcagtttctcaacaagtgggggtgacg

SEQ ID NO: 4476 - DNA, 275 bp, Avena sativa
cctctaccaccatctgctttgggaaagccatatactgcgatgtactctcatggtggtcgtttctcgcatccctttctacccctagtaagtatttttcgtcatgatctacttttcactaacagaccaagtaaccaaacacgacaatcactttctatctgtatctactctaacccgttggagttatgctacggagtaatacagttagtttccagaaaaaaaatagccaatatgtaagacatggaaacttctttaggagaagacctaatcactagcta

SEQ ID NO: 4477 - DNA, 499 bp, Avena sativa
ctaccaaatgtaaaaggtgtatctcggaagggattgggccagacagggagttctgagagagcagaagataggtgaggttgctcagttggccaagagaagctggaatttggccggagaaactattgtccacaagtgcaaggtctgtcaagctactacaattccctagccatgatggaatttcgccccttaactgattgaacgacaatatgaacgtctccaacttgcagttctcaaaatgaatatcaatctctccagttaagctgtttccggtggcatcaagaatcttcagtccactgatatggctcaaggtttttggaagactcccgctcaaccgattatctagtagatagagctcctccaacttggtgcagtttccaattgaatctggcagaaccccagataacgcattttcatgcaaccaaagttttctaagacttgtcatttcaccaactgaagaagggatataaccactgagattattggaatggagatacacatc

SEQ ID NO: 4478 - DNA, 314 bp, Avena sativa
tagaacaatgggcaaaacatcaaaggttgcaacacgatcaactagcagtaatgcaactggcagacaacccccactgatggtagaatatcatttgatgtcaaaaggtctacttctcaacgtagtcttaacttttagtttattatagtagctgtagcgaaaaaaattcacagtaaaacagagaaactaataggagcacatgtaattgacaacctgttcttctctaatccaacgaggaatgcagcttctgcaagtgctgctaccagtgttcctttgccagcatcatttccagtcacagcgtactcactaacaattgc

SEQ ID NO: 4479 - DNA, 492 bp, Avena sativa
aagtggagatcaagaaagagcaccaagttttgttggtcaataagaccaccaaattcaagaaaggcaagtcttaagcaaaagggacacttcaagaagggtggtaagaaagttaccgcgccgacgaagaagaccaaggctggacctaagacctgatactgagtgcttttactgcaaggtttgagaattcagacccacatgatattgtccgtgatctcaaattgatctttgagactcatgcggcaattgagagctatgaggcttctgaaaagttctttaactgcaagatggaagagggcagctccgtcagtgagcatgtgcttaagatgtctgggcacgcaaacaaacttcaaagcttgggtattgtgattcctaatgctttggtgatttaccgtgtcctccaatcactaccaccaagttacaagaactttgtgatgaactacaatatrcaaaacatgaacaagcagttgccagaactgtttgctatgttgaaat

SEQ ID NO: 4480 - DNA, 419 bp, Avena sativa
catgaacaggtgaacatacatgtgatatttagagcaatatataccgaaatactgacaaactaccagcatcctgtaaagaaaagcgatggacagaacattgaatagaaaaactgcaaaaatagaacacgtggctgactggaagcatataagcctttattattcagttcacaaacttggaagttatattgctagggaatgaaagagaacaaagtctgctatgtactaacacacacacagtggttgtgagttgtgtctcttgctgatcaagagacgcaacagatcctaagctgaagtgtgtgcattgtaaataatctaattcagccatccaattttttaccaaccaaggcaggtgttcctgcattgcattataagaaagagtggacacctgcaaaatgatcgtattcattcatctaactgga

SEQ ID NO: 4481 - DNA, 426 bp, Avena sativa
cagtcttttgcctgcacaaataagtcatgagactttgtatcagtctcaagactcccaaccaaatccccagaacctgaactgggaaaatataactatggccatgctgagcgccccaaacaacaaaatcctacctccgaatgcccaagagatacacagaatttgtctttgtacctgctgaaggaacatcggttggaactctgcttgcctggaacgacaaactctatactgtcacggtccttatgcagaataaacagtccatgtcagttcaagtaacatcaaacactaatgacactacaatagtcattacaaatgtgtatgcatccggcgaccctgaggagagggcaattttctacgaggaactgaaacagatcagtacaggcttcactgttccttgggtactggcaggggattttaatatctaccgat

SEQ ID NO: 4482 - DNA, 357 bp, Avena sativa
ctgaactccctttgagctctcctctgaccataggaagttggtgacaatctgttcatgtgtaccaaccaaaagctgtgtcttgcagtagacatgcatcaatggtccggtcttcatcaacttgtagaagctaattgtgtgctgttggcatactaagctcatgaatactgtcttcatctgcaaacaactccttgggacgattgcgtgtaagtataggaaatagcaggaagcaccctgtgttgcgttattaggattactgggttgctgagtagttgatggcgagcgcctgatgtctgaagctaaatgttgcaagttcagatcacatttccattgaggcacatgtaaacaagttgcagtaat

SEQ ID NO: 4483 - DNA, 554 bp, Avena sativa
ttgtagttcctgtagaagaggattccttcccagtttttaccaccaaacccagatccataagcaagccaaaaccaaagacagctggtggttcatcccagaaagaaatgactacagctccagcgtcagaagtggaagatgtaaaagagaatgaaaaggaaaaggcccgtcgtatggcggaggagttggagctagcaaggaaggcggaggagttggcacggaaggaggaggaattaagacagcagagggctgcggctgaaaaggaacaactcgtgttggagcaaaaggccaaagctaaggaggctgaagagagaaagaaaaggcaagcacaaaaggctctggaaagagctgagcaaagagcaatcaaggaagctgagattaaggaaaggaaggtatgtttccacaatcttgtgctttcatgttagagctcaatctttgttgattaaacatatgcccacacaacaaattattaattgtgcatcctattatcaaacatgtgcagaggagacaaaggttggatagaaaggaattggtaaatggtagtggggagggcaact

SEQ ID NO: 4484 - DNA, 447 bp, Avena sativa
agaacgcgcgagcgaggggaaggcactgggaggtgcaggagatgatggcgagcaagctagttgtgcaatcccgagatgctgcgcggaagtttcatcacggcgaagcaatcaatgcgtaggtacctcaggttaatcatgtcgccaatattatccggcaacttacaccgcctcggcccctgtacggagatgacccgaatgaacttggacgcgagcaagaaatccagatcatgggagaactgagcgtcgttgtcctccttgttgatgattctgcaaatgaaggaccgcagcttaggcaacttttttttggcgaaggtggtggcacatcgtctgctgttgtcactctgaacggagagacggcgtgctgttggtggcacacggacgtcatgtacgatgttgatgatctccatgaagccagactcacggacctcccactgcactggactccat

SEQ ID NO: 4485 - DNA, 375 bp, Avena sativa
atggcatggtagacacgtacatgaagttactttacaattacaccggcggtgacatgaaagttgaaaccattattagctgtgtaattaaagaacaaaaaactacctctatgacggacgcgatgcctgcccctgaacttcaaaagcacctagccccagcacaacttcctggatccagactttgagcgatagaatatgcttgttcacagactggaagaagataaggactgtgtcagggatatcgcttagcttgcacgagtcaaacttagaaactcagggaaaaaaaccatgtttttctctttataaaaacgcagataagtcaaggagcgtacggatccgggcaacattgcggtcgtcgctgccgatgtcaacagcggc

SEQ ID NO: 4486 - DNA, 269 bp, Avena sativa
gctggacaacctcatccctgttggctggtggcgcttcagaagaatcagcctcgccatcggtaacaccctggctcttctccctctggctttcaccggaggaagccgctgcgacggtggtctcggacggctcagagactgaccctggcgtcgcggaatggccagcggaggagcctgtggttgagacacaactcagagggctttcgtctggatatccctgaggattgtttggagatacctcagcaccgggtacagctgcatcatcatgatgc

SEQ ID NO: 4487 - DNA, 302 bp, Avena sativa
gcaggaagctcaaggttgcaaggatcattgggtttttgtgtttttatttaaacatgcaatgcttgtaggtatatatgtcaacttatgaacacactgtttattgacaggatatttgtggaggtggtcccgaaacttctgattgaagatcctttgcttaccgaatctctaaagtctctaaagaaacatgcagtaagtttaatttcttcttcttcagagcatgttaggggattcccaggataacttgtggaataaatgaacaatgcagattataaattatctcatttgacttccttttggtagca

SEQ ID NO: 4488 - DNA, 280 bp, Avena sativa
gatggacccagtgcagtataagcaatgggatcccggtgtcatgtgggttctaggtgcagaaagggataaagcttcgctgagcacgaacatggggaactatggatcggattccatggctgagagacgatttttgtacagaagttggagctacagtttgttgcaatctgaatgagtcattgcttgggggcaagcaatgtttcttcggggcggtaatgtcatgcccgtgcattgtgatactctgggctcagcggacatgggccgtgggctaactacaatgggc

SEQ ID NO: 4489 - DNA, 521 bp, Avena sativa
agtgcagaaccggaggacgcgtgcgtcatatcctctggatgaattggatcttttccatatatttaggttctgccttgttttattttagagttttctgaagtattctgtatttctgcaccatgcctacagcagtatgtgtcacaaatagactgtagattgttctcacatgctgatatggagcacatgttgattgtgttgctcagtgcttggctgtttgtctacatggttgtatttccatgcaaaactgtgcgagtattggcatgtcttgagctcaccatggcacaccaaaatgattagtgaagggatgttgaggaggaggcttttagattcttttagaatagactgaatctgaaggatttgaatctaactaaaatctcaatccccctctcctacgcaaataggccctttctgtaaaacaaaatctctattgtctgctctatttttctgtttaaagttctcaagtattgatgctatgtacaaacacaaaatgaggtgccctttcacactgcactgaatccatc

SEQ ID NO: 4490 - DNA, 373 bp, Avena sativa
cggctgagcagtcttgttgttatagactgcttgagcgtagaaaagtgatagagagcaaagctccaaacctctctagtttttacgtgagggggcactgggtggacttctgggagtgaagaaacattgcaaatgaggaaactagacatggggcaaccaaacttcatccgtgatgcttgtgccaagctcccatccattatgccaaatcttgaaactcttgtcatagaatcaaggtgcgaggtatgtatgtattaactacaagataggctgttgtaggatagccatttatagggattacattagtcgtacctggtgtacagtatctgatacatggcattttttttcgcgacctacggtaggtacctacctactacgt

SEQ ID NO: 4491 - DNA, 332 bp, Avena sativa
tccagccatcacctccataacaaagatgcccacccagttcccttcacagttgcctgcatttgtccatctcagactagatcagctccacggctcctctactgtcacccaggcagagcagtccattgcaagagttgtgcacgaagaggctccgagaagccgagggcctagacagctggtacatgtacccattggcatcggcgagcacggttgaaagagacctatcattcaccctatcatttgcaaagagcagcaacttctgctggccccggttcaggtgctcgtgaacgaaatgcagatccgagagcaaggacatccaggacttgcagaccatc

SEQ ID NO: 4492 - DNA, 288 bp, Avena sativa
gatggatctagtgcaggtaaggaaagagctagcagaacttgggaggagaggcaaaccctttctgctttctctgatcagcagacaacagcgaaggacatggaatgatggaaacaaaagaaaggagaaggtcacctaggccatggttaatttgtatgtataggctcaaacaaggttacatgagctgcaaagctttatctgccgctgccacagtaatttgatttgcaggttcagcaagcaatttaagcacaccagcacggcagggtctagctataggtaataacatgagca

SEQ ID NO: 4493 - DNA, 370 bp, Avena sativa
ttacacattaacgatcactggccatcagaacagaacatgcttgggtacacccagaaggcctgcagctggcggtaccagtttctcttgaacacaagatcagggtcagtggaaggatcccacacagcatctgcctcgtcacccaagccatgtacgttccaaggctgagagtaatgggcatagtacaagcggttgctgctccctccccactgttctgggctcaagcaagaaaacggcgggctcctcacatcaccacctacaaagagtgcccagttgtccagcttcttcacctccacccattttgcaggtttggctgacatgtcaaggcggtagggtttgtagaggactggtactccaaatgacaagctcatag

SEQ ID NO: 4494 - DNA, 327 bp, Avena sativa
tgcagcatacataatatattactggatggacagagacttgatgacattaaaattctaagatcagcacatgaattgttcaacatcgtagatttaacatatatacataatacatgatttaacatcacagattctgaacaaaagaaactatagcgaataagcaccttacttatatctacagcggcagcagatcatccgcgttttgcgtagtgcacccgcatgttcctaccatcaagcacctgaaaattaaacaagtgtcatcatgtaggaaagccgcgttagcaaaaggataaaagcgacactgagtgctgcataatatcctgcactgga

SEQ ID NO: 4495 - DNA, 474 bp, Avena sativa
caatgcaagtttggacatggggctcatttgttagtacttgatagttactttcatgtccatcacagattgatagggacacaacaagtggtatcagatttcttttgccaaagataagtcttaatgagctcgtgctgtgtcacaaactaaattttgttcattgtaaccagcactaatcatatagcagctaattactctaacaattcagctcaatgtcaattgcagcttctaacccgtgaatcataatttctatcacttgaactaactcagcacgcatatcagctgtgtgcaacatacataacactgaaggaataacaaaaaataccgtcgtaccattgcatcattcatcatccctgttgggcctgttcacacctttctgccacaccaccacaaagctagaagaagaaatcagaccctgagaatctgcagtttattggcgaatgcaatggcaacccagtccggttgggttgctgacca

SEQ ID NO: 4496 - DNA, 336 bp, Avena sativa
gttgttagctagtgctaggagatcagttagactatcataagtgtatcttgtccgtgtatataaacactccctgatgatcaatacaaatcagctctctatcgtctcttacatatcacgatagtaagttgctagcgcaaaatggtggcatcgtcatagttcaattcagcttgatcaggaagcactaaagatagttgttataatccagtttaaacaaaatatcatattctatggtattgtgaccccaaggctaataatacccttgatggaaatcatgatcatcaacaagttttctgcaaccggttacaagcaaagaaaattgcaaattcaatcatacct

SEQ ID NO: 4497 - DNA, 423 bp, Avena sativa
gagccggcgtgccgccgcgccttcgttgccctccatctccattgccgccgtctgcgtggccatcagcagggccatcatcagcgccgccagagcgcagagaactaccatcctgttcttcttcttcgcaagttccacgccgccgccgggagccatcgcttcagcttgagaccttggcctacatcaagcgtcagtaccacaagacaaaaatggcaggaacaagatggtgacggctgctggtgcttggggtcgctgaaaccagggcactcacgtgcgacatgaagtagaggaaccagcgtgctggcgttgcaggttcgtggtcggagtggagcaccaggagacggcctcgggaggcgcaacagagggaggtccacggcgatggagcgaggcgacgcggatgaaggggacgcgtggccgggtgctgtc

SEQ ID NO: 4498 - DNA, 520 bp, Avena sativa
gttcggactgttcaagtagaaaagcggctcaatgaggtggtgaaccgtttgaacaagacaaaggtggagaggaacgcctgacctgaagggtacaagacttctctctggaatatattttattctctcattttaagacatttttccattttggacttcttaacgtattagtatttggtttgcaacctattgtttttgaagaggcttcaaggggatttgacgaactggtgtgcaatttaggctagatcaagtctgtaggcaggcactagctggtttcttcagcttgtgccccagattgttcacaacataattactagtactgaacagcatatgagtccaggcaggaattcacatctttctgcttccagtgagcaatatactactactatctaattcggcggcgggccgcaagcagaaaacatcccctgtgactgtgagtagacaaggacaactgtgcctgtatggaagcatgtgtttgtttattgatctcggtcatggaaaaccggtaagcaggtgagggtag

SEQ ID NO: 4499 - DNA, 355 bp, Avena sativa
aagtcggcgctgccgttccaggaggccagtgagccgccatcactgacctgtgctttgaaagcaagcagggcggcctcgtcaccagcgctcacaatggcgatcatcaggacggcgtagaagtggtccatatcaagctcatgacccccatcgccatgctactactggctcctggtttggtaccttagtagcaattccctgcttcatatctaatctggtcatgtgtggcgctcttgtagttatttgccaaaagtgttgtgctaaaatttcaacaagtcctcatcgcttggctcgctatcattaaatgaaagttagacatctgtcctgttttgactttatcaaagttattagacagggc

SEQ ID NO: 4500 - DNA, 587 bp, Avena sativa
gatggattcagtgcagggagatgaaggcaaggggattgctgccggattgctggaccttcaacattctttctgccggagcttacaagtttgggaaggctgtgcagttatcgcatgagcaggaggagggttcacagatatcagcagatagtgtagatatggtggtctgtaggctttgttgggatggccggttggatgatgcccagcagcttgtgtgtagtgcaattgagcagggtgttccagtgactgttgcaggatttaatgctttgattgctgcatatagcaaggagggattcatagaagaagcccttgagttatatagaattatgaaagaaataggctttgcaccattgtcatctactttgaattacttgataatgggactgtgcaaccaaagaagactagatgatgcacaactcctgctagaacatatggttagtaagggatattgtgtgggtacctcatttaccgtttacatggattcatgcttcagatatggtgatgtagaaggtgccttgaaatgctgggatgatatggtgaaagttggcgtgcagcctgattttatcgccttctctgcatatatcagtggt

SEQ ID NO: 4501 - DNA, 402 bp, Avena sativa
cagtgcggcaggcataagctggatactcctagtgatgaaatccatggcaccatgacagagagccaagaggttcccataataactacgtaatgacaattggcaaagaaacagaggtgccatgatgtagctcagtgttattatattgctcaggaccgtgcgatctgccatccatgaagtcagatcaaatgcatggccagaagagaagaaggcaatataactacgaagaactcctgcatctccataaattcagacagcagcctactggaccagaccaattaacaaaaaagacgcagtgtaccatcacagtgcatctcggtctataatggctagagatctgcctgtacggctgtaccgaagattgtcgtagtagtactagtattaaacattctgcacggatccatc

SEQ ID NO: 4502 - DNA, 472 bp, Avena sativa
  modified_base (154)..(154): a, c, t, g, unknown or other
  modified_base (163)..(163): a, c, t, g, unknown or other
tgtgttgtggatcatgtcctagctgtgttatggttgttgtcgctaaatttggggggctccccgtatgtgatgtgctatgattggttttggtcgccgcctgtaggcttgtcgcacagcagacggtgactttagcctggactggcttggggggganagccccctnttacattattggtggtggcagagcattctgttgcggagtgctagaatctgatatgcctttactgcaaggacgaaactgtacaccctttgttgtatgagctgatgctttttgagcatttactgagatgccggcaaggtttttaagaatggagttaggtttggtaggagcagaggctacatgttgaccatcatgcactgccaatgctttctgactacttgtttgatctatgctggttgtcttttcggacaacaatgacacatcagatttctttgcatctgatttggaaggaccatctgcactgaatccatc

SEQ ID NO: 4503 - DNA, 329 bp, Avena sativa
tacaaaacctcattatcttaagagtaagagttttgatctctctgttgactctagctttaccacaaggtccttcaagtctgactctttcgcagcaattaattcagttagatctaagatgattttctctttttctgagaggatttcagatagtctgctatactcatcatccaagctagcaattatgttttctttctcctctagattttcttccagcttatgaactttatccttctcagcagaaataattttagcagtgtccttcatcaataactccctctctagcattgtaacatttagagcctcatcaagctggcaaatcctttgctcaa

SEQ ID NO: 4504 - DNA, 294 bp, Avena sativa
tatgatgtcctctctgggcgcaaagtactcggcggtcatctcggacaccttcacgagattgtgaatggtatcttgttagtaacacagcaaaagaaaaaatcagtccccattttgaaagaaaagaatcacatcatggagataattgtgaatactatgtattattaccagctgaaagatgaggtcattggagaccccctggaagaggtagacgttctgtacgataccgaagaagaggtggtgcgcgatgctggacctgatggctttgggcagcgcctcaagggtctcctgctgctg

SEQ ID NO: 4505 - DNA, 285 bp, Avena sativa
tagagcgatatgtttgatgtgcttttatccccagataagactaagttggggcatttcttccaatccaagtaaaaaagactacaatacaggcaacgttaataaaaactccacaggctcactggtcttctgaaacaccatagtaaatgaccaaagctgtgtcttgtccaggaatccagtatactgtatcgcaacacaatgcacttggcaacatcaaagttaaagtactactcagagcaactgcaagagtacgatgctaacaaagagtcacttgctaaaagaaggtac

SEQ ID NO: 4506 - DNA, 351 bp, Avena sativa
cgttgtacaataatgcagctgtttatccataacaagattatccatctattctttaaagtggtccaccacactgctggagaggttactcatgtgcaggtgctacaagacatctgcatgtgccggagcacttcatgcaagttagattagtctaactcatctgataattgagatgcttttgagaaatacagagagacacgtctcgcctattatttgcaccatcaatgcatacacacgtgttaattagctagaatgcatcatgtaagatactacggtctaagagaatgagtcaaaagtgaagtgaagtaaggggacgaatgtgagcaaaggggcaagctgaattattgtacaacg

SEQ ID NO: 4507 - DNA, 420 bp, Avena sativa
cagttcgcggcaggcatctctctccattcacataatctaatttgaagctaagcagcaaacaatacctaatttgaagcggcaattgtccaattggggggcacttaatacatagaaatcatgcactaaatgaggtgtgtttgttgttcggcctgcccaattattttcttgtagctccgccacttcctgggattcgctgtctattatttctagaatgtatgcaacagaaaggtgagtagccagccaccattcttgctagatttcttttctgatacttgaaagtttatcagcaaacatgtagccaagctctgtgatttgggggcggaggacattgtttgatatgtgggatgggtgttgtgtggcaccttgtcctagaagcacgccgccaacctttgttgcttctgtttttactgctgctaggtt

SEQ ID NO: 4508 - DNA, 331 bp, Avena sativa
cgagtcggataggcccaagttgtcccgctgacatcatgtacctgggaattcccctcaccgtctgccgtccaacagcttcccaacttcagccgctcgtggatcgcgtggctcagagactaccaaattggaaatccagattgatgcagaaaccaggcagactggccctggtaaaatcagtactgggaaccatacctctgcaccagctgctagttcttgacctgtcaaagcagacaatcaagaagctggcaaaaatagagagaggtttcctctgggaaggacaggccacggcaaatggccggaagcctgccatcgttcaactggcacgtcgtgt

SEQ ID NO: 4509 - DNA, 487 bp, Avena sativa
tcatgtacttacaaaccatccttctggaaaatagcaaatgcagttaccctgggaaagactgaaaggaaactagatggaagaaatcgtgggaaagctatcaagatccctgaatgcgtaaaggtggcaatcctgcaggcactcagccgcataggcctcaacaaccgccagcttcccagagaaatcccatcgctgaatgatctcaaccagtttccgaggtacaaatgggcctgtctggacctggacacgtgctcgcaggtcattctggtgtggcacatcgcgaccagcctctgcgaaatcaagcttgcgcaagagtgtgaaatggacttgaccaaacccaggttccttcactctgcctggtcacgcctgaagacattcttctgttgcacttccaagccgtaccttgtaaatgacaatattcatatgcatggagacctcaagacttgttaccacactgcaaccagcttgtcacgttactgtgcttatctaa

SEQ ID NO: 4510 - DNA, 375 bp, Avena sativa
catccttgggcaaattcattaccacttgtgtgacaggatgcacatgttggcttgagtatattgcactaacaaaccttctagcatccatgttaaaaacctggtttaacaaaatatcgttagcacattccagctaatcaaaccatgcactaatcagtacaggccaacataaacacgagagaactgtgaaattatatttccacagaaaacgcaagctttcggaatgttcagttataacttgcttgataattgtagtactgaactagaaaaagaacagtgctatctagtatattctgaagtttgattggcaaattcaggttttaacttctttaaaatatatactttttgtctaggtcctctcactactatgcagcgata

SEQ ID NO: 4511 - DNA, 429 bp, Avena sativa
gtgagtcggggggcaccggagccgtgtccgacgccacgggcaccaggaaacgggagttcccggacctcaagggtaggtgtcacaatctgtaccatggaaattaactgatgttttgattataccgattttttgatttattctgtttcctttttattttttggcgattggtaaggagggacgaacaacagcaagtccgccgaggccatggtaagctagcatagcagcagtcaattcttgatagtacgaagaattaccgttactttagcagtcagttctagttccttactttctgctgccttcatcaggtgaaaggcgtgagcaaagagtcgttccagtggggtaatgagattcgtgactctccttgaccttgttaatgttactgctggttcttgagactgtctggcgttgttaattaatgtgggagattcg

SEQ ID NO: 4512 - DNA, 418 bp, Avena sativa
cagacaaaaggcttgtaagaatgaattcagaggcatgaagaacagaactgaaacagaagtgcaaagctgaaggatgtaaaaataaaaacgcaaagggcttgatttagttaagtatggtaggagcttattataacgtagtattgaattcagatgcttttcaatccatgcaatatatttgttccgtaggaactagacatgtctgactcggaagatatgcaccgtacttatcttcatgaacccctgccttctttcatccatggctaaaaaccgaaatcaacacaacagacagcacgtcatcagcctacacgcctcaaaacaagcagaagtcgcgcatgctaaatgatgaaggaattcacaggggaaaaacaagggaccagagacaagccgtgccggtctgtatccctgcactgaatccatc

SEQ ID NO: 4513 - DNA, 425 bp, Avena sativa
ccagtgcagatcacccatgcttgatgatatatacactcttgatcaggccccctatgctgaaaactcttgaaaacttcctttaccaacacgttgaggtgtccaacaaatgactgctcttttttcatcctatggtggctactcgcaagaatatactgcctgtcgtcaatagttcgcccagttcatctgagcatgttgctgctgctgataaccattggcaggtgggccaaccatttcaacagctccagggatagtctgcggtggctggagcagtggatgaacagcacctccagcaagagtctgtgctggatggtacacccctccatatgagctatgaccagcttgggtaggggcaaatgcaatatgctgcccctgtggatgcagaccataaaaggtgctagattggagggcaggtagttcccgtccgg

SEQ ID NO: 4514 - DNA, 454 bp, Avena sativa
cgagtctaggaacgcaatacccatcggtggcatgtcggagaccatcaagataaaggtgctcggcgcaattgacaccacgttcggcacacatgacatgtagcagttttcaggttcttattccaagacctcttctatgtcctcttgcttgtcatcacctgcaacagaatcaccagcggaatcaatcatccagaaaagcacacgtacaagaataatgcgacctcgcaagccacggttgtaagggagacctggcccaaccctaacctcccacccagctaaaacaaatcaaggaaaggtggataaatccaagcgtcttaattccccagcagggacaccgggaactcttctcggatctgccttaaccctaaccaccgacggcgagggaaggcgagttctagtcaaaatctactgttccggggctggaaaactcgcgatccggggagtggagaggacgaat

SEQ ID NO: 4515 - DNA, 329 bp, Avena sativa
ggagtccagtgcagggtacgacgacgacgacatgaacggcggcggcggcggtggaaccctatcttgccttctcctccattgcacgggatatgagagattgggggaatcgctcgggcggggggcacggtggcagttttctgttattatcccaaactacgatggggtacttcggtccgctacactcgggaagcggcaaaagcgctcgggaagctgctctcggcccgcttccgcccgcctgcgctcggtaggctattttcttgggccgcttctctacagcgcattccaaaatttgtgtgtttgtttcctttgccgattccgaaccacaaaag

SEQ ID NO: 4516 - DNA, 477 bp, Avena sativa
gatggatcccagtgcaggcgacggcgacggcgacgacgatggtgcacggcggcgcgacagcgaggtcccttgtgcaggcccccccgaagctaggtaggtaacagacaaggaacaattcctacctgtatcaaatcatgaaggttgtactactactactactagtatataacaaatcagtaacgtgggtgctgttttgtttaattgcctcgccggcaatggtggggtggccatggtggcggccggatggtgagcagactgccccaaggtgtgctactggcggtgcagcaacaactggaagaacgagatgtgcaacgacaagtgcaacgtgtgctgccagcgcctgcaactgcgtccctcccggcaccggccaggacacgcgccacatctgcccctgctacgacaccatgatcaacccgcacaacggaagctcaagtcgacccttaaatctatctatctatccatccatccatccatcta

SEQ ID NO: 4517 - DNA, 313 bp, Avena sativa
gatgagcaacacagtgcagaaactagaagatggcaggcggtctatctaagaagaatttactttggctacatgttataattattttacttaggttttcctcttgtgttgcgctactcccttggtagattttttttagagaactcccttggtagatttatgaactaacggaagttatgttattctttgttttcctcattggcattcatacataacacaaccttttgttagatgttacacagtcggcaaattgaccccctcttcttgtgaagtctcatacaatttgcagaaagtgctaattgaaagaagcaaccta

SEQ ID NO: 4518 - DNA, 343 bp, Avena sativa
tgcagacagattttatcataaatgtgcatgtacgtgtttatgtagtaacacagtatctatggaaacattaaagtaagagtatcttaaaacagtagccgtctatagccccgatatatccccactatatctgtttgagtgcgttgctgctaaatgaaatcacatacaattgtccgctagagccttatttagctctgctatagctgttttggagggctgccgctattttccatagcaggctatttaaaacattgttagcacatgatcattattattcatagtactactatcactacgaacaagagaatgctatgcctacaaaaagctaaaacacatgtacatggat

SEQ ID NO: 4519 - DNA, 432 bp, Avena sativa
cgtcggagagtagagatcactccctcctagattatctcgttagtttgttagcccgcttaaattaggcagatatctatttctcctaataatcttgttaattagttaccctcttaaggttgagttgccatctccccatgtaagccggttataaaagacctagcactttgtgagaaagaaacaagttatctcctaaaccaatttagctctcttctctcatccctactctgccttcaccaactccagtgatcagagccttaccacagcgatggaacagcggctgttctctggtcagtttccacccattgctcgtggcggtccttaaccttggtttgtaacattgtgatattaaaattaaaatgtaggattttgaggactgtgaggctatgaaacaacaatattacagtgtgttatacaacatagtaataagaggta

SEQ ID NO: 4520 - DNA, 346 bp, Avena sativa
tgatttcaccaacggttgagtccagctccatcataaggatgtgttgcaggaaggaaaggtattcgtcatacaaaattcctctgtactccgtcaaggccaactttcaggcctgtggaaagccctttcatggtgcaattcacaaggtatactgaggtccaggaaaaacctggcttggaagatgggttcccattctgcacttacagcctcactgcgtttactgacctcccagcacctgctactagacctgcacgattcgtaggttagtcgggctgtgttttctgtgttgtactttccgctgctcctggtgagtttgtttggatgtaactgtctttcctgatttattccc

SEQ ID NO: 4521 - DNA, 449 bp, Avena sativa
gatggatcaagtgcagacagttaagtaagaaacggtagtcaaattgcaaaccgccgaggtagaaattcagatggcatgtttaaatttgagacatggtttagcatcaaactgtattattccaaaaggatgtcgcagattaatcaagatttgcatatatctacactagaacgtgtctacatacatacatacaaatttagacaaatccaaaacatcattttcagggactgagggattataaactatatctacccagtctctccagtattttgctgtggctcatgctttatgtacacgctgcatctgtttatcaatgcaagtggctggatccttcaaaaaaactgatcataaataaatagtgatgcacatctgcaaaccatcgcccatgcagttttatctaagaatcttgaagtaagataaaacttgggaaaggcctcagtagtgtttgaaam

SEQ ID NO: 4522 - DNA, 388 bp, Avena sativa
ttctttcactcgtatagataaattacactccacacaaaagactgatatatagttgcccacttgcttctccaggtcatccatgcaaggctcatattcaaactaatatgcaaagtgctactataactagcacatgcacgtagtggtgtatttttgtgtggcaaagaaacgataaattaagcaacagaactttgggttcggcgaccttaggttccatatttgctacttggtttccaacttggattatccgtgtcggactcgggtttgggcgtgggtggtcggtggcgaacttgttctgtgccattgcggtctttggaacatgcgatgacacgatgatcttgtcatgcggttgatgtttgtctcatcaagcggcgggcggccggcgaccgtg

SEQ ID NO: 4523 - DNA, 364 bp, Avena sativa
cgtgtacctagccgccttttgtgaagcaaaaggcaaaacctttttagggctagaagagtgtgagttggttaaaaagaagagaaagagaagaaaaaactaggcatcggagatggtgcaatcattgggaagtatatatttctatactgaggttttttgtagattgcctatactagttaatggctcagcaaacaacacttttacacttcctcagcctcccacaaggaagctgcaacctgacgcttagcgtctccggcaagggagctgcaacctagcccgctctattctagtatctctcagctgcaacctagtcattagtatctctcggcatttcccgcaagacagctgcaacctagtccgctctatt

SEQ ID NO: 4524 - DNA, 408 bp, Avena sativa
accatgtctctaggcacagcatcaccgctgacgcggcggacaacttggcgaaaccacagagaccggtgaatgcctgcatggtaaaccctgtccatgtgtgcctgcaccttggggtggctatgatgtaggcgaactgggcaatcactatgatccaccaactgaggctaagcttgggcttggcgaggtaagacgggaggctccaacagatagggatgatgaagcagagcggatggcttcagtccagttcctacacacagcctggaacggtgaagatgaggcctggatggcgggtgcggatgggcagcctaggatggctggcagcgagctgtgaaggttggccatgctcatgggcatgaggcccctgagctgagcagtgacctccccatcagagagcaacgtctctgcact

SEQ ID NO: 4525 - DNA, 338 bp, Avena sativa
atggatggacttattaacaggtattgttaaattttgtcactaatccactttggcatgtatacacacccgcgcaggactaggccgtacaaacgcaacgagcttcaacgcgtacgtgctggaggggagcgcgccggtgctgccggagacgaagcggctgtacaagaagctgttgtcggtcggcgtgaagcccttcttcctcacgggtcgggccgaggaccagagggccatcaccgtcgccaacctccacagccagggggatctccgggtggatggacctaaagctcaagcagcccgggttcaaaggctccgccgtggcgtacagtccggcgggaggcaga

SEQ ID NO: 4526 - DNA, 376 bp, Avena sativa
gtagaaacacaagtgaattggacaaatatatgttggtttgcgtgctgcaccccaaatagaaaactgcgtacatttacaatgttttgttggccctcatttttctgtacaaacatgcaactggatatagttttggccccaattggcaggtttatacttcatcccttttttcggaattttgggagatgaagggtgtatacagttcgttcttgtgtagatatgatgcaatcaatatatttgaactgtatacatttgcactgtaaaagcacgcaagatataatattccattcagctctaggaattttatgttttgtaaattctgaactggaaatacggagattcccagcctggatttgtccaattcacttgtgtttctacc

SEQ ID NO: 4527 - DNA, 430 bp, Avena sativa
cagggacagtctgcatcatcagatcttaaagggccgtcacctgtatattcagccatagccagggcggagcatttgctctttccatgtctagaatatatagccatagagaggtgccatagcttaacggtcctcgttcttccgccatcccccaagaaaatatttgtttttgagtgtgctgagttgagatcagtggattcaaacatatgggtagaaacctcagttcaccgagaccagaaacagagctcctacaaaactgctgacttccataactcctatcaaggctgggcttcaaataagaagacctactaagcatatgaaaccatgaatgcaattgcccaatatataccataatctggactttattcattcttgtgactggcagtataaaattatccacattgaaaagaaatcaagacatgataaaacacta

SEQ ID NO: 4528 - DNA, 285 bp, Avena sativa
gaagacataaaaaactacaggcataaaaggagagagagctgagatttacatatacctgcaaaatattccgtcactgaatcaacacggtaggtactactgcaagcttctcacattaatgtcctttcatgtttcttgattgcgacaactccgggtggcacccaatgatatgaagtgtttctactgaggatggcagaccacatggcggtaaagattggagctctgagcagtatgatattctcagcaccttgagagatgaaaggctcttgaagttcaacgggaatgttg

SEQ ID NO: 4529 - DNA, 390 bp, Avena sativa
cacttgcagcagttttgacaatgctaccatgctgtgatactacatttaagaatatatcatgacatagttggttattccgggccatttctgtatatttgtactttgagtctgaatgcatgcagttttcagttgctaggggtaaagaaaaatactaaaagaagtgaaaacctcggatacttcatcactgctcaaggttgactatgggtagtacaaatgatacaagtatcgcggagaaacaagataacaatttgatctctttacctaatgcttcggtctaatcctatgttgacaaaactcaggttttttctgtttccctaagaatcaaaatctcaaacgggagaatgagagagagaaactcagagtctttgtgctgagctaaccatctgcact

SEQ ID NO: 4530 - DNA, 352 bp, Avena sativa
gtaatgtgataaaaacaatgtttggtggaatctgaagaaaaatcttgtgcttgtagtcagttccattaaacaattgttaattttccgtgtagatcttgagcagaggactactgaacatatttatgatcttggtcaccggacacttttcctaggtcttcagaggtgcatctcggttaatgcggataagttttcagccattgcacaaaattgcttatatcaggtatgcatttcaacacatacaaggcaaattaaaatgggcaagtacaattttatgagttctgagaagcatacggtttatgaaccttttatcaacaacataatctatgctctagagacaaggcctttcagcatg

SEQ ID NO: 4531 - DNA, 276 bp, Avena sativa
gatggatctagtgcagactgctgcatagtcttcagcaaggtgtggtgcagcttccttgtgagggcatacgaacttctccatgaattccttctcgctgatcatgagtgtactatagtagtcacggtctttatgtaacaatcctttttccttaagaaacttaaggacatagtaccggggtctgacacggccctccaggctgtaagtgagcattgctggccgatgagcaatatatgccggtgccaaccccacattagagaagaggaaatttgacctgct

SEQ ID NO: 4532 - DNA, 422 bp, Avena sativa
gatggatcccagtgcaggaaatagcaatccaacggtcacatatatttcccagctatcctactgcatcccctatttaagactgaaagtaagtttttcatcttgcagaaactcacagagagatgatccttggtgggccagagattgcatagctgcaactcacgccgtcccacaagtatttcttgggaccgcacggatcacccatccagttcttcttgatccgatacatggccttgatggccataatggcactcactagatcgcccaaatcaggtggaatacaagaaaatgtcagctttgatcaatcactaaatgactaaatcatgacgagattcagagttcagattactgtaaaccacagagacacgaattagtactactactagtaacttatgagattttgagaccatattaataccatctcc

SEQ ID NO: 4533 - DNA, 265 bp, Avena sativa
gtgcagcagcatgagcagtgccaccactaagccgcacaaaggaaatgattcaaggtgggaggccatccaagtggtgaaatccagggaaggtgttcttggtctgaaccagtttaggctgctcaagaagctgggctcgggtgatattggtagtgtctacctctctgaattgagtggaacgaagagtcactttgcaatgaaggtgatggacaaaacatctcttgctagtcggaagaagctgcttcgggcacagactgagcgggagata

SEQ ID NO: 4534 - DNA, 317 bp, Avena sativa
ttttcaaggcagtaacatcaacaaaatagtatggacacacagagtaaattgcatcaacacaggcaaaccaagcacctaagttttgaggaccctgtaactcttaactgtctccaggaacataaatgggaacagaggcaaacaaaggcaagagttaaatttccacataattcagacataattgttttgatataacatacaaggtaattaaatttccgcaaaccaagagctagctagatgaactaaaacacaagctgtgtgatcgtttgtgccaaataacagtccagatgataacattcctccatatattatgctgcact

SEQ ID NO: 4535 - DNA, 487 bp, Avena sativa
aggtcggacgtcagtctttacaatccacctctcgttttcaggtacgccaactttttagtttgctcaagcagtctcaggtatgcgtttcctgaggtacaaaccctgggttcacattaggattggaagctctaagtatttcatgctctgggacactgggtgatgcaggccgcatcttcaatcgttttggaacagatggctgaccatcaaaggattcaacagacaccgggtcaatgtccattatatcaccttctaccctattcattattcgttgagtcatgctctgttgagcaactttaggctcagggaccttttgcttacttgccagttcagttgagaggcgcaaaaatttctttacattactacatacaggacactgctcatcaagacatgtcttataatgatgaattagctttcttgacgtactgcacttcttctgcggacaatcttttctttggcagttgtccaaatgcttcacaaatcctgcact

SEQ ID NO: 4536 - DNA, 328 bp, Avena sativa
cacgatggattcagtgcagccggcagccccaggcgattgagtgtccaggtggccgacgtgcgcggcgaggtggcaccgccaccgctccgagtcctccgcgtactgccagctttgacgggtaggggatacaagacggcagttttgtcttcccaagaataggatccctgaggtcggacggtgtgaggaaggaacctccaccgctttgactgagccaccgcataggccaatccggcaagactacgtgataaggaaagaggcaacatggggacgtaatggaaacgtgtggatcgctaagaggacacgcgttaggattgttgacagagctccc

SEQ ID NO: 4537 - DNA, 456 bp, Avena sativa
tgtgaaagtgagttgccatgcaagtattaggtagcaaaaattaacaccacgtagcctttttgaataaatctcccaattgttcactgttctgtatttggctcaatatggtggcatgttaaaccccatttgctgccttgctaggcaccctgatttggctgcaactaacatatttttttttagcttaggctgcaacaaacatgatagttatgtcaactcacaccacggtttggacttgcaactccttgaatggcttagcttattcatcttttcaagtagaattatactgtaacatatatcaagttaagtctcaaaattaatctgaatggcttatctaaaatatcttggttgaggtaacaacagtttgctggcattagccacatggaacctcttcaaacatgaggggaactacttaccaagatccatttttatatacgaagaaattaaatggtctccatc

SEQ ID NO: 4538 - DNA, 345 bp, Avena sativa
agtgcagcaggcacatacgcacgcacgcacgcacgcacgtctggctccccgcgctacgcagtaacgccacatctgcttgcagagcgttcctggtgctagctgctttatttcccggaggaggactgctcacggatacggattgtgcacaccaaagtcagcaagcaaccacgcaacacgcgtcgccagcctgcaacatcatctctttccgaacgtacgtcgctagctgttgttggccattttgcaagatcaccctcatgtttatggtcgtcatcaaagtcatcggtgtgactagtcaaaatcgtgccaaaagccatcaaatacgtacgtatatggagcgtctgcact

SEQ ID NO: 4539 - DNA, 359 bp, Avena sativa
aacaaggaccaaatacctggagatacatcacctgacccttcacaaaattaatgaagaatggttcctccttctggtttcccgttttatagtaaaacctgatgacgatggcaatgcgcttccatctgcggttccttcaggtgcaccagatcagccagaaactgatccatcgggcagtatgtcatacaaatcaactgaagctcccagccccattataagaggtatgctttccatacgaaaaatagttttacaacttgtggcatataccctttcattggaatttgaaactatctttgatattcactttctttttatagataatggtccaccacagcaacaagcccacgagacaacatcatcac

SEQ ID NO: 4540 - DNA, 318 bp, Avena sativa
tgcagcttgcccgaaccagcctagtgtcgcgcgcgtcgtgaactctgcggcctaaacaaacgctgcacgtctggactgatgctagctgcggagatgagatggcaaacctagaatcggcaaggggattggtctcactatttcaggttccaagatctactctgatgtgaattggcatgagggtccttgctctatagtactgtatattccttctactgccggccggtttgggcatccatattcaggttccagcaggttcagcaaaactagagacgactacacatctgcgttctctcctcctgttgtatcagctctgcactg

SEQ ID NO: 4541 - DNA, 305 bp, Avena sativa
atcacacctagcgcgacggcagctggctccccatcacgcccgacaacggaatccttcttcatcaacgttggagacgccatgcaggttctcacgaacgggaggtacaggagcgtgaggcacagggtggtggcagaggccggggaggaggtcaggtcaaggctgtccacgatatacttcggcggcccggcgccggagcagaggatcatgccggtggcggagctgatgggggggctggaggcgagccggtacaagagctttacatggcaggagtacaagaaggccgcgtacaagaccaagctcgccac

SEQ ID NO: 4542 - DNA, 556 bp, Avena sativa
gtaagcgcttcctagctcgctcgctcgctctggcattggtttgctgagcaggaattggaacgtgtgcgatgtttccttccggttgtacagtaattatccctgcaattagaaagagttggcgcaaatcttagccgaaatttgtagaatcctgacatcttaagatgtatgggtataattagttaattactgtatgagcacaagagaaatgttccgttcagtttaccagggtgcgattagaattgcctcaagaaaagctgtgcaataacattaaccctctgtggctctgtccacatcatagaaaaaactatgtgttcctatgccaactatactatatacctaatcctgcatttgtccttttacttcgtttctaggactcggaccaaaaaaggcatctgttctttcagtctcagagtgaccctggtctgcatcctacagcagatacacatggcttaagggaagaaaaatataccagtattaaaatacatccaggttcttatcccgggcggtaacacatggtgtcacagcgctaatgcttcgtcctgcactggaatccatc

SEQ ID NO: 4543 - DNA, 306 bp, Avena sativa
gttgagattactagttaagatgagtgcatgctaaggcgtagtggttctttgttagcttgtctttgggcccaggattccgaccaacacaactaaaaataatctcccaagtgcatctggatcatccagcatgacatgaaatcatctaagtttgtatgctaaattgcaaactaaatgtttcacctgttcactttttattgcagccattgaaggtaaaatgactgcgttcaacttgcttggtagccctgatatccatatccagatgacagtagaaggcactaaagaagagactatgacgcgcaaattatt

SEQ ID NO: 4544 - DNA, 535 bp, Avena sativa
cggctcttccaggcctgccgcgccgtcttccggggccccggcacagtccccgcgcccgccgaggtccacctgctccgcgccatcctcggtacgcactctcctctccgctgcttctttcctcaccaaaagaaagttcaatgtgcaaatctactgcattcgttcgttctttgcaatgatctgtcacagagtagtttgttgcgccaatctggtagtattttgtacctagaagctatctcaagttgatctcgccggaattcattaggaagtatgctcctccaatcccttgatttgccaacagaacaaaagccatacagaagtgaaatgaaagtgacagagtctggtgagtagcctttgttagccatcttattcattatgtccaatgccttcccgagcatactatgtctgcacaggctaaagatgatagcattgtatgctgaatttcttggatcccatttgtcattaaccaaacccttgaatatgtctagaagagcatgcttttcatgcatcttaactgtactactgcactagatccatc

SEQ ID NO: 4545 - DNA, 334 bp, Avena sativa
aacctctgcttccgctagccgctcatgggtattgtatcttgtcagaaggaggcagtgcctacctgaataagaagaaaaagaagtgcatattagaggcataaacagttacatgtactctagttacttcctttgcatcaaattcaactcaccgccactttaatactgtgaactacagtccagaaactgaatattttcaaagcatatagcaggaaattttgatagagctcttagtgctagtgctaccacatgcacggaatgtaaaaacagtacctgtgttggttcttgaggactaccactgcttgcttctaaaaaatcaccatactatctcctgcac

SEQ ID NO: 4546 - DNA, 317 bp, Avena sativa
cttgtattgaatgaaacagcttctcattctggtaatagtttcaggcagttcagacaaactttaagtaagataagccggttggctgccaaacactggttgatgcaatcagccacgctggataggctgcttttgcaagaaaaaaattagcatggccatcaagtccaaacctggaactgctccagattggaggccaagtttacatatatacttgagataagggatgctgattacatctacatcaattaccaaccgatcctgtcattcgtaccttctgcccaactttacctaatctggtcttgccatttgtattctgcact

SEQ ID NO: 4547 - DNA, 382 bp, Avena sativa
ctgctccaccacgaagtagtagtagtagggaagaaaaagggcaggccggacccagttgcaacgccacgtttgactcttctccgatcacttcatttcatttcgtttcgtttcgtttcatccaaaaagggagaagaaagggtgagacaattagtaagatcaaaagcgaggctgtacagtagcagaagagtgggggattcctgcgcgtcacttccactcctgggtgtcacactgggactcggagcacccttccagcgcgacgtcggtgatctgcacccccgtgtcgtacacacgcccggcggcccaccgccgcgggatgacctcccggtcagcccacacccacttcccgtcgtacccgccggtcaccaccatcctgatctgcact

SEQ ID NO: 4548 - DNA, 337 bp, Avena sativa
aagcacactctgtggtaatttgacactctagttagacagatggacaaaagcaactaatcataatacagtatatgacttcctgcatttcatattagggggacatttgatttttggttcagtttttccatttcactggcgcatgctcctaccaaagcgttcgttaattgcagtgttcccattatcagcgattggctaacaacctgctaactcataagtactactctctccatcccatggtataagatgttacttcctccatcccatgatagattggttctatattggttgtatattatgagacggatgaagtagtgttaaccggcagttttcaactctg

SEQ ID NO: 4549 - DNA, 369 bp, Avena sativa
ttatgcctctcagcttctgctttccttcttcctctatcctccgacattttggttccagtccctgtctcctcggaggctcggactgcgttttcctcttttgtacaacagaagtcctcattgtttattagaaaataaagcaaagtaaatataaagaaatgggcaaagaatgtgttactataaaaagagtgtacctgttaatccggtattccagtcctagacagcaaaagaccagatcctgatgaatagtttaatggggtacattctttccaaagctaaactgggacattctttccctgaaagaccaaagcttccaagcattagagcccaaacaaagcgggcaatgacaaacagtgtggaacgctcgtgtgc

SEQ ID NO: 4550 - DNA, 270 bp, Avena sativa
caagacactatctatgataaaaaaatgctaaatgctatcctaaatgattatggctgcttacttaagcagctcaaggcatgaagaagaggctcttggtagattcagaggcgagacaagaagcaggaaacctcagccacattttatattctgaaagaacatcaattcttctgatacttgtcagcagaaaatagccacaagtatgctactacactggccagataatgggactaattaaagtatggtatccaccctgacagcatatggcatgca

SEQ ID NO: 4551 - DNA, 472 bp, Avena sativa
agtgcaggaagagcattgctttgacttcacaaaagatgctgtaaccaggtacctccttcgtaataatgttccaagtttcctgtggaaacgtccctgcgtttggattgtgaagctgtttccaagaaggcgatcaggaaaagcatgtgaactataggttcaacctttttgttccgattaaatggcatttcgtcaggcgtgcatctctgatctgtaccaacaacattgattcaggcaatggttctggatgaacatttcaggaataactcacatgtacacaaagtacttcctttcattgacttcacctccggtagtgttatgaacagagaaatttgggaactaccaaatggttctcttgaggcaatgccagctgcttgaagaagacttcctcctctgtgaggataacaagttggcaactaccaaatgattctcttgagtcttcacaggtctgttaaatgagcacagctgcactgga

SEQ ID NO: 4552 - DNA, 443 bp, Avena sativa
tccagtgcagcaccttatcaggagactcttctgagagatcaaaaacctgtgaaaaggagagtagctccagctatcataaaaatgatatgaagtgctactgtggatcacgggaacgaactgattgagcatcacagcttctccaactgctaggggaggtacctgtgcttcattgagaagttcacggtacgttttgatcaagccacttccaagttgaccaccgctcctggagttgatgaagactaccacaggacaacatggtgcattgtcaaggatgacttgatccgagtctggctttagtatgtaatctggaatgtggtagtccgtcagcgggccgcatgacttgtagcccgagccattggtggcatccatcctgcaacatcgtaacagagaatttcagttttacacgctttgtgaacactcgctccacctgcactgaatccatc

SEQ ID NO: 4553 - DNA, 420 bp, Avena sativa
gcagcggtaagtcgttgctacttttttcttgaatattatgctttgtacagatctgcttgttgacaacagttcttgccattcaggagatcaaaggcatccgaatggaaataccagtccctgggaatccggtttcttctagtctgcttgaagattgcaggcgtcttcaaacattagtagctaacaatgatgtggtcttcttgttgactgacacatgggataaaagatggtttccaactcttctgtgtgcaaaagaaaacaaggtaagtctcaggcacattattcatctgtggggttgcaatatgaccaagaagttttaatgcatagtggaatgagtggataattaatgtattctggtcatatggctctattaaattagtatgatttccccatctcttgggaactaaatatcttctgtctgca

SEQ ID NO: 4554 - DNA, 386 bp, Avena sativa
ggcggcagtgttgtgcagttgtgtgcaaacggtaaatctactgcactggatccatcgatggatccagtgcagtagcattatagtgagtccgaatttcatgtataaaccggggtaatgcatgtgtttgcagtatgtttcgttgtgttccattgttcactattaaactcacgactaacttgacacactgagcccgcccagaccaatcctttcggtgatttgggctgatccaacttatcaactcaaggcctagaataattgataacgaggtccatttttgcagttccagaaaacacactaccactatggtgctattgcaccatatcacatcacaatcacagatttcagtttcatcataatgcatactgatatttagcctctagcatctc

SEQ ID NO: 4555 - DNA, 270 bp, Avena sativa
gaggtttttaaggttgtttgaacgttcctgtcttttccttttaacatgaagcacgcagaggcgtaaaagatgatgcagggtagacacatggggtgtgtactgatctaaggcgagacgcggaggatgcagatgaaggtggatccagatgaaggtacaatccatgatgcaaatgcagcacatagttcattactaagcaggtttaattcgttggggggagcttgtgcagcattggtatgatccagagagaacgtgcttctgcttctgcttctg

SEQ ID NO: 4556 - DNA, 257 bp, Avena sativa
tgcaggcggcatacatttctgatcgctgaggagtattattctgcatttaatatccaactaagtgagcatgcaacacacatttaggttactgaagactgagaactgtacgtcacatcttgcactggagactgaaagtgaaagacggcacacatttcttatcgctgaggagtattattctgcaacaaatgtccaaagctagtataagtgagcatgcagcacacatttaggtcagtgcatactgcactgacctaaatgtg

SEQ ID NO: 4557 - DNA, 343 bp, Avena sativa
tggaaagccaatttatcaatttaaaatagccgtaggtttgtcccttgttaattgtttataccatgcagacacgatttgatgtcttaagacttggtagaatgttgaaattaatactagaaaggaaaagatggcttcatgcatattaacgatgcacaattaaggaaaatatcactgaacttgaatggttctacaaaatactagcatttttaccattccgtcaacctaagttaggctttttcccagtcagtttttgcatttcgcgaaagccatacttgaaatcaaaacaatctcccataggaaggataggctcaattttcttgtgttatgctgcgctcctcaattt

SEQ ID NO: 4558 - DNA, 429 bp, Avena sativa
ccgatatggagcagctgtagtagtgatcttttccgtgggttgcggtaacatgttgctgatagtttttcttgggatggattttttgctgtttttcctgatataccttgggtcaatgaatgaacttattctaaaagatgttttctgggttagaatgatttgcaataagtaacttgagcacgttttttatgccattttaagtattcattctgcacttccatgtgttgtagcctgatgggtcgtaactcgtggttcatgcgctgtttttctctggatgcatcagtgtaacctgctgttggtctgttctccgagtttgcctattgacaattggttcgctgtagttgctattgatattgaatcatgtaagttatccacaattccacatgaccacacggcgcctgaacaccaccactctatggtgactgcactgga

SEQ ID NO: 4559 - DNA, 379 bp, Avena sativa
ggccatggcggcgtctgcagactgagctgaatttgtttttcttccttgaacatggtctcaacatgttccctgtgtcaatctcgtttttattttcctacatgatctgtctagctattgattttttactgatttggggattatttataggggttttactgatgatgttgaattagggaagagaggcgctgctctatgccacttttgcaatttttatgctgataaatccgagtgatttaaagttgctacatccgtctcttgggtatgcctcctattcaacttcttgaggatatgttgtacagtgtaaataatttatttcatcatttgactaggaaatacaaagcaatggatttctcaagatctctttagaaaatgatacagg

SEQ ID NO: 4560 - DNA, 475 bp, Avena sativa
gagggcagaggctagggttccagccggatgtcgtcgtggcacggcagggcgggatattggagctctattgaggtgttctcttgggtgattgttcagtactgtccggtttcttgtgtggctgcgtgagtgttgcctgcctgcattcttttaggtaggtggggatggagccttcttggctgggagcaccgtccaaatttattttcttggattgtcacttctcactctaaatctgagttgttcttggtcagaggggagtccggtgacatgttccctattcactgtatcttgatcggttgtcaggagtagcacgggatgttgtgtgccctgccatcgccgcaaggagcggcatgtagctgacagcagcagcgcaacacactctggtggctcaacgcattagggaaacaatgtcttccatgagagcgctcggctgaacggcgaggtggagctcgctgggatgaaaatggtgatatcttgt

SEQ ID NO: 4561 - DNA, 241 bp, Avena sativa
tgcagagccaatttgcaggacttcctcatagacctccttgtatgatttccataaatagggccctggctagaagatgaaaatggagaaggttcccatcaagaacgaactaatagatgatatacatctagcagatacataagcttcattatccttggggttagttgtatttgcgcataccactccatctttaaatggacgccatccaagcatccggttgtctggatacttgcctgctgctgtt

SEQ ID NO: 4562 - DNA, 375 bp, Avena sativa
ttaggagaggtagaggcagcgctttgacacgcagaacgtcgggatatctccacccgccatcgtgtacaccggaccaccgtccgctgccggcggtgagaagcacgacggcggatcaactttagtcatttgtgcttacctgaacctcctgtccgtggtcgcctacctacctgtacaagaaggatgagaagctgttcgtgcgggaacacatgcatggcaggcagggcagcagcctggcctgacgaatctggactgcggatagtgaaggggcgtggcgcgcgggctggcggtcctgcacgaggagaggagctgccgatgcttacggtgccgccgcgcggccaccttaattcctccacgacatacgtgttggtagcgctg

SEQ ID NO: 4563 - DNA, 340 bp, Avena sativa
gtacaaaagaataccccaaaataggacattgaataattgcagcttaggaacagtttcagtaagcctccatgcataacactatctttatggatgattccaatgatttcagctagatttctcaaagaataccacgactgccacacatgttacatatataaaggctaggtacgctccagaatttgacaagtatcttgatacaaggattttggtgaatacatgtaaatgaataaaagaggattgacacctgaaaaatgttcaaagaatttctggtgcaccgtcatctctgccatagaaacaaatgcacttcctttttacaattaacatgaataccatgtatgag

SEQ ID NO: 4564 - DNA, 336 bp, Avena sativa
caagtgtcaataagtcaatcaacgttgagtagtagtaattagtgtgaccattagcagtataatagccactggaatttggaatcttttttcggacatagggagccagtggtagatgggaattataagaaacccctaaactgacaggacgtgtaagttgtcagctgaaaagaaacattagtgcacaaccctcaaaagataccgcatgcttgaatgtgtgtgtggtgtgagactcttggccttgacttgattccagtgtgtcctaagtcaaacagatcaagatcgttattctttggtaattaagtctaccaaggtgcttgatacatgccttgacatatt

SEQ ID NO: 4565 - DNA, 283 bp, Avena sativa
ctcttatgtggtgtctaatcatgcagtgatgatacactataatcccagctctatgaaaacttccctttgtgggtcgtttgtgatatggactaagcgttatagttatgtctgagcatactgtttcaaagcatgatttacggtgttaattaattttggctgtctgagtggatgtgtatttagatttggttagcgaatcaactatttgtgcagtgttgttcctttgtagtgtgtattcactttgaactcttggtatggattgattctcattggcaaatctatgcat

SEQ ID NO: 4566 - DNA, 282 bp, Avena sativa
gcagcatgaatggagacttcagtgaaacccctgtcattagccactgtacagcattcagtaaacagccgacattgcatcacagaaaggagatagctgccaaggaaagaaaaacgatttgtaaattttgcacttcatccagatatcatacaggattttgattagattctgacaaaactacgttgcagttctatgaaaaagaactgaggtgtacaatagggataggcaattttagacgttgccactgtaatacattgtttgctctgttaacacatgttcatactg

SEQ ID NO: 4567 - DNA, 417 bp, Avena sativa
gatggattcagtgcagtgaggagaaacaaagcaaaaattggaattctgtcaatgtcttaatttctttggagtatctcctaagtgaaaatgttagttagggtaattttcacggcaatatcaaaaattcaatatacatactcttttttaagcttcatttttagggattgtgataacttatgacttccagttatggtcctgatattcaatttctacagcacatattctccttgagtatttaccccttattagtaattaattatgatagcaatttcagcacactgcattgatagaaaaactaaaattcttattcatgctcaggctgaggttcgccagtcagatatacatgaagcgcaagctgcttatgaggacctatacatacacgtgtcagctgactcttatgataaagttgatgctgca

SEQ ID NO: 4568 - DNA, 316 bp, Avena sativa
gtgcagcaggagtttttgcattgaggttatttatgatgatgaagcagaagatcacttgcctgctgaaccagaggatgatccccatgtctcgttacacgccctcactggaatttgcgctggtagaacaatgcaacttcaagttcggttgggtaatattgacctgattgctctagtagattcagggtcaacccacaatttcgtgcgagacgacgtggttcagcgaatagggctcgctcttgcaccacgaccaaatcttaaagtcactgtggcaaatggtgaacgggtgccatctgctggtgttgctcaacggcagcta

SEQ ID NO: 4569 - DNA, 537 bp, Avena sativa
aacttctgtagtggtccgtacgtgacagtcattcggtgaagatgcggctacaagaatcggaccggtgaggagctggcgtgtgactgactttcgtcgtatgtgctgctgcgccagcagtcaaaaagtgtcccttgttcaaatattagtatgagtttgccttttggctgcactggatccatcgatggatccagtgcagccatgaaatgcattgaacttagctaacattatggttcctggacaaccagcatcatcatttcttcctcttacgatctaatgtagtatacagaaccattgccagcggttccagtatagctacatcaaccaccagcgactcttcatcaggctcatcactcccccatgctgacttgcaactccagttggtcctgaatgatgcaaacctacaatcctcattaccaagacgtctgttcaatctgtcgggaaaacaccaagcaaacaaatttgtgctcatataccttcatctccttttccttgcgcgcctgaagctgatcccctccctccttgaactgaacctccacy

SEQ ID NO: 4570 - DNA, 348 bp, Avena sativa
agtgcaggtgttgttttcattgccatctacacggacagagaggatgaaaaggatcacgggccaaaggatgctaaccttgccgtggatagctatctttccattctgactgcatgcatgatttactaattcaaagtaatttcatgtgctctggacgatatagtgacataccttccctatgccaagacaaatcttttcaggaatgaagccattaaatacaacccacaactggtcaccgcaggtctcttcaaaaattattattgaaccagagcaggtttagttgaaaggcataataaatcaagatcagcgcaataatatttgttagttaacatattgaattagtcatagcta

SEQ ID NO: 4571 - DNA, 282 bp, Avena sativa
tgaaatccaaaagaaaccatccatgaacatcttctgtacccaacttgtatgttttgtccctcttagggaacacctccttaattagtgttgacttatcaagcttcaagcacgatttgcagatgcctataccgtcactggacagttgcagatcacagtagagaacgacatcaggcaagccagttgacatggcaaactgatacgcagcagggcttgattcaggaaataagccagagaaccctccacgagcaatgactagaggaggactacctgcacggatccatc

SEQ ID NO: 4572 - DNA, 295 bp, Avena sativa
gacttcaatgcaagaacagaacaaccatataaagactgacgaaacagcaaactgcacagtgacaaaaacatgacagcaagcaagggctcctcatgcttgcatgccacctgagaaacacaaaaagcagtaaggaggtagtaaataagaaacatcaaacatatacatgtacctggtaaccatgagaaagatgtccaccgtgaggaagatccagagccatgattctatcatgtggcttcagcacagcagtgtatacttggaagttggcaggtgaacccgatagtggctgcacattcaa

SEQ ID NO: 4573 - DNA, 389 bp, Avena sativa
aacattatacgggctgctgctccacgtgcttacctgggcgttctctggttgaccgggccggatgttcccccaaatatttaatcagattccaaccaaagttgaaatgtatagcttacaataatgtttactaagttgtatgaggaaatgtggagtataaaataaggtacttacggcacaaaaactgcattatactcctgttcaaggcatatgacgcatattttcaagaccaattggtccttcttactgttaggctctccatctgatgtaccatctgcccattcacataataataaatgatatcataagatagaaactagtactgacaagacagcctaatcaatctttaagaagatcaccttcagcttccctagcctgcctttgtgctgcac

SEQ ID NO: 4574 - DNA, 326 bp, Avena sativa
gagagcgaggataatattcacagaaacttttatatcccaatagaatctctttgctaatcagtctgacaaacagaaagaatgagcacactggtcacgagagttcagctgcatttgtatcacgaaactacagcttaagattgaacggcaaggaacttttatagattatacatgcttgttgaaagaaagtaggttcactgagtggctttaactagaatggttcagcttgagcgcagaaggaagggaagaactgccactcaattgaagtcgtgagaactagagaaagtacctgacacgggtgaaatgataagcctctgatcaaagcacca

SEQ ID NO: 4575 - DNA, 548 bp, Avena sativa
cccatatacctttagcagcagaggcagcagcacttcaggaggtggccgtgaccattgactcggcaatggaagcaatgcatcaagacgcaagcattgtcatcgttgagaaggagctaggtgtagaaggagaggtggcgagctcttctctattccaggctcttttcatacaggacagggcttccaaggaacatatcgttctcctgtacagaattctccagtaggataagcatatcaagctaatcagaggcgtgtcttcaggtgcaagcgtttcagaaatggagttgcatgcaacagcagtgaaatactgtattgcaacatgtcagtaacatggggcttggatgggatagaaccatggtcatgcctagcagtttgaagacacacagatcttcaaacgagcgttgcagtccgtcaccagcatggagactcctgggcttgcagccgcagctgctgcctagcagcttgaggacaagctggtcatcaaaacgagaggaaatatcatgtgggctgataattcccatggcagtacccagtccacaaagggctgcgac

SEQ ID NO: 4576 - DNA, 246 bp, Avena sativa
ataagatattggttattactttaaaaatcagaggtacaaacgtacagctctacatgtgattgggttgacaatattcaaaactaaatcacatctaatgtcaacttggtatacttgtatatccaccaagcttgcacacaatacacatacgttatatccagcatacatatccagtaccaaatgtttttaatacataattcttaaactaacagttgaaaagcgatgttgaattaccagtcacagtgttac

SEQ ID NO: 4577 - DNA, 386 bp, Avena sativa
taccttgatgcactcggcagcagcaagtagatcgctcagttgcctcttcttaatcgtttcaacatgactctacgacacctctaattggagccttgtacatgtatacctccaacaaacattagaagtgtgaatttgctcaaagatctgaacacagcgatgcatgcaaatagctatggatattagtaccactaataagtggtggatgttgagacatggaattcttccaaacaatggcattgaaatatagacaaatagagctaagtggatgaggtggaaaaaaggcatagctttctatggctggaaatagtatgacatctcagaatatatgaaaactgatgcctgcaccttctcctcggttagctatgaccatactaattcctgaaggt

SEQ ID NO: 4578 - DNA, 275 bp, Avena sativa
aggtgacagagtgactctttcagccttgtcaaaaggtatatgagactccagtaagaagaacaaatatcagcgggtactgatgacggagtagaaaaaaccatagcttccttccaccgattatttttatactacaacggtgacattatgcagatggtgatggtgaaaattgtttttctacgtacaaacattaggacgataaaacaagggtgtcaccagggacagggatacacacaagcagcttgtgattttgtactgacctttgttgtcagatagct

SEQ ID NO: 4579 - DNA, 277 bp, Avena sativa
gtcccatggttgttgctgctcacgcggcaagacggctattggtagtgggagtgccacctccgctagttcctcctccatatgtcgtccctcgtcatccgaccggtaccgacaaagatcagaaattgtggggattaaataaaaaaatgagtgaaagagagaggagaggaatcaaatcaacatgagctgcacacgtacctctattggcccttcgcttgcgagcccctgccggtctgcctaggcacgtgtgatgctccacctcgccaccggctcgcgtctg

SEQ ID NO: 4580 - DNA, 308 bp, Avena sativa
tgcaggaagtgtgaggtacacatgccagccaatgtgcatactgcatacatattccaattgaaagtggtttacaaaaccctggcccacttaacaaaaattaactggctatcatatacatattaaaatgtgcatgctaaatagacatgtactttgagttcaacattgctagattggcatataaatcagccattaaggtcctcacctgaataaaatggactacaacatatagctgaggatagaaatggattctaattctcttactacctaacgaggtggtttacatgcaggttggataccaagcagttgat

SEQ ID NO: 4581 - DNA, 385 bp, Avena sativa
ctcgtatcctatccattatccaataagatgatcattcatatatgtgcaggttagctagcgagatgaaaagtgccgataccatactgcaggcatgtacagctagctcacaggactagctagcctgtacaaacactggagctagtatttaacaaagtgcatacaagcatattagaagtagccaaataagaaaaactttgatcaaatttaataattaattagtcatcatatgcatgcccaaagcagcataacttccaaatccattttctaagaatgtggcattttgattccagtatatcttcatgttatgtggacaactttacccagaaaaacaaatagcattgaaggaacacaccacaatatgcatcataactgcacttgatccatc

SEQ ID NO: 4582 - DNA, 259 bp, Avena sativa
gttatatgatcaagttgtttaaaatcatcttaagcagcacatactgtataatcatttgctagttataaattatttagaatgcagaactctattgaatactcattattacttgtgacatttttgtatagtctcaattttcgccttcagtttcctgtattcgtggcaccaatttccctgtacaggaaaattattttctgtcaaaaggaaactggtaaaggaatggatgttcctttgtgcgaaataagtaaatatattaccg

SEQ ID NO: 4583 - DNA, 333 bp, Avena sativa
ataccggagcaagcaagcaatgcaagccaccacatgttccggagtcttgctttgcacattttggtactacccgaagtttcacaggaagaaagaagctagtagtgttactagttactactagactgattaccattgtttaagcttgaggggtatacgattggctgcccgaaacagaaaactggcaaattcttaatactattgtcaaggctgggggagttgattgaccattgaagcttgaatggcgcacacatccatgtgggcagaatggcagataaggacgcgctctcctgataaggaggtaccgacccacgcccctctcttcacgctgcactg

SEQ ID NO: 4584 - DNA, 301 bp, Avena sativa
gatggattcagtgcagccctatactacacattaagtatcagaagatgttcccagtaacaccttacttgttacaacacctgaatctgatgggaatgatagacaaaataagcaactatactgatgcaacaggctacctcagcctagttataaactgaacaatctatcacaaatccagggctgggtgagtatactgccagattaaaaggctacttcagcctagtttagtaattgtaaccaattaatgaatcttgaagccccaaactccatggtgtgggtctcgccaactatttgcactgcactg

SEQ ID NO: 4585 - DNA, 332 bp, Avena sativa
tgacacaacaaaaagaaaaatgtaacaaagaaaacgagaagcatttagcaggatgaccagtgtagccaaaataatatacaagggaagctatggatattaggatctaagaagcacacttaagaaatgaaagagcccatcttagagggtgttgcgtgaaacctggtgtacctctttcgttctccctgaaacatgtatgttgaagtaatatattagaaaattgaatatcatcgtcttcacataagaattaaccatagtagaagaagcaaacttgcatgcaacatcaagatggccttaaacgtgggaatcattcatgctgaagcgccgctagacaa

SEQ ID NO: 4586 - DNA, 339 bp, Avena sativa
gatggattccagtgcaggtacttttccaggtaaatatattgcaagaaccaagaatatgcatggtggcattttaaattggccagcggagcatgctttagtggagaaaggacaaggaatgtaaactaaagtttactgtgtttagtgctcctttgctggaattcacactgatgctgtccttgcctcactgatcactacatgtcaattccagctacattctctctctgggaaattcccattccacttccaggcccagtgttatccaatgtaattcacacacaagaataaatctaaaacctatgttgtaaaatatgcagggcatttgcataagctactgcactg

SEQ ID NO: 4587 - DNA, 406 bp, Avena sativa
tcatgtggggagaagttccggagcagaatccattcttggtgtggtgacaatcagggcttttgcagcaacatacatgttcatccacaacaatgtgcaacttatagacaatgatgcaacaatgttcttccacatggttgctgcacaagagtgggtgcttataagagtggaagcactacaaaacttgacaatactcatgtcatccttgttccttattttgattcctccaggagtaatttcaccaggtatctacatatcctgtatagtaaacatcgcccttttttaactgtatccacagatttggtgaacacttctgaaatgaatatacaagcttcaagggtctttgcctcccgccgtaataccagataataggcctccaatttcatggccacgagaggggagaatagac

SEQ ID NO: 4588 - DNA, 386 bp, Avena sativa
agaaattagtttcaggaacagcgaccgacctggtcgttcagcaagcttcaatgggcaatacacaagcagctgccgcatagccgcaacacttgtacacacacggggcgtagatccgacttgcgtgccagcggtccagaattaaatgctggatgatcctttgcatgctcctctgtcagtaaaccaaaatctgccaagttgcagtggaggtgggaatctagaacgatgttctcaagattcaatccaccatgaaccatcatctgtggtttacatgaatgcaagaacagtagagcatttgagatctctgaaacaatacgtgcacggattttccatggcagcggtggggtatcgtagcgtttgctgaagaggtggctttgaaggctcccact

SEQ ID NO: 4589 - DNA, 284 bp, Avena sativa
cagtgcagttggcaggttggttggtgtactttagcatgctggaagagctcagagcccgtaagcaatcatcaagctgagacaccggcagctcagtttgactaatctctgttttttctctgtgatcgtcgtaaccttctctgtctctgcactaggccgtagatgctcggagacaagaatcggttgaccggccgttgcagcctgtagatgtgttctttgaggaacgtgtgtttgatactacggccagtgaacaagagttgcgtgtttcagtccaggtgttgctggtt

SEQ ID NO: 4590 - DNA, 363 bp, Avena sativa
cagtaacttatgtgaagacaggttgcattattgccagacagattatgatcatgtaatgctttcatctgaatatggcccggactgttgatagataatgttaccatgtttatttcttgaattccatttattatttttgcttactataaaaactagtaccatacagtttctaaattgctatccatttgtcctaggcttagtttgacatgcttattcagctaaaaagaatagaattatccacacaatataaacctgtggagttaggattttgcaactgagtatttaagtatctgtttttcctcaaaaaagtagttaagtctctcttgtttaaagtatgagcgtgcatgccatttcaatctggggcac

SEQ ID NO: 4591 - DNA, 306 bp, Avena sativa
gatggattcagtgcagaccagatgtcaccggccccaagctaaccaacaaactacaacggctaaacatcaacagtggtccaaaccaatccaacactaaagtttcttacagtaattaattaattatgtcatcattttcatacaaggaaattaattaaattggttgcaatggcaagagcataaactccactctaatagaaaatagatataatctcgcacctggtcacctaaatgtttctgtctatgaacttgagccatctccttaagttcagcaaaaaatttacatatatcggtaaattctttatcact

SEQ ID NO: 4592 - DNA, 370 bp, Avena sativa
tatttgatcagccgacgaaagaaactgaactttggacctcacttaattgcattctaatttatgaggtcggaaatacaggagtagataaggggctgcaagagtgaagtaaacatactcccatgggacgtctccaacaagcatccagtcgccatccttgtcttcgtaagtagtaacaacatctgaaccgttcactgcctcaaccatcttcccctcattccctgaaaataatgtggcccttgttaagtcaaattaagttttccgtttatacagctgagacagaatggttaacatcatcagctgataatctgttcttgcaggttctggcgccggcggctggtttaccagttgcggtgaaggtgctgaacatctt

SEQ ID NO: 4593 - DNA, 276 bp, Avena sativa
cctaaggatacgatgggatcatgcaggagctagctgacgacaattaacccgaaagtttagtgtagtttattagctgggcccgaaccaatccactgtggatggatgctggccatctggtgaccgatttgtcgccacttttctcatcttctgccactccgggtctctggctacatacgtacgtggcgatagatctgtgaagcgaacctaactagcggaatggcagatggtctcgctacattccatcggcaagggaagtatatcacctgcaggttgccc

SEQ ID NO: 4594 - DNA, 257 bp, Avena sativa
atcagagttttaaagcagataagttcacaatagcaaatgttaggtatctacatatgtgaacatagaatagcattctcagtgtagtctcttatacctgaaaggttctcagcagcaaattttaggcaaacagatttaagctccgtggcatgatactgatcagccagcgctagagtagttgccacagagttcacagaaatctgcttgcacaagtaagattcacatagcactcttagccttggcaactcatatttgtctgc

SEQ ID NO: 4595 - DNA, 285 bp, Avena sativa
gaaccattttgttgaaattaccggatgaaaaaaatccgggaggcactcaaagttgtcctaggtaattcatcttcataaggacacagcacacctctaacacctgcatcacagcatttcatctctcttactcctttccctttacttttgacccagatgtaagaaatcaaccgctgcttattcactgcaagagaggcaaggtaaacttagttcctccttatcacttcacagctggtatgttgaagtcaatgaattcatgctcactgatcaatacttgcatatgtgtat

SEQ ID NO: 4596 - DNA, 292 bp, Avena sativa
gaatatggggaacacatgctttctaaatgcaactcttcagtgcatcactcatactgtcccacttttttaagaagctcctatggttcatacgatcaatgatcaacttgagtactgatgagcttttgatgaagtgtacatcatggctattaattgcttcttattgttttcaggccagtggttttctttctgtttctttggataataagtttacaatattttgtatcaatattttaaatcaaggaattcagaggaattgcacaggacaatctgcaacatgcaactgtttatacat

SEQ ID NO: 4597 - DNA, 338 bp, Avena sativa
gatggacccagtgcagaagcaaagagaaacattaggtgtcttctttctcaaggggactcatatgcgcacatataattccctaagggtgcatgactatggtagtatgatagtatatattcacctaaaaggtatagaacttctagtgccacaagtggaaatatgccatgtgatgcacaaagaaattaatcatgtgagatagattatgagaccattaagattagggcctaactaagattctattaagtactcctgtcatcaacagaatgtgtaagcctataatgttacacagataggatgaatttacatattgaatatagaaggcagaaaatcttgcaaca

SEQ ID NO: 4598 - DNA, 367 bp, Avena sativa
tcagccaccttgatagctttggaatagcccttctcagagttgatgtggatcctgataaccatctgcgtctgcacaagcgtttcaatccatgaacggaattttagcaactaacgacaggaagaagcaagtctactataggagcccttttttaaaaatttgggtacagtacaagagcaagaaataattgctcacaaatcgtgtacaatagaagagctagaaataattgctcacaaatcatgcacagtacaagagcaagaacggaagctaatcagtagaaaattaggaccaagatcttaccctcatcatattgtttcccccctgggtactccggcgagcaaggcaaaagaagagcaaagtaaggaagaac

SEQ ID NO: 4599 - DNA, 253 bp, Avena sativa
gctaagaagtaagcttgcagcacactctttggagatacaccatacatttgaaggtttttcctgttgcaccacctacacttatacattaagaacactggagtcaagttaacgaggtatggtgagatacaaccggaggagagtagacccagtgatcactttttaggctgtgcaactcaagtttgcagagtctttggaaatttctgagatcagctttagctgtctggagtaataggtcgttgctgaaaagaacatc

SEQ ID NO: 4600 - DNA, 301 bp, Avena sativa
gatggatccggtgcaggtaggtcatcatgaaaaagcaagattcatgattctcccgcaggacgacgctttcaatctgcttcccagtcaggtagcctaatggcaaaaaacaaaattttgtaaggtaggagttgtggcttgcaggaagctgcaccgctctgctatgttgtgtgctgaaagattagtgagtataagagcaaaatttaaggaatgcatatagcttactgtgatttgtaagtttcacagaggcggcaaaagtgtcagccgacgtgatcatatcttaggggctgcactcggatccact

SEQ ID NO: 4601 - DNA, 383 bp, Avena sativa
gtgggtgatttgatacatatatccagatcccagtttcttgggtaataagaaaacgttaaataagctattggaagcaacttagttgtgtggtaggtacaactaaatagtaagaaatcctacaacaagtacatatcctggagctagtagccaaattacattatagataggtagttctctaaagatatactaccagtttcatgagaagacaatagtagttctctaaagtttcatgagaagacaataagaggacaacagaaaaatcctttaaattccagatacttatctatgtgacatacaaagataatgtaaatgttttgtagcctgtattataagcaggcaagtatcttttttcaagtaaaatagaagcacacattaaggtataa

SEQ ID NO: 4602 - DNA, 335 bp, Avena sativa
  modified_base (37)..(37): a, c, t, g, unknown or other
tatgatggatcagtgcagtgatgtacctggagaaagngagggagcaggtcctttgcttcttcctgctggcaaagattatggcggagacggcctcgctggagttggttgccagtgggagggcaatgaacgagataaagaaggatggaatgtgtgtggcgttagagaagttgtggacggcgtcaacgagcgggtctgcaaatgcggcacagatggcactgcccagaagcaggtaacccacggctttggcgatgtacaagccagggttctccacactctccactgcctcgtcagatttgtcaaccagctggtcatgctcctcccttgttctctgcact

SEQ ID NO: 4603 - DNA, 271 bp, Avena sativa
aggaactcaaacccaaggcggcggtcatgataactgccgcaatagatggtgtctgagcaaatcttaaacatagcaatgacacacctgggccgataaaaccaattgactgcaccaggcaaagagaagttgttggtattgtgatgagtcttatgcttcagctcttgcatgttgttagtaaactctatttgcacgagactaatttcagatgattctcttacctgcataattttccgaacttgcacggtagggtagccagatttgatcatgtaat

SEQ ID NO: 4604 - DNA, 438 bp, Avena sativa
tgtagccaccatctcacgcagttggcgtatgcggtgataaagcttgtgactcaaacgctcagtaaagaggagctcactgtcagtagtgtgtagtgcttccagtagctcacaggaaagagtttcatactcgttaaccttctcctccagctttgcaacttccttgcgtagaataaacacctgagggtaattgatacccttaagctcaacttgatactctgctgcaagtgcatggagggctatgatagcagcattctgctcagcagctgcaggggtcgcaccactaccttcgtagtacaactcaggaactctgccatttgcccccaacacaactttaatggccaccacataacaaccctgagggcattgactaatggcatacgtgggtggagcgaggccaagcatcgtggcaagttcatctaaaaccggcatactcagaat

SEQ ID NO: 4605 - DNA, 241 bp, Avena sativa
cgggctcctctcggtgcgatcgtccaggacttcctctccttgttgtgcttgctgctcgcgacgtgccggcgcttcacgatgatgtagacgacacgatcgtctggaaccactcccctaacagcgtctacatggccaagtctgcctaccgccttcagttccttgggcgaaaggggagcgttatgccggctccgttctgggacgcctgggctccagccaaatgcaagttcttcgtttggttgct

SEQ ID NO: 4606 - DNA, 268 bp, Avena sativa
ggtctgacggaaaacttcgggtttgcagcgcgtcttgctgatcttcagcagaggatcctggaggattgtgaggtccaaatggagcgattgtttttggaatggaaagagggaacatagttcttcgtagaggtgtggatggttctgtttatcgcgtcgggaggatctaggaaaaatggccggaaaagttgagccgcagctgttgtgctgtctacacgcgctgggtgagctgacagagatcgcacggatggcggctgcactggagtccatc

SEQ ID NO: 4607 - DNA, 292 bp, Avena sativa
ggatcaagcagggagcggacacagggaagatcgtgccgcatgtccagcattgcaaagacgtcagctggggcttgaaacttgttcctcatactagtgcttagtaaattttctctcttttttgttggccgttttgttacggcatcgttgaaagcttaccgagtttcataggaactttggaggatatgaattgtaagaaggaagagctagctaattcaaaatgtttggaagaagcttacatcagaaaactgagatttctgtagctttgactgtatgccaacgaggagctgcactg

SEQ ID NO: 4608 - DNA, 399 bp, Avena sativa
  modified_base (338)..(338): a, c, t, g, unknown or other
gatggatctagtgcagggctatgcgcgaggacatggactgccgctgcgacccgtgggttctctgtccactagtatgcaaccgtcagttcagggaggtttgtcgtcgtctagactttactcatcgcttctcctatccgacatttttattcatctgaatcatctgctaactagaggatgtgtgtggttgcagtgttggttgaagaaacaaaaggatgtgatggctcatgctgtcattgcacttcttgtatagtcttcggaaatcatgggtgtagatttgttgtgagcatgatcgtgagtgcagtttgcagtttgcctgatttgtgtcctttaattaaacncgaacttgtcctttacaatccctacgacactaccaagttgcaatcaggtagtttttttgta

SEQ ID NO: 4609 - DNA, 455 bp, Avena sativa
agtgcagaggcgccggcggcaatgcccgttgtttgccgaaatgggccccatctacatcttccgggagccaatagggccagacagaatgagtcggctggcattccggggcggagatatacttcccagttttggaaatggtgcgggtttgccatggaaggcaacgaatgaccatattaagaacatggcagaagagagctttgcactgaaccatgagattggaggctgtttgcatcttctttatcaccctagtcttctcagtggccgtttttgcccagatgcttccccttctggttcagcaggtctgtcttatttcccccttttttattaattggactatgacccttttcctttatcaacagcacattatttgtttttggataattaaattgtagtctaatttgtccaagtggagcagctatgcagatagagaaaacactgtaattcagaaactgatg

SEQ ID NO: 4610 - DNA, 340 bp, Avena sativa
cagtgcaggactaaggacataccgacatactaaaagtcagttggactctaccacgtttagttcatcaacagaaatatgctaaacaaagaagcacacacatagttaaatgatcaaagcaattttggcataaataaaaaaagtggactatatttttgtttattaagatcagattaattcatccatctaatgcagatgatgcaggtactcacctttaggaaatggcaattttcaataacacctggggtgttgaaagtatttggtttagctccaacagtcacaacaagataatcatagtccacaacaaattccccattgccatcaacattggtcccatcgcctg

SEQ ID NO: 4611 - DNA, 451 bp, Avena sativa
ccgaatcgcagaagacactcccacgcaacttgtgccgcgcgagcgagctgctgatcgggacgattgtccggggccgggagcaggcgtcgtggccgtgggcgccttttcggtcgccggtcggggcatcgtccggtcaggcgtgatttgcctttcaacgtgggcttcacttcctgcctcctcggcacatggcgtgcctactccatgcatacatgtgtgcagtgcgacgccgcaggttctcatcaaactcccgtaacctcacatttcgtagctccaatcccagctatgccaggcggaggtggtatccttttttcgtggactttgcgattcttgcagacagttgttttctcgggagatctccggcgatgtgacgacttgcgttcaatgattcaagtccttgcattggagttgtagggtgctggtattggttgactcggtagtctgctatacgtcc

SEQ ID NO: 4612 - DNA, 237 bp, Avena sativa
gcgtcgtccatctcctacttcgtcattgattataagagcaagtgcaataatatagatgttgctggctatatacccatgccaactcacctaaagtcttcatacgtatatactcatacaataagctggctattagtttagctctataaaatatttaagtactaaatatttgcatgtccatatgcttgcatgcaagacataggaaaggagagtagccggcttaccgcccctgcatgcaag

SEQ ID NO: 4613 - DNA, 361 bp, Avena sativa
cttggaagaactacacaaaatcattatgcaaagacttcaattccagggtcctgtcttcgtgaaggcttttgaatatcacaagaaggatatctttgctgacagcttcactgatgagagtgctgaaatcatcttcagagatcatctcttttctcctggaatcatttagttcatttgcaagcaaagagttttgttgaatcagcttcataatctcactttgcagtgacctccgagaatcttgcaattctgacaattgtccgaccaagaacttcgcctcggcccttaagtcgtcaactctgtggttgcgagactccatctcttcccagaactcatcggtgatattcataagttcatccctttctct

SEQ ID NO: 4614 - DNA, 353 bp, Avena sativa
acggtgagcaagcctgtgaatgtaacttcatcggggcagacatcttgggacaacatcctttcatacacatccatgcccatccgtttattgtgaaaccgaacagcatagtgttccatgagaccgagtcagtctgaataacggcattgaatatattgcttacaccctctacatctccgcacttgacatacatatcaatcaagctgttggccacgtacatgtaagatgcataaccagtttggaatgcacaggcatggatcatccttccagtggccacagcagcacaagcatgaagcacagccccaaagtgaagtcgtcaggttggatatccttctctgtcaatgtcttgaccaaca

SEQ ID NO: 4615 - DNA, 404 bp, Avena sativa
cgacgacgattagcatccatcccggctgccagattcctgatgagcactggccgttcttttctgtccctcctaatcgccctcgctgcttttctccgcggcactgaattatcccccaccaatcccacacacatattctcccagctgccccacgcatgcataagttcaatggaataatgaactgattttctctcatacatctcactagctaatacacacgcgcagggcagagagaacaagttttctatctctctctttctttctttctggagaatttcttgtccttttcatgtgtactggactacaggcaggaagtgcagaatatgctctgtaccatgcacgatcttccaagagatcacacacgagatacacagctgaggttcgtagccttgctcatgggtctgcac

SEQ ID NO: 4616 - DNA, 441 bp, Avena sativa
tctttccttcatctgtcgtccgggttgctatctccggggtgatggcctcagataagagtgcccggaagtcacggacacaacgctgcagacaaaatataggaacatcaagatcagtcaaaagcatgcaataacttgagcactaaaaaattcaagctcgcattatagatgatacacgtggcaatcaaaatacaactaaaaccgccaaagtgtgaggttttattaaagtagcagtgaccatcagagctcaaccaaataaatacattgcaataataccatccatagatacttcaatgctgatagttcatgtgaatctgctgaatattttgggtttcttctatggatgaagatgactggaacaggccacgggctcacagcccaagaagcatacctcaataagcaagccaccagaatacctagtaatttaaaattctattacagtag

SEQ ID NO: 4617 - DNA, 426 bp, Avena sativa
cagtgcagaaagcagttatgagcattcaggacatccataccaccttgttttgtctcctcgggcaaatgactaccccaagagttctgaaagggattggccttctcctggtttaacctccttgaactcaagaagcagatgcacaggcaacgaaagaatccggcatgctaaaatgatgcgatatgattatgatggatataatcaaaataacaagcaatatagtccttcatttcacgtcggcaacattcagcgatctgctttatacactggtgcaggtgctgagactggttactgttttctgccagtcaagaggaatctccatgctgatctgggttctgtgaaccataaagatcttgttggcttagcatttccaaaagggagaagattgacacatcaccaacccttgatcagtgataggaagctttatgc

SEQ ID NO: 4618 - DNA, 227 bp, Avena sativa
ctattttccaaacaactctagatctatatctgcctcttcatctcttaaatggttgtcaccatcatttgcagcttcatccctcttcttctccttgtctctgtcatctataggaatgccaaaaagctttgccatttcaatgtcatctattggtgcaatraccaaatcagtccggtcatgtatctcaactgaattccagtcaacagttacagccctttgtgcattagcat

SEQ ID NO: 4619 - DNA, 478 bp, Avena sativa
gcatgagccaacttggcaacttccaaagtacagaattccacgccaggaggaactagggtcgccaaaaggttgggaaaagaaaaccggaaggtgactaccgggtagatgcggaacccttggtaccgcagcatcattggaagcctgcgttacttggtaaactcaaggcctgacatagcttttgcagtaggctttgccagccggttcatggaagccccaggtacacaacattgggcactggtgaaacaaatcctgcgctatgtgcgtgggacactgggttatggatgtgtctacagagctggagcatcggaaccagaactgatcggttttagtgacagtgatcacgctggtttagtggatggccgcaagagcacaacagggatattgttctttcttggctcaagcgcggttacctggtcctcgcagaaacagaagacggtggcaacatcttcatgcgatgcagaatacattgccgcatctg

SEQ ID NO: 4620 - DNA, 442 bp, Avena sativa
cattcaaggacatttgtgttgtaactaatgagtattttggcatgcaggatttaccagttggcgttggaagaatcatgcactatacgaggatcaggggagttgacaccagtcggttttttcttgctacctactgtttgctacatcgtttttaattgacactactttgttttttatttaactgcacttgctattctgaattcagaagtagagaaggaagatgttgtagctgggagctaggtggttttgtgtgtatgctgggattgtggcaagccccggccggccagcacatatgattacacgcaaccatgttgaatctctacatagctttgttggaagcttggaaccctctatggtatcactcgcgacggtgtgtcccctttgctccaactctagccaatttgggaagtactctacactagcaacggtgcgtcctttttcttac

SEQ ID NO: 4621 - DNA, 418 bp, Avena sativa
gggtttctgatgtccaagctgagtctgccacttgtctggatcctgatctattcacaaacttcttggtatggaactgtatgttgttttcctagataattgcagcacaagtaaaaaataaatattgaattgaatgaaaatcttttggttgttttacggagcagatatcagttcctaatgtattgatgcgtggcacccaatgtgatttaaccttattagtatttattttcttgcagtcaccttgtccatggcagctggagtagtaactgagaagccattttgccttctcagttgtaactagttacttagttggcaacagcgaagaatctaatgctaaaacttgatatgatattggagtttcacaatgttaatctttccatggattctgattagccaaatatagtttttattggttgtgctg

SEQ ID NO: 4622 - DNA, 408 bp, Avena sativa
tccagtgcaggcggcggcggcgcaacaatacatctccagtatcaatgtcactcttcggcgccgcaaatccaccctctctgctaaggtcgtcgctgccatggatcagagcttcttctgtcggccaggagaagagacattggcgcacggacagcctctgatccagttgtaattttttcctttggaagtttctgaagaggaaaattcaggagttcctctgagtgggagggcagcgcttgatattgcaaccattcgtctcaccactcaaccagactaatctaagaaactctttgttgtactagaacaggcaagttatacgcttcttaatttctttcatttagggttacaatgatggtaattgtacatctaaataagctagttattgattttgcaaaacaatgcatgttctgc

SEQ ID NO: 4623 - DNA, 364 bp, Avena sativa
tacacacttgaagtatacgcaataaccaccggagtacatccgaagtacagcaagatgtttgttactccccggtagtgtacttaccaagattttacatgtacgccccctatgttgtgtctaactaaataatagagtaaaaaatggaactaaaaataataaaaatgaacagaatgagactctaacttagaatgtatggtgcaggtacagatgttcattagttgggaacacgggcagtgatggttacctgagtgtcatctgtcactccatcaccctttgctccaaaagcaagcacgttgaagaccgtgtcctgtgatggctcttctggtggtgtcggaggcggtgtttgtggtggtggcagagatgg

SEQ ID NO: 4624 - DNA, 478 bp, Avena sativa
tgaatgaagtgaataacagtagaagcataagaaaccacaaaatctgcagtacaaagggcttatccagctttctgaacaagctgaaatacatagtgatgttactcctgcgtaataggagcatccttctgggattgttacacaccagtgaacagtacagccgcaattggacaaactatctatacgcagtcagaaatatacttctctgagattcctaccatggctatgcatagtggaacagaatattcactaagcttgataaaagaatcccttgtatgaaaatatatatccacagttgacctccagcgttctttcttgtcagcattgtgttttcagtagtcgcctgacaccaatttgagcgttactaataccaaaatgttgctgtaattatgccactgtttcaaaatcttttgtcaagcatttgttcatggagaaagccatttatattggtctgtacactgggcaagacgcaactctgtgc

SEQ ID NO: 4625 - DNA, 397 bp, Avena sativa
tccagtgcagtgagctactgaagggagaatctgaggggcttctgaagctccctactgacaaggcattgctggatgatcctgaatttagacgctatgtggagctttatgcaaaggtgcagatgattgttgacaatcttaaattttgtgcagttgatacctgatactaccatatatgctattgtaccacttattttttcaatgtacaagtcctcaaatccaaacaatgactttttctccgtattgtaggatgaggacaccttcttcaaggactatgctgaatcacacaagaaactctctgaacttggcttcactccacggagtggtggcccagcatctacaaaatcagatcttccaacttctgttgtactcgcacagagtgcagtcggcgtagcagttg

SEQ ID NO: 4626 - DNA, 284 bp, Avena sativa
tgcagcacacagaggtatacacatatcctacgcacccacacgcgatgatctctccggatctgcccatgaaatcctgtcccggaccctcccctgcgcgccacggagctccggcgcccggtgccgtacgtggagctccctgtacgtagagccagctgtacgtcgtcgttaagaattagcgggaggatctgcgtaattcagagcttctcttctcatgaggatcttaggcgcttgcggggagcttggttttcacggattactcacccgggatctggcaaataccctcc

SEQ ID NO: 4627 - DNA, 366 bp, Avena sativa
tgcaggagagaaaggtgtcgtcagtagcaacccaggcggcgcttagaagaatgttatgttgcgaaaacgaagtgtacctgcacattcatgctccactcggccttttcttggtgttatgtttcggtgcatgcggtgttgctgaagttgttgcatcaggccaggtaagattgacatcatcaaccgattctctcgccacatattttggtccgtctgtttccggtgttcgtcagttccggtgatggtcatgaagctggatcagagaatgatcatgtacagcattgcttgacagagggttccttgcacatacacacacacgcgcgcgcgcgcgcgcgcgcctgaagaaacgcacatgacatatctgccttt

SEQ ID NO: 4628 - DNA, 266 bp, Avena sativa
gcagtgcggcgcgcataagctggaaactcctactgatgaaataatccatggcaagatagccaagaggttcccataataactagtaatgacaattggcaaagaaacagaggtgccatgatgtagctcagtgttatattgctcaggaccgtgcgatctgccatccatgaagtcagatcaaatgcatggccagaagagaagaaggcaatataactacgaagaactcctgcatctccataaattcagacagcagcccactggaccagacc

SEQ ID NO: 4629 - DNA, 554 bp, Avena sativa
aaactctaaaatttagtggggatcagcttccctgtccacgtaaagagttcttttaacaataaatggtgagggtatatggtattcagttaataagtaggtgagcaccaacactgagccgactcaaatgccagcgccccgtctttccctactgagttacacttggttctcttatgtgtgtaagattgaggtgaacttacctagctttttaataagttgatttgtcccgaagtcaacagaattcacattagtaaatacctcaggaaggtaaaacatctctggaacctagagaaataatcacatgattagattccaacagagattctaattagacttctgcactaagtactgtgctgtgcaatatttatgtgaaatgtttctagagcacatttttgaacaaaacttactagctcttttacatcattcacgtcttcaaggacactattccaggttcggataagatcagagaacatgtgatcatcatcaccaaacttgccaccttgcagctgaatatgaagggtagtgaaaggttctatcctgacaagataatacaatac

SEQ ID NO: 4630 - DNA, 370 bp, Avena sativa
ccagtgcagcggcattttgtgccttactagaccgtcaggatgttcaagcggagttggatatcctcatgccttccatgcctagtttgacgcgattcaccgactatactattacatagtatatgtgactctagattaaaatgcatgaatcctttaaatctaaggaacatagtttttgggaaaaggagattcaaaaaagatgaaaggagctctggtaagaaagaatgatggagtgggtagagatcaatagggatggtgttccatgtattgatggcacaatcttttgtagtaatacataggattggagccggtactaaaatcatgtccattaaattcttgtacttttttgtggttttatagtttgatatgtatt

SEQ ID NO: 4631 - DNA, 384 bp, Avena sativa
cagggacagcccatcatatgggcattcatcgtgccccttcccacacaatccagcagtccagtttccattggttgatatccgctcatcatctagcccctctacaagtgcattagaacgactcatctagctcctccaaaagtataaacccctccaaacttctcaaacttgtctcctcaacagtcaccgcagggatataagtatataactgtcgtctcaattaatctcataacaaagcaagcaactcagtttgctaaaaaccttccctagtaagcaatgacactcattgtggtattagtggtctaatctgcactttgtacttaattgatcagtattcgtcgtgtatcaaccaccgcagattcatctcgccatgtgcccataccttgc

SEQ ID NO: 4632 - DNA, 534 bp, Avena sativa
cgttgtccggcatcctattgggagggaggccaggagcccattttgtgttcggcgtcccaatagtcctattgggagcgccgccggagatgctctaaatgatcagtcccttaaccctttgtcatttatcatcaaaagtgttgaagtatgatctaaattctattaaggaggctaacttcctacgagcagagcgaggcccgtcgccggctgggataagttgcatttgtgaaaatacccggtgttctgtaaacactccccgtcatagtgaagttttgctggctggcgtccgtggttttttcctctctttgttggacaggatcttaaataaaatcttggctgtcactcatgctttggcatggatatgatatatccctactgtgtctttattgtaccatagcggattttgggcaaccttgcaattttcaccgaatatgttttatactaaataatatccggttctgcctgatgttcttattgcattgtttacaaggacatgtatcttaatgtcttctggatctacctgcactgggatccatc

SEQ ID NO: 4633 - DNA, 342 bp, Avena sativa
cagtgcaggatccaagaaaaggcgaagtttgctagggggatgcgctggactttcactgaacaggtatgtagcttgaacataatttaactcaaattctcaacgtgcaaaatatatttcttttttggattctcacgaatattatactgtatgtttacttattcagatttgcgtgtttcaggacataatgccccctaatcgcattacgaacccaactcattcttatcatgagtatggatctccacttgcgaatgagcttctcaaaatggaggagtcgggcacgcctgatttgttgcaggcgatgtttgaggtatggctggaaatgttgtgctatgctgctaatcg

SEQ ID NO: 4634 - DNA, 297 bp, Avena sativa
gttaggctatattgaatttgacttctgttcagcaacaacactgattagtctggaacatttgcatgtgtaacagaaattaggtaggcatcaacccacaacacaaacaaatgtattcatcttgacagttgttatgaacttatgactgtctatgtagatactgatactgttgcaaacaaattcttgtagtcatttcaggtcagatatttattctattttgaaccaaacaagctgatccttatgtcagacacagctagtgtggctcttctccatgttaaccttctataagcatctggacac

SEQ ID NO: 4635 - DNA, 475 bp, Avena sativa
gatggttccagtgcagaaccagaaatgtccttcccgcacttcctgccctgctgatttcctggatacagattactctatatgaggctggttgcctgtatatttacaggaggaaggggctgttttcagaggctcctctaaaagtgtttttcaactagtcctctaaattgcggttttttgagaatggggtgatttagaggactcactagagttgctctcaagtcattggagtatatcattcattcagtaagagtacagtccaattttgtaactatttcttggaaacagagcgtgtatgacagaaaaaactgcatggtttatctattactgtgcattacgattgtctttaactaccattgtacctcaaataaagtgatcaaaactatggtctgccatggatgtatctctggggatgatgctgacaactatgtggttcaaataagggacgaggtggcagcaatacagggagaaaatccca

SEQ ID NO: 4636 - DNA, 421 bp, Avena sativa
aagctcgtcagtcgccgtcgtcctgccgggaacgctgcagacaccagacgctcactgccggcttcctcacgcctcgctccacgctcggcctagctcggctagcccacgagtgtgaggtcaagcccctcttcctctctgtaacttactcttcctctctcgccatctcctgctcctcgccgcacgttgctacgcgcgtagacaacagctcgccgcgctcaagcagcgagcgcatctaccagcactctgtctccgtcaattttacaaccgcttcaggccacctccagcaacattcttcatactcacacgtttgcggtatatccatctacgcagaacacaaaatctttcctagaacggagctttagatctctcggaaatctcttccaaagatcagccgatctcactgtttttcagctgcactgga

SEQ ID NO: 4637 - DNA, 379 bp, Avena sativa
gtgcagcccgtttccctcgtccgccctccaagcctacaggtgcagcgacgatgatccatgcggctcagcagagacacaggatggctccgaggtgcaatctccgcggccctcacacagcgcaagttccgagttggataagaggggagggcaggatcttgagcagaccacctgctcaggcatgttctggagtcgcagaagctgtcagagggagcagcagtgcaacgcggaaatcaatgcttgattcatgcttcctggttgtgaatataatttggattcatagcagcagctcaacgtgggagatgatatgatcagcggtcctccctggctgtgtttcttctttttcttgctatttacagccaagtattttggtgtttggtga

SEQ ID NO: 4638 - DNA, 486 bp, Avena sativa
gatagaggggaacttaatagaaagatctcactcagctcctctatttgtgtaaagtatgtctgcaacatctagcccatgaacttcaccgaaagcttctgtctttacctactgatgagtttttagcttttgtggctgtaatctactttacacttgtgtatttttgtgtgtatatatatacacttgtgtgacctatgcctacatagctaccaaccgaacacaaggaaagggtctggaattgcacacatcatctggtacatattctacactgttccaagggaccaaatcttgaataatgtgaaataacacctcagactgaataggaaataacttgaactgagcaattgtatagctatatcatggcacgcacattttttccaacaacaaacataacttgatattagaataacatcacaatgttctccacagcatacaaccacagctgatccaccgacagacagacgaggcgtgattatgtcaagattacac

SEQ ID NO: 4639 - DNA, 409 bp, Avena sativa
aatgaaccttgacaaaagaaaagaaagaatgggtgtattgttacaaaaacgcaaaatgccaaatgggtaatgcacacaagattctgccatactaacaatcaagttctgttatcgtaatataaattatgcatatccctaccgagtcagcaagagaaaatgttctgatatgacaatcatatataaagtgaagcaaacttacaaatgcgacgaactaactatttctccatcttatcgcagagagggatacactttgagattgcatactctcccctcattgatgatgtcaattcaaggagacaagtcttagctgaagccaaggttaccaacgttgttctaccttcagtgtttcttcacattggatgcaaacattgtctaataatctcgtttgtaatttcattaccaccatgct

SEQ ID NO: 4640 - DNA, 406 bp, Avena sativa
gaagaagcagtcctgctgccacagccaccaaagcctctattccaacgactgtcctccgcgcgttggtgatgtatggggacaaggcctccatggcccttgtcatgttcactgcaccatgctggtttgcaggatccatgaagagctgccaactcgtctctcttgctggagttgtggatctatgttttagagtggaaagccttcccggtgctgtggatttgttttatggctgattcttcctacttaacacccttctaactatatcaggaaaatgcagatctttgcaagaattgacccgtgaagtccgtaataggaagtatatgtgtctctgaatatacaagggggacacactgtgtcattgtatttttgcagccatcatgtggacgcccgcttctattcacagcaaatg

SEQ ID NO: 4641 - DNA, 458 bp, Avena sativa
agtgcagtgtgagccaaatgagcctctgcgtgtcaatgtgctcttcaagcacatccagaagatgcttacaggtgacagtgcggtgatcgcagagactggtgattcctggttcaactgccagaagctgaagctgcctgagggctgtgggtaaacattcttacagtctgactctacactgttgtaactgtgtatggtttcttgttatttgccttgtatactgagctaggtttttttggatacttcaggtatgaattccagatgcagtatggttcaattggatggtcagtcggtgcattgcttggatacgcccagggggcaaatgacaagcgtgtgatcgcctgcattggtgatgggagcttccaggtgacatttctcgcttgacgaccctgttatgctgctattatctgcaaatgattctgtgtttctaatgtggttttgtgggcaactacctgcactgg

SEQ ID NO: 4642 - DNA, 437 bp, Avena sativa
gatggattcagtgcagacagtggtggatgaaattctatccagacggggtgccagtgtccgcgatagggaagcgagcagtcatctggagaaagacgtagaggaggctcgtaagttcattttgatgcttgcaacttttgctgctaccatcacataccaagcaggattgaatccacctggaggcttttgggctgaaaatcagtatgacccacttagttccaccgttccttcttacaagcatcgtccagctacttcagttctccgcagtaaataccttcaccggtataacttttttgttagctgcaatgcgacttcttttgtggcatctttggttacggtcattctgcttctgagcccagaattgagcagccatggaataaggtccagagcagtgactgtgtgtgtggtagttgacctattcggtctgattggggcctatg

SEQ ID NO: 4643 - DNA, 286 bp, Avena sativa
gtcactatgtgccacagcttgctgatcttgtgtatgagaggaacaagaacaagatggccaacacatacatgaacctcaagggcttcatggtaagaatttacactgtatcaattttttgcaaatatgaattcctttcaaacagagtggtcaatcagaagggatatgattttgtcaactacactaacttccaccagaaccttcacgaaaaaatggcataagagctggaccaacttcctagtaattttgtcaattactaggaatataaaattcagaatggacctatgta

SEQ ID NO: 4644 - DNA, 330 bp, Avena sativa
cagcagcatcatcagcctagacatccagctgagggtgatgtccaggccggttagaccggtggtgacgagggcgcgcatgcgttgcagcatcacgtccgactccatcttctcgtcataggccttcaagtcccactgctgccagctagactccatgtcctggaatgccggaaggttgatctggtccacgatggtgaggttgcggacgtagaagtacgactgctgccacaaacgtaccgtatcatgcagccggaacttggggtagccggtctgcgtgcgggagtagatggaggcgccgccacagacgaccagcggccccttcgtgaactggac

SEQ ID NO: 4645 - DNA, 357 bp, Avena sativa
cagtgcaggagtgctatgcatctctctgtcctggaattctgtccagtgcaaagatcattaaggcttacgagtggcctactaatgcaggctatgatggggctatgcgtttggtatgtatgccttataatttctctatgagttcagcatatatatgttttggcatgagtgcaaagaccttgtccaaaaacaaaataaaagaaacattactggcaaaacaagcactattctacgatgaatttcaagtttttaagaaaggatcaattatgattgtgaattcaagtttaaatactgtaattataactgagtgcttgatgttcttagttcttactacttcttaccgtggcgatcacgatgaag

SEQ ID NO: 4646 - DNA, 354 bp, Avena sativa
gcaaggggcacggtctgcgcttcatcatccaggaggagagcccgtgtgctggtttcgtgttcttgcacatccctcccaggaagaggtgtgcgggaattttgacctcttaattccccttcccttcttaactcccataccctcaaacctccaaacaagaggtttaattcccattccttagctccaatttcaccaaacgaaacatgttgtaaaggagtgctaatggaagatgtagagtgaatacttattttgccatggttaaaaaaaggaactacacagcagcacgagcattatcagttagctgccgccattagcttgccaaatcattcatgtaaacaaaaaaaacatgtttcataa

SEQ ID NO: 4647 - DNA, 227 bp, Avena sativa
gagaaatcaacaatgcaggtagcgccagcaagtggtggggctagccttgaccctaccgaggagaagttcttatttggggatgatgaggatagcaactggggagctttgtaggaacatccatgtttatgcacttaaagtgggattagaaagagattgttttgttgtgtctgagctggtcaagtcagccgggagggtaggtgatacccagtacattggagagcttgttg

SEQ ID NO: 4648 - DNA, 452 bp, Avena sativa
ccaagagagcagctgaccaagagaacggcccagctgattcaacacagtctatcttccatgtgaacccggaagctccagggtggataaagaggtgagttctgttaatgccgctgaatgaaaaaaaaatgatactccctccaatccatattacttgtcattaaaaatggatgtatctagacatgtttttgtgttagatacatccatttcaatgacaagtattatggatcgggggagtactagaatggcttgagtaggggtgtctggtttgtggacgaatcagaagtagcagtgtcgtattttgagcgtgtacggctatcttgcgaggtctgattgaattaggaagacgagacaaattagctgaataattcgtccaggttcttgtgaagaactagtggcaacatagtattgggtcatgtctcatgtaggactgcggctggacagttttttttttt

SEQ ID NO: 4649 - DNA, 219 bp, Avena sativa
gccattgttataagagcgatacaaacgatgagcatgtgctttcttgttgctaaggacttgtctcatcttcttccattcccgttcccatttaagtcacctcaaaatcttttgctggtacaacagcgtgttgacctcaagtgagaagatctagtggttcaaagcgagcactaatgccttggagccatggcagaacaggttgttaactcagtgagcttggtc

SEQ ID NO: 4650 - DNA, 305 bp, Avena sativa
gtgtcatatacgggggctcaagaagaagggtcaaggtcatgtgctttcttgttgccaaggacttgtctcatcttcttccattcccgttcccatttaagtcacctcaaaatcttttgctggtacagcagcgtgttggacctccaaagtgagaagatccagtggttcaaagcgagcactaatgccttggagccatggcagaacaggttgttaactcagtgagcttggtcgtgactggcgaactcaccagcagagtgttctccgggctgatagagaggtacggtaaagatgcagccaccagagagaag

SEQ ID NO: 4651 - DNA, 465 bp, Avena sativa
gatggatcagtgcagctaggtgctaggccagtaggcctattatgcgcgccgtaatttggcagagcttagctctaaacaaaaaatgatgatggtgctgaaggctgcttagctgctcaaggaaaagaaaaccacgctttaattccacgtcacgtcagtaacaccgtgattagccaaaaaaggaaggcgctgtggctacctgtaaaccgatacgatccggcttcggttaatgccagatctccggtttccctacgattcttggtgcctccgtgcgggacgcggcgcgtgctctggtctggcctcgcgcggcacccgtacgcgtatgctggcatgcgaggatagcttgccagtacgggggccgcggcccaagcagcagcggcggcggcggcgcaaccagggttctacagcgaccaggtacacgcgtcttccattctactatctgcttgatccgagggggttggttcttct

SEQ ID NO: 4652 - DNA, 426 bp, Avena sativa
gattaatttactatggtaatatggaacaaacataaagattgcattatggagaggaacaaaaaactaaacaagtacctgcagaagcattgatgcctttgcacacaagatgccacctccaatagcagagaagagcggggatgggctgacatgggatccgacaagcttgtttggggatgagtttactgtgatggtgatatcctcagcgccatcactgttcaacatagaccaaccatcatccggaaatccattcacagcatcattgaagcctctgcaaggtagtctctccagtttagaggggcggtacacacatgcatgtaatattacaagatggtctagcaaatggctgtaagaccacagggccattctaatgatacacacctgctgagtctttgactgaaggttctgaggactgcactggagtccatc

SEQ ID NO: 4653 - DNA, 491 bp, Avena sativa
atacctagctaacagactgacagagtgatgtatgtatcttttttacttcatttctatccgcaacattttctaatcgtacacgtaatttatcttcagcactttgtacatggcaagaactcgctcacagatttttctacctagtgagtgaaatctgcacgctttgtacatggcatcagtacctttttccatttcaagaacagttatgttgacttcacggttggagatctctctgggcaacccaacctggcagctatgccgacgatttcatatactacctccttttcaaaatacgatgtcgcagatttctcaagatttaaacgaatttagacactatttagtatatagatttaaattttgataaacctatgacatatatagattcaaattttgataaacctacggtatctattttgagacggggggagtactacaataattttctatttccaccgaagtagactgaaatgagtggcagagtgatgtatgtaagc

SEQ ID NO: 4654 - DNA, 422 bp, Avena sativa
agcgcagcaccgcgccattgctacccgatcagatgaatcctggcaaacatttgatgcttctgctcgtgcctcatgcggactgtgccgctgtaaagtcaagtttcttgcgcgctcgtaatttacacccgtcatggagcacacgtgactacggagaacaaagtgcccatcaaatgttatgcaggagtacattatatatgttcagcttgttttgttttactgttcttccgttctattcgcgtctcattatacattgaacttttatagattaatgtaacactgaattatgtcaaaagaaaaggtacaccaatttaagggagtacctatttctacggtgacccaaaataattatttatttacaaaattatgtgctacttcacttctaactagacatgtgcaactataggtagttgcatactcaaaaa

SEQ ID NO: 4655 - DNA, 391 bp, Avena sativa
tcgttgtcctttttctttttcttatatctgaaactagatcagataaatacatggtatttctatggattttcttttgtcttggttcttgcataaaaaagtttcagaatctttgagtggtccgtcggattcatggttctttaattgctgaatttatttgcttcttaattgtttcctctgtccgagcatacgctcgctttcaacactgctagcatcggctcgccgagaagcactacttggtcaagctgaaatcttgctgctagaggatttagataggtagtctactgtgacggttgtggtttgcaattttttcatcagacctaggtgtcagcacaatgtatctctcccgttgccacttatcaccagtggggtactataaatctgttgtatgaac

SEQ ID NO: 4656 - DNA, 337 bp, Avena sativa
ggcggaaatcatgtggagtagaaaggattagagaactaggttcattaaaagactacttcaacaaaaacgatgattaaatgctataggataatcagctccattaactaacgcccagagcatgtaggaaccataacattccgcttctgccatgactacattagtgcatcagcttccattctattaacgaacttggcagccctacaaattagtaaatcctagtctatatcaagtaacatgagggaataagagtgcatcaggtgtaataaaattttcaagtgcaacagcagcattggtatggtcatgtgtcatgtgaccttattagtgggtagtataagag

SEQ ID NO: 4657 - DNA, 302 bp, Avena sativa
ctgactttggaaatcatctaatatgttaactgtggagtgctactgcatctatctaatacttgtcaagtaaagtctgaaatgtttggattaattcagcagtgttggccatgataatcataatcacgtccagtttgatttactcctggcgccaaattatggttgccattgcctactgttttcacaaatcgtactatttctaagaattgtgtgtgttatcgccggtactatagtacttctcaaggagagcaacaacactggtacaaaagagaattgtaaatgcttgctacactgagtacttgaca

SEQ ID NO: 4658 - DNA, 502 bp, Avena sativa
tacctccatgatgagtgcccagatggtgtccgtatcgtccatatggacttgaaaacagacaacatactagttcatgtcagcacaagtggagtactaaccccaaaaattggagactttggtatctcatggcctcttgatttgaataaacagtatgagcatgttgacaagcctgctggaaacatgtaagattctcaatctaccatcgcggtctatagcggcactatgttcaatcattctcatgtagcaatgttgtttgaacttcaaacattcaacatcaataacttggcgatgagagatcgtagtttggaatacttccatccagttttggtgttaacttgatactttgtgcactattcttcagatagagatataaatgaacaaattccaatttattagatagtcaacattctactgatttcgggttaattagttaaatttgtattgtggtttcatacccatagcatccctcgttatatgtatacatgatctgtattaatttccc

SEQ ID NO: 4659 - DNA, 397 bp, Avena sativa
atgcgtagtgcatttttttgaattagcagtagtatgcaaattgtatgatccaatgtatgatcatcgtatgcctaaattttgccacgaaggcaacttatcaggttttaaaattattcagtttcaagttcgttttctgttctaccaagctattttgcgaactaaaaaaactggagttcggatccctttatatgcatttttaaagggtctattatatgcgttatgttagggttgctattaaacctcttattgggcaatacatctcgtggcggcttaagttgcctaatacggttccaagcgaatcgctcttcacgatccttgaatttagaccaggctcaactcaacgagagtgaattttcaaaacatgggtacacctgaaatgaacctaaagagtgagtta

SEQ ID NO: 4660 - DNA, 493 bp, Avena sativa
gaaaagggaggtcaaacctagactggccaacacgttttgagatatgcttaggcattgcaagaggtctggcctatcttcatgaagaatctagtatccgtattgtgcacagggacataaaggccagcaatgtcttacttgatgccaatctcaatcctaagatctcagatttcgggctcgcgaaactttatgatgaccaggagacacatgtcagcacaaaagttgctggtacattgtaagtgcatttccatcttgctaacctttatgtttatgtactattttcatatgtatgctaatgtcgtttattctgtcctttgtcaagtggttaccttgcacccgagtatgccatgagaggccatgtgacagagaaggttgatgtgtttgcatttggcgttgtggtattagagactttagctggaagaccaaactattacactactgcggaccaaaacaaggtttatatttttgaatgggtaagctcactgaggaactgcac

SEQ ID NO: 4661 - DNA, 374 bp, Avena sativa
accgtccatcgcaatttttgcttctgaatttcttaccctacagaaacaaaaacagcatacatgcagaaaaatgcaaggtgaaaagacaaaagcaatatacatacacgattttcacacgacatcacaccaaagaaacaggggacaaactcatcacgtgcagcaataaacaaattttcataaaccaacaattaggtgcaccaagggcagcaaataaaggacaaatctaataccagcttgcaagtgcctgtgtcgggtccgtggggagtagtggcagtcgccaatcagtggcggcagcgcctgtctgtacatggtctactacagctgcacggctaaaccccttcgccatcaaccatgagcgtggcacctactgcact

SEQ ID NO: 4662 - DNA, 298 bp, Avena sativa
acgcctatgcagaacttcgttacattgaactatcagagttgcattgtacagtacactatttttgaccgaggggtttggtttcctccagtatctcaaaccatctacagacaccaataagaaaacgaacttcaaacgtatctcacttacctaaaaaaaaagaaactgcggtacttgggacagcaattggcgtcccatttatagaacctgggcaagcaactgctatgattatcgcacgcggaatcatgcagtccagggggcaacacgcatgcaagcggtgcccaacagatcatgctaaatg

SEQ ID NO: 4663 - DNA, 469 bp, Avena sativa
gatggagccagtgcagtagccgttagaccctctgctttgatggtaaacatgcagcctcacaatagttggtagtactgctagagttaaggtcataacaagcacgtttagaatagttggcctttgggagttggtcacatgagcatattatccattcaaaatgtgatatgttgttacttaaaataactgcttccttgtttctgttttcttttgttgtaatcagaaatatcgttggaccctcgtttcaaggaaagagaaggatcttcaaagtacaggggcatctgggcacgtcgttacaaggagtacttgaaagagagcgggccacttactgaaatacaggataagaaagaagtagacttaaagtttaatgaactctatcagaaatacaagcaagtaagtccccaatttcctgatgaataatacaagtatatacatgaggctcctactgacattctgaaatggcataattgtc

SEQ ID NO: 4664 - DNA, 591 bp, Avena sativa
gcccgcaccgcaagaaattcattgcgcaacggagtactcgcgaaacgatatgcaatgacaaatgctggaagagcaaatacctggagcaccaaagtcgtgagagaaactgcacatactggtagggaaaggcagcggaactaacatgaaggataatgccagcaagcagtaaccaggtacctccttcgtaataacgttccaattttcctgtggaaacgtccttgcgtttggattgtgaagctgtttccaagaaggcgatcaggaaaagcatgtgaactataggttcaacctttttgttccgattgaatggcatttcttcaggtgtgcatctatgatctgtaccaacaacattttgattcaggcaatggttctggatgaacatctcgggaataactcacatatacacaaagtacttcctttcattgacttcacctccagtagtgttatgaacagagaaattcgggaactaccaaatggttctcttgaggcaatgccagctgcttgaagaagacttcctcctctgtgaggataacaagttggcaactaccaaatggttctcttgagtcttcacaggtctgttaaatgagcacagct

SEQ ID NO: 4665 - DNA, 446 bp, Avena sativa
gatggattcagtgcagatttcaacatagcaaatagttctggcaactgcttgttcatgttttgcatattgtagttcatcacaaagttcttgtaacttggtggtagtgattggaggacacggtaaatccccaaagcattaggaatcactatacccaagctttgaagtttgtttgcgtgcccagacatcttaagcacatgctcactgacggagctgccctcttccatcttgtagttaaagaacttttcagaagcctcatagctctcaattgccgcgtgagtctcaaagatcaatttgagatcacggacaatatcatgtgggtctgaattctcaaaccttttctgaagctccgattctaaaccatacaagatagcacactgaactgtggagtactgagtcttccgagcgaggtaaacattctttacttcatcggtagcagtagctgcact

SEQ ID NO: 4666 - DNA, 238 bp, Avena sativa
gatggatcccagtgcagatttcaacatggagaagagttctggcaacgtcttgtccatgttttgcatattgtagttcatcacaaagttcttgtaacttggtggtagtgattggaggacacggtgaatccccaaagaattaggaatcactatacccaaagctttggagtttgtttgcgtgcccagacatcttaaagcaacgtgctcactgatggagctgccctcttccatcttgcagtta

SEQ ID NO: 4667 - DNA, 407 bp, Avena sativa
accatcatgccaagggtggcgtccacgaccttgccctcaatgctcgtcacacttccagagctgtacttggtttatcctctgctgccacccctgctgaacctggacaggtactagaaggtgcaagacaacggggcgtctgctgcggttggccacgtgctaggcagaggtcacgcggcagttcctcctcaacgtcaaacgccaatcaggctgatgaggagaaggtcagtggatgcatgcccaagcttggtaaactcctccctcgctcatcttccccacatgttcatggtgataattctggccagtcaactctttatggtgcgccgcagagagagcattcgcaagaaacaccattgttggggtttaatagggttgatatctctgaaagaatgaagcacattgtagagcaa

SEQ ID NO: 4668 - DNA, 405 bp, Avena sativa
agtgcagcatgtaaacagttgtaaccatgtagtccccccgaatatgcacaatcaggattttgcattaatttctcgtaaagatgcgtaaaatttctcctcgcagcgaagaacaggggtgactcattgcacttgctgacagcttgcgataacccaggctctgctgatattaactccagtgcaagatcttcgtggctgttgcgaatggcatggtgcagtgcgttaaatccatagatgtcttgttgcaagattgcatgtttgaattctagttggcggcagcaggtcctgagaaaataagaagataaggagacatgaccatttgtcaccgcgacgaggagcggcgtctcctcgtccaagtttacagccacgagaagagattcctgtagtgccacaacatccctgcactgg

SEQ ID NO: 4669 - DNA, 467 bp, Avena sativa
gttaaagatgtcagaatgtatgagcaagataaggtatgaagcaattggctttcttcacattacgtatgtacttttaacttgtaaggataaactacttttaaaaaaatgcagcgaatagcaaatcatattattaaggtgcaataaggatgatgctccagccctctttctgcgagcctatccgacgtccacagcttgttcttcaaggccagccacatatgcattttgaacttcagtggggctccgtagttccacaattgtctcatgcccaggacctccgatctccccaaaaagaagagggagtaagcaaattttaaggaatactactcatttgctatcagtttccatgtgatcttgtccttctcatcctcattcagcaccaccatcctaattctgcactagagctccataaattccacaattgtaggaaccgaaggtgtatcccggaatgatctggcccagctgttgtt

SEQ ID NO: 4670 - DNA, 532 bp, Avena sativa
tcagggaaagtaggaccactatcatcattcctggcaatacacgccgtttggtaaccatctcgctcatcttcttgttcaggagcatcatgatgatgataatggatgccacaaaggcgactgcattgagatagaagaatgcgataaagcggggatggtaaatgtcctcaaggatgcgatcagcagctgaatggtgatgttcacttcttgaccagaaacccctgttgagctaatgaactatctgtgcttgaacttggagcagtctctcggctcataatataaacacctgatgacacatcatcatcttcatctgaaggcacatttgcacttggagcagggcatcggttcataatagtaccccctgtggagtcagctacatatccatctgaaggcacatttgatcttggagcagggcaccggctcattatagtaacccctgtggattcagtatcctctctatctgaaggcacgttagatcttggaactgggcgccggctgatgattgtaatccctgttaactcatcagcatctgcat

SEQ ID NO: 4671 - DNA, 454 bp, Avena sativa
cgtacggaagaagatagcccggtagaatgagattggagctgggctcatattgctgaaagtacgctgggacggacagggagatgaacagggtaaacccaacgattatcatgtttcttgagcttgcagcttcagtatatcgcagtgtggacaggccaagtgcgacaatcagcgccacacaaagcacaactgcaattatctcaccaaaattgctagtacatgacagaacccacttaaagaacacatactgtatttgctcggcacagccgccgcacctatatcactacaaattttgagaagccgttcacaaattaaatggtacaacacgggaggaaccaaaactttctttttggtgcttctggttacatccttcaggcacaacattccatgcgacgaaacccacaagcaatggctggtaaaatggcaaccatgccatagctggataaaggcttcgtcg

SEQ ID NO: 4672 - DNA, 413 bp, Avena sativa
cgtcacgaaaaggtctggttcatatgaactcttgaaccagaccttttcgtgatcgctgccggtgatatgtgtgccatctgccaggagaagatgcatgttcctgttctacttcgctgtaaacacattttctgtgaggattgtgtctctgaatggtaacaccttttgcttatatgttttttatcctgcattatttggtcatttgaggctttgttgtgtaaggcatctagtttgatatacaattcattcttgcatgttctttatgtctggatatgtgatatgttcttgaactttcactgctcttgtacgaatttgcaagagatatggtttacaggatgatgaaccactttgctactttagtttgaccagaggttcaagagttcatatgaaccagaccttttcgtgacgctgcactg

SEQ ID NO: 4673 - DNA, 391 bp, Avena sativa
tattgccaaagctggaacgccaagtaaagtcacaggttggtttgtctaacaaagtaaaatattatcaaatagaactttacacaatttttaacagaattttcactagtctttttaaaatttgtttgcttcattgtgtgtagggatgacaatgctgttgtttagatagttggcaagcttatttaatgctgctattgtgacataatcatctatgatcttgcagggaggggcaacttggtggaggcttttaatgtaaaagatgtctctacattcacaggatgctgcttgatgcagatctgatgatttactagtttgcgatgctagtgtttgtgccatgccagtgcttcatcaatagggtgcggtagagtcacattccctattgaattgctgcact

SEQ ID NO: 4674 - DNA, 541 bp, Avena sativa
cgtaggaggcgcacatttgtggattgccattatctttgtcaatatctataatgtttaaaccagcattgtcccctggaaaaaaaatattctttagttgctgccccactgaacagaacatgcaaagaatatcttcaagtttctgttttgaggatgtactgatttctatcttgtcttctaatgtattttcaaaatagcttgtgatactaatttctagtgtgttattctataggttgttgtcatgacacatgcatatggaaaacgttctggagtacgatatgttaccggtggcttgaaggtttattatgtgccatggaggccagtcctgatgcagaatacactgcctacgttattcatgacgtttccaattgtaagaaccattcttatccgtgagaagatttctgtcgtacatggacatcaggccttttcaacactgtgccacgaagcattgatgcatggcaggacgatggggtacaaagttgtcttcacagaccactcgctttatggttttgctgacgttggaagcattcacatgaataaggtg

SEQ ID NO: 4675 - DNA, 420 bp, Avena sativa
gatggatccgagtgcagcaaagatgtcatatcttcccaatgtgacagcagaaactctaagaagaagaccacaagctctgctgaccaccgcaaagaaagggcagcaaagcacaaagcaccaagtaccgaggttgtcctcttaaaaagaagggtggagaagaagagcgccactggcaagacggctgcacctaatgattacaaagaccttgcagtaactccgaacggtctaaattgtgttggcacagttctgcgcaagtgcaaacttgaagagccatctgaaaccataagcaaccgtctgaactgcaagaatgttccagcacggtctgtggtcttcaagttgcctcatgaagtatcgtggccccaacgtagagaccccgcggtcgcgaggtgccatgctgtaaagccagtcaagaccctgcac

SEQ ID NO: 4676 - DNA, 446 bp, Avena sativa
tacgtccaatgtcccttgcctagcttgcgcggttgtcatatcacatcaccatgccctgcattgcatggttatccacattaatttcctccatctacaatggcgactatttattgtgttgacaacgaaacaagaggttggttgagaagggggatattgatgctgctgagtgatgaggcacaatgacaatagaagtggcaggaaacataatatgaaggcaccaacagctaccacgcaaccactaatcagttattgcacatgttgtactagcacaatttatgcggttggaactcgtgcattgggtccaaacaggaaaagatcacaggcttcacaggatctgggtatgtagattctggagaacgtgcagcgcaaaatctttcaagtacagtttgccagcggggcaagctttatctggctgacttccatcaatgccggtgaatgctgtggtg

SEQ ID NO: 4677 - DNA, 440 bp, Avena sativa
ccagtgcagttgctccttagttgtgagggcatgctcaatggtttagatagatactgtctatagcaaacttccacgtcatctagtagacagtagtgtaaacggtgtgtacattgtgttgtcttttgaggtgtctatacaaggaaccaacgattgaatcatttctaatcttggtatctttgttcaatagctcaatctatgggcttatgatctatcatggtgcttgtttgccataagaacaaaatttcatacctaatcaaatcataataatctgccaaaaatctgtgcattgaaattgatgccccagtgccatctgcgcggaagaacaccaattcccaaacttaaataccactcctgctcatatcctttaaccaccggctgcaagaggcaaaatgattgaaatcaccgcaatcaccaccgcctgtgttgccatggcgtgttgc

SEQ ID NO: 4678 - DNA, 517 bp, Avena sativa
ggagtgaaggccgtcgatagccaagagttttgaaaggattcaccgtaagcaatctcgctggaatgggcattgtccctctatgcttcaaggctggggaagatgctgacaggtcttggcttaactgggcatgagcgctacaccatccagcttccgaccaatgtgaatgaaatcaagcctggccaagatgtcaaggtcacaaccgatgatggaaaatctttcacgtgcacacttcgctttgacactgaggtacatgggttcatccctgagtatttttctagaccaatgttgtttgatcatctgtagtgatttctgatgatgcgttttctgattactcttcaggtggagctcgcatactacacccatggtggtattctaccatatgtcatcaggaagatcgccgctgagcaatagagtgtgttcctgagatgattgcgatgaggcaaattgtaattgttgtaaacagttcctttagcaagtcccatttgaggaatactcctcaaataatcatctgagatat

SEQ ID NO: 4679 - DNA, 405 bp, Avena sativa
ggtgttgtcaagaaggctgttgggctcggaggctggcactggctggttagttcttccttccaattattcaggcgcctcttgacttttcttttcacgaagtaggtagttttggtgccaagctgggtggaggtacaaaaggcagcaaggaggtgaagaaaggcatgggggacagcgagaacttggccaaagctctagagaagttggcagaatttctcactagcaaaagtgatggaggagcatctgctggagggggagctattgttcctcataccgaagcagttcagaaactggaactgatgccaaatgacatcaaattggaaggagtgaccaactatcttcggtggtcaaggagggctctgaggattctgaatacgaaagggctggatgaccgtgtgtgtgatgaag

SEQ ID NO: 4680 - DNA, 290 bp, Avena sativa
cagaacccacagagggatctgccagaccctaatcttgcttgtagttggggatgcttatctcggagttaaggaggcattattctagtgaaactttcgttactctttccttgctgtagttcaggagaatgaaagatcaactcaacccccaacctagcgaagaacttgttcttttcttttttcaagatggggaaccgaaccccaacctcggcattgagcgctgcacacaaccatatactattcatagtgtaaatttcagcatcttttattttaacaaagcgaagcgctgcact

SEQ ID NO: 4681 - DNA, 559 bp, Avena sativa
tacaccattcacatgcggcttttattatgagaggtagttgatgcacctttcaccatcatgccctggataaatgtatccaagagctttccattgctggatgagacgattcctgtccatgataaagcccttggggaaggccgccaaataggtgaaacacattttgtagtccagcttcatgtagtaatagctcaacatgaggctctctaatgttctcttctgatatacttctcccaagtcaactttggtgtttcttatatcttcccatgacctcacagttcttacctcagacattacttgcccaagagcatttgccacaagtggtaggcccccacacttcactgcaattttccttccaatttcttccaagacactttggtgatcgtcaggcccaaacgcccttttcttcattatctcccaacagtcatcaattgataaaacatccaaattgatttgaccaggctcaggcaccgggcagattttcccctcatttgcaagaataccagtgcacagtttttgtactacgcttagatttcgggtagttacaataatccggctaccc

SEQ ID NO: 4682 - DNA, 506 bp, Avena sativa
tccagtgcaggtacgaaaccctagcaacccctggaagcaacgtgaggaccgtaggaggatggagttgggtgggggaagcacgggggaagccgagcgaaccgcaacggcgcaaatgcagcccaagataaacgcaaaaacacacaagggatcacctacttggctacttcggtctcgtatggaagagaaacaagagcgacacaagtgttttcagggcagatgatgttatcggtagaagcaaggatggtgtaggttcgtccatggaacccatatgctgcctctgtagcaagccatattccccagacttgatgtacattcgctgtgagaggtgcagaagtaagtcaattccacctatggcatgccattgttcaagcaagaaatccctctttgcgttatcgtactgaccttttccatgtctcatattctcatgtatacagagtggctgcatggagatgtcttgagacttgaggaggcaaggattgctgaagttgtatctacagatgctgcac

SEQ ID NO: 4683 - DNA, 484 bp, Avena sativa
catgcaggtgtagactaaagccactacccctgatggtcggtcatgttaatggcaccattcacaagcagggttaaccgtcctcatgttagttcaatatttaattagtactagtatttcaagcccatctctgggtgcacattggatgcttctcttttcggttataaaaaggaagagattggtacctattgcttaaaatgtaaactacaggggagctcttgatgaccccttcctgaatgcagaaccagggcactccatgaatgtaccattgcatacaaagaagccagagaagccatctatagtccccaaatctgcggtcaacaggcctgatcatgtcaaggttatagattctctaccaggtgatagtcaatctgctgtagttggtgaaaaaagttttacgaggctagactctgggaaacacttcactgatactaagaatgggaagtcagctaatgtcccaccttctccatcagatatattgtctgca

SEQ ID NO: 4684 - DNA, 388 bp, Avena sativa
gatggtccagtgcagtataatctagcaaagtagatcacaaaaaatggtacattgatgcagtacatccagtgacttactacagcagtgcatcaacaaatctccacaaaacatgggtgaaattgtagtgtggtgctttcggctggttacaggtcaggatccgagcagcaacagcatgccatccatagacatcactaccgtctatgcagctagttgactggctcaacgctcccaggttgcaacgcgagaaggggcgatgggctccatgtgggcgccacatccggcacgacaacgtatcaggagtggaggagttgccacgagtgcaggcggaatcgtctagcaacctctcatcggagagtagggagcaacagcgtgtgttagctgcactgga

SEQ ID NO: 4685 - DNA, 314 bp, Avena sativa
gaggagtcggagtagtcccaggttgccgtttccatcaagtcgctgcccagcttcttccccttctaccgggcaagtcagaccaccatcgccgctgctgctgagcacgaggtgagccatcgccttctgcccgctctcctcctttgtcctctatatctgcatgccatcctccatggtcatgtgtctaaataagagagcgtataccccatgtctgcaactggagcgtgtactccacaccttggtcgtcgtcacatccaccatggtcgtcggaacaaagcagcgcccacctgctgcatcttgctctggagctgagcact

SEQ ID NO: 4686 - DNA, 456 bp, Avena sativa
tagaaacaagtacattagaagctattaccaatagatggcaatgcaaacttaagaaggcgttttgtggagaactcacacgagatctgcgtcaacagaggtgcaagaatctcccgaacatttaaactgatagccatcaagtttagccgatttacgacatgtggaacacgaagagaaccatcagtgctgatcagggtcaagcctagaaaccgtagcagtgtagaaaaaccttttatcctacacaagcaagagttaggtggcattagtagggcacttgattgggatggaacgcacgcacaagtaggatctctgaaaaatagagttgtagctcatccacaaaagggtcaaggtcgtcaagttctttaacagttttatcaaccggagcctcatgaactcgggctacaagagcacttgggccagcagggtcataactggctagaggagtaaacttatctccaa

SEQ ID NO: 4687 - DNA, 575 bp, Avena sativa
tgtgtgctgttccaaaccttttgtcatctacgaagagccagactgctgctttctgacatgtcgtgcgcgccgaaaactgaatctagttatttcagcctgcaactcccaaacccgttttgttgctcggctgcgttgttttttcctcccaagttgctacaatcactggcatgaacaacttgaacaaaacaaaatacgacaatcactggcatgaacaaaagaaaacaatgattaaacgagattaggggcatggcgcggtctgattctccttggatttgattcaatttttattgcatcccccctagaagtgtcctcagataaatcaccaaatgatgagtacgaacggtacggccttttcttttgttcatgccagtgattgtcgtattttgttttgttcaagttgttcatgccagtgattgtagcaacttgggaggaaaaaacaacgcagccgagcaacaaaacgggtttgggagttgcaggctgaaataactagattcagttttcggcgcgcacgacatgtcagaaagcagcagtctggctcttcgtagatgacaaaaggtttggaacagcacacactg

SEQ ID NO: 4688 - DNA, 406 bp, Avena sativa
gatggatctagtgcaaaactgaaggagatgcagagcaagaccaacagccagattcagaggaacaggaacagagtgaaacccctgaacctagtaacaattccaatgcagaattcatgcacatttccctgtaggcagtcaaaggaaaaactagtatctctactttcacattgaaggtgaacattgggggcaaaacatctgtggcactagtggattcaggaagcactcacactttcattggcctcaaatttgcaacaagaacaacatgcaacattgagctcaacccaatggaaactatcaaggtagcaggaggaggagaattacaatcaggttcacacattcatgtgacaacatatacaacccaaggacattccttttcaaatcagttcaaggtcatccagctgcactg

SEQ ID NO: 4689 - DNA, 342 bp, Avena sativa
tgcttaagcagggtctgtgcagctgatccatgacagtatggccaagtgcatcactctccataatgaagtccaagttgtcaaccgagggaacactatcaatcatcatagccagctgctcactatcttttattagtgcgtccatataacgggtcatttctcccattgtgacaccgaactctttgagtctccgaacctaaaacaacataaggagttgataaacaggaatggaacacttgtattttggatcaggaacagtagcaagaggtgaggaggtcagtttatcgcagcgcactgtcggaagtatgaagaaatggaggatccaactactgcactgaatccatc

SEQ ID NO: 4690 - DNA, 404 bp, Avena sativa
gctgcacctccggcaagcatgccgcccatgccgggcccatggctaccagcatgacctgtgaaaacgacgcccgattagtgctccagaacaatttgagtttcgctatcatggcaccaagataaagcactactcataacatgaggtgaaactggaatattgttaagaatgcacacacttaaaatgttgcaggcattgcagctgcttttcatcctgaagtatgtttcttaacctttggcttttcatttagaacaaaattatacaaacactaatttattgagatgttctcaaacaggaacctttgcttaatggagttgcacctggagcacaattgatttcttgtagaattggagatacccgcttaggatcaatggagacagggaccggcctagttagggccttgatag

SEQ ID NO: 4691 - DNA, 523 bp, Avena sativa
agtgcagtagacgtggtagaaacttaaataaggctagaacagaagcatacctcattcaagaattctcggatgccctggtaggagtcatttgtgagaagcttgactgcgatctccctcccatctgccagctttccatagtatactatgccaaaacctcctgagccgattctcttctcaaatttatcagtagcatcttcaatttccgataaagcaaatctgtgtgctgattctgtagctacttcactgaaatatgaccctagttttttggctggtgctgcaagaacaacagtttctagacacggcaaaaataaatcactgcatgctcttacatagtagaaacatccaatgagacaaagaatacataccacgtgaaggtcttctctttttcttgcgtgtacacaaacagcatccaatagcaattgcaagtaacaagatggccccaaccacagcacagacgatttccactatggtgctgcggctaatactctcgcttcccttctcaaggccattgttgcctgaccag

SEQ ID NO: 4692 - DNA, 421 bp, Avena sativa
atgagttgaatgcatggctcctatacctatttgttatgaataacggtaccaaaaagaatagtgaatgaatcgctcctatacttactaatagcaagaatgcattgctatatacttaattactagtactagtatacttgtttatgacaaccacgaaaaggaaccaagctaggctccaagaacataacaactcaacccttctgttcacatgcacaactcaactcctagataaacaaaaaggcatgggcataaattaacaaggagacatggacacaagaaaagaagaaagagatttttcataacacgggccatgatcatgattcatgagagtgaccgcacacactgactgccctgtctgtccatggcaacgcccgtcacatgacgctgcacccggcgttggggtcctcgctgcactagatccatc

SEQ ID NO: 4693 - DNA, 380 bp, Avena sativa
aaccattccggctagtagctaccttgatctgtacgtcttagcttcttcagagaaattctactagatctgctcatctgcactggatccatcgatggatccagtgcagccgggccgttctcagttttctcaccctccaggggagctacttcagattcagctggctttccatctcccttcttctctgctacaggggcagacacgtcactaggaagcaccgagacttcggcttcttcagtcttctctacagtatccacacccatcatgggaagatccgagacttctatactggcttcagtcttcttcagttccttctctacggtatccacacccatcatgggaagatcccagtcttcgtatactggcttccgcttcttcagtct

SEQ ID NO: 4694 - DNA, 394 bp, Avena sativa
agtgcagtatcttgcttcttacacttgtcagaacgtgcttcttctgttgagagtgttgctgttctggaagcagtgctagaggagtgggaacagttgttctcttccaaagaagaatttgttgcgcctcttgaatcgccaaaagaagcaagcgactggagtgatgggtgggatgatggctgggaggccctaccagaagagctggagaatccaacgcaaaagcaagatgatgcgtcatcatctgtccatcctctccacggttgttggatggagattataagaaaacttgcagcgtttggtgacctccagaagatcattgaacttctagatcatgcatcttcaaaacatggcctgttgctagaggacgaagaggcacaccgcttgcttgaccttgtat

SEQ ID NO: 4695 - DNA, 392 bp, Avena sativa
ccacagggttaagcaacactgtggtgacaccaggtctgtcggccaaacaagcactcgctcgctggctgcacacgacagttccttatgtgcaagaaacgctcatgacagaaatggcactagcactcgccagcatgtattacttccagctaaacaggatcctttttccggtcgcgtgagtaacgaacgattagagttttgggcggcggaggggaggagaggggcttactgtaggtatgttcgtggcaagggcacgccatggcggggcggcggggtttgaagcggagaattggggagtttggtcggccggagcggaagtgggaggacgactggctgcgaaatgaaagggaaatggcgcatgctaggcgtccccggacgatgggagcgcttttgtg

SEQ ID NO: 4696 - DNA, 369 bp, Avena sativa
tgaagtgcaggaatgctatgtatctctctgtcctggaattctgtccagtgcaaaaaccattaaggtttacaagtggcctactaatgcaggcagctacgatgggtctattcatttggtatgtatgctttatctttcaatgagtttagcatagaagtgtttttggcgtgaatgcaaagatcctgtccaaagtcaaaacaacaatacattactggcaaaacaagcactaacctaaggtgaaattagtttgctccattactgacagtttgccatatttttgtttgcttggaaacaacagatgacaactgagacagtattcccgtcgcccctggtaccatctaggaaatgcacattcgtgaggcactgcactgg

SEQ ID NO: 4697 - DNA, 405 bp, Avena sativa
cagtgcagggtgtacttctcggtgagcttcccttgtcggcctggaccagcatccacgctgatagagagagagagggagacaaatttctggtactccattagagctggtttacaaggtagcaaacaaacagagtatgtagatactgcggtggtatttccagattacaaggtagtatcacaccaaaacacaacaacgacaaccaaagccgcgaaagtaggcactgtgatccactccctcaacactcatgagctctccgcaccgcattgcgtcacgctcattgcttattagaacaggatatgcagatagacatgggcacttgaaagcaacacaaaatattttcagacagtcactgcgcaccttacccagctaccatagctaagcaggcaggcagtggaatttgttgag

SEQ ID NO: 4698 - DNA, 456 bp, Avena sativa
ggaacagactataactttaaacgtcgttagcaaacaatgagcatagacaaactctacaccaaggctagtccaaagacagtcaccaccgacaatgcctaaatatggctaaaacacaaacgttcatttgcttggttgcgttcttgaaggcgtgtcatcgtggtgaagctcccaactccttccactacctccgggagaaaccctagcgttgttccctcctccttgggggcatcatccttggatcttgcatccatgaccgaccgtaaaaatcctcttgtttcttgcatcgccggagatgctataaactatttacctgtctgtcgcgcgtgtgtgtctcatttttctccgctgccgcagctttctgctctgcgtgctgcgcaacaccaaaacacaagccacgtactgtatgcacgctgcacctctcacaccggctgccactgtcttccccaagctccaatg

SEQ ID NO: 4699 - DNA, 462 bp, Avena sativa
gatggatcccagtgcagaaccgcacgcgtgatcctaagccctggtacatcctttaccgcgagtgaacaaaccatgctagtattctctagcctacatggcaggaaaaatcctggatggtgacatagaaatgtactgatagtatagggaggtagttttgactagacactgtgtttgttctagggaaaaatcctggatggtgacatagatgaaggaatacgtccatgcattgtgacactgtgtttgttcttgatgtggtcttgcttctgtatttgggggtaagccatagattgtataaagagttggttctcttttctacatgctgcaagatattttagatcaaggaaactatgggcaactcggtggtgtctcgtcagtgcttgctaaacaaatgctgctgatgatgagttgcatctttcatctattgcagaatgcaaatgtttctctgagatttactgatagaat

SEQ ID NO: 4700 - DNA, 357 bp, Avena sativa
ccagtgcagcactacgggccctgccttgctgctgacggtgcgaccaatggagaagccctcagttcagcagctagcctactggtaagtaaacagaaagggacccgcgcgcgcctccacattttctaaaaggaatacttcaaaacaagatgaaaactttggctatcattacgatgttctgagagcgaagctaagccatccggtttgtctggaaagattttaataagcataatgtgagtacacaaagaactagttttgcacgcgattacaccagatataggcaaatggaagtagtagggaaaaggactatgtcgccgcaacctccaaaatcttgctcacttggatcatctgtccttttta

SEQ ID NO: 4701 - DNA, 482 bp, Avena sativa
cctacaaacctttggatcttttttgagggattcacttctgtccccttagccaaggaagcttgattgatttggcacagaggacattccaagatgccttcactgttttgcatatgaggatcaagacagaagctatggaagctacgagaacaactagcattctgacattggattagaagacagctgccagttccactctacacacagatagaccaaataagattgcacatatggctaaaaggcaatgcaaaacaatgtgtgtgaacaaaccttgcaaatttctcacgaaaataataccttacatattgagcacataggtccagcagaagtgctatggcgaggttttacagtattccgcaataactcatcatctgatagaaaacatatatgtataacacaaatgtcatgttagaagatcaacctcaaaacaaggagatccaagtatccaataggtcaacaaaaggcagaaaaatgtatgactgaat

SEQ ID NO: 4702 - DNA, 461 bp, Avena sativa
cgagcgaatattaattgagtattactattaccatagctgtattactttttcccatgcagaaatatttcttacctttcttgtggttcagttaagtgatttagcaataaggaaaactgttggcacatgaccagtgtatagtgtttcaaacatagttaccgtatttacgcaacagtcttctaaactggttctagttgaggatcaaaattgatgacaatcggtacagatttggtgtctggtttgttgatgggtgccaaacaaatgaaatcaagagagaaagggaagaaggttatactatttgaatatcggcatcaccttttaatgctttggtgattctttttagtcactagtttattttgtctactcagacccagttcccaggactgaggagatcaatcaacctagggaaaggaagtcttcagctagtggttccaattggaatgtggaattcaaggatgcagcat

SEQ ID NO: 4703 - DNA, 402 bp, Avena sativa
atcctacactgagtaattacatagtagttaaacaaccagcggccaagccacgacagaccataaaataaaaacatgcataaaaggaagggatcacaactccagcatatcattaccagtccaaattccacttccagaaacagcttcagttcagcgttctgtgccttgtttgatatttcccgaagttgtcccacctgtacagtagaaaatatagaagttggactcatgacatatatacataaaaggtaaacaacactgcacaattctacattgttcacaaaatttcctagagtagtttaaacgagtaatatgcaccggaggtcctaaaagtttggacgaaatcgtatgcaggtcctaaaagttttaaattgtgcactgaggtcctaattctcagtaagttatgca

SEQ ID NO: 4704 - DNA, 452 bp, Avena sativa
acaaaaacatcagagaaatgattctgacttttataacatcaaaatgatgttaagtgcagatgcatgatctaaaactaattattgatgttgcaagctaattataaactacttattactctttgatgtatggagagggagagagggtaccatgtatcgtgtatggagataaagcaggggctagcaagatgggtggcctcccagtaccacttgccatggagcggttacacctagggcttggcaaagctgccctctattagatgctcccatatatgtgtggtttgagagagggagaggcatggtaggactgggcactaaccaacgaacggacggcggccgtgcgcataaggggactacatggagaagaagaggtgggagagtgtgctggtcgctggcgcctgcctggacccagcaccgctggttggaggcctccacctccatagatgcacctcaag

SEQ ID NO: 4705 - DNA, 451 bp, Avena sativa
ttccaacttcttattgaccacatcacggggcatttgggtgatgagaatgtatgccattttgtctttataaaaatgagaattgttatatgtgtcacattaagcttgatgatctccccttggatttaatcaggagcaaaccatagcatcaaatatagttcgtgttgtggtggctggaaattcagtgcatattgcacccagatacttaaacggccaggtaatggcattgatttcacatgttctttttggttattttgcaaaattgctggcatgttgtgacagtagtattggtctttcagacagtagctgcaaaagatcaaccgaggatagctgagccaatcaaagaactggatataatgctgactcaggttcccacacttttacctgtttcctcaatttttgctagcgcgactgctctggtctctgttgcagatcttgatgtgatgcatttcgt

SEQ ID NO: 4706 - DNA, 392 bp, Avena sativa
gaggatcgctaggtcagggctattagggtaagggagagaaggagctttcttcttagagcaaagcagaaccagttgctcaactctatgaaagaaatggaaattgaacctgatgtaccctgttatactgtattgattgatggccattgtaaagcagattatttagaggaagcccggggactatttgatgaaatgttgcagaaaggacttgctcctaatctttatgcatacacggctcttataaatggatattgcagccagggagaaatagcgaaggcgcaagatttatatcaagaaatggtagataggggaataaaaccagatgtactgacattttctgtcttgaaccagaaaaccttgaggcataggcgggatcagccatatatatgattttc

SEQ ID NO: 4707 - DNA, 343 bp, Avena sativa
caggatgaaccggatttgcaaggcggtgtcttggtcagcaagatccaaccttgagcgtgtctccgcagtcggcatcagtgcgggggcgctaggaggcaggggaacaaggtggcagcagcgcgacgtggggaagcggcgacaggggtggggggagggcggagcagcggcgttgggcggccgtcgggataccggatgagtgagcgacgaagcgagcgaggtgagcgaggatgacgacgaggagttcagatttggtcggacatttcgcaaggggttttctgcaaaattagcaccgcgaacagtaattcggatcggagggagtaggaaaagggatcagacgtgctta

SEQ ID NO: 4708 - DNA, 232 bp, Avena sativa
caccagagccatcaatatggtaggaagcatcaatattgagttttatatgagccaacctctggtttttaccccatctcggcggttccatcttcagatttgaactagctatattataattggatgtcaatgcattaatcgcaaaagctgtattccttggcgtattcacgcgttccccatggactgattgccgtcgttgccaccaaatataccaacaaccaaccccaatagactc

SEQ ID NO: 4709 - DNA, 374 bp, Avena sativa
aaaattgaccaacatgttcttggtcagtacggcgtagatcagtcggcatttcagggctacttaagatatcctcccctttatataactcacagaaacgctgtggtgataaaagtaaaaccatgaaagcaaattaattgatgtaaatcagactatagcaatacttcatcagagttatagtaaataggctgtcactctcagcaaacaagaatagttggggctattgggaaatgaataaataggtgtgtgtttatccacaaaagagccagcagataaactcaaaattgaatcaacaagagcccggtccaacttttaagcacagtactgataaaatgttattcctcagtccaactatgccccttatcattctgctgcac

SEQ ID NO: 4710 - DNA, 355 bp, Avena sativa
taccatattaagtacatgtatttcagcccagtaaattcaaggttccctgtataaaacggggaagcagtcagcataacactaaagccggaaagagaatgaagattccgaaataaatacttcttgtgtaaaataattgctacgtgaagtattttagaaaattttgagtatgcaacaaggtacagcaaatatgagcagaagcttttgctgcatagttgacataagcctttacttgatgattagcatgtgctgccattctgagtgctcaccaaaataatgttggtgttcatgcccattcctatatttcctgattttatttttgttttgctgtgctaactgggttttcatgtgtgcaaag

SEQ ID NO: 4711 - DNA, 467 bp, Avena sativa
gatggatctagtgcagaccaaatctagatcatgtttctcaaggaactccgcaaccttatcagctccaaaagtgtaagacacacccctgtcattctcaccccagccatcaacatctttatcagggtctgaccacaatagatcacagaggagaccatggtctggaatatccacaggacgggcaatattacgtatctggtccatgttctttagttcaggcgataaacccccatgcatgcacaggatcttatcatcaataagtgcagccacagggaggcagttaaaacaatcagtgaaaaccttccagagacgaacattaaacctcctcttgcattcatcaaagaatccataaattctgttgatagaggcacattcatggtttcccctaaggagaaagaagttctcygggtactttatcttgtatgcaaggagaaggcaaatcgtctcaatactctgttttccacgatcaa

SEQ ID NO: 4712 - DNA, 559 bp, Avena sativa
gtaaccatggtggaagcctcgtgattgacttgactagttgacttcagtcatggtcgtccatgggtggctccatgcagtcaccgtggatgcttcattgaaggtccctttcccttcttgtataaaatctactccagcacatggttttttatgctactacttgttatttatatattgagagataacaccaaatgctatcctgtccaagttggtacgtagcttgtgctgtcccaatctgaataattgatcccaagttggtacgtagcttgtgctgtcccaatctgaataattgatcccaaattggtacgtagtgactcctctggtcagtcagctgaacatgcattccgcttcttcatctctcattcctcttccattctataaacacatcctcttcttccttctcctggtagcagcagggcatgcatccatccagcgtgcgtcagtcacacagccatacatcctctcttctccaactcattctccatgcctcccctctacacattattactcggacttctactcttgcaagttactccttcgtgctccgctgcactggaccatc

SEQ ID NO: 4713 - DNA, 400 bp, Avena sativa
acttcactctcctgcatggtaaggatttttgcaatacaatagactaaaaagaaaaagaaaacgtgcaaacagtgaaagaaggacaaagaataacaagtagtttaatattgacaataccaaaagctttattcatcattttagaaaccacattttttcatgatagcaccattacttgctttgaaatattcgcttacaagtattacagaagtgacacataggtgcatagtacataatttcttttaatgcacagttactgatcttggctacagtgaggagtgagcattaaaaagattgtattctcacttgcagagtgaaggcctcaagtggaattggagatagagtagtcacgaggtaaacatcgctgtactcattgttggtgaaagtcccattgttgataaca

SEQ ID NO: 4714 - DNA, 474 bp, Avena sativa
cggcgcgtgcacaaacaatgccgggatcatccaccggatgtagctccctgcccccatggcgatttcccggtcctggccagcgagcacgaggatctgccctgtgtacatccagatcacggcgacaaccgagctcaccagagtgagcacaacaactgccctctgcttgtagatgccaacaagactgtactgcttggctccaaaggcttggccgcacagcgtgtccaagctgcttgccatgcctgactgaaaccatcgtcaacgaacaatacacatatggcaaagcctcaaaaacttcagcggcaggtccaaacataacgaaaacgaaacgggatgtgatgacatagtagatataccaacacgctgaaaccagtaacaccagcaaaggaggtggcgatggaggcgctggagagggcgagctcgccgaggtggccaacgaacatgacagatatcatcaggattacagtctgcactgga

SEQ ID NO: 4715 - DNA, 455 bp, Avena sativa
ggcctgattaggcagtagaacccagttgatcaaagccattggtctaagagtctaaaatccaaacacggcagtgcacttgtttcttttctttttgagagaacatgtagaaacacttgccaggattttatagagagaaacaaccaaagcaaaaatagaaataggtggctcggaaatagtgcagtgacagatttgttggaagtcatatttcttcaagccgtccaaataccgcaatgaccagaaaggaaagctccagtgaagtaagacttccaccattcgtgtgagacgggttgcgtggaattgtgatccttgcagatttctcccccttgcacagagaccatacattccatgagatatatccaatgatagctaatttttttgaaggcactgtcccagtggcaagcaatagactgtgacttgtgagtatgactcagtcagagtggagagagaccacacgt

SEQ ID NO: 4716 - DNA, 441 bp, Avena sativa
aacaaggagctggcggtgctgtccatcagtctcttcttctcctgcctggctctcttcaagctggcctgcgactgcgtgctgatgctcttcaccagcaaggacgcggacgccgaggagagggcagggagagggtggatgcaggtgctggcggccagcagcctgaccaccctcatcgtgctgctctacagctgaacttaactgtcttgatttgttaggaaagaataacggccttgggagctacttctgccaagtagatttgttagcacttgctagtgttgctttaagaaataatctgagtgccaagacacttatgggtggcgtggtttcatttttgcagcaagatatactgtgcaataggtaggcaacaatttctacattccctgtcaagacttctaagcacaaaaagattcccagcacgctatgaaaaaaacataacaccgc

SEQ ID NO: 4717 - DNA, 451 bp, Avena sativa
ctccatgtccagacacttcaaattggtgaacacaaacaagttagtacggatcaaccatcatatgtagagaggcatgcaggagcttacaaatttggcagcagtagtgagggcatccttcccgttccggcggcatttggtggtaacatcgtccaccggtcggacctcgtgtggccaattctcaggattgggcgcgcaggcagcagtgacatagtccataccattccgcctgtggtactccttgaggtaattcaaatagaaaggcatggaacagcagtcttgtggaagtatccgttcccatccccacgcagcctcaaagatatctagttagagataaagccacaaagaagatgaagacggcggattgggtggaaaaaactgaacgcaaacaaggagaaggcaacggcattgagattaattacctggaaacctgaggatctttgtcggcggtttc

SEQ ID NO: 4718 - DNA, 389 bp, Avena sativa
aaggaactaacgctatgtccatggtaagtttaagccctagctagccaaattacttacaagatgacgatggagtcattcaacgcctaacaaatttgaatgaaaaaggagaacaagaaaggaaacaggaaagattcgtccagaaatcaaaattgtcaaaagtgcagaatatgatacccacttgccggttcagactaagcatccatattggcctataaaagaggagaagaaaacatcacagcagcaacccaattcctaccctttcatcatttcctcataccttcaagcaaggagccacggaccaatgtctcacactcgtctgctctatttccaagcccaccaaaacaatgccaaatttcaggacagccatgagagtgcgatgaagaaagaag

SEQ ID NO: 4719 - DNA, 294 bp, Avena sativa
gtatgatggagtccagtgcagcaagtaaggtacgtaccagtgctatccaaatctccatgtttgggttccgtggacacaacaacaacagcattatgattctgctcctgaagaagtgtaagagcgatccatgcatcgtgatctgcatccagaccatcagaagtcatcagttaatccaaatctgatgtaagggcatatctatagttgctgattgacaatgcctagatacataccagtttgatccaaatctccatgtttgggatccatagacacaatgatagcattttggttctcctc

SEQ ID NO: 4720 - DNA, 371 bp, Avena sativa
gatggatccagtgcagaacagagtctagcaaaacaaaactatgagttggtttgttcctagaaccggctctaaatatgctttgagatgaactggagttgcacgtttatgttgcagtcacattcatctgattcacatttcattcagctcaagtacagaatacatcgtgtagtacatagtcctgcaataagctggagttttgaagagctactagagctccagacgctaagcgtccgatgggctgctgcgcactgttgtgtgctactccgttcagatccctgacaatgtggtacaccttgggctgaagaacctgagagacctgcttatttacgaatttcccagagggagttggctgcactggactccatcagtgt

SEQ ID NO: 4721 - DNA, 410 bp, Avena sativa
tagtactgtagtactgaaagcgtgtctccagcgagccaaatttcttcaaatttctgggttacacaggcatagtatcaaatatcttgtccgttaaactatttaaccgaaaatcctagcggatccgcattcgcgtcagcacacgtacgtcactatcttcgccatttccattgctatgcccttgcgaccgagggcacaccacacttaacggttggacaaaaaagcaacaaaaccagtattggtgcgaatcacattcctccacggtgaaatattggtgcgaaatgatttgatataaacaagaaaatcctaaattaggcttcttagcactatctaaacataatctttccgctgttctcttgctttttatggtttagcccggcccgggtcatattcccaacttgcatctgcactgg

SEQ ID NO: 4722 - DNA, 456 bp, Avena sativa
atatggtgctattcatgctgtgtccaactttggatccaaaggtggtgacggtaacttcgccctgtccatgggttttgacgactctgtgtcctatgcagcacaaggggatgacagtagcagacctgttccagctacaatgaactgacatgccagcaactaccctgttagattgggccccacatcagccaacatcatgataatcatcattgcagccactgagaaggatgtggagacataaaagacgagggcgtttgcattcaacacatgtgaaatacgaaggtaatgcggtgattttcagtgagtttattgaaggtggaagttcatagtaccatttatcaagattgggtactttggaattacacacatcttatgtaatcccaacaaataacacaaggtacaatgtgctaatcaaactccatgcacaaatggcatctgatcacagagatgcccctgtag

SEQ ID NO: 4723 - DNA, 409 bp, Avena sativa
ggagctctgtcagcgatcctaacgcggcgccctcttagcgatccacacgtttctattacgtcgccacgttgccttcttttcttaatcacgtagtcttgccggattggcctatgcggtggctcggtcaaagcggtggaggttccttcctcacgccgtccgatcttagggatcctattcttgggaagccaaaacttccgtcttggatcccctagccatcaaagacggcagtacgcggaggactcggaacggcggcggtgccacctcgccggcgagagcaacacggacggtacgcgcacgtcggccacctggacactcaatcgccgggggctgccggctgtagttccccgcggcctcaccggctggtcccctgtgtggctgcgtgtctcccagcagcgtcgggggctgccgg

SEQ ID NO: 4724 - DNA, 447 bp, Avena sativa
gatggattcagtgcagaacaattactcacacgagaaattaatttttcaaggacatgatggcacacacaagaaataaccaaggatgcaactttttcagccatataagaaacatttcatgagacaagaaaatcatcacacatttcattcattcaatccaagactcactgataaatttccggccaaggctacaatagcctccttaaaaccatcacacatgcttgtttttattattaagcgcccaccacgaggtctcactcacacacgaaaagaaactaattttaacccgacgcactaattaaactcaacaaccccgggggcgccaggcgacgcgacgacgaccatctagttgctgcccttgctgatgagctccagggccgcggcggtgctgggcagcgccgggatagctcccttctgcgtggtgcagatggccccgcacgcgttggagaa

SEQ ID NO: 4725 - DNA, 428 bp, Avena sativa
cgttaaacaggagctaatggcacatcaagcgcaaagttttgtacccatcttcggcatttttatccccaaaagacgaggaatatacgcgaatttggtgttcgtccaatactcacaagtccctcaaatactttttcctaaaaatattttactatgatagagtttttaatctagtcaaaaatacaccggtataaaggggatttgtgaaaacatttcgggattatcccctcaaaactcggccgtaaacaacctatcggagaaattccgatatacaaaataatccactgaaatatcctaaagtaaacaaggcctaatcggggtacgccacaagaaacaatgcggacgccaaagagaagccggtggagacaggcagaggaaagtcatgacgcatgatgatacaagcaattctactctcgttcatgcatgtgctg

SEQ ID NO: 4726 - DNA, 511 bp, Avena sativa
ccacctcagcctcttcctccaaggcgattccccgtcgaggctctgccgcagccacgttcaggttgtccttctaaagaattctccttaacctcttccacagatacctcagcctcttcctctaagggattttcactgacatcttttgaagcaaaatcaggatcgtcatccaaggccttctcctcaagttcatgtccgccaaactcagccgcatcagctattgtcttcttcttgcgctccttcgcatcagttattgccttcttcttaatctcctttgcagcctgtaacttagcttccaacctcaaacgctcagcctcaagctgaccaggaacatcctcggcctgagtaacaggttcagtgccatcaacatactgggactgtgtatccgatagatccaaagaacctatatcagaagcatcctgttgatctccgttacgaggtcctccaccatattctttctcaacagagtcaactacatctgctatatctttgtgaggagaccaaaggagatctt

SEQ ID NO: 4727 - DNA, 425 bp, Avena sativa
tgaagagtttgatgctgtgaagcctctgatggatccagtgcagtactgagattggcaatgattcagacgctaggtgtatgtactaggagcaaattccaggataagcattgtaatatacatagtgatatgtgttatggtttacaaaggagtgaatggagatgttaaacagttcactgtgcagatcaaaagggatcatgcaatatgaagtttacagtagatacatgtagattcggcttggctcaggactgtataaatatgtttgacaatggccatgtataatcatctcaaaattcttctatgcaacatttgaaatttgaacacgcataactcattcagttatgcaatgccaaggtactgtgcaccaggttgttggtcgctatctattgttttttattctttcttttaattcttttggatgaaacgca

SEQ ID NO: 4728 - DNA, 324 bp, Avena sativa
gatggacccagtgcagtatcggacacaaaaaacgcttgtaattgaacagatgctacaagtgttggaaagaaaactgctttggatgatcgtagatgatacacgttaagaaacactttaacctgataaccaccgacgacgagcaaagacgtatatgaagggtggaaagcacatgcatgaaacttgttcccgctgctgttgagttcttgcaagcagttcccgctagcagaattcaaagaccatgcttttaccgtgtcttcacttgtagagacaatataatcaccagaggggctccaacacagtgaatcaacatgcgctgtgtggccc

SEQ ID NO: 4729 - DNA, 322 bp, Avena sativa
cgtgcaggcctacagactacagcaacaccacaaaactactagtactgtacctgtcagcagctgctgctgcttgcaggaacattcatgtatcaaaacggagaatgaaaaaacaaaagaggtaaaaccctcaacatcacaggggtgtcaaaatttcgttaggcattctacatcccagggacgaagactagcacagaactgggcagtcttcaaacatctggcatcacctttacagcatttcaaagttgcacgcgaggagacgaggacacgaaatatatatcatcagcctgacgtgcttctctggcattctgaatagacccagctg

SEQ ID NO: 4730 - DNA, 349 bp, Avena sativa
agtcttgaacctgctgttaatgaggttgagggcgaagttgcctgtggtgttgttgaaacggaacaagtaataataggagatgatggtgagggggatttgcatgatggccatgcggatgttgctgtctcatctgaagagaaagcagaacctcctgtgaaggagggtatggatgaatccattcctcctgaagctggtgtgtgtgtaattactgggaatctaagtgaacaaatagtgcaagatgatgtattggtcaagaatgctgtctcttctggcatacttcagtcagaacaatctgagccagatcaagttgttaaacctaaggcggatcaagaagtccaggtagaagtta

SEQ ID NO: 4731 - DNA, 353 bp, Avena sativa
gtctgctgcctcagcctcccccctgtcggtgctgctgtgcctccactgaagcacgtgtgcaacctcgccccagcagcacatcctattttgcatttaccccgatgtgctttattcccgatctgatttttctctacttgaccttggaggacaattgatccaagcttattcatgtcgtatcatgttccttctagattttcctttgaacttattttgtgaatctcagatccgactctttggttcaagttcccagatccgaaaatcatttgctaggatgatgtatgaaaaaattcttatctcatgaaattttctgtaccatgcaaattgttccaccacagttgcgattcaaagtctgc

SEQ ID NO: 4732 - DNA, 430 bp, Avena sativa
gggccatgtcgtgggtactgtacaaattgtgggccgccatgctacaggtaaacatgtcaacgataagcaagtgcaacgctgctagcacgtgacgccaacaggtaaactaatagtactaaaactggataggtcttaaaacggcgttgttgctccttccaccgccgctgcaactgcttcttccgcggctccttcagtccaagtcattcatatttgtcccatggccctctttcgttagtggcgttagcaacaccagcctccaacgtctcccgccatgaacgtgctccagcagcggctcatcatgatctcaaggcttgcgaataaacaagtaatcacgggcaccgatactgcacccgctacttgcatgtgttagtcattcccccaagcaaagccaaaggtaagttggcgttgaagactctgcactgaatccatc

SEQ ID NO: 4733 - DNA, 397 bp, Avena sativa
gaaacatccaaaagcagcatacctaggtgatcctaatggcggcctaaaaagttaatttgactgcccagagtgaagaatcttggttttcacttttatcttgataacacttgttattattggaaaagaatttagaattcaattgtttgccaaaatttcctccatttccatctccctatggcaatggaaagggtgaggaaaccataaagactcagatctgtgcccactacatgatcggtcaaagtgagtgagtcaaatttgtctcatgaatactttttgaacgtatgtttagagaggaaggatatgttgtaatttttttgtactgaataagtttgaggaaagttgagaaattcaatttgtaacatcctattttgtttctatcataaaagaaatggggata

SEQ ID NO: 4734 - DNA, 439 bp, Avena sativa
gtgcaggttaattttaagtagcactgcataaatcgtcatttctttgatatgtttaatcttctgttgatactgatcacataccgttgtaggttaccaggataacagatagaggaactgattgtgttagagtacagggtaagaagcaggctggtgtcttctttgatattaagaacacatttattctgaagaagtaagtagccaacttgaaatctccacatattcagtgggttctgattaataatttcttgccatttttgttacatttcaacagttacagtattcatttggttgccggtattctgcaatcatagtagctttaaagtggttgaatgctttgacaagatttgtgttaacccataagtgtttagtgagtcatgatgtctctcatttgagttggctatattcttaattgtgtgttgtgcaaatcctggtaataata

SEQ ID NO: 4735 - DNA, 391 bp, Avena sativa
tgaaaggacttctgttaccaaggagctaaccaccaccaccgtgaacattaccataggagcaaaacatggcagctttgcatgagcaagtggttaagcaggagcgcttacagctctcctcatcgcctagttctgcctctatggaagagttatagtagaagtaagaaacattggggatagccatgagctgatgatattgcatagattcgcaagaaattgggctctccagtgcacaaccaagattgggtgtccggtagtcaatctgcctaaaatatgctgcatcaggtgctgtcgggcaggagcactggcctcttgagcagatgccataccccccacatgcagttgggtaattgcagtactctaattggaacaaatcatgtgctactaaactcag

SEQ ID NO: 4736 - DNA, 414 bp, Avena sativa
gatggatcccagtgcagtcttgacagatctaaccatgccaagttgtcaaaacaggacaaagtctaaattatttcttcaaaatgaaagtgaacagacgacgtaaatagagatttagacattgttgaaatatttgcacagcccttgcagcacgcacaaggcaagcacacagaccaagtatatatggagcaggcaactggtactacttggcaaccaaacccaaaccaagaggaacatggcaataggggtcatcgtcatgaacttgctatgcccacttgtggccgtcctgatggtcgtcgttatggtgagcgccggcgacgaggcagcgttgcttgctttcaaagcccgggtaagtggcagggactccctggtctcctggaacagcagcactgccttgtgcaactgggaaggcgtgac

SEQ ID NO: 4737 - DNA, 315 bp, Avena sativa
caaatcacgcagcttgtgtaaaatttgccgttctccatatattcatattttggagaatcttttatatatggagactcatatatggaaaatatatgctctaaattatttacgatttctgcaacagctatagtttttcagatgtattttagttatctttgctatgtctcaccagtgtactgactacaatatgactgctacttctagtcatacgccaatgaaaatgaataatttttggttctcctaccttgttgggtgctatgtacatttatctatttttattaacattttttctgattatgcacctcataggctgca

SEQ ID NO: 4738 - DNA, 358 bp, Avena sativa
gttatctagagcaaagcaccaggaacacattggtgttacttgttgcaacaaatgagaaaagaaaggaggtcctttttttgcggggaaaaaggaggtcttgttaatcagtacagtaatccaatccggtgatgctgttttccaagaaccataatatgtatttcctccgtctcaaaatacatgttgcgggtaattcagccaaattttgacaaatatgtgtgactggggggagtagtataatgatgccgtgggaatttgcagcaccaagtgttgcagcatcggaactgcatgcatgttagggagggccgaggggccggatcgcgtccggaagaacattatgatccaaatcgcccagcaactt

SEQ ID NO: 4739 - DNA, 505 bp, Avena sativa
gctagtgtgtgtttttctgtaactcgtcctctaaattggcagtttttagagaatggggtgatttagaggacccgctagagttgctcttaagtcattggagtatatcattcattcagtaagagtaccgtccaattttgtaactatttcttggtatcagaactcacaaccatctcccacaaaatattgaagatgactccatggtgctcctcaaatatactacgttacaagaagttaaatacatgaaaaatagtgcatattcaacaaaatcatgatatctgctgcatgcttagtcaaagtacgaaccaaagaaaccggattgcatcaattatttcagcagtgtgatgcatagaaaatgaaccatccttcgtgttttggaaaagtaatttcctcaaatattcttctaactgttgacgacttgaaggagaacccaaaataccagacaatagcaatggaagaacacatacaattgcaactttttcagcagcagaagtttttggacgcaaac

SEQ ID NO: 4740 - DNA, 434 bp, Avena sativa
agtgcagcagtagccagaaggagaaacacaggcagttgcccagcagcgccatggtgcccagcatccagctcctgttgccactgccatcatcagagtggtgagcagccgggctcagtgcagcggcagcctggtgcgtcaacggcaaacccttgtagagagtcagcagcagcaggccagcgagcgacatgagtgtcccggcgatcttcgcggctccagacgtgttcttcaccttcagtggttccatcctcagcacgacggcaatgaggaaggtgagcactggagagaggttgatgaaagtgatggcgaaggtggcggtggtgtactgcaagccgtataagaaggtgaactgcgagagcgccgcgccgaacacggcgctgaagaagaggtacgccaggatctccagcgtgagcttgggccttgtgctcctgcactgg

SEQ ID NO: 4741 - DNA, 378 bp, Avena sativa
gatggagtccagtgcagcgacgaagttgcgagtagtaggaagctaacctagcactgataccatgtcaggaatatgcaacttgtattcctccgggggccaaatgcaatatataatacaggtacatgtggaaatatacaggaaaaccccctaacaagtggagacatacaatatacaaatatacatcaaacacagaacaaacactaaaaatggtatgtgtgctaggtgatgcagctgcactacccggttgatttcaattttgtgaacaaggagctccatgcactcaagagtggcatgcagtacaagcacacaacactctgaaaggaagggaggcttcgcactcagatccaaagtcttgaataatccggcaagattcactgc

SEQ ID NO: 4742 - DNA, 576 bp, Avena sativa
gtctaagaccgtctactcctcatagctagctagcacccccttaagaaacagagatgtgacccgtctatgacacaacctgcaaacaaatgttagtagtaaaaaacatgaagcccgtggccaagggaaaacggccgcagcatatggatggatccagtgcagctttaattgccttctcgttaagacatttcttagcttccttcatcacttcatcatttaattcaataactcccctcttctttgatgttggaataggcacaggaatagatggttcaggtacaattacttcaggtatagcttgtttaggaggagtccaatcttcataattcttgcttattttagccattaattcctcagcttccttcggagtcctattcctgaaaacacaatcagcacaactatctaggtatgtcctagattcttcggttagtccattataaaatatatcaagaagctcattcttaggtaatggacttccaacctgtgcacgaatcaaagcacaaaaccttgccaagattcgggcaatacctctttttctccctgtttaaaatcaaaaagttcctacaaaacagcatttta

SEQ ID NO: 4743 - DNA, 458 bp, Avena sativa
gatggagtccagtgcagtccttggatgggtcgcgtctgttcccttcatcctgctagtaatcactggttctctgatggaagacatgatgtcgtcacctgtggagggatcggtatctaagaggaaaatgattggttccctgattgtggatgtggggatagttggcactagtgcaatatcttgctttgtggtcattccagctttcgcactgcgtaactggaggaatgcccaatctgacagaaaatcaggacttgccgtttgaggtatataccttcccctcttctttggcttctctcatgtgtgtgagccatattatcatctcaactttttttttctaaaaaggagccacagcccatattatcatctcaaccaatgaggcataatttgtgtacattgttagccccctaataacatgagaatagtgcctccagcgttgtgtatttgcaatcatttcaccttag

SEQ ID NO: 4744 - DNA, 313 bp, Avena sativa
gactagaaaagtgtttctgaaaattaggatttataattcttctttccaagtagggttataatcattacgagctatgaagtctatttcttcaatattttgtttcagggatagctcttacctgggtttccttacctttcacggctactatgagctcatccagcttagcattgagttcttcattttcttgtggtgagaaggagttcaccttcttccaatttgatctatccacctgccactaggcatggttatcttgcatattgtctagcagctgctttgcttcggtaatatgtttgcccataaaatgttcttccag

SEQ ID NO: 4745 - DNA, 423 bp, Avena sativa
tgcagggagcagcagtggtggaaccaaggctcaaagaaagcacgcagactctagaggcagtgacagaaattaagctcaacataccatgcaatctttgaagttaccatgcatatgcatgatgaactgcaccttaatcttccagcactcgcagggtttgctcatctcaaccggagacttcctgcaagatggatcatagttcatgttcataatggaacttctgtttgcatgactgattcatgccaagttactagtgttgctatagaatcttttaagggtatagacaaattaattgatattttgttgtttaggaacaggaaaagcatcaaataaacatcgcaccacctgctaacccgatgtgccaagatcactaccatgtgaacagaaataagaacccaagttagaaagaagagatgtcactactgt

SEQ ID NO: 4746 - DNA, 358 bp, Avena sativa
acaaaacggaataatctcttttaggattctgaatcctatttggaagatgaaaacacataaacatggtggaattcatatttcattgttgttcagatttggattctaactgcaaatgtgatgaaagccccgcaagacaatctctctgctactgactttccttccagtgtaaaagttggcagtatcatatcaggaagattgtctaccccagaggcagtgattgttgtaaatactggaagtcatggaaagagtatgcttttctcccggagatcatcttatcagcagatactatctttggagaaaggaggaatgcaggttgtggaacgagacgttgatcttcctgtggacctaatactcagtg

SEQ ID NO: 4747 - DNA, 450 bp, Avena sativa
gatggatcaagtgcaggctaacaaatgaaaccatgttgccaccaaagaatgtgagcatgcctacccaggaacatcttcttcgtgacatcaagtttctctatgacgcgctcctctgcccatatacgatgcatctctataagccagaacaaattcatgatcaggccaagagatctgccatgatccttttggactgcaagcaattcatcaagcattatgacttggaagaggatttcttgcctcagaaccaatccttgttgcacatctggtgccaagtggagctattggatcaggttgttgatccacccagcctcccagcggagcttctaacacttccacaaacagctactgttgctgatctgaagatggaggctaccagagcattccgagaagtgtatttgatgttgcagagctttgtagcaaaccagcttcttgattgcccatctgcactgg

SEQ ID NO: 4748 - DNA, 491 bp, Avena sativa
tataagacttcctgatctttgtattgtattttatcatatcactggcacattacatgagttcatttttgtgtggcagcaaagagcctgccagttttgtgctggcacgtcttgtttaaatagcatagatagatcagtgttatggtatttctgcaactctgatgatgtaaatattacagtccagtccagagagaaagggttcggagttgagagcaagctgagcatgtatgatatttcatctttgccaagtgtatgtatgcatgtatctgcttctcgccgactagtagaaaacttcactgaatctccattttcatcttggcttagtgtatgtatgtagctgcctgtcactgaaaaaacaagaagaaaacttcactgaaaacctggaggttacaggcttcagcttagaattctggctgcggctccaggaggtatccaaatggaggtgcaaccttttcagcttgcaggatcaaattcagaagtagcgtgcactcact

SEQ ID NO: 4749 - DNA, 388 bp, Avena sativa
cacccaatataccaggcattctagcacatcactccagctacaggccgtggatgtcatttcttattagcaaggaaaaataatagcgcactatagaaaaaaagtgcctgccttaaaatatgatattagtatgctatatcacactagagcgtgctatcagcgagacattatacaatgattaatttagcgtaggctttgtagatatgctatagcatgctattagcgtcaaatagtgtggaaacaattgttaaatataaatatactgcctaacctcttatcatcaagtgagcggagcactcattagactgttgcttcactacttccatagttcacaattattgctatatcggtggattattccttgactacatccatcatccaattataatct

SEQ ID NO: 4750 - DNA, 323 bp, Avena sativa
tcatcaaaaggtttaatagttgtgccagcacatgcaggttggatcctgataatactatgagatactatgtagcattgatggcagtagttcatggagatcatcaccatctaccccgaaaaagaatttcatctaatttcaggaagtagaagacttgcaccaagataccttgcaataaatacattatcaacaatctacaaaaacacgggctgaaccactagaccgatcaacttttgcagaaatcataatatgactatctagatggaaggagttcatagatccaacatgaagttcatctaccygtccgtcccagcatactttcagca

SEQ ID NO: 4751 - DNA, 400 bp, Avena sativa
gacaggacaatttagctgttatatatgttgggtgtattattaccttccaccaacgtatggtcttccctcttcaccagctggaacatcgccttgcaagccagagataattgggagaacaaatcatgtcagacagctggacagtaaataatactcacaatttacttgcaagcatatgcaggttccatgctcaggctgtttcactatggatgtccttttcaagattaagaattccgagatacagaagatgaaaacatgactacactgacagggtaccaacagaacatttagcatatccacaaagcagaaggccttttgttctataatctcaaataccctgtagttagccaccaatcaatacttaacacatggtaggacaagttgactacatgctaaattacta

SEQ ID NO: 4752 - DNA, 545 bp, Avena sativa
acatgctgaggtgaggacgcctgtgcaccatttcgtgcagatgctgcttatgattactccctagttaggtgctccccgtgcttgtggcgcttcctacaatcttttgagtgtaccaatactcaagcatcacgattcagtaggtgttagtgtggtggtagtcctattcatttgtgcagttcaagatcttcaagccaagatcatattacagcgtgcagttcaagatcctgaatatttgaattctgaaaagctagagatatcggacaaggcatgtttacatcagatgagtcaacacaagaaaaggtatattcaaacatggattgtctgatttcccgacggtcgtgatctacaccattgagatcgctaccaacgtgagacacacttggctttacaacataatcgtgacatctatataatctgcaataagatgtctagttttccatagaccctgtggattagatgttctcctggcagctgcttctttggcaaggggtaagttggggcctgccgaagctgaagaagatgtgcagtctataccacaaggagtg

SEQ ID NO: 4753 - DNA, 419 bp, Avena sativa
ccagtgcagtcacagcgatgtgttttgtcgtgtccagaaacacgtgacaccgattgccattaggtcatgtcatgtagacatgcatgctacgctagcccgcacgaagtttggtctttagccaccaccatcgccagccacagtacaggagtcacacccagaggtcaaaaggcagacatatgcacgtccttcccgtcctggaaaaactgagaggaaaaccttgcacagttgcatgcatgcatgcatgtcgtcgctcgccaacaaagccaaaacgcactgcatgatccagtggttcgtgtgccatacggcgcaaccattattgccggagtagtagcgaatgtgtactgtttccaaggattctcgttggcggttttgctgtacccacgtttaggcatgtcatgtggagcggaggcgtcgtgctg

SEQ ID NO: 4754 - DNA, 412 bp, Avena sativa
caaattttgagggagtcaccttgtaacaattttgcagacgttaattgacattactagacgagcatataggcgtaaaaacatgaaagttgcatgggcatcacaaacgcttattgtattatatggtattgtgatttttttatccatgctttgccaatcattgaataatgcagaacttacaaacttgctctctctagcgtactgaaaaaattcctgccaatcagccccaccagctttggctgcatatataatcagtccaaggcccacggcaaacgttacctgtaacatgattggaacaaaatcatgtaattattacgcaagtgaccaactagggtatgctgcatgctactgaaatcaagattttgacaatgcaaagacactacaactagagcatacccctgcactgggatccatc

SEQ ID NO: 4755 - DNA, 398 bp, Avena sativa
agtgcagaaaccagtgcttccaccgggtaaagagcactgacagcaaaagataaccgaatatgttgcagcactcggcacatcaaaagattcgcttgcttcccccagaactacaaaacattggttgcgagcaccatcgccacaaacatttcctaacatggtataagctcattctcattcagatctctttgtactttcttttccgttgatcctgactgttttggtctctccttacggcctgcattgtcgccagcttccttgtgcttcctctgcttcttcaacatagacttatcggcattcccatccatgagatgttcgtactcttctagacttgcaaatggagttgagccgctctttccaccatgcttccgctttttcccatgggctgcacaggatccatc

SEQ ID NO: 4756 - DNA, 406 bp, Avena sativa
gatggatctagtgcagttatgctgatccagaggttgtaattggctgtgaggatggcagagcctttgtatatgatatgtacagcaggagttgctcaagtattcaccggtaagcacaaggggagtccagtagcatatcatgtgaacaaagtgtttctgcaattattattattagaatgggtgcacaagcttcaccttgagagcaattctgtgacatcatataagtagtagccatactacggagtacagtttctaggttgcatttttggtgcatatgttgttgctgcatcacagctcaaaaagctgagatctttttctgatattattgacatagcatcaaagtcaaaataggccagttgtcttaggtgttagaatgcttattggagatagatctaattttgacatgctg

SEQ ID NO: 4757 - DNA, 378 bp, Avena sativa
gatggattcagtgcagtggagtcttggctaactgagaagaagcagcagcaggatgctctgccaaaacatgctaatcctgccatccttgtttctgaccttaagaagaaggctgatgcacttgacaggttggtttgctgacaaccccctgatgtgatgtttcgtgcctcctgtgtctgggacacctattctgaaaaccgccctttcttgcagattctgcaaaccgatcatgactaaaccgaagccagcaccgaagccgcagaccccacctccatcggatgccccagcaccagaacctcaatcgccagagcagcacccagacggtgccactgaagctggtgacccgaccagtgagggaggagctcaggagcagcctgcact

SEQ ID NO: 4758 - DNA, 495 bp, Avena sativa
gatggatctagtgcagcctcaagataatcgctgaaaacagaggcaagaaatgcagcattggcgacatactggagaggttgtggcatcccatgattcaactgtatcaaaccacctgtggtacaagaaattcagtaaactattccacgaaatcaataggagataatgtgatttagtgagttggcagttgataccttttgttctgttgaaagatctaaaaactggaaggtaagagcacatgataatgcttgtttgattgtgaaacgtcctcaacatctcttcatatggatacccaggactcaagaagagccttaaccggctcagaagaacctggaacgccagaacaatacaaaacaagtaaatgttagtcatgttaaactcacataattattcaatatagttgttcttgtaagcttggactacaggataatacatcatctagccctacatttttttacacagcaatgctaccatggtgtatgacacataatttgaaac

SEQ ID NO: 4759 - DNA, 391 bp, Avena sativa
gcagtgcagtaccgccaaacagggccctttatctagtttatactgttctggaaaaacccagttagccatctccattatataagatgagtgtctatgtatagttgatatttttgtttccagctttttgtaattgtgatcctggtaggcagcagcaagcagtttaggtgtgaagtgtgtgttgcttagcttctttttgtccagacctaatttgactcagtcaacaagaagttagctttttaccattgtagattgcggtattgttttaggtaacttcattgtagaaccgtatgcttcatgaagaactttaacatgtcagaaatatgaattgctaacaaccgagctaccaaaactatatatgaatggtagtctggggattcattgatggcatgct

SEQ ID NO: 4760 - DNA, 404 bp, Avena sativa
gatgtgcagaagttgagaccatagagtgtatccagccaacagtaactaatgtagccgtacgataaagagagatgtgtcatggatagtgatttgtcaaaaatgaaggattcatgtagaccccttgattgcctgtacacacttacataggcatgttatcactacgaggtgctattgaatttgcaacgtgaatgatttgtctccctgaaaataatcttataaggtctttggctgacttgcgccatggcatgtctacagggaggttcacgcggaagtaagtgaggcaaggcataaggcttcaacgatgaaatctcggcgacaagagcaggagttggctcgcagagagaagctcaagcaagcttacctcaagaaacgcctggagaagttgattgctgaaaagcaggcat

SEQ ID NO: 4761 - DNA, 469 bp, Avena sativa
atgcagaagatagaccgcggtgagctaagtggtagtctaaccggagtatcctggattctgcacactctgattggagcaggatgagactggaagtgccgacatctgtggcggtggcgtgccatatatgtcctgaaaaacaacataccagatgaagaatagcactagtaaaatttacagacatgctgcccaagttcagttcagtgggcaactttttaccagattagaataaataaaatgcctcggtaagggcaatgaactcacatctaactggggactctcttcgttgtcggtgatggcgatccctagctgctcagacaagtactggaattccatctgctcggcgaaagcaaaggcgtggttttcaccatggaagctgccatcagaagcatctccggaaagattcaggaagtcttttatatcatctggctgttcagcttcatcgtgaacattgccagtatcaccactgagc

SEQ ID NO: 4762 - DNA, 574 bp, Avena sativa
ccgcggtcctttctgcatcgtacccacgctgacgagttccccacaaaccaaccctgtgctgcactacattgcaggtattttgctgtgcctgcattatgtttcaagtttttttccagatcataaatttgcataggcaactagtatagtactatacctaaaatgttgataactcaactcgttcattaattcattcaatagcacttcacagaaatgttagtacacttgagctgtcccccttgagatggtaatagtctggccatattcatgagcaccttcatttggatccagcagtagacatcaaaggctatgtccagtttccaccctccgcaactcggcctggatcggttgtacacacacgtacaccttgtacgtctgcacccccccatgtgtgggtactgaatcgccctggtctgacactgcatcttcttctttaccgctgcatgccactaatcactcacccagcacgcagatgaccaaacgaacaaacagatgaattcacccggtaaagaacaaaacgcattgatttccttcttcttagagaaaaaacaagagcattcaaaggccttcaaaactc

SEQ ID NO: 4763 - DNA, 340 bp, Avena sativa
acggcctaattcgcccatcacctcttctaagctttggataccactcttccatccttcctccacaacctgattgtagcgttcatgcttaagccacatattttcataacaaaacggtcgttcagctccaccaccatgcagccagtccaaccgcttgatagtaattaacagacaacaatggtccgatgatgtagtctgaacatgacatactgtcgtgttatcatacatttccatgaaacgatcatctcccaatgctctatcaagccgaaccttaatattgttaggtgtctgttgtttgttgttccaagtatatagtagccccgagtatcctagatccataaac

SEQ ID NO: 4764 - DNA, 544 bp, Avena sativa
gactcgtgcatggtggcgctgggagaaggggggagtggttctgaagctggagtgccggtgcaagggcgagctcgccctggcgcaccgggactgtgccctgaaatggttcggcatcaagggcaacggcaactgcgacgtgtgcggccacgacgtgctcaacctccctgtcactctccgccgggtccgcgacaacgttcctccgccgctaccaccgtctcctgctgctgctgctgcggctgcaactcctcctggcaatggcagtggattgatggtagtttggcggcaccgcacagcgatcttggtggtagtgagcatgctggcctacttctgcttcctggagcagctgctggtgggcgaccatggcaccgccgccctagccatctcgctgccctttgcttgcgtcctcggcctcttctcctccctcaccacagccaagatggtgtcctccaggagatacgtctggatctactccgccgcccagttcctcttcgtcgtcctcttcacccacctcttctaccgatacgtgaagctgcactggaccatc

SEQ ID NO: 4765 - DNA, 465 bp, Avena sativa
gaaggccgggtggatcctgtgcgcgcctctgctccggaggtggttctcgctggaacaaggggcgtagtggaagtcgctgttggaggaggagaagccgttgatgcagttttcgtagtccgagtaggccgcctcgtcgccgccatcacggccgccgcggtccaaggtgatgccgctccagttctccgaccgactccgggtgtcctggcagatgtcgttcagcccagctccagcagccatcgccatgggctcctcctcgtaagtctgcaccatgtttcacagtcaaaaatgtaaatcctcggaggatgaattgcaacctcatggaatgatgtagacaatgattccaacaaatgattcagtcaccacgatcttgcaaagctcgtggacagtattccaccaagtaggcaagtaccagtggtcactcactcacaggcagtggtaaccatgagagattccgaaagaacatta

SEQ ID NO: 4766 - DNA, 416 bp, Avena sativa
ccagtgcagcacatcgtcctaagcccctctgttgaggacactatcacttggaagtggactgctgctggcacttatactgccaaatcagcttatcagttccagcttcatcaaggtataagtcgtcaccaagagctgatttggatgcaacagattacccaaagttgcaattttttctcatggttggttgttcatggaaaatgccttatgacagacaaccttgcaaacaagagatggctacacaatcctatctgctccttacgcaggatccacaatgaaactgtccctcaccttctgatgcaccgctccttcagctctgaggtctggcagcgtgtgcaaacatgcttcggactacctgctacctcccagcctccactgactgctcactctccatctggtggatgcaaagccttgactcc

SEQ ID NO: 4767 - DNA, 429 bp, Avena sativa
tccagtgcaggctgcatgaaagttgacacaataaagtcaaagatcacagagctggactggatgaatgattgtatcaaccagctatctgaacatgataatcctctctaacctggcaaaccattgcaagaagtttgttggcttctccgcaagcagatgtcatttgatccattacaccacaaggagctccaacaatgtgattctcaacctgcataaatgttcacccatggatgactcacttgaacagaataatgagtgatgattgcaacacagtttgaacccatcaaggggtttctttatcttaataaatactttaccttttgacagagtatagcaagatcccttggagcaatatttaaacctacagcaaagaaaagcacatgtgttaatgtcgtttagcatgttcagttaagttaaatgtgcaccaatagc

SEQ ID NO: 4768 - DNA, 467 bp, Avena sativa
agtgcagcaatggcatgagctaaggagttacagctccgagggcggtacaatacaacactttaacattggtaagtttatcagccaaaacctccttgatctccctcagaatcatgcacagtggggacatgtcttcagcattgttcgcaatagaggatttaagcgcctgtgattccatctccagatcacagcttcggatgcccagggaaacaacagccctgagcggtgagcgctcgctggacagtttccgcttcagcttgtagagcactctgaatatagtccagccacgctgcacttggtgcgagaacccttccattgctatctctgaaaaccgtaccccaacctccaaaattcccctctgccagataagagccatcagtgttgacttggatacgtccctcatctgtaggctgtcattgctggtttgcccttggtgtagcagtggtcttagtacttaggatcttgagata

SEQ ID NO: 4769 - DNA, 442 bp, Avena sativa
ctttaattcccttctccttaagaacatttcttagcttccttcatcacttcatcatttaattcaatttcccccctttcttctttgatgttggaataggcactggtatagtaggttcaattacaattacttcaggtatagcttgttcagggggagtccaatcttcatagttcttgcttattttagccattaattcctcagcttccttgggagtcctattcctgaaaacacaatcagcacaactatctaggtatgtcctagattcttcagttagtccattataaaatatatcaagaagctcattcttaggtaatggacttccagcatgtgcatgaatcaaagcacaaaaccttgcccatgatttaggcaatatctctttttctcgctgtttaaaatcaaaaagttcctgcaaaatagcatgtctagcactaggaggaaaatattt

SEQ ID NO: 4770 - DNA, 373 bp, Avena sativa
caacagccaaatcataacttcaagtggaaaataatccacaacaccattagaagtggataaaaccattatcaagaactaaccaacataccaaatgtttacaatacctatggatccaacaaccaatgatgaactcattctgacgggcttcagtagggaactgctcagcttccgcaaatcctcaccacaaacgggcacatatgaaatcccctctcatcttccatgcacgaacaatctcaccaaatatcaattactctcagccataattaacagtatcccttcggcactccatcttattaccagcaaaaatgcagggagttctggcagttttgacggtggcttacaagagacgatagcaccaccagagtaccggcgg

SEQ ID NO: 4771 - DNA, 467 bp, Avena sativa
gatggatctagtgcagtagttgctgcaacatactcagcttcgcaggagctcagagccacaatcttctgttttgctgactggcaagtaatgggattattgcccagcatgtagaggacaccggaggtacttttccgatcatccacatcgccggccatgtctgaatcactgtaccccgtcagcttctcttctccatctgccgtgtacttgcaaccaaggtcagttgtgccagcaatgtaccttagcagatgcttgacggcagcgaggtgctcggtggtgggcgcttccatgaaacaactcacgtacccgacggcgaaggagatgtctgggcgtgtatgcaccagatagcgcagacaccccacgacgctcctgtagaaagtggcatcggtggcctcgccttgctggccttgctcagcttgagccttggttccatgggcaccagcgcaggattgcactggcccatcccagcg

SEQ ID NO: 4772 - DNA, 481 bp, Avena sativa
tccagtgcagggttcattgatctagtttcttagcttttaatgaattttccatctgatgcccccctaaccttttattgtaattctttttcacaggtcggtttgatggctcaagcatatgcaaagctgctgtatctagtgaagatgtattggatcataaatgaaaaaatattgaggcgatacgtacaaaaaaattcctagaaatcttagggaaaagggataggcgagggtcctgggacttcaagttcaagcttggaggtggagaaattccggcgtgttgttctctgcgctctggtgctcctgctcatgaacaaaaagttgagggagaacttcaacagatgatttggccctccgttcctgcactagcccgtgaaactccgacagcgacatgtggctcgctccaacgttcctaggcagggaagggggttagggtgggaggtatagtaaggaagaaaaatagattgagagtgggagttcaggatgt

SEQ ID NO: 4773 - DNA, 362 bp, Avena sativa
gatggatcccagtgcagtgacctatcttgtgttggcacctcgtctgaatcacgcaatttacttgagatagagctttcagcactagaggtaattctactgtccttgtcctcgttatatgctattgcatctccagtgagataatcatatagagtaaatgagcggtgacgttcagcggatgaactacgttggaggctctcggatgccaagttggagcgtggcaggcttggaaaaccagacggacccatcctgaactgttctcattcatatctgatgagacaagggaacaagaaacattcagatgatgagaaggggaaataaggatttaaattcaagccaagtaggcttatgtcttcatgcaagca

SEQ ID NO: 4774 - DNA, 377 bp, Avena sativa
tggttctctccgggcgttctcgtcaagataatgcttatgggtatgatatgggagtcatgcatagagggaagccgcgcaggagtgtagatggccttgattcagaggacctgggatatgacagggatctgcctagggtccgatctcagaagccgctggtgaagccagtgaagaagaaggaatttgctacagtgatacctggttactgcttgctggcattatcctcttcatgttagttccgttgctgttctcctaccagtatgttcagttgctctcatgatttccctcaacggtgctccaggtattttctcttccagcttttgtcgttgcatatcgtttcgggagtactccgctgcgcaatgaatttcgtgcggtgcggc

SEQ ID NO: 4775 - DNA, 373 bp, Avena sativa
tgcagcgtattgttgataatggcagtgatatttcatcgggaatgttaatggcagtgatatcgttcatgggctgtgcatgcaggctgatactttctttttgtctaaactttctatttttttgttcctgttatcatgaatataactaagcatgaaccttataaaagttactgacagatttatctttgatatgatatgttgtttatctgttgtttatctgttgtttggcttgaaactccgatgaccttatcttgaaaccattgaacccttgtctgttgtttgtctaaactgatcaacagaataaatgttctagctactttattcagattataagtcttttggtttgtgtgtccagactaaaaaattataatgtcct

SEQ ID NO: 4776 - DNA, 375 bp, Avena sativa
  modified_base (375)..(375): a, c, t, g, unknown or other
gatggtccagtgcaggtggatggtgcaacactttctcgtcctgaatttccccgattgatataggttggtccagatattgtatgtttcccttttagttagcatgcctattcaaatacataatgtattaggaagcttccaaggtactacatcataattttttgtttgcatgatataaaagttatgttcagagatgaaacatattatgaaatttgttactccctccgatccataataagtgtcggtgagttagtattgatttagtacaaagtttgtactaagtttcccacacttattttggatcgtaggtagtacatagtttcagtacatttctatttcaatatcagccatataatattctagcatgtatgcttaggn

SEQ ID NO: 4777 - DNA, 352 bp, Avena sativa
ggatatactgggaggtaaatatacgatgctcctgttctgttaccatgcttacatttatgattgcattctcgtatataacgctatcctcgtatagaatgctttagataacctttcagattgacttgatggttacttttctttcctcatgttgtggtcatttgattcatgaattatctttcttggtggggcaactggattaagagatgaacagatagtggtgattactgaagagtttttgtttgatctacaacatctcttcaaatgaatatatagagaggaagcttctaggtttttctttaagagagtattccaattctaccccatagttgtgacccacttgttaggacgacac

SEQ ID NO: 4778 - DNA, 505 bp, Avena sativa
agaggcaaaacacagatgagagatggcctgtgtgaagaaaacaagaaagtgcattgtcaagactaagaaaaatctacgcgcaaagaaggcttatcagagaagaaagagaaaaggaacatcagagaagataaagctcaggttcagagagaaaaactggaagcagaacaggccaagaaaagggaagaagagagcagcagcagagccaggaaacctaaactcataggtgtccatgcagaagggaatcttaaggaaaaaaggctcgctaaaatagtgtttcatttagggatacgaaagaaaagcctattggcggatggtcacgttgtagtagaaacattgacgcacgactacactgattcagatgaagaagaatctgattgatgggttttcaaaggttcaaataaaggtgtaatgaaacatgtagagatgtcttctcctgctggttcatctctagtgagatattagagtgggactagattctctttatctagtcatgcgtaggaccacc

SEQ ID NO: 4779 - DNA, 491 bp, Avena sativa
agtgtaaaatctaagtacttagccatgtccctggtaagggacaatttgagcatcaagacatggaagcaatcaagaatctcatcattcaaatttctaaattaaaatcttgtggttttgaacaagggttgttttgaattcttcaatcattgatggagagatggcttggtacaaggatcttgaaatctttgattgagaaaaatgattttgtcgagcaaaacttagtattttcaaatgttaaggaaaatctattttgagcaatgcaagcctaaactccacttagccaaatgcatatagatgatagactccactatactaccatagtatcacttgccaatacaattcaaatgtattgacccttgtggctgtaacttgttatgttgcaggtttgattgatttagtgaagtgtgttgattaggattacaaagtccacaaccaacatgtctgcctgtggcactttgaagatgaaggaccccatgcttatagatattctt

SEQ ID NO: 4780 - DNA, 408 bp, Avena sativa
agtgcagattgaggcccttggtgtgataagccatacaatggccctccctgaactgtttgctgtcccccagctgacgcaacttgattcataggtgactaagaatacaaagaagaatcaagaattcatcagtgcagtttcatatttttctgaccatgcatcgcatgcatcataacacaaaagtagagtggagcttttggaagttttgtgacattagacagtaattgttgcatctttaataagagatcttatgaattaatttctgaaaattcagtccagatagaaaatttcattttacataaacacccttgctcaataacctcctactatctgtagcacaaagatcaaaatgaaaaataatactccaactgaaacttaccatgtaagggttccatccctgcatttgcatga

SEQ ID NO: 4781 - DNA, 248 bp, Avena sativa
gtgcagccgatcaagtcaacatggagtagcaaaggtgtgagtattgtaacagatgggtggtctgatcctcaaagacggcctctgttaaattttatggctgtaacggaagatggacccatgtttttaagagcaaccaacaccgaaggagaaataaagaccaaagagtacatctttcagaggctgatagaaaccgttgattttattggagcagagaatgttgtgcaagtggtgactgataatgcatcaaa

SEQ ID NO: 4782 - DNA, 405 bp, Avena sativa
cctaaacagcagttgactgaattgttgcttcctactgtctcatcatccttggattcttctcaatgtaattcctggtcccaactatataggctttggtggataaaacaaagttggatccaagtgagtattggcgacatttgttgttggtaccgttttagctcctgggtcccaaagggctatagaatgcaggatggcagcattgtatgcagggttccctggtaatttccattatttctcttacaatttgcctttcattgttatccctgtgttggttaattttttttatgtgatgtagatacggttcctctcaagactgtaaaccggcagtgctcttctggtctacaggcagtcgcggatgttgcttctgctattaaagctgggatgtatgatatcggtaatgcttta

SEQ ID NO: 4783 - DNA, 436 bp, Avena sativa
ttttgagaaaagacatggagttcgcagcaaaaagacgacactcgtgataaccctgcaattgtatcatctctatctctactatctaaaaagaagctcgtgttccgttttctgccgcaagacgtttcgccccggcccttcgtcgcgcatcgctctaccctccctacttttttctgccatttttattatcaacgagaatctcgcaggccgttttctcatccccttttcttttcctgtcatgccctgacctcctctcgtcgttccccgtactcgggaaggccgcctacctcctccgcgatacactattgccgttgattccccggaggcctgctctttccaagatcttcctctctccggcggctgtcagcagcgccttcacggagttccatgacttggagatgtccccaagaacttccgatggcgctgcactagatccatc

SEQ ID NO: 4784 - DNA, 426 bp, Avena sativa
acagcaactgaagcgaaactgaccgtaaggcacgcgtcaaagaagtacatcataataatagagcctcaagcatgctacttgcattttgcatcagcttattgaaaatcttactctgttattgctgtgctcaaatgcatatcactacgtcaaggtagaggtttaatggcactctaaagtccatcttaaataagaaacactgttatttactgtccagcttggtgacataatttattttccccaatctgtttgcttgagactttgacccatgcagcaatctaggtgaacttctattcattatctatacaataggattacatataaaaaattgctatacatggtttcagatgtttgttttatggtgttatgggtttgtgcgattggatggaactccatcttacatgttcggctcacctgtttcatcacatt

SEQ ID NO: 4785 - DNA, 359 bp, Avena sativa
tgcagtggcgccagagggcggttcaccagggtcggggaaaagcgtccggactactacggtcaagcaggtgcagtggagtgtcttcggcgctgacagcagcagcgccggggcagatccgttcggggacttcctggcgggcggtgaagaggacgcttttttcgtagccggggtccagggattgcagggttcagttgttgccggcaccagcagtgttggagccgacgaccacagtttcttcaatggagtgggtggcagtaatgccagttcgcagctggaccagggaactagtacaagggactttttggcggatggtactgctagcgaggatgcctttttcggagtgcaaggttcggctgcac

SEQ ID NO: 4786 - DNA, 495 bp, Avena sativa
cgcgggccattccacccacatgtgctagtatatattattatacaatatccaaaagataatggtgtggtatgaatcaaagcggacccagatagatacacagacatgtagggcctacagacacgtatagcgaattgattgacgatttaacatgtagcatgcatgtgcatatacagttgctcgcttaacttaagactttctagttccaattgtaacaaggtatgatcgggctgcaaaacgtgcacccattgattcacatatatatacacaaattacacgcttgtgttacaagttcatgaggtcggtttgatctagattaggtaaccgacaatcagattctcctggaactctatggtcatgcaacacaagcccccggaggctgaacaatctgattgttttagaactctagtcgtgcaacacacgcccccgaaggctgaacgaggggacaacctgattgttctaaaactctatagttaggtaacacacgcccccgtagac

SEQ ID NO: 4787 - DNA, 378 bp, Avena sativa
gtgcagcaagaacatcaagagcttttgcttctcagtgtgccggccaaacataaagttgtcagtgtaaagataaacatcatagggcctacgagacatgctctcgcatccacctagaagcacaacaaactctgccatgtcagcaagagcgttttctaagctttccagggcacggtgcagctccaagcgcatggccttgtcatgcttctcagttattgttcgtgaacgcttgagaggaatggctaaacataagctgcctctagatgagttgttgctgctaacctcgtcaaagcctgcactgtcttggagggctgatcggtacctcatggtgtcgtgtacgcggtgcccctggtagatggcctctgagagcatcttgagctg

SEQ ID NO: 4788 - DNA, 475 bp, Avena sativa
caaccattggagccatcttcaaggatagacatgggatggaagtacttaaatagtcaaggtttccggcaggaaaagcttgtggaaggtcgccccaggtgatgcggagaggactctcagctttttgaagttggagactgggtgcgcttgaaacctagtattggtagtagacctacttatgattggaacagtgttgggaaaataagcatagcagtggtccatagtattcaggactctggttacttggagttggcaggttgtttcaggaaagggaaatggttaactcataacacagacattgagaaagtacaaccctttaagattggtcttcatgttcatttccgctctggaatttcagagcccagatggggatggagagatgcaaaacctgattctagaggcataattgcaggtgtccatgccgacggagaactaagagttgccttctttggtgtgcctgggttgtggagaggcgatc

SEQ ID NO: 4789 - DNA, 359 bp, Avena sativa
gatggatctagtgcagaatgtacccagcaatgcagtccggcagtttgatatcattatcaataacaagacacagaacatagaactttgcaggccaatgttcctatttgtcaattatttgtccagcattgtacatgggatgtcaaattataatgtctcacttgtttctgcaaaaagtgcaacactaccacctatcctcaatgctatggagatatacttggtgaaaccaataactgaggttgcaactgatcttggagatggtatgaatttattgatgcaatattagtacagacttcagagggtataactagctagagttacaaagttaagggttttgtctactttacaatagaaaaattcct

SEQ ID NO: 4790 - DNA, 375 bp, Avena sativa
gatggatacagtgcaggactaagacatgatggcaaagaggcacgtgccatgctgtacatggagagcctaaaaaactgaaaaaccaatttccctttgcagaccagtttgctaatgttccgatgtctccaatccccgtgtacacgatattcttacatctcatcgccccgttatcttctcctctatttgtgtgctatatgaatgaacaatgtggcttcgttatcaacttccgtgaagatggagtggcatatttatagggggggaagaggggagactattattgggatgaggcaccaacctggtgacttcatccttatctccatacgtctcaagttcatattcacgagagctttggtattgtcctttttgctcatatat

SEQ ID NO: 4791 - DNA, 349 bp, Avena sativa
gcctcttgtgttgtgtctgatttctcaagctcacgcgacagccaactgccacaatgtgctattgtgtgtatccaatactaggtagcttcccaatataagtagactccaacctcttacgagtcgtaatccttcaaagttcaaagttacactgtattttgcagtcgcatcacatgtttgtgtatttctcatacttgtgaatacagtttattattgatactgaaaatataaataaaacacttgtaacattttgaataaaattcagaagccccttcttgactcagtgactccttaattaccaccccggaactgcatggcaatgtattttccacgggcaattttcctatctcta

SEQ ID NO: 4792 - DNA, 335 bp, Avena sativa
caccggccggcaccatcgtcaatccagttgatgtccctttcttgtctttctctgaggtggacttccttgtctcttgtgttgtttgttggcatcttctaacaatatttgatagacatgaaagtttagttccctaaaatattagacagaaattgcattctatgttcttattactcttgcacttgtcttagttaatgatttcattggtacacattgctagatgaaaaatgtattctctgcactaaatttctttagaaccgtttgttgcaaccacggtatggccagcctatctcaaagcacgttcatcttgacttctgagctacccggattataatagc

SEQ ID NO: 4793 - DNA, 449 bp, Avena sativa
ttgctgtggctgttgatgctgaatattatgctctgccgtcggaagcaagattgtattgccttggccataaaatgaaggcattgcttcatgatgcttctgctgaggtgaagagaatggagatgttggatcaaatcttgaggctaccctatgatcaaaaaatgagatccgttgccttcctttggtgttggtggacggagagaaataaagcgaataggggagaaagaaggcagactctgaatgtcttgcagttcactatcaacatgtatgcagctgaatggaaagaggtgctcttgaagaagccaacgaatgtatccacacgtattgctacctgggaggcaccacctatagattgggtcctcatcaacactgatgatgcgttcctgatagaccaagcaagaggtggatggggagctgtagggcgtgacagtgatgttgatatgttgtttgtg

SEQ ID NO: 4794 - DNA, 567 bp, Avena sativa
gccaggctgggcgtcctcggctccgaccaggcgctcttcctggacgcgcggaccaggccgctcgtgcaggagctgggcgccgacaaggcccgcttcttcaaggcctttgtcgccagcatggaccggatgggctccatccggggtcaagaaaggcaagaagggagaggtcaggaaaatatgtagccgcgcctgaaaagaaaccccgagctggccctaagtctgacaccgagtgctactattgcaaggggactggccattggaagcgcaactgccccaagtatttggcggacaagaaggccggcaaggcaaacaaaggtatatgtgatatacatgttattgatgtgtacttgactagtactcgcagtagcacctgggtatttgatacgggatcggttgctaatatatgtaactcggttcaggggctgcggaacaagcgacaactagcaagggacgaggtcacgatgcgggtcggcaatggatcaagagttgatgtgatcgccgttggaacgctacctctccatatgccgtcgggattagttataaacctgaataattgttatttggtgc

SEQ ID NO: 4795 - DNA, 548 bp, Avena sativa
tggctacaggaagcgagaggagtgggggagatgcttaccagattcgcagagtcgcggtgatgctcaaggtgctcgcgagagtgcaaggggcgcacggggactaaggcaatttcttgccagagttgtcctctggcttggtctcgtcctgttgaagatgatggcgaaagcacggggcacgccagagagaaaagagatgcggttagatgcatggggtcatggcgagcatgtgagtgtgaaggagagggatcagggcggtcagacttttaccagggcttcgccggaggggaagcaggcggtggtggcactcagtcaaggaggtggagtgcaatgtgttgccattggaggtgtgtgggctgttacttggacgtccatggcagcatgatcagaatgttactcatgctgggagagcaaatacatattattttctgcatgatggcaaacaacagactttaaaacctatgcaggatgatcaattaaagtctgatgttgaaatggtggtacacaaggagaagtttcgcaaggctaagccaaaatctgggctagctacg

SEQ ID NO: 4796 - DNA, 254 bp, Avena sativa
gatggatctagtgcagcagtcccagtgggatggtcacggatatttttctggcttcacggggtcttgaaggacccatctcgccattccttggcaacctcactggcctgttgcgtcttgatatgtcccgcaactcgctgtctggtggcctaccgcttgagttggtgcagtccaccagcatcatcgtcattgacgttagtttcaaccgcctgacaggaggcctgagtgagctgccttctacagcccccgtgcagcct

SEQ ID NO: 4797 - DNA, 259 bp, Avena sativa
  modified_base (243)..(243): a, c, t, g, unknown or other
ccctcctgatataggcatcactggtatgaacgaacatgcctatgagcgcctttgtaacatcacctttgctttcagttttgttcatgttgcttatgagcgccttcttgacattacctttgctttcagtttcgtgcatgtatagctgcctcagaatctccatagcctccaatttcagatttaggcctttacaatctttgcaggtaatatcttccacggtggtcattactcccttgttctccgagntatgtttgcgcaggta

SEQ ID NO: 4798 - DNA, 479 bp, Avena sativa
ccacaacatgtgcgttgaaggcgctggcaagactcaaagacacatggaagtacctgcaggaagagaggccggtcaatcaacaaactctagtatacgcaatctatgcctcatgcatgctgcataacatagtcatagatatggaggatgatgcagccatgccgagtcttgaggaagggaagtactgccaggatgtgcgccagttagcaagtgaggatgctgtcagggcaagggatatgttgtcgcaatacttcttgaccagcaggacattagaatcaggaggtgaattaacataacttcttgtacatcttaatttgttcatttctcactattttaatactgtcagagttaagctctcaccttgctagttatttattatgtaaccacttttacactttctactcatacaggaaccttgccttcttttgaagacatgcaaagatttgagtctgttttcaaaatgacaagaaaacctttattac

SEQ ID NO: 4799 - DNA, 403 bp, Avena sativa
caccagaaccttcagaaccagttgtggttatagatgccggagtgtttcatttcagtcagttaaaaggaacataggttatcatgttctatttctacactgttagtatttacccctctaagccatcagatgaggttgtacgtgacagcctttctgagaatggcttcaagagattctctcgtcccatggctcttctcaagctgtgccgctttaagccatatactcttcttaacaaggaacacactaagagcatgtgcatagatggcgcgagctgtctcaattgagcctcgtttcttgcattcctcagcatcagcaacccatgttcgcttccggtcctcatcttcaaccccaactccaatcgtgctcttcacaatagcctggcaagtaagaacagacccagcacgct

SEQ ID NO: 4800 - DNA, 415 bp, Avena sativa
gatggttccagtgcaggcccacctaggcgctcggtgccaccctcccacactgccacgtaggtacccgtctaaccccgcataggcgctaagtggggtagagcgcagcgtcttttggagcaataaaaacaacttctcatgtaattatggccaatgtgttcataacttgacatagtaatattgtggtttcttcaattcaatgatgtctagtgttgattgctggatagctgagttagctctgtattcaacaccattaacctgtgtagaacttggctcattggctgcactgcaaatgactttggttgtcacaccataccctgagaaaaaagctaatcaagcaccccaatttactaggctatttttgtttgcatgtaactactatatcatgtgaaaaatactcaagatgttgactactcca

SEQ ID NO: 4801 - DNA, 445 bp, Avena sativa
gtaaccatggtggaagcctcgtgattgacttgacaagctcacttcagtcatggtcgtccatgggtggctccatgcagtcgcttggtggaaccgtggatgcttcattgaaggtccctttcccttcttgtagaaaatctactccagcacatggttttttatgctactacttccttgttatttgtgagagatagcaccaaatgggtatagagttatcaggtccaagttgcagcacaagttggtacgtagcttgtgctgtcccaatctgaataattgatcccaagttggtacgtagtgactccttcggtcagtcagctgaacatgcattccgcttgttcatctctcattcctcttccattctataaacacaccctcttcttccttctcctggtagcagcagggcatgcatgcatccatccagcgtgcgtcagtcacacagccatacatc

SEQ ID NO: 4802 - DNA, 478 bp, Avena sativa
ataattcctcctggtgttgaatttggtaaagcagactggactgatccatccaagtgcccacatctactgaaattgggtgcatcaaaccagcacatgcacattagatacttcttttacctactgcaaattttcatcgtgtatagcctgactttaggttccacgtcgctgaattaccatttaatcaagataactcgcttacagtcaattagccaagcaaccttctctagtcaagtgcgtaggcaaagttcccaattcgtcggcaacgaaatgggaagacgcgctcaggcacacccggtttaactgaagcagggatgggatttagctcaccgagggcgctcgccgaggagtggggacgaagttgtcgggcggggttgtctagcgcaatggcgccgcgaggactgaattcccgatgcggcaacattcaccggatcagatcccgtgggagtggaactgcggaaggtccctgcactggtccatc

SEQ ID NO: 4803 - DNA, 277 bp, Avena sativa
gtgcagataagacccgctctaggaaagagcctctttttctgttaccggcacttagcactggtgaagatgctaacaatgtttcccaagacggaccaaataacgtgtccacagcatcagcttcgcctgcgaagttacagcccaagaaatcattagctgctacgcttgttgagagttctaaaaaggagtcggttgctcttgttccatctgatattgcaagattgacacagagattttatccgcttttcaattcttcactatttcctcataagccacctcc

SEQ ID NO: 4804 - DNA, 382 bp, Avena sativa
atcccaaagaggagtaatgttcttgtatggtttgctgtttttacagagtgatgagctgcttcagatttccaatactcagagtaagtggacctccaagtcttggattgttagacagatccctgcatgtagttcatatcagtagccataaaacatattatggtctagatatctagttaattttgtaggttgtagcatcccgttcctgtagtccgtatctgttacaacatggttttcacgatagaaaaagggaagattttattcttgaatgaaggaaatacttttaaaattgaggaagcaaggacttacagatatgtcaaagcagagagttggcctatggcgttgctcaatgcaccttcaatattcatgcttgataatttcctgc

SEQ ID NO: 4805 - DNA, 412 bp, Avena sativa
gtacaaaatacacagaaccgagcataaaattagctattacttcgtgaaatggctgagtctactatttcaatacaattgcaaacctctaactggtctgaataaatacatcaagtagtattacaatacatcgcatgcccaatactctgattcttcttacagaatttcagtaaggtactatcacaaaagtagtcatgctgaacaagaactggcacccacgggttggacactccttacttgatttggattctctgaagcacgtccagcgatgaatcaacaccctggaagcaagagggcgtcagacattgggaacaaaaaaacagcgtatccagtttcaccccattagctaaactggcaagcaaggcttctcacttgggacaagaatgggggactattctccaacctccctttgcct

SEQ ID NO: 4806 - DNA, 368 bp, Avena sativa
gtaaccaaggacctcctgaatctttagtgattgagatcagaacacaaagttagatgcaagcagattacttaggcacaaatgattagttccagcagtttaggtacaaagagaaaaattacaccttgatattcctatcatgatattaagctgaccaccgacatactcaaaaataatttagctgcaaatcaagaacaagcattcagaagtatatgatccaaatttactattgcataagaaatcaatggcttaaggtaataacatttgattagatcaagtaacaatctgaacctgctgcatggcgggaaataagactctagaataaaatctccatgccataatttgtactaacagtacaaataaacctgtgg

SEQ ID NO: 4807 - DNA, 431 bp, Avena sativa
aacagaactccttatcatatatggttggcaggtcttacaacacggaacattgagttgtgccaacagtataagacaaacaacacaggcagcaaattggttagtcttaaaagtacagtacaatagtgtaacttgaactaacagtgcatgctaatacacaacatagcacagaaggattccaagatacgaacgcctcacataataagattacagcaagccacaggggacttgccatctcaaacaagcaatgatatggagatcgtgtgaccaatcaagggtgtgactgcatctagaagagcatgactttctttccattaaagtaaccatacaactgcctgcggccagatttgggattggagaccaactcatcctcatcagatttatcctcatccgcatagtcaggattgcaccagcgaggcatgggcacaggccac

SEQ ID NO: 4808 - DNA, 403 bp, Avena sativa
tgcagaaccacaatgccaaactggccggtaaatgcattgacattaatatccttttatcaagatataggtcttttcggggatttggttttcaggggattagatttgttaataagcaaaacctgttccttatgtactttatccccttgtaactgtaaccagtgatgcatatgatttctgatgcaatatcacaaatagagctttgttttacgaattacttgcatgattcaaaatgttggagaataatttttagcagctgttgtcaaatgcttctgttcaaaatattcatgatggtttttactatgtatttctattggttgtaaacaatggttctgcattctgattcatctatcttattaaatttgtcctacagggagattgagaaattgaagctttctgagctgac

SEQ ID NO: 4809 - DNA, 353 bp, Avena sativa
aaccaacgacctgagtcaacaaatattatgtcatcctcggtctcctgcatcctccaagacgggttcaacacgggtcaacaggactttccttaaccgggtcaacaaccagttaagcgacggcagcaccaaccttgtcagatacgttgcgtccctgcacttgctcctaccatggatcaatcagaaaattgtgcgtctgcttcccatgaactactccctttgtcagataacaaccaaggcgacgggagcatcaacattgtcagtcagatacattgcattcctgcacctcgttcctgccatggatcaacagaaaatcgtgcgcctgctccctcttcggtgtcgcttcccacgaacta

SEQ ID NO: 4810 - DNA, 465 bp, Avena sativa
gatggatcaagtgcagaggcgaaagcacttaattctgaaaaggaagaactgcatgctaaattggagaaagctgctactgatctggagataatagaaaaggatatcacagcaaccactgacaagatacaggaatgcgaagggcttattgtgctcaaagaacaagagtcggccatggcaagttacaaaaggctccgtctggactcctctgctgctagagcagaattgactgctgcaactgaaactgatgacagcgaagaagtggagatattacgcaaagaagctgaagccgcagaatctaaagctctggaactcaaaacattgtataatctccaaccggatggcgatgaatatacatttcagcctgtagttcctatagcgttcataacaaattcaacatggcagcaattggcagaaatggcatcttcttttggcctctctcctgagaagtgaattgtatagtggacc

SEQ ID NO: 4811 - DNA, 453 bp, Avena sativa
cagtgggtaattcggttttgggaggttgggtgtgatggaatatgattttgcagggctcatggtggggcggctggggtgtattcaatcgttgctggcgccggacttgggaacatgatcattaggtgagtgaattgaggtgaattttgtcgggagtgctagttattggatatcttaaacttagctcattctaggatgtagtggcaccttgttactagataactttttttcccatagtcataattgctataagcatgtcatagctatatctggaacacttttgatgaatcagtgtatcattttaggattgagttacagttgctgaacatgggtttgtaaaggtggtatcgtactgtaattaggattaaacttcaaagaaaaattatatatgcctgaaccattaagtgccttatagcctatacaccacttagtgcattgttgaatactagactgcac

SEQ ID NO: 4812 - DNA, 331 bp, Avena sativa
tgtcatgcgttcccgtccttgccgtacactacgataacaggagccgaccagaagcctgaaagggatggcaccttatgaaacgtggcggaataagacaccaagggttgattatctccgcaccttcggttgcgtagcacatatgaagatcaccggccctggcatcacaaaaatgtcagacagagcacactccggtgtgtttgtaggatatgaagagggagccaaggcataccgtgtgtttgatccagcagcaaatcgggttcatatcacgcgagatgtgatttttgaagaggaaaagcagtgggactggagcgcagctcctgggggagttgat

SEQ ID NO: 4813 - DNA, 351 bp, Avena sativa
tgtgtgtgcagctaccacatgctcattaccgcaggcaaccttaactacagtgtgaccatggaaatcccacacaggcagtgggactgaactagctgctatacagaactctccatcatcagtctgctgcgggcaatttccccacatccacagggcaccaagactgtctatggcaaaggacatcatgcccccagctttcacagaagagagctataacaaacataaagcaggattacttaagaagaaacttctcaagcttagagtcttgtaaactgttgaaaaaaggtgctttgtttataccttcaaaggggtctgcgcaagagtgctctgtgcttcatcctgcactgatccatc

SEQ ID NO: 4814 - DNA, 467 bp, Avena sativa
ccagtgcagcaatttagagatttctgtcaatcaatctgagtttgattcacttgagatagatatagagaaaactattagtcccatttagcttatgctcatccacatggctaaaacgacgaacacttaaaaatctagcaatgcgaatttagcagatagatatatggaaagtcaagtgaagcaacagaaattagaagcaacttcagctattgctatcataccttgcagctcacatgtcgtgcctagatcagcttctgcatcttccttttgcttttggtagtgtgaatggaagtagggtagtaataggaactaatttgtgtactctttcgtgaatgaaatcacgtactgtagtccttcttaaactacaaaaggtgtgcaggacaattattgatctattcacttatctcatatgtggttgaaacaataatgaagataagtgattttgcacttctaaaatctgctctgatcct

SEQ ID NO: 4815 - DNA, 299 bp, Avena sativa
cttcgggcaaccagagttaccaccacttatggaactagtgtttttagggtctccaagatcagcttgctaattgcatcacccacccatcagttgatgatcacgcatatatgtatgtatgtatagcagtgccttcttggatacactatactgttcggaaacaaaccgctggtttctaaattgctgtgtgccgcgaaattgctgaaccactgaatttttccatgctaaattgttatagctaaaataccagacgaccatttctatcttgtactactaccacaatctatcatgcattatacaga

SEQ ID NO: 4816 - DNA, 290 bp, Avena sativa
ttaagatatgattaggatccaacaatataaaagacacactgccgtctaaacagtactgaaacactgcttgtgtgtatctctgatgacaattttatcgtcctcatgtttatagaataacaattttaccatcaccatctgcataatttcaccgttgtataaaaataatcggtggatctctgtggaaggaagctatgattttgtctactccgtcatcagtacctgctgatatttgtgcttcttactggaatctcataccttttgacaaggctgaaagggtcactctgccacct

SEQ ID NO: 4817 - DNA, 433 bp, Avena sativa
gggctgatgctttagaggcctctattgctgctgttagcaagtatggtggttttttctacttaataataaatcagatgcacttatatcgtgatttgttattatatttctagttttctaccacttaggtgtagcaatctgcctgtactcacatgactcactatgtgactgtaggtagcccaaaagctttatgaagggatcagtctttctttagaacaagcaacaggcttaataacgtacctcagaacagatgggtattatgtaggtaccatcctactttaagttgatgaccaaagtagtctttctattcataaatgtattatgtaggtaggataaaacacactcttggtctcttttgtgtagtctgtgtttgtgggttagaatgggtgcattcagaccaaaaatgaacaaattgatccctctacatgcaagtgaa

SEQ ID NO: 4818 - DNA, 429 bp, Avena sativa
ggggccttctctacaaactgtaccacaaatagaatgcatcatcaacaaaacatagggacttgaatatggaaaactagtttgtggaaaggagaagaaatagctgacatacactgggtgaactgagacgtgccaacagagcatcatattctgtctgcatcttagagaggcgcttggagagccgcttaacttcctcagacacatcaaccatgtcagccaaaggtagatatgcctccaaaccctcatcagcaacaatgtggacagactggtttgcatcacctggcaagtatgaaatatatttgtatattggaaaactgcatcaacaaagatacatctggacaggttcaaaaggtactcactcggtagcgattcagtaaaatgtacgttctgtgcgtcaagcttggaaagcaaagcaagaacctgcttctctct

SEQ ID NO: 4819 - DNA, 344 bp, Avena sativa
gtgaagtttgagttatgtgagccattgatttctagaactttctgggagtacagaggtttgttcgtgcacatcaattttgtcgcgaagcacaatggcaagaagacactcttttttgccgagatagaggatcgtggacagggtggcaaggagatgttggaagtacgttgttgcattcctttggaatcgttatgtcaaggtaacccatgtatgctggaagaattctgtccatatatatatgcacatggaccaacatgaatgattagtttttgtgtttattattccctttcaatcagtctgttgctatatatatgttgacacttgatggattttactatttgttctgc

SEQ ID NO: 4820 - DNA, 394 bp, Avena sativa
tgcagcatgcagacaaagccgaatagaatctctctactctcaagcgttggtctcccagcagcacacaaccaaagtagcatcagctctctatatctctgctcgtcatatccctctgaaaaaagcagtagtacagtaccgacttctctccgtgctcaattacaacagcatcatgcccgtgatggccttgtacacattgccagtgccagcctcaactttgtcagacggatgcagataaagcgaccgaagaaaccacaaatggttagacagatagaaaatagaacaatcaagcatcattctatataaccgaacctataaaaaacctactggatcggcaaacataagaatcaaacagtttcctaggttctgtaattttaaataacagagcagagcagtt

SEQ ID NO: 4821 - DNA, 343 bp, Avena sativa
ggtggaaataaaaaaaacaaaataatgcctgaactatccatgattgcattgtaaaacaaaggttcagagctatactgtaattataaacataccagcattatgataagaacttgtgagttcaatctaaataccggaaatggacactattttatgcagtatgttaaataaatctggttacataacagttgtaccatccgaggcgcttaaaaatcagttaagcctctaattaaataatagtaacaatcaaacgacatggattatatctagaccacgtactggagagtgctcaaagtagagcacacacaacacaacagaaagaacaaaagacatcaatcacaccgtg

SEQ ID NO: 4822 - DNA, 400 bp, Avena sativa
ttggattaaagaaaagaaaagagctaatcatcatctcactagccccctccacccctaggcgcctagctagctagcctagacctgcataagcaaacatagattcttcttcaccggtagccctgtctcccctattgccgccggtgctagttgtcggatgaaacaccacaaccagctaggccaaccacctccagcggaggagtaatccgcccatgccatgactggggccgacacccaaggtttcctcgtgctaaagggatgaacccaggtcatctccacatgtcatcgtccgacgacgaggtgctacatgggcgtcaagttggaggttgtggcccacctgaacccatctggaccccgatcaaggcccgcctgcgccgctgccaccacccgccccacccaccgc

SEQ ID NO: 4823 - DNA, 484 bp, Avena sativa
cagtgcagcttcaccttcatgaggaggctccatttcggtgtagttcgtccgcatcagaatcgggtaactaccaccgacgccgtccttcatgacacgctcaaccatgacctcaagctttcctgcatcgtggtggcacggtcgtctctggtggtggtgaagggaacggtgcgctggcgaggcggactgccagcaacaccttcaactggagctgacatctctcaggatactatcttcaccagcaacctggctctgataccaacttttagctcacaggtagtgtgtaggaagtagtctgtttgtgactgccaaaagcttcttgtgcagcttgtattacattttggcatatatataggatacaaggtcggtaagggcagatatgacctgatagttctagagttttctactgctacatggtttacagcctaaggtttacacactgaaagatacttctagaacccaccagtactactgcactagatccatc

SEQ ID NO: 4824 - DNA, 365 bp, Avena sativa
cagcaaacgctttcgtcgttatgatgtaatccggagcaatgcatgcctgcccgttgttacagccccatttaccgacagcaatcctcttaacagcaacctttcaagcaaagcatctgtcagggaaaccaaatagcagggggagctttttctataacagtctgacaacataagatatcgcttacatgaagatcaatgttggaatcaacaataacagggcactttccaccgagctccagagcaaccggggttagattcttcgccgctgctgccataactatgcggcctatatttccatttcctgcaattcaaatgaacatgtgcatcagaaactcaacattaattcaacaacctgcactgggtccatc

SEQ ID NO: 4825 - DNA, 335 bp, Avena sativa
cagctcacggttcttgtaacgcttatcctgaagaaccttcttaatagcaacagtttcacctgtctccaaacatttagcctgcaaaaaggtcacatgagataaattttccaagtatgcacacaagtatataggtagtcacaggaaaattcattaaggttatatagaatatccaaaacttgtagagagttggcttaagacacagaaacaaacaatggtcaagaagggagttggctgcctaacaaaacaaaagtcaggctgaagttgttgcaactaacctggaagacaatcccaaatgaaccttgaccaacaatacgctcagccatgtagctcacggt

SEQ ID NO: 4826 - DNA, 383 bp, Avena sativa
acgaaatttctgtccgcaaagtacatttagtttatctgtgatgggtaatcttgagatcccgactgggttgacccgttcttgcccattgattgacaagtgaggttatcatttcaagtcggtgaccacattcaggaacacctgaggttgcaatgaaaatatgggtttttcctctaccttgcatttgaacgtcattccagcatcatagttgaacatgatggaaactagtgaccttgaaggagcggctaggtatcagacaggacaccaccgttggagatcgttgcccacagtgttagtggaaagacgacttacatagtctctgatctatgtaagaatggagagaacataaaggccagcatatagcatgcaatacagtaccgcagaat

SEQ ID NO: 4827 - DNA, 451 bp, Avena sativa
gtgcaggttcagaagaagaggggaggtgggctgggaaggagtggatcttggtctatttgggctagaccggtctagcaaacaggattttggctcttggtaccgtgcaggcttacacgctgcggtgtttagcccgtatccgaatttttaagatctggcggacggagataattggggtaacatggttgcaccaaattttagtttgcaaacattaaatgctttttagtagggatgaactttatagacattatagataacgtgagattgagaagatccgtgagatcagtgaaaataatgttccgctagtggcagcgcgcggcctggccggtggcaaaggcagctaatgtggatcatacgagcagaagggcaagacagaagatatgaacgtttgcttaagctacgcagccgttggagggattacgattcagctacgagtcaggggtcatcgggcagg

SEQ ID NO: 4828 - DNA, 366 bp, Avena sativa
tccagtgcagaactgaaggttggtgtatattttcagaagaaaatacaaaactaaaaaactgaaggggagtttattgtttccatagtaatgtatcccacaagagctggggaacaaacctagaagatatgtaaggatgtagctagctaaacttcaaagtagaagagaggcgcaagtagaggcgttaagtatgcacgatactggatcaacctacaaggttggggttgcatacaaatgaagagaggcgtaagtagagacgttaattatgcacgagagttgacttatgagtttagttcaccaagcagaggatacttcacaattaacaacttcagattaccgtggtgcatgtgatggctgaaaatgatagaa

SEQ ID NO: 4829 - DNA, 460 bp, Avena sativa
tccagtgcaggaactatccaaccaactgatcctaagattaatccagattcaattcaaaaggaagctaaacaagaggaagttgctcctggtgttgagtcagaagataaaaagttcttggatagtatcttcgccttaatgcggaaggaggaaacattttctggacaggtcaagttgatgcagtggattcttcagataaataatgtgacaattcttagctggtaagatataggccttatagtacatatagagcttgaaatgattatattgatagtaccttcatctttccaataactgtgcaggttcttaacaatgggtggtttgacgattgtgtcaacatggctgagccaagcagctactgaagagcaaacaactgttattcttgtcattttcaaggttcttatttttgtcatctgagcatgtaatatgtctatggcatgtattttgaactaccgtctgattg

SEQ ID NO: 4830 - DNA, 443 bp, Avena sativa
gcaggcacaacacagtttactggtccaactgggttctagtaggtagcaacctctagagatcaggtgcaatgagatcaggtgcaagacaatggcttttccctgaacagttaatttgccagtggtagcctccgagtgcttgtccctgcaactccctgaacaggcagagaacaggcagagggagttgcagggacaatggcttttccctgaacaggtgcaggaacgaactagagcttgaccattttatgaccatatcttgccatagttacttgaagtacagttaatttgaccattgacgcttaacaagactccatatcagatacagaacaagaaccaaaaggaaaaccaacgccaaaactgcaaactgaacttccaggcttcaactacttgctcaagattgaaacttccgcaacacacgctcttgcttcagccacaacacctgcact

SEQ ID NO: 4831 - DNA, 359 bp, Avena sativa
agtgcagtacaagtcaacccttgtgcaaatcttatacttggctgatatgagccgccccaatgcccagtaggctgctacattttccaactccattagtgtccaatcatgccgttgcttcgtcagagttatactaaccatgaagcttccctgtgattgagacccaagctgttgcctgcaactgcaatgctactcatcagtttcttgtttagtccctcccagctgtccatgttcacctgagtactacgctgtgctggatggtcaacgaaggaaccgcactcaccggcgtgtgcgctgacgtggcacctgttttgtgttttgtcgtgcagtcggaggtgaactttctgggcaggctgcactgg

SEQ ID NO: 4832 - DNA, 369 bp, Avena sativa
  modified_base (351)..(351): a, c, t, g, unknown or other
gatggatctagtgcagtagtaaataaataattaagcaacactgaactttttgacagtctaatcacgagtaagagaatcggtgcaatatattgacagtctcattaccggaattttgaggacagagcattaacgatgatgctccaagtccaggacattgcagaagctcgttgtacatcaaattctgattaaaaacagcagtaagatagctgaatggaacatttcagtcaagatacatggcatacgaatcacatcaagcaatattgtcttcattgatggagcaggaggtaatcccccaccctctccgtaaggccgtattcactagtgtggttttgcgttagattgaaagggttntttcaattctcgcaaaat

SEQ ID NO: 4833 - DNA, 399 bp, Avena sativa
gatggattcagtgcagttccatatcgtgacgtcgtggatgatgacattgctcacgttttacagcatgaagcacgcaccgccctcaccaaccgcgacgcgggcatcgcgtcgtggccgtccacggtcttgtgcagggtcaccaggagcccctgcttgggccggatcattatgtcccaggcaaagacgatacagagaggcttgtcctggtggaggctgtacgtgctggagcgtggcatcgctaggtcattgtcgctgggacttgtcaccacgtataccttgccatccctgccgccgatggcgttgcggccggccaaaccctatggcgcagtcggcgaggcagtgccggttcttggaccagctcgggtcgcgccgggagccgtcgtccgaccgggttgcctg

SEQ ID NO: 4834 - DNA, 510 bp, Avena sativa
ctaactcccgcagggacatcacgatacagtgaagggaggcgcaccggccagcggagcagcgacccaaatcgttgggagcccgacgggaaaaaaccgtagtcggcggatgacggagcttcgcggatgaatatccagatgactatcgctcgggtagggccgagaccgtagtcggcgaatggcggcggctggccggaaaacctaggacggagatgcttgcacggagagttgtggtgcccagaaaaaccacgtgagttttccaatataatcgttgtgtgctgcatggtgcataacatagtgatagacatggagggtaaagctgtggaggaggattacgtaccaaacagttgcgacgtgaagtatagtcaggaagctgcggaggaggaatacataccagatgagaattctgtcaggataagggatctactgtcgcagcacttggctagtaggccatcgggatgtgtaggtattaacacacagtttccatcttaattttgtttgattaccctgtac

SEQ ID NO: 4835 - DNA, 330 bp, Avena sativa
tgcagacgctttacgccgagtggtagtagtagtaagtaccgagagagagagaaaactttattaagcactaacgaacaacttatcaacttatcgtcttaaacaactgatcatggccctgtagtaacacctaacttcccaaccgattgttgcattgaatttagctttctagaataggtatgtaattggaccttgaaaattgaattgtcatgtcttgtaagtaagtacatatccattaacttcattatgttttcatgtagtagtgctgaatttcaagagaagcctctgttcccaatgcagatctagttaaggtacccatttatcagtccatag

SEQ ID NO: 4836 - DNA, 402 bp, Avena sativa
actagtaagtgcttaaccatttctttattcccatcatcgtcaagatcttccatggaaggcaacgaatccatatagatgaagtgaagcaatgccttgaaaacagcaggctgcatgtcttcaacagttatatcgtgcctccacttgtctctcatcggtccactagtaccgctgtgccttgaagaccggtgaccgcgcagcaagcacgatcttgtgtgcaggaaaaacctcccctttaaccttgaatgccacatctgcctcctcccctgtctttagcagatttccaatgttatcagacaagtttgatggtggtacctggacctccacagtttcatcaacaagtggctccttgatcacagtgaggtcgcactcaatcacgaggcagtcatcctgcactggaccatc

SEQ ID NO: 4837 - DNA, 390 bp, Avena sativa
agtaacctaatattatatattttacaaagacaaatttattatttgttggcccgttgcagcgcacgggtattgtgctagtggtaactagaacgagtcacgtgcatggggatgcaaacccatggcttctgtttgtaataactgcttcaagtgtagaattagtaggatttaggatgatatccccattctagatttactggtaggagaaagttaagggcttcagggttacaagattgggtttgggatactccgccatagatctgctgcttgaggaaaggtatgtatttcaggattaggctaagtacaatgcataagcacttaatcagacgcttaaggaaaacaattaatgggataagacgtagaagcctctctctctccatcgctgctcgcaat

SEQ ID NO: 4838 - DNA, 382 bp, Avena sativa
cagtgcagttccctcatcaccatcagaagcttgcatctcgtcagttgtttcatcaccatcagaagtttctccgcattctctttcctggcgaccactgttctcagtttcagaaggctgcatgacttgcaccgctccatctttatcagatgctcgtccagactttcttttcttaaaaacatgactgtcctgatcgctgtcttcgtcggtaggaacttcattggtgtcatccaaggcagctggagattgacttgcacaagcaccgttctcaatgcgggctgcttgagtactggactctctggtatcaccggttgattggggatccttgaaagccaatgtatttagagaaccatcattggtggcgccaagtagcatctgcactgga

SEQ ID NO: 4839 - DNA, 219 bp, Avena sativa
atgtaagggcagattatcatgtagatctacataaaggtagcatgagaggtcttaatctttattacttactcaagtagaagactaggtttgagtaaacagaagattttgttttgcttgacataaattgcgcagaggtatgcaggttaccttttccaacgaacggccttgatagattgcctcaggcgtgctttctttctccttcatttttactgcccttac

SEQ ID NO: 4840 - DNA, 262 bp, Avena sativa
ctatatggatcctataaaagcttccaggatgaatgtaagatgctaagaagagtaaggcactgatgccttgtaaaagatcatcacatgctattaagcatcaaccaccaaggtcaagacttcagagcagcactagtccatcggatatgttgctctaggcaacttgaatgtgatgatctaattagcacatgatgacgtctaattagctatgttcacgaaataacttttgtgcttacctgtttatgcttcaaaatgtttcaatcta

SEQ ID NO: 4841 - DNA, 315 bp, Avena sativa
gatggattcagtgcagctcgcctatctgcgcctggcctaggagtggagtttgggtcagcacctggccatgttatgagagcgctgtttcagggcttgtttctcgctccgcaaatggttggagaggcggtaaaagtaggttgcttatcagttcttgcctctttgagaaaattctgcatgcagtttcaagtgacagtcttgtaccgtccgcagggaggtttgctaattgcagaggtcatgtcagccaagggatatagagttcaaccactcccaagggtcccacgccatgatattgtccaggttgccttaagttacaca

SEQ ID NO: 4842 - DNA, 267 bp, Avena sativa
agcaatgagcaccattaagcccaccaaaatggataacgtctcaaatgtctaaccttacaattttccttgccaacatttctggatttcttaacttggaacacctctgtaacacgagtgttgatatacttggatatttttggctgttctgggttccgaagcccattgcttggcctagatccatatgttaagtatcaaattccttatatcaaagcaaaagaaaacatcaatatgcataattagagcagacttgcctatcaaatgctgcac

SEQ ID NO: 4843 - DNA, 327 bp, Avena sativa
catatatagacacctagcacaatcaaggttattgagtcgtcacataaatgtcattagggcatccagcctcttcacttgaccggatatttcctatcctgtccacattctgagtcagtttgtttctgctcccacttcggttcactgtagtcaccttctacgtattctaagatatgttcgtggcacaatttctcgtcgtcttttctttcctcgttacaacttcaggcctaattggatgctacgtgggctagtgatcatttggatcgccgttcaatttcttcttacagcatttttctggtggttgtgtcattgtctagaagacaaagacca

SEQ ID NO: 4844 - DNA, 364 bp, Avena sativa
ttgagcattaaattcagatacagcaccaacaggatttcctgccagaacaagaataagtattgacaagcatgcaatatcccacaggtaagttaacaaaaaagctcaagtgctccgaagggcaaaattaagtcatgtttatggaaagagtcaaggtgctaacaaaaatacctaatcaggaataactaattaatgtaacaggatatgcattggcagtgggtaaaacagtaacaggagtacatacaagactcccaagggacatgaaatggatacatggataatactaatacataaatataggggacacttcatttgcctgtcatttccatgatttgtcaacaaattaagattggcgcatccacgagtt

SEQ ID NO: 4845 - DNA, 367 bp, Avena sativa
gtctaaaatctgaaaaggaagatcctttcgttgcggcgcaagccttgttgggccagacagtgtttcgcaaagagttccactcggccgaggcggtgagggagtataccctctctaggtcagagacaacacggattgtggacctgtagggagaagagagtcaggagaccttagtggacgtaccagtccagggtacccattatgccaataccggggttcctccaagaccatgttggcatcccatcgtggaaactagctccttaaacaggatgccaatacgactttctttcatgccattcccaatggtagaaggaggaaatgtgccacgagattaatggccgattaggggaccatccctgaccctcgggag

SEQ ID NO: 4846 - DNA, 298 bp, Avena sativa
gaaggtcaggcccggcatggtccaaccctttgaagccgtcagccaaatgtgtgaccgtatttccggtgtacaaaaaatgtataaggataaatttaacactaacttagcttaaaaggggttaaatgtggcagaaaccattaatgtgagtttagggtgaaattcgctcttgagaaaaaagttgatgctttaggagcagctgggttgaactgggccaattaagaaatagtataacttggctacttaggaacctctatagcgtttggaaaatctataccgtccaagcaaaaaatctaagggt

SEQ ID NO: 4847 - DNA, 335 bp, Avena sativa
atcacacttactaccagttgaggtttgaggacctataactaccggttaatatgctagtactactgctatataaccaactctcagacatgcttccatatatgcttctaataacactgctgctagtagtaagtggatagatagctaggacagtgacgccagtactcttttggagcagttgtaggctgacctcacatgaaccttgcagggtaataaggggagctgctgagggtgagctccagggaggtgcctgcgtcctggctggtgggcatcatcagctgctgctggttgctgctgctgctgtaatagctgtactgctgatcttggagctgttgctg

SEQ ID NO: 4848 - DNA, 568 bp, Avena sativa
tcagatgttatctgatgcaaatgactgacatgaatacattatgtgcgttgtgtgtctttgctactgggtttatcatcactagttactgcttatttgatcattgcaaatgagtaaattgaaatagaatgcgttctttttccctgcaatttgcatttcttagtttgtccgggggtttcatggcctagctagcgctggcactaacacaattcatcagctttacgcaagttgtaaagccatgaatgaacggaccaggctaacagcctggcttcattctattaacacttaacagacatcatcggctgcttaaaaagagaataagcagtaactgtacaaatcttctcttgccatcataatttggcgaccgatacaatgactatacaaaacacttgactatcagcaaaaacaaccttctccgtgagctctatcaccatgacatcttctaagttccaaccccataacagatccatgtgtgcgcaggcctgaagaatggaatcagctttacatcacccatccaactgttaatgtagccaaatgccaccctcctacccaaaagaatcatacctattcc

SEQ ID NO: 4849 - DNA, 461 bp, Avena sativa
cacacatcaagacagaaagctgttcggtcacaagcacttgccagcttactcaggaatcagaaaatcaaaattgttctgtataacaggttactcactggattttactgcctcgccctatgtataatcacttagatagcctaaattcatctcagcatcatcggcaagagtgccatcatccaatacatcatctgaatcttcgcttggatcactgaaatctgaaaatcctatgggttacttcagagtagattgttggatgatttcatatcttcagtacactgtgtgttgatgtaaatatgccacactgatcttctaggaaccaaaacagagccagccggtgcatcacataatgtaaaggaaataatactttagccatgcgcaagcctgacatagcaagtttggttaagcttggggtagcatatcagataccaagtctctaagtaagttatgagctagaggaaaat

SEQ ID NO: 4850 - DNA, 397 bp, Avena sativa
gttggatctcggagatgtgtcctccaggatctcggtgccagtgattccacagccaggggctatcattggtctcgcatttgtaagtatagtggaatcattacttatttgagagtatttgaaaggacattagcaaagccactgtggtaaatggtaaatgttgtagccaatcatttatgtaaacatgttcactactttaagcaaagagaatgttgatacttaccgaaataaggttcactgcgtcttcacttgctgagggaaccacttccgcaagatgtatgctttcagactgttgagacatgtagaagttaaacatcaattgctcctaatatctgaattagagaaaaggttactaaatgattctacctgaggaaactgaaaattgatagatgctgcaagt

SEQ ID NO: 4851 - DNA, 258 bp, Avena sativa
tacagtacagtacagtacgtgcatggagtgtcttactttccaacacgtacagtgtatacatacgcgtaactacttctaccatgatgattacgctgtacaatggcagtaagcgttgcagcaacccaaaacccttcccgtgctccggacaaaatcatcagcaaccaattagctagcacctcagaaaaaagacacgactggcttagctactccagactatgctatagcctccaatacaggttgagaactacaatttgccgg

SEQ ID NO: 4852 - DNA, 543 bp, Avena sativa
gacagattattacagtcatgtggagtgtgggcaaataaactgcactgtgttaaacattgctacaatagagtccataagaagtacatcataaaatgtacactctccgaggtgcctaagggagtggggaagatccagttcttgttcttcctctccttctggcatagaaacaacaacatgccaactgcaaaaggcaactatgctactcaacaactgaagtgatcaattctggaagtatgaaatatacctactaaagaaggaacttgattaaacagttctgcagttatagtgctatagctggcacacacacaaaataacacatcatgcaagaacagtggatgaacacaatgtaccaagttcagtgaccagctatactgatggcataggtcactgaagcatgagcatcttttgtacaaaggaaaccttaatggcattaatatggacacagaacctttcagcatagctatgatggtctagattttcagttactgcatgctctgtaaaaacgacagcaacacctctaaagcggatgcatattatcaacag

SEQ ID NO: 4853 - DNA, 410 bp, Avena sativa
ccagtgcagcattaataccacctgaatggcgcaggacaatacaaaatttgaaggttctttctttgtacccaacacaaaatgaagggaaacgaggtggagtatattagtccaaaattaaaagctatcacgaggaatattgaaaaccacattgttctccaaatagctcacaatgaacacgtcacccattcacacttgatcctgtcaatacaaaatctctctacatctacagtttgattgctacactattggcttgctactttctagattcaccatgatcataaagagtggcaacagcctctaggcactagagccgtccatggtcaaacttttcattggcagatgaactcgttgccgttgcgattttccaccctgaccatctcctctgcctcaatatctgcactgaatccatc

SEQ ID NO: 4854 - DNA, 263 bp, Avena sativa
ttcctagcggtgcagtggtcggagactttgtagccagccatatatacggaagttaccagtgacagttcctagcggtgcagccatcaattttatgaaaaaaaatgttttatgtgccacaagattatacatttgactcacattccgaaaccaaaactataatgcatgtccttatggagttttacaatctttggagtatgtatatttaaatgttggtggtgtcttaaacacagcaacccacattcgttagtgttctagatttggtt

SEQ ID NO: 4855 - DNA, 286 bp, Avena sativa
gatggatcaagtgcagaggtaactaacgctgaggtgacaaagccagatctggataacggagttgctgaacaaagcactctgacagggaagaaagattgtggccatgctgagtgcaaggaagctgagattgatgattggttgcttcagtttgcagagctgttccgaaaccaggttgggattgatgctgatgcacatctggaccttcatgaattgggaatggagctgtgttccgaagcgcttgaggaaacggtgaccagcgaggaggcccaatccttttttgagatgg

SEQ ID NO: 4856 - DNA, 322 bp, Avena sativa
tgcggattgcaattggtacaggagaggagccaaaaccgccatgagtgatctcgtccatccaattcaatccaacgttccaccatatcacttgacaccggcacccttcgccaatcgcgttttcgcccctcacctgccctttcgccaatcgcgttttcgcctctcacctgataccgccttttccctcccgttaggtttttcctttccctccgtctccgacggcgctctctcgctcctccctatctgctgcttccgttaatggtggagaagaaagcccgattttcggccctcttgtagttcgggaagcggaggatccgaggggacc

SEQ ID NO: 4857 - DNA, 460 bp, Avena sativa
gaggagacgcacatgggaatgggattaccgggacaggccagcttgatgcagaaaaacaggggtttgcatgcttaattagcagtacctcccagactgtttgtggagcagcaccatctccagtgaactggagaccagactgctcaccacttagttagctgtacttccttctctttctgcgtcaacatctgcatgttgtgtgcgtcaagtcatcaactaaatcgcatgcatgcgattgggccttgttgtcactgtgtctatgtgcaataatcaatgattctagttggcgctgatgtagcctctgccactttcacaatttctatggattattgctgattaccctaactgattccagagctggcagagaggtcagtaaatggtctatctctataagactatacctctatacagccggcagctcaacaaggaaactacttacggttacagtagctaactagactgc

SEQ ID NO: 4858 - DNA, 390 bp, Avena sativa
taaaggatgctatagcgcacagtaaaatatcttgtgctaattaaaaccagggaaaccgaagggttcacgatattttggttgtatccagacatgttcatagaaaattatgaggaaatatactgcataggagaataagactagcgctctttcttttcttctacatacaaacctcaaaaaatttctcggccctctcgtcgcttaatttgccacatctctttatccaattcctgcaaaccaatcgcattcttccagagacgtaaagcaatctccctcaaattcttcgtcctgcctttgttcgtttccaattcttgttgccatcttcatctgatgaaacatctcccttttttccttgcgctgaagtttctgtctctttcgctcttcttgtttcct

SEQ ID NO: 4859 - DNA, 481 bp, Avena sativa
atataaatgattgttccacaaagtcaggctccagctatgatgatgcccgtttgtttggttatgtgaaaggtcttgacaaaatcttcatgaaactttccaaggctttacgcaccaaatgcgattgttatgtttctgatatcatagtcagagaagatgataaggcctatgcaagcatgattgcagaggttctggttcctgagtttaaggaagaaattgggctccctgaggttgaggttgaggttgaacatctgacaaaatttgttaataatatagaatgcattactaatacttgtaataattggatctggagtgatttgatagataaaacgtgttttgttttctacagattgctggtggtttgggaccaaagctaatggatctgcgtagagatgcgggaaaagatattgctaattgtgacaaacaagaaatcctgaagtccctgaaaaggctttcagatgtttgcaaagagaaagagtgtgca

SEQ ID NO: 4860 - DNA, 381 bp, Avena sativa
ccagtgcaggatgcccagggctggagtctctcatggagatcatcctgtaggctgacgacactcaccaacgcaaaagttcagcttcatggacattgacgtagctcaagtttcccctggaagcaagtttaagtgctgtttttttctttatgttttagactgcgggatagcacgaaatagtctgccgttcttgcctggatatgccctggtgttggtgttgcaacacgcagcatagttcgtgaatttgctcactgagtttgtttgcttgcttttgctggcagatgcatttgagctggtaattacattagtccgtatggacctattaccataaccatctatagctctcctttacgtttggtgtacacaagctgcactgaatccatc

SEQ ID NO: 4861 - DNA, 631 bp, Avena sativa
gtccctggcggcggttgtgagcgcgagcacgagctgcgcgtgtctcatcctcaccggcaacgtgccgctcggcctgccgatcaaccggacactcgccatcacgctgcccaaggcctgcaactccatgtccgtcccgcttcagtgcataggtaccttcttcaatccaaccccgttccagtccagaacacggctgacaatttcttggcgttttgagtaagatcaaatcaaacacgtactgtaaccttaccattgtgacaaattgggtctgcagatacgtcggctcaactcccagctccaggccccgtcgcagtctctcctgcgttgcccccgctgcgtaagaattagaacctcctctggcttaattagcctgcttctatacatgctcgtccctgtcggcattaattctcaccgatgaaacgttatggaatctgtcaaacttgcagcgccaatgacgccggagtcgccagctccgacggcggagcccaccgtgaccacgccgccgagcagccagagccaggggcagacgaaaccgcaggttgtgcccagctctgcctggagggacagcgctggtgtgtccgtgatgattgccgtcgctggtgccatgctgggttgatcggatttgagtttgttg

SEQ ID NO: 4862 - DNA, 443 bp, Avena sativa
aagcatatccatgctgcgcgcgcgcccacacacgcacgcacacctatgtatgtatgcatctatgtatgtatgtatgtatatatgtatgtatgtatgtatgtatgtatgtaatcttccattgttgatctattagctgctgaattttttaaccagagaccttgtggaaatgcgttattgtcttttcttgaccagaacaatgaaagcttctgtaggctatagctggaccaaagccaatgcagagccgtcagggggcgtactacatgtagtaattctaccataattgccgcttgtacgctggaggtgccaactaaatggtgatgcagttagtaattgtcctgcggctgaatccagcaattgttacaggaggtacataagttctgcaacccctaaattcagtgaagttggagcttaccatgattcaggtttctttgcagactttgccg

SEQ ID NO: 4863 - DNA, 570 bp, Avena sativa
ttccaggagttaacatggaagatgtagatgataatgaaccaatacgtaagaaggaccatcgccgtgttccaagtactattgccatggaggaagtcaaggtgcgactcacatgaaattgtttttagctctgacgtcattggagccatctcatggggtttgctgtgctgtctcctaatagtatcctcgtacatgatgctatacttcaggcacttctggttatcggctgttattatctgtgttggtattcttcttcctaccggcctgtatattttgaggcagagaaagctggctaagaagagagagaggagattattgttgcctctctccatgtaaggttgtttggtagtgataggtttcccttatattgtggttattcttgactaaacggaatccacattcttggcttgtttagcacacatctgacagttcataggcctctgctgcccagtatacgtctatatactttagtattttctaaagtgctggaagaaataccatcatttttgcgctccagtgttgtgcgagtagataatctccaatgtccgtgttctctgctgcactagatccatc

SEQ ID NO: 4864 - DNA, 319 bp, Avena sativa
agtgcaggccggggctcatcggttgccgaagaagagaagaccgggctgctgctagatagcttcaagacatcagtcgtctcgcgcaccgacgaaaagatcaatgtgagattgtaaactccgctaaggcgtgttaagctgaagttgtccatatctgtaaacaaagttctttaagtttcccggtcacgtcagtttatacagacttttctcttcaacttaagtagtaggactgtaggacacatagtgacacagagctgctttgaggtgagtgtgtacttgatccatctgatgctgggaatgcgctgtctgcactggctccatc

SEQ ID NO: 4865 - DNA, 469 bp, Avena sativa
gatggactccagtgcagctggggcatcgtcggtgtgttgtccgtggtggtgcgccgggctggcaccaccctggcttgtctccctctcccagcctggtccgcgtcgggcagacccgaccgaccggttggtgactggcgaatgatgaagattccaagtatacgtttgattggccttcgtttcctagttcctagtacgacgtgaaacgtgttcaacgaggtaaaaaaaagagatggcccgtcttcttggctgacttgcacgggtccccgtcacaaatcccatccacacggcacggacgatggatccaccggcctcatcggtcgctcttccatggtcgtcgccgtcaccatttccacgtgcaccgtcttgactcgccgcctcgccgcgtctggcacacgcagcccacgtctccaggaccaatgggctctgcacggggcctacttatccagccttggatgaggccgtctctttt

SEQ ID NO: 4866 - DNA, 453 bp, Avena sativa
cttaagcctctcacttccataaattgtcatgctatcagctctcaccgtgtcatatgacaccatgctaaactgtggctggagattcttaacaaacttctggaagcccagatcatccacaattgaaaaccggtagccatgctggacaatcatacgtgcaaggtcttgccggctgagttcttgatcaaagtgtgtggtatcgttgtcatgatcatcaccagatgcaaccccatcgccgggccgcccagtggaggttttattgttgaggatacggcgtacaataagcttccgacgcttaccagcacggcgcgtagaggtggtggtgcagattgcgaggtggttgcgtaggtgtgtggtgcctgaccggctagttgctgtgagctgcttcttgcagtggttacagatggcgacacaattgccatcggcacggcgctccttggtgaagtcctgccaaaa

SEQ ID NO: 4867 - DNA, 378 bp, Avena sativa
aacgacttcatctattgctgggatgctgttgggtgatgatgtcgcatcatcctccgtggtagcagaaggaataacaagagaacctgttactgcaagagaagaggaagatcagacatcagttcaaccaccagaagcatcagaaacagcaatagatgaagtcgttagtggcggttgcacgagcacatgcctacaaacatcaagagttagatggtcatcaagcaagagcagcaccgatgattccttaggatccagcagctggttgtccaagttgatgcaaagtttcggactccattgtggaaataattatggtgttgaggttgtggcaggagttgggaccctaacagccttacgtactattggtgacgtgaatgtaagtgc

SEQ ID NO: 4868 - DNA, 403 bp, Avena sativa
gatggatctagtgcagatacttgggagccttcagattgggtaccgccagacattgtgggaaactgcatatgatggacagtcaagtgagaccaatggacaaattctggagttcaatcaatgcatcatgataagaattacagaaaaatagcaaacaatagtcatcaagtattagaaaaaaacatttgcttttgacagtatcaaagtgcaactaacatatgcacattggttcctagagatctaacaagacttgccacaacacaaaacaaattagattgtccatgcaattgtgtgagttgatgcatcaagaaggaaatacatgacagttatccttcaatagacacagcaacacaaaattaatgttggtgagcttactgaccattcacacaggtattgctgccatggt

SEQ ID NO: 4869 - DNA, 471 bp, Avena sativa
gagacgccgtcggcggacatgctcgctggcccgcccggggagaaccccatagtgacatcgcttggcccgcctaggcccagtgggatgaacttgttggtaccgctgaagccggaaggagaggcgccgaggctggagagcatgcagccgagcgggttgtcggcggtgtcgtcggagaacatcctgaggtgcgggctcttgatgtctggcgcaaagacagaggcctcgtcgggggcgacggcgtcggtgtccatgatgtccacttcgtcgtcggcggtctggatgggcgacagcagcatgaggtggtggtgagcctgctggccctggagcgccgaggccaccgtggccatgctcatggcgggctgcggcagcttgttgttttcctgcgccagcgcgtcgcagaatgcccggtgcgtcacgaagctgtctctcctgcgcacgaaccaagaaggaaacatgaattcagtctgatcg

SEQ ID NO: 4870 - DNA, 375 bp, Avena sativa
gatggtccagtgcagtgaatgcaagtcctgaggaacttgagagttggagatggtacttggccacagttaggtctcttccccagtcaaatgaacctgagattttgcaggtaactatccctgattccacttcttacctagcaggggcagaccttttagtttatgttttgcacggtgtcctttacacctgtgtactgagttgtgcaatgctttgcatcttcaatgtagacaatccaagatgaaatggtcagtgccatgcgcgaagataggagcctgggttgctctgaacttagcaggtatggttcggtcctggtgctgttttcgcaattatgtggaagcttatgaactatctacccaactgactttgctcgtgctgat

SEQ ID NO: 4871 - DNA, 403 bp, Avena sativa
tccagtgcagtggagccccatttcaagtgcccaaatggagcacatttcctgtgaaattcacacccaattatgtgcactgttttggtaatgccattgtggatgccatctttgcattgcatatggtgagatgctgctggatgcagcagtagcactgaaaggctgaaggtttggccattgtttatagagccaagggaaaaaagggttttctgcaagtggatgtgtagatcagtgagtggtgttccactcagatgcactgcacttgcatgcatgcatgggttacaacattggtttgtgacaatctccttggggagagtggttgtaacttgtgtaacatctgcttctgttcttgagaaatgggatcagattgcattttgtgtatgtatgtatctgcactgaatccatc

SEQ ID NO: 4872 - DNA, 524 bp, Avena sativa
aggtccaggggttcggcgtaattatccaccaacgttgacaacttggtatcggattcaggaccatcctcctgctccatgtcttccagcactgacatctgtggaagataagcttgggaaaattcaggaatccttgctggctctgtgcaacacgcagactatcatgtgtgatgaccagaagaaacttgctgccgacagaaggctctctctgtcaaggttcaaggttgacagcctcttcggtactgtgcacgacattgatcagcagacgcacgcacacaagattcccaagatggagaacggagaccaccctggcgctcctgtaaccctagcgcttgcaaggatggcatcctgccatcctctggcctgccgctgttgcccagcaacaacacagagttcccgagctatgatggcaaggttgcctctagacccttaagggaaatcaataaagaatcagatctattatcccctcccacgttatttcttccctgcctctattgtgtagcagcccctccacggctggagtcatg

SEQ ID NO: 4873 - DNA, 406 bp, Avena sativa
gtactacctgcccctcttcggctcctcagggaacctcctccgggtgcttgagcgcggcacctacctcgtcggctctaaccttgagaaggtggtcaagcccaacgtcttgttcctacggcagtgcggcctaatggattgcgatattgccaagatctgcgtctctaggtcaaggatcctgactgccaaacccggacgcgtccaagcaatggtggcgtgcgccgaaagtataggtgtgccctgtggctctggaatgttcatgcgagcgctgcgggctgtcgcattcctcagtgaggattatatcgccaccaaagtgaagtacttgaagaagatctttaggtggtcagatgctgaagtcagacatgctgtatctaagtatccacatgtggtgccgagtggagaggacatg

SEQ ID NO: 4874 - DNA, 445 bp, Avena sativa
gatggtccagtgcagtcacattctaattctatcagtaaatctcagagaaacatttgcattctgcaatagatgaaagatgcaactcatcatcagcggcatttgcttagcaagcactgacaagacaccaccgagttgcccatagtttccttgaactaaaatatcttgcagcatgtacaaaagagaaccaactctttatacaatctatggcttacccccaaatacagaagcaagtggcaggggacaacatcaagaccaaacacagtgtcacaatgcatggaagtattccttcatctttggtgtctagtcaaaactacctccctatactatcagtacatttctatgtcaccatccaggatttttcctgccatgtaggctagagaatactagcatggtttgttcactggcggtaaaggatgtaccagggcttaggatcacgcatgaggtt

SEQ ID NO: 4875 - DNA, 325 bp, Avena sativa
gtgcagatgatttaagactggaaattgcatagaaaacccgaaagagggtggccctattgcacatgaacataacatccaagtgcatctggagcccatgcatctcatcagtcatcagcaaatatgagcaatttagtaacacaatgctgctgcaaactcaagtctgaatcatcaatggcaattgaacatcacacatcccattccaatgtcagatttggaattcattgttctctactacactgaattcaaaatctgaacaaaaaagaagggaggttcttttaagctgcaagtgtaactcaaaccttggatcacttctccggcgctggag

SEQ ID NO: 4876 - DNA, 451 bp, Avena sativa
ccactggtgatggcattatgtgcatctgattgccctcttatggtgaaacaaggagcatccctttgtcctccagtttctggaagagttcaccttttctgccaacctgcttttagtttttaccgtgtacaactgtgcattagcttgaaggggatagcataaatgatatacccagttattggacatttttatgtagtatatggttgaattgtttggtggtgtcaatttaagtgttgtaagcgtcctctagctacaccgaagtaacactgtcatggctatcacttgtatctatttcaagggccatgttacttaagttgccctcatgtattttcaggaaagcgtggaatgggaacataagagcaaagtgcctgggaagatgcacggatgtggccatgatgcacatgttgctatgcaattgggttctgctaagattcttcaggagcaccgtgatgag

SEQ ID NO: 4877 - DNA, 658 bp, Avena sativa
cccaccagctgcctgcctgcgtgccctccacacagctcccgccgcgtcatggccggcggtaaggcaaagggtacgcctccgcgctaaaaaaacaaacgcaggtctcgctgctttcctttccgtgtacacactccaaccacgcggccacggccccggccccggccccctcctgtcctgcacaaggtttccccggccaccgaccgaaaactaggcggagacgccatctctggaacagaaaaaaattacacgagaaacgtttcagagaacacagcagggttctgcgctcctttgaaatatgcactaattgtttgaaacttgagaaaaactcaggattaagagtacagggttgggttccttttattggaagtttgaaacatttttgcttctaatccttgcaatgctactttacattggagaatatagagttacttggtggggaatttagctgcgcccttgattccatgaatggtattcttgaccccatacatcaaaattgacaccttgctgctatgatctactcgttgaaacgctttaatgtagacaagcggcatactagattattcctgggacagttgagcatgctcgcaataatctttcttgataataaggatttattccatttcccaattgattttgaacatggagacatatatgcgtg

SEQ ID NO: 4878 - DNA, 437 bp, Avena sativa
gtgcagggtgtagttgttggagagcagagcagaggtgtctgctcgccattgttggtcaagctgagtagtgcagtctgtatgcagtacctaccttggtgcgccggagtgagtgtgacgctggagggagggagggagtgtgcgatatcccttgtgaaacaagattgccattttgcgtttgaagttcagatagtcaatttttgaagaaaaaaattacagtactcacatcaaagtgctcgttgcggagagggtagttgatgtccgtcgcagtccagcaggattcagaaataaaatctctatacaccggggcagcggcgctggacgcctctgtgagtggcgaggcggctgttaccgatgcggtgtggatgacgcgcttcaccgtcttggattcctcgcatagccggaggatgacgcgcgccgcatcggcggctgcttccgct

SEQ ID NO: 4879 - DNA, 383 bp, Avena sativa
caagtatccgggtgcagtcttggaagtttgatatccaggatgtcccttgcctctgtccagaacaattgcaccgtttgtgattatgaccgaggaggacatgagatagtaggtggaaaccgcataccacagtacaacattctataccatgttacatgtttcctaaagttaaatcatatgaatcctgcttattgacgccactagcctatacttgtgcatcagtgcattgcgaagctaacagcacataagaaaagggagtcttattttttattactgcaaggaggataaaaatcttaaaccgaggtttcttaacatacatcgcgccgcagctggttgagcccgccatagcaatatatccggatgtacccattcctcgtcggcggagc

SEQ ID NO: 4880 - DNA, 400 bp, Avena sativa
cagaagatgcattcgtctttcgccggtatatgccttctccgcaactaaacccagtaggtaaacaatcatggacaatcctccataagacgatcttcatcttacccgggcctgtatcgcccaaagtgatttccactcttttatccgatcaacagtatctaaattactacggccaccagatgtgccactagaagtgtagaacgatccagttcttgctagattatacgccgaactgatagaatatataccaaattttgcatgtggccaggatacaaaattaaattcaccatgtctactgattggtatttgttggataattgacgccatagcattgacattgtccgttcttgatcaatcagactgagatcatcaatatcgccaatgaccatcgcagtagattcaa

SEQ ID NO: 4881 - DNA, 303 bp, Avena sativa
gtgcagcgtcatcgcacatttcctggccagatctagctctttgtactgttacttcaggaaagtgtttagtggtgttcatgtcctgctgaatctgtaacggtctggtaaataggtgtaactagatcacgttggtttctgaaattaaatggagggtttgctctgaacttgttgatgattgtcaggtgtgccgttcgggaagaactcgcgtgagccgaggtaccgcatggagttccacactattggctcgccgtaccacccggtgagtatcctgatgatttctccttctgttctttatctcgcact

SEQ ID NO: 4882 - DNA, 404 bp, Avena sativa
gcaattttatgtggcaatcacatggtcatattgtgaaggtatagtgctacgtccttcccaaatcaaccaacagagtatgattcagatcctggttggcctactataaaaatttagtaaagaggcctaaatgtgcaactctcaagttcagggaccaaactggcttacatgacaaatttagtgacatatggtgcaacttcacctacataggcacaagtaggcctttaaatagaagctgtgttacacgaagggtgccaaaaactttaaccaatactaggaaagcatgtcgtatgatccattgcaagctcaggtggcagcttcaagagtccagcgatattcatatgaaagcattacatgatcataatctgtctggcaataatgcaaccctgtcttcacataagttactg

SEQ ID NO: 4883 - DNA, 289 bp, Avena sativa
gcgattcctttgacctcctcagcatgaaaggagacctagagacagcaatgctcacctcggcatctgagaacctgaacgtcttcttcaagtagtccactctggcagcgatctccttctcgctgaggaatgcgacagcttgcaaggcatatctgagcatcccagaactgcggggcacacctagaccttcagcgcaggccaccatcgcccgtacacgctccgggttggtggccagcatccttgggacattaacgcacagcttggcaatatcacaatcaattagcccacgctc

SEQ ID NO: 4884 - DNA, 298 bp, Avena sativa
gcagggtggttcagtaggagggacatcgcccattctacagtgattgaagaagtccccgttcctgccgtgaataagttctgcacagattaatgaagagaatattagtgagacagtgtgttgcttgtgaatttcaactcaggagaaacaaaaacatatgcttgttaggcattgacaaaattgggttgcagaaatactaggcgagaagttataaaaatggaagtgaaagtgcagagaaagaacttacgaggcagagaccgatgatcattttatcggtgtagacctcaggctctttcttctg

SEQ ID NO: 4885 - DNA, 510 bp, Avena sativa
cgagtcagagcacaggggacgtggtggcagaaccgcacgacagagttttgggatagaggtgtggccgaccattgaagtaaccacatgacggcctagattatgctgagattagacgtgatcgcagagaatgctcggggattgcgtgtgcacgccaaaccgatggcacccacccaacagcagtagagatcaatcttccactgcattggcaagcaacgctcttgcacctctccgatttctgaacaggtattaaagcggaccaggccgcaacagtcaccggtgaggccaccgggtgcaaggactacagcggacaggcgcatcagaaactctcacaaggttggttcaccacccgtcaaacctatgccctgattcaataggtaagtaatcccaattccaaaacttacatgttctatcatctaaggctctatacagggccgaatgttcttggttcccacgcataactaaatttaaaggtttggatgtgtctatttgttttcatgacgtgataatgca

SEQ ID NO: 4886 - DNA, 245 bp, Avena sativa
gcattcgttccacatgtgtcttctcttgcacaagaaggctggttctgatcttgttgtagcttggagggacatagccacctaatttactattggcagcaaacatgaaagcttgcctaaaccaagggtttcttgcgaggttgaaaggcagacctacaacaaatacaatgaaaacacgggattgcttaaaatttaaaagaatctacgtaaaatgaaacatgttgcatgatgataacattttcacctgc

SEQ ID NO: 4887 - DNA, 461 bp, Avena sativa
aaactagagccggggcttattcacttgtccagcatggatactggcagcaggcgcaaaccctcttttaccaggcaatgatcaaagcaactcagggtacatacaataatactgtcccaaaggctgagatgtgtctttgggaagaacagtggttgtcttgtgcaagtcaattaggtcagtgggaagtattggctgattttggaaaaggtgtggagaattatgatattcttttagactgcctctggaaggtgcctgactggacatatatgaaggaaaatgtaattccgaaagctcaagttgaagagacaccaaagttacgtctgattcaagcattttttactcttcatgacaaaggtactaatggtgttggagaggctgagaacctcgtcagcaaaggtgttgaacttgcgctagaacagtggtggcagttacctgaaatgtctgtgcagtcccgaatgccttcg

SEQ ID NO: 4888 - DNA, 403 bp, Avena sativa
cagcagcagcagcagtagtttactgctggcaaatggtgttggtgattattgtggtgacccgcgcactcaaagtgcctccctccacaatgtggtgtggcagtgtggcacggccctaccatcttcctggcaagccacatgactttccagcacctagtgctgtccatttctgttagtttatggcctcggtttggttggattaggctgtgaaatgtccctgttctgcactagacaatctttcagttggtaaggcaacaatcctttgttattgttggccaattattttagcggttgctctgcctaaggtatcatcagctcttcaagttgacgtctgtgtctcccagatctgtcctgctgggttatctcagcacagctcctgatgtaaaatttgtgttgctagtatttt

SEQ ID NO: 4889 - DNA, 369 bp, Avena sativa
ttgcgaataattgatgcgttgtaagtactcttcagtcatcaatttgttaggattggttgctatcgtgaagtaagctccttatgactctccaacaaatatcatttgttaatttctgaatgctttgtctgtgtgcacatatgctgctatcatgaatgtctcagtctaccttttacttaaatgatggtcttctgaccttgtgtattattctggaattcaagaactcatttgcatgtacgtattgctagtgccagcgaaggtgaacaatgatttgtatactcggtttcagattttttttcttccctgaagtttgttttgcaatcctgttcccccagagaattatgaaacattttacctagtcaacttttttag

SEQ ID NO: 4890 - DNA, 348 bp, Avena sativa
ttttcacaacattcccgcatgcaatctacttctgcaacatatttgcttgtgttttgtttggtctgacaagttcatctcaccttcactatgctcaaacctctggttcatagagacatctgcatcctagcttagactttcatatcgcagttccaacttgtttcttctgctaatgcagtccttttcttctgtttttagctattggtggattggactaaaggaaagaatctcatcatttcaagtgctgctcataatgctaatgaaattagagggccctatgatgtcataaatctatgtgcatatttgcttggcctgtctacacagcgagccaaagctgcaacgtccgtaaaa

SEQ ID NO: 4891 - DNA, 347 bp, Avena sativa
tgaagacattgagagcgccaggagcgctaaaatagttggacaaaatacaagtatcaacaatcccagatataatggcaccacatgccgtctaggctaccttccacgaagctaagctcaccacgttgacgccattcaccacgccgtgaagctaagcaaatcaaatccatccacaatcgcatgatgaaagtatcctacactgttgttaccttgatgcactcggcagcagcaagtagatcgctcagttgcctcttcttaatcgtttcaacatgcctctactccacctctatgacaacaatggaaccaatgtgaatatgccaataacacatcatacctgcactgaatccatc

SEQ ID NO: 4892 - DNA, 535 bp, Avena sativa
gtgcattgttgttgtttgcaactttgctctttggaatgctaatgtagtttgccctttcgttgtgtttctactgcccctttacagagcgtttttcttttctgtagatgatatttaggctgggtattctgtgcatgattagaggcaaaggatagtatttgagtttggactaattctttacccatggtgacattgctagtatacggtcactagctttatgcataagaagcttcattactattgaactggactgtttaccaagtgaaatttatagtttcatgcaccaaatagagaagtaaccgccgcacgagtgaacctataaattttcatcggttactactatgtttacggttattatagttatccacatgtaaccgtctctgcctgtacttataattaaccctgtatgcatcttacttttttattgtacaccttgcatgtggtttatacagaatatcagcagaagtgctacttacattgctaatgcaagtttatttcgcccctcctgtatgatagtaatcaaacacctgtctctgca

SEQ ID NO: 4893 - DNA, 448 bp, Avena sativa
aattcatcaagtgaaacaaatgatggcgcattgttattaatctagtttcttatgcaacctaagattgctgaagtgctagttttctgtgtgcccaggttcctgattatgccatgtcttacgtcaaggggagatcacttgaggtgagtgcccctaatctgtttttccttattatttttttgtaacactgtccaattttaatagttgtggttaccatgatggttctgacaggccattcggacgtctttggtgggatgaaacagttccaacggttttgacaagagcaaagccgcacaaccaggtcagtatggacatatcgtggtgttttgcaaacaatgttttgctgatcctattttctttactctcgctgtaatggatctgaatgttccgcttgtagaaaatcttgcacccgggtcaagacagagtgctgtctgtccgtgagaatgcgaga

SEQ ID NO: 4894 - DNA, 473 bp, Avena sativa
ctaatgcagtggcctagaaaagattttatccttagccttgtggttcttttggggaatttatttaggtgtgttctagacaaaattgaagtaaatcaaagttcccttccgtgccttgcgtcttttgtttattgaaggttgctttgcttttaggcttcactgaagatcaccagtcctcttgcaattatctggaaatctttcagccttgttttctttgcggtaagttgattctcatgtacagaaatataatctgtcaaacactcatagctgtagaagcttggatgatcttgttaactcatgaataactggtttattacttgctgaaaatatctgtactattgcaggagtggggggatcgctctatgctggctacaattgcattaggtgccgcacaggtctgttctatgggtagaaatgtctcttgcttcttgatgtggtttagctttgtgtaagcataaaccagcctcttacttctg

SEQ ID NO: 4895 - DNA, 497 bp, Avena sativa
aacataaccgatggtatgcgagaaataactggcccgtttgtaccaatagagcccaagtggggtctgaaaaatgatggcccaattacaggacgccgtcgttcctaccggcgcgttgatcccgtgtaaggctacggtccccacttaggcctaccagaacattaaccgatggtacgtggagcgtcgggtcctccttctccctggcgcccaggcgtccaattgctgtcgttccgcacggttgggccaggggtggagcgtcccatgtagtctaggttctggcgtgggctatctttattcaatctttctcggttcgtttagctggctcatacaacgattgacaacgctcttctatttatattaatgcccttagtagaattatatgccaatttgtatttgtgccgaatttaatttgttatattgcggtgtgaagctgtttgaaccggttaaaaaggaccagtctcgttccacatgatcagtctctaacgagcactttggtagct

SEQ ID NO: 4896 - DNA, 492 bp, Avena sativa
gttaaggcgtgagcaaggtacgttcaaatgcggtcaaggattttcaaggaacatgtcagcaagacctcaattttggatgattttgcattttacgagaaccgacaaaagttgatgcaggaaaagagagcaaagcaacaagtgcttcaaggccaggcaagtgttatatccatatattagagcgctctggttgacaatttaagaacttcacgagcaccagttattgtatataggtcctgatgcatgcatgctatttacattgtccagggcggtgatgagaaggagaagaatgcagctaatgggaattccgcagcacaacaacaggcagtgagcaaggagagtgcagcccctgtttctggggatgagccgaacgcctccaaacccgctgctgaaaggggtgttgcgaatagcaactagcgcaatatatttcttacgcttattgctgtaacatggaacccatcgcgcaaaactcagcaggtctgcactagatccatc

SEQ ID NO: 4897 - DNA, 513 bp, Avena sativa
ctcactttttagctgcatgtgggtgttattgcttttcactttgttccatgttgatgattagttttagaatttacttgtgcccaagcatttatcagttgatgttttgggtttgctattggttactctattaaatttgtagaaatgtgctttcttggagcacagcctgcactggatccatcgatggatccagtgcagcgtgagggtacgcccaggtcgtgagcttgtgcttcacaagcacttctgtcactagcaacctcttggctattggaagatcaagcaggtattcattttgcttgctaaattttcccagtacttatattggggtcacatggttgacaaccatttcctttatttggagatgcagaatcagaagggcagttgaggaggagcagaaagctgttccatcttgttgctttgtgtgtgtctgttttttcaggatggatgaatcggcaactgtatattagtattcgtgaacgtattgaatggagcactgtgaataattgttctgcactg

SEQ ID NO: 4898 - DNA, 449 bp, Avena sativa
gatggatcaagtgcagttaacccagcctgagcattggtctcctaacgccgtataccaagcaacgcggctcttctcttcaaacatgagtgccaagaatgccgtgagattctacgaagctattctgctaccgcgtattcgtaatgacataaagcacaacaagagactccattttgcactttatcaggctatgaaaaaatccctctacaagcctgctgcctttttcaagggaattttgctgccaatctgtcaggtagttctctttagaatggagagtttcctagaatgaatgatgagtttgttagtatatctgaatatgtgtttcaaaggaccaatattgttgatcatccaaccataagccacatctattgctagttatagacttgtatatgcattagttgtgttattgtttccttttcttcttcactctataatataagtgcaaatgttat

SEQ ID NO: 4899 - DNA, 477 bp, Avena sativa
gatggattcagtgcagaagcctatggtgcagcaaccttatctcttcatccttggaagcaaactgctgaactacttctttttctacatcttttacaaagcctttgacgactgagtacgtcacgaatgttgagaaatcaaccatggtattgacatcgtcccacaaggagtccatctcatcaacgatgattaactcatcaccatctgaagaaggttcaccctgaataatagcatatccgtcagtgtcactgagtgtctcacccaagctctgttcatcccgagtagtggcacttccgttactgtgactgagtgcctcagccaagctttgttcaccctgagtagtggcactttctttggtgtcactgagtggctcacccaagctctgttcacgctgagtagtagcacttccgttggtgtcactgagtggcacatccaagcactctgccatgtttgcttatgctggaatatgaaggcacacca

SEQ ID NO: 4900 - DNA, 407 bp, Avena sativa
tccagtgcagaggaaaagataacttcattgattgttaaagtaagaatattacattgacgaacatttaacgatctggatatatactttttaagaaaaaaacctaagaaccattaagtgtaatgctcggtggaaaattagtggtgggatagaaattgcttattttcttggagcatatacaatgcaagaactcttaactcgggtgatggtttttatatcttgtagcacctagctaggcaagggtttatgtctatattgcaaaaggtgtttttcaaacaaccaagaggatccaagcgtcggccgagcatcctcctccagcttaggcagcaactccaccggctaaatcaatgggatttatttccccatgtggaacaatgataagcttgttcgtccctcttcggatattttga

SEQ ID NO: 4901 - DNA, 378 bp, Avena sativa
accggtgaacatcctggaaattggcacttcgctgtgtccacccactatcatccgggaagatggcacttcgctgcagccagcttttgatcattgtggaagaggcaccttcctgcgccaccgccaaccgtaactaaacaaagcaaagctagtacgggtttgagaattcagatccacttagcatatacagtggagatagcgctaactaacgttgccatgagcagaacatccattctaaatgggaaatgggagttcagggcagcgccgtacgtaccacagtaataggcaggcgagcaggagggtcgcgtgtggcaacatggaacgccagcttcgtggctgcccagaggcgctcctggacgtgctcccaatggtcctgcactg

SEQ ID NO: 4902 - DNA, 523 bp, Avena sativa
ggaaatcaggagaccgtgaggactatgctatgtatgaagaggaaacttgcttagcagaagaacatggttgttgcacggagaccatgctacttgttgtcacttttcgtcactcaacttggctatggttgttaggcacatttagtgtctcacatgtgtgaattagttcctttgtgtgtgttttgtgttcatactaaatttggttatcaccccatgcgactaatcttcttcatggaatttgcagatacaccaaaagatctgcttctgtgatgcctctgttagcatctgcaaaagatcgcatcagtaggcgcagctccataagggcacacaatcagtaccatcatgggtgttgacaagttatatgatcagatgagacatttggagataagagacgataactcatataatctttacttggatgggtctaattaacgccgcgacttactcgtaacatatttccctgaacgacatgcaggaagtggaaactactataccccaaaagattgttcttggatgcacctgcact

SEQ ID NO: 4903 - DNA, 481 bp, Avena sativa
ggttgctccccggggctcccacgcgctggtcgtctccacggagaccatcaccccgaactactacgtcggcaacgagcgcccgatgctcctgccgaactgcctcttccgtgtcggcggagcggccgcgttgctatcaatgtcccccgtgaacgcccggttccgcctcaaacatgtcctgcgcacgcacaccggcgccgcgaacgacagctcctaccgttgcgtgtttcaggaggaggacgacgaggggaacgtcgggatcaacctcagcaaggacctgatgatcatcgccggcaagtccctggaggccaacatcaccaggatcgggccactcgtcttgcaggtctccgagcagcttctcttcgccctctgcttaatcgcacggaaggtgttccgcgcgcgattcaagccctacatcccagacttcgccatggcgttcaagcacttctgtatccacgcgggcggccgtgcggttatagatgag

SEQ ID NO: 4904 - DNA, 355 bp, Avena sativa
acaagcaaaaaaagcatgatgaacttggagtatgcagtatcaaaagttcaaaacatcaggcaatgatgggtactgcaaaacatgcacaggcaagcatgtgtacatgcaaatgcgagaggtcgcaattgttttctcaatgtccctcattccctcgttcaaagtaacataaactagggctaagtggatacaaaatccaacaaagtaatacgtagctttatgggccattattttggatggtatccttcggacttcggttgtctggtatatgtagagagaaagtgcatagtgcaagctggacgcgcattgaaaatgcatgttagagaccaacatggattaactcattgcgtgcaattca

SEQ ID NO: 4905 - DNA, 432 bp, Avena sativa
  modified_base (26)..(26): a, c, t, g, unknown or other
gttaggattatttatcagtatttagntaaaaatataggctacgtcacaatgaagagggcggggagcttccactttttgattgctttaatatttagacgctgcaaaactcataaacagtggagacgttaatatgaattcaaacttaccattaacattcagcaacatgaatatcacaacgaatatccacaggtaccacctaaatggaaaaaaggcatagcaagggtaaaactgtttaggattatctgtcaggctcaacaactactagtaaatgaataaaaaaaatcacctaacaaactgatctgggaattattaaaacaagctttaatttctgagtttggattaccttatgccaaccaccttcttgaaatcagcctccaaagctcgtagcatgtatcggtgaaaatcaaattttgggcttcctcggcaatgtgt

SEQ ID NO: 4906 - DNA, 358 bp, Avena sativa
agactaaattcagcagacgtccattgctttccaaaatctcaaaatgcatcagcaggctaggtggtactacctatcaaaagttacttcttttcagctagcagcaatctcccttcacatctttcagcctcgtcatgaagcaatcgcagcattctgtccttctctgcctggatccaagggcggttaggctcagaccactgcctcggagtaccatgaagggcaacgcggagattattgctagtgtggcaaacataattggctatcccgttgatcacagcatgatcagttatgtatgctccagcacaattcaggccaacatccacataatggaattcggaaatacttgacaaaacatcgctag

SEQ ID NO: 4907 - DNA, 349 bp, Avena sativa
acggtacccgactggagaagtcgcgggctgttctcgcgcgtgtccggggacatctcgctacggctgtacatcctctacgaacgcggtgaccgcgccgcccatgacgccgctgcttctaacgctccgatgaacgatcaagatcagcaaaaccaccaccagcagcgtgccaaccccgccacagaaagcatggatcctgagaggattgtccggaatgccttcgccgccgcccaatccgaggcgccggccgccgagtccaggggaacaagcaaccacgagcagcagtcacgcgtcttccgcgccgtgccctcttcagagcctcgccgcgccaccctgcacgccgtgccgaaac

SEQ ID NO: 4908 - DNA, 378 bp, Avena sativa
gatggatctagtgcagatgctcttctcatctgcggttgccagtatataggagtgtggggatgaggggagggagagtgtagccgtgacgactcttcgggatacaaattatcagaaccaaataagagaagacgtaactggctgaggtgtattggcttgatcaattaatgttgtagtccgggttttgcaatattggtagatttatccagttaattaatgtactgctcacctcaggggcggacccaaaatgagccaagccccaggctggcatttgtgtttaagcattgaactactttttctacacaaattttatcagtttaaaaaaaaattctagtgcagttttgaccctaagcctagggcctgcagcacgggctgccctcg

SEQ ID NO: 4909 - DNA, 295 bp, Avena sativa
ccagtgcagagaagagctgacaagcacaaccatgtaaacgaaaaggaagatgcaacgaaatctgactggaaatggtacttggggaagctgaattccctagattaggtattcaataacatctcgctggactcagctggaaaattcttctccttctggtctagaacataggttgaataaaaaaattcagatgacataaaagcacaacacgctgcccaccaaattgatgcgatgaaacaaactctgacaacggacagctgcagattctgataaaaggctctagattcagattacagga

SEQ ID NO: 4910 - DNA, 269 bp, Avena sativa
ttaattcatacagatctaaaaccagagatcatgttatgagataggttgagtgaattcagcatcaaaagggagccaagtgtgtctggaatttcaccagacaaagaattctctgcaagattaaggtcaactaggctgttgcacaaaccaatttctggatgtattgacccttccactgcattgtgctgcaaatgcaggtacgacaattgcttcagattgccaatctgtgtagggatttggccagagaatctgttgttggaagcatccagctt

SEQ ID NO: 4911 - DNA, 354 bp, Avena sativa
gcaagttgtggtgcatccctagcctgttgatatcttccaggcaaccggtgtagttcccactgtcacacttgtatgcccagtgcccagtgctcgggcttgctgaagtggtagcagcaagaaccaacgcgagagccacaactggtactgtcttcatcgctacgacagcatgacctgaaaacaatatataattagaaggaaaattcaagtaatctaaagactgtaaatgaaacatgctaaactgacattttgcacagttgttggaagtagcgactgaaattactacgcactgcttctgaacattgcatgtgcctgtgcttgtgttaatctgtgttttatgcgtgcattgtgtgttcg

SEQ ID NO: 4912 - DNA, 296 bp, Avena sativa
tgtgtgatggatcagtgcaggtaggattttttgggcactttgcataacattttgtacattagcgtactctaagcatgaataaatgttattttgatgcattttgccaatgtgtgtgtcataatgaaaacaaagaggaagtggaaggacaaagaaaatgcataccggcagttgtaacaccttaattagttttgacagctctttcttaagttgaacgtgaagattcttgggtgtcgtcagttttttcatcccttcagaacaaaatcatatcagaacaatgtaatacgcatatctgcact

SEQ ID NO: 4913 - DNA, 272 bp, Avena sativa
caatttattatgtgactaacaacttagtacatattgcacactgcggccatatatatatgctaagaatagatgcagccatggaccgaaatagatgcaggttcataatcaaaggtacgttttatcccatgcgcttgcatttcctctactattgtgtaatgttcctttgggctaacaaatcctaaaaaccctctgaacaagcaaaactggtgtaaatatacccttagatgagtttaacaactgtttagctagcacgtggacttcttataaccgca

SEQ ID NO: 4914 - DNA, 292 bp, Avena sativa
gcttatgtgtactaaatacatgattttttggaggaaggggccaacactcagtcaaacagcttttggatttgaatgccagcatacttagcactttcattattgaatgtgtatgtctgaatacaaaattaccccgaaaagttagtgaaaaatcatatgcatttcatagagctgcaaggtgaaaactcgggcccaaaattgtactagtaaagtttccgcaatcagatttgttttagcacaaagataaaataggtggaactcataaggcctaaggaggtattatcccaactcaaac

SEQ ID NO: 4915 - DNA, 476 bp, Avena sativa
atgatgttcagcattatgttcaggagcacccatttggtcaaccttccattacagagagtgatccaaattggaatttctatgcgaaaatacattatagactggatagacgggaatggtcatgagcttttgtacttgtgttgggcatgtattggttgctagatggcaggaagtcttgacactcaagttttgtttgttcacttgacatggctacttataggcttgttttgttgcatagatcagtggtcaggtcagagcatatggttgattcaacaattttgatactctgtcgtttccgtccgtgcttatcctgaagtagacaggctaagtagtgttcacaagtacttaatacttcacattgtacttagttacacatgttgacatgtgtcattagtcatttgttccctgtatcatggataacagggttgttgtaatagctatgctccatttaaaaaaagttctgaactgtgttgtaagtg

SEQ ID NO: 4916 - DNA, 290 bp, Avena sativa
gtgcagggaatcccgtttccggcaggacgcacgccgcgaacaagttccttgcggagtggttcgcatcccagcaggttccacaagaggcaccggacaaagcagcacatgtacatgaacatggcgaggtcggcttcatcatccgtctgtgcgcgaacgacctgtgcggccgccaggagacgaggcctcacgagttcaggagatgctctgtctgtacaatggtgaattactgctcgcgggcgtgccagtgaacccattggaggaggggtcacaaactatcctgcacgccactg

SEQ ID NO: 4917 - DNA, 276 bp, Avena sativa
gctacagagaatctatcattagggcagcggcaacgttccagtgcacatgcacaatgggcgtggaacatcaccatgttcgtatatgctctgaagatgaaagagacaccagatccatgagttccggccaccggagtcggagaagtaggatctaaaccgctcccgccaccggagtcatgggagttgccggattgaagcactctggtcatggtactcaagggagacgccgaccattgctcgccagcacgtgcaccggccggtccaatctttaccatctct

SEQ ID NO: 4918 - DNA, 364 bp, Avena sativa
tgagattttgctagaggtcaagcgtgctccatgcatcaggcgtgttggcactgcattcttgcggggagcagcaactccatttccaatgttaaaaaaaatgaaattaggaatggtggaatgggaggagtgggagtgggagcagcaagtgctagccatgccccgtttggaggagattctgctcgcagggtgtaaactgaggcgtgttcctcctgggcttggctccaatgcgagggctctgaaaaagctgatgttaaatgaagttcagaatcttagctacctggagaactttccttctgttgttgaacttgtagtgattgatagttctgatcttgagaggatcactaattttcccggtctgcactgg

SEQ ID NO: 4919 - DNA, 324 bp, Avena sativa
gatggatccgagtgcaggatggttcagttgtgccgttagatgagaagtcaagaaaagctattttggcaagtctccatgaattgtcaacaaaagctctgcgctgcctcggttttgcatacaaggaagatcttggagaatttgcgacatatgatggtgaattccatcctgctcacaagcttttgctggatccagccaattatgcggcaattgagacagacctgatatttgttggtcttgctggcctaagggtaagactgccctcactgtgcatatgttttaaattttaatactgttctacacttgagctcacaaaatattgaatct

SEQ ID NO: 4920 - DNA, 337 bp, Avena sativa
tgtaggttttctttgccgtgtgcttctgaatgcccacacggcagagatcagctttgccgtgttccggccctattgacacacggcaaaggatgggggcaacggcagcgacaattttttccgtagtgtattttatattacatgctgaattaaaatcacatagacaaattttcccgtagtgtatcttacattacaatgtttagtttgtcttcttggtgcagacggctttgaacccttgtctgaagttgccattatggtgctcatggattattataatgctcattaggaacagcggcgttgttaaggcctacctgtagctggtctctcataacgccgcagt

SEQ ID NO: 4921 - DNA, 277 bp, Avena sativa
tgaattagcagtcaaaattaaaggtcatatgtctaacactgcattgcaactttataaactgactcagatctccctcgaatccattttgttctcttcaacaggagacaccttactgttacgatgactatccacctgatcatccatgcacaggtttatgagctcattaagctgggtcccaatctcaaaatcatcacagtcatcagcttcaaaatgatggaccttacttgattccagttcaactgaattyaagcagtcatactccacactatctgcactg

SEQ ID NO: 4922 - DNA, 512 bp, Avena sativa
gaaaagatataattttgtgcaacaccgtgtaagatttgtttagaaagtagcatgtattgttcaagacatgtcttccttgagatcatgaaacaaaataggcataacgtggtgcctaattaaggaagatgtgatggctgaattactggtgggagtataaatgattaattttctaatctcatttaaaatcagagatgaaattgtaaagtaataaaagtttggatctacacttgaatcctattacagcagctagcaatagttcatcacgagaagtaaagagaaaacgaaggtggaagtacctgaattaacaggaatttagcgatgcgtaaggtccctgtctacttctttagatacagtcaatgaacaaagcattggctgccgaattcatgtttccgtgtctatttctttggagcatgcatgtttgattatgcgaccacttggttagctcacttgtatttgtgatgaaactgtctatctaattgtgagcccatcatctctatccttctccgctgcac

SEQ ID NO: 4923 - DNA, 356 bp, Avena sativa
gatggattcagtgcagagtactcgcaaagatacctgggattgggtggacaactttgaagattgataaactgcattatcaaaggacataaatcgtcagtacaaataacaaacaaacaaacaggaatagattcaacagcactactgcaaacaaatagtatcacatggtcaaatagaattgagtcgttgctcaagacatgtatacaacaaataaaacattgctcaaaacatgtgtagagcaaatgatatgttaccactaccaacctctgaggttcaagtgtgaaccctacctttcagcagttatatctgcaaaatgtttttggggtgccccaggtcattatcttgttttctactatcaa

SEQ ID NO: 4924 - DNA, 443 bp, Avena sativa
ctctactgccattgttacagcttctggaatgataatataccaaattaacttgaactgaaggctgggtaaacaagagaataagtgtattagagaaagctccaccaatgttaaagcatcttttaagatcaaataagcttcacagatgtctaaacagaatacttgcaaatatgcatcacctagaaagcacgtgttgtaggaaaaaaaaatggccgcatatgaggaaaggaggggagggggtggattaagggagaaatgaaaaaaggtaatacttgcattgcagagttggcatagaatcaatgactacaactgaagtactgatccttaaatatatgaccaaataaaagtaggaggtgcatcatttacaaagtgatgtatggaaatacagcatgtcaggctatgagacatgcctgggagagaatttaggaatgaacagtaacactgaa

SEQ ID NO: 4925 - DNA, 450 bp, Avena sativa
gatggatctagtgcagtacaggtgtccgtacggactgccccgttaactggatccggaccaactaattgctgcgtcatgcatgtgttactagtcatcaagcacaagcagtggtgagaccgtaataaaacgcaaaagtcagtcacgcgtaaagggctctctgcctgcggacggaaaaaacatcgcaattaatttcgtctgtgatggtggcagagcgcaattgatggttttggccagggacatagtgcacgttgtgcatgtgatcccagaggagagtattcagcgatgactataaggtttctaaaacataagtgtagcgtcaatcgggctgatcgtggcgaaattcagtgcgtaatacggggagcgcatgccgattagccagatgtgcatgcgcaaactgaccaagtatatacatggaaaaacacatgaccagcattccctgaatccaggttc

SEQ ID NO: 4926 - DNA, 395 bp, Avena sativa
tgacagcaatattttaactccagatgcttccctctatcaccaaacattatcctacttcacataatacctgatggatgccacagaaagaatgctgtcatccttttccaggattatagtatagaaccccttgtagtccagatgtacaaagttggacctggaaaagaattatcaaagtgtaaaatagagatgttaagtgagttgtaaagagatgttaatacatgatattgaggggaaactaaagaattaacaaactgattcagctcacctccagttatacaccatagggggcattatgtctatccctgttctcggatcgtaaataggcaagaagcattcttccaaaatactcaaggcaataactaatttcatgttgcactcagccaggagagcaatat

SEQ ID NO: 4927 - DNA, 499 bp, Avena sativa
caagcaaaagaaatactccaagggctcggctgttttggataattggattggaaaggaagaaggtgaccaacaaattacgttttaaattgaggaattgaggatgaggtcctcaagactctggtcgctgccactgcttcgcgttgttgaattggatgagggtagccgccccgatgccaacgatttcgccagggctgagggtcacgccgcgcaccaggcttcatctctgacaggcgctgaggcattggggccggggtcgccgcgcgtgctgggcggtaggctagccaaggaggggaagaagaagaagaagagcatgaagggtagtcctgatgatggtgagatcgttgtggatggggaaagcattcctgataccaaggaagggaagaagagcaacagtaaaaaatctagcatggacaagatgaagaaaagaaccagggcaagcggttcctgttgttgatgcctctgaaatcagttgatctccattgtcttgaattgataccag

SEQ ID NO: 4928 - DNA, 579 bp, Avena sativa
cccaaataagcacaaaccagcgcaccatggaatggagtcacagacatgcattatatcactactatagcacattcttacgtttttgtccttgattcacgtagaacctatgaatgctgctttgccaaaggttgatgatctggtaccgtttgtaacactatatgttttacagtgaaagaactaagtttttccaagaggatgaaaatatccatattaacttccatgtgtaaagctgcgctagatatatgcaattcacccacgtggtgtggtgaatttgtgcattgccattaatttgtttgctagcgataaactgataatataagattgttgatctggtataactgcataagggcatgctggcaaggatcagaagtcccctcatacgaggattagcattagggagatatctatattgacacttagcgcattctgctgctctatttttttaatatggatggttgtgactacactagaggacggtgaattgcatattactctgcaaaaaagggaaaagggaaaaacatgggcatctccaatacaaggtcaaggtagcttagatccgtatgctgcactgtatccatc

SEQ ID NO: 4929 - DNA, 501 bp, Avena sativa
cagctaccaccttttgggcgagtataggatcttcaagttttttgcagtttggggaaaattggacacccctagtcaggactgggttgttatacagcttgagctccaaccacggaagcaaagccttcaagagattggataccattgacaccccgtatgtttaagattttcaaagaacttgcatggaaggaaagaccaggaggaatacacctcagtttgcaaacattgatcgtaagtttctccaaggccggcatagcttgcatgttctcttcccactcccactcctcccattcccccatttcaactaggatcatactctgcaatcttggaaaaccaacaaaaatctgggatgaaggttgttgatagtcactattgggctgcacaaattcaggtccaacttgcttgattgccgaagcggtcttgaccactaggtactccaaacaagggagttgacacaagacatcgggaagttgggtgcaaaagggcaaccctatgatctgcact

SEQ ID NO: 4930 - DNA, 423 bp, Avena sativa
tatgataaggctgagcaacgcaagttcaagatttacataaacaacaagactgctgccgagagctatgatgtgtttgcgatgaaaattaccagaccggaagcagcaccaattagcacccacttggggctccgtttcggtttccttacgccaccactgataccaccaatcctcacagttggatgagcaaggtttccttcccggctgaccttaaagatctccatgccattcagaagagcatcagtagccgcagaacctgctgaagactcggaaccgagctgaacccaaagagtctccatctgcggcgagccaacatcaaggaagtcctcatgaaaagccttgttcttccccccagccctcgcaaacacatcatagctctcggcagcagtcttgttgtttatgtaaatcttgaacttgcgacactaa

SEQ ID NO: 4931 - DNA, 242 bp, Avena sativa
cgtagggcgggtagaatggaggaaactggtcgcagttagtaggtaaaaaggatttggctttgaacgtgtcgcaggcggtaagcttggtctcctgaagaagggtgatagagggcttaagttcagttagttcagctagaatttctttgcacttggcagaatcatttaggccacggatgttccatgaaccgatgagaaaggatagattaggcatgggtaacgtgtagttcaccttggagggtaag

SEQ ID NO: 4932 - DNA, 387 bp, Avena sativa
gatggtccagtgcagcctgggacgagccagataaaaataataatatgtgcatttttcattggcattcacccatttcatgttaatttttaactcctccgttcaaaacacttcaaatacaaacacttgctcttctagtataaacagcactatatatggcataattgatgttattaaattcacggtgcaaagtacttgtcagggatatggtttcttaacacaaaatgttacttcactggtttagtacaaagttgtaccgaatctgacacatattatggatcagagggagtacatagtataatggtagagcatgcagcactgtagcaaagaatcttcttgcgctctcataacactagtaactactagcaattgtgcttttttaacattata

SEQ ID NO: 4933 - DNA, 459 bp, Avena sativa
tgcagcagttggagcaggagcaacgccaatggcgccgcaactagctgcgccgaggctgccgcgaccgtcgctgctcccccggtcgtaacttggccggtggccatgttggcgagccaggagtcgtctcttctatccccgaggatcacgccctgcccttggaacgtgccagccccgccgcccatcggcatcggcgtgctgtccggtgtggcgtccgtgaacgtcatccccggcatcatagtcggcatctccgtgccaggcatcgtcgtcggcgtcgtggtcccaggaaacgtcgtcggtgtcgtggaggtcgcgccgggcaccgtcgtcatggatttctggctgctcacgtgacaaaagaaagccatggaggcatgggtcagctttgaaagaatgggtgaaacagtaaccaaaggcagaaccgaggacagacaatgctaaagccaaacactgtaaccgcat

SEQ ID NO: 4934 - DNA, 565 bp, Avena sativa
cttgtggactatggtcattgcacagaaaggcctagtgctggaaacctaggtttaaaatttcccagcagccaagagaacattattacaacaacgttttcagcttgtttggacaaacaaagaatcatggacacccaaatgcccatgttatctcaagcagctgaaatgagacaaccgcgagtacacccaagaggaaactatgtagagtagcaaaacccagactctaggctttcccaatgcatggagggaaagaaccttgtcacttgattgaaaccgtgacttgtgcaggtgagaatggcactattgacggccaaggtagtgtgtggtgggacatgtggaagaagggtacattgccattcacaagaccccatctacttgagctcatggactcatcagatgctattgtctccaatgtggtcttccaggattcgccattctggaacatccatccagtttattgcaggtgaggatagccagatagttctctagaccaaaattcccaaaccctatcgttgttccttatggatttgatggtgaagaccactagccagttctgcagagttgggcg

SEQ ID NO: 4935 - DNA, 373 bp, Avena sativa
tgccatggaagtgatttaatgaaaatagaaaactcccaaatcgtgaaagggtgattcaataaataaacattaaagattaatccacgtgcatctgacaaaaggtaacgcatgcatccacacgtacgaatctctcatcttcctccgatattgagctccaacaaaacgcgatgtcggcaactcgttgatccaagagaaaaagagggagagttggagagatctgtgtaaatcaacagacatagattaacaagatactaccttcctctcttgacggcgagcttccgtgaaacatgatgacggccggtatatttggaaagctatccataagtcgtttggcataggtaggttatatagtatgttatgcggccggaaaaaa

SEQ ID NO: 4936 - DNA, 367 bp, Avena sativa
tgtatgccagctattagggaagcgaggtatccaaggtcttttttttcgtctctctcttaagagaccatgtgctctattaatctcgtatagatttaggcacgccgaagttgttagaagattatgagaaagttcatggatgtagctagcaacatgttaaatcgtcttcctttttcatcagaatatttggtgcctttgcgaagaaaacttcctttaatatctgattcctaagttcttttttgcatggcacaaaattatcatttttaggatgaaatttgaaaggtttccagattgtagcttgcactatttaccaaactagctaaccctacactacttgcatgactgtttcttaattccccccaagaagagt

SEQ ID NO: 4937 - DNA, 313 bp, Avena sativa
gcagtgcagggggtacggtggagctctggtgaaagtctctggcgggtctcaggcgaggttgggtttgctagatggatccggtgtctctggtgggtctcccgttgaaggaaagtttttgacgcgaatcttttttactaagatgcagcaaaagcgtgccagattgtagcaaaaacgggataaatgtagaaaaagcagaatgaaaggcatgaaggaaagaatggaccggtgatccgcctgatccgacggctggggatccggggggatggaaagtttccatcccgggagacgcctagcatttcccagttgcaatata

SEQ ID NO: 4938 - DNA, 379 bp, Avena sativa
acgttaaattcctctccaaaccatgggtgcggtagttctatatccatgtaattttcatgtctctgaatttaggaaagctagcagggagcagagtaatggattgaatcctcgccttacacttgactcactacactcaacaaatttctttatcactggttctacatattgacttcatacattcatgatgatattacaaatagaaaactatttaagggtcttttctgtgacttgattacatatctttgctaatttttattgtgaagctttattatgtttttacttacaattttaggttagagccctccctcgggcacgtcactgtctagcctcttttattcagaacttttgatagattcttctcgcatgggtcttactgcag

SEQ ID NO: 4939 - DNA, 448 bp, Avena sativa
agtgcaggttccagtttggcagccggtttccaagcccatatagttttaggctccgcaggttcaagagaggcagcggtatgctatcatccaaacagcttccactattgttctcaagccgcaccgatagtgattccaaatggacaagatctgaagttgcaaggataaacttgttgctgtttttcttgctgatcccagacactccgagcttgcgcaagtgggtgagctccttgagctcttctaggaaagcctccgtccctgaagcactgacattcacaacaccaagcgtgtgcaatgccgtcaatttcccgatccctggaggaacctcaacaccaaccagttgacgaccaccacaataattggagactttgtacactagatgatgattcgcactagtctgtgctctctttgctggggccttgttggtgcctgcacggatgtactgcactgg

SEQ ID NO: 4940 - DNA, 296 bp, Avena sativa
aaccaaaaaataagatggcagcttccttagcaatagaaactcctgtaatttccagatcagtagattcatttaaaagagacggtccacctgtagctactggttccacagaaacttcagcgtcaaagttagaggttcctgtaactcctgtcttggtgacaacttcactcacaagagaaactctttctgcaagtcctggaagagttgtagcctcaataacaagggaacctaaccgtccacaatccatttcaacagtagattcattcacaagagaagctcccatcttatttttggttctg

SEQ ID NO: 4941 - DNA, 419 bp, Avena sativa
taggaggtcctccaatctgggcacggattccgacggaagctggatgagagagaaagatgtgcttcccctagtcaagaaactgccatgcatcataatatccctagagagagtgaggtgaaacgtgtgggtgtgggtgtgggtgtgggtgtgggtgctagaaaaagttgccatcattacccaataattcaacgtgggtgctctgccccaagcactcaaacagggaaacaggagccgagccagccagccagcaagacagagagagacatacattgtgagaagggctaggaccagagacatggcaccaatgcaccatagtattttcgtttgtccatttcttggtgtttgctttgctacgggtccagttttggtgtcttttaccaaatcgcctacttttatctccatatcccaaacagatatat

SEQ ID NO: 4942 - DNA, 385 bp, Avena sativa
attgttaacaagaccttcacggttcacgttcctgttggacatcaggcaacacacctcaatctgatagtgagtgggtagcccacgtcaatttgaaagtgagtgacatagttggatatgaactactttaggtaagtaaactagtccgaaagaaattcagtcctgatctgagatgagttcctttgattatgggagcgtgacgacggccctggagaagtaggtgaccgacgcgcaatcgtgaaggtttatttcctatggatttttgctcctatatatgcatacccctgattcttgtatatgcactgaatttgcacagtatctactttcctgttctcttggattgatggcattatgttcagaaagaaagcaccaatcctaacttgcattg

SEQ ID NO: 4943 - DNA, 342 bp, Avena sativa
cctatttgaccctcatctatattatgcactgcattccaatgtaactgtaggagtatattcagttttaaggtatttaaggtaaaaatcaacaagctgaatgttaatcaaataaaattgcatgctgatatatttttataccatccagttttgatttacccctatgatattccttgcctttttaagcagatcaaatctagcatgtaattttgatgtttggatggtcctgatacccatactgaggagtataagcagttcttggaacaaattcatgccgatcaactttgtgagagttcagtaatgtaaatttctttaaaaaaaataaaacagaaaggttcgtgcaaa

SEQ ID NO: 4944 - DNA, 314 bp, Avena sativa
ggtcttttggaaggatttaaggaccaccaatggagtttctcttatagtacaatattgcagcttgctctttttcgtggtgcgggctgaagcaatgacctgcatgagctgtgtaatttcggcttctttatagcaactgggttgaccttaagtctctacagcttcagacacatgaatcgcgaggataaatacttttgtggtgcgttatacatcttctcctttcttttcttttgctcttccattttctttccactcacccagcatcttcaatctctgtgtcctctggaacacctcggaggtacataacattgttgcat

SEQ ID NO: 4945 - DNA, 407 bp, Avena sativa
tggtatgactcaattgtatggctgtattaactaactatacgtctcacatcttaaaataatctccttatgatgataatgctctttctctttgtcctgttgccttttgaactattgttaacttgctgttctgaatgcagctaacatatatttcagtgatttgacaacatggtagcatcgcttaatgtttaggatatactagcatatgcataaatctgacattttaaatgtgagacatctccaattaatcacagcaaaatgtatgtcaatacagaaaacacagaggcgaatatttctatcatcctatcttgatatgttagtatgttcctatgtagatacaatctatttgaataccattaggccaatgaatgatttttatttgacttctctttatttataactcatgatat

SEQ ID NO: 4946 - DNA, 431 bp, Avena sativa
gtgcagaagtagggactgcattgatgaccagcagcaaaaagaagcagagactgatatgcctggcgtccatacttaaatttgaagagaggatattttcgttgtggatgtgtggggatgagttagattccgctatgttgtgtataaatagagctcctggataatctaataatagaagtgaaggattaggtcctagttaggctcaagatcagtagcgcgcatgcatgcatcacaccattggtaaaagataagtgtcagttacatgtcacaatcctgctgcttcagcgccgacctattcttctcttttttcatttgaccttcaccagatccgtccggtgcggagaggagaaggacgactgatccatcttttcattgaactgaaatatcacagagctagctggatcttacacgactcagagtgcaaaaaaatacca

SEQ ID NO: 4947 - DNA, 434 bp, Avena sativa
ttgcggtcgggacacgccggcgaccagaagcggtggccgccgatcgtcatggaatcagggatgcgcttcattgcgcacaccccactcttgagtagtctcacacttccggggtgtcataacgtgactgattttggaattgctgaattgggacatgcacataagttgagtctttggccattgagtgttgtcgtggggtctctcagcaagctgtgcagggtgttaccaagtcaactcactactccactcgcacttcggacactattatggacttgttgagtgtcgtctattcatgaagtggtatccaaaattgtcagcataaattttgtgctgaagccgctaagttgtcaagtgcgcaccatagaacaagtctgtgcatcatccgacccagattcactctctgaactttctgttaccttctagctttactgcactgg

SEQ ID NO: 4948 - DNA, 324 bp, Avena sativa
gatggatcccagtgcagtatagaaacgcacgagaaaaaaaacgtagtctcagattagaacggggaggtgagaagatgcatacgtgttgaagatctggattagctttatgcgttgaaggggagaggtgaagaggaaccatcgttggagcatgcagggttgcagagtatgcttattttggcgtgagaaaatctaatcggagaaaattatcaccaactaaaaaatcgtggtgacgtacgtgaaggctggcaaggcatcagcaagaaaatagactagtctggatcaactattctgtcttaccggccgaaccttattttttgctcccgg

SEQ ID NO: 4949 - DNA, 400 bp, Avena sativa
gatggatccggtgcaggatcaaaagcggatcaaacggctaaaaacgagcaggatggaagatcggacggttgggaatgcggatcgtgggagagctccctcttgtcccacttttaatatccctaatatgtaatcatattgaataaaattgttcacaattagctgacctatctatagcagttctagaattgaaattcactattgccttcttcagagtttagactttcgcattagagaaaatcaaacacagagattacttttaagcagagagggcaagaacctggacagtacagttggaggtgatgactgaggagccgacgaaaatacgcaggcgacaggcgctaagtgccggtgttggtcgcggcgacgtgtgggcaccggcaggcaacatcgcctcacgtgg

SEQ ID NO: 4950 - DNA, 270 bp, Avena sativa
gtggactaaattacaagaacagttatattacaactctccatatggactgaaaattaaggcacaggcaaacatcatctatagttatgtatctacagatttgggtagatgtgttcagcgtttgatataagcaagggccccacagcttttcatctgcaaactcccaggaaagggggacatatccagtgaaactgttgaatctgtgcacccaatgcacccatgctacacctaagtttacattaagtttctatcaagttacagatacgaaacgta

SEQ ID NO: 4951 - DNA, 291 bp, Avena sativa
ttcagaacagcaatccgtttctttttgtggataacgactgcgaagtagtgacagacagcagaagcttgagcacattctggaacaatatgtggccacaaaacagaatttgttagcatgaattattggctggagagtgctggacaagcattaaggtgagactataaacaggtagcggtttccacacagaaaaaaatgcatccgaccgacacgaattggttgagcttgcactaggctaggcttcaagcttcagtaaagtttcactcagagcagcgaatgatcaaaacatattgg

SEQ ID NO: 4952 - DNA, 266 bp, Avena sativa
gatggtccagtgcagttcatgcacgttagaactcacctttactaattggcgtgtttcgtagttgagtgagcacacctgaacttgtttccctctctagaatgaacagatggatgagctttctttaggtgataggcttcacgacgctgcttgagcagttcgtctttttcttttataatccatttgagcatatcgctctctagcagcattgcctcttaatttttccggatctgtaggtgttgattgcgtaatgcatgccactggctccc

SEQ ID NO: 4953 - DNA, 362 bp, Avena sativa
tccagtgcaggcacgcgtgcgccgcagtgcgcgaggcaccccgagccttcacgccaacccacagaacctagcggcgacctcgccccggaactgaggaagaggagcccaagcataccaccatgctggctgcaaaaccaaatcaagggtttaaatctgggagcatcaggataaccgatttgaaggagaaatggggtgaataacaccggggttgcaccaggattcagagccaacattgatcgccctcggcggcggaccggcggtgtgctcggctgcggagatttgggcaaagggagaaagctcccgggaggttggagtaagaatagttaggatctaccatcctgaagatgccactttctgggacc

SEQ ID NO: 4954 - DNA, 414 bp, Avena sativa
cgatcgtgcaagcgggaactaactcggttaactgtaggtgggcacgctcacggctgcccaccggcagacccaactgttccgacccaactgttccttagaagggttaattggatagatgtcattgtaatttctatgaaattaaaaaacgccactgcaacttttaactttgaaaaaatgccactgcaaatatgtgtatctttggtagatgccattacaccctctttcaaagcatatactagtcattatatgtcgtatttctagccatatatacgtacacgtggtgggctccactagaattagcaaaaaacgtatagaatatttgcaacgcaactccaggttcaatgatgctacagattcagatacaaaaaaagctacagattctgataaaaggctctagattcagattacaggaac

SEQ ID NO: 4955 - DNA, 347 bp, Avena sativa
gtagacgcagaggtaggggtcaactcccctctattcccattcttctttctgaaaatgtccacagccatgattccgcttgctagttctggcgtttgctctaaatacaacctctccccctaaatctcttcaggaattacaaacagtgacttggccacatttgcacttggtgctattcaggtgcgtaactagacagatcctttttgtgtgtcttagtagttcgcgttaagttgctgacagcatttatcatcaggttcttgccactggagttacaacctggttagtggacagagctggccgacggatcctacttactgtaagctccttctccctgtgaaaccagtttatta

SEQ ID NO: 4956 - DNA, 346 bp, Avena sativa
gatggattcagtgcaggagttacccaaactgagaagcctagaatagccttccgcagacagaagtacccgaaaaataatactttgcaggactccattccatcagagatgatcagtagtagctaggctgtcattcctacagtattacaggttagcaacggcagatgagatgctcctgcacatcatacttactacataggctgcggctgcactcgtgctaccatggcaggaaaaggtatatcctgggctatactatggtggttacaaacacaagaggcctccatcatggaccggcatgatgtgccttgcagtcttccagaactgaccatggacataatgtttaggaatc

SEQ ID NO: 4957 - DNA, 502 bp, Avena sativa
tcttggagataagtttactcctctagccagttatgaccctcctagcccaagtgctcttgtagcccgagttcatgaggctccggttgataaaactattaaagaacttgacgaccttgacccttttgtggatgaggtacaactcttatttttgttatcacattgttttatttttcttaagtatatcatgaggaaaagcagacacaaccatttttataagggtattacatgttacttttctggatattgctggtcatgattgtctttgctgcgaacttctttcctgtatttcagcaacaactatggaattttgcacaaaggacaacagctttaccttttgggcgtggtgcgtttactttagctacaacttacactctgttgacagaggtaggagttcatactggtgtgccattatatctgggattgttgatacttgtattttgtccaacattttagcgctcctggcgctctcaatgtcttcatgttatgtgaacattttctttgc

SEQ ID NO: 4958 - DNA, 354 bp, Avena sativa
agtcctcacagttacaagcaactggccagcgtttaacagtaagcccaccatgtctggccaaagttagcccactagaaagttcaccggttatgtcagctgatgagagtgaaacacaaagagcacagtgtgcggcagaagcttgttctagcggtgagaactctccagtgttttatgcagccaatgctggcagtgaacatgagaacgttgaagataacgattctgagagaagtagtatcacttcaaattcgtgtgctggtgataatgaccgggatgagaaccttcaagatgagtcatcctgctctaattttgatggcaaaactgttcaagatccggaagcagcgacttctgataaaa

SEQ ID NO: 4959 - DNA, 271 bp, Avena sativa
tatttgtctaatggctttctgtagtgttttaattactcgggatgttttataactcctttttgagtaattccaattggtactgtttcttatcggcgatgtctatgcggtagaatttttccaggattttacaaatagtataataccggtagtgaattatttaagttctagctctagtagagatctctacttttggttaatagttttcctagcgccaaatctattttccatgcatgtattcggttgtaatatgtattagtattatgtggtgcag

SEQ ID NO: 4960 - DNA, 231 bp, Avena sativa
gtcccaaagtaacaaaggagacagtgtaaataaaccatttaaaaaacatagcaaagcaacgtacaaagccaaccatagatcaatgttgcaacaactatttacctcttcatcaggacgattaccagttacagtaaatacccttctttcaacaacttcccgatactcctgccggattgattctctcaatacctgcatcagagggtaacatcgtgtcgctcacatactgcactg

SEQ ID NO: 4961 - DNA, 310 bp, Avena sativa
gtgcagggttttgctggctaccctgaaaatgtaaaacggaactgtgagaactgtgagcatctacagttgagtaaaacacaattctaacacggagtgaactgggcaatgattcagcttgacatactctaaaatgaacatcaaaccagccagccaatgctgctactcttgttctatcccggttgatcggcaatgaaacctgtgctctaacttcttggatctcttcaacagttgctgtcaagcaatccatttccttaatgaccgcaggttgccctataacttggtttggatgaagattattccatattgaaga

SEQ ID NO: 4962 - DNA, 293 bp, Avena sativa
gatacaaagtgtggatggacagttagttaacaagagttttcgtatatcatcctacgaagctgattgatctggcagggttagagtgtcacctgaagaagaatgtctgcgtaggtgtttgcctttattgcaccaagcacaggtaatgcgatcccatacagaataagattggacacctgcattttttttgtcagataagaagatattttttcctttaaaaatccagcaaagaaagaattcaaaagatggccatgcatggattgggtactagtactactcaccatggtggaagcatt

SEQ ID NO: 4963 - DNA, 383 bp, Avena sativa
gatggatctagtgcagtattcctgcgctaccgtattacacaacactggtctcgccaaattgattacactttttccccacaccgccgccagagagagaaaaaagagatcttgccctagggcaccgaccttccgatgccggcctccggcggctcccctgccgacaacttaggtcatcggtgatgagggggtcgttggatccacgtgtgtggatagttttagtctaaagtagattcgtttttaggctgctcatcgtcttggcttcggggacgacgatgacgatgctgaattaattttctccagatttggagatcggtctatctaagcaaggatggtgtggcggtgacggtatcctcatggtggatttgtgtcctcaggctctgccg

SEQ ID NO: 4964 - DNA, 336 bp, Avena sativa
gtcatgggagaaaacccaggtaaaatttccagcccttccatgcagtggtcatgggcgatgccactgcctcatttgcctgacgcttcagtcaggccacatggtacacttgggccagcctcaacagagccatgtgtcgtcatttccacctcaccccactccgtgaagtcattcgcatctcttggggtctcggtctagagcaagcaaaggaagtcggataaaccatttagggaggagtcaggatgcggatgtactcacccgtccgatcatccggtctgacaccaagaacgctaaggcattcattcacaaattcaatcaaaataaaggcataggatgcag

SEQ ID NO: 4965 - DNA, 290 bp, Avena sativa
gcggtgccattgctttggtcgtccacacagatggaaagcgactctcttttgcaagggtaggacacacttcttggcatcaagtttcaaggatggacggtggtgatgatagttttgctgatattgtccaccactgtggcatgttctatgtcctcacaataaaaggggtacttttttccttggacttctgcggaccacacaaaccaaaaagggaagtcgtcatcgccgaggacgataataagttacctaatgttatcacgaggtacctagtttccacgccatgggaacatctt

SEQ ID NO: 4966 - DNA, 371 bp, Avena sativa
caaagctatcaaggtgcaatgaaacccccatcaactcctttagccaaatatattagagtcatccaagatttttgctttgcgctcctgcaatagagtattgtataaaattgaggcacaaactaattaactaaatatattaacattgtaattctgtattatgtaggctaaacaggtttgcccaagacagcaatattctcaagtcaaacaaatagtgcacaaaattgtaagttccttctatgaaacctccgatatgttcagtaatctacaaacaaaaatgagatttccgattgcatatgaaaagcttgtatcttcttatctaacctgcatgtcaatcacgatcccagctttttccacagtgcgaagatatgatt

SEQ ID NO: 4967 - DNA, 264 bp, Avena sativa
gaacccatgaataagaaactagttaagacaaataacagataaaacgaaagcatttgttttacagaagagacggacaaagaacaaatagtaataaaaaacacttgtgctggagacagtacttttaattatgcaaccaaagatcttttcttttaaaaaaatgtaagaacagctattcccacgctcacacgagacaaagatcacagtgcggcataaaagtcaaggaaccccaaagctgcatttccttttagaactccaaagctgcac

SEQ ID NO: 4968 - DNA, 306 bp, Avena sativa
gatggatccggtgcagcaacaatctgattctcacttttatttttctcctcagttttagctctactagctctagcaagatcatcttttaaaatctgttcgggagtcataggttttagaccaattttctttccatcatgcataagagaatagtgattagttttgccattatgaacagattctctatcaaattgccatggtctaccaagtaacaaagaacaagcttgcataggtacaacatcacaatcaacaaaattagaatatgtgctgtagaaattgaatatcaggaccataactggaagtcataag

SEQ ID NO: 4969 - DNA, 354 bp, Avena sativa
gtggtacactggtcggcaccaagaccaacgtcaagttcaacggtcctgggtatagttaattaacatcaaatcaggagctatagtcagaaaacaaatgcatttagtataggatccagctacttggttgtctctgtcattttaagaatacaaaggcaaggtaaatgtatacagcacataacaaaacaaccgcgaatatgatgggttagcatgatggctctgaatatgatcccccaaatgtttcaagagccatgtgagaaacacttcagctttttattttaaaaaggtaatctaccttttgattgcaagtatgttggcaagataaaagtacctttgaagactgagataatcgtcttg

SEQ ID NO: 4970 - DNA, 593 bp, Avena sativa
gtaacctgcaaatcgctgcgctatgctacaactgtgtacttccattgcatttctgtatgtctctttattttgacgtcaaaccccttttaaaaccatttaaaataagaaaagacccaaaaacacacgggaatagcccccctatctccatcagaaaagagctccatccttcatcttatctccctcccaaatcccactccccttctatattcctctatccacactcagcgagctgcgcacaagcgcggtcctccgctacaccgccatggcctctaccatctcttttggacaactccagcaacacaatttcagccatcaccatcaagctcctcccttaccatctacattaccacacctctaccaacatcttctcttcaagctccatcactgcgctacagccatcacctccataacacagatgcccaactacttcactactgccggcatcgcctcaacatctgcccatccgaccgcacctcgctagcatggcgtgagcacttcgtcccgacggcctcctccatagctcgctcgttcgccactcctcctcctgtcaacgaaggcctccgcaaccttcccttctgctgcaagcctgcact

SEQ ID NO: 4971 - DNA, 380 bp, Avena sativa
gagaatcggacgccgggaccatgctacgtaccacacactgcaaagcattgcaggcatccgttctcagatgttctagattacgagtcatacatggtaaatgcatgtgtacacaaatggtttacttgctaactaaagatggttttccttgggagctatctaccacatttatgcgttgacaattgcggcataaatattttcaaatagcaaactcagttgcaataattcatgcggtgaaataccaaagtacaaaatggagcaggagggtaaatataatttaatctgcatcttattctacttcatccaaacacacaaatgcttgcaaagttggtcctagattgtgtttcaaacatttcatttatcatagttgtgaagttttgata

SEQ ID NO: 4972 - DNA, 526 bp, Avena sativa
gcggcgttggcacggtttcgtgtctagcggtaattgaacaccgtggtgcacaatcccacggatggagacagccatggattgaggctgccatggtccttggcctccatgcagggatcctacttcatgggccaagctaggttattgagtgcgcaggtacatcttctctctagcgtggccggtctcaccgtacaacatcagcagtagtgagtacaaatgctgctcctcccccttcttctctcgctttctttctctagcaacatctactcacatgaggtggcctggcgctgcacaccttggctcggcagcctccataggtttgatttcaggagacggatacaggctgtgcaggatttggagaagctaactgcaattgtagctcctcatgcgtttcaattttttatgcagttttgatttctcacattgccatacacggtgagaccgctcaaggttatgtttcagtaagtatttgtatacacaaattgctgcatgtttagagctctttaggctggtgttttatgtgctgcta

SEQ ID NO: 4973 - DNA, 517 bp, Avena sativa
ttgatctagctacaacaggagtgcttgcaatgttctctagcatcactgccatcatgtcaagaactggcccagcatcagatacctgatcaacaaaatagtgttgataagctatccgtgcattttggagaggtattaaagctaaccatataatggcacagatgagactgctaaggggcaatagttaaaatgttgtataaattttcagacggagagaaaagaaacataccttctttgacagttgcactaggcagtcatctatagcgtttcggaatttttcgctcctttgtactagttctgcgtctttgctaccaagagtaatatggaaggttctctttaaatgcctgactagatcacttatggcacctatagttactgctgaagcctggatactggacagttctgcaagggtagctgccacttccacgatgctaagctgcatgtctggttgcttcaacattgctttgttttcaatatgctttattagtagagacagcagtaagtgcatgttttgccctgc

SEQ ID NO: 4974 - DNA, 555 bp, Avena sativa
cactttgagtcgttggctgtaaacaggtaggaatgtagagttagccctgagtattattactggtttccctgacggatgcagttacttgtaaattgtttaggagcattaaaattgcagtactagtgctgatgctttcaagtttatgtgtttaggagtattaaaatggtgataatgtttttgtataatgtagagtattacctgtttttgcagatcgtagatacagttctatgcaaaaacaattgtgtcaaaagtgcctataatgtaggtggtaattgcatttggtatttactggtattcaaatctgttgtgcatactgatgatgatattaatgttctcatgatctctaagaaatctgtaataggatcaggatattgcctaaactggcttggctataatgctgctaatgtggtacatcagactaatctaaagtggagaactcttcacaatgaatttaaatgctgccaaaatagagataccaaaacacgtagactaattaataagtgccaactattcaaaatcagcttacagcagcaacccagaaggcttgtcataggt

SEQ ID NO: 4975 - DNA, 398 bp, Avena sativa
gatggtccagtgcagtttatcatagagagaacgaatgtagttgcgcggaataaatctgtcacgcatcacttgcttcatagttctccatgtaataattgggggtcaccttcttcttgccttgtacgcacaagattatcccaccaatgcaatgcatacccatcaaattcagaagatgctaacttaatttttctatcctcggtgtattcatgcaaaacgccataatttctctatcttcagttacccatataagatactcttcaacatcattagagccctcaaaacttgggaagagaaaattttggtttccctagcccatcctcttgctaaaacctcaggattagcaaacattaggacgtgcaaccgaaaaggagcaaaaaccatggccatgaggtatagca

SEQ ID NO: 4976 - DNA, 519 bp, Avena sativa
cagcatccattcaacaggaagtatcgccagaagctagttcaggttaccggatcaaactgccgggtatctccgacacaaaccctagctcggatttttctcaacacgcacacaccaaaaagccacacagagtacccaaacatcgccgagaaaatgccccggttccctccggagttacaccgcgatcaattcagatcaaagcacagcgggcaactgacgaaacaaccgaacaaacaatccagaaacaagacgaaatcgccgaaaagaataacacggatagatcccgaaaatacagtgcggggagcaaaccgaacctgaggagcccggggaggcggaggcggagcggatcggcgcgcgaatcagcgatctgatcggagtagtgtgctagcgttccgagctcgcgatttgggaagttgggaagcgaagcgggtgagaggcgcttggatagttggactgggaagccagcgtccgggtgcccctatactccgctcgctgcggaagagagttgctcaagcctgcact

SEQ ID NO: 4977 - DNA, 430 bp, Avena sativa
cctacaagcgcatgcaaaggcaataagctaggttaccgaattcacatgcacatatatccttgtgtacatgcatgtatataagtttgtatagtgccaacaattgcacagcgacacaatgaatgtattaatggatggaagaagaggaggagcagcaaagtttgaaaaaaggagagggtgaacagggagagacaagatgtttatttcacatggagatagacttcaatatgcatgcaaatgcacagctagactagctaggtctggggaagaatctgttttgaattggagatgatcagcagcctgtgtggtcagtgagtgaatactactccagctagtactgatcagtgtacctcctgaattcttcaagaaagaattgtgtatgctgatatgcatgcatgacaatcaatcaatgcctacttactaggactgcact

SEQ ID NO: 4978 - DNA, 412 bp, Avena sativa
gatggatcagtgcaggagaaatcaacaatgcaggtagcgccagcaagtggtggggctagccttgaccctactgaggagaagttcttatttggggatgatgaggatagcaactggggagctttgttgaaaggagacaacaaccatggtaattctgttgataatgataactttggtggtgctttgccatcagtgcagagtgggaggtggagtgcccttatgcaagaaacactacagcctacacccagtaaaaatagtcctaaggaagaatggagtggcctgagtttgcagaaagctcaacagacaactgccaacaactcaactttaccagctcatgaccagagtaagcttgcgtcattaagtggcgcacaacaaaatgcacgacccttgtcagcatctagctatgctgatggaa

SEQ ID NO: 4979 - DNA, 395 bp, Avena sativa
gatggatccaatgcaggactggtgggcattggtcggctagctaaccttcagggatcacttgagctccatgttgagaagaaggaagggcttaaagtggaagagctgagggacatcaatggtctccgtgggttactcaaaataaaaggtctagaaaatgtttcaagctatgaagaagcctgcaaagctgagttgaataagaaaccatatcttcaatctctgaatctggaatggagctctgctggtagaaataatacccttcctgctgatgccaaggtacttgaaggcctacatccgcaccaagacataaaggtacttcatattagaaggtattgtggcgccaaagcgcccagttggctacagtcactgcatcagctgcattccttgcaccttactaa

SEQ ID NO: 4980 - DNA, 521 bp, Avena sativa
gatggatctagtgcagcctcacgacagtgagcaggctgccgtcagctctgttgacgcgtcagcgctgcgcccctccttatccccaagctaacgcagcccccaggaaccctagaccccctccacaccttgcgccgtagccccttccttcatctgccttcctgcacatccccggatgccagcgccttagacatgccatggcaccatctccggcctgccgtgtacctacaaggacgagaaggccacgtcgccccgcaccggtcgttgctgtgcactaggaggagacgccatgctcgccatcacggacgcctcgtcgtgccgccttcctcgtcgcatctacggccgggaaccaccgtctctgactccctcccgatgagcagccgctagccctagttcccctagccttgatagctctgccgcgcttcgccattgctgccgctcgccgcacgcacgaacaacatagaagcaaccgcatccaaaaccacctctgtttctccttgttttccggcaaacgccgtacacct

SEQ ID NO: 4981 - DNA, 387 bp, Avena sativa
  modified_base (341)..(341): a, c, t, g, unknown or other
gctgccggaccgagctccaggtagggaagtttcaccacttgattcatgagtgacttgccggatatgccgcagtgcctgtacagaaagaataatcacatgtcgtggatacatcagtcagattaaggattcagtgtaactacagaaggccaacgaattattagcagcaatctaacagaacgggacacatactgcaatagttgttttctgcgcaaggatctttggagactcgtacagtggcctaagcacctcaggcacactccaggcctacagaaaacaataatttagaaattcatgtctccgaagagtattcaaggttgtgacactcaatgatatgaaaaccnttgctgctacttacatccaaatcaacatgatccacaatgtggatca

SEQ ID NO: 4982 - DNA, 391 bp, Avena sativa
cagtgcagttcaccaaataggcagtccaccgaaaccatcttcgtccatcttcgtccaccgaaaccatcttccctttcatggtcgcctcactcctccaaatcacattcccgtgactgctgtcctcaccaaaatccatctgaaaactgcaagaaacatcaaatcaaaagaaatatcaaccatcttggcgagcagtaaaaaacactacatccaaatttctagatgtggagcacatggttagaaaataaaaaataaccaatacatctccagataggcagatgtggagtacatgaacaccgacgtagatcaagaaattaacctataaaccaatcgtagaaggagaaaaaggctcagctgtaggaacagacgtgctcgtcgccttcgccaggaccag

SEQ ID NO: 4983 - DNA, 488 bp, Avena sativa
aaataggtcgcgccgatgctacaaggtctccgccatgcaccgatttcgctgcaaaacgaaggtcgtcgctgctgtgttgctgcaatacaggcatagagccgcgcgccatggtatctgcaagccagagggttggggcggggtgagattcgtcatcggcgacgctccaagctttgcatgacggggattttgactgtacggtatactagtagagtaaaggaattcgtcgtgctgaactgtccgtatggccgggtcgtccctgcatgtagtactacatagcctcgggaagggggctctaggtcacttgcaatggcaggagtacaggctgtgagccagctgatccaaggctggctctgcgtctttcttctcgctcgctttgcagtttgcactgccaccacacatgcaaaggtcaatcttactactaatccacagacaacttaattatactactcctaccgtagtagtacgcattatcttatccctgataatcg

SEQ ID NO: 4984 - DNA, 498 bp, Avena sativa
ataccactatctcctcaatatacttactaaggcccattgtatcagataggcatattgagcttaagtcaagacactcaagatcattttctgcaaggaacttctgtaatatggttccgattatcttgaaattgaataatcttcatatcttcttctaactgggagttccagcttacaaggcgattctcattttctggtggcctgatgtctatgttatatggaaataaagcagatagtctgtcatccaactcctcctcatcatcaaggtccatatccataattcttgagccgaggagcagaactggcccttcaagcttggtcagtagcttttcaaacaaaagatacatttttggggatttgtgaagaaacttctcaacatctcttatgtagagtacaatcggactcttcttagataccgaatgcagaaccttgtataacgcttgtaccaaaattttctcatcaaaagtccagctgctagcacgcctgagaggagctgcactg

SEQ ID NO: 4985 - DNA, 484 bp, Avena sativa
cacatcataagcttcagctaggcccagaatgtagttgaagaagcaacatgcagagcgccagtgtggttcagggtgatttggttctaagtccatcagatgacctcttctggtttggacggccaaggcttataatgtccctaatccatttcattctcttccagaatgcctttcagattgcgttcttcttctggatactggtaagcgcgatgctgtatatcaggtcgtttatgaaatgcactcagttaggacgccatgcatggctgaccgtctgatcgcaacattgtttgcctacttccgttgtagatcacatatggattcaattcatgcatcatggggaaagctggatttaccgtgcccaggcttgtcattgggtattttatatgtgactaataatatgtttctcccgtatgaaaataaagtaaacacatgatcatgttcttgagtctctacatccttgtacatgcagggtcgttattcaatttgt

SEQ ID NO: 4986 - DNA, 379 bp, Avena sativa
atcgcgatgtgcctttgggtgaccaacagcaagaggaaacgaaatcatgtgccacccggaatcacagctgcgtgcggtggtgtggggtggggtgagaatggttctggaagaaaggagactgcggtgtccctgctggaagaagagacggcggccggaaaaagaggcggcggagagggcctccactccatctggaggtcgtctagcattgagaatgaggtgcagggagcccgggaaagcttcgcgcgccagagcttgtggatgaggaggtggaagaggccctgctcagctgctggaggcacgacgggcgaccaagcacataccgcacttggctgccatggtgacaaggatggctgtatggcggtgtccagtttctttggtg

SEQ ID NO: 4987 - DNA, 442 bp, Avena sativa
tcaagaatgaccaaactggggaccctcaccccagttttctcccttcacgaccacaccccagcaccggcaccagctccagccactcacccacacaatgacacaatacggactcccagctccttcacgaccgcctgcatcgcctctgctcatcttcccatctccgataaagatcagaggggctccttcgcctccaacttctcttcctccccaagtccgacctccctaacttattctcctcctatcagcacctccattgcaccattctaactagcttcctgagcaacaatccgtgcggagcagcaatcaagcctcatatggcgcaccttgcaacatgaggtggctacccccacacagagcaacagagtgcggcctcctgccacctaggtgactacaatgcccccggtgttgttgataagaagagctggagtaggtgctgcactgg

SEQ ID NO: 4988 - DNA, 444 bp, Avena sativa
cgccaccctcctctgcacggtcttcttccccacatgcgccagcttgttcaggatccgcacctccgcctccttggcctccttgatcagcttcaccacctccctagccgccagcagcacgcctcggcccagctcaggcgagatccagattcagttcggtctcctccggttcgtcacacatctcggactcgcgcgcaatgcaccacagtaggaaggtgagcttcgccactaactctctacatgttcctgctcttgcatcatgcactaaaggctctccgtggccctgcaacaaagtcggcaatccgggttctcgcacggcgtccccatcatgcgaccggccgggaagcaagctgcattcacgccatcccatgactacaccggcaccgaaaaggacttcattgccaccttccgctaccagcaccaccacgacaagctcacagtgctacc

SEQ ID NO: 4989 - DNA, 461 bp, Avena sativa
tgcagtgctaaagggtgtgatcgcgcacacattccttttgaacaaatccatgactacagaatgaataattttgaacgtcaacgaacgcatgatctcacctttgttcaatgcaacctacggctacaacacaggtactaaaattatctttacatagaatgttaccacatattgttaattggcgacatgttattctgaagaaaagcagggatgcaacaactgatttgatttgtatcacaggcaacaagacaaggcaaaggcatttgatcctgtctcagtagacaacatagacatagttgatgactgggtagtggatagatctgcaccattgccggaaccgactgagcagcccaactggatggagatcaatcaaccattcaactatgtcgcctcagcaggaccgggtgatgaatttgagttcttcattgaaggtacatcctcctttgcttccggtttatctgcac

SEQ ID NO: 4990 - DNA, 439 bp, Avena sativa
cagtgcagaagctgtacgacgaccagatggacagcggcacggctcagttcgcaatgtactacaaggagtggctgaaatgcggtggagatgcgccacccgctccctccgtgccattgcctccgatacctgaggattttgacaagtgggggaagcactccttgtctcagcgcactagctccatcaacagaaacctgtgcgtgaacaatgccagtggatgaactgtgaaaattgttgctgcttaattgccagtagtagagactaaagagtgataatattatctgctttttacaggtacaatgcggttttcggcacggcatttgaggaggaagatgtcaagaatgcaaaggtgccaggtgaggctgaatttcttttggatatggatgtgcaattagatggaaatccagctagcctgaagatggagaagcttgctcatgtgagt

SEQ ID NO: 4991 - DNA, 285 bp, Avena sativa
agtgcagcattcctttgttgttttgcctctccatattaaataaggagtgtggtgtcagtctccactagattatttaagaagcctgacatatatgtagattttcatgaaaaatagaaagctacaagtatttttcctgaaagaagcaaccactggaattcagtcacccatagggacaccgatgaaagtggaattgacttaaaggagtgtccatgttgcataaaatcacttgtgcgccactaaggacaaggtgctatggcatcattttttacacaaagcacaaaggaa

SEQ ID NO: 4992 - DNA, 473 bp, Avena sativa
agtgcagcccaagcttcatgccatattttgaacttatgtgaccaattaaatctgaaaaatggtactcatgtgaatggctgaaactgaaaagggaagggagtgccctcttatattttatcagtgtactctaacaatctttagaaaggccatatttggtattgcataatttgacacgatagatactaattgactgtattacatgttgaaaaaaatcatgaaaaggttcaagaaaagaactgcaagtaagcataaagtaatgatcttcaaaagaaggttactcaaaaggatcatttaccaccttggacacactaattgtttaagactggtatataattagaccttaaaaccatagtaatgaactataagacagtgagacactaactgaagtagtcaagtcagtgatacaagttgctaacctttgcaaacgtgcttgcaagatcatcaatttcagacaagttactcatacaatcaat

SEQ ID NO: 4993 - DNA, 406 bp, Avena sativa
ggttctagcttgtctaggaactgggacttaggcagacagatcggtggtgagcatggtgttctcatagaatgcagggatgtgcataagtcctttggggacaagcatgtgttgcaaggcatttttctagttttcactgataaaaaacacgtagagcagagggcaagaagaaaacaatgcatttcatcgctccataagcatagaaatttgtgtgacttcacctatgaaactcttttgtcaactgtttgctcagtacagtagtgaggtgccatagcttgatgccactgctgaaatgccaagtatagttcactgctgaagccactaatctagagtttccacatgttcaatgctaatgaatcggtacaataattatcaggtagaatgagcgttagtctgcactagatccatc

SEQ ID NO: 4994 - DNA, 496 bp, Avena sativa
aatgttgtccagatgatatctgtcatgttcgttggccacctcggcgagctcgccctctccagtgcctccatcgccacctcctttgctggtgttactggtttcagcctgttggtatactatgtcgtcacaccccttttattttcatttatgttggacctgctgaacgaacagttaaccggagtttagtatcatttttaaggctttgccatgtgtttgttcattatgatttcagtctggcatggcgagcagcttggacacactgtgtgggcaagcctacggagcaaagcagtacaatcttcttggcatctacaagcagagggcagttgttgtgcttactatggtgagctctgttgtcgctgtgatctggatgtataccggtcagatccttgtgctctttggccaggacccggaaatcgccatgggggcagggagctacatccggtggatgatcccagcattgtttgtgtttggactgctgcaatgccatgtccggttc

SEQ ID NO: 4995 - DNA, 441 bp, Avena sativa
attttagcagctgtgtgtgagagcacacaggacttgtcctcggttgggacagaatcaatttccttcatatatgtttgatgcatatgtttcctttcgtgactgagcaacgatccgtggagttagcatacgagtggtgctgaagtttacatcttattccactgcgtattttcagatcatgtttgagtgtgctaatttcccaacatctttgccactattgcggtgggttgttaggtgtagaatacaaaattgcgtcagtcttagcgaagccctgtgcaccgcttaatgattgcatagttgcttgcagcgtctgctaattgagatataaagtgatgtagtgcctcacttggagatgagaagagaagagagctccatttgcctgtggagatttagctagcaacatggagagagtagcaagtaagcaagtgtagttccatgcggtgg

SEQ ID NO: 4996 - DNA, 496 bp, Avena sativa
caccagacacaatgtgccccgcacaatccccaaacaaactgtgccctacaaaaagctcttgaagttgaggatccaagctggcttgttgacagaaatagattaaggtctttaggtatgctaccaattttgttatcatttatattattttatgttcccatgttgttgtcttaacaagattggattatgtttaataagaaaaggatattagcatcttacatttgcctcactcctgatagaggatgtaagtgccattgactacagtttaggatgcatttaatgaggacatgaaatggcacagtactattgtttgaataacatacaatgcaaaatattggcatacatcataggaaggataatgctaagcagttcagttagcagaaacacttcatgctattacactgtgattatattcgctagatattttacttgatcttctatccttgctactctgatagtggaattgaatgaagtccgggatgcgctcaaggaccctgaa

SEQ ID NO: 4997 - DNA, 524 bp, Avena sativa
gatggtccagtgcagaatgcagacgctttacgccgagtggtagtagtagtaagtaccgagagagagagaaaactttattaagcactaacgaacaacttatcaacttatcgtcttaaacaactgatcatggcccaacttttgtgcaaacatacatacataatatgcatgcatggccggactctataaattaaggtagggacagtaacccggagacatatgcatggacatgtatttgtttaatgtgtagtatacgctctagttaaacccctcctgacaggcatcagtgcagcaaacactgggatggtttgcaaagcaggaggtacacgtaccatacccccctgaagcttgctcccgcgaccaggaggttaaatacttcagtgcaagcgacctgatcagcctagccttctcctctctgcatgatctgaattctgagataaagagtgaagcatactcatagatatctgacactctgccaggatgctaaggggttccacctacttgtcactggctgcactgaatccatc

SEQ ID NO: 4998 - DNA, 502 bp, Avena sativa
tgactgactttcgtcgtgtgtgctgctgcgccagcagtcaaaaagtgtcccttgttcaaatattagtatgagtttgcctttggctgcactggatccatcgatggatccagtgcagacaaaaggcatggtgaaaaggagggtcaattattcggtgccaatcatatatattgtcaaaacggcggatactgctggcgaaatctaagtggaaatagtagactgatccagccaaagaccattcttcaaggaacaacctaggcgggagtagttaacttattcagtgaaagaaggtgcatgcttcaaggaactacctaggatgcttgggatgtccatggacgactcatggtgcaggaggaggacaaagggaagcagacaagtatggggtatggcgcatcatctctgaccatgtaaaggactaaaggtgtatgtttggcagaggagtgtggagcattaggacggagatgcatggattctgcattgcggctgggaaatctgtgaggtgcag

SEQ ID NO: 4999 - DNA, 390 bp, Avena sativa
ataattcctcctggtgttgaatttggtcatattgttcatgattttgatgtggatggtgaagaagaaaaccatggcccagcatctgaggatccacctatatggtcgcaggtcactgcattttcttcagatttccacatacaagataccaattactagtttaacctttattgttttaatgaaaattgcttgcttgtccctgttaatcctgtatttctaactctaaacactgattatctatgtatgtacaactgatgacagataatgcgcttctttacaaatcctaggaagcctatgattctggctgttgcccgcccatatccagaaaagatatcacatcgcttgtaaaggcatttggtgaatgtcgccactaagggagctcgcgaatctcgt

SEQ ID NO: 5000 - DNA, 401 bp, Avena sativa
gctggctacagcgactctctcgctgtcttgtttgggtgagacatcaaccatctttgcctggccactgctatcaacatgggtaagccctggctgagcctccccgagtgcagaagtgggctggactggttgctggggagggactggttgcaggggaggacttgagcccaaaggactggatgaaggagattcaccaaatattgattccatttcctgcgatacaaagtacatgataattgctgcaatgatcattcatttcaattccatgagaataaattagttaaattcatctctatgaggacattgcagaaatgccaagaccaagtcaggaagctatatttagtttctgtagtttgtttttgttatatttcttttaagagctctgcatactacaaatattttta

SEQ ID NO: 5001 - DNA, 525 bp, Avena sativa
ctcttaaagcaagtaccggcatgtctaatactcaccaaattcagtttagaaaggaaagagaggttatggaacttattaatccattttttggataaaacaaatgagtaactcaccgaattctgatatggagatccatttgtatactggagctcctccgccatcccctgaatcattcaaatcatcttggctgtcagcaaaccgggatagtgagctactggaagatcctttggagaaacagcgcatggcgcgagaagctttaaccaagtcagacactgcaaggacctatcaccaggaaaaatgaagaagaacatcacatcaagcaaccatgtatgccttagggtaacctaactaatagaataaggacaagcatggctttttttgtgtaagtattaccatctccttataggctgatagaagcatctcttgacattgcacctgaacaagggaaacagcatcaaaacgagaccaacaaaagaacttaaaccatcctgctgactgacgaggattggctgagttcctgcactg

SEQ ID NO: 5002 - DNA, 435 bp, Avena sativa
cgtcaactcgtgggtcaacccaccatcaccgaataccgccacagaggagttgttagcataaaaccaccactttgagagcaaaattttggaaatctacaactttacgatttcgctgaaaaatctatcatatttggagtcagttttagcactaaactcggcttgaccataaattgacatggaaactcaaaaggctgacccacttgcagcgctaacgcggcaactccagacagtcggcacggccgttaacggcaggtgtgggacccaccacttgacgcatgtataagctgagtgaccgttgaccacgcgcatgtgttcttccccgctagggctaggatgttccaccagctccttggttgtcacaatacactgttgcctgggttggtatattgtttcttatgatatctaatgacagcaacatatgccttcattcttgct

SEQ ID NO: 5003 - DNA, 467 bp, Avena sativa
attctgtgatatatccttcagtatagtttctatctgcattatattgaggggcttcaaaagaaggggaaaatgattggttatgcctatcatcacaatccttaatgcatcatgcaaagatttactgagcagcttctcttttattctatccagagtaactgagcaaatgctgtccagaacctgaagtgcttctttttcatcaagttcctgacaaggggaaatttaagttaatctgaaacagaaaatcaattaacattgctcccacaataatttaattgggaaacatatatcagatcccattagaaaagtatacctctacaatgacgtctgagagtttctttatgcctaaggccttgcagatgctctgtggaagatctgggtgagcaaaccttatcctggatgtatttatattactcagcaaatgcgaaccatatgggtcaatatacacacatgatgtagctgagacaagc

SEQ ID NO: 5004 - DNA, 483 bp, Avena sativa
cctacacatgatgacctccaaggtgcttcctccagcaccaaagctactggtggtctcgcccacatcaagatcggactccagcgcagtctactcatactcgctgtcaggccacagagatgatttcctcttcacctttgactctgccttccacgactccgtggaagtggtgacgccctcaccatgctatggactcacccttctatttgatgctgctgtgccagcttactatgtttgcaatgccgccacacgggcaattacacgtctgccaccttaccgttatcctggacgcagttacactgctggactgggatttgatgaccagacaagggagttcaaggtggtgaggttgatcaatggctataaccatgaaaaggaggcggttatgtgtgatgtgtacacaccgggagctgattgttggaggccagcggctagagaagtacccttcgggctgttgcagttcgcgatttctgcactgaatccatc

SEQ ID NO: 5005 - DNA, 423 bp, Avena sativa
ccagtgcagatgctctatttgaacttggacgtatatcaaggctcggcttgcgaaactttaaactaacccccttcattgtggatggaattttggtccctccaaaacctttgttcaaatatcttgggaaaattagaatgagaggaactctaccaggccgttggcaatcattgtcaggatcagaagcgatgcaacccttttcatctaacaaactgctatctcaactttttgtgatccatgattgtaatatgctgaatgatttgaactgtgcaataaaaaggctacgctccccatttcagaaaaatatctaacaaactgctggagcaagtgagaatgtacccatcagggaggaaattcctgtattacatacaatcgccatggtaataccccaatatcaatgcacccagtctacttacttacatcact

SEQ ID NO: 5006 - DNA, 444 bp, Avena sativa
  modified_base (99)..(99): a, c, t, g, unknown or other
ttttaaaaagcaaaagcgaacacaaagtctgtcaaaatttgatcctaaaatgttacaattttctttagttactccatatcaaccagttaatgaggccanccttttaagccaccattattactacagtcagttgaaccaagtcaacctattaataaaccatataaaatctaacttgttattaacgacatcatttagatgtactctacaagtttagtagaagaccagatccagctgtgtacctttagttcaaacttctaccgaacatgacccaatcaaaagaatactgtaaaatcatctgaaataatacacataactgtgcaaactggtaatcacgacaccagaacagctaagctcaaaattatccaaatacatctcagcagtgaagagcatagagcattagcactccggttacatcgttcaacactttttatgtgcaatatacaa

SEQ ID NO: 5007 - DNA, 317 bp, Avena sativa
caccaacatttacaccacccccacagcaattatatctagagaacacaataacacgtcacccaaaaagttacacagccgcaggcaaagttgctaaagcaacacaaaaccttgcctgtataataaaaataccactgaatttatctaggcctgtttgaagggaagaccaatatactttagttgcacagcaacataaacctaggcctgagcacccctcacctataaacacaacagtagggaataaacaaagatttggacattattaataagcactataagmaaatattttagaaaataatttactagaacaacagaggtag

SEQ ID NO: 5008 - DNA, 486 bp, Avena sativa
gatttcactgtgagataaaaattgtttctcgcgatttattaacagaacaaaataaaagggggaagcgacgactgttaccttgggtgtgtacccgtaaaccagggtagcttactttcaactccctagcttgctcatttaattccgcgttgcaactgactaggctaaattcttctagcaatggcggaaagccatctttaggaagcgagcggagtttagtacaatgcccaagtagtattttcctgagagacagaaggcgatgtaacccttgagggagggtttgcagagaataacagtgttggaattccagtgtctggagggaggtgagaagcccaagtgctcccgcctgctcttctgtgaagctttccatctgacgatcaaagctgaactgtagcgtgtggagagtagtggcaaggaggctgccgatgggagcaacaaggaccgctgagatgctatccacgtgaagcaggtctaattggaaggagcctg

SEQ ID NO: 5009 - DNA, 354 bp, Avena sativa
tgagccccgagccaacaactccacattccccaacacctctattgccaccgccctggagctctactattgtcgttgttctgcaccatcacgcaacaccgcccgaccacaagctctccatctcccggcctctctccctgcaacacctccccgacagccctgacccttggcgtcttgttccccttgtacgactactatctcggatgcaacctcttctccctcatccacactcagcctcatctacgatttcatcttcctaccattgtattcttccacggtggtagatctctttccctagctaaccttttttccataaattcttgaatagattgtcctgcttgtcttgttgactagtgg

SEQ ID NO: 5010 - DNA, 377 bp, Avena sativa
  modified_base (357)..(357): a, c, t, g, unknown or other
ttgcatttttatgcatgacattcatgtaaatgagtagttactgataatatgcccaagtattattgttcctcaactgaactgtttagtaacttcaggtctgttaagatccgtccctacgtgttgtacatttatgtttcacacggtaagtgtattttcctggctatctgagatatgttgttttcctgggactttgtcaactctttgcttttatttgtatactcgctctatctttgtaactataggcacagttaatttgatagctatactgcctatttttctagccaaaagaaaaacctaatgaacttggtgcaatgtggtttccataaaaagccagctaaatttaaagatgacaaaatnttgctagcactacactgtaa

SEQ ID NO: 5011 - DNA, 422 bp, Avena sativa
aatgagaaggctcccaagtctgctgactctgtaacaacttcacaatctgtatcttcattcccacggtaattatttgactagaggcggtactgtatcttattttatgttcatgcgtttccctgtggaggtctagcagagaatctactgcttgtagttccgcaccactgcatgctttattctatatactagcagaaggacaaatttgcgtggtctgatctatttaatgtgggacctgcatatctgtatttcttaacatgatttgtctcctgtatttaccacagccagtaagactcactgtttgtgccgagcttatcagacttgtaatttgagaaaatacttgcacttttcagctccgagagtcgccaccgagaagggcaagaatcagaaataggaacacgatgaacccgatctgttccctgcca

SEQ ID NO: 5012 - DNA, 580 bp, Avena sativa
  modified_base (236)..(236): a, c, t, g, unknown or other
ggatctctggattattagttctcgttttgacgtcccttccgattagatttcgctgcttatacctaactattgcaaaggtttttacggtgaatttgttgtttgttaattgttactgcatatctctacttctatttttattactttctaatcgttgagaatctccagcggtgctgcacccactaagtgcccaggacagtattggccatatttctcctgccatccctcatcgtccccgnagcggatggtgctcgtcggtgcacgcctgaacatgtccagaagcgtccttcttcagtaaccgagccaccctgccaatctctatacatgttcagaacctaatagcccagtttcgttcgtcagctaacaccaaaacagtctagaggccctcggttccctgcaatctcccatccgctccagttcatgtccagtgcatatcttcacgggatcataaacttggtatatcccaccatctacataaccaaatcgttcacaaaacagagctctacaactctcaaacacgtcctcgcaaaatcaatgcatctcgtagtagctatcttcgttcttcagttagcagcgctgcact

SEQ ID NO: 5013 - DNA, 448 bp, Avena sativa
gcgtgacatcattggagccatctcatggggcttgctgtgttgtctcctaatagtatcctcgtacatgatgctatacttcaggcacttctggttatcggctgttattatctgtgttggtattcttcttcctaccggcctgtatattttgaggcaaagaaagctggctaagaagagagagaggagattattgttgcctctctccatgtaaggttgtttggtagtgataggtttcccttatattgtggttattcttgactaaatggaatccacattcttggcttgtttagcacacatctgacagttcataggcctctgttgcccagtatacgtctatatactttagtcttttctgaagtgctggaagaaataccatcattttttgggctccagtgttgtgcgagtagataatctccaatgttcttttgggtacagaggcttgtgttctctg

SEQ ID NO: 5014 - DNA, 432 bp, Avena sativa
gtgcagcaggtgtcggagtgggatgttggtttactgtctgggaggcacggacgagaggggaacaaatgtgcatgcaacggaggagcatggagcagagacggcaacagagggctacgggggccagccagtttaggaggggtaagcagatatgcgccgggcgaaaaccttgtctccgacgcacgaccggagcctgcgccgggtgaaaaccttgtctttgacacacggccggagccagcagcagcgacatccatggatgtcgtcatcttcttggagacgttgttatggtggcatgatcctctcctcccagtgttcctgccccgagggaaaccattaggttcaattcttctggatcggacaatgatgacactatgcgccattcccttccttggaggcatcatctttggggtagacatcggtttggggacaagtggt

SEQ ID NO: 5015 - DNA, 334 bp, Avena sativa
ccagtgcagcagggacagtcagcatcttcaatccatcaagtggcatctctggaatcatcattcggagctggggtggagcatttaatattagtgaggtgtcaaggcttaacaggggtcctccatcttccctcgtccctcaaggtactacaaattggccggtgccatggattgacatctctggaatctcgctcgggagagctcctgtccttggagatgcttgtgcttctacaatgctgtaccctgtcatccctacctattgggccgcaagcatacccatctctcagacatcttaccattctagactgccctcgtataaagatgctccctacaagcc

SEQ ID NO: 5016 - DNA, 360 bp, Avena sativa
ttgcaaagtgattagaaaacctatcctgaaactattttgagccgagttacttctcataaataacggccaagtttcaccctttcaatagctgatgtctgttcactctcacttaatgtgaaacttaggcatcacagaaataaaaaaatggttaaaatattgtttccacatttctgttaccttttcacctaataacaacgttgcaaaacttgataagcaatagcctccgtgttttatctatatatcctcttactagaaaatgaaagctttattacacctggcctctgcatcaatgatgcatataactttctagaaaatggaagttttatctttgtatctagagtgtttttgacgacgtgctat

SEQ ID NO: 5017 - DNA, 476 bp, Avena sativa
gtgcagcggcgatgccttcaacaaggtaacgatgagaaagcgctgccatcgcccgccaagattagggtcatagcaagatttttaccggcagccgtgcctccccaattcgccgcaggtactaaaagtgggataaacagcgcgaccagccctggccgaccacctacggcgaaggaggccgccaccaccatgacccattgtatcaagacaaattccgatcttttattttgtctagactttaaaactaaataaccgaatgaaatggataatgtatgtttattgtgaaaatgcaaaaactttgccgacaatttccgtagatggtagtgtgtagttctgttcaactgaactggataatggaaatcatgatgactttttttgaacatgtccaaatcaagttcgtttaggtagcacatcgcgatcagaactgtactcggcccgtacgtccaaatatgtaactggtccagcaacatacctgtttc

SEQ ID NO: 5018 - DNA, 543 bp, Avena sativa
gatggatctagtgcagccgagcaatcagagccatctgcaatttactgtctccttattaatcaatccttgaaaatagcacccgtgaatcggcagagagagcccaaggatttcacaaacctcttggtgagcagaccttcggcagcgctccgtctgcctcgcgaggcggattttcttcaacacgtacctgcaaccaaatcacgagcatacagacgacgtcaaccaaagccggcgggtgtgaatgaaggaaaaaatcaaatactctggagcataataaaaccgtatctcctacttcttcttctcaatcttgtggttgacgaggatggcggcgccgaaggcaccacgcccaatctgctccatgatctcgtactgatccatccgggactccaatctgcgtcgtccccagaatccgcagcgagatatacacagcagcctcgcggcaacagcgactcgccaccaggccgtgtgattccagacgacgaatcacactcctgctgccatgcccataccgtagctcaaacgcctgcacatcctcaccaccaggtc

SEQ ID NO: 5019 - DNA, 442 bp, Avena sativa
catgatgttttgatctgtcaagaaagacaatcaagcagaaatggttcattctgtgtataaacaaggtctcgttggctgatagcacactagctttcgctttacttttttgttggcaccttttgtgatgcaaccccgtaaacacagtgatattatgacaatgctaattgatcgtcagtatatgcgtggagacaaagctggctcactgccccaaccgcccaactgattcttaacaccttttagtgtggttcaaatctttataaagtgtaatgtaatgtgacgcctctctataagaaaagacaccccgaaagttgtccatgatctgattgcagaattctttgtcagtgttttcaatttccatacgcccaaaactgctcttattttgctcaataaaaagaaaggatggcagcaacttttggcttcggaaaaagagggagccaaatct

SEQ ID NO: 5020 - DNA, 315 bp, Avena sativa
ccctgattcctccaaggccagagttgtatctatgtacagcgtaacggtggcaatgttatggcaccaaatttaattcattggagatgcaaatttcagatgagactagcaaagggagtagctcgtaactgcactaaagtgttgttgaaaaaaaattctagcttggtatccatttctaaattaccgctccataatttgagacaaataactttacattactgaaatacagaaaagaaatatcatgcaaaacatatggttcagggtatctcagtagtcagtactgctgcaacagcgtactgcatctagcatgcctgcacg

SEQ ID NO: 5021 - DNA, 347 bp, Avena sativa
tactactacaaacaacgagcacctcaacccgcggctgccggcgcccatggtgttccaaggaggactggcgcacggcgcagaggttccaggctgtttctggaggcatcggggacaggaggaggaggccctcggagggccccggtgggagctccctgttctcggtgcagcctggagcgcgtgacggcaatggggcggagtttcttatgagtgataggatgggcaggagcgacaggaacgggcttgcacgtcagcagtcgtcggactggctcgcacagggcgctgatgggcttattgggttgtctgatgttaatggcatcgcttcccgtcgcaagagcttcgcggatgcc

SEQ ID NO: 5022 - DNA, 395 bp, Avena sativa
gatggatcccagtgcagcatctatcttccaaagtatgcaaaaatgaaactagttttggtccatggaatataagagtctgcaatagttttgacatagttttgttaaagtattgtcacctagcagttttttgttcttctgggaggtttcaactgtacaattagtgtgtattcttttcatggtcatgctctttatttcaattgcagataccgtacattcctggaatatctatgctcaagatcttgaaggatatcaaagtgaaggagtgtctgtttgatgattttatgcgatacgaggaagatgaagctagaattaagcagcaccgatggtccaagctgagccacaatgctccagattttgtgcctgtatcacagcgtaggagggatgcgtctgatgct

SEQ ID NO: 5023 - DNA, 465 bp, Avena sativa
aagagtaaaacacagttgccaaaatctgttatgatagctctgacagctgctggtgccttcttgttcttagtttaggtatattatctctgctactttgtattgatcatttcttcattgcccatattatattgctagtgaataatctgtacttatttatttcatacaggaatgctatagatatggaattgtccaaatatgttggtgaagcttatccaaaaggtgtgcgtgccgtttattgtaccggcggaaaagatatagaggaaccaggcgctgattttggtttggcagtagttatttccgctgctagacgcagcccacaaaacttctggtatgttttctgacttgcgtctgttacctctatgttataaggaaattaccttgtttagtttaatcctgcacctacgatcagtgactttggccttggttatgatgacgcctgaaggttctgttgatccggttttagca

SEQ ID NO: 5024 - DNA, 369 bp, Avena sativa
cggttggctgtgcaggtgcagattcttttcctttttcaagagagccaaaagtaaggtatccgccaaatttggggcaaagaacacgagatataaagcccctgttgttcatcaccagtcctatgatcggcacctgtttttcctaattcaatattcaaataaaagacaatgtgaactaggaaacctgctaaagcacctgagaaataaaggatggagtcatggacatcatcacatagcataacattttctcaagtgtgagaacccctatattgatgcgtgtgcatagaaagtgcattcctgctaggaaattttacaaatctatcttgtgttaagagccatcacagtactatatattagtaactaatagtagcc

SEQ ID NO: 5025 - DNA, 376 bp, Avena sativa
ccagtgcagcggataagccacgccatggccaccggccaagctcagtccgcgtaggcgtcaccatgatggatacctcagtacacggaggtattccagggagggagagaaggacgtcggcgcccggggtggacggcaacgatggggatttctatttccaacctaagccatgggcttgtgcaccgagagagcactatgggagcgatggggattgggggccatagggaggaagaggggcctggatccttcggggcgtccaccgctttgaccgcctctcggtgaaaacaaaaggccacagaacgaaccgcgtaaccagtgaccttccgaggtccggagaagacgcgggtgacactggaggaggcaggcgggttctgctgtt

SEQ ID NO: 5026 - DNA, 404 bp, Avena sativa
agtgcagagaagtgcaagctagaggaggaggttacttccatggcagggctgctctaccgagcccatgaggagaaatcacgtgtgctaaagctcgcttgaagaaaaacaccacccttgtttggaaccatgctttttcaaggtgctccgagccaccgaccctctcatagtcatgcatcatccctccttccaatcataggtaccattcttctcagagaggcatttttaagagatcatctccccgcgagaaggcaatttccaagatttcttccagtggtcctgattagggtgcagcgagggagctggtcgtgaaggtcctaatagcactctggccgggctcaccaagtctggagctcttgagtcccactgcctggagtgtcctcttgctctagcttgcacttctctgc

SEQ ID NO: 5027 - DNA, 462 bp, Avena sativa
cttattattcctcgctaggttctccttcggcgtcaggtgttcaaaattgatgtcaagatgagcacacaactgtgcaaaaacacttccagtcatgaatgcatcatatcctgcctcgtgcttagcacctgaagcaaagcaagataacctgcaggattaatggaagaataaaatagaaagatcagaaacaatatcaattgataaaaacatgtataattgcattgaagatgaaaagcagtagcaatattgtacatggaaaaacaatttcggcttttttgggcacaagcatgtaaaataaaaaattgggtacatcaaatatgacggatcaagaacagaccataaattgtttcacaagcaaataaactattatagaaagaagcacataaatatgaagaatccagaacaaaccatacattgtttcatctgcctcaacttcaattctcacaggagcacgggtagatgact

SEQ ID NO: 5028 - DNA, 558 bp, Avena sativa
accattgtcagttactcggttgtcaggtattgatgtattttagggaaaagattactaaaaaatactcacatgatactggggtgcgcccattattcatttgatgagtaggcctccgcgaagtctagaattcttcgcttgatagtctggggaattattaacagctaagagaatcagagcatgtcatcaactcaactgaaacagcctaatcaactaactacaaaaacaccatactaatgatactaaaagatcacattacgcaccagcaactcttcgtgaagcaaattttccaagcagcctgtcctcacacggtcacatgggtcctggtctactaaacagtgtcctagactggtttgaccacaccacttcctgcatcagtccacatacatacccttcaagttctactttaaatctcatgctctccctccctcttcactctcatccttatgctcttgcagtacacctttcatctttctcctcaaaacatcaacaccaaagcttgtttgctctgcaaaacccacagaagagccatgaagcaaccagtcctgcactagatccatc

SEQ ID NO: 5029 - DNA, 514 bp, Avena sativa
gggcttgcgggctgtatgacgtggaggcctccacgacaaggctggaagcaaattcagaggcggcacttttggactgctgtttcaaggatgagtatgtggcgttcgctggcgcttcggatggatccataatgaggtaaaattaggctcgtggaatctacataatcgcaactggcatgtgctagatgtaatgaagcccaactgaattctttctgtcatttctgtatatcagtattctctctgtcccaaattaattgactcagtttagtgcgtagatacatgtgtatctagacaaagattagtcaattaatttgggacggagggagtacattggcatgtgaaatctacataactacatttagctttgaaacatgccataaaggacattacggtagaaattgtcttattttcctttgtaatgattatttaatctaaaacagttatgctttttttttgagttatatctgtcagactgcatttgaaattagaattagtttgaaacatcctaaacagagca

SEQ ID NO: 5030 - DNA, 472 bp, Avena sativa
aggttttcgtggatttcttctggattgattagggtcttctcatcggaggctttcttataggcgcatgaatcaaggtcggtgggggtctaggggcccacaccccctgtgggcgcccccagtgcttgcccgtgcctagggggtgcggccaccctgtggcccccctcggctctgcttcgtggttccgtgttgctctaggaaaaatatgactttggctcaaggcatataacatactattgccattttcttctttggattcatcaagctctgactcagattctgaagatgaagaagacccatcactgcccttcttggatacgtcagagctcacagcagagcccatggacacatcaaagcaatctgattgattttggggctttctttgtgccatcatatcttccgcgttaggctctgtagatggagagggagatcgtatctcagaatctgattcagagataccacaagagccatttga

SEQ ID NO: 5031 - DNA, 533 bp, Avena sativa
caattaatcgtcaacatagtaccaggttagcatacttgtgggtgcaaataaatttagctagtatcatttgtacaacctctctttcaaaatataagacattttggtagcctaaagcagtctatcaaaacattctatattgtagagatagttagtactgacaatttaaggagtatatttcatcacgaccagtaatgtaccaggtaagcctcctgaaagagctgggagtacccatgtgactggacgaactgccccagcgtcccatcccggtccagatcagggtttttctcatggtcgttcaggtacgtgatggcatcgttcctgaacctgaaaatctcacggatcatgtgccagaagctaggactgagcacattgctcttctgcgccaacagccccgacacgccgctgcggctgccccactcccacctgcggccgtcgccggacagctgtgtgctgaccgacatggacatgtccggcgaccacttcatcttcaagcccagctcttccaaccattctactgtattctggtgcatcac

SEQ ID NO: 5032 - DNA, 369 bp, Avena sativa
agtgcaggtctgcaagggttactgaagatcaacgtgtgcactgtcgccttggagtaaattgagatgaagcaagccagattatatcataaataacagcgagagttcacattcaaggtagctacaactgcaagccgcaagatgattgtagaatttcgtttggcaccgccatggtcatggacatgtagtaaaattcagatcagacatgcactgtgtttagggataacaacagaaaagaccaaaaattctcagacactaaaatattcagagaaattacgacagattctcaggcactcaaaaatttcatagataacaactgaatgaaaataaattatgaggaactyaaaatttcagagataaacaactgcgaat

SEQ ID NO: 5033 - DNA, 645 bp, Avena sativa
cagcaactctccctgcaacaccaagtcaaccacgttcaagggcagggtttacttctctgcaccaagccaccaagccgccgctggcttcaattgcgtcctcctcactaatccgctgctgtttccaacttgctgcagcgccgctatttctcctcgccgcacgcgcactgctggccaccggtctagccttttcttcttcctagagtcaccactgagcctcacctacagctcgccccacctgctccaccgccgtgtctcttgcagggcacctccacacacgcgagctccagcacttggtgattcaccgtcagtcacctccaggaaccagcagcaactccaccttgtgctctgataccatgttggttccaggggaaaatttctggatgggctggtcccttggacctccacaccctctaatatatatagctgaacttaggtacatctttactagtacaccagaatactctagaatctagtagggcactaacttaggctccaacattcactggaatgttccaggcagtcctgggacagcactactatactaacacttactggaatattccaggctctcctatgacagcctccaacagataacttctatttatgattctttgtactctgttaactgctgagaaactactgcac

SEQ ID NO: 5034 - DNA, 377 bp, Avena sativa
gcttttttagctggttgatcttcacctgtagtttggcagtggaatggcattcccttgcaaaagccctagtttacaagaacatgccctgcactttcatataaaatggatcaagggtctatactttgttctgtaacaaagcattcacaattgtcccctatcatttctaccatatagaaattaagatatcctctttttattattaacggggaattggtgaatgagcgatggggtcacagtccttccccctcctataggaacccaagtacataccctgcacaaccagaccagttagcatgcaagtgctgacacgagcttggcagctcggcatactggtgatcctgaagtagagagacactacaaggcagcaggtgcgcaca

SEQ ID NO: 5035 - DNA, 458 bp, Avena sativa
atggattcagtgcaggcattattccaaggtgtatgtagccttcatgccaaaggaactgaacatgctatttcatagtagcgacctctgttgagcagttgaaacgcgttaagcagtttaatgaaacccatgcttgagtacagaatactcttacccacaaaaaagaaactaaatattccctccgcccaggattaactgacacacgaatctagacaaatatgagtgtgttaattccggacggagcgagtagtaatactcttacccacaaagaagagagttctattgatccaatctgtacagctcaggcgttatttattccgatgttgcgtcttatctttgacaatggtgtgctgtaatgaaaaaacttagttgcagtactttgaataaacaatggcttatcttgttataacaaatcacaagaaaatgaagatagcattaacaatgggttcttgactcgctta

SEQ ID NO: 5036 - DNA, 326 bp, Avena sativa
caccgagtgcggccaggatgcgtattcagccgctaccatgtccgaagacatagatgcaggcagattcggctctatcagattcttccattttttgtaaatgggatcagtggaagacgcttggttttacttcaaaggactaatatgatacacatgttctttcttttttcccatctgcatgctagagcgccaggtattggcatgtgagatgtggccaagattttcttagttcagttcaaatgaaataccactgctaatttcagatggcagagttcgtttctgcaaaactctcatgttatttctgtttgagacactgcactgaatccatc

SEQ ID NO: 5037 - DNA, 317 bp, Avena sativa
cagtgcagcctgaagcaaaatctcacaccggtgaattcttggccatacctttacccacatcatgaggaaaaatagttgaatcgtcaaataactaaagcagaaagaaagcgcactggaaatacttttctcacatatatgcaacaagctccaccagtgcaactataaaagcatagagtacagaagcctcttacatgaactcctagatcttcaaattgaatgtagcatcagtaatctcaaacacccgttcgttgaagacccatttgcctgagacacatgacagattagtcaaactaaaagtaaatattcacccttacaaa

SEQ ID NO: 5038 - DNA, 274 bp, Avena sativa
tgacattgggcgcaaccaagggaatcatggccgagcaaccaggtgcagcagcgcaactagtggtggcggtactacaaccaggggtaataataacaaaggcacaaatagaagtactagtgacagcaaccctaataggagaactacctactttgtcagatccagcagtggcaacacaacctaaagcaacacctgtggtggcatcgggtacagtggaggtgacgcttgatgtgccaagacatggagccgtgggggaaacacgaccatggttgccagc

SEQ ID NO: 5039 - DNA, 400 bp, Avena sativa
gaccttggagctgtaactagtttggctgcacaaacagtactattgctgagtgccaacgcacgccaacttttcggtatgttcagatgtttcttgatcatagtgttgttgttataagcccttctctttcatacaaaaaagtaacttatcctttctttgagatgcaacaccctgtccatttgatgtatctacagtactgctgtgctaaaaaaaatgttttcatgcttttcaaagaacataattcagatgtctgaaatcagttcgttggatcattctctaacttatataactttcctgtcaggcttgccaagatcacatctctcatatgtacagaacatcaaggaagggctacctctgttcctgttcaattatgatgatcgcagattgcatggaatttatgaag

SEQ ID NO: 5040 - DNA, 330 bp, Avena sativa
cacattgctcatcatatgcaataagagccaaagtatcttcatcataatcactggcggaatcgtatccaccatcctcaagagcaatcatcacacgagaggaggcacaatcacgtgaaaagtgaccaagtccaccacatttgcagcactgaatttggctggacttgcccgtagatgccatggaggatgcaacactcgggactgatcccgtagtagtctttcgtgcagcaaacggaggtggtgtagatgttgtagatcgcgtagatgtggtcgctagaggtgtaggtgcagcagtccgtgacgccgaattcggtgatctcctagtagaacgcc

SEQ ID NO: 5041 - DNA, 438 bp, Avena sativa
gtcaagtatgacttgctacctatgaactcccagagtacatattatcaatcagaaaaaatgtcctgtgaaaattacaaggtaggttactatgatgggtttttctggtggattttaaaggacttattgagtcaattattgtatcaaggaagaataatgtgcgtgatcttttctgcaaagtagttgagctaggggtaccagagcaataaatcatttgtgttacttaattagacaaaatgaacagagttcttgcattgaataaaaaagttgtacacaaatcatcagcaaccaagtaatagaaaaagaaaggaacaaaatataacagtagatctttccttttatctactttgtagttgatgagttcttcacaggacattttttctgattgataatatatactctgggagttcataggtagcaagtcatacttgacctgcactg

SEQ ID NO: 5042 - DNA, 449 bp, Avena sativa
agtgcagcaccacagcattcaccggcattgatggaagtcagccagataaagtttgcccggctggcaaactgtacttgaaagattttgcgttgcacgttctccagaatctacatacccagatcctgtgaagcctgtgatcttttccagtttggtcccaatacacgagttccaaccgcataaattgtgctagtacgacatgtgcaataactgattagtggttgtctagtagctgttggtgccttcatcttatgtttcctgtcacttctattgccaatgtgcctcatcactcagcagcatcaatatcccccttctcaaccaacctcttgtttcgttgtcaacacaataaatagtcgccattgtagatggaggaaattaatgtggataaccatgcaatgcagggcatggtgatgtgatatgacaaccgcgcaagctaggcagggtcatggaga

SEQ ID NO: 5043 - DNA, 447 bp, Avena sativa
caggctgatgcaaacatttatgaagggtgccaacactgcgtctacattaaggatgctattctcgctcctgatgtatagattctatggtgtttacgcctgtggcttccatatttgcaatagattatacatgttaattaaaatagtgaagatcggtatcaatctactgtgagtagtgtcattagcattttgcatctaatttgaagtccattatggtgcatttcatgtattcataaaccaccagcacacaaatgcaagacaaagatgaacttacagtactcaccaagctattttttgagaagttgtcatggctgtaaataatcttgcaatagaacaggataactagcatcagtggcattcccaatttcggatctgatgctccaagaatacccaaggactgagcagcagaagtaccgagttttgggtgcattaccaaaacagatactgcac

SEQ ID NO: 5044 - DNA, 744 bp, Avena sativa
gtacgtacgtacgtacgtacgtacgtacgtacgtacgtacgtacgtacgtacgtacgtacgtacgtacgtacgtacgtacgtacgtacgtacgtacgtacgtacgtacgtacgtacgtacgtacgtacgtacgtacgtacgtagtaccccgttaacgttaccccccgttacggttacggttacgggtccttggagtctcaggatggatccagtgcagcaggggtacctgcataggcgggtatgacacgcccaccgttggcctctgagactgccaggtatcaatacctccttcacgaaaaaacccgcaaattagcataactcaagaccatatgtcatatcctgagatgcaaggactgcatacaatgtgtactcaacctctcaaagtgcattttagaccatgctaaaagatttccgatacttgttttataactatccacatatgctaattacaatgtgactaccattggtatccgcaatgcaaatatccagcactaacattaatattcagatgaactaacaaaatgggcgcatattatattgaaaagatgatctagactaaggtgaaaggatcttttctgtaaaatagttttgcacgaatctccaacaaatcaatggtaacgatggtgccagggaagcaacgtgtatgtggtattgcatttccgggcgtttctccttctggtacctctcctccctcgcacgtacaacttggtacaaacttagtgctagggtaagggctgccggcct

SEQ ID NO: 5045 - DNA, 533 bp, Avena sativa
gatggatcccagtgcagtgatgcaagggctactgaaagttattgcagggattgaaatctcattcacactcacatcaaagacggtgagtgatgatgtggatgatgaatttgcagacctctacgaagtgaagtggacttcattgatgataccacctctcacgatcatcatggtcaaccttgttgccattgctgttggcttcagccgcacaatttacagcacaattccgcaatggagcaagcttcttggtggagtgtttttcagcttctgggtgcttgcccatttatatccatttgcaaaggggctcatgggcaggagaggcaggacacccaccatcgtgtacgtctgggctggactagtttccatcactatttcattgctctggattgcaatcaatcctccatcatcagctgccaactcacagttaggtggtgggtcattcactttcccttgacccaattcattctgaagcttcatagctcttattggattcacagactagttgccaaagacaacagtataacatgaagcacatt

SEQ ID NO: 5046 - DNA, 477 bp, Avena sativa
gcttgccgtcatttgacaggaatagctcttggtatgcacgtttgtaatacctgaatcaaacaaacattcgttgttgtgtatcaaaacataatagttcacaaatgataaaaacaaagaaaaagctacaagaaagagggagagaggcagatgagctaggattcagggcatttcaggttacaggtgtaaaacgatcaagcaggcgatataaagtagaactttaccggcctagcgagcataaatggacgatatcagcttgcatctcctgtaactgagcataaaacaaagaaaatgcactgatcagtaagggatgagggcgtaaagtgtgtttcagttctgactctgaagcaggggagaagactcttttttttggcgtgcattacctcaagcttcttctcccaatctgaaccatagagaccagtcagaatgaatccaacctttatgcagaactgaggcatctccttgaaaaaatcaacaatt

SEQ ID NO: 5047 - DNA, 359 bp, Avena sativa
gcccaagtcattgtcaggttaggtgatcgtctcatggttttgagcatacccgtcttccttattaaaaagaaaagcagtggttgacgttaaagaaagtgttctcagagtggtaaaacaggaaaacttcatagttaagcatatgcccatcctcttcctattttggttctgactttcatgaaatgtagaacatgatgatcagtgagtggtgaaaagtatcggtaaaagaagagagcaaagcccacggctatgcaaagttttatacggcgaacaggtcagcttagtctatctgatggtagatatctgtctgactcaaggaacaagttgcatgacgggtttaatgagaagaagcgaaccaggta

SEQ ID NO: 5048 - DNA, 337 bp, Avena sativa
tctggctacggcaataacctgttactgcaatgacatcattcacatcataattcagagaaatatccatggtgcaaccaataaaaggaatgaatgattagatgttcaaaggaacagaggtacagggaaattctcaccacttgattcagccaaaaaaaagaagacaatgatatcctacagagtaaccgattaatcaactgcacaacccaattatacattacagacagcgcaggagtgttgagtgacctaccgccaacaccgactcccgtctaatagttgtaaagatataaagttatagcaatccgaaatatcatgattatgtgtctttggggctgtaatg

SEQ ID NO: 5049 - DNA, 392 bp, Avena sativa
tttaaataagatacactgatagcacaatagattcataccttttcaagctgcagcgtgtctggatgctcataagatttctgaaaaattgaagcaaacttccacaacaccaactgtcaaaattcatttgaaggtattcatcttggatctgagtagtccacggcttcatgctgcccgtacattttgatcatcaacaccattcagtgacctttgaaagctctccacctgaatgtttttcggaaatcctcaacgatttgacacaccatatgcatgaaaacatgaagaatttaattcacacataaaacaaatatatctcagtgtgcgaaaggatcattaattagtacttctctccaaaataacaattttagcaattatgatttaaaagattgatgttc

SEQ ID NO: 5050 - DNA, 522 bp, Avena sativa
gtggacggaggtgtgggagtcccaagatggcgacctggtgcaggagcacgaacgcagacggaaacgaagacaagatccaattttgaatttttcaaattgaaggccaaatttggaacgttttgagtgtaatagagtttttgacaaaattaaaattgtactgtgctgcgaattgtaattcaggccggatggagcagttctttgaatatcagatgcttaatagtgaaccgatgtttgatctatcccaaatgtatgcctgtaatacagtaatattgttgctaagctcaagttttctctctgctcttcgcatgatgacctgcaccatttcaaataaaaagaaaaatctcaggaacaacttaattgaggaagtaatagtaacgggagtcagagttttgacctcttcaattgtgcgctgtgataccaaatttattgataatacatgattcaactgtccaatgcggtgagtacgctgacaaagccttgttttgtcagcttgaggattccagtcttgttcataaaaataac

SEQ ID NO: 5051 - DNA, 549 bp, Avena sativa
taagtaggcaaacataccacatttaggaacagtggacaacaataggggaactctaacgtggagaacaatatcaccttacatcttcactgaggataggctcaattgattgttcatatcttttatacagacggccctcagcaccattctgaatttaataaaaattagaaagacaagtaagctagtaccattaggccatcaaatttgcatacacaagcatgactagaaatacaaatatgaaagagattgctaaatttagagggcaaatagctagtgacatctcatggcagcagcttatagtgacagatattcacctaaatatcaaaaacatgtgcaatcagctcagtaacaaatcacgactacctatctatacactgtgttgtgcacctcgtaaattctggagcatattcatgaatggtgttcacaaattgcaacttgcactgtgcagagccagacgctattcaggacaacccagtttttttaaatcaacaggagcacataggcacaagaaactatatagatgtgcagaaccacattctaagatactgacag

SEQ ID NO: 5052 - DNA, 313 bp, Avena sativa
tccagtgcagaacagcagcagagaaaagaatgaaaggcaccagctagctagcacacacccatggttgattattcgtactagcactataaaaccttttttattttttcagatccccaatgtggcgcgcaatctcaggaacaaaagcaacgcgatcatccgtctcattctcatctaggccttggcggcggcggcggcgggcggcacgaagaagtgctgcgacacgatgcggcgctggatcttgcccgtggctgtctttggcaggtcgtcggcgatgtacaccttcttgggcaccttgaaggcggccaggttcctc

SEQ ID NO: 5053 - DNA, 265 bp, Avena sativa
agcaggggaggaggagggggccctgtggggaagacgcaacgcagcagctgccttttttctttcctttttgagcagcgtatttttatccactagactttcggagatatacggggatttggcgttcacccaatactctccaatcttctaaaatactttccctaaaaatactctatcttaaagaaaagttttcaatctagacaaaaacttgaaggatttgtaggaatatgtcgggattatcccgaccaaacccggcgtggtaaacgga

SEQ ID NO: 5054 - DNA, 444 bp, Avena sativa
gaaaatgtagtttgtttgctgcatcctgctgaaggctggatgttatatatggcatcggaggattcttgtgactgttgcttctcttaacacctcttacttcaaattggcaagaaaatcatactgaaatagtaagctaacatttatgttgaactccagaattgtaatcgtgatttcatattttgcatgcgacaaacacagagttcagtatgaagcgactggttaaattgtcaattatataacggcaacataaagaaataataggcgagtgatttgcttaagcgtgattctccaaatgattcccaaaagagttagagaactttattagttctaataactgtaagtgggatactactgcacatgaaaattttgaattaagaatgcagaaggtttaagggaagaggtactccacgaacctggtcggcttaggagttaggacttcacgga

SEQ ID NO: 5055 - DNA, 361 bp, Avena sativa
tccagtgcaggcctaccctttgcaagcatccatgccacacttcccttgcaaagacacattgcataagaatgtgttcaacatggtcctccttttgaaggcaagtgtagcagggtgaagtttcttcctgtaagccatggcgtgctctgcgatccgaggtccagagcctatacctgaccaccaaccaacaaaagatcttgcactttagtggcgctttcgctttccaaataggtgttgctatgcacgatatgatcctcccctgacacaacatacggtaggtgtccttggcagagtatatacctgactcctctcatgtccagctgaatttatcctcttcctcctcgtctctccgaagtgtagtaat

SEQ ID NO: 5056 - DNA, 383 bp, Avena sativa
agcaaaaggaattgtaatataagaaagaagaaggtatgtttcaagtctatgattattatcagttcttgaacatcttcaataatcacccggcgatagaaatttacaagaagcagcatagatagatcttaagtatgcatcatacgatccgatttccaacagaaaaaggcggatgcttgcacaaatctagagctacttgaatgattcatcataggacgctactatagtactactactaagatactaccagtatgcaccatgccacctatgtgcagctagcagtgtacaaaaatagcatgataacattctgactaaaactccaacttcagttatttaaagatggtatggcttggtataatttcttttactgaaaccaaaccttgcca

SEQ ID NO: 5057 - DNA, 335 bp, Avena sativa
cagttattgcgagctcacaaactatatgtcaaggacaacaagtgttactttgcttgtgccagcctggagtacttggaccatataatttctgcaaatggagtggccacagaccctcgtaagactgacgccatggtgaattggcctcagccatctatagtgactgagctgcgaggatttcttggactaacgggctactacaggaagtttgtgcgcaactacgcaacaattgcccggccactgacaaacatgttgaagaagaagggtttcgtctggagtgatcaagccacagaggcgtttgttgctctaaagcaggccatggtctctactccggttct

SEQ ID NO: 5058 - DNA, 329 bp, Avena sativa
taaagggcaatattcaagccagtgaaccctcttcttccctatgatgtgcaaaaacgaaggacaccgtcagtttacaaatgtacataaaacagggtgttttctgcaatgttcaaaagtggttgcacgaatcttgaagtcggattggacgacccatgataagccatagacgtctaacactatatggagtttgttttctgctgatcaaacagctatgcgagccgtattaaagaaaaggatgggtcagctggtgcgactcgttgttgtggccaagaatccactcgtcggtaccgctgagctcccagatcaatggtgactttgtatacaacaac

SEQ ID NO: 5059 - DNA, 362 bp, Avena sativa
acagttaaatttgaagtgttacactagtctttaatatttgtctgttttgttatcatcagaagggaagataactgtactggtcattggtggtggaggaagggagcatgcactttgttttgctttgaaccgttcaccttcttgtgaggcagttttatgcgcccctggtaatgctggtattgctcaatctggagatgcggtctgcatatcggacttggacatctccaatggtgatgctgttatatcgttctgccaaaagaggggagtgggaatggtggtagtgggtcctgaagttcctcttgttgcgggtcttgcgaatgaccttgtcaaagctgggatactaacctttggtccttcatcagagg

SEQ ID NO: 5060 - DNA, 437 bp, Avena sativa
tctggtacttgatccgcgcgagcgacgcacttgatgtccgcgcggaggaagcgcggcaatgaacagagaagctctgtcttgcgagcttcagcgaggaggaagaggacagcgactacgatcagttcctacaccaggtaggcttgccgtggactggggcactgacttggtcgtcgggggcaccggtgactgagagcgacatggacgtctctcttgggagcgagcaagtgaggggcacctatggatgagagggagtggcagcggggagcacaggagtaggtcttagggttgcggtgaggcgcttgcggaaagataaggaggggctggtggtgacgcggatgatggtggtggtacacccatatgcttccgccgtgaggctgcactggatccatcagttacaaagttaagggttttgtctactttacaatagaaaattccac

SEQ ID NO: 5061 - DNA, 370 bp, Avena sativa
gcatgcatgccgaggttttactccgtgttatcccaaacaggtctcctcatcttcagtagatgaattttcttagaaaacaagtgattgctagaaaatgttcattttgtttggtacttcatgttaggaccacgacaagattcactacagtgatactctgtcctgaaggattgcccaacatatacaccgatatacacaacctataatttgtttactgtattagcacagtccatggtttagagctttcttcaaaatagtatcatgcataatgcttttgacttggtgtaatattttttgtcgtgcatttcagttctcaagacaacatgatttgcgagattacatctacaatcattgtttgcaggcactctgcact

SEQ ID NO: 5062 - DNA, 256 bp, Avena sativa
gcacctctccactgaggctattgttgtagagctgcaactcctccatgtcaggcattcgccacagcgccgcgggcaccgtcccacggagcatgttcttgaacagggccagcttcttcagatggctgagctgactgaactccggcggtatcgtcccggagaggctgttgttctggagctggagctcaaccaagtcccggcatctcccgatttctggtggaattgtcccagaaacggcattgtctgccatggagaactt

SEQ ID NO: 5063 - DNA, 383 bp, Avena sativa
gatggatctagtgcagtgctgaatcaagcaagacatggtgtactcttccacctgattgtattagggaccatttggccctggatatatccaggaattaataaaaacggagctatttcctctctctcagaaaaaaagataactaaatatggacgtaagaggaatgcaaagcactgttgccagagcagtatacactacttacattaataataatccagatcactcacagtaccaaaagtaggggtgttcttgtgaactatgatgaacaaaggttgaagcaatacatgtgtaaaaatgaatgcataactgacaacaacaaaactgcacaagcaaagcaagccttgaaagcacaaacctcctgtaaggattgcctcggtccaggtcta

SEQ ID NO: 5064 - DNA, 433 bp, Avena sativa
caagattactgcatttcaaaggggcatgcacatatgtaatcagtgagtcataagttctcccaaatgcccatagtagtatctactgctcaatccaggttagtcccacctgtcatcctcagccaatatcaatgaaatatgctgcctcctccataaatgattggtatgatgatactgggtcctgccagcctgccctgtctgatgaaagtcagtcgcgttcacatttatttccatagcattatttacattggtaaaagacagatgattagctctctacagtcattattttgtcatcctcagccaatatcagtgagtcattattttgtcaggatacaagcaatgccactctggaagttatatatatcaaataactatacgtacaacataaaaagaacacctactgaataaatcatacattcaaagagaaggtatactg

SEQ ID NO: 5065 - DNA, 445 bp, Avena sativa
ccttcaactttctagagacacagtttgggcaacatggtgtagatatagttaaaataggtaaatagctgccattcctttttattatttacttatttttgtcaccacggcttccttctgtcctgccaaatgacagtggccgtttactgttactgacgacttaaactgatgcagattaaagatcttcagaaagcaacaagaataatccaaactatatgtgcagaggcaaaggtacaattaacaatctccttttactcggtacattctttaatctttgttttctgaccgggtacagtcaataatctcagatccatcatgtgcattgtgcgctccaagctgagaacagtaatttgatctcctgtagggttataagcgaacaatgatcacgagcaagatacctgctgcaaagagatccatggagcggtttgtgttccaagtgaaggccctc

SEQ ID NO: 5066 - DNA, 431 bp, Avena sativa
ccggacgggaactacctgccctccaatctagcaccttttatggtctgcatccacaggggcagcatattgcatttgcccctacccaagctggtcatagctcatatggaggggtgtaccatccagcacagactcttgctggaggtgctgttcatccactgctccagccaccgcagactatccctggagctgttgaaatggttgcatctttctgcaaagataagcttttagaacaattcggtgatggcaaagcactgggacaaacaggaagataaccaaacaagcattagaatgtatgagactcaccaggactctctggctgacataaaaatcctcaagcttatttgcccagaaggatgcagtttgatcccttagatccattttacttgtactgtccatcttactatcttgaaccaccttaggattttctggcc

SEQ ID NO: 5067 - DNA, 338 bp, Avena sativa
atttttcatgatactacactaaacatgctttggcagggtttaagtatgctttatgtttgcaagactagtagtattatggaggacaaataataccttcagagggaatactaattttggataggcattagaaaactgtagaaaattgtagtaggttaccttcacataagtgttccaaacatcatcttctacagtgatcatattcttctcatcatcccatccaaatccactctgagaaagcatcttgttgacgatagcataatgtttgtcaaaagtcttgctcctagagatgatattatcctttgtaacctcaagctgacacttctctctcactttcttga

SEQ ID NO: 5068 - DNA, 300 bp, Avena sativa
cagtctcagccagtgcagtgttctgtcctgtcacaactgctctgtgagaagagactggtcggcccttgaactgcttggaatccatagtttgcctcaaagaagcctgccttggcacagattgttcatacccatctgaggggggtccttcagcattcattttctttgaccagccctgagatgccatctcaaaatcaccattggatacagtattttggtcatctggagcggcagaattacttcgttctgaccccatcctttcagcttgcctctgatccctaatgaccacctggttttgtgttt

SEQ ID NO: 5069 - DNA, 417 bp, Avena sativa
gggtattacaagcaatcagtataattgtgctcacgcagtataacaggccctaataagtttgaagagtgcacaccacttgtggtctgattcttattattagccacatagcatgcaaaacagcaagcactgttgttgcaatggaggtaatataagattgccccacttcacggctacgatatatctgcatgaactgggcgtcctcaatgatcttctctctatcaccctaaaaaaggcatcactgaagtcatactcaaacctggaatcacttgcaaaaaacatcataattgacctccacctgaatcaatgacttctcatagacctgtgccttctgaaggctcatgttgtcagtaagtgcagccacatagtaccttggcgtaaatctatccttctgtagctcggttagaatattcatcattt

SEQ ID NO: 5070 - DNA, 479 bp, Avena sativa
agaaacaatgcaggtgtcatgttctgtcctttccaactgtctgaagatgaggttgagatgcagtttgccaccaatcatcttggtattgtctcttaactgtcagcaacacttgaaacagacgatatcaatgctaaatatcctgatactaacatttgtttcactccttatgttcaatcaggtcactttctactgaccaaccttctcattgataatatgaaagccactgctaagtctacgggtattgagggtcgcattgtgaacttgtcctcagttgcccacctccatacatatccaaaggggattcagtttgatcaactcaatgacaagaaaatgtatgggtacttatggttatttagaagaatgtatactattgattcaactattgctaatcgttttgtattggcagatacaatgacaaaatggcctatggacaatccaagcttgcaaacatactgcacgcaagagagctctctagaagg

SEQ ID NO: 5071 - DNA, 471 bp, Avena sativa
actaaatttgatggtgccatgtgatcaaataactggcgattgaactatacatgaagaagcgaggacggtagtggaagaaagcattcttgtggtgaagtagtagccggaggagaataaagaggaagccgcccgctcgcctgcctcatgtacccagatcagttacagtgaaaatttaattagtagatgaccagaagagtcgtgctgagaagatgataggtgcgcatgccatagcccaaacaccatgaaataaaaatgctagacgcattattggaacatcatgactctttaatttcatcggaggtatgacagtccaaataacaaacattctgttatgatcaagtctgatgatatggcaggctgcatgcgaaaaggaacatggctgctgatgtgtaaggttggtgagatggataagctgcatgtcaagagaaataacttagtggagatcacctatttagtttatatagatatgac

SEQ ID NO: 5072 - DNA, 432 bp, Avena sativa
ggaaaaacccttttggacccttcttctatgctaatttcagagctaatttacccacacaaaaaattcagggctagtataataataatgcacttttgttgtgtacgtgcctggatgcaatgtcttgcagttgcagagatccgacccgatctgaaattctgtctccccagccccaagcgagcgctaaccatcaaatgtatagtttttgttggtgacgcagcaggtgatatggggttagagaatgaaaggaaaatactgtgatgacaacactgcatatgcatggcatgcccgaacaaattcgcctgttatgccagaactcagcttgtttccgcgtggccaatgatcatattgtacactcggcatcaaccaccaatccaatcataaaatgtgacaactgtacatgagacctcagtctgatgtctgcactggaccatc

SEQ ID NO: 5073 - DNA, 525 bp, Avena sativa
  modified_base (248)..(248): a, c, t, g, unknown or other
atataaaaatgacagcataaatagcataatattggcacatgagttcacctctgggagaccaaaatgacaggtagcaaaataacaggtgttaaagaattgtttccagaatcagcccatagattttgtgtgagacatctttggcaaaatttcaacaagaacttcaaaggtgaggtgttgaagaaccaattgtggaaatgtgctagaagcaccacagctgcaaagtggcaggaaaacattgcattttttcngtactctttacaatgaatgcaacttaatatatcttgcatagtgaagttgggtgttgggttatttccctgttctatactagatcaacatccacggttgaaacttgaatgaatgtatctacaatctgtttgaagatggccgatgtccgctcttaacatcttggtgtctccacaatgtgcaggctacagcaagaggggaggaggggatgacgctcttcttcgtgtgctgcaacctctcctgcggcaaccgctggagggaatgatgaatgattcgcgttcc

SEQ ID NO: 5074 - DNA, 342 bp, Avena sativa
gtccatgacgttggtgccctcgccatcttctacgttgggtaaggcagtacatgctctcaattagaggatcccaggttctcccctcctctctctaattttaatggcatctagctcatgcatttcttggatacacatgtatgtgatttttgaaaatggcttacctccatcgcctcctcgcccagtgagttcctcctccccaacctgacgattcatgcacactgtactgctgccagccagctgtgggcgtggttcaggtaacgtcatatttcaacataacgcatcttgtcaggttgcgctgaatttggtccctaatttgtatagtaaaaatctggtttattttgg

SEQ ID NO: 5075 - DNA, 377 bp, Avena sativa
caggaaccttgttgagcaatcactgggctctgcatggtgctacctagttgagtttgaactattctgatgatttgttgaatttgaaccctgcattgtgtttggctttgaatttatttggtctgtaaacttaatatttattcatttctaaacatttatttgattgtatgtgaactatgccgaatgtttagctatgttctagtttgatttctagaaaaaaaaagtttactcctctaagtttaggggatcggtagtaaatttactcgtctaagttttactcatcggtttagtcctctaaccgattggggatcggttaaagatgccaccaaggtcagtatcaggactgctaacattatgctaactatttgactctttctttc

SEQ ID NO: 5076 - DNA, 540 bp, Avena sativa
ctcgctcgcctcgcctgcaagagaggacacggctctcctttttctaacctttgccccataatatttttcctcctttttcttccccctcgctagtattctaccgttcgctccactgccagctttgcccgttgtcccgcactctcgcttcacggacgaatgctgcctgtggctggtctgcccagatcctagttgctgccatctgcttgcttcatctgccatcattcttcctcacctgtgtgcctgcaatggctgggagctttgacgggaggatgcaaaccagaggtgttgagcaggtctgtgaaaaaaaagtcattttatcttctcatttttctcttgcagcttcactcctctccacaaatccatttctcaaacctggagtgcctgaaatgctccatccagatttcgctatccttttattttgcttcatctgtactttcaccattctttttgcccttttattttcctggggcctgggggtggtggtagggggaacgcatccatctagcacttcaaaactggccaggctcttaaatttatcat

SEQ ID NO: 5077 - DNA, 289 bp, Avena sativa
tccttggacaggttcgttctgcttctgattgataccaagcctgattggcattcctctggttgtcagcaagttgcgattacttttgtttgtgtggtccatctccacttaatagcggtacttagatgaatggtggtgttggtgcttctctcattcgtgcgacactataactgactaatgctcttctgatattgccatgtggaagttgttgtttccgctagtacttcttatggattagttatcgggcaaatttttgttggaaacattgttatttatgtggcagcacaaccca

SEQ ID NO: 5078 - DNA, 354 bp, Avena sativa
gttctgctcatcgctacatcatcagtcaaaagaaagtagcgacataaagacatttcaaacttcttcagagcgtcatgcattcttcctccttctcttcctagcaaaagcttggatcagatttccattgcctgagttccttccggcctatggcgctcccccgccgagcgcttcttcctctggatcggcggcttccggccatccgaagtcctcaatgtaagtactatatatcatccacactgaatatcaacctctctcaacgaaacgtactacgtacacaggttcagttatcatcagaatatatgcagggtaagttgtgatactgaattcttggtgtggcagatcctgagcccgcag

SEQ ID NO: 5079 - DNA, 435 bp, Avena sativa
ctttaatctcttcccttgatgcttgcctgtgtacagctttctttttgttatcacattgttttatttttcttaagtatatcatgaggaaaagcagacacaaccatttttataagggtattacatgttacttttctggatattgctggtctagatctccattatccatttctagtgtacatgcgaagaagagtacaatctaaattacttttactagtacgtgccaaaaagtgatatcaatgatgatttgtagtgtacgttggaggcttcaggttggaggctgctaggaattttcagtattgtactgctagcatttatcagtactgcagtgtgtagcaagatgtcaagacaattgctycatttttgtttatttgtttagatagctatgtcctgtatcaactgggaaattcgctactaggacttcaactgcaattcgtt

SEQ ID NO: 5080 - DNA, 416 bp, Avena sativa
gatggatctagtgcagatgtaagaaacaacctttctctgtgcagcttaatgtgtaaaaactgagtgttcaagcaatgcagattcaagaaaaaagacattgcttcagatgtgtgttgatttcttggtctgcttattcatgtctcaaataataaacacggtgtgactaatctgtgtactcaggtactgatatgctaagaacttatgctgatggtctttgtaatatccaaaatcttaatttcattgtactgtaactatcaaactaagatacttcatattgctttgtccattactcagaggtacttaacaattcaaccggcatgccatctgcaaaatcgtttttcagtaagtatattttgtggtggatgctatgttaaatgccgaacatcatttttcttgtcgtattgtttcagtcctgc

SEQ ID NO: 5081 - DNA, 360 bp, Avena sativa
ggaagaagataacaaatatcattaaaaatcttgttatttctacaaagccataacgaccaaataatggcaagcgttcccacccaaagagttcatatctagaaactctaaaagaaacctcttcttcatttctgcccttcattggtctccacaccatttcggcagagagaaacttcactcttcttctttttctgagcttcactgctattaccaagaggataatcattctgaaccatacgagttaattgttctttagtggaatggacaacagcttatcagccagtgtaaattgcaaagtacgttcaactccttcagtaagttgatctgactggcttgccaccagtgcaaatatatccacgtttg

SEQ ID NO: 5082 - DNA, 378 bp, Avena sativa
cttcggttcactgtagtcaccttctacgtattctaagtacatgaattcgctctgtctctcctttctcttgttcgttttcttaccgcttttcaacttatttgtcatgctatctgcctgggagacaatctttgaaactgagaatcctgcttcctcaaaaattgatgccctctcatggacgagggagctcctggggacaacatcaacaccatcgtacgtccataaccctaacaccgcctctcctttcaggccgattccataccagccaagacctgaaatggctatgtccatagtatttttatcccaactatccccagaaactttgaactttttcctcacccatttcccaagctcgctcacccgtttctggcctatgggagg

SEQ ID NO: 5083 - DNA, 427 bp, Avena sativa
gaggaccagtctcttggcttttcaggtaacagtcgttatccggagcagctacctacctacctaccggtatgctgccgccagccagtggccacactttgaggaaagctctcggtccccgtctgtggcttcagattacccactaaccatggggaggtatcccgtgtaatttacacggtgtaaaaaaaaccacgcaataaggactctgccagatgccaatcaggatctcttacaaaataaaattccaggagcacaactcaatcttgaatgaagaagaaaaggaatctgtaatgtgtttcatattcaatttggaaccttccaagctgattttccagagcgaaccgacgagtcggcaatcagaagccagaccgacctaacatggctcctgtcctgtgatgatcaactggagaacccactcatgttcatgtta

SEQ ID NO: 5084 - DNA, 452 bp, Avena sativa
caatattttcctttccctttttgtattctatggtgtaatcaaattctagcagcttgagtagtaacttgtgttgtattccttcagttagcttttgagtggccataaacctgaggctttgttggtctgtctttatgatgagaggatttcctagcagataatgtcgccacttcttcaaagcttccaatattgccagtgcttccttgacataaacagactgtgctgctgctttaggccctaaactcttgctcatataagccagtggcctaccagattgcataaggacagctcctatgcctgtcccacaggcatcagtttccagaatgaagggctttgagaagtctggaagagctagaacaggacaggtggtcatcacttgttttaatttgttgaaagaaacagtgtgctcctcagtccaagtgaaagcactcttttttaggaggtcatgtagtggt

SEQ ID NO: 5085 - DNA, 305 bp, Avena sativa
ttacacatgagatccatacaataacaaaaagagtggcaaaccacaatgctctcacatcacgagaatacagtatgactcttaagtacaacttagtgctaaacaaattcacattgcttacagcaagttgtgcttgaaaacgctaaacaaaagtgtgcttgaatacgctaaacacaaacatagcaaagttctgataaacgatacggaggatccagtactaaatccagccagcatattggttgcatagcaccagcctgcgcctccatctcttcgcggcccaaataagaggtcccaaaagcaaaagcatc

SEQ ID NO: 5086 - DNA, 389 bp, Avena sativa
cacacaagaacaccaaagagacggcataatggttatgcactacattcccatcttcttcctcctattcttgactttcttctgcaaatccgatgaccagcttacacatgcaaagccactcacccacagcgatacactcatctctaagggcgggggctttgctctcggcttcttctccccagcaagctccaacaccagcttgtaccttgggatatggtaccacagcatccccggaccacgcaccatcgtgtgggtcgccaaccgagacaacccaatcaccgtcccttcgtccccgatgcttgcgatcaccaacagttcagatctggtgttgtcggactcccaaggtagcactccatgggcggtgaagaacaccatcatcggcaccggagtta

SEQ ID NO: 5087 - DNA, 489 bp, Avena sativa
agtgcagcaaaagatagcttctattcacaaagcaaagatagatgtaaatttcgttgtcggtgaagcatcatgatcacccgaaaccccacatatcatcaaatcccatttacatgtaacaaacaatatcccaaaggatggaaactatatccagatcttatcgggaaagtagcaggccgtagaatttttttgctgtcacaagtgtgaattgtgcatgtagtttctagcaggtttctaagatgaaaaccaagactttgtactacaacctccaactacacagatggtgcaaaaggaaatagtgtagcaactccctgaaccaaaaacagcatgcacattcttcaagtttttgctcactcaaaaaagtgtagggcgccatgacttcttcttcaactgatttgaacacaaaaatctctgtagctgtaaaaggatgatagaagcaattaggtactcatggtcttattgcgaaacacaattagtaacacatatgtatgt

SEQ ID NO: 5088 - DNA, 464 bp, Avena sativa
tcggctaggttaactaattattcagcatgctctctattgatgtgttgattttgttcatgttttaaaagaaatctgtgttttgttagtcatattcactctagttctattagcatttcatcagtacacgcacaatctatgctttgcttttagcacaatacactttccttgacaacttgaataaacttatctgaagtaaacctttttcaaatatgtcaattgaataacacaggtcctcttgtccctatatattttgtgtattccaaacacacttgccttctttgttcattcatgaaaccctcatgtcagcatatttgtcatgcaggtcttagtgtaccatgacttgttagggatgatgcaacatccgcatcacgccaaggtaaacacgactgtccttttaacccttgcctagcgattggttttgttacggttcaccccgaggtcaatctgtacaaatactgctcttc

SEQ ID NO: 5089 - DNA, 312 bp, Avena sativa
attacatgatgtctatatgtgggggtgatagtctaaaggagctttcttcgcctgggaaaagtggcagtattttctatctttcccaggacgaacgatttgtcataaaaacactgagaaaaagtgaactgaaggtatggctctcaagatagcttatgagagtgtagtttttctgtttatcacgtggatgaatcatcattacatttacaaccaggacaatgaataaaatgagctttaccaaaaataaaactgacttaatatctttgttgagtgataagatatgcctagtgaagattggtttgacgttaatacgtc

SEQ ID NO: 5090 - DNA, 261 bp, Avena sativa
gatggatctagtgcagctagatattattgtcattgtttgctgtcaaagtactagctccatagtttccatattccatataatggttatttctacaggtaaaagtgtgggtagatttttgtgaccacatgaaacataaaaaggaagccactattttttgtgtttccgtaatggcgtagatacctcacatgtggagcttgggcaggcaaactgttttgcatctttatgatcataaactacctcgtatggtgcctcctagaattc

SEQ ID NO: 5091 - DNA, 241 bp, Avena sativa
gatcgttgagatgaagaagatgtccgagctagggttgaggaggcatggagatggccatggccgttttgtgggtaagaagaggggaaggagaggaatatgcttgctactggttgctttaaggacagagaggggggaggcacaggctcggcatgggcgatcgctagccagggagggtgatcacgtgcaaggggaaagaagagaaacaggagccggcttggtttgcaccgcggtttggccccag

SEQ ID NO: 5092 - DNA, 309 bp, Avena sativa
atcagatcagatggctgtcgccatccaccccaccccaccagtaataatggcaaagctagaacagttagcagtagatgttgtggaaaatcaggcaaaagcaagcaactattttactacaagtaaaaggacctagaagtaccatataatctataacttaggaagacctattgttcaaatcggtacttattcttcttgtttgtttcttctcattgttaagtttagcttcaattatctttattcttccctttcatcgcatgcatcgtgatattttctttttcatgatcttaacttctatgtgcctgtatggta

SEQ ID NO: 5093 - DNA, 269 bp, Avena sativa
ctgccgcccaacaacaacgccatgcatatcgtcctcgtgcaggagtcgtctaaaggtacctacctgcaatttttatccatcgccaacaacaacgctcatgagctgtttgttttcagggatcataggactcgcagatgtaccctggtttttttccttcctgttgttagtaatgttgcattgagaggcttcttgtgatatctacacacgcattatataagcaaaaaagaattgaaagggcctaaccgggtttgaaccggtgacctattgat

SEQ ID NO: 5094 - DNA, 331 bp, Avena sativa
tcctcactgatttggtatgccatgcagctcaccgagtgcccacaaagtatacctttttctttctcagtagttacttgccaaccactttagaaactagcaacggaccgcacataaggctttgacctacatttttttttgaacaagactttgacctacataagtctcacctttttgatggtacaattacaaacgctctacatggataggatagtgtaaaactctttccaaattgctgctcaagtacatgtgaggtggaacttttgttgtgaattcctttcacatggtggcgtggatttcgttctacttatgttgctgctgttatcaggctcat

SEQ ID NO: 5095 - DNA, 414 bp, Avena sativa
cctcataccaccgacttcttagacatttcaaatcctaaagcagtgttagtactgatttcgtaaaactattttcttgtgaatatttttcctctcattttgctatagcatgttgtattgtaccttgactggtattgtcttggtatgagtagttagatccctgaagaatactaattccttgttcatgtcattcttgcagcttggagaaaactttgcggaactactcttgtctaaccactggtgacagcattatggtggcatataacaacaagaaatactatattgacatagttgaaacaaagccttcaaatgctataagtataattgagactgactgtgaggttgactttgccccaccacttgactacgtagagcctgagcgaccaaaacctaccgcacctcctagtgctgaaccta

SEQ ID NO: 5096 - DNA, 395 bp, Avena sativa
cagtgcagtggaaagggttagtttctaagcttgtccaatatagacagtaacgagacattatggcaaatatcgtactagagcttcccattccactgtatcttcctagaaaatttctccacaaatcaagagatttgtgacgcttcagttgaagggattgaaatgtttcttcgtaaattttattgcaaattttaagagtatctctagcaaacaccgtaaaccttcggtgtgaaaaaagcctttacacgccacacaaaacgtgtttttcaagctgattttgcctcgcgggaaacaaacctgtaaaacaacgtgtttgtttttctatgagcatattccttcttcttccgtgtatattcctcaatcgttgccaaatcgcggctttgcctgcccgccgcttg

SEQ ID NO: 5097 - DNA, 511 bp, Avena sativa
  modified_base (162)..(162): a, c, t, g, unknown or other
agaactcgttccttcctacagtataaaattaaagatgcggctttaaacaatatacatatgccaacgcaagtggactagccaggcatacaattctcagaggtgaactaataaacatcttaaaataagaacaaaaggttagaccaaaagaaattaccccttttnataatcccgaaatctgcgtttgacttcttcaacatcagcagactgacggaggattccttctaccttgacacctacaaacagagtgttgttccgctcgttactgaactgcgagatcttaaaatgtcatgcttctgcatggtttctttcaatgtgcaccagtaaaatatgacataaatttaaacttagtgcaaagtcagtctagataatgtactgattaatgataataagggaaaacacttgccataatcttcaatgaacctcaaagctttctccaggaaagatggactaccatcaggatcaactagtgaaaactcggcacgtcttccaataagagacgatttaccctccg

SEQ ID NO: 5098 - DNA, 608 bp, Avena sativa
atcgtgaatgaggacgcagggtgtgcctgctctagctccgcctttgagcttcctgggagcagtggtgtacagggaggcgaaaaacgcacccaactaggcttgcctctgtccatggcgattgggagatgggggatgtagagacgttgctctgttctacagcagcctaccacctgagccggctagcatggtttccacctcgccagcccattacctcttcacctctgcttcggcccaagatactggttcgttgcgccatttactgtttctcgttcttcgtcgctttcccctctctgccgagagaaacagcagagcatgtccccttccgccatcgtcatcctcgtcatctcacgcctcccgtgtgctccttccccctccccatatacctgcgccacacccagaaccctagccccaattacccctagtgccgcaacccctgctcaccacctgctgtagaacagagcaacgtctctacatcccccatctcccaatcgccatggacagaggcaagcctagttgggtgcgtttttcgcctccctgtacaccactgctcccaggaagctcaaaggcggagctagagcaggcacaccctgcgtcctcattcacgatac

SEQ ID NO: 5099 - DNA, 338 bp, Avena sativa
ccataatcggaggagtgatggtcatagcgggcctgtacatgctgctgtggggcaaagacaaggatcaagagtacaactcaagcagccaagagcaggcagtacccgatctggactgcgagaagcagcagcagcaggaggaggaggaggaggaggaggaggaggaggaggaggcaaagatgaccgacgcttcttcagcgaagaacggatcggaacaggaggggaagacgacgacatagtgggggatcagactgacattggcatcagcctgaaccggtggcgtgacaaattcagtgaactgcaaggttggcagcaagtttccttgagttcacacatctgca

SEQ ID NO: 5100 - DNA, 356 bp, Avena sativa
tccagtgcagggcaacatggatctttagcaagcagtgatctaagggcaagcaccaccaaacatgcagcaagcacacatctaaccgccccaccctacacgccaatagaaccaactaaacatgaagcagggaactatctaccgagcaggcatttgaccaaacacctgaagggcgactgaaaacaataccgtagaccaagaccgatcgcacgagcagacgagatcgtagaagaaggagaggaaggaagatatacaggtcgtgccgtaaagcaaaatagaggcgaacacactagcccgagcagatcaagagaggcgaagacagctcacctcagccagacggaccagtcaccggaaccatc

SEQ ID NO: 5101 - DNA, 287 bp, Avena sativa
ggtcaaaaccaaattccaatacaatggcaagtatacttcctagtctttctgagctcaagctactcgggcatggaaaagagattcatggcttctccttaagaagtggacttgaccagagcaagtttctagggagcgcgttcatagacttctacagtagacaaggattcataaggaagtcagaaactttatttgagctcatgccaaagacagatgtcctatggaattcaatggttgctggatatgccacgaatggggatacagattctgcactgcgtgtgtttagagca

SEQ ID NO: 5102 - DNA, 282 bp, Avena sativa
ccaaacggtaaccacctttcttcggtattgacgcaccccggtgatgaacatgcttagggtaatgctttccgtacccaaccacgtagctcatcttcaaaggatttttgcccaagatgtactccatctgacattaagtagtaaatcataaccaggagtccagatgacagtcaccataccaagatattcagatattcaaatgcaagaaatgtacctgagtccttgcaaaactgcgaagaacctcaaccgagtagaaatgggggccacaataccacccaggcgtat

SEQ ID NO: 5103 - DNA, 249 bp, Avena sativa
gatggatctagtgcaggtgctagtgcggaagtgctaaaacagacaaagttgttgacctccccaacctttgcttcaaaccctaaaattttgggaccatggcatgatttgctggatcttcgtggcagcctataatactgtgtaaaggtcggaaagcaagagaagcactatgagtagattacttgctgcatgaatccctcttgtgagattttaatatagttgattagggctttgcgctggtcttaattgtat

SEQ ID NO: 5104 - DNA, 366 bp, Avena sativa
ccagtgcaggtatttgcaaatcagtatcatgacggcaacaatacgttttgagttcctaagttgctgaccatcaaatccatgtccgctcatgattctgacctccgtgcgacttttcaaacgacattcatataatctgttgtaaactagaaataactttcttacatgaatgaccgtactgcatgaagcaaaagcttttccagatcgtttttctatgactgcgggatgcacctgtgcctggaaagttaggtacgctctcgtactcctgtgattggttttgctttaactttatacagaaatttaccacggaataactttggggaatcacatggctcacggccacgtaagtaacatggccctgcactcgga

SEQ ID NO: 5105 - DNA, 575 bp, Avena sativa
ccccaaaaaagatgatccctggtttctagcaaaccatcatcacagaggcagcagaggtcgttgccattgagagtaaagtctttccttatgagtatatccttcgtgtttaggcagtcgttagaaaggagccagaaaaaagatttgatcttggatgtgcattttgattttcaaagccaagaagaaaaaatggaggacctgtggatgatgatccatggatgcggcgaggataccgcctagggatgcgactgagccgtccaagaacacggcgagggcgtcctcacatagtgcgttgtcagcgagggggtcgtctaggccggtgatcttcagggtgagggacgcagagggggaggcatctaggaacgcattgagggcatcgtcgcagagggcgttgtctaggccattgattatcggatgaccccgaagggacgtccatgccattgattagggtgaggtgattgcagggctgatcagtttccttttactcttcaatcgttggggctgagtctttcctccgtcgggatgagtgtttcatcgttgtaaaatgctaaatgtacaccgagttctgtttaggctaa

SEQ ID NO: 5106 - DNA, 422 bp, Avena sativa
cagaaagctatggatcgcttaatggggcttcggttcaagatcatctgcaaaaaaggtgcagaaaatcatgcagcggattcgttcttgcgtgtcggccaccttatgtccattcaggcttgctctgagttgtagcctacttggttatatagagcagaaagcagctcatggagcatgtcgggattgcttgtgatacagccttgatcaacacttcacgccccacagagcttaattttttctaacaccagcccagtgcaataactcaacaactattcctactagaaacaaaaatgaatcaataatctaagttagcatctctttccttgaactcagttatcccaagtctggtctaatttcaccatctgaatttcccgagttttttccgaattgattttgacgttggtttgcaggatgggagactctct

SEQ ID NO: 5107 - DNA, 567 bp, Avena sativa
aagtttgtgaaggtaacccctacctctagtgatctgctcccgccattgcttatgttatgtagaatcaggagctgtaaatactttgtgttttgttttgagaaggaacagctggtaactgaattcttttttcaaatgtcagttaaccgaattcttggacaggggaatggggaatatatttctcggagccaaatgcgcgcgcacgcgaccaacaggtggggtccagtcactcggtggtgcccacctgccataggtagcaagagatacactactccacacgtacaattgctagccacacaagcatcacacggtacagtactagagaaggaacgcgctcacaaacccaaaacaaaaaccccagcgttcgcccgaggaggcggcggctctgtcggtacggacgccggcatggcggcgccaccggagtccacgactgcgcccaacgccggcggaatcagtaatactttctcccctgcccctctgccctctctccctcgcccttgttctgagttttcgtgcgcctctgcccacacagcttcagggcgactgaaatgtcacgccttcaagagctgg

SEQ ID NO: 5108 - DNA, 416 bp, Avena sativa
actttctagttgatcctcttgctgcctgcctgagacctcaaacgtatgtgtagagcctgtaacacggaatacatgttcagaaatgaaacgtcttgcggttaaaggactgagcaagattattttgtagtactctatcatggtgcaccgatgccctgtttgcacttaaatttatttgagggagtagaattgtctggccttgagtgtcagtaacagtggttggagggcatgacactggtagcactgatttgtgggctgattcagcacactatcagagcttcctaattttttcctagaaatggcccaggttgatgattcggtcagcatctgttccgagtttcagcactcaaaatccaccgggtgtcgtctacagaggtcagctagaaacccagactttcagaggcatgtactggtagaca

SEQ ID NO: 5109 - DNA, 354 bp, Avena sativa
gctcatctaattaatgattagatcatgtatgagtacaaaccagaaggaggcatcatttctcatgatgatcctaaacatctctatactaactcttccagggacaagaaatagaaggccatctaccaaatacaataccattctcttgtagctttgatgacaacaactcattaccaggttatataagtgatgaccatcatactagtaattattttgcaaagataaagtaggagccaacttgtggatctagtgaaaagagtcgcttttcagaaaacaatgtcaagggccaatatgttggaggtgcctctcaaaattaaaagtcaagaacgcatgctcaacaccataaacacgatgatg

SEQ ID NO: 5110 - DNA, 374 bp, Avena sativa
gatgtcattttctgtctcaagggctaacaggttaactgcagcagactgcattaatcgggtgcaacgaaagtagtttagttggaaaatatcagatgagaatatttagcgtgcaaactctattgtataatttttactttggtcaagttttactagcacaggagtagccttctagccatttcccctacaagttgcctttttatttggatatgctatctgagagtccaaacatagcttgtagagggatgtcatattaaagaatgctgcaaaacaatctgcgtaccaattgatgaatgcatgttatctacttgcttttccagtttccttgatcgtcattcttctgtgttctaaaaggtagccccatgttgtaatattct

SEQ ID NO: 5111 - DNA, 316 bp, Avena sativa
ggtgcaaaagaatctgcagaataaattggagagagacacagtgctcatggagtttgctaaggccactttccatacatatatgatagcgatgcaatgctagcaagatggtccagccaggaacaagctcgctaatatatcacatgccaagaggtcgtggtgtgcgttgttgatatattggcaagccgacgcatgtgcgacgcggatgctggtgcgtgaccaccaggtcgttgggtggcggcaaggggaggaggaagggaaaggcagaagcacaccggagttgaagaggtacgtcctacaggggttcatggtgatacgg

SEQ ID NO: 5112 - DNA, 420 bp, Avena sativa
aaatagaatgaagagttattggaaaccaatattcattggaataattacgctgatcaaagaactgctctcacttaggagacattggaccactacaatcaaatttaactaagaaaaaaactgaaacataacccacaagcttcttcaggtaattctgacacactaaagtttatttggtaatgaaaataacttacacccacatttctatctttaaaatgtcatactagtatgctattattgatgtagaaaaaactgtaaccggtaaaatattaaaatcttgaggaactatggtcaaaccttgtgatttaaaatgacaccagatggctggagtagaaaagcttccttaacagccccaatagctgaaagaatgcagattgcctttgaagtcaactgtgagaccgccatggcccttgatacaatatc

SEQ ID NO: 5113 - DNA, 585 bp, Avena sativa
gatggatccacgtgcagcaacattagtgtcaccaaggaagtccatgaggaggtgcaccactgatccagccacctccgggaactccacagcacatgcatggatagcttgcaccagcatctggcggtactcaccacccttctcaagctcccctgattgtgtcttgacaacctccttcttgaggtaaagcactacctcctcaacattacgaggagtgagcagatcaagcaccaaatccagcaccttcctcttgacgtctaagttcgggctggcaagtgcacgcagcacatccatcaccatatccaccatcacatcccggtgtgacgtccgcagctcattcagacggtccaggagaatgagtctcacattgttgtcactctgcgatgagagcagctcacagtatgtgttggcagcagcgcgcacagcagtgggcgccgaggagagcgacacaagggcacccgcacactcatacacaacagctgtgctgggagaagagagaagtgagatgatgatcttgatatacctgcccttgtcagcacggtttggagaacggcagaccttgcggatgaggtctaccaccgccatctg

SEQ ID NO: 5114 - DNA, 444 bp, Avena sativa
gcgagaaaaacttgcattctgaagcaatttctctctcctgtgattctgacagtgacaacttgagggcattgatgtcttcctgcccttgctgaatatctccacaacagagctgaatgcttgctgaaagttcctccgccctcgtactagccatttcaagtagtttaaagtattgcaccgcatcctgggcagtcacaagcctgtcttggacatactccacctttcccgtcctccataagcggtaacgctttcttctgccgttcttccagggcaaccttagatatctcctctggtgcaagaagatctgtgatttcctcattgtacagctccaaaaatgtgaccttgacactgtactcagtattctgcctctccagtgtatcaaatatctgcttaacagctctgggtatgaccccagcatctgaaggtaactgcccgtccggtccactc

SEQ ID NO: 5115 - DNA, 443 bp, Avena sativa
caaccttccgaaaagagtctggtcccatctgtttctccaatgtttgaagaacagccacctgttcaaaagaaaattttgagggaacaatgcataaaagctagttttacagttcaaaaaaatcaaaacttactgccttcaatgaacggattttcccgtatgagccaatagtttgagttccatacagatcagttgaagcagcagaagcatctgaggaactaagtttcattttcttctatattgtttgctaatctttgtctctttaaggcacaaaggttaatttaactagtttgttctgccgtatgtttgaaggatgcagagccacataaacatgatccgcatttcatttccgtagcactcactctacgagatcaaccagacgaagccaggggcgctagcacgcggagccaagttgcagatactgatagtatggactgtgttagcaa

SEQ ID NO: 5116 - DNA, 430 bp, Avena sativa
ttgaaagattacaatacaggaaaaaccaactttcattgacttgctccaggaaaataaaaaggtgacgagaacacacacccctacgctccctttattccacctccctttacccctaatataggtcaaaatgtccagcatcagcttagatgcattttttaaccccagaacatgtaacagaaccaagtggacctacaataacttatgtagagtcaagatccttggttcataagcaccaaaacttgcatcagttggatagattctagaacaaaatcacagtctgtagaaaccctctagtgtttactcagaacactaggccccaataataaacaacaaaacaaactacctaaagaaactatctatagattgcaggacaataaatcactaaagttagaacaaccctgatccagaaaaaaagaaataacacctattc

SEQ ID NO: 5117 - DNA, 465 bp, Avena sativa
agtcatcttcaaacttccttcatggtaggtctttcttcacctcggagccttaagcacatctctgcaagtgaggcaacattgttaatctcttcctccgtcgcttcttcctggacttggacatcaacaatttcttttattggcctcttcttcaactcttcaagaaagtaattggatagactctgctttaaacctgactcgtcactagataaaataggcttctttctgaggagcatctctaacagcagtaccccaaaactatacacatcactcttctcatttagctgccgagtgtgatagtactccggactctaacgtacccaaacgtgccttgtacattggtggaaacatgagtttgatctataggaaccgatcttgatgccccaaagtcagaaacttttgcagtgtagtttgcatccagaagtatattagaagacttgacatcacgatggaaaactgagatagaag

SEQ ID NO: 5118 - DNA, 376 bp, Avena sativa
aattcttggctggaatcctagaggcctcaacagcgacgcacgtcgcgaggtcgtcgccgagatggcctccatggccaaagcagcaatcttatgtgtgcaggaaacaaagctagcctccattagcgactttgatgcaattggcatcgcagggccttctagacgtgattttgttttcctaccagcttcaggcacgaggggtggcatcgctgttttttgggacgcttctgtggtctccctgacagattgtgatctccgaaccttctcggtctctgccaccgtcaccatcttgcacaccagaacatcctttctcctctccacggtgtatgggcctgccgaggatgagcataagatggcctttctgcaagagatgcggtcg

SEQ ID NO: 5119 - DNA, 531 bp, Avena sativa
gtgcattgtagttgtttgcaactttgctctttggaatgctagtgtggatatagtttgcccggtcctagtgttcccactggccctttacagagcgtttttctttcttgtagatgatgtttaggctgggtattctgtgcatgattagaagcaaaggacagtatttgagtttggactaatactttaccccaggtgacattgctgctatacggtcactagctttatggataagaagcttcattactattgaactggattgtttaccaagtgaaatttatagcttcacgcaaaaaataaataattaacagcacgagtaaacctataatttttcatccgttactactatgtttacggttattatagttattcacatgtaaccgtctctgcttgtacttataattaaccctgtgtgcatccgacatttttattgtacaccttgcatgtggtttatatagaatatcagcagaagtgctacttccattgctagtgcaagtttatttcgtctctcttgtatgatagtaatcaatcagctgt

SEQ ID NO: 5120 - DNA, 257 bp, Avena sativa
gatggatcccagtgcagcgtggcaaatgtataaagcacaagaagacctcataaaggtggcaaagcagtacggagtaaaattgacaatgtttcatggaagaggtggaacggttggcagaggaggtggccccagtcatcttgctatattatctcaaccaccggacacgatacaaggatcacttcgtgtaacagttcaaggagaggtcatagagcactcatttggggagaacacttgtgctttagaactctgcaacgttt

SEQ ID NO: 5121 - DNA, 362 bp, Avena sativa
atttctccaagctcgtagcctaaccggtcatcagaccagcgtagtttccagtttacaacacctgtttcagcccctgcatcaacatccatataccagtcaccgcaaatgtctgtacaaacatcaacagacgcctccctcagacatcatcgtgtgactgcacagcacacttatatggactcttcgggtaccaacttgatgaattatccaagtggtggcatgggacttgcataccgtaggcaagcataaactggaagcgtgtggtgatcgctcgcaccgcctgattgctcatctccattcgtttgtaaactcgctgccagcatctgtttgtggttaggctacgagcttggagaaatagctgcact

SEQ ID NO: 5122 - DNA, 497 bp, Avena sativa
cagcaaagaaaactagtagtagtactagctctgctgggagtagtacaatctgcaattagcttcagctgcgtgctactatcttagccgccggccggtggccgtacgaagcgtaagaagattaaggtctgctagaattaataaaagtgcgaagtttcagagagcttattagctacttttacacaggaacgacataaaacctgcgcatgcatgtgagccaggtcaactaaactcgcaccctgatcaatgttaagaggatagaacatgcatatgcatggcttcgctgcaaacgtacggagcaccgacgcattcacaaaaactccagatcatgccacatgcactgaggaacccatacatgtatctgttatttatttatttaagaggatttgattaaccaatacagcatagattatttgatactggatggaggacactgtcgtcaggaactcaacggctactgcgcgtcttttgtattgtagggaactctgactgatgacact

SEQ ID NO: 5123 - DNA, 445 bp, Avena sativa
ccagtgcagtagggtttccaatgacatcaagcgcacggatatttaatcctctcctagaggttaacccttgaggttgcaataaaaagtagaccatgagaaaaaagcaggatttagcaaatagtcaccaaccttatcaagtttttgtccttggcttttattaattgtcattgcataggaaagacgaactggatattttcggcattgaagtgtaaagggccacttggtggatcgtgcatttagtacaatcctcggtacagatacacagtcaccaacattgctgccaatcatattttagcttcaagaacccattccccaacttagtaaccatgagatgtgattacctttccgacagtagaattttgcagtacacaactcaaaagcatgtgaattgggagaacttccacagttgcaaactgattgaagcagaacatcagtagtagaaagt

SEQ ID NO: 5124 - DNA, 544 bp, Avena sativa
agaagctaaagttgtagaaaccaataggacatatgataaaaatgaaatagttttaattaaaacactggaatatcaaaattaaactaagatagctcaaaacaacaaacaacctgagtgaaaaccgaatcaagcaagagaaaatacaaaatcaccatcttcactatggcactaccttgttgcaaaaagctaagaacaagaaaaataaaaagagcgacactaaaatcaagttacactggcttgaaagaaaaacaacctacatgagacttcaaaatcatatatcacagaaatttccatagagaagagaagaactcaccacacttcattgcttcagcaattgagaccacagacgcacgcatgagttgatttgtatgccatgatcactggtcttgttatcattaatgtcgtgccaatgtgtaggccttggacagaagctctacctctctgggcacaaaagcatatgtatactccattactcccagataaacacatcatggagaggggaaaacatccacaaacttagagatcaacccatcccaagtaaact

SEQ ID NO: 5125 - DNA, 388 bp, Avena sativa
cagtgcagaggaatgcagggcaaacaaaacccctaagctctcaaggggacgagagaaggcgactttgcaagagaaccgtggcatattggggactcagactgcccaagatcgtactagaagcccattatcagataggactaatctttcagaagttctagctgccccagcaccagaaatcagtgggaaatggaagtgccccagcaaaggcaagccctacgtagcccctccaatgaaacagctgcggttggaacaatggctgcgccgagcgaaatgacatttcaaacattgctagctttatcaaggaaactttgcatcagggcgaagcctgcagtgtttgcctggccaattatcgccaagtttcacctttggagttcaatcagaacctgct

SEQ ID NO: 5126 - DNA, 316 bp, Avena sativa
aatggtgtccctgatatccggtcagaaatttgaaggtatgatatgactgctctcccggtgcttctccagttggatatggaacgctgaaacacttgctgatttgccctgctttagtgtcgtatttttggatataactaaccgctattatctgtggctttcctatttctgttaaccgcttgtttgttcttgggcagtcatgtataaaggttgcacttgactttgtttctccggaaaatgtacaagagtgcatcaggctgacggaagaatttcgtctgcttccaaaatggcatagggtgaatgaagataagctagaggt

SEQ ID NO: 5127 - DNA, 559 bp, Avena sativa
atgcatctgaggttgctggtgctgctgggagtggatctggagctgctgaagctgttgggccgccaggagagattgcatctggctactacgctggtagctctgcgaatccgccgctccgtacgagggaatgccgaacttccccattttcccactgttggcgttaacctgttctgttgcgatcttcagctgctgaacctcgtccctcagtctgtcgttcagtgctgcatgcagacaaggaacgggttacaaacttgcaatattgctaacagagatggtagggaaacacagttagtatagccaaaatgctaacacgatttaactttgccatttggaattacgaggagacaggtaatagcggtagaatctctagaagaacaagaaaatcacgacaaaatccaagagaatacaaactcaagagttttctgcgtgagagtaagcagacatgtagaatgtataacatcaccgagtaatttgcagccatggaagaacatgagcgtggtatgaagcaaatgtctttttgttaacctcaaatttgtgatgcaaagaaaaccttaccgtc

SEQ ID NO: 5128 - DNA, 328 bp, Avena sativa
aagtgacatgaattcatatagactttccagtgcagcttgtcagattcatcgggtaataaaatatggcaaagattccagttcaacggaaaatgattttctgcaaaggaatattaaacaaaaacccatgttcaatttactccgcttcataagatcacttgttgctctctgcaaagttcagagttcatcaaagttctgaaggcgcgggcgctgctttgtctgggcccgaactgggagcccaacaacactctgtatccacgatagagctcaagcccatccgaccttagctctctagttttattttctgagaaatttctcttcccctgcactg

SEQ ID NO: 5129 - DNA, 471 bp, Avena sativa
ctctgatgcattgcctagtgagtgtggaatctgaccttccagcatgttggtagaaagaagaaggtcagtgaggttcgggaggaagtcccctattccagatggcaatggaccatgcagcatattcgctgtcaaggccaactgttgcagtgaagagagattgaagagtgcttctgggattctacctgacagtctattcacaccaagcaacaagtctaataagttgggtagtttcccaagctcctcggggatgcttccatggagctggttctcatgaagaaagatgttgtgcaaggttgtgatgttccctagaccaggcggaatagtcccggtgagactgttcctataaaggctgaaatatgacagggcggagaggaggcctatttccctggggatttctctcgcgagcaagttgcttgcgaggtccagtacaatcaagctggaacagtttgtgagcgcatcagggatatttcc

SEQ ID NO: 5130 - DNA, 406 bp, Avena sativa
catgatcggtatattgcatgaggaaacagaagtactatatagtttggaaaacagtccgaacagcatttgaattatatagtataagaggaagttttgactcttcagaacacatctctaccttccaagttagtgctactagctgtggtgaagcactgtgttgaccaaaaaggtgtttgactttgaaatagtccactatttaaacacatggcagataattttctctgatttatctacttgaacatgtgaaactacaaacttaaaactcaacacaccgaggcctacaataacggttgatcctttaagatgttgctgatggagcaaatacatgctactagctgattgactctgaagtgcaaaaatatgttgagacttaagcatccagaggatgaactgcactgaatccatc

SEQ ID NO: 5131 - DNA, 337 bp, Avena sativa
taccatttttaaattgaaccagtttagtgcatccttgacatagtaatcccataaaaatggaactacgttttccatttcaaaaaaattagtggtatggacgcaaataagaaacaagcttgcaaagcaagcacgagaaatgctaatacgaaataaggaaaatgaaatactccctccgtcccaaaataagtgacttggatttgtctagattcgtatgtatctagccttgttttagtgtgagatacatccgaatttacacaaatgcaagtcacttattttgagacagagggagtaccatatactgtttcctaataggtgaaatgtatgtcatactacaatc

SEQ ID NO: 5132 - DNA, 361 bp, Avena sativa
tgcattgtttgagtatttgcccgttcaagcttcttcaccgatcatataatatttcaaaggagctagtcagctgagcccggggccctggcttcgccactggtaccgtggtgatgtcgttggttggtgtggcgagagtctgcccatcggcggcgacatccagagcgagtgtactgtcacagctacgcgaatatgttggacgaatctagaattttggcttccatagggcggttgggtgttttctaggtctcatcaggaagactcagtagtgttgtattgtcggctttgccttgtatgatcttgcatgttttgtggttatttttttcttaaaaattggcaagtgttgcgtgttttctcgtaagtc

SEQ ID NO: 5133 - DNA, 293 bp, Avena sativa
gctgcatagcaaaactcattttaatatccaaataagaaaaaatattgaacgaactcgtgctcaaatatgtagagagtagaagcaacgattgggatacaagtggttagaccaagaatggatcaaagggacattttgcaagacatttgcacattcaccatggaactgatccaacaaccatgataaatagcaggcgtctaaatcaacaaagaatctgagcttttgtaactatctatgaagactacaaagtcataacagcatctctaacacctgccgcattctgcactagatccatc

SEQ ID NO: 5134 - DNA, 233 bp, Avena sativa
  modified_base (196)..(196): a, c, t, g, unknown or other
cctcagtggcagcctcagcccaaccattatcatcacagcaaactctaaggaagttgattgacttccctgttctcagaatcctctgcgcaagcaccggagaaatgaaagttggtagcatatcagactgaataaggtatccttcccgccacaaagattcagccttgactggctgcccaagatgaagaactcgccgaancatcctccaattccccttcaagcacccagctccggac

SEQ ID NO: 5135 - DNA, 462 bp, Avena sativa
ctagtttctgaagatgaagactgtttacttcatcaccatcttcatcaagaccccatctccttgtcagattcaacttcttcatcgtcatcgttatcatcagcagcaaaactctaaggaagttgattgacttccctgttctcagaatcctctgtgcaagcaccggagaaatgaaagttggtagcatatcagactgaataaggtatccttcccgccacaaagattcagccttgactggctgcccaacgatgaagaactcgccgaacacatcctccaattctccttcaagcacccagctccggaccatttcaaatagtggtgagcacacccgccgcagcaagcggcccatgaaatcttgaaccatgggatccccatgctgtgcgtgcccatggatcgcaccagacattccaccgcctctcagaccacggcatccatctaccaagacagccattaagcgcatcctga

SEQ ID NO: 5136 - DNA, 400 bp, Avena sativa
ccagcactggcaggcgcagcttccagccgcaagccaccctcgtagctgccaccggtaccagcagtacgagaaacagaggccttcatccccatcttgtcacaagctcaatcacaatccttggcagccaaaccctttgtcagacaatcagcaatctgatgccccgtgctcacataatagattttgataataccagcatctagcttctctttaatgaagaatctgtcaatctcaacgtgatttgtcctatcatgttggactggattattttctatgcagattgctgacttgttatcacaccatacgttcaagtgtcctgcctttaagatcttcagctcacttagaaggcttcttactcatagcatctcacttaatcctagagacatggctctatactctgctt

SEQ ID NO: 5137 - DNA, 466 bp, Avena sativa
gtctacagagaatctttcgtaaaaaaattaacactgggcattttggctcatgtcttttacatgtctgcaaagtttcataaataaaaatcgtattttgtgtcctacaagaaaaaaacagcgctgtatagagcgatttttggggctgaaatttgcttattttacaaatgtctttctgccctaacagtttatgtttgaacataggacatgggcatatacatgtgttaattttcagatattttagacatctggaatgcatttttttctagacagttgctggggcctgggagcaactttgaatttccaaacttacagcagtattgcagcactatctgtacactgggatctgtgttgcgagcatatttgaagcaactagatttacaaatctgaaaacaaagggacatgatatgtcacgagattgccaagtctcctaaggcattacaaattacaagcatgcaaactgcacgta

SEQ ID NO: 5138 - DNA, 317 bp, Avena sativa
ttttggagaagaaaaactgtcaacttctccaagtatagtgaggtccggagccaagaactatataaaccacagggaacctaattagtcccagatctcatcacagcctctgagtcaggagagaaaattgaaaaagccaaagcagcagctgtagacatataaactacacatggctcctcatgctttgtcttgggttagtgtgtctatgtttgtcttcatggtttcgttgtcatgtgttgcggcgaggagcgcacacgcacctaaaatcgccggcccgacagacgggttcacagctgtgcaccttgaccagagcaactttg

SEQ ID NO: 5139 - DNA, 323 bp, Avena sativa
tgagttgggataatacctccttaggccttatgagttccacctattttatctgtgtgttccaaaatctgaagcagaatatgttgtggactgtggaggaacaactaatagttccaaatccaaatctgaagcagaatctgggcaaaagaaatgttgaagagagtgttcgttgctgttttctccaaccagttgaaactggctgttagtactaaatggtgtatgcattcggttcataattaacactattgagcatgctttcctggtttgacctatgagcagcaaaaaggaagaaatggtttaatccaaagatctgaaaagacaatcta

SEQ ID NO: 5140 - DNA, 323 bp, Avena sativa
agagcagtcacacaatacgttcagttgcttcactctgtaccgttgattaattagggctgttgtggaaaaacgacgcacacaacgttactacaactacttacttggaaggatccttgccccatgagaggggagaacctgaaggtatccatattcatgtcggttatccagcttcagatccctcctgcattcacgaattcccgacgacattagtccaagaatccaagtaaacgccctttgaatttgtgatcagaggaaaaggcccaccttgtaccgatgatagaagtcgtttgttgtatctgggttgctcccatccgcaattttcc

SEQ ID NO: 5141 - DNA, 291 bp, Avena sativa
atgcggatcatggtgctgatttctattacaatttgctggaagcatggtccagtgccaagtgaagaacctattggtgccagtgtcttggaggaagcagttgaagatccaggactgctacaaggtagtggatcgagcttgatgttgaaatatcagaagaagctccaggtagcaatggtgccggtttcttggaggagcagttggacatccaggatcttgcttcagcaatcaatagtgacttgagtgcacatgcagagggtgatgttgtagtggaagaagaatcaattgatgctg

SEQ ID NO: 5142 - DNA, 295 bp, Avena sativa
gatggatcagtgcagcgccacgctggtctgcttgggcatcgcccagaatgtcatgcgggcgcgggcaccacgtccggtattggcgctcgttgtttcgtcggaggcactctcgcccgggtggtactgtggcaaggacaggtccatgatgctgggctttgcccttttccgttgtggcggggcagcggcgctgctcaccaacaatcccgcgctctgcggccgtgcaaaaatgaagctacgtcacatcgtgcgtgccaccgtcgcggccaacgacgatgcttactctgccatcctgcac

SEQ ID NO: 5143 - DNA, 258 bp, Avena sativa
gagctaggaaggaggcagggctaagtcaatgtgggtggggtggcagaaacagagcagaggaggagaagaaggtggatttttagtccaaattgtatgtaaatgcggttttcctgtggcgggtggcgagacgacaacaccgagaatgtttgttttgtttatgggcggagacagacacagagacgaagtatggtgatcctctgtcgtcgcgtgcaggggtaggtgcgtacgtaggtaggggtacgtggtccagcttctcct

SEQ ID NO: 5144 - DNA, 266 bp, Avena sativa
gatggatctagtgcagctttgatctagcaaagagaggaagacagtccagcgcctcaatcacctcctccgcctacacactgaattttctgaaaccaatcaatagaagaaactttcgggaaccggctgaaccggactcgggggtaagtgtcggcgtccggggatcttgggaggatggaggcgtcaagcaagacagtccagcgccgggcgtcctctctctacctacgtactgagtgcaggcatgagttccaaccacgcgtgctctgcac

SEQ ID NO: 5145 - DNA, 240 bp, Avena sativa
actatgttgtgcataatgtgctccctaatattgtcccagatgacaataactcaaatatgagcgaggaaatcctaggtaaagttttatccctgtacatgaccatgcacttgataaatgagctagtattgaatgtcacgcaacctcctttttcagttcctttctctttatttcaaacgttcaacaaaaatttatttcgcagggcaacataaggtatctggtgatacaacaatgatctattga

SEQ ID NO: 5146 - DNA, 309 bp, Avena sativa
aggcataaattgatgaagaaggtgttcctattgcttcacgaagagttgctggtgcgcaatgtggtcttttagtattattagtatgcgttttttgtagctgattaggctgtttcagttagtttatgacatgctctgattctcttagcttgttaacttccccagactatcaagcggagaattctagacttcgcagagacctactcatcaaatgaataatgggcgcaccccagaatcatgtgagtgtttttttaagtaatcttttccctaaaatacgtcaatacatctgacaaccgagtaactgacaatggg

SEQ ID NO: 5147 - DNA, 558 bp, Avena sativa
agattctagttaggaggtctaaataggttccataaaaaaacgttcgtacgtgtagcatttgttatgctcatgcgggagtatggatgatttagtcgtacttgtccgacctcaagatggtgaagctcctcgcacgtcacaccttgtttaggttcttgcatgacggtcaggtcactacaatggtagcttcccagttatcacacacatatggtgaaagacaatgactccatccctgctgaggttgggatggatccagtgcagcagggaaggtatacctccttggtgatggtcttcaggtgtaatgccacttcctctgatgatagttgcaacttcttgctcaaatctatcattgcactgttgacaccgaagggcctgaggacaggaatttgctgtgaggctgttagcttcgtatgtatcgtggacaagtcctccgaaaggaacaagcgaatccataaagctgcaaattacgaatttggaattgttaggtcaagttgaaaggagcagaaggagtacatcgtcaaacccataccaaatcctacttcaaaacacctatttctcact

SEQ ID NO: 5148 - DNA, 354 bp, Avena sativa
ggtaataggattcaagacatgtgccagctaattgagatccaaccaaacactactctgggcttcttattttaataagggcagagtattaaatacaccctaattaacctcaccttggtatctccaactattatccagaccgtcacattcaaaagaattgtagggagtactccgataaagcgctaagaacaatggtgacaaaggagtagaaaacaaaggaatacaagagaagggcatgcaaaagtttgatgaaccttggaaacgtgtacccaatgatgggggcgcacagccttgtgtccaatggagaacacaaaaccagaacttgtacccgctagtgactctgggaatttccgtctc

SEQ ID NO: 5149 - DNA, 337 bp, Avena sativa
gatggattcagtgcagggcacctacgccatagatgatatgaagctggtaatgagccccggtttgctgggaatacttgcgcaacgctgcttccgctagctgaacccattctgataccatcttataagaagtgtcctcctcctagcgatgagcttgaaggccgccgtgtaccgatcctggagtggagggtgtggcagcccatttgttactggggaaggcagcagcatggcggagaggcgcagaatgtcagccgaggaaagcatgcgcttgctgttgagcagcgagacggcttcaggttccacggaggggatcacggaagaagcgaagagcgctgagtgc

SEQ ID NO: 5150 - DNA, 427 bp, Avena sativa
aagagagcagctgaccaagagaacggcccagctgattcaacacagtctatcttccatgtgaacccggaagctccagggtggataaagaggtgaatctggagcttaacagtgtcagtatgttatagacgttgttttatctgcggcgtagatctgaattcagaaaccgtatgtctgttatctgtgcataacttgccccatcctctttcattcctgcttcccgcgcttctctctcttacatgtgagccgatggtaactgagatacgaggtaattaagcttcatacatacaagcggcggagataaaacggagtgatttcgtggttaaatggctggtctgcactggatccatctctgatgttgacttggcgtggacaaaaacgagcagaagtgagcatctggttgtctatttttatataactgccttgggtt

SEQ ID NO: 5151 - DNA, 301 bp, Avena sativa
atagtagcatgtgctggggtagcgccatgtgcataaagtaagggagccacatatgctgcaaccaaacaaagtgaaagatacaactgattagctcttgccatgtctcttaattcaggctagaaatgaaaaaccctgaccaaaaagatggcggccttctagttaatatctaagtagaaaacaaaaacaaggaaggcatgagcaaggtacaaggaacaatgtaatctgcttgagacataataatagagaaagaagaaaagagcatgaatcagataagcaggttacttactgcactgaatccatc

SEQ ID NO: 5152 - DNA, 390 bp, Avena sativa
ctgccaccgccgctgctgatctccttgtcctcgcgaggtcgtcgtccgactatgtacactgcaagctcaccagttgatctccggcaccggcgttttcacctcctgcacggcagggtaagcagcaactcccctgctccgacatcctcttcctccttgctttccctgttcgtacgcttttagctctcagctcctcgtagctaatatcccccgtaatgtcacaaggaccactgagcgtgaaaaacaaacgaaattattaagtgcacaataaacatcgtaaaatgcctagaggaactctagagcatataagcggcaatttacctcctcagatgagcataacaagtaagcttccagagcggagtctcgttcttaaaatcatcagagatctgctgc

SEQ ID NO: 5153 - DNA, 265 bp, Avena sativa
agtgcaggccatgccccaggttaaaaagcactaggcgtgaattcctatttttgcctcagctttgcctctatctctcctaggcttatgtcgtgcatagcatgattaagcgctaggcgttttgctgttgcctagcgaagacatccccttctttaaccatggccatgccactgccccaagatgcaatgctccctagtcaggaaaaagtcaacaagaacagcattcagcaatggcaatggcagcatctaagcattcagcaaccgaccaa

SEQ ID NO: 5154 - DNA, 410 bp, Avena sativa
cagtttgggatttatgaaatttaagtcagcttaacgtttggaaacaaatggatgttttctaaattatttggattcagttcggcatgcaatttgttggttttttagggtcttcctagagtccatctatgatgtttagcaacacaataggtatatgtttttccggcactatatcataccgccaaagtttggtacttcctccgtcctaaaaagattgtctcagatttgtcaaaatttgatatatctggacactatttagtattatagattcatccaaattttaacaaacttgcaatatcctttttaggacagagggagtatttcagttgaacattactgctgaatgttgatagaacgttgttgctttctttgtttgactaagcttgtttgtattatttactttctccttgttt

SEQ ID NO: 5155 - DNA, 289 bp, Avena sativa
tacagcctgaaaagcaaggaaatagaaacttacctatcatttacaaactgtaacaacccatcaatgtcttcacattgagaaataaacaatgccagacagaacagacggaaaatgttgcagtccaatcatgtggacaatgactcacagggcaggttgtgtttatcttaagggcttctgcgagctcgcgagaagatatcagaagtttgacaggccgatattcaagcgccacatttctccctttggagtctgcaaaggtaatcaactcgcggtccaatagatgctcaaaagc

SEQ ID NO: 5156 - DNA, 368 bp, Avena sativa
caggttcttgtacaccccggtctcgtcctacacagaccaagacgtacacgcgagtgcagcaggaacgcatcaacgacagtacatgcaaaggaccaagcaagcagatcgggagcaagaagaagaaacgaaggcgtagcgtacgtacgaggatagctgcggtgagggaggtggacggcccgcggagggagaggagcgcgagcgcggcctcggcggcggcgtgctcggcctggcggagcgtggtgcagcaggtggggccgtggaaggtctcaccgttgaaggtgacggtggccttgaagcggggcgcatggtcggggccctcacgcgtgcacacgtacgccggcaggctgaagcagctcctctgcgccagc

SEQ ID NO: 5157 - DNA, 407 bp, Avena sativa
cagcaacggcacagcctttccagcgctccacaggaacagcagcagctcggcccccttgatttggatggtggagcacccgccgcagcagcacatccacgacaggtagctcaaacacgtccagtctgtgcagccacaaaacgttaaaacgtccttcttatcagtccactaatatgcttgaattactacctgggggtaattaattaaccacgagttgatggctctgcgggacgaccaaattgattcatgatgattgttaaataaggtgcagccacaaacacgtcacggcctgaagctctgtggcagggtgcagggcacagacgttaactctgttcacagccagtcactgatcacacttgctagttgctaccaatgcagataatttaaccacgagttgatggctctgcact

SEQ ID NO: 5158 - DNA, 396 bp, Avena sativa
ggagtccagtgcaggcaggctatcgccatattgactgctctccacagtatggtaatcagaaagaggtaaccatactttctttgcgttatgctagtttgtatcagtctcttaatgtcagcttaaatagcgtttctaagtatgattgaaagttggtcttctaacttgagtcttcctttacaggttggttcggctctgaagaaactattcaacgagggtctagtcaagcgtgaagacctgttcatcacctctaagctatggtagtttgtcaacctctgtctctccatctgcactggatccatcctggaactctgtttttccttggctcaagcgctgtcacctggtcctcgcagaagcagaaaattgttgcgttgtcatcctgcgaggctgaatatgtta

SEQ ID NO: 5159 - DNA, 628 bp, Avena sativa
agcacacataggttgtgtgtttgctgttaaaagtaatcttgtcaatgtagttggctagtagaaggagctagctaggtcatgatgtatccagggtatgtagggagaactttagaattaggaatgttctagagtaagatatttaggagtagtatgaaatgtctagagtttgtagagtattctagaaatatggtgtagggtttagattgtgccacatggcaacaatctaaagggtcttgtacaagtataaataggtcctagcatagcttgctggggtaagcataggttgctgtgggctagcataagttgcaagccaagatgtagtagatagcctgtgtgtcaggttgaagcacatatgtatgtgtgtcatacatgatacatatgtgtgtaagcatgggttgctaagttttgtaggcatttgttgctgagtagtgtagtatccgttgctgcaaaagctaatagaagaaggcatttgttgcctgaaacttctgtgtgttctcctttgtagtgctagcccctcattttctgcttttactcaaaagagagaacagagagggaacactaaggcccttggattttatcatgttttaggtcttccaagtctagcatgtcgcccccgaagatgcatgtg

SEQ ID NO: 5160 - DNA, 446 bp, Avena sativa
agatgactgaccacgttagcagtactcggtactagtacaatctacaatgctctaccaccacattgaaaattaagaacctctagcactccagattccaaatagaacaaatgctaccacattgagctagcacactgataaaacaagagtatagtacaactccattggagcagctagacattctactgaccatttgattcttgatttagattgagtttttcagctgaattttattaggtgtttagaggtagatttattggcttgttcgcagattttccttatgggatattgcctcccttgatcctacattttacatttggggtctgctactctattccccaaagtgtgctactcaagtctatgtaactctttttgtaattgttaatgaaatcatgacataattctttttgttgtaacttcttgtcgggaacctcgcacaactcaaattg

SEQ ID NO: 5161 - DNA, 402 bp, Avena sativa
ttctattttaacattaagatcagattgcgacttgaaatagcataaatgacattagaattttaatcaagtagtagttttttggtagagaaagaataactggctcttctcttacaatccgtatgcaacttacagtatccatgagataatccatcatttttttggcattcatcatgaccacagcatcagcacgagtagcctcggtcttgaatcctattatatcagtactatttttcccaccaaatttttgagcataaaccatcttgttcagtatttcaaatgaaccaccagggaccggcagccatagtgggccgtgggactcgcacaaagtgacaaactcgtgcattgcattctgagctagttcaacaatcatctgcgtgtcattttgtctcgcaacgacacttt

SEQ ID NO: 5162 - DNA, 355 bp, Avena sativa
gctatacattttgtactagtcactcttaaaatctggtaggtttagggtttgaggtaggagaggataattttttatcagagaacaccgaaatagtagcttcatgccggtgacaatctatcacagctcataagtcataactactcgtaacccggggatgaaaggttggaatcctgggctttatgccttggaaagtgctgcgtggcctgggcctgagatgatgatgatatgccttcaggtacgatagtaaaagatgacacaagtggattggaagtgatgaaaggggaaactatcattgaggacctgaaaaaggacgccggggaggaagaagtcataccggatgaggttgtgcatcaag

SEQ ID NO: 5163 - DNA, 413 bp, Avena sativa
catatccaggttatcttgttcgtttctgccctatatatggtcatggtaacatacagtgcatgtcaaccgaaagattgtgcatgaaagagtaacatgaagagcacaatgcaatcaaaaacagaccaatggtctttctcccacgaacaaacagatcagtggttgctatggagtgtttcagggtgagaatcacagtgcggttctcctctggcatggatgacaatgtatccagcgtttgacagtggattatgctatcaccgtccctgccaaaggagaattgccctgccattcagaataaaccctgctttgatcttgctccttgtcacagcacattgctacttgcaggccaatgatggaacagtcattcaataaaggtattattataggaatcatcttaaagcttactttcctcaaac

SEQ ID NO: 5164 - DNA, 329 bp, Avena sativa
gatggactccagtgcagcacaggcaatggcggtcttgaagcagatgcttgcaagtggcagtgacccagatgtcgtcacttttaacactctgatatctgggttatgccgggaaggccgtctccaagaggctgagcgtctgttgagggaggccgttaggagggatgtaaacccaaatctatttagctatacttcattgattcatggcttctgcactagaggagaagtgatggccgcatccaatttgcttgtggaaatgatggaaagagggtatactcctgatgtggttacatttggtgccctgattcaagaccgccattgcctgtgctgca

SEQ ID NO: 5165 - DNA, 336 bp, Avena sativa
ttgatagtgcagaaagattagctgaatgcaagaaaatctacactcaagccatttgccagtattcaataaccaatacaacaattccagagcaaaaaaatccaaggccaaaaataaatgcgtagtaaagcaaaaaagagttgaagttgtgaacaaaaataggtgtgtgttgtgcataagattgtgtttagcttagcacgggccaaccgtacttcctaggtgtgttttatgcataaggatatgcatagggaaacaacatcttagccatacttccctagtactgcatactgcatactacattagcactaaagtaccatggatactgatgtactgcacact

SEQ ID NO: 5166 - DNA, 234 bp, Avena sativa
atagcttctcctgaagcaacgtcactacctggggaaatgtccccgtctcacgcaactcctctgaagtcgcatgtttgactgaaaaagcatgacaaagtttatcatacttgattgtatatagacaaagcatgacaatttcacatgagctggacaaggaacggacggcagatttgcttgattctagccagcatcatctccagaccgagcacaagctacacatctgaatctgacggt

SEQ ID NO: 5167 - DNA, 415 bp, Avena sativa
cagcacacaatgagggcttggttgcagagtcatctcatccatgtgtgatgccacatggacggacggatcagatggtggaacaaacaacgaaatccagctgaaatgtcaaatttgaaagaattccataacacgacatgtgttctatccttaccagattacgacaagatcatcgtcaacttttcccagttcgcagaaactttcatgctatacatcaactttccttgacatccattagtattcagtatttcaaaattttacagttctaccctagcaaggctcctaccaaaagcttccttcccttacaacgaattgatttttcttatagtcatggcgaaaccgtgtctacgttcctaccttcatcagctgagaggttttctgccattcatgttacatgcactacaacgggcaaacaata

SEQ ID NO: 5168 - DNA, 435 bp, Avena sativa
gggtgcctctcagatctaccgcctcccgaacaggagcatcaaaatcggggcgttcctcaccgccatgaagagaacgcagcagtagctaaggaggagagtgctctcagattttctaggagggctagcgacgtgtgtcctcgctggtcggtggccgctgcctcgtggctgaaaggccccatcctcgcagtggcgtgctagtgcagggcaataaaacaggagaacgaatcacccaaaaatcatcatggtccagcgatctgacgttcacgactcgcctgatccagcgacctgagccgcgccgccttcaccgggggctgaggaagctagactgcgtcggtgttgtgcccagggggaaggagaggggaagtagcagcttgcggcgccgtcatggctcggagcagctagctacagaaatagggttatccgtgtcttgtgtct

SEQ ID NO: 5169 - DNA, 335 bp, Avena sativa
gatggacccagtgcaggaggattctcaaaggcggagtgttagctgatagataaatcgccactgtcatcctaccaaggagttaatagtataaaactaccactttgaagatgcaatttaccaaatggtatcacactacgtttttgggatagaaatctaccagcttataggaagttatttgcagaaaactctaaaagtgaactgagatagaattgacacggtttaggatggcggggtcgccggggaccatggatgtgtcgcctccgagctccacgggcatagccatggcgggacctcggggggaaacgtcaccgccgcgtcgctgcactagatccatc

SEQ ID NO: 5170 - DNA, 401 bp, Avena sativa
gatggatctagtgcagagtggatacaaatgcagtgaaatacaatgatttgggctacgtgcaaagtgtaggctatgatctacaacactaacataagttctgcaaagaggatacaaatgcagtgcttgaaaagcagctggagtaactatagactaagatttatttatacactaacaaaagatgaggcttccatagatgcagagcctactgtaagaggcacataatatagcagtgaaatttaaacagatgtaagataccaagcagatcactataatctaaactcatattcaaatgaaaatgaatgaactcaggatttagtacaagaacgtgacctgctcatgcctatggcacactccccataaaaaaacctttgttgactgcaaatacatagaaagtccaccaa

SEQ ID NO: 5171 - DNA, 379 bp, Avena sativa
agtgcagtcagggttgcaaaggtaaaaaaacttggaaagcataagttggagtaattattctttctgacaaacgctttcatacatctagcaattggatgatactgtttgatccacatgagtgtccaagcaggcttctacatggaagtaacatatccaatggacgacatgaaagcattataatacaatgaaacatggcattgtatataccaatcttgcagcaaaaccatcaagtcatttttcttactaattaaaaattggctatgttgagtgttgacaaaactggctctagataatgaattacctccttgcaggtcattaattcagcgcaacaacggtgtgctacatgaatcaagctgtgtaaaaatatgtctgctaatag

SEQ ID NO: 5172 - DNA, 375 bp, Avena sativa
gcaaccgatgcatgcagacaaccaaacagccccatttctgcttttcgtgcatgcaaaaagaaaaacatgcccaaacgggctgtcattcatggcggcctgtatgaggctgggccaaaaattggatgcagcctacgaaacaggccccaagtgaatcaaactgtacgctgagccaacatggccagtagaggtcaactggagaaacaaagaaccggagctaacttgataggctggaaccattacatcagtcattaagacactggacaacaatctaaacagctggcagatttctcaggatcgtagatttgtacagtctcgcaaaatagtctttcctcctctttttacacctaaacaacttgtacaggacgcatatcttct

SEQ ID NO: 5173 - DNA, 612 bp, Avena sativa
ctcattgcggcttccagctttcttaatctttatatgttcgtcccaatctgagagggtgtcgtgagccacaacttcctcaccatttggttcagaggtctatttcatcagaggtttttaatttgttgtatcaccccatccattgaacatttgacctcacacaccttcatgtgtctacaaagttgactggtacctgagaccttagaggctgggagcacaatgctgcagtgcttgcatcgtccttgcattagaaatccatcaatatatatcggctccgcatcgttccaaacaatagaggttaacttccgtggtctgcgtttggagcctacaagtatgaagattttcaaatattttcatccaagtagtattattagtggtcgtatttgagagaatgtgatggaggttagtagttaccattagtagcggcagctgatggagcaggtgagagatcatgcaaagaaggggacttcaaagtcccagatggatttggagaccttgtttgtgaattaggagaccttgcatgcaaattaggagaccttgcgtatgagtgtgctttctttcttgcaaacatattaattacaggagacctagaaacgataggagacatcttttttc

SEQ ID NO: 5174 - DNA, 330 bp, Avena sativa
agtgcaggagattaaatgaagatggtgcccacctatttctcaaatgcaaggaagtcagaagagtatggagtttactggggttggaggatttctgtgatcgcttgagtacgtacagcactgccgaatcagtagtgcatgaaattcttggtctccaagaagcagacagagttttggtttgctgtatgctttggcgctgctgggatgcaaggaacaaattaaatgcagaaagaaagaagtcggcagaggctgtggttaggcaggctaagtactgggctgctgaatctttgttgtactgacaaaaaagatcaacccaattccctggctattagc

SEQ ID NO: 5175 - DNA, 370 bp, Avena sativa
taacatctcattgttgcattaatgattactctggtcactggtgtttatgttctgcaaggtgaaaatgtgcaagcataacctgacgactgaggtgcgaaatttacaagatgtcgcatgaacctccagaaggaaagaagctttatccctcttctgattgcagttgggcaggagctcccgaagcaagtcaagcctgaaagagagcgccggtagatgcttcttagaaccgtactgttacatcctaagaacagtattcagcatctgtacttatatgacttattatgagaggtcctttctggatttgcttatagcatgctgagttctcgctatcgtcgctagtgtgctactactggtagatcctaccctctgcatt

SEQ ID NO: 5176 - DNA, 339 bp, Avena sativa
agtgcagatagctaatgacatgggaaagggaggataatgctaactatttccatgtcgtcggatccactgccagataatagacgcatgaaccggtgactcccaaatcaagtagcaacaccagcgaactgtcttgcctgacaacagcaacaacacgtaggacccaacccccaaccgcgagagccaactcgcagcccccaaccagcacggaagcaccgcaacacgtcggaagaaaaaatggctgagatagaacaatgatctcaacattctatagatataggaactagtgaatacaatagattcacgcagtgagaaaaatgttcaagaatcacaatctttggg

SEQ ID NO: 5177 - DNA, 482 bp, Avena sativa
  modified_base (223)..(223): a, c, t, g, unknown or other
tgggtaaaaggaagaaatagagtaccaaagaaatttcctttgatttcccttcgtctcaccatatacaatctaattgaaattcttcagcaaaaacactagacttttgatattgtgtgatcattacgtagaaaataactgatatcttaaagctctgtataattcattttattcattttaaaagattgtcatgttcctactgtcttaaacactgaactagaaaggngctgctcatcatttaactggttcgtgaatggttgcaacagagatgctggtctgcacattggtaatgcagcggtaacagcaggatgagcttgatgttgccgtctgtcatctatccccaggtcaatcatagaagctgctggccctccagagaggcgatgcttaagctgtagggcgcctggttgtgcatacagaccattcccaggagggtggttaaaggaatccacagggctaactgactgccatagaactttctgatattt

SEQ ID NO: 5178 - DNA, 361 bp, Avena sativa
cagtgcagaacagtggcctctctcgcatcggggcatccagcggcaggcgcacggtcacctccgtcgtcatcttctccgttgccagatcaaaacgcacgagcttctcatctcgcatgcccttcacatggctaatggagggccagtacactgccccgttacggtgcaaaggatctccgtatggttggccgtggacggcgctggccacatgcaccctcgtccagccctgcttgcctcctcccaccgtgaacatgtgaagctcttggtcatcaacgtcctccccctctcgcgtggtgctgccatggtgtacgatcttgtatcgtctagccgtagcatcaaagccgaagcagtatgctgcactgga

SEQ ID NO: 5179 - DNA, 399 bp, Avena sativa
tctacagcagtggtaactaatgtacccttaacgaccaaattgccggaaggaaaaaaaaagtacagagacactgatttggtatggaaacagtacagcacagagtcgtactcactatctgtcgctatgttgtttcagttttcacaagattccgagcaaatactgtaagtacttctgaaatcggaaggttaaaacatgttccatgtttttgaaccacatacccacaacagaaactactacgagtactcgcgttacaacagtcggccatacaggggcagtgaccgaacctcatccaaagaagttcagagagatacagtacatagcaggcagaaatccaaaccgttcttcagccattccccaaggaatgtttcagccatgaacgacgtcggttgcagccaacag

SEQ ID NO: 5180 - DNA, 450 bp, Avena sativa
ggatatcgctgcgagagtgattcccaggataggccaggaattgatcccaaccgccgagaaagtgatcctagcgtcttgacgttcgtattctaaatacccttaaaaataagagaaaatattttttccatttttttacttgtaatccactgctttattaaacggaacagactcggactgaatcacatcagtcaggaatccaggaattacatcaagagaggtaaactttggtctgcttcctttgcaactgcttagtgacgatagaggagggaagggctctggcctctggcgacgcctccacttgggattgtggccacaactgagaagtgggatctgagtggagcccttgcgggcaggatgtgcttgagagcagatacagaagggcgtcattggcaacaggcgccctcacctgctgatgaactgcaaggggacaaggcaaccgtgacttgagtt

SEQ ID NO: 5181 - DNA, 402 bp, Avena sativa
aggaccaatcacttttgttaatggttgagtacctggcttacgggaggtgaatcccatcacgagaggcgggtccgatcactaggaggaggatcccgtcggcggggaacttccctttcttgtgcggcactaccacatactcagcgctctgcgccgcgtgctactgctggtggtgccgccgccactggtcgctaatgttcatggtggctggtcgtaggaaggatcggtaaggatatgacggagtatgtggggcaggatgtgggctcggaaagcccatctgggcggccggcaatggtggcaagagcatcgggcagaaaatcggcggcgacgggctcaaggtggcgggggagtgggagaggatggggcgctggagaggatggacagggccacagggggtctcagtac

SEQ ID NO: 5182 - DNA, 511 bp, Avena sativa
aaccaaggttaatccacggtctagtcggcctctttcagcacccatcaacaataagaggttttctctgctttgaccttctagactacatctctttcctcctatgaatttgttcactccggcctccaccatccacaacttcattgatcaccacgtccattggagtagaagctggtaatgaagcaacacaaatggttttattgttagaaccttcatcattcactaagctccagaacttgtcctaaaatctctgattcatagatgcttggactcctcccaaatcagagtcatttttcctgctttgcttagactcctcttccccaaccttctgaccttccgcaccactagaaaatcccctgtttcatctgcatcagtggtgaggctgccgctaagttcttgtgtggagtgtgctccaccaacgatagtgattccttgtagtgttcattcatccaaatcgcctgtggcagctcctccgggcacccgagctcggtcagtcgctgcactgggatccatc

SEQ ID NO: 5183 - DNA, 387 bp, Avena sativa
gtactgtgatgacgcttttgatcagctccaatcttccttttctgctcaaatgttttcctttccatccttttaagcctgtttgcaaccctatcaataagaggttgaacttcaatgcgccgcgacttcctaaaaccgagagggaggccaagataattgcaggggaaactgcctcgctgccctccaaaattttgcagcacctcgtccatgtccaagtgggcgcacgcaacagggaaggccatgcacttgtcagtattggtcttcaaacctgatgcctcaccaaacagcttcagaatttgctgagtagcaacagtgatataagtcagcagcggattgacaaataggacagcatcatcagcgtacatactgaccctcaaccgcgtcgttgtt

SEQ ID NO: 5184 - DNA, 420 bp, Avena sativa
catgtgcaggaagctcattaacagaagcatcctgtgtaattatttagaggttaagttattactaaggcaaagaagttgagcaactgatatcattatgctagcaatccaaccttctgtgcagtgcgattgagtagctgccggtcatcaaattctccggtgacaaatggatgctgcaagaatatgtttaagatgtcaatatacaaacaaactaaacatcaccatacacttagaaccatagaaacatttaagatgcagcaaatcaaaccaaagatacctttaataaatctgacgcagttttgttgctcctcccaagacacacttgactttagttgtcatgatacattattgatactgtacaactttgatcaagttagctatataaatgcttcgttttgttatgctttgatcagtactgaatga

SEQ ID NO: 5185 - DNA, 388 bp, Avena sativa
acacatgtaattaccaaacataccagagctgaagccgattgcattttatttgaacatgggctcgtgtaacgggttttatatatcttgcagactttatagttcacttttctattgaagaagcaatgatttggcctagttgatttctgttatacctcagggaggaagtcttttgactctgctattgacgactccataagcaccttaacagctacttcgtcaccattttctagcgtgccataataaacagtaccgaaacctccttttccaacgattgttttgaagtcgtttgttatgtgcttcagctctgcatacgtgaaccgtctgatgtcaacatttaggggtgtttcctcttcatacatagcatagtcctcacggtctcctgatttcc

SEQ ID NO: 5186 - DNA, 377 bp, Avena sativa
tgaaagtgagttgccatgcaagtattaggtagcaaaaatcagtgtcaatatggagctgtaacctgaaatctgaagccaggcatgcttcaagctaaaggcttagaacatcatgtagtagaatgctacaataggttgcttattttatattccaggagattatgtagtaaaatgctacaatagcttgcttatttatatttccgaacatgtagaaacctgaataagaagctcagtcttcaagcgtcggctagcttcatgctcactacgagcttcaccacgttgactaataatagcatcaatctcatcaagaaatatcgtggatggtgcatgatgtcttgcaagctcaaaaagaactttgactagcttctcagaatctcctg

SEQ ID NO: 5187 - DNA, 419 bp, Avena sativa
atatgtaacctgcacgaaccgtatcagcttgagatttaattatgcatttctctccacctcaaaggctcaaactgtagatcccacttcaacctgtactgccaagttgcctggctaaaagttccagttgaatgcaaacacatcggcgcaatgcatatataacaaaaggtaactacacagaccatgaattcaacacgtgcactggaagaccgtgaggccaggctaggagatcgccatcttgttcagaaaaaggagatcaccatgctggcactaccgagctggatggctggacagttcaacggtggcattcaatggtgccaactaccattaacccgtggcaagatcacacggtccatgagcgcagcagcggcgacccgacggtaggcacgtactgagcgctagctagcttgtgtatatatacc

SEQ ID NO: 5188 - DNA, 444 bp, Avena sativa
gatggattcagtgcagttaatcagacaagcaaaaattctacagcagtcctaactttcaaagcatgtgtttactgcattttttggaaatgaacaatagcgattttcagtatcataacaggttactgtctatattttttccgagatctcacacgcagttctgaacttcttaattcctcactcaaatgtatatgtactggatgtcacagaaaaggctaattaatctcagaagcaatagcatacctctgaattgtgtcaatatattcagcagttaatctttccagactcccaacataaaagaccaaactgaaaaccactggcacaaggcattaccattaagttactgaaaccactgggggagtttttaggaattagagcaagagagctcgtttacctgagccgctgaaggtgttggaagtggtgaggacgtgcgccgtcggtcgtctc

SEQ ID NO: 5189 - DNA, 452 bp, Avena sativa
gaaaatcatgccgtttcagaatgttggtaggagcctcaggtagtacttgctgtttgttattcagaacgagattgggaggagcttacatgtttgtacttcagatagagttccttaaactttaagtctacttctttcttatcctgtatgttgatgagtggcccactctctttcaagtactgacggtaatggtgtgcccagatgcccctgtattttgcagatccttctctttccttgaaacgagggtccaacgatatttctgattatgacaaaagaaaacagaaacaaggaagcagttattttaggcaacaacattttgaatggataatatactcatttgaccactcccaaaggccagcgattccaaacgtgctcgttatgacattaagtctagcagtactaccaactattgtgaggctacatgcttaccatcaacgaagaggtctaagggccta

SEQ ID NO: 5190 - DNA, 503 bp, Avena sativa
ccacccgtagaagaaggagcgcagggaggcatccaccgggaggtacgagcccggccccgccgcgatctccggggtcctggcccaggcggaggaggatccaccgcgtgttcgcccacacggcggcgatcgggaggctcaccaggctcagcaccagcatcgcccgctgcttgtacacgcccagcatccggtcctggttcgctccgaaggcttgcccgcacagagtctccaggctgcacgacatgccagtctgcacgcacgcacgcaggcaagagcgtaagtacataacagactatgaaagctagctagctagccagcgcgagtaccagaaaactgaagccggtgacgatggcgaatgaggaggccatggaggcgctggccagagcgagctcgccgaggtgccccacgaacatcacggagatcatctggataacgttctggaggaggcagcccacgatgagaggcaccgcaaggcggacttgtttcttggcctccctcgtcacctg

SEQ ID NO: 5191 - DNA, 324 bp, Avena sativa
tctggagtattactcggttcatggttagagtatgttccagaacagtattaccttcccaacagttcaaagttcccgtataagttagtatgcttatgcgggttacagtaattacccatgaacttgattttatcgcgagaactgttagcccaaaaaatgaatccacaacccccaggccacggatgggaaaaaggaactgctacaacgtttaacttgcttcgtgtgatacagatctactgaaattgcaaaaccatgatttgggatcaatcaaccctgacacctatgtttttcaaatgacatgtatgtggctcgtggttctctacaatc

SEQ ID NO: 5192 - DNA, 542 bp, Avena sativa
ccattcttggattgctgaacggagggcatagttcggcaaaagatcacggtggagtagctcaaggtttgtcatgggtgatgtatggtgtccactatcaatccactatcttatagcttcggcttcataggtaaaaccatctgcagcagttagaggctccctcatgacatccgaattacaaatgttgtttatgcacggaaatcaaccgcctttggataaaatgattcagaataatgattggaaacaaaagttcagaaaaatcaaatggatatctcaaatatatgaatgtttgctggtagatatagcaaataggtaaattatgatatgttttacgagtacataagatattagaacaaacaaccactaatagaaaactcaaaacgttggcagaacaaccaagtacacgaatgaataaacaaagttttgaaatgctgacgcagcagcaggaacaactcaacaactagacaagcatagtgcagcttgtctattcttcatgttcttctcatgcagctagattcattggagaatttatgatgagcccagtt

SEQ ID NO: 5193 - DNA, 421 bp, Avena sativa
tttttttttttttttttttttttttttttttcagaggcagagggtgtccggaaggggatctttttagacctctctagccaatgataacacgtcaaccacaatgccttttgcactgcatagtttctccatagcacaagcaactgaggattgggggtcggcgaacaaggcgagatgtgcaaggcctcttggaaacggaccactgcgcggaggagagagtgggggggtcaagatgtcgttgtattgttccatcacgcgtttagcctccatcagagccgcactgcccagatgcagttgataatgatgttggaggcagtgtccagagatgaggatgctacgcatgagcgagcctgaatttgtgggtaccagcgtgagtgccttgatgtagaaactgtgtatcatgccatggaggtacatcttgaaa

SEQ ID NO: 5194 - DNA, 451 bp, Avena sativa
taaaggtcaaatgaggaagcaaatgagccatgttaaaattgtaaagcatcaacagtacaatgaagcaacatgattcacaaacttaaaagcaacaccaagtcaccaacacatatctacaaatcgttttttagaattaaaatatgaaaatattgcaagcctcttttaccctgaaactttttttactagtatgttccagagaaaattaatcgcattgctctgtagttttcagaagaaaactcacgaaaccccctaataatcagaagctagcatcacgaccgtacgaattgggaaaatacattgcaatttttcgccacagctcagatcaagatcatagacaagataaattgattttccaatttgatattcactagaccgacctcgtcgtcctgtcgctgctggttgactcgtatctcatccgcatctttatcgttccaggcccgaaggtggagtg

SEQ ID NO: 5195 - DNA, 339 bp, Avena sativa
gatggtccagtgcagagggaaaattgcaaaaaactacgacagggcttcaaaaaactatgacttttgaggatcgttttaaaaactagaattttgggacagctgactacaaactagcgatgcaggtgggatggatttgggacagcccgcgtcctgcctaatcagcccgccgggacacagtgggattagcgggatcttagggaatgaaacaattggatccagcaggacccggcaaactaccgcgtcagtacaactccggctgaacggcctagagtctagtagctgtacggttaacccctctgcgcacggacgagttgtttccggagtatttctatacgctgc

SEQ ID NO: 5196 - DNA, 435 bp, Avena sativa
tccagtgcaggaacggtgagtagtatccccccgctggcgcggacattggggtggtgacggcggcggtgggcgacatgggcacaaactccggcgcgtgcacattgaacttgaacgatgccggagccgacatgggcgtgggtggcaccgtgttggcgtcgccatcgctgccctcctgcgcggccatggctggctggctggtggtgaccaagggaatggatggatcgtgaccggcggtgctatataaaggctggtgggaaaggaggaatggttggtctgagtttcatggccgcttctcccgcgcatacgcatgcactgcacgcccgcatgtctcgtctgtcctccctttgaccgttgaccccaatgagggattctgcttacatctagggccctaaatctccctcataatatgcacctacgcctttactaatctgcact

SEQ ID NO: 5197 - DNA, 433 bp, Avena sativa
gaggcatgtgaacaccctgttgcgtgatctccctgcaagatcacctgccggttctaaccgtgacaattagctcccgttaatctcgcggaaatacttttacaacctggcagctgattcgtgtcaagcatgcagcccctgatgatgaatggccgcattgcctgtactactactatacacagacacagctagcagagctagctttatgtttatctttttcggcttgtattgtactgcgggaacagtctatatactacgaagacggtgattcgtaatctgtatcatatgatcagatctacacggactcgtgctgtggaatccatgattccgtgaccgggacatgtatacaatagctaggccggccggccggttcttccagccatgcatgctgatgctgtggtcctaggagctgctataggttaattagcagctcgct

SEQ ID NO: 5198 - DNA, 407 bp, Avena sativa
gatggatcagtgcagtagaagtacacttacattagttcttgcccgtgtgatgagctctgaagtctgaactgaattgtttccatgccagaacaatcctcggaagccacgaaagcccaatcgctttgctaccaccgacaacgatgtgtctgtgtgtgcttagtgtattcctggtcacattatgagtacttgccattttgctagtaccactgattaagtacgcttccagcagtaggtgtggtgtatgaatcacgggttgtcgttgtctttcggctaaagtatttgcgagtaggagtcacactgctatactttgattccgcctattgatcaatggagccaggaaaagcggagattctctttggagatatcaggcacgctttggcgggcatcatttgagttggatctcctgc

SEQ ID NO: 5199 - DNA, 353 bp, Avena sativa
agttcatgtccagtgcatatcttcacgggatcataaacttggtatatcccaccatctacataaccaaatggattagtgcactgtgctctcaatgagaagcttgcaaaatcattgcttttagttttggtaatctatttttcttcatattgtaattgatggctttttctctaatagcctctaaatatcatctttcttatgtcgtacttcaggaaaatatggtggcgtttggcaagcaatcttgcttagttttctggttaaaaaataaagacgacatggatttaccatgttctgttacaggaaagcttggaggtccgagtcaacgtcgtttggctacctctataacctcttcagtg

SEQ ID NO: 5200 - DNA, 271 bp, Avena sativa
tgcctgtggagcctcgccctgtccattctgtacttctacgcgcttctcgtggggcgttcctaccggactccccgtgccatcgccataatttgcgccggggacgtgggtgagtcatgttttctcaggcgccttgatcaaacaaccatctgcctttccttgtggattaaattccttttgaatacatgaataagaaaatagttatgtgacggatcatgagcgttcctctttccctgaaatataaccaagtcatcttctgatttgctgctgctct

SEQ ID NO: 5201 - DNA, 257 bp, Avena sativa
tgacaccacattttggttacctcagaggttaaattagtatggggtcgactttagtataaataggttcagttaagtgaacataacactcatagtttcttgctcgtcaggttcaagagaatggggatgaattggagaagatataagctgattgtgcaacagtatgaccgaccactcatattttctatgagtaactgaattaggagatatatgtggtaaattgtatcaacaaaaggacatgttttttttagtttttgctt

SEQ ID NO: 5202 - DNA, 343 bp, Avena sativa
acaaagaccgctcgtcaataggtaaaggagcacactgattgcctacctgaatacaatttacaagacaaacggttatcaagaaattcaagcggacaaacttgtcaaatcagaattcagaatgaaagtaatatgagattcctatcttattatatgattggagtgctgttttgttccttgtgtttcagactccatggttggacatgattgtgttgagaatcggatcatttgaccacaacatcttcggacgtgtgtataaatttcagatgacagtgacaaggacaaagttcaggaatttgcaatttgcagtttatgtactacctagtggttgcttgtttacagtgca

SEQ ID NO: 5203 - DNA, 411 bp, Avena sativa
tctgttgcagtctgatctgatctccatgggtaactcgtcatacatatttggctgtctgggttttgactacttgagccacacccatgctgcaaccaccatgccctcatgtttgctctgcacgcaacatcaacctctacctctaaatcaaagctcttgctgactttgagccacaccatgacatggtcaatgaagcacggaaaatttcctgcaactttgcttgttttttgtcaatcggctgtatgtgtcagccactattccacaatgcttctttgatttatgtgtacaagccgtagtagtgaagaaaatggagggagaagaaagaaagagatgtgacacgggaatagatcacatccgagagccggccatgccattagatagatccgctccgagtcttctgcactcggatccatc

SEQ ID NO: 5204 - DNA, 440 bp, Avena sativa
gtgcagctttacctataagcttgctctccttccagaatcttatatatccccttaatgagaggttgactttatctggacttggctatcactacggaattgaagaagaaattatccgaacttccacatcattgcactacaatggtaatatgaaaccctggcttgaattgggtataccaaattacaggaagtactggaagaggtttcttgcacgagatgagcgattcatggatgagtgcaatgtaagtccatagcacacactttgaacctgggaaccagaccatctgacggtagattgtttcgtctactgctgtactatataccaagaggacgagcacttccaatgaaaagaccaggaaagcagtcattagccatcaattttgacagagtagatccaacacaccatctgttcattgaattagtgagcttgtggatgttttttt

SEQ ID NO: 5205 - DNA, 400 bp, Avena sativa
taaactggagtactggacccccgaaaaacattaagaaaccagtactatttacttgaacaattgcaactaacttaaaagtggagtgatatataagattgttccttccagtaacatataacaactaaaatcatgaaacacggaaactggatccaacgtgcctaaggacgattgtttcaataacccgaggcaaaatacaatcatgaatatgtacaaaatatacctgagaacaaaactagttctccatactaaaactactcttcagatgacgaatgggagaagccaagaaatagccaacttcagcaaaaatccaagatctgacaccatgaaacgcacttaccatcgggatgcccagcgccttgagatcactttcagtcatgtgacgtagggccgccatgtcaac

SEQ ID NO: 5206 - DNA, 363 bp, Avena sativa
atcaacaggtagcgaggttattgggagtgagagggacatttacagagccggttctaccatgtacggcccaatatgtaacggagattggaccctgatgattcatcttttgcagaaacaaacggtaaaaagagtagactttgtacactctcctgacgaactggaaattaatggatgatgactttccaacttaaagactgcccatacggtacaagcatacactcgcactacagaacgcaagtggaatcacaaagattcggctaaaatttcgcgaaatgctggaagctgccatgccacagtggaaatgaaacataatacacgaactcccttctaaaaatccccgtttaggccgtacacctaccaagt

SEQ ID NO: 5207 - DNA, 519 bp, Avena sativa
ccacgtcacccccattttgtccgtgcgcgtatagtcctcgcggcctcacctctcggctctcccccgcttggtcgcatgtagcgttttctttatgcgagcctctatccaatccttcataggtgggctggaccggcatgggcttgaatttttttgggaacgttgttccttttcctggtagccaataatcgctggtagtaactcctccgccacagcgaccttccatcctcctccggcataagatctcctcacaaatgctcatgaaaaatctgatctttcaggtatcgcctccaaggtttctatacgcggatagaagacgaataagtggaggaggggacagcaaagtgcaatgcctctgttttggttttgttcccgttcaatttcagcacaagataacaacgatcctatttgttgtatgacctctgaactgtatattagtgcgctttgcttggtttaggataatcaagaaaatatgactcctcatttgttgatcgtgtatgtctaattaatgtcccctttcca

SEQ ID NO: 5208 - DNA, 378 bp, Avena sativa
gatggatctagtgcagtcaagctatccaaaatccaaaaagatgtaacgtggtcccatgaacttttttacttttgccattggtatatcttgcatttagttgagacaatattaactgaaagtaagtgtccgcgacaaactaataaattctaaagctccacagtgaaacggtaaacagctgtaacatctgggccgtggtgattggtttcattcatggtgctgtgccgaatcgtgcaatgagcattgaagttgatccgtttaggtccatggtggtgctgtcatgctttgggacacgacaagacgactcaccctcttctttccgtgcgggtgcggtgattccagtccgctgttctgtgaccttgcttccgaccagctgcactg

SEQ ID NO: 5209 - DNA, 346 bp, Avena sativa
cagtgcagggtctcctcaaggtgatcgccggtgtggacatctccttcacgctcacgtccaagccgggcggcgccgacgacggcgaggaggacacgttcgctgagctgtacgaggtgcggtggagcttcctgatggtgcctccggtgaccatcatgatgctaaacgcggtggcgatggctgtggcgacggcgcggacgctgtacagcgagttcccgcagtggagcaagctgctgggcggcgcgttcttcagcttctgggtgctgtgccacctctaccccttcgccaaggggcctcctgggacgccgcggccgtgttccccaccatcgtcttcgtctggtcagggctc

SEQ ID NO: 5210 - DNA, 476 bp, Avena sativa
agtaaaaagctaatgtaacccaaaaaaatttcataacagaaataaaagtagtaactaagatgcagggtgactactctgtggagagcatgaacaagctaaagaacaagtgactggactgtggaactatgtgcaatgcaacagaaatatagcatgataaaaaaatctatatgtattcacaacattctttgaccagttattaaccacgcactgcgtttaaagatgcacttgaatacaccacctaagcatacccctagtccaaacagctggtttcaaataatgcgcaacaggtactgaatcaaaacaatcagtaagtagtggaaaatgaaaaggttcctaggaggactcaccttgaagctgacgccttgcaacacatgcttgtccccaaaggacttgtgcacatccctgcattctataagaacaccatgctcatcaccaatctgtctgctcaaatcccagttcctagacaagctagaacc

SEQ ID NO: 5211 - DNA, 379 bp, Avena sativa
cgtgcaacaaaacgagaatgaggtggacacttgagctccatgagcgttttgtggaggctctagcaaatctcggaggaccggaaagtagggtgcccctctagttcaatttcagagaagtttggaaattaaacaatcctttaaatgttttgcacgtatatcttgtagaggcaactcccaagggtgttctgaagcttatgaagattgaaggcttgaccatctatcatgtaaaaagccatttgcaggtagttgggtcaaatatgtttcaatatatagtaaattgtctctcattttactatcattttgttgtgatatttactcatcacatatcattgcaatgcagaatattaacataagtagattattcggatgaaacaacatc

SEQ ID NO: 5212 - DNA, 382 bp, Avena sativa
caatacgcggggtacctctagttacctagatatttcttttgaaaaggggcatatattaatatcaggagataccaattacatctagtctctgcaataaagtattactctattggcattacggatacacacaaccaataaaaaaaagaatttataaaaaaaccccgctatagtgattagttccttgaagagttcactaactggtacagcaactgtcatactcataccagtggaagctgctccagcaaattataagcataagaagtgctccacaaggagcaatacgataaagggaaactgaacaagggaggaactgatggcacaaacagagcaaaatgcagagtatcccggtagacgcttaatttgcgataagagaagcaacact

SEQ ID NO: 5213 - DNA, 381 bp, Avena sativa
tccaacggcacggccacacgccgccggattagtgcgcggcacgaccataccgccgcactgcacggcctaccttcacacctcacagtattccttcgcttgaaggtaaatgtattgtcatgttcttctaatttgaagattgcaatgttgtaaatttattttgttcaaatttgatcggttttagaattgtagtcatctcgctataattaccaacgtgctttaaaaataggttataatctgcaatggttgaacaattgcaaatttcacaaatggaatgctactgttatttacaaatgtctttagcaacatattaattgatgttatcaccggtaacttttttctggacatatcttggcatgatggcgaagtattctagaaaccaaa

SEQ ID NO: 5214 - DNA, 404 bp, Avena sativa
ggaccctttgctatgctagcattgtttgtcaaaatccgaagcatttctgccaatgcaatgcaaagaaaatctggagcgtcgtgaagaatatcaagaatactctcaattacaccagccttaaccattttactagctgccatattcacccttgcacacctttatatagactatgatctctttgtccaaatttaacttcttcctttccaatctttaatttgtcatccgtaattttttttgtcttactgtcacgggcgggcgcggtgtgttaccgcgccaagtttcctagtatctaaaaaagaggagcgtgttctgttttctgtcaccgatgcactccgttggttttctttcgtccaacttcccattccaccggttttcctacgtcgtcctcagccaccaactaccac

SEQ ID NO: 5215 - DNA, 316 bp, Avena sativa
tatatatgtaaatactctaatcaaattcgtctgcaccgtttaatttcccagcgagatgatcttcatttaaatttcaaatttctcagtttacagtgtctgatctgtgcgatggtgttcaaaactgaaaagggtgtctaatctgtacgacggtaattaaatacagtcgtctatgctctaaatacagtcgttgttttacagtttacaaatttagcatatgctagagttgctctaaaacggttaaccccaagagcaccaagagaaagccttgttggtgatggtgttttcttgaatctggcaatagtgaaggctcgtcgtc

SEQ ID NO: 5216 - DNA, 363 bp, Avena sativa
gattctgttgtaggcacaggaaaccaacatggacacacttgagcacctcagctccagggtagtttcttcccaaggagaaatctaccatctctgcaatcgttccttcagcccagtgcttccatacctagaatttacaaattcatgtcttacacgattaacaacatataataagcaagttctaaaagtatttacagtgtactcacgatgcttatgagatcttcgttttcctcaggaaggtaggacccattgtttctccggcccgttacgatctctatcagtagaatgccaaaactgtacacatctgattttatagagtattgtccacgcatcacatactccggagacatgtagccgctgcaacaa

SEQ ID NO: 5217 - DNA, 388 bp, Avena sativa
gcagaaagctcggtcagtatggcgctccaaaacattggtgcttccaacaaggatgatgccttctacaggtacaagatgcccagaatgttgaccaagatagaaggccgtggtaatggcatcaagacaaatatcgtcaacatggttgatatagcaaaagcacttgccaggcctgcttcatacacaactaagtactttggatgtgagcttggggcacaatcaaaatttgatgagaagactggaatctccttggttaatggtgcccatgacacttcaaagctggctggtcttcttgagaacttcatcaagaagtatgtccagtgctatggatgtggcaatcctgaractgaggttctgatctccaagaaagagatgataactctgaaatgtg

SEQ ID NO: 5218 - DNA, 381 bp, Avena sativa
attttgggattttctgcgacccgacatcaattatgcagcctacggaggtggagcgaccacataacacgtttccaacatggtattgtgctaaccaaaaattattactgatggacgtgttcggttttgaccaataattcgctttgccaatttttgttctactggtgaaccagaaacagttgatgaggcgttgggtgatcctaattggaaggctgctatggatgaggagttttctgctctcttgcgtaataatacgtggcactttgtttctactagttctaggaggaacatcacagattgtaaatgggtctatacggtcaaacagtttgatggtactattgacaggtacaaggccagacttgttgaaaaggggttcaagtaacg

SEQ ID NO: 5219 - DNA, 407 bp, Avena sativa
cagtcccaacctgagccaagaatccagctcctgagcccctgacagcacctgtctggtcccgtgcgacgaaaccccagcctccagtaccaaattcctcagagaaagccccatcggtgttaattttgatcacatcacccatgggcggtgtccacataatctgctttggagagctgctaatagccagggaattgggttgattctttttgcagtacaacaaagattcagcagcccagtacttagcctgcctaaccatagcctctgccgacaacttctttccttctacatttaatttgttccttgcatcccagcagcgccaaagcatacagcaaaccagaactttgtctgcttcttgcagaccaagaatttcatgcactactgattcggcattgctgtacgcactcaagcga

SEQ ID NO: 5220 - DNA, 371 bp, Avena sativa
aacacttcagttaagtttcagatcagcggtaggtaataacctaacacaatttgaaaactgaaactaggtatgcataccagccccctctcctggagaagtaatcactgtccaaagacaccgccagagcaagagctaccgctctttcaggtatagtcagctggcgaacaacgtctagttcttcaatctggaagcatcattgaaatgtgagtttgaaatcagcgagaggttctccaaaaaagagagcgtagagagcaaaaatgggtaagtacataaactgaaatgggtccatatgaacataagtttcacggcaggggaacagatatattaaggcagatgtttttatgtctgtcaactcggaacacttactacat

SEQ ID NO: 5221 - DNA, 452 bp, Avena sativa
attttgctttactgccaggactgaacactctaagcttaaatggcaagtgttcctgcaagaactagtcggctcagaccctgaggatctttttgcctgatgtgcgcaacagtgggctactccattgattgatctgcttacatggtatatcttggctcctagaggcttcattagattctgtcagtggatggcttgccttcttatctcccaaagcatatcctggttcctccctcctgcatctgctattgcttttgctaggttgattgagtcagtgaaaaagattggatcttgtaattttagttgttgtgccagctttgctgcaaccaataaagcagtagcttcagcctcaatggctgagttagagtgagccatcttagccatgatgaagacatcagtttgggctgctgcattttgttccttgtagtgcagatagactcccagccctgctgtggcat

SEQ ID NO: 5222 - DNA, 390 bp, Avena sativa
tagccacccaccagtattaccaaccactttagggtctgcttggaatggatgtgtggccaccggtatttagctctcacatgaactaaataccggttggcacataaattttacaaccaatccaaacagcccctaagacttattttactccacctagacaatttggcaacatcttcttgcaccagagcactggtggacgtgtgattccctatctggcctaactggcaattatcacactttatcacctatacatctaacacagttcactgatctcccgtgatcagatccatgggcacgtacatcgccattgacatggatgggtcctccttaaatcggtcttcttcagcacatttctcagcagtcaaaaactaaacgatatttgtagaccagtct

SEQ ID NO: 5223 - DNA, 250 bp, Avena sativa
gccttgctagttcttccggaagctttgtcacggaatggcgtgaatgtgcatgcctgaacctcaagtacttgaggtgcaatagatttcctatgccggcaaggtcatcatctttcagctgcccgcactcgtcaaagtccagcacacgcaggagccggaactccgacagagatgggatcttggcattacgcccgaagacatggagcgaccgggcatgagatacatctagatccggtggaatctcacccatgtt

SEQ ID NO: 5224 - DNA, 468 bp, Avena sativa
caaggagactgaagaaacttttacccctgccccatgatatgttcttttttttggtaaatggttgtcattctcttttatttaatgtacctagttgattttgaggggcaggggaaccagccaggatttagatttaaatagaggcacccctaaataacctgtgtgccacaatctcagaggaggcaagaatttggggttggccgtggcacgaatttggggtaatgtaatacgaagagagcaggcttttgttttctttttgaatggggtgttcctcggcctctgcatcctcggatgcacacagccaaatttattacttattagcataaaatgcaatcattacagttcaaggatctgagagggttgatacacaccaatcatttgaataaaaaaagtggacgaagagtacaaaacggggtgtaaacatgcctaaaaacacctagagaaaaaattacaatactgcctaatcaggcc

SEQ ID NO: 5225 - DNA, 439 bp, Avena sativa
ataccttcgttacacagaaaacaagatggcgagccgttctagtcaaccaatcacaggtgtctgagttggtgtgcgttcagataaatccaactctggttgatgtagcgtgaggaactcgtggctgtgaacacatggcgatattgtattattgtgggtgcgtggatgaacaggtagggagctgtcattctttaacattttcgtctctttgtactgcaattgttatggtaaatgggtattggtcttgttttcgtgtccagtagtgtgctagtagcctagtactaattattatcgctagctggagtaacgcacaacgtgcagcacgtacgtacctggacggtccagtagtagtgggatctctctgtctgtccgaagtgtctctttctgacagaaacctgttgcaaagtcctgcaaagcgcaaacacctacctgaagttccgtt

SEQ ID NO: 5226 - DNA, 361 bp, Avena sativa
ccagtgcagcactttagtttgcgttggaattgtcttcttactctcttgtatccatccaaaaaagtaaagctacagcgtcagagaaaattgctggattaaagttaaaggcaaagagaaactttggataagtaactggacacagctaatgaatgcacccatggtcccgaaaacccagagcgcagtacctgggtaccgcagtgaccttttcttaaattggaaaacctatttccagtactacaaaaaaatataaatctctaacaaaaaatgtgttatttactcctatatacagtaagaaatttgtaattttgagttccaaaaaatacaaaaattattctgggaacttatacatggtccgagtaac

SEQ ID NO: 5227 - DNA, 351 bp, Avena sativa
gggcgccggcgcgcccgacgacgaagacggccgccgcagacgggagaagcagcccagcatggcgctttaattcttgccttgatgtgtgggcgctagtagctgcccagctactagctcgtcagctccttggttttgggggaggtagttgcgcgcgtcgtgaatggggcgagcgagtgtgcgtgcgaggaatttataggagaaggggtgaagtaggtggtgggggctcacctattatttggacgtattgagttcagtgcagagctgacagtagtttgtccaaagaagggctacaatatgaattcatcaaattatagaggaagtggtaatggtgtatcacagtatgagacatca

SEQ ID NO: 5228 - DNA, 397 bp, Avena sativa
cagtgcagtctttgctgcttgtggcgcccaaggaaaaggttctttcaagagactaggtagatgagatgatagacaaattggcttgtccatcttttcaggcatggacctctaaactttggctggtgtcgccagaactgaagaatggctggaacccaaaaaagcgtgtgatatcaccatcaacgacccttttcgctggtgaacgcaatgttggctatgtgtttcacgatccgagtttgttttgggaattactgtttttctactgcaagagcacactgtgtagtttgtgggcatccatgatcccaagatatgccaaatttaaactaccatgagtatatatgagttgaagctagcagaattacctgaagatagtttatgtaatgttaatgagttgtgatat

SEQ ID NO: 5229 - DNA, 555 bp, Avena sativa
cttcgccagaaatatattttacaccagggagcatcttcacttcttcagtgacagaccctaatatctgaagcatactttcatttactgcatatgtatttacccataaatcacctcattgcaaatgtagaatatgctacttttatatattttagttcaatagtatggccattgcttgggagaaaaggccttttgttgttgtacactatgaagttatattggttgtacatatggggttgaagatataggacgtgatctctcacggatctcttatacaagtttttaagatatattttttaatgttttactgcatggtgtactattcacttgctaatagttatatctttttgctcttttcaatagacgttggattatgtgaagcaatgcgaggcagatattgtcaacatgtcagtggcgcaacgtccatcccttggttatgaaccaacagcagataagctttatgacctgccacaattaggatttgtgcgggctaaaaatgagcctagagagaagcagcaagaacagccagcacaagaaacaccggaagaacccttggac

SEQ ID NO: 5230 - DNA, 574 bp, Avena sativa
ggcatatacagcagcatcttagaaacattactaacacttccttactggttcacagcaagacaaatagctaatgaagatggacagctaggaaaatagtccatggcgttcaccttaatagtaagttccttagttgtccgggtagctattgtaacacttctctgaataacagggcctataatttctttaatagccttatccaaagcaacatccatgattctatgaagatcaagagtgttatcagatcatcggtaaaataatccaaatgttagctaagtaattttctgagacatacttgctatattgcagtgaaccaagagagctaagtttttcattaattctgaaatatatatccgcacgtgggattgctgcaataagctgtaaaaattaagaaaacaaagtcaagtacagaaaaaacatagttggaggggggaaaacaaggacaaacctgactaagagtaaacagagcaggtgatggagacggtgtttgagatggtgaaacctgatcaggcattattaaagcaaccttatcatcttctaccatgctgttcggaggaagacgaagaggtggtgcata

SEQ ID NO: 5231 - DNA, 554 bp, Avena sativa
actttttatctgaattacttgagagtgacccttgccagtcctgatgcaagacaagtttgaagatgcggtagcggatcatcaggaggtattattttctatcagcaaacatgcgatcaaatggttctgaaactacaagatcaatgaggctgtttggcagaatacaaggacatgatgtgatcatattgattgattctggttcatctaacaacttcattagtgataaacttgcgtcacaactacaaggagtgccgcaactacctgaaccagtgagggtgcaagtggccgttggtggagtcctccaaggacattctgaaattcctgattgtagctggcaatgtcaaggcaatacattcaaaacaacactaaaagtgttgccacttctgtgctatgacgtgattttgggcatgaaatggctagagcagctgggactggtagctacacattgggctgaaaaatggtttgaatttgattgggaaggtgccagatgcaaattgcaaggtctccgttgcaataccaaaaattgtgaagtcatctcaattcaagagttgcagcag

SEQ ID NO: 5232 - DNA, 413 bp, Avena sativa
tcttgaccttctcgcctcaacttgagggcattgcgtttgttgggtgagggattcacgctggattctgaggcggtctcggctagacattgctttcggaggctgaactgatttgttctcctccgctggaggggcataggccgacgcgttggtgtgaatgctcgcgctagcaggttgctggatcaaattactctgctgcacagctgatgtagctgactcgtgcgcaccagacagactgtcttgttgagcaccttcagaacgcttctctaagagttttgctagttttaattcttctctagcttctgctagcttcccttctctcttaaaagcaactgctcttctcttatggagtaagatatcatctcttagtgtgtcacatcgctaggacactgcattactgcacctatctcaagcag

SEQ ID NO: 5233 - DNA, 451 bp, Avena sativa
aatacggtgaaggtggtcaaatttctccaagtgcagatgtgtatagtttcggtattgtgctccttgagatgtttacagggaaagagcctacacatcctatgtttaccgaaggattgaccttggttgagtatgcaaagttggcatacccagcacaagtgatggatattattgatccccttctgctatcagttgagaagacacgggaagatatcaatagttacatgtactctgtcacaagacttgcactagcatgcaccaggaaaagaccaactgataggctgtctatgagcaatgtcgtagctgagatgaacaagataaaggctcattgtgctgtagaagtaattagggaatgtagttatgagtgatggaacatgtaactattgataagatgtactagttcttgagcactagcttcataagatgtactacagtactagctgtagtctgcact

SEQ ID NO: 5234 - DNA, 358 bp, Avena sativa
gagcatttctgatgtcaacattcaatggttgatgtcaacatccagttctcaccagtggctgatgttaatctgcaagagtacttgacaaaggagtatatccatactggtaaggatctttggagattcccactttcccctgaaagatcatcaaagttatatttacagtgtagttggagtagacattctactgtcattgtacctatagagcatgattttgtaccacaataacactagcacttgaccattattttcagaaagagggaactgttgttcaatagtaaagatcttatttaacttaaccattcatttcagtaccaaaatttatatttacattgtagaactgtttcctttgtatatc

SEQ ID NO: 5235 - DNA, 600 bp, Avena sativa
tagatcgccgggacgagcaggggccatgaagctcggtgttttcttccccatgttcatgcagctgttcgctgcaaaaatggagccgtaacgtcagacaatagactgagaactccaggggatttaggaactacagtatcaaggatgcacaatgcaaagaggaagtgttaacccaacatacatttgtatctccgtgctgtcgcagggaaatcagtaattagcccattcactcccatgccccgaacatatgcattggtcacgatgagttgaaagaaaacatagtaagtagatttgggaagtctgtacaatttgcgtttcacgatagagattgaattcatatttacagcgctaactagatatatccctctaatcaagaaagaagattggaagtttgttctgggatattcaaaggttgtagtaaggtgaatgcatttagatggattaccttgtccatatgatttcataagagtaatacactttctgaccatgtgtctgtaattccatcttgttactgtgtgtgaatcatacacacagtcatgtttctgtaagcagaaaatgaaaggtggacagtgcaataaagaacataccattcctgtatttgct

SEQ ID NO: 5236 - DNA, 341 bp, Avena sativa
accaggaactgtgagaaacgtgcagggggatcaaatgccgacaccggctgctctctggatcacatgcacgcagactgtactaaaatactttaaatatgttcaattcagattacaaaattatgagtagactagatgttcttgtgactccattctatggtccctgcactccagcaggcagtgttaactaacgccgaaaacttgcatcacaagcgttgcttaacacgcttcccattgataacccagctgggggtctacgtgctgttagaaagttgatagaaatcggttccactaattagtactaggctagtggctatatgcagtgaggacggcaccattttttt

SEQ ID NO: 5237 - DNA, 538 bp, Avena sativa
aactaaatgttaccttatttggacaggacagcccagatatgataagaagcgtcttttcattgtttatccaaaaaacacaattcagtatttggcaaacagagcttcagtgtttacttaagagactgttaatgttcatttttggaaaaacaaaaggtccagatactcatgtattgaacaaaaaaatctctagatactcatgtggtgaaacacatgtattcaccaccagtaggtgtccacagaaaaccatatcttatcaaactgaataattttgcattatttctccagaaacgtaccgcctctttcccaattcatttcctcggatttctggaagtacaagcgtagcacccagatacctcgcaatgactacagcatcagcaatctgcaaacaaagggtagtagaaaatcagaagctggttttttgttcagtcaactatacattccataagggcaggttgaagttacgggcatacctgtgatatatggtattcaggaccgatagtcaacgacaatgtaacaaaaccgttagactgatcatcct

SEQ ID NO: 5238 - DNA, 476 bp, Avena sativa
taggagaatcccctttaaaaattagcgtatgctgctatttgcggcgcgcacacggtattctttagtaaaaggcgaaagaatagttcgctttgtgctcaccgcgcagctgcgtgctttctcaaggtcgctctggtgctccttatatacacgtccctcggctggcagcgctcctaagcgagcgaggtggtactaaactctgctgcatgctctgcccgcccgcgcggctgtggcttagctagcacaaatgggccagtaccgtgatagctcccaccaaccaaagattatatgggctaggcctggagagattagcagaacatctctctgcgacagtacagtatcattttcatgggcatctttttttttctaaaatgaaactgcttatttctctctttaaccttgcttaagaaactaatttggaaggacattattttagttaaataattttctggaaatgcatagttcatggcaaaggtgtt

SEQ ID NO: 5239 - DNA, 359 bp, Avena sativa
agtgcagatatagtgcagttatccaggagtacgatttgtaagatactaagatgtcactgtctgaaattttggctgtattcaacaaaatggggggccttgagcttgaacgcctcttacagattgatagaatctactagcatttttttcatactcacggacttttttgtgctacacccggtttgcgcactgattgaagaggctctgcacataaatttctattttggcaaaaaaataccacttgcatatctatctgaatttagtctgtatctattgatcatggcccatttattggtttataccactaaactcatccagatatccttactgacagcttacatcttcatcgtattatatgcctg

SEQ ID NO: 5240 - DNA, 434 bp, Avena sativa
aactgattgcagtgcagaaatcgcaatctgagagcgtaggatacacagttagtggagagtagcaaactcagcttctaaatgactatgaacaaaaagggaaaacataaaacaaatcgccagaaattatcagcttcagtaatataagcacaccctagttcagagccttttgtttgcctaatggaaaatttacctgaacagtttcgtcatatgtgaactgcgggctatccttcattttcttctccagaaaatttattgcttcctgctccttaagtccggcactagttgcctgaaaaatgttgtcagtagtttgttgggacagagaagagaaagaataaactaagcacttggtcagtacagaattagttacttagtaataatggtataaggtggtgcagaattttactgtatatataccttatgtccaaagaagtgac

SEQ ID NO: 5241 - DNA, 561 bp, Avena sativa
ccagtgcaggtgcacatatatacacgctgacacgcataggcaggactcaaggacctagtcggagacggagcacgccttgtatcctactcggacgcatgaacgggtacatgcacggactggttacggactgacatggagagaaggattattagatttccaccaatcagaaacttccgcgtccatacatttggaaggatgaaactgttaaacatattctgtgtatctagttgtaaccgagttggagtttatctcctaaccagactcctctccctcctctccttgtaacgatattctgttgtggtatattaacacgcaaccgagccgaggccaaggtatcgttaatcccagaaacttaatatggtatcagagctgctcttccaacttagctgctgaaactcgccgccgccgccgtcgcaagccctcttgccaccgccgccgccgccaagatccaatacaccaaacaaaccgtcgttgtcgcagccttccctgccgactccgtcgtcaaagccaaaaatcggcgcctgggtgttcccggacaccgccgccctcccgcgcggcgcc

SEQ ID NO: 5242 - DNA, 390 bp, Avena sativa
ccccagggtaccgcatgccttgacatgatgctttgcagagagggctgcatgtgcattagttcctctacacccatcacagtcaaggtgctaataattccatcattagctgcgatggcacttgatttagaatggattaatttgaatatctctctctctctctctctcactcacatacataaacgcacacacatggatggccagcatttgggcagaattagtggtactgtgtggggaactggggatggacagtgtgttgtgattttgaatatagcccctccacagggcagccacacaaagtgctgctctgagagaatggaccagcagtgtgaccacacaaacatgccctagttgctcttttttaacgaactagttgcacattctcttctctct

SEQ ID NO: 5243 - DNA, 398 bp, Avena sativa
cagtggtggttttcaaacttgataattccagcggagaagcatcctcaaagtagtcaatctgttgaggagagggatagttgcaacacaatgctgtagatgtagacattttggtcttgatccgtggattccgagagatggaattaggcttctgatgacatcccgcgtgggcattgtgtgtacacaagagttgcagagcaaattgacccgattatggcacagtgtgatgcatagctcattcgggataacttgatggttgtagatgttgagttgatattgcgaacacctatcagagaagatgctgaggattttgtagcatcgtatcctgattcctgatcccaaaggtggtttctctgttaaatcagcctataaggtatgcatgaaacctgaatcctcggtag

SEQ ID NO: 5244 - DNA, 565 bp, Avena sativa
ttaccagtatttataacgtgtggattgctgaatgtgaaacaaaatttcttcactcaagagtacacagcttatctgagccaaagtcaaagtagataaactcatcatccaacaagccatccaaacgataactttgcagcagaggcaagcatgcagttgatctagaatgttgaataattaggcatggtatcattactgttttattgaactttgacccactaactatccacttatccagtgagacacaagcaaccatttgcagctacaaagttcttatagtatagacaatcatgtttggcgtgatcagaaaccatggtcaatatctatttaaaaccttgatatgttcagcagtttttcccagctctctattagcaagtaaccagagaaaattattttgacaccagaacatttagaaaaagttttgaagtttacacattcatgcataacaaacaaaatccaaaaagcagtcattccaagacattatggcaaggtaccaaattagaaatcttaggttacctcgtacacaaacgtattaacagcttcattttctggtacagcatctcttccc

SEQ ID NO: 5245 - DNA, 426 bp, Avena sativa
ccagtgcagatctctaacgtccagtccaccaaacttggtcgtggtgttgtgcatggactttgccatcatttgagcaagcataaaattgctgtgaatagaccgtcccttgatgaaggcatattgattctcgcagacaatgctgtgaaccaccagagcaagccgtatagacaaagactttgggagacgtttgaaaatactgtggattaactaattggcctgacatcgcgcgcacctccaacatgtatgtcttctttggcaacaatgtcaaaagcgccctgttcagcctgtgaaaacagaggaatggctgctgtgaagccactgaaaaagcgccatatgtctaccttcattactaaccagcaagatcttgaaagaacatcctggaaaatctatctggaccaagtgacgtgtccgccgccagggctctga

SEQ ID NO: 5246 - DNA, 390 bp, Avena sativa
tgtgattacctgtgattttgtgacttaactatgagagtcatactagcaattgctgtacgaaatgcttatgtgagacagtttcacctgtttgttgcttcttgttctttcttcatttttgtacatatattcattgcattattatgtgaacttcagtttgctactaaccaacatgtatataacagtctgattttgaacatgtatttagacgttgttactctttcttcgggaggtagtatattgagggcgtggaatcttcctgatggacagatgatctgggaaaccaatatgcagacttccacagaatcaaaatcgttgctgcatgttttggtttgtattggaaaataacatatgtggataataaaatatatttgttttctcaagtagtattct

SEQ ID NO: 5247 - DNA, 390 bp, Avena sativa
acatatagactgagattaaacacggtcagaagtgacatatatttaacaagcacacacatgtataagaaaaaagaaggtattacaagccacgatctagctcttacagatcaactaaataactattaaactaacagtttcagcacggtacagatcaccacatcggacatcactagttcgtaggaaaattatttaggaaataaagagagagaggtttgattggattcaacccaggtgcaacttcaggttggtgaagaggaggacgtcgtcgctagagtcggtggagagcagcagcttgagggagacagtggacagagcagcaggcagcaggtggcgttgcaggaaggggagcttcaagtcgccgtcgttgctggttcgttggtgaagagaaga

SEQ ID NO: 5248 - DNA, 164 bp, Avena sativa
agattgttcatttaacttaaggtgatgatgtactatgtgaatcccctttgttgtccgttgtaacctgacagccggatgcattagttggacacataatttttgcataaaatgccgtagaaatcaaagcattttccattcataaaccgaaaagttaaatgaacaat

SEQ ID NO: 5249 - DNA, 545 bp, Avena sativa
ctgcatggtgacctcaatggaccttgtagtatctgatttgcaatgtttttttcactgtcaagagactgttccacatcattttgaactgaaccacagagcaacagatggttctgtacttctgtttacctaagaaaaaccctttttgcagtcatcccatgttccatatgtcatctaccatcgtggtcctaagagaagaggccaggaatgtctcaatgattgaatgaagaggaagaagaagaagcagctgggcagttaacttgggcaattattagctggtcaagcttgtctgtggacttgggacttgagagacagatggtccatggccagcctcttccatgtggaaatcaggcagtctatctagtctccgagctggtaccgcatgagcattatttactcgtttttttccttaacacgcaccaaaatgcgctgtctttggtggatcatgccaattttcccctcgtctttttttctgagctcatgttttggggatatgagatctatccaataggtggcctagtttgggatgtgggaacctttctcacagt

SEQ ID NO: 5250 - DNA, 387 bp, Avena sativa
gtgcagctatttatctgtccagagatgtcgcatgctagctatttgcagcaacatcgtcgcgtttcgtccatttccggggaaagacgtcgcacaggggctatcaaccccaagttaacagggggacttccagcaggaatttcaaacataaccagccttgaatggtcagatctttctaacaacctactcactgagccaatcccacaatccatgggcacgatgaaaaatctcgtgtggcttgatctctcttgcaattatattttaggcactatcccaatagaaataggcatgcttgggagtctgcaacgattgtttctccaaagaaacaagttctttggctccatacaaagcaacttaggtaatctcagtaggttagagaaaattgacttg

SEQ ID NO: 5251 - DNA, 513 bp, Avena sativa
  modified_base (180)..(180): a, c, t, g, unknown or other
cttgaggggattaacagatctcatacggcactgctcaggaagaaggagaatgtagtagctacagacccatctcgctccttaattgcactgtcaagtggattaccaaggttttggctgcacgtcttcaaactgttatcaaaacttctggttaacgaagatcagtccggctttgtcaaaacncggtgtattgcaggcaactttatgtatgcaatggatttggtacaaacttgcaggaagaggaaaaagaaagccatgattttaatgctggattttagtaaagcttttgacattgtttcctgagatgctcttttctctatcatgcgggctagaggttttgatgacagatggatcatgtggatggaagaactgcttaagtcggcaaaaactgctgtccttttgaatggtatcccgtggagttggattcaggttaagaaggtttacgacaaggggatccactgtcgctactgttgtttattgtggttgtggatgtcctgcagcaggccatcagaaaaa

SEQ ID NO: 5252 - DNA, 468 bp, Avena sativa
cagcgtgccaattgacatgccctaccccaaatccccctgtaaaaaaatacattcagttattacattgttgtatattgctatgcacttgacttgtgtagttctgaatcttaagctcagaattattccatgaactgcctgttaattgttacctttgcgaaataatttccaactataattaattccactcatctattcgtatgattggcaccagtccagttattagcgaaatgcaaaaatagtttggcaagtattggaaggagtcgtacttagcgaattgcataccaatcatcctagatccaaagtacaaatatgagtttgtcaaattttggatcaatcaagcatttggaaaggatgcaaaagaacaccttgacaaggtggcaacaattatcaagagtctatttgaagaatactccaaggaaatgggcgattctctttctgatccttcggaggaagttcatgttgatgaat

SEQ ID NO: 5253 - DNA, 306 bp, Avena sativa
tataaatgcaaattaagacatgaaaataatttggatgatgtacaattatttgatgatgcagacttttcgtgtcaccagcaggttccagagaaacacagttacaaaaacgtgctacaagtcttggacactccgaatgctgcacagtatgtgatgtccgcctctcacggttttcacccctctgatttgttccggtaaagcatcaaggcggccgctgttcctcactagaaatttcaaatggctcctcgtgcaggactttggacaatacaatatcaaacttggagtccgaactttcagccgcaaggaccc

SEQ ID NO: 5254 - DNA, 381 bp, Avena sativa
agtgcagatgtggcaggccgtgtgctggtggtggtggtggtggtggtggagccattgatgatttgattctccccggctccttttcagggtggagataactcacatgttgaccgacgcgatgatggcccggcagctccgtttgtttctgctttctactagggctttctcttcttggcttgggtcgtggcggcgatctcaaaatagatgagggttcttcggtctcagcttcaagctggatactgaaactattcttcggaccatctgtttatgagtagtacttccaagaaaatttcggtgatcggtgcaagcgatgctgccagcaagaagctgtcactctatctaagatgtgatcaaggaaagcgttcctgtacttcctgcact

SEQ ID NO: 5255 - DNA, 596 bp, Avena sativa
cataaccaaaattgaccataagttagttatttgaagagaaattgattgcacgaatggtacagaaagtcaaacggttaccaactcaatcacagcattcaagaaatcgtttgtgcgttgcctcttaggaggtttgtaaacaacaactctttctttccaatgaaatgaaacgcaaaggtcctttgcgttttacccggaaaaaaagaaacgctagaaagattgcatgaatggtacagaaggttacaaagatagccattgaatcgcattctaattctgagcatctatagaaagtggcaacaaagggatgacaggtgcaggcaagtggaaatacagaaacatgccccaagtacttacaatctcagttgacgccctttggaagatgctactgcttctgggtctgaaaattagtgacggcaaatcagatcaaaataccgcggtatatagtctccttttaggaaacactgaatgaataaaataattgtttaccagtctggagagccgtatgcacaaacagaggcccaaggaagctaccaccaattccaaccgagacaacatttgtcaatggtttcccagtagcgccaatctgcactagatccatc

SEQ ID NO: 5256 - DNA, 269 bp, Avena sativa
taccattcaccaaatcagaaagttcaatgaagtatgaaggagatggtggatttagactgatggaaaatgctggaaatgctatgggcagcacagaaatttataatcctgatggtgaagttgtgatgtgtaattaccaaggatgtaacaagcgaacccagggaaatacagtgtactgcaaagtccacagcggtgcttcaaaggcatgtatggttgaaggttgtaccaagggtgcacatggaggcactccactgtgcattggccatggagga

SEQ ID NO: 5257 - DNA, 594 bp, Avena sativa
tgaaatgaaaatcttattcagctttgaaacctcataggcatcaaattcctcctgcacatcttgaatcaattctttcagattttttgggcatctacagtctgttagatactgtaaagaactaaaaaaaccaaggtcaagggcgttcatatcaggggattttgctggctgctgcagtattctgattttcatgcctgtagcagccacagcttcagtaaagtccaaatcagtaggaagaatgtgagtcctagcattatctggttggatatatattgtttctttagcagcatattgtggccacatttctttgatcgcaggaacaactttctcaatgagatattctctcataactgtcctattcacaataatagttttggtttctagtgttcccatctctctgttctcacttcttctaacagcagttgtttctatgacgaagggccacacaccaagttttcctgaaaatgtgcaatcaccatgtgtgttataccttggtctagccacagctaccaaaacatcaccttgccaatacaattcttgttctgaactgttctgtgtggctcttcttcctcaggtagcagatagtaggttgggctg

SEQ ID NO: 5258 - DNA, 367 bp, Avena sativa
agctatttcgtagcgtccagtcaggttagctcagcatttaactcacgttctaatgtttatacacacacggtccaacattcaacagagatgccacttcacctcaaagactagactagtgagaggaaggaatatcacctttataagttgtgtgtggcctcctcaagtgagcgaatcgttcatgcagtggccctaacatcccatcccctgagaagccccttagaggcatggcggtgttggctctgataccagatgttagcgtccactcgggctaagtcagcattcaacccatgttttgaaagtttatgcgcacacggcccaacattcagtggagagtccactccatcccaaaaaatctggactggtgaga

SEQ ID NO: 5259 - DNA, 532 bp, Avena sativa
ccagtgcagccactggtgatgacattatgtgcatctgattgccctcctatggtgaaacaaagagcatccctttgtcctccagtttctggaagagttcaccttttgctgcccttggtggtgtaagttattgcgtgtgattgtgtgctcgttgtctccttcattgcttcttcagtgcaagaacattctgctgaggcttactatatactccctctgttccacaatataagcctttttagaaaactaaaacagcttgctagaaaggcttatattgtggaacagaggtagtatttgttactggggcactctgcaagcagaaagaaaaatgagaacttacaggggagggcagtccattcggagatacatactgtttagataaaaagctcttctatatccttcctctaagtagatctgagctacggtattgaggattggtgcgttgcgggattacagtattggaatttcactggaatttctcagcgaaaaggggtgagttgacttggacagtgaaggtgattggctgccctctcgcctc

SEQ ID NO: 5260 - DNA, 414 bp, Avena sativa
gatggtccagtgcagctccagctactgccccaccggcaaccatcccgcctacaccatggccgcctccgtacatagcagcgtgacctgaataaaatagtttgggacaagaattagtgaagtattgcaccatgagtccatgaccatctttttctttgattgttttagtcgccatcatcattgcacaaatgcagtagaataaatctaaatacccgttcattttctttactgtgaaaaaattactattaaatttggacatatatgttttgaagcagcggataaaggatcaacaaattatgaaaatatagtgcaaatacaatataacaaaagcttaaataccatagggaggaactggcattggtggcccatgaccgggataaccagctggagggtacgttgtagggtgttgcgaatacc

SEQ ID NO: 5261 - DNA, 508 bp, Avena sativa
agcgaacggcaacacaagacgcaatcgcagaacgtgcgcacaagattggggcaaagatgggtattggtcctgcactcctgcgacctgtgtgcaggttagctcggtgtggttttcttgttggaaagaacttgttgaggcgaaaaagattccaccctttcatcaagcttcgcactgcaaaatcggcgcataattgatgccatcatatggatccaatgtaaacacactcatggcgaatctattggtgtaatgattttgcttaagcctccgcatgccaggttcaggcgctaatttaggccttctttgattcctaagaaccaaaaacgcaggaataggaataggaaccggataggaatgcatgtggaaacctgagtgtataagaatgttttctttcatggtcctttgagatgtaggaaaggaaaagtagaggattcaccatgctgtggtaagcaacttgattaacgtgaataacaagcaaagcaacattattaggtggtgttgaatggccagg

SEQ ID NO: 5262 - DNA, 364 bp, Avena sativa
tctgcgtggcgaaaagggtagccttgttgcttctgccttttctcccaggaaatggatactgtattaccgatgacgctcgcgggtttcagtcgttcgtgcgaatgcctcccagttgggctactcatctatcttctctctttaccaaccaaaatcagggcccgtataagtgggattttcatcattcggactgctccagctttgtctctccttaatgcccttgcgtttctgcacataactcggcgggcagtttttctgtcgttgtttccttttctgttgtctgttgaggaaagtgtctggttctgtgtggttggtggatggtgtgctactacctcgtgtcgcttctcaaggccattgttgcctgacc

SEQ ID NO: 5263 - DNA, 521 bp, Avena sativa
aaacatcctcgggcttccttcaacagctagtggcacaaagcgcataagcagttttgcagagttaagcttcacacgtacccgatgaaacacacctgtacgcatctgaataggggtcaaatcagtagatatcagttctcccactctgcttgccaattgatcaagaacctccttcttgcaaaatagtggtggtaatttgtggatttgaacccatgcttggacacctctccgtatgactgcaccgttgttgccccatcaaaaggttcaaccatcagagcacattccctaaagagccaagtgccctccagcatcatacggttccagtccactagacattgggcttgtagtacgaatagattttcttccacagcagtgaacgagatttcccttgctggattccacgctgcatgcattgagctctttagcgactgcatactgaaggatttggacgtaagtacctttgcagccgctaaccacttaacttcaggccacctcctgatctcttccttccctagcaccacgtc

SEQ ID NO: 5264 - DNA, 423 bp, Avena sativa
gagtggcaaactgaaactagttagtcgtgtttagagatctcaattcttgtagtgtcatgttgaggacttaatttatctgttattgtgccttgttctggttagggtcatcagtctgatgtgtataaatgacagtcgtacctgaatagcagtggctaccaaaaagttgaaaatgctaaaattaccacaaccagccctcaaaatccatgctgttttgccaccacgacctgagcggcgaatcaatgcctgctggcggggctgcggtgagcctattaaaggcggtcatgggtgatgacacagcccacagtttatcttgagtttgatctttgttcttgggttggctcttcaagttgaagcagggtctcaaatttggagtattggtactgaatgaactactgagtgtgtcagctacgctgtttctccatg

SEQ ID NO: 5265 - DNA, 569 bp, Avena sativa
ctctcgtcaccgctggagcagatttatttagagagaaggaaacacacacataagagtttctatccattgaattgatttagttataggcatctgggttggcgatgaggtaggcctcggcgcctttaaagatgttggtgatggagtccttggcctttgtggtttcatccttcccctccacactgggcagcagcttgtatgtagattcgaccttcaccacgcagccaccattggctgttggctccaccttgatgtgcgacgtggccgtctcaatcgcggtgccgatgccgccaccctctatgagggtcgacttgcactcgcacttctctacatcgaggaactcaagcttctccttcatgacgctgaagggcatggctgaggtgaagttgaactgcctgacgctgccgacgccaatgccgcctgctccctcgacagggtgggcgctggcgacgatgtggggagcaaccttgggggccaggttgtgccagtccatgacaccggcacggaacaggcgcggcgcggccatgggtgactcgatctcgagggtccagctgttggtggaggcatcccgg

SEQ ID NO: 5266 - DNA, 1006 bp, Avena sativa
cgagtccctcgtcgtcgccgacgtcgccgcgctcaaggacggcacgggctccctcaccgtcttcaccaacgagaagggcggcgccatcgacgactccgtcgtcacaaaggtcaccgacaagcacatctacctcgtcgtcaacgccgggtgcagggacaaggacctcgcgcacatcggggcgcacatggaggccttccagaagaagggcggcgacgtcaagtggcacatacacgacgagcgctcactgctcgccttgcagggtcctcttgctgcaccaactctccagtacctaacaaaggaagatttgagcaaaatgtacttcagtgacttcaagataattgaaatcaatggctctacttgcttcctcaccagaactggctatacaggcgaagatggctttgaaatctctgttccatcagagaatgccgttgatcttgcaaaggccctcctggagaaatctgaaggcaaggtgaggttgactggcctaggtgcccgtgacagtctccgtctggaggctgggctttgcctgtatggcaacgacatggagcaacacgtcacaccagtcgaggccggcctctcatgggcgatcggcaagaggaggaaagctgagggtggcttcttgggtgcagacgtgatcctcaagcagctcaaggaaggaccaaagatcagacgtgtaggcatcttctcacaaggaccacccccgcgaagccacagcgagatcgtgagcagcaccggggagaacatcggcgaggtgaccagcggcgggttcagcccgtgcctgaagaagaacatcgccatggggtacgtgaagaacggcctgcacaaggccgggacggagttcaaggtggtcgtccgtggcaagtcctacgacgccgtcgtcaccaagatgcccttcgtgcccaccaagtactacaagggcccatagatttgtacagaaaaggatggttcttcaacaacaattttctcttgcaaactccctcctgggcagcttgttcatggcaggctg

SEQ ID NO: 5267 - DNA, 747 bp, Avena sativa
ggacctccggctcgcggcgtcgcggatttggtggggagggggaggagcgacgggggattcagggagaagcttcgagaagctcttcggcggaacacaggctccacttcgccttccccacgaactccggcgagtcggtcccccagcccccgagcacccacccgccccgaccaccgccatgtcgagacgcggcgactgggtctacgagaacaacggcgggacctgcgtggccatcgccggtgcggactactgcgtggtggccgccgacacccgcctctccgtcggatacaacatcctcacccgtgaccactccaagatctgcgagctggcagagaaatgtgtaatagcatcttccggcttccaaggtgatatcaaagctctgcagaagaacttatctgccaaagagctgctatatcagcaccagcacaacaaaagaatgagctgccctgcaatggcacaattgctctcgaataccctgtactacaagcgattcttcccatactatgctttcaacgtgcttggtggtcttgacagtgaagggaaaggatgtgtttactcctatgatgctgttggttcctatgagaggactggttacagtgctcagggaacaggatctactctgatcatgccagtgctggacaaccagctgaaatcacccagtccgctattagtccctgcaagagatgctgtcaccctttgtctgagtcagaggctgttgacctagttaaggatgtgtttgcatctgcaact

SEQ ID NO: 5268 - DNA, 649 bp, Avena sativa
gcaatggagaagccacatgatgctggcaaaagctcgtgcgattggtgtgagtaactttgcatcgaagaaactgggtgacttgcttgctgttgctcgcgtacctccagctgttaaccaggtggagtgccatcctggttggcaacaaactaaactccatagcttctgccaatcaactggtgttcacctttctgcatactcgccactaggttcacctggttcaacatggatgaacggtaatgtaccttaaagaacctgtcgtcatctcaatacgcagagaagcttggcaaaactcctgcgcaaagtagcgctgcgctggaacattcagatgggtcacagtgtacttccaaagagcgtgagtgaagaacgtataaagcagaaccttgatgtttatggctggtcaattccagatgacttgtttgcgaagttctctgagattaagcagactaggctgctcatgggcaacttcatcgtgaacaaagacagcgtgtacaagacccacgaggagctctgggacggggaaatttaggactgctcgaggtgttgattctgcccagagagcaggccaccttagtaccagtcacttgttatgtattgccaacgatgtgcttaataagcgtatggctcagatacttcccttgtgaattaaaaa

SEQ ID NO: 5269 - DNA, 982 bp, Avena sativa
cccgggatgcgagtacaaggtcaaggacctctcccaggccgacttcggccgcctcgagctggacctggccgaggtcgagatgccgggcctcatggcctgccgcgccgagttcggcccctcgcagcccttcaagggcgcccggatctcgggatccctccacatgaccatccagaccgccgtcctcatcgagaccctcacggccctcggcgccgaggtccgctggtgctcctgcaacatcttctccacgcaggaccacgccgccgccgccatcgcgcgcgactccgccgccgtcttcgcctggaagggcgagaccctcgaggagtactggtggtgcaccgagcgatgcctcgactggggcgagggcggcgggcccgacctcatcgtcgacgacggcggcgacgccaccctgctcatccacgagggcgtcaaggccgaggaggagttcgagaagtccggcaaggtccccgaccccgagtccaccgacaaccccgagttcaagatcgtcctcaccatcatcagggacggcctcaagaccgacgtcaggaggtaccgcaagatgaaggagaggctcgtcggcgtctccgaggagaccaccaccggcgtcaagaggctctaccagatgcaggagtccggcgctctcctcttccccgccatcaacgtcaacgactccgtcaccaagagcaagtttgacaacctttacgggtgccgtcactccctccccgatggtctcatgagggccactgatgtcatgatcgccggcaaggtcgccgtggtctgcggttacggtgatgtcggcaagggctgtgctgctgcactcaagcaggctggtgcccgcgtcatcgtgacagagatcgaccccatctgcgccctgcaggccctgatggagggcatccagatcctcacccttgaggacgtcgtctctgatgccgacatcttcgtgaccaccacaggaaacaaggacatcatcatggtcgaccacatg

SEQ ID NO: 5270 - DNA, 855 bp, Avena sativa
gttgcccgtggtggtgtgattgatgaagatgctctagtcagggctcttgatgcaggaatagttgcacaggctgctcttgatgtcttcaccaaggagcctccagcagcagacagcaagttggtgctgcatgagaatgttactgtgacaccacatcttggtgccagcacagtagaagcacaggaaggagtggctattgaaatagctgaagctgtcactggagctctgaaaggggagcttgcagcttctgcggtcaatgcaccaatggttcctgctgaggtgctatcggagcttgcaccttttgttgtgcttgctgagaagcttgggcgcctggctgtccaactagttgctggcggtggtggtatcaagtcagtgaaagtgacctatgcatctgcaagggctcctgatgatcttgacacaagacttctccgtgcaatgatcaccaagggtgtgatcgagccaatctctgacgtttttgtcaatctggtcaatgctgacttcactgcaaagcagaggggcattcgcatcagcgaggagagaatcttgatggacggctcacctgagacacctctggattacattcaggtgcagattgccaatgtggaatctaaattccccagtgccatatccgagaccggagagatcacagtagaggggaaggtgaaggacggtgtgcctcacctaacaaaggtgggagcattcgaggtagatgtgagcatggaaggcagcctgatcctctgcaggcaggttgaccaacctggcatgattggggcagttggaagcgtcttgggcgaggagaatgtcaatgtcagcttcatgagcgtcgggaggatcgctcctcgcaagcgcgctgtcatg

SEQ ID NO: 5271 - DNA, 579 bp, Avena sativa
ttggtgaaatctaccctgatcctgtaagagttgtatcaattggtcgcaaagtgggagatctgcttgcaaatcctgaaagcaaagaatggttatccatatcaactgagctgtgtggaggtacgcacatttcaaacactagagatgctgcagcatttgccctcatatctgaggagggtatcgcaaaaggtgttcgaaggataacagctgttactgctgattgtgcctcccaggctatgaagttagcatcatcaatagatactgatatcaatgaaacatctaaattggatggagtcttgttggaaaagaaaattggttccatcaagagtacgctggatgcagctgctatcccagctgcaagaaaagctgatctaagaggcaaggtctcaaagttggaggatcaactgaggaaggccaagaagaaaatgggcgaagaaaacatccaaaaggctgtgaagaccgcgttagatgctgcagaagctgcgctctcggaaggaaaacctttctgtgttactcatatcgatgtgggtcttgatgccactgctgtccgagaagctgctgtgaaagccattgtaaccgttt

SEQ ID NO: 5272 - DNA, 699 bp, Avena sativa
agctgcgacaaggtggacgacgactgcgacgtcatgcactttgcttacatcgtccgcagcggtgaaaacacgtcggagatcgcctccaggcacggggtaccggagtctatgctactgaggatcaataatatcacaaacaacactagcctgcgccaaggccagattcttgatatcccgcttcaaggaatgggcacatggtctagggtacattatgtctcaagatataggacaagaagtttagcgggaggcaatttgttgcctgaagttgtagggccggtactcaaatcgactcggcaacaagctgcaagatctccacaacaagccggtgttttggaagaaataattggtgcttggagaggtgcttggagagattctgtttactttagattcttcgttttagtattggctgcaattatcatttcggtgctctgcaagacatggtattactggagaagtgcactcaaatccctctcctcggggacgacgaatggcgttatgcaattcgattacagagatttggctcatgccacagacaggttctccaacaatagcaagattggagagggtaaatatggcgcagtatataaggcgaccttcaacggccaggaattggctgtgaagaaaatgattggagagggagagaccaaggacatccatgatgagctccagacagttggtaacacaaggcacacaggggat

SEQ ID NO: 5273 - DNA, 846 bp, Avena sativa
ttattaccacagtaaacagggatccaaacaataattttctccagacatccactagcgcccaactcaaaaataatcaacgcaagatcatgtcacgatactaagaggctctatatatgaagagctcaaacataattacacaatcttagggtgtccttcgactgcatataactaaagaataatacgctaacatcatcccaaactcccaaacaaccatccaccagcacaatcgccacgccactcgatataaccatgcctatggtatatccacaataagatctcacccgtgcacaacacaaccagcaaatttccccctgggcagttcaatgggaaatactgcatcaacctggtggagataagttctactgctgcttgcactctgttggctgctctccttgtgcaccaccctttgcagctcccttaggtttgccagccttcttcgtgggtttgcttagttcttcttcatcgtcgtcatcctcatcctcatcttcttcctcatcatcatcctcgtcatcatcatcctcatcctcgtcatcctcatcaccttccatatcctcaaaatcttcggcttgcacagcctcaccagtaaaccaggaaacagcatgagggatgatcttgtcccttatggtagatccaatatcataatcatgctccatttgaccctgaagctcatcagcagcatcttcatcaatctcctcctcatcttcaggtacttgtggggggttaaaaagttgagaagctatcgcattgttcagttttagtaataggcttcgcattctttgacctttcttgggtttcttttcagaatcttctgtgtcacgtttttcccaggataccactcaatttcag

SEQ ID NO: 5274 - DNA, 909 bp, Avena sativa
agaagattcaagcagtcctcaagaggtatgacatcttattaatagcagatgaggtcattactgcatttggaagattgggaaccatgtttggatgtgataagtataacattcaaccagatcttgtctccatagcaaaggctctttcttctgcctatatgccaattgcagctattctcgttagcccagaaatagcggatgtaattcattcggagagcaataaacttggttcttttgctcatggctttacatattcggggcatccagtttcttgtgctgttgccatagaagctctgaagatttataatgaaagaaatattaccaaacatgtcaacgaaattgctccaaggttccaggaaggaatcaaggctttctcaggaagtccgatcatcggagagacacgtggactgggattgatacttggaactgaattcgttgacaacaagtcgccaaacgatccgttccctgcagaatggggagttggttcaatatttggtggcgagtgcgagaagcgcgggatgcttatcagggtcgctggggatagcatcatgctgtcacccccgctgataatgactcctggtgaagttgacgaaattgtgagcaaatatggtgatgccctgaaggccacggaggaaagaattgcagagctcaaatccaacaagaagtaaacattgttgatttgctgtcagcccgtagcaatggttggtgatgctgagaacaatgttcaatgtacagagtaacttgaagtgttcaacggttattagatgccaaaataacgagctcgctgaaaacctgaaccttgtccattttccttttctagggaagcctgaaccttgttcatggtatgcagaaaagcagttggttatttgaatggcagaagtgatcatttgaatgggaaaacgtcaacttgag

SEQ ID NO: 5275 - DNA, 535 bp, Avena sativa
gatcaagcgccgccgccttcctgcacccaccagcgccccagccgccgccgccgccgccgccggagaagaggagggagcagccgcagccatgggtcgtgtccgcaccaagaccgtgaagaagacctccaggcaggtgatcgagaagtactactcccgcatgaccctcgacttccacaccaacaagaaggttctcgaggaagtctccatcctccagtccaagcggctccggaacaaggtggctggcttcaccacccacctgatgcgccgtatccagcgcggccccgtccgcggcatatcgctcaagttgcaggaggaggagcgcgagcgccgtatggacttcgtgccggagaagtccgcgctcgaggtcgacgagatccgcgtcgacaaggagaccatggagatgctcgccttcctcggcatgggcgacctccccggcgtcgaccgtgcccctgaggtcacctcctccgcccccgcctaccgccagcccttcacggcctcgcggcggcaccgctcctaggttcctggtcacatcgtc

SEQ ID NO: 5276 - DNA, 892 bp, Avena sativa
ccagtttgatcttgtctttgagaaggactttgagctctcgcacacctccaagtcttccagcgttttcttctctgggtacaagattttccagcctgctgacggagatgagatggattttgatgatgaagacgaatctgaagatgaagaggaggaagaggaagagaagatcgctccagccaccaaggaaaatggcaaagctgaagctaaggacaaggagccaaagcaagttaagatcgctggggctgccgctgctgctgctgcaaaaccaaagcccataattagcaaaaaggatgctgacagcgatgaggatgagagtgatgatgacagcgatgatgactctgagggccaattggttcctatggacgactctgatgaatccagcgacggtgatgacagctctgaatctgatgatgagagtgatgacgaggaggacgaggaaacgcccaagaagccagagtctggaaagaagagagcagcagggagcgtgttgaagacgcctgcttctgataacaagaaggcaaagatcgcaacaccgtctggccagaagacaggtgacaagaagggggctgtccatgtagccactcctcatccggctaagaaggctggcaagacccctgccaccaacgagaagtcacccaagtctggtgggtccgtctcctgcaagtcttgctccaagaccttcaacagcgagaacgctcttcaagcccactcgaacgccaagcacaaggcctcgaccaagtgagaagaaagtgatgatcgctgccgtgtgatgcaatgttaaggctatatcttgttttgcccccctgagaaagaaagctgtgttgagcgtacgtgaacatgttcagtagtgagacatgaatggaaacgaacaaagctgatgttatgatgctat

SEQ ID NO: 5277 - DNA, 891 bp, Avena sativa
ggtcaaaatgtgcgtactgggatttccagtgacagaatcaaaagcttgtcaaagatctttgcaactaagcctagtgatatggaatccataccataaaataatattcaaaagataattgtctcgtggactgcaccccgttaaaccagagtgactagtaccgtctaatctttttattaactgtaaaacgaattctctcatcctgacaagatcatggcagcgtttccttttaagaggaggtggcttccttcaggtacgcgatgagatcagcacggtcctgcggcttcttcagtccagggaagaccatcttggttccaggaatgtacttcttaggattaagcaggtagtcatacagagtgttctcctcccggccacaagcaaggtcctaacttgcatggtctgtttgggaggcagtcgggtaccactgctggttactcctactccgccgcgaacaagaacaaggctgtggactgggaggagaacactctgtatgactacttgcttaatcctaagaagtacattcctggaaccaagatggtcttccctggactgaagaagcctcaggaccgtgctgatctcatcgcatacctgaaggaagccacatcctcttaaaaaggaaatgctgctatgatcttgtggggatgagagaattcgttttacagttaataaaaagattagacgttactactcactctggtttaacggggtgcagtccacgagacaattatcttttgaatatcatttttatggtatgggttccatatcactaggtttagttgcaaaaaatctccgacaagcttttgattcagttgctggaaaatcccagtacgcacattttgaccaccaggtggtggtcggtctggaatgcacccatgttgatgaactttgagatct

SEQ ID NO: 5278 - DNA, 824 bp, Avena sativa
acatatacagtcggcgggttctcagtgggagtttgtcgtggttaacaagcatctcctccatgatttgactgagatgggtatttggacacctgctctgaaaaacaagataatctatgaagacggttctgttcaaaagatggcagaaatccctgatgatctgaaagcaatttacaagactgtttgggagataaagcagaaaactttggttgacatggctgttgatcgtggatgctacattgatcagagccagagccttaatgtccacatggaccaaccaaactttgcaaagctaacctcattgcatttccatgcttggtcaaagggtctgaaaactgggatgtactatttaagaacacgggcagcagccgatgctatcaagtttacagtggataccggttttctgaaggtgaatggggacactgctgccaaaccggcagaggaagatgatgaggccaaaatggctcaagtcgtctgttcgttgaacaaccgggaagagtgcctggcctgtggaagctagatgcatccaccacaccacacacatctagtttttccaagatagcagagcattacacaacccagccggctggtcatttggacttcaataatgtgagaaacgagttgtttgatgtagggtttggttatgattcagttggtattttactgtgcagcccttgatcactgagatgccaactttggcctgtattgtatttgtacgattgaatacctgggctgctgcagctgtatatatgtgtactatggtttgtgttaattgatttgtgctgttatttggtctttcaccacgcataagctatagaattgaccag

SEQ ID NO: 5279 - DNA, 804 bp, Avena sativa
acgatacctgaacaactacttgaagaggtcgtgttttgtcgatgcttctgaggcagatgaatttcagaagttgcattgaaaccttaagatcctaccttatgactcccccgggcatgacctttgtggccttcgaaaagccagaaggtgtcttggccaccgggaagttctcaaatatattgaaattcattgttaaagaggttgattcgtccacaggtgaagctgaggacgatggtgttgaggacgagtatcagctagaagattttgaaattatttctgctgattacatgttgaaggtgggggtttcgaacttccgaaatgcttgggaaagcatggatccggagagtgagcgggtcgatgagtatgggcttggtgttagggagagcttagccgaggccgtgagtgctgttataagcattctcggcatgcagccttgtgagggtactgatgttgtccaaaacaattcgaggtcgcacgcttgcctgctatcaggtgtgtttattggtaatgtgaaagttctagcgagactttcatttggaattagcgggccaaaagaagtagccatgaagctagcagtcagatcagatgatccagaggtcagtgacaggatccatgaaattgttgcaaatggctgaaagtacaagcaagagttttttggttgaccttttttgttgttttggctttcaatctgctgaaagcaagggagttcgattaattatagtagtatatgtatgtaagtttgttttctcgttgtatcactgttgttgcagcaccattcttgttcaacgcagtaaaacawtttgattg

SEQ ID NO: 5280 - DNA, 860 bp, Avena sativa
agctatcaccaattcatgtacacaaacacaagtaaactacaggcgacttaactaaagaacacagttcagtcattttagtccattcagtatatactagaataatgttgaagatggtgcaagacaaggcagcaaatgttgccacagacaactgattatttgagctaccacagacaaatgctaaaataagtagcaatgttgtcaaattcaattatttgagctaccaccaattcaaatacttgacaaaagaacacagttcagtcattttaattcatttagaatacaagtttaaggagaccagaaatcatggtgggaccaaaggaataaagtaaaagatgccttgatgtagttgtcactatccaaagtaaagcggtgatacattcctgcaggcaaaacaatcatgcccccctttttcactgctacacggatccactgttcgttttcatccctcaaatcaaagtatccactgccctcaaggcaatagcgtatctcttcgtcagtatgcaggtgctcttcaaagaaattctttatcttgacctcatagtttggcaacttctcgggacacacatcgcaaatgtccacataagagtatcccctggcctcacggattttcttgagattctcatctttctcccagtcatcagcattcaggcgccagcttactacacccaactccgaaagcttgttgagagaaatgaactctttgggctcacggtgatgaggaagcctctggtcctcttcactgtcatccatgtaccatgcttggatgacctcctccttgccatcctggaactcgttctccatgtccgcggcctcgcgcgctgctgctcgctgtcttcctcctcgctccggaacgagccctc

SEQ ID NO: 5281 - DNA, 789 bp, Avena sativa
ttattagttctcatgttaacattaaaaaaaaattagggggcaaagcactgaatacaaatatgaacaacttgaaggattattacgaagaccaataaattgaacaggactctctttagctgtttacttcagaagcatcttagggctcaaaatacaacaaaacaatataacagtgaaaccacagccgaagctcaagtaactgttgatctcaggaaatacacattacatacggggaatagcatcccatcccaacccaatccctaggtatccggtgaatgatccatccaaagctcctagctccaaaatcttgacgaaaatttaggacttgctagcaatgttgctggacagccagtccaggccttcgtacaatccttcacctgttgtagcacaagtgctctggatgtaccagtgtcgctggcgaagagagtgcagtccaagcttatcggtaatctcagcagcattcatagcatttggaagatcttgcttgttagcaaacacaagcaacacagcatcacgtaactcatcctcattcagcatcctgtggagctcatccctggcttcaacaacacggtccctatcgttgctgtccacaacaaagatgagaccctgcgtgttctggaagtaatgcctccacaatggcctgatcttgtcctgacctccgacatcccagactgtgaagctgatgttcttgtactccacagtttcaacattgaatccgatggtggggatggtggtgacgatctcgccgagcttgagcttgtagaggattgtggtctttccggcggcgtcgag

SEQ ID NO: 5282 - DNA, 1019 bp, Avena sativa
ctgcacgatgcggttccagggattcagagtcatgctgcactctggtgttctaaatctacatttgatcccagtcaatagcgccgtggctttcaaaactatacccaggttgccgtagacggttgcgtcccagtttgctcattgtggaaaggccttcgatgactttgtaaagtgacgaccaccacctgtcaggtggaacctcatactgggtgagtgattcctcgatttcggtgttgtgcttcccttcaagaacactctgcagggtgattaccgcctccttcgttttcctcaggatattgtttccctcggcggcctccagtgagagaaggtcactgtgtgatgacgcgaggctagcagcaagcgcaaactgggcagcagcagcccatcggttagacgcaacccatttcttctgaatatcctgcaacttactttcttccctccgcatcctctcctcaccatccccaagtacgagactcttgagatattctgcattgctaggccctgtactctgaaccatcttagagaaagcaccttcctcattgctcagaagatgctcaggagtgtcaaattcctcaatctgcccagaactcagaataagcaacctgtcacagtcaatgacggtgttcagacgatgagcgattattagcattgtacaactcttgaattcttctctgattgtcttctgtataagagcatcagttcgaacatcaactgctgctgttgcctcatccagaacaagtatctttgcccttcgtagcaatgcacgagctaaactcagcagctgtcgctgtccaacgctaaaattttcaccagcctcagaaacctcagcatctagtcctagagcattcctccttatgacatcctttagatgagccctttcaagagcctcccataaatctgcatcgttatgctcaccaaaaggatccagattaaatcgaatagaacctgaaaacaagactggtgcctgtggtattattcctaaaactttccgcaggtcccaaattccaamttagaagtgtcac

SEQ ID NO: 5283 - DNA, 971 bp, Avena sativa
gggatggagctcccacatctacgggctcttctctgacacggttgtcgcggtcgaggtcgtccttgctgacggtcgggttgtcagggccaccaaggacaacgagtactctgacctcttctatggtgtcccatggtcccagggaacactcgggttcctcgtttcagctgagatcaagctcatccctgtcaaggagtacatgaagctcacgtacacccctgtgaagggatctctcaaggacattgcgcagggttacgccgatgctgtcgcgccgagagacggcgaggtccctgacttcattgaagggatggtgtacaccgagacggagggcgtgatgatgacaggcgtgtacgcctccaaggaggaggcaaagaagaagggcaacaagatcaacagcgtcgggtggtggttcaagccgtggttctaccagcacgcgcagacagcgcttgacaagggcgagttcgtggagtacatccccacgaggcagtactaccatcgccacaccaggtgcctctactgggagggcaagctcatcctgcccttcggcgaccagttctggttcaggtacctctttggctggctgatgccgcccaaggtgtccctgctcaaggctactcagggcgaggccatcaggaactactaccatgacaaccatgtcatccaggacatgctcgtgcccctgtacaaggttggagacgctctcgagtttgttcaccgggaaatggaggtgtacccactgtggctgtgccctcaccgtctgtacaagctgcccgtgaagactatggtgtacccggagcccggcttcgagctccaccagaggcagggcgacacgagctacgctcagatgttcacggacgtgggtgtgtactacacccccgccttcatcttccgcggcgaggagttcgacggcgcggaggcggtgcgcaggctggagcagtggctgatcgagaaccacagctaccagccccagtacg

SEQ ID NO: 5284 - DNA, 541 bp, Avena sativa
ccgggatccttcaccaatcaccagtccaccaccgctccacgaggaattccagtcgttcgaggtcgaagccatgtccggacgcggcaagggaggcaaggggctgggcaagggcggcgccaagcgccacaggaaggtgctccgcgacaacatccagggcatcaccaagccggccatccggcgcctcgctcgccgtggcggcgtgaagcgcatctccggcctcatctacgaggagaccagggggcgtcctcaagatcttcctcgagaacgtcatccgcgacgccgtcacctacaccgagcacgcccgccgcaagaccgtcaccgccatggacgtcgtctatgcgctcaagcgccagggccgcaccctctacggcttcggcggctagattctggtgtcctcgtcttcgtcgccgacgcctgcagcagattccgatgtttaaagttctctgttcccttggtagatcgaactgtaacgtgaaatcgtttggaacaaagctgtgcgtgcccgaatttcagatcattgacttgtattctctgcaaaaaa

SEQ ID NO: 5285 - DNA, 716 bp, Avena sativa
caccgtccagcgaaatcccaccggccgccaacaccaccccgcctctctctctcccgtcgaagcagccgccgcacccatggcccccaaggcggagaagaagccggcggcgaagaagcccgtggaggaggatcccgcggcagagaaggccgagaaggcccctgccggcaagaagcccaaggccgagaagcggctgccggcgtccaagacggcgtccaaggaaggcggcgagaagaagggcaagaagaaggcgaagaagagcgtcgagacctacaagatctacatcttcaaggtgctgaagcaggtgcaccccgacatcggcatctcctccaaggccatgtccatcatgaactccttcatcaacgacatcttcgagaagctcgccggcgagtcggcgaagctggcgcggtacaacaagaagcccaccatcacctcccgggagatccagacctcggtgcgcctcgtcctccccggcgagctcgccaagcacgccgtgtccgagggcaccaaggccgtcaccaagttcacctcttcttagtctgttcccgatctcgtctggttcgctgtcaggttgaggttttcagtcgtaggctgtagttagctgttcgtgttcgttctgaaattggccatactgtaagaattgtccttgttgtgggaacatcgctgctatttcgatctgagattgtaatgttgctgtatcactctgaatcatgcctgtc

SEQ ID NO: 5286 - DNA, 1016 bp, Avena sativa
tcaatgagaagtacaatgagtttgtcatgtcagaggacattgaaggattgatgactaagcttcaggaggttgaggattggctgtatgaagatggcgaggatgagaccaagggtgtctatgtcgcaaagttagaagaacttaaaaaggcatgccttcctcactgcgctatatgttctatagttctatagtttgcttttcttctagttctagtttagtcttaactttgtcgttctgcaggtcggcggtcctattgaagcgcgctacagagagtggaccgaaagaggtccggctcttgagcaactgatgtactgcatccgtagttttagagaggctgcattgtctaatgatcaaaagtttgatcacatagacatatcagagaaacagaaggttattaatgagtgctcagacgcagaggcctggctatttgagaaaaagcagcagcaagatgctctaccgaagcatgctaatcctgtcctccttgtttctgacataaagaaaaaggctgaagcggttgacaggttctgcaaaccgattatgaccaagccaaagccagcaccaaagcctcagaccccaccaccagcggagaccccagcacctgaggctcaaactccggaaccagaatcaagtggagccagtgagcctggcgaggcggccagcgaaggagctgatcaggaggaggctactgcggagcaaatggacacggacaaagccgatccttcccaagcatgaggactgtagatcagaggagattttatgtcaatgatcggttgcattctcctgtgcttttggtctgctagggcaacaaactaggaggaacggttgttttacatacgttgtgagggatatgtaatggaacatggagagttctgcggtgtttctagctgtattggtcagtaagaacagccttttcttttcgactggtgaattggacgaagcatgcaggataagggcacccttccaggttttggtgacccgttgtctctgtgtaattttattgagatggtccataacgttgt

SEQ ID NO: 5287 - DNA, 1052 bp, Avena sativa
aggtgtaccggagcaacatggagttcatcgaggcagcgaaccgggacagccggatgagctaccgcctcggcgagaccccgttcaccgacctcacccacgacgagttcatggccatgtacagcagcagcagcaacccgtcgacgtcggagacgacgatggttatcacgactcgcgctggccccgtccacgagggcaccaccgttgacgtcgatgagccgccgccgccgcgccgtgccaacctgaaggcggtggtgcctccggcgagcgtcgattggagaaccaaaggcgtcgttacgccacccaagtttcaaggggcatcctgtgcgtcctgctgggcgttcacgacggtggcgacgatggagagcgcgcacgcaatcagcaccggcggaccgccgccggtgttgtcggagcagcagctggtggactgcgacacactcaaccacggctgcagcagcggctggatggacaaggccttcaagtgggtgatcaagaagaacgatggcggcatcaccacggaggcggcgtacccctacacaggcaaaaagggcaagtgccagacgggcaagccggtcgccgtgacgctcagcgactacaagaaggttacgccggccggcaacgaggcggggctcatggaggccgtggccaagcagcccgtcgccgcatccttcgactacagcgacccctgcttcaagcactacatcggcggcgtgtacgacggcggctgctccatgtccggtgtctacaccaagggggcgtgccagacggcgcagaaccacgggctggccctcgtcggctacggaaccaagccggatgggaccaagtactggatcggcaagaactcgtggagcgacaagtggggcgacaacggcttcatctacctcctcagggactcgccgccattgggcctctgcggcattgcggcgctcccgttttacccaatcatctgatctcgcagcgccaggggccgtgcacctccatcatatttatacttattatatgtaataatgataaataattgcacggtacctctattaattcatcacttgtatact

SEQ ID NO: 5288 - DNA, 909 bp, Avena sativa
gtttgacaacctttatggttgccgccactccctccctgacggtctcatgagggccactgatgtcatgatcgccggcaaggtcgccgtggtctgcggttacggagatgttggcaagggctgtgccgccgcgctcaagcaggccggtgcccgtgtcatcgtgaccgagatcgaccccatctgtgccctgcaggccctgatggagggcatccagatcctcaccctggaggacgtcgtctctgatgccgacatcttcgtgaccaccacaggaaacaaggacatcatcatggtggaccacatgaggaagatgaagaacaacgccattgtctgcaacatcggtcactttgacaacgagatcgacatgaacggcctggagacctaccctggcgtcaagcgcatcaccatcaagccccagaccgaccgctgggtcttccccgagaccaagactggcatcattgtcctcgccgagggtcgcctgatgaaccttgggtgcgccactggccaccccagcttcgtcatgtcctgctccttcactaaccaggtcattgctcagcttgagttgtggaatgagaggaagtctggcaagtacgagaagaaggtgtacgtcctacccaagcacctggacgagaaggtcgcggcgctccacctgggcaagctcggtgccaagctgaccaagctcaccaagtcccagtccgagtacatcagcatccccgttgagggcccttacaagcctgccgcctaccggtactagagaggatggtgtatgtccagcacggctagcggctggttcgagaaaggagcagcaaagtgtctctgcggcatggatttgttgaaccactgtatcttctattttgcatcatcttgcatgaatgctgtgtctcttaggcggcggatgatttgatatgttttgag

SEQ ID NO: 5289 - DNA, 761 bp, Avena sativa
tggtccgtgaatgcggcgaggtgttcaaggggataggctcgctggtcgacgtcgccggcgggacaggtaccatggcgagggccattgccaaggccttcccacatgtcaagtgttgtgtgcttgacctcccacatgtgatccaggacatctctccggctccggctccggctctggccgacaataataatgtccagtttattgctggggacatgatggagttcattccaccagctgatgccattctactcaagtacgtgctgcataactggaccgaccaggattgtgtgaagatcctgacacgatgcagagaggccattatttcccagcatggaacagcagctgctgggaatgggaagaatgggaaggtcgtcatcatcgatgcagtggttggggctccctcccctggcgtagacgtactccaaactcagctcttgatggatatggagatgatgtcattattcatggccaaagaacgatatgagcatgagtggagcaagatattcatggaagcaggatttactaattacaaaattcagtctaccctaggtctcagatcggtaattgaactctacatataactacttgttgatccgatccattgatcgacctacatagtgagtagtaagaggccatatgcatcactcagatcagcactctatcctctttcctgttccactttgctttgtaataaacacatgatgatgtcttatgacacatgatgatgcattccgattgataattaataatagtcacggccgccc

SEQ ID NO: 5290 - DNA, 955 bp, Avena sativa
ggttcgtattagatggagaaatgccaccttatttacttgcgaaggatcttattttacaaattattggcgagatatctgtatctggtgcaacatacaaatcgatggagtttgttggatcaactatagatagtctaactatggaagagcgaatgacactatgcaacatggttattgaagctggtggaaagaatggtgttgtgcctgctgatgcaactacatttaagtaccttgagggtaagacgtctgtcgaatacgaacctgtttacagtgatgctcaggccagatttgtcagtgactaccggtttgatgtatccaaattggagccagtagttgcgaagccacactcgcctgataaccgtgctctagcaagagaatgcaaagatgtcaagattgaccgagtttatattggttcttgcactggtggtaagactgaggatttccttgctgctgcgaaggtgttcttagcttcaggcaagaaggttaaagttcccacttttctcgtccctgcaacacaaaaggtgtggatggatgtatatggcctcaccgtaccaggatcagacaaaacttgcgcccagatatttgaagaggctggttgtgatacaccagctagccctaactgtggtgcttgcttgggtggtcctcgtgatacatatgctcgcatgaatgaacctacggtctgcgtgtcgacgacgaacaggaacttccccggcaggatggggaacaaggaagggcagatctacctggcctcgccctacactgcggcggcatcagccttgacaggatatgtcgcggaccccagggacttcctggtgtagtgaagatgaaaccttggattggagctgctcactgagaaaccgtgcgttgcgaattgttctgtaccagtactctgtttttggtgttggaaagtgtagtttagatgctgagaataagttacttttcaagtagcagttgtaac

SEQ ID NO: 5291 - DNA, 898 bp, Avena sativa
cgccgtcgcgtcctaaaactccaggcctcctctcctcccttccttccccaaacacagcaggcgatcgcatcgcatagcccgagcgtcggaatcaatggcgatggttaccgcgaagctgagctgctccccggccaccgcctccctcggccggcggtccgcgcccgcccgccgcgccacggtcgtccgcgcctacggcggctcctacgccgacgagctcgtctccaccgcgaaaactgttgcttcccctgggcgtgggatcctagcgattgatgagtcgaatgcaacatgcggaaagagattagcatccattaatttggacaacacggaagttaaccgtcaggcttacaggcagcttttactcaccactgctggtcttggcgaatatatttccggtgctattatgtttgaggagactctttatcagtcaactacagatggcaagacatttgttgactgcttgaaggaccagaatatcatgcctggtatcaaggttgacaagggtttggttccgttgcctggatccaacaatgagtcctggtgccaaggtcttgatggtttggcttcaaggtgcgccgagtactacaagcagggggcgcgctttgctaagtggcggactgttgttagcatcccttgtggccctactgcattggctgtcaaggaagctgcatggggacttgctcgttatgctgccattgctcaggacaatggtctagtaccaatagtggagccagagatccttctcgatggtgaccatggcatcgagagaactcttgaggtggcagagaaagtgtggtctgaggtattcttctacctggctgagaacaatgttctgttcgagggtatcctgctgaagcccagcatggttacccctggagctgaacacaaggagaaggctact

SEQ ID NO: 5292 - DNA, 640 bp, Avena sativa
gtcctctgggaggcggaccaggacaaagaccgcgccgacggatacttccagcgcgccgtccaggccgcgcccgacgactgctatgtgctgggatcgtacgcgagcttcctgtgggacgccgaggaggacgacgacgaggaaatgagcacggcggtgaccagtggctccccggcgttggtcccggcttgctgaccctgaccgtcatcctggaaagatcgtcggtggcggtctgttgtactatactgtacgtatgaggagagccgggaggccggctggccagcgacctcctcgcatcctcggcggcggcgggagagacaaatcgactgtgcatacggcatgtcattgccggcaacaagtcgacggacgtgagcggatccggaccgcctgaggcaactactactactactctactgaagttctttgctgcaatcacttatcagcaactgcttaattaaccttttcatgtactaatcaatccatgttatagagcgagcttgttctccgtttaattactctactgctcgagctcggctgatgcttccctaatgtgtaattcatcgccataccgagatcgggctaatctttgccttgatcggtcttcttcacaaataaaactatatttgtttatgtaccaaaaaaa

SEQ ID NO: 5293 - DNA, 801 bp, Avena sativa
gcccggcgcttgtgcatggagtcacgcgagatacccatggtggcgtgggtggcttgtctccgctgctgcttcgccttctatgcccgcgccgccgcagacaaaaagaagcacaaagaagcctcccaaacgccccaaccacgacgatggccatgtcctcccctacgccctcctcctcgtcgccgttgccgcgatcgccgccgcgccgctcgcctacggggcggcctgcgaaggcgaggcctcactgaagggcgtggcgaacgacgtcctctcggagtacggcctgcccaagggcctcctcccggactccgtcacctcctacaccttcgtcaacgccacgggcgacttcaagatcaagctcgccagcagctgctacgtctggttcggcgaccactacacctacttcgaccaggagatcagcggcaccatctcctacggcgccatctccaacctctccggcatccaggccaagaagctcttcatctgggtcaccatcaccagcatggtggcgcgccccgagaggggcatgatcgagttccacgccgggttcatcaccgaggacgtgcccatgtcgctgttcgagaaggtgcccgtctgcggcaacggcctcctcggcgagcagctccgcggtgccgccggggtgatccgggagcttgacctgcttcccgtcgccgaggtgtgagtcgcttgagatatcagttgctgttcaagtcttgctctggattattacacgtatcgttggctggccaacaaatttgcacctttcttgttggaagtatttwaattggaagtagagagatgata

SEQ ID NO: 5294 - DNA, 929 bp, Avena sativa
gccataaccacactgctgcccaagtcactcttcctcatcagcgccggcggcaatgaccttttcgttaccaccccctatcccgatcctgtttccgatcttctacgatcgcctcctcaatagttacacgaagcatgtgcaaaccctgtacgacctcggcgcccgccgcttcggtatcatcgacgtgccgcccatcggctgcgtgcccttgatacgctccctattcccgaccggcacttgcgtgggcctctacaacgagctcgccaggggcctcaacatcttgctggaggagaggatggcgaagatcgctgccgaccccgaacggcccgggatggcgtactccgtggggagctcctacaatctggtgaccaacttcacagcagacccggaggccgccgggttcaagaatgtgaccagcgcgtgctacggcctcggatggcttgaggtggagggctacaaccaggccaacgctgccgtctgcgacaaccgtgccgactatatgttctgggacattgtgcatggcacccaggccatcgctaagaagggcgctgccatcatcttctctgccccagtggaggagggattcgccaagcccatcaacttcgagcggctcgtttcttcaacacatggttttgatggagttagcagctcttaatttaagtacgacttcatcgaaaggtagtcaagtttgtcgtttattttcttcagtttatgacgagtctgttggcacgatggtttttactgaatatgtacgtgccatgttacctctgttttattttacaaataaactgaacctgacacgtgcgttgttcacgtggtggtgcgtctagtttcagaccgagtcctggtctcgatcatgggattcggtccaagtttgttacacttcctttctgttaaataaaagcgaaatggagttacgcgtcgcaacaaaa

SEQ ID NO: 5295 - DNA, 690 bp, Avena sativa
gtacgtcgacgaccacctgatgtgcgagatcggagggcccagcacctcaccgccgccgccatcctcggccacgacggcagcgtctgggcgcagtcccccgaatttccccagttcacgcctgcggagattgctgccatcattaaggactttgaagaacctggaactctcgcaccgactggccttttccttggaagcataaaatacatggtgatccaaggtgaacctacggttgtcatccgaggaaagaagggcactggtggcatctgtatcaagaagactggcatggccttgattctcggtatctacgacgagcccatgactccaggccagtgcaatatggtcgtggagaggcttggcgactacctgatcgagcagggtttctaagccctcatatgtctattttggtcaatctgggacttaagtttgctctactcgtctggttgagtaacctgtgggctttgcatctgcttggcgtaccgcatgatatatgcaagtgaataattagcttgggtttgttggtaatgtgtcgggaaaaagagaagatttacttggggttttatgtttggcatcgtgtcgtatcaaaactcagctgctctttcactctgagtaatgtacatttgcctggtcatggtaacttgtgggtttcccctgctttattgaagatgattgcatttttactaaaaaaaagaa

SEQ ID NO: 5296 - DNA, 863 bp, Avena sativa
gacgcgctccgacgatggcaagttgtggcgctgagaagctggtcgaagacgagcatccctctgaataaggcgcgccaggggttctttgagcgggtggagtcgggccttcccccgctcgatgtagtccctcatccctccgtggcggcgctctcatggggagagccaagagcggcggctgggatgaccactactcaccctccaaataaagcccatgctctgtacgccttcaacagctaccttttccggccacctcttctggctcgtggcagtagcttggatcgagatggtggtctgcaactcttgcagcagctgatgaaggatgtgctggctctttctggatttgctggtcggtgctactgcttcttcctcctggaagccatggtagcctggaaggggactgaagtgttgcagcgatgggctgacacagagaagcctaggaaatttgtgctacgcgatctggtgctcccaagcgacggtttgttttgccggagctatccttggccgaagtggccgcacccttcaacctccatggccgaggcctctttcggaacatgccgctggggctcggcgccgctttgctctcaagtggttcgtccccgggagcgatttggcgaccggtggcatgctttcctcgccgggaatgtgtcccctttgagcagtgtcacggatctcgacggcgacgccttgagatcaccggcgatgagcggagaagaccccttaggacttgattgctttttcatctcttttctagggttctttttgcaaatttcgagcccctctccatcagattttttagtgcagtggatgtctttgaggggcttgatgtaaattgtacccgcttggttaattaattgcagcttcta

SEQ ID NO: 5297 - DNA, 1010 bp, Avena sativa
ctgcctttcgttcttggagcctaacgtcggcggatgtggattcccgttggcgcgccgtcagtctgttcgctcttctcgctgtggctgttctgctggtcgtcggctttggtggtgagcagcacctgtctggccgctccacaaataatcaatccagggcaaatcccctctgcaaggtttgtgtcttcatctattctccaaccacagcccatggtggtcctctgtttggggatgtagatgatcgtgcagccttgccgttgtttgattttgtcccctttctctatctttcaataaatccctgtcctctgatgcttctcttgccggactttttctcgcaaattatttcaatccggcgagctggtttcaatcctcactcatggagtttgaagcggattggtttgaggtgttcgcatgttctctcggtcgaattcttggcgacgccgctagcttttcttggcgatgttttcctttgtatctttgcgctggggagaggccgatctacagctggtccttggccttcttgcgccttcctcttacctccagtttggaggcccgctttgcggtctcggggaggccttgttatttggtcaggtctatgttggtgcgttcatctctgttgggggagctctgtccgagtcagcgggtgcgttgcgctggcgatttggtttcttcaggatgtgttgcgctggcgattggttctctttgccttgcttctggactggttcaatctgctgagccgacgatatgttgtcgtcttcatggtgagcggaggttcagcggcgtctcctccctggtggcagccggacgggcttgccggcggcgagtctgcttctggtcagcggaggggacacgtggaggcaactggtgatgacgaggatgcaacccgaaggtgtttagacgacacgttgcgcttcgttcagcagcggcgtgtgtgcgtgttgttggacttcaatgtaattttcagtgttttkgggttgtacctgtaatggggacagtttgtcccgatcctgtaa

SEQ ID NO: 5298 - DNA, 733 bp, Avena sativa
acagaagcccctgccaagatgcttcaagccttgttggcaatgttgttggacagccagtcaagcccctcgtacaaaccctcaccagaggtagcacatgtgctctggatgtaccagtgccgctggcgaagggaatgaaggccaagcttatcggtgatctcagcagcattcatggcattaggaagatcttgtttgtttgcgaacaccagaagcacagcatcacgcagctcatcctcattgagcatccggtgaagctcatctctggcctcaacaacacgctctctgtcattgctgtccacaacaaaaatgaggccctgggtgttctggaagtagtgcctccacaggggcctgatcttgtcctgacctccgacatcccaaacggtgaagctaatgttcttgtactcgacagtttcaacattaaatccgatggtggggatggtggtgacgatctcgccgagcttgagcttgtagaggatggtggtcttaccggcggcatcgagaccgaccatgaggatcctcatctctttcttggcgaagaggcggctgaacagcttcgtgaacgtgagccccatctccactcctgcgcgagatcgcgacgcctcctgccctttgcttgacgcgcgcgcgctcggctcggtgatcccctcctctcttcctcgccctcctcgcgccgggcttcctcctcggttcgggatcgggtggcaggagagaaatggaggagagagaagatcccggg

SEQ ID NO: 5299 - DNA, 962 bp, Avena sativa
caacagaggatgtgttcctttcttttctcccacttgctcacattctggaccgcatgattgaagagtatttctttcacaaaggagcctcagttggctattaccatggagatttgaatgctttgagagatgatctcatggagttaaagccaactctgctggtcggggtgcccagagtgtatgaaaagatttacgaaggtattctaaaggccttagcagatctcagaccccttaggagagtgatttttaatgccttgtacaaccgcaaattaggaagcatgaaagcaggctacacccataaaactgcttcaccttttgcggacatgctggcttttcgcaaggtcaaggcaaggctcggtggtcgtctccgcctactaatctctggtggtgcaccattaagtactgaaattgaagagttcttgagagtgaccagttgtgcatactttatccaaggctatggtttaacggaaacgttgggacctagcacagttggttaccctgacgacatgtccctggttggaactgtcggtgtcgctgccacctacactgaactgcggttggaagaagtacctgagatgggttatgatccacttggtgttccttctcgtggtgaaatcctcatccgagggaacacaatcttcactgggtactacaaaaatcctgagctcacaaacgaggtcatagttgatggatggtttcatacaggagacattggagagatgaccccagatggaatcctgaaggtaattgaccgaaagaagaacatatttaagttgtcacaaggggagtatgtggcagttgagtatctggagaaagtatacgtcttccctcaaattattgaagatatctgggtgtatggggacagctacagatcaacattagttgcagtagttaatccacatgaagaaagcaccatgaagtgggcagcatcaaatggatacaaaggttcttttgatgaaatatgc

SEQ ID NO: 5300 - DNA, 892 bp, Avena sativa
gagtgattatggtcagaggaaacttgcatcttttctgctgatcaagacatgccgcacttactatctcaaatccacgacagtgccttcaagaagcggagacaagtacacaagaggagtatgcgatttaagtggtggtatgtcagagccggtaatcttcttctcattcgacctactcagcacctttctcacctcatcagcaagctcaatgatggaatcatcttcatggcttatattggacaatgccttctccattgagaacaggtagtccctattatttccggtagggccattggctgtagcaatttgccttgccatatcctccaatggagctgggccaagatagtatttgttgccaactggatcaggagtggatacgaaaactaatacacccgtcacagatggttccagagaatttccatcctcgtagaaatccacagagatcttctggtcatactcacattctcttttctccaagtaccgcattgcttcttgctctttttctagaccaccattgacacaataagcaattccccagcatatggcttcctcttcggattcaagcgtgcaagtcctagccggatcctttggtgtgcctctgtggtcaatgcaagcgagattgaacgttcgcttgtagccctttatgaatcccaggatcttttgatcgaaatcgaagcctgggttccagatgagggacccatacccgaagacccacagcaccatcttgatccctctttttgtgtttcctggaagaaacgccggagagaataggccgcgggtggtcggcggggcaggaggaggagtatgagtaggattggatttgactcctcttagccgccgcctctcccgaggctacagtcttctctcctcggcttgggtaggggatttcgattcg

SEQ ID NO: 5301 - DNA, 625 bp, Avena sativa
caacaggaacccctgttccaaatactaatccacttccaaatccttggaacaccaatgctggtgctgcgcaagcagcaacacggtcagttcctgctggcaataccaggaatgctgcaacaggtggcttaggtgggttgggttcagtagatttgagcagtctgcttggcggtcttggtgggaatgcaggaaccggtgctccaggtggtctaggagggccgggttcagcagatttgagcagtctgcttggtggtccacctgatgcttctcatttgagtcaaatgctgcaaaaccctgctattatgcagatgatgcagaacattatgtctgacccacagtcaatgaaccagatacttaacatgaacccaaatgcacgtaacttgatggaatcaaacactcagttaagggatatgttccaaaatccagaatttcttcgccagatgacatccccagaggcgttgcagcaattactctcattccagcagacactatcatcacagcttggtcaacatcaacctagccaggatagtaacctaggaggcaatggcacaggcaacgcgaggaaatgttggcctggacaccttgatgggcatgcttagcgggcttggtgctggaggtggcttaggtg

SEQ ID NO: 5302 - DNA, 728 bp, Avena sativa
cttataccatgatgaagtttgcttcctttgagacaattgtagaacttatctacaagcacgctgttcctgttccaaagtcggagtgcagcaagcctttccagttgggtatcagctttgctggtggctacattgccggtgttttctgtgccattgtttcccaccctgcagacaatctggtctctttcctcaacaatgccaagggtgctaccatgggtgacgccgtgaagcagattggtgttctgggccttttcaccagaggattgcccctacgtatcgtcatgattggtacactcaccggtgctcagtggggaatctatgatgcatttaaggtcatggttgggctcccaaccactggtggtgttgcacctgtaccagcggctgaggaagtgaaagccgttgcttgatgtcctctgctgagacgatgacgatgtatttgttggtgtcatattggtggatgggaccctgtatgaattacctgagtttagtaccccaaatgttttattcttgtagcagatgattttgtgtcatctttttgatgagtggaactcattaagcagggaaagtaggtctttttgtccccggaaagcttggtgcttgacaaaataagtattattaggacagcaaggctgttaagagggcatgttttgccatcatctcctgttctgaggaatactctacttacatactgttgtttatctcgagtttatgctgtcgaggtggtatatcaa

SEQ ID NO: 5303 - DNA, 772 bp, Avena sativa
gttgatttctttccatactgtgtccaaaggttattggggcgagtgtggacaacgtggagggtactttgaaatgacaaacattcctcccaagacggtcgatgagatatacaaggttgcttcgatcgcgctgagtccaaatgttcctgggcagatattcatggggcttatggtgaaccctcctaaacctggagatatctcgtacctgaagtttgctactgaaagcaagtctatccttgagtctttgaggaggagggcgcaaataatgaccgatggtttcaatagttgccgaaatgttgtctgcaatttcacagaaggagctatgtactcgtttccccagatacgcttaccacaaagagctatggatacagccaaaagcgctggcaaagaacccgatgttttctactgcctcaagcttctcgaagcgaccgggatatccactgttccaggatcagggtttggtcagaaagaaggagtgttccatcttcggacgaccatcctgccggcggaggaggacatgccggctatcatgtcaagcttcaagaagttcaacgactcattcatggagcagtaccaagattactccaagctgtgatgtgaagagaaacaacaacagtattcagtattaatatagcgctgctatttcctagcagcaacgaaagttggaaaaaaaatagactgcaagtctggtgaaggtgactctctgctgtgatttgctatgtatagggaagaaaatttccgcgggaattaatataatacttcgatcatactgtaa

SEQ ID NO: 5304 - DNA, 982 bp, Avena sativa
gttatcttgtgtgttcctggagaattcacgacaatggctggcaggcggctacgtgatgctgtaaaaaatgtactgataagtggcagcaatggtgaatttaatgacaatattcacgttgttattgcggggctgacaaacacatattctcagtatgttacaacgttcgaagaataccagatccaaagatatgagggagcatcgacgttgtatggtccccataccttgagtgcatacattcatgagtttgagaaacttgccacagcaatggttgcaaacaaagtggtccaaacaaacatccaacctcctgacatgctggacaagcaaatcgggctactaccaggtgtaatgtttgacacaactcctattggcgctcactttggagacgtcagctccgacgttcctgcaaactccaacttcaggaagggcagtatagtgaatgctacattctattcggcctgtccaaggaatgacctccttactgacggtacctttgcactcgttgagaagctaaatggtaaggattgggttcctgtctatgatgacgatgattggtcgttgcgattcaagtggtcaaggccttcaaaattcagttcaagaagttttgcgactctggagtggaccattcctgaggatgcttcctcgggtgtttacaggttgaggcattttggtgcatctaaggcgatattaggttcaatcaagcatttcaccggtgcctcgagcgcatttgctgtgcgttaggcaataaacaatgattctggcggtgtacctgccggaatgtagaaacacacacttcgcccgttaaggcacctaagtacatgatttcacacttgtatttactttgtgtatgagagttgtaaggatgtggattgtgcgaaaccggtgctgctatatatatacttaagttccgagggaaatatatagcctgtacattatactgtcgatattatccagtgttttgcgattgtagcaggagatttcaaaa

SEQ ID NO: 5305 - DNA, 878 bp, Avena sativa
gactgcaaatcccgaagtagataacgagagcattagggcatccgccataatgcctcaatctagggagagtgtggattgtgcgccatcgcacatcagaccattgaccaactattccctcttggatcagactctagataatggatcttctcctgcaagtaatgattcatgcaggactgaaataaccaataattcttcagtcggcaatggtgccattaccgacatcccaaatgggtgtcacaagagtgtcagttctggacagaatgaaacgcctggttctcacaactctggagagtttacccagtatttccaagagggctattgtaaaatatcagaactcgatgactgccgtgagttaactgaagctgttactgatgctgacagcagcagcagccactgcgcgagagagaagcccgaggaagatggggacaacgatgacatgcttggaggggttttcgccttcagtgaagaaggttgaacttactatactgggatagataatggaaaacagttgccacaacattcggtgtgcaatattatgtagaaaatggtggaattctagtaggcttccgtggaataaagtttgtgctgagaggacaatctaatgtttggtacatatttgaaaggtaaagcttgcgctccatttttatttgccggaagagattgagacgaagatccctccaggcaatttactaatccacggatccacgtcaaggaagggagtttggtggttgttgagaagttgctactgcctgccgcaacactgtgcccacccttttctgttgctttgtacatactgtaagacccatttgtttcgttgagatactttctgggacatttggatgatctcaaaccctgcgagccatatttgttgactgctt

SEQ ID NO: 5306 - DNA, 974 bp, Avena sativa
tggtcatggtggagctcgagcagctgaatatgtgaagaaacaccttttcagcaatttaatcaagcatcctaaattcgtgatagatacaaagtctgccattgctgaaacattcaaccatactgattcggagtttctgaaagctgatagtagccactccagagatgctggctcaactgcctcaacagctattcttgttggtggtcgcttggtggttgcaaatgttggtgattctagagctgttgtctctaaaggagggaaggcaattgcggtttcaagggatcacaaacctgaccagacagatgagagacagcgaattgaggaagctggaggctttgtgatgtgggctgggacgtggcgtgttggtggtgttcttgctgtttctcgagcatttggtgataaacttttaaagcagtatgttgtcgctgatccagagatcaaggaggaggtagttgatggctcactcgaattccttatcctcgctagcgatggactgtgggatgttgtcagtaacgatgaagctgttgccatggtcaagccaatagaggaccccgagcaagcagcgaagagactactccaagaagcttctcaaagagggagcgctgacaatatcaccgttgtcatcgtccgctttctggacggaacaacgacgaccgaaggcggaccgagtgaggaggtcgccaaggaccaatcatcatagttcttgttcttccatgctgtcatatctgcagttgtatctgatgctcgaagtagatgtcctgtggcgccaccctgccacgccgctaaggaaaactgacttggcttgaatttcattatcgttccatgttcccggctatcgtagatggtaatgtgggagcagggatggtggggttagtgtttaccatatgatccaaggggtacttttctttcttcttgatgaaacttgtaatgtgtagcttctgtgctggtgtttcatgcaggtgatttttagcagtaaa

SEQ ID NO: 5307 - DNA, 611 bp, Avena sativa
aacttccctgcaatctgcatccattctggcatgacccaggaagaaaggttgactcgatacaagaacttcaaggaagggcacaagaggatcctcgtggcgacggatctagttggcagagggattgatatcgagcgtgtcaacattgtgataaactatgacatgcctgactcagctgatacatacctgcacagggttggaagggctggtcgttttggtaccaaggggcttgcgataaccttcgtttcctctgcctcagactctgacgtcctaaaccaagtgcaagagaggttcgaggtggacataaaggagctgcctgagcagattgacacttcgacatacatgccgtcataaactcgtctggaggaagcaaggaaggaagaaggtgaagatggcacaccatgcatatgcatttgtttttgcctgcgtccctgcttagggtccagctgtgtaccatgcatttagtcttttatgcttgtaggccgaattgtcatcttaggatatgctgaatgtattatgtggcagaagatggatgttttttgcttagtacttgatgatttttgttgtgatattcggtcgactggaaataactagatttgttatacgtgacaaaa

SEQ ID NO: 5308 - DNA, 958 bp, Avena sativa
cccaaaatgctggagttgatgcgcctatacataacaattcacactgatcacgaaggtgggaatgtcagtgctcatgctggccatctggttggaagcgctctgtcagatccttatctttcttttgcagcggcactgaacggtttagctgggccactgcatggcctggctaatcaggaagtgttgctatggatcaaatctgtgatggaagaaaccgggagtaacattacaactgatcagcttaaagaatacgtatggaagacactgaagagtggaaaggttgttcctggctatggtcatggagttctacgtaatacagatccacgatactcgtgccaaagggagtttgcacttaagtatttacccgaggacccacttttccaactggtctccaagttgtacgaagttgtgcctcctatccttactgagttaggcaaggtaaaaaacccatggcctaacgttgatgctcacagcggagttttgctcaaccactttggattagttgaagcacggtactacactgtcttgttcggggtctcaaggagcatgggaattggatctcagctcatttgggaccgtgcccttggactgccacttgaaagaccaaagagtgtcaccatggagtggctggaaaaccactgcaagaaggctgcggcttgaagctacaccaatgcttcgttttacaaatcgggttgtttttatgttaataatggttgagcataaattaggcatgtttagcctcatttcaccttcttcgttttcctggccaataactggagtaagaggctctcagacagtagaattttgtaaccacctttacttgaatactaaatcagttaatctgccagcgggcataatgagattaggacatgacacataagcattgtgtctctcggtaatgttttgaagtttgtgttgcttgagtaaactatacccagttatgtgattggggaacctatca

SEQ ID NO: 5309 - DNA, 931 bp, Avena sativa
aacttcaggttgttttgatctctgcaactctgccccatgacatcttggagattactagcaagttcatgactgatccagtcaggatccttgtgaagcgtgatgagttgaccttagaggaatcaaacaattcttgttgctgttgagaaggaggaatggaagtttgataccctctgtgatctttatgatacactgaccattacccaagctgtcattttctgcaatactaagagaaaggtggattggcttactgaaagaatgcgtaccaacaacttcactgtatcagctatgcatggtgacatcgccccaaaaggaaagagatgccattatgagcgagttcaggggtggttcaacccgtgttctaataacaaccgatgtttgggcccgagggctggatgttcagcaggtctctcttgtcattaactatgatctcccgaataatcgtgagctgtacatccatcgcattggtcgctctgggcgttttgggcgcaagggtgtggcgatcaactttgtgcgcaaggacgacatccgtatcctgagagacattgagcagtactacagcacgcagattgatgagatgccgatgaacgttgccgacctgatctgagcttttgggggagagcagacgctgttgttgtgtgtttgatgatgatgatgttgtcggtcaactcaactcaactagaactgtttctctgcgtgtggtttggcttgaaagtgttttgggcgtgactgtattgctgtaacctcctaaggggagttgttttgtgtttgtttgggtgaagaagaggtgacatgaagtgtgtatatattcgtttccaggaccggctcttgtaaaacacacaatttgtcccgtttatgctttggacaactttgacaatttgttcatttcccattttgtagtctagtagaagatttagacattttgccaacgaaa

SEQ ID NO: 5310 - DNA, 904 bp, Avena sativa
tactgcagcaggtaagcaaagccctgtatgctgaatttttagcaacacaaaagaagaagaggccattcaagggattgggattagatcatttgaatggtccctgtcctattattcctgatagtttgacaagtggcatattaaggagctccaagttccagatggatttgttctgcttaagggagcgggatttactaaaacagttcgcggaagaggtatctcaatatctggcgcatggagaaagcagagagaaggctttgatgctgagctaccaaattggcgaagacttagcaagagcgtttactgagcgcacaattttgcaaatatttttggaggacgagatgaatgctcctgctggttctttaaaggatgtattgggcttactgaggtctatgtatgttatggtctgcatagatgaatctgcatcttttctgagatatggttatttgtcgcgggataatgtagccaccgcgaggaaagaagttatgacactgtgcagagaagtcaggccccatgcgcttgctatcgtgagttcttttggaatccctgatgccttcctcagcccactcgcttttgactggatcgaggcaaatgcgcggtcctccgagagcgaatgactatagtactcctgtcgtttacacagtttacaataagtccaagtgtacagtttgaggatactgatctgcacggacaatagagattttgatgtatgcatcagctcatgcattgtattctctagattacgcctgtaaaactgaataagctgatatagcccaccacgggggtcccacagcgaacattattttggcactgctgtatgctttaaatgtgttgttgacaggtacagaaagcattgagtcaaaacacaaatgggaatgaggttaggctgcacctcatgctgaatcca

SEQ ID NO: 5311 - DNA, 620 bp, Avena sativa
catgcattgttctatgtggtctttatgctgtcagcatgtgctctcttctcaaaaacatggattgaagtttctggttcatcggccaaggatgttgctaagcagctaaaggaacaacaaatggtgatgccaggccaccgtgagtcaaacttgcagaaggaattgaacagatacatccctactgctgctgcatttggtggagtatgcattggcgcattgactgttctggctgatttcatgggcgcaatcggttcaggaaccggtattctgctggctgttaccatcatctaccaatactttgagacatttgagaaagaaagagcaacggagcttggcttcttcggtttttgatagcgtcaggagcatgttatggctacagctctgtcttcccagtacttgcctggctagctgttgtggttgtaactggagatcttaaattctgtttaggttgcccgacttatttacagttgagaaatttgtagatgctgcgcttgtgttctcaggctagtatgatggtaggacctgtccaaggacggacatgccatcatcattcatcttctgtagcctttctcatgtcttttgactatatagcaactaaaatgttttgggatcaatttagtaca

SEQ ID NO: 5312 - DNA, 994 bp, Avena sativa
agatctggcttcggggagctacaaattagatctgcacggaacattgcactgtaccgagagagaattatttagaggtttattaaaatttcatgaaatgcggaaggtacatgcatggaaattcgagcaaactctattatttagcaacttcaatagcaacagggactagagtagtaataagtaggaattccaaaaagatctgcgagatctctctttgcgactaaatttcagtagggcgatcgaagtttgatttagtgatcatcattccttgagcagtccatccttgtccacaccgcagaaagacttcaatggatcactgaacttgcgcccttcctcggagtgccggaacttggtgtagtcgttgttgttgcagggattgtacagcagagggtgatcatcgtcgacgagttcagccatcgcgctgagatcgatgccgttcttcccttcgcagccgaagagcaccgagaggcgctcacggttactgggcgtcctgacacggtggatgcacggcggcacccttccgttagtgacgaccgtgaacacctcgccggccacgaaggtgaaggtgcccggatgaggcggcacggcgagccaggtcccgtccttggcctgcacctcgaggccttccacctcgtgctggatgatggtggtcatcacgctgtcgtcgcagtgccccttgagggacatgccggtctccgtgtctggcgggaccccgtagctcgacagccggaggccgtgggcgagcgtgtccaggtgcgcgtcgatgtgctcttcctggacgccgaggccctccaggatcatcttctgcaccgtctgcagcagttctagcatgttctccgaagccgacagaattgtgtcgcagaatgcggggtttccctgtggccacatgaggtcggcgtacccgcggacgcggccagcgtcggtagggtcgaggatgctcacgctctcccagttcatgccggggatgttggaggcgtagcctctatagggacctaag

SEQ ID NO: 5313 - DNA, 994 bp, Avena sativa
caaggacatcagcaaggacaaccgtgctcttggaaagctgaggagggaagctgagcgtgccaagagagccctcagcaaccagcaccaggtccgtgttgagatcgagtccctcttcgatgggactgatttctcggagccactgacccgtgccaggttcgaggagctgaacaacgacctgttccgcaagaccatgggaccagtgaagaaggccatggatgatgctggccttgagaagagccagatccatgagattgttcttgttggtggaagcaccaggattcccaaggtccagcagcttctcagggactacttcgacggcaaggagccaagcaagggtgtgaaccctgacgaggctgttgccttcggtgctgcggtccagggaagcatcttgagcggcgagggtggtgatgaaaccaaagatatcctcctcctggacgtggctcccctcaccctcggtatcgagactgttggaggagtcatgaccaagctgatccccaggaacactgtcatccccaccaagaagtcacaggttttcaccacctaccaggaccagcagaccaccgtctccatccaggtctttgagggtgagcgcagcatgaccaaggactgccgtcttctcggcaagttcgaccttaatggcattcctgcagctccaaggggcactcctcagattgaggtcactttcgaggtggatgccaacggtatcctgaatgtgaaggctgaggacaagggcacgggcaagtctgagaagatcaccatcaccaatgagaaggggcgtctgagccaggaggagattgaccggatggtcaaggaggcggaggagttcgctgaggaggacaagaaggtgaaggagcgcatcgacgcccggaaccagctcgagacctacgtgtacaacatgaagaacaccatcggcgacaaggacaagctggcggacaagcttgagagcgaggagaaggagaaggtggaggaggccctcaaggaggccctggagtgg

SEQ ID NO: 5314 - DNA, 639 bp, Avena sativa
attctgttaactacagcactgttaacaaacaaaagcagtaagtgtacaaaaagggagcttctgaaacaaggcaaacagctaacttcatctatagctagagtaccattaagaagctaggtaggtacatgggcggaaaaccccgtatcatgatgatgcgttttcgcacggaaaaaatggacgtccttcaaaaccatcacatttccagcaagtgaccttctgcgcacctagaccaacacaacagagctaaaaagagacaacacaactacagctcgtccttgtcgtactgctcgtactcgggctcctcggccgccttggcgccctccttctcttccacctcaggctcctccgcctcctcttcctcctccacggcagcatcagggctcaggtcaaggctcttctgcaccgaccggtagatgctggaggcgaagtccttggggtcaggaaggttgaacccactctccatcagagccgtctggtacaccagcctcgccgtctgcttcaggttatcgtcctcgctgtcctgagcgaccttgtcgcggagctccttgatgatggggtgcctggggttgatctcgaggacccgcttgccgcgcatgtacgcctgcttgctcgcgtccgacagggtctgcgcctgcatcc

SEQ ID NO: 5315 - DNA, 1112 bp, Avena sativa
caccttcgggacagggaatgacccggtgatgttggacaggttccaccggtggatgtcggcatacgggcgctcataccctagcccatccgagaaaatgcatcggttcgaggtgtaccgccgcaacgtggacctcatcgacgcctccaacagggacgccgagagactcggctatgagctcggcgagaacgagttcaccgatctcacgaacgaggagtttctcgcgcggtatgttgggggtggtgctggtgctagtggtggtatcatcactaccctggccggagatgtcgcggaggggatggtatcatcgtacgatggtaatatgacgaccgcttctgatcctcctcggcagttcgactggagggaacatggcgcggtcacacctgctaagcaacaagggacatgtggatgttgttgggctttcgctgcagcggcgacagtggagagtctgaacaaaataaaggggggagagctggttgacctgtcggtgcaggagctcgtagattgcatgtcggcggatccattccggtcaccatgcacaaccggttcccctgacaacgccctcgactggatcaaatccaaagagggactgctcaccgcgtccgaatacccgtatgttgccaagagaggaaagtgtgcgacatccgccgatgcccgccgcgtcggaaaaatcacgggcgtccgttccgtagaaatgctgagtgaggaggcattggcgctggccgtgctagagacgccggtggcggtgcggatcgacgcgagtgggcctgtcttccagaactacaagtccggggtgtacaaggggccatgcagcacaagccacaaccacgtggtgacactggttgggtatggggtcaccggcgccggagaagagtactggattttgaagaactcgtggggtcaggaatggggccagaagggcttctttttcatgcgtaggggagctgatgggcgcgaagggctctgtggcgtcgccatattcggtgtctacccagtcatggactagtgatttgggtataatctaatatatgtgggctatatatatgtacatggcgtactgtgtaatgtgtgtgattgaaataagctgcatgtatgcggtgcacgcacgagccggt

SEQ ID NO: 5316 - DNA, 810 bp, Avena sativa
aggatcctcacaggcttgttcatgaacttgcgggtaatctcaagggcctcagggggcatggtagcagagaagacaccaacttgaatctttcctgggagcagctggaagatgtcataaatctgatccttgaaaccacgggaaagcatctcatcagcttcatcaaggacaaacatcttgatgttgtcagggcgaagagactgcctacgaagcatgtcgaacacacgaccaggtgtgccaacaacaacatgcactccacttgcaagaattctctggtcctcacgaacagaggttcctccaacacatgcatgaactttcacacccaagtagtcaccgagtgcacgcatgaccttctcgatttgctgtgcaagctcacgggtgggagcaaggaccaaggcctggcactcaaccaaaccatagtcaagctgttgcaagattccagagcagaaggtagctgtctttcctgttccagattgtgcttgctgaataacatcaagccccttgcagaaaggaacaatacccctttgctggatggctgaaggcttctcaaaaccataagcataaattcccctcagaaggttctcttggagacccatgtcatcaaagctctcatgaacttcatcataggaggtgaagaagtcctcagtctcaccttggctcagcagctcctgcattttagagtcatagttcttagcatcaaactgggaaccttcaggtgccattcctgccatggctgaagcgttggggaggagcttgagcggatcgcctgggttgcgctgcgaggaatccgagatcgagtctcggtcccgggaa

SEQ ID NO: 5317 - DNA, 1053 bp, Avena sativa
atgttatccgttacttccccactcaggccttgaactttgcattcaaggattacttcaagagcttgttcaacttcaagaaggacagagatggttactggaagtggtttgctggcaaccttgcctctggtggtgctgctggtgcttcctctctgttttttgtgtactcccttgactatgctaggacaaggctggccaatgacgcgaaggcatctaagggtggaggtgagaggcagttcaatggccttgttgatgtctaccgcaagactctcaagacagatggtattgctgggctttaccgtggattcaacatctcctgtgttggaatcattgtctaccgtggtctgtactttggattgtatgattctctgaagccagttctcctcactggcactctccaggacaacttctttgccagctttgctcttggttggttgatcaccaacggtgcaggtcttgcatcttaccccattgacaccgtccgcagaaggatgatgatgacctctggagaagccgtcaagtacaagagctcattcgatgctttccagcagatcctgaagaaggagggtgctaagtccctcttcaagggtgctggtgccaacatcctccgtgccattgctggtgctggtgtgctttctggctatgaccagcttcagatcctcttcttcggcaagaagtacggctcaggcggtgcctagagtggaagaaatgatgacgaacaacaagagagttgcgttcccagtcctgccccttcaggatctggtaactttatctttttaacgttgaaaggcaataatttctgtagagggtggattttcccaacattcgtttttggtggaggcatcaaactccaaaggttgtcgtaggttggcggcagcagtacccagacatttgctatcgtagggcggagtttgagttcgagtatgtgccctgaactgtaatcgggcaattttccttccatacattgtcctctgaatcgaatgagttaagacaagtttaagctgtggtgttaactcctatatttctgtttgctttgttgtttgaatacaaaaaaaa

SEQ ID NO: 5318 - DNA, 826 bp, Avena sativa
gccttgtcagccttggcagcagaggcagcagcctggcctctgagacgaccagtcctcctggcagcaatgagaccaaccttctggccgggtggggcatcacggcggacggtggaggcatgaccaatgtgctggtggttacctcctccgtggggatgctccacagggttcatggccacaccacgcaccttgggccagcagttcctcttcacacggtacttgtggtaggcgtttccagccttaagcatgggcttctcagtccttccaccaccagcgacctgaccgatcatggcacggcagctgctgggcacaatcttcttggctcctgaggggagcttgatccttgatgtgccgttgtcagggttgtggctgatgacgatggcgtagtccccggaggccctggcgaagacgccacggtcgccgacgtggtgctccacgttacagatgacgcctccctcggggatggcgcgcaccgggaggacgttgccgacggagagcgtggcgcggcgtccgcagtagacgaattgtccggtgtacatgccctcggcggcgacgaagagctccttctggtgcttgtacctgaacgggtggcggaaggtcaccttggccaacggcgcgccacgccccgggtcgtggatgacgtcggtgacgacgcccttgaggtacccattgcgctcgccgaagtcgagcgaacggaagcgggcagggcccttgcggtggtgggtgtgagacttgaagacggagccggcacccttacgctgagcgcggatcacgcgacccatctcggcggcggcggcgaagtggcggcggcgggtgcagggrtcccggg

SEQ ID NO: 5319 - DNA, 973 bp, Avena sativa
aatgcatatctgcagcttcagaaagcaaaagaaagaacaggataagccagtaaagcaaacactgggatttggttcaacagccaagtgagggcaaacaaactttcaatttcgtccttgagatggaataacatgaaaggaactacataacaattcatagttcgaactacaatatgcccatatgatacagggcatcaagcaaaacaatgaaatacccccaccgattacgagccaaaccaagtccaaataacacatcacatggccatcaggccgacacatttttattgctcttctccgtcatcttcataccggcttcggaggacagaagcaaattagcagcagcccgcctcgccaaatcccaattcagagagcttgaggtgtgcctcagcatagtcagcaaagaaagcatcctcatccgcggcatatttgtccacaagggggcggaaggccgggtcagtcaggaggaccttgtcggttggcaactgaagaaggccttccttctcacccgtcagcagctccgtgaagtaagagttgtcgaagatcaaagggttggcagtccaggctccctcaaagccagatctgtccttgtggcatcttcccagggtgtgaccaccagaaagagcaacaatgtcctggtcgctcaaacccatctgagtggagaacacctgcctgaggtggtcagagcctagggtggcgtcaggaagacggccttccggaggaggctcaggcttgtcctctctccccgggtggaagggaacctcgggcccgccggtgacctcgacagcgacgactccagcgagctggtagaagtcggcgtaggagagggttgggacctgctccttgatgggctcgaggagcctgacggcgatgtcgaggccggcgttggcgccgtgcgcgagctccgcggggcacttcatggtgccgaagggccgccggtctggtggagacgtcgaggtaccgccgagtgccacgcgag

SEQ ID NO: 5320 - DNA, 1011 bp, Avena sativa
tgagatctatgatcagtatggtgaagatgctctcgaaggaaggaagtgggagggggaggaggtggagttgatccatttgacatattctcatcattctttgggccctcttttggaggtggtggtggtggcagcagcaggggcagaaggcaaaggaggggagaggatgttgttcatccactgaaagcttctctagaagatctttacaatggtacctcaaagaagctctctctttcccgtagtgtcctctgctccaagtgcaagggcaagggctccaagtctggtgcttccatgaggtgcccaggttgccagggttcaggcatgaaagttactatccgccagctggggccttccatgatacagcagatgcagcagccttgcaatgagtgcaggggcactggagagagtattaacgacaaggatcgctgcccaggctgcaagggtgagaaggttcttcaggagaagaaggttctggaggttcatgttgagaaggggatgcaacacaaccagaagatcaccttccctggagaagctgatgaagcgcctgatactgttactggagacattgtattcgtcgtccagcagaaggaacacccaaagttcaagcggaagggcgatgatctcttctatgagcacaccatatctctcactgaagctctctgtgggttccaacttgttctgacccatctggacaacaggcagctgctcattaagtcgaaccctggtgaagttgttaagcctgattcattcaaggcaatcagtgatgaggggatgcccatgtaccagaggcctttcatgaagggcaagctctacattcatttcaccgtagacttccccgactcgctggcacctgaccagtgcaaggctctcgaggccgtgcttccaccaaagcccgtgtccaagctgactgacatggagcttgatgaatgcgaggagacaacaatgcatgatgtcaacaacatcgaggaggagatgcgcaggaaagctgcccatgctgctcaggaggcgtacgac

SEQ ID NO: 5321 - DNA, 824 bp, Avena sativa
atctcagtataaatatgtgcacatggtctactttctattaaaatatgtatttttatgtgttctgaccccattctttaacgtgtcaaatcggattttttgtgaacatgcatgcatgatactagctatgacattctcactatggctagtctaataaacatattatgtgaaattaatggtgtttccatgtgtgcagtgatattctgcatgagtttttcgtgcaacaaagcagcctagtgaacaaacgcctccttccggcaatggcaaggctcctagggttcgatgatgactttttcggcgagaaactgcggggtcgggctctcaccttcgctagactaagccactacccgtcgtgtccgaggccagatcttgttcttggggtaaagtcgcatacagacgcgacgattgtcaccgttctcatggtcgacaacaacgtcagtggactgcaggttcaaaaagatgatgtctggtatgacgtcccttgtccgactgacccccacgcattgctcatcttcgtgggagacaataccgaggtgatcagcaacggggctttcaaggcctcggtgcaccgcgtcgtgacaaacgcacagaaggagaggacgtcggtggcaatgttctatgtgccaattccagaggaggtagcgccgacaaacgatcttgtaacgatagcatcctcgacggtgccagaagtaatacactactggtagtatcagcacgtgtcttgagctcaagggacaggaaatgtagacatggtgcggatataagtctgtcattgctttaaaccatatttcctactcctcgtcttcgtcaataaacagattgatgct

SEQ ID NO: 5322 - DNA, 1071 bp, Avena sativa
ggataatatttgaaagccttatttcgatccgaaatcatgacaatctcaccgacttctgtacataatataacccttatttctatcaattacacagtataccctttttatcctttcaggtgaaaaacgacaagcgtggggctatcaaactgaaacaggtgtctacgtctagagttccctctggcacatcacttcaaacatgcggtataatttaggtccaaaagaacgcgtatcttgcttacaagttcgtctttggcttagaagccgggctcacgcgcctggtcaaggtccgcatcgtcacaaactcttcggcggcagaagggtgaattccaacagtgctgtcaaaagtggctttggtagctccagccttgagtgcgacagcaaggccctgcataatttcagctgcatctggtccacacatggctgcaccaagtactttatcggtctcagcatcaaccaccagtttcatcacagacttctcctgtcgtttggatatgctgttcttcattggattgaaacttgatgtgtagacaagaatgtcattcttggcttcctccagagcctcttgttcgctgagacccacaacagatagtggcggaatgcagaacacagcacaaggtacatctttgtgatcaggcttaattggctggccaccaaacacagttttagaaaagcaagtagcctccatcagagcaacaggtgtaaggttaatccgatttgttacatcacccacagcccatatatttggaactgatgtacgggagtattcatcaaccttgatggctcctacttgatcaacctcaacaccaacagcttccaagttcagcctattggagtttggtgcacgacctgtagcaaatagaacaacatctgcaatgagctcatcccctttatctgtcaccactttgatgccatcggccgttttactcaactcagttaaatttgcccctggatgcaatctgattccccttccctcaaggttacttgcaacaattgttctcatctcatcatcaaaacctcttagaggaagctcctttctataaaacaagtctacttcagcacccaaatcccggg

SEQ ID NO: 5323 - DNA, 929 bp, Avena sativa
tcactctactcatgggattcaaactccacttacattcacgagcccccatacttcaaggacatgaccatgtccccgcctggcccacatgcagtgaaggatgcttactgcttactgaactttggggacagtattaccacagatcatatttcacctgcaggcagcatacacaaagatagccctgctgccaagtatttactcgagcgcggtgtggaccggaaggacttcaattcgtatggtagccgtcgtggtaatgacgaagtaatggcaagagggacattcgcgaacatcaggatcgtgaacaagtttttgaatggagaggttgggcccaagaccattcatgttcctacaggagagaagctttctgtttttgatgcggccacgaaatataagtctgaaggtcatgatactataattcttgctggcgctgaatatgggagtggcagctcacgtgattgggctgccaaggggccgatgcttctcggtgtgaaagcagtgatttccaagagctttgagcggatccacagaagcaacttggtgggaatgggaatcatcccgctctgcttcaaagctggggaagatgctgattcacttggccttactggacatgagcggttcaccattaacctgcctaccgaagtcagtgagatccgtcctggccaggatgtgacaatcacgaccgacaatggaaaatcttttagttgcacacttcgctttgacacagaggtggagttggcatactacaaccatggaggcatcctcccctatgtcatccgcaacatggcaggaggtcagaactaggcgaaagcacagacacccttttaatcatgacggcagcactgcagtctttccagcgccagcatcaacgtcaagagttaatttggaattccgtggcckcatcaaaaacataaagcttctctcctgtaggaaca

SEQ ID NO: 5324 - DNA, 912 bp, Avena sativa
gtgctgtctgtgttgttggtggcgaaaggtcattgattgcaaacttatctgcagcgaactgctacaaatctgaacatctaaagaaaccggagaactgggcactagttgagaaagcaaaatacatctacattgctggctttttccttacggtgtcccctgactctattcagcttgttgctgagcatgctgctgcaaataacaaggttttcttgatgaatctctctgctcccttcatctgtgagtttttccgtgatgcccaagagaaggttcttccgtatgtggactacatctttggaaacgaaactgaggcaaggatcttctctaaagtccgtgggtgggagactgagaatgttgaggagatcgctttgaagatctcacaactgcctctggctgagggaaaacaaaagaggattgctgtgatcactcaaggtgctgatccagtagttgtggctgaggatgggaaggtgaaaacattccctgtgatcctattgcccaaggagaagcttgttgacactaatggtgcaggtgatgcttttgttggaggcttcctatctcagttggttcaagggaagagcattgaggacagcgtaaagggaggttgctacggagcaaatgttatcatccaacgttctggctgcacttaccctgagaagcctgacttcaactagaacactgtccagcggtgttaccggaaagcaacacttaaccacttgatggttcggcttgttctccctgtactatgttgaggctttccatctgatccggcctatatttttggccgtgatatctgttacactcctatgtttggtactcttatcatttttataaggcatgattgccactatatggcgtgtttgggctctaaagcgtggctgatgtgactggatatatatggtcggagtgttgtgaaaa

SEQ ID NO: 5325 - DNA, 795 bp, Avena sativa
gctgctgtgaacagcagtgatagcagccacattgtccatgttcctccgggtgaacacgccctttctgatgttcttataagcactcctatctttaccggtgaagaaggtggaagtggttttgctgcttctgcagcagcagctgcagctaccggagctactggatatgattttggcgtggacccaaatgtagatccagagttggcacttgccctacggttgtctatggaagaagagcgagcaaggcaagaggccatcgcaaagaaggcggcagaagaatcttctggtgctgacaataaggaccatgcctcaagttcaaacactgattctgttatggctgatgcggagcctgcctcaaatgcttctgctgatgataagggagatcaactgaaggatgatgatgatgctcagctattacagcaggcactggcaatgtcaatggacgagggagcttcaggagctgcagctgtggctgatgccgctatggcggaagctgctgcagatgatcaggatttggcattggctcttcaaatgtctgtccaggatgcagagatgtctggtcaatctgatatgagcaaagtgttcgaagaccgatcatttgtgacatccatcctgaattcacttcctggtgttgaccccaatgatccatccgtgaaagatctgctggcatcattgcatggccaaggagagcaagaggagaagaaagacgacaagcaggacaagcctgaagatagraaaaactaaactcccttcatgcctttcatgtgcatgaagaaccgaaggttgcatggattagct

SEQ ID NO: 5326 - DNA, 1084 bp, Avena sativa
agagcaggagtaccgaagtgatatcttcggcgagcgaggtattttgcttggcgctgttcatggcattgtggaggctcttttcagaagatacacagaacaaggaatggatgaggacttggcatataagaacactgtagagtgcattactggaattgtctcaaaaactatttcaaagaagggaatgctggaagtttacaactctttaacagaagaaggaaagaagcagtttaacgaggcatatagtgcagcttattacccaagcatggacatactatacgagtgctacgaagatgtttcttctggaagtgaaattagaagtgttgtgctggctgggaggagattttatgaaaaggaaggcctccctgcttttcctatgggcaacattgatcaaacacgtatgtggaaggtgggtgaaagggtgcgttccacccggccgcaaggtgatcttggcccattacatccattcaccgctggagtgtttgttgcaatgatgatggctcagatcgaggtcctcagaaagaagggccactcgtattcagagatcatcaacgagagtgtgatcgagtctgtcgactccctgaacccattcatgcatgctcgaggggtggcattcatggttgataactgctccacgacagcccgcttagggtcaaggaagtgggctccgtgctttgactatgtcctgacccaacaagcttttgtgactgccgacaagaaagcaccaattaatcaagatcttatcagcaattttatgtctgacccggttcatggtgccattgaagtctgtgctgagttgaggcccaccgttgacatctcagtgactgctgatgctgattttgtgcgcccagaactgcgacagtcttcctgaagtttgtgttgatcgctggcacatccaagtttagccgtgtgtatgctaaatgtatcgctataacctgaataagtgaacacttcagatgttaggactgctgttgttttgttgtcactggactagtgttctgcaggaataaaagaagctgtttgttatgtctgctccccagcgagtgctgcaagtcacttgacttatgaagatcaccatttcgacgtt

SEQ ID NO: 5327 - DNA, 853 bp, Avena sativa
actgaggtgattacatgtgcggagttccatccaactcattgtaatacactagcgtatagtagctcaaagggcgctatcaggcttattgacctgcggcaatcagcgctgtgtgacaaccactctaaactatttgaggagcatgaatcggctggatcaaaatccttttttacagagataattgcatcggtttctgatataaagtttgcaagggatggaagacatattcttagtcgtgattatatgactctcaagttatgggatctcaacatggattcaggtccagtagcaactttccaagttcatgaacatttaaggcctaagctttgtgatctatacgaaaacgattcaatctttgacaaatttgaatgttgtctgagcggggacggtcttcgtgttgcgactggctcttatagtaatttatttcgtgtttttggttgtactcctggaaatacagaggcaatcactttagaagcaagcagaaaccctatgaggcgccaggttgctaatccaacaaggcctgcaagaacgctgacctctttgacccgtgctgtgaggagaggtggtgaaaatgcaggagccgatggcaatgtgaactctaacgacttctcaacaaagttactccatcttgcatggcatccaaccgagaattccatcgcgtgtgctgctggaaatagcttgtacatgtattacgcatagggaatgtgctagagaagattcactagttttggtttgttcgacgtgaaagctctcgccttccacatgcaaccagggaacagtgcagggcattgttgtctattccgtgattggggccaaaaaagctgtcagatatcctccaacgtgcagcagactattt

SEQ ID NO: 5328 - DNA, 678 bp, Avena sativa
cgaaaccttgcaattcgtgatgggtttgagaacattaatttcttggttgatgatgttcttgagtcaaagctggaaagaaggtttgaacttgtgatggatgaaggaactctggatgcaattgggctccatcctgatggacctgtaaagagaatgatgtattggcagtcagtggctagcttggtttctcctggtggcgtattggttatcacgtcgtgcagcagaaccagggatgagttagtgcaggaggtggagaacttcaatcaaaggaagttgggctctgcagtctctgaaggagcgttggccagtgatgctgtggtgttcaagtacctcgaccatgtccaagcttatccaaacgtggatagttcttgcatcgccaccgttgctttcgtgcatacatgaaatatacgtgtatcctttccctaacttatcaaacctgtgagtaacaatgtatccctggacagctgttcttctacggatgatgtttaccttgtcgaatacgcttgtcggacacgtgattcactactacggtgctttgttataagctttcttctcatcgctgtactctttgagagcttatatcaagtaaatgttgcaaccagatgtacagaaatttatatgctcagaactgaatcaatagtccatgcacttatcagcactagaatccaaggcctgtagacc

SEQ ID NO: 5329 - DNA, 813 bp, Avena sativa
agctaagaagccggaggactgggatgacaaggagtacattcctgaccctgaggacacgaagccagagggctatgatgatattcccaaggaagttgctgaccctgatgctaagaagcctgaggactgggatgatgaggaagatggtgaatggactgccccaaccattcccaacccagagtacaagggaccatggaaggcaaaagaaaatgaagaaccctaactatcagggtaaatggaaggcacatatgattgccaacccagatttcaaggatgatccttacatctatgcttttgacagcctgaagtacattggaattgagctgtggcaggttaagtcgggaactttgtttgacaacattctcatcactgacgatgctgccttggccaaggcatttgcagaagagacctgggccaaacataaggatgttgagaaggctgcttttgacgaggctgagaaaaagaagcaagaggaggatgctaacaaagctagtgaggatgatgacttggacgatgaggatgctgatgacaaccacgaggataaggatgagaaggctgtgtccgatgatgaggatcaatctgacgacgagaagcaccacgatgagctctagatggccaggatgaacaaggccgccgatagtctgttttcaggatttagtacttctcccattatgatgttgccctttttctgaccagaaacttgacaagttactgtgtagaagaacatcgctgaggcactttgttgcccttctgtagtgttttttccaaatgagaaagaaaaccttaaatccatttctatctttgttacaacaataa

SEQ ID NO: 5330 - DNA, 980 bp, Avena sativa
aatcaaccatgatttcactgcgatgtgctacccactgcttgtgagctctgttggcatcattgtctgcttgcttaccacactctttgcaactgatttctttgagataaaggctgcaaatgaaattgaacctgctctaaagaagcagctcatcatctccactgctttgatgactgttggtgttgcgataatcagctggttggcccttccagctaagttcaccatcttcaatttcggtgctcagaaggaagttgccaactggggcttgttcttctgtgtgggaattggactctgggctggtctcattattgggtttgtgacagaatactacacgagcaatgcctacagccctgtgcaagatgttgcagattcctgcagaactggtgctgccactaatgtcattttcgggcttgctctgggttacaagtcagttatcatcccaattttcgctattgctgtcagcatttacgtcagcttctctattgctgccatgtacggcattgcaatggctgctcttggcatgctaagcacaatggcaactggtcttgccatcgatgcttatggccccattagtgacaatgctggtggaattgctgagatggctggcatgagccacagaatccgtgagaggactgatgctcttgatgctgctggcaacacaaccgctgctattgggaagggttttgctattggatcagctgctctggtgtccctggccctttttggtgcttttgtcagcagagccggtgtgcaggtcgttgatgtcctttctccaaaggtgttcattggcttgcttgttggagccatgcttccctactggttctctgccatgaccatgaagagtgttggaagtgctgctctcaagatggttgaggaggttcgcaggcagttcaacaccattcctggactgatggagggtactgccaagcctgactatgccacctgtgtcaagatctccactgatgcttctatcaaggagatga

SEQ ID NO: 5331 - DNA, 921 bp, Avena sativa
tctcggctcgctattaagcagcgcgcacggcccttcctttcacgcttcactgaaaccaacaggggattcagatcggatcggaagcttctagaagtttctgatctgcgtcgccggagatggcgatccgtcgggggtcttcctacgctgtcgtggcattggttgctctcgcttccgtcgccaccgtcaccgccgagatcttcttccaggagaagttcgaagatggctgggatagccggtgggtgaagtcagactggaagaaggacgagaacatggatggtgaatggaaccacacatctggaaaatggcatggcgattctgaggacaaaggtattcaaacctcagaggactacagattttatgccatttcggcggagtacccagagttcagcaacaaggataagacccttgtgctgcagttcactgtgaagcacgaacagaagctggactgtggtggtggctatgtcaagttgcttgggggtgatctcaaccagaagaaattcggtggagacacaccttacagcattatgtttggaccagatatctgtgggtacagcaccaagaaggttcacactatccttaccaaggatgacaagaaccatttgatcaagaaggatgtgccttgcgagaccgatcagctgtcccatgtgtacactttgatcatccgtcctgatgctacgtacagcattctcattgatactgaagagaagcaaactggaagcatctatgagcattgggatattcttcctcccaaggaaatcaaggacccagaagctaagaagccggaggactgggatgacaaggagtacattcctgaccctgaggacacgaagccagagggctatgatgatattcccaaggaagttgctgaccctgatgctaagaagcctgaggactgggatgatgaggaagatggtgaatgga

SEQ ID NO: 5332 - DNA, 890 bp, Avena sativa
  modified_base (796)..(796): a, c, t, g, unknown or other
ttctcctctcacctcaagatcggaatcgttgggttacccaatgttggcaaatcaactttctttaacatagtaacaaagttgtcaatcccagccgagaacttccctttctgtaccattgaaccaaatgaggcacgggtaaatgttccggacgaacggtttgactggctttgcaaactttttgagccgaagagtgaggtgtctgcatatctggaaatcaacgacatagccggacttgttaggggagctagtgcaggggagggtctgggcaatgccttcttatcccatatacgtgctgttgatggaatctttcatgtcttgagagcatttgaagactcggatattactcatattgatgatacagtagatcctgttcgtgatttggaaactattagtcaagaactgagactcaaggatatagagttcgtgcaggctaaaattgatgaccttgagaagcaaatgaagaggagcaatgacaaacagcttaagatagaacatgaattatgtcagagggtcatggcccatctccaagacgggaaagatgtacgtttaggagaatggaaaactcttgaaattgagatcttgaataccttccagctgctgaccgcgaagccagttgtttatttggtgaacatgagtgagaaggactacctgcggaaaaagaacaagttttaccaaagatacatgcttgggtgcaagaacatggtggtgaaactattattcctttcagctgtgccttcgaacagaaactagtggatatgccagcggatgaagctgctaaatattgcgctgaaaaccngacagtaagtttgatccccaaatcatcaagactgggttttcagcaattcatcttatttacttcttcactgctggtcctgatgaggtaagtgttg

SEQ ID NO: 5333 - DNA, 990 bp, Avena sativa
gctcagccttccccttgtcgttggtgattggttgatcttgttcttctggccagttgtcttgtcctcggcagagacattcaggataccattggcatcaatgtcgaagcagacagtgatctgaggaacacccctgggagcaggtgggataccggagagctcaaacttgccaaggaggttgttgtccctggtccttgtcctctcaccctcaaaaacctggatcagcacaccaggctggttgtcagagtaggtggagaagacctgctccttcttggtagggatggtggtgttcctcgtgatgaggacagtcatgactcctccggcagtctcaagaccaagagacagtggggtaacatcaaggagcagaaggtcctgcaccttctcgttcccctcaccactcaggattgcagcctggacagcagcaccataggcaacagcttcatctgggttaatgctcttgcagagttccttgccattgaagaagtcctgaagcaactgctgaaccctgggaattctagtggaaccaccaacaaggacaacgtcgtgtacagtgctcttgtccatctttgcatccctaaggcacttctccactggctccatgcacttcctgaagaggtccatgttgagctcctcaaacctggccctggtgatggtagagtagaaatcaactccctcaaagagcgagtcgatctcaatggtagtctgggcagtggaagaaagggtcctcttcgccctctcacatgaagtcctaagccttctcaaagacctggggtttccactgatatccttcttgtgcttcctcttgaactcctggacaaagtggttcaccatacggttgtcgaagtcctcacccccaaggtgagtgtcaccagcagtggccttcacctcaaaaataccctcctcaatagtaaggagagagacatcaaaagtgccaccaccaaggtcgaaaataagcacgttcttctcaccaacacttgtagccttcttgtcatc

SEQ ID NO: 5334 - DNA, 829 bp, Avena sativa
ggcgagatcgtcaccaccatccccacgatcggattcaatgttgaaactgtcgagtacaagaacattagcttcaccgtgtgggatgtcggaggtcaggacaagatcaggcccctgtggaggcactacttccagaacacccagggcctcatttttgttgtggacagcaatgacagagagcgtgttgttgaggccagagatgagcttcaccggatgctcaacgaggatgagctgcgtgatgctgtgcttctggtgtttgcaaacaaacaagatcttcctaatgccatgaacgctgctgaaatcactgataagcttggcctgcattccctccgccagcgacactggtacatccagagcacttgtgctacctctggtgagggtttgtatgaggggcttgactggctgtccaacaacattgccaacaaggcttgaagcatctcggcaggggcttctgtatatctggataagctggatattcggactaataccgcctttacgtattataaactacatagtcttgacagatactttgggattgttctgggaaaagataaagctctttgtcaaagagctagctatcagattgttttcgtgggtgttaattgtccttggcgctctttgttttccctgcccatcaatgtctcgttatgtccactctgtactctgtacttgcaactcccagagagacttgagacattgtagtattgacttgtcatggcatagcttgttgtcagtgtggtctatcatgtttcttttgaattgttatggctgatgttgatctcatgttgaatgggaatatctttgaaatccacaaatcgttttgatggccgcc

SEQ ID NO: 5335 - DNA, 792 bp, Avena sativa
aacaggttctgaaccaaaaattggatccaaacagcaccataggttcaactaacatcaaatgatcctcaacagggcaaattaaagcttctcctggtaaacatagaaactgcaggaccacacagaggagtaagttcttgattgccaccataggagttgaaagatagcctgaagaagacatctacagcctccttcccctccttccacccttccggcgggtgctgtcagtgggaacgggagtaacgtcctcaatgcgcccaatcttcatcccagaacgagcaagagccctgagagcagactgagctccaggtccaggagtcttggtcttgttgcctccagtggcacggagcttaatgtgcagtgcggtgatgccaagctccttgcaacgtacagcaacatcctgtgaagcaagcatagcagcatagggtgaggattcatcacgatcagccttgaccttcatcccaccagtgatgcgcacaagggtttccctcccagacaagtcagtcacatgaatgaaggtgtcattgaaggatgcaaagacgtgagcaacaccaaagacatgctctccttcacggacagccggtccaagggtgatgttctcctccttgggctccctggtcttcctcttcgacatggttgcgtggagcggcggtggatacgagaagacgacgacgacgagtgcgggcctggtttgagatcacgagtgcgccgccgccggtcccgggaattccggaccgacttgttctatagtgtcacctaaataggcctaatggtcatagctgtttcctgtgtgaa

SEQ ID NO: 5336 - DNA, 776 bp, Avena sativa
ccgccaaaacatccgtaagttggtcaaggatgggttcatcatcaggaagccccaaaagatccactccaggtctcgtgcacgcagggcccatgaagccaagcagaagggacgtcactctggatatggtaagcgtaggggtaccagggaggctaggcttccaaccaagattctgtggatgaggaggatgcgtgtgctcaggcgtctgctccgtaagtaccgtgaagcaaagaagattgacaagcacatgtaccatgacatgtacttgaaggtcaagggtaacatgttcaagaacaagcgtgtgcttatggaaagcattcacaagtcgaaggctgagaaggcaagagagaagacgctctctgaccagtttgaggctaagcgtgccaagagcaaggcgagccgtgtaagaaagattgccaggagggaggagaggcttgctcagggcccagtggaccactcagcaccagcacctgcagcagcagctcctgctcaaccggcaacggcaccaaagaaggcaaagaagtgaagatctgacgtttaagtgttctgtttactgagtgaaatctgtttggtctttagctgaattttgaagtatgaactgttttgttcagtatttaagcatctttatccctgataccttggatactatgttgcatgctactcgatgtagtattagatgcttatgcaaagtatctttcaagatgtcgttgcttgtgtctcctacatttgttctctgtccagttgatcttttttatgctatagctggktttatattgtta

SEQ ID NO: 5337 - DNA, 1005 bp, Avena sativa
gcggaggagaggctgagcccagggagcggcgggagcgcggtgctggacgcgcgggatgcgctgctcgggtgcggcggcgtggttgacagcagcgtggagtcgtactgcttcccgggaggcggcggcgcgtgcgccttcaccaaaactgcggcggcgcgcgaatagaaggcgaagcagcagcggagccaatccaccgacgccaccatgggtatctcgcgtgactccatgcacaagcgccgggccactggtgggaagatgaaggcatggcgtaaaaagcgaaagtatgagctcggccgccagccagccaacacgaagctgtccagcaacaagacagtgaggagggtccgtgttcgtggaggtaatgtcaagtggagggctctccgcctggatactggcaacttctcatggggaagtgaagctgtgacccgcaagacccgtctcctggatgttgtttacaatgcgtcgaacaatgagcttgttcgaacacagaccctcgtgaagaatgctattgtgcaagttgatgctgcccccttcaagggttggtatctgacgcactatggcgtggacattggtcggaagaagaaagctcctgctgctgccaagaaggaagcttctgagggacaagagggtgaggttgctgcagttgccgcagaggaggcaaagaaaagcaacaatgtccagcgcaagcttgagaagcgtcaacagggccgtactctggactcccacattgaagagcagttcagtggtggtaggctgttggcctgcatctcctcccgccccgggcagtgtggcagagctgatgggtacatcctggagggcaaggagctggagttctacatgaggaagctccagaagaagaagggcaagggtgccgcagcttagataacagtctcctgtgtgctctatcgctggatgttatatttcattccctgagttttgatagttgttgcgtctatgttatgatgtactgaatactatgttctgcaagcgagtcactatgtttga

SEQ ID NO: 5338 - DNA, 986 bp, Avena sativa
ggaaggtcctcagagtcaacaatgcccttgacaaagctcaggtactcagggatcaactcctcacagttgtccatgatgaagacacggcgcacatacagcttaatgttgtttgccttcttcttgttgtcaaagaggtcaaagggggccctcttgggcacaaacaggacagccttgaactcaagctgaccctccacagagaagtgcttgacagccaaatgctcctcccagtcattggtcaagctcttgtagaaagcagcatactcttccttgttgatctcctctggcttcctcatccagataggcttctgcttgttgaccaaggaccactcatgggaaacttccttaatcttcttcttcttcttttccttttcctccttctcctcatcaacttcctcaaccttgccctcctcagtatccttcttctcctcttcatcctcgtcatcagagatttccttctccgttgtcttctcagtccacagggagatagggtaactgatgaactcagaatgcttcttgatcagatccttgatgcggcgctcctcaaggtactccatctggtcgtccttgaggtagaggaccatcttggtacccctgccgagctgctccccggtggtatcacgggcaacggtgaaggacccaccggcctgtgactcccagatgtactgctcgtcgtcgttgtgcttggtggtcacgacgaccctctcggccacaaggtaggcggagtagaaaccaacaccgaactgtccaatcatggacacatcagcaccggcagcgagggcctccatgaactccttggtcccggacctggcgatggtgccgaggttgttgacgaggtcggacttggtcatgccaatgccgctgtcgatgatggagagcgtgttgttggccttgtcggggacgatgtggatgaagagctccggctgcgcatcgagcttgctcttgtccgtgaggctctcgaacctgatcttgtccaacgcatcggagga

SEQ ID NO: 5339 - DNA, 649 bp, Avena sativa
cactgcgatgcagctagatatcgttgggaacaggaaggccgtggttattcatgtgccgtaccgtctgcgcaaggccttcaggaagatccatgtcaggcttgtcagggagctcgagaagaagttcagcggcaaggatgttgtttttgttgcaacaagaaagattgtaaggccaccaaagaagggctccgctgttcagcgccctcgcaccagaactctgacagctgttcatgatggtatcttggaagatgttgtgttcccagctgagattgtggggaagcgtatccggtaccgtttggatggtgccaaggtcatcaagatatacttggacccaaaagagcgcaacaacactgagtacaagctggagaccttctctgctgtctaccgcaggctttgtgggaaggaggtcgtctttgagtaccctgtgaacgaaagcgcttaaagaagaagatgcatgccttggatatctcctttttcatctctttcaaatccagatgttttggctgaggtcttggttagtttgctatcagtgtattccagaaaccatagttttggtaacaacctggtgattaggaagtttgctggagatggcatatgatgggaacaatgtttttttgagcatttaaattttagaccttgcctggttgtctaa

SEQ ID NO: 5340 - DNA, 919 bp, Avena sativa
caggtcatatcatcattgactgcttccctgaggtttgatggtgctctgaatgtggatgtcaatgagttccagaccaatctggtgccctacccaaggatccacttcatgctttcctcctatgccccagttatctcagctgagaaggcttaccacgagcagctctctgttgctgagatcaccaacagtgccttcgagccttcctccatgatggccaagtgtgacccccgccacggcaagtacatggcctgctgtctgatgtaccgtggtgatgtcgtgcccaaggatgtcaacgctgctgtggccaccatcaagaccaagcgcactatccagttcgtggactggtgccccactggcttcaagtgcggtatcaactaccagccacccagcgttgtccctggtggtgaccttgccaaggtccagagggctgtgtgcatgatctccaactccaccagtgttgttgaggtcttctcccgcatcgaccacaagtttgacctgatgtacgccaagcgtgccttcgtccactggtacgtgggtgagggtatggaggagggagagttctccgaggcccgtgaggatcttgctgccctggagaaggactacgaagaagttggtgctgagttcgacgagggtgaggacggtgacgagggcgatgagtactagagcctgcgtcctggtgctgtgttcccaaggcggactactactactgctatccggtgatctgcccagagtggctttatctgttgttctgtctgtttgaacgtttgctttgcgatgtgtttggtttacaacctgttctgttgtaagaacctgtggtatgtttgaacctgcttcgcaccttggttaatatgcatcttatgtggtctttgtgtcttctgttactgcatgtatcttttatgtttattgatgttatattcaggtc

SEQ ID NO: 5341 - DNA, 835 bp, Avena sativa
gtgggaacagatcaggcagctgatgagatcaaaagcattgctaccattctttgacagtgcttatcaaggatttgcaagtggaagcctcgacaaagatgctcagtcagtgcgcatgtttgttgctgatggtggtgaattgctcatggctcaaagctatgctaagaacatgggattgtacggagaacgtgtcggtgctttaagcattgtttgcgggagtgctgatgtagctggtaaggttgaaagtcaactcaagcttgtaattaggcctatgtattcaaaccctcctcttcatggtgcctctatcgtggctaccatacttaaggacagtggtatgttcgacgaatggactatggagctgaaggccatggctgataggatcattagcatgaggcaacagctttttgatgcactgacaagcagaggcactcctggagattggagccacatcattaagcagattgggatgtttactttcactgggctcaacagtgatcaagtagccttcatgaggcaggaattccacatttacatgacatctgatgggaggatcagtatggctggtttgagctccaggactgtaccccatcttgcagacgccatagatgctgctgttacaaaactgaagtgaatgatcacattgccaaccccctctacaataaaatcttgaagctactggctgaactcaagtatttgccttgtagattcactagacttttgttttctgagacagttttgtacacaacggatgaaaagatgatggtgatttctaataagctgcacttgtgatgctttgtacccttgaacactgaggtatttgtcctgcagcactgtataa

SEQ ID NO: 5342 - DNA, 862 bp, Avena sativa
agagaaggagatcaaagaaggcaggaaagaagatgggcgacgctgcccggcgcaaccccccctcctcgcccccctacaaggatgggggagattttgagctctcccacagggtcgttcttgcaccactgacaagggagcgatccttcggaaatgttcctcagcctcatgctatacagtactatcaacagagaacaactaaaggaggccttttgattgctgaggccactggagtttcagacaccgctcaagggtacaaagatactcctggtctatttagacaaagaagcaggtagaagcatggaagccgatcgtgagcggggttcgtgggaaaggaggaatatttttctgtcagatttggcatgtaggaagagtctctaatcatacttttcagcctaatgggcaggctccaatttcgagcaccgataagccagtcaaacctgtagtgagagcgaacggcatagatgtggctacgttttcaactcctcggagactagagactgatgaaatcccttcgatcattgatgatttcagggttgccgctagaaatgcaattgaagctggatttgatggtgttgaaattcatggagctcatggttatttgattgatcagttcttaaaggaccaagtcaatgatcgcactgacaaatatggtgggagcttagagaatcgttgccgttttgcgctggaagtagtccaagccgtagttgatgaaattggagctgataaggttgggataaggctctcaccctttgcaagttactcaaatgcatcagactcaaacccagaagctctaggcctatacatggcacatgcactgaacaaatttggaattctctattgccacatggtggaaccacggatg

SEQ ID NO: 5343 - DNA, 675 bp, Avena sativa
acgacttgttggtcgagaggatggcggagctcgccgccgacaccgaacggcccgggatcacgtactctgtggggagctccttcaacctggtgaccaacttcacggcggacccggaggccgccgggttcaagaatgtgaccagttcgtgctgcggcactggacgtcttgcgttggagggcttctgcctgcccggcgccactgtctgcgacaaccgtgccgactatctattctgggacttggtgcacggcacccaggccaccgctaagaagggcgctgccctcatcttctccgccccactggaggagggattcgccaagcccatcaacttccaggagctcgtttcttcaacacccggttttgttggagttagcagctcttgatttaattacgacttcattgaaaggtagtcaagctcgtcgtttattttctacattttatcatgagtctgttggcacatagtttttattgaatctgtatgtgccatgttacctctgttttgtgtttacaaataaactgaaccagacacgtgcttgttcacgtggtggtgcgtctagtttcaggccgagtgatctcgatcatgggattcagtccaagtttgttacactttctttctgttaaataaatgcgaaatgcagttatgcgtcgctaaacgctctctgtctctctgagatgtgt

SEQ ID NO: 5344 - DNA, 955 bp, Avena sativa
agaacaaggcacaaggcaatgccaatctaatctattcaccatatgcaaactgacagggaaggctaaatcaacaaattaggagccaaagcaaaacagcagcacgccataaaaataagataaatctataactccagcatgatccacaaaactgaaagaaacgggttcaattttcagggtgaccaactttggcaaggggtgaacgacacagagcaagttcagctcaaagcataagatagcactactacagaaactacactcttcactcgtcatcctcatcatcatcaacatcagcaccagcagaggagttgagggcattcagcctttgaacaagactggccttcctctcatcataggtcagcttcttgaggttgtacctcttgtgagtcttaggttgttccttggttgatttggccatgctaggatcagcacggatggcagcatgaaccttcttgtaaatttcttccatttcatcagccgaaatacccttcttgatgtactcactgaagtggctctggaacttctcaggttcctcctcagcaagcgacctcatgtagtctgcaacatggcctccatagatgtacttgcggtgaacctcagcatcaagctgcttctcatccttcttgaaaccagcaaacctcttgtcactgtgaggaatgtccaggccaccatccaaagctcccttaagagcaccgaagacacggtttccagtggtggtcctgagaaggccaacatccaatagagcacggaaaggccgcctctcaccagatggctcaacagagtagtcctcaccagtggcctcaacattgccctcatattccgcatccaaatcacggtacttgagtatgcgacgagccaaaagaagcccagtgcagtatgctgcagcatagttggtgagaccaactgtcaggccataccggggcagctcatgagaataggcagcagccattcccgggaa

SEQ ID NO: 5345 - DNA, 764 bp, Avena sativa
cgcccacgaagcaacggtactcgacttccgccattcctcccactaaaaccctaaacgaaccggaaccgggaacgaggactagtgagggggaggagaagccagcccacccagttctagcagccgcctccgcttccgcaaggaccgctccgccacaaaaccgcttgctcacgatgggggaggcgtcttctccggcgatcgccaaggacgtcaccgagctgatcgggaacacgccgctggtgtacctcaacacggtcacccatggctgcgttgcgcgcgtcgccgccaagctcgagtccatggagccctgctccagcgtcaaggacaggattggatacagtatgatcactgatgcagaggagaagggattcatcactccaggcacgagtgtgctgattgagccaaccagtggcaacacaggcattggactggccttcatggctgccgcaaagggttataggcttgtacttacgatgcccgcctccatgagtatggagaggagaatcatattgaaggctttcggtgctgaactgatcctgactgacccactcttgggaatgaaaggagctgtccaaaaggcggaagagctggcagcaaagacacccaactcatacatccttcaacaatttgagaatgccgccaacccaaagattcactatgagacaactgggcctgaaatctggaaaggcacaggcgggaagattgatggccttatatctggcatcgggacaggtggtaccattactggatctggacgatacctgaaa

SEQ ID NO: 5346 - DNA, 851 bp, Avena sativa
cacatttaacatcaacaaaatttgacgccaaagcgcaccagtgaagaataaaccagaggtacaatatagttcagcaatagcatagtctaataaccaacgaaaagacgcctaacagagagcaaaagcgagaagaaagtgcagatagtagtagtatctcgtcctgccggctgggtatcgaagcccgacactaggagttgttcctggagtttctgttccagtgatggcaagcaacggtgacacattgatatggcttatcgcctgcttgtcttcccgattcctcgtttcccagagaaaagatgttttggtttcaaagtggggatgacactgcagtctgctaggccatatggccagagggctgtcctcaagtttgctcagtacactggtgctaatgccattgctgggaggcacactcctggtacattcactaaccagatgcagacatcattcagcgagccacgccttcttatcctgactgaccccaggactgaccatcagcccatcaaggagtctgcacttggaaacattcccaccattgccttctgtgacactgactcccctatgcgttacgtcgatatcggcattcctgccaacaacaaggggaagcagagcattggttgcctattctggctgctcgctaggatggttctgcagatgcggggtacaattcttcctggacgcaagtgggaaatcatggttgatctgttcttctacagggaccctgaggaagcaaaggatctagaggaagaagatgctctggttgcccctgagtacggtgcagttgctgaatatgctgcccaactggagatacctggggtgctgaatggccggaggctgcagctcccctgctgctg

SEQ ID NO: 5347 - DNA, 756 bp, Avena sativa
attgacaggcacaatcagttaaggccagaccttggattttcaccctgcaagataagactgggaactcccattgtgttgtcttcctgcaccaacagtcgctgcaacgagtctcagatcacgcagccagttctccgtcgccacaaaattggtcctccaaatctagtaacatattttcatagaatcgatcctcataatttacatcatggtagtacaagtgaaaccagttgtgcatacttcatcgtgtgcatggtctctcggacaccgccttagtggatggcttatttgccgggaacaaagttggtggcgaaagcccaggcgttgttgttgactgggtcggccaggtggtcagcgaggttctcgagggggccctttccggtgacgatggcctgcatgaagaagccgaacatggagaacatggcgaggcggccgttcttgagctccttaaccttgagctccgcgaaggcctctgggtcgtcggccaaaccgagggggtcgaagctgccaccggggtagagagggtcgacgatctcaccgagtgggccaccggcaacacggtacccctcaacggcgcccatgagcacgacctggcaggcccagatggcgaggatgctctgcgcgtgcactaggctcgggttgccgaggtagtcgaggcctccctcgctgaagatctgggagccggccttgaaccagacggcctcgccgaacttgacgccgttgcgggcgagcaactcagggaagacgcatccstgagactgc

SEQ ID NO: 5348 - DNA, 813 bp, Avena sativa
tcgtaatcctctcttgcagtcctccaagatcagtagcaagagttggttggtatcccacggcagatggaatacgtcccagaagagcagacacctcagagttggcctgggtgaagcggaaaatgttgtcaataaacagaagcacgtcttgcccctcagcatcacggaagtgttccgcaacagtcagaccagtcagaccgacacgagcacgggcacccgggggctcgttcatttgcccgtacacaagagcgcacttgctttcactctgcttctcaccaagcttaatgacaccactttcaatcatttccctgtacaggtcattaccttcacgggtgcgttctccaacaccagcgaacacagagaaaccaccatgggccttggcaacattgttgatcagttccatgataaggacagttttacccactcctgcaccaccgaaaagaccaattttcccacccctttggtaaggtgcaagcaaatccacgaccttaattccagtaacaagaatttgctgctctgtggcttgctcaacaaaagcaggtgcctcacgatgaatgggaaggaagtggtttgttgttatgtcacccttgtggtcaattggctcgccaataacgttaatgatgcgtccaagcgtggccctcccaacaggaacagtgatgggtgagccggtgttgaggactttctggccgcggacgagcccctcggtaccgtccatagcgatggtgcgcacgacgttctctcccaggtgctgggccacctcgagcacgaggcggatgctgttgtcgagcacctcgagcgcggtgaggatgggaggga

SEQ ID NO: 5349 - DNA, 998 bp, Avena sativa
ggcgatccgtccacgagccgacgtttcttgattcttccttcattactctcgggtcgtgtgtacgtagttgatacggccaaggatccgagggcgcctgcgttgcacaaggttgtccaggctgaggacatcgctgagaagactgggcttgggttcccccacacatcccattgccttgcaactggcgatattatgatttcttgcctgggagacaaggagggaaatgctgctggaaatggctttctcctgttggattcagaatttaacgtcaaaggacgttgggaaaagccaggtcacagccccttgtttggctatgatttctggtaccagcctcgtcacaagacgatgattagttcgtcatggggagccccggcggcttttaggacaggttttgatcttcagcatgtccaggatggtctctatggaaggcacctgcatgtgtatgactggcctggtggtgagctcaagcagacactggatttgggcagtacaggtcttcttccattggaggtgagatttttacatgacccatcaaaggacactggctatgttggttgtgctttaacaagcaacatggtgagattcttcaaaactgcggatggatcatggagccatgaggttgccatatccatagaaccattgaaggtgcgcaactggatgctgcctgaaatgccaggattgataactgattttgtcatctcgctcgatgaccgctatctctatttggtgaactggcttcatggggatatcaggcaatacaacattgaagaccctgcaaagcctgttttggccggacaagtatgggtaggtgggcttcttcaaaagggcagtgatgccgtctatgtgacagaagatgataaagaagagcagtatactgtccccaagtcaaggggcatcgacttagaggtggtccacagatgattcagctgagcttggatggcaagcgggtttatgtgaccaattctctcttcagccgatgggatgagcagttctacggtgtt

SEQ ID NO: 5350 - DNA, 992 bp, Avena sativa
ccacggcgtcaccaagttctccgacctcaccccggacgagttccgggaccgctacctcggcctccgcaagtcccgcgggggattgctctccggatcggcgcacgacgcgcccaccctacccaccgacggactcccgaccgagttcgactggcgcgagaagggcgccgtcggccccgtcaaggaccagggcacgtgcgggtcgtgctggtcgttcagtgcgtcaggggcgctggagggcgccaattatctcgccacagggaagatggaggtgctcagcgagcagcagatggtcgactgcgaccacgagtgtgaccctgatgaaccacgtgcatgtgacgctggatgcaatggtggcttgatgactacagctttcagctatcttgccaaagtgggtggcttggagacagagaaggactacccttacactgggggcaacggcgcctgcaagtttgacaagtccaaaattgctgctcaagtcaagaatttcagtacggttgctgttgacgaagaccaaattgcggctaaccttgtgaaacatggcccacttgcaattggcatcaatgcagtcttcatgcagacgtacattggcggcgtctcttgcccatacatctgcgggaggcatcaagatcacggcgtcctcctagttggctatggatcagcgggttacgcgccgatccgcttcaaggagaagccatactggatcataaagaactcgtggggcgagaactggggcgagagcgggtactacaagatttgcaggggtccgcatgccaaaaacaggtgcggtgttgatgacatggtctctacggtgactgccatccatacccacaaggaataggttcttactagtacaccggagtcggcctcttcgattgcctacatagcataagatgcctgtgattgtgccaagtctgttggtagttacagctattccacagtcttaggttgcagtttgtggtcagcaaatgtgtgaaaccctgtcttgattgctg

SEQ ID NO: 5351 - DNA, 805 bp, Avena sativa
atgatgtatgccctagttgataacccatccaacgctgttgagtgggcattcgccgagatgatgaacaggccggaggtcatgcagaaagcaatcgacgaactcgacacggtcgtcgggaaagacaggctagtcgaggagtcggacattcctcggctaaactatctcaagtcatgcatccgggaggccttccgcatacacccataccatgcttttaacccgccacatgtcgccttggcggacaccaccctggcaggctacaccatacctaagggcagccatgtcatactaagccggattgggcttggtcgcaaccccaaggtctgggacgatccgatggagttccggccagagaggcacctgaacaccgctaacgtgcttctcagcgagcctggcctacgtttcatttcatttagcagtgggaggaggggttgtccagggatctcactcggcacctcggccaccatgatgatgtttgcaaggatgctgcagggattcacttggatgaagcttccgggcatcgacactattgatctccaggagagcaagattggacttgctctagctgaaccactggttttgcgagccaaaccacggctggccgcgcatctctatcactaaattgaatcagtatgtaatacatgattgttttagtttatatcggtaataagtatccagatggatcttaattacgtgcaatattttatgtgatgtgtaaaaataaagcagcgatccatgttgctaaagtgtaatgtaatatgtaagcaatccgtttcaattatatttaaatttaatatttggtaaaaaa

SEQ ID NO: 5352 - DNA, 979 bp, Avena sativa
cgatgctggagaatacaatgacactcctgagaatacccagttcttaaggacgatggaacatacctcaccgagaagggaagttttcctctcatggtactccaacaaactgatcaagcatggtgacaagatcttggatgaagcaaaccaggtcttcttgggatgcagagtgcagctggcaatcaaagtctctggcattcactggtggtacagggttccaaaccatgcagccgagctcactgctgggtactacaacttagatgacagagacggctacagaaccatagcgcgcatgctcacaaggcatcatgctagccttaactttacttgtgcagagatgagggactccgagcaaagctctgaggcgaagagcgcaccagaagaactagtccaacaggtgctgagtgctggatggagagagggcttaaatgtggcatgtgaaaacgcgctcggtcgatatgacgcaactgcttacaacacgatactaaggaacgcgagaccaaaaggtgttaacaggaacggccctcctgagcacaagctgtttggattcacctacctccgggtatcggatgaactgctggaggaacagaactacgccactttccaaacttttgtcaagagaatgcatgctaaccagggtcatgaccaaagtgttgatccaattgcgcccctggaaagatcaaagccggaaatgtcaattgaaatgatccttcaagcagcggaaccaaagctggagccattcccatttgacgagaacaccgacatgccagtttaaagatctcactgatgcaggatcgctaacaccaacgtcctcagcctattggtgttagcaaccctgacattttgtggagaattgaggtgctttgtgagaattgaggtgcacatggaaataagcctattgtggaacaataggccagtgagaaataaacttctgtgcaacaaggttataatcatgtagtgtggcaataataatgtagtgctg

SEQ ID NO: 5353 - DNA, 944 bp, Avena sativa
ttgagccacctgatcagcaaccagaatgaatactgcatggaggttaccccgaaaacattggctgatgttaaaggtggtaccctcatctcgtatgaaggaagggtccagcttttggagattgcccaagtccctgatgagcatgtgaatgaattcaagtcaattgagaagttcaagatattcaataccaacaacctgtgggtgaacttgaaggcgatcaagaggcttgttgaagctgaagcacttaagatggaaatcattcccaaccctaaggaagttgatggcgtgaaagttctacagctagaaactgcagctggggcagcaatccggttcttcgaaaaagcaatcggcatcaacgttccccgctcaaggtttctgcccgtgaaggctacatcagatttgttgcttgtccagtctgacctttacaccttggtggatggctatgtcatccgcaacccagttagagtgaagccatcaaacccttcaattgagcttggtcctgagttcaagaaggttgccagtttcctggcccgattcaaatcaatccccagcatcgttgagcttgacagcttgaaggtctctggtgatgtctcgtttggctctggcatcgtactcaagggtaacgtgaccattgctgccaagtctggagtcaagttggagatcccagatggagctgtgctcgagaacaaggacatcaacggccctgaggatatttgagcgatgctcacttgccaccgcccggataccttccagttctccttccctgagttaaccagtcttgtaattttcgtgtgcattctgccaggggttattcatgggagagccccgttacagaataattgtaatccctctctgtccatctgcacttctgtaattcctgggtcgtaccagggacgttaagttcttttgattaagtgatgatatgccataagtttttacttaaaaaa

SEQ ID NO: 5354 - DNA, 594 bp, Avena sativa
aaggaggcggccaacttcacctcccaggtcatcatcatgaaccaccctggtcagatcggcaacggctatgccccagtgctggactgccacacgtctcacattgctgtgaagtttgctgagctggtgaccaagatcgacagacgatctggcaaggagattgagaaggagcccaagttcctgaagaatggtgatgctggtatagtgaagatgattcccaccaagcccatggttgtggagaccttctctacctaccctcctcttggtcggttcgccgtgcgtgacatgagacaaacggttgctgttggtgtcatcaagggcgtggagaagaaggaccccaccggtgccaaggttaccaaggctgctgccaagaagaaatgagtggctcattgtctgacgcctagcagcagttttagttccaatcattctttggtgaatcttagtatatcctatgttttgatcttggttgtgttactcttattgcttgagactctgcaagatcctggttgttattattctgcagaacttgtaatatgtgtctgatttgtggcttctttggtggagtgcaatagaatgttagggttgcatacaaaaaaa

SEQ ID NO: 5355 - DNA, 728 bp, Avena sativa
tctgcgggctggacgacatctactgcgtcttcatggggtccctggacaacctgagcagcctgatgcggcagtacgggctgacgggccggtccaccaacgaggcgctgctggtgatcgaggcctaccgcaccctgcgcgaccggggcccctacccggcggaccaggtggtgaaggacctctcgggctccttcgccttcgtggtcttcgacggcaagtccgtccccggcgccgtcttcgccgcgcagagcaccgacggcgccgtgccgctgcactggggcgtggccgccgacggctccgtggtgatctgcgacgaccgcgccctggtgaaggccgggtgcggcaagtcctacgcgccgttcccggccgggtgcatgttccacagcgagggcgggctcaagagcttcgagcaccccatgaaccgcctcaaggccatgcccagggtggacagcgagggcgtcatgtgcggcgccaacttcaaggtggacgccttcaccaagatcaactccatgccccgcgtcggcagcgccaccaactgggccgccacctgggacgaagccgccatctagtctagctgacgatgtagccaccgtgtgttgtccgtcctcgccggcgccggcgccgttcgcctggctcgtcggccgtacctctgaatttgggcttacttttcctttttgtcttgtatgtacattctgtatcttggcgtgtggaccgactgaccgacacgctcg

SEQ ID NO: 5356 - DNA, 906 bp, Avena sativa
gccgcagtcgtcaaacactacgcgccgggccgccaccgccgcctcccaccgcggccgggcggcgcacgcccacaccacccgcggcaggggccggatccggcgggaacgcctgcgaggagaataagacgatctgggtcggcgacctccagtactggatggacgagaactacctccacaactgcttcggccccagcggcgaggttgtaaccataaaagttatccgcaataggcaaactggacagtcagagggatatggttttgtagagttcttgtcccatgcatctgcagacaaagctcttcagaattttactggccacgtgatgcctaacactgatcgagcctttaagttaaactgggcatcctatagcatgggtgaaaagcggtccgaagttgtctctgatcactcaatatttgttggtgatttagctgctgatgttactgacgaaatgttgatggagctgtttgcaaacaagtaccgttccgtgaaaggagctaaagttattattgatgcaaacacaggccgttctaggggctatggatttgttagattcggagatgataaggacaaatctcattcaatgactgaaatgaacggcgtatattgctctaccaggccgatccgtgttggaccggcaacacctagaagaactggtgattctggctcctcagcacctgggcattcagatggtgattctactaacagaacggtttatgttggcgggctcgacccaaatgttagtgaagatgaactgaggaaagcatttaccaaatatggtgatgttgcctctgtcaaaattcctctagggaagcaatgcggctttgttcagtatgtcaacagaatcgatgcggaagaagcactacaaggattgaatgggtccgtaacattggaaagcagacagttcgcct

SEQ ID NO: 5357 - DNA, 569 bp, Avena sativa
caaggccaaagcccctgccaagaccaaggccgccacgaagcccaaggctgccgcgaaaacgaagaccgctcctgccaagcccaggggccgtcccgccaaggctgccaagacctcggccaaggacacgcccgggaagaaggcgcccgctgctgccgcccccaagaagcccgctgccaggaagccccccaccaagcgcacgacgccggtgaagaaggcccccgccgccgccaagaaggcaccagcgaagaaggccgccaagaagtagattgttccagaaggtttccattagcagtatgtcctctgttgttcccttcttaggggaagtggcactaggctgtaaatttgatattctgggtggggttgcagcggtcttcctccgcacccattggtggccatgcgtgtgagaaaccggtggtgatgatgacgatgatgaggggactctgttgttggtatgttcctggagtagtagcctctgtatgtctgtagctaatttcagtcgttgtgttgtactagctgcatcagccatgttacatctgtcgaaatgataatcttattttccaaaaaaaaaa

SEQ ID NO: 5358 - DNA, 666 bp, Avena sativa
  modified_base (666)..(666): a, c, t, g, unknown or other
ccctgagggaggagtcatctgtaacgtggagcaccacgtcggcgaccgtggcgtcttcgccagggcctccggggactacgccatcgtcatcagccacaaccctgacaacggcacatcaaggatcaagctcccgtcaggtgccaagaagattgtcccaagcagctgccgtgctatgatcggtcaggtcgctggtggtggcaggactgagaagcccatgcttaaggctggaaacgcctaccacaagtaccgtgtgaagaggaactgctggcccaaggtgcgtggtgtggccatgaaccctgtggagcatccccacggaggaggtaaccaccagcacattggtcatgcctccaccgtccgccgtgatgccccacccggccagaaggttggtctcattgctgccaggaggactggtcgtctcagaggccaggctgctgcctctgctgccaaggctgacaaggccacttagagatatcgttgctgtttatctatgtttgctaccgtgctcgtctctagattattgcacctcatggacatgtattccagtatggatgtcgtttttggttggtactttgggaacctggtgatgtttgttataagttttcgaacctgtggtttggattcttcgatccacctaaagaagattaagcttggaataaaaaaaaaaan

SEQ ID NO: 5359 - DNA, 891 bp, Avena sativa
aattctgcttcacaatgataggaagagccgacatcgaaggatcaaaaagcaacgtcgctatgaacgcttggctgccacaagccagttatccctgtggtaacttttctgacacctctagcttcaaactccgaagatctaaaggatcgataggccacgctttcacggttcgtattcgtactggaaatcagaatcaaacgagcttttacccttttgttccacacgagatttctgttctcgttgagctcatcttaggacacctgcgttatcttttaacagatgtgccgccccagccaaactccccacctgacaatgtcttccgcccggatcggcccggtgagaccgggccttggagccaaaaggaggggacttgccccgcttccgacccacggaataagtaaaataacgttaaaagtagtggtatttcacttgcgcccgtaaaggctcccacttatcctacacctctcaagtcatttcacaaagtcggactagagtcaagctcaacagggtcttctttccccgctgattccgccaagcccgttcccttggctgtggtttcgctggatagtagacagggacagtgggaatctcgttaatccattcatgcgcgtcactaattagatgacgaggcatttggctaccttaagagagtcatagttactcccgccgtttacccgcgcttggttgaatttcttcactttgacattcagagcactgggcagaaatcacattgcgtcagcatccgcgaggaccatcgcaatgctttgttttaattaaacagtcggattccccttgtccgtaccagttctgagtcgactgtttcatgctcgggaagccccgaaggacgattcccggtccgtccccggccggcacgcggcgacccgctctcgccgc

SEQ ID NO: 5360 - DNA, 692 bp, Avena sativa
gggatcgatccaacatctaaagaaaaaccttccaagttatcttactaagagcattgccaccatgaagatgatgaaggcgctcacactgggctttctggtccttgcctttgctgcagcgacggccctcggctgcagccgcggcagtccttgcggcggcaacgaatgctgcagcgaatacgggtactgcggcaccggcggctcctactgcggccccgggtgtcagagcggcccgtgctatggtaaaggtgccatcctcaatgaaaatggcgtgcccgccaacgcgtgcagcggcggcagtccgtgccccggcaacgaatgctgcagcaggtgggggtactgtggcaccggcggcgactactgtggctctgggtgcgagagcggcccgtgctacgtagccaagcttcgcggtcgcgtagcaggcgcggtcaccgacgccctcatcgatcaagtggtgccgacggtgtagacaccgtcgtggatgtcctactcctccgtgtccgcctcaaataaatagaaatctacttcgcactcaattacgtcgtccatggcgatgcgaggtgaggagcacgggcgagtggtatacatgcatgcatgcgtgtgcatggatgtgtcttatgtgtggactatcctttgtgtgtatatttctggtacgatttgcatgtataataataaataaagatggacaacatgca

SEQ ID NO: 5361 - DNA, 1043 bp, Avena sativa
gggatgacatgtccatcctcgccatgcaacgcctcaacgaccacctgccaaacgggccgtcgtcgccggtggacatggtcctggactacttcaagtacgactacgagttcgcggagccgccgcgggtgaccagcctgcagaacgtggtcccgctcgccaccttcgaggacttcggcgacgacgtctacttcgtcgccgaccagcgcggctacgaggccgtcgtctactacctcgccggccagtacctcaaggccgacaagtccggcggcatcgtcgacccgcggctgcagctcaacaaggtggtgcgggagatctcctactccgggagcggcgtcaccgtgaagacggaggacggcaaggtgtacaaggcggactacgtcatggtctccgccagcgtcggggtcctgcagtccgatctcattcagttcaagccacagctgcctaactggaaggttctggcgatctaccaattcgacatggccgtgtacaccaagatcttcgtcaagttccccaagaagttctggcccgagggaaaaggcagggagttcttcctctacgcgagcagcaggagaggctactacggagtatggcaggagttcgaggcgcagtacccagacgccaacgtcctcctggtcaccgtcaccgacgaggagtcgaggcggatcgagcagcagtcggacaaccagaccaaggcggagatcgtggaggtgctgagggacatgttccccggcgccgacgtccccgacgccacggacatcctcgtgccacgttggtggtccgacaggttctacagaggcaccttctccaactggccaatcggcgtcaaccgctacgaatacgaccagctcagggcgccggttgggagggtttacttcaccggggagcacaccagcgagcactacaatggctatgtccatggagcttatcttgcaggtattgactctgcagatattctgatcaactgtgctcagaagaagatgtgcaaataccacgtcccgggcaagtacgagtagaggtttcagaggcatttcaaagataaatgt

SEQ ID NO: 5362 - DNA, 877 bp, Avena sativa
acgaccggccgcgagtggccgtggcagaccttcgacacagccaccttcttcttctccatttcccctccctccccttcggttcgcttccccggggtaaaacctagctcgtcgactccggcggtggcctgaaatgcggcgtcctccctgatgccctaaccctagccccgatcgggaaaaaactaagggggatccggtagaagaatcgcgcggatcggcgagggatcgatttgatccggatccctggagtttgattgtactacaggagttttattgggtagagacaacaatggagtgtgggagggtgccgaagtatacttagcaccatggcccccgtcgtggcttcgtcggccacctcggtcgcgcccttccaggggctcaagtccactgctggccttcccgtcagccgccgcagcaacgccggccttggcagcgtgagcaacggtggaagaatcagatgcatgcaggtgtggcctattgagggcatcaagaagttcgagaccctgtcttacctgccaccactctcagaggaggccctcctgaagcagatcgacttcttgatccgctccaagtgggttccttgcctcgagttcagcaaggttggcttcatcttccgcgagcacggcagcactcctggatactatgacggcaggtactggacaatgtggaagctgcccatgttcggctgcaccgacgcctcccaggtcatcaaggaggtggaggaggtcaagaaggagtaccctgacgcctatgtccgcatcatcggcttcgacaacatccgtcaggtgcagtgcgtcagcttcatcgccttcaagccaccgggctgcgaggaatctggcaaggcaaaggcataagttgccagctgaaacagtggccgccc

SEQ ID NO: 5363 - DNA, 963 bp, Avena sativa
agctgctgctctgccctgaatctgatgactcagctcaactttctcagattgaaaccgaaaagcttctagcccaattggttgagaccgaaatgaacaaacgtttgaaggaaggcacttacaaggaaagaagttcaatgcaatctgtcacttttttggctaccaagctaggggtgcaatgccttcgaagtttgactgcgattatgcctatgttttgggtcatgtgtcctaccacatcttggcagctggtttgaacggttatatggctactgttacaaatcttaagagtcccctgaacaagtggcgatgtggcgctgctcctatttcgtccatgatgaccgtgaagcggtggtcacgtggccctgcgaccacacaaatcgggaagccagctgtgcatatgtctagcgtcgacttgagaggaaaagcatacgagctgttgaggcagaattcatctagctgcttgttggaagacatctacagaaaccctggaccactccaatttgaaggaccaggtgccgattcaaagcccatttcactgtgcgttgaggatcaagactacatgggcaggatcaagaaattgcaggagtacctggagaaggtgaagagcattgtgaagcctgggtgctctcaggatgttctcaaggcggcgctgagtgccatgtcttcggtgacagagacacttgccatcatgacttcgtcttccaccggccaggccccagtctgagagtctgagtactcaagcgggttaaaattctatacgtgtttccctgatcctcttttgttccatctgacggttgggattagagaacaatgatcttgtgatcccgtggtttgttcttttcctagttttcagagagttttatcatttttgactctaatagcgtttgaggattgttgttggcgagttggaactggaataattgatcaaactgccggttgttatctatcaataaaccaaattttgcg

SEQ ID NO: 5364 - DNA, 799 bp, Avena sativa
tgctacaaggctctcaatgaccagcatgttctccttgagggtaccctcctgaagcccaacatggtcacccctggatctgactccaagaaggttgccccagaggtcattgccgagtacaccgtccgcaccctccagaggaccgtcccacctgcagtgcctgccattgtcttcctctctggtggccagagcgaggaggaggcgaccaagaacctcaacgccatgaacaagctccagaccaagaagccgtggtctctgtccttctccttcgggcgtgccctccagcagagcaccctcaaggcctggggtggcaaggcggagaatgtcgcgaatgcccagaaggcgttcctggtgaggtgcaaggccaactccgaggccaccctcggcaagtaccagggcgatgctacccttggcgagggtgcctccgagagcctccacgtcaaggactacaagtactaagctgccttcggcgccggtccgtttgggccttcctgcataccagtattattgtttggttttctgagtcctatatatcttcggatatcgaacatcgtttaataatatgaaacttgtgctttcataataccgtagtagttttttggtgttgctctccctgaaactcaggtgctgggtatggtaaattggagcagctggattttgttctatcgtcctgtaattttgctgcttgaaaccgcaatgggataaaccttttctatgctgagtataaatgtgtgtttgcagtaattttattatttgccatttatcctgttttgtcaggtttagctttgattgagagactgat

SEQ ID NO: 5365 - DNA, 1001 bp, Avena sativa
tctgtggtggacttccatccccagctgccgcaaacaatccactggcctataagttcagttggagtccagcaggtgccatccgagctggaagaaatcctgctgtctacaaatttcttggagagatcatcaatgtggatggtagcaaattatatgagtcagcaaagaggctcagactgccggagacttaccagcttttgcgctggaacacttgccaaatggaattccttgatgtatggtgacctatatgggatctccaaagaagcatctacagtatataggtccactcttcgttatgaaggatttagtgagatcatggctatcctggcgaaaattggcttttttgatgctgaaaatcatccactcctagaagaaactaatcgcccaacatatagaatgtttctcgatgaactccttaatgccaataatatctccacatctaacacgaaggtaaatggtgaagaatctggaggacatgatgatgaactgatttcaaggctcatgatacttgggcattgcaaagagaaggaactagctgtcaagatactcaaaaccatcaagttcttgggactgcatgaggagacagagatacctaaggattgttcaagtgcactcggtgttatttcccaacgaatggaacagagaatggcatatggcaacgatgagcaggatatggtactgctccaccatgaagtcgaggtggagtacccggacgggcgacccacggagaagcaccaagcgacgctgctggagttcggaaaaaccgagaatggcaggtccaccaccgccatggccctcaccgtcggggtaccggcagcgataggagccctgctcttgctccagaacaagatcaagaggaaaggggtgatccggcctctggagcctgagatctacatcccagcgctggagatcctggaagcgtctggcatcaagctgatggagagagtggagacttgaggatgggatgagaatccacctggtatatatgctgcaagagagaggca

SEQ ID NO: 5366 - DNA, 752 bp, Avena sativa
aggacaacaaccttctcggcaagttcgagctgtccggcatccctcctgcacccaggggcgtcccccagatcaccgtttgctttgacattgatgccaatggtattctgaatgtctcggcggaggacaagaccaccgggcagaagaacaagatcaccattaccaacgacaaggggcgcctcagcaaggaggacatcgagaagatggtgcaggaggcagagaagtacaaggctgaggacgaggagcacaagaagaaggtggactcgaagaacgccctggagaactattcctacaacatgcgcaacaccatcaaggacgacaagatcgcgtccaagctcccggaggctgacaagaagaagatcgaggatgccattgatggcgccatcacctggctcgacaacaaccagctcgctgaggccgaagagttcgatgataagatgaaggagctggagggcatctgcaacccgatcatcgccaagatgtaccagggcgctggtgctgaaatgcccggtgggatggacgaggatgttccagccagtgctgccggcggcagcagcggcccagggcccaagatcgaggaggtcgactagatgattgaggaggatgttttgaataatttgtggctctatggtggattttagtatcgttctgcagttttaattttgtacgggcatatatacgttgcccccagcttatgttccaagtttgaagcaataaatttagtaatagtagacattatacctgtttctctgaca

SEQ ID NO: 5367 - DNA, 883 bp, Avena sativa
aggttttctacacagcaacagtgattctttcaggctcgaagtatcccacctctcatcttcatttctaccagttttggaaaattaagaagatgttgaataaagaggaatctaatctgaatagaaagctattgaatggacaaccatcaacccaggatctaacaattgcacgtatgataaaacaaatgcaaatcaagttcaatcagtattggatagagacatacaagtcagcttgcattcccgtcatacttgatccgaggttcaagtacgacttccttgaatttctcttgaatgactttggaagtgaagaggaggccagaaaatggatgagtgaagtgaagcaaatcatggaagatctctttgatgaatatagcaaagaggtttctgttcagtcatagagagaaagtgatactgaggtggaagatgatgatgatccacttgcaaagtgggatcagtacatgaagttcaaaagagggcagtcgagcaatgagctagattgatatttgaaagaagatttgacacctcgaaaagaggaagttgatattttagaatggtggaaaacaaattcttcaaagtaccctattctctccaaaatggcccgtgacatattggcaatcccagcttctatcgttccttcggagtctgcttttagcatcggaggacgcgtcattagcgactataggagcagtctcgcatgctctaccgttgaggccctgatatgcctccaggaatggtttaaggcagccgatgaatcggaccatgagtagaaacttttctgttagctaggatcgcatcactacaggagctccgtcgaaggatcggcgtgtcgtcgacatgaagtaagatcagcaattggtttcgagggagagcaaggcacacaggggat

SEQ ID NO: 5368 - DNA, 878 bp, Avena sativa
ggcgccattctgatccgagtcgtgtcaaattatgttgcattgcaaggccttgaaggcaaactgttggccgcggttcgatctgcaactgatgtaactgctgatccgttgaataaatggatcattaggttacagaaatactctcttcgttccataaaagaaacgatctcagccttcacagtacacacagatcacgatcttgcaccatggcggttggagacgacctgaagctgctcggcacatggcctagcccgttcgccatccgggtgaagctcgcgctcgccatcaagggcctgagctacgagtacgcggaggaggacctcgccagcaagagcgagctcctgctgagctccaacccggtacacaagaagataccggtgctcatccacaacggcgtgcccgtctgcgagtccaacctcatcgtggagtacctcgacgaggcgttcgccgccgccggcccggccatcctccccgccaacccgtacgaacgagccactgctcgcttctgggccgcctacgcggacgacaaggtgttggcgtcgtgggccacgatgctgttcaggggcaagacggaggaggagaaatcggaagggaagaaggcgctgttcgtggcattggagaccatggagggcgccctcgccaagtgctccgacggggagggcttcttcgccggggacagcgtcgggctggtggacttggcgctggggagccagctctcctggctgaagacggcggaggtgatgtccggagagaaattctttggcggtgacaagaccccgctcctcgccgcgtgggcggcgcgctttggcgagctcgacgctgcgaaagcggccttgccggaggtggacaggatggtggagttcgtcaagatgaggcaggca

SEQ ID NO: 5369 - DNA, 665 bp, Avena sativa
gaaattgttaagcagggagctgaagtagttcggacagctctcaccaaagcatttgatcagctgcaggcagcatataacgggaaaattgttgggctggtaatatccacaaatgaagcatcaacatccttggcatccatcattgatgcaccatcttcattgcatatctcaagacggctagcagaagcaagcaaaactaatgcttcagcttctatagctgctattattcttgttagattgagtttggcatggactactgggatcatccttcttatctcgactctcatagggatttgcttgctcatgaacatgccgcttaccagggataccctcctgtattcaaatgtcaagcttgattagtttgtgttatatatgatttttcacacgacgacatggaagttttctacagcctgtgtccttttcttgtgaatcctgggttttacagtatagccgatcgtttgtttgctgtacacccagtgtagcataaaacactgcttctatgtggatccctcatgtgaaactgtattgctactgcctgtatgggcttctcttgtttccagtaaatatcaataatcgggaggagtgtattttgttaatatctttgacgattgtattatcgcggaatgcttagtatctgaataaattcactgctcgaatattcaaaaaaa

SEQ ID NO: 5370 - DNA, 765 bp, Avena sativa
aaccagacgccacaactgagagcttcctcactcgagaagcttagcagcaaccatgaagaacaccaagctcgtggcggtcctcctcctccaggccctcctggtcatggggatcctcgctcacgtgaacgccgactatttccccaagtgctgcaacaactgcaggtccttctcgggggtggacgtctgcgacgacacccaccccacctgccccaagggctgctcggcgtgccgcacggtgacgacgagccccaagaagacgtaccgctgcgccgacatgaagaacaccgtcgacggcacgtgcgggggaccctgcaagaagtactgaagagaggaaggttgaaattgataaggatctgcaggctatgcaacctctttccactaagaaggaaatgatgaggttttcatcaaactgggtgctgataaggatgctttgaagaagaaagaaaatgctgaacgtgatgagcgtgctaagaagtctgtgagcatcaacgagttcctgaaacctgctgaaggagaaaggtactatggtggccgaggacgcggcggcaggggacgcggtgaccgcggaggcttcagaggtggattcggtgggggctatcatagcccacctgctgctccggcgattcaagaccagaaccagttcccaactctcggtgggaagtgataatcttaagcgtcgtggaccttaattttgttgttaccatatatttctgtgcgacttccattcggacaatatcgtgtgctgtatgtggatcattcgctctt

SEQ ID NO: 5371 - DNA, 544 bp, Avena sativa
  modified_base (533)..(533): a, c, t, g, unknown or other
tgtctacagcaactgttaaactgatagctctagatggagaggagaagataggatgctcagttggaacaggcccagttgatgcagcttacaaggctgttgaccaaataatacagattccaactattcttcgggaatatagcatgacttctgtcacagaaggcattgatgcaattgcaactacccgagtactcatcactagagatgtcagcggtgatgaacatactacgtctggttactccaaccgttcctttagtgggagtggtgcggctatggacgttgtagtgtccagtgtccgagcttacctgagtgccttgaacaagatgtccagttttatcggcgccataaacgccagcagcgaagcaccggagaccataagcgttcagagctcagaatgatcgtcgacatcccttgtcgcatctccagagcatcttgaaaggcctggcgagaagtgttcaaattcctgcattccatgttactagtaaaggtctcagttcgtgttgtagaaactggtttaactggttatycagttgggncatcttaaggt

SEQ ID NO: 5372 - DNA, 1005 bp, Avena sativa
tggcctcaagtgcttggcaccaatcaaccttaaccagcaggggtctacaccattgtgattgggagtcacatctcaaccatctatcactatggcttcgcaaaccttatgatgcgcaggtatgttgatgccaccaaggaattcaacaaaattctgctttatattctgaagtataagcagtaccaccagaaatctcctcagtatgatcagattctgaagaaaaatgagcagatgtatgcactgttggcaatttccctctctctatgcccacagaacagactcatagatgaaaatgttagcacccagctgaaagagaagtacaatgacaaaatgacaaagatgcaaaggtttgatgaagaagcttatgctgcttatgatgaactattttcgtatgcatgcccaaagttcattactccatcacctccagtcctggaccagccacttaccaattataaccaggatgcctatcgtcttcagttgaagctgttcctttatgaagtgaagcaacaacagttgctttctgggatccggagttatctaaaattatattcagcaataaccataaccaaacttgcccaatatatggaaatggatgaggcaacacttaggtctatccttctgacgtacaagcacaaaatgcatgctgttgacaataatggaaaaattgtttccagcgcagactttgatttctacatcaacgaggatgttattcatgttgtggagtccaaatcggcaaaacgccacggtgattactttttgagacaaatcttgaagtttgaagaaacgatggctgagttggaaaaggtgcagcttgactgagcatggcagatatcatgttgaagagaaacatcccaggattctaccttttttcttcttttgtcctattataaggagtggcacctgtaatgactaagtttagcggagcattatttgtgctttccggtacaccttttgactccagtgaagatttggctattgatgtatttcctgttaatcccggttgctagt

SEQ ID NO: 5373 - DNA, 828 bp, Avena sativa
gatgttttcggcaacactcagcaaggagatccgtccgatatgcaagaaatttatgcaagatccaatggaaatttatgttgatgatgaggcgaagctgacccttcatggtctagttcagcactacataaaattgactgaggcagagaagaatcggaaattaaatgatctcttggatgcccttgatttcaaccaagttgtgatatttgtgaagagcgttagcagggcagcagagctgaacaagttgctctgtgaatgcaacttccctgcaatctgcatccattctggcatgacccaggaagaaaggttgacccgatacaagaacttcaaggaagggcacaagaggatcctcgtggccacggatctagttggcagagggattgatattgagcgtgtcaacattgtgataaactacgacatgcctgactcagctgatacatacctgcacagggttggaagggctggtcgtttcggcaccaaggggcttgcaataaccttgttcctctgcctcagactctgacgtcctaaaccaagtgcaagagaggttcgaggtggacataaaggagctgcctgagcagattgacacttcgacatacatgccgtcataaacaagcggtctgcgcggcggccgagggagggagggaggaagaaggtggaagatgggcaacaaaacaccatggcatttgttttgcctgcgtccctgctagggtccagcagctgtaccatttcctagtcttttgtgcttgtaggctgaatttttatgttaggatatatatatgctgaatatgtattatgcggcacaaggaagatgggatgttcttatcttagtat

SEQ ID NO: 5374 - DNA, 1010 bp, Avena sativa
cgcatccaaacacgccttctgctggctcgatttcgtcatcttcagctcaaggggaaggtggtaacgacttgaggattcttgtccccagggctggtgacttatcaccacgtgctaattctattgaagaggcaggcaaccaaagtcctggggtgcttacctatgatgccgagcaagacgctgttgtttcatctggaaatagtactcctgtatccagtcctaggtttttcaacaggagacattccactggacaatcaactccagtaagtaatgacagggcagggccatcagatattcagtccttctcagactctctaaagtctcgcttaaatgcggtctccacaaagtacaaagaatctattacaaaaagtacccgagggtggaaggagaggcttttttcacgcaactcgtctgtgtcagatcttggttctgaagtgagacgagaagttaacaatggaattgcgtctgtatcaaggatgatggagcgtttggaaactagaggaagtagtagaacaagcgatagcccaacatcatctacttctgaagtttgtcccactgcagaaccaagcaatgagagggttacagaaagcaactctaataatactactagtagcactagcaacacttctgccccttgtgtgacagcatctggttcaaattagtgtctgctactgttactgaagaaggcctgcatgttcccattcttcatcttcaaaggtatgctcgggtggcttggtaaggatcgaaccacatgatggggccatctcctcgactgttgcataaatcagctccagaaaatctgaatgataatttgatgtattggtttgataaaagggcggttggcctgaggtgttgcctaggcagtcgatttgtctcctgtttcatctctgtaattaaaattccttcctagacttttgtttactggtataaataatggatctggtaatttcatagcatgccttatcgtgacaaatatgactggaacagccaagagttccatgctgttgcatggc

SEQ ID NO: 5375 - DNA, 976 bp, Avena sativa
actactcagacgtactatctatacatcggaatcacggaagcactggctgatgatgggaagttcttgcttgctgcacgcaaatgcagaaagcccacatacacagactacctgattcccttgatatgggtgatatgtcaaaggggagtagcacctgtattggcaagctaaggtcaaactttctgggaacaaagtttactgtctacgatgctcatccaccatatgatggagcagttgtatcaaagagccggtctgcacgtgtggttggtttgaaccaggtctccccaagagttcctgctgggaattatccagtttcgcagatttcttatgaattgaatgtattgggctccagaggtccaagaaggatgaactgtgtgatgacttctatccctgcatcagctgttgaagaaggaggcaaagctccaacacagactgaatttcctcttagtaacctcgactccttcccatcaattccattcttcagatctaaatctgctcggatggacggtacagctccacagatacccgctcagaacgaagagaagctggtgctgaagaacaagtctcctaggtggcatgaacaactgcaatgttggtgcctcaatttccgtggacgggtgactgtcgcctcagtgaaaaactttcagctggttgcttcagacgaaaatggaccagctgagcaggacaaggtgattctccagtttggaaagataggcaaagacttgttcaccatggactaccactatccgatatcagcatttcaggcatttgcaatatgtctgagcagtttcgacaccaaaattgcttgtgaatgagacaaggtactaggagtatggtggcagctggaaggaagcaggaatgtccaagttgaaggatttggtaaccttgaagttgctattccagtggtgctgcggtgtatatatagcagctatatatatatctagtttatttccgtcctgattaatatacggagtacatt

SEQ ID NO: 5376 - DNA, 647 bp, Avena sativa
agtacacatctggtgccagcagtatatcacagaaggcagggcttgcagccttgaacctaggctatgccggtggtgaagcagtttcaaccatggtcaaagcattccaggagcgccgggattaccttgtaagaaatttcagggaactgccaggagtcaaaatatcagaacctcagggtgccttctacttgttcatcgacttcagctcctactacggatccgaggtagaaggttttggtactatcaaggactctgagactctctgcatgttcctgctagagaaagcacaggtcgcgcttgtccctggggatgcatttggagatgacaagggtgttcgtatctcgtacgctgctgcactgtcgacactacaagatgcaatggagaagataaaagaagcaatggctctggtcaagcccccagttgcggtttaatgaaggcagagtgttgaccaacggcatagcaatgccttgtattaaacggtgtctattgagtagtaaagcatggcatgttgtaaaagagaaagttcatcatccttattttgtgcaaggttgcacatgatctggtttgtttcaaaattatgtttggtggtggctgagaactcagcatatctgcaatttagaaatgaaaataatgttttagttagggtaaaa

SEQ ID NO: 5377 - DNA, 918 bp, Avena sativa
agacaggttgtatgatgccattgattgcatcctatctttcatgaatacagatggaacattttctacctacgaatgcaaacggacattcgcttggttagaggttctcaacccttctgagagttttcggaacattgtcgtggactatccatctgttgaatgcacatcatctgtggttgatgctctcatattatttaaagagacgaatccacgatatcgaagagcagagatagataaatgcattgaagaagctgttgtatttattgagaacagtcaaaataaggatggttcatggtatggctcatggggtatatgtttcgcatatggatgcatgtttgcagtaagggcgttggttgctacaggaaaaacctacgacaattgtgcttctatcaggaaatcatgcaaatttgtcttatcaaagcaacaaacaacaggtggatggggtgaagactatctttctagtgacaatggggaatatattgatagcggtaggcctaatgctgtgaccacctcatgggcaatgttggctttaatttatgctggacaggttgaacgtgacccagtaccactgtataatgctgcaaggcagctaatgaatatgcagctagaaacaggtgacttcccccaacaggaacacatgggttgcttcaactcctccttgaacttcaactacgccaactaccgcaatctatacccgattatggctcttggggaacttcgccgtcgacttcttgcgattaagagctgatatggaaacaaacatggatgtctaggctgcgaggaataagaacattgctcccacgagcattcatgcgttattttctttgagaaataagttctcttcctaccgatgtcatcatgtaacttttcggaatattttatgtgtaattggaggtgcacatttactagccatgtatggca

SEQ ID NO: 5378 - DNA, 744 bp, Avena sativa
tcccgggatcccttctgcccaagcctccttctaccggcggcggagacgacgacgacgacgacatggtgcagcgtctgacctaccggaagaggcacagctatgccaccaagtccaaccagacgcgggtcgtcaagaccccaggtggtaagctcgtgtaccagtacaccaagaagagggcgagcggccccaagtgccctgtgaccgggaagaagatccaggggattccccacctgaggcctactgagtacaaaagatcaaggttgtctaggaaccgcaggactgtgaaccgtccctatggtggagtgctctctggacctgcagttagagaaaggatcatccgtgctttcctggtcgaggagcagaagattgtgaagaaagtcttgaaaatacagaaaaccaaggacaagactgcctcaaagtagagaacttgtttgaaactgaattgagaggctgttatgtaaacaaggaaatatttttgtggatggtgatcatgaatggttttagtcccttctagctaaatgctttagtatgtcaaggagatctgttgaattcagagattgtgagacatttgatacccatttgctattccatttctgaatctcatgttgaatttgcaatttgtgagtccaccttttcatgccttggtcagtataaccttggaacatcagctgctgtgttgcattgctaaccttttgtggatggtgatcttggttttagtcaattctagctaaatgctttagtatg

SEQ ID NO: 5379 - DNA, 692 bp, Avena sativa
ctgttgtagtaagatcactagctaatagctagcttgctcgatcagtgcaatgccgccctcccagcttaccctcttccttgccctgaacctggtcctcctagccaccgtcgcccatggctgcacgccatactgccccacccccacgccgatcatcccaccgcccgtcctgcccacgccgtccaccggccactgctcgatcggcaccctgaagctggaggtgtgcgccaatgtgctgaacctggtcaagctcaagctgggcgtgccagcgaacgagcaatgctgcccgctgctccacggtctcgccgacctcgacgccgccctctgcctctgcaccgccatcaaggccaacgtccttggcatccacctcaacgtccccgtcgacctcaccctcctcctcaaccattgcggcaagaaatgccccgaaaacttcgcctgccccatctgatttatccacccatctcaaaccatgcatcgttgtgacatacatcatgtccctccgaatgcaaatcatcctcgtaatttgcatgtcttttcatttgtttcagttcatatgattccttaagtttccattcaggcccaaagtgtatcttccctatgcttggtgtctgaatgatttgcatatttgtaaaaggatatacacactcttgtacacctggaattaatataaagtttattcatgttgtgtaaaaaaa

SEQ ID NO: 5380 - DNA, 519 bp, Avena sativa
ttttggactctgaaagaaacttttattcatggacatacggacttggcaaaaagagtccccaacagactatgccaataatcacacaagactagaaaatgccacaacgtggagaagccacgctttctggcttattacatgcatcaactttatttatatcgataataaacatatgacagaggtgaaactgaaagaagttgaaaagcatgcatgcacacatgcatgaagatggatggatcgaccgtcgttgatagcacgcacagccttgctagctagccagcaatgggagcgttggggccacaaaccttgctaaggccacaccagcaacctttcccacatggactcgacagggagcatggaccgccacactcgacaggcaaagccgaggaagccggcgggaggagatcttcctcggccaccatgacgaggatgtcaggcaggcgagccatggccgtcgtcggagccatggccgcaagctgcacaatcaccgccatcgtgaccatcaggaccacctcccgggaa

SEQ ID NO: 5381 - DNA, 645 bp, Avena sativa
agcaaagctcgcatgaatacacagacacacacacagactgctgctatggcaagcattgaatggatgtaggggcgagcgagcagtcctcgagaatgcataggcgccgtagcaagccagactccaaaaggttttttttaggggaataaatatatatatggaccaggcagtgtataaatatgggatacaaagtacagtctcgaccgtatgtgtctcctcaaggcagagaaaggaaaaaatcaagcaccgatacactggtttgccggccacgcagcacgcaaagctggctcgactactcgtactctctcgacctcacacggggagatgcatgcgagcttttattcagtataaataatataggtgtgtgtgacgcgccggcgccggcggtggaggagtagtggatggaaggatcagttgatggagttgcagttgacggaggtgctgatggtgtaggggacgctgacgccgcacttggacgggatgctggcggcgttaccggccttgatcccactgatgctcccggccaatttcttgaggcagttgcacgccgcacgcttgtcggcggtgctcttggccgagctggcgaggctcttgacgccgctgcagcagcccgctgacgggctggcgccgccacgagcgtatcccggg

SEQ ID NO: 5382 - DNA, 916 bp, Avena sativa
agatgaacaagaggtcattcaagtacgcgtgggtgcttgacaagctcaaggctgagcgtgagaggggtatcaccattgatattgccttgtggaagttcgagaccaccaaatactactgcacggtcattgatgcccctggacaccgtgacttcatcaagaacatgattactggtacctcacaggctgactgtgctgtcctcatcattgactccaccactggtggttttgaggctggtatctccaaggatggccagacccgtgagcacgcactccttgctttcactcttggagtgaagcagatgatctgctgctgtaacaagatggatgccaccactcccaagtactcaaagggccgctatgaggaaattgttaaggaggtctcttcatacctcaagaaggtcggttacaaccctgacaaggtgccgtttgtccccatctctggatttgagggtgataacatgattgagaggtccaccaaccttgactggtacaagggccctaccctgcttgaggcgctcgaccagatcaatgagcccaagagaccctcagacaagcccctgcgtcttcccctccaggatgtttacaagattggtggcattggaactgtgcctgttggccgtgttgagacaggtgtgatcaagcctggtatggttgtgacctttggtcccactggtctgaccactgaggtaaaatctgttgagatgcaccatgagtctctcctggaggcgctccctggtgacaatgttggcttcaacgtcaagaatgttgccgtgaaggatctcaagcgtgggtttgtggcatccaactccaaggatgaccctgccaaggaggcggccaacttcacctcccaggtcatcatcatgaaccaccctggtcagatcggcaacggctacgccccagtactggactgccacac

SEQ ID NO: 5383 - DNA, 787 bp, Avena sativa
tttaaacagaaataacagatgtaaacattaacccatataggcatacgaagataatttgaatccattacaatcacttgcttttacaaatcaaggataaaaaccaatgacaatgccgactgatcggagttacataacgcacatatatatgtgtgtttctttgtactactaacttttgcttagcatggccaaatcactgtcaccatgtgttaacatgccaaaacttctctcatgctctcggcactggtcatcagttgctactttttctttacaccggaactatgaaaccaaataacatagaaccataacctaaagacagaatactagaacatggtaagagaggatattatgatatcccatataccctaacggcaggcacatttcagatggttctgaaaagctcaggtaagggcgtaactgttgacatgcccgcctcatttgctgaattcacagcccagggtttggcttcagggcagcattaggccctagtccaagccaagcctggttctcaggctccttcttgactggtgttgcgtctgaaggagaagcttggtatggtgccttggcatgcagacgatcctttctcttctcaaggaaccggtgaagtgacgccttcctagcaattggcatatcagaagtgcgagcaggcttctgagcatcagcctgagcaccaggcatactactctccaggaccggcacggccgtctggaccttggtgctgtcggtagcagctgcgggcgcagagacgttctgaacgacagggttgcccttgctagccagctgcatcagg

SEQ ID NO: 5384 - DNA, 915 bp, Avena sativa
gcttccatcatctcgaagtctggaaaagcacttgtttcaaggcaatatgttgacatgtctcgaataaggatagaaggattacttgcagcattccctaaacttgttggaactgggaaacaacacacttatctcgagactgaaagtgttcgttatgtttatcaacctattgaaggcctctatctgctccttatcacaaacaagcagagtaatattcttgaagatctggacacattgaggctactatccaagcttgtgcctgaatactctgctctggatgaggagggtatctgtaaaacagcatttgagctgatatttgcatttgacgaagcaatctctcttggaaacaaggaaaatgtaacagtgcaacaagtcaaacaatattgtgagatggagagccatgaagagaaggcacataagctgatgatgcagaacaaaatcaacgacactaaggatgtcatgaagaagagagcgagtgagcttgataaaatcaggatggagaaaggcaaacttgacaaaggattctcgtcaatatctggtccccgtgtaattgagaaaactttcagtgacatgaatatttccggtactggctttggaagtggttctagtgtgaacactgatatggactcatttgttagtaaacccaaaggtcgtccgtcagcagttgctactgctcctggtaaaggtcctggtggtatgaagttaggcaaatcacagaagacaaatcagttcctagaatctttgaaagctgaaggagaggtcattttggaggatgcacaaccaagttcagttttgtcaaggtcctcacctcttctaccaagtgatcccgtcacagtgaccattgaagagaagcttaatgtaatagtcaaaagagatggaggtgttaataactttgatgtgcaaggaacccttgctctt

SEQ ID NO: 5385 - DNA, 1004 bp, Avena sativa
caaggcgccggtgccggcgaagagaagacggcgcaggtgacgaaccgctgtcgagaagaggccgaagcagttcggcatcggcggcgcgctgccgcccaagaaggacctgcacaggttcgtcaagtggcccaaggtcgtgcgcatccagcgccagcgccgcatcctcaagcagcgcctcaaggtgcccccggcgctccaccagttcacccgcaccctcgacaagaacctcgccaccaacctgtttaagatgcttcttaagtaccgccctgaggacaaggcggctaagaaggaaagacttctgaagagggcccaggctgaggctgaagggaaaaccgttgaggccaagaagccaattgttgtgaagtatggtcttaaccatgtcacctatctcattgagcagagcaaggcccagctggttgtcatcgctcatgatgttgacccaattgagctggttgtgtggctcccagctctgtgcaggaagatggaggtcccatactgcattgttaagggaaaatcacgccttggatcgattgttcacaagaagacctcctctgttctttgcctgaccactgtcaagaacgaggacaagcttgagttcagcaagatcttggaggctatcaaggcgaacttcaatgacaagtttgatgaagtgaggaagaagtggggaggcggcgtcatgggctccaagtcccaggcgaagaccaaggccagggaaaggctcatcgccaaggaggccgcacagcggttgacctaagcatagccttctatgtcgagcatatgccatgtagtttccctttcagtgtcctgattttgacgaggaacttcaaaactcttttagcactgctgtggaatcaatcttattgtggttgtctggttttcattatggtcgccagaccatgttggtaactctgcaaagatcagatgaggttgtcaccatgtttggtttctatatagtaagtactatctattatgttgagccggttaatcgtgtgtgttcagccaga

SEQ ID NO: 5386 - DNA, 889 bp, Avena sativa
tctagggctcttgcctaaggtagtagcaataggacaaaaccacaacgacagcaaaatgacaggccacgcacaaactagccagttagtatacacatcagctggatctccaaatgcacaaatctgataaacgaaacagttctccaagtagaaaatttccaaatgagggtagcagaactgcatgcataacaaaggttttaccaacgagattgtactatcacagggttaccaaactaaaataagaggacacaggttctcaacaaaactgatggcacggagaagcctgatttcttagtacttgatcggagccagaatctccagctgagttcccaacttctcctcggcagccttctcagccttgacacggagcttcgccagctgctttcgcctgtcatacgcaaccttggccttctccttcctcttctcctccagctccctgatggtgtcgtggtagttccatccgacctccttggagagctggccgaggaggcagtagttgtgaccgggctgcagcctcagaaccttgagcgcgtcggggatgaccatgcgcttggtcctgtcgtacggtggcggcacgccctcgtacgccttgagccgtgcgagcgcagcctcacccctcttggtcttgtgtggaatcataccgcggatggtgcgccagaggatcttggccggggcacggaagtggatagggccgtgggagggcttggtgttcatcctcttgcggaggaagcggaggtacttcatcttctggcggactagcccgccggacatgcagatctcctcgcagcggacgaccaccacgcgctgcccgttgagcagctccttggcgatgatcgaagacagacggccgagcatgtggtggcgcgcgtccaccaccacgcgccgtgcgcag

SEQ ID NO: 5387 - DNA, 699 bp, Avena sativa
ctacgaggatgcaaattctttggaaccatctgtgacgggtgtattagtgtaaggtcaaacttgagtactggtttttaatattccatgttaattgtctgccaaacttacttggttaatgtgcagtttcgtatccactcctgatccagttggcaacaaatactatcttggccctgctccattggaggatatggcaaggcaaattgctacagccaatggccctactggaaataatagggactacctgttctcaatggagaaggcattgtccaatataagccatgaagatgattccatcattgagcttgctgatgcggtgagaagggtgctgagtaggtcgaatgagaagaagattaccagctctgacataccacttaaatcgcatactcctcttgtgtacttgtctccgcttcttgaaggcattgtcatggattcgagatagtaagagcggcatgccttgatcagcagagaagatgcaattttcctctgaccataatcactcttgacattctccgatgaaagtttggttgtttgcttcagctctggcatcactgatgatccatatgtactgatttacttgtggcaaaactatacagcttccagagtgctaatgcgaaagcctgggaagcattgttgcttcttttgatatcctaataataaatgtatttggctattttagacaaatgctattgttgtagtgtc

SEQ ID NO: 5388 - DNA, 699 bp, Avena sativa
gataatggttaaccaagctgatgatgttgcaggaataatctcgtctaaggcaggcctgcagtatgttggtcctgatgtggatgctatgaaagctgtggctgatgcctactcaaaaagatctctcaagtactttgaaaccgctctccgtgactacaaagcccagctggaggaagacccaattgtccacaggcacctctcatccctgtatgataccctcctggagcagaacctctgcaggctgattgagccctactcaagggtggagatcgcgcacgtagcagagatgatcgagttgccaatcgaccatgttgagaagaagctgtcacagatgatcctggacaagaaattctcagggaccctggatcagggcgctggttgcctcatcatcttcgaggactccaagaccgaggcgatcttcccagctactctggaaacgatttcgaacgtagggaaggttgtggagagcctttacaataggtcggccaagatcatggcttgagaggagatcttttattattgacgtggtgtctctgattaaaaccttacttgatctatgttaagagtcttcaggacatgatattgtgcgtagcgccttttcatccttgcaaattgttttctttaagctaaatgtctcgctcatggacaagaaggcactgttgcttctgcgtgatggaaatactgtgatttaaaccaaaaaaa

SEQ ID NO: 5389 - DNA, 919 bp, Avena sativa
atagctatcatgaagaaatcttcaaagttccttccagttattggttggtccatgtggtttgcagaatacctctttttggagagaagctgggcaaaggatgaaaaaacgcttaaatggggtcttcaaaggttgaaagacttccccagatcattttggcttgccctttttgttgagggtacaagatttactccagaaaaacttttagcagctcaagaatatgcagtctcacagggtttgacagcacctagaaatgtgctgattccacggacaaagggatttgtgtcagctgtaagtattatgcgtgactttgtcccggctatatacgatacaacagtgattattcccgaagattctcctaaaccgacaatgctgcgtattcttcagggacaatcatcggttgttcatgtccgcataaaacgccatgcaatgaatgatatgcctaaatcggatgaggatgtttcaaaatggtgtaaagacatcttcgtacagaaggatgcattattggacaggcatatagcaactggtacttttgatgaggaaattataccaattggtcgtccagtgaaatctttggtggtggttctgtcttggtcatgtctcctcctatatggtgctcatagattcttacaatggacccaactcttgtcgacgtggaaaggagtcatcctcttcgctactggactggcaatggtgaccgccgttatgcatgtattcatcatgttctcacaggcggagcgctcaagctcagctaaagcagcaagggaccgagtgaagagagactgagagctcgtgtgaaattcagtctataggtgaattgccaatttattatgttcagaatatatgtagacacaggcttcatgggtctgttcttgttgtactcgttaagagctacaggagttttgtgtggaaagaactggga

SEQ ID NO: 5390 - DNA, 891 bp, Avena sativa
tgagctgagctgtctcatcaagttcctggaaaggtgtcaacggagatagatgcccggttagcttacgatacccaaggaatcattcagagggtgcatgaactgttgcagatatacaatgaacatgatgtcctgtcagaacgtttgttattcaaaattcctgctacatggcaaggtatagaggcctcaaggttgcttgaatctgaaggaactcaaacacatttaacattcgtttacagttttgcacaagcagcagctgcggcacaagctggggcatccgttgtgcagatattcgtggggcgtattcgggattgggcaagaaatcacactggtgacccagagatagatgaagctttaaagaagggagaagatgctgggcttgccttggtgaagaaagcatatgcttatatccacaggaatggctacaaaacaaagttgatggccgctgccgtacggaacaagcaagatgtatttagccttgtggggattgattacatcatcgctcctgtgaagatattgcagtctctggatgaatctgtcactgatcctgatgaaaagtatggttatgtccagaggttgactccttctcttgacaaggtgtacaacttcacggaagaggagcttgtgaagtgggaccaactgagtcttgcggctgcgatggggccagctgctgaagaactgcttgcttctggtctggagggatacgcgaaccaggcacgccgggtggaggagctcttcgggaagatctggccacctcccaatgtttaaagacagtccctcgctgtgcaataggctttttttctccttccaacaaagatcaacatgtttgttcttgtcatgtccatgtttaccttttttccttcaaattacccgccagattgatctgaagtccga

SEQ ID NO: 5391 - DNA, 802 bp, Avena sativa
agaggcttgattcctatttggagttccagtctgctaactccaccttgctgcaaggatatggactggttcatgaggagtgcataaccaaaatgcgactgatgtctctgcttgatctgagtagccattgtgctggtgaaatcccttactctgcaattacaaaagcacttgggatcaatgatgatgaagttgagtattggattgtgaaagcaatatcatccaagattttggactgcaaagtcgaccagcttaatcaatttgtcattgtcagtcggcatactgagaggatttttgggataccacaatggcagagtctacgctcaaagcttctagtgtggaggggaaacattgcgaatgctatcagcacaatccaagctaacaaggttactgaagatggtgggcaggggatgcaaggattgatgatccgctgatttgatgggagtccctgaatcgagattatagcctgagagtttagatgagcaatcctttttgtattagatatcttgtaatccaaaatacttgttcctgtgactgttcggttgcaacggcatgcctaagcaatttcatgttgcatgaattttgtagacaaaaagccatgcacaaggtcagccgttacttgttatttcctctgttcctgaaggcagcttacatttaggaacggaaggaggtagtagtcgttacagagtcctgattgttcatactggatgcttgtttatcgtgatattgtttctttccatcttctgtgattggtaattattctatcacatttttatatccaaacaccttgtgcattttggtagaaaaa

SEQ ID NO: 5392 - DNA, 945 bp, Avena sativa
gagaagacaatgacacttgatgcgtgcgctccactgattgccacccttccattggaagtccgcacgaaaataggtgatttcattagaggatcgttttctgttttccaagacttggatttctcatttatggagatgaatccattcaccctggtaaatggggaaccataccctctggacatgagaggtgaactggatgacacagctgctttcaagaactttaagaagtggggtaaccttgagttccctctacctttcggaagagtcatgagcccctcagaaagttatatccatgagctggatgagaagacaagtgcatcactgaaattcaccgttctgaacccaaaaggtcgcatttggacaatggttgcaggtggtggtgcgagtgtcatatacgctgacacggttggtgatttgggatatgcttcagagctaggaaattatgcagagtacagtggggctcccaaagaggaggaggttttgcagtatgctagagtggttttggattgtgtcaccgctgatcctgatggccggaagagagcccttctcattggagggggtatagcaaacttcactgacgttgctgctacatttagtggcatcattcgggctttaagagagaaggaatccaaattgaaggctgcacgggtgaatatttatgttcggagaggtggtccaaactaccaaactggactcgccaaaatgcgtgctctaggtgcagagcttggtcttccaattgaggtctatggaccagaggccacaatgactggaatctgcaagcaagccattgattatgtcatggcggaagcataattcatcatcatagtatagttcaaatgtttgccgttgtgtccattctgtctcatataaattgagtgaaacaaacggagaaacataggtttgtgggggagaaattactggcataacacaataatacatgtatcttgc

SEQ ID NO: 5393 - DNA, 669 bp, Avena sativa
ggcgtcccttccttcaccggccccgccatcgtgccttgccacatcaccaccatgtggctctggttcgtactgcggcacgtcgaggccatcgagatacacagcgggttcgacatcccgttcaaccccaccaagctcatcccgttctacggaggggcagagcaccatgactaccatcaccgcgtggggcaaatgagtcagagcaacttctcctcagtattcaccttctgcgattatttgtacggcaccgataaaggttacaaacttcacaaggcaagcctaacaaagctcaaggagatggcggcggaaaacaatctggagcaagcagccagtctggagcaagcaaggaagaacgatttcgacaagaaaccatagacaattaccagcaaggcatggcagtaaacagtgtggggcatggaataatttcacatattggaaaccatatgtcgtcagatcgagtaataataaccgtaggcaggcatgtctctttcagatcggatgcacgttcaggctttgtcatgcatgcatgtagtgtgcggtcttctcatcatgatgagcgagatggatcttgtataaaccaaattcgccaaaagcatatgcatgcctactcttgttgcagtaataaaacaagcagctaaattccatatgttcacataaatttccagtgtgtgt

SEQ ID NO: 5394 - DNA, 743 bp, Avena sativa
cacgatattgccctgcaacctcccacgagaagatgtcagagacgcgtttcatatgcttgaatgcaaaaactcttgcggagcttcctactggtagtgttgtcggaagtgcttccctgcggaggcaatctcagattctctataaatatccatcactaaaagttgttaacttcagaggaaatgttcagacacggttaaggaaacttaaagaaggagatgtacatgctacattgttggcactagctggactgaaacggttaaacatggcggaaactgcaacatctgtattatcaatagatgaaatgcttccagcagttgctcaaggtgctattggaatagcttgcaggagcaatgacgacaaaatgatggagtatctatcctctttgaatcatgaagataccagattagctgttgcatgtgaaagagagttcttgtctgttcttgatggtaactgccgaacgccaattgcggcatatgcttatcgtgatagcaatgggaattgttcattccgtgggctattggcttcaccagatggatccatagtatacgagacatcaagaagtggaacatattcctttgatgacatggttgcgataggccaagatgctggccacgaactgaaagcaaaggctggacctggtttctttgatggcttacaatagaaactccaccacgccctgatagtgttgattatttttctcttctttccgtagttattatgatagaagtttgtatcacattgagct

SEQ ID NO: 5395 - DNA, 816 bp, Avena sativa
accaatgcaggcaaccttgcggagacctctgtgggtcttgcggggaaggcgggtgacaccccaacgtgtcaccacaccctcgtatcccttacccttggtgacaccgatgatgtcaatcatctcatccttctggaagacagcatcaatggggacttccttctcaaagaaattgtagccatagtccaccttgtctgcgatggtgccaccattgacctggatctccatcaggtgagccttcttctgcttcaagcccttcatcttccttatctgggtatgggcgataactcggataacagtgccatacttcttcatcttctcaagctgcagctgaatttccttcttgcctgcatcactgtcatacttgagagcatacttggtgaaagccttcttcttgctcttgcaccagttcttgtagaacctcctcctaacgtcttcactgagatgctgagcccagacagtgttaagagtacgaaggccacgaggagtcttcacgtaggcaacaagtccaacaataacaattggtggtgtctcaacaatggtgacagcctcacaggtctccttcttgtgtagctttgaaccaggcttctcgacctcacgcacaatgtgagtcattccagccttgtagccaaggaaggcagtgaggtggcactgtttgttggtgtcatccctggggaaggccttcacctttccgcggtggcgcgagcagcgcttcctggggaggaagccgagggatccgtgcctggggtgctcgaacttacggtgagacatcttccttccttcccctgggaggtggtggcggcggcggatggcggcggc

SEQ ID NO: 5396 - DNA, 811 bp, Avena sativa
gaggaggccgagtgtaccaacctgtactattgcccaaaatgaggtacctgaggatggttgtgtcagagaccctacggttgcatcccccggcaaccctgctggtcccgagggagacgatgcggccgttccaggtggacggctacgacattcctgccaagaccagggtgatggtgaacgcgtgggccatcagcagggacccaggcgtgtggaagcaggaccccgaggagttcaacccggagcggttcaaggacgcggacgtggacttcaatggcagccacttcgagttcatccccttcggcgccggccgccggatctgccctgggctggccatgggggtggccaacgtcgagtacatcctcgccaacttgctctactgcttcgactgggagcttcccaaaggccatgaggttgtcagcgtggaggaggtaggggccttcactttcagaaagaagaccccactcgtgctcctgccaaaacgctaccaccaccacgcgcaggacgagtaggacgcgacctaccctcgctccttgtacttctcgggcacatcaagcatgcatgggccttggaaattttatttgaacgtttaaataaatctcctacttgttccacccttctttaaattataatatgatgacgggaacaatcttggtgatgaagctcctttcatcaaaccccagttgcatgcatatgcaatctcgattaaattgtactgaaataatatcatgtgtaatacatcaagttgtaggtcaataagaggttacatcatgtgtaatatcatcgtcattctgataaccgaggtgcgtggtaaaaa

SEQ ID NO: 5397 - DNA, 540 bp, Avena sativa
gacgtacgttcctacggaacggtaacgtttacgtttacgtaagtacgtcgctattaacttatttttttttttgcaatctaaaaacttgcattccacaattcagactcagagaaccaaggtttagccgaacatgaaataggaatacagtatttaaaccacagaactagatcattgcttgcacgtttcaacagtctccagcaacaagagcaatgcgcatgaacagaacttaaatctaaaacttcagctagatatcacacaaactgaacaactcatttcttcttggcagcagccttggtaaccttggcaccggtggggtccttcttctccacgcccttgatgacaccaacagcgaccgtttgtctcatgtcacgcacggcgaaacgaccaagaggagggtaggtagagaaggtctccacaaccatgggcttggtgggaatcatcttcactataccagcatcaccattcttcaggaacttgggctccttctcaatctccttgccagatcgtctgtcaatcttggtcaccagctcagcgaacttc

SEQ ID NO: 5398 - DNA, 874 bp, Avena sativa
tcccgggatcttggcggctcctcctctaccgccgcctctcctggaactccaacgcctcccacctctgcatagcaaggtacagagtgctagacaaacatggggttgagggacaagaagaggaaccagaggcgcgtgctctcgcggcgctcggctggtcccaagaccggcgagggaaaggatttcctgccgctggaagggaaggagaagaggatcaaggagaagcagcccgaggagccggagaacacggccaccgtcctgtatatcgggcacatcccccacggcttctatgaggaccagatgcaaggtttctttcagcagtttggggctgttaagagggtcaggatttcccggaacagaaagacaggcaagtctaagcattatggatacatcgagtttgagaaccctgaggtggcgaagattgtagctgatgagatgaataactacctgttgtatgagcacaccctgcaaattgcgcttgtcacaccagagaaagttcatcccaaattatggaagggtgtgcggaagggatttgtaccgattgaccgtgtagcaattgaacggaggaagcttagcaaggataggacagtagatgagcacaaaaagatgatggaaggaattgtaaaacgggatgagaagcgtcgcaaaagaatcaaggctgccggtattgattacgagtgtccacctcttgtcggctttcagccttcagctaagaagatcaagtttgatgaggattagctctatagatggcatgtgcatcttatccagtgggagtgatgggactgtttttactgagggatgagatggtgatttcgcttgggttttgtatctttgtcttcgctcaatgttgtactcctccgtttaaatataagatgtt

SEQ ID NO: 5399 - DNA, 688 bp, Avena sativa
cgtcggcgctgccgtacaagaggactccgcacagctgggtcaagactcccgtcgccgatgtggacgatttgatcaccaaggccgcgaagaagggccagatgccgtcgcagatcggcgtcctgctccgtgaccagcacggcattccgctcgtcaagagcgtcaccgggagcaagatcctccgcatcctcaaggcccatggtttggccccagatattccagaggacctctacttcctgatcaagaaggcggtggcgataaggaagcacctggagaggaacaggaaggataaggactccaagttcaggctcatccttgtggagagcaggatccaccgccttgcccgctactacaagcgcaccaagaagctcccggccacctggaagtatgagtctaccaccgccagcactctggtggcctaagggagctttgcatctggtgtgctctttactgcttaaagcttgattgttctggaaaccattcttatgtaacgctttatgagtttggagccaattagacgctgcaaattttccttgtttacctggagattgccgtaaaacctttctggtttcgcaattctgtctgttaaacgactctgttgtcatgtatccagattttgtcagttataattagcggttaccatacaatgtgttctccatgcctgttcatcatatggttcacgttgttgctt

SEQ ID NO: 5400 - DNA, 746 bp, Avena sativa
tatagaaatgctgatgaaggtaaatttcagtcatttcagacatttgcatcactagtattaatcggagtgcatccaacacacttgctacaaaaaagataaaggtaaatagtagccacttacaaaggggagaaaggaccattttctaaacatccaacacgatattgctcaaaaactacagatccacaaaatctgacttagcaccataaacggagtacataacaagtttgcaagacacaagatcgatagcttggatattgttccatccttgaaaagacaaggaattacagcctccttcctctcctaccacccttcctgcgagtgctgtcagttggaactggagtaacatcctcaatgcgtccaatcttcatgccagaacgtgcaagagccctaagcgcagcttgagcacctggacctggtgtttttgtcttgtttccaccagtagcacggagcttaatgtgcagagcagtgatcccaagctccttgcatcttacagcaacatcctgagatgcaagcatggctgcataaggggatgactcatcacggtcagctttgaccttcatgccaccggtgatgcggacgagcgtctctctcccggacagatccgtcacatggatgaaggtgtcgttgaaggaggcgaagatgtgggcgacgccgaagacgtgctctccatcgcggaccttggggccgagcgtcacgttctcctccttgggctctcgggtcttcttcctcccggacatggctgatcc

SEQ ID NO: 5401 - DNA, 661 bp, Avena sativa
cctccattcccagcgacatctcccaagagctcctccctctccccaaccctcgacgcgaaccccaccccagtctcccgtcccgatggcccgcacgaagcagacggcgaggaagtccaccggcggcaaggcgccgaggaagcagctggcgaccaaggcggcccgcaagtccgccccggccaccggcggcgtgaagaagccccaccgcttcaggcccggcaccgtcgcgctccgggagatccgcaagtaccagaagagcacggagctgctcatccgcaagctccccttccagcgcctggtgagggagatcgcccaggacttcaagactgacctccgcttccagagctccgccgtctccgcgctgcaggaggccgccgaggcctacctcgtcgggctcttcgaggacaccaacctctgcgccatccacgccaagcgcgtcaccatcatgcccaaggatatccagctcgcccgccgcatccgtggggagagggcgtagagtgcgttgtagtgtccgacctgggagttaggaaagtttgcctgttcgtatctgagtgcgtgctggaatctagatggtgtctgtgttatgttgtcgtcctgtgtcctgtctgatgttaccttcttgttatcatcagcaatgaaaatgttggttatcagatctcaaaaa

SEQ ID NO: 5402 - DNA, 1055 bp, Avena sativa
ggccgccgtgcggagggacgaggcggcgccgctgggttactacgagtccgagcacactaagaacgtcagggactggaaggaggtcttcgacctcgtcccccgcgagccgccgccacccgccgccgtggccgacggcgagctcgtgttcgagaacaagtggccccgcgacctgcccgggttcagggaggcgctggaggagtacgcgaaggcgatggagcagctggcgttgaacctgatggagctcatcgcgcggagcctggggctgagacccgaccgcctgcacggcttcttcaaggacgaccagaccacgttcatccggctcaaccactacccgccctgcccgagccccgacctcgcgctcggcgtcggccgccacaaggacgccggagcgctcaccgtcctctaccaggacgacgtcggcgggctcgacgtccgccgccggtccgacggcgagtgggtgcgggtcaggcccgtcccggactccttcatcatcaacgtcggcgacatcgtccaggtgtggagcaacgacaggtacgagagcgcggagcacagggtgtcggtgaactcccagaaggagaggttctccatgccctacttcttcaaccccggcagcggcgccatgatcgagccgctggacgagctggtgagcgacgacaacccgcctaggtacgacgcgtacaactggggccagttcttcagcaccaggaagaacagcaacttcaagaagctcgcggtggagaacgtccagatcgcccatttcaagaaggacctcaagtccatctcgtagaatgaaattctaccaccctcatggcattttcagtgatcaaccaaataccggccggcgcatgtcgtcatttgtcatactgtatataaataatgcgcggctattaatagtactccctccgacccatattagttgatttggatttgtttggataaatctaaacactatttagtatataggttcattcaaatttggataaatccaagtcaactaatatggatcggagagagtatatgtgctgatttatttgtgtgtcttatatcgatactga

SEQ ID NO: 5403 - DNA, 480 bp, Artificial Sequence
  Description of Artificial Sequence: Synthetic probe
atcgcggagcaaataagatcagctatttgtgtagttatacttctccagtcatttgatgattttaggataaagaagacgggtttgatggttttagctcatttgtctaccytaagagaatgaatcttgaccattaaaataatcacaaagtgaaaccaatcatcctaaaatccgaagtacattttgttacagggtttatttattactgtcatagaagttattgtttctcttgcttatctttgattgatgagcggaactggacatatttctggaaactttgcttgtttctttacactaaattgatccatttttgtgcttcaggtttggcacagttgaggataaatttggtgcagccttgtgcaagaagcttcatgaaattggctggcaagtttctcatgtagccattgttcccaatgaagtaagtgatgtttaattgatttgcatagttcttatatgatgacccaaatgtccacaaatagattg

SEQ ID NO: 5404 - DNA, 213 bp, Artificial Sequence
  Description of Artificial Sequence: Synthetic probe
tgatcgcaacaattcagaaaggtccctgttttcatcagagaggatgcggaaggggccagcagacgatggtaggttggcaattgactaggcaattagaacataagctatgtcggtggtaatgataccctgtctgtggccatgacaaatcaataatcatgtaastgcattataaaaaaattgcaaactagtttagcttctggtagaatgtgtaat

SEQ ID NO: 5405 - DNA, 294 bp, Artificial Sequence
  Description of Artificial Sequence: Synthetic probe
tgtggccaaaatagttaagaacatacaaacatcatacagcgacaaccaatgagtgttttgcgctaattagacgacatgagtgcgtggaggctgtctcctggcaataggaccggaagagacaacaggatggattcaggatgagacaaaatcatctcctcagatgagaggttgcattgtgttagcgcgtctgtgtyttaacgcaaggattatttagtaattctgcatgcacatattcctgtctactccgtactacattaacaaagcaggacagaacagatgccagatgcacatgca

SEQ ID NO: 5406 - DNA, 156 bp, Artificial Sequence
  Description of Artificial Sequence: Synthetic probe
acctggatcgctaattactgccgatcacggccatgtggtcaggtcaagcagtctgaataygagcgccagtttgatccatgatccatccaccgatcccctggagcccacgccagttattcctcctctcctgctctgctctcgttatgctgcatcgca

SEQ ID NO: 5407 - DNA, 321 bp, Artificial Sequence
  Description of Artificial Sequence: Synthetic probe
cggagacggagagcgggcacaagctccgagtactgcgcacggaccgtgtcggcgagttcgcgtgtcatccatgttcgctgtgcgcagtgtgccgacaccgacgtcaagcgccacctcacggcgccgtaatcaccctagcagaacaaggtgatcgcaaggcgcaactagaaggtcgtagcggcggccagaagcatgctaaaggcgaagggcatgccaaattacttctagggccagaccgtgctgacagtggtctacgtgatgarcctgaaccaggcgttcacgcgcagcgtcaccggcatgatgccatatgaggcttcgtat

SEQ ID NO: 5408 - DNA, 139 bp, Artificial Sequence
  Description of Artificial Sequence: Synthetic probe
ttattagcagagggctctagtaaagaacatttcactgaaatcctacactattttcaatagtgcaaaatgcatgcatgagttcrtcatctctagttgcaagtttcactggctagcttagagtatattacaataaaatgca

SEQ ID NO: 5409 - DNA, 377 bp, Artificial Sequence
  Description of Artificial Sequence: Synthetic probe
gaaaaaagattatcactagtcttggtcaattgctaagtacggtacagttagggagttcgttagctttggtctatgcatgtagtgtgttaccgatggcgtgctcgtatgtgtcactgtgtgtatttttaatataatcacactggtagaaaacaggacactagtcccggtttgtaagaggctttagtcccagattgcaatccgggactaacgtatcgggactaaaggttaggcctttagttccggttctgttacaaaccgggactagattgtctccacgtggccrctctgtgcgcgctgggctggaggatatttattcccggttcggccgggactaaagttcttctgccgccgcagcgttttgcaccaaactgttgccg

SEQ ID NO: 5410 - DNA, 234 bp, Artificial Sequence
  Description of Artificial Sequence: Synthetic probe
gacggagatgaagtaatctacggtaattcacagtcccgctctcgccttgctcatctgtagtttccccagatccggtcttttatcctacgayccatgatctatctagattcctggaataagaattactagaatacttcttcgtcatattaccacgagcagatctgtttagcgattgtctagcctagccacgagcagagcttaactaattattaatcccccaaattaacgacgcat

SEQ ID NO: 5411 - DNA, 233 bp, Artificial Sequence
  Description of Artificial Sequence: Synthetic probe
gactacagagtaaggcaggggcccactaaacattgacatgaaaatacaaaaaatgtagaggatgatagatggtttaatgcaacwgcacggtatagatgaaagtcaattaatgcaagtgagcaacaggtagcaaataatagacttacttgactaaagcagtagccgagccaatctcttcggggatggtgcttatttgattgaacgagacatccagcgattttagcaacggaagg

SEQ ID NO: 5412 - DNA, 206 bp, Artificial Sequence
  Description of Artificial Sequence: Synthetic probe
ctacaccatcaacagcccggattctcagctggcctttccagaaataccgaaataggtttyaaatttgcttaccggcggtccgtggaactgctgtacattgtggccaggcttagaacagagtatgaaagtaatgtttagtactgtatatttttctaatgctccttaagcttcaattccttttactactagttgcatttatcgggatt

SEQ ID NO: 5413 - DNA, 394 bp, Artificial Sequence
  Description of Artificial Sequence: Synthetic probe
tgcatgaagtacgtgtctgagtacttttgctaggtccaaaacttctttgtactgactctgcgctggatgaaaagataactttgtactatctgtttgcgacgactactagtctagagarccaattcggcattacaaagcatgggcatgcaaaagagaaatttaagtcgggggcattttacgatcatattaaatgcacttaaaattcccccatgttttagattcctattaaccgtgacaatccatcatgaggaaaaagccacactttggctcttatgtttgccataatcaagaagaattaattaggggatgaatagtggctctctcgtcttagcacgcggattattttttgcccatgaattaagtataattaattaccccgcctgtaatctcaaaa

SEQ ID NO: 5414 - DNA, 275 bp, Artificial Sequence
  Description of Artificial Sequence: Synthetic probe
ttgggagcaactacatggcgcctagatgctccttcgctgccccgctgtcattgttcctttgccacctcatagattctcacttcatgatattgcgcaaattcctctatggtcagaatgccaggtacatctctaagtcggtgccggcaccgagctcatagactgtagatatcggggtatgcgggaacgatcmtatgttgttctgcattctatttgatgggcgtgacgatgtcatcttgatatccatcaagtgcgtgaggccgtcggcatgcttgagg

SEQ ID NO: 5415 - DNA, 215 bp, Artificial Sequence
  Description of Artificial Sequence: Synthetic probe
tcatttttcttgcatgaggacgaaaacgtgagcatggcgtttggttgtctggagttgatatggctattacgaacacacatctaagtaatccatttggaggttaaaacaagttctaaacatgaacacgaatctgagaagatatgaagtactaagcakgttcatgtagatttgaaggggaagaagcaccccacgagagaggagagtgatgtttatca

SEQ ID NO: 5416 - DNA, 192 bp, Artificial Sequence
  Description of Artificial Sequence: Synthetic probe
acttttgtgttgcaggccagggcatggctggagccggaaacaagggatatgctcttgatctgatctccggcgtctctcttctctctgggtaatgtgatagagtatcatgagctagctactagtagttgttgagggagaratcatgatgatggccggtagctaggctttggaaagaagcatctgagacctgca

SEQ ID NO: 5417 - DNA, 248 bp, Artificial Sequence
  Description of Artificial Sequence: Synthetic probe
gcgacggacgacctctccctgtccatccctgggccagcctcttccctgaccctccagcctcttccctcaccctcctcttccccttcatttcttccagaggagcacccgtgtttgctgatttcggttcayttgctgattctgaaaagggtctctcctctcctacgagcctgctagctagattgaggaagcagagtagaagaggacgtgatccgagttggaagatttacaaaagacctgcatgtttcgct

SEQ ID NO: 5418 - DNA, 273 bp, Artificial Sequence
  Description of Artificial Sequence: Synthetic probe
tggaggtggaacgaaaattcctttattttggtagcttctgaacacactttttgaaagagttcaatcggagagaacccaagttaagtttcyagtaggggcaaactatacgattttgttattccactgattgttactttcagcagagtaatatcggcaatagaaactcaacataatcatatcatccaaaacaaacaatgacctacactcaaaaatttattttataaatgtatatgcagaaaaggaagcaagactatagaacatctaagtgatgga

SEQ ID NO: 5419 - DNA, 423 bp, Artificial Sequence
  Description of Artificial Sequence: Synthetic probe
cggcaaattttgcgcccattcccggcgcgttgatagccgacatgtacattggccggttcgtggccatctcgctaggatccattgcatgtctaacagtaagtgcaaattcatccggttcttgtattttctctagcaactaacataagwgagcgcgatgatgcttacctgcgttacataaatttgtacttggtgcaggggattgttttcctgtggctgagcgccatgataccgggagcacggccgccaccgtgcggcgtaggcctcgctccggagcagtgcacgcccccggggccgaggcacctcgcctggctgatagccgggttcacgttcctgtccatcggcgcgggcggcatccggccgtgctccatggcgttcggcgcggaccagttctccaggcaccccaaggagcagaggtccaggatc

SEQ ID NO: 5420 - DNA, 163 bp, Artificial Sequence
  Description of Artificial Sequence: Synthetic probe
cacaccgttgagatatgagatcatatcagaggaagatgaagcagtccatggatatgagcgggttgttgagatcmtccaccaattccccgccaccaatgccggcgccggccgtcgttgtcgccggtgatccgcacgaagaggaagaagttgaaagcctcttctt

SEQ ID NO: 5421 - DNA, 211 bp, Artificial Sequence
  Description of Artificial Sequence: Synthetic probe
gtctgcaaatgcataactgaactgtgtaggcataaattgtcgcagacaaacccactatatactgaatttaatgtctcaaatgaaatgccgagtcccgaggtagtttctttsgttgatatcagatgtcattttaatttctcatccataggtacctatttctcatagctatattgattatgcaggatctgtttgctcgttttctggtgcttct

SEQ ID NO: 5422 - DNA, 218 bp, Artificial Sequence
  Description of Artificial Sequence: Synthetic probe
tctgtcaactatgttggcggcctagtttatgcacatgcaaagattgatggcaatcatgaggactgggtctatyatagtaacagaaaatccgattccggttaccatgtagaggaaccgcagtcatcaactgccgagcaaactgtgttgcctgctacaaaacggagtatccttccttggagaaagaggaaactgagtttacggtcattaaaggctaaagg

SEQ ID NO: 5423 - DNA, 226 bp, Artificial Sequence
  Description of Artificial Sequence: Synthetic probe
tggttgtgaactccactcttgttcatgctaaggtatacctcttggccgatttcagagatataattgccaattgcgctactgattaatcattgtgaattmtacaaccactaatacgaactaatactgtgttctgtagaaaccagcaaaccatgtcttccacattgtgacagataggcttaactatgctgcaatgaagatgtggttcttggctaatcccttgggtaaa

SEQ ID NO: 5424 - DNA, 385 bp, Artificial Sequence
  Description of Artificial Sequence: Synthetic probe
aggagatgcaaggccaccattaaataacttccaaatggcgtgatttatcgtagagaataagaatccagagctcccaagatacaacaagaattccccccaacgggatgaatcaaggccgaatgatcrcacggaactttcaggaagagatactactagatgtagagttttacagatgaatatggctacatggttcagtattatcatatacagatctagagcttgaagcacttcctatacagagaaaacgacacattactctcaggaaataatctgttaaacgcgcgatgaaatgagatgacatgtttggcttcctcgtttccttctctgttgtctggttttttataagactcacggcctgctgcctagcctactgctcttcctccgg

SEQ ID NO: 5425 - DNA, 229 bp, Artificial Sequence
  Description of Artificial Sequence: Synthetic probe
tatgcactatcctcaaagcattacgaatgttccgactgatatctttttagttcctgctggaaaacccctwatccttgcacttgagataaaggtgtaaattgaggctctagctttatatttgacactatgaccaatctggaaagccaacatatttacctacgaaattgcacatatcaatatataagtacattttagctaatctttgccaataggattcttctgttgcgac

SEQ ID NO: 5426 - DNA, 201 bp, Artificial Sequence
  Description of Artificial Sequence: Synthetic probe
caccactcagacggttctcttgagcattcacgtccactttaaaccgtgtctgagggtgtgacagstctctgattctgtaaacacaaacaatatagtctagtgtgttgggatcatcaaaaagcttcttctccttcttctcacggcgctctgctggtgtgagtttgcgggcaatgttgcggtccacgtgagcctgctcacgct

SEQ ID NO: 5427 - DNA, 266 bp, Artificial Sequence
  Description of Artificial Sequence: Synthetic probe
tcggtgtactagtagtatataagcagactgtgcatgaagtttgcttcatcccatcccaacgcagtgcacatacaagrgctttctagctagaagcaacaatggccgttccacggagctccttgttcatcgctgggctcatggcaatcttcctcttctcctcagcaaacggcggcagcatcgccatctactgggccagaacggcaacgagggcacgctcgccgagacctgcgcaaccggcaactacgccttcgtcaatatcgccttcc

SEQ ID NO: 5428 - DNA, 293 bp, Artificial Sequence
  Description of Artificial Sequence: Synthetic probe
ctgcatctgggttggtgtccatcgctgccttgctgtgatcttgtgacctccatggaccattagagggtcacagtacaggttaccaagcytcatacctgaagaaatgaaatgtcagctggctgtaaaagcatgatctttaagcgatggacaacatctccatggatgttgtcataggtttgtgtttggcagtctaccataaaagcatgatctttaagcggtattagattaattatattacaaaatcctgggataagggaagaacaattgtaaggacattaggtaattactagtag

SEQ ID NO: 5429 - DNA, 392 bp, Artificial Sequence
  Description of Artificial Sequence: Synthetic probe
agtttcaaagtactctacgattctaggtgacaagccactgcttctagacagcgagttaatttgatctccaccagatggtgtggatgtcgttgccgatattgttttttatyttcatcaaggcctactaagtttgcaccttccctttcttcaactcgtacgactgcctgattgcatcccagaaagcgggcatcgcctcagagtcaggaacttctttgaatgagggaagatagtttaggtccactatgacatggtctccgctaccctcctgaacctgcaatatataaatgctgctttttacaattccgaagtagaatgtgctacatgaagacataatggcgactgaatgtgaagaagctactctttgtagctttcctgaattctaaaagcaccaa

SEQ ID NO: 5430 - DNA, 364 bp, Artificial Sequence
  Description of Artificial Sequence: Synthetic probe
aattgcatgactataggtttttaaattagtgtatagactaaaggctctgtgaaatcaaaccaaagggtgatatgtaagaaaaaatctatcattaaacttgtgttcatacaattaagactgaaactctgagccaattagtaaaacgactatgatcccacatgtgtatrtgtaggtccatacgtccagttatcttcaactgcattctagcatccaaaaataacgataaaagcattaatattagctgattttgttgcttggtttagtacaacaactcaggggaacgaagataccctgaaaagtgagattcaacaagaaaacattgggcaggtgaagtttgatcctacacttgaaaagccaagtgaaa

SEQ ID NO: 5431 - DNA, 453 bp, Artificial Sequence
  Description of Artificial Sequence: Synthetic probe
agtccaacaccagttgagaaatcaggtacttacatcaatgatgaatgttgtgaacatatatatactcccgccgtttcaaaatataagatgttttagctttgtaaaagtagtgtatctagacctctttagtatgtaggttcactccaaacatagatgaacctgcacactaaaaggagtctagatacactccattcacaaaactaaaacatcttatattttttgaaacggagggagtagtttcatagtcagggattcagtcagggtcaggttrcatctgatttcattcagacaaggtggtcatgtcaaatagtactagaagtaatgacaacgtttcaaatgattttgattcttatcctactgtgtgcacatgtcacaaactcaagtggatcagtcttctgagcccatcctatgcgtaaccagatcaagaagaatcatcacagccagctcagctgc

SEQ ID NO: 5432 - DNA, 268 bp, Artificial Sequence
  Description of Artificial Sequence: Synthetic probe
tttggagaagtttacaagggccttgctggtgatgaaccagtcgtagtaatgaagctgatcagtgatgatgtgctagatataaatcaatttgtaagagaatttagcatccaatcttgcgcccgccacaaaaacattgttaagatgataggtgtttgccttgatgctgacgtcccgatgctagtctatgagtttctctgcartggtagccttcacgagattcttcacaggagcaatttgcacctcagcttgggcctgcgtttaagtattg

SEQ ID NO: 5433 - DNA, 307 bp, Artificial Sequence
  Description of Artificial Sequence: Synthetic probe
actactatacaagcttgctgctagtagcagtacttgtagtggtggtggtggtgcgtagtagtagtaactagtagtaaaacctgcatctcctagtaagctccacagagtaacacaacacacccttttgccaagaacagcccagctagctgttcatcatccctgttgcatatctagtgagtatagcagcagctaaccttctcctcccttcctctaataatctatcctstttgaatggggagaggcccagcaaagcagtagaggctaatctaatctaatctagataggggtagaggaagggaggagaagg

SEQ ID NO: 5434 - DNA, 304 bp, Artificial Sequence
  Description of Artificial Sequence: Synthetic probe
aagtgatgctcacatctggtttcagctgagcagactgaagtagagggggcataacracactcatgtacggaaggaactcctgaccaaggcatttacacagtctcgcccatgcctacaaatgcaattagattaagcaaaagtgaggcacactagcgatcacaatttgattaagtcaaagtaagcacacaagtgatcgtataactgccatttgggttttgatttccaacgtacttgcagcatgtaacttgttatcgggtcatcagcctccatctgagatccttgcagtgacatcaaaacttccatc

SEQ ID NO: 5435 - DNA, 430 bp, Artificial Sequence
  Description of Artificial Sequence: Synthetic probe
tacgagtagtattttctccagccctttgccgcgccatgctgtgttgtgtatgttcatgttcactggcgggcacggcagggcgttggccggcgcggccgaaagcggcggccgcacatgcgtagcttgccgctgcccattgactctcctctcttgccattgcccgccatccttcacctaatacacatcagaatgtactgtatatgcgcagtattttcttggataagtaagagtttgccaagtatagcaactcctagtctgctattttagtaacagtcaaagaattctgcaatggttattaatcttaatccggtttctcttagcacttcccctttgagcactagctscgcagtatcttgagcgataactatttagtatttacacattatttgtggggaatagatacacatggagaagcgtaactaatgtggtt

SEQ ID NO: 5436 - DNA, 442 bp, Artificial Sequence
  Description of Artificial Sequence: Synthetic probe
gtgaacaaatgtatgtaagatgtgtctttaacaaaaataaaattgctaattcaagaataatgttgttttactatttatggagcaagtgttgcaagtctattcacagtatttaattgaaagaatcttctgtgggataggacagatcaacaaaacaatttccaaaaaatgtcggagaagaatataaaattaaaagtgttttccccatgctattattaactttagactgatattcaacgagtatttctgyaagctgttggaaaattcagatataccacctaaaagtcatgtcttctctgcctggtcccttacgactcatgatataaacttgtgcaagaggatgtatcaccagttccaaagtcatattccaaaatattgaatatctttagcaaagtttatttggctgcatagcaagagttatattacttctaaatactgtaaactg

SEQ ID NO: 5437 - DNA, 341 bp, Artificial Sequence
  Description of Artificial Sequence: Synthetic probe
caccatccattgaagataaatcacagttcccgaccctgggaggagggaagtgaaaaaggtcccgtgctgcctccagcgctgcattgtctttactggtgtcgcctttaaattttgccygacgttgaattattgagtcacggttaattggaacaaataatggtgttgcatgtcagttttctttcaacgtttgttactagactttgtataccggagttgagtcgtttgtcgggattagcctctagttttgtaggctagatttgcttttggtaacaggaacgtctgccatattgtttatttgaaatgatgtggtaccagcaatgcaattggtgatttggtcttgc

SEQ ID NO: 5438 - DNA, 373 bp, Artificial Sequence
  Description of Artificial Sequence: Synthetic probe
tgactcgctcagcagttggccctaagtggccgtgacgactatacagtctacagtccaggactctaggtgcttggtgctgtgctcaaggtcagcattgtgtggccagtagatagaccagcaagaattttttatatcctgcaaccccactcttggtggccagtacccaaagtggaaaccttgaatttgctggatcggatgggcacccccaagcaagttcaatggaggagccaccgccattccattcatgaaagcagcaagacacagacgcattgtcatatggtatatatcatgacggtgcrtactgctaattagttggagcgcaaagacgatgcctgcacgcactcaaatatgaactagtgctgccaccactatt

SEQ ID NO: 5439 - DNA, 143 bp, Artificial Sequence
  Description of Artificial Sequence: Synthetic probe
ctccaagaccggtatagctatgcaggaaatgagttgctcatcgccattgccgatgaataccrtcaatcctagatggagcttcactgtgtacaaaccatcttgactcacaaggaagctctggaagtccagcaaaggaatcaagc

SEQ ID NO: 5440 - DNA, 456 bp, Artificial Sequence
  Description of Artificial Sequence: Synthetic probe
ctgctgtccgctgtcaattctctcaaaagaaacctcactgcgttcagcaagcaagagtgaccgatggagaagatgttcgttttgctttggttacatctttttccctggtgaaaatgcatctaaagtaaaaaggcgatggattttgttttagaacagcttgaaggatttggtgtttatgtaagtaagagtatatatgtctggttggttcttgctgatagcctgatagccctttttgtgttatgrcagcacgatgatccagttggacaagttttttgctgttaagctagataattatcctcagcgttttctattccgttcttgtacaacaggtaggatactccggatttactagcttaaatgctttttgctggaacctgttgtcaatttactaggagtatgaagcagctcattgactagttttggatgctaggtacacgcgctgactacaagtttctc

SEQ ID NO: 5441 - DNA, 132 bp, Artificial Sequence
  Description of Artificial Sequence: Synthetic probe
gagcaccactgatatataaacgacactaaagcatcgtcatatataaacaacactatccaggctgaagcaaccargaaaggaaagcatatatatcaaaatctccttaaaaatctagaatctaagactatgaac

SEQ ID NO: 5442 - DNA, 179 bp, Artificial Sequence
  Description of Artificial Sequence: Synthetic probe
ctgaaacaatttgcacctgagatgaatgcattgcatgaagataaatggtagcttgtgccattgcttgtgttcatatgaatcatgatatcctacaagtcggtggttgcagttgttaggaaaagctkgtgccacgaagaaattcttgttaggatagctcaagttcttgcacttgtcattgt

SEQ ID NO: 5443 - DNA, 273 bp, Artificial Sequence
  Description of Artificial Sequence: Synthetic probe
ttagtgcccgctttgtatgtttgcaagtgaatgtgtttgcccccgatcagagagcagagagctatrgattgctttgctttgaaaccggcctgtttaattatgaggcgttcatgggcggcagggcagcacctttagggtctttccctaggctaggctaggcttcgttggttggttccccaagtttgacattagcgctggtgctctcctccgtggagtagtcagattgttggtcaataaaagcagatcgtatatcttgggaagttttcttcgcgt

SEQ ID NO: 5444 - DNA, 149 bp, Artificial Sequence
  Description of Artificial Sequence: Synthetic probe
aaaacatggctatgcagttctcaggctttcagttacttagaacagctccagactaattctaaatcactgaaarccctgatcatcaatttgcacttttatcactaacatgtctgctgcctcaagctgtcccattagagcattctgaaatt

SEQ ID NO: 5445 - DNA, 332 bp, Artificial Sequence
  Description of Artificial Sequence: Synthetic probe
aggaaagggatcgctacgcactacataaagacgagatattaaataaacgacgggaagcccgtcatctggtaaatgttgcagctgcaacaaaggatgacgaaattgaagccatggcatcgtgtacaccactggtccagtcccatggtaaaagacggcgtgacgacagtggacagactaaaactacaactggccttgaaaattttgttcacggtatgaaataccaactattgacatggtacttccatttggtgcgtacataactcattcrccgacaattgctgacagatatgcacacccaaaatgctgatacattcaaatcagcggtgacccag

SEQ ID NO: 5446 - DNA, 239 bp, Artificial Sequence
  Description of Artificial Sequence: Synthetic probe
ccaccgtcagatttcagatcagcggttcagatcgtttgttgaccggtcagattcaggcgttgcctagtcagacgcccggtcagcgcccagtcagcagacgcgttgaccagtcaacagacacagttgactggtcaacrcgtctgctgactgggcgctgactgggcgtctgactagtcaatgcctgagtctgaccggtcaacgaacgatctaagccgctgatctgagatctgacggtagct

SEQ ID NO: 5447 - DNA, 407 bp, Artificial Sequence
  Description of Artificial Sequence: Synthetic probe
gacctttttcgtatgtgaaaccgtatacactagacaagcatgattgatattttactagtagttgtcaatgggtcatgttcagaaaaccttgtgaattgattttccttttgacaaaaaacttagtagatctgtgactccccatattcagcatacaatgaaattttttttcaagtgtacctatatagcataagacagtatttctctgtcgtgcttgtgcaccacaaaattcacacataccaragtaatatcagcacacatacaccacatcccataggactagttctcacaagtctacactggcagcagttgcgcgaatgaaagacaaaaattcagacataacagaaacacgtctggacttattggtagagtgtgaattatggagtttctgcgaataatcactcctacga

SEQ ID NO: 5448 - DNA, 226 bp, Artificial Sequence
  Description of Artificial Sequence: Synthetic probe
gggattaggaagacaagggatcaagcaagagtaattcagattgcgaggatattgagagaagagtaagcagagagggtgagtggaagcrggactttgacagaaggaatgagccagacaaacgggatgcacttagagttggggcagagggatataagcctcataactttgatgctaatagtcagggtagtaaaatagtacagagcagggcgaagtactttggccgtat

SEQ ID NO: 5449 - DNA, 484 bp, Artificial Sequence
  Description of Artificial Sequence: Synthetic probe
cttgtaaatccccaattttacaatagccataaagaagagaattacaagtgataatggtcggaaacataccagctacaacaatctgatcatacagacraacagcattaccgatatcaccaatctttgcatagccatcaataactacattatagagtactacatcacctggctgatatctgctagctacattttccaaataccatcttgcttcaattaacagtcctttcttgcaaagtcctagaagaatagataaatggttcagtgaagttggcatcactttgtgagaatagcacataacatcgcaaacttggagcgccctttcaatttcccccagcttgcagtacccgtggatgaggatggaatatgcaatgacatccatatctagaccaatactgtgtatctcaccaagtaagttttcaacctcatagaccaaacccttcttgaagagagcattgagaaggacgctgtatgttacaatattcaa

SEQ ID NO: 5450 - DNA, 424 bp, Artificial Sequence
  Description of Artificial Sequence: Synthetic probe
attatttggaaccgaacaggtatgtatgccattgcagctcaacaaaagacactattggtagcaacgaggaacaccgaattttgctgcctgaaatcatgaaacaatgcctcggacttgggtcacacaaataaagcatcatatamatgaatgagcaatgtatgtacacgggcgactagactatatgattctacgaagaggaacacggcactatgattgctagcctgaatctaaatcgggttcgtacaggagcatcgctgtgctctgctcctttcccccactgcctaggaacatgatgcattccaccgacttaccagccaaggttccaaatcctgaaacctgcatcaagatgtgagcattagcaaccaaacacgtgaatcacaacactaaaactagttaaaattgaaatttgcaaaaactacctgag

SEQ ID NO: 5451 - DNA, 473 bp, Artificial Sequence
  Description of Artificial Sequence: Synthetic probe
cgtcgcaccaatgaagcacaactttgtggcacccacaccacctccaaccccgtctccaccatctgcaacacacgacagtcgccataagaaatggccagagcgaccaaaactccaaagcatattagtcagggagccgccacccgtaccaccaaggactgtgccgtccgcgcaaaggtggaagctatggcatccgaggctgtccgggcctcgcctccgcagggcctcctcaagctcgcccacagacacgccctccctctgcacttgcatgtacagcttgctcggttagggtttagggtttgggagagcacaacagggagggatttagttctgttttgggaggttgcgwcggatgctagtgacagtacctcgtcggagaaccgtgttccggatgcagcggcggcggcggcggcggtggatggggcgacgactaggcggtcgccggagaggacgagggctatgccgcacatcgctga

SEQ ID NO: 5452 - DNA, 517 bp, Artificial Sequence
  Description of Artificial Sequence: Synthetic probe
tatttttcttctctgctatgtttaaatacatgcgaatctacacaaatccgagtcaattagttttcaatggagggagtatrtccatgtggttaatctgaaaaaacaggcgcctcacatattactctgtacatttaagtagaacctgatcattggagaagttcttgactaggacagagacataatgttccaactttgtatgtgtgttactgtatggtctggagaaatgataaatctatttcagttgggccaatatgctagacctggtcaatctaaagattatctttcagttactatcgtttctggcttgcacttatgatatttgcattttgttatttgactggaatgaaaatagggatagcttctctccaagtttagactagacctattttctatcttcacttttggaatgatttttttcttcctattttaaagtgtaccatagcagattggaagatgttcactttctttctaacctctgattccaggtagttgcacgggaagacactggtagcacccc

SEQ ID NO: 5453 - DNA, 308 bp, Artificial Sequence
  Description of Artificial Sequence: Synthetic probe
ctggaggaacagttatgggtaaacaaattaccgaagcaaagtagctgctagacaatatgcaagacaaccatgcccaatggcatgtgraaagatcaaacacgaagaaggtgaactccatcactcctcaagaaaatgaagagatcaatgttaagttggatgctctcatattagctttcaaaggtaaggaaacccatttaagagctacacccgaaccaaccattgaagaaatatacttcatagctcgtaatgattataaccctgcttggaagaagaattataatctagatttttagaaacattattctagt

SEQ ID NO: 5454 - DNA, 432 bp, Artificial Sequence
  Description of Artificial Sequence: Synthetic probe
cgcactgattcccgcgtatgtcgtacatttgattagataattaatgttctaatcttgacattaaacatatgttgcatgtccaaacgaaggtacgcattcagaccgcccgacatgcatgcatgaaataatacacgcgtctgaaagatcttgccttgatctaacttttcttccacggcttcagctcctaaattcatstcctaatacatcaaaccgtcggtggaacttgccatctgctgttgttcttccatgaactatgagagagcaagagagcacaggaatagagcacgtagcgagagagaagtgaagctgtaagagaccactgtgccgattaaaagaggcgtaaatgagaggaatcagctctgctttgagtggtcaagtagaggaaaaggacaagacattgatatgagtagacctaactgcgcctgacagaac

SEQ ID NO: 5455 - DNA, 457 bp, Artificial Sequence
  Description of Artificial Sequence: Synthetic probe
catcttactggaggaactatcatattgagaaacaaggattttattattctatatagaggcaaggattttcttcctggtgaagttaaacaatctgttattgaacaagaggctcgggtagatgaccagcaggtgaaggaagaagaagcccgattaacggtggttgactcccttaagatgttygctggtttaccatctgaggaaagttctatggggactttcagagagtatcgggatttccaggttaaccatgtgcgagaaacaactgaaaacaacaaggccatgatagaactagaggccgagaagcatagattggagaaggaactgaaagaccaggaacggaggcttttcattgtaagacctggtctacactaatgctctttttcttgcggaatacactaatgctcttgttagcatagtagacttctaatagtacctaatgaaacaaaactggtctgta

SEQ ID NO: 5456 - DNA, 418 bp, Artificial Sequence
  Description of Artificial Sequence: Synthetic probe
atgacatgtataacaagtcctaggatcactaaaccgtaagagatactacatagcaagattagtgctttagtggcaagctcatcaatcatgaatacaaaaacattcccttgcccgaaactgccaaaccgtctctagagtaattgaggtaaacattccctatctatagactaaaccgtaagagatactccctcagtttcacaaaagctaaaacatcttatattatgaaacggagggagtacatatcaaggttagtgctttagcggcaagctcatcagtcctgatgtcagcaatcagcggtrcatctacatttcatcagagcccaagaacctgcaaaattggagaggattctgtctggcatatcatcaacttggattatctgaaccctaatagataagaaaatcatcaatatgatctgaag

SEQ ID NO: 5457 - DNA, 447 bp, Artificial Sequence
  Description of Artificial Sequence: Synthetic probe
tactcaggtttctcagtttgcttcaaatgtggtcatagactttgttgcacatacgcttcttagtttatatctatttatgcctatagaagagttactttacgcaggtctccttccaagacaggtttttcttatttcagatttattaatattttgttttcatattgaactgctattagttttgagaccaagtcccagagtttctaccatatgattcctgctggtatgtcctattatattcttcaaggaccttaacatattgtgctcattcttttatttataagttatccttcatcacatcaaggcaaacatcagtytatattgtcttggattttgggtcttctatgttttttgaagaaattggggcttataagttttctcttatcgcaggctgttaacacactaacatcgttaatttagagaaagttgtgttcagagaattatgcttcg

SEQ ID NO: 5458 - DNA, 366 bp, Artificial Sequence
  Description of Artificial Sequence: Synthetic probe
tctgaacctgaagcacatgattctgcaaaaatctggaagcaaatatcatcttctctagatgcattttacaggttttctcggccgcatactgtcataggaacagttaagttatgctcctatattgtttcactcagatattttaaatgaagctagtaagcgtgatttgtggtctccgcttgctctccttgattctaaggacttttattcgttcatttgtttgggcaggcactgagcatagtctcagtttccctacwggctgttgagagcttgccagacatctctccatcgtccattgctggtttgcttgaggtacaacttgaaacaacatttgtcttctaaaactagaaattaaatcatcacaaagtt

SEQ ID NO: 5459 - DNA, 394 bp, Artificial Sequence
  Description of Artificial Sequence: Synthetic probe
gaaacgggaacgaagtcggcatagattgatatgccgccggcttactcgtatgctgatgacagccggcggcatatggctgtcaataatccggtggcatatagtcgtcggtaatcaaggcgtcaccatatagaggatggccgttggcacatagttggccgtagtagcaactcatgcaaggtggattgatttattgatgtggataacttgcagcctaaggaggctaaaaccatctgaccccaagacaaacttctgttgtaccttgcttaagcttgcatyctagtgtcgtgtaaaaggcaaacttctcgcaaaatatgttaccatgcacctcattcatatttgactattgacgttcaattgtcccagcaaaataaacaatttagcaagacacatcatt

SEQ ID NO: 5460 - DNA, 303 bp, Artificial Sequence
  Description of Artificial Sequence: Synthetic probe
gactagcatagtgtttctgaaagttaggattataactcttcttccaagcaggattgtaatcattacaagctacgaagtctatttcttcaatatttgattgggggtggctcttacctgagtttctttaccttttacggctagtatgagctcatccaacttagcattgagatcttcrttctcttgtggtgagacagagttcaccttcttcgtgtttgatctttccacatgccattgggcatggttgtcttgcatattgtctaacagctactttgcttcggtaatatgtttacccatgttcctcca

SEQ ID NO: 5461 - DNA, 454 bp, Artificial Sequence
  Description of Artificial Sequence: Synthetic probe
tcgtgaaaagaatcccttggtcagataaaataaaagccctgttttactcatcagatcagatagttcatggagatttttggaggagaggaaagtaggaaaccagcgcaccttgtatgcggcgccaggcgcggccgtggagctgcatggcttccaggaagagcttgtgctcctcctcggtccatttctcgcgctgcttcgttatcatgtacggcttccgcgccttggggaaccgcgcttcggcggcgagcgagtccttgtcgccgcgattaggggggcacccgagatctcccatgatgttataatcatcgctcgggttggtttccttcaagaggagaaggagatggtatcgttagactcartttcaagcgaatttcaagggggacgaaataagatccggaaggaacacacagacggataagaaacgagtaattaattacctggaaacgagccatat

SEQ ID NO: 5462 - DNA, 347 bp, Artificial Sequence
  Description of Artificial Sequence: Synthetic probe
ctacaaactctaatgtcaaacctggataaccaccaggctactgtagtaaccgaccatgacaaaagggtgctgatcactactgacaaaccaacgacggcaagagacatctaccggctactcgcggaccgtggaacgagatggaccccggccaaatggatttggagagcagtcatcccacacaggcacaagattttttctggttagcattcaggcgtcatttaaacacaaaagacaacatgattaacaaaaagtggtgyactgatggaggatgcgaccaatgcctagcaattgagagttttgtacacatcgccttgcactgccgacaggcaacctgggtgtgggacaaa

SEQ ID NO: 5463 - DNA, 465 bp, Artificial Sequence
  Description of Artificial Sequence: Synthetic probe
ctgttgttgcttcatctctgaataacccacttgttttaatattctgtatgtgcagggcgcctcttggatttgtacattattctagccttagcattttagaattctatgtgtccaagcacagttcaaggagttgccaaggaaagcttgaggkcctcaacccatcctgtacataaaataagatggtcagtgtgcacaatcatcccacaatttcacaattacatgcactgtttacatataatccgagtttgctgttctgaatctcgctgcgttggttacctaggtacttttcccttcacatttttgttgctctagactgtgagtagtattactgctggaactgaaaaatatttgcttctctgtgtgaacccccatttccaccactttttcccgatcccacaggcccaatattttattgttttggcttacttcattagcgtgtaatcttaacgatctgcggtgcctact

SEQ ID NO: 5464 - DNA, 344 bp, Artificial Sequence
  Description of Artificial Sequence: Synthetic probe
gctgaagatctaagtcgcattgttgataatttggggaagtttttgtctaatagagatgtgaaggtcagatatttgaatctgttataccttccctagacattaattgttaaaattttctcggaactctattttgtaatttatttttgtgtctttcccactctgaatgtttgaattacgtgtggaccaaaaacataaygaagtcataaataagcaattctcttttattttgaataccgagaagtttacagcaaggaagcatcttgctctctcaatccctaagcagtttgacgactcttgtttgatattatcaatactattagatttttatgcttttgtttttcttt

SEQ ID NO: 5465 - DNA, 400 bp, Artificial Sequence
  Description of Artificial Sequence: Synthetic probe
gctgctcggctgttgcaagagctcttgtgggcgaagcttctagcttgtgtagagaggggcttcagtttgcttacaaatgaagtaaagcctcaagtgatcaattgattgagcttagtttctatcaaacaatgctcgctgcatgttggcagatctcataatatctcaaatcataaaggtaaatcctgtagtttgtgagctgcggcttgttttttttaatgtatcggttggaacactcctagatatgtataaccatcaagtggcatatgtctatttgcackaatctttcatgtaaatttgtcagttagtagaacaatgggacatgttcctttttacctgattttgtatcccttgcttctcagttcaccaacaaattaagttttttatattcattttacttgaa

SEQ ID NO: 5466 - DNA, 501 bp, Artificial Sequence
  Description of Artificial Sequence: Synthetic probe
cagcagtcgttatctacacgcggtggtaatagagtgaaaacaacctctaaagaaactaacaatagtaacataccagagtcggctagatatttaagccgacacaccaaatttcttcttcaatcggtttgcttttaaaaccgactctaatacacaccaaatctagttcaatcggtttgtaaaagaatttctcggccgattcccaagagagttggtatgaaggggtgtaaagttggtcacgcacgcacgcgtgttcaagctttccaatgagggcgcgggccacgctaacacacatacacacggcacactggcacagagtacagagtcacccagcatttccaaaaatcagtagctgacagatccaagcataamccccctgctttacctaaagatctgacgccgtatatatatatggccagctgccgggacattaagctttctagagcgaaatatgacacatgcatcaccagaaacctgaccacgagtaacaagactaaagttcca

SEQ ID NO: 5467 - DNA, 376 bp, Artificial Sequence
  Description of Artificial Sequence: Synthetic probe
ggaactgcccgttggacaagatgacaagcctactatccctggaactggagatgcacrgttcagaagaaaagagacatggtctgcctccgttcaaggctgctctcgggaacatgcctcttcttggccacttatatctgaaagctgatctgataccttcatgggtcttcaccgacccaagccttgtaagtcttaagaccatggtcctaaatggaaatgtcaattggaacaaaattgtcccccaaaacaaccaagtgtcgggtcatcttctacgaaaggtccggccaaacctcattcagattaaactgcaagatagcaataaggtgcctgaaatcatcaaagagcaactaggaatgatactaatcaaagaggattagaa

SEQ ID NO: 5468 - DNA, 493 bp, Artificial Sequence
  Description of Artificial Sequence: Synthetic probe
cttgctgagggcgccgctgagcgcgcccacgggcggcgccggcccgtccagcgtcgccgtcggcagcgacacctgcttgttgtcgttgagtatcacgatcatgtcggagtccaggtacccggcgttgttcatggcctcgtaggcctgcccggccgtcatggccccgtcgccgatcaccgccaccacgttgttcttgccgcccttgaggtccctcccgacggccatccctgccaatccggcaaacacacacacacacacttgatcaactgtcacagaattttcacgagcaggttaactacwcaatcggatgcagagactaatactagtagatgcttgtagtaccgagggcggcggagatggtggtggagctgtggccggtgccgaagctgtcgtactcgctctcggagcgcttgatgaagccggacaggccgtcggtctgccgcatcgtcggcatcttgtcacgccgccccgtcaggatcttgtggggatacga

SEQ ID NO: 5469 - DNA, 502 bp, Artificial Sequence
  Description of Artificial Sequence: Synthetic probe
gacagctctccaaattgttgcgtacctgctagcttaaatgtaggataaagggctaggcatgtaatttgttacatcagaaatagggttaagttaattacctctatcttctgttgttccaaacatgatgcggcactctataaaataacgaaggagtacaccrtgcttattgatgcaaagggccttaggcgatggatatatcacaaaaaatgcgctgatggactgattgggcacagaacgttctggtgcatttttctccatcagactatagaagatggttctcattccatgatatttactcattgcaggcaatatctagtttcttcccttcacttttatctggatttgaggaagatattattgaacttctgaaggaggataatgaagtgcttaaagagggtattgctcatgttttgtccaaagctggtggcaacattcgtgaacaattggcctcatcaaggtcagctgcttgaaagttttttatcttgtgacactactttgcact

SEQ ID NO: 5470 - DNA, 216 bp, Artificial Sequence
  Description of Artificial Sequence: Synthetic probe
ggaatgtgatgtaccgtaggcatctagtctttgatcccatggtatcaccttactacgaggtgtttaagatccccattttggatgactataatactacggacgaggtggaccccttgatggaggaatcagaatggccgccgtccctwtacaaaatgtatgtattctcgtcaaagtcaggctgttgggaggagaggggtttcagccgagaaggggatg

SEQ ID NO: 5471 - DNA, 327 bp, Artificial Sequence
  Description of Artificial Sequence: Synthetic probe
attcctatggtccaagcctccaggtgagcgagggagagcctgtgtacgatttctgctggtacccctacatgtccgtgtctggtgagtcaattgcttcctttgtcatgtcagggtgtctgcaaactgtrcatcttttgtgaatgcaaggtgctgtgccgatttgcagatccagccacctgtgtatttgcaagcactagtcgcgatcatccgatacacctctgggatgccaccactggcgaggtataattggttgtttatgcttctcacctatggtgttactggtttatggataatgaaatatccatctctgatgattcattgtggtaa

SEQ ID NO: 5472 - DNA, 273 bp, Artificial Sequence
  Description of Artificial Sequence: Synthetic probe
gagcttggagtgagcttgccaaggtaagaagtcatatgaggaacatgtgcggcaacaaggtgcycggctgtagctggatagaagtaggtggaaaggttcagacatttgtctccaatgatgtttcgctccaacgatcaacagagatgagacacatgatggaccttcttgtcgtattcgtggaaaaggagtgcaatgaagatactctttgcaaggatccagatttaatttcagaatggttttgacatcttattaaaagttggcgttaactggcat

SEQ ID NO: 5473 - DNA, 393 bp, Artificial Sequence
  Description of Artificial Sequence: Synthetic probe
aactatgttaacatcaagtttcataatcaagcaacattaattataatttattacctcttggttttctaacttgtgtcaaaaacttacagcatgtcatcagaaatggtagcttgtattgccgtagagtccatttctatcctggaaagcatgcattctaaagggtaagcagtcatctgaaagctggytatgtttaatgcgttgggcattttctctttctcgtgacgcttctatatgtttctttcagatatgtacatggagatgtcaaacctgagaacttccttctcggtcagcctggaacgcctcaagaaaagaaactttttcttgtagatcttggtttaggttagcaatgaaataaacttctttattcagattgtgttattttacagctttatg

SEQ ID NO: 5474 - DNA, 292 bp, Artificial Sequence
  Description of Artificial Sequence: Synthetic probe
gcgctggacatggaatcagtttccttcacggcctcacgggtgtcatgtcaatgccgcggcatgcggaggaggactgtcacttgcatcatgcatgccacatggacgtgttgtggtgtagattagggcatgtacaatgctagggaaggcatgcyttctcttagctctccacatcatttagagaagacacaggcatggagaataagatcggatagtctggtgattagggactagtgctcatcaagaggagacgcaggttgagaaacaaacgacgtgctgcttctgaggatccaca

SEQ ID NO: 5475 - DNA, 429 bp, Artificial Sequence
  Description of Artificial Sequence: Synthetic probe
gtgagcagtggcatgtgttgttgtctgttacaagactatgttcgcttgtgtttcggcaagaggtcactaggctaggctagtggcgccagcagtaacatgccgcagattttgtacgattatttaktttttgtttctttatgaagcgtactcggttcattccggtcgcgcatccctgcctctagcgtgccctgtcattcgtctcgttcccggcctccactgtcctgctcacccgtcaaaaacgtcccgacaggccctttctaccaacccacttacgttatgaactcgcaagtcgcaaaccgaagtaaaatgagaaagattgtggattttggcggcgctctcatgggctcatggctgctgctgcgtctttccacgctgctgcaagtgcaggccctgcaatggcaaaaggcaaaaacgaatcgctgctactag

SEQ ID NO: 5476 - DNA, 392 bp, Artificial Sequence
  Description of Artificial Sequence: Synthetic probe
gtcactatgtgccacagcttgctgatcttgtatatgagaggaacaagaacaagatggccaacacatacatgaacctcaagggtttcatggtaagaatttacactgaatcaatcttttgcaaatatgaattcctttcaaacagagtttgtcaatcagaagggatatcattttgtctactagactaacttccaccggaaccttcacgaaaaaatggcataagagctggaccaacttmctactccctccgatccatattacttgtcactaaaatggatgtatctagacatgttttagtgctagatacatccatttcaacgacaagtaatatggatcggagggagtagtaattttgtcaattactaggaatataaaattcagaatggacctatgta

SEQ ID NO: 5477 - DNA, 490 bp, Artificial Sequence
  Description of Artificial Sequence: Synthetic probe
ctgagacccagagcaagagttgctggcaccaaacctgatgggcaagaaggcgagctcgtcgggcatcggcccgagtgcgatgacaccagctgacgacatcttcacacgaggggattagtaggccgaagcttcctgctcagccactaccaatatttacactagctggagtcagaatctgtacactaagaattaggagccattgagaaattaagccaagsgtgtccttccttctaaaatggaggaaacccttcgcgaaaaatccacaccacaacggcacaaccagtgtaatttacagcctcatttcggattccacgcccatatctgcacaaaaaaacagaccgcccttcgtcagtgtccagcagaaccttcaacaaataaattggtaagagatagagaacagcttgagggagcataccggaattgattttaggggcaaagtggcgtaaatcctgcctttgcccccactgttgacccaatccggcgacacaat

SEQ ID NO: 5478 - DNA, 286 bp, Artificial Sequence
  Description of Artificial Sequence: Synthetic probe
aggtacgtgacctccagttcacggcaaccaattctccttgtcatctgatgcatatgctcttatcagtttctaagacttaccagtgcattgcatttctgatacacttcagttgcgcatggatgacgtccccattttgctgtgcgagtacrgaactctgctttccacctgagagggctccacttgcaactcttttacctggtaggtgcttctgggctaaaaccattgtgccaggacataattttctgcttttatggtttctgatgagtgatgacaccgacttttatgt

SEQ ID NO: 5479 - DNA, 356 bp, Artificial Sequence
  Description of Artificial Sequence: Synthetic probe
tccgcacccccaaaatccctcgcccaaatcctgctgctagggttcgtcgtggcggggaaccgaatcccagcctcccggcgatccgccgtgcagtagccgtcccttcagcatgggctccccgcaggatccgttctacatcgtccgggaggagatccagggctcggtaatccccacccttctcctctgcctcctcctctcgcccttctcgtcaaccgcttccaattagttattgcayagttcgtcctctcttcatgcgtacctgcggcgatcacaagtgaatggttggatcatgtgtctgtgcttgctctgtccgttgcatactgaacatgtagtaaatattagtagttctgtaactt

SEQ ID NO: 5480 - DNA, 197 bp, Artificial Sequence
  Description of Artificial Sequence: Synthetic probe
tgctcttaatctagagttcataccctccacggaagtgcatgaacatctctctaacttgggcatttgaactaaaactagctcctccagtgaaggaamcgatatttgtattactctccgcaggttgctcaacttcagctttgttagaaactgtaaagtatctagagatggaagtatttcccattttctacaactgtata

SEQ ID NO: 5481 - DNA, 302 bp, Artificial Sequence
  Description of Artificial Sequence: Synthetic probe
gcagaacgaatagaacgatgtttgttgatgattctgagtccaaaatcttgtctaaccaacatctctgaaaccagtctgagatttcagataagccaaaacagttgcaatgattagtgcagccttgcacttcatgacaaaaatcatctgtcttmcacgaacattgctgtctactaccatttccactgcaagccaagaatatacaacaactaaggaataaatacacagcctgcctttgtaaatgcctagtagatttatcctgaagctcgcccaaacctacaacgctcaacaaaaatggggatcct

SEQ ID NO: 5482 - DNA, 386 bp, Artificial Sequence
  Description of Artificial Sequence: Synthetic probe
cctactgccctgcatatgacccccgcgaagatgataatcaggggtgtattcttctttcttttctaccagtatacaaaaactgtagrgttccgttggttccagatttcgtgggacacaaacataaatagcgaaagacagtgtggtcaccacctgagctcagaaacttagaacaaacagtgacagcatacagcaggatgccacatccggatttccaaagaaattgaggcaatcaaaagttgtttggcacagaggcaagcatacttttttttcatgatgaaagccctagcgatgctgcacacttgatgccctcaaaatcaaacacctacaacagcatcagtggacaccatgcatccaccatgaaacataccatacagtagaacagtaga

SEQ ID NO: 5483 - DNA, 347 bp, Artificial Sequence
  Description of Artificial Sequence: Synthetic probe
atacacactcatatgcttgcagcacctggatgcatgtttttgaatgtacagtagcttatttatatatgctcagttggccgtgtatcaaacttcttccaaatttattgacctgtttatctgaacattgaatcggtaccatgtcaaatttttgatgttacctgaaacatattcttcagctctcacaaaattttgatgrttcaagtacatgggtgattttttgtgttgtttcttaacttggcattatgaggacagaccattcattcttttgtctgcatcatttgctcacagaaaacattttcatgacacctagattatcaatgccctgagctgagctgagctttgctgaa

SEQ ID NO: 5484 - DNA, 342 bp, Artificial Sequence
  Description of Artificial Sequence: Synthetic probe
tcattttggtgtcagtaagctctttacttattatctatttgttaggatcttggtggatcattaggtagggatgctgctactggacggggtgtattgtatgctactgaggctctcctggctgaatacgggaagtctatttctggatcaacctttgttattcaggtgagtcatgataaatcattaacctctaygtatctggtgaactgcttcttagatggtaataagatagtagtatgtgctatgctctaatgtagcaattcaaatatcaaaataagtttgtttaaacatagtggtactgtctgcacccaccactatgttgcactgtctttaatctgtgagatc

SEQ ID NO: 5485 - DNA, 462 bp, Artificial Sequence
  Description of Artificial Sequence: Synthetic probe
tattcttgcagcagcaacaacaacatgaggcagtacccaaaggcctctgctccgatcaagaagctgatccatgaggacttatccttgaggcaaaatgaggggcacaagagagtgcccagtgtgatcgccagactgatgggcatggactcgcctcctctgaactcggccaccggcgagctcgtcaccgcccacccagatgatagaaggcaggagaccaccattagatcagtgtcaaggagagaaagagatcctgccgagacggtcgcgaccaagcatgtctccttcgtgccgcagcagaattctgttcggcatgccgcgaaactggaaatccgctcattaaacgatgaggaggagaaggagattcttgggcagctgaggaagaagagtarcagtggcggtggtggtggtggtggtgaggaatggagcaagccggcgccgcgggagcatccgcaggaagaggag

SEQ ID NO: 5486 - DNA, 277 bp, Artificial Sequence
  Description of Artificial Sequence: Synthetic probe
cctcggagcctgctattgcctgcacattatcagaaacaacaggtaacgtggcttgcaactaattctacctagctgctgccccgtaccctaaccttgatgttgaacatactcaccaggggccatrggtagaacaaaatttggaggcaagtacgtaccatgtgcatttgactgagaagtaaaatcttgagttgaagaagatcattgtaccatatgttgagcttgatttgtaggcacaaaaattgtcggatattgcctagaaccatgcaaacagacttgg

SEQ ID NO: 5487 - DNA, 284 bp, Artificial Sequence
  Description of Artificial Sequence: Synthetic probe
taaacgagaaattccatcttcaaacatggccctgcattctgcacactgtgctcgcaaccttcagaagtgcgaacgctgcggagatatggttccaaggaagcatatggaggaacactacgatgagaaccatgctccggtatgtttccaaattttgaatcatatctgttttcctaaattctgatcatatctgtttccaaaattctgataatatycaaacttacccatactccatggtgctgctcaattgggcatcctgcattaattcaacgcataaaccgataaac

SEQ ID NO: 5488 - DNA, 458 bp, Artificial Sequence
  Description of Artificial Sequence: Synthetic probe
ctggaaccgaaggggtggctaggaagtgtacttcagatttctgttatctgtgtcgggcgagcgagcgcaatcagaatgtccagaaatttttgtcttccttacgatttttcatgtagggttcctcgggtttttgctcttgccgaactgacagccgggttacggtctgtagccggaaccgaagagtgtgcccttagacccgcctayagtactcagtcgtctgggatgcgtgggcgtctggtccatccggcgagtccccgggagagaccgccggagtcggggtaagaacaaagcaacactcggtgtggttctcaaggtggcgtcccggttgtgtctttgctacggttcgtgtcgtggcacgacttgtttctgcttagacatttgaccacggggtcggcacaccggtgtcgtcgccctagtctcggctatctgacgcccttccactgtgcttggtctcggtc

SEQ ID NO: 5489 - DNA, 414 bp, Artificial Sequence
  Description of Artificial Sequence: Synthetic probe
gatttttactgtcagtctgaacattgaaatccatcccaaaagcaagctatatatatatattgcagattgaccacaaatccattctctaactttctatccataacaacaacacggtagcatcctagaaagaaagtaggaacaaagtaagtgcatcagctggatcttacaacacacacagggatacatatagcttaatcaacaacccaaactatacaacaacaacaacaacaacaacaacaacaacaacaacaacaacaacaacaacaacarcagccaagacaggagaagatgctttgaagcgagaggctgcaaaaccatgtgagctgccctgtcctgccctgctcgctcttctttctttctgcttctggggctagagaaccaccttgacccaacagccaacactgccttgatgtt

SEQ ID NO: 5490 - DNA, 228 bp, Artificial Sequence
  Description of Artificial Sequence: Synthetic probe
ccccacgtcaacattttcggtgccttgcagctccgctcctttaataacagycgcacactttttcttcttctttgcctttccattcacttcatcttcccggtcttgtgactgatccatctgatcttgatcgctgttaaatatactcttgtaaggaccgagtaggggcgggcggaaacgaccatcggcaggctgaaaaatcttctccctatttctcaccacccatgtcca

SEQ ID NO: 5491 - DNA, 516 bp, Artificial Sequence
  Description of Artificial Sequence: Synthetic probe
tctggtcagtttcacaagcacaccctcttatttctgggaaattgtacgtgtgcttttgcagttaactaaccgcgtgatggtgattactgattccactacatggttagggttcaatayggtttgccacctatttaggctttctttattaatatagaaataatgggttttgcaaaatgcaaacaaccacaactctaatcctattgtttatgaattcaattggatccttgaaaatccaatcttatcgcacacaattcctacaatacacacacttaatcttgcatatccagcactaattatgtacttacttgggctacacggccatttttttgtgctagattgctcaatatagcttagggaagatggtttggttattttcttgtgacgattacatacattattttgagattttgatcattcttaggtgtggtggtgtttgtaacatagcaagttaagacaaccatctttatgctaaaagttgagtcggaagaaacgcggcagaattgtttcgtctttatg

SEQ ID NO: 5492 - DNA, 287 bp, Artificial Sequence
  Description of Artificial Sequence: Synthetic probe
ctggcaggatttgaattaaatattggtaaccattggtgaagaactccagattccgggatgctagcagtaattcctacaggcataacattaaaaatcaaacattggcccataaacgaatatgaattgcaggataagtttctggctggacataacaayaaagcataactgtataaccgcggaacagttttgggatccaaaaattatcttacttttgatagggtatagtattttagtacagtggcagtacaggatgtgactgcccatgtaacaccgatatgttattacag

SEQ ID NO: 5493 - DNA, 553 bp, Artificial Sequence
  Description of Artificial Sequence: Synthetic probe
aggtcttccacgggctatatgacgaggtgatgaccgtgtctgcgcgggggcatggcctcgtgctccgggcgcagcagctggaggcagagttgccaatcctggagaacgacatctgtcagacagattacctctacgttgcttctaacaagggtaggatcagtacagagcacaaagttccttttcccctgtaaaacttgtttctttccactcaaaaaagggcgttgctacacaggagttgattggcatgcaaatccgagggtggaccatggggttgtgacgacaggagacacgcctcgcttcatcatgaactccatgaagcggtgtcatgggcctccgagattgttcatgcttgacaagtatgatgagttaccccgcccttttctgtttctttgttgtgagttggagatagggargaagcaatgtaggtgtctatgaaatggtgatcatgtaattttgctcaactttcaggtatgatatcggcggagagggaacgtgcttgaagagatactcggacccagccttcttcaagacggattccgcgtgttctaggagg

SEQ ID NO: 5494 - DNA, 338 bp, Artificial Sequence
  Description of Artificial Sequence: Synthetic probe
agtaagtctctccaagttgggggcgtggcggagaaaatactccaggagcgtgggcgtgtcacgggtgaaatcgcactcgtccaggatcagtgttgtcaggttattgaactctggtrgatctctgtcgtcaaaattacagttcatcacctggaaaaacagagaccgaaacacgcaatgtcaaatacattgtcgtgctcatggttttatataagtcttactgatcttccagtaagaatgaatttcatatagttattagttgagacaatttagcaacagacggacggaccgatcgtagcgacgggaagctggatatctctaatttagtcacgttatgaaga

SEQ ID NO: 5495 - DNA, 502 bp, Artificial Sequence
  Description of Artificial Sequence: Synthetic probe
attttgtcagatacatggacacatctagaaaaaatgcccagtttggctctcttctatttccgtggaggatcatcggaattttagttttaattccgttacagacgcagcctgttctgttcagtttgagcatcgtgctttaaggccattatcaatgaatttttgttcaaggtgtctgaatgtgggccattcgggactcaagtgctccaataggatctaatgtttcaagtgtggtaaagagggtcatatttctgtcaagtacaaatcgttctagtctggaaaccgaagcaacaaccttagcgcttatctcctgtttctagtracaatattggcaataccttgggtattttaaggggtgttgagcgttcctcccctccttttcctccttatccacctgacagcaccatggcctattttccagttaatcccttttgctttgttcctgatggcctgacgttggatgatggccctgctgatcgcttggttcgtgctcacttggcggttc

SEQ ID NO: 5496 - DNA, 502 bp, Artificial Sequence
  Description of Artificial Sequence: Synthetic probe
ctttgctctgttgaatcatgagtacagcgcacacgattgtgtcattctagtactactaataactgatgatccggagttagctgacagattagtttctctttacgcttttgtgtttctgataaatgttcaaatcttgaaatgattttatactaaagaaaagctggttagattctgttcagttgcccttttggtgtggtaacaggaaatagataatgactgctctgatggtcatggcaatggtgatcatgacaaatatgctgctgtgattggcaccgcctctaatatgtttgcatgtcaatgcagttccagtgccagagtggtgatggactaactgtactcagaattttgacaaacacagagatctagcrcagcagatttgccaatcagcaccggtccatttactccttggcaagatcaaaatgtttaatgggagtttctgtagcttactaagttcttaactgcactagctaattaagttatgtaaagagaacagaagtttact

SEQ ID NO: 5497 - DNA, 260 bp, Artificial Sequence
  Description of Artificial Sequence: Synthetic probe
tagaagattgatgcggtaaaacacaaaaggcttaaattgtgaatgccatttattgtgaatttccatcaatacagaaggcatacttaaatttttaatgccatttattttgaatatccatcaacaagagaagcatacgtgtgaactatccacttcaaatagacccaaaaaagtayctcaagtattcaaccaaagatagtgtgtagagagctacagatctacaaacccagaatgcacttaattgtgtactgctactgatacta

SEQ ID NO: 5498 - DNA, 408 bp, Artificial Sequence
  Description of Artificial Sequence: Synthetic probe
gagctactggataaatttagcagaagaaaacagtatatgaaaacgtacaacaggggtatgtagggaatctcagcttctcccagattggatagtctagacatgtctctgtttcaaccatttctagaaccaggaagaaaaaccaccaatggttcaaagtaacattaaacgcatggataatcatggtatactttgaactgacaaaggaataaagagcacaatagcacactcacatcagatgaaaaagaaaacgtacatcaacagaagcaacaaatggataaaagacaccaccccaatctaaggaagtactcaagaaattaagcacaggaagtaayatgatatgggtaaacgaaccaaacttcataccagtaatttacacaggcgccatctcttaaacgggactgtagccgt

SEQ ID NO: 5499 - DNA, 457 bp, Artificial Sequence
  Description of Artificial Sequence: Synthetic probe
taaactattgtgtcctcaccaattattattacaccacctagtggtactttattgctagtccactctcacaatattgggtaatgcatcatggcaatgttcagaacaagtacatatacagrtttctactaaaatatgataacataaaagcctaagaataagcatgtgtttctatatagtcaagagatcaagcattggatgatcggacagaaaatcacgaactgaaaacctaaggaatatataaatatcacgtataccacttgtaccttcagaatatattgccctcctccatatggggggcttgtgtcctcattagttctcagcacatgcaaactcagtttataccctatgaggttcaagatgttctacagtggccatccatgttcggactccgaacaatggcaattgaactaagttcacaaataaaggggaaaaaaggaacattggaagtattccacag

SEQ ID NO: 5500 - DNA, 304 bp, Artificial Sequence
  Description of Artificial Sequence: Synthetic probe
ggaagagctgctcaccgccgaggagatggaagcacgcttcgctgagcgcaaggtctcccatgtatctcagctacaccacttcgctaaacttgccctggcgcattacaatggcaggaaggccgaggtatgtatacatcaaaacttccccatataatcgygttacaacttgcttcactaacaggttcttgttgttacaaaaatcgcagcacaacaagttggatctagctcaagccctgacatccaactgcttcaccgaggcttgcgggaccacatacgctcatgtcaacttcacagccattattcc

SEQ ID NO: 5501 - DNA, 479 bp, Artificial Sequence
  Description of Artificial Sequence: Synthetic probe
aggcggcgccggaggccgtggccgccgccggcgagcgctgctgcatggaggcgggcgggtgaaaggtagcgggtggcgctggcgtgaggccgagcggccgttaagaggcggacgcgaaacggaaggagccaaggaggcccggggaggagatcaatggagacgacgagaaacaaacaaaakcatcttctccacaatgacatgacatgcgggtccactagaaatgtggtctcattacgccagagacacatgccgtcatctgtgggggcacgacgagtgtgcgcgtagccgaagtgatacagctcggacggggattcggagccgtgctggactggcgcatattcggagccgtgctggactggcactggcacgacggctcgcctggtgaagtccaaggctcgtgtagcaggcgatgacatggacgacagctcggatcatccatgccctgtgggacccgcggctgttgcggtcaagctgctgtg

SEQ ID NO: 5502 - DNA, 245 bp, Artificial Sequence
  Description of Artificial Sequence: Synthetic probe
ttcctgatgctttcttggtccgtggcagcacctgctgatggccagacttcaaagctgactggtctgaagctaaaactaaattacttccaattgaatcaggtactcatctgaccgctcctgtgatctggttatcaatcactttgcaagtgttacctgtaggagagagcaaccgatcaattaggaatacctgtatycttctcttgattcgtcatgagcttcatgatcatctcagaccttttagagca

SEQ ID NO: 5503 - DNA, 370 bp, Artificial Sequence
  Description of Artificial Sequence: Synthetic probe
gaatgtagagtggcgtttgcgttggtaccttcagttcaacattggttcagayttcatcccagttgatgttgcattcaccctagcaggttagagaactcccagtaaatcaaactacgagtataatttcattatcaaactacggacttctgtatgatagaaacacaagggaaaaaaactaccccttgtagaaccagtgctaggaactataccccccttaggcttcgttcggttgctgtggattacttccactagtggaacttatcccaggagggatcgggtgatcacccaaacccctggggggattagttccactagggggactaatccatgcttctatgttctgttcggttaaccccagacaagttatgtt

SEQ ID NO: 5504 - DNA, 337 bp, Artificial Sequence
  Description of Artificial Sequence: Synthetic probe
attttagaaatgaacccgatctgcattttgatatttctcgtttcaccgataggaacatagcttgactactaatatgcaatagagtagaaatagacatgctttagcaactgagtattctttcaagtctgtctcttgtttaaatctgcacttatatgatgtgctctttggctgctgaaagactcctttgcaataatygtttcttgcataattaagcatttaaagttgtagatagatgtaaaagagaaacacaatcaattaaacacgccttgattccacgattcatttcctgggaacctccagtaacatgtaacatttagaaaatggagtaatctatgta

SEQ ID NO: 5505 - DNA, 555 bp, Artificial Sequence
  Description of Artificial Sequence: Synthetic probe
ctcacatgctactcaaggtgcatttagcttgcaagggtcttcacttactcatatcaatattgcagtttggtcacgttccttgatttgatctgtacctccaggagtataaacaagcctgtggtgctctcttggatgcacaaaagtttgatcccggtaatgcagaaattgagaaggagctacggtaacttactctcttatgcttatctcgttgagtgtctcccaaatgctagtatgattttaggttggcaaaatacgtgataaggagacaagcagttttacttgattgattatataatgtcaaatgccattagtgcacgcctctgaagaacttgttttgtttcttatgcaccactgtgtctcggtaacttatattgctggwcctagtatgtcagccctagagagaggaaccatagtgggttgcatattgacagattattgttagagctgacatgtccatcccacacggttgaattcttgcaggaaggctagggaactcatggagaattctcctggcgatggtgatgagcagtgaggggcgtggctgtgggcattgga

SEQ ID NO: 5506 - DNA, 302 bp, Artificial Sequence
  Description of Artificial Sequence: Synthetic probe
gcaaaccttggttggtgggaactacggcctgcttaacacaacaacatttgaaccaaatcctgattattacaggtaaactgacagggctgaatttctgaaagtctgggcaacaagagatattactgctttcattccaacaaggccatgccttacgtgcagaattgtttccaattattagaatcttgcagcacatacttagtgtccaagctaaggattggatccatagactgaatgcaacmttgtagagtgatgaaacatggtgccaaacttgcattcttcatgcaacttattcctgccttttt

SEQ ID NO: 5507 - DNA, 281 bp, Artificial Sequence
  Description of Artificial Sequence: Synthetic probe
tgctagtttatcaatccaagtaggctgttcttgtgagttcttatgattttcaataatcactcctaaaacataaataatagaacatcaacatgaaattagaagtgcaagtctctarttgttaagcttcggtagtttgctgcgttgaaaaacaaaaggttgatttaagaaaatgaaagctagctaggtgcctagccacatcgttatatgtatctttccaagtagtagtttgcagcaaatatattggtcaaaaaggtctgtctccattaccctgtgcattattt

SEQ ID NO: 5508 - DNA, 390 bp, Artificial Sequence
  Description of Artificial Sequence: Synthetic probe
ccaaagtctaaagagtgcaataaatatcatgtattgtcgcctatatgtgtcagctctcttttgtgctaggctgacagaacgagatacgtaccttgtttacataggactgcgaacaaggcttgacagtgggcaactgagggtgacgaaacagctgagagtgcagtgacttaatcagctttcagatgcacaaagacgaattaagcatgcaaatgcaatgggaaagctaggaacatgtatacaaagtagctaggcacctgaagaaggtcatggttayggaaaaatgatagcacgaagaaagcggagagactcaaagcatcttgtgatgaacatgaccacatgcctgcgcagactggaatctgcaccaaatattttttcgtgtcaccaaatcaa

SEQ ID NO: 5509 - DNA, 279 bp, Artificial Sequence
  Description of Artificial Sequence: Synthetic probe
ttcatgataaaaatggagctgatgagtcaaaagatgtccatgtggaatatggagttgaaaaaccacctgtgccagaatctgtttcagacccctatagcagtgctgattttagtgcagtttccacaagtgaagrttgtgcgtatacttctgatcaatgtaatgaaaatgaaggtatacagcaacatgttctcttcgttctttcattatttattacaattccctggaagaataatataatatagtgttgagatgttgtgctattgaagcgtatctacatga

SEQ ID NO: 5510 - DNA, 308 bp, Artificial Sequence
  Description of Artificial Sequence: Synthetic probe
ggctagaataatgtttctgaaaatttggattatagttcttctttcaagcaggattataataattatgagttatgaagtcaatttattcaatatttggttctgggatagctcttactagggtttcctaacctttgacggctaataggagmtcatccaacttagcattgagttcttgattttcttgaggtgtgacggagttcaccgtctttatatttgatatttccacatgccattgggcatggttttcttgcatgttttctagaagctgcttttcttcggtaatttgtttgcccataaatgttcctcca

SEQ ID NO: 5511 - DNA, 345 bp, Artificial Sequence
  Description of Artificial Sequence: Synthetic probe
ttcctgaagttacagctctgatttgtttgatctacttttctgatcagtgaacatcccatttcatttcatcaactgcaagtgtttgtcaatgttttgctcataaacctgttcagggcagcaagaggttagcagatgggtctcctgttccgtgcgagactgcaagtcaactatcacatcattcggacctagggattcagcttatcagttgaaacaatgaaataggttaaggtaaagtgcacaaaattattttgaaatgggtcaaaactatcacgcggggtaraaggtggagaggtcttataaagtattgcatcaaaagaaaaggccaaatcacatggcaagttttct

SEQ ID NO: 5512 - DNA, 289 bp, Artificial Sequence
  Description of Artificial Sequence: Synthetic probe
acaaagagtggaggaggaggaggaaggaagaggtgctactaggtgtggtgtgagttgtgtgtgtgtgtgtgcggccartatttatacacacacaggccaaggccaatgccaatgccaatgccaatgccaatgccaatgccaagggcatcatcacggtgcccgtcaattaagggggctgcgaggcctcttgagtgcacgtaattagctagcgacggcaacattcatgtgtgctttgctttccaaccaaaccgatcagaggagggtctaaattaatagggcggctggagga

SEQ ID NO: 5513 - DNA, 288 bp, Artificial Sequence
  Description of Artificial Sequence: Synthetic probe
gtggtaatgccctcaacaagtggaggcatctcagcatcagtgctaccttcacaaggaaatgccgcaaactcatggccatctgcatcagttccatgagtactttcacctgcatcttttgactcatacaaagcatactgctcactaccattcatcttatccacagctgtgtcaatttcctcctttgtgctaccttctatgatatcatsttctgatgttgaacgaaattcctcagaaacttgcatcttcttggcctcgcagacagagattgagttgttctcgtcctctgca

SEQ ID NO: 5514 - DNA, 339 bp, Artificial Sequence
  Description of Artificial Sequence: Synthetic probe
ctttaatttgtttccttgcatatagcggtgtcagttagtagtactccaataaaacttgcgccattaatttgggatgaagattgcatgcagcagttataccyagcacaatttgggccactaaaatgcggatgcagggacggcatattcctctctgggttaaactgctaagtgcatactatacatcaattagattaatatcggtggttagatcagatcaattggtgtaaacaagcggtgttgatttgtctgtgtagaatgagcggagtgtccctaggaaaactaatgtttgcttgtttaatagtagcggtgataatagtagtggtgataataggaatgttg

SEQ ID NO: 5515 - DNA, 301 bp, Artificial Sequence
  Description of Artificial Sequence: Synthetic probe
ttttctgcatggctttgcctgccttcaaacgataaatctaagccaaagaggtgtatgagaattgaccactatccttatcatctttgaagatgtataccaaaagatttctcaacatgattcaratgtttatagacgaagtcatggaccaagtcacctggattgaagaattctatggtgagtctggcaggggcaactggcctgtcagctgagcagtgaaaaaagctaataatagctgtggagctggtagctagaccttccattatatttatggatgagccaaccacagacttggatgcccgtg

SEQ ID NO: 5516 - DNA, 399 bp, Artificial Sequence
  Description of Artificial Sequence: Synthetic probe
ctttgggaacgaaaacttcaactaaatcaatgaaagtgcatgttactattggttcagtatcatatctgatggtagcacccattcgttcctccattcaaaatttgctcctaagttatctggagttcaaattatgtcacctatgactgtgaagctagtagatggcaattccatccaatgtaacatgcacatacctgcttgctcttggaattatggagatgaacaatttcagtcacacttcaggcttctctctttggcrcattatgatggaattcttggtctggattggctagcatcattggggcccatgggggttgattgggggaagaagtggatgacagttcatcataagggacattctgtgacttttggggggattccacagccagaactgggttgttt

SEQ ID NO: 5517 - DNA, 290 bp, Artificial Sequence
  Description of Artificial Sequence: Synthetic probe
tatgtactttctgctggctgataaatttgactgtactagattctgactgtgatggtagatatcttttgcgacagagaacccctgacaccacttacttgcagtctgcaacttttatgttgtaccgtctgatgatgtcgtatctccttttgcctttgtgccatttgacatagtaacaactagacctcattatgccctgcaaggttttaaagactctwtaacaagccctgctgttggatacctaccactaagtataaacttgacttcagtgtattcaaattttcctgctagag

SEQ ID NO: 5518 - DNA, 378 bp, Artificial Sequence
  Description of Artificial Sequence: Synthetic probe
ttcatgttcacctacctcttcttccccgggtgagtcaccgagttgcattttcacagccagctagctgctgctcactgataaacagggataatcatggcaaactcggtatgttaattagggaatctatattggttgtatatgtataaatagttcgcataaagcattggtaataccgacgtaccgtaatctgttcagagatttggtacgggcttcagttgagaatttggtgtgacagtatcctccycgtagctagacacatctccatagaaaagcaaagaacatgttccaatttatcgccgtatggcctaatatcatcactatagataagtagttttatactcttcaaaagatcatcaactgaattcagttttcatggat

SEQ ID NO: 5519 - DNA, 325 bp, Artificial Sequence
  Description of Artificial Sequence: Synthetic probe
gcttacatgtagaaatcttttctctcttctctcacatgcacatgggggttaggactgagcagtgacatcaattttttagccggctaccctccacacagcccccaaaggcattagtcggatgttaaatggggaggagtggagatgcttttatgcaccattgcattracaaaaatggtatggatattatttatttaaaggtaccactgacttgattaacacttcttttgtaacataagacatcaacttctcactccaccctacccttgcacctgccccttgacctttcagcaacatgatcaaactgacgatctgcaaggagaccatg

SEQ ID NO: 5520 - DNA, 316 bp, Artificial Sequence
  Description of Artificial Sequence: Synthetic probe
gagagctcccggtggcggtcggtataggagatgcaggagctctcccggcggaggtctgactccaatattwggatttttagtcaatggttccaagtttatgactgaaagaggaaatccattattcagaaactgcataaggattgtaaaagaagacgatttttgatttccgttacacagttttatggagaatggcattatctacccatgatagaaaagtgatacagtttgcataaatagatatgttgatatatgaagtctcactgaaagttgaccgactctgtatgttcacaggttcacgtatctctgaatttgatga

SEQ ID NO: 5521 - DNA, 323 bp, Artificial Sequence
  Description of Artificial Sequence: Synthetic probe
attggagtgtgccctggaaggagaggacagtgacacacccaggggcctttgtctatgaaaactacggcggccgggagggctgtccagatggaaactacggctcggcgtcagcttgctcgcatytgcttactccgtaaggaatcaaacctgcgtgattctgaaacttttttctttaatttgtcccctgattctccactgcatcatcggaaattcagaatgacaaagcagcagtactaactgtcagaggttgatgatagaatagcaggagtatatatagtagttgactgagatccaagattgcatcttgtaaactaatttcatta

SEQ ID NO: 5522 - DNA, 335 bp, Artificial Sequence
  Description of Artificial Sequence: Synthetic probe
ctgctggattccactgaataatgcgccctgctcctcaatactcttgtaaattttagtccgygaccgctgaaccatgcctggtgatgttgctgtagcatgtaggaaattgattaacaacgaatagagcccatgagcttgatggcaggtttatctggatgatcctcaatttgctggaccaggtagtctcgcttgaggtcgtcgctgtaagaacccatgagccggacttccttgagatcttttatatgctctagtccagaaagatgcgccacagcctatgacctagcggtactagagattctgcaatagcgaaccttgagcaagtagtactagagctt

SEQ ID NO: 5523 - DNA, 295 bp, Artificial Sequence
  Description of Artificial Sequence: Synthetic probe
aaaattcagaaatcacaactcattacatcactcacctcccacggagtttgcaggtgatgcagtatacatggaacagtacaatattactagcagttaggatgtgaatgttatgcggttctttgaactccytttctttataaatggttgatgtgaatgtcttgtccttttcttgaatgatgatgttacctaaataatgatttagtttctccacctcctttagagagtctgtagcatttctaaagaagctatcatgtaataactccctaaaattgttgttctcattttgatgcgcatg

SEQ ID NO: 5524 - DNA, 276 bp, Artificial Sequence
  Description of Artificial Sequence: Synthetic probe
attcaaacaactattcagattaggagccagaaagaagcacaaggagcgagaaggcataccttggggcgcgtccaattcttgtgtgagaatgcgaaggcggtgaggacgcggatgccccacctgcgggagagcarctctgactgtacttgtaaagtcacaaactgtaaaccacgttgacagcccaccgaaaaccgattttacggtcctaaaatgcctgtcgtccgccgtgcgagatcccagcccctgcttgcagcgaccacaaagtgttacagcgac

SEQ ID NO: 5525 - DNA, 406 bp, Artificial Sequence
  Description of Artificial Sequence: Synthetic probe
gaagtgcgccaacaccaacggtggtctaacaggaaggagtatattacaaggtcatcatccccaactagatttggtcatgctcaagcaagckaggtaagttcctagcttttgtggtcatgctcaagcaagctaggaaggagtagattacaacgcatgcatgctcagtccatggctacattactacatacccacattgtccattgtatatggatataagttgacttgcaatcaatcactagtctttcttgtttgtcgttttaaaagcaaacatgcactggttaaccgagtattttcaccagggtttaatttaggatgatgtccatgctactgcccaatatgcgccattggtatttggcatttagtcaaaaaccacgatgccctagtctatatcaacaacacaaggcta

SEQ ID NO: 5526 - DNA, 298 bp, Artificial Sequence
  Description of Artificial Sequence: Synthetic probe
attcccaaactggtgcctcggcaaattccttcataatacaaacgtttgaccaaaacaatgtcagctttttataacaaattataataatggaacaactaactttgagcttatggtgcaggttttgcaacaatgaaggcacagctgaacaatccaacgaacgatgttgcactcttattgctctgaaaatgmatcttacagtttaagtaagcaaccttactttcttgtagaagctgcatagcatacacactttcagaattcacaagctcttctagcaaaaggtaccctaagggcacgtaca

SEQ ID NO: 5527 - DNA, 267 bp, Artificial Sequence
  Description of Artificial Sequence: Synthetic probe
actgttaacgatgtgttggttggagtcacgtacgctgctctatcgcgctattacttccggagctcaggtgatctactggcaagctaatagcgttgtctttaaatagggcatcccatattytcctccagaacgagagctgattctgtttagctgaataggatagtgagttcgctgcttgttcccctcatttttattaggtgacagcgacattggcaaggagctacgtttgcgatccatacttcttgttaatttaaggccaaccacaag

SEQ ID NO: 5528 - DNA, 289 bp, Artificial Sequence
  Description of Artificial Sequence: Synthetic probe
ggtcgtggcatcttcttggaaagatcagcatctaggaaggatgcataagctacgcaatttgctacacttgttttcctaaggcgacacaaaatttcacatctcagcttaactaaaaaggcacagggcaaaaggaaacataccatcacaaagctctttgtcctaggatcattgtaccgcgcaagcaaacagccctgttgaggcttcaayccgtctttgagtagctgggagcgtagctccttctctttcttgaccacaatttcctcttctggtcgcccactgaattttttca

SEQ ID NO: 5529 - DNA, 299 bp, Artificial Sequence
  Description of Artificial Sequence: Synthetic probe
tagctacaaatctcaataattacaacacccatctctgtaactcaacatcttcacacacacaaaaaggaaaactgtaacaacaaggcatgcacaagaggccttctctgtcttatgtactgtgtttatgttcacttcgtkctccccttttttatcatctccaccttcgcatacactttcttcgtacataattttggtattccattgttatggcgtaacgggattacgaacacgtataatccatgtatatgtgtcgctttccagtagagaacactagttgtttgccagaaatcaccatgaca

SEQ ID NO: 5530 - DNA, 396 bp, Artificial Sequence
  Description of Artificial Sequence: Synthetic probe
tttgccacacatgacaaatacaagtctgacaaaacacttaattttgagaaataaaatagaagtggcaggaagcgcacaagagctcgctaatccccaatattctagacttcaagctttattatttagtcttcaaacttcatcatccagcccttgagaactacaaccaccaatacaaacatcaggaatataatatattgaagatacgtcatacatgcagatctggacattrattctgatagtttagcttaagctcaccaaaagtttagcactgggctttgtagcggagctggacttgcatattatcgctgaattttgtgagaattgcgcttgcaaagatgatagtgattccgcaaagcagatgtaccattcataaccggatgagcagggatgtccttt

SEQ ID NO: 5531 - DNA, 455 bp, Artificial Sequence
  Description of Artificial Sequence: Synthetic probe
gttgcaacctatcaccagaatttgtatttctagaatattgattaggtcagtccccactccacctaaacaacaaaaccatggaagccttagggttaattcaaaacaggtgttgcatcttcattagcaycagaatttctgaatctctagtcatcttcaccttttccttgaatttacttgtgtaccattgatacatacagattggccataccctaaactacaaatcaatttctgcaactcttgctgtcttgaccaaatcagaaacatgataatttttgcaagaatgcccttctccacttttgggttcatgtggtgaacaattatctttttttacttttcaattttctcacaaattgttaaaagaaataattcttccaaagtattttgcataattagctggatcaaaagtctgcaatttattgaatcatagaagggaggagacagaaactataccttgg

SEQ ID NO: 5532 - DNA, 319 bp, Artificial Sequence
  Description of Artificial Sequence: Synthetic probe
cacgggcatccaagccagtggttggctcatccataaatataatggaaggactagctaccagctccacagctatygttagtctttttcgctgctcagctgacaggccagttgctcctgccaggcccaccatggaattcttcaatccagttaattctaccaggtccatgacttcttctataaacatctgaaacatgttggacagaaatcttgtgagatgttttggtatatattaacatcaaagatgataaagatagtgatcagctcatacatctctctggtgagatttaacgtttgaaggcaggcgaagccatgcagaaaa

SEQ ID NO: 5533 - DNA, 358 bp, Artificial Sequence
  Description of Artificial Sequence: Synthetic probe
ccaaaatgctggataaactagcgccctgtgctatccataatccataacattagaagttgtaaatcattcatttcagggcataataagtgaggytatttgcatacttcctctatcccggtttaaaggacacatattggaaatcatgcaatcccaaaacacccccaccttctaggcacataagcatttaattttagagaaagagccaatcggaggagtaattagacccaaattagccccaatcaaaagacgcctagggcccagagatttgctatatgtgccctttaaaccgggacggagggagtagtagttaaatttgtgtgtatgtgaaatgtggattatccttcatggtgcacccatc

SEQ ID NO: 5534 - DNA, 342 bp, Artificial Sequence
  Description of Artificial Sequence: Synthetic probe
ttcctaattctctgctatagccctgactacagtacacatggatctgagaattaggacctgcgctgcacaagttgaaacttttaggacctgcgcwgcacaagttgaacttttaggacctgcatacagttccgtccaaacttttaggaccttcggtgcattttactctaaataataaatacatatgatttttctattgttgtaacataatatgcttagctaagtcacagataaagattaactggtgtgtaatataaatacaatacaaattaaggccagaacattgtgaggctcggatcaataccaaattagaacagacaataacgatctgtttctccaggagcg

SEQ ID NO: 5535 - DNA, 294 bp, Artificial Sequence
  Description of Artificial Sequence: Synthetic probe
gcgatgacaagcttgtgaaggtttggaagaccggttcgtggcgctgcgtccgcactatgtaagtgctgcttatatttttctcaatgtagctaacacgaagcagacaccaaaaattgcatccttcatttggcacgtattcagtctctaagtcytgttctgttttatggtgtatgttttgtatgagaacccactgcttatctttgatagctgactttaaacaagcaatgagcatagtatttattataaacagtgcagatctatatattattgtgttgccaatactattaaatcttt

SEQ ID NO: 5536 - DNA, 338 bp, Artificial Sequence
  Description of Artificial Sequence: Synthetic probe
gttaacaaaatagtaaagcctcataattgttcatccaccgctgaagtgatctcaagcatggcagaccaagcatgggtggcagaaaaggcaattggcatacttcagactgaacgaaacattggtgccggtgagctgcaacaaaagttaraagatgagtacgatgttactactgggtatcacactgtttggagggccaaagaaagggccatggataaattatatggtacctggggacaaagcttccaaaatctattgaacttcaaagctgagattcagaagagatctccgggtagcatcgtagaggttgatgtgaagagtgaaggaggtaaagcatattt

SEQ ID NO: 5537 - DNA, 256 bp, Artificial Sequence
  Description of Artificial Sequence: Synthetic probe
gcagtaagaagtaataattatttgcatgttgactaatattaaacattgattgtcttgttgcatgagaagagacgatcagaagacatgtaaaattgatcatggtagggggcccttaccaacacggaaactagctcagttgtggatgttaaaagattcttggccyggctatttgtttggattctaagagataagaagagtaaccatccaaagcgataatgttcagaagcatgttgcgcatttgattctgaagaattat

SEQ ID NO: 5538 - DNA, 306 bp, Artificial Sequence
  Description of Artificial Sequence: Synthetic probe
gaaaaaagctatcagaaagcataatcagtgagaagcttgctgcttgtgtgarcatagtgcctggtaggaacacagttctatctctttgtttattctgtgcagctatagacatccaaatttagcatactcttgtcaattgaccatcatctacagcagttttcagctctcaaagatcataatctcttccagtttcatcaatggaacaggatgaccattaaacatttcagttctccaaaatgtgacacgggtaatcatgtagttgtttatgtaagcatcatttggcctgtcaggggcagcatcattacc

SEQ ID NO: 5539 - DNA, 228 bp, Artificial Sequence
  Description of Artificial Sequence: Synthetic probe
tgcaggcttgatcttctagcagagcagctacccagttttgaagaagtgcagtctggccaggcaaccttarggtcatggaaggaacaatatcagaagtaagctattcttagattctttcccagtctccttgctttgcatttagtttctgtaccaattgattccgtgtttgcaggttgcgggcgagcctcaggagtgctaatttacaagcaaaagcaaatattaagaaag

SEQ ID NO: 5540 - DNA, 419 bp, Artificial Sequence
  Description of Artificial Sequence: Synthetic probe
tccccctagaggcggagtgccagcgacaacggccactctcacacacgtagggaacgacgccaagttttgccttgtggagtgtgtgttgcgcgatggggatcatgcttttggtcgtgatggttgtactctccacatcaccacgtttggcctcaagtactctcataagggagagctgcaaaccatggaccgtgtcactaactcatatacagtgtcaaagcatgcccccttgttttctcccgtggcgttctggatgtaggaactamctctttgtatgcaatatgcatactacgtccgtccagtactctggtctctggatgtaaattatatgtgatttctggcaataacatgcttgcttctccggtcaattgtgtagaacctgcttttttcttatatgtcagttatgggaaatgcaaagatgc

SEQ ID NO: 5541 - DNA, 372 bp, Artificial Sequence
  Description of Artificial Sequence: Synthetic probe
caccagccgtgccagaatgctcacttcttttcaggtatggtctatggtgtcaaccatctcaaccgtcaacaaatattgcaatatgccttcaaatccttgactcccaaatttctgttttgccaagtgaatgctgaatatcctgccaattgcaggtttcttctgagtggcactctactggacattgtggaattgtkgtgtaagcatgcggccagcggtgtaagcatgcggccagcatagatagagtatctccgtccgtttcatgttgttgcagtgcagtgtagtgcaaatcttctgccatcacctagaccagtgcatgttgttgacctaaatacgctgattaaaccatgtaatgtttaagcgtatcagtttcat

SEQ ID NO: 5542 - DNA, 330 bp, Artificial Sequence
  Description of Artificial Sequence: Synthetic probe
cttcgccatgatcacctgctcgcccgacttcttcgtcaccggcctgtaataacgcacaatcttgtcccactgtctgctactctctctagtctgtaatatgcatcttctaattcggatgctccacaccacagcgaggctccaagccagaacctctcgggcctgctcgccccgaccatagccaacctgaccagcctggagaccgtrtgagtgtctcccccttctttcacaaatcccacggattaccctttccactgcaacttatttgttcattcattcagagtttcccattttcatttctgattttggtatcattcccttgggtgcagtctt

SEQ ID NO: 5543 - DNA, 310 bp, Artificial Sequence
  Description of Artificial Sequence: Synthetic probe
attagagaactgtaaaaggtgcagaggactaataaaaatatggccacatgcagcatagagaaataagaccacaaagttcagatataagagaactcactctcatgggagtctgaacagctaaccgctcaagtatcatgttcycaacaaaagtgtctaatgtttctgcattcacaactgaatcttgctcttgttgggagaacaacaatgaattcctcaaattccaggggtgtccagaattcacactggaaacgaaacatgcaagatccagatgaaagcataaaagatcacacaagtactcctcgcaggatgt

SEQ ID NO: 5544 - DNA, 322 bp, Artificial Sequence
  Description of Artificial Sequence: Synthetic probe
ctacttagaccgagacaggccaaggcagatcaaaaactgcgattccatatgatgtacatccactagccattgatttgggggaagatttgygatatcttcataaaaacatccatgacctagcatcagagacatcccagagaaagagaaaccaggtgagtcagatcataaagttaccatgtgagcagatgacactggttaataaaattaaaatatacctcttcgtcattttggtattttacaatattcagagggttctgggagcactgcatcaaaaaattccatgtcagaataattaaataactagggataacttgataaatca

SEQ ID NO: 5545 - DNA, 302 bp, Artificial Sequence
  Description of Artificial Sequence: Synthetic probe
ctcttgaaattacagttacattcagcgtaatgtcctactcgtatccataagcagattaaaatcttattatgttgataaaattccaaaaaaatattgactatgtattcgtagacaccattattctcacgagtagagatattgtgtttaaaccagtgtgatgtcacttcatctaagraaccattttgttgcttaatacaagtttctgattgaatcattgaatatatctaacaaaataaccatgcagctatgctcacaaggcattccattaccttgggaaaaattacccactaccaaacttaata

SEQ ID NO: 5546 - DNA, 320 bp, Artificial Sequence
  Description of Artificial Sequence: Synthetic probe
tttcctaatattatgctggcttgctaataatcactctataagttctgtatgaacagrttataaatttggccacggtgaataacatattcaaggtagatacttgcaagatttcattgattatgaaacacatacacctacgatggaacacctcaaaacctcggaagccccatacaccaataggaaggcatagcatagaagtattccaagaaccaagctaaaacatctttggctataaccattagagttcatattgcagtatcctcacaagaggtagcacatccctgatattcctataaattaaattgaatacaaaggcccat

SEQ ID NO: 5547 - DNA, 311 bp, Artificial Sequence
  Description of Artificial Sequence: Synthetic probe
cccagcaacgagcgcgtcagacactttctgctcatcagcggcagacgtaacagcatctttcactcgcccttccgctgaactcgcttctgccctctcctccttaagctcacgctccagttcggccgcgcccaaggcggactgagccactgtcaagtcacccaccgggacaaggcctcggcgggcctccttcaactcggctgcaaccgcttgaagctccttgtttgtatcctggacgayaatgagctccttctccaagcgagacttcgcagcaagccggtcggccaattcatgttgcagaccctgcgcacaaa

SEQ ID NO: 5548 - DNA, 557 bp, Artificial Sequence
  Description of Artificial Sequence: Synthetic probe
ggatagtttattagctttgatgacaccgtaatgttggcctcttggtcacagccgagccacctgtactgaaatgtctgaaatgtatttcctttcactgtatccctcaccctgtcacccaggcagaaccaacaggatggctccactaatgactctggatctgactcctgttcattaaatcgctatgctaagtccatatctcaaagtgctaacaaacggccctaattacatcctcgcctcgcatcatgatcagcaaaacctkgcaaattacgcttgtcccctattcattgagggaactactgtgactaaagcaatactgtaaggtggtgtgcaccgatggatgcttttccagattcctctcatttctaacatatggtgcatactgcatagcacggtccacttccatgctttgttcattagttatcactatctctcccgaatataatctatcttcactccctagcaaattgagggaaatagctacaacagaagtttataagaggtggtgcatctgctcatttataagagatggtcatcgtttgatgtgtgaaggttgttgg

SEQ ID NO: 5549 - DNA, 279 bp, Artificial Sequence
  Description of Artificial Sequence: Synthetic probe
atgtctgtagatctgaaacgaggagagactctgccaattcacataaatgtatcatttccttctttaccatgtgaaggtcagttattgattcagtatatatccagtataagtctgatacaaggttccatttgracattgttttacacatggttcatgattttgatatatatttcattgtctcctgttgtcattcagtcttgagtgtggatgcaattgacatgtctggcaaacatgaggttgacttgcatacaaatatttggaaggtaactaccatctgat

SEQ ID NO: 5550 - DNA, 481 bp, Artificial Sequence
  Description of Artificial Sequence: Synthetic probe
gtccgtcctcctgatctggcgggacgagctgctttggtggagtcgtagacgtgacacatgcctgagacaactcgtgaaagaaagtcaattattttccgtctcgtactggttttgacattacgtgatgcttgcacttgtagcttcactttttttgggtagattgaaactcttgcacggaaattctcatgcgtcttagacttgatcgcaacaagatcagaygtagggctttcctccgactgctactcttttctaagaaaattgaaaaatcacatgaattagtactttttgtgacgtgctgcttcagatcacctttttctctctatttttttcttgagcttcatggagtaacaagaccagacgtggcactttccttcttgttcaaactgattagaaatagcctgttgcgtactcgccacggattccatgaagctcctaattcgcatgcttggccgcgatgaagatgaagtagaccatggcggtg

SEQ ID NO: 5551 - DNA, 532 bp, Artificial Sequence
  Description of Artificial Sequence: Synthetic probe
ggcgaccgccaacggaaacgcctagaccggccaagggaaaggcgcgggttgcaaaggctgcccgcgcgagactggacacgatggaagccatagcctagggcgaagggtttgtgcgcggcggcggaggcggttgttacctaggagaaaacctttatacatagagcaaagggtctcttgaggccgttggatcgctctcgccttgtatctccttcccctaaaactagttgaaccacgcaataacccacctaataaccccgctctgcctgccggacactgctggcttggcacggcgtacataaagcagcaggcgcatgccttccatcgccaggacgccagtctggactgaaactcacttgcttgcttggtggtcagttagttgcccttgttccaaaggcaaatctgttgaatgatactacccctgatcattaggtgaacacaatwtgtttgtcaggaaagtatgctgatgttgtcatatggtatacgaaactgaagaagaaggatttcatgcagtttatcagtctcaaggcaaacg

SEQ ID NO: 5552 - DNA, 198 bp, Artificial Sequence
  Description of Artificial Sequence: Synthetic probe
tgcaggttctgatgctggggacctggacaacagtgatgatgatgatgacaatgatgagattgcacatgtgtattcacgtgaggatgactgctatcatastccaatttatggtggccatggtattcttcacagcctctccaatgtgataacaatgaacttgtcagcacattatggggaggtacatttcacgccgctgat

SEQ ID NO: 5553 - DNA, 371 bp, Artificial Sequence
  Description of Artificial Sequence: Synthetic probe
atcctatctgcttgacagatttctgaaagtctgaatgctgttagcctgagtattacttacacatgtttttatcacgtttatatcgcgacacgataaatgtcgtatgaaycattttaactgtttgctcttatcatcagcataatgggttgcctctgtattaccaaaatgtcacacgtaccattaactatcaactgcatatattccttcgttatcatcggccttttgatcttattatcagcgacgaagcgcacggtcatgctctgttttggaacaggctttctattccggggcttcaccatgtgcgagcacatgctgaaacccactgtcgggtgttcccctgtggcaactcttcaatcatgctgggatcatcg

SEQ ID NO: 5554 - DNA, 299 bp, Artificial Sequence
  Description of Artificial Sequence: Synthetic probe
ataatcttcatctccatatgctaaaattttggatatcccctctagtgggatctgttggatgctcctgcacgaggccttcagctacctccgctgctgctcaggtccggctcacagctgcctctgctcaggtgaagaatctcggtgtaagccaggcagtagggtgctcacatgctttgattggtacwgataggtggtagcagtatcttcacgggaaagagagcataggtggttcacatggtctatgccagaaacgctgagaatgcttgtgactcttattgtgttgcaatcaattttgtctc

SEQ ID NO: 5555 - DNA, 337 bp, Artificial Sequence
  Description of Artificial Sequence: Synthetic probe
tcttttaagaaaatttagtttaccgacttctcttttaaagcatataatgcttgtttagttcaatgtatcatatcatattactgagtttaaatgagtataatgtacagcaagccagaaatatagcagtgtcagcaaaatatgttcttcaaaaaaatygctcttgtaaatacttgcgggtgtaagcaagtactagttcttagtggcgtatatctgttttagtatgagagaatagtgacgtatatctgttttactctccagtctgctgtgtatgagatactgactgctgtgtattgtagatttggaagaatctgctctgcccctagaagaatatccttct

SEQ ID NO: 5556 - DNA, 382 bp, Artificial Sequence
  Description of Artificial Sequence: Synthetic probe
gacacgacttgtacaaactactagtatcatcagaacagaattacacttggtacaagtatagtatacctgaatatattttgtgcctcaacagaactcttgtattcagtacarcagcaaaatgctcaagaaaaaaagggtctttaccaggtctgaaagcatccttctaatttgttcatttttccagtggcatgcttgcgatttatatgccttctgtttagagatgcaagtgggatcccaacaaaattccagctatagttcattttgtgatttttaaacatttaacaaaaaaattgaattacaaatcaaaaaatgaacaaccagtgggatttcggtgggatcccacttgacaccttacttctgttgatgaactttctccacacta

SEQ ID NO: 5557 - DNA, 558 bp, Artificial Sequence
  Description of Artificial Sequence: Synthetic probe
aggttggtgaacaatgggatccagtgataaatcttggatgctggtgcttgtggttgtcccagtgcttcaaggagtattttatagatcctgtaccacagtttgagcactacatgatgtttttcagcttgcttgagcagtgggaatttcctagatattcaagtaagactaatcctgggatgtatgcgctcatgaaggtgcaacacttggataacaggttaagaagaccatgggatccgggaaaacaagaggttgtgatagatggcttatttggtttgaaactccatgcagaaacatacatcagtcagtgcaattttgctgttgttaccagatcaaggaaggatgctaaagcaaagcaattaaccactaatattttgttggataagatgccagcttgggaacgaagtggtttcagccctggattgcagccacactyggggataacaccatcaagtagaaggcaggtaagtccagattgtctgcccattattattgcaaggtttgccagatgttcagttgaacggttggcgttgtacaagtgcatttggaatgttcagaagg

SEQ ID NO: 5558 - DNA, 458 bp, Artificial Sequence
  Description of Artificial Sequence: Synthetic probe
actgattttcacccgcttgtctggatctcctcttcaaccttgccttggtcctcctccttcatattttcatcgccccaggttcggatttccactgtggggtggttcagaagcagagtagctgtattcctgatggcatcctctgatgcctccacctcccgaaccgtggcaccagtgcaaatgatcttggcgataatatgtgtaacagaagwgaggtgctggatgccaaaatcaagatccctgccagcatctaatggaacctccagcttttcaaggctgggcatggccccagcttcaaacatcaggcctttccggttgctccagcaggtgaagcggagctccttcgggcacatgaacatgttgctgcttatgaagagtctttgtttgggagcagctgattctgatgacaaccagagaaacagcaaagcaggtagcgctccaaggatctcaaatgtgtcctc

SEQ ID NO: 5559 - DNA, 359 bp, Artificial Sequence
  Description of Artificial Sequence: Synthetic probe
gaaacaagcagggcacatgatcttgagctattggcaaaactatggaaaatgccaagactagataatagacggtgcgcacagtaaacctgaattcatcaggagtttctacatttgttagttgattcttcaaagcagaaaacctgtagagttaacycggagttggtatacaagccttgggcatttatatacatataaataccatgataaatggttgagcagtcaataaaacagaaacaaaggtagttccacgaaccatattcccttttgttgaataatggtcaagacagaatcatcctttacaacaattccttggcccatttgttgggtgccagtcttttgcaggacaaagatagcaacga

SEQ ID NO: 5560 - DNA, 311 bp, Artificial Sequence
  Description of Artificial Sequence: Synthetic probe
cctaacagaattagtagaacctcaagtttgcttatctgtaataaacaagcaccaagtgatcatagtgcaacagcagaataaatataataataaacaattaacagtacccacaatatgtactatggagtcaaagtggatcaattccgaggatctctagaaaagaaatgactcatgtgtcagcaaacacyggagtcctaaataactcgtttggtaagtctagttacaaacttacaaatttccgaacaccctgtatgcttgaaagatctaatgaaaaaaatatttgtttgtattgtgcaaactgcaatgcattc

SEQ ID NO: 5561 - DNA, 279 bp, Artificial Sequence
  Description of Artificial Sequence: Synthetic probe
cttgatggtagagtacaacatatagcacgaggaggaacctgagtcatcaccactgtacatatatttagtaattctaaaccgaactttcatgttcatacaatcattcataccayggccggacatgcttccagatttatttggagtattaagatgtatataaatacacgtacggggtgatattactatcggttctgtataatccagtaacttgtactactaggaggtgtgcatcaaggctgattgagcaacatatccttccattgctggtggagcaggggt

SEQ ID NO: 5562 - DNA, 223 bp, Artificial Sequence
  Description of Artificial Sequence: Synthetic probe
gaggttgcccagcacggggagctgcttcggagggccaggagcgtgtcttgctccctcccgcgtccctgccttactgctcctccacaagagcargtagagcagaggaaggagaagcagtgcagatatgaatgcgaggagaggccatggcgacgggttgggaagagaagaggcagccatggagtgactggagttgataaggcactgaggacggccaccaggggga

SEQ ID NO: 5563 - DNA, 201 bp, Artificial Sequence
  Description of Artificial Sequence: Synthetic probe
agctcaaccttttgcaatgaaaacatatgcacaatatgtatctgtaccatgaaacgactaatctcaagtaggagattagcctgaaaagcaatttatattgagtgggatactatgaactaaatgtgcatacccctaaaacaaccttctycttcttaatgaccatatcttgtatgtcagctactacagttcatgggattcctc

SEQ ID NO: 5564 - DNA, 235 bp, Artificial Sequence
  Description of Artificial Sequence: Synthetic probe
agtgcagatcatacttcttgattcgtatgataatgctagtggctaaagatgattcattggatcatccaaaaaagttttttttgtcaacgtgtaacatggaagtggtctgctttggtacrtgcactgttccatttctacctgctcttactgtctatgaatatctgtggtttactactttacttcatgcaaaattcaacaaaggcaagttcagagaaagcatactagtgtagtttgt

SEQ ID NO: 5565 - DNA, 317 bp, Artificial Sequence
  Description of Artificial Sequence: Synthetic probe
tcacatagttttctttctgtttttaggtacagtgatacccaaatgaaagcatactgctttctctttgatcttagtttctttgtaattcggttaaaattctcactgttttcttttcttctcagatgttacagaaatgaagccaaaatagatatgagatactttgcaggagagatctttgatggttttcggcttgtggcaactcaagcaatgaaaggtccttttctktcatgctttagttcgtgtcttggaattatctccttccatcacttaagtacgcaagtttgtacttcccagtaagtcatttgaacatttgtgcg

SEQ ID NO: 5566 - DNA, 384 bp, Artificial Sequence
  Description of Artificial Sequence: Synthetic probe
cagctccgacaactcgtcaacaacatcaacctgtagctcgtcgttgtccttgacattctccctaagtcaggaagagggcaccaaccttttgctagtcggtgccgtcatcgccttgctctagttcagccacatctcaaataatagaggaaatagattagtctagtattaatataaatagtagcagaaattgcattatgagaaacacaaagcaccaatgcaatatctacatatatggaagtccaggataaatttcayaagcatacaatcaagacagggtagaagcatgattgagaatgtgacatagaagatcacggtacaggttttaccaagtatagctgagtatagggcataataacaagaaatgcaagcagtttggacacgtga

SEQ ID NO: 5567 - DNA, 247 bp, Artificial Sequence
  Description of Artificial Sequence: Synthetic probe
aagaaatgcttgctcgctgaaagaaagaaacaatggcactacaacgatcctaaaacttcacctatcagattcaaccgccaccaagaaaccagtcacccaaagaaggaagagatcyttgtttcacagtacactaatcatgattttaattgttgcagttgcagggcaggacagcaggagctgaaccaagcccttcaccagcagacagctgacccttttccataaaaaaaagttattttcaatgattcat

SEQ ID NO: 5568 - DNA, 527 bp, Artificial Sequence
  Description of Artificial Sequence: Synthetic probe
caagttgcagatgagagagtgcaaggagtatcatcagtaacagcattgttcatcaagatgatagatgcaaaacaatgtaaaaattgagccattagaggaatccaaaattcttaacagaaaatgtgtgtggrtggttatcacctaatctctgttaggattggtgttcagacactaaatgcctaaatggttgaactactcaaagctgaactgagttgttgttcaagtcaacttctcagttaaacgggagcagattcaaatcaaaactaccgtataactaatctaactcttagatagcgtatcagtgtgttggtatcctgtcagctagttactgtcaggattaccaatactgaacttgcaacaagctgcttgctacagctacatatccttaaacatgtcttttcccgctattttctttatgatatttattaacgttccagttttaccactagagatagtagagaagggaaaaacactagttagagccgaataagcagcaagtaatagcaagctgacaaaaataacatata

SEQ ID NO: 5569 - DNA, 213 bp, Artificial Sequence
  Description of Artificial Sequence: Synthetic probe
cgtcagccacagtatccagcacggttttatctaaatcaagagcttctgcctagtaaaagagcatatcttatgaatctccgtgggaaaaataatatgaatgattacttctcaaataatgcagggctggtrggattttgcagtttattcaatagtactgtggccaagtgcctagccagatttagtatattacttgaacaaacttgagaaccatat

SEQ ID NO: 5570 - DNA, 345 bp, Artificial Sequence
  Description of Artificial Sequence: Synthetic probe
taggttttgcagccactccaaaaatgccgctgagcgctgcccctccctctacaccatggccgcgagccaccagggccccgccgtggggacgacgaggtgaggaggaaggcaggatggcatggaggctaggatttttctcccccggtcacccttggagggaggcgacgagagcgaaacacgatgggggatgctattggtaaaattgatgygccctatgattgtcaaagagagagagagttatgaagccctagaatattacacctatagataacattctttggtggcgagcagcagtgccactacctgcttttatgtctctcccagaagtggtgaaggcgtggaatt

SEQ ID NO: 5571 - DNA, 255 bp, Artificial Sequence
  Description of Artificial Sequence: Synthetic probe
ataccaaccaggcacagtcatatatggttcatataaatggggttgcaaatgctaatggtactgcaaacaacacaatggttaccyctgtgttgcatactcctccagcggcaactacacaggaatctggtaagaagaaaagggggaggccgagacgtgtgcaagatactactgttccttccgtcgccccagttcatttggttcatgtggatcgtccagttcatttggttcctgcggatcctccagttcatttggttc

SEQ ID NO: 5572 - DNA, 284 bp, Artificial Sequence
  Description of Artificial Sequence: Synthetic probe
gttgttggtgatgagaggggcatagtggcatggccttcacgtcagcgtcaacgccaactccaagaaataccacatcagcgtcaacgccgttaatctctcattccaacaycacctggattgcttctgtttatcatcgttgcccctggtaaaattactctaggagtaccttgtgccatggcatcaactttattctcttagtcagcatcgcgattgattgattgattgcttctagattggcgtatgaacagttggacgcgtaggggtcacaataacaagcacgacga

SEQ ID NO: 5573 - DNA, 336 bp, Artificial Sequence
  Description of Artificial Sequence: Synthetic probe
gacattgaggccctcatagcagatatccaggcctttgggttcaagtaccaaccagaaccacaagtgccggtgtccaagcagtggaggcagacagattatgttatcattgacccacaacaaattgccgggagatccagagacagcagcagaagagcatttacttcctccttgtctcacatatttatatttagagtcctgtgctggcatgttgaggggcattctccgtctgcccacctccctcaagacactgagaattgmagacagcagcgggttcacatctctggagtgcctgtcgtcaggccagcccctgttgttggaagacctttgtcttattca

SEQ ID NO: 5574 - DNA, 250 bp, Artificial Sequence
  Description of Artificial Sequence: Synthetic probe
ttcagccgcggatctcaaagttatctgctgtggcttaaacctaaagttgarggcgtggactaaacaaatcaagatcaagaagaagagaggacaattgttcgttaacatgcatggaaatcgtcacctgcggcgcgaagaagtatggagctggaggaggaagaggaggaggctcccacatcacgacatccgccggagcgacggcctcagcagagctatcccaaccaaacaactagactagacaagcaccgcc

SEQ ID NO: 5575 - DNA, 247 bp, Artificial Sequence
  Description of Artificial Sequence: Synthetic probe
gttgtttctttatttccccttctccagccattggttgctgttttgggttgggatattctgargggtaagacagcactgcggagaaaactaatgcagttgttctggacaagcaaatcccaagctctacgactacaagaatattcacattatcgtacgcagacagacgaggtactttctttgctcttgaatcatcttgcttctgtggtaccgtttagcaaaaaaatgtgaatggttttgacttctccat

SEQ ID NO: 5576 - DNA, 270 bp, Artificial Sequence
  Description of Artificial Sequence: Synthetic probe
aagaggaacagaacaccagggttacatatactcctgaaccgaatatggcaggacacgtacatactggatccacaacatcatccatctcgtgaggaatgtagtgagaactcacyagctggttcgtggtcgtttgttagagctggatcccctgttgtcccctgtttgctttatccacacttccctgcgctggtttagtgtttgtctcacctgctttatatatagtttatacacgagtatgatcatacatacaaggaaaagagtaagcggaga

SEQ ID NO: 5577 - DNA, 302 bp, Artificial Sequence
  Description of Artificial Sequence: Synthetic probe
gagctcgtcgtaagcttttctatcacagattttggctgtattattgttctttgcaaagtgatgatgcatgtttaagttttmctgggctactgcctcactgttgaaacttagagaattgaaacaattgtcgtccagtctatacattccactaaatgtttctatatttttgattggtacctggatgcaagttgccctaataggaagtgagatgaattgatgcactccttgttatttgatcacgcagatgtactcctagaaactaatattggttgctgatatgttttacatttatactcaagtct

SEQ ID NO: 5578 - DNA, 264 bp, Artificial Sequence
  Description of Artificial Sequence: Synthetic probe
aaatgaacatatggttaagtgatgtccttatcatgaccttcaaataatctgacacttcaaactttggctggtaaacctgatagaaaataaataaatagatgtgagaccgagactttacayattcagatgcctgttgacatcaaacatgactattagtaaatcgtacaggttaactgagctccaggcactctccacacgaacagtgacatccctatgaggaagtccatgatgccctaacatgagccctggggtatcaaaaaagca

SEQ ID NO: 5579 - DNA, 320 bp, Artificial Sequence
  Description of Artificial Sequence: Synthetic probe
ccgcgtgagcaacataataatagtagcagtacacccacaatagattggtagaaagttttgtacaacaaccatctacaaaattacgaagatatgcaaacagggggactataaggttcttgcctgattgtactgtgcaagatgttctgatctggaaggtgctctggtcttgatttgtggccctatttcataagaaagattgttgcattaacttcagcatgaaacttgagttgcacyaatgacctctttccaagaataacttggaaatatactgtatataacccaaccactaaatcagcaattaacgcattctcggtttcacc

SEQ ID NO: 5580 - DNA, 221 bp, Artificial Sequence
  Description of Artificial Sequence: Synthetic probe
agaggcgggcgaagaacaccaccgagtccgcctcagaggtgctaataccactcatttggttcaccagcatrccgctaagttctagcagtctcatgtcctctggcgaggcagcaaggcagtccatgaagacagaatatgcagtgacatggcaccgcaccaggtgggtaggtctgctcaaaggcgatcaggttgcggaagaggggctcgctgtaggcgcacaa

SEQ ID NO: 5581 - DNA, 177 bp, Artificial Sequence
  Description of Artificial Sequence: Synthetic probe
ccacagtgtatctgtatgtggtccatgcatgcatccactgagccctgaaaacatcacatcagaagcagcagcagcagcagcagcatatatgccctgcttcttctgtctggtgtagmattagcatctgcggtgggcatggcgccctgattgaaccttctgtctcatactgtcatgtat

SEQ ID NO: 5582 - DNA, 302 bp, Artificial Sequence
  Description of Artificial Sequence: Synthetic probe
aacgtaggctgagtgctgggctggccaagtggacgctaacataactacatggatattttgttagaaatgacctaatcatcacgatraatgctcagcgggagaagttgagctagccaactcacacacacacctatctcctaatttaggcccgcataaagcttcttaatcaacttaaaacacgggatttaactggttttagtgtgcagctgcaacagaaacaggggacagtactactgctgacagtagtagcttggtccaaccaccaaaccaaacctgacatcggttaggcgtgcacggtctcc

SEQ ID NO: 5583 - DNA, 211 bp, Artificial Sequence
  Description of Artificial Sequence: Synthetic probe
atccatagtctactggttacttgatacgtacgagaaagcctgtattcaccgagacttgttccataagggggctgrcataacaagtaacttggtacgtgaacacccactcctcatcttcatatgccctccatgaatatgctttaaagggttccttttgttttttccctccatgaaaatttgtgttatgcactactcatttgagattttgctt

SEQ ID NO: 5584 - DNA, 376 bp, Artificial Sequence
  Description of Artificial Sequence: Synthetic probe
ttgcaggtgaactcgtgagccggttaatctccttctcaattgagttcatctggaaaattctaaacagttttcrcagtcaaactttggtagactagagtgcacatatatatgggataccttgtaaatgtagaagtccaaaggcacacatatgcatagtagtttaacatacatacatttttctatggaattaataataatttcaacatacctagtgtgaattttaaaaacactagttgatttttccatgtcagatgggcagttgccttgtcttcctcacatgtttgtgttaggaacgcaactcatatattccatggggctctggaccaatatgtagcacaagtacatgtattatataaggatacacgttagcgtgtct

SEQ ID NO: 5585 - DNA, 338 bp, Artificial Sequence
  Description of Artificial Sequence: Synthetic probe
agtatacaccgtatctaccaaataagcccttcgttatggaggaaacaatggcttctttgatggyatgcagagaattctctcaccacaaaaaagcgcctagggaattctctcaaatattacccctaccttaccttgtgaatacccaaactctcccttacagtttcgtcatttgtccataactcggatagaaagtacgtgccattctgcatcaaccgaatgaagcacaccaattaacaccgtaaaatcagaacgacaaaatgaaagcaacaagaactctgaataaaactaaatacagagaaaaccgagaagaaattcagattaatatatgagatgtttac

SEQ ID NO: 5586 - DNA, 373 bp, Artificial Sequence
  Description of Artificial Sequence: Synthetic probe
gaccatgatttccatcctggtcttatctgcaataggaacgtgagaaattgcacataaaacaaatatttatatcaatttataccactaaccctttcttgtttgcaggctctgttttttataaggtcktccttatcacggcaaatatttttcacagttctccatagctccctggtattcttaacctgacaatagggaataaatcaggacttttaggcattattaatatttagagaaataagcagaactcccatacattagtctccttaaagctggaagtgtgaggacttgcttgcttcaaaaacaacatgcatgctgagtatgagccatcggaactttcttcctgagtagaagaaccaattagaccactacacat

SEQ ID NO: 5587 - DNA, 266 bp, Artificial Sequence
  Description of Artificial Sequence: Synthetic probe
tgttttagctacaaacctacacttcattaagcattactattggtatggaagtgttgttcaagggccyttttatcctcacaactgtgggttcgttaagctggatatgctagttcttccaaaagtatgaattcctttggatccattgacttgtaactaagattcaagtttcaaatctgtttgcctggtgaatgaaaatcaagtagatctattgcctagaataatttatcctgcttactgttgcttctgataatttagttcatatgaca

SEQ ID NO: 5588 - DNA, 265 bp, Artificial Sequence
  Description of Artificial Sequence: Synthetic probe
cttgacacgcccaagctacagcaggaactcaaaatacagagcaggaaaagacaaagattcagggactcacaccgcaatcactatgccagctgcgcgccagagccttatatcctcrcagatttgttcaaatatatctcctcagcggagtgttgggtgctttcaaacaccttggagttgcgctccttccagatttgccaatgaacaagggtgacgacggcatcaaaattaaccaattgcttatagtagctgctattgcttatagtag

SEQ ID NO: 5589 - DNA, 229 bp, Artificial Sequence
  Description of Artificial Sequence: Synthetic probe
acagtgtgggtggagaagacatgagaagttcagagtctctcctgtacgatttgagtaccctcagagatgccaccgacaacttctccgaakaaaataagctcggggaaggagggttcgggccagtctacaaagtacgtgacaccgattaacttggaatatgagaatatcccatccgattaagttctccattcccgagcgagactgaactttggctgttggtcagggcaca

SEQ ID NO: 5590 - DNA, 230 bp, Artificial Sequence
  Description of Artificial Sequence: Synthetic probe
tgcgttgttgggtcaagccaccattgcaccggacacgcaagtacccattgctctcagattcagttggtggggctgcaagyagagagatcgcatttcaggatttcatttttccatcacccatagaatggcgtaagacaggagcagtaacttgtggttctgggaggatagagagagaaacttacgaggccaatatgtgcgtggtgcagaagatgctctccaaccatttgaat

SEQ ID NO: 5591 - DNA, 175 bp, Artificial Sequence
  Description of Artificial Sequence: Synthetic probe
tgtcatttccaacaaactcggttacagaatattattcgttgttaagatgcaggacagaaagagggctaaaaattaactggtaacytggagtagatcctcaaaatctgttcccaatccggtgaatgatcttgcaatgtacttcacaagccactcggtagtcaccaatagtctctct

SEQ ID NO: 5592 - DNA, 329 bp, Artificial Sequence
  Description of Artificial Sequence: Synthetic probe
ttcatccatgtcagcatggaacctatcaataaaccgagtgctcaagctggttatgtcttccccattcagattcgcctgattgrtaatctgcaaaccaattatttggattaagtaccatactgcgtattcttgagcaggagttgtactagactacaggtgccatatttgttggagattttcctctcaagatcaatatgtcacctcatacattgattttcagaacatgccttaaccactataatatgatgttcgggtgttacattcttcattgcaatttgcaagcaacaacttcgtacagtagcacctttttactaatcgtctgttcagat

SEQ ID NO: 5593 - DNA, 229 bp, Artificial Sequence
  Description of Artificial Sequence: Synthetic probe
catgtctcttatatcaagtctatccatatctaaaattgaagaatatgtggttgagttgactgcataatttccataaccagtaaaactcgtagggataatagtatgcaattataatttatcaaacttaggaggtgttaaaaccacttaccatttataagrtcaagtgtctttcccataagtgagagttaggctttccatagtaaccgaaggcctcatgtaaataggaaga

SEQ ID NO: 5594 - DNA, 272 bp, Artificial Sequence
  Description of Artificial Sequence: Synthetic probe
gtgctatgtattagtaccatgtaataacaaggagtgaaggttgtaccttagcatagtcagagcttccttctcggcttcaagaaacgatttagcttcagtgacagcttcatgcttgctgctcacatcagaggacaacttttccargttttgctcatctgccatgacctctagactctccatggccagtctatcatacatgctatcaacttctgatcttaaacacaccagttcctgattcagacactctaaagctttactttcttttagcaaga

SEQ ID NO: 5595 - DNA, 219 bp, Artificial Sequence
  Description of Artificial Sequence: Synthetic probe
caagagtggtttgcaactaaacatgagcaacaagcatgtgctagtgaacagtgatagtttatctcagtactttgcaagarcaagaattgatggaatgatggaccaatgtcgtactcatacatgcagttcataattacctgaaaataattagaccgaggtaccacttatgataaacaatcaaaaccatagcagcatggagcaacgtcatagcaacacaat

SEQ ID NO: 5596 - DNA, 374 bp, Artificial Sequence
  Description of Artificial Sequence: Synthetic probe
atgtttttaatgtagagaactacagtaacaccaactatgatacgctgggcgcatcccaacagcctgtgcaggtaattacttagttaacgattttcttcacttgtgagatgcaatcatttcaacagttgatgattattgtatagcttgaagcaatagcaaagattcgcccttacccttttctgtatrgaccttctctgtctcaatagtgttctataatataatatgcaccctccatttcagatatttgctcattattttaggaagatatggttttacagtttttatccactgaggaaatcaagagtgtagttactgtaatatttgctctctactcctactttagtactgtggaagagactaagtagttgtattaa

SEQ ID NO: 5597 - DNA, 212 bp, Artificial Sequence
  Description of Artificial Sequence: Synthetic probe
agcagtgcatgcaccgcgtcctttgcaagtcggtcaagcacgcggcatggtcgtccccccgcgaggacaaacgggkatttgcttgaattttaggaatttcttctgtagttttcctaccatcttcactactcgtgccgacctccgtttgtcgcatcttcgttttttccctttctatttagagctgtctgcatctttgctacgcgtatgccaga

SEQ ID NO: 5598 - DNA, 306 bp, Artificial Sequence
  Description of Artificial Sequence: Synthetic probe
tctatacatattccgttatgtcagctgtactgtctgggtttaaagtttgaaactcacgcaatgtttcacatggctgatatctcttcatttgggcagacatacactggaaatattctcattgctgtcaatcctttccaaaatttgaagcatttatatgacctgcatatgatgcaacagtataaggrcgcaccatttggagagttaagtccacatgtttttgctgtcgcagatgttgcatacaggtaagtaaacataaccaaaatcggttcagtattgccaaagaagacgagttgatctcattgttct

SEQ ID NO: 5599 - DNA, 415 bp, Artificial Sequence
  Description of Artificial Sequence: Synthetic probe
ttctccaacgcgtgcggggccatctgcaccacccagaagggagccatcccggcgctgccaagcaccgccgccgctctggagctcatcagcaagggcagcaactagataatggtcgtcgtcgtcgcgtcgcgctcccggggttgttgagtttagtgcggatttagatgcctgcgttgggttaaaattagtttcttttcatgtgtgagtgagacctcgtgggcgcttataataaaaaacaagcatgtgtgatggttttaaggaggctatatacttgtactgtagccttggtcggaaatttatcagtgagtcctggattgaatgaatgaaatgtgtgatgatttttttgtctyatgaaatgtttcttatatggctgaaaagttgcatccttgattaatttcttgtttgactgtttact

SEQ ID NO: 5600 - DNA, 218 bp, Artificial Sequence
  Description of Artificial Sequence: Synthetic probe
aacagaggaacacacatcaggtaagtaaaatatacaacaggtattgagcaascaaaatatacggaagaaaaggggaaatacaattggcacataagtaataaacactatatgctttaacagctgcaaggtgctgctgcatcaatatctacgcctcccgccattgtcattagtcctatcaggaggaacaaatggagtaccagcaacaaatagatggagat

SEQ ID NO: 5601 - DNA, 281 bp, Artificial Sequence
  Description of Artificial Sequence: Synthetic probe
aatgggggtcctttctcaaggatcatccagatggcgggagggacatgtcgcgatgccacagtagattcaaaactgctgtggaacttgacaggcagaacaaatattgaaattgacaggcagaagtaaaatytatgctctttataggttaaaatcaaaaagtaaagaagacctggcttctgaagtagatttggcttgcatttccaaggttcatataacagaaagatttatgttcagttcccacacatgtgccagcagctcattcaggttatctccagactcag

SEQ ID NO: 5602 - DNA, 236 bp, Artificial Sequence
  Description of Artificial Sequence: Synthetic probe
acacggtgcgactgtggcagtagtcgtacttctacgtccacaacctcggcaacatggaccggatcaatctaccggctttccaggatgtggaatctagccgggagaattgggacctgaatatccatggcgagaaggcrgagtcggacaccatgctgcagtagatgcgatccctcgtcaccaccggcttaaccagcctggacatcacgctcagctggatgtctcagcgcatgatgccg

SEQ ID NO: 5603 - DNA, 230 bp, Artificial Sequence
  Description of Artificial Sequence: Synthetic probe
cttctttggatatgaagagcaccagcagcagtgtgccacaactgcgcggtgcgcgtattttcacgttcgctgaactgaagaagataaccaataacttctcgsaggcgaatgacattgggaacggcggctttgggaaggtgaaatagacattgtgatcctgcatggcatggcatgcattacattgtcagaagtggtcaatatatattcagagctgtgttggttgctcctta

SEQ ID NO: 5604 - DNA, 227 bp, Artificial Sequence
  Description of Artificial Sequence: Synthetic probe
aatgattactttgacagacgaactgatttcagccaagctaaaacatgttcaggttggtaccaatattttattagtttgtcacaacattttgacacttgtactattcttcgtagctaatggcatttataagctggcatttstactgccttttatggatgaatgaatatttattcacgaccatttttggtgcaactttttcagttgcagcaagagctaaatgcgttgta

SEQ ID NO: 5605 - DNA, 130 bp, Artificial Sequence
  Description of Artificial Sequence: Synthetic probe
gccttctggcctggtgttcaggttcgctttactccattcatggttgattcacyaccttactgtggaattttgattcctttattatttgctttctcctatcatcatcaccagacgctactaggagatgttg

SEQ ID NO: 5606 - DNA, 189 bp, Artificial Sequence
  Description of Artificial Sequence: Synthetic probe
caacaacagtggctgaggcgcaaccaaatgagccaaatgaccagcccccgtggcgctcttacaatggcggacaaaacccaggccatggtaarcgtgaagcttgagaataccatggattcacaggtggatagctcgtatggatctctcgcgcgacaacaacagatgcagcagctaaggcagcagcagcta

SEQ ID NO: 5607 - DNA, 137 bp, Artificial Sequence
  Description of Artificial Sequence: Synthetic probe
tcagttggactgcgtgctactgctacctgtccgtgtgtgtgcagtatcgtcaatgtagtatatactcatacaccacagartaacgagtaaacaaagcagccaattgagccacagatgccctcaccctcgctgtgctt

SEQ ID NO: 5608 - DNA, 276 bp, Artificial Sequence
  Description of Artificial Sequence: Synthetic probe
tttcttggtgtccgccaccggaagctaatcctgttgattaacgctgatgcggccwtgttctcttcggctaacagcatgggcgctggagtttaattcgtgatcacggaggggagtgcgtggctgcatgcagtgccaggttccccaacgttacaacgcccaaccttgctgaacccatagctgtgaggcttggcctctcctttgtcagggacgaagccttggataacctgggttacctgaggttcaccgcatcaaatcgtcagcgagggaccggtcttc

SEQ ID NO: 5609 - DNA, 240 bp, Artificial Sequence
  Description of Artificial Sequence: Synthetic probe
taccagcttcatcctgcacaatgacatatccgtcaataggttgaaaatgtatttatgcgtgtcacagaaattgaagtttacacagtgtatacttggcttgagtcctttccaatccagaagtggatgtcgtacakaaggtccgctgattgtagcctgatctcatggtttctttagtacgctgtcctgcttgtattggagtctaaaatttgccataggatgaacttgcacatctcataatag

SEQ ID NO: 5610 - DNA, 300 bp, Artificial Sequence
  Description of Artificial Sequence: Synthetic probe
gagagcgtgccctgagccgtctccacagcgtgagggaccgcatcggcgattccctctcggcgcacaccaatgagctcgtcgccgtcttctcaaggtctgtctttaatcttttgcagactggactggccggctggcagtttgtagaatccctgcrtacaaaacatggttaagtgatgaattatggttgccttgtgtatacctaaattatgctacaagtacgagttggaatatgacacctttgctgtattttcagcaaagctcaacaaataagtagggccattaattttaaggcaagtgtgt

SEQ ID NO: 5611 - DNA, 416 bp, Artificial Sequence
  Description of Artificial Sequence: Synthetic probe
tagaccaatattttttgtcacaatgtgcttctaaatgggcagatttaaggtcatttaggaaattacttgtaacttgaactgttgaattctttggtgatcctcggtttagtcgrcatgaaagagttcttttaaattgttgtgcaactgctatgctgccaaacccttattaatctatttatttaatgtaagactgttgaacacacctcaattggaagattggaactatagctgcactagagcaattctgtttcagacggtctcattggtggtgatggctgaatgcaagtgcaccaagctaccacttaattgatgagtttctttagttcttgtatccgagtgacactgttgtgcaactgctatacttgctaaacctatattagtttgttagtatatgtaatactgtataacagttaggg

SEQ ID NO: 5612 - DNA, 312 bp, Artificial Sequence
  Description of Artificial Sequence: Synthetic probe
ggtgtctaatctaagtacttagtcgtgtccccagtatggacatctgagtttcttgatattgagttcatgatatgtttctcgttcattccaatttcctaaagtatataatattgttgggttaattaattgggatctttttaaagaaaatctaaaagtgattatgaaagtaggataaaagtgtttatgctcgcaaaatagtcaagctyccacctagccaaataagcatgtagttgctagttgtattgtctctcttcatagcactacttgccgtacattccaagtattgacccttcgggactgctacgttttatg

SEQ ID NO: 5613 - DNA, 326 bp, Artificial Sequence
  Description of Artificial Sequence: Synthetic probe
gtttccaattctaccaagggcatcaggaatattgccagagaacttattcatggtcaggttaagtttactgagtccctttatattcttcagtgactgaggtaygcttccctcaaaggaattattgtctaacaaaagccagtccaacactatacagttctgaatactgtcgggtatcttgccagacaactggtttccggacagaatcagctggtttagattcgccaagctaccaacttcatcaggaagaggtccagaaagcgaattgtacgacaagtccaagtaccaagaaaggccaggtaatttgaagatctctctcggaattgaaa

SEQ ID NO: 5614 - DNA, 210 bp, Artificial Sequence
  Description of Artificial Sequence: Synthetic probe
ctgtcagaaaaatataacaagaagtaagcacaatttccaatatgattcatccagctaagtaaaatagacacatggaaactttgtaagatagcaacatcattttaacggtgcacagtagccacacaaatcagwagtagtaccaaaaaaatagatctcagaaacagggacaagacaattcatgaccaagaaatctgcggactcttccaatgc

SEQ ID NO: 5615 - DNA, 269 bp, Artificial Sequence
  Description of Artificial Sequence: Synthetic probe
cgtttgctattcgtatcaaactagtagataaacgaatatttgtgttgcattaggtgcttctttatgaccgtgctactggtacagcactaccctatggaataacatgaaatcaggtctagtggaaatttacttccagtatgtatgccgtttaaaatgtcgtttcactaaacgagttaacttttccaaacccacgagtactacttgttgaagtctgyttcgtttacatctgtgctgattcactttgcatttcagtctgctaatgtgtaaac

SEQ ID NO: 5616 - DNA, 381 bp, Artificial Sequence
  Description of Artificial Sequence: Synthetic probe
actttgtcgctttatatgacattgccgttagttttgttagtcttccattagtttacctttttaaggaccaaactacccgtccgcttgatcgcttcatctgccctatttttgattatcactcgttaatatccacaccggagaaagagtggaaccactgaccgtgtaacttacccatgactcatatgtactacgttcttacggctgacaaataaagtcatggccgttgccggcggccgaacctagaggagacgaactcggtcagggtcatgtggctgatcarcgtatacatctcttacgcctccagccgtcggtacaactataaaactttgttctgcagcccataaaatgtgtacgtggcccgtggccttgtgcccacacacg

SEQ ID NO: 5617 - DNA, 136 bp, Artificial Sequence
  Description of Artificial Sequence: Synthetic probe
gggacgttgtaccctgtactatgtaccactgcaactgcacagcagttttgcrtgttccaggagaattgcatgtctatgtaccactgtcaagtttgttgaattaacatgatcacacgaaaacataaaaaactttgtg

SEQ ID NO: 5618 - DNA, 277 bp, Artificial Sequence
  Description of Artificial Sequence: Synthetic probe
gaattcatcgctatagggtaatcaataccaacatagtagtatttcttcctaacttgcccattcagctcaggtgcatcaagaaactttgatatccggrtgaaagcaaccttagcttgtacccgagcgtcctggatttttttaaatattttctgaaactcacaaatatgtttttgtattttctaaaataacaagagcagtggagctcgggagacaaaaatctctactccatactcacccttttatttagcagtactcatactagcatagtcaggatgaa

SEQ ID NO: 5619 - DNA, 239 bp, Artificial Sequence
  Description of Artificial Sequence: Synthetic probe
tatgtttttcaggagtagtggtacttcctaaaacttgcaagtactccaacatacrcatatttggttcaggatgcttatgcatgataactgtaacttgatatctgcttcaaactagtgctatcatgtagtattgctaatcttctgtagtgtgagcttgtattactgcttgttgcatgatcatttgtgctcaactcaagttaattggaactttattatactccaagataaacgatgaccaa

SEQ ID NO: 5620 - DNA, 360 bp, Artificial Sequence
  Description of Artificial Sequence: Synthetic probe
gttaaagatgcttgccataacaaacaagttgtagcataaatatagcggtgamtgctataacctccatctttaattgcaaaagaatctctcttctgcacttaggctttcataattttctataggagtttctggactaagctgcatgcttatttcttccgaacttcccatcacttggtagttttattaatcacatacttactatattaaacacttctataaaatgcaaatctgacaaggacatttgatatgaatatagctgactggaatggacatttggtatgagctacgaaaaaaaccctatgacaagctcaaggatttcatcagggcaggtacaacaggccagcaaaaaaacagcacgaa

SEQ ID NO: 5621 - DNA, 236 bp, Artificial Sequence
  Description of Artificial Sequence: Synthetic probe
gccatggctgaaggaatccgacgttgtgttcgcagcaggtttggggaaagcgctggagaccgccgctcgctgctagtagcacttggcattagaaactgtaaataaaccaactccaaagtaccaagttgactcctagcaatgtaacttggcatsgggtgctcatatcatcattgatatcccaaagggatcatacaaccaatcacaatagatgaaaatattaaccataagagagagag

SEQ ID NO: 5622 - DNA, 151 bp, Artificial Sequence
  Description of Artificial Sequence: Synthetic probe
aagtggtccatctttggcagtatgtgttccttaaagaccagccttcaccttttcactatggstaagatcagatgcaaaacctgataaacatttaaccacggttggccatcaaaaatcatactatttctggtttttcacagtccccacagga

SEQ ID NO: 5623 - DNA, 204 bp, Artificial Sequence
  Description of Artificial Sequence: Synthetic probe
aaaagaacaaagacaaccaataagcctacatgaattgtgagtcttcaagcgtccatatcaayggaaaaattgcaggctaaaccagcatgctttcgccaagagaaaatggcttgaaaacggatataagtagcagcaggacgaatggctcgcacgaattataattatgcattaaacgcagagatgtaacacacaggcaagacgggg

SEQ ID NO: 5624 - DNA, 249 bp, Artificial Sequence
  Description of Artificial Sequence: Synthetic probe
gagatggtcgtcatggcacatccacccgaagagcacactgaattaatctttcagtacacaagggcaaaaagttctcattccttagcagtctgtgtcctcctcgccaccatcgcagctgtctccggcggcttgaccatgttgtccagtgcaggtgcagggcccttgggggagccggacagggacgtgytgtggtgtagctagatgccagcggaccgctgccgatcattgttcacgtatgtagtctgtatt

SEQ ID NO: 5625 - DNA, 251 bp, Artificial Sequence
  Description of Artificial Sequence: Synthetic probe
atgtacatcaccaggggtgttgttttactccaccccattgaagagcaccttaactctgttgcttgtctgtaactgaccaaattgcattagtccttgctaaggtcaatcagtgacggttacttgttagtgtacactccytgttgctggggaaattctgttttaggccctcagctttttgagttgggtctgtccaaaccttaattttaaggacttccagaaaaactttgatctctaggttataattatagagt

SEQ ID NO: 5626 - DNA, 281 bp, Artificial Sequence
  Description of Artificial Sequence: Synthetic probe
ggaggatggatgcaaatcttgagatgattgcaaaggttgccgctgtgtgcaatgatgcaagcgtctcrcattcttcaaaccagtatgtctccaccggaatgcccaccgaagcagctttgaaggtgagagttggtggtacagttcctgctgctattccacaccagtatttctgatgaagtattttgattccacattatggtgcatccacaactcaaaacacatgtttcaatcatcatcctgtaaacagtgtaggaaaagagtgatgattggatactgtattc

SEQ ID NO: 5627 - DNA, 231 bp, Artificial Sequence
  Description of Artificial Sequence: Synthetic probe
gtattcacctccctttaccactctcgctgaattaatgctcaatgtctgtgtgttcaagtcccaactaactatatgatcgtagagkgggatacactttgagatcgcatactctcccctcattggtgatgtcaattcaaggagacaagtcttagctgaagccaaggtgacatacgttgctctgctttcattgttccttcacacaataaatgcaaacattatctaatagtagtc

SEQ ID NO: 5628 - DNA, 258 bp, Artificial Sequence
  Description of Artificial Sequence: Synthetic probe
catgtagttgcagttagcacatagcacacatgaagatataatgtgctagattacatgattttacaatttcctttggacaggaatgaaaaacragcgataaggaagattgtaaaatgactttctgaactcaacaggaaaacacaggttttctcatcgttcagtttgtctgcaccgcatataaacgacagggaagattacctgagccgatgcctgttgcatgttgaaaagaaggcaacaaaaccatacaaaatgctccgg

SEQ ID NO: 5629 - DNA, 380 bp, Artificial Sequence
  Description of Artificial Sequence: Synthetic probe
tattaccttactagtcttacgagtattgctttactgacagtgttacttctaactgaagcttacaaatatctaaacagtacaggcctaagggcccagaagtggkctactcaactctgttctatgggacatactaagaaatcttagcattttcatgttgtccagaaatcttacattcataccgtgcagctaactctaatgcccacactgtagttacatagccagctaggccatggtgagctaattactttaatatttcagaaaggtggttgttttaagtatgggactatgggtaggatataccaaaatttcagtttcgttgtacaatccttcgggttaaatttagcatccgcacaatgaatccttttgttgtttaatatctt

SEQ ID NO: 5630 - DNA, 242 bp, Artificial Sequence
  Description of Artificial Sequence: Synthetic probe
tgaattagttgcttacttaatctagctgcgcttacctgccatgccgtgaatccatgaatcccagctgaggcgagcaatggagggatgaattagttgtactctcagcatctacatctgctctgctctgctctgctctgctaaatataaaatccccttcyaccacctactacgctacagtttgaccagaccgctatttgtagttgacatacctttgttgcacctggtccttctctcatctactg

SEQ ID NO: 5631 - DNA, 288 bp, Artificial Sequence
  Description of Artificial Sequence: Synthetic probe
gcatatctattatctatgtcagacagatgagccgtgtcctagatccgccaaactaccagaattaattgagatagcasctcggtggtcatgagcggcagtcggatttcagatagattaggtgcgcaggagctggtggctgtcgggtaggtaggtgcgtaagaggcagcgggtgtgcgggtgtggctgaggagaggcgcgtggtacggctacggcaggtacctggatggtgagggcggcggcggccgcgcggcgcaggtggctacggagctgccgctcctcggagacctt

SEQ ID NO: 5632 - DNA, 274 bp, Artificial Sequence
  Description of Artificial Sequence: Synthetic probe
gataaagtcaaggtccaagattttgatgtacttgacatcatttcagtacacatccctttggttattgtggcaaccatttttgttgaagaaaacaaagagaacgcgaagaayttgcctatggcacaaatttgtgatgctgtacaagaacatgtgaaggtctcctgccatcatatacaatcctactacatcagtaaaatatctgtactaagttacacatatcatcttggaaagctactactgcctaccgattactatgggtacgggtctgtctatg

SEQ ID NO: 5633 - DNA, 324 bp, Artificial Sequence
  Description of Artificial Sequence: Synthetic probe
aaagacatacagttaaaagtgcagagagaaggcgggaatccatctctaaatctgatcctgctggtggatccacttcattgtttccatgcgaattagagtcattgaccttgtcctttcttccctttgtttttccgttttcatcttttttcttgccatgtttrctttgtttatctcctttagtatcacgagggcaagacataagtacctgacaacagagccatagaacaagaataacaattttaaatatttaaaagcaacactatataagtgagcagactatgaagatggaacttaaagccatagggaaaaatcatatgatgtaaa

SEQ ID NO: 5634 - DNA, 304 bp, Artificial Sequence
  Description of Artificial Sequence: Synthetic probe
gaatgagtaaactccacgtccaaaaaactggacgaggccaattactttggtcggcactagaggcacamatcaataacttcagagctgaatttctagtaagaccatgataggatcttagttagtcggccacattccttcaggacagcatagttgcaatacctaaaacattcttatcgtttcactgttctttgttgatgtacggctaagcatgtccatttgaaaggaagtggcatttgaggatgagaataatggtcttccaagtgactgcaaaaaccgacaaacacacaacacttacactgtagag

SEQ ID NO: 5635 - DNA, 340 bp, Artificial Sequence
  Description of Artificial Sequence: Synthetic probe
acacttactcttatatgcaataaaggaaaatcctatggctactagactgcaaaagctgtttgacggcatgattacatttccccctataaatttagcaacctcttaggtggaagcctgcacaattaggcgggcttctagataattytggggactccatggatcagatcatcagagattcactatattcaatttttctacctacttacctactattggatttgaaccaatgactcccgccgtatgaaagcaagtgcttcttattcaactaccatgagtttactttacagttagtataatgatttaaacagcttaacaggacaacaaacttggatactataca

SEQ ID NO: 5636 - DNA, 358 bp, Artificial Sequence
  Description of Artificial Sequence: Synthetic probe
ggatagtttattagctttgatgacaccgtaatgttggcctcttggtcacagccgagccacctgtactgaaatgtctgaaatgtatttcctttcactgtatccctcaccctgtcacccaggcagaaccaacaggatggctccactaatgactctggatctgactcctgttcattaaatcgctatgctaagtccatatctcaaaggcatcacctactgtagggaaccaaccaagaggtacgacgattctcaaggaaggcatagagtttgcgcctactggtggatcggrccctgcggggtaacttgtacacaccgtgggtgccgccaccgtgtaccgcgatttatgtacgcaagccatggc

SEQ ID NO: 5637 - DNA, 346 bp, Artificial Sequence
  Description of Artificial Sequence: Synthetic probe
cgacacaaggtgaagcacactcaaggttgttggatatttgaagccgccgctccaactttccgcttctccgmcgcgccctgcgcgtcaaccaatgaacatctcggtacattgttgttgtagtccaagctagtacttctgcctagtgtttcaaaagcaaagatgttcctcatttggagcattgatctaggacaagctctattgtcagacgacctatagttgtgtatccccctcatgcctgtacaattgtacaatagtaatcacttgctggtctgccataggggagtcattctgatgaggctggagcatgctgggaagatccagtcagcttcactgatacgagtcgcag

SEQ ID NO: 5638 - DNA, 308 bp, Artificial Sequence
  Description of Artificial Sequence: Synthetic probe
tcatggagtgggtgcattcatcatcaggtcacttttgtttgttccaattctgcctttgggcaaaagtcacttgcccaatgaggtcatctaccctggctaagcaagtttttcagtcaccctacagtttaccaaatgcccagcaaaggtaagcaagttaaaatactctatccacacccataacattccattctgtgtttcagaaagaatagttgtacytgagcaatttttcgtagagaccagataacttctggtcaatcaaaactcaagatatggataaattaaccttacgcatggaaaacacagatcca

SEQ ID NO: 5639 - DNA, 289 bp, Artificial Sequence
  Description of Artificial Sequence: Synthetic probe
tagcaaattttatgagggcaacacgtgaactcttgggtgcaaaccgtcttaccaccacaacaatcttgggtacaatcttgtctatgcacgtgtaccgtgctcgtcgcctagaaatcatctgggctccayaacaagaagacgggcacaataattgtggaaccggtgatgcagagtggtgccgcactagctagggtgtttgacaacaagctgaccgagcaaatccaagagcttaaacgtccgtcatgcatttggtcacgagagaggagcggcacaatgctcatcacagaga

SEQ ID NO: 5640 - DNA, 241 bp, Artificial Sequence
  Description of Artificial Sequence: Synthetic probe
ggaaaacaggaaacctcaactgaaaattcagccagcacaccggaaatcttcagatacacacgaaatggtgttttcgtttcgcttgattttagagtcacagccctagctcaatccacaaaaagtttgcatactaactgcatcaagyaacagatacttccacaagggtcttaataagatgtaaggagcgtgcagggtggcctggaggttgtctgacagacaacacaatccttttttgctactt

SEQ ID NO: 5641 - DNA, 261 bp, Artificial Sequence
  Description of Artificial Sequence: Synthetic probe
tacaagaagcagtttctgaggtcatctgaaaggtcatggtagctcagattcaaaattgctcggacatgaccattttttgacaactcgctttgwagctggttgtacgtttgtttccaaatgtccaatcgttgtcttgaagacaacatgcttccaatggtaacaattgctagcggcaggccatgacacctttcaactatagaattagcaattgtctcaagctccttggggcacatgtggtctttcttgttgtaaaatgctctt

SEQ ID NO: 5642 - DNA, 195 bp, Artificial Sequence
  Description of Artificial Sequence: Synthetic probe
acggactgggagggtggatacttccccctaactctgcaatttgatgataattacccaaccacctctcctagctgcaagttcccagtaggtttcttccrtgtcaatgtctacgattctggggttgtatgcctatcaatcctgggtgatgtaagtttccactgactgatactctcttccttttcagcatatctatct

SEQ ID NO: 5643 - DNA, 273 bp, Artificial Sequence
  Description of Artificial Sequence: Synthetic probe
aattccactatttcacactggttttctgccacaagaacctatgcacaatttaaccaccttaagacttgtagaagtttattaaaattgcacaaataaattaccagtaratgcacctgtccaatagggttgcctggatttacgaccacaagtcccctaacggtgacaccctcagatcgggcatcatccagatgcttcttcaggtctgaaatgctcacgccccaacctctagattcatcaagataatatggtacctgagaaataacatatctgttt

SEQ ID NO: 5644 - DNA, 195 bp, Artificial Sequence
  Description of Artificial Sequence: Synthetic probe
gcaaacgccaatcagaacagtgacacctttcagaaagtggagtacattgtctgtctgtcttcgccacccagagaaaaggaaagaaatgtamagagagaacgaacgcaccgaacgaccccaggtaggcggcggatggggtgccggcggcgcaggttatcctcgcctcccaccggccggccccgtgatgcctgcggt

SEQ ID NO: 5645 - DNA, 466 bp, Artificial Sequence
  Description of Artificial Sequence: Synthetic probe
cgggctgggatgctcaagtgcaagacgacgactacgcctatgtctagcactaacaagatcactactgttgatggagagcttctgtcttctgctgatgctacagagtacaggagtattgttggtggtctccagtatttgacgatcactagaccagatatattttatgctgtcaacagagtttgtcagtatcttcagacgctccgtgacactcattggtcagctgttaagcgtatattacgctatgtcygtctgaccgtgtctcacgggctgcatatacggccaaacccctccggggtcctttcggcgtactccgatgcggattgggctggcagtcctgatgacaggcgatccacggggggctatgcagtgttctttggctctagcttgatcgcctggagtgctcagaaacaggctactgtctcacggagcagtactgaagccgagtataaggctgtggctgatgcta

SEQ ID NO: 5646 - DNA, 184 bp, Artificial Sequence
  Description of Artificial Sequence: Synthetic probe
ggaatacacgtagtgcaaccaaccattttttttcctaattctcatgttaatggctaccaaagcttgaaccaaaaagtacatcagagagaacacttcagtaytatgcagtctaattctgcaccgaaataaacactgataattcatgctgcttttcagagcttgacacatggaagctgactatgcc

SEQ ID NO: 5647 - DNA, 437 bp, Artificial Sequence
  Description of Artificial Sequence: Synthetic probe
cggatgctgctgcggcagcttgtgtgaagtttgcctcaaaatttgagaagagcagaaaggacaaaagagcagcaatcaaggcctcctccatcttcccggagtcatcaagctcagcttcaaaaggcaagctagaccttgcactgaagaggaggaatatagaagccagtgcagtgtctgtgctgatggcaggcagggtgaagccgtcctcgtggcagagcgccggttgttctggaagtgcacggactcttgtcccgataatggcgaggcgcaagtaggttgtgctttgcacagtcaggaggcttgctcagtaaaacctgtttatctcgtgtgcactttcagttctctttgtgaatgctcgtagaatgtagtgtaacctcgtcrtgacgtcctgctgtcattggctgaggttgtgacatcttgaaggatctagagttgtt

SEQ ID NO: 5648 - DNA, 264 bp, Artificial Sequence
  Description of Artificial Sequence: Synthetic probe
tgccagtgtcttggggcgtgcaaccatacatgtatctagtagtatttgttcgtgtgcatctccataagagtaaggttaatartagagcctgctgccggctctatagacatgccaagtcagttatagtcttcataaagcccataaatacaataggctagctattaggcagactattagatgagttttaattaaaatttaattgtataatgcatagatgccattgggcctgggatgcatgcaagctgctttttctcgtaccctgtg

SEQ ID NO: 5649 - DNA, 210 bp, Artificial Sequence
  Description of Artificial Sequence: Synthetic probe
gcatatatatatattgtattgtatgcctatgctatctatagtataacgatttgttcaaaccatagttccaatctcatttgatgcctcaccagaaatattttagggctatcagcatgatgctagtgcaagacaagratgacgcctctccttactctataatctcctgtcctccacaaactgctacaatacctcttctatagctccactgaa

SEQ ID NO: 5650 - DNA, 257 bp, Artificial Sequence
  Description of Artificial Sequence: Synthetic probe
cacccggtcatcaccgtcgcgctagggtcctctacacgctcgccaggttctgctacttgaagggcttttccactggcgtcccggacaaccgcctcaatcccgggtatggattctttgattagcaacaaygaatgatcaacccatgttgttatctgttttcttccaactggtccatatgcacataatttgcttactttacagtgacatcaaaatccttgtggttgtgaagcaatacatatccacttgatgatttctag

SEQ ID NO: 5651 - DNA, 198 bp, Artificial Sequence
  Description of Artificial Sequence: Synthetic probe
ctttgtcacactctcatcccttaaagtagagatatgcacaaaccaggaggtaaggaacatgatgaatggctcatataaataaaagattggcaattaaaatgatgtgcagctactcccatccttgtagacggcttcagtgwattgcaataggtgggttgcgtaaggtaccatcagctgagcttttgggccctttatacc

SEQ ID NO: 5652 - DNA, 199 bp, Artificial Sequence
  Description of Artificial Sequence: Synthetic probe
agaagttcattgtaagcatgcaaactgatttgagtttgaattgaccaaacttgaaaccatttgactgtattagggagttttttgcaaaaacaaaaatgaactaggaggggacgagttgcacatcttttctggaatgkagggagtagttaaatatttttttagaggattgtacatattgagttgatttgccaagataatg

SEQ ID NO: 5653 - DNA, 262 bp, Artificial Sequence
  Description of Artificial Sequence: Synthetic probe
ggtagcattgatgttcttcagaagtaccctgtgccagaaactgacatttggtttatcaagttctcatgtgattttcayttcaatcaattagcaataggtaacacttgttatttacactggtatctgaggaatcattttttgtaaggctacccttttatatacctggcaatactttataaattctacacacaacaaagtttctgaagatgtccatacttgtacatatgaaacattgattttcagaaaaaatgctacagagcaa

SEQ ID NO: 5654 - DNA, 491 bp, Artificial Sequence
  Description of Artificial Sequence: Synthetic probe
gcagcagtcaggagacgcgtgaggcgaggtcaggatgccagaaggaagggtatgttgggcaggatgccagagtagataagcgaggcgtgtaaggagtattggtcggggtggtcggccggaggagagaacgacacgtcggggtcgtggcgtacgtgtcagttggttgaatgggggacaatagaaattaacgatagagaacagcttaggcgtttttcactttggcggtggcatacccttgtaatatggcgctgctccggccttcgctgatccgcaaaattggagaagtggtgctccgagatttacacagcaaactgggccagcttcttgaatttggctccatggagttaggacgttcggactgctccacagtggatttttagaaagctggaagctagaggactaccgaacacgccctaagyatgtaatgcttgcatgctattggagctggtactagtagtggctgcacgcaaaccttctccttggagcttgtg

SEQ ID NO: 5655 - DNA, 348 bp, Artificial Sequence
  Description of Artificial Sequence: Synthetic probe
aattagaaggaatcatatgattcaattttcaatgacagaaattggcatcaacctagctacattaacagatgtggggtggacttgatcaaacgagtattgacaaatttatatmtcattaaaactgcaaaagggaaacgccatgtcaggaagaacatagtggcagaaatatggcaatcatatcgccacaacctaatccgcatatcagttactctatctcgcagataatcttgaaaaaggacaaatgaagaagattacatttgtatcaaaattttgaaatatcttcatattttgacgcttcagtagcttacaacatcatctaacacagttttagtcttattattctcttgt

SEQ ID NO: 5656 - DNA, 423 bp, Artificial Sequence
  Description of Artificial Sequence: Synthetic probe
gagtattgctaagcatttttagctgtgagctttatttacatgtagtagttcaacagttgggattaaataggacttgatctctgacacaaaaccatcagacctgtcacctatgcaacatgatagcaattcatttctgcaatcaaaacgcgagcacttctccagaggaatcagcaaggcatctttagtgtggaagcagtgacaatctgtgtgtgccagacttccagtactacttggattcttacagcagagttgtatttatrtggtgagacttgggtaccagtaactggtgggcaacattctgttctaggcttgtagcaagtactccagggttgtggtattgtttatcagttaatgtaggattatttgatgttcttgctggaattgcttaattgcagttcatcctctggatctccgcaaatggaa

SEQ ID NO: 5657 - DNA, 346 bp, Artificial Sequence
  Description of Artificial Sequence: Synthetic probe
cttatctctaataaatattacttgtgttctgtttgatgcaacaacttcttctgaccctaactgttcccaacacaactggttctgagacaaattgataccctaccttacactttcagatttcaaaccccttgtgttgaacttagttcgctctagtatcttttgctaaatatcttttttcttcttgattaggttttggcttttgrtggactggtataatggaaagaatcgcattgtttcaagtgatgctcgtaatgctaatgatattagagggccgtatgttgtcatcaacatcggtgcttatttgtctggcctctctacagagcgagccaattgctatgcctgtaaa

SEQ ID NO: 5658 - DNA, 283 bp, Artificial Sequence
  Description of Artificial Sequence: Synthetic probe
ttcttcctgtttcatcttcaattctttgtcgttcacattcagcttttcctccctacaactaagggatctctgcaaattagcaartctattctgactttccttaagcctcttctcccaattatgcagagactcctcattttccttaagttgattctcttgtgcctcccacctgaaaatataagaattttttaccataaaaagataatatattcatgctcacttctgttcacacaagcgtaaagaaaaatcatcaagtcaaaaaacatcatactcagtctcatag

SEQ ID NO: 5659 - DNA, 298 bp, Artificial Sequence
  Description of Artificial Sequence: Synthetic probe
actatagagaggaagggccggttggctaatcacgcgaatcatagtagtagcaattaactttgtattagagccccactctctaagattcatcttaaccgcatcccagcggccagccatgaccacctctgcctcgcaaatctccaacacggctggagggcttatatctaccgcttgtttcttgttcyaatcctgggtaggttataggccgggactagtgtgagctctagtaccagtttatcccggctccaatgcctaggcggctggatagctatagtcccgggtcgttccggacgtctag

SEQ ID NO: 5660 - DNA, 279 bp, Artificial Sequence
  Description of Artificial Sequence: Synthetic probe
caccttatatgtttagttactctgttttatggggtggtataactcttgaaatgtctgctaatacaatactattgcacatacttttggtttacacgaccaatcacagcgagtactygtcaaaaagcagtgttccttctaaaaaaacatgatatataaacatatccatgcggtaaccaatgtaatgtgaatcctgcaatttgcaggtgaactgaagtagtactaaaaatcagcattctaactgacctcaaccgatccatatgtgacccctttcttcctata

SEQ ID NO: 5661 - DNA, 243 bp, Artificial Sequence
  Description of Artificial Sequence: Synthetic probe
caggtgcatttgatgctgcaaaggacataatggaagctcttaggagcaagcataccaatctagccaatgaactggaggtaagaaacaacaaagtagtttatattcatggttggaaactgtagtaatgagcaaatatgtcttcggctgttyggatatttgttggcaaatatgttaaacaaagctaccctttaaaagcggcagaaaagctgtggtgcatactagttctactatttatgagctata

SEQ ID NO: 5662 - DNA, 379 bp, Artificial Sequence
  Description of Artificial Sequence: Synthetic probe
gccaccgcaggatagagccatggaagcgtcacatgcagccaacgatgggagcgaaccgaaacatggtggtgttgtgtagaaagggccagggtctrgggaagaaaaagctagctaatctgatacgtgaaaacgaatacaccaaaaaagttttatactaggaccgtcatagtagccgcctatgagagacgttttccagaactaataggacccacccaacatgtctaccgtctctgctgccaactcgtcttgtggaggaccccaccgaatgcgacaaaccatggacggcgacaggtaacacttcccgctcgtctctcgcctgcgagaatgtgctgccagctagagtctacgtcgctaggtgtgctttcggccatgagaaacc

SEQ ID NO: 5663 - DNA, 242 bp, Artificial Sequence
  Description of Artificial Sequence: Synthetic probe
gttgctttcttcttttcccggatctgtcatatacccaatatcactggccactgcaagacgtttatccaccgaaaccccggcaactagttcgttataagagggaataagacaaacccaggaactgcaagrtgcctaaatgtaacgatcatttgtcaacaagttacaacgttgctgaagaagctaaccaaattctaatgaacaacctgtcagacgacaaatggatcgcgcgattcacattgagg

SEQ ID NO: 5664 - DNA, 206 bp, Artificial Sequence
  Description of Artificial Sequence: Synthetic probe
acctttgattgtattgagttctttctccccaggctcaacatcaccaacagcttaggataatcaaacgagtcactatacaaatcatttcagttgtgaacagggatatcttttcaagctcctgagactacccgttagaattgyaccacgcataggttcgctaccaaatgcattgtcatttgtcaaaacaatgattgactagagaaaaa

SEQ ID NO: 5665 - DNA, 236 bp, Artificial Sequence
  Description of Artificial Sequence: Synthetic probe
ccggagcagctaactaaaatctttgagctgtgtggcacgcctgatgagttaaactggcctggtgtcagtaaaatgccatggtacaacaatttcaagcctccccgaccattgaagagaaaagttaaagatgcctttaracagtgagtcctatgcttggcattggtatgtcgtgtagctttagtcatgtccccgatgatgctcacacttatgtatttgcagttttgaccggcatgctc

SEQ ID NO: 5666 - DNA, 155 bp, Artificial Sequence
  Description of Artificial Sequence: Synthetic probe
gagaagctgcggcaaacggacagaggcagcgtctaatacgatcatgatatttggagctttactttacgagagrcgcatgctgatatactggtcctgctctcagaagaaaccataaagatcaagtttgtgccatggccgttgcagcacgtacgggc

SEQ ID NO: 5667 - DNA, 347 bp, Artificial Sequence
  Description of Artificial Sequence: Synthetic probe
actcttagtcaaggtacagcttctcctctcctggtaacatcaaccgtttccagcctattagggcttgtacagtgcaaaatatttctacatgggtcttgaagccttggcaaagatattctaacaacatcatcaaacaccatctaagttacaactcctccaatgcaagttcctctttgtaggttctcagatgcttgtattatgtaccaacgagagctaattatatgcttaagcacayggtaagcactggttcctcatcaagcataggtgctacaaaataggaaccttgtccccatcatacgtggcaagggaaaagtgttcagttttgctaagcacctctcaaggcacct

SEQ ID NO: 5668 - DNA, 202 bp, Artificial Sequence
  Description of Artificial Sequence: Synthetic probe
acagaacaggaagagtacatcggatcagttctgtcatttggggtctaactatrtgagatgaaaatcatcccttcccgctgatcatcaccatcagaccattaaggcaccgatagtagttagcatttgcaaattatattcagtagtaattacaagtctgtaaatattttattctattccttattccgaagaataacagtaaaat

SEQ ID NO: 5669 - DNA, 254 bp, Artificial Sequence
  Description of Artificial Sequence: Synthetic probe
aaggcttctgccatgtaaaggtttcgcccttgcaagcagaatactgtcactttgcacatacctaaaggaaaggaaaggggtggagcgaacagaaaatgacagcgatattttgagtgttagtaacttgtggcactctggaaagtgcaataggtcttgtaaagcgataaacttttgcttcatatagtkccaacgttagtacacgtgttagcttgcagctcagtattgtaattgtaactggaactgtacgcaatgat

SEQ ID NO: 5670 - DNA, 253 bp, Artificial Sequence
  Description of Artificial Sequence: Synthetic probe
attctcaccctcaattaccaccgccaccgcgagttgcatcccagccagacttcaaatcttttcatttggtcaaaaaacctgcctgtactatatgctagcatgatgtggtagaggtagactaactgaatrgtaagcaggacctgatcatacactgttagatctagagtatggtgtggtgaagactttgggagctactgtgcatgggttaatttaattttgttgctatgacagcacatagacttggtattttaat

SEQ ID NO: 5671 - DNA, 531 bp, Artificial Sequence
  Description of Artificial Sequence: Synthetic probe
ggcatggtgttcttgctgatggagaggaaacggcctggtctcaacggcttggtcctcctacctagcgttgtttcctcgcagcagcaaattaaccgatttagtatgtcatgataaccacatcaatttcttgcatagttcgtgtctgtttgcagctgtcctaaattggtgttgcgcagggaggtattttggtttatgatgactagactcactcatggggttctcggctatgttaatatcactttcagcttcccagaattttcacataatttcctagcagtgtaatcttttttgtgaaagatcataatttattgcacaggtgaagcctagaaatttataatttatttgcatttgttgcagatctccttacactctcttaatttggtatttcacatgccaatttgtgctattcgctatatgtgtttgttcatgttacttgactatayagagaaagggaatgaaaaacagtgctaacataattcttgggtctgcatgagaaaagtaagtatcttctgcactgatcaggggaagaat

SEQ ID NO: 5672 - DNA, 276 bp, Artificial Sequence
  Description of Artificial Sequence: Synthetic probe
ataccagctgaagcaaattacagccagtttcaacttccaagttgtgcaccaacttctggggcattgtgccattgtatacttaaatcaatagtgttcatatagtgtgcaacaagtgaaccattctggaagcttgaaaaaaggaatttaaacttattctcttgctttgtacatgtactgactcaagaagtcataaaccggtgtgatcttttgtcacaaaragaaaatgtgtatgcatgccacttaggcacattgtgacaacacatgattgcttaatca

SEQ ID NO: 5673 - DNA, 237 bp, Artificial Sequence
  Description of Artificial Sequence: Synthetic probe
ttcagaggttttctatatcgctctgcacttcaaatttgagttgggcgcttcataatctatackggaggtttgaatgcctaaagtatagtacaccaggctggcacgagtggtttagactatcacgagagagccgttaatcctgggtgtagttgttgaggaatatttaagttgatccgcaggccaacacgaaggtgtagctgtaaagatgattaaattgtaaaacattcagtatgactt

SEQ ID NO: 5674 - DNA, 207 bp, Artificial Sequence
  Description of Artificial Sequence: Synthetic probe
tatggatatgtttttgagttttgaccttcaaatacagctagggatgaaaccttgtttgcaaacctatcaaggacagacagaagatttctgcttgtaggatagatcggttaccatwcataaggattaagctagatgcttgcaaaccttgttcaagttgaagtagctagtactatcaagaatccaacaaggtatgcatagaatttagga

SEQ ID NO: 5675 - DNA, 309 bp, Artificial Sequence
  Description of Artificial Sequence: Synthetic probe
atcagcaaatgcttgccgattggatgcatgcctttctccatggttcaggcggccgagaaactatcgcagactcatcacggaggcagattgtgtcggctgagatcgttttgyttgtctagctacgtgaagtactatgtgttttcgtgtcaactgctctccccgattagtccatatgccttctctctaaaatattttcagcccaaaacaataaaacacacatatatgaacagtctagagaataagctccccatagccatgggccctaggcgcttgcacatggttgcctagggtcagagccgggcctgatca

SEQ ID NO: 5676 - DNA, 307 bp, Artificial Sequence
  Description of Artificial Sequence: Synthetic probe
tttatcattaccttaaaaaaccatgaacctccatatattttgcacactttgtagtttctataatatgtattcgttgcacggggataaaacgaggaaatgscacatgcaatgatttttgtaaggattacttgtcatagcacaattagctgcccgctgttttgtcaaactaaagtgaataaagctttatgtttgcttattgcttcatcttattcttccctttctttgtattttctagcttttcagcagctggatatagattatgttattggtgagagccacaaagaatttcttcccaaatcttctggcc

SEQ ID NO: 5677 - DNA, 258 bp, Artificial Sequence
  Description of Artificial Sequence: Synthetic probe
tctctttgatcagatcatttgtatactcggttgccagggactgtgataattgcaaagttgaccgcaaggtacagtttccggagacagttccttttgagttacattgttgtgtcacattgctgcatgcatgtgctctaccgtttaagacaaaataaaacagacaattcctttcttaccatgcccatgcgtagtaaaytgacatcatcttcatctaatatagtattttgcaatcaggcttgtgcaggagtaatcctcttt

SEQ ID NO: 5678 - DNA, 235 bp, Artificial Sequence
  Description of Artificial Sequence: Synthetic probe
aaaccacaggagaatcgtggaattactagcctgcttgctggatcacatagaacgtgtatcatacagtagagaaagattatttcttgaaattctacggcgacaggaaagagaaggctgtacgtgattgtcctgcatataacatgagraaaatttgtgcatcgtctgtccaaaagtacctatcagatcgggtgagttagtctcgcttgctaagcgctagtccctatatatgctggat

SEQ ID NO: 5679 - DNA, 166 bp, Artificial Sequence
  Description of Artificial Sequence: Synthetic probe
ccagtgcagggccttcagggctacagtgctccaccaagagcatcaagtcactggtcctcattatacctttacaggcagcatatatcaaacttcagagtctatctmgctatttgttgccataaggagtactggccaaagaatgcgacttaaaaggatgtagtaagaa

SEQ ID NO: 5680 - DNA, 374 bp, Artificial Sequence
  Description of Artificial Sequence: Synthetic probe
aatagtatagatttactttacaatcccttctaacagcacatgcaaactaaaaaaatatcattttgaatcaaagttcyaattgctgaccaagattggaacttatgaaatagcacgatccttgtctaccaaaatcagacggaatcttttacatatcaaacattgcaatgccaccaatttcatggtccaattcaagcatccacaaattcgtgtgtttaccaacaaagagaatttttttaattaacatctgcctactaggtacttgctccattgtttggctccactatttgacagttgttagtctacttctttctgcataccttgttaggcattgggtcctatgttgttatccaacactatttgttcaaatccgaaat

SEQ ID NO: 5681 - DNA, 205 bp, Artificial Sequence
  Description of Artificial Sequence: Synthetic probe
caggcttgctggcatgaagtgtgcccattcctggaggctgcataccctgccctgtagttgttgtccccctcccstaggatctctcggtacttgagcagcagtgccgagcagcagacagcgacgtcctcgccctggtccagccgatccctggtggcaccacacagggattgcagccatggggcgcggtcagcgtcggtaagaggga

SEQ ID NO: 5682 - DNA, 271 bp, Artificial Sequence
  Description of Artificial Sequence: Synthetic probe
aatattcattggcagctaacggcaatagtacatgtctaacctttttattcaagtaggtaatggtactccacataatctaagttgagtaccgataatgttgtcaagttgtgtaccaatggtgacacaaaaggttttaacagcaatgccgtaactgtgccaggcacagtgttgcacatgcaagtgwgcaccgacggctgaacaatcatacgagtgagtaataaccaacaagccccatgccacaagattctccttaccactttgttggaccaac

SEQ ID NO: 5683 - DNA, 331 bp, Artificial Sequence
  Description of Artificial Sequence: Synthetic probe
gggaggccccgacagtaaaattttatcaaagagtagaaatatatacaacatggaatggaaggagggaatgcacatatgggcctagctcagggcatatcccaagtaaactacagagcgtctagccaggcaataagaggggattacaratcatccttcattctgtaagaaagaaggaagaagtctctttaaaagaaaaggacaaagctctaatagtaagtataatattataaaaaatgagagcattcctttgcttccaaatgttccaggatgctgtgccaaaagcttcaaaaagaaaggccttccaaagttgtgctttggtcatggcaatcat

SEQ ID NO: 5684 - DNA, 297 bp, Artificial Sequence
  Description of Artificial Sequence: Synthetic probe
taaccaggacaatggtataaacagaagaaccagaaagacttcaaatttagggcataaattatttacactgacctaaatgaggccacacattacacaagaaatgtcagagctcaagycaattccagggctcctatatgaagagagcctgttgacatcctgcttccagataacatgagttccatgagtgttctattgtctattgttctaattatattgcattaaataatcaaattcacgtaggggacaatatattaaggaagaaaaagccttcttgcggaaaaaagttgacacttagca

SEQ ID NO: 5685 - DNA, 317 bp, Artificial Sequence
  Description of Artificial Sequence: Synthetic probe
tgaagaacacacggtagctgcaagacaggcgctcaagccactcaactccatctgacsaatacaggtggatatggcactcgcaagtttagttgttgacgcagccgcactgctgtccgagggcaaatttccaaagataaatcttaggtgccgaaagactgccatgcaagctatccttgcaagctcgctgcttggagtcacaagttcaaggtaacgggaaaccagtttccgaccctttggtagtgagattacgcgaagaaacaccaggtcatcatttggcgatagaggcacgctcttatttggtccaagtggatcaacta

SEQ ID NO: 5686 - DNA, 315 bp, Artificial Sequence
  Description of Artificial Sequence: Synthetic probe
catcccatgactccttgctggtccaggaaggatcgttcttcccggtgtactcgtacatccaatgaggccgggtcgccaacgggaccaagcatcgcccgrgccagcagttatacaggttgattgtggacaacccttggtccttcaacttctggatctggtccatcatctctgtgacggccatcctctgatcatcggggagcttgttagctgtcagtcggcggggctcgcttctctctgtgatgaactcgggtagcgccacttcgccggagggggtagactccttcacataaaaccatctcttcttctattcgttcg

SEQ ID NO: 5687 - DNA, 538 bp, Artificial Sequence
  Description of Artificial Sequence: Synthetic probe
gagatgccgcggcacgggacgaagcggcctctctcggtggaggaagagagggggtatcgcgagtgcgaagtgcgcaagaagttgatgcgccataagtgggaggcgctaaactgggacctgtggcttgggtgccttgcctggaggacgcgagctgctggagatgcctggctttgttgccgcgactgagaagatgatgctggctatgcggaagaccaatgcggagtttgcaccgccgcagggtgcacagaagcccagctccagcgccacagctagagtagatgctytgcacgagaagttggcgcagacgaccaaagtactaacaaaggtactccatgaggggagcgtcctacaggtcgcaacgaagctcatgcggctgctgtgcccagatgtcggttctagcgccccaactggaggcggtttgggcgggaatgactgggggctggttgaggaggcgataggcaatttggtgaatcagaccggggagggcatgcaggtatgttgttttcttgtatgtgcttcatcctgatgttaaattata

SEQ ID NO: 5688 - DNA, 278 bp, Artificial Sequence
  Description of Artificial Sequence: Synthetic probe
catcgtagtgttctttgttcttgcactaagttagcacctcacaatgggctatcctttcacatacaaagccaacctacccatggagatgaagggcatgcataccggtctgacatcttcgtatytcgctatggttcctgttagcgacggtccaacaatcatgagtagtaggtcttccagcagaaagcagcccgaaaaacactccattgcggcattggctctagtgtagcagggttgtaggtgtagctagaaaacaacttcactacttcacgggtagagaa

SEQ ID NO: 5689 - DNA, 322 bp, Artificial Sequence
  Description of Artificial Sequence: Synthetic probe
gggtttgtacactttacccgctcttaccatgacacgcattttgagctcaatttgagttgccgaatttagaagctatgacatgttctcgctyatcccaatttcataatttgataaaacttgtggttaacttaattgggttgtatgctgaaagatcaaatggtttaaaaatgataggatgaacttattttgatgttgcaaacatgccttgaactccacaagccaaataagcatgtagtgtatagagttgtttcacactctaatagttccacttgccaatacattcaaagtattgacctgactagtttggctgcaaccttttatg

SEQ ID NO: 5690 - DNA, 239 bp, Artificial Sequence
  Description of Artificial Sequence: Synthetic probe
aacatgtgataggtacaggccttggcagcggatcggcatggctgaggttttggagaagttggtccttagtctagtgactataccaaacattkaagtattctgatgatcatgacggcgtttgatcacaccgatctgatgaatatttgccacatcgcctacttatggtgatgcacaaatgatgattctcctaccagaagtttggagaggaggccttcgtccgtggctaagtcaagcaggca

SEQ ID NO: 5691 - DNA, 241 bp, Artificial Sequence
  Description of Artificial Sequence: Synthetic probe
cctcagtccccgggaacctgctcatataactggagttggggcgcagtaaattagtactcatcctcctcctgtgtacttacttgatggtgtggggattaactgccccgagtgaaatcctawtagtaatgcagctgacctcattctcaatggcccgccgctgcccagatcggctctctacgtgcgacaggggacgcctcctggcagtgaattcgcttcactaataaccctcccgaggtggatc

SEQ ID NO: 5692 - DNA, 121 bp, Artificial Sequence
  Description of Artificial Sequence: Synthetic probe
aagctaagctcaagctcaagcatcatcaatggagggcaaggaggaggatgttcgcctgggygccaaccgctactcggagcggcagcccatcggcacggcggcgcagggagccgatgacaag

SEQ ID NO: 5693 - DNA, 121 bp, Artificial Sequence
  Description of Artificial Sequence: Synthetic probe
taccactcaccagaatgttcagggtgtgagtttcgttgaatttgttgtttgccggtctcayggctgagtagactttcaccagagttgtccacgcatatatggcactggtggttgtgttaat

SEQ ID NO: 5694 - DNA, 121 bp, Artificial Sequence
  Description of Artificial Sequence: Synthetic probe
cgggtcgacaagtgcatacccagcagcagtgctgcacatggtggtaaatctcctcacaaaraagggtatacacttcagagttacttcgaagcaaacagccgcygacaccaatgacaagttt

SEQ ID NO: 5695 - DNA, 121 bp, Artificial Sequence
  Description of Artificial Sequence: Synthetic probe
aacgattgggtcttacagtttgctatgatttgagatttccagagatttatcaatgtttgcrttttaagcacaaagcacaggtcttgcttgtaccatctgcattcacaaaggtaaccgggga

SEQ ID NO: 5696 - DNA, 121 bp, Artificial Sequence
  Description of Artificial Sequence: Synthetic probe
ataggaaagaatgcggtcgcaccatgcaggtgtcctcctcccagattttggctcatcactygtgtacttcttcgagttgaacatgtacttgtatgttggagcaaagctgataactccttcc

SEQ ID NO: 5697 - DNA, 121 bp, Artificial Sequence
  Description of Artificial Sequence: Synthetic probe
ggacgactccgatgacagtacccaggtagccagcaagaagtggaaagtactcgagtcgatwgaaacgactcggcgcccacggtcggcttcgacatttgagctgaagccaagcatgaactcg

SEQ ID NO: 5698 - DNA, 121 bp, Artificial Sequence
  Description of Artificial Sequence: Synthetic probe
caccaatccttgtgaagaaggagaaggtggtcttctagtccgtccgtcatcacggagaaarcaccctagttatgtccatttgtacattttgcttcctttttgtttgcaaaacctctgcagt

SEQ ID NO: 5699 - DNA, 202 bp, Artificial Sequence
  Description of Artificial Sequence: Synthetic probe
tgcaaaccttttaggggagacgatctggcgtgttcacgatgattgctcggttggtcacgcgccgtactccaccttggatatcgactgatgcttgtgttacmctcatatggtgcttccgtccgtggaggcccttgtttgaatgatgcctaggaatagttgtgcaatgcccttgccttttggatcttatcctctttgctttcgt

SEQ ID NO: 5700 - DNA, 121 bp, Artificial Sequence
  Description of Artificial Sequence: Synthetic probe
tcaccagcccttgagtgacccgaaccggacgctatgcatgggcgacgtggtggagctgacrcctgccctgccacacaagtcactaacygagtacagggaagagatccagcgcatgtacgag

SEQ ID NO: 5701 - DNA, 121 bp, Artificial Sequence
  Description of Artificial Sequence: Synthetic probe
attctgagacacacaactgcccatttgattataagaccgccggccgcgaggagattgcccrtgccaaccctctcatcagggctgccaaggtcattaagatatgaggttatgtcatctaaga

SEQ ID NO: 5702 - DNA, 202 bp, Artificial Sequence
  Description of Artificial Sequence: Synthetic probe
acagcatcagtgcaaacagccctgtcctcatcgttggaggttgtacctggacttgcatctgaggtcttcttttgtttcttctgtggaagcggacgtgtctkccatttcggatacttctcaaactctatatagcaatgcattagtgtaaatggcttccttttaggatccaattcaatgtacaggaggtgtgcatctctttcct

SEQ ID NO: 5703 - DNA, 121 bp, Artificial Sequence
  Description of Artificial Sequence: Synthetic probe
tttggagttacagatgaggatgcagacagccttcgcagtcacaccctttctgaagccggtratatcgagtcgttagaaaagatgattgacgattctgacttcggaaaaggtaccccatcat

SEQ ID NO: 5704 - DNA, 121 bp, Artificial Sequence
  Description of Artificial Sequence: Synthetic probe
tagcagaagacttggagaaaatcgtaggcgtagtggaccatggaatcatttacaacactayttcgtatgctgtcattgcgtcgaagggggaagtgaaggtcttggatcagaagtcgtcggt

SEQ ID NO: 5705 - DNA, 202 bp, Artificial Sequence
  Description of Artificial Sequence: Synthetic probe
catctgatatctcagtgctgggcgaccaacccagacagawksccgksaattcgatgacatcgtttcaattcctcgagggctacaaagaagctctggatgaygatccatcgttcttcttgtcatacataccgcctccgctgaaccatcaccatcagcaccaacagagccttctccggtgctttcctcgctacaaatctctgcg

SEQ ID NO: 5706 - DNA, 121 bp, Artificial Sequence
  Description of Artificial Sequence: Synthetic probe
agcccccttactaatctcttcactttctggttgtgaagatgatgcaagagtttttggactycctagagccggtgcttgaactgtaaagcgccatggcattctcaaaaaaggaagttgtttt

SEQ ID NO: 5707 - DNA, 121 bp, Artificial Sequence
  Description of Artificial Sequence: Synthetic probe
gcgatgagctctcctggttcaagaaggaagctgctaaatggggtgttgatctagtcggtayttctcccctcagttctaatacggagtactgcaggtttctccagagcttcgatgatccaga

SEQ ID NO: 5708 - DNA, 202 bp, Artificial Sequence
  Description of Artificial Sequence: Synthetic probe
atgggaggcatgagctccggccgccacaccgatcccttcgctctcctgcccggatctcctccttcttcgatcatcggctaatggggattctgtcgagtcgyagctcaagaaaagaactcaataagtccgcatgttctgtcaatcttcgatatctgacagaacggtcgtaccagtaatgcagtatcgatctctactggacgct

SEQ ID NO: 5709 - DNA, 121 bp, Artificial Sequence
  Description of Artificial Sequence: Synthetic probe
catgtgcgtgtacctggccaattctaacttattcggcttgacgatttttcgcctcaactcytgctgtgctctatttctaaaactgaccttgtccattttgtatcatcatttgaatttccta

SEQ ID NO: 5710 - DNA, 121 bp, Artificial Sequence
  Description of Artificial Sequence: Synthetic probe
tggacggcactagcgtgtgccgtcacggctgccagttgatttttttcttatctccgctctwgcctaatgcttgtcgatgttgttgtcgttgttgtatcatgtaatccctgtcagtgtggct

SEQ ID NO: 5711 - DNA, 121 bp, Artificial Sequence
  Description of Artificial Sequence: Synthetic probe
atggcgcgtgggtatacgttggtgcgagctcgaactcaaagtgctgaaggatcatacacarggcaatctttgcctccagcatcacaaagctctgtccgatgcagacccgtggacccgaacc

SEQ ID NO: 5712 - DNA, 202 bp, Artificial Sequence
  Description of Artificial Sequence: Synthetic probe
cagtgcgaaagtagacatgactgctaataaccagacagaacgaagtaacagcttctagtagtgatggggaggggagggagggggtgcaaacctaccgttgkagtcagtcgctacaaaacagggcaacggtgatgagccagcatcatctcggctcttgtcatttggtcattttcgactgattctaccggtagtaagcctggtg

SEQ ID NO: 5713 - DNA, 121 bp, Artificial Sequence
  Description of Artificial Sequence: Synthetic probe
gttcacttactgaagtcgtaatcttccacttcgtaattggcatggcagatgcagctcggtygagtcccaactacattaccagcgacaatcccctgggaccctctgaataacgcctaacaag

SEQ ID NO: 5714 - DNA, 121 bp, Artificial Sequence
  Description of Artificial Sequence: Synthetic probe
tattgtgtgttgcttgctgctacggatttgctccacttgaataaggatctatagtttgtgyaaaagacacgatcctcgttgtcatgtactactaatgtgtattgtaatcatccatctggat

SEQ ID NO: 5715 - DNA, 121 bp, Artificial Sequence
  Description of Artificial Sequence: Synthetic probe
gcaagccattgctcatatctcatcaccacagcagatctgtgtcccacattcccagagattycaatggagtagctcataattgggctgataagattctcagagaaaacctgacccaacctgt

SEQ ID NO: 5716 - DNA, 121 bp, Artificial Sequence
  Description of Artificial Sequence: Synthetic probe
aaagaacagggttcgaggcaagttgaggaagttgaaatctggttccaaacctagttccackccttcagcggcccgaaagaacccatggcaatgaagagagagagaaggatgcgctccattt

SEQ ID NO: 5717 - DNA, 121 bp, Artificial Sequence
  Description of Artificial Sequence: Synthetic probe
ccagaccgaaccatgggacggcaaggacggagagatcatcgaagaggacgagttctcgctygacgagctcatgggcgacagctctccaccgaacgacgagttgtgatcctggtgggttctg

SEQ ID NO: 5718 - DNA, 121 bp, Artificial Sequence
  Description of Artificial Sequence: Synthetic probe
gctttgttcctctcgtccgcgatgatgctgaggcatttgcagttcccatcattcgcagacmggctggagtcagcagtgaagcgtgtcattgcagaaggcaaatacaggaccaaggatttgg

SEQ ID NO: 5719 - DNA, 121 bp, Artificial Sequence
  Description of Artificial Sequence: Synthetic probe
tcaatcgcacctgtgctgccacaggcaaggagatggtgtggacttgatacatgtcacatcrcctcatctcatctcatgaatctaactgtttcttctttctccctatctcctacggtcctac

SEQ ID NO: 5720 - DNA, 121 bp, Artificial Sequence
  Description of Artificial Sequence: Synthetic probe
catgcaagttgttggagcagttgggtttcagagccgacgccttgatattccagataacgtygagcccgccgttggagagatcataacaagatgctggcagacagacccaagggcccgacca

SEQ ID NO: 5721 - DNA, 121 bp, Artificial Sequence
  Description of Artificial Sequence: Synthetic probe
ggatctggaacatacacaaaagcacttggtcttgagcttgatctttcggagaaaggattgrgtctgcgttcgaggcggtttgctctccttgctgatgacctcaaggtcactgtcgcaaaca

SEQ ID NO: 5722 - DNA, 121 bp, Artificial Sequence
  Description of Artificial Sequence: Synthetic probe
cggggacctatccttacttgcacgcttcggagatggggaggcaggaagggaacgatcttgkacaggtggtggggaccttgatcttgacccagacagactcctgctcctggagattgaccgt

SEQ ID NO: 5723 - DNA, 121 bp, Artificial Sequence
  Description of Artificial Sequence: Synthetic probe
ggacaaggggaagggcaccatgaattccaagatccagaagcaagcatgccagtggtgaatkgtatgccaggttcagtttcttgcagggggtcttacaatgggtcaagcctagggacagggc

SEQ ID NO: 5724 - DNA, 121 bp, Artificial Sequence
  Description of Artificial Sequence: Synthetic probe
gatgacacagacgacgactgatctgaacattgagaggctacctgatgtgaatgattgcttkcccacagttggagatgagtgccaccatgccaaaatcagatgtagagaagcttcccaatac

SEQ ID NO: 5725 - DNA, 121 bp, Artificial Sequence
  Description of Artificial Sequence: Synthetic probe
gattatttttcccggaggcaatcacataggatgcttgtcagtagatgtgtagcatggttgstgtgtgaattagttatttgagttgccagctttgttggtatcaggtaactttgttaccttc

SEQ ID NO: 5726 - DNA, 121 bp, Artificial Sequence
  Description of Artificial Sequence: Synthetic probe
ttccacaaatatgaatgagcttattcaatggaatgatctatatggagatggtgggtcgagraaaaagacaacgctaagctacttcatgtagctgatgttgagtacatgtacatacatcata

SEQ ID NO: 5727 - DNA, 121 bp, Artificial Sequence
  Description of Artificial Sequence: Synthetic probe
tatcaacatactgttgatagcattccatcaactgtcgacattgattattgcacattgcatrggtgatcggtttacagttagtcgaactattttggatgattactaagagtacagtgcgctg

SEQ ID NO: 5728 - DNA, 121 bp, Artificial Sequence
  Description of Artificial Sequence: Synthetic probe
ggaaacaggaacagtagcacgaacacctaatggtaaccataatcatctcaaaccctaagcratggagtgagacctaggatactctggagcgatgacacgaaacacataaacgataagctag

SEQ ID NO: 5729 - DNA, 121 bp, Artificial Sequence
  Description of Artificial Sequence: Synthetic probe
aactttttttaagaaataaaggcacaagtactttcaactgatcaaggtatattctcaaccygatgttccttccttcctaacactacggagaatgaaacaaatacaactaagtcgactagtc

SEQ ID NO: 5730 - DNA, 121 bp, Artificial Sequence
  Description of Artificial Sequence: Synthetic probe
ggagagagttagagaaaggaagagagagctgaaacaggctaaagaggccagaaagaaagcyaatgaatgatatggatcctaaattgaaagaggcattggagaatatccggttttacaagtt

SEQ ID NO: 5731 - DNA, 202 bp, Artificial Sequence
  Description of Artificial Sequence: Synthetic probe
gcttgcaattggatgagagttgccagtgaaggcctaaggttgagctgaatttgctccggtgaatgtttctttcttcttcgaattcctgcaatcacggttcraaaatttgaagtttcctcagctcatcttcctgtctccctatgtactattacctcccttctacttggcggcacttggctcagccttgctgttcccagccttc

SEQ ID NO: 5732 - DNA, 121 bp, Artificial Sequence
  Description of Artificial Sequence: Synthetic probe
tccaaacggagccgcttgtgctcctggtcacctaggtgcagtgacatagcgagctcttccwctgatggattattcaaattggcgacgatgctccttggagcatttttggtcatggcgcacg

SEQ ID NO: 5733 - DNA, 121 bp, Artificial Sequence
  Description of Artificial Sequence: Synthetic probe
ctgagctaacgagacgccgagctcggaggcaataggtttcagcccattcacttttctaagygtgtcgtcgaccagagacctgttggccaggttcttgtaattgtctagtgcaaaccgactt

SEQ ID NO: 5734 - DNA, 202 bp, Artificial Sequence
  Description of Artificial Sequence: Synthetic probe
atatggttgtacttccatacaaggacagtctgctactttkragtagatatttgcaacaacttgtcatggaatctcttgggaaagaatttgaccttgatggmaatcgggttaatcaagggctaactgtatatggtaacaaaggaagcacagaccagcatgcctacattcaacagctgagagacggggtgcacaacttctttgt

SEQ ID NO: 5735 - DNA, 121 bp, Artificial Sequence
  Description of Artificial Sequence: Synthetic probe
agctataacttcttccatccatgcaatttcctttgtaagcctcaaaatagcagcatttgcrgtttcaaaaacaaagtttgcatcatccataccatcaccagcatcagcaagagcaaaccta

SEQ ID NO: 5736 - DNA, 202 bp, Artificial Sequence
  Description of Artificial Sequence: Synthetic probe
aagcaggtccgggtctggtgcaaagcggccgaggggagatgacaacagcagcagcagtcgcaacaagggccggcaacgtcgatagtggtcttaggagaggygtgcggtacttttggttctagcactagcaccagctagtaataagtccatgtcctctcaactcagattttccgacgaacctgcctaacccttgccccttgaa

SEQ ID NO: 5737 - DNA, 121 bp, Artificial Sequence
  Description of Artificial Sequence: Synthetic probe
ccacaagagaatgcctgctgaagctatagatcttgcctcccgccttctccaatattcaccwagtctacgctgtactgctcttgatgcatgtgcacattccttctttgacgagctacgcgag

SEQ ID NO: 5738 - DNA, 121 bp, Artificial Sequence
  Description of Artificial Sequence: Synthetic probe
ctcctcagcaatctgtttgctcactaaccagaaaactctcgaccttataatgatcctcaaytctaaaagatttttggacagactggtgtcaaccttagaagaaaagaacatcacgaggtga

SEQ ID NO: 5739 - DNA, 121 bp, Artificial Sequence
  Description of Artificial Sequence: Synthetic probe
tcgggaagtgagatctcaactgctagacatactgaaagccctgaagatcccactgacatcrtgccatatggaatgggacgtggtgaggaaagctatctgctctgcgtacttccacaattca

SEQ ID NO: 5740 - DNA, 121 bp, Artificial Sequence
  Description of Artificial Sequence: Synthetic probe
gattctcgtcaagcagtttctcttgatgaagcattatggagagtacaggcttttgctgatkcccgggagttctatttattgatgccctagcttcaatagaagagatgaaggcattctgtgc

SEQ ID NO: 5741 - DNA, 121 bp, Artificial Sequence
  Description of Artificial Sequence: Synthetic probe
gattagccgcatgcatccgtcgaaatccgtgtcaagcgagagcactgtggcgccgttggcratcggctggatgagctgctgcagcgagatgcgatcggcagggaggaagacgatggcgggg

SEQ ID NO: 5742 - DNA, 121 bp, Artificial Sequence
  Description of Artificial Sequence: Synthetic probe
atgacaagtctgtttcatgatagtcttggatttggttcagccaaaatgatcaggagaatakttgggatcgctcatgtcgaggattttgactcgattgaggatgccagcaagagagcaatcg

SEQ ID NO: 5743 - DNA, 121 bp, Artificial Sequence
  Description of Artificial Sequence: Synthetic probe
ggtcatgcggacacagatggtcagactgtcctccacccgacgaacggaaagctagtaaagrtattagatcatctcgatgcaagtgcatactacacccagtttgcagaactgctcagcgcca

SEQ ID NO: 5744 - DNA, 121 bp, Artificial Sequence
  Description of Artificial Sequence: Synthetic probe
gaggcaatcatccagaggcctttgagaggctgatgcagatggagcttacagccagatccaracagatacatccagccatggctggccccgtacctggtggcggcatgtacgggccgcctga

SEQ ID NO: 5745 - DNA, 121 bp, Artificial Sequence
  Description of Artificial Sequence: Synthetic probe
gagtgatcgcacccaagactgtgtactcagaaatggtacaacagcatcatggtctccactrtacaaggaagatagatgagagattcgaaaacaaaatatggtaacctgatacttggagtgg

SEQ ID NO: 5746 - DNA, 121 bp, Artificial Sequence
  Description of Artificial Sequence: Synthetic probe
ctcaacagacgatttcaacggagcgcagctgaaggctgtttgtgtagaagctggtatgctygcgctacggcgagatgcaacagaggtaacccacgaggatttcaacgaggggataatacaa

SEQ ID NO: 5747 - DNA, 121 bp, Artificial Sequence
  Description of Artificial Sequence: Synthetic probe
cgtctgccgactgtcgacatttcagaagttcaggaaacagaggattgtaactgagctcctygaggtttcgctctctgctctggttttggcttatcgttctggactggtggaatcttgatgc

SEQ ID NO: 5748 - DNA, 121 bp, Artificial Sequence
  Description of Artificial Sequence: Synthetic probe
ttcagctactgacgatgagatgccaacagtagcatacctcagggatgtcttaggtctgtcygaagaacattccgaccaaaggatgctcaagatagcgacgtacttcaagcatttgttatgt

SEQ ID NO: 5749 - DNA, 121 bp, Artificial Sequence
  Description of Artificial Sequence: Synthetic probe
ttctttcttctctgctgcatcaacagcgctatatgtgtatctgtactccatctattactaycacgtgaagacaaagatgtctggcttttttccagacaagtttctactttggctacacaat

SEQ ID NO: 5750 - DNA, 121 bp, Artificial Sequence
  Description of Artificial Sequence: Synthetic probe
ctgcgcaacggacggcggcagcggctgacgccgacctccctgatggatacttcggcaatgycatcttcaccgccacgccgctcgccgaggcgggcaaggtgaccggctcgctggcagacgg

SEQ ID NO: 5751 - DNA, 121 bp, Artificial Sequence
  Description of Artificial Sequence: Synthetic probe
taacgaggctgttgaactggacgatagacacgaacagatagacgcgttgctagatgatgckttggaaaacgatgccgatgacaggagtagatcacctcttatgcccccacaacctccacca

SEQ ID NO: 5752 - DNA, 121 bp, Artificial Sequence
  Description of Artificial Sequence: Synthetic probe
cagtgatattggaacataagttcactgatgctagtttgtatatctgctctcttactggagmactgaagccagtaatctccatgtaacctcctcttttaccacactctccataatatccctt

SEQ ID NO: 5753 - DNA, 202 bp, Artificial Sequence
  Description of Artificial Sequence: Synthetic probe
gatacaaatggcctgaaatatagggctatgtgctttgcatgacactgaatcatatcctcagatctttgttgtcatgtacactaaatgtcagggtcaggtcmactagtgaggtgagggaaggatcaggataatgtaattataccccatacataaatttcagtaaaactgctgtgctaacttaacatgaatgaatcccagccaa

SEQ ID NO: 5754 - DNA, 121 bp, Artificial Sequence
  Description of Artificial Sequence: Synthetic probe
caagatgtgcatgccgggtgaccgtatcaagatggtcgtggagctcatccagcccgtggcktgtgagcagggaatgaggtttgccatccgtgaaggtggaaagactgtcggtgccggtgtc

SEQ ID NO: 5755 - DNA, 121 bp, Artificial Sequence
  Description of Artificial Sequence: Synthetic probe
catcatgctagggaaagcatttgtaccatacctggaggggcttagtagcacacagctgcgkctagtaacaatctatgcaaatcggatatcgcaggcaaggtctggcacaccgatcgatgct

SEQ ID NO: 5756 - DNA, 121 bp, Artificial Sequence
  Description of Artificial Sequence: Synthetic probe
gcagcattttggacaatgaggaaggatgcatcccgatcaaaagcgaaaaagcgcacctgaratggggagtgtggttagcacccaagctgttcaatgtttagaagaacagatttcggtctgt

SEQ ID NO: 5757 - DNA, 121 bp, Artificial Sequence
  Description of Artificial Sequence: Synthetic probe
gataaacatggtcttgggttaacaggacacaaactgcaccaagaaacctgatgccgcttgyaggcaatatacataccctttcagatgcagcaaccttcaccagattcggatctacaaacta

SEQ ID NO: 5758 - DNA, 121 bp, Artificial Sequence
  Description of Artificial Sequence: Synthetic probe
cacatcaacagcccagtccttggcatcctccagccgcattggttccccggttcttaagcgrgcttttggacgagccaactttgattcaaagggagtccttggcctgacttcttggatttca

SEQ ID NO: 5759 - DNA, 121 bp, Artificial Sequence
  Description of Artificial Sequence: Synthetic probe
ggcgaatccctactatgacttcgaggaagtaattgattctgatgaagagttaaatctgggmgccatggacactggcaattcgagcagttgatcacatcctgtactgtatcagtgtacttag

SEQ ID NO: 5760 - DNA, 121 bp, Artificial Sequence
  Description of Artificial Sequence: Synthetic probe
tcttacaatcaaattcctcgttacatgtgatgtatgaggaggctttttcttgtatccgtcyagtgaactttgtagccggttgatccttcaactgttttgctgaaatcattactgaatccat

SEQ ID NO: 5761 - DNA, 121 bp, Artificial Sequence
  Description of Artificial Sequence: Synthetic probe
ctgcgcgccgaataacatctgcacgaaagatttggtggacctgctgaggaagatgtttccraagtacagctacgtgagcaacatcatcgacgtggagcgcaaagcgccgataacgtcgcag

SEQ ID NO: 5762 - DNA, 121 bp, Artificial Sequence
  Description of Artificial Sequence: Synthetic probe
accaactactacggcacaaagcgggtaacagaagctctcctgcccctgctccaatcctcaycggatggaaggattgtcaatgtctcctccaactttggactgctaagccttttcaggagcg

SEQ ID NO: 5763 - DNA, 121 bp, Artificial Sequence
  Description of Artificial Sequence: Synthetic probe
agaggttgaaccctcagtagaggaggagagcgtgatggaggagaccatccgcgtgacacgwgccaagctaaggaggcgtgctgccgcagaggcttccgcatgaaattagccgcaaaccatt

SEQ ID NO: 5764 - DNA, 121 bp, Artificial Sequence
  Description of Artificial Sequence: Synthetic probe
gggtcgatgcagaagttgggaaagtggacgagaagcttaccttgctaccgccctcatcaaytccatcagcccacaagtcagtccttgtgggtgatctgaaactggccgatttcaagcagtt

SEQ ID NO: 5765 - DNA, 121 bp, Artificial Sequence
  Description of Artificial Sequence: Synthetic probe
cacgtagtgattagcttcacacctagtgtatgtattgtttagatattgtctcggttgtttygggcagagtcagtggcagctctaagaatgcacgctgcttgctgacagtttggcaacccca

SEQ ID NO: 5766 - DNA, 202 bp, Artificial Sequence
  Description of Artificial Sequence: Synthetic probe
gcccaatttaacctgaagacaaacgatcgatgtggaaactttttcggcccgcttaatgtgctgggaccaacacatcagtgacacactgcacactggcatcwactagctttctgacaattggccagtgcaggacggatctgtaattcctactagaaggtagctctaatgatggaammatggaattacctgtggatgtagcaaa

SEQ ID NO: 5767 - DNA, 121 bp, Artificial Sequence
  Description of Artificial Sequence: Synthetic probe
ctatcatcactgcatcacaatcacagctgtgcgagcttcaaaggagtcaccatgagaagaygctggtgatatcagggaacgccaacagatcattgggggatgattacaaggtggatgaacc

SEQ ID NO: 5768 - DNA, 121 bp, Artificial Sequence
  Description of Artificial Sequence: Synthetic probe
ttctgtgaattgtcaggctaaccaggataatggctgtgtgactgtgactccatccaagccrgagccaaagaagaggaagaagttggttgaacgaagccctgactgtgtcgcaagcagactg

SEQ ID NO: 5769 - DNA, 121 bp, Artificial Sequence
  Description of Artificial Sequence: Synthetic probe
tggaagacggggaatggcccttcaccccaaagcaatggccatgcaggttctgctctacctygaacagaacgggtatctgcaggcctagctgtatacccgagaagattgatcttattcttct

SEQ ID NO: 5770 - DNA, 121 bp, Artificial Sequence
  Description of Artificial Sequence: Synthetic probe
tggggcgggtgctcctcatccacgtgccctacgtcttcatggcggcatggaagatggtgtrccccttcatcgacgacaacaccaagaagaagttcgtgttcgtcgccgacaaggatctgga

SEQ ID NO: 5771 - DNA, 202 bp, Artificial Sequence
  Description of Artificial Sequence: Synthetic probe
aatggcccttccaacttgcaatccgatgtctcggagacagaacttccagtagatgcaggctcattagctacctttgcatccgtaagcttgtctttggacawaatatccaaatcagtttctgctaacgatgcactgtcatccgtgtatgtcatgagttcccactcaaaatcaataggcctctggaacacccgacggtaacctc

SEQ ID NO: 5772 - DNA, 121 bp, Artificial Sequence
  Description of Artificial Sequence: Synthetic probe
ctagttggatccagatagtgtagattcatggtctgaagttcatgggctttgctgaagaccrttgtacaatggtaattaccctgtgctgtatgccgagaaacatatgattctggcatcacat

SEQ ID NO: 5773 - DNA, 121 bp, Artificial Sequence
  Description of Artificial Sequence: Synthetic probe
acagttcgagcacaccatcttgctccggccaacctgtaaagaagtcatatctagaggcgaygactattgatggcgcagcagctccccttctctgtaccggttgctggcatgatcattttgc

SEQ ID NO: 5774 - DNA, 121 bp, Artificial Sequence
  Description of Artificial Sequence: Synthetic probe
agatgcaaaggagaagggggcaactttttgccaagagtacaggagagagggtaaccttatmtggccgttgctgttggatcatgtccggcctgacatgaggattgcttgggaggagccyttt

SEQ ID NO: 5775 - DNA, 121 bp, Artificial Sequence
  Description of Artificial Sequence: Synthetic probe
gatggactgaccctgtaccagagggcaagtgtagctgcctggtttcgagtagaaatgtacygacttcagtgacttgttaccaaaagggaacagggtgtgtgtcttgttatttttgtcgctt

SEQ ID NO: 5776 - DNA, 121 bp, Artificial Sequence
  Description of Artificial Sequence: Synthetic probe
cagtaagattgctccttcaagaatcgagcggtttagtttcagtgttgttctctgtttctcycctgtgttgagaagttcagggtgaacagtgtgagtcggtcaggaataatgggtacattat

SEQ ID NO: 5777 - DNA, 121 bp, Artificial Sequence
  Description of Artificial Sequence: Synthetic probe
ggaccagatatatgatgtctacagatatcttcccccagaacttcaggttgttttgatctckgcaactctgccccatgacatcttggagattactagcaagttcatgackgatccagtcagg

SEQ ID NO: 5778 - DNA, 121 bp, Artificial Sequence
  Description of Artificial Sequence: Synthetic probe
ttctttcgagaagaggggagttctagccatgctgtattaggtagaacaagtggcttgagcwtctcacccgatgattattccaggaaagacatttggtgtggcgaactgattggtccatctc

SEQ ID NO: 5779 - DNA, 121 bp, Artificial Sequence
  Description of Artificial Sequence: Synthetic probe
ctctgtctaatggacagcttagaactaagaggagatcttcgttctccaattcagaatatcmggagagtgaaaccaagaacactccagttccaccaaggaagccaagctatatggctccaac

SEQ ID NO: 5780 - DNA, 121 bp, Artificial Sequence
  Description of Artificial Sequence: Synthetic probe
ctcaaattgtattcaatcatgtcaaaacattaaggataagtacatgcagaacagactggtragactagtttgtgttttcctccagagcctcatccgaaaccagattattaacgttcaagat

SEQ ID NO: 5781 - DNA, 121 bp, Artificial Sequence
  Description of Artificial Sequence: Synthetic probe
tggccgagatctcggatatgccttgaactcgcaactcataccagcactttgcaaaaatggygggccagcttgaccagcctcaaattgtaccactttgtcagccattccatgtgaccacata

SEQ ID NO: 5782 - DNA, 121 bp, Artificial Sequence
  Description of Artificial Sequence: Synthetic probe
atttgtgccatgtggaacaatggccaaaagcttcgggtgctctcccagaatgctttgtccrtcggtctcatggtatattcagtattttcttcagcttcgcgacaagcttccagtcatccat

SEQ ID NO: 5783 - DNA, 121 bp, Artificial Sequence
  Description of Artificial Sequence: Synthetic probe
ctccgaacattttacaggcacacaaccttgtggaaggacatctctgatcatcttgatggtyctatggtgcagttttgtttgcttttcatactgccaggtcatgcaattcattgttattgtg

SEQ ID NO: 5784 - DNA, 121 bp, Artificial Sequence
  Description of Artificial Sequence: Synthetic probe
caatggtcatgggggtgaagacgagcaggttggagaggttgaatccgagcgcggagatgasgaacccaagctggtagcgctcgacggcggacgcggtcttccacgggtggaggtaggcgaa

SEQ ID NO: 5785 - DNA, 121 bp, Artificial Sequence
  Description of Artificial Sequence: Synthetic probe
gatggtcgaaggtttcgagatcgctctgaagaaactaaccggatggctcgaaaccaacatygacaacaagactaaaatctatttcgctggctcgtcgcctacccatacctgggcaagcgac

SEQ ID NO: 5786 - DNA, 121 bp, Artificial Sequence
  Description of Artificial Sequence: Synthetic probe
catcgatcagagcacgcagttgccgaatctgggtcgctggtggacgacggaaccgcagcckccgaagtcacatgactgatcggaccggccatggcgctggtagtagtcgttgaatgcgtag

SEQ ID NO: 5787 - DNA, 121 bp, Artificial Sequence
  Description of Artificial Sequence: Synthetic probe
cccgccgagaacgttggcgcacactctcagcttgagcacgtcgatggagcactggccgtcrtggccgtgccctcctccatggtgcggcggcggaacgacgacgggtggcgtcggcaccaca

SEQ ID NO: 5788 - DNA, 121 bp, Artificial Sequence
  Description of Artificial Sequence: Synthetic probe
atgccactgaacttaacttatatttcttctcaaacatgtttcgccaagaaaggacacacartattagtctctacctactgagaacggcacctgtaaaccgagaaaatggggtaaatttcag

SEQ ID NO: 5789 - DNA, 101 bp, Artificial Sequence
  Description of Artificial Sequence: Synthetic probe
agcttctcgagtctaaactggaagaagcttcctctctcatygatgagaaggattcaagaatacgtgaacttgatacactcaacaagacacaaccaagggaa

SEQ ID NO: 5790 - DNA, 121 bp, Artificial Sequence
  Description of Artificial Sequence: Synthetic probe
tgggggtcttagagtcaagcagcaggtgccagaagcaccttattatcaaatcagccctgcyggccactgtcctcacgatgaggttcctgaggttataaactatttactccgaggatggctt

SEQ ID NO: 5791 - DNA, 121 bp, Artificial Sequence
  Description of Artificial Sequence: Synthetic probe
cggaattcccgggatcgtgcaggaccacgccacgtacgccttcaacgcctactaccatggsatggggatggcatccgggacgtgctacttctccggagtcgccgtcatcacgaccaccgat

SEQ ID NO: 5792 - DNA, 202 bp, Artificial Sequence
  Description of Artificial Sequence: Synthetic probe
cggcttctaagccaaagacgaacttgtaagcaagatacgcgttcttttggacctaaattataccacatgtttgaagtgatgcgccagagggaattctagamgtagagacctgtttcagtttggttgccccacgcttggcatttttcacccgaaagggtaaaaaggtatactgtgtaattgttagaaataagggttgcattat

SEQ ID NO: 5793 - DNA, 121 bp, Artificial Sequence
  Description of Artificial Sequence: Synthetic probe
tccaccagcactctcctcaggcagcagctagctggctcctccgccagacctgcaccagcamtcttgtgcgccagctatgtctcccttgccaacctcttcctctctggccaagcttctcctc

SEQ ID NO: 5794 - DNA, 121 bp, Artificial Sequence
  Description of Artificial Sequence: Synthetic probe
acccactaaatatcatcagctgaccaaataactgatggttgacaatcagcaggatccttcrtcaaacttcaggtctcacgcagttcgcagaggcggagacaccaatataacaccatcacct

SEQ ID NO: 5795 - DNA, 121 bp, Artificial Sequence
  Description of Artificial Sequence: Synthetic probe
ccctagcggcggttacccagcatcgccaaagaagctaaaagtggtagaactgtctagatcragttatctgacttgttccagtggattcgtcgggctcagtagatgggtactagtttgcagt

SEQ ID NO: 5796 - DNA, 121 bp, Artificial Sequence
  Description of Artificial Sequence: Synthetic probe
cgagcatcttcaaaggtcccacagcagtgcacaatggcattcagttccgtgcgggtccgcytgggcaattccagcaccccatgtcgttccagcaagctatgccccagcaccagcataacaa

SEQ ID NO: 5797 - DNA, 121 bp, Artificial Sequence
  Description of Artificial Sequence: Synthetic probe
aagcgccggtacgagcaggaagcggcggaggagaacaaagacaagtaacaagtagtgctckctggttcgcaagggagctttagattctccttgttaggcataagcaagattggttgactgc

SEQ ID NO: 5798 - DNA, 202 bp, Artificial Sequence
  Description of Artificial Sequence: Synthetic probe
gtctataaagtatgggaaatgaacgaataatctgtgacattcctttcgtagtattaatcgtgagtatttatttttgaagccatcaagctagccaatatatstttccccctgtacaccgccggaaagatatttatatatacatatatacagaatattactattaattwatwacgcagtagtccgagagttggagtgtgctctg

SEQ ID NO: 5799 - DNA, 121 bp, Artificial Sequence
  Description of Artificial Sequence: Synthetic probe
tgtgagtgagaaggtaaatgtcatagaaagaccaccggtcgacaaaagggatgcatcaacygcgacagaggatttaggggaaagcagctcttcagaaacactgaccagtaccaataaccaa

SEQ ID NO: 5800 - DNA, 121 bp, Artificial Sequence
  Description of Artificial Sequence: Synthetic probe
gatcattgtgtcgtcattgcggaaccttctggatgcagaggcaaacttgtgcatctgggcracagcaccctcggcaccagttcttgcgccgctcgaggtgccctcctgttttggtttgtca

SEQ ID NO: 5801 - DNA, 202 bp, Artificial Sequence
  Description of Artificial Sequence: Synthetic probe
aaaccttttccgagttttgtcgcttgctcacctcattgaacaacctgacaaccccttgggttgcaaccttgatgagcatcttctctttgttgtcaatatgrtttgcgggtatgacatgacccttctgcgcagcaatgcgcttctccttgcgggcatctcccttggacttgtgctcgtccgcctcytcggccaacttggcggc

SEQ ID NO: 5802 - DNA, 121 bp, Artificial Sequence
  Description of Artificial Sequence: Synthetic probe
ggacttggatgatgaggagagtgacgatgatgatcatgacaatggccgggaggcggacaaygcccgaaggttgataatatttatgatgcgtcaggttactcagcggcatcgaacccaaagg

SEQ ID NO: 5803 - DNA, 121 bp, Artificial Sequence
  Description of Artificial Sequence: Synthetic probe
accacttgaggaagctggttgatgaattatattgctgatgaaattgaggtagagaaggctrcatctgtggctgcaacggatggtgctcgagggaaacctgatcactgaatgtgctattcct

SEQ ID NO: 5804 - DNA, 121 bp, Artificial Sequence
  Description of Artificial Sequence: Synthetic probe
ggccaccggtatattggagctccagtggagtggtgttggtattgaggactggtggagaaaygagcagttctgggttattggtggcacatctgcccatcttttcgccgtgttccagggtctg

SEQ ID NO: 5805 - DNA, 121 bp, Artificial Sequence
  Description of Artificial Sequence: Synthetic probe
gcagatcaccagcagtggctatattaattcggtactacgagcgaactgatcacactttccsttcgccggcgcgatagactgatcgtccccccataagctgctgctgcccaaccccgccggc

SEQ ID NO: 5806 - DNA, 121 bp, Artificial Sequence
  Description of Artificial Sequence: Synthetic probe
caccatgatcactggctaaggtgttcaatgctttcttggtacttgtagtttctaagcgccsgcccaggtccagagctatgtgcagtgtgatggattgaatcctgaaaccaagtggatggac

SEQ ID NO: 5807 - DNA, 121 bp, Artificial Sequence
  Description of Artificial Sequence: Synthetic probe
cttcagcaacaacttcatagcgcagacctcacagacctgtttgttgctctcttcctccggrrgattagaaagggctacagcaattcgagcgccagtaagagcattgttctttacaagtgca

SEQ ID NO: 5808 - DNA, 121 bp, Artificial Sequence
  Description of Artificial Sequence: Synthetic probe
cactgcaatgagtataccagattccagatgcatattcttgtttgcatctattatcttggcrcactcttctggagaatcaacgcggcatggcgccttacatccactagtgtctgtgaagaaa

SEQ ID NO: 5809 - DNA, 121 bp, Artificial Sequence
  Description of Artificial Sequence: Synthetic probe
gaacaaggctcttgacacattcaatactgcagttgtttcaccaatatactatacaatgttyacatcactaaccatactggctagtgtcataatgttcaaggactgggatcgtcaaaatcca

SEQ ID NO: 5810 - DNA, 121 bp, Artificial Sequence
  Description of Artificial Sequence: Synthetic probe
caagatctaacttctctgacatctctacacgtatcattcctcccctcctgggggatggaarcaacaacggaaacaaggatatgtgtatgaactcaacacgcttgggccctccgccgcaagg

SEQ ID NO: 5811 - DNA, 121 bp, Artificial Sequence
  Description of Artificial Sequence: Synthetic probe
gagggtggtgagactgtgtttccttctgctaaagttaatagcagctcaataccaaattatratgagctgtcagaatgcgcaaagaggggtatatctgtcaaaccgaagatgggagatgcct

SEQ ID NO: 5812 - DNA, 121 bp, Artificial Sequence
  Description of Artificial Sequence: Synthetic probe
aaactttgactgtgactatgcttatgcccttggccacatctctctacatatgatagcagcyggtttgactggctacatggcaactgtggctaatctgaaggaccctgtacacaagtggcgt

SEQ ID NO: 5813 - DNA, 121 bp, Artificial Sequence
  Description of Artificial Sequence: Synthetic probe
gagcaatcagagtaatcttttggtagaagactgaaaagagggctagcaattcttagtgatratcaccccttctattttccgccgcgaatatctgcagagtacagtgaagctattctctgtt

SEQ ID NO: 5814 - DNA, 121 bp, Artificial Sequence
  Description of Artificial Sequence: Synthetic probe
gtgagaagctcaacactctgattactcaagatgcaattaaccgtggcagtagggacaacarggaaaccatatcccctaaagtacagtgtcagccgggaaaccaaatgggactcaactgcct

SEQ ID NO: 5815 - DNA, 121 bp, Artificial Sequence
  Description of Artificial Sequence: Synthetic probe
caatgtctctcttctgaagatgcgcacaatcttcttagcaggccaacctgaggtaacaacycatgttgctcttgttcttctagcatcctccgcggtccttctcgtggttcctttcaagtac

SEQ ID NO: 5816 - DNA, 121 bp, Artificial Sequence
  Description of Artificial Sequence: Synthetic probe
tgccttcaagacccctgtggccatgctggagaaagagctggctgcactgatcactgagaasaaaataaaggctcggatagactcccacaacaagattctgtacgcaaggcatgacartkmc

SEQ ID NO: 5817 - DNA, 121 bp, Artificial Sequence
  Description of Artificial Sequence: Synthetic probe
ccacagaggtgttatgctaaccttgaaggtgtgcactttctttgtggcattgaagactagrgtgggtgggtcaactttgatcttgactcctaggggagactgtatatcagattggtaaact

SEQ ID NO: 5818 - DNA, 121 bp, Artificial Sequence
  Description of Artificial Sequence: Synthetic probe
aaaacagtgctatgtcttaggcaacttaaatatcaaacgtgctatcgctgcagacattctkcttttttcactcaaatggtaagttatttcttcccgttaactgtacatatgtaagagaatc

SEQ ID NO: 5819 - DNA, 121 bp, Artificial Sequence
  Description of Artificial Sequence: Synthetic probe
cttcatcgagctcttcttcatcctgacctccatctggctgcaccagttctactacatcttyggcttcctcttcctggtgttcgtcatcctcatcatcacctgcgcggagatcacggtggtg

SEQ ID NO: 5820 - DNA, 121 bp, Artificial Sequence
  Description of Artificial Sequence: Synthetic probe
ggaagactcagatagtgatggatgtggtgaaaacttccaattgatgacgggtttgtgtctrtcgatgttaccagctaaatgtaacacatggatggtcatttcggtactgccaaccatggct

SEQ ID NO: 5821 - DNA, 121 bp, Artificial Sequence
  Description of Artificial Sequence: Synthetic probe
tactcagaatggcaacagacatctctaaggaatgaactacctgcatcagaacaacataatmcacagagatctcaagactgcaaatcttctcatggatgaaaacaaggttgtaaaggttgct

SEQ ID NO: 5822 - DNA, 121 bp, Artificial Sequence
  Description of Artificial Sequence: Synthetic probe
ttacgatcatcgtatgtatggccaaaaccttacggtccagagtttctacaatgcatcagtycctgtctctgtgcaagcaacctttccctatacatttgccgtgagcaagttcttgcagcct

SEQ ID NO: 5823 - DNA, 121 bp, Artificial Sequence
  Description of Artificial Sequence: Synthetic probe
tccgctggatcgcctgggatagttccttgttcccgcgctccacgttgtttgtagcttccaytgcctggtcatataaatactgaatctgttgagcttgttgtagaacgtgtgttgacataag

SEQ ID NO: 5824 - DNA, 121 bp, Artificial Sequence
  Description of Artificial Sequence: Synthetic probe
cgtgtcctcttatcgtagcttgatgattgcctttgtctttccatcgcagtttctggttcakgactcttgtagttgtatggcatctttaactcccycctttggtggatggagctgtgtttta

SEQ ID NO: 5825 - DNA, 121 bp, Artificial Sequence
  Description of Artificial Sequence: Synthetic probe
ggaggtgacgatccgagagagagacagcaagcagcaggtcagggtgggcatcgatgaggtrgcatccgtggtgaagcagctgacagagggccaaagcacatggaccgatgttgaatttaag

SEQ ID NO: 5826 - DNA, 121 bp, Artificial Sequence
  Description of Artificial Sequence: Synthetic probe
ccccggatcgagagcggaatcgacgactcgacgaggaaggagacgaaggaggagcttcgargatgttccggaaccagtacgacacggatgtgacgacgtggagcccggcggggcggctgtt

SEQ ID NO: 5827 - DNA, 121 bp, Artificial Sequence
  Description of Artificial Sequence: Synthetic probe
ttggtacggtcagaggtcagaattcaacgacatattgttgcggaataccagctgggatagyattcccagattaggtaaactgaccatctcctgacaatagaatgctctacgctggtctgtc

SEQ ID NO: 5828 - DNA, 121 bp, Artificial Sequence
  Description of Artificial Sequence: Synthetic probe
gaacatccagcaacaaaatgaagccggtgggaatcgaccagatgggtactgtcatgcgtaycatacatcacaccgaagccatcaaggcgagatgctgctttgcggtctcttgtttgtgatg

SEQ ID NO: 5829 - DNA, 121 bp, Artificial Sequence
  Description of Artificial Sequence: Synthetic probe
aatcctcacggtcagaactatgctcagcaatgtacccaagcaggccatgccagacagaacrtaaaatgtaaatctgaaacagttggggccatggcacgcgatatcgaggtctgtagttgtg

SEQ ID NO: 5830 - DNA, 121 bp, Artificial Sequence
  Description of Artificial Sequence: Synthetic probe
ctcatgaccctttggatgtatgctggtggtaggtatttggatggctggagcacattttcckctccacctatccatcttcgagagatgtggatgctgggttgcgtgttctygacgatcccca

SEQ ID NO: 5831 - DNA, 121 bp, Artificial Sequence
  Description of Artificial Sequence: Synthetic probe
tggttcttatttcgatacttgcaagtgatcctcttgaactgcgctccttctgaagcacgaygttacccatgggctgcaattttgtggaagctctgcccaaggcatctttgggaactggagc

SEQ ID NO: 5832 - DNA, 121 bp, Artificial Sequence
  Description of Artificial Sequence: Synthetic probe
gatgaacccccatagttgatgcagcggcgtaatttgacgattgatgcagagttgaagcccyattgaaccgtgccagttatctgtcgatgttatcccatttcagacgtgaaactactgctcc

SEQ ID NO: 5833 - DNA, 121 bp, Artificial Sequence
  Description of Artificial Sequence: Synthetic probe
gtggtggcgagtgcatgcgcccgggagagagcctagcctttttaactccgcgaatttatcyggccatgtgtgtatatatgctacatctcctagtgttgttttcaagaccctgaggtgacaa

SEQ ID NO: 5834 - DNA, 121 bp, Artificial Sequence
  Description of Artificial Sequence: Synthetic probe
tcgtccacgccggcatcatcggacggcggccagctgctgaggcgcctggaggagcagaatraggagatcatgcggttctgcgaggaggccgggatcgcgtgcgtgcagtacctgccgtact

SEQ ID NO: 5835 - DNA, 121 bp, Artificial Sequence
  Description of Artificial Sequence: Synthetic probe
atgcgaagtcgaaggacatgagaaggacccaagaaaagcagcaacaacctgctgttcctgsgctcactgcttgaaatgccccgcggaacggttactgttcattgtatgatacatcctgtga

SEQ ID NO: 5836 - DNA, 121 bp, Artificial Sequence
  Description of Artificial Sequence: Synthetic probe
acgaaaatccatgtctctttccctccctcccttcttagatttagtccacctgatcaggcaygcaaaaactatccaagaaaatggcatggcatggcatggcatagcacctttcctccccaca

SEQ ID NO: 5837 - DNA, 121 bp, Artificial Sequence
  Description of Artificial Sequence: Synthetic probe
gcgtgagcataaagcagagctatacgacgataggaactgttaaaagacagatgccactggyttgtttttgtatgtatgagttgtgtaaatatgtgtcatccatatgttcttgagtaccgac

SEQ ID NO: 5838 - DNA, 121 bp, Artificial Sequence
  Description of Artificial Sequence: Synthetic probe
ctccaattcctgacttgaatgacaagatcgttgtgtttgggagggttattaagggagaagrtattgttcaggagattgaagaaattgatactgatgaccattaccagcccaaaacccctat

SEQ ID NO: 5839 - DNA, 121 bp, Artificial Sequence
  Description of Artificial Sequence: Synthetic probe
aggcaagtctcacctggaactttccggtagcaacacaactcacacgaaaaccatggtcttsgccagatcaagggccctttcccttccgaagagcttctccacaatggcaagcgagaattcc

SEQ ID NO: 5840 - DNA, 121 bp, Artificial Sequence
  Description of Artificial Sequence: Synthetic probe
agtcgttgaaagaagggtatttactgtaactggtaatcgtcctgatgaagagactattgaygatttaatagagactgggagaagtgagcaaattttcaaagatgcggttcagcagcaaggg

SEQ ID NO: 5841 - DNA, 121 bp, Artificial Sequence
  Description of Artificial Sequence: Synthetic probe
gtgagcttgtcgaacccaccacccaaattactatccacagccagtgaatttgcattgctgstcgaggtagtgacaagagcaagttcccatcctgttggatcaaatcctgtatcttgcatta

SEQ ID NO: 5842 - DNA, 121 bp, Artificial Sequence
  Description of Artificial Sequence: Synthetic probe
gaacagagctacattccgactagcctatctagcagcttcggagctgatggtcatctctggrgtgtmatksscggsatcaaatatgcctaaccagtccgcgtcccagctactgacccgtgta

SEQ ID NO: 5843 - DNA, 121 bp, Artificial Sequence
  Description of Artificial Sequence: Synthetic probe
agatcggaaaatttaggagtcgaacaagcttgagaaagtagtactgatctgacacagtttrtatccgaaagcaattccgggacatccttttgatctaattaatggatggatatgaacatgg

SEQ ID NO: 5844 - DNA, 121 bp, Artificial Sequence
  Description of Artificial Sequence: Synthetic probe
tcatcgggatctagtcttggttccttaacggatagatttgctgaaatatcagaggtttgcrgacggaacaaagcggtgcaggaaatagttcaagctgctctgcagcctcatgacttagcct

SEQ ID NO: 5845 - DNA, 121 bp, Artificial Sequence
  Description of Artificial Sequence: Synthetic probe
aaaaaccacttcctgttccagactctgagcctaaaaaagaagaggggcggtcgccgccttygaaaaatgaaagaaagatatgctgtgactgatatgatgaagcttgcaaaccgaatgcagt

SEQ ID NO: 5846 - DNA, 121 bp, Artificial Sequence
  Description of Artificial Sequence: Synthetic probe
tagctcctacctatagctccatggatcaacggccccccaacagaggtattggatttctctyccaggattttcaaaaagctcgaggatgtttgacatttgctgccgatcgatgtccgtctca

SEQ ID NO: 5847 - DNA, 121 bp, Artificial Sequence
  Description of Artificial Sequence: Synthetic probe
ctactctctgggtcgagcataccagggccagctggaggggagcgaccctctctttgtgctkcctgagagcttcacttatgtcaggcagaatgaggtagtagagcactagagcagagagctt

SEQ ID NO: 5848 - DNA, 121 bp, Artificial Sequence
  Description of Artificial Sequence: Synthetic probe
agcaaaattcttgagaacaacttcattgttataatgttgtgtaagaagggatcaacaagtkccgcttcaagtacggctaaggattccacaaagcagccctcagtcgatcgggctatacctg

SEQ ID NO: 5849 - DNA, 121 bp, Artificial Sequence
  Description of Artificial Sequence: Synthetic probe
gacaaggtttcatcttcctgtatggcttggatttggtgcagcattcaaacatataatgcaraaggacattaggaacatccatactctgaaagaaatgtacaatgagtggccattctttagg

SEQ ID NO: 5850 - DNA, 121 bp, Artificial Sequence
  Description of Artificial Sequence: Synthetic probe
ggatgaagctaccagcgccctggatgccgaaagtgaataccttgtgcaggatgcaatggaytccttgatgaaagggaggacggttcttgtgatagctcaccggctctccactgtgaagact

SEQ ID NO: 5851 - DNA, 121 bp, Artificial Sequence
  Description of Artificial Sequence: Synthetic probe
caagggaaacaatggtaatgtcaattcattcaagatgaatgttggggtcaacaaatattcraacaacataaatgggaaagaggcaaatggaaaacacaatggtggtaacaacaacaatgga

SEQ ID NO: 5852 - DNA, 121 bp, Artificial Sequence
  Description of Artificial Sequence: Synthetic probe
cgagaaggctttgaaggaagattcagttttggtcgtcccatcaaagaggtcaactttggayaggtgcaagctcccggttgggatccgcctgtttgtatcagctggccacacggaatcagac

SEQ ID NO: 5853 - DNA, 121 bp, Artificial Sequence
  Description of Artificial Sequence: Synthetic probe
tctccccaaactgccatcagagcaaacaggttctgttgacatcgcagcgtccatatcttcygcagaacagctagaacttagcaagtcagcggcagaccccgttcggcagccgatccgtgct

SEQ ID NO: 5854 - DNA, 121 bp, Artificial Sequence
  Description of Artificial Sequence: Synthetic probe
acggtatattactccaagttaccactccaggactggagcaactcttcaacgcatatatccyggcacacctcatgaaaagggtactaacccctaaaaaaaaactgaaaaatgtactcaaaga

SEQ ID NO: 5855 - DNA, 121 bp, Artificial Sequence
  Description of Artificial Sequence: Synthetic probe
accaatatgcacagcctcttcaggtttcacgcccagcaactcacaggccttcaagaatatygttgggtttggcttttcagctgcaacctcagcagacacagcaactgcatcaaaccagtga

SEQ ID NO: 5856 - DNA, 121 bp, Artificial Sequence
  Description of Artificial Sequence: Synthetic probe
catgtcctcattacgatcaatctcctgcttaacggcatcacccttgggtttgtgactgatrgttctctcaataggttcaactaatgagtccaaaactgcaagaacagcagaagggcacttg

SEQ ID NO: 5857 - DNA, 121 bp, Artificial Sequence
  Description of Artificial Sequence: Synthetic probe
gaagcctgtttacttcagttggttctgggtgagacctactaatatggaccaccggtttctrcgctaagatgggagttgaagtgctaacggtactaatatgctaacccataactaacaaaag

SEQ ID NO: 5858 - DNA, 121 bp, Artificial Sequence
  Description of Artificial Sequence: Synthetic probe
ggtcctggtgctcgtccagagtcagtactagctagcgtgtcaagctgctggaagtagtacyagctcgctcgcgtgtaccacgtgagtttggctagccgcgccatcatggtcggtcgccttt

SEQ ID NO: 5859 - DNA, 121 bp, Artificial Sequence
  Description of Artificial Sequence: Synthetic probe
ccccgatgcccctcacaggttccccggcctgagcctgtcgacggtccatggtatcatggaygccgtgtaccagtaatcaagcaaagatggctaaaacctgggatgtctgcggcggtgtctc

SEQ ID NO: 5860 - DNA, 202 bp, Artificial Sequence
  Description of Artificial Sequence: Synthetic probe
tggggcttggacgtgaagctgtttcatttgccgtgttaaattatggagataatccgacaaaggtgaaggagtttgtgaagtcctacaacgctctccacgaratgggcttcaccaccagtaacgtccctgagttgctggcgatccacgacaatgacccccgacaaagttatccagcacttggtcagctcgccatagtccacca

SEQ ID NO: 5861 - DNA, 121 bp, Artificial Sequence
  Description of Artificial Sequence: Synthetic probe
ccggggtctgacttgagttcttggtcggactgaagaaaaccgcgattcacctgaagattcrtgtagtagttcttgtcaaaggtgtcaggtgtcgtcggatcgaggtcatttagtgacgatc

SEQ ID NO: 5862 - DNA, 202 bp, Artificial Sequence
  Description of Artificial Sequence: Synthetic probe
ctgagacaacaatggcttcactggccgatgttacattcattggagctcagtatgctagtaggacgggtatggaactggttgtctgtcagctcgacggctarcatcactcagaacagaaccaaatacgcgtctactatactcatatgtagcatcacttaatcctctacttgctaccccacktgatgcttgmgartggrratca

SEQ ID NO: 5863 - DNA, 121 bp, Artificial Sequence
  Description of Artificial Sequence: Synthetic probe
tgaggtccaggccgtgaagccaatgtgggcgatcatcaccgggaagcgcaagaagcggtcwggctgtggcactcgtgtcggcgccctccacgcatcctctgtttgtgtcgaggaagttggc

SEQ ID NO: 5864 - DNA, 121 bp, Artificial Sequence
  Description of Artificial Sequence: Synthetic probe
actcatctggccactgatggagagagctttaaaaccaagattccttaaagtgagagcaagwagtcttgttgactcacaggtcctcacaaagatcatgatcatgctccctggcaactcattc

SEQ ID NO: 5865 - DNA, 121 bp, Artificial Sequence
  Description of Artificial Sequence: Synthetic probe
atgaagaagaagaagaatgcgtgacagacagggaaggaaaactggatctgctgctggtgtygtgcagttcagttagtgcaggtccagctcttggtggggacgcagctgaggtagtggcacc

SEQ ID NO: 5866 - DNA, 121 bp, Artificial Sequence
  Description of Artificial Sequence: Synthetic probe
tccttcaccaaattatacaaaaataagcagaattgccttttaccaagaaagtgccatgtayaggtgcttaatgcttaattgacagtctagagggcctgcttggcaagcattagcgtacatt

SEQ ID NO: 5867 - DNA, 121 bp, Artificial Sequence
  Description of Artificial Sequence: Synthetic probe
ctgttagctccatcatcattattaattattagttcagacggttttgaacataaggctactrccagttgcctgcctgtatagaccggctttttttttcacattgtatagaaccgtccaaagt

SEQ ID NO: 5868 - DNA, 121 bp, Artificial Sequence
  Description of Artificial Sequence: Synthetic probe
cttgaatcttatggacggtcatgggcaaccagctcttctctacatcgttcctttcacgctyggcaccttcatatcacttggcaagaaacggggcgagctcagaaacctctggacaaaagga

SEQ ID NO: 5869 - DNA, 121 bp, Artificial Sequence
  Description of Artificial Sequence: Synthetic probe
ggaagacgatggccaccgcgtatgctcctcccatggcgagccagctgctgaagagcagcarcagcagcttggtgtgctccaagccgaggggcctgtccggtgcctcgctcaccacgaggcg

SEQ ID NO: 5870 - DNA, 121 bp, Artificial Sequence
  Description of Artificial Sequence: Synthetic probe
caaggtgaaacaatgtgttgatccaagattaaatggagagtaccctccaaaaggagttgcyaagcttgcggcagtggcagctctctgtgtgcaatacgaagctgagtttagacccagcatg

SEQ ID NO: 5871 - DNA, 113 bp, Artificial Sequence
  Description of Artificial Sequence: Synthetic probe
ttcccgggatcggaatggtgtcgtgaagcagttcaggaatcatactggagatraacttcatccacgcatttctgcacccagatcacctgaaccgcaaagaaggggaaaccctc

SEQ ID NO: 5872 - DNA, 121 bp, Artificial Sequence
  Description of Artificial Sequence: Synthetic probe
accaaacccatcgcccttgtgacggcccccaagtgatggcacgttctcacactgctccaaycccggcattcccattgcttcagggcaaggccgcgcctcggggaacctccagtacttctct

SEQ ID NO: 5873 - DNA, 121 bp, Artificial Sequence
  Description of Artificial Sequence: Synthetic probe
gaacatgttacccttgaccttcaagtacatgtcgtggtacatgtgcttgtcaatcttcttygcctcacggtacttgcgcagaaggcgccttaggacacgcatcctgcgcatccacagaatc

SEQ ID NO: 5874 - DNA, 121 bp, Artificial Sequence
  Description of Artificial Sequence: Synthetic probe
ttgaaggttttggaggctttgcagcagcttgtgtgacctgaacatcagcaacaaccagatsagtagtttcacatcacttgaacccctgacaaagatagtttctctgaaagcgctggacgtg

SEQ ID NO: 5875 - DNA, 202 bp, Artificial Sequence
  Description of Artificial Sequence: Synthetic probe
ctggatgagaatgtaccatctttaaagaagttccgaaagctagcagagttgcttgatatgtcattgaagtccattacagctgcttgggaaagtggagagcyagttaactgcggtttcacatcatctgaggtgcgaaatttcatcaaagcgatttttgcagattcacctcttcggaaggagtgcttgggatggatcgttatga

SEQ ID NO: 5876 - DNA, 121 bp, Artificial Sequence
  Description of Artificial Sequence: Synthetic probe
ccagtgaactcaggctgtttgttctgtcaaacttcggaattgaagagccacagagtgcctkgaggcgaaagatatgtaggttgttttctagtagtgtatagttgaactcttgaataaaaca

SEQ ID NO: 5877 - DNA, 121 bp, Artificial Sequence
  Description of Artificial Sequence: Synthetic probe
gggatccaagagcgcatgtgaggccaaaccgaacaggttcataatcagcttttaaaaatcrgccaagagaagcacgttcaacctcactggagagagagctgctatcagaattaggagaaca

SEQ ID NO: 5878 - DNA, 121 bp, Artificial Sequence
  Description of Artificial Sequence: Synthetic probe
gcaatttccaaaactgaagagtcgcctaaaatggagagagcaagattagatccattacagwgaaggagagggggagggaggctagagagtgagtcgtgcgtgaatccatgtagtctttgta

SEQ ID NO: 5879 - DNA, 121 bp, Artificial Sequence
  Description of Artificial Sequence: Synthetic probe
aagaatcatatctgtgaccatttcagcagtacctagtgacaaagcaagtccacttccttcrtgtcctgttgcaatcaaaacatttgacagatcyggaacaaagccaatractggcttccca

SEQ ID NO: 5880 - DNA, 121 bp, Artificial Sequence
  Description of Artificial Sequence: Synthetic probe
gaaggtcgcggacaagatctacggcgtgactcacaagaacagagtgagctacatcaacgtsgtgacaaaggagcaggccatggacttcatcgagcatgaccagacgcacaatgccagctga

SEQ ID NO: 5881 - DNA, 121 bp, Artificial Sequence
  Description of Artificial Sequence: Synthetic probe
catgccgctgtattcgccgacgagcttgccaagtatgcttaagctggatggttcttctcarccatggcctcatgtacatgtatatgctcatgcatgtaacrccctctcactgtactttttc

SEQ ID NO: 5882 - DNA, 121 bp, Artificial Sequence
  Description of Artificial Sequence: Synthetic probe
catattcttaatagaatttctatgcttagacaagagccttctacgacagcagacgagaccygtgaagtggcaacatggaggctggcagcaagggcatagcttcaccaacctaagcatatac

SEQ ID NO: 5883 - DNA, 121 bp, Artificial Sequence
  Description of Artificial Sequence: Synthetic probe
cccgcgcatcctgcactgatgataatgtattgtttgatttataattgacttgatgtgttgygtttggggtttccatggggtgagtgaggcgggatcgatccgtacgtgcgtgtgtgtgtgt

SEQ ID NO: 5884 - DNA, 121 bp, Artificial Sequence
  Description of Artificial Sequence: Synthetic probe
ctgcgaattaaaacaaacattagctatctccgtctgaggatacttattgaattagcggggytattggtgcagttcaacgactgcaagcataaggtcatggacaatttgaggtggatgctcc

SEQ ID NO: 5885 - DNA, 202 bp, Artificial Sequence
  Description of Artificial Sequence: Synthetic probe
gatggagagagacagtgctgaaaagaattgtttgcgccgtatatgtgacatatttgagaagagggaagaaagcagaaactctgtaacttcacaaccctcayagcctgcagttgatccagtgaggcaagagtttttggaaatgatggccaaggttgttgctgatggatgtggacctggtacccgtgagcatttctatgcttca

SEQ ID NO: 5886 - DNA, 121 bp, Artificial Sequence
  Description of Artificial Sequence: Synthetic probe
taaccagaaagagaatgcgacaatcagatgacaatatgcctacaatttccaaatcgcttarcagcaggtaaatatttcaagacaaaattaaagatatgccataccgaacttgtattaaagg

SEQ ID NO: 5887 - DNA, 121 bp, Artificial Sequence
  Description of Artificial Sequence: Synthetic probe
aatccatttgccattttgtcagcatcagctttggtctttggttcaattagcaaccttaatsacaggatcagggaattccatacgttcaagcactacaaggttatctgggtcacatagtgtt

SEQ ID NO: 5888 - DNA, 121 bp, Artificial Sequence
  Description of Artificial Sequence: Synthetic probe
caaacttcgaccagcctgtacgaagcattatactgcgtggcctgacgtgtaatgtcgtgcrccactccttgttctccagctgaagcgtgagagtatgatctctgcttggaagataagttga

SEQ ID NO: 5889 - DNA, 121 bp, Artificial Sequence
  Description of Artificial Sequence: Synthetic probe
aatcatacagaaaatcagcgcttctaggatgttggaggctgtctattttggctacccatcrtccgcggatgcgctggcaacatccggtgttgtccgcaaacctaacggatttacatgttca

SEQ ID NO: 5890 - DNA, 121 bp, Artificial Sequence
  Description of Artificial Sequence: Synthetic probe
gcaatatgttttccaagatgaccaagccctccgcagaagaaagcaaagcttgaactggagmggtactgaaggataggagtctctgcttgaggaaggacactgtgtctactcgttctgtggg

SEQ ID NO: 5891 - DNA, 121 bp, Artificial Sequence
  Description of Artificial Sequence: Synthetic probe
gcggacaggatggacttttgggcaaaaggctaccatcgagctcactcacaactggggcacmgaaactgatcctgaattcaaagggtaccataatgggaactcagacccccgtggcttcggc

SEQ ID NO: 5892 - DNA, 121 bp, Artificial Sequence
  Description of Artificial Sequence: Synthetic probe
ccgggatgtcaatcctagctttgttcctatgcttgagaaggcaggccttcagttcccgggwtgcgatgaaagcggaaataggatggagattgtagagcttcaagaccacccattttacata

SEQ ID NO: 5893 - DNA, 121 bp, Artificial Sequence
  Description of Artificial Sequence: Synthetic probe
tgctgggtgggaatggggaataggtgctgcacaaaagggtatcctcgcatttcagatgtcstgccctatatgctatgaggatcttgatccaacagactccagattccttccatgtccctgt

SEQ ID NO: 5894 - DNA, 202 bp, Artificial Sequence
  Description of Artificial Sequence: Synthetic probe
ctcaggttgatcttgcccatcttttagcgtcccgtgaccaagaacttcgagcactctctgctgagatgaatcaagtgcactctgagcttgaccttgctcgyggcctgattgatgaaaaggrctcrgagatccaccgcattcgtgtgagcaacaatcagwatggagtgctcgagcagcaaagcttgaacgggcactggaggca

SEQ ID NO: 5895 - DNA, 121 bp, Artificial Sequence
  Description of Artificial Sequence: Synthetic probe
atccctttggtctgttagttgtctgctgtttagatgatgattgggcaggtctggtaccgayctgtgtagcttgtggcttcagttgttgggtctcatagggtaggagaacgttgaaactctg

SEQ ID NO: 5896 - DNA, 121 bp, Artificial Sequence
  Description of Artificial Sequence: Synthetic probe
ggtgaccagcgaaatagggttggcgacagcgsmrggatcgctccttgaagaatgatgaggyaggaagctctggtcacaagtcggataaggatgactcccccagagggcctcctccgggtat

SEQ ID NO: 5897 - DNA, 121 bp, Artificial Sequence
  Description of Artificial Sequence: Synthetic probe
tagcattctcacataaggcagttccttgtgaacccaaatcccaagccggattacagcctcwagtggtaagcagagcttagcaggatcaatgaggacacagacattatacctcactcataat

SEQ ID NO: 5898 - DNA, 121 bp, Artificial Sequence
  Description of Artificial Sequence: Synthetic probe
acgacgatcttcaccgcaaactagaagagatgtttgacatccacggagagctctctgtcarcctcaagaaatggaagcttgtttacacagacgatgaagacgatatgatgctggttgggga

SEQ ID NO: 5899 - DNA, 121 bp, Artificial Sequence
  Description of Artificial Sequence: Synthetic probe
atactcaccctcctcatcggcggtcgcatcctggtactgctggtactctgagacaagatcrttcatgttgctctccgcctcggtgaactccatctcgtccatgccttcaccagtgtaccaa

SEQ ID NO: 5900 - DNA, 121 bp, Artificial Sequence
  Description of Artificial Sequence: Synthetic probe
ctcgatacgcgaccacgaatcagacccgaacctgaagaacattgagctcgaaggcaatttygaccagataaagcaggccagtgagatggtgcgcgaccttattgccagcatcagcgccaca

SEQ ID NO: 5901 - DNA, 121 bp, Artificial Sequence
  Description of Artificial Sequence: Synthetic probe
cgcaaaatagctgctgactggaagacgatctcccccaagctcaactctgaagccctcaaakcaactctcaagagcctaaaggctaagaatgaggtggctctggaagaggcagaagacgctg

SEQ ID NO: 5902 - DNA, 121 bp, Artificial Sequence
  Description of Artificial Sequence: Synthetic probe
tccatcttctgatcagcttagcatgaagcgtgtcgatccatcgcatctcgaggctcatgtyaaaaggaagatgtcgaaagaagaaagattagagttagtgaaagctggaagagaggataga

SEQ ID NO: 5903 - DNA, 121 bp, Artificial Sequence
  Description of Artificial Sequence: Synthetic probe
tttgcgctatgtggatccagacaaagcaaaggagtaccttttaagtattagaggacttggrctcaagagtgtagagtgtgtgcgtcttttgacactccatcatatggctttccctgtggat

SEQ ID NO: 5904 - DNA, 121 bp, Artificial Sequence
  Description of Artificial Sequence: Synthetic probe
cagcagggcatcaccttttatgggctttactgcatatccatttttagcacattcagatgcygtctcatccttgtgttgtgttamcttcccctctgcattgggaaagatggtttctccaccc

SEQ ID NO: 5905 - DNA, 121 bp, Artificial Sequence
  Description of Artificial Sequence: Synthetic probe
actaattttctctaccgcttgaggtaactggagtagccagctgtcatggagtatgatgagsagaggggggtcaatcttcatcgcattggtcatcctctcttcctggcttgtctcccctgaa

SEQ ID NO: 5906 - DNA, 121 bp, Artificial Sequence
  Description of Artificial Sequence: Synthetic probe
tgacgttttcccctctttgaataacagtgggaaacttgataccttattgtcgcagggaaargagtatgtcttcgttgcaaactcagacaacttgggtgctatagttgacatcaagatattg

SEQ ID NO: 5907 - DNA, 121 bp, Artificial Sequence
  Description of Artificial Sequence: Synthetic probe
gatccgtgtgaaagaaaatgaacttcggttagctatgctacaggaggaggctaaacaactygaggccgagaaccagagcatgagagtggagtcgcctcgccgcttgacgcgtcaaggggct

SEQ ID NO: 5908 - DNA, 121 bp, Artificial Sequence
  Description of Artificial Sequence: Synthetic probe
aagtggcctaacgctgacagcaagacaccaaggaccagtcacacgacctaatttttagttycccaggtatgatccacgcactcgatttgcagatactgcagacctgctgagtttttgcgtg

SEQ ID NO: 5909 - DNA, 121 bp, Artificial Sequence
  Description of Artificial Sequence: Synthetic probe
caccgagcacgtaaacgggacggcgtcggcagaagttaccagcaaagtggcaatgtccccrgtgacaacgaaaccgcaacagaagaagaacaagcctctgctgaagaagtttggcagcttg

SEQ ID NO: 5910 - DNA, 111 bp, Artificial Sequence
  Description of Artificial Sequence: Synthetic probe
acatggctcccatcctagttatcgcgacaaatcgaggcatcacaaccataygtgggaccaactaccgatcgccacatggtataccatccgatttcctcgaccgcctcttga

SEQ ID NO: 5911 - DNA, 121 bp, Artificial Sequence
  Description of Artificial Sequence: Synthetic probe
ttcgaacctaccaggagatgtgccacgggttgatggccagctcgcagttgcaagagcattyggagatcggagcttgaaaaagcacctcagctctgakccacatgtagctgaagaagttatc

SEQ ID NO: 5912 - DNA, 121 bp, Artificial Sequence
  Description of Artificial Sequence: Synthetic probe
gccttcgcccccagcaaagaatggagtactttacactggaggagaggatcgtggtattackgcttgggatctgtccagcggcaaggtttcatcgcgcattgagggcgctcattcaactcgt

SEQ ID NO: 5913 - DNA, 121 bp, Artificial Sequence
  Description of Artificial Sequence: Synthetic probe
aattataggactggttcgtggtttttcaggaagcatcgtggctgcccttgtggtatgagcrccaaatttgtcacctgttttcttgtgctatgtaaggctgttttgttgcttgagactttgt

SEQ ID NO: 5914 - DNA, 121 bp, Artificial Sequence
  Description of Artificial Sequence: Synthetic probe
tgaccttcaagaaaaggttttgttggccatcaggagtttactgaaccttcccacgaccgaygctagagacttggagccgtgcgacctcgacggcgtgctgtacagactgggggtgcagctg

SEQ ID NO: 5915 - DNA, 121 bp, Artificial Sequence
  Description of Artificial Sequence: Synthetic probe
ctcgccgcagagcgtggaggagatcatgaagatcgtgcaggaggcgcagaccgtgcccaarcccgacaagcccgtgtccgggtacggctggggcaccggcgacggtgaggcctccgacgac

SEQ ID NO: 5916 - DNA, 121 bp, Artificial Sequence
  Description of Artificial Sequence: Synthetic probe
acttaaatgtcaagattctgtggatgaggagaccttaccattatcacttcccaaggctgamaaccactacctaatggaagagcttcctcttagatacaaagacttgaatatttcctgatga

SEQ ID NO: 5917 - DNA, 202 bp, Artificial Sequence
  Description of Artificial Sequence: Synthetic probe
gtgctcattgacggatgttgctccatttggattatagttctgtgaatgaattggtttaggacagtaagaggttgcagatgagcaagcgagcaaaatgatgrtcagttctgtaggttgagttgtctcgctcaatcccatttctagatgtaatttggatgtagtgttttcagttactcgctgttgaactagtgttttctactta

SEQ ID NO: 5918 - DNA, 121 bp, Artificial Sequence
  Description of Artificial Sequence: Synthetic probe
gaactgccctgatgaaaaacaaccttccgcaagaaaatttattgaaaaagtacaaaccacwtggaaaccggagaacataccatccaagtactcttcgttagattcagagggcctcgcggaa

SEQ ID NO: 5919 - DNA, 202 bp, Artificial Sequence
  Description of Artificial Sequence: Synthetic probe
gacataaccatgtcattgcccagctttgttctctactctgaaactggcgacgaggagttgtagcagcaattctctattgtatcgcttatgttgcttccttmatatcagaacacaggcatctgaacctacttaaagctttctctcatgtctttcgccttcactgtacaactttgtagattatgcgaacactgttttgtagcgg

SEQ ID NO: 5920 - DNA, 121 bp, Artificial Sequence
  Description of Artificial Sequence: Synthetic probe
tgggaagctggggagtgctgggggatctccacagtgccgtctggctgaaggcctgtttgcrgaagaactgttaggccaagtgcctgggttagatgctgacgatccatgggcggtgcctgag

SEQ ID NO: 5921 - DNA, 121 bp, Artificial Sequence
  Description of Artificial Sequence: Synthetic probe
atcagtttggataggacgaaggacatgtccagcttcattcttgggctctttgaaaagtacrtggaggaaacgtccaagttgcagaatcactcgaatcacactcatgaagtgcaggtcaaaa

SEQ ID NO: 5922 - DNA, 121 bp, Artificial Sequence
  Description of Artificial Sequence: Synthetic probe
cttcaacaggaaagggtaggaagtgatctcgtacaaatcacagcaactattcccgtcgctyggtcagtataacagcttgaaagaattcctcacggcacggctatgaaactgagggaaagaa

SEQ ID NO: 5923 - DNA, 121 bp, Artificial Sequence
  Description of Artificial Sequence: Synthetic probe
ataatactcggaatttttgcttttgatcacagcctctaaatgctctgacagaagcttagcragatactcagcacccattttatgtgccaaatgaccataatcaggactgctttggaagtac

SEQ ID NO: 5924 - DNA, 121 bp, Artificial Sequence
  Description of Artificial Sequence: Synthetic probe
actagctgattttccgtaggcttatgttgtaataccgtagcctttggtatcattaagatgygatgttatcttgttcacgatgttggcttaataggaggatatcttggtttctgtgatgcgg

SEQ ID NO: 5925 - DNA, 121 bp, Artificial Sequence
  Description of Artificial Sequence: Synthetic probe
aatcccaacaaaccaacaaaacaacaacatgatgattaactagtactccatctccttccgsaattgaggagaagaggaagccgctgccgaccaatccggtgattggcctatcagtagtatg

SEQ ID NO: 5926 - DNA, 202 bp, Artificial Sequence
  Description of Artificial Sequence: Synthetic probe
atataattaattgatgccagaaagaaaatacaagagggtcacatcacgtcgccctataggcggaatgtgacgcgaccaaatttcgtctcttgggggcctarttacaaacaaagacctgttagcttcatcagagttcttcagagcggctatagagcttcactggccactcacaacaccataatgtactgctagctgtggtacg

SEQ ID NO: 5927 - DNA, 121 bp, Artificial Sequence
  Description of Artificial Sequence: Synthetic probe
ggagtgcacggaggtggtctccatggaggaattcgcggtcattctcggaaggcatttcacytccctgtacccgcaggtctcggaggcgacagtgacgatcacggagcgcccatgggagcgc

SEQ ID NO: 5928 - DNA, 121 bp, Artificial Sequence
  Description of Artificial Sequence: Synthetic probe
catcaaagccattttgcttcacgcaaagataccaggatctaaagaaagttctggcagacayattctttggtcctcctgatgttggtgtatatagtccgtcggtgcagaatacattgtacct

SEQ ID NO: 5929 - DNA, 121 bp, Artificial Sequence
  Description of Artificial Sequence: Synthetic probe
gcacatgcgtgtcaagtacggaaatcctcctgtcatcatccatgaaaacggatgggctgamtttgtccaacaccccagcgagatcaaaaccgacgactaccctagatcagaagtcctgcca

SEQ ID NO: 5930 - DNA, 121 bp, Artificial Sequence
  Description of Artificial Sequence: Synthetic probe
ttctcccttgcccatatgcgcgcgcacacggtgaatccatcatacagtagcagcaaatttrttcccgcccaattctttccttcatcatgtaataagcgtacgtatactgccatccgtagag

SEQ ID NO: 5931 - DNA, 121 bp, Artificial Sequence
  Description of Artificial Sequence: Synthetic probe
tccaatgaaactatgcaaagaaatggtggaggccatgggtggcacagaaagccaatactayacgagattcaagtcctactgctgcgaagcatacaacatcttgaggaacaacagcagcctt

SEQ ID NO: 5932 - DNA, 121 bp, Artificial Sequence
  Description of Artificial Sequence: Synthetic probe
ggtcttattattgacattgtacaagatataaggttgataaaatggtgaagccattcatgcracccccaagaaagacaggggtcataattcttggtggaggccttccaaagcatcatatatg

SEQ ID NO: 5933 - DNA, 121 bp, Artificial Sequence
  Description of Artificial Sequence: Synthetic probe
ccttgggttgctggggctgacgggccagtccctgaattcatctgtaggtgtggttttggtygcaggaagagaaatgtttcacaggaagccgtacaataacaaagagaccagtccttcggaa

SEQ ID NO: 5934 - DNA, 202 bp, Artificial Sequence
  Description of Artificial Sequence: Synthetic probe
agtatggtgccaccgtgaattctacggatgctagaggtcggacaccgcttcatcacagcattttgaaagggagacgcgtgtttgccaagctgctcctttcmaggggtgctgattcgcaagccacagaccgagagggtagaacagcactacagtatgcaatcgacagcggaactatcgacgatgaagagattcttgttttgtt

SEQ ID NO: 5935 - DNA, 175 bp, Artificial Sequence
  Description of Artificial Sequence: Synthetic probe
gccactgcgtcagcgcctgcggcagcatgtgtgtgtctctgctcgaagccttgttacgaggcggagtgtgttggaaagaagattccttcgatataggtgaytgtagacgaggtgagcgctccacgacgaattcgtgttcatcctcgctatagatccagatcatcccgggaattcc

SEQ ID NO: 5936 - DNA, 121 bp, Artificial Sequence
  Description of Artificial Sequence: Synthetic probe
gataaagccgcttcctttagctactttgtcatgtacaactcggtaatggttggttcagctrggaagggtgggagagcttgtggcgtgtgcctaacggcgcagggggaacctgtgatttgct

SEQ ID NO: 5937 - DNA, 121 bp, Artificial Sequence
  Description of Artificial Sequence: Synthetic probe
gttcagcaacactcttcctgttaaggttttcaaggagcatgaaaccgaggatcttttggakgtgctggatgcttgttaacagtaggtcagggtactctactagctttaacaaactcagctg

SEQ ID NO: 5938 - DNA, 121 bp, Artificial Sequence
  Description of Artificial Sequence: Synthetic probe
cccaaccctctctagctcagcagtcaaatggtctagtgataaacaacaaggtgcctaggcyaccaatgctcctgtggaatttccatatgtaaatatatgttccattctattattccatttg

SEQ ID NO: 5939 - DNA, 121 bp, Artificial Sequence
  Description of Artificial Sequence: Synthetic probe
ctgtgttggtactctgcttttgcttccgtcagttaaaagaaccattagattcaattccttktctgcgtcctgcatcttgctagctcgccagatggatccaatgaagcttcagtctagagct

SEQ ID NO: 5940 - DNA, 114 bp, Artificial Sequence
  Description of Artificial Sequence: Synthetic probe
atagaacccgtcctcggcaaccaacttgaaccagacctgcggcatgcccgtcartgcagccacgatggtgccgcaggacttcaagtcacccgacgcgttggacgtccaatacta

SEQ ID NO: 5941 - DNA, 121 bp, Artificial Sequence
  Description of Artificial Sequence: Synthetic probe
aatttgggaggaaaaatagggtacccacgcttgtactattcccagctgcaaactgaaattrgcagggaccatgtgtcaaccggtcatgcttgttcacgggctcaagcagtgcttccctggg

SEQ ID NO: 5942 - DNA, 202 bp, Artificial Sequence
  Description of Artificial Sequence: Synthetic probe
gtcaactcattgtagaccaaccaaacataccaaaagatgaagtgcaatctattttcgacattatatttgcagatgaaatttgttaagtgcagtcatgttgragccactggggcttgatctacctgcctatccagacaaagcatgaaggctgccacacttttcaggtttaatgagcaccatgaggatgctggaattcattgac

SEQ ID NO: 5943 - DNA, 121 bp, Artificial Sequence
  Description of Artificial Sequence: Synthetic probe
ttcgaactcgtcggcggagctcggggacatcacggggttctacatgatcgacgaggagggyaccctgcagacggtggacgtgagcgccaagttcgtcaacgggaagcccgccagggtggag

SEQ ID NO: 5944 - DNA, 121 bp, Artificial Sequence
  Description of Artificial Sequence: Synthetic probe
ggttgtgtgcatgtctgcgatgatgcctgccgagaatttgtcttggaccaatctagtgggytacttgtctgtacgatatctggccactgctttgagagatttttatgtcctgatgatgaat

SEQ ID NO: 5945 - DNA, 121 bp, Artificial Sequence
  Description of Artificial Sequence: Synthetic probe
tgaagccaccatctcttttaaccacaatcaaagggattttgtgaccttcaatgaaaattayccgagcaccctcactttccttaatgaaaccttggttactcaatccctccaaaacttgtgg

SEQ ID NO: 5946 - DNA, 202 bp, Artificial Sequence
  Description of Artificial Sequence: Synthetic probe
ctaacccacaactcacaccttgatggtttatgcttgctccagcataagaacgtgtagattaccatgcatgcatagacttctaaaatagcagaaggatgagyatataatagacgttgaacaagtgtcgttgggaacacacccaacacaaagtaggtcatccgatcatcatatcaagaccaacagaggaggccatgatccaaag

SEQ ID NO: 5947 - DNA, 121 bp, Artificial Sequence
  Description of Artificial Sequence: Synthetic probe
ctgtgtagttgatttagcaactgtagagtattattatcgatcatggtccgtcctatgtaakatatatgtgtcctgtgttaatttgtgtctgtatcagtcagttcgttatcagagtggtgaa

SEQ ID NO: 5948 - DNA, 121 bp, Artificial Sequence
  Description of Artificial Sequence: Synthetic probe
ggttactaggcgcagctgcgtgctgctaagcccttccaggtacggaacaaatgctttcccragaatgatgtagatatccaccaagcagaatacaacagtctttcgaacatctggactttgg

SEQ ID NO: 5949 - DNA, 121 bp, Artificial Sequence
  Description of Artificial Sequence: Synthetic probe
cccccaaccccaaccccaagacgtttggagcagcgaatcccaagacgccaatgaccgtcgsggctccgatgcagttggcgatgacgcccgctgtggctaacaacaacaaggttacatctgc

SEQ ID NO: 5950 - DNA, 121 bp, Artificial Sequence
  Description of Artificial Sequence: Synthetic probe
cgatcttgtgcttcagattcatcttccctcgggcgaaagtgctatttgatgataactagcycttgggtcattgtgcagaatgcaaccaccataccaggcagcacataattttcatgttgcc

SEQ ID NO: 5951 - DNA, 202 bp, Artificial Sequence
  Description of Artificial Sequence: Synthetic probe
tccgcgacggcacggcttttcgtctccccgtgtcctcttctgttggtatatgtaatctagtagaccgaaacatgttcaacaacttccttgagtagttctartaccatgtcgtcttgcatgcttaaagttctcgctcttctgctttaggggttataatatgtgatgtttgaaataaaaaaaagttaattaatcgcgatctaga

SEQ ID NO: 5952 - DNA, 121 bp, Artificial Sequence
  Description of Artificial Sequence: Synthetic probe
gtgtcggtggttgaagagctcctggtaattagcataaccagtatgagaaccccgacgcctyctaaattccccgagactggtaccgaactcctgggtatggagcaagaaaagagggcatgtt

SEQ ID NO: 5953 - DNA, 121 bp, Artificial Sequence
  Description of Artificial Sequence: Synthetic probe
ctgctcgaggaggagacggcttcgctggtggaactcggggataggcgcaggagcaaccatyatcgtcgatgaagagaactagtcctctgccaggaccagaagaaagaatatatatatgtat

SEQ ID NO: 5954 - DNA, 121 bp, Artificial Sequence
  Description of Artificial Sequence: Synthetic probe
taccgggctgagacccgcaactgagccgtacgtcggcgacatgcatgcagcgctacgaacmcacacgcgtagagctctctacgtgctgtggctctgcgctgcgcacgtagtaaattactgg

SEQ ID NO: 5955 - DNA, 121 bp, Artificial Sequence
  Description of Artificial Sequence: Synthetic probe
ggagtgggttgatttgacagtgaagcaaggcagttcaccgcacgaatcttggggagaatgycgaaattgccgaatccacctctccaccctctgatgcaccgaagcctgatgataaagactc

SEQ ID NO: 5956 - DNA, 121 bp, Artificial Sequence
  Description of Artificial Sequence: Synthetic probe
actgtgagtttctctgtcggcgctttttcgactggatattgcacttttcagatagtatgcytggaagtggaggtggttgattgttgcaaaggcacccagactgttatacccaactctgaag

SEQ ID NO: 5957 - DNA, 121 bp, Artificial Sequence
  Description of Artificial Sequence: Synthetic probe
gcgtgtatgcctggctcatgagtcatgacagtgtaggcgtgtgagtgtgacccagacaccyaggctcagcaggagggtggtgacccagccaagcgtgaagcaagggtccgcaagcccagcc

SEQ ID NO: 5958 - DNA, 121 bp, Artificial Sequence
  Description of Artificial Sequence: Synthetic probe
ctcttcaatccttctggtattgtagtatattggcacttccaccttgaaatccttcctcaayatggtccgcactctcattgcatcatcatcactctcaatgccaagacagttaggcatccct

SEQ ID NO: 5959 - DNA, 121 bp, Artificial Sequence
  Description of Artificial Sequence: Synthetic probe
agcttggccaaaaccaacaatagcttctagaatgataccactatcaacgacatgcttcacyagctgatccagctcttcatttggcctcgtatcactcgaaaagaaatacaagccgatacta

SEQ ID NO: 5960 - DNA, 121 bp, Artificial Sequence
  Description of Artificial Sequence: Synthetic probe
tggaaaagaagtattgtcgcgaatctgctcgaaaattgaaaaacacaaaaaattagaactsttgaaccgcttttgctgtacgcacgtagtgttgcttcatgggtcaccagtgattcggagg

SEQ ID NO: 5961 - DNA, 121 bp, Artificial Sequence
  Description of Artificial Sequence: Synthetic probe
ggttgccacactctttcctccatcttcctctaagttagcaaattgcctccggaaattgtcracagcactaggatatagaaagctcgtttttttcggagccactgacataactctttagaag

SEQ ID NO: 5962 - DNA, 121 bp, Artificial Sequence
  Description of Artificial Sequence: Synthetic probe
cagcggcaacagctactttggtgggttctttctcttcaccatcgtgctgctcctggattayctgaaggagtttgagaagtacctgcttgctcgaaggcatcgtgccggatacgatgaaaac

SEQ ID NO: 5963 - DNA, 202 bp, Artificial Sequence
  Description of Artificial Sequence: Synthetic probe
tgcctctggaggaggtctacatcgacgtcaaggactccgccgatggatggaatgcgatcagagacatggttgtccgtggtgctcccgcaatagccatagcrgcagcattgtcattagctgtcgaagtttttgatcaggatttcactggtacacctgcagaagctgcctcgttcatttctaaaaagttggaataccttgtatc

SEQ ID NO: 5964 - DNA, 121 bp, Artificial Sequence
  Description of Artificial Sequence: Synthetic probe
atcatatgtagtctccacagggtcacatagggatcctctcttcaggagctaggttgatatrtagtctccacacggtcacatacctgtgggccaactagaaagctgggtcgtgaaaaagtgt

SEQ ID NO: 5965 - DNA, 202 bp, Artificial Sequence
  Description of Artificial Sequence: Synthetic probe
acaccaacaacgagactactatagtgcactcatgttcggcgagcaggtgttcatggagaagttcatatgccctcacaaggaagctgcaccacacctggctsaagactatgcagcagcctgcagaggggaagtgccgactagattcagatttacatgaaccaagaacgggtatgacaattggtaactgcctatggcacaaaat

SEQ ID NO: 5966 - DNA, 121 bp, Artificial Sequence
  Description of Artificial Sequence: Synthetic probe
acaagtaactttgtgcagcaaacttgaaagtataatctggagaccaatagaggtttctgcmaaatctgcattgctgaggacaaccacttgctagcctcggcctcgtggctgcccgctgcta

SEQ ID NO: 5967 - DNA, 121 bp, Artificial Sequence
  Description of Artificial Sequence: Synthetic probe
  modified_base (29)..(29): a, c, t, g, unknown or other
ctgcgcttagtatttccgggaggttttancctttcaaatattacatttcaccatccgtacrcatggacaaagttccatgggaaggaaactggaaaagttaaaagctatctggttccatacc

SEQ ID NO: 5968 - DNA, 121 bp, Artificial Sequence
  Description of Artificial Sequence: Synthetic probe
agaagagaaaggagaagaatgagaagaagggtgacgggaaaggtccagatcctaatgatcyggagattatagcgatgaacaagttgcgagcgtcgatggggatggggaccactgaagtagt

SEQ ID NO: 5969 - DNA, 121 bp, Artificial Sequence
  Description of Artificial Sequence: Synthetic probe
tcgcattgtgcaacacactatggagattattcatctcttgactgatgctaaccctatccarattatcattgatgccatcataaacagtggaccaagggaagatgcaactcgtattggatct

SEQ ID NO: 5970 - DNA, 121 bp, Artificial Sequence
  Description of Artificial Sequence: Synthetic probe
aagtgtgagtcaagaccatatggttggttactgaacctggaggaccatggaatgtgaatcytcattaagtagcaaactcaccattgaagggaacaatggttgatagtagcaggatgaacta

SEQ ID NO: 5971 - DNA, 90 bp, Artificial Sequence
  Description of Artificial Sequence: Synthetic probe
atgattagaggcatgggggcgcaacgccttccacctattctcaaactttaataggtaggayggtgcggctgctccggtgagccgcaccac

SEQ ID NO: 5972 - DNA, 121 bp, Artificial Sequence
  Description of Artificial Sequence: Synthetic probe
tcaggaagctgtcaagcttagtgagtcagagctgcatggtcggcaaatcaaggtcgctcckaagcggactaatgtccctggattgaagcagcctcgagggggtcgaggatacaacccttat

SEQ ID NO: 5973 - DNA, 121 bp, Artificial Sequence
  Description of Artificial Sequence: Synthetic probe
gcccggaacgttgcagggctcatgggcagatgttcatgagagagggccggtcagagaattrtttcattcttccagtgcagcatgtggataggaaactaggcgaggaggaccgttgtatgta

SEQ ID NO: 5974 - DNA, 202 bp, Artificial Sequence
  Description of Artificial Sequence: Synthetic probe
tcaaccgtttaaaaaaaaaacataacttacagcagagtagcatccgatgttttacacctcatgtttctctccagcaccgcactgaacaataaagttactcyaataaaattaggttacaaatgacagggtgctcgctggcaccggggcgtgcaaggggcctacaatgctaccgtaaggtgcctcatctgaaaattgcctgtcc

SEQ ID NO: 5975 - DNA, 121 bp, Artificial Sequence
  Description of Artificial Sequence: Synthetic probe
tggtggtgttctcagtggaaagtatcttaatgctaactctggcgatgcaaagagaagcagrctgaatctcttccctggctacatggagcgctacaacgcatcgttggctaaagaagcaacg

SEQ ID NO: 5976 - DNA, 121 bp, Artificial Sequence
  Description of Artificial Sequence: Synthetic probe
gaagctggactaccagaagatcttcgacaacatgcagaagcccgcctttgtctttgatggrcgcaacgttgttgatgctgagaagctcagggagattggcttcatcgtctactccatcggc

SEQ ID NO: 5977 - DNA, 121 bp, Artificial Sequence
  Description of Artificial Sequence: Synthetic probe
gctacaagaagatcaggaaggtcctttgcaagatccaagacaagatgaacatcaagacgayctccttcgacgagaagagcaaatgccgtgacggtgtccggaccgttcgacgccgacaaac

SEQ ID NO: 5978 - DNA, 121 bp, Artificial Sequence
  Description of Artificial Sequence: Synthetic probe
agctcctccagaaacgagggacccacgggacattgatcacatgtccatgctgacgaaaccsccacgcaggaagaggcaccaccataggaggacctgattagcgcagaaggtttttgtcgca

SEQ ID NO: 5979 - DNA, 121 bp, Artificial Sequence
  Description of Artificial Sequence: Synthetic probe
gaactactaagtttatttggaatacttggggttactgatacctgtctggaggctttgtcaraatcttgctcaaagagtctcacaactctagatgtaaatggctgtactggtattaagagga

SEQ ID NO: 5980 - DNA, 121 bp, Artificial Sequence
  Description of Artificial Sequence: Synthetic probe
actcgagggggtgaagaaacacgaggattacctcaagaggcgtcttcttttcctcgagacrggaaggaaattcctcaagttgtctttcatgttactcatgcctattcccgcgatcggtgcg

SEQ ID NO: 5981 - DNA, 121 bp, Artificial Sequence
  Description of Artificial Sequence: Synthetic probe
agtttcagggatcaaattcactgaaagattgcgcataggcaaccttattttactggactaygcagagctagttcttgttctactgtcctgttcgcatctaccaagacgccttcttaacacc

SEQ ID NO: 5982 - DNA, 121 bp, Artificial Sequence
  Description of Artificial Sequence: Synthetic probe
tcacttcacccttattgccaaggtgcggaacacgatacgagacatgcggaacttcttgtaracaccacgagagcggcccgtgaaaatacagcggttcctaagacgcgtcatgttactattt

SEQ ID NO: 5983 - DNA, 121 bp, Artificial Sequence
  Description of Artificial Sequence: Synthetic probe
tgaccagctgactgaacaagaagtgggtgagatatcttctgttgacgacatgcatgagttrgagaagaagctgtgcatcactggattatggtgcatccagatgaagtcccatgatcggcca

SEQ ID NO: 5984 - DNA, 121 bp, Artificial Sequence
  Description of Artificial Sequence: Synthetic probe
cctccgtcgaggagcacgcccagaagccctgaacagctctgcccgcccggcggtagatctkctagtgtttggcacggtgcatggcggtaatgctagcgatacgtagtgtgcaccgtgcatg

SEQ ID NO: 5985 - DNA, 121 bp, Artificial Sequence
  Description of Artificial Sequence: Synthetic probe
acagatgtcttgaccaaaactaatggtcctgagagtgcaaataaagaaggaaacaagaccrtggcatctaagatgcccaaattcatagtaaaaccaaaggtcaccgctgtaaaatcctgag

SEQ ID NO: 5986 - DNA, 121 bp, Artificial Sequence
  Description of Artificial Sequence: Synthetic probe
tcgaagctacagttgttgtggagatggtccatccccgtgatgacatcctatcagttacggwgatcccggaagatacggattaaatgcgcgcatatggctcttgtacgctcatcccccttgc

SEQ ID NO: 5987 - DNA, 121 bp, Artificial Sequence
  Description of Artificial Sequence: Synthetic probe
agcgcgtcatccctaatagaatcatggagtttcaccaggacccctgcagaacgccttggcraggtagcagagcacacacatggcaaggctgcccaaccatgcaaaatggtacaccgctgag

SEQ ID NO: 5988 - DNA, 121 bp, Artificial Sequence
  Description of Artificial Sequence: Synthetic probe
aggggaagagttggagaaaagaattaaagaatctgcacacacgattcactctccggccaakgaagtgtcatcaagcacaggaacaactgccgccgagagttcgatgtgcgagaaccgtgca

SEQ ID NO: 5989 - DNA, 121 bp, Artificial Sequence
  Description of Artificial Sequence: Synthetic probe
ccctggttttctcttggtcactgctttcttcctcgctcaattggttgctactctcattgcwgtgtacgccaactgggaattcgccaggatcaagggtatcggctgggggtgggctggtgtt

SEQ ID NO: 5990 - DNA, 121 bp, Artificial Sequence
  Description of Artificial Sequence: Synthetic probe
taattggctcatttcttactcgaaatatgccacggctttggaaggcttctatgataagttygattctagctttattgatatgagaacaaaaagcacgtgaagtgttgcagagagaggatga

SEQ ID NO: 5991 - DNA, 121 bp, Artificial Sequence
  Description of Artificial Sequence: Synthetic probe
ctttggcgaagtcaatattgtccacaaacaccgatttccacccatcagggtccaggatggmtgtgatcttggtgttagatcccctggcaagggacctgcctcctgcaccaccttccctcca

SEQ ID NO: 5992 - DNA, 121 bp, Artificial Sequence
  Description of Artificial Sequence: Synthetic probe
atcccgtattattgtgtgcatgcctctgatctgataagtagtctgaatgacatataaattkgggtgtattttacagagatcattttgaccaagtttagtgcgaatatgctgaacgattagg

SEQ ID NO: 5993 - DNA, 121 bp, Artificial Sequence
  Description of Artificial Sequence: Synthetic probe
agatcgtaccaaagatgcccagttcattattatcagtctcaggaacaacatgtttgaactygccgataggctggttggcatctacaagacagataattgcaccaagagtataaccataaaa

SEQ ID NO: 5994 - DNA, 121 bp, Artificial Sequence
  Description of Artificial Sequence: Synthetic probe
actgaatgctggtaaaaacaaactgacaagaattgacgaggtcaaatccttgacgaacctrggggcgttgattctgaacgataacaacatttcttccatctgcaagctcgatccccatcac

SEQ ID NO: 5995 - DNA, 202 bp, Artificial Sequence
  Description of Artificial Sequence: Synthetic probe
accagtgaaaggtttgatcatcgggaagagaacagaaaggattgcttgaggacactttatggctcgtggtggaagatgccatgaaagccgacgtgttggcygatgatgctagaaatgcttatgttaaagcgaggcttaaggctaattctcagttcatggaccggctgaagacgaagacacagaaattaaggctagctgcata

SEQ ID NO: 5996 - DNA, 178 bp, Artificial Sequence
  Description of Artificial Sequence: Synthetic probe
ttatgctgtttttagctactccctccgtcccaaaataagtgacttgagtttatctagattcgacatgtatctatatactaaaaacgtgtctagatacatcygaatctagacaaacccacgtcacttattttgggacggagggagtatttattatgaattaataaacaataccattgga

SEQ ID NO: 5997 - DNA, 202 bp, Artificial Sequence
  Description of Artificial Sequence: Synthetic probe
acacggcggcgcagagctacaacgccaagctccagcggatgctcgccgagttccggtccgcttcgcccgggtccaggcccgtctacgccgacatctacacmcctctcctcgacatggtcgaccaccccgacaagtacgggttacgtggaggccagcaggggctgctgcgggactggcctgctggagatgggggcccctgtgc

SEQ ID NO: 5998 - DNA, 121 bp, Artificial Sequence
  Description of Artificial Sequence: Synthetic probe
cagcagcttactagcctcatgcggttgttgttgaagagtttgattgatcatactgatgccyggccatttaaagagccggtggattcacgtgatgttccagactattacgatattatcaaag

SEQ ID NO: 5999 - DNA, 121 bp, Artificial Sequence
  Description of Artificial Sequence: Synthetic probe
caatggtctacccttgggtgcagttgtaacaactcctgagattgcaagcgtgatgtctcaraagatccagtttaacacatttggtggcaaccctgtttgttcggctggtggactggctgtg

SEQ ID NO: 6000 - DNA, 121 bp, Artificial Sequence
  Description of Artificial Sequence: Synthetic probe
tgttacactattcatgtcaacatggaaagacggaggactgcagttgccatttttaaaggayggatatgaactcagaaaacaaattttgggacaactgctaacattcaaggataatgaaagt

SEQ ID NO: 6001 - DNA, 121 bp, Artificial Sequence
  Description of Artificial Sequence: Synthetic probe
catcttcagtggctacatcgtctacgacacggacaacatcatcaagcgcttcacgtacgaygagtatgtctgggctgctgtctcactctacctcgatgtcatcaacctgttcctggccctg

SEQ ID NO: 6002 - DNA, 202 bp, Artificial Sequence
  Description of Artificial Sequence: Synthetic probe
gaggtcgagcatgaaatggaggacagcatatcaccctccatggatgtcgacgtggaggacggagagattggctgctgtgggtagcacatctcttaagcatscatttattcttcctttgttcctcaggttcatagtcaacatgctccccagggttataagattgcgtgattctatcctgcaatgaggctgtgtcataagcgga

SEQ ID NO: 6003 - DNA, 121 bp, Artificial Sequence
  Description of Artificial Sequence: Synthetic probe
tgcacggtcttcctgagttctacaagaatcctcggccacacatatcattggtgtgggcatygggtgatgttagctccaaactgaagcaggccatcaaagaaattgaaaaaattcagaacag

SEQ ID NO: 6004 - DNA, 121 bp, Artificial Sequence
  Description of Artificial Sequence: Synthetic probe
gcggtggcatgctctctgctctcgccagctgagccctgtggcagcctatcaaatgacacarcgccttggtgtttttggtcctctcggcttgttcgccgctgattagcctatgctactagta

SEQ ID NO: 6005 - DNA, 121 bp, Artificial Sequence
  Description of Artificial Sequence: Synthetic probe
cgcggcggctcctcctcccagctagctagctcctcgaggtattctggtcaccaaaggatgkcgatgacggcctacacgaatcaagcccaggccatgatgagggactacctgctagctgatc

SEQ ID NO: 6006 - DNA, 121 bp, Artificial Sequence
  Description of Artificial Sequence: Synthetic probe
gaaaagttctccactgcaattttttttcttatacgagcagatccatccagatgatgcattyggggagcaaatgattagaaatcttgagagtagaggatgcccgctccttggtataaatgct

SEQ ID NO: 6007 - DNA, 121 bp, Artificial Sequence
  Description of Artificial Sequence: Synthetic probe
gaacatgctgtggagatgaagagcagccataatgttcatgaacgggcagccaagcaccaarctgtgaatggttttaattctgtgccaggatcagtcatgtttgcatctaccgcgcagctgg

SEQ ID NO: 6008 - DNA, 121 bp, Artificial Sequence
  Description of Artificial Sequence: Synthetic probe
taatccaagaagagggctccttttcaattcatgagatgcacgtgaatgaccttacaggtgrtccagaactggatgtgaccccaagccaattatgcaaacatgatgagagccgcctttgagc

SEQ ID NO: 6009 - DNA, 202 bp, Artificial Sequence
  Description of Artificial Sequence: Synthetic probe
tctgctgatcaagacctccaatcatatcatatgtagaatctgggaccttctcaactttcataagattgaccaayggrtcaactttgcttggcaggatcaartggagcatatagctatcattccgaagagcaactcttgttgaaggtgtgatttttgtaatatcgatgctcttatcaatatctacgacattatttgccttccg

SEQ ID NO: 6010 - DNA, 121 bp, Artificial Sequence
  Description of Artificial Sequence: Synthetic probe
ttctataacattctttatttacggcttctctgaagagtcagcatttatctgctagctctcyacaaggtcatttcagctcctacataaaatgaagtgacctcctcctctgcggtgctcggca

SEQ ID NO: 6011 - DNA, 178 bp, Artificial Sequence
  Description of Artificial Sequence: Synthetic probe
ttaaagctttatctgaggagcgaattgtctacattgcctgtggaggatcaacttctgctgctatatcagacaaaggsaacttgtacatgtggggaaatgcaagagattgccagttaggcgttcctgatctcccagaagtgcagccgamtkccsgtkrawgttaattttctcgccgacg

SEQ ID NO: 6012 - DNA, 121 bp, Artificial Sequence
  Description of Artificial Sequence: Synthetic probe
ttgatcatcaagcctcttccacgtcttgatagacttgactccttgccactcgccgctctcygtcttctcaagctgcacagacaccacccttgctctcctcgaccacccggcctccccgtat

SEQ ID NO: 6013 - DNA, 121 bp, Artificial Sequence
  Description of Artificial Sequence: Synthetic probe
tggaaactggaaagatacaccctgtacattacatgggaggcggtcatgttatacagtagamagacccaaacgaccgttcaggtttagccctgtgctcctgctgcttgtccggttcggagta

SEQ ID NO: 6014 - DNA, 121 bp, Artificial Sequence
  Description of Artificial Sequence: Synthetic probe
tggctagagtgtccatgtcatcctatgcagaactgcatacgttacttgttgtgatcacttmtgtccatccacggatgcaaccctcatgtactggttctcggtcattgcctcagaccgaaca

SEQ ID NO: 6015 - DNA, 121 bp, Artificial Sequence
  Description of Artificial Sequence: Synthetic probe
gatggccatgattcatagccatcaggtgatggtttcttcaagagtatgctgcatatggtcrtagaactggaggcttgccataggcaccttatggacgtacggatgaacttactttcttgct

SEQ ID NO: 6016 - DNA, 202 bp, Artificial Sequence
  Description of Artificial Sequence: Synthetic probe
ggttggatgagacataggctttgatggaagcctcgcccatagtgaagccagtatcgacagtcagatgaatagggctttgcacttctcttgaataaaattcrtggataagcgtactaccccctgaaacaccaaagccagtagagaaccatcccacaatcacttccttgggggttcaccttttggtgcgacacgtacatgttgt

SEQ ID NO: 6017 - DNA, 121 bp, Artificial Sequence
  Description of Artificial Sequence: Synthetic probe
gatgatgctcaaagcaagaactcccacaaaggtggttgaagaatgtagccaagaaagagcycactgcaatccggatcgatcggattcggtgcggacgactataagttagaagaagggatga

SEQ ID NO: 6018 - DNA, 121 bp, Artificial Sequence
  Description of Artificial Sequence: Synthetic probe
tttgttttttggtaatttgccacaccagaggtcgaattggatttttggccttcggtacaamagtgaagatatccctttgaacttcacaagacatgctgataattcaaacttgtaccatcca

SEQ ID NO: 6019 - DNA, 121 bp, Artificial Sequence
  Description of Artificial Sequence: Synthetic probe
taaacttggcgagaagattacgtgtggattgtacaagtgtggcatgtgttgtatgtgtaamcatggatgtaagagataaatttatctcttattttccagctgaataattggcatgtgtctc

SEQ ID NO: 6020 - DNA, 121 bp, Artificial Sequence
  Description of Artificial Sequence: Synthetic probe
tagagtgttctagtcatacaagtcaatatgaaatgtttgtacaggacgggggtctgcatgyaaagtatgtcgtttgttgtttcgggtacctgaacaacaaggtgcgggtttacacttcgct

SEQ ID NO: 6021 - DNA, 87 bp, Artificial Sequence
  Description of Artificial Sequence: Synthetic probe
atggaaccctaaatacaacctcctggyttatgcaggagatgacaagaataagtaccaggctgatgatggtgtttttccggatatttg

SEQ ID NO: 6022 - DNA, 121 bp, Artificial Sequence
  Description of Artificial Sequence: Synthetic probe
ctgttgacacaatgctctattggcatcgctggagctggcttggctgttcttctgtcagtcrtctgcaagattgctatcggtggaaggactccttttgccgctacccggctgctgaacacag

SEQ ID NO: 6023 - DNA, 202 bp, Artificial Sequence
  Description of Artificial Sequence: Synthetic probe
ggatgttgactctgggaatataagcaagcccgctacgattagcgacttcatggaccttaagatcaggagcatgaggagagaaaataacttggctttagctycaaccagtaagctgatgtccaccatcatagcacaggcttctcctttgttgtctcaagagacaacacgaggctccataacattcactgcaatagcggatcgc

SEQ ID NO: 6024 - DNA, 121 bp, Artificial Sequence
  Description of Artificial Sequence: Synthetic probe
cgaaacatcagcagcaattccttcgaagcctcggaaagtcatggctgctctgagaccacayttattcttttgttttttttaccgggacttatttcaggacattcaaatgtgcacaggatgt

SEQ ID NO: 6025 - DNA, 121 bp, Artificial Sequence
  Description of Artificial Sequence: Synthetic probe
atgttgcagtatatgatggatcatggactgaatggggtgctcaccctgataccccagttgmtactgctgtttagtcttgtgtgcagttgatggagggccatctatggtagttgcacttcac

SEQ ID NO: 6026 - DNA, 121 bp, Artificial Sequence
  Description of Artificial Sequence: Synthetic probe
ccattcttgtacaagcgcacagcaacagcacatcacatgtgaaaggaaatcgtcacagcaycctcccgcgatatttaacctttgacgaagctttctccttacacagcaagtgtaacagcaa

SEQ ID NO: 6027 - DNA, 121 bp, Artificial Sequence
  Description of Artificial Sequence: Synthetic probe
aagatcgtttacttgcaaagaccttggaatggtgaagatcaaatgctcaaaggatgatgcyagagtccatacgttggcacatatgttcatggcaaatggtgtaccattttgagaagattta

SEQ ID NO: 6028 - DNA, 121 bp, Artificial Sequence
  Description of Artificial Sequence: Synthetic probe
gggagctgtccaaggactccccattgatctcagaggtaaaagagcgtttattgctggagtygcagacgataatggttatggttgggcaatagccaaggctcttgctgcagctggtgctgaa

SEQ ID NO: 6029 - DNA, 121 bp, Artificial Sequence
  Description of Artificial Sequence: Synthetic probe
gcgcaagggatccttgtttttgcctgtgtcaaactggagactcaaagaaggcgaaatggcygagaggtgatatatgtgttttttgggcgtgtcgaaagggatggaccgaactcgtacagtt

SEQ ID NO: 6030 - DNA, 93 bp, Artificial Sequence
  Description of Artificial Sequence: Synthetic probe
gtatgctgcattattcctctgcagcgcatccagggcaggatttgctcccctgataacggtkgggctcgttgaacacgaagagagaggtcaaaa

SEQ ID NO: 6031 - DNA, 121 bp, Artificial Sequence
  Description of Artificial Sequence: Synthetic probe
tgaggtgaagaagggaaagaaagctgtggacaagatcgggagtggaggaaccatgaaggcmagtggtgggtcttcgaatagggatgattacgagggtggaggatctggaaggtctcgcatt

SEQ ID NO: 6032 - DNA, 121 bp, Artificial Sequence
  Description of Artificial Sequence: Synthetic probe
gaagcaaatgccaatcttgtgatgaccctttcccttgctgcattaggctccttgatgtggytgaggaagaacaaaccaaagactctaattccaattatttatgcatgtgctctgcttctgg

SEQ ID NO: 6033 - DNA, 121 bp, Artificial Sequence
  Description of Artificial Sequence: Synthetic probe
caccatggccgtcacgaagtcggtcgagaacctggtcggggtgttgctgtacgtcctgacsagcgcgtcctgcgagccgccgttgaagagctcctggtcggagtgcagcaggccgcgccgc

SEQ ID NO: 6034 - DNA, 121 bp, Artificial Sequence
  Description of Artificial Sequence: Synthetic probe
gctcaaatatttgtacgtacgtatataggaggtaactagtatatatatataccaccaaatmcatttgtaaaatgaattaattgctagtacgtggaacgggaatacgagatacatatacatg

SEQ ID NO: 6035 - DNA, 121 bp, Artificial Sequence
  Description of Artificial Sequence: Synthetic probe
atgccgccagttcagaaggactttcttgtcatttccgtctcataatagtctgcaccattarcagggaatcctctatcactgcgccttccgatatgcatgaacgaagtccaacaactgaatg

SEQ ID NO: 6036 - DNA, 121 bp, Artificial Sequence
  Description of Artificial Sequence: Synthetic probe
tgcagttttattacaaaaagcaagaatatcatccattaggtgtagcttgcagcaccggctrtcgcttgaaaagaaaaatcacagatggatcggcatttcgaaacaccgtgaggattatcat

SEQ ID NO: 6037 - DNA, 202 bp, Artificial Sequence
  Description of Artificial Sequence: Synthetic probe
ataccaataatccacctctaaaacggagttcgagcaggaacaagacgaaatcaccttcaaaagtgtccaaatttgatgaagaaaatattcagaggaaagaraagaaagtgaaggatcagcccatggagggatgcgggagtgaagatgataattcaagtgaaaagaaaaccaacgcaaggaagagatggttaaacattgcttt

SEQ ID NO: 6038 - DNA, 121 bp, Artificial Sequence
  Description of Artificial Sequence: Synthetic probe
cacccccatggttgtctccttcttcaataaacatttgcagaccttatcatgttcctttccwgactcattttctctgatacagatgatgagggatgtacaagtaacctccagtagatgatga

SEQ ID NO: 6039 - DNA, 121 bp, Artificial Sequence
  Description of Artificial Sequence: Synthetic probe
tcaggatcaaacaatcaaatagctattaacaacatatgaattgaagtgtaaaaaagagcgmggtgagatgagatgagtcaggctagttaaatcgtcttccgaacatacacaacaaattaga

SEQ ID NO: 6040 - DNA, 121 bp, Artificial Sequence
  Description of Artificial Sequence: Synthetic probe
tgagctgagacatgtgcaggagtatctcgtccctgccttggttggttacgctgctcgtcaytatccagggaggtgctgcctcaaaatattcacggatcaggctctggaaagattctacgtt

SEQ ID NO: 6041 - DNA, 121 bp, Artificial Sequence
  Description of Artificial Sequence: Synthetic probe
ggctcttagctatcaggacatatgttgagccaaaagttccctccagcgtcaagctaactgytgtggagccttgcagacggtgccatggtcctgatctttagatgcaagttatcataagtgc

SEQ ID NO: 6042 - DNA, 121 bp, Artificial Sequence
  Description of Artificial Sequence: Synthetic probe
agatcttgtgcgcccggggcaccgtgccaagagccgagcacagttaatttgtgtgtgacarccgagctccatcagtgtgttgtacgtactgtttgtcatcacttatcaagtggagtagctg

SEQ ID NO: 6043 - DNA, 121 bp, Artificial Sequence
  Description of Artificial Sequence: Synthetic probe
ggtggcgggcatgatcgagttcttctacgaccaggcgccggagagcatgaagagcctcggyacggcgctgtcgctcacgacgtacggcgtcggcaacatcttgagcagcttcctcctgtcg

SEQ ID NO: 6044 - DNA, 121 bp, Artificial Sequence
  Description of Artificial Sequence: Synthetic probe
gttgcgcatggcggttgatccagaaccgtgtgtggatagtcaagcccaggttcttgcctamcactccctcgccggacagaggccggactgccctgattgggtgaccccattgcatccagcc

SEQ ID NO: 6045 - DNA, 121 bp, Artificial Sequence
  Description of Artificial Sequence: Synthetic probe
cgcttagctcagcatcatacaagccagggttgtacattgcccggtcctctgatatccacaytggcaagggctcagccgaatgcagcatgccctccagcatggttggatccacgccatccag

SEQ ID NO: 6046 - DNA, 121 bp, Artificial Sequence
  Description of Artificial Sequence: Synthetic probe
cgaggcctacatgactgggtgcaaggtgatgtacccgatcatggcggaccctgaccgctcsgccatcaagcagctcaacatggtggatcccgacgagaaggactctgagggcgtccagctc

SEQ ID NO: 6047 - DNA, 121 bp, Artificial Sequence
  Description of Artificial Sequence: Synthetic probe
aagagtgcttgacttttctaaacagtgccaataaggaggaactaaaaagcttaaggggcaktggagaaaaaagagcaaattacataattgagcttcgtgagaactcacctgagccatttaa

SEQ ID NO: 6048 - DNA, 121 bp, Artificial Sequence
  Description of Artificial Sequence: Synthetic probe
  modified_base (80)..(80): a, c, t, g, unknown or other
gatggtccaagattgtaagactgaggttgctcgtatgcctgatcatatgtgtagtaactgycatggcctataattgggtnaggaggtggcatgttggaattaaatccagtcatcatcatca

SEQ ID NO: 6049 - DNA, 121 bp, Artificial Sequence
  Description of Artificial Sequence: Synthetic probe
actgcatatctatcatgaacttatacagtatgggcttcgcatatggatgttcagccgggaycagatgcagtgattccagtaacatcaactagatacagtattgatgctctcaagcttccaa

SEQ ID NO: 6050 - DNA, 121 bp, Artificial Sequence
  Description of Artificial Sequence: Synthetic probe
ggccaggtaagtcacattccatgctgaacatgcattcgactgcaaaatctgggggcaaaarcatgaggataaagatggcacatctcaagccccatgcagctggcttcaagaggaaccctca

SEQ ID NO: 6051 - DNA, 121 bp, Artificial Sequence
  Description of Artificial Sequence: Synthetic probe
ttctcaaaggaatgccactatataagtgaagtcatgaagaatggtacttccattaaacatratgcctcaaacgaagatgatttggcagttgagatcgttcgagttgagctccaaggtgctg

SEQ ID NO: 6052 - DNA, 121 bp, Artificial Sequence
  Description of Artificial Sequence: Synthetic probe
tttgcctgcagttattggctctcctattgttccagctgacagggctactgccagcataacratgcaccgccgtcttgcagctgttgaaacaggccaggtcgatagctgacaagcttcctgt

SEQ ID NO: 6053 - DNA, 121 bp, Artificial Sequence
  Description of Artificial Sequence: Synthetic probe
aggtggagggtacacgcccacgccagggtacaccccgacgccgtacacgcccacgccgtcyggtggtgggtacaacccgacgccgtctggcggtgggtacaacccccacgccgtccgggtg

SEQ ID NO: 6054 - DNA, 121 bp, Artificial Sequence
  Description of Artificial Sequence: Synthetic probe
ggaacctgataatgccgtttcacatggtgatgcatctcttgccgtggatgattttttggckcgagcatcgtaaacaacgtgagggtgattcgggtgagcgtctttctactctttttgacac

SEQ ID NO: 6055 - DNA, 121 bp, Artificial Sequence
  Description of Artificial Sequence: Synthetic probe
gctgctgtagttggacaccacagtaagcacctcgccgtcgctgaccttgatggagcctggmttagggtagcacgtcgacatgccgacgatgtagttcgcctcgttccctgcctcctgccct

SEQ ID NO: 6056 - DNA, 121 bp, Artificial Sequence
  Description of Artificial Sequence: Synthetic probe
ccttctcggtggtgtgttctatgtttagttcggtagccaggttagctgtgtgtgccctcgygtcggtcgtgttccatgacggtcgtcgagggtggttgtgttggttttgggccagtttttc

SEQ ID NO: 6057 - DNA, 121 bp, Artificial Sequence
  Description of Artificial Sequence: Synthetic probe
catccatcgccacggtcatgatcgagagattattaggaccgctcttcaaagaatcaagcargtgtcgtcgtgcgtgtcaacaaccagtaagaaccaagcaagtgtcgtcagtaagattgct

SEQ ID NO: 6058 - DNA, 121 bp, Artificial Sequence
  Description of Artificial Sequence: Synthetic probe
tctcccccctcagcttaggtacttggcgagtgagctacggcagatcgtagcggacctcttmggcggaaggctccgcggtgtggcaaagacgaacgtgtaggagatgtccatagatgtcggt

SEQ ID NO: 6059 - DNA, 121 bp, Artificial Sequence
  Description of Artificial Sequence: Synthetic probe
gaatttcactgcacagggaaggtcgtcaaataaccaatatgaagaacgatgattcagttcrtgtggtttttagggttagtccgacagcataaacaggtttctttctctgttccttttttct

SEQ ID NO: 6060 - DNA, 121 bp, Artificial Sequence
  Description of Artificial Sequence: Synthetic probe
  modified_base (70)..(70): a, c, t, g, unknown or other
ataccaaaaccctaatagtcaatcatccagccacgaaaagttccacaacaccaccgccacygaagggganattcgggggacagaaagtctctgttctggcaccctgccgggacggggaagt

SEQ ID NO: 6061 - DNA, 121 bp, Artificial Sequence
  Description of Artificial Sequence: Synthetic probe
tcctctctctcccactagttcaaaacagtagttttagtttgttcttggtgagacttgggakatatctccaggaaaggtttttagccttcccttgtacttcaaccattttgatggacataag

SEQ ID NO: 6062 - DNA, 121 bp, Artificial Sequence
  Description of Artificial Sequence: Synthetic probe
atggtggagagggaagttgctgtggagtaagccccagctctttagactccttttttcacayggtattccattctttttcgcgatctgtatacaggagtgcatagggctaaatcatgttttt

SEQ ID NO: 6063 - DNA, 121 bp, Artificial Sequence
  Description of Artificial Sequence: Synthetic probe
cctcactaggcagtgttagtcagatctacaagtgcttcctctagcaggtcctccaaaaccrccgcgcaaaccatggcgttgatctcaaacgtgtctaaccgtgccgtgtcggcgctgcccg

SEQ ID NO: 6064 - DNA, 121 bp, Artificial Sequence
  Description of Artificial Sequence: Synthetic probe
ccctgaatctgaacaacaagggagacaccctcgctgcttcctactaccaccaggtgcatgraaccacagccgttggaggagagattgctcacaccttctccagcaacgagaacaccatcac

SEQ ID NO: 6065 - DNA, 121 bp, Artificial Sequence
  Description of Artificial Sequence: Synthetic probe
agctcacaagatctaaacatgatagcacaaaggagaagaaccgaccatctagctactacayggacccgtagtccaaggatgaactactcacgcatcacaccggaggcttgcatggtgatga

SEQ ID NO: 6066 - DNA, 121 bp, Artificial Sequence
  Description of Artificial Sequence: Synthetic probe
aggcggcgtgcttatatggaaaggaagaaagagagcgacaagaggagggaattcaaccttmtgagatatgaagcaattaaggatgaactattgctcctgaccgcaggcattggggctgctt

SEQ ID NO: 6067 - DNA, 202 bp, Artificial Sequence
  Description of Artificial Sequence: Synthetic probe
ttaggaagctggaacttatttacgctgatcctgctcaacgattggtgggtgatgttgctcttttaaactgtgaaactgctgtggtatcagatcgacgtggsagcatatctgtattatcctgcccaagacttgaagtttctgaaaagtccagaaaagaacttagatgtacattgctcattctttatgggtgaaattgctatga

SEQ ID NO: 6068 - DNA, 121 bp, Artificial Sequence
  Description of Artificial Sequence: Synthetic probe
actcgttgattaagaaatgcatctttgctgtggatccgtccaatgtgcgagcaatctgttygtcagtaccctttaagtatctccagagattgatcgatgcattcgccgacctgctggaaag

SEQ ID NO: 6069 - DNA, 121 bp, Artificial Sequence
  Description of Artificial Sequence: Synthetic probe
tcggtacaaggaagcacacatacgcatcagtagaggctccacaaatcagacaagccatagmggtctgattttgcccagatttctattgtccacaaaaattttgctctctaatgaccatctt

SEQ ID NO: 6070 - DNA, 202 bp, Artificial Sequence
  Description of Artificial Sequence: Synthetic probe
taatgcactcctacggtctgcaaaaagcgaactctgatggcctaattctaagcgatggctgtgaaataacatctgacaacaggccaaagagtacaatattygattggttcttcgaccctctgatggtgatcaaagatcaaatcaaaagccagtaattttacagaagaggaggaagtgtaccttcaaaaaccgcgtagctgtt

SEQ ID NO: 6071 - DNA, 121 bp, Artificial Sequence
  Description of Artificial Sequence: Synthetic probe
actgtattttcattttgcttcagagattctgtcaaatccttcacttccatactagaaactkgaactgcactgctagtgcaagggatgacaccatttgaaacaatagcatccttggaactca

SEQ ID NO: 6072 - DNA, 121 bp, Artificial Sequence
  Description of Artificial Sequence: Synthetic probe
cgatgaggatgacttcgtgatgccgacgaagaccaaaaggcagaaggtctagctaagtatytgatccgtaaacaaggcatgtcctttgtttatcattgtcattatgctagatcaggataac

SEQ ID NO: 6073 - DNA, 121 bp, Artificial Sequence
  Description of Artificial Sequence: Synthetic probe
gcagcctccagactacgcgaaattcttctgatctggcatgaaaccttgctgctgaaactgktcaggaattttgacggatcgacacgggctgttttagtataggtggaaataaatagatagc

SEQ ID NO: 6074 - DNA, 121 bp, Artificial Sequence
  Description of Artificial Sequence: Synthetic probe
atcttaaactgcagtctgcgtcttatttgtttgaaattgatgtcaacatgtcaacataagkcatgtacgaagaggcatcttagtgatgcaaaccgtaccctcatacacatcgatatcatgt

SEQ ID NO: 6075 - DNA, 121 bp, Artificial Sequence
  Description of Artificial Sequence: Synthetic probe
cgatacaaatgcagtaattttcgataggccttcaggtcaagtcttgggcactctcactggycactcaaagaagattatcagtttgaaatttgttcctcgggatgagcttttgataactgga

SEQ ID NO: 6076 - DNA, 121 bp, Artificial Sequence
  Description of Artificial Sequence: Synthetic probe
agagttttggagcacaaccaccatcgaggttgatccggcagatctccgagcttctacaatycacctgtcttcgtgggaccttgatcagcatggagtgggaagcagtcacaacgccgcggaa

SEQ ID NO: 6077 - DNA, 121 bp, Artificial Sequence
  Description of Artificial Sequence: Synthetic probe
ttatttcccctgaagtattctctcgctgacacaagcacataagggttagtgtgcctcatcyattgcaagcggcacgctcttcaccagctcacgtagcttcagtatatagaacatctcgagg

SEQ ID NO: 6078 - DNA, 121 bp, Artificial Sequence
  Description of Artificial Sequence: Synthetic probe
atgctctgaaggcttcacatttcctttcacgcgtggtgtaatagatacaggacctggttgrtgaatttattttcagcgctaaaaactacaatcaggatgttgttgcttccggtcgagttag

SEQ ID NO: 6079 - DNA, 121 bp, Artificial Sequence
  Description of Artificial Sequence: Synthetic probe
tccaagccaaaaagcttcagttcccaaggagaggttcttcgtgacactctggatatagttygctccatagaagccattattcccaaattgcaattgggatctaaaatcttttcccttaaaa

SEQ ID NO: 6080 - DNA, 121 bp, Artificial Sequence
  Description of Artificial Sequence: Synthetic probe
acctgctttaaaaaaaggggtgccgacaaagggcaaaggaaaaaagagagcgatcagtacygaggccagtacacggcgagactaggattcggcggtcctcgcctacataggtatggtggac

SEQ ID NO: 6081 - DNA, 121 bp, Artificial Sequence
  Description of Artificial Sequence: Synthetic probe
ctaaagggaggtcaaaggcccggggccgacgctagatgtaacttcctaataatcagctgcraaatgcaggggcctcatgtatctcctgtcttgtgagggaaaaaagaagcttgtaattagt

SEQ ID NO: 6082 - DNA, 121 bp, Artificial Sequence
  Description of Artificial Sequence: Synthetic probe
tgcatgaatcattcatgctgtccaaatgccaaagcatttaaaagagatgaggataatgacrgtcacgcagtgataattgctctggggcctatcagcaaaggtgatgagattaccatctcct

SEQ ID NO: 6083 - DNA, 121 bp, Artificial Sequence
  Description of Artificial Sequence: Synthetic probe
tccgctaccaaatagcagaagtagagcataatgcaagtgcacaagtctcttgctgtggacracgaccttcgcaacaaatggtcaacctgaacactagatgagggattctagaactttctta

SEQ ID NO: 6084 - DNA, 121 bp, Artificial Sequence
  Description of Artificial Sequence: Synthetic probe
gccagtgcagattgttggagatgacctcctcgtcacgaacccaactagagttgcaaaggcsattgcagagaagtcctgcaatgctcttctcctcaaggttaaccaaatcggatctgtaacc

SEQ ID NO: 6085 - DNA, 121 bp, Artificial Sequence
  Description of Artificial Sequence: Synthetic probe
cgcgctgcagaggctcctcatggcatccggcgactggtcatagaagaactcgagagctccratgaacgtgaacacctcggcggcaccaaccaggaaatactgagggatttgccacaaaatg

SEQ ID NO: 6086 - DNA, 121 bp, Artificial Sequence
  Description of Artificial Sequence: Synthetic probe
ttacatcctcctaggctgctgtgttgtgttctcggagagtagctcctcatcttttctgttmcgtcttgagatgaatcggtggtactctatgtctttctgtaagaaatgtgctgcctggggg

SEQ ID NO: 6087 - DNA, 121 bp, Artificial Sequence
  Description of Artificial Sequence: Synthetic probe
tctttgtgctgcagcttggtcttcaattgagtttgtaagagcctcataccaattgaagtcyagaactattccaaccttcccttgctgagctgcctgatacttgcttcggtatcttgcaact

SEQ ID NO: 6088 - DNA, 121 bp, Artificial Sequence
  Description of Artificial Sequence: Synthetic probe
gtatcatcaagcactgcttgcagctagcccattcgaggcggtatgctgtgaggtgctgttrtctctgtaaagtggtactccaccacctagttccttcagtctccttaccatatcatgcaac

SEQ ID NO: 6089 - DNA, 121 bp, Artificial Sequence
  Description of Artificial Sequence: Synthetic probe
ttgagaaccatctactattaccttcaatcttgtctgccctgcaattccttttacgacaccraggggataacggagggcttcgaggacaggcccttgttccaagtgaacctcaacataactc

SEQ ID NO: 6090 - DNA, 121 bp, Artificial Sequence
  Description of Artificial Sequence: Synthetic probe
accaaaggaaaggaaaagaaaagaacacgtacacacacactgaatatagaacacattccargactgtgaaggaagcgggagggttcctgttattatctagattggcgatactctgtctatg

SEQ ID NO: 6091 - DNA, 121 bp, Artificial Sequence
  Description of Artificial Sequence: Synthetic probe
ctattaagttagctggttaataagtagtttgctggttaaatgattggttttgtgttctgtmtactcggtacggtcccattgcgttgcatattgctctcatgcgtgcgtgtttcctttttct

SEQ ID NO: 6092 - DNA, 121 bp, Artificial Sequence
  Description of Artificial Sequence: Synthetic probe
caacaacacaccagcaggatatgacatatcaggatactgaggaggccagtgatactccgcyagtcccccatcctgtgcaggagcaggtagggagctcgaagcgtgggaggcactatggtac

SEQ ID NO: 6093 - DNA, 121 bp, Artificial Sequence
  Description of Artificial Sequence: Synthetic probe
caacaagtgagttacgtacatactacacatgatcatgatcatcgtgttgggggatgcacgmcctcaagtcaaacgcagaaaatcaaaatgcatatgctgtgtgtgtgataatatacctgta

SEQ ID NO: 6094 - DNA, 202 bp, Artificial Sequence
  Description of Artificial Sequence: Synthetic probe
atacagagcttgttgccgtcaatggtgaaccggctagcaaatcggacgagggcgatgttggcagtgagctgtagagagctggaacagcgcaatcatccttmagatcaaccaaagcctagttttcgaatcgaatagatcaatgcagtgcacgggattcttagtcgagtagggcaaaacgctatgaattcagtagaggccggaa

SEQ ID NO: 6095 - DNA, 121 bp, Artificial Sequence
  Description of Artificial Sequence: Synthetic probe
atcgtccctgccatcttattctagcatggatggtagcggatattcttcgtcgggtcttggygggtatggtacgacttaccggtactagctggtacctatttgtcatcaagccaccctgtac

SEQ ID NO: 6096 - DNA, 121 bp, Artificial Sequence
  Description of Artificial Sequence: Synthetic probe
cttgggcgacttggtggcggccttctctgccttctcgacggacttcttggggagcagcacmgggttgatgttgggcagcacgccgccgtgggcgatggtgacgccgccgagcagcctcccg

SEQ ID NO: 6097 - DNA, 121 bp, Artificial Sequence
  Description of Artificial Sequence: Synthetic probe
cttggcggtgacggcgagcttcatgccggagtagcagtagccgtagctgcagatgaagaastagtccttggcctccttgagctggaaggcgtagctgatccccttgttgtggctggtgatg

SEQ ID NO: 6098 - DNA, 121 bp, Artificial Sequence
  Description of Artificial Sequence: Synthetic probe
tgtgcccctagtggctatccggctcaaggacagcagcaagttcagcgtgtttgacatctcygagaacctgaggaggtttggctggattgtgccggcctacaccatgcccgcggacgcagag

SEQ ID NO: 6099 - DNA, 121 bp, Artificial Sequence
  Description of Artificial Sequence: Synthetic probe
gcttaccacatttgctctgaagttcaaggacactggcatcagggaagatttcaaagatgcsgtggagacgcacaaggtgaagaaggcttcggacgcgctgaagacacctgagaactctccc

SEQ ID NO: 6100 - DNA, 121 bp, Artificial Sequence
  Description of Artificial Sequence: Synthetic probe
gctcaacacctacccagacattggcaagacaatgactgtagtggaggcaaaccgctacgcwgaggatgctgtcgcgcgattcctggaggccggcaggatcgcgcttagagctggcgcgaac

SEQ ID NO: 6101 - DNA, 121 bp, Artificial Sequence
  Description of Artificial Sequence: Synthetic probe
gtctgaatatgatattaatatgtacttcgaaagcatctccagatacaagaaactgaaacartgagcagcattgcactaacagcacgtagcggtggtagtgttactcagcagcaaaagatat

SEQ ID NO: 6102 - DNA, 121 bp, Artificial Sequence
  Description of Artificial Sequence: Synthetic probe
agtccgtcctcgttcacctcgcgagatgtcgcactgaatctggtgattgtctgaagctggygtccagggcagcaattctgggcaacaaacccctagtcgtggccttagagactgtctcgtc

SEQ ID NO: 6103 - DNA, 121 bp, Artificial Sequence
  Description of Artificial Sequence: Synthetic probe
tggaacttcagggcgcccacgctcgtttaagaagaatgtagctgaagcagaagaggaagargaagaaatagaagaatctgaagaggaagaatccgaagacgaaggtgaagagaagaaacat

SEQ ID NO: 6104 - DNA, 121 bp, Artificial Sequence
  Description of Artificial Sequence: Synthetic probe
cacaacaataagcacacttgcaacagaggtcagcagcaagcttgcagccctgaaaggactygatgcaaggcttagggagatccggggctatctagatcttgkaattsmcgsgaagctccca

SEQ ID NO: 6105 - DNA, 121 bp, Artificial Sequence
  Description of Artificial Sequence: Synthetic probe
ggatccttatgacgaatcagagagcgatcatgtagacgaccctctccaaagtggcataaaygtcgccaagtgcttgagagcagtgatggagcctcttttttgcgagacattttggtgaatc

SEQ ID NO: 6106 - DNA, 121 bp, Artificial Sequence
  Description of Artificial Sequence: Synthetic probe
cccctaatgtaaacgtaacatagaagagcaagtaataataccagtgtttttagagtacacscactccaccgcacaagacacaaccaacagcctgaacctgaatacctgaagacctgatgca

SEQ ID NO: 6107 - DNA, 121 bp, Artificial Sequence
  Description of Artificial Sequence: Synthetic probe
tccaattctgtaaccaaaagcaaatctagcctacaaaattagaggctaatcccgacgatcractcaacttcaactccggtatacaaagtctagtaacaaacgttgaaagaaaaccacataa

SEQ ID NO: 6108 - DNA, 121 bp, Artificial Sequence
  Description of Artificial Sequence: Synthetic probe
accatgtagctttgctgtgatttgtaaactctgaagtgcacagcagtgtgctcctccatgytgtcagaggccaggacaacaagcccaaatggccctatgccaccttgaaccgatgcacctg

SEQ ID NO: 6109 - DNA, 121 bp, Artificial Sequence
  Description of Artificial Sequence: Synthetic probe
ggagatggctttttacccaaccaagcctgcagcagctcagatgggggtcaaccttggtaaytgtaaactttaatgacccatgtagtgtctggcgctgcgacatttttctcggtcagtctaa

SEQ ID NO: 6110 - DNA, 121 bp, Artificial Sequence
  Description of Artificial Sequence: Synthetic probe
ggttgcagttatgggggagtttgaactatctttcttgttatgtaccccttgcaatccttcrtggtttggaagtcctaatgtactatcattagattacttgccattctactgaaatgctatg

SEQ ID NO: 6111 - DNA, 121 bp, Artificial Sequence
  Description of Artificial Sequence: Synthetic probe
gacctgggaaccacaaccagtatgtggcgccaagttttcttaccggtcgacctgtctggtygtttatcctatctgtcttttgttttggctgtggctattggacggctagctgttctaaaat

SEQ ID NO: 6112 - DNA, 121 bp, Artificial Sequence
  Description of Artificial Sequence: Synthetic probe
cccagccttggcagcactgtaattagcttggccagcattgccagtaagaccaacaactgaygctatgttgataactcttccctttttcttcttcatcattattttagtggcagcctgtgta

SEQ ID NO: 6113 - DNA, 121 bp, Artificial Sequence
  Description of Artificial Sequence: Synthetic probe
ccatcttcgccaaagctgctgatgccatggaggaatggactaagctgtggaaatctcatgragctcagagcgcgtagtgactagccatcatcaggaacacctaattttttttcttataaga

SEQ ID NO: 6114 - DNA, 121 bp, Artificial Sequence
  Description of Artificial Sequence: Synthetic probe
atcatctgcgcagtctaagcctcagggaggcgagattgttgtccttgttggagggggcagractattggggataagaaggtggaggtcagcataccgactggatctcaagttgtatattcc

SEQ ID NO: 6115 - DNA, 121 bp, Artificial Sequence
  Description of Artificial Sequence: Synthetic probe
caacggcaccatcgacttcccagagttccttaacctgatggcaaggaagatgaaggacacrgactcggaggaggagctcaaggaggccttccgcgtcttcgacaaggaccagaacggtttc

SEQ ID NO: 6116 - DNA, 202 bp, Artificial Sequence
  Description of Artificial Sequence: Synthetic probe
ttcatctactcaagaattgaagaccatcctcgccatcttggctcatggaagtgctggcagaacctttcccccgtgcaggatccaaatccaacgttgtagtmctcacccttgcagcaagctgtcaggatgacttcatccccatcttcgaggaacttgcggatggaattcccaaccggtatctccttctgcccgttccacgtta

SEQ ID NO: 6117 - DNA, 121 bp, Artificial Sequence
  Description of Artificial Sequence: Synthetic probe
gcagtacctcctgaagggaatagcttgcttgtgggccaaaacatcctcaaggtacctcttrgccttgttcaaaggcatcttgcgaagggcaaacgctgtctcacgtgtgttcttgaagtgg

SEQ ID NO: 6118 - DNA, 121 bp, Artificial Sequence
  Description of Artificial Sequence: Synthetic probe
tccttgagcttgccaagaagaaacttggtagcagactcgatgttcttcttgaaacattcawgctcctctccttcgagcttggcactgaggttcttgatgtagcgcttcatgaaggtgataa

SEQ ID NO: 6119 - DNA, 121 bp, Artificial Sequence
  Description of Artificial Sequence: Synthetic probe
cctgatccatccatccatcagtccaacgcaagccatgcatatatatatatagtcgtccacrtcagcaccatctgcatgcaagtcatattcgtaattaagttctgcatgttatatatataat

SEQ ID NO: 6120 - DNA, 121 bp, Artificial Sequence
  Description of Artificial Sequence: Synthetic probe
aggaaatgagcgcagacgagaagcagaaggttacaccacgcactgtcggaattcccgggawggcatttgcaacatacaccaacgctaaaagaatagtgaaattagtaactgatgttggtgc

SEQ ID NO: 6121 - DNA, 121 bp, Artificial Sequence
  Description of Artificial Sequence: Synthetic probe
aaaatagcgtccccaacagcccaatcccaagagaaaaaatgacacatagaaccagaggccraatacaccaatggctctttatttcctcccaatgttgcagcgaacaaattatttaatctac

SEQ ID NO: 6122 - DNA, 121 bp, Artificial Sequence
  Description of Artificial Sequence: Synthetic probe
gaacgctcatttgaagccaaactggtacttgttgtagttcgccaagctctcgatgccaccrccttgtgtagatggaggaattccagacatccctagaccagatccccctgcgcccatgctc

SEQ ID NO: 6123 - DNA, 121 bp, Artificial Sequence
  Description of Artificial Sequence: Synthetic probe
gaattggcggagactgtcagggtaggacgagccggtctcagcagaccatttaacctgtgcrcttttgatgacagttactaagctctcgccagcagattcatcaagctcatagtcaaatggg

SEQ ID NO: 6124 - DNA, 121 bp, Artificial Sequence
  Description of Artificial Sequence: Synthetic probe
cttacaggacagcacatagaacattcttctaccctgctagaaaaccctacattgttctctwatataaaacctgcgacccgaaacgatataggattttatagtctcgttaagctcatgtttc

SEQ ID NO: 6125 - DNA, 121 bp, Artificial Sequence
  Description of Artificial Sequence: Synthetic probe
ccataagtcactggtcaacttcccaatggttgtctgtgcaaaggttcgtgaaggcgacaaraggatagttcggattaaagaagggaaccctgaagggagacatgtcgttattgttgatgat

SEQ ID NO: 6126 - DNA, 121 bp, Artificial Sequence
  Description of Artificial Sequence: Synthetic probe
tatgcggacatgaacaactgatgattgtccctgaagaatacgcagcattgtcggtttaggmgaatcttcgggaataatcactgttgtatcgtatatagccgggacaaagtcacgcataata

SEQ ID NO: 6127 - DNA, 121 bp, Artificial Sequence
  Description of Artificial Sequence: Synthetic probe
tgtcatcgtcagtctgcatactgagaggatttttgggataccacaatggcagagtctacgytcaaagcttctagtgtggaggggaaacattgcgaatgctatcagcacaatccaagctaac

SEQ ID NO: 6128 - DNA, 121 bp, Artificial Sequence
  Description of Artificial Sequence: Synthetic probe
catgttctctcctatttcgagaatcgcagccatgttaccacaacggtaacagtagtttggygcgctgaaaactgtgacaacgttcttctcctgggccccaattaaacccttccatcacaag

SEQ ID NO: 6129 - DNA, 121 bp, Artificial Sequence
  Description of Artificial Sequence: Synthetic probe
tgatgaagatgacagcgaaggtggagacaaaaccaaggagagtgagcccatgactggtgtytgtgatgcgtgagatgaagtgcatgttagaaaatgactttattattatagtgatagttcc

SEQ ID NO: 6130 - DNA, 121 bp, Artificial Sequence
  Description of Artificial Sequence: Synthetic probe
gtccatcacagcacgcttgatgcttcctccattcttctcaagcagctccttgttcgtctcsctgtcctcgaatcccatctcattcagttcggcgagcagagggtcccattcattgacgccg

SEQ ID NO: 6131 - DNA, 121 bp, Artificial Sequence
  Description of Artificial Sequence: Synthetic probe
gtggacctctgtaattaagggcccatcggagacaccttttgaaggtggtgtatttcagctygcattctcaattcctgagcagtatcctctgctgcctccacaagtccgcttcatgaccaaa

SEQ ID NO: 6132 - DNA, 121 bp, Artificial Sequence
  Description of Artificial Sequence: Synthetic probe
atgcttatttcctacttgcgacatgatcagcactagagatgaatttatggatagtcgcctytgtgacattaatgttcttgtaccctgaggctcatacataccctaatagaagtgtttgctc

SEQ ID NO: 6133 - DNA, 121 bp, Artificial Sequence
  Description of Artificial Sequence: Synthetic probe
tcctacagtcggcgatgccagggatgactggaagatcatccgtgctctttctgaggttgcyggggctccactgccttacgacagcgtcgcaggtgtgaggaaccgcattagcatggtggcc

SEQ ID NO: 6134 - DNA, 121 bp, Artificial Sequence
  Description of Artificial Sequence: Synthetic probe
caaaactgctaccggcggcaaccatatctcaccaaagaaagagtagagcagtactagtacwacttctaaaaaggcttatattgtggaacagatgtagtagtattttgcttgtaagacgtgc

SEQ ID NO: 6135 - DNA, 121 bp, Artificial Sequence
  Description of Artificial Sequence: Synthetic probe
aaggttacagacaagacagattaatgcatgcctccaagaattagctagggagaaggaatgracacttggtggtggtggtggtggtgtcggtggttttagggctctctgtctatgtatttgt

SEQ ID NO: 6136 - DNA, 121 bp, Artificial Sequence
  Description of Artificial Sequence: Synthetic probe
ctatacagagaaggaggatccttctttaagtatgaagcatgacgcaagacgagattatttygagcaagtcgccggtagtttctcagaagacagatccaacggaaagtgtcttctgtgcaag

SEQ ID NO: 6137 - DNA, 121 bp, Artificial Sequence
  Description of Artificial Sequence: Synthetic probe
ataccattgttctgccattgtcgctcccggaatagctactgccggtaggttaatacaggtrctactacacttactactaaggctagctaacatagatagatagatagagatatttacatca

SEQ ID NO: 6138 - DNA, 121 bp, Artificial Sequence
  Description of Artificial Sequence: Synthetic probe
gatgaaggcctccggaagcacggggccggcggcggtgatcggagggttccagatggagaayaggctggtggtgctggacaacgggaagcagcagctcagcttcaccgggtacgtcccggcc

SEQ ID NO: 6139 - DNA, 121 bp, Artificial Sequence
  Description of Artificial Sequence: Synthetic probe
gcaagtaaggttgtcaagttctccaaactggcatttgccttatttaggcatttgccttatytagtagtaagtatatcaagatcaaataacagaactatagtcatgaactacccgcaccatc

SEQ ID NO: 6140 - DNA, 121 bp, Artificial Sequence
  Description of Artificial Sequence: Synthetic probe
agcctcctgaagagcaagcactgcatggctctggaaacgcagatcagtcttgaaatcctgrgcaatctccctaacaagcctctggaatgggagcttccttatgagcagctcagtgctcttc

SEQ ID NO: 6141 - DNA, 121 bp, Artificial Sequence
  Description of Artificial Sequence: Synthetic probe
ggcaggtcccaactacgaaggagaggccctcctcacagctgacctagaccttggagaaatygtccgagcaaagtttgatttcgacgtcgtgggacactacgcacgacctgaggtgctgagt

SEQ ID NO: 6142 - DNA, 202 bp, Artificial Sequence
  Description of Artificial Sequence: Synthetic probe
ctgccgcggccaccctgttgacttctggcaatgccgccttggccccgtcaagctcactgaagcgatccacccatgccgctaggagcggagtcttaacgggstcaaagatctttgtcccagacatcacctccgtcgctttcagccacgagagcgtgctccccagcgaaacgtccaccagtccgacactctcgcctccgaagta

SEQ ID NO: 6143 - DNA, 121 bp, Artificial Sequence
  Description of Artificial Sequence: Synthetic probe
cttcgcagggtacaactacaacagcttgcttggcagtgttctcaccacaccaccaccgatkaagtacaacaaattctagaaacccagatcagttcaatgggtttgcacaatggttgtaata

SEQ ID NO: 6144 - DNA, 121 bp, Artificial Sequence
  Description of Artificial Sequence: Synthetic probe
ataagttccaataggcactgctcaaatatatgaaacagttttagcatataacgaccattcrcaatcacaaggatcgcatcaaccttaacaaatcctgactcaaacattggattaacttaaa

SEQ ID NO: 6145 - DNA, 121 bp, Artificial Sequence
  Description of Artificial Sequence: Synthetic probe
cagggcagggatgatgccctccaaccgcgaagtgcgcttgaaagcgtccaatgcttcctgrtctgtcacactatcatattcggcacgtccaatatccctcaagaaactgtgctcaggtcca

SEQ ID NO: 6146 - DNA, 121 bp, Artificial Sequence
  Description of Artificial Sequence: Synthetic probe
tctcaggcatgatgatcatgttgcggaggtgggtcctcacagactcaggcttctcaccagyaggggcatcgcttttcgccttgcgcagcttcttgatgagcgccatcggcttcctcttcag

SEQ ID NO: 6147 - DNA, 121 bp, Artificial Sequence
  Description of Artificial Sequence: Synthetic probe
tattacatccgtgcaagccatttatgtgcctgctgacgacttgacagatcctgcccctgckactacttttgcccatcttgatgctactaccgtgctctcacgacagatatctgagctcggt

SEQ ID NO: 6148 - DNA, 121 bp, Artificial Sequence
  Description of Artificial Sequence: Synthetic probe
cagcaacaagaggcacttggaggagtgtggacagctcatcaagatcttcaatggatgtgtkaggatggaccagtccacccctgttagagaatgcacagtagctcccaacaaggatatttcc

SEQ ID NO: 6149 - DNA, 121 bp, Artificial Sequence
  Description of Artificial Sequence: Synthetic probe
ccgccctggctggaagtctggcgactggatttgcaccaggtctggatgcaacgagcacaaytttgccagcaggctggagtgcttcaggtgcaacgcaccgcgggactccggtagcgccacg

SEQ ID NO: 6150 - DNA, 121 bp, Artificial Sequence
  Description of Artificial Sequence: Synthetic probe
cgcaaggaagatccagcggttccttagccagcctttccatgttgctgaagttttcactggygctccagggaagtacgtggagctgaaggagggtgttgaaagtttccagggtgttttggat

SEQ ID NO: 6151 - DNA, 121 bp, Artificial Sequence
  Description of Artificial Sequence: Synthetic probe
aggttcttctgatcagtgctgtcttggtgggcttgtttcactgagttcgtgcaggagcctkggggagttgaatgaacacaagacatactcttctgcgccccactatgggggctccccaact

SEQ ID NO: 6152 - DNA, 121 bp, Artificial Sequence
  Description of Artificial Sequence: Synthetic probe
ccaagaaggttttggagataccaaacactgctgtgtaactcaataaccccaatggaccacrgacatatttttattgtcttgggtcacgcactcatctagatgttcatcttccccagtgtca

SEQ ID NO: 6153 - DNA, 121 bp, Artificial Sequence
  Description of Artificial Sequence: Synthetic probe
agatgatgctctctctgctagcttatatcggaatctattgtgctatcagcctgtaatcaayggtggttgcaaaacctttgatgtcatgactgtttctgtatcttaaaaagttggcgaatta

SEQ ID NO: 6154 - DNA, 121 bp, Artificial Sequence
  Description of Artificial Sequence: Synthetic probe
acgccgccacactcattgaccagcttgtctctgcaaagtcgacttaaggaagggggtcatraatattattggatcaatccttgttgttctgccataggctttattattatgtggactctgg

SEQ ID NO: 6155 - DNA, 121 bp, Artificial Sequence
  Description of Artificial Sequence: Synthetic probe
gcacctagaccaacacaacagagctaaaaagagacaacacaactacagctcgtccttgtcrtactgctcgtactccggctcctcggcggccttggtggcctccttctcttccacctcgggt

SEQ ID NO: 6156 - DNA, 121 bp, Artificial Sequence
  Description of Artificial Sequence: Synthetic probe
gactactctctgttttgcttgattattattagaactcttgatcgtgtagcgttgattattygtagcactctgcagtactaccgtcgtcggtacttcgttatccttttatttgtcgaatttc

SEQ ID NO: 6157 - DNA, 121 bp, Artificial Sequence
  Description of Artificial Sequence: Synthetic probe
ggaggccaatgttctccctggcatcaaggtggacaagggcaccatcgagctcgctggaacygacaaggagaccaccacccagggccatgatgaccttggcaagcgctgcgccaagtactac

SEQ ID NO: 6158 - DNA, 121 bp, Artificial Sequence
  Description of Artificial Sequence: Synthetic probe
tgataacgatgtgaagctatggactccctctgccagtgagcgagcacaagtgttaaatgtygaggagttgaagccccgaaagagaaaagcaaagctctggcactttgccttaccggaggaa

SEQ ID NO: 6159 - DNA, 202 bp, Artificial Sequence
  Description of Artificial Sequence: Synthetic probe
agtagatttggcctccctcatatttatcccatccaccaactatcattccagcttgcaacatgctcttgttctgataggccagcagcctaaccaagttggaygcaactttcacagtagctggctgcccagactgaatagtgtgttggtggagaaaataacgcacataatcggaaataacttgtgtatcagcagcagatccaga

SEQ ID NO: 6160 - DNA, 121 bp, Artificial Sequence
  Description of Artificial Sequence: Synthetic probe
ggacaaggagagcgcgcggatgcaagcgcgcgtcgggtcggagctgatggaggagggtgaygcgttaccgtgcgaccaaccggagacgggcgacgacggtggcaggactgccaagctactg

SEQ ID NO: 6161 - DNA, 121 bp, Artificial Sequence
  Description of Artificial Sequence: Synthetic probe
cctctcttgcaaggctggcagttccttcacttcatcaagtgtcacaccagctgcgttctcrgcacctagaagataatcttggacctctgctgaaggaacgtcaaatacagcgcctctccca

SEQ ID NO: 6162 - DNA, 121 bp, Artificial Sequence
  Description of Artificial Sequence: Synthetic probe
ctttggcaagcagatgggcttgagtgatcaggatattgttgccctctctggtgctcacacyctgggaaggtgccacaaggagaggtccggttttgaggggccctggacaaagaaccctttg

SEQ ID NO: 6163 - DNA, 121 bp, Artificial Sequence
  Description of Artificial Sequence: Synthetic probe
ttggaggagtgtggacagctcatcaagatcttcaatggatgtgtgaggatggaccaatccrcccctgtttgagaatgcacagtagctcccaacaaggatatttccagcaacagtctgacgg

SEQ ID NO: 6164 - DNA, 202 bp, Artificial Sequence
  Description of Artificial Sequence: Synthetic probe
tcgatctgctcaacccgccgccggagctcgagaagcgcaagcacaagaagaagcgcctcgtccagtcccccaactccttcttcatggatgtcaagtgccarggctgctttaacataacgactgtgttcagccactctcagaccgtggtggtgtgctcgggctgccaaaccgtgctgtgccaacctactggaggaaaggctag

SEQ ID NO: 6165 - DNA, 121 bp, Artificial Sequence
  Description of Artificial Sequence: Synthetic probe
tcacgcagggggtcacctgagatcacatacacaatggtgaaggctgtagccgtgctttccrgcagtgagggtgtcaagggcaccatctttttcacccaggagggagatggcccgaccgccg

SEQ ID NO: 6166 - DNA, 121 bp, Artificial Sequence
  Description of Artificial Sequence: Synthetic probe
ctggattgtcaccttaccaaacgatttcttcccgaatttgctgttgtttttgcaagagatrtggagcttctggcctttgggagggctatcaaaagcccatgcaaaggcttcatcccattcg

SEQ ID NO: 6167 - DNA, 121 bp, Artificial Sequence
  Description of Artificial Sequence: Synthetic probe
cctctggtaagccagtagttcagctgctgagaagccttgtggcacaccggccatcgctacrggctgataagaagcaaccggaggtggcagtggcttagaagatgtcccaggaggagttggt

SEQ ID NO: 6168 - DNA, 121 bp, Artificial Sequence
  Description of Artificial Sequence: Synthetic probe
ccccgtgattttatttcaatatcatctgatctgatttgcagcgcatttctctgaattctgytttgtgctctagtttcggtgtgatttcccaactgcctaggctttggatattaattaatgg

SEQ ID NO: 6169 - DNA, 121 bp, Artificial Sequence
  Description of Artificial Sequence: Synthetic probe
cagtctccacgtaaacgcgacaacagatccaagcagtctccatgctagctgcccagtagtygagggtgagaagtggtctgccacgaaatggatccatgtccggtcattcgacaatcctccg

SEQ ID NO: 6170 - DNA, 121 bp, Artificial Sequence
  Description of Artificial Sequence: Synthetic probe
tccttcccagtaacttgcagcggtggtgaatggacaattgttcaagagctcccgatcgacragttctcaagaaagaagatggatgcgacagcccaggagctctcggaggagaaggcgctcg

SEQ ID NO: 6171 - DNA, 121 bp, Artificial Sequence
  Description of Artificial Sequence: Synthetic probe
taccgcctactaagtctctattatctttaaatcccccatgacatcgtcatttttatgttgkgtctggaactgttgtcccttgcaactgttgtgtctgtttaactagtatggaatcggtgta

SEQ ID NO: 6172 - DNA, 121 bp, Artificial Sequence
  Description of Artificial Sequence: Synthetic probe
gctacacatagggcataccttatttatctgaagccactggtttatgcactcggggtggtaygaatgcttgcagggaagtgcaaccaaagattcaccatcttcaaattccacacggcaaatc

SEQ ID NO: 6173 - DNA, 121 bp, Artificial Sequence
  Description of Artificial Sequence: Synthetic probe
acccgctgacccagccaccaccaccaccaccatccagcagcattcattaagcaaacacccmaacacaagacaacgtaaacaccaccctcaaaggcaccacgaaccaggccagagcacacta

SEQ ID NO: 6174 - DNA, 121 bp, Artificial Sequence
  Description of Artificial Sequence: Synthetic probe
cctttaagctgtcggacactgtgatcaattcttctcctacctgcacaaaatcactgtttcraactgtggtgcatctttgttctgtcccaacacatttattgcgtagctctgtagaggatag

SEQ ID NO: 6175 - DNA, 121 bp, Artificial Sequence
  Description of Artificial Sequence: Synthetic probe
tactcagggagtgtatacatttgatgagaagtcgcgcgcaatccaggtggagacattctgygtccatggttcacctgatggatacatcaccggtatccgtgggagggtgcaatgcctttct

SEQ ID NO: 6176 - DNA, 121 bp, Artificial Sequence
  Description of Artificial Sequence: Synthetic probe
tgcattcggaaagctgaaaaagacagaggaagctattaatgtattccagcacttatcaagycttgatgttaagccaaatgcaacaacatactccctacttgtagacgcacatcttgtcaac

SEQ ID NO: 6177 - DNA, 121 bp, Artificial Sequence
  Description of Artificial Sequence: Synthetic probe
gttttgccactcccatggagttcatctgtcagcgtatgcgcccttgggcaggatgaaagaygtcgcgagtaacccggtggtgtcgtcgatagccgagagcctggggaaaactccggcgcag

SEQ ID NO: 6178 - DNA, 121 bp, Artificial Sequence
  Description of Artificial Sequence: Synthetic probe
tcgcaatatggtcaaggcattggaatacattggtcttgctccggaaggcagccagagggtytctaatttcttagagaaggctgcggatggtcttgttgaaggtggcaagaaggaaattttc

SEQ ID NO: 6179 - DNA, 121 bp, Artificial Sequence
  Description of Artificial Sequence: Synthetic probe
ttcacattccatatagaagtagcaagagataactggaaagagcttatccaaagcattaaakcaaagggcatgacgcctggtgtatcattgagacctggtactccggtggaggatgttttcc

SEQ ID NO: 6180 - DNA, 121 bp, Artificial Sequence
  Description of Artificial Sequence: Synthetic probe
ccgtgcaaccccaacgttcttcttcctcaagaacggccagcagatcgacaagctcgtcggygccaacagacctgagctggaaaagaaagtacaagctcttggcgagggcagttgaactgtg

SEQ ID NO: 6181 - DNA, 121 bp, Artificial Sequence
  Description of Artificial Sequence: Synthetic probe
ggtcatttacaacagagagtcaggccagagccgtggatttggatttgttacaatgagtacyattgaggaagctgacaaagccattgagacgttcaaccgctacgacattagcgggagactc

SEQ ID NO: 6182 - DNA, 121 bp, Artificial Sequence
  Description of Artificial Sequence: Synthetic probe
ctttctaaggatacccacctgttgcttactggaggtatggtaaaagattttgcgtgtataygatttgaaccgtccagatgctgctccaaaagaactagccaaatcacctgcttctgtccga

SEQ ID NO: 6183 - DNA, 121 bp, Artificial Sequence
  Description of Artificial Sequence: Synthetic probe
agctcctgcggcgcgtgcgccacctgcttctggaagatggccaacatcctcgaatcaaatrctaatcacaacctttcttccctgcaccggacagacaaaaagaggcagagctagcaagaag

SEQ ID NO: 6184 - DNA, 121 bp, Artificial Sequence
  Description of Artificial Sequence: Synthetic probe
ccatggtgcccttgctggctttctggtagccctgaagcaattgttaccacaccttgagctycccatgtgctttttctggaaaataaaggccaagtggatgccattcttcgtcatgtgcttc

SEQ ID NO: 6185 - DNA, 121 bp, Artificial Sequence
  Description of Artificial Sequence: Synthetic probe
ggacgatctcaagcaaaatgtcctacttcagttgcttgctcttgttgctaagcaaccggcktttcaccaattacgttcggttgagcaacttggctacataacactgctaagacagagaaat

SEQ ID NO: 6186 - DNA, 121 bp, Artificial Sequence
  Description of Artificial Sequence: Synthetic probe
cactaagatgagcaaagccatgaagaaatatgggaagaacatcttcttctcactctgtgartggggaaacgagaaccctgctacatgggcacgtggcatgggtaatagctggaggacaact

SEQ ID NO: 6187 - DNA, 121 bp, Artificial Sequence
  Description of Artificial Sequence: Synthetic probe
gagtatacttgtgaacagtttggactgggcaagacttaaaccaaatctcccgtggcttgtsgatgctgcaggatgtgttctgctcgattctttcattattcttcagttcctttatttccat

SEQ ID NO: 6188 - DNA, 121 bp, Artificial Sequence
  Description of Artificial Sequence: Synthetic probe
caatgaaatcggtggaaagcacggtatagggcgtattgatatggtggagaaccgcctagtsgggatgaagtcccgtggtgtctacgagacccccggcggcaccatcatggcagccgcggtc

SEQ ID NO: 6189 - DNA, 121 bp, Artificial Sequence
  Description of Artificial Sequence: Synthetic probe
gggcggcgccctgaacatgatcgacgaggagaaggtgatgatggagtcgctcatgtgcctrcgccgcgccggcgcggacatcatcctcacctacttcgcccgccaggccgccaccgtgctc

SEQ ID NO: 6190 - DNA, 121 bp, Artificial Sequence
  Description of Artificial Sequence: Synthetic probe
accttcaaatattgaaggtgattcatccaaatgctcatctccggaagctctcaacaaagtrcgaaagcagattgtggatcacattgacttgtggttgtcagaatgccaagaacaaggacac

SEQ ID NO: 6191 - DNA, 121 bp, Artificial Sequence
  Description of Artificial Sequence: Synthetic probe
caaagctttccgaagaatacaaggcgagctctgatgcagcaattagtcaagtctattgccrctgtacaaatgatctaggcttcagagctgaaagagtattagataaatgaatcatgggaac

SEQ ID NO: 6192 - DNA, 121 bp, Artificial Sequence
  Description of Artificial Sequence: Synthetic probe
tagtgaaggtggagagcctgcagacgcagcgatttgcaatgctggcagtcatgataatcgkatggtgggcagtcaggaaggtgattgtcttggataactggaagactgggtatagcattca

SEQ ID NO: 6193 - DNA, 121 bp, Artificial Sequence
  Description of Artificial Sequence: Synthetic probe
gtttcgactcaacggcttcctcatcaaaataacttgattgattatgatattgtgtgcgtcratctcgaacttcgctaactcttgcaccaatctctccgtttcatacaatgaaagaaattca

SEQ ID NO: 6194 - DNA, 121 bp, Artificial Sequence
  Description of Artificial Sequence: Synthetic probe
tgcagtgattgggatggggctatactcatacttctgtacccgagaaactcagcagaaaccygctgaagcctctccacaagtcacccaggtgaaggaaggtgaatcagaccctttgatctcg

SEQ ID NO: 6195 - DNA, 121 bp, Artificial Sequence
  Description of Artificial Sequence: Synthetic probe
ctctgtcgtcaccgctgcagataagggaggtgctacccatgttgacatagcatgtgaccargacttggtaaagcttgctcttaagcttaccaaccttccgatttgcgtatcatctgtagat

SEQ ID NO: 6196 - DNA, 121 bp, Artificial Sequence
  Description of Artificial Sequence: Synthetic probe
gtagctacgtcttggtcaaaagcattattcattttatgctttgcaccagtgttatattgtrcacacgtgaggtctcccacacctctgttctgttgctcatctatagcagatcgagctgtgc

SEQ ID NO: 6197 - DNA, 121 bp, Artificial Sequence
  Description of Artificial Sequence: Synthetic probe
cttcagtttttgcaacctcaatagcttccgaacaaaatccgggatgggattctccttgttyatgggtatatcagttccacagtatttcaatgagtacacttctgtcgcaggctttggccct

SEQ ID NO: 6198 - DNA, 121 bp, Artificial Sequence
  Description of Artificial Sequence: Synthetic probe
tttcctgctgggcccttggttggaaagtgcaaaaagccykggaacgactgaagatgaacgkacacagtacgagtggaatgctagaacacaggtgtcaatgtggtaygacgacacaaagacc

SEQ ID NO: 6199 - DNA, 121 bp, Artificial Sequence
  Description of Artificial Sequence: Synthetic probe
cccatggacacccttcttcctgtcgcacggctcgcccacgctctccatcgacgagaccatsccggcgaggcacttcttcaagtcgtggctgccggcggccatcgcggggtctgagccgccg

SEQ ID NO: 6200 - DNA, 121 bp, Artificial Sequence
  Description of Artificial Sequence: Synthetic probe
ttccaccatctgcaagggtcatttcggagagacatattatctcrgttgtgcctgttacccragtcacaatgtcttaccgcaagcgatctttcagcttctatgtcgttggctacagcaggga

SEQ ID NO: 6201 - DNA, 121 bp, Artificial Sequence
  Description of Artificial Sequence: Synthetic probe
gatgcaagcagttgcggtgaagagccaactgcaacagattgccagacctatgtacagcaayccaccactttcatggggcacttagttgtttccacaatccttggtgatccagcactgaaaa

SEQ ID NO: 6202 - DNA, 121 bp, Artificial Sequence
  Description of Artificial Sequence: Synthetic probe
gatcaagcagttcgtcgcaaaagaggttgttttctacaagaggatcagcaaagtgttcttygcggaatccattccgaagagcccttccggcaagatcctcaggaaggacctgagagcaaag

SEQ ID NO: 6203 - DNA, 121 bp, Artificial Sequence
  Description of Artificial Sequence: Synthetic probe
gttaactgctttggggatatctacatatttaaccttgaggtccagaggcaacactggttcrtaccgagaatgaatgatggttctgttacctctggtggcttttgtcccaagaacaatgccc

SEQ ID NO: 6204 - DNA, 121 bp, Artificial Sequence
  Description of Artificial Sequence: Synthetic probe
ttgaggattttgtgaagaaccacttttgcaagcgtggccactacattctcaaagcttgtgwggcctacttgcaaggagatgtggttggcacgctcaatgacgatgcctgctctactgagag

SEQ ID NO: 6205 - DNA, 121 bp, Artificial Sequence
  Description of Artificial Sequence: Synthetic probe
gtattctccctgtgaaagcttgaatatattcttctttctgtcaatgattttcaaggatccrtttggttgccactcaccaacatccccctgtgtgaaaccatccatcaatcatcacttcctg

SEQ ID NO: 6206 - DNA, 121 bp, Artificial Sequence
  Description of Artificial Sequence: Synthetic probe
tcggttatccattgtgttgtactccaaggcgaataaggaagagtagttggttccctgttgyggttgagctgtgtagtgctggttgcggtgagtttgcggaggaactgtactttatctcgat

SEQ ID NO: 6207 - DNA, 121 bp, Artificial Sequence
  Description of Artificial Sequence: Synthetic probe
acaagttttggtcgcggtgctgaaagtagtcattgttactaatgctgcaacagggcagccracagggtctgcatatgtagaatttttgcacacggagtcagctgagcgagctctgtctttg

SEQ ID NO: 6208 - DNA, 121 bp, Artificial Sequence
  Description of Artificial Sequence: Synthetic probe
taagacacgccaagcaaaaactcttgctggtggtggagcaaacccgcttatcttgactgcrtcatggtagagtgaatctggatgctttctgaagaacttcttcacataaatgtcctctggc

SEQ ID NO: 6209 - DNA, 121 bp, Artificial Sequence
  Description of Artificial Sequence: Synthetic probe
ttaacaagaagtacaaaacacgcttcctggatgatttcaaggatctttgggatgaaaacartgaatggtatgctgaaacaaaggagctaaacaatggcaacccagtggaattcgatgggta

SEQ ID NO: 6210 - DNA, 121 bp, Artificial Sequence
  Description of Artificial Sequence: Synthetic probe
agcacattcaagtaaacacattgcttttgtgaggcacgaatataatcagcctgatcagaaygactctggttgaaaaatgaataactactcaaaaattggtacaatgcttgaagactattca

SEQ ID NO: 6211 - DNA, 121 bp, Artificial Sequence
  Description of Artificial Sequence: Synthetic probe
gtggcctgtcaaatgatgttcatgtccttggatgcaacataagagttctcatttccagcgrtactagtatgcgtatacacaggatggctgatttttgcgcagggtttcgatttacatctca

SEQ ID NO: 6212 - DNA, 121 bp, Artificial Sequence
  Description of Artificial Sequence: Synthetic probe
cttgactgcccaacatgatagcctaaatactgaaccgaatccgatcattcttcactgttgratattttatcttgctttttgttcaaattagaatatcgctatgcagatcgatcgtccctgt

SEQ ID NO: 6213 - DNA, 121 bp, Artificial Sequence
  Description of Artificial Sequence: Synthetic probe
tgccgcgccttggtggagctcaaccatcatcctggagcactccattagctgttcttctgartacttggtgtggagctcgcagcaccggttccaggacttgaacccattgatggtgcattgg

SEQ ID NO: 6214 - DNA, 121 bp, Artificial Sequence
  Description of Artificial Sequence: Synthetic probe
aaaatcttgctcacgttattaacatcaaactggcaaaagatggggggttcttggaggcctygaagtaattgatgctgcaagaaaagctggtattgcacttatgattggtggtatggtcgag

SEQ ID NO: 6215 - DNA, 121 bp, Artificial Sequence
  Description of Artificial Sequence: Synthetic probe
gaccgctcctctgtagcttaccatggagttccttctgaagctccatgatcaattgcaagcytccgagttcatcgagaagttttgtgatcgtcggtgaagctctgtgacagtaattctgtta

SEQ ID NO: 6216 - DNA, 121 bp, Artificial Sequence
  Description of Artificial Sequence: Synthetic probe
tggtctatttatagacttcagcctaattatgtattggcttttttgtttgttgtatgttatytgtaataattagccgaatcatgctgttgtgggttattggactttttgtgatgatcaatat

SEQ ID NO: 6217 - DNA, 121 bp, Artificial Sequence
  Description of Artificial Sequence: Synthetic probe
tgatttgtcttcataagcttttaacaaattgttcaaaccttcgtgcccaatcttctcaagraaccattttatgtagggacctggtaaacctttgagtgcattgaaacataggcacgtatcc

SEQ ID NO: 6218 - DNA, 121 bp, Artificial Sequence
  Description of Artificial Sequence: Synthetic probe
ccaactcctagagagagcaactatgcaaatgctcctagcccatacgtgccttccacacctrttggtcagccaatgacgccaaattctgccgcataccttcctggtacaccaggtggtcaac

SEQ ID NO: 6219 - DNA, 121 bp, Artificial Sequence
  Description of Artificial Sequence: Synthetic probe
atgtctgggagataacctcctttcctttccttagccacatgcctcccctggcattgtacaycggggcgcatttcatttcggcggtctaaatgccagacgataaggctggattgttttggct

SEQ ID NO: 6220 - DNA, 121 bp, Artificial Sequence
  Description of Artificial Sequence: Synthetic probe
tcttccccttcggttggggccccaggatttgcatcggccagaacttcgcaatgctggaagycaagatggcgctgagcatgatcctgcagcgtttcgagtttcagctatcaccttcgtacgc

SEQ ID NO: 6221 - DNA, 121 bp, Artificial Sequence
  Description of Artificial Sequence: Synthetic probe
aacaatgccacgagcaccgccatcaccgtcgaggggcttgtcgtgtatgacatggcatcarccgagagtcgggccttcttggctgatgacatttagatgaaaatagccaagaactggtaaa

SEQ ID NO: 6222 - DNA, 121 bp, Artificial Sequence
  Description of Artificial Sequence: Synthetic probe
agatgaaattcaaaagctacaacatgccctgtcccagaagatggatgcatccggttacagrgagaaggctccgccgagtgtccaggaggaggacatgagaaaactcactgctttcctcgag

SEQ ID NO: 6223 - DNA, 121 bp, Artificial Sequence
  Description of Artificial Sequence: Synthetic probe
gaaggcaaaacaatttacgatctcaagttaactgttgcgaaaataagattaccgaacacaygataccagtgcaaacacattcagcaacaaggtcccgacacaatgaaacaggctaaacatg

SEQ ID NO: 6224 - DNA, 121 bp, Artificial Sequence
  Description of Artificial Sequence: Synthetic probe
atatcctgtatgatccttctgttagtcagaggggagctcttgtatgtgtcggacgagcacygaggaagaagtctgttgatgattatgaggtgcaacctttaatacacaatccacatgcact

SEQ ID NO: 6225 - DNA, 202 bp, Artificial Sequence
  Description of Artificial Sequence: Synthetic probe
atgccatgtacatatcagatgacagcccaaagtccatctttgaaattcctggagcaaaggaggttgcccttgagactgcatctttctctaaatatgctggwttcactggtgtgcgtctgggttggaccgtggtccctaaggagctccttttttctgacggacatccagtggctaaagacttcaaccgcatagtctgcacttc

SEQ ID NO: 6226 - DNA, 121 bp, Artificial Sequence
  Description of Artificial Sequence: Synthetic probe
cgtggccgtcgccgtcgtcctgctgtaagccgggcgatacagtatggtggtaaatcaccgwccgacgtacgaccctcgcgaggtgtccttatccggcgagcctcttttggcgtgacggagg

SEQ ID NO: 6227 - DNA, 121 bp, Artificial Sequence
  Description of Artificial Sequence: Synthetic probe
gcctggccttttgggcattctggttggacatttgtactacttcttttcagtgttgcatccsctagccagtggaaagaactacctcaagactcccatgtgggtacacaagattgttgctcga

SEQ ID NO: 6228 - DNA, 121 bp, Artificial Sequence
  Description of Artificial Sequence: Synthetic probe
gggaagatagactaacaagaactggaaatctaccaacaaactctggaattaatccatatgmaatgagatcaccactttcaaccgattccagcaatgtggatgtgatctcasmatttataac

SEQ ID NO: 6229 - DNA, 121 bp, Artificial Sequence
  Description of Artificial Sequence: Synthetic probe
ggagtctttggaggataccaaagaggatgctgctgtctgaatccgccgtaaacctggagcragctgtagcaagtcgttgtagctagagcaccattgtttgggagctcacattgcactgtta

SEQ ID NO: 6230 - DNA, 121 bp, Artificial Sequence
  Description of Artificial Sequence: Synthetic probe
gactgtcatgcgcaaggagttccgcaagatggctaaggccgtcaagaaccaggtcagcgayaactattacaggcctgacttgaccaagcctgctctcgcaaggctgagtgcagttcaccgc

SEQ ID NO: 6231 - DNA, 202 bp, Artificial Sequence
  Description of Artificial Sequence: Synthetic probe
aaatcatcgtgaatggtgtgtctggtttgcacatcgatccttaccacagtgacaaggctgcagatatcttggtcaacttctttgagaagtccaaggcggayccaacctactgggacaaaatgtcggaaggaggcctcaagagaattttatgagaagtacacctggaagctgtactcggagaggctgatgaccctgaccggtg

SEQ ID NO: 6232 - DNA, 121 bp, Artificial Sequence
  Description of Artificial Sequence: Synthetic probe
aaagccttctgtagacagggagaaagtggtgtcaccttcagctgttaagtctaaccatcakacgtcagcattccatccggtccagcaccaaacgtctccagaaaaatgtggtagggaatgg

SEQ ID NO: 6233 - DNA, 121 bp, Artificial Sequence
  Description of Artificial Sequence: Synthetic probe
tgggaacctgcagagccaacatatgctgctcaatggcaatgtgttggctactgatgccaayggaggcatccccaagctggagcctgtgcaggtggagggaacaaagcccataaccgtgggc

SEQ ID NO: 6234 - DNA, 121 bp, Artificial Sequence
  Description of Artificial Sequence: Synthetic probe
aagggtgcaatccgagtgggacaagctcggggaggtgggcttcaggtacaagtacaagatsgagcagatactagacgaaagcatcggctgcacggtgaggctgggtggcctagacggatcc

SEQ ID NO: 6235 - DNA, 121 bp, Artificial Sequence
  Description of Artificial Sequence: Synthetic probe
gtgtattggctcatcaccacacgggactgcctagtgaccctcttgttgtaaagaaagtagygacctgtgtaacatcagctatatgtcaataaacattaggacgtggttatatataacaatg

SEQ ID NO: 6236 - DNA, 121 bp, Artificial Sequence
  Description of Artificial Sequence: Synthetic probe
ttcttaggaaacacatagcgtggggcttgtcccgaggccccgtgcaggcagcccaacacayggcaacacccgaaacttgcatcagatgggcttggttcgggttgaacgcagggaaccaatc

SEQ ID NO: 6237 - DNA, 121 bp, Artificial Sequence
  Description of Artificial Sequence: Synthetic probe
ttggttgggagcccaaatacccaagcttcacggagttccttggtgtcagtaattaatagcygcttgtgcacacgatgaacagttcttcttaccttgagtggatagcagtgtcaaggggatc

SEQ ID NO: 6238 - DNA, 121 bp, Artificial Sequence
  Description of Artificial Sequence: Synthetic probe
cagccacagttgctacactagtagctctaaaagagcgtataagtgactctaatggtgctgsttctgtgcttgattctgctatccagtggtggaagaatgccatgacagaggataacaagtt

SEQ ID NO: 6239 - DNA, 202 bp, Artificial Sequence
  Description of Artificial Sequence: Synthetic probe
tatcttctccagtaggctcagagaaatcacgggtgtagatagcatctctaccaactgactgactcacgtcatcaacaccttcctggaagaaggcacccttrtggtagtacttctgcataaagttccacttctgtttggcctcacgagaaggttttggattcttcttgtcccattctcggcgctcctcctcagtcatattcct

SEQ ID NO: 6240 - DNA, 202 bp, Artificial Sequence
  Description of Artificial Sequence: Synthetic probe
gcatcaagttcagagagtaaaattcctactaatggtgcaaatatcgagaaatttgtaacaaatatgtttgagatcatctccccattgctcctgtctcagcyaaaagaaaactgaatattaaggaggaagagctttctccaatattgaatggctgtaaagaaaaagctgccccagatctcgagagatttacgagtttgttcaa

SEQ ID NO: 6241 - DNA, 121 bp, Artificial Sequence
  Description of Artificial Sequence: Synthetic probe
gcctgccacttcgacccctacggccccatctacaacgaccgggagcgcgtccagatcttcwtttcggacgtcggtgtggtggccacggcgttcaccctcttcaagctcgcttcggtgttcg

SEQ ID NO: 6242 - DNA, 121 bp, Artificial Sequence
  Description of Artificial Sequence: Synthetic probe
atggcattccttcggaatacacacggacggtcctacttcaaaccgtcatggagaaaatagrcgcagctcaacagggaaagaagaaaccaaagaaacaaagcagcccagatcagccttcagc

SEQ ID NO: 6243 - DNA, 121 bp, Artificial Sequence
  Description of Artificial Sequence: Synthetic probe
agagaagacttcagcctcagaagctcatgtgttaatttctgagacaaaggctgaaccttcwgaagaaaaagttttagctcttgatacaagtatttcaaacaatgaggatgcactttccacg

SEQ ID NO: 6244 - DNA, 121 bp, Artificial Sequence
  Description of Artificial Sequence: Synthetic probe
tgtgtgcccattctccaccacaagtgccaatgccatgcccgacgatacgtgcttttccatrtgacagtgcaagaaccacaccccaggattattcgcgacaaatcggatggccatccatcca

SEQ ID NO: 6245 - DNA, 121 bp, Artificial Sequence
  Description of Artificial Sequence: Synthetic probe
ttacaacaagagcgtgctgaaagggaaagattgttggaagaggagcgaagatcaagactakaatttgaaaaagccatgatgacaaagttcaaccaacagatggctaaactcagccaacaga

SEQ ID NO: 6246 - DNA, 121 bp, Artificial Sequence
  Description of Artificial Sequence: Synthetic probe
ttccatttcataatccttgtcgtggtttcagtttaaatttaaactaaaaccacgacaagawttatggagcagagggagcacatcttatatgcacacttcaatcaaactgaaaacttagcct

SEQ ID NO: 6247 - DNA, 121 bp, Artificial Sequence
  Description of Artificial Sequence: Synthetic probe
gagtggtgccaacttgcaatttcgaacgagccgccaacaaatgaacatccgaatataggartgtgaattcctttcggttgttgttatgaacatttcttccgcaccgggagcttgaattagc

SEQ ID NO: 6248 - DNA, 121 bp, Artificial Sequence
  Description of Artificial Sequence: Synthetic probe
tctgcggcgtgctattatgaggctcctggaggacagtctcgcggaaaagatgctggctggygaggtgaaggaaggtgactctgctattgttgatgtggatgcggacggtaaggtggtagtt

SEQ ID NO: 6249 - DNA, 121 bp, Artificial Sequence
  Description of Artificial Sequence: Synthetic probe
tccgaatctatggcgacagtcatgacgtgacctctcaggcaataacaaatatcagctgatyagagtaaatgccaagggcatgaacgagggctgcaaatgggtagaaatgtttgaggatgtc

SEQ ID NO: 6250 - DNA, 121 bp, Artificial Sequence
  Description of Artificial Sequence: Synthetic probe
gcgggactgtatgcgagagagctgatggatagttccaaaaagattgttacggagaatcaargggcaccagggatgagaacagaggaggttcttgctatggctgcagaagaagcacggtccc

SEQ ID NO: 6251 - DNA, 121 bp, Artificial Sequence
  Description of Artificial Sequence: Synthetic probe
aaggccaacgccgaggcgttcgctcatggctggtaccactccggtgaccttggcgtgaagmatcccgatgggtacatcgaagtcaaggaccggatgaaggacatcatcatctccggcgggg

SEQ ID NO: 6252 - DNA, 121 bp, Artificial Sequence
  Description of Artificial Sequence: Synthetic probe
gttggtatggagcgctcgccccatgccctctaggattaacagatctgcatccttggcagcwgctgcaagctccgagctaacctgccggaaatcaatacaggggctgccgcatccattctct

SEQ ID NO: 6253 - DNA, 202 bp, Artificial Sequence
  Description of Artificial Sequence: Synthetic probe
aggaatcatcctggagcagatgttttcatcttaaatactggtaacagggatactatgagagagggtatctacaatcagttgagcagattgatgcagaagasgtgataccttagtggctgaattaggagcagataggagcagttgttctcacctcctcaaatactggtaaaagggataccacaagagagggtatgtactatca

SEQ ID NO: 6254 - DNA, 121 bp, Artificial Sequence
  Description of Artificial Sequence: Synthetic probe
tgttctcagtttcctaactggttcattgtctctttctaagcacgttgtcgagacaacaaartactttaacgtgacagttagctttggaagtgtgaagtcactgataagcatgccctgcttc

SEQ ID NO: 6255 - DNA, 121 bp, Artificial Sequence
  Description of Artificial Sequence: Synthetic probe
agcaccaccatcgtcaccacaactatgatgactagatgtccagcatggtcttgacatgagkttgtcatcctcacgcccagtactacacgaataaaaatggcattgtttccccttttgggta

SEQ ID NO: 6256 - DNA, 121 bp, Artificial Sequence
  Description of Artificial Sequence: Synthetic probe
tcgaggatccatgttgcgcatgctaatgcacattgttccgatgcacaactgagcaatgctrttcagtgtttcagtccagtaagctcatgtttgcagatgaagacgtctagtgcagaaaagg

SEQ ID NO: 6257 - DNA, 121 bp, Artificial Sequence
  Description of Artificial Sequence: Synthetic probe
ccagcaaggggagtgccactcaacaaagtcacacactgttctcgagaaatgcattgggaarcaaagatgtgccgtcaccatctcccccgacaacttcggcggagatccctgccctaacacg

SEQ ID NO: 6258 - DNA, 121 bp, Artificial Sequence
  Description of Artificial Sequence: Synthetic probe
aaaaatgaaggcagttctcttgttgacagtatgactaaagctattgatgaggttatcaaamtcagagagtgtgacatctacagctacaacccggactccgacggtgatccgtttctagaga

SEQ ID NO: 6259 - DNA, 121 bp, Artificial Sequence
  Description of Artificial Sequence: Synthetic probe
tgaatatggtgaaggaaatgagaggaggttgacagggttacatgagacagctagcatatcrgacttttcatggggtgttgcaaaccgtggctgctctattcgggtggggcgagacactgag

SEQ ID NO: 6260 - DNA, 202 bp, Artificial Sequence
  Description of Artificial Sequence: Synthetic probe
caatcctgctaggatcagagttcttagcctgcaagtattaccagcaaagtcctcccgaggatttggccctgggaagaatgttggttaggcctggaaatcaktttctagatgatcaagtgatgaaggacgccaacctgctcaccgccgacaactatgggtcggtgaagaaggtgtatgtggtagccaaggccgatgaatccag

SEQ ID NO: 6261 - DNA, 121 bp, Artificial Sequence
  Description of Artificial Sequence: Synthetic probe
caacaagctctgggttttcggtgctttgctacaatggctacgagcaccagttccagcagcygagcgagggcggcatccggccggttctcctgatgtgctctgcctgctccgcggtcctcgc

SEQ ID NO: 6262 - DNA, 121 bp, Artificial Sequence
  Description of Artificial Sequence: Synthetic probe
ccaacctgacaatgccgacattctatccagcactgctccctgttccacttaccctttgggmtccaaatgttactaatgtggaagtagcaggcacatcccatgaaatcctaaagcccactcc

SEQ ID NO: 6263 - DNA, 121 bp, Artificial Sequence
  Description of Artificial Sequence: Synthetic probe
tcattgttggctaacttacttggaatggttgcgattttttctcattcagaggaaccggcaygctttaattggcagggccatcgatgatcatgatatgcagcgagttcttgaatttctgaaa

SEQ ID NO: 6264 - DNA, 121 bp, Artificial Sequence
  Description of Artificial Sequence: Synthetic probe
aaatccaaccttgggatcaagcacatcgtttgatggatctctggacgagacaatggatggwaggcgaagcctggacaacgagctctccttcattcacaaggccaaggagtctggcgttgtt

SEQ ID NO: 6265 - DNA, 121 bp, Artificial Sequence
  Description of Artificial Sequence: Synthetic probe
agctcaaccgacagaaccttgttcttgtaatcgacgttgatgaatccacttatacctttcwttcccaggtgctcattgaacagccaagtcaattgtcgcttcaaaaggccagcatttctct

SEQ ID NO: 6266 - DNA, 121 bp, Artificial Sequence
  Description of Artificial Sequence: Synthetic probe
ttgaactgttaacagcatctgtgttcaggctttctgcaggagagacttccattcccaaatrctcagagcattctgaaagtgtctatggatagcagtttccggttctgcgctggaggtgcag

SEQ ID NO: 6267 - DNA, 121 bp, Artificial Sequence
  Description of Artificial Sequence: Synthetic probe
ctaaccatggctccaagatctaccttctgctgcttgctctgggctgctgcaagcctaagtygaaaaaataacatgttgtactcagaactttgtacatttttgtagtttgagcttatagtcg

SEQ ID NO: 6268 - DNA, 121 bp, Artificial Sequence
  Description of Artificial Sequence: Synthetic probe
caagacctccgcccagggcctggtgcggacaggttaaagaaactcgtcaaaggcttgctcwcccaggaaggctatgatgacaagcattgcgtatgaaacttgatgattctggggtaggcta

SEQ ID NO: 6269 - DNA, 121 bp, Artificial Sequence
  Description of Artificial Sequence: Synthetic probe
tgcgcctctcactgttagctcatcagccagattacatgctaatcactacgagagttcttgyccggaagttgcctgcagtttcttgtggcgagaagcaatgttggtcatctttctactgctt

SEQ ID NO: 6270 - DNA, 202 bp, Artificial Sequence
  Description of Artificial Sequence: Synthetic probe
aagaaattctgacgataaatgtaaagcccggttggaagaaaggaacgaagatcacmwttcctgaaaaggggaatgaagctccaaacatgatacctgctgayattgttttcatcattgaagagaagccccatgacatcttcactagggaaggaaatgatctcgtcgtgacagagaaaatctccttagttgaagcactgactgg

SEQ ID NO: 6271 - DNA, 121 bp, Artificial Sequence
  Description of Artificial Sequence: Synthetic probe
aatgggggagatgcatgacgcattttgggaggcagttgtggcaatgaagaaggaccattcrtctgttgaaagcgacgattcatctgactagggctggggctgagttcctgctgggtcgagt

SEQ ID NO: 6272 - DNA, 121 bp, Artificial Sequence
  Description of Artificial Sequence: Synthetic probe
aacagggattgatcttgtcatacgccttccgagctcttaccctctgcgccacgttgatgtygaatgcacgagaagcctgggtatcagcgaagtgaagtgcaggaaatggctgctctctctg

SEQ ID NO: 6273 - DNA, 121 bp, Artificial Sequence
  Description of Artificial Sequence: Synthetic probe
  modified_base (121)..(121): a, c, t, g, unknown or other
agccaacactttgaaagctcaagcacccaatgtatagcagaggcttattgcgttgctgtcrataagcttcttgattcttttgtgcatagtccgcatagttcatgtacatagtctccaggtn

SEQ ID NO: 6274 - DNA, 196 bp, Artificial Sequence
  Description of Artificial Sequence: Synthetic probe
cccggcgttggtgcgggctttcccgggatgaccgtagtcctgggaagatcgtcggtggcggtctgttgtactatactgtacgtatgaggagagcmgggagggcggctggccagcgacctcctcgcatcctcggcggcggcgggagagacaaatcgaccgttatacggcatgccattgccggcaacaagtcgacgga

SEQ ID NO: 6275 - DNA, 121 bp, Artificial Sequence
  Description of Artificial Sequence: Synthetic probe
ttgtccctcgtgttgctctgggcgttcagggagactctgaagatgtgtgtaccaagataamaacgatgaacgcagagaaggatcttctaaaagctttggaggagaagttgagactagcaga

SEQ ID NO: 6276 - DNA, 202 bp, Artificial Sequence
  Description of Artificial Sequence: Synthetic probe
ttgctacaatcttgacttacccattaatcaggtgcaaggtcatgattcaggcagccgaccctgatgatgatgatgacgacgacgaatctgagaggccaggscattcaagacctcccaaaacaatgctgggtgccatgcatgctatgtggagcaacgaaggcatcccgggcttcttcaaaggaatagaggctcagatactgaa

SEQ ID NO: 6277 - DNA, 121 bp, Artificial Sequence
  Description of Artificial Sequence: Synthetic probe
tggaaatgacgagtgttatgatataaaatccagctacggtgtgcaggttgtacaggaaacktgcaaacagcctacgccagcgtccaggttgacgcacaagacgcagctcgcgatggccgcs

SEQ ID NO: 6278 - DNA, 121 bp, Artificial Sequence
  Description of Artificial Sequence: Synthetic probe
cagccgtataggtttttgacctaatattcccgaagacgcaccatcacgatgatgtttagakgatcgtcacagggatgcatatccattagtacaattgcgagcttgctgagatactgcagct

SEQ ID NO: 6279 - DNA, 121 bp, Artificial Sequence
  Description of Artificial Sequence: Synthetic probe
tcagcgctactctagtgacgtccagtattgtgaaaccaggacgtcttttactgataacagyctttatgctctagccctaaactgtcaaatgcttcagatcgtagacctcaaatttacagga

SEQ ID NO: 6280 - DNA, 202 bp, Artificial Sequence
  Description of Artificial Sequence: Synthetic probe
taccacaagcaaaggtacaacacaggagaaccagaacttctctttttgtgcttctggttatatcttcatactcataattccatcatgttgcccccatgagyaatgtttggtataatgttctgcagaaaggatgctttggcacaagaatcggtcagaaaatgacccaaaacggcaatggttgctgtactgctcctgattttct

SEQ ID NO: 6281 - DNA, 121 bp, Artificial Sequence
  Description of Artificial Sequence: Synthetic probe
gccttcacatcaaggttctccttgtcgttaataggcttggtggtctgactcctgatcctcytgatcttggggctttccagccccttatgcccaaacccatacagttgcagcacctggttat

SEQ ID NO: 6282 - DNA, 121 bp, Artificial Sequence
  Description of Artificial Sequence: Synthetic probe
ggagagaatcatccgggcatttttggttgaggagcagaagattgtgaagaaggtgctgaaratccagaagaccaaggaaaagaccaccaagagctaaactgttgtgccgagataggcattc

SEQ ID NO: 6283 - DNA, 121 bp, Artificial Sequence
  Description of Artificial Sequence: Synthetic probe
acatccaggaactcgcagtatatcatacgagggaacgcatcagccctaagcatgaacgacytttccgtttcacgctcttgttctgtggcggtgtccacggccacgtcgtcggaccacaggt

SEQ ID NO: 6284 - DNA, 121 bp, Artificial Sequence
  Description of Artificial Sequence: Synthetic probe
agcgtggcgctgacgccgcacgtggtccggcagaacaagaagaaggggtcggtcaagacgrtggcgaggttcggcgtctgcgacctcatggacaacatcggagcggacggggacaagacgg

SEQ ID NO: 6285 - DNA, 202 bp, Artificial Sequence
  Description of Artificial Sequence: Synthetic probe
cctgcggctgcaaactcaccaggaacccccccccactctcaaattgtacaacgctgctgcactcctccaagcttggacaagggtgcgagtttggtctacarcccctactcttcctcatcttcatcctcatcttcctcttcagcttctttaagccactgaataaagcatcagactgtttaacgaaactttatcagactcatcg

SEQ ID NO: 6286 - DNA, 121 bp, Artificial Sequence
  Description of Artificial Sequence: Synthetic probe
ccttttggcctccttgtgctcgctgacgtcaggcaccatggcggagacacggaacagaccrccgtctacttctacgttgccagaggccttgacggcggcctgcacacgcacttctgccatg

SEQ ID NO: 6287 - DNA, 121 bp, Artificial Sequence
  Description of Artificial Sequence: Synthetic probe
gaatgcgatgtaactacaaaagctatcttagtaccgaccctggtgctacttgtggggatgygacttcgtcgggtgcaatctttcgcggcattttcttcttctgcgtgtactttgcgtagga

SEQ ID NO: 6288 - DNA, 121 bp, Artificial Sequence
  Description of Artificial Sequence: Synthetic probe
tctgttcaattcaaaacctaaactactagtggccctgccaaatgacataccatcaaatggmcgaatacatgcactgacttctctatacttgggaaaggacatggagtatcaatattatcca

SEQ ID NO: 6289 - DNA, 121 bp, Artificial Sequence
  Description of Artificial Sequence: Synthetic probe
tgccttcttcaggttcttcctcttcaccctgccagggaggcctccaccaaatgggcttgtmagagaaaagtcaatgtgcttctcagattcaaccctcaccatgaaggaagggacattgaca

SEQ ID NO: 6290 - DNA, 121 bp, Artificial Sequence
  Description of Artificial Sequence: Synthetic probe
tctcgctgctgtggatgtccttcacctcccccgttcgaagccatggccgtgctggtgatgmtgctgctactgctagcccggcgaagaagatggaaccgcccaggactcgcacctttctgca

SEQ ID NO: 6291 - DNA, 121 bp, Artificial Sequence
  Description of Artificial Sequence: Synthetic probe
ttgcactcttcaaggagaagaaggagaagcccagatcttagattgctttttttataggcarggatggaatggacagttgaatctctacatgtttgaggaggaaagttgcctgctatgttta

SEQ ID NO: 6292 - DNA, 121 bp, Artificial Sequence
  Description of Artificial Sequence: Synthetic probe
atcagctggttacgcgccgatccgcttcaaggaaaagccgtactggatcatcaagaactcrtggggcgagaactggggcgagagcgggtactacaagatctgcaggggtccacatgccaaa

SEQ ID NO: 6293 - DNA, 121 bp, Artificial Sequence
  Description of Artificial Sequence: Synthetic probe
cggagactccgagaagtccaagtcagaggtcaacgacgaggatgaaggcagcgaggccgaygagtgatgcgtccgtaccagcaagcagcagcaggaaggggaaggaagtcaggtctctcac

SEQ ID NO: 6294 - DNA, 121 bp, Artificial Sequence
  Description of Artificial Sequence: Synthetic probe
caagatatacttccccgtcatctacgacatcaagcacctcatgagattctgcaatagcctmcacggcgggctcaacaagctcgccgagctgctcgacgtcgagcgggtcggaatctgccat

SEQ ID NO: 6295 - DNA, 121 bp, Artificial Sequence
  Description of Artificial Sequence: Synthetic probe
atgagcttcgccctccgtccttggttgaggtctaaactcctagtcatgaaatgtcacatcyttttgtggtcggagtcttctgcgaggctgtcactgttctcggtcctagctaggtttctat

SEQ ID NO: 6296 - DNA, 121 bp, Artificial Sequence
  Description of Artificial Sequence: Synthetic probe
ttagatgagatgtggttggtgtaagactctgtcggtgatgttcttttggtttgcgatgagscaaacgtatgttggaaactattattgttacttgttagcaagtaatttcgtcctgtgcttg

SEQ ID NO: 6297 - DNA, 121 bp, Artificial Sequence
  Description of Artificial Sequence: Synthetic probe
tgctctggctcggagacctcttcatcttcccgacgacgtcagtggccgccttctcctcctsctgctgctccaccttcaccgtcgcggcggcgaccacgtcggcacgacggtcctcctcaga

SEQ ID NO: 6298 - DNA, 121 bp, Artificial Sequence
  Description of Artificial Sequence: Synthetic probe
cctggatggagtgctacatagtcccgaaaaaaaaaagctgacccagctgacccagccgaasaagctgatcctgctgaaccggctgagccattggattgggatacacgcattaacataatac

SEQ ID NO: 6299 - DNA, 202 bp, Artificial Sequence
  Description of Artificial Sequence: Synthetic probe
cttacttccgaacatatgtggggttgagtcttaactctgaaatttgacagataatgaacaaatacatgtgcggttcctgttttgctatcctgcctcactgyaaatgagaagaaaagaacaggcaaaaatgaccatcctctattcaaaaaatcttctcaccagttgagaaaatcaagaaaatgactgaactaaaaatacaaag

SEQ ID NO: 6300 - DNA, 202 bp, Artificial Sequence
  Description of Artificial Sequence: Synthetic probe
tagagcgaaaaccaccacgctacaggatacaagtgatccacccttgtgctaccccctttggtgccgttccccagagccacaagaaacttgattccttcctyctctttgtaaagtttttctgtgaatcttgtacctccaggcttctagcgagatttgtatcatagcaaaggtgtaatgttctgctggctaccaggcttgtata

SEQ ID NO: 6301 - DNA, 121 bp, Artificial Sequence
  Description of Artificial Sequence: Synthetic probe
gtatgtcaacgagatacttgcacctcctggattcatgatgggaaggaagtgcttgagtaargaaatatacgagtaactagatgctgaaactgcagcaagatagccryttcttgatgtctcc

SEQ ID NO: 6302 - DNA, 121 bp, Artificial Sequence
  Description of Artificial Sequence: Synthetic probe
tcagataatccatcgagaacatggattgactaaacctgcaattgacatcttcagaggcctyacatagcctaacccatcgtagaaccagcggcttaaccagcaatcgagaaggcatcggcaa

SEQ ID NO: 6303 - DNA, 202 bp, Artificial Sequence
  Description of Artificial Sequence: Synthetic probe
agaagggcatcgacgagatcatgatcccgttggcagcgaaagaagggatcgactggctggagtacaggaagacactgaagaagtcggagcaatggaacgtsgaagtctactgattcttgctctgaacattttgtgtgcatatgcgcgctgcgtgcgatcaaggtgtacgatatataaagtagtagataaaaggtgcattcct

SEQ ID NO: 6304 - DNA, 121 bp, Artificial Sequence
  Description of Artificial Sequence: Synthetic probe
cagagaacggttcaccagcctaagcttaaagctgcagaaggatggatcgttgcaggtaacragtacccaatagtagacgattaacgcaatagacaagttgtgaattccagatgataaaccc

SEQ ID NO: 6305 - DNA, 121 bp, Artificial Sequence
  Description of Artificial Sequence: Synthetic probe
acctaatgcttcctgggtatcttgtatagcttttgatgctgcagttatggcggtagcctcrtccatgaagctgaccttctgggataaccaaacttcattcgaagcagtgtccgctagaagc

SEQ ID NO: 6306 - DNA, 121 bp, Artificial Sequence
  Description of Artificial Sequence: Synthetic probe
ctgctccaatgggatggttcagttgttgactaacagctggctcagcaagagttctttttgytaactgaagaagaaagggaccgaggttggtataactgagaaaggcaggatagcggctctc

SEQ ID NO: 6307 - DNA, 121 bp, Artificial Sequence
  Description of Artificial Sequence: Synthetic probe
gaggttgcgatttttccacattcagttcacgttttgctgtacatggtttatgggttgctcygtcggtacaatcgaacctccttttgttgagcgtcagcgctggagtttgtcaggtgctggc

SEQ ID NO: 6308 - DNA, 121 bp, Artificial Sequence
  Description of Artificial Sequence: Synthetic probe
gtccttccatctgccgtcaatgtcatgtgtgctacaggttagccagatcatctaccttctytccacgcaaatcggcccagagcatcctcagaaagatcagataactacaacgcgttcctct

SEQ ID NO: 6309 - DNA, 121 bp, Artificial Sequence
  Description of Artificial Sequence: Synthetic probe
ccttgatcaagctgttgttgagaagactttgaagccttgccttgtcgagctgagcgaggaycctgacgtggatgtaagatactatgcaaaccaggcccttcaggcatgtgatcaaatcatg

SEQ ID NO: 6310 - DNA, 121 bp, Artificial Sequence
  Description of Artificial Sequence: Synthetic probe
aaggagagttcacatgacaggcacacgcacacatatatacgcatgcaacttaacccgacgrcgactttgcttgctgagaaacctcatgtgcttaattagccgctgccgccgagcacggact

SEQ ID NO: 6311 - DNA, 121 bp, Artificial Sequence
  Description of Artificial Sequence: Synthetic probe
cgtgatcgagctcccaaagaaagaagagctcaaatctgtgcttgacaaggtgagagacttmgtcggcgaggtaacctccggcgccaaagaatcatttgcacagataacaggaactgccagc

SEQ ID NO: 6312 - DNA, 121 bp, Artificial Sequence
  Description of Artificial Sequence: Synthetic probe
ttgaaggcggatccgtagatggcctccgtcccgaacttcttcttgtcgtcccagaacttgktctccgattggatggtggcctggagcgggtgcgccggcgcgagctcggccctgacgctgt

SEQ ID NO: 6313 - DNA, 121 bp, Artificial Sequence
  Description of Artificial Sequence: Synthetic probe
gaacaacaaggggctggaggctgccctgaaggacctcgcctcgatcaccggccagtacccygtcaagaccaaggccaagaactccgtggccagcttcaagatccgtgagggcaacacaatt

SEQ ID NO: 6314 - DNA, 121 bp, Artificial Sequence
  Description of Artificial Sequence: Synthetic probe
gggaaacatccctacaattgccttctgtgacactgactctcccatgcgatatgttgatatyggcatccctgcaaacaacaaggggaggaacagcattggctgcctgttctggctcttggcc

SEQ ID NO: 6315 - DNA, 121 bp, Artificial Sequence
  Description of Artificial Sequence: Synthetic probe
ctgaacaagctatatcactgacctacgacccgtggcgctcatttgtgattggtgtggatastcatttgtgatactacgttttacaaataatatgtacgtgtttggttgctaatctggagtc

SEQ ID NO: 6316 - DNA, 121 bp, Artificial Sequence
  Description of Artificial Sequence: Synthetic probe
ttcctttaagggatgagttcctcgaaaattctcgcctgttcattttcgagacttactgccrtatacatcggtgcattgatattggcatgcttgcagagaagatgaacatgacctacgatga

SEQ ID NO: 6317 - DNA, 121 bp, Artificial Sequence
  Description of Artificial Sequence: Synthetic probe
caaggcatcaccaaagaggaaggctgcagaggcgccggcagcaaggaggacctcgccgagrtccaagtactgatcggctggtgcgcgttcccatgttcagttcctcttcttgctgtgtcag

SEQ ID NO: 6318 - DNA, 121 bp, Artificial Sequence
  Description of Artificial Sequence: Synthetic probe
tgcaatatctcgcgatcctcgatattgggataaccctgaagatttcaagcccgaaaggttygagaacaacaacattgactattttgggacacactttgagttcaccccttttggggccggg

SEQ ID NO: 6319 - DNA, 121 bp, Artificial Sequence
  Description of Artificial Sequence: Synthetic probe
caaatcagcaccataaacaatcctgtgatcagccgtgacattgaccagcattttgttcttsacactaaagaaaccatccttatcagccaccactgtgggttttgaggctccaacagccatt

SEQ ID NO: 6320 - DNA, 121 bp, Artificial Sequence
  Description of Artificial Sequence: Synthetic probe
aattggatatccattgggttgttcaaatcacatggaacctacatttgagcccccagacccrtcttcgttcagcaccgtatttccttatgagaagggctctgtgcctacatggtctggacca

SEQ ID NO: 6321 - DNA, 121 bp, Artificial Sequence
  Description of Artificial Sequence: Synthetic probe
gggaggagtatttatggtgaatgctttgatgatgaaaattttacattaaagcatgttggcmctggtgtactaagcatggccaatgctggccctgacacaaacggaagccagtttttcattt

SEQ ID NO: 6322 - DNA, 121 bp, Artificial Sequence
  Description of Artificial Sequence: Synthetic probe
catgaagaatcaagcgcatcatataaaatcacacaatgtgctacacgctggacacctgacygactttgcccaatcacatgccccacaagtaacatttcctcctttctgcggtttgcctctg

SEQ ID NO: 6323 - DNA, 121 bp, Artificial Sequence
  Description of Artificial Sequence: Synthetic probe
tgcaagtgggctgtggtgaccctcgcatcaaaaggatgccttgctaagcatggcaagcagrtagttcaagtgccggcaattggggagagcaacgcggtggacgccacgggtgcaggcgacc

SEQ ID NO: 6324 - DNA, 202 bp, Artificial Sequence
  Description of Artificial Sequence: Synthetic probe
cacataatgcttggctgactctcagtttttccctgccctaccagcagatgctcgtttagaggcaacaattcttgtactgtaaccaaagatttgacccaccygtgtcataaaaagaaggatgaatgagcatccatggcatcgcatggaaaaaaarwtatgttctcgaaacagagagctggtcaatccatttcagaccttaata

SEQ ID NO: 6325 - DNA, 121 bp, Artificial Sequence
  Description of Artificial Sequence: Synthetic probe
gaagttcatactacattggttacataaaaaggtaagattattttcacagccgtcgtatgcktatcgtgcatccaacacagtatgaccactgttacgggacgtaaccaattttaccaacagc

SEQ ID NO: 6326 - DNA, 121 bp, Artificial Sequence
  Description of Artificial Sequence: Synthetic probe
catcggtgcaccttttcactctagagagtccttcaactaaaacttctgcaaggctctctaygccatactccagcaagagctgttggagctccttagagattcccccatggtccaatcttgt

SEQ ID NO: 6327 - DNA, 121 bp, Artificial Sequence
  Description of Artificial Sequence: Synthetic probe
aagttgaggaggggcagacgcttcggatctccgggaagcagccagtaagtcttaggaagcrgcctcaggaaaagggaggctcgtgtagtgttgattattaccctctttacatttcaactcc

SEQ ID NO: 6328 - DNA, 121 bp, Artificial Sequence
  Description of Artificial Sequence: Synthetic probe
ttgcttcagcaggcaatccttgaagcccgtctccagctcttcacgcttgaggttcctgccratgaacacgatcttgttgattcgtggctcgtctgcctcccaagttctgtcaggtgatccc

SEQ ID NO: 6329 - DNA, 121 bp, Artificial Sequence
  Description of Artificial Sequence: Synthetic probe
catgcgaggtccaatggtttcaggagtcattaatcagttgctgaccacgactgactggggygaacttgactaccttgtcattgacatgcctcctggaacaggggatatacacttaacactc

SEQ ID NO: 6330 - DNA, 121 bp, Artificial Sequence
  Description of Artificial Sequence: Synthetic probe
cggcgacagatttgcgccaacttggagatatgtatgacatgcctctggtgtcaggtgaggyccttgaaaatcagaccaagcccgcctgctccatggctgtagctgaaactcccatcaggtt

SEQ ID NO: 6331 - DNA, 121 bp, Artificial Sequence
  Description of Artificial Sequence: Synthetic probe
tgcaagccttgcgcccttgcatgttcggaatgccctctgtgccgcacacgaattgtagacmggataattacctttacataggttacttgttagccaaggaaacttttgacgtacccaatct

SEQ ID NO: 6332 - DNA, 121 bp, Artificial Sequence
  Description of Artificial Sequence: Synthetic probe
aaccagtgggttctgctaaaccgacatccatgagaaccccctgctagagccccctactggraacttgagagtcgctgcaataatagagaaagcaaacgccatacgccaggcggtgggaagt

SEQ ID NO: 6333 - DNA, 121 bp, Artificial Sequence
  Description of Artificial Sequence: Synthetic probe
cgcgatgggcgggaggatcacggcgacgtcccgggtgtacccgacgcaggccatctatggwgctgcgggggtgtacctgttcaataacgcgacgggggccggcgtgacggtggagagggtt

SEQ ID NO: 6334 - DNA, 121 bp, Artificial Sequence
  Description of Artificial Sequence: Synthetic probe
gggggaaaagtaatatcggctgttcttcatcaatctaatgctccctttgggcatccatggytgttgttgatgaacaacattattatttttctgtgaacagcctatatatgtactaaagaac

SEQ ID NO: 6335 - DNA, 121 bp, Artificial Sequence
  Description of Artificial Sequence: Synthetic probe
agctatggttatggtaacaaccatatggattctggcttgctgtcttctcagtcaaagaatkcacagttcggttttctgcacagtccaaatgatgtcactggtggctggtcttctttgcaaa

SEQ ID NO: 6336 - DNA, 121 bp, Artificial Sequence
  Description of Artificial Sequence: Synthetic probe
gaagctgctggtgcttgacgtcgggctcaagcactgcgggccgtgcgtgaaggtgtacccsaccgtggtgaagctgtcgcggaccatggcggacaccgccgtgttcgcgcgcatgaacggc

SEQ ID NO: 6337 - DNA, 121 bp, Artificial Sequence
  Description of Artificial Sequence: Synthetic probe
ctgtggtgctagtgagcctcccccgccaccgctgaatcaccctgcatatttctacatggartacatggatcttcttgtagagaacgtcccacgcatgttgatagttaggggatacagaaga

SEQ ID NO: 6338 - DNA, 121 bp, Artificial Sequence
  Description of Artificial Sequence: Synthetic probe
agcttaccaagcgacctatgtacagcatccaatcatatatctgagtcaggttttacgggtyggaacgtgactttctgcttgtatcagtgtttggaaaaattactctccttcagcaaaaaag

SEQ ID NO: 6339 - DNA, 121 bp, Artificial Sequence
  Description of Artificial Sequence: Synthetic probe
tgactttgttgataaccgctggcaggttaagaaagaagttcttgacaagcttggcttgacwaactcacctgtgaatcctccccagaagatgaaatcaacagccagtctttcccagaagacg

SEQ ID NO: 6340 - DNA, 121 bp, Artificial Sequence
  Description of Artificial Sequence: Synthetic probe
attttttttctctagatcctttctcgatttgatgctcttaacagctttgtagtattaggargtataaaaatgaactgtacttcaatacttgtactgctggaatacaatgtccatagaattg

SEQ ID NO: 6341 - DNA, 202 bp, Artificial Sequence
  Description of Artificial Sequence: Synthetic probe
cacgacgaccacgtgttacactccgtggaacaaaattttccctcccaatgccccaaggtggaagagctgctgtaattaataatcccattttacgtgaagaycaacttccctcgaaggttctgcatcctaaatcgaagaagtcaagcaagctgggggatgatttcctgggcgccgaggacatatttacgcacagtggcgagaa

SEQ ID NO: 6342 - DNA, 121 bp, Artificial Sequence
  Description of Artificial Sequence: Synthetic probe
aacgtccataacgaacatattttgtgatgccgtagtcacctctggagtttccggcaagacraactccacaacaatcactcttcccttctccgggagagctccgtggcaattctggagtacc

SEQ ID NO: 6343 - DNA, 121 bp, Artificial Sequence
  Description of Artificial Sequence: Synthetic probe
ctgatgagcctgaaagctggaggagtagctctaaatctcactgtagcatctcatgttttcytgatggacccttggtggaacccggcagtcgagagccaagcgcaggatcggatccaccgaa

SEQ ID NO: 6344 - DNA, 121 bp, Artificial Sequence
  Description of Artificial Sequence: Synthetic probe
ttatgttgagttattattatgtggctgctgaaatcggcactgttcttcaacagtgttcggktcagtccagttgaacctatctatggtgcgtcttacgggaggactagattgtatccagcat

SEQ ID NO: 6345 - DNA, 121 bp, Artificial Sequence
  Description of Artificial Sequence: Synthetic probe
tagtgcggggggatctcaaatgtggttgttaatctgtgttggacggaggaacattagctgyggtagatctggtttgtgatgatgagccaggaaggcacagtacatttgctagatcgcttgc

SEQ ID NO: 6346 - DNA, 202 bp, Artificial Sequence
  Description of Artificial Sequence: Synthetic probe
caaagagtctggagctcagcctgcatgatcttcatcctacctcttggtactgtgttgcatggtatcccatatatcgcatacctgatgggaaattccaggcygctttcctgacgtaccattctcttggacactgggtccatcgaataagctcatcggaccaggctggtcatagccatgctgttttgccggtcatgggtctgca

SEQ ID NO: 6347 - DNA, 121 bp, Artificial Sequence
  Description of Artificial Sequence: Synthetic probe
tgatggtagactgttcattatcgggttcatgggaggcgttgtaactgaagtgaacctggcrgttatgcttgcccgaagattgaccgtacaagctgctgggctgcggaacagaagcattgct

SEQ ID NO: 6348 - DNA, 121 bp, Artificial Sequence
  Description of Artificial Sequence: Synthetic probe
acattgaatgcttccactctcagcaagcagtgggaatctatgggacctttgctacaaaagkctgtggcatcctttcaccttctccccccaacagaaaaatatgttcctccttaccaggacc

SEQ ID NO: 6349 - DNA, 121 bp, Artificial Sequence
  Description of Artificial Sequence: Synthetic probe
actggtactgattggcgctctgtacattgtaggaaagtttataggtgactgccaggagacytaggtcgttgcttagggctcatatcattaccagtggtagtactagtagtacatagaagca

SEQ ID NO: 6350 - DNA, 121 bp, Artificial Sequence
  Description of Artificial Sequence: Synthetic probe
tgtctgtgctgatgggacactgtctttgtgggaggaggttgctgaagatgatcaacttccracctggaggaaatgtaaagtctttgagggtggcaattcccacatcctaaatgtacagttt

SEQ ID NO: 6351 - DNA, 121 bp, Artificial Sequence
  Description of Artificial Sequence: Synthetic probe
cggtgcggtagtttctcgagaattgcatcaggaccccatctatctgtacgctgaaataatmatcaaggtcgacaaattgcccaactgctagttcttgtgttctccaatgtcaacttgctgc

SEQ ID NO: 6352 - DNA, 121 bp, Artificial Sequence
  Description of Artificial Sequence: Synthetic probe
attcccaagacaatagataatgacatagcgataatcgacaagtcctttggttttgatttcrgccgttagaagaggctcaacgtgctatttgattcagctcatgtggaagctttgcagtgct

SEQ ID NO: 6353 - DNA, 121 bp, Artificial Sequence
  Description of Artificial Sequence: Synthetic probe
gaagatcaacaagaagcagttcctgcggtgctgggaaatcctgatctatcaacaccttgaytctgaggaccgcaagtgcatcgacaacttcagggcctgcatctacgaccgcaccaaaggt

SEQ ID NO: 6354 - DNA, 121 bp, Artificial Sequence
  Description of Artificial Sequence: Synthetic probe
ttcagctgcctcagaagccatgtaccatttcttgatcaactcgactgctgatttgtgagaraacttctcaccaattacacctctaatctcctttgcaagaacgtcctcggatatcctcctc

SEQ ID NO: 6355 - DNA, 121 bp, Artificial Sequence
  Description of Artificial Sequence: Synthetic probe
gccgtgtcatagagcctctttttggcatcagccagttttggagtaagagatggttctgatrcattgcgttgttggaaaacgaatgcagacataatggccacagcttcttcaggytctaact

SEQ ID NO: 6356 - DNA, 202 bp, Artificial Sequence
  Description of Artificial Sequence: Synthetic probe
aaaggactagtggagctgctggaccttctattgagaaggtagagaaggccccagccgaaggatctgctcgaaggaatcctagtgcttctctgaatcagagyggcgacaactatgcaacacgaccacgcgaaactgtatcgatgtcactaaaggagattatgcacagcacggatcgttctggtgaaaggaccgaaaggactgc

SEQ ID NO: 6357 - DNA, 121 bp, Artificial Sequence
  Description of Artificial Sequence: Synthetic probe
gctactgtcattaccacgagcagtttgatgtacaagagagccaaaggatacatatatactycgtaaaacacagctaatgaacaaaccagatcaaaattgcgagcatatttcaggtgcgatg

SEQ ID NO: 6358 - DNA, 121 bp, Artificial Sequence
  Description of Artificial Sequence: Synthetic probe
gccttatgtcctctttattcagaaaacattacgcaggaggcctttcttgataaagagtctygaaaatgttatgcgcaaattcctccagtccttggagttctttgaagaaaatgagaggcag

SEQ ID NO: 6359 - DNA, 121 bp, Artificial Sequence
  Description of Artificial Sequence: Synthetic probe
tttgaccgggagtttatgccaatcaaaagcttctggacaagggtaaggagctactgaagcrgatggaggaaaatggtgtcagaataggggtgtcaacattggattcgctggtgaagctcta

SEQ ID NO: 6360 - DNA, 202 bp, Artificial Sequence
  Description of Artificial Sequence: Synthetic probe
tcttgatgttgtcaggagaaggatgcagatggtyggttggaaycatgctgcttctattgttactggagaaggaaaagcggctctccagtacaatggtatgrttgatgcatttaggaaaactgttcgccatgaaggatttggtgctttgtacaagggtcttgtgcccaactcagtgaaggttgtgccttccatcgccattgct

SEQ ID NO: 6361 - DNA, 202 bp, Artificial Sequence
  Description of Artificial Sequence: Synthetic probe
ttttgtagaattctggggcagcatatattgcatgttttagttgtcttcgtcaatgcgaacctggctgctcaatggtggccacttgattttgtaaaaccggsatgttatatctttcttttcaagcttgcccatgaatgttctgtctattggaattagaagacatacatatactcacttgcgtttaaatgcacagcatcatcga

SEQ ID NO: 6362 - DNA, 121 bp, Artificial Sequence
  Description of Artificial Sequence: Synthetic probe
taacacatttgtagctcagaagaagaacctcagtctcatcgatgttgatgtcccagttgtyggtggtcatgctgggataacaattctacctttgttgtcgaaggctaggccatctgtcacc

SEQ ID NO: 6363 - DNA, 121 bp, Artificial Sequence
  Description of Artificial Sequence: Synthetic probe
catgaacgcgttcataaagcgtcttttggctgtctcggaccctgaacagatgaagacggcrgtgtcggagacgagcggcagccagctggcgaacctgctgttctggctgatgattgttggg

SEQ ID NO: 6364 - DNA, 121 bp, Artificial Sequence
  Description of Artificial Sequence: Synthetic probe
caccctgatgctatgattgctcactgcccacctggcagcagcaaggaacactcctcggaarcttcgtaagactatagtgatgactagagaactcatcatgccagccaaaacccctgctgct

SEQ ID NO: 6365 - DNA, 121 bp, Artificial Sequence
  Description of Artificial Sequence: Synthetic probe
attcttgaggggcatcgagccgcgggttctgtggatcggcattggtgggtccatctttttyggcgtgctggagaagaccaagtcgatactcgccgagaggagcagccgcaaggccttggtg

SEQ ID NO: 6366 - DNA, 202 bp, Artificial Sequence
  Description of Artificial Sequence: Synthetic probe
tcaaaatgatgatactagaaatggggaaacttgtgaagagaaaatggacacagatcctaacgtgaaaaayatgcgcaaagggttcgatgaattacagaacytgtaccccaaccttacctcttatgtggagagcatccaggcccagcatccatgtggggagacactgaaaagagcatttgagttcattgctgatgagaaggct

SEQ ID NO: 6367 - DNA, 121 bp, Artificial Sequence
  Description of Artificial Sequence: Synthetic probe
cacgtatgcggtatggttttcttggcatataacagcaggatagaatacctgcagggaaaayggtgcaagagccagagcaagggatggcaaagcccactcaccagagtartctcaaatcgta

SEQ ID NO: 6368 - DNA, 121 bp, Artificial Sequence
  Description of Artificial Sequence: Synthetic probe
cagcacataagaaaactaggatgggatgtgggatgggcaacctattcatgtaccatgtgcmaaccccttggcgtgttaattagagaactagtagatgcctaagaggaactcatgcttttct

SEQ ID NO: 6369 - DNA, 121 bp, Artificial Sequence
  Description of Artificial Sequence: Synthetic probe
taacagcacagactcgttctctctaggaagtattattggatatcccatgatatttgcgtgytcttggatatacaaggagttctttgcaagtcckccagaggcaagaagagtgtcgatcttg

SEQ ID NO: 6370 - DNA, 121 bp, Artificial Sequence
  Description of Artificial Sequence: Synthetic probe
gattgacaatactgatgacccgttgagagtgaaagaggaagctgagaaacaaggggtaatmtgcatatcagccatgaatggtgatggtttggaggagttctgcaatgcaatccaagcaaag

SEQ ID NO: 6371 - DNA, 121 bp, Artificial Sequence
  Description of Artificial Sequence: Synthetic probe
ctcgtcttcccaaggtggtggctactaccgctaatggaatgaattatgatgcacaataaaygctagtcatgtagccgtcgagttgtttctcgttgccgactggagaacagctgctatatgt

SEQ ID NO: 6372 - DNA, 121 bp, Artificial Sequence
  Description of Artificial Sequence: Synthetic probe
tcatggtctcgtctcgcagggcttggaggatgtctctcaccgggagctccctttttatcaraattctataaagcctcttcagaattgggcacagttcagcaggmgcaacttgcttgttttc

SEQ ID NO: 6373 - DNA, 121 bp, Artificial Sequence
  Description of Artificial Sequence: Synthetic probe
aattcttcgagtgtttccgcttgcttctgccaattcaagaaccattaataagtttgagggygcccactacatttcgcccacgataaacaattatttatgtactactgattggttggtttgc

SEQ ID NO: 6374 - DNA, 121 bp, Artificial Sequence
  Description of Artificial Sequence: Synthetic probe
gaatgcgagaacaaggcggctgctctagctcgggctattgatcttgccgagtcagcttttktagacaaggaatagagtgtattttcgtgaatttattgttaattcttgtccatggtatctt

SEQ ID NO: 6375 - DNA, 121 bp, Artificial Sequence
  Description of Artificial Sequence: Synthetic probe
cacgccgcaattcggcataagattgcacgagatgacacatcatgcagatatcaggccatcrggaagagagaggccctcctctgcacctgcggacagaaatttccggcatgcatagaagatg

SEQ ID NO: 6376 - DNA, 121 bp, Artificial Sequence
  Description of Artificial Sequence: Synthetic probe
gcacatggcgtctatcacacatggctcaacgccatggttagttaccattaaaattccccakgactccagtgccaagcgaagtttggccgtctcctcggcgccactgccatcagctttgctc

SEQ ID NO: 6377 - DNA, 121 bp, Artificial Sequence
  Description of Artificial Sequence: Synthetic probe
atcagaagggctcctgctcctgctcatctccctgccacgagggctgtcaccattatccttygcttctggggagagagaccgcctggggctcctattgccatcaggtgtggggctgcgatcc

SEQ ID NO: 6378 - DNA, 121 bp, Artificial Sequence
  Description of Artificial Sequence: Synthetic probe
tgaatactgctgttctgaattctgaggttggaaatgagaatgcaatggatgccactggtgracttgtttccrgtacwacacaatcaggagaagaacaaggkggtgtggatttggttgaatc

SEQ ID NO: 6379 - DNA, 121 bp, Artificial Sequence
  Description of Artificial Sequence: Synthetic probe
tagcgcagaaccaccaagtgatcatgcccataatcgtcccagcattagagcagaacagtcrgacccactggaaccaagcggtcctgaacctgaccgccarcgtgatgaagatgttctccga

SEQ ID NO: 6380 - DNA, 121 bp, Artificial Sequence
  Description of Artificial Sequence: Synthetic probe
ggctctatccctgatgattatgagaggctggagaagggattgatgcagtatgggtgtgcayattaccgaaggaggtgccgcatacgagcaccatgctgcaacgagatttttgattgtcggc

SEQ ID NO: 6381 - DNA, 121 bp, Artificial Sequence
  Description of Artificial Sequence: Synthetic probe
gcccaaaacttaccggattactgatatattcggcttcaagcgatcaaggcctctgcaccgytcactaaagggaggtccaggccggatcacaatggactgacacatattctctgctacatat

SEQ ID NO: 6382 - DNA, 121 bp, Artificial Sequence
  Description of Artificial Sequence: Synthetic probe
tttgcgaattatggctgggcatcttgctgatgttgattgtgtgcaatggcatgtcaactgyaattacattgccacyggctctagcgacaaaactgtaaggttrtgggatgttcaaacaggt

SEQ ID NO: 6383 - DNA, 121 bp, Artificial Sequence
  Description of Artificial Sequence: Synthetic probe
gaaaatgggctgtgagaagcaaggttattttactctggatgagtggagaactggcatgaargctctgcgagctgatagtattattaagctgaagaaggcgttccccgaactgacacaagaa

SEQ ID NO: 6384 - DNA, 121 bp, Artificial Sequence
  Description of Artificial Sequence: Synthetic probe
gtcgaggagacagcgcggcttctagagtatgagagtggtggtatactagttgcaatcgaamgagtgcccaagggtcacgcacttattttttaccgtggaaagaactatcggaggcctatta

SEQ ID NO: 6385 - DNA, 202 bp, Artificial Sequence
  Description of Artificial Sequence: Synthetic probe
tcgctatgtaaatacgacggctgtacataaataaatcacgtgtgtggttatcaccatgtatctccagttgtgttgttgtgctagagaacttttaccctagycggattttgtagcaatcgccaagattttggtactggtttttgtatgtaactagtccagctggacaaggacaaaagtattatcaatcttattacgctgcagt

SEQ ID NO: 6386 - DNA, 121 bp, Artificial Sequence
  Description of Artificial Sequence: Synthetic probe
atcctattccgagaactaggattgagacatctattggttgtgccaaagaccccagacaggmctccaattgtcggaattctcacaaggcatgattttgtggaggaacatatccacgggttgt

SEQ ID NO: 6387 - DNA, 121 bp, Artificial Sequence
  Description of Artificial Sequence: Synthetic probe
attttctatatgtgagctactaacattcattgaatcactgtagatgtgtggatcatcagcwcttccttccccacttatgaagcggtgggaggaagtgacaggccaccgtcttttggaacgc

SEQ ID NO: 6388 - DNA, 202 bp, Artificial Sequence
  Description of Artificial Sequence: Synthetic probe
ctcgggtctacgatgatgggaaccgtttgacatcggagatgtatggttttacccagtccaggagcttctgctcgccctttgggcggttcctgtcaatgggrcgacgacccgtgatgagctcgtagaggagcacaccatagccccatatgtcactttttgcagtgaggcgcccagtttgcaagtactccggcgctgcatatcc

SEQ ID NO: 6389 - DNA, 121 bp, Artificial Sequence
  Description of Artificial Sequence: Synthetic probe
aatcaccacagcagctgtaccggatggaaaggagatccagattttacagcaatgaggactyaacagttgcattccactgtcaggttcattcgtgctacccaccagcactagatgattttgt

SEQ ID NO: 6390 - DNA, 121 bp, Artificial Sequence
  Description of Artificial Sequence: Synthetic probe
tgcagcagcaattttgacatcaaatcctttcttggtgttcaagccagtgccaactgcagtmccaccttgagcaagctgatacattcttggtaaggtacatgcaactcgatcaattccatac

SEQ ID NO: 6391 - DNA, 121 bp, Artificial Sequence
  Description of Artificial Sequence: Synthetic probe
cttggccccctgtttgctaggctcttcaacatcattgtcagttactgttttctcatcagcwtgctgatccgtaccagcttcagaagcacttgctttcttgcttttctttttcttctgtttt

SEQ ID NO: 6392 - DNA, 121 bp, Artificial Sequence
  Description of Artificial Sequence: Synthetic probe
ggtccacgtaaacggaagctagcaatgccctcgggttgttgggcaacaatgcaaaaccacrgctcaccatgtagctggcctgctcaagctctccctgcaccgcggcagtcatgcctaggtc

SEQ ID NO: 6393 - DNA, 121 bp, Artificial Sequence
  Description of Artificial Sequence: Synthetic probe
ggtcacaaacagcctgcagccggtcatctcaggggttgctattggaggaggatggcaaggmcttgttgcatacatcaacctattctgctactacgcgtttggcctccccttgggctacctt

SEQ ID NO: 6394 - DNA, 121 bp, Artificial Sequence
  Description of Artificial Sequence: Synthetic probe
cagaagcatcacgaggtgcctggctcggtggcgaacgctgacttagacatcccagaatctrtggggctgtccactccacaaccttcgtccgtcaaaaggttgattgatacaagctcagtca

SEQ ID NO: 6395 - DNA, 202 bp, Artificial Sequence
  Description of Artificial Sequence: Synthetic probe
aagcaccgacctaaacacagataatcatcaggagccagagtcgccaacaaagcagcttcaagaaaccgggttgatcaccgacaatgcccaggagccaatcygagctagagttactccggatgaccaagacctcgacgaacagtgtgtgtagcaaaggccacggtgaccaaatccttcgattttgcgatggcaggtgtgcctc

SEQ ID NO: 6396 - DNA, 121 bp, Artificial Sequence
  Description of Artificial Sequence: Synthetic probe
gagttgatcaaagtcatccagcaggagcagcagagctacaaggatcccataattgaattgytggaatgcctgtatgtgaagtatgattttgatggtgcgcaacagaaactcatcgagtgtg

SEQ ID NO: 6397 - DNA, 121 bp, Artificial Sequence
  Description of Artificial Sequence: Synthetic probe
ctatgctgaagtttacagcaacccgtccaagatccgtgacgagctgaactggacagcccarcgcacggatcttcgcgaaagcctcgcgacggcatggaaatggcagaagacacacccgggg

SEQ ID NO: 6398 - DNA, 121 bp, Artificial Sequence
  Description of Artificial Sequence: Synthetic probe
cccggggatgctattcagcgatgagtttgtctcacggctggagtctttgactagcaagttytcttccaaagctgcaggttctacacggcatgaagctgccctgagattgttagcaacaacc

SEQ ID NO: 6399 - DNA, 121 bp, Artificial Sequence
  Description of Artificial Sequence: Synthetic probe
gctggggcaccggctggcgcgtgcaagagcaccggagcaccgagttcaaatcgaaccaccwcatcctcttctacaactggaaacgtgatttcaggaaccatagagttcaaatcgcctgctt

SEQ ID NO: 6400 - DNA, 121 bp, Artificial Sequence
  Description of Artificial Sequence: Synthetic probe
tattgtttgctgaacctaactaaggagtactacattctcagcctggtacgaattgtatccrgctgctaaccagcttgttgcctacgcggagtcctaatagcggaagttatttatgttgttg

SEQ ID NO: 6401 - DNA, 121 bp, Artificial Sequence
  Description of Artificial Sequence: Synthetic probe
gatgaaaattgcctcgttaaccagttcagcgacaaggctctcacttacgcgagattcaatwactatcctccatgtccaagacctgatcttgtactgggtatcaagcctcactctgatgtct

SEQ ID NO: 6402 - DNA, 121 bp, Artificial Sequence
  Description of Artificial Sequence: Synthetic probe
tgatggagagggttctaggtcctctcccacggcacatgctggaaagagccgaccagcatgyggagaagtacatcagaagaggaaggttgaactggccagaaggggcaacaacaagggagag

SEQ ID NO: 6403 - DNA, 121 bp, Artificial Sequence
  Description of Artificial Sequence: Synthetic probe
ttaagcgaccgggatcctctctggtagcttctcctcgatcgtctcgaagttgaagttgtarctgttgatgccggtgtacatgccatcatccttggggttctcctccaccttcccgtcaatg

SEQ ID NO: 6404 - DNA, 121 bp, Artificial Sequence
  Description of Artificial Sequence: Synthetic probe
ctctcataaaccggctaacagaactaaatgcggccatgacattagtcatcatcgaaggttyctcttcagattgctcactggcgccaccaccgccaaatataatctcaatatctgttgcatc

SEQ ID NO: 6405 - DNA, 202 bp, Artificial Sequence
  Description of Artificial Sequence: Synthetic probe
gatttgttacctcttctgtgaaacctactgcagtgttctccgaagccactacaatgacgtcaggcctctttccactgtacttccttaccattttcctcaaratttcagataccatccgctccatgtgactaagtgggcaattcaaaggacagcttgataatgcagcatgcgcagccttgtaaagtccatcgagtagtctccc

SEQ ID NO: 6406 - DNA, 202 bp, Artificial Sequence
  Description of Artificial Sequence: Synthetic probe
tccagttttgctcctgtaatgtcgataatcggattcgtccattcgggcgggaatacatgagatctgtagccctgtcctgatgtaatgtaaatataggaacygtgagacctagtctgggagagagggggctgttcgtgggttcagagcctgagctcctcttccccctgaattctgtagcaaattcaaaggtgtgaaattcaca

SEQ ID NO: 6407 - DNA, 202 bp, Artificial Sequence
  Description of Artificial Sequence: Synthetic probe
cattagggacctcatgtacgtcatactccaacacttatttctgttcatatatatatacatctatgttcgataaatccctctttattcttatgtcgatgttycaggtatttgtgtccgacagtttcccgtaaatgacataatgtagccgtggagggataccaggaacaaattgcagatgtatgtatattaaagagtaactagg

SEQ ID NO: 6408 - DNA, 121 bp, Artificial Sequence
  Description of Artificial Sequence: Synthetic probe
tttacgcttttgccctcctttagtttttggcccattactacagcctatggtgaatacgagyagcaaattcttaatctatgttatgaaaggaggtcgtgatgcgatgaataacaagctgtgg

SEQ ID NO: 6409 - DNA, 121 bp, Artificial Sequence
  Description of Artificial Sequence: Synthetic probe
tgaggattcgccttgtaaagcgccatagtggaacattgctctcactgatgatacactatgygtcgaacccaatgttgccgcagccactgagcaatgttacatttattgttaagcttcctgt

SEQ ID NO: 6410 - DNA, 121 bp, Artificial Sequence
  Description of Artificial Sequence: Synthetic probe
cggtggtgctgacgggacaagcccttcaagaatgagagcgtttatcaatagagaaggtatygacttttctgatgctcagaacatgcagcctgtgcaggaatgggacctggcagagaatttg

SEQ ID NO: 6411 - DNA, 121 bp, Artificial Sequence
  Description of Artificial Sequence: Synthetic probe
ttctattctgggtgctgttgctgcgaagaagttttctggcgttcgcgatgcaatgaagtcrctgaatgcagcaggaaaggttgtgcatccgtcttcagatcctagggtgaagaaataccac

SEQ ID NO: 6412 - DNA, 121 bp, Artificial Sequence
  Description of Artificial Sequence: Synthetic probe
aattacccgctactgttgatggccgcaacgggcactggtagactgctacagcagtaccagraaatccttgtcatggcatcaggaagagttactcatctaaagtacacgttcaaacatgaca

SEQ ID NO: 6413 - DNA, 121 bp, Artificial Sequence
  Description of Artificial Sequence: Synthetic probe
ccgtccatagtttagtgcaagttttatcccatattcttccttggtgagaccaccagtttcrgcctcatcagtactccccatcaaagggtagacacctctcacagaaaaacattgccttgcc

SEQ ID NO: 6414 - DNA, 121 bp, Artificial Sequence
  Description of Artificial Sequence: Synthetic probe
gaagatcatcattcctgaaggctcatttctttcaccaagtgataaggctgcagtggtcggyggaaatgtgttaacctctcagagagttacagatgttgtcctaatggcgttccaagcctgt

SEQ ID NO: 6415 - DNA, 121 bp, Artificial Sequence
  Description of Artificial Sequence: Synthetic probe
aggggtcggtgcggtttcacacctggcccctcgccgttgctccttatcgcgagacacgccyccttttacttctactagtagtactcctagctagctctagccttggtccgttgttcccctt

SEQ ID NO: 6416 - DNA, 121 bp, Artificial Sequence
  Description of Artificial Sequence: Synthetic probe
ccatgtgcaaatcacgttaaagttgttagtcagctggctgttcttatgcaacatgtaatcygcgttttcagatgtgctgctctctcatactatcttctactaacgtattataaagtattaa

SEQ ID NO: 6417 - DNA, 202 bp, Artificial Sequence
  Description of Artificial Sequence: Synthetic probe
tcgcactgacatcgtcgaaagggccaccagcctgggggccgcagcagaaccaaggcatcgccatgggccaacccgtgatcccgcagcagagcagcgaaccrgtgttcgtccacgaggacacctacaaccggcagcagttcccatgatcaaaaccacatctaagccgtttcgagagccgctatgttagcaagtttggtttgta

SEQ ID NO: 6418 - DNA, 121 bp, Artificial Sequence
  Description of Artificial Sequence: Synthetic probe
cgacgggacaaaaaaatacagtctataatttaactgaacctaatcgcatggagctgagatwacaagcaaaactagtccagctctaagtatttctagcagcttccaaatcttcaggagcaaa

SEQ ID NO: 6419 - DNA, 121 bp, Artificial Sequence
  Description of Artificial Sequence: Synthetic probe
cctctacatacaatgctccttctgacttgctaagtttgcaaacaccagctgaaactgcacyaataaaccctggtggttcgacatatccatcacaaacaaatttcagtcttgatgaccttct

SEQ ID NO: 6420 - DNA, 121 bp, Artificial Sequence
  Description of Artificial Sequence: Synthetic probe
acgtcgaacccacagccacaaagtccaatgaaagagagaaggatggaaccattgaatgatkctgcagattcacttctcagcttgaatgatggcaatacagtggctgcgagtatattttctc

SEQ ID NO: 6421 - DNA, 202 bp, Artificial Sequence
  Description of Artificial Sequence: Synthetic probe
caccctacgagcaatcagatagtccgttggaaacttactctgacggaaatactatgtacttcacgcctgaacaaatgccctctacccaggagagtgttacrtatattgattgtgagagtgatgtgccaggaacaagtgagattgtaccagtgacagaaaacctcataatgcgggaggctaggaaactttctacgctcaaagt

SEQ ID NO: 6422 - DNA, 121 bp, Artificial Sequence
  Description of Artificial Sequence: Synthetic probe
cgccagctctcaggcgcctagaactgttggcggcggatcagccaggctccaacaaggaagrcttggacaagacggctgggaagcttggagataaccaggccctgataaacgttaatgccat

SEQ ID NO: 6423 - DNA, 121 bp, Artificial Sequence
  Description of Artificial Sequence: Synthetic probe
gaagctgcagtgctcccaagagtgtgagcttagaaacctggagaaggaaccacccaggttmtgtttcttggtacaccatctcaccaagaggcagaaagagtaaaactcttgaaaatcgata

SEQ ID NO: 6424 - DNA, 121 bp, Artificial Sequence
  Description of Artificial Sequence: Synthetic probe
ggtgcccctcggcaggctggacgagaacgcgtgttgattcgacaccaacgagcaaacagcwgatcatatatctctgcaccagacttaaccaggaggaactgctagcttcctagctctgaac

SEQ ID NO: 6425 - DNA, 121 bp, Artificial Sequence
  Description of Artificial Sequence: Synthetic probe
gcactgatggacaaatatgtgcatcactgtttattgccagaattttacatattacagtagraacatattgtgtaggaaaaaacatcacaatttctttagcttcttagccacttaactggta

SEQ ID NO: 6426 - DNA, 121 bp, Artificial Sequence
  Description of Artificial Sequence: Synthetic probe
gcccattccatggctgccgagagcggtgcttactgtaccgactttcttaccggaaaccacrtccacgacatcagagcctggagcaacagcttgctcaagttctttgtcgttttcatctaca

SEQ ID NO: 6427 - DNA, 202 bp, Artificial Sequence
  Description of Artificial Sequence: Synthetic probe
tgctggtggtgcacggcggcgaggacacggtgtgtgacccggcgtgcgcggaggagctgcaccgccgagcggggagcaaggacaagacgctgcacatgtaycccgggatgtggcaccagataatcggcgagccggaggagaacgtggagaaggtgttcggcgacgtcgtcgactggctcaaggctcgcgcctccgcggcggc

SEQ ID NO: 6428 - DNA, 121 bp, Artificial Sequence
  Description of Artificial Sequence: Synthetic probe
gcccaaaatttggtaaaaattatattggctgctatggttcacgaattatacagaagtggcytaggtgaagtattatttgacaagctagcaacgactgttttctcttggtgccatgtcaatg

SEQ ID NO: 6429 - DNA, 121 bp, Artificial Sequence
  Description of Artificial Sequence: Synthetic probe
aggattcttaccagagatcttggacacatcggtcatcgatgaagcggttagtgtgactacygaggacgcaatggtgaatgcgaggaggttggcaatggaagaaggcctgcttgtgggcata

SEQ ID NO: 6430 - DNA, 121 bp, Artificial Sequence
  Description of Artificial Sequence: Synthetic probe
ctggaagtcgtcgcgtccaaagaacagtgatgtctccaagaaagacgccatggaggcactmaacggtagagcatcaaatgtacggctatcggtcgggacgcattccaccatcgaaagcggc

SEQ ID NO: 6431 - DNA, 121 bp, Artificial Sequence
  Description of Artificial Sequence: Synthetic probe
atgaaatcgcctattttcgttcggacttccaatggaagggtggcaatcagtggagcacacrcatcaagtgtcattgtcttctctgtgggaagaaagatcgtcttaaccttatcccagttct

SEQ ID NO: 6432 - DNA, 121 bp, Artificial Sequence
  Description of Artificial Sequence: Synthetic probe
tgacagtgagctctttggttccatcaccagtaaaatggctagatcaaatgattcacatgcyactgctctctctcctgaccaaggtgtttgcaagctgtgtttgaagctattaaaggagcgg

SEQ ID NO: 6433 - DNA, 121 bp, Artificial Sequence
  Description of Artificial Sequence: Synthetic probe
ccggccaagggaggataagtccaagctcacaggattggcctttggtcctagttaccaggcygccccttcagggaaggcaaaaccctcyaagctggcgaaaaggaagcatcagatcggttct

SEQ ID NO: 6434 - DNA, 121 bp, Artificial Sequence
  Description of Artificial Sequence: Synthetic probe
ccacactccaatccctcacaactccagtaacacgagctgtcagtgcactcgtccgagaaaycacaaggaaaactgacagattaagtacgaaagtgcacatgcagtttaagaacaatgtaac

SEQ ID NO: 6435 - DNA, 121 bp, Artificial Sequence
  Description of Artificial Sequence: Synthetic probe
tttgaaaaccgatttcatgacgtccaccccgtgggctctgaagaaaatgctggagcatctscaggtcaaatacaagaatcctgtggtcatgatccacgagaatggagctgccagcatacgt

SEQ ID NO: 6436 - DNA, 121 bp, Artificial Sequence
  Description of Artificial Sequence: Synthetic probe
tcgccgtttggtctagtgagttggttacatggtgatctagagttttattatccgggtgtayggttactggggaaaagaaatgcaaaaggtagtagtacctcaattgttaattaccgagtca

SEQ ID NO: 6437 - DNA, 121 bp, Artificial Sequence
  Description of Artificial Sequence: Synthetic probe
ggacatccagcagtgcgtcgtcagctgcttcaacgacttcgccatgcacgcctcctgctcygagatgcagagggagatgctgagcgcggacgccgtcaagcagcagctgctcaagaacgcc

SEQ ID NO: 6438 - DNA, 121 bp, Artificial Sequence
  Description of Artificial Sequence: Synthetic probe
aatatttacttgatttgagaggcatctgtatggatttgtcagtacgacattccttaccctwccacagttttggaacctagaaaaataaatatgtagctcatacacgagatagataacctgt

SEQ ID NO: 6439 - DNA, 121 bp, Artificial Sequence
  Description of Artificial Sequence: Synthetic probe
agggtcgccgccagttcgagagcatcgagcaggtgattgctcacattcgatcagtaactcrcgactgagaagaccaggagttatgcttggtgtgtcctattgaggagaccctttggggcgt

SEQ ID NO: 6440 - DNA, 121 bp, Artificial Sequence
  Description of Artificial Sequence: Synthetic probe
atacagaaacgaaacatttgacagaagtgtggatacttttgcattcggtctcattctttaygagatgattgaaggagttcctgcttttcacccaaagactcgagaggaagcagccaagatg

SEQ ID NO: 6441 - DNA, 121 bp, Artificial Sequence
  Description of Artificial Sequence: Synthetic probe
tcaccgcgaccgaccgacagacgggccgatgtaaatctactgtctgacagacgacgccccrcgaggtggctcgctgtaaatgaaccttctagtgtgtgtgttgtgcgtgcgtgcgtgttcc

SEQ ID NO: 6442 - DNA, 121 bp, Artificial Sequence
  Description of Artificial Sequence: Synthetic probe
atcacagtagacagtacacaggtagggacatgcttagtagagaatacttggcggtgttcayaaatagtagattccgtgaaaaaaagagtacatcaagaggtacacacggttcacatccgca

SEQ ID NO: 6443 - DNA, 121 bp, Artificial Sequence
  Description of Artificial Sequence: Synthetic probe
ctttctggtagatacgacctcgagctttcagttggtgatgcttcaatggaaaattcgttcytacgagcccttggccatctggagttggacttgccggaggccccagagaaggccccgcgtc

SEQ ID NO: 6444 - DNA, 121 bp, Artificial Sequence
  Description of Artificial Sequence: Synthetic probe
accatcttggtgcaagtctccaggcaaatgccacactcgtcttctctctcggcgtccttgycatcggcgtaaagcttccggccaccgctgtcgccgtcccccttgcaccactctttctcca

SEQ ID NO: 6445 - DNA, 121 bp, Artificial Sequence
  Description of Artificial Sequence: Synthetic probe
tttcttgtgcaaggatgatcaccgtaaaattgtaggctgcacaaataatcatcaggttcgsttatacgatactgcttcacaaagaagacctgttatttcagttgattttagggaggcacca

SEQ ID NO: 6446 - DNA, 121 bp, Artificial Sequence
  Description of Artificial Sequence: Synthetic probe
acaaagacaaagctgacaaaaaccacggcatatttaagcgtaaacacagcaaggaaggaamctatggtaagctactgctgatgatagatggacggcagcagcacgggcttagaacacccgg

SEQ ID NO: 6447 - DNA, 121 bp, Artificial Sequence
  Description of Artificial Sequence: Synthetic probe
ttctccgggcagcaaccagcaagaggaggatcacatggttcaactagacaagagatgctcygaggccttctgaaatatcagcttacagtttccttttccgcatcacatattgcgtgctgaa

SEQ ID NO: 6448 - DNA, 121 bp, Artificial Sequence
  Description of Artificial Sequence: Synthetic probe
aactgatggctcatactgttcttttgtctgtgcacttaatcgctggataatggagagggaygatggtacaccagaggcatggattggaccaagaagacatgctgggaaatggatgtaaact

SEQ ID NO: 6449 - DNA, 121 bp, Artificial Sequence
  Description of Artificial Sequence: Synthetic probe
tcataatggttaccatacggttggatacaggacacaacttgtgcaggtgcatccatcttcmgtactggaaggcgatgaatacgggaaactacctgtgtatgttgtctaccatgaactaata

SEQ ID NO: 6450 - DNA, 121 bp, Artificial Sequence
  Description of Artificial Sequence: Synthetic probe
gtatgcacctcatgatctctacctgcagaagtacccgaggtgatatcctgatgttcagatracacctgatgcattcctatgtaacagaaacaccagcacatcttgtaatttcgagatttcg

SEQ ID NO: 6451 - DNA, 121 bp, Artificial Sequence
  Description of Artificial Sequence: Synthetic probe
gacaagcagaacaaatacagctgagaagtacatccaggtggtctctattgataaccatgarttctggttcatgggctttgtgtactacgacagtgctgtaaagaacctgcaggaagcactc

SEQ ID NO: 6452 - DNA, 121 bp, Artificial Sequence
  Description of Artificial Sequence: Synthetic probe
gggatcgagataatcattagtgtgtacatgattgatgcatgcatgttagttgccaacctcyggttgatgagtgcaagcacgaagcacgcacgcgtccataccatgtgtgtgctgtcagctg

SEQ ID NO: 6453 - DNA, 202 bp, Artificial Sequence
  Description of Artificial Sequence: Synthetic probe
tttccttaacatcatccagtggataatcattggaacatccgaacatatcatggcctgtttctccacatcgcaaacacaatgtggtggattgctgagtattyctcatgtgcttgtcagggcaatctttcgccatatgacctcctttttttgcagataaaacaatcttgrccctgtgtgcactgcttcgcattgtgtccaaaca

SEQ ID NO: 6454 - DNA, 121 bp, Artificial Sequence
  Description of Artificial Sequence: Synthetic probe
tgtgttctggagaaccctaaagcatgaaggcatttctgggttctacaaaggaatcctaccraacctccttaaggtggtgcctgctgcaagtattacctatatggtttatgaggcgatgaaa

SEQ ID NO: 6455 - DNA, 121 bp, Artificial Sequence
  Description of Artificial Sequence: Synthetic probe
ggtgatccttcccggcttgtttgatgggttcaagatgtcaatcagctttaccaattcagcrgggtccattttatcgctcacctttatgccaagggggttggcaataccacggaggaattca

SEQ ID NO: 6456 - DNA, 121 bp, Artificial Sequence
  Description of Artificial Sequence: Synthetic probe
ccaacagaaattcgcttccaacgttgttgagaagtgtctttcttttggttctcgtgaggarcgccagattctaattgatgagatgcttggcactaccgatgagaatgagccattacaggca

SEQ ID NO: 6457 - DNA, 121 bp, Artificial Sequence
  Description of Artificial Sequence: Synthetic probe
cagctccgacatggatgcagtcatagggtgcgagctctggccagccctccctaccatcagmkatgtgaatactgagggatccatcagwcagctgtggrcctgctgcacttttcttgatgtt

SEQ ID NO: 6458 - DNA, 121 bp, Artificial Sequence
  Description of Artificial Sequence: Synthetic probe
atcgccatggatagacctggtcacgcgctggacctttacaaagagagtcgtctcgtctttyccggcgctcctcgacatgctcaaggagacggggaaaggagcaatggtggcgcaggtttcg

SEQ ID NO: 6459 - DNA, 202 bp, Artificial Sequence
  Description of Artificial Sequence: Synthetic probe
ctttggtttgccatctggcggctatggcaggagcaacccaactggcaccattggtgaaccttttttctgcatcagccaatgcatatgaaatgaacaacatwgattcgtatggcaacaactctatttatggtgactcaacctggaggttcacgtcatccgagatcgatattcccccttttgatcatgatcttggaaatattga

SEQ ID NO: 6460 - DNA, 121 bp, Artificial Sequence
  Description of Artificial Sequence: Synthetic probe
acctggccacccccgagagtaaattcgaaggggtcacctctgtcatagctagaatcaaatrccgatccatcagtgagtgacccacgataatgcactttgattttgtcgcctttgtgagcct

SEQ ID NO: 6461 - DNA, 121 bp, Artificial Sequence
  Description of Artificial Sequence: Synthetic probe
ctgcagcaatgtatcaggtgatgaagggccatgacatattggtttcgattttcgtccatcragctcataaagttcaccatcaacacaagagaaacatacaaaatgttcattcacatcaaca

SEQ ID NO: 6462 - DNA, 121 bp, Artificial Sequence
  Description of Artificial Sequence: Synthetic probe
catggatggcctgacaaatgatgttgagaggtcaaacgaaatggtgtccattctgcaagargagttggaagctaaagacgtggagctgacaagattgaaggagatgcttttgcagaaagag

SEQ ID NO: 6463 - DNA, 121 bp, Artificial Sequence
  Description of Artificial Sequence: Synthetic probe
gggagtcttcgacggtccatgcggcgcgcagctggaccacggcgtggcggctgttgggtayggttcagacaagggtaagggccacgactacatcgtggtgaagaactcgtgggggcgacaa

SEQ ID NO: 6464 - DNA, 121 bp, Artificial Sequence
  Description of Artificial Sequence: Synthetic probe
tgaggttttgtatgtcaggcagttggggaacgacatgaagaattcatttgatggatgctcwgcgcagacgacaaatttccccattgcaagagcctctgctgttgctgtgcacaagacatca

SEQ ID NO: 6465 - DNA, 121 bp, Artificial Sequence
  Description of Artificial Sequence: Synthetic probe
gtctttgtcaaataaggtcaagctgtactactacgctgatacctatgagatgggaaagatyggcagtctctcagcagtatgatatatacgaggctgtacacgccaccatggaaccgttcac

SEQ ID NO: 6466 - DNA, 121 bp, Artificial Sequence
  Description of Artificial Sequence: Synthetic probe
ttgacttgttaaggttcgtgaagatccagtatttcgaagagagaaaggtgatatccatgtygatactgtcttgaatgtgactcaggcaattttgggaggtactgttcaagtgccaacactc

SEQ ID NO: 6467 - DNA, 202 bp, Artificial Sequence
  Description of Artificial Sequence: Synthetic probe
gccgcatagactcattgatacagcgcatcaagtactttagctcttttacatcttcatatctggggagtctaccttgtagaacacgatctacctcatcttgwgctctccttagtgctgctggatccttactgagaagataaatagtccatgtgagtacagagcctgttgtttcatgaccagcaactaacattgacaatagatc

SEQ ID NO: 6468 - DNA, 121 bp, Artificial Sequence
  Description of Artificial Sequence: Synthetic probe
gctatgctcccttcacctctttggcagcgaactcaccaacaaaggattgacagcaatcctygataactgcactcacctggagcatctggacatccggcattgtttcaatatctacatggat

SEQ ID NO: 6469 - DNA, 121 bp, Artificial Sequence
  Description of Artificial Sequence: Synthetic probe
ggctcgttcaatcattcataagaagkttcagctgttcagagaatctgcaatagctcagagmgtgctagaagaagagaaggctgcggagaaggccaaacttgagcgtgtgaaggccccagag

SEQ ID NO: 6470 - DNA, 202 bp, Artificial Sequence
  Description of Artificial Sequence: Synthetic probe
ctcaatatattcctgaggaggcaagaagcactatcatgaatttcttccgcataccactcaacctgtttgtatgtgtggtgctttacaatgtgaatgccttyccaatcactgtcatgtttggcatgtgttctattttccttttcatcgcagcaattttgcagaggcggctgatggttgtgtctgaccttcacagatcgactaa

SEQ ID NO: 6471 - DNA, 202 bp, Artificial Sequence
  Description of Artificial Sequence: Synthetic probe
tgagccggcctgtgagagagaatattaagttgtagctgatccagaatttactgcagattcgcatttttgtagtagctgaacgttatgagcatgtaggctgyccatgtataagaaacgagaactggacaagaaatttcattgatgaggaaaccggcaattgacgattgacgaacctadaamaaaaagttaattaatcgttttg

SEQ ID NO: 6472 - DNA, 121 bp, Artificial Sequence
  Description of Artificial Sequence: Synthetic probe
tacgcctcagcttcatgatatcgatgcacttgctaagatggttgacccagcattaaatggratgtaccctgctaaatctctctcccgctttgcagacataattgcactatgtgttcagccg

SEQ ID NO: 6473 - DNA, 121 bp, Artificial Sequence
  Description of Artificial Sequence: Synthetic probe
gggggtgcttcatcgagtatatgactatcagtctgcagtcaaattagcgcaggttttgccwgccagaggaatctcaaagacccttccgtttcgggggaaaagatgcattccagggttgtgg

SEQ ID NO: 6474 - DNA, 121 bp, Artificial Sequence
  Description of Artificial Sequence: Synthetic probe
gcagagtcactggtttcagccatttgttagcactttttttcactggccatagtactaactwgtcggaaatgtaccccatgatctgtacatcaccagataagtatcaacctatcatgctggc

SEQ ID NO: 6475 - DNA, 121 bp, Artificial Sequence
  Description of Artificial Sequence: Synthetic probe
aggaaaagttataatcatcgacacagtggttgggttcgggtctccctctcatgaaatactkgagagccagcttctgatggacatgtgcatgatggtgctcctcgacggtaaagagcgagat

SEQ ID NO: 6476 - DNA, 121 bp, Artificial Sequence
  Description of Artificial Sequence: Synthetic probe
taggcatctcgtctccgaagaggcaattgattttctcgataaacttcttcgatttgaccaycaagataggctcacagccgaagaagctatggcgcatgcctactttgagcaggtgagggca

SEQ ID NO: 6477 - DNA, 121 bp, Artificial Sequence
  Description of Artificial Sequence: Synthetic probe
agtcacgcagatgtagctcaacgtatacagttgtttgttcagaggaatcgcatgtgaaaartgcagaatgattccaagaacaaggagaccgatgcccatggtaacccactgctttagccgg

SEQ ID NO: 6478 - DNA, 121 bp, Artificial Sequence
  Description of Artificial Sequence: Synthetic probe
gctttggctggtgagcatcgtgtgcctattcctcatgcccggactacccaacagaagcctkgtggctccaaggagcgccggaagagatctcgtgatggtagccagaaagctaagcagtgat

SEQ ID NO: 6479 - DNA, 121 bp, Artificial Sequence
  Description of Artificial Sequence: Synthetic probe
tgagatccgtgcggaaactcagcatgcgctggctgcatacttgaacgcactctcgacagargtagatcatgtaccatccaaggtatcaatcggtgctctcctgtctaaacaagggcccaag

SEQ ID NO: 6480 - DNA, 121 bp, Artificial Sequence
  Description of Artificial Sequence: Synthetic probe
ataaaagatgactatctgggcattatcagtgatcctggtgcagcatcataaatgatccagwcaagactgcagccttataatactcttcaacttcgacatactgatgcattgtaacgttgag

SEQ ID NO: 6481 - DNA, 121 bp, Artificial Sequence
  Description of Artificial Sequence: Synthetic probe
ccttgaccggacttctgaagttctgcggcagacgactatcaacttttatacgtctgactargtctgcattgctggagaagacgctgagttgttgcaccacacatacagtgtgagggcggtg

SEQ ID NO: 6482 - DNA, 121 bp, Artificial Sequence
  Description of Artificial Sequence: Synthetic probe
taagttggacaaaggtgctgtgctcaaagctatctgttcaggatttgaggagacaactgarcctgctatttgtttgagtgaagacgttcaaacaaatgagtgcttggacaacaatggaggt

SEQ ID NO: 6483 - DNA, 121 bp, Artificial Sequence
  Description of Artificial Sequence: Synthetic probe
aaggtaaatgggtgattttcaagtcttcatccttcctccgcaaagcaaagaaaataatccyggctttttaaactaattgggggttctaaccatataaagatgttctgttgaacaaacataa

SEQ ID NO: 6484 - DNA, 121 bp, Artificial Sequence
  Description of Artificial Sequence: Synthetic probe
tgcacattgttcggatgcacacctgagcaatgctatccagtgtttcagtccagtaagctcrtgtttgcagatgaagacggctagtgcagaaaagaaaagcatctgtaagcaaggcctgtac

SEQ ID NO: 6485 - DNA, 121 bp, Artificial Sequence
  Description of Artificial Sequence: Synthetic probe
gcgtgaagagaagctaggtactgcgaacccagatgtcgacgacgagaagcggaggcttgckgagctactcaaggaggctggtcgggggagaagcaggaaggcgatgtccctagaaaatctg

SEQ ID NO: 6486 - DNA, 121 bp, Artificial Sequence
  Description of Artificial Sequence: Synthetic probe
cggtggtcttgggtaccctagtttctaccagtcgcaggctggtatgccgcaggagcaccakcagaaccctgctgagggacgcttgaacagctcccagactgccccgactcagccttcacac

SEQ ID NO: 6487 - DNA, 121 bp, Artificial Sequence
  Description of Artificial Sequence: Synthetic probe
gtttacctcacattcgtcgtctatcttatagtgagaaacactacgctgtattctcgccttygctcatcattctcgaagagctcatgagaacttttgagactgttcattcatgaagatgaac

SEQ ID NO: 6488 - DNA, 121 bp, Artificial Sequence
  Description of Artificial Sequence: Synthetic probe
aaggaaaggtaaatatgagagtgggctatgtataaaagcctctccataagcagtgcctgtygtgatggtattttttatccaatcacggcattcgtgctttgcttggccgcaacctgacggg

SEQ ID NO: 6489 - DNA, 121 bp, Artificial Sequence
  Description of Artificial Sequence: Synthetic probe
cgtattattcaccttcgatgttgggatctgccatcggaaggccaattttgatttatactgrctcgtggctacaggtgttaaaacgcttcactgtgaagcaaaatttccactcaaatggtca

SEQ ID NO: 6490 - DNA, 121 bp, Artificial Sequence
  Description of Artificial Sequence: Synthetic probe
ctcactagccctggatgagaacatccttggagcagctgatggtgacgatgccatggtggakggcaggtaccgccacagcctggatctcttcttcaagatgtccaaggaagcagccgccaca

SEQ ID NO: 6491 - DNA, 121 bp, Artificial Sequence
  Description of Artificial Sequence: Synthetic probe
caggacgaaattgcttttttgtttggtttggatgatcactggggtccactgactcacatgraagagatctcaaagtatgctccaggggttgccttgtcgatcgagaaagaaggtcacacac

SEQ ID NO: 6492 - DNA, 121 bp, Artificial Sequence
  Description of Artificial Sequence: Synthetic probe
aaggcacccggcgcagtatggctcccattacttctccagatttcaggtaggaaaagaaggrtgtttctttcacctcttgcttttccacgcgggcaccgatgcaaacggctccccagatatt

SEQ ID NO: 6493 - DNA, 121 bp, Artificial Sequence
  Description of Artificial Sequence: Synthetic probe
cttgcttttacagaaaggaaaaatgttttcgcatgggggaaggggtactagtggacaactyggtcatggtgaaatagttgacaggaacacacccaagctgattgatgccctaagcccggat

SEQ ID NO: 6494 - DNA, 121 bp, Artificial Sequence
  Description of Artificial Sequence: Synthetic probe
gatttgtgtctacagtgctacgatttgcagcttcatgtgaggatttcatgattactagtcycgtctcgtggtgctaagaaggaggaaggggctggagatctgcatccacgtgggtccgtgc

SEQ ID NO: 6495 - DNA, 121 bp, Artificial Sequence
  Description of Artificial Sequence: Synthetic probe
gaacttcgtgaagttcacccatgcatctccctcgttagacatcatcgatggagaatcagakcccaggaaaaatatgagtggcatgggtagtacgaggtacatcagaactgttaacattggc

SEQ ID NO: 6496 - DNA, 121 bp, Artificial Sequence
  Description of Artificial Sequence: Synthetic probe
gtggccattgacgatagtaagagctctgcagttgcatcttgtggaggaggttgctgtgcgktcttctgtggggtgtcggttttaactttgtgggtgttcatgtaccttagaatgatgggtt

SEQ ID NO: 6497 - DNA, 121 bp, Artificial Sequence
  Description of Artificial Sequence: Synthetic probe
ttggtgtcctgttaaactacgaagacggcttggatggggaagaggagatcatcgcagagasatggctccaagtagggcaagaagtgcacccttcgacagagtgattttgtgtacagatatg

SEQ ID NO: 6498 - DNA, 121 bp, Artificial Sequence
  Description of Artificial Sequence: Synthetic probe
ccaagtagggcaagaagtgcacccttcgacagagtgattttgtgtacagatatgggctcamcaactacatcagaaagattctacgcggccgttgagtcgctacatactgtaacatatgctg

SEQ ID NO: 6499 - DNA, 121 bp, Artificial Sequence
  Description of Artificial Sequence: Synthetic probe
gataagatactaagcaacaaagcaattcctgttcacctgcgtgatgtccctgaatacctarttgaccccacaacaaaagaatccagcaatgcgatcaaacttttaagggctgctatgggtg

SEQ ID NO: 6500 - DNA, 121 bp, Artificial Sequence
  Description of Artificial Sequence: Synthetic probe
aatgtcagggcgttttttgcccctgtcaaactagggtttggagaaagagcgagaagaccaraggcgcaagaggtggtgatgtgtgttttgatctgtgtcgaaacgaacttgtacagtggag

SEQ ID NO: 6501 - DNA, 121 bp, Artificial Sequence
  Description of Artificial Sequence: Synthetic probe
ccaagaactaaatggtctatttcaataccttgctgctgtatttgcatctgatttacactcragaacgttcctgcgtctccctaagaccatgggagtggatttccgtgcctcatgtttctgc

SEQ ID NO: 6502 - DNA, 202 bp, Artificial Sequence
  Description of Artificial Sequence: Synthetic probe
ccatgctgagttagaaggagcaaccatatataggaggatgtaccaaaagacgagatgtttctcttcagattactccattagttcagtggatgcaagtgttrttcagttagttgaggggccgatgtctgatggctgatggctctctgattgattcgtgtacctcgctcagtgatcaccaaccttcaccctccctggcatgatc

SEQ ID NO: 6503 - DNA, 121 bp, Artificial Sequence
  Description of Artificial Sequence: Synthetic probe
gggatcctcaaagatgcttccctatttcaacatgtttattttctccaatattggtggagtrgttgctgatcacttgattacaaaaaggattttatcagttaccaagacaaggaagctcctg

SEQ ID NO: 6504 - DNA, 121 bp, Artificial Sequence
  Description of Artificial Sequence: Synthetic probe
agttgtaggcgcgtgtcggttttgcaccgacgccgatctccaccaacacttactcctgcgwggcataccccttgcgcaccccgacgaggctgctggtcgtcgagaagtcccagctgagcgg

SEQ ID NO: 6505 - DNA, 121 bp, Artificial Sequence
  Description of Artificial Sequence: Synthetic probe
tttgattgcactgtgggaagcagaagatgatggtgttccagtctgcgtgggtgaagtgtcrgtttgatgcatggcctagaggcttgagttagaaattatagaatcagttgacaattgcctt

SEQ ID NO: 6506 - DNA, 121 bp, Artificial Sequence
  Description of Artificial Sequence: Synthetic probe
ctggcgttagacggagtacaagaatccgttcaaggcctttggaggattggcgtggagaaakattcctatatggccgtatacatgacacaatgtcaacagtcatcggcattaaatcatattc

SEQ ID NO: 6507 - DNA, 121 bp, Artificial Sequence
  Description of Artificial Sequence: Synthetic probe
gggatggcaggcaaaccatgagcacaaagaggatgacactgaaggaggcactccttgtacrcaataaatgccaggagcttgatgatatctgcaatctgtgccagtgggtactcccaagata

SEQ ID NO: 6508 - DNA, 121 bp, Artificial Sequence
  Description of Artificial Sequence: Synthetic probe
aacatgtctaggggactttcgaacatgcatgtaggtcttcttaagcctgtaggtattgcartcccagacacgaatactaccgtcacttgaagtggtaattaacaacggtcgtgttggatgg

SEQ ID NO: 6509 - DNA, 121 bp, Artificial Sequence
  Description of Artificial Sequence: Synthetic probe
gctatatgctctttgtctgctttgtacttgtgtcagtcccagatatagatattccgcatcktcagcttgtgttctgtttatttctgtctgcacttcatagcttgaagatkgggaacgagct

SEQ ID NO: 6510 - DNA, 121 bp, Artificial Sequence
  Description of Artificial Sequence: Synthetic probe
gcctgttataaattgcaagaaagctctgcgttcttggcgtccaaactcttgtatgatctcyaacaaattaatgactgcagggctgctggaggtgtagccatgatcaaattttatgtgatca

SEQ ID NO: 6511 - DNA, 202 bp, Artificial Sequence
  Description of Artificial Sequence: Synthetic probe
atttcttggaggtcgaacagtgttcgcccacaagaagggcaagacacatattccgkttttgtgttgcgcatccggcaaccctgtagcaagttgaaggatgyatccctcaagaattcaaactcttggttaktagcttcaagaagtaaaccatcaccaagaccatcaactagaagagcaccaacattggtcccagcaccaataa

SEQ ID NO: 6512 - DNA, 121 bp, Artificial Sequence
  Description of Artificial Sequence: Synthetic probe
cacgggtaaaggaagcttacctagagtccgagagggttaggtgaaagatgtactgtgttgraaaggcaagtctgtagtaaccagatactcccgtctcttctgaggccattcttaagatctc

SEQ ID NO: 6513 - DNA, 121 bp, Artificial Sequence
  Description of Artificial Sequence: Synthetic probe
cttccacaaactccttcactgacctacctcttccagtgccaacgttgtatatgccaacttkgcctctttccgccttgttgagcgcttttacatgggcgtcaaccaggtcagtgacatcaat

SEQ ID NO: 6514 - DNA, 121 bp, Artificial Sequence
  Description of Artificial Sequence: Synthetic probe
ggtacggggaggcggaggccaggaggacgctcagggcggtgtgcgcctgaagatctctgasgcagaggttgtgtgtaagattttgtgtgtgtgtgtgtccaaatcgacacggaagggatcg

SEQ ID NO: 6515 - DNA, 121 bp, Artificial Sequence
  Description of Artificial Sequence: Synthetic probe
caaggtttgcctttggtggctcagggaagtcgtcatcaggttccttctcatcgggatggcyatttcctcggtagtgttcttttcgaggaggtggcctttccagggactgtatctcagcatc

SEQ ID NO: 6516 - DNA, 202 bp, Artificial Sequence
  Description of Artificial Sequence: Synthetic probe
tgacctcaaagccagtcagctcatcaatgaaaaagaacactcctagagcaacaacagttgctggagcatttagcaggaacatcttcaagtagtcgacggtyagatcgctgtaaacttttcgactccgtagactacaccttggaccctctgttacgatgtcgcttccgtcttgctttagcctgagcttgagctcgtcgaactc

SEQ ID NO: 6517 - DNA, 121 bp, Artificial Sequence
  Description of Artificial Sequence: Synthetic probe
tgacaagacaggcagcggcaagtttgtcctttcagttgcctggagcccagatggcaagctsttggcatgtggatccatggatggcaccatcgccgtgtacgacgcggtgcgcatgaagttc

SEQ ID NO: 6518 - DNA, 165 bp, Artificial Sequence
  Description of Artificial Sequence: Synthetic probe
gtttggggttggtggaatatgtaattcatgtcttgatccagcaaatgcttcagtaattactcamtgtggtggaatcccattggttgtacaatgcttgtctagcccagttaggaatactgtgatttatgcacttggtgccttgtactacttatgcaactcttcrac

SEQ ID NO: 6519 - DNA, 121 bp, Artificial Sequence
  Description of Artificial Sequence: Synthetic probe
tgccaagtgccccagtgtcgtggtctccttgaagaaggccatgcactgaatccaccacatsgtttggagttcattggtgatatatacgtagggacatagggtcatggggcacctatgtatg

SEQ ID NO: 6520 - DNA, 121 bp, Artificial Sequence
  Description of Artificial Sequence: Synthetic probe
cccactattgataatcaaggttaggcttcacgtctccactaatcctgagcatgatcgtgayggtcataccatcttatttgaaggtgatcttacctttgaccgtgaccagtatgaaaaatca

SEQ ID NO: 6521 - DNA, 121 bp, Artificial Sequence
  Description of Artificial Sequence: Synthetic probe
tctgagaatttatataggctctcatttttgctgtgacgggatgtattctttacaaatatgmagaactgcccatgggctagttagaagtttacaagcgagttagaagaaccatggttgcaag

SEQ ID NO: 6522 - DNA, 202 bp, Artificial Sequence
  Description of Artificial Sequence: Synthetic probe
ctgctgaccctcttgtggagggatttttacgatccaagattcatgcagcttggcaagatggaaaatctagagtggctgggcacctaccctcttatggtctmtggacaagatgaatacaaaatactcaatagcttttgtacgaggcttttgcagcgctttgagctcatccagaatttgatactcatgcttgtctatcggccgg

SEQ ID NO: 6523 - DNA, 121 bp, Artificial Sequence
  Description of Artificial Sequence: Synthetic probe
ccaatatcattggaggtgatactgttgtaacgtcacttgcctttgtcactaatgttaccaygtatgggccttttggaaaagaaaatggcacaccattcagcagccaggtgccggacaagag

SEQ ID NO: 6524 - DNA, 121 bp, Artificial Sequence
  Description of Artificial Sequence: Synthetic probe
agcagcaacgaactccttcccatacttggtggtaaacaaattacggagatgcattagctcwggcaagtctgagcatcttcctgatgcaaagattatactggctattgcttctcgcaattct

SEQ ID NO: 6525 - DNA, 202 bp, Artificial Sequence
  Description of Artificial Sequence: Synthetic probe
gggtcgagttccagacgcgcacactcgtcatcgaccacaagtctgtcaaggcccagatctgggacaccgccggccaggagaggtatagagctgtcacaagygcatactacagaggtgcgctgggagctttgctagtctatgatatcaccaagcgccaaagctttgaccacatacctcgctggctggaggaactccgggggca

SEQ ID NO: 6526 - DNA, 121 bp, Artificial Sequence
  Description of Artificial Sequence: Synthetic probe
ggtggtgctagcgccaccaaaggctaagaagaagaaaaaggcgcagaggggggcttgctcmatcttgtgatctaatcaatcggtagacaaagaagaagggcgaagttgccatgctatatta

SEQ ID NO: 6527 - DNA, 121 bp, Artificial Sequence
  Description of Artificial Sequence: Synthetic probe
catgcaatcccagcacaaggaccctgatgatcagctcaccctattcgtacacattaaaatygcctctttcaacccttctttgtccaatgatgtctccaccatcacctcttgcacattgttt

SEQ ID NO: 6528 - DNA, 121 bp, Artificial Sequence
  Description of Artificial Sequence: Synthetic probe
cggtggacgtgcccccgagtacctggcgctggatgatagggtgcttaggttggccaagggrttcatggatggaggaaagccggtcgcgtcgatctgccatggccagcagatactctctgct

SEQ ID NO: 6529 - DNA, 121 bp, Artificial Sequence
  Description of Artificial Sequence: Synthetic probe
caaacaatcacagcagttggaggccgtgccaaggaagggtgcacatgatcccgagaggaarccaacagagaccatcgtcccgctgcctaaagttacttcaagaagycggcarycacagcaa

SEQ ID NO: 6530 - DNA, 121 bp, Artificial Sequence
  Description of Artificial Sequence: Synthetic probe
atactggcagcaagacaagtggactggttgtttccctgtcaagtggcacattgtaaaggayattcccaacaatttattgaagcacattattcttgagtataacgaaaacaaaccagtgaca

SEQ ID NO: 6531 - DNA, 121 bp, Artificial Sequence
  Description of Artificial Sequence: Synthetic probe
cccccaaaaaggcaaatgggaccgtgctaaaaatgttgatattctaggcgtcgaactagcyggaagtgcagctcaattgccacttaactggaatattcaagttagcacatggctacgatac

SEQ ID NO: 6532 - DNA, 121 bp, Artificial Sequence
  Description of Artificial Sequence: Synthetic probe
acctttgagaagttctctatagtctccatttcttgtcattgagttaaccacgccatcatcyttaactacaccaagtccaatcaaggtcacctttacgatgttgagcgcgatcacaagtgaa

SEQ ID NO: 6533 - DNA, 121 bp, Artificial Sequence
  Description of Artificial Sequence: Synthetic probe
agagagaaatagtgtgattagcaatgctcccgatatcaagggaatttaggatcagagttcyaggaatgatacgctgaccctggtagtgtttgctgctagatttggtgtcgaggcgaaaata

SEQ ID NO: 6534 - DNA, 121 bp, Artificial Sequence
  Description of Artificial Sequence: Synthetic probe
gctggtatatatcttcttgatgatggyttcagcttcctagtatggttaggtaggatgctcsaacctgagctcgtgaacgacattcttggagtcagcttgggaaacttccctgatctatcaa

SEQ ID NO: 6535 - DNA, 202 bp, Artificial Sequence
  Description of Artificial Sequence: Synthetic probe
tttggtctggttctgaaacttctgctagtgcactcagcatactgactacttcatacgtatcgtccaggtagaacttagctttgcttggtttctgccccacrgtacatgcaaacagtggtgtttttggagcaacaacgctccttttcatggcatctgcaatgttttcaaacatgtcctcatctgacctgtcatccccaatgca

SEQ ID NO: 6536 - DNA, 121 bp, Artificial Sequence
  Description of Artificial Sequence: Synthetic probe
ctgggcagaaggatgcagcaacggaatgctcaactttgaccatgatgaggagagataccargcgatcaagaatctcagggagcagatgatagctgggtctgggatcatcatgtcacatggt

SEQ ID NO: 6537 - DNA, 121 bp, Artificial Sequence
  Description of Artificial Sequence: Synthetic probe
ttcccgggatggaccaccaatcattagcttcagtgatgcatcatttggttatcctggaggkcctattttgtttaaaaacttgaattttggtattgacctcgacagccgtatagcaatggtt

SEQ ID NO: 6538 - DNA, 121 bp, Artificial Sequence
  Description of Artificial Sequence: Synthetic probe
tccgagacctccaaatcccacaatagaaaccaccttcagctcttgatctggatgcatcaayaactcaacaagctcatctctaggggtatcaatacccataagaccagccgtatccgcaaaa

SEQ ID NO: 6539 - DNA, 121 bp, Artificial Sequence
  Description of Artificial Sequence: Synthetic probe
ggagaccgaagagcttggagtctccatcatgcatgacctgcatcagcagcgccaatctctyttacatgctaatgatacattgcacagtgtggatgataacattggcaagagcagaaagatc

SEQ ID NO: 6540 - DNA, 121 bp, Artificial Sequence
  Description of Artificial Sequence: Synthetic probe
agctgggatgtacgcaatccgtgcccgcaggaagaccgtgacggaaaaggacttcctcgaytcggtcaacaaggtcatcaaggggtaccagaagttcagtgcgactccaaaatacatggtg

SEQ ID NO: 6541 - DNA, 121 bp, Artificial Sequence
  Description of Artificial Sequence: Synthetic probe
cgagaaagatgaagagaaagccttgtggagcgcctacttggaggttgctgataagatccamcctggtgtcgatgttaaaaccttcgccgatgcctctctgcatctgatacagcccctggaa

SEQ ID NO: 6542 - DNA, 121 bp, Artificial Sequence
  Description of Artificial Sequence: Synthetic probe
ggacacccggagcaacatctcctacgcctacaacagcttctaccagaagaacgaccaggaygacgtggcgtgcgggttctcgggcttcgcgacgaccaccggccaggaccccagcaccggg

SEQ ID NO: 6543 - DNA, 121 bp, Artificial Sequence
  Description of Artificial Sequence: Synthetic probe
cgacgacaagttcagagccaagatcacggatcttggcatggccaagtgcctgatgaacgayggcgtgacgagctgctcgagctcgccggcgcggatgctgggcacgttcgggtatttcgcg

SEQ ID NO: 6544 - DNA, 121 bp, Artificial Sequence
  Description of Artificial Sequence: Synthetic probe
cctgtttctcctgcgaccgccgagcgaatggaagaagagcgactgggggatcgtcacgctrtggatcgttttgatcgggacggcgttctatctgcagagatgaatgtctcctggcaactct

SEQ ID NO: 6545 - DNA, 121 bp, Artificial Sequence
  Description of Artificial Sequence: Synthetic probe
ggataacagggaacagctttgatgatacagacaaccttgccgggaggcaacaccaaaatckggagtccagaaaccgtctctctctctatctctctctctctctactgagaggtgcttagat

SEQ ID NO: 6546 - DNA, 202 bp, Artificial Sequence
  Description of Artificial Sequence: Synthetic probe
ttggcgcttttgtaaacgcacttttacttgctaagccggttggcttaaagaaaacttcgaaatatgttggatacgtgaagaagtttacgttgagtagcacratgggacctggattttctgttaccataccctcactatcggcggcggctgataattataccaaagtgcaagtcagctaattaaccattttatttgtgggcac

SEQ ID NO: 6547 - DNA, 121 bp, Artificial Sequence
  Description of Artificial Sequence: Synthetic probe
cattaaggagttcttctccttttctggagacattgaacatgtggatatgcaaagtggtgaygagtggtctcaagttgcatatgttacttttaaagacgcccaaggagcagagactgcactt

SEQ ID NO: 6548 - DNA, 121 bp, Artificial Sequence
  Description of Artificial Sequence: Synthetic probe
cctgggcgccatacagttgctgctatatgcctacttcaggaaagaaggatccagaagagaygagtgcacacggccattactagtcacacatgcatgagcatgcaagacaagaagcaagctt

SEQ ID NO: 6549 - DNA, 121 bp, Artificial Sequence
  Description of Artificial Sequence: Synthetic probe
cagggcacaactgatgatccatgcaacttgacattaaatagtagcgacgtcgatcactcamtggtctgaacacgaaaccatagagatttcagtgctgggcgggagggtggtagatcggagt

SEQ ID NO: 6550 - DNA, 121 bp, Artificial Sequence
  Description of Artificial Sequence: Synthetic probe
ggcaatatgacacttgaattcagtcaggcggaaagtacatcccatattatacaccccacayagtagaacaggaacaaagatacatgcgatgcagcgacgatggctccaacatcttccacct

SEQ ID NO: 6551 - DNA, 121 bp, Artificial Sequence
  Description of Artificial Sequence: Synthetic probe
tgtttacaacctttttccgacacaggtagtggcagataaactctgcttattgaacaatatrttctcgacttggaaagacaaagcagaatctaaatgagtatcatgacatacaggcacaatg

SEQ ID NO: 6552 - DNA, 121 bp, Artificial Sequence
  Description of Artificial Sequence: Synthetic probe
ggacagcagttgaacttttgaaagcaacgagggacattgaatcccagttggaaaaaatttkkrctctccgttgctgattcttcatggagcagcagaccaggtaaccgaccctcatgttagc

SEQ ID NO: 6553 - DNA, 121 bp, Artificial Sequence
  Description of Artificial Sequence: Synthetic probe
aggagacagaagtagatgatacagactcgttctcgacttcagtaaaagtgaaagcaaaacraatattgtcgagggcgaagtcagcttgctccatgtcacttggcctcggggaggagacaat

SEQ ID NO: 6554 - DNA, 121 bp, Artificial Sequence
  Description of Artificial Sequence: Synthetic probe
caatttctcttgatggctagaggattgtgggagctattcactagatgatgatagcatttcygcaatgtataagtgattctcataacatgatactgatgtacaaaggctctattatcttctc

SEQ ID NO: 6555 - DNA, 121 bp, Artificial Sequence
  Description of Artificial Sequence: Synthetic probe
agcagcttttggtgaagctatgcttcacactgttggatatatttatgtacgacaagcagcwagagaacgtggaaagagtaaattgtatatgggcgtaccattcattgccgagtgggtaagg

SEQ ID NO: 6556 - DNA, 121 bp, Artificial Sequence
  Description of Artificial Sequence: Synthetic probe
tagccggacagccgggttgcggtctgtagctgagacgaagagtgggcctctaacaccgtcrcacactactcagtcggtttacgggtttagcaggccgggccaaccggcgagcccccgggta

SEQ ID NO: 6557 - DNA, 121 bp, Artificial Sequence
  Description of Artificial Sequence: Synthetic probe
gtataacctctggaatggggagaagaaaggaggaattaccactcacgggaattcatgaggyccgatgatagaggtaccaggagggggttttctgatttcaggggtgctggtcagagaaatg

SEQ ID NO: 6558 - DNA, 121 bp, Artificial Sequence
  Description of Artificial Sequence: Synthetic probe
cacgaaatcaagagcgacggttgttgacgaaataaccaataacctcgtcgcccctgtcatwggcgaagccaatctggcagcatacaaatctggtttcaatgactcacagtcagatcaggcc

SEQ ID NO: 6559 - DNA, 121 bp, Artificial Sequence
  Description of Artificial Sequence: Synthetic probe
tggtcgtatggtcagtcactacaagtccgcattgcttatggatccattatcacatacatgrtcacatgaatattttgtactgccgaggggtctaagttcactatgtttgacatgtcccctc

SEQ ID NO: 6560 - DNA, 121 bp, Artificial Sequence
  Description of Artificial Sequence: Synthetic probe
gccatcatgattgtgaggagagctgttaagaattcaacagttgtgcctggtggtggtgccrttgatatggagataagcaagtatctccgacagcatgcgcggacaatagctgggaagtctc

SEQ ID NO: 6561 - DNA, 121 bp, Artificial Sequence
  Description of Artificial Sequence: Synthetic probe
ccagatggaacgaacgctcaaacaaagccgcttcccaacgactgcggctgcgatgacggcrtcaagccgttcctcatccgggaagcttacctgtggmtgtacctcctgrttctgttctttc

SEQ ID NO: 6562 - DNA, 121 bp, Artificial Sequence
  Description of Artificial Sequence: Synthetic probe
cacaagaaaacaacatgtggactgagtacttggcactaggaattctggtttttaaggtgcmatcattgcgaagacaatttgctgtggtgcgtgaagtacatcacccatcgcatcagccatg

SEQ ID NO: 6563 - DNA, 121 bp, Artificial Sequence
  Description of Artificial Sequence: Synthetic probe
ggagatccagattaatggtgggaccattgcagacaaggttgactatggctacaagttcttygagaaggaagtcccagttgaagccgtcttccagaaggatgagatgattgacatcattggt

SEQ ID NO: 6564 - DNA, 121 bp, Artificial Sequence
  Description of Artificial Sequence: Synthetic probe
cattctcctccatgagacaggacgaagacgacgacgcttacgctgagcataatctcgcacrgaaaatcttgactgcagccaggaaaggatctgacagccatagagaactgccaaagttcag

SEQ ID NO: 6565 - DNA, 121 bp, Artificial Sequence
  Description of Artificial Sequence: Synthetic probe
cggcctctttgtcattgtaagagatttcttggtgatgctagataaagcatgcaaggaagtygggggcatcgcagaagaaggcggcaagtaaatctcagagcagtggcagtggcaacctagc

SEQ ID NO: 6566 - DNA, 121 bp, Artificial Sequence
  Description of Artificial Sequence: Synthetic probe
gggcgacctgcggaagagcatgatggaggacatgccgatggtctcctccaaggtggacggmcccaacggcaagaagatcgacggcttcctgtacaagtacaggaaaggggaggaggtgagg

SEQ ID NO: 6567 - DNA, 121 bp, Artificial Sequence
  Description of Artificial Sequence: Synthetic probe
ctcaatcaagaactgcattgctcgcctaagcacaatggaattctcgcaagaggagaaggtraaagctctacgagtctttaaaagtgcagacaatcgcgagctcttcatctgcactgacctt

SEQ ID NO: 6568 - DNA, 121 bp, Artificial Sequence
  Description of Artificial Sequence: Synthetic probe
gagaaggtaaaagctctacgagtctttaaaagtgcagacaatcgcgagctcttcatctgcrctgaccttgagacggctgcgatgtggctgcgaagcgaaatggcctagcaaaggtgtgtgc

SEQ ID NO: 6569 - DNA, 121 bp, Artificial Sequence
  Description of Artificial Sequence: Synthetic probe
agccctgtccgagctgattgttgccttttctcgtgagggtcctacaaaagagtatgttcarcacaaaatgtcagagaaggctgccgacctttggagcatcatttctcagggtggctatata

SEQ ID NO: 6570 - DNA, 121 bp, Artificial Sequence
  Description of Artificial Sequence: Synthetic probe
gtgccggcggtgctgggcgagaagacggggacgcggccgaagatgctgatgatcgagcggmaggggcacgcggaagctgctgaacctgcacgcggtgcgggagctgtgcgagcagctcggg

SEQ ID NO: 6571 - DNA, 121 bp, Artificial Sequence
  Description of Artificial Sequence: Synthetic probe
caccgtcgccgtggttcatcacgtccatccctaggttcaggtacaccatcctgttgtccargctcaggttcatggctgtgctcgctccaccggcgccgctgtacaccgcccccaccgccgc

SEQ ID NO: 6572 - DNA, 121 bp, Artificial Sequence
  Description of Artificial Sequence: Synthetic probe
gtcttctggggcatgatggccacaccatagcttagaggtgataaacagatcttcgcgcttsactacaccctcttcaaatagcttcttcagagccmaaacccacctctttctcgttagttgt

SEQ ID NO: 6573 - DNA, 121 bp, Artificial Sequence
  Description of Artificial Sequence: Synthetic probe
gggattatctggctctcctgccattagtggacatttcatcatgacttacacccttagaaarcctggatgcagcatttgcacagactagagtagaaaaggaagaaaatgtatgtattgtttt

SEQ ID NO: 6574 - DNA, 121 bp, Artificial Sequence
  Description of Artificial Sequence: Synthetic probe
aattttgatgttagcaacaccatccgctccagctgtcacatttccaagatcaccagcatgrcggatttcatcttctggtgccccatgcacgtgaccagcggggttgaagtgtggtccagtt

SEQ ID NO: 6575 - DNA, 202 bp, Artificial Sequence
  Description of Artificial Sequence: Synthetic probe
tcaccaccgacgcctccacctgcgccaagtacgccgccggggccggggccggcaaagatgcagccacttcaggtagcactgccccgtcttcaggatccacrggaactgcaacttctacagcggccaagccaacggccagcgcaggcacgatgcatcgccagagcttgaaggccgcatcttccttggtagtaggcttcagttt

SEQ ID NO: 6576 - DNA, 121 bp, Artificial Sequence
  Description of Artificial Sequence: Synthetic probe
gaatctgttttttcagctttgacatgttaccatgggtactgctaagcttctgcatgcatgstctccagctaaatgaacaaaattagactacgtcaataccagtaaacagagcatacaggct

SEQ ID NO: 6577 - DNA, 121 bp, Artificial Sequence
  Description of Artificial Sequence: Synthetic probe
atagtgcctagcgctgactccccacacaagcacatacttcacatccttaagcaagctcctrtggatatgattgcagaagtcttcaactgtgcaaccaccccggtctgtagaaagaacaacc

SEQ ID NO: 6578 - DNA, 121 bp, Artificial Sequence
  Description of Artificial Sequence: Synthetic probe
agtagctctgtgagtgtgtcgaacagtttcaaggttgaattttccagttcagaaggagtgrtctctgagttctcactcatcagaacttgacgctggacaagcatgctagtcgcgataacaa

SEQ ID NO: 6579 - DNA, 121 bp, Artificial Sequence
  Description of Artificial Sequence: Synthetic probe
gttcagtatggacatggggcagagtcaggagatcgccacctcttccaacagctacgacggytcgttgcaaacggtccacatgaaaatggagctttgattgacatcgccgggtggagaagct

SEQ ID NO: 6580 - DNA, 121 bp, Artificial Sequence
  Description of Artificial Sequence: Synthetic probe
gaggaagacactggaatgggggatgtagactttacaaaagctggtgctggtacagactgartctcctccggtgctacactggttggatgagttcacttgtacagcagcgccagcagggaag

SEQ ID NO: 6581 - DNA, 121 bp, Artificial Sequence
  Description of Artificial Sequence: Synthetic probe
gaaccattctgtgtacaacgtcttcccagtcccattgatggttgctcctcttgaagaatcrggtgggacatcggcattcgcaactccaacctctgaaccgaggggtaagcaacattgaagg

SEQ ID NO: 6582 - DNA, 121 bp, Artificial Sequence
  Description of Artificial Sequence: Synthetic probe
cacagccccacgcctttccactgcctcctccattcccctactgatacatcgatgttcaccrtaccatggatgtctccagcatctttgagatacttgctagcagcagatctgtcaaaaggca

SEQ ID NO: 6583 - DNA, 121 bp, Artificial Sequence
  Description of Artificial Sequence: Synthetic probe
ctgtcgatatttaggcagcgcgcattgttacgtaccccacgtctagtgtattgacatagtrttcacggttagatcaattccatcatccattgcattcatagcttcagagttcagaacgtac

SEQ ID NO: 6584 - DNA, 121 bp, Artificial Sequence
  Description of Artificial Sequence: Synthetic probe
cttcgcaagtttgagatccatggtgcaatgtttgcagcactgtgccaaaagaacagcctgraaaatttggattcaaggttctcgatatcttcattggaagaggtcctcatcaccgtgcgct

SEQ ID NO: 6585 - DNA, 121 bp, Artificial Sequence
  Description of Artificial Sequence: Synthetic probe
gttcttgtacaacccttccatttttaccaaattcgttttgtgtaaaatttgttgcccatcytctcttggcctgtgtgagaatgtatgtatggtcttctcagctatagaatttttctaggaa

SEQ ID NO: 6586 - DNA, 202 bp, Artificial Sequence
  Description of Artificial Sequence: Synthetic probe
atcctcaccggacggcgttcgatggagaagaaccgacccaagaaagagcasrggmtgctggaatgggtgaagcagtaccccgtggaaagtaggcacttcascaagatcatagacaccaggctcgaaggccgctactccaggaaggggactacagagatcgccaagctggccaaccgctgcctcgcgaagcgctcgagggacc

SEQ ID NO: 6587 - DNA, 121 bp, Artificial Sequence
  Description of Artificial Sequence: Synthetic probe
gctgccagaatgttcagcgagaacaagcgagagtacaaccgcaaggtccgtgagatagtckagcagagctggactgctgactaaggcagggtaatggtgccgttgccagaatgtcacaata

SEQ ID NO: 6588 - DNA, 202 bp, Artificial Sequence
  Description of Artificial Sequence: Synthetic probe
tccacttagctgacggtctttatatcggtacataattatcgaagcaggccacatgatgcatcattacagagaggttttctacctgaaattgactgggttcrgcactcctgcccaaatctttgttcagttaacaatctcatgtggtttatgcaattatgagtctagacttctgtaatatgtatattatgtaaatccataattt

SEQ ID NO: 6589 - DNA, 121 bp, Artificial Sequence
  Description of Artificial Sequence: Synthetic probe
ggagaggaggatctatcttggcatccagccctgatttcgcgtcgatgtgtgttacaaaatyggagtacgaggagatggggtcggcacggtgccgtcgaagatttttccactgaagactgaa

SEQ ID NO: 6590 - DNA, 121 bp, Artificial Sequence
  Description of Artificial Sequence: Synthetic probe
gcaatgtgatatttctctttattaatattttccagaattccctcgatggacccatgttgaygaataagcttcagagctgttagacccccaatacctttaatgttatcacagtagtcacatc

SEQ ID NO: 6591 - DNA, 121 bp, Artificial Sequence
  Description of Artificial Sequence: Synthetic probe
accaacatctgtaacttctggatgttctacttctacccaggcagctgatgagatgtccatktcctcgtcaacaggtttgacctcaacgacagagggctcaacctggtcactggagcccatt

SEQ ID NO: 6592 - DNA, 121 bp, Artificial Sequence
  Description of Artificial Sequence: Synthetic probe
gaaaaaaccagatgatgggaaaatgaaaggcatcgcattcatcaaggatcctgatggctaytggattgaaatatttgacctgaacagaatcggggaggtcacggctacagcgtcctgaagt

SEQ ID NO: 6593 - DNA, 202 bp, Artificial Sequence
  Description of Artificial Sequence: Synthetic probe
tcccgacaaagtaaacatgggggcaagtttcaacaaggaamgggtccttgtctgtgtatggataacatcctaggctgttcggtgcagtcggagcaagatgrcgccatgtcaatgtcctttccatgaattctagcatgtctttggcatcagagtacttgtagaggtacatctatgttctggccagacgttccaagaacttgac

SEQ ID NO: 6594 - DNA, 202 bp, Artificial Sequence
  Description of Artificial Sequence: Synthetic probe
tatccaaggatgctaaggctcgcaagttggctttccagcactggatcgaggctattgatccaagacatcgctatggacacaacctgcatttctactatgaygtttggtgccagacccaagctggccagccattcttctactggcttgatattggtgaaggaaaggatgttgatcttccagtctgtccaagggctctgctaaa

SEQ ID NO: 6595 - DNA, 121 bp, Artificial Sequence
  Description of Artificial Sequence: Synthetic probe
agtacatgaacaatatacacgaataatagcatcaaactctcggatttcagtacagcatacrcgaataatctttgaacatgcacaattcagactcttaaactttagtttttttcaaattcga

SEQ ID NO: 6596 - DNA, 121 bp, Artificial Sequence
  Description of Artificial Sequence: Synthetic probe
gttgatgctccgatgaaaggcaaagctaggagatatgggtctaaattcccagttggaaaartgacatgtctagatgctgaagatctccaattactacactcgtctctggtgtcatgttccc

SEQ ID NO: 6597 - DNA, 121 bp, Artificial Sequence
  Description of Artificial Sequence: Synthetic probe
aaatgaatgcattgctcagttcgaagagaacaattcgctgagaaataaactcaaagacctygctgatcaatataatatcattcagcagaaatatgctcatcagttgaaagaaaagacgctg

SEQ ID NO: 6598 - DNA, 121 bp, Artificial Sequence
  Description of Artificial Sequence: Synthetic probe
tttggatgaggacatgaaggtcaaaggtaaggcagcaattgatgtggtatgcaacccactrgggaaatctggaggtgccttgatccagcagttcatgatcttgtcatttggatctcttgcg

SEQ ID NO: 6599 - DNA, 202 bp, Artificial Sequence
  Description of Artificial Sequence: Synthetic probe
ccccgtgtgggtctgttcggatttgccatttgacgtctcatcgggttcctgctggcttccaaagtggtcactccgtactaccaggagtagaaccaaaaacrcggaacaggttaccataagagccagttgcaacatgaagtccatccccactaagacaacactcgaacttgtcaaatattgagtcgttctcatacagatcaca

SEQ ID NO: 6600 - DNA, 121 bp, Artificial Sequence
  Description of Artificial Sequence: Synthetic probe
gagctacaatgtcttaagacgacccaacattttaccacctaataacacgaaagagaaggaraacatagcatgccacggctataacttatcacaaggtagagacctactagtatcaaaatta

SEQ ID NO: 6601 - DNA, 121 bp, Artificial Sequence
  Description of Artificial Sequence: Synthetic probe
cacctgatgggagtgaacggggtcatagtggacctcgtgcctgagatcaccaaggccatawccgatctcatcgccatgccacacactgacatggaaaccgtggatttaagcagcaaggtgg

SEQ ID NO: 6602 - DNA, 121 bp, Artificial Sequence
  Description of Artificial Sequence: Synthetic probe
tctgaacatataaaatgctataccatgagtgtactgaatcctgacggacagacaagcaacraagatatcatatttctttaccgacttgttcctggacaggcgctcttgagctttggacttc

SEQ ID NO: 6603 - DNA, 121 bp, Artificial Sequence
  Description of Artificial Sequence: Synthetic probe
tacactgtcttctctaggcccctatggaacttatgccacacgataagaagcgttatgaaaycaaggatcatccgttgagccagtggttctcaaacttctctgaagcagatgaactattaaa

SEQ ID NO: 6604 - DNA, 121 bp, Artificial Sequence
  Description of Artificial Sequence: Synthetic probe
tgaagttaatgctgccattcttacaagccaaagtcacgagaaagatccaaagctccccagyctgttgaagatgttgatttggactcaaaaccagctgaacgagaaggcagcatatccccaa

SEQ ID NO: 6605 - DNA, 121 bp, Artificial Sequence
  Description of Artificial Sequence: Synthetic probe
aagtaaatcacacctggaaattgatctaagagatattgatgagaaaagaaggaatgatgtyattcagaaggttcaccaatctgcgattaatatatcaaagatccgcgcagtcgagctatca

SEQ ID NO: 6606 - DNA, 121 bp, Artificial Sequence
  Description of Artificial Sequence: Synthetic probe
ttccacccttgaggtaatgggagcaactatcggagggaaaggtgaatgggctattgttggsgggcaccggtgagttcaggatggcacgtggtgttattgacagaaccttctttgatagaac

SEQ ID NO: 6607 - DNA, 121 bp, Artificial Sequence
  Description of Artificial Sequence: Synthetic probe
atgacgacgcagtgtccgcggaagcagctgaggacatcatcaagcatctagagataaaatkagttggagtaaattgcagagcttctcccagattttgtaattagctgcgtcgtgtgcacat

SEQ ID NO: 6608 - DNA, 202 bp, Artificial Sequence
  Description of Artificial Sequence: Synthetic probe
ggcatctagtgcactcggctcttgttttcccaaacacgtgtagcacacacagatccgcgagcagacacatcttttaccgagccggtctgcattatcgatcygatgaattttctgctggtcgaggaacagtaggcccatcagctgttgcgctctgtttgtgtttttcccacacatgtgtgagccggacaatcctggatacaaa

SEQ ID NO: 6609 - DNA, 121 bp, Artificial Sequence
  Description of Artificial Sequence: Synthetic probe
ttagcaacactagcgtggaaagcagagaaggaataaaggctatcatcggtatgatgaacakggccgagtcattgtatgtgcatgacaattcatccatcgccactattatcactgaagacat

SEQ ID NO: 6610 - DNA, 121 bp, Artificial Sequence
  Description of Artificial Sequence: Synthetic probe
cggtctccacatgcaaggaagactgtacaaattgctagcttctatctgtagggtcgtgttytgtttcgagatggtctcgctgatgatgtctccacggtgcctggggcgctgcacttgcaag

SEQ ID NO: 6611 - DNA, 202 bp, Artificial Sequence
  Description of Artificial Sequence: Synthetic probe
aaggggctcaggataggaaggagaagaagaagcaggtgcagccgcctttccgtggatggctgggctgatcaacatgtctgcgggaagacgatccaaatggsctgaacaaacatcatggagatgagttttctgacgagacgagaatgccccctgttggcaaaaagtttgttgcagcaaaccgtctccttcagagttcagacaa

SEQ ID NO: 6612 - DNA, 202 bp, Artificial Sequence
  Description of Artificial Sequence: Synthetic probe
tcgaacggaagatgagaaagaaatggtctcaaggactgtatattgtactaacatagataagaaggttacggaagatgatgtaaaggttttctttcaacggytatgtggaaaggtttctcggctgagactccttggtgattatgtacactccacatgcattgcttttgttgagtttactcaggcagaaagtgcaattcttgcc

SEQ ID NO: 6613 - DNA, 121 bp, Artificial Sequence
  Description of Artificial Sequence: Synthetic probe
tgatttctccatggacaagaaccatgtcatgaaagaaagagggtcctctgaccgagatgtygatcttggacaagaaccgacctattctgaggacagcaaagcacaccaagttaaagctatg

SEQ ID NO: 6614 - DNA, 121 bp, Artificial Sequence
  Description of Artificial Sequence: Synthetic probe
agtaagctggaactggatgaatttctgaatattcgcatagacagagcgtccccagcgaacraccttgacaacagatgtgaagtcatcatccaagattataatatcagagctttctttagca

SEQ ID NO: 6615 - DNA, 121 bp, Artificial Sequence
  Description of Artificial Sequence: Synthetic probe
actggaatgaacttcccaacaaaagccaacggccagctgacaaaagcaatacccacagaarcaagccaaagctcccaactgagtctcacagttgatgtaaatttccccaggaactcaataa

SEQ ID NO: 6616 - DNA, 121 bp, Artificial Sequence
  Description of Artificial Sequence: Synthetic probe
caattctttcaagaaatttgccagatcacttggctacaatgaggatgacatctctatagtrtcatatcattcggtttcaatggggtactatggagaatgtggcagaaggggaggctacatg

SEQ ID NO: 6617 - DNA, 121 bp, Artificial Sequence
  Description of Artificial Sequence: Synthetic probe
cgacgccgggatgggagccattatcttctcacccatcgtgttcttctcgtggttccccttygtgtcgaccttccagtcgcggattctcttcaaccaggctttcagccgtggtttggagatc

SEQ ID NO: 6618 - DNA, 121 bp, Artificial Sequence
  Description of Artificial Sequence: Synthetic probe
taacctgcacttgaccgtcgctgcatgtaaagcttgtagtgcaggcgtgttaaacttcacktggtttttgcactgaatctcctgttgaaatgctacgctcccctctggagaggcagtatag

SEQ ID NO: 6619 - DNA, 121 bp, Artificial Sequence
  Description of Artificial Sequence: Synthetic probe
gtcagagggggaagcattgaaagacaaggctgcacatcatgacctacacaaagagcatggygtcgatgatcccgatgagcgaccagcatctccaccagatggtgtggaagaattttactga

SEQ ID NO: 6620 - DNA, 121 bp, Artificial Sequence
  Description of Artificial Sequence: Synthetic probe
ggtagaaggaaaacaaatcaaagaatacatatacgcagccaaaatgtaccaaatttacccygaggaatccacagtaaatacaacgaaatctcacatctgcagatggctcagtaaatagatc

SEQ ID NO: 6621 - DNA, 121 bp, Artificial Sequence
  Description of Artificial Sequence: Synthetic probe
tgagaagttctctgaatcggaacttgagttcagtgagttgaaaacagccagcgaggaggcyacgaagaggtatgatcacatagttagcgtaatgaacgaggagcttgctcgattccaggag

SEQ ID NO: 6622 - DNA, 121 bp, Artificial Sequence
  Description of Artificial Sequence: Synthetic probe
agcgcaagcagcggttcatatatccgtcaggcgcgcaagcatgtttggaagttctagcatrcctgggagtgcggctgggattaatgctgttcgtgactgtaaaggggtagttcactcctac

SEQ ID NO: 6623 - DNA, 121 bp, Artificial Sequence
  Description of Artificial Sequence: Synthetic probe
tttatttatttgaactggctagaaccaaggtggcgaggcttgtcctgccaaatcggtacaytttrcttaatagctagactggctatttgacatgggttgtaatttatatgataataagtag

SEQ ID NO: 6624 - DNA, 121 bp, Artificial Sequence
  Description of Artificial Sequence: Synthetic probe
ctatgaggatttcacaaaggtgctacctgagactgactgtcgatttgcagtctatgacttygactacatgaccccagaggaggttcccaagagcaagatatactacatcttctggtcccca

SEQ ID NO: 6625 - DNA, 121 bp, Artificial Sequence
  Description of Artificial Sequence: Synthetic probe
cagcactatccggatccacgcctgagaggttatgattctcatctaaaaggaatccaagtcrtcattcttaatagacatctgatttgcactctctgatagcaattcaacaactgaagttgta

SEQ ID NO: 6626 - DNA, 121 bp, Artificial Sequence
  Description of Artificial Sequence: Synthetic probe
tgatgctgggctcatgggactcctgctgcgggcagtccaacgctgctcaataggtgcaggygcaggtacatcttccttctcaatcaactgtagcaactcctccatataatctaaatccttc

SEQ ID NO: 6627 - DNA, 121 bp, Artificial Sequence
  Description of Artificial Sequence: Synthetic probe
accactatattgcattataaatcataactctcatacacgaagcattacatacaataaaatsaagtgtagggtatctattggatccccatacagggacaaaaactatcagtctaagcatgtg

SEQ ID NO: 6628 - DNA, 121 bp, Artificial Sequence
  Description of Artificial Sequence: Synthetic probe
tgtccagctccttgctggaatcttatggatacccttttcacgcatctccagccttgtgttytctgaacaatgccactttgctgattcagagtacaaattagatgctagaacatatgtggat

SEQ ID NO: 6629 - DNA, 121 bp, Artificial Sequence
  Description of Artificial Sequence: Synthetic probe
agaggagtggcatgtcttcatcgagaagttccaggagctgctgaaagaagcgctggatgartgcaaggcggctggagcacagcggatgaagcaacggctgggcacttcctgcaagttttga

SEQ ID NO: 6630 - DNA, 121 bp, Artificial Sequence
  Description of Artificial Sequence: Synthetic probe
gtatatgtttgatatgtccaaactggaagctgaagagctaaggacagttcggaaggaggaygtcatcagttggtacaatacctacataaggtcatcatctccaaagcgtagacggttggca

SEQ ID NO: 6631 - DNA, 121 bp, Artificial Sequence
  Description of Artificial Sequence: Synthetic probe
tttgtttgcttaccaccttaaaagatgtgcaggtagagttgctgacggtcaggtaggaaakgccgttgatgttgctcttaatattagagaagcgcctcttctcaggatctcgcgaggagtg

SEQ ID NO: 6632 - DNA, 121 bp, Artificial Sequence
  Description of Artificial Sequence: Synthetic probe
gcttagaagcataaaaatactcttagttgtatgcttacaagttacttaaccagcagctagsttattcattacatgtcagatactacctccttggagtcgaagagcatccatatctcgttga

SEQ ID NO: 6633 - DNA, 121 bp, Artificial Sequence
  Description of Artificial Sequence: Synthetic probe
acgagagcagccgaattctaagtcgcactaagtacttgcctcattacttaccctcatctgytattcctcttttgtgttggctaccgttgtcctgattttgataggtatgagattgatgacg

SEQ ID NO: 6634 - DNA, 121 bp, Artificial Sequence
  Description of Artificial Sequence: Synthetic probe
ccaccaccgccgtggtattaacagtacgttgttgccacctataaaccatgtggagaattgmagcagccaggatcgcagcagctgcatgatgttttgggctagagtcaataacttgttgaga

SEQ ID NO: 6635 - DNA, 121 bp, Artificial Sequence
  Description of Artificial Sequence: Synthetic probe
tccaccgcaacggcgtcttcaccaggttctgcaccagcaggatcgtcggccacgtcgttcwgatccggtgcctcttttgcctcctttgaagacttgtctttcttagctttcttcttcttgg

SEQ ID NO: 6636 - DNA, 121 bp, Artificial Sequence
  Description of Artificial Sequence: Synthetic probe
  modified_base (95)..(95): a, c, t, g, unknown or other
tattgttgctccaggctgctgctggttcagagactgtagcaaaatgtgtgtacatctccakgaaattgttctccagcaggccttgaaggatttanctttggagatgcaagaaatcagaact

SEQ ID NO: 6637 - DNA, 121 bp, Artificial Sequence
  Description of Artificial Sequence: Synthetic probe
tattgcagaattctacaatactctctctaatgctccatgcattcttttggcgcttattggrctcgtgaattgcctccgccaacgtttcgagaaacgattcagtgttctgcacatatccaat

SEQ ID NO: 6638 - DNA, 121 bp, Artificial Sequence
  Description of Artificial Sequence: Synthetic probe
gctctttacacccatcacggttctgtcatggtttcccttcgtctccgagttccagacgcgratgctgttcaatcaagcgttcagcagaggacttcagatctcccggatccttggtggccag

SEQ ID NO: 6639 - DNA, 121 bp, Artificial Sequence
  Description of Artificial Sequence: Synthetic probe
ccgtgttgcctatatcgccacggttattcggaatgtggacactttcaattgctttgccaargcagctgctgactccaagttgtctattgtcaacatcaccagcaccgcggctccctcaagt

SEQ ID NO: 6640 - DNA, 121 bp, Artificial Sequence
  Description of Artificial Sequence: Synthetic probe
gtcggatctgttcgacaccacggtataatacaacattgacaaaaggggaggaaaggaattytgttcaacgtatacaactccttctcattcattctgttcagctgatgcaattgcagttgca

SEQ ID NO: 6641 - DNA, 121 bp, Artificial Sequence
  Description of Artificial Sequence: Synthetic probe
tctgaatagctccacagccacccattccaccttgccgctgcattccaggtctccatcaggrattaaaagattctttgttgctacttcaattgagtaaatcactgtatgtagtacccccacg

SEQ ID NO: 6642 - DNA, 121 bp, Artificial Sequence
  Description of Artificial Sequence: Synthetic probe
agccccagttctggatgcgcaacaggtgtttgaggctcatgaggattatgttgaagatgtkgcttggcacctgaaagatgaaaacctgtttggatctgttggcgatgactgcaagttgatg

SEQ ID NO: 6643 - DNA, 121 bp, Artificial Sequence
  Description of Artificial Sequence: Synthetic probe
gtagcaacgcccgacactggtctagagtctccattatcctcccatccatacttgttcgtckattcactgctcttttttttctcttgctatctgtctgttggttccatgatctcaattcgtc

SEQ ID NO: 6644 - DNA, 121 bp, Artificial Sequence
  Description of Artificial Sequence: Synthetic probe
gtcgtatgccgacaggatcagggcttccgagctcgagaagtgcctgacgaagatcggggargacaatctcaacaagaagatgagaaggtccatcgaggagctcagcaccggcatagtgaac

SEQ ID NO: 6645 - DNA, 121 bp, Artificial Sequence
  Description of Artificial Sequence: Synthetic probe
gtctgcttgagtcatcaaccttggatcctggggtatatttgggtcagctaatacatcataycccatagtaccctgttgcatgtactgttctggataagccaactgctgttcagcatactga

SEQ ID NO: 6646 - DNA, 121 bp, Artificial Sequence
  Description of Artificial Sequence: Synthetic probe
cccagtggcataaactacaagcatgatgcactccaatagcgaccaaaaatctcaagctaaycgagtcagtctccattcagttgggcttttcttcctggcacttagagcatgtacatgtgaa

SEQ ID NO: 6647 - DNA, 121 bp, Artificial Sequence
  Description of Artificial Sequence: Synthetic probe
cagagagagctcaatgaggtctatactggtggggttgggtcttatgctcttctcactatgytgatcacacatttacagttgatctggggagtgaaagatatgatgggccatgtacaatcga

SEQ ID NO: 6648 - DNA, 121 bp, Artificial Sequence
  Description of Artificial Sequence: Synthetic probe
acgagaaggaagcgccaaaaaggtgatgcgaagatcacaggaaagtagcacgctattcgcrccgaggtctgtgatcaaaccccttggttggaacaagagtgagaagccggatgttgccgcg

SEQ ID NO: 6649 - DNA, 121 bp, Artificial Sequence
  Description of Artificial Sequence: Synthetic probe
tcaaacaattgattcaggtgattgttcagctacattccacctgaagaagccaaagctgtgmatatatgtgaggctgttcaccatcccgtgtgctgctgctgctgcatttgtctgtggagca

SEQ ID NO: 6650 - DNA, 121 bp, Artificial Sequence
  Description of Artificial Sequence: Synthetic probe
ggtggggtcaaaggtgaagcagatacaattttggatgtggtggagcgctacaaggaaggcygtggctggggtgaataccgggatgaagtcaatcggcaggagatgctactgttctgccatc

SEQ ID NO: 6651 - DNA, 121 bp, Artificial Sequence
  Description of Artificial Sequence: Synthetic probe
gaatgaggatgaagtattttctttcttggttaactactacgggaagacgctcgtatcatcstacaaagagacctacatggagtcgcaagagaagaagcttgtaggccatgtggggccacta

SEQ ID NO: 6652 - DNA, 121 bp, Artificial Sequence
  Description of Artificial Sequence: Synthetic probe
gagtaatcggttgcagattgcgcaggctgaaggtttggtgcaccgcaaggtggctgttccratgagcatcctgtggcaaacaccccagtacttcctgctaggtgttgccgaggtattactc

SEQ ID NO: 6653 - DNA, 121 bp, Artificial Sequence
  Description of Artificial Sequence: Synthetic probe
cttgttgtgtcctacttgcttgcacctgctacatagccgtataagagtggtttccttgttsgggttaaacctcttccttctcggtttatctgacgtccgtggcctgggaggtgggatcact

SEQ ID NO: 6654 - DNA, 202 bp, Artificial Sequence
  Description of Artificial Sequence: Synthetic probe
gttgcttctcgtcctcgaaatcaatgccgtaatcccatgtcagttcctcaaaagcctccaccttcgtgcttgtgaagaatgcaagatgataatagtgatgrtcaggagtctccacttcaacaggaaccgctgctagatttgcatcacggcatctgtrswtgatagrrtctgccaacattccccgtaaaatgttccatctagg

SEQ ID NO: 6655 - DNA, 121 bp, Artificial Sequence
  Description of Artificial Sequence: Synthetic probe
agattactggaacttcattccaaacgatgaatcaaggttccgctcggttgcgtatctctckcagatttggtggtttgaagtcagagggsmggkatgagttctgcttcccagaaggtacata

SEQ ID NO: 6656 - DNA, 121 bp, Artificial Sequence
  Description of Artificial Sequence: Synthetic probe
tagtccaaatgatgaatcaccagcaaatattgaagccgctaaagactggagagacaagcgrgatgagttcaagaaaaaggttaggcgcgccgtacggaaatctcaggaaatgctttgaata

SEQ ID NO: 6657 - DNA, 121 bp, Artificial Sequence
  Description of Artificial Sequence: Synthetic probe
aacctacttcagattagcgatcactgcatcagtaacttcctgggtggtgctatcgccaccragatcctttgttctgtatctgccttcctcaacgacacgcttcactgcagtttccagacgg

SEQ ID NO: 6658 - DNA, 121 bp, Artificial Sequence
  Description of Artificial Sequence: Synthetic probe
cagagcattgaggtgccatcctttttgatgacattatgtcattcacctcaaatatgtcaayggcatccgacccaaaggccacaactgtcatgtccggcttcccgatcacaaataatcctgg

SEQ ID NO: 6659 - DNA, 103 bp, Artificial Sequence
  Description of Artificial Sequence: Synthetic probe
ggaagtcccaacgaaatggtaaattggcttgccattgatagagaaccgtgacttgccatcrccgatcatcacacctctgtcagtgttgatcctgagcagatca

SEQ ID NO: 6660 - DNA, 121 bp, Artificial Sequence
  Description of Artificial Sequence: Synthetic probe
tggatagtgccttgataatggactcatatatcccaattcctttgaggtactcatctttgcycaggaactcgttatggtcatggagcagtattggtgtgttcgccataggagaaaccgaatg

SEQ ID NO: 6661 - DNA, 121 bp, Artificial Sequence
  Description of Artificial Sequence: Synthetic probe
atccagaagtcgttggcttcctcgaaggggacaaagatgacttcccttatgtagaagcccrgtattcttatggcgctccaccaaagctcataatgcttgacgacaagggtgaccagaagga

SEQ ID NO: 6662 - DNA, 121 bp, Artificial Sequence
  Description of Artificial Sequence: Synthetic probe
gaacaccatacgcttatatgcctggagctgccaactttgaaggcagcaggaaataatcacsaggtttttttgtttgttctctattctctttcctgatgcaagctatttgcagtagggttcc

SEQ ID NO: 6663 - DNA, 121 bp, Artificial Sequence
  Description of Artificial Sequence: Synthetic probe
tccatcaaaccaccttcgacatccacttcatcgatgcctgatcaggaagcgaacattcatyataatcatacgattgagaacatcatgggttgatgcttttgggcgtcggaagtcattgtct

SEQ ID NO: 6664 - DNA, 193 bp, Artificial Sequence
  Description of Artificial Sequence: Synthetic probe
tgtgaggaggacaccgctgactttgatgtcttgggttggtggaagaggcatgccaaaaaaaattccaatattgtctatggcccgtgactttyttgcaattcctctcagcacgatggcatctgaatctgctttcagttgtggtggtaggatacttgggggacactagaagctcattacccctgatatgctacaa

SEQ ID NO: 6665 - DNA, 121 bp, Artificial Sequence
  Description of Artificial Sequence: Synthetic probe
tcccgggatgggaggcatatcatctctgcagtttgtcctcccgataacatggtcacatggrcaaaagtacggcatcactctgaatcagctagtctcgtggtggagcgagaaaccccgctga

SEQ ID NO: 6666 - DNA, 121 bp, Artificial Sequence
  Description of Artificial Sequence: Synthetic probe
tcacaggccacgatctggtgtctggaaaggaactagtggtggggaagctatttcatttagyggttgtgatgataatcaaacatcagcagatacttcagccttgtcaaagatcacttcgact

SEQ ID NO: 6667 - DNA, 121 bp, Artificial Sequence
  Description of Artificial Sequence: Synthetic probe
gtccgattgactatctcaggatgaagagaccacctccagcccttccaaaagtccgttggcrgcgcggaaagctgcattatgagctttctggtttaggttgtctctactgcctattgtttct

SEQ ID NO: 6668 - DNA, 121 bp, Artificial Sequence
  Description of Artificial Sequence: Synthetic probe
gaagagcgtcgacgagtacaaggacaaggttcctgctgaggttgttacggaaatccagtcwgctgtttctgatctgagagcagcgatggctggcgatgatttggacaacatcaagcagaag

SEQ ID NO: 6669 - DNA, 121 bp, Artificial Sequence
  Description of Artificial Sequence: Synthetic probe
cttgggatactttataggcatgacaactgcttctttaagaagacgctttgcagtttccaarcctttaatgctttcccatttaacacccggactcccaggaataatatccctcaacaatgtc

SEQ ID NO: 6670 - DNA, 121 bp, Artificial Sequence
  Description of Artificial Sequence: Synthetic probe
gttgatcttcctggggtacatggtgtacgacacacaggagatcatcgagagggcgcaccayggcgacatggactacatcaagcacgccctcaccctcttcaccgacttcatcgctgtcctt

SEQ ID NO: 6671 - DNA, 121 bp, Artificial Sequence
  Description of Artificial Sequence: Synthetic probe
tcagtccttatggttccgtattcacaacaagggttcagtttcagtttatagcacatcttcmtcttcatgtcttgctcgggctgaaaacacattattgatgtcctgcgaatcgacactgaac

SEQ ID NO: 6672 - DNA, 121 bp, Artificial Sequence
  Description of Artificial Sequence: Synthetic probe
aaaaagaccaccggtaaaaatttgactcatctacagttgcaaaattctgacgtgtatatgygttcaagagctcagatgaaaatttgcttgctttatctttattatacatggctaacactcc

SEQ ID NO: 6673 - DNA, 121 bp, Artificial Sequence
  Description of Artificial Sequence: Synthetic probe
actgaaccttgggggtgtacacataccaaaaggtgtcaacatctacatccctgtctccacmatgcaccttgatcccaagctatgggggcctgatgctaagcagttcaacccggcacgcttc

SEQ ID NO: 6674 - DNA, 121 bp, Artificial Sequence
  Description of Artificial Sequence: Synthetic probe
agagagcaagcgagaggctgcatccgtggtgagagagatcgaccagctaactagctaggarccatggcggactgggccccggtgttcatcgggctggtgctcttcatcctgctctcgccgg

SEQ ID NO: 6675 - DNA, 121 bp, Artificial Sequence
  Description of Artificial Sequence: Synthetic probe
ccttgatcaatatgtagagaacatgtctgagaaccaaaatgcaatctattacattgctacrgayagtctccagagtgcaaagactgctcctttcttggaaaagctggtccaaaaagacatt

SEQ ID NO: 6676 - DNA, 121 bp, Artificial Sequence
  Description of Artificial Sequence: Synthetic probe
gaaacagtgggtgtacagtgatattacaaaggaccccataaggacagaaaaataaaacatrggtccctggcatttgtagataggaccttgctgaaagattgcaattacaaactaatcctat

SEQ ID NO: 6677 - DNA, 121 bp, Artificial Sequence
  Description of Artificial Sequence: Synthetic probe
aggcatctaccagtaataataccagagggattgaacgaacttcaaaaaatcgctgtgcgayttgaagagaagatctataacgcagcgactagccagcctgattatttgcggaagctttctc

SEQ ID NO: 6678 - DNA, 202 bp, Artificial Sequence
  Description of Artificial Sequence: Synthetic probe
atctgaatcttatggagtgggataaactctggacaatcaacaagaagatagttgatccagtgtgtggaaggcataccgctgtgctgaaagacaaacatgtkcccttgacacttactaatggtccagacgaaccatttgttcgaatcttgccaaggcacmagaagtatgagggtgctggaaagaaggctacaactttcgcaaa

SEQ ID NO: 6679 - DNA, 121 bp, Artificial Sequence
  Description of Artificial Sequence: Synthetic probe
agtattagggcccagctttggtcccatgaagataaacatgaagtgcataacaattgaagaygtggaggctcctgtcttcaaggccttgctccatttatgtattgggatgagttgcctgaca

SEQ ID NO: 6680 - DNA, 121 bp, Artificial Sequence
  Description of Artificial Sequence: Synthetic probe
ttatgctggagggaacttaagtgcctacaggcgaggtggtgatgagagctttggtggcccyggtagttctagctacagtggcaccatgtttgctggggcatatgatcctgcactaggtgct

SEQ ID NO: 6681 - DNA, 121 bp, Artificial Sequence
  Description of Artificial Sequence: Synthetic probe
tttcgtgtgcctgtgcgtgccggagaccaagggaagaacactagaggaaatcgcgttctcwttccgctgaagcccagaagcagcacacacaggccaatcaccaggtagtatacctgaaggt

SEQ ID NO: 6682 - DNA, 121 bp, Artificial Sequence
  Description of Artificial Sequence: Synthetic probe
cgacgagatggccagcgacgcgaggaagctcgagaaccagcagatcaaggagaaggctctrtttgactgcgagcgcgcgtcggcacccaaggcctcgacggaccagttcaagtgcgggagg

SEQ ID NO: 6683 - DNA, 121 bp, Artificial Sequence
  Description of Artificial Sequence: Synthetic probe
ctgtatgtttatgccgggctcctgaatctctcttgctttgtaagttcaggcttcccaatgyggtacgtgttgtattatcccctagttttctgcatggatacatggatgtacactatttagt

SEQ ID NO: 6684 - DNA, 121 bp, Artificial Sequence
  Description of Artificial Sequence: Synthetic probe
gaggggctgtgttgtctgccaaatccgatggccgatagattaataacgatcttaggctgtktcctaaccaaggactgaacttcatatacactcggcctgaggtaattcaagtttgtcgaag

SEQ ID NO: 6685 - DNA, 121 bp, Artificial Sequence
  Description of Artificial Sequence: Synthetic probe
catgtgaaggagattggcagggagctgaggaagaggctgtatgggcacctgcataggtccyggaggagccacagcaggagcagcaggagcccgagcccttaccattaccactcgagggacc

SEQ ID NO: 6686 - DNA, 121 bp, Artificial Sequence
  Description of Artificial Sequence: Synthetic probe
gtcttgacaatgggatggttcaagcgtttgatacgcggacagcttcgtcaaattcaaatcstggacagcccacatttactctgcatgcacacaataaggctgcttctgcaatatccttctg

SEQ ID NO: 6687 - DNA, 121 bp, Artificial Sequence
  Description of Artificial Sequence: Synthetic probe
taacttctgtccagttgtatcatcgaccacatttcctgagatgtcaacggtatatgatttyccagtgaaacgttgaaggcctctctttacaagcaaaatcaaaatccttctgatgaagtcc

SEQ ID NO: 6688 - DNA, 121 bp, Artificial Sequence
  Description of Artificial Sequence: Synthetic probe
ccgcagctcaccgcccttgaggaagccagagtaccagcgggcagagttcttcatatacctygtcctctcgttggagctcatgtccacgccgcacagaccgaatcgcgagctgtagcccaac

SEQ ID NO: 6689 - DNA, 100 bp, Artificial Sequence
  Description of Artificial Sequence: Synthetic probe
tacgtcaaggacaggtacaacagcccgccggtctacatcaccgagaacgggatggacgacrgcaacagccccttcacttcgctcaaggacgccctcaagg

SEQ ID NO: 6690 - DNA, 121 bp, Artificial Sequence
  Description of Artificial Sequence: Synthetic probe
tctgctaaattcttgagcttttcttgttcatcagattctatactaaatccatttgtttcgycagctgatctattagcatcattgtccactgtcgacttgtgtagaatctctaaataaatag

SEQ ID NO: 6691 - DNA, 121 bp, Artificial Sequence
  Description of Artificial Sequence: Synthetic probe
aagcacagggattgggggacagggctttcaatctgggaaattggacaaggtttggactacyttttcgatgttctgtaggaatatttcgtgtatgattgtcagttaactgtttggcttattg

SEQ ID NO: 6692 - DNA, 121 bp, Artificial Sequence
  Description of Artificial Sequence: Synthetic probe
gtgcagtgtctctactgaagggtgaacgtaagaaactgcgcagaaaaagagaagcgtgccmggatagagcaaatcagggttatcctcggtctttcggattctcaaaggaccccaacgccgg

SEQ ID NO: 6693 - DNA, 121 bp, Artificial Sequence
  Description of Artificial Sequence: Synthetic probe
ccgttcgtccagagtgaactcaataaaggccaacccattcccttgcgatactccttctgcrtatattacatctttctctgaaggttcgtactcattacttgatacttcaatggccctgctc

SEQ ID NO: 6694 - DNA, 121 bp, Artificial Sequence
  Description of Artificial Sequence: Synthetic probe
attcaccacgaattcttcgtcgtcgttaagctaaaatcgccaagaacaaccaatcacgatrtttatggaggcgaattttatttgcagaccatagatgactaggggtgcaagtgaccaccac

SEQ ID NO: 6695 - DNA, 121 bp, Artificial Sequence
  Description of Artificial Sequence: Synthetic probe
gaaactgcgctcccactggtccacaggtgccgcttcagcatgaggtacgtggttggggttyttctccctcttgtcgcccttcagctgtttcatagcatgcttcaacgccggcagaagagcc

SEQ ID NO: 6696 - DNA, 121 bp, Artificial Sequence
  Description of Artificial Sequence: Synthetic probe
aaccgaggacgacgccaaaatcccagctgtttatcttcaagcagattttacttgttcaccrtctgttgcatgaggtcgtgcatcacgccgccttcacaactctctgcctccttcatgtagg

SEQ ID NO: 6697 - DNA, 121 bp, Artificial Sequence
  Description of Artificial Sequence: Synthetic probe
ccaagcttcatcctggtcatggatagatcacccaggttcgggtccataagcagtgacaatygccctatgaagactcgctttcgctacggctccggtgggttccgttcccttaaccaagcca

SEQ ID NO: 6698 - DNA, 121 bp, Artificial Sequence
  Description of Artificial Sequence: Synthetic probe
aggcaaaaagaaaggaggagcaaaaaagaagcagctccatatagagaagggagaggaggarttcgtcgctggagcgggtgcatcttatgatgatccggacgagtttgacttcatgtgattg

SEQ ID NO: 6699 - DNA, 121 bp, Artificial Sequence
  Description of Artificial Sequence: Synthetic probe
aatcttttagtcctactatggattgatttggagccaatgcatgtcatctcttccttttctrtggtgttggtgacggacaggtagttgtgatggagcacacttcttatcggcagctggacca

SEQ ID NO: 6700 - DNA, 121 bp, Artificial Sequence
  Description of Artificial Sequence: Synthetic probe
  modified_base (89)..(89): a, c, t, g, unknown or other
gggtacacacactagctgcaacataaacagtgagatcccatgactggaatttttgagttgyaggatgatgaaacaaggcagagatttcncacggcaagtgctactgacctacaaaatcttt

SEQ ID NO: 6701 - DNA, 121 bp, Artificial Sequence
  Description of Artificial Sequence: Synthetic probe
gcaactgccactgccgtgagcagcgacggtgaagagaaaaaggagctggaggcgtcgagtrgcaaagaaaagcacatgaggacaggtcgaggctcgcgaactggagtagaagagttgtgta

SEQ ID NO: 6702 - DNA, 121 bp, Artificial Sequence
  Description of Artificial Sequence: Synthetic probe
acgatagacaacagatacagatttcccatcagttgagtagactatgttgcgaacctccccrgaccattctgcaaaggtttacaaaatggtagaagaaagacagggaatgtggttctcaaca

SEQ ID NO: 6703 - DNA, 121 bp, Artificial Sequence
  Description of Artificial Sequence: Synthetic probe
gttgacctaaaggatatgtacagagaacaagtcgatcttcttgttagccagctccagacaytgggcgctcgtgtatagtgctactgaccaagagattttgaaggctgaaaatattttgcca

SEQ ID NO: 6704 - DNA, 121 bp, Artificial Sequence
  Description of Artificial Sequence: Synthetic probe
  modified_base (98)..(98): a, c, t, g, unknown or other
aaagcagagtgaaacagagtgcctcgcaccgagcctgagcaggtggagctgttgatatccrtatagcctcctccccagtttcagccaaagctttttgngctacaagaataatgtgatagaa

SEQ ID NO: 6705 - DNA, 121 bp, Artificial Sequence
  Description of Artificial Sequence: Synthetic probe
acatcatccccctggctgactcggtcaccaagctaacagcacgctgtgagttgtgtggtcrccggggcgttcttcacattgaggaagacacaggaaaccaggactgaactcattggaggag

SEQ ID NO: 6706 - DNA, 121 bp, Artificial Sequence
  Description of Artificial Sequence: Synthetic probe
agcacgctgatccctgcaccttcatacatacatcgtcttcgcttcttctttcagcacccaytatttgagcaaccctcgccagcactggacggacgggggtggaggctcagttctcgtgatc

SEQ ID NO: 6707 - DNA, 121 bp, Artificial Sequence
  Description of Artificial Sequence: Synthetic probe
cttttcctttcttgagaatatcctaattttgtatgtagaagacttaaggagtgctatcatmtcttctggcaaacctttgctctctgtcccaatagtttcccctaattgctgtagttcctca

SEQ ID NO: 6708 - DNA, 121 bp, Artificial Sequence
  Description of Artificial Sequence: Synthetic probe
caaccttgtttgttttttctgacaacgcagcagaaacttttcgttagtcttatgacaattrgagaatatgtcgtcttgcctttttccrcaaccaggcagcatgctgatgaarwgwtgcaca

SEQ ID NO: 6709 - DNA, 121 bp, Artificial Sequence
  Description of Artificial Sequence: Synthetic probe
cacccgcctagacgtttccttcttctcccgattattttgcaagtctcaagtttattaaagrcttgaacaagtactactagtgtgttggcagcagcactactccttgctgaaaaaagagaga

SEQ ID NO: 6710 - DNA, 121 bp, Artificial Sequence
  Description of Artificial Sequence: Synthetic probe
gttgtagttccagtagacagggatggcgccgcggccgtagtactcgacgcccttgacgcargggtactgcgtgtaggagtcgtcgcagtagccctggtcggggccagctcgtggttgtagc

SEQ ID NO: 6711 - DNA, 121 bp, Artificial Sequence
  Description of Artificial Sequence: Synthetic probe
aggatgatggcatcgcaaagctggagaagtacattgaggaaaagtcgcagaaaattactaytctgcagagcgagatcacatccctccaagaaaaaggggtctgtggctgctgaggagcagg

SEQ ID NO: 6712 - DNA, 121 bp, Artificial Sequence
  Description of Artificial Sequence: Synthetic probe
cactcccgtataaacacttgatcgtagtttacatgtcgcgaccagtattttcggtatttgkacagtccaatctcgagccagggtttcaggttcccattgtagtggatgacagatgcccgcc

SEQ ID NO: 6713 - DNA, 121 bp, Artificial Sequence
  Description of Artificial Sequence: Synthetic probe
gcgattttatctttcaagagtttgccgctgcaatggtcgtgtcgtatcttgtcttgtttcrgcagctgcatgcgttcgtgtgtgttggcttcttcctccatgtaattcatcgatcacccgt

SEQ ID NO: 6714 - DNA, 121 bp, Artificial Sequence
  Description of Artificial Sequence: Synthetic probe
catctgggttggaggatctggaatcgacatcagaagcaaatcaaggacgatatcgaagccrgtggaggacccttcggagctacccaaatggaactacgacggatccagcacagggcaagcc

SEQ ID NO: 6715 - DNA, 202 bp, Artificial Sequence
  Description of Artificial Sequence: Synthetic probe
aggatctccctttgtctaaaatgtcaagagctaagttgaaagaagaaggacacaaagctttgcatgaaggggattacaatgctgcattagaattctatacyatggctatggttgttgatcctgaacacgttgattcaaacttggtcggcactaggggttttgcccgtcttctactgggaaatggagagggtgctttaaacga

SEQ ID NO: 6716 - DNA, 121 bp, Artificial Sequence
  Description of Artificial Sequence: Synthetic probe
tgtccatcttctctgatgacactggaaccaccagtggatccacagaacccgcagttggttygcaaaaaaggagcagcagctgcaaagaagggccatagtcttcaggatgccttgcagaagg

SEQ ID NO: 6717 - DNA, 121 bp, Artificial Sequence
  Description of Artificial Sequence: Synthetic probe
aactctcgacaatagatttgaagatccgagtccatgatatcatcagacggacaagtaaagrcatcgttgttgcgctggaatatgacttggtttgagtgaagttcgtctggccataagtgtc

SEQ ID NO: 6718 - DNA, 202 bp, Artificial Sequence
  Description of Artificial Sequence: Synthetic probe
gagcccctgattttcatcaacgttgctctcctaggcatggccacatctgtacaggaagttttattggatgtccctccaattgctgaatgtgaagctaaatrtgcattgtttactcaatatcgtcaacccaggcgcacccggcacgtccggtcaatctgctcccttctgcgatagatcagcgcctacatggattttcttgact

SEQ ID NO: 6719 - DNA, 202 bp, Artificial Sequence
  Description of Artificial Sequence: Synthetic probe
gctcgagatttattcaggtataaggggaagcgaaattctgtagtctggacaacaagtatttacagtaagaactgcgagactatagaatgacaagagcggamaaaggtggtaacgcctatgctgttcatcgtcaatcacaaaacgatggggttcacaacacacaacagtcctagaatcattacatcaaatcttctcccgtggt

SEQ ID NO: 6720 - DNA, 202 bp, Artificial Sequence
  Description of Artificial Sequence: Synthetic probe
gaactgagctaaaggaggtctggaaagttgctgctactccaccgaatgacaagtaccagtatacatacttcgcacacaaattaaatagctttgatacggckcccaagaagctcttgccttcagactccaggttaaggcctgacagatatgcccttgagaagggggacatgtcaaaatctggtgcacaaaagagcaggcttga

SEQ ID NO: 6721 - DNA, 121 bp, Artificial Sequence
  Description of Artificial Sequence: Synthetic probe
gttgcggatctgtccctgcttgccggtgagcacgttgatctgccccatcttcaccatggaraagacgaactgcttgaagaatgcggcctggtcgacggcgaacttggtgacggtgggcttg

SEQ ID NO: 6722 - DNA, 121 bp, Artificial Sequence
  Description of Artificial Sequence: Synthetic probe
agagaggatccctatgtgaccctgtggagactacatatgatgactgtatactagcaagtamtctagaccccattaatgcgttccttgggcattgcaacagcttggtatatcatttccccag

SEQ ID NO: 6723 - DNA, 121 bp, Artificial Sequence
  Description of Artificial Sequence: Synthetic probe
tgcgataagagcagccgactcgaatagcgccttgtggatggccctccggctcatgttctcrttcaatattgcttgccggtcggtttgggcttctagccagtgctgctcgaactgaatgttg

SEQ ID NO: 6724 - DNA, 121 bp, Artificial Sequence
  Description of Artificial Sequence: Synthetic probe
ggagtagctgttcttgtggttgacaaacttggcagaagaccattactcattggtggtgttrgtggaattgctgttgccctattcttgctgtcttcatactataccttcttttcgggtgctt

SEQ ID NO: 6725 - DNA, 121 bp, Artificial Sequence
  Description of Artificial Sequence: Synthetic probe
aattgtggtgcttggtttggctttgtgtcacatgcaagcggaagacagttactttgtcggyaccccaatctgctgcagagcagatttgatgtcatctgtagtgcaaccctggacttcgatg

SEQ ID NO: 6726 - DNA, 121 bp, Artificial Sequence
  Description of Artificial Sequence: Synthetic probe
ccggcatctttgcctatgcaaagagtgcgagagcaagctgagcttctgccccttgtgccartcctccaagatacttggtatggagatatatatgtaatgtacaatataatttatgtaccac

SEQ ID NO: 6727 - DNA, 121 bp, Artificial Sequence
  Description of Artificial Sequence: Synthetic probe
aatttttggcggtttcccgtctactgcatggtttgacgttgctgatctttcagaagattcwcctgatgatattgaggggctggattctgcggctgcacatgtcgcaaaatttattgtctac

SEQ ID NO: 6728 - DNA, 121 bp, Artificial Sequence
  Description of Artificial Sequence: Synthetic probe
gctggagctggccaaggttgtccaggacaccatcgacccaaatgcgcggattgagttccgygagaacactcaggacgacccgcacaagcgcaagccagacatcaccaaagccaaggagctc

SEQ ID NO: 6729 - DNA, 121 bp, Artificial Sequence
  Description of Artificial Sequence: Synthetic probe
gaaatttagtatgggctacatccaagcatgacgtcttcctaatgtcacattactcagtacktcactggtcagcattgagtggtgtggatactgaactcatgaatgtccaaggtcacgtagg

SEQ ID NO: 6730 - DNA, 121 bp, Artificial Sequence
  Description of Artificial Sequence: Synthetic probe
aagggtgtggttacaatggtgggtagaagtatgatgatacagagaagccaaggaagaggakgcctccaatggtggctactgtgccctgagatatcctcgacgccagcatgctgccacccac

SEQ ID NO: 6731 - DNA, 121 bp, Artificial Sequence
  Description of Artificial Sequence: Synthetic probe
aggaaactcttgaggaaggttgtgagctgattagtaaagtacaggaaagtttccatgatgycrggatcagtgacagaagtctcatatggaattcggacttgatagagaccatagaattaga

SEQ ID NO: 6732 - DNA, 121 bp, Artificial Sequence
  Description of Artificial Sequence: Synthetic probe
cgaatgggtaaacttgtaccactctgactgccggaaaatcttggagtcttatctgaatgaycaagagaaggaatggctgcggagggccaccgaacccatcactatgagcagttaagccaga

SEQ ID NO: 6733 - DNA, 121 bp, Artificial Sequence
  Description of Artificial Sequence: Synthetic probe
gggatcgacagagtgcttctaaagaccaagtctgccgagctgaagacaactggtggaatcytgctgccttcgactgctcagtctaaacctcagagtggtgaggtggtcgctattggagagg

SEQ ID NO: 6734 - DNA, 121 bp, Artificial Sequence
  Description of Artificial Sequence: Synthetic probe
aggaggcaatgacaaccatgacgagagggacaaggggctcatgtccaacctgatgcaaggygttgctggtggccatggggtacccacccggtggccatgggtacccgccgcagcagggata

SEQ ID NO: 6735 - DNA, 121 bp, Artificial Sequence
  Description of Artificial Sequence: Synthetic probe
atgatatcctctgccatggcctctgatccagagatgaaatcgcttctgagcagcacttccratatctggatgcccgtcatcaccgcatccgccgatgaaaggcgagggtttgcgggaacaa

SEQ ID NO: 6736 - DNA, 121 bp, Artificial Sequence
  Description of Artificial Sequence: Synthetic probe
actgtcagctggacgtcggttccgcctaactaccaggtccatcgagggcccaacttcaacsagctccattctaggaatagatgtgcctgacctttttagacggagagcacagtgcatcatg

SEQ ID NO: 6737 - DNA, 121 bp, Artificial Sequence
  Description of Artificial Sequence: Synthetic probe
cttaaccttcacaaagctacaggacatccagtccttgtatgcatggtggccggcagattcrcctatgaaatggagaagctatcagacgaagaatcggttaactttgtcatgtcacagctca

SEQ ID NO: 6738 - DNA, 121 bp, Artificial Sequence
  Description of Artificial Sequence: Synthetic probe
tgttgatggagagactgttgggctgtttggggtgtttgatggtcatggtggagctcgagcrgctgaatatgtgaagaaacaccttttcagcaatttaatcaagcatccaaaattcatgata

SEQ ID NO: 6739 - DNA, 121 bp, Artificial Sequence
  Description of Artificial Sequence: Synthetic probe
ggctgagagagatccaacacctctgcatcgagcagcgaaggttttgatcaacttacaatcygaggatggggaatttgctcaacaagagatcatgggagtcttcaacaagaactgcatgatc

SEQ ID NO: 6740 - DNA, 121 bp, Artificial Sequence
  Description of Artificial Sequence: Synthetic probe
tggaaggacaaaccatccgtgtgaacaaagcgtagacgtagcagatatttcacactggagrcaaggggagaatatctcggcggcacacctgtagacggaggggaactccgagactagattc

SEQ ID NO: 6741 - DNA, 202 bp, Artificial Sequence
  Description of Artificial Sequence: Synthetic probe
gtggttgaagaacagggactggacgataaagtgatcatctttaagttcaagaagaagaagaaataccagaggaaagctggtcacagacagccaaacacaargttaagaattaccggcataagtggatatgaggaatatcctgctgacccaatacttcaggttccagcttaagtgtaattgtaagttgtttagttacaaacgg

SEQ ID NO: 6742 - DNA, 121 bp, Artificial Sequence
  Description of Artificial Sequence: Synthetic probe
ctcttgcggaaatgaccatgcaagaaacatcaacaagctcacaggccatcgtccctgttgyctctccaaaatcagaggctctagccattgtgcctgtttgtaagtcaaagcggcccgcaat

SEQ ID NO: 6743 - DNA, 121 bp, Artificial Sequence
  Description of Artificial Sequence: Synthetic probe
ttttgtggcgatgtgcctgcctactttccatgtatgacatggttccctttgttttttgttrccctagtgctagactgctactgctgtaggtgatggtggatcatatagtaattatatataa

SEQ ID NO: 6744 - DNA, 121 bp, Artificial Sequence
  Description of Artificial Sequence: Synthetic probe
tgacaacctctatcaaaagaaaaaggaccacaggagacaggacactttttttttcgggtgycatgacacacgaactaattatttgacatggaaatctggaattgcacacactaacatgtgg

SEQ ID NO: 6745 - DNA, 121 bp, Artificial Sequence
  Description of Artificial Sequence: Synthetic probe
caggtggctcaagactcgccaagtgtgcccattagacaacagcgaatgggagttccagaartatggccactagaccaacctctgctgctgctgggtggccttcttgcctactgccgcactg

SEQ ID NO: 6746 - DNA, 121 bp, Artificial Sequence
  Description of Artificial Sequence: Synthetic probe
gcgcaggacagatgatgatgtgaagctggccaacagtgttgatgttgcatctctccgtgayccacaggaggatgcagagcgtgtcaaaggaccctgagtggcttgttgtcattggtgtctg

SEQ ID NO: 6747 - DNA, 202 bp, Artificial Sequence
  Description of Artificial Sequence: Synthetic probe
tagatcgcgattaattaactttttttactgatacttgaacatgattattcaacttgctacactgatgatggtgttcactaaggatactgcaaatgggttawtcaacttattacaaataattatgaatagtgctctctaaacactaatggtgacactgctactgcaaatgggttattcgacttattacaaatatgaatagtgc

SEQ ID NO: 6748 - DNA, 121 bp, Artificial Sequence
  Description of Artificial Sequence: Synthetic probe
tcgtgtgaagtggaatgaggacaatctttatgagattgaatcaaacaagccagtgaggcaraagataactgagcccaagacaccgtatcaccctatgatagatgatgatgagtcactatca

SEQ ID NO: 6749 - DNA, 121 bp, Artificial Sequence
  Description of Artificial Sequence: Synthetic probe
tttttgacacttttaacgctactagtagtaccaatcttggcatgacgaaaactggaacgtkcagcatatgattcagtactggtcaaatatagcagcccactgaacgtattacgagtctaca

SEQ ID NO: 6750 - DNA, 121 bp, Artificial Sequence
  Description of Artificial Sequence: Synthetic probe
gatcggtatccggcagggcatgtggggatgcgtgaagagaattgagcctggactccgtgcytatcagaaagccagggctgcaggggagccaccttcaaagagcgccttgatggcacggatc

SEQ ID NO: 6751 - DNA, 121 bp, Artificial Sequence
  Description of Artificial Sequence: Synthetic probe
gtgatatacttccgatttatttcatcagttatctctaattctccgtggatacataagagasatgtttactcgggaccaccgtggaggcttccacgtgagacttcaatcaaagcttgggaac

SEQ ID NO: 6752 - DNA, 121 bp, Artificial Sequence
  Description of Artificial Sequence: Synthetic probe
atggaatttattcccaggttctgtttccacttgacaaagttaacacaggaagaatacacamtggatgagtttccacaaagaacacttagcaccgctgcaccgaagcataaaacgcggacga

SEQ ID NO: 6753 - DNA, 121 bp, Artificial Sequence
  Description of Artificial Sequence: Synthetic probe
gtgcaggtttccttccaccacctggagcttgctcttcctcatcggagtcgacatctccatrgacccacagccccaccctgtccttctttgctttctcctggaactcttccaggttcttgag

SEQ ID NO: 6754 - DNA, 202 bp, Artificial Sequence
  Description of Artificial Sequence: Synthetic probe
cagggagctattctgagaaagtagacatatggggagctggagtgctactccatgtactactgcttggttcacttccatttcaagggggctgtttagatgaygtctttgaagctataaagacagttgagcttgatttccacagtggtccatgggaatcaatgtcagtttatggacgggatcttattagtcgaatgttggatcg

SEQ ID NO: 6755 - DNA, 121 bp, Artificial Sequence
  Description of Artificial Sequence: Synthetic probe
attgatgtaccaccaaagctcctgataagccaccaccacacacagccactagtcatgtagmagaagcagcagcagcacattaggtgcgatttgtgaatgatgtttagccacaactacaatg

SEQ ID NO: 6756 - DNA, 202 bp, Artificial Sequence
  Description of Artificial Sequence: Synthetic probe
ccttgctcacttgcaacttccgcggttgcggtgtaactggctctatatttgtaccagcaggctccctgggttgacttgttaacttcccaggggttgccctrctcttctgctgtagatctagattggaaatggatgtgatactattctcctgtactctcaaggccccatttgtacttccttccgttgtaatataagatttgca

SEQ ID NO: 6757 - DNA, 121 bp, Artificial Sequence
  Description of Artificial Sequence: Synthetic probe
ttttataggggaaggagattcatctttaacagggagaggagattgattttttagaggtggrggagattctgccaaaatagcaggttcttcatgcagtatcactggaacttcttcaaggatt

SEQ ID NO: 6758 - DNA, 121 bp, Artificial Sequence
  Description of Artificial Sequence: Synthetic probe
ccagcacccaaaagtgcatcaaagtctgcagacatcaaaccctcggtatcacacaatagcratgatgacctctggggttcaatagcggcgcctcagccgaaatcatctgggaggccttcaa

SEQ ID NO: 6759 - DNA, 121 bp, Artificial Sequence
  Description of Artificial Sequence: Synthetic probe
gagtacgatttttcctcattaactcaagggatgtttacaaagcgatgaacaccttgccatrcttggaaatggatcagagagcctccgattgaggacaaacacggcagatttagggagaatg

SEQ ID NO: 6760 - DNA, 121 bp, Artificial Sequence
  Description of Artificial Sequence: Synthetic probe
cttctgcgagagccttttatgtgtttgcgtctcgtcgacatttctttgctgtgagaaccartgtgtagtagcatatgtgcattattctgcaacattttccccaacaaataaggttctggtt

SEQ ID NO: 6761 - DNA, 121 bp, Artificial Sequence
  Description of Artificial Sequence: Synthetic probe
tgttcgtattgaaagtgatctgtatgtgacagcgcaaggatgcaagaacatgacaaacgtyccacgggagacgtgggaaatcgaagcggtaatggctggcgcgccatggccttcccgtgtt

SEQ ID NO: 6762 - DNA, 121 bp, Artificial Sequence
  Description of Artificial Sequence: Synthetic probe
taggatcgagtgactttccaatccttttttgacaaggacggcaagaataacatggagaaayttggaggtgaccatcacatagcttagcctttaaagattgttggtcacattaatatcttgt

SEQ ID NO: 6763 - DNA, 121 bp, Artificial Sequence
  Description of Artificial Sequence: Synthetic probe
ctaaagccaccactatatcgccatctccatctcaatcttcttgtgcgggtcgtagctgtcyagcttgaagtccgatgccacaaaagaatcaatatccttcttcgaagggtttatcttcaga

SEQ ID NO: 6764 - DNA, 121 bp, Artificial Sequence
  Description of Artificial Sequence: Synthetic probe
gtctatgctgttgctaaggctgattgcttggatgatttggcttttgcaattatgcaagagrtgagcaaattatcatacagggttactgaagaagatgttattcgtgcgcgcaatcagctga

SEQ ID NO: 6765 - DNA, 121 bp, Artificial Sequence
  Description of Artificial Sequence: Synthetic probe
cttgtgaatggtgctttatgaattttgtgtgctcgccctagacaggttcgtaaactgctcycacctgttggccctggtttctgtccacattgcgtcatatttgtttgtatgatttgttcgc

SEQ ID NO: 6766 - DNA, 121 bp, Artificial Sequence
  Description of Artificial Sequence: Synthetic probe
gcaaactgaacatacacaggcaaatatatgaaagtagcaacatccgacgataagaaaaacraagaagatttggtacaacaacagcaagagtctcgactaaactatcaggtcccagctaaga

SEQ ID NO: 6767 - DNA, 121 bp, Artificial Sequence
  Description of Artificial Sequence: Synthetic probe
tgtcctgaatggtggcaagccagggcctcaccttatcactggaaatggagtgggattcaarccagatattttggacatggatataatggataaggttcttgaggtgaaaggtgaggatgct

SEQ ID NO: 6768 - DNA, 121 bp, Artificial Sequence
  Description of Artificial Sequence: Synthetic probe
attattaccaaagctctccacgaaccatttctactgtcactgtctcggtaattaactaagyacaccactgatggattgtacaggtattctctcaatgggatacagtatcacagcaaaaccg

SEQ ID NO: 6769 - DNA, 121 bp, Artificial Sequence
  Description of Artificial Sequence: Synthetic probe
gttcctattgttgacaaggcagtggatgcaacatggaagagagaacttcctaagaaggcamccttcccatccacagactcttctctgaaaascaccacyaaggcatccaacwggtccttgg

SEQ ID NO: 6770 - DNA, 121 bp, Artificial Sequence
  Description of Artificial Sequence: Synthetic probe
caacgtgaccactgggaagtgcgggatagccatgatgtcatcgtaccccaccaagaagggygctaacccgcccaagccatccccgacgccccccacaccaccgacaccacctcccccggtc

SEQ ID NO: 6771 - DNA, 121 bp, Artificial Sequence
  Description of Artificial Sequence: Synthetic probe
gagttgaatctgagtttactagtacttcgggagatttaatcaacccgccgagatgggttcmcaggcgatcgagaagaacagggagggcgcggaggtgtaccacggcgcggcgctgtgcgcg

SEQ ID NO: 6772 - DNA, 202 bp, Artificial Sequence
  Description of Artificial Sequence: Synthetic probe
accatgtttaccaatctgctagtcaagttaccccaatactgatggttgctgcattgcgctgacataacaacactaccaagtagcaccgtcaattggttttrgagcttctgctatattcacaaagcttgtgttggtaccaattgtggataatacttgttcccatcatcagtttgctgaaggtgttttgcttttttcaaaaaag

SEQ ID NO: 6773 - DNA, 121 bp, Artificial Sequence
  Description of Artificial Sequence: Synthetic probe
ttcatgtgtagcaaaaagaaacgggcatacacttgccatgtattagttggatcgatcatcmtgtgtggtttaatttgctacgatttaatttgatggtgctggcagttgcatgtttgagcta

SEQ ID NO: 6774 - DNA, 121 bp, Artificial Sequence
  Description of Artificial Sequence: Synthetic probe
tctaatccatcatggtgagatcgatctcctccagatagtgagacgatcgatgaataagttrttaatttgttcaagagtacgctcgttgctgtgtcgtcgtcgtcgtgtgtgcaagagtacg

SEQ ID NO: 6775 - DNA, 121 bp, Artificial Sequence
  Description of Artificial Sequence: Synthetic probe
tagacaacagcttgttcgcatcatgaccagattcaacctcaagatgtgcagtacagacttyaacagtcgcgagtactatgttaatatcaggaaagcaatgctttcaggctattttatgcag

SEQ ID NO: 6776 - DNA, 121 bp, Artificial Sequence
  Description of Artificial Sequence: Synthetic probe
cacgataacacatatttacatccacgctcacataccgatgtatacacacaaaaaacatatygagctactaggccccaccctagggaaaagaattgcttgaccacacaaaactggctatcta

SEQ ID NO: 6777 - DNA, 121 bp, Artificial Sequence
  Description of Artificial Sequence: Synthetic probe
ggtttttgtacacactgggtggcttggaaaaccttcaaaccgcaaagaagtattatgcatygacgatccaattgactggaggcaagaacacgagagctctctttggcgtgtgtctgtgtag

SEQ ID NO: 6778 - DNA, 121 bp, Artificial Sequence
  Description of Artificial Sequence: Synthetic probe
taggcatttgtattgatagcaaattagttgtcgttgcggatgtcatcttctgaagctattrgattattattatgctccaaggtgtgtttgttagtagtcatatttgcccgtattatctagt

SEQ ID NO: 6779 - DNA, 121 bp, Artificial Sequence
  Description of Artificial Sequence: Synthetic probe
caaagcccagctggaggaagacccaattgtccacaggcacctctcatccctgtatgatacyctcctggagcagaacctctgcaggctgattgagccctactcaagggtggagatcgcgcac

SEQ ID NO: 6780 - DNA, 121 bp, Artificial Sequence
  Description of Artificial Sequence: Synthetic probe
gggggatgaagagtctggcgccttcacttcttgcgtcggaacacggtggtttagagctccygagctcctgtacggttcaaccaactacggccaagaggtcgacctctggtcactaggatgc

SEQ ID NO: 6781 - DNA, 202 bp, Artificial Sequence
  Description of Artificial Sequence: Synthetic probe
acaatgctgtttatctacctcttctggcagacgatctcgctagattccttgacacatattcagctccagatttttcaggatttagttgctctcttcctttyaaagtggatgcagtacattgttgccatgaacatgacgctgttgctaagtcaataggagccataaacactataattaggaaatcagatggcaaattagtggg

SEQ ID NO: 6782 - DNA, 121 bp, Artificial Sequence
  Description of Artificial Sequence: Synthetic probe
tcgcattttgtgcttcctggtaattttcctgaagcctctttctggccgaatcgagcttctyaagatccaaattattatccttctgttcccctcattgtcctagctggagcagatgacgaag

SEQ ID NO: 6783 - DNA, 121 bp, Artificial Sequence
  Description of Artificial Sequence: Synthetic probe
gagaggttgtctctgtttcctccaatggagaacaaggttttggtccagtaagcatagtagygtatgatgacatattatagatggccataaaagtgggcgagagagacaggtatatgcatgt

SEQ ID NO: 6784 - DNA, 121 bp, Artificial Sequence
  Description of Artificial Sequence: Synthetic probe
ggaagaccagcttgaagaaaggcgaaggaaatggagcccaccgccacacaaggtcactggyggagcactttggaagtacataaagctggtgtcttcagcctcaagcgggtgcgtcaccgac

SEQ ID NO: 6785 - DNA, 121 bp, Artificial Sequence
  Description of Artificial Sequence: Synthetic probe
gttcgtcaaagctgagggtgttgctgggctttacaaggggcttgttcctctctggggtcgycagattccttataccatgatgaagtttgcttcctttgagacaattgttgagcttatctac

SEQ ID NO: 6786 - DNA, 121 bp, Artificial Sequence
  Description of Artificial Sequence: Synthetic probe
tggtttatactccgaatgtcgatccaaagatgaacctagccaatccttgtttattactctyttttggtgtatgtgtactcgttgcactcgaggggtgattttccgtgaatccatgtcgatc

SEQ ID NO: 6787 - DNA, 121 bp, Artificial Sequence
  Description of Artificial Sequence: Synthetic probe
gattcaggaaaatcaggctgagtttctccgcctggttaacgaaactcctgagagtggtgcyggcgcgtccacaaatatattaggcgcgttagcagctcaattgccacagccggttacagtt

SEQ ID NO: 6788 - DNA, 121 bp, Artificial Sequence
  Description of Artificial Sequence: Synthetic probe
taaagaggttgacacatcttcaggggaagtcgatgaagatggcgtggaggatgaataccaratagaagaccttgaaattgttccagctgattatatgctgagggttgcagtctccaacttt

SEQ ID NO: 6789 - DNA, 121 bp, Artificial Sequence
  Description of Artificial Sequence: Synthetic probe
cataaagaactttgcggtaatctacctcgttgatatcactgaggttcctgacttcaatacratgtacgagctgtacgacccatcaacagtgatgttctttttccgcaacaagcacatcatg

SEQ ID NO: 6790 - DNA, 121 bp, Artificial Sequence
  Description of Artificial Sequence: Synthetic probe
aaaagagtaggagtgaacaccattcctggtattgaagaggtcaacatcttcaaggatgacrtggttatccagttccagaacccgaaagtgcaagcatccattgctgcaaacacatgggtgg

SEQ ID NO: 6791 - DNA, 121 bp, Artificial Sequence
  Description of Artificial Sequence: Synthetic probe
gtgctgccatccaagtcaaaggtgcagcagctatcgtctacctccatggtaccacgaagayggcctgctgattggttttgtatagaggtgctataggtggggtggctaaccttcagatctc

SEQ ID NO: 6792 - DNA, 121 bp, Artificial Sequence
  Description of Artificial Sequence: Synthetic probe
ggatgccaatgtcaaactggaacaaataaaaaggcggatatatatggcatgcaaattactmgagtatgatttgcgtgcagattgacgaggaggtttctgtgatggatgatggatcagatgg

SEQ ID NO: 6793 - DNA, 121 bp, Artificial Sequence
  Description of Artificial Sequence: Synthetic probe
gtagtcgctcttccgaccgtgttttgagttgtggtgttcaccatcagtgtgtttgtgaaakattctgtaggttctgtgggcgtgactttgaagtgtaatctctgtgcgttgagtctggtgt

SEQ ID NO: 6794 - DNA, 121 bp, Artificial Sequence
  Description of Artificial Sequence: Synthetic probe
gctagacggggaaagaaacagggtgacacgaaacattgcgcttcatcacacggattgcctsagaagactaggccacttacttggactgcaacaacagcctctaactaggattgcaacaaca

SEQ ID NO: 6795 - DNA, 121 bp, Artificial Sequence
  Description of Artificial Sequence: Synthetic probe
tatgaatatcgtaccaattgattcagctgacacactgcccattgtttatgagcgtggcttktttggtatgtatcatgactggtgcgagtctttcagcacttacccgagaacatatgacctc

SEQ ID NO: 6796 - DNA, 121 bp, Artificial Sequence
  Description of Artificial Sequence: Synthetic probe
tcttaccaccgactttgacatcctaaagtggtgtgatgtcaactctacaaggtacccaacrcttggcagaattgcacgtgatgtgctggctgttccagcttcatcagttgcctctgaatct

SEQ ID NO: 6797 - DNA, 121 bp, Artificial Sequence
  Description of Artificial Sequence: Synthetic probe
gatcaacatcgcgcaggatatctgtgcttttgaccatgagatgaagtattcattgccttaygtcgagagcagctcggacggatcgatggacagccttctgaacagtgtcatgcaggacggc

SEQ ID NO: 6798 - DNA, 121 bp, Artificial Sequence
  Description of Artificial Sequence: Synthetic probe
gtggagtggcacgatgccgttagtgccaaggaagacacgcacggcactgaggctcaacccrttgattcctggaaaataggagccatagcaggcacaaaggagatgttgaaggggtctattg

SEQ ID NO: 6799 - DNA, 121 bp, Artificial Sequence
  Description of Artificial Sequence: Synthetic probe
atgggagcaagcccatccatgttgatcagaagttaattgatggtccaaaccccaacaatcrctggaagaagtacatacctctcatcctggcggtgcagtactttttcgtggtaaaaggaat

SEQ ID NO: 6800 - DNA, 121 bp, Artificial Sequence
  Description of Artificial Sequence: Synthetic probe
ctgtgaagcccgttatgtggtggctgtctgtgtctactagtttggactttggaggcgctgkcttcagtttggttcagagacaggctccgggtgtttaagtttgtgtacgcatgtgtacttg

SEQ ID NO: 6801 - DNA, 121 bp, Artificial Sequence
  Description of Artificial Sequence: Synthetic probe
ggttgaagaaagtttcttcacctggtttactgatactgagcacaagagtcttgctgatggygtgcaagatgaggttgcagagatcatcaaagaagatttgtggcccaaccctttgaaatat

SEQ ID NO: 6802 - DNA, 121 bp, Artificial Sequence
  Description of Artificial Sequence: Synthetic probe
caactccagctcagagacgttgtggacgacaaacttcttgaacttgttgggcaggtaatgmctggtcttcttgtcagaaccgtaaccaatgttgggcatcaaggtacatcccttgaacttt

SEQ ID NO: 6803 - DNA, 121 bp, Artificial Sequence
  Description of Artificial Sequence: Synthetic probe
gactacctggagatcaagtatgtatgcatggggaacctgagttagtgcttgaagctagccyttgcttccacctgaatgaagatgaaccaggaacctgctggggcgctggtgctggtgcact

SEQ ID NO: 6804 - DNA, 121 bp, Artificial Sequence
  Description of Artificial Sequence: Synthetic probe
taagctgttggaggagaagactaaaaagtacatcatggagcacagacagaactacaccggrcagggtgatgatctgatctaccactccaaggggcatgctctgaacccagggcaaagggac

SEQ ID NO: 6805 - DNA, 121 bp, Artificial Sequence
  Description of Artificial Sequence: Synthetic probe
tgcatttgcaccattcattgaattgaaagacaaatgaccaagaccaccattgaaatttccyaaattttgtagtagctgctgctgctgagcaagaagagcttccatggcaccataatttaat

SEQ ID NO: 6806 - DNA, 202 bp, Artificial Sequence
  Description of Artificial Sequence: Synthetic probe
ccagggccttcagtattgcaatgtgttgagtggagttatcaggggagcactcgaaatggtttccatgaagacggaggtcacatgggtccgtgatatgctcygcggggacgacgcctacgagatgcgggtgaagctcaccaagcaggtcccggaggagtatccctacaaggacgacgactagtttcaatctcaaggggttagt

SEQ ID NO: 6807 - DNA, 121 bp, Artificial Sequence
  Description of Artificial Sequence: Synthetic probe
tatcagcgtggcaggtattttgtcatgaactaactcgaaagctgtaagcctggaaccctgrttaaatggacgggtttcagtgcagaaggccttctccagaattcctccagagtgaagcgca

SEQ ID NO: 6808 - DNA, 121 bp, Artificial Sequence
  Description of Artificial Sequence: Synthetic probe
ggtgtcctgacagctggtcttgtcagcttccggtacgggaattctcgactgggtcagaagytgatgagggcccgtgtggttgctcaaggcgtaacagttgctctgatggttggcagcgcgt

SEQ ID NO: 6809 - DNA, 121 bp, Artificial Sequence
  Description of Artificial Sequence: Synthetic probe
cccaccgccgtaccccaccaaagacaacctgatcaagaacgacgggttcgagatcggcccrcaggtgttcaagaactccagcgtgggcgtgctgctgccgccgaagcagaaggacaccacc

SEQ ID NO: 6810 - DNA, 121 bp, Artificial Sequence
  Description of Artificial Sequence: Synthetic probe
gagctaaatgatgaaaagaactggagaaatgggcttagagtacggctcctgaatacttgcrgaattcccgggatgktaaaagggraaaaagggagcgcatgaaggtgatggaaacggtgag

SEQ ID NO: 6811 - DNA, 121 bp, Artificial Sequence
  Description of Artificial Sequence: Synthetic probe
tgcggagattgacccccttgcttctcttccaaagctgcaataccttagcttgctggataayactgtaactaagcagccagactaccggttgtatgtgatccacaaattgtaagcatttgcg

SEQ ID NO: 6812 - DNA, 202 bp, Artificial Sequence
  Description of Artificial Sequence: Synthetic probe
tacttcacaataagcaagtctagcaaacatagggaatttcaaatcatacggatcagacatcagacatatattaagctctggactctaaaatgaatcaacayaatgttcagtcacagccaagccaagcggacgacgaccacggtgtgttggcccttattgataaccagccctcactcttccattcttaggcagacgcagaacc

SEQ ID NO: 6813 - DNA, 121 bp, Artificial Sequence
  Description of Artificial Sequence: Synthetic probe
tcactgctagttgtaacgctgaatgctctaagatgtcagggaatgtttaaagagccgagayggttgtgaagccagaattattgatggtccagtgttgtagtttgggattctgtgatttcct

SEQ ID NO: 6814 - DNA, 121 bp, Artificial Sequence
  Description of Artificial Sequence: Synthetic probe
cgtgctgctggtcaggaaaaacgaggacatcgataatctgaagaagctgattgatgagtcracgttctacgacaagcaatggcagtcaacctggcaagacgattccactaccgggccgaag

SEQ ID NO: 6815 - DNA, 121 bp, Artificial Sequence
  Description of Artificial Sequence: Synthetic probe
acacgtagggtagcgctgataaaaatgaattaataaaagtggtaggggcgcagaatggtcktcgcattggccggatcggatcggatcggatcagacgaggcggcggcagatggtgacccca

SEQ ID NO: 6816 - DNA, 121 bp, Artificial Sequence
  Description of Artificial Sequence: Synthetic probe
ttcttccttatcttcctccacatttgtagtggcatctttgctgaccttgtcctcctctgcytgtggtgcatcctcaggtgcaccctgcttctcaggaacagggaccttctcatccagcttg

SEQ ID NO: 6817 - DNA, 121 bp, Artificial Sequence
  Description of Artificial Sequence: Synthetic probe
actctgtaagtatgttgtctgctttctgtttgtggcctttgctgtatatcaaacaaccatmtgctcctctccatttgatgcttatgaatgttcagggatgtgactcttcatggtttccaag

SEQ ID NO: 6818 - DNA, 202 bp, Artificial Sequence
  Description of Artificial Sequence: Synthetic probe
gcagctccgatagaaacatcaccgagtttcttcgtcaaatcaggtccaaaaaacctgagcaagcaagcaaggcagaatctgttgtgtgattgtgtcgcatyttgtgtcaagcttgtcagtcaaaccgttaatcaagttggaacggaattatccgaataaaaattatagggacgaccttgaactatattttaggagaaatcaa

SEQ ID NO: 6819 - DNA, 121 bp, Artificial Sequence
  Description of Artificial Sequence: Synthetic probe
aaactacatgtcagctggtcagatcaatgttcctattgttttcagaggaccaaatggagcygctgctggagttggtgctcagcactcacagtgttatgcagcttggtttgcacatgttcca

SEQ ID NO: 6820 - DNA, 121 bp, Artificial Sequence
  Description of Artificial Sequence: Synthetic probe
ttttagcttgtgtgcctccgagagctttggatgtctcgtcaaatagtctggtgagtgttgyaataacaggtctcagctcagcagacacattcgatgtatcagctgtctgcacagttggggg

SEQ ID NO: 6821 - DNA, 121 bp, Artificial Sequence
  Description of Artificial Sequence: Synthetic probe
gaggctgggctgaaggaatggctgctgcgcttcttgctgaattagtggcatcaacattgcyggcagctttaatatgttgtttcgatgaactcactcaatgcatgtcttagtctatccagtt

SEQ ID NO: 6822 - DNA, 121 bp, Artificial Sequence
  Description of Artificial Sequence: Synthetic probe
ttgttccccttccgccgtttcttctctaaccttttcttgcgaggatcaagtataccctccrcagtgtacaacttgtcatgttgtgtgttaccactagtcgtcttgcttccttcacggtcat

SEQ ID NO: 6823 - DNA, 121 bp, Artificial Sequence
  Description of Artificial Sequence: Synthetic probe
tgtacattaatcttttctgaaggaatgccgagaagcttttgatttgcaagtgcaacagccrcaaaggcttcattaatttcataaaaatcaacacgagaagactctaagccagcattcgtga

SEQ ID NO: 6824 - DNA, 121 bp, Artificial Sequence
  Description of Artificial Sequence: Synthetic probe
gaaacctggattagaaatggctactgaacagagtgaacttgatctgtcatatgggatgcgrtaccaaaatgtcacaattccagaggcatacgaacgcctcattttggatacgataagagga

SEQ ID NO: 6825 - DNA, 175 bp, Artificial Sequence
  Description of Artificial Sequence: Synthetic probe
tagttctagatcgcgattaattaactttttttkgktagaaggaccaagcgtgtcatgctgtcacaaaaatggtsataacagcgtagtagcaatttacaagaaagactctgaagctagtgaaaattgatagtacaagcagcggcatcagcagaagaagaaagaaaagcgtttgggc

SEQ ID NO: 6826 - DNA, 202 bp, Artificial Sequence
  Description of Artificial Sequence: Synthetic probe
tgaaggagtacattgcgcgatttggtcacggatctgcaaagcttgctcgtcaggctcagagcaaagagaaaactcttgcaaagatggagcgaggtggtctygctgagaaggttgtcaatgacaagattctggtgttccgctttacagatgttggcaaactcccaccaccagtgctacaatttgctgatgtcacgtttggata

SEQ ID NO: 6827 - DNA, 121 bp, Artificial Sequence
  Description of Artificial Sequence: Synthetic probe
gtataagcatattcaaaccttggacaaccaggagagcgaaaagagatatcaagtactactrctccctctgtttcaaaatataagatgttttagatttgtgaataaaatgtatcttagactt

SEQ ID NO: 6828 - DNA, 121 bp, Artificial Sequence
  Description of Artificial Sequence: Synthetic probe
cagtagatagctcagtttaatccatccaacattctaacttaagtgatacaatcttgatctkatctactaccatcataggaaataagcaagcttagcgaaggcttcatagtacttcactttt

SEQ ID NO: 6829 - DNA, 121 bp, Artificial Sequence
  Description of Artificial Sequence: Synthetic probe
caagtcccatggcggcgaggccaccatcatggtcaccaaggtcgacgagccttccaagtayggtgtggtggtcactgaggaggcgaccgggaaagtggaacggttcgtggagaagcccaag

SEQ ID NO: 6830 - DNA, 202 bp, Artificial Sequence
  Description of Artificial Sequence: Synthetic probe
gtccacgacggcaccaccatcgtgctctgggagtggtgcaagggcgacaaccagagctggaagatcctaccctggtaaagcttgatgccgtgtacatgttsgtttccagttcagtagacagaataaacaaccaggtctgcagctacgatccatggtcagtacgtcacttgacagtcgagatcggatcgcttcgttcacgaat

SEQ ID NO: 6831 - DNA, 121 bp, Artificial Sequence
  Description of Artificial Sequence: Synthetic probe
atagggactcaattttgtcgcaagagctgctttggagtggtattggtttgcggcattttgygctgtgtgggttagatttggtttagcaagcagctcttgcgctcctccttgagtttgtaac

SEQ ID NO: 6832 - DNA, 121 bp, Artificial Sequence
  Description of Artificial Sequence: Synthetic probe
ggattgctccgatccaaacccccatccatcatcatcatcgtcactctctcttcctctccawttgggtgcgtcctcgaagatggcgtcgtccaaggtgttcaccctggaggaggtctccaac

SEQ ID NO: 6833 - DNA, 121 bp, Artificial Sequence
  Description of Artificial Sequence: Synthetic probe
gaaactttccgacaaggaggctgtggccctcgtcatggctcacctcaagaagatggtgccrgaagccactgaacctacgcagtacctggtgtcgcggtggggctctgacccgaattctctg

SEQ ID NO: 6834 - DNA, 121 bp, Artificial Sequence
  Description of Artificial Sequence: Synthetic probe
cgcacttccttggacactttgaaccaactctttctgatcagcctagctaagcttgtttcayagtgagctccaaatggcttactccaaaaccctagctgctggcatcctcgccatgatgttc

SEQ ID NO: 6835 - DNA, 121 bp, Artificial Sequence
  Description of Artificial Sequence: Synthetic probe
gtgcaactctgcagcttgattttcaattgcccagtcgcttcaagttgacttattctgcagwggatgaagccaagcttgagaggcctgtgatgatacacagggcaatactaggatcagttga

SEQ ID NO: 6836 - DNA, 121 bp, Artificial Sequence
  Description of Artificial Sequence: Synthetic probe
gttccgcttatctcccatcgtgctattgtcatggatacctgtttagcgcaactttgttatyggtggtgactaatgtgcgaaagatttactgttgccttgagaatctaattcttgttgccaa

SEQ ID NO: 6837 - DNA, 121 bp, Artificial Sequence
  Description of Artificial Sequence: Synthetic probe
gggcgggtgcatcatccgggccagcttcctggaccgcatcaagaaagcttatgacaggaaygctgagctcgccaaccttctcatcgaccctgagttcgcgcaggagatcatggacaggcaa

SEQ ID NO: 6838 - DNA, 121 bp, Artificial Sequence
  Description of Artificial Sequence: Synthetic probe
cgaaacaagtgccttggaggaaaggtctctacagaaagataaaccgcagactccggatgawttcgagaagttggttaggagctctccaaatagtagttttgtctggataagctatatggca

SEQ ID NO: 6839 - DNA, 121 bp, Artificial Sequence
  Description of Artificial Sequence: Synthetic probe
tcaaccacaggggataaaagaatagcatcattcgattgctacgactctaactaagcgatartgttgtcggccagtgatagcccagcaagttggctggtaggggcgttcggattctgctgct

SEQ ID NO: 6840 - DNA, 121 bp, Artificial Sequence
  Description of Artificial Sequence: Synthetic probe
tgaacctttctgccccctttatctgtgagtttttccgtgatgcccaagagaaagcttttcmgtatgtcgactacatatttggaaatgaaacagaggcaaggacatttgctaaagttcgtgg

SEQ ID NO: 6841 - DNA, 121 bp, Artificial Sequence
  Description of Artificial Sequence: Synthetic probe
gctgatggtgatcttgttcttctggcccgtcgtcttgtcctccgcggacacgttgaggatrccgttggcgtcgatgtcgaagcagaccgtgatctggggcacgccgcggggcgccggaggg

SEQ ID NO: 6842 - DNA, 121 bp, Artificial Sequence
  Description of Artificial Sequence: Synthetic probe
gttgtgttcaccctcgtatgtcacaatgagcatcgacggatcgtccacgcaacgttcaacrtgcttccttgctgggcagcccctcacactgctacatttgtagtaccccctgggatgaggg

SEQ ID NO: 6843 - DNA, 121 bp, Artificial Sequence
  Description of Artificial Sequence: Synthetic probe
cttgttgaataaggagaaggagttggagtggagtctcgtgaaggagatgaagggctgtggygtaagctctcaggagctggcgaccagcgacttcctggccgcggagggcctgtacctgttc

SEQ ID NO: 6844 - DNA, 121 bp, Artificial Sequence
  Description of Artificial Sequence: Synthetic probe
gttcatctgctgctgtaggcccatcttcgacatacgagcatcagtaatctcaccagttgcragtttcaaacgctggacctcaccagttagtgcttcatttaaagcatctctcagctgtgct

SEQ ID NO: 6845 - DNA, 202 bp, Artificial Sequence
  Description of Artificial Sequence: Synthetic probe
cagtcataccagtatgaaccaggctcgacaggaccagccttcttttctgccttcttaagagctctttcagagattggatgtccattgattgaaactttaayactatccatggactgattaaacttgaaacccttcttcaagaaaccagcaaaaaatgatgaatccccactcttaccagttgaggattggtcttcatctaacc

SEQ ID NO: 6846 - DNA, 121 bp, Artificial Sequence
  Description of Artificial Sequence: Synthetic probe
gaccttgcgcgccttctctgggtcgctggcctcctgcgagagctggttctcgaaggacgcsgagtccttgttccagctccagtacacgccggacttggtgaggctgggctccccgaccacc

SEQ ID NO: 6847 - DNA, 121 bp, Artificial Sequence
  Description of Artificial Sequence: Synthetic probe
gtcgtggagattagcatctatggaatatgagccatgctgtatttgtcaggaagaatacgtygatggagatgatctcgggacgcttcactgcgggcacgacttccatgccggctgcatcagg

SEQ ID NO: 6848 - DNA, 121 bp, Artificial Sequence
  Description of Artificial Sequence: Synthetic probe
acatccaagttgtgtgctactaccttatcgccccttgtctcttgggcggcaaccttgtccygatatggtgatttgtacggatctagatatgatttaggtagctgctttttgtgccgtaata

SEQ ID NO: 6849 - DNA, 202 bp, Artificial Sequence
  Description of Artificial Sequence: Synthetic probe
gtacccaaacaatagtgtacacgttattgtgggagaggctagtgctaccaagtcaaacaaacagaacatgtcagatcaaacacctcggtctgcatccatcrcagtcaaaaaaatgttctcctcgggtatcgggcatactgggatttgcagctgccgcatcgagcagtccagcagctgtgtttcttctctacgctgcttcggg

SEQ ID NO: 6850 - DNA, 121 bp, Artificial Sequence
  Description of Artificial Sequence: Synthetic probe
gctcctccttgtccctctagtgccacaagattaacaaaaggacggtccatatatagtcttktgtgttttctgcgcagaagattgaggacactcaagactttttactacccatcgcaaaata

SEQ ID NO: 6851 - DNA, 121 bp, Artificial Sequence
  Description of Artificial Sequence: Synthetic probe
agttcctccatatgttgtactcttagttgtgtgtatgttgtaaccatggacgactgatttrttcactgcaaagggttgtgaagtaggaggggaacattgattggttggtgtgctgtgctga

SEQ ID NO: 6852 - DNA, 202 bp, Artificial Sequence
  Description of Artificial Sequence: Synthetic probe
gacctacagctccggcaacgaccgcgtcacgctcgcccgcggcgcaaactacttcatctgcaccgtcccaggacactgcggcgcaggcatgaagatgcagrtcaacgccgcatgatcctgctgcctcccgctcctccatccggaattactaatcaggatttgatccagatgagacacgtccgcctgccgtggctacttgctg

SEQ ID NO: 6853 - DNA, 121 bp, Artificial Sequence
  Description of Artificial Sequence: Synthetic probe
aatccatatcattgatttcagtgatctgtccattggggatcctttattcgacttaattccrctgcacttggacgtttttcgtggtgatattgatcttctcagggagtaccgtacgaagcta

SEQ ID NO: 6854 - DNA, 121 bp, Artificial Sequence
  Description of Artificial Sequence: Synthetic probe
gcggcacaagcctaacgacattgcctttcccagccgtcagcaagaagacaccagcgtccargcacgcatcaactaaaggaccagccggtacgtcgagctcgatgccracaatgagaccaat

SEQ ID NO: 6855 - DNA, 121 bp, Artificial Sequence
  Description of Artificial Sequence: Synthetic probe
ttaccgcccaacgcttgtcagctcatcctgggacgggtatgtggcccggtgggaggcatcrggagacaagaaggacccctcgatgctctcgttcgatgagcagaggactagcccttaccac

SEQ ID NO: 6856 - DNA, 121 bp, Artificial Sequence
  Description of Artificial Sequence: Synthetic probe
accccttcgctcaatgtcatcgctggagaagggttcccatcaaaggtcttcttcaatggcraggagtgtgctatgccacagaggtttccaatgagcagtggattcaggaccgcactcagca

SEQ ID NO: 6857 - DNA, 121 bp, Artificial Sequence
  Description of Artificial Sequence: Synthetic probe
gctggctgaggactgtgaccagcctgattacgtgaagctggttaaggcactgtgtgctgakcacaatgttcaccttgttactgtgccaagtgctwaaaactcttggcgagtgggcagggct

SEQ ID NO: 6858 - DNA, 117 bp, Artificial Sequence
  Description of Artificial Sequence: Synthetic probe
gtgcaagaagacgacgtccccaagctcacctacctcaagatggtggtcaaggagacwctgcgactgcaccctccggccaccctgcttgtgccccagggagaccatgcagtcctgcca

SEQ ID NO: 6859 - DNA, 121 bp, Artificial Sequence
  Description of Artificial Sequence: Synthetic probe
atatgtcgatctcatccaaggacaggcggtcgcacagcttcaagttgtgttcatttgccaratgcaagagacatatgaaataaagatgtggcgagatctcggtcgttggaagatcagggtt

SEQ ID NO: 6860 - DNA, 121 bp, Artificial Sequence
  Description of Artificial Sequence: Synthetic probe
tctgcacgcattattgctaagtcttttagccgaaccaaagacatgacctggagacctgatmtgtttagtgacagtatggcggctagtggaatagaaactggtacaaaattgtacatttcga

SEQ ID NO: 6861 - DNA, 202 bp, Artificial Sequence
  Description of Artificial Sequence: Synthetic probe
agccttgagatacatattttggatcctgcggatcttttaattcagttcaggtggatcagaataacagggggaatgcggcccaggtcatctttctggcaccwttttggtcttgaattcgtcctttgtccacataatctgttttctaggcaaatgttaactttgaccttattattttgatcatcagccgcctgttaataattga

SEQ ID NO: 6862 - DNA, 121 bp, Artificial Sequence
  Description of Artificial Sequence: Synthetic probe
gccgccgctgagggcgctggtgccgctgctctacaccgtgcgccgcgtcttcgtcatcgtmgactgggtctacgacgtgtggaccaataagctcatcacccgcaccgccccgtccaggaca

SEQ ID NO: 6863 - DNA, 121 bp, Artificial Sequence
  Description of Artificial Sequence: Synthetic probe
gcccgactgctccacctcgcccctcatcgcggagccggagttccagcaggccatgctgacrgaggacgacgagttcctcatcatgggctgcgacgggatctgggacgtgatgaccagcgag

SEQ ID NO: 6864 - DNA, 121 bp, Artificial Sequence
  Description of Artificial Sequence: Synthetic probe
cgtttgtgccctcccaaaccatacattttggtcggttatcatttgggatggatgactcctytgaggatgcccaccagacaaaccaaactgctgcatctgtggcaagattgactgtgattgc

SEQ ID NO: 6865 - DNA, 121 bp, Artificial Sequence
  Description of Artificial Sequence: Synthetic probe
cgttcccgtgacgttcatgacgtgccggatgaggttgctgttgtatgtgtcggcgttgtcrgcgttggcgtccggctccgcggacgcgtcgcccttgtgcggccacccggtctccgtcacc

SEQ ID NO: 6866 - DNA, 121 bp, Artificial Sequence
  Description of Artificial Sequence: Synthetic probe
caaccgtgttcgctctcaaagaaggcggcggcgagggtggcgtcattgtcgactccggcayctccgctacgcttctggtcgatggggcgtaccagcccctcagagaggagctcgggaggca

SEQ ID NO: 6867 - DNA, 121 bp, Artificial Sequence
  Description of Artificial Sequence: Synthetic probe
cgactgccgtcagattggcataacatgccccattgttcctggcataatgccaataaataaytacaaaggtttcatccgaatgactggattctgcaaaactaagataccagctgagattact

SEQ ID NO: 6868 - DNA, 121 bp, Artificial Sequence
  Description of Artificial Sequence: Synthetic probe
ttggcatagaagtagtcctcttccttgggtttgtcaggaatcacctgcctcctggatggcrcgcccatgcggctggtatgtgatgccttcatggaggacgagaaatcggtccagctcaatc

SEQ ID NO: 6869 - DNA, 121 bp, Artificial Sequence
  Description of Artificial Sequence: Synthetic probe
gtcgctccatcgctgcatcgatcaatcatgcatgacaaattcattctacgagatggacttrcggtccttccctgaaaatgcgcgatctggacgttgtccacggcgagcttcttgaagttgc

SEQ ID NO: 6870 - DNA, 121 bp, Artificial Sequence
  Description of Artificial Sequence: Synthetic probe
tactgaagacacaacttgacacaaacgagacagacttcacttcaagggcgacatgcgacakggcagcccaaccgacgaccaaggaccaccagcagctgcaataccaagacacttactgacc

SEQ ID NO: 6871 - DNA, 121 bp, Artificial Sequence
  Description of Artificial Sequence: Synthetic probe
ggctgagcggcggcatggaaaggcacgttgaggtcggagaagagcctcccaaggaggttgragcaccgacagacaacgctgacgggcgaggcggggtcagccttctgaccgaagatagcag

SEQ ID NO: 6872 - DNA, 121 bp, Artificial Sequence
  Description of Artificial Sequence: Synthetic probe
cagaactctgacatctgttcatgatggtatcttggaggatgtcgcctaccctgctgaaatygtggggaaacgcatcagataccgtttggatggtgccaaggtcatcaagatctacttggac

SEQ ID NO: 6873 - DNA, 121 bp, Artificial Sequence
  Description of Artificial Sequence: Synthetic probe
gaattcattgatgatctgacagcccaagttaagagcggtgttatccccatgagcagaatcracgatgctgtttacaggattcttcgggtcaagttcaccatgggtctatttgagagccctt

SEQ ID NO: 6874 - DNA, 121 bp, Artificial Sequence
  Description of Artificial Sequence: Synthetic probe
gagtattttggaattctcaagtcgtgtcgtatctgttcaataagctgtaatgaaatgctgycctttcgactcctggaacctgaccagttcgatttggttaatttgaggtgaatatttgtgt

SEQ ID NO: 6875 - DNA, 121 bp, Artificial Sequence
  Description of Artificial Sequence: Synthetic probe
caagcgcatctcagggctcatctacgaggagacccgcggcgtgctcaagatcttcctcgaraacgtcatccgcgacgctgtcacctacaccgagcacgcccgccggaagactgtcaccgcc

SEQ ID NO: 6876 - DNA, 121 bp, Artificial Sequence
  Description of Artificial Sequence: Synthetic probe
ctccttggctccattgacaccagctggggcgtgtctgcgtatgtttcccccttcttgtccrtctacatgttcggcttcatcttgaggcgcgacgccagcttctgtccgagggaagcatcac

SEQ ID NO: 6877 - DNA, 121 bp, Artificial Sequence
  Description of Artificial Sequence: Synthetic probe
tggcatgcagatctttgtcaagaccttgactggcaagaccattaccctggaggtcgagtcytctgatacaattgacaatgtgaaggcgaagattcaggatawrgagggcatcccgccggac

SEQ ID NO: 6878 - DNA, 202 bp, Artificial Sequence
  Description of Artificial Sequence: Synthetic probe
attactgaataaatgctagcttgctggctctccttttccatttggaaatgaaatgctcccagttttctgggtcagctattgtattctaggcgtgcctggcyatctttgtgtaactgaggcttgttgcttgcaactgctatgacctttctggcaagttgtttttgagcaagtgagccaagtaaggatctttgggaatgcattt

SEQ ID NO: 6879 - DNA, 121 bp, Artificial Sequence
  Description of Artificial Sequence: Synthetic probe
atcagcaagactcttgtgctcagtatcagtaaaccaggtgaagaaactttcttcaaccaaygggcgcttgttccctttctttttaagtggatttccgttaacctccattccttccttccac

SEQ ID NO: 6880 - DNA, 121 bp, Artificial Sequence
  Description of Artificial Sequence: Synthetic probe
gatctccatgcatccagatcatcaagacggccactgtccacttcagcatctgcaagcgtgrtaacactaagcagttccacaagtcagacatcaagttcccgctagtctaccagaaggtccg

SEQ ID NO: 6881 - DNA, 121 bp, Artificial Sequence
  Description of Artificial Sequence: Synthetic probe
caagctcaccaagtcccagtccgagtacatcagcatccctgtcgagggtccttacaagccygctgcctaccggtactagagagggtagggtgcccagcacagactcctggctggcttgcct

SEQ ID NO: 6882 - DNA, 121 bp, Artificial Sequence
  Description of Artificial Sequence: Synthetic probe
acttagttccttcgttcccggttccggttcgttagggttttagttgggaggaatggcggamgtcgagtaccgttgcttcgtgggcggcctcgcctgggccactgacgaccgctccctcgag

SEQ ID NO: 6883 - DNA, 121 bp, Artificial Sequence
  Description of Artificial Sequence: Synthetic probe
tcgggaactgttttgagtttgttgtgtgcgtcgagcagccttcgtgctgctcattattctstctttcagttgtgttggtgaactattggcatgctatgttcggttaaagttgctacttcta

SEQ ID NO: 6884 - DNA, 121 bp, Artificial Sequence
  Description of Artificial Sequence: Synthetic probe
agcttaaggttaaggagctcaagaacggtcgtcttgccatgttctccatgttcgcttcttygtgcaggccattgtcaccggcaagggccccctcgagaacctcgctgaccatcttgccgac

SEQ ID NO: 6885 - DNA, 98 bp, Artificial Sequence
  Description of Artificial Sequence: Synthetic probe
gaagccaccgatcccaattccctgcctcaggtagatcttccttgccatcgaggcagccctratgtagtaccagtcagcatcatagggtggagctcctt

SEQ ID NO: 6886 - DNA, 121 bp, Artificial Sequence
  Description of Artificial Sequence: Synthetic probe
gaagacaaaccaaaggcaaaatgaaataacctcggagtcccaagcttctcgattggtaggyggaagcaggatcagcaatcacacgggaactccaagagaccacatttgaggcatgctgctg

SEQ ID NO: 6887 - DNA, 121 bp, Artificial Sequence
  Description of Artificial Sequence: Synthetic probe
cctgtggagtccttcacttggatacagaaaatccaactctacaacctggtcagagtagccygcgttccttgacatcacaactccccaacgattaccagcagtacccatagatgttacatgg

SEQ ID NO: 6888 - DNA, 121 bp, Artificial Sequence
  Description of Artificial Sequence: Synthetic probe
taggaggaagagtaacatacattccaggctgtatggcaaggtctttcttcggttcaattaraccattccgttcttgttgcagattaaacaatgacccgaattttttctctcctcttcttct

SEQ ID NO: 6889 - DNA, 121 bp, Artificial Sequence
  Description of Artificial Sequence: Synthetic probe
tcaagggcacgggagaagactcctgatgtgccatcacgatcctctcctgcaggagctccakctgtggttcctccacagggaggagattttgaagcgaaagtcagaaagctcgtggaacttg

SEQ ID NO: 6890 - DNA, 121 bp, Artificial Sequence
  Description of Artificial Sequence: Synthetic probe
acgacatgtggccctctgcgatgcctctcctgtagctgcatccgtcagctgaataaacatyccctttgtttgggattttagattttatattatttgctttttattagttttgcccgtcgag

SEQ ID NO: 6891 - DNA, 121 bp, Artificial Sequence
  Description of Artificial Sequence: Synthetic probe
tatgaccgttcttctcaaggacctctcaaacccacagctaaaccggtctgtcaaacctccrattttctcatgctttggagacattgctcttgccattggtgagaattttgagaaatacctg

SEQ ID NO: 6892 - DNA, 121 bp, Artificial Sequence
  Description of Artificial Sequence: Synthetic probe
gcatcggacttatgtcgatcttaaggacaaatggaagacgctggttcacacggcgagcatytcgccccagcagcggcgcggcgagccagtgccccaggatctgctggaccgggtcctggct

SEQ ID NO: 6893 - DNA, 121 bp, Artificial Sequence
  Description of Artificial Sequence: Synthetic probe
cgagcagttctcgagtagcttcagcgtctccgacaacaatctcccagagctatcctccggyggtttcatgtgtggcactgccaccgatgcgctgagctcctctgtcttccaccagctctcg

SEQ ID NO: 6894 - DNA, 121 bp, Artificial Sequence
  Description of Artificial Sequence: Synthetic probe
tgtattcttctgtacagtgaacagatacatgggcctcgctaacctaccccaagagatggcyggaaccttttgccattgcgcctctctagtggcagttcctcgaggagaatcagtcctgtta

SEQ ID NO: 6895 - DNA, 121 bp, Artificial Sequence
  Description of Artificial Sequence: Synthetic probe
gtacgacaaggagctggtggaggccgaggagattgccaagaaggtgaggtgggtgatggaytcggagggcgggaggctgctccgggagcgcactctcacggcgatgcggcaggcgaacgac

SEQ ID NO: 6896 - DNA, 121 bp, Artificial Sequence
  Description of Artificial Sequence: Synthetic probe
caagatcgcgtaccagttctaccgcgtcttccccaacggcgaggtgcagtacctccacccmaaggacggcgtctacccggagaaggtcaacgcgggaaggcagggcgtgggccagaacttc

SEQ ID NO: 6897 - DNA, 121 bp, Artificial Sequence
  Description of Artificial Sequence: Synthetic probe
cgttatgaaccaagcccgatgcctccttctgttgtactgtgttcttatatcaccttatggygcttttttgctggtcctttgttaatctctcggcggttgtcagatcctcatagtcggtgtc

SEQ ID NO: 6898 - DNA, 121 bp, Artificial Sequence
  Description of Artificial Sequence: Synthetic probe
aaatgtgcgggtcgcaaggaaggaagataagctcaaagtgaaggacgagtacaacaattayagggatagggctgcatatatgttcctgttgtttccatccactctcctcctattgagatgg

SEQ ID NO: 6899 - DNA, 112 bp, Artificial Sequence
  Description of Artificial Sequence: Synthetic probe
aagtagaattcacttctgagatagcaggcaattttaccacatctgaattcgctagtttggractggtagtattagcttctgaaatgttgagtttggcagtggcagaaccagc

SEQ ID NO: 6900 - DNA, 121 bp, Artificial Sequence
  Description of Artificial Sequence: Synthetic probe
agcagccgggtgagggcgaggagcctccctcatgagtggcctttcgtgaattgcaggatarcctctacgatcctcgagcacgcggactgcaggatagcctctgcgatcatcgaccacacgg

SEQ ID NO: 6901 - DNA, 121 bp, Artificial Sequence
  Description of Artificial Sequence: Synthetic probe
gatatctcaagatccaatgtctgctgaagacactattgatgaagcaagtgttcaaactctygtttcctttggatttcaagaagatgttgcccgaatggccttgaaagcttccggtggaaat

SEQ ID NO: 6902 - DNA, 121 bp, Artificial Sequence
  Description of Artificial Sequence: Synthetic probe
gaagaaactctggcattgttcttgatagaggttactacagcagctgaaccttaccccaccwaggaactcggcaatcggcattattcttataggtttacacacattatctgtcatatttttc

SEQ ID NO: 6903 - DNA, 113 bp, Artificial Sequence
  Description of Artificial Sequence: Synthetic probe
agcaagtacggaagcattctgcagatgttcgccatgcaggaatccacttccayggttggacctgaagcctcgaaggctgtcagcagggagatgcctgtcgagctgctccgtgc

SEQ ID NO: 6904 - DNA, 121 bp, Artificial Sequence
  Description of Artificial Sequence: Synthetic probe
tttacaagcttcactcgtcatagaacaaacgattcatggaacattgcaaagtaggaaggayttagagtgctcaatcatagtagcagcacacggatgtaccaaaccatttacacaattagaa

SEQ ID NO: 6905 - DNA, 121 bp, Artificial Sequence
  Description of Artificial Sequence: Synthetic probe
tctttgaatcgcaacgacgacctcattacagcgtgcacatctgtaagaacttgtagccgcrcaacgagttcgtaggcaataataacaatacctgtgttgacatgggagagctacaaaggga

SEQ ID NO: 6906 - DNA, 121 bp, Artificial Sequence
  Description of Artificial Sequence: Synthetic probe
agcagttccagtatattcctgctgaggaaactctcctgtgtctagctgcatgttgatcagyactcttgctccacgatacagtggtaccggatcaatttcagcctgtccagcataaattaga

SEQ ID NO: 6907 - DNA, 121 bp, Artificial Sequence
  Description of Artificial Sequence: Synthetic probe
gagagcgggaaatgcattttgcgcctataattacatgatgatgcatggctgtggcttgccrttgtccgctgtccttcgtaaaacaccatcactagcctctaaggaagttgtccactctgac

SEQ ID NO: 6908 - DNA, 121 bp, Artificial Sequence
  Description of Artificial Sequence: Synthetic probe
tttttaggccttgttagtgttttatatgtatgtttccttgtcaaattgtatgtgtgtggcycttgtatagaagtggatgtgagctgttgtttcatccttaaattaggcaccatagcctcag

SEQ ID NO: 6909 - DNA, 121 bp, Artificial Sequence
  Description of Artificial Sequence: Synthetic probe
atgcaggtagtagaacgacacttgaatgtaagcaaatttttgcgtagagcaccagagcctrggatcatagagtgtatctgaattgtgtgttctcttggatttctatctaatggaccttccg

SEQ ID NO: 6910 - DNA, 121 bp, Artificial Sequence
  Description of Artificial Sequence: Synthetic probe
aacaccgccgtcggtttcaaaacctcctcagactaggggggaccatttcaactatccagarggctctattcactgagatactagttgttcaagaactaggaagtaaaatggagttggttcc

SEQ ID NO: 6911 - DNA, 121 bp, Artificial Sequence
  Description of Artificial Sequence: Synthetic probe
cggcgccggatcgagtgtcgtcgttcctcgtaacttcaggctgctagaagaacttgagcgyggggagaagggcattggagatggaactgtcagctatggaatggatgatgcagatgacata

SEQ ID NO: 6912 - DNA, 121 bp, Artificial Sequence
  Description of Artificial Sequence: Synthetic probe
ggaaccacatatggcacatacagccttctcttttgccttttcccttggccctctcgctgcragactgcatacgccttgttacagggcgctcgcgggacgggcgattctctggagccttgta

SEQ ID NO: 6913 - DNA, 121 bp, Artificial Sequence
  Description of Artificial Sequence: Synthetic probe
atctgggatgacaccttgcccttcaaatccccagaagtggcttccagtccgtgcaactccygcctgaacttcgtcagcgatacagaggccaccagcatctctaaccattttgtaggctgca

SEQ ID NO: 6914 - DNA, 121 bp, Artificial Sequence
  Description of Artificial Sequence: Synthetic probe
gttgcgcaagtgcatatgtagtaccggtcagtgtattggcatagcttctcgcagtgaacarcataccctacagcagtagcatgtaaaaataagttcacattagcgcatagcagcaagtgta

SEQ ID NO: 6915 - DNA, 121 bp, Artificial Sequence
  Description of Artificial Sequence: Synthetic probe
tggtgtctgctcagttatttgattggccttctacagttgccccctgttgcgtttacctttrctttgatatggaatcttgagtctagggcgacatgccacacttagagtttaggacggagta

SEQ ID NO: 6916 - DNA, 121 bp, Artificial Sequence
  Description of Artificial Sequence: Synthetic probe
ttcaaacaaacgaatccaggacatagtttctgaaaacttgcatctaggttgtgctgctatrcatggtgaacacaatgctggcttccttcgtatccaacacgtcactactgagatcaaatat

SEQ ID NO: 6917 - DNA, 121 bp, Artificial Sequence
  Description of Artificial Sequence: Synthetic probe
tttttttgtgtgtagagaaggagacctgctatttattctgtaattgtgacagcttggattrtgaagactatattgacaaaaatgwrawmaagtgctttgttgtgcccttagcactggagtg

SEQ ID NO: 6918 - DNA, 121 bp, Artificial Sequence
  Description of Artificial Sequence: Synthetic probe
atcctatcaattaagctgtctgcatcattgatgcgtcaagttacgataccaggagaagagrtgagctgaagaccctgtcgtttgccttttctgcctcctttccaatctatgcaccacgcga

SEQ ID NO: 6919 - DNA, 121 bp, Artificial Sequence
  Description of Artificial Sequence: Synthetic probe
tgccaaggtcgcccccgagatggctccagacatccgaccttcgccttactacattcctccrttcaatggcatcacagcggtcgaaggtggttacagcaaggttaccgcagctacaaggatg

SEQ ID NO: 6920 - DNA, 121 bp, Artificial Sequence
  Description of Artificial Sequence: Synthetic probe
caaggcgcagcaggtcgatgtttgcacgacaaagcagaacaacacgatgacagacataacracacgagactgctgacatgctcagctatgaataacacgagtttctggcttctcaggtcga

SEQ ID NO: 6921 - DNA, 121 bp, Artificial Sequence
  Description of Artificial Sequence: Synthetic probe
cgcgccttcgttcgggcccatctgcggcccaaacatctgcatcatggctctcagagtctcrgcagtgtgctcctcttctgacagatgcacataaacgcccgcatccgtctgggcgcctggt

SEQ ID NO: 6922 - DNA, 121 bp, Artificial Sequence
  Description of Artificial Sequence: Synthetic probe
cactcctatgccccgagcatatgcattgatctgtgcagtcgcatctgagaagaagtcgtayggctgagaaataaactcgttcatgagagtataggcgtagaccgagagaccagctttctgc

SEQ ID NO: 6923 - DNA, 121 bp, Artificial Sequence
  Description of Artificial Sequence: Synthetic probe
ccccgggttctttcctcgccctctttgtagacttccctctcttctgctccaactggccatygtttgcgtttcttctcttcctccgcgcatctgcctgctcatgcgctgcggaaggtttggt

SEQ ID NO: 6924 - DNA, 121 bp, Artificial Sequence
  Description of Artificial Sequence: Synthetic probe
caagagaaggtgctctaaagctaagagggagttgtggggcaaagttcctgttgtagttgtraagtcagaaacagatgttggggtgtaaagctagtagtattacatatcggaacaattgatt

SEQ ID NO: 6925 - DNA, 121 bp, Artificial Sequence
  Description of Artificial Sequence: Synthetic probe
acgcgctcttcgcggggcgcgaggccagccgcgcgctcgccaagatgtccaaggagagcgscgacgtctccggcgacctctcgggcctgaccgagaaggagctcggcgtgctcgccgactg

SEQ ID NO: 6926 - DNA, 121 bp, Artificial Sequence
  Description of Artificial Sequence: Synthetic probe
gagagtctgtgcaatcaaatgtatcacctcaaccaaaaatcttcaaagaaatctgctgtamgggcaaaggttcctttcgagaagggctatagtccaatggactggcttaagctaactcgta

SEQ ID NO: 6927 - DNA, 121 bp, Artificial Sequence
  Description of Artificial Sequence: Synthetic probe
cttgccatgttgaattcacccctccgagaggaaagtccgcggctaagtccacacccaagtyctcatccaagccccgcgtccaggaggtgcttctcccttcagtaacggtgggatgaagcga

SEQ ID NO: 6928 - DNA, 121 bp, Artificial Sequence
  Description of Artificial Sequence: Synthetic probe
ggagttggaagcacaacttgaccctgaattcccatccttcgtgaaacggatgttacattcrcacgtggtgcgagggttctggctgggtctgcctagccatttctgtgacatgtacctgcca

SEQ ID NO: 6929 - DNA, 121 bp, Artificial Sequence
  Description of Artificial Sequence: Synthetic probe
tttgcctatgacacctcgtataaatgttgtcggggcttctaatggcagacctacgagaacrgttgttatgacgcctgaaacggttcaacgtggtggaggttccagcaacaggcctttgagt

SEQ ID NO: 6930 - DNA, 121 bp, Artificial Sequence
  Description of Artificial Sequence: Synthetic probe
aagacatgctggatttgaacattgtggatttggtctcatttccattgttgggaaataatcyttmagtgaattatatcccaagtaaggagaaacttgtccaaacttcaacagatatttcaga

SEQ ID NO: 6931 - DNA, 121 bp, Artificial Sequence
  Description of Artificial Sequence: Synthetic probe
aacttccccaagttgtgaaggatacaccttaaatcatccacctttatataaccaactctgytttggtcaaagtacctaaaagcctgcaacaggtccttgtcaaccacctcatgttttgctg

SEQ ID NO: 6932 - DNA, 121 bp, Artificial Sequence
  Description of Artificial Sequence: Synthetic probe
agctcgtttcggtatactccaacggtatgagaaggacgaaaaaagtatcagatggtttgarctccccaattgcttcatattccacaatgctaatgcttgggaagaaggcgacgaagttgtt

SEQ ID NO: 6933 - DNA, 121 bp, Artificial Sequence
  Description of Artificial Sequence: Synthetic probe
tagccagcaaacagctcactgcaatccggattcggtgcggacgactataagttagaagaarggaggacgacatgagcctgtttctcactgaagctccggcagcatcactgagtttcagcat

SEQ ID NO: 6934 - DNA, 121 bp, Artificial Sequence
  Description of Artificial Sequence: Synthetic probe
gagcgacgccgcctggaggttcacctccatcaccatcgcccagttggtgtagttggagcgygtcaacatcgggaaggagaggttggtgctgctgccgcctccggtctcgcgcaccacttgt

SEQ ID NO: 6935 - DNA, 121 bp, Artificial Sequence
  Description of Artificial Sequence: Synthetic probe
catacaccacataacaacacatataaagacccctaaagctggtactaatctcaaagcaacygaatgcgcacccattgggcattccatcccatgtgggtctttacagtaagtcaaatttctt

SEQ ID NO: 6936 - DNA, 121 bp, Artificial Sequence
  Description of Artificial Sequence: Synthetic probe
ataggtcaagtgatgaggacatgccttcagattctgacaaacataagcgacataggagccrctccatgggggcatcttcagatgatggagctgctggtgaaccagacaaggcgaatggcaa

SEQ ID NO: 6937 - DNA, 121 bp, Artificial Sequence
  Description of Artificial Sequence: Synthetic probe
ctcctcagctgccccggcgggatcgatcaacatgagcaacatcttcacggggaagtgcgtsgccaagatctccgccctggaccccaccctcacggttgctcctcggaggagaggcgacagc

SEQ ID NO: 6938 - DNA, 121 bp, Artificial Sequence
  Description of Artificial Sequence: Synthetic probe
cttaatgaggaactcaagctgcagcaggttgtagctgaggagcacatccatcacatgaacrctacccttgtcgaggcaaagaggcaggccacccagtaccagcgagaggcagagaagtgta

SEQ ID NO: 6939 - DNA, 121 bp, Artificial Sequence
  Description of Artificial Sequence: Synthetic probe
tctttcgacagattaaaaccccacacctgtctatcctggaaaatcatcgctccggatgcargttattcttcttcttcttctatatcttctatcaaacaaagcaatcaagaaggcaatgtac

SEQ ID NO: 6940 - DNA, 121 bp, Artificial Sequence
  Description of Artificial Sequence: Synthetic probe
gaggtcgcgcatgcactcgggctcgcgggggaagacggtggtgtcgaggatgtaggtgtasagggcgtcgctcttgagcagcgtcttgttgctgctgtcgatggagctgtggacgttgggc

SEQ ID NO: 6941 - DNA, 121 bp, Artificial Sequence
  Description of Artificial Sequence: Synthetic probe
aatatgcggtcattgtatcgactttcaattacatcataccgcacatcatgggatggagcaygtttacaaattctataaagcccgaggattcacagcaatacagcaggcctcagtcgtcgcc

SEQ ID NO: 6942 - DNA, 121 bp, Artificial Sequence
  Description of Artificial Sequence: Synthetic probe
tcgagcggcgaggtgatcgaaggaaggcaatgttgttcttgaaggcgaatgcgagaatgaygatcagtagaggctgactccgaaggactcgctgacgatgatggcgatccccatggagatg

SEQ ID NO: 6943 - DNA, 121 bp, Artificial Sequence
  Description of Artificial Sequence: Synthetic probe
ggtactacaagttttcagttgaagaaggtacaagtgagaaagtagcttctggccttgcaarcattgaggttaagatagatgctgatacaagcagcggtgacactgatatttacgtatcaag

SEQ ID NO: 6944 - DNA, 121 bp, Artificial Sequence
  Description of Artificial Sequence: Synthetic probe
tccagaaaagcgtgaggtgcatatcgtcacagggtccatcctcagtgccaccgaaaagctyggcggcacagtcccattcgataaagcccgagtgctcatcgtatcggctgattctcacgag

SEQ ID NO: 6945 - DNA, 121 bp, Artificial Sequence
  Description of Artificial Sequence: Synthetic probe
agtgtgatcggaacatgagttgtaacctgccatctctccggaagactgtaaagaggattgrcagtgacaaggatggaaaattgggctttctaagttcgttagtaaagttccatggtttttg

SEQ ID NO: 6946 - DNA, 121 bp, Artificial Sequence
  Description of Artificial Sequence: Synthetic probe
tagccgaacgtgatagtctgcgggaggaactaaaccgtgctaggacggctcttgactatgrgaagaacgcaaatccagacctgatggcccaggtgcaggcagtggagaaggatcttgtaac

SEQ ID NO: 6947 - DNA, 121 bp, Artificial Sequence
  Description of Artificial Sequence: Synthetic probe
caaggagacgttgccaggagggcatgctgtcaacaggaagagggcagagagaggcctaacrcagctggagattgaagtggtggaactggtgccagagaaatctacaggcaacaagataagc

SEQ ID NO: 6948 - DNA, 121 bp, Artificial Sequence
  Description of Artificial Sequence: Synthetic probe
  modified_base (73)..(73): a, c, t, g, unknown or other
tcaatgatgccaggcgcaaaaggagatcaagggagggcagtgtcgtatatcaacgctttcycgacttcaaacnttcccagttacctcactaggtgggctattcgtcaagctggcactgacc

SEQ ID NO: 6949 - DNA, 121 bp, Artificial Sequence
  Description of Artificial Sequence: Synthetic probe
ctgcctgaagcaatcagcaacaactttttttggaagatagacagggtgggatgcttcacarcaataactagtcaacaagttgtaccccgattcattttttgtgtcatggatattttgaaga

SEQ ID NO: 6950 - DNA, 121 bp, Artificial Sequence
  Description of Artificial Sequence: Synthetic probe
ggatcactagaaaagataggtgtcgacacacgagtccagactgcactgatgatgcaagagrttgcagaaccatacataaggaggcgagccatgcgccatcttgaaaaagcaagggttgtta

SEQ ID NO: 6951 - DNA, 121 bp, Artificial Sequence
  Description of Artificial Sequence: Synthetic probe
tggttaattggacactggctccagttctaaaatttgttctattccagctgtaaccaggctkcgacttgttggcgcatttacctcatgctaaggttgctcaggtcatccacaatatgcacag

SEQ ID NO: 6952 - DNA, 121 bp, Artificial Sequence
  Description of Artificial Sequence: Synthetic probe
taattttgaccaatctgcccaagggcggaacctcaataccatgattggcagagcagcccayatagaattcctggagactgacatctacgccaagttcatcatgtggtcctttcctgaactc

SEQ ID NO: 6953 - DNA, 121 bp, Artificial Sequence
  Description of Artificial Sequence: Synthetic probe
tccaagacctataattgttcttttttttccgccagcacaagctgaaatggaacagcagcayaggtaacaaaaaagagcactgctccaacaacaccttgaaatacaccgacgcgacggcacg

SEQ ID NO: 6954 - DNA, 121 bp, Artificial Sequence
  Description of Artificial Sequence: Synthetic probe
cgctgctgcggcggagagatcgatcactctgaaaccaggggaggagtggacagggaagctygaggtttccgcggtgccgtcgacgaactgcagcgatcatcttgatcagcckggcatcatg

SEQ ID NO: 6955 - DNA, 121 bp, Artificial Sequence
  Description of Artificial Sequence: Synthetic probe
gttgggtttcaagatgagcccaccggcctacatgtcgttaacgccagaaacgaggcatgaratcctcagaggctttggtggggtcaactacgcttccactggctgcggcattctcaacaca

SEQ ID NO: 6956 - DNA, 121 bp, Artificial Sequence
  Description of Artificial Sequence: Synthetic probe
gttgcaaaaccaaatggagcaagattatgatatcggatctaccatcagggacaagattatyccacacgctgtttcgtggttcactggagaggctgttcaggatgaggaatttgatggcatg

SEQ ID NO: 6957 - DNA, 121 bp, Artificial Sequence
  Description of Artificial Sequence: Synthetic probe
gcgcttcccaatctgataagcattcggccggagtagcttggcacccaagacataagtagtwatgtactgaagcgctagcttgcaaggacctggagtgaatataatttatattttacatagc

SEQ ID NO: 6958 - DNA, 121 bp, Artificial Sequence
  Description of Artificial Sequence: Synthetic probe
ccccggcatgatggcgatggcgcggcacccggacgttcacatgatggatgtggtttctgaygagttcgcgtttggaagcagcaccaacggcggggctcagcaggcccctggtttggtgcgg

SEQ ID NO: 6959 - DNA, 121 bp, Artificial Sequence
  Description of Artificial Sequence: Synthetic probe
cgcttctttatcgacgatgaatggaccagagatgctctctcaggaaccctcaaaacttgtyggcgaataccatgtggtaccgggactttgcccttgcagactttgtggactgcatgtagct

SEQ ID NO: 6960 - DNA, 121 bp, Artificial Sequence
  Description of Artificial Sequence: Synthetic probe
atggactttgatgaggaggtggagcttccatccccttacacctgcgagaacgcgataaggrctgcaataatcggcctgctgatggtttggatcttcrttgcgttcctcgccgggatgaacg

SEQ ID NO: 6961 - DNA, 121 bp, Artificial Sequence
  Description of Artificial Sequence: Synthetic probe
cgccgacgtgctcgtcaaccagtacgcgcagcagctcagggtcctgtacgacaacggggcraggaaggtggcgctgatgggcgtgggggcaggtcgggtgcagcccgaacgagctggcgca

SEQ ID NO: 6962 - DNA, 121 bp, Artificial Sequence
  Description of Artificial Sequence: Synthetic probe
agtagtagtcggtagcttctccggtagttatatacttatgtatagcagttcatatacacartcatatgtatgtacaacagctgatatgtgtatgtagagcwgaggcrgaagctaggtrgag

SEQ ID NO: 6963 - DNA, 121 bp, Artificial Sequence
  Description of Artificial Sequence: Synthetic probe
gtcctgtaccatgaatgacaggctctgtcctcttaggtacgcgttgctctgccagtaggcrccccagttcctgctcatcaccatccagtcagtgctggaccccctgatccacgtctgcgtg

SEQ ID NO: 6964 - DNA, 121 bp, Artificial Sequence
  Description of Artificial Sequence: Synthetic probe
gcaccgtcaagccccaccttcatcatgatgttgcaatctatctctgttcaatgcgttcackctttagcacgctgtcagtggcaccactggcagaagatcgcaggcaagagatccgtctagg

SEQ ID NO: 6965 - DNA, 121 bp, Artificial Sequence
  Description of Artificial Sequence: Synthetic probe
cagaataaggctttctgtgttggcgcctttttgctctcattgcgatgatcagtttgataartggtaagctactagtgtggagctttttcgcaacccatcagtgttttgactatctcgaagg

SEQ ID NO: 6966 - DNA, 121 bp, Artificial Sequence
  Description of Artificial Sequence: Synthetic probe
ttcttattgatgtggtgtgtatagtaaccaccaggaagagtatttaaagccctctggcacrtagctgttgtaacggctatgagtaggctccttgatagccaaattttgcacacttgagaaa

SEQ ID NO: 6967 - DNA, 121 bp, Artificial Sequence
  Description of Artificial Sequence: Synthetic probe
agagaaaggagaagcatctccacctcgcaagaagatgacggtcgagttcccagggataaaygcgcctgttccagagaatggcgacccctggctgtggggcagcactccgcctcctcaatcc

SEQ ID NO: 6968 - DNA, 121 bp, Artificial Sequence
  Description of Artificial Sequence: Synthetic probe
cacttcgctgggcgtgggcgacaagatctggaacaacgggcccctggacacccagatccartggttccagaacctcctcccctccgtctgcggctccagctgcagctcctacctgtccaac

SEQ ID NO: 6969 - DNA, 121 bp, Artificial Sequence
  Description of Artificial Sequence: Synthetic probe
gcgctatgacattaccattcaccaaaatttctggcatgagttcaaaacggcaccacccatygttcaagatgttgtccagcagttgaaggagctactttaggatagtagattccatatgttt

SEQ ID NO: 6970 - DNA, 121 bp, Artificial Sequence
  Description of Artificial Sequence: Synthetic probe
agcatagcacagtcgaatactaattatataggtttgcatccccatcaattaagccatgatrtcccagcagagcaccacaaacaaaactctcggttgacaaaaccgcacatggtaattgttc

SEQ ID NO: 6971 - DNA, 100 bp, Artificial Sequence
  Description of Artificial Sequence: Synthetic probe
tgcatacacacggagggacgggctagactacgtccaggttgaagacatcgcgtcatgtgartccctaatatttccagtccacatctcggccaccaacgac

SEQ ID NO: 6972 - DNA, 121 bp, Artificial Sequence
  Description of Artificial Sequence: Synthetic probe
cttgaaatcagtcgtctgatcagacagctggtacgccccaggcacatcctttaccgcctcrgcgaggtgcgcgcagtcctcgtacgaggccatgagctccagcacctcttcctcgagctgc

SEQ ID NO: 6973 - DNA, 121 bp, Artificial Sequence
  Description of Artificial Sequence: Synthetic probe
gtgcgttctggctaaatctccttggtccaaaccggagctgaaggttgtccaaaacacgggmaacgttcagaagccgtggatcatccgaaggaatttctcgttccttcaatcccctgtggta

SEQ ID NO: 6974 - DNA, 97 bp, Artificial Sequence
  Description of Artificial Sequence: Synthetic probe
tgtcatggagaacgagggcttcctcaaggagctcaartttggacctggagacgggcagctccactattatctctacaattaccgtattcgcaatgga

SEQ ID NO: 6975 - DNA, 113 bp, Artificial Sequence
  Description of Artificial Sequence: Synthetic probe
attgatgtatctgtgtcagataacgcgtcgcgcacccacgcattgtatcaatgttgtatcmttattgtaggcttcacagtggctgaccacgtatcacggtctagatggtgtga

SEQ ID NO: 6976 - DNA, 121 bp, Artificial Sequence
  Description of Artificial Sequence: Synthetic probe
ggattataaccagtatgtcatgaggaatttagcacgaggatactcaaggaaagaaatgggygtgagctatgttaaggagaaacaactgcaagtgaatatgaagataaacaaacttcgtgag

SEQ ID NO: 6977 - DNA, 121 bp, Artificial Sequence
  Description of Artificial Sequence: Synthetic probe
ggacacaatcacatcaagacatcaactcgcaggcgctaggcttgaaggcagcatcgggctrgtcctactggagaaaccaaataatatcatatctaacagttggtctgaaagttactcttca

SEQ ID NO: 6978 - DNA, 121 bp, Artificial Sequence
  Description of Artificial Sequence: Synthetic probe
aataacacaaatttacagggacggtttacaaaacacgatgcaaactcaaacccccctagtmgaaatataaaacaaagatcacaaaataccccccaaaaggtagtagaaactaagaacaaga

SEQ ID NO: 6979 - DNA, 121 bp, Artificial Sequence
  Description of Artificial Sequence: Synthetic probe
gcgggaaatggcgattagtgaagggattcctattttggtggaggcgatgacttaccgagtyagccatcactcgacatcagacgattcaacaaagtacaggtcggctgatgagattgagcat

SEQ ID NO: 6980 - DNA, 121 bp, Artificial Sequence
  Description of Artificial Sequence: Synthetic probe
caggcagctcagctgtttcgaggtagtatgtggcaatagcgaacaggagctcacatacccwggttcgcagaccttctctttcctgtgccacagatgacacggatcagccattacattcccg

SEQ ID NO: 6981 - DNA, 121 bp, Artificial Sequence
  Description of Artificial Sequence: Synthetic probe
caagcggtagtgaaccactgcaggcaatccacatggttgcaccagcaattcaagttacagytgttatacgaatctacttccagctagtacttgtgtttgatgaaatgcgtgatgttcgcag

SEQ ID NO: 6982 - DNA, 121 bp, Artificial Sequence
  Description of Artificial Sequence: Synthetic probe
aatggcgtatacaagctgaggctaatgatgaagcggaaaggcttcttaggtcagattcttyggaagcattgtccgctgagcatgtataatgagattttacttccaaactaagaagccatac

SEQ ID NO: 6983 - DNA, 121 bp, Artificial Sequence
  Description of Artificial Sequence: Synthetic probe
ctggaaacaagttcaaattatcgctctcattatttggggaacacttgttctcaattctcaratgccttccttgcaaaaacagtaacttaaaaaagctctgaagttctccttggatctattt

SEQ ID NO: 6984 - DNA, 121 bp, Artificial Sequence
  Description of Artificial Sequence: Synthetic probe
cgccgcagtaagatgaagccgcttgtttctgaattacatgcagatgccacaagcccaatgraagcaagggtgtggggaggctgatacacccgcactcgcagggcaagcccttagatctttc

SEQ ID NO: 6985 - DNA, 121 bp, Artificial Sequence
  Description of Artificial Sequence: Synthetic probe
gtgcaaggaagagtatgactttaagttgtgtaatctgatggagcactacgggataaaaacmgaggctgagatcattagtggatgcattcttaagatggcaaagaatttcaccaagagcagc

SEQ ID NO: 6986 - DNA, 121 bp, Artificial Sequence
  Description of Artificial Sequence: Synthetic probe
gaaagtgacgatctggaagaaattccatgtcatctacaacttcttcttggtgcgcaagatygtcgcgcatatcgtgactttcaccttctactgcattgtcatcccggcaaccatctttgtc

SEQ ID NO: 6987 - DNA, 121 bp, Artificial Sequence
  Description of Artificial Sequence: Synthetic probe
aaaatggagcaagagaagctggcacgcaagggtcccggcgcaggagagcaagctccgtctrccccaagctctgcagcgagcgacgtgaaggctggaggtggtggcccaacagcgtccacat

SEQ ID NO: 6988 - DNA, 121 bp, Artificial Sequence
  Description of Artificial Sequence: Synthetic probe
ggtgggcttcgacttcttcctcgatgatgttcttgtaacaccacgttctgataccctgtgmaccgctgcagtaggtttgtccaatccaggctcatcgttgctagtggcatcagctttgttc

SEQ ID NO: 6989 - DNA, 121 bp, Artificial Sequence
  Description of Artificial Sequence: Synthetic probe
ttgtgaggacgctttcagcaagtgcctccattggtttctagagaacactcgtgtgaagctyctaccaaatgcatatccggaagatatattggaagagccgctgcctgcgtgagacgagctg

SEQ ID NO: 6990 - DNA, 121 bp, Artificial Sequence
  Description of Artificial Sequence: Synthetic probe
tgtcgcgacgggggaggtgatcgatgccttcttcgccacccagtttggtgtgcccgttctygatgatgaggataggtgcatctaggtcttctccaagaaagaccggccatggcctccaaca

SEQ ID NO: 6991 - DNA, 121 bp, Artificial Sequence
  Description of Artificial Sequence: Synthetic probe
gatgttcacaaagcagtggaactgattgcaactcatttgagaaaatttcttgttgaccgtrgtgttctccctttgttcgaaatgcagatgaaagtgcacaatgtgcccagagagcaaccta

SEQ ID NO: 6992 - DNA, 121 bp, Artificial Sequence
  Description of Artificial Sequence: Synthetic probe
agatgctaccggtcaacgattaacaagaagtaatagggaagtaagttccactgaggagcgmgtgaaatgatctgcggcgaagtttgtgaccccttatatagctattattaagagtgtgcaa

SEQ ID NO: 6993 - DNA, 121 bp, Artificial Sequence
  Description of Artificial Sequence: Synthetic probe
gcaatgatgatctgcttgatatccttggagaagtttcatctgatgggctctcacaagatarcttgaagaagttgccgtaccatgtggtgattgatcagaagcaagagccaacgggtgaaaa

SEQ ID NO: 6994 - DNA, 121 bp, Artificial Sequence
  Description of Artificial Sequence: Synthetic probe
tggttcaagctttctactccctccgatccaaattaatgttctcatatttgtctaaattcakatgtatgtagagatacattcgaatatagacaaatctaagaacattattatggatgtgagg

SEQ ID NO: 6995 - DNA, 121 bp, Artificial Sequence
  Description of Artificial Sequence: Synthetic probe
cgtcggaggaggggtatcctccctcaacatgcagctccgcaaggagctcgacctctacgcmtcgctcgtcaactgcgccaacgtcccaggcctgcccaccaggcacaagaacgtcgacatc

SEQ ID NO: 6996 - DNA, 121 bp, Artificial Sequence
  Description of Artificial Sequence: Synthetic probe
ggtaacaaggagggagtgaaaggcgacaagtctctgctgtcatcaagagacgcggctgagrgaccgatgaaagccgagtggagacgctgaagacggagacccagttgaccatcactgaaca

SEQ ID NO: 6997 - DNA, 121 bp, Artificial Sequence
  Description of Artificial Sequence: Synthetic probe
cagagctttgagaacctttctccagtgtcaagacatgcactgagcttacatgtagttgatmtggaaggatgtaaatggtccaaggacaactggatacagaggacaactgcacctgaaccgc

SEQ ID NO: 6998 - DNA, 121 bp, Artificial Sequence
  Description of Artificial Sequence: Synthetic probe
ggttgaggcaggttcggtcgttgctatttttggccttggcacagttggacttgcagttgcygagggcgcgaaaacagctggtgcttctcggattattggcattgacattgacccaaaaaag

SEQ ID NO: 6999 - DNA, 121 bp, Artificial Sequence
  Description of Artificial Sequence: Synthetic probe
cgatatcggatactaagcatgtcgtgcttgcctggctagtcggtcccaagtcagatgggcrgcggaggatgagggcctgtggtgtctctgcaggcttggtgtaggagctgataggatcatg

SEQ ID NO: 7000 - DNA, 121 bp, Artificial Sequence
  Description of Artificial Sequence: Synthetic probe
gtggaaaaaagggtggggtgaaaaaggtgaaagatggctggcgatgggggctggctggcasgaagacgaagtaaaagaagaagaagaaacagtgcgatgataatgttgttgttgttgtagt

SEQ ID NO: 7001 - DNA, 121 bp, Artificial Sequence
  Description of Artificial Sequence: Synthetic probe
tccgtggcgataatccacgtcgacgacctctgccgcgccgaggttttcctcgccgagaacragccgtcgtcggggaggtacatctgctgcagccacaacaccaccgtgccccagatcgccc

SEQ ID NO: 7002 - DNA, 121 bp, Artificial Sequence
  Description of Artificial Sequence: Synthetic probe
cccctgcatgtttaagcctagagccgagctctttaaagttagaaagcggattatcccaggrcgcctcaatgtgaccctcttcaccagagtaaagagagatgtaatattgaggatttgttct

SEQ ID NO: 7003 - DNA, 121 bp, Artificial Sequence
  Description of Artificial Sequence: Synthetic probe
caactgagtgaaggttttcagcggtttcccatcctctattgacaatatcattagtggaacrtgattagttgccttctggtatatcacgagcatgattccagggcttatcttaatctcctgg

SEQ ID NO: 7004 - DNA, 121 bp, Artificial Sequence
  Description of Artificial Sequence: Synthetic probe
caaagaagacagataatggcatgggccagagttacacatttacacatttctaatccaagtytcaggagcttattgccacttcacgatagaattttgcagaattttagaaggaggattgaca

SEQ ID NO: 7005 - DNA, 121 bp, Artificial Sequence
  Description of Artificial Sequence: Synthetic probe
ttaggtacaggtttttagttcacgggcatccaacatcagcagttaaagaatgccctgatcracgaacaggcggtactgttggttggttgtatttatgagcgaattatgcatgcacttatag

SEQ ID NO: 7006 - DNA, 121 bp, Artificial Sequence
  Description of Artificial Sequence: Synthetic probe
acctggtggccagtttgaactcagtggtgctcctcttgaaacgctgcatcaaacttgtgcrgaggtcaattcacatctttatcaggtcaaagcwgttggagaggaaatgggagttggattt

SEQ ID NO: 7007 - DNA, 121 bp, Artificial Sequence
  Description of Artificial Sequence: Synthetic probe
tcctgtccagcgctcaagatctccggttaccaacagaagagcttatgactgatagagaatyatctaggttatggcagtgaggactgaggcggcttctgtttgccattctagctcgagcact

SEQ ID NO: 7008 - DNA, 121 bp, Artificial Sequence
  Description of Artificial Sequence: Synthetic probe
tggtgccgccgttaaccagcgtgacgccgatctcctccacttctggcacaagtaccggagrtccgaagaggggtcggcacggaaaggagaggcgcgaaggcagttggtggagatgatggca

SEQ ID NO: 7009 - DNA, 121 bp, Artificial Sequence
  Description of Artificial Sequence: Synthetic probe
acgaagaagtaaagaaagccgatgcgagcacggaggaatgcatgtgatgagcactaagtgktccttggcacgatgcgagcacggaggcggttcttgaggacgatgacgctcgctagctccg

SEQ ID NO: 7010 - DNA, 121 bp, Artificial Sequence
  Description of Artificial Sequence: Synthetic probe
aaaaaaggcatatgtgcaacagctagagagcagtaagctgaaactcgcaagcctagagcargagctccagaaagctcgacaacagggaatcttcatttctagctctggagatcaaactcat

SEQ ID NO: 7011 - DNA, 121 bp, Artificial Sequence
  Description of Artificial Sequence: Synthetic probe
aacctgttaatcatcttcagactagtagctttttgcttcttgctggtggcattaccttgtrcatgtgattatatgatggcagctgctgtttggcatcttgcgcggttatgcaagtctccct

SEQ ID NO: 7012 - DNA, 121 bp, Artificial Sequence
  Description of Artificial Sequence: Synthetic probe
ctattacaacaacttcagtttttaactgtaccaccagaattaccagcagcaccacgtgctraatatgtacagcattgacaacacgtgagttttttgcagcgttacacataatcgaacaaca

SEQ ID NO: 7013 - DNA, 121 bp, Artificial Sequence
  Description of Artificial Sequence: Synthetic probe
cacgcccaccagcagcagggacaccttcagcctgttcttggtgtcggcgtaggcgatgaayaccgcggtgtaggcgagctggaaggcggcgccggatgggtgttgacggtggcgactaggg

SEQ ID NO: 7014 - DNA, 121 bp, Artificial Sequence
  Description of Artificial Sequence: Synthetic probe
gtcaccgatgctgctaaggtccttgcagatcctggagaactcggaggagggcatgcggackatggcctggtactcggagtcggggatcccgaggtgctcgctgtcgatgtccatgagcttc

SEQ ID NO: 7015 - DNA, 121 bp, Artificial Sequence
  Description of Artificial Sequence: Synthetic probe
ttccactgaaagcatagacacaacaatcaacatttcttccaagcacttgaattcgcttgayactatcaacgccttggagtacattggatccaaaggcagcctagccatctgtttaccaact

SEQ ID NO: 7016 - DNA, 121 bp, Artificial Sequence
  Description of Artificial Sequence: Synthetic probe
actccgaaaaccggtacccggactgttgaattagttttgggctgaggctgcttggttcccsgcaggaaatgccgacattgtcgtattattctcttgacctgtgacgtccgcactcgcgtgt

SEQ ID NO: 7017 - DNA, 121 bp, Artificial Sequence
  Description of Artificial Sequence: Synthetic probe
tgaaaacgctacaacttgagacgcactacagttgcaaaagcagctccaaccgacaaaaagraagctgcgaagacaggaagaaagcagacggtagaagctattgctgatgatacagaaggaa

SEQ ID NO: 7018 - DNA, 121 bp, Artificial Sequence
  Description of Artificial Sequence: Synthetic probe
cttgatgacctagaggcagaagtaaggtttaccgacagcctcgaatgggacgacaagtcayggatctccaaggatgtgaagtctttcctttcgcccatcagggagaagctgcgcacattcg

SEQ ID NO: 7019 - DNA, 121 bp, Artificial Sequence
  Description of Artificial Sequence: Synthetic probe
cttaccaccagacatatgggttgtcatttgctatgtagtgaagttcctgaagccctcggcrccgatgatgtacggagacaagggcaccaagcggctgggcgatgaacctcgtgtagggttt

SEQ ID NO: 7020 - DNA, 121 bp, Artificial Sequence
  Description of Artificial Sequence: Synthetic probe
agacaaacccaaatcaattatttctggacggaaggagcactatatcaggtctaacagcggrgcgcacaaaaatctacataacaatgatgaaaaattaatccaaagataaacatcagccgcc

SEQ ID NO: 7021 - DNA, 121 bp, Artificial Sequence
  Description of Artificial Sequence: Synthetic probe
aagatacaaagttcaagatccaaaaatgtggaaagaagtatgttgctgtgtctagagcacrcaacatgctgttccacgcctccatgatagtctaagaaataataagccactggagtttact

SEQ ID NO: 7022 - DNA, 121 bp, Artificial Sequence
  Description of Artificial Sequence: Synthetic probe
tccccagccaagcaacaacatgcttctttggcagaccaaccagataaaagccatccatcayggccatgctggagattctcatagtgggaggcaatcaccagatgaaaacactatgggtact

SEQ ID NO: 7023 - DNA, 121 bp, Artificial Sequence
  Description of Artificial Sequence: Synthetic probe
gatcagacagaaaatgagacaacaatcaaatgagacaggcagagctgcagccattcccatmaccgtgaggcagcttgaagctattatacggctgagcgaatctctcgcaaagatgagattg

SEQ ID NO: 7024 - DNA, 121 bp, Artificial Sequence
  Description of Artificial Sequence: Synthetic probe
gacttcccgccactctctagctgacaggaccaaggacgtgtgaatccaagagaaagatacygatacaccgcgcacacccagcgcagcaatagcagaggggttactctacaaaataatcgcc

SEQ ID NO: 7025 - DNA, 121 bp, Artificial Sequence
  Description of Artificial Sequence: Synthetic probe
cgacgtccttatcccggcagcgctgggtggagtcataaacaaggacaatgctaatgacatyaaagcaaagtacatcatcgaggctgccaatcaccccacggacccggaggcagacgagatc

SEQ ID NO: 7026 - DNA, 121 bp, Artificial Sequence
  Description of Artificial Sequence: Synthetic probe
gctggattcaggtcttgaatgacggacgaagtatacaaatgaagtagtactggtacgaagygtcacctgcttcaagctataaccaactctctttctgttgctacgtatttgaaaaatagca

SEQ ID NO: 7027 - DNA, 121 bp, Artificial Sequence
  Description of Artificial Sequence: Synthetic probe
ggtgaagaggaggaaggtgaagcatgccaaggagatcggcatggtgatgaagaaggtcgcraagggcgacgccaaggaggagtgggagaaggtcgaggctgctgcattccaactggcgctc

SEQ ID NO: 7028 - DNA, 121 bp, Artificial Sequence
  Description of Artificial Sequence: Synthetic probe
tctgcggaaagcttgtataatcgaacaggagccgaatgaattcaaccagtttgtgacgacrctttacaaaagattgaagaatgtggatgatgttgcaaagttctttcagcttcttgcatcc

SEQ ID NO: 7029 - DNA, 121 bp, Artificial Sequence
  Description of Artificial Sequence: Synthetic probe
cgagcatggcggtgtgatccaggaagtccttgagctccaccacgttctgcagtatcctcckgaggtcctccgcgcgcacgaagcccgccgcgcccagccggcgcacggcgtagacgtagat

SEQ ID NO: 7030 - DNA, 121 bp, Artificial Sequence
  Description of Artificial Sequence: Synthetic probe
accatccctgatctgtgcagcgacatctttgacggctccaggaccatgggggatgaacacygaagaggacttggacgaggccccaatctccttcatggtgtcaaagtactgggtcaccaga

SEQ ID NO: 7031 - DNA, 121 bp, Artificial Sequence
  Description of Artificial Sequence: Synthetic probe
ctatgaccgctcccgtggccacgattcgagaagaagggaacgctctcgatccagggagcgyagcaggcgccctgatagatactgaatcggttgctccatggctggctgattccagggtggg

SEQ ID NO: 7032 - DNA, 108 bp, Artificial Sequence
  Description of Artificial Sequence: Synthetic probe
cgtgtcacccgtacatatgcagagtgaaggctggggtaagcctaaccrcataaaatgcttctccgagacacagccagcgctgaattacaacaaaacattggagctcgg

SEQ ID NO: 7033 - DNA, 121 bp, Artificial Sequence
  Description of Artificial Sequence: Synthetic probe
tgacactgccacctttgacatgctcactgttgcagcaacatgcccaattgtatgagctacrgcgaccgggaaaagcgctttccagaaatcttcgtcagtattgggggcctcaactaggcgg

SEQ ID NO: 7034 - DNA, 121 bp, Artificial Sequence
  Description of Artificial Sequence: Synthetic probe
tattgaatgaatattgctgcatttagcactgtgcttccacaacatccctctgttacctccytgaaaccataaaggcgaggtcgttgaatgatatcaagcaatattgtagtatatatcgccg

SEQ ID NO: 7035 - DNA, 121 bp, Artificial Sequence
  Description of Artificial Sequence: Synthetic probe
tttagaacctcagcctttttattacatggtccagttggttcagtaacaagcaacaaggatrctgaaaatgcactacaaaaggcatatgaaaaggctatcaggagccagatagaggtgttgc

SEQ ID NO: 7036 - DNA, 121 bp, Artificial Sequence
  Description of Artificial Sequence: Synthetic probe
  modified_base (79)..(79): a, c, t, g, unknown or other
tgttgctatcatgcgatcgtgcgacactcctctataatatctgctgaagcatagtctgttkcacgaggttctcaaggtnaggaatgagaatcgatgatgatggtgagctgctattgcagag

SEQ ID NO: 7037 - DNA, 121 bp, Artificial Sequence
  Description of Artificial Sequence: Synthetic probe
gaagactgaggaagtagctcctcctgcaagtttggaggagtcgaagactgaggaagtagcycctccagcgaagcaaccccaactgaaaactcagttgctgctcccagcgagcctgctgttc

SEQ ID NO: 7038 - DNA, 121 bp, Artificial Sequence
  Description of Artificial Sequence: Synthetic probe
aaaccgctcttcggttgtaaggaaaagcatcatagtttcactggatcgcggaagccatagrtgatggtcaagcagccttcccgggaacaatccagtgtagtagctgaagcggtcagttata

SEQ ID NO: 7039 - DNA, 121 bp, Artificial Sequence
  Description of Artificial Sequence: Synthetic probe
gcacccgtcatatgtggcatcagttcttatagaaggcaaccaggacatctctactggtttrgaatggatacgcacatgggccttgcgtactgccgaagctgatcctgatacagagtgcaca

SEQ ID NO: 7040 - DNA, 121 bp, Artificial Sequence
  Description of Artificial Sequence: Synthetic probe
gttgctcagttttgctcagcgcaatgtgcctgtcaatagctctagttcttctgggtctggyaatgtaccgatgacatctgaatatgtccagagctgaatagaagaccaaagctgcttttcg

SEQ ID NO: 7041 - DNA, 121 bp, Artificial Sequence
  Description of Artificial Sequence: Synthetic probe
caaccttctgatcccatcttattcagcatcacagtgaagagccgagatgaagttggagacrgtttcaatgtccggtacatgtccatgctcctgggtgtattctaaggggtttaagcggctc

SEQ ID NO: 7042 - DNA, 93 bp, Artificial Sequence
  Description of Artificial Sequence: Synthetic probe
ggcgctggacatggggagcatggggaagggccagatctgggtgaacgggcacaacgccggscggtactggtcgtacaaagcctcctccggcag

SEQ ID NO: 7043 - DNA, 121 bp, Artificial Sequence
  Description of Artificial Sequence: Synthetic probe
tggggccagatataaagagtatcgtcttcaggactatagctcttggttcgtcaaaacagcycaatgacactgaaaaataggaaccaatctgagaagttgcattgtgaaatacggatgattg

SEQ ID NO: 7044 - DNA, 121 bp, Artificial Sequence
  Description of Artificial Sequence: Synthetic probe
agctttgttcaccgctcgaactattcaaaacaattaagcaaattatgcacctccacgagcrgcgagatgcgccggaccgccgtccgccggatctaccactaccagcgtcgtccgggacgat

SEQ ID NO: 7045 - DNA, 121 bp, Artificial Sequence
  Description of Artificial Sequence: Synthetic probe
tagactattcgatctaggaaaaggttactcaatgagcttctaagcagaagtatgattaaaycaatagacattaatgttgatgatggaggcttggaaaaatcttatcgtgtacatgatatgg

SEQ ID NO: 7046 - DNA, 121 bp, Artificial Sequence
  Description of Artificial Sequence: Synthetic probe
agaggttccagctatgcaagcactttcagtttgattggccagtgaatcatacgtcactgarktcccgggatcagaaagcttgttgttattgtgggggatgatcctaatggtttacttattg

SEQ ID NO: 7047 - DNA, 121 bp, Artificial Sequence
  Description of Artificial Sequence: Synthetic probe
cgatgaggagggagtcgagccaaaggacatcgagttggttatgacgcaggcggctgtctckagggccaaggccgtcagggctctcaaggctgccaatggagacattgtcaccgccattatg

SEQ ID NO: 7048 - DNA, 121 bp, Artificial Sequence
  Description of Artificial Sequence: Synthetic probe
cccgttctggccgaaaggcggtctcgggatccaacctccatgggaggcccatatctgaagygcggcgctagtgctcgacctcgtgttcttggcaagtggttcgtccctgccgggtacggga

SEQ ID NO: 7049 - DNA, 121 bp, Artificial Sequence
  Description of Artificial Sequence: Synthetic probe
agggctatccttccttgagacctcagcactggaagccttgaatgtcgagaaggcatttcaraccattctttctgacattcatcagatcataagcaagaaggcacttgctgcccaagaggct

SEQ ID NO: 7050 - DNA, 121 bp, Artificial Sequence
  Description of Artificial Sequence: Synthetic probe
aagacaaatattcgggatacataccatttctggttgaaggagaatctaaaaatctggtctyactctctggaaattcggcactttgccacctgcgcttatagcattcaggggtcatgtccat

SEQ ID NO: 7051 - DNA, 121 bp, Artificial Sequence
  Description of Artificial Sequence: Synthetic probe
ggtcgcggcttccaagatcttccaaggtgactacaccagcggcgaacccgtcgacaaggcrcagctgattgaggatgtgaggaaagccctctacgcctccaagatctgcagctacgcgcag

SEQ ID NO: 7052 - DNA, 121 bp, Artificial Sequence
  Description of Artificial Sequence: Synthetic probe
tgtagtgtgtccatggggagtagggtttcgcagtaagcagaaatggagaacaggcatttayccatttcgatcgtttgtgcaagtcagccttttgtgcctggatggtaggagctatatgttt

SEQ ID NO: 7053 - DNA, 121 bp, Artificial Sequence
  Description of Artificial Sequence: Synthetic probe
caacactatacaaagttcatcaaatgaatacattgctgagattcttgaggaggttaatatkgaaaattcagttttggaatctgagttacggtatagggtttcagaatatatggaagttctg

SEQ ID NO: 7054 - DNA, 121 bp, Artificial Sequence
  Description of Artificial Sequence: Synthetic probe
ctagtttctggggaagatcatcgtgacgaatttgcagcagctttcttttcatcacatcttrccagtttttggacaacacggtgttattgaacgaactaagtagctttccaagttttctcca

SEQ ID NO: 7055 - DNA, 121 bp, Artificial Sequence
  Description of Artificial Sequence: Synthetic probe
gactctgaccggtgtctatggcttctggaagtacgtctccaacctggagaggcgcgagacycgccgctacctggagatgttgtacgcgctcaagtaccgcaccatggccagcactgttcca

SEQ ID NO: 7056 - DNA, 121 bp, Artificial Sequence
  Description of Artificial Sequence: Synthetic probe
gaaagtaagacctctaactgacgacgaccttttgaatcttgtataatcccgaaatataggkttctatctatattctgtagtgctagcaatgctgtatgatatagtttctaactcagtgtgc

SEQ ID NO: 7057 - DNA, 121 bp, Artificial Sequence
  Description of Artificial Sequence: Synthetic probe
cgaacgggcagcagccgcatctgcagcagtttacacaaagacaaaatttcccggttcgtgyatcgttactagctttgtgtttggcggtggatctggagtatccagtccatgtaactgcttg

SEQ ID NO: 7058 - DNA, 121 bp, Artificial Sequence
  Description of Artificial Sequence: Synthetic probe
catgggtcttgtattattttctattccttcgggtgccatcttgtccagttactgtgtctcyggacagccaaagatcagctggtaaaacttttatttggaaagtgaatcttgatcatgtaga

SEQ ID NO: 7059 - DNA, 121 bp, Artificial Sequence
  Description of Artificial Sequence: Synthetic probe
gtggaagctcctcttaacaccgtcagcatttatagtaacggtgcgaacaacccctccactrgcaccatcacgggcaatagcaagggaaaccaccttcaccacaaacttctcagcttcttcc

SEQ ID NO: 7060 - DNA, 121 bp, Artificial Sequence
  Description of Artificial Sequence: Synthetic probe
gactaccttccccccgatcctcaccacatagactgctgccacgcttctcccgggctgtaawgatcgatttggtggtttcatttggtgattcagaacttatttcagaacatagcaggtcggt

SEQ ID NO: 7061 - DNA, 121 bp, Artificial Sequence
  Description of Artificial Sequence: Synthetic probe
acagctttgcggtatttgtgttcgtggtgctaggtggactggccatacgtgatgtagagcrgcgtatggttgcagagagggagcagagggaggcgctccgggcggatgtgatggtggtggc

SEQ ID NO: 7062 - DNA, 121 bp, Artificial Sequence
  Description of Artificial Sequence: Synthetic probe
cagctggaaagaagcgcagaagaaagtgacttgactagtttcccctgaacgtgcagctctygagggatgaggcaagctgtgtgccctcagtctctaggtgttgttggcatgaggcaagctg

SEQ ID NO: 7063 - DNA, 121 bp, Artificial Sequence
  Description of Artificial Sequence: Synthetic probe
taagaacagaagcaccgataaagagctggtacatcttacacactacctgctcgccattgckgcgctagaagattttagcaagctggatcacgatgattgggaatccttcctaggagtaaat

SEQ ID NO: 7064 - DNA, 121 bp, Artificial Sequence
  Description of Artificial Sequence: Synthetic probe
actgggcttcttctcctcctccttcttttggaacaggttccggagccagctgccgccaccrctggagttcccgatctcaggagggaccacggctggctggggcatgcctgggaagccgccc

SEQ ID NO: 7065 - DNA, 121 bp, Artificial Sequence
  Description of Artificial Sequence: Synthetic probe
tcccgcaaaagtggtgtaaatgaggagcttgaagatggtgagcttggagaagatggggagrttcattaggcagagttttacctccaagatcgtcagtacttgctgtctcttgtcttgtcaa

SEQ ID NO: 7066 - DNA, 121 bp, Artificial Sequence
  Description of Artificial Sequence: Synthetic probe
tgagcattttgcacctttattcgaacaaattgcaaagttagatgaagcactttacaacatycagttcgagcagcactggctagaagcccaaaaccgaccggcaagcaatattgaacgagaa

SEQ ID NO: 7067 - DNA, 121 bp, Artificial Sequence
  Description of Artificial Sequence: Synthetic probe
ggtagagaagttaaccgtggccgaggacaaaaaggaggaacctgtggagaaagaggagacycctgcagcagtagaggagaagaaggatgctaaagagtgaagcgcctgcctgctatttcct

SEQ ID NO: 7068 - DNA, 121 bp, Artificial Sequence
  Description of Artificial Sequence: Synthetic probe
gaacagaaacgacgacgggaagcacgtgccggcagacaacgtggtgttccataaccagtaytgggcgagcaacacgcggcgcaggaggctgaagaagaaccacctccgctacgagagcctg

SEQ ID NO: 7069 - DNA, 121 bp, Artificial Sequence
  Description of Artificial Sequence: Synthetic probe
agtgcgtgaagtgtattggaagatctacaactcactgtatattggtgcacaagatgcactkgttgcttcttatcctgcactgggtgatgatggagacaatatcttcagccgtccagagcta

SEQ ID NO: 7070 - DNA, 121 bp, Artificial Sequence
  Description of Artificial Sequence: Synthetic probe
ggttgataacgacattgagctcgccaagaaggagaaggtcctcgtggatgctgggtaccgygatgccaagcagcagccatagaatttgtagcactacttgatcaaatggagcttggtctgg

SEQ ID NO: 7071 - DNA, 121 bp, Artificial Sequence
  Description of Artificial Sequence: Synthetic probe
ccagtctgcaaggtcttgtcctcaaagccagccaagtaggaacccgttcatcaaccgtctrgagctgggggcaatgtatgtacctaaccttgggtggtacagcggcctaagtaatttaatc

SEQ ID NO: 7072 - DNA, 121 bp, Artificial Sequence
  Description of Artificial Sequence: Synthetic probe
gtccaatggcaccgatcctggcaggtttgtgtgcagcatcaacaaatgcaattctttcatygaaagacacatttttttcatayccaacttcccatgtactgaagtcggtgagttgggggca

SEQ ID NO: 7073 - DNA, 121 bp, Artificial Sequence
  Description of Artificial Sequence: Synthetic probe
ggtgcccgtcacaatcagggaccccgggtgcacccgcaagaccttccccaactacttcgaygtgctaagcactttcgtgaagaactagatcgggatgctataaaagaattgcatatgtatt

SEQ ID NO: 7074 - DNA, 121 bp, Artificial Sequence
  Description of Artificial Sequence: Synthetic probe
ctgtgaacaaacctcgtcctacaacagagtcaaaccaggcaacgccggttatgacttcatygatggcagtggataagcccaaatctgawtttctatgcagaagcccatgaggaagaagaga

SEQ ID NO: 7075 - DNA, 121 bp, Artificial Sequence
  Description of Artificial Sequence: Synthetic probe
aggaatgtggcatatgcttaattaccagaacttcataaggtagatagaaagggaactgatkaagtgttgctctagcgcctaggtgtacacgtacatgttcgtcaaaactttgttgcctaaa

SEQ ID NO: 7076 - DNA, 121 bp, Artificial Sequence
  Description of Artificial Sequence: Synthetic probe
ttatagcctgtatgaggaccttgacgaggaagtggacgtggaataagcggagctggatgaygtagtagccagctgcaggccattggagtggagaccattattaattagcatttcagtgtac

SEQ ID NO: 7077 - DNA, 121 bp, Artificial Sequence
  Description of Artificial Sequence: Synthetic probe
acctctcaggactatttcaattttccaggtcatgagaacgttagaacgagtccattatgckctcaactgaggttttatgaaatcaaattggttgactcggacaatctttgtacataaaatg

SEQ ID NO: 7078 - DNA, 121 bp, Artificial Sequence
  Description of Artificial Sequence: Synthetic probe
ctgtgcagttgacttctgcttgtttggaggctatttcaggattggcttcattggtattgtyaaatctgaataggtgtggcatatatgatgaaggctgtgagaacttggaaggtcttgtcaa

SEQ ID NO: 7079 - DNA, 121 bp, Artificial Sequence
  Description of Artificial Sequence: Synthetic probe
ttttatttacatcgattccataggatcaagaattttggtgccagagctatccctcgtgaaytgtacatatatcatcaaactcttctatagaactttgtacatagaatgctgttagaaatga

SEQ ID NO: 7080 - DNA, 121 bp, Artificial Sequence
  Description of Artificial Sequence: Synthetic probe
ggaacagaaagtggcccaagttgcttgtggatggaggcatactcttgcttttacagaaaakaaaaatgttttcgcatggggaaggggtactagtggacaactcggtcatggtgaaatagtt

SEQ ID NO: 7081 - DNA, 121 bp, Artificial Sequence
  Description of Artificial Sequence: Synthetic probe
tcccacttttacttctaggcctttccagtaccatgtctgctctgctattcttgtagtctgwtgaacttgtcttgatgttttctcgccaacttggtccgaaaattgatcaaagtatagmgtt

SEQ ID NO: 7082 - DNA, 121 bp, Artificial Sequence
  Description of Artificial Sequence: Synthetic probe
tgaactcgtgaagtacattcttgaagttggtctggctaaggtcgacgtggaatatgctggrttttcgccaatccgcataaaatcggcattcacggacaaacagtccttattttacatgaac

SEQ ID NO: 7083 - DNA, 121 bp, Artificial Sequence
  Description of Artificial Sequence: Synthetic probe
tgcacacaaatacacaacgtctttcgggattattcttctgtggaatgctatcttaatcttmgctctgggttagtgcatggtggcgacgattgcccatcaacatgattctcatccttgcata

SEQ ID NO: 7084 - DNA, 121 bp, Artificial Sequence
  Description of Artificial Sequence: Synthetic probe
acctggttactacatcacacaaatttctggcacacaggaacattgtttattcagcttcacsacagagcatatggaaatttaaagtcttataagaaaaaattaggtgctcctgatgatggct

SEQ ID NO: 7085 - DNA, 121 bp, Artificial Sequence
  Description of Artificial Sequence: Synthetic probe
ccctgagttcatcatcaagatcctccagttccttgtccccctggccatccttggcctggcygtagccgttaggatgtacaccaagtcggagtcggcttaattatcatgtgccatttgttct

SEQ ID NO: 7086 - DNA, 121 bp, Artificial Sequence
  Description of Artificial Sequence: Synthetic probe
ctacaaggataagatagttggtgatacagtgcctgtaatttttatcgtttgattctttgcyggctgctttctttgagcgttttttaagttgttgctgctgttaggatttggacaagtgtgt

SEQ ID NO: 7087 - DNA, 121 bp, Artificial Sequence
  Description of Artificial Sequence: Synthetic probe
tacttgaagaggccatgtagtattcactttccttttcataaaggatacaactcttggattygtcgtttggaaagctaaagctatcctggtgtaaattcttctaacttgagtgttaagaaga

SEQ ID NO: 7088 - DNA, 121 bp, Artificial Sequence
  Description of Artificial Sequence: Synthetic probe
ctttgcggtctgggctggctttcctgaacgaggccgagaaggcaacaaatttgtcgtagcygacaaaccacaggggcagtcgagggggctctactgctcagactcaattgaagacgtgatt

SEQ ID NO: 7089 - DNA, 121 bp, Artificial Sequence
  Description of Artificial Sequence: Synthetic probe
ctgctcagactcaattgaagacgtgattgaagagcgcaagacgcgaagagaaaatgcttgygatatattcgaggagaatggaagtagcctcacccaagaatcaaatggtctagacacaatg

SEQ ID NO: 7090 - DNA, 121 bp, Artificial Sequence
  Description of Artificial Sequence: Synthetic probe
gtaattggggcagtcgccgggttcggaattggtgccctcattgggatagctgcagattcgytgcttgacttgattttcagctctggaactagcaaggtgcatataacagacgggcttaagg

SEQ ID NO: 7091 - DNA, 121 bp, Artificial Sequence
  Description of Artificial Sequence: Synthetic probe
aaagaaaacaaggctgaaagatttccagataattgcaagaggactggtgatcttcagtgawgccttttctttgacaagctcctccgcttcagctagttctccagattcagagtttttctga

SEQ ID NO: 7092 - DNA, 121 bp, Artificial Sequence
  Description of Artificial Sequence: Synthetic probe
ggcagccacgtcctcagctaaaggtagcaaaggcgagtatatacccgccttagatatttcyaaggtgctctttggactgttccctaagcatgtctagaagcctgttgatacgatttcaatt

SEQ ID NO: 7093 - DNA, 121 bp, Artificial Sequence
  Description of Artificial Sequence: Synthetic probe
gcttggattcaaaatgttccttggtgtgactgcaactgtaaccaattgggatgctgagggyacaacttgcagctttgtattggaagacaacccacttgtagattttgttgagcttcctgat

SEQ ID NO: 7094 - DNA, 121 bp, Artificial Sequence
  Description of Artificial Sequence: Synthetic probe
tgcctttacggtcaacacttacagggtacttcatgaggtggcctctcatctcattcacctygttggaaaggaactgatcccagttatgttcccccgagacgacgaacccgcctcatgcatt

SEQ ID NO: 7095 - DNA, 121 bp, Artificial Sequence
  Description of Artificial Sequence: Synthetic probe
ggatggtggagagtataccgtctttgatcgttctgttcttgtttccaatggtgctgttcaygaacagcttttgaatcggatccggcctgctactgaagatcttaagaaaaaaggaattgac

SEQ ID NO: 7096 - DNA, 121 bp, Artificial Sequence
  Description of Artificial Sequence: Synthetic probe
cgtaaagcctacaagtgaccagaagcctgctgctggcaagtaaaatgatgcagatgcctgsagatgggagtggtaatctgagctaattgctaattttgaagaaggcgtggaaggctgctca

SEQ ID NO: 7097 - DNA, 121 bp, Artificial Sequence
  Description of Artificial Sequence: Synthetic probe
aagggccattcggatcacgagtgagccccaacagaccggtaactgcaaagaagttgcctgrcccaaaatccaacggcacctccataaacggcacacctccaagcagaagactatcaatcaa

SEQ ID NO: 7098 - DNA, 121 bp, Artificial Sequence
  Description of Artificial Sequence: Synthetic probe
actgcagcagttgtaatcacagatcataaataatctctcctaaatgtttccattcgatgtrtacgaccaatactcgttgaccagctcacggaacagagatccttcagtctccatgagcttc

SEQ ID NO: 7099 - DNA, 121 bp, Artificial Sequence
  Description of Artificial Sequence: Synthetic probe
ttcttcagcatcttgagcgacatcatccgctactgatcacacatacatctgagaaaaagaycctaggctccactataggaatttgyttactccattttgcccagcttgctattttcacagg

SEQ ID NO: 7100 - DNA, 121 bp, Artificial Sequence
  Description of Artificial Sequence: Synthetic probe
cctcagtcagcattaggccgtgccaaaaagatgtgtgtttgtatatatgtactggcagaakgttgtttgttctgttaaccttgttgtctctagtgcttttttggtcgtagaaggattctgt

SEQ ID NO: 7101 - DNA, 121 bp, Artificial Sequence
  Description of Artificial Sequence: Synthetic probe
aatccaaatagtcacagtacaaaaaaacatttaggggaaacaaacagagggccaccaaacrcttccagcatctgtggaaccaagtgctcacgcgttattagcatatggggactcttcacgc

SEQ ID NO: 7102 - DNA, 121 bp, Artificial Sequence
  Description of Artificial Sequence: Synthetic probe
tgcgtgccaaaactcggttaaaagctaatattcggaatgtatatatggatatccatgaaarcggcaaggagatatgctccgacctttgtgcttatatttatagagatgctgatctatactc

SEQ ID NO: 7103 - DNA, 121 bp, Artificial Sequence
  Description of Artificial Sequence: Synthetic probe
ctgcccaagcaatgtactacaagagagacaacagcgccccaacctactctgtccaaaccgycgaggagatcatgaagatcgtccaggaagcacagaaaccacctccttccagcacccctgt

SEQ ID NO: 7104 - DNA, 121 bp, Artificial Sequence
  Description of Artificial Sequence: Synthetic probe
gatggccgaagaagaaaccctgttgtgtccccatgtgtctccaaagctagaaaacactcgrtaagaaaagcccatgtacaaagcatatccaatgtatgcgaaacgaatggagcatttctac

SEQ ID NO: 7105 - DNA, 121 bp, Artificial Sequence
  Description of Artificial Sequence: Synthetic probe
aggagtgacacactcaacctgggaaagagatgatggcatcatctgctgtttgttgctagtygccgcaccatatcttgattcagtttggacttcacgtgagatctactatacgttttgttag

SEQ ID NO: 7106 - DNA, 121 bp, Artificial Sequence
  Description of Artificial Sequence: Synthetic probe
tccaatacgcctttctcctgcttgaataagcttctcgacccgggcaacaatatgtttcccrtaggtgtatctcttcagtgcattcaggtggaccttgatacgygaaagaatcagctcacgg

SEQ ID NO: 7107 - DNA, 121 bp, Artificial Sequence
  Description of Artificial Sequence: Synthetic probe
gtagaacaccagactatttcctgtgatgtgraactggtgttggcagcaaaggtttgatagytagctgaagtttcctggttgcagataatctttttgccccgtgtgttattcttctttattt

SEQ ID NO: 7108 - DNA, 121 bp, Artificial Sequence
  Description of Artificial Sequence: Synthetic probe
taagatgggtatctccttaataacgataatctctgtgggaaggaaatcgccaagtagtgtrcttatatgcttgtatccttgaagtgtagagtagcgcgtgctgcttgtggaaactgaaagc

SEQ ID NO: 7109 - DNA, 121 bp, Artificial Sequence
  Description of Artificial Sequence: Synthetic probe
gaagcatgaagcgcagagaagaccgtgcgtgtggaacggcatgaagaggccctgctacctmttcgcgcgcaagttctatcccgaggcgctcgacactctgatgaacattttctcgaacttc

SEQ ID NO: 7110 - DNA, 121 bp, Artificial Sequence
  Description of Artificial Sequence: Synthetic probe
atcaattgaccttgaatatgtttttggttggaacaccagctagtaaagccggaggtgtggrcttcacccccaggatatgcttaaactgctcaatagtatagttctcaaagtaagggttgtg

SEQ ID NO: 7111 - DNA, 121 bp, Artificial Sequence
  Description of Artificial Sequence: Synthetic probe
agacgtggaactcacacaagctgaacgcaaaagaagaagagctaacaagaaaaggagataygcagaaacacacaaggacaggccagccaaggtgcagaaaaactcagatatgtaggaagct

SEQ ID NO: 7112 - DNA, 121 bp, Artificial Sequence
  Description of Artificial Sequence: Synthetic probe
gatggtcttctctggcctctctctccaaatatatctcaaatggaagagaaagaagggcagrgaacacaaggaatgagctcaaatattttaaggacattttgatttgtagctttgattgcac

SEQ ID NO: 7113 - DNA, 121 bp, Artificial Sequence
  Description of Artificial Sequence: Synthetic probe
tcccatggcacccagacggaaaatattttggtctgatcactaaagcttgcctcggatggtsatgcaacttacttggccatcatgactttaacaaattcgtcgtagttgatctggccatcac

SEQ ID NO: 7114 - DNA, 121 bp, Artificial Sequence
  Description of Artificial Sequence: Synthetic probe
aaggttcatgcgtatatgggagtactatctcgtgttctctgcgtctggtttcaagtcacgrgcagttggagattaccaggttgtcttctctcgtccaggcaacaggcgaattagccatgtg

SEQ ID NO: 7115 - DNA, 121 bp, Artificial Sequence
  Description of Artificial Sequence: Synthetic probe
aaagcaaagcatcatgtgagcttgcttgttgcctgatattggacatctgttggaagatttkktgctgtgtccactgtgcgctccggatcatcattcttagactgatgcctgttttttatga

SEQ ID NO: 7116 - DNA, 121 bp, Artificial Sequence
  Description of Artificial Sequence: Synthetic probe
cgaaaatcttcaagatcccaagagcccacatcatgtaatgttggactctcttttggagatrtccatgtatcagatatggaatccaaacttgctttcccaccatagcagaaatcatcgactt

SEQ ID NO: 7117 - DNA, 121 bp, Artificial Sequence
  Description of Artificial Sequence: Synthetic probe
cgcggcgaagctggagtggtcgatcctgtacgtgctggcgagggacgaggaagggtacctrtccagggaggccatccggcgcatgtacgacgggagcctcttcgagtacatcgagaggcag

SEQ ID NO: 7118 - DNA, 121 bp, Artificial Sequence
  Description of Artificial Sequence: Synthetic probe
tgggcttcttcaggacaaaatccataactggagagcaacagcgcttacattgacatccatyctcttcgttgcagttgtgttttggtttatgggcatatttgtccgcagcgttgatcgtttc

SEQ ID NO: 7119 - DNA, 121 bp, Artificial Sequence
  Description of Artificial Sequence: Synthetic probe
ggacatcgctgccggccgcgttcctgggtacggcgtcatcaccaacatcatcaacggcggsctcgagtgcggcatcggaccggacccccgtgtggccgaccggatcgggttctacctgcgt

SEQ ID NO: 7120 - DNA, 121 bp, Artificial Sequence
  Description of Artificial Sequence: Synthetic probe
aggatctacacataccagtgtagatgragtctttgctgctggggacgtgcaggataagaartatcgtcaggccattactgccgctggatcaggatgcatggctgctttggatgcggagcac

SEQ ID NO: 7121 - DNA, 121 bp, Artificial Sequence
  Description of Artificial Sequence: Synthetic probe
gaatatgactctcccatatctcagggatattaccacaacatttccaagctttgtcttcaaytctcaggtcgaggatgcgtgagattccgatttctatgttaccactgatgcttgtggggag

SEQ ID NO: 7122 - DNA, 121 bp, Artificial Sequence
  Description of Artificial Sequence: Synthetic probe
gcagacgatgcatattctcgatcttgttttcgcaggcccaaccattttgtcattagaaggyggaacctgtgccgtgttctcggagacacacttgtaaggtgggaagcacatcgcgaagtgg

SEQ ID NO: 7123 - DNA, 121 bp, Artificial Sequence
  Description of Artificial Sequence: Synthetic probe
aatgttggacattctcaagtttctgcagaagaaccaggtggcgttcttcctttctgcgtaygacggtgatgcraaaggtgctgaygtggtraaaggcaaatagaagcrgatgatggccatc

SEQ ID NO: 7124 - DNA, 121 bp, Artificial Sequence
  Description of Artificial Sequence: Synthetic probe
actgcaggcgattgtaactcctggttggttacaagaaagcttttgtattcctaaattgtgrttagcagtaaacgtttgttgtagtattgcttatctgaatctaaaactgacgattatactg

SEQ ID NO: 7125 - DNA, 121 bp, Artificial Sequence
  Description of Artificial Sequence: Synthetic probe
gctgcctcactgctgctgctggtctagagatgatcctccttgggactacatgttgaggaayctcagggtctttaccattttcagatgtattacttgcagtgtctgctgtagctataacagc

SEQ ID NO: 7126 - DNA, 121 bp, Artificial Sequence
  Description of Artificial Sequence: Synthetic probe
gtccatcactgtttgtaatcgtagagcctagggttgtccatccgttaaaatctttgttgtygaatgatgggggacttgacacatccttccacatctccaggtgaacttcaattccagatgc

SEQ ID NO: 7127 - DNA, 121 bp, Artificial Sequence
  Description of Artificial Sequence: Synthetic probe
gcgaggatcatgaaaaaatgtccctggatggaaagttggtgagagcgtgtataactctggraaatggatgcctcctgcaaccggtgagctgcgtcctgaggtctggtaaggcctgcggttg

SEQ ID NO: 7128 - DNA, 121 bp, Artificial Sequence
  Description of Artificial Sequence: Synthetic probe
tcaaagtgaagcttaacctgatacaacagtgcaaacaggtttctaggtaatcaattcccakcacaacccccgaaggccacaacaactcctaacaccagaagaaaaaacactatatcacaag

SEQ ID NO: 7129 - DNA, 121 bp, Artificial Sequence
  Description of Artificial Sequence: Synthetic probe
catctggacctcttcgccccattgtgcagtgccagactctcaagtacaacatgaagtccarggcaggcaggggatttacccttgaggagctcaaggctgccggtatcccaaagaagctggc

SEQ ID NO: 7130 - DNA, 121 bp, Artificial Sequence
  Description of Artificial Sequence: Synthetic probe
tggttgccagaacttttccataggaaagtgccatgcttcgagtactcttgacttggtgtcrgaggcatgtgtgggcaacaacaaatgtgcaatcagtgtttcgaatgatgtatttggtgat

SEQ ID NO: 7131 - DNA, 121 bp, Artificial Sequence
  Description of Artificial Sequence: Synthetic probe
cacgagcgcgtcgtagctcgagaagtccacgccgtcaaacgacgcgttcaaagggaagtcrtggccaggcttctcgctgtaagtctggtcgccttcgaagtcgtgratggckgtcgcrcac

SEQ ID NO: 7132 - DNA, 121 bp, Artificial Sequence
  Description of Artificial Sequence: Synthetic probe
cgtgggcgcccaagaggagcagcagcaccgcccgaggttgaacctcctccatggtgtccgygtcgagctcacccaccatcataacctccgaccaaggcaagctttcggagctgcaagccat

SEQ ID NO: 7133 - DNA, 121 bp, Artificial Sequence
  Description of Artificial Sequence: Synthetic probe
cgtgggcaagtgggcgcgcgtggagaacatgaccatcctcggcgaggacgtgcacgtctgygacgaggtgtacagcaacggaggcgtcgtgctccccccacaaggagatcaagtccagcat

SEQ ID NO: 7134 - DNA, 121 bp, Artificial Sequence
  Description of Artificial Sequence: Synthetic probe
gccgcatgctcaataccacctgttttattgacatctaggttgcggagtgattcaatgctgyagaacctcaccacctgatccacaaccccaccctggacttcatcttcagtgaatggtacac

SEQ ID NO: 7135 - DNA, 121 bp, Artificial Sequence
  Description of Artificial Sequence: Synthetic probe
gcttatttaactttctgtatgacttaaatctgtatgctctgcaaacacacagtagagctgyatttctctgtagccagactattggtgtatcgggaaacattgtactggtagcttctagttt

SEQ ID NO: 7136 - DNA, 121 bp, Artificial Sequence
  Description of Artificial Sequence: Synthetic probe
tatacaaggttttgctcaagtgtgacatatctgtgattacaaacccttaatatagatcagwcttatcagtaggcaatttgatttgttaccagcaataattagatccatttgccgctagttt

SEQ ID NO: 7137 - DNA, 121 bp, Artificial Sequence
  Description of Artificial Sequence: Synthetic probe
gatgtacactctctcttgactcgtgcgcagccgcaccacaaaatgtatattgtttgattcyacacatctgtatactctggctgtagctcgtatcgtgcggcggaggggctttgttattctg

SEQ ID NO: 7138 - DNA, 121 bp, Artificial Sequence
  Description of Artificial Sequence: Synthetic probe
tcccccaccgtggccggcatggagacggtggtctacgtacgatgatgacgtgtaatgtgtrtgggtaattatacggtcgacgccatcgagctagtatcgagctagctagtacggctgaccg

SEQ ID NO: 7139 - DNA, 121 bp, Artificial Sequence
  Description of Artificial Sequence: Synthetic probe
tcaagatactatggcagatacagtattgaggattaaatacgatgttccagtcctacaatgmgacacgacaatctaatggatacttgaatataaagattattgcatcgtccttttcacgctt

SEQ ID NO: 7140 - DNA, 121 bp, Artificial Sequence
  Description of Artificial Sequence: Synthetic probe
tccagatgagcgtgtcttgggactgtatcttatccgttttgcagaggttgttgaagacgcrtgcactaatctccttcccaatgttctgtgtgaatacctatacaacttatctgaaatgttc

SEQ ID NO: 7141 - DNA, 121 bp, Artificial Sequence
  Description of Artificial Sequence: Synthetic probe
tttagcacgcggggcaagggcagcgagaaccatgtgaagctactactactatgcagtgtgkctgtagttccgtatcagcaggctagccagggtcagcagctcctcttgtgtttcctggaaa

SEQ ID NO: 7142 - DNA, 121 bp, Artificial Sequence
  Description of Artificial Sequence: Synthetic probe
ccattgttcattatctccatgcagtctgctaagttaattaccaatgtgtgaggcttcactrgaacattgtaccattttccatctctctgaacttgcaagccaccaacttcttcatccacaa

SEQ ID NO: 7143 - DNA, 121 bp, Artificial Sequence
  Description of Artificial Sequence: Synthetic probe
aaaggagtatgatgcaattgcaatgaagtaccttacatatgtccttctcttccttatggcyggctttgctgtctattcactcaagtatgacaaacacaagagctggtactcatgggtactc

SEQ ID NO: 7144 - DNA, 121 bp, Artificial Sequence
  Description of Artificial Sequence: Synthetic probe
gaagaagatatatttgcagacaccacagaggatgacccaagtacctcgtccttactggagrtggaccgtggtctgtcagctgccaatacttccacgacaaatgctacgcaaaatgacgatg

SEQ ID NO: 7145 - DNA, 121 bp, Artificial Sequence
  Description of Artificial Sequence: Synthetic probe
ggtgggaagacatttaaaatgaaatttggtcatcatggaggaaaccaccctgttcgtgatracaggactggacgtgtggacatcagtgcacagaatcataactatgctgtggaccctgaat

SEQ ID NO: 7146 - DNA, 95 bp, Artificial Sequence
  Description of Artificial Sequence: Synthetic probe
aatcttatacctatagagagcagcttaaaggagaragtagcatcacctccaaggatgcagcaacctcctgttaaagctcttctccaagcatggca

SEQ ID NO: 7147 - DNA, 121 bp, Artificial Sequence
  Description of Artificial Sequence: Synthetic probe
tcgacactactgccagtaactactagtaagtaaatggacaacattaacggtgactgacgakaaataactgaagggtgaaaacgacgacgatccacaaatgatgcacctgctggcgtcctgg

SEQ ID NO: 7148 - DNA, 121 bp, Artificial Sequence
  Description of Artificial Sequence: Synthetic probe
cggaaaatttacatctaaataggtgggaccatatatcccctttaaaaaggggccatgtagycagctaaaaggttccatcccgtgctgcgggatgaacatctgacttgttgctgctatcacc

SEQ ID NO: 7149 - DNA, 121 bp, Artificial Sequence
  Description of Artificial Sequence: Synthetic probe
atgcccggtcaccggcaagaagatccaggggattcctcacctgaggcctactgagtacaaragatccagattgtccaggaataggagaaccgtgaaccgcccttacggtggtgttctatct

SEQ ID NO: 7150 - DNA, 121 bp, Artificial Sequence
  Description of Artificial Sequence: Synthetic probe
cccctgcagggtaaatctttctaaaagccgtgtccgcggttatggacgacttggagcacartttctcgatcatagacaagtataactaaagtgccgcttttaatttgactaaatacgtgac

SEQ ID NO: 7151 - DNA, 121 bp, Artificial Sequence
  Description of Artificial Sequence: Synthetic probe
gctggtgggcgtcccgcacaaggaggctgtgttcaagacccacccgatgaacttcctcaaygagaagaccctgaaaggcaccttcttcggcaactacaagccgcggacygacctccccgaa

SEQ ID NO: 7152 - DNA, 121 bp, Artificial Sequence
  Description of Artificial Sequence: Synthetic probe
ggcccgctcatcatgccccatgatccagaacctcgaggccacgctccggaacaacaccgcrccgcagaccacgcagttcgtgcccacccctgcgtccgtctctgtcacgccacctgccgca

SEQ ID NO: 7153 - DNA, 121 bp, Artificial Sequence
  Description of Artificial Sequence: Synthetic probe
ccatgccacagcacgctaacgtaagagcttgttgatgggttgtttacttccctttggtggkcttgccgttggcctcggcgccctccttggggttgagcgtgtcccatgcctcgatccaggt

SEQ ID NO: 7154 - DNA, 121 bp, Artificial Sequence
  Description of Artificial Sequence: Synthetic probe
caacttcactaacagtacactcactaagtacaaacaaccatgcagggatttacagaccccrttatctttgcaccggaccgtcaaacctttctcccgataaaaagagggagcaggtgcaaca

SEQ ID NO: 7155 - DNA, 121 bp, Artificial Sequence
  Description of Artificial Sequence: Synthetic probe
aatccggtgttgattccaagtacctccgtggttgctcacttccactgtaatatgaaggcaygatgtggtttgtagagctaagcggaatgtgtagacagcttttcggaccgttgtgttcttg

SEQ ID NO: 7156 - DNA, 121 bp, Artificial Sequence
  Description of Artificial Sequence: Synthetic probe
caaggaggtggtggaggcccgggaggtggcagcgaaggtgaagtggatgatggactctgayggaggtagggtgatccgggagcgcacgcaggcggcgatgcggcaggcgaagaaggccatg

SEQ ID NO: 7157 - DNA, 121 bp, Artificial Sequence
  Description of Artificial Sequence: Synthetic probe
gtggttgattaatgtcaaaccgaagtgccaagcaatgtgtttcttcaagaaatgttcaggygtcgctcactaaataccagtttgcactagagttgtaataatggtaaatgttaacctttgg

SEQ ID NO: 7158 - DNA, 121 bp, Artificial Sequence
  Description of Artificial Sequence: Synthetic probe
aagttgcccaggagcatcatcagcaggtccaaacgagatatctaaaaagataaacaagctygagttcataaccaagggcgcttccacaagtgcatgggtccaggatacacgagcctggctc

SEQ ID NO: 7159 - DNA, 121 bp, Artificial Sequence
  Description of Artificial Sequence: Synthetic probe
accgttgatctctttaccctgaacataaagtcttctaactgatgggcccattcccttgggmcatacagcgatcacactgatgttttttgggaaatcaaggccaactgattgcagatgtcca

SEQ ID NO: 7160 - DNA, 121 bp, Artificial Sequence
  Description of Artificial Sequence: Synthetic probe
catgccctggtttgggtaactttatacatcatcgtaccgagcccgagccacactttatttmtgctactgccgcgaacgtactacacacaagtccaactcttaaaccgctcgggctcccgct

SEQ ID NO: 7161 - DNA, 121 bp, Artificial Sequence
  Description of Artificial Sequence: Synthetic probe
aatccttcatgccgaagagaaggattacaagactgcctacagttacttctttgaagcattygaaggattcaatgcactggaggatgctaaggccaycttctgcttgaartacatgcttctg

SEQ ID NO: 7162 - DNA, 121 bp, Artificial Sequence
  Description of Artificial Sequence: Synthetic probe
ctaggaggaggagaaggaggaatcgctgcggctgtttctcttctgagttctgacggatggygccttcgttcagaagggtttctggaggaaggcgagcatgtccccgaacgcggcggcgtcg

SEQ ID NO: 7163 - DNA, 121 bp, Artificial Sequence
  Description of Artificial Sequence: Synthetic probe
ccttctgcatctgttggggatttcttatctcagatggcacattggcatttggtatagaccracacccgcggccagctgcagcatgtcttctgtctcctctttgatagccacctggcatata

SEQ ID NO: 7164 - DNA, 121 bp, Artificial Sequence
  Description of Artificial Sequence: Synthetic probe
gctgctgggatgccatggtcgcctctccaaccgtcagcctggacaagctttcctgtcggaygacatcgtcgcataatccagcagcagatttctatctgtcttaccaaaccatattttagtt

SEQ ID NO: 7165 - DNA, 121 bp, Artificial Sequence
  Description of Artificial Sequence: Synthetic probe
tgttaaccctgactcgtcttgtgaaactgagttagaggaccagttcttttgtcggcttctycaagaagctgccctaccctagcttcctgggaaagcctgttccgaaattttgtgtggcttc

SEQ ID NO: 7166 - DNA, 121 bp, Artificial Sequence
  Description of Artificial Sequence: Synthetic probe
acataatccttaaggattcgacagggcttctccgatacaacattcgtcaactaactgaccmaaggcacgatactttgtgccaacctctagccatcggtagtacatatatggccatcatggt

SEQ ID NO: 7167 - DNA, 121 bp, Artificial Sequence
  Description of Artificial Sequence: Synthetic probe
accgtcgaaccttaggcctgggcggcgccacctcggaaccaaagggtaaatgcaggtggcrcgagtgcgtgcaagttaagtgtgggccaggatggtcaggtaaacgtgagggtgtgcgtgt

SEQ ID NO: 7168 - DNA, 121 bp, Artificial Sequence
  Description of Artificial Sequence: Synthetic probe
ttgcttgtagtatttgacaggtgatttcccgtttcatgcatgcctcctgcacaattttctmttggtagaagcttattcctgttgtatttctgaaagtactcgtcagtgatgtcagtacgta

SEQ ID NO: 7169 - DNA, 121 bp, Artificial Sequence
  Description of Artificial Sequence: Synthetic probe
catcggattcagttagctaggggctgtgaatgatttggatattggtttgttggcttgttcrttggtattcgcgagagcagtactgttttcatgttatgttgatcattactaatctgtagag

SEQ ID NO: 7170 - DNA, 121 bp, Artificial Sequence
  Description of Artificial Sequence: Synthetic probe
acggccgcatatcatgccatcattcgcacaaccggctcgtgcgtgcaccacatacatgcakcttatttcaatcacacgttacgccatgtacatatatatagcacacatatattagattata

SEQ ID NO: 7171 - DNA, 121 bp, Artificial Sequence
  Description of Artificial Sequence: Synthetic probe
aacactggacctgcatgcattgaacgtccagatcttccttaagatgcaccgctcagactaygctgacaagcaactgaaggtcatgcaacaaactgatgaggaccatacactgacacaacta

SEQ ID NO: 7172 - DNA, 121 bp, Artificial Sequence
  Description of Artificial Sequence: Synthetic probe
caccttctgcgattatttgtacggcacggataaaggttacaaacttcacaaggcaagcctracaaagctcaaggagatggcggcggaaaacaatctcgagcaagccagtctggagcaagca

SEQ ID NO: 7173 - DNA, 121 bp, Artificial Sequence
  Description of Artificial Sequence: Synthetic probe
accctcctccacgtggaaacccaccttcagaccagggaactcgcacggcaccctggtgaawgagatgtcgatgatcccggcgtgtcggagctcgtcgttgcggccgggcttggcgagcttg

SEQ ID NO: 7174 - DNA, 121 bp, Artificial Sequence
  Description of Artificial Sequence: Synthetic probe
tttttcttaaggcaaaacaatgggtttcatgaattaaagcaaacaatgattcaacacaccrttcttagtaccaacacaaaatagataatctcattgaagacgaggttcaacacgacrttca

SEQ ID NO: 7175 - DNA, 121 bp, Artificial Sequence
  Description of Artificial Sequence: Synthetic probe
acaaaccggtagctctggcactaatggttcaggttatgccaccggactcggtggtggcgcyggtggcggaggaggtactagcgacaatggcgggacaggcggtggttctggcaacggatct

SEQ ID NO: 7176 - DNA, 121 bp, Artificial Sequence
  Description of Artificial Sequence: Synthetic probe
atgtcatggctgcaccgtacaatcatttcacgccacctcaaaacagctttgatgttcactygacatgcaatcccatctttatcatggtgatggatctatgaaatggaggacttagggcggg

SEQ ID NO: 7177 - DNA, 121 bp, Artificial Sequence
  Description of Artificial Sequence: Synthetic probe
gttcgatttgccaggaggaataccggaatcctggccaaagcttctccgggttctgaatctrgaggaccaacaagagttgaatcgggccgccacggcgtaagtcttgtgggcagaagacctt

SEQ ID NO: 7178 - DNA, 121 bp, Artificial Sequence
  Description of Artificial Sequence: Synthetic probe
gttcggcgaaatcatcgcgattctgaacaagcagttcattgaggaggctgagaaggtgaargtacttccagatctgaggcccggtgacatcatcgagcttagaatgcaacgacccaacaag

SEQ ID NO: 7179 - DNA, 121 bp, Artificial Sequence
  Description of Artificial Sequence: Synthetic probe
cttgagatgctcgactgaaaatgatttccatcaggcaaaggatattgatcttttcaagtarccccctctcattctgtaccaaagcaggctgtgcgctcaaagcggtagcatgaatttttgc

SEQ ID NO: 7180 - DNA, 121 bp, Artificial Sequence
  Description of Artificial Sequence: Synthetic probe
atagctcgtagcatgatgccaaggtgattactttcctgaaatctgtttcggggtcaccacrgcttgagagttggacaccgtgtgtaatgagcttggcaagacttggagacgatgacagaag

SEQ ID NO: 7181 - DNA, 121 bp, Artificial Sequence
  Description of Artificial Sequence: Synthetic probe
aatcttcatcctccaatctgtgctatatttctcattccacttgtcatgaactacccgatcrcggtagtttagcattgtcccaagcccagtgtttggtatccaaccatattcttccaaaacc

SEQ ID NO: 7182 - DNA, 121 bp, Artificial Sequence
  Description of Artificial Sequence: Synthetic probe
tcagaatgtgtgtagcagaagatgcaggtggccaatccccgacacagaaaaattccttcakcaaagcatttgtactgcgttaataggcaagatcagaatttgcattccataaccacccatg

SEQ ID NO: 7183 - DNA, 121 bp, Artificial Sequence
  Description of Artificial Sequence: Synthetic probe
cagggtgacctcaagaagaccattgaatttccttacctttattctccaggattccaggtgktgttgctattttcgtgtatgctagcatttctgctaaactacaccatcttctggaacacaa

SEQ ID NO: 7184 - DNA, 121 bp, Artificial Sequence
  Description of Artificial Sequence: Synthetic probe
tgagatacttttatcccaagactccaggtctatggaaggatagttctctgacacagaggarcagacacttgtcacaactcttctcgagaatgtaatcttcgtgggatcmcaccatgctcct

SEQ ID NO: 7185 - DNA, 121 bp, Artificial Sequence
  Description of Artificial Sequence: Synthetic probe
gagggctcgcttatgtatatgttagcaatcgacaccagatgtttgttcgttctgcgtagcytaaatctcgttgtcaaacctgggttataccttagatagaaaggcagtcatattgtaacgc

SEQ ID NO: 7186 - DNA, 121 bp, Artificial Sequence
  Description of Artificial Sequence: Synthetic probe
tggaagtgcatattatgttgccccagaggttctacacagatcatacagtatggaagctgayatttggagtataggtgtcataacgtatattttgctctgtggtagtcgtccattttgggca

SEQ ID NO: 7187 - DNA, 121 bp, Artificial Sequence
  Description of Artificial Sequence: Synthetic probe
catggagctaagggacaaggtgactgagtatgtcaaagagagggttgtggcttttaagagyatcaaatccaggacagtacgacaacgtatctgttgtgcgcaccaattcgatgaaatatat

SEQ ID NO: 7188 - DNA, 121 bp, Artificial Sequence
  Description of Artificial Sequence: Synthetic probe
gtttctggttcttcttggagaggacgatcacctcttcctgcttctgaacaagaacatgacrccctttgggcatgcgtttaccgtggtttgcctgaggaacggcgacctgaactggaagttc

SEQ ID NO: 7189 - DNA, 121 bp, Artificial Sequence
  Description of Artificial Sequence: Synthetic probe
tctatgtaccttttttttcttctcataacatcctatgcgtcatctgtagctgcagacgctrcaccctttttattcctggtaactttgcttgctggaaagtgaagcctcgcatacagcggtc

SEQ ID NO: 7190 - DNA, 121 bp, Artificial Sequence
  Description of Artificial Sequence: Synthetic probe
ggactttggagatggtgatgactcgagttcagaagatgtcgaggtgacaacgaaagatccrgctaattctaccaaggatgactcctctgttcctgtattccctgatggcagacaaagggaa

SEQ ID NO: 7191 - DNA, 121 bp, Artificial Sequence
  Description of Artificial Sequence: Synthetic probe
gatagtggtccctggtggaccatcagggagctatagttctggtgctgttaattttcagccrccagagaatgaagtagctcagctcacgcccgacgatgagtcagctcttctgcagcaggtc

SEQ ID NO: 7192 - DNA, 121 bp, Artificial Sequence
  Description of Artificial Sequence: Synthetic probe
aaaaaaccttgagctgcttctcactgctggaattggctcagatcatattgatttgccagcygctgctgctgcgggcttgactgttgcagaagttactggaagtaacaccgtctctgtggca

SEQ ID NO: 7193 - DNA, 121 bp, Artificial Sequence
  Description of Artificial Sequence: Synthetic probe
taccaactggatcttaactaaacatgctgaaacgtgctgtacgctatgatctcaatgtgcstcgtgcgtatctccataaactggctgctaagaccagtgtggcggccatgccggccaaaat

SEQ ID NO: 7194 - DNA, 121 bp, Artificial Sequence
  Description of Artificial Sequence: Synthetic probe
ggtctatttggaatattactgtwgcctctggtggcaggtcatttgctatttgctgtggatyttctagtcagcacagatcttgtatttgcactggatgtgcgctcatctcggtggaaggccc

SEQ ID NO: 7195 - DNA, 121 bp, Artificial Sequence
  Description of Artificial Sequence: Synthetic probe
gaactcccctgcgaagctgccccatgacaacaatgttggcaagagatccagagtgcggaarcagccatggatgccgttcatctgctgccactccgtgcactgatgcgctgctgctgccctt

SEQ ID NO: 7196 - DNA, 121 bp, Artificial Sequence
  Description of Artificial Sequence: Synthetic probe
ccaccatcacacgagtcactgagcgatgaatggctagaaaacgggcagtgcccacttgctyggtcttaccgggcaatgagtggtgttctgcccctggtcgccaaggctttacagccaccgg

SEQ ID NO: 7197 - DNA, 121 bp, Artificial Sequence
  Description of Artificial Sequence: Synthetic probe
tgacaaccttcttcttgggacggtcacctctgtcagtctccgacgactcgaccaaactcaygatgtccatgccttcgaggacctggccaaagacaacgtgcctcccgtccagccacggtgt

SEQ ID NO: 7198 - DNA, 121 bp, Artificial Sequence
  Description of Artificial Sequence: Synthetic probe
atgaatcaaatccaagccgagtagccccagttaaagccatttgtcttctctcagtggactrgcatgctggatttgctggagctttcactgaatagcaatcttatacagtacaggagactag

SEQ ID NO: 7199 - DNA, 121 bp, Artificial Sequence
  Description of Artificial Sequence: Synthetic probe
gtaaatctacaaaagaatgaataagaccagcttgctacatactactcttttagtactacarcgaaaactgcgtattcacgagccattgtgtaaaatctcccccaccttctgttgctatcta

SEQ ID NO: 7200 - DNA, 121 bp, Artificial Sequence
  Description of Artificial Sequence: Synthetic probe
ggaatgcctccgtggtaggctttagctttcccgaagaaaccagtccccttcagcgatgcaracaactttgagacggaagggaccagcttaggcaacataccgttagagggatcagcgtcat

SEQ ID NO: 7201 - DNA, 121 bp, Artificial Sequence
  Description of Artificial Sequence: Synthetic probe
cagcgcgcagctcgccgggctcttcgagcaggccggctccgtcgagatggtcgaggttgtrtacgacagaatgactggacgtagccgtggattcggattcgtcacaatgtctacagctgcg

SEQ ID NO: 7202 - DNA, 121 bp, Artificial Sequence
  Description of Artificial Sequence: Synthetic probe
ttttgtcgttcgcaatgacatggcttgcggttcgacaattggcccaatactcgccagcggygttggtatccgaactgtggatattggagcaccacaactgtcgatgcacagcatcagggag

SEQ ID NO: 7203 - DNA, 121 bp, Artificial Sequence
  Description of Artificial Sequence: Synthetic probe
ggcgcttttgctgtttgttatcatgtctttggttttgataagatagaaggatcctaccacmtcatatcttcgtattgacataagatcagttcacaatcttatatgtactagcagtacaaca

SEQ ID NO: 7204 - DNA, 121 bp, Artificial Sequence
  Description of Artificial Sequence: Synthetic probe
gttggagaagggagagggcgctggaaccttgggtcagcccatagcagatctcgtgatctcrtaggccacgaaggtggcrgcgttggccgggacgctgcgggccatggcggggccgaaaccc

SEQ ID NO: 7205 - DNA, 121 bp, Artificial Sequence
  Description of Artificial Sequence: Synthetic probe
acctggactgcttacggttttcagctgctttggccagtacttctgcctacattttgaagcrtttcagctgggcatggcacctgtctacattgctttcctgaggttcatgggagatgacacg

SEQ ID NO: 7206 - DNA, 121 bp, Artificial Sequence
  Description of Artificial Sequence: Synthetic probe
ctgctgctagaagaggatcttcatcacgcaaaggccattgcttgccgatgcgatttctggytgagaaggcagccaattctgatgccggtgagggcatcctttcaacctcccaggcggaggc

SEQ ID NO: 7207 - DNA, 121 bp, Artificial Sequence
  Description of Artificial Sequence: Synthetic probe
ggaactttgatgaccaagatactgaatctgtttggggatctaatgcaaatgagactggccrtcatggaagcaactctttctttgggtcagatgactttgacggaaactctgttagagtggg

SEQ ID NO: 7208 - DNA, 121 bp, Artificial Sequence
  Description of Artificial Sequence: Synthetic probe
ggaaagtcgcttttccaggtttgactctatgagcagcgttgcaggcgagaatgcagcaggrttcgattcatcaaacagctcaagaaattttggccggttcgattcttttgatgatgccgat

SEQ ID NO: 7209 - DNA, 121 bp, Artificial Sequence
  Description of Artificial Sequence: Synthetic probe
ttgtgttcagcttaaaaagtgaaccattggagtctgcattctcatttcctttgatatcatrattgggatgtacaaacgctaatcatctggggtctagtgtttaggtttcgatgttggcatt

SEQ ID NO: 7210 - DNA, 121 bp, Artificial Sequence
  Description of Artificial Sequence: Synthetic probe
tttctacaacagattacccccgacacacacaaacacaagcatataaagtggaacggatacyacgtaggtacttaccaagtgataaattaaccgagtagctagcaggactagctagtcacca

SEQ ID NO: 7211 - DNA, 121 bp, Artificial Sequence
  Description of Artificial Sequence: Synthetic probe
aagagctaaatctggaggcattatttcacaagtatgagaaggagagctacaataagctgakcgctgacatcgaggcccagccgagcaaagcggttcagaaagttctgaggtccttcctaga

SEQ ID NO: 7212 - DNA, 121 bp, Artificial Sequence
  Description of Artificial Sequence: Synthetic probe
cttgactacctatctatcaagcagtttatgccaagtagtttcgcatctttttggacaatgwattcgatatgatgttctctaagactttaagttatctatgcaatatccttttgcttcgtgc

SEQ ID NO: 7213 - DNA, 121 bp, Artificial Sequence
  Description of Artificial Sequence: Synthetic probe
ctcgaaaagtctcttcagcgacgtcttgaacttgacagagcagctcgtgtcgccctcgtcracgtcctgcaccccgttcccggcaaggcatccgacctgggcgccgtccaggtaggccttg

SEQ ID NO: 7214 - DNA, 121 bp, Artificial Sequence
  Description of Artificial Sequence: Synthetic probe
acacgagcaaatattaagctcctgccaattaagttacaaactcataaacacactacaggcrtccgcgaagaaataacacatcttcctcctatgtctctttgtaaaaagatacatcctcaat

SEQ ID NO: 7215 - DNA, 121 bp, Artificial Sequence
  Description of Artificial Sequence: Synthetic probe
ttgaaccactgtatcttctattttgcatcatcttgcatgaatgctgtgtctcttagggtgraggatgatttgttatgttttgagtctgagtctggggtggtggaggaagcgtttatttttg

SEQ ID NO: 7216 - DNA, 121 bp, Artificial Sequence
  Description of Artificial Sequence: Synthetic probe
gggccacccgccatgaaacacaacagttcaggatatcgaggaagaggctcggacagaggtrgaagagtacataggaattggccgaacgggccaagaactagacttccgtatgatcaccagg

SEQ ID NO: 7217 - DNA, 121 bp, Artificial Sequence
  Description of Artificial Sequence: Synthetic probe
agagtgtctatacacctgaaggatggctcacagtgtccagtccaccattgttatctgcccygctctcctaagaaactgcactgcacaactcttaattacttctgttcctttctagtagggc

SEQ ID NO: 7218 - DNA, 121 bp, Artificial Sequence
  Description of Artificial Sequence: Synthetic probe
gaggaggtggtggacctgacggtgatggtgatggtggagtgtgacgtggtggagttggtgytgcgcatcctagagtgcctccggtggatggagcagatcaacgtgctatccgtagaggccg

SEQ ID NO: 7219 - DNA, 121 bp, Artificial Sequence
  Description of Artificial Sequence: Synthetic probe
gacatcttctaatgatgttccaagaggtcatgggattaaggatgtcatcaagttggctgtrcaatctggggcaaaggaatgcagcgatctgttcttcacggccaccaagttgttcatggat

SEQ ID NO: 7220 - DNA, 121 bp, Artificial Sequence
  Description of Artificial Sequence: Synthetic probe
aaacacagaaccttgcaagcccagctaatgttcactctttgcccttggtgaagaaccggcygaagccccggttctgcttgtcaggcatctggttagcaatcgacgaagatgacgaggacct

SEQ ID NO: 7221 - DNA, 121 bp, Artificial Sequence
  Description of Artificial Sequence: Synthetic probe
ttggggttggacccctttttcactcacaatgttggtgctgttgtccagcagcacagacgcrtcacaccccttgacgaagcagtcatggaaatgcagcctgaccagggacgccgccatcctg

SEQ ID NO: 7222 - DNA, 121 bp, Artificial Sequence
  Description of Artificial Sequence: Synthetic probe
gcgggagatctgctgctgctgctgcatgtacttctccgtgcttctccctgtgcagctcggyacccaaccggcgaggatccagccgccggtgaggtagttgggggcgacgccaaggggccga

SEQ ID NO: 7223 - DNA, 121 bp, Artificial Sequence
  Description of Artificial Sequence: Synthetic probe
tgctgaagaaccaaaatctgaagatcccagtttcgccaattacaacccctagtctgatacmaatatggttgcaagattaattaatgtccaagaaagtaaagtctaggctccagaaacaaga

SEQ ID NO: 7224 - DNA, 121 bp, Artificial Sequence
  Description of Artificial Sequence: Synthetic probe
aattactatcgcgacactgtcatcagtagggtaaaactaacctgtctcacgacggtctaamcccagctcacgttccctattggtgggtgaacaatccaacacttggtgaattctgcttcac

SEQ ID NO: 7225 - DNA, 121 bp, Artificial Sequence
  Description of Artificial Sequence: Synthetic probe
gctggaacggtccagaaaatgctgatagtatctctgggacatagtgaaagtgacgagccamggcccaccatccagaagtcaagagaaggctggtttttgtttctccctttgtggtctggta

SEQ ID NO: 7226 - DNA, 121 bp, Artificial Sequence
  Description of Artificial Sequence: Synthetic probe
gctgcagggcaagcactgatggagtgcctggcagttcacgtaacatcgtgttgagtttgtycctaccattgttcggcaccgcgattcagaaccagctctgttatctggagctaccaaaagg

SEQ ID NO: 7227 - DNA, 121 bp, Artificial Sequence
  Description of Artificial Sequence: Synthetic probe
cgaaggcccagccggccgccgggagccttgaggagctcaagaaggagggcctccagttcgycagcaggatctgatgagtcctgccattttttggagactcggcgggcgcgtggttgaagtg

SEQ ID NO: 7228 - DNA, 121 bp, Artificial Sequence
  Description of Artificial Sequence: Synthetic probe
ctccgaaccgcatgcgcttggcgcgtacatggtgcagcagcttaacaagcaccaggggttyctctactgacacatggtagaaccgcggatggccattgtggatggccgcaggcagataccg

SEQ ID NO: 7229 - DNA, 121 bp, Artificial Sequence
  Description of Artificial Sequence: Synthetic probe
tttgatgttgagaaggaaaagcagatggctgaacaggctgcaaaagattcgtcagaagacmtttctgaaatccagaagaagatcttcgacattttgtacaaaatcgcattcattccattct

SEQ ID NO: 7230 - DNA, 121 bp, Artificial Sequence
  Description of Artificial Sequence: Synthetic probe
accccattatcaagaagagcaacaatcttcacgctttagagatgaggaggactagccagtyccgattagagcagtctacagtaattagaggagtgcaatgctgctctcgccaccaggtggc

SEQ ID NO: 7231 - DNA, 121 bp, Artificial Sequence
  Description of Artificial Sequence: Synthetic probe
atcagcaagaagaagaagtttgtgagcgatggcgtgttctacgccgagctgaacgagatgytgacccgggagctggctgaggacggttactccggcgtggaggtgcgcgtgacgccgatgc

SEQ ID NO: 7232 - DNA, 121 bp, Artificial Sequence
  Description of Artificial Sequence: Synthetic probe
cattaatgggtatggcgcgaagcgatcgcgctcccaggcatagaatcggtttcctccggcrtcatcagtctccattgaactatggccggatgaacctggtgggaacargcaaaatgttggg

SEQ ID NO: 7233 - DNA, 121 bp, Artificial Sequence
  Description of Artificial Sequence: Synthetic probe
catgcttgcgacaggtaccggcatcgcgccgttccggtcattcttgtggaagatgttcttygagaagtacgaggactacgagttcaagggccttgcatggctcttcctgggagtccccacc

SEQ ID NO: 7234 - DNA, 121 bp, Artificial Sequence
  Description of Artificial Sequence: Synthetic probe
tccgctcggtctctctccgaagaagatcggagaagacatcgccaaggagaccgccaaggaytggaagggcctccgcgtcaccgtcaagctcaccgtccagaatcgtcaggctaaggtgtcc

SEQ ID NO: 7235 - DNA, 121 bp, Artificial Sequence
  Description of Artificial Sequence: Synthetic probe
taagacataagctcctgtttaaccaattgggttgatacataaccgggtaaacggcgatttrctggcctgtccaagataaatgtgcttccgtcaattctcttgatctctgctgtggtgcttc

SEQ ID NO: 7236 - DNA, 121 bp, Artificial Sequence
  Description of Artificial Sequence: Synthetic probe
taacatggaagctacatacagtccattacatgatggtgcatgcatctgggttctcatcgcygagagtctgcggtggatagtgcggataaggccgatacattgctgcagtatatgggtactg

SEQ ID NO: 7237 - DNA, 121 bp, Artificial Sequence
  Description of Artificial Sequence: Synthetic probe
tgaaactggccgggcgacaattcagaaggtttcgaatattaccgaaaagcttggccatatrtctgtggcctctcgaacacgcactactgtgaagcccccctgtcccgatgttgaaagctgg

SEQ ID NO: 7238 - DNA, 121 bp, Artificial Sequence
  Description of Artificial Sequence: Synthetic probe
attacttcctttacctataactaatgtgtttcctgtaatacagaaataatctcatgacaayaggtcaactaataattcatttgacctgatgagtcccgccaggttaccatctaattggcat

SEQ ID NO: 7239 - DNA, 121 bp, Artificial Sequence
  Description of Artificial Sequence: Synthetic probe
agacctccccatcacacagattttttcagcagcttcctccctccctaaatctgacagctcmcgaaatgtctttccttctatgatgctttgctccgatacattgggatcagtaagtattcca

SEQ ID NO: 7240 - DNA, 121 bp, Artificial Sequence
  Description of Artificial Sequence: Synthetic probe
gcaattgcaccatctgctttcaagcaagatttactatcaagttcaggtggtggaacgcatmggtgctgtgtctatattgctagtaaaaacaagtactgtcaccgtttgaactccattcagg

SEQ ID NO: 7241 - DNA, 121 bp, Artificial Sequence
  Description of Artificial Sequence: Synthetic probe
attattttgtctcttgagtttcaaggtactcttgctctttgtcgtagaaacaggaacatgmaggaatttagggtactctatagaactcataatcaggctgcgagttttaacagactgcatt

SEQ ID NO: 7242 - DNA, 87 bp, Artificial Sequence
  Description of Artificial Sequence: Synthetic probe
acattacattagttgctcaagtgaackcaactgggcatagtccaatatttccagtgattacaactacagtatctcgaatcatatact

SEQ ID NO: 7243 - DNA, 121 bp, Artificial Sequence
  Description of Artificial Sequence: Synthetic probe
tactctgtaagcatcactctggtcaaataaccgttccttcaagaaaaatgcagcaccatgmgcaatcatgcaatccctctccatttctccaaaacggagaccaccatcacgggatcgcccc

SEQ ID NO: 7244 - DNA, 121 bp, Artificial Sequence
  Description of Artificial Sequence: Synthetic probe
cacacatccaaacacaggtcaaaaaagcaatccagcttctgcattcttcttcaccaattamatcagcatcacaacacataaacatcccgcagtgacccttgtcccatataatcgcaagtcc

SEQ ID NO: 7245 - DNA, 121 bp, Artificial Sequence
  Description of Artificial Sequence: Synthetic probe
atctgctagatttacatgtttatttattttgaatagtagtgaactccatgtccgttgctakatatttcttgcctcttgtactgcaccggtgagttattgctatctatgcacatcaatatga

SEQ ID NO: 7246 - DNA, 121 bp, Artificial Sequence
  Description of Artificial Sequence: Synthetic probe
ttccgccttgggtaggggctgccgccgcctgtgctcctctatgctcttgaggcagactccmgtcgaagtttgtttgtgtatctccgtcttgggttttgactgtttgattgaataacgatga

SEQ ID NO: 7247 - DNA, 121 bp, Artificial Sequence
  Description of Artificial Sequence: Synthetic probe
gacctgcacctgctgctcacttcatgggcatgcatcaaagcctcggtattcagctcgcgcrgcttgggaaggatgcttctgcagcaggggctgcacgcagaggtaatttgcggaagacggt

SEQ ID NO: 7248 - DNA, 121 bp, Artificial Sequence
  Description of Artificial Sequence: Synthetic probe
cagaccatgcgatgaagaggaactagtcctcactgacaccccttcgacagtggcggtgaaygccagtggcaccgctgcagctgctagcccggtggccgccgtcgaggaggagccccagcca

SEQ ID NO: 7249 - DNA, 121 bp, Artificial Sequence
  Description of Artificial Sequence: Synthetic probe
ccattataaataaactcatcgaagcaatccaaaacgttagacattcaacctcacagtaaarctgaaaatttcaagacaactgggtaacttgacaaaggtctatgataggataggaaacaac

SEQ ID NO: 7250 - DNA, 121 bp, Artificial Sequence
  Description of Artificial Sequence: Synthetic probe
aatggctagtgccttatgcccttccgtcaagttctttctcaagaatgtataaacatagttsaccactatcttcttcaataccgaggacttagctttagctgtaacattggcctcccccatc

SEQ ID NO: 7251 - DNA, 121 bp, Artificial Sequence
  Description of Artificial Sequence: Synthetic probe
gttcgagggcggcggggagctgaagctgccggcgaagaactacctgatcccggtggacggstccggcacctactgcctggccttcgcgggcaccagcggcgccgtgtccatcatcgggaac

SEQ ID NO: 7252 - DNA, 121 bp, Artificial Sequence
  Description of Artificial Sequence: Synthetic probe
gtgtagtttaagccttgtcattagaaacatctgtaggtagtgaattcaggttactgaaagygtacttagactccaaaatccagcgagtatgacttggttgcagcggaggtgtaaacgctta

SEQ ID NO: 7253 - DNA, 121 bp, Artificial Sequence
  Description of Artificial Sequence: Synthetic probe
catacccgacatgctcaagaacgcgcccatgttcaagcgactcgaggccaggataaggggmaagggttcagcgattggcgtcggccgcgggcgtgcggtcgcgatgcgtgctcgggccgct

SEQ ID NO: 7254 - DNA, 121 bp, Artificial Sequence
  Description of Artificial Sequence: Synthetic probe
aaatccagttttagtctctgccgcagaacaaatttttggtgctggtggaaagagattaagrccagcattggtttttctggtgtccagagcaactgcagagttagctggtttgtcggagcta

SEQ ID NO: 7255 - DNA, 121 bp, Artificial Sequence; identical to SEQ ID NO: 5718
  Description of Artificial Sequence: Synthetic probe

SEQ ID NO: 7256 - DNA, 121 bp, Artificial Sequence
  Description of Artificial Sequence: Synthetic probe
tcggtgcaggagtttgataacagggcaactgtagatgaaatgttttgagataccataggartgcctccagggctaggaatggcctgctggtggtcttgttctcaggttagactgctaggcg

SEQ ID NO: 7257 - DNA, 121 bp, Artificial Sequence
  Description of Artificial Sequence: Synthetic probe
tcccgaatacgttcaaggttacaagatcacatttacggattgcttcccgttcctgatagcytcccagggttcactggatgcactaaacgagcttctcaaagaacctgtaccaatcaatcgc

SEQ ID NO: 7258 - DNA, 121 bp, Artificial Sequence
  Description of Artificial Sequence: Synthetic probe
ttgctgctgagctgcagatgcggaagagccagcaacaacgaccttacatgtgaagcagtayggaggcacacgtaagatgcagaatatccctcacctgttcaaatcgaaagaggcattgcca

SEQ ID NO: 7259 - DNA, 121 bp, Artificial Sequence
  Description of Artificial Sequence: Synthetic probe
attgcaatacaacaggctaatcacctagagcagcagggagaatagtcacagaagccaacaragaatgagaaaccaattctcagacagcagcacccttgcgttgctcattctcgccgtgggc

SEQ ID NO: 7260 - DNA, 121 bp, Artificial Sequence
  Description of Artificial Sequence: Synthetic probe
ttgcccagcatcttcatctggatatgggataacagcagcatcagcaattccaggatgagaytgtagaatatgctccagttcagctggaggcacctggtatcccttgtactttatcaactcc

SEQ ID NO: 7261 - DNA, 121 bp, Artificial Sequence
  Description of Artificial Sequence: Synthetic probe
aaaaaatcccttgaagggaagtgcaagttgtatgctgatggatacagttccaaggtggtgrctgcatatctggaatctgcagactccacggtgaaggatcttgcaaaatcggagctgcagc

SEQ ID NO: 7262 - DNA, 121 bp, Artificial Sequence
  Description of Artificial Sequence: Synthetic probe
atttaacccgtaccatggctacccttatagatcgtacgggtcaccgtacttcccaccgtamtgttatgggagagtccccagattccgtcggccaacccgctacaggccttacttctgaagt

SEQ ID NO: 7263 - DNA, 121 bp, Artificial Sequence
  Description of Artificial Sequence: Synthetic probe
ggtgtgctgactctttcccctgcagttatatgtgctgctatcagaagaatctgatagagcyacttgtcttgttgtttgttttcgtcggtcaaaataggttatttggtgtcggtattgtaat

SEQ ID NO: 7264 - DNA, 121 bp, Artificial Sequence
  Description of Artificial Sequence: Synthetic probe
agcagcgagggccaagtagcaaagaagagcacatatatggggttttgagaagtggtggttrccacctgcgccggaggttaagaagccccgttcactctacaacgcggcatccctcgcgtac

SEQ ID NO: 7265 - DNA, 121 bp, Artificial Sequence
  Description of Artificial Sequence: Synthetic probe
cttggtggcgacgagcgcgttgttgacggggacgacgacaactccggtggagatgttgagytggttgttggcggtggcggtgatgttgagcgtgaatggcccgtcctgtccggacgcctgg

SEQ ID NO: 7266 - DNA, 121 bp, Artificial Sequence
  Description of Artificial Sequence: Synthetic probe
ggctgaaaaataatcgtccctcatttccatacatccaatagtgaagccaagcaatggcatrccagtgccattattgcagacacaaaccatacaggctactgcctaaccaacctgtgcacca

SEQ ID NO: 7267 - DNA, 121 bp, Artificial Sequence
  Description of Artificial Sequence: Synthetic probe
aaggttatgttggggttggtgccaatgcaaagttatcaccacagtctgcaagagttgttcrtcccgagacttctcgaatgattatttatgatcctagacagataaaaggaccagtgattgc

SEQ ID NO: 7268 - DNA, 121 bp, Artificial Sequence
  Description of Artificial Sequence: Synthetic probe
gaacaagaaagcccgtggaatcctcgcaatggccaaggtggcagctccaaacatggccctsaaagtgctcgacatggcaatgcaagtccacggcgctgctggcgtctcatccgacacggcc

SEQ ID NO: 7269 - DNA, 121 bp, Artificial Sequence
  Description of Artificial Sequence: Synthetic probe
ccctacttgccgcaaggccctcaagaagaacaatttccatcgggtttaccttccgaactcygatgcttaaggccaacagcgatcattcggctgaagcgtaacctcacctagatgtgttatt

SEQ ID NO: 7270 - DNA, 121 bp, Artificial Sequence
  Description of Artificial Sequence: Synthetic probe
caagtgcttcttgagctctatgcatactcttgcaatggcagcatgaaaactagcaggcagyaggctaactacaacttcaacctgtgaaacaaggtttgtaagacttccaatatctgaaaca

SEQ ID NO: 7271 - DNA, 121 bp, Artificial Sequence
  Description of Artificial Sequence: Synthetic probe
gcagctgtccgtgcccggcctagggagcatggagctcgacgacattgacgatgttgacgcygacatcgaggacagcggcgacttcgtgtgcgcattgtgacagacatgtgtctttgtgtcc

SEQ ID NO: 7272 - DNA, 121 bp, Artificial Sequence
  Description of Artificial Sequence: Synthetic probe
aatgtactccagcagattggtattttactggttaatttgtttccgctcaaatctgggagaygttactggaccggatgatgattaagatgcagaattgatgagatacagttgttgaaaaaat

SEQ ID NO: 7273 - DNA, 121 bp, Artificial Sequence
  Description of Artificial Sequence: Synthetic probe
cgagggccttcttgtatcagtaaccaagccatggagcacaaggaaaccggctgccagtccygggagggtcccatcctctgcgtcaataactgtggcttcttcggcagcgcggctaccatga

SEQ ID NO: 7274 - DNA, 121 bp, Artificial Sequence
  Description of Artificial Sequence: Synthetic probe
accagatattaaaaccaggcgacgtatcttccagattcatacagctaagatgacattggcygaagatgtgaacttagaggagtttgtgatgaccaaagatgagttttctggtgctgatatc

SEQ ID NO: 7275 - DNA, 121 bp, Artificial Sequence
  Description of Artificial Sequence: Synthetic probe
ggctggactgctgagttgggtaagcgaagagcattagaggaggcttttaacagcatattcrtataaaaaatagatcaggcacagcaaatatcctggaggacgcatggttaacttgtgacaa

SEQ ID NO: 7276 - DNA, 121 bp, Artificial Sequence
  Description of Artificial Sequence: Synthetic probe
tgggaggcaaaacctaacgaggaacacaaacacagggctgccttctgatgcacggggtttyggcacatcatcggttagtactgctgctgcagcacagatcaacagaacgagtgttcagggg

SEQ ID NO: 7277 - DNA, 121 bp, Artificial Sequence
  Description of Artificial Sequence: Synthetic probe
acgggagcagggtgaaactctgtgactttgcagtctgatagtgataccgagattcaacttygggcacatatgtaatgtaagcttgtatttgccygttttagtttcagytgaggcatacggt

SEQ ID NO: 7278 - DNA, 121 bp, Artificial Sequence
  Description of Artificial Sequence: Synthetic probe
catggagtctgagaagaaggcgatcgccccgatcccgaggaacaagagcgacatgctggayggggaggacgtgccgctgaagtcgaggctgagtgggctgccgtccgagcttgacctggag

SEQ ID NO: 7279 - DNA, 121 bp, Artificial Sequence
  Description of Artificial Sequence: Synthetic probe
gaatgagaagtaaaggggggatatcttgctctaatgaagtgatatacaacaatacagatgygttctgaatcatggctcgacgggtggctttagcctgatcagcctccggactctgtccttc

SEQ ID NO: 7280 - DNA, 121 bp, Artificial Sequence
  Description of Artificial Sequence: Synthetic probe
agatcgcttgtgttctcatcagactgtggatatctctctaagtagcatttggcagtggtaygaagaaccttgctgctatggcttggaagtgaaggcacaggatctccgtagatcgaaaggt

SEQ ID NO: 7281 - DNA, 121 bp, Artificial Sequence
  Description of Artificial Sequence: Synthetic probe
atatacgagttagctttccaggctgagacagagacaagctagcaagcaattcgaaaaagartgttcagattgaggtctctgggacagactgaaaagtcgaagaagtctgcagctagaccat

SEQ ID NO: 7282 - DNA, 121 bp, Artificial Sequence
  Description of Artificial Sequence: Synthetic probe
acaagagtgtggacatgattgctgctaggcgtagagagcgtgactattttgctaacacacyagagtacaagcatcttgctcataggatgggatcagagcatttagccaagagtctctcaaa

SEQ ID NO: 7283 - DNA, 121 bp, Artificial Sequence
  Description of Artificial Sequence: Synthetic probe
ttctaataacttcttcagctccttcttgttaacctttcccatggcattccgaggaagagartcccataagtacaatcttgttggaatcttgtatggagctagcttatctttttgaccaact

SEQ ID NO: 7284 - DNA, 121 bp, Artificial Sequence
  Description of Artificial Sequence: Synthetic probe
acagaagatgcagcaatctggaatgcgtgcccctgctggagctggacgatggtcgactccraccgcacccagataggttagatgtacgcttaggcgactttccctctacgaaacgtgcctg

SEQ ID NO: 7285 - DNA, 121 bp, Artificial Sequence
  Description of Artificial Sequence: Synthetic probe
agaacccgtaagaggacccctactcctggagaatactgtggcccaagaggcgggcgttctmgatcttcgcctcgccggtccagcagggggcgctcgaggtcgccggatggaagaagcgacc

SEQ ID NO: 7286 - DNA, 121 bp, Artificial Sequence
  Description of Artificial Sequence: Synthetic probe
ccaagactgtgaagcgggaggggttcctgttgttatctagattggcgatacgatctgtctrtgtttctttgtacgtagttaagttgatgtgttactgttgtggttgtttccagctgccgcg

SEQ ID NO: 7287 - DNA, 121 bp, Artificial Sequence
  Description of Artificial Sequence: Synthetic probe
gctcccaccaaatccttgtagagcatctcttccctcaacattctctcctgtattgctattygtaacactctgggaggtcgttgtatctgtcagccagtagttgttgttagtgcagaacaag

SEQ ID NO: 7288 - DNA, 121 bp, Artificial Sequence
  Description of Artificial Sequence: Synthetic probe
caaggccgccgtctgcagggacgcgcccagcaatccgcactagtagcttccacttcactcrtctactgtacgtgcttgcaaggagtagcaagattttggagatttcttttcatcagtgggg

SEQ ID NO: 7289 - DNA, 121 bp, Artificial Sequence
  Description of Artificial Sequence: Synthetic probe
ctggtgatttagaaaaatgttgagccatcaacaacacggagacctgagacgccaagcactyggtgttgctcgtcaaccaccttccctacatgacatccaccatgatagtgccagatggtga

SEQ ID NO: 7290 - DNA, 121 bp, Artificial Sequence
  Description of Artificial Sequence: Synthetic probe
atcagtggaacactagctgctgcagtggcctttctcatcgctagatactttgcaagagagmgtattcttaaaaatggttgaaggaaataagaagtttctggcgattgataaagcaataggt

SEQ ID NO: 7291 - DNA, 121 bp, Artificial Sequence
  Description of Artificial Sequence: Synthetic probe
caaggtggtcaactccgtcgacgtgatgatgggtgtccacggtgccgggctcacaaactgygtcttcttaccggacaaggccaccttgagttcagatcgtgccgtggggcggcatagaagg

SEQ ID NO: 7292 - DNA, 121 bp, Artificial Sequence
  Description of Artificial Sequence: Synthetic probe
ttagaagtgagttcttccctgggtgatctcctgtcctcatgccatcaacaagccttgtatrgttattgtggctttgctagttgcagtgcggatttgaagacacacatcaaggtgcaaattt

SEQ ID NO: 7293 - DNA, 121 bp, Artificial Sequence
  Description of Artificial Sequence: Synthetic probe
taacccaccattgcatccagcgtcgcacgaatcaggttctgaactgtcacactcatggtcrcagtcgacgaactgctgctcggagagcacctccatctttcccgtcgcgaggtagttggct

SEQ ID NO: 7294 - DNA, 121 bp, Artificial Sequence
  Description of Artificial Sequence: Synthetic probe
ggcttgtggatcatgcccgttgttgctggatcagggaggtcccttaccagctgggaaccakcactgcggccattccatgtgacatcttccatccatgttttcatttgctgcacatttgatt

SEQ ID NO: 7295 - DNA, 121 bp, Artificial Sequence
  Description of Artificial Sequence: Synthetic probe
ctttggatctgataaaaatgatccagagttgatggggttgaacataatgcaagcacctctygtggacatggaaattagaggtgttcccgctctcaagtttttgggtgatatagtgtggaag

SEQ ID NO: 7296 - DNA, 121 bp, Artificial Sequence
  Description of Artificial Sequence: Synthetic probe
ctttgatggatgattgttcatgattggcactacgtcagctgcaacatatggttgcatcgcmtattggatagagaatctgaaacatggcttttgtacatagacaccacgatacttcgtatct

SEQ ID NO: 7297 - DNA, 121 bp, Artificial Sequence
  Description of Artificial Sequence: Synthetic probe
aagtttgctttgatctactctcgtgtccgggtctgtaatgagtattgtacgatgatccatrtacttggtgtaaatggacgacgatggcagtcaaaggtggaaataaagttcatgttataaa

SEQ ID NO: 7298 - DNA, 121 bp, Artificial Sequence
  Description of Artificial Sequence: Synthetic probe
caggaaaagctgggacctcaaagaagagaaaagcaattactgatgcagcttcacagaaaarcgcagcttatgattgggcagaccttgcagataatggaaagctgaaggatatgacggtaat

SEQ ID NO: 7299 - DNA, 121 bp, Artificial Sequence
  Description of Artificial Sequence: Synthetic probe
gggatggaaatttatttatgtcggggatatcagagttaagagtgaattgccatccacctayaaggcctactgccgacagcaattccggtggtcctgtggtggcgcacatttattccgacaa

SEQ ID NO: 7300 - DNA, 121 bp, Artificial Sequence
  Description of Artificial Sequence: Synthetic probe
tgatgttgcgttcattttctggatagctctatcttgtatttcgcttaggggtggcaatccmggtattcccctggcatccttcaagaggatcaaactgtcaatcatatcctccgtaatccca

SEQ ID NO: 7301 - DNA, 121 bp, Artificial Sequence
  Description of Artificial Sequence: Synthetic probe
ttaccagctgaggcggggatgtccttggctccgacgagcacaatcttctggtagacgatgycgtcggaggactggtgcatggggtactccacaggcgcgacgggacggcgcgtcccccatg

SEQ ID NO: 7302 - DNA, 121 bp, Artificial Sequence
  Description of Artificial Sequence: Synthetic probe
gatcgactcgctggcggaggctctgaacgagtgggacgggggcctggtgctggtgagccaygacttcaggctgatcaaccaggtggcggaggagatctgggtgtgygagaagcaggcggtg

SEQ ID NO: 7303 - DNA, 121 bp, Artificial Sequence
  Description of Artificial Sequence: Synthetic probe
ttctagggtagcacggttcattcgttgtgcttttgattgactggagatacatttttgtttmcataattagctctgaacgttagttatactattcaatgtacgtaggttttgtttgatgtgt

SEQ ID NO: 7304 - DNA, 121 bp, Artificial Sequence
  Description of Artificial Sequence: Synthetic probe
atgggtgaaggtaggatcagttctctgaaggctatgtatatatgactgcacatggatcccrtgttggacaactttgctgaatctgaacctactgaacacataatcaggccgacccatatcc

SEQ ID NO: 7305 - DNA, 121 bp, Artificial Sequence
  Description of Artificial Sequence: Synthetic probe
cacgtagtacgtagaatgaagcgcaagaggcctgcctgatttacgattcttgtatgtattrattatcatctgatttatatggtgagcagatcgccagcatgttctatttagtaaaaaaagt

SEQ ID NO: 7306 - DNA, 121 bp, Artificial Sequence
  Description of Artificial Sequence: Synthetic probe
agcccagaagcaacatactgaagatttggagaaacaaatcacaactcttacagagcagctwcaattagccgaaacacagtacaagcagaaggttgcagaagagagtgaaaaactcaccctt

SEQ ID NO: 7307 - DNA, 121 bp, Artificial Sequence
  Description of Artificial Sequence: Synthetic probe
gcgtccgtcgggagctacggggcctacctcgctgatggttcagagtacagtggatcgtatkgagacgacatcacggtagagaagctcaaggatttccaccggcgccggctgcaggtgctcg

SEQ ID NO: 7308 - DNA, 121 bp, Artificial Sequence
  Description of Artificial Sequence: Synthetic probe
gacgaagaacaagtatcttgatgcggagtgccgccgcctcagctacgcactccagtgctgsgtagctgagaacatggcactgcgccagagcatgttaaaggataggcccgttcggtgctcc

SEQ ID NO: 7309 - DNA, 121 bp, Artificial Sequence
  Description of Artificial Sequence: Synthetic probe
tttaggaaagccctgaagtcaacaacaaatgaagttacaatctccagcggcgagcaaggcrtacgacctccattgacataatacacaaataagtatgagtcataatgctgtcctcttatgt

SEQ ID NO: 7310 - DNA, 121 bp, Artificial Sequence
  Description of Artificial Sequence: Synthetic probe
acggggcatctgttgcgtttaggatgctcccagcggaaacccagatcttctgatgaccagycggagcacgtcaccgaattacctggaaatcgcactgcatcgtcacggcaagcacaagatg

SEQ ID NO: 7311 - DNA, 121 bp, Artificial Sequence
  Description of Artificial Sequence: Synthetic probe
gatagcctcaataatctggccgagattttgttgtgcatatctcacaaccagccacttggasccttggaagtcctccttagtgaactcattggcctggagcttgactgcactagataggcat

SEQ ID NO: 7312 - DNA, 121 bp, Artificial Sequence
  Description of Artificial Sequence: Synthetic probe
ttggaatggtgtggatgcagcctgtcatgccatgcggcttgagatttttgagggaagttaygccatgtatggttctcagggatcagagatggccatgtctatctctgtatgggctagctgt

SEQ ID NO: 7313 - DNA, 121 bp, Artificial Sequence
  Description of Artificial Sequence: Synthetic probe
acaacgcattcaagaaggagtaccgatctattttgaaagcgtcacatccgatgggtgtgaratctctgatgatgagaagaaccgtttgtacgagatgaaggcatcggcgtggtaccaggta

SEQ ID NO: 7314 - DNA, 121 bp, Artificial Sequence
  Description of Artificial Sequence: Synthetic probe
ggcaagacatcaggacctaacgggcacaagcagaagtaatcactattcttcccaagacaaygatgactttattgacttggaatctgatagacagcttctactcatgaggcagcaggatgat

SEQ ID NO: 7315 - DNA, 121 bp, Artificial Sequence
  Description of Artificial Sequence: Synthetic probe
actgacaattcctcaaggacgagaagcatgataactaggtagggaacttcagatcgtatcrtaactaggtggggaacttcagatcgtaccagatatctatctccagcaaaagaatgaacca

SEQ ID NO: 7316 - DNA, 121 bp, Artificial Sequence
  Description of Artificial Sequence: Synthetic probe
tacgaaatgaggcgattaaagaaggtgaccgggtggcactgttggaaccatactacagaaygctgaacatacggtggaaagagcagcgctaccagtttaaatcgatccgcgtggacttccc

SEQ ID NO: 7317 - DNA, 121 bp, Artificial Sequence
  Description of Artificial Sequence: Synthetic probe
aactgtaaagaaaccagggctagaaatggcaacagaacaaagtgaactggatctatcctaygggcaacggtaccaagatacgaagatcccagaagcatatgagcgcctgatcttggacacg

SEQ ID NO: 7318 - DNA, 121 bp, Artificial Sequence
  Description of Artificial Sequence: Synthetic probe
accatgcagaaagtctgtgtaagccttatccttgaatattaacaggctgcagggcattagyagaagtgacaaagaagcaggatcagcttcctttgagccttcaaccttacaggaaccatta

SEQ ID NO: 7319 - DNA, 121 bp, Artificial Sequence
  Description of Artificial Sequence: Synthetic probe
gggattttactctccctctagaagtgaagcatatgaaggcttctgtcttctcatgtctgcrcttctgagatgatgtagagggtagrgatgcctgtagagtggcttgttctcatggggatga

SEQ ID NO: 7320 - DNA, 121 bp, Artificial Sequence
  Description of Artificial Sequence: Synthetic probe
acgaaaccctggtctaagtttgtcacacctgagaataggcatctggtctccgaagaggcarttgattttctcgataaacttcttcgctttgaccaccaagataggctcacagccgaagaag

SEQ ID NO: 7321 - DNA, 121 bp, Artificial Sequence
  Description of Artificial Sequence: Synthetic probe
tggcccacagcccatgtcagtgcctccggtgcagcagatgtcacgcatcgatcagcctatmcctcctcctgctggctatgcgccacaaccagcatacggccagccttacggtggctatcca

SEQ ID NO: 7322 - DNA, 121 bp, Artificial Sequence
  Description of Artificial Sequence: Synthetic probe
cttctgaaaatctgtcgatggcctttgttgcgtgctaaacctacttcacatcggttttatyggcgagactcgagtggcaacaccttcaaagtcaatagctctaataatgggcactgattgg

SEQ ID NO: 7323 - DNA, 121 bp, Artificial Sequence
  Description of Artificial Sequence: Synthetic probe
agagaacatgctcatgcactatgtgccagaggtgaaaggagtggagcaggagtttgatggygatgaggaagctgaactggctagccagacagaatgagcttctaaggtcaaagtacaaccc

SEQ ID NO: 7324 - DNA, 121 bp, Artificial Sequence
  Description of Artificial Sequence: Synthetic probe
attcgctaacgaacaaaggtaatagatggtcctccagacgctacgtatctcgctgaaaacygagcagtaaactgaagaagaaactgcctagcctaggtatcgcacttccacttggacgtcg

SEQ ID NO: 7325 - DNA, 121 bp, Artificial Sequence
  Description of Artificial Sequence: Synthetic probe
ccacaggcaacatagtttgcttgccataggccggcagagccggtgctggactttggcggcrgcaagtttatgggcacttccattgggtggcccgttgtcaccttcctaccatagcctagac

SEQ ID NO: 7326 - DNA, 121 bp, Artificial Sequence
  Description of Artificial Sequence: Synthetic probe
gcgcgtccaaccacacgagcaggttgcagatctggggcagcgatgcaacgcagatgttgtrcggcgtgagcgcgtccacgtgcacacggtcggaagtcaggatttttaatctatgctaatt

SEQ ID NO: 7327 - DNA, 121 bp, Artificial Sequence
  Description of Artificial Sequence: Synthetic probe
acttgcatctgccggtggtggtgcggtttcatttttacctcacgcaccaaaggagcctgtycttctagacgaaagatcccttctagcttgcattgttcgtgcagttcctgctggatctgat

SEQ ID NO: 7328 - DNA, 121 bp, Artificial Sequence
  Description of Artificial Sequence: Synthetic probe
agcaagagaggctggacttgaatatgtggagatccagaatttgactgagttctacgatgayaacagaacgcagtttgctccaatgctaggtaattatggtgcaagtctgctggatcctcgt

SEQ ID NO: 7329 - DNA, 121 bp, Artificial Sequence
  Description of Artificial Sequence: Synthetic probe
tcctcgaattgtttttcactctgattcctcaccactagcacttaaaatcctcgctaggtcytggacaatttcagacattggcggcctgaattctggttccggccggacacaatgactgata

SEQ ID NO: 7330 - DNA, 121 bp, Artificial Sequence
  Description of Artificial Sequence: Synthetic probe
tggaagcgcaccggctttatgtcccagccatggatgtgctcggtgctataaacccggcggscaagccgcttgaaaggtctgcccagatgaactcggaagagcaggctgtatgtaccttctg

SEQ ID NO: 7331 - DNA, 121 bp, Artificial Sequence
  Description of Artificial Sequence: Synthetic probe
ccagaagctcgacgcaccagagctaccgatctccatcggagggaagatagaagcggatcarcctgatcagtgggatgacaactggggagatgattgggacgacgaggaggcgccgtcgaca

SEQ ID NO: 7332 - DNA, 121 bp, Artificial Sequence
  Description of Artificial Sequence: Synthetic probe
agacatgcagtcagaatcagatgatcgtatcgtgagatgagatatagtagtgcttgggtayatgtatgtgccggtgcctgaagagctggaggttattatatttttgatggtattgtaggtt

SEQ ID NO: 7333 - DNA, 121 bp, Artificial Sequence
  Description of Artificial Sequence: Synthetic probe
ggcataccatcacccgggagtcaaaggctacatacacgagggagggctcaagagagatgtrcctatgcttgaggaggtggtggtcatcaagggtgctgggccatttcattcagcaggagag

SEQ ID NO: 7334 - DNA, 121 bp, Artificial Sequence
  Description of Artificial Sequence: Synthetic probe
agctcagtctagtttgtggattggaggttggagaagttgccatgcaatggacatgctgtgrgaagctttttggtgcaaggctggcwaawttttataattttgggtgctgaattgtctgcca

SEQ ID NO: 7335 - DNA, 121 bp, Artificial Sequence
  Description of Artificial Sequence: Synthetic probe
tctttctgttcttgtaacgaactttggcccttctgtaaaatgtatagcttgccttggattrtgggtctgcggctggtgccgtgctatttcagttgtgtgcactgcatgctcagttgaagct

SEQ ID NO: 7336 - DNA, 121 bp, Artificial Sequence
  Description of Artificial Sequence: Synthetic probe
tgcccttttgtttgccccatcttgttctttctgtatagctagtttattgggcacaagaatyacatatatattcctctctgcaaaattcttacttccttctgttgctagctcaccaacatca

SEQ ID NO: 7337 - DNA, 121 bp, Artificial Sequence
  Description of Artificial Sequence: Synthetic probe
atacagacattacaaggggaatggaaaggactaaacgaacaacgaacagggataaggattrcagaacaaacgaacacattggtaaaatcgcctcaagttgcaaaatgctgcacttgccaca

SEQ ID NO: 7338 - DNA, 121 bp, Artificial Sequence
  Description of Artificial Sequence: Synthetic probe
atttgaaggatttctttactgttggacttggctgggtgctctttggtgggcttccttttgwtttgctgaatgtcattggccaagggcttggcttcgttggctctggcatgtacgcctactg

SEQ ID NO: 7339 - DNA, 121 bp, Artificial Sequence
  Description of Artificial Sequence: Synthetic probe
gatacaacatcatacagaatctgcaaacctgagatcaccgtgtgtctcagtaactggctcrctccagcaggttgcacacttccttgaaaactagctacctaacacctatttcaacattaga

SEQ ID NO: 7340 - DNA, 121 bp, Artificial Sequence
  Description of Artificial Sequence: Synthetic probe
atgtaattcaggaacctgagatacccagtgccacaagtagggtcagtcatgagatgtgctkaaatgtaagaatctgtaaatttggatcctagattttacgactacagcatcgacacaggtg

SEQ ID NO: 7341 - DNA, 121 bp, Artificial Sequence
  Description of Artificial Sequence: Synthetic probe
tggaggtaaaaagccatgctgctcaggtgccattacatgaacttggaagcagttcgagaayatctcagtaaacagctcgagatctgtcagagattagtttgtttgtgatttatattctgta

SEQ ID NO: 7342 - DNA, 121 bp, Artificial Sequence
  Description of Artificial Sequence: Synthetic probe
aagcccggaggaaaaggagactccagttgcgcttacgaccgaagaaccacacctactgttktgcgcagtacaggaatatatcctggtatggatacccaaggtgcttgactgaggccataat

SEQ ID NO: 7343 - DNA, 121 bp, Artificial Sequence
  Description of Artificial Sequence: Synthetic probe
agcatcacaagatgcattggatgggattatgcaaaaccttatcaaagttgtgacattgcgktgaagatttcaaatgatatgccattgtctatggaattgcatgatgtaaaactccagctgc

SEQ ID NO: 7344 - DNA, 121 bp, Artificial Sequence
  Description of Artificial Sequence: Synthetic probe
agacatgcagcgactaatctcgtgcctgcctaccttaatatccaacattacaacatctatyagaatcgccagtgagcatgggtgagccgacaactgaacacaaacaaagcaaaagaaaaac

SEQ ID NO: 7345 - DNA, 121 bp, Artificial Sequence
  Description of Artificial Sequence: Synthetic probe
tcttgctctgcttcctgtggcaagatctccatggatggatgacgagcaagaactacttgtygccacagagcgcgcccagcccggcccggacatgccatgccccctttttgtgattattggt

SEQ ID NO: 7346 - DNA, 121 bp, Artificial Sequence
  Description of Artificial Sequence: Synthetic probe
tgtgaccggaagaacagcagttaaggttgcgaacagcatcctgaccagcagctacttctcygcaggagctatgatggtgtccgacgctctcactcgggctgccaaagcggcggagaatttg

SEQ ID NO: 7347 - DNA, 121 bp, Artificial Sequence
  Description of Artificial Sequence: Synthetic probe
cactgtccgcaagaacagcgatgcggccacggatgaagagaggggcaggctcgaggttgtsggggagtaccatcttggagagtttgtgaacaggttccgtcacggttcgcttgtgatgcgc

SEQ ID NO: 7348 - DNA, 121 bp, Artificial Sequence
  Description of Artificial Sequence: Synthetic probe
tagcatatatgttggagatgagtgtgtaagatccatcattctctgcattcatgtcaactarcttgctaagagcatattcagcaagttccacatttgaatgtactctacaggcactaagtaa

SEQ ID NO: 7349 - DNA, 121 bp, Artificial Sequence
  Description of Artificial Sequence: Synthetic probe
aggaggctgagcaggtgcttgaggatgtcctgcttcgaaggatctccggattggacgacgmcaaggctgtctcccgggccgagcagctgctccatgagctcggcccgaggacacgtgttcc

SEQ ID NO: 7350 - DNA, 121 bp, Artificial Sequence
  Description of Artificial Sequence: Synthetic probe
tacatcacagaggacgtccattctgaggcactcaaggattggtaccccaattatgctcatyggtgcctacaatgtgtttgatctcgtcggcaagtgcctaccagccgtctatctcctccag

SEQ ID NO: 7351 - DNA, 121 bp, Artificial Sequence
  Description of Artificial Sequence: Synthetic probe
tgcgctgcaccctaagatcaatggaagcctgttgcctgcatcagttatcggcctctactgyacctacctgtgctacagcggactctcaagtgagccaagggactacgagtgcaacgggctw

SEQ ID NO: 7352 - DNA, 121 bp, Artificial Sequence
  Description of Artificial Sequence: Synthetic probe
ccctgggtcgtggacggcgatctacatgccgctggacaatgtggggatgtggaacgtgcgrtcggagggctggggcaggcagtacctgcggcagcagttctacctccgggtctactcgccg

SEQ ID NO: 7353 - DNA, 121 bp, Artificial Sequence
  Description of Artificial Sequence: Synthetic probe
tggtgcttgccgagggggagggggggcaagcaacacatctacagagctaatctattctacmtcaagctctcacactgcccaaatggtgtacaacgtggagggaggtcctacctagaactca

SEQ ID NO: 7354 - DNA, 121 bp, Artificial Sequence
  Description of Artificial Sequence: Synthetic probe
gaattataggactggttcgtggttttcaggaagcatcgtggctgcccttgtggtatgagcrccaaatttgtcacctgttttcttgtgctatgtaaggctgttttgttgtcttgagactttg

SEQ ID NO: 7355 - DNA, 121 bp, Artificial Sequence
  Description of Artificial Sequence: Synthetic probe
gctttgagcatataagactcggcaaattttcaacatttcttgaacttccttcttgtactcrtccacagcaccactttttwwcttagatgcattatgcaccatttcttgaatgttgcgccag

SEQ ID NO: 7356 - DNA, 121 bp, Artificial Sequence
  Description of Artificial Sequence: Synthetic probe
ggagaagtcagagattttgcttgtatggcctccatgaatgaacaagagctcaggagggccrtcctctgcatcctctggtgtttgctcctgatcaattctgcttagatcccaaaccatcagc

SEQ ID NO: 7357 - DNA, 121 bp, Artificial Sequence
  Description of Artificial Sequence: Synthetic probe
attgaaccaacggaaggcaaactgaaggaactccaatccttgttcctctatgtgcttcgayaaaggttcatctatccgatgaaccaactcttttcaacctgaatacaagacgttgtaattt

SEQ ID NO: 7358 - DNA, 121 bp, Artificial Sequence
  Description of Artificial Sequence: Synthetic probe
ctgtgctgttataactggccagccagctcgtgaaccgaaaagtgaagagatgcatcgctartttacgctgagagagaggtgcacaggtcattggtataattagccaacatccatggggaag

SEQ ID NO: 7359 - DNA, 121 bp, Artificial Sequence
  Description of Artificial Sequence: Synthetic probe
caccggcaactaaagctaggcctctagcgtcatcaggtaggggacgaggaacgaagccagyaccaaaacttggtgctcaaagaataggaaggacttcctcaactgggatgtagagtgccat

SEQ ID NO: 7360 - DNA, 121 bp, Artificial Sequence
  Description of Artificial Sequence: Synthetic probe
cacttggtcatgattttggaaaaaacgagttacttctctgtacaactgctccccttcgaakggcttggaaacatagccatccatttcacatttcaggcactgctcatatgttgcctgaata

SEQ ID NO: 7361 - DNA, 121 bp, Artificial Sequence
  Description of Artificial Sequence: Synthetic probe
acataaaatcggtgaactgcaccagagttcagaagatgtattgatcgacaaccaacgagcygaggaaggataccagaactttgaggtgatcagccatccgtcccagcggctrcgggtatcs

SEQ ID NO: 7362 - DNA, 121 bp, Artificial Sequence
  Description of Artificial Sequence: Synthetic probe
gatgggaacaagggtcaagctattggatatcactgctctatcacgtctgagggacgaaggkcatatatcacggtatagtattaaggccacggaagggattcaagattgcttgcactggtgt

SEQ ID NO: 7363 - DNA, 121 bp, Artificial Sequence
  Description of Artificial Sequence: Synthetic probe
taacatctaacactgcgacaccgaatgaaaagggcactagagtcagcgcctgtttgcaatrctgaaggagctgactttctgaggkgtggcgaccaccagaggagcgtcaggggagtcgctt

SEQ ID NO: 7364 - DNA, 121 bp, Artificial Sequence
  Description of Artificial Sequence: Synthetic probe
agctccatgttggaacattttcctatcacattgtctcgaaacatcttaatgcccatcacgkcatgtaatctctcaggtcacggctctagtatctgcgactgtgtggaaggttctattccta

SEQ ID NO: 7365 - DNA, 121 bp, Artificial Sequence
  Description of Artificial Sequence: Synthetic probe
gtggctgagtacttcaaaaataagatatcttcagccacatcagatgatcaacgaggggagktcagtttgaacggaatcgtggaagggaggacaaggaagcaagctgcatgcatgttttttt

SEQ ID NO: 7366 - DNA, 121 bp, Artificial Sequence
  Description of Artificial Sequence: Synthetic probe
tctccgaggtgaacataatatgtggagagctctaatactatatatcgctgctggagcactrcccgaggctttagaaacactccgcaagaaccagcgaccagacactgccgcgttgttcttg

SEQ ID NO: 7367 - DNA, 121 bp, Artificial Sequence
  Description of Artificial Sequence: Synthetic probe
tgctcgtctgaattggaattgcggagatgatgggaaatggttacagcatgatttgtacggycttgtgaaatttgaagcatctccaagctgtctgtcacactcgctatgtctatcgaggctg

SEQ ID NO: 7368 - DNA, 121 bp, Artificial Sequence
  Description of Artificial Sequence: Synthetic probe
gaggcggaccacctcggtgccggcatcgccgtacggctcgacggagaagaacccgtggtcytgcccctggaacttcaccagctcggccgacttgcccatcgccttgagcctggcgacgtag

SEQ ID NO: 7369 - DNA, 121 bp, Artificial Sequence
  Description of Artificial Sequence: Synthetic probe
tggtgcagttcaccaggatgcacaaccttgggacacagaactcaaaaatatacaaactacrcaacaccagaatatctaattctacatagtggagaaatacacgtaaccatgagtagcgcca

SEQ ID NO: 7370 - DNA, 121 bp, Artificial Sequence
  Description of Artificial Sequence: Synthetic probe
aagcttgctgaacatccatcttcatgccagaaatgggattagagctctccgccatggcttrggacagctgcaccagttgtagaagttggaggtcggagaagcatgtgtggagcataaattt

SEQ ID NO: 7371 - DNA, 121 bp, Artificial Sequence
  Description of Artificial Sequence: Synthetic probe
ataatatctaccccctccgtcctgaattagatgtcgcagatttgttaggttcacatgtatytatacactaaaacgcgtctagatacatgtgaatctagacaaatcttcgatatctaatttg

SEQ ID NO: 7372 - DNA, 121 bp, Artificial Sequence
  Description of Artificial Sequence: Synthetic probe
agagtaggccaggccgcggttaataatccatgcctggtttaacaaatgacagtgtacaatkaagattgcatcggtgcagattgactcgtatcgccatttttggacatgtggtgtttctgta

SEQ ID NO: 7373 - DNA, 121 bp, Artificial Sequence
  Description of Artificial Sequence: Synthetic probe
acactctgcacgaaaactaccaaacaagacaggctgctactatcaaacatcatcggtacartttctatcactgggcgaatgaagcgggtcatcaaccatgctaacaatgggagtttcctgc

SEQ ID NO: 7374 - DNA, 121 bp, Artificial Sequence
  Description of Artificial Sequence: Synthetic probe
cagttacagtccgcttcagggcttccgtcctacagaatcgaatcacataatatggcagcamctaagaaataactcatgttcctgttacaaagtctgtgtacagtgtacagatgaaggcgga

SEQ ID NO: 7375 - DNA, 121 bp, Artificial Sequence
  Description of Artificial Sequence: Synthetic probe
accagctgagaagcctaacctttacaccccggaggatgatgatgacaaagaagtggaggastggctagaggatatggatcacgtttccagcaaaaacaggcgacatcacttcagttgggaa

SEQ ID NO: 7376 - DNA, 121 bp, Artificial Sequence
  Description of Artificial Sequence: Synthetic probe
ccacgaatgccagatggcacccgtgggttctcactgggcagagggaagccacaagcattgrcacccagcttatccgcgtaaaccttgaactcggttcacagcacgagacacagcttgtgct

SEQ ID NO: 7377 - DNA, 121 bp, Artificial Sequence
  Description of Artificial Sequence: Synthetic probe
gttgtcctcgcccggtgcctcggcgacgccatcttcggcgacgggagggagagtgtcgagrcggctctgctcaagtacgccgggatcaggcggtggaggagcgtccagctcatcgcggcgt

SEQ ID NO: 7378 - DNA, 121 bp, Artificial Sequence
  Description of Artificial Sequence: Synthetic probe
actgcaggaagttgcagaataaaatggtgtggcagctgtagcagtaaacggtgttgccccracagatgcaaagccagcagtggatgccattggctgttgattttttgctgcttaagttatc

SEQ ID NO: 7379 - DNA, 105 bp, Artificial Sequence
  Description of Artificial Sequence: Synthetic probe
aaagaatgttttcagctcagtcaaaaatcaagtctccagttgcgtaggtgttatagaagayggtggcgcagaagtaaagcaccgccgtaagggtgaggaaggcct

SEQ ID NO: 7380 - DNA, 121 bp, Artificial Sequence
  Description of Artificial Sequence: Synthetic probe
cccggacagaacttgggaggcagacgagccacgaatcaacaagatcgtgttcatcggaagraacctcaagcgtgaagagctggagacgggcttcaaggattgcctgctgaagcaatgagcg

SEQ ID NO: 7381 - DNA, 121 bp, Artificial Sequence
  Description of Artificial Sequence: Synthetic probe
gcgacacgcacggacacgaaatggaccgatctcccgcatcgtcttaactcgaggaagggcwcgaaggcagatgttgccctgtttctatctggcctaacctgatcataatctttgcctgcgt

SEQ ID NO: 7382 - DNA, 121 bp, Artificial Sequence
  Description of Artificial Sequence: Synthetic probe
ttattgttaccgcatagcgccttcttatctcgctctaatagccgaagttgtagcgtgtctstataagttagatagtgcaagctttgctgccgctgagcccaccatacctatgtaggcgagg

SEQ ID NO: 7383 - DNA, 121 bp, Artificial Sequence
  Description of Artificial Sequence: Synthetic probe
aaggatggaacttgaacatcagtgcgagctttgccagctgcaattaacttcaaaaataccrgggcagccacatgacgctaactgaatcaatacacatatgccgaatcttgctgagttgcgt

SEQ ID NO: 7384 - DNA, 121 bp, Artificial Sequence
  Description of Artificial Sequence: Synthetic probe
aagactgccatggacattgagaaagcagaggatggaaaggcttcaactgatgatgcagctrttagtaagaagaggaaactagaagacgttgatggaagcaaaccccatgccaaagaagata

SEQ ID NO: 7385 - DNA, 121 bp, Artificial Sequence
  Description of Artificial Sequence: Synthetic probe
cgcatcgtcagttggtggctacgcggagcaagtgatccgtggtccgtcgggacttctgcayttttgaagcctgaagattggaagaagtacatatatgtagggcgccttcgcttggcccctg

SEQ ID NO: 7386 - DNA, 121 bp, Artificial Sequence
  Description of Artificial Sequence: Synthetic probe
actaggactctgccacggcagagccaatcttggctgagccacttgtggccgatttgtatcyaggttgggtggaaccaacttggggttccaccataggccgccgcccttttgaaccccataa

SEQ ID NO: 7387 - DNA, 121 bp, Artificial Sequence
  Description of Artificial Sequence: Synthetic probe
tggtcacaagcttcgtgcttataacctacaagatgatgggcgtgacaccgttgaggctaaygaggaactaggactgcctgtggactcaagggaatacgggatcggtgcacagatattgcgc

SEQ ID NO: 7388 - DNA, 121 bp, Artificial Sequence
  Description of Artificial Sequence: Synthetic probe
agagcccaaggcattgctggacagggctcatctttatgtatttgtgtatgtacaattgtcrgtccgccattgatccatgtaagccttgaatatgttgagctgtgtaacaaacgggagctga

SEQ ID NO: 7389 - DNA, 121 bp, Artificial Sequence
  Description of Artificial Sequence: Synthetic probe
ctccttctggcggtgacaactttgctgccagcaacttcggcgctgatagtggtttcggtgktaacccagctggaaactatggtgctcctgcagcttccaccggtggtgatgagttctccag

SEQ ID NO: 7390 - DNA, 121 bp, Artificial Sequence
  Description of Artificial Sequence: Synthetic probe
tagcctcagtaccggaaatgctggtggaagacttgcatgtggtgttgttggcctgactccrttgtaggttgttggccttgagttgtgttgtccctgtcaaacctgtcgagacggcgtcttt

SEQ ID NO: 7391 - DNA, 121 bp, Artificial Sequence
  Description of Artificial Sequence: Synthetic probe
atgcgtctcaaacactccaaattatttctcagaaatcaggttccttccaccgttacaccasatggatttattccgatacgacattcatcatcaggaaaaagaagaaaaagggtccggtaca

SEQ ID NO: 7392 - DNA, 121 bp, Artificial Sequence
  Description of Artificial Sequence: Synthetic probe
tatcatcttcagcttctgcttcagaagatcgatctgctcctcgactttcccgcatttcttrtagaggtcgatgagcaggttgtcgagggactcctgggcctgcctggagcagaggtgcctg

SEQ ID NO: 7393 - DNA, 121 bp, Artificial Sequence
  Description of Artificial Sequence: Synthetic probe
gaacaatgcaatatgtatacttggctgaagttttatctattggctgcgagctgactttctrgagatcctggtctaccaattctgtttgggtgatcccaaataggtgggaggagtatacttg

SEQ ID NO: 7394 - DNA, 121 bp, Artificial Sequence
  Description of Artificial Sequence: Synthetic probe
ggtgtccaccaaatttatcatgaaggcattgtgaggtgccaatggatagtgatgtcagtgrttactcgcaatgatcagcaatctgtaaatacaaactcgttgtgtcaactgtacatattgt

SEQ ID NO: 7395 - DNA, 121 bp, Artificial Sequence
  Description of Artificial Sequence: Synthetic probe
ccggagaaagtcagcacacgtaagctgagaaacatcgtgggtgacctcaaagaaccccttygcactggctccacgtgcatggacaacacgttcagggatacgttcccggtcaaactgcgca

SEQ ID NO: 7396 - DNA, 100 bp, Artificial Sequence
  Description of Artificial Sequence: Synthetic probe
taatgcaacattctgggagtacaacatatatacacattctaagcacaatcaggtcacttargatccgcctacatgctttggtatttactagctccagctg

SEQ ID NO: 7397 - DNA, 121 bp, Artificial Sequence
  Description of Artificial Sequence: Synthetic probe
gagaagatgggcatggaggagtatatcaaagatgtatccatggatgacgctgctgaacggrcttccaatatgaggtctcagattaatattttgtggggtatgctactttatgagcgctcag

SEQ ID NO: 7398 - DNA, 121 bp, Artificial Sequence
  Description of Artificial Sequence: Synthetic probe
ctttcttcaggatgagatgcgttggtcggaatctgaactacgtactactctttttgcttgrttattattagaactcgatcgatcgatgatggtgtgctatcatcgtttggtttagcctttt

SEQ ID NO: 7399 - DNA, 121 bp, Artificial Sequence
  Description of Artificial Sequence: Synthetic probe
agtagattgttccagaaggtttccattagcagtatgtcctctgttgttcccttctgagggragtggcactaggctgtaaatttgatattctgggtgggggtgcagcggtcttcctccgcac

SEQ ID NO: 7400 - DNA, 121 bp, Artificial Sequence
  Description of Artificial Sequence: Synthetic probe
aaaagcttcttaagatcatatcaagtttttctctaccaaagttctggatgggacgttggtkttcatagctcmgttttgccsgactttgcaggcttcttcttcccttgccaccatttcttca

SEQ ID NO: 7401 - DNA, 121 bp, Artificial Sequence
  Description of Artificial Sequence: Synthetic probe
cttattataagtttaccatcttttgctacggcgaaatcagatgtttttgatgatctctgcyctttccagcaatctgcttctttaccatctagatcccacaagcaaatgctttcatcagtta

SEQ ID NO: 7402 - DNA, 121 bp, Artificial Sequence
  Description of Artificial Sequence: Synthetic probe
ggacatgatccgccatgtctcggagctgtccaggaagaggaggctccagctcgagacagcygacgcgacctgtgaagaagcaacaagagcagcagacaacgctgccgcagtaccggtgcat

SEQ ID NO: 7403 - DNA, 121 bp, Artificial Sequence
  Description of Artificial Sequence: Synthetic probe
ctggatgaagtaacgcgtccaccacgaattactccgcaactttgctggtcttccaaatttkggcagttcagaaaccttagccttctgctgacctggattgccagtaaagatmacaaggcca

SEQ ID NO: 7404 - DNA, 121 bp, Artificial Sequence
  Description of Artificial Sequence: Synthetic probe
agaatgcctgagccgatcacggtccacaagctgataattcttctaattgaagtagtggttrcgcaatacatttttcatttgactcccaagacaagcttggatgcggacatcctcctagtag

SEQ ID NO: 7405 - DNA, 121 bp, Artificial Sequence
  Description of Artificial Sequence: Synthetic probe
ggcatttccgcattccataaacccaacaccgtacaggctacaacacgcgcttaacaatggrcaggatatcaaagacagatcaaccctgtcttgccaaggcatacagcttcgacggaccatc

SEQ ID NO: 7406 - DNA, 121 bp, Artificial Sequence
  Description of Artificial Sequence: Synthetic probe
tctcagactcgatcaagatgatgatcaagagttttctgccgaggccgatttccagcacacrtcttctaaaatacggacaagagcagcagcacgaagagcaagctcgtttctcgaagggttt

SEQ ID NO: 7407 - DNA, 121 bp, Artificial Sequence
  Description of Artificial Sequence: Synthetic probe
gcacttggagtcaactcaggctgctactggttacgcatctgaaaatgggcaaccaacaacmgttcagccatctgttgaaggtactgtcaccaacggtgtcgtggacacggctactgaacac

SEQ ID NO: 7408 - DNA, 121 bp, Artificial Sequence
  Description of Artificial Sequence: Synthetic probe
ctacggtggaagcagctgatagccttgcaaaatctgtggcacaacttgttgaacgcattcycgggtaaactaggtccctgtgtgtaagaacacctaatacactatatgttttgttgtgttt

SEQ ID NO: 7409 - DNA, 121 bp, Artificial Sequence
  Description of Artificial Sequence: Synthetic probe
cttgaaggcgttctatggtcttgtgaccggaacagaaggttccttgcctgagtttgagcarctgcaggtcccaaggctacgttcagatgcttgctacggtttggcaagagctctagcagaa

SEQ ID NO: 7410 - DNA, 121 bp, Artificial Sequence
  Description of Artificial Sequence: Synthetic probe
cagttttctccagttccatctcggcaaaaatgcctccaacacaaatgctacaatcagattragcagcagcaatactgaaataaggtaaaagctgacaaaataaatcaggctccaagaactt

SEQ ID NO: 7411 - DNA, 121 bp, Artificial Sequence
  Description of Artificial Sequence: Synthetic probe
ctgccgtgaggaagctgatggatttcgacagtgaggttgggcaagaaatgaggagaagagmtgcagaactgcgccacgcctctggtagcgctgtcaaggaaggcggctcgtcgcatcgttc

SEQ ID NO: 7412 - DNA, 121 bp, Artificial Sequence
  Description of Artificial Sequence: Synthetic probe
tcaagatggaggcagtctctggtcaamcggaaggatcacagagaagagggcaatgagggcratggattctacggtggaataaggaagcttcagaacaaggatgaaatatccaagtggaagc

SEQ ID NO: 7413 - DNA, 121 bp, Artificial Sequence
  Description of Artificial Sequence: Synthetic probe
gtttgaacttctgctgtaatgctacatatagtaacatgaacactggatatgacgagtgttwtacagtgttcttcgataaaattacaggtatagtaggcgtgtcttcagtttcttgttgcct

SEQ ID NO: 7414 - DNA, 121 bp, Artificial Sequence
  Description of Artificial Sequence: Synthetic probe
gggagggagcaacagaggtccaaaacttgactattggagcgctccattccgtttaggttgygtttacggttttggaggttttggcttgagtttgccacagcaagtgaacgtctgtgtctgt

SEQ ID NO: 7415 - DNA, 121 bp, Artificial Sequence
  Description of Artificial Sequence: Synthetic probe
ctgatataaccatggagagcaatcatgatgcactggaaagccaaaccttgaagacacccawtgatgctcaggacataaccaaagacccaccaactataccaaatgagaagaggaatgagga

SEQ ID NO: 7416 - DNA, 121 bp, Artificial Sequence
  Description of Artificial Sequence: Synthetic probe
tgctcaggccagccagaccagacagattcgccggaagatggttgagattatggccagccaygcttcaacctgtgacttgaaggagctggttgcaaaattcatccctgaggtcattggaaag

SEQ ID NO: 7417 - DNA, 121 bp, Artificial Sequence
  Description of Artificial Sequence: Synthetic probe
aaaatcatattgtgttcggagtggaacgagacgacattgaaatgatctgcagatgatgaayaccgtgctccaaacagctccaggtggctgacattgtgcttcaaggtccatttttccagta

SEQ ID NO: 7418 - DNA, 121 bp, Artificial Sequence
  Description of Artificial Sequence: Synthetic probe
atccacgtcatcatctgactctgctgagcaatgatagcctgagcctgctccctctgtctcstctcgttctccaagtcctcccgaatcttgtcgatggctctagacgacgttgtcgaacggr

SEQ ID NO: 7419 - DNA, 121 bp, Artificial Sequence
  Description of Artificial Sequence: Synthetic probe
agagtaaaatcatgtcgatcttgttatgctccccaagggcgaatggccacaatggtgccaratatgtggaggcagtggcctagattactgccaccggtgtcatggaacaggcgaatatcga

SEQ ID NO: 7420 - DNA, 121 bp, Artificial Sequence
  Description of Artificial Sequence: Synthetic probe
gcctggcgccattcaagatgggtgagaaggtcacattgtccaaacgactttcctctcggcmgacatatgatgacgagagcagcagcctccgataggaaacgccttctttcaatttgttggt

SEQ ID NO: 7421 - DNA, 121 bp, Artificial Sequence
  Description of Artificial Sequence: Synthetic probe
tggtgaaattcaagagcagtcaagcttcccatgctagtagttgtgcttcggagtagtctgygtattactccaccttgtcgctgcgactgaagctatgtaacatttgctcattttgcattga

SEQ ID NO: 7422 - DNA, 121 bp, Artificial Sequence
  Description of Artificial Sequence: Synthetic probe
tacccaccgttggcgatgaaagtccccttgaacgcctcccggtatggcaacagccgcttcrgcaccacccgccgcccatccacgacggccatcctcggctcaatcatgtgaaggtagagga

SEQ ID NO: 7423 - DNA, 121 bp, Artificial Sequence
  Description of Artificial Sequence: Synthetic probe
ggtgagaacgtgtcagctgctgatctgagcctgggcccgaagctctttcatctcacggtcrccctggagcatttcaaaggctggaagatcccggagacgctcaccagcgtccatgcctaca

SEQ ID NO: 7424 - DNA, 121 bp, Artificial Sequence
  Description of Artificial Sequence: Synthetic probe
ctctttcggcatgacgccaaaatctgtaaggttgcccaagaatggcgagatgctcttatcygtgcacgggtctcctcttggaatgtacaaagaagaaaacctggcacctattactgaatct

SEQ ID NO: 7425 - DNA, 121 bp, Artificial Sequence
  Description of Artificial Sequence: Synthetic probe
gtatccagacattgctctttcaggtgtgccaatggatgataaggttggcaacagtattggraagcgccttgccaacatgctgcagtcgtacccagccccacctgcaatggctgaagaattc

SEQ ID NO: 7426 - DNA, 121 bp, Artificial Sequence
  Description of Artificial Sequence: Synthetic probe
tgtatgtgaaatgtcccgagttgattgatctgaacctcaactcttgtacgaatctgcaccmaggcattatgtcctttcctgtttcatcaggttgtcaagtcagtaactgttattatcattg

SEQ ID NO: 7427 - DNA, 121 bp, Artificial Sequence
  Description of Artificial Sequence: Synthetic probe
cagccaggtaacaacacacagggctttggtcagcatatagcctattgccccaaaattcccraggagtcgctccaccgcggcatggacatttccagaggtagctgtcagcgctcggatgttc

SEQ ID NO: 7428 - DNA, 121 bp, Artificial Sequence
  Description of Artificial Sequence: Synthetic probe
ttctatgctctccttgaggtttctttaccagagcaccgcaggcttgtggcagcgtaagttytcggaaccacaaaatcaccaccagcgacgcggatcaccagatcggagcgactagtctgtc

SEQ ID NO: 7429 - DNA, 121 bp, Artificial Sequence
  Description of Artificial Sequence: Synthetic probe
tcccggccaactggaggcccaacaccttctaccgctcaatcgtgcagtacagctgaagaargtcatcccaccggccgtcgatgctccgagtacctagtaatgctactactgtactagtact

SEQ ID NO: 7430 - DNA, 121 bp, Artificial Sequence
  Description of Artificial Sequence: Synthetic probe
ccacgcccaatcgccagggggcgatgtcgggacccagtacaggtcagggatctactactayaccctggagcaggagaaggcggctctggagtccgtggagagacagcagaaggtcttgaac

SEQ ID NO: 7431 - DNA, 121 bp, Artificial Sequence
  Description of Artificial Sequence: Synthetic probe
aagagtgaagaggaagaaccagaaaaaggcctcaggtggtggtggtggcgacggcgaggargaggaagagtaagagctcagccttttctctgaaggactttgtggcagaaattgtgaaaac

SEQ ID NO: 7432 - DNA, 108 bp, Artificial Sequence
  Description of Artificial Sequence: Synthetic probe
agtctaggacgttcttcaaccytcatcaagcacgagatggtcgaccgsctcggcatctccatccagttcctcgacaccaggtacgtcagcggcttctgccagctcagc

SEQ ID NO: 7433 - DNA, 121 bp, Artificial Sequence
  Description of Artificial Sequence: Synthetic probe
catacaactatggtgtcacagaatatagcaagggcaacgcatatgctcaggttgctattgrcaccgatgatgtgtacaagagtgctgaggctgtcgagctggttaccaaagaactaggggg

SEQ ID NO: 7434 - DNA, 121 bp, Artificial Sequence
  Description of Artificial Sequence: Synthetic probe
gctcgagttcgtgcaccgagagatggaggtgtaccctgtgtggctatgccctcaccgtctkttcaagctccccgtgaagacgatgatctacccggaggccgggttcgaggtgaaccagagg

SEQ ID NO: 7435 - DNA, 121 bp, Artificial Sequence
  Description of Artificial Sequence: Synthetic probe
tgcatccgtgacctcgggatgcccttcttcaaccacgaggtggtgaagaaagcgctggtgrtggcaatggacaagcagaacgaggccagcatcctggccctgctgcaggagtgcttcggtg

SEQ ID NO: 7436 - DNA, 121 bp, Artificial Sequence
  Description of Artificial Sequence: Synthetic probe
agcatcattcatgggggagatatggcaagttcctccaatgttttctgctattaaggttggyggtgaaaaaatgtatgacaaagcaaggaggggtgaaacagtagagctttcacctagacgt

SEQ ID NO: 7437 - DNA, 121 bp, Artificial Sequence
  Description of Artificial Sequence: Synthetic probe
cagcccaatcttcctgtcgatggaygccaccttggcactggcggtcgacgtgaagccgtgmgtctcgtcgaaagatttcgccctgccgacggcgtctttgcccagggtgaaacccctcgca

SEQ ID NO: 7438 - DNA, 121 bp, Artificial Sequence
  Description of Artificial Sequence: Synthetic probe
gtcctttggtcactcttcatagtcattatgcaagcatcctgggcttatgtatggtattagytgtagggtctgcatctttgtctggcacaggtgtactggtattggtatgtatgtgatttgc

SEQ ID NO: 7439 - DNA, 121 bp, Artificial Sequence
  Description of Artificial Sequence: Synthetic probe
aagcagaagaagcttgtcgcacagtcagtcaataaatgctgacttgtagtggaagtcatcratcgtcgagtaaatgtgcccaccatcaacatggaaatcaatagcttccttgatcttgctt

SEQ ID NO: 7440 - DNA, 121 bp, Artificial Sequence
  Description of Artificial Sequence: Synthetic probe
ggacaagacccccgagttcatcatcaagatcctccagttccttgtccccctggccatcctyggcctggccgtcgccgttaggatgtacaccaagtcggagtcggcttagttagccggtgcc

SEQ ID NO: 7441 - DNA, 121 bp, Artificial Sequence
  Description of Artificial Sequence: Synthetic probe
tttcaccaaagcgggattcactggctataaccttgtgaagaaactaggagctcgcggcgtmtttgaggtatatccatgagacaagcccaataacattgtgcggtttggtgcaagagatgtg

SEQ ID NO: 7442 - DNA, 121 bp, Artificial Sequence
  Description of Artificial Sequence: Synthetic probe
aggatccattgaccgctgcgagacaagctgacccagatatccttacccaagacatgctgamgaagtatattacatatgccaagttaaatgtattccccaaaatacatgatgctgacctgga

SEQ ID NO: 7443 - DNA, 121 bp, Artificial Sequence
  Description of Artificial Sequence: Synthetic probe
ggactttgaaaccgtcgtctgaacctctaaaataatccgactgtaaagcactaaactcgaktttttgggacttttcccccaaattttggttggctggggtcaagtgatttgttgagtggtt

SEQ ID NO: 7444 - DNA, 121 bp, Artificial Sequence
  Description of Artificial Sequence: Synthetic probe
atgtttgaacctggttcgcaccttggttaatatgcatgttatgtggcctttgtctcttacmtwggttaatatgmatgtgatgtggccttgtttagcttgctactgcctgtttctttatgta

SEQ ID NO: 7445 - DNA, 121 bp, Artificial Sequence
  Description of Artificial Sequence: Synthetic probe
cgatgccgcgacgtctagaagtgtgacgatttgccatgatacttacgtcgagtcgcttgcrktttccttcatcgaccaagccggtaaaaagcatactgctggtccrtggggtgccaaatac

SEQ ID NO: 7446 - DNA, 121 bp, Artificial Sequence
  Description of Artificial Sequence: Synthetic probe
ggtaagctgctcttgctgtcaagaactcatggtttcgcagaatgtggccaatttcttttcytgcaactgcagtttgtggatctaacatgtgcttttttgtccttatagtctgcatgccaag

SEQ ID NO: 7447 - DNA, 121 bp, Artificial Sequence
  Description of Artificial Sequence: Synthetic probe
ccttggctggcaggaacagggtgatggtaagttattctatggggtgcatgttgacaatggycgtctcggcgggcaagtaaagaaaactctgcgagagataattgagaagtacaacttggat

SEQ ID NO: 7448 - DNA, 121 bp, Artificial Sequence
  Description of Artificial Sequence: Synthetic probe
cctcatgtagtactaactgtgcttcttcctacaattgtgtagacacatccaacgccccgtrcagccaaaacactgaggattacgccgccaccaccaccacccgatcatcagattgctgctg

SEQ ID NO: 7449 - DNA, 121 bp, Artificial Sequence
  Description of Artificial Sequence: Synthetic probe
acagttctacttcagaactgctgatatcactggaaaaattgagttgcctgagaacgtgaaratggttttgcccggtgacaacgtaactgcaactttcgagttgatatcccctattccactt

SEQ ID NO: 7450 - DNA, 121 bp, Artificial Sequence
  Description of Artificial Sequence: Synthetic probe
aaggaaatcacagcagatgctcctaaatcaaaaaagattacctttggtgattctgatgagkagtaaccaacagagaccttgctggtgtattttcttgattgctcaatagcagtacgggaat

SEQ ID NO: 7451 - DNA, 121 bp, Artificial Sequence
  Description of Artificial Sequence: Synthetic probe
cttgccaacgttatcgtcaaccccatgcaaggtagtgtgggcatgcagtagtgattgccgytgttgatgaaggtcctgaagaattgacacaccaagatcttctgtctccagcatagttctt

SEQ ID NO: 7452 - DNA, 121 bp, Artificial Sequence
  Description of Artificial Sequence: Synthetic probe
caagaagggtgggaacaggttcatcaagaccgctgcttacggccactttggccgtgacgayccagacttcacatgggaggtggtcaagccgctcaagttcgacaaggcatctgcctaagaa

SEQ ID NO: 7453 - DNA, 121 bp, Artificial Sequence
  Description of Artificial Sequence: Synthetic probe
ttgcgggcgacgagttcacacttgcggaccttgtccacatgcccaacactgaacttcttgygagcaagaccaagacggcgggattgatcaccgagaggaagaatctgtccagatggtggga

SEQ ID NO: 7454 - DNA, 121 bp, Artificial Sequence
  Description of Artificial Sequence: Synthetic probe
ctcacgtcacgacgcagatgatgtgagggagaacacgcacagtttcaatggtgtaaacgcrcttgcgtgagcacagtagaaactacaaatccatgagtaccagggtttgagcggaataacg

SEQ ID NO: 7455 - DNA, 121 bp, Artificial Sequence
  Description of Artificial Sequence: Synthetic probe
tgaagatctgctttatctagaattcctcgacaagtttgagaggaaatttgtggcacaaggrgcatacgatactcggaacatcttccagtcacttgatctagcatggacattgcttcgcata

SEQ ID NO: 7456 - DNA, 121 bp, Artificial Sequence
  Description of Artificial Sequence: Synthetic probe
tactcagtagcaaagagcccatgacaaaatgtaaggacttagacggtgacatatcaaattractcttgaaaatatattttctacatccatgatatcatcgtcttacatgctaccaaaaaaa

SEQ ID NO: 7457 - DNA, 121 bp, Artificial Sequence
  Description of Artificial Sequence: Synthetic probe
ttatctctcctcctaaagtacagggaaacacgctaagcccttcaaagatacagcccactgrctgctttcttattatttcatctactcaagaattgaagaccacctcaccatcttggctcat

SEQ ID NO: 7458 - DNA, 121 bp, Artificial Sequence
  Description of Artificial Sequence: Synthetic probe
tgacatgactgttgacgaggcggtggaccttgttgacaagtgcatcaaggagatcagactycggttggtggttgcgcctcagaatttcgccatcaagatcgttgacaagaatggtgccagg

SEQ ID NO: 7459 - DNA, 121 bp, Artificial Sequence
  Description of Artificial Sequence: Synthetic probe
ggtggagtacgcgatggaggcgatcggcaacgccgggtcggccctaggtatcctggcggcsgacggcgtggtcctcgtcggggagaagaaggtcacctccaagctcctccagtcctcccga

SEQ ID NO: 7460 - DNA, 121 bp, Artificial Sequence
  Description of Artificial Sequence: Synthetic probe
gctgatcatagaattcccattcaccaattattgccaaacacgccctcagattattggacarcaactagtattaagcagctagtagtaagcaagcacacaccctgacaccggctacaggagg

SEQ ID NO: 7461 - DNA, 121 bp, Artificial Sequence
  Description of Artificial Sequence: Synthetic probe
gtatacttgctgaatgacagctatactcagcagtgattcaaggcagaacagtccaaatccracaaagtaaaatatcccaacaatagcactcttggttatgacatcaatggcaggcaaaatc

SEQ ID NO: 7462 - DNA, 121 bp, Artificial Sequence
  Description of Artificial Sequence: Synthetic probe
caatgcacactgacaggtaagaataataatagaacaacatgcatgcttattggattggcayccgattaaaatataaatgtatgtcgaacaaataacatcaacatgagaggaggctgtgtgc

SEQ ID NO: 7463 - DNA, 121 bp, Artificial Sequence
  Description of Artificial Sequence: Synthetic probe
gaaagatgaggcattcgagatctggtcgaaggggtgggcttgcctgttccccgagggcgaytcgtctagggcgttgctagagcaggtccagaagagctactacttggtcagcctcgtggac

SEQ ID NO: 7464 - DNA, 121 bp, Artificial Sequence
  Description of Artificial Sequence: Synthetic probe
caccacaccaacgccccctgctgatgctaagcccaatccaacctatttccaatcttctcckgttagcccagacacgatccagcaaacggaggttcttctccacctgtacgcgtaccagcgc

SEQ ID NO: 7465 - DNA, 121 bp, Artificial Sequence
  Description of Artificial Sequence: Synthetic probe
gcaccaggcggcgcacccaacatgccgaaccagcagacagggtacacaccaggcagcgcamccaacatgctgaaccagcagtcgggctacgctcccagtggtgctcctaactatcagcaag

SEQ ID NO: 7466 - DNA, 121 bp, Artificial Sequence
  Description of Artificial Sequence: Synthetic probe
gagtctggcctacttcgactcgtaccggagggacaggctgcccgccaacctggtgcaggcrcagagggactactttggggctcacacctacgagagggtggacatgccgggctccttccac

SEQ ID NO: 7467 - DNA, 121 bp, Artificial Sequence
  Description of Artificial Sequence: Synthetic probe
gctgcgttcaactccaggattgcattctgcctcaacatgcacaacgaagcagtcaaggctytgagattccctccgaattctcacaaggaaaaagagagtgctgagaagaggcgagagagac

SEQ ID NO: 7468 - DNA, 121 bp, Artificial Sequence
  Description of Artificial Sequence: Synthetic probe
tatgtagtttgtgccatcagcgcccttgaactcgccgcctgcgtacttggagtacaacacrgtgctgcctgctgacaccgaaagtggctgtctgttgccttcctcgtcgagagcgcctgga

SEQ ID NO: 7469 - DNA, 121 bp, Artificial Sequence
  Description of Artificial Sequence: Synthetic probe
tcaggttccttccaccgttacaccagatggattcctttattctgatgtgtacaacattcaycaggagaagaagaaaaaagggtccagtacaaacactagtttgttccagctcccagtagat

SEQ ID NO: 7470 - DNA, 121 bp, Artificial Sequence
  Description of Artificial Sequence: Synthetic probe
tcgcgcaggagagcttatctgctgctgattcaggatatggtgttctccattttcttctacygatgggctacctggagttgatgttcatttgatggctggttttattttgtacgggaaggca

SEQ ID NO: 7471 - DNA, 121 bp, Artificial Sequence
  Description of Artificial Sequence: Synthetic probe
acccttggaagtgccaacagcaacactaacatcaacgtagtctctgtatatgatgtcatcrccgtcaatgacagcattcacgattggctggttttgcagtccagaaacagccgccttgaca

SEQ ID NO: 7472 - DNA, 121 bp, Artificial Sequence
  Description of Artificial Sequence: Synthetic probe
ggtagtatggtacattcggaacaggatccaaccattcgaaatgcaacttaacttatcagckaagacaggatttccagatcaacaaacggtcacgcgaaaaccatagatttgatgttgccct

SEQ ID NO: 7473 - DNA, 121 bp, Artificial Sequence
  Description of Artificial Sequence: Synthetic probe
  modified_base (93)..(93): a, c, t, g, unknown or other
acctcaggtttcaggtttgcagccagattcgatccaatccaggatcgatccgaccacatgrcattattagactcatactcatagatcccccanaaggggatcgataactcaaccaccacga

SEQ ID NO: 7474 - DNA, 121 bp, Artificial Sequence
  Description of Artificial Sequence: Synthetic probe
gcgtttttcaacaacgcattctacgctagagtaggaggaatcagcacgatcgagatgaatmggctcgagctggatttgttatttaacctggacttcaggctgaaagtgaacctagagacgt

SEQ ID NO: 7475 - DNA, 121 bp, Artificial Sequence
  Description of Artificial Sequence: Synthetic probe
tattggaattgagatctggacaatgcaggatggcatcctgtttgacaatatccttattgcygatgatgagaaggtagccacctctatcctggagaagacatggaagcctaagtttgatgtt

SEQ ID NO: 7476 - DNA, 121 bp, Artificial Sequence
  Description of Artificial Sequence: Synthetic probe
cttctgccagctcagcaaggacctcaacaagatatgcacattgcacgccaactgctgtgtyggccttggcgccaagctgcatgatctcaggaacgtgcttgatgtctggaggaactacacc

SEQ ID NO: 7477 - DNA, 121 bp, Artificial Sequence
  Description of Artificial Sequence: Synthetic probe
tatacacataacataacaagaacaaagcggaaacatcgcacgcaaatagaagttcaacaayggccattgtccgtggagagaacacggcctatttcgtcatcatcaccctgatcatcattat

SEQ ID NO: 7478 - DNA, 121 bp, Artificial Sequence
  Description of Artificial Sequence: Synthetic probe
gagcgtgtgcgacatcgcgccgcggggcctgtcgatggcgtcgaccttcgtgggcaactcracgtcgatccaggagatgttcaggcgggtgagcgagcagttcacggccatgttcaggcgg

SEQ ID NO: 7479 - DNA, 121 bp, Artificial Sequence
  Description of Artificial Sequence: Synthetic probe
gtgcggacttgccgcagtagttgaggatgaggctgagcttgatggggacgttgaggacgaygccgagcacgttggccttgagcgccgtgcagaggcagacggcggcctcgaggtcggcgag

SEQ ID NO: 7480 - DNA, 121 bp, Artificial Sequence
  Description of Artificial Sequence: Synthetic probe
tgcttgagcgctcttggttatcattaggtccaaatgttccttggaggataatggcctcatygttggagttgatcagtattaagctttctgtcctttctgtcactcgatctctctccctcgc

SEQ ID NO: 7481 - DNA, 121 bp, Artificial Sequence
  Description of Artificial Sequence: Synthetic probe
gtcttcatggccgacatggccatgctcacaaacacaccgggtggcaaggagaggtaccggrgggagttcgaagtgttggccaagtgcgctgggtttggcgctttcaaggctacctacatct

SEQ ID NO: 7482 - DNA, 121 bp, Artificial Sequence
  Description of Artificial Sequence: Synthetic probe
ttgaagacaaacaatgatgttctatctgtatactgtttaggtattttttgggggaaatttstttgaaattcctactactgctagatcgaccaaaatctattctgttttgtatgagggctat

SEQ ID NO: 7483 - DNA, 121 bp, Artificial Sequence
  Description of Artificial Sequence: Synthetic probe
aggcgtgtgtccgcatggccaggcagagcggaagcgtgagtggggtcgcgtccaagtgaaygagtgaggtggtaggcacacaaattttgccttgtccggatggttttgaataacctggaat

SEQ ID NO: 7484 - DNA, 121 bp, Artificial Sequence
  Description of Artificial Sequence: Synthetic probe
ttttccctcccgtgaagtagccatgtaatcatgctgttcgtcgcagatgaactgaaagtcycgccacagctgaactcatgaaaagaaagacgcgtgcttatcttctgaagatgttaagacg

SEQ ID NO: 7485 - DNA, 121 bp, Artificial Sequence
  Description of Artificial Sequence: Synthetic probe
acttataggtgaatacttggagtgggcccagctaagtcacaccatgaaagtttatttgccrgaatgtaatctgcccaaggacttttggaagaatgagctaaaggatttttctaacaaaaat

SEQ ID NO: 7486 - DNA, 121 bp, Artificial Sequence
  Description of Artificial Sequence: Synthetic probe
cattggttaggctgttcaagccatttgacgagctcgttgttgacagcaaggattttgatgkttctgctttggagagcttcattgaagctagcagcaccccgaaagttgttacttttgacaa

SEQ ID NO: 7487 - DNA, 121 bp, Artificial Sequence
  Description of Artificial Sequence: Synthetic probe
cctccgaaaaatcttgatctgtattcttttggcgctagatacttcttagttcactgcgctrtagaaacttgggctaataaatttgcagacaaagcaagcagatcaagcaagagaaaaaaca

SEQ ID NO: 7488 - DNA, 121 bp, Artificial Sequence
  Description of Artificial Sequence: Synthetic probe
ctctggcgaaattatcatcaaacatctgaacaaagagcaggaagctgatcagagcaatttycgcgattctgagactaatgctgagttggaagttcaggaaaaaatctctttgttggaatgg

SEQ ID NO: 7489 - DNA, 121 bp, Artificial Sequence
  Description of Artificial Sequence: Synthetic probe
tttgtattcaccaacaacaaatttcgagaatcatttactatgaatgtataataaccatgcygctacattcctgatacatatggactggaggcctgtagatctacagataaggggccctcga

SEQ ID NO: 7490 - DNA, 121 bp, Artificial Sequence
  Description of Artificial Sequence: Synthetic probe
tgtcaagcagtggttgagtgagattgataggtatgccagtgacagcgtgtgcaagcttctrgttgggaacaaatgcgatttggttgatagtaaagtcgttgacacagaggaggccaaggct

SEQ ID NO: 7491 - DNA, 121 bp, Artificial Sequence
  Description of Artificial Sequence: Synthetic probe
tgggaaatatagcatggggcatcggtgtgagtggcgaagtaatcctccgcattatctttgygttgatgataattgctaaatcgtctggaactattttgcccgttgttttgtcttttgacat

SEQ ID NO: 7492 - DNA, 121 bp, Artificial Sequence
  Description of Artificial Sequence: Synthetic probe
ctccacgttgtctaccgcgtcggcgaccttgacaagacgatcaagttttacacagagtgcytggggatgaagctgctgcggaaaagggacatcccagaggagaggtacaccaatgcctttc

SEQ ID NO: 7493 - DNA, 121 bp, Artificial Sequence
  Description of Artificial Sequence: Synthetic probe
ttccagttttcatggttcgctcttctcggcgaccccatttttatctctttgggcggcactrctatatgctgggtgtgataaaactctttctgcttcttctgcctgtttaataggtactgct

SEQ ID NO: 7494 - DNA, 121 bp, Artificial Sequence
  Description of Artificial Sequence: Synthetic probe
gtttttgtgagggattcatagtgtgatcccttcgggctgtctgtgcctatggtgttaagcyatcccatcttcatcttctctttgctgattctaaaattcagcgggatgcccatcttcatca

SEQ ID NO: 7495 - DNA, 121 bp, Artificial Sequence
  Description of Artificial Sequence: Synthetic probe
gtctggctggctctcgatgggccgcaactggggccagatatggcacatcaacttagatctyaaagggcaaccggtgtccttcgagctctcctcaagcgacggcacgacgatgaccaacttc

SEQ ID NO: 7496 - DNA, 121 bp, Artificial Sequence
  Description of Artificial Sequence: Synthetic probe
gtggagcgcacacagttctgggtaacagaactggggcttaggaatgttcacttttatgttygcaaatgcaacggtatcttttgagcaaatcgtgtcatcgtaccctggtccattatcactt

SEQ ID NO: 7497 - DNA, 121 bp, Artificial Sequence
  Description of Artificial Sequence: Synthetic probe
caaatttgagaataagtgcggatggtgtaggctcgatgagtggcaggttgcttttaggcayggctgaatctatactctctgaagagctcatagatacaactggtgcaggtgatgcattcat

SEQ ID NO: 7498 - DNA, 121 bp, Artificial Sequence
  Description of Artificial Sequence: Synthetic probe
tatacatcctaagataccattacagcacccgagcattgtatgactatgatgaagcagataycttctggactcttgactgctttgaagacatagccacaggtgctgcggtgagcactgcatg

SEQ ID NO: 7499 - DNA, 121 bp, Artificial Sequence
  Description of Artificial Sequence: Synthetic probe
gaagctatccgagctcctgcaggaggcgatgcagaacggcactgaagagaacaccaccacygtcaccggagaaccagatagcagcaagaacggagatcagcagccacaatccgtcaccgca

SEQ ID NO: 7500 - DNA, 121 bp, Artificial Sequence
  Description of Artificial Sequence: Synthetic probe
tagcatgtcatcctctcctatgaagaaccagattgacctgaacattcagcctgaacgggargaggaacwgtcaccaaaatccgatgcggttggtgccttgagaattcctcgagacaatcca

SEQ ID NO: 7501 - DNA, 121 bp, Artificial Sequence
  Description of Artificial Sequence: Synthetic probe
aaagaagaaatgggatggtttcacagagagattatcaaagattctaaatttagaagagccrtggactttaattattgatgatgcattggcggcttcatttattgctccagccacagatttg

SEQ ID NO: 7502 - DNA, 121 bp, Artificial Sequence
  Description of Artificial Sequence: Synthetic probe
gccgttggatgcctttgaaggcggaacggcaggagatcctttctgggttctcaggttgatygggtatccagtctcagctgacatcccgcaagarcaacgcactgatactggatgtggagct

SEQ ID NO: 7503 - DNA, 121 bp, Artificial Sequence
  Description of Artificial Sequence: Synthetic probe
ctgcagcgaagagtggatagccagtatctgaattaggcttctctatattaggcactccackacctgtttttgtttatctttaaatttccgtcgtcatgtatttattttttgctgcggttct

SEQ ID NO: 7504 - DNA, 121 bp, Artificial Sequence
  Description of Artificial Sequence: Synthetic probe
ttccaaggccttcatagaaaaggctaaaatccttagaaagaccctaggtggcggaatgagrcaggtgggtgttctatgtgctgctgcccatgtcggagtccgcgacaccgtaggcaagctt

SEQ ID NO: 7505 - DNA, 121 bp, Artificial Sequence
  Description of Artificial Sequence: Synthetic probe
ggtaacctttccaggatttgtcgactgtgtttaccttggcgcaccgagtgagcttaccctrgacaatggattgggtgacaaaattgtcatctcaaatacaaactggtcagatgcagtgttg

SEQ ID NO: 7506 - DNA, 121 bp, Artificial Sequence
  Description of Artificial Sequence: Synthetic probe
aatttctggttctggtcgtttcctcaaggagcaaaatcctgatatcaaggttattggtgtrgagcctactgaaagtaacatactctctggtggaaaacctggcccacataagattcaaggc

SEQ ID NO: 7507 - DNA, 121 bp, Artificial Sequence
  Description of Artificial Sequence: Synthetic probe
cgtggggcagctcgagttcttctacgaccaggcgccagacgccatgaggagcatgtgctcmgcgctctcgctcaccaccgtcgccctagggaactacctcagcacgctgctcgtcaccgtg

SEQ ID NO: 7508 - DNA, 121 bp, Artificial Sequence
  Description of Artificial Sequence: Synthetic probe
cggcggagcttctttgaagcccgagttcatcgacatcatcaacgccgccagcgtgaagtcygcctaagaagatgcttggtstckygcgcccccttggacgatgaaaaggaacttgggctgg

SEQ ID NO: 7509 - DNA, 121 bp, Artificial Sequence
  Description of Artificial Sequence: Synthetic probe
acagagatctggtcgatcccatggagacctgatacgagcttgagcgccttctgcttgtgcytgtcgtcgtgcaggtccagcttcagcaccaccttctgcatccttgaacggcggcgaattt

SEQ ID NO: 7510 - DNA, 121 bp, Artificial Sequence
  Description of Artificial Sequence: Synthetic probe
agctgcctgtgtttgaggaatcctggagggggaatgctggacagcacttaccaggctggamccaaaatgctggtatatctaatggtgctaactctggtaactcgggtgccaacggtaggca

SEQ ID NO: 7511 - DNA, 121 bp, Artificial Sequence
  Description of Artificial Sequence: Synthetic probe
tttatctacagctactataaaactaataactgtagatggagaggagaagataggatgttcrgttggaacatgtccagttgatgccgcttataaggctattgacaagatagtacagattcaa

SEQ ID NO: 7512 - DNA, 121 bp, Artificial Sequence
  Description of Artificial Sequence: Synthetic probe
tttcattgagctgataaagaaccctcgctacaacttttggaaccgatccttcacgcatatygctcccgagatcaggttgctgttcgagtctgtcgcgaagtcgtgcgctggaaaagcttcg

SEQ ID NO: 7513 - DNA, 121 bp, Artificial Sequence
  Description of Artificial Sequence: Synthetic probe
tggtggatatctacatcatgctagggaaagcattcgtaccatatctggaggggcttagtakcacacagctgcggctagtaacaatctacgcaaatcggatatcgcaggcaaggtctggcac

SEQ ID NO: 7514 - DNA, 121 bp, Artificial Sequence
  Description of Artificial Sequence: Synthetic probe
cttacaaggacgctctcgtgagcggcggcaactagcggtttcgctgtgctgcgcggtagcrataagaggttgcccacctcaatgtgcaatggcatagctgctggtgaaacttttgtttctg

SEQ ID NO: 7515 - DNA, 121 bp, Artificial Sequence
  Description of Artificial Sequence: Synthetic probe
ctcctgcaaactatttccatgttctgcgtcggcagatacaccgcgatttcagaaagccttkaattcccgggatccgaagaacctccttcgtcacaaggactgcaaatccagtctatctgaa

SEQ ID NO: 7516 - DNA, 121 bp, Artificial Sequence
  Description of Artificial Sequence: Synthetic probe
ggagttttattctggtcatacatctcagtgaccaaacagtacaggaggtcgatacaaaatkgccacctgaaacattttatccacgaaaagaatgcatcgacakctcgtataccctcttcac

SEQ ID NO: 7517 - DNA, 121 bp, Artificial Sequence
  Description of Artificial Sequence: Synthetic probe
ccaggcgctggaacactagctaagaatacggcggctgccacgacaggaccagcagctaagratgtggctcccggcactggaccaccagccaatcgccaacataacccaatggtgaataatg

SEQ ID NO: 7518 - DNA, 121 bp, Artificial Sequence
  Description of Artificial Sequence: Synthetic probe
ctagctttcattaggacaacataaccaactgatatgacgtttaccctgcaagggttcaacwaaggcaacattgcttattttccccatggtgatactactactagtagtaaagttggaagca

SEQ ID NO: 7519 - DNA, 121 bp, Artificial Sequence
  Description of Artificial Sequence: Synthetic probe
acttcccgcggaggcatttttccccctacgctttgccattggagaccttccctccgcttcygccggcgttcttgccgggaaacgacctcccgctactcgtgacgagtcccttgatggctgc

SEQ ID NO: 7520 - DNA, 121 bp, Artificial Sequence
  Description of Artificial Sequence: Synthetic probe
gcccaggacataaggacgagaaattacataatgcaatagctgtaatagaccaaccagccarctggaataactgaatggccattttccaataacgcaacacatactattcttcctaatataa

SEQ ID NO: 7521 - DNA, 116 bp, Artificial Sequence
  Description of Artificial Sequence: Synthetic probe
taaagatcaataaagacgtactcctatatccggaaagaataccaagacatgagacattacmatagtttctaccaaacaaaccctaatatttcagcaagcacacaagagaacaaaag

SEQ ID NO: 7522 - DNA, 121 bp, Artificial Sequence
  Description of Artificial Sequence: Synthetic probe
ggggcgagtccgtctacggcgccaagttcgccgacgagaacttcgatctgcgtcacacggrccccggggtgctctctatggccaacgccgggccaggcaccaacgggtcgcagtttttcat

SEQ ID NO: 7523 - DNA, 121 bp, Artificial Sequence
  Description of Artificial Sequence: Synthetic probe
tgaaggcattgagcacctgcgcagcttcctcaacctgccatctgagatcgtgcctaacacrctcaagaagtcggccaagcctcctggccgcccattcggatctggccctcctggtgaccgc

SEQ ID NO: 7524 - DNA, 121 bp, Artificial Sequence
  Description of Artificial Sequence: Synthetic probe
acactgaccatggatatagtatccatccctaagaccaccaaacttctcttgcccagcagtrtcccagcagtagaaacgaatctttccacagttggtggtgaaatccaatgggtgaacttca

SEQ ID NO: 7525 - DNA, 121 bp, Artificial Sequence
  Description of Artificial Sequence: Synthetic probe
tgatcatattgtcattgtcatctactagtagtagtagtagtatatcactaggttggcctgrtctagctttgtacagtcgagattattctgtgctctggtcatctactagctggctatttac

SEQ ID NO: 7526 - DNA, 121 bp, Artificial Sequence
  Description of Artificial Sequence: Synthetic probe
tttattcttccatatctggacatgtataaactacaaatgtccaccggatgcgtccgagacraggtcaccttcagacatcggaaagtcacttcttgccatcggcaccggacttggccttctc

SEQ ID NO: 7527 - DNA, 121 bp, Artificial Sequence
  Description of Artificial Sequence: Synthetic probe
gacccctcgctcgtccgcgcagagcttgacgccggtgccccacacgttgcagacgtagctytggttgcagaactggtccgcgaagtagggccagcacaggaacggcacgccgtgcagcagg

SEQ ID NO: 7528 - DNA, 121 bp, Artificial Sequence
  Description of Artificial Sequence: Synthetic probe
cccccatccccaagccctggttttgctgaatctgacctgtttccgttagtcttgcaaagaytggcagagcttgaagagaaggttcagacgcttcaagaaaaaccttctgaaatgccttgcg

SEQ ID NO: 7529 - DNA, 121 bp, Artificial Sequence
  Description of Artificial Sequence: Synthetic probe
catgtcactttcctcctgttgccgtgatccattgagagcattacagtgaggacagtaatakgtaatgaatgtgaagtcctctttccttgcaagaccattatgcatatggcagttgccacat

SEQ ID NO: 7530 - DNA, 121 bp, Artificial Sequence
  Description of Artificial Sequence: Synthetic probe
ggacctccatgacgagctctgaatgtctggtttactatctatttaatggcggaagccctgmatctgcatgatcaggggattatcgtcgcaaggagaaaaataaacaatcactcgatatttg

SEQ ID NO: 7531 - DNA, 121 bp, Artificial Sequence
  Description of Artificial Sequence: Synthetic probe
gatggtcttgtaccaacaccaagcgccaaatccttccccatggacaagaacaattttcttkgtttctaagttctctaaaacaacttggacagccttggcattggtgacggagtccggtagg

SEQ ID NO: 7532 - DNA, 121 bp, Artificial Sequence
  Description of Artificial Sequence: Synthetic probe
caggtgccttcgatgacaattccaatgacttcctgtacagctcatttgctggttccacatmaacagctttctggaaacaaccagttgctttrtcaaagcattcattagcagggacagagtc

SEQ ID NO: 7533 - DNA, 121 bp, Artificial Sequence
  Description of Artificial Sequence: Synthetic probe
tttgctcttcttttctgggaaacaagacgcaaggactttggagtctcgatgtctcatcatktggcaactgttgttctggttgttatgtcatatatttgcagattatctcgtgctggctcgg

SEQ ID NO: 7534 - DNA, 121 bp, Artificial Sequence
  Description of Artificial Sequence: Synthetic probe
ttcgccctcaggcttcaacgcaaggaggagtgatctagtggagatggcattctcgttgatktggttttggtggtatcctgttctgtattcgtgcactagagtttgtggttctgtaaaatag

SEQ ID NO: 7535 - DNA, 121 bp, Artificial Sequence
  Description of Artificial Sequence: Synthetic probe
agcaaaatgtgttacaaatgcttccaagtttattgaggataaacaacgaaaggatggctcmtggtttggcaattggggtatatgtttcacctacggaacattcttcggtgtaaaggattaa

SEQ ID NO: 7536 - DNA, 121 bp, Artificial Sequence
  Description of Artificial Sequence: Synthetic probe
gggtacatgcttaaaatcaggttctgagctcaagtgcgccttcaggctctgatcaccaaamgctcttgcaacagcaagttgtccatttaccctaggaacatcaccaggaaaagtagaaaca

SEQ ID NO: 7537 - DNA, 121 bp, Artificial Sequence
  Description of Artificial Sequence: Synthetic probe
attctcatcttgcaagcaaacacacatgcatgaagctgggaaacaatgtatagagtctackgcagtatcaacagaatttggagacaatgattgtacatggagtgggcgttcatggatttct

SEQ ID NO: 7538 - DNA, 121 bp, Artificial Sequence
  Description of Artificial Sequence: Synthetic probe
tcggaaggaaagcgagaggggctcatgctcgtgaagatttcacgacaagagacgatgagamttggatgaagcactcaatggggtactgggagaatgagaaagtacgattggcatacaggcc

SEQ ID NO: 7539 - DNA, 121 bp, Artificial Sequence
  Description of Artificial Sequence: Synthetic probe
tggaatgtgctggttacctgcttcgcctaggtggcttctcttatgtgccacacaagggaamggaaatctgcgggagacaaaagaaaacgctacacgttgcttatgtcgattgaggggtcaa

SEQ ID NO: 7540 - DNA, 121 bp, Artificial Sequence
  Description of Artificial Sequence: Synthetic probe
gatcggccctggctcatgttttatccagtgaacaggtattgcaagtgtagatacacatggmgggggtttggcccctacacacctcccatactgtacgaagatggttaccgtcacttgtacc

SEQ ID NO: 7541 - DNA, 121 bp, Artificial Sequence
  Description of Artificial Sequence: Synthetic probe
gtacacaaattatggtagccaaaaggcacatgatttgtcggaaaattcaaatgctgcgctmcttttctactggaatgagatgaaccgacaggtgagagtagaagggttggttcagaaggtt

SEQ ID NO: 7542 - DNA, 121 bp, Artificial Sequence
  Description of Artificial Sequence: Synthetic probe
ctcttcaccatggctattgttggtttgggactgctgctttttgcactacttattggcaacmtgcaaaattttctccaagctcttggaagccggaaactagaaatagcaacttcgacggcgt

SEQ ID NO: 7543 - DNA, 121 bp, Artificial Sequence
  Description of Artificial Sequence: Synthetic probe
ccccgtcatcgcctttgctgtccactcagcaacagcctgcccagccccgcagaaatcagckagttcatcaataccctcatccaagcatacagtgctatcgacatcgaagcacactgcatca

SEQ ID NO: 7544 - DNA, 121 bp, Artificial Sequence
  Description of Artificial Sequence: Synthetic probe
tgatgccaacaaagcaattgaacttgatccttcaatgcataaggcgtaccttcggaaaggmtcggcatgcatcaagctggaggaataccaaactgcaaaggctgctcttgaggtgggttcg

SEQ ID NO: 7545 - DNA, 121 bp, Artificial Sequence
  Description of Artificial Sequence: Synthetic probe
ttgcttgtgtactcacggatgaactgtaacagataggggaaggcaaagtcaagcatgttgktcgtccatgcaagctcaagagcaacatccgcacgaatcaagtcatagcaaatgaagaggc

SEQ ID NO: 7546 - DNA, 121 bp, Artificial Sequence
  Description of Artificial Sequence: Synthetic probe
gcacgggaactcttcagtatcccagagatcggttttggttatcaatggccagaacatcgtmatcgagggtctttccttggacggcgctcttattgtcaactccgtcgatgaagcagaggtc

SEQ ID NO: 7547 - DNA, 121 bp, Artificial Sequence
  Description of Artificial Sequence: Synthetic probe
gcggtcctcgttggagagtccctcatcaagcaagacgatcccgggaaggcaatcgctgggmtttttggtaaagatatctcaccggtgagcagtgctgtgtcaaaataggaggaaaataagc

SEQ ID NO: 7548 - DNA, 121 bp, Artificial Sequence
  Description of Artificial Sequence: Synthetic probe
cgagagcttgcagaagtccttgcacaggtatcttgaggcgaggggtatcaagcactcactkcatgactggttgaatgattacatgatgggcaaggatgagaaggagtacgtggtttggttg

SEQ ID NO: 7549 - DNA, 121 bp, Artificial Sequence
  Description of Artificial Sequence: Synthetic probe
ccgagccccaacggagaatctgctgtcgattgccatcagatctcggagatgcctaatcttkccttcaccattgcaaacaagactttcaccttaacgccagagcagtacgtagtaaagctgg

SEQ ID NO: 7550 - DNA, 121 bp, Artificial Sequence
  Description of Artificial Sequence: Synthetic probe
ggcagaggcgcccatctagaccttgagttcttccagcaagacccgtttttctgagagactmatgtttagaggcttgtcgcgttgacgcccatctttctgaataatcctgctttgtctatcg

SEQ ID NO: 7551 - DNA, 121 bp, Artificial Sequence
  Description of Artificial Sequence: Synthetic probe
tttgtgatacaactgaataaaactcaagaggccccaaagctgrgagaccatccttctctckgcgagcatttaatgccatgagcagaaaatcataattgctcactccaggaatttcaatagg

SEQ ID NO: 7552 - DNA, 121 bp, Artificial Sequence
  Description of Artificial Sequence: Synthetic probe
gctgtcggattttgatttgtccctccgttgtgatgtgagccctacccttcttaaatcgtckaaccctggtgtagatcctaaccaaaagggcaatcaagcttaattgtgtacagcccgtctg

SEQ ID NO: 7553 - DNA, 121 bp, Artificial Sequence
  Description of Artificial Sequence: Synthetic probe
catccagccatttgaatggtctatggtggcatcaattgcaccatctcttatggccttggakacgatgcactcygcatcggcaacaggattgacagaatctagccttagcttcttggcaata

SEQ ID NO: 7554 - DNA, 121 bp, Artificial Sequence
  Description of Artificial Sequence: Synthetic probe
cgaaatcatccattttgttcatctttgccagccatcttggagattctggaatgaagatagkccaggtatcaacactgtgcatggcaaggttcctatgactgcagcatcctccaaggaacaa

SEQ ID NO: 7555 - DNA, 121 bp, Artificial Sequence
  Description of Artificial Sequence: Synthetic probe
gcctgaggcaattctgaagcaaattatctcattgaacagccttgacatggaactctatgakcatgctaagaacatctttacacaagaacatcttatgctaaagggccagcatcccgtggtg

SEQ ID NO: 7556 - DNA, 121 bp, Artificial Sequence
  Description of Artificial Sequence: Synthetic probe
ttagaatgatctcttaaggtcggtgcaacctgtaaggtgactgtaatttaatgatgatgaktatacaaactttttgagatgcaatttcctagcaagtatattcgctgccatgcatccctga

SEQ ID NO: 7557 - DNA, 121 bp, Artificial Sequence
  Description of Artificial Sequence: Synthetic probe
tagatttgtcatgggaatacctctcagatacttgctcaagctcctgcttgcacttctcaakttcaaggtcacgatatgaaagttggtcctcataatgcttagctgctgatgccatctctcc

SEQ ID NO: 7558 - DNA, 121 bp, Artificial Sequence
  Description of Artificial Sequence: Synthetic probe
gattggccaggatagaactgattagcaaatctagtttcctagattttctctgtgatgggamtgtgttctcccagctaaatatgttctgtgtaggctgtactgtgtaaacttgtccttccga

SEQ ID NO: 7559 - DNA, 121 bp, Artificial Sequence
  Description of Artificial Sequence: Synthetic probe
ggggttattccagctcttattatggtcagcaatcccgcaatccagttcatgttgtatgagkctcttctgaagaagctgaagaagagacgggcctctaatttgaagggtgctcagggactga

SEQ ID NO: 7560 - DNA, 121 bp, Artificial Sequence
  Description of Artificial Sequence: Synthetic probe
cgggactgacagaggttacagattccataaggcttacctagcaaagttgaaggacctggckccaagcgatggtgagaaagaagatgccaatggattcagctacacgaagttggattagatg

SEQ ID NO: 7561 - DNA, 121 bp, Artificial Sequence
  Description of Artificial Sequence: Synthetic probe
ggaaagtccatagcctactagccctgctacatagtggcagtactcattatagtcatcaatmgtttcaacctcctggcatataaattttgccattcctgctcccattcgcctagtgatttct

SEQ ID NO: 7562 - DNA, 121 bp, Artificial Sequence
  Description of Artificial Sequence: Synthetic probe
cttgttggatcagggagcaaaggttgagctccagttatattcgccaattcgaccagttgtkgagctttcagcaggcttcttattgataatggctgtaggaactatagtctgtgcctcacta

SEQ ID NO: 7563 - DNA, 121 bp, Artificial Sequence
  Description of Artificial Sequence: Synthetic probe
tttcaaaagttacaatagagaatcaggaggagaggtttacttacaatgccaagattgcagkcaatagctattcagtgtctggagtcactgcagtttctgcatggacttggtcttattcatt

SEQ ID NO: 7564 - DNA, 121 bp, Artificial Sequence
  Description of Artificial Sequence: Synthetic probe
acacacaaggtgctcaacttctagttagtcttggaattgatcttttcagaattgatcgatkgataaacagcttcggcatgccaatgggaccttttcaactccaagatttagctggatatgg

SEQ ID NO: 7565 - DNA, 121 bp, Artificial Sequence
  Description of Artificial Sequence: Synthetic probe
aacagttacctggaatccctcaagaagccagagaaagacctgattcaggtcatggcgtctkctaaggaagcaatgaaagctgttgtagcagagaaaatacgcctcttcggatctgcaggga

SEQ ID NO: 7566 - DNA, 121 bp, Artificial Sequence
  Description of Artificial Sequence: Synthetic probe
aattttctttttctgccggatagattcatttaacacatgaactgtatccgcaatgaagggmtccaaacgctctgcaaacctcttgtacctctcaacctcttccttgagcatgcttttgctg

SEQ ID NO: 7567 - DNA, 121 bp, Artificial Sequence
  Description of Artificial Sequence: Synthetic probe
ttgaattcatctcctaatggacatggttccttaagatactaatacacgcggtgttggcctkatcaagagcctttagaataattgtactttaaatatttcctcgatctcaaaaataaatgtc

SEQ ID NO: 7568 - DNA, 121 bp, Artificial Sequence
  Description of Artificial Sequence: Synthetic probe
ttgcgatgattcagccttcattgatttcattctcttttgattcaccaccttcccctgtgtkccttgatgtggcatcaatagcagcagatcgtatactgttacttgatgcatacttcagtgt

SEQ ID NO: 7569 - DNA, 121 bp, Artificial Sequence
  Description of Artificial Sequence: Synthetic probe
gttagttaatcgatcggtcagaaggcggcggcgtcgctgaccgagccatgttgtatttctmttgtgaactacttatgttcgtgtagaacccgtcgatgtttctgttggtttttggtgtagt

SEQ ID NO: 7570 - DNA, 121 bp, Artificial Sequence
  Description of Artificial Sequence: Synthetic probe
aaactttcacggatacaagtgttacgagagctttcactgtaccgccgattacatggcgttktaataacaggtctgcttggccaaatgtaccctgctacggtgtgaaataaaaaagaaatgc

SEQ ID NO: 7571 - DNA, 121 bp, Artificial Sequence
  Description of Artificial Sequence: Synthetic probe
caatggacaggtggttttactaggttcagctccagatgatcgcatacaaaatgattttatmaacttagctaaaaaacttcatgctgaatttgatggccgcgtgaagctttgtttaacttat

SEQ ID NO: 7572 - DNA, 121 bp, Artificial Sequence
  Description of Artificial Sequence: Synthetic probe
caaagaaggataagaagaagttcaagaagcacgcaaagaagaaggaattgcaggagtcaakggaagagaagagtgttcccatggaggaggattcaactgaaccgaaccttgacatctgggg

SEQ ID NO: 7573 - DNA, 121 bp, Artificial Sequence
  Description of Artificial Sequence: Synthetic probe
tcttgacataccgaatcgtcccaagggccttgaggatcctgagcgtctggcaagggaaacmgtttttagcgtaaatgagatcgaggcgctgtatgagctctttaagaagattagcagtgct

SEQ ID NO: 7574 - DNA, 121 bp, Artificial Sequence
  Description of Artificial Sequence: Synthetic probe
agctttgtccttaacatcatcgaaacatcgtgatgcaggtttccctttggttgtaaccgcmgcatggtcctgcctgcctgctactgttgttcatgtgttatatacaatcatcctgccggaa

SEQ ID NO: 7575 - DNA, 121 bp, Artificial Sequence
  Description of Artificial Sequence: Synthetic probe
atcccgtaatcgccccttcacaattccttccatggtttggaagagcagaggctggtgttgkgtgtatacattctcaacacccttaagtccacgagccatgttgcgagcaatatttaatagg

SEQ ID NO: 7576 - DNA, 121 bp, Artificial Sequence
  Description of Artificial Sequence: Synthetic probe
tgtcctaaatgattttagtcctctgtactttgcaaaacgctttcttgccgggacatctaamggtgtctccacctcatcaggaaattcttcatcgtcagcattagattctttgattttctta

SEQ ID NO: 7577 - DNA, 121 bp, Artificial Sequence
  Description of Artificial Sequence: Synthetic probe
caatacatcctttacaaaaggggcaatagcagcggtactaacttcatcattgtggctgatkccattattgaatacccagattggagcagcgcccaggtcttcagaaagctgaagaaactca

SEQ ID NO: 7578 - DNA, 121 bp, Artificial Sequence
  Description of Artificial Sequence: Synthetic probe
tccaggcaaagaatacaatgtccgtgttgcttcaagtattattttcaagggacctgaactkcttgttgatttgcaagattacgattattctctagacatgtggagccttgggtgcatgttt

SEQ ID NO: 7579 - DNA, 121 bp, Artificial Sequence
  Description of Artificial Sequence: Synthetic probe
tttggtgagtactgaagtagccttgacacaagatcaattgcttcaggtggcatgcgcttamcaaaaaagcttgtgccagggatgagcttttatctgagggaacttgaattcagagtagttt

SEQ ID NO: 7580 - DNA, 121 bp, Artificial Sequence
  Description of Artificial Sequence: Synthetic probe
agcaaatcgaagtctgcccgaaagcaatggagatcaccgaacagatcacagatagaattamctcggatggcggaggtgctcttatcattgactacggcaaaaatggaatagtctctgayag

SEQ ID NO: 7581 - DNA, 121 bp, Artificial Sequence
  Description of Artificial Sequence: Synthetic probe
tccttctctgaaggacaggcatgtgaaagtattgtactagtttatgtcagaaaattgaaakaaaagtacttgtagtttgaagaaacctgaacttgcactgggtaaagctgggtaatgaaga

SEQ ID NO: 7582 - DNA, 121 bp, Artificial Sequence
  Description of Artificial Sequence: Synthetic probe
gtggttctctgttccatcagtaaccaacttgtagcccttgctcatcagatgatttgcaatkgcaacggcattggccttgacctgctgaatataagccttgaatccaggtgacatggcctgt

SEQ ID NO: 7583 - DNA, 121 bp, Artificial Sequence
  Description of Artificial Sequence: Synthetic probe
tttctaccatactgatctggctaggttctggttatgtggccacccacatgctttcctgtgmtgttttggctctagattgggcaggaagtttgtgttgggtagctaagagagggtgtgtatc

SEQ ID NO: 7584 - DNA, 121 bp, Artificial Sequence
  Description of Artificial Sequence: Synthetic probe
tactgagaatgtcctgcagaaggagaaagatcatattgagggctttgcacccgaggttgcmtgggttactaaatcaggaaaatctgacttggaagctccgattgctatcagaccaacaagc

SEQ ID NO: 7585 - DNA, 98 bp, Artificial Sequence
  Description of Artificial Sequence: Synthetic probe
gaaatcttactgtgcagatgttcatttctgtgatgggagcttgaccttattctgtcaattkacaagtctacttgtaataatcatgctgcacatagtct

SEQ ID NO: 7586 - DNA, 121 bp, Artificial Sequence
  Description of Artificial Sequence: Synthetic probe
tttggttcgtctagggcaccatgatgtctttatttcacactagctgacatggagcacagakgagttcaatttacaggggagggagagagagaatgcaaattgctgaacaccagaaggccaa

SEQ ID NO: 7587 - DNA, 121 bp, Artificial Sequence
  Description of Artificial Sequence: Synthetic probe
gccgtgctaccacagcaagagtatcaaagaagcaaccccacataacagtaaattgcctaamagtttcaaagatcttggtgtaactaacaagacctttcctgtaagaacgagaatgcttggg

SEQ ID NO: 7588 - DNA, 121 bp, Artificial Sequence
  Description of Artificial Sequence: Synthetic probe
acactgggaaattcttcttcgtgctcgtgcaatcgagacgcaatgttatgttattgctgckgctcaagctggaaaacacaatgagaaaagagaaagctatggtgattctataattattgac

SEQ ID NO: 7589 - DNA, 121 bp, Artificial Sequence
  Description of Artificial Sequence: Synthetic probe
caacgagctcgccaaggggttaaacaacttgttggtcgagaggatggcgcagctcgctgcygaccccgaacgacccgggatgacgtactctgtggggagctccttcaacctggtgaccaac

SEQ ID NO: 7590 - DNA, 101 bp, Artificial Sequence
  Description of Artificial Sequence: Synthetic probe
gaatcttatttgttagaaattcagtgtgctcacctctgggctacatgcctgtgtcttagakccaataatctcaccgagaaaaatgggtgtatgtattatac

SEQ ID NO: 7591 - DNA, 121 bp, Artificial Sequence
  Description of Artificial Sequence: Synthetic probe
gtgacgatgttgtattgacaacgtgaagatgttgtattgacaacactctgttctgaacaaygaattcaggaagatttcttgctgtcctgcagtcgctcgaacaggctgccatcgaagaggg

SEQ ID NO: 7592 - DNA, 121 bp, Artificial Sequence
  Description of Artificial Sequence: Synthetic probe
catacccctgaacctgtttgtctgcgtggtgctgtacaatgtgagcgcattccctatcacygtcatgttcggcatgtgctccatattcctcttcatggcagcaatcttgcagagacggcta

SEQ ID NO: 7593 - DNA, 121 bp, Artificial Sequence
  Description of Artificial Sequence: Synthetic probe
tgactagtggaaagagaactgacatcacatttgaagtcaatggggagatgtttcctgctcmcaaggtggtgcttgcggcccgatcaccagtatttagggcccagctttttggtcccatgaa

SEQ ID NO: 7594 - DNA, 121 bp, Artificial Sequence
  Description of Artificial Sequence: Synthetic probe
cgcgaactcatcccagtcacaggcgcaggctgggggatgcagttgttagctccagttccamactttttgcagctcatgatgtcaaggaccccatgcccatcaaacaaaacatctacattac

SEQ ID NO: 7595 - DNA, 121 bp, Artificial Sequence
  Description of Artificial Sequence: Synthetic probe
ccaaccttttgaggttcggattgctcggatcttcaacacatatggcccgcgcatgtgcatmgacgatggccgtgttgtcagcaactttgttgctcaggcgttaaggaaggagcctttgacg

SEQ ID NO: 7596 - DNA, 121 bp, Artificial Sequence
  Description of Artificial Sequence: Synthetic probe
cttattcccaagtttgttttaccatgtaatcgttgcagtgctccttctgggattctactayctccgttccataatataagtttttttagcaagctaaaataactttctaaaaagacttaca

SEQ ID NO: 7597 - DNA, 121 bp, Artificial Sequence
  Description of Artificial Sequence: Synthetic probe
ggagcgagcccgtcacccccgaaaatctccaaacaattcttgtttccgttagctgatgatmtgttcctgtgttttagtagttgattatcgcctctgagaacttgtatgtcagatttagttt

SEQ ID NO: 7598 - DNA, 121 bp, Artificial Sequence
  Description of Artificial Sequence: Synthetic probe
tgcattgttctctgagaattaacagcttttccatgtatattctttccgctccaaagaagaraagtgtaagattcattttaacaaaacctgtatgtgtgaatcttaaaatagaaaaagactt

SEQ ID NO: 7599 - DNA, 121 bp, Artificial Sequence
  Description of Artificial Sequence: Synthetic probe
gtggcgaaaattatggtgttcgcacagcgggacgtgttattttcggtacccactcaaaatmtatatgctagtttgactgcgaatttactagatatactgtaccggttgcttgcataggttc

SEQ ID NO: 7600 - DNA, 121 bp, Artificial Sequence
  Description of Artificial Sequence: Synthetic probe
tcaggttctagcccagaagactgcgatcatgtagataataatacagtgtttcgtcactggycattttaagtgtgcaactgtgcataattaacatttacacacgctcacatatcttgggtgc

SEQ ID NO: 7601 - DNA, 121 bp, Artificial Sequence
  Description of Artificial Sequence: Synthetic probe
tgagacgcaaattgatcaaaatgctgcagtaacactgaactatggttgctaccccaatgayttctaccttcttgattatggatttgtagtaacatcgaatccataygatcaagtagaactg

SEQ ID NO: 7602 - DNA, 121 bp, Artificial Sequence
  Description of Artificial Sequence: Synthetic probe
ggaggtatactgctgcgatatgccatatgcagatttgaccttctcagaggtcacatctgcygtcgttcgtcagaatctgaggccggagataccacgctgctgtccgagctccttcgcgaac

SEQ ID NO: 7603 - DNA, 121 bp, Artificial Sequence
  Description of Artificial Sequence: Synthetic probe
ggcgagaaggtggtctctggtggtaaagatagggcgctcaagttatggatgaactgagagstattattattatttatcttgtaaaatgttagggagcagagagagagagagcaggcgacag

SEQ ID NO: 7604 - DNA, 121 bp, Artificial Sequence
  Description of Artificial Sequence: Synthetic probe
cgcagcgggatccttcagcgtcgcataaatatgaccgatcgatcagggaatttaatcaaayttgctcggggtcggggatgcaccgtacgtgtagaagagggcatgtgcatgtgtgtgtttc

SEQ ID NO: 7605 - DNA, 121 bp, Artificial Sequence
  Description of Artificial Sequence: Synthetic probe
aaatgcaatgcagtatgtggtgttctagtaggagacactaatgtattgatctcctcatgtkcccacgttgtcatttttcaggcatctcaggtacctggttatggataataagtacctggtt

SEQ ID NO: 7606 - DNA, 121 bp, Artificial Sequence
  Description of Artificial Sequence: Synthetic probe
aagatgtatcaatgagctatgcactctgattcaaacagttgaacagcttctatttgcaacrtcaacaactgcagaaccagtattgacaccttggccactgatgcgtgcgcttgatgatatg

SEQ ID NO: 7607 - DNA, 121 bp, Artificial Sequence
  Description of Artificial Sequence: Synthetic probe
catctgccttgtgacacacagcatctcacccagtatagcttggctgtggtgctccaactcrtttttcagtgatgtagtctatgacagaaaaagcagaaaaagaagacctttcattttagct

SEQ ID NO: 7608 - DNA, 121 bp, Artificial Sequence
  Description of Artificial Sequence: Synthetic probe
ccctgctgcacctggtgatgaccttgcagtttctcgagccgcgagcatgaaggctttgagraacgagcgggaatttctcgcgagacggatggggtcaaggctgacggatgaggagcgggag

SEQ ID NO: 7609 - DNA, 121 bp, Artificial Sequence
  Description of Artificial Sequence: Synthetic probe
cctcatgcacaccctcttcgtcgaggcagatgacatggaccgcttccagatgaaggagatygtggaggctgctctctcgcagcttgacgctcccggaagcccgccacttagctccatgagc

SEQ ID NO: 7610 - DNA, 121 bp, Artificial Sequence
  Description of Artificial Sequence: Synthetic probe
aggattgtgggttgatgatgatgattccgttggtgatcctccaaggccatcatcgtgtttmtccaagggttactatagttgctgttcagaagatcaaaatgttgggtaaagagttgcaggc

SEQ ID NO: 7611 - DNA, 121 bp, Artificial Sequence
  Description of Artificial Sequence: Synthetic probe
tacgcatcaattcattccattgccaattgctattccctcgatgtatcttaatatttggacyatactggtgtataccctttacatattcatttactgaatgtgataatatgaataatgtgct

SEQ ID NO: 7612 - DNA, 121 bp, Artificial Sequence
  Description of Artificial Sequence: Synthetic probe
tcagttggcaaatgaaaaagaggaaggtatgcctgtcagcagcttgtatacaaaatgccgygagcgcttcctggtgagcagtcaagtgacmctgaactcccacctgacagagtttaaagat

SEQ ID NO: 7613 - DNA, 121 bp, Artificial Sequence
  Description of Artificial Sequence: Synthetic probe
tggatcgatccatccaacagggtacagagatttcagtcatcgtatatatacatacacactrtaatttttttggttttgtttctaagattttacagagaggatggtacgtaataatggaatt

SEQ ID NO: 7614 - DNA, 121 bp, Artificial Sequence
  Description of Artificial Sequence: Synthetic probe
caatgggacatgccatttggatcttggagggaaagcgagctagagccgttcgctaagattrcaaaggggcgcctagttatgccgtcaacgttcagcgtggaagttgttgaccttctaacca

SEQ ID NO: 7615 - DNA, 121 bp, Artificial Sequence
  Description of Artificial Sequence: Synthetic probe
ctatatataagtgggactccgaaacagtaatttgaagtgtccagagtcaagcattttggcyttgcacattctcctgtcgaaatcttcgcatggatctgaaaggatacagatgtgcaatgat

SEQ ID NO: 7616 - DNA, 121 bp, Artificial Sequence
  Description of Artificial Sequence: Synthetic probe
ggtgaactttatgtggatgatgggaaaagttacgattatcagcaaggggcattcatccatyggcgatttgtatttgccaacaataagctaacttcgatcaacgttgcccctgataacctgg

SEQ ID NO: 7617 - DNA, 121 bp, Artificial Sequence
  Description of Artificial Sequence: Synthetic probe
gcaagcacatccagaggattggcaagccattgatttggatgaaagtgtcttgtacaacacmtcgggtggcatgccccatgggcgcttatcaattgctactggtgctgtcaagaaagcccac

SEQ ID NO: 7618 - DNA, 121 bp, Artificial Sequence
  Description of Artificial Sequence: Synthetic probe
gccctacggtggcatcataaaagctgttctggtagctagatccactttcctgattcactgyggctcgattcttgaataaagaggtaagttagttagtgccaaaactgagggcagggtaaag

SEQ ID NO: 7619 - DNA, 121 bp, Artificial Sequence
  Description of Artificial Sequence: Synthetic probe
cgactttggtgatgaaatatgtggagtagttgttagcatccgtcagaagcaggaaagagtmgccatctggactaaaaatgctgccaatgaagctgctcagataagcattggcaagcagtgg

SEQ ID NO: 7620 - DNA, 121 bp, Artificial Sequence
  Description of Artificial Sequence: Synthetic probe
ggattcggtcgctgccccatctgatgaagaagaggaagaagttgatgaattggtgtatggygaagacttgggtttgtcggaaaatagtgatgatgatgctgaatagaagcaccttcgacag

SEQ ID NO: 7621 - DNA, 121 bp, Artificial Sequence
  Description of Artificial Sequence: Synthetic probe
tgacaggcatttacatagcagttaagccttgaagattgggcttaacgagcacagaggcgtygagaagcaggtcttgasacagsacgststtgacaagacgggtgctacatatctcggtccg

SEQ ID NO: 7622 - DNA, 121 bp, Artificial Sequence
  Description of Artificial Sequence: Synthetic probe
cctgcctaagaaagaattcgatacgtatttctgcgcatacgagccctatgagcagtgtccragatcaaattcacgagctacttacggttcaagagatgatgacttgtccatcaagacttca

SEQ ID NO: 7623 - DNA, 121 bp, Artificial Sequence
  Description of Artificial Sequence: Synthetic probe
agcgcaggcagatgaaaggtttatgattttcatttcgtctgcgctctccttgttcggttcygttgtatacacatgcattttgtggtttggaaacatgtagtcgtgcagaatggggttctct

SEQ ID NO: 7624 - DNA, 121 bp, Artificial Sequence
  Description of Artificial Sequence: Synthetic probe
cggcgccctctcgccggagggcgattcagcggtacacctccactgtagcatacgcatccawatctacctctctactatagtttggtctgttctgttctacacaaggagccgaagcaagcaa

SEQ ID NO: 7625 - DNA, 121 bp, Artificial Sequence
  Description of Artificial Sequence: Synthetic probe
gagccggacgagcatgtcaagcgagcgatgaacgagatcaacgcagctgcaaggatgaggktggccgcgaacgagaaggcggaggcggagaagatcgtgcagatcaagcgcgcggagggcg

SEQ ID NO: 7626 - DNA, 121 bp, Artificial Sequence
  Description of Artificial Sequence: Synthetic probe
aggtgacttattgcccagactgcacgagggcatgccagtatgacaccagagcccttgttgkaagccagggccccatcagaggcagtgatttttcaacacggtgttcggctgcctctttctc

SEQ ID NO: 7627 - DNA, 121 bp, Artificial Sequence
  Description of Artificial Sequence: Synthetic probe
gaatgagcagatggacggtggaacatccggtgttttggatgccgagtcgccgagtagcagygctgctgctgtaaccatggacggagcagccaatggtgtgaatggtgaagggggccrgagc

SEQ ID NO: 7628 - DNA, 121 bp, Artificial Sequence
  Description of Artificial Sequence: Synthetic probe
gcctccagccacgaaaagttccgcagcgccgccgccaccgaaggggagattcgggggacaraaagtctctgttccggcaccctgccgggacggggaagtgcccccggagccatctccatcg

SEQ ID NO: 7629 - DNA, 121 bp, Artificial Sequence
  Description of Artificial Sequence: Synthetic probe
agcagaagcacacgcagcagcagcaacaccggcgcgtcgctggcgcagatggccgcacacyacataggcacgaagttcaagcggctgttccactcgctcacggagcgcaagctttatgtgt

SEQ ID NO: 7630 - DNA, 121 bp, Artificial Sequence
  Description of Artificial Sequence: Synthetic probe
ggaggagaaaatttcttcttgagaactcatagtgccgatgtggttttaacaccaaaaaagmaagtatttattgttgaagaaagtgcaatagttcatctgcatacatatatctcaagatgag

SEQ ID NO: 7631 - DNA, 121 bp, Artificial Sequence
  Description of Artificial Sequence: Synthetic probe
atgtaatctagtgttggcaagcaagtcaaaaaccatgagatcagtgcagtgcagtgcagcrtttttgtttctcttctctggaactattgtaagccaaatcaggagggaacaatcagatgcc

SEQ ID NO: 7632 - DNA, 121 bp, Artificial Sequence
  Description of Artificial Sequence: Synthetic probe
caagcgccagcggggagaatactctgtgggaagcaacatggcttcaagttaacaagatcgygccgtccctgcagttagaagtcttccctcccaacgaaggcgattccgcaacgagaggcca

SEQ ID NO: 7633 - DNA, 121 bp, Artificial Sequence
  Description of Artificial Sequence: Synthetic probe
gcaattgcgtcaccccaggtcgttccctttagatgcattaagacttgttgagtacccctarggactcacacgataaatatttgatttagatggacatgtatactcctaggaaggctactgg

SEQ ID NO: 7634 - DNA, 121 bp, Artificial Sequence
  Description of Artificial Sequence: Synthetic probe
tagcagctgccgtggactctgggacgggttttaacagaattgggtgagaacattttgtagyttgaaatcctcccgcaccaccagcatggacgccggcgaggaaataggagtagagcaggga

SEQ ID NO: 7635 - DNA, 121 bp, Artificial Sequence
  Description of Artificial Sequence: Synthetic probe
ttcccacatggaaaatccaacaaggtgtatttctaaggggagggagcaaataggacatctygctgaaacactgcttccagtagtcccttccaagctatctctttcactgagaggatctgct

SEQ ID NO: 7636 - DNA, 121 bp, Artificial Sequence
  Description of Artificial Sequence: Synthetic probe
tgcagtaaaggaggaaatgaaggtccctgtggtggtagacagtggaagtttgatcagcaayaaaattttggcagaggaacatgataaagagttaaaggatgctgctaaaaaatgaacttaa

SEQ ID NO: 7637 - DNA, 121 bp, Artificial Sequence
  Description of Artificial Sequence: Synthetic probe
gaagggacacagctggcatcttcagagtccaccagtttgaaaagatcgaacagttctgtgycacaagccccaatgacaatgattcctgggagatgcatgaggagatgataaaaaattcaga

SEQ ID NO: 7638 - DNA, 121 bp, Artificial Sequence
  Description of Artificial Sequence: Synthetic probe
tgcaaatgccaatatgacggtgatgctaatcggaaacaaatgtgatctgtctcatagacgygctgtcagttatgaggaaggtgaacagtttgccaaggagaatggtctggtctttatggag

SEQ ID NO: 7639 - DNA, 121 bp, Artificial Sequence
  Description of Artificial Sequence: Synthetic probe
aactgtaaagaaaccagggctagaaatggcgacggaacaaagtgaactggatctatcctaygggcaacggtaccaagatacgaagatcccagaagcatatgagcgcctgatcttggacacg

SEQ ID NO: 7640 - DNA, 121 bp, Artificial Sequence
  Description of Artificial Sequence: Synthetic probe
catacctttcaccattatcaggccagggagattaactgatgggccctacacttcctatgaycttaacactcttcttaaggctacagctggagaaagacgagcagttgagataggccaaggc

SEQ ID NO: 7641 - DNA, 121 bp, Artificial Sequence
  Description of Artificial Sequence: Synthetic probe
ggaaggatgagaagaagatgatttgtggagaagtagacctgaaaagaagcaaggaagatgraccttttgatggcgctgttgtctgtaccctctttgtgtagtagttgtgtgtgtagagaag

SEQ ID NO: 7642 - DNA, 121 bp, Artificial Sequence
  Description of Artificial Sequence: Synthetic probe
ctagcgaggatgctgtagcttcgcaggagttttaaaccctaggtcaaaagaagagactagyggagagaaatgaaggggcttcccttcagtctctttgaccccctagggccgcccatgacgt

SEQ ID NO: 7643 - DNA, 121 bp, Artificial Sequence
  Description of Artificial Sequence: Synthetic probe
aaagctttgctacttactactatccaggtagcctgactacaatctagagcattctgcttgyggatcactggagctcccggttcccttttggtagcatcgagtcatgggcactgtggagttt

SEQ ID NO: 7644 - DNA, 121 bp, Artificial Sequence
  Description of Artificial Sequence: Synthetic probe
atgcaagagatcctgaagctgcatcagccaacggaaagatgtgatacgcaggaacgtctcytgtacaatttatcgtggttcagttatgtctgtcttgatcattcaaatacaatctttgttg

SEQ ID NO: 7645 - DNA, 121 bp, Artificial Sequence
  Description of Artificial Sequence: Synthetic probe
agtcaccaaggaatgggctaggaagccccagattgcagcagtaggctcttgctgcctagtyggcgtaatctgcgcaggcaatctctatatcgcgaatgccggcgactcgcgagcggttctc

SEQ ID NO: 7646 - DNA, 121 bp, Artificial Sequence
  Description of Artificial Sequence: Synthetic probe
aagagctggaagaggcctaacagctgcgccgccgggggcccgagtactgcgtgacgtcgasgaaccagacaccgggccacgtcctccaggtccactcgtcacagagccgctgtcagaggac

SEQ ID NO: 7647 - DNA, 121 bp, Artificial Sequence
  Description of Artificial Sequence: Synthetic probe
atatgcacatcatgctccgtttactcgtgcgagggcccactcattatctatttcaacacckgaatctctcaaaatgaaaagaaccaaatcaggccgagtggtagtaccagcattggattca

SEQ ID NO: 7648 - DNA, 121 bp, Artificial Sequence
  Description of Artificial Sequence: Synthetic probe
gttgggaaccccaagaggaaggtatgatgagcacagcagcaagttttccctcagttatgaraccaaggtttaaatcaaaaccagtaggagcaaggaaacaccccaaaggtgttactagctg

SEQ ID NO: 7649 - DNA, 121 bp, Artificial Sequence
  Description of Artificial Sequence: Synthetic probe
gttggtgattcagaccgccgaagcaagcctatcatcaaatgtcgagataaacgacatgctyggagctgagttttatgtccagacagcagagagggaggctaagcggcgagctgaccccttg

SEQ ID NO: 7650 - DNA, 95 bp, Artificial Sequence
  Description of Artificial Sequence: Synthetic probe
  modified_base (76)..(76): a, c, t, g, unknown or other
acggcatggttcgatactagtacatgtatgtacatagctagcttaactgccgttcttcctrttcttctgtgaattntagctcattgttcatagat

SEQ ID NO: 7651 - DNA, 121 bp, Artificial Sequence
  Description of Artificial Sequence: Synthetic probe
ttttctcccctcctctctctcttgatcccccttcttacacttattgatctattgtgtaggrttgtaatttatctctatttttgatatatggagcctaacttgaacctcgagaagactgtgt

SEQ ID NO: 7652 - DNA, 121 bp, Artificial Sequence
  Description of Artificial Sequence: Synthetic probe
aagcgcgtgaggttctccagaaggcatttcctgatcatgaggttgtgatggtggaaggcgscagagagatcgtgctgggaggtggaaacatacactgcatcacgcagcagcagccagcgcg

SEQ ID NO: 7653 - DNA, 121 bp, Artificial Sequence
  Description of Artificial Sequence: Synthetic probe
gcgttttctattatctttctagggtctggtttgcatattgtaaggacctatattgtattgytgtagctttgacaatcttttctataatttgtacccaccgtttatttaatggcagtatcca

SEQ ID NO: 7654 - DNA, 121 bp, Artificial Sequence
  Description of Artificial Sequence: Synthetic probe
ggtaagcgagacaggtaaacatccaggacaactgaaggatcaggtcacttcccctgcaggractaccatagctggggttcatgagctcgagaagggttctttccgtgggacactgataaat

SEQ ID NO: 7655 - DNA, 121 bp, Artificial Sequence
  Description of Artificial Sequence: Synthetic probe
cactcctgcctcctgaaccttatttccgaagtcatttggatgtactcccaaggtcttaagytgtcggaacaaaaacacaataataatgattatggtcctagaatccccttttcatgaactt

SEQ ID NO: 7656 - DNA, 121 bp, Artificial Sequence
  Description of Artificial Sequence: Synthetic probe
cgctgttagaagacaccttgaaggcaaaaatcttacccacaacgaaacttgaaattatctratatccctttcgtagagggacaactgcaggatgtgcagtgcagtggccttgcatcatgtc

SEQ ID NO: 7657 - DNA, 121 bp, Artificial Sequence
  Description of Artificial Sequence: Synthetic probe
cagcgacccaaagcgcaaggcaactcttccacgtttgccatcgctaaacgagagaaaacargcagaaatagacgcatttgctcggagattgcaagggatcacaaagtcgatatcgaggtac

SEQ ID NO: 7658 - DNA, 121 bp, Artificial Sequence
  Description of Artificial Sequence: Synthetic probe
cccccggaagcataactgtttacttctttgcacaagaagatgatgactctgtcctgaaggytacaaaggaaaattttctccaacctgtgagcgtgacttttaaggaaggcaaaaggtcagg

SEQ ID NO: 7659 - DNA, 121 bp, Artificial Sequence
  Description of Artificial Sequence: Synthetic probe
ggacaagcatgtgttcttcgacagctaccaccccacacagagggcgtatgaggtcatagtygaccacatcttcaagtactacgtgccactcatgcatctctgatcaatccatttatttgtt

SEQ ID NO: 7660 - DNA, 121 bp, Artificial Sequence
  Description of Artificial Sequence: Synthetic probe
gtggcgtcgatcgagcaaatcaatggaccgtgtgtatatgtcgattcccggagcaagacgracggccggcgatagggaagatggggccgggggcgttctgtataaatgtcggaataaatta

SEQ ID NO: 7661 - DNA, 121 bp, Artificial Sequence
  Description of Artificial Sequence: Synthetic probe
gacccaggaaaccctccgaacttctgccttccccagcaaccatgtgaaggaaaaatgggcyaagaacctgtacatcgcctcaatctgctatgggcgaaccgcgtgctgacaggcagcggtc

SEQ ID NO: 7662 - DNA, 121 bp, Artificial Sequence
  Description of Artificial Sequence: Synthetic probe
agcaattgcaattgttatggcgcctacggatacaacaaggaaacatggcatattccacctyacagatccaggtggcatgggggtggatccacgattgccaggagagtggattccatcctca

SEQ ID NO: 7663 - DNA, 121 bp, Artificial Sequence
  Description of Artificial Sequence: Synthetic probe
tttgaaaggagaccttgtgagatatggaaggcagacattgcctggattaattaaagatggyatgagygctctttcrcggtattatttgaacaattttcatgacggagtgcgacaagatgct

SEQ ID NO: 7664 - DNA, 121 bp, Artificial Sequence
  Description of Artificial Sequence: Synthetic probe
taaccctgggaagaactctgcggcaggatgagatttttctcgttttctgacatgtctgtaratgtcaggttcttttccccctgggcaaactcttatggagcttccatggtccgaatggggc

SEQ ID NO: 7665 - DNA, 121 bp, Artificial Sequence
  Description of Artificial Sequence: Synthetic probe
ggggttgtcaggtccctgaatgttcatgtcagtgccgccatcgccatctgggactacactyggcagcaccgcacctcccgaagaacactagaatctcaatctcctcctcagtagtagctta

SEQ ID NO: 7666 - DNA, 121 bp, Artificial Sequence
  Description of Artificial Sequence: Synthetic probe
tggatacttcagacttccgtacgacatccccaaggttttctggagataccccatgcagtayatcagcttccattactgggcgctgcagggccaatgccagaatgacatggatggtctccta

SEQ ID NO: 7667 - DNA, 121 bp, Artificial Sequence
  Description of Artificial Sequence: Synthetic probe
ttcaaactgagaaggcgccagcagcattaggcccctattctcaggccatcaaagcaaatartctcgtgtttctctctggggttcttggcctaaaccctgagacagggaagtttgtctctga

SEQ ID NO: 7668 - DNA, 121 bp, Artificial Sequence
  Description of Artificial Sequence: Synthetic probe
ggaacttctcaaggaatatgttgagagggaaaagaagaagaggcaagagagattggagacrccgaaaccgaatgaagctgttgcgaaatttgacggataccctatcgcatgatgcattaac

SEQ ID NO: 7669 - DNA, 121 bp, Artificial Sequence
  Description of Artificial Sequence: Synthetic probe
catgaatttgggcgattgttttccgcaaattcttcgaccggggaaacttattcagtttttrgcgaaaagaaatgctgtcaccactatgcaagggcggttggttcgggtattgactttcctc

SEQ ID NO: 7670 - DNA, 121 bp, Artificial Sequence
  Description of Artificial Sequence: Synthetic probe
aaaggaacaatattgccgggcatcacaaggaaaagcataattgatgttgctctgagcaaargcttccaggttgaggagcgcctcgtgtccgtggatgagctgcttgatgccgatgaagtgt

SEQ ID NO: 7671 - DNA, 121 bp, Artificial Sequence
  Description of Artificial Sequence: Synthetic probe
taaagatacccaccccaagctaacagaactgcttcagaaatgctggcataaagattcagtmgagaggcccgatttcatccagatactggagattctcgaaagactctccaaagaggtggga

SEQ ID NO: 7672 - DNA, 121 bp, Artificial Sequence
  Description of Artificial Sequence: Synthetic probe
tcctgaagttctcgatgtttctgaacctgtgatgccagccacagttttgttagtgatcagygcaatagccgagcttcttgatgccacgtgtaaccggagttgttgttatgtacagtacagt

SEQ ID NO: 7673 - DNA, 121 bp, Artificial Sequence
  Description of Artificial Sequence: Synthetic probe
gaagaaggcaatgaggaagaactggcttgggaatgggccatccatgattactgcaggcagygtggacgggatgrtggagaaggccaagatcgtgagctgggccttcggaggcagcaggatg

SEQ ID NO: 7674 - DNA, 121 bp, Artificial Sequence
  Description of Artificial Sequence: Synthetic probe
catcttgatatatttggacgtgagcaaggcactgcgaagacggaatgaagctctatgtttyagacaacagggtgatactgacggagggtttcgacggcgtcgttcctgtcaagtactttga

SEQ ID NO: 7675 - DNA, 121 bp, Artificial Sequence
  Description of Artificial Sequence: Synthetic probe
ccatgttgacttcttaaagcccgtggatgtaggagacttccttcgattcaaatcatgtgtyttgttcacccagcttgagaataaatggcaacccctggtaaatgtcgaggtcgtcgctcat

SEQ ID NO: 7676 - DNA, 121 bp, Artificial Sequence
  Description of Artificial Sequence: Synthetic probe
accgatcgatatgcttttcgtgtgtgatcaggtcactaagctaatcagcaaaagggcgttyaagccttctgtctagcgcctagcaagttagctaacctcaccggcatcctcccggcgaagc

SEQ ID NO: 7677 - DNA, 121 bp, Artificial Sequence
  Description of Artificial Sequence: Synthetic probe
accaggttgttttgggtcaggtaaggtggcattttcgttcgtaatcatagagatgacttcrgacatggagggccgatcagcggcagcctcctgaacgcacaacaggccggcgtgaatgcat

SEQ ID NO: 7678 - DNA, 121 bp, Artificial Sequence
  Description of Artificial Sequence: Synthetic probe
cctgcaataaggctgagggtgcaatgtatttgttccctcgccttcatttaccccagaaggyggttggagctgcccgagcagctggtgcttccccggatgcatattatgctctccgccttct

SEQ ID NO: 7679 - DNA, 121 bp, Artificial Sequence
  Description of Artificial Sequence: Synthetic probe
  modified_base (105)..(105): a, c, t, g, unknown or other
aaaaggaactacagaacaatcgctctgaatcatgttgctttctagcttaatgtgtttgtgmctgcttcaatgccccacatcgattgttaacaaatgaagaaaacncaatccgattgcatgc

SEQ ID NO: 7680 - DNA, 121 bp, Artificial Sequence
  Description of Artificial Sequence: Synthetic probe
gccacctcctcttgccttcgcacttgggaggaagctgaaggaagccgttgatgcaaagcgmcagcaggcataactgtgttcaggagaagcatctctagatgatcagcacatgctatgagct

SEQ ID NO: 7681 - DNA, 121 bp, Artificial Sequence
  Description of Artificial Sequence: Synthetic probe
aagtgctacaccgacaaagctataacagtatggagtggtaatgatgatgaatgccatgatkctaggtggaaatatggtgccactggagttatttctgtagctagcaaccttgttcctggtc

SEQ ID NO: 7682 - DNA, 106 bp, Artificial Sequence
  Description of Artificial Sequence: Synthetic probe
  modified_base (85)..(85): a, c, t, g, unknown or other
gccttgtctgcctctgtagtctgtacacactctctgtcttaggtctattacttgttcgttmcctgcagtctgcaactcccgaacncgcttctttcatcagtgttcg

SEQ ID NO: 7683 - DNA, 121 bp, Artificial Sequence
  Description of Artificial Sequence: Synthetic probe
gaggagctcgtgcacgttcctggaattccctcatttccggcgtcgcactccatgctgccartcatggaccgtgacgacgcagcctacatggcattcgtgaacgtgtgcagcgacctgtgcc

SEQ ID NO: 7684 - DNA, 121 bp, Artificial Sequence
  Description of Artificial Sequence: Synthetic probe
aatgggaaatgcattagctactgacggtggcttctgtacgggaagtgtgagggttgttgaycatcagcgtctaagcagcgcgggctatgtcttctccgcttctttgccaccctatcttgcc

SEQ ID NO: 7685 - DNA, 121 bp, Artificial Sequence
  Description of Artificial Sequence: Synthetic probe
cgagatgtcatggtagaaattgtggaattctagggtgtccccgttcgacttgcggatctcraccatgtagagtgaaggggtgacttcaaaaacctctgtcgcaattgccagctgacctttc

SEQ ID NO: 7686 - DNA, 121 bp, Artificial Sequence
  Description of Artificial Sequence: Synthetic probe
gtgtatcctatgccggaaagttcagtgacccgcgcactggggagatatggattggtgtgaytcgtgcagatggtgcgaagtgtgagcgctgttgggcttacacccaggacgtaggatcgtt

SEQ ID NO: 7687 - DNA, 121 bp, Artificial Sequence
  Description of Artificial Sequence: Synthetic probe
aacctggagctgatcaggaggcagctgggtctcgagcatgtcgaggtcctttcagcgttcratggagctgctcgtgccaaggctgggaagcatggtcctgtgctggacaagaacccacctt

SEQ ID NO: 7688 - DNA, 121 bp, Artificial Sequence
  Description of Artificial Sequence: Synthetic probe
gaggaatctgaaaaatcatgctcagatttacgccgatctgtctacatgctatggcaatggyagctactctgagttggaggcgttcatccagtcaaacaccgagaagttccaagctgataac

SEQ ID NO: 7689 - DNA, 121 bp, Artificial Sequence
  Description of Artificial Sequence: Synthetic probe
ttgcccacggtgaaagtgaactacgtaaatcggctgcggcttgagagatgctttgtcgtgkctcgtcatgattagtagtgatcagcaagtttgagctccagatctgaggccgttcatccat

SEQ ID NO: 7690 - DNA, 121 bp, Artificial Sequence
  Description of Artificial Sequence: Synthetic probe
tcgtcgcacagaagacataaacacattgttgaacggtttatcatgttgccagatactgcayttgcatgcaacctgtaatctgctagagtattggttgttttgtcgataaacgtattgtctt

SEQ ID NO: 7691 - DNA, 121 bp, Artificial Sequence
  Description of Artificial Sequence: Synthetic probe
ggaaaggctaaaagaatggatgttcttgctggagaaacagctggtgttgaagggcagctaytgctgctatatcctgttctttttgtactgcagggttttgaagcatatgttggagtattgc

SEQ ID NO: 7692 - DNA, 121 bp, Artificial Sequence
  Description of Artificial Sequence: Synthetic probe
cctgtcttcctctggcacatcagtttgtttgagctttatgattgtaactcctgactcgggytcatcaaataccaacctgactgtagaatacacgccatcagcccagctcccaaaccgccac

SEQ ID NO: 7693 - DNA, 121 bp, Artificial Sequence
  Description of Artificial Sequence: Synthetic probe
acactggtccactgggatcataagttgtatgcagctccatatctacacttgcgaaccgtayctgacggagactgaaggagccagcacggaaattctttgcagccacaagcttagcataaat

SEQ ID NO: 7694 - DNA, 121 bp, Artificial Sequence
  Description of Artificial Sequence: Synthetic probe
aggaggttggcgagtacaagaaggccattgctgactgttcgaaggtactagagcaagatamggagaatgtgtcagtgctagtgcagcgggctctcctatatgagagcagtgagaaatacag

SEQ ID NO: 7695 - DNA, 121 bp, Artificial Sequence
  Description of Artificial Sequence: Synthetic probe
ataagctcaagactggaccgttgttttggatagatacagctgataagcagccatgcattgrcactggtggaatgatcccgtgggcatctgaaggcaacagggaagctgttccacagtggcc

SEQ ID NO: 7696 - DNA, 121 bp, Artificial Sequence
  Description of Artificial Sequence: Synthetic probe
acttctcctgggacaagttcagcacacagctagcagccgcaggagctgctgcacggagctyggacgaggaagaaccgaaagcccagatcgccacggttagaggccaggccagggccaagaa

SEQ ID NO: 7697 - DNA, 121 bp, Artificial Sequence
  Description of Artificial Sequence: Synthetic probe
aagccgctcgaactggaacttgtcacctagaactgcggtggcaagtgatggtacagcatakgcgccctttacaatctctttcgagttggggttaaggtcacccagccaattttccaattcg

SEQ ID NO: 7698 - DNA, 121 bp, Artificial Sequence
  Description of Artificial Sequence: Synthetic probe
ggcaaaaacaagcggtagctttgtgttgcgaagatttggtgcatttgactttgccaagccyggttctgggaaaggtatgaagatcgaggacctggatttcactgacgaagaaatggagatg

SEQ ID NO: 7699 - DNA, 121 bp, Artificial Sequence
  Description of Artificial Sequence: Synthetic probe
actgatggttgttgaagattgtgaagttccgttcttgtatgaccgctccactttgttgacytgtgtagctgagtagtatgctgcgatgcaaacttgacaatgtaacttgttcaccctccct

SEQ ID NO: 7700 - DNA, 121 bp, Artificial Sequence
  Description of Artificial Sequence: Synthetic probe
ttcgactagcttcgagtttgggtaattgtggataccattatggaacacgcgttttcttggmcgggcgacgggaaaatcgaggagaaagtaaaatgaagaatcttgatcaggcagttgccgc

SEQ ID NO: 7701 - DNA, 121 bp, Artificial Sequence
  Description of Artificial Sequence: Synthetic probe
ggtggcgcagatcaacaaccgcttcaagagggaggaggtggtcatcaacggctgggagacygagcaggtggacaaggccgtcgcctggctcaagaagatcgagaggaagcttgacgagcag

SEQ ID NO: 7702 - DNA, 121 bp, Artificial Sequence
  Description of Artificial Sequence: Synthetic probe
atcgccgagaccacgctcctcctctgaacaccaaccaccctacacctacacctacacacamacggcaacgatgatgatggttgctgcgtcctcgactctctcgatcgagggtggtggtgat

SEQ ID NO: 7703 - DNA, 121 bp, Artificial Sequence
  Description of Artificial Sequence: Synthetic probe
tacatctcggatgcaatacataagaagacatggtagggtcttcaagctcactgacgcaacycccgagcactgccctcctggggagttcctccgtgaaatacctctagctacccgtatccct

SEQ ID NO: 7704 - DNA, 121 bp, Artificial Sequence
  Description of Artificial Sequence: Synthetic probe
gtggtgtagacaataagttctggtgctggatctccagaatcgtatttgtttatagggtggyggaggtttttgtttcaggcggtagcctgatttctggctatccaagacctgaaataatttg

SEQ ID NO: 7705 - DNA, 121 bp, Artificial Sequence
  Description of Artificial Sequence: Synthetic probe
cgggctgcacttcctcatcctctacgtgccattcctcgcacaggtgtttggcatcgtgccyctcagcctgaacgagtggctgctggtgcttctcgtggcgctccccgtggtgctcatcgac

SEQ ID NO: 7706 - DNA, 121 bp, Artificial Sequence
  Description of Artificial Sequence: Synthetic probe
ggtcgggacgcattccaccatcgaaagcggcattcaggagattggcctcagtccgccgagygccgatcagtggagctcaccggactcgatgaacatccaattcaaccgggggttcaagggc

SEQ ID NO: 7707 - DNA, 121 bp, Artificial Sequence
  Description of Artificial Sequence: Synthetic probe
atttttttattgttccctccgacccaaattagtttgaatctactcaattttatcaagatayggatgaatctaatactaaattatgtctagatataatcaaatctaaagaaatctaagtcaa

SEQ ID NO: 7708 - DNA, 121 bp, Artificial Sequence
  Description of Artificial Sequence: Synthetic probe
cagtggtcaccgtgcgagaaactctgctgctgctgctcttctattaccgctacttacaagktttatttattaataaccgcgcgtgttgctatatataatgcgggcggaggtattgtattgc

SEQ ID NO: 7709 - DNA, 121 bp, Artificial Sequence
  Description of Artificial Sequence: Synthetic probe
taatttggtgtacaggcgtacagccattctcgcataaaagccacaagacagcgaaatggtycatatgtatacatcatgtattcgtgtggacaactcactggtgcgtgtgcaggcagtggtc

SEQ ID NO: 7710 - DNA, 121 bp, Artificial Sequence
  Description of Artificial Sequence: Synthetic probe
tggagtgctcttatgtagattctcaggtgacggaactgcctttctttgcatctaaagtgckcctaggtcgttctggcatcgaggagatcttgccacttggtccactcaacgagtttgaaag

SEQ ID NO: 7711 - DNA, 121 bp, Artificial Sequence
  Description of Artificial Sequence: Synthetic probe
aatctcggctgtgtagataaaagcagagtttgtagcgtagtacaatcatgtaactggtatstctgcgccctgtcccgctgtatcccgcgtgtagtcctacatattgtaccaaacggagaag

SEQ ID NO: 7712 - DNA, 121 bp, Artificial Sequence
  Description of Artificial Sequence: Synthetic probe
ctgattgatatagctccacagtactatgatctgaccaatttcccatcatgtgaggcgaagygtgtcctcgagaggctacataacaagcgtgagagggaaagagctgccaatagaagctgat

SEQ ID NO: 7713 - DNA, 121 bp, Artificial Sequence
  Description of Artificial Sequence: Synthetic probe
tcacgccttcccatcatctcatcgagatgaaacagacaggcggcgatccgctggagtaccrgaagctgatggaggacatccggccagcgctgaaggacatagtctgggcctggcatggaga

SEQ ID NO: 7714 - DNA, 121 bp, Artificial Sequence
  Description of Artificial Sequence: Synthetic probe
gatggagggctcaatgggcgacccgagaaacttgctgatgtgtgctactcatggtgggtgytatcaagcttgataatgattgatagagtgcactggattgacaaggaaaaacttgcaaaat

SEQ ID NO: 7715 - DNA, 121 bp, Artificial Sequence
  Description of Artificial Sequence: Synthetic probe
atggttgggaaagaaacatccgtttcagcttcgttcgtctcgggggcgtagtcaggacatyctgtctacgaaacaagaagaaactagaggaggaggaggaggaggaggggcgaggttagga

SEQ ID NO: 7716 - DNA, 121 bp, Artificial Sequence
  Description of Artificial Sequence: Synthetic probe
tttgtaatgtagcttttgacaaatacagcactagacacaagtagagtccgcgacagcatgkcaggcaagcaagtcggtgtacactagttcactcaatcgttacagctgcagagttggacct

SEQ ID NO: 7717 - DNA, 121 bp, Artificial Sequence
  Description of Artificial Sequence: Synthetic probe
tctaaagttccattttcactgttacaagagtggtgctcttactgatttcacaagctgaaaycttgaaatgctattttttttgtaagtggagtgattccacttttgtagttttcctttaaac

SEQ ID NO: 7718 - DNA, 121 bp, Artificial Sequence
  Description of Artificial Sequence: Synthetic probe
aactagctactgtcgagtgtttagaagataattcttcttagtcgagctttggagtacatgyaatttaccctctagagtgggaacttccttctagccccagtaaccgacctatggttctgtt

SEQ ID NO: 7719 - DNA, 121 bp, Artificial Sequence
  Description of Artificial Sequence: Synthetic probe
cccttttctgtaccagaaacttgacaagttactgtgtagaagaacatcgctgaggcacttygttgcccttctgtagtgtttttttccaaatgagaaagaaaaccttaaatccttttcatct

SEQ ID NO: 7720 - DNA, 121 bp, Artificial Sequence
  Description of Artificial Sequence: Synthetic probe
tagaaggaccaattcaatggagtggtagacgtaacccgaaagccctgttgttactgtcttrcagttacagagtttcttctttcgctttctgttaccccagtcgtcggtggtggcggcgatg

SEQ ID NO: 7721 - DNA, 121 bp, Artificial Sequence
  Description of Artificial Sequence: Synthetic probe
tgcacagaacagcatgtatactactggttgtctgtccccgatttggggaaaacaggagtgrtcttgtgtaactgtatatattaaagcaatggcttgtataataacgacgatgtcttccatt

SEQ ID NO: 7722 - DNA, 121 bp, Artificial Sequence
  Description of Artificial Sequence: Synthetic probe
tgctcctcgtgggttgtaacatttggttgggtgctgtgtgatgagccatgattgatgatcrcggtgcaacatttgtatggtgctgcttattgctagtttagcctatagtttgactgtatga

SEQ ID NO: 7723 - DNA, 121 bp, Artificial Sequence
  Description of Artificial Sequence: Synthetic probe
atgtagaccattctgctggggactttattgatcttttgcaagggttgcttaggcatgatcyggcaagccgcttaacagcccatgaagcgcttaagcatccattcttgacggaacagagtga

SEQ ID NO: 7724 - DNA, 121 bp, Artificial Sequence
  Description of Artificial Sequence: Synthetic probe
aaggtcctgaataatgattcagcatgtgtgtttgctctgggcttgctgctcgatcttctcygcttgggtctacagccttcggatgaactcaagggaaggatcgaagcaataaataatcctg

SEQ ID NO: 7725 - DNA, 121 bp, Artificial Sequence
  Description of Artificial Sequence: Synthetic probe
ggtcctttgtataaaagttgaggacaagcttgtatttcttgtaatttctagggtcctcttygtaattctacccaccgagtaatggagcttccggggccttcggacctcttacccgttaaaa

SEQ ID NO: 7726 - DNA, 121 bp, Artificial Sequence
  Description of Artificial Sequence: Synthetic probe
tagagtctgtttaagtcttgggcactgcaagctcattgaagagattatgattggggaggayaggctgatacatttttccggggttgcaatggggcaagcttgcaccattgtcctgagagga

SEQ ID NO: 7727 - DNA, 121 bp, Artificial Sequence
  Description of Artificial Sequence: Synthetic probe
gtggatggagcgctacggcctccccgccggcgccacctgcacctccaagaagtacctcgcytaccagtgggcgctcatggccgtcgccctcgtcctcgccgtcgcaggattcgcgaccggg

SEQ ID NO: 7728 - DNA, 121 bp, Artificial Sequence
  Description of Artificial Sequence: Synthetic probe
aaagctctactgctccttagctgaaccttatgtagttatggtggaagtatgtgacaaatgyggcaagtattgggatcaggatatccaggtccaggcatctgggttgggtatggaatctctt

SEQ ID NO: 7729 - DNA, 121 bp, Artificial Sequence
  Description of Artificial Sequence: Synthetic probe
ttcgctcctgctgttggaaggggtcctataccccggatgctgtggtccactggtccaatakgcatgcgatgtaaattatttgtgctgtatgaattctttcttagtgtttttagtatgggct

SEQ ID NO: 7730 - DNA, 121 bp, Artificial Sequence
  Description of Artificial Sequence: Synthetic probe
atacctcgggtcaagctgtctcctcgaggacaatgtactattaagtttctgaacgttacaratatgcctgcacgctatgcgtctgagcggtataatttttgcttgtttctccgaacaccaa

SEQ ID NO: 7731 - DNA, 121 bp, Artificial Sequence
  Description of Artificial Sequence: Synthetic probe
cacttcagaattcaaaacaagggctttggaataacatcaaccctgtgggaccatgtattcrgaacactgccttcaacaaaagccgctgacaagagcacctgagtttcaccgtatctacctc

SEQ ID NO: 7732 - DNA, 121 bp, Artificial Sequence
  Description of Artificial Sequence: Synthetic probe
attcggagaggacgacatggacagtgtggtgaagacggccaagaagatcccaacgaagaarttcaatgacctgacaggcaacgacatcttcaagggcgacgatggtgcggaggtgacgcct

SEQ ID NO: 7733 - DNA, 121 bp, Artificial Sequence
  Description of Artificial Sequence: Synthetic probe
agagaagcttgagaatctgaaacttggggaaggtgtaaagggcgtgtacgtctctgtcgaygtggactgcctcgaccccgcattcgctcctggtgtctctcacattgagccgggaggcctc

SEQ ID NO: 7734 - DNA, 121 bp, Artificial Sequence
  Description of Artificial Sequence: Synthetic probe
cctcgaagctatcgacagtcttgttaattttgcctcttgctgtgccgaggggtgttcatcrtaggtgatgacgaccctggctggtctggtggacgtagatgaccacttagaagaatttgtc

SEQ ID NO: 7735 - DNA, 121 bp, Artificial Sequence
  Description of Artificial Sequence: Synthetic probe
atttcgtactctgaacctatgcggaataaataatgtgtgaggaagttgaggtctgtgctayatcttcagctcttttttcttaaaaaactacagtaccatttcaccgggggtcttaattgta

SEQ ID NO: 7736 - DNA, 121 bp, Artificial Sequence
  Description of Artificial Sequence: Synthetic probe
catccagagttggggaggctcctaagggatgagttccgcaccatcgaggacttcaaggcayggcgtgcggcagagaaagaaaccggcggtagtagcagcaagagtggtgcggcggcaagcc

SEQ ID NO: 7737 - DNA, 121 bp, Artificial Sequence
  Description of Artificial Sequence: Synthetic probe
caccgggtggaaggatgctcggaacgatcctgtcaaggccgtcacgtttggcgacggctcrccactgcctgctgatgtcatagacgaatgcgggaagatcctggaggaggaatgcgtcgcc

SEQ ID NO: 7738 - DNA, 121 bp, Artificial Sequence
  Description of Artificial Sequence: Synthetic probe
aaatgacgatgacccaaaactgcgggaattgtggattgagtatggcgacgacgtttgtaaygcagtgaagaccgctctgagcgaagtaaacgactacaaccccagtggaaggtacgtggtg

SEQ ID NO: 7739 - DNA, 121 bp, Artificial Sequence
  Description of Artificial Sequence: Synthetic probe
ttggactcaaactttgttgtatgagttgactatatagatgagtaggctgattccagctccytgtgatgaaaaaaagtgctactctaacgaataaagactgctccattttctgcattagtaa

SEQ ID NO: 7740 - DNA, 121 bp, Artificial Sequence
  Description of Artificial Sequence: Synthetic probe
ccacaacgccgatttcggttgggggcggcccgtgttcatgggtcctggtggcattgcctaygaggggctggcgttcgtcctcccgagcgcgaacaaggacggcagcctgtccatcgccatc

SEQ ID NO: 7741 - DNA, 121 bp, Artificial Sequence
  Description of Artificial Sequence: Synthetic probe
aaacggaggcgaggactgggtgagcagcatcgttaggcggcagtggagttgggaagcaatyttcttgagcttcacctcggcggcgggtttcagccgtccgacatccaaggccaatgttact

SEQ ID NO: 7742 - DNA, 121 bp, Artificial Sequence
  Description of Artificial Sequence: Synthetic probe
gcgcacaagagagctgttaccctcaggctgcaagagatcgaagccactgtaactgtgtaaytgttgacgatggtctgttgtaccggtaaatttgatgcgctgggaactatatatttcagat

SEQ ID NO: 7743 - DNA, 121 bp, Artificial Sequence
  Description of Artificial Sequence: Synthetic probe
ggtcagcttcgacttcatgttcaacccgcagcagtacggcttcgtcaccgccaaggtggcmtgctgcgggcaggggccctacaacgggatcggactctgcacgccggcgtccaacgtgwgc

SEQ ID NO: 7744 - DNA, 121 bp, Artificial Sequence
  Description of Artificial Sequence: Synthetic probe
ccgcatgctacccaaccaacgttgtcaatgaaattccgagtcatgaggcaagctctcacartcctgcatgggagcactgctttcttgcatgctctgggatcaattttgccacgatgtccac

SEQ ID NO: 7745 - DNA, 121 bp, Artificial Sequence
  Description of Artificial Sequence: Synthetic probe
cgctccagaaggtttccattagcagtttttatgtcctgttttcttgctagttgaggcgaawggtattggtaggatgtaaatttgatatccgggtgggggtacagtggccatcctctgcacc

SEQ ID NO: 7746 - DNA, 121 bp, Artificial Sequence
  Description of Artificial Sequence: Synthetic probe
catagcaaaagtccgcaatcagattggagcatttgcagctcctgacaagatccactgggckccaggacttcctaaaacccgcagtggcaagattatgcgcaggatcttgcgcaagatcgcc

SEQ ID NO: 7747 - DNA, 121 bp, Artificial Sequence
  Description of Artificial Sequence: Synthetic probe
gcgaggataaagcctcatagttgctattttgtctattcttaatggagaatgtgtgtataayagatctcgtaggaaaggtatatataatggagatctggtatttagtagtgtcttggagtag

SEQ ID NO: 7748 - DNA, 121 bp, Artificial Sequence
  Description of Artificial Sequence: Synthetic probe
ggcggccgaggagagtgctactgaaacgctggagaaaggatggtcgtctattggttctgcraagaagaggctgtcctttccggctggagtagcgccatcatcggcaccgatgagacggcat

SEQ ID NO: 7749 - DNA, 121 bp, Artificial Sequence
  Description of Artificial Sequence: Synthetic probe
tctctagcatagggtgcctgaagaacatatcttgttgtgactgattctgtgttcgattttsaattcattgtaagcatacactaattgaggtgtaagaaagtgcctacttgtttataccatg

SEQ ID NO: 7750 - DNA, 121 bp, Artificial Sequence
  Description of Artificial Sequence: Synthetic probe
agaaactctactagtctcaaccaatttctactatttacatcgaagagtgatcaaccagaayggttcaagaaaaatcatgtggatacatccgatattgttgaaaataatattgcctcttgaa

SEQ ID NO: 7751 - DNA, 121 bp, Artificial Sequence
  Description of Artificial Sequence: Synthetic probe
cgtgaatgctcaaaaagccaaggaaagtggccagcttattccaagtactaaagcaatacayaaaacacatcggcctatgaaaattgagactgatgggaatttggatctgaagaaaggcagt

SEQ ID NO: 7752 - DNA, 121 bp, Artificial Sequence
  Description of Artificial Sequence: Synthetic probe
gtaggcttctgtggctatagtacttgcccagaaaagtcgtccacagtttattgctaaataytgatttcaccataacatctaaagttgaattgtcttgcatccaacttattctaatttaccg

SEQ ID NO: 7753 - DNA, 121 bp, Artificial Sequence
  Description of Artificial Sequence: Synthetic probe
ccctgcactctttgttctggtgctggctcactgttgcgggccaagttcggcaagcccgcaygtgtgttccctacttgttgcggagtaaagcagcttggagtagccaagcttgtggctcgag

SEQ ID NO: 7754 - DNA, 121 bp, Artificial Sequence
  Description of Artificial Sequence: Synthetic probe
cgagtttagcctttttcatgcttaattgtattgtgtcagtttgtggtcctgttactagctygctgtgacttcatgatgagacccaacttgcttcttgaaaaatttgtgtaccgtggtgact

SEQ ID NO: 7755 - DNA, 121 bp, Artificial Sequence
  Description of Artificial Sequence: Synthetic probe
catggatgatcaggttgttaaggttgcagactttggggtagcaagggtgaaagaccagtcrggagttatgactgcagaaacaggaacytaccgatggatggctcccgaggtcattgaacac

SEQ ID NO: 7756 - DNA, 121 bp, Artificial Sequence
  Description of Artificial Sequence: Synthetic probe
ggtggaggagtatttcctgtaatcaaagagccggattaccttgttaatggggaatatcgtrttgacaaaggggcatcaccaaaaatgttgaattgtctaatgtacaagctctgttattatc

SEQ ID NO: 7757 - DNA, 121 bp, Artificial Sequence
  Description of Artificial Sequence: Synthetic probe
agctgaatggcttgtaatcttgggacccatcttcctgacattgttgcttcttttcgttagygggatcccacttcttgagtcatctgctgataagcgcttcggtcggtcagaggagtaccgc

SEQ ID NO: 7758 - DNA, 121 bp, Artificial Sequence
  Description of Artificial Sequence: Synthetic probe
gggggtgacctcggtttcatgggccccagcaatggcccctggttctctgatcaccacaggrccttctggccagtttgagtaygttcagaaacttgcatctggtggctgcgataacacggtc

SEQ ID NO: 7759 - DNA, 121 bp, Artificial Sequence
  Description of Artificial Sequence: Synthetic probe
gagaaacgtaacaggatgctactaatcagaagggccaatcattttctctggaacaactagytcatggaattctttttccgtcaaaactccaaggcttaaagcagattccttcagtgttgtt

SEQ ID NO: 7760 - DNA, 121 bp, Artificial Sequence
  Description of Artificial Sequence: Synthetic probe
actatatgaacccccagatccgacttccttcagcactgtttttgctcatgagaaaagctcygtacctacttggtccgggccattggtcaattcttccgcagttggggaccaaaagcggaaa

SEQ ID NO: 7761 - DNA, 121 bp, Artificial Sequence
  Description of Artificial Sequence: Synthetic probe
tggtgctcgcctggaggatccttaccgtccaagagagattgatgcccgtggtgctcgtgtrgaggatctctaccgtccaggagaggttgcctctcgtggggctcgtgtggaggatcactac

SEQ ID NO: 7762 - DNA, 121 bp, Artificial Sequence
  Description of Artificial Sequence: Synthetic probe
tgtattagtagctcggagcgagcaaattgatgtaccttgtatgggtgtgatgtaagctgtraccatgtatatgacggccatttgttgtgccggtgactgtcaccgaagttcttgtgtacca

SEQ ID NO: 7763 - DNA, 121 bp, Artificial Sequence
  Description of Artificial Sequence: Synthetic probe
agcagctggccaggctatgatgatcaagggagactggatcaaaccaggcgctgcggtcatygatgtcgggacaaattccattgacgacccaaccaggaagtccggatacagacttgtcggt

SEQ ID NO: 7764 - DNA, 121 bp, Artificial Sequence
  Description of Artificial Sequence: Synthetic probe
ccgaatctcctttcaggcaactcaggacttgacctccctcaagagcatggctggggagacygggaagaagctgacatctatggcatcaaacatcatgtctgatcttcaagaccgcatcctc

SEQ ID NO: 7765 - DNA, 121 bp, Artificial Sequence
  Description of Artificial Sequence: Synthetic probe
gtgtagttccttcctcgatctccttgggtggacagataagtgtccaccaggagaactaatsgttgatgacagtatgcggctaaataatttgagaattacctgggctttgcgacgagaacga

SEQ ID NO: 7766 - DNA, 121 bp, Artificial Sequence
  Description of Artificial Sequence: Synthetic probe
attcttggggtttttgctccccaacattttgttgtgcatatgtacgcacgattatttgttygtgcgatcaaggtgtctgtaacatatataaagtagataaaggtgtatttctgacattttc

SEQ ID NO: 7767 - DNA, 121 bp, Artificial Sequence
  Description of Artificial Sequence: Synthetic probe
aaaagaaactggacgccgtgtcttcagacctgtccggccacgacgagctttaaatcgtctmacgaggaaacagcgactccaccattacaacaaccataaccatacgaagggctaatgagga

SEQ ID NO: 7768 - DNA, 121 bp, Artificial Sequence
  Description of Artificial Sequence: Synthetic probe
cttcaaaatgtttgtgatgggaagatgcacccgcttacatctatgcaccatacatctacgyacaattcttccctctgcaaactaatggagtattgcttgagcccagctataactgtacttc

SEQ ID NO: 7769 - DNA, 121 bp, Artificial Sequence
  Description of Artificial Sequence: Synthetic probe
ttctggtgtggcactggctgcaaaggccataaatccttcaatacgtattctggcagcagarccaaagggtgctgatgattcggcccagtccaaggcygctggacrtatcatcaaactagct

SEQ ID NO: 7770 - DNA, 121 bp, Artificial Sequence
  Description of Artificial Sequence: Synthetic probe
cacacctaggatgtcagactcatccgtggagcagagttgggagagcaacgggaatcatgtyggtgggggttcccagctggcccctcgtatcactgggcgtgagatgaacgccagcatcagc

SEQ ID NO: 7771 - DNA, 121 bp, Artificial Sequence
  Description of Artificial Sequence: Synthetic probe
acacaatacacacacttaggacttaggacacccattcgttcctgctagtctgagccatcarcaggatccacttgtacacttcatttttttctctgcatctgttgtatagttgcatctgcta

SEQ ID NO: 7772 - DNA, 121 bp, Artificial Sequence
  Description of Artificial Sequence: Synthetic probe
atacatgcgaacattgccttgcacaacctcgcagtctgaacggataaagaaactgtttcaygggtcatggacagcagttgatcattggaactgtgggttcatagcaccaaaccttgcccct

SEQ ID NO: 7773 - DNA, 121 bp, Artificial Sequence
  Description of Artificial Sequence: Synthetic probe
atgggctggaatcacatggttggattactggaggaatgaacagtttttcatgatcgggtcracaagtgcatacccagcagcagtgctgcacatggtggtaaatctcctcacaaagaagggt

SEQ ID NO: 7774 - DNA, 121 bp, Artificial Sequence
  Description of Artificial Sequence: Synthetic probe
tgcttccctccacaagacaatgatttggagagctatatgctcggcgacaaatcgatcttamgcgacgccggagtgcaatccatagcagacgtcgaggcccttccagcgcctccggagatga

SEQ ID NO: 7775 - DNA, 121 bp, Artificial Sequence
  Description of Artificial Sequence: Synthetic probe
atgaggctttgccacggtctgttacctggcagcaatgggtttgatacgattcttttgttgragcctatcttgaattgttgcctggttggttcttttgtcaaagtgtcacctgagcacttgt

SEQ ID NO: 7776 - DNA, 121 bp, Artificial Sequence
  Description of Artificial Sequence: Synthetic probe
ttttgtctggagttcatgctgcaatctgtagtatggaatgctgcgtccagccatccaactkctgagatgaaggcgctgtgcatgttaatatcaattctcagccccaataaactgtcagact

SEQ ID NO: 7777 - DNA, 121 bp, Artificial Sequence
  Description of Artificial Sequence: Synthetic probe
gtgacgacgtgtccaagcatgtcttctttgatagcttccaccccacagaaagagcgtacargatcatcgtcgactacatgtgggacacatatggccatctcctgcaaccttgaattgagtt

SEQ ID NO: 7778 - DNA, 121 bp, Artificial Sequence
  Description of Artificial Sequence: Synthetic probe
ggaatatactggaactgctaactcagcttttttctttaactactccaactatcgcaacatmtaccctattatggctcttggagagcttcggcgcaaacttactgcgagcagaaagtaatgt

SEQ ID NO: 7779 - DNA, 121 bp, Artificial Sequence
  Description of Artificial Sequence: Synthetic probe
gttttcatcaccggacatgaacgatccctgggcgaggatgagaccgcagaccgaatactaygacgaatgggagttcagttcacgctagtgccatttggtacgggttccttgattacgttta

SEQ ID NO: 7780 - DNA, 121 bp, Artificial Sequence
  Description of Artificial Sequence: Synthetic probe
tgtttattccttctctttgggagagaataaggtgcagcttgtaaaggggtgacttacagcytgctgaataagcagaataactgtaagttgatatatggaaaagcgggtgcttatatatatt

SEQ ID NO: 7781 - DNA, 121 bp, Artificial Sequence
  Description of Artificial Sequence: Synthetic probe
gaaagaaaaggacaaggagatcgttctacggccgttaaacatgaaagatttgaaagaagcraagaaccaggtggcggcgagttttgctgctgaaggttccataatgggtgaactgaagcaa

SEQ ID NO: 7782 - DNA, 121 bp, Artificial Sequence
  Description of Artificial Sequence: Synthetic probe
gacggctttgagtagaacactctcacagcatagcaaagttgcccctgcgtccatacgacgyttaggtgtcgatggtggctgcccacctagcamagatcggcaatgtgccaggagagcacat

SEQ ID NO: 7783 - DNA, 121 bp, Artificial Sequence
  Description of Artificial Sequence: Synthetic probe
acaaaggggattcaaaaactaaatcaaaggcaactgatgacaagaagaaacagcaaagacyattcctcatgcagttcttctcaccaattttcataaaggcattttccattactttctttgg

SEQ ID NO: 7784 - DNA, 121 bp, Artificial Sequence
  Description of Artificial Sequence: Synthetic probe
aatctccgacgaacacattttgcataaaaagtagcgtttatgtgtctccccgaccaaactrtgggaccacagaaagaaagatcctcaaggagaaaactggagtactgaaaagttcaccacc

SEQ ID NO: 7785 - DNA, 121 bp, Artificial Sequence
  Description of Artificial Sequence: Synthetic probe
ttgctcgtgaaatggttagtactagtgaacaatctccggatccacaaagctgagcttactygcagcgaaggccagatgacctagtgcagttctcttaagcaatccagatactgctacaact

SEQ ID NO: 7786 - DNA, 121 bp, Artificial Sequence
  Description of Artificial Sequence: Synthetic probe
gataagtcatggttgagttgcaaggacaacattcggaactgcacttccacacaaattgaarttcttgatgggttttggaatacaatggtgaatgccttgaaggtcgtcaaagataaggagg

SEQ ID NO: 7787 - DNA, 121 bp, Artificial Sequence
  Description of Artificial Sequence: Synthetic probe
cgttgagagcagctcagacggttcgatggacagccttatgctgaacagtgtcatggaggayggcgctagtaatggggatctctggagccttgatgagctgttcatggcagctggtgcttat

SEQ ID NO: 7788 - DNA, 121 bp, Artificial Sequence
  Description of Artificial Sequence: Synthetic probe
atgagtccgatgacagttccgaaagctcgagttccattgaggcagatgagaggaagggcaygggtaacaagaacattgccagtggcaaacccgggcttgcggcgccagcgcctgtgcacat

SEQ ID NO: 7789 - DNA, 121 bp, Artificial Sequence
  Description of Artificial Sequence: Synthetic probe
cctcgccgccacgctccactgattcattcctacagcatcacgtctgattacttagtagtaktagtttggtttggtacaccgaaacaccagtgctcaatcatgagcacatctgcatttcatc

SEQ ID NO: 7790 - DNA, 121 bp, Artificial Sequence
  Description of Artificial Sequence: Synthetic probe
tcacaagctcttcctgcaaccctgaaacacttcagtgtctgatctgtagcactttggactrtctactatccagaaaatgccaggtttgacggttgaaggtgttcaaatcctcactgcaatc

SEQ ID NO: 7791 - DNA, 121 bp, Artificial Sequence
  Description of Artificial Sequence: Synthetic probe
caggcgctgcacgacggcgccgcgtcgcggccggcggtcgaggggttcgccaggaaccagwcgctcttcttcgaggcgttcaaggaggccatggtcaagctcgggagggtgggtgtgaaga

SEQ ID NO: 7792 - DNA, 121 bp, Artificial Sequence
  Description of Artificial Sequence: Synthetic probe
cacttcaatcgagatttatgaggataataacaatgggtatattcccccaacttatgaggawggtacatcgtctggaggaggattgagaatgaagctcaaagagttccacaaaagcacaaca

SEQ ID NO: 7793 - DNA, 121 bp, Artificial Sequence
  Description of Artificial Sequence: Synthetic probe
cctgaagattggtgcgagcttggaaacaggaaaaggtttctcgttggttgcaaatatgagygccagggttggctcgataggagacaacggtttgggaggctggcattcatacagagcttct

SEQ ID NO: 7794 - DNA, 121 bp, Artificial Sequence
  Description of Artificial Sequence: Synthetic probe
cgagtacttgaaggaatcagaggttgtactcccggtccaaatcaatgggaagacccggggyacaatccttgtcgacaaggagtgctccgaggatgacgtgttcgagaaagcagcctccgac

SEQ ID NO: 7795 - DNA, 121 bp, Artificial Sequence
  Description of Artificial Sequence: Synthetic probe
gatcaaactagaagctgtttagtgcaagattgagaatccatgtgtttgctaccggtagctrtgcctcacagctgctggcgcaggagtgatgcagagtcaagttgtgggttcaagaagacca

SEQ ID NO: 7796 - DNA, 121 bp, Artificial Sequence
  Description of Artificial Sequence: Synthetic probe
ccaagaacttgagctggacaccctgcaatatgtttgcatgggtactctgtgctcctccacyacctggatggccggatatgatgattgagcatggggcgccgacagtacagttgcttaacaa

SEQ ID NO: 7797 - DNA, 121 bp, Artificial Sequence
  Description of Artificial Sequence: Synthetic probe
aagtctttcctcttcgctgcattcttcttcgcttcacaagagtgggagtttgtcagatagractgtggaagcagttgagtctacagataaacatacagtcgctgaaggtgcaaggccagct

SEQ ID NO: 7798 - DNA, 121 bp, Artificial Sequence
  Description of Artificial Sequence: Synthetic probe
ttgtacctaaacttctacgacctgaacaaaggcctgaacatgaaggtttgcactgttattrgcattgctcagctccttgtgtgggcattgtgggcagccttcacaaggcatccttcacggc

SEQ ID NO: 7799 - DNA, 121 bp, Artificial Sequence
  Description of Artificial Sequence: Synthetic probe
agcgactatcgctgagaaactgggtttagagaaagacaaccggtccaacttcaaggcccarttcggacacttcgcgaccagtgtggacggtgtctttgccgctggggactgcagacgtgga

SEQ ID NO: 7800 - DNA, 121 bp, Artificial Sequence
  Description of Artificial Sequence: Synthetic probe
tcctggatgggtcaaccgacttgccaaatttggttctgtctgcaactgtgtgcttcctgaraacataaaggtttcagcggtcagagatgaaactgcagacctcgagttttcagacgatgat

SEQ ID NO: 7801 - DNA, 121 bp, Artificial Sequence
  Description of Artificial Sequence: Synthetic probe
gagcacaagagcccggagcacctcgccagaaacccgttcgggcaaatccctgcatttcaakkmcsgggatctgcttctcttcgagtcmcgcgcgatctcmaagtacgtgctccgcaagtac

SEQ ID NO: 7802 - DNA, 121 bp, Artificial Sequence
  Description of Artificial Sequence: Synthetic probe
ggagcctgccgacgtgaagaaagtggcgaccacgctgaagcgcgcagtcaaggtcgtcggyacgccggcgtaccaggacatggtcaagaactgcatgacccaggatctctcctggaagggg

SEQ ID NO: 7803 - DNA, 121 bp, Artificial Sequence
  Description of Artificial Sequence: Synthetic probe
tccagccagcactaccttggttcgtccagccagcactacctgggttcgtccagccagcatyggtcgtcgtacttgcggcgctgcggcgagtcggggcccagcttgtccaccatggcccctc

SEQ ID NO: 7804 - DNA, 121 bp, Artificial Sequence
  Description of Artificial Sequence: Synthetic probe
cgcaaggtcactgctggaagtgctgatcgcatggtctacatctgggacacaacatcgaggmggatcctgtacaagcttcctgggcacaacggttctgtcaacgagactgctttccacccca

SEQ ID NO: 7805 - DNA, 121 bp, Artificial Sequence
  Description of Artificial Sequence: Synthetic probe
caacgaatacatccagtcctgcgacattgttgccttcaacaagatatagaatctcggtacmatcagtattgctgctgctggattcttggtactgggattggtctttctggaagcattttca

SEQ ID NO: 7806 - DNA, 121 bp, Artificial Sequence
  Description of Artificial Sequence: Synthetic probe
ggcgcggagcctgcagccgagcgtgaaggcggggctgcttgccaaattgagagagtacaartctgatctcagcagtgtcaagagcgaggttaagaaggtctcggcgcctaatgcccaccag

SEQ ID NO: 7807 - DNA, 121 bp, Artificial Sequence
  Description of Artificial Sequence: Synthetic probe
cctatagttgatgataatggatcccttcttgatgtctatgcactcagtgatatcatggctytggcgaagaatgatatttacactcgcattgaacttgagcaagtgaccgtggagcatgcct

SEQ ID NO: 7808 - DNA, 121 bp, Artificial Sequence
  Description of Artificial Sequence: Synthetic probe
cttccattttctcaagcaaatggaaaatgaaaaagaatgaaagcctcggagctgtcttccsgtgagaatcattcgatgactgggaaaaaggtccgaggcatatctttctagagatgtgccc

SEQ ID NO: 7809 - DNA, 121 bp, Artificial Sequence
  Description of Artificial Sequence: Synthetic probe
cagtgtgacctgttccttccgtgtattatatactagcacgttatccttgtcggtaggactyggtatggcagcagtttccctctagggaacttgtagagcgactttgtctgtctgtagagaa

SEQ ID NO: 7810 - DNA, 121 bp, Artificial Sequence
  Description of Artificial Sequence: Synthetic probe
gggccaggttaggaggagtgatgcgctaagctacatcaaacttcttcgtgctgtttacatmcctatccacggggctagtgacatgcttgaaatgcacggggagtctgaccctaccatggta

SEQ ID NO: 7811 - DNA, 121 bp, Artificial Sequence
  Description of Artificial Sequence: Synthetic probe
cccatctgtggtgaaatcggctccagctggtgccgttacgtttgtggcgtacgaatacatmtcggactggatagcaagcaaggctggagttgagtaagtccttgtccgatacaggagctaa

SEQ ID NO: 7812 - DNA, 121 bp, Artificial Sequence
  Description of Artificial Sequence: Synthetic probe
gaggagctcaaggcgcaggccaagacggaggcggacaggttcggcgacaaatacggtgatsgggtgctgcccttgtacagcttcgtggactacgccgtggagaggggatttgagctccagg

SEQ ID NO: 7813 - DNA, 121 bp, Artificial Sequence
  Description of Artificial Sequence: Synthetic probe
cattggcctatttttattttgcattttccgatgagtgatcccggagtttgagatgccctcygtctggtgtcatgtgtgcgtgcgtggccgtcgtttagcgtcttcaacatgtgtggcaaat

SEQ ID NO: 7814 - DNA, 121 bp, Artificial Sequence
  Description of Artificial Sequence: Synthetic probe
ttggaacagtgggcaaagttatgaacataaccattcatgatccacacgcagtaggggaatrtgcaggatcaaagaagactgacttcatgctgagtaacaaggtgcatgccattgtggagta

SEQ ID NO: 7815 - DNA, 121 bp, Artificial Sequence
  Description of Artificial Sequence: Synthetic probe
actgctgattgagatggcaggcaataataacgtgaaggagaaattgaggaagcttcctacrttgttccctgctagaagtttcaccaaaagatcgtaccctcattgaatccagaatcattac

SEQ ID NO: 7816 - DNA, 121 bp, Artificial Sequence
  Description of Artificial Sequence: Synthetic probe
cataaaagaagaaactgatggaaagggtgttgatgtcattttggacaatatcggcggatcytatctccagcgcaatctgaacagcttagctattgatggtagactcttcattatcggtttc

SEQ ID NO: 7817 - DNA, 121 bp, Artificial Sequence
  Description of Artificial Sequence: Synthetic probe
tggcccgctggtgaacaacgacttcatcgcctccgtcgtcatcctcaaggcgccgctgccrctcgacggcaccaggatgcttgccagctgcgtcaccaaggaccactccgacgagttcgtc

SEQ ID NO: 7818 - DNA, 121 bp, Artificial Sequence
  Description of Artificial Sequence: Synthetic probe
gtgattatttgagtcgaccttttgagaaccctgtaggactggttcggactccatatactcygagaatacagtgtcaccacagttttgtttgacggccaaaagatgagattgtgtaggaatg

SEQ ID NO: 7819 - DNA, 121 bp, Artificial Sequence
  Description of Artificial Sequence: Synthetic probe
tggtcgtcgagaagtcccagctgagcggacccatgctactccaactccaactacatcgacrccgtcaagaccgacgaggcacgacggcgagggcgggcgtggccggagtaaaggccacgct

SEQ ID NO: 7820 - DNA, 121 bp, Artificial Sequence
  Description of Artificial Sequence: Synthetic probe
agcatgtgaatacaaaaagggacgtggtgacgatagagcctttcaatggaatatgcgaatycgtgaatacacatgaatttcgtatggcgtgcgtgggttctttgtatgttgccgtttcaca

SEQ ID NO: 7821 - DNA, 121 bp, Artificial Sequence
  Description of Artificial Sequence: Synthetic probe
gcgggttcaaggttccaagatcagtgagaccgagatcaaacagttcgttgcaaaggaggtygtatattacaagaggatcagtaaagtttttatcacggactcaattcccaagagtgctgcc

SEQ ID NO: 7822 - DNA, 121 bp, Artificial Sequence
  Description of Artificial Sequence: Synthetic probe
cagcggtgatcaggaagaaggcgccatgccgatggattctgacaatcccgtggtagacgayggcagccagaagcggagcccaggcgaagtctccgggcccgagtccggacagtgcgaagct

SEQ ID NO: 7823 - DNA, 121 bp, Artificial Sequence
  Description of Artificial Sequence: Synthetic probe
gagggaaaccatcaaacttccgtttcttcatttggatccccagtctccaaatgtatcagtygatgtattcaggaatttgtcaccccatgttcaagcttgtgtgccagacctcctgaagtta

SEQ ID NO: 7824 - DNA, 121 bp, Artificial Sequence
  Description of Artificial Sequence: Synthetic probe
gatttagtgtacatatttgccagaataaggtatttctggtgcacctgtaggttccatgggyaagggttgagtgtgtgaatattgtgccatgggtcatgtggtggtggaactccaaaatcag

SEQ ID NO: 7825 - DNA, 121 bp, Artificial Sequence
  Description of Artificial Sequence: Synthetic probe
ttctgaaaggcaaactgtgtttggaaggcactttgacatagtacttactagtcagcatctsaaggaggccctaggattaggtgtctgtacagatttaggggctacaagggcggaagggccg

SEQ ID NO: 7826 - DNA, 121 bp, Artificial Sequence
  Description of Artificial Sequence: Synthetic probe
gactccaataaacttctttagacgtttgccagcaaggactgatagcatgctatgaagtagytggcatctggtggccttaccgttgtaatcgctagaaatactgcatgcctgttcatgtagt

SEQ ID NO: 7827 - DNA, 121 bp, Artificial Sequence
  Description of Artificial Sequence: Synthetic probe
aaggctatgttgaaatacccggtggatgtagaatcagatatgaagaatctgcagaggctgmagtagcgtatgcttctgagttctgccgtgaagcaccgcacagtccatttgcacctggcac

SEQ ID NO: 7828 - DNA, 121 bp, Artificial Sequence
  Description of Artificial Sequence: Synthetic probe
agatggccaggtggtctcaatctcgatccatcctgtgcccatgcatacggatccggatctmgtacaattctacattgccacttgaatccttgatcgataccccctgcctgctcctaggtaa

SEQ ID NO: 7829 - DNA, 121 bp, Artificial Sequence
  Description of Artificial Sequence: Synthetic probe
ttcttagactagaaagcaaaggagcatatttatgtacagggcatgcgcattctttatgtayacaatgaaattctttgtcaatttgacttgcactacaactttaccatacagtgtgcattta

SEQ ID NO: 7830 - DNA, 121 bp, Artificial Sequence
  Description of Artificial Sequence: Synthetic probe
gcgtcttcttgccctcgagcttgctggtgacgtagtgccggctgtactcgccgtggttgarcctccggtacctgcacggctccccgtcgccgacgagctccggcagcgggcccatctcgac

SEQ ID NO: 7831 - DNA, 121 bp, Artificial Sequence
  Description of Artificial Sequence: Synthetic probe
ggatgcatggtaatcattattgagttgctgaactctgtaataagcacttgttgtactcttkatttcttcttcttcttcctttataattcgatgattgaagctctgcttgtaattaaaaaaa

SEQ ID NO: 7832 - DNA, 121 bp, Artificial Sequence
  Description of Artificial Sequence: Synthetic probe
gatgctgccaaggacgacgacgagtgaagatgagggtgaggaagatagtagcctttccatkaaggtggtagtctccaagggaactggcccgaagctcgagttcacctgcacagccttccgc

SEQ ID NO: 7833 - DNA, 121 bp, Artificial Sequence
  Description of Artificial Sequence: Synthetic probe
cacaaagcgtacaaatgtggctctcacaagggccaagcattgtttgtgggtgattggcaaygcaacgactttgtccaagagcaggtctgtctggcagaacattgtgtatgacgctaagaaa

SEQ ID NO: 7834 - DNA, 121 bp, Artificial Sequence
  Description of Artificial Sequence: Synthetic probe
atggcatggcggggagattacacacactgtactattactgtcaatttgagtttgttattaktatgaagaggtggagggttattatggacttattcgttatttttattgcattttgtagata

SEQ ID NO: 7835 - DNA, 121 bp, Artificial Sequence
  Description of Artificial Sequence: Synthetic probe
cctcccgtggtgcgcgcgcaacaacctaggaagatgctcccagacaacgcggcaaaggaayccgggagagcttctgcagccaagaagtcgtcagggaagcggtcacggaagtcaggctcga

SEQ ID NO: 7836 - DNA, 121 bp, Artificial Sequence
  Description of Artificial Sequence: Synthetic probe
gattgcttcattctagtcgagtacccactcaaaacagatatgcctgaatcctgtggagacytaataaagatagctgacaggaggtttggtaggacaaacctgctaatttatgggccaacct

SEQ ID NO: 7837 - DNA, 121 bp, Artificial Sequence
  Description of Artificial Sequence: Synthetic probe
tgtcgatgcccaatggatcgtacaccaagtggttccttctctcgggaaccagggacaatcrgagaatgggaaggcaccatgggaaggcgtccgagagcggtgccgaaaggagtgggggata

SEQ ID NO: 7838 - DNA, 121 bp, Artificial Sequence
  Description of Artificial Sequence: Synthetic probe
ttgtgagtttcaagaagtctctggatgcacacgctgaacttctcgcaaaggagttggcgaygaacagaactcgagcgctggaactgaaaacagacgaaccagctgcagatgagatcgtgyc

SEQ ID NO: 7839 - DNA, 121 bp, Artificial Sequence
  Description of Artificial Sequence: Synthetic probe
acttcatctctgaggaaggggttgatgaggtgaaggagattctgaaggatggtaggaactygctggaagtgcttggcccgctggacgagaacgatcccgagggggacccagaagatgatgg

SEQ ID NO: 7840 - DNA, 121 bp, Artificial Sequence
  Description of Artificial Sequence: Synthetic probe
gaaagcgttcagctttgtgatgggtggatggtggagtggcatctcaacaatgtcattcaayaagaactttgtacagcaggttcaggagaagttctccaaagatacggatattatcctagtg

SEQ ID NO: 7841 - DNA, 121 bp, Artificial Sequence
  Description of Artificial Sequence: Synthetic probe
ttacttttgaccaacggagggacagaaatctacgccgacgtgaggaggaactcgttggaasaggcactcaagctgtgtcttgccagcggcatgcaaggtatcgtgtccgaggcccgtgcaa

SEQ ID NO: 7842 - DNA, 121 bp, Artificial Sequence
  Description of Artificial Sequence: Synthetic probe
agttagaaatctcaagttggtagacaatgaaatatgggccatgatgcgtgaaggagaagcrgagaagcagaagcagtacgctgccctcatatggacttctagtccyytgacrgatgatgac

SEQ ID NO: 7843 - DNA, 121 bp, Artificial Sequence
  Description of Artificial Sequence: Synthetic probe
gaaaaacgtcaacgctatgctttgtgattgtgaagtgacatttgtgagtttatgtagccgytgtgtgctcgttaactcgttatgctctatttgttaagatatgtgcctactgttgttattc

SEQ ID NO: 7844 - DNA, 121 bp, Artificial Sequence
  Description of Artificial Sequence: Synthetic probe
gaattatgatcctcgtgctaaagtcatccggaagttagcagaggaggttttcacgattgtkggacgggatcctctaatcgaggtcgccgttgctttggagaaggcagcactgtcagatgag

SEQ ID NO: 7845 - DNA, 121 bp, Artificial Sequence
  Description of Artificial Sequence: Synthetic probe
actacgaacaaaccaggggaaatgatatgtcgttttcctgctccaatatttgttttcctcyctctctttctctatggtctctctctttctctcagtgtaatgtaatgcagtgtgatgtgat

SEQ ID NO: 7846 - DNA, 121 bp, Artificial Sequence
  Description of Artificial Sequence: Synthetic probe
cccatacgacagtggtgcactgaaacatggatgcagcttgctcggaactggactttcattkggtgtcactgctgccattgtcatggccctcggtttctgatttcagtacttgcgtgtcttt

SEQ ID NO: 7847 - DNA, 121 bp, Artificial Sequence
  Description of Artificial Sequence: Synthetic probe
tatcctattcttgaaaggtgcatctgagaagtctcttataattatcgatgagttgggacgyggaacttccacatatgatggattttggtcttgcatgggctatctgtgagcatcttgtgga

SEQ ID NO: 7848 - DNA, 121 bp, Artificial Sequence
  Description of Artificial Sequence: Synthetic probe
gtttcgctgagctgcgcggtagcaataagaggttgcccacctcaatgtgcaatggcatagytgctggtgaaacttttgtttctgtttttgcgaatgagggactggagaaacattggcatgt

SEQ ID NO: 7849 - DNA, 121 bp, Artificial Sequence
  Description of Artificial Sequence: Synthetic probe
cctatgtatccagaggtcgccaactcgtcgcccatcaagtgaggaggtgcttgaaatgctmtctggtgagggtcaaccaccacatctcccagttgagttctcaccatcgcctcctggcggt

SEQ ID NO: 7850 - DNA, 121 bp, Artificial Sequence
  Description of Artificial Sequence: Synthetic probe
ttcctgtatccaagtgaaggcatccatcggcgatgggagcatggttacagaataacttctkcagcagccaccagtgaccaagctgcttttatcctgagcaaaccaaaacggaaaccggtag

SEQ ID NO: 7851 - DNA, 121 bp, Artificial Sequence
  Description of Artificial Sequence: Synthetic probe
ctcgacgacccagctctccatctccatcccgatgcctagatgcgattgacaggcctgccaygtcagtgcgcgcggcagctcaatgcgtcgtcgccgtggttggttggtggtgctgtccatg

SEQ ID NO: 7852 - DNA, 121 bp, Artificial Sequence
  Description of Artificial Sequence: Synthetic probe
cgtggcggcataacttcttggccaaaaagccttttgcgctaggctttggtttgcagcaagrcagcggtgtaaaatgagagatgttctggctgtgcacgtgctgcttgtactagctcttttc

SEQ ID NO: 7853 - DNA, 121 bp, Artificial Sequence
  Description of Artificial Sequence: Synthetic probe
cggatgttgactatagcgaccgagtactgatgttggaaatacttggcaagaatgattatcratggttgctagtttgctttgatgagagaacttcaaaacatgtatgcagccttgggggcct

SEQ ID NO: 7854 - DNA, 121 bp, Artificial Sequence
  Description of Artificial Sequence: Synthetic probe
ctcggccaacgccaagatgaacaagcaagcagcaagggcggttcagaaggccgatcagatycgccagacgggacgaatcccacggtcacatatcctatgctgtggctgcttctgtgaaccc

SEQ ID NO: 7855 - DNA, 121 bp, Artificial Sequence
  Description of Artificial Sequence: Synthetic probe
gacatggcttacaaagctgtagcagagtatggtcttaatcagcgtattggtccaatatcgrtagctacattgtcaaatggtgggctagatgactctggaggctctccatttggaagggatc

SEQ ID NO: 7856 - DNA, 121 bp, Artificial Sequence
  Description of Artificial Sequence: Synthetic probe
ataggtagattgttgtgtatcgatcttcacgcgcattgccggtggatgaaactaatagatrtggttccgccatcattatcttgtttgattgatgggagaaatctaacctagaggcaccaca

SEQ ID NO: 7857 - DNA, 121 bp, Artificial Sequence
  Description of Artificial Sequence: Synthetic probe
tggtgaaggtaaaaacatcttatcccttggtcagaaatattcccctctatcccaaattaaktgactcggctttatctagatactatgttttagtttgcagatacatgcatatctcgacaca

SEQ ID NO: 7858 - DNA, 121 bp, Artificial Sequence
  Description of Artificial Sequence: Synthetic probe
tcatgaagaactccgaggctgtcaacttagcaccgagggccgcccaatgaagcatactacrtggcccttacgaggaggggtggcggaaaggaggaggaagccttgccctgccgaggttcct

SEQ ID NO: 7859 - DNA, 121 bp, Artificial Sequence
  Description of Artificial Sequence: Synthetic probe
atcaggcaactatgagcttgggcagctttcatacaaatacaacctgctcaaatccagaggycccaggaggatgtattgtgcactcgagtgcccttcaactcaagagacctgggaaagctct

SEQ ID NO: 7860 - DNA, 121 bp, Artificial Sequence
  Description of Artificial Sequence: Synthetic probe
tcaagaggaaggagccaggtgttgatcgcagatgaatgctcctgaccgctatgagcgcttygtcgtgcctgagggcacaaagaaggtgtcatttgagaaggatacaaagatcatgaatgct

SEQ ID NO: 7861 - DNA, 121 bp, Artificial Sequence
  Description of Artificial Sequence: Synthetic probe
gaagattgaaggttcatcaggttcgtcctggccatcttgaacaggtttgtcgggttcgtcrgtctggccaacagcgtgggggagctgaagccagggcatttgcgacggaagatcccgtgtc

SEQ ID NO: 7862 - DNA, 121 bp, Artificial Sequence
  Description of Artificial Sequence: Synthetic probe
acttgttgtgctgtaatatatacaccgcaatcggcgtcaagaaaatggtgtctgcattctkgaaaatctatatggatctggacttgtggagttaaggagtatcgtgtgatgatcaatgttc

SEQ ID NO: 7863 - DNA, 121 bp, Artificial Sequence
  Description of Artificial Sequence: Synthetic probe
tattatcctgtctgtactgtagtgtcccccctccgcactaatctgtgcttagcagcgtcgrgtagggccgtgttgttgtattccaccaatgtatgtcatccagtgtacatatatgattagt

SEQ ID NO: 7864 - DNA, 121 bp, Artificial Sequence
  Description of Artificial Sequence: Synthetic probe
cttgttagcacaaccgcccgaactgcttttaccgtgctgtgtgatttatgagacatttggwtagctgatgtgatgtgcttatgaggtgcatctcttatgcgtcgtatgttatgtttaggcg

SEQ ID NO: 7865 - DNA, 121 bp, Artificial Sequence
  Description of Artificial Sequence: Synthetic probe
tggcactcatgtcatccaccatctcttcccccaaatacctcactaccacctagtggaagcractaaggcagcaaggccagtactcggaagatattaccgtgagccggagaagtcaggtcca

SEQ ID NO: 7866 - DNA, 121 bp, Artificial Sequence
  Description of Artificial Sequence: Synthetic probe
tgaggaagcaaaagactaatctgaactgtaaaggggaagaagaggagaggagtaagaaacracatgttactctgctcactgtacaaatttagcactagagagagagagagagagagagaaa

SEQ ID NO: 7867 - DNA, 121 bp, Artificial Sequence
  Description of Artificial Sequence: Synthetic probe
ctgggaactgcctctagggtttaagagcaaagatattgatatgacagagctgtttgggctraccgttcatcggaaggaaaaactgttgttaatcccaaaagcacgcatttagccgcaagaa

SEQ ID NO: 7868 - DNA, 121 bp, Artificial Sequence
  Description of Artificial Sequence: Synthetic probe
cctgtctcggttccacgatattttccggaggtttttgaaccagttttggacaaattcaccrtttcaccaaacaataggaggtgtacaattacggcttttgcacttgttccggtatcggatc

SEQ ID NO: 7869 - DNA, 202 bp, Artificial Sequence
  Description of Artificial Sequence: Synthetic probe
agaccgatccaactcaaggaagacacaagccaacgcaccgttcgcccatagcgcccaagttggcgagcgaaacggcgggaccgagcccgactggaggaggygtcgacgagggagaaccaacaacagcatacatagcgtcccggaagcccaagctctaggcggcagccaaggccagactccagctagcgcaccgggaactcat

SEQ ID NO: 7870 - DNA, 202 bp, Artificial Sequence
  Description of Artificial Sequence: Synthetic probe
gtatgcataggtgcaaatgtattgtgatctaaccatgtgaatgcagcattactgagtcacgatttttttcgttgtttgaatattttgcaggtcatcatcaygatccctgtcacctgctgcctccccctcgtgacaagtctgtgagcaggagcccccgccaggagcagaagtttawccccatctcggtctcctgtgaaatctg

SEQ ID NO: 7871 - DNA, 121 bp, Artificial Sequence
  Description of Artificial Sequence: Synthetic probe
gtgagagtcggtagtactacagtttagtcaataaatatatcgctcgccttccagttgtgtygaacaaggtaattacaacatctcatggcttccaacgatcatgtgttttcttgtcatgtgg

SEQ ID NO: 7872 - DNA, 121 bp, Artificial Sequence
  Description of Artificial Sequence: Synthetic probe
ggtggcggtagtgccaggggctgtgctccacggcgaggcgttcttccacgggcatcagctkctgaaggtggaggacgacgaggccgcgttcctcggcgacgacgacgcggcctgcggggct

SEQ ID NO: 7873 - DNA, 121 bp, Artificial Sequence
  Description of Artificial Sequence: Synthetic probe
ccgcatgcttggaaccagtgtggattctctagcgggtggaactaaagcagctgccaagggygcagctgcacagccaagattgcttattccaatggttcttgtgatgatgtataatcgatgg

SEQ ID NO: 7874 - DNA, 121 bp, Artificial Sequence
  Description of Artificial Sequence: Synthetic probe
tatccgtacaagacatcagatcacgaaattttatgccctgaagtcccagctacaaggtgtwtctcttcgtattcagaccctaaaatcaacacaagcaatgggggaagccatgaagggtgtc

SEQ ID NO: 7875 - DNA, 121 bp, Artificial Sequence
  Description of Artificial Sequence: Synthetic probe
cctggcagtcaacccgaactatgtcatcgattaaccgtgtttggagactcaactaactccratccattttatgcggttaaccactagagcagacgttctagtgaagactgaaccctggtgt

SEQ ID NO: 7876 - DNA, 121 bp, Artificial Sequence
  Description of Artificial Sequence: Synthetic probe
caacaaggctaattataaatcaagtattgcctccatctgcatctgaatgcagattttgtgstgtaaaacggaaggaagaaacacgggccctcaatatgataagtgcggatcctgaacttgg

SEQ ID NO: 7877 - DNA, 121 bp, Artificial Sequence
  Description of Artificial Sequence: Synthetic probe
ggcagagtgctatataccctttcagatagacgcctcagctgagggtggggatgagaatagytgcttgaaaggtggtgtttacttgtctaacggtgatgagactgttccagttcttagtgcg

SEQ ID NO: 7878 - DNA, 121 bp, Artificial Sequence
  Description of Artificial Sequence: Synthetic probe
gaaatcattgggattgccctcttgttgttgctgaatctgagcacaaggtgaggcattttayaacagataggtagaagtttaactggaaaaaccaaatgccactgagcacaatattcagata

SEQ ID NO: 7879 - DNA, 121 bp, Artificial Sequence
  Description of Artificial Sequence: Synthetic probe
catcgactatcatgcaacgtatccagagattgatgagctgatcaaagaggtgactgtgackcctgcagaggtcgccgaggttcttatgaggaacgatgacactgatgtcgcgctggatgat

SEQ ID NO: 7880 - DNA, 202 bp, Artificial Sequence
  Description of Artificial Sequence: Synthetic probe
atcaggaataaacgtgtagaagtttcctgaagcagattacacttgaataaaatttcctgaaggagaatagaaagcatgttgtagagggggtaacttggagrtgaggataagtttctgatttttcatttgaaatgccttaggaaggcatggttttgacctcccttttgtctaacctggcagttactaactccattgtctaggc

SEQ ID NO: 7881 - DNA, 121 bp, Artificial Sequence
  Description of Artificial Sequence: Synthetic probe
cacatggttggttcttgtgctaacatgcttgtggaccataagttgtatgtagtctctcggyggtcctccaagatcttgccagcgtcgacacagttgtagctggcctggggaaagaaaagaa

SEQ ID NO: 7882 - DNA, 121 bp, Artificial Sequence
  Description of Artificial Sequence: Synthetic probe
ttctgatgaggtcatctccattgcatctatgttgtcgattggcaactctatattctatcgyccaaaggacaaacaagttcatgcagataatgcaaggttgaacttccatactggcaatgtt

SEQ ID NO: 7883 - DNA, 121 bp, Artificial Sequence
  Description of Artificial Sequence: Synthetic probe
aagaagaacatcttcaagttgtcccaaggggagtatgtagcagtggaggtcgtggaaagcrcatacgtccagtctccactcgttgcatcagtttgggtctatgggaatagctttgagtcct

SEQ ID NO: 7884 - DNA, 121 bp, Artificial Sequence
  Description of Artificial Sequence: Synthetic probe
tcctcacggcactcttagaaaggctggccctgtaatcagtaaggaaggaacgacaggaacrtccaagaagatgaaatcatgagtgatgacttctctatttacacgtgactttcctatttac

SEQ ID NO: 7885 - DNA, 202 bp, Artificial Sequence
  Description of Artificial Sequence: Synthetic probe
cctgatccagttccatgcaccaagaacagaggcctcttgctgcttatcgagattgtcgtcgtcgtcatctggtatggagggcttcctcctctatatgaagmtctcatctgaatttatcccttagatttgggagccccccgacttcatctaccgtgtttgcagctgaatatattcctgtcctttcttgatatttgcttgatag

SEQ ID NO: 7886 - DNA, 121 bp, Artificial Sequence
  Description of Artificial Sequence: Synthetic probe
atatcatttgtcaggaacgcagaaatatgagctgtcgaagcaagaagttaggattgcagaygtcttcatggccatggagaatttcaagaagagagtggaagtgcaagcatggggcctcgcg

SEQ ID NO: 7887 - DNA, 121 bp, Artificial Sequence
  Description of Artificial Sequence: Synthetic probe
tattttcttctgtttttggtgtcagaaaggcagaaaatcaatattctcggaattggacggkacaaaagccaaagttattattttcccggagcaacacggaaccacgaagcagagccggagg

SEQ ID NO: 7888 - DNA, 121 bp, Artificial Sequence
  Description of Artificial Sequence: Synthetic probe
cttggtgtaaagcaaacggtgatggtagtcatggaagtcggagcctccatacagtggcagraaattcgatgggctccatgggaagtgatacccactgtgagcttcaaccgtctctaacacc

SEQ ID NO: 7889 - DNA, 121 bp, Artificial Sequence
  Description of Artificial Sequence: Synthetic probe
tctctggcagcgttgctgggggacaacatctacaactttggggaggttgttagctcacccwattatcaatagtcttactgggaccaaggtggagtgggtctatcacatgttgcaagcattc

SEQ ID NO: 7890 - DNA, 121 bp, Artificial Sequence
  Description of Artificial Sequence: Synthetic probe
ggcgctgtgctccgagttccccaagatcatgcaacagggtttcgcatacctcccgggcggygtgtgcgtgtcgagcatggggcggcccgtgtcctacgagcaggcggtggcgtggaaggtc

SEQ ID NO: 7891 - DNA, 121 bp, Artificial Sequence
  Description of Artificial Sequence: Synthetic probe
tcagctctttgataagaaatgctttccagaggaagagttttgtgaacagcgtgttaggctmaagattacactggaaggatacatccaaactacagagaatgagatcaaatcggcactgtat

SEQ ID NO: 7892 - DNA, 121 bp, Artificial Sequence
  Description of Artificial Sequence: Synthetic probe
gtggcagcctgtcacggcgtgggaaaaagcgcgccttccacgagtctaacgccaggagagygctctttaaggaatgatctttagacacaggataacaaagaaggcatctaaagcgtggatc

SEQ ID NO: 7893 - DNA, 121 bp, Artificial Sequence
  Description of Artificial Sequence: Synthetic probe
catgtggccgagctccaagtgggccttcaaccacgagtccttcacccgaccgctgctcgayggcctgccgaaacccgcaccagttcgcagggaaaaagcggctctggactgaatttggtct

SEQ ID NO: 7894 - DNA, 121 bp, Artificial Sequence
  Description of Artificial Sequence: Synthetic probe
tgacgatgactgcatcaaggtactccggagttgccaccgagctctcccggagaagggaagrgtgattgttgtggagtttgtcttgccggaaactccagaggtgactacagcggcacaaaat

SEQ ID NO: 7895 - DNA, 121 bp, Artificial Sequence
  Description of Artificial Sequence: Synthetic probe
atctgcggaattaagttgtatctatccgtgaaaacgttcttcacacatgaactatcactaytttgtgttagacctcatatattgtttttgaatgtaggaacaaggtagtggtgccggagca

SEQ ID NO: 7896 - DNA, 121 bp, Artificial Sequence
  Description of Artificial Sequence: Synthetic probe
aagcaaactgggtactctcttctcttggcaggttagttgtgtatgcttgaaaggagaggaygactagtctcgagtagatcatacttggttactcccgcaatgtctcaggagtcacctcatg

SEQ ID NO: 7897 - DNA, 121 bp, Artificial Sequence
  Description of Artificial Sequence: Synthetic probe
tgtttgctatagaacagagcagacagtaagacggacgtggagggtttggaggacgtggagkaccttactacacaggacgatattgacaagttcatgaaacaactcacaactctcatagtaa

SEQ ID NO: 7898 - DNA, 121 bp, Artificial Sequence
  Description of Artificial Sequence: Synthetic probe
ttatggtggcgatggctacctaaatgaagaagctggtggttatcatggtggggagtataaygcacctcctgcgcaaggatatgagggtgataggggaaggggccgaggtcgaggcagagga

SEQ ID NO: 7899 - DNA, 121 bp, Artificial Sequence
  Description of Artificial Sequence: Synthetic probe
aaagtttggaccatggggtggaagtgcgggtcccgaccttccatacgaaccacggatgatygaaagcataacaattgcaagtggcgacgttattgattcattttcatttacatacattgac

SEQ ID NO: 7900 - DNA, 121 bp, Artificial Sequence
  Description of Artificial Sequence: Synthetic probe
tgatgttattagccgctgtattcagcatgagccagaattcaggccaccaatttctgaaatygtccaagacctaattcgtatggtcggtgacgcatcaaaggcttccatgtaaggggtttcc

SEQ ID NO: 7901 - DNA, 121 bp, Artificial Sequence
  Description of Artificial Sequence: Synthetic probe
gaatccaagagagatgaagctatcagtcttcttggtgcagataattttgttttatcgtcaratgaaaaacagatggggtccctgaaaaattccctgcacttcattgtggatactgcctctg

SEQ ID NO: 7902 - DNA, 121 bp, Artificial Sequence
  Description of Artificial Sequence: Synthetic probe
cttggtggatcctaccgggggaatgattgatgaggcactcactcttttggcaattcttgcyggtaacccagaaggcaaggctgtaatcacggaatcagagccaatgcccccactcgtggag

SEQ ID NO: 7903 - DNA, 121 bp, Artificial Sequence
  Description of Artificial Sequence: Synthetic probe
atacaacagggaagatatggactctgataatccagcaagaggtcaggtacttggagaagayggagtgcgtgtgcacagcatggtcctgccagggcttgcttcaagcacatcggtcattttg

SEQ ID NO: 7904 - DNA, 202 bp, Artificial Sequence
  Description of Artificial Sequence: Synthetic probe
gaggactccggctccgacgacctcgagctcaccctgggaagctccaggaagaggagctgctgatgctaacagacacctaactcgggcgggattattcttgwtgttgtagttcaattttcttcttcgtgttggttagttttctgaaagagagaccggatcgtgtggttccttcagatagcttcgcttcgcctgctgtggtgat

SEQ ID NO: 7905 - DNA, 121 bp, Artificial Sequence
  Description of Artificial Sequence: Synthetic probe
acctaagtgcctaaattttgtggaaggccttcaagtgtgttcacctgttacttcagtgaaycatattggtcactggtcaacatggagcgcaattcttgatcgggatgacaggagcaagcga

SEQ ID NO: 7906 - DNA, 121 bp, Artificial Sequence
  Description of Artificial Sequence: Synthetic probe
gtaaataatgagtgaatacctcttcgaggagcccatagactacctgcaatgtttcactcartgctcataggacacatattgcttcagttggacactatgtatatatgtatcattgtttcag

SEQ ID NO: 7907 - DNA, 121 bp, Artificial Sequence
  Description of Artificial Sequence: Synthetic probe
atattcagaggatacaggtgatgaggctgatgaggaaggactttctcttgtgggcagtgcygttaaaggaacaggagatatggtgaacatgcatgtgtttcctgaggataaacgtgcatga

SEQ ID NO: 7908 - DNA, 121 bp, Artificial Sequence
  Description of Artificial Sequence: Synthetic probe
tgtatgcttactgcatatacaaaattcatgtgtacatgaccgaagagttgagttaaatgartgttgattttatggcaggtcagmtggttccaggtagcgtgatgctgatggactgtctcga

SEQ ID NO: 7909 - DNA, 121 bp, Artificial Sequence
  Description of Artificial Sequence: Synthetic probe
gtctcagagtacttgcagttcaaggacaacttgtggaaggaagtaccatggttggtagcarcaaaccctgtgaattacggccacccatgtcagctttcatgtgtggaagctttatcggccg

SEQ ID NO: 7910 - DNA, 121 bp, Artificial Sequence
  Description of Artificial Sequence: Synthetic probe
ctgaagctgggcgtgtgcgctaacgtgctgaacctgctcaagctacacctcggcgtgccgrcgaatgagcagtgctgcccgctgttggctgggctggtggatctcgatgccgccgtgtgcc

SEQ ID NO: 7911 - DNA, 121 bp, Artificial Sequence
  Description of Artificial Sequence: Synthetic probe
tgctcctccacatggaggtattgcctatgggttggaccggttggtgatgcttctggctcgygaaagttcgatccgggatgtgatagctttccccaagaccacgactgctcagtgttcgctc

SEQ ID NO: 7912 - DNA, 121 bp, Artificial Sequence
  Description of Artificial Sequence: Synthetic probe
tcacaaccaaacgtgtgttgggagcttgaaacactgcattgaccccaatctaatggatctrtatcctcacgactgcatgtaccagatggcgatactagcgaaacactgcgtcgatgaagat

SEQ ID NO: 7913 - DNA, 121 bp, Artificial Sequence
  Description of Artificial Sequence: Synthetic probe
acagcattgcttcaatctttgcttggacaagaggacttgcacacagggcaaagctagatgrcaatgctaggcttcttgatttcacacataaacttgaggaagcatgtgtcggaactgtgga

SEQ ID NO: 7914 - DNA, 121 bp, Artificial Sequence
  Description of Artificial Sequence: Synthetic probe
agggcttggcgttgctggattgtcagcatctcttttgacctctgttctaacaactacgctsgaagatctacttgctcttgctctttgctcagctggcgggttttttgcaatatcaaatttc

SEQ ID NO: 7915 - DNA, 121 bp, Artificial Sequence
  Description of Artificial Sequence: Synthetic probe
aagtagttctggtttctgatgaggcaaacaggttggatgattgttctgtgtctgcaatttytgaggatgtgctggtttctgcaaccgaggctaaaatagccgatcttccaaacgatgaggg

SEQ ID NO: 7916 - DNA, 121 bp, Artificial Sequence
  Description of Artificial Sequence: Synthetic probe
catgtacactctgcccaccagggagcagttgatactgaggttgaatgaaactgattcctcygtgcagaaggagatgaggagatacattgatgcttccagtcctattatagagtacatygat

SEQ ID NO: 7917 - DNA, 121 bp, Artificial Sequence
  Description of Artificial Sequence: Synthetic probe
atggtgtgatcgcattctttggcgtggtaaggacctgaaacaaatccagtacgagacttgygactacaagttgtcggaccatcggccggtgagagcgggtttctttgccgaatgcaagatc

SEQ ID NO: 7918 - DNA, 121 bp, Artificial Sequence
  Description of Artificial Sequence: Synthetic probe
agttgattatgaaactgtaaccctggaccagatagagagcaacatttgtagatgccctgayccagaatatgcagacaagatgatcgctgcaattgataaagtacgaactgaggggaattcg

SEQ ID NO: 7919 - DNA, 121 bp, Artificial Sequence
  Description of Artificial Sequence: Synthetic probe
tgaaagcgatcctttggcaccggttaaattcatcataagggcaggcccggagactcaccascagaagccgcaagttggcaagactcaaaagcagaagccacatgctggcaagacgagccag

SEQ ID NO: 7920 - DNA, 121 bp, Artificial Sequence
  Description of Artificial Sequence: Synthetic probe
actggctgcgtgatctgagactcgttgcagcgactgttggtgcaggaagacaacacaatgkgagttcacagtcttatcttgcatggtgaaaatccaaggtctggccttaactgattgtgcc

SEQ ID NO: 7921 - DNA, 121 bp, Artificial Sequence
  Description of Artificial Sequence: Synthetic probe
gggtcctcgaatctgcctgggaaaggagtttgcgtacaggcagatgaagatatttgcggcygttcttctctacatgttcaggtttgagatgtgggagcgcgactccgccgtggggtacagg

SEQ ID NO: 7922 - DNA, 121 bp, Artificial Sequence
  Description of Artificial Sequence: Synthetic probe
gaagatttctatgtattttgtccagcaggcgaagggtgcatgtcatggtgagaagaagaarctaacaattgatcaagaattcgagcagtacttttcagaactcatgctttagcatgacagt

SEQ ID NO: 7923 - DNA, 121 bp, Artificial Sequence
  Description of Artificial Sequence: Synthetic probe
acgtgccttgaagggccgacagcatgtacctgctcgtccagtagagcaaatgagggagttrgkttcagaagtatggtaaaagatcatctgttgaatcgcgtcgctgggatgacgatgacga

SEQ ID NO: 7924 - DNA, 121 bp, Artificial Sequence
  Description of Artificial Sequence: Synthetic probe
tcgacaccgacggacaaggctatcagcggggccatcttacagtcagctaccagtttgtcarctgcggcgacaacgagctggttctcgaagcctgatgaaaaataagaagctatagtacaat

SEQ ID NO: 7925 - DNA, 121 bp, Artificial Sequence
  Description of Artificial Sequence: Synthetic probe
ctgctttttactggtacagaagagctgaggcattgtatgtttgtgtgtacatagtagattygactatctgcagggagtagcgtgtatctcctacctaactgccttgtaaagtactctttta

SEQ ID NO: 7926 - DNA, 121 bp, Artificial Sequence
  Description of Artificial Sequence: Synthetic probe
gccgcccacgaacaagctcgactggatgctcttctgacgagcaccatcatcatatatatckcaatccaaagcagagaagcagatgttgcgtgccaagaattgcactcatgtctttcggaaa

SEQ ID NO: 7927 - DNA, 121 bp, Artificial Sequence
  Description of Artificial Sequence: Synthetic probe
agcagctgcagagcgtatgtggactccattggaggccatatctgcacaagacctggaaacracggttattgctcggctacactacttcagatgcctgctgaaccaccgtggagtcgccgca

SEQ ID NO: 7928 - DNA, 121 bp, Artificial Sequence
  Description of Artificial Sequence: Synthetic probe
ctggataaaaatgacaggctgctggatttcacacagaagcttgaatctgcatgtgttgaarcagtggaatctgggaaaatgacaaaggatcttgcacttcttagccatggacccaaggtaa

SEQ ID NO: 7929 - DNA, 121 bp, Artificial Sequence
  Description of Artificial Sequence: Synthetic probe
tgggagctgtgcacgttgagccgcccatgggatgggatctyccccgttcaagtggtctacrcggttgctaatgaagggtcacggcttgaaattcctgaaggacctcttggcaagttaattg

SEQ ID NO: 7930 - DNA, 121 bp, Artificial Sequence
  Description of Artificial Sequence: Synthetic probe
tctatgtatacgtatgtgtatagggttgtctctatctctctccgtgttgtattagtgctamtgttgtattcattttcatcgagcgatgtattcgcaattacatatcgttgttccttacgta

SEQ ID NO: 7931 - DNA, 121 bp, Artificial Sequence
  Description of Artificial Sequence: Synthetic probe
caaaatcgcatctcaacaagctgcacaaggaccgccctcgtcctcaaatgcaaggcaatcraggaaaaagaaggacaatgagttctggtatgatttgggtgggtgggtgattcttggtatt

SEQ ID NO: 7932 - DNA, 121 bp, Artificial Sequence
  Description of Artificial Sequence: Synthetic probe
tccttgtgcctcgcgaacatgttgttgtacagcagtgacgcgccgcaggaaatgctgtagrcggtgaggcccttgtccgcgaaccattgcaggagctcagcaacagtgaggtcgcccttga

SEQ ID NO: 7933 - DNA, 121 bp, Artificial Sequence
  Description of Artificial Sequence: Synthetic probe
cccctcctggacgcaccattgttcggattccactactgttatatccatttttgtttgtcaygtgaccgaatcgtcatggcaatgccttgacattaaaatgaggctgaacatgttttgtgtc

SEQ ID NO: 7934 - DNA, 121 bp, Artificial Sequence
  Description of Artificial Sequence: Synthetic probe
aagtactgtcccatgcagcagttttaaaatagtcgtcgctgtacttttagggatagaaagrcactttttgtaccaattaggatattgtcatggccaggttatctaacccaatttagtcatt

SEQ ID NO: 7935 - DNA, 176 bp, Artificial Sequence
  Description of Artificial Sequence: Synthetic probe
tgctgccgaatttgcacctcatcaaaccaaaactagagtcctgtgaagactcaccggtgccagctcctgacgctkctgatgattgggacaccatgcctctctccggagaccacccattctttaccatcatcctgtcaagatcacatgttcagaagccgtttcagctgtgcattcca

SEQ ID NO: 7936 - DNA, 121 bp, Artificial Sequence
  Description of Artificial Sequence: Synthetic probe
aagcaagatcaaggaagctattgatttccatgttgatggtgggcacatttactcgacgatygatgacttccactacaagtcagcatttattgactgactgtgcgacaagcttcttctgctt

SEQ ID NO: 7937 - DNA, 121 bp, Artificial Sequence
  Description of Artificial Sequence: Synthetic probe
cgtggtccgacatcttgctgacttgacagacacccagttcatagcgaccacattccggccrgagatcctgaaggtcgcggacaagatctacggcgtgacgcacaagaacagagtgagctac

SEQ ID NO: 7938 - DNA, 121 bp, Artificial Sequence
  Description of Artificial Sequence: Synthetic probe
cgcgctcaacctcgttgtggatggtggctttacatctgtgaatcgcaatctgaaagcattygaggactagttgaagtttttagttgcatttgtcacttgatattcgctgatgtactactag

SEQ ID NO: 7939 - DNA, 121 bp, Artificial Sequence
  Description of Artificial Sequence: Synthetic probe
gccaccgccgattggacccaagaggggaacgaaggtgaagattctgcggcgggagtcctaytggtacaacgggactggatccgtcgtcacggttgatcaggaccccaacacccgttacccg

SEQ ID NO: 7940 - DNA, 121 bp, Artificial Sequence
  Description of Artificial Sequence: Synthetic probe
gttcaagatggaagatgtgagcatgggcatgtgggttgagaagttcagcaggactcgccgkccggttgagtatttgcacgacttcaagttctaccaatccggttgcttcgatggctactac

SEQ ID NO: 7941 - DNA, 121 bp, Artificial Sequence
  Description of Artificial Sequence: Synthetic probe
tgtacactttacaaattgaactgtcacctgcaatgtgcgtgtagttttggtcttggtgatygcggcggagaggagcagtacatcaggaaaacatcgaaaggctcgaatgtaaatgagtgcg

SEQ ID NO: 7942 - DNA, 121 bp, Artificial Sequence
  Description of Artificial Sequence: Synthetic probe
tatctgggcatcttacttttgctagctaggctattccatgaattagtatagtatcgtattyctgttcgttctcttttgccctatcttttcaacatactactattcgtttttataattttag

SEQ ID NO: 7943 - DNA, 121 bp, Artificial Sequence
  Description of Artificial Sequence: Synthetic probe
agagaggagcgattcctgcgatgcccaccccacagcaagtggctgatgccctgaccaacgycgttgcttaagtaagcaaggcgcgttgtcctcacctttttttcgtgcaaattggcaagaa

SEQ ID NO: 7944 - DNA, 121 bp, Artificial Sequence
  Description of Artificial Sequence: Synthetic probe
cacaagcaaagagcacacgacagaaaaagtctaaaaagaggtatttgctcgaggataagayggccattcagcccgccagacagccgtacgatggaccatctacagttgtgttgtatggcaa

SEQ ID NO: 7945 - DNA, 121 bp, Artificial Sequence
  Description of Artificial Sequence: Synthetic probe
ggtatcggaacggctagcagttcagtcacctacatcgccacttgaacaatagcatcctgcyggcacggacatatgaatcagcatgaataagaagcttcaaaggctagtcggaaatttcgat

SEQ ID NO: 7946 - DNA, 121 bp, Artificial Sequence
  Description of Artificial Sequence: Synthetic probe
ttctgaaagcttctgtactagaaacacgggcgaagctgatgctcagaggtggacagtatgrcaccggagatgacctgatacggaaggccatattcatccgcacctccatctgcggcgagca

SEQ ID NO: 7947 - DNA, 121 bp, Artificial Sequence
  Description of Artificial Sequence: Synthetic probe
cgaagaattcggagacactggcagctaatcctaagaaaaagaagggaaaaaaatccattcytaatatatattacaaggggtctctttaaattagatatgctcaacaacatgtgaactacga

SEQ ID NO: 7948 - DNA, 202 bp, Artificial Sequence
  Description of Artificial Sequence: Synthetic probe
acttcgcgagggacaagaaaaccagggcgaagaagactgagggtgaactctttgagaccgagaaggaggcaaccaagaacctgcctgacttcaagaaggaygaccagaaggccattgacgccgagttggtcaaggctatygakgctgtcccagaacttaaaaactatctcggtgcycggttctckctcagggacggtgacaa

SEQ ID NO: 7949 - DNA, 121 bp, Artificial Sequence
  Description of Artificial Sequence: Synthetic probe
gctgcactttttacgtggcagtgtcagcgtggcatggctccgtgaagcaattgccagtcgsataattcgaaggggaaaatatatgaatggaactagggaacaatccgcgatatactctgtt

SEQ ID NO: 7950 - DNA, 121 bp, Artificial Sequence
  Description of Artificial Sequence: Synthetic probe
ataagatacgttcacgccagctaccgcaaaaggatattcccattcagctctctcaccatcygccttacgtaatagcctatgaaaggaatctgggtaatttctggcaaagtatattagtatt

SEQ ID NO: 7951 - DNA, 121 bp, Artificial Sequence
  Description of Artificial Sequence: Synthetic probe
gaaagagacctttgagagctgcaagatccaagtcttttgcatagctgaagaggacactgaygctgaagagctgaagactgatgtcaaaaagttcttgtatgatcttaggatgcatgcggag

SEQ ID NO: 7952 - DNA, 121 bp, Artificial Sequence
  Description of Artificial Sequence: Synthetic probe
gccaaagggaatgcccatggaggtgaggctccagtgctcgaaggcaaactaatgatggctmcatgcataacaaagtggatgctacccccaattatattgaattatttatcaaatgtccata

SEQ ID NO: 7953 - DNA, 121 bp, Artificial Sequence
  Description of Artificial Sequence: Synthetic probe
acaggctctatcgacgatgggtgcttctgtattcagtggaatcacgttgactaaacttgtmggagttattgtcctgcattttgcgaaatctgaagtttttgtggtatattacttccaaatg

SEQ ID NO: 7954 - DNA, 202 bp, Artificial Sequence
  Description of Artificial Sequence: Synthetic probe
ttgttgatgtcgtgggaccgacaacatgtgatataatgatggaggatgggtcagagctggtgcagggggtcgagcaggatatgcttgaaacagtcctgccrcggactaatgggcgagtgcttgtgctctgtgggaagcacaagggggtgtatgggcatctggtagagaagaatrcagaggctgaaactggattggtggagga

SEQ ID NO: 7955 - DNA, 121 bp, Artificial Sequence
  Description of Artificial Sequence: Synthetic probe
tacttgtgcaagatactgtcatgtgaccaataagtattggtttatagctgtgctgcttatsttatcgatacacgtgtaaactcaagtttgatgttatcaagtggcatttggctatgcgtca

SEQ ID NO: 7956 - DNA, 121 bp, Artificial Sequence
  Description of Artificial Sequence: Synthetic probe
taggtcgcgctcaaggaaaatccccagatactctcttgcataactttgtctagggtcactyttgctagctctaagatgttacacgctctgtttcaaactctgacattaaaaaggctccaat

SEQ ID NO: 7957 - DNA, 121 bp, Artificial Sequence
  Description of Artificial Sequence: Synthetic probe
gcatgtctttggtgttgctcacgtctttgcatccttcaatgacaccttcattcatgtgacygacttgtctgggagggaaacccttgtgcgcatcaccggtgggatgaaggtcaaggctgat

SEQ ID NO: 7958 - DNA, 121 bp, Artificial Sequence
  Description of Artificial Sequence: Synthetic probe
gaatggaacagtagtggaacaaggaccacatgatcttcttctgtcaaagggygggcgataygcggaactgtggtcacagcagaacaacagtgaagccagcgatgtttctgctgtcagctta

SEQ ID NO: 7959 - DNA, 202 bp, Artificial Sequence
  Description of Artificial Sequence: Synthetic probe
tgtttgttatggcgtgcctactgtcatcaagaagaagtaaatggttttctgctttaatgggaaataattggtgattgggtgctgcagctctggtctttgarccattgattacagttgcatgtcaccgacggaagtgccatgataggcatgtcattgcacaggctcaaatgtgctcatgacatgtttatgctgttgtttgtac

SEQ ID NO: 7960 - DNA, 121 bp, Artificial Sequence
  Description of Artificial Sequence: Synthetic probe
ctaaaaccgtgaaatgatcaaattataataatacgaaataagcatggtagcaaaatttatyaattctcaccagaagtcgtgtacttaagcttctgtttaagttagcatcatgttgtgataa

SEQ ID NO: 7961 - DNA, 121 bp, Artificial Sequence
  Description of Artificial Sequence: Synthetic probe
acaagatgatgtcaccgaaaacgacttggacatccagtactacaagaacgtgctatcaggyagggtgctcttcacctccgatgcggcgcttaattcgacagacacgcgcgakttggtgaag

SEQ ID NO: 7962 - DNA, 121 bp, Artificial Sequence
  Description of Artificial Sequence: Synthetic probe
aacgtcagggtcgtcttcgacgtcgccaactcgcgcgtcggattcgcgcgggagtcctgcractagaattagattagatcgcgcgagacgatcgagcttcacgtgttcgtcatgcagttag

SEQ ID NO: 7963 - DNA, 202 bp, Artificial Sequence
  Description of Artificial Sequence: Synthetic probe
tggctacggggattattgttttggctgctactaatcgtcccaaggcaatcgatgcagctcttctccgtccagggcgatttgatatggtgttgtatgttccrccaccagatgcccaaggtcggcacgagatattacgcatcaaaacaagacaagatgaagttgggagaggatgtggaccttgggaatatagcggagtgcactg

SEQ ID NO: 7964 - DNA, 121 bp, Artificial Sequence
  Description of Artificial Sequence: Synthetic probe
gaagattgaaatgatcagcgaccagatcgacgcggcagtggagcctgtcatcgaacagctygagaaggagttcaagccaagcccagcatccgacgtcggatcagatgcccagaaatgaccc

SEQ ID NO: 7965 - DNA, 121 bp, Artificial Sequence
  Description of Artificial Sequence: Synthetic probe
gaaagaaccacagcagaaagacggtgactctgaacgaggcttgataacttcgatcacacayggagtgatgtccgaggacgattacttcaactgcatagagaggggtcttgccgcatcctcg

SEQ ID NO: 7966 - DNA, 121 bp, Artificial Sequence
  Description of Artificial Sequence: Synthetic probe
cgagcaggaggtacaggtgaaccagaaggagatcatggatatgtacatgaagagcatgcakcagttcaccgaatcgctggccaagatgaaacttccgttggacatggacaacggcagcgac

SEQ ID NO: 7967 - DNA, 121 bp, Artificial Sequence
  Description of Artificial Sequence: Synthetic probe
tcttatttggcgcagagtgctcgctttcttatgtgcttctcaattcttacggatagtgacrttctattctacacaacttccagggccaaactatcattgccgtgagggttcacctcttgcc

SEQ ID NO: 7968 - DNA, 121 bp, Artificial Sequence
  Description of Artificial Sequence: Synthetic probe
tcattgtcccgcaaccggagaattcgtgctagccagcgagcagactctgccgtctttcacsccaccgggttcttacactctccaaatgaagcttctgggagagaagaacgaggaactgacc

SEQ ID NO: 7969 - DNA, 202 bp, Artificial Sequence
  Description of Artificial Sequence: Synthetic probe
ccttgtcagctgggcgtccatcttctgctgatatcccttcatgtccctactgtaaaggtccactatgctatgaatttcagataatgccacaattgctgtayttctttggtgtgaaaaatgaaccagactctcttgattgggcaacgattgttgtgtacacatgtcaaggatcatgtgaccaaaacattagctacaaggaaga

SEQ ID NO: 7970 - DNA, 121 bp, Artificial Sequence
  Description of Artificial Sequence: Synthetic probe
taaaggttgagccaacaccggatggcaacggtcgctttttcaacctcagtgttcaaaacckccttttgaacgttgatgagagcatttacatccccataaccagaggagaatatgcggtcat

SEQ ID NO: 7971 - DNA, 202 bp, Artificial Sequence
  Description of Artificial Sequence: Synthetic probe
  modified_base (29)..(29): a, c, t, g, unknown or other
gaaatagccatcaaggactagtgctgaanaagggcgatctatttgagattaagggaactgacacttcacaggctgatgtggagatagattttgagctgacrtccattgaaagcgctgatcctttcgattcttcctggcttttggatgttgaaaagcattgccgggaagcaggtgcttcagttgatggtggcatagggccgtt

SEQ ID NO: 7972 - DNA, 121 bp, Artificial Sequence
  Description of Artificial Sequence: Synthetic probe
aaagagttttgaaatgccaaataaatggatgaatgctatcccagaccgtgatgcgtttctraggacgatggagacgtggaatccaaaaaatgtggacatccttgtatgaaaagatcggtcc

SEQ ID NO: 7973 - DNA, 202 bp, Artificial Sequence
  Description of Artificial Sequence: Synthetic probe
aaattctagaatggaccagtgggcctgaagaagcactttcgatagcaatatatttaaatgacaagtatcatatagatggcagggaccccaatggatacgtkggytgcatgtggtctatatgtggcctccatgatcagggttggaaggagcgtccgatatttgggaagatacgttacatgaactacgctggttgcaagagaaa

SEQ ID NO: 7974 - DNA, 121 bp, Artificial Sequence
  Description of Artificial Sequence: Synthetic probe
tacttaaagtttgtacagatgcaacaataactttccagacctgatttagctctgtgcatakgtgtaagattgcttctagtgcctagtaaccaaaggatgtgtaattttgtttgtgctacta

SEQ ID NO: 7975 - DNA, 202 bp, Artificial Sequence
  Description of Artificial Sequence: Synthetic probe
tgcgctctggcatttgcttgtacaagaagcgtttgattcctcgctgtgggtccaagttccggtcattcttggcacagtagcgttctgtgtcggcttcgtcrtccacatcattcgccactggctcaaggatgaatagcgatacatatagctgcagttggttkatggaggctggagccaakctgccacggaaggtttactccac

SEQ ID NO: 7976 - DNA, 121 bp, Artificial Sequence
  Description of Artificial Sequence: Synthetic probe
attctgaactttttgtcattatcactggataaagctgatgaaagtgtctgaagacaaaccrtgcttattatttattgttagcaccaacagaatattgatagtgtccagctgatagcaggaa

SEQ ID NO: 7977 - DNA, 121 bp, Artificial Sequence
  Description of Artificial Sequence: Synthetic probe
tgaggcattcaagaaagcaagaagtttgggactaggggacctggatttttccgcggtgcaygaggtgttgaaaggtgcaggtggttcaggccaagcgtgatggaggtgttttttctgggaa

SEQ ID NO: 7978 - DNA, 121 bp, Artificial Sequence
  Description of Artificial Sequence: Synthetic probe
tccatttcgagttgccatgctgtctgaagarttacggggatatatggatattatgttgcgytgctgcaaagtctatggtcatgtcatctcttctcttacgtccatggacgccaaatcatca

SEQ ID NO: 7979 - DNA, 121 bp, Artificial Sequence
  Description of Artificial Sequence: Synthetic probe
ttcaagggaaaggcaagaaggtctgtctttgatcctgttccactgacggagaatggtagaytgcctgacggctatattccggaggatcccgactctcattatatttatgtctgcaaaaagg

SEQ ID NO: 7980 - DNA, 121 bp, Artificial Sequence
  Description of Artificial Sequence: Synthetic probe
aggtaatgatttctagcagttgcaccggcctgctcccaagtgatgcatccatcaatctgaraggcagagccaataatcttcttttccccaatgcttgtttaagcattctcctatgatccaa

SEQ ID NO: 7981 - DNA, 121 bp, Artificial Sequence
  Description of Artificial Sequence: Synthetic probe
cggcaccgtcaccgtcgagaagctcatcgtgcacgagatggactcatcctacaaccagatyttcatgtccgaggacttgtaggctgccatcgaccacgtgcatggacgggtaactatatat

SEQ ID NO: 7982 - DNA, 121 bp, Artificial Sequence
  Description of Artificial Sequence: Synthetic probe
gtggttccagaatatcaaagctagtgtttgggtactgactggagaattacgattaactttsggaggaattattttctgccacgccattttgtaggtttgcacgtgcatgaaaactgtagtg

SEQ ID NO: 7983 - DNA, 121 bp, Artificial Sequence
  Description of Artificial Sequence: Synthetic probe
agagctaagagagctggcgaaatctcgagggctcagaggctactcaaagatgaagaaaagygagctggtggccgtactgagcgaaactgcctgatcgattggcatagccctcctgcccggg

SEQ ID NO: 7984 - DNA, 121 bp, Artificial Sequence
  Description of Artificial Sequence: Synthetic probe
ctagcgcacactacagcgcagacttcggcaaagaataagtgatgctgatcttagtaggagmatgtaggcgatccactgaacgttctcttgtaccaaggcggagtttgtcatcccgacaatg

SEQ ID NO: 7985 - DNA, 121 bp, Artificial Sequence
  Description of Artificial Sequence: Synthetic probe
cgtgtggtatatgctccagtactggaagttggtggagaaggacgcctagtacgtgcctgcraggtaataactgaagcctttgtcaagtcaggcctagttcttgaaagggacgcaagacaag

SEQ ID NO: 7986 - DNA, 113 bp, Artificial Sequence
  Description of Artificial Sequence: Synthetic probe
gtttcttgctactccatccgattcacgttacttgtcgttaaaatggatgtatctagcactraaacatgtctagatacatccactttagtgacaagtaatatggatcggaggga

SEQ ID NO: 7987 - DNA, 121 bp, Artificial Sequence
  Description of Artificial Sequence: Synthetic probe
gaaagtaatcaatgagttttctaatgacaagagcattctggttttactaatgtccctgaargccggtggtgttgggataaaccttactgctgcatctaatgcatttgtcatggacccttgg

SEQ ID NO: 7988 - DNA, 202 bp, Artificial Sequence
  Description of Artificial Sequence: Synthetic probe
ccagcggtttacagcaacatatcctaacatcacgcagtcactgacattcacttccgatccagaaccggaagctgcgacgtggtcctgaggagcgccgaagygaccgagtgcaccacaatgtgcgctatcctcagctttatctgcccgcgacgtggcatctgccgacctccgtttcgcctctcgcccttgtaggctccgatga

SEQ ID NO: 7989 - DNA, 121 bp, Artificial Sequence
  Description of Artificial Sequence: Synthetic probe
cacctcaccaaacggtccaacaagagtggaatgtccccaggcaacataacttgaagtagtrtctcgagctggagcacaggtcgcaacaaaaagctggttgtcggtagcccttgcccgttga

SEQ ID NO: 7990 - DNA, 121 bp, Artificial Sequence
  Description of Artificial Sequence: Synthetic probe
cacaattcatggagtagtttctgaataccatgacatgagaatcaagcaaactgtgtcacaytgtatagcgaggatcagacaccagcagttccctcagtggagggataaccgctgttttaat

SEQ ID NO: 7991 - DNA, 121 bp, Artificial Sequence
  Description of Artificial Sequence: Synthetic probe
atcatcgaggagagggacaccgtgcttgtttggaactacgaggatgcagacccctgatttygggtcatgccaagctaaggagcttgtcgaccatctcgagagcgtggttgcgaacgaaccg

SEQ ID NO: 7992 - DNA, 121 bp, Artificial Sequence
  Description of Artificial Sequence: Synthetic probe
cctcacctgcatcttcggcaaggttaaagctattactcaaggttgtgttagtcgcggtagyagcttgttgtgtttcactacctgtcaaacagttgagaactacttttgagctagttataga

SEQ ID NO: 7993 - DNA, 121 bp, Artificial Sequence
  Description of Artificial Sequence: Synthetic probe
tagactgagagaacttggtatagcattgccgctgatgtgttgcgcagcagacatgctcacygtcccatcgaggaagcaggtagtgctggtgggcgacaaaggatctgcagaatttcaagac

SEQ ID NO: 7994 - DNA, 121 bp, Artificial Sequence
  Description of Artificial Sequence: Synthetic probe
ctgcaaaaagctagcacccatcctggatgaggcagctactactcttcaaagtgaagaggaygttgtcatcgccaagctggatgctaccgcaaatgacgtgccagctgagttcgatgtccag

SEQ ID NO: 7995 - DNA, 121 bp, Artificial Sequence
  Description of Artificial Sequence: Synthetic probe
catgatatcccacttgcgtccaggaagaattgtaccacgcatctgcagaaccatcctagcragcagccagaataggcaaccaatgctctgcttccccttgttgttggcaggaatgccgata

SEQ ID NO: 7996 - DNA, 121 bp, Artificial Sequence
  Description of Artificial Sequence: Synthetic probe
ggacatggatatgaaatttcttggtgagatacctcttgaaatcgacatccgaacaggttcsgacgaaggcaaaccaatagtaatatcttcgccaaactctgcaccagcccaagcttacctg

SEQ ID NO: 7997 - DNA, 121 bp, Artificial Sequence
  Description of Artificial Sequence: Synthetic probe
ggggtgacaaatctggtagctggacacggttgtaaacttactgtcgggcaaaataacgcasactgcttctttatttagggaactgtaggcctgcaacaaagcctactacatccagtgtatg

SEQ ID NO: 7998 - DNA, 121 bp, Artificial Sequence
  Description of Artificial Sequence: Synthetic probe
tgttttgggcgaattggatggtgatgttgaagctgctattgagtacatgatagctgagcgrttcgcagttggttctgataatgtggacatagatccttatattgactttgcgtgtaatgga

SEQ ID NO: 7999 - DNA, 202 bp, Artificial Sequence
  Description of Artificial Sequence: Synthetic probe
ctaccatgatgcaaatgatgcaaaacattatgtctaaccctgagtccatgaaccagttgctcaacatgaacccaaatgtacgtaacatgatggaatcaaayacccaaatgagagaaatgtttcagaatccagaatttcttcgacagttgacatccccagaaacattgcagcaattaattcaattccagcaggcgatgacgtc

SEQ ID NO: 8000 - DNA, 121 bp, Artificial Sequence
  Description of Artificial Sequence: Synthetic probe
attttgtataacactgtaataagtgggctggtttgaagactgtaccaaataagctttcagytgtgtagctgtcggcccgattgttgtatcagttatcaaataaaacctagttagtgttctg

SEQ ID NO: 8001 - DNA, 121 bp, Artificial Sequence
  Description of Artificial Sequence: Synthetic probe
tatgttgcttatataactgttgctattaattaacgggcgtccgtccatctctggttggacrgatgtgtagcgagtctctatagctctttgtagatattatctttctctgcaattgcgtcac

SEQ ID NO: 8002 - DNA, 121 bp, Artificial Sequence
  Description of Artificial Sequence: Synthetic probe
ttaggctgcgaaatgctttactagcgaaagcagatttggttatccaggaggacaaacagtrtgttgatgaaaccggtgtatcttctacagataaatgcactagcagatgttccattgcctg

SEQ ID NO: 8003 - DNA, 121 bp, Artificial Sequence
  Description of Artificial Sequence: Synthetic probe
attgtttggatgcgaactgccgcgcttcccacattcagaaaactgtatggtaggatacatkttgacctaaaggaaaatgacactattaccgttacactggaaaacaactacaacacatata

SEQ ID NO: 8004 - DNA, 121 bp, Artificial Sequence
  Description of Artificial Sequence: Synthetic probe
cctcctggaacatcggatgagcacatctcgattgtccagtatctacaagccacagaagttkatggtgcgataatcgcacaactccacagcaagtgtccctgattgacgtgaggaaggaaat

SEQ ID NO: 8005 - DNA, 121 bp, Artificial Sequence
  Description of Artificial Sequence: Synthetic probe
agaaatataagtagatgcttcatgtgtgcatctttgttgatttcggtaatcggcaagggaycaatgttgtctaccagtacctccccatctaccaatttggatgagtaagttctgagttttt

SEQ ID NO: 8006 - DNA, 121 bp, Artificial Sequence
  Description of Artificial Sequence: Synthetic probe
actatcgattgagaaattaactgaggccgacacacagtagccatgtacaatataggtttargttagatatccatccattcatttcctcaatgtgcgctcattctttttcctaagctgacat

SEQ ID NO: 8007 - DNA, 121 bp, Artificial Sequence
  Description of Artificial Sequence: Synthetic probe
attgcttccaaagtacaatgtcactgcaacattgcagtgcgcaggtaataagaggactgcratgagtaaggtacgaaaagtgagaggtgttggatgggacgtatctgctcttggaaatgca

SEQ ID NO: 8008 - DNA, 121 bp, Artificial Sequence
  Description of Artificial Sequence: Synthetic probe
gtggaccagttgcatttgttgacttcaaggatgagtacagttcaactgaagccctaaatcrtctccaaggagctattctacattcttcacctggcgagggcatgcgtttagaatatgctaa

SEQ ID NO: 8009 - DNA, 121 bp, Artificial Sequence
  Description of Artificial Sequence: Synthetic probe
ctgttgggtgctgcgctttcaggaacaacaggcaggacaactcgcacccagcgtggaagtraagatgcatggcgatgcttaggtaattaggccgatgatcagtgctaatgattggctcatt

SEQ ID NO: 8010 - DNA, 121 bp, Artificial Sequence
  Description of Artificial Sequence: Synthetic probe
ccagaagtaaacagtgtgtctgcataagcaaacagtaaccagctcggtcgcttgtccagtrttgtgctcctgattgagtcacaaccaagttccggcttcagaaagagtgttccttgccata

SEQ ID NO: 8011 - DNA, 121 bp, Artificial Sequence
  Description of Artificial Sequence: Synthetic probe
cagtacagaagtcttttgcaacaagcattgtgaacttgatatagcaatatacacaatagcragtagaagggcagcttcgatatggcaccatgcccaccagcaagactgcttgctgctttga

SEQ ID NO: 8012 - DNA, 121 bp, Artificial Sequence
  Description of Artificial Sequence: Synthetic probe
cctcgccgccgcgctgcccgccgacgactgccgctacgccgtctacgacctcgagttcctmgccgacgactccgtgggcgacacgccccgcagcaagatcttcttcatctcctggtcgccc

SEQ ID NO: 8013 - DNA, 121 bp, Artificial Sequence
  Description of Artificial Sequence: Synthetic probe
agaatctgcacagaaagcccttgatcaggctgtaaatgagaaactgaaaacaggtgaggayggagaggtaacggccaatcatttgttcctggcaatatggtcagataaagagtcagctggt

SEQ ID NO: 8014 - DNA, 121 bp, Artificial Sequence
  Description of Artificial Sequence: Synthetic probe
agcgatactacagacgaggcatccattttggaggatcatgacatgattgtcgtgccatctrgcctctcgctagacgagatgattgaggccagttgtgatcttgattctttctatgtgccac

SEQ ID NO: 8015 - DNA, 121 bp, Artificial Sequence
  Description of Artificial Sequence: Synthetic probe
attgactgtaccattcatgtgtcctatacctgctgcaatccaacaactagaaatcgtacckatccagcggcgccatttaccttgacaggctctcctaacagagattttggtatcgcgacaa

SEQ ID NO: 8016 - DNA, 121 bp, Artificial Sequence
  Description of Artificial Sequence: Synthetic probe
acatgcaacccaccacatttacaacaaggagaatactctatcaccgtgggcgggactcgcrttccatccgttggatggggttttgcaagccatatcgcacgtggttgctctcttcattatc

SEQ ID NO: 8017 - DNA, 121 bp, Artificial Sequence
  Description of Artificial Sequence: Synthetic probe
ttcaggagcaaagaaaaacatcttcaagcagaaggcgcctgaagccgactccgcggcaagyggctgctgctaacatgttgttaatcgatggatgatatgtcatggacaaaaatctcagctc

SEQ ID NO: 8018 - DNA, 121 bp, Artificial Sequence
  Description of Artificial Sequence: Synthetic probe
aaccaaggaggatccagactgggtggtagagcagaggaggcaggaggttgagatcataaargggtggatagatcagtataaccaggacatcgctgagaggtcgccgtaaggttttcacagt

SEQ ID NO: 8019 - DNA, 121 bp, Artificial Sequence
  Description of Artificial Sequence: Synthetic probe
tatctggctatctgggaatccgcagatgaggacgagaatagagttgcttcttagacaaaayaagctgacaaaggacgatgtcaaggctatacttcaggagtaccacgacaacatcggggac

SEQ ID NO: 8020 - DNA, 121 bp, Artificial Sequence
  Description of Artificial Sequence: Synthetic probe
tgctcttcttagacagacagacaaagcacgcggccgactgacaccaccgaacggaagtggmagctccattatccttcagtatttccatgttttttacataggggtataacttggtatctat

SEQ ID NO: 8021 - DNA, 121 bp, Artificial Sequence
  Description of Artificial Sequence: Synthetic probe
atcattcatcttgtgtacagttgcaaaacaagaattgaacttgaattgaggatctgaaggrattttttacagtgttgcctgttaattgcgcaccatttctgtctgaagggttgccattcaa

SEQ ID NO: 8022 - DNA, 121 bp, Artificial Sequence
  Description of Artificial Sequence: Synthetic probe
gccacaaggctactactttggtaatttaataaagaaacccacgagactgcaactcaagatragccgcttctccaattttttctgctgcatctgctctctgaagttatatttgagttttaca

SEQ ID NO: 8023 - DNA, 121 bp, Artificial Sequence
  Description of Artificial Sequence: Synthetic probe
gaaacgggcagtgtagtagggtatccacaggatctgcttcaaaatgtgactctcccagtgrtgactaaagcccaacatgtagactccattgccatggttgataagctccatgctggtagca

SEQ ID NO: 8024 - DNA, 121 bp, Artificial Sequence
  Description of Artificial Sequence: Synthetic probe
tggtttgagacaagatcaatgcggaaaaactaggcactggttattggggtgtgcaataccrtgtatcaattagatgtactagaaggaacatgcacgttgaccagaacagaagcagtgtagg

SEQ ID NO: 8025 - DNA, 121 bp, Artificial Sequence
  Description of Artificial Sequence: Synthetic probe
ttcctcaagaaatactgagtgattgatcggccacgacgtccacgtacgcgctagctggccsagattttgcatctttataaatcggatcaggatccaagtgaagtgaaagagtgaataaagg

SEQ ID NO: 8026 - DNA, 121 bp, Artificial Sequence
  Description of Artificial Sequence: Synthetic probe
ttgcaagactggcactttattgagtctagatgagattaatgattctttgctagcagtaagygataaatctgttgagcccttgcagataaacgtgctygactatctattaggggttgctgat

SEQ ID NO: 8027 - DNA, 121 bp, Artificial Sequence
  Description of Artificial Sequence: Synthetic probe
ctgaggaagaaaggaagatcgaagctatgccagaagagggcctccactggaggttgaagawcacctggtgcaacgccggcgccagggtctggaggtgctgactgtcagccacttgattcgg

SEQ ID NO: 8028 - DNA, 202 bp, Artificial Sequence
  Description of Artificial Sequence: Synthetic probe
  modified_base (155)..(155): a, c, t, g, unknown or other
gaaaaactaactctgtgcaagtgagcgaggatggtggcgccaaggaagtcgtggcagatggagatgatctgaagcccataaagagaatggcaacatccagrgctgccaggggaaaacaaaacaagaatgccacaagtgctccttccagaaaaacngggaaagttgctggtggcagagaaccaagcattgaacatggcggcaa

SEQ ID NO: 8029 - DNA, 121 bp, Artificial Sequence
  Description of Artificial Sequence: Synthetic probe
cctaaaagctgttgatgtcaacatgaataaaatgcctgacgttgccatgactcttgcagtygttgccctctttgcggatggtccaactgctatcagagatgttgcctcctggagagtgaag

SEQ ID NO: 8030 - DNA, 121 bp, Artificial Sequence
  Description of Artificial Sequence: Synthetic probe
agaagcacaacaaggacggcacgctcaggctcgacgactgggtgctctgccgcctatacarcaagaagaacgaatgggagaagatgcagcaggacaaggcggcagcgcagtcggtctcgtg

SEQ ID NO: 8031 - DNA, 121 bp, Artificial Sequence
  Description of Artificial Sequence: Synthetic probe
acatgtcaagacaaattcttgacattcgaattcgaagacgacttcctcgttgttttggatygggaagaagcagtggccgcatcatcagatattcaaaaggagcacgccatcccctctgtaa

SEQ ID NO: 8032 - DNA, 202 bp, Artificial Sequence
  Description of Artificial Sequence: Synthetic probe
gccacagcacctgtgttgtcggaggaacaaaagcaatagtgcttggaggacaaactggagaagagtggatgctcactgaagtacatgagctctctctggcyagtaactcggtttgaggtccagaggtcttttcagcaagcttccttgaaacaaatggcgccaaccgccagaggaccggagcactgaatcagcatactgttat

SEQ ID NO: 8033 - DNA, 121 bp, Artificial Sequence
  Description of Artificial Sequence: Synthetic probe
gaaaggaagagacaagagaaagagagaacatgacgacgaaagtgaagataccacagaagaygaatcggtcgagaaatgtagaagaaagaaaaaagaccgcaaaggagcttcgaagatgaaa

SEQ ID NO: 8034 - DNA, 121 bp, Artificial Sequence
  Description of Artificial Sequence: Synthetic probe
tggcacttgactcggcttttggctgaagctgccctgattgtggcgcagctgattaaggagygaaacgaagctgtatcgcctgcttccctgtggtacccttgcttgctctcggggtctgctg

SEQ ID NO: 8035 - DNA, 121 bp, Artificial Sequence
  Description of Artificial Sequence: Synthetic probe
agcttgaacaccagtcccagaggacgaggcagaggtcgaggaagaggacgaggccgacctycaaccaagagaaaggaagttggtgatgtacaatttgaggatgagagcagcatgtttgctg

SEQ ID NO: 8036 - DNA, 121 bp, Artificial Sequence
  Description of Artificial Sequence: Synthetic probe
taactacatacaggtttccagggacgacacgagcgttgaggagcaagaaatgagagatcgrttgactggtccagaccctgatcttacgaaagaagaaaggcagatgatcaaagagtatttg

SEQ ID NO: 8037 - DNA, 121 bp, Artificial Sequence
  Description of Artificial Sequence: Synthetic probe
cctcttcctcgacgacgcggagaggatcgtcggcgaaatcgccgtcctgctggaccagccwgtcgtggacttcgataaggtggacgcctgtgtgcaccaactaaaggggagcagcctccag

SEQ ID NO: 8038 - DNA, 121 bp, Artificial Sequence
  Description of Artificial Sequence: Synthetic probe
ccgctagcacttttatttctttgtggctatgcaggcaaaacaggggctctgcttcgtcctraattatactacatcagcaagagcttgcagccatcaacagaagagttggttgcgaccacag

SEQ ID NO: 8039 - DNA, 121 bp, Artificial Sequence
  Description of Artificial Sequence: Synthetic probe
agcgacgctgatctagctatcatccagtggtgttccacagtttttgtagctggtcgtcgawtctctgaagttagttcttacacactgtggactgtaacgaagtggcactatagttttagtt

SEQ ID NO: 8040 - DNA, 121 bp, Artificial Sequence
  Description of Artificial Sequence: Synthetic probe
gcaacgactgagcatggaggagaaccccaactcgtgcgtcatctcctaaggcgaggtggtygatcatgtgtatacgtacgtgctccctgccttgctctcgtcgctagcttgaggtgaggtg

SEQ ID NO: 8041 - DNA, 121 bp, Artificial Sequence
  Description of Artificial Sequence: Synthetic probe
tcccaacattgataagcttggtagaatatgccttgacatcctcaaggacaaatggagtccrgctcttcaaatacgcactgttcttttgagcattcaagcactgctgagtgctccaaaccca

SEQ ID NO: 8042 - DNA, 121 bp, Artificial Sequence
  Description of Artificial Sequence: Synthetic probe
cacacacgcacccaacgatactaccaagtaccaagtacatacgtgttttgatccatcaggyagctagccacaccgtccgtccgcgatcatggctcatggctcagcgcgggaaggcggcgat

SEQ ID NO: 8043 - DNA, 121 bp, Artificial Sequence
  Description of Artificial Sequence: Synthetic probe
acacagctttgcaccagattctgtagaatagagaggcactgcagaactcaggtgtaacttyagagagcagatgcagtacaataaatttggaaagagaagcggctcttccggcgctccctcc

SEQ ID NO: 8044 - DNA, 121 bp, Artificial Sequence
  Description of Artificial Sequence: Synthetic probe
gagcctggactactgctggaagccagggayttaccactggatttcagaaccagtgaacctraccagcttcagaaaaggaacactggtgctgactttgcggtcttcactgacgagctatatg

SEQ ID NO: 8045 - DNA, 121 bp, Artificial Sequence
  Description of Artificial Sequence: Synthetic probe
caaggaggacgcggacagcggtgtgcaccaggtcttccggtacttggatcatgtccagacrtatcctaccatcatgtttggcggagtcgaggggtctcaagtgtgcaccgtggctttccaa

SEQ ID NO: 8046 - DNA, 121 bp, Artificial Sequence
  Description of Artificial Sequence: Synthetic probe
gatgatggtcaatccgatgatgccgcagctgttcccgaggatccacgcattgagagctggratctcagacgatgagagctcgatcgcgtcgtcgccctgaccacaggtagcatgccgatag

SEQ ID NO: 8047 - DNA, 121 bp, Artificial Sequence
  Description of Artificial Sequence: Synthetic probe
actcaatacaggttctgatgacagcaatcaagtacatccctcaggctgtgatgaacttccrgcgaaagagtactattggttggagtattggcaatattttacttgatcttacaggaggggt

SEQ ID NO: 8048 - DNA, 121 bp, Artificial Sequence
  Description of Artificial Sequence: Synthetic probe
agaaggtgattatttcacagatttgtgggggctaaggaagggttttaacattggtggatayggtgccctggctgaattcgctaaattgtatgctcttgttggggaggcacaaagatactgt

SEQ ID NO: 8049 - DNA, 121 bp, Artificial Sequence
  Description of Artificial Sequence: Synthetic probe
tcgttccggcagttccaagagcgccgcggaaggagcatccaagtctgaaccgaaacagcgrccgggccctgctagcacaaccacgaagcgaatccaggcacaggcctgataaatcagctca

SEQ ID NO: 8050 - DNA, 121 bp, Artificial Sequence
  Description of Artificial Sequence: Synthetic probe
gtacctgtacagtaagagacattcttcataatggtttatgatgtcttgaaacttggtcgtrtgatcttgggctgatgcttgtaccatttgattggaaggtgcatgcttgtaccatttgata

SEQ ID NO: 8051 - DNA, 121 bp, Artificial Sequence
  Description of Artificial Sequence: Synthetic probe
ccagcattacaattacatctggcgagggtttggaggatgaagtgtactcaaaagatcgggygattgttgcagtacggcaagggaacatcctcgccactgcctttcacccagaattaacatc

SEQ ID NO: 8052 - DNA, 121 bp, Artificial Sequence
  Description of Artificial Sequence: Synthetic probe
cttgtgcggccctctgtctgtttcccctaaatgtttttttgtactgtgactatttggattrccatgtggctgagtatgttctttgttagcatttgtgtaatttcttttgtgaagagtctgg

SEQ ID NO: 8053 - DNA, 121 bp, Artificial Sequence
  Description of Artificial Sequence: Synthetic probe
gcaagttcagctgataggtacaacacaggatttctgcagattagtaaatgcatgcactctkgctcaaaaaatgctaggctttgcctagcttactataccatgattcaatttcttgggtgac

SEQ ID NO: 8054 - DNA, 121 bp, Artificial Sequence
  Description of Artificial Sequence: Synthetic probe
cgctttacatcagatgttccttcggcaccttctcataatgctgttggagggccagcttcasaacttcccaaacgcacaccactctccgaggaagagattgaggctatcatgctcggtggtg

SEQ ID NO: 8055 - DNA, 121 bp, Artificial Sequence
  Description of Artificial Sequence: Synthetic probe
agaggctcaagaccatgtacaactcctagcaatgcctcagtcaagatgcaatgcctcagtkgtgggtgtctgttgttagtagagtggttctcaagagcttagatttgcatgtgcttaagta

SEQ ID NO: 8056 - DNA, 121 bp, Artificial Sequence
  Description of Artificial Sequence: Synthetic probe
taagcttatgctggttatccataatcgagtgggtgctctctccttctggtaaggtgaaacmggtgcctgttagaactgtccaatcttctactggaaatccagctgtgttgttgtaaggtca

SEQ ID NO: 8057 - DNA, 202 bp, Artificial Sequence
  Description of Artificial Sequence: Synthetic probe
gcctcgcaacgcccttcttaccagtacaaccagaacaatgtcgacgctgattgcttacgggcaccaccgggagtggcagcgactctgacaacaaggaagaygaggaggaggaggaggaaggaggaggaggaggaggagatggaagacgaagaggaagagagccagtaacatcggacacaccgcaaaggtgattcgagaattt

SEQ ID NO: 8058 - DNA, 121 bp, Artificial Sequence
  Description of Artificial Sequence: Synthetic probe
agaaattaaataggcatgtgagcgcacacacacacgcccacatacatggcacatatatagytgacaccaacacatggattgactagatgtcgtcgctccacacactgggcaatttattgga

SEQ ID NO: 8059 - DNA, 121 bp, Artificial Sequence
  Description of Artificial Sequence: Synthetic probe
tagagatcatgtctggtgctgataactgacgatgaaatcagtcttcagtgttccgattcgyggcgggtgattatggattctttggtttgtatttgttgttcctccttgatcctgaaaagtt

SEQ ID NO: 8060 - DNA, 121 bp, Artificial Sequence
  Description of Artificial Sequence: Synthetic probe
cttcagttccatagctcaaagagatgtgtcgtcacagtgaatgtaacttactgtatatgcytgtttaaaatatatgaactactattatatcatccgcattgcctactttctaaggctatac

SEQ ID NO: 8061 - DNA, 173 bp, Artificial Sequence
  Description of Artificial Sequence: Synthetic probe
ggcggcttgcagctccagtaaagaggtacttgtttagtgactgcccaccatagctgatgttaggttagattaattttcttgctgttggtttcctctgtacyatatgaacaccgctccactgaggcattgcttcttgtgtatctgtgatcaaataaccttttcctaccagtggg

SEQ ID NO: 8062 - DNA, 121 bp, Artificial Sequence
  Description of Artificial Sequence: Synthetic probe
gcagagcagccgacgaaaccaccatcaccactcgatcggagcttccatcgacatgggtctscaggaggagtttgaggagtacgccgagaaggccaagacgctgcccgactcgaccaccaac

SEQ ID NO: 8063 - DNA, 121 bp, Artificial Sequence
  Description of Artificial Sequence: Synthetic probe
tctcaggttgatgacacgtaaaagctgtgagaattttgtatactagtatgatggaaaatcrgaagacggtctcagtgctttgttaagctttccgaggatggtttcacggaagccgtagttt

SEQ ID NO: 8064 - DNA, 121 bp, Artificial Sequence
  Description of Artificial Sequence: Synthetic probe
gttcatgctgttcgcacctttattaagaaggaactcgcctttcaactcaaagatgatcttmttgcagctgtaacaagcaacaggagttctgaagcttacgcatttaaccatgatagtgtgg

SEQ ID NO: 8065 - DNA, 121 bp, Artificial Sequence
  Description of Artificial Sequence: Synthetic probe
ccagccaaagaggtagctcgatatcaggatcagtgtaaagaagtgtttcagcaacaatgayaggcaacctcggatgcaaatctttatatttatccaaatatagttcaagagtttcccactg

SEQ ID NO: 8066 - DNA, 121 bp, Artificial Sequence
  Description of Artificial Sequence: Synthetic probe
ctgcctgagcagcttcgacaccaaattagcatgcgaatgaaacagaggtgtcgaagaaccratagagtgtagtagaaacagtggctggattaatccagaactacatgctagatatcggagc

SEQ ID NO: 8067 - DNA, 121 bp, Artificial Sequence
  Description of Artificial Sequence: Synthetic probe
cttacctttcccgttacttacgaaaaatgctgtggagtctctacggtataggtctcaggakgttgctaggagtgtgacgagccgtgatatacaggaagcacgtcgtcaagacataaagaat

SEQ ID NO: 8068 - DNA, 121 bp, Artificial Sequence
  Description of Artificial Sequence: Synthetic probe
aaagtggtcaaggagtcagcctcccaatgtcttgtacggctaccatctggtgctgagaaastcatagattcccgatgccgggctaccattggtatagtttccaacccctcccatggtgcac

SEQ ID NO: 8069 - DNA, 121 bp, Artificial Sequence
  Description of Artificial Sequence: Synthetic probe
aggtcactgcttccataaatgcaccggacccatcagcagcaacagcagcaggagagcattyacttcctccttgtctcacatatttatatttagagtcctgtgctggcatgttgggggggca

SEQ ID NO: 8070 - DNA, 121 bp, Artificial Sequence
  Description of Artificial Sequence: Synthetic probe
caaccaacggcagtcactgctgcatgctcacacaacattgcatggcgtggatgactacatyggcaaaagcaagaagatcctggcgtccatgtccaagaggatggacaggaacaaatggacc

SEQ ID NO: 8071 - DNA, 121 bp, Artificial Sequence
  Description of Artificial Sequence: Synthetic probe
ttccttacatggtggatccaaacacaggagttgccatgtacgaatcagatgacatcataamttacctggcaaaaacctacggtgatggaagtgttccgattatgctaaagcttggtctatt

SEQ ID NO: 8072 - DNA, 121 bp, Artificial Sequence
  Description of Artificial Sequence: Synthetic probe
tgacgctctcagtcttggtattctcgattatgttggctactttgctggcttatgtatgatsaatgagaccaagagatccagcgagcttcaagttgttgtcaggttcctgaggtgcgcggcg

SEQ ID NO: 8073 - DNA, 121 bp, Artificial Sequence
  Description of Artificial Sequence: Synthetic probe
gggacggcccgctcgagttccggccagagcggcatcttggaggcggtggttcaaagaaggyggatctcaccgagccggacctacggttcataacattcagtactgggaggcgttcttgccc

SEQ ID NO: 8074 - DNA, 121 bp, Artificial Sequence
  Description of Artificial Sequence: Synthetic probe
agcttgatggcgttcaacactaactatcgtgatacaggattatttggcatctatactactkctccgcctgatgcactacatgacctgtcacggttaataatggaagaatttagaagacttg

SEQ ID NO: 8075 - DNA, 121 bp, Artificial Sequence
  Description of Artificial Sequence: Synthetic probe
tccatttgaaggagcaccagaagaatttgatcagaccatctaccctgttgaccgtaaccgytccattggtccagtagaaggccttgctcttaacttagcgaaggaggcaaataggaagcgg

SEQ ID NO: 8076 - DNA, 121 bp, Artificial Sequence
  Description of Artificial Sequence: Synthetic probe
ggttggaacaaaggccaggagtaccacctgagggacatctgggcaagcgaggcctaccgcyccttgggcttgtcagagaccgttccgtcgttcccagtgctgagcatggacaagggtgacg

SEQ ID NO: 8077 - DNA, 121 bp, Artificial Sequence
  Description of Artificial Sequence: Synthetic probe
atatttctgacgatgtagacttctgcagcaagttggtgaaggaggaatcagtcatactgtygcctgggaaagccttgggcatggaacactggttgcgcatcacctttgctacggagccacc

SEQ ID NO: 8078 - DNA, 121 bp, Artificial Sequence
  Description of Artificial Sequence: Synthetic probe
ggaattctaccagctgagagtgaagaaaactgagaagtctagttgcctagacagcccaatyactaagcccctttctccagtattcctttccactcgtaacctcatcacttttgatgagaag

SEQ ID NO: 8079 - DNA, 121 bp, Artificial Sequence
  Description of Artificial Sequence: Synthetic probe
ttcctcgcgagagtatggacatgatcaataactgttatgaagaattcaagaccaagaaaayaagccgtgtcgacctagtgaagaggctgaggcatatagttggtgacagaatgctcatatc

SEQ ID NO: 8080 - DNA, 121 bp, Artificial Sequence
  Description of Artificial Sequence: Synthetic probe
aggacttgagggtatatgtaatgaactattagaagaggatggcataacagatgtgaagttygggcgccaggcattggagaaacgtgtggtttcacaagatttagagctttggctttctagt

SEQ ID NO: 8081 - DNA, 121 bp, Artificial Sequence
  Description of Artificial Sequence: Synthetic probe
cagctaaagatatctgcactgaacaactctccaaagtgtaccgtagaatcagcagcttcamtccagtgcattgaggacagcgagggacagccacaaaacatatgctagccatcaaacaacg

SEQ ID NO: 8082 - DNA, 121 bp, Artificial Sequence
  Description of Artificial Sequence: Synthetic probe
tgcggacggagatccaaatgttgctattgagattctcatgagtcagcaggattagagattrgccatgcaattgttcaaagcaagcgcagttatcagaaaaaaaaatctcgtatgaaggttt

SEQ ID NO: 8083 - DNA, 121 bp, Artificial Sequence
  Description of Artificial Sequence: Synthetic probe
ggagctcactcaacaacagcaaggctctatgatgatgccctgagacttggaactgaccatyggtcggtcaaggcagaaacagttccatatcaatgagggtgctgtggattgctagatttgg

SEQ ID NO: 8084 - DNA, 121 bp, Artificial Sequence
  Description of Artificial Sequence: Synthetic probe
tcaccggtcttcatggtcgacatctccaactccggtaaccgtgtggtcctcaagtacctgycgggggccagaggcatgtcctccgaggccctgatgcataacgagaccctggaacagctgg

SEQ ID NO: 8085 - DNA, 121 bp, Artificial Sequence
  Description of Artificial Sequence: Synthetic probe
caaaaccaaggccatggttgaggaactgctgaaaaactacgaaaatgtgtgcacccttcgygtaaggatgcctatttcatctgatctgtccaacccacgcaacttcatcaccaaaatcact

SEQ ID NO: 8086 - DNA, 121 bp, Artificial Sequence
  Description of Artificial Sequence: Synthetic probe
  modified_base (107)..(107): a, c, t, g, unknown or other
aatggcccgtatcaaggatgatccatctttgaagcctattcttgatgagatagagagtggwggtccatctgcaatggtgaagtactggaatgaccctgagattcttnaaaagattggccag

SEQ ID NO: 8087 - DNA, 121 bp, Artificial Sequence
  Description of Artificial Sequence: Synthetic probe
gaagatattgatgcctataggatcatcaccggaccagtctccacagagagtgacgacctcrtcaggggctccttcctcagggcacgtccatcacttgcgatttcgacacgcgacgccctcg

SEQ ID NO: 8088 - DNA, 121 bp, Artificial Sequence
  Description of Artificial Sequence: Synthetic probe
gtgccatgttcgacaaatccatagacatatgtgttcttcacaggtatgcgcacctcactarcaacctcaagaacattcctagaagcacccagttcacccataccatagcccctaaccgagt

SEQ ID NO: 8089 - DNA, 121 bp, Artificial Sequence
  Description of Artificial Sequence: Synthetic probe
gagcgtgagtatggcaagtgcaacaaagccgtactggaaaacattgtacttgtagagatayttaattccacgcagagactgcagtgtgtggccaaagatctcctgagctgcagtggcttgt

SEQ ID NO: 8090 - DNA, 121 bp, Artificial Sequence
  Description of Artificial Sequence: Synthetic probe
attatacatgttatcgatcactcgaggggccaagggaggatgtaccaccatttgtgaagawcctataagcttctcattgcggattctcagtgcagataaaatgaagaacgggcgtcaagat

SEQ ID NO: 8091 - DNA, 202 bp, Artificial Sequence
  Description of Artificial Sequence: Synthetic probe
catcagcggacaacataaagaagtttagcctgcccaaaggcgaatttctgcacaacatgctgtcccagcaaaagacaattctaaatgccatggctgttaaygaggatggtgtcctggcaacagcaggggacaatggaagcatgtggttctgggattggaagagcggccataatttccagcaagaacagaccattgtccagcc

SEQ ID NO: 8092 - DNA, 121 bp, Artificial Sequence
  Description of Artificial Sequence: Synthetic probe
agagaacgcggagtaggaaggatgtgtacctgtcatgaaaaagaataggatggatatctcraagcgtgatccaattcctgatgctgttagtttactagttcagcggtgggtctaagtactt

SEQ ID NO: 8093 - DNA, 202 bp, Artificial Sequence
  Description of Artificial Sequence: Synthetic probe
cttaaattttgttgttaccatatatttctgtgcgacttccattcggacaaataatcgtgtgctgtatgtggatcattcgctcttgtgttggtcagactttstaaatccagagttgtttgtcacttgttttgtaggctgttgcgcccctcaccagttaatacatgtcacagccttggttttgttgtgaccaaaaaaaaaaaaa

SEQ ID NO: 8094 - DNA, 121 bp, Artificial Sequence
  Description of Artificial Sequence: Synthetic probe
ggagtggcttgcaccttcgattgcaccacttaagggaagaggaggtggcggcaagaatggkcttgcacagggccagggaagtgatgcttctcagctcaaggaggccatggagctcgctacc

SEQ ID NO: 8095 - DNA, 121 bp, Artificial Sequence
  Description of Artificial Sequence: Synthetic probe
tgacatggggaagacttcatacatcacacggagcttgccatttgggctcttcttgtctgcrgggtacaagaatatacctccgtatagtaacgtgcggtggacatcggcaaccatactgccg

SEQ ID NO: 8096 - DNA, 121 bp, Artificial Sequence
  Description of Artificial Sequence: Synthetic probe
ccaagtgctgttactggagagcatacctgtatggccctgagtcccctaaatagtgatgacrtcaaagtgggtgatgataaaatcaagtctggatttttggaaccattttatcaagatttca

SEQ ID NO: 8097 - DNA, 121 bp, Artificial Sequence
  Description of Artificial Sequence: Synthetic probe
tccggatttagagcatatcagctaatgagaaaatacagaaaacgtacctgtcacgcagcgscatcatggctcgggtggaccaccaggacgtgcattgctggttctgatgcccccctggatc

SEQ ID NO: 8098 - DNA, 121 bp, Artificial Sequence
  Description of Artificial Sequence: Synthetic probe
attttgatcagttactggtggtgctgggaaggttccaaacaaagatcaagtttgagacaarcaataaaagtaatgagatactgacatctactggagagatgataacccagcacctccaggg

SEQ ID NO: 8099 - DNA, 121 bp, Artificial Sequence
  Description of Artificial Sequence: Synthetic probe
ggccttccatcacaacagggagctcaagcagcagcttgatgagcttcagaaaaagtacccraagacgaaaatcatgtacggtgattacttcaaagccgcaatgcagttcgtcgtcagccct

SEQ ID NO: 8100 - DNA, 121 bp, Artificial Sequence
  Description of Artificial Sequence: Synthetic probe
gcagcaactcttgcatatacatcagatggctgagttggactctgagaggtggggcctgcgytgccaagccgcttttagcaaatttgatctggatggtgatggatacatcacccctgatgaa

SEQ ID NO: 8101 - DNA, 121 bp, Artificial Sequence
  Description of Artificial Sequence: Synthetic probe
tgcacttgcagcatattcctgaagttcttcgtttcctggttctacgctcaaggcgaacttkgaattgctcagagtatattcatgtccacagtacaccttcgtcacatctggaagagctaca

SEQ ID NO: 8102 - DNA, 121 bp, Artificial Sequence
  Description of Artificial Sequence: Synthetic probe
gtacgtggcatttaggaaattcaattgccttgtatatcagcatctcctgctcaatttctcmtgtaagaaatatcaaacactttatatctacggcatgaaaataatgtgaaaagtctgatgc

SEQ ID NO: 8103 - DNA, 121 bp, Artificial Sequence
  Description of Artificial Sequence: Synthetic probe
ggaccagaagtcgtaccagtggatacaccccaaggacgtctactacggcatcgcgccggtrgtgcagaagaaggacaactacggcgggatcatgctctgggacaggtacttcgacaagaac

SEQ ID NO: 8104 - DNA, 121 bp, Artificial Sequence
  Description of Artificial Sequence: Synthetic probe
gtttgtcaggtttgtcagtgtcgttccttatagcgatagggaggtgtcgttcgtccgcctrtgttctagttttgttttctgctccgatgtacaacttctgctggccgtgtggactggacat

SEQ ID NO: 8105 - DNA, 121 bp, Artificial Sequence
  Description of Artificial Sequence: Synthetic probe
agacacgtgtgcgatcgtatacgacgtggacaagccagcatccagccgcatcaccattaarggagctcatctcggcggagtccacgggcttacctttgctgacaacgatactctgatgact

SEQ ID NO: 8106 - DNA, 121 bp, Artificial Sequence
  Description of Artificial Sequence: Synthetic probe
actaggctcgatgcttatattcctgtttagtggatgggcttgttcagctgttggcagaacygcacaagaagttgttactgaggtcaggagacaatttattgagaggcctggcattatgaac

SEQ ID NO: 8107 - DNA, 121 bp, Artificial Sequence
  Description of Artificial Sequence: Synthetic probe
aaatgatactgaatggcacagttttgttggacaatgccttgatatggatgagaatgttaayaaagcaccatgcctggtacaccagtctggtaatgtgcccatgctcaacagagcctgcacc

SEQ ID NO: 8108 - DNA, 121 bp, Artificial Sequence
  Description of Artificial Sequence: Synthetic probe
gcttcgctcacaaagcctgagataggtgctccgtgccgtgtgaaccatgatcttgtctgastcgtggtgtggtttttgttgctgattcgtagtagcattaaagagagaataatgaaacgag

SEQ ID NO: 8109 - DNA, 121 bp, Artificial Sequence
  Description of Artificial Sequence: Synthetic probe
ttgccacagggagatcatatacgacatcggacccttgcccaagaagtgggcgcttccttcygccacatgatatgcctaggatagctagctagctagaagaagacatttgctcaagaataaa

SEQ ID NO: 8110 - DNA, 121 bp, Artificial Sequence
  Description of Artificial Sequence: Synthetic probe
tttaactgtagatttctttaggaagcttcctcaggacgttgagaagggtggaaatccaagycactctatttttgatagatataatgattcttatctaaggagaattggttcaactgtcctg

SEQ ID NO: 8111 - DNA, 121 bp, Artificial Sequence
  Description of Artificial Sequence: Synthetic probe
aaccaggcaatagtttcttagtctgagaaattatcttgctttgtctgttatggcggtggcrgatgttctgttttgttgctgcgccaaagtccgttttggcgcgcacagatgaacggaagga

SEQ ID NO: 8112 - DNA, 121 bp, Artificial Sequence
  Description of Artificial Sequence: Synthetic probe
accaggcagacattgtcaaggtcagcgaggtcgagcttgagtttttgactggcatcaactyggtggaggatgatgttgtcatgaagctgtggcgccctacctttaagctcctcctggtcac

SEQ ID NO: 8113 - DNA, 121 bp, Artificial Sequence
  Description of Artificial Sequence: Synthetic probe
gtccgtggaggaacagggtggtcttcctcttccaagcttcagcgcgtacccacaagcgtaygtgaccagtgtgggggagtatctcctcactttgccgcagcagttggagccacttgctgaa

SEQ ID NO: 8114 - DNA, 121 bp, Artificial Sequence
  Description of Artificial Sequence: Synthetic probe
ctaacatagaacgatcaatcacaagcaattggttataagagagttcaagtggaagtccttygttccttatcttgcagcaccataatgtaacaatgttctcgaaaattatctgactgcgacc

SEQ ID NO: 8115 - DNA, 121 bp, Artificial Sequence
  Description of Artificial Sequence: Synthetic probe
ggtcctttgtgttcatggtggtctttctcctgatgtccgtactattgaccagatacggacrattgatcggaattgtgaaattccccacgaaggtcctttctgtgatctgatgtggagtgac

SEQ ID NO: 8116 - DNA, 121 bp, Artificial Sequence
  Description of Artificial Sequence: Synthetic probe
gcatctgctacgttttgtagcggatcaaaccgtagttatgctaagactatattgctgctgrcagtggaacagtatgccgtgtctatattccgtttatgatgcaagtcgtgtctatgattgg

SEQ ID NO: 8117 - DNA, 121 bp, Artificial Sequence
  Description of Artificial Sequence: Synthetic probe
ggctgctgctgatgcaaggttacgtggtgttttcgataggaagcagatggagtgtgttgtygtccttggcctcaagtgttcacacccagaagagtcacaacgaccttccatggaggatgca

SEQ ID NO: 8118 - DNA, 121 bp, Artificial Sequence
  Description of Artificial Sequence: Synthetic probe
aaacagattgctacctagtcattatctgaaaatgcaggaggtgttgatgcaggagatgttyaagggtagtgttgtcaagaaggaagatgcccatgtattattcaaagttgaccctgccaaa

SEQ ID NO: 8119 - DNA, 121 bp, Artificial Sequence
  Description of Artificial Sequence: Synthetic probe
ttgctttacgggcaattaccagtgaggatggcatgactgcagattggtattattttgaacrccagttcctggtagatgtggtgaagaagatctgcaataatgtgcgaggcgttaaccgtgt

SEQ ID NO: 8120 - DNA, 121 bp, Artificial Sequence
  Description of Artificial Sequence: Synthetic probe
agatctctgtgttctgaaactgaaataccctgattaatgccgtcaaggcctgtttgtctgrgtacctgtctgacttctccgtttgtaatgtaatctgcctgtagtatgtcaatcagcgcag

SEQ ID NO: 8121 - DNA, 121 bp, Artificial Sequence
  Description of Artificial Sequence: Synthetic probe
cttgtcgtggtgctgaagtattgtatgattagccgggtccgaacagatgtttcaaggactrcccttacccatctcgttgtagtcttgctattgtgttattatctcatcttgtactagtagt

SEQ ID NO: 8122 - DNA, 202 bp, Artificial Sequence
  Description of Artificial Sequence: Synthetic probe
tcaaacctccaattttctcatgctttggagacatcgctcttgccattggtgagaattttgagaaatacctggcatatgctatgccaatgcttcaaggagcrgctgaacttcttgttgttttggatcaaaatgatgaggatatggttgattatggtaaccagctcagacgtggcatatttgaggcatactctggcatactaca

SEQ ID NO: 8123 - DNA, 121 bp, Artificial Sequence
  Description of Artificial Sequence: Synthetic probe
acattgtcaagggcgcgcaacacaagggaatattatttgcatcgctgcaaccttgttcatkctgccactgctgcttgcattccttcacgaccaggatgaggcccatcaagttatgtatgta

SEQ ID NO: 8124 - DNA, 121 bp, Artificial Sequence
  Description of Artificial Sequence: Synthetic probe
aggcaagtgtgcccttgctcttattatcaacgaacctaagccacttatttcttgtctggartcttctctaacagttgaccgagaacctcgaatagatcaccaacgattccgtaatcggcaa

SEQ ID NO: 8125 - DNA, 121 bp, Artificial Sequence
  Description of Artificial Sequence: Synthetic probe
tgagaaggttgatctggcttcagtttctgggtcacattcagaaggggagtcctcaggtgaraagtcccagagcagtgattcggagaaaaatggaaatgctcttcaggaatccatggaagta

SEQ ID NO: 8126 - DNA, 121 bp, Artificial Sequence
  Description of Artificial Sequence: Synthetic probe
tctcaaaactccattctgcttcgagggtaattgccccaaggaagaccccttgtcactggtyggcttccggaaactcgcggagcccctacccttctccaagcagcaccactcgaagctcgtg

SEQ ID NO: 8127 - DNA, 121 bp, Artificial Sequence
  Description of Artificial Sequence: Synthetic probe
ggtcatgccctccgatccgctctactccgtctacgccgccaccaaagcgtacgtcgaccarttctcaagatgcctctacgtcgagtacaggggcaagggaattgatgtccaatgccaggta

SEQ ID NO: 8128 - DNA, 121 bp, Artificial Sequence
  Description of Artificial Sequence: Synthetic probe
tctttcattgcacttcgaaattgcatcgtaagccggtagatatatcattggagaataatcmaactgtatctaccacatttatctgctgttgtttgttctgtccattccatcctcatccatt

SEQ ID NO: 8129 - DNA, 202 bp, Artificial Sequence
  Description of Artificial Sequence: Synthetic probe
gatcgtctgcgctggtgccgacttcgggggtgggagggggtcgctccacctccgccagatcgggatctacctcgacatccacttcatcaacaagccggagytccacgtcagggctttcgacgatccgcccaagttcgacgccgaggggaacctcaccgacgccaagaccagggagcggctcaagagggtgctcctctcactc

SEQ ID NO: 8130 - DNA, 121 bp, Artificial Sequence
  Description of Artificial Sequence: Synthetic probe
tcatacggtggatagccaattgtgtggctgattgaatttccctggccagctaaggcttttrgggtgaatttggggattttatttagtaagtagtttccggtcaggatagttaaagggagaa

SEQ ID NO: 8131 - DNA, 121 bp, Artificial Sequence
  Description of Artificial Sequence: Synthetic probe
gtggagttcaataggagactctctgcagtcagagccatcattctgagggggttggcaagaytaaaagacacgtggaagtgcttgcacggagagttgtggcgcccmgaaaatccacgtsagt

SEQ ID NO: 8132 - DNA, 202 bp, Artificial Sequence
  Description of Artificial Sequence: Synthetic probe
tatttttttttttttccttgaaaggacgattcatgcttcattgcatttcaccaagattaatactactagtacatattctaattctcaagctgttacagatyctgcagtagcatcgcaataaacatatgaaccatagaaatggagtttgcaacagaggaaagctacaacctttacatctcatgaactgccattacactcccct

SEQ ID NO: 8133 - DNA, 121 bp, Artificial Sequence
  Description of Artificial Sequence: Synthetic probe
ctccactgcccttgatctctacttcaaatataacgttactgaaatgctggcaactggaaayatcttcacctcaaatggtaaagaatatgcactgagtgatgtcatcgatactatcaaacat

SEQ ID NO: 8134 - DNA, 121 bp, Artificial Sequence
  Description of Artificial Sequence: Synthetic probe
tacatatcatgcagtcagcgcagacccattttcctcttcacctgatccaaatgaccaagaygaaaacctggacatactcggcgatgatgacaatggctcacccaacaatatggcctcagca

SEQ ID NO: 8135 - DNA, 121 bp, Artificial Sequence
  Description of Artificial Sequence: Synthetic probe
ctaagtaaagatgataacatctgctatcggtcttgtgtattaagaccacaacctgtcttgytgtcgcttaagttgcttctctagcatctgctgtcggtcttgtgtattagaccacagtctg

SEQ ID NO: 8136 - DNA, 121 bp, Artificial Sequence
  Description of Artificial Sequence: Synthetic probe
tactgcagaacatgaactgcgggacctgttccgatggtcacggtgtaagaaagccatgccygagattgccatgcgatctattggtatcccactgccagctgaacaagttgaggtgctgcag

SEQ ID NO: 8137 - DNA, 121 bp, Artificial Sequence
  Description of Artificial Sequence: Synthetic probe
cactgttgtggcgtgctaaaatgcttggtatactgttctatgcagatctgttgactttccygctggttgtaaccttgtattgacatgcatacatttgtagcgatggtactccggagatcac

SEQ ID NO: 8138 - DNA, 121 bp, Artificial Sequence
  Description of Artificial Sequence: Synthetic probe
ggtccagcagaagctgcaggtgctccgcctcaagtaccccaaggccaggatcatgtacgcsgactactacggcgccgccatggccttcgccaagaatcccaagcaattcgggttcaagcag

SEQ ID NO: 8139 - DNA, 121 bp, Artificial Sequence
  Description of Artificial Sequence: Synthetic probe
gagcaagccagctcggcttggacactgtcatacgtgacgtgactgaaaaagcatatatctkctgggaaataaaatagtctcaataattattgtatgcgacagcttgatctcacaatccgca

SEQ ID NO: 8140 - DNA, 121 bp, Artificial Sequence
  Description of Artificial Sequence: Synthetic probe
caaattccatccatcgccacggtcatgatcgagagatcagtaagattgcttcaaagaatcragcaagtgtcgtcgtgcgtgtcaacaagcagtaagaaccaagcaagtgtcgtcagtaaga

SEQ ID NO: 8141 - DNA, 121 bp, Artificial Sequence
  Description of Artificial Sequence: Synthetic probe
taaagagcttgcaactgctgcacagaagaataagctacggggtttcgagtacatcaaaggygtaatattggatcctgtaccttttgatattgaaagagatttggtcactgcaacgatgaag

SEQ ID NO: 8142 - DNA, 121 bp, Artificial Sequence
  Description of Artificial Sequence: Synthetic probe
caagcttgaccttgagaccaacaagattgttgacttcatcaagttcgatgttggcaacgtygtcatggtgactggtgggcgtaacactgggcgtgttggtgtgatcaagaacagggagaag

SEQ ID NO: 8143 - DNA, 121 bp, Artificial Sequence
  Description of Artificial Sequence: Synthetic probe
accaatggctgctgctaggtgtaatgtgacagtttaccttgttcaagtagtatttccatcmtcctggttctgttcttgtttgtgtcaagttgggcattattatctcgttaagttacgatga

SEQ ID NO: 8144 - DNA, 121 bp, Artificial Sequence
  Description of Artificial Sequence: Synthetic probe
tcaccatcctaccatgatcaacgcagcggcagctccctacaccatcgcacctgcacacacrccgtactatggtaacgggtacccaatgcagtaccaggtaccatacatccactaatgggga

SEQ ID NO: 8145 - DNA, 121 bp, Artificial Sequence
  Description of Artificial Sequence: Synthetic probe
aagggcgacaatagctccacagagcagctttacaacaagtaagcggttctaccaaagaagrcaaaaaaaacgaattctctcaaaaccagatggttccaacctagagctaagtttttaataa

SEQ ID NO: 8146 - DNA, 121 bp, Artificial Sequence
  Description of Artificial Sequence: Synthetic probe
gatgggcattcccgggcaagatgccagcgtgggagaagcgccagaaacaggcagttgcaamcaaagacaaaaagcagtcataggatcttgtattatttttccatcactgttccattctttt

SEQ ID NO: 8147 - DNA, 121 bp, Artificial Sequence
  Description of Artificial Sequence: Synthetic probe
cgtatctgcgtcgaggcagagtcttccctggacaacgacgccgtcttcaaggagatgatcmggtctgcgccccttccgatgagcccattggagtctcttgcgtcctcagctgtgcgaactg

SEQ ID NO: 8148 - DNA, 121 bp, Artificial Sequence
  Description of Artificial Sequence: Synthetic probe
aagaagtcgcaagggatggctcttgacgcgtcggatcttaagttgctgtcctctgtgcccraggtgggtgtgggtgaactgacgggatgggattagtggcagttcctagtgggcttgacaa

SEQ ID NO: 8149 - DNA, 121 bp, Artificial Sequence
  Description of Artificial Sequence: Synthetic probe
atggttgagcaagagctgccttctggaggcctgctgatctaccagagcttcactgccatcrgagaaatgtccactgggtcgccaagatctgtcctgaattgctttgttgatgacaatttgg

SEQ ID NO: 8150 - DNA, 121 bp, Artificial Sequence
  Description of Artificial Sequence: Synthetic probe
acaagaagatcgtcctaggactgtaaaagaaatatgttctgttgccaatggagcaacaaaraaagagattggccgagcaaaagagttcatagtgaagcaactggaagttgagatgggccag

SEQ ID NO: 8151 - DNA, 121 bp, Artificial Sequence
  Description of Artificial Sequence: Synthetic probe
tcgtggagaagccgagcaagaaggcccctgctgccgccgggatgccagggggcatgtagtkggttgaagtggtgtgtagtcctgctggggtgggttagggtgtgggagtctctgacgactt

SEQ ID NO: 8152 - DNA, 121 bp, Artificial Sequence
  Description of Artificial Sequence: Synthetic probe
atctacagccataatggatctcattgaggagcgctgggaagagctaattggtgaaatgccyctgaagatatgctatcctgctattgagaaccatgaatggcgaattgtgacggggtgtgac

SEQ ID NO: 8153 - DNA, 121 bp, Artificial Sequence
  Description of Artificial Sequence: Synthetic probe
ctcaaagggttatgcattctgtgtctaccaggacctcaatgtcactgacatagcttgcgcygctctaaatggtatcaagatgggtgacaaaacccttacggtcagaagagcaaaccaggga

SEQ ID NO: 8154 - DNA, 121 bp, Artificial Sequence
  Description of Artificial Sequence: Synthetic probe
acacgatgcagctcgccaagttcgacgtcgtcccacagcatatccagaaccagctctcagyggcaaaacaggaggaggccgctgcttaatttttttggtggtctcgtagatatatatacgt

SEQ ID NO: 8155 - DNA, 121 bp, Artificial Sequence
  Description of Artificial Sequence: Synthetic probe
ttcagcagtgatggatattgattattcaccaactgggcgggaatttgttactggttcctaygatagaacggtacggatcttcacttataatggtgataatagcagagagatataccatact

SEQ ID NO: 8156 - DNA, 121 bp, Artificial Sequence
  Description of Artificial Sequence: Synthetic probe
gaagtgtttctgagttaccatgaagtttgtagctgtaagtgtttgtccagatatatatttrcttagcagacttgcttccaagagtatacagcaatacatggttagtatttgcagtcaagtg

SEQ ID NO: 8157 - DNA, 202 bp, Artificial Sequence
  Description of Artificial Sequence: Synthetic probe
ttgccaagtgctgcccaaatgcaattgtgaatgtgatcagtaaccctgtcaattctaccgtaccaattgctgctgaagtatttaaaaaagctgggacataygattcctaagcgtttgttgggggtgacaacacttgatgtagtgagagccaatacttttgtgggggaggttcttggtcttgaccccagagatgttaatgttc

SEQ ID NO: 8158 - DNA, 121 bp, Artificial Sequence
  Description of Artificial Sequence: Synthetic probe
ctcctctgaattatctgacgtaagggaggtgaccacagaacctgaagaaaacagccatccrtctgaagtatctgttgtaagggaggtgaccacagaacctgaagaaacagcttggatattc

SEQ ID NO: 8159 - DNA, 121 bp, Artificial Sequence
  Description of Artificial Sequence: Synthetic probe
atcatggagtgcgacggctattggtatctaccagaatccggcaattctaaaagcagcaacygcagccttctggacatcctgccgcgtggtatccaagttcctgtgaataatagtccatgcc

SEQ ID NO: 8160 - DNA, 121 bp, Artificial Sequence
  Description of Artificial Sequence: Synthetic probe
tgtatcgtgagctgggttcatgtgaggttgttgttcagcgaattcaggtcataaattgttkgtctccttgttttgtggcaaggagagcagtggtgatattggttactaattgtagaatgtt

SEQ ID NO: 8161 - DNA, 121 bp, Artificial Sequence
  Description of Artificial Sequence: Synthetic probe
tccttcttggcaagttgccagaatcttttatctcgaccttgggttattgatgacctagackcgttcaaaaccaaatggaccaagaaatcttgggaaaaggcagttatttttgttgataatt

SEQ ID NO: 8162 - DNA, 121 bp, Artificial Sequence
  Description of Artificial Sequence: Synthetic probe
tcttggctggatctgccgttatgtttcttagcaaagctgctcttgtaataatagacttctkcacataattatgttgcgagtcgagcaactgtatgaatcatatagctggatgctgctatga

SEQ ID NO: 8163 - DNA, 121 bp, Artificial Sequence
  Description of Artificial Sequence: Synthetic probe
aaagtttgcacaactgagccaacagatgggaaccaacagactcaagctaatcagacgtccragaaaatgataggcaaagaaaatagcaatccaaacttgccaaatactcttctaaaggacg

SEQ ID NO: 8164 - DNA, 121 bp, Artificial Sequence
  Description of Artificial Sequence: Synthetic probe
tgaggttactgactgcacatctgccaagctctatggtgatgtcaagtttgtagatgagagrcaccggcacagatatgaggtgaatcctgatatggtgccagcgtttgaaaatgcgggactt

SEQ ID NO: 8165 - DNA, 121 bp, Artificial Sequence
  Description of Artificial Sequence: Synthetic probe
actctgtacctgtattattcctgtactgccagccggctgatcaaactgtattgtactgtgycatgatttgtgctagtctttcatactgtactgttggtcaatagtctacgaattgagcatg

SEQ ID NO: 8166 - DNA, 121 bp, Artificial Sequence
  Description of Artificial Sequence: Synthetic probe
ggtcgtgggactgaaccacaactctggggagccagttgatcctgagatggaaggcatctaygacaattactcggtgaaacgtcaaatcatcaattccggacccatcatcgcctcgcagctg

SEQ ID NO: 8167 - DNA, 121 bp, Artificial Sequence
  Description of Artificial Sequence: Synthetic probe
gcgagcaatgaatgatatcaatgcagctgcaaggatgagggtggctgcgaacgagaaggcrgaggctgagaagatcatacagatcaagcgcgccgagggcgaagcggaagccaagtacctg

SEQ ID NO: 8168 - DNA, 121 bp, Artificial Sequence
  Description of Artificial Sequence: Synthetic probe
tgctacaccctacgcatctttgttcgacgcataccctcatgttatggcatggtggactgayctgttggcaaggccctccgtccagaaggttgcttcactgataaaaccatcatcttagagt

SEQ ID NO: 8169 - DNA, 121 bp, Artificial Sequence
  Description of Artificial Sequence: Synthetic probe
cgaggtcttggttccactgaatttggatgacatcagcagcaagctacgcccgaacagcagyggtagccagaccgtccagatggccagctccctgcttgcggcccgccactccggcgagagg

SEQ ID NO: 8170 - DNA, 121 bp, Artificial Sequence
  Description of Artificial Sequence: Synthetic probe
ctgagaaggtcttgaatgaggatctgcggcttgtgctcggccaacaagagcgaatgaacarcggcgctaacgtttggaactggccagtgtcatatgacaagctcggcatacggtacagact

SEQ ID NO: 8171 - DNA, 121 bp, Artificial Sequence
  Description of Artificial Sequence: Synthetic probe
ggcttggctgccctgtaactgtagctgtgtttgcactcgtaggagaggaagtacttactcstagcatctgatctatgtgttccgaacaggcatgtgtattgcctggtaaataaatgtaccg

SEQ ID NO: 8172 - DNA, 121 bp, Artificial Sequence
  Description of Artificial Sequence: Synthetic probe
acgtggcacccatggttctgagagacgctcacattgtgttctagttatctcttgtgaatakaaccttatgtagcgagcttgtatcgtgtagatagaaacatggggttttagctctgtttac

SEQ ID NO: 8173 - DNA, 121 bp, Artificial Sequence
  Description of Artificial Sequence: Synthetic probe
aagcagaacattcgtgaaggtttataagtcaggatcagtggggaggtcgttggacatcacycggttctctaattatgctgagcttcgagragaactgggtcagatgttyggcattaggggt

SEQ ID NO: 8174 - DNA, 121 bp, Artificial Sequence
  Description of Artificial Sequence: Synthetic probe
tgttgatgcacttgaagatgtagctcatgcagtgaatgggctcttgactccccaaaattcygttctgatgattacacattaccaacgtctgttggatcttattaagccaagctatgtccac

SEQ ID NO: 8175 - DNA, 121 bp, Artificial Sequence
  Description of Artificial Sequence: Synthetic probe
ggggctttatagagttctctgggacaacttgaataaagttgttagtgttttagttgctaastgtatgtaccccatttcattatgctctcccaattttgcaaatgttattgatataaactta

SEQ ID NO: 8176 - DNA, 121 bp, Artificial Sequence
  Description of Artificial Sequence: Synthetic probe
ggataatgttggagaagtagtccactacggtgacttcacaagcagcagcgcaaggttcggygcctactgggtcggtagaggccagatcacaggcgcgtttctggaaggtggaaaccgagaa

SEQ ID NO: 8177 - DNA, 121 bp, Artificial Sequence
  Description of Artificial Sequence: Synthetic probe
ggtgcgaaagcctgctgtgaattgttttaccttagatgtggtgtgctgacattgcaaccckgacatttgtatcttgaatgtgtgtaaaaggctgggcgcattggtccggttccgtagtaaa

SEQ ID NO: 8178 - DNA, 121 bp, Artificial Sequence
  Description of Artificial Sequence: Synthetic probe
cagctactggagctactggatatgattttggcgtggacccaaatgtagatcccgagttggyacttgccctacggttgtctatggaagaagagcgtgcgaggcaagaggctatcgcgaaaaa

SEQ ID NO: 8179 - DNA, 121 bp, Artificial Sequence
  Description of Artificial Sequence: Synthetic probe
cccgcggaaggcggcgaggagaagaaggacgagaaggatgataagaaggacgacaaagctsgagacggcgacgaaaagaaggacgagaaagagaaggagggcggcagcggcgaagagaagg

SEQ ID NO: 8180 - DNA, 121 bp, Artificial Sequence
  Description of Artificial Sequence: Synthetic probe
cagaggtcgagttctagacgaccactgataatcacagaaggcccatacttttgtacagaaraagtatggccagtgaagctcctccgctaacagtctctagactcgaggactgagaactgat

SEQ ID NO: 8181 - DNA, 121 bp, Artificial Sequence
  Description of Artificial Sequence: Synthetic probe
taacagaggcagcagtgtatgtaaatctgtatatcattacatgagctccgatcgcctctgytgttgctacccatgattctagaagcagtaaatatgaccaatttccttgcgaaatggtagg

SEQ ID NO: 8182 - DNA, 121 bp, Artificial Sequence
  Description of Artificial Sequence: Synthetic probe
tttttgttgttgtcgtgtttagactatatgcccgtgctggtgtgcaaagaactcagaagtyagactgcttgatgcctcttaattctgttgacaatttgtcacggtagtgttattatttgtt

SEQ ID NO: 8183 - DNA, 121 bp, Artificial Sequence
  Description of Artificial Sequence: Synthetic probe
gccgtgctctacatcaacatcccccacatgcatagtccaggaggcaagcacacaaaggtgrcacacggtcaccatggccagaagttcctcggctggccatgagctcggatgacgacgtcgc

SEQ ID NO: 8184 - DNA, 121 bp, Artificial Sequence
  Description of Artificial Sequence: Synthetic probe
aaacgcaaacaactgataggcgatttgatctttgttgttctggaggtgtctattgttcaayaatcgacacatctgccagtcatcgtctcttctttcttttttcttcatttgtgacatcagc

SEQ ID NO: 8185 - DNA, 121 bp, Artificial Sequence
  Description of Artificial Sequence: Synthetic probe
taagaacttgttggctgaaaagaagagaactaaaactgcaaaggaggagagtaagaaacgrgctcgtgaccatgatgatttacctacagacgaggatgtggttgaggatttggtcctgagt

SEQ ID NO: 8186 - DNA, 121 bp, Artificial Sequence
  Description of Artificial Sequence: Synthetic probe
tgagccaatcaagcctgtgcttggtgacatggtcttgtctctggaggagaccaacctgtckaaaaggacccgcagtttggtaatggttccaccggctgatcttgccgagacggtgcggctg

SEQ ID NO: 8187 - DNA, 121 bp, Artificial Sequence
  Description of Artificial Sequence: Synthetic probe
agcagttcgattctgcagagagttgcgagcacgtcaacaagcacagaagacgctgatgctmctccctccggcagctctgctgagccagttgcaccgagaagaacagtcagggagaggaaga

SEQ ID NO: 8188 - DNA, 116 bp, Artificial Sequence
  Description of Artificial Sequence: Synthetic probe
gaaatctgaatcgcttgttaccgtcgatacaagatttgcagcacgtgaggtttcayctgcaaggaaggttataattcagaaaccagagacctttgtgcctcatgtatcaggcattt

SEQ ID NO: 8189 - DNA, 121 bp, Artificial Sequence
  Description of Artificial Sequence: Synthetic probe
aataagttgactgctacgtgtacaaaggtaaatggaaaccgtctcggatcgctaaccttayttgccgaatcttctgtatatatatgcactactttcttactctctgtgttggctaatgtct

SEQ ID NO: 8190 - DNA, 121 bp, Artificial Sequence
  Description of Artificial Sequence: Synthetic probe
agcaccgcctcaaagagcaggagatccttagccgtaagaaatcttccagatagctgactcmggccctctctgcctggttagtgaatcgacaggagattgaccacatttcatgagaggtttc

SEQ ID NO: 8191 - DNA, 121 bp, Artificial Sequence
  Description of Artificial Sequence: Synthetic probe
ttgctgacgtgcaaactctcacctatgataggattgcttcattcgttgatagatttggtgkctttgacctggtgattggtggcagcccatgtaacaatcttgccggcagcaaccggcacca

SEQ ID NO: 8192 - DNA, 121 bp, Artificial Sequence
  Description of Artificial Sequence: Synthetic probe
ttgagtttgcttaagaacagaaggggttggcgtaaccagtctgatgatgacatcgtaattygtgtttagataataaatttttcatttgagttatgcatgctatatttttctgtgatcttgt

SEQ ID NO: 8193 - DNA, 121 bp, Artificial Sequence
  Description of Artificial Sequence: Synthetic probe
aatgctgctgagaagaaaagtgtgaatcaaactggtgatggagagaaaaaggaggacgtasctgccccttcagagagcaagaatgccaagaagaagaaaaacaagaaggacaagagcgcaa

SEQ ID NO: 8194 - DNA, 121 bp, Artificial Sequence
  Description of Artificial Sequence: Synthetic probe
ctactatgtttgacctcagcgaggcacaagctcacagtattgttagcaagatgatgatgcrtgaggagcttcttgcaagctgggaccagccaaccaagtgcataatttttccagaacgtgg

SEQ ID NO: 8195 - DNA, 121 bp, Artificial Sequence
  Description of Artificial Sequence: Synthetic probe
catctaagttagaggatcctgcagtaggcgtttctgttgtgtcctggtttcttgtgttacyggagttttgtactagctgttgcttagcaaagcccctcggtggctccattgccccccacca

SEQ ID NO: 8196 - DNA, 121 bp, Artificial Sequence
  Description of Artificial Sequence: Synthetic probe
tcttttcgagcaaaagaatgatgtggcaaaagctgtacttgaggagcttgaaaaggtgatktcagattatggttacagcattgagcacatcctcttggttgacatcatccctgatgctgct

SEQ ID NO: 8197 - DNA, 121 bp, Artificial Sequence
  Description of Artificial Sequence: Synthetic probe
gcaaaacgcagaagttgctggtgatgatgacagtgaggatgaggaagacacaggaatgggygatatcgaccttacaaattctggcgtcaatgcagattgagtctccggtagttgttttgga

SEQ ID NO: 8198 - DNA, 121 bp, Artificial Sequence
  Description of Artificial Sequence: Synthetic probe
cccccaactcgacgaagaaagcctcgacgacgacgcaagcgctgcctaccgcgaagctgtygagctcgtgagatgtgtttgtagatatcccccccyycccaccccgagaaattagtatacc

SEQ ID NO: 8199 - DNA, 121 bp, Artificial Sequence
  Description of Artificial Sequence: Synthetic probe
tgaagaacaacaaagagctgagaaaagaactcgggaaaccaaaggggagcaattcactcckaaatggttcaacatgacggacgaaatctcccctaccccatggggcgatctggaggtgtac

SEQ ID NO: 8200 - DNA, 121 bp, Artificial Sequence
  Description of Artificial Sequence: Synthetic probe
cgggttgcagtcagcaaagacaaccaatggcagcacatcaccagccaaacaacaacagcakcagcaaaagaagaagaaattcaaattcggtggtttactgaagaagaaaagcccaaactag

SEQ ID NO: 8201 - DNA, 121 bp, Artificial Sequence
  Description of Artificial Sequence: Synthetic probe
ccgtggcatctgcatagccatctgtgccctaaccttctggatcggtgacatcatcgtgacrtacactctccccgtgatgcttaacgccatcggactcgctggtgttttcggaatatatgct

SEQ ID NO: 8202 - DNA, 202 bp, Artificial Sequence
  Description of Artificial Sequence: Synthetic probe
ttgtatccgtatgtgtgagtatttgggaagtcttggcggtgtatgcgtggggcattgtacgtgaggtagctacgtacaagtcttgtagtggtacgtttgtmattgtcattgtgtggtgggttcaataattgtactgcagagtttcccggtcccattgtcagtgcggacgagcccactggctttggaccaggattgttttttt

SEQ ID NO: 8203 - DNA, 121 bp, Artificial Sequence
  Description of Artificial Sequence: Synthetic probe
aagggtatctaagctgttctcgcatttcgctgaaagctcagacgtgaaggccttgcccaayggtctgtcgctcctccttggcaaaatgaatccttcgaaaagggagcaggttctcgacggc

SEQ ID NO: 8204 - DNA, 121 bp, Artificial Sequence
  Description of Artificial Sequence: Synthetic probe
acgaatgcaaatcccgtaccaacaatgccacaataatgccgtcttacatagcggggtaaaycattctggtaaccggctccacttgggtccaagaacaccttttctctctaattctgagcgg

SEQ ID NO: 8205 - DNA, 121 bp, Artificial Sequence
  Description of Artificial Sequence: Synthetic probe
gagctgattccaagctgtgtatctcatcaggggttgaaatagcgtgatgaagatcccttcygcatattgtgctatcaagctaacagcagttcaatccagattatattggtcgacaagacat

SEQ ID NO: 8206 - DNA, 121 bp, Artificial Sequence
  Description of Artificial Sequence: Synthetic probe
aaacaaggatgaagatgatgcagagggaaggagggccttacattttgcatgtggatatggygagttcaagtgtgcagaaatccttctggaggcaggtgctgcagtggatgcactggataag

SEQ ID NO: 8207 - DNA, 121 bp, Artificial Sequence
  Description of Artificial Sequence: Synthetic probe
gagagagagcatgagtagacgaaatgaaccagctagcagaagagatggtaatgcaagccaygagagggagagagttttagaaactgtccttatggagaaggaacaaaaagaagcggaactc

SEQ ID NO: 8208 - DNA, 121 bp, Artificial Sequence
  Description of Artificial Sequence: Synthetic probe
ggatgttccagaagggatacacttactaatgaggcggcatgatttatatactgagatgcaygtcgttttgacgtcatggttccatttcaacggtgtgaataatcaccagcatgttggtgcc

SEQ ID NO: 8209 - DNA, 121 bp, Artificial Sequence
  Description of Artificial Sequence: Synthetic probe
acagggatggtcgttcaagcgaggggacaattttaccaaagttctattgttttgaactcartgcaatccgaaaagcatgtgcctccctggaggcgaattacccaaccaaggggtgactttc

SEQ ID NO: 8210 - DNA, 121 bp, Artificial Sequence
  Description of Artificial Sequence: Synthetic probe
caacgcgcccaagtgcggattcaagaacaaccactacgacggcgccatgaacttcatgcaycgcgacgaggaggtcgactactacccgtcccgccacgccccgctccggcaggcggaccca

SEQ ID NO: 8211 - DNA, 121 bp, Artificial Sequence
  Description of Artificial Sequence: Synthetic probe
agcagcctcatcacataggtgaatgatgctgccttcttgatggactaggagcaattagtcsagatttgaatcaaaaaagctcatcgtggcactcttgtacatactaatgcagtattgccag

SEQ ID NO: 8212 - DNA, 121 bp, Artificial Sequence; identical to SEQ ID NO: 5999
  Description of Artificial Sequence: Synthetic probe

SEQ ID NO: 8213 - DNA, 121 bp, Artificial Sequence
  Description of Artificial Sequence: Synthetic probe
ataccaaggaggagggcacggacatggtaggcaatgctccatcgacgtgctcaacctaagrgtgtgtgccaacgttctaggtgggctgctcggcctcaaggtcggcgtcccggcctacgac

SEQ ID NO: 8214 - DNA, 121 bp, Artificial Sequence
  Description of Artificial Sequence: Synthetic probe
cagcttggtatctggattgttgacaatcggcccccgatttggtggtgcaattgatgatgcygctcggtacttcaaagatgcatatgataggggtcttacaccttatgagtttgttgagggc

SEQ ID NO: 8215 - DNA, 121 bp, Artificial Sequence
  Description of Artificial Sequence: Synthetic probe
ggccggcaagaagtagagccgctccagaaggttcctaagggttcggtttccattggtagcwgtttttatgtcccgtgttagttgctagctgatggggaaggggtacttaggctgtaaattt

SEQ ID NO: 8216 - DNA, 121 bp, Artificial Sequence
  Description of Artificial Sequence: Synthetic probe
gatggattcatatgacacttgtttatcttccgcagtttgctcagtgggtcgttgtttcagrccattttgtgcataagactctgagcagtatggtattaattgtcagggtttattgtgtata

SEQ ID NO: 8217 - DNA, 202 bp, Artificial Sequence
  Description of Artificial Sequence: Synthetic probe
gtggtgttgatcagcttgttgagatcatcaaggttttaggtacccctacacgagaagaaattaagtgcatgaatccaaattataccgagttcaaattcccwcaaatcaaagctcacccatggcacaagatcttccataaaagaatgcctgccgaggcagtagatcttgtttccagactattgcaatattcaccaagccttcg

SEQ ID NO: 8218 - DNA, 121 bp, Artificial Sequence
  Description of Artificial Sequence: Synthetic probe
ttcccccaggcagagaacagaatgcacgctcaaaatgcaatcatgcttcatgtgtttgggkcttagttatcctattgcatgctaggttgctagtgttaaatcagtactgaaactgaagatt

SEQ ID NO: 8219 - DNA, 121 bp, Artificial Sequence
  Description of Artificial Sequence: Synthetic probe
aaagggtggcgaccactgtcccttcttctcgaagccgcagtctctccacaagatcttggtygagatcgcgcagatccaagctccgtcgatgctgttcccaggcaaagccatttcagaagag

SEQ ID NO: 8220 - DNA, 202 bp, Artificial Sequence
  Description of Artificial Sequence: Synthetic probe
ggaatgggcagatgataaacttgaaagtcaaattgaaattgtcttggataccgtgaacaaactaagatctctgaagccatcaacagatacaaatgaaaggygtcctgcttttgcactttgccgaggacaagatattgctgccactgttcaatgctatcaatccctagccgtgtctctatcttctgtatcttcgctaaagatc

SEQ ID NO: 8221 - DNA, 121 bp, Artificial Sequence
  Description of Artificial Sequence: Synthetic probe
ctccaaatactgaccccttcattgctctgggcattggcatatcatttccaagtcaggatcrgaatatgcatccctgttggccaagcaggcatctgtgcaccttcaggatcttcatgttcac

SEQ ID NO: 8222 - DNA, 121 bp, Artificial Sequence
  Description of Artificial Sequence: Synthetic probe
cattgccccaatcgtgttcgagcaatgatgtccgtgccttgagaataagtgatttcaaacrtgcacatgaacaggtttgtgcaagtgtatcttctgattccacaaatatgaatgagcttat

SEQ ID NO: 8223 - DNA, 121 bp, Artificial Sequence
  Description of Artificial Sequence: Synthetic probe
atggcctcgcgccaccgcgtgccgttccccctgcatccagatcatcaagactgcgacggtrgacttcaagctgtgcaagagggacaacaccaagcagttccacaactccaagatcaagttc

SEQ ID NO: 8224 - DNA, 121 bp, Artificial Sequence
  Description of Artificial Sequence: Synthetic probe
ggcaatcgactccaagcctaatgccatagcacagaacgacgccaagaaacccacgaaaacrtttgacgtgcccctgaagagcgccgcggtgcacagatcaaacagggtcttatttcggaag

SEQ ID NO: 8225 - DNA, 202 bp, Artificial Sequence
  Description of Artificial Sequence: Synthetic probe
acgtgatcgacggggagggcatgcggaaggtggcggcggtccgggacggcgcgtccggccgcggtctcgagctgtgggccaaccagccggccatgcagctytacaccggcaactttctgaacaacaccaaggggaaggacggccatgtgtacgaccagtacggcgggtttgctctggagacgcaggcctaccccgacgccgt

SEQ ID NO: 8226 - DNA, 121 bp, Artificial Sequence
  Description of Artificial Sequence: Synthetic probe
ttcccagaacagttaccggaggacaaaaacttgattggattaaagcgggcacggtgcactrtgcatcttgattcttgattaataatcacataaccatagctagagtactgagcttttgttg

SEQ ID NO: 8227 - DNA, 121 bp, Artificial Sequence
  Description of Artificial Sequence: Synthetic probe
gcttctgctggatgttgctctgtgtagctgccagtggctaacatcgcgtccagtgtggtgygagatcattgtgtccatgttgtgcagcgctgaagctaattgtgctcgcgcttgcccatta

SEQ ID NO: 8228 - DNA, 121 bp, Artificial Sequence
  Description of Artificial Sequence: Synthetic probe
tcgactccaacgacctgttgctcaacctccagcagctgaatgtgggaggaaacaagcagargaaatgaagttgctatctgagttggcgcgtatcactgtaaaagactttgcaaccagaagt

SEQ ID NO: 8229 - DNA, 202 bp, Artificial Sequence
  Description of Artificial Sequence: Synthetic probe
tacaacgtgtgaacctggtgccatgtttattcagctcaaagcttcaactttaatttacacacaacatatgagcacattcactacccgactcgaagcaatgrtcatatcttcttcagcctaatttgagcaccgtgttgcgggtggagggttatcaccgtgtatggtgcgtgggtgtaggacggcgagagctcgaacgagaagc

SEQ ID NO: 8230 - DNA, 121 bp, Artificial Sequence
  Description of Artificial Sequence: Synthetic probe
accactcctggaagagaactagctagagaaccgaagcatcttttatctcagcttaatactytaggtgttttgagccagatgatatcaccaacagagatggaaaacggttgaaactgttgaa

SEQ ID NO: 8231 - DNA, 121 bp, Artificial Sequence
  Description of Artificial Sequence: Synthetic probe
tgttgacttgttggatgtcgggaagaggatcaagaagacaccaatagtagttgggaattgyactggttttgcagtcaacaggatgttctttccttacacccagtcagcgctcctgtttgtt

SEQ ID NO: 8232 - DNA, 121 bp, Artificial Sequence
  Description of Artificial Sequence: Synthetic probe
tctgtgatattcctgcgatccaaacttcagaatatgtctctagctttcgtagctaccaccrtgaacatggtgtccagcagaaggtctagaagatgaagtgtgggcagacaggcacagagga

SEQ ID NO: 8233 - DNA, 117 bp, Artificial Sequence
  Description of Artificial Sequence: Synthetic probe
ttcatcgagctcttcttcatcatgtcaagcatatggatggggcgtgtgtactatgtmtttgggttcctcttcatcgtgatgttgctcctggttattgtctgcgctgaggtttccctg

SEQ ID NO: 8234 - DNA, 121 bp, Artificial Sequence
  Description of Artificial Sequence: Synthetic probe
gcaggagaagctcatggcaagacattccacagtggttgacagtttcgagaagaagctgcgygggcaagatatagagaaccggattgcttcccagcaacagaaaattggtgcgctgaggcaa

SEQ ID NO: 8235 - DNA, 121 bp, Artificial Sequence
  Description of Artificial Sequence: Synthetic probe
gaacatcagagacgtcatcccgttcccaagataccctgggagggctgatctctgaagggtygacgatgttctcctcaaaatagaagtgaaacctgcgctccaaagccatttgaagtactac

SEQ ID NO: 8236 - DNA, 121 bp, Artificial Sequence
  Description of Artificial Sequence: Synthetic probe
ccaggcctacgagatcgctttgcaacagatcagggagaaccgtgtggcgatggacaagatygtggaggtgctcctcgagaaggagacgctgagcggtgatgagttccgggcgattctctcc

SEQ ID NO: 8237 - DNA, 121 bp, Artificial Sequence
  Description of Artificial Sequence: Synthetic probe
gccgacactaggagagctggatgacttgtactgtgtttacatgaagagtattcccaagtcygataagctatcgaggctgcagtacttgctcaacataagcgctgagaaggctgaccagctt

SEQ ID NO: 8238 - DNA, 121 bp, Artificial Sequence
  Description of Artificial Sequence: Synthetic probe
tggcccagcattgcttcctgatgattctgaaaagaagcagttcgctgaggagctgcttgcrtataccgatgagttcggtaaagcagcatactcatctatcatctccaagggagatgtgtca

SEQ ID NO: 8239 - DNA, 200 bp, Artificial Sequence
  Description of Artificial Sequence: Synthetic probe
ctagttctagatcgcgattaattaacttttttttttttttatttggaatctgcttatcgtgttccttgatcaattgtgtaataaattggcagcttcaarctgcgtgggaaggagctgaatattacatatacatatgcagaagcaaatttggcggttctgtaaacaaccgaacccagtttttaggtttatgtacacgagca

SEQ ID NO: 8240 - DNA, 121 bp, Artificial Sequence
  Description of Artificial Sequence: Synthetic probe
tctctgcttcaggcctctattattatcctgcaagctgagtgggtttctccatatctattgyttctgtagcaaccgcgaaaggactttttctgttgattctttccttgtgtgggagatctcc

SEQ ID NO: 8241 - DNA, 121 bp, Artificial Sequence
  Description of Artificial Sequence: Synthetic probe
agcagctgatgagtctcccgttgtcgtgggagaggaggtgctgaacactgaaattgctccygatggtaaatctccaagtgtgtgagaggctgatgctgtggaattgcaagcctgcgagcct

SEQ ID NO: 8242 - DNA, 121 bp, Artificial Sequence
  Description of Artificial Sequence: Synthetic probe
gacggccgcacatgagatcctcgtgtagattctgttggtagtcaatgccatgtaaaaaagktgggcattttgttgcgacaggtacttttgcgcagatttagcttccccacgtgtatgggca

SEQ ID NO: 8243 - DNA, 121 bp, Artificial Sequence
  Description of Artificial Sequence: Synthetic probe
agagagagatggagaaacaacaagctgaacaggatgctggtacaggtggtgacaatgcagmagatgggcatgtggatgcaagtgctgatgtggatggccatggaagctctggcaacgaccc

SEQ ID NO: 8244 - DNA, 121 bp, Artificial Sequence
  Description of Artificial Sequence: Synthetic probe
tcatccaacctgtctctaggagataggcaccttgccgcacaatttcaggaaattcctctgsatctgaagatgcttgatgcagaaaaagttggatttgagttgttgaagtctacgatggtgg

SEQ ID NO: 8245 - DNA, 121 bp, Artificial Sequence
  Description of Artificial Sequence: Synthetic probe
gttgcaaggaacttattctcaagttaacaaagacagccaaccaagttatccatacaagcayacacacggaaaaaaagatcatccatctcgagtcaagtccccgagacgacttcatcttctg

SEQ ID NO: 8246 - DNA, 121 bp, Artificial Sequence
  Description of Artificial Sequence: Synthetic probe
gctgctgcaggaagttattacgatagcaccggatatggttatggtagaggaggctatggtrctgcctatggaggcaatgctggatttgggtctggctatggtggtggctatggtggctcta

SEQ ID NO: 8247 - DNA, 121 bp, Artificial Sequence
  Description of Artificial Sequence: Synthetic probe
tgaggcacattcttacatttgggcggtatagagaagggcaccattggcgaggaatcaattktggtgacatgacaaataaagttactttgccgtgtaggcatcatacatgtaatggggtggt

SEQ ID NO: 8248 - DNA, 121 bp, Artificial Sequence
  Description of Artificial Sequence: Synthetic probe
gtggcagtaaggttaggctaagatcctcttccttggcctcgacaacgccggcaagaccacsctcctccacatgctcaaggacgagcggctcgtgcagcaccagcccacgcagcacccmacg

SEQ ID NO: 8249 - DNA, 202 bp, Artificial Sequence
  Description of Artificial Sequence: Synthetic probe
gggatttcattggcattgggaatggcttcccttccttgagaaacctatatgttaataataatcagttgattggagtgctaccagatcagattgcaaatttraccaaccttgagatcctgcacttgtccaataataggctgattggatcgatatcgccaaagctagtcagcattccaagattgacatacttgtatttggacaa

SEQ ID NO: 8250 - DNA, 121 bp, Artificial Sequence
  Description of Artificial Sequence: Synthetic probe
tcggctgcaccttctggtggtagttattcagaatgcagggctgatgtagtgaaagctcttmaagtggacgaagcatgcactcacatgaaatgttccttcggtggcatttggaatggtggtg

SEQ ID NO: 8251 - DNA, 121 bp, Artificial Sequence
  Description of Artificial Sequence: Synthetic probe
ttctaaaacgatcaagctgaaacctaccgagaccgtgaataaaatcatcggaacaacgggyaattttggaggccatgttgtcgtgaactcgctcgagattgtcaccaatcttgacacatat

SEQ ID NO: 8252 - DNA, 121 bp, Artificial Sequence
  Description of Artificial Sequence: Synthetic probe
ggacgagcaagaagcagctttaaaacagttaaggaagtccttggtcatcaaggcaaaaccyatgccaaacttctaccaagaaggcccccctccaaagactgagcttaagaaggtgcctcca

SEQ ID NO: 8253 - DNA, 121 bp, Artificial Sequence
  Description of Artificial Sequence: Synthetic probe
agtcttcaaccaattcaccgagcagttctcagtcaatgaactagccaggctggtgacggcygcgggagcgaagcttgggctggaggtgcagaccaagtcggtgcccaacccacgcgtggaa

SEQ ID NO: 8254 - DNA, 121 bp, Artificial Sequence
  Description of Artificial Sequence: Synthetic probe
gtttatagaagctgtgaaaagttgccctgacgaaaaaacacgtgaggtactgaagctagtktgtgacctttacgcgctcgataggatctggaacgacatcgggacatatcggaacgtagac

SEQ ID NO: 8255 - DNA, 121 bp, Artificial Sequence
  Description of Artificial Sequence: Synthetic probe
tatccatagtgactttcagaaaggcttcattagagctgaaactgtatcttatgatgatttygttgcggcgggttctcttggagtagcaagggagaagggagtgctgaggttggaagggaag

SEQ ID NO: 8256 - DNA, 202 bp, Artificial Sequence
  Description of Artificial Sequence: Synthetic probe
tatccatagtagtgggaagtgaagaagcagcacttagggctggcagtcatatgctaagatctggatttcacgttacaccaattcgaccacccacggtaccrcccaactcatgcaggttgcgaatcactctgagcgcggctcattcctctgatgacatcaagaggcttgcggaggcactcactccatggctacctcacaaaca

SEQ ID NO: 8257 - DNA, 121 bp, Artificial Sequence
  Description of Artificial Sequence: Synthetic probe
agactgggggtgcagctggaagagttgccgtcggaggagcaaaaggagtacgccggggagktggacgccctccggagagaagtccagacgctctaccagcagaagctcaaggaggggcgga

SEQ ID NO: 8258 - DNA, 121 bp, Artificial Sequence
  Description of Artificial Sequence: Synthetic probe
ttcagcaggttcttcaaacctaaagtaccgtaaccccaagtacctatccatgctgaaccayttgagattttatctcccacagatctatcctaagttggataagatacttttcctcgatgat

SEQ ID NO: 8259 - DNA, 121 bp, Artificial Sequence
  Description of Artificial Sequence: Synthetic probe
atggttggagctggcaatgaccaagtaccggccatattggacaaggtatataaagtatgaycatccttatatccgtggatgcaacttgagtgactagaaacaagagagcatcacccatctg

SEQ ID NO: 8260 - DNA, 121 bp, Artificial Sequence
  Description of Artificial Sequence: Synthetic probe
aaactatgcctcggtgttgaaagcgcagagaactgcaaaggagaaaggatattctgatgtyctctatttggatgctgtccacaacaaatatctggaagaagtttcttcatgcaatattttt

SEQ ID NO: 8261 - DNA, 121 bp, Artificial Sequence
  Description of Artificial Sequence: Synthetic probe
tggcgcttcaatagctcccaaatcacttagagcaggaaaagcaccatcaccagagaggatraaatattgggaagaacatgggtttagcagtttgattgttgctgctcctgggcatgaggta

SEQ ID NO: 8262 - DNA, 121 bp, Artificial Sequence
  Description of Artificial Sequence: Synthetic probe
ctggctctgtttctgctggcgcttctggaccaacacctagcatgtgcttctgactggtggygtggaactagcaatctctatttatcatgtatgtgattgccttgccttgaccctggaaagc

SEQ ID NO: 8263 - DNA, 121 bp, Artificial Sequence
  Description of Artificial Sequence: Synthetic probe
aggccaggggaataataatatgaactggaatgcaccaagtgggaatcagacttggaaaaaycagcaggattttagtggtggtaactcaggtgggcggtcatggaggccaccttttaagagg

SEQ ID NO: 8264 - DNA, 121 bp, Artificial Sequence
  Description of Artificial Sequence: Synthetic probe
tacggtctatgaggacatcttcacggccaaattcatctacacgtggcatgattggatagartcgaggacagttataacagaaactatattagcccttgctaatcatgtggagctggctggg

SEQ ID NO: 8265 - DNA, 121 bp, Artificial Sequence
  Description of Artificial Sequence: Synthetic probe
tgcaaccgtacattcagttgctcaagagacaaaagatcagcttggttatgaacccattgtrccactcaaggatggtctgaagagaacaatagagtcgtattcccatctacaagcacataat

SEQ ID NO: 8266 - DNA, 121 bp, Artificial Sequence
  Description of Artificial Sequence: Synthetic probe
caaggatattggtcggcaaaattccatctctgctggagaatttgattgctagagttaatgsttgggaaaaagagaagggcataccatttatgcatgataagatgaggcttttggatagctt

SEQ ID NO: 8267 - DNA, 121 bp, Artificial Sequence
  Description of Artificial Sequence: Synthetic probe
gaggcctagctgttgcagaggcggtgtggaagaagggcccgattgttttcttcttatctgytgtagggttctttttgtaaagcgcatgggcctggttgtatttttccttcttcttcggtcc

SEQ ID NO: 8268 - DNA, 121 bp, Artificial Sequence
  Description of Artificial Sequence: Synthetic probe
gccacaagcccgaggagtatgcgtcgcgggaagacatggcaaatggagttcagatgctagmcttgacgatggccaaactatccttggagtgagcacggaatggggaggaatcaagagggta

SEQ ID NO: 8269 - DNA, 121 bp, Artificial Sequence
  Description of Artificial Sequence: Synthetic probe
gtttaactgcaacttatgataaatggtttcaggcgggcaaaaggcggagactatggaaggygggaagcttgccagtggggcagcttgtcttctacaaccaaacagtgcctcttgaccaccg

SEQ ID NO: 8270 - DNA, 121 bp, Artificial Sequence
  Description of Artificial Sequence: Synthetic probe
aaaggttggtaagcactatattgttgatgcctcttcggaggaggaatcccagatgagttckgcggtttctgtttcagtcaacaggcgtggccaaatatgcgggttgaccaagaggggagga

SEQ ID NO: 8271 - DNA, 121 bp, Artificial Sequence
  Description of Artificial Sequence: Synthetic probe
cgacttcgtctccggcaagttcgacacatgggagctgtaaatcttcctacacatacatacmtatacagacgtacatataccaagatatcgtccgacccaccgaccgaccgatgtggatgca

SEQ ID NO: 8272 - DNA, 121 bp, Artificial Sequence
  Description of Artificial Sequence: Synthetic probe
acccaggaatttagacgaagcaggacctgtgcaccctttagcttctagtcttgctgcaggyttctctggagttgtagcagctgctgcttcacatacatttgatactgccaaaagtcgttca

SEQ ID NO: 8273 - DNA, 121 bp, Artificial Sequence
  Description of Artificial Sequence: Synthetic probe
ctgtaaagatgtggaatgatccatctccgtccaggactggctctattcctcttaccgtaartccctcgttgcatagttggttgagacaaaaaataatacggagaatgtggatatgcgttag

SEQ ID NO: 8274 - DNA, 121 bp, Artificial Sequence
  Description of Artificial Sequence: Synthetic probe
ggctttagcttcaaaagagaaaaaaagttagtgttgtaaactactataaaggaagcttctytgttatttagtctttcaaaagacagcttcataccttactgaaccttcagcaaatgttgtt

SEQ ID NO: 8275 - DNA, 121 bp, Artificial Sequence
  Description of Artificial Sequence: Synthetic probe
cgagaagtcgttcgcctattcaggacaactcctgcgccagatattcacctgagccaagaayaatctccattctctcttacgacaaacattgtaaatattaagtcatgtctgcgcactgggg

SEQ ID NO: 8276 - DNA, 121 bp, Artificial Sequence
  Description of Artificial Sequence: Synthetic probe
ctgggctatcatcattttgcctctgttgtctaactcatttccatttttacaccctgtcgtwatggttggaattttccgcaattgtattaaggaaaataataattttaaggtggggagccat

SEQ ID NO: 8277 - DNA, 121 bp, Artificial Sequence
  Description of Artificial Sequence: Synthetic probe
ataccaagaagctatgtctgttgcgacgcagtgggagaaccaggttaaagattgtctgaarcaaaatgaagagctccgtctccacttggagaagctaagaagtgagcaagctagcctgttg

SEQ ID NO: 8278 - DNA, 121 bp, Artificial Sequence
  Description of Artificial Sequence: Synthetic probe
ctgataaaggaactcaggaatttgtttggcataccgtagatggcgtgaaaacgagtaacgrtctccatgcccagcaattccgttgagttattcaacctttatactgtggattttctgctgg

SEQ ID NO: 8279 - DNA, 121 bp, Artificial Sequence
  Description of Artificial Sequence: Synthetic probe
tcagtgcaagagagagggcttcgttcaaaggttaaaagacgaacaaggcgaaggatgcaayattcatggatttgtagatgtgaataaagtagctgggaattttcactttgcccctggaaaa

SEQ ID NO: 8280 - DNA, 121 bp, Artificial Sequence
  Description of Artificial Sequence: Synthetic probe
ggaccagtggtccgaagtaccttcggatgtagaatctttcagagaaggtaaacgatacttyagtagcgaggccgaggagatgagcgacgtcgacaactccaacgttctcgtcatggacaaa

SEQ ID NO: 8281 - DNA, 121 bp, Artificial Sequence
  Description of Artificial Sequence: Synthetic probe
ttatgaagcttctgaaggcttatgaagctgcactccagaagaaggcatagattgcctttgkagtggatgcgtatccttgctcagcgctctggaagatttcatttgggccatcatgcatgct

SEQ ID NO: 8282 - DNA, 121 bp, Artificial Sequence
  Description of Artificial Sequence: Synthetic probe
agggcagatttgtaacatggtttctccacttaaactcaaaactgattcgaacagcaaagcragcttaattcattttacagcttagttggctgcctgttcttcttcttgatgccagacttgg

SEQ ID NO: 8283 - DNA, 121 bp, Artificial Sequence
  Description of Artificial Sequence: Synthetic probe
ggttgcttgtcagtgcaattcagatatgcatattcgaaaggaagagcctagaagcagctgyctggtctccaacaatgataagtttgttcgcaggatttgccgttgcactatttgtgttcta

SEQ ID NO: 8284 - DNA, 121 bp, Artificial Sequence
  Description of Artificial Sequence: Synthetic probe
gcagaagcagggctctggtggcgtgtggggctggcttgtgggaacccctcctgatgattcygattcatgatagagcccggcttcttcctccccatactacatacaggcagcgattcatata

SEQ ID NO: 8285 - DNA, 202 bp, Artificial Sequence
  Description of Artificial Sequence: Synthetic probe
cctacactgtccttgctccagcagcactgaacttcttcgtgaactatgccgaaggagcggtggagtcgatatggtcaatagaccagtactttgagttcgtrctcgtgcttctgttcagcacagggttatcttttcaggtccctgtgatccagctcctgctggggcaagtcggactggtttccagcgaccaaatgctatcgat

SEQ ID NO: 8286 - DNA, 121 bp, Artificial Sequence
  Description of Artificial Sequence: Synthetic probe
tgcagctgatatgtggagcttgggctgcactgtattggaaatgctaacccgccaaataccrtatcctaatgtggagtggacaaatgctttctttatgattggaagaggagaacaacctccc

SEQ ID NO: 8287 - DNA, 121 bp, Artificial Sequence
  Description of Artificial Sequence: Synthetic probe
tatgttgattgatgaggtacatacacctgactccagcagatattggattgccaattcataygaggagagattcaaagctggccttgaacctgaaaatgttgacaaggagttcctgaggctg

SEQ ID NO: 8288 - DNA, 121 bp, Artificial Sequence
  Description of Artificial Sequence: Synthetic probe
tgaggctaagaaggatgataacagggaggcatcgcctgaatgctcgatttgcctcgatggyttctacgacggagatgagctgataaggctgcgctgcgggcacaggttccactcaacttgc

SEQ ID NO: 8289 - DNA, 121 bp, Artificial Sequence
  Description of Artificial Sequence: Synthetic probe
tggcaaaggggctgccatgcctaccagcgatgacacgcttgaacagctggaagctttgaakaagcgcttcatggagctcaccgcaggctatggggtgccgcagctcgagaggctctactcc

SEQ ID NO: 8290 - DNA, 121 bp, Artificial Sequence
  Description of Artificial Sequence: Synthetic probe
cttctttgcccattaacgttggcgctgtcagtgctcttggcctggcatatctacctcatawtacagaacaaaactacaattgagtaccatgaaggagttagagcaatgtggttggcggaaa

SEQ ID NO: 8291 - DNA, 121 bp, Artificial Sequence
  Description of Artificial Sequence: Synthetic probe
tcatttccaaaggagtgtggcgaattacaaagctgcgatggaggtgcttgagttgatcggyttctgcgaggatgtcgtgtcggatgagattggtcgtgcagagacatacctggtattgaaa

SEQ ID NO: 8292 - DNA, 121 bp, Artificial Sequence
  Description of Artificial Sequence: Synthetic probe
aaatgaaactgctgttgcttcaggaaaaaaattggctggtggactagacttgctcaccctkgacagcctatacgatgacgcgaaccgacgagcgagccagcccrcgagctacaacccctgg

SEQ ID NO: 8293 - DNA, 121 bp, Artificial Sequence
  Description of Artificial Sequence: Synthetic probe
gatacgaccggcgctggtgacaccttcacctcagcttttgctgtagctctggtcgaagggragcctaagaaagagtgcatgagatttgctgctgctgccgcctcactgtgtgttcgagtaa

SEQ ID NO: 8294 - DNA, 121 bp, Artificial Sequence
  Description of Artificial Sequence: Synthetic probe
cgatcacatccttttcatcgtaaaccgggaaagagctggagtgcagtttgatttgctgtaygatggcattttccagcgctgcagaaagcatgcatttaggaagagccccccaaccgtgcca

SEQ ID NO: 8295 - DNA, 121 bp, Artificial Sequence
  Description of Artificial Sequence: Synthetic probe
ggcggcgcaggtgctctcgagcctgctgtcgcatcacccgaaccgcgtcatcttcatccargacggcgacaatctggacaggctgctgcagctgctcgatccttccgagggcaagctgatg

SEQ ID NO: 8296 - DNA, 121 bp, Artificial Sequence
  Description of Artificial Sequence: Synthetic probe
tgtacggcgcctgtatatgtagttaggtagagtgtctgttttggtcattcgtttggtcgayctgtacctgtgctagctagcttagcttagcgtagctcgaccgtcctctctatcttccata

SEQ ID NO: 8297 - DNA, 121 bp, Artificial Sequence
  Description of Artificial Sequence: Synthetic probe
ctgagaccgcagcgtcgagacccctttcaccatatgcaaattacccggatctcaaaccacyatccagccctaccccacccgctgcagacggtaagaccgaggccaaggctgaggccgcagc

SEQ ID NO: 8298 - DNA, 121 bp, Artificial Sequence
  Description of Artificial Sequence: Synthetic probe
cttgtaccagtgcttctaagggaaaataagaaatgaaagaatggttgatattgtcatagayggtagggccagaaggcatcaagttctgtttcaatcatgtagggcctttgtgtcaccattg

SEQ ID NO: 8299 - DNA, 121 bp, Artificial Sequence
  Description of Artificial Sequence: Synthetic probe
cgtgcgtcttgctggacggattgaatcggggcttgccgaagctaggcatagggaggactgytaaaagtggcgctggagctgatggtaacggtgagcgacaaggcaaacgtccaggagagga

SEQ ID NO: 8300 - DNA, 202 bp, Artificial Sequence
  Description of Artificial Sequence: Synthetic probe
cccctctgttcgtatgttgtctcgtgttcgctgtgtgtacaaatgtgcatgtcaggaagaccaatcatctcgtccgcagtagagttgggcatcggtagttygataaagcagcgatcgaggactgtgtcaaactgtaattattaattccaatttgctaactattctgttcatgttctcgaataatcttgttcggctaagtact

SEQ ID NO: 8301 - DNA, 121 bp, Artificial Sequence
  Description of Artificial Sequence: Synthetic probe
agtgcccaacccagcaatagccttgcagaatcaggtgttagtagtcctgttgtgaggaacytacctactgttgaagaactgcgtgcagcaagtccttctgcgagtgacttaacgactggtg

SEQ ID NO: 8302 - DNA, 121 bp, Artificial Sequence
  Description of Artificial Sequence: Synthetic probe
atggaggtgctcctcggataatcaatggatgccttagaacgtatgtgaaagatcacatcarcaatggcactagccagcctgctgaatcaaaacaatgaagtatccgttaatatgtatcaca

SEQ ID NO: 8303 - DNA, 121 bp, Artificial Sequence
  Description of Artificial Sequence: Synthetic probe
tgccaacaattctcgagtttgcttaacctatgacgagtttgtgaagaagtgttctgacccyaagaagttaactgtgagcgacatattcgcccttcaacttatgcaggtaccacaggtgaca

SEQ ID NO: 8304 - DNA, 121 bp, Artificial Sequence
  Description of Artificial Sequence: Synthetic probe
acgactacccatacacggcgaaggatgacgcatgcgacaccatgaagctggcgcatcacgyggcctccatctcgggtttccagcgggtggcgactcggagcgaggcatcgctgaccaatgc

SEQ ID NO: 8305 - DNA, 202 bp, Artificial Sequence
  Description of Artificial Sequence: Synthetic probe
cgtcattggttggtcgctatctgctcgagcaccagcatgttaccgctgctaaggaagcacctcacgaggagctgtagatgatgcccttcttgagtgaaackggttaaacgttaactgcaatcgataaagaaaagaggttgtgcgcctagtcaaatcctggcttgcttgatgaacatctctgtacctccaggtgattatgcaa

SEQ ID NO: 8306 - DNA, 121 bp, Artificial Sequence
  Description of Artificial Sequence: Synthetic probe
acctccttgcctccttgaactcatcagcatttgtcactttgaggtcatttcattattcacytgttgattccccaaatggccaatgcctcatgttctgcgtcggttctttcgtcctttggag

SEQ ID NO: 8307 - DNA, 202 bp, Artificial Sequence
  Description of Artificial Sequence: Synthetic probe
aactgagcattgccaccagtgaagttgtccagaaggctaaggatgggatcaccccgagcagcagtagcagtgacctcgtggagcaatgtgttcagtgcccrgcaagattttccactgtgggggccctaatcgagcatgttgagaaatcccatgggaacaactcacaattgagccgtggcaaagtgacaatcgatgcttgtcc

SEQ ID NO: 8308 - DNA, 121 bp, Artificial Sequence
  Description of Artificial Sequence: Synthetic probe
ggagagtctgtgcaatcaaatgtatcacctcaaccaaaatcttcaaagaaatctgctgtamgggcaaaggttcctttcgagaagggctatagtccaatggactggcttaagctaactcgta

SEQ ID NO: 8309 - DNA, 121 bp, Artificial Sequence
  Description of Artificial Sequence: Synthetic probe
agttggcatcagttgtatctgtgcttggtggagcatctacatcatatacagaagtcacctsagttcgaaaactgtatgatgcaaagcgagctcccatgtgaaatgtgtgggactgattgag

SEQ ID NO: 8310 - DNA, 121 bp, Artificial Sequence
  Description of Artificial Sequence: Synthetic probe
ctccatcaacaagatgaaggtgcaggtctactgggacgcgcacgactggctcttcggcacygggatgaggcaggcrctgttcatcttcaagcccgaggcgccgccgtccttgttgtcgtcg

SEQ ID NO: 8311 - DNA, 121 bp, Artificial Sequence
  Description of Artificial Sequence: Synthetic probe
cccctgtggaaccttctcaaggattgcttcaatcgccaagaacagacccatgtcttcggcrgaagcctgcaatgatattatggcatactccctgattttgtcttgttgctgttacacttgc

SEQ ID NO: 8312 - DNA, 121 bp, Artificial Sequence
  Description of Artificial Sequence: Synthetic probe
cgtcgcgcgcgaggccgacggctccgtcaagttcggccagggcgagggctccgcctacctmttcgacccggacatctacacggacggcaggatctcggtgcagggcatcgacgccgtgctg

SEQ ID NO: 8313 - DNA, 121 bp, Artificial Sequence
  Description of Artificial Sequence: Synthetic probe
tatacaagacttgtggactagctaggcggcttctccatgccgcggatattacatggaggtmcgagctgagaagaacatcctgctacttacagtcgagcgaagtactacttacagttcatcg

SEQ ID NO: 8314 - DNA, 121 bp, Artificial Sequence
  Description of Artificial Sequence: Synthetic probe
cgggatggagaatccaacaagtactcgagatattaaaaactctctccataacaagatgctrttgtggcatggttcaaggttgacaaattttattggaattcttagccaaggactaagaata

SEQ ID NO: 8315 - DNA, 121 bp, Artificial Sequence
  Description of Artificial Sequence: Synthetic probe
gctcccgcccagtgccagttttgtgaagctgtcggacatgggctccgaggagtggaatgcrttcctcgacaagttccaggagcttctcccgagcgctttccaggcacggaagcacgctgct

SEQ ID NO: 8316 - DNA, 121 bp, Artificial Sequence
  Description of Artificial Sequence: Synthetic probe
cctgcctgcgtactctcttccctcatggttgcacccctttattcttttcttcatgtaatgyagatgctgccctggaacaacaataagaaatggcccattgatggtcatagcatgtacctag

SEQ ID NO: 8317 - DNA, 121 bp, Artificial Sequence
  Description of Artificial Sequence: Synthetic probe
agagtgtgagaagatggaggctgaagcatgaactttgcctgatttgtcaggtcctttgctrgaataaataaggcggcatggaaactattgctagacttgcacacgtttcttttttctcata

SEQ ID NO: 8318 - DNA, 121 bp, Artificial Sequence
  Description of Artificial Sequence: Synthetic probe
actgagcttcgcgccgcagcagtccactcgacggtccagtaatagttggagatatggacgytcttctctggactgatccatttgcacattacaagatgcaaatgaacaagacaggctcccc

SEQ ID NO: 8319 - DNA, 202 bp, Artificial Sequence
  Description of Artificial Sequence: Synthetic probe
taagccttgctagaggccttgattactatactggtgtgatatatgaagctgtgttcaagggcgctacccaggtcggatctattgcggctggtggcaggtaygacaaacttgtcggtatgttcagcaacaagcaagtccctgctgtaggcgtcagccttggaatagaaagagtatttgcaatcatggagcaacaggagaaaga

SEQ ID NO: 8320 - DNA, 121 bp, Artificial Sequence
  Description of Artificial Sequence: Synthetic probe
ctgcagtggttgtatgcttttcagcagatccaccccctcaaattgagatcccaagattccrggtacgaagaagtatttcaatggaagggttgcatatgctaaagggtgctcttgacagtaa

SEQ ID NO: 8321 - DNA, 121 bp, Artificial Sequence
  Description of Artificial Sequence: Synthetic probe
tgagaacatatcctaacatggagaattctgcgatccacccttgaaactggcgtccaggaaktgagataggaagtcatcaggtgacaatggaaacggcctacgcctctccagggtagcaatg

SEQ ID NO: 8322 - DNA, 121 bp, Artificial Sequence
  Description of Artificial Sequence: Synthetic probe
ggccatgaaattgttttcccatgataagatatattttggaaagctggtgaagtgtgcaacrttatcattaagttcagctggtgggagtgattatggagcttcagtctcttctgctattgtc

SEQ ID NO: 8323 - DNA, 121 bp, Artificial Sequence
  Description of Artificial Sequence: Synthetic probe
tgagataaagttcgacaaatcagggggatggaattcagaggcagaggatgaaagcgatgcygagatacagtccctggaaaggccacctcctcgaaaagaacactaccgaggaaatggtcat

SEQ ID NO: 8324 - DNA, 121 bp, Artificial Sequence
  Description of Artificial Sequence: Synthetic probe
agataaagttttcactggtggcctggacaacgacgtcaagtggtgggatcttcgcaagaaygaagtcacggaaaatctcaaaggacatcaggacatgataactggaatgcagctcagtcct

SEQ ID NO: 8325 - DNA, 121 bp, Artificial Sequence
  Description of Artificial Sequence: Synthetic probe
ctgcagtttttgcttccgctacatcagcgacttcgccttcaagatgcaagcctacagccaygtggatcggatcaagttcaagtacttcttgaaccctgaaaggatccaggatgtgatatgc

SEQ ID NO: 8326 - DNA, 202 bp, Artificial Sequence
  Description of Artificial Sequence: Synthetic probe
ttggtgtcatcttgtgggaactagcaacacttagaatgccatggggtgggatgaatccgatgcaagttgtgggagckgttggcttccaggaccgaaggctkgacattccaaaggaagtcgaccctctagttgcaaggattatatgggagtgctggcagaaggatccaaatctgcgcccttcttttgcacagctaacgactgc

SEQ ID NO: 8327 - DNA, 121 bp, Artificial Sequence
  Description of Artificial Sequence: Synthetic probe
actacaaggccttcctgtccaaagaggtgatcgagacggcattcagagcccccagcaaccrtggccctcgtggggatgccgcctcacgcccgaaccctgttcctgcagccaaaggaggccc

SEQ ID NO: 8328 - DNA, 121 bp, Artificial Sequence
  Description of Artificial Sequence: Synthetic probe
cataccatgacatatgctgaaacacagaaagtaccctcaaccattagttggtgcttacccrtgagtggtcgttgtgatgcttccgacccctttgcaccattgcttgatcatgtgcatatta

SEQ ID NO: 8329 - DNA, 121 bp, Artificial Sequence
  Description of Artificial Sequence: Synthetic probe
atataattttgtgagcgctaaagattttgtcctggtggcatctccatataattttgtggcmtcacggatgtttgacagctggaacagaaggaaaaaaggtcaggaacaagctgcaatcact

SEQ ID NO: 8330 - DNA, 202 bp, Artificial Sequence
  Description of Artificial Sequence: Synthetic probe
ctcctggagatggaagcatattcagggaggatgatgaattgatgccacaatggtttagtgaagcaatgtctggtcctatgttaagctccggaatgtgcacygaagtgttccagttcgatacatctccggcctccgttgatgcaagtggcattgtgcctgtctactccagtggtattcccaatgcaacacataacttaacaga

SEQ ID NO: 8331 - DNA, 121 bp, Artificial Sequence
  Description of Artificial Sequence: Synthetic probe
aacaggagcatcggagcagcctcaggggagcgaggcgatggacgacatggtagggagcgcrgggtacaacttccctggcagcacgtccgacggcatcccgaatctcgacatgaaagtcgat

SEQ ID NO: 8332 - DNA, 121 bp, Artificial Sequence
  Description of Artificial Sequence: Synthetic probe
ttggagatcaaatccagaacaagatgcggtgctcgatgctgcttgtgcttcgatcctctayctatccaggacatctctgtcattgtgttctactgttgccatgcatatcaccagtcttgcc

SEQ ID NO: 8333 - DNA, 121 bp, Artificial Sequence
  Description of Artificial Sequence: Synthetic probe
acaatccagaagcggaacaacattctcccccaactctgatgtcaggaacagctctagccgrcaagaatgtagcactaggtcttcgccacttggctcatcatcgagaagcgcaagcaatagg

SEQ ID NO: 8334 - DNA, 121 bp, Artificial Sequence
  Description of Artificial Sequence: Synthetic probe
caaattagacggaacccaaatcataatgttcgccaccacggtaataattaatccccttcamctttgggggatcaccttttgtgggggtggactttgaagggttcccaacacaggctgtggg

SEQ ID NO: 8335 - DNA, 121 bp, Artificial Sequence
  Description of Artificial Sequence: Synthetic probe
gaattttgatgcttttgaccggctatcagtaaaagactgctactttgctccagaataggcragaccatgtgctcaagtcagttccagatgcactttgactgtttgacagctgccggtagat

SEQ ID NO: 8336 - DNA, 121 bp, Artificial Sequence
  Description of Artificial Sequence: Synthetic probe
ttctgtctcactattttccttttgtctattattatatatgaccttgattattccttagtgrgtaggcttaagttggagagctgcagtttttttgtcaagcctctgtaagttttaatgttcg

SEQ ID NO: 8337 - DNA, 121 bp, Artificial Sequence
  Description of Artificial Sequence: Synthetic probe
ttttgcagataagtgcagatctatttgcaagtttcgcgcatttggactgaagagggacttyatgattgcgaatatatcaacatatgcwaccatttaggtcatatttggaacgctggagttt

SEQ ID NO: 8338 - DNA, 121 bp, Artificial Sequence
  Description of Artificial Sequence: Synthetic probe
ggtagttatcttctgaactcattggagaatttcctcaaacaagcgagtgaagcattcggtratgatatttcatatgatggtgattgcccagggcccttcttcagccgttgttatcacagag

SEQ ID NO: 8339 - DNA, 121 bp, Artificial Sequence
  Description of Artificial Sequence: Synthetic probe
acttcccggccacaatggagaggtatggcaactggaatgggacatgggtggcatgacgctsgcatcgacgggaggtgatggcatggtgaagctatggcaggctaacttaaatggagtttgg

SEQ ID NO: 8340 - DNA, 121 bp, Artificial Sequence
  Description of Artificial Sequence: Synthetic probe
tgacactgatgacgtgaaagatctgaagccactgagtgatcgtattctcattaaggttgcrgagtctgaagaggaaactgctggtggtttgttactgacacaggcgacgaaagagaagcct

SEQ ID NO: 8341 - DNA, 121 bp, Artificial Sequence
  Description of Artificial Sequence: Synthetic probe
gactaacttctttcgcagcaacgcgcgggcattttactaggaactctacaaaaataaaatkgaaggaacgattccgtcagaacttggtgatttgaagaacctaattagcttggacttgtac

SEQ ID NO: 8342 - DNA, 121 bp, Artificial Sequence
  Description of Artificial Sequence: Synthetic probe
cttcccagggctgggttcgccgattactcatgtggatgtgacttatgatggcaagtggatmctggggacaaccgattcttacctgattcttatatgcaccattttcattgacaaggatggg

SEQ ID NO: 8343 - DNA, 121 bp, Artificial Sequence
  Description of Artificial Sequence: Synthetic probe
tgtcactgaagagccacatgatgagcacgagcatgaacatgaacatgaccatggacatgarcatcaccatgaccacggccacgatcaccatcaccatcatcatgatcatgaacacaaacat

SEQ ID NO: 8344 - DNA, 121 bp, Artificial Sequence
  Description of Artificial Sequence: Synthetic probe
gtacatatgtcgacttgaacacagcacacagctctgctaggttttcagcaaactttaggasagccggtttacatttgattgccgtagtgccgatgtaacattgtatatgcaggcagccttt

SEQ ID NO: 8345 - DNA, 121 bp, Artificial Sequence
  Description of Artificial Sequence: Synthetic probe
atgaacctgttcgagcatttcgcctccgttgcccagcgcctcggggtgtacactgcacggrattacactgacattgtggagttcctagtcaagcggtggaagctggagacgctggagggcg

SEQ ID NO: 8346 - DNA, 121 bp, Artificial Sequence
  Description of Artificial Sequence: Synthetic probe
gccctccagcaggattagatttagatgcatcattgtggtactgatcctgccagtgtacttsaaccaactccatatggtgcgcgtcattcttgagagattaggtataggaacagcactcagc

SEQ ID NO: 8347 - DNA, 121 bp, Artificial Sequence
  Description of Artificial Sequence: Synthetic probe
aaatagccgcgttctgtggaagatgagatttgagttgaggatatgataacgtgtcgtgccstttctttccggggcttcagggtgtagttccctaaacaaatttgctttaattttcaatgca

SEQ ID NO: 8348 - DNA, 121 bp, Artificial Sequence
  Description of Artificial Sequence: Synthetic probe
tgacaacacttccactgcagttcctcagattcaacgkcggggacccctgagtaggagctcrgtgaaggatattcagtacctacagctcagtactccacttcctcggctgcaaatgctagat

SEQ ID NO: 8349 - DNA, 121 bp, Artificial Sequence
  Description of Artificial Sequence: Synthetic probe
ggcatttcgtagaatctctggtcctcagagaagcagcccaccagtcgactctgcggagccraagcgctcttcttcggcacggcactcatctaacccgaagaactaygagtctgccctcaaa

SEQ ID NO: 8350 - DNA, 121 bp, Artificial Sequence
  Description of Artificial Sequence: Synthetic probe
gaggttgcgtgtttaccatgatttgtgtgaaccagtagaggaattctacagagcacgtggyaaactcttggagttcaatttaccaggaggaatacccgaatcatggccgaagctactgcag

SEQ ID NO: 8351 - DNA, 121 bp, Artificial Sequence
  Description of Artificial Sequence: Synthetic probe
acaagcacctggaggcaagctgcccgtcggtgctggctgaccttctcaagtcaagtctgcrcatgggaggaagaactgatgcataattaggtgctacttgaggtctaagacatgatcgatc

SEQ ID NO: 8352 - DNA, 121 bp, Artificial Sequence
  Description of Artificial Sequence: Synthetic probe
aagtacgagtctactgcgaggagctggacccagaagtacgccatgggttaacattcttcarcatgaagaatttggtgcacttttcagagatcctactgtatcacctaggattctcatgtga

SEQ ID NO: 8353 - DNA, 121 bp, Artificial Sequence
  Description of Artificial Sequence: Synthetic probe
tcatatatatccaataaaagcggggaagtgccgcaatggatatactagatagaataaagcwggggagcaggaaatatgtatacctgagagtaaggctctctataagttcttactgagagaa

SEQ ID NO: 8354 - DNA, 121 bp, Artificial Sequence
  Description of Artificial Sequence: Synthetic probe
tccatacttccgatcagaaaaagtaccacaagaaaagggacttgttgaaaaggttgttggmcgcacattagattcttctgtcctagaaagccctcaccacgtcttcctcgaggcttatgca

SEQ ID NO: 8355 - DNA, 121 bp, Artificial Sequence
  Description of Artificial Sequence: Synthetic probe
acaagagattgtgtcaaaaatagaggaagcatgcgggcctcttggtttcaatgtgcggaarcaaaattataagatgaatttgaaaggtgacaagactggaagaaaaggccatttatctgta

SEQ ID NO: 8356 - DNA, 121 bp, Artificial Sequence
  Description of Artificial Sequence: Synthetic probe
tcaactcagctttgtcaggacatagttctgagtgaatgagttctcatgccacctaagtggrcatacatgtattggcatcgcagctggtgacgctttcttagagtaatttgagtggatcgct

SEQ ID NO: 8357 - DNA, 202 bp, Artificial Sequence
  Description of Artificial Sequence: Synthetic probe
ctgaagttcttgattttgtcaaggatctctcccatttagaacctgcctcaaagatccaaytgaaagagttggcwgaagaaatgcaagcaataactaagggmctggaaaaagttgagcaggaattggcaacatctgaaaaggatggcccagagtctgagacgttttacaagaaattgaaggaatttcttgctgatgcccaagc

SEQ ID NO: 8358 - DNA, 121 bp, Artificial Sequence
  Description of Artificial Sequence: Synthetic probe
atcaggaagttccattcggaaacaccgccatggcaagctgaaaagtgtgattatcaatggytttcgcccttggaagaccatgattgagctaacgaggtgtattcttgattatgcgacgtca

SEQ ID NO: 8359 - DNA, 121 bp, Artificial Sequence
  Description of Artificial Sequence: Synthetic probe
tgctttagcttcaatggagtggcaggcatcgcaatttctttattgacatggtttaagactrttaaataatcgttgcatttgttctggagaagtttttgctagcatggcaaactagatgaag

SEQ ID NO: 8360 - DNA, 121 bp, Artificial Sequence
  Description of Artificial Sequence: Synthetic probe
tgacattgtcgccgagacgtctgacatggtgtcttcaggtgattcttgaggagattttggmttttgggaggtgatacaaaaggtctttctacttgctgctcatggccggagaaatctttgt

SEQ ID NO: 8361 - DNA, 121 bp, Artificial Sequence
  Description of Artificial Sequence: Synthetic probe
atgacgatgaggctgaatttgatgatatggatgatttcgacgacgagggctcagaatctgscatgtatgatgatgtattcgatatctgaaggagttgtgaccaggactctcggttttcact

SEQ ID NO: 8362 - DNA, 121 bp, Artificial Sequence
  Description of Artificial Sequence: Synthetic probe
catgacactattctacatcttctacagtatgccgaaggatgttgctcagttgtatgctgcraatgaactatataacaaagggtggctttaccacagagagtaccgtgtgtggctcacaaga

SEQ ID NO: 8363 - DNA, 121 bp, Artificial Sequence
  Description of Artificial Sequence: Synthetic probe
agccagcttcatcatgatcacacaggcgtctgaatcccatcactcatggaaaagagacatmtcatgtagaagtgtttgttaccctctcaccagaatgctcaggatgtgagtttcgttgaat

SEQ ID NO: 8364 - DNA, 121 bp, Artificial Sequence
  Description of Artificial Sequence: Synthetic probe
ttcattattggtttcatggggggcactgtaactgaagtgaacttgcagcctatgcttgccygaagattgaccatacaagttgctggactgcggggcagaaaccttgctaacaaagctcgga

SEQ ID NO: 8365 - DNA, 121 bp, Artificial Sequence
  Description of Artificial Sequence: Synthetic probe
gaccagcgccgtgtgcacccggtctccgtccttgctgccggcttccacggcatctctgacrgccacgaggtgttcctcagcctgcccgcacgcctcggccgcgggggtgtcctgggagtcg

SEQ ID NO: 8366 - DNA, 121 bp, Artificial Sequence
  Description of Artificial Sequence: Synthetic probe
aaggggcagtgcgcgagcttcgtaaagataattatttcctgtctgctgtgaaagagaaggrtaggataaaacaagagcaagaaagggctgaaaagtatggaaaggcaatggcttttcttca

SEQ ID NO: 8367 - DNA, 121 bp, Artificial Sequence
  Description of Artificial Sequence: Synthetic probe
cacatctccatctgcagttatgttcaggtcggcagttataaatgcaggatatcagatctcragcagtcacgttaatccgcttgggctgaagtctgatgccccttgggatgttatttgggac

SEQ ID NO: 8368 - DNA, 121 bp, Artificial Sequence
  Description of Artificial Sequence: Synthetic probe
aggaacagcaggggcttcaaggtttaagctgcagtgttttcggcacccttttgtcgtattkctcttgttagttaatcatcatcatcatcatcacctctttgggttaccagaatcgtactgt

SEQ ID NO: 8369 - DNA, 121 bp, Artificial Sequence
  Description of Artificial Sequence: Synthetic probe
gttcttctgcgcaaaggagaagctggaccagctgatcgagatgtgcaaggcgttcccttckatcacatacatcgccgtgagcaaagaaggggagacgttctcgaacctccccgcaaacgcc

SEQ ID NO: 8370 - DNA, 121 bp, Artificial Sequence
  Description of Artificial Sequence: Synthetic probe
ttctcagacaaagcgacatgcaaagagtacaaacaatgatgtgtctattgatggaaggacragtataaatcctaatgctgtaagcaaccctgttcagagttttcccatgagtccacaagca

SEQ ID NO: 8371 - DNA, 121 bp, Artificial Sequence
  Description of Artificial Sequence: Synthetic probe
gcgctggctacaatcagatgggggctggttatggcgggcagcagccatatggtgggtacakgtgagattacacgttggcggattacacakcagmkgatttgagaaacagtttagcaggcgw

SEQ ID NO: 8372 - DNA, 121 bp, Artificial Sequence
  Description of Artificial Sequence: Synthetic probe
ggaagaaaatattgttttaagctcggagaaacttcagaagctaggttggagcttcagcccygtaggaaagactctgggggacagcgtcgaatcctacaaggcatctggcgtcctgaactga

SEQ ID NO: 8373 - DNA, 121 bp, Artificial Sequence
  Description of Artificial Sequence: Synthetic probe
ctaccacttcatccagcatacttacatgcatattctccgtatcgttcaaatttcattccasaaggactactacctacatatatactcgctatgaaaataaagaattaaacaacaattccgt

SEQ ID NO: 8374 - DNA, 121 bp, Artificial Sequence
  Description of Artificial Sequence: Synthetic probe
catcaacgcgacaaatgcaggttcagtgatggagcttggcatcccgaatctcaaaggcgtygccgtggtctctgctctctttgatcgtgagcatgtcatggcggagactaggaacctcaga

SEQ ID NO: 8375 - DNA, 121 bp, Artificial Sequence
  Description of Artificial Sequence: Synthetic probe
aaggttgagctcctaaaagataagtttggattygatgcagcttttaattacaaagaggagyctgacttaactgcagccttgaaaaggtactttcctgaaggtatcgacatctactttgaga

SEQ ID NO: 8376 - DNA, 121 bp, Artificial Sequence
  Description of Artificial Sequence: Synthetic probe
tggcgtggatgactgcttctcgcttgaccactctttccaccaagagctctaccattacatygagcagcaggcgttgcagcaggagctggtcaagcagggttctttgcatgtagacatcccc

SEQ ID NO: 8377 - DNA, 121 bp, Artificial Sequence
  Description of Artificial Sequence: Synthetic probe
tgtccgtgaggcagcctgcagcaaacgatgaggaggagctgatcgcgtacgagggtcccgrcttcaatgacctcgacgagaatctgcagagggcgttccacaagtaccttgagctgcgcgg

SEQ ID NO: 8378 - DNA, 121 bp, Artificial Sequence
  Description of Artificial Sequence: Synthetic probe
ggtttcatttggtgcatgagttgagatgtctttactacagctttctttatgctagagaaarttgtggtaatatagttttgtcctagaagtcgtgctgaatgtaggaactgaaatggaaaac

SEQ ID NO: 8379 - DNA, 121 bp, Artificial Sequence
  Description of Artificial Sequence: Synthetic probe
agtttaccagagaggagctagaactgacccggcaacaagtgagtatcttccatcagtttayccagacgacccagaaggattgcaatttgtgctgcagtacctgacagaatcctatgggggc

SEQ ID NO: 8380 - DNA, 121 bp, Artificial Sequence
  Description of Artificial Sequence: Synthetic probe
tatttctaggctaacacagcatttcactgacacttatagatcagttgcatatgtcattgartattggtatgaaggaagattgtaatctagaagattcaggtcgagtgtttggttataccga

SEQ ID NO: 8381 - DNA, 202 bp, Artificial Sequence
  Description of Artificial Sequence: Synthetic probe
acgactgaaggctgaactcagtgcggaattaggtagaaaaccatgagccccaacaaggatcttgacgaccatgaatgattggattgcccgatcaccactasaatccttcaaacgagccagtttttgtccgcagggagatcaacctgcatttccgatggaagttttgctgaaattgtacttggtaggtctgaaccgttgcaar

SEQ ID NO: 8382 - DNA, 121 bp, Artificial Sequence
  Description of Artificial Sequence: Synthetic probe
ctctcaaatttgctgccggagacatatgatgatgttgaagctgttagactgacagctaatrgcgcaggttctgctttacattcgtctggccaagcacaagaaaacagtatggaatcagcag

SEQ ID NO: 8383 - DNA, 121 bp, Artificial Sequence
  Description of Artificial Sequence: Synthetic probe
gtaccagaacacatgatacggaaagctagttcatcagctcagaaatactttagacgagggrcacgtctgaattggcccgaaggtgctgttacaagggaaagcatcagagcagtcagaaaac

SEQ ID NO: 8384 - DNA, 202 bp, Artificial Sequence
  Description of Artificial Sequence: Synthetic probe
tctggtttggaattctgctcgatgtaaaaaagaagagaataaactgtttgtcgctggatggaagtattatttggtgaaactaactgtactctggcctgaamtgaacaaattagggctactaacaaggtttggcgtccatcaacagcgctgatgaaatttgcatccgcgctgagaagatggctcccagaatttcaagacttrg

SEQ ID NO: 8385 - DNA, 121 bp, Artificial Sequence
  Description of Artificial Sequence: Synthetic probe
gctacctctcaaggaagtacctagatactaagtagtrttcacctgtggctttttgcccttstgctatgtgctctcctttcttcttcctcttaccacctaccttaatgataacaagttttgt

SEQ ID NO: 8386 - DNA, 121 bp, Artificial Sequence
  Description of Artificial Sequence: Synthetic probe
tggggtgtatggagcgacgcttgatgaggctgatacgattgttctccttgaaatggacaasgatggtcagctgattcaggataatatatcaacgaaaaccggaactagcacaacaacaacg

SEQ ID NO: 8387 - DNA, 121 bp, Artificial Sequence
  Description of Artificial Sequence: Synthetic probe
ccagtggatgggcatgaatgctcttatagtctatgtcctggcagcctgcgagctgttcccyacgctccttcagggtttctactggcggtcacctgagaacaacctggtggacgcgacggag

SEQ ID NO: 8388 - DNA, 121 bp, Artificial Sequence
  Description of Artificial Sequence: Synthetic probe
gcgctttcagggtgcgcctgcagctagttaccagtggacacttgttgcttggggatactcrgatacagtaagagcaccgagaaaagataacttggggatcatctgttactgcgtacataca

SEQ ID NO: 8389 - DNA, 121 bp, Artificial Sequence
  Description of Artificial Sequence: Synthetic probe
tcccacatatatactgtttgacaaggcgactgaaattgctcggttcccagaaattggaaaygcaacaaaagtattcgtgccaaaagttactaagaagcttctctgccagcactttgatctt

SEQ ID NO: 8390 - DNA, 121 bp, Artificial Sequence
  Description of Artificial Sequence: Synthetic probe
tacactctaagggcgacgacatggacgatggaggagagacagatcattcaaacataagaakccaacaggaggaaaggaggacgacgcggcccatgaagcccaaccgcaagtatgtcggacc

SEQ ID NO: 8391 - DNA, 121 bp, Artificial Sequence
  Description of Artificial Sequence: Synthetic probe
acatggcagaggagaacaataaaagcgctgcagccaactgtggtttgatttaatctgctgygttgtgatatttacaacgggccttctctaggaaggccaagtatggaggtgaggaaatcgg

SEQ ID NO: 8392 - DNA, 121 bp, Artificial Sequence
  Description of Artificial Sequence: Synthetic probe
ttgagtagtagttcaacattggcatggatgaacaactaggctctgccggtaaatttttgcstgtccagctttattaagccggcaagtcgggggcaggtatctgtgttatgcaccatcatta

SEQ ID NO: 8393 - DNA, 121 bp, Artificial Sequence
  Description of Artificial Sequence: Synthetic probe
tgacagactagatgaactcatctatgttgagagccacctaagcaacctctcaaccaagttytacggggaggtgacacagcaaatgctaaagcatgcagacttcccaggcagcaacaacgga

SEQ ID NO: 8394 - DNA, 121 bp, Artificial Sequence
  Description of Artificial Sequence: Synthetic probe
tgctgtaaattcaggaggatgaaatctattcttgtcaaagttctagaataatgcacagaayggtgctgtctcagtttacataacctggcatggtctcgtgggacctggaaccaagagcata

SEQ ID NO: 8395 - DNA, 121 bp, Artificial Sequence
  Description of Artificial Sequence: Synthetic probe
gaaagccacaaagagttcaacaaaggaaactaatactcctgtggataaggccaacaagaakgtttctaaaccaaaaaaggatgagaaagaaagccaaagcaatacttctggtgctgtgaac

SEQ ID NO: 8396 - DNA, 121 bp, Artificial Sequence
  Description of Artificial Sequence: Synthetic probe
cagctatgcctggtgtacttggacaaggagcaaaatggcgtgaaggagactggctatgcascagctgcaacaatcataattatgcatctcgtgcattttgcaacaggtgcaaatctcagaa

SEQ ID NO: 8397 - DNA, 121 bp, Artificial Sequence
  Description of Artificial Sequence: Synthetic probe
gctacgtcaccttcagctcttcgccaatcggctccgcagcaatgcacttgctgcaatcctygacaactgccaccacctcgagacccttgatttgcgtcagtgtttcaacatccagattgac

SEQ ID NO: 8398 - DNA, 121 bp, Artificial Sequence
  Description of Artificial Sequence: Synthetic probe
cctgccggatggtcattgtggaacaaccttgaggtcaacgtacctctaacatagaagtctygccgccgttgctgcactgtgtacaagacagaagcgtgataaactattgtaatggcgcaga

SEQ ID NO: 8399 - DNA, 121 bp, Artificial Sequence
  Description of Artificial Sequence: Synthetic probe
tccgctgctacggatgaacaagcatgatgaccagcaagcaaataggcagcactttatagtygagagagagggctgcctgaataaggtcgggtcacagctgaatttcactacagttttctca

SEQ ID NO: 8400 - DNA, 121 bp, Artificial Sequence
  Description of Artificial Sequence: Synthetic probe
cataacatagtgatagacatggaggaggatgcagccatggacgaggcacggatatcggacratcacgacgcaaactataggcagcaggtgtgccagttagctgatgagaaggctgtcaatg

SEQ ID NO: 8401 - DNA, 121 bp, Artificial Sequence
  Description of Artificial Sequence: Synthetic probe
aaccttatttataactacggccctacattttccgggaaaacttcgaaatccttcgagcagrtgtacctcttctcctaagactggagccgatgcttgcaactgcaagtattgtactgttgta

SEQ ID NO: 8402 - DNA, 121 bp, Artificial Sequence
  Description of Artificial Sequence: Synthetic probe
ttacattctggtctagagccttgaatcatctcgcaatgtgccgatggaatccactaatcgkctcagaaccatgcaattaagtgagtcagtgccagccatggtggttgataataaggtttgc

SEQ ID NO: 8403 - DNA, 202 bp, Artificial Sequence
  Description of Artificial Sequence: Synthetic probe
ttggaagacccggggacagcaataatygatgcatgcctttgatcgtcttgctgkctactacataaatctccatgtctgcttcttttatctgcaatccatgytgatgccgataaccaccgaacagctccaagtccaagagtctgcacggaggttaaatacttggccacagcttgcgaccgagtcttaacttacaaggcgtaca

SEQ ID NO: 8404 - DNA, 121 bp, Artificial Sequence
  Description of Artificial Sequence: Synthetic probe
tatgacggccggcgatctctcctggaggctcagcaagatacaaatttaactacaacaactmtcctggacgaaataaaagttcctaaatctgcaactgcgaagggtgaaattcattacattc

SEQ ID NO: 8405 - DNA, 121 bp, Artificial Sequence
  Description of Artificial Sequence: Synthetic probe
aacacgttcggctctgtctaattcgtctgagctaccactgtaaataaaaaggaagatcagkctgtcgtcatcttccatgtacatgcttcgtctctagtatgctgctgcaggattgctgtca

SEQ ID NO: 8406 - DNA, 121 bp, Artificial Sequence
  Description of Artificial Sequence: Synthetic probe
ttcaagagacatgcgagtgcttgtaaaagttaagaaggcacatcttggcattgttactacrttggccttctctcaagattcaaggaccgtgctgtctacttccttcgactcaactgcaagg

SEQ ID NO: 8407 - DNA, 121 bp, Artificial Sequence
  Description of Artificial Sequence: Synthetic probe
aacaaaatccatcctccaaatagtatggtgtttgattttggcagcgatgcttgttgggttygctgtatttggtttgacagtctctgcgatgggtctcgggctattactggctacaacataa

SEQ ID NO: 8408 - DNA, 121 bp, Artificial Sequence
  Description of Artificial Sequence: Synthetic probe
gagatgacataattgacaagttttcgtgattctggggccctgcacccaccatgtcagtgcktgccaacaggaagaaacaagaacgtgtttggctctggagaaggctggatgcattttaatc

SEQ ID NO: 8409 - DNA, 121 bp, Artificial Sequence
  Description of Artificial Sequence: Synthetic probe
ttacacatggttatgtttatgattcttaaattggcaatttatctctttgttcgaatcacaytcccaatccatgtttagccactctactttggtggtggcgcattgaaagcatatggttgaa

SEQ ID NO: 8410 - DNA, 202 bp, Artificial Sequence
  Description of Artificial Sequence: Synthetic probe
ccgacaaaggtggtatgcctgacccaggtggtttcagcagatgaactgagagatgatgaggagtacgaggacattttggaagacatgagggaagaagggcrcaaatatggtaacttggtcaaagctgtgatccctcgacctgaccccagcggcatggctgttccaggagttggaaaggtgtttttggaatatgcagatgttg

SEQ ID NO: 8411 - DNA, 202 bp, Artificial Sequence
  Description of Artificial Sequence: Synthetic probe
gctccatgttctggaccgttcctggcaagaagttccactccgccgggcagatcgccggcgtggctctcaacctggccttctgcttcgcccagatgcagtayttcctggtgatgctgtggcggctgaggagcgccgtcctcgcctactatgccatgtggatctggtcatgatcacatttggtttcagcccccaaaacccatgc

SEQ ID NO: 8412 - DNA, 121 bp, Artificial Sequence
  Description of Artificial Sequence: Synthetic probe
caaaactgcaaccagtgaaagtactcattaaacctacatagcctccgcgaaagacgtaggmaatgttcaacaacttgattcaacttgattcgaaagcagtacagttaaggcaacagcattt

SEQ ID NO: 8413 - DNA, 121 bp, Artificial Sequence
  Description of Artificial Sequence: Synthetic probe
tacctcgccggagacgcatacacgctcgccgacgccaaccacctcagctacatgttcatgmtcaccaagacgtccaaggcggaggagctcgtcgcctccaggccgcacgtcaaggcatggt

SEQ ID NO: 8414 - DNA, 121 bp, Artificial Sequence
  Description of Artificial Sequence: Synthetic probe
tcctgaggaaaaaggaacagatgagaaagagaggacgcgaggtgcccgctgacacgaaatrcacggggcggaagcggaagacccgcttctaattcggtagygggtggggtgcctatgcamc

SEQ ID NO: 8415 - DNA, 121 bp, Artificial Sequence
  Description of Artificial Sequence: Synthetic probe
tagttgcaagtttatgaagcccgtgggcggaaggtgctcttgtttgatgtaagaccgaagratgggagaacaagaagaaatttgaagtctctgtgtttgcatttgatgttgtgtgttgaac

SEQ ID NO: 8416 - DNA, 121 bp, Artificial Sequence
  Description of Artificial Sequence: Synthetic probe
taactaatgaatgggtgaatgttaaagatgttgcgatggcacatgtccttgcttatgaagycccatcagcaaaaggaaggtattgcatggctgagagagttgcgcgctattccgagcttgt

SEQ ID NO: 8417 - DNA, 121 bp, Artificial Sequence
  Description of Artificial Sequence: Synthetic probe
cgctgggcacttctccaaatcggggagatttgagaaattgcgagaagatgccttcacttaygtgttcatcctcaaggccctgggcatgactccaacaaaggcttcaggaaaggaagtggaa

SEQ ID NO: 8418 - DNA, 121 bp, Artificial Sequence
  Description of Artificial Sequence: Synthetic probe
gaaggaagtcttcatggggattacctggaattatgatgggggcagtcaataccactactascccatttaagctctcagtattcaacgactaaacagagatagactgcttcctaggtgtatt

SEQ ID NO: 8419 - DNA, 121 bp, Artificial Sequence
  Description of Artificial Sequence: Synthetic probe
gatggcaccatggacaggagcaaaggtgcaggtgccaaccaagttcattgtcggagacggygacctggcataccatcacccaggagtcaaaggctacatacacaagggagggctcaagaga

SEQ ID NO: 8420 - DNA, 121 bp, Artificial Sequence
  Description of Artificial Sequence: Synthetic probe
aacaactgacggcaacgctgaatacaaagtaggatcactggtgcagaatttggtgttttcrccactcgtgtgtaacattatctttgtgataattgtctgcataactgagcggagaaggctc

SEQ ID NO: 8421 - DNA, 121 bp, Artificial Sequence
  Description of Artificial Sequence: Synthetic probe
gctgagggagcaacacgtgagaaggatgctcaaaccgttaagctgagggccgagctggagragcttcacgtttccatgtcacagctccaaacatcctgtgatgaacttgataccaagcatt

SEQ ID NO: 8422 - DNA, 121 bp, Artificial Sequence
  Description of Artificial Sequence: Synthetic probe
gccccagccccccaccccggcgcccgcaccagcacccgcgcccgcgcccgccaagtccaaraagaagaagaagaaggccgccgacatcgccgaggagcccacctccgacgagaccaagaac

SEQ ID NO: 8423 - DNA, 121 bp, Artificial Sequence
  Description of Artificial Sequence: Synthetic probe
atttgatgggatgaagtatgatttaagaagggttgaggaggtattttatgatgtgaagatwcgtggacttgtgcctgtggagtcaaaacaagaggttgctcagycatgaaaggcygagtga

SEQ ID NO: 8424 - DNA, 121 bp, Artificial Sequence
  Description of Artificial Sequence: Synthetic probe
tagtgaaggtgcagacatcataaagcatattatcgaccatttcgttatctagtgaacagcmgatctctggaaagaaagcttgtgccagcacgcgcaagttgctaactgatgagtgagccaa

SEQ ID NO: 8425 - DNA, 121 bp, Artificial Sequence
  Description of Artificial Sequence: Synthetic probe
tttgactccatcgtccaggacaagctccgtggatcgggcctcactttctagaacaaacccygcagcttaatatttccagtaatgcacccaaataatgtactactagtagaagcacacgcga

SEQ ID NO: 8426 - DNA, 121 bp, Artificial Sequence
  Description of Artificial Sequence: Synthetic probe
gagcttccacatgttccgctgcgtggcacggtacgggtacaaggacgtccaccggaaggaygacgacttcgagaagatgctyttctgcagcctgctcgtcttcgtccggctggagagcatg

SEQ ID NO: 8427 - DNA, 121 bp, Artificial Sequence
  Description of Artificial Sequence: Synthetic probe
cccgtgatgtgctagctgttcccgcttcaactgtcgcctccgagtctgcgtttagcacatrtggaagagttattaccgatcatagaagtagcctggcacctgaaacggttgaagcactgat

SEQ ID NO: 8428 - DNA, 121 bp, Artificial Sequence
  Description of Artificial Sequence: Synthetic probe
tttgaagagggtttccgcgttggtcctttcagaccacatttgatcccggattacctgcaaracgggagagagtttggtcggttttcgacgccctgtgtactctaggccgagtttggttggc

SEQ ID NO: 8429 - DNA, 202 bp, Artificial Sequence
  Description of Artificial Sequence: Synthetic probe
cccagtgaaagagctgcaggaatattgtgatcgcagatcttacagtaagtcttacacaacaacccacaaagatggagtttcttcggtggttgcagcggtgsaggttgaagggactatctactcagcaactcaaaccggtggtgataagtctgtggctaagaagtatgcagcgaagttgctgctaaaggatctccaggatgca

SEQ ID NO: 8430 - DNA, 121 bp, Artificial Sequence
  Description of Artificial Sequence: Synthetic probe
agttccttttgttatccatttagttgttactggtcttcttccatcatgttgaacttatctwgttttcattctggtagatgtagtagtagcagagggtagcgaaatcgatggtcatggtttg

SEQ ID NO: 8431 - DNA, 202 bp, Artificial Sequence
  Description of Artificial Sequence: Synthetic probe
tgatgaagatttggctgtggagagcatatttgatgccttggaagttattgaaccagtaaaactgtttcagcagctactcgcagtaattctttctgtatgcytcctagcagctgaatcactagtaccagcaaacagcarcctgtcaaaattattctacgactgtaaagactacgttattrgcatttaccaagatgacatgtca

SEQ ID NO: 8432 - DNA, 100 bp, Artificial Sequence
  Description of Artificial Sequence: Synthetic probe
tgataacaattcttcagagagtggttgaagagtgcactgygtcacttgttgcttccaggattgaagctgaagaaagattaatcaatcaacgtttgcgtga

SEQ ID NO: 8433 - DNA, 121 bp, Artificial Sequence
  Description of Artificial Sequence: Synthetic probe
tagtcggcgcattgagaaaccctgcggcttgttcatacactgtcaagacgagaaagactgkaccaacaccatgagtgtcacacttgcagctgaaagatctaggaaggttgggccacaagct

SEQ ID NO: 8434 - DNA, 121 bp, Artificial Sequence
  Description of Artificial Sequence: Synthetic probe
acctataagtgctaaatttggcagtggagtggatgatatcaaggagtggatattatccaarctcccgctgggtcctgcgtactaccccaaggacatagctagtgaacaccccgagagattc

SEQ ID NO: 8435 - DNA, 121 bp, Artificial Sequence
  Description of Artificial Sequence: Synthetic probe
gagagccccgccaccgacgagccttctctataacaaaccaaccaaccggcattgtgatccwactacacctccgttccgttcgttccggaccaaaaaaattgcttagttctttgcacggatc

SEQ ID NO: 8436 - DNA, 121 bp, Artificial Sequence
  Description of Artificial Sequence: Synthetic probe
caaccttcagcttcttctcgccataccgacccgctctgttcatcgcgtgtggcgcaagttygatgacagattcatgcgcccaatgttcgggggacgaggcttcgtaccgtttgtgcctggt

SEQ ID NO: 8437 - DNA, 121 bp, Artificial Sequence
  Description of Artificial Sequence: Synthetic probe
gcttagaattaaacttccacatgagcttgttcacttaggtgctaaagcctcaactcttacrcactctgatatgttggtaattgcgaaaacaagatcctactatacaaatgccaactacttt

SEQ ID NO: 8438 - DNA, 121 bp, Artificial Sequence
  Description of Artificial Sequence: Synthetic probe
agttaaatgtttcagagccttgcagttggtgccatgctattgaacattagatttcaatggytgatcatgtaaaattacaatgtttgtcctgggttgtttcttaaatgcctagttttgtgtt

SEQ ID NO: 8439 - DNA, 121 bp, Artificial Sequence
  Description of Artificial Sequence: Synthetic probe
tagtgtcccaatatagtcgttaagctagatgctacttgttgcgtcatatggtttcataatratgtattacactgtattgctgtccaagaacaaattttgtttataagcagcgttagcttct

SEQ ID NO: 8440 - DNA, 121 bp, Artificial Sequence
  Description of Artificial Sequence: Synthetic probe
gttgtaacttaaatgaatattgagtatgtttcccttaggttgggaaaatggctgtagatcmcatttgtaactcgtaacgccatacagtatattgttgattgtttaactggcaataagatca

SEQ ID NO: 8441 - DNA, 178 bp, Artificial Sequence
  Description of Artificial Sequence: Synthetic probe
atcaacgtcatggtgtttttgttattggagcgacaaacaggattgatgttatagatgaggctgttctaaggcctggyagatttgggaagaaacattttgtccctttacctggtgccaacgagcgggctgctatattgaaagcacatgctagcaagaaacctgtctcccaagacgttga

SEQ ID NO: 8442 - DNA, 202 bp, Artificial Sequence
  Description of Artificial Sequence: Synthetic probe
tggctggaagctggatgcacgcaaggaattctgttctggagacgtgaaatttttgtcccgtgtttatatagcctctaggttgtggtttcagtggctggtgyatgtacagatcgcgtagtgaagttttggtaatccaattttgtggcgcagatggcgatccaaaccgtggcatattgtaggttggacagatgtagtggtaatt

SEQ ID NO: 8443 - DNA, 121 bp, Artificial Sequence
  Description of Artificial Sequence: Synthetic probe
gggcattttcgtcgactcctgctttatacactgtcagtcgttgaactcgttcacttggcaytctccatcttctcctagagtcaacaacaagaccatcgcagaagcagttggagattggttc

SEQ ID NO: 8444 - DNA, 121 bp, Artificial Sequence
  Description of Artificial Sequence: Synthetic probe
gttctagcgggtggatcggcatgcttgcctggtttgccagagaggctggagaaagagctgyacaaacttcttccygcatacatttcagaaggaatcagagttcttcctcctmcgtttggca

SEQ ID NO: 8445 - DNA, 121 bp, Artificial Sequence
  Description of Artificial Sequence: Synthetic probe
gcgcaaaattcagctgatccttgccaatcctggaccaacagtgatccaaaagctgcgagcrtcgaaattcactgagctcatcggtgacgacaagatattcctgtcggtcggcgaggctgtt

SEQ ID NO: 8446 - DNA, 121 bp, Artificial Sequence
  Description of Artificial Sequence: Synthetic probe
gtccgggatcgtggtgatactgaagaacgccacggtgaaggacggcaccatcgtgtagacygccgcatgcaccgggcagctgcccggggctgtcgacctgaatttcattcagacgaggaag

SEQ ID NO: 8447 - DNA, 121 bp, Artificial Sequence
  Description of Artificial Sequence: Synthetic probe
gctcctaactatcagcaaggtggtccagctggctaccaaggtggacctgctgggcatcagrgaggtaaccaagtttacccaggatccaacatgcctagcggccctggaccagcccacccag

SEQ ID NO: 8448 - DNA, 121 bp, Artificial Sequence
  Description of Artificial Sequence: Synthetic probe
gttcagcacatcaggattggatggtaagatcgtggtgtgggatcttgaaaaccacgtcacmattacacagtagctggtggatggactcgcggcgcctcatgacgtaaaccatttgttggca

SEQ ID NO: 8449 - DNA, 121 bp, Artificial Sequence
  Description of Artificial Sequence: Synthetic probe
ctgctgtcatcccaactgcttacaagcatggaaagagaataggagaaacggcagcatcgarttggctgcacatagttccctggggcatgttcaatctgatgaaacatgttaaagagaagta

SEQ ID NO: 8450 - DNA, 121 bp, Artificial Sequence
  Description of Artificial Sequence: Synthetic probe
tgaagccaaggcatttgcagagagagaatcactctatttcatggagacttctgcactggastccacaaacgtggaagatgctttttccgaggtcttgacccagatctaccgcatcgtgagc

SEQ ID NO: 8451 - DNA, 121 bp, Artificial Sequence
  Description of Artificial Sequence: Synthetic probe
atcgagtgaagaccgaactcgcccgacaacgcatatccgctttgtaaagcggcctttttgwcgcgaattaatcaagggattcctgttctgctgctacgtagtacagttcgtggtatgagga

SEQ ID NO: 8452 - DNA, 121 bp, Artificial Sequence
  Description of Artificial Sequence: Synthetic probe
tggagtctaagcacttcgtccgttctcctacatttgaagttggcggacataaatggtacaytggcatgtatccgcgtggtgacaagttcaccactgattccctctccctgtacttgtacct

SEQ ID NO: 8453 - DNA, 121 bp, Artificial Sequence
  Description of Artificial Sequence: Synthetic probe
accttttcttcagaagaatgatccctttatcgcggcacttaaaaaggaactatcggagcawactgctgatgtgcatgttcaaaatgacgtccttgatggcttgttcactttctatgatgca

SEQ ID NO: 8454 - DNA, 121 bp, Artificial Sequence
  Description of Artificial Sequence: Synthetic probe
agtctcatagatttttcatctcaccgcaacccatgtgctgtgatgtggtaatgcgaggatrttgtaactgagtggccttgacaaatttgtgcctagtctcaccacaatccatgcgctgtct

SEQ ID NO: 8455 - DNA, 121 bp, Artificial Sequence
  Description of Artificial Sequence: Synthetic probe
attcaaaacagctgaaggggtctatcatgctgcctggtctccagaaggacttggatacgcrttccaaactcctgaatcttggaacaacgacgacgggtaccggtccctgtgctacatgcgc

SEQ ID NO: 8456 - DNA, 202 bp, Artificial Sequence
  Description of Artificial Sequence: Synthetic probe
gaagccgttcaatatcgatctaacaccattcaaggagtgacctggcacagtggatggagaaagacaccttctcactgcccaatgtggctgtatcaggacaraatcactctttgtgtactgtacattttttttcattcaccaacggttgctgctatctttgttggactgcctgttatcttcttttagaagcataagctttgca

SEQ ID NO: 8457 - DNA, 121 bp, Artificial Sequence
  Description of Artificial Sequence: Synthetic probe
gagccaggtgtacgagaagtacaagggccaaggacttgaaatcctggctttcccgtgcaaycagtttggtgggcaggagcctggcaccaacgaggagattgtcgagtttgcctgcactcgc

SEQ ID NO: 8458 - DNA, 121 bp, Artificial Sequence
  Description of Artificial Sequence: Synthetic probe
gggacaacagagtaccgaccgggttggtcatcgctcccttgttctggttgtgtttattggyggcgtaacatctgctgagattgctgcacttcggttccttagttcacaggaaggaatgggt

SEQ ID NO: 8459 - DNA, 121 bp, Artificial Sequence
  Description of Artificial Sequence: Synthetic probe
cttatttcaatggcccgaggggttgtcgcaacggtgctagttgtactttcctacatgactygtcagcaccgccgaggcaggacggctcaaaaagacttaagctggacaacagaatagccgg

SEQ ID NO: 8460 - DNA, 121 bp, Artificial Sequence
  Description of Artificial Sequence: Synthetic probe
gggcagaatggatgacattcaccggggccttcaatgtgcttactgtcagtcccctgacacygatgacatacctttggaaggaattcaaacttccagtacagatgaagataaatgtagcagc

SEQ ID NO: 8461 - DNA, 121 bp, Artificial Sequence
  Description of Artificial Sequence: Synthetic probe
tctgaaccacgcaaagaatggtgttgacattgtttctggaactaaggttcggacacatttygcaagaccaaattaggaaaaaggtacctagctaaaattagcctccaagcatccgtatgcc

SEQ ID NO: 8462 - DNA, 121 bp, Artificial Sequence
  Description of Artificial Sequence: Synthetic probe
gcctgctgcgtccgatacgatcgagaacctaattgtaaaaaagatttggaaatttctgttsgcgttgtgtactactgtagtagtcgtagctgccggtgatgttgtgatcaccaaccaggtg

SEQ ID NO: 8463 - DNA, 121 bp, Artificial Sequence
  Description of Artificial Sequence: Synthetic probe
cacttcattacctaaccttcacatagacagttcggttgtgccaaggcagggtctggatggyggtaatgcaggcggtgttgcctctctgcagggtggcaggattgatcagcaaactgccggt

SEQ ID NO: 8464 - DNA, 121 bp, Artificial Sequence
  Description of Artificial Sequence: Synthetic probe
ctagggtagttctccctacctcctatatttgcatcaagtgtgcgtgtagctcatgtcgtastccagttgtttgtactaggtctcgacagtttggtttgttgttggttgtacatatcgcatt

SEQ ID NO: 8465 - DNA, 121 bp, Artificial Sequence
  Description of Artificial Sequence: Synthetic probe
cctatcggaatgacggagtggtactttaatgttgtttcctgtcagttctccggttgatatyagtggcggtgaacatcagttcggatgatatatttggtgaacatcagttctattgatatgt

SEQ ID NO: 8466 - DNA, 121 bp, Artificial Sequence
  Description of Artificial Sequence: Synthetic probe
cttctcgtggatattcgacttaaatggcatctctgagatgtataagtcatatgaagatacyaacttgtggagggttgtagatgatgtgccacggggagttcacatcaatttccttaaggct

SEQ ID NO: 8467 - DNA, 121 bp, Artificial Sequence
  Description of Artificial Sequence: Synthetic probe
atactggcgtgtatgtgggcagattaagctgtgataatctcttgacaaagcacatttcgcsctacctgagtagctgagttgaacgatggcttctctaatgcacagcagtcccaaataaaca

SEQ ID NO: 8468 - DNA, 121 bp, Artificial Sequence
  Description of Artificial Sequence: Synthetic probe
gaagagcaaggacgccactgatggtacggagaaggcacttgttgacgagctgcaggcactsgacgagcacctaaaagctcatggcccctacatcaatggggagaacgtgtccgctgcagat

SEQ ID NO: 8469 - DNA, 121 bp, Artificial Sequence
  Description of Artificial Sequence: Synthetic probe
ccacatgctggatattgaatgcttctcttatcttaatcgtgctttggagagctcattatcrccaatcgtaatactcgctacgaacagaggaatatgcaccgtragaggaactgatatgaca

SEQ ID NO: 8470 - DNA, 121 bp, Artificial Sequence
  Description of Artificial Sequence: Synthetic probe
aagaactgtataggtgctatagatgggtctcatgttcctatcagtctatctcctcaatacyaagctccatggagaaataggaaaggctctcttagccagaatgtcatgattgcttgcgatt

SEQ ID NO: 8471 - DNA, 121 bp, Artificial Sequence
  Description of Artificial Sequence: Synthetic probe
acagttccaatatttgggaagggtcacatctttactcagatagtagcatagcagaaggcarttcttcactggcaatggatttgtatggagtacaagaactggaaagcctgtttcaaattca

SEQ ID NO: 8472 - DNA, 121 bp, Artificial Sequence
  Description of Artificial Sequence: Synthetic probe
ggtagaagttgtattcttctgtacagtgaacagatacatgggcctcgctaacctgmccccragagatggccgcaacctttgtcattgtgcctctctagaggcagttcctcgaggagaatca

SEQ ID NO: 8473 - DNA, 202 bp, Artificial Sequence
  Description of Artificial Sequence: Synthetic probe
caagaggtagtatgagtgagcatggtgcctcaccagattttgagacacgctcacagtgtagcaataggtgagtttttttctgttcggcttccagtctcgasaagatggatattatgttgactggacaaagagtttgaagaccttgtttgtgtacattatgcgtgtggaggtaaaggctgtatayagttcaggtcttyaggat

SEQ ID NO: 8474 - DNA, 121 bp, Artificial Sequence
  Description of Artificial Sequence: Synthetic probe
gctagcggctctcctgtaaatatcaccgagtgttgattgattgcccgagctagcagctccsctgtaaatatcgcaagcgttgatctggccaggtgtacgttagagactgagctggttgcgg

SEQ ID NO: 8475 - DNA, 121 bp, Artificial Sequence
  Description of Artificial Sequence: Synthetic probe
aatgtgtacagccatctctgccttttgttccagcatcccaattgagttcagagagtgttgyagcttgtaattccattaccagccagtaatatcttctatatctaagatggagaggttgtga

SEQ ID NO: 8476 - DNA, 121 bp, Artificial Sequence
  Description of Artificial Sequence: Synthetic probe
tttcttctatgatttctcgcctataaaggtgatattcacagaagaaaatagatcgttcctycactacctgacaaacctgtgtgctatagtgggaggcatcttcaccgtctccggcatcatt

SEQ ID NO: 8477 - DNA, 121 bp, Artificial Sequence
  Description of Artificial Sequence: Synthetic probe
aggggataacaattggaaacattaagagtgctgatgcttgatgttaactgtcaggtgttgktaggatcataggagtgacaagcgtacagtgtagcgwawgtgcattacgttatgaataaaa

SEQ ID NO: 8478 - DNA, 121 bp, Artificial Sequence
  Description of Artificial Sequence: Synthetic probe
ctcatcagtaaactctggtgtccttggcacactcgtctccatgggagatgtaaaaggcgtmtttcttggtcatgaccatcttaatgatttctgtggtgaccttaacgggatacggttctgt

SEQ ID NO: 8479 - DNA, 121 bp, Artificial Sequence
  Description of Artificial Sequence: Synthetic probe
acctagccacatcattgatttgctacagcagtgtattcctaacaatgcagatgagcatggygatggagagatagagattgatatccatgcactcagtgatgaggttctatttgaactgaag

SEQ ID NO: 8480 - DNA, 121 bp, Artificial Sequence
  Description of Artificial Sequence: Synthetic probe
agtcaggattctgatggaaaaggtgctgtttggaggcgaaattcgcgaagatcagaaaatycggaaaaatatatgaaaaatcctatttttccagaagacgaaggatgccagaaggaggagt

SEQ ID NO: 8481 - DNA, 121 bp, Artificial Sequence
  Description of Artificial Sequence: Synthetic probe
gatctaattgagagaattgcagaaacatttcctgaatctgagcagatgtttcgtgctcatygacaaacttagtgttatacctgtgcagatwttcttgtccaaatttgctttcaatgtttgt

SEQ ID NO: 8482 - DNA, 121 bp, Artificial Sequence
  Description of Artificial Sequence: Synthetic probe
ccgatacaacccggacaccctggaagagtcggtcctctggactgagagcagggacgtaggrgaaggctaccgctgcatcaggatggtgaacaacatctacctcaacttcgacgcgctcaat

SEQ ID NO: 8483 - DNA, 121 bp, Artificial Sequence
  Description of Artificial Sequence: Synthetic probe
gtgggataagcagctcaagactgtcgtgaacaacgagagctccgagattatccgcatgctyaacaccgagttcaacgacatcgccgagaatcccggcttggatctcaacccggctcactta

SEQ ID NO: 8484 - DNA, 121 bp, Artificial Sequence
  Description of Artificial Sequence: Synthetic probe
agaaaatttggctgcacagaatttgtgaacccaaaagatcataccaagccggttcaagagktactcattgagatgacaaatggcggagttgaccgcagtgtggaatgcactggcaacatta

SEQ ID NO: 8485 - DNA, 121 bp, Artificial Sequence
  Description of Artificial Sequence: Synthetic probe
ggttcttaggttgtacccgccagcaatctttcttaccagaagaacatacaaggcaatggarcttggtggcatcaaatatccggcaggagtgaaccttatgttgcctatcctcttcatccac

SEQ ID NO: 8486 - DNA, 121 bp, Artificial Sequence
  Description of Artificial Sequence: Synthetic probe
ccgcagcgtagatgacctgatcctctccgtcggatctggtggaggtggtgctccagctgcygctgctgctgcaccggctgcaggtggtgccgctgctgctgaagaaaagaaggaagagaag

SEQ ID NO: 8487 - DNA, 121 bp, Artificial Sequence
  Description of Artificial Sequence: Synthetic probe
gaccgatggccctaccctggaggagtgcggcttggactgcacctaggagaacaccgctgarcagcttatgtgaattccctcacccagtgcgtgtgtgtgtatgatgcccgaaggaggattt

SEQ ID NO: 8488 - DNA, 121 bp, Artificial Sequence
  Description of Artificial Sequence: Synthetic probe
aaaggatcaggtggatttggttagagtttatttctgaggggttatagagtataccagtgtycattgtgcaggcggagataagggaacgtaccccaattgaatcttttggcgatttgccatt

SEQ ID NO: 8489 - DNA, 121 bp, Artificial Sequence
  Description of Artificial Sequence: Synthetic probe
tcactcgtcacgggcagcctgcatcctgattctgttgacgtatgcaccagactactctgcrcaaatccagtgcagcggatgtccttgcaagagttcatcaaccacggcttcctccgaccat

SEQ ID NO: 8490 - DNA, 121 bp, Artificial Sequence
  Description of Artificial Sequence: Synthetic probe
aagggcgtgcagtgcatgaactttctgctgtcttgggtgttgatatttcactgcgtggatrgaagcttgcaagtttggagcgatggtaccttttatgggcaatatttgctctatcttgctg

SEQ ID NO: 8491 - DNA, 121 bp, Artificial Sequence
  Description of Artificial Sequence: Synthetic probe
gcatcaggagcagaattgacactagtgatcctcaacatggcaaggcgtatggcagcagcakcagcagcacaaatgacactatcgttcgtgaatacgataatttatctctatggctgccacc

SEQ ID NO: 8492 - DNA, 121 bp, Artificial Sequence
  Description of Artificial Sequence: Synthetic probe
agcagcatgacataggaaatcagctgttgggtggacttagagcagcaaacagcttcaatgrtcttcactatgactggaaaccctcccaatagagtggctggagacattatttcagtatgat

SEQ ID NO: 8493 - DNA, 121 bp, Artificial Sequence
  Description of Artificial Sequence: Synthetic probe
tggatctcctgcatctatgggtaaaggttttctggacaatcctattattgtttccgttgcygaggagttgcagaaaacccctgcacaggttgctctacgctggggtcttcaaatgggccac

SEQ ID NO: 8494 - DNA, 121 bp, Artificial Sequence
  Description of Artificial Sequence: Synthetic probe
gcttactggttgtctctttggcaccttctactggtgaatcattcttttcacttccagatgrtgaagatttctcattttcagctccactagacagctgttcttggttatcctctcctggatc

SEQ ID NO: 8495 - DNA, 121 bp, Artificial Sequence
  Description of Artificial Sequence: Synthetic probe
tatgaatgagtctttctccctcgaccatgtgtttagatatgatgttgcggtggatgttgtkcctgaactccaatggttatctgaagacaaatataagaacctcaaagtggttattgaaata

SEQ ID NO: 8496 - DNA, 121 bp, Artificial Sequence
  Description of Artificial Sequence: Synthetic probe
ctaccgcatcccaggagtcaaaattttggaatcaagaattgtgagggagtggcgccttgckgtgtttgtttgtctctcatacctacagtgtttaggacatgtacctctgttcttttgaccc

SEQ ID NO: 8497 - DNA, 121 bp, Artificial Sequence
  Description of Artificial Sequence: Synthetic probe
gcttttgccatggcacttcagacagtaaacaagtgtctatcggatgcaatatgtgccatgkcacacaataggttagatggcgaaagccgtgctgttkctctgattcaatctggcaatgaga

SEQ ID NO: 8498 - DNA, 121 bp, Artificial Sequence
  Description of Artificial Sequence: Synthetic probe
atatttgttgtaccgtaatgctgctcaagaagtaaatggtatttggttttacaatcagcakgactgcgatgccgtagcaaatctttttggaaggatactgaatgcttatgccagagttcct

SEQ ID NO: 8499 - DNA, 121 bp, Artificial Sequence
  Description of Artificial Sequence: Synthetic probe
tactgataagaaataaatctggacggaactgtcctcacgtacgtgtagcagatagctgggkatgattgttgtgcaatcccatcggcccatctcataactttgttgatctacctttcctaga

SEQ ID NO: 8500 - DNA, 121 bp, Artificial Sequence
  Description of Artificial Sequence: Synthetic probe
accaatctcttactggtgtctatgtgtgtgtgactgtttgaggtgaccggaggaggatggmtcggaaccgaaacggaagaaatgtcaacggtcttgtgcaagaggtaaaaagagagaaaag

SEQ ID NO: 8501 - DNA, 121 bp, Artificial Sequence
  Description of Artificial Sequence: Synthetic probe
accactccaggcagaaagaacatctgaacgcctcacctgaacattaaggtaatcacatatmgcatccaatatgaactgtatttcatcctcatgtggttcagggagcattgttatcgctgta

SEQ ID NO: 8502 - DNA, 121 bp, Artificial Sequence
  Description of Artificial Sequence: Synthetic probe
tttatacacagtacttgaagcgccatagccaatgatgtatttctcactcaaattctctgtmagcctcataatatcttcgtaggtatggatagccatgtccatttggaggagaactatcttt

SEQ ID NO: 8503 - DNA, 121 bp, Artificial Sequence
  Description of Artificial Sequence: Synthetic probe
gaggactcttgtgtgatgcccttttcttcatcatttaccttctcattgtccacagcactcmtcttgtccttggccttcttctttttcttcgaaaycatgccatyttcagcatttgcctccc

SEQ ID NO: 8504 - DNA, 121 bp, Artificial Sequence
  Description of Artificial Sequence: Synthetic probe
gcaagagtgattggcatcattcccagccaagaagccagcatgtattctaaaatgccaacakgagtgacagacaacaggtagttcaacatgttaaacggaagtagaggtacaagccttagta

SEQ ID NO: 8505 - DNA, 121 bp, Artificial Sequence
  Description of Artificial Sequence: Synthetic probe
aaacaatagttgtatatgttgatcatcttctcagtcagaaaaactacataaaagaagaaakggttgagaggatgaggctagatgaagaagtgcttatggatttcttcagagaatacactaa

SEQ ID NO: 8506 - DNA, 121 bp, Artificial Sequence
  Description of Artificial Sequence: Synthetic probe
ccgaatctggttgctcgtaagcttccggtggtgatgcagaagacccaaaagctgaagatamccagttaacctgctaagacacttttaccctgtggttcatccacgactattcgacggtggt

SEQ ID NO: 8507 - DNA, 121 bp, Artificial Sequence
  Description of Artificial Sequence: Synthetic probe
  modified_base (112)..(112): a, c, t, g, unknown or other
acctcgatcgttgactgcttgtaaggagaagcacgtcgcgaaggtggaagcgtatcccgakccacatgttttttgtaattccaactccagttgatgatgtttgcgcgaaacntgttagatg

SEQ ID NO: 8508 - DNA, 121 bp, Artificial Sequence
  Description of Artificial Sequence: Synthetic probe
aatgttgagtgcaaggaacaaacatctgggccatatagtcgtttatacaagttgtcataayatttttaacttggaatgcgagaaacaaaaattaatgggccattattaacttgagacgaat

SEQ ID NO: 8509 - DNA, 121 bp, Artificial Sequence
  Description of Artificial Sequence: Synthetic probe
tgaagatgagcatgatataccagaacccgcagaagagaattatgctgggtatcattcagamgttgaggatgataggcacaaatacgacgatgaagagttaactaatgtttcagatgatgaa

SEQ ID NO: 8510 - DNA, 121 bp, Artificial Sequence
  Description of Artificial Sequence: Synthetic probe
aggagacactgaagaaccgcgccaaccagctgatcaagacacttgagagctgtggctggarcactcttggctgccacggcggcatctcgatgctggcgaagccgaccgcctacattggcaa

SEQ ID NO: 8511 - DNA, 196 bp, Artificial Sequence
  Description of Artificial Sequence: Synthetic probe
ctgccaacaacagaatactgctgccgctgcatttcaggcatgcttcatattggggatggcgcaagaggatttcctctgccatacagggagtctgatcctgmttctggtgtgagcatttaagttactgaacttgttttcagttttgattagcgacgcaatacctgatcctgggtgcacatttgtcgtgcattttcaa

SEQ ID NO: 8512 - DNA, 121 bp, Artificial Sequence
  Description of Artificial Sequence: Synthetic probe
ttaagcagattgtggtacccgagcaccccctttcctggataatgacgaatatacatagcarctcacagacccgtgtcggctggaaatgccatgttatctctgatatgttcatcttcttttt

SEQ ID NO: 8513 - DNA, 121 bp, Artificial Sequence
  Description of Artificial Sequence: Synthetic probe
ttatttgcgatacggactgcactacatcgacttccaggatcccgggctggcaagggagccraagctctctgccaagtggtactccaagttcttgaggagtgaaattgggataaatatcgag

SEQ ID NO: 8514 - DNA, 121 bp, Artificial Sequence
  Description of Artificial Sequence: Synthetic probe
agacaccacccaaggatggtttgtagctgaatagtcaagccatccaccaaatgatgctggrgaggctggatctcctacgattcttatgatggccgtaacaccagtaatgatcatcgcagaa

SEQ ID NO: 8515 - DNA, 121 bp, Artificial Sequence
  Description of Artificial Sequence: Synthetic probe
ctccaaccatctaattctaaaagaggatgatatcataggtattctggagacagatgatgcsaaagacatgaagcctcttagtgaccgtgtacttatcaaggtagctgtagctgaagataaa

SEQ ID NO: 8516 - DNA, 121 bp, Artificial Sequence
  Description of Artificial Sequence: Synthetic probe
tacaacgagccgaggagagtggagcacgtcgaccatgcccggaaatcagccgagcaggccrttaaggcgatcaagggcaaggagtccggcgagacggtggcggagtacgattacctgccct

SEQ ID NO: 8517 - DNA, 121 bp, Artificial Sequence
  Description of Artificial Sequence: Synthetic probe
cgtatgggagtgcggagtgcctatacctcattcatagttgtttgctagtttctgcgctagytggacattttccctgtgtttggaaaacatttgtatgtgcaaacagacggagtgaactata

SEQ ID NO: 8518 - DNA, 121 bp, Artificial Sequence
  Description of Artificial Sequence: Synthetic probe
cgtgcaaacaccagcattacttagcagttcgcactataggtacccatattaacggtcaacrgttcaaagcaggaaactaagctatgtgtcaatcaacggttctccaggtgatcttcactct

SEQ ID NO: 8519 - DNA, 121 bp, Artificial Sequence
  Description of Artificial Sequence: Synthetic probe
ctgtgcggccccgtgcccccggccatcttcgacaagaagatcgacgcgctcttcatcaacracaaccacttcgacttcgagctgcccgacaacttcggcaactccaccgcstcsgtcatcg

SEQ ID NO: 8520 - DNA, 121 bp, Artificial Sequence
  Description of Artificial Sequence: Synthetic probe
cccgggtccagacccgtctacgccgacatctacacacctctcctcgacatggtcgaccacyccgacaagtacgggttcgtggaggccagcaggggatgctgcggcactggcctgctggaga

SEQ ID NO: 8521 - DNA, 121 bp, Artificial Sequence
  Description of Artificial Sequence: Synthetic probe
atctgaccatcaatgagagacagttycactgatgttcatccttctatgtatgctaactagyccttgttatgtgcagctgctgtgtgtattgatcttaccgaacaatggagccacttgcytt

SEQ ID NO: 8522 - DNA, 121 bp, Artificial Sequence
  Description of Artificial Sequence: Synthetic probe
gatcaaggacattgatgcggtggtattcaagccattgctttacttcatttacaccgactcygtggaggaatttgatcagctggaatctggttggcagtatgaggcattggcgattttggct

SEQ ID NO: 8523 - DNA, 121 bp, Artificial Sequence
  Description of Artificial Sequence: Synthetic probe
acccagattctagtagcaaagtggttgatgccgagtcaggtttaaggcataaagcaagaayagagaggcatcagcgcacaaccgagcgtgtgtcaaaagcacttgctgagaagaacatgcg

SEQ ID NO: 8524 - DNA, 121 bp, Artificial Sequence
  Description of Artificial Sequence: Synthetic probe
agtgattttggatgttacattatgtgatgctctgtacaaaggagcagtcaaaaagggttcmgcataccctagtgagatccacaagaaggatttgggatcaacatttataaaccgcatgcaa

SEQ ID NO: 8525 - DNA, 121 bp, Artificial Sequence
  Description of Artificial Sequence: Synthetic probe
caaatggcggtacgtattatgctaatgaaggtgcggatcagatagtgggcctgagctcccygggcatggagcgatggagctcgccggactccatgaacagccagctcgaccgtggcttcag

SEQ ID NO: 8526 - DNA, 121 bp, Artificial Sequence
  Description of Artificial Sequence: Synthetic probe
aagaataagaatggcgtgtgttgactccattacgaagaaatttgcgagtgtatattaccgkcccaagcttagtgtatagtggttactgccacggtaggtgatacacagaaagtacaatgtc

SEQ ID NO: 8527 - DNA, 121 bp, Artificial Sequence
  Description of Artificial Sequence: Synthetic probe
cccaagtaaatgctagtgcatcaacatggaaccaaggtccacccactaataatcaggcccygacattttctgcatctggaaatactgctgggaaagagttaaatgatttggtcatgagtgt

SEQ ID NO: 8528 - DNA, 121 bp, Artificial Sequence
  Description of Artificial Sequence: Synthetic probe
ccacgcattgtatcaatgttgtatcattattgtaggcttcacagcggctgaccacgtatcrcggtctagatggtgtgattactaggatcagtcagtagctgagttctctttctgtttcgtc

SEQ ID NO: 8529 - DNA, 121 bp, Artificial Sequence
  Description of Artificial Sequence: Synthetic probe
tctgttgtctatgatggattaagctccttgacttaggtgtaagtactgaagtcttgtttcktgtgctgatcttggattagggctagcgatgaattgatttgtctggggtctttttagctta

SEQ ID NO: 8530 - DNA, 121 bp, Artificial Sequence
  Description of Artificial Sequence: Synthetic probe
tttgggtggtcgaaagaagaaagtggagcttctggttcaggcctttgagaccgtcctgccrcacgacgaagacgagaagaagaacatctccccacgaggcctgtccaggcttgcaactgat

SEQ ID NO: 8531 - DNA, 121 bp, Artificial Sequence
  Description of Artificial Sequence: Synthetic probe
atttgaaatgatactagcaagcaaagaccaaacggaaacttacgactcccatgatgagaaygacaatgagaagcagatggaccggttgatgaaaaagaaaataatcagaagtaaatcaaac

SEQ ID NO: 8532 - DNA, 121 bp, Artificial Sequence
  Description of Artificial Sequence: Synthetic probe
ctacacgcctatcgaaccggggaaatatggagctcttgctaaaccaatggaaggatctaayttgtggccggatcacccaccaaattttgacgcgctcctggagaactatataagtcttcta

SEQ ID NO: 8533 - DNA, 121 bp, Artificial Sequence
  Description of Artificial Sequence: Synthetic probe
gtaccccatggaccagctctccaccgacggcgccgtcttccaccgggcatgcttcaagtgycaccactgcaagtccaccctctcgtttagcagctactcctcctttgaaggggtgccctac

SEQ ID NO: 8534 - DNA, 121 bp, Artificial Sequence
  Description of Artificial Sequence: Synthetic probe
tgacaccttgacctcgatcattggctttccttgactggttaatcttgtcaggagcatgaasgctgctgataacagtaggaccataacaacaaaatagactatccatcccctgatgataata

SEQ ID NO: 8535 - DNA, 121 bp, Artificial Sequence
  Description of Artificial Sequence: Synthetic probe
tccatatgtcgttctgcagcgaggaagatgcataggattgcttcacgtgtacattttttgmtcgaagtaaatccgaggcgttgatgccaaattacagattgtggcttctacaatgagctat

SEQ ID NO: 8536 - DNA, 121 bp, Artificial Sequence
  Description of Artificial Sequence: Synthetic probe
taaaccactgggccactttgctgaagcaaccaatgctcctaattacccaccaatatctgcwggggagtatgtcgagcaagagctctcggcaattaatctgaaagggaaggttgcactctag

SEQ ID NO: 8537 - DNA, 121 bp, Artificial Sequence
  Description of Artificial Sequence: Synthetic probe
gctcgagatctccatgcagttacagaagggggtggtcacattcctatgaccgtcctgtttyaccatactacagcaggcactattctccacggaacagaagacgcagctattctcgcagtgt

SEQ ID NO: 8538 - DNA, 121 bp, Artificial Sequence
  Description of Artificial Sequence: Synthetic probe
gtatcagtagtggtagctcttagtcatgtaatgtcatgaaatgttaatatgcggtgaatcytgtgctttaggccgaagtttgaagaagcctgaagccccatgtgactcttgccatctcaac

SEQ ID NO: 8539 - DNA, 202 bp, Artificial Sequence
  Description of Artificial Sequence: Synthetic probe
tgttacctgggatgttgagagagattgcttcagaacggcagcagctgctattgggaacttctatgcacttcatcctcccatccttccaaatccatctggcratggcattcagttatacaagaaaagtaaagattgcatggcaagtggtgaatgtgatgacgatttaacaaacacagatgaagatgaaattgatcaagaactg

SEQ ID NO: 8540 - DNA, 121 bp, Artificial Sequence
  Description of Artificial Sequence: Synthetic probe
tttgctatttgctttagcattccgtgtggcttttgactcggtgagctgtttcttcagcatrtctactcgctgcctgtactcctcttgctctaaagtcaagtactcttccctctcagcggca

SEQ ID NO: 8541 - DNA, 121 bp, Artificial Sequence
  Description of Artificial Sequence: Synthetic probe
agcatgagggccgagctggacgccgtcatccagcccacgtcgatccaggcctaatcatcartcgcgtcctaatctccaacagtggagtcacagtcaccaacctgtccatatataatgcatc

SEQ ID NO: 8542 - DNA, 121 bp, Artificial Sequence
  Description of Artificial Sequence: Synthetic probe
ggttagagtagagtgcaaatcaaagttgaccggagcccagacatgcaccttcgagggtcasacggaccacactggtaccttacaacatccccgtggacgacgagcacgagcatgagctctg

SEQ ID NO: 8543 - DNA, 121 bp, Artificial Sequence
  Description of Artificial Sequence: Synthetic probe
ggtgagtgtcaacgcggaaagttactgtacctcgaaaaccgagttgcattggcaaagataytgtttccaatcgagacaaaagtagcaatgaagattgctcaagtggatggtactttggaat

SEQ ID NO: 8544 - DNA, 121 bp, Artificial Sequence
  Description of Artificial Sequence: Synthetic probe
tctatgagcataaggtacataacatcgctacaaacccaccaacaaaatacaaggccttgtyggttcaagagctaatcagagctgttacctgtccatccactccaaaaccaacttatttcga

SEQ ID NO: 8545 - DNA, 121 bp, Artificial Sequence
  Description of Artificial Sequence: Synthetic probe
atcaagggggaacctgggaattgatcttccacccgaaaaggtgttcttattccaaaaatcygcgctccacaagtgcaacatggctggaaagcctgctgttgttactcgggttgtggacagt

SEQ ID NO: 8546 - DNA, 121 bp, Artificial Sequence
  Description of Artificial Sequence: Synthetic probe
gtttagcttgtgtaaccgatgctacagcgaagggaaggttccgtcagcgttcaagttggaygagtacaggttcatagaatacagcaacgagtctgaggctcttattgacaagtgtatgtgc

SEQ ID NO: 8547 - DNA, 121 bp, Artificial Sequence
  Description of Artificial Sequence: Synthetic probe
aggacgacagcctcgacacctcctccaaattcacgtctttccacgcaacccacatctcctwccagaagaggcaggctctagtgacctacctggagaacaaccgcgcgggcatcaccgtgtt

SEQ ID NO: 8548 - DNA, 121 bp, Artificial Sequence
  Description of Artificial Sequence: Synthetic probe
cggcctcatcgtggtgcaccatcccagagcgccggcatccaagctctgagaacctggatcragaacactgcggcatgcatatacgaacctaagttggccttgttgttgcttacacaataat

SEQ ID NO: 8549 - DNA, 121 bp, Artificial Sequence
  Description of Artificial Sequence: Synthetic probe
ctgcaaaggaatgtggcaataaacagatacttgcggcgatggaaaagatgcaaaagaagawgggaggaggttcaaagaacctgttgttgaccaaaggaggaagacattggcaagaccgaac

SEQ ID NO: 8550 - DNA, 121 bp, Artificial Sequence
  Description of Artificial Sequence: Synthetic probe
gtactggcactacaagagccgccggtacgaccagacctacgaggggtacatgttccctctycacgtcaccgacgagctccagcagtggcccgagatgacgtcccgcaagcgcacctgggca

SEQ ID NO: 8551 - DNA, 121 bp, Artificial Sequence
  Description of Artificial Sequence: Synthetic probe
ggtggatacggttggtggtatagtggaccagcttatacagtttggaaaagtgacaagacckattctggggataaaatttgcccctgatcaatccgtggagcagcttggcctaagtggagtg

SEQ ID NO: 8552 - DNA, 121 bp, Artificial Sequence
  Description of Artificial Sequence: Synthetic probe
cctggaaggagatcacatgcattctagtatccagaaggttcctgctctggtcttggattgygaacctgacattgacttcaacaaagacatacaggctaaacgacaatatgctcagcaagtt

SEQ ID NO: 8553 - DNA, 121 bp, Artificial Sequence
  Description of Artificial Sequence: Synthetic probe
tccatgatccatcctttctcttttttcgtaactcccaagaattgtcatctggaaccctggrcaatgagcaaagcagtaatattagaccattcctgatctagtgagtttgcagttcagatag

SEQ ID NO: 8554 - DNA, 121 bp, Artificial Sequence
  Description of Artificial Sequence: Synthetic probe
attcaataccagcgttcagcagcatgatacggtatgcatgagcttgttcaaacgagctttycccaaatggccagaacagctctatcagatctaagacgtgcttctggcgccaagtagattg

SEQ ID NO: 8555 - DNA, 202 bp, Artificial Sequence
  Description of Artificial Sequence: Synthetic probe
tcaactaagctttacagcaagcaacagggtcgttgtgctcttggagcctccggcgtgcaaagtccaccgcgttctggctgcggaatacgtcccagataccrtcacaaccgatgatcatgaactcgtcctcctcggtgagattcctcaccatcacctcaggttcagcactaagaggcccaagaccatcacatgcttttagtcc

SEQ ID NO: 8556 - DNA, 121 bp, Artificial Sequence
  Description of Artificial Sequence: Synthetic probe
tctcttgtcatgtgaatatagtgaccctaattctgccatgttcctgatggacttatctggygtggaccctaattccggaggagtatgatcatcgagatctgaaatcttgtgtaagctttgt

SEQ ID NO: 8557 - DNA, 121 bp, Artificial Sequence
  Description of Artificial Sequence: Synthetic probe
ggttttgttagtgatggatgcagttcatctgatgtttaattcatgtgaaatcgttagtgcrttgcttacagtggcattctcttgtcctggaaaacgtgaaagattcgttgcagattgacaa

SEQ ID NO: 8558 - DNA, 121 bp, Artificial Sequence
  Description of Artificial Sequence: Synthetic probe
ggtcgcaggttgcataaagagtccctgttccattctgccaaatctaggcagtctggtctcygactccctacatatcaagcctgtctgtcctgtactgtcggatcctctctccagaccagaa

SEQ ID NO: 8559 - DNA, 202 bp, Artificial Sequence
  Description of Artificial Sequence: Synthetic probe
ttgagatcggagattctgggaacggttcgaacgagcgccgaggtagcagattctgcttgactgacgagcttaggcctgcaggttcttgatagagttatatyttactccggtggacgacaccaaatttttctgcggcattggtattattaagaattaatatgcacgctcataaatcgattcagttcacactccaaaaacagtt

SEQ ID NO: 8560 - DNA, 121 bp, Artificial Sequence
  Description of Artificial Sequence: Synthetic probe
attggaccagaagatagtcgatttctacactaaaaatggggaggccgggckggttccatgygattctccaaagggaggtggcaccagctatgacacaaaggttcagccacaacattgagga

SEQ ID NO: 8561 - DNA, 121 bp, Artificial Sequence
  Description of Artificial Sequence: Synthetic probe
tcatgcgaatgcgttggcagcatttgccagtagaagatgatcttcagagaaacaattaccwtcaaaattttgtgctgctggagtgtttttgttaaagactgtccttctatcagatatggtt

SEQ ID NO: 8562 - DNA, 121 bp, Artificial Sequence
  Description of Artificial Sequence: Synthetic probe
cgagaagcagaagctgaaactagagaaagagactttggagcaccagatgaaacttatgacygcaactccagcctatatgcctcatcccaccatgatggcctcaccattcgcgcaggcacca

SEQ ID NO: 8563 - DNA, 121 bp, Artificial Sequence
  Description of Artificial Sequence: Synthetic probe
tgaaggatcaaccccacctggaggttttcccaacagttggagtggtgcagcatactgtacrtctgatctgtccattcacaagaatggtgaaatacacatttgggacaagggttttgatgat

SEQ ID NO: 8564 - DNA, 121 bp, Artificial Sequence
  Description of Artificial Sequence: Synthetic probe
ccctcgattgccgccacaagtaccatgccgcgtgcatcaagcagtggctgatggtgaagarcctgtgccccatctgcaagacaacagccttgtcagcagatagacgcagcgggtgacatat

SEQ ID NO: 8565 - DNA, 121 bp, Artificial Sequence
  Description of Artificial Sequence: Synthetic probe
tgcagaggaccaggaggcattcttcaaagactatgctgaagcccatgctaaactgagcaaycttggtgcaaagtttgatcctcctgagggattctcgttggacgatgccgcaccggctgac

SEQ ID NO: 8566 - DNA, 202 bp, Artificial Sequence
  Description of Artificial Sequence: Synthetic probe
tggatggaactcaacattggaggccgttgctagcggtgtacctcttgtgggtattccagattgggctgaccaacctaccatctcaaagtatgtggagagtrtgtggggcatgggtgtgcgagtgcggaagggtgaaaatggattcatagggagtggggacatcgaaagttgtattagagaggtgatggatggggaaagaaag

SEQ ID NO: 8567 - DNA, 121 bp, Artificial Sequence
  Description of Artificial Sequence: Synthetic probe
cagccagggtcagatgtgcggctccaccttcaaggtcgatagcgaggccaagaaggattcrgggatccctcgcgtcggcagcgccgctgattggtctaaccacttctagttcaatgaccca

SEQ ID NO: 8568 - DNA, 121 bp, Artificial Sequence
  Description of Artificial Sequence: Synthetic probe
cagttaattgttcatgtggagccaaggatgatgatggcgagaggatgctatcttgtgactygtgccatgagtggcagcacactaggtgcgctgggataggtgactttgatcaggtgccaaa

SEQ ID NO: 8569 - DNA, 121 bp, Artificial Sequence
  Description of Artificial Sequence: Synthetic probe
agtaaggaccatcttggaagggctctgcagcaatgccaatagtagctactggagatctgargatgatgtgggcgtagctgctggtcttggaggcgagacagagtcccacccttacgtttca

SEQ ID NO: 8570 - DNA, 121 bp, Artificial Sequence
  Description of Artificial Sequence: Synthetic probe
tcactaactggaaaggctgttccacactcgtggggatgtcaaacgtcatctctgagctgasgtcaagaaaagaagctccttaccatccgcatcagatcactgggcggcgactcgatctgct

SEQ ID NO: 8571 - DNA, 121 bp, Artificial Sequence
  Description of Artificial Sequence: Synthetic probe
caggtgcctgaactggaacgagaggctagaccagaaagcactgtagaaacgtgtggcacayacacacacatacggaccctagcatgctcctgtacatacatagctcaatacatagataaac

SEQ ID NO: 8572 - DNA, 121 bp, Artificial Sequence
  Description of Artificial Sequence: Synthetic probe
tcggcaaccacaaggatgtgttcacatcagtgtatgcaaatctgctcggcctgtacgcgckcactgaatcaaggtcgctggaacaaccggagggcaggcatgaatcgtatctgcaagagtt

SEQ ID NO: 8573 - DNA, 121 bp, Artificial Sequence
  Description of Artificial Sequence: Synthetic probe
acattgcgtttggtggtgaagagcccgttacaatgaagaggtttggctccttctggttcargtccagaggttctgctaaacaaacaggggagtcaccagttctaaagacgctggtgctagt

SEQ ID NO: 8574 - DNA, 121 bp, Artificial Sequence
  Description of Artificial Sequence: Synthetic probe
gagctttgcaggcatttactcacgtactgaaacaaaagggtgtgcttaattctatatcgcmtcgtgccaccaccatgcactggtgaagctgctagccacgaaaatccatctgaagcccagg

SEQ ID NO: 8575 - DNA, 121 bp, Artificial Sequence
  Description of Artificial Sequence: Synthetic probe
ggaggattcgcccagaccattcaaatctctatcagacctgggaaatataggtctatcatcraaacaaatccaagacatcctacgtaaaacagccactggaatcttcaaatgaccactagaa

SEQ ID NO: 8576 - DNA, 121 bp, Artificial Sequence
  Description of Artificial Sequence: Synthetic probe
tgggtgtggatgggaagctgctttgggtcaatggccagctcgtgtcgcctcaaaccgagcycaaggatggagatatagttgaagtgcggacgtagttgcgattttcctccacccatttctc

SEQ ID NO: 8577 - DNA, 121 bp, Artificial Sequence
  Description of Artificial Sequence: Synthetic probe
taatcatagttgtactcgctagatccccaaaggtcatcatggttagtcctgaggcctctgyaagtagctttggttcttatagcaaggagagcatggagtgggtgcagaagcgagtcagctt

SEQ ID NO: 8578 - DNA, 121 bp, Artificial Sequence
  Description of Artificial Sequence: Synthetic probe
gaggtcaaattttgacatatgtgaatgggtaggcctctcggtggtgggtgctcaggcactrtcaatcattcttgcaatggtacttcgggcccttggtcctgaccgtgagattgactacgac

SEQ ID NO: 8579 - DNA, 121 bp, Artificial Sequence
  Description of Artificial Sequence: Synthetic probe
ggagcagattgaaataatgtttgaaggtgggaaaggatggaaaggaggcgaggtcgagctygaagatacacaacacttaatacagggcgacgtgaagtctgcctctctaggttagtataat

SEQ ID NO: 8580 - DNA, 121 bp, Artificial Sequence
  Description of Artificial Sequence: Synthetic probe
ccttatactccctgttttgcggaggaataaccattagatggtcactaagagtcagtgcagyttgacagtcttatcatggcaacaagaatcagtggttggtatggatgtaagcttctagttt

SEQ ID NO: 8581 - DNA, 121 bp, Artificial Sequence
  Description of Artificial Sequence: Synthetic probe
gttattgaaaaggttgcgagggagtacactgcaaacaacaagacaagctcctaactcagtycataagcctaaaaaaatccatcaccacgcgccacaaaggcgcaaggcagggcaagaacta

SEQ ID NO: 8582 - DNA, 121 bp, Artificial Sequence
  Description of Artificial Sequence: Synthetic probe
catctccttctccctccaaattgcatgaacttcatcagttcggaatctttgagtaaatgtygactcctccaggggagtggtgacaccatgtgcatatgccagtaaaccagtgtatgcaatc

SEQ ID NO: 8583 - DNA, 121 bp, Artificial Sequence
  Description of Artificial Sequence: Synthetic probe
caggagggcgaggagtttgcgagaagccaacagtgttttgtcatggcgcagtacactgtcmaggcagctacagtaatggcgctctagtataaaggataagtttcagagttttcctagccta

SEQ ID NO: 8584 - DNA, 121 bp, Artificial Sequence
  Description of Artificial Sequence: Synthetic probe
catcttgacaaaggtgaaacacaccaagggccagctgtccttggaattgctcttattgccwtgtctgaagaactaggatctgaaatggctatacgatcactcgagcgtcttttacagtatg

SEQ ID NO: 8585 - DNA, 121 bp, Artificial Sequence
  Description of Artificial Sequence: Synthetic probe
gtgcatttcaagccatttctgatccatcagcctaaaggttatgcagtaaagaatgtcaaargctcggtcattttctataagtaaatttaggaacactgctccaatcaaagaccttggctta

SEQ ID NO: 8586 - DNA, 121 bp, Artificial Sequence
  Description of Artificial Sequence: Synthetic probe
gaatctctacaccgcagaacttcgggccaagtggctggcgcatttcctggatggtggattyagattgccaagtgttaaagcaatgcagagtgatatccttgagtgggagaagtttatgaaa

SEQ ID NO: 8587 - DNA, 202 bp, Artificial Sequence
  Description of Artificial Sequence: Synthetic probe
gcatttgtaccagatctggaaggaaaattcttagcaactgagaatttctaccacacctcgaagttctttgggctacgttccaagtcctttctttctgatckgatgctagctggggagaaattttgccatggggactggtcaaacataaaaaagaagtaccgttctttcaacgagggggaactgctcctttttttgcttctct

SEQ ID NO: 8588 - DNA, 121 bp, Artificial Sequence
  Description of Artificial Sequence: Synthetic probe
gtacccggaccggctcctcggcaaggcgatcgcsacgggsgtcattgggcgcatcaacgtsaggttctacgacgactcctactgcgccgcgcactggcgccaggagtgggacaagtgggcg

SEQ ID NO: 8589 - DNA, 202 bp, Artificial Sequence
  Description of Artificial Sequence: Synthetic probe
tcctcgggaccaggctggagagcctcgaggggctgctcgccagggtgcctcccaaatccatcactgacaaggagttgcgtaagcgccaagacatgctttcmaatttgaaatctagagcgaaacagatggcggcaggtttcaacatgtcgacatttgcgaacagggaggatttgcttggtgagactaagaaagctgccgatga

SEQ ID NO: 8590 - DNA, 121 bp, Artificial Sequence
  Description of Artificial Sequence: Synthetic probe
tgagagcttgatagagaggattcatgaggatggcagaatagcagagaatgccctagatttrccggaatatgtcaagtacaaagactcgccatatttgagaaaccctttgcagcagggcacc

SEQ ID NO: 8591 - DNA, 121 bp, Artificial Sequence
  Description of Artificial Sequence: Synthetic probe
tgttagagctttcctcttctgcttagcatcattagaaccttcgtatcctgtaatttctgtyggtgttaaacttcttgatgtcaaaacctgtgactgcttgtcatatgattggcgatgattt

SEQ ID NO: 8592 - DNA, 121 bp, Artificial Sequence
  Description of Artificial Sequence: Synthetic probe
ccctaagtgtacaaactatatataaacaggtgcttgttcatctattctcacagagaagatygcggacctccacatctcttccaccttccaagtttctcgcaacccttgcgcggtttaatag

SEQ ID NO: 8593 - DNA, 121 bp, Artificial Sequence
  Description of Artificial Sequence: Synthetic probe
tcatctactttgatggccatatctatgttgcccttaatttccgctggaatttcagtagaaycatatgtatttaccttactttcagaaggagagatcaaatcttcattagttttggtatttg

SEQ ID NO: 8594 - DNA, 121 bp, Artificial Sequence
  Description of Artificial Sequence: Synthetic probe
acaactagataacaggaaacctgtcgatgggtatgcttattaggagccttggtggccaaayggttgaaatgcccgtcaagttttggctcttctagggcagcagattatctgcctggtactt

SEQ ID NO: 8595 - DNA, 202 bp, Artificial Sequence
  Description of Artificial Sequence: Synthetic probe
tcaagctgattcccaggacgaatgccacgcaggccaggtctctttctcctccatctcaggataactttctcsacgataccgactgaccaaacgacttttckrtagtttttcctcacttgatgtccacgmacatgrgcctgtaatttgacaattctctggcgaatgatcataaactcccttctccccttccaacctcggaact

SEQ ID NO: 8596 - DNA, 121 bp, Artificial Sequence
  Description of Artificial Sequence: Synthetic probe
ggataagtcactgagtgggaaaggccatgactcagagattagtgagtttttgaaggtagcrtttcaatgcatcgttgctcgcccaaaggagaggatctcgatgtaccgggtttaccacact

SEQ ID NO: 8597 - DNA, 121 bp, Artificial Sequence
  Description of Artificial Sequence: Synthetic probe
gttcgtggcgagggcttgcgatcgaggcaacagaggtgtacatgtattctattggcaggcyctgttttatctcgtaatctaggagaaacatatgtcgagagtgagaactgcatgggccttt

SEQ ID NO: 8598 - DNA, 121 bp, Artificial Sequence
  Description of Artificial Sequence: Synthetic probe
ggcagccttggcctgcaactccaccaccatggatcatttgaaggctctgaactaaagagaycaaaggtcgatgccccccctgagctagtcgcgctccctcatcggtacccccttctgaccg

SEQ ID NO: 8599 - DNA, 121 bp, Artificial Sequence
  Description of Artificial Sequence: Synthetic probe
attcgagaggattgccgaagagaagtcgatgctgaagtcgtggttcgtggatctggagcgygtcgtggagcggggaaggagcgtcgtcgtcccggaataacccggtttagttgaacattca

SEQ ID NO: 8600 - DNA, 121 bp, Artificial Sequence
  Description of Artificial Sequence: Synthetic probe
caccaacaagctactcatctgattggcacgttcagtatgtctttcagagaaatggcgttcsaattggaaagctggcaaattccaattggctttacatcgtcccractggcatgtacggatg

SEQ ID NO: 8601 - DNA, 121 bp, Artificial Sequence
  Description of Artificial Sequence: Synthetic probe
cagtactttcactctgcagaagggcagaagtccccagaactgatcagttcaagtacctcawgggaaccctttttggtccatcctttcttttttccaaatgatggtgttagataggagggtg

SEQ ID NO: 8602 - DNA, 121 bp, Artificial Sequence
  Description of Artificial Sequence: Synthetic probe
tgggtgaacggatgcacggtcatagtcgtcgacatcccgctcttgttcgagacaaagatgraccgatggacagacccggtgattgttgtatgggtgggatcccaaaacacagatcgacagg

SEQ ID NO: 8603 - DNA, 121 bp, Artificial Sequence
  Description of Artificial Sequence: Synthetic probe
ttatgcagaaaatgctgcttccctgtggcctccctccggagagagacgaagactgaggcgkcggcgggtactgtactgccaccaccggcaggcaactgcgtgtgattgaacatcacatcct

SEQ ID NO: 8604 - DNA, 121 bp, Artificial Sequence
  Description of Artificial Sequence: Synthetic probe
actcagggtcatcgagggagcaaatcactgctacactgcacatcgtaaagaactctccgaygctgtagtggatttcattatgttctccaaggcaggggatacctcgttagcagaagatgaa

SEQ ID NO: 8605 - DNA, 121 bp, Artificial Sequence
  Description of Artificial Sequence: Synthetic probe
gtcgtgcctacccctacagggcaggccattgctccgaatgcataatgcagctgatgtgcakgcacccgatgtgcccgcctttgctgggcaggaagtcgatgtgcttcccttctgatccaaa

SEQ ID NO: 8606 - DNA, 121 bp, Artificial Sequence
  Description of Artificial Sequence: Synthetic probe
cgcgagcaaggctcgatgtgtagcgcgcaaagtgaataaatgtggcgcttagaaagctgayctggtggtgagagtttaggctaacctgtaccaaggtgcgcgtgttgaatttttttggaag

SEQ ID NO: 8607 - DNA, 121 bp, Artificial Sequence
  Description of Artificial Sequence: Synthetic probe
aagacgaggaaggtgcccgccaacgaggaaccaatcatgaagggcagcttcaaagtcagcraggccggcaaggtggtgctcaccgtcaacaacccgacgtcgaagaagaagaagctgttgt

SEQ ID NO: 8608 - DNA, 121 bp, Artificial Sequence
  Description of Artificial Sequence: Synthetic probe
aggtgtgatcaagcctcgcctgtccgtttatgcccagttgccagtagaggccttgaagaargatctggaggaatacaaggacttgggcccctcagatgatgcttgtaatcccgagcttgaa

SEQ ID NO: 8609 - DNA, 121 bp, Artificial Sequence
  Description of Artificial Sequence: Synthetic probe
agaaatccattatttatcccatggaaaggtggtgtgatcttgggcgtccttgatactaccygtgatgcttggatccatagagaagactggattaaaaatggtgtccacgttgggagtggca

SEQ ID NO: 8610 - DNA, 121 bp, Artificial Sequence
  Description of Artificial Sequence: Synthetic probe
aaagccagagtatgatgaagaaatctctgaggaaacggaagaggccatcgatgaactgtcygaaaagatctccaagatggacccctagtatagcaacaacaataaggacgatgaaaatgga

SEQ ID NO: 8611 - DNA, 121 bp, Artificial Sequence
  Description of Artificial Sequence: Synthetic probe
aaactaccaattttaatatataattttgtcatcacctaaataaaccggtcatgttgctccyaatatatcgtaagcttgagtgtgcaatgaagcttatgagttgtaagctatgttgactagc

SEQ ID NO: 8612 - DNA, 121 bp, Artificial Sequence
  Description of Artificial Sequence: Synthetic probe
aagatacgccgaagccagctcagtggcatcgaatagctgttcataatgattatctaggtgyttatgctgttcagaagttggtgaagaactctgcggtatatattgagggtgatatcgaaac

SEQ ID NO: 8613 - DNA, 121 bp, Artificial Sequence
  Description of Artificial Sequence: Synthetic probe
agggcccgcagtcgctcacctgctgatagggactgaaactacatgcctgcgctcattcccrcctgcttcggacccgtggctgtgctgttgtagtgatgctcaagctggttaatttaggcag

SEQ ID NO: 8614 - DNA, 121 bp, Artificial Sequence
  Description of Artificial Sequence: Synthetic probe
tgcggcatcgggcaggatgcccgggtggcggaccggatcgggttctacaagcgctactgcracatcctcggtgtcggctacggcgacaacctcgactgcaacaaccagaagtcgttcaacg

SEQ ID NO: 8615 - DNA, 121 bp, Artificial Sequence
  Description of Artificial Sequence: Synthetic probe
tgatcaaagccatagttgcctctgatattctcatcggtaaagtatctaattcaaccaagcscatccaagagatagtttctaagaacttggctccaagccgatcatagatggtaaacacaat

SEQ ID NO: 8616 - DNA, 121 bp, Artificial Sequence
  Description of Artificial Sequence: Synthetic probe
ttgctgtagctgctgctgctgtgatggaggctgctgccgtggagattgctggttaaattcmtgttgttgaagttttatagcgaactgcagatccgagtctccagatgagtccggcagagtg

SEQ ID NO: 8617 - DNA, 121 bp, Artificial Sequence
  Description of Artificial Sequence: Synthetic probe
ccattgcatgtccgggaaaaacaggtcagctgctgtggtaactgccttcttgatgaagtcyaggacgtggagacttgcacaatgtttccagtgggtaaaagatcggcggccacaggtccaa

SEQ ID NO: 8618 - DNA, 202 bp, Artificial Sequence
  Description of Artificial Sequence: Synthetic probe
acccgttctattatgttaattccacaccataataagagaaaacctcctcagaccgatctaagctccgtatttcggtgctttccagagcttaaatgcaaccycgtgcagaaagcgctccgcaagcatagcaaagtttccggcgcgctttataaattcttcaaaagagaactctttggccaaatcagaacgtgtcactccttcc

SEQ ID NO: 8619 - DNA, 121 bp, Artificial Sequence
  Description of Artificial Sequence: Synthetic probe
atgctagcggtggacgggtgcttcctggtgcagacttacagagaccattgctcccaaatcmaggtgctgaatgtaatatccatggcagataggcatgctcctggagccctggcctcggttt

SEQ ID NO: 8620 - DNA, 121 bp, Artificial Sequence
  Description of Artificial Sequence: Synthetic probe
ggccgccggcgccgtcggcggagctctggccatctcggagctcatgccggagaagtacaarcacatgctcggtggaccctcgctcaaggtggatccccacaccggcgccgtcgccgaaggg

SEQ ID NO: 8621 - DNA, 121 bp, Artificial Sequence
  Description of Artificial Sequence: Synthetic probe
cccagctttggtgcaaaaactttggcaagaaggagtactgaaggatgcaccgagttgcackgagaagtcctgcttttacytccttttgtcataatcgactgtgctcagcagtgaacgctgg

SEQ ID NO: 8622 - DNA, 121 bp, Artificial Sequence
  Description of Artificial Sequence: Synthetic probe
acatgataagatcaaaaattagtaagagcatcactcccttgatagtgtttctcatgacgaygcatcgaggatgtcgactttgatagccgatctgttacatatactcttagtttagtgcact

SEQ ID NO: 8623 - DNA, 121 bp, Artificial Sequence
  Description of Artificial Sequence: Synthetic probe
agctactaagtcttgttggtgcacaaatgatcaattgcgaattgctgttaaggcggtcttkgcaatctttatttcgctcgggcatatgcgccggaggtgggtgagatcgcctctgatgtcg

SEQ ID NO: 8624 - DNA, 121 bp, Artificial Sequence
  Description of Artificial Sequence: Synthetic probe
cgagtgtttcgctgtatttatttaatagcccgcagcggtttcagtgttgctcaactctgamagggagaagctggaaaatggaggatttaccaaaattcgctgggttagtccaagccaaatt

SEQ ID NO: 8625 - DNA, 202 bp, Artificial Sequence
  Description of Artificial Sequence: Synthetic probe
ttgccccgctttgggcgccaactgtcgttgtattgggaacggcagtacctggggaggttagatagaggtgtggggactagcagggaagctatcgacggtgyccgcaggcgggattgggatacaagcgagcgtagcgggacgcaagaagtacccaggttcggggccctcgtggtgaggtaaaacccctactcctgcctgatct

SEQ ID NO: 8626 - DNA, 121 bp, Artificial Sequence
  Description of Artificial Sequence: Synthetic probe
gctctcaaatgcaacggagccaacagtactagacaagctttgtgctgctctaaacatcaayaaaaaaagcgtggatagagatctcgacgtgtaccgcaacttgctctcaaaacttgttcaa

SEQ ID NO: 8627 - DNA, 121 bp, Artificial Sequence
  Description of Artificial Sequence: Synthetic probe
agatggcctggtcaaagccggtgtgctccggcgttaattcaacctcctctgagaggccctrttcgagctcgggcactggggssttcgccgggccggagacaagtggtttcgtcccgtctcc

SEQ ID NO: 8628 - DNA, 121 bp, Artificial Sequence
  Description of Artificial Sequence: Synthetic probe
atgtcgactcatcacatcctggggttgaagaaggtcccaagggttcggttgttcgccgatkaaagtggtacgtgagttgggtttagaacgtcgtgagacagttcggttccyatctaccgtt

SEQ ID NO: 8629 - DNA, 121 bp, Artificial Sequence
  Description of Artificial Sequence: Synthetic probe
ctagttgtattggtcagtaagaactgccttttcttttacgactggtgaattggacgatgcrtgcaggattaagggcgcccttccaggttttggtgacccgttgtctcggtgtaatttttat

SEQ ID NO: 8630 - DNA, 121 bp, Artificial Sequence
  Description of Artificial Sequence: Synthetic probe
gatctactgtatatggatcatgcacggggtcaattagtagctactctgctattaataagtyattactatctgctgtcacgtcccagtaatgtacatgtaatctacattaagattaaaaagg

SEQ ID NO: 8631 - DNA, 121 bp, Artificial Sequence
  Description of Artificial Sequence: Synthetic probe
tgcggcaagatcaccggggatgttaggcaagagcacactatagcacagtataagcgtgagytggattcgtggtatgacaagtacagcgacctaaagtccatgtatgagtcacgctatcctg

SEQ ID NO: 8632 - DNA, 121 bp, Artificial Sequence
  Description of Artificial Sequence: Synthetic probe
actgggcgtactgatcaagtttatgctatagttcgtgatatgactgctgctggacttggaytaaacaagtactgttatgctggactaataactgcattcaagaacaagacacctgccagtg

SEQ ID NO: 8633 - DNA, 121 bp, Artificial Sequence
  Description of Artificial Sequence: Synthetic probe
aaataataataatgaaggatgaagtgaagagaattcttgtgataggactgctggtgggagwaatgatcaagccctctcagtatctagatcatccttttgagcctttaatttctgtaaactg

SEQ ID NO: 8634 - DNA, 121 bp, Artificial Sequence
  Description of Artificial Sequence: Synthetic probe
gagaattcttccaagttcagtaggtcgtgctcttcttgcttaatcaagtagtaccagcatyaagattttgttcttagataatgtcaaagacgttagtatattaatctcggtcaaccagcgt

SEQ ID NO: 8635 - DNA, 121 bp, Artificial Sequence
  Description of Artificial Sequence: Synthetic probe
gcaacagagccttgtcacatgggccaccccaagactgagtgaagataaggttaggcaatgygttgactcaagacttggaggggactttcctcctaaagctgtcgcaaagtttgctgctgtc

SEQ ID NO: 8636 - DNA, 121 bp, Artificial Sequence
  Description of Artificial Sequence: Synthetic probe
attctcaattaaccccttgatgatcatgatcatagggtcaattcttcatggatatattctrgtcttcccggttccgtggtttattcagaagacagctgctgcttttttgttttagaaagca

SEQ ID NO: 8637 - DNA, 121 bp, Artificial Sequence
  Description of Artificial Sequence: Synthetic probe
caaataaaaaggactgaagcacaaccagcagatgagctgctattgcctgatacacagattrtggctgaagttctaaaggagcatagctcgtcaagcaccttcctctctagtgtggggtgcc

SEQ ID NO: 8638 - DNA, 121 bp, Artificial Sequence
  Description of Artificial Sequence: Synthetic probe
agtcttaggtgtctacctcggtggatctgtgctgattgacataattctgaatctgactctkactctgaacgtttaacttcattttttgtctacatgggtttttttcttgatcttgtttctt

SEQ ID NO: 8639 - DNA, 121 bp, Artificial Sequence
  Description of Artificial Sequence: Synthetic probe
agcatactacaagattctgagcggctacccatatgttgcagttggtgctttacttctgtaygttggctcgtaccaggtgtcgtttggtccaataagttggctgatggtgtctgagattttc

SEQ ID NO: 8640 - DNA, 121 bp, Artificial Sequence
  Description of Artificial Sequence: Synthetic probe
gatcaggaggggtttaatcacccgcaatgtgaaggaagccgttgatttgtttcaccaaagrtttggtatgacgtttgtgcctgcattaagcagagaattccgcccctataagccagatcca

SEQ ID NO: 8641 - DNA, 121 bp, Artificial Sequence
  Description of Artificial Sequence: Synthetic probe
tgtgactttgtcatccaagtgttggagttccctgcctctgctgcagctgattagtagctgygccaccaggattgttgtttgtttgggattttgcttgcagtgcttacactgccgttacgtc

SEQ ID NO: 8642 - DNA, 202 bp, Artificial Sequence
  Description of Artificial Sequence: Synthetic probe
ttcgtctcaacatccatgggattgtctctcttgaatcagcaacgatgctggaagaggaggaagtagaagttccagtttcagctacaaatgaggcacccaargatgctactaaaatggacacagatgatgcaccacgtgacgatgacaatatgcaagaacctaaggtccctacagatactgccgagggtgctgctgaaaatgg

SEQ ID NO: 8643 - DNA, 121 bp, Artificial Sequence
  Description of Artificial Sequence: Synthetic probe
cagctacgcgaagcagttccttccagctgacagcaaccccaaaaaggagtaggatacaccrtgtagcaaattacaggcagccacccagctgatatggaatatgttgatgctattacctgaa

SEQ ID NO: 8644 - DNA, 121 bp, Artificial Sequence
  Description of Artificial Sequence: Synthetic probe
gtgccgcatatgccaggaggaggacagcatcaagaatcttgagaagccgtgtacttgcaayggcagcctgaagtatgctcatagagcatgtgtgcaacgctggtgcaatgagaaaggagac

SEQ ID NO: 8645 - DNA, 121 bp, Artificial Sequence
  Description of Artificial Sequence: Synthetic probe
atgcaaataagcaaggtctactttcaaagtttagctgcacatggttatcttggattgatgwgaagcaaggtgttgacactatccctgttgttcgggttgatcctccggcagtggacgacaa

SEQ ID NO: 8646 - DNA, 163 bp, Artificial Sequence
  Description of Artificial Sequence: Synthetic probe
agaagatgatcctaactcttactgcaagcattatgtactggagcctacagagaacgccactrtcacaatctgatatgtctgaaccatcagagccatctagtatggcttcggatgttgcttctgatattggttcggaggatggcgcctcaacagcagcaccatc

SEQ ID NO: 8647 - DNA, 121 bp, Artificial Sequence
  Description of Artificial Sequence: Synthetic probe
actgagagtgtatctgaggaggttcttgacgagatgagaacgttgatgacagaggaatcgrccaataatacttcagagagcacctttttattggatgaggaaataagtatgccgatatcac

SEQ ID NO: 8648 - DNA, 121 bp, Artificial Sequence
  Description of Artificial Sequence: Synthetic probe
acatttttctgggaatgggaacaggcgcccttgatgccgctggaggtgctaaattatgtgmttgcaggatgcaggtcacgcccttgacgggagaatggagatcgaggccaccatgtacagc

SEQ ID NO: 8649 - DNA, 121 bp, Artificial Sequence
  Description of Artificial Sequence: Synthetic probe
aggtgtgaactcgcacgcggagaagactttccaaagccgctacagggactatgagccaacyggcgaaactcccatgcgatccgagccagaagttccgagcaaaggcgcgatcgagtcgctt

SEQ ID NO: 8650 - DNA, 121 bp, Artificial Sequence
  Description of Artificial Sequence: Synthetic probe
actcacatatgtgtggttaattacacgtgcaggttgacccgccttggtccgtaccagctcrgaggtcccgtcgtcgccggcggcagcaagaccctcggtgtgaagaaggaagcggaagcgg

SEQ ID NO: 8651 - DNA, 121 bp, Artificial Sequence
  Description of Artificial Sequence: Synthetic probe
atcccggcgctgccctccaccgctgccgccctggagctcatcagcaagggcagcaactaarcgagccggtcgtcgtcatcgcgcccccggggtcggatttagtgggatttagctgcatttt

SEQ ID NO: 8652 - DNA, 121 bp, Artificial Sequence
  Description of Artificial Sequence: Synthetic probe
tgcattgtcacctggtggtgtccgaattggtacaccagcaatgacctcgagaggtttggtygagaaggactttgtgcagattgctgagtacctccaccaggctgtggccatctgcttggac

SEQ ID NO: 8653 - DNA, 121 bp, Artificial Sequence
  Description of Artificial Sequence: Synthetic probe
agtgaagaagcatctgtgccaactcaaaaggaaaccttggttacaggaccagttgccgctstgccagatcaagtggagcatgccagtactgaactgcttggagaagatctaaatttaaagc

SEQ ID NO: 8654 - DNA, 121 bp, Artificial Sequence
  Description of Artificial Sequence: Synthetic probe
ctacggtccgtatctccaggtggccggtatgtgcttatatcagctggtgtgatctatggaytgtttgtggttgatatggtatatgaaacggcgggcagcttatccgagtcctgagaagatg

SEQ ID NO: 8655 - DNA, 202 bp, Artificial Sequence
  Description of Artificial Sequence: Synthetic probe
aactgggatgcaataagtctaatattctcgagagattatgctacaagtgaagaagagagcgcaggaggacgaaaaatgcccaagaaatggcattgaagggygctgaagatgtccgggagctaactcaaaactcaccttcaacatctggacctagcaagtacaaagatcaggggtggaacgccaacatcaactcgacccagtc

SEQ ID NO: 8656 - DNA, 121 bp, Artificial Sequence
  Description of Artificial Sequence: Synthetic probe
gcttttaaatgttcacacattcacgtttaagttcaattatgtccagtgcaggatgatgttraagagaagcttgcaacccgatctgctacagaagcaatgtagaacataaggtctttggtaa

SEQ ID NO: 8657 - DNA, 121 bp, Artificial Sequence
  Description of Artificial Sequence: Synthetic probe
ataatgttcaattgtacggaaagattcgatatgtccaggactacagtcacgagaagattgyttctagaggaccaaagaagtatgcagaagatattgaaagtggttcctcagatgttgaaac

SEQ ID NO: 8658 - DNA, 121 bp, Artificial Sequence
  Description of Artificial Sequence: Synthetic probe
gatctcagaaagatttttatcctctagtgtagcattgagaaggctcgactgcattggatcrtgaggagccagcaccaagtaccaacagatcttcctaagaaccggtatccactttgccaga

SEQ ID NO: 8659 - DNA, 121 bp, Artificial Sequence
  Description of Artificial Sequence: Synthetic probe
gaatccacatgccctggaggctcttaaccggaatgtggtggacaaccatgtagcagatcgrtgtgtcatacttgaaggagataaccgtctgacggcaccaaaaggggttgctgatcgtgtt

SEQ ID NO: 8660 - DNA, 121 bp, Artificial Sequence
  Description of Artificial Sequence: Synthetic probe
atggatggcaccagagatgtgtaagcggaagccgtattgtcggaaagttgatgtttatagytttggccttgtcttgtgggaacttgttagtggttcaattccttatgaagagatgactccg

SEQ ID NO: 8661 - DNA, 121 bp, Artificial Sequence
  Description of Artificial Sequence: Synthetic probe
aaagacgtggtgagaacagatcgatctgttccctactacgaaggagatgacaatcggaatrttgtagttctacgtgatatcttgttgacatattccttctataattttgacctcggttatt

SEQ ID NO: 8662 - DNA, 107 bp, Artificial Sequence
  Description of Artificial Sequence: Synthetic probe
gtacatagaaggaacattcaccgggaacttgcggagcatccaaattctttttgtctcactrgttgttttctgttcttctcttttcagcacttggtattccatgattg

SEQ ID NO: 8663 - DNA, 121 bp, Artificial Sequence
  Description of Artificial Sequence: Synthetic probe
ggttcttctgctgttgaaacataatcgttcaggtggctccaaaaaaactcctgcaatcgckactgggaggccttgtctcaacatgaagctttggagagtgcctgccaacgtgccatcttct

SEQ ID NO: 8664 - DNA, 121 bp, Artificial Sequence
  Description of Artificial Sequence: Synthetic probe
ttcccccgaaggaaagaggaggatatcaatgatgaaagaacaaggtcaagaggcaaatgcrttagatcagctcgagttgggcactgttcggaccttactctatggagctatcgctggatgc

SEQ ID NO: 8665 - DNA, 121 bp, Artificial Sequence
  Description of Artificial Sequence: Synthetic probe
atatgatgaggatgctcgttacccagagactaaaacagttacaattggtcagttcaagctmgggctatgccatggtcatcaggttgttccatggggygacctggactccctagtcgatgct

SEQ ID NO: 8666 - DNA, 121 bp, Artificial Sequence
  Description of Artificial Sequence: Synthetic probe
taaccggataggaacggaaactgttgagactgagcatggcaacagcactataaaattttaygggaattcattcatcgcagggccaactggagaaatcgtgaagcttgcaaatgacaaagat

SEQ ID NO: 8667 - DNA, 121 bp, Artificial Sequence
  Description of Artificial Sequence: Synthetic probe
atcttcaaattcaataccatcaggaaatggctctactacagcacatcaacaccaagcaaayggcttttctgaggaagttcgagctgggcagtcatcgaggcacacggctgctgccaatggg

SEQ ID NO: 8668 - DNA, 121 bp, Artificial Sequence
  Description of Artificial Sequence: Synthetic probe
tttcccccttttgttctagggcatgcaaatataaaataaacctagcacaacatttccttgygcgtctcacctggatgatggttctatccttcatcgatgcttggcttatgcagttgctttt

SEQ ID NO: 8669 - DNA, 121 bp, Artificial Sequence
  Description of Artificial Sequence: Synthetic probe
gaggcaaatgaggttttctctgtctatcgtgatcagtactatgaaggtggaatatcctccrtgtacatttgggaggatgatgaagagagtttcattgcttgcttcttgataaagaaagatg

SEQ ID NO: 8670 - DNA, 121 bp, Artificial Sequence
  Description of Artificial Sequence: Synthetic probe
caacgactgcatccactggtgcctgccagggcccatcgacatctggaacgacctgctcttycagatgatcctcgtctagctagcgcaactcgcctcatcacgtcggtaaccgtgctgcaca

SEQ ID NO: 8671 - DNA, 121 bp, Artificial Sequence
  Description of Artificial Sequence: Synthetic probe
gcggttcggcgggccgcagcagtgcaagccgaccaactactccaggctcttcaagcgggcstgccccaaggcctactcgtacgcctacgacgaccccacctccatcctcacctgcaacgcc

SEQ ID NO: 8672 - DNA, 121 bp, Artificial Sequence
  Description of Artificial Sequence: Synthetic probe
tggtattggacacgggagattcattcagctgaccccggggagcttcattcagcttgttttkgttgcggcaaaagttgacaatcggagcctgaggggcttttcctttggacagttgacgttg

SEQ ID NO: 8673 - DNA, 121 bp, Artificial Sequence
  Description of Artificial Sequence: Synthetic probe
ctctatcaagggaggaagcagagatgaagattctttcattatataaagctggcaacagggytagtgctcctgagttgctagatgatcacctgaagacggttcttgtgaatgtccgcttggt

SEQ ID NO: 8674 - DNA, 121 bp, Artificial Sequence
  Description of Artificial Sequence: Synthetic probe
agaaactttcagctgcaatggcgagcaaagacgaagcagagaagaacttatctcttgttaytgacagcaaggaagagctagagaagaggctagctgagagggacagggaggtcgagatgct

SEQ ID NO: 8675 - DNA, 121 bp, Artificial Sequence
  Description of Artificial Sequence: Synthetic probe
aagttccgcacgaagactgacgcaatcaatgccttcattgctaaaaacaggagtttctgcytgaacaatcctgttagtgtgcgggttattcaatagaccgtcacatcttatctattttctg

SEQ ID NO: 8676 - DNA, 121 bp, Artificial Sequence
  Description of Artificial Sequence: Synthetic probe
acccaagacgttattgtcgcccttgagaacgagcatgaccgtgggttggtcgtgggactgraccacaactctggggagccagttgatcctgagatggaaggcatctacgacaattactcgg

SEQ ID NO: 8677 - DNA, 121 bp, Artificial Sequence
  Description of Artificial Sequence: Synthetic probe
aaagagaaaagagatcaggatcttctggtcttgcctacagatgctgcattatttgaggacycaacattcaaggactacgcagagaaatatgcagcagaccaagaagcattctttgaagact

SEQ ID NO: 8678 - DNA, 121 bp, Artificial Sequence
  Description of Artificial Sequence: Synthetic probe
aagatgattctcaagacgctttacaagaatgatatggtggtatgtgcattattggcggatyggagggtgccagatttggtccttttagctactcaggtgtcattgaaatgatctccaggtt

SEQ ID NO: 8679 - DNA, 121 bp, Artificial Sequence
  Description of Artificial Sequence: Synthetic probe
ataaaattttgcgtcttgtcgaccggcacgtctcgtaatttcaccatattttacatcggcyacacgattattgtactcgatcctgttgggtccgcacgtatattcatcgatcatgtattta

SEQ ID NO: 8680 - DNA, 202 bp, Artificial Sequence
  Description of Artificial Sequence: Synthetic probe
tgctcactctgcagaagacggagcctgagctctacaccgataccatgatcacggctctctgtgcgaatttatttggggccgggaccgagaccacgtcaacmacgacggagtgggccatgtcgctcctgctgaaccacccggcggcgctgaagaaggcccaggccgagatggacgcgtccgtagggacctccgcctggtgtcc

SEQ ID NO: 8681 - DNA, 121 bp, Artificial Sequence
  Description of Artificial Sequence: Synthetic probe
ctgctcttgctaaagcgagtgagcatgtgagtgagggaacgtcagcagtggtgcagcaacstgttaacctaagatggatcagtacctgccacaagcctgatcctggaatagctaatgctga

SEQ ID NO: 8682 - DNA, 121 bp, Artificial Sequence
  Description of Artificial Sequence: Synthetic probe
ggttgaaccagaaattgcatttgcaaacttgcatgatgatatgaactgtgcagagagctaygtacaatacctctgcaaatggttactcaagcattgccgtgaagatatggaattcatggtg

SEQ ID NO: 8683 - DNA, 121 bp, Artificial Sequence
  Description of Artificial Sequence: Synthetic probe
cagaaaatccgagacagatgtgcattcggatgggttcagttgacagatctagcagtatcartctgatgagttactgttctctaatctcaagcatttcttgaaccgagcaagaagctcctca

SEQ ID NO: 8684 - DNA, 121 bp, Artificial Sequence
  Description of Artificial Sequence: Synthetic probe
caagttcatcacaaaaataagcaacaaaaactcatcagggattcgggaggctaaagagggmagagatacataactacgaagctatccttttattgttgatttgtcttccttcagatcagtc

SEQ ID NO: 8685 - DNA, 121 bp, Artificial Sequence
  Description of Artificial Sequence: Synthetic probe
gaccctagataggggtgaggtgctttctattattattgacactgccctcattgtaatccaktgtgtcatttttatgtttctgttagctctcagtttcaccttttctctcattcttgtgtct

SEQ ID NO: 8686 - DNA, 198 bp, Artificial Sequence
  Description of Artificial Sequence: Synthetic probe
caaatcggaagttcctgtgctccatgttgaaagtgattccgctacagacaatgcccgtacgacagtagtttctgttgataccaagtcatctacacgytggactctcgcaatcaataagcaggaaatcgatgatttcacgattcaagtggattcagaggagttggttcagctgggtggtaagagcgaggtsgacrgatg

SEQ ID NO: 8687 - DNA, 202 bp, Artificial Sequence
  Description of Artificial Sequence: Synthetic probe
ccggccccaagttttttctttcctttcccccattgaacttgttagctctagtcgatactctctctcttatgcatgttaattgcgatttttcagaaaccgcstatggtactcttatgaacggatttgatgagtactttgttcaagctgtcaatgtaaccgctacttgtaccttgtaactgatgtttgttcatcgatcccatcg

SEQ ID NO: 8688 - DNA, 121 bp, Artificial Sequence
  Description of Artificial Sequence: Synthetic probe
ctttgccctgctgctagacctactgcacctgaccccgagctcaccagactacgctatgttygcaaacgcctccagtggtaaagttatctgaatctttcaccttttctgtcaaaaataacta

SEQ ID NO: 8689 - DNA, 121 bp, Artificial Sequence
  Description of Artificial Sequence: Synthetic probe
gtgtttatgtcgtttgatgaatgactagtactgtatgtccttttctagccttccatttccyagtgaagcatgaaatgatgatagcaggcttccatggacttcattcattcgcagcaggctg

SEQ ID NO: 8690 - DNA, 121 bp, Artificial Sequence
  Description of Artificial Sequence: Synthetic probe
tcaaacatggcaggagtgaaagagtgtgttggacatgagcgtgtcaagtgctacactgacmaaggtataacaatatggagcggcaatgatgacgaatgccatgattctcggtggaagcatg

SEQ ID NO: 8691 - DNA, 121 bp, Artificial Sequence
  Description of Artificial Sequence: Synthetic probe
tatatacaaaaagagccactgtgtcctaactcctaactaaaaaagaggagaaaaaccaccytgctctaccacccttcttcccttgtagcagaaagaacacaagagacggcaataactacag

SEQ ID NO: 8692 - DNA, 121 bp, Artificial Sequence
  Description of Artificial Sequence: Synthetic probe
aagttcaatggcgaagctggacgaggagtcggaggagctgcatcagaagttcctggagaargaggtcgacctgcccaccttcgtgcagaaatacaagaagctccgcgctgcccaccacaag

SEQ ID NO: 8693 - DNA, 202 bp, Artificial Sequence
  Description of Artificial Sequence: Synthetic probe
ctcaaaaggctgaagctattgatcagtttttactaaaactgaaatgtcttggatcaggagaagctgcttttacctttattcttgacgatccttctggaaayagcttcattgagaacccgcatgcaccttcatcagatcctttgttgtccttgagattctatgataggacatctgaacagcaatcagcacttggttttcttgc

SEQ ID NO: 8694 - DNA, 121 bp, Artificial Sequence
  Description of Artificial Sequence: Synthetic probe
cggtaaagaaattgacgttgctgctgccaccaccggtaaagaaaatgatgttgctgctagwgctgccactgcaggtccaacggactcataacatatacgcagtggatcaagaaattgtttc

SEQ ID NO: 8695 - DNA, 202 bp, Artificial Sequence
  Description of Artificial Sequence: Synthetic probe
agattcccgggtctcgcaagacaacccggttaattacatccatgggatcaagcccgcggaatacctccgattaagctgcgctgatgatcatcgttgtttarataatcttgaacagaagaaaaagaagaatagctttatttcgctgaaacacaatcatatatgctatctcgacgtgcataataatgagagatttatttgacaa

SEQ ID NO: 8696 - DNA, 121 bp, Artificial Sequence
  Description of Artificial Sequence: Synthetic probe
acccccccaagtttggcctggcactcgccctcaagccctgatcagatcattagtgattgayggcggttgaatttcagattatttgattgcttttgggaagatgtggccaataatttgttcc

SEQ ID NO: 8697 - DNA, 121 bp, Artificial Sequence
  Description of Artificial Sequence: Synthetic probe
gccaggaacttactgtatctgaaaggccaggttcccggtcctcaaggcacgctttcttttygttaaggattcaatatacaagaaacccgacagagctttgctgccattccctacatacttc

SEQ ID NO: 8698 - DNA, 121 bp, Artificial Sequence
  Description of Artificial Sequence: Synthetic probe
gcctactggacccttcagctttcacacttgcgtagcatcgttctgaacattggagctccgmgagccagaacatggccctcccagtccgacatgacgccaaacggattctccatccggttat

SEQ ID NO: 8699 - DNA, 121 bp, Artificial Sequence
  Description of Artificial Sequence: Synthetic probe
tggggtgcatccacaggacctggtaatgctggttggtctacctgttcttctgtggtgccaygtttaccattttgctgctcggcggaggggcgatggcggggtcggaggaggcgccgtcggg

SEQ ID NO: 8700 - DNA, 121 bp, Artificial Sequence
  Description of Artificial Sequence: Synthetic probe
ggagtacgaggagcggagccaggaggtgcagggcctgaagcagctggtcctgcagtaccargagcagctgaggacgctggagatcaacaactacgcgctgcagatgcacctgaagcaggcc

SEQ ID NO: 8701 - DNA, 121 bp, Artificial Sequence
  Description of Artificial Sequence: Synthetic probe
cagcaaacttgttctcggggtagaaggacgcaacaactgggttgccaccgaactttcttcygtgcatggcrgtctttgctttggtggaaccgtcgatgtctgcgtactccaagaacacctt

SEQ ID NO: 8702 - DNA, 121 bp, Artificial Sequence
  Description of Artificial Sequence: Synthetic probe
tatgaaatgtgagattttcattggacctgtttattaccaacgtcttcgtcatatggtctcwgacaaatttcaggttcgcaccacaggtcgcatagatcaagtgacaagacagcctatagga

SEQ ID NO: 8703 - DNA, 121 bp, Artificial Sequence
  Description of Artificial Sequence: Synthetic probe
gagaggatcagattagccctcgtgttaactctgtcagaaccagtagctagttacttagtgytgtggcccctatttttctatttctgtgttgctgtataatgttcctaggaggtatgtctgt

SEQ ID NO: 8704 - DNA, 121 bp, Artificial Sequence
  Description of Artificial Sequence: Synthetic probe
ccctgaatctatagtatgggctatggagtatagacagttgacaatgtttcagatctgtaartttgtgctgggaaccttctcgctgctgaagctgatgttcctggagagccctaagcttgta

SEQ ID NO: 8705 - DNA, 202 bp, Artificial Sequence
  Description of Artificial Sequence: Synthetic probe
ccacattacatcttcttcttgtatctcgaggaatgaatctgtgtagatgaacctaagcaaagcggcaaacacttttgcatccacgcctttgatctgtatgmcatttgatgtagtgccttccttcatggggccaaagagttgtgccatgaagacttttgatcgggctgcaagcacagaccggtgtgcagcgaacgtctcgccg

SEQ ID NO: 8706 - DNA, 121 bp, Artificial Sequence
  Description of Artificial Sequence: Synthetic probe
aaactgccaaggatttgaatcctctcgagaattactgttgcaggtttttgcactgctttckggttgtatgcccattgtatttaagtataagtatgcaactcaataaaagatcgtagtggtt

SEQ ID NO: 8707 - DNA, 121 bp, Artificial Sequence
  Description of Artificial Sequence: Synthetic probe
agtgcccctcagtttttatcttacaacaacagcaagccatcgtcgtaacacaagacacgcrggataaacaaagtagtcgcggcggcggctttaactcactctttagacagctaacagcttt

SEQ ID NO: 8708 - DNA, 121 bp, Artificial Sequence
  Description of Artificial Sequence: Synthetic probe
acgcttggaggtactggcaaggaacatggagataggcacccaaagatcggtcagggagctyttcttggagctggtgctactatcctcggcaacataaacgtaggcgaaggtgccatgatcg

SEQ ID NO: 8709 - DNA, 121 bp, Artificial Sequence
  Description of Artificial Sequence: Synthetic probe
tgacgggaagccagaagatgttctaaatccaaagaagaaacagttggacaagataacaccrcatctccgcacggacgaaaatggaatcgcaacattccgaggggtacccttcactacgtca

SEQ ID NO: 8710 - DNA, 121 bp, Artificial Sequence
  Description of Artificial Sequence: Synthetic probe
ccaccccatcggctgtacagggtcggtcgcggtgattgcatcgcgacgaggctgggtagasaaaagaagagcttgttcttttcggtagaaattcagattcatttatttatttgggtgggcg

SEQ ID NO: 8711 - DNA, 121 bp, Artificial Sequence
  Description of Artificial Sequence: Synthetic probe
actagatagcgccgtgccatgtacatctttccttttttcttcttcactgttgtccttgtcrgtggctcaacaatgttcctgtggaattgtttgtagtaacagttgttctctgctttgaacg

SEQ ID NO: 8712 - DNA, 169 bp, Artificial Sequence
  Description of Artificial Sequence: Synthetic probe
gataataattaagtgccgagcttgttccttcaggaacttgattctggtgctgtttcctggcgaccaatctcatgatagcacagtctgtcatccttgccagmgtggtgtggtaactttgctaactctgaacttgtaggagctagcagcgatggtggttaagtaggaagct

SEQ ID NO: 8713 - DNA, 121 bp, Artificial Sequence
  Description of Artificial Sequence: Synthetic probe
ggacaggttcgtagtggcctgtttagcttggacataagctacatattatctacaagaagtrttgaggctgtaatagaagtctttgcagaggttgacagtyctcatcatttgagatccactg

SEQ ID NO: 8714 - DNA, 121 bp, Artificial Sequence
  Description of Artificial Sequence: Synthetic probe
gacagagagtaagaaggtgagctcagataagaaagaggacagttcagagaaggcgaattcygatagcaaagaggaaagttcagaaagcaagggggataccacggaagggaaggctgaaggt

SEQ ID NO: 8715 - DNA, 121 bp, Artificial Sequence
  Description of Artificial Sequence: Synthetic probe
tcgtgtgcaagaggttccacatgaggggcctatgtgtgatcttctatggtctgatccagaygaccgatgtggctggggcatatctcctcgtggtgctggctacacttttggacaggacata

SEQ ID NO: 8716 - DNA, 121 bp, Artificial Sequence
  Description of Artificial Sequence: Synthetic probe
ctccgttgtaaatagaggatctgatataagaagatccagtgatgaagctgcgggtggtttrcaaggaaagagacaaccaagtttttcaggaagtgaatccagctccggaaagttgccacat

SEQ ID NO: 8717 - DNA, 121 bp, Artificial Sequence
  Description of Artificial Sequence: Synthetic probe
caaagattatccccaggaataccactctgcccacctcaaaatcagaggtattctctacggyggctgatggacagacaagtgttgagattaatgttctccagggagaaagagagtttgtccg

SEQ ID NO: 8718 - DNA, 121 bp, Artificial Sequence
  Description of Artificial Sequence: Synthetic probe
ctatcattggcaatggacatcgttcttctcggctgcatctactgccttgtatgtatatctrtatgcaatatactattatcacgtgaagacaaagatgtcaggctttttccagactagcttc

SEQ ID NO: 8719 - DNA, 121 bp, Artificial Sequence
  Description of Artificial Sequence: Synthetic probe
ctgtttttggtttgatcacgctggtggtgaggttgaggaccgagctgaaaaacaatggtamgctttggtctcgccagtcaatggattctggtgacgggaagttggctagagcatatcagct

SEQ ID NO: 8720 - DNA, 121 bp, Artificial Sequence
  Description of Artificial Sequence: Synthetic probe
ccagcacaatgtatgcggccgttcgatatatgcagaggggactgttgatgctgtcttgttyctccataaaaagatacaggatggggcgaacaagaaattatacgatatgatcgatgtgctg

SEQ ID NO: 8721 - DNA, 121 bp, Artificial Sequence
  Description of Artificial Sequence: Synthetic probe
agattacaagggagcgaaagaactgtgtactgaggtcctggaaattgacagcacaaatgtraaggccttgtacagacgggcacaggcgtacactcatcttgttgaacttgatttggcagag

SEQ ID NO: 8722 - DNA, 202 bp, Artificial Sequence
  Description of Artificial Sequence: Synthetic probe
aatgcacgcaacttgatggaatcaaacactcagttaagggatatgttccaaaatccagaatttcttcgccagatgacatcaccagaggctttgcagcaatyactctcattccagcagacactatcatcacagcttggtcaacatcaacctagccaggatggtaacctaggaggcaatggcacaggcacgcggggaaatgttg

SEQ ID NO: 8723 - DNA, 121 bp, Artificial Sequence
  Description of Artificial Sequence: Synthetic probe
gaatacttgtgctttatcgttgtctgatctaaaatcatcttttttttgagaatcatctaakacagcggtagtgtgcatgccaataatttggtgtacaggcgtacagccattctcgcataaa

SEQ ID NO: 8724 - DNA, 121 bp, Artificial Sequence
  Description of Artificial Sequence: Synthetic probe
gttgacgccattttcgaccttgttgtgtactttacagaaagttttcttgaagcacaatttwgttgaaggtatatgttatgaatgggatttctgatcttagttgatcatagagctgcatgat

SEQ ID NO: 8725 - DNA, 121 bp, Artificial Sequence
  Description of Artificial Sequence: Synthetic probe
agtggatgagccatagacgtctgcctagaagatttgagaaggagggttagacatgcagaamggttcacctgggcagctactcaaggagtaaacgaagaagagctcttaagtaatttaccag

SEQ ID NO: 8726 - DNA, 202 bp, Artificial Sequence
  Description of Artificial Sequence: Synthetic probe
tctgatcagtctgccttcccttttttgttgtgttgttgaaattgaccaatcgtgcagagatccatcgaggtacagaatagtatgtgaccaaactggaatgytttctgatctttttgattgtgagatagaagaaagataaaagtctattttaaactctgaactatatataaatgttctctccgattttgaacccctccgtctg

SEQ ID NO: 8727 - DNA, 121 bp, Artificial Sequence
  Description of Artificial Sequence: Synthetic probe
atgctcttcaggaatccatggaattagcgattagatcaggatgtgattttgagttggcgartactttggagtgtgaggggggaacgtcggatcagcctgctcctgagaacacttttgaaaa

SEQ ID NO: 8728 - DNA, 121 bp, Artificial Sequence
  Description of Artificial Sequence: Synthetic probe
cgcccctgtatccgccatccagaggaaggcgggttcagacctcgaggttggtggcatcaargtgccagaaggcacgatcctgaccatccccatcgcgacgatccatcgtgacaaggaggtc

SEQ ID NO: 8729 - DNA, 121 bp, Artificial Sequence
  Description of Artificial Sequence: Synthetic probe
aattaacgataaccagttggttgagctggtcagcaaaatcttcatcgtagctgtctctgcygtggctcttcttggttttgcagtatatggtggaaggctgtttgtcttgctgagacgtttc

SEQ ID NO: 8730 - DNA, 121 bp, Artificial Sequence
  Description of Artificial Sequence: Synthetic probe
atctagaactagcaagggcagaaaatggcgcaaaaatgtgaaggctgtcgagaaggaattrttacttttggaaaatgacatgaatgctctagaagagatgtaccctcaaggagaaaaggct

SEQ ID NO: 8731 - DNA, 121 bp, Artificial Sequence
  Description of Artificial Sequence: Synthetic probe
agttggccttgtcactatgggcaatgttgtagttagtcatacatgcagcgaaccatgtaarcaactgtgtggaactgaaaatgatgtaaccttgtatcagaatcatactcattgctcaaca

SEQ ID NO: 8732 - DNA, 121 bp, Artificial Sequence
  Description of Artificial Sequence: Synthetic probe
accatcacgccgttcagcgtcaagatctcggtcgagatcagtttcttctcattcatcaaakggacgttctccatcaagatcaccagcaaaatccctatcccctattgcatctcccgccaat

SEQ ID NO: 8733 - DNA, 121 bp, Artificial Sequence
  Description of Artificial Sequence: Synthetic probe
cagcactaggagcattgcgccggccgccgcacctagcggtagtattccgccatggatggaytcctccctctgaatcctccatgtactagctgggagcgtttatttttgtatagagtcagtg

SEQ ID NO: 8734 - DNA, 121 bp, Artificial Sequence
  Description of Artificial Sequence: Synthetic probe
gggcagtgaactacaagcggaccatttgtcaggttggccgctctgctgctactgctgctarctttgtaagcgtagcattcttgagttatgcaatatgctccaacctgcttccttgtgatag

SEQ ID NO: 8735 - DNA, 121 bp, Artificial Sequence
  Description of Artificial Sequence: Synthetic probe
tgagtcagaagaggatgattccgacagtgcgtccttggtggaatcagatgaggatgaggakgaggattctgatgaagactccgaggaagagaagggcaaaacctgggatgagcttgaacgg

SEQ ID NO: 8736 - DNA, 121 bp, Artificial Sequence
  Description of Artificial Sequence: Synthetic probe
tcagtaatctttccctacgatgtatctctggtatctcattcatttaggagtagcacaaccrgacaacaattctcttggttagaataagtgctcagcacggaggattgtagtacgatttact

SEQ ID NO: 8737 - DNA, 202 bp, Artificial Sequence
  Description of Artificial Sequence: Synthetic probe
accctgttcacgtccgtgtggttcaggatcttcgtggtgtgcagcgcttcgttcctcacgtttgccacattgtacggcgtgcatgttccgcaacttgtggktgtcccggaggctggcgcccatgccaagaaatcttcctgaacgtcgctgtgtgtaacttttgactggaagctgtgtctcagtatgcattagaactatgttt

SEQ ID NO: 8738 - DNA, 121 bp, Artificial Sequence
  Description of Artificial Sequence: Synthetic probe
atgaaagaccagatgaggtcaacaacgcaatgatggacctgataaaggccactaaatacgygatgaaacctcacgagtggtcgtcccagccagagatcacatcagaaactggcgcacttat

SEQ ID NO: 8739 - DNA, 121 bp, Artificial Sequence
  Description of Artificial Sequence: Synthetic probe
accgtacgcgcccatgaagaagaagccactgaacagcctggttaacgggttctacgcgaayggcaacggcatccaaatctaactgagcagccgccagccgcagcatcgtacaatattcgta

SEQ ID NO: 8740 - DNA, 121 bp, Artificial Sequence
  Description of Artificial Sequence: Synthetic probe
cgaggtaaaccccaagagcgaccttcccccgcttccacgggtgggtgtcgtgttcaatgcygataagtccctggaccgtgtcacgtggtacgggagaggcctgttcgagtgctaccctgac

SEQ ID NO: 8741 - DNA, 121 bp, Artificial Sequence
  Description of Artificial Sequence: Synthetic probe
cgaaagacggttattcgtctagttgacatggaggccagttacctaacagttgaattcttcyggaaacttcccactgaaccagataaaggggctaacaataacactccagccaatgacagat

SEQ ID NO: 8742 - DNA, 121 bp, Artificial Sequence
  Description of Artificial Sequence: Synthetic probe
tcagctgggatgacaagctcccygggacacaggttcttttgtcaagagtaaatttctttgkatccaataaggcatccaatgctgaaaactcgggactcaaatcgtacagagacactgctga

SEQ ID NO: 8743 - DNA, 121 bp, Artificial Sequence
  Description of Artificial Sequence: Synthetic probe
ttacgggcaagcctccattttttggtggtaacagggacaaaattcagcagaagatagtgarggagaagatgaagcttccgtcgtatttgtctagtgaagttcattctttgcttaaagggct

SEQ ID NO: 8744 - DNA, 121 bp, Artificial Sequence
  Description of Artificial Sequence: Synthetic probe
ggggacgtgcatgtacgtagctatgccggattcaccatgggcaacaacaacaacatcatgsaggttgatggactaactgaccatgcggtgaagagaccaaagttttcctccgggatgtcgc

SEQ ID NO: 8745 - DNA, 121 bp, Artificial Sequence
  Description of Artificial Sequence: Synthetic probe
tttccgggagatatgctgggcgttttccatttacttggaggcagtggctattctccctcarttagttttactccagagaagcagaaatgtggataacttgactggacaatatgttctcttt

SEQ ID NO: 8746 - DNA, 121 bp, Artificial Sequence
  Description of Artificial Sequence: Synthetic probe
gcataatggccaggtcacatcactagattttcatccaaagaggacagaacttttgtgctcytgtgatggcaatggtgaaatccgatactggaatgtgactcaaccttcctgtgtgcgtgtt

SEQ ID NO: 8747 - DNA, 121 bp, Artificial Sequence
  Description of Artificial Sequence: Synthetic probe
acggtcgtcgtcaacatacgtggcattaagccccatcatccatgagccaactgatatgtcrtcatgggcatagctctgcagcgatgcactgtttatgttgatgtagcgagccaaattgttt

SEQ ID NO: 8748 - DNA, 121 bp, Artificial Sequence
  Description of Artificial Sequence: Synthetic probe
tttgacagggttctgcattttatcgaaacttctgtatttttgagttcgcttgcaagtagcyaggtaccgttactagttggattgtacgaggaggctatataggcaccaaatgattgtgtaa

SEQ ID NO: 8749 - DNA, 121 bp, Artificial Sequence
  Description of Artificial Sequence: Synthetic probe
accgcatgcggaccgcgcaagtgttctgtgtgtagcttcagccataagcttagcttcaaaytagaatctcatcgtttatgttacagagttacattacagtgcttgttatcataaagacata

SEQ ID NO: 8750 - DNA, 121 bp, Artificial Sequence
  Description of Artificial Sequence: Synthetic probe
cgtatatgggagtactacctcatatactctgcggcttcttgcaagtcaggggcagttagakattaccaggttgttttctctcgtccaggcaacagtcggctcctgcgccttgatggctaaa

SEQ ID NO: 8751 - DNA, 121 bp, Artificial Sequence
  Description of Artificial Sequence: Synthetic probe
tatactttcttaccaggggcagaactaccctgtcaagaaagatctacagtgtgaaactgayaggttgacgcatgtttacacgttcattcttaggcccgacgcatcttatagtatacttgtt

SEQ ID NO: 8752 - DNA, 121 bp, Artificial Sequence
  Description of Artificial Sequence: Synthetic probe
ggctggacctggccgcgcaggaggatcgtttgctgctgcattcctgggctgcttcctgggyatcattgtgctcatcttcggaaacgtcagcaacatcggggcgctgaaggccgccgggcat

SEQ ID NO: 8753 - DNA, 202 bp, Artificial Sequence
  Description of Artificial Sequence: Synthetic probe
gctgtagggggtggttgggtgagtccggagtagtggcttgcccttattggcggcataagagcagtgttgtgctgtacatgagggtcttgttagggaggcaraagctgatattacatttaggcaaacaccagtagcgaaatcctgtgaaatgccagtgagccrgcgagtgtataattcttwaacatgaacctggaagcattga

SEQ ID NO: 8754 - DNA, 121 bp, Artificial Sequence
  Description of Artificial Sequence: Synthetic probe
gcttaacccaccttacactgagtgtgcgtatgctgcacatcttggacaaattcaaatttgwgatttgtggaatgccctggtggacttgaggagggcattagctgatagtaggagttatccc

SEQ ID NO: 8755 - DNA, 121 bp, Artificial Sequence
  Description of Artificial Sequence: Synthetic probe
tccttaaaagtactatgtgaattcaagttagcagagactgtaaatatgtcgaatgctcggstaatagaagatattgcatcacgaactggggctgatgctttggcacgcctgtgtgagaaat

SEQ ID NO: 8756 - DNA, 121 bp, Artificial Sequence
  Description of Artificial Sequence: Synthetic probe
cccaaagaggttatcctgaaggcttccgacaggcaaatactcgtagcagagtaagctctckgttatgtccgcctggatgtatctcccgtcgagctgcaccagtttcttgttggtctcgctg

SEQ ID NO: 8757 - DNA, 121 bp, Artificial Sequence
  Description of Artificial Sequence: Synthetic probe
gcgaaaggagtgtagtttaggtttacgtgatatttggcttccattgtttggacatttatgygtagacatttcacgtgtgttgtacactcttgtagcagcagtgtagctttgaacgtgtatg

SEQ ID NO: 8758 - DNA, 121 bp, Artificial Sequence
  Description of Artificial Sequence: Synthetic probe
ggcgacctatcctttagtgaacttgggctaacgagcaagcaggaggctttatttatagagyagatcactgaatagaggcaaagatttagacgcgactagagatagcatttgagagttgggg

SEQ ID NO: 8759 - DNA, 121 bp, Artificial Sequence
  Description of Artificial Sequence: Synthetic probe
tgggcaggataaggccgggctacccatcggtcttcagttcatcggcaggccgtggtctgargccactctgctccacatcgcattcgcaatgcaggaagcctgcagcaagaaccacagaaag

SEQ ID NO: 8760 - DNA, 121 bp, Artificial Sequence
  Description of Artificial Sequence: Synthetic probe
acgtcacgttttgacaaatagttttccatgcttgttttgtaagaaggatcagtccttgggktgtcgttggttttgaaaagaacaagttgtaagaggttacttagtctgtcataccttgtcc

SEQ ID NO: 8761 - DNA, 121 bp, Artificial Sequence
  Description of Artificial Sequence: Synthetic probe
aataagaaacgcggatgaaaagaccatatcagcaatatcctcagaggtcaagcagctagcygaaaaggcacgatctgggaagcttgctcctaatgagttccaaggggggtctttcagtatc

SEQ ID NO: 8762 - DNA, 121 bp, Artificial Sequence
  Description of Artificial Sequence: Synthetic probe
agttcaaatgtccgtctttcatggggccgcagtaccaaacagcctccccagcaggatgcawgccaggggaatggcaacagctactatggatatcaacagggtcctgatgcttactatgctg

SEQ ID NO: 8763 - DNA, 121 bp, Artificial Sequence
  Description of Artificial Sequence: Synthetic probe
ccagaccatgtggtaccgtgcttgcaacacctgcaacaagaaggtgactgaaggagttggrtcaggatactggtgcgaagggtgccagaagaactatgaggagtgctcgttgaggtacatc

SEQ ID NO: 8764 - DNA, 121 bp, Artificial Sequence
  Description of Artificial Sequence: Synthetic probe
gaaaacaagagtagtggactccaacttcgcaggaatagaaacaattcctcgcagggcttcsacttgaagagagtgtgtcacataggactgtggaataataggcaaagaatctgttaatggt

SEQ ID NO: 8765 - DNA, 121 bp, Artificial Sequence
  Description of Artificial Sequence: Synthetic probe
ttctagaatagaagctgtagttcctgtgcctctttcctactactttgaagtacgaaatttrcccaaaggcaagcatcttgttcagcttcggtctggccttccatcacatacrcacatattt

SEQ ID NO: 8766 - DNA, 121 bp, Artificial Sequence
  Description of Artificial Sequence: Synthetic probe
atggggtcgcaatccagctaacaagcagttgaggagtgataatggaaaccagtggaacaaygggatgtactatgcggcatcgcctttctacaacgggtacggctaccctgcggcgccgttc

SEQ ID NO: 8767 - DNA, 121 bp, Artificial Sequence
  Description of Artificial Sequence: Synthetic probe
gacagccgaggttgccaagacggccatgtgcaaggataagatgacgatcgggacgcggtaygtggagctgttcccgtcaaccccggaggaggtgagcaggtcgaaggttcgaggcaggcag

SEQ ID NO: 8768 - DNA, 121 bp, Artificial Sequence
  Description of Artificial Sequence: Synthetic probe
ggtgcccgtcaacccgatgatggtcaacccgatgatgccgcagctgttcccgaggatccaygcattgagagctggaatctcagatgacgagagctcgatcgcgtcgtcgccctgaccacag

SEQ ID NO: 8769 - DNA, 121 bp, Artificial Sequence
  Description of Artificial Sequence: Synthetic probe
gtcgcggattctcttcaaccaggctttcagccgtggtttggagatctctctgatcctggcrgggaacaaggcgaaccaggagtcgtagaaaagtcctgtgtgctctgcgcctgtgtgtttg

SEQ ID NO: 8770 - DNA, 121 bp, Artificial Sequence
  Description of Artificial Sequence: Synthetic probe
gtttgttcaaagtggctggttgtttgttccagacggccaatggggtttcttggactaaacmtcagttcccttgttgtaggctaaggtgttactgggctgtggacgtatgttaagaagtggg

SEQ ID NO: 8771 - DNA, 121 bp, Artificial Sequence
  Description of Artificial Sequence: Synthetic probe
tacttgcccaacaaggtaaggaagatcggaaaagttgcacgagcaattgctattatgagcmacccaattccaagcgcaaatgattcccactcggttcagattattttaccacaaaagcaac

SEQ ID NO: 8772 - DNA, 121 bp, Artificial Sequence
  Description of Artificial Sequence: Synthetic probe
gctaccccctcccaccgccaacatcacccagctcacccagctcttcgccgcagtgaacctygacatcaaggacctcgtcgtcctctccgccgcgcacacratcggaacgtcgcactgcttc

SEQ ID NO: 8773 - DNA, 121 bp, Artificial Sequence
  Description of Artificial Sequence: Synthetic probe
tgtcgcttttaggttgatgaaaaggcttgatagtcaagccggaatgtttttcctgggttgwgaaactctgtgtgtgacattgatctacatgtttgccatggatttgttgtcggacacattg

SEQ ID NO: 8774 - DNA, 121 bp, Artificial Sequence
  Description of Artificial Sequence: Synthetic probe
tataacccctccctctcttccggttcgttttgtctgccatatttcagggttttgctaagcmgtttgcagttttgcaccaaacttgtatcctagcgtatacatttgatccgtgtacatcaag

SEQ ID NO: 8775 - DNA, 121 bp, Artificial Sequence
  Description of Artificial Sequence: Synthetic probe
caataaggttcatagagctaacgctgaacgagaaatccttgatatgttggatcacccattycttccgacattatatgcgtcatttcagacaaagacacatatatgtctcattacagactac

SEQ ID NO: 8776 - DNA, 202 bp, Artificial Sequence
  Description of Artificial Sequence: Synthetic probe
cacagatggacgacaagcttaaggctgcatacaaggccacgaccgagggtaagttcccagaagcgctgaggcagttcctcaacatcctatacaccatccckctccttgttgtggactcgcggcgagaggttgatgaagtgaaggagctcattgagatagtgagggagtacgtcctcggcctcaggatggaagtcaagaggaa

SEQ ID NO: 8777 - DNA, 121 bp, Artificial Sequence
  Description of Artificial Sequence: Synthetic probe
atggattattcacatattgaactagaagcgttcatcagtaccaagagctgatatcttcacwtcctaagggtgccactgcgaacaacctcctaacaaaaattgtttagacgattctagtata

SEQ ID NO: 8778 - DNA, 121 bp, Artificial Sequence
  Description of Artificial Sequence: Synthetic probe
tgtactatgagttacttcacaacaggaattgcaacagatactcagctatagagagtagtcrgcgataatttgatgcccattcggtggaaggratcagcttaaaagactgccatattcttat

SEQ ID NO: 8779 - DNA, 202 bp, Artificial Sequence
  Description of Artificial Sequence: Synthetic probe
ttacgagaacctgccagtccccgaatgcgacggtctgcactgacggctcaaagtttgtcagctgggacggcgtgcaccttacagaggcagccaatgccgcygcggctgcagccatactgacctctgcatactccatacccaagctcaagttcgatcagttctgcaaagcctgatttgttcatactacatgtactatatacta

SEQ ID NO: 8780 - DNA, 121 bp, Artificial Sequence
  Description of Artificial Sequence: Synthetic probe
tggtccgttcccattccacctgtttggcgcactagcacagagcttgaagcgtgaccactaygttagcgacaccggagacatactctactaccaaactgacccaaaaatcgcyggtgrtgca

SEQ ID NO: 8781 - DNA, 121 bp, Artificial Sequence
  Description of Artificial Sequence: Synthetic probe
tgttctcacaatcgtagtccttatacacgttacgagcaatttaaactacagatgttgtgartggattttcttgggagatcagcatcgattgtgtacaaaattggatggtcaaaaaggtcca

SEQ ID NO: 8782 - DNA, 202 bp, Artificial Sequence
  Description of Artificial Sequence: Synthetic probe
aattgataaacgacttctgaagatgggagatatgattgcttctggttcttgtgggtgacctgttccatgggacttactttggcgaggatgttgctgttaargttttaaaagccgagcatttgaataagaatgtttggaatgagtttacacaagaagtatatattctaagggaagttcaccataccaatgttgttcgattcat

SEQ ID NO: 8783 - DNA, 202 bp, Artificial Sequence
  Description of Artificial Sequence: Synthetic probe
ggttctactgtcagcgagaagatggggagtgcggatgtagccccccgtttctgaaaatgcggtaaaatttataatcgtttagttgaagataaattgttgtygtgtttgtcaacttgtcatctgcggccggtgccaaggcaggactagatttgatgcaaacatttgctcctgcccttgtttctcctattactactaataagat

SEQ ID NO: 8784 - DNA, 121 bp, Artificial Sequence
  Description of Artificial Sequence: Synthetic probe
cgacaactcctccgttgttgatccccagattcaatggcagggacattgtaagtttgagctyggtgaaggctattcgacatctacagctcatctctacacctcgtgtgcatattccagatag

SEQ ID NO: 8785 - DNA, 121 bp, Artificial Sequence
  Description of Artificial Sequence: Synthetic probe
caaagttcttgaacgggataatgctgcagctgcacatgctccaactacaacctcccggtcwattgacgttggcaaaagcgcttcggatgaacaggtatgccccatctgcctaacgaatcca

SEQ ID NO: 8786 - DNA, 121 bp, Artificial Sequence
  Description of Artificial Sequence: Synthetic probe
gggcaagttcacataaacacttgagaggtctggaaacacactggatagaaggagcatagcwcgaattgcgtcgtccgttttagcagctacagctagtaggatgcttaactggaaatcgatc

SEQ ID NO: 8787 - DNA, 121 bp, Artificial Sequence
  Description of Artificial Sequence: Synthetic probe
tgttaacaatagctctaccaatgaagatggccagccgaaaattgttatggttctggcagcwaccaactttccatgggatattgatgaagcactcaggcggaggctggaaaagcgtatttac

SEQ ID NO: 8788 - DNA, 121 bp, Artificial Sequence
  Description of Artificial Sequence: Synthetic probe
aatgatttctaagtctgcggcaaagtcatgactcgcgaccaggatttacaacatggatgayctgatgaattcattaatattcccacttcttcagctccataccatcaggggggctcccttc

SEQ ID NO: 8789 - DNA, 121 bp, Artificial Sequence
  Description of Artificial Sequence: Synthetic probe
gaaatatgtactacgtatactaaaaattctaagaattttttgatgaaaaatgagagaatastaggccacctaggtaagcgtgcgcgcggagtaatttgaaacagagggagtatgtcacaac

SEQ ID NO: 8790 - DNA, 202 bp, Artificial Sequence
  Description of Artificial Sequence: Synthetic probe
acacggtagaatttaacctcgaggaagctctgaatacggtcctaatgcaaggcatgtctctgagcaaggaaaagcaaatttctcttgaccgtgattggccygtagaagtatcatctatgtacctctatggggataacttaaggcttcagcaagtcctagctgactacttggcgtgcacgcttcaatttacgcaaccggctga

SEQ ID NO: 8791 - DNA, 121 bp, Artificial Sequence
  Description of Artificial Sequence: Synthetic probe
tgcatgcaaaggtgttctcagaggtttgcatagtaacaaaattgttgaaagagagctggaycgggcaaagaggacactgctaatgaaacaygaggctgagacaaagacaaatgcctattgg

SEQ ID NO: 8792 - DNA, 121 bp, Artificial Sequence
  Description of Artificial Sequence: Synthetic probe
ccaatcaacaccagtgctccttgttctccctgtagtaaccttttatttccacaaatactgyaagaaccgctttgaacctgcttttgtggaatatccattacaggaggcaatgaggaaagac

SEQ ID NO: 8793 - DNA, 202 bp, Artificial Sequence
  Description of Artificial Sequence: Synthetic probe
tggatgccgagatggagattaaggagcactactttgaggtttgtgacattataaatggtttattcgtagcaatattcaaacacctgaatgaaaattgccaraaggaactcgagacaataaataggcagtatccgtttgaaccgctgaagtacctagagaaaacattgaagctaacatacgcggaagggattcaaatgttgaa

SEQ ID NO: 8794 - DNA, 121 bp, Artificial Sequence
  Description of Artificial Sequence: Synthetic probe
tgttggcctaaccattcagggaaataagccggaagaattgcctgagcaggtcttatgctgygttaggttgaatgggatagattacgtgaaatatcagccactgatgacaaatggtgcctga

SEQ ID NO: 8795 - DNA, 121 bp, Artificial Sequence
  Description of Artificial Sequence: Synthetic probe
gctggtatgagtgtgcattcaagtcatctgtcaacagaaaatgcatggccaccggtatcargcacaccaattcctgagggaacacatagtcgctctgacaggagggctgcagcacttgcca

SEQ ID NO: 8796 - DNA, 121 bp, Artificial Sequence
  Description of Artificial Sequence: Synthetic probe
gatcgaggcgcactacaagaggctcatcgaggaggacccctgcaacggcctcttcctccgsaactacgcgcagttcctctaccaggtgagaggggaccgcaggcgggcggaggagtactac

SEQ ID NO: 8797 - DNA, 121 bp, Artificial Sequence
  Description of Artificial Sequence: Synthetic probe
tacgtgtacaagagactggacgcttggtccaaggagtacggggagttcttcaggccctgcsaatatttagcttcgagagctcgtcggggtgcatccttggctgccgcaggagccaagccgc

SEQ ID NO: 8798 - DNA, 121 bp, Artificial Sequence
  Description of Artificial Sequence: Synthetic probe
agctacaaaccaagagatggccaggtggtctcgatctcgatccatcctgtgcccatgcatrcggatccggatctcgtacaattctacattgccacttgaatccttgatcgatacccctgcc

SEQ ID NO: 8799 - DNA, 121 bp, Artificial Sequence
  Description of Artificial Sequence: Synthetic probe
cacttggtgctcatggtgtttgcttaggaactaggttcgtagctaccgatgaaagctttgygcatcctctgtataagaaaaaactaatcgagatgaactacacggactatacaaatgtatt

SEQ ID NO: 8800 - DNA, 121 bp, Artificial Sequence
  Description of Artificial Sequence: Synthetic probe
aagggtcttggcgtccttgaccttaacctcatggtgcttccactgtccgtgaacagtgtcrtacttgaacatgtatgtcatgtagtcggtggtgatgaagggtcgttgacggcgacgagct

SEQ ID NO: 8801 - DNA, 121 bp, Artificial Sequence
  Description of Artificial Sequence: Synthetic probe
gccttatgcttttattaagtttgatacatacatacagaagactaagaaactctatttggayaccagaactcaaaggaacattgcaaaattgaatgatgagctctatgaggtgcaccaaatc

SEQ ID NO: 8802 - DNA, 121 bp, Artificial Sequence
  Description of Artificial Sequence: Synthetic probe
gcaaagagtgtcctgttggaatagcacacagcaaatgcaatgaaattcatgatgatcctgrgatatccgatgagattagggatgtacaggtacaccgatgggccctctttagctgacgtcg

SEQ ID NO: 8803 - DNA, 121 bp, Artificial Sequence
  Description of Artificial Sequence: Synthetic probe
tcatggtgtgaaggtttacatatactcaagtggcagtagagaggcacagaggctactattyggcaactcaacctatggtgatctgcgacaatacttgtgtggtttttttgacaccacaacc

SEQ ID NO: 8804 - DNA, 121 bp, Artificial Sequence
  Description of Artificial Sequence: Synthetic probe
ggaaaggctcaacgccctcaactcctctgctggtgccgctgatgatgacgaggacgacgaygagtgaagattgttgtcaactgcagcagcgtagtcttgcaacgtgcatttttgttaaagt

SEQ ID NO: 8805 - DNA, 121 bp, Artificial Sequence
  Description of Artificial Sequence: Synthetic probe
ttgatgacttgactcgctgtagccagagtaaaatcaggccatctttgttcttgcggaggamagggttgagcatttctatgaactaggtttagctgtacagtacccacagttgacggcagtg

SEQ ID NO: 8806 - DNA, 121 bp, Artificial Sequence
  Description of Artificial Sequence: Synthetic probe
tgcaacggaggaaggtgcagcatctttgacatcttcgtcgagcatgtagacaaggttatayttggcttcttgcttgaacttcactagagttgagctgtttgtcgactgaatcatgactttc

SEQ ID NO: 8807 - DNA, 121 bp, Artificial Sequence
  Description of Artificial Sequence: Synthetic probe
aatcctggggctggagacgaatctaggtacgcttcggatccaattgctgcctaattgcgcrccccgttccgtggactacttcatcgagctcttgggcctgcacaactgcgctgggtgcaga

SEQ ID NO: 8808 - DNA, 202 bp, Artificial Sequence
  Description of Artificial Sequence: Synthetic probe
gaattcacgactcatcgaggagaactgaagcacagggccccgagcttccgcgacgagcggctgatacggctgaactctgtccacatgacgagacagttctyccggatctcttcttttgctcctccacggcacggatctttgtaaggagatgcgaggagcaatctttgtggcacggatctccaggcgattggtgcaaaataca

SEQ ID NO: 8809 - DNA, 121 bp, Artificial Sequence
  Description of Artificial Sequence: Synthetic probe
tccgagcaatcaatcacctcaaaccatttgtacatctatcggggaggggtcaactatcaaygtataacaaggcatgctatcgaagcttcgactcgttggtcttgctgctccggaagtttga

SEQ ID NO: 8810 - DNA, 202 bp, Artificial Sequence
  Description of Artificial Sequence: Synthetic probe
gctatggaagctggttatatggagaaggttgacgagctttgcgaacgatactctcttgaaggttatgtcaattctttggtcccagaagaagtcttctgtcrgtctgactacttagatctgaagaaattgattttagaagaaattgtgtgggttgatgagatcaagggactacttaaatgcaacaagttatattgaagcttgt

SEQ ID NO: 8811 - DNA, 121 bp, Artificial Sequence
  Description of Artificial Sequence: Synthetic probe
gtgtctgcgaagtacaaggggatgttttccttttggggtcagaaccaactagcttcttgakcatatttgtgatctctttgagtgtgctattcacaagctgcttccgggtatcaggctacca

SEQ ID NO: 8812 - DNA, 202 bp, Artificial Sequence
  Description of Artificial Sequence: Synthetic probe
ctgcgataccagccaacttagtctgttcagttatactgataggattcgacacgattcttcttctctgtaatcttgtttggtcactgtatatagaaacgtcsgcgtgcaaacattgtggtgttgtcctgctgaatggtataaacggcagygaacaactagaatgtcgacagaggacccawttkggagtatcttgtatcttcag

SEQ ID NO: 8813 - DNA, 121 bp, Artificial Sequence
  Description of Artificial Sequence: Synthetic probe
gatctatgttttgatgattcgtaatacaacagattaactttctccctgttattgcaatgcmtgaattgagctattgctgatatttattgcaatttgtaaagggattttcatttcctttgat

SEQ ID NO: 8814 - DNA, 121 bp, Artificial Sequence
  Description of Artificial Sequence: Synthetic probe
acactgggataagctactacctgatgagataaagcaaaaggtagaggctaaatttaatgarttgggggacatgtgcgagaggggggagcttgaacctgagcaggcttatgagctatttaaa

SEQ ID NO: 8815 - DNA, 121 bp, Artificial Sequence
  Description of Artificial Sequence: Synthetic probe
accgtcgttcgtagaagtctgcaatgagaagaagaaaaaccctgactagatgttattatcyagtgtaatttcagtgtgtcgagactctttagatgttaattcgtcgtatttcgtggattat

SEQ ID NO: 8816 - DNA, 121 bp, Artificial Sequence
  Description of Artificial Sequence: Synthetic probe
ccttcagctcattgaggtgggtttcagctacccaggtcggcctgacttcaagttgtcagaygttgatgttggcattgacatgggaacacgtgttgccattgttgggcccaatggggctgga

SEQ ID NO: 8817 - DNA, 121 bp, Artificial Sequence
  Description of Artificial Sequence: Synthetic probe
cattgctcctaactggtggaagccatttaaatataagttggtatgccctctaatcgattcragagatggatccatatatggggcacttctagaatgggaccagctcgctgctctatcagac

SEQ ID NO: 8818 - DNA, 170 bp, Artificial Sequence
  Description of Artificial Sequence: Synthetic probe
tccgatgtctcggatgtgcagctgtgcggttcaccattgatgagcttcacctgaaaggagcaacgaattgattgttcctccaggagcgggaagggttgtcrtagccggttatgacttgtgcgtttcttggacgttggggttagagtggtgtctctctgttgttgttgatg

SEQ ID NO: 8819 - DNA, 121 bp, Artificial Sequence
  Description of Artificial Sequence: Synthetic probe
gggtctcacctggggtgcatcaaagcttgttgccgtgggttatggcatcaagaagctgcasattatgatgacgatcatcgatgatctcgtctctgttgacactctggtcgaggaagtactc

SEQ ID NO: 8820 - DNA, 121 bp, Artificial Sequence
  Description of Artificial Sequence: Synthetic probe
gcaaaatgttcaccgtaatcaggacatatcccagcagctcccctttatgatcatgacatgrcggttttggtgcatggcatgcttgtttgattgctcatgtaccacctgtgtgtaaagatta

SEQ ID NO: 8821 - DNA, 202 bp, Artificial Sequence
  Description of Artificial Sequence: Synthetic probe
tgtcctctcttacaggatgcgctccaggccgaacaaggggtcttaagatacattcagctaactcaattgacaatggtttgaaggccattagatgacccaakatattcagtgttgactgatgattttttccagttagtgagatgaaagcttcagaaacatcttagttagggaaaaaagggaacacaaagtgggaattcatttc

SEQ ID NO: 8822 - DNA, 121 bp, Artificial Sequence
  Description of Artificial Sequence: Synthetic probe
actttcttcagctaccggtgcttggttattgctggaagtcgatccattctgcagcacctcrtgatggttctggtccacagtgctactagggccagctggttcatgcaggcccaggcctcca

SEQ ID NO: 8823 - DNA, 121 bp, Artificial Sequence
  Description of Artificial Sequence: Synthetic probe
cttcaaaggatgctttgatgacacgaacttgacaaggttgaggaaagaagtaaagatggayggcaatgatggtagcctatttaactttgaccccaagtctatggactggcaccaatatctc

SEQ ID NO: 8824 - DNA, 121 bp, Artificial Sequence
  Description of Artificial Sequence: Synthetic probe
gctttatgctggtttaacgcctactcttgttgaaatcataccgtatgctggcttgcagttyggttcatatgatactttcaaacgttcgatgatgtcatggaatagatacagacatggaaat

SEQ ID NO: 8825 - DNA, 121 bp, Artificial Sequence
  Description of Artificial Sequence: Synthetic probe
ggcaggtgttgctcttagcaaaacgcttccaaagcttcatgatctcgttgagctgtacctsagtgacctcaacctcgagaacgagggtacactagcaattacggatgtcctcaaacagtca

SEQ ID NO: 8826 - DNA, 121 bp, Artificial Sequence
  Description of Artificial Sequence: Synthetic probe
ccagacctgcttttggatctgctgttgttttactctcttctcctgcatcaacttctggcgrttctcatagaacgtgaagtcttccaggatagaggtcttactgacatgctccttgaatatc

SEQ ID NO: 8827 - DNA, 202 bp, Artificial Sequence
  Description of Artificial Sequence: Synthetic probe
agcaaagaagttactttaagagcacatctgttttcgacaatctccttgttattgacatggtagctaacagaggaaaagtgaacgaaaaacggaacacctgsttctcatatgcaatttccagtcagcacatcagcgttcggccatggttctaatttgcaggcttccctcatgcccttagctcaacataggaccccgagatccc

SEQ ID NO: 8828 - DNA, 121 bp, Artificial Sequence
  Description of Artificial Sequence: Synthetic probe
acgccatactgttcttcaaatctgtgaacttggtgcagcttgacatcaaaggaaatgcagytgccgacaacttcaggactgttgtgacgacactcagtccttctctgaaatggcttgatgg

SEQ ID NO: 8829 - DNA, 121 bp, Artificial Sequence
  Description of Artificial Sequence: Synthetic probe
agacccattttccctttcacctgatccaaattaccaagatgaaaacctggacatacttggygatgatgacaatggctcacccaataacatggcctcagcagaaggcgcatcttatcgcagt

SEQ ID NO: 8830 - DNA, 121 bp, Artificial Sequence
  Description of Artificial Sequence: Synthetic probe
gagtagaacacattgtttttctgtttgcacataggcacttggtgatggctaaacgtcaagrccatatattgttattatacacacaaagcataggttgttgttctcttctctgctggatatt

SEQ ID NO: 8831 - DNA, 121 bp, Artificial Sequence
  Description of Artificial Sequence: Synthetic probe
tgccatgtccaatgctcaggcctacccgcaagtggcgtacgacagcaacggccgcgcagtstactacaccggccttctccctcagtacccttcgcccgtcaacggcatgtcatcctccgca

SEQ ID NO: 8832 - DNA, 202 bp, Artificial Sequence
  Description of Artificial Sequence: Synthetic probe
ggctgaaatcggaggaggagatccgccagctcagagagcgccttgagaaggcccagctggaaaacgaggagttccgacggttggcgacgagtaacaagtgygctattctgtgagacggatgtctctccggaaagttcatcggatgcgcgcggatgctttggtgcttttgttaatatagggtgctagtaatcttaagccggty

SEQ ID NO: 8833 - DNA, 121 bp, Artificial Sequence
  Description of Artificial Sequence: Synthetic probe
tcattggaggtggtatagccaacttcactgatgttgctgcgacatttaatggcatcattcrggcgttaagagagaaggaatccaagttaaaggcgtccaggatgcacctatatgttcgacg

SEQ ID NO: 8834 - DNA, 121 bp, Artificial Sequence
  Description of Artificial Sequence: Synthetic probe
ttgggtcataacttgctgcaaccatcattctttttaccgggtgttaatctctatgtacttrcatgaggttaaggcacttaagctggactgaggtttccttggtggtctatttgtgtgtgct

SEQ ID NO: 8835 - DNA, 121 bp, Artificial Sequence
  Description of Artificial Sequence: Synthetic probe
ctggttccgttacctcctttactctgcagcaagtcatacctaatctatcagtagtagtcgmcgtagtagtgtttcctgtgttactcgtgtcaagaagagggatctgcctgtgatccgtgag

SEQ ID NO: 8836 - DNA, 121 bp, Artificial Sequence
  Description of Artificial Sequence: Synthetic probe
tgcatcaatgttactcttgtccttgtccttcacctggaaggctttggcaccttattcaggmactcttgctgtcgttggcactgtcctgtatgtgctgtcttttgctcttggagctggccct

SEQ ID NO: 8837 - DNA, 121 bp, Artificial Sequence
  Description of Artificial Sequence: Synthetic probe
gaacgttcattcctgtgagaactggcttccaagaagggtgatgagtgcgtggcgcatcgcyggaattgttcatgcgttggagggatggaaccagcatgagtgcggagacacggtgctagac

SEQ ID NO: 8838 - DNA, 121 bp, Artificial Sequence
  Description of Artificial Sequence: Synthetic probe
catggagctctgtgaccgacaggaagcattgattcggttcatcatgggattcagatcattrcttagagttagcattctccaattgtggttgtaactggcagatgttgtttctagtttttta

SEQ ID NO: 8839 - DNA, 202 bp, Artificial Sequence
  Description of Artificial Sequence: Synthetic probe
acgtacagatgcaaccttgttggccacatatgcctgtacagccactacactctgtcccactatcagtgcaactgcaacaacatccaatggagggtacagcrgcaccacagtatgttcataacatgccaagcgacaagtcaagtacaaatgaccgattccaggagccctcaacatctgctatgccatcagatagcaacaagag

SEQ ID NO: 8840 - DNA, 202 bp, Artificial Sequence
  Description of Artificial Sequence: Synthetic probe
cccaatgtccacaattgaattcaagcccaatacagctgatgatccccacatgagaaaaccagatattaccaaggccaagaagctgctaggttgggagccaraggtctctcttaaggaaggtcttcccttgatggttacagatttccgtcaaaggatcttggatgagtaaacaaagcaaactgctctgaatgatgctgggaat

SEQ ID NO: 8841 - DNA, 121 bp, Artificial Sequence
  Description of Artificial Sequence: Synthetic probe
tagggagatcaggaagatactgacagagagggcaaggaacttcaacattgcccttgacgaygtgtccatcactagcctgagcttcggaaaggagttyactcatgccattgaagccaaacag

SEQ ID NO: 8842 - DNA, 121 bp, Artificial Sequence
  Description of Artificial Sequence: Synthetic probe
gccaggagttggccacagaatgaccgtaaacatggtgaagcaagcaagcgattggtttgaycgcttcctgtaggttcttgatggatctgtcaaccgaatgccggctcccattgtacttaat

SEQ ID NO: 8843 - DNA, 121 bp, Artificial Sequence
  Description of Artificial Sequence: Synthetic probe
gcaacggattcaggatgtggtacaagtgcctggggattgatagcagcagcggatcagagtkgctccgtcctagattgatcgagggaacatggctcggtgtctgaaaagcagatggcagcaa

SEQ ID NO: 8844 - DNA, 202 bp, Artificial Sequence
  Description of Artificial Sequence: Synthetic probe
tcggcctaaatgtcgtcgatgtcgtcgccctctcaggtggccacaccattggcttgtcccgctgcaccagcttccggcagaggctgtacaaccagtcaggkaatggcctggccgacaacacgctggatgtatcctacgcagcgcagctgagacaagggtgcccaagctccggtggtgacaacaacctcttcccgctcgacgt

SEQ ID NO: 8845 - DNA, 121 bp, Artificial Sequence
  Description of Artificial Sequence: Synthetic probe
aagaaaagaaaaaacagaggttatacaccgaagtccctggtctgctttccaaactcccttsgatgtgcctgtacatgatgatgtaccctcagtgattttgcataaatgtagaccaggaatt

SEQ ID NO: 8846 - DNA, 121 bp, Artificial Sequence
  Description of Artificial Sequence: Synthetic probe
gctggagcagctcgagaacgtcgaccacgacttctacgccttcaggaacgagcagaccggygaggtgaacatcctgtacaagaggaaggagggagggttcgggctcatcatccccaagcag

SEQ ID NO: 8847 - DNA, 121 bp, Artificial Sequence
  Description of Artificial Sequence: Synthetic probe
cctggaacttgacagcattgtcagttattcgggacatccagggatatttcttctttcgatrtcgtgttgacgtaattgtaattctgtaagtgacatcagttggacaagcgcaggttttctt

SEQ ID NO: 8848 - DNA, 121 bp, Artificial Sequence
  Description of Artificial Sequence: Synthetic probe
caagtgcaacagctgctactgggaggtcagcaaggacctccacgacgccggcgtctgggargactgcatcgacgactacccgccggagaccatggtcaatccgtacacggagaagttcgga

SEQ ID NO: 8849 - DNA, 121 bp, Artificial Sequence
  Description of Artificial Sequence: Synthetic probe
gagagattggttgctgtgggtagcatatctcttaatcgtccatttttattcttccattgaytcttagatcatagtcaatatgctcgctggggttataagattatgatcctgtcctgtaacc

SEQ ID NO: 8850 - DNA, 121 bp, Artificial Sequence
  Description of Artificial Sequence: Synthetic probe
gccattggccaggtatcttgcagagaagaccaatacaactaaacctgtcctagagaaatgygacggagagtgccaactaaaatcaactctcctggaaggagtgtttgtgggactagtgctg

SEQ ID NO: 8851 - DNA, 121 bp, Artificial Sequence
  Description of Artificial Sequence: Synthetic probe
gcagatgaagtttgatgcaagctggttgacgtacatgtggacattttgtgatccgtggttygctgctttgagaaacttctgtgtagaagaccgcgtcggttggtttgaggttcattttgta

SEQ ID NO: 8852 - DNA, 121 bp, Artificial Sequence
  Description of Artificial Sequence: Synthetic probe
tggaatggtcatggactgtaacttatgtgtgcggagtaactgtgagtttgtgagctgctgycagattagaaatcccatggttgggctggactgaaccgttgttgtcgtctccagaataaag

SEQ ID NO: 8853 - DNA, 121 bp, Artificial Sequence
  Description of Artificial Sequence: Synthetic probe
ggaataaaaatatttgaccacaatggatctctccagtttaagaagatgtttgaaaacaagytgtatcaggctgactggaaacctgaagcacctgaaagatttgatgacattgctgacctca

SEQ ID NO: 8854 - DNA, 121 bp, Artificial Sequence
  Description of Artificial Sequence: Synthetic probe
ccaactaaacagccgatgcttgacatttgcggctttcgagccccatcccctatactcatamaggctagttgaagtgtacacacatctcggaattctttgaaatgaggactccagagggaaa

SEQ ID NO: 8855 - DNA, 121 bp, Artificial Sequence
  Description of Artificial Sequence: Synthetic probe
catagcttgacttgttgccgcattcattgtttttgatgatcacacatctacacatcgtcgytggtgcctttgctggtcttctcttgaatggatgaagatggagtgcattagctattcaccc

SEQ ID NO: 8856 - DNA, 121 bp, Artificial Sequence
  Description of Artificial Sequence: Synthetic probe
agattatatttattgctcatgtctccgtattgtaagctgtttgcgtgacaggttagcttckaagtacttatcctagttttgcaagctacagctgggcaaatagagctatgccatacctgtg

SEQ ID NO: 8857 - DNA, 202 bp, Artificial Sequence
  Description of Artificial Sequence: Synthetic probe
atgcgacaaggggtgctatgcgagcagcgttttgaccgcaacatatctcagacgatgataggtttcaaacgtaatcccatggatagatcgtgccataaacraaagtatatgtttgcgttgactagttggccctgactataatcttaagctggcataggttactgtgatgaagtgacattgtatgacttgtccactttcctta

SEQ ID NO: 8858 - DNA, 121 bp, Artificial Sequence
  Description of Artificial Sequence: Synthetic probe
gaccagaagcctgctgctggcaagtaaaatgatccagatgcctggagatgggagtggtaayctgagctaattgctaattttgaagaaggcgtggaaggctgctcaaccttgttgcgaggaa

SEQ ID NO: 8859 - DNA, 121 bp, Artificial Sequence
  Description of Artificial Sequence: Synthetic probe
gaaatcccctgacgaaacttgtggagagcatgaacgaggacaatgatgatgaagaagatcraaaggagttctccatgcattcatctcatcggatcccgtcttctgagttcaatactcccag

SEQ ID NO: 8860 - DNA, 121 bp, Artificial Sequence
  Description of Artificial Sequence: Synthetic probe
atgctgtcgttgctgctaagttgtgtctctagtatggttgctgtaataaaataaagtcgtygtttcctggttagtgcatcctgggaaagcacgcagtactgtgtttcttttcggccttcca

SEQ ID NO: 8861 - DNA, 121 bp, Artificial Sequence
  Description of Artificial Sequence: Synthetic probe
tctgcagttttgatgaacttggartcaagagctgtagcatgtgaagacattgcgaggcagrttttgacttatggtgaaaggaaacccattgagcacttcttgaaggatcttgaagcaatca

SEQ ID NO: 8862 - DNA, 202 bp, Artificial Sequence
  Description of Artificial Sequence: Synthetic probe
ttgaagctttcaaaaatatgcatgtagatgaagaggaggatgcacatgaagaggatgtacatggaggggaggagctaacaaacgaaaatgataacgttcaygaggttttcgaagatgacggtgtagaagatagccaagaggatgctgttgaggtcgatgctgatggttctactgatggcactatccatgtgaatggaaatga

SEQ ID NO: 8863 - DNA, 121 bp, Artificial Sequence
  Description of Artificial Sequence: Synthetic probe
atgggggccgctctttgggaagctcttctttgcgttctgggtgattgtccatctctacccrttcctcaagggtctgctcggaaggcagaacaggaccccgacgatcgtcatcgtctggtcc

SEQ ID NO: 8864 - DNA, 121 bp, Artificial Sequence
  Description of Artificial Sequence: Synthetic probe
agtagagattccccggctgatcgagcagatttgggatcggacgagaagagaataaggttaygtggatcgatcggaaggtcgtgcctcgaccgatcgtgtacgattttcttgtacaacaata

SEQ ID NO: 8865 - DNA, 121 bp, Artificial Sequence
  Description of Artificial Sequence: Synthetic probe
cttgtttccccgcccttgatagagaggacatctggtgaatacttggtaaagaatggtgtgygcacatttgcttgcagcgagacagtgaagtttggtcatgtcacatttttctggaatggaa

SEQ ID NO: 8866 - DNA, 121 bp, Artificial Sequence
  Description of Artificial Sequence: Synthetic probe
caccttcaccgcaactgggaatgaggggaagatggttgaggcagtgaatggttcagatgtkgttactacttacgaagacaaggatggcgactggatgcttgttggagacgtcccatgggag

SEQ ID NO: 8867 - DNA, 121 bp, Artificial Sequence
  Description of Artificial Sequence: Synthetic probe
cagcagctgtttgtcgacatgttccagtctgatcttgactcgggattctgcaatagatccrccaaggaccagtatgatccgtttcaaggacagactcgaacatcctcgacttctccttcgt

SEQ ID NO: 8868 - DNA, 121 bp, Artificial Sequence
  Description of Artificial Sequence: Synthetic probe
aaattatagttaaattggaggagattgcaaacgtcaagagcttcgcggtgcggaagaaggrttggcgggtcagcctagagggtacaagggaaggagttaaggggccactaacaattggggc

SEQ ID NO: 8869 - DNA, 121 bp, Artificial Sequence
  Description of Artificial Sequence: Synthetic probe
tctgctcgttaacttctttgagaattgccagggagaccccagccactggaccaagatctcmctgggcggacttcagcgtatcgaggagaaatacacctggaagctttactctgagaggctg

SEQ ID NO: 8870 - DNA, 121 bp, Artificial Sequence
  Description of Artificial Sequence: Synthetic probe
agcaaattagacggaacccaaatcataatgttcgccaccacggtataaattaatccccttyacctttgggggatcaccttttgtgggggtggactttgaagggttcccaacacaggctgtg

SEQ ID NO: 8871 - DNA, 121 bp, Artificial Sequence
  Description of Artificial Sequence: Synthetic probe
tgtcgaattggcgtcctgtacatctgtagatggtgcacaagtcgcgtgtagacgttgtgcrtatgtgccctttcttttacagtatttacttttgtcgataccatagtcttttgtgctgact

SEQ ID NO: 8872 - DNA, 121 bp, Artificial Sequence
  Description of Artificial Sequence: Synthetic probe
taggtaaacagatgctcggcaacggttcctcgacaaccctggtacacgagaatgggcacgsgaagaagcaagccaatggtagcacagcaaatggaacctaccatgccaacggcaagcactg

SEQ ID NO: 8873 - DNA, 121 bp, Artificial Sequence
  Description of Artificial Sequence: Synthetic probe
gctcaccgacgacgaccgcaccaagatcgcccagtttccacagaagaagatcgtcaaaacygccgacggaatttctcgacggaggggagttcacgtcagttgaccttgcagacatcgaaat

SEQ ID NO: 8874 - DNA, 121 bp, Artificial Sequence
  Description of Artificial Sequence: Synthetic probe
atatttcaagaagagacagaatgtctgaaggctcagctagatagtatctgcacaaaggatraaaaacttactgccgcagccaagacatttagcgtcaagaaggaagagcttattccccagc

SEQ ID NO: 8875 - DNA, 121 bp, Artificial Sequence
  Description of Artificial Sequence: Synthetic probe
gaatcagtcactgaagatgtatcattacaacgattatgcttgccttgtttttttgccctcrcgatttttgctatttctttcctttgaggcttgagcatgctagtagctgagttttcttctt

SEQ ID NO: 8876 - DNA, 121 bp, Artificial Sequence
  Description of Artificial Sequence: Synthetic probe
ttcgaacgctactgttctgacgtccagcaatgtgatggatgaaaattccttcagtaacccraacaaggttgtgcctgtgacaagccagctgcgcaacgctgcggagcagatgcaggtcaca

SEQ ID NO: 8877 - DNA, 121 bp, Artificial Sequence
  Description of Artificial Sequence: Synthetic probe
tactatgatgatggaaaactagaattaagcaccggctatatagtactaattgctactaacytcttatatgtgttcaaaagaaaattactaacttcttatatatagcactagaaatgaataa

SEQ ID NO: 8878 - DNA, 121 bp, Artificial Sequence
  Description of Artificial Sequence: Synthetic probe
ctaatgaatttggtacaagagaatgaatcatccgcaaagttgatgctttagctcaagattyacagctgagaaaagcgtgtaatgcggttattccagctactcaagacccaacgagaccctt

SEQ ID NO: 8879 - DNA, 121 bp, Artificial Sequence
  Description of Artificial Sequence: Synthetic probe
gcttggccaatgcactctgaccagccgtgggacgcggaccttctctgcaagtacctcaagrtcggcttcctcgtgaggccatgggagaagcatagcgaggtggtcccggcggcgtccatcc

SEQ ID NO: 8880 - DNA, 121 bp, Artificial Sequence
  Description of Artificial Sequence: Synthetic probe
gagccataagggtgcaaagaaaaatggccctaaaaatgctgaaaggaatgttgacaataargaaccaagcaacggagaaacagcgcaggtcaagggccaaaagagtgtgaagagaagaaat

SEQ ID NO: 8881 - DNA, 121 bp, Artificial Sequence
  Description of Artificial Sequence: Synthetic probe
atgacggctgagctgtttgggaagaaaggcggcggcggccgtgggtcatttttggtagcaygaactaagttttttgagaggtcgatgatggatggatggatgtagttcgagataaagtgtg

SEQ ID NO: 8882 - DNA, 121 bp, Artificial Sequence
  Description of Artificial Sequence: Synthetic probe
tctcgtgcagtttctgccgtacgtagtgcctggaggttatttactgggtacactaatagcycgatacaatactacatacacatattcacatacgtatcttcytggcaccagragccamaca

SEQ ID NO: 8883 - DNA, 202 bp, Artificial Sequence
  Description of Artificial Sequence: Synthetic probe
aaagcttctcatccttgaatgttttgtccccatactccataacatgagaaccagcactatacatgttcaagtctgaggtacgcttctttacctcttcgtaytgctttttgattgtctcctccttcagattatgattctcactatcttccatccatgcaacactgtagaggtcacctaagcaggtaatatattcagaaggagg

SEQ ID NO: 8884 - DNA, 121 bp, Artificial Sequence
  Description of Artificial Sequence: Synthetic probe
taaccgctcagtcattctttaccagttcttttgtgcgtggtatattatagattacttcgtycatgaagagttcatgacctccacatgggacattattgcggaacggttgggtttcatgctg

SEQ ID NO: 8885 - DNA, 121 bp, Artificial Sequence
  Description of Artificial Sequence: Synthetic probe
tcctcctagtgtacatcatgcttgaccagaagcacaagacatcgtctgtcatctttgcctrtgtcttcatattctggcggcaccagacaactttatgcacccccagcattcattctgatga

SEQ ID NO: 8886 - DNA, 121 bp, Artificial Sequence
  Description of Artificial Sequence: Synthetic probe
gaaagctggcgccgtgcagaaggcgctctcggacaagaagacttctgatctgctacctgtygagatggctgtactccaggatggagagttcacctggttcgctgaccaggaggcggtgtcg

SEQ ID NO: 8887 - DNA, 121 bp, Artificial Sequence
  Description of Artificial Sequence: Synthetic probe
ggcgcttcacttttctggtaatagcaccatcgaaggtgccattaactggctttctgagcaycaggaggatcctgatattgatgaaatgcctatggtgccggccaattcaaacaccgtggct

SEQ ID NO: 8888 - DNA, 121 bp, Artificial Sequence
  Description of Artificial Sequence: Synthetic probe
gacaagtcgagaagatttattggatcactagataatgataagacacttctaaataacaggrctgacatcccggcccttatctatattaaggaaaagccacggattgccatctgtaagttcc

SEQ ID NO: 8889 - DNA, 121 bp, Artificial Sequence
  Description of Artificial Sequence: Synthetic probe
gtgatctgtagaggcaaattgactgaatcttgttaaacgatgcgctgattaaacatcggcrtgtccttcaatttctcttgtgcttgtcttcaggaacttatcttgagatgtacgcggtgct

SEQ ID NO: 8890 - DNA, 121 bp, Artificial Sequence
  Description of Artificial Sequence: Synthetic probe
cactctgatcgaaagaccatcgctctttggggcattggttcaagagtatgcaaaccggtcractgacgtgtagccaatgagataatggacaatttttggattcaagatttgggaggaatta

SEQ ID NO: 8891 - DNA, 121 bp, Artificial Sequence
  Description of Artificial Sequence: Synthetic probe
ctgctgctccttggcctgtttcttggttttcttgacgccatttttggcagctgtttccttyccaggagcatttttggctggattccggttgtaggaacctctgaccttcgcatcaggcttc

SEQ ID NO: 8892 - DNA, 121 bp, Artificial Sequence
  Description of Artificial Sequence: Synthetic probe
ttccgcgcagaaatgcatttgacatggcatgccaatgcgataaacatttgcagtggtcatygctttcacataaataggaagctcagatcgaattgaatggaccttctcctcaactttcctc

SEQ ID NO: 8893 - DNA, 121 bp, Artificial Sequence
  Description of Artificial Sequence: Synthetic probe
agctgggtgaactaccacgagctctcagaaaccgggcacttcctgtcgccagtccctgggytaggagacaccgttcttaggaccctcttcagctaggctggcttggcaacgtcgtagcagt

SEQ ID NO: 8894 - DNA, 121 bp, Artificial Sequence
  Description of Artificial Sequence: Synthetic probe
cttccctgctgatcttgccgcggaggtgtacaacagacaggaggtgggcgatcagtgggcrctgcgcgtgtcgcaccacgctcccggcatcctccactggtggatggaccagacctggctt

SEQ ID NO: 8895 - DNA, 121 bp, Artificial Sequence
  Description of Artificial Sequence: Synthetic probe
ttcctcgccaagctgctacgccaagggagcaattgccgcctccaccacctcttatgaagcytcctacatcggatccaggatctgtaagggacaagctcctgcccacgcccactccaaagaa

SEQ ID NO: 8896 - DNA, 202 bp, Artificial Sequence
  Description of Artificial Sequence: Synthetic probe
tcacatttgttcattgaaacactgtttgttttggtcctttatgatacactatatagtgctacgagccttctgatcgaaaatccctactaaaatgcagggasattaaacaagatggtggccaatggtgatgcaccagcaagggggagtgcagcagctgctgcaagcttgcgcaggcgtcgacctgctggcggtgctgctgctg

SEQ ID NO: 8897 - DNA, 121 bp, Artificial Sequence
  Description of Artificial Sequence: Synthetic probe
gaccgccgtcgtcgacgccgttgaagaggaggagggtttcgccgcttcggcttgatctgtrgagctagctagggatgccggtcggctggccggcggcatgcatgagtgtttttcctgttca

SEQ ID NO: 8898 - DNA, 121 bp, Artificial Sequence
  Description of Artificial Sequence: Synthetic probe
agagtactcttacgttaacgctcctttgcagaaggaactcttggcagatgaagtggggaaygcagcagcattttttagtgtctccgttggcgtctgccatcactggctcaaccgtttatgt

SEQ ID NO: 8899 - DNA, 121 bp, Artificial Sequence
  Description of Artificial Sequence: Synthetic probe
tgtggttccagaaccgccgcgcgcgctggaagaccaagcagctggagcgcgactacaacgmgctgcgccactcctacgacgcgctccgcctcgaccacgacgcgctccgccgcgacaagga

SEQ ID NO: 8900 - DNA, 121 bp, Artificial Sequence
  Description of Artificial Sequence: Synthetic probe
cgagattgatgacattgatctctttgaattgaacgaggcctttgcctctcaatttgtgtaytgctgcaacaagctggggctcgaccggtcaaaagtaaacgtgaacggaggcgccatcgct

SEQ ID NO: 8901 - DNA, 202 bp, Artificial Sequence
  Description of Artificial Sequence: Synthetic probe
gatgaattcaatcaaatgaaaatatacatgtatgcaacgttatggaagaactactttccttgctccggttctcggcgcactattctcagacgctctacagrtgcaacaacgccggaagttggaatgctcacgaggactggacgatmggttggtccgcraaggggccgtatagccaacccttggcgatgtgaccataagcagc

SEQ ID NO: 8902 - DNA, 121 bp, Artificial Sequence
  Description of Artificial Sequence: Synthetic probe
tgagaatgaactgaaggattccggtgctgtgacgattgcacagtctctgcaagaaggccayccagacctgaaggagcttgacgtgagcacaaacatgtttcagaggtctggagccaggtgc

SEQ ID NO: 8903 - DNA, 121 bp, Artificial Sequence
  Description of Artificial Sequence: Synthetic probe
acccatctacaaataatagtagtaattttccaatatttatctatggtcgattctcagcatkttgtgccattttgacgaggtgtacctcgctcaagctaggaacttcccttatttttattac

SEQ ID NO: 8904 - DNA, 121 bp, Artificial Sequence
  Description of Artificial Sequence: Synthetic probe
gatctctgccacgatgagtggagtaacatgctgcttgaggttccctgggcagctgaactcygacctccggaagctggcagtgaacctgatccccttcccacggccccacttcttcatggtc

SEQ ID NO: 8905 - DNA, 121 bp, Artificial Sequence
  Description of Artificial Sequence: Synthetic probe
gttctcccctgtaagagtgggtgctgaagcgctctcgtgggcagctaagaagctagaaccraacaagattggcctggcgacgtccccctccaccacagcggtccaggaccgggttctccaa

SEQ ID NO: 8906 - DNA, 121 bp, Artificial Sequence
  Description of Artificial Sequence: Synthetic probe
agagcgtgacacttctggtggaaaatcaaggggacagggcactggaactattctcattgtkactctggtcgacccagagacagaatccagcataaatgctgccatgcttgaggaagggctt

SEQ ID NO: 8907 - DNA, 202 bp, Artificial Sequence
  Description of Artificial Sequence: Synthetic probe
acaatgtagtaaacataaacaaaaaccaatccccaatttgatcaggttcgccccttcatgaatgaatcatctaatggggcgatcgaataataccaacgcgratggaaaaggcattgtttattacaggcctaaaataccactcacgcttccgacaacaggcgccccccctctctctctctctccctccattattccaaacctt

SEQ ID NO: 8908 - DNA, 121 bp, Artificial Sequence
  Description of Artificial Sequence: Synthetic probe
tattccaaacctttgggcaagtgtggtgttgcttggcatcaaggatgacaaaaactctcarcaagtacgatcttacaggctcttggctgcggcaacgacgctctccgcggtgataccatac

SEQ ID NO: 8909 - DNA, 121 bp, Artificial Sequence
  Description of Artificial Sequence: Synthetic probe
ttggttaagcttctatgaactattagaagcaatcgttgaccagccaccaccttctgcaccygcagatcagttctctccagagttctgttcattcatctcttcctgcatacaaaaggatccc

SEQ ID NO: 8910 - DNA, 121 bp, Artificial Sequence
  Description of Artificial Sequence: Synthetic probe
aagggaatatggcacaacaatgctgcttgtgggtaaaacgtggcatgttaaactccacccrgagagagctagtatgcccatccgtacatcccaacactgacaaggacgagcagagccaccg

SEQ ID NO: 8911 - DNA, 121 bp, Artificial Sequence
  Description of Artificial Sequence: Synthetic probe
agaagcagagaagtttgcagcggaggacaaagagaagagagacgcaattgacaccaagaaycaggcggagtctatcatctaccagactgagaaacaactgaaggagctcggagacaaggtc

SEQ ID NO: 8912 - DNA, 121 bp, Artificial Sequence
  Description of Artificial Sequence: Synthetic probe
tgatggcaaaggctttgatagagtaagaggatatgaaataggaaagaagcatttcaagctwacacattttgaggaggttttcacgacacaccattggatggtccgcatttataagctgaaa

SEQ ID NO: 8913 - DNA, 202 bp, Artificial Sequence
  Description of Artificial Sequence: Synthetic probe
tggtcggttttcgacgccctgtgtactctaggttgagtttggttggcaaatgtacataacagttatgtacatttctagactgatgtattcatgttgttggygaaaattttgtaaacgttgcggctggagctggccccatcatgtacatttgactttttttagaagatcatgtacatttgactgatttccatgttgtaaacca

SEQ ID NO: 8914 - DNA, 121 bp, Artificial Sequence
  Description of Artificial Sequence: Synthetic probe
ggggctcgccgaggccttcaacctcatcagccagatcgagttctactacaaggagatcccmgagcacatgaggagcgtcgccggcgcgctcgccttctgcaacctcgcgctcggcaactac

SEQ ID NO: 8915 - DNA, 121 bp, Artificial Sequence
  Description of Artificial Sequence: Synthetic probe
taatacaaacaggttaccatttgatttcaaccacaagatactcttatttggcattctggcrtactccctccaatccaaattactccgtctgatccaaattaattgacttcggtttgtctag

SEQ ID NO: 8916 - DNA, 121 bp, Artificial Sequence
  Description of Artificial Sequence: Synthetic probe
cctggctctctcggtaccacggcatcgaaggcctgatctggtttctaggagctacgtacaygcctgagtccatgtgacctgtagtgcattgatctgtagtgtagtggcattatggacagat

SEQ ID NO: 8917 - DNA, 202 bp, Artificial Sequence
  Description of Artificial Sequence: Synthetic probe
tcctgcacaagctgttgacccgttgggaaagtttaggccacagaaggagatatcacacatattccgttcaccagagaagaggccgcctaaggaagtctcaytagcatttactggtgtcacacttttgccttttattgggtttttgattgggcttttgcgtctgggagtcaacatgaagaacttcccatccctgccaggacca

SEQ ID NO: 8918 - DNA, 121 bp, Artificial Sequence
  Description of Artificial Sequence: Synthetic probe
ctccttgctcgccatcatcatcggcatggttcccgtgttcaaggctttcgtgttcgaggcygacgcgccgctctccttcttcaccgacagtctggagatcctggctgctgccgtggtcccc

SEQ ID NO: 8919 - DNA, 121 bp, Artificial Sequence
  Description of Artificial Sequence: Synthetic probe
tcctaggcgaaatgcagaaagtccaggctggttattacgaatcagagaagatatagctcckagagctttggtgcgtgcattcgtgctaggatcagacttgaagtttgtcaacagtggctcc

SEQ ID NO: 8920 - DNA, 121 bp, Artificial Sequence
  Description of Artificial Sequence: Synthetic probe
ccggagaacatgctggtcgttaataagctccattccaaccttttgtactccgtatgatatmgggaaaaaggagcatgtggcagacagtgtgtgtctatgttttgtgattattcttctcgag

SEQ ID NO: 8921 - DNA, 121 bp, Artificial Sequence
  Description of Artificial Sequence: Synthetic probe
tctgacaacatggaggaacacactgttgtgcactttagagtctacaaatcacagcagaagyatatgatactcatgtgctctgacctaagaaggtcttccttgagaccagaactgtacacac

SEQ ID NO: 8922 - DNA, 121 bp, Artificial Sequence
  Description of Artificial Sequence: Synthetic probe
gtggctttccaacgggtgtgaaaggccaattttaagcgtgtctcgctcagtgttgtagccygttttatcctcggttgttattgttgttgctgtagcctagactggctgctgctgttgttgt

SEQ ID NO: 8923 - DNA, 121 bp, Artificial Sequence
  Description of Artificial Sequence: Synthetic probe
catcaaagagaggatgacgaatgatgaactgcaagatgcaaggaaagagctgatcaagggmttggcagatttgttaaaccctcgtagcaacgttgtaatcaagaggatgggtgaactggat

SEQ ID NO: 8924 - DNA, 121 bp, Artificial Sequence
  Description of Artificial Sequence: Synthetic probe
tcgcctgcctcatggaagatttaaattttgttgaacgcgacaatgtcgcagctctggatgyactcgttcgctggttcaacgcacaaatggtcctcaatgagtgtgtcaacagagacaagat

SEQ ID NO: 8925 - DNA, 121 bp, Artificial Sequence
  Description of Artificial Sequence: Synthetic probe
cggatgcgcgccaccaggcacgtcctctcggagtacggcaacatgtccagcgcatgcgtcytcttcatcatggacgagatgcgcaagcgctccgccgaggatggccacaccaccaccggcg

SEQ ID NO: 8926 - DNA, 121 bp, Artificial Sequence
  Description of Artificial Sequence: Synthetic probe
taactatccgcggcatacagttgtgccctccttgagaggtggtttttcccttgggtgttgkcgtatgaagatgtcctggagatttagtaatagcgctgtgatgttctcctggaaacgagac

SEQ ID NO: 8927 - DNA, 121 bp, Artificial Sequence
  Description of Artificial Sequence: Synthetic probe
accccgtgctgtatgccgagaaacatatgattctggcatcacgtcattgtaaaggggaaaygtcattagactgatatctagctactaagatttattaacatttgctctgtcaggggtgttt

SEQ ID NO: 8928 - DNA, 121 bp, Artificial Sequence
  Description of Artificial Sequence: Synthetic probe
gaagattcctggtctgaatgctccaattcctcttggtgctacttttggttaccgacccggkgaatggggaaagcctcctgtggatgagcatgggcgccccctctatggagatgtttttggt

SEQ ID NO: 8929 - DNA, 121 bp, Artificial Sequence
  Description of Artificial Sequence: Synthetic probe
catctgtgtaatatcatggtattgttaggttattattatgcttgttgacgcggtggacatwgtgtgtgtggatgtggtgacctgatgacgtctgctgtatgtatattcgggagtaaatttc

SEQ ID NO: 8930 - DNA, 121 bp, Artificial Sequence
  Description of Artificial Sequence: Synthetic probe
gtaggaggtaaaagcagactgaggggttaaaacaaaaatcctcctctgtgtagacaagcakgcaataataattgttctagaaatgctggtgaaatggaacaaaataatcccaaaatctact

SEQ ID NO: 8931 - DNA, 121 bp, Artificial Sequence
  Description of Artificial Sequence: Synthetic probe
catcgacatccagttcaagagagtgccttgcgagttccctgggctcaaggtgaccttccaygtcgagcagggttcgaacccggtgtacttcgcggtgctggtggagtacgaggacggcgac

SEQ ID NO: 8932 - DNA, 121 bp, Artificial Sequence
  Description of Artificial Sequence: Synthetic probe
tcgtccagtacagctagctgaagaagctgcatatcatttggaacgaatcattggctagatygatttggtattgtatcgaggtttgttttgcatgcatgatgcatggggaatgaggtcggat

SEQ ID NO: 8933 - DNA, 121 bp, Artificial Sequence
  Description of Artificial Sequence: Synthetic probe
atctagttactacagtggtcaattggatccggaccgtgttatccaggattcagttgtcccrgaggattccatcagctagcccttggtgaatctctgtgcaggtagactattaatatcacat

SEQ ID NO: 8934 - DNA, 121 bp, Artificial Sequence
  Description of Artificial Sequence: Synthetic probe
cgacaacatgactatgatcttggtgcagttcaaaaatcgaggcagtgagaagaaaaaggcygacttggctgagcgatctggaaaaggcgaggaagagtctgaggttcggtgagtacacacc

SEQ ID NO: 8935 - DNA, 121 bp, Artificial Sequence
  Description of Artificial Sequence: Synthetic probe
aggccacttccttggaaaggacgaggacatctatgtattcttcgaccccgaatacccttcygaatccaaagtaaaaccggacggtgcatcggtatctgtcgacaggaggcagaacggacgg

SEQ ID NO: 8936 - DNA, 121 bp, Artificial Sequence
  Description of Artificial Sequence: Synthetic probe
tgtatcagaagaaaattccgaccagcaagtgctcgcaatagctacgcacttcaggaatgtkttacatgcatctgaggatgtttgggctagcgaccagctcttacgcagcgcggcaccatta

SEQ ID NO: 8937 - DNA, 121 bp, Artificial Sequence
  Description of Artificial Sequence: Synthetic probe
aacttttggcagtagttggggatgatcgggacgctcttcttgttgattcacgaaatgggargatagcttctaccttagttggccatctggactactcatttgccacggcgtggcatccgga

SEQ ID NO: 8938 - DNA, 121 bp, Artificial Sequence
  Description of Artificial Sequence: Synthetic probe
tttctgtgttgtttaagttgcacttgcttgtcactgtcaaaagatcgccatgttgaagatrcagtctctatgctgttcgggctgtttcaccggaggtggacgacaactcctccgttgttga

SEQ ID NO: 8939 - DNA, 121 bp, Artificial Sequence
  Description of Artificial Sequence: Synthetic probe
gagcattcatgtgttgggtgtgtggtctgtaacttcatcgtatagtataattcatgtgcawcgtaaaaaaccaggttacgtgcgtggacatcttggtcttgcttcatgtcaaatggtgaat

SEQ ID NO: 8940 - DNA, 121 bp, Artificial Sequence
  Description of Artificial Sequence: Synthetic probe
agcggagaaatgcaaacatggatgtgctgtatttgtcggcgaagattccccgtggaattcyattcctgatagagcttactggtgcagttggtgttcctggcgcaaagtgtgctgtcaaaac

SEQ ID NO: 8941 - DNA, 121 bp, Artificial Sequence
  Description of Artificial Sequence: Synthetic probe
gcacctggcgatggtcccggagcacctggcggtcgtgtcggagaagctccaggcgatggcrtcggagtacctggggtccttctgaacataccgtctatccggctctatttatacaggcagt

SEQ ID NO: 8942 - DNA, 121 bp, Artificial Sequence
  Description of Artificial Sequence: Synthetic probe
ccgaagaacttgacagattctgcaaagcgatcatgactaaaccaaagccagcgccgaagcygcagaccccacctccatcggatgccccagcaccagagcctcaatcgccggagcagcaccc

SEQ ID NO: 8943 - DNA, 121 bp, Artificial Sequence
  Description of Artificial Sequence: Synthetic probe
agaaggattattggagtgaaataaagggtggccaagggaagtataaagacaacaacagaartaacaggggaggaagggactggaagaacaacagaggtggtggtggaaggcacttcggtgg

SEQ ID NO: 8944 - DNA, 202 bp, Artificial Sequence
  Description of Artificial Sequence: Synthetic probe
caccctagttttgctgcatcgatctgaagctcagggatttgtcaggtggagctgtagttagtgttgtgttttactggaagtgacatagatacatggaatcrgtggagctggatataccaggttgaggctgtagtttagaatgttgtgtgtactgcaagtgacatagttaccggaagcgatggtggtggtgtggtgatgatga

SEQ ID NO: 8945 - DNA, 202 bp, Artificial Sequence
  Description of Artificial Sequence: Synthetic probe
gacggtcgacaaggccatggtcgtcgccttcgtcaaggacctcctcaccgtttaagaaccaagggatcacatgatccgtcgtctcagcattggtttgatcygctgatatttgaaaatcaaatgatttgaaatgtaaaaattgatcgaattgtatgtatactccatccattggatgcactgcgagcatgaaggcacattgtac

SEQ ID NO: 8946 - DNA, 121 bp, Artificial Sequence
  Description of Artificial Sequence: Synthetic probe
ggtcatctcccgtctgagagccttcttgactgtccgtgttacaaacttgaacttaggaatmcgtaggggatcaagccaacttatggaacgtgcatcgactgtgcttgatgttaagagactt

SEQ ID NO: 8947 - DNA, 202 bp, Artificial Sequence
  Description of Artificial Sequence: Synthetic probe
cagccttgcatagataggcatgcccaggtactcgcatactgctcacttactgggaggaggtcggactacccgcagtctgttgttcctttgcatcctgcgtsactgtaaatacactaagccggtgtcttcctgctatgtgttctagcccccctgcccttggcgggcaataaggatgtttgtgtgtggttattgtatggatcta

SEQ ID NO: 8948 - DNA, 121 bp, Artificial Sequence
  Description of Artificial Sequence: Synthetic probe
atgttcctctaaaaactgggccatccgtagtgcagtattattctggcattgaacacgaagrtgcagtgttttcatgccccggaggatcaggtaggaagcattcggatttagaacaccacca

SEQ ID NO: 8949 - DNA, 121 bp, Artificial Sequence
  Description of Artificial Sequence: Synthetic probe
tgattgtgaggaaccacgggagtctctggaagaggtgcaaactttgagaactggaatggarcggagaaaagttcactggactgacacgtgtgggaaggaacttttcgagatcagagaattc

SEQ ID NO: 8950 - DNA, 202 bp, Artificial Sequence
  Description of Artificial Sequence: Synthetic probe
gttgtgaaggactagttattcaaggcaaatactatatgaaaattgacgcactaggagaaggagctaggtggcgtcgtacattcggtcaggaaatatactcycctcttcttctagctttctccgagcaggatggaggtaactgggtaaattcacatgttccaaaattctcatcaatggatccaacttacagcttacctgataa

SEQ ID NO: 8951 - DNA, 121 bp, Artificial Sequence
  Description of Artificial Sequence: Synthetic probe
ggacatcaaccgcgacaactacgagaccatcgggctgccgtgcatcgagaaggccggcgtsgcgcacaagatcgacttccgcgagggccccgcgctgcccgtcctcgacgcgctgctcgag

SEQ ID NO: 8952 - DNA, 121 bp, Artificial Sequence
  Description of Artificial Sequence: Synthetic probe
agatattcaggaggaagctgcgcatgtattgacaccatccttgcaatcacgtgtaaggtcrttgaatgtctccaacttcctcttccccctgaggaacacctcagtgtcgactgcaaccctc

SEQ ID NO: 8953 - DNA, 121 bp, Artificial Sequence
  Description of Artificial Sequence: Synthetic probe
gatcacaaggacacctcggagaaggaagagaccaggatccgcgggttcaagttcgagaagrtggagcagctggaggtgaattacaccgagccagggaagcattgcttgagcccgtgaacaa

SEQ ID NO: 8954 - DNA, 121 bp, Artificial Sequence
  Description of Artificial Sequence: Synthetic probe
acactttgcgttggaaagcttcacaaagaatttgagacttcaatgtctgatgatctacatrctacagtggcgctagctgccatttctgagccgttgaaagttatgaatgatttgctgcata

SEQ ID NO: 8955 - DNA, 121 bp, Artificial Sequence
  Description of Artificial Sequence: Synthetic probe
ttctgagaagacaagagcattcagggtgaagaaatgagacagttttctcttaggcgatatrggatgtgtattggttcagtgcaggacgtagacatggcagcatggagagcaagtagtgaaa

SEQ ID NO: 8956 - DNA, 121 bp, Artificial Sequence
  Description of Artificial Sequence: Synthetic probe
ggccaacagaaatgtggagaacctcgacgtgatcgataggctcatcgacgacgcggaagckcagcagaggaacttccagcaccccgatccttacattgttccatgggctcctggtggtact

SEQ ID NO: 8957 - DNA, 121 bp, Artificial Sequence
  Description of Artificial Sequence: Synthetic probe
cacggtgtgtgtgagttctataatgtaacatccatgaccaccgacacsagaaaaagatggsaagccgtggaagaccacaacgatcaagaagcgttccggcacaggtgttgccccaaggatc

SEQ ID NO: 8958 - DNA, 121 bp, Artificial Sequence
  Description of Artificial Sequence: Synthetic probe
tcaagaccagggcgaagcaaatggaggcgttcttgaggcaacccattcatgtgtaactgcyttttggatcgaaagcaacaccagggtgcagtggctgcgctgctgagggttccccacatgt

SEQ ID NO: 8959 - DNA, 121 bp, Artificial Sequence
  Description of Artificial Sequence: Synthetic probe
cagcctgttgttctagaacgtgtccagtagtcgtcactaacaggagagtataaatttgttrctatgtactccctcagttccaaaaataagtgtcgtgtgtgcagcatgaacaaattgtrra

SEQ ID NO: 8960 - DNA, 121 bp, Artificial Sequence
  Description of Artificial Sequence: Synthetic probe
gtttgatgtgaatttttttgtctcttacttgtagctacggtttggtggtgttatgatcctygggtgtataggtctattttacactatacgatggttgcagagtaggggaacaacagtacga

SEQ ID NO: 8961 - DNA, 121 bp, Artificial Sequence
  Description of Artificial Sequence: Synthetic probe
attgagagaggatgaaacacttattcccacccttgaggaagatgttaaagaagaatgcgtwaagtttggtccggttgacaatgtcaagatctgtgaaaatcatccacaaggagttatattg

SEQ ID NO: 8962 - DNA, 121 bp, Artificial Sequence
  Description of Artificial Sequence: Synthetic probe
gaatgccatcgcaaagtctacacgaaccatcgatgagtccctccgtgcaagttacagaggktcaaccccacctgcaagcactccaaagacaaggttttcaacagacccaggcttgggatca

SEQ ID NO: 8963 - DNA, 121 bp, Artificial Sequence
  Description of Artificial Sequence: Synthetic probe
tgttaatgcacttatcgaggatcctgtaagcctttctggccagctctctgatactttctcrgatgcaatctacagcaagaggccaccttcagtcccatctggtttctgcatggacctctgg

SEQ ID NO: 8964 - DNA, 121 bp, Artificial Sequence
  Description of Artificial Sequence: Synthetic probe
agtcttaccaactattctgtctccgcttgggaaggcctgtgccagtatggaccttacagcrgtacatgatatattgcttaaaacaggttacaaagacgatgaaggtgcagaaaatgagttg

SEQ ID NO: 8965 - DNA, 121 bp, Artificial Sequence
  Description of Artificial Sequence: Synthetic probe
aaggcttagctctaacagctgtgtaaaaatatagttgtattaggagagagatattgtgcgytcatcatgtgtacaaatgtatcacaatgtaggaaggaagctgttagatgggttatgcata

SEQ ID NO: 8966 - DNA, 121 bp, Artificial Sequence
  Description of Artificial Sequence: Synthetic probe
aagtggaggcagccatcagctcatgatgtctttgttggcaactggaaaccaaccaagaaasacactttgtccaagaggtatcctggcttcggtgctaccatgaacatcttgtatggtgatt

SEQ ID NO: 8967 - DNA, 121 bp, Artificial Sequence
  Description of Artificial Sequence: Synthetic probe
gcggcagaagtaccagaagcagttggatttccgtgtgggatcgtcaggcgttttcgatgarggtgcggatgatgacgacaggcgttcataaatgcttctcttgccatgtgcagggtttctg

SEQ ID NO: 8968 - DNA, 121 bp, Artificial Sequence
  Description of Artificial Sequence: Synthetic probe
agcgaaatatggcatcgacgagatgtgtagggaccagtggaactgggctagcaagaatccyaacggatacggatcagctgactccatcaagcaaaacggccaccgcggatatggatcagct

SEQ ID NO: 8969 - DNA, 121 bp, Artificial Sequence
  Description of Artificial Sequence: Synthetic probe
agcaccatgaggatcgtgttgcaattattacaaggatggttgccgtaatgaaggaggtttrcggtgaagctgctttcaataagcataatgttgtcaactgggagatggctgcagataggtg

SEQ ID NO: 8970 - DNA, 121 bp, Artificial Sequence
  Description of Artificial Sequence: Synthetic probe
cttcctttggaaagaatgcccagtacgatagtacaaggtggaccgaggaccacgaggtacyctagtatcaacagcatgaggaagaatctccattgcttgacttgggattggatgaagaaca

SEQ ID NO: 8971 - DNA, 121 bp, Artificial Sequence
  Description of Artificial Sequence: Synthetic probe
aaatgttgggacttctgataatggactgctggcactcgtaagaggatgcccaagcttgcaraaattggagctaaggagttgctgcttcagtgaacgtgcaattgccgttgctgcgttacag

SEQ ID NO: 8972 - DNA, 121 bp, Artificial Sequence
  Description of Artificial Sequence: Synthetic probe
acacaaaaactacggaaatcgcccttttctatcatcaaacaacttcacagtgcaactatarccatcaaactgaaactacgccaccagccaatacaacatttccaaaagttacaaaccaaga

SEQ ID NO: 8973 - DNA, 202 bp, Artificial Sequence
  Description of Artificial Sequence: Synthetic probe
tactccgatggttgtacataatgaggaagctagaagtgtaaagcaggatccattcgatgacactgcaatgctgcaagctaatgaggaagctagaagtgttsaacaggagccacccaatgatactccgatggttctgcataatgaggaagctacaagagttgacaggagccrcccagtgatactccgatggttctgcataatg

SEQ ID NO: 8974 - DNA, 121 bp, Artificial Sequence
  Description of Artificial Sequence: Synthetic probe
gctgcaatcaagactgtggagctggatgctgcgcttggtggacgtgctgttcaataccgtraagtacagggaaatgagactgagaaatttctttcatactttaaaccatgtattataccag

SEQ ID NO: 8975 - DNA, 121 bp, Artificial Sequence
  Description of Artificial Sequence: Synthetic probe
tagttcaggaaagaatggtttgagagcatcaaatggttgtggtgattttgcgacctgcgcygaggggcatgtcggggaggcacctgctatggaatcccgatcacaaagtcggaagcagaca

SEQ ID NO: 8976 - DNA, 121 bp, Artificial Sequence
  Description of Artificial Sequence: Synthetic probe
atgcagtagagatcaccctgaagaacaaaaaaaaaaattgtatgtagcatactgctgcaakccgccccacctcagtcgccgtaatccgtgctgccgctgcacgagctgctgctgttcgacg

SEQ ID NO: 8977 - DNA, 202 bp, Artificial Sequence
  Description of Artificial Sequence: Synthetic probe
gtaccaaggaaattttgtttggagttgcactttggaaatcctatggaggacagggttggtcagagattgatgcttgggaaagcctaggcatagaagtgatmtggaagatcatgtaggacaaaggtgataatattaatgatgtaaactaccaattctgtgatgtggttcgaggccatttacatagttgcatagcattgctgga

SEQ ID NO: 8978 - DNA, 121 bp, Artificial Sequence
  Description of Artificial Sequence: Synthetic probe
gaagtgtgccgatgacaagccattcgctccaacataccaggtctcaagagacaagataaaraccttggggatcgagttgacccccttcgagacgaccctcagggagaccatagaaagcttg

SEQ ID NO: 8979 - DNA, 121 bp, Artificial Sequence
  Description of Artificial Sequence: Synthetic probe
atactttcatcagacgccgaccttacagcagctgtggaccatgcaagacaaattggttggmagagtttaaggttgcacttggattactccggcgttggccggcgtaagcgaggagccgtct

SEQ ID NO: 8980 - DNA, 121 bp, Artificial Sequence
  Description of Artificial Sequence: Synthetic probe
agagtcgttggtgcatggtgcaaacatatctgccttccttaacatcgcgcaagccatgacmgatcaaggatgtgtctagttaaacatttggttctgtcaagaagcagaattagacgttgat

SEQ ID NO: 8981 - DNA, 121 bp, Artificial Sequence
  Description of Artificial Sequence: Synthetic probe
gcatcttttggttgaaagcctagagaaatttctgaggagggaagcccaggaacttgctctkgaggtgagcacaatggaggcagagcgtgatgatgtctctgatgtgtccgagacacgtcca

SEQ ID NO: 8982 - DNA, 121 bp, Artificial Sequence
  Description of Artificial Sequence: Synthetic probe
tgtatctggagggatcatgtcactgattgatggttcatatgagtactaccattacctccaygatggtatcgatgacaatggatggggatgtgcctaccgttctctacaaacaatcatgtct

SEQ ID NO: 8983 - DNA, 121 bp, Artificial Sequence
  Description of Artificial Sequence: Synthetic probe
cactacttcttctatgtacaaaaacttgtccaaagcaaagcattgccctcgaagcatctcyctgccagcatatgatcccaatgcattcttaaattcaaccttggagattctcccagaagcc

SEQ ID NO: 8984 - DNA, 121 bp, Artificial Sequence
  Description of Artificial Sequence: Synthetic probe
tgaggtgcgcatcacgagcactgatggcaagaagtacatacggtacaacaagggacgccgyatctatgagacaaatgctcagtctgaagactgaaatcttcctgaaaatcttgccacttgt

SEQ ID NO: 8985 - DNA, 121 bp, Artificial Sequence
  Description of Artificial Sequence: Synthetic probe
ttggtgtagggtcactgtataaaatgtatacaattgtggacttctagcgtaatagtaggcytggagagatttacctgggtaggcacagaaatgcctcgagctcgtttacttgctgtaaatg

SEQ ID NO: 8986 - DNA, 121 bp, Artificial Sequence
  Description of Artificial Sequence: Synthetic probe
tgcgccatgatgtccgtgcaccgcaaccggaagcgcttcgtccaggacgagcgcaacgtgrcgcagatactgcagctgctgggccccgacgaggagaaaccctcgccggcgaagcggttct

SEQ ID NO: 8987 - DNA, 121 bp, Artificial Sequence
  Description of Artificial Sequence: Synthetic probe
ctctgctcatgtatatttgagactgaataaaggtcagacaatggatgacataagtgaaggsgtgctggaagattgtgcccagcttgttaaagcgaattccattcaaggtaataaggtgaat

SEQ ID NO: 8988 - DNA, 121 bp, Artificial Sequence
  Description of Artificial Sequence: Synthetic probe
cgtcacgcgccgcatccatggctacgcgaggctcttcctcgccgaggtcttcgccaagggyctcggcgacaagctccaggtcttctccaccgacttcatcgacggcgacttcgtcgacgcc

SEQ ID NO: 8989 - DNA, 121 bp, Artificial Sequence
  Description of Artificial Sequence: Synthetic probe
tgatgcattcgtgttcatcattaacagtaaaggaatcggcacagaacaggactacccttayattgggaaggacaaccgtagttgtgctgctaacaaggagaataagacggttgttacaatt

SEQ ID NO: 8990 - DNA, 121 bp, Artificial Sequence
  Description of Artificial Sequence: Synthetic probe
actcattcagagaatgccaaggtgcaggcatggttacttccatgtagtgaacaatgactayacccactgggagatgtacgccattggagggagtgccgagccaaccatcaacagccagggg

SEQ ID NO: 8991 - DNA, 121 bp, Artificial Sequence
  Description of Artificial Sequence: Synthetic probe
catgtggaacgtgagagcagaaaactgggccaggcaataccttggacagcagttctacctscgcgtgtggacgccgtcgacgtcatggcgcgacgagttcccgatccccaagaacgccctc

SEQ ID NO: 8992 - DNA, 121 bp, Artificial Sequence
  Description of Artificial Sequence: Synthetic probe
ctccaaacacccatcagccgggtttccctggcgtggaagagggcatctacaacacagcatygcatcccggagttgccgccgcctcctcagactacgagtcggcgaaccaattagaccagcg

SEQ ID NO: 8993 - DNA, 121 bp, Artificial Sequence
  Description of Artificial Sequence: Synthetic probe
ataccctagtatgctagtatactagtagtaatctagtatacgattgcgattgaagggaagmagatgtaaacgcttcccttcctagtggtggaggctgattggtataaggatacgtacacag

SEQ ID NO: 8994 - DNA, 121 bp, Artificial Sequence
  Description of Artificial Sequence: Synthetic probe
ctatctatggtatgcttggaattcctctgtcgtacttgatgtggtataggcctctgtaccrtgcaatgagaactgacagtgcattaagctttgggtggtttttcctttgttacatgctcca

SEQ ID NO: 8995 - DNA, 121 bp, Artificial Sequence
  Description of Artificial Sequence: Synthetic probe
agtttgcgaagaatggatctctcatgacataaagtgcccacatcatctttcgccttttcarctcgtccctctcagcagatgagagatgatgaactttcccagctctatgatttagatctgt

SEQ ID NO: 8996 - DNA, 121 bp, Artificial Sequence
  Description of Artificial Sequence: Synthetic probe
gctcatgtcgtcgggcgtcgtcctgaactccgagatccactgggtcaccttccacagcggmtacgacttcggctacttgctcaagctgctcaccggctccaacctgccggacaccagctcc

SEQ ID NO: 8997 - DNA, 121 bp, Artificial Sequence
  Description of Artificial Sequence: Synthetic probe
aaacttgaacattttgtcatctttgggaatgaaaccgagtttatcaactagcatgacgatsccaaccccagcaattggaaccaagatcaaccgtgcaaagataatggcaacggtggttcgc

SEQ ID NO: 8998 - DNA, 121 bp, Artificial Sequence
  Description of Artificial Sequence: Synthetic probe
gctttgagcccagtctagtttgcggattggaggttggaaaagttgtcatgcaatggagatkctgtgagaagcttttggtgcaaggctggcaaattttatactttggtgctgaattgtctgc

SEQ ID NO: 8999 - DNA, 121 bp, Artificial Sequence
  Description of Artificial Sequence: Synthetic probe
acaagatctaggggcccctgaatggtcggcaaacgaaaaggtctcaaatctcaatctgtgygtctttgctgcattatcctttcatgttgcaatctagttgttgggcatcgtgatgcatggc

SEQ ID NO: 9000 - DNA, 121 bp, Artificial Sequence
  Description of Artificial Sequence: Synthetic probe
gcatgattttggatattgaaagatccatcttcagggaccttattgatgaggtcataggtgkcgaggctatagaaaggatgcaagctggacaaccgaaattgcgtaggcagctgtctttcag

SEQ ID NO: 9001 - DNA, 121 bp, Artificial Sequence
  Description of Artificial Sequence: Synthetic probe
aatgtggtggatatggctgaagaaagggcggaagctgctccgcaccttggccagatgggtygtgtgtttcctatgttccagacctggccgcctagggcatgatctggtggcagctacccgt

SEQ ID NO: 9002 - DNA, 121 bp, Artificial Sequence
  Description of Artificial Sequence: Synthetic probe
ttgtccaaacatatttcgaggcccagagtatatactggatgcatgaagtctggtcctgtcmtatctgataaggatgtcaggtattatgaacctgagcactggaaatttggggataagtatt

SEQ ID NO: 9003 - DNA, 121 bp, Artificial Sequence
  Description of Artificial Sequence: Synthetic probe
aatgcagagaagtacaagaagcttgggtccaaatacggagtagatggcttccctactctgmtgctttttgaccatggagtcccacggagtacactggttcaaggaaggccggtcttctcat

SEQ ID NO: 9004 - DNA, 121 bp, Artificial Sequence
  Description of Artificial Sequence: Synthetic probe
tggcttggaaactcgaggtgggtccactccatggaatggtctggccagaaagacttcgcakcatctgctgaatcctcatttttagtcgataacacacaagctggagtgttgaagagccatg

SEQ ID NO: 9005 - DNA, 121 bp, Artificial Sequence
  Description of Artificial Sequence: Synthetic probe
cattggggcatatcaggtatacgcacaaccgatatttgctacagcagagaggtcgattgtytcccggtggccggacaccaagttcatcagcagcgcatacaccgtcagcatcccgctcaca

SEQ ID NO: 9006 - DNA, 121 bp, Artificial Sequence
  Description of Artificial Sequence: Synthetic probe
ggttttgaaaaggtcatgccagagaaatcattcttcgggcgccgtccaccattgcctctcygcggcaagcagatacaaatcatcgtgggagaaccggtagaatttgatctgcctagcttaa

SEQ ID NO: 9007 - DNA, 97 bp, Artificial Sequence
  Description of Artificial Sequence: Synthetic probe
ctacatctgcaacaacgctctcagctttatgttcagaaacctcgactccatgaatttcggyttcatgactagcacccattccaacactccctccgct

SEQ ID NO: 9008 - DNA, 121 bp, Artificial Sequence
  Description of Artificial Sequence: Synthetic probe
tgagtgcacaaaagctgagctgtggctgagggagagctcgcaactacaggagtccttgccyaagaatgttgaccctgtagtttggtctcatgaaatcaagaagaaggaagaagagctggac

SEQ ID NO: 9009 - DNA, 121 bp, Artificial Sequence
  Description of Artificial Sequence: Synthetic probe
cgagggtggtctgctttgttttactgtcactatgtagactgtagactgatgatgccacacrttttgctgatcttttcgttcgtgaaatttcccattgagagggcacatatttagctgagaa

SEQ ID NO: 9010 - DNA, 121 bp, Artificial Sequence
  Description of Artificial Sequence: Synthetic probe
tctttatggcaagttagcagagcacacaggacatactgttgaacaggttcatgaggacctrtccagggtgaagcgcttcgacgctgagggagccctcgattacgggatcatcgaccgcatc

SEQ ID NO: 9011 - DNA, 121 bp, Artificial Sequence
  Description of Artificial Sequence: Synthetic probe
agatacctgcgatggtcggaggtcgcgataggcgcttagagattgatgatagataggggcratgcagaggctcctcaccagaatttgtatagcagtccggttgctagttaggtcgtccagg

SEQ ID NO: 9012 - DNA, 202 bp, Artificial Sequence
  Description of Artificial Sequence: Synthetic probe
tgcacaaggagatcgtcgacttccacggcgagatggtgctgcttgagaattacagcgccctcaactacaccggactggtcaagattctcaagaagtatgayaagagaactggggccctgatccgtctgcccttcatccagaatgtgctgcttcagcctttcttcaccactgacctcctgtaccagcttgtgaaggagtgcga

SEQ ID NO: 9013 - DNA, 121 bp, Artificial Sequence
  Description of Artificial Sequence: Synthetic probe
cgaagtgttgaacatagccggatcaagctgcagctccagcccaaaggggcggcgaccctaygacctcaacatcccgtccatcacggtctcgcagctcgaaggcacgcagacggtgaagcgg

SEQ ID NO: 9014 - DNA, 121 bp, Artificial Sequence
  Description of Artificial Sequence: Synthetic probe
gttactgaatgtgctctggctgaggtctggtttgctgaaatcttccacagcattcgagatmtcctccaccagatcaacaattacaccattcacacccataagatactggagataaacagcc

SEQ ID NO: 9015 - DNA, 121 bp, Artificial Sequence
  Description of Artificial Sequence: Synthetic probe
gtggttgatgatcaattattattattcttcattcggttgggataagttaaaagctcgatcyggggaacaagctaagttaaagctgtcaaaaaaccggcactgcgtgcgtgtaacggtggaa

SEQ ID NO: 9016 - DNA, 121 bp, Artificial Sequence
  Description of Artificial Sequence: Synthetic probe
gcaatcggacgatagcaaatacataagagaagacggaaaaaaggggggcctaaaagagaakccgggtgcttccttctttccaggagacttcaaaaatacacaaacaccgagctcttccttt

SEQ ID NO: 9017 - DNA, 121 bp, Artificial Sequence
  Description of Artificial Sequence: Synthetic probe
attcagttctgacgaagaggtcatccaacttgcaaacgactctaaatacggtcttggctgygctgttttttctggcaaccagaagcgtgccatcaaaatagcatctcaactgcactgcggt

SEQ ID NO: 9018 - DNA, 121 bp, Artificial Sequence
  Description of Artificial Sequence: Synthetic probe
ccttgttgaggtaaaaattctcaggtcgtcaacagcatcgttatctggagagccaattgcrcgcacaagcttgggcatgtaccgcaagaatcatgcatctgcagcatgcgctgttgcttcc

SEQ ID NO: 9019 - DNA, 121 bp, Artificial Sequence
  Description of Artificial Sequence: Synthetic probe
agatgcacatccattagctcaagaagccggtggattaagcgggcagcctctatttgactcrtctactcgcgtcctcagtgagatgtatagccttacagggggcactgttcctctcataggc

SEQ ID NO: 9020 - DNA, 121 bp, Artificial Sequence
  Description of Artificial Sequence: Synthetic probe
ttcttatgagcaatttggagcattcttggcraacatcaaggaattcaatgcacagaaacartcgcgagaggacacactgtcaaaagcagaggagattttttggaacagagcacaaagactt

SEQ ID NO: 9021 - DNA, 202 bp, Artificial Sequence
  Description of Artificial Sequence: Synthetic probe
tgcctcaagaagctgactcccaaagaagctacaagaaaagcttctgagctgtgtaagttttggcagatgcagctgctgaacccagaatggaacccggccawgactctctcggatgaagatatccctaaggaaatttgtgtccatgatgttgatctgcaagagctacgtgctgcttggggtgaagaggtgtacatggtcgtgg

SEQ ID NO: 9022 - DNA, 121 bp, Artificial Sequence
  Description of Artificial Sequence: Synthetic probe
ggaactgccgagctattcagaatctgatgatgcattctggtaggtcttggagctgttactycaggtccaggaccaaacaggactcctctcaagagttgcccattaacgacggctgtcatga

SEQ ID NO: 9023 - DNA, 121 bp, Artificial Sequence
  Description of Artificial Sequence: Synthetic probe
ctccgttagcttttggtggcgtacgacagttataaccccgagctcttagtgacaacattgkgatctttggaccagacctcgggattcaggaatttggtaagcctgactggacactacgttt

SEQ ID NO: 9024 - DNA, 121 bp, Artificial Sequence
  Description of Artificial Sequence: Synthetic probe
ggagctggatgccgctgttgcaaagatygccaaagaaatatcagagaagtcagcattggcrgtgatgggaacgaaggccgttctgctgagaagcagggatataacagtagagcaggggctg

SEQ ID NO: 9025 - DNA, 202 bp, Artificial Sequence
  Description of Artificial Sequence: Synthetic probe
aagctatgcacaaatcaacaaatattgacgacgttgacaagaccatggatgaaattaatgacaatatggagaatatgaggcagatccaggatctactatcygcgcctattggagcagcaagtgatttcgatgaagatgaactggaagctgaactcgcggatctggagggggaggagttggaggcagagctactagcacccac

SEQ ID NO: 9026 - DNA, 121 bp, Artificial Sequence
  Description of Artificial Sequence: Synthetic probe
ccaagaaatccccaaccctgcgtactttgagcttgacaagcctgactttgatccaattgcygctattggaattgagatctggacgatgcaggatggcatcctgtttgacaacattcttatt

SEQ ID NO: 9027 - DNA, 121 bp, Artificial Sequence
  Description of Artificial Sequence: Synthetic probe
gcagtgatgatataagctcttcaagcgaggtcaatccttgtcagctccaaacagcaagcamaaatgaatctagccaatttggtcagcttgaagacggtgttatggccagattgcaagtact

SEQ ID NO: 9028 - DNA, 121 bp, Artificial Sequence
  Description of Artificial Sequence: Synthetic probe
tccttcaccgagccaagtttctggagaggccagggtttttgctgcccatcgccattgccartgctataggcgaggagactaggaagaagaacgagaggataaagggtcaacagagtgacga

SEQ ID NO: 9029 - DNA, 121 bp, Artificial Sequence
  Description of Artificial Sequence: Synthetic probe
acggggtctgaagaatcgccgatctgacgagatgaagcagtttgatcaacttctctctggygatctcgtcggagcaggagaagcagtgaaggatctgaggaagaagttcatgtgatgaggc

SEQ ID NO: 9030 - DNA, 121 bp, Artificial Sequence
  Description of Artificial Sequence: Synthetic probe
aagtctcagctagtagaaaaaaaaatgagggaatgaacagccggcttgtaatgcgctttckgaatcagcttgtagccctcttctttccccccatatatatagaaggaagttctgtgggcac

SEQ ID NO: 9031 - DNA, 202 bp, Artificial Sequence
  Description of Artificial Sequence: Synthetic probe
cttgtttcagttttattactaaccaaagtatatggagatttgacaagagaataggagtttcaaagacacttgattggtttgatggagctatgtcccagccycagttggttctggctgatctaatagaagttttcttccaaacgggaaactatacaacaatttacttcaggaaccttgcaaaggaagagggggtcacagaact

SEQ ID NO: 9032 - DNA, 202 bp, Artificial Sequence
  Description of Artificial Sequence: Synthetic probe
ccgagaacgagcgcatgcacctgatgaccttcatggaggtggcgcagccgaggtggtacgagcgtgccctcgtcatcaccgtccagggcgtcttcttcaaygcctacttcttcggctacctcatctcccccaagttcgcgcaccgtgtcgtcgggtacctcgaggaggaggccgtccactcctacactgagttcctcaagga

SEQ ID NO: 9033 - DNA, 121 bp, Artificial Sequence
  Description of Artificial Sequence: Synthetic probe
gctaatatcatggaaattttgaggcctttaataaataaggtcgccgtgccgcagctgctcygttcagactcatagcagtttcatggtgtttaggaaagaatcatttgcttaaagacgtcgt

SEQ ID NO: 9034 - DNA, 121 bp, Artificial Sequence
  Description of Artificial Sequence: Synthetic probe
agcgaaggaggcatttagactacttcgcccaggagggaccattgctttaacagataactcrccgaaatctaaagtacttcaggaactatcacccgttctgttcactctgatgaagagcact

SEQ ID NO: 9035 - DNA, 121 bp, Artificial Sequence
  Description of Artificial Sequence: Synthetic probe
actgcctcttaatgtgtcacgagaaatgcttcaacaacatagcagtctcaagaccatcaaraagaaactgatccgcaaggctcttgacatgattaggaaacttgccgaggaagatcctgat

SEQ ID NO: 9036 - DNA, 121 bp, Artificial Sequence
  Description of Artificial Sequence: Synthetic probe
tacagtgcctcactgtcccttttacagtcgtgaataactttggtgatataatctgactcawgtgctggtttgcaagcttcaactagttctttgccaccctcaatagcatcaaccaagtaaa

SEQ ID NO: 9037 - DNA, 202 bp, Artificial Sequence
  Description of Artificial Sequence: Synthetic probe
atatcattatgtatgtgaactctccaggaggatcagtgacagctgggatggccatatttgatacaatgaagcatatcaggcctgatgttgccacagtttgyattggacttgctgcaagtatgggtgcttttctacttagcggtggtacaaaagggaagagatacagcttgcctaactcaagaataatgatccatcaacctct

SEQ ID NO: 9038 - DNA, 202 bp, Artificial Sequence
  Description of Artificial Sequence: Synthetic probe
ctcagtcaacttcccatctaataagtactcgggagctacatatcccaaggtcccagaaatcttcaggttccctttgtcgagattcccaccggtcactgcawggccaaaatctgcaatcttggcattgaagtctgaatctaaaagtatattagaygatttcaggtccctatggatgactggaggattgcagtgctcatgaaga

SEQ ID NO: 9039 - DNA, 121 bp, Artificial Sequence
  Description of Artificial Sequence: Synthetic probe
tggcgccggcgagggcggtggcagcgtgcggaagcgcgtgtacttcgggtttgacgacggwgggggcggctggttcgtggaggcctgtgaggaggcgccggcgagggaggctgacttcttg

SEQ ID NO: 9040 - DNA, 121 bp, Artificial Sequence
  Description of Artificial Sequence: Synthetic probe
cgtgatggatgaccgtgggaagttcatatacatatcaatcgaggagatgcaggctgtcgcrgactacatcaggaagcacgggagggtgagcatatcacatctggccagcaactcgaaccag

SEQ ID NO: 9041 - DNA, 121 bp, Artificial Sequence
  Description of Artificial Sequence: Synthetic probe
ttgccctgaaaaatacaatacaagcggcgctttcgggagtcttgggagtctatgagttcgrtttggtcacagcttgcctcgactcctcagcgagaaggttctgctcgccccagtttcgtat

SEQ ID NO: 9042 - DNA, 121 bp, Artificial Sequence
  Description of Artificial Sequence: Synthetic probe
ccatcattcctttggtgtcctgtactcaatcatttctgggcagtagcgcctggacagaacrtcgacctgctcgatgaaggacttctccctgtggccgccgatgcctcggaccatctggttc

SEQ ID NO: 9043 - DNA, 121 bp, Artificial Sequence
  Description of Artificial Sequence: Synthetic probe
taatgattctttgctagcagtaagtgataaatctgttgagcccttgcagataaacgtgctygactatctattaggggttgctgatttgtcaggggagctaatgaggcttgcaattggccgt

SEQ ID NO: 9044 - DNA, 121 bp, Artificial Sequence
  Description of Artificial Sequence: Synthetic probe
gtttttagacgataacaatctggaccttgttgtccgatcccatgaagtgaaggatgaaggrtatgaaattatgcatgacggaaagcttatcactgttttctcagctcctaattattgcgac

SEQ ID NO: 9045 - DNA, 121 bp, Artificial Sequence
  Description of Artificial Sequence: Synthetic probe
tccgaggacagaagaaataacttttgagcaagatcctcatcgaaaaatgcaacggacaggyggggcttttggtgaagcatgtctggcatcaatgagtgaagctgaaactggagctggctcg

SEQ ID NO: 9046 - DNA, 121 bp, Artificial Sequence
  Description of Artificial Sequence: Synthetic probe
gttcggatcaatgctacagaaagctggtgtaggggttgatatttatgatctctgtgatatygacttgaaagattttagcctgcaagcttttgggcaacaaggctgtctacttcggagctta

SEQ ID NO: 9047 - DNA, 121 bp, Artificial Sequence
  Description of Artificial Sequence: Synthetic probe
tccagtacgaaaccaaggcgcaggagatcgtcgccaaccactgatggacggtcgacgatcrcgcggtgtttgggctcgcgatcgagaagagccttagaataagtgcactattcagcacatg

SEQ ID NO: 9048 - DNA, 202 bp, Artificial Sequence
  Description of Artificial Sequence: Synthetic probe
ttgcagcctgtgagagaaacacgcgaaaaacaggtgcagctatggaaagatctgatacttgattactgtagaagtcaaaagatgtatataatctccctggragaggattttccgttgttctccaatccgaagattgagagaactctaagctatgaagcaaaggaagtgttccttgcagctcttgttagtgaagggcgcgccg

SEQ ID NO: 9049 - DNA, 121 bp, Artificial Sequence
  Description of Artificial Sequence: Synthetic probe
agtttctgaagactgtgcaccgcactgcaggaggcacttggtgaccattgtagcacaatcyggacgccccagtttttgtccatgtttgttgaataggagtgtagcatgtctgtaccacttg

SEQ ID NO: 9050 - DNA, 121 bp, Artificial Sequence
  Description of Artificial Sequence: Synthetic probe
aacagcgcaagaaggttctcttttacgtgtttagtttgcatacgattctgacttggtgaaraggtatagtagcaataaactcttggaagtggagaaagcacccatttggtgcctgagacct

SEQ ID NO: 9051 - DNA, 121 bp, Artificial Sequence
  Description of Artificial Sequence: Synthetic probe
cgtgtgagtgtttcttcttatgatccaagctggaaaggaaagttactggagacttacgacrcgcacactgatactttccaaattgcccctgcctgctggatgccagactgggcagaaatag

SEQ ID NO: 9052 - DNA, 202 bp, Artificial Sequence
  Description of Artificial Sequence: Synthetic probe
aaggacatgttgctacatatcagaagttcttgatgctggacttctcggaccattgtttagggtggctgtagagaagcttccagagatttcttttactcacrcttcaccaattcaatgttgggacagtgtgagagacagggtgaatgaagaaataaaaaracagcatagcgctggaaagcctggcgttcctgctttattatcc

SEQ ID NO: 9053 - DNA, 121 bp, Artificial Sequence
  Description of Artificial Sequence: Synthetic probe
tctatgagcatctgccagctgggcaaatttggccagttccttctcttctcgctgttgctcwcgtttctgcctatcatcacggttgctgttgctgctactttgcatttctctcatttcctta

SEQ ID NO: 9054 - DNA, 121 bp, Artificial Sequence
  Description of Artificial Sequence: Synthetic probe
tgccacaccctatgtgttacttgtcagcttccattggaccaaggtggtgggtgaaggaaargctctttacattgacgcagaggggacattcagaccacagaggctcctccagatagcagac

SEQ ID NO: 9055 - DNA, 121 bp, Artificial Sequence
  Description of Artificial Sequence: Synthetic probe
gggtccccgggcctggagatgacgcggagatgatagcaacgtgattgtgcgaagcatcatygggcagttgtgtgcgaagcatgtgtgtgtgtgtgtgtataggtgtacatacatggaacat

SEQ ID NO: 9056 - DNA, 121 bp, Artificial Sequence
  Description of Artificial Sequence: Synthetic probe
gaaaccaacagccgaggagtttctacagaacctgatctccgttacgatggcgctggaccargcagtcaccaaagtgatcgacttcatcgatgggaaatgcgtttyggatctctgaaaagcc

SEQ ID NO: 9057 - DNA, 121 bp, Artificial Sequence
  Description of Artificial Sequence: Synthetic probe
aaggctgtggaggaggctgagctccgtagattagaagaagctgctgcaagagaagctgctrttgaaaagcaaaagcaagagaacgaggataaactgagaaaacaacttgaggaagaggagt

SEQ ID NO: 9058 - DNA, 121 bp, Artificial Sequence
  Description of Artificial Sequence: Synthetic probe
caagccaggaacttatagactggtgaggtcttaccccaggcgtgcattcaccgacgaggartgtcagatgtcgctgagtgatgttgggctcaccagcaaacaggaggccctgttctagagc

SEQ ID NO: 9059 - DNA, 121 bp, Artificial Sequence
  Description of Artificial Sequence: Synthetic probe
gatctgactgaaccattcaaccaagtgggcagaatgcgtatacgacagactggatggttcygaggcttgctgatattgtgtgaaawttttgcacaagcggttggttttaattccatggatc

SEQ ID NO: 9060 - DNA, 121 bp, Artificial Sequence
  Description of Artificial Sequence: Synthetic probe
gaggctgcaagtgttccgcgcaacccagaaggactatagtgaggcagctcgatgggtcgtsagcctcatggcgagatcaggaacagaggcagcaggagggttcacagaagcacagcttcaa

SEQ ID NO: 9061 - DNA, 202 bp, Artificial Sequence
  Description of Artificial Sequence: Synthetic probe
acggggaggtgcggacaggtacggcttaactgcagcgtcgtcaaccccgccgcctcctcgccgtctccggtcgagctggcctccgtcgacgaggagggcgkcatcgccacgagctagctgattaaccatcccgccatcgagttccatcttctacgtggtcgttttttttctattttacgttgtgatgatcgcccatgttggt

SEQ ID NO: 9062 - DNA, 121 bp, Artificial Sequence
  Description of Artificial Sequence: Synthetic probe
ccgcatcaccctctgcactacactagtatggagtttgccaatgtcgctccacttcaagtcraacgagaaataatccaattcaactctcccaacgagattattcccagaaacactagcacct

SEQ ID NO: 9063 - DNA, 121 bp, Artificial Sequence
  Description of Artificial Sequence: Synthetic probe
gcttgctgatttggtttcatgtcaggtttacctcaagggcaaatgccgggctctgtacatycataagytaagrgactgccgtgtgtttattggccctgttttcggctcggtgctcatagag

SEQ ID NO: 9064 - DNA, 121 bp, Artificial Sequence
  Description of Artificial Sequence: Synthetic probe
tgtcgaaaatgtagccggcattgtggcagcaggcacatcacatgatgatgtattaacctgwattcagcagattgttgtgtactacgttgatcgtgtggggccagttttgatatttgcaaag

SEQ ID NO: 9065 - DNA, 121 bp, Artificial Sequence
  Description of Artificial Sequence: Synthetic probe
aagtggcggtaaagccgtagcagttcaacacatacgacagaagtgtggttacaagacactygttatgattggagatggtgcgactgatcttgaggctcgccaacctggtggagcagaccta

SEQ ID NO: 9066 - DNA, 121 bp, Artificial Sequence
  Description of Artificial Sequence: Synthetic probe
cacggacggaaaaggcgtaaatgtggtctatgattctgttggaaaggatacgcgactagaraggaggcggtggccaagtggaggagacacgtgtggaagaagaaccggacgaagatcttgg

SEQ ID NO: 9067 - DNA, 121 bp, Artificial Sequence
  Description of Artificial Sequence: Synthetic probe
atgaaggcttcttaatgctatactatacacagcaaaaattatcacagaataaacgtgtctrgccattttatggaacttaactgtcacagaggatacactgttatagttatatcttcagaaa

SEQ ID NO: 9068 - DNA, 121 bp, Artificial Sequence
  Description of Artificial Sequence: Synthetic probe
cgtaaatagcattgctagtgtaacaaagaagcccattgtgttggttatcacgggtggtggycccgtcgatgtttctttcgcaaagcaagatcgaacaatcgcaagtatcatctggatcgga

SEQ ID NO: 9069 - DNA, 121 bp, Artificial Sequence
  Description of Artificial Sequence: Synthetic probe
catcttcttggtgacatttgtgatcgggcagacctttcttgctatgttgtgccatctcaasttcggcaccttctttctgttcgggggkkggtgtgcgtgatgacgctgttcgtcttcttct

SEQ ID NO: 9070 - DNA, 202 bp, Artificial Sequence
  Description of Artificial Sequence: Synthetic probe
cacaggttgcagtagatgcaaggcactgactcctggtacttccattatagcacctttcttagactccactctagcaaccttcttcgatttgtctctccagraaatcagaaggatcaagaccctcgtaaatacatcttacagaggcctcctcagcttccagctcgtacatacgtcttacagaggcctcctcagcctccagttc

SEQ ID NO: 9071 - DNA, 121 bp, Artificial Sequence
  Description of Artificial Sequence: Synthetic probe
ggaatcgagttggaagcatcgtttgtccattttatatagccttgcacgatgatccccttgwgtatgttcgcgaggcaaaaatgcttatgcgtaggaaaaagagctctttagaagtgatgat

SEQ ID NO: 9072 - DNA, 121 bp, Artificial Sequence
  Description of Artificial Sequence: Synthetic probe
gaggagacaattccaccaacaaaagagcgtgtccaaagccataaaaacttcattgaagackgctgacacaatgaccagctcgtgaaccaaaaagtgaagagatgcgtcgctaatttacacc

SEQ ID NO: 9073 - DNA, 121 bp, Artificial Sequence
  Description of Artificial Sequence: Synthetic probe
tgatgagttgaatgcagaaagacatcaatgtcgatctgggatgcgagatctgtttaatagygcctttggtgcaacattccttacagacacaggaacggaatcatcattttcctatcacatt

SEQ ID NO: 9074 - DNA, 121 bp, Artificial Sequence
  Description of Artificial Sequence: Synthetic probe
aatcacccagcaatgattgctgctggagcagtgcctctgttgaagcggattgtgcatgtgsaaagcccacactggaagcgcgctcttcagttgctgaggacattgcccgtatgacttgaca

SEQ ID NO: 9075 - DNA, 121 bp, Artificial Sequence
  Description of Artificial Sequence: Synthetic probe
aaataactggtgcttgttgtatgtggcaaatcatcatctgttcgagctcggtgacccgttrgccgcttgtgttgttcaggaacttgagggagggagggaggggaggagatttagagagcgt

SEQ ID NO: 9076 - DNA, 121 bp, Artificial Sequence
  Description of Artificial Sequence: Synthetic probe
tgctgtaggagcattaattgcaggaatatttggcatgaaccttacatcatacctcgagacsaacgcgtgggcattttgggcgacgaccggtggaatcgcagtcggggcagtagctggattt

SEQ ID NO: 9077 - DNA, 121 bp, Artificial Sequence
  Description of Artificial Sequence: Synthetic probe
aactaggctatggcagtatcgactctctgagcctagaggacatggtcgttgagattgtgargcaaattgaaaagctgatcaaggcaaaggaaatgatggaagctgccggaaagcccgaatg

SEQ ID NO: 9078 - DNA, 185 bp, Artificial Sequence
  Description of Artificial Sequence: Synthetic probe
atgtggtggacggaggttaagatcacctgagactgctgaaactgctcttctctgctggtcttgatgtcatgaacaatggacagrgaggttgtgttctgctgctgatcttgatccacgggcggagatagagacgagactcgatttgctgttgctgcatgtacttctccgtgcttctccctgtgcag

SEQ ID NO: 9079 - DNA, 121 bp, Artificial Sequence
  Description of Artificial Sequence: Synthetic probe
cctccagaagatgtccgagaccatggacaacttcgagaggcagttcgtcaacatggaggtscaggccgagttcatggagggcgccatggcgggctccacctcgctctccacgcccgagacc

SEQ ID NO: 9080 - DNA, 202 bp, Artificial Sequence
  Description of Artificial Sequence: Synthetic probe
tcggacccctgtcttgcaacactttaagccgtatattaggttgtccagtggtcctcggctggaataaaccagtttttctgttggatagttattacagagaygaataatcgtgcggtttcgatcgctttgcatgccttccgccaagcatcaacacagccagcggcgttttagtttggagacgcccttgtatcgtgtgttgccc

SEQ ID NO: 9081 - DNA, 121 bp, Artificial Sequence
  Description of Artificial Sequence: Synthetic probe
ggatgaaacgcaaagtagatccaagccccaccttcattcctgcattagctattcagacgcygcttgctgttctagcgatatatgttgatattagcaccgggtttggctccagctgttctgt

SEQ ID NO: 9082 - DNA, 121 bp, Artificial Sequence
  Description of Artificial Sequence: Synthetic probe
tgttggtatctcaaattcttttggatttggaggacacaactcagtggtagtatttgctccrttcaagccttaatgtggcggcacttgctccacaagtcttggtcgaaacagtgaggttttt

SEQ ID NO: 9083 - DNA, 121 bp, Artificial Sequence
  Description of Artificial Sequence: Synthetic probe
ttatctgctcatactgcttggcctgcttggaaccggtacattcttcgtcatccgtcaggtycttgtccgcagggagctcgacctttctgctaaagacttgcaggaacaagtgagaagtggc

SEQ ID NO: 9084 - DNA, 121 bp, Artificial Sequence
  Description of Artificial Sequence: Synthetic probe
agagcctctaaatgatgacgtcagagcagcttttgcaaccatatatgaatctgcactacaratgaaaacagaaaagcagaaatctagaatccaagcttgaagagataaggcattcatagac

SEQ ID NO: 9085 - DNA, 202 bp, Artificial Sequence
  Description of Artificial Sequence: Synthetic probe
ttcatggagggttggaaacgatggtgccgatgggtcaggggtcgataagggtggttccagaaacctgccgttaatcttgctgccagtagcaccagtgttgktggttagtgcttcagttttactggcttgtgtgccattgtctgaacacctttttctgttagcattccgccacagtacaagtagttctcactcgtttggatgg

SEQ ID NO: 9086 - DNA, 121 bp, Artificial Sequence
  Description of Artificial Sequence: Synthetic probe
caacgctaacattgcgcagatggcacggagcagcccaccagagaaaccagcagtggcgcaygtgtgccaagagttcaagtgcagccctccggtgacctctccaggtgcactccgtgagctt

SEQ ID NO: 9087 - DNA, 121 bp, Artificial Sequence
  Description of Artificial Sequence: Synthetic probe
ctggtttatcgggaatacaagttttgcggcagaatcaacatctttgcacttggcgcaatcrccaaacaagaaaggttgatgtgatgtttgaacagagatgaagccactgacctcagatgct

SEQ ID NO: 9088 - DNA, 121 bp, Artificial Sequence
  Description of Artificial Sequence: Synthetic probe
gtttaatcacgacaccccaacggtaccggaacgcctagtgagtgtaacaatccaaagcgaygatgtccttacttcaattgcgttttcctacatcgatgaggatggtcagctgaaaagcgcg

SEQ ID NO: 9089 - DNA, 121 bp, Artificial Sequence
  Description of Artificial Sequence: Synthetic probe
gcaatgtttactgctgcccaggcatcttcaaactcacaaatgatggcaaacctacctgggwcaatgcaatcacagtcaatcttgccacaaatgcagcagtttggtttgtctggtgggcatc

SEQ ID NO: 9090 - DNA, 121 bp, Artificial Sequence
  Description of Artificial Sequence: Synthetic probe
atgactggggcacctatgccaaaatgacagatgaggttgggcagcatgtgcagatcgtagsagatgaccttcttgttactaaccccacgagggttgccaaggcaatcacgtgaggaagacc

SEQ ID NO: 9091 - DNA, 202 bp, Artificial Sequence
  Description of Artificial Sequence: Synthetic probe
tagaccagcgccgcattgtcactctcgataattactggaacagcagctacaggaatgactgcttttaaaccctccagctccaggcaagctaaagcttaggytcctttggcagatcggcaataaggtataacgccccacggcaacattatcaccctgcaatcaggtcacaaaggactgctccccaagacccattattttttcc

SEQ ID NO: 9092 - DNA, 121 bp, Artificial Sequence
  Description of Artificial Sequence: Synthetic probe
tggtagtaacggatctctagtagagatatacagggatcatggaggccaggattacaaatcyacatgaagcacagaatggtaaagggttatcaggtgggtaaggtcttgttccgcccttatg

SEQ ID NO: 9093 - DNA, 121 bp, Artificial Sequence
  Description of Artificial Sequence: Synthetic probe
tgcgctgcggagagactcaattggtgactattcggtcaatgacgcttggaacttcgatgarctagaagaacaaattaccaagggatatttatgagaatcgggtaattagccgtgccctttg

SEQ ID NO: 9094 - DNA, 202 bp, Artificial Sequence
  Description of Artificial Sequence: Synthetic probe
gcgcagggtgcggcggctgctgttcaagtaccccagtatgctgtaacaatgcctaacaataacagtgcccaaggttacaacgctgcaaatttaggcggcaygccctggagaccaagatagaaaggaacctgtaacagttagttctcttgatttctttgtagctctgcccagcttccgttctagggttggtttctttttcctt

SEQ ID NO: 9095 - DNA, 121 bp, Artificial Sequence
  Description of Artificial Sequence: Synthetic probe
tccctaaaccccaaatcacgttcatcaacccgtaggagagataagtccggcggtggagctyctttcaaatggaaggtcatggagaccgtcactccgaaagatggcagttgcggtggcttat

SEQ ID NO: 9096 - DNA, 121 bp, Artificial Sequence
  Description of Artificial Sequence: Synthetic probe
ttcacctgagaaatcctcaccagcatcatcatcatcagcgtcagcatcaccagtttcatcrtcctcatcttcatcatcatcatcgtcgtcgtctgacccagcgtccttgttctcagggaca

SEQ ID NO: 9097 - DNA, 121 bp, Artificial Sequence
  Description of Artificial Sequence: Synthetic probe
caggctgtgacgttcgtgactgcacctgcagagatgtgttaggtcgttgttagcccgtgtkgagtagtggagatgttctagtgctgtaggaagttcctttgttcttgccatggcgtggtct

SEQ ID NO: 9098 - DNA, 121 bp, Artificial Sequence
  Description of Artificial Sequence: Synthetic probe
cctggagttcagcaaggttggcttcatcttccgcgagcacggcagcactcccggatactaygatggcaggtactggacaatgtggaagctgcccatgttcggctgcaccgacgcctcccag

SEQ ID NO: 9099 - DNA, 202 bp, Artificial Sequence
  Description of Artificial Sequence: Synthetic probe
agcaacaatcaagtcattcatcgaagattcacatgctggaattaagatatcaccacaggacatcaacttcgttggcttgcatgataggcttgttactatcwcaggacccttgaacactcagttgcgagcaatatatttgatattgaacaagttatctgaggatgttcactacccacctaatttgagttccccatttccatat

SEQ ID NO: 9100 - DNA, 121 bp, Artificial Sequence
  Description of Artificial Sequence: Synthetic probe
gctctctggtgaaactgctcatggaaagtacccattgaaggcagtgaaggtgatgcacacygtggcacttcgaacagaagccagcctttatgacccaactaaagctcccagtcttgttgca

SEQ ID NO: 9101 - DNA, 121 bp, Artificial Sequence
  Description of Artificial Sequence: Synthetic probe
gctcgaaggttggccttgcattggccctcaagccttgatcacccatcttcataacttctcrggtttacctcggtttcggatgaaattggggcgagttggacaagacttcacgccttccccc

SEQ ID NO: 9102 - DNA, 121 bp, Artificial Sequence
  Description of Artificial Sequence: Synthetic probe
gatgatggccggcttcaggccgtctccgctcagctcgctggtgaatgccaccatcaggtcrctgctgcagagctactcggtggactacaagctcgccgagagggacggggtgctgtacctt

SEQ ID NO: 9103 - DNA, 121 bp, Artificial Sequence
  Description of Artificial Sequence: Synthetic probe
gattgtcatcggaggtccaaggacctctatcggtggcatgattgagctcaattcatgggtyccggatcagcaaccgcctgtgtggaatttggttgccaggcggccgtccgggaacttcgtg

SEQ ID NO: 9104 - DNA, 121 bp, Artificial Sequence
  Description of Artificial Sequence: Synthetic probe
ttgacctcagcaggagcagttcctgcatcagccttatctgaggtttctgaagttgatttaytcttcttctttttcttccccttatccagaggagcaccatcacccacattagcctcatcat

SEQ ID NO: 9105 - DNA, 121 bp, Artificial Sequence
  Description of Artificial Sequence: Synthetic probe
acggcgcgtacttgcttcgctttgtaaatagcctgtaaatgcgttatgaggcatgaggccwtgctgaagaatttgtctgcagtatgtatgtacgacgcctgttttgcagatacgaactgaa

SEQ ID NO: 9106 - DNA, 121 bp, Artificial Sequence
  Description of Artificial Sequence: Synthetic probe
ctcgttcatctgcgaaactgtgaatttgcccctcactgcagattattgttacatcatgttwatttcccttccctttttgctagctgctgcatttgctactactccctaaataatatggtaa

SEQ ID NO: 9107 - DNA, 121 bp, Artificial Sequence
  Description of Artificial Sequence: Synthetic probe
gtgattcctgatatggtttcagctgccagctcaagacacttcaagacacttccaacgtttygaaataattttgaatcgatgtgtttcttgaaacattcttttttttttccttttgtgagcc

SEQ ID NO: 9108 - DNA, 121 bp, Artificial Sequence
  Description of Artificial Sequence: Synthetic probe
gaagaaggagtaccctgacgcctatgtccgcatcatcggcttcgacaacatccgccaagtrcagtgcgtcagcttcatcgccttcaagccaccgggttgcgaggagtccggcaaggcctaa

SEQ ID NO: 9109 - DNA, 121 bp, Artificial Sequence
  Description of Artificial Sequence: Synthetic probe
catcaccaacgacaagggaaggctcagcaaggatgacatcgagaagatggtccaggatgcygagaagtacaagtctgaggatgaggagcacaagaagaaggttgatgccaagaactccctg

SEQ ID NO: 9110 - DNA, 121 bp, Artificial Sequence
  Description of Artificial Sequence: Synthetic probe
gatattttggtgggagcacttggtttgtggtcgagaggtggcccggacaccgccggtagcrggatgatcgtggagtttgtagtgctaggtcaggcggggcctggctgatggtggtggtggt

SEQ ID NO: 9111 - DNA, 121 bp, Artificial Sequence
  Description of Artificial Sequence: Synthetic probe
ccttcaagaaagccttcaatggcactttcattgccgctggtgggtatgacaaagaggaagkcgacaaggtggtatctggtggctacgctgaccttgttgcctacgggaggcttttcttggc

SEQ ID NO: 9112 - DNA, 121 bp, Artificial Sequence
  Description of Artificial Sequence: Synthetic probe
gaaagagtcgacgtgtgtgtgctgaagaagcagcaggtccctgatttgatcaagacattcrgactggcagatgaaaccaagattcatacaaatgtagtaaatatatatagtccgtagtact

SEQ ID NO: 9113 - DNA, 121 bp, Artificial Sequence
  Description of Artificial Sequence: Synthetic probe
ttggagttgttattctagaggcaatcacagggagggatcctgttgactatggtcgcccggmaaatgaggtaaatctagttgactggctaaaaatgatggttgctagcaggcgctcagatga

SEQ ID NO: 9114 - DNA, 121 bp, Artificial Sequence
  Description of Artificial Sequence: Synthetic probe
actgcttttgctttgggacagctgtggcttgatgggtgtgaatgccttcttgatagagtgmgtgttcttcaggctgatatgttgagcttaatccaaggtggagttactgttggcagcacta

SEQ ID NO: 9115 - DNA, 121 bp, Artificial Sequence
  Description of Artificial Sequence: Synthetic probe
agacataagcatatgctagccgaaggtgacaacagggtgccttcccaatctcctagtcttmttccctttgtccctatttacaggttccgaaaccctcaataaaattcaccagggatgagca

SEQ ID NO: 9116 - DNA, 121 bp, Artificial Sequence
  Description of Artificial Sequence: Synthetic probe
cgagcacaaattgttccagattcacaagtaaattctgaagagaaggaccgagattgttctktagtgttctatttggatggcgcgcacagccccgaaagtatggaaatatgtgctacatggt

SEQ ID NO: 9117 - DNA, 121 bp, Artificial Sequence
  Description of Artificial Sequence: Synthetic probe
gaggagagtgatcatgtgcacattattgctctgtcagatgcattaggggtgccaatccgcktgatgtaccttgaccgaagctcttgtgatcctgccaatttgagtgtgaaccaccacgatt

SEQ ID NO: 9118 - DNA, 121 bp, Artificial Sequence
  Description of Artificial Sequence: Synthetic probe
gtacttcaatgaattctgtatcaatccctgtctcttcttttacttctctgacagctccaakgtttatatcttcacctggttcaacaactccagttggaaatttccatacacctagtcctcg

SEQ ID NO: 9119 - DNA, 121 bp, Artificial Sequence
  Description of Artificial Sequence: Synthetic probe
tgaatttgaattgatgaaatatcgaatcacggaaggcgtaaatcttccattccgggttctkcccacaattaaggagttgggccgaacacgcatggagattaatgtgaaagttaagagtgtt

SEQ ID NO: 9120 - DNA, 121 bp, Artificial Sequence
  Description of Artificial Sequence: Synthetic probe
acaccaactgaacgatggcataaacaaaattgtacagttcgtttagtttaacaatgaagakgcagaaacaaacccagcatctgatatttattgaagtcctaacagtgagacatgaccttat

SEQ ID NO: 9121 - DNA, 121 bp, Artificial Sequence
  Description of Artificial Sequence: Synthetic probe
cgggttgaagactaaggatggtgttgtcctggctgttgagaaacgtgtcacctcaccgctkctggaaccaagcagtgtggagaaaatacatggaaattgatgagcatgtaggctgtgcyat

SEQ ID NO: 9122 - DNA, 121 bp, Artificial Sequence
  Description of Artificial Sequence: Synthetic probe
gatcatgtaactgcaggtcagcaatgctttcatatagataggagactgtatgaagtcaatktattaagtctgaatattgatgccaaaatggcatgctgcaatactagagataactgtatga

SEQ ID NO: 9123 - DNA, 113 bp, Artificial Sequence
  Description of Artificial Sequence: Synthetic probe
aatcaactgtatgccttgtaaagagacagggtgtttgagctcagcctcatatctggaatckagaatgtacatgaaaattccagatgcacacattaacaatacattagctctca

SEQ ID NO: 9124 - DNA, 121 bp, Artificial Sequence
  Description of Artificial Sequence: Synthetic probe
agctaattgcgatgctcccgtactttgtcactgagactgcactgttagaaataatgattckctgctgagaggtgtccctattgaataaagagagcaaaatgtgaggctttgtcagtgtgtt

SEQ ID NO: 9125 - DNA, 121 bp, Artificial Sequence
  Description of Artificial Sequence: Synthetic probe
tgcttgatggtgtgaagaggtgtattcaacagatcaacaaggcgaacagaggtgaacttamcccggaggaactgaaagagagacagggcaaagctatgcaggaccctgaaatccagaacat

SEQ ID NO: 9126 - DNA, 121 bp, Artificial Sequence
  Description of Artificial Sequence: Synthetic probe
gaggaggccattcgaaatctcatgaaggggagccagggtgagttagcgagggaaagagctmgagagctcaagaaaaaagtaatatcttgcttggagagtgacgggtcttcttcgttggcca

SEQ ID NO: 9127 - DNA, 121 bp, Artificial Sequence
  Description of Artificial Sequence: Synthetic probe
taagcatatctctctggcttctcttccaggaatgcaagagaggactatcatcacatcctckctgtcaaaaacttacagtgtaactggttggagaattggctgggcttgtgccgtagcaaac

SEQ ID NO: 9128 - DNA, 121 bp, Artificial Sequence
  Description of Artificial Sequence: Synthetic probe
gagatgctgctaagatttccttgcggcatgcaatcagctaccttgatattggactttgacmaggggttcctacacatagacgaatatcctcctgatgctaatcaaggatttgatattccat

SEQ ID NO: 9129 - DNA, 121 bp, Artificial Sequence
  Description of Artificial Sequence: Synthetic probe
acgagttgacagcagtgtgttccaagcagatagcaagaagcagtatcagcttgatctggakaagatccgtaaaggagaagatactaggacaacattgatgattaaaaacattccaaacaag

SEQ ID NO: 9130 - DNA, 121 bp, Artificial Sequence
  Description of Artificial Sequence: Synthetic probe
gacgagaatgcagtgccgccgcctgcttgcccaagcatcgtcaactccaagcaactcggcmtgccatcttccaagctttagacagacagagagagagataatgccgcctatggatggtgga

SEQ ID NO: 9131 - DNA, 121 bp, Artificial Sequence
  Description of Artificial Sequence: Synthetic probe
ttttgagcaccttccttacgagtttgcccaggaggtagatgcactcatgaacctgaagctkgagggatcagttggttaagttgtgggctcaacaagtctatgaatatcacacgataattat

SEQ ID NO: 9132 - DNA, 121 bp, Artificial Sequence
  Description of Artificial Sequence: Synthetic probe
tgttggacaggaaaagcttttgggtgaactaagcatcgacatggaaactacttccaatcgkctcgattttgtgcagaaaagagtggctatggttctgaagaaggccagcttgaaagggcag

SEQ ID NO: 9133 - DNA, 121 bp, Artificial Sequence
  Description of Artificial Sequence: Synthetic probe
tctacttccgttgaaggcctccctccacatttatatgatgttgtggttagccttgtcagamcgacagacggggtgtgcgttgcatactgtaagctgagtagggtttatgccacaccgctga

SEQ ID NO: 9134 - DNA, 121 bp, Artificial Sequence
  Description of Artificial Sequence: Synthetic probe
agacttttgctctgtaaactcaagttacgggagcaatgcgttctttggtttcttgattgakgagattgctgcatcaaattattatgagtattactatgtgtaattagttccgagaagtaca

SEQ ID NO: 9135 - DNA, 121 bp, Artificial Sequence
  Description of Artificial Sequence: Synthetic probe
tagaattcgtcaggacttgtcgcaagatgataacagaggattggaaatatttgtgtgcggmgatcagatacgcaaaggtgctgcgctgaatgctgtgcagattgctgaaatgctactgaag

SEQ ID NO: 9136 - DNA, 121 bp, Artificial Sequence
  Description of Artificial Sequence: Synthetic probe
tctcatgcaggacttcaagactggttacctraccctctcttcaccaaggtccatgttcgtktcacagttgattgggactggtcttggatgtgtcattgctcctctcacattttggctctac

SEQ ID NO: 9137 - DNA, 69 bp, Artificial Sequence
  Description of Artificial Sequence: Synthetic probe
ttatttgckgcagttcaggaacaaatgttctcaacatttgtagagcaaggaacagcaatggagagacac

SEQ ID NO: 9138 - DNA, 121 bp, Artificial Sequence
  Description of Artificial Sequence: Synthetic probe
attgtggagcccagcacgacagatgattgagatgtttttgctgcagttagtaaactctggktcttggagctacatggaatggattgccggagaacaccattagtgttagtggatggtgatg

SEQ ID NO: 9139 - DNA, 121 bp, Artificial Sequence
  Description of Artificial Sequence: Synthetic probe
ttctgcacttcaaaatcagccagttgtcaatgctgtaattgatggcgatgacatcatctayagagactatattgatattagtgtcgctgttggcacttccaagggtcttgtggtgcctgtt

SEQ ID NO: 9140 - DNA, 121 bp, Artificial Sequence
  Description of Artificial Sequence: Synthetic probe
gcggcccaacgccaagtgggacgtctactccttcggcatggtgctcctggagctgctctcygggcgggtctactccgaggtggagctctgccagtggcacgccggcgccgccactactgaa

SEQ ID NO: 9141 - DNA, 121 bp, Artificial Sequence
  Description of Artificial Sequence: Synthetic probe
tacgacatcctaaagacctgaaacagtctagtaccagtacatatgtaattcttccctgackgtgttatgcctgctacaattccatctgggaacgtacacataattccttcttcgtgttgct

SEQ ID NO: 9142 - DNA, 121 bp, Artificial Sequence
  Description of Artificial Sequence: Synthetic probe
aagcatctcttctgttgtacttgtatcctatggaactgtatccaactatgacacatcccarctagaggagctttkggcaatggactattgcaattctggcaaaccttttatttgggttgtt

SEQ ID NO: 9143 - DNA, 121 bp, Artificial Sequence
  Description of Artificial Sequence: Synthetic probe
ggcagctgaaccagagaagaagtgatccttcatcaccaaattccaagagcaatccaagctrccacctggtttgctgctggtaattaaaggaaccatttaagctattgtgaatttgtgatca

SEQ ID NO: 9144 - DNA, 121 bp, Artificial Sequence
  Description of Artificial Sequence: Synthetic probe
tttcgctgggcactagtttcctgtgaactgaagctggagggcggtgatgttggaagcaacrccatgatacagatggarmagctagcsatacaggaccagccttgtaaaattacaratgcag

SEQ ID NO: 9145 - DNA, 121 bp, Artificial Sequence
  Description of Artificial Sequence: Synthetic probe
gtttctgttcctcggaaaattattatagagtagtatgcgtgagccctccaatgtaacagayttaaatccacattttaagcagttttttgtgtacccatccatgagttatgagttattatac

SEQ ID NO: 9146 - DNA, 121 bp, Artificial Sequence
  Description of Artificial Sequence: Synthetic probe
actgatgccatcaagttctgtcactcagttgtcaggtcggatgcgtacattactgaactaygaagcgccagaactccaggaatctcggatcatcagcgaacggagtgatgtttacagtttt

SEQ ID NO: 9147 - DNA, 121 bp, Artificial Sequence
  Description of Artificial Sequence: Synthetic probe
atcgatcggttggttgattatcttggctctgcagcacgcgtcgtccatgcgtgcgtgcagmaactgttgtacaacaacgtcggctctcatgccggcaacctttgtaatgtgtaaagcttaa

SEQ ID NO: 9148 - DNA, 121 bp, Artificial Sequence
  Description of Artificial Sequence: Synthetic probe
tggagggttgtagatgatgtgccgcggggagttcacattaatttccttaaggctgaaaggrgtttgcatagatgggctcttgaagacctccagaggattcatactgcggaggagctggctg

SEQ ID NO: 9149 - DNA, 121 bp, Artificial Sequence
  Description of Artificial Sequence: Synthetic probe
aaggaccggggggattagaacggccaatggaaccccctgactgatgaggatttgaagattygggtggagataagagcgaaaaaaatwacgtagaagatttgttgtttcacgccggttgttg

SEQ ID NO: 9150 - DNA, 114 bp, Artificial Sequence
  Description of Artificial Sequence: Synthetic probe
ctgctttttcgtatcttcttcgggatgttgaagcgacggctacgtcttggagtyagaataaggtcctccccactctatcctcgctccggtggtgcatctagcgccaatgggaag

SEQ ID NO: 9151 - DNA, 121 bp, Artificial Sequence
  Description of Artificial Sequence: Synthetic probe
gatcactcaatatcttatccagttgttagggctgtgtctgaaatgcttggtggacccgttkacattcttcatcttgacacatattcatatatctatgagtgttttgaagggaacacttact

SEQ ID NO: 9152 - DNA, 121 bp, Artificial Sequence
  Description of Artificial Sequence: Synthetic probe
ttctgtttcctcctgctctttttccatgtcgatgtggatcgtgttctattgttcactactytctcccttccaaaataaatggccggcgtggtttttgaactaaaaccacttggaacggagg

SEQ ID NO: 9153 - DNA, 121 bp, Artificial Sequence
  Description of Artificial Sequence: Synthetic probe
aagcggctgtagatcctgcttcctggtagcttgatgtaatagcaatgttgtctcaaaactkgggaagttcttggcaatttaggctcttcattttgtattggcggcattcggcagccatgat

SEQ ID NO: 9154 - DNA, 121 bp, Artificial Sequence
  Description of Artificial Sequence: Synthetic probe
gctttctctattactccatcaatcaagcatgtgttaaggttcagaacgaagaaattactakgatgggagtaagtaggttttatgtttgggggcgcagcccatcatcatgcaaaggagcacg

SEQ ID NO: 9155 - DNA, 121 bp, Artificial Sequence
  Description of Artificial Sequence: Synthetic probe
gacggtgacgatgttgtactagcataagtagcatgatggtgttttatgcccggacatgttmtagttttgtcatgtgttttgctgcctgcctggcttattacgggaaggaatgggtattgct

SEQ ID NO: 9156 - DNA, 121 bp, Artificial Sequence
  Description of Artificial Sequence: Synthetic probe
ttcctcgacaatatcagacccaggacctatttgggataatgaaccgaagtgggatactggrccaagatgggacacagagccaacttgggagcctgatcacccaatcgaacttcctggacca

SEQ ID NO: 9157 - DNA, 121 bp, Artificial Sequence
  Description of Artificial Sequence: Synthetic probe
ggatacatctgagaaagctcatgaaagtgatatatgtggcattgcttgggctccacgcacyattccaaatggtggcgttcctgccttcgtcttggcgacttgtggtgaagacaaaaaggtg

SEQ ID NO: 9158 - DNA, 121 bp, Artificial Sequence
  Description of Artificial Sequence: Synthetic probe
taactgccggtctgaaagccgagattttttttcttcttctaaaatggggagcatagccacrgcctctgtatcatgacgatgcacacagccttttattgcaaagttcatagaatcaggacga

SEQ ID NO: 9159 - DNA, 121 bp, Artificial Sequence
  Description of Artificial Sequence: Synthetic probe
aaggaaaacattatgctttccaaatgagatgtcttagaaagaacattggatattagtgaayagaaactggggtgcagaaaacagaaaaaaattagaagaaatagaaaatatgcgtggatta

SEQ ID NO: 9160 - DNA, 121 bp, Artificial Sequence
  Description of Artificial Sequence: Synthetic probe
ggaagaaaagccaggcctaacactgaaacagtacaaagacatgatatggaagctatggaaraaatccccagacaaccctttgaacaaggctgctgagtgaggatgcactcctagtttcgta

SEQ ID NO: 9161 - DNA, 121 bp, Artificial Sequence
  Description of Artificial Sequence: Synthetic probe
ggatatcagaatactaaagcaccttataatgatcgaggacccagaagaacgtctgagcgcrttgaatgatgcgtttactcctgggccygaacttcaaggcgaaaacgtcgatacattatac

SEQ ID NO: 9162 - DNA, 98 bp, Artificial Sequence
  Description of Artificial Sequence: Synthetic probe
ttctcgatgaggtcgttgtaagaacaaaggaaaatgcrgagaagaaactgactttgacttatgaagaaatggaagcagaacgagaagaggaagaagta

SEQ ID NO: 9163 - DNA, 121 bp, Artificial Sequence
  Description of Artificial Sequence: Synthetic probe
agaaggccggcaccaagaaaaccaagaaggcgaagagcacggttgagccagctggtgcctstgagaatgttaccatgtctgccatacctgcaactggtgtctctgagaatgttgccatgtc

SEQ ID NO: 9164 - DNA, 121 bp, Artificial Sequence
  Description of Artificial Sequence: Synthetic probe
ctggaactcagctccctggacaattctccctggcactgtttcctgcagactagatggttaytaccacgcgctggtgaaaattatcaaaagatataaatcttggaaaatgtgattttagtca

SEQ ID NO: 9165 - DNA, 121 bp, Artificial Sequence
  Description of Artificial Sequence: Synthetic probe
tggcgattgcctgctgttcgagctggtagagcgcactaagttcagggtctatataatcagrcaaagttcctacaatggaaaacgatgaaggtgtgagattcagatatgcccttagagcagt

SEQ ID NO: 9166 - DNA, 121 bp, Artificial Sequence
  Description of Artificial Sequence: Synthetic probe
ccaaaacctggtcctgaacttggtcggttttgcactcatctccgtgagctcattattcggkgctgcagctgggacgccttgccagattgcatggagcacctgacgtcactgcagasactgg

SEQ ID NO: 9167 - DNA, 121 bp, Artificial Sequence
  Description of Artificial Sequence: Synthetic probe
gatttacaccttgaagcacgatgttacagatgttcggtgcctaatgccaggactaattctrgcaatacggaaagtgatacgcttgaagaacttgatttatggtctggagaagttcttgtag

SEQ ID NO: 9168 - DNA, 121 bp, Artificial Sequence
  Description of Artificial Sequence: Synthetic probe
agtgagctccactccaagcggctcttctggcaacagagtggcggtggacgacgtggttgayaaggtttctaccatggggttctcgaaggagcaggtgagggcgacggtgcgcaggctgacg

SEQ ID NO: 9169 - DNA, 121 bp, Artificial Sequence
  Description of Artificial Sequence: Synthetic probe
acaatgaagatgaagaagaaacaaggcattagttggaaatgcgttggaagagttttttgcrtgttaagcgggacaacctgttatctcagtactccatagcagtgccatgtgtatagatcaa

SEQ ID NO: 9170 - DNA, 121 bp, Artificial Sequence
  Description of Artificial Sequence: Synthetic probe
ctcttctgatggtggcgatattatgatttctgaaggtgctggtatcagaacattacggagrgcagttcgcagagcttataggagaaatgaggcaagagcaaggcgaaatgtcccaattgta

SEQ ID NO: 9171 - DNA, 121 bp, Artificial Sequence
  Description of Artificial Sequence: Synthetic probe
gctccaaccccaagcaaacgtgatctggagaaaacatcggccaacctgagcagggctagcmctagggcccaccgatggtcatgcttgtggtggtgcgccgtggcatattttgattcttggc

SEQ ID NO: 9172 - DNA, 121 bp, Artificial Sequence
  Description of Artificial Sequence: Synthetic probe
ggcgagaacatcgttgttagtactgtggatgactcatatatgacgagggcctaaatgctgygtcatgtagatggcattgtgtgctccaaaattgggattggactttcgcttgccttcttag

SEQ ID NO: 9173 - DNA, 121 bp, Artificial Sequence
  Description of Artificial Sequence: Synthetic probe
tttctacaactacgacatggagagggctgaatttgtgcagctcttcatcaagttcacccakaacgtggcgctctttggagccctcctcttcttcctgggcatgaagaacgccatccccaag

SEQ ID NO: 9174 - DNA, 121 bp, Artificial Sequence
  Description of Artificial Sequence: Synthetic probe
gcaagggcatgagctgggacactaccagcaggcgcagccgtgacgacaaggacgggctcgygaacctgaacattagccagtgcacggcgctgacgcccccggctgtgcaggccgtgtgcga

SEQ ID NO: 9175 - DNA, 121 bp, Artificial Sequence
  Description of Artificial Sequence: Synthetic probe
catcgcgtcgggcagcaagctattctcgaaaggcagagtctgccacgagccgagacatccrcacacgcgtttgtgaccaaccttgtcaggtatgatgctgaagatctcaaggtggctgacg

SEQ ID NO: 9176 - DNA, 121 bp, Artificial Sequence
  Description of Artificial Sequence: Synthetic probe
ggggcgctctacggtgcggcgagtacatcacggtgcgcaagatcggcgattccacccagargggcagcaacgggttctcagcagatcgtgatcgagggcccgctgtgcgaggactactata

SEQ ID NO: 9177 - DNA, 121 bp, Artificial Sequence
  Description of Artificial Sequence: Synthetic probe
gaccgggaggattgcgggggagatcatttgcatgaatgacggcgcagtcgacttgacggaytgggtgaggatgctggcaagggaggagcgtgcttcagagtgcttcgacaggcgcattgtc

SEQ ID NO: 9178 - DNA, 121 bp, Artificial Sequence
  Description of Artificial Sequence: Synthetic probe
tggctgttagtccgagcttaaagtccatgtttgcatctgctcagatgagtccaataatgcsgttgaggttgcttgttcctgctggataccctaaatgctccccggtgctcctcgacaaatt

SEQ ID NO: 9179 - DNA, 121 bp, Artificial Sequence
  Description of Artificial Sequence: Synthetic probe
ctacctgtggctctgtgcaagactgcagcaagtagtagcagtcgcctgtatgactagacayttgttatgtctaccacatttctctgaatcctcttgtatacaatacaaggctaaagttttc

SEQ ID NO: 9180 - DNA, 121 bp, Artificial Sequence
  Description of Artificial Sequence: Synthetic probe
agtcgttgaaagaagggtatttactgtaactggtaatcgtcctgatgaagagactattgaygatttaatagagactgggagaagtgagcaaattttcaaggatgcrgttcagcagcagggg

SEQ ID NO: 9181 - DNA, 121 bp, Artificial Sequence
  Description of Artificial Sequence: Synthetic probe
tcggagcgcgcccgccataccctggtgctgtagcctttaccacagtgcatctctcttaccrttctgcaaataaacgctctttggcgtgtggccctggtcccagcaggaaagggggacctgt

SEQ ID NO: 9182 - DNA, 121 bp, Artificial Sequence
  Description of Artificial Sequence: Synthetic probe
tgcgctgaacagggatagcgccatgcagcggtacaaagagaagaggaagaatcgcaggtaygagaagcacatccggtacgagtcgcggaagctgagggcggacacacggaagcgggtgaaa

SEQ ID NO: 9183 - DNA, 121 bp, Artificial Sequence
  Description of Artificial Sequence: Synthetic probe
gaagttctaaatgagtccggagacgagtctgaagataaaataattagacgccaagagattyggtctgagcaaatcacctgccagcgaggatgattactttgaatatgacatgctcgggcgt

SEQ ID NO: 9184 - DNA, 121 bp, Artificial Sequence
  Description of Artificial Sequence: Synthetic probe
ttcttcactgctggatttaggatttggttctattgctgggtcatatgaatatgcagtgtcrtgacagaacacaggtgttgaagtacttattcagttatgtgatgaaaggtcctgactgggt

SEQ ID NO: 9185 - DNA, 121 bp, Artificial Sequence
  Description of Artificial Sequence: Synthetic probe
tactgggaggcgagggagaagggtcgatgggatggttgccgtgacatattcggcgacaacygagcttctgcggttctccccattgcggatagctcaagtatgtagtcgctccactcccacc

SEQ ID NO: 9186 - DNA, 121 bp, Artificial Sequence
  Description of Artificial Sequence: Synthetic probe
tgtgtacattacagtcggcgatggaggcaaccaggaaggacttgcctcgaggtttaacgayccgcagccggactactcggcgtacagggaagccagctacgggcactcgacgctgcagctg

SEQ ID NO: 9187 - DNA, 121 bp, Artificial Sequence
  Description of Artificial Sequence: Synthetic probe
tgctggagctatggtagccactgttgagttctacgagccaagaatgccatcatgggtggcrgtggaaccaatgaactacaccagagggtaccatgcctcagctgtgcttggtggctcgata

SEQ ID NO: 9188 - DNA, 121 bp, Artificial Sequence
  Description of Artificial Sequence: Synthetic probe
tccaggacgatcataaggtgtttggtaatttgtccacaaggcggttcagtgcggtgacgaycccttttctctgccctagtctccttctctgctaatattttcttgaaactgaatcgttcaa

SEQ ID NO: 9189 - DNA, 121 bp, Artificial Sequence
  Description of Artificial Sequence: Synthetic probe
atttggcttgagaggtcttttcagtttgatccttggtgaagaaaatgctactgacgatgcmcaaaagatgatgcagatgggtggtggaatgggcttcaacccagcaatgagtttgggcgca

SEQ ID NO: 9190 - DNA, 121 bp, Artificial Sequence
  Description of Artificial Sequence: Synthetic probe
gctaagttggtatggaagaactgctgcgccgcgggaaatccttctctatacaagttctcgkacgaggtttttgaacagaacttcgataggcgagaggtgtaaagcaccgcgaggtgtgaag

SEQ ID NO: 9191 - DNA, 121 bp, Artificial Sequence
  Description of Artificial Sequence: Synthetic probe
tggagtatcttgtagcagtgaggggtactactgaatcggcatcaccactgaagacccatawtcttaggccagctgcgataagttcacggtaaataggaagcgtggacctcggcgaatcttt

SEQ ID NO: 9192 - DNA, 121 bp, Artificial Sequence
  Description of Artificial Sequence: Synthetic probe
aaatagagcaggtgcctgaatgtgcatagcagcctgaattcacagtgcaatctgcacttcrtcacaccttttcgactgaagcacggtycccgaacaaaccgtgcagccgagagataagtta

SEQ ID NO: 9193 - DNA, 121 bp, Artificial Sequence
  Description of Artificial Sequence: Synthetic probe
tgtatagagaagcaacatacgtactacagttgaataggaacgtacatcaagcaattagtgmattgattgatcaatattattctctcctgaatctgtagagctagctatactgttcatgacc

SEQ ID NO: 9194 - DNA, 121 bp, Artificial Sequence
  Description of Artificial Sequence: Synthetic probe
gaatcatgcacatggttgtcatgcctcctccagatgctggtccggatgatcctgttgtcaytgacgagtgcactgttggaatatacgagacaccaagacatctttacagcaagatccgact

SEQ ID NO: 9195 - DNA, 95 bp, Artificial Sequence
  Description of Artificial Sequence: Synthetic probe
aagaggatggtgaggaagaggaaggagatgaagakgaagaaggtgatgaggctgaagatggagaggatgaggctgatgacaatgagccagattct

SEQ ID NO: 9196 - DNA, 121 bp, Artificial Sequence
  Description of Artificial Sequence: Synthetic probe
gaccatgcagttgctgtggcagtttctgttagaacacagttagagatgctacttggcaccmccaatggtggttctctaaatacatcggctttcaaggatgcccaatcaaccagtgagccca

SEQ ID NO: 9197 - DNA, 121 bp, Artificial Sequence
  Description of Artificial Sequence: Synthetic probe
tcgtatcttcaccgtgatggtaagagcatgctgcgtctcatgagttctaactaaaatccayccatctgcagattgtacttcttggttttcttttcgtttgtagatcgatctccacccttac

SEQ ID NO: 9198 - DNA, 121 bp, Artificial Sequence
  Description of Artificial Sequence: Synthetic probe
tggaggaatgacagttgcgttatctgatatagttgtcctacgtaatcttctgaaacctctwcgcaatctgcatgatgcctcttcactgtgcaaataccttgaatcattctatactcttcgg

SEQ ID NO: 9199 - DNA, 121 bp, Artificial Sequence
  Description of Artificial Sequence: Synthetic probe
gagatccatcgtcagttgctttctttgcaaaggctggtctgtattatgtttcttgctcccygttcagggttccgatcgctaggatagctggagcctaggtgcttgtctgaggggtgccgcc

SEQ ID NO: 9200 - DNA, 121 bp, Artificial Sequence
  Description of Artificial Sequence: Synthetic probe
tgactatatttagatgccactttggtggccgatttttggttcaaatcttcagatgagccgygtgcagtccgatatcataggaaattaactgaccgcccttattgttcaatcccaatggcac

SEQ ID NO: 9201 - DNA, 121 bp, Artificial Sequence
  Description of Artificial Sequence: Synthetic probe
agagctagatatccgcccttagccatggctggagctagtaatctggctttaggccgagacrggaggtagtagaaatgawtgcaagctcgtcacgtttaaatattctctgtcgtcgtactgt

SEQ ID NO: 9202 - DNA, 121 bp, Artificial Sequence
  Description of Artificial Sequence: Synthetic probe
agtgtaactgtgattctggccaggtgcactactgatgggagatcatgatgatgagcatggyggcgagttgcagagctattactaggagatcaccacgacaagaacggtgagctgtggagct

SEQ ID NO: 9203 - DNA, 121 bp, Artificial Sequence
  Description of Artificial Sequence: Synthetic probe
gatccaccgtgatgtgaaacctgagaacattctctttgatggagagctttgtgcaaaggtygttgattttggagtagcttttgaagacgtatactgcaatacattggaagatgatccaggt

SEQ ID NO: 9204 - DNA, 121 bp, Artificial Sequence
  Description of Artificial Sequence: Synthetic probe
aggaaatgctgatgtggctattgaggacaagatggtagacggaaatgctgatgtggctatygaggacaagatggtagacggaaatgctgatgtggctatcgaggacaagatggtggaagga

SEQ ID NO: 9205 - DNA, 121 bp, Artificial Sequence
  Description of Artificial Sequence: Synthetic probe
  modified_base (74)..(74): a, c, t, g, unknown or other
gcaccacggcgcgtagaactccaccaggaccaccccgttcgcattcagcaccttcttgaarttgttggggggtnagctgggaggaccggggagccggcggagtagagcgcggcggccgggg

SEQ ID NO: 9206 - DNA, 121 bp, Artificial Sequence
  Description of Artificial Sequence: Synthetic probe
ctggggcaaaaacgcccagacctcgccgaggaggaaaataagtaacaaaactggggacggyttattgcggctttccttggtcgtccccggttagtgagcgaacatcgagtcctcggcctcg

SEQ ID NO: 9207 - DNA, 121 bp, Artificial Sequence
  Description of Artificial Sequence: Synthetic probe
gtcgagcaggtatctgaagtttttattcgggccgccgagctttggaatggcttatcgatgmaggttctcgccacgccttctacgtggcatgtctggtcaactgagaaagtagacatgtagg

SEQ ID NO: 9208 - DNA, 111 bp, Artificial Sequence
  Description of Artificial Sequence: Synthetic probe
ggatggattagacggtgccattgtttcttcacctccttttttgttcttctyggtgttaatggtagaagtggaacataatcaagatctaggattcactgcgtggagtgagag

SEQ ID NO: 9209 - DNA, 121 bp, Artificial Sequence
  Description of Artificial Sequence: Synthetic probe
tcaagagttgtctagaagatgtgacactctcattcgtcttgtggagaaggagaaccaagartgtgatgagcgcgataggcaggccaggaaagataagaagaatatgacatcaaagcgccct

SEQ ID NO: 9210 - DNA, 121 bp, Artificial Sequence
  Description of Artificial Sequence: Synthetic probe
catagatgactctgtgagagtgagtgcagggaaggtataaagtaagtaagcatttgctgaytgttgcaagtgctagcttaggataacagactcgggtaaggttcacaaatgtgaatgtaat

SEQ ID NO: 9211 - DNA, 121 bp, Artificial Sequence
  Description of Artificial Sequence: Synthetic probe
ctgattgccgactgatggaccctaaaagcggggctgaacttgtgctcacatatgaggacarggatggcgattggatgcttgttggtgatgttccatggcgaatgttcacagacagctgcag

SEQ ID NO: 9212 - DNA, 108 bp, Artificial Sequence
  Description of Artificial Sequence: Synthetic probe
tccagtcgcagcagcagcaacagccacaacagcagaagcaacataataagctgctataggrgggagagcattcagaccagcggcaactgatagcgttattgagagtgt

SEQ ID NO: 9213 - DNA, 121 bp, Artificial Sequence
  Description of Artificial Sequence: Synthetic probe
gtccgccttcttcatgtggatgctgtcatgaggctctctcgcgcagtagtacgtcggagtytctgaaagctgcgagatagaaggagggaaatgccggcgagcccaacgagctagcggccga

SEQ ID NO: 9214 - DNA, 121 bp, Artificial Sequence
  Description of Artificial Sequence: Synthetic probe
cttcatcgtatgatatttgcattaagcttaaggagagaggcattctagcaaagcctacgcwtgacaccataattcgattagcccctcctctttcaatcagttctgaggagctcgcagaagc

SEQ ID NO: 9215 - DNA, 86 bp, Artificial Sequence
  Description of Artificial Sequence: Synthetic probe
ctgcggatgagaccctccggttctggaacgtgtttggcactcctgaagtagcaaagcccgyacccaaggcttcccacactgggatg

SEQ ID NO: 9216 - DNA, 121 bp, Artificial Sequence
  Description of Artificial Sequence: Synthetic probe
tcagtacttgtacttcctagtgtatttcccttcttcccttttgtattgtaccgtacggaaycaaacatatatatgggtgcgtgcatgtaaatgtacattaagaagctacgatcgagttata

SEQ ID NO: 9217 - DNA, 121 bp, Artificial Sequence
  Description of Artificial Sequence: Synthetic probe
ataagtgcttggttgatggggcagacgagtatttacagcttctggatatggctagcgagayaatccgtgctctttttaacattccccaagggctggtcttttaagagaagatcgtggagat

SEQ ID NO: 9218 - DNA, 121 bp, Artificial Sequence
  Description of Artificial Sequence: Synthetic probe
tccttataccagcaacttggagacatcatccacgcaaggcaatttatgtaaaactgagaaragcgcacacaaagcgctttgtgtgttctcgttatgtagctctagattcatgtacagcatc

SEQ ID NO: 9219 - DNA, 121 bp, Artificial Sequence
  Description of Artificial Sequence: Synthetic probe
acacagacaggtctatggctccatgttacaaagggtataggaggatggtgccagaatgcayatatagggttccttttcttacagttacaagttgatgtctgtcagtaacttaccgtccacc

SEQ ID NO: 9220 - DNA, 121 bp, Artificial Sequence
  Description of Artificial Sequence: Synthetic probe
taaccgctgatcaagttcttagtcacccatgggtgttgttctacacagaatgtactctgawggcagtaactcctaatgtatgtgtcactaacaaggttgtagcacccaaacttccatggga

SEQ ID NO: 9221 - DNA, 121 bp, Artificial Sequence
  Description of Artificial Sequence: Synthetic probe
tgtgggaggaacaaaagcaatagtgcttggaggacaaactggagaagagtggatgctcacwgaagtacatgagctctctctggctagtaactcggtttgaggtccagaggtcttttcagca

SEQ ID NO: 9222 - DNA, 121 bp, Artificial Sequence
  Description of Artificial Sequence: Synthetic probe
gtgcagttgggcgatgacacgctggctggatcgatgatggtgactgatgcattttggattraactttttgccagcgttcacagggcaatcacatggtgagaccgactggccttatcgcctt

SEQ ID NO: 9223 - DNA, 121 bp, Artificial Sequence
  Description of Artificial Sequence: Synthetic probe
tgtagattatgtgaagttcctgtagatcgtaatgtttttgtcacgtgatttgcgccttgtktaaatatgtctttgagctcagctgttcttcgttactggctgtattgcagtgtcggtgttg

SEQ ID NO: 9224 - DNA, 121 bp, Artificial Sequence
  Description of Artificial Sequence: Synthetic probe
ggtttaccgcatatgacacaatgaagcatttgctgaagatacctccgagagagaacgtaargtctgatcaaggttctacttgaagttcccatccacaagaaagacacattggcaaagtgta

SEQ ID NO: 9225 - DNA, 121 bp, Artificial Sequence
  Description of Artificial Sequence: Synthetic probe
aggatagttttgcttgcctacttgtaaatggaggacttgaacccgttccagtgaaatggayaatgctgatgaatgcagcattctgacccaaggaaactgttgaaatgccgatgttcatagt

SEQ ID NO: 9226 - DNA, 121 bp, Artificial Sequence
  Description of Artificial Sequence: Synthetic probe
actgcaactactgcaacaccatccttgtggtgaatgtgccaaacaattgttcctacaacaytgttactgttagatgtgggcattgcacaatggtgctctccatggatcttggccctttcca

SEQ ID NO: 9227 - DNA, 121 bp, Artificial Sequence
  Description of Artificial Sequence: Synthetic probe
catcttacgcttgaaaccgttcttcaccattttcatcgtctggcgaagtacatgtgtaccyatgcgatgtataattccatgtcgagttgtgtgagtgctatttgtaactgtaggcgtggcg

SEQ ID NO: 9228 - DNA, 121 bp, Artificial Sequence
  Description of Artificial Sequence: Synthetic probe
cattacacaattcatcttgttgatgggaaacatccaggtacttggtggtttgcagcaaaartttagctataattcatcatatttgaaggggacacctgcacaaacaagtacaaatagataa

SEQ ID NO: 9229 - DNA, 99 bp, Artificial Sequence
  Description of Artificial Sequence: Synthetic probe
gtaaggcgggacagcatctgagccagtttttgctgacgctctgcaaggctcacccctaccrctgaaatcaacacggaacagacgcaatcacagaatcca

SEQ ID NO: 9230 - DNA, 121 bp, Artificial Sequence
  Description of Artificial Sequence: Synthetic probe
agaactgttctgacttcttcctgaagggttacaatgaggatattgagaaggtagaacagaygttgccacccccgacgaggaaatggcaacgattcaaatgacaagaagtgcagtccaacag

SEQ ID NO: 9231 - DNA, 121 bp, Artificial Sequence
  Description of Artificial Sequence: Synthetic probe
acttttcttgaatcatgagcagtgaactttacttgtaatttgctttagggaattttcctgkagaaaaaaacactcgtttaatatgctgaccttatcactgctctattcttagtttttggtc

SEQ ID NO: 9232 - DNA, 121 bp, Artificial Sequence
  Description of Artificial Sequence: Synthetic probe
ggctgtggaattatttggcttgtcttgtgtttcttttccgattctttccctggttaaagtyacctttctgtgctttgcgagaaactctgtagtgtccgcctgtccgggctctgcaactagc

SEQ ID NO: 9233 - DNA, 121 bp, Artificial Sequence
  Description of Artificial Sequence: Synthetic probe
gcagaaatgtggattcatcgactggatctccatgcaaggttgtcatcttgccagatattaytgcacgaggattactggggattgagacaaggtgtgccattccatacaagtaagacatgtg

SEQ ID NO: 9234 - DNA, 121 bp, Artificial Sequence
  Description of Artificial Sequence: Synthetic probe
ttttaccttcgacgattgcagatctaccatgaaactagacagcagatatactgtatgattrtacctggaaatgggccacatcttctcactgtaacttcatgttgggacattaatccacaga

SEQ ID NO: 9235 - DNA, 121 bp, Artificial Sequence
  Description of Artificial Sequence: Synthetic probe
aggtacagcaagcacttgcagcatggtaaaccagtgaactttattctgtatatgcattcaytccacagttgcaacttactccactggcactggctgcatggcctctgcttccttcctcaga

SEQ ID NO: 9236 - DNA, 121 bp, Artificial Sequence
  Description of Artificial Sequence: Synthetic probe
aaaaatgtttacccaccgtgccaaccataatttatcccttccttttattatgctataccgygtcccctcctaaccctgcctccctaccatcttccttcatccgccatcctatcccaccatg

SEQ ID NO: 9237 - DNA, 121 bp, Artificial Sequence
  Description of Artificial Sequence: Synthetic probe
ccatctccggagcagcaaacaaattgtgtgaatccggacctcgagacagaaaatcaatcaygagctacaattgattcccacagacacaccacgaaccccaacacgcaaatctaccaatcgc

SEQ ID NO: 9238 - DNA, 121 bp, Artificial Sequence
  Description of Artificial Sequence: Synthetic probe
cgccacctggtagaaattttccataggccagtttagacaattccatagttaaagcatgtcrtcatacatacaagtatactgaagattgtaccgcattgggaatatataattggttggggtt

SEQ ID NO: 9239 - DNA, 121 bp, Artificial Sequence
  Description of Artificial Sequence: Synthetic probe
agtcagtccttaagctactctgcggctaataatatatttagccctcgttaaagtgtctttkaaccttataaagatcatttgcgtgcaagaagtcgagcaataatctctcttttactgacga

SEQ ID NO: 9240 - DNA, 121 bp, Artificial Sequence
  Description of Artificial Sequence: Synthetic probe
aagttagtggatctctttgaagaagctacagagtctgcaaatcacacagctcaactgtcgytggctacacagagtaaaccagtgatcgagcgaatatctcttcaaacagaaaacctctact

SEQ ID NO: 9241 - DNA, 121 bp, Artificial Sequence
  Description of Artificial Sequence: Synthetic probe
tatcttacatttgtttcacagccatatcttacagtcattgttcacaaccattcgtccacamccattgttcacaaccattcgcccacaaccattcgtccacaaccattgctgctcgccggag

SEQ ID NO: 9242 - DNA, 121 bp, Artificial Sequence
  Description of Artificial Sequence: Synthetic probe
gcatcacatgcctctgagcttggtgatctgatttccaagtcattggaaacatggagttctrctggtgtgttacgaagaattgtgggagcagaacatgagctgctagctgagttcaagaaaa

SEQ ID NO: 9243 - DNA, 121 bp, Artificial Sequence
  Description of Artificial Sequence: Synthetic probe
agttccaggtgggggaaaaagggccatgatacatcctctccacagctgcgcatttcgtagrggcatggaattacattggcaaaaagactgaaactcctatatatatgtagcttaagcttgt

SEQ ID NO: 9244 - DNA, 121 bp, Artificial Sequence
  Description of Artificial Sequence: Synthetic probe
tgtgtactaccactctctccggtttgcagagcagcaaggcatcaagtctctgtttgtacaygtgcccctcttctcgacagtcgacaaggaggtccagatgcatttcgctggttccctcctt

SEQ ID NO: 9245 - DNA, 121 bp, Artificial Sequence
  Description of Artificial Sequence: Synthetic probe
ttgtggagcctttgattcctccggaagaagccaagcttggagaacgcatttcttttgctgrgtttgatgggaagccggaagatgttctaaatccaaagaagaaacagttggacaagataac

SEQ ID NO: 9246 - DNA, 121 bp, Artificial Sequence
  Description of Artificial Sequence: Synthetic probe
cgctcgaggagatcattcattacgaccagtgggcgaggaggtacacagccagcctacaggmatcctctggccggagccctgttcttgcataaggccctgttggaacagttcccagttctcg

SEQ ID NO: 9247 - DNA, 121 bp, Artificial Sequence
  Description of Artificial Sequence: Synthetic probe
gtcaagtgcgtgaaggcgatgactatgagtgctcccttgattttgattgagccttagttgkgaattgtgatggttgccggagtgcattcacatcgaactgaattatccatttcctacggat

SEQ ID NO: 9248 - DNA, 121 bp, Artificial Sequence
  Description of Artificial Sequence: Synthetic probe
gaaagccagaggatggaaaggcttcaactgatgatgcagctgttagtaagaagaggaaacyagaagatgttgaaggaagcaaaccccatgccaaagaagataccgctgctactgaagatga

SEQ ID NO: 9249 - DNA, 121 bp, Artificial Sequence
  Description of Artificial Sequence: Synthetic probe
gtaacggtggtatgaaacgtgcgaaaacaggccagtagggaaccaactcccccaactgttrccggtattgtcgaggtgccttatgcccatatgggacgccatgtcttgggggcatttgccg

SEQ ID NO: 9250 - DNA, 121 bp, Artificial Sequence
  Description of Artificial Sequence: Synthetic probe
accgttcgtgacgctcagcggacgcataccggggattctcaaatccggagacctgttcgtyggcaagacaaggaagcagatgggtctgggtgcttgagcagggcgtgccctcctgaccttc

SEQ ID NO: 9251 - DNA, 121 bp, Artificial Sequence
  Description of Artificial Sequence: Synthetic probe
gatggttacccagcatcatgacggcatgtacactgggctgaatacattcaatctccagtaygagaccaaagaagaagacctgccggcccctcagtaaacttttattgtccgctatgcatgc

SEQ ID NO: 9252 - DNA, 121 bp, Artificial Sequence
  Description of Artificial Sequence: Synthetic probe
cctttcatcattgcatgatggcaacctagtctaaggcttgagtgaaataccttcttgttgraatttgtttttttgtaactgagattgagtgatgttgctgcgttgctgataagatatctct

SEQ ID NO: 9253 - DNA, 121 bp, Artificial Sequence
  Description of Artificial Sequence: Synthetic probe
tggggagtcttctgaatttcggaccgagaaagacgctgtagtagaagaggtgccatctgcrggaggtagagtagagcctgaggcaccacaggaacaaacaactgaacatgttggcgaagca

SEQ ID NO: 9254 - DNA, 121 bp, Artificial Sequence
  Description of Artificial Sequence: Synthetic probe
acaattcatattcgacgcattcagttactccccatccaccacacttttcgaggtgtcacgygaagaggaatttgcgccagtgaagaatgcaaacggcgcagcttacgacacccctgatacc

SEQ ID NO: 9255 - DNA, 121 bp, Artificial Sequence
  Description of Artificial Sequence: Synthetic probe
ttttgcaaagatatgtgggcagccagttggaattatcggaaacaatggaattttatttacygagtcagcgctaaagggtgcccacttcattgagttgtgtgctcaacgcaatattcctttg

SEQ ID NO: 9256 - DNA, 121 bp, Artificial Sequence
  Description of Artificial Sequence: Synthetic probe
ggttctgtgctaccgacatgatgaggcagctacaaggttcctcaagaaaacctataacctycccaagaagctttgatactacatgggatagctcacacactgtacattttcagccaccgct

SEQ ID NO: 9257 - DNA, 121 bp, Artificial Sequence
  Description of Artificial Sequence: Synthetic probe
gctggaagcagcggtgtcatggaggagaaagaggatgagaaggatgacacggctgcaccamgcagaaggtcgcgaagagagacatagacttcagtctaggaccttgctattttggacgtct

SEQ ID NO: 9258 - DNA, 121 bp, Artificial Sequence
  Description of Artificial Sequence: Synthetic probe
ttggaggataaggtgttctctatcagagaagcagctgcgaacaacttgaagcgcctggcaraggagtttggtccagagtgggcaatgcagcatataattcctcaggtgttggagaagataa

SEQ ID NO: 9259 - DNA, 121 bp, Artificial Sequence
  Description of Artificial Sequence: Synthetic probe
aaaaagctcgccaagagaaattgtccgaaagattgaggaagctgcaaagcctctaggattygatattcagaagaaaaaytacaagctgagactagaaaaggtaaaggctggaaggaagggg

SEQ ID NO: 9260 - DNA, 92 bp, Artificial Sequence
  Description of Artificial Sequence: Synthetic probe
gacgccaaaatttgagaagaaagcttgcatgttgcgtgtcagcctaaatggaactagctcrttgaactcaatcattccatttggatcatagg

SEQ ID NO: 9261 - DNA, 121 bp, Artificial Sequence
  Description of Artificial Sequence: Synthetic probe
cagctgagctgttgtagcatacgcacacacacactatggattgacgtgttcatttccttcygtggaggatgagcacagcggaattttgacagatgatgagtgtaaaatcagaaggtcygtt

SEQ ID NO: 9262 - DNA, 121 bp, Artificial Sequence
  Description of Artificial Sequence: Synthetic probe
aatttctgctagacatttctggtggccccaacatgatgtatgaaatttcaggtatcccgtrcctcaacaactagcgcgaagtttgcagccttatttggtcacaagaagaaatagtgctcta

SEQ ID NO: 9263 - DNA, 121 bp, Artificial Sequence
  Description of Artificial Sequence: Synthetic probe
agcatctcgctacggcggtagatcttagaagaaggagcagcagtactagctcctctctggscttgtgtttaacccatctggtttaggctctgctccatctttatctagaagagcgccttct

SEQ ID NO: 9264 - DNA, 87 bp, Artificial Sequence
  Description of Artificial Sequence: Synthetic probe
aaatgctgagcaagcactacaacatcmattctttaatgttggtaagtgggcaccaaggtctctccatgataattccttctcaaggat

SEQ ID NO: 9265 - DNA, 121 bp, Artificial Sequence
  Description of Artificial Sequence: Synthetic probe
aaactatgaggagcatatcaaagagctwagggctcaaagggtatctcagttgctctcagaygttgcaggctccagttcagatttacaagccttgccgcagggtctttccatgctactagag

SEQ ID NO: 9266 - DNA, 121 bp, Artificial Sequence
  Description of Artificial Sequence: Synthetic probe
tgtagctcttccagatgtgacgaaggtgtactgtggacatgaatatactctgagcaattcmaagttcgccttgagcgtagaaccaggaaacgaagaacttcaggaatatgctgcaagtgca

SEQ ID NO: 9267 - DNA, 121 bp, Artificial Sequence
  Description of Artificial Sequence: Synthetic probe
gattagtcgcttccttgagggatatagagctggaagaacaataaagaagagagtgggcggrcgttccccaacactgctcggtgtgaatgcactgtacatcctcctcttcttggttgctgtt

SEQ ID NO: 9268 - DNA, 121 bp, Artificial Sequence
  Description of Artificial Sequence: Synthetic probe
gctaccaaagtggaagcagaataggctcaagatcgcactacagctgttttaaaatgtgttrtacaggctgttattctctgcttagaggttggttttcaaaggcaaatctcatgcagcacac

SEQ ID NO: 9269 - DNA, 121 bp, Artificial Sequence
  Description of Artificial Sequence: Synthetic probe
ctcgtcgaccagtgcatgcagggggaggttaagataaacttcgatggcttcataacccacragatgccattctcagagatcagagaggctttccggctgctggaggaaggcaagtccctga

SEQ ID NO: 9270 - DNA, 121 bp, Artificial Sequence
  Description of Artificial Sequence: Synthetic probe
acccctgaacctgtttgtctgcgtggtgctttacaatgtgaacgcattcccgatcaccgtmatgttcggcatgtgctccatcttcctcttcatggcagcaatcttgcagagacggctaatg

SEQ ID NO: 9271 - DNA, 121 bp, Artificial Sequence
  Description of Artificial Sequence: Synthetic probe
cgactggagctgcaaacggtgttgccccaacagatgcaaacccggcagtggtgacagtggkctgttaatttttcgctgctcaagtcgtttgagcatccatgcaaggaggacaatcttatac

SEQ ID NO: 9272 - DNA, 121 bp, Artificial Sequence
  Description of Artificial Sequence: Synthetic probe
aggagctgaagctaactttatcaattcacttgaccatgtccagaagatcgagattttgagyggcatcaatgacatgaagaatgagttccagtcctttctggaatcccgtgatccgtctaaa

SEQ ID NO: 9273 - DNA, 121 bp, Artificial Sequence
  Description of Artificial Sequence: Synthetic probe
aaaacgtgaggctacatggaagcgtctagaggaaattggcttgtcaaatctgcaagcagcraggcccgagacaacggttcaccagcagagttctacctaacttgcttcctgacttgcacac

SEQ ID NO: 9274 - DNA, 121 bp, Artificial Sequence
  Description of Artificial Sequence: Synthetic probe
catggcactgaaaaacctgtgtgacgttggcattattcagccgtaccctccgttgtgcgaygtgcgggggagctacgtgtcgcagttcgagcacaccatcctgctccgaccaacctgtaag

SEQ ID NO: 9275 - DNA, 121 bp, Artificial Sequence
  Description of Artificial Sequence: Synthetic probe
tgtacttgcagtggagaccttttgtacatcaaggagcatgacacttgcataagtaagacakcagttcaggctaaagcagcatgggctgccgtgtgggggatcttggtagcgttggctgttt

SEQ ID NO: 9276 - DNA, 121 bp, Artificial Sequence
  Description of Artificial Sequence: Synthetic probe
gttcaagtgcagcaactgaagagggcgagattgtctgagaacacacattcaactgtcactmtattactctgctgctgctgcttggagcaaaaaacccatatggtgttttgttctttcttct

SEQ ID NO: 9277 - DNA, 121 bp, Artificial Sequence
  Description of Artificial Sequence: Synthetic probe
ccaatcacgaaagggaagcaggaaactagccaaaattgtgatgcttcttggctgcatattygggaatgggaagaaaaacaagcgcaaatgtgtggtcattatgttcttgtattcttctgtt

SEQ ID NO: 9278 - DNA, 121 bp, Artificial Sequence
  Description of Artificial Sequence: Synthetic probe
agccccaagaagagtactgcttcctactagtactcctgaagaagaagagaagagtactacygctactactactggcttctctggttaatgcttaattatggtttggttcatgtttcttatg

SEQ ID NO: 9279 - DNA, 121 bp, Artificial Sequence
  Description of Artificial Sequence: Synthetic probe
cggtggggttacccttggtgaaaagcctacttttgtgtggtatgcaacggcgggggttgtygtggctgtgtcgatctccgcatttggttattggtatggcaggaagcgccgcaggtggtga

SEQ ID NO: 9280 - DNA, 121 bp, Artificial Sequence
  Description of Artificial Sequence: Synthetic probe
ccttggagcaggcacgctaccatttggaacgctgtttattgagctgttcttcattctctcragcatctggcttggaaggttctactatgtgtttggcttcttgctgattgtcctactgatg

SEQ ID NO: 9281 - DNA, 121 bp, Artificial Sequence
  Description of Artificial Sequence: Synthetic probe
gctgaataaatcgacaggctctcttgccactgaccgagatctccttgaaaccattgcggasaaggcattgaaggaagattcagttttcgtcgtcccattgaagaggtcaagtttggatagg

SEQ ID NO: 9282 - DNA, 121 bp, Artificial Sequence
  Description of Artificial Sequence: Synthetic probe
aggacttgacaaatagcccatctactgggaaggctcgttgtgtttggtgtagcgtgttccraccaagtggagatgggcatgtttgggagtatttgcaccttggggctggctgcccaggttg

SEQ ID NO: 9283 - DNA, 121 bp, Artificial Sequence
  Description of Artificial Sequence: Synthetic probe
gttaggcctagtattatcatgggcttttaattctcctggcgtgccagtgtgttagcaggartgtgagccgaagcatttgaacgagcttttggctaggatggcagcggtggtaaaggatggc

SEQ ID NO: 9284 - DNA, 121 bp, Artificial Sequence
  Description of Artificial Sequence: Synthetic probe
ttttcttttgtgggaaatagaaacgttgcgccatcactacacacctgcagtttctagattygttgactcacttgaaaatgatctcactgtacgtgccaaaacaactgagatgaaaataaca

SEQ ID NO: 9285 - DNA, 121 bp, Artificial Sequence
  Description of Artificial Sequence: Synthetic probe
gccgacgtgattttggcgaaaaataaaaatctactactacagctgtacatggcacgcgctyatccgataggcaatatcttgttctgttgcagcagcataaaggaaggaaaactgtataaat

SEQ ID NO: 9286 - DNA, 121 bp, Artificial Sequence
  Description of Artificial Sequence: Synthetic probe
aatgagtatgcttctggtgacaagttaactgttgatatttttttcctccaagatcatttcyggtctcattttcacagaaaataagaaacgttacaaatttttgaccgttaactcctactgc

SEQ ID NO: 9287 - DNA, 121 bp, Artificial Sequence
  Description of Artificial Sequence: Synthetic probe
tttggtgggtctcaaaggaattttcaacagccatacacgtggaactggatttatgcatcgygctttccaggcatatgctaaatacaaaggtcaactaggaactgttagaaaaggagttctg

SEQ ID NO: 9288 - DNA, 121 bp, Artificial Sequence
  Description of Artificial Sequence: Synthetic probe
tctcatgaaaacgtcaggaccgagaaatcaaaggggtttacgcgctaaacgtgtgaacccygacagcgcatcccttgaagctcagagatttacttcaatgatactagcttggcagtagaac

SEQ ID NO: 9289 - DNA, 121 bp, Artificial Sequence
  Description of Artificial Sequence: Synthetic probe
ccctctgccaaagtaacaccaatcgttgtgaagaagaaacccgctacaccaaagaacgggmtctcgcaggtggatgacgacgcaaggagtgtgctcagtgtgcagtcagagcgaccaaggc

SEQ ID NO: 9290 - DNA, 121 bp, Artificial Sequence
  Description of Artificial Sequence: Synthetic probe
gtacgagtgggttcacaagcccgaccttgacacaagcagaagaagattcttcttgtaattrttgtctttgcttcaccatgcgaaccgtttgtttctgttcctcggaaaattactgtagagt

SEQ ID NO: 9291 - DNA, 120 bp, Artificial Sequence
  Description of Artificial Sequence: Synthetic probe
tcggacactttctaagctgtagttcttgtactctacagacgtgagatgcatcaactttcrtcgtcacaaagtatggtgcagcaaatgtaacatatgagtgcagcaaatataattgagctg

SEQ ID NO: 9292 - DNA, 121 bp, Artificial Sequence
  Description of Artificial Sequence: Synthetic probe
gatattccagaagtacctatggaggacgattaatggcagcggagagcgttgtggtttgctrtgtgaacttcatcggcgctccagttttgatggtagtggttttcctgggcgatttgtacct

SEQ ID NO: 9293 - DNA, 121 bp, Artificial Sequence
  Description of Artificial Sequence: Synthetic probe
gaagcccccggtgaagcaacaagtgagctcggctccatttaaaaccgccgtggagaacttytacatgaccgactcgattacacgagcctcgaagatcatggctcagtgcagcgcggccttg

SEQ ID NO: 9294 - DNA, 121 bp, Artificial Sequence
  Description of Artificial Sequence: Synthetic probe
taggcagagaaggaacaaggaatttggatgttgtagagatgagagctctcttgtcctgttytgtatttctgttccgtataaatttccaatgaactttgagcaagggctgctttgatcattg

SEQ ID NO: 9295 - DNA, 121 bp, Artificial Sequence
  Description of Artificial Sequence: Synthetic probe
cttgcttcagcggatcagcactcatggtcgtctccaccccaccctcccctaggttactacyggcagctgcagcaaggtctttctttgtcgaggcatcgggcgatccatttgtttcaatttt

SEQ ID NO: 9296 - DNA, 121 bp, Artificial Sequence
  Description of Artificial Sequence: Synthetic probe
ctggtactccaaggtatcaccgtttgtcttctttaactccacaagatggaagttaggggtracctcaaatatctcggcatcgatacccatcacacctttccttcctggcctggaaccttcc

SEQ ID NO: 9297 - DNA, 121 bp, Artificial Sequence
  Description of Artificial Sequence: Synthetic probe
ccttcttgaagcaatggagattggcaaggaaaggaaaaagagcaaggttgcgctcctgaasgataggaaaaagaaggccgaatccagtgcttctgctaagaaacgtagctgatgcacggca

SEQ ID NO: 9298 - DNA, 121 bp, Artificial Sequence
  Description of Artificial Sequence: Synthetic probe
tgcttcttatgtcagcagcgggtcgcctcttgccattataactatgtgaataggatagtartaataatctgccagctgctattccatgcctggtactatgctgttctatgtttttgtctta

SEQ ID NO: 9299 - DNA, 121 bp, Artificial Sequence
  Description of Artificial Sequence: Synthetic probe
gtgcaagaagcagaatttgctgctcagccaattcaatgctcactacatcctgtttaacatrtcctgggctttgattttcaccgttgctgactgctgctttagcctctaaagaatgatgaaa

SEQ ID NO: 9300 - DNA, 121 bp, Artificial Sequence
  Description of Artificial Sequence: Synthetic probe
acacgtgtacacactgatcatccggcctgacgccacgtacagcatcctcattgacaatgtygagaagcaatctggcagtgtctatgatgactgggacattctccccgcgaagaagaagagg

SEQ ID NO: 9301 - DNA, 121 bp, Artificial Sequence
  Description of Artificial Sequence: Synthetic probe
tagtgaagactgcaatgcaggaagcagcaaagaagagggagatgcggtattcggacctcargaaaattgaccgtggggtaaggcgccacttccacgatgatataaccgtcgtcgtggtatt

SEQ ID NO: 9302 - DNA, 121 bp, Artificial Sequence
  Description of Artificial Sequence: Synthetic probe
cttgctcattatcacggacggtgttatctctgacgagcaagaaacaaaagatgctattgtragggcgtcagatttgccattgtcaattctcattgtgggagtaggaaacgctgatttcacg

SEQ ID NO: 9303 - DNA, 121 bp, Artificial Sequence
  Description of Artificial Sequence: Synthetic probe
gcatctttcaatagcatcgaggcatattcttacatttgggcggtatagagaagggcaccaytggcgaggaatcaattttggtgacatgacaaataaagttactttgccgtgtaggcatcat

SEQ ID NO: 9304 - DNA, 95 bp, Artificial Sequence
  Description of Artificial Sequence: Synthetic probe
atcgccgactggcttcatgttcgcttcgagcttcaccacgttggctaataattgcatcaayctcatcaagaaaaatggtagatggtgcatgatgc

SEQ ID NO: 9305 - DNA, 121 bp, Artificial Sequence
  Description of Artificial Sequence: Synthetic probe
gaaggttgagtttggcttgccagacctggagggtcggacccagatcttcaagatccatacycgcgccatgaactgcgagcgagacatccggtttgagctgttggctcgcctctgccccaac

SEQ ID NO: 9306 - DNA, 121 bp, Artificial Sequence
  Description of Artificial Sequence: Synthetic probe
aaatgtcgcctacttggcaaacgctattcatgaggtcaccaagcaaaattaagatcccttygtcctgtcatcctgggaaataagaggagccttttcaccttcaagtttcaagcggcggctt

SEQ ID NO: 9307 - DNA, 121 bp, Artificial Sequence
  Description of Artificial Sequence: Synthetic probe
ttgccttgggaaaatggaagtcctttgtacatgatatgtaacttgccgctggtagctcttrtggtgcatagaatctcatgttttggtgtgtggtttgctgagccaaaaactgaaagcaaat

SEQ ID NO: 9308 - DNA, 121 bp, Artificial Sequence
  Description of Artificial Sequence: Synthetic probe
tttccttcattaactgaggtgttgatcgactggtgtaacagtattctgtcgtaacgtttgrctctagcatgttcatgttcggatgttcctcttcgatgcattctactgttatacatattgg

SEQ ID NO: 9309 - DNA, 121 bp, Artificial Sequence
  Description of Artificial Sequence: Synthetic probe
gtacatttttactcctgccgtcagcgtatcttcaatttgacgagaaaggtcaaacccacgyggtgtatcagcatgttttgagaataaactcgttcgatcatccacacggtaatactacggt

SEQ ID NO: 9310 - DNA, 121 bp, Artificial Sequence
  Description of Artificial Sequence: Synthetic probe
catgctgtgtttcgctcccatttcctgcaaggcacatgggccgaagcatcaattttgttcktttgttttaactcatctgttgcaagtsatgagctgtaagttgcacgaaaaggttaatttg

SEQ ID NO: 9311 - DNA, 121 bp, Artificial Sequence
  Description of Artificial Sequence: Synthetic probe
attcagcagaagcaccaagcagtaaaacggcctcacctaccaattttaccattgagacttrttggcacatttgagtatggttgttctttgcggaaaaatccacctgatagcatagaccggt

SEQ ID NO: 9312 - DNA, 121 bp, Artificial Sequence
  Description of Artificial Sequence: Synthetic probe
gcctagcctgtcctatctcagcatcgattggtgggattgggaggaggaagaggaagaggargaggagaaggaggagaaggagaagggatcagagatggaacctgcgataaggagagcaatg

SEQ ID NO: 9313 - DNA, 121 bp, Artificial Sequence
  Description of Artificial Sequence: Synthetic probe
cgtggtccagtgtccaaatatgttcttcctgatgagaatctacgaggaaggcttgaaatcrcttttgatggagacataatgaatggggtggcatgtaaccttgagtctcaaggctttaaag

SEQ ID NO: 9314 - DNA, 121 bp, Artificial Sequence
  Description of Artificial Sequence: Synthetic probe
cgtgaatgtgcgcagtggagaggtgctgttgatagaggtgaacaccgtacctgggatgackccgtccacggttctgatccaccaagcactcacggaagaaccgcccatctacccccacaag

SEQ ID NO: 9315 - DNA, 121 bp, Artificial Sequence
  Description of Artificial Sequence: Synthetic probe
tatcggtagcggctggggcagtttagcaatacaagtggttaagcaaactggctgcaaatayactggaatcactttgtcagaggagcaacttaaatacgctgagaaaagagtaaaagaagct

SEQ ID NO: 9316 - DNA, 121 bp, Artificial Sequence
  Description of Artificial Sequence: Synthetic probe
ctctttggaggagaagcaggcggacgtccagggcaacacgtttgctttcggagtgattttrctggagatcgtcagcggacggctcccttactgcaaggacaaaggctatctggttgactgg

SEQ ID NO: 9317 - DNA, 121 bp, Artificial Sequence
  Description of Artificial Sequence: Synthetic probe
gggatggaactggtgagcttaaggtttggcaatggattattgatgcctcccaaacctgatsaatatatagtgtattctagattagtttcccaatgtatgttatgatggatttctcaaagct

SEQ ID NO: 9318 - DNA, 121 bp, Artificial Sequence
  Description of Artificial Sequence: Synthetic probe
ggttctcctaaattgtgttgaagaggccaatggttccaccaattggcctaattgttcgccracatgcagaagaggttctcagaagtttggaagggcaggatgccaaatggaacatctttcg

SEQ ID NO: 9319 - DNA, 93 bp, Artificial Sequence
  Description of Artificial Sequence: Synthetic probe
tgtaatttcaacctaggtagctaggttatcgctggcctcatcttcaagatacagatgattrgttacgcggggtcagttaatttgaagcaaagt

SEQ ID NO: 9320 - DNA, 121 bp, Artificial Sequence
  Description of Artificial Sequence: Synthetic probe
gaagtcagaagtggcttcaaagaagaggaagcacgaagaggccgagcctacaaaggagacrgctgcagaggacggagagcaggagaaggagaagtcaaagaagaagaagaaatccaaggac

SEQ ID NO: 9321 - DNA, 121 bp, Artificial Sequence
  Description of Artificial Sequence: Synthetic probe
aatctccggaggaagagagcaacaaacagttctgtgaggtctgcgctatgaagttcttgcygaaggagtctctgtgaacttgacctccgatgccaggggctataaattcctcggcacggta

SEQ ID NO: 9322 - DNA, 121 bp, Artificial Sequence
  Description of Artificial Sequence: Synthetic probe
cccaatgccagttttggcagtkgtgttcccacgtgagggctctgatccatcaaagtggcgwtcgtatggaacgacacaggcgaggcaatgtttttctgtgagaggtgtctaccctttgatg

SEQ ID NO: 9323 - DNA, 121 bp, Artificial Sequence
  Description of Artificial Sequence: Synthetic probe
gcagggtaattgatgtggatctccatcagtaagaactgtaactcgtggctgagtcctcgtkatggttttggtttcytgcaaaccgtttgctgctacagcagtttcacttttatatgtatga

SEQ ID NO: 9324 - DNA, 121 bp, Artificial Sequence
  Description of Artificial Sequence: Synthetic probe
ctagatgaagctactagctctcaccagggtcctttttagctccagagatgtgtttctccgygtcgatgcatcatgatgtgatctgcaggagggtagtacgatctttttgtgaatattgcgg

SEQ ID NO: 9325 - DNA, 121 bp, Artificial Sequence
  Description of Artificial Sequence: Synthetic probe
tgctgctactgtatggtgatggattcaccgtgtgcgcgtatgggcagggagaagaagacgmgagacagaacttgctaaccatgatgcattagttgaccttggtgcatacccggcgtatctc

SEQ ID NO: 9326 - DNA, 121 bp, Artificial Sequence
  Description of Artificial Sequence: Synthetic probe
gtacgtcgccggctgtgccgccttccgcaacgccaagaggatggacaacgacgagtcgtayggcatggcgaggatgaccaagtctcggccgagcaggttccagttctaggcttgcgacgaa

SEQ ID NO: 9327 - DNA, 121 bp, Artificial Sequence
  Description of Artificial Sequence: Synthetic probe
tgccaaatgatcagttttcacagtatcccagggatccatcaacacaggacagtcacattgrttttggttcttctctatctgccttcgagcttccaccaatgcctagcttttttgatgagat

SEQ ID NO: 9328 - DNA, 121 bp, Artificial Sequence
  Description of Artificial Sequence: Synthetic probe
ggtttcacctccaaactaatggctaaagatctggatttgtccatggcctctgcatctggtrttggcttcaaatgtcccatgggctcagaagcacttgagatctaccggaagttatgcgacg

SEQ ID NO: 9329 - DNA, 121 bp, Artificial Sequence
  Description of Artificial Sequence: Synthetic probe
gtcgaatctacttaagtctgcatatgctgcggcttttaaacaagtacgcccagcattcccygaggagacccctaaggatcttgcgttcatcgttgaatcatgctgggtcgaggatcccgcc

SEQ ID NO: 9330 - DNA, 121 bp, Artificial Sequence
  Description of Artificial Sequence: Synthetic probe
ttctgcagcagtattcatcattgccaacgaatcagtatcaccactccgggatgctccatcygctctagagcctgtctcctcaagacgtgctgcacttctggatgcccttggtgatgagcga

SEQ ID NO: 9331 - DNA, 121 bp, Artificial Sequence
  Description of Artificial Sequence: Synthetic probe
gtgttttgcctaatcggtaatcacatggtacctatcaaacaagcaaaaacacctacttgtmttcatcacatggatcatgatgtccggatgaaatctgcgtctgtcactacggggacagtgt

SEQ ID NO: 9332 - DNA, 121 bp, Artificial Sequence
  Description of Artificial Sequence: Synthetic probe
ttctgagaataacttctcagaatctactgctggagaacatacagaaataggaaatagacgsctagattccatatcggaggctgttagttatgaagattttggaagtgattaatcagctttt

SEQ ID NO: 9333 - DNA, 121 bp, Artificial Sequence
  Description of Artificial Sequence: Synthetic probe
tcgtcgcgttgtatgagaagcatgttgttggctcttaactgcttccttaacattatgcaaytgagttaactccctagatttcttaatagggttcagcgttgatgacacgatttaggtcaag

SEQ ID NO: 9334 - DNA, 121 bp, Artificial Sequence
  Description of Artificial Sequence: Synthetic probe
gaatccacagatcatgttccctaacaaaggcggtttgtgggtccctggaggtgtaccccckttcacaggctctgcaatgaatctggatttcagaagagccatgtcttcgtatctcccaact

SEQ ID NO: 9335 - DNA, 121 bp, Artificial Sequence
  Description of Artificial Sequence: Synthetic probe
gtcggcggcgtgcgtgcctccatctacaacgccatgccgctctccggtgtggagaagctcrtcgcgttcatgaaggatttccaagccaggaacccctgattgaccatgatcctctggtatt

SEQ ID NO: 9336 - DNA, 121 bp, Artificial Sequence
  Description of Artificial Sequence: Synthetic probe
cttatgtgaagacagggttgcattattgccagacagattatgatcatgtaatgctttcatmtgaatatcgctggactcttgaagctgccacctgagcttgcaatggatcatacgacatgct

SEQ ID NO: 9337 - DNA, 121 bp, Artificial Sequence
  Description of Artificial Sequence: Synthetic probe
agagcttcgccgcgacatcgaaactttaagaagactgagctaaaactcttttccaaggggyggcgctggattacgtgggagaaactggggcaataattatatgttgaagtggtcattttta

SEQ ID NO: 9338 - DNA, 121 bp, Artificial Sequence
  Description of Artificial Sequence: Synthetic probe
ccaggaagatgtgccaagctttggacgtgctcacagccacagggttggatttcccaggcgrcagtgcacgcttcagaggtctaaccccagctcgacatgttcagacttcgacggtgcaaag

SEQ ID NO: 9339 - DNA, 121 bp, Artificial Sequence
  Description of Artificial Sequence: Synthetic probe
tgaacccagctaatactgatgacactgaggcgcccaatgcaaatggtaaaccaaaggccgyggcggtaaatgatgttgcgcgtaaaatcgaaggcttccacatttccgaggaggggcagac

SEQ ID NO: 9340 - DNA, 121 bp, Artificial Sequence
  Description of Artificial Sequence: Synthetic probe
ggatgagcagctagctgcaaactatctcttggaccacatgaatgagtttgacgatgatgcrccggaaccgccacactaatctggtagttatagattacaaaaggtacatgtgtcgcgcaaa

SEQ ID NO: 9341 - DNA, 121 bp, Artificial Sequence
  Description of Artificial Sequence: Synthetic probe
cgagaggctctgaaggacgatggagcagctgatagcatggaagtggtgaacgacatattgmaagaagtcgacacggataaggatggcaagatcagctacgacgaatttgtagcaatgatga

SEQ ID NO: 9342 - DNA, 121 bp, Artificial Sequence
  Description of Artificial Sequence: Synthetic probe
gttcgaagtcgggtccttcatgtcagccacgctaagctgtgatcaccgggtcatcgatggygccatgggtgcggagtggctgaaggcattcaaggggtacattgagaacccgacgaccatg

SEQ ID NO: 9343 - DNA, 121 bp, Artificial Sequence
  Description of Artificial Sequence: Synthetic probe
agataatatgggatcttgtttaaacccaaatgatgttcccaaagtcatcgcaattcctcaktttgcttgtagagttgaagaggctgccctctcggctggtttgccctggaagctcaattgt

SEQ ID NO: 9344 - DNA, 121 bp, Artificial Sequence
  Description of Artificial Sequence: Synthetic probe
ttagaggacctgaattctgagagcctgctggagcgtggctccggcaaagatgcggtcagcrcattcccctgcatcgctgctcctatcgcataccacgccccttccccgatggatgtagctg

SEQ ID NO: 9345 - DNA, 121 bp, Artificial Sequence
  Description of Artificial Sequence: Synthetic probe
tgatgaatcttcatttaccactgaaagcactagagattcattcagtgtcgtggattatggygacaatgctggccttgatccaatcacctcaatatttgggccatattacgctcctgaccat

SEQ ID NO: 9346 - DNA, 121 bp, Artificial Sequence
  Description of Artificial Sequence: Synthetic probe
cgagcacgccccgaagctgaagcctcagcacgtggtcctcaaccatctgttcatcgagaarggatgggggtcgcagtccctgctcgccctcggggtcacccatcggttccagtcgaagtat

SEQ ID NO: 9347 - DNA, 121 bp, Artificial Sequence
  Description of Artificial Sequence: Synthetic probe
aaggctggagaagagcccgtagagatccatgtttaccttgttggtatgtatgcggagtcasgccaggaagagaaagtccgcaaatccctcaagattgtggaagagaagaagaaactgctga

SEQ ID NO: 9348 - DNA, 121 bp, Artificial Sequence
  Description of Artificial Sequence: Synthetic probe
ttgtagatgaaaaacgataaagaactcgagcaagctgttgctccaggctctgatgtcgtgsacgtggtttccggtaagaaagtcggtacagtaagcaccgctctcggcagccatggaatgg

SEQ ID NO: 9349 - DNA, 121 bp, Artificial Sequence
  Description of Artificial Sequence: Synthetic probe
tcagtgcgtggatatgttgaagatcacctgattgagtgaccaacacaccgagatggctagygcgcgagctacagtaaacattaaccagtgctttgcagtgcgggttcatgaatcaggattg

SEQ ID NO: 9350 - DNA, 121 bp, Artificial Sequence
  Description of Artificial Sequence: Synthetic probe
cttgcaattagccgaacttgctgtgtcatctgaaaacacaagaagagtgggtgaatggatsgcctgccatcgacaggaaagcttggagcgacaatgcagcagcatcagcacggcccgagtt

SEQ ID NO: 9351 - DNA, 121 bp, Artificial Sequence
  Description of Artificial Sequence: Synthetic probe
gatatgatgcatatgtatgctgatttatatacagtatatcatgtaagaaatgtcaactctytgatacacatctatctcatcattggttactggtaagtcttaccaacgcagagttcacagt

SEQ ID NO: 9352 - DNA, 121 bp, Artificial Sequence
  Description of Artificial Sequence: Synthetic probe
ccgagtgccgccgttggaagatgttgtcatctattccgaggggtgtgctacgtttgacctrcctgttgaagtagccatgaatatcaaaggagctttggctcatccacaggatcttatgcat

SEQ ID NO: 9353 - DNA, 121 bp, Artificial Sequence
  Description of Artificial Sequence: Synthetic probe
gtctgacccaggttcaaaacagagtcggtttttgtttgactagtctctgccaattctgtayaaattccagtcagtctggaagagaactgcaagtctaagattcgctgaggaaatgaaatgg

SEQ ID NO: 9354 - DNA, 121 bp, Artificial Sequence
  Description of Artificial Sequence: Synthetic probe
ataaatattaggatgctcgggcatgatatttatatatctatttggtgcctgcatcagcgtygtatgggctaacattatgtttgcatctgtactctcaaaatgtcaagttttctgctacttg

SEQ ID NO: 9355 - DNA, 121 bp, Artificial Sequence
  Description of Artificial Sequence: Synthetic probe
ctcgctcattttggtgagctgttggctgatctcactttccgagattttgacaaacttcgarctgggagtcgggcgcatctctgtgaaaatcgaccggcggggagctagtggcaactggtac

SEQ ID NO: 9356 - DNA, 121 bp, Artificial Sequence
  Description of Artificial Sequence: Synthetic probe
caaggctatggactggagaacagctgagaagctcctggaggaaatggagggtagtggattrcgccttaagggtatcacgcgcagcctcgtagtagcagtcaaggaattagaaatggaagag

SEQ ID NO: 9357 - DNA, 121 bp, Artificial Sequence
  Description of Artificial Sequence: Synthetic probe
aaagtttctcagggatctaagggaggagccaatactgatggtaaaggtgagctggaacgckttcgttgtctcagccgtatctgctgccattggcgcgcaccggttcgttgtcctcttgtct

SEQ ID NO: 9358 - DNA, 121 bp, Artificial Sequence
  Description of Artificial Sequence: Synthetic probe
tacgcaaccaaacaaataagctggcgcacgagggcgctggtgatatctgactggggccgtygcttcatcttcggtagagactcgagcggcatatagtcaaaggatgataagattttgtttg

SEQ ID NO: 9359 - DNA, 121 bp, Artificial Sequence
  Description of Artificial Sequence: Synthetic probe
ccgaagtgtgggtggggggatgttagtgatccacctttttctcttcgtgttctgattgttrctttagggagggatgtcggtttattcaattgctgtgctcaaattttggagctgaactgtc

SEQ ID NO: 9360 - DNA, 121 bp, Artificial Sequence
  Description of Artificial Sequence: Synthetic probe
agaagtcgggtcaagcagactgtcccaaatgagactaggggcaggacgttctaagattacratgttgtttgtaacgatgcttggaacattagactgtgctcctgctatttaggaaagaggt

SEQ ID NO: 9361 - DNA, 121 bp, Artificial Sequence
  Description of Artificial Sequence: Synthetic probe
gggacgagctggccgaccccgccgacgtcggcctcctcatcggcgacctcatgggccacgrccgcgacaagatcaccgtgcagtacctggagcagttcgcgcacgcagacttcgtcatagg

SEQ ID NO: 9362 - DNA, 121 bp, Artificial Sequence
  Description of Artificial Sequence: Synthetic probe
gaggaatgcagtggtgttcgacgatgcggaacctaacctgggtggtcttctggatacaatycggtctgaggctagggcttgggctggtgctggagcgattgggctacgtgtcttgatcccc

SEQ ID NO: 9363 - DNA, 121 bp, Artificial Sequence
  Description of Artificial Sequence: Synthetic probe
ttcagaagcggacaggctactggagtctaatagtcacacggtatgaatagcttgagaatcrtgtagtttgtgactctctattcatcatattcttttcacgtgaccctttacaggcttagag

SEQ ID NO: 9364 - DNA, 121 bp, Artificial Sequence
  Description of Artificial Sequence: Synthetic probe
gttttcatatagtgtacattcaacatttgttgtttctatcttaacatttggaaaatgtggytccaaatgaatcctgtctcttccaaactgtggaatagaggtgtgccctgcgcagtttatg

SEQ ID NO: 9365 - DNA, 121 bp, Artificial Sequence
  Description of Artificial Sequence: Synthetic probe
cacgatgagtttttgcttcagataacatgtaaacactgccaaccacacatgaccaacgcgrcaaactaagtgagaactgcagcagccatcccttcacctgtttaaccattttagcacatta

SEQ ID NO: 9366 - DNA, 121 bp, Artificial Sequence
  Description of Artificial Sequence: Synthetic probe
ctcgttggtctcatccataatgtccaagtgcgagtccaaggcgtccaaggcaagcagctckgagcccacggaggaagagttcgaacgtgctaggcagaggctggagaagaaacgttcgaaa

SEQ ID NO: 9367 - DNA, 121 bp, Artificial Sequence
  Description of Artificial Sequence: Synthetic probe
tgggaagtgccatgagcacgatttggaaaatgagctggcaaacatgtgggcccttgtttcraagatgaagaaacaaaactctcaggatgatttgtttgaattcaagtcaaaggaaaatggc

SEQ ID NO: 9368 - DNA, 121 bp, Artificial Sequence
  Description of Artificial Sequence: Synthetic probe
caacaaccctgctttcgtcgcactcaggcagattgaagctgccagggagatcgcccatacyatctcaagctcccacaacaaggtgttcctggactcgagcgacctgctgcttgggctccag

SEQ ID NO: 9369 - DNA, 121 bp, Artificial Sequence
  Description of Artificial Sequence: Synthetic probe
ccatgtctctgttcctgtctgtgcagatgcagtgctcaaggcgctggtgtctccgaagggmggcgacaacgtcaaggtcttcccggagaagcccaggtactctgagaaggccaccaagtac

SEQ ID NO: 9370 - DNA, 121 bp, Artificial Sequence
  Description of Artificial Sequence: Synthetic probe
gacacttcccgaagggatgctaccggaggacgtgagcatggaggagcaaggaaaaatcaayttccatcgcaagacgccgcttctactcgtgcccaccgcataccgttgcccataacacctc

SEQ ID NO: 9371 - DNA, 121 bp, Artificial Sequence
  Description of Artificial Sequence: Synthetic probe
agcctaagcaaccggcaccagcagctggttcatcgtatcctagaggtcgtgagttgccgtyggggctgggcatggaccttctggctgcacgtgggaaaaggagtgctggggatggtggcga

SEQ ID NO: 9372 - DNA, 121 bp, Artificial Sequence
  Description of Artificial Sequence: Synthetic probe
aaaacggagtagcggtgaaagaattggtgaaagagctgcgtctgagtggcttcttatagtyccttggggtattcggaaaacgattaattatatagctaagaaatatgacaatccaataata

SEQ ID NO: 9373 - DNA, 121 bp, Artificial Sequence
  Description of Artificial Sequence: Synthetic probe
aatacattagttgttgagcgcacattgatgcccagacagtgaatactgctcaacattctgyggttacagtgttttaagaccgacccacacacgagatccataagcaaaacaggtgatgctt

SEQ ID NO: 9374 - DNA, 359 bp, Artificial Sequence
  Description of Artificial Sequence: Synthetic probe
atttggagaaagataagggcagagagacacatactagcaacatgaaaaacaacacaaatgaagtaagcttkcctctaaaccctgagacaacagaaactaccacttccgctagagctgagcagaatgcagagcacccagagatattcacaacattcaggacttctttcttgcgggcctttcacataatggacagggatctgaaattacacaagaatattgattgctttttcagtggaactacagcagtggcagtgctcaaacaggggcacaatctaataataggcaacttgggggactcaagagctgtcttatgcactcgaaatgaaaatgatcagctcattgctgtccaattgacagtt

SEQ ID NO: 9375 - DNA, 426 bp, Artificial Sequence
  Description of Artificial Sequence: Synthetic probe
accacacattagagtggatagagaagttttatccaggtttatttgagcagatccatttcggaaaccattttgctttggaaggtcaatcaaggccaaaatcagagatttgcagatcgtttggtgctcaggttttaatagacgacaacccgagatatgctctagaatgcgctgaggatggcatgagggtcctgctgtttgattacgacaactygtatccctggtgcaaaactggcgtggaccaatcacatccgctggtgaccaaggttcataactggcaagaagtcgaggagaagcttctttcttgggtagcacctgagagctgacattctttgtgaggtgtgatcagcagaactgtgatcagcagataatagcacagtttctgaagcaacatgctgggtcactccctcaacagctcaatacatgagc

SEQ ID NO: 9376 - DNA, 378 bp, Artificial Sequence
  Description of Artificial Sequence: Synthetic probe
aaccctgctgggccagaggccccggggctggaggccgtggcgatgggccccatgctcgtcgtcgcggccgagcacgacatcctccgtgaccggaacgcgcactacgtcaagcggatgaaggaggagtgggggaaggaagtggagctcgtggagttcgccgacgaacagcacgatttcttcgcggtggacccttggtcggagcacaccgacgagctcgtacgcctcgtcaggaagttcgtggtcgaccacatggacacggagtagccgaccggagtgattcgatttgctggctcaatagtcttttcttaacgtgcttgstcaataatggcgacgccatctggatgcatgtgcttctactaggtgggatgccagttgtta

SEQ ID NO: 9377 - DNA, 433 bp, Artificial Sequence
  Description of Artificial Sequence: Synthetic probe
ttctatatatgaatgtatgagtaagactatagggtacagatcattccagaaaaaagaatgatcaggtctgtccctgctcctatgatgttagtcctgtaacttcccttgggatcagaacaaaaacccgatcggtaagagagtgccaatcagctgaacagtcaagccaaggcccagattatcaaactgtactgatgagatgttcaaagctgatgtcartgcagctcccaggaatgaacctaatgtcgaactgaggttgttaatggacatgaatagagcgaacagtgtgccctcgattccaggtgggcaaagctgtcctgagaggattaggaatggcatcatcttgaattggttgattgcatcggccaaagcagaaccccacagcaccatgtatttgtctgcaattccatactggctatgtaatcctgacaccaac

SEQ ID NO: 9378 - DNA, 416 bp, Artificial Sequence
  Description of Artificial Sequence: Synthetic probe
ccgtgcccttgagaacaaactcaattctccattgtggcaggttcgcatgaaggctatctgtgtactggaagccgttgtaaggaaacaggataccgacccttattctgttgttgcttcatatttcagtgagaacagtgcttctgttgtcagatgttgtgaactgcctcaagtttctctcagggaaaaggcttcaaaagtattaaatctgctggttggggaacaacctactggaaacaaacatctttcagaatcaaaaactacactaccaactgttcagatgccygacttgattgatacgggggatcaggatgatctaggaactcagagttcagctcaagaaatcagtgagcagataatagggaatagcacacatgtttcttcagttgatgatttgcttggcggggaacctattggta

SEQ ID NO: 9379 - DNA, 406 bp, Artificial Sequence
  Description of Artificial Sequence: Synthetic probe
attcttcttgatagaaaaggcttttagagctccacggaaacaggtttatttagggtgggagagttcaagacagtccgggcttggtgcaagtggtgcagttaatgccattatgcttcttcagatttttctcaatccaaagggactaatctatctttacttcgtccttcctgttccagctgccttagtgggggctgcttggattggtcttgatttgttgagggtcaacaaggggcagggtcagacaacagcttctactcatttaggaggtgccgtagtggctgcccttgggtgggctcgaattaggaagggttggatctgargagcaattcggaccggcctccccccagcagctggtggcctatccggctgagattggtcgacaaagttacgtcttggtagagagata

SEQ ID NO: 9380 - DNA, 308 bp, Artificial Sequence
  Description of Artificial Sequence: Synthetic probe
aaatgtgtgcctgaacattctgcgtgaagactggaagcctgtcttgaatatcaacaccataatatatggtctaaaccttcttttctctcaacccaatgacgaagatcccttgaaccacgaagccgcggctgtcctccgagacaacccrcaaaagttccagagaaatgtycagatggcgatgtcgggaggttatgttgayaacacccatttcccaaggtgcaagtaatgaatgcttgctaggygcatccagcttatactgcctgcccacccacctagtacccccctgctgaaccatgtggcatacataa

SEQ ID NO: 9381 - DNA, 663 bp, Artificial Sequence
  Description of Artificial Sequence: Synthetic probe
cacagatcgaaatgaaacacccaccagggtctcctgaggcgcttacacttgcaagctggattggccggagctatagggctcacactggagaagagatccgctggtcagacaccgaacaagcagattctcccctgaagctcctgtggaaccacagcgatgccatactctgctgttctctgaagcctgctcccatgttcacctttggcaacaacgctgccctggacatgctggagacgacgctggtgaacctgcaggacatctcgctggaggcgatcctggatgaggaagggcggaaggcactgtgtaccgagttcgccaaggtcatgcagcagggtttcgcgtacctgcccggtggcatgtgcaagtcgagcatggggcggcaggcgtcgtacgagcaggcggtggcttggaaggtgctgagcgacgacgtgtccggcgcccctcactgcctcgccttcatgttcgtcaactggaccttcctgtgatcgcctgtcgccaccagcatcgagatcgtcttcagtttgtgttgtgttgtactatcatgcrgtgcaatcatgtatcctagctatcgatcgcttgcacctttcgcatgtgcgtggccgagagacctgatctgtatgtgtttcctgtgatgcaaaacctagttggctttcacgtgtagtg

SEQ ID NO: 9382 - DNA, 434 bp, Artificial Sequence
  Description of Artificial Sequence: Synthetic probe
gcaaccaccccagcaacgccgtgctgcccaccaccaccgacgccagcgacggcggcgccgcagtgcagcagcagcagcagcagacgcaggtgatcgagctccccgtgcacaccgtcgccattctgtccgtgggccccgtcccggtggtcggcatgcacaagatcgaggtcgtggccaccgagcagcagaccatcgtcgccaacaagyctgcggaggtcatcgagatcgctgctgccgtgtgagtgtgagtccgagacatcgacaaggaccggaacatgatggatgacatgatgctagctgacggagaacactggacaaatgatggatggggtttggttggttaaattatcgtcgtagtactactgcaggtgtgctcgtgtgtgtgggtcgattagtttaagtattatacttgttggatttgtagtagcactgtg

SEQ ID NO: 9383 - DNA, 558 bp, Artificial Sequence
  Description of Artificial Sequence: Synthetic probe
caattgatgtgcttgtccagaactctcaggcacgtggagaatgctttggaaggataacaatcgaagcaatggcgttcaagttgccagtattgggcacggccgctggagggaccaccgaaattgtcttggatggctcgactggccttctgcaccctgctgggaaggagggcgtcatgcctctcgcgaagaacatggtaaggcttgcgagccatgtcgaggagagggtctccatggggaacaggggctatgccagagtgaaggagaggttcatggaacaccacatggccggccgtatcgccgcggtgttgaaggaagttctgcagagatcgcggcagcattcccattcttgagctttgtcactgcccgtatccagtggcaccgttgtgttgatatatcttgcsctagcatgttgatccggattttagcaaggctgaacccgaacacagagtcaactgtaaggtcgctgcttcctgtgccactcacgtctgttgttatccgtggctgttgtttgcttacctagtagtagtatcatgtaggatcggcaccatggaaatgtaa

SEQ ID NO: 9384 - DNA, 426 bp, Artificial Sequence
  Description of Artificial Sequence: Synthetic probe
cagttgtcgaggatgaaacgaaggtcgaaggttcctgaagctgagcccgcatgttcttcttcgcagcggtcctctagtggcgataaggctgccgggccgctgaatgttctggtcgaatggcgaccctggggttcaaccaccttcggaggctcttcttcaaagctcaccgccagtgctcatcgcctcgtcgttagcaagtggtgtgtccccgcggactgcctggcggccggtggtggtgcttcttctccggttcgtggagcgtcaccagcaagagtctcaygacctcgccgttggatggaggtcgccggagatcggtggcggaggcactcgaggacccgattgctttttatgttttgtccgagggtgttgtttgcaagggagaggcccctttctgttttgtctagttttgctagaggtctttatgat

SEQ ID NO: 9385 - DNA, 452 bp, Artificial Sequence
  Description of Artificial Sequence: Synthetic probe
gttcgatctacggacctctgggtgctcacccgcgacgaggacgtgatcgacactgtcgccctagagaaggagaatgtgaggcacttccacagcttcatcgacagcctgcctctgattgtcccggacaacctcctgctggtctactacgactacctagtctagggacgttcctgttggaagaggaaatataacatgaatgtacaagggttttctggcagccgaccatcctccttggatcgagtccggcaaacgaagccgaagccgtcgatcggtctgttgcgaagcagcattatttgttacactggctttgcgcaatcrcattgttgtggtaataataattgtacagaaaaggaagtgtactaagtctggcatctatgctctggcaaattgccaagatattcaaaaactagcggtgtgggtacttactttgctgcaccaatggtcaagctatg

SEQ ID NO: 9386 - DNA, 505 bp, Artificial Sequence
  Description of Artificial Sequence: Synthetic probe
acaagcaacatttgcttctacaatttgttttctgacttaaaatggagagaacaagagcaatttttcagagcatgaggcatgaaagagcagcacataaggaaatatcaacgatagtctaaatcaaatgacagtggcaatccaccgacgcctacgagctcatcttggattaaacagttgacaaacaagttgagggtgaatgcaggcatcgatgccttggcgagatggacgtaccagacaggggtatcaacatgaaagttccattgcagaggaagytccaagacaagataaaggatctgcccgtgtacaagctcaaaaacgatctgatcaagacatcgaggagaggagtaccaggtgttgatcatagacagatagacaggctttggcaaggtcacaccatagtacctacaggaacctccaaatatccaattgttatagatggaaattaaaaacaagggaacaatgtctttccaaagtctaaattgtaacttaataatcacacttctcg

SEQ ID NO: 9387 - DNA, 354 bp, Artificial Sequence
  Description of Artificial Sequence: Synthetic probe
cagaggtcgcagtagaagccgtagcaggagtgatagtgataggcgtaccccaagccccaagaggcgccggcatgacgtgcaggctagccggagcaggactagaagtcagagccgaagcaggagcaggagcaggagttacactaggaaccgtcgtgccagccgcagcaggagtcgtagccctggtgctggacataggactgaaagaagagctggctctggatctgcacatcctgaccctggccactcggtggagcacaaaggtcacccttcaaatgatcataggaacyactctgaccagaaagatgacttctgtgtggaggatggtaagatgggaaaggttgatcttgatcgctc

SEQ ID NO: 9388 - DNA, 385 bp, Artificial Sequence
  Description of Artificial Sequence: Synthetic probe
atagaattagtacttctgcaggttgtactcatttgtggttgcagagtgcagttcctctagggtgtattcctgcacgttcaagcaccaccgtcaaactcgagytacttccgttaacagatgggatcattacactggatacactgcaaataaccataaaggagaaaggtcttacatacataccggagcactccttggagatacacgcatcctctggcatttcagcgggaaggtcgtaggattcagcagtgcattattatatgcctttagtttctggctcaacctcagcgtggagtaaagtggtcataggattcacttgtattggatgttggacatgggagttctcgtggcaggatcctggagcccgagccagataactccgtttggg

SEQ ID NO: 9389 - DNA, 339 bp, Artificial Sequence
  Description of Artificial Sequence: Synthetic probe
gccaaacccaaagctcgggtctgttacaaatgacgtttctggtgctgtcaaagcggcaaaatcaggccgtattgatttcaaaatagacaaaactgctatagtgcatgttggtcttggaaaggtgaatttttccgaggagagtttacgtgaaaatattggcgcttttgtaaacgcacttttacttgctaagccggtyggcttaaagaaaacttcgaaatatgttggatacgtgaagaagtttacgttgagtagcacaatgggacctggattttctgttaccataccctcactatcggcggcggctgataattataccaaagtgcaagtcagctaattaac

SEQ ID NO: 9390 - DNA, 504 bp, Artificial Sequence
  Description of Artificial Sequence: Synthetic probe
agttctggtgcacctactcagcctgtccaagcaccatatggaacttctggtacgcaaaacatgccacacatgtaccctccaccttatagttatgccccatattatccatctgtcacaccggttcagcccccgcctccaccaccagctagtgttgatccgtcgcaaagcattgcaacagcaccttgggccacccacaatgcaccgcctccaccaccaccaccggttagtgttgattcctcgcagagcaattcaagtgcaccttgggccaatcaccatgtaccgccaccaccacctctgccatcttccaatgacgcgcccactgctccgtatggtgctgatgcagagtatgagaaatttatgtcagaaatgaagtgatatgtgtgaagctggtgygttctttcaacagtgggaaaggcttaaggtttcttggagctaatgccaacatgatttatttgttgttggaagtttgggactcatatctttaaccttgctgtgctgttatga

SEQ ID NO: 9391 - DNA, 542 bp, Artificial Sequence
  Description of Artificial Sequence: Synthetic probe
aaggggtatcaaccaaatagatttacttttgatataatgatacatggcttctgcaagcatggcatccgaagtgaggctgaaaggtggatggaggcaatgtaccgaaatgggttctatcctacttggtacactatgaggttatacaacaatacatccttgcgagtacatgatcagaaagtcatttcatttgtataagcaattacctatcttggcctcgcatccrtctgctggtctactgtaatcctatgactttgctgaaacaggcactctttttgaggttcagacatatccatgtggagaatatttgtaaacttaacattagtgcatcctgaaccacatctcacgtggcacgacgtagcgtcgaagatgtagctagggtatcaatttacctgtaacattgatctattttccttggcccatgatgtattctactagtcctacacagttttgctgtttatctggtgtaacaatagtaattcagtagtccccactgaatcagtatattatggagcaatggagattcattgtcatgatatcgtcat

SEQ ID NO: 9392 - DNA, 267 bp, Artificial Sequence
  Description of Artificial Sequence: Synthetic probe
ccatggtctgtttgtggttgacatgctttatgaaacagcagaagcttatccaagtcctaagaagatgggccgtgtgtttcccttgtcagaatactggccgtcaaagcctttgattcagtaggggaaagacgtaatatcgtaggcttcctgtagcacgtagctttaattagaaatmaatcacatgcgccttggtaccatcagagcgatgatctgtgctggacatgctagagagacagaccgagtgttccgaaagaagggcaaagtggc

SEQ ID NO: 9393 - DNA, 303 bp, Artificial Sequence
  Description of Artificial Sequence: Synthetic probe
gtcatacaagcatttatcatggcaataagaactttaaggagatctccttgcagygacttcagtgtctggtgagcttaggctttgcatgtgaaagccaggcttgtattgcacccctgtggccgtgctgggatatacaactcacatggattcatcttcctgatgatgtgaactgtgagaggaacaatcttcgctgtaattgctgtaaatgtaaatcatatccatagtttcctggaaacagttttcatcggcttcagcagttgctttgctagagttctgtgtctgccaggcttggcttctattcta

SEQ ID NO: 9394 - DNA, 522 bp, Artificial Sequence
  Description of Artificial Sequence: Synthetic probe
ggctctgtcttcctcctccagctggccgtggtggcgaggggatgagggagacgggagctatttctggttcctctacctcaagatggcttcctttggggcaaagctttattctgaaaataatctgccttgcacatcatggtgatggtgaaggcagtgatgctccaattttatatagcccgtgttggagatcggaggagacggtgtttcaatcttctgctgctccaaaaggttttcatcgaccaatgtttctcatatttttggagctagctcttcggtctagctactactcraaggatcaactgcgtattgctgtcaaggttgtctttgttgtcttcatttcgctcgggtgtgtgcgccggagacaggtgagatcgtctccgctgtggctccttagatttggcgatgaagacccgtctgtgttgagctcggtgaagcttcctcgacatctacatctcaactttcaacctcgtggccttgcgccttctcaatggctggttgagcctctggctatctggttagccg

SEQ ID NO: 9395 - DNA, 723 bp, Artificial Sequence
  Description of Artificial Sequence: Synthetic probe
cttcgatatcagcatggtgagcagagtagatgaaattatgctgcacacaccgaaatatcttcacagcctgcttgcggattttacgttgcttatgaaagaagaaatcctctcggggtcttttcgaattccatcagcagcacatatgccactgctgacgtccacaccatctggcttcagaacagacactgcttcacaaacattatcagcatgaaggcctccagccagcagccatccatttttgctcctaacagatggcatctgaaatctctgccagttgaatcccttgccgcttccgcctttcrcactgtccactaagaaccaatcaggcacatattcttcatgaggaggagcattaataagttttccatcatcatcggcattaaggacataaatgattcgtttattcttcgaaagcaaatgaagcaatgcacgggattcatctccatggagctggactaaattaaggtcacatgaatcagagactcttaatattgtctcttcgtcatcatccacaaaaacaccaactgattcagccccataagattgcgctactcttgatatttcttttgcttctgataatgcgacagagcgtttagagttgggccaaagtatcatgccaataagtttagcacctgccttcacagcgatttctgcatctttagctgatgtgatgccacacattttgactacaggctggataactttggtaccatcgtaacttag

SEQ ID NO: 9396 - DNA, 441 bp, Artificial Sequence
  Description of Artificial Sequence: Synthetic probe
accaggtgcacaccgcagttgctctgcgcggaaacgccatgaatggggtgcacgctgcagccatggtcaatggtggtgcggtggatctagggagcaaggtcccgcttggtggtacaggcaataaccgctccactgcagagaggacgccgtctgatccttttagtagctgggaagaagtggaggcattttggatgarccatctggaaggactacaaaagcaaggctttggatcagacgacctgctacaggtagacgatgcttggaaccaggcgcttcagcaggcgaacgaagatgacgctcccgtggctcaaaggggtgacgcgcgtgctgctgctcaagaacccgctggtggtgctgctctggcacatgatgctgagttcagcattgatgatgtgcaggtctggatcccttagtttgcaggtgacgactttggcatgccgt

SEQ ID NO: 9397 - DNA, 356 bp, Artificial Sequence
  Description of Artificial Sequence: Synthetic probe
agatcttgcagcatcttcgggacctcagaaggattgagcagcgtgcaaggaactctggagaactttcgccagattatgtgcatccttacactgattaaagatcagcaccagcaaagccctgggatcatgttcgacagcaatgcatcaagatgaaaacagcaccaacaagaagaaaaagaaaagtttgcattacaccaacagcgygagagaagggaaagcacatcgactagttagaagtatagccatgccagaagcttggctttgtctcaggaggagaaggagctcctcctggcgctctcacggcatcgccatcggaattcggaaggcggatcgtgctgcaaatatctgccttgtaa

SEQ ID NO: 9398 - DNA, 530 bp, Artificial Sequence
  Description of Artificial Sequence: Synthetic probe
gcgagtctgccatgatcgctggggcgagggacgtgggcgtgtcgccggccatcgtcggtgccttccaaaggaaggaggctgcgcttgtggagtttttcatggatgactgccttcaacaactcatggaccgcgttgatgctggtgagagagagcagttgaaaaacttgatactcaccgagagactctccaggcttatccgtatgagacttgagatgcagacaccttacatttctaagtggcctcaagcgctgagtatccagtctcaaccggcagacgtgtcgacaagtctaaaacagagagcagtccttgttgatgagatttggcatgctgctggggattctggatcagatattgattggtatgtcaagcgtgctgtgcttggtggtatctactcaacctcggaggtgtacatgttaacagataattttccagagtttcgggacacatggacatttgtgaatcrccgcatcaaagaggctctcgatctgcagaaatctgttaaagaggtcggatatctagctgaagccatg

SEQ ID NO: 9399 - DNA, 522 bp, Artificial Sequence
  Description of Artificial Sequence: Synthetic probe
gctaaaagtggctcaacaggtgatcgcttgaaggaaactcaggcaatcaacaaaagcctgtcagccctcagcgatgtcatctttgcgatcgcgaagaacgatgaccatgtgcccttcaggaactcgaaacttacatacctcttgcagccttgcctcggcggggactcgaagacgctcatgttcgtcaacatcgcgccagaagcgtcctccgtcaatgaaacagtctgctccctgaggttcgcctcgagggtgaacgcctgcgagatcggggtagcgagacgtcaaacacaggctcgatcctcggacaacaggctgagctacgggtgaagctcctccccttagtggccgtcataacgtgatacctaatgggggataatgygatacataatgggtcggcttgttggctgacttggccatgagctggcgacgcgcgcgcggcggctggcctcttgtaacatgtacagtagggagagtggcagagcgtgcgccgtggcggcgagcgagcaggagagcagagagcct

SEQ ID NO: 9400 - DNA, 442 bp, Artificial Sequence
  Description of Artificial Sequence: Synthetic probe
cgagtatgctagaaggtgcaccttcaaagatcaccttcaaaagcacgagcacaccgaagagagtrcagaccagactgataagaaccttatagtggcccagagtcttgcatcaaaagtactcagcaatgccaacgttcacctagtgtcgatggacatgccggtaaccttcagcatcgacgatgcctccggcctgtgctggcgatttagcagcgaggtcctgagcacttcaaacccctgcctgattaccatcatggcagaagggcatgcctcaggaccactggatatcacaatcaaggtgaactctgaagacacggtgtttggcctaaacctccttaacagagttgtagcgatcatagagtgaccggacactttgatttttgcatgtttggtttgaaataccactttgtcgatactgtaaattgttgtacattattgtgaatgc

SEQ ID NO: 9401 - DNA, 348 bp, Artificial Sequence
  Description of Artificial Sequence: Synthetic probe
agaatcagcctcaattttattctgggtgcacatttttgctgtattttccatggcaggatggattattttctacttgaccttgctcttctaaatactgaacggcaatatccggaaaaactatgtaccatcaaaacatatagaagatggtggtcatgatttgtacaataccaactaaatcatggtgacagcgccggagacacgagytgtatccgtacagatatggttcctcgtgcccgcctctgtaaatgtcacagttatgttaattttggcctcgcctcgctcctccaagcaacgagcagtgagaaaaccgcagcagctagtgccctgcccatattaattaggttaccc

SEQ ID NO: 9402 - DNA, 384 bp, Artificial Sequence
  Description of Artificial Sequence: Synthetic probe
acgtctcaggacttcctggtaggatcccgactactgctcgtagtagtcctcatcagcataatcgacgtagtaagaaccagactcatccacctgatcacacgtacctgagtgatcaaaggacggagttggttcaagatcgagagggtactcataagactattcaaactcctgctrgtactcgtcgggctcgccttagtggatcggcgaggcgggttcggcggtgttgacggtgacgagcggcagcgacggtgagcgcggcgacgacctggacgcgtccttgctcctcctcgctgctgctccggtagaccacgtcgagggcggggctgaggacggctggtggctacgctaggaaggaggagaggacgacggcgaggctgccatggc

SEQ ID NO: 9403 - DNA, 421 bp, Artificial Sequence
  Description of Artificial Sequence: Synthetic probe
atcatctcaagatatctcatgacaacaaaaatttccttgtctacttgctttcttgggttgtaataattgccattgttggattggtcaagctcgtgaattgtgctagccgtcagttgagctcaaagcaccaactcgtsttcaggttcattaagttgttgacattcctggcagttgtgacttcatttatccttctctcttgcctgtgcaaactatccatcatggatttgatcatctgctgccttgcatttataccaactggttggggtctcctccttattgttcaggttttgaggccaaaaatagaatactatgcaatctgggagcctattcaggtcattgcgcatgcttacgactacggaatgggttctctgctctttttccaattgctatactagcatggatgcctattatctcagccatc

SEQ ID NO: 9404 - DNA, 328 bp, Artificial Sequence
  Description of Artificial Sequence: Synthetic probe
gacgcgcacacccagatatacaagaagcagtggagcccgctgaccccggagcagatcgccagccctaagagctacgcggactgcacccattggtgcctcccaggactccaggacacctggaacgagctgctctactcgaagctattcttyccttgagcgaaggaagatcttctgattcggaacatttaacatgcagcaaggcgcccatcgtcccttcacctgaaaaggatcccatgaacataacgcccaggttcctccgaatataggagtatatcacctcacctgggaaaggtggagaagggctagtgtgtaggtaacaacaacgtac

SEQ ID NO: 9405 - DNA, 409 bp, Artificial Sequence
  Description of Artificial Sequence: Synthetic probe
atggatgctgccgctgaatcatcatttgaagatgccaaatctgctttggaaaaggttcttcgccatgaggatctgaaaggggcaccggtcctgttatttgccaacaaacaggatttacctggagttatctctgacgaagaattgagtagacgtatgcatcttaaggagctaaatgatagrccatatagatgccaggctgtatctgcttatgatgggagggggattaaatccggcatagactggctggtggaacagatggaaagaagtaaacgtactgaggttctaagggagcgtgcaggtgtaaccgggcagatttagaacgttgaccggcatttcttatcatctcttttctgaaagagcatgtaaatttgatgcggatggcttctattaatctgcatgattatgccat

SEQ ID NO: 9406 - DNA, 933 bp, Artificial Sequence
  Description of Artificial Sequence: Synthetic probe
tgtcagtttcttgaggaaactctgtgacgcgccatataacaagacacttgattggtcaaagtggtacatattctggtctgatgaacgtgctgtagcaaagaatcatgcagatagtaactataagttaacgaaagaaggattcctatcaaaggtacctattctcagtagtcatgtctactcgataaatgacaatgccacggtggaggatgcagcgacagattacgaatttgtcatcaggcagctggtcaaggtccgcacaataggagtctcagagagcaccgactgtcccaagtttgatctcattcttcttggtatggggtctgacggacatgttgcctcactgttccctaaccaccaagcccttgagctgaaagacgactgggtcacctacatcactgactctccgcagcctccacctgagagaatcaccttcacccttccggtgataaactcggcatcaaacatagcaatccttgcgacaggcgtcgacaaagcaactgctgtgcatttagctgtgtctgacagcagtgatggaccagacacctccgcatcactgcctgcccatatggttcagccgacagacggtaagctggtgtggtttttggataaggcagccgcctcatcgctcgacacgtcggatggcgcctaccagcagcaccgtgagtactaactcggaatgaccgaagattcttttgctgtggatgaaggcgtgtaagtaggtggtgaatcatatgatggtgkaaggtttgctctcccctttagctctcagtacctctagccttcgtcttagtccaacgaagggtttgctccaggaaatcaaaagcccagttagttttcgtaaacggagatggttttgtgcggcacaatgttttatgtgatgttgaggggatcagagacgagaacactaaacctgatttgtgatgcagttatgat

SEQ ID NO: 9407 - DNA, 503 bp, Artificial Sequence
  Description of Artificial Sequence: Synthetic probe
cgtggtcttgttggagagattatttctcgctttgagaagaagggatttttgctgaaggggctgaagctttttcagtgccccaaggagttggctcaggagcactacaaggatctcagcgagagacctttctttcccaaacttatagagtacataacctctggacctgtagtttgcatggcctgggagggcgccggtgttgttgcatcagctcgcaaactgataggagctactaacccccttcaagctgaaccagggaccattaggggtgatcttgcagttcaaacaggaaggaatgttgtccatggaagtgatagcsctgataatggcaagcgtgaaatcgcactatggttcaaagaaggagagctcgctcagtgggaatcagttcacacaccctggcttatagagtgaacttcgtttatcactgcaagaacctgatccagtggtcatttggttaacttgattcgacaggtcatgtataaatttgcttctgctgattgtggctc

SEQ ID NO: 9408 - DNA, 453 bp, Artificial Sequence
  Description of Artificial Sequence: Synthetic probe
cgtggaatacatttccagaatgatgccaattctgggcatggcatttgttttcgatgatatgcaatgtgttctttcaggtgttgttaggggctgtggtttgcaaaagattggtgcttgtgtcaatctcagtgcatactaccttgtcggtgttccagcagcgttattttttgccttcttctaccattttggcggaatgggattgtggttcggaataatgtgtggactcatcrtgcagatgctactgctgctgtccattaccctgtgcaccaactgggagaaagaagcttccaaggcaaaggacagagttttcagttcttccctccctctagacatgacgacatgaacatgcaagatgcatcttggtaagaacacggtgcaaaggagagacacggaactcatgaagaatttgtcgcgaagaaaactgccgcgcgtctcgatgtcaccagcagcatg

SEQ ID NO: 9409 - DNA, 508 bp, Artificial Sequence
  Description of Artificial Sequence: Synthetic probe
aaggtggttcgatccctaccaagattctttagtttctctgagcgacttaagaaaatgcatggccatcatgcattgtagcatgaataaactgaaaattttactaacatgcaaattctttagtagaagatattttaggcagcagtgtcaatctacttccatgcaaaatacttttgtacaaaattatgtttttctgtaaatgtgcatttgaaataatttattcattttgcattccatatttttgtgcaggttattaggacagctttgactcgatacggaagcacttccgtctagccagattattagaacaaaaataaaagcctgtattaactaggtatggtgtcaatagatatgaattagtttcacaaccccaatataataaggatctggtttgggarcagttcatctagcagcggatgcaaaggagaaagcatgattcatcagagacgctaatcttgatcaagattagtgaacttggtgaagaaattgtaaaagaaaaactgatgccaaa

SEQ ID NO: 9410 - DNA, 458 bp, Artificial Sequence
  Description of Artificial Sequence: Synthetic probe
cgcgccacatgactacgaaaaagttcaccaacgtgtaactgctgttctgaaggattacccttttcttaggcttacccatgggaggaaggttcttgaagttcgccctgtgattgactggaacaaggggaaagctgtggaatttttgcttgaatcgcttggactaagygagagtgaagatgttcttcctatctatgttggagatgacaagacggatgaagatgcattcaaggttctaaaggccaataaccgcggctttggaatcctggtgtcatctgtgcccaaggacagtgatgccttctactccttgagagatacagctgaggtaatggagttcctgagaacattggcagcatggaaggaggaatccagctgagcaaaagggaagaacactggttttgctgacctggagaagcacccaactataaatacaagctaacccatatgttggctgataagga

SEQ ID NO: 9411 - DNA, 337 bp, Artificial Sequence
  Description of Artificial Sequence: Synthetic probe
aacttgccgtggatactgatgaagaaattgtgtctctagaccaaaatgaagatagtaccagctgacccttagagtaggtaccaatttttgtacatgacttggagcacctccatggtcagagctggccgtgttacactcggaaactgtcagcatgggaagcaagcagtgttgggtcrgtggttaatgagctggaatcagtggttgaaatggggccattctttgagtcgtgcaatgagctgggatcagtggttgaaatggggccatttctttgagtcgtgcaatgagctgggcccaagcagtatttaccaccataaacaatctagtaattgaatttcct

SEQ ID NO: 9412 - DNA, 320 bp, Artificial Sequence
  Description of Artificial Sequence: Synthetic probe
ttgttgtctcctggcgcaagaatgcccagccatcttgggccaagaggatggaggccaagctcaaraagatcttttacttccaagttgacaatcagaagcgcatgtatgaggctcatgtgtatgccaagaaggcttgtgctcgacagaaggaaatgatggaagctcaaggattgaccatctctgcgggttccgagaccaacatcacccctgaagaacaatggatctccaagcacagccactgggatgatgatgtctcttcctcgcaccgcgctccatccacctatgatgaggaggactttgatgacgaggaggattgacag

SEQ ID NO: 9413 - DNA, 538 bp, Artificial Sequence
  Description of Artificial Sequence: Synthetic probe
tgacgcaggtggtggtgtgcttcgtgtgcaagagctatcgccgccgctgccacagctccgacggcgccgcggcgaagagcctcaccgacgtcggccggaagggacgagccactcggaaccggaagtgacagtgacgtcgatcgagtctcactgcacacggcaactgcctacctattaagctagtacagtactaataatcagttaatccacggtagtactccctccgtttcagaaatataagacattctagctttgtgaaacgaacgtatctagacacattttagtgtataggttcacttcaaacctctacraacctatacactaaaacacgtctagatacgttcgattcacaaagtaaaaacgtcttatattttcgaagcggagggaatatatattaagctaattgcatgcatggtattgtctgtgatcaggtacgtataacttctgattgagcttgtacatacatggtattctctacttaggagtactcgcattctactaccttgtacgtacatttcaaggagctagatgtatgagt

SEQ ID NO: 9414 - DNA, 498 bp, Artificial Sequence
  Description of Artificial Sequence: Synthetic probe
ccaagttccattctccaatacaaacatcaacatgagtcattagttgctagtcaccgcacttataggcaacttgatgctctccacatcctcctcctcatcatccatgcttacctccatcacattcaagtctttatgggcacccttaatgtagcttccaccacaaaccaaarcttccaccatataaggttttagagaacttctatagtcatccaacacccttccaccggtgctaaaagtggattccgaagacacggaactagctggaatagtcaagaaacgccttgccatctttgccaataccggatatctaagtgaattcactttccaccaattaagcaagtcaaagttgggagcattttcctcaccggcatcttctaggtagtttctcaactcactctttgatgattttgtggtggtgttggcacgccaattgtggaagtcactatccgatgtcggcattgaactactaactataggaagcttggatgatgattggcc

SEQ ID NO: 9415 - DNA, 462 bp, Artificial Sequence
  Description of Artificial Sequence: Synthetic probe
ctgaaactacaatactattaataatacactatataccactactgtttagtagcatagttatgacctttataccctgtttcttgytgcaaggttggtatggttgactattaggcttctacacctgatcgcctcacttctagatccattcaagcatgatgagttcatcgcctccgatcccgtctacacccgcagatctacaagatgcctgagcatagggaaatcaacaagatgggcctcaccgacctctctggttgtggaaggttctttatcaggacggtggcctttcctggagctctagtagggaggtggcctttgtcatcgacaatttcaagctggcctccgatctctacgacgatcgtgacaaggtgcacatcaagctggaaagttgcattggctggcacagatgatctaggagaccagccaaacaccactcacacaacatttaggggtctccaggctggt

SEQ ID NO: 9416 - DNA, 367 bp, Artificial Sequence
  Description of Artificial Sequence: Synthetic probe
tgaaaacaaggaggttgcagtgaatgacttcctcccagcagaagacgccatcaacgcaatcaagtactcaatggacctgtacggttcgtacatcatcgagggcttaaggaagtgatctccagcagtgcaactgcagatgctacgckattcactcgactaccaatagtacgacagacatttatgttaacatcacgattgaaaaccatggctcagggatatatgccatgtaaggtcaatgctgagacaacgcatcagaaccttttctttccatatatgccgtgtgaggtccaagtattcgacctcttgctggaacctttgttgtcaaaccgtcgtttaatagaacggttgcttgatagaacatcagcat

SEQ ID NO: 9417 - DNA, 525 bp, Artificial Sequence
  Description of Artificial Sequence: Synthetic probe
accttcctgacatgtctccgaagaaagtttctgctactcgtaatgtctacgtttccccactacgaacatcaaagatggatactttgctttcrccgagctccaagagctactacgcgtgtgtcggggagagtacccacgcattccagagcccttccaaggacttgaaggcgatcaacacccgcctaaacagcgggaagaaagtcaatggaaggctcaactttgatgatgttgtcagcgatctggtggttgccagaagtctcggcgaccaaaaccaaaacggcagctcccctgctgatgctgcggtgacggttctcggcaccaagacgcctgtaaaatccgagcatccagagccagactcttagattctattggggtatcgcgtgtgtgccacgacctatcggtagaaatgccagtctattaggtgtcagcctgatctaatgttagatgtttagaagaagccctttttcaatttcactgacatggggagtccctctgcgagcagctcttgatttgtgtggcatgtaa

SEQ ID NO: 9418 - DNA, 249 bp, Artificial Sequence
  Description of Artificial Sequence: Synthetic probe
gcaactccgccaacatctaggagccccactccttttggaacagctaagtatctgttcgacaagatcccraaggatgcttcaagcaaggtccggatcaaccaggacctgtatactcaagaaagggtcattggagcgccacccccattgccagatttctcattggcactaacacctgaagattatgatcttcctccactagacccactttggaacaaagaggacggccatcagtaagagtatattcagcaa

SEQ ID NO: 9419 - DNA, 383 bp, Artificial Sequence
  Description of Artificial Sequence: Synthetic probe
cagaggaggacatggtcgccgagatgtccaagctgcgagaccagatcagctctacggggaagctggatggcctggagttcttcgatgagctttcagaagccgggcgcgaggtcctgctcggcctgcttgccttcaaccccgacgagaggctcacggcgacggaagcgctccagcaccggtggttcaacgagccctctgcttccgccggccagcagtaccctggcttcgtcaatytgttcagctgattagctttgattttgcactagctgataggtgtactggaatcggtgactctgagtggtgtactggaatcggtgactctgagttatactagcttgatttagtcgttggctggtgtagtaatggtggacgacactgattat

SEQ ID NO: 9420 - DNA, 451 bp, Artificial Sequence
  Description of Artificial Sequence: Synthetic probe
ctcactggccatacttcccgggtccttttcatggctcagagccctgatggttgcacagtagcatctgctgcaggagatgagactttgcgtttctggaatgtgtttgggactcctgatgctcctaaggctgcagtgaagacttcacacactggcatgttcaacagttacaatcatatccgataagcattgatacccgcgactggtgtggcattattctgacaaagagtagcaggttacgtgcaaaaagtaattgcatcgcaagttcttaggtgaccatcaggagttccagaactgttgatatgaatggagaccgycatgagctgattccagaactgtcaatatgaatggagaccgttaacaaagttgtaaatcatcggaggcgccatcatgagctgatttacttaggtgtttacattactttgattttagacagaactgaattatgtgtgtg

SEQ ID NO: 9421 - DNA, 767 bp, Artificial Sequence
  Description of Artificial Sequence: Synthetic probe
ggtatttagtttgtccatcctatctctaacacatatatttatctatgctaatagctaagtatatgtctgttattcattcttctgcaggcagttcatattttgtagggaacatggtaacgaagctcttgccgatgaaacattttttctttagtccagtaccccagctgactaataaaatacacgtattgtggttttcatcagcattacgcctgattgggattagttctatccatggtggctggttcttctctccagagtttgtatttcatgtttcaggcgctcctggttcatgtcgatggcgacgaggcggagagttgagatgaaagtaggtagaatatatgctggttctgcccaaatgcatctatggcatattttattatytggtcgaccctgctccaaactcctcatgttctttctccaaaatagcatccctgcttgttgtgtacttccaacttggtggttagatcaggcctgaggttgttcctcctttcagacccctcgccgtgtcaaccgccatccctgatgcgcgtacgcgccactgcagcatgtccaggtcaatgcgtagcaggaaccaggggcatgtgctacaggcctacaacctccagcaggtcgacctcatccacggcatcaagagagacatggcctttcagcgctaccgtgtaccgtgtcggcatctctatcccttgacctgcgtgtgacaggaatgtgagcgagctacattatgctactgttgatatattaccttacgccgagagtgattgcgtgtt

SEQ ID NO: 9422 - DNA, 368 bp, Artificial Sequence
  Description of Artificial Sequence: Synthetic probe
caacggcagctgcatccgcgctcgcgagagacacgcaccgagaagaggagatctgcggcgctgctcctgctcttgctcgttcgatccgcgactgcggcggcgatggagacgggaggggaggcgggcggcggcaagccggagtacagcatcatcgtgcccacctacaacgagcgcctcaacgtcgccatcatcgtctacctcatcttcaagcacctccmggatgccaagtttgaaatcattattgtggatgacggaagccccgatggaactcaagacattgtaaagcagttgcagcaagtatatggtgaagagcgtgttctattgagagctagaccaaggaagctaggacttggtactgcatacgtaca

SEQ ID NO: 9423 - DNA, 473 bp, Artificial Sequence
  Description of Artificial Sequence: Synthetic probe
acactgagaggtacagtggagtctctgttgggctaaatgacacgatggagaacctcttggcctctgtggacaagaacgaggcagagatctctccgtctacactgtatgccatcgcctgcgtcatggagggcgtaccgttcatcaacgggagccctcagaacacctttgtgcctkgactaatcgatcttgctatcaaaaacaactgtttgattggcggggacgacttcaaaagtgggcagaccaagatgaagtctgtcttggttgacttccttgttggtgctggaatcaagcccacctcaattgtcagctacaaccatctggggaacaatgacgggatgaacctgtcagcaccgcagacattcaggtccaaggagatctccaagagcaacgtcgtagacgacatggtctcgagcaacgctatcctctacgagcccggggaacatcctgatacacgtcgttgtgatcaagtatgt

SEQ ID NO: 9424 - DNA, 497 bp, Artificial Sequence
  Description of Artificial Sequence: Synthetic probe
agccattggggatcaccatcctgatctagttgttggttcaacagataagcaaccccttcttgaaaccccaggagaggtatttgaactgaggaagctgctgcccacttctctaccttatgacttcaatatccatataatggactttcagccaggcgaatatctcaatgtgaaggaggttcattacaatcaacatgggctgctgcttttagaaggacaaggaatatatcgattggcagacmgctggtatccggtgcaagcaggcgacaccatttggatggcgccatttgtgcctcagtggtatgctgcccttggtaaaaccaaatctaggtacttgctgtacaaagatgtcaacaggaatccactgatatgagcaatgagatcgctcttcatggatggaaaattggcaattactcagcatagagagctgtcctagttatgcagagacactgctccgattgcttgctggcgaactgccaagaaccccagaatgaatcaat

SEQ ID NO: 9425 - DNA, 466 bp, Artificial Sequence
  Description of Artificial Sequence: Synthetic probe
atgatgaacaaggatgttaaggtcattggggtagaacctgctgaaactagtgtgatttctggcgacagaccaggttatataccaagcatattagatgttgagctgctygatgaggttgtgaaggttaccacgggagaggcagttgatgttgcgaggcaacttgcactgaaagagggattgctggttggcatttcctcaggtgctgcagcagtcgctgctatgaacattgccaaaagacctgaaaatgctggaaagctgattgtggttatattccccagctttggagagagatatatctccagcatattgttccgtccratatataactccgttcgaagaatgaggaagagataactaacttctgccactccaaaaaggaccaacatcatcatttgtaaacctgacaagcttccgccgcacaacaaactttgaagcgtcaagtccctgttagatgaacatcaggcat

SEQ ID NO: 9426 - DNA, 408 bp, Artificial Sequence
  Description of Artificial Sequence: Synthetic probe
tcgttcgaacatatcacaaatatggcacgaaaaggtttattaagcttctttcctggttgatggctatagttcagagtcttcttatcattgccgcccgcaagcactacactgtggatgttgttgtcgcttggtataccgttaatttagttgtatacttcgtggacagcaagctcccagaaatgccggaccgtacgaatggrtcgcctctgctcccgttgagtaccaaggagaaagatggcaggctgaaggacgagaaagacagcaggctgaaggacgagttccacaagctgttgaacgggaaccatggggatcctactgatcggcggcagcgggtgcagatgaacgggcggcacgacgaggacatgaaccaccacggcgcgctcccggacgccaccaccaacagcgcat

SEQ ID NO: 9427 - DNA, 277 bp, Artificial Sequence
  Description of Artificial Sequence: Synthetic probe
gaaacaaaaagaacaggaaattgaaaagaaggcaaggaaacagttcaaaggactttttgacaagaagccaggggagatttctgaagttggtgcggaatcggagggtgccaagaatgcgggcgacaaggcggtctctggtgaggcagtgacgagtaccgatagagatggaagygagaagcctagtccgcgtgcagaacctgattacgcctttgaggaagagaggccaggactaattggccgcatatggccatcggcaaggcggattttctcctctctt

SEQ ID NO: 9428 - DNA, 327 bp, Artificial Sequence
  Description of Artificial Sequence: Synthetic probe
gtcaagatcaacatggacgggatacctatcggaaggaaagtaaacctcacagcttacgacagctaccagaagctgtcgtcagccgtcgaagagctgttccgtggatttcttgaagcccagaacgatctatcttgcgctgaaagcggagagcaaagagcagaagagaaaatattttcaggattgctagatggaaccggtgaatacgctctagtgtacgaagatgatgatggagayaggctgctagtcggagacataccatggagtgcctttgtttcggctgcaaagagactgagggtgatgaggaggtcagagcttccgcaggatctc

SEQ ID NO: 9429 - DNA, 349 bp, Artificial Sequence
  Description of Artificial Sequence: Synthetic probe
agccagtgagaggccaaacatgggtgccccatggagcactagccagaatccaaacttgtactatagttatgaagcagcagcaccctcagttaggacctctcaggaagcatcagtgacgcgggaattcactgatttcggcgcctctaatatgggagaggcggtagggaacaacacaaagaactgcaacaygtctgctggtaatgccaatcgaggcagccagcgccgtgacaggtactctcagatcagcgaatcctggctcctcagctcgaataactttaggagtaggtcagatggagttagcagcggtgggacatcacgaacagccccgagggggacatgtaaattccac

SEQ ID NO: 9430 - DNA, 344 bp, Artificial Sequence
  Description of Artificial Sequence: Synthetic probe
cccacccaacccccatcccaccaagcaaatgaaacgagttggaagaaagttggaatgtgaaaccagcttcccatttaactgttccatgtacaaaatggttgcacgactgatttaccggaagcacctctccgtgagtatggttgcgacctcaaccaggatgtgtatccactgatagtacttgtggagcgrgacatgatgctttttggagatgctacattatagagcgggaaatgatgctttgtggattcttttgactaccttccttagagaatcttctcgtagactatttgcctccgcagaattacagatgtactcgtctcggcaggacactttgagtggttggc

SEQ ID NO: 9431 - DNA, 401 bp, Artificial Sequence
  Description of Artificial Sequence: Synthetic probe
tcaaagggaaacgcgcatgtgtgagcaaggctgtggcagctgttgtgatgaatgaggcctgtcttyggaaatctgttgcttacacaacgataacacacggttgccgagtggtggttagcacatcctaccaagcctctaacgtttcattcgattgggtgggcactttgaggagagctcaagcagatccaatggcgctcaagattggctggctggcttaacctgcagagattgaacaggtgggaatcggatccttttctgcgtgcaatttgacagggtatataggagaaagcaagtacaacttgctacagatattagtcgctcttttggggtcgtctcgatcaacttgtggacactgacctactggaacccatggagagtatttttgcagtccattcatatat

SEQ ID NO: 9432 - DNA, 377 bp, Artificial Sequence
  Description of Artificial Sequence: Synthetic probe
ccgcgcacagcagcggcgccgcctgctccggcgccagcccggctgggatcttcaccacgaacttctggtcgacgaccatggcggaggagaagccgccctgcgtgggcctgccgtcggtgtagacgtcgttgtasgaccagatcttcttgttgcagtactgctccacgttggccttgcacggccggcagtcgcggcagcacccgacgatcacccccacgccgaccacgtcgccgacgacgtacttgctcacctccggcccgacctccaccacctcgcccaccacctcatgcccgggaaccatggggtacttggaggcaccaaggtggttcttggcctggtggatgtcagtgtggcagatgccgcagtacagaaccttc

SEQ ID NO: 9433 - DNA, 493 bp, Artificial Sequence
  Description of Artificial Sequence: Synthetic probe
tgtgctgcctgctgctcttagcacttgaaacttgattgatttgatggttctctctgcttctcactggatctgacctgttgccgggatgaccggttggtgaactaagccgagaggcatcttcacgttgttggagttctttgctgctccgctgccatcgcagttgggttccaataagcgtacaagagagagaaakatttccattctggttacgtccctgtttgcctcaacagtaaagcgtgcccagattttacttttgcgtgcttccattacacctctcaggatggtcaatccaagtcctttgataaaatcagctatctctaagaagatgcctctatcctcgcaaatcatctccacaagcatctgacgaggtctgtcaagatcctcaacgacgattgggcatgtcatagactgagagccaacatcaaaggcccaggttgcaccaccttcaaagtagtctttccatacgggtccgttctcactgccaagtatctta

SEQ ID NO: 9434 - DNA, 437 bp, Artificial Sequence
  Description of Artificial Sequence: Synthetic probe
accagtgggatgtgcttgcagcaaggtcaatatgggcttttggacccgacaagcagggtcctaacattctactagatgactctctttcggtygaggtggataagaacttgttgaatgctgtcaaagattcaattgttcaagggtttcagtggggtgctagagaaggtcccttgtgtgatgaaccaattaggaatgtgaagttcaagatcttaaatgcaaacatcgctccagaaccattgcaccgtggtggtggtcaaataatccccacagcccgtcgggtggtctactctgcgtttctgatggctaatcctcgtcttatggagcctgtttattatattgagatccaaactccaattgattgtgtctctgctatatatacggtcctgtcgaggcgacgtggtcatgtgacagccgatgtacccaagccaggcactcca

SEQ ID NO: 9435 - DNA, 506 bp, Artificial Sequence
  Description of Artificial Sequence: Synthetic probe
cgtacacggcgctccggacggacgtgtacggcgcgttcatcaaggcattcgacggcggcaacggcggacagggcgagggtcacgccgtcggtggcgccgttcgagctgtgctacgagtcgacgcagctggggtcgacgctgctggggtacgcggtgccgcagatcgacgtgatgctgcagggcggcaagaactggacggtgttcggcggcaactccatggcgcaggtgaacgaccacaccgcgtgtctcgcgttcgtcgagatgaaggggaagtacaagcgtgccccgtacggcggaggcttgacggaggcgccggcggtggtgatcggagggttccagttggaaaacaatctcctggtgttggacgaggagaagcagcagctcgggttcagctcgctgctctttggcaggcggacgacgtgcagcaacttcaattttaccycggctgcttcttagctactttgttcatcacattgatctcttgtactcctagcaattgcgtacgc

SEQ ID NO: 9436 - DNA, 530 bp, Artificial Sequence
  Description of Artificial Sequence: Synthetic probe
gatcgtgaagctccagctgtggggttcgatccgtgcgctggcgcgtggctacgagatcatcatggggctcctcctcttcaccccgatcgcgttcctkgcgtggttccccttcgtgtcggagttccagacccggatgctgttcaaccaggcgtttagccgaggcctgcagatatctaggatccttggcgggcacaagaaggaccgcgccacacggaacaaggagtagtaataggagtaaggtggattatgtatggttaatatgggtgtgtagcaaccagccctttgtatgcgatggaggagttggtacgtagagaagcacctattcctgcctgcacagctagcttattgttctgactggcatggctccagtggagaatcttgatttgtagtggtaaagtaattggtggtagttgggaacagaagagaaggcagtatcctgtcctgattaattagtagctccatcagctagctgactttgcctttctccagtccacaggaagcaaaattttgtcatgtcttgtgtttttcaa

SEQ ID NO: 9437 - DNA, 252 bp, Artificial Sequence
  Description of Artificial Sequence: Synthetic probe
attgttgtctccttattagccattctttatgtcttctcggtattgtaaagcatgggatgcacatttgttgttgtaccaagtatgggaataaagccaaagacatcttgattctactggacaygatctctcatatgctgtcatccatgtagtggatcttttgtgcaagaacccaaggctacccaggagggcatcacgaatcagattgtacatgcaaaccatcttttatttcttcagaagttcgcttggatctgc

SEQ ID NO: 9438 - DNA, 427 bp, Artificial Sequence
  Description of Artificial Sequence: Synthetic probe
catccaacagatatcgcagaaattcttgatctccagcacggcgtagcaattcggtccggccatcattgcgcacagatcctgcaccgtaccctcggtatcaccgcaagtgcccgcgccagccttcacttttacaatacaaaagaggaggtggacgtcttcatccacgggcttaaagataccatcgatttccttacttcccagcactagtacagctcagttagcacacgttagcttcctcgccgtctctcgtcatatgaagcgtgatacagaaaacctattcctgctactgtctctcggaggcttctcttgtcaaatcaggcacgggaaagtaagtttgtgyaatgctctcgcgccctcctgaagttttggaataagcatagattggccatgtagatcgctcgggcaggtcaattttctcattctcttc

SEQ ID NO: 9439 - DNA, 349 bp, Artificial Sequence
  Description of Artificial Sequence: Synthetic probe
gcgtgttaagctcaacagtgaaggggaagcaccaacagtcaataatacaataaataatttggatgataatgtccgtggttctcctgattcatcaccaaattctcccagggtgcagccatttgatgcaaacccccaatattcccagagtccatatgtggaggccccgcagttcggcggcgcttattattcgtacttcccgatgccaaccgctccgcccggtgcgcagagggatctggtcccatgattcgctccatggacagcaatatcgcttctgttgggtcaacstttttgtacaatatcgcttctgttggtagatgatcacatggtcttcatttatgctagcatagta

SEQ ID NO: 9440 - DNA, 374 bp, Artificial Sequence
  Description of Artificial Sequence: Synthetic probe
cacacgaagaaatcttgctgagaacgatcgtgttttgctaaaccgtgcacaycgtgctcagcaagaatatgaaagagtggccaactattgtctcaagttagccggtgaacaagaaaaggttgtggcggaacgttggctgccagaactgagaaatgcagttcaagaggctcaaaggtgtttcgaggattgcagacgtgtgaggggcttggttgatgagtggtacgagcaaccagccgcaacaatagttgactgggttaccattgacgggcaaagcgttggtgcctggatcaacctcgtaaagcaactccacatggagatctccaggcgaacacttgccatgtcctcggcaggtgacgattaggggacagctgctt

SEQ ID NO: 9441 - DNA, 513 bp, Artificial Sequence
  Description of Artificial Sequence: Synthetic probe
gtcggtaaagttcttgtatatgatttgatatcaatgcgcatcattctcttgcctgttccggagtatccaatcatcacgcaggaaatgacaattgaggacaagttagacacgccggtggatatttcaccctacaaggaagatggttccttggagatcgagtactcttcccttattgatgtaagactactgaagggtagtgagccagtatctgcagctcctagtactcccattcgagaagcaggaaagaaaggcgaaccaacggtcggagaaccagttaccttggagaaaaataaaggcatagctcacagccagattggaatcttggtgccaaataacactaaagatccagaagaggcaccagaaaagaaarataataaggtttgggaggaaagcagcgagatcccaaagcctgatgaagttcaggagaatggctggggaacttggaaaccaaacggtagcacgtcggcctggtcatatagagcacaaagaagcagcgctcttggcccaacactt

SEQ ID NO: 9442 - DNA, 423 bp, Artificial Sequence
  Description of Artificial Sequence: Synthetic probe
tgatttcccaagcttcatcagagaaggttttcaggtcaaagtagtgacacctgacaactacataacacgggactcyggattgatatatgaggatgtcaaagttggtacaggcgattgcccacaggatggtcagcaggttatatttcactatgtgggctacaacgaatcaggacgaaggatagatagcacctacattcagggctcgcctgccaaaattcgtctaggcaacaaatcattggttccagggtttgaagagggaattcgggacatgaaaccaggtggcaagagaaggcttattatacctcctgagcttggtcctcctgttgggccatcgacgttcttcagcgcgaagcagtttgaagtattcgatgtcgagctactctcggtgcaggactgccagcggaggacgataggattctactc

SEQ ID NO: 9443 - DNA, 246 bp, Artificial Sequence
  Description of Artificial Sequence: Synthetic probe
acagtactcacaaaacttcctcactcaatgtttcgcttgcctgtggaagcaaagtctgtcatactggagaaatcctccatatactgcagtcaagttcttctatactacattaattgccctgttgtttggaacaatgttctggggcattggcagaaaaaggcacagtcaacaggacttgttcaatgccatgggytccatgtatgcctcagttttgttcatgggagtgcagaactcggcttcagttca

SEQ ID NO: 9444 - DNA, 407 bp, Artificial Sequence
  Description of Artificial Sequence: Synthetic probe
ggtgcttgcaagcgcacgctgaagtttctgatggcaatcttgaatggcaaatggattgtctccatcgactgggttaaggcctgcatggatcacatrgaacctgtagatgagcagaaatttgaagtcgctactgatgttcatggggtcacaggaggtcctagattaggaagacagagagtaatcaacaagcaacctaagctgttcgacagcatgcggttctacctccatggcgactacaccaagtcctacagaggcttcctgcaagaccttgtggttgctgctggcggcactgttctgcaccggaagcctgtatcgagggaccagcagaagttgctcgatgacacctctcctgtcatggtcatctacagcttggagaatcaggagaaggcgaagctcggtgatgatga

SEQ ID NO: 9445 - DNA, 537 bp, Artificial Sequence
  Description of Artificial Sequence: Synthetic probe
cagagactacataactgagctgaagaaggcgatagacaatggagcacgggtggttgggtactttgcttggtctctgcttgacaacttcgagtggaggctcggttacactgcccgtttcggcatcgtctatgtggactacaagactctgaagcggtaccccaaggactcagccttctggttcaagaacatgctctccaagaagaagaggagctaggattgtgaacaacacaagagagaaccagttgattcagctttctgctaaggtcaacagagatttctaggccgtaatgcaaagcttcttccctttccttcacgaaagacgaaaagcattttgttatgttttctagaggagggagccgaaaagccgacgactaagcttttttattctccaaaaagaaaggtgataatcaagccgtaayccataggagagcagcacaccattattccaagctcgggcccaaatgatataggctgtttccacatacggaaatatacatgggcctggcgctctaagcagcaattcaaaacatttcatgt

SEQ ID NO: 9446 - DNA, 396 bp, Artificial Sequence
  Description of Artificial Sequence: Synthetic probe
gtgtctgcaaaatccattggcttcgacgaggagccagccacacagatgaacaccgtgccctcggtgctgcgtggtggcctgtaccttttctttgtatcggccatgatcctcgtgttgagtttcaaagtagggtcctgtatctacagcaggtaagttaaggcgctgttttattttggttttatagtggtgtcccctcaatgacaatgagggaagaacagcgcaagaaggttctcttttacgtgtttagttggcatacgaatctgayttggtgaaaaggtatagtagcaataattcttgaactggagaaagcacccttttggtgcctgagactttgtgcttcatttaggacctgtaatctattctttttatttggttgttgccacccagaggcttgga

SEQ ID NO: 9447 - DNA, 285 bp, Artificial Sequence
  Description of Artificial Sequence: Synthetic probe
cgccgtactttggtacccaaggggaagtggtattgctcatcgtgtagcgtagagagagcaaaggcggggatgagacggtatgagaagaagatgctgaagcaccactttaaggatgatgcggcttggctgcagagaagaaacttcgcagctgtggacttrctactctctgccgcggagaagctgagcgaggatgagcaacaggtgactcctacagatcagtagagagagcgtagacatatgcagcatccctgcactgcatcctgtcctagctgttcttcagttagt

SEQ ID NO: 9448 - DNA, 219 bp, Artificial Sequence
  Description of Artificial Sequence: Synthetic probe
atctagccgatggtctcatacgccattccagacacattgtgtgtgtggaacaagatggaggactgaaactttccgtagaggcttacaaaagaaacggagatttctakgaaggatctgccgtcacagtcttgccacccaagagattctccgctagtcttggtatatgcaagcttaacttctgcactgttcgcttcaccgtcgcttggtcctgcctcgcca

SEQ ID NO: 9449 - DNA, 476 bp, Artificial Sequence
  Description of Artificial Sequence: Synthetic probe
gtcaccagtatgctcagatccaagtgacaagtggctcagacgcttgaaacgtgatgtttcagatcctcatgttccttgttccaagcgacccaagtctggagacagtccaactcctggaggagcatgtaccatgtacagacaagtgcttgatcacaacagggatagtacttgcatgataaaacatgtcaaggaggacatactgatgcatgatacactgctggaccaacaaaaccaagacgggtctcccatttcagcaaagartcttaatcattggatagggaggtggtgccaaggtggcacacctaattttcatggaagtttgagtctaggaaagcaatcgcgcaagtctaatacaccacctgattgtcttgaaggtcagtttccaagcatcgcagcgatggctatgatggggcgtgtaatgaacaagctccgcccatgtgaacttgagaagaagggtccttctgtagtctggaaga

SEQ ID NO: 9450 - DNA, 223 bp, Artificial Sequence
  Description of Artificial Sequence: Synthetic probe
agggaaccagcgaatgcatgtgaagctgaccaaccagagtcagtgatggaggaacaggagattcaggatgagcttcgtgatgaagtagatgyggcactgcagaatgtcagcgccacaacgtatgttgatgatgcttatggtgaaaggactgacgacgacaatatcttgtccaaggatggtattctggttagaaatgagtggaccagagcttttgaacgtgagt

SEQ ID NO: 9451 - DNA, 496 bp, Artificial Sequence
  Description of Artificial Sequence: Synthetic probe
cagatcccgaccatggagggaaatctcgacgcggcgatcgagtcgctcctgaacgtggagaagcagtgccggctcgccggcgatgtggccggcaccaggaaggccgccgtcgacatcgtcgagctctgcttcaaggacgccaactggaagacgctcaatgaccagatcgtcgtcctctctaagcggaggggacagctcaagcaggccattactgctgtggttcagaaagcaatggagtacattgacgtgacaccagatgttgacacccgyattgagcttatcaagacattgagcagcgttgctgctggaaaaatatatgtcgagatagagagagctcgattgatcaaaagacttgctaaaatcaaagaagagcagggaaaaatcgacgaggctgccgatttgatgcaggaagttgctgttgaaacatttggctcaatggcgaagacagagaaaattgcattcattctggagcaggttcggctgtgcctggatcgtc

SEQ ID NO: 9452 - DNA, 221 bp, Artificial Sequence
  Description of Artificial Sequence: Synthetic probe
tttcttcatggcgttgctcatcttagtatatctttccaccacattcctgccagcatcattgcagttgtcrtacttcagataatcaactccccaagatgtgaaggttttcacatcttgctcttcgtgatcgagtgatcctggcattctgttactgcatgttagtgtcccagcatcactgtaaacaccaagtttcaacccttttgcgtgcacataatctgcaa

SEQ ID NO: 9453 - DNA, 387 bp, Artificial Sequence
  Description of Artificial Sequence: Synthetic probe
ttcgatctcaatacatgctatgacagaggctctgacagaaaccaagggagtaattcaattacatgcttacattggtcagcatgacgtgctcattcttgttgattcaggtagctccacttccttcatcaacaaacagttggctgacaaattaccaggcgctcaagatctgsagaagtcatgcctagtcaaagttgctgatggatcacaacacaagtgtgacaaattcattccctcctgtcaatggactactcagggtgctacttttcacactgatctgaagatcttgccactgggtaactttgatgcaatactaggtatggactggttagaagaggacaatcctaatgtggattggatcttgaaaacattgcatattcaatctgagca

SEQ ID NO: 9454 - DNA, 394 bp, Artificial Sequence
  Description of Artificial Sequence: Synthetic probe
gatttctcctcgtaggggccgaggacctccattgaggcgtggaaggtcagattcatcctattctgcatcacccagtcctccaagaaagggaccaagaagagtatcaaggagccgcagtcctagaaggggtcctagaggaaggagctccagtggcagcgggagcagcagctcaccttctcccaggccacgcaagtagaacttcgtgacatgtgctcctggcaggtaagacttcttttctcttggcaggtaaaactggctgtgagctcaggtggtgattcgagggggtgccaacgatgagtgcttctgttagatcagctggcttagcattgctgtgctawagttggttcctggaatttgtactcggagatcacacgctctgcgatgacttgtgtat

SEQ ID NO: 9455 - DNA, 423 bp, Artificial Sequence
  Description of Artificial Sequence: Synthetic probe
gacactttaatggatcgcatggttctcaatgaagctaatctcacaaatgctgtgcttgcacgcactgtgcttacacgtagtgatctcggtggygcaaccattgaaggtgctgacttcagcgatgctgttattgacctacaacagaagctggctttatgcaaatatgcaagcggaaccaaccctgtaacaggggtcagcacccggaaaagccttggatgtggcaacagtcgccggaatgcatatgggagcccttcctcccctcttttaagtgccccaccacctaaacttctggaccgtgatggtttctgtgatgaagctagtggtatgtgtgatacaaagtgaaagaggaatggtcgtgtatagggtgcaagttgagcatagcattatgtgctgtatagctattgaagatgagctgaaagacaa

SEQ ID NO: 9456 - DNA, 406 bp, Artificial Sequence
  Description of Artificial Sequence: Synthetic probe
gcttacttctactgggttaccagagagcaaggatcatttgactggttcaaaggagtcatgaatgaagttgctgacagcgatcacagcaatgtcatagagatgcacaattacctcaccagcgtgtatgaagaaggcgatgccaggtcagcattgatcgccatggttcagtcactccagcatgccaaaaatggtgtcgatatcgtctctggragcaagattcggacacattttgcaagaccaaactggagaaaagtgttcgctgatttggccaacgcccataagaattcccgcataggtgttttttattgtggatctccaacgctcacaaaacaactcaaggatctttcaaaagaattcagtcagtcaaccacaactaggttccatttccacaaggaaaacttctagg

SEQ ID NO: 9457 - DNA, 450 bp, Artificial Sequence
  Description of Artificial Sequence: Synthetic probe
aagcgaaagcacttgcacattttgccaccagctcgtcgatgaagttctatccaaaatgaaagatcctgatgcacagttcgagataattcaacttcyaatcaaggagtgcaacaaggttcaaggccatgtccagcagtgcaagagaatggttcttgaatacgctcccctcatcctggtcaacggcgagaaattcctcgcgaagaacgatttgtgcacgcttatgcaagcatgcgacaccagcaaaaagacgatggtcagatcgttcttggatgggggcttgcggagcgatgtttgaatgcgagagacacgcactgcgtgtagccatgtagatgtggtgaaaacagggcgaccaagtggctgttgtacatatgtcggccaaatggtggctctgttctcttgcgcccttgcacgaagagatgatgcaacactctgtcaagctattgtgtatat

SEQ ID NO: 9458 - DNA, 264 bp, Artificial Sequence
  Description of Artificial Sequence: Synthetic probe
cttactatgattttggcaggcacaaaatagtgatagtcgagggaaattatttattactggaagaaaatatttggagggagattagagacttgtttgatgagaaatggttcattgacatcgacattgatgtatccatgcaaagagtgctccagagacatattggcacaggaaaagagccagatgtagcrgcatggcggatttcatacaatgaccggccgaatgctgagcttatcatggagtcaagaaaggctgcagatcttgtaa

SEQ ID NO: 9459 - DNA, 551 bp, Artificial Sequence
  Description of Artificial Sequence: Synthetic probe
ggcttagaagtgtatgttttatgtagttattatctgtgcgggagcgggcttatataactctttgacatgtatatacatttggtatatgctttgctgcgagcatttcatagccctgttgaagatttttgatgcataatcatgtttactttcataattattatatttttggtttatgccttcatcacaggtcacaagtatcagcatggaaggtgttttagtaggagaagatctaaatggttgtgcttttgtgtacggctcattaagttttgttgacaaagtgtcctgtggcgtagctttgtatattctggagtcatatcaaggaagtaccaaggtcagcgtgaatcaagaattggcgtatggctattcagttacgagactcggtttggggctagttccagcggtctgttcgctgctttcagcratagtagcttataccatggacctcccggacactcggccaagacctctactggagcctcttcttgaataactcttgctcgtagcagttgcactgcaggcctttgatcatccatcctgtacatgttcttgga

SEQ ID NO: 9460 - DNA, 570 bp, Artificial Sequence
  Description of Artificial Sequence: Synthetic probe
gtctttggttatctcagaagataaatgagcatttcaagaaaaacaagacaaccataaatctgaagtacatagatcctacatacatgatacgcgccattcctagcaacgcatccgataatgtctattgcacactgttggctcacagtgtggtccatggagccatggctggatacaccggtttcaccgttggccaagtaaatggccggcactgctatattcccttttacaaaatcacggagaagcagaacaaagtctctataactgataggatgtgggygaggcttctctcctccaccaaccagccgagcttcctcagcaagcaagacgtggaggatgccaaggctgaagacgagagagcagccaagctcttggacggctcgccttccaaccacaaggcttgagataatgtttgttgcatcttccaactccagtgctgtgaagtgagaccaccacggctactgatagctatgtgcagataaattagtacgtacagtactcactggcagtttctgttagctatggaaaaccatgttttagttcttcttccattcgaaattccagtgcttaata

SEQ ID NO: 9461 - DNA, 185 bp, Artificial Sequence
  Description of Artificial Sequence: Synthetic probe
gctagaactgaccagtggaaacaagaggatgtacgctctgtaggatgatgagttgatatcagcactcgcgcccragtcatgtatatatcgaagcccgtttgcctgaggtgactccacagcattcagcggacttgactcgagatacatgtagtaggcctaggaacatggcagctgtatctatctat

SEQ ID NO: 9462 - DNA, 402 bp, Artificial Sequence
  Description of Artificial Sequence: Synthetic probe
agtacattgccgacatcccgcagatgccaaacttggaggtttggcttcagaggcccacggatattgttcgtaaactgtgttcaggggatcttgatcttggcattgtgggttatgacataatcagtgaaatcgggcagggcaatgatgatctagttattattcatgatgctctcgactttggacattgtcacttgtccctagcggtaccgaaggaaggtatttttcaaaacataaatactctagaggagttggtaaatatgcctcaatggacagaagaaagaccaatgcgggttgttacaggatttggayatgtaggtgctaagttcttgaaagaaaaaggtttcaagcatgtttcgtttctatctggcgatggtgctcttgagtcatatcctgctatgggca

SEQ ID NO: 9463 - DNA, 438 bp, Artificial Sequence
  Description of Artificial Sequence: Synthetic probe
ggtggagatccttgccctgggtataatgaaaagggctgtcgtggaagttacgtgcggttgaacggcacaaccgtttgggctctcatatgaccttgggtatgtccgactgcgccatagtccaaccaagtccatacaggcttctggcaaagagttgagtcaccgtgacacactgrctgctagaagttacagaaattagttgtacgatagagtgaatcatcaacgtatgtatgtacagtacattagtctacacaagaattgactctgtaggtgcgaaaaagggttgtgaggctctagatgccactggtctcgtttggggagagcacagatcgagactctgctgaatacctgagtccatatgtgcaatggcttctggattttggaggaggccgtgcgatggttcatttttgcttcaacgtgcaaggacataccactcattca

SEQ ID NO: 9464 - DNA, 160 bp, Artificial Sequence
  Description of Artificial Sequence: Synthetic probe
ggggtttcaccaacggtggcgcgtcaatccgggtcagccgcgagacagagtagaacggcaagggatccttcgagggtccatgccgatttcgttgytctccaaggtactactccactgccatcaaattcaagcgccacctcgtcctcatgctcgtcctcaa

SEQ ID NO: 9465 - DNA, 460 bp, Artificial Sequence
  Description of Artificial Sequence: Synthetic probe
catcatccctccttacacagttccagatgagaagagggagaaccatattccatcaaccgcaccatacagtctcgctgaatgcgttcatgacctcctccaccttgctgcgagaatgctggtgatcggcggyagacttgtattcttctacccggtcttgcgggacgatgactttactgacgtagccaaattcccggagcacccctgcttcaagctggtcgcctcatgcgagcagatcctaagcttgcggtacagtcgggttctgctaaccatggtgaaggtcgagccctacacggaggagattgaaaagatgggtgaggaacgtcaccaggagttcagggagaaccaccagaaatggatggaggagggtaacctccactccgccgtgttcagcccctcggagcaggatgggaagccgaagtttgacaaggactccaagccaaagtacagaggcaagtacgtg

SEQ ID NO: 9466 - DNA, 269 bp, Artificial Sequence
  Description of Artificial Sequence: Synthetic probe
cggcgtatcctatggggtacactcaaatgtgtgcataaaccagttggtccgtcatggcagtgctgcgcaaaaggagaagtatytgcccaagctaatcactggggagcatattggggcattggccatgagtgaacccaactctggctctgatgtcgtcagcatgaagtgcaaagctgagaaagtagatggcggctacgtcattaacggaaataagatgtggtgcacgaatggtccgtgtgctcagacactggttgtttacgcgaaaacgg

SEQ ID NO: 9467 - DNA, 522 bp, Artificial Sequence
  Description of Artificial Sequence: Synthetic probe
tgataaaagaagacagagtgtacgagaagcagcagctttgtcatcacaagaccaagaaaatataggtcctcgaggaggaataaatgtgaataatgaacatgatcgacaaaaaaacatagtaagaggtaaggtatctcttgctcatgttattaatagggcggaaggttgttctcaacaaggaggctggtcaagacaaaaagccatgtcaataacagagaagctagagaaagagaatttgagattggagcctaggtcgagtctgctttgctggaaagcttcaagcactactagacggaagctctcagcrttgaagatcagaacccgaagatcgcgagctctgtcaaggctcgtcctgtgcgggaggtgcatttcggtgaagtctcccaagtcgacacgctgacgcggaggtcccaccggatttacatgtagctaactcccatctccatggtttattttctgtaactgtagcaatcagtaagaatgtaggttattctgtacatcgtttaacatgtagtagtccta

SEQ ID NO: 9468 - DNA, 427 bp, Artificial Sequence
  Description of Artificial Sequence: Synthetic probe
gatgatataagtatggaaacagagtcatggtatggtctgtcccttttgtacctaagcttgtcgcagtggagggatgcagaactttgcatatcgaaaataaaagctatagatgcatactctcccttggcttatcatgctacaggaaatctacatgaagcgagagggtttctgaaggaagctcttggagcatactccacagcattacacttygaacctaagcacgtaccgagtttgatagcgtcagctgttgctcttcgtcagcttggcggcaggcccttgcctgctgtgaggtgcttcctgggtgatgcgttgagactggacagaacaaatcatgtcgcatggtttcacctcggtttaacctatgaagatgaagggagcagttcatcagtacttgaagctgctgaatgttttcagacggctgctcgtc

SEQ ID NO: 9469 - DNA, 327 bp, Artificial Sequence
  Description of Artificial Sequence: Synthetic probe
ccgcgctgtgcgccgtggtcatggtggcgctggtggtgcagacgatggtctacctggtgtgcaagagctaccaccacgagagcatcgacaggagcaacatctccgaccatctcgaggtctacctcggcgactatgtcccgctcaaggccagcgacgtgcagatggaacacttcgaggtgtgacccccaaaatcactctcttcgattgccctgtttgtaatactakcacgctaggcatagtcccacggaatttgcaattcccttgctggtcttgatattgatttgcacaaaacaatggaatgaaattaaggagaggtataagatcatt

SEQ ID NO: 9470 - DNA, 172 bp, Artificial Sequence
  Description of Artificial Sequence: Synthetic probe
gtgagccacgtgaaaggacaagagagcatggagctgttgagaggactcgcggaccttgctaaaagttgtctagatatgtgtggtgacaacaggccatcgatgaaagaggtygcggacgagcttaatagactaaggagactttctatgcatccttgggcacggttccatgtgc

SEQ ID NO: 9471 - DNA, 447 bp, Artificial Sequence
  Description of Artificial Sequence: Synthetic probe
tgatgatcatataatattggacatagagaaggctggaagagggatggatgacaatacattaacttccatagagccacaaaggcatcacactctaaacctaatacaaccagccatcacactcagaagagccacagaggcatttcttcttcttgatgttaccattggcatcataaacctgatctattgcatagttgtagtggtaagctagctcctgacagggyggaatatcctcacaggcaaagaacatgatatgaggcgcactcttgtcgtcatgatcatagaggacattttgtgcataaaggttgggggtacagctgtggttgataaattttgcaaagttgcccatctttgaagcatcaacagcaaaaccagcatcctcatcttcctcgggacccttctgaagcgccggtatagatcttgataggccctcccaaaggatttcatcat

SEQ ID NO: 9472 - DNA, 465 bp, Artificial Sequence
  Description of Artificial Sequence: Synthetic probe
aaaatgagcattctggaggatgtgatccacaagatgagaactccggttgtttacttgaacataacaagactgaccgactatcraaaggacgcacacccttcaatctaccgcaagcaacacttgagcgaggaggagaggagatcgcctgagagataccaggactgcagccactggtgtctacccggagtaccggattcctggaacgagctggtttatgcccagcttttgatcagccagcatcaaatgcgccaacagtaaaggccagtatgaggcgctctggatgattgtatatgaaatgttgccaatgatcaaagtagaggtcatccggagacctagggtttttcaagacccacatatatagatagtaaagccgccagctggtgagatctctctatatacccacacacgtccttaggttagaggctaataggacttcatgttgtaaagttcatgcctaaatgagaa

SEQ ID NO: 9473 - DNA, 372 bp, Artificial Sequence
  Description of Artificial Sequence: Synthetic probe
ggactattcaatcaaccgaggagattgaagtgcatgagaatgtaaaccagaagttgtctcattccatccttcgcagttctggtggaagccgcacactatgcaacaccgaatttgactcagtrcggtcttggatgttcattaattcccccctgctgtattttatcctttcatctgcgaaagagataccggaaagcctgccaggatcagtcaaaatatcaacagattttgcttttgcctttagaagttgcttggatttgtgaacttgcgaagtaccgccacgatttggttgaagttcctgcattagttcatgtctcacctcaatcactggatgatgtctacaaaatgttgagatggcatctcctgttaagatcc

SEQ ID NO: 9474 - DNA, 755 bp, Artificial Sequence
  Description of Artificial Sequence: Synthetic probe
gaacaaacgaatcttccactcctcccgtctgatccggtccagccccatagcatctccacccgatcggctccactgcagcatgctatagtccgtggagtccggggtgctgtcgattcccgcgggatctgccgggcggccggcggcttgatcggagaaagcaaggatgtcaactcctgcaagaaagagattgatgagggatttcaaacgactgatgcaggatccccctgctggtataagtggggcccctcaggacaacaatataatgtcttggaatgctgtmatttttggccctgatgatactccctgggatggaggtacgttcaagctgacacttcagtttacagaagattatcctaataagccacctacagtgcgatttgtttctcggatgtttcatcctaacatttatgctgatggaagcatatgcttagatatcctccagaaccagtggagcccaatatatgatgtagcggctatactcacatccattcagtcattgctttgtgatccgaacccaaattcacctgccaactcagaagctgcccgcctattcagtgagaacaagcgggagtacaaccgaaaagttcgtgagattgtggagcagagctggactgcggactaaaatcacaagcatccaggggtcttgcgtactgggctgcttgcaatgtaattaaaatgttataacatgtttgttgtgtactatgttcttccttgggcattggttggattcttcagcaattgagattatatccagt

SEQ ID NO: 9475 - DNA, 334 bp, Artificial Sequence
  Description of Artificial Sequence: Synthetic probe
aaggcattatcttcagcgaagacggcagaagagaaatctaaaattaaagaggatcagcagaaatcaacagtgacaatgcggtcctataataacatattggcaatgtcacagccattgcaagtgaaatctcctttattcattggtgataagaaaattactctctcatggatggaactgccaaagaaaccagcagctacaacagcaggagggaagaggacccaacctccttccaatgggattgcccctgtaagtaagaaggggcgaggagagggaggagtgmataataatcagcttgtgaacagagcttttgaagcattatcacgtggtggtggta

SEQ ID NO: 9476 - DNA, 426 bp, Artificial Sequence
  Description of Artificial Sequence: Synthetic probe
gcccatcctcggtgacaacaatgaagatgggtattgagcggcgtttgatggagaaaatacctgagattgttgcagttgaacccatcgctgatgaggagactggtcttgaattgaatcaagagaacatagaaaaggtactcgatgagatcaggccatacctttcaggcacaggtggtggtgagctcgagtttgtttcaatygaggaacctatcgtcaaggttaggctcacaggcccggctgctggtgtgatgactgttagagtggccctcactcagaagctccgagagaagatccctaaaatcgcagctgtccagctattgtcataatctctgaagtacacataccttacaatttacaatgtgaatgtgccgatacagtaattgtcaggaagttgtaataacatttgtatgtgtagcctcccaaaga

SEQ ID NO: 9477 - DNA, 278 bp, Artificial Sequence
  Description of Artificial Sequence: Synthetic probe
gacggctgcagctcgccggccagatactgctaccagcttgacggctacacggcggcaggcggcgtcggggcggacatggaattcgaggctcagctcgagttcttcttgaacacgtcccagtttttccaaccacagattcagagcctataggcatcgcggccagtatyctgctgtaccagcactagtattagattcagagttgtgtgatcacaggtggtacacttagcatatgaccagttatcactagggaagtgtatcccaattggtcatacaccggc

SEQ ID NO: 9478 - DNA, 299 bp, Artificial Sequence
  Description of Artificial Sequence: Synthetic probe
tatggacaacggctggtcgtgctacaataactgaagatgtaaagtaataccaatgacaactgctcagtttgtgctaggttgggagttgttgccagaaatggtgatggactgttggctgtagtggaatgcaggaagtatatgaatgtcactgtcccattaatagctgaagttcttkcatgcatagatgctactctgttggggagagaagatgggtataccagagtatgggtggaaactgattgacaaacttttgtcacccatggcaaagtgaattgaaggagcgctcatcctgtgtccac

SEQ ID NO: 9479 - DNA, 176 bp, Artificial Sequence
  Description of Artificial Sequence: Synthetic probe
gctcaagcaagtttcataaatgtgtcgatgtcgactatcacgtcaaagtggtttggtgaagacgaaaagaatgttagagcattgttcacattagctgccaaagtatcacccactatcatatttgtsgatgaggtagacagcatgcttgggcagcgaaacagagctggagagcatga

SEQ ID NO: 9480 - DNA, 280 bp, Artificial Sequence
  Description of Artificial Sequence: Synthetic probe
ctggttcatttggtgtggtatatcaggccaagtgcttggaaactggagagactgttgccattaagaaggtactgcaggataagagatataagaacagagagctccaaacaatgcaaatacttgaccatccaagtgtggttcagctaaagcatcacttcttttcaacaactgagaggggtgaagtttacctaaaccttgtacttgartatgtcccggagacagtttatcgtgttgccaaatactatagccggatgaaccagcgtgtacccatactatatgt

SEQ ID NO: 9481 - DNA, 242 bp, Artificial Sequence
  Description of Artificial Sequence: Synthetic probe
ggccctcggggcccatcctctgaaaggaaacagtcactacagttcgtggcatcgagactgcatgatgcactcttccactgcctgcatgagtactttgctgggtggcctaagcagaaggatagttggtccaccatatacccyaaaattgtggacacgctgtacagaaggcctgattctggtccaatcgtcctgcacctagtatgctactacgacggtgagcgtctgaagttcccaatcaccaa

SEQ ID NO: 9482 - DNA, 420 bp, Artificial Sequence
  Description of Artificial Sequence: Synthetic probe
aaggagtgctcctccttgtctttcgatgaccaatgcgccgtcttggagaaggaggccgttaacgtgtccctcgagaacctcaagacctacccgttcgtcaaggaaggtgtggccaacggaaccctcaagctcgtcggcggacactacgacttcgtctccggcaagttcgacacgtgggagctgtaaatcttcctacacatacatacctatacagacgtacatataccaagatatcgtccgaccgaccgtcgatgtggaagcagtggcatggaktgcgttacttgttattttgcagtaccggatgccggatggctcgatgtgaatttgtaataagcaatagttgtttctacccttttctgacgccggttgtaagtgtgatgcataatttgatcgccttctgatcaaaagacatcatataat

SEQ ID NO: 9483 - DNA, 410 bp, Artificial Sequence
  Description of Artificial Sequence: Synthetic probe
gcagcctcagcctcctctccttccttcttggtagcactcttcttcttgcgaccaatatcaactccatagtgctggagataccactgcttaaatggagctgcatcaacttgaacaattgcactcttcactagagtctgtgtcctaaccaactcattatttgaggcgttgtacaccacatccaataaacgggtcttcctagtaacagcctcactgccccaagagaagtttccagtgtccaacctcaaagcacgccacttcacattgcctcctcggacccttatcctcctaacagtcttagcattagtcaccagctttgtatttgcaggctgtcttccragctcatactttctcttcttcctccacgccttcttcttgcctccagtggcacgtctcttgtgcatcgaatcccg

SEQ ID NO: 9484 - DNA, 416 bp, Artificial Sequence
  Description of Artificial Sequence: Synthetic probe
agaatttggaggtcatgtcactgaagaagcagaacgaagcgttgagagctgagaatgagcactacaggaaractgcaaagccatccagaaatccaaggctgtgcaggttctgtaacgaatatgtagttggccacgactaccgcaactgccccaagaggcgcgcctctgcttcttctgaacaagatgaagacgatgattttccagctaacactcgtgaagctatgctgtgttaatacctacacgataggatttgattagatataatatgttgctgtccttgagtcaagaacttaacattccttttgttgctactactactagagtactagtgatgcttttgtggctacacgagctcctaatgctagttagtagttacttggtaatgtatttattgcagaacatgaagatgtctgcac

SEQ ID NO: 9485 - DNA, 289 bp, Artificial Sequence
  Description of Artificial Sequence: Synthetic probe
gacctggcatccggttcgcggggaacacggatcgtggaccaagcgagaatgcagtttctagaagcagraacagtgaaccaaatgcgggtagcagcagcattactggaccaagcagtgacatgtcctctggaagcagacccagtgaagcaggccctgaattatgaaactaggcaatcaaccttctgaaggagatggaagctgcgaacgagtctgagacgctgctgtttcgtgctctcaaagggtttgatgagcatctctcaccgagaagtcacatcaggcagaagagctt

SEQ ID NO: 9486 - DNA, 523 bp, Artificial Sequence
  Description of Artificial Sequence: Synthetic probe
tgccaaagagcatgccatgaccaagttagcacagtcggtttctcgaaaggccatccgagctcttatatcaggtggggcagggagtttatcttacacaggtcctaccaagttgtttctgctggtcagatgtccctgcaagttgaacttacccctggatttcgtgccaaaacgcgatttccgttacagtaagaaggttgtaccccagcacatgtctataaaatgtaatgcaccggacttccaaaacaaaaataagcatgttacatcartcatggatgcgtcatgttgcagctcagaatctctttcttccgatgttatctggttccagtgcaagcacacgataagaggtttagcatgcaaggcgtcattagaagggtgataatcttgatgtatgttccaattgaaaaatgctgtagtgaggtggtctttctccgtacgaaagcatcagcattctcaatcttaaccatgtacccgtttccctagtactattattttgtactggaatggctcgtggtctcaacagttc

SEQ ID NO: 9487 - DNA, 313 bp, Artificial Sequence
  Description of Artificial Sequence: Synthetic probe
cgtgaacattgccttgtgcggtgtcttctcgcggcgctacaacgagctcagcagaaaatacagattcgtcatgcagctcatcgagctctacgcgccatacagcttgttcaaagggtgctttgatgacatgaacacggagagactaaggttggcgatgaacaaggagcgagaggacaatgcagcaaactattacttyggtttcgaccccaagtccatcgactgggacgactatttctacagtgtccatatccccggtgtgcttaagtacatgcgtgattgagtacccaaatccccacatcctgcttgctagcct

SEQ ID NO: 9488 - DNA, 379 bp, Artificial Sequence
  Description of Artificial Sequence: Synthetic probe
atcgcaaccatctaccgggaagcaacaggagctcgacctgcccctgcaacgagcaggagccgccacacccgacgaggaggacgcacgctgcagctcaccgccgctcgccaccgttgccgcgctcatcgccgcctcgccatcctgcctcggccgccttctccaacacctcactaagggagcccgacgagtaccagcaggagtttgaacagtcttacgagtaccctctcgagtttgaaccgactccgtcctttgatcagtcaggtacrtgtgacccggtggacaagtctggctcttactatgttgattgtgctgatgaggactactacgagcagtagccgggatcctaccaggaagtcctgagacgtgtgggcatggaact

SEQ ID NO: 9489 - DNA, 262 bp, Artificial Sequence
  Description of Artificial Sequence: Synthetic probe
cgttgagcattatgagaaacaaagtgagtcggatttacataggctggaaggaattcgcccagcagaatggcctggaggtgggcgacatctgtctcttcaaactggcagaccgygacaccaagagtctcaagatgacggtctatctgatccgcaagtctgagatagagccacagctcaccagcgtgtagcgttcagtctatctgtgctctgtggttttacttagttaactctcttataccctgccatgagaagagagagctga

SEQ ID NO: 9490 - DNA, 326 bp, Artificial Sequence
  Description of Artificial Sequence: Synthetic probe
acgagcagcaccaaggccatcatcattaatagtgccagggtccctcacatttacccttgcaatatgtaatgtcgacgtatagatggtagargatgtaatctgaacaccctgttggtgaatgtgagctcggctcctaatgaatctctgaagggctggcacctcaaaacgattccagaagtacaagattagatgctgcatgaatgctgccgtcgcagagaaagccaggtatgaaaagccgtaggtgtatgagaagaagtagatgtggaaaaccaggaaatacagcaagaaaaagcgaggaaagaactgcattgatatagatgtgcgca

SEQ ID NO: 9491 - DNA, 317 bp, Artificial Sequence
  Description of Artificial Sequence: Synthetic probe
aaatgaggaaatgcgaggcttggaaagcctaagtattcagctaaagattatgcggaagaacattgattcactagacctggctgttgatcgcctgctccacctcccctwgtcagttgatattatcgcaaccttatacaaggaatccaggaacttccaatgaaatttgttcaccaagtagctgtcacatttttgggaggcaaccaactactgtcattgtaaaggagaaggtctccccttccatggcaaccacatgagatggcctccacttcaacggcatgttgaaattccccaactcttgactttattacactccatgt

SEQ ID NO: 9492 - DNA, 229 bp, Artificial Sequence
  Description of Artificial Sequence: Synthetic probe
gcaacaggaagaagatgatggcaccgaggatttgaaaggtagtaatggcaataataaaatggctgaagaccatgcagtggcagcacataaagaggagcaagagcagcygcagctagagtctgtcgagaagacggatattcccagcagagagagtgaaagtgttggaagaacattcttagatctaaacgagcttgcccctggagggggctttgacgacgggccaatcctg

SEQ ID NO: 9493 - DNA, 371 bp, Artificial Sequence
  Description of Artificial Sequence: Synthetic probe
gtacggctacatggctccagagtttgcatacacaatgagggtaactgaaaagtgcgatgtgtatagcttcggcgttgttgcactggaggtcatgatggggaagcacccaggtgacttgctaacctctctgccggccatctcttcatcggaagaagatgatttactcctcaaggacatactggaccagcggttggatcctccaactgaacagcttgcagaagaaattgtgttcatygtcaggatagcacttgcttgcaccagggtaaatcctgaatccaggccctcaatgcgatctgtagcgcaagagatatcagcacatacccaggcctacctctcagaagcgttcagacttatcacaataagcaagctaa

SEQ ID NO: 9494 - DNA, 339 bp, Artificial Sequence
  Description of Artificial Sequence: Synthetic probe
tgatgatggggatgaggatggcgactttggtgagggtgaagaggagatctctgaaggagaggagtatgacaatccgaagtccaatgataccaagaagaaacaagtaggtgagggtgaggagaatggtgaggaggaggacgaggaagtacccgaagagcaggagggtggaggaggtgatgatgatgacgatgacgacgacgatgacaatgaggatgatgacgatgaggaagatgttgctgaagacgatgaagayggagtagaagaggaagacgatgatgaccaggatgatgaggaggaagatgatgacgaggactcgctccagcccccgaagaagaggaa

SEQ ID NO: 9495 - DNA, 398 bp, Artificial Sequence
  Description of Artificial Sequence: Synthetic probe
gtttaattaagttgacaaaggttcttcaaagtacgatatacgaagttgaccttgatcgcattcttcagagtgttcatatttatttacaagaacttgggatggaggagatacggaggagggctggagctgatgacaaaccactaagaatggtyaaaactgtgttgcatgaactcgtaaagcttcgaggtacagcaataaaaggtcacctttcaatggtccctatagacgctgaacctcaaccaatcattctggcatacattgatcttaatcttcagacccttgcagcagctaggatgttgacgccatctggacctatgggtcaaacccactggggcgatgctgcatcgaacaatccaaatccatcagttcattcaactgatgcacaattgaagcaagag

SEQ ID NO: 9496 - DNA, 274 bp, Artificial Sequence
  Description of Artificial Sequence: Synthetic probe
acgttgttgaagctgtcctggtctgtcacgtcatagacaatgatgataccatgagccccwcggtagtagctgctggtaatagttctgaagcgttcttgcccagcagtgtcccagatttgcagcttcatagtcttcccatcttgctccacagtccgtattttgaaatcgacaccgatagtactgatataactgtccaggtacgagtcatcggcgaatcttaagagaaggcatgacttgccaacacccgagtctccaataagcagaagcttaaaga

SEQ ID NO: 9497 - DNA, 355 bp, Artificial Sequence
  Description of Artificial Sequence: Synthetic probe
gtgttcttgtatatgatgtcaatgtaaccaagtcgtttgaaaaactcaacaactggcgtgaggaattcctaatccaagctagcccatcagatccagagaayttcccttttgttttacttggaaataagattgacgttgatggtggcaatagcaggactgtctctgagaagaaggctaaagcatggtgtgcttccaagggaaacatgccttatttcgagacgtctgctaaagaaggcttcaatgtggaagcggctttcgagtgtatagcaaggaatgctatcaagaatgaacctgaagaagatgtatatcttcctgatacaattgacatgggaggcactggaaggcaacaacgctc

SEQ ID NO: 9498 - DNA, 344 bp, Artificial Sequence
  Description of Artificial Sequence: Synthetic probe
aaggttcacatctgtctgcagattttaaacgaagctcctcgtttacaagccagcctagtggtggccacacatctgatgcagcggacatggattcatcagcagaacccaatggaagcgacacakacatgcacactgagtcttctgtcgaccatatgatgcaataagctacccaaaagatgtcgatgccacaccagtaggatttcccttgctgatgtggctcatgcaaaacaatctgcttgcttatcgttgctggatattttgttgtaattgtacaatagtaggcaccgagggtttgacaacagtgcatgttccaggattggtcagatatatatggtgttagtata

SEQ ID NO: 9499 - DNA, 230 bp, Artificial Sequence
  Description of Artificial Sequence: Synthetic probe
cgaccaccagctctacatgggcgcccagaagaccatcaagtgggacaacagcattgaccgcctcgagatgaccttcgacggcattcccgtcgaaatcccckccgggatcaacgggcagtggcaatccaccgaagttcctgcattgaccgtcacaaggacctccacgacgaacggcgtcagggtccagctcaagggtgtgttcgacatcatggccaaggtggtgcccatca

SEQ ID NO: 9500 - DNA, 368 bp, Artificial Sequence
  Description of Artificial Sequence: Synthetic probe
atcacggaacatttagtctcaatcataaatggtggagcccttccaggattcgtaaatttggtcaggtcagcagatatagagtgcgcaagacttggacttcagttccttgaactggtcatgaggggatatcccaayggacagggtccagcgctcgtggagaggcaggatggcatcgaggccatggagaggttccagttccacgagaacgaggcgatgaggaacatggccaatgggctggtcgataaatacttcggcgaggattatggccttgatcagtgagctgctgccattccggcgtctgttcgcagcaggtgcccgtcgatctgagactgtaaaatgcaaccttctgcgatcgtggaacagtctgt

SEQ ID NO: 9501 - DNA, 282 bp, Artificial Sequence
  Description of Artificial Sequence: Synthetic probe
gaccaggtccgagactgtctacatgaagcagaagccaaaatatcaatacatcatctcctgatagacaccaatgcttatgtgttaacactaaccgacgagaccatattaaaaaaattatagccacacgtgcatgcaatagttctttgttgcaaagcacgcgatattgatttctgtcaaacttaacaaatttacagcaatcatytccacatgccccagatctcactcgggaccaaacggattacaaggcagcagctaaagggtaataaatccctctactaacca

SEQ ID NO: 9502 - DNA, 491 bp, Artificial Sequence
  Description of Artificial Sequence: Synthetic probe
gggcttcttattgcaaaaacagtttggttgtagtctttctgcaagagatcrccagcatgaagcaagacaattcttgagaaatcgtatgatggaccagcaaataagcaaagcgccctctatttctttgctagatagtgaacaatcggtttctggtgtctggaggtcacaatctccaatacggttttgtcttttggggcttccaagtactaaccagggcgtttagagtggagaaacaacaatggctgccccctccgcaccaaaaaggatgtcaccgttttttctttaaaagtatagatacatatgaacttagagaatctgcgacattctttttgggatggagggagtactatacattgtagcagtaacaatccagagtcaactgttcgatatatactcgagcttgtagtagtaacaatctaggtgctgccttaagttgatcaattggttgcagcatgaatatgtctatgctacgacctactatgacttatcaa

SEQ ID NO: 9503 - DNA, 234 bp, Artificial Sequence
  Description of Artificial Sequence: Synthetic probe
agagaacctatccagaagagatgattcaaacaggaatatccaccattgacgttatgaactcgattgccagagggcaaaagattcctcttttttctgctgctggacttcctcacaatgaaattgctgctcaaatttgtcgtcaggcyggtcttgttaaaagattggaaaaaagcaagcatgcagcagagggcggtgaagaagacaattttgcaattgtatttgctgctatgggag

SEQ ID NO: 9504 - DNA, 189 bp, Artificial Sequence
  Description of Artificial Sequence: Synthetic probe
gacaagttgtatcggaggacaattatgatcatcaaaagggaagcatgcgacctttccctcaaatagrgatgcatcatacagcctttctgaacagaggttgtacaccttatatttccccttgtgatgcatttcaaagaacctgatgacttcctccatgtggttgcggtagaagccctcaaaatatccaaa

SEQ ID NO: 9505 - DNA, 339 bp, Artificial Sequence
  Description of Artificial Sequence: Synthetic probe
caaatactggagttatccttcccaagggaacatgtgatttcacagttaccatgcaagcacagcgtactgctccaccagacatgcaattaaaagacaagtttttggtgcagaccacagttgttcctcctggtacatcagatgaggacctcattcctgcttttttctccaaagaaactaacgcatatattgatgaaagcaaattgagagttgtccttgttgatgcatctcgtcctcctgtggagcaacygataaatagtgtccccaacactgatgcagcagttgaggttcctgtgtcaagacacacactgaatgttgagaatgaagtgccagttatggaga

SEQ ID NO: 9506 - DNA, 275 bp, Artificial Sequence
  Description of Artificial Sequence: Synthetic probe
gagaatgaactctgatccatcaaactgcatcgtaattgaggattccttgccaggtttcctggctggtaamgctgcaggcatgcacgtgatagctgtaccttcaatacccaaaagcactgctgaatctggtgctgctgatgaagtgatcaattctctccttgacttacggcttgaaaaatggggcttgccaccgtttgtcgattggattgaggacaccttgccaatagagccatggtttatcagcggacctgtgataaaaggatatggccgtggtt

SEQ ID NO: 9507 - DNA, 187 bp, Artificial Sequence
  Description of Artificial Sequence: Synthetic probe
aagagcgaaatccatgaaccaccttgcccactgtgtgtacgagctactgatagtgaaggatgygtatcattctcagaacctctccatgttgccctcagatccgctcgcaggaatcaaagcattagtttctcttcaggtggtgctggtgggagtagcagtgcaaaccatcctcgcaatgatcatgtcc

SEQ ID NO: 9508 - DNA, 351 bp, Artificial Sequence
  Description of Artificial Sequence: Synthetic probe
catgtcacagtgagctgcataccgtactaaattcctagttacgttatatccttcgaggcggctcgacaagcactcctcatgtggcctgcttctttcaccatgtgaatttttcgatttctagtagtaagtcatcgttgaatrttgatgatgttgcctcatcagatgtacccagtttagcagttgcctgacggacctcctcgagcattcggcggtactgcatccttgcttcaggagagtctaccatggacagtactcttgacacagcctcctgcacagattcatcaaccttctgtcgacggaagatcttgactgcttcgtcatcagcgaagtcatcgtcatcctcctcctctc

SEQ ID NO: 9509 - DNA, 333 bp, Artificial Sequence
  Description of Artificial Sequence: Synthetic probe
caacgtggcggccatgagctaatctgtcagaccagcacacgaatttttgaagtggtacagctgttgatatgggataaacacacgtgattggttcattcgttgccttacacgaccagctactactacccgagtctgagcacacggtttttggcgggttgcagtcgtcgttacactcgccagttygtctttgacagcatccagttctatgtttcagacaaaggactccgtagaacctgagtcttgaattgcgtagacagggctgagggctgtagtatgttgtttctgaacattgtaacgatgtgtaaaggatgtagagtctcggaacattgtgac

SEQ ID NO: 9510 - DNA, 228 bp, Artificial Sequence
  Description of Artificial Sequence: Synthetic probe
gcgagaaagcaaacgtggagtggcaaccctcggctgttcattttaagcacaagaacctggttaagctcaccatctatggcttccaacctgaggaaaactttgtgcgatatgttaggcgtgttatggaaattgcrgtgaacatggaggagatatctctgcatgacagggaggtgtgtgagcactgcgggaacttggatcccagtatcaaggtttgtccttctaggtatc

SEQ ID NO: 9511 - DNA, 318 bp, Artificial Sequence
  Description of Artificial Sequence: Synthetic probe
gcttgcccaagcacactaaactataagtgtttcatcaaacccttgattactgtccaaatattttgcagtttgcctgccatagcctattatactgaaaacttagtcacaaaagagtgagtaacaagttttcccttgtttattgtgcaatgtaatgcatgtatcttcagaataacaagctgttggtkgagtacgtggaccacttcgagtcatgctggctgcggctgctcgtctatgctggcgacaacacagatcagatcttcaagaaaccccatccaccacattgtcacaatcaggtggtttgtgcatctgtcaaactgt

SEQ ID NO: 9512 - DNA, 265 bp, Artificial Sequence
  Description of Artificial Sequence: Synthetic probe
ctacttcatccggctcgaacgggagatcatgtgcctcgccgtcctcggcacgccgcattccgccatgtccatcatcggcaattaccaacagcagaatttccaygttctctacgatttgcagaacaaccggctcggcttcgcgccacggcggtgcgccgaggtctaaagtctccattttgattggttggttgattgtgttacaggtggctaactgggtgtgtacaaattttggagtaggatggaggatgctatttgctacacataa

SEQ ID NO: 9513 - DNA, 206 bp, Artificial Sequence
  Description of Artificial Sequence: Synthetic probe
ctcagttccaagatgcagggatataaaggtattcatgggcaaggcaaggatgctcactgtagctcgagctatagattgccagcggttccggaattagcgtcctgtgaaactagtagtacttgctaatcaagaagattcgttgatgaraacgcaataagttggcggccgtcataaaaatgacgacttggtggcggcagcagcagcag

SEQ ID NO: 9514 - DNA, 398 bp, Artificial Sequence
  Description of Artificial Sequence: Synthetic probe
gacgacgctgaaccatcttgaccctcataactgttctaggactcactgattgtcctgatctgtagccaaatcatcaggactgtttgcctgcaatggcttttcttccccacaacttggacggttgcattttgtccggaaaggatagtttatgttaytgcacttatcgcacttccaactaccctctggcgtcttcggttttgaacctcgtgaactgtcaggtttgggtccctggttatcaggtcttggtgtgttgcatttcctcatgttacagactgcccgaaaggcaaagttgacgttgttgcaattagggcacttccaatcattatcacgcccagctcctgcagatttcttctgtgagccttcgtcagaataggaaccagcccttgtgaccattgcac

SEQ ID NO: 9515 - DNA, 209 bp, Artificial Sequence
  Description of Artificial Sequence: Synthetic probe
cggctccaaatctttcgctcaagggaacaccatactggatggcccctgaggttgtccaggctacacttrtcaaagatgtaggttatgatcttgctgttgatatctggagccttggttgcacaattattgagatgttcactggcaagcctccttggagtggtcttgaagggcctgctgcaatgtttaaggtgttgaataaagacccacca

SEQ ID NO: 9516 - DNA, 394 bp, Artificial Sequence
  Description of Artificial Sequence: Synthetic probe
ctctacttgagcgagcaggaccacagtcggtctccattgtagttgagaccttactgcaatgatctcygtcttccggagtttttgtccccacctaacatgtaggagttgttgcaattcgaagcctaaattccagttggtgagccatcagggcagctgtatttacttgtctggtagaaagttgagttcatctgtgaattagtgtcaggtcaaggtcatctcgtatgggtgtatggcctctttgctggatacttggctgccgttttgtaagctcggattcttagagcctactagaagtgtcttgggtaaagtaccccagcttttaacttgtacaacacaatatagtaacatggggcctgtatctactgttaatctggccctctcgaaggtcatcatg

SEQ ID NO: 9517 - DNA, 134 bp, Artificial Sequence
  Description of Artificial Sequence: Synthetic probe
atgatatggtggatggtttcatgaaagcaatgctggggcactgtccatgttcatggcgatgacgacgaygactgactgactaaaagcaagcatgcaatgcatacatactagcatgtatacatatattgtagcta

SEQ ID NO: 9518 - DNA, 149 bp, Artificial Sequence
  Description of Artificial Sequence: Synthetic probe
agagcctgaccgaggactaacttggcagatgaccaaaagaagaggtgacagagaggtccataaggtgacagaggaaagrcaaggctggtgctctgaccctcatcttccaccttgtgctgcgtttgttgaaataatggctcctgtcttct

SEQ ID NO: 9519 - DNA, 219 bp, Artificial Sequence
  Description of Artificial Sequence: Synthetic probe
cttgttagccagtccttgccacttagtaagcttactctacatgagtccgagagctcatcagatctcttggaatgtctttctaaacaaaaacaaagtaaccaggaggctctcagtgatgaagagctcagyaatacaaaggagaatgaggctgttggactagacaactttgaagtcttgaagcttgttggccaaggggcatttggcaaagtctatcaggta

SEQ ID NO: 9520 - DNA, 247 bp, Artificial Sequence
  Description of Artificial Sequence: Synthetic probe
aaaagctaagcatgctgggatgtttgatattgcgaagacagcaaatagacctatgatacatattggtggctaaggatcagyggctgagttccttctctcctgtgtgacagctaagataaagtgtgagcttgctgttgtttcctgagaaaagttacacatctagctctggaaagaggcaactcagaaggcaatacagatacggctgttaaaacatagtccaatacttgtgaaacagcatttcagaacc

SEQ ID NO: 9521 - DNA, 342 bp, Artificial Sequence
  Description of Artificial Sequence: Synthetic probe
cttgttttcgtggtcactgaaagatgacagctttaagggttcatagcgatagaggaatcaggattcacctgcacatatcaaaagcattgattagattatatctggtaagctgacaagcayctgcttgtgttgacaacaagagcacggggttgggctcggcttgaagaaacgtgctatatggggacccctcttgacgcccaaggccattcgaggatgtaaaggccaaatgcaacagagacacactactgaaatggggaagaagtggatgaggcgatcgaggcgtcgttgtgctgacaatataatcttatactgtgcattgtgtgctggttctacctcctgctc

SEQ ID NO: 9522 - DNA, 211 bp, Artificial Sequence
  Description of Artificial Sequence: Synthetic probe
gtgaaacttaagataaaatctttcaaggtgcctgaacttctaattgagatcccagaaactgcatctgttggttcgctaaagaaaactgttctggaggcggttaatgccatgcttggaggtggtctgcgtgtsggtgttcttcatcatggaaagaaaatcagagatgatagcaaaaccctattgcaggctgggattggtcatgatgatatgc

SEQ ID NO: 9523 - DNA, 182 bp, Artificial Sequence
  Description of Artificial Sequence: Synthetic probe
gattgggggataaagtctccccaactgatatcgaggaagggatgagagtcggtgttgatcgaaacaagtaccagattcaaattcctttgccaccaaagatcgacccaagtgttacaatgatgactgttgargaaaaacccgatgtgacatataacgatgttggtggatgcaaagagcagatt

SEQ ID NO: 9524 - DNA, 510 bp, Artificial Sequence
  Description of Artificial Sequence: Synthetic probe
catataagctctgcagcttggcagagggattacacatcaaaatgtttctataacactataagaagcatagattgacgagatcggttttcatatatttgcattcctgtcgacggcggttctgctcagtaacccacttttgagctctaccaagttgctttgtcaagaaggacgcaattttgcatcaccggagagcaccaggcaagagtttgcgtattatagcagttggttgccttacattctctgttttccacagctcaaagaacagcagtcattaaacttccaagattaagatgccttcaaacgagtctgscgttttgcctttcctctttttgatttgtcagttttccagcaggggaagaggccatgacagccaggtgctccagactcagagactacactctcgttgtcacaattcgccaaatcgttattcctgtgcaagaggcttggtgaaatcacgaatccgttctcccttcctacattccggtcattctggggaccatgactgtcact

SEQ ID NO: 9525 - DNA, 141 bp, Artificial Sequence
  Description of Artificial Sequence: Synthetic probe
ttcatcttcagatgctacttttggaacattctcctttgaaaagatgcgtatgtttgctcytgatgttcttcgtatctctgtaatgattgaaccacctttgccgatcaggcaccctatccgtgatgttgacaccaacaaacg

SEQ ID NO: 9526 - DNA, 743 bp, Artificial Sequence
  Description of Artificial Sequence: Synthetic probe
tgctctgccacgcatggcgtggcgaatgattgatcagtacaccttcttggagaagaaggtgcggcgcaggccgaacagcccgtgcggcgggttgcactcctcgccgtcggcttccgagcacgccgcgttgttccggcacggggccgtcgccgcgctcacgctgctcgccgccgatgctgacgccggcgcaggagcctccttgtcttcttcatcttctgctgtgccgccgggctggctcgtggcgacgtcgtcgtcggggacggactctttgttattattagycttggtgccgtctttctgcttctgctcggccgcggcctgctgctgctgcagcttgttgcgcctgagctgccacacggggctggcccggcccaggcggatgccgctggcgccgagccctgctcgaccctgcccgccgggcacccacctcctcagcatcgaggtggcggcggccttctcagctgccaccgcgatggcgaccgtcggcaatgccgccgtcggccccgaggtctcgccgcgggagttgctccgggagcagggcgcgctgctcaccttgcgcccagcagcaggcgccgccggtgcgctagcagcagcgacggcaccggtgttgctgttgctattgctggcgccgggattgcttggcttggccttgccgacggcgccagcgccggcggcggcggagtggcccgcggagcggctcctggagaagggccatatgttgatgttgatgagctccgagttcc

SEQ ID NO: 9527 - DNA, 267 bp, Artificial Sequence
  Description of Artificial Sequence: Synthetic probe
gtgtgccttgcatagataatgttctcccttattgttgtcgagaagatgacrggctcttgctgaattaggcccatgtggcttcgcaaccatctcaggttgaatgctttcagatctcggccatccagcagaacttggccagacattgggtcataaaatctctcaattaaggaaatgatagtgctctttccagaccctgaaacgcctaccactgcaactgtttgcccaccgcttaccttaagattaaaattgctcagcacaaggacttct

SEQ ID NO: 9528 - DNA, 386 bp, Artificial Sequence
  Description of Artificial Sequence: Synthetic probe
actgcagatgatccgggatattctaatgtacatggaccgaacttatgtcccaacatctcataggacacctgttcatgagcttggtctgaatttgtggagggatcatataattcactaccccatgatccatggtcggctgcttgacacccttcttgatcttattcacagagaaagaatgggtgaagtgatcaacagaggcctgatgaggagcrtaacaaagatgctaatggatcttggtcctgctgtgtatcaagatgattttgagaaaccatatttggaagtttcagctagcttctacagcggggagtctcaagagttcattgaatgctgtgattgtgggaactatattaagaaggctgagcggcggctcaatgaggaaatggagc

SEQ ID NO: 9529 - DNA, 197 bp, Artificial Sequence
  Description of Artificial Sequence: Synthetic probe
agaggcggaacttctttgccaaccatttcagcttagctcagtaacccgcagctccacctcagaggacgtggtcgctgatggcgaggggcgcctcaagcaaccttagccgcrgttcgactagcaaccaacttaggaacaggcggtagcagtagtttcatttaggttcctggatcgttatggtatccttatttaccgat

SEQ ID NO: 9530 - DNA, 372 bp, Artificial Sequence
  Description of Artificial Sequence: Synthetic probe
ataccttggcacggtggtcttcagcgagctcctaaggatgtctcaggaggagttcggattcgctggcgtccatgatgggaggatcacgctaccctgtgatgccgcggtcatggaatatggcatcttcttgctccrgagagatgcctccgcagaggtggtgaaggcattcatgagctccgttgcaaggccgtgcagctttgatggttgtgcggtggcgtcatacgtagagcataaccagcaagcagctgtctgttagcttctgaagaatggcagttgtagtgctagctttagccctgttttgcttgttgcatgatgtgaatatacagttggaagtagtagactggacatgtaaacgaagattatgttgcaatc

SEQ ID NO: 9531 - DNA, 195 bp, Artificial Sequence
  Description of Artificial Sequence: Synthetic probe
tggtgatccacgctcgagaggtttcggccttccaagatcctgatcaaactgttgcgygtgcctcgaggtggccggtcgatgtgtcggtggcatgatagcacgcacgccgagaaagaaccaatcgaccagtagctccgtagcacttgttcttggtctcgtgcgaatccaacaccctgcgcgcgcacgttgggatga

SEQ ID NO: 9532 - DNA, 188 bp, Artificial Sequence
  Description of Artificial Sequence: Synthetic probe
acccaaggaatgagcttgtgaaattcccgcagtactttgggtacagcttagagctgcggataaaacctcggtatgctcggatgactggttgcggggtkaggttgattctgaaccagatgttgtcagtctcggaaaccaggtttgaggaaattctgcagaagaagtcaggcggattttgagatgatcat

SEQ ID NO: 9533 - DNA, 293 bp, Artificial Sequence
  Description of Artificial Sequence: Synthetic probe
gtatactcaattttcttttcttctgcacctacatatccgtcttgagattttgtcagctagaggagcaaygataccctggaaatagctctctcataggtggttaactggacctctgcattcttttctctctttgtacaaggtgacgtgttcattcagagatgtagattctgtatcgtttcttcttctgattatccatggaaagaaagcatagcactttgttgtatgcttcttacaattgaatttatacgttgccaaaccatgtgtttctacatgtatgtaatactaacaattca

SEQ ID NO: 9534 - DNA, 276 bp, Artificial Sequence
  Description of Artificial Sequence: Synthetic probe
agcgagataactgggcacagacggcaacagagggcctctggactgcgaggaactgctccgtgcagcggcaccgggtcctcgttcatcatcaccgtctcgacagtcgtcaggaccgaggaaggcggtagaaggcatggcgaaggcaggagagagcagcttcagtgatgagattatggagtcagatatcgagtttgaaggggaagttgttgagcctgrcaatgatcttccacagaagatgggagatccatcggttgaagtctctgaagagatgcgcga

SEQ ID NO: 9535 - DNA, 176 bp, Artificial Sequence
  Description of Artificial Sequence: Synthetic probe
ttctgtccatgatacctctaatacgaccataccagtggcagagtctactcataccggttttgccaaatgacatgctggattttctggatgcrcctgttccatacattgttggtgtacagaacaaaacatctgatctgcaatccaggctagcaaatgctgtgatcattgatgcgaac

SEQ ID NO: 9536 - DNA, 133 bp, Artificial Sequence
  Description of Artificial Sequence: Synthetic probe
taatgctggtagtgggatatagtgaaatccatctcaccgacgaaccctcgtccacagatacgatcgccatayatgatgttcattgtagcaccaaacccagggtacctcttggacagagtgtcactcttggttg

SEQ ID NO: 9537 - DNA, 503 bp, Artificial Sequence
  Description of Artificial Sequence: Synthetic probe
acaagccaagaggtgcttgtatcaagtttctggcatcacgaggtgaattggaatcaatctttttagcctctaaagtatcagaatcatttggagaatcagatctccataatcccaagccaaccctctgcaggtcatgacttargagggtatagaactccaaagttggaccaagcccagttccaacttcaccgaagtattcaacttcaagaacagccttctgagtggagaacatttccataactttggaagcagaatccaagatacggttacgagaaacacgaactttctggcgctgcagtctaccaacccgtacttctctttcagttgctgagttattatcaccctgctggtgctgaagacggttcaatgcccgagataacccaaaagctgtagaataaaagtgctgccttctcgtttcaaaaggaaacagaaatggacaagctttggtcatctgataacaccaagaaggtaagctaccactacagagtgcaagaacatcctga

SEQ ID NO: 9538 - DNA, 179 bp, Artificial Sequence
  Description of Artificial Sequence: Synthetic probe
cgtccaaatgccaccgcgttgcacacggtgagactcttgtgccgaatgaactgttttctcggtacgacctgagcgagaacacaccaggtcgtcttctctccctcgattagkgttctaacagtgcttaaggagagactgtatgaaaagataatggattttattgttcaaaaatatgcaag

SEQ ID NO: 9539 - DNA, 420 bp, Artificial Sequence
  Description of Artificial Sequence: Synthetic probe
caagttcaattcatatgcagagcaacaaaagtatctcaaggacgccaaagacgcccgtgataaggtgtaccacatccttgacagtacacaagaaatgatagccgaggctgagaaggacgccagcaaggaaggtatcgctaaggatgtctacgaatactgcacaaagggcattgaaacatccctcarattcatccgtagttacagcacccgtcgcacctaccttgacaagctcaagagccacagtgatgatctcatccatcagctaaagtggctcaatccagccacccaacagaaggaagctcagcgccttgctcttgaggccggcatgtataagaaagccacgcttgagaatgccaaaaagtttcagcattttttaccaaatcaattctcaaaatatctcaaagaaaacggtatcaagtt

SEQ ID NO: 9540 - DNA, 287 bp, Artificial Sequence
  Description of Artificial Sequence: Synthetic probe
cccggaggtgctcaagcattaacacgtctctgctacacacacacgccatctacaggatctctcgctcgctatctctttctatctcgatcgtacctgtaggtaattgycttgtcccatgctgcatttcttctatccatctcctgttacacctcatccgggcccgatcccgatggatggatcgacgggaacgcgcttgcttgcgtgcccataacgatcgggcaggacacggccggccggcgtaatggcagcggcggtggccgccttaaatatgcaggatctatctgacg

SEQ ID NO: 9541 - DNA, 155 bp, Artificial Sequence
  Description of Artificial Sequence: Synthetic probe
cacgtcgtttccaataggagaaatcccaccctgtcgcatacaccacccatgaaggaccatatctttgaaagtccgyacaagatctatgttggcaaccttgcatggtctgttcaacctcaacacttaagagaacacttcactcaatgcggaactgt

SEQ ID NO: 9542 - DNA, 196 bp, Artificial Sequence
  Description of Artificial Sequence: Synthetic probe
acagagatgaaggacctgcgaggtgcgtatcttctccctgccagagacttcgggtctccacatgcaaggaagactgtacaaattgctagcttctatctgtagggtcgtgttctttgtcraactgtcggagtgttggtgatggcattgttgatgatgcctctacggtgcctgaggcactgcaagttcgttggttctg

SEQ ID NO: 9543 - DNA, 383 bp, Artificial Sequence
  Description of Artificial Sequence: Synthetic probe
gtagttctgaattttgtttcagttaacgcatccaaagataattgttggacatggttaactccatgtatagttgtctttcgtacggtggcattgaacttggttttaccaatttgctatttagatgattattataggaaggtatttactaccacactactgtgtggagacaagaataggcaacatattttgcattggaaggttccttcratcggattctaggtcagtatatgattattggtggaatatttcttggtggtgtatcattcaccgcatagttctccgaggaatctatctcatcgtgaatatactcgaagggttttcagctgctgtgccaggattgaagtattataacaaggataaagcacacaaatagtgagtgagta

SEQ ID NO: 9544 - DNA, 299 bp, Artificial Sequence
  Description of Artificial Sequence: Synthetic probe
atctcctgaccatgcgccgaatgcagatggaccagcttatcaaatgatgccaatacattcaccccgagtgcctaattttcgacatccagtgcctccacgaaagaaacraagtagcaggacaaccaagtctcctccaatcgctccatctccatattctctcctccattcctgaagtggtgctcggattgcttcaaatgtttctcctgtgttggctacaaagctatccttactatgaggttgctgtggttgcaattttgctgcttggaacttcctgaaccagtaatgggagtttgatactg

SEQ ID NO: 9545 - DNA, 237 bp, Artificial Sequence
  Description of Artificial Sequence: Synthetic probe
tactctgaagatgccaggaacctcggcatcaagcctttgtaaaagcacgtctctgggcttgaacattcagctcaagccattcatcagtgacataaagctggagaagctcacggtatggtttcctggattgtgttctgytgaatctcatagtgatcacagcagctgcggtcgggggcgataccgtgcaaagagaagaccaacacctcccctccacacggagacatgcctgcggcagcg

SEQ ID NO: 9546 - DNA, 328 bp, Artificial Sequence
  Description of Artificial Sequence: Synthetic probe
attcccgggatgaaccagcaaataaatgatatgttggaggtatacgcgaaggaaataaaactagctgatgcaaagcgcataaatggtctgcgagctgtgtttggggaratctaccctgatcctgtaatagttgtatcaatcggtcgcaaagtggaagatcttcttgcagaccccgaaagcaaagtgtccatatcagttgagctgtgtggaggtacacacatttcaaatactagaaatgctgtggcatttgtcatcatttcggaagagggcattgctaaaggtgtacggaggataacagctgttaccggagaatgtgcgtcccaggcta

SEQ ID NO: 9547 - DNA, 281 bp, Artificial Sequence
  Description of Artificial Sequence: Synthetic probe
gatccatgttcatcacttgcttctgcatgctgacaatttgtgccttaagtattcttatctccatctccatcctagttttctcggcaatgcgagcattttgcacatcttctaacatattaagtgcatattgttcttgtctccatcgaggtgtctcttctggtggacctgtcaccagctccagtgcacgatctcttccagaagcgcttrcagtatcatgcgatggaactttgatatccttgctgactgtaaatggttcctgaactccatgtcgagaataatac

SEQ ID NO: 9548 - DNA, 260 bp, Artificial Sequence
  Description of Artificial Sequence: Synthetic probe
cattgccaccgagctcagcactgctcccaaaggaatcaaatcttgagaagctgtcacgctgcccgaacgaattgttgtctttggcgccaaaggtgtccatctgggagaagctgtcgtcccctgcttcgctgtacctcggygagaagctggagttgttgtacatcggcgtgcttggaacggaagaatcaaagaatcccttttgctggccaccaccataggtgctgccagcggtaggagattctgctctgcctgagccagta

SEQ ID NO: 9549 - DNA, 365 bp, Artificial Sequence
  Description of Artificial Sequence: Synthetic probe
tggctgatggtcaggtggtaacaaaattcttctactcacaggtagatgagtatgcgagtccgagtggctgaaacgtgccatgcgctatgatctcaatgtgcctcgtgagtatctccataaactggctgctaagaccagtgtggcggccatgccgaccaaaatcttcgcatctctgctaaatccaccagagctccaactcacaaytgatatcaacgagttccaacgagatggctttggcataagaattactacggtgtactgttttttacaagggaaagatatgaccctttgcaaggccattttcatcgcctctggctttaaagcctctctaacttttagacgtccctcattctggaccttgaagg

SEQ ID NO: 9550 - DNA, 246 bp, Artificial Sequence
  Description of Artificial Sequence: Synthetic probe
gcagcgagaaaagtcagccgaccctgatatccaattaatctgtgatgattcgaatatattcaagtggactgctctaatcaagggyccatcggagacaccttttgaaggtggtgtatttcaacttgcattctcaattcccgagcagtatcctctactgcctccacaagtccgcttcctgaccaaaattttccacccaaatgttcacttcaagacaggtgaaatatgcctggatatattgaagaatgc

SEQ ID NO: 9551 - DNA, 211 bp, Artificial Sequence
  Description of Artificial Sequence: Synthetic probe
aagtctgagtaatgcttttcagcaaaggcgcgatccacggtgatgagcttcaagcctttcaaagagaatcctttcttctcaaatcttccaatwatctcaccaaccaggccacgttggacaccatcaggcttgatcatgatgaaagtctgctccattttcgcttctttgatgttctgaaaaatggtctatggatttagaatagcagtacgca

SEQ ID NO: 9552 - DNA, 303 bp, Artificial Sequence
  Description of Artificial Sequence: Synthetic probe
gtcacctttgtgagagccttgcagacagttgctttcctattaatcaagggcattctgccagccggcttcatgaatttttcttgcaccagttctgtgatgctcacacttgcaacgggcgttccaaacctttccccaaaggtggcaggaaacaaacaaacagattctacctggctctctgcatcttgacgttgcttcttttgccactgttctatctcatagtatttytgcaccagagggaaatgaagaaaggagataaagttttcgaacgaattgcaaaaactgcgcacaagaagaagccatcct

SEQ ID NO: 9553 - DNA, 153 bp, Artificial Sequence
  Description of Artificial Sequence: Synthetic probe
aagaaattggagtttgtttgagcacatacactccaacaagagaaatagacttgagcatcaagtgatgaatgatattgcttatgttcaatgcaactcaaggmtagaacagaagtccaaaatccgcactagaaactttgaccccatatgtatgga

SEQ ID NO: 9554 - DNA, 205 bp, Artificial Sequence
  Description of Artificial Sequence: Synthetic probe
agaccacctgcatcgagaagaggggcgcgctcgggggcacctgcctcaacgtcggttgcatcccgtccaaggctcttctgcattcgtcacatatgtaccatgaggcgaaatcttcttttgcacaccatggtgtcaarttctccaatctggagatagatctgcctgcaatgatgtcccagaaagacaaggctgttgctgggcttac

SEQ ID NO: 9555 - DNA, 148 bp, Artificial Sequence
  Description of Artificial Sequence: Synthetic probe
tcaatcacctcaggagcaacatagtttggagttccgcatgtcgtgtgcagcaacccrtccttcacttgctcagttaaagcacttaagccaaagtcagacactttcaggtttccagcagcatcaagcaacaagttctccaacttcaaat

SEQ ID NO: 9556 - DNA, 403 bp, Artificial Sequence
  Description of Artificial Sequence: Synthetic probe
gtggtagagtgcatgtccaagcctttctatggaaccaacatcctgaaggtcgacctggctgtcgacgccaagtgtggaaaaagttggtatgacgccaagtagagaaggatctgtgcttttccacgctaaacgtggaaaaagttggtacakcagcaagtagaactgccccatctccatccacactgtcataagatgtccatgtttgtcagccacaccatgtcggtctgttcgatcagacacacacacggcgggtttgagcgagtgtagctctagaagcagctcaagcgcattgaagagcggaagactcatggcggtggtggcatcgacttgtgatgcacactagcaatctggtagcacgtggtttgggttgttctgtagtcccagtaggatgtgatgagtatca

SEQ ID NO: 9557 - DNA, 243 bp, Artificial Sequence
  Description of Artificial Sequence: Synthetic probe
aatatttgtgtgcattgagaacctacatcagtttggttgctttcctgatgattcacatcctccatatttttctcttgatgaatgttgttcaatcaacagtattaaagaagtggttgtggatcagcgtgasaagaaatgcttgacactgattttggacaaacatgtacatgaaggaatatctcatagtagcactagaaatccacagagcaagcaagcagatgaaatttacgcaatacatacatg

SEQ ID NO: 9558 - DNA, 159 bp, Artificial Sequence
  Description of Artificial Sequence: Synthetic probe
gttaaagaatcctcttcatttccctgtgtgtaaggaatacttaccatcctgcactattttcaccttgattcatgtaattgctctrgctgttttgtttgtcttggatcacaaaggttgaacatttataggcaacaacggtgagggcaacttggtatagta

SEQ ID NO: 9559 - DNA, 396 bp, Artificial Sequence
  Description of Artificial Sequence: Synthetic probe
ggatatgggagcttccagaccatgctgccacaggtttggtcgggaaatttagaccttcaattcctcttagtcaggaggagcttctaggggatggtatctgggattttgatcggttgagccgcccatatgttcgtcaggaattcctggagggraagtttggatctttatggacagttattgcagctaactttctgaacgagtatcagaagcaatgctacgagttcaaagaggattgcaacactgagaaaaagattattgcaaagcttaaaaccagtcctgaaaaatcactctggctggagaaagaagacagtgttcggcgtggtctgttcgatctactacagaatatagtgctcatcagagatccagaggactctacaaagtattatcctcgtttta

SEQ ID NO: 9560 - DNA, 346 bp, Artificial Sequence
  Description of Artificial Sequence: Synthetic probe
ctaccttcttgtggataacaaaacgacagtgaaacagattgaagacgcatttaaagagttcactgygagggatgatattgcaattgtgcttatcagccaatatattgcaaacatgataagatttctggtggatagctacaacaagccaatccctgctatattggaaatcccatccaaggaccatccatatgatccagcgagtgattccgtcctttcccgtgtgaagtatctattttcttctgactcttctgctgataggcgttgaatagcgaccttggccttgacgataccgaacagggctatttaccgttggttggagtcttcctgtacttgatctatgtatctg

SEQ ID NO: 9561 - DNA, 252 bp, Artificial Sequence
  Description of Artificial Sequence: Synthetic probe
tgctcaaattatcacttcagaattaagaacgggctacacagtacgatgctcaataccatcacccgaccaatatctggagcatttacatgcatcgacaagctacagttcaacsagacagtacagtagttgatcaagtggatctaagaatatctatggagggcagggcagaagccagagtacaccatgcagctcctacaattccagcctagttccacgagatctcttcaagcacttgttgatcatacgtgatta

SEQ ID NO: 9562 - DNA, 757 bp, Artificial Sequence
  Description of Artificial Sequence: Synthetic probe
ttatggtgcatggaatagctcttctgctggtggaaatgcacccactagtcaggcacctggtgcagctgcaggttatggaaaccagggctatggttatggtggttatggaggggatgcatcatatggtaatcatggaggatacagtgcttatggggggcggggagatggtgctggcaatcctgctactggtgcagcgtctgggtatggtgctggatatggaagtgggaatggcaactctggatatccaaatgcgtggactgatccttcacaaggtggaggatttggtggttcagtcaatggagcttctgaaggccaatcaaattatggcagtggttatggtggtatgcagcctagggttgctcagtaagagaggccattataacgttatgaagtgaaccagcacatttgggcagcttatgtattatcgtggtactatggctttggtcccatcctcctgaagcttgtccattttgctggttaaatcagtatttctcctggttggaatgcttgatcctttcgtggcttactactagaacttctagtcaataagtagctattatgtcgagtagctgtatcttcgtaatgctttatttgagtttagcttatcctttggtgtgctttgagtggtgtttcagrttgcttcatctctagtttaaagctagagtagcttcactgcttatggaccaaattatctagttgtatctctattcgacagaatcatatatttgtgtttgactgtagtatttatgctaggaaa

SEQ ID NO: 9563 - DNA, 254 bp, Artificial Sequence
  Description of Artificial Sequence: Synthetic probe
ccctgcacatcggcaaccttacaataccgtgtgcatctcctaggctctgacagcacgggagaagcagaattcactttacatgggaagctggcccaaaatttggttggcctttcagcacagcagcttatacttaataacctgcgagctgacattgaccgtatcgatttggtcactgcggmtgcaactattacacatacaccacctgagctagctgctattgtcaactagagatataagcttgttctgtgtgtgac

SEQ ID NO: 9564 - DNA, 389 bp, Artificial Sequence
  Description of Artificial Sequence: Synthetic probe
ctacctgtattattcggatcataagatgtactagggttggttgcactatgtgaatcataagaagtagtaggatcgtgctatgcgaagcgygtcgagctgaagtacctagtggactacagtcatgagggcatcatgtggacatcgtcgcttcaggaactgcgttattagccattagcagatttcaaactatttcctgtgttgcagcacattattagtactgctgtattagcaattttcattggcttgttaatgattgaagatgctggtgcctaaacgccttttttgtaatttcttagttgtcgttttgatattttctattgttgtgatccctgtctccaggacctggagagttgttcctttgcagatggtctgcactggtgtttgagttg

SEQ ID NO: 9565 - DNA, 396 bp, Artificial Sequence
  Description of Artificial Sequence: Synthetic probe
agcgaaacatcaaggttggaagcaactgttttcaggactatctatcaactatttgaaggttgtcccatcggtagccattggatttactgtttatgactcaatgaaggattggcttagtgttccatctagagagaaaacagcygtggttgtccctgtgctgacagaagacggaagtaacgctacccctgttcactctagttagacatattctggtggtgcgcgacgcccgtcatcactgccttaatattcataggcatgtagcatagtattctttcttgcagctacacccccacaattcttaggcttctctagaataataaaaataaattcgatattcagtaagccaataagcagcgcacctgctgacgccaaataagttcttgccatccatgcaga

SEQ ID NO: 9566 - DNA, 660 bp, Artificial Sequence
  Description of Artificial Sequence: Synthetic probe
cacagaatttgtgaacccgaaagatcacaccaagccggttcaagaggtactcattgagatgacaaatggtggggttgaccgcagtgtcgaatgcactggcaacattaatgccatgatacaggcatttgaatgtgttcatgatggctggggtgtagctgtgctggttggtgtgccacacaaggacgcggaattcaagacccacccaatgaagttcctgaacgagaggactctgaagggcaccttcttcggcaacttcaagccacgcactgacctgcccaacgtcgtggagatgtacatgaagaaggagctggaggtggagaagttcatcacccacagcgtgccgttctcagagatcaacaaagccttcgacctgatggcgaagggggagggcatccgctgcatcatccgcatgtagaactaggtttcstcgcctgcttttgctcgctcctccaatggatgtaataagtgctagagggtggtttctggtttctgaacctgccttggttgagatcagacactcagtcggtgacgacataagcctccgtgtatgacataagcctccgtgtatcgaaccagtagtgtagtattagcctccagtgtttgtaattacctaccgatggaaccagtggtacgagcttcgttttggcttaatagtatata

SEQ ID NO: 9567 - DNA, 348 bp, Artificial Sequence
  Description of Artificial Sequence: Synthetic probe
gcttcaccaagtccagtgtcgagctctccgacggcaccgttctcaacatcgacgccgccatcctcgccactggctacacaaataatgtgaccyagtggatccagggcaccaacctagaatttggcaagaacccaatgacctcgttccccaatggctggaaggctgactcagggctctacttagtcggcctcacccgccctagtctcttcggcgcctctgctgacgccgtgtgcgtcgccaatgacattggcagcacctggaaagaggacacgaagaaggccaaggaggatggcaggacccctctccacagaaggtccatcagcatgaatgcataatcttctaagggtc

SEQ ID NO: 9568 - DNA, 238 bp, Artificial Sequence
  Description of Artificial Sequence: Synthetic probe
agcaagttcttcacagcaaacagaccccactccctcaggtacgcatttccttcatcaatgacacactgctgcagtagcaayataatcccatttagctgcctaacctcatcctgcacctgtttccttccatgcaagcaattggcaatgacagcgactaaatctctcctgtaaccgttgtatgggcagacttttgcacttgcaagggctggttgttgatcgccttgttcctttgccatcg

SEQ ID NO: 9569 - DNA, 400 bp, Artificial Sequence
  Description of Artificial Sequence: Synthetic probe
attctatgatcttttggctccgtggtatggcgtttcacctgattgatgcagttctcatattgaacttgcgtgctcttgtagtttcattttttaagaggattaagacctacattaagttaagaaaagcacttcgttcgctggatggagcacttccagatgctacatatgatgaaatctgcacatatgatgatgagtgtgccatatgccggggaccaatggctcgagctaaaaagttgtcctgcaaccatctatttcatctaccttgcctgcgatcttggttggatcaaggattaatggagggttactcttgtccwacttgtcgaaggccattctttctttcatctcaagggcatactaggtctgcaacagcagaggtagcaaatgttcagctcattgcgga

SEQ ID NO: 9570 - DNA, 652 bp, Artificial Sequence
  Description of Artificial Sequence: Synthetic probe
cagggcagttgctgttgtgattgatcccatccagagtgtcaaggggaaggtggtcattgatgcattccgcctcattaaccctcagaccatgatgcttgggcaggagccacgacagacaacatcgaatgttgggcacctaaacaagccatctattcaggctctcattcacgggctgaacaggcactactactccattgcaatcaattacaggaaaaatgagctcgaggagaagatgttgctgaacttacataaaaagaaatggactgatggtttgattttgcggaagtttgacacccattcaaagaccaatgaggagactgttcaggaaatgctgagcctggccatcaaatacaacaaggcagtgcaagaggaggatgaactgacgcctgagaaactggcgatagcaaatgttgggcggcaggacgcgaagaagcatctggaggagcatgtctcgaatttgatgtcgtcgaacatagttcagaccctagggaccatgctagacacarttgtcttttagtttgctttccaaatctttgcactgaactgtctgttaccataatgcaactcgagattgataccagctactggttaggtattttgtttgctgtaccactatgtggccatcttctgtacggtgtactgttactactcc

SEQ ID NO: 9571 - DNA, 762 bp, Artificial Sequence
  Description of Artificial Sequence: Synthetic probe
caaacatgcgattggatcaagaaacgtttgggtgagaaggttgctcgtgttgatatttccaaccgtctcagctcatcaccatgtgtcctagttgcagctaagtttggctggtcagccaatatggaaaggttgatgagggcacagtctataggtgatacgtcttctctggacttcatgcggtcgaggaaagtatttgaaataaacccagagcatgagataatcaagggactgaatgctgcgtgcagaagcaaccctgatgactcggaagctctaaaggcaattgacatcctgtttgaaacttcaatgatttctagtggctttacacctgataacccgactgatctgagctcgaagatctacracatgatgagtgcggctatggcgggcaaatgggcagcgcagtctcaacctgcccagacaagccagcagcagtctgccgcacctattggccttgagcctgagccgcttgaagctgaggtggtggaacccgtccgcgagcagaaataagaaaccctgtgttcgtttgccgctcccagcctagtcttgtttggtatatggctgaagaattcttggtagttgtagctcagcagtggtcaattccaactgaatattcaagctgctgtgcttgttccttgttattttggaacagggatttctgtttccacggcctgtaggatgagccgtgcgagtgctagtgtaatattatcctagatagtattctggtgataagctgataataagtaaacatttcccaactcatac

SEQ ID NO: 9572 - DNA, 679 bp, Artificial Sequence
  Description of Artificial Sequence: Synthetic probe
atgatgacaggctctgcatcagccgtgtgcgccgctccctctaaaggccgcacctttctgcttcgtctccctctccctcaccgtctccgccgaagaagaagaagaggtggtaaatctccctggctgttggatatggacggatttgtggatggatggttggttggttggtcgatagatccggaggcaagcccgtcctggatcagatcccggcgatcgttccgatcaaacccctyggtattttttcagagggaaggtttgatggcgagtcgccggtggtaggatttggtggttgcttaggtttcacacgttgctgcaagctgtttggttcgtcttgatctcgttaggtagtagaggattaattgttcagagttggtgccttctccgttgtctttctgaagattaggtgatacgtcagtacttagtgggggcttcatcaggtataagttagtgcaataatccaaggttcaggttcaggttatgtgtgtgtgtgattccaaggttaagattaagaggtaatttatgtgtagttgcatcagctcaacctagtgtatagttgatttagcagcaaccgagagatgtgagaagagcagttgcatcatcagctaagctatgtgtagttgatttagcaactgtagagtattattatcgatcatggtcctatgtaagataatatgtgtgc

SEQ ID NO: 9573 - DNA, 917 bp, Artificial Sequence
  Description of Artificial Sequence: Synthetic probe
gcaatccataaccgaccgaagcagcgaaaacacctgcagatcaaacccaaaatgttccaaactcaatacccatggactacatttcgagttcttgacaaaagcaagacaataccagatccaaaaggccaaccccagactgagcagatatcttgcttaacaatagatactcaaacccatgatcgcccaaagggtgaaaatggactctgctcaagacaaccttctgacttgttaccaactaccaacttccgtacaaaggaaggaccgacaaactgactctttccaccaagcagtgcttagcggtaccattgtgattggtgctgctctccccactactctgcgggggttgcatcggctttggtttctgtctccttgccagcatcagatgattcctcaggtttgctttcgcttacactgagtttctccagcagtccrgcagcggaagaaccttcttcgctttcaccttcagtctttgcaagtgactccgcaatctcatcgaccaagtccttaaacttcttgcagttttccacagaaccaaaccggatggcaaacatctcatccttgagctctccatcagcaaagtctgccgcatgccagacgcaggacttgtcactgccggcgtgctcctgcatcttcgtggtcgagataactaggtgatttgcgcagatcttgagagtcttggcctggcgcataacaaggcggaccttgccgttctccttatgcttgagcagcttaactgtgcccgttcccctctccttccactggttcccatccttgtcgaacctgtatagctttgccttcatgtcgaggagagagtcctcgtcctcctcgccggtggtgacggcgacctcctcgagccgcacgatgggggcgacctgggcgccagtgtcctcctcctcgccggtggcggcagcggcggc

SEQ ID NO: 9574 - DNA, 629 bp, Artificial Sequence
  Description of Artificial Sequence: Synthetic probe
gcagttggagaggggagaagcataggcagcaacgtcgttgagatcagtgttccggttggtgccaaagttatttactccaagtatgctggcacagagttggaattcaatgatactaaccatctcatcatgaaagaagatgacatcattggtattcttgacaccgatgacgtgaaagatctgaagccactgggtgatcrtattctcattaaggttgcagagtctgaagaggaaactgctggcggtctgttactgacacaggccacgaaagagaagccttctgttggaacagttgtagctgttggccctgggccgttgggcgatgatggcagcaggactcccctgtcaatcactcctggaagcagcgtgctgtactccaaatatgcaggaagcgagttcaagggctctgaaggcgagtacattgttctgagggtgtccgagttgatagccgtgttgtcgtcgtaagcatatgttgttgttcacgtgaaataggaattttgatatcgatcgagtctgtaactttgtttcattacccttgcatggagttggtgaactgctggctcttctggctgtaccgtgttatggtttgaaatgctgtttcgtataataagaggactgcttagatttcagac

SEQ ID NO: 9575 - DNA, 587 bp, Artificial Sequence
  Description of Artificial Sequence: Synthetic probe
ccaggctggtgttccgatccccatctaccaccctgtgcagcattcgtggaaattatggcgactgtgttctctagggatgcatggcgctgtgtgtggcatatgattcagaacgacttggtccatggatggggtctcgattttgctcttaggaagtgtgtggagccagctcatgagaaaatcggagttgttgatgctcagtggattgttcatcagagtgttccatcacttggtaaccagggcaagtcggagaatggaagagcaccatgggaaggggtaagaggacgctgtagaaaagagtgggggatattccaggcgaggttggccgatgccgagaagaagtattacttggatcaagggatcacgccaccgaattcgactagatgaattagtgyggcatatgcaggagtcaacagtatggtttctgctacggaaacctggcccttacatgctcagcatgttcatgaaagcagcctgctcccttaatatagctgaagctccagggccagatatttgtacatgggaatatcgtgggaacggatagcatgttagcagagagtgagagctatgctaataatgaaacatctgta

SEQ ID NO: 9576 - DNA, 563 bp, Artificial Sequence
  Description of Artificial Sequence: Synthetic probe
ctgaaataagaaccacaccacgcataccaagagcaacacggaagcaaataggcaagaagcggccatgttactcgtgcaggagaatgccgccggcgtcgatgtgccagatgggtacgtgatgaagccggaggaccgcccttccgccgaggcacctgtcgcacaaatcccggtcatcgacgtcggccttctgtccggggagcgcaaagctgatggtggcgacgaggaggcagcgaaactccggtcggcactggagtcatggggaattttcatggtaagtaaccatggcgtcgagccctgtgtgatagacggcatgtgcagcgcatcgagggaattctttcaacgaccgytggaagagaagatgaaatacagccaagccaaagacggcgagaagtacgaggacttccaccaagggtacggaagcaaagagctaaagttggagcacaaatcaacccgcgactgggtggatcgcatgtttctccaggtggaaccgcaggagcaccgacagctccacctttggcctgaatcgttccgtgatattctgcatgagtttttcgtgcaacaaa

SEQ ID NO: 9577 - DNA, 734 bp, Artificial Sequence
  Description of Artificial Sequence: Synthetic probe
ggtcgctcatcctctcctacaaccagctgacgggcccgatcccgcgcgacgacgcgcaggacgagatcaacacggtggacctgtcgcacaaccagctcaccggcgacgcctccttcctcttctccgagggccggcccatcggcaaggtggacctgtcgtggaacaacctcgacttcgacctcagcaagctcgtcttccccaaggacctcacgtacctggacctcagccacaaccacatcaggggcaccgtgcccaagtcgctcgaggcgctcaccacgctgcagacgctcgacctcagctacaaccagctctgcgggccgctgcccaagctgcacggcgtcatgcgccacggatgcaagccctacgagcacaaccagtgccacagcggggcgccgctcgagggcagctgccaccagctctgagcctgagcacggccgccgcctcgatctcgccggcagcggcaggcgtacgtatatggtgaatgtccttcgcgtgcgtgcgtgcgtacgtgtacgtggctgcatgtgtactagtacgaactacgaaggacgaccacggtgcttactttggggtttagtagagtgccgcgtagtgstaatgcctgacacgcggtccttaccatagagatgtgtgcagtgtgctgctgtgtaccgtctggagatgcccgcgggtcggtgtgctcctgtcctgtgtttggggtcgatcccagttattacctgatgtatcagatgttg

SEQ ID NO: 9578 - DNA, 836 bp, Artificial Sequence
  Description of Artificial Sequence: Synthetic probe
atggactcagtattacattattacatctcaacttcttggcacaacaacatagtgccatactgaagtatatacatgttgaatattctagtatgcaaacaatatcagagtgtacacaaagtgtgacatataacagaagtaccaacaaatgacaagactctaaaatttgatcagtttttcattcttgagccataaaagcatctcagctagaccttcagttaagtttcgcggaccgtagcccagttccctctttgctttgtcacatgaatacgcccattgatgtctaagaacacacaccgtagggtaactgattagtgggagcttgccggttatgcgagaaatgaaaactgagatccacccatatatattgatcacccagagaggtacgtggaacaagggagcttttgtgtttgtgatgttagcagccatgttgaaaatctgcacgaatgacaggttttctccagtgaggagatatctttcgcccactctgcccttctccatagccgctatgtgtccrctaacaacatcatctacgtggcaaaatgattctctatcatacccatctccaatgtaaccaggtagacgtccattgaacctttcaattaaaatacgggagacaaggtttccagttgtaagttttccaggaccgtagataactcctgggtagacaatggttattggcacgccctctgctgctgcctgcaatgcaattttatctgctagcacttttgatctctcatactctgtgcaaaatgttttcccttgatgcatctgtgtctcgtcggcaacatacccatctgttggcccaagtgcgaaaaatgacgaagtgtatactatct

SEQ ID NO: 9579 - DNA, 974 bp, Artificial Sequence
  Description of Artificial Sequence: Synthetic probe
cttggatgagtcttggatatatgttatatgtaggggtacaggctacaaatgctatgttcttgctcctgaccctacaacacgtaccttgaaagtcatccaagtcatggaacctccatgctctgcgcgtgaaggaatttccatagaaaccttagacaagaggttattcctcttgggtggttgtagctggctaaaggatgctaatgatgaagtatattgttatgacgcttcttcmaattcttggagcaaagcagccccaatgcctactgctaggtgttattttgtatctgcatctctgggtgacaagctctatgttaccggtggccttggtttgacggacaagtcgcctaattcatgggacatatacaacaaaggcactgactcttggtttgcacacaagaaccccatgctgacccctgacatagtcaagtttgtcgctttggacagtgagctggtgaccatccacaaggcagcttggaacaggatgtactttgctggcatatacaacccggtcaaccagacctggaggggcacagcgaacgagatcgccctctgctggtctggcccgacggttgttatggacgatgggacgctctacatgcttgaccagtccctcggcacaaagctgatgatgtgggtcaaggagaccaaggagtgggtgatgctgggcaggctgtctgacaagctaacgcgccctccgtgtgagctcgttgccgtcgggagaaagatctacataattggcagagggctgagcacggtgacggttgatgtggacacggcagccagggtggatgggttcctggtgtcgacatcgacaggtcctttgatggagcatgacttcccgccggagcgatgcagagtcatcacaatctgaagactgcttgttgcacagatgaaataaagatcttctgactaaatttgctccatgtggtctgtaatagtggatgtacattgacttgtttatttgagatggctct

SEQ ID NO: 9580 - DNA, 840 bp, Artificial Sequence
  Description of Artificial Sequence: Synthetic probe
gtctaattggtgcaacaactcaaggagcatgtttattgttcactgattcatcaaatgttgccaaacacgtggtagaattgtcctttgagcgacagggcagaggtaaacagctggctgccttacatgcttttggaagcatatgtggtgttgatcgacaagaaggccagatgaaactggacgatcaagcagaagaacgtctgaagcgcttagtctatactgtagcatcaaacagtccaaaattaactccttcagctcttcttctgtcagttctacagcaagatccagatgttcggatagctgcttataragtactatcaggactggttgtccgagaatggtgcctaagggaaatttgctcaaagtcagagataatcagagttgttacggatccaacaatggagacaacaaaacttggcatggaagcacggtatgcttgttgcgtggcaatcaacaaggccttgtcatcatcgcaccttgttcatgaatcgagtctttctgaagtcattggaaagttgaatgaagcggttagaaggggtccttaccttttggagaggaagcgtgtggaggcgcagccggtggttgataccatgcagaggttttaagttccgccttctatctcttgagctgcggcaaccctgagaaaccgagcaccctgtatgcttgatgcaacgccggctcaggtattagcgcgtatattactacatgagaagcacctgtcgttagcgtggtaactgaacttgcgagaggaggataatatcagtcgcaggttcttccgttgggctttctaatataaatgcttgatgtggtgaatgctgtttaatgtcaatccatctcaccatt

SEQ ID NO: 9581 - DNA, 646 bp, Artificial Sequence
  Description of Artificial Sequence: Synthetic probe
gttgttgtggaaaagcatgggatggttgctgctggagcccttgtaagacagaacacaaggatcccttgcggagaggtatggggtggaaaccctgcaaaatttctgaggaaactgacagatgaggagatcgcttttatctcggaatcggctgccacatattccaccttagctaaggttcatgctgctgagaatgataagcctttcgaaaagattgattttgagaaggtgttgcgcaagaagtttgctcaccaggatgatgaacacgattccatgcttggtgtcactcaagaggtccctccggagctggcgccatccagtgctactcctgcccaataagcttttcttatctgctcctattttcctttggtgccttcaccatcttccatgagatcgttgaagtggacactgttcagtgagttcggcagtttatgtttacttccccaataattttgkgtcaagcaatgttccaaaactggccatgtacttcttcagtttctgtattccatatgtttaagatgcgctctatggaacaatcagaatcattgcacacaaatttgcgagtaccatctaccatgcgttgctgagcgttgttgaaatagcgaggtgcacttgaggcagcatgtgcgctataagcctgtagttcagt

SEQ ID NO: 9582 - DNA, 567 bp, Artificial Sequence
  Description of Artificial Sequence: Synthetic probe
ctccaatctcggaaaaggagatagaagaaaagaagtcatcaggtaaagaggcggcaaaggacaaaggggaaccagctgaaacaggtctgcccagtaagactgagctgaaaaagaccattatccgaatccttaaaaaagttgacttcaatacgtctactttcagtgacattcttaagaagctcgttgaccawtacaagattgatctgtcgccaagaaaaggagctatcaaaattatgattcaagaagagctaaccaagttatcggaggcagataatgatgaagatgaagatggagatgtggagaagagacagcctcagcctcgagcgaaggtcatcgtttgaaggattgtgaaataccatagcagtagcgcccactgttaattattttgtacttgcaggcctacctctcttttgccttgatgggcacttgggcagccctatattaattactgttactcttgttcgcaaaggctaaaccccctatccttgtttgtgtatgctaaaacatagcctgtaggcagctccaccacatgtagctgactgatgggggacaattgtaggtaacttc

SEQ ID NO: 9583 - DNA, 773 bp, Artificial Sequence
  Description of Artificial Sequence: Synthetic probe
gcgctctacagggccggcattgtccccgtctcctaccgcagggttgcgtgccagaagaagggaggcatccggttcaccatcaacggccactcctacttcaacctggtcctcgtcaccaacgtcggcggccccggagacgtccacgcggtggccgtcaagtctgagcgctctgcggcatggcaggccctgtcccgcaactggggccagaactggcagagcaacatgctcctcgacggccagtgcctgtccttccgcgtcacagccggcgacggccgctccgttgtctccaacagggcagtccctcacggctggtccttcggccagaccttcagcggcgcccagttcgcctgaacctcctccagcaccgtcggtccggcgtagtactatccagtagtagtagtagcaagtaattggagcgtgcwaggaagcgccatggttttatggttggttcttcctcaagcattacgttcttcggggattagtagcagtagcaggtagttaagcctagtattatcatgggcttttaatgtcctggtgcgtccgtgtgttagtagtgtgagccgaagcatttgaacgagcttttggctaggatggcagcggtggtaaaggatggcctcattaactaaaagccaccttgtatcacccgccaaattagcgattgggcctcttggatgatggccttgtctcgaggatgtctttgtatggttttgtttgtgttggttgtatcgaacctgaactcaagtttagcctctggcttattatgattccaaaaa

SEQ ID NO: 9584 - DNA, 676 bp, Artificial Sequence
  Description of Artificial Sequence: Synthetic probe
ggaaagaggaaaaccaagcagtggaagagaatggtaacaaaggccacctttgttggtcctggatttacaaggaagccaccaaagtatgaaaggttcattcggcccactggtctgcgtttcaccaaagctcatgtgactcaccctgaactgaaatgtacgttcaacctcgacatcatttctgtgaagaagaatcctaatggtcaaatgtacacttctcttggtgttatgacaaggggaacaatcattgaggtgaatgtcagtgaactcggtcttgtcacccctgctggaaaagttgtttggggtaaatacgcacaggttacaaataacccggagaatgatggctgtatcaatgctgtcttacttgtgtgaagctgttatgcaattctagttaaggygacatggcgcggtgtttgtatctggtccaaggagggtagttttgttttgttggcgttccagatcatgcttgtcttggaacacccactttccagtgtaatatcagggtgcaacagtcttctccccttaatgtaaccggctgtaaaatccgagctatagaacaagcaaagtgagagtctcctcgcataggtttccatgttcgtgttatgtcctgcttattttgttggtacctctgttccattttaaactgtctgtgacagttaatattgaacagagagtattt

SEQ ID NO: 9585 - DNA, 558 bp, Artificial Sequence
  Description of Artificial Sequence: Synthetic probe
ggcctaatgctgactgaggtgaccaaaacatgctttgcattgctctatttaccatgtctatctttccaaacggccagacgattattccaggggggcggattctgagggcggaaccacagctttggcctcctgcaccttgtcattgttataacgagtgcaaakcagtcgcaaacccagcagcatttcctgatatggatacaatgtcaaatatatttttcctatgaccctaatgcttggctagaaatgaatggaagcgctgcacttttgcagcatccttttttgaggtgtgcaacttgtcaggcacaattccaccaggggaaagtctcctccgctttcttaaccgaaacaagaaatcttcagtgtcaaggacatacgagaccttggaggtcttgcaggatatcttgcattcaagaccattagcaacttggacgccatccatggtcttcaatgaatccaaagcctcgtcattacttgaatttttccgcttattccttccaaggaagataccgtcagacaacattgtgtccgacaaacttgacaaaaagtcactgaagagat

SEQ ID NO: 9586 - DNA, 498 bp, Artificial Sequence
  Description of Artificial Sequence: Synthetic probe
cagcggattcagacaagacagagagtaagaaggtgagctcagataagaaagaggamagttcagagaaggcgaattccggtagcaaagaggaaagttcagaaagcaagacagatactacggaagcgaaggctgaaggtgagaaggaaccggcgatcgatctcaggccattgacgatggaggacctgaggcaggccaagaatcaggttgctgcgagcttcgccgctgagggcgccgtgatgagcgagctgaagcagtggaatgatctatatggcgaaggcggctccaggaagaaggagcagctgacatactttttgtagaaacgatgggttcttatttgaagattggtgatgcttcggcagagaaatgtcggctcagcgattggggagaattgccgtggatcagagagcagcttgatggcgataaaggacagaaggatttctrgggagcagacgtgagttgtagcatcttgggatggatgagataggtggtgggtattgg

SEQ ID NO: 9587 - DNA, 512 bp, Artificial Sequence
  Description of Artificial Sequence: Synthetic probe
ctctcagctatgcacacaaagcttcttcccggtggcatttgccatggctatagaaacctccttgtttgatgtttctacggtgccagattggctgactgcctatctactactgtatcatgtatcttgagtcacaacatggagaaaattgcagaaagcgagcaggcctagcaggcccgaacctcagtaaaccggcttggggctggttcacagttgctggtaagtttcaaagacccaaagagacaggatagtctcctcatgatgggctttcgactggctactacttccaatgacataacattcttcccggtatcaatgtgcatatcatagccmtccagatctgcttctgttatgaacactgcatcaatacacccagtcggactgcttggcgtgggtagcataacttgacaaaggggtaaaccgccgtcttcgtaatcaaactccatagaataatcatccatctctctgtcagggatggagggtttgctgccttctacataacagttcaggtctgt

SEQ ID NO: 9588 - DNA, 771 bp, Artificial Sequence
  Description of Artificial Sequence: Synthetic probe
tctgtgcttcgcaacggtaactgttcaacatctggtacggatcaatatgaacagcgaagggttgccagaagcccaggaatcggtccacacggtgttccttcgggcagctcatatccaagaagaaacaatacctgcaagagcgaaacaggtgaagccgaaaggatcgacgtgagccacgctgggccacctaagccatatgcaggaaacaaattacccgctactgttgatggccgcaacgggcactggtagactgctacagcagtaccagaaaatccttgtcagggcatcrggaagagttactcatctgaaattcacattcaaacacgtcattctgtacagagttgtattatttgtcaggttaacatccccttcctaaagactgtggaaccgcacgcgaagtccttgagataggtacttgcttctgcgtttcttgacagctcaacttctgaatgagctggtacagaagattacctgcatctgggtagattcggttcaactgttccagaagttagcataaactggaaaacctcgtggcactcgtgtcaaacggactactgactcgacttgtgttactcacttgtggctctgaagatggtgggtcagagaactcatttgtacactatctgatattgtaacttccaggttaattgagtttaaagtacgttcctgttgctagtagcgtgtcattcagctgcagcctgtagtaagtactgaactatttacatttctgataaacattatttggagacaactcactattaaaacagctga

SEQ ID NO: 9589 - DNA, 500 bp, Artificial Sequence
  Description of Artificial Sequence: Synthetic probe
cgagcagacggccgtgtacttctacgtgtccaggggccttgacggcggcctccggacggacttctgccacgacgagtcgcggtcgacgcgggccaaggacgtcgtgaaccgggtggttggtgggcccgtgccggttctcgacggcgagaccttctcggtgagggtgctagtggaccactctatcgtgcagagcttcgtgatgggcgggaggaccacggcgacgtcgcggtcgtacccgacggaggccatctacgccgcggctggggtgtacctgtttaacaacgccacgagcgccaccatcaccgccgaggggctcgtcgtctacgacatggcctcggccgagaatcgggccttcagggaaaacgagatgyagatgaaaatactgtaaaggtcaatgccgacggccaagcttgcggagaagcttcttcgtcgccagatggggatcgtcaaggaaggagagaaggtcatggagatcgccattcgcaagttggcagacatgt

SEQ ID NO: 9590 - DNA, 624 bp, Artificial Sequence
  Description of Artificial Sequence: Synthetic probe
tctgtacaagggtgtagccaaaaagatgaaaatatcaagagaggtcatagaatccagcgggagagtctcgcaggtagaagaaattctgacaataaatgtgaagcccggttggaagaaggggactaagatcacctttcctgaaaaggggaatgaagctccaaacatgatacctgctgatattgttttcatcattgaagagaagccccatgacatcttcactagggaaggaaatgatctcgtcrtgacagagaaaatctccttggccgaagcgcttactggatatactgtgcgtgttgccacgcttgatgggcgcattctgtctgtacctgttagctcagtgatccatccaagctatgaagaggtgatccctggagaggggatgccaatacccaaggagccgaataagaaggggaacctgcgggttaaattcaacatcaagttcccttccaggctgacgtctgatcaaaaagctgggatcaaaaggcttctgggttcgtagatttaaaatgtggcattctctagactagcgaaagtggttgtgaatattgccaccgtgtggctaggtagatctctgtttgcctgaagaggccaatgagcggaattggtttaatgtgggtatattcc

SEQ ID NO: 9591 - DNA, 523 bp, Artificial Sequence
  Description of Artificial Sequence: Synthetic probe
ccttgtgactcaaccaggtatacatctccttcctgtgctgatcaaacagcttgatcatcacmggttcacccatcagaccatcttggggctttgacggctttgacccaacttgtgcacactgaatatctgctgtatagttctagcctagcaaatccttgaaaagattaggattgttccctgttggtgtcacgccgacatgccgtgcagtggcgtccttctgcaaggcatcctgaagactatggcccttctttgcagttgctcctttttgsgmaccaactgcgggttctgtggatccactggtggttccagtgtcatccgagaagatggacataaggtctggtgtgttggaagcgctgggagctgaagttccaggcagcaccggagaggctgatgttggcccaaggagcccatctaactgtgagaaggggtcagctgacgaagcacttgatggaattggctcacccagatccatcagatctggtggtgggacagctgggactacttgttccttggcaggctgagg

SEQ ID NO: 9592 - DNA, 332 bp, Artificial Sequence
  Description of Artificial Sequence: Synthetic probe
cagcttgaggatggccgcaccttggcggactataatatccagaaggagtccacccttcacttggtgctccgcctccgtggtggccagtaagtgcctcctagccatggcgctgctttgttctttgggttcacaagtctggtgctgtcggtgtgctcctgtggagctgtcattgtgtcgtcgtctgatttggtcgtcactytatttgtgctgtcttattgtggtagtgtctacaaacttctgctgtggtgcagtagctctggatgaactaaacagtctttttttgcactatgtttgattctgtcctcggtttgaacagtaaggtaatatctttg

SEQ ID NO: 9593 - DNA, 547 bp, Artificial Sequence
  Description of Artificial Sequence: Synthetic probe
tgttgtcaagtgcatgcatctccgagcatcaaaaggcgattctgtgtttaaaggcgactatacactgtcaggggatggacagatagaaatggcactgctatatccagggcatcggtacacgcttgttagaatgcggcttagggtcagaggcactacaattggcgcaaataacaggttggatgtcttgaagatcctaaccacgggagtgaatggaactgaactgggaaactggaaaggcaacatacttgaacttgttgagggctgggaggagaacgagacacatgacccggacgtgcctgctgtttcccacagcaggggtttgactccctttgtgtttgttccgtttgaggaggctgatacttcagttctaaacctgccagtagagaagatggattactttgtccccgggtgagcacctccagaagatgagcaygatgatgaggaatggagagatggcctttaatctcatggtgcggatggagacgacaagcatgtttcgttccagactgagctcatgttggagcgatatgtacatatgtagtacttg

SEQ ID NO: 9594 - DNA, 476 bp, Artificial Sequence
  Description of Artificial Sequence: Synthetic probe
gtcattgagggttagtctgacatccagcatgaagttggagaatggagggaatggatggggggtctggtgtctctttggtaagttgctcaactcacaaactttccttttcgacacagatctgcaagcattgggggccttggaaggaagatggcggttaaatcatggcagtcaatgacatgatgaaaacaacattcaagcaaagtttccatcattrgaggccatgagatgtctaccagctctagattatggcaagaaattttactagttcacttgcaacttccgcagttgcggtgtaactggctcttattgtaccagcaggctccctgggttgacttgttaacttcccagggttgccctgctcttctgctgtagatctaggttggaaatggattgtgatactatcctcctgtattctcaaggccccatttgtacccttccttccgttgtaatataagatttgcaagatggttcattgt

SEQ ID NO: 9595 - DNA, 964 bp, Artificial Sequence
  Description of Artificial Sequence: Synthetic probe
atcaaatcacactatagaattatgtttgacaatggatctcaactagtaactgtaaaactgtacttgacaagggaacatacttgttttgatgctttggttagtattttattatctattgctatttgtttagcttcttaccaaatgcacataatggtttcactagacctactgcttaaataaatgctttaacttgtcacttttattgttgtttaaatataagcttagaattcatgcaactagtccagccatgagcatgttacttgattatcttaccgttggtttgacaagttactaakctagccattgtcatgcaaggcattaaatattttactaaatgcagctaccttggataggcttattgaaaattcttcatgattagtactagtattgtgtgtttgtgatgtactgtatggttttaacctagtgcattgcttgtatgtttgttttttatgatgacgcgtggcagtatttttcgttgaaaagctcttgataatcattactaatgtaccatttatatttacccatattgttatgcgcaaggaaaaacacgtccaggtccgtctggcaatacgaggtctggtgcaacaggtggcctaggaggatagggtggacttctacatcgacaagtatctaccaggagggagtgagggtgcctgacaagtacccgcaaagtctctgtagacctgatggagtgtgtgctggagcgcatcaaccctgaattactttgtattaggatgtgcaagaaggtttattcatagtctcggtgaacgacttgctcgcagcggcttctttttgatggtgctattgatggagttatttgtgattctacagttgttttgttgcttgctgatgtggtgtagtacatttgatgattttggcaatgatgtggtgtgatggagttagttgtgattgttgagtcggaagtgtaaagtttagacttatattggtatatattatctgaaat

SEQ ID NO: 9596 - DNA, 993 bp, Artificial Sequence
  Description of Artificial Sequence: Synthetic probe
caaaggacgactacgttagcgtccacatcaggacgctgggcgactggacccgggagctcaagaacgtcttctcaaaggtttgccggccgccgacggaggggaagagcgggctgctccgggcagagtacgaccgcgacggcggcgccatgtccaacctgagctttccgagggtgctgatcgacgggccatacggtgcgccggcgcaggactacaagcaatacgacatcgtgttgctggtggggctcggcatcggcgccacgcccatgatctccatcctcaaggacatcatcaacaacatgaagcgtctcgatggcgacgtcgagtccggcaaccccagcgacgcgagcgcctcggcgtcgttccggacccggcgtgcctacttctactgggtcacccgtgagcaaggctccttcgagtggttccgtggcgtcatggacgaggtggcagagacggacaagaagggcgtcatcgagctgcacaactactgcaccagcgtctacgaagaaggcgacgcccggtccgcgctcatcgctatgctccagtccctcaaccacgccaagcacggcgtcgacgtcgtctccggcacacgcgtcaagacgcatttcgccagaccaaactggcgcaacgtctacaagcgcatcgccctcaaccaccgcgaacagcgcgtcggagtattctactgtggtgctccggtgctgacgaaggagctacgtgagcttgcgcaggatttctcaagaaagacaagtacaaaattcgagttccacaaggagaatttctaatttccagccacaagaagtttctctttttgtggaaacccatgttaatttagtacataccaagttctatacatatgaagaaagtagaggggctagatcatagtaggcattggttgattgtgaccwgttcggtcatagtttcatcaatttttgctgtagaagaataatccattgcctcattgtacaaatattctcttcttcgatataatccatcgca

SEQ ID NO: 9597 - DNA, 504 bp, Artificial Sequence
  Description of Artificial Sequence: Synthetic probe
gaacacttccatggcattagcacctgtatcagttcttggtgctcctacagccactcctttgctacagtctacagtccctggtctcggtctaattccaggagcatctcttccagttatccaatccattgacatggctccacctagtgaatgcctattgctcaagaatatgtttgatccagctgtggagacggatcctgattttgatttggatattagagatgatgttcgagaagaatgttctaagtatggccaagtacggcacatttaygtagacaaaaatactgccggatttgtgtacctgcggttcgatagcataactgctgctatgggtgcacagaaagcacttcagggaagatggtttgcggggaagatgattactgcaacctatatgtctactcagcagtatgaagcgaagttcccggagttaactggctagctgaagatatctgctttggcgtcgtgtactttcttctatacatggcatcatgctggcactgttgtatt

SEQ ID NO: 9598 - DNA, 593 bp, Artificial Sequence
  Description of Artificial Sequence: Synthetic probe
gactgtgaagcgataagcaaaaacatcgagaagttggccaagcatttcagtggtttggacaatctaaaatttgcacgcattgatgcttctgtgaatgaacatcccaaattgaaggtaaacaattaccccaccctgttgctttatcccgccgacgacaagaccaacccgatcaagctttcaaagaagttaagyctaaaagacatgacgagattcatcaaggaaaagcttcagatttccgacgtcgaaatcaaggagagccttcaaacttctgacatcaaaatcaaggagatcccgcaaacctctgacgttgaaacggtggtggccgctgatggtgtgaaggatgagctgtagtagaatgctttcgttgtgtctccatagcttttgagcattcaccgaaggaaatacggtggcgcatttgcgctgctaaagactgatggtagagcatggctgtaacttacggcgacaggcaaggatatagagtagtggatggtcacaggtgacaatgaacatgtgaaatctaatttcgtgttacatatatacggatagtcagatcccaggtttacttcctgtaatgcaatcgttgtggcatgtca

SEQ ID NO: 9599 - DNA, 495 bp, Artificial Sequence
  Description of Artificial Sequence: Synthetic probe
ctgatatgatggcaaacatgagtgagcagtttggtatgaagctgtcgaaggaggatgctgtcaaagcccaacaagctatgtcttcattatctcctgaagatttagacagaatgatgaaatggatggacagagcacagagaggagtwgaagtcgcaaagaagacaaagaacttgctcataggcaggaaaggcttgatcatcgctattgtcatgctgatcgtggccttcatcctccagcggcttggattcatcggtaggtgatggcctaaacgtccataatggctgatcagaccgttcatccaaagatcggatacaaataacttttcagcagatgttcggtgctcttctctctgagcgagaagcggtagcacgcaaatgataatgtccttgggaagggcagagaaatagttggatccgtgcctttcttgtaccattgtttattctttggtcatatgtgcttatagattgtaacaaaatagaagggaatgcctagtct

SEQ ID NO: 9600 - DNA, 727 bp, Artificial Sequence
  Description of Artificial Sequence: Synthetic probe
ctccaacccccaccctcgtcttcgtcttcctgatcccagtcggctcctgcgcgtccccgcgacggcgcgatgaggttggagaagtgctggttctgctcctccaccgtctacccaggccacggcatccagttcgtccgcaacgacgccaaggtcttccgcttctgccgatcaaaatgccacaagaacttcaagatgaagaggaaccctcgcaaggttaartggacgaaagcgtacaggcatctgcgcggcaaggacatgacacaggatgccacgtttgagttcgagaggaagaggaacaggccggaacgctacgaccggaacgtcaccgagcagactctgaaggccatcccgcttatcaccaagattaggcatgaacggcagaagacacacatcaataagagacagmaggcgggtaagagcatgtcacggaagaaggacgccaaggagctcgatcaggatcttcagatgcttcccaagaaggacatcgcgcattatgaacctaagacgaaggttctcgtttctcagctcaagaccgaagagaatcttatggaagagtaatggaatggatatgtcttgcttgtgcgtgcatgtagtcctttctatgcaatatgttgggtttcatcagattgtggatgacaatgcaatatgtttccgattgagtagaagaaagttctgcatgtgctgtaatcgtcagatttggtttcttatcattataatagaatcgtgc

SEQ ID NO: 9601 - DNA, 576 bp, Artificial Sequence
  Description of Artificial Sequence: Synthetic probe
gaacagagtgacaatgaatccaactgactttgatgattttgacaagagaaaattgccgtcacctgggttccaggtcgaggttgttctggtagattwtgatggttcacaaccaccaaaacaaaaaacagctgaccgatctgctgataagaaatctgatgctgattcctccacgggcaccagccccaaagaaaattactctgcacatgcagagtccaacaaagaagctggaggcgatgataaggatgatgttttttctgacaatgaagcagaagatgggtcatccaagggcaagaaggaaaaggtccccagcagtggtcaaggtacagcgagtgcagcaaaagcttctgaaacaagtgttgcacaaaaggaggcatctgctgcttctgctggtatggaaaaactaactatgtctacggagcaaggaaatgcaagggcacctgatgccacttctctgaaaactgaagctagcagcaagagcagctccaccacgacacaaccccctgccatggaatcatccggcatgagcgagttcaaggccattgctgcagatgcttcggtcttctcgtttggagacga

SEQ ID NO: 9602 - DNA, 527 bp, Artificial Sequence
  Description of Artificial Sequence: Synthetic probe
tgggaatcaagctctcggtatgccactggttttgttcctagtactctgatgggaacagctcaggttgcgcgttactgttacaagattggtatgccagtcagttggttctgtaacctaagagacagagtgttatttctttcgttcaggcaagataatcatgcttgatagaggttatgacctggtctgctcttccctagtgggtctaaaatgcatgcccgaaatatcgagagttgatttcaagcaagtctgtggtagtgactcaagaagctgctgctgctcgagcttttcagcaaagcatctacatcgaagcccttttgtttgtaattgctcggtgttcartgactcctggtggttccagtcttcatgtattgagtacttaattaaagctacctttgttactgctcctggcacacttcagtagcctgaagtgcattccaaatgccttcggcacagtaactgccttgccggacttgtcatgctgcgcgcagtactgtagatactggctctcggtgcttgccttggctgca

SEQ ID NO: 9603 - DNA, 803 bp, Artificial Sequence
  Description of Artificial Sequence: Synthetic probe
ctacttgcagaactccattttattcgtctaaacactggctccgttggaactgagatatactacgtccgtatgaccaaaactcaggcaatctcccatcgataaaagaattacatcaaagatggggctacagcgcaaaagaatcctaattaatatgtccaggattgcttccgtgtaacgtgggtatgatggcttagtaatccatcccacccatgccgcccattgcaggtgcctctttctcctctttaggaatctctacgatgatggcttctgtggtggtcatcagagatgatacactagcagcatccaccaatgcagttctgatcacctttagagggtcaatgataccgaccttaaccatgtccacgtattcacctttagctgcatcatatcctagatcagtgttatcttgctccaaaagcttrccaacaaccactgccccttctacacctgcattggaagcaatcgtatacactggtgtcttcaaagcattctgaatgatttgtacgccaatcttctgatcaaagtttgcagtctgcagtttatccagagcttttgatgcatatagaagtgcaacaccacctcctggcacgataccctcttcaacagcagctttagtggcattcagtgcatctgtcactctgtctttcttctcactaacctcagcttcactggctcctccaatctttagaacagcaacacctccagaaagcttggccaaccgctcctgcagcttttccttgtcataatcagaagtgctttgctcgattgcagatctaatctggtctgctctctcttcaatgttc

SEQ ID NO: 9604 - DNA, 855 bp, Artificial Sequence
  Description of Artificial Sequence: Synthetic probe
tgggattgtgcaccaccatcctttctgtggtctattccgctgttcgtgctggctcgtccgcaactgtgctctcagcaccagactcgccacgcgctggtgcagacaagccactgctccccttcagcaaggctgatgaggaggaaaccaaggacgtggcgaagccagtgtcatactcctactctttcttccacctcattttctctctggcaagcatgtactcggcgatgctcttgactggatggtcgacctcagttggcgagagcggaaagcttgttgacgtcgggtggccatctgtctgggtcaggttagcaacccagtgggcaacggctggtctgttcatctggtctctcgtcrctccgatcctgttccccgatagggaattctaggttgacctctttacctgctaagggtgacatcatcttcttggtgtacccatgtatcgaccgtgtcggctgtgatagctaaggtgactatgggccacttctttttagcttctccggcagcttctggaagaagcttctccccaccagcttgtaccaaaagcctggatcaaaaaattcttgatggcttatagtttagtttttatgatactaaactataagccatcaacatttttcttgttcaggcttctaggagaagctggtgggaagaagcttttcctagaagctgtcggagaagccgaaaagaagtccccctatatgtatttggtatatgatcttgtgtgagcaaacccatggcaaggagcaggtgtttgtgtaaaacgttgtcaagagtctggtctacataatctgtgacatcaggcattgtgccactatttgaacattggagaaacgatctttgattgtatatatatcg

SEQ ID NO: 9605 - DNA, 653 bp, Artificial Sequence
  Description of Artificial Sequence: Synthetic probe
tgatgcgatgatgaagaacgctgcggaagtgttcccctacaacacgcccatcaacaaggaggcgtactactaccgcatgatattcgagaggctctacccccaggagtcggcgagggagacggtgccgtggggcccgagcatcgcgtgcagcacgccggcggccatcgagtgggtggcgcagtggaagtcctccaacgacccctccggccggctcatcacctcccacaactctgcgacccccgctcacgccaacggcaacggagcggtggagaacggcaacggggcagtggcgaacggcaatggacacgcgaacggcaacggcaacggcatagtgacgkcgaacgggaaagccaacgggactctggcataacgccggcaggatccgtgctagccgtcgtcggtggcgctagccagggccagccgtcgtgtgcgcgcgtatcctccgagagggtccgaccggtggcccatgcatgccattggcgcggccatgccggcgatgttgttgtgtactagtagtacgtgctgtagtttcttcggtgcggtgtatgtgtgtgcgtcagtgcgtgcgtgtacgtgtgtgttgggatgtggcagcggggggtgatcacctgtacaagatcgtgaaatgcattgagctatcgagtattggtcga

SEQ ID NO: 9606 - DNA, 617 bp, Artificial Sequence
  Description of Artificial Sequence: Synthetic probe
ggatctcgctcaaccccatcacctcgctctactacgtcgcgccatgctgcctctgcttcctcttcgtgccatgggtcttcgtcgagctgcccaggctgcaagccgtcggcatgttcgagccggatttcttcgtattcgggaccaactccctctgcgccttcgcgctcaacctcgccgtcttcttgctcgtcggcaagacctccgcgctcaccatgaacgtcgcgggcgtcgtcaaggactggctgctcatcgccttctcctggtccgtcatccgggacaccgtcactcccatcaacctcttcggatacgggatcgccttcctcggcgtcggatactacaaccacgtcaagctgcaggcgctcaaggccaaggaggcgcagaagaagctggcgcaggccgacgaggaggccggctccctgctgcaggagcgcgactcgcacgcagaacgcaagaccgacacccagtcctagaagagctctgcccatctcatcctcatatccaacaacatycatttgtggcccgatatgtgatccttacgagtttgatactatgtgatcctcacgagtttgatgatggtgatgcgaaatctcttcatttcttgtcctaatttggtacta

SEQ ID NO: 9607 - DNA, 510 bp, Artificial Sequence
  Description of Artificial Sequence: Synthetic probe
cttcatctacaccaaggaggaggtccagaagatgaactcgaagtcgtcgaccccaaggaaggaggaaggttcggctgatggcgacggcacgagcgagaaggctcatctccccgcgtcaagccatttagataactaggtttgcgtttgagctggggtgccgattgaggcatgaggtgaggtatcgcacagggacagggaagcgtcctgcctgcgggtcccagccaatgaagtaacagctcgtgatgatgtcttattgctatcggtgatcgccccctccttccccttgtttggattttagtagtcccagcctaggaactgtagagagagacttatgcttcttaattgttkatctccgctggtttggttggctcgttggcagaaagatttagggccaagattcgccctttgcctgaacgcttgctctttctcgcgacttgatgatgatgtaaatatatctatctatctatctatcctagccttagtggtaagtagtaagtgtagtagtacctg

SEQ ID NO: 9608 - DNA, 320 bp, Artificial Sequence
  Description of Artificial Sequence: Synthetic probe
ctcagttcttccttaaatctctctctcggtagaatcaaacagagctttgtattgactgaccgccatttgcctgacatgccgattgtctaygcaagtgatgcttttctatcactgacaggttactctagagaagaaatattgggctgtaactgcagattcttaagtggtccaggcactagtgtggaggttttagaggagataaatcggaatatttgttctgagcaggcttgcacagtacatctactgaactacaggaaagatgggagtgcattccgtgatctgctacaagtatctcctattcgaaacgcatcaggcaaggt

SEQ ID NO: 9609 - DNA, 552 bp, Artificial Sequence
  Description of Artificial Sequence: Synthetic probe
tacttgcaatgcttactgttttcgagagagttggggataatttcatatcatggttaccaatgtacagtgaagcaaaacatgaatctgagattggtcgcaatcttcttgagttgaggactagagctagtgacatggcagttgtttacttccataaggttgcagactacagccagacaaggttccatgaaatcctgcaatatattgcttctcagtcayaggctcaaagatctcgttctcaggcgcgctgaacgtctagagtttaatataatctcgtgatttgtcgggcaacagctaccaaggctatgagagtagagaggtggcggaagagaagtggaggaggcatggaaggaagaagtggaggaacttcctcgtgatcaccaccttgttgctcttcattgtaggttatgtgttctacttcatctaggtagagctacgtcgttggagttgtaatgtgaattgtgaacttgtactcgaaggtgtaatgtgattgtgaacttgtactcggaggtgtgaacttgtggtacaaacacttgatgtatgaacttgtatgtc

SEQ ID NO: 9610 - DNA, 491 bp, Artificial Sequence
  Description of Artificial Sequence: Synthetic probe
tgcgaactccaactgattgaacccagccatcaaggcaccaatcgtcttagttggtgtacagcaatataaccgaggtataagtttgttagtatctgccrtttctgatttgctgatttgagccatcagtctttgatggactcttcatgaatcttcgatgttggcatctcctgtagatggcccaacaatgcttggcagtatggcaaagggacactcttctgaagccggaacttggttgtgactcaatcaggagcacaatactggacaagcgaccgagctggttactgtttgcttgcgcagacacactgtttactgctggtttggaagttatctatctggatggagctgctacgatccatcatagtttacatgtttgtaataactgttacgtactgcctgagggtgtatttgacaacatagtagcttatgtattcaatatttgtttacaatccaagtagtgtgtaataactttatctgaagcattattatttggc

SEQ ID NO: 9611 - DNA, 486 bp, Artificial Sequence
  Description of Artificial Sequence: Synthetic probe
gcgacaacgtagatcattgttcccccgtccaggtgaactttcctgatgaacagaaaacaacacaggtagcctgtggatggaggcatactcttgctctgacagaaaataagaacatgttctcatggggaagaggcaccagtggacagctcggtcacggtgaaatagtcgacaggaacacaccraagatgatcgatgctctaagcctggatggatatgcctgcaagcagctggagtcatcaaacggagttccaatgacaggtgaagcctgggccaaaccatcggcacgatacgcgatcgtccccgacgagaatgtttgtaaatcaggaaatggaactgacaccatgccgcacggcgatgcgaagaggatgcgcgtctgatctgagcatatgttccacccttcttgaccatctagcagtgtgcaataagctagcttgggcaactttctccttcaccatgctgcccagttttacttcaatgctcttatca

SEQ ID NO: 9612 - DNA, 546 bp, Artificial Sequence
  Description of Artificial Sequence: Synthetic probe
tagcagaattagatgaagaagacgaagaactcatcaagtcaatcacttttcgaaactcgaaagattatgtgaaacggattgaagacgacgatgatgatgatgatgaagaatttggtataccaggccagtcaagtgtgacggcaaagattaatggatcttctagactagtgttgaatccaacagatgtcttgaccaaaactaatkgtcccgagagtgcaaataaagaaggaaacaagaccgtggcatctaagatgcccaaattcatagtaaaaccaaagctcacagctgcaaatcctcagaagaaacagaagactgaaccggcagctgaccaagataatggcaaagcacctgttgcagaggaaaaaagtggagcttcggaggagaaaaccaatgttcttcagtccctctgccagtatgacagcgatgaaagtgatgactgaagactaaggttctcgagtcacaaggcgagcccctggaacacggacatgtaacccgatctgtaattgtctgctttcgcaaaatctctgttgccaactgtaagtctgc

SEQ ID NO: 9613 - DNA, 588 bp, Artificial Sequence
  Description of Artificial Sequence: Synthetic probe
gagccaaggacaaagccactgacaagacaaatgatgctggtgctaaagacagcagcaaaccaaaggaagttagcatcaagggcaaggatttgaaagatgaaagcaaatccggtgatgtacctgtcaaaggtaggcctggccgtaaaccaaaatctcctgctactcccgcggctgtggttggatctgtgaaagagaagcggaaggagaaagaagaagaggcacctgaacctgaagtggagcaggaagcatcagtcaaagcatcatcaactggaaccggaaagaagcgcagaaggaaggcttaaactttgctggcccgtgtacatctcttgtaaatgggttygctctctctttagtctcatcgtcggtgttgggacattgcaccgtgtatggattgtaactccttggtcggttacctattgaattgtgtgctgattgggcatcatgttgtagttaggtagctgtagccagaaacaatttgcagtagctgtaatgttaggcataacctgtgttgttggatgcatgatgttgcaaagcctcaggcgagattgtggaacctatgcttggcatgaggcccgtcacatctagttg

SEQ ID NO: 9614 - DNA, 411 bp, Artificial Sequence
  Description of Artificial Sequence: Synthetic probe
caaagaagcagcgcacgatacaagtaatggagctgggcgacataccaaagcctaagaatcataacagacagcctatggtgaagtcaaggaataacattagaagtagggtacttggtcggygctgattcttctgtgaaattttttccccttcatctgatgaactgtgttgccatgccttagctgtggtccaaaggaagcagctgaacttagctgccaggaccaaaaccgtatttttgaacataaacacctacctctgatggagagcttttccttggagttgcaagagctgcgctggatgcaatatcgctcttgcattcggcgaggctagtcgctgtctggacaatatagctcttgcactcggagggaggtctgagagttttagtctgtcatgtcttgataatctgagagtgg

SEQ ID NO: 9615 - DNA, 426 bp, Artificial Sequence
  Description of Artificial Sequence: Synthetic probe
aaggagtggttttggccacagcatgattaccgttggaggatttatcttcactcttggctgtcccattggcactgccctcctccttatgtgcggcctgtttcttcttcttctctgtctcttcagtggcaagcataaccatctcagcagttgctgcactcagctgctcctgcatgcgctttctagcagcctctgctgatgtgtcagtctgccactccacatcatcctcgtcatcatctgcagcaactatgaagyccgcatcttggctgtgagttggtgaggttgcatgttcttcatcagatcctccaccagaacccttcttctttgaacctttagcagtgctctccttggacgaaccacctttcttctttgcatccttcttaattttcttcatctcctcatcagcagcctcaccttctttcagccgct

SEQ ID NO: 9616 - DNA, 610 bp, Artificial Sequence
  Description of Artificial Sequence: Synthetic probe
gaatgagctaaatctcataagatgcaaacacatcccaaagcgacctggctgtgactggcatgacctaccagatgagaaggtcaagctatcttctgggcagatggtggacctgataccttggtgcttgcctaacactgctaagaggcacaaccagtggaaagggctctatgggagattggattgggagggtaatttccccacatctgtgacagatccccagccgatgggcaaggttggtatgtgctttcaccctgaccaggacaggatcatcactgtccgtgaatgtgctcggtctcagggctttcctgacagctaccagtttgcgggtacaatccagaccaagcacagacagattggcaatgccgtgccacctccacttgccttcgcacttgggaggaagctgaaggaagccgttgatgcaaagcgccagcaggcataactgtctctagatgatcagcacatgctatgagttwatctcgattgctcgttgctagcattgtagccgactgtcagatgttagtggtctgactagtatggatttcctgagatgactgtaatttttatgggtcttattatggatgccttgttgtgtactatcttagatgtgtgg

SEQ ID NO: 9617 - DNA, 470 bp, Artificial Sequence
  Description of Artificial Sequence: Synthetic probe
aatcactaccctgggttacggggataaaagcttcacatccgaattggggcgcacttttgcggtattttggataatcacgagcaccataatcctcgcgctgttcttcatgtaccttgctgagatctacaccgagcgacggcagaaaatgctggccaactgggttctcacgcggaggatgacaaccatggatcttgaagcagctgatctggataatgatcgacaagtgggtgctgctgaatttgtcgtgtacaagctcaaagaactggggaagatcaaccaagaggacatatcttcttttctagaggagtttaacaagctygacgttgaccagtctggtactctctccgcgtatgaccttactatggcacaatccggtcagtgaagaacacttgggcttgtactttactttacagcctgaatagttgaatggctggatagtgtcttaattgatcctgtaatctagtaagtgt

SEQ ID NO: 9618 - DNA, 510 bp, Artificial Sequence
  Description of Artificial Sequence: Synthetic probe
gttttgggaaggatctagagctgctagactcacctggaattttgccaatgagaattagtgatcagacagcagcgcttaarcttgctatctgtgatgatattggagaaaggtcatatgattttgctgatgtggcagcgattcttgtgcagatattgtttagacatccggctgtgggtcctgaagcatttcgaaaacgatacaagatcgatgtagacagtgactgcggcaaaatgtttgtcacgaagctctcagtccacttgttcaatggagataccacccaagcagcttttcgcatcttgtctgacttccggaaaggcagatttggctgggtggccctggagagacctccagcatgagcaataaatgtaacggtatatcagagatacagaagatacagaattgctgtacgtcacacacagtgattacaatgtcctttgtagcaccataataggagaatttctctgtaccttagacagtgagagtgtgaggaacgaggaatcaattgaggat

SEQ ID NO: 9619 - DNA, 412 bp, Artificial Sequence
  Description of Artificial Sequence: Synthetic probe
aagtgagaatgctgacttgcaaaaaggtcgcaaatcacggcagccatctgatgggcaatcagcttctcgagcttctgcagcctcgcctgcactctcatcgttgttaataccttctctgaaagagactactggtgacaagtttgaagaccctgttgtccatgcagtcctcagttctctgatggatctagaacatgagattcctggatcctgtgaggtattggttrgtagattgctacatcggctagggagctcgaaagattcctcgctgcaaagtctacatgagacggcaatgtcgttttttacaaagaaacccgagcctctgtctgagcctataagcaacaagaaacctgctagtacgccaccattggctgctcctactgtaagccctctggcgaggttccttcttaccagg

SEQ ID NO: 9620 - DNA, 538 bp, Artificial Sequence
  Description of Artificial Sequence: Synthetic probe
gtcatcagctggtccgtcaccgagatcattaggtattcattcttcggcactaaagagcttctcggatctgccccatcatggcttctatggctcagatatagctctttcctaatcatgtacccaaccgggatcagcagcgagcttggactgatatacattgctttgcagtacattaaggcgtcagggaagtactcccttagattgccaaacacatggaattattcgttcgattatttctatgcatcaatcatggtactcctaatttacgttccaggaagcccacatatgtacacctatatgcttgggcagcgcaagaaagcgctctcaaagtcgaagaccatgtaaatcttgttgatatccctttcaaaagtgggtaaaaattgtcgtattcaatgtcgactcagcaaatcgggagcctgttattggtgagcactagctgragtagaggatcatcgaactctttgtcatgttgatgttgctgaattccgcatttacttgttcttagatacaatatccaaattatatggatatgtattgt

SEQ ID NO: 9621 - DNA, 1238 bp, Artificial Sequence
  Description of Artificial Sequence: Synthetic probe
tcacatccatttccaatctagatctacagcagaagagcagggcaaccctgggaagttaacaagtcaacccagggagcctgctggtacaatagagccagtaacaacgcaactgcggaagttgcaagtgagctaagctccattaaattacttgccataatctagagctggtagacatctaatggcmtcccatgatggaaactttgctggaatgttgttttcgtcatgtcattgcctggcatgattttaccaccatcttccttcaagggcccccaccaatgctcgcagatctgtgtcgaaaaggaaagtttgtgagttgagcaacttaccaaagagacacccaggccccccatccactccctccattctccaacttcatgctggatgtcagactaaccctcaatgacgacttctgggatccatccgagttcacacctgcaggagctctagctcttcatggaggccgctctgagaaaccccgttcccagcaaagtgcactttttcagcaaggacatttcccatgtccttttcagcratctgcagcaaatctgcwttattgccrcccaagctwtcacttccgacgagctccaatacaaccttctcagcaacacgctttaaagttgtactcactgctactgttggagctgcgctgtccttgacttgggaaaaacaattaacatgcttgctagtcacgtcaccggaacagacagcttccactttcacacatttggagcctgatgcaatcgaatccaagcttttctcagatgcctgtgatgaacttgagcactttgcttgctctaggttgccaatgctaggtgaattctggctcccaccacttgcattagaagtaccttttgtttggttgttgcttgttggctcatcactaacattcccagacaggggtgatgaagttttgggatgaactgggctgactgaagctctcttaacagatctacaaggttcagtatcatccattccagcagaagcatgctttctctttagctgaccatctggagatccattcaatggactctcagttgcacttttatcagactgttgctgatgactcacatgtctctgaggacgaggtctcctgtatccttctgggaatacataagctggaatctcctttctccgaacatgagaaacagccaactccatcccaggcttccaaaacatatacatgttgatttcatgcctaaactcgtcaacagtcccacgaatatcaaactgttgacctt

SEQ ID NO: 9622 - DNA, 908 bp, Artificial Sequence
  Description of Artificial Sequence: Synthetic probe
catgggtgtcgtcgcccacgaccaggccaccgacgccaccgccgagcacggcgtctccgtgtccgagaccagcgtccccggcgggcgcatcgtcaccgagctcgtcgctggacaggctgtgggtcagtacctcgcgccggacgaggatggtcccgctgttggaggtgtagctggaggaggcggcggcgcaggcgtggcggctggcacgaagataacgatcggcgaggcgctggaggcggcggggtacgcggcggggagcaggccggtggagctcagcgacgcggcggccatccaggcggcggaagtgagggctaccgggctggacgccaatattcccggcggcttggccgcggaggcgcagtcggccgcggagtacaacgccttggccgcgagcgacgaggtcaagaccaccctcggcgacgtcctctcggatgcgacgaggctgctggtggcggacaaggaggtggaggtggatgacgcggcgagggtggcgctggcggagacgcggaacaaggaggacgggacggcgaggcctggaggggtggcggcgtccatggctacagcagcgcggatcaacacctatacctatcctaggacgacctaaggacgcaataatatataggcaggagctgcgtgcgcgcgccttccctgccagagtactagtttgcgccgggccgagttcagcgttcccggcccgtttgcagtgtctctccagacttgatagtcctttgctagtactagctaccatctttgtacacgtacgtagtcgagcttagtcgtcgtacttctggtcgtgtattcgtgttagtttgtgtccggmcgcatgtattgtagacatctcccgtgtaaatgtatatcagcatctatatacgcatatagcactgggtcgaggtcgatccagtcgcaag

SEQ ID NO: 9623 - DNA, 360 bp, Artificial Sequence
  Description of Artificial Sequence: Synthetic probe
cgcttgcccacctcagctacttgcatgaaccttctgaagctccctccatacaaaaccaaggagcagttgcaaaccaaattgttgtacgcaataaactcagaagcyggtttcgacctgagctaattgccttgtggattcaaaaattgtgcagtgtagatagtttctagataatagcttaaaaggcacccagggctgaagcaccaaccatttgggctgaattcgaagcccccacaaacaaagaacagatgtttcttagagtggctgggaggaaattgaggggaggcacctgcaatagctgctgatagatagagctttggctgcaagtcggtaaaagcacgcggatgctgttgtaagcagcca

SEQ ID NO: 9624 - DNA, 753 bp, Artificial Sequence
  Description of Artificial Sequence: Synthetic probe
aagcaatacatggttatgggaccgtgttcgagttagtggtggagcatatggagggttttgtgactttgacactcattcaggtgtgttctcctatttgtcataccgtgacccaaacttactgaaaaccctagagatctatgatgggactgccaacttcctcagagaactagagatagatgatgatgctctcatgaaagctattattggcaccataggtgatgttgattcctaccagctaccagatgctaaaggttacagcagtttaatgcgatatttgttgggtatcactgaggaggaacgccagcaaagacgtgaagagatactcgcaaccagcgtgaaggatttcaaggagtttgctgatgctgttgaaaccatcaacgtcaatggagtcgtggttgctgttgcgtcacctgatgatgtcgaggcagcgaataaagagaaggygctattttcagacgtcaagaagtgcttgtgagttgtgaggactccccattcctgccctcgttggatgttaaatctggacctgggatcagaggttcttccacgtttgcttcactggtgaacgatgagtgtgacgctgtaacatgagttcatgtggcgagagaactactcacttgactgtagcacagttacgatttttttcctcgctcattttttggggaaaataataattagtccagagtgttgagcgaatcagtgctcagagaagccggttgtacaccaagtttctgataggggattaagagctgatga

SEQ ID NO: 9625 - DNA, 652 bp, Artificial Sequence
  Description of Artificial Sequence: Synthetic probe
gtgcagaagacttctgtgacaacccaagtccgtggaactatgggtcacatagcacctgagtatctgtccacagggaagtcgtcggaaaggacagatgtttttggttacgggatcatgcttcttgagcttgtgactggccagcgtgccattgacttctcacgcttggargaagaagaagaggtgctattgctcgatcatgtaaagaaactacaaagagaagggcagctaggctccattgtggaccgcaacctgagtcaggattatgatgaggaggaggttgagatgatgatacagatagcattgctgtgcacgcaggcatcgcctgaggaccggccatcgatgtcagaagttgttcggatgctggaaggcgaaggccttgcagaacggtgggaagagtggcagcaggtggaagtgacgaggaggcaggattacgagcggatgcagcagcgtttcgactggggtgaggactccatgtacaaccaggaggcaatagagctgtccggagctagatgataagtactagcatcgttgtctatagagctagatattgatagaaatatgctcatcttgtaatgcagaaaaactcatggagtctggtgaatattgatcaattatacagagagagagagagagagagagagagagagagaga

SEQ ID NO: 9626 - DNA, 573 bp, Artificial Sequence
  Description of Artificial Sequence: Synthetic probe
ggagcataagttacatggacgggatatagatggtaccaggtccttgaaaatttcagagcaagtcgaccatcttcttaagcaggcaacaagcatygacaatttgtgtaatatgtatgaaggatggacaccttggatatgattgaatcaatgtaccgctgtccagagtttgggcagaagacaatccatagcaaaagcaggattagcgtagcatgacggtgaaccaagttagagaggtcattttataatccagagaggctcaacttctccacagcctgctgcgtatggacgactatggatggctccaagcaaacaatacatcttcatctacaatatctgtagccatccacatgcatcctgggatctggacattgacattgtggaatgctgaatctgcagtatgggcagaatacagaatttgcatggacaccgcagcaacgctctaccactggatccaaaactgggagagctgcaattcccgggatgagcatgaagttgtgcaaggatgttttaagagcacagccatgcacagccccataacgacgaacttatcttgttcaagtaaaatgtacatac

SEQ ID NO: 9627 - DNA, 523 bp, Artificial Sequence
  Description of Artificial Sequence: Synthetic probe
gccgaggtttgttctaccaaagagcgcccaggtggacggcgagatacggaccgagctgcaggacctcatggacgcgagggaggccggcatgtccttcatcctggggcactcccacatgaaggcgaagagcgggtcgagtttcgtgaagcggatcgtrataaacttcatctacgagttcctgaggaggaacagccgtggtgcatcctatgccgctaacataccccatgcttccacgctggaggtgggaatggtgtaccaagtctgatagtagcagctgtatgaaaggtagagagaccagatgaagtgttgtttctccgtctgtatatatcccctcctgtcgcccgacactgctaacccgacacccgacgatggcagtagatgctggagcacaccgagggctaacaatacagggagctgcaggtctttggagagccctacttttaagtgtgcatttttgccaatcaagtgtcaagctttttgttgagttggcccttagtttttggtttcctggatctgtttgctg

SEQ ID NO: 9628 - DNA, 544 bp, Artificial Sequence
  Description of Artificial Sequence: Synthetic probe
taactttgcaaacaacctcatgggtcaccgcctatactatggtttccgcaccactgtcacgccaaacaggaaggcccttgctccgatattcatggacagggaagaagcccggacagctggctttgaggagcgagtgaggcaggtcatgttgaccacatattttagcggtcctcgcaagcgcattcatccagagtctttctatacaaactcatggccagagtgcttttgcsaggtgaatcctagaaatcaagcaaacaaatgcccaccagacaatatatatgaggttctgaagaatcaatttatgagtgaagagagtgaagaaggtataggagaagtgaaaatcactaatcagacaaactcaaccagccaaacagaagatactatgatttaactgtgcaaccaaaacggagagcatgccactgggtcatctatcacgtacttattgtattttcgttgatgtattgatgctccaagatttccacgttaacccgaactattaggatgtcatagactgaacgcagaattatgggagcagcgagttaaa

SEQ ID NO: 9629 - DNA, 630 bp, Artificial Sequence
  Description of Artificial Sequence: Synthetic probe
cgcaccactaccaccgggccgctgcaagggccgaacgtgacgatcgcgccgatagacaagccgggcatggcgatcaccaactcgttgagcgtcaccctggagccgggaccagacgcccccttcaacgcggtgcccgggctggacgggcgccccggcacggtgtccctggagctcggcaccaggccagggtgcttcctgatggcacccggcggcgctggctacagtcccggcgacaaggcccaggtcggctgcctgacaagcggtggcggcgacgacgcggcgttcaggaaggccgcgagcttcacgcaggcgccaccgctgcgcacctaccacccgctgagcttcggggccaaggggacggagcggaacttcctgctggagccgctgcatagcctccgggacgagttctacaccgtgtacttcaacctggtcgccgacagctgaaatgtgctctgtgcagtgttgcttcatccacgtgagagtgatactgagactgagactgagacgacgacagaccagagtttcagtgattggtggcaggcagacacatcacatgtgctgcrggctgcacaattactactacgtgtgctgttgcagtagtatctcccatgaccaataatgctcttgcat

SEQ ID NO: 9630 - DNA, 261 bp, Artificial Sequence
  Description of Artificial Sequence: Synthetic probe
ttggtccttaagggcgtgcagtgcatgaactttctgctgtcttgggtgctttaaagcatcggcaacttttacgtctttcagcttgtcaactggcaaatccctgaaagcaccaccagatgccgtgagaataacgcgacgaagtgatccttcagataagccttgtatacactgaaatattgcagagtgctcagaatcagcaggragtattttcacattgtgcttgtgggcaagaggaagcacaaaaggaccacctgcaatgag

SEQ ID NO: 9631 - DNA, 638 bp, Artificial Sequence
  Description of Artificial Sequence: Synthetic probe
agccgaagcacctccctccccaccccgccatgtcctcccccacgccaagcgaccgccgctgcagccactgcggcgtccagaagaccccgcagtggcgcgcggggccagaaggagccaagacgctctgcaacgcctgcggcgtccgctacaagtccgggcggctcctcccggagtaccgccccgcgtgcagcccgacgtacgtgagcaccatccactccaactcccaccgcaaggtgctcgagatgaggcgcaagaaggaggacgggccgctcgtcaccatcgctaccgcgccggccgtgccgtcgttctagctcagccagctagctagctagcttagccaccccgccgcggtggctgtacattttcccggccgtattagtcttgtaccgtaccgtaccagaactcctttccccattttctcttcctagtagtgtcagtcatgctagtagcagtcccggcyggattaatcaaatcagagtctaggaggttttaggtcgtgttaggtttaggaagaaatcggctttgcttccaactcccaccaccttcattttagttcgttagtagagtactaagtagtagtaccgctacagctgcagcagtgcagcatcagctcagtcagaactttatttcgacctttt

SEQ ID NO: 9632 - DNA, 480 bp, Artificial Sequence
  Description of Artificial Sequence: Synthetic probe
tggcaactcatcctatggtgatctgcgacaatacttgtgtggtttttttgacaccacaactggaaacaaaagagaagcaaggagttactctgagatcacaaaatcgcttggggtggacaatccatctcaaatcttatttatcacagatgtgttcgaagaagccgttgctgcaaagagtgcaggtctcgaggtaataatctccattcgccctgggaatgcaccacttcctgagaatcatggttttaggacaatcagttctttcagcgagatctgacaaatgtgcaagagacaagcatgcagragaatcacctttggacgtgtacgtggcagtgcttcacgggcccctggatcagttcttgtaatagcaggagagcgcttctacaagcatggcatcagattgcaataaaaccagagaataaaagggggggaaggattgtaagaaaaagagaacgatgtggagagcgtacgagtctgttcaag

SEQ ID NO: 9633 - DNA, 596 bp, Artificial Sequence
  Description of Artificial Sequence: Synthetic probe
agtgcatctattcagaattcatcaaatttgggcctctccaatgaggaagcacgaatgttaaagcgaaccctggaattcaactggcatgcgctattggaggatattggtctttggataccagtagaagtcccacacaccgagcatgatgacaaacctcagaatgaaccagaagargaagagataatagcaggtccacccttggacccacaatgcaatgccgagctacatgccgattatggtggcgctgccgtgaaatggggcttaacgcaccacaaaggatctgctgcagattgttgtcaagcatgtctagaccaggctaagaatgccaagccaggtgaaatgaagtgcaatatatgggtttattgtccatcagagtttggttgttattcgccagacaaatatgagcataaacatcaagagtgttggttgaaacaggatgaccggcctaaactgaacttcaaagacaagtacaccgagtcttacagagattctcatcctagagcccctgtcgttgtgtcctggatgtctggtgttaccagcgcatgagctgctaggccccatcggcatttgggtttatttgcactgatgcaacttca

SEQ ID NO: 9634 - DNA, 453 bp, Artificial Sequence
  Description of Artificial Sequence: Synthetic probe
tcagatcttggtgatgctgatgatgtttctacgatgcctcaggcagacaaggctaaagccactccttccattatacccacagataaaaatgatgcttccgtgaagtcggactccaactatgacracactaatttgttggttgatcccattgtagcatgggaagaggaaccgtatcctactgaagatgagcctagtccagaagaagcggctttcctaaaatctcttggctggaaagaagatgaaatagttccgcctctgaaacaggaagaaattgctgattgtttaaggcacaacttgaggctgcagcagaagcttgaggaatgtaggggctaatgacagaactcaacaaacaaagttactggtgttgtcactgcgccgagaactagtgaagatcaagatgagatttggttggtaactacctcaattctcacatggggtgattgtctagcttaa

SEQ ID NO: 9635 - DNA, 562 bp, Artificial Sequence
  Description of Artificial Sequence: Synthetic probe
attgtaaatgattttaagagtattgagggggatagaactctgggactacagtcacttcctgttgcttttggtatggaaaccgccaaatggatatgtgttggagcaattgacatcacccaattatctgttgcagcttacctcttgagcaccggcaagctgtattatgccctggcactacttggactaacaattccccaggtgatcttgcagttccagtacttcctgaaggaccctgtgaagtacgatgtcaaataccaggcgagcgcgcaaccgttcttcgtcttcggcctgctggttaccgccctggcgaccagccactgacgactaacctgaagcgaacctgggatgttgcggtcgaagaggcaggtggctttgtacgacagttagtggaataagatcgcagcaacacttatactatgtacaagctgttgggattgccggtagggtactagaatgaagaacgcctccttgaatgcagaaaggtagackgtagattgttccgatattgtcaggggctgtataacgtaattttgatcacattaccgttgtatgatcaaattgt

SEQ ID NO: 9636 - DNA, 403 bp, Artificial Sequence
  Description of Artificial Sequence: Synthetic probe
ggctatgacaaccaccatcaactttcagttaaagaaccctacccaactgagaagagtagtctttgggggtgacaaccagctgagagcatctctcacaggacccggtgtcgttttcattcagagcctacccttcagtcggctctcacagcgtattgcaagtagatcagtggcggccccaagcttgagagacaaccccaagttcttcatccagatcgtcatgttcttcttcctggcctatgtcatgattgtatcgtcaataattctgacggatgtttagacgatgccrtgacaagcattctgtgtaatcctcttagagatgttcagtgaaagttggaagagtaaaagttgttacagcttacagaagcataagcattctccctccctccttgtagatgttctgggt

SEQ ID NO: 9637 - DNA, 604 bp, Artificial Sequence
  Description of Artificial Sequence: Synthetic probe
tgagagtggtttggtgagggcgaaaacttttgtgtcaaaacatctcagcacttcgctcccagatgtcaaaattgctccggtgattgaaaagctatgcttagagttctctgatgtttacataggggctcatcggatttctagaactgggcctttggttgtgaatcttcttggaaaggataaccaaagggtagaaggggccatggagaagctgaaaagtagcttcgacggacaattttcccaagtctgacagttgcaaataaactgtccacacacttccatatttcttccacawtctttctgctggaagttctgaaattgtgcagatctaatggtgcattgtggtgctcacatgccttaatccagtgctcgaataaacaccactaagctaccactctgaagctccagatattatttaggaaacatacaaattttgtattatgcttttagaaatgaatgaacaagtgagatgctggaggcttcagctagttacaaattaacgacggtagctttgcatggtctattttgactaggctaagagctcgcaattgtttcatggaaaatcaattgaagttgattgtagcataactttattattgattcaagt

SEQ ID NO: 9638 - DNA, 552 bp, Artificial Sequence
  Description of Artificial Sequence: Synthetic probe
ccaagtgctacagggacttcattaaggtgaccacgctggccgcccctgtagtggagaagaaagtgttcacagcggcgtcatcttccacggcgccattggagccagcaaagccagacgaagcacctgcagctactgcggttgaaagccaagcagcacaggaacctccaaagcctcccagcaaccgatgcctttcatgccgcaagaaggttgggttgaccggtttccagtgccgctgcggtggaaccttctgctccatgcaccgctatgctgactcccatgaatgctccttcgactacaagaaggytggccgagagcagatagccaagcagaaccctgttgtgatagctgagaagatcaacaagatctgattgctggttacacaggggtcatttgcctcctattcgcggtggtacctgagtcgtcaagtttacttcagtcatgagtaggtttccttcaggtctgggctagtgtgttagggtctcaaattgtgtctatccttctccttaatcatggtttcattctctcgattatgaaataaaatgtaaatatata

SEQ ID NO: 9639 - DNA, 520 bp, Artificial Sequence
  Description of Artificial Sequence: Synthetic probe
tcctagtacccactgaattcaaccagcgcggaataagatgtgttctcatctgttgcattttgaacgttaggagttctcatttgtttttgattctcagatttctgcggattggcgacaccaaaccctgccatctcattcaattctgacctcttgtgcctcgcttcctccacatctccttcccagcatgtctctgcaagaacatcctgggctttatccatactttcttccgagatcaaattgtcattttgcagcagtacaaggtagacctgatcagctgcagccttccggatcttggggtatctatggcctaggaacgtgagtagttgagagaatgccttggtgccagttctatctagttgtgaagaaatatatccgargattgagaggcctgcacacaacttcgtgaagtcctttgatcccttcagttcagagcctagtaaatttatcagttcacagtagaagttaccatacccctccttgttcaagaaaacctttttactgagtaaagtctcaatagtct

SEQ ID NO: 9640 - DNA, 555 bp, Artificial Sequence
  Description of Artificial Sequence: Synthetic probe
tttttcaacacaactgatcaagcctttgaaactctagtagtagtattcaagatgttacagaatacattagcaagttagaaccaactacaaaatcaatcccggrtctccattcgagtactacatgtctttgcctactgttgtacaacaatggatcacttctgtccgacgtgactgccggcattacgagactctcaaaccgagtaacagaactccgtccagtccacatatcaggttaaacatcaccaaatgtgatgacagcaatactggcaacgagcaccaatcttgattcaacaccgagctgctgtagggcaggaacgggagataaagcagggaattagctgtagcacacctgaatttcttgtcgatggactgctttctgaaggagcatcagacttaggtggacgactgactctgcactgtttggttcttggcttgcaagactttctggctttcactgaaatactgattaggatgattaattccagtatcacatgagacattgtgagttgcctcaaaggtcaatgtgcaagctagctggtaatgtctgttcttcac

SEQ ID NO: 9641 - DNA, 676 bp, Artificial Sequence
  Description of Artificial Sequence: Synthetic probe
gtccaaagtgctgacggttagattagattttctactagtagtatcttccggtaatagtaagaggtgccttaaaaacgccttataatgacacaggtaacgatatgttttaactcaagacaagactccggaagaacagggagcatctcagctccttcctctgacacatacagaccaaaagacgcacaaccagggtggtctcaatcgtcagacgccttaggggagttctcaggtgtcttcagcgcgtccgcagccttcttcgccttgtgcgtctccaccgcggctttgaagtcctccctgatgccagtgtccttgaacttcagagcaaacgtagtaagcgcgctcggtgattcgccgatgctgttgatgcaagcaaatgtcacgcccttcttgtccatgtccttcagcrtcatatcgtcatagaggcttgcgttcaggatgagccggtagttgcccttggccctcatgacgagccgagatctctcaccaccagaaactgggatgttgagcttcagttcacctctccccctttctttccagcccccgtcaaggtactcataaattgcagagtcagcagtaaatacagcctcttcgttctcttcgcctgtttcaactgggccctctggcatagcaaatttcttcggggcatctgctgcagtggcaagcgctgggacagaac

SEQ ID NO: 9642 - DNA, 578 bp, Artificial Sequence
  Description of Artificial Sequence: Synthetic probe
cagagaccgtgattaccgccgctcgagctattcatcagaaagggatgttgatagacgaggccgtgataggagggacagggactctgaccgaaatggacgttcgagcgcccgcagaagcaggagcaggagtccgagccgcggcagagccaacggcgacagccatcgctctagcccatttggtaaagcgccagagtcgtccaacctggcaaagctgaaggatctatacggcgacgcgtcaaacgcaaaggacgacgctggtgatgacagagctcgcagggattccggaactgaagaggtgatcagattgggaggtgccaggtggaggtgactgtcaagaaccactgagactctcttctccctgtactagcattgcgagackctgccagagacgcgccacctatgatgggattcttgttccctgagctgccattcctagagaaatgtctctgaccttagtgtgcacgacgcaaaatctgttagacagctaggcaatgtagctgcagtttcaagagaaacaaatgccactttggatagacaaagttctgtagtaagtacgtatctgttatggcgtatgcgtt

SEQ ID NO: 9643 - DNA, 602 bp, Artificial Sequence
  Description of Artificial Sequence: Synthetic probe
cttcgccactgcggtgaggaggcacagtggcgctgctcctgcggcaccaccttctcccgcaaggacaagctgttcggccatctcgcgctctttgaaggtcatatgccagccatctccgcaccgaacaaggatgcagtggcagcgcctacagagggatcccttgatataatggatgaaggactaactgaaggggactgtgaccaggaggatggtgatgaatgtagttttgacccggagttcttcaaggagttgatggatgagctcaaagatggtgctgagcctgctggtggcacaagctggcctggacctgcagcagctgggcaatagccatgtagtaagtgctgtttgtggtgtacggtagcaacagcaagggccactcgcttgcggaagttgactgggaagatcagtgaggaaggaaggtgcttctgaagaacaacacggattttgtccgggcccatccctctccgtgttttgacggtgctcacttgttccgcctcacttctgttggtctcgttgttgttctgtacctrtcgcctgctagtggaaatacttcccagatgttggttttgcacctctggaattgcaaggctcctctttctgta

SEQ ID NO: 9644 - DNA, 452 bp, Artificial Sequence
  Description of Artificial Sequence: Synthetic probe
ggagataagaaggttgtgggcacattcaagaatcttggacaaagcatgcttgaaaatatccaggtgattgagtcagcatttcagcaagaccgcagccagcctggccccatggagaacttctcaaacaacatcctgggtggcaaaggacaggtcaccgcaacagcagctctgacggagctccggaagatcagcaacctgctcagcgagatgtagccacccaatgcaaaaccacaaccacccatccttgcccaaccctctctagctcagcagtcraatggtctagtgataaacaagtaatgtgcctaggccatcctgttcaccagtgctcctgtggaacttccatatgtaaatataggttccattctattattccatttgagtccaatatgtaactaattaagcactgtatatccaaggaactcgtatcaatcaatgtaggtgtcacgacgatg

SEQ ID NO: 9645 - DNA, 509 bp, Artificial Sequence
  Description of Artificial Sequence: Synthetic probe
tgagcacctggaggatgctgtaaaatacgcccgcgctaacctcgccagcttcttgacgcacaaagcttttgaggggttgctgaaggagagtgtggccctactygcgtacgagaaaccttcagaatcttgcattggatatttgctggactctccacagcgtgaattcgtagcggatgcagtgaatgctgctgtcctgtcgacggaccctagcatgaaggaccccgagagctgcctttactcgtgcctcgagaagttactgaggcagctcacagtatgcagctccgagctacgtgctttcaacagcgatcaaggggactcgttcttacttcataaagagatgcagacctgcgaaagatccaggcggccctaggcacacgtcgaatgggcttatgagcagtggactcagaaatgaggacctcatccttcttggaagtaatgatcgcctggaacagtggactacgccatgaggaaacacatatttcttccctttgaggcacccaacactccac

SEQ ID NO: 9646 - DNA, 425 bp, Artificial Sequence
  Description of Artificial Sequence: Synthetic probe
ggaaaatgaagaacaaggacttcctagttgcgcactacgaatatttcactcgaggcgagagagttgtcgatgcattaaggatatagctaaggtgatactgctttcatgctacaatatccatggaaaataaaggattggagaatctcaataaggggatgaacctggtgaaaataattaattgatccggtttgcactgaagtttgggttaacttgttcatgtgaaattgagcataaccacgaaatgcattggacgattgagtgcaagccatagatgccaaaggcagaagttgccaatgtcagggagaaatagatcactgaatygatgctaatgaacacatcatttggtcctaaattgttcagaaaatgggatgcaggcgaaaattgtagcagaaagccagaaagatgcaaatttcatgaataaaaaa

SEQ ID NO: 9647 - DNA, 634 bp, Artificial Sequence
  Description of Artificial Sequence: Synthetic probe
gatgattcaagctgttattccccacatgatggaaagacgagaaggtacaattgtgaatgttggaagcattacagccttggctccaggaccatgggctggcacgtattcagcatcaaaagctgctcttcatgcattgagcgatacattaagggtggaactacgaaattttggcataaatgtcatgattgttgcaccaggaggcacaaggtcgaatataggaagtaactctgcagacaagtatgatcaaataaacgactggaagtactataaaagtyacgagaaatcacttcgagccaggaccgatatatcccagggcgccgggtgcgttccagcagaagaccttgcaaagagagttgtaaaattggttcttaagaagaatcctccggcctggttcgcttatggccagttctctgccattctgacgatcctgtattatgccccattgtggttcagagattacttctacaagcttgttatgaaagtgtaaacaacctgtaagataaatcgtcgcatgaaccagggagatggcctctcagattccaatttcagtcacatgctaatactagtcggtccgactgttgctacaggtatattttacgatacatgagtacgtacacttccagtccatatggac

SEQ ID NO: 9648 - DNA, 910 bp, Artificial Sequence
  Description of Artificial Sequence: Synthetic probe
ggcgatgatgagggttgcattaaggtgtgggatactcggaaacgatcttgctgcaatacttttcattgccatgaagattacatatcagatatgacctatgtagctggctcaaatcaaatattggcaacaagtggtgacgggactttatctgtaaacaatcttcgtggtagcagagtaaaggcacaatctgaattttcagaagatgaattgctatctttggtagtaatgaagaatggtcaaaaagttgtctgtggaactccaagtggagctctattgttgtattcatggggacattttaaggactgcagtgaccgctttctggggcactcacagtctgttgatacactgctgaagctggatgaagaaactctgatatcaggtgcagcagatggtgtgatcagattagtgagtatcttacctaatcagatcaaacagccactagcagagcattcagaatatccgattgaggcgcttggtttctcgcatgataggaagtatctaggcagtatttcacatgacaaaatcctaaagctctgggacatggaagaactcttgggtggtccgcagttagatggtcacgatgagttgcccgaagctgcagctgctgctgatcacgatgaattgcccgaagccagcgtcgccgttgatcacaaagtggctgaagctgatagcgatgatgatgggatggatgtagacatggagccaagctcttcaaccgcgtcaaagagcaagaagaaaggcaagggcaagcgtgtgaatggattccaaccggacttctttgcagacttgtaggtctcgcccgtaaagctcaatccttcmggtggccacttgatcactactactccgtacttgagcagttttgaccgcagaccaatagttcaagtcttgatctcctgcatcgaagcgcgag

SEQ ID NO: 9649 - DNA, 624 bp, Artificial Sequence
  Description of Artificial Sequence: Synthetic probe
ggatcacgctgccgcgacgaacactgctgtgaccggcgccgtcgccgctgccgtcgaggcttctgctgattcggctgtcgccttcactgctccagctgctgctgctgagccggcgagggatgatctcgtcgacaccatcagcgccaactggagcatgagccccgccgccgccgctgcctgcttccggccatcggcgccggcgcccttcgcggtgcaggcgcaggacgagatcacggacgccgccatgctgctcatgacgctgtcctgcgagcttgtccggagctgatcgaccgaccgatcgagcattcgagaggcmacactactatctacactgcggtacccccacccaggctttttttgccttagtccgttagacagtcagtacgtactgtccgtgctgccgcgtttttggcttcttgttcatgttgctagtgtaaccctgcatgcgctactcttaaagtcttgtgattcgttttgtgtgtaagattaagacatagaggaagagagatctagagagagaggaagagaggtagaaacaaggagagaaaggagatgataataaggataagaatgtgatcagctagctagctaggatcgagatcgagtgtgagttcagttggagta

SEQ ID NO: 9650 - DNA, 415 bp, Artificial Sequence
  Description of Artificial Sequence: Synthetic probe
gcttacaactttacaacttcatctatacatctggcgagatggcccattatatgctgcagcttaacatgaggcagattcatctgcacattcttcggatctagcagcatgtatccgttgctgcgggcccggggttttgattagtgtgttgcaacattgtgcgtcatgttgggatgtcatctgctgctgaaccgtcatcatckttctcttcagaatccaagctttggttcatcacaaacctcagactgtcgccctcttcaagctcccactgctttctgagttcatcaatggctcttgatgcagagctagctacggcgtaattggaatcttgagccaacctctgtaatgcgcccatcccagcattccccagggtccacatggacggagctgcagccaatgcattagccaaagctttcct

SEQ ID NO: 9651 - DNA, 460 bp, Artificial Sequence
  Description of Artificial Sequence: Synthetic probe
agaaaacacagagcttaaaataaggttgcaggccatggagcaacaagctcaactgcgtgatgctctgaatgatgcactgaagcaagaagtggagaggcttaagatcgctacaggcgagacaacaaagtctgatgaagcatataatacaggaatgcatcaagtctcatacagtccgtctttcttccaactttccgaacaacacgcaactcagcaccatgcaagtgtgcatcaactgccgccccaattccagtcatctcatcccaatgtcccaagccaccagatgctatcccaccccaataccttctcggataygatgcagcaagactcgctagggcggctccaggggctggacattggcaaagggtcaatggctgtgaagttggaggcagaggttgctgctaagtcagatggcagctcgatatctgcaggttaaagcagtaccttctaagtatagaccaat

SEQ ID NO: 9652 - DNA, 614 bp, Artificial Sequence
  Description of Artificial Sequence: Synthetic probe
gcacatttgaagagtttggtgacgagctagaacctgatgagaagtaccgtgtctcttattgcagaaaagcgtttcaaatattatcaagtaactacctccaggaagcagaatggtttcaccaaaatgacaaaccaaaatttaaggatcaagtgaaggtatctactatatgctctggcgcaccatgggcatgtgttgggctgttagttggtatgggtgatactgcaaccaaggaggcattcgaatgggcactcggttgcacggatgctatcaaggcttgtgyagtggtgacacgttttatgaatgaccttgcttcatttaagcatggaaagaacaaatatgatgttcacagttcagtggaatgctacatttgcgaacatggtgtggcaaatgatgtcgtctttggcaagataggttctatgatcgaagatgcatggaagaccacaaatcaagcacgttttgagcaccctgggcttctttctgtgatacagcgagtcgtgaatttaacaacaagcatgccattcatgtacggtgaccagaaagacgcttttacattcagcaccagcctagatgaaactattaggcgcctgtttgttgatcctattcccttgtagaca

SEQ ID NO: 9653 - DNA, 829 bp, Artificial Sequence
  Description of Artificial Sequence: Synthetic probe
tatagcagtgcgggatggtctggatccattgcttaattatgttgtcagtttaagcagggatgatcccatcatcgtggagcagggttccgtcatcaagatggctggcccaaagcgagggatagatttgggtggcagtattctaatcgagtatgatatgaggatcaagagaagcgggcacgaagatgatgatctacagctggttgatggtatatcggtcataggcgacctgggtggactatggaattgtatattcaygaatcgcatccttggcgatcatggtgagattgacttgaccgtgtcacgtgttcatcgtgcggttgaggcgaccgtagaagttgccatatcgcaagtgcaaagaggtttcaatctctgtcttggttgtttcatggattgctttgatgaagaagaagaaatccggctctttgatggcgccattggcgagtcacgtggcttaaagaggtctgtcattgctctaacgaagggttccactatggatttgaagttcagggtaggcgcggagtcatccggttcagctgaacattcttgttccttcgaggcggacacgcatgggcatgctactcgacggataaagactcgtttcgggttgatctcagtgaaggtgacttggtcgactttggttgggggctgctaaggtccatttccgtacatcctcccaaccttacatcaaaagtttgtgaccgtgaggagtgtgccaggattttagagttgtgtcaaaaagtggagtcgtggacttgcggcatttccctgctattccttccctgtcaatctacagtttaccggtagtagtcagcgtggtttttagtcatgt

SEQ ID NO: 9654 - DNA, 478 bp, Artificial Sequence
  Description of Artificial Sequence: Synthetic probe
cagcacgccagcgccagacaaagatgcaacgcaaataccattaccataaacctagattcttgcatgatgactgccgaagagtgagaatgacttattattaaatgaagtgctaccacttcaggttcacttaaggttcttgttaaaccagtcagtcatgtccgttagggcttcctcggcgctcttcacagcagctgcgtcgtcgctgtcgtatctaacagtccatccatgagaaaccccagggaaaatcttgacaaagtarccaatctctgagttagtggataggacctgctcaaactgcctgaccagttctggtggggacgttctgtcagtttcagctccaagtacagcgatgggacatttaacctctttgatatcatcaacagtcacaaaagaagggtgcgacataacagctgcctggatctcattagctttcgccaactctgctactacctttgcaccccagcaataacctgcagcg

SEQ ID NO: 9655 - DNA, 334 bp, Artificial Sequence
  Description of Artificial Sequence: Synthetic probe
gttgccagtggcgcggtacttggcggccgtctcctcagctttgaggatttcctcgccacgcttcgcctcaaccatggctctcttctcctcagcttccttgtggatgagtgcagccttgttcttcatcttctctgcgtattcagccttcttcttttctaattgctcctcaatcttccttagttgagcttcaatgtttgctttcttggtgttctcccatgaaagaatagcrgatacctttttagcagccttgttctcagcctttgtcttctcattctcctcccatgctttaattagagagttcctcttctctgtttccacccttgtgagagcaata

SEQ ID NO: 9656 - DNA, 548 bp, Artificial Sequence
  Description of Artificial Sequence: Synthetic probe
tcgattaatacaccacttctcatatatttatcttttgattgtgtaatatcaccagatccatggatttcactattgcactgttacagagwctggatgaggaggagggctccgatcaggagagccttgcacagcttgtagaagctgcgtacaaggtctctcagaagccatggcatggctggattgcttaggcggcatatcacaaggaagctcatccccgagaggaagatctttgtaggctggcttgtcgggaaggacccgagctgcagtgttctcaaggacgagatcgaaaggctcgtcccgctgcttcagccctttcttgtcgacatctatgacatgctggccaagctcagactggataggctgaagcaaatctaagatggtctgagtttcagaattccgattctgtgaatacaaccttggggaaggtttattcatagcctggggtgaatgacagggttcacatctgcttctctttgatggtgcctctgatggattgatgtacatctatgatctggctatcgatgtcatggtgttagtagtttgttatg

SEQ ID NO: 9657 - DNA, 751 bp, Artificial Sequence
  Description of Artificial Sequence: Synthetic probe
tcaagaaatttatagaaaggcaaatgtttgagatcactatacaagcagcaattggttcaaaggttatcgcaagggaaactctgtcagcaatgaggaagaatgttctkgcgaagtgctatggtggtgacattactcgcaaaaagaagttgctagagaagcaaaaggaagggaagaagcgcatgaaacgtgtaggatctgttgatattcctcaagaagcattccatgagcttctgaaggtctccagttcaaaatagatgagctgcagattagtgttgtagagcctcgtgtagtcatcttccggaaggtcttcatcctagttcagtggctacataccgctgtttcttgctaaaaactgcagcaggatgttgtagattgcaccactgcaatatttttgctccaggcaatgattacacgctgccccacagagcttatttcaatttgagaagtttcaccttccgtggtagtgacgcggtcgctggtgttgcaaaccttgtgtttacaggttgttttaattaatggcgtctacagcagagccacagtgcagaaggaccttcaccactgcatcctgtcaccctgttataatgattctgactggaaaattgacaaccatacgccgaataccgtgctttactttactgcacagttctggaagcacaatgccggagaatgctactaacagttttgtatactgaaattttcatgcacggaatgacgttgattgtatcatacttggttccattttgttaagttt

SEQ ID NO: 9658 - DNA, 444 bp, Artificial Sequence
  Description of Artificial Sequence: Synthetic probe
ctacataatttgtggctgacaaacttatttatttctgcacaaagcaatattcaagttccrttttggtttcagggagccacaatggagtacccataggtgtagtgtgtatgcattcaggaggtcaagatttgcctctagctatattacttgagagcaacaaactgatcatcatggtcctatctcttcagtgttcaaatgagaccaatgagttaatagctgggcaaattaatagaccatttgtgttaatacatgttctgaggatggaatggtggtatttgctgcaaagagaatggaaatagtgccagctatcatgcggaattttctcttatttcattcaagtgtagcctctcattcaggtgggaatgattcatgggttgccttcttcctctcgcgttgcgctacatgcgattccactacaggcagtgaatggatggtgagctagat

SEQ ID NO: 9659 - DNA, 557 bp, Artificial Sequence
  Description of Artificial Sequence: Synthetic probe
agatgatgccggggacccctcctaggtgtgataaatccgttctcctcttctcggtcgcaatcaaggtctctatcggaatgtcgagagacatcatatcatggcgaatatgggggttgccgatagtgttgatttcamcagctccgtccacctcgattgagcatggcagctttccaccctgatagtttattggccacgctatccaccggtcgagctagtatgatgttccaaattgaacgctcactagctcgtagtagtacatatgatgcacacccgaaaacgcagcgcggttcctgatccatttctccttggaagttgggactgaatctactgcggctgttggtgcggcggcaggaacggcagcccgcggcgagcccgcttcatgaggttatactccaccagccccggcacgtccggcacgatctcccgcacgccgtccagagcgccgaaccgctccgcccaggccgccaccagcggcgtcctcgccgggtcgatcgtcctcacgccgcacatggcctccgacgcgcgcagccacccgatgaacccgcccagcgccacgt

SEQ ID NO: 9660 - DNA, 479 bp, Artificial Sequence
  Description of Artificial Sequence: Synthetic probe
tgctggcacatctcttgcaatgcttgcccgcatcttctggagctacttatactacttcattatgccatggttctgtctctgcactggtgtgttccttgtgaagaccatgaagaggrttctcctgggtggaccaaggagttacgagaggcacccgagtcgaaaccactacttcctgctcttcctggcggtcgtgcagttcccgatgctgttctggcttggcaacatcagcggttgatcttttgtcttatagttgagctcggtgacttgaatcggtttttgggaggatgctgtgcaggataggctcgcggttaacttttctcggacaacttcataatagcatactgcctaatgcttagtctattgtgaagctgctagagatatacgcggataaacaaatgaaagacgcatgtaactacctttttatgttttctgttggaggtgacctatggccacttcagatgggatggagatgacatgta

SEQ ID NO: 9661 - DNA, 348 bp, Artificial Sequence
  Description of Artificial Sequence: Synthetic probe
acagacaatcccaatgccttgcaggaacttatagaggagcatgagaacattckggaaaggaggaataatcctgacagtgaaataacatgggaggaatacaagtccatgaaatttacatctcatgttatacatgaagcattaaggttggccaacatcgctcatgtaatgtttagaaaagccattcaggatgttcatataaaaggttatactatcccaaaaggatccaaagtgatgatttgtccttccgctgctcacctagatcccgatatttacaaggaccccaatgtattcaacccttggaggtggaaggatattgtggaaccagtgggaggctcctccaaggacttc

SEQ ID NO: 9662 - DNA, 420 bp, Artificial Sequence
  Description of Artificial Sequence: Synthetic probe
aaatatcaaggaacatgttcttattcctgaacatcaagtgcttactactgaggaaaagaagacattattggagcggtacactttaaaggaaactcagctaccgagaatacaaattaccgaccccatcgcgaggtactacggcctcaaacgaggacaagtcgtgaagatcatcaggcccagcgagacagctggcagatacgtcacatatcgctatgtcgtatgacaaagttacacaagtgaatgaaggaaccgtaaacatggtgatttttgcaggtatacacatgrcatacacatacccatttgcttggcgaaactggcatttctcaatacagccattcttaaggatagcatggatgtacaagtggattcttaataagctgagtgtatggattataagtaaaatcctcatgttgttcaatt

SEQ ID NO: 9663 - DNA, 389 bp, Artificial Sequence
  Description of Artificial Sequence: Synthetic probe
cgaaggacattcccagacatgttcctgtggcaggaccatacgttgttacatggcttggtttacccttatgaggccacccagttgaaaagttgtcccaaatcaaatatttgtagtgaagagtcagtgggagaacatgagggtgccactgccatttcttccaccatatctagtagtactaccagcgaagtactagatcagctcaatcaagctacacaccctcagacatagcattttcatcctccatcttgtccttaacctcagcagccttttctccctctttcttgtcytttccttccaccatattgtcctcgacagccacatcagcatttccttctaccatcttgtccttggctccatcagcatcttcttccaccgtatcttcaatagcc

SEQ ID NO: 9664 - DNA, 440 bp, Artificial Sequence
  Description of Artificial Sequence: Synthetic probe
tgtgcccagaatcttgataatttcaacgagctgatcaactccactttcaccaggaaagagaggctgtcctgttagaagttcagcaagaacacatccagcagaccagacgtcaattgctgatgtgtactcagtggcaccaaaaataagctcaggtgccctatagtacctagagcagatgtatgatatatttggttcacctttcaccagaacttttgcacttccaaaatcacagatctttagctgatgagtgtgtgggttaaccagaagattttgtggttttatrtccctgtgacaaacaccaacagtccgatggatataggccagtgccctaagaatctgataagtatatagcttcacatagatgagtggcatgcgttggttcatcttgttgtagtgtctgatgacacggtggactgtctcaggaacatactcaagcacaa

SEQ ID NO: 9665 - DNA, 478 bp, Artificial Sequence
  Description of Artificial Sequence: Synthetic probe
tattggcatggtactctagagaaggttttgttgtgaaggctgagcagactctgaacagattcctcgagaaaggtgggaaccccaaaccaaacacctgggaaatccttgcctccgcatacctgaaggataaccagttgtctgaagctctgtcgtgtatggagaaagccgcggcagttactagtgcaagcagatggagaccaaggccagccaatgttgagagtctgctggcgtatttcaaggagaagaatgacacggagagcgtagacaggctgaagactgtacttgaaagtagaggatgtgctgagaaggaagagtacaagtctctgattaacacctatgcttttgcgggcacgtgatggtgaaccgayaacatgatcagtaagaagtccttgaaaaaagtgaatcgccttgcttgttgtaatctgaatctcatgataacccctgcagctgagaattcatgcggtacagttatgcttat

SEQ ID NO: 9666 - DNA, 401 bp, Artificial Sequence
  Description of Artificial Sequence: Synthetic probe
gtgtatgaaggaacatttatcagccttccttgctctactttctgaacaaacggttaccggaagtaaatgtaaaagagaacattttgttgctcctgatacacatgtacatacagcattaggttgagtggttaggattctgcagaatgcccgagccggtcacsgtccacaagctgataattcttctaactgaagtagtggttacacaatacatttttcatttgactcccaattcaagcttggatacggacatcctcctagtagtgatgtgtaggtccatcacagttttcccttggtgctggactgctggttgcatagagtgtgtgagtgtaacataacctgttgcgatgttcttaccagttagggcgagcaactcgctccccaatagaatttgtctgtatgta

SEQ ID NO: 9667 - DNA, 345 bp, Artificial Sequence
  Description of Artificial Sequence: Synthetic probe
gagagcaactcggacgaggaagaggatgttgttgtgacgcgcaagacgactcgtcttgctgcccgtaaggtcgagagcaagcctcgaccagggcttcgccggagtcgaagaaacatgaaaagtgatgatgaagagatggtgcaagcaggacaggttacacctgaagcratgacgaagaaaactacaaggcaacggccgacgcccatatccaagcagttctccatgtcaggctctgaagatgatgattcgcagtcagttgtggactctgagtcaggctctgaagatgatgcagctgtagaccttgcgtcaggctctgaagaggatgatcagtcagagcctgatgca

SEQ ID NO: 9668 - DNA, 411 bp, Artificial Sequence
  Description of Artificial Sequence: Synthetic probe
tgttgatccagacgaatactcttatgaggagctggttgcattgggtgaagtagtaggtacggaaagcagaggtgtctctgctgatactctggcttcattaccktcggtaacttaccaggcacaagataagcaagacagcaacatggaacaatgtgttatttgccgagtggaatttgaggaaggtgaatcattggttgcacttccttgcaagcattcataccattctgaatgcataaaccagtggctgcaattaaacaaggtatgccctatgtgcagtgctgaagttcctacttcagatagcagccaggcatgacattctggtgtagtcatcatcatggaagcttaatgggaagaaatagggtcagcttatattttctgctgttggtgagattcaagcattaggagctgctg

SEQ ID NO: 9669 - DNA, 552 bp, Artificial Sequence
  Description of Artificial Sequence: Synthetic probe
aacacgattcagaagaagggtgcgcctcgtcgattcccagtgggcttctctgggttcgctttcaacagtacaatgctctgggatcctcagaggtggaaccgcccggctatggattctgtcatcgtccactctgggggtagaggtggtttgcaggagtcacgatttattgagaagcttgttaaaagtgagcgtcaaatagagggccttccagacaattgcaacsgagttatggtctggaatttcaacttggaacctcctcaactcaactatcccgccggatggtcattgtggaacaaccttgaagccaacgtacctctaacataaaactatcgccgtcgttgccgcaccgtgtcttatcctacaggtcatttctcttgacaagacagaagcgtgataaacttttgtaatgggacagaggttctgaatatcggctttgtgttgtccacaagtgaccgcggcgctgctaactgatgtcctccctgaacagcctgcacaacaggatcccacaaaggcgtagtgccgtgatctgcctccagcatattcaactgcctg

SEQ ID NO: 9670 - DNA, 334 bp, Artificial Sequence
  Description of Artificial Sequence: Synthetic probe
atcacgcataaccttgcaggaagtaatagttccgtactcagcgaaaagttctcgtaacttttcatcatcaacagtatcatccaagttcttcagatacaagttggtgttttgatacttatctgctgcctcttgaaggttcttttcaaacttctctttcaactccatctccctttcagattttttctgagctcttccgacataccattccttatcactaaatttcttgccattcaagtcttgaacagccagagcagcakcatctggactttcaaaattgacaaatccaaaacacttggatcttccatccccgtctcgcattacaacaacacttgtt

SEQ ID NO: 9671 - DNA, 504 bp, Artificial Sequence
  Description of Artificial Sequence: Synthetic probe
cgctctctttggtgacttcctatatctatcccttcagagatggctattcccctatgactaccaagtggttcaagagatgcacaaggatgacccccacgaatacagcatgatacatctgccagagaggagccatttgagccctgaagaagcgagaagctatgcratctccatgcttccccgagagaactccaagcacaccggttttgctttcgactccccaggatatgagtcgttcttcgcgtcacagcaaggcgtctgtgtgcctcacaagccatgggacgtcgcaaggagagccagcatgaagcagcagcgacagcagccacaacggacgggaagatcctaatcccccttttcgtgtaaagttctgtacatcatgatcttttgcatgcagaccacatgagtgtgtataagtagccttctagcctttatttgttttgtcacccattatgctggccatgttagtaggtggccattgatccagttagctgaagaattaggtaggca

SEQ ID NO: 9672 - DNA, 646 bp, Artificial Sequence
  Description of Artificial Sequence: Synthetic probe
gagaggttcttggtgaagatcgagttgtcattactaatagtgaccttggcaaactccactacatgtgcatggtcgttaaagaggttcttaggttgcaccaacctgctcccctaataccccgcatggccagagaagattgtaaaatcatgggttatgacatgcctaaaggtactacagtattcattaatgtcttcgcggtttctagggatccaaagacctggaaaaaccctgaagagtttgtgcckgagaggttcgagaacaacaatgtggattacattggcacacattatgagttcaccccattcggggcggggcgaaggcagtgtccggggatgctattcggcacgtcaaccctagagattgcattgacaaaccttctctaccacttcgattgggtgcttcctggcggggcgagcttagagtcactggacatgtctgagaaattcgggatcaccgtgggaaggaaatctgacctacaacttgtaggtattccacgtggacattttaacggcacatagacatgaatgtagacgcggcatgcagatggatacatctattatgtcttcatatactagtatgtctatatacacactgagtggaacctaccagaataagagataagagaatgttgcattcctatgcttct

SEQ ID NO: 9673 - DNA, 414 bp, Artificial Sequence
  Description of Artificial Sequence: Synthetic probe
tgccaggagaagtttcttcccatggtggagatcagtattatctgcccggtctcctgtcaaggtgattcccacacaatgggctggttctactaaaggcatggatagtgggatagcttcgaagaaacctactctggagctggatcgtaagatagctttgaagaaagcgaccaccgacggatctactgcacctcctctgatgagtcgagttccccaagcagcattcaatcatcagccctgtatgctgttcagtacagcggctaattatcagcccagaaggctgtttggtgcagyggttaactatcaacccagaaggccgtttggtgcagctgttaactatcaacccagaaggctttttggtacagcggcactgatgctgctgaaagtattgaagaagaaggcatgagtaaaaggtga

SEQ ID NO: 9674 - DNA, 607 bp, Artificial Sequence
  Description of Artificial Sequence: Synthetic probe
gaggtgatggagggagagaggagcgaggagtacgcgcggaatgctgtcgagtggaaggagaaggccattaacgccatgggtgaaggtggcagctcggacaggaacatcacggagtttcttcgccaactcaggtccaagaaatctgagcaagactgcttccacacccatcagacagagccgatgccgacccggacgacgccctccgcgcggttctattcgcatcaaacatggatatggtgaaggtgctggcttggaagagcgtgatgggtatcatcgcgtggttaataagaccttcagaartgatgaagaaggatgccagttctataatgactatactaatggttaaaagggtttagtgttagaaaggaagaggtgaaatacttgctaggcacgaggacatggttcagacagctttacacgtgttttaaaggacactatacatttcgaaaggcctaacctgaagagaacttcaaaggctcttactcgttgtggatgctcaattcatttagagatcgagctaagtgtagctaccggcgaatggttcatggatacgtttgaccacaagcataaccatccactcgctaagcataaccgtggattgatacca

SEQ ID NO: 9675 - DNA, 505 bp, Artificial Sequence
  Description of Artificial Sequence: Synthetic probe
gctatgagtttggaagagttgctgccacgaagtcagcagaagtactcaaacataatcatgcttagatcagccttggtgatatcaaccctcattgttgctctrtcggttcccttcttcgcacttgtgatggctctggttggttctttactcgccatgcttgtgacctacattctaccatgtgcctgctttttggctattcttaagacaaaagtggcttggcatcaggttgtggtatgctcattcatcattgtcgtaggggttacctgcgcttgcgttgggacatactcatccatctctgggattatccagaactactcatgactcctcagaattaaatacatataagggcttattcggtttgattggttttgaaacggattgagggggattaaacaattcattctgatccacttgggaagaggattaaccaagcaaggcccaaaagagaagattgcttgctcaaccacattattgtaagtgtaattatgcatatctatgagcggag

SEQ ID NO: 9676 - DNA, 541 bp, Artificial Sequence
  Description of Artificial Sequence: Synthetic probe
gtcattgctccagatagtatgttaggaacatcagcagatgcgaagatcacatctgtcggaagatggtctgtatttggtgaagtgatagaagggtctgttgcagtaaaggaagcagcaccaaagcaaaattgtgctgaagtgcaggaagaaaatagacaaaatcatgtggaggaagtcacttgttctacaaacacctgcgattcctgtgcatgctcgggtgcagaaagcgcagcacaacaatgtagccagcaatgtaaagatccatctgatgcacccacagattgcgctgatgatactcgcccrgaagcacctcaatctacacttgtgagaagaaatgtggaagggacagtagaaacaaatgaaattggtgcagcaacaccaatagcaaaaggtcagcaggcaaatgtagttactaggagagcactaaatgttgacaggattctttggggtggtctggccgtaagctttgccacaacggcggccgtacttgtgctgcttacctacaagatttctaacacttcttcctattaggctggtgctt

SEQ ID NO: 9677 - DNA, 395 bp, Artificial Sequence
  Description of Artificial Sequence: Synthetic probe
acatagaggaccagaacccatggaagaagacggtggtccctccaagcaagttcatccggtccatgctaatgcaatggctgtggacgagccaggaaatgtcaagactgaacacgggagctctatcaagttggcagacccaccagccatctaccagaagccatgactgcattgctaggccagctcgattscttgtgctcctacatgttttgacggtcgaaaaacgaagtgaatcacccatacaattttttgcatttcggattgaactggcggtctacccatctgtagatgtgcttctgtaggcagtactttgaggtggagacaatatatagtctgacccatcaggtagcgtggatcaagttgtaatgtatagtcgaactatagtcgattaagtgtac

SEQ ID NO: 9678 - DNA, 417 bp, Artificial Sequence
  Description of Artificial Sequence: Synthetic probe
cgcgtgaccgtcgcttccgtgaagaacttccagctgaccgccgccacgcagcctcctgctggagccccaactccgccacaccctgctcctccaacaactccaccagagcatgataaggtgatactgcagttcggcaaggttgccaaggatatgttcaccatggacttccgctacccgctgtcggccttccaggccttcgccctctccctgagcagcttcgacaccaagttggcctgtgaatagaagaatcgccttattcsagaagctggtcatcggaaggtaaatgctggacgtccccaaaatagttggggatgccattgtgttgttgtatgtcgttgatgatgccattgcgacttaaaaacaactggaagcaaaggaaagtgctgtttgtttagcattgggaactgttgtgtgtgt

SEQ ID NO: 9679 - DNA, 552 bp, Artificial Sequence
  Description of Artificial Sequence: Synthetic probe
atccaacgtgaccaccctcctacgcttcctcgccaagataagcctcgacgccgacgacctcgtggcgctctccggcgcgcacacgctcggcatcgcgcactgcacctccttccaggagcggctattccccaaccaagaccccaccatggacaagtggttcgccggccagctaaagctcacatgccccgccctcaacatcaccaacaccaccaacaacgacatccgcacccccaacgtgttcgacaayaagtactacctcgacctgctcaaccgccagggcctcttcacctccgaccaggacatgcacaccgacgccaggaccaagcccaaagtcaccaagttcgccgtcgaccaggccgccttcttcgaccagtacgtcttctccgtcatcaagatggggcagatcaacgtgctcaccggcaaccagggacagatacgcaacgactgctccgcgcctaacgccgcccgcagcagcaacgacgagctgccgtggtccgtgctggagaccgtcgcagagactttggcgctgtagtttactgatactagtcgatc

SEQ ID NO: 9680 - DNA, 521 bp, Artificial Sequence
  Description of Artificial Sequence: Synthetic probe
ctgctgcttcctgtaacaaatcctacaaagccagtgaaactcgaggttttcgacgaggatagattcacggccgatgacagcatgggaaccgctgagttcaatgtaactgacatctacgatgctgcaaagctggatctgaagcatgcctctgacgggacaaggatcaaaaccatctaccctgttggcacaaactaccttggcggtgagagccacgtctcgtggaagaatggcaaggtcgtacaggacttgattctgaagttgaagaacgtcgacagcggctctgtcgtgctgcagctggagtgggtccatgtccctggcgttacgctgtaagctgcttccgacygaagaatgttactgcaacctggtttcatgaggctacagctatggtcggtacatgttcctggtgtcacaatcgtaaacaatgcgtggatgtttggtttgcagtgtataaggtgtgtgtgtgtgcgatgttatttcggtgtgatttgtgtactgtatttgtagtacatcctggtgtggtt

SEQ ID NO: 9681 - DNA, 576 bp, Artificial Sequence
  Description of Artificial Sequence: Synthetic probe
gcccagtcagggctaaacatgtcttagaataactgacgtattaagatgcatgcgtacatgtcgggccacacttagaatcccgcatgtgtatatgcgacaagtcacatatgtatttatgcagctgattaattggaagatgatcatgcatcagtcgtcaacccattgccagcttatcattttccgcacgagaaaacacaacctggcattctccaactgttttccccttgaaaccagctgcactgtataggaagtagtactcccatgtacgtatgaacttgtcatcaaagccaagtgccaaaatttcatctttgttatccatyaagttgtccctccaacatcccagagttcggtagtactggtcccaactaatatcctcgaggcgctttatgcacaacccatttgaagcggaaaccgtctttatcctagacaaagaaggaagtgaacccccagggaagatgaactcttttatgaagtctgtgcttctaatgtattcctcatagagttcatcgtgcattgtgatggcctgcatggatcacatatgtacatatgcacatagaactggtagttagttgcttt

SEQ ID NO: 9682 - DNA, 933 bp, Artificial Sequence
  Description of Artificial Sequence: Synthetic probe
ggtttataaagctgggatgggtaatgctggagctgctttatccgtgagcatctgtgactgggttgaagtgactgttcttggtctttacattaatttctcaccttcttgtgagaaaacgcgcgctccaccctcgtgggaagcttttagcgggattggcagtttcatgcgtttggctgtaccgtccgctcttatgatttgccttgagtggtggtcttacgagctgcttgttctgctttctgggatcttaccaaatccagcacttgagacttccgtgctttcaatatgcatatctacagtggtactgttgtacaatcttccttacggtatcggaacagctgcaagtgtgcgtgtctcaaatgaactaggtgctggcaatccgaacggtgcccgcttggtggtaggtgttgcactgtctattgtagcttgttcagmagtcgtggtgagcgtaagtcttctagcattgcgccacttcattggaattgcattcagcaatgaggaggaggttataagttatgtcaccagaatggtacctgtgatctccatttcagtaattacggacagcctccagggagtgctttcaggtgttgctcggggcggtggatggcagcatctaggggcgtatgttaacttgggcgcgttctatcttgtcgggatccccgttgcgctcttttttggttttgcaatgcaactaagaggaatgggattttggattggcatgatagctggtggagccatacaggtcactctcctatctgtgattactgctacgacaaagtgggacaagatggctgacaaggctaaggagagagtatttgaggaaaggctcccaacacaataaaccttgaacaactaccatgccaaacttttgaaaggatgaaaatgaataagattctgtaacttcctacttgtaggatgacaccggcatttgcttgg

SEQ ID NO: 9683 - DNA, 286 bp, Artificial Sequence
  Description of Artificial Sequence: Synthetic probe
ctgcaggtcgctttcaaaacaaaggtgttccatccaaacgttaacagcaatggcagcatctgccttgatatcttgaaggagcagtggagtcctgcactgacaatctcaaaggtcagcttgctactcttccattctaattcctagtaaatcataacagcttcacacgttgaattcaagaacggaactaaacttaatctgtcgggycaaggttgcaaccccatgttctctatgctggcttagtaccaaattctatagcaaatttactttaatgactccagttgttaac

SEQ ID NO: 9684 - DNA, 493 bp, Artificial Sequence
  Description of Artificial Sequence: Synthetic probe
ttattctagagaggaagagttgtactgtgtgtatgtcccaacaaaccatctttacattggggacatgtttctggtcacctcgagcgatgttatgagaccaaacttatctgttcgtgaaggcatcgagattgttgtctctggcggcatgtcaatgcctcaagtattatcaatactggaaacagaggacaaccaattgaacagaatgagatacagtcgaagctgagatagctctaacatgtcagattgtttttgtactctgycattgaaccattgatggtcacagtaagcaccagaattggatctgatctgatggataggttgtacaattattctgataggaatgtgcaatcttgtgtacactctctcgagcattcagtcattgcatactccctcgagcggtcactcagaccataatctgaatgtgtgtgggctcgcttgtgcaagaagttaagagtcgtggtatgtttagtaagttagagttgactcctgagtg

SEQ ID NO: 9685 - DNA, 413 bp, Artificial Sequence
  Description of Artificial Sequence: Synthetic probe
ggcaagagtcagcaactaattgtatcttcgatcaaagaaacggccatgagtccagttcttcctcaatgtgatgggatacaagatgactataataatgatcagtttttcttcccaggagttccaacagaagactataacacccctggcgaatcttcggagtatcgaactcccacgcctgctgttgcaacaccaagaccaagaaacgatacaggggatgatgatgatgatgatgagcctcctcttaatgaagatgatgacgatgacgatgaggcagatgacttcacggamgataatgatgaacctaacacacaacaccttgtccttgcacaatttgacaaagtgacaaggacaaagaatcgctggaagtgcacattgaaggatggtatcatgcatttgaatggcagagatgttct

SEQ ID NO: 9686 - DNA, 673 bp, Artificial Sequence
  Description of Artificial Sequence: Synthetic probe
gagttcaaaaaggtagattttgcatatccaacaagaccagaatgcctaatcctgcaggattttagcttggacgtcaaggcaggaacaagtattggcctggtgggtagaagtggatgtggtaaatctactatcataggtttgatccagaggttctacgacgttgatagaggtgcagtaaggattgatggtatggatgtgagggagatgaatattctttggtttcgaggatttacagctctagtcagtcaggagccggcgatgttttctggtagtgtcagggacaacattgccttcggtaaaccagaagctgatgaagaagagattgtggaagctgctaaatccgcaaatgcacatgaattcatctcatctctgaaggacggatatgatactgattgtggagagcatggtatccaactatcaggaggacagaagcaaagaatagcaattgcgagggcaataatccgcaatccagctatactactacttgatgaagcaacaagtgctcttgacgcacagtcrgagcaagtggtgcaggaggcacttgatcgaatcatgtcagggaggaccacaatcgtggtggcacatcgactaaacacgatcaagaacgcagactcaatagccttcttaggagagggcaaggtgattgagcgtggtacttatccacagctcatga

SEQ ID NO: 9687 - DNA, 201 bp, Artificial Sequence
  Description of Artificial Sequence: Synthetic probe
gattgagaatctgtacgagttgacgcccagcttatgcatgatttccacatcttcctgtttcggggacaatggcagcagtacacattggtatttggtacaaytaagacgcatgatatggggattactagggattgtctgtctgctgaatctgtaccatgtaccggtggtagtgattgtctgctacatccccattacgtccat

SEQ ID NO: 9688 - DNA, 121 bp, Artificial Sequence
  Description of Artificial Sequence: Synthetic probe
ggagataaaagaaggatattgaacccgccacgaatgctaccgacgtcactcctggaacacraagaaacaccaggcaaacggttggtttcttacaccagggaaaagttctacaactctgcac

SEQ ID NO: 9689 - DNA, 121 bp, Artificial Sequence
  Description of Artificial Sequence: Synthetic probe
tgaaatatgaattagcaatagttgtgtctagctgactaccttattgaaattgatcaatgcrttatcaagaccacctaaagtactaaggaaatagctatcaagataatacatatctacatat

SEQ ID NO: 9690 - DNA, 121 bp, Artificial Sequence
  Description of Artificial Sequence: Synthetic probe
agaatcttgaagattagcagggtaccaactcccttttttcctaccaatgagaggccacatyacaccccacgagaggatgccgcctagcagaacagacacattcacaatgtgtgggcagatc

SEQ ID NO: 9691 - DNA, 121 bp, Artificial Sequence
  Description of Artificial Sequence: Synthetic probe
acttgaattactagcctcagcacatgacaaggtactgaacacccaactgacagtcgtcctractggtgcccctggtatggtgtgtagtacgccgtcggggacaccaaggcggctgtaagcc

SEQ ID NO: 9692 - DNA, 121 bp, Artificial Sequence
  Description of Artificial Sequence: Synthetic probe
tatactatagtactccaacaataggcgtcaagaggaggggatgagtaagttgcatgattgrtgatctcgctcaagtcaaacacacctcctcaatcctcatccaccctttcttgctcttacc

SEQ ID NO: 9693 - DNA, 121 bp, Artificial Sequence
  Description of Artificial Sequence: Synthetic probe
tgaaatagtatgtgtcatatttttatgtgcgtgtttcgttgcagagcttgccggtgcaggygcgagcccaagcggcggacactatggcgacagaggcgcggtgccgggtgcaggacccggt

SEQ ID NO: 9694 - DNA, 121 bp, Artificial Sequence
  Description of Artificial Sequence: Synthetic probe
caacattcacatgcagatctttctcctctgcgaaagggtaggcctgcacatgatccttccrgtagatagtgggcgggtagaaagccacgtacccgccgatctcccacaagatccgctgagc

SEQ ID NO: 9695 - DNA, 121 bp, Artificial Sequence
  Description of Artificial Sequence: Synthetic probe
cagttttctccaacatcttatcttcagccctgtctaaaccagtgcagtgtgttagctcggytagccaccatcgtagtcagagaatttggcagatgaatgtgagtgttggatgggaccagat

SEQ ID NO: 9696 - DNA, 121 bp, Artificial Sequence
  Description of Artificial Sequence: Synthetic probe
tttatggacaagacaatggggcaggcagactataggttgagatgagaagacaaaacaatgyaatcaaactacagatgacaatattcaaacatgagcagccgagctaacaaatgcgaattat

SEQ ID NO: 9697 - DNA, 121 bp, Artificial Sequence
  Description of Artificial Sequence: Synthetic probe
tgattgcatggaagtatgcgaacagaatctccctcttcatattcaacaaggcaaatatagyatctgcattgtggaggaaggattattagtaaaaaaagcatggttgtttaaatttattcaa

SEQ ID NO: 9698 - DNA, 121 bp, Artificial Sequence
  Description of Artificial Sequence: Synthetic probe
tgatgttctccaagtacttggattactatatattgtacattctcttttcttgcatctgatmctgttatattacgttcagtcgtgggaacctgggtgcttcgtttaaataatctgaaggaaa

SEQ ID NO: 9699 - DNA, 121 bp, Artificial Sequence
  Description of Artificial Sequence: Synthetic probe
catttactctctgtatggtactcaataaattggcaagttgaaaacattatatgcagccaaytggcgtacgatacgccaccatcaagtagcctcctgatcatcctaaataaatcatgattgc

SEQ ID NO: 9700 - DNA, 121 bp, Artificial Sequence
  Description of Artificial Sequence: Synthetic probe
tttggagttggggacactgtcttaaactaaaacatatacttcatgtcctgtcttacgatgygacttatctcagtgaatattatatgttcttttgagcatgggacatctgacagcttaaacg

SEQ ID NO: 9701 - DNA, 121 bp, Artificial Sequence
  Description of Artificial Sequence: Synthetic probe
gtttttctacacaaagatttgcctgtgagacataattgcttcctgatgtacctcaactatrtatagctgacatatttggatatttggaattcactgaaaggccatggactgcatttcagag

SEQ ID NO: 9702 - DNA, 121 bp, Artificial Sequence
  Description of Artificial Sequence: Synthetic probe
ccgagcgagggcggtgcctcctgttttcccggtcaatgaagagttgtgttgcgctctatgyagctagctagacttccagaccttgactccagccatgaacatgtactcctactccgtgcta

SEQ ID NO: 9703 - DNA, 121 bp, Artificial Sequence
  Description of Artificial Sequence: Synthetic probe
cttgatctgtgtcgtttacagccttgcagattagttttgttgtatctggcgcttacgaatyctccttttcatgtgtccacaggagaaactgatccaagcagcctgggtcaacatctgcgag

SEQ ID NO: 9704 - DNA, 121 bp, Artificial Sequence
  Description of Artificial Sequence: Synthetic probe
tgcagagcccagagttctgcgggaaactcacatttccgctgtctcttaagcaggtaaagayccaactgacatttaatatcctgacgtgtattttgttctcatctcacgtcctaaaataact

SEQ ID NO: 9705 - DNA, 201 bp, Artificial Sequence
  Description of Artificial Sequence: Synthetic probe
tcggcaaggagaatgcgcaaacagagatcagcaggatgcagaaagagatattagtgctgcaaactgagaaagagttcataaagagctcctatgagagtggrattgcaaagtattgggatcttgaaaaggaaatcaatgaaaaacatgaagaagtctgctacttccaagaggagttcaacgaaagcgctgtgattgaagatg

SEQ ID NO: 9706 - DNA, 121 bp, Artificial Sequence
  Description of Artificial Sequence: Synthetic probe
tacgaagtggctgtcatatagcagattttgtacaaccaaaataatcacattgcatagcaaracttttcaagcattaaccattttcaatccatttaaattcagcaaacttgatgttccataa

SEQ ID NO: 9707 - DNA, 121 bp, Artificial Sequence
  Description of Artificial Sequence: Synthetic probe
gtctgggcatcctgcgctcccggcaggtgtgcacgccccactatttcaagtccgcacattytcgcgattccaccactcgccgccccagcaatcacccgacacctgctctctctttctctgt

SEQ ID NO: 9708 - DNA, 121 bp, Artificial Sequence
  Description of Artificial Sequence: Synthetic probe
ggaggttctcagtgagcgacaaccctggcactttgcaaaaactatctgaaaatctaggatrccactaaaagtaaagatcttctgttggtagctggccaaagatagattaccatcacatcag

SEQ ID NO: 9709 - DNA, 121 bp, Artificial Sequence
  Description of Artificial Sequence: Synthetic probe
tcctagggaagagcatacacctcaatatccaagtaagcaattaaaactctatacatctgaytctttgaacaaaattgctagaaataaagatagacatgtaaatctgatccttcaacttaat

SEQ ID NO: 9710 - DNA, 121 bp, Artificial Sequence
  Description of Artificial Sequence: Synthetic probe
tcttggactgactagcccttcagtaacatgcttcgccaaaaatccaaaaatatttgcctaraaacacggtgtttttgacctgcaaatcgtctctctttagagctctctttctctaggtacg

SEQ ID NO: 9711 - DNA, 121 bp, Artificial Sequence
  Description of Artificial Sequence: Synthetic probe
agtctggaggagttgaaagttgagaactctccaggcttcacaacatcctggctctccgcarcggcagaagttgggagcgaacacagccacttcatgggaacacttcaggtccttgatactg

SEQ ID NO: 9712 - DNA, 121 bp, Artificial Sequence
  Description of Artificial Sequence: Synthetic probe
ggcaatgggcggaggggacactaaattctccaatctttctcgggcatggaaaaaacctgargtatctagctctaagctggtgtcaccttggggaagatccactggggatgctcgcacccca

SEQ ID NO: 9713 - DNA, 121 bp, Artificial Sequence
  Description of Artificial Sequence: Synthetic probe
gcacgtttgcggaagctgatagcttaactaactatagagaccgataatccatagggcagcrgccatctatgaaccgctggatagaatgtgaccaaagccaccatctttccttctgcggccc

SEQ ID NO: 9714 - DNA, 121 bp, Artificial Sequence
  Description of Artificial Sequence: Synthetic probe
cgagtacctgcttcatcacacatccaattcaaatcagctgaccttttcttttgctcaaccygttttctgtcacctgccagcttgtgtggttagctatgcacgacaccaatccacaatctgt

SEQ ID NO: 9715 - DNA, 121 bp, Artificial Sequence
  Description of Artificial Sequence: Synthetic probe
tttgtgcccaaatgtctaatcgctgtgtggaagacaacatgctgccaatgataacggttgytagaggcatgccttgacacctgttaactatagaaccagcaatttccacaaactctacggg

SEQ ID NO: 9716 - DNA, 121 bp, Artificial Sequence
  Description of Artificial Sequence: Synthetic probe
agtgaactaatcagacagctttcaacctgatagctcatgaatagtgttatgctataacttycttatgtcataattttaagtttacagtaatatttgcatggcctgtcatgtttgaccatag

SEQ ID NO: 9717 - DNA, 121 bp, Artificial Sequence
  Description of Artificial Sequence: Synthetic probe
tccccgtacaacagaatttgacatccttaagtggtgggatgtgaattctgcaagatatccracgcttggcagaattgtccgtgatgtgttggctatttcggcatcatcagttgcctccaaa

SEQ ID NO: 9718 - DNA, 121 bp, Artificial Sequence
  Description of Artificial Sequence: Synthetic probe
tagatggttgagcacagtacaatctggccacatgccaaaaagatttctacccaacgaacayaatagttacctgagatttcacttgcaggctagtccagcaaagagtgtgaatacaaaatcg

SEQ ID NO: 9719 - DNA, 121 bp, Artificial Sequence
  Description of Artificial Sequence: Synthetic probe
ggtacctttcaaagtcagggtcatgttcaagcagcatttgagatatcctcaagcgtttaaygttgtgctaggttggacacatgttggccatattcctgggttagctcacttttgtgtcaac

SEQ ID NO: 9720 - DNA, 121 bp, Artificial Sequence
  Description of Artificial Sequence: Synthetic probe
cggaactaccttgattctgctgcaagcaaggaccgcttagaagtagagtagcgccttatgygaatttgaaggaagttggttgtttttgtaatcccgtatggaggtttggattcatttgaaa

SEQ ID NO: 9721 - DNA, 121 bp, Artificial Sequence
  Description of Artificial Sequence: Synthetic probe
tgtatgcctacgtggattacttgctaaatagaaaagccattctagattttccttatcgctrgacttgcctatcaatgctcatgttgtcatgcaagcacatcaccttatttgaattagatag

SEQ ID NO: 9722 - DNA, 121 bp, Artificial Sequence
  Description of Artificial Sequence: Synthetic probe
ttttgatggttgggtagtgcaaagtggacgatttggagttattaaggatattttctgggcyactcaagagttaaaggggagtggacttatcccataaacatataaacatgaagaaatatat

SEQ ID NO: 9723 - DNA, 121 bp, Artificial Sequence
  Description of Artificial Sequence: Synthetic probe
acatcgcaaactgaacacacaaataaagctgccaaaactaaaccagcactgcaaaaatttkcccaagaaaacttaaaacagtgccacagtatctcaggcgacatcagatgtacatacaaag

SEQ ID NO: 9724 - DNA, 121 bp, Artificial Sequence
  Description of Artificial Sequence: Synthetic probe
gatcattcaggtattttcttgcactgcatgcatttgatattatagcaattgcattggcgtycttttactgcaaatggtcaattactcaaagccttttgcatatacatatgtatgcgtgcag

SEQ ID NO: 9725 - DNA, 121 bp, Artificial Sequence
  Description of Artificial Sequence: Synthetic probe
agtcaaaattactggcagcacaatgcacaactggagatgaggcggtgagtattctcagttmgtaaacatgataagattaatcatttgtaagcaacactcagtcaaccaaaaaggaggatta

SEQ ID NO: 9726 - DNA, 121 bp, Artificial Sequence
  Description of Artificial Sequence: Synthetic probe
agcacttgggaagattgtccatcgtcggcgaagtcaaatgcagagagcacctgaataaggyacaagcatcctatatagacactacactacatacttcaggaaaagttcgttgcaataggct

SEQ ID NO: 9727 - DNA, 121 bp, Artificial Sequence
  Description of Artificial Sequence: Synthetic probe
atttggttagatagttgtcaccgtacgtgtggacttgttgcgaaaaaattgatggtcagargtttgggttaaaaatggcttaagagtctaaagtaaagttggtcacaagtagcaaggcgac

SEQ ID NO: 9728 - DNA, 121 bp, Artificial Sequence
  Description of Artificial Sequence: Synthetic probe
gcaagtggtaaaattgatgtaaaccatatttgttgttttgagattatctagaagaaagtaytaatttaaagaagcgtgcaatttcatcatattcatttatagtcatatgaagtcatagtgt

SEQ ID NO: 9729 - DNA, 121 bp, Artificial Sequence
  Description of Artificial Sequence: Synthetic probe
ccaccccagaccccctgcatggtggccatcattgtttgttaatatatcatcattctttttytttttgcagtggttcttgagatatagtattaattaccccaactccgtagttgaatttgta

SEQ ID NO: 9730 - DNA, 201 bp, Artificial Sequence
  Description of Artificial Sequence: Synthetic probe
atcagcaattctggagacctggttatgtccgtagttgatgacaggatatacagtgtgcgtgcttgtcatggatggattagtgtctctgatgggaaactgtrtaacttgctgtgccaccgtatattgtgcctccactggattgccatctcgcaattttgcggcagcagctagccttctcctcttcattctctcctcattgcg

SEQ ID NO: 9731 - DNA, 121 bp, Artificial Sequence
  Description of Artificial Sequence: Synthetic probe
tgatggcttgccagtaattgtggatttttctacaaggtcatgtgactgcaagaggtggcarctaagtggaataccctgtgggcatgccattgcttgctgtagacacgataggattaatcca

SEQ ID NO: 9732 - DNA, 121 bp, Artificial Sequence
  Description of Artificial Sequence: Synthetic probe
tcaagtgctctctgttcatccaggttcccatgtaagagagatcttccacgaggcccaggaycaaagaatactgatgttcccgtgtcaatcgcacaatcaatagcagatgcaataacatcag

SEQ ID NO: 9733 - DNA, 121 bp, Artificial Sequence
  Description of Artificial Sequence: Synthetic probe
tgtagacaacacctgctaggagaaagatgagataggtcagtcaaacttcacagagggcagyaggctaaatgttactacctccgttgcataatgtaagcctttctagcagttcaatggaacg

SEQ ID NO: 9734 - DNA, 121 bp, Artificial Sequence
  Description of Artificial Sequence: Synthetic probe
ggtgatgatactgaacaaccaacatctgggaatggtggtgcagtgggaggacaggttttayaaggccaaccgggcgcacacgtaccttgggaacccagaaaatgagagcgagatatatcca

SEQ ID NO: 9735 - DNA, 121 bp, Artificial Sequence
  Description of Artificial Sequence: Synthetic probe
aatgcaggcattgatgatgaattatgttgggtgaattagaatacccccgttgctagatgcycttccaaaagagatgctacttacacaatgacactgttacacaattcagttcataaccctg

SEQ ID NO: 9736 - DNA, 121 bp, Artificial Sequence
  Description of Artificial Sequence: Synthetic probe
acaaatactgacacccactgcctccgaaataactatgcactgcggtgctatgcttcttaargcagctttgtgatcggtgtaagataaggaccggccgcagtgcactgaccgtgcaatacac

SEQ ID NO: 9737 - DNA, 121 bp, Artificial Sequence
  Description of Artificial Sequence: Synthetic probe
gatccttccttgctttcccttatgatggagctggactcaaccgttggtgaaatcatgtcayctccacctataactctgacactttagaagactgtcttgggtaacttccgcttccctctac

SEQ ID NO: 9738 - DNA, 121 bp, Artificial Sequence
  Description of Artificial Sequence: Synthetic probe
gtaaataagtgccagttctcacaattggagtgttctgtgatgtcaggaagccaacgaaaartttcagcagttgcagaaggtgatatctattcttggagacgaggagaaaagagcattgtat

SEQ ID NO: 9739 - DNA, 121 bp, Artificial Sequence
  Description of Artificial Sequence: Synthetic probe
taagaagaaatcagaactctgaagtaactccatgtctcagtaacctcatcatcataagcakcatggaccacaagtacctgcatcatcataagcatcatggaccacaagtacctgcatgcct

SEQ ID NO: 9740 - DNA, 201 bp, Artificial Sequence
  Description of Artificial Sequence: Synthetic probe
cacaaaatggaatagataatagtagcacgaacacggtcagcaactcttctctggctactccgaagatgcaaaacttgtatgtacaaacttctgtatcacargcagattcagtcaatatatcgttgccagttgaaaagtatctgcccattgagcatggttagctactagccgctgagagtttttattaccttgcttgatagt

SEQ ID NO: 9741 - DNA, 121 bp, Artificial Sequence
  Description of Artificial Sequence: Synthetic probe
gcgggccagagcagcaacagcagcagtatctctgaatccgctgcgagctgattgccggatwagcagtctgattttctccttttcttttcttttcttttgtttttcttagtataaagcgctt

SEQ ID NO: 9742 - DNA, 121 bp, Artificial Sequence
  Description of Artificial Sequence: Synthetic probe
cgcgatgctcatgttgacctggcagcaggatacagttagcacattatgacattatgcagargcagcaacttgaaacagctcaaccaccggcgtagcccgaaacttggaaggacgtgaggta

SEQ ID NO: 9743 - DNA, 121 bp, Artificial Sequence
  Description of Artificial Sequence: Synthetic probe
tgatgttggctacagcgtcagacaagaaaccatcgtcacgtgtaagacatgccaagtcgtyattagatagttccgcatcaccgatgtccaagaacatagttttttaggtgcggacatgatt

SEQ ID NO: 9744 - DNA, 121 bp, Artificial Sequence
  Description of Artificial Sequence: Synthetic probe
tcagggtttgcaaacatgcttggtggctttgttgtcaaggtacatttgtggctctgcaagrtacatttgcattttctctgggttaagatgcacaatgtagatatgtcttggttgttccttt

SEQ ID NO: 9745 - DNA, 121 bp, Artificial Sequence
  Description of Artificial Sequence: Synthetic probe
agaccgattatctaatggagtaatattaagttgaccagtgactgcttcgcatgatgcagtrccttgcggagcatctggagctggagctggagctggagctgggctagtcttagatgtcgtg

SEQ ID NO: 9746 - DNA, 121 bp, Artificial Sequence
  Description of Artificial Sequence: Synthetic probe
cataacgccggttcatcaggcacagagccacaatcaggacattgcatcttgacatatctartggatagaaaagtaagtcgttaagtttcaaaccaaagtctaactcccgaagccacacaca

SEQ ID NO: 9747 - DNA, 121 bp, Artificial Sequence
  Description of Artificial Sequence: Synthetic probe
tcaatacaggacaacgaaaggcaaattgaagaaactgaggcacaagacaatgtatcttacragcccaaaagaaaaggcctgattcagcacaaatcagtggtgatgctcgtcgtacaagtga

SEQ ID NO: 9748 - DNA, 121 bp, Artificial Sequence
  Description of Artificial Sequence: Synthetic probe
gacaaaaggttacagaagtccaaaacaaaatagctccggaccaaactacaatgtcagtggyccaccacaactcggtgcgctgctgacaatatccatgacgcatgcaagcaacgtgcgccac

SEQ ID NO: 9749 - DNA, 121 bp, Artificial Sequence
  Description of Artificial Sequence: Synthetic probe
taaaatggttttgtgaagattgtcacttggctctgaaatttctgtctaagactgtgtcagkccgtaattatatgggtgcacacattcaggcataatcgctaacaacatccaccaataatca

SEQ ID NO: 9750 - DNA, 121 bp, Artificial Sequence
  Description of Artificial Sequence: Synthetic probe
cactagtagattatttattgatgttcagatatagtgtagtacatcacaatgaacacgccgyggagcttcctaggtttggttgttttaaatatttagatgctgcaaaacttgtaaacggtgg

SEQ ID NO: 9751 - DNA, 201 bp, Artificial Sequence
  Description of Artificial Sequence: Synthetic probe
tatatatgtgtcaaatgattaccaggttgtgtgtttttataggttctcggacagtattttctaaggtaccaagcctgattaattagcaaaagaagtcccayatgtatacgtatatgtgaacgattccaaagttctgtaaccatggactataactcagatcatcccaccgtaaccttcatctcagcacgttcttgagattac

SEQ ID NO: 9752 - DNA, 121 bp, Artificial Sequence
  Description of Artificial Sequence: Synthetic probe
gcaaactggctttctccaatgaagtagaggccttggactacaggggcaaacaatcagatargaagttcaaagaataaactgaacactatatagacaagtttgcatgcttcatgcttacttt

SEQ ID NO: 9753 - DNA, 121 bp, Artificial Sequence
  Description of Artificial Sequence: Synthetic probe
ggccacctcagcatctgaccacatgagtgttttcttcaagttgtccactttggcagcaatrttctcctcactgtgaaatccaatagcgctaagtgcatgcttgaacatcccagacccacgg

SEQ ID NO: 9754 - DNA, 121 bp, Artificial Sequence
  Description of Artificial Sequence: Synthetic probe
cccgtggacttggaaaaagctagtactccctttgtctcaaaataagtgatttcggtttatrtagtaaaataaatgactatcatttgtttacatttagacggatagagtaccgtatattgca

SEQ ID NO: 9755 - DNA, 121 bp, Artificial Sequence
  Description of Artificial Sequence: Synthetic probe
ttttagtcttcggagacaaaatttggttgtttggttctcgtacgctagggatgatttctcrtctctaatcatctctaacaccagtaataactgctcgctgtttggttcttgttccgccgct

SEQ ID NO: 9756 - DNA, 201 bp, Artificial Sequence
  Description of Artificial Sequence: Synthetic probe
tttgaaaacttggttcactgaaatacacttcaacaggattgtaggagagatcaagtgtacgcaaattcttgaggtgggaaatcccaatgggtatctgaccrgcaaacctcgtattgtagaaatcaaggctgacgaggttggtcagctgctcaaacccggaattgggaaggctggcatggtaaaagtggttaccagcgaggc

SEQ ID NO: 9757 - DNA, 121 bp, Artificial Sequence
  Description of Artificial Sequence: Synthetic probe
gtgttctaaggatcacctttaactggacataaatgaatgctagcatgtgccacttgaattrattgacaagggtagttcataaatgtgatatggatatgcacgtgagactaaacattgatct

SEQ ID NO: 9758 - DNA, 121 bp, Artificial Sequence
  Description of Artificial Sequence: Synthetic probe
gatttgaagagaaattgattgcacgaatggtacagaaattcaaatggttaccaactcaatyacagtattcaagataacgctagaaagattgcatgaatggtacagaaggttacaaagatag

SEQ ID NO: 9759 - DNA, 121 bp, Artificial Sequence
  Description of Artificial Sequence: Synthetic probe
ttaaagatattccagcataaagattgtacttcatgttccacattacttttcctcaacagaytttttttaaacgaggcaaaagacttgcctcggcagattcttacaaatatgtcttgttctt

SEQ ID NO: 9760 - DNA, 121 bp, Artificial Sequence
  Description of Artificial Sequence: Synthetic probe
gatggtaatcattgtctctgccttattttaagggccatgatgtcggattctgtcatactgygccagttatcactgcagcacgtcctttcaatgttggactccttgattacctccctagcca

SEQ ID NO: 9761 - DNA, 121 bp, Artificial Sequence
  Description of Artificial Sequence: Synthetic probe
cgtgcatcttgccaggcactttgctcttatgttcccattccacgctttcctgaaaatacakgagggcaacttaagtaacatggcccttgaaaaagatacaagtgatagccatgacagtgtt

SEQ ID NO: 9762 - DNA, 121 bp, Artificial Sequence
  Description of Artificial Sequence: Synthetic probe
tccaatcaccaactgtatcgccactgagagaactgcccttctcgccttcagggcaggtctrtcagaccctgccaacctcctttcatcatggaagggtgatgactgctgccgatggaagggc

SEQ ID NO: 9763 - DNA, 121 bp, Artificial Sequence
  Description of Artificial Sequence: Synthetic probe
cgcccctttttctgcatgatatgaaccatcttgtataaataatgtgactaggctatccccrtgtcttctgaaaatttatcatctgcgtttgaaaatggtttgtcatcacaggacggataag

SEQ ID NO: 9764 - DNA, 121 bp, Artificial Sequence
  Description of Artificial Sequence: Synthetic probe
agtaaagtcacaggttggttgtctaacaaagtaaaaatattatcaaatagaactttacacratttttaacagaattttcactagtctttttaaaatttgtttgcttcattgtgtgtaggga

SEQ ID NO: 9765 - DNA, 121 bp, Artificial Sequence
  Description of Artificial Sequence: Synthetic probe
aaaataccaagcaaaacgacatgactcctccagcaacagtagcagctgggaggccaccaamcagcgcgacgccagagcagcctccattgaggacgcttgggtccctgacaacgatgaggac

SEQ ID NO: 9766 - DNA, 121 bp, Artificial Sequence
  Description of Artificial Sequence: Synthetic probe
aagaaatttaattttctctgtgttttcttgctattcccactgtttgatcatatgtaacttyaagtccaaaatactagtcgtgatcatacattattacaatacccaaatagtctgtgcaaaa

SEQ ID NO: 9767 - DNA, 121 bp, Artificial Sequence
  Description of Artificial Sequence: Synthetic probe
ggtactgtccagttaaaacacgacgcgtggccagataggtttaaaacagaagtttgaaatmtgattaagttgtgaatttcaaacccttgtaactttggattcacacgtccaaaaattacaa

SEQ ID NO: 9768 - DNA, 121 bp, Artificial Sequence
  Description of Artificial Sequence: Synthetic probe
cggccgccggtcgtggttccataaaggttatcgcgcgaccacctcagagaggacatgacamtgcgatgcatgcctgcaaattaactcccctgaaaccgccattgccaacctcattcttgtt

SEQ ID NO: 9769 - DNA, 121 bp, Artificial Sequence
  Description of Artificial Sequence: Synthetic probe
aatcctcaatgattggagcaacaagcgaaagccaagatgcatttcaggttaacatagcaartaataaggcagacagattagtatagctgaatgcttcccgttgccatctgaaatcaaacca

SEQ ID NO: 9770 - DNA, 121 bp, Artificial Sequence
  Description of Artificial Sequence: Synthetic probe
tccattaacaattatcccaatgactcttgatttgacaagtctgggcaagacatctgtggtrtaaaattctgaagtggcagtattcctaggagataccgtggggaattttatagttttccta

SEQ ID NO: 9771 - DNA, 121 bp, Artificial Sequence
  Description of Artificial Sequence: Synthetic probe
gatgtaatcttcagcagaggttatgttcacaactcggtcaacaattgttgctccctgaaaraggaaaatagaacatattgtttatactgtatcacactagcatgcacgagggaggcctttg

SEQ ID NO: 9772 - DNA, 121 bp, Artificial Sequence
  Description of Artificial Sequence: Synthetic probe
aacagaagcttaacgtgtagatctgaagtcaattcgcgtttccaaggagttgggcagttgrggcagtttctttccaattgctttgctttagacaaattggtaattttaggttatacaccac

SEQ ID NO: 9773 - DNA, 121 bp, Artificial Sequence
  Description of Artificial Sequence: Synthetic probe
accacaaaagggttaacacttaccacaatgactgcaaagggtgctcgtgaaagaccataaycaagcttttccactatctcctcttcaatggctgttttatcagtgaagcaacggacaaaca

SEQ ID NO: 9774 - DNA, 121 bp, Artificial Sequence
  Description of Artificial Sequence: Synthetic probe
cggtgctggagtagatggctgggtacttcttggtcagcctggtttgcagcagcagccagarggagaagcacaggcagttggccagcagcgccatggtacccagcatccagctgctgtcgcg

SEQ ID NO: 9775 - DNA, 121 bp, Artificial Sequence
  Description of Artificial Sequence: Synthetic probe
acttcatgcagagttaccattttggagaagctacaccgagttgacctagagcggcgtcatygaacctgtataaaccatttaggtcaaaccataaacctgtttaattttctgagttggtttg

SEQ ID NO: 9776 - DNA, 121 bp, Artificial Sequence
  Description of Artificial Sequence: Synthetic probe
acggttttcaagcagaaaagactcatccattgttataaacctgcacaccacagccacgtcrtgagacaaccaatcatcatctgcatgtgttatgaatttataatcccaaaacgtatatctt

SEQ ID NO: 9777 - DNA, 121 bp, Artificial Sequence
  Description of Artificial Sequence: Synthetic probe
aaatgaaacatggaccccgtaggggcacataattagtttgcctacaaacaagcaaaaacartaactaagcctaatcatataaatctcaggaacagggtaaaacagttcagcagattgtttt

SEQ ID NO: 9778 - DNA, 121 bp, Artificial Sequence
  Description of Artificial Sequence: Synthetic probe
tcttgtgtaagtactgtacttgcattggcaacacctgttcttcttcagggttctgaaccayaaacggacacgccgcgacgttggacgcatccgacacggcacgacaagcgtccacctcgcc

SEQ ID NO: 9779 - DNA, 121 bp, Artificial Sequence
  Description of Artificial Sequence: Synthetic probe
gttcttatcttatccctatgtgttcaagaattttgaggtcagtatttgcttatctctcccytttcttctgattgcaccatatgtatacaatttcattttctcacttagcaatggtatgaat

SEQ ID NO: 9780 - DNA, 201 bp, Artificial Sequence
  Description of Artificial Sequence: Synthetic probe
aatcgcttaatacctgatatagctggagtaaggatcccatctccaatggcggtacatgtaccaataagaacaagaataagaagacaattctttttataagmatgtccctctagccatctcttcacttttgctgcaagtgaattctcctcataagtttgtcggctatatgttgttagttcttcatcggtcttatgttggttc

SEQ ID NO: 9781 - DNA, 121 bp, Artificial Sequence
  Description of Artificial Sequence: Synthetic probe
aaaagcaggggtgtgacaccaccggacattcaccaccaactctcatttatataatagcaargataaataaaacaatgtgttgaagtgtttggcaactagcactggcaacaaacactcgtaa

SEQ ID NO: 9782 - DNA, 121 bp, Artificial Sequence
  Description of Artificial Sequence: Synthetic probe
gtcttccttgcaagaaagcttgcatagagaaattgttgtcggtcactgattggttctccasaggataagagtctacttgttgaattaaactttcttcagatggttgtattccttgagaata

SEQ ID NO: 9783 - DNA, 121 bp, Artificial Sequence
  Description of Artificial Sequence: Synthetic probe
tccaaatgtataggggtcatccatgataacatttcagttgaaatggtcccactgaagccgrgcaacaattacatataagttcactccagaatgtgtgtcttaaaaagtattttctaagctt

SEQ ID NO: 9784 - DNA, 121 bp, Artificial Sequence
  Description of Artificial Sequence: Synthetic probe
cagtactagtctgagtctgaaattttgaggtgcgcaaaagggcgaatacgacctcgcgatytccgccaccgcgcccaccggttccgtcttaccaccaccaccgcaccacctacctccggtc

SEQ ID NO: 9785 - DNA, 121 bp, Artificial Sequence
  Description of Artificial Sequence: Synthetic probe
tgcagcacggagatagttcatgacataccgagtgatggggtgtatacctcctccaggggtkgctacccgggcagggtcacggcggatgagattttccaattccatgaatatacctttgatt

SEQ ID NO: 9786 - DNA, 121 bp, Artificial Sequence
  Description of Artificial Sequence: Synthetic probe
accaggcttattccatgaggatcgtaatacaagacacatgactcttgcatattctagataygagaaaagctgaacataaaggatgaaaaaatggaaagtaaaatggtgacttcagaatcac

SEQ ID NO: 9787 - DNA, 121 bp, Artificial Sequence
  Description of Artificial Sequence: Synthetic probe
aatacgcttcatgcaccaccaagatacttagctactctttcttgttcaagctttcactacrtaaaccaatgccaatgatcataatgaatacaaagtgtaggatatgccctcaggagattct

SEQ ID NO: 9788 - DNA, 201 bp, Artificial Sequence
  Description of Artificial Sequence: Synthetic probe
tgagaatgattaccaaaaggattgaagttgccaaacctgaagcttctgtcaatcagctgacacttaaatactttaccctgtttgactgacaattagattgyctatccaattgccacctccagcctccaatctctggctgcgctcagccgaagcttatgtcaatcagctgacacctaaatactttaccctatttgactgaca

SEQ ID NO: 9789 - DNA, 121 bp, Artificial Sequence
  Description of Artificial Sequence: Synthetic probe
catacttcatgtgtgatcctcagttaaagaaggtatttggggaggacaagatgaggtttgygatgctgtcgcagaagatatcgcaacatctggcacctccaccacccatcaacttagagca

SEQ ID NO: 9790 - DNA, 121 bp, Artificial Sequence
  Description of Artificial Sequence: Synthetic probe
agaaattttacaactgtagttagttgtactgccatgaaatagaactggcgatgtacctttkattaggtgatgcagctcttgcattgtattctttctttatttgcatcttgctatggagttt

SEQ ID NO: 9791 - DNA, 121 bp, Artificial Sequence
  Description of Artificial Sequence: Synthetic probe
atttgaacgtgtccttgtgcatataaatgtacaagaccatttacaggctacagtccagcarcacttatttgaaggtgttgaagcatcttcttattgttcttttcgttcttggatacaggtt

SEQ ID NO: 9792 - DNA, 121 bp, Artificial Sequence
  Description of Artificial Sequence: Synthetic probe
cacactactagtgtattgctcatcatatacaaacaaggatcttgttccctcccagggaaarcaggccaccagggcacattacacagcaaaacattgttcatgatttagcgagaattaaaac

SEQ ID NO: 9793 - DNA, 121 bp, Artificial Sequence
  Description of Artificial Sequence: Synthetic probe
actcttgtagtcctgttatgacatgataattgaagcgattagtgtggtggttgcaacatcrtccctgcactgtcacggcaactcttgtagtcctgttatgacataacaattcatttgggtg

SEQ ID NO: 9794 - DNA, 121 bp, Artificial Sequence
  Description of Artificial Sequence: Synthetic probe
gtgattgactccttataatttttaacaagttgtcctaactaaactgactaccacgagccasccaatccttgagcattattgatgaaaaccatggaacttgagctttataaaaccatgttag

SEQ ID NO: 9795 - DNA, 121 bp, Artificial Sequence
  Description of Artificial Sequence: Synthetic probe
attgtagttctcaccatatggtagttgaggcatagcacgcgggaatactcggaaattgtarttctcatttgacatggtgaaagtaggatttgcttgagaagatgcaatagcacaatcatca

SEQ ID NO: 9796 - DNA, 121 bp, Artificial Sequence
  Description of Artificial Sequence: Synthetic probe
agttgatatacttgttgcagatgtttttgcaaggttggtgatgtagatgttttcccccacygggcaagatgaagaaattttccacaaaatgttctgccgaaagcaatcttacctgaattgt

SEQ ID NO: 9797 - DNA, 121 bp, Artificial Sequence
  Description of Artificial Sequence: Synthetic probe
agacgactaccactcccaggcgaacaaaggtactgaatattcttctgtgacttctttgatytgccatctcccaagtttcacctgaaaaccggttctgtacttctctgctctctttgctttt

SEQ ID NO: 9798 - DNA, 121 bp, Artificial Sequence
  Description of Artificial Sequence: Synthetic probe
agagtagttgcagaaaagaaccttccgcggctggtaagaaaggcttagctcaacgcgcagyaataggttgtcaatcttattcgtagttaaccaatgagttctcttcttaaaaggtaggcgg

SEQ ID NO: 9799 - DNA, 201 bp, Artificial Sequence
  Description of Artificial Sequence: Synthetic probe
tcggaggcttcattgttgccttcgcgcaaggctggcttctcaccctagtcatgatggcaaccatccccccactcgtcatagcaggagcagtcatgtccaaygtcgtcgcaaagatggcgtccctcgggcaggcggcttacgcagagtcatctgtggtggtggagcaaaccatcgggtccatcagaacagtaagcacacatg

SEQ ID NO: 9800 - DNA, 121 bp, Artificial Sequence
  Description of Artificial Sequence: Synthetic probe
taattctgggacaggcgcgacccaaatcacgcgcgactaagcctcgcatcagatcaaccarggagaagaagcatcacatcagatcgggacaaatacctctccggtgctcgcgaagcagctg

SEQ ID NO: 9801 - DNA, 121 bp, Artificial Sequence
  Description of Artificial Sequence: Synthetic probe
cttacatcttcactcgtacactggaatgatctagactctagtaggacattactactatacyaacactccctagaatactctagactctacaagagtagtactactacactaactcagactc

SEQ ID NO: 9802 - DNA, 121 bp, Artificial Sequence
  Description of Artificial Sequence: Synthetic probe
gctgtctaccttgggcaagtgtttgaatccaagagcgtatacaccgtgtctgaaactggarcgtaccctccccgacttggtcgtcgtcgcattcatcacggtcgccggaacagagcagcgt

SEQ ID NO: 9803 - DNA, 121 bp, Artificial Sequence
  Description of Artificial Sequence: Synthetic probe
attcttccaaccagagaaaatttgggacatgataattaagatgctgtggctttacctgtgygagtgccagtgtgacaacatggcacctggtctgaagataggaaacagggaccgaagcttc

SEQ ID NO: 9804 - DNA, 121 bp, Artificial Sequence
  Description of Artificial Sequence: Synthetic probe
ttacacgcgtactataaagacaacaacatccagttaggcatgaacactgagatcaaagccmaccagcttactgcacagagcgaaatctttgtgggcgcagtaaatatttatcagattttaa

SEQ ID NO: 9805 - DNA, 121 bp, Artificial Sequence
  Description of Artificial Sequence: Synthetic probe
gcgggcatcaacagctggccagaggccagcttagaaggatccggcgtttgcctccagtctrgaggccggagcagccggagctagcatcttcctcaaatccagcgtccggagcacgcatcca

SEQ ID NO: 9806 - DNA, 121 bp, Artificial Sequence
  Description of Artificial Sequence: Synthetic probe
agagagtgctgcgatagatagaagtgtgcacgatttgcggcgcgtttttggtcactggtgygtgccaacttgtgttagtgtgcgcacgacgatccacgatccacggccttggtcgtcaacg

SEQ ID NO: 9807 - DNA, 121 bp, Artificial Sequence
  Description of Artificial Sequence: Synthetic probe
gggaatgtgtttgttctaaagccatggctttcctggaaagcttttggccatctaatctacyattgtttaattaacatggaacatggagtattgttgtaactttatgccagcctattagatt

SEQ ID NO: 9808 - DNA, 121 bp, Artificial Sequence
  Description of Artificial Sequence: Synthetic probe
acaaacctatagcaaaaacagcaaaaatagacctacagcgaaaacagcaaaaacagatctrtgacctacagcaaaaacagatttgtgacctacagcaaaaatagatctgtgtacagcaaaa

SEQ ID NO: 9809 - DNA, 121 bp, Artificial Sequence
  Description of Artificial Sequence: Synthetic probe
tctccttctcaatttttgagtcctccaacttctgcaagagctcacacattttcgcctccaytgtgcctgtactgccagagtttttcttgtcggtaacatgatcacgtcctaagcttgattg

SEQ ID NO: 9810 - DNA, 121 bp, Artificial Sequence
  Description of Artificial Sequence: Synthetic probe
acttgatagtaaaaattacatgccttcatcagattgtttggatgtttggattagttcttcmaacttgttgcgaactgttgaaatattcttcctcgcagccgcatccaaggagtcagcgggc

SEQ ID NO: 9811 - DNA, 121 bp, Artificial Sequence
  Description of Artificial Sequence: Synthetic probe
atcatctcccaaagttcctctttttccttttcttttaccttcacagaattcagttctttcyaaaactttttctttatcgttttgtatcattcagctacattcatcatattctttgtgtgga

SEQ ID NO: 9812 - DNA, 121 bp, Artificial Sequence
  Description of Artificial Sequence: Synthetic probe
tgacagagccccactatttagttagtaagttagttacagaacaaaataccattcagtcagsgatacattacttttgtctgactagttgcatggcatgagaaagccatggctatgtttttag

SEQ ID NO: 9813 - DNA, 121 bp, Artificial Sequence
  Description of Artificial Sequence: Synthetic probe
aaagaaaatacaataaattggttaaaacaagcaaattttgactaaagccaaaagctagaartacacatattattgaattttggttgaatatttgcattaagcgttcagattgtcggtgaaa

SEQ ID NO: 9814 - DNA, 121 bp, Artificial Sequence
  Description of Artificial Sequence: Synthetic probe
tttgttacctgtttttgtgataaaagaagtcagcttaagatgtactggtgtggtgtatcaytaagctgaaaccatttttttttaacaaactgaaaccaattatttataaatgcatataagg

SEQ ID NO: 9815 - DNA, 121 bp, Artificial Sequence
  Description of Artificial Sequence: Synthetic probe
acccagcaaatgcaaagcagcctgctattagatgatatgcaaaatagaacaaccataggaraattgtgtatgataagagcatgcttttgacgcttgacttagcttgtgatccatacagcat

SEQ ID NO: 9816 - DNA, 201 bp, Artificial Sequence
  Description of Artificial Sequence: Synthetic probe
gaccatctatgagtgaagctaagccctcagaagtcacatgatcacatcttgacacatcaacactctgcaatgaaagtcaacatatagattggatcagtgcytgataagattgaagaaaatagccaaatagtcaagtgctggtgaagttgcacactatagttatccacatgccatgtttgactagagtcagcaatatccaat

SEQ ID NO: 9817 - DNA, 121 bp, Artificial Sequence
  Description of Artificial Sequence: Synthetic probe
ccccgctcaaccaagaagtccttcagctgctcaaccagataatacaatgtaacattaacarttgaaatcaaacaaagattattcttctagcagtactaagaaaacaagacatggatgaact

SEQ ID NO: 9818 - DNA, 121 bp, Artificial Sequence
  Description of Artificial Sequence: Synthetic probe
acatggcacctccaaaggatgcagtagaggagtggcctgaacctaagcaaacttacacctkctacttcgtcaagatccgctcatttgaggaccctaagctgagagcaaaacttgagcaggc

SEQ ID NO: 9819 - DNA, 121 bp, Artificial Sequence
  Description of Artificial Sequence: Synthetic probe
tcagcgaggtacggtgcagcttccttgtgagggcatatgaacttatccaaaaatacctttycggtgaacatcaatgtactatagtaatctcggtcacacttaagcaatccattttccttaa

SEQ ID NO: 9820 - DNA, 121 bp, Artificial Sequence
  Description of Artificial Sequence: Synthetic probe
ccccaaaacttatggagcaaatgttacttgacgcacttagagcacttgctatagcaacctygtcaagttgcacaccaaggcgatgcatctcgcagaacagctccatggcatcaatagcatg

SEQ ID NO: 9821 - DNA, 121 bp, Artificial Sequence
  Description of Artificial Sequence: Synthetic probe
ttggaggggcggctcaggccaaggtactatgtagtgaagtttcttaaggcaaatggattgytagatcatgaccgggactactatactgtagtcacctacaccgagaaggcatttgtggaga

SEQ ID NO: 9822 - DNA, 121 bp, Artificial Sequence
  Description of Artificial Sequence: Synthetic probe
tcattaaagcgcgcattctcatagattggcacaagggtatcagtttcatcattaattaacrtactgaaagtaaagcaacttgtccaaacaggcaaacatggattatctctgcatttactgg

SEQ ID NO: 9823 - DNA, 121 bp, Artificial Sequence
  Description of Artificial Sequence: Synthetic probe
ctctggcgcatgttcctaacttgttcctagcctcgtgcttatctctgagcaagtttgttaytgacagtttttggtggcaacatataaaagccacttggcatggatggatatagcagcacta

SEQ ID NO: 9824 - DNA, 121 bp, Artificial Sequence
  Description of Artificial Sequence: Synthetic probe
caaggcgcaaatatgaaagttggaaagggggtttcggtctccaagttggttcatacggtcycgtcggaaaaggcctaggttcaccggaaaacaggtcggaatagaaggtgcgcgaagctgc

SEQ ID NO: 9825 - DNA, 121 bp, Artificial Sequence
  Description of Artificial Sequence: Synthetic probe
tccatagcacgaagaataggcttgcggattccttcagttaatttctatgctattgctcaaygctacttgaacgagttgtctctgccggtagaaagaatcctccctcacgcttgccgcatct

SEQ ID NO: 9826 - DNA, 121 bp, Artificial Sequence
  Description of Artificial Sequence: Synthetic probe
gtttacttcccctctctgctggatgaaagctaagtgtgatgaaaggaacaaatggtgatgrtgatggtgatttgtttagtgctaaattctacctttggtcactgtcagtgtgaggactggt

SEQ ID NO: 9827 - DNA, 121 bp, Artificial Sequence
  Description of Artificial Sequence: Synthetic probe
gggaattgggagcttgcaaggcagaaaacctcgtccatgaaaatacaggtagctagctctyttacctcataatgctgattctatgaaagatgcataaagaatacaaaagttagctccaaga

SEQ ID NO: 9828 - DNA, 121 bp, Artificial Sequence
  Description of Artificial Sequence: Synthetic probe
gaacacaagatattacagaaaatgtagagactgctgatgcccacagctggcccaatgcaaktgaagacaaaaaaaacagagggatcaattgtttagttatccaaacatgacagattccgaa

SEQ ID NO: 9829 - DNA, 121 bp, Artificial Sequence
  Description of Artificial Sequence: Synthetic probe
tacttacaggaccatgccagctcatctaatgggccggagataaatgtttatagaaactctraaaggtagaggcaccacccaagatcacgtttgaaactctggaagtgctgataattatggt

SEQ ID NO: 9830 - DNA, 121 bp, Artificial Sequence
  Description of Artificial Sequence: Synthetic probe
tcagacaaatcctaaacatatgttgtgtttgaatcacacaagaactatgttgcggtacctycttgtggaagacaggcttggtctgaccaccatatcccgactgcttcctgtcataacgacg

SEQ ID NO: 9831 - DNA, 121 bp, Artificial Sequence
  Description of Artificial Sequence: Synthetic probe
tgaaaatgaaagaataggataggaatgcatgtgcttttggtgtgttcagctcattagcttytgtcttgatttaaatacatttgtttgtcttcatttaaatccattctcatgtgagattcat

SEQ ID NO: 9832 - DNA, 121 bp, Artificial Sequence
  Description of Artificial Sequence: Synthetic probe
cgtttgacacaacatcaagataccagccaccaccagcaactctttctcttgaaacatgaaracccgaattatgtcttgtccttagggcaacaacaaagccatctttgagcctctcaggagg

SEQ ID NO: 9833 - DNA, 121 bp, Artificial Sequence
  Description of Artificial Sequence: Synthetic probe
ctggcacagcaggaccactatttggctcacacgttggcatccgagcctagatggcatgtargacagcacgtctagagctaccggttggccatgcccttactcagtcattgtgactagtcta

SEQ ID NO: 9834 - DNA, 121 bp, Artificial Sequence
  Description of Artificial Sequence: Synthetic probe
tgaagcctgatttggtattgccactaattgaatctttgcccattgagcagttggcatcacrtcttcctgaggtttgtatttggtgtcctggctttcagttcaactaaacttgttatctcat

SEQ ID NO: 9835 - DNA, 201 bp, Artificial Sequence
  Description of Artificial Sequence: Synthetic probe
ggttaacatttacaccggttgcattcctcttttagaagtccagtgatagtttttcattctagttcacttccctatcttctctcgcaagcatcttgagagtyttccatttacggtactcgtctggtggctatcagagaacttcttgagcattgtctttatgtcatcaagtgtgattgcctcaatacaattcgtgttgcttgc

SEQ ID NO: 9836 - DNA, 201 bp, Artificial Sequence
  Description of Artificial Sequence: Synthetic probe
tcctctgaaccttcccagcaacaattttataccggcaagagttggcgcatagcaatcccagtcctacaccattattagccatggtgatttcttatcgtagmaaatcatcctctctagcgtccaagataagaagagaagcactcgccatccagttgttctgcctgctcgtgttcgcgcacgggacgattgttgatcaggctg

SEQ ID NO: 9837 - DNA, 121 bp, Artificial Sequence
  Description of Artificial Sequence: Synthetic probe
tctgaaggaaaggcatctggtgatgtaaacgcacccggagtggcagagaaaagcaagtttraaaggaacagagcaaaggtaatatttacagctactctgtttcaggatattcaatctttag

SEQ ID NO: 9838 - DNA, 121 bp, Artificial Sequence
  Description of Artificial Sequence: Synthetic probe
ggtgtaagaaccattatcattctattcaggagcaatgctgatttgatggccatggtcagamattaacatgctccaattgcaccaatcagaaaccatgcaacatagcattattagacaagaa

SEQ ID NO: 9839 - DNA, 121 bp, Artificial Sequence
  Description of Artificial Sequence: Synthetic probe
gagtttttgaggcaatatggtaggcactctatggtttttctttacccttagaccgccgtcygtaggcatgcaccagtagctggtttcttcagcttgtgccccagattgtttacaacaacac

SEQ ID NO: 9840 - DNA, 121 bp, Artificial Sequence
  Description of Artificial Sequence: Synthetic probe
cggttgagagtgagactcctgtccatatcccgcagtttttatttgagaatcaagagcattrtatttcttcatttcacagcatgagaatcatgctgaatacaagggagcataaagtcagtgt

SEQ ID NO: 9841 - DNA, 121 bp, Artificial Sequence
  Description of Artificial Sequence: Synthetic probe
acattaggttacgttatgtgtatctttccactgaatacatacatcaggcagacagcagttycatgtggaaacacaatggcaagaatatgatttacaaaagttcaccttagaagaatcacct

SEQ ID NO: 9842 - DNA, 121 bp, Artificial Sequence
  Description of Artificial Sequence: Synthetic probe
cctagagagtgtgcaccttcacttgcacatcctgtaaatggtgatttgtttatttgatcartgaaacagctgtactgtatgtttcaaccaagcacacctctgtggtaatttgacactctag

SEQ ID NO: 9843 - DNA, 121 bp, Artificial Sequence
  Description of Artificial Sequence: Synthetic probe
atccaaggatccatatttctcatcaaactgtagtacttccatcacagaaccaatcccttcrgtaagcttctggttgtttcctgacaaacaggtcagtttctcttgaagaaccttctgtgac

SEQ ID NO: 9844 - DNA, 121 bp, Artificial Sequence
  Description of Artificial Sequence: Synthetic probe
taaagttagcagtacatggtattgatgttagctgtacatgttattaatgttttctcatgcrattgttttgttcatctatgcatttggtaatttataatagaataaatgcattgtagatggg

SEQ ID NO: 9845 - DNA, 121 bp, Artificial Sequence
  Description of Artificial Sequence: Synthetic probe
taaattcatgaatccttaaagggtttaaaacattcttatgggaaatgaattggagctatgrcaataaataattcttgtattggacaaaaacttactggcagtctttgctttcatggtgggt

SEQ ID NO: 9846 - DNA, 121 bp, Artificial Sequence
  Description of Artificial Sequence: Synthetic probe
gtacagtcccaatgcacaatgtggtggatgacctgtctgatgttgttttcaacacccctgrgttggatactgaatcagatatttctcttctaagcacaggtgtgatgatttttctgtctgc

SEQ ID NO: 9847 - DNA, 201 bp, Artificial Sequence
  Description of Artificial Sequence: Synthetic probe
agcgttggcaatgtggatgtaattaagccaagccatgcatgtgcagagggtggctcaaacatgagtttggttcttggtgcttgcatgcaaacaggaagagrtaatctggtacatgcaatttttagaagctatctttcagattggaaagaaaagcacgatagttattctacatgcatgagaacaaactcagatgagattcat

SEQ ID NO: 9848 - DNA, 201 bp, Artificial Sequence
  Description of Artificial Sequence: Synthetic probe
caggggtcacggctggaggtgagctggtctgacggtgcgtaccgagcggtggttgccggagaggctatgatgatgcgcccgtggaatgatcaagggaaacmtgcgctgcgctgtgcgcagtgagagtgaggacaagggaatggatattgatcaagagagctaggttaactgtccggtacgcgcgcgacggcggggcacacg

SEQ ID NO: 9849 - DNA, 201 bp, Artificial Sequence
  Description of Artificial Sequence: Synthetic probe
atatgacgagaacatatattacatcaaaatacccgaaaccactatgcaacacctacgacaacgggggaagaacatgccacggggccttatatgccctaaaracacaggcaacggcccaccagctaggtatcggggcatcaccgagtcaacatatggcgaaccaggagcacacatccggtccagaccctcagtgtgcacctc

SEQ ID NO: 9850 - DNA, 201 bp, Artificial Sequence
  Description of Artificial Sequence: Synthetic probe
aagaaaactgagagggatatccgtggtaattggatgagtatgtttttgcctgttttcttgcagtgagattcaagctagccgggcaaaagcatgcggcaagrtaatcgcaacgacggcggttctgcctccatggctccggcgctacagagaggcaagatcaaaacgttacggcaccaccactcttcaagtagacgtacgtat

SEQ ID NO: 9851 - DNA, 121 bp, Artificial Sequence
  Description of Artificial Sequence: Synthetic probe
actgagtgctgatcaaggcaacacagatgcaggtggcatgcaggcccttcccttctcctcrtggtagttatatcttgatcaaccagatcctaggcagtttgtgttgatcatcagttaccaa

SEQ ID NO: 9852 - DNA, 201 bp, Artificial Sequence
  Description of Artificial Sequence: Synthetic probe
gcacccaaggttggtttttcgcacttttttgtttttctgaaagtggaattttttcagagttcagaaatgaacaagccattggtttatttgccgtgcctgayctagatcctacaacattgcaggggatactaccgttgcacgtaccggaaatctcagggatgcgcggcgacgaagcaggtgcagcgcgccgaggaggatccg

SEQ ID NO: 9853 - DNA, 201 bp, Artificial Sequence
  Description of Artificial Sequence: Synthetic probe
ctctgcccaaggacgtcctgccaagttctctgcaagaattagtaatctacgattgtccagccatcaaatctctgcccaaggacgcccttccaagttcactmcgagaattacatgtttatggtgacaccagcgaggagctaaaaagacagtgccgcaaattaaaaggaaccatcccaatagtcgcagactacagagcaaagg

SEQ ID NO: 9854 - DNA, 121 bp, Artificial Sequence
  Description of Artificial Sequence: Synthetic probe
gtagcagacatttccagctacaatgaactgacatgcgtgcaactcccctgttagattagcycacatcagccaacaccacgataatcatcattgcagccactgagaaggatgtggagacata

SEQ ID NO: 9855 - DNA, 201 bp, Artificial Sequence
  Description of Artificial Sequence: Synthetic probe
attctggccacaggaacaccaaaaagcagccacccaaacaggcattcaatattttgaaagcttatcctatcaactttcacctttaaactaaatgttcttcrtgaattaactgtctataaaggttgtttctcttaatatattggttgaatatattgctcagctcaaagatatgtagcctttatgcttttgctagccggtgag

SEQ ID NO: 9856 - DNA, 121 bp, Artificial Sequence
  Description of Artificial Sequence: Synthetic probe
aatgtgcaccatctttcctgctgagagagctagatccgacactggctccattgtggaaaarggtgaagatgaccaggcaccaccggatgcggcacggccagtaatacctgacatactgctg

SEQ ID NO: 9857 - DNA, 201 bp, Artificial Sequence
  Description of Artificial Sequence: Synthetic probe
actggctcgtcctcctcgccgggctcagcgtcaccgcagtctcataccttggggtgattgtcggcagaacgtacatatcaaagatgacaaagcgagactgrgtaccaacacttgggagtactggcccactagttctggggaccttgtaatgtggtaccctaatgccgctttaggaatcctaccatttgaccctgtaatttt

SEQ ID NO: 9858 - DNA, 121 bp, Artificial Sequence
  Description of Artificial Sequence: Synthetic probe
ggtttgtcttaactggtcataacatctttttcccaaatttacatcatgaaagataatgtgyacggaccgcacctatgctgcacatgatttttgtgcaaagaaaaggcacacaacgctggaa

SEQ ID NO: 9859 - DNA, 201 bp, Artificial Sequence
  Description of Artificial Sequence: Synthetic probe
gatttaaccatacaacacaactgttcggacagtataaaagtagggaagatgagatatatatgcccctgcaaatgcaaagcggtgcatcttctaaaaaacgyccctgcaaagttagatttgtcatctcattattttgtatgaaccaaattgtccctgaactttcttcttctattaatatacctgaatttcatattttcttgt

SEQ ID NO: 9860 - DNA, 201 bp, Artificial Sequence
  Description of Artificial Sequence: Synthetic probe
agcaaattagcaccacaatggagatgagcaactagacaaaagatagcctgcaaaacttaactgaaaactacgctatatgaacttggcaaagttttcactgrtttgaaaaatgtaaatgagaaatagactactcatagatttgtattccagttagaggagagtaaagagctgcccttacattcacattctctaacagaaaat

SEQ ID NO: 9861 - DNA, 121 bp, Artificial Sequence
  Description of Artificial Sequence: Synthetic probe
gcatcaacgctgccttcctcatccagcaggtttctagacttctgcggaggtcgtcgcctakttggtgttcaggtgcctagagagattggaaaacttacggcattgcacacccttggtgttg

SEQ ID NO: 9862 - DNA, 121 bp, Artificial Sequence
  Description of Artificial Sequence: Synthetic probe
atccatgtatggcagaatcagaatcttctgactctggatcttctgatgaggatgaccatgktcagatgtccgtctgtgccgatattgaagagaactgtgctccagagcctaaatttttcag

SEQ ID NO: 9863 - DNA, 201 bp, Artificial Sequence
  Description of Artificial Sequence: Synthetic probe
gcaagctcgccagtgatttggtagcagccatggaggaggagcaggaagctccgggctttcctgatgtgcccaaggatatccccgtcgccaccaagtccctyaccatcaggaccagcaatgccgggtacggcagcggctccgaccggtccaaccccattgactcgccggccatctccttcacgccgcacctctactcgcctt

SEQ ID NO: 9864 - DNA, 121 bp, Artificial Sequence
  Description of Artificial Sequence: Synthetic probe
tacataagtgagcacttacaaaaagaacggtaaatgcataatactttgcttctgttcaatyttggtccttgattttctcccttgtaatttgacttgttaaacctgttcaggagaaacttgc

SEQ ID NO: 9865 - DNA, 201 bp, Artificial Sequence
  Description of Artificial Sequence: Synthetic probe
ccatggaactattgtttttctagttttactcttttttactgttcaaatgggcccatatatatccagcatatccatgcatgtcaacatctaatcggcatgtrgaaaatgggatgattatgactgatcgcatttttttacgccggcatacataccttcaaattgcatggaagaagccccgctgatcaatgaccaactcttttg

SEQ ID NO: 9866 - DNA, 201 bp, Artificial Sequence
  Description of Artificial Sequence: Synthetic probe
gctactgaacaattaagagtgaatcactgactactggacacataccatggtcctcagctgagcacagtaagataactttgggttcaaatgacgtaaagctyagatcactggataagcatgtaccttgtgaaaatacaatgtgcaggtaacactgaactgaggaagtaaatggagatattgctcgtcaccaatttccagctg

SEQ ID NO: 9867 - DNA, 201 bp, Artificial Sequence
  Description of Artificial Sequence: Synthetic probe
tgcagttcaactttagaacaggggactacaactaaaaatcagcaactagtacatgatgactgaatagcatttattcgtgccacagctacttaacactggtyggataatgcatttcctttttaagtgacaaatacattgagctgtgaacattagttaccagaatagccatgcgcggccggtacgacgtcttgcggagctccc

SEQ ID NO: 9868 - DNA, 121 bp, Artificial Sequence
  Description of Artificial Sequence: Synthetic probe
aaaggagaagcgggacatgttgtgtaggcctggagaatatgcacgggagcaaggcaaagtyggcgtttggagctttcctagctaggtgcaggtagtgatggggactggtggagccgtacgg

SEQ ID NO: 9869 - DNA, 201 bp, Artificial Sequence
  Description of Artificial Sequence: Synthetic probe
taggtggtttccaaattagtgggcggttagtatggaaagatgcgcaatgtcattggagcatcctaggccaccctatctaagaggatggacgggtgagatcraatgttcctgccatacttcttgcttttataagtagtggagataaataactgttgtttatatgtatgattatactccgaaaaccagaagttatatttgtga

SEQ ID NO: 9870 - DNA, 121 bp, Artificial Sequence
  Description of Artificial Sequence: Synthetic probe
tgcatgcagtcactcctaggttcttctcaccagcagttagtggatttagttattccacacrtctcattggcttcaaatatagggtggacccgacaaagatagctgaacctacatcttcacg

SEQ ID NO: 9871 - DNA, 121 bp, Artificial Sequence
  Description of Artificial Sequence: Synthetic probe
caagccacccgcacaccagctggcacttgtatattctgtgaaaagcttctccactcaataratagaatgcatgtatttagtagagaaagcaatcaagtgattgttcaaagcatgaatgatt

SEQ ID NO: 9872 - DNA, 121 bp, Artificial Sequence
  Description of Artificial Sequence: Synthetic probe
acttagcaagagcaatggtgtcaggacaaagcggagggaatgagctcttaaaaaatgaagycaatctgtaaaatcaacctgttgaagttgagggccctagcacaacaaaacggatgcctta

SEQ ID NO: 9873 - DNA, 121 bp, Artificial Sequence
  Description of Artificial Sequence: Synthetic probe
gcaggttggattctcggaacctgtgggctggagagatcattattttcgtcctctaattcgyctcctaagtttctccgtgtttgttgcaggcgaagtgctgtctgtgctgaaatttcgccaa

SEQ ID NO: 9874 - DNA, 201 bp, Artificial Sequence
  Description of Artificial Sequence: Synthetic probe
tccacaccaactagactctggactgcggatgcgcagtgcagccaatcactctgctcgcaagacatctttgttcatttgttgagatcgggagtacgtatatrtaatgctgaagttttcggcggcacccgcaagaggctaagtaatctatccacaccataagctagacgctgaaagtctgaatatgcagttttacacccactc

SEQ ID NO: 9875 - DNA, 121 bp, Artificial Sequence
  Description of Artificial Sequence: Synthetic probe
acgttgtagctgaaattaggagaaaaatcagaggaatggtggttgagaaggaaccaggacygagctggattgagattaaaaatatggttcatgtgttctctgcggatgatgaattccacac

SEQ ID NO: 9876 - DNA, 201 bp, Artificial Sequence
  Description of Artificial Sequence: Synthetic probe
caaagaaagctcaggaatttaattggcctttactaaatgcagccaactaacacaatgcactggctaataaccattgtagaatgatgggaagtacagcatarctttaaaggaaaaactctctcttttggagatggaaagaatcacatctcaaatgaagttttgctacatcagctggccagttgggacaaatttgattggcca

SEQ ID NO: 9877 - DNA, 201 bp, Artificial Sequence
  Description of Artificial Sequence: Synthetic probe
aaagcagagtacgacagtggttagaaggcgggtgcaagatgacttgtgaagggattccccataagatcagttagcgtagtgctgtcatccgtggcttcgtyaataaagatccactttcacagacacattagggtatcttgatatgacaactgtgattaccatggtcttgacggaggtgggtatgtcaagatggtttgatgg

SEQ ID NO: 9878 - DNA, 201 bp, Artificial Sequence
  Description of Artificial Sequence: Synthetic probe
accatctgctttgggaaagccatatactgcgatgtactctcatggtggtcgtttctcgcatccctttctacccctagtaagtatttttcgtcatgatctamttttcactaacagaccaagtaaccaaacacgacaatcactttctatctgtatctactctaacccgttggagttatgctacggagtaatacagttagtttc

SEQ ID NO: 9879 - DNA, 201 bp, Artificial Sequence
  Description of Artificial Sequence: Synthetic probe
agttctcaaaatgaatatcaatctctccagttaagctgtttccggtggcatcaagaatcttcagtccactgatatggctcaaggtttttggaagactcccrctcaaccgattatctagtagatagagctcctccaacttggtgcagtttccaattgaatctggcagaaccccagataacgcattttcatgcaaccaaagtt

SEQ ID NO: 9880 - DNA, 201 bp, Artificial Sequence
  Description of Artificial Sequence: Synthetic probe
aatgggcaaaacatcaaaggttgcaacacgatcaactagcagtaatgcaactggcagacaacccccactgatggtagaatatcatttgatgtcaaaaggtytacttctcaacgtagtcttaacttttagtttattatagtagctgtagcgaaaaaaattcacagtaaaacagagaaactaataggagcacatgtaattgac

SEQ ID NO: 9881 - DNA, 121 bp, Artificial Sequence
  Description of Artificial Sequence: Synthetic probe
ggcaattgagagctatgaggcttctgaaaagttctttaactgcaagatggaagagggcagmtccgtcagtgagcatgtgcttaagatgtctgggcacgcaaacaaacttcaaagcttgggt

SEQ ID NO: 9882 - DNA, 201 bp, Artificial Sequence
  Description of Artificial Sequence: Synthetic probe
acaggtgaacatacatgtgatatttagagcaatatataccgaaatactgacaaactaccagcatcctgtaaagaaaagcgatggacagaacattgaatagmaaaactgcaaaaatagaacacgtggctgactggaagcatataagcctttattattcagttcacaaacttggaagttatattgctagggaatgaaagagaa

SEQ ID NO: 9883 - DNA, 201 bp, Artificial Sequence
  Description of Artificial Sequence: Synthetic probe
acacagaatttgtctttgtacctgctgaaggaacatcggttggaactctgcttgcctggaacgacaaactctatactgtcacggtccttatgcagaataarcagtccatgtcagttcaagtaacatcaaacactaatgacactacaatagtcattacaaatgtgtatgcatccggcgaccctgaggagagggcaattttct

SEQ ID NO: 9884 - DNA, 201 bp, Artificial Sequence
  Description of Artificial Sequence: Synthetic probe
tagaagctaattgtgtgctgttggcatactaagctcatgaatactgtcttcatctgcaaacaactccttgggacgattgcgtgtaagtataggaaatagcrggaagcaccctgtgttgcgttattaggattactgggttgctgagtagttgatggcgagcgcctgatgtctgaagctaaatgttgcaagttcagatcacat

SEQ ID NO: 9885 - DNA, 201 bp, Artificial Sequence
  Description of Artificial Sequence: Synthetic probe
aagacagctggtggttcatcccagaaagaaatgactacagctccagcgtcagaagtggaagatgtaaaagagaatgaaaaggaaaaggcccgtcgtatggyggaggagttggagctagcaaggaaggcggaggagttggcacggaaggaggaggaattaagacagcagagggctgcggctgaaaaggaacaactcgtgttg

SEQ ID NO: 9886 - DNA, 201 bp, Artificial Sequence
  Description of Artificial Sequence: Synthetic probe
gatgctgcgcggaagtttcatcacggcgaagcaatcaatgcgtaggtacctcaggttaatcatgtcgccaatattatccggcaacttacaccgcctcggcycctgtacggagatgacccgaatgaacttggacgcgagcaagaaatccagatcatgggagaactgagcgtcgttgtcctccttgttgatgattctgcaaat

SEQ ID NO: 9887 - DNA, 201 bp, Artificial Sequence
  Description of Artificial Sequence: Synthetic probe
cctggatccagactttgagcgatagaatatgcttgttcacagactggaagaagataaggactgtgtcagggatatcgcttagcttgcacgagtcaaacttrgaaactcagggaaaaaaaccatgtttttctctttataaaaacgcagataagtcaaggagcgtacggatccgggcaacattgcggtcgtcgctgccgatgt

SEQ ID NO: 9888 - DNA, 201 bp, Artificial Sequence
  Description of Artificial Sequence: Synthetic probe
aacctcatccctgttggctggtggcgcttcagaagaatcagcctcgccatcggtaacaccctggctcttctccctctggctttcaccggaggaagccgctrcgacggtggtctcggacggctcagagactgaccctggcgtcgcggaatggccagcggaggagcctgtggttgagacacaactcagagggctttcgtctgg

SEQ ID NO: 9889 - DNA, 201 bp, Artificial Sequence
  Description of Artificial Sequence: Synthetic probe
taggtatatatgtcaacttatgaacacactgtttattgacaggatatttgtggaggtggtcccgaaacttctgattgaagatcctttgcttaccgaatctytaaagtctctaaagaaacatgcagtaagtttaatttcttcttcttcagagcatgttaggggattcccaggataacttgtggaataaatgaacaatgcaga

SEQ ID NO: 9890 - DNA, 201 bp, Artificial Sequence
  Description of Artificial Sequence: Synthetic probe
gaaagggataaagcttcgctgagcacgaacatggggaactatggatcggattccatggctgagagacgatttttgtacagaagttggagctacagtttgtygcaatctgaatgagtcattgcttgggggcaagcaatgtttcttcggggcggtaatgtcatgcccgtgcattgtgatactctgggctcagcggacatgggc

SEQ ID NO: 9891 - DNA, 201 bp, Artificial Sequence
  Description of Artificial Sequence: Synthetic probe
gcgtcatatcctctggatgaattggatcttttccatatatttaggttctgccttgttttattttagagttttctgaagtattctgtatttctgcaccatgyctacagcagtatgtgtcacaaatagactgtagattgttctcacatgctgatatggagcacatgttgattgtgttgctcagtgcttggctgtttgtctaca

SEQ ID NO: 9892 - DNA, 201 bp, Artificial Sequence
  Description of Artificial Sequence: Synthetic probe
gtttttacgtgagggggcactgggtggacttctgggagtgaagaaacattgcaaatgaggaaactagacatggggcaaccaaacttcatccgtgatgcttrtgccaagctcccatccattatgccaaatcttgaaactcttgtcatagaatcaaggtgcgaggtatgtatgtattaactacaagataggctgttgtaggat

SEQ ID NO: 9893 - DNA, 201 bp, Artificial Sequence
  Description of Artificial Sequence: Synthetic probe
cagagcagtccattgcaagagttgtgcacgaagaggctccgagaagccgagggcctagacagctggtacatgtacccattggcatcggcgagcacggttgmaagagacctatcattcaccctatcatttgcaaagagcagcaacttctgctggccccggttcaggtgctcgtgaacgaaatgcagatccgagagcaaggac

SEQ ID NO: 9894 - DNA, 201 bp, Artificial Sequence
  Description of Artificial Sequence: Synthetic probe
aaggaaagagctagcagaacttgggaggagaggcaaaccctttctgctttctctgatcagcagacaacagcgaaggacatggaatgatggaaacaaaagaraggagaaggtcacctaggccatggttaatttgtatgtataggctcaaacaaggttacatgagctgcaaagctttatctgccgctgccacagtaatttgat

SEQ ID NO: 9895 - DNA, 201 bp, Artificial Sequence
  Description of Artificial Sequence: Synthetic probe
cagggtcagtggaaggatcccacacagcatctgcctcgtcacccaagccatgtacgttccaaggctgagagtaatgggcatagtacaagcggttgctgctycctccccactgttctgggctcaagcaagaaaacggcgggctcctcacatcaccacctacaaagagtgcccagttgtccagcttcttcacctccacccatt

SEQ ID NO: 9896 - DNA, 201 bp, Artificial Sequence
  Description of Artificial Sequence: Synthetic probe
gttcaacatcgtagatttaacatatatacataatacatgatttaacatcacagattctgaacaaaagaaactatagcgaataagcaccttacttatatctrcagcggcagcagatcatccgcgttttgcgtagtgcacccgcatgttcctaccatcaagcacctgaaaattaaacaagtgtcatcatgtaggaaagccgcg

SEQ ID NO: 9897 - DNA, 201 bp, Artificial Sequence
  Description of Artificial Sequence: Synthetic probe
actaatcatatagcagctaattactctaacaattcagctcaatgtcaattgcagcttctaacccgtgaatcataatttctatcacttgaactaactcagcrcgcatatcagctgtgtgcaacatacataacactgaaggaataacaaaaaataccgtcgtaccattgcatcattcatcatccctgttgggcctgttcacac

SEQ ID NO: 9898 - DNA, 201 bp, Artificial Sequence
  Description of Artificial Sequence: Synthetic probe
tcaatacaaatcagctctctatcgtctcttacatatcacgatagtaagttgctagcgcaaaatggtggcatcgtcatagttcaattcagcttgatcaggargcactaaagatagttgttataatccagtttaaacaaaatatcatattctatggtattgtgaccccaaggctaataatacccttgatggaaatcatgatca

SEQ ID NO: 9899 - DNA, 201 bp, Artificial Sequence
  Description of Artificial Sequence: Synthetic probe
ggaacaagatggtgacggctgctggtgcttggggtcgctgaaaccagggcactcacgtgcgacatgaagtagaggaaccagcgtgctggcgttgcaggttygtggtcggagtggagcaccaggagacggcctcgggaggcgcaacagagggaggtccacggcgatggagcgaggcgacgcggatgaaggggacgcgtggcc

SEQ ID NO: 9900 - DNA, 201 bp, Artificial Sequence
  Description of Artificial Sequence: Synthetic probe
gattgttcacaacataattactagtactgaacagcatatgagtccaggcaggaattcacatctttctgcttccagtgagcaatatactactactatctaaytcggcggcgggccgcaagcagaaaacatcccctgtgactgtgagtagacaaggacaactgtgcctgtatggaagcatgtgtttgtttattgatctcggtc

SEQ ID NO: 9901 - DNA, 201 bp, Artificial Sequence
  Description of Artificial Sequence: Synthetic probe
tgctactactggctcctggtttggtaccttagtagcaattccctgcttcatatctaatctggtcatgtgtggcgctcttgtagttatttgccaaaagtgtygtgctaaaatttcaacaagtcctcatcgcttggctcgctatcattaaatgaaagttagacatctgtcctgttttgactttatcaaagttattagacaggg

SEQ ID NO: 9902 - DNA, 201 bp, Artificial Sequence
  Description of Artificial Sequence: Synthetic probe
gccggagcttacaagtttgggaaggctgtgcagttatcgcatgagcaggaggagggttcacagatatcagcagatagtgtagatatggtggtctgtaggckttgttgggatggccggttggatgatgcccagcagcttgtgtgtagtgcaattgagcagggtgttccagtgactgttgcaggatttaatgctttgattgct

SEQ ID NO: 9903 - DNA, 201 bp, Artificial Sequence
  Description of Artificial Sequence: Synthetic probe
atctgccatccatgaagtcagatcaaatgcatggccagaagagaagaaggcaatataactacgaagaactcctgcatctccataaattcagacagcagccyactggaccagaccaattaacaaaaaagacgcagtgtaccatcacagtgcatctcggtctataatggctagagatctgcctgtacggctgtaccgaagatt

SEQ ID NO: 9904 - DNA, 201 bp, Artificial Sequence
  Description of Artificial Sequence: Synthetic probe
ctagaatctgatatgcctttactgcaaggacgaaactgtacaccctttgttgtatgagctgatgctttttgagcatttactgagatgccggcaaggttttyaagaatggagttaggtttggtaggagcagaggctacatgttgaccatcatgcactgccaatgctttctgactacttgtttgatctatgctggttgtcttt

SEQ ID NO: 9905 - DNA, 201 bp, Artificial Sequence
  Description of Artificial Sequence: Synthetic probe
gtctgactctttcgcagcaattaattcagttagatctaagatgattttctctttttctgagaggatttcagatagtctgctatactcatcatccaagctarcaattatgttttctttctcctctagattttcttccagcttatgaactttatccttctcagcagaaataattttagcagtgtccttcatcaataactccct

SEQ ID NO: 9906 - DNA, 201 bp, Artificial Sequence
  Description of Artificial Sequence: Synthetic probe
gcggtcatctcggacaccttcacgagattgtgaatggtatcttgttagtaacacagcaaaagaaaaaatcagtccccattttgaaagaaaagaatcacatyatggagataattgtgaatactatgtattattaccagctgaaagatgaggtcattggagaccccctggaagaggtagacgttctgtacgataccgaagaag

SEQ ID NO: 9907 - DNA, 201 bp, Artificial Sequence
  Description of Artificial Sequence: Synthetic probe
taagttggggcatttcttccaatccaagtaaaaaagactacaatacaggcaacgttaataaaaactccacaggctcactggtcttctgaaacaccatagtraatgaccaaagctgtgtcttgtccaggaatccagtatactgtatcgcaacacaatgcacttggcaacatcaaagttaaagtactactcagagcaactgca

SEQ ID NO: 9908 - DNA, 201 bp, Artificial Sequence
  Description of Artificial Sequence: Synthetic probe
taactcatctgataattgagatgcttttgagaaatacagagagacacgtctcgcctattatttgcaccatcaatgcatacacacgtgttaattagctagartgcatcatgtaagatactacggtctaagagaatgagtcaaaagtgaagtgaagtaaggggacgaatgtgagcaaaggggcaagctgaattattgtacaac

SEQ ID NO: 9909 - DNA, 201 bp, Artificial Sequence
  Description of Artificial Sequence: Synthetic probe
aacagaaaggtgagtagccagccaccattcttgctagatttcttttctgatacttgaaagtttatcagcaaacatgtagccaagctctgtgatttgggggmggaggacattgtttgatatgtgggatgggtgttgtgtggcaccttgtcctagaagcacgccgccaacctttgttgcttctgtttttactgctgctaggtt

SEQ ID NO: 9910 - DNA, 201 bp, Artificial Sequence
  Description of Artificial Sequence: Synthetic probe
ggaattcccctcaccgtctgccgtccaacagcttcccaacttcagccgctcgtggatcgcgtggctcagagactaccaaattggaaatccagattgatgcrgaaaccaggcagactggccctggtaaaatcagtactgggaaccatacctctgcaccagctgctagttcttgacctgtcaaagcagacaatcaagaagctg

SEQ ID NO: 9911 - DNA, 201 bp, Artificial Sequence
  Description of Artificial Sequence: Synthetic probe
cagcttcccagagaaatcccatcgctgaatgatctcaaccagtttccgaggtacaaatgggcctgtctggacctggacacgtgctcgcaggtcattctggygtggcacatcgcgaccagcctctgcgaaatcaagcttgcgcaagagtgtgaaatggacttgaccaaacccaggttccttcactctgcctggtcacgcctg

SEQ ID NO: 9912 - DNA, 201 bp, Artificial Sequence
  Description of Artificial Sequence: Synthetic probe
tgttggcttgagtatattgcactaacaaaccttctagcatccatgttaaaaacctggtttaacaaaatatcgttagcacattccagctaatcaaaccatgyactaatcagtacaggccaacataaacacgagagaactgtgaaattatatttccacagaaaacgcaagctttcggaatgttcagttataacttgcttgata

SEQ ID NO: 9913 - DNA, 201 bp, Artificial Sequence
  Description of Artificial Sequence: Synthetic probe
gcaccggagccgtgtccgacgccacgggcaccaggaaacgggagttcccggacctcaagggtaggtgtcacaatctgtaccatggaaattaactgatgttytgattataccgattttttgatttattctgtttcctttttattttttggcgattggtaaggagggacgaacaacagcaagtccgccgaggccatggtaagc

SEQ ID NO: 9914 - DNA, 201 bp, Artificial Sequence
  Description of Artificial Sequence: Synthetic probe
tgtctgactcggaagatatgcaccgtacttatcttcatgaacccctgccttctttcatccatggctaaaaaccgaaatcaacacaacagacagcacgtcaycagcctacacgcctcaaaacaagcagaagtcgcgcatgctaaatgatgaaggaattcacaggggaaaaacaagggaccagagacaagccgtgccggtctg

SEQ ID NO: 9915 - DNA, 121 bp, Artificial Sequence
  Description of Artificial Sequence: Synthetic probe
cacccatgcttgatgatatatacactcttgatcaggccccctatgctgaaaactcttgaaracttcctttaccaacacgttgaggtgtccaacaaatgactgctcttttttcatcctatgg

SEQ ID NO: 9916 - DNA, 201 bp, Artificial Sequence
  Description of Artificial Sequence: Synthetic probe
tacaagaataatgcgacctcgcaagccacggttgtaagggagacctggcccaaccctaacctcccacccagctaaaacaaatcaaggaaaggtggataaayccaagcgtcttaattccccagcagggacaccgggaactcttctcggatctgccttaaccctaaccaccgacggcgagggaaggcgagttctagtcaaaat

SEQ ID NO: 9917 - DNA, 201 bp, Artificial Sequence
  Description of Artificial Sequence: Synthetic probe
tacgacgacgacgacatgaacggcggcggcggcggtggaaccctatcttgccttctcctccattgcacgggatatgagagattgggggaatcgctcgggcrgggggcacggtggcagttttctgttattatcccaaactacgatggggtacttcggtccgctacactcgggaagcggcaaaagcgctcgggaagctgctct

SEQ ID NO: 9918 - DNA, 201 bp, Artificial Sequence
  Description of Artificial Sequence: Synthetic probe
ggcgacggcgacgacgatggtgcacggcggcgcgacagcgaggtcccttgtgcaggcccccccgaagctaggtaggtaacagacaaggaacaattcctacytgtatcaaatcatgaaggttgtactactactactactagtatataacaaatcagtaacgtgggtgctgttttgtttaattgcctcgccggcaatggtggg

SEQ ID NO: 9919 - DNA, 201 bp, Artificial Sequence
  Description of Artificial Sequence: Synthetic probe
ataattattttacttaggttttcctcttgtgttgcgctactcccttggtagattttttttagagaactcccttggtagatttatgaactaacggaagttaygttattctttgttttcctcattggcattcatacataacacaaccttttgttagatgttacacagtcggcaaattgaccccctcttcttgtgaagtctcat

SEQ ID NO: 9920 - DNA, 201 bp, Artificial Sequence
  Description of Artificial Sequence: Synthetic probe
tatgtagtaacacagtatctatggaaacattaaagtaagagtatcttaaaacagtagccgtctatagccccgatatatccccactatatctgtttgagtgygttgctgctaaatgaaatcacatacaattgtccgctagagccttatttagctctgctatagctgttttggagggctgccgctattttccatagcaggcta

SEQ ID NO: 9921 - DNA, 201 bp, Artificial Sequence
  Description of Artificial Sequence: Synthetic probe
aaattaggcagatatctatttctcctaataatcttgttaattagttaccctcttaaggttgagttgccatctccccatgtaagccggttataaaagacctmgcactttgtgagaaagaaacaagttatctcctaaaccaatttagctctcttctctcatccctactctgccttcaccaactccagtgatcagagccttacc

SEQ ID NO: 9922 - DNA, 201 bp, Artificial Sequence
  Description of Artificial Sequence: Synthetic probe
gtggaaagccctttcatggtgcaattcacaaggtatactgaggtccaggaaaaacctggcttggaagatgggttcccattctgcacttacagcctcactgygtttactgacctcccagcacctgctactagacctgcacgattcgtaggttagtcgggctgtgttttctgtgttgtactttccgctgctcctggtgagttt

SEQ ID NO: 9923 - DNA, 201 bp, Artificial Sequence
  Description of Artificial Sequence: Synthetic probe
ttattccaaaaggatgtcgcagattaatcaagatttgcatatatctacactagaacgtgtctacatacatacatacaaatttagacaaatccaaaacatcmttttcagggactgagggattataaactatatctacccagtctctccagtattttgctgtggctcatgctttatgtacacgctgcatctgtttatcaatgc

SEQ ID NO: 9924 - DNA, 201 bp, Artificial Sequence
  Description of Artificial Sequence: Synthetic probe
ttctccaggtcatccatgcaaggctcatattcaaactaatatgcaaagtgctactataactagcacatgcacgtagtggtgtatttttgtgtggcaaagaracgataaattaagcaacagaactttgggttcggcgaccttaggttccatatttgctacttggtttccaacttggattatccgtgtcggactcgggtttgg

SEQ ID NO: 9925 - DNA, 201 bp, Artificial Sequence
  Description of Artificial Sequence: Synthetic probe
tttctatactgaggttttttgtagattgcctatactagttaatggctcagcaaacaacacttttacacttcctcagcctcccacaaggaagctgcaacctracgcttagcgtctccggcaagggagctgcaacctagcccgctctattctagtatctctcagctgcaacctagtcattagtatctctcggcatttcccgca

SEQ ID NO: 9926 - DNA, 201 bp, Artificial Sequence
  Description of Artificial Sequence: Synthetic probe
ttgggcttggcgaggtaagacgggaggctccaacagatagggatgatgaagcagagcggatggcttcagtccagttcctacacacagcctggaacggtgargatgaggcctggatggcgggtgcggatgggcagcctaggatggctggcagcgagctgtgaaggttggccatgctcatgggcatgaggcccctgagctgag

SEQ ID NO: 9927 - DNA, 201 bp, Artificial Sequence
  Description of Artificial Sequence: Synthetic probe
acgcgtacgtgctggaggggagcgcgccggtgctgccggagacgaagcggctgtacaagaagctgttgtcggtcggcgtgaagcccttcttcctcacgggycgggccgaggaccagagggccatcaccgtcgccaacctccacagccaggggatctccgggtggatggacctaaagctcaagcagcccgggttcaaaggct

SEQ ID NO: 9928 - DNA, 201 bp, Artificial Sequence
  Description of Artificial Sequence: Synthetic probe
cccaaatagaaaactgcgtacatttacaatgttttgttggccctcatttttctgtacaaacatgcaactggatatagttttggccccaattggcaggtttrtacttcatcccttttttcggaattttgggagatgaagggtgtatacagttcgttcttgtgtagatatgatgcaatcaatatatttgaactgtatacattt

SEQ ID NO: 9929 - DNA, 201 bp, Artificial Sequence
  Description of Artificial Sequence: Synthetic probe
gagaccagaaacagagctcctacaaaactgctgacttccataactcctatcaaggctgggcttcaaataagaagacctactaagcatatgaaaccatgaaygcaattgcccaatatataccataatctggactttattcattcttgtgactggcagtataaaattatccacattgaaaagaaatcaagacatgataaaaca

SEQ ID NO: 9930 - DNA, 201 bp, Artificial Sequence
  Description of Artificial Sequence: Synthetic probe
aaaaactacaggcataaaaggagagagagctgagatttacatatacctgcaaaatattccgtcactgaatcaacacggtaggtactactgcaagcttctcrcattaatgtcctttcatgtttcttgattgcgacaactccgggtggcacccaatgatatgaagtgtttctactgaggatggcagaccacatggcggtaaag

SEQ ID NO: 9931 - DNA, 201 bp, Artificial Sequence
  Description of Artificial Sequence: Synthetic probe
gatactacatttaagaatatatcatgacatagttggttattccgggccatttctgtatatttgtactttgagtctgaatgcatgcagttttcagttgctargggtaaagaaaaatactaaaagaagtgaaaacctcggatacttcatcactgctcaaggttgactatgggtagtacaaatgatacaagtatcgcggagaaa

SEQ ID NO: 9932 - DNA, 201 bp, Artificial Sequence
  Description of Artificial Sequence: Synthetic probe
actgaacatatttatgatcttggtcaccggacacttttcctaggtcttcagaggtgcatctcggttaatgcggataagttttcagccattgcacaaaattkcttatatcaggtatgcatttcaacacatacaaggcaaattaaaatgggcaagtacaattttatgagttctgagaagcatacggtttatgaaccttttatc

SEQ ID NO: 9933 - DNA, 201 bp, Artificial Sequence
  Description of Artificial Sequence: Synthetic probe
gcatacgaacttctccatgaattccttctcgctgatcatgagtgtactatagtagtcacggtctttatgtaacaatcctttttccttaagaaacttaaggrcatagtaccggggtctgacacggccctccaggctgtaagtgagcattgctggccgatgagcaatatatgccggtgccaaccccacattagagaagaggaa

SEQ ID NO: 9934 - DNA, 201 bp, Artificial Sequence
  Description of Artificial Sequence: Synthetic probe
tttcccagctatcctactgcatcccctatttaagactgaaagtaagtttttcatcttgcagaaactcacagagagatgatccttggtgggccagagattgyatagctgcaactcacgccgtcccacaagtatttcttgggaccgcacggatcacccatccagttcttcttgatccgatacatggccttgatggccataatg

SEQ ID NO: 9935 - DNA, 201 bp, Artificial Sequence
  Description of Artificial Sequence: Synthetic probe
accactaagccgcacaaaggaaatgattcaaggtgggaggccatccaagtggtgaaatccagggaaggtgttcttggtctgaaccagtttaggctgctcargaagctgggctcgggtgatattggtagtgtctacctctctgaattgagtggaacgaagagtcactttgcaatgaaggtgatggacaaaacatctcttgct

SEQ ID NO: 9936 - DNA, 201 bp, Artificial Sequence
  Description of Artificial Sequence: Synthetic probe
catcaacaaaatagtatggacacacagagtaaattgcatcaacacaggcaaaccaagcacctaagttttgaggaccctgtaactcttaactgtctccaggracataaatgggaacagaggcaaacaaaggcaagagttaaatttccacataattcagacataattgttttgatataacatacaaggtaattaaatttccgc

SEQ ID NO: 9937 - DNA, 201 bp, Artificial Sequence
  Description of Artificial Sequence: Synthetic probe
tcaaaggattcaacagacaccgggtcaatgtccattatatcaccttctaccctattcattattcgttgagtcatgctctgttgagcaactttaggctcagrgaccttttgcttacttgccagttcagttgagaggcgcaaaaatttctttacattactacatacaggacactgctcatcaagacatgtcttataatgatga

SEQ ID NO: 9938 - DNA, 201 bp, Artificial Sequence
  Description of Artificial Sequence: Synthetic probe
cgcggcgaggtggcaccgccaccgctccgagtcctccgcgtactgccagctttgacgggtaggggatacaagacggcagttttgtcttcccaagaataggrtccctgaggtcggacggtgtgaggaaggaacctccaccgctttgactgagccaccgcataggccaatccggcaagactacgtgataaggaaagaggcaac

SEQ ID NO: 9939 - DNA, 201 bp, Artificial Sequence
  Description of Artificial Sequence: Synthetic probe
tgccatgcaagtattaggtagcaaaaattaacaccacgtagcctttttgaataaatctcccaattgttcactgttctgtatttggctcaatatggtggcaygttaaaccccatttgctgccttgctaggcaccctgatttggctgcaactaacatatttttttttagcttaggctgcaacaaacatgatagttatgtcaac

SEQ ID NO: 9940 - DNA, 201 bp, Artificial Sequence
  Description of Artificial Sequence: Synthetic probe
cgccacatctgcttgcagagcgttcctggtgctagctgctttatttcccggaggaggactgctcacggatacggattgtgcacaccaaagtcagcaagcarccacgcaacacgcgtcgccagcctgcaacatcatctctttccgaacgtacgtcgctagctgttgttggccattttgcaagatcaccctcatgtttatggt

SEQ ID NO: 9941 - DNA, 201 bp, Artificial Sequence
  Description of Artificial Sequence: Synthetic probe
tgatgacgatggcaatgcgcttccatctgcggttccttcaggtgcaccagatcagccagaaactgatccatcgggcagtatgtcatacaaatcaactgaarctcccagccccattataagaggtatgctttccatacgaaaaatagttttacaacttgtggcatataccctttcattggaatttgaaactatctttgatat

SEQ ID NO: 9942 - DNA, 201 bp, Artificial Sequence
  Description of Artificial Sequence: Synthetic probe
cgtctggactgatgctagctgcggagatgagatggcaaacctagaatcggcaaggggattggtctcactatttcaggttccaagatctactctgatgtgarttggcatgagggtccttgctctatagtactgtatattccttctactgccggccggtttgggcatccatattcaggttccagcaggttcagcaaaactaga

SEQ ID NO: 9943 - DNA, 201 bp, Artificial Sequence
  Description of Artificial Sequence: Synthetic probe
gttggagacgccatgcaggttctcacgaacgggaggtacaggagcgtgaggcacagggtggtggcagaggccggggaggaggtcaggtcaaggctgtccaygatatacttcggcggcccggcgccggagcagaggatcatgccggtggcggagctgatgggggggctggaggcgagccggtacaagagctttacatggcag

SEQ ID NO: 9944 - DNA, 201 bp, Artificial Sequence
  Description of Artificial Sequence: Synthetic probe
agaaaaaactatgtgttcctatgccaactatactatatacctaatcctgcatttgtccttttacttcgtttctaggactcggaccaaaaaaggcatctgtyctttcagtctcagagtgaccctggtctgcatcctacagcagatacacatggcttaagggaagaaaaatataccagtattaaaatacatccaggttcttat

SEQ ID NO: 9945 - DNA, 201 bp, Artificial Sequence
  Description of Artificial Sequence: Synthetic probe
cgtagtggttctttgttagcttgtctttgggcccaggattccgaccaacacaactaaaaataatctcccaagtgcatctggatcatccagcatgacatgaratcatctaagtttgtatgctaaattgcaaactaaatgtttcacctgttcactttttattgcagccattgaaggtaaaatgactgcgttcaacttgcttgg

SEQ ID NO: 9946 - DNA, 201 bp, Artificial Sequence
  Description of Artificial Sequence: Synthetic probe
agaagctatctcaagttgatctcgccggaattcattaggaagtatgctcctccaatcccttgatttgccaacagaacaaaagccatacagaagtgaaatgraagtgacagagtctggtgagtagcctttgttagccatcttattcattatgtccaatgccttcccgagcatactatgtctgcacaggctaaagatgatagc

SEQ ID NO: 9947 - DNA, 201 bp, Artificial Sequence
  Description of Artificial Sequence: Synthetic probe
gcatattagaggcataaacagttacatgtactctagttacttcctttgcatcaaattcaactcaccgccactttaatactgtgaactacagtccagaaacygaatattttcaaagcatatagcaggaaattttgatagagctcttagtgctagtgctaccacatgcacggaatgtaaaaacagtacctgtgttggttcttg

SEQ ID NO: 9948 - DNA, 201 bp, Artificial Sequence
  Description of Artificial Sequence: Synthetic probe
ggcagttcagacaaactttaagtaagataagccggttggctgccaaacactggttgatgcaatcagccacgctggataggctgcttttgcaagaaaaaaawttagcatggccatcaagtccaaacctggaactgctccagattggaggccaagtttacatatatacttgagataagggatgctgattacatctacatcaat

SEQ ID NO: 9949 - DNA, 201 bp, Artificial Sequence
  Description of Artificial Sequence: Synthetic probe
gaagtagtagtagtagggaagaaaaagggcaggccggacccagttgcaacgccacgtttgactcttctccgatcacttcatttcatttcgtttcgtttcgyttcatccaaaaagggagaagaaagggtgagacaattagtaagatcaaaagcgaggctgtacagtagcagaagagtgggggattcctgcgcgtcacttcca

SEQ ID NO: 9950 - DNA, 201 bp, Artificial Sequence
  Description of Artificial Sequence: Synthetic probe
taatcataatacagtatatgacttcctgcatttcatattagggggacatttgatttttggttcagtttttccatttcactggcgcatgctcctaccaaagygttcgttaattgcagtgttcccattatcagcgattggctaacaacctgctaactcataagtactactctctccatcccatggtataagatgttacttcct

SEQ ID NO: 9951 - DNA, 201 bp, Artificial Sequence
  Description of Artificial Sequence: Synthetic probe
ggaggctcggactgcgttttcctcttttgtacaacagaagtcctcattgtttattagaaaataaagcaaagtaaatataaagaaatgggcaaagaatgtgytactataaaaagagtgtacctgttaatccggtattccagtcctagacagcaaaagaccagatcctgatgaatagtttaatggggtacattctttccaaag

SEQ ID NO: 9952 - DNA, 201 bp, Artificial Sequence
  Description of Artificial Sequence: Synthetic probe
atctatgataaaaaaatgctaaatgctatcctaaatgattatggctgcttacttaagcagctcaaggcatgaagaagaggctcttggtagattcagaggcragacaagaagcaggaaacctcagccacattttatattctgaaagaacatcaattcttctgatacttgtcagcagaaaatagccacaagtatgctactaca

SEQ ID NO: 9953 - DNA, 121 bp, Artificial Sequence
  Description of Artificial Sequence: Synthetic probe
ttgacttcacaaaagatgctgtaaccaggtacctccttcgtaataatgttccaagtttccygtggaaacgtccctgcgtttggattgtgaagctgtttccaagaaggcgatcaggaaaagc

SEQ ID NO: 9954 - DNA, 201 bp, Artificial Sequence
  Description of Artificial Sequence: Synthetic probe
tctgagagatcaaaaacctgtgaaaaggagagtagctccagctatcataaaaatgatatgaagtgctactgtggatcacgggaacgaactgattgagcatyacagcttctccaactgctaggggaggtacctgtgcttcattgagaagttcacggtacgttttgatcaagccacttccaagttgaccaccgctcctggagt

SEQ ID NO: 9955 - DNA, 201 bp, Artificial Sequence
  Description of Artificial Sequence: Synthetic probe
acttttttcttgaatattatgctttgtacagatctgcttgttgacaacagttcttgccattcaggagatcaaaggcatccgaatggaaataccagtccctrggaatccggtttcttctagtctgcttgaagattgcaggcgtcttcaaacattagtagctaacaatgatgtggtcttcttgttgactgacacatgggataa

SEQ ID NO: 9956 - DNA, 201 bp, Artificial Sequence
  Description of Artificial Sequence: Synthetic probe
tcactattaaactcacgactaacttgacacactgagcccgcccagaccaatcctttcggtgatttgggctgatccaacttatcaactcaaggcctagaatrattgataacgaggtccatttttgcagttccagaaaacacactaccactatggtgctattgcaccatatcacatcacaatcacagatttcagtttcatcat

SEQ ID NO: 9957 - DNA, 201 bp, Artificial Sequence
  Description of Artificial Sequence: Synthetic probe
cacgcagaggcgtaaaagatgatgcagggtagacacatggggtgtgtactgatctaaggcgagacgcggaggatgcagatgaaggtggatccagatgaagktacaatccatgatgcaaatgcagcacatagttcattactaagcaggtttaattcgttggggggagcttgtgcagcattggtatgatccagagagaacgtg

SEQ ID NO: 9958 - DNA, 201 bp, Artificial Sequence
  Description of Artificial Sequence: Synthetic probe
tattattctgcatttaatatccaactaagtgagcatgcaacacacatttaggttactgaagactgagaactgtacgtcacatcttgcactggagactgaargtgaaagacggcacacatttcttatcgctgaggagtattattctgcaacaaatgtccaaagctagtataagtgagcatgcagcacacatttaggtcagtg

SEQ ID NO: 9959 - DNA, 201 bp, Artificial Sequence
  Description of Artificial Sequence: Synthetic probe
tgatgtcttaagacttggtagaatgttgaaattaatactagaaaggaaaagatggcttcatgcatattaacgatgcacaattaaggaaaatatcactgaamttgaatggttctacaaaatactagcatttttaccattccgtcaacctaagttaggctttttcccagtcagtttttgcatttcgcgaaagccatacttgaa

SEQ ID NO: 9960 - DNA, 201 bp, Artificial Sequence
  Description of Artificial Sequence: Synthetic probe
gaatgatttgcaataagtaacttgagcacgttttttatgccattttaagtattcattctgcacttccatgtgttgtagcctgatgggtcgtaactcgtggytcatgcgctgtttttctctggatgcatcagtgtaacctgctgttggtctgttctccgagtttgcctattgacaattggttcgctgtagttgctattgata

SEQ ID NO: 9961 - DNA, 201 bp, Artificial Sequence
  Description of Artificial Sequence: Synthetic probe
agggaagagaggcgctgctctatgccacttttgcaatttttatgctgataaatccgagtgatttaaagttgctacatccgtctcttgggtatgcctcctaytcaacttcttgaggatatgttgtacagtgtaaataatttatttcatcatttgactaggaaatacaaagcaatggatttctcaagatctctttagaaaatg

SEQ ID NO: 9962 - DNA, 201 bp, Artificial Sequence
  Description of Artificial Sequence: Synthetic probe
tgtgtggctgcgtgagtgttgcctgcctgcattcttttaggtaggtggggatggagccttcttggctgggagcaccgtccaaatttattttcttggattgycacttctcactctaaatctgagttgttcttggtcagaggggagtccggtgacatgttccctattcactgtatcttgatcggttgtcaggagtagcacggg

SEQ ID NO: 9963 - DNA, 201 bp, Artificial Sequence
  Description of Artificial Sequence: Synthetic probe
gcaggacttcctcatagacctccttgtatgatttccataaatagggccctggctagaagatgaaaatggagaaggttcccatcaagaacgaactaatagaygatatacatctagcagatacataagcttcattatccttggggttagttgtatttgcgcataccactccatctttaaatggacgccatccaagcatccggt

SEQ ID NO: 9964 - DNA, 201 bp, Artificial Sequence
  Description of Artificial Sequence: Synthetic probe
agaggcagcgctttgacacgcagaacgtcgggatatctccacccgccatcgtgtacaccggaccaccgtccgctgccggcggtgagaagcacgacggcggmtcaactttagtcatttgtgcttacctgaacctcctgtccgtggtcgcctacctacctgtacaagaaggatgagaagctgttcgtgcgggaacacatgcat

SEQ ID NO: 9965 - DNA, 201 bp, Artificial Sequence
  Description of Artificial Sequence: Synthetic probe
ttccaatgatttcagctagatttctcaaagaataccacgactgccacacatgttacatatataaaggctaggtacgctccagaatttgacaagtatcttgrtacaaggattttggtgaatacatgtaaatgaataaaagaggattgacacctgaaaaatgttcaaagaatttctggtgcaccgtcatctctgccatagaaa

SEQ ID NO: 9966 - DNA, 201 bp, Artificial Sequence
  Description of Artificial Sequence: Synthetic probe
ggaattataagaaacccctaaactgacaggacgtgtaagttgtcagctgaaaagaaacattagtgcacaaccctcaaaagataccgcatgcttgaatgtgygtgtggtgtgagactcttggccttgacttgattccagtgtgtcctaagtcaaacagatcaagatcgttattctttggtaattaagtctaccaaggtgctt

SEQ ID NO: 9967 - DNA, 201 bp, Artificial Sequence
  Description of Artificial Sequence: Synthetic probe
atgtggtgtctaatcatgcagtgatgatacactataatcccagctctatgaaaacttccctttgtgggtcgtttgtgatatggactaagcgttatagttaygtctgagcatactgtttcaaagcatgatttacggtgttaattaattttggctgtctgagtggatgtgtatttagatttggttagcgaatcaactatttgt

SEQ ID NO: 9968 - DNA, 201 bp, Artificial Sequence
  Description of Artificial Sequence: Synthetic probe
tgtcattagccactgtacagcattcagtaaacagccgacattgcatcacagaaaggagatagctgccaaggaaagaaaaacgatttgtaaattttgcactycatccagatatcatacaggattttgattagattctgacaaaactacgttgcagttctatgaaaaagaactgaggtgtacaatagggataggcaattttag

SEQ ID NO: 9969 - DNA, 201 bp, Artificial Sequence
  Description of Artificial Sequence: Synthetic probe
tagggtaattttcacggcaatatcaaaaattcaatatacatactcttttttaagcttcatttttagggattgtgataacttatgacttccagttatggtcytgatattcaatttctacagcacatattctccttgagtatttaccccttattagtaattaattatgatagcaatttcagcacactgcattgatagaaaaac

SEQ ID NO: 9970 - DNA, 201 bp, Artificial Sequence
  Description of Artificial Sequence: Synthetic probe
ttgcgctggtagaacaatgcaacttcaagttcggttgggtaatattgacctgattgctctagtagattcagggtcaacccacaatttcgtgcgagacgacrtggttcagcgaatagggctcgctcttgcaccacgaccaaatcttaaagtcactgtggcaaatggtgaacgggtgccatctgctggtgttgctcaacggca

SEQ ID NO: 9971 - DNA, 121 bp, Artificial Sequence
  Description of Artificial Sequence: Synthetic probe
cattgaacttagctaacattatggttcctggacaaccagcatcatcatttcttcctcttaygatctaatgtagtatacagaaccattgccagcggttccagtatagctacatcaaccacca

SEQ ID NO: 9972 - DNA, 201 bp, Artificial Sequence
  Description of Artificial Sequence: Synthetic probe
tctacacggacagagaggatgaaaaggatcacgggccaaaggatgctaaccttgccgtggatagctatctttccattctgactgcatgcatgatttactarttcaaagtaatttcatgtgctctggacgatatagtgacataccttccctatgccaagacaaatcttttcaggaatgaagccattaaatacaacccacaac

SEQ ID NO: 9973 - DNA, 201 bp, Artificial Sequence
  Description of Artificial Sequence: Synthetic probe
cttagggaacacctccttaattagtgttgacttatcaagcttcaagcacgatttgcagatgcctataccgtcactggacagttgcagatcacagtagagarcgacatcaggcaagccagttgacatggcaaactgatacgcagcagggcttgattcaggaaataagccagagaaccctccacgagcaatgactagaggagg

SEQ ID NO: 9974 - DNA, 201 bp, Artificial Sequence
  Description of Artificial Sequence: Synthetic probe
acagaacaaccatataaagactgacgaaacagcaaactgcacagtgacaaaaacatgacagcaagcaagggctcctcatgcttgcatgccacctgagaaayacaaaaagcagtaaggaggtagtaaataagaaacatcaaacatatacatgtacctggtaaccatgagaaagatgtccaccgtgaggaagatccagagcca

SEQ ID NO: 9975 - DNA, 201 bp, Artificial Sequence
  Description of Artificial Sequence: Synthetic probe
atgtttactaagttgtatgaggaaatgtggagtataaaataaggtacttacggcacaaaaactgcattatactcctgttcaaggcatatgacgcatatttycaagaccaattggtccttcttactgttaggctctccatctgatgtaccatctgcccattcacataataataaatgatatcataagatagaaactagtact

SEQ ID NO: 9976 - DNA, 201 bp, Artificial Sequence
  Description of Artificial Sequence: Synthetic probe
cagaaacttttatatcccaatagaatctctttgctaatcagtctgacaaacagaaagaatgagcacactggtcacgagagttcagctgcatttgtatcacsaaactacagcttaagattgaacggcaaggaacttttatagattatacatgcttgttgaaagaaagtaggttcactgagtggctttaactagaatggttca

SEQ ID NO: 9977 - DNA, 201 bp, Artificial Sequence
  Description of Artificial Sequence: Synthetic probe
tattgcaacatgtcagtaacatggggcttggatgggatagaaccatggtcatgcctagcagtttgaagacacacagatcttcaaacgagcgttgcagtccrtcaccagcatggagactcctgggcttgcagccgcagctgctgcctagcagcttgaggacaagctggtcatcaaaacgagaggaaatatcatgtgggctga

SEQ ID NO: 9978 - DNA, 201 bp, Artificial Sequence
  Description of Artificial Sequence: Synthetic probe
cgtacagctctacatgtgattgggttgacaatattcaaaactaaatcacatctaatgtcaacttggtatacttgtatatccaccaagcttgcacacaatamacatacgttatatccagcatacatatccagtaccaaatgtttttaatacataattcttaaactaacagttgaaaagcgatgttgaattaccagtcacagt

SEQ ID NO: 9979 - DNA, 201 bp, Artificial Sequence
  Description of Artificial Sequence: Synthetic probe
ttagaagtgtgaatttgctcaaagatctgaacacagcgatgcatgcaaatagctatggatattagtaccactaataagtggtggatgttgagacatggaaytcttccaaacaatggcattgaaatatagacaaatagagctaagtggatgaggtggaaaaaaggcatagctttctatggctggaaatagtatgacatctca

SEQ ID NO: 9980 - DNA, 201 bp, Artificial Sequence
  Description of Artificial Sequence: Synthetic probe
gagtgactctttcagccttgtcaaaaggtatatgagactccagtaagaagaacaaatatcagcgggtactgatgacggagtagaaaaaaccatagcttccytccaccgattatttttatactacaacggtgacattatgcagatggtgatggtgaaaattgtttttctacgtacaaacattaggacgataaaacaagggtg

SEQ ID NO: 9981 - DNA, 201 bp, Artificial Sequence
  Description of Artificial Sequence: Synthetic probe
gcggcaagacggctattggtagtgggagtgccacctccgctagttcctcctccatatgtcgtccctcgtcatccgaccggtaccgacaaagatcagaaatygtggggattaaataaaaaaatgagtgaaagagagaggagaggaatcaaatcaacatgagctgcacacgtacctctattggcccttcgcttgcgagcccct

SEQ ID NO: 9982 - DNA, 201 bp, Artificial Sequence
  Description of Artificial Sequence: Synthetic probe
aaccctggcccacttaacaaaaattaactggctatcatatacatattaaaatgtgcatgctaaatagacatgtactttgagttcaacattgctagattggyatataaatcagccattaaggtcctcacctgaataaaatggactacaacatatagctgaggatagaaatggattctaattctcttactacctaacgaggtg

SEQ ID NO: 9983 - DNA, 201 bp, Artificial Sequence
  Description of Artificial Sequence: Synthetic probe
aggactagctagcctgtacaaacactggagctagtatttaacaaagtgcatacaagcatattagaagtagccaaataagaaaaactttgatcaaatttaayaattaattagtcatcatatgcatgcccaaagcagcataacttccaaatccattttctaagaatgtggcattttgattccagtatatcttcatgttatgtg

SEQ ID NO: 9984 - DNA, 201 bp, Artificial Sequence
  Description of Artificial Sequence: Synthetic probe
tataatcatttgctagttataaattatttagaatgcagaactctattgaatactcattattacttgtgacatttttgtatagtctcaattttcgccttcartttcctgtattcgtggcaccaatttccctgtacaggaaaattattttctgtcaaaaggaaactggtaaaggaatggatgttcctttgtgcgaaataagta

SEQ ID NO: 9985 - DNA, 201 bp, Artificial Sequence
  Description of Artificial Sequence: Synthetic probe
tagactgattaccattgtttaagcttgaggggtatacgattggctgcccgaaacagaaaactggcaaattcttaatactattgtcaaggctggggggagtygattgaccattgaagcttgaatggcgcacacatccatgtgggcagaatggcagataaggacgcgctctcctgataaggaggtaccgacccacgcccctct

SEQ ID NO: 9986 - DNA, 201 bp, Artificial Sequence
  Description of Artificial Sequence: Synthetic probe
gatgggaatgatagacaaaataagcaactatactgatgcaacaggctacctcagcctagttataaactgaacaatctatcacaaatccagggctgggtgartatactgccagattaaaaggctacttcagcctagtttagtaattgtaaccaattaatgaatcttgaagccccaaactccatggtgtgggtctcgccaact

SEQ ID NO: 9987 - DNA, 201 bp, Artificial Sequence
  Description of Artificial Sequence: Synthetic probe
atgaccagtgtagccaaaataatatacaagggaagctatggatattaggatctaagaagcacacttaagaaatgaaagagcccatcttagagggtgttgcrtgaaacctggtgtacctctttcgttctccctgaaacatgtatgttgaagtaatatattagaaaattgaatatcatcgtcttcacataagaattaaccata

SEQ ID NO: 9988 - DNA, 201 bp, Artificial Sequence
  Description of Artificial Sequence: Synthetic probe
acttttccaggtaaatatattgcaagaaccaagaatatgcatggtggcattttaaattggccagcggagcatgctttagtggagaaaggacaaggaatgtraactaaagtttactgtgtttagtgctcctttgctggaattcacactgatgctgtccttgcctcactgatcactacatgtcaattccagctacattctctc

SEQ ID NO: 9989 - DNA, 201 bp, Artificial Sequence
  Description of Artificial Sequence: Synthetic probe
ttggtgtggtgacaatcagggcttttgcagcaacatacatgttcatccacaacaatgtgcaacttatagacaatgatgcaacaatgttcttccacatggtygctgcacaagagtgggtgcttataagagtggaagcactacaaaacttgacaatactcatgtcatccttgttccttattttgattcctccaggagtaattt

SEQ ID NO: 9990 - DNA, 201 bp, Artificial Sequence
  Description of Artificial Sequence: Synthetic probe
tcctttgcatgctcctctgtcagtaaaccaaaatctgccaagttgcagtggaggtgggaatctagaacgatgttctcaagattcaatccaccatgaaccaycatctgtggtttacatgaatgcaagaacagtagagcatttgagatctctgaaacaatacgtgcacggattttccatggcagcggtggggtatcgtagcgt

SEQ ID NO: 9991 - DNA, 201 bp, Artificial Sequence
  Description of Artificial Sequence: Synthetic probe
gcatgctggaagagctcagagcccgtaagcaatcatcaagctgagacaccggcagctcagtttgactaatctctgttttttctctgtgatcgtcgtaaccytctctgtctctgcactaggccgtagatgctcggagacaagaatcggttgaccggccgttgcagcctgtagatgtgttctttgaggaacgtgtgtttgata

SEQ ID NO: 9992 - DNA, 201 bp, Artificial Sequence
  Description of Artificial Sequence: Synthetic probe
acagtttctaaattgctatccatttgtcctaggcttagtttgacatgcttattcagctaaaaagaatagaattatccacacaatataaacctgtggagttrggattttgcaactgagtatttaagtatctgtttttcctcaaaaaagtagttaagtctctcttgtttaaagtatgagcgtgcatgccatttcaatctgggg

SEQ ID NO: 9993 - DNA, 201 bp, Artificial Sequence
  Description of Artificial Sequence: Synthetic probe
atccaacactaaagtttcttacagtaattaattaattatgtcatcattttcatacaaggaaattaattaaattggttgcaatggcaagagcataaactccrctctaatagaaaatagatataatctcgcacctggtcacctaaatgtttctgtctatgaacttgagccatctccttaagttcagcaaaaaatttacatata

SEQ ID NO: 9994 - DNA, 121 bp, Artificial Sequence
  Description of Artificial Sequence: Synthetic probe
cttgtcttcgtaagtagtaacaacatctgaaccgttcactgcctcaaccatcttcccctcrttccctgaaaataatgtggcccttgttaagtcaaattaagttttccgtttatacagctga

SEQ ID NO: 9995 - DNA, 201 bp, Artificial Sequence
  Description of Artificial Sequence: Synthetic probe
tacgatgggatcatgcaggagctagctgacgacaattaacccgaaagtttagtgtagtttattagctgggcccgaaccaatccactgtggatggatgctgsccatctggtgaccgatttgtcgccacttttctcatcttctgccactccgggtctctggctacatacgtacgtggcgatagatctgtgaagcgaacctaac

SEQ ID NO: 9996 - DNA, 201 bp, Artificial Sequence
  Description of Artificial Sequence: Synthetic probe
cacaatagcaaatgttaggtatctacatatgtgaacatagaatagcattctcagtgtagtctcttatacctgaaaggttctcagcagcaaattttaggcaracagatttaagctccgtggcatgatactgatcagccagcgctagagtagttgccacagagttcacagaaatctgcttgcacaagtaagattcacatagca

SEQ ID NO: 9997 - DNA, 201 bp, Artificial Sequence
  Description of Artificial Sequence: Synthetic probe
aatccgggaggcactcaaagttgtcctaggtaattcatcttcataaggacacagcacacctctaacacctgcatcacagcatttcatctctcttactcctytccctttactttgacccagatgtaagaaatcaaccgctgcttattcactgcaagagaggcaaggtaaacttagttcctccttatcacttcacagctggta

SEQ ID NO: 9998 - DNA, 201 bp, Artificial Sequence
  Description of Artificial Sequence: Synthetic probe
ttcatacgatcaatgatcaacttgagtactgatgagcttttgatgaagtgtacatcatggctattaattgcttcttattgttttcaggccagtggttttcyttctgtttctttggataataagtttacaatattttgtatcaatattttaaatcaaggaattcagaggaattgcacaggacaatctgcaacatgcaactgt

SEQ ID NO: 9999 - DNA, 201 bp, Artificial Sequence
  Description of Artificial Sequence: Synthetic probe
atataattccctaagggtgcatgactatggtagtatgatagtatatattcacctaaaaggtatagaacttctagtgccacaagtggaaatatgccatgtgrtgcacaaagaaattaatcatgtgagatagattatgagaccattaagattagggcctaactaagattctattaagtactcctgtcatcaacagaatgtgta

SEQ ID NO: 10000 - DNA, 201 bp, Artificial Sequence
  Description of Artificial Sequence: Synthetic probe
cagagttgatgtggatcctgataaccatctgcgtctgcacaagcgtttcaatccatgaacggaattttagcaactaacgacaggaagaagcaagtctactrtaggagcccttttttaaaaatttgggtacagtacaagagcaagaaataattgctcacaaatcgtgtacaatagaagagctagaaataattgctcacaaat

SEQ ID NO: 10001 - DNA, 201 bp, Artificial Sequence
  Description of Artificial Sequence: Synthetic probe
tacaccatacatttgaaggtttttcctgttgcaccacctacacttatacattaagaacactggagtcaagttaacgaggtatggtgagatacaaccggagragagtagacccagtgatcacttttttaggctgtgcaactcaagtttgcagagtctttggaaatttctgagatcagctttagctgtctggagtaataggtc

SEQ ID NO: 10002 - DNA, 201 bp, Artificial Sequence
  Description of Artificial Sequence: Synthetic probe
atgaaaaagcaagattcatgattctcccgcaggacgacgctttcaatctgcttcccagtcaggtagcctaatggcaaaaaacaaaattttgtaaggtaggrgttgtggcttgcaggaagctgcaccgctctgctatgttgtgtgctgaaagattagtgagtataagagcaaaatttaaggaatgcatatagcttactgtga

SEQ ID NO: 10003 - DNA, 201 bp, Artificial Sequence
  Description of Artificial Sequence: Synthetic probe
gtacaactaaatagtaagaaatcctacaacaagtacatatcctggagctagtagccaaattacattatagataggtagttctctaaagatatactaccagyttcatgagaagacaatagtagttctctaaagtttcatgagaagacaataagaggacaacagaaaaatcctttaaattccagatacttatctatgtgacat

SEQ ID NO: 10004 - DNA, 201 bp, Artificial Sequence
  Description of Artificial Sequence: Synthetic probe
ggtcctttgcttcttcctgctggcaaagattatggcggagacggcctcgctggagttggttgccagtgggagggcaatgaacgagataaagaaggatggartgtgtgtggcgttagagaagttgtggacggcgtcaacgagcgggtctgcaaatgcggcacagatggcactgcccagaagcaggtaacccacggctttggc

SEQ ID NO: 10005 - DNA, 201 bp, Artificial Sequence
  Description of Artificial Sequence: Synthetic probe
gcaatagatggtgtctgagcaaatcttaaacatagcaatgacacacctgggccgataaaaccaattgactgcaccaggcaaagagaagttgttggtattgygatgagtcttatgcttcagctcttgcatgttgttagtaaactctatttgcacgagactaatttcagatgattctcttacctgcataattttccgaacttg

SEQ ID NO: 10006 - DNA, 201 bp, Artificial Sequence
  Description of Artificial Sequence: Synthetic probe
ctcagtaaagaggagctcactgtcagtagtgtgtagtgcttccagtagctcacaggaaagagtttcatactcgttaaccttctcctccagctttgcaactyccttgcgtagaataaacacctgagggtaattgatacccttaagctcaacttgatactctgctgcaagtgcatggagggctatgatagcagcattctgctc

SEQ ID NO: 10007 - DNA, 201 bp, Artificial Sequence
  Description of Artificial Sequence: Synthetic probe
tcgtccaggacttcctctccttgttgtgcttgctgctcgcgacgtgccggcgcttcacgatgatgtagacgacacgatcgtctggaaccactcccctaacrgcgtctacatggccaagtctgcctaccgccttcagttccttgggcgaaaggggagcgttatgccggctccgttctgggacgcctgggctccagccaaatg

SEQ ID NO: 10008 - DNA, 201 bp, Artificial Sequence
  Description of Artificial Sequence: Synthetic probe
tgacggaaaacttcgggtttgcagcgcgtcttgctgatcttcagcagaggatcctggaggattgtgaggtccaaatggagcgattgtttttggaatggaamgagggaacatagttcttcgtagaggtgtggatggttctgtttatcgcgtcgggaggatctaggaaaaatggccggaaaagttgagccgcagctgttgtgc

SEQ ID NO: 10009 - DNA, 201 bp, Artificial Sequence
  Description of Artificial Sequence: Synthetic probe
tgaaacttgttcctcatactagtgcttagtaaattttctctcttttttgttggccgttttgttacggcatcgttgaaagcttaccgagtttcataggaacyttggaggatatgaattgtaagaaggaagagctagctaattcaaaatgtttggaagaagcttacatcagaaaactgagatttctgtagctttgactgtatg

SEQ ID NO: 10010 - DNA, 121 bp, Artificial Sequence
  Description of Artificial Sequence: Synthetic probe
tgaatcatctgctaactagaggatgtgtgtggttgcagtgttggttgaagaaacaaaaggrtgtgatggctcatgctgtcattgcacttcttgtatagtcttcggaaatcatgggtgtaga

SEQ ID NO: 10011 - DNA, 201 bp, Artificial Sequence
  Description of Artificial Sequence: Synthetic probe
cggctggcattccggggcggagatatacttcccagttttggaaatggtgcgggtttgccatggaaggcaacgaatgaccatattaagaacatggcagaagrgagctttgcactgaaccatgagattggaggctgtttgcatcttctttatcaccctagtcttctcagtggccgtttttgcccagatgcttccccttctggt

SEQ ID NO: 10012 - DNA, 121 bp, Artificial Sequence
  Description of Artificial Sequence: Synthetic probe
taaggacataccgacatactaaaagtcagttggactctaccacgtttagttcatcaacagraatatgctaaacaaagaagcacacacatagttaaatgatcaaagcaattttggcataaat

SEQ ID NO: 10013 - DNA, 121 bp, Artificial Sequence
  Description of Artificial Sequence: Synthetic probe
tcgtggactttgcgattcttgcagacagttgttttctcgggagatctccggcgatgtgacracttgcgttcaatgattcaagtccttgcattggagttgtagggtgctggtattggttgac

SEQ ID NO: 10014 - DNA, 121 bp, Artificial Sequence
  Description of Artificial Sequence: Synthetic probe
ctggctatatacccatgccaactcacctaaagtcttcatacgtatatactcatacaataarctggctattagtttagctctataaaatatttaagtactaaatatttgcatgtccatatgc

SEQ ID NO: 10015 - DNA, 121 bp, Artificial Sequence
  Description of Artificial Sequence: Synthetic probe
atcattatgcaaagacttcaattccagggtcctgtcttcgtgaaggcttttgaatatcacragaaggatatctttgctgacagcttcactgatgagagtgctgaaatcatcttcagagatc

SEQ ID NO: 10016 - DNA, 121 bp, Artificial Sequence
  Description of Artificial Sequence: Synthetic probe
caagcctgtgaatgtaacttcatcggggcagacatcttgggacaacatcctttcatacacrtccatgcccatccgtttattgtgaaaccgaacagcatagtgttccatgagaccgagtcag

SEQ ID NO: 10017 - DNA, 121 bp, Artificial Sequence
  Description of Artificial Sequence: Synthetic probe
tggagaatttcttgtccttttcatgtgtactggactacaggcaggaagtgcagaatatgcyctgtaccatgcacgatcttccaagagatcacacacgagatacacagctgaggttcgtagc

SEQ ID NO: 10018 - DNA, 121 bp, Artificial Sequence
  Description of Artificial Sequence: Synthetic probe
agtgtgaggttttattaaagtagcagtgaccatcagagctcaaccaaataaatacattgcrataataccatccatagatacttcaatgctgatagttcatgtgaatctgctgaatattttg

SEQ ID NO: 10019 - DNA, 121 bp, Artificial Sequence
  Description of Artificial Sequence: Synthetic probe
agttatgagcattcaggacatccataccaccttgttttgtctcctcgggcaaatgactacyccaagagttctgaaagggattggccttctcctggtttaacctccttgaactcaagaagca

SEQ ID NO: 10020 - DNA, 121 bp, Artificial Sequence
  Description of Artificial Sequence: Synthetic probe
atatctgcctcttcatctcttaaatggttgtcaccatcatttgcagcttcatccctcttcytctccttgtctctgtcatctataggaatgccaaaaagctttgccatttcaatgtcatcta

SEQ ID NO: 10021 - DNA, 201 bp, Artificial Sequence
  Description of Artificial Sequence: Synthetic probe
gtgcgtgggacactgggttatggatgtgtctacagagctggagcatcggaaccagaactgatcggttttagtgacagtgatcacgctggtttagtggatgrccgcaagagcacaacagggatattgttctttcttggctcaagcgcggttacctggtcctcgcagaaacagaagacggtggcaacatcttcatgcgatgca

SEQ ID NO: 10022 - DNA, 121 bp, Artificial Sequence
  Description of Artificial Sequence: Synthetic probe
cacttgctattctgaattcagaagtagagaaggaagatgttgtagctgggagctaggtggytttgtgtgtatgctgggattgtggcaagccccggccggccagcacatatgattacacgca

SEQ ID NO: 10023 - DNA, 121 bp, Artificial Sequence
  Description of Artificial Sequence: Synthetic probe
tagtaactgagaagccattttgccttctcagttgtaactagttacttagttggcaacagcraagaatctaatgctaaaacttgatatgatattggagtttcacaatgttaatctttccatg

SEQ ID NO: 10024 - DNA, 121 bp, Artificial Sequence
  Description of Artificial Sequence: Synthetic probe
acggacagcctctgatccagttgtaattttttccttggaagtttctgaagaggaaaattcrggagttcctctgagtgggagggcagcgcttgatattgcaaccattcgtctcaccactcaa

SEQ ID NO: 10025 - DNA, 121 bp, Artificial Sequence
  Description of Artificial Sequence: Synthetic probe
agttgggaacacgggcagtgatggttacctgagtgtcatctgtcactccatcaccctttgytccaaaagcaagcacgttgaagaccgtgtcctgtgatggctcttctggtggtgtcggagg

SEQ ID NO: 10026 - DNA, 121 bp, Artificial Sequence
  Description of Artificial Sequence: Synthetic probe
caagctgaaatacatagtgatgttactcctgcgtaataggagcatccttctgggattgttrcacaccagtgaacagtacagccacaattggacaaactatctatacgcagtcagaaatata

SEQ ID NO: 10027 - DNA, 121 bp, Artificial Sequence
  Description of Artificial Sequence: Synthetic probe
caaggcattgctggatgatcctgaatttagacgctatgtggagctttatgcaaaggtgcaratgattgttgacaatcttaaattttgtgcagttgatacctgatactaccatatatgctat

SEQ ID NO: 10028 - DNA, 121 bp, Artificial Sequence
  Description of Artificial Sequence: Synthetic probe
ccacacgcgatgatctctccggatctgcccatgaaatcctgtcccggaccctcccctgcgygccacggagctccggcgcccggtgccgtacgtggagctccctgtacgtagagccagctgt

SEQ ID NO: 10029 - DNA, 121 bp, Artificial Sequence
  Description of Artificial Sequence: Synthetic probe
gaatgttatgttgcgaaaacgaagtgtacctgcacattcatgctccactcggccttttctyggtgttatgtttcggtgcatgcggtgttgctgaagttgttgcatcaggccaggtaagatt

SEQ ID NO: 10030 - DNA, 121 bp, Artificial Sequence
  Description of Artificial Sequence: Synthetic probe
tgaaataatccatggcaagatagccaagaggttcccataataactagtaatgacaattggyaaagaaacagaggtgccatgatgtagctcagtgttatattgctcaggaccgtgcgatctg

SEQ ID NO: 10031 - DNA, 121 bp, Artificial Sequence
  Description of Artificial Sequence: Synthetic probe
gtatatggtattcagttaataagtaggtgagcaccaacactgagccgactcaaatgccagygccccgtctttccctactgagttacacttggttctcttatgtgtgtaagattgaggtgaa

SEQ ID NO: 10032 - DNA, 121 bp, Artificial Sequence
  Description of Artificial Sequence: Synthetic probe
agaccgtcaggatgttcaagcggagttggatatcctcatgccttccatgcctagtttgacrcgattcaccgactatactattacatagtatatgtgactctagattaaaatgcatgaatcc

SEQ ID NO: 10033 - DNA, 121 bp, Artificial Sequence
  Description of Artificial Sequence: Synthetic probe
agtccagtttccattggttgatatccgctcatcatctagcccctctacaagtgcattagarcgactcatctagctcctccaaaagtataaacccctccaaacttctcaaacttgtctcctc

SEQ ID NO: 10034 - DNA, 121 bp, Artificial Sequence
  Description of Artificial Sequence: Synthetic probe
actcatgctttggcatggatatgatatatccctactgtgtctttattgtaccatagcggaytttgggcaaccttgcaattttcaccgaatatgttttatactaaataatatccggttctgc

SEQ ID NO: 10035 - DNA, 121 bp, Artificial Sequence
  Description of Artificial Sequence: Synthetic probe
ctggactttcactgaacaggtatgtagcttgaacataatttaactcaaattctcaacgtgyaaaatatatttcttttttggattctcacgaatattatactgtatgtttacttattcagat

SEQ ID NO: 10036 - DNA, 121 bp, Artificial Sequence
  Description of Artificial Sequence: Synthetic probe
gcaaacaaattcttgtagtcatttcaggtcagatatttattctattttgaaccaaacaagstgatccttatgtcagacacagctagtgtggctcttctccatgttaaccttctataagcat

SEQ ID NO: 10037 - DNA, 121 bp, Artificial Sequence
  Description of Artificial Sequence: Synthetic probe
cattcagtaagagtacagtccaattttgtaactatttcttggaaacagagcgtgtatgacrgaaaaaactgcatggtttatctattactgtgcattacgattgtctttaactaccattgta

SEQ ID NO: 10038 - DNA, 121 bp, Artificial Sequence
  Description of Artificial Sequence: Synthetic probe
cggcttcctcacgcctcgctccacgctcggcctagctcggctagcccacgagtgtgaggtsaagcccctcttcctctctgtaacttactcttcctctctcgccatctcctgctcctcgccg

SEQ ID NO: 10039 - DNA, 121 bp, Artificial Sequence
  Description of Artificial Sequence: Synthetic probe
tctgagttggataagaggggagggcaggatcttgaccagaccacctgctcaggcatgttcyggagtcgcagaagctgtcagagggagcagcagtgcaacgcggaaatcaatgcttgattca

SEQ ID NO: 10040 - DNA, 201 bp, Artificial Sequence
  Description of Artificial Sequence: Synthetic probe
agggaccaaatcttgaataatgtgaaataacacctcagactgaataggaaataacttgaactgagcaattgtatagctatatcatggcacgcacatttttyccaacaacaaacataacttgatattagaataacatcacaatgttctccacagcatacaaccacagctgatccaccgacagacagacgaggcgtgattatg

SEQ ID NO: 10041 - DNA, 121 bp, Artificial Sequence
  Description of Artificial Sequence: Synthetic probe
tttctccatcttatcgcagagagggatacactttgagattgcatactctcccctcattgaygatgtcaattcaaggagacaagtcttagctgaagccaaggttaccaacgttgttctacct

SEQ ID NO: 10042 - DNA, 121 bp, Artificial Sequence
  Description of Artificial Sequence: Synthetic probe
cctccgcgcgttggtgatgtatggggacaaggcctccatggcccttgtcatgttcactgcrccatgctggtttgcaggatccatgaagagctgccaactcgtctctcttgctggagttgtg

SEQ ID NO: 10043 - DNA, 121 bp, Artificial Sequence
  Description of Artificial Sequence: Synthetic probe
cttcaggtatgaattccagatgcagtatggttcaattggatggtcagtcggtgcattgctyggatacgcccagggggcaaatgacaagcgtgtgatcgcctgcattggtgatgggagcttc

SEQ ID NO: 10044 - DNA, 121 bp, Artificial Sequence
  Description of Artificial Sequence: Synthetic probe
taccatcacataccaagcaggattgaatccacctggaggcttttgggctgaaaatcagtaygacccacttagttccaccgttccttcttacaagcatcgtccagctacttcagttctccgc

SEQ ID NO: 10045 - DNA, 121 bp, Artificial Sequence
  Description of Artificial Sequence: Synthetic probe
gatggccaacacatacatgaacctcaagggcttcatggtaagaatttacactgtatcaatyttttgcaaatatgaattcctttcaaacagagtggtcaatcagaagggatatgattttgtc

SEQ ID NO: 10046 - DNA, 121 bp, Artificial Sequence
  Description of Artificial Sequence: Synthetic probe
agggtgatgtccaggccggttagaccggtggtgacgagggcgcgcatgcgttgcagcatcrcgtccgactccatcttctcgtcataggccttcaagtcccactgctgccagctagactcca

SEQ ID NO: 10047 - DNA, 121 bp, Artificial Sequence
  Description of Artificial Sequence: Synthetic probe
ctctctgtcctggaattctgtccagtgcaaagatcattaaggcttacgagtggcctactartgcaggctatgatggggctatgcgtttggtatgtatgccttataatttctctatgagttc

SEQ ID NO: 10048 - DNA, 121 bp, Artificial Sequence
  Description of Artificial Sequence: Synthetic probe
aattccccttcccttcttaactcccataccctcaaacctccaaacaagaggtttaattccyattccttagctccaatttcaccaaacgaaacatgttgtaaaggagtgctaatggaagatg

SEQ ID NO: 10049 - DNA, 121 bp, Artificial Sequence
  Description of Artificial Sequence: Synthetic probe
tttgtaggaacatccatgtttatgcacttaaagtgggattagaaagagattgttttgttgygtctgagctggtcaagtcagccgggagggtaggtgatacccagtacattggagagcttgt

SEQ ID NO: 10050 - DNA, 121 bp, Artificial Sequence
  Description of Artificial Sequence: Synthetic probe
agcagtgtcgtattttgagcgtgtacggctatcttgcgaggtctgattgaattaggaagaygagacaaattagctgaataattcgtccaggttcttgtgaagaactagtggcaacatagta

SEQ ID NO: 10051 - DNA, 121 bp, Artificial Sequence
  Description of Artificial Sequence: Synthetic probe
ccattgttataagagcgatacaaacgatgagcatgtgctttcttgttgctaaggacttgtytcatcttcttccattcccgttcccatttaagtcacctcaaaatcttttgctggtacaaca

SEQ ID NO: 10052 - DNA, 121 bp, Artificial Sequence
  Description of Artificial Sequence: Synthetic probe
gcactaatgccttggagccatggcagaacaggttgttaactcagtgagcttggtcgtgacyggcgaactcaccagcagagtgttctccgggctgatagagaggtacggtaaagatgcagcc

SEQ ID NO: 10053 - DNA, 121 bp, Artificial Sequence
  Description of Artificial Sequence: Synthetic probe
ggaaggcgctgtggctacctgtaaaccgatacgatccggcttcggttaatgccagatctcyggtttccctacgattcttggtgcctccgtgcgggacgcggcgcgtgctctggtctggcct

SEQ ID NO: 10054 - DNA, 121 bp, Artificial Sequence
  Description of Artificial Sequence: Synthetic probe
ttgcacacaagatgccacctccaatagcagagaagagcggggatgggctgacatgggatcygacaagcttgtttggggatgagtttactgtgatggtgatatcctcagcgccatcactgtt

SEQ ID NO: 10055 - DNA, 121 bp, Artificial Sequence
  Description of Artificial Sequence: Synthetic probe
ttctacctagtgagtgaaatctgcacgctttgtacatggcatcagtacctttttccatttmaagaacagttatgttgacttcacggttggagatctctctgggcaacccaacctggcagct

SEQ ID NO: 10056 - DNA, 121 bp, Artificial Sequence
  Description of Artificial Sequence: Synthetic probe
tgactacggagaacaaagtgcccatcaaatgttatgcaggagtacattatatatgttcagyttgttttgttttactgttcttccgttctattcgcgtctcattatacattgaacttttata

SEQ ID NO: 10057 - DNA, 121 bp, Artificial Sequence
  Description of Artificial Sequence: Synthetic probe
attcatggttctttaattgctgaatttatttgcttcttaattgtttcctctgtccgagcakacgctcgctttcaacactgctagcatcggctcgccgagaagcactacttggtcaagctga

SEQ ID NO: 10058 - DNA, 201 bp, Artificial Sequence
  Description of Artificial Sequence: Synthetic probe
gattagagaactaggttcattaaaagactacttcaacaaaaacgatgattaaatgctataggataatcagctccattaactaacgcccagagcatgtaggraccataacattccgcttctgccatgactacattagtgcatcagcttccattctattaacgaacttggcagccctacaaattagtaaatcctagtctatat

SEQ ID NO: 10059 - DNA, 201 bp, Artificial Sequence
  Description of Artificial Sequence: Synthetic probe
aactgtggagtgctactgcatctatctaatacttgtcaagtaaagtctgaaatgtttggattaattcagcagtgttggccatgataatcataatcacgtcyagtttgatttactcctggcgccaaattatggttgccattgcctactgttttcacaaatcgtactatttctaagaattgtgtgtgttatcgccggtactat

SEQ ID NO: 10060 - DNA, 201 bp, Artificial Sequence
  Description of Artificial Sequence: Synthetic probe
agtgcccagatggtgtccgtatcgtccatatggacttgaaaacagacaacatactagttcatgtcagcacaagtggagtactaaccccaaaaattggagaytttggtatctcatggcctcttgatttgaataaacagtatgagcatgttgacaagcctgctggaaacatgtaagattctcaatctaccatcgcggtctata

SEQ ID NO: 10061 - DNA, 201 bp, Artificial Sequence
  Description of Artificial Sequence: Synthetic probe
attttgcgaactaaaaaaactggagttcggatccctttatatgcatttttaaagggtctattatatgcgttatgttagggttgctattaaacctcttattrggcaatacatctcgtggcggcttaagttgcctaatacggttccaagcgaatcgctcttcacgatccttgaatttagaccaggctcaactcaacgagagtg

SEQ ID NO: 10062 - DNA, 201 bp, Artificial Sequence
  Description of Artificial Sequence: Synthetic probe
aacacgttttgagatatgcttaggcattgcaagaggtctggcctatcttcatgaagaatctagtatccgtattgtgcacagggacataaaggccagcaatstcttacttgatgccaatctcaatcctaagatctcagatttcgggctcgcgaaactttatgatgaccaggagacacatgtcagcacaaaagttgctggtac

SEQ ID NO: 10063 - DNA, 201 bp, Artificial Sequence
  Description of Artificial Sequence: Synthetic probe
catcacaccaaagaaacaggggacaaactcatcacgtgcagcaataaacaaattttcataaaccaacaattaggtgcaccaagggcagcaaataaaggacraatctaataccagcttgcaagtgcctgtgtcgggtccgtggggagtagtggcagtcgccaatcagtggcggcagcgcctgtctgtacatggtctactaca

SEQ ID NO: 10064 - DNA, 201 bp, Artificial Sequence
  Description of Artificial Sequence: Synthetic probe
tatgcagaacttcgttacattgaactatcagagttgcattgtacagtacactatttttgaccgaggggtttggtttcctccagtatctcaaaccatctacrgacaccaataagaaaacgaacttcaaacgtatctcacttacctaaaaaaaaagaaactgcggtacttgggacagcaattggcgtcccatttatagaacct

SEQ ID NO: 10065 - DNA, 201 bp, Artificial Sequence
  Description of Artificial Sequence: Synthetic probe
ctgctttgatggtaaacatgcagcctcacaatagttggtagtactgctagagttaaggtcataacaagcacgtttagaatagttggcctttgggagttggycacatgagcatattatccattcaaaatgtgatatgttgttacttaaaataactgcttccttgtttctgttttcttttgttgtaatcagaaatatcgttgg

SEQ ID NO: 10066 - DNA, 201 bp, Artificial Sequence
  Description of Artificial Sequence: Synthetic probe
caacctttttgttccgattgaatggcatttcttcaggtgtgcatctatgatctgtaccaacaacattttgattcaggcaatggttctggatgaacatctcrggaataactcacatatacacaaagtacttcctttcattgacttcacctccagtagtgttatgaacagagaaattcgggaactaccaaatggttctcttga

SEQ ID NO: 10067 - DNA, 121 bp, Artificial Sequence
  Description of Artificial Sequence: Synthetic probe
tcaaagatcaatttgagatcacggacaatatcatgtgggtctgaattctcaaaccttttcygaagctccgattctaaaccatacaagatagcacactgaactgtggagtactgagtcttcc

SEQ ID NO: 10068 - DNA, 121 bp, Artificial Sequence
  Description of Artificial Sequence: Synthetic probe
tcaacatggagaagagttctggcaacgtcttgtccatgttttgcatattgtagttcatcamaaagttcttgtaacttggtggtagtgattggaggacacggtgaatccccaaagaattagg

SEQ ID NO: 10069 - DNA, 201 bp, Artificial Sequence
  Description of Artificial Sequence: Synthetic probe
gctcgtcacacttccagagctgtacttggtttatcctctgctgccacccctgctgaacctggacaggtactagaaggtgcaagacaacggggcgtctgctrcggttggccacgtgctaggcagaggtcacgcggcagttcctcctcaacgtcaaacgccaatcaggctgatgaggagaaggtcagtggatgcatgcccaag

SEQ ID NO: 10070 - DNA, 121 bp, Artificial Sequence
  Description of Artificial Sequence: Synthetic probe
atgtttgaattctagttggcggcagcaggtcctgagaaaataagaagataaggagacatgrccatttgtcaccgcgacgaggagcggcgtctcctcgtccaagtttacagccacgagaaga

SEQ ID NO: 10071 - DNA, 121 bp, Artificial Sequence
  Description of Artificial Sequence: Synthetic probe
tttaaggaatactactcatttgctatcagtttccatgtgatcttgtccttctcatcctcaktcagcaccaccatcctaattctgcactagagctccataaattccacaattgtaggaaccg

SEQ ID NO: 10072 - DNA, 121 bp, Artificial Sequence
  Description of Artificial Sequence: Synthetic probe
taatgaactatctgtgcttgaacttggagcagtctctcggctcataatataaacacctgakgacacatcatcatcttcatctgaaggcacatttgcacttggagcagggcatcggttcata

SEQ ID NO: 10073 - DNA, 121 bp, Artificial Sequence
  Description of Artificial Sequence: Synthetic probe
attgctagtacatgacagaacccacttaaagaacacatactgtatttgctcggcacagccrccgcacctatatcactacaaattttgagaagccgttcacaaattaaatggtacaacacgg

SEQ ID NO: 10074 - DNA, 201 bp, Artificial Sequence
  Description of Artificial Sequence: Synthetic probe
gccatctgccaggagaagatgcatgttcctgttctacttcgctgtaaacacattttctgtgaggattgtgtctctgaatggtaacaccttttgcttatatkgtttttatcctgcattatttggtcatttgaggctttgttgtgtaaggcatctagtttgatatacaattcattcttgcatgttctttatgtctggatatgt

SEQ ID NO: 10075 - DNA, 121 bp, Artificial Sequence
  Description of Artificial Sequence: Synthetic probe
taaaagatgtctctacattcacaggatgctgcttgatgcagatctgatgatttactagttygcgatgctagtgtttgtgccatgccagtgcttcatcaatagggtgcggtagagtcacatt

SEQ ID NO: 10076 - DNA, 121 bp, Artificial Sequence
  Description of Artificial Sequence: Synthetic probe
tctataggttgttgtcatgacacatgcatatggaaaacgttctggagtacgatatgttacmggtggcttgaaggtttattatgtgccatggaggccagtcctgatgcagaatacactgcct

SEQ ID NO: 10077 - DNA, 201 bp, Artificial Sequence
  Description of Artificial Sequence: Synthetic probe
gaccacaagctctgctgaccaccgcaaagaaagggcagcaaagcacaaagcaccaagtaccgaggttgtcctcttaaaaagaagggtggagaagaagagcrccactggcaagacggctgcacctaatgattacaaagaccttgcagtaactccgaacggtctaaattgtgttggcacagttctgcgcaagtgcaaacttga

SEQ ID NO: 10078 - DNA, 121 bp, Artificial Sequence
  Description of Artificial Sequence: Synthetic probe
tcatatcacatcaccatgccctgcattgcatggttatccacattaatttcctccatctacratggcgactatttattgtgttgacaacgaaacaagaggttggttgagaagggggatattg

SEQ ID NO: 10079 - DNA, 201 bp, Artificial Sequence
  Description of Artificial Sequence: Synthetic probe
atactgtctatagcaaaacttccacgtcatctagtagacagtagtgtaaacggtgtgtacattgtgttgtcttttgaggtgtctatacaaggaaccaacgrttgaatcatttctaatcttggtatctttgttcaatagctcaatctatgggcttatgatctatcatggtgcttgtttgccataagaacaaaatttcatacc

SEQ ID NO: 10080 - DNA, 121 bp, Artificial Sequence
  Description of Artificial Sequence: Synthetic probe
tgaatgaaatcaagcctggccaagatgtcaaggtcacaaccgatgatggaaaatctttcaygtgcacacttcgctttgacactgaggtacatgggttcatccctgagtatttttctagacc

SEQ ID NO: 10081 - DNA, 201 bp, Artificial Sequence
  Description of Artificial Sequence: Synthetic probe
ggaggtacaaaaggcagcaaggaggtgaagaaaggcatgggggacagcgagaacttggccaaagctctagagaagttggcagaatttctcactagcaaaartgatggaggagcatctgctggagggggagctattgttcctcataccgaagcagttcagaaactggaactgatgccaaatgacatcaaattggaaggagtg

SEQ ID NO: 10082 - DNA, 201 bp, Artificial Sequence
  Description of Artificial Sequence: Synthetic probe
cacagagggatctgccagaccctaatcttgcttgtagttggggatgcttatctcggagttaaggaggcattattctagtgaaactttcgttactctttccytgctgtagttcaggagaatgaaagatcaactcaacccccaacctagcgaagaacttgttctttttcttttttcaagatggggaaccgaaccccaacctcg

SEQ ID NO: 10083 - DNA, 201 bp, Artificial Sequence
  Description of Artificial Sequence: Synthetic probe
ccaaataggtgaaacacattttgtagtccagcttcatgtagtaatagctcaacatgaggctctctaatgttctcttctgatatacttctcccaagtcaacyttggtgtttcttatatcttcccatgacctcacagttcttacctcagacattacttgcccaagagcatttgccacaagtggtaggcccccacacttcactg

SEQ ID NO: 10084 - DNA, 121 bp, Artificial Sequence
  Description of Artificial Sequence: Synthetic probe
atggcatgccattgttcaagcaagaaatccctctttgcgttatcgtactgaccttttccaygtctcatattctcatgtatacagagtggctgcatggagatgtcttgagacttgaggaggc

SEQ ID NO: 10085 - DNA, 121 bp, Artificial Sequence
  Description of Artificial Sequence: Synthetic probe
gaatgtaccattgcatacaaagaagccagagaagccatctatagtccccaaatctgcggtyaacaggcctgatcatgtcaaggttatagattctctaccaggtgatagtcaatctgctgta

SEQ ID NO: 10086 - DNA, 121 bp, Artificial Sequence
  Description of Artificial Sequence: Synthetic probe
aaagtagatcacaaaaatggtacattgatgcagtacatccagtgacttactacagcagtgyatcaacaaatctccacaaaacatgggtgaaattgtagtgtggtgctttcggctggttaca

SEQ ID NO: 10087 - DNA, 121 bp, Artificial Sequence
  Description of Artificial Sequence: Synthetic probe
atcaagtcgctgcccagcttcttccccttctaccgggcaagtcagaccaccatcgccgctrctgctgagcacgaggtgagccatcgccttctgcccgctctcctcctttgtcctctatatc

SEQ ID NO: 10088 - DNA, 121 bp, Artificial Sequence
  Description of Artificial Sequence: Synthetic probe
ccaatagatggcaatgcaaacttaagaaggcgttttgtggagaactcacacgagatctgcrtcaacagaggtgcaagaatctcccgaacatttaaactgatagccatcaagtttagccgat

SEQ ID NO: 10089 - DNA, 121 bp, Artificial Sequence
  Description of Artificial Sequence: Synthetic probe
gggcatggcgcggtctgattctccttggatttgattcaatttttattgcatcccccctagragtgtcctcagataaatcaccaaatgatgagtacgaacggtacggccttttcttttgttc

SEQ ID NO: 10090 - DNA, 121 bp, Artificial Sequence
  Description of Artificial Sequence: Synthetic probe
gcaaaacatctgtggcactagtggattcaggaagcactcacactttcattggcctcaaatytgcaacaagaacaacatgcaacattgagctcaacccaatggaaactatcaaggtagcagg

SEQ ID NO: 10091 - DNA, 121 bp, Artificial Sequence
  Description of Artificial Sequence: Synthetic probe
tcactctccataatgaagtccaagttgtcaaccgagggaacactatcaatcatcatagccrgctgctcactatcttttattagtgcgtccatataacgggtcatttctcccattgtgacac

SEQ ID NO: 10092 - DNA, 121 bp, Artificial Sequence
  Description of Artificial Sequence: Synthetic probe
tttggcttttcatttagaacaaaattatacaaacactaatttattgagatgttctcaaacrggaacctttgcttaatggagttgcacctggagcacaattgatttcttgtagaattggaga

SEQ ID NO: 10093 - DNA, 121 bp, Artificial Sequence
  Description of Artificial Sequence: Synthetic probe
ctgattctgtagctacttcactgaaatatgaccctagttttttggctggtgctgcaagaayaacagtttctagacacggcaaaaataaatcactgcatgctcttacatagtagaaacatcc

SEQ ID NO: 10094 - DNA, 121 bp, Artificial Sequence
  Description of Artificial Sequence: Synthetic probe
atgacaaccacgaaaaggaaccaagctaggctccaagaacataacaactcaacccttctgytcacatgcacaactcaactcctagataaacaaaaaggcatgggcataaattaacaaggag

SEQ ID NO: 10095 - DNA, 121 bp, Artificial Sequence
  Description of Artificial Sequence: Synthetic probe
cgggccgttctcagttttctcaccctccaggggagctacttcagattcagctggctttccrtctcccttcttctctgctacaggggcagacacgtcactaggaagcaccgagacttcggct

SEQ ID NO: 10096 - DNA, 121 bp, Artificial Sequence
  Description of Artificial Sequence: Synthetic probe
ttgttctcttccaaagaagaatttgttgcgcctcttgaatcgccaaaagaagcaagcgacyggagtgatgggtgggatgatggctgggaggccctaccagaagagctggagaatccaacgc

SEQ ID NO: 10097 - DNA, 121 bp, Artificial Sequence
  Description of Artificial Sequence: Synthetic probe
ggtcgcgtgagtaacgaacgattagagttttgggcggcggaggggaggagaggggcttacygtaggtatgttcgtggcaagggcacgccatggcggggcggcggggtttgaagcggagaat

SEQ ID NO: 10098 - DNA, 121 bp, Artificial Sequence
  Description of Artificial Sequence: Synthetic probe
aaacaagcactaacctaaggtgaaattagtttgctccattactgacagtttgccatatttyttgtttgcttggaaacaacagatgacaactgagacagtattcccgtcgcccctggtacca

SEQ ID NO: 10099 - DNA, 121 bp, Artificial Sequence
  Description of Artificial Sequence: Synthetic probe
agctggtttacaaggtagcaaacaaacagagtatgtagatactgcggtggtatttccagaytacaaggtagtatcacaccaaaacacaacaacgacaaccaaagccgcgaaagtaggcact

SEQ ID NO: 10100 - DNA, 121 bp, Artificial Sequence
  Description of Artificial Sequence: Synthetic probe
aatgagcatagacaaactctacaccaaggctagtccaaagacagtcaccaccgacaatgcmtaaatatggctaaaacacaaacgttcatttgcttggttgcgttcttgaaggcgtgtcatc

SEQ ID NO: 10101 - DNA, 121 bp, Artificial Sequence
  Description of Artificial Sequence: Synthetic probe
acatcctttaccgcgagtgaacaaaccatgctagtattctctagcctacatggcaggaaaratcctggatggtgacatagaaatgtactgatagtatagggaggtagttttgactagacac

SEQ ID NO: 10102 - DNA, 121 bp, Artificial Sequence
  Description of Artificial Sequence: Synthetic probe
agtacacaaagaactagttttgcacgcgattacaccagatataggcaaatggaagtagtarggaaaaggactatgtcgccgcaacctccaaaatcttgctcacttggatcatctgtccttt

SEQ ID NO: 10103 - DNA, 121 bp, Artificial Sequence
  Description of Artificial Sequence: Synthetic probe
ttcacttctgtccccttagccaaggaagcttgattgatttggcacagaggacattccaagmtgccttcactgttttgcatatgaggatcaagacagaagctatggaagctacgagaacaac

SEQ ID NO: 10104 - DNA, 121 bp, Artificial Sequence
  Description of Artificial Sequence: Synthetic probe
tctttttagtcactagtttattttgtctactcagacccagttcccaggactgaggagatcmatcaacctagggaaaggaagtcttcagctagtggttccaattggaatgtggaattcaagg

SEQ ID NO: 10105 - DNA, 121 bp, Artificial Sequence
  Description of Artificial Sequence: Synthetic probe
taaacaaccagcggccaagccacgacagaccataaaataaaaacatgcataaaaggaaggratcacaactccagcatatcattaccagtccaaattccacttccagaaacagcttcagttc

SEQ ID NO: 10106 - DNA, 121 bp, Artificial Sequence
  Description of Artificial Sequence: Synthetic probe
gctaattataaactacttattactctttgatgtatggagagggagagagggtaccatgtaycgtgtatggagataaagcaggggctagcaagatgggtggcctcccagtaccacttgccat

SEQ ID NO: 10107 - DNA, 121 bp, Artificial Sequence
  Description of Artificial Sequence: Synthetic probe
atttaatcaggagcaaaccatagcatcaaatatagttcgtgttgtggtggctggaaattcrgtgcatattgcacccagatacttaaacggccaggtaatggcattgatttcacatgttctt

SEQ ID NO: 10108 - DNA, 121 bp, Artificial Sequence
  Description of Artificial Sequence: Synthetic probe
tcttcttagagcaaagcagaaccagttgctcaactctatgaaagaaatggaaattgaaccygatgtaccctgttatactgtattgattgatggccattgtaaagcagattatttagaggaa

SEQ ID NO: 10109 - DNA, 121 bp, Artificial Sequence
  Description of Artificial Sequence: Synthetic probe
gatgaaccggatttgcaaggcggtgtcttggtcagcaagatccaaccttgagcgtgtctcygcagtcggcatcagtgcgggggcgctaggaggcaggggaacaaggtggcagcagcgcgac

SEQ ID NO: 10110 - DNA, 121 bp, Artificial Sequence
  Description of Artificial Sequence: Synthetic probe
cagatttgaactagctatattataattggatgtcaatgcattaatcgcaaaagctgtattycttggcgtattcacgcgttccccatggactgattgccgtcgttgccaccaaatataccaa

SEQ ID NO: 10111 - DNA, 121 bp, Artificial Sequence
  Description of Artificial Sequence: Synthetic probe
gcatttcagggctacttaagatatcctcccctttatataactcacagaaacgctgtggtgrtaaaagtaaaaccatgaaagcaaattaattgatgtaaatcagactatagcaatacttcat

SEQ ID NO: 10112 - DNA, 121 bp, Artificial Sequence
  Description of Artificial Sequence: Synthetic probe
aggttccctgtataaaacggggaagcagtcagcataacactaaagccggaaagagaatgargattccgaaataaatacttcttgtgtaaaataattgctacgtgaagtattttagaaaatt

SEQ ID NO: 10113 - DNA, 121 bp, Artificial Sequence
  Description of Artificial Sequence: Synthetic probe
tctagatcatgtttctcaaggaactccgcaaccttatcagctccaaaagtgtaagacacayccctgtcattctcaccccagccatcaacatctttatcagggtctgaccacaatagatcac

SEQ ID NO: 10114 - DNA, 121 bp, Artificial Sequence
  Description of Artificial Sequence: Synthetic probe
ggtcagtcagctgaacatgcattccgcttcttcatctctcattcctcttccattctataamcacatcctcttcttccttctcctggtagcagcagggcatgcatccatccagcgtgcgtca

SEQ ID NO: 10115 - DNA, 121 bp, Artificial Sequence
  Description of Artificial Sequence: Synthetic probe
gcaccattacttgctttgaaatattcgcttacaagtattacagaagtgacacataggtgcrtagtacataatttcttttaatgcacagttactgatcttggctacagtgaggagtgagcat

SEQ ID NO: 10116 - DNA, 121 bp, Artificial Sequence
  Description of Artificial Sequence: Synthetic probe
agtagatataccaacacgctgaaaccagtaacaccagcaaaggaggtggcgatggaggcgytggagagggcgagctcgccgaggtggccaacgaacatgacagatatcatcaggattacag

SEQ ID NO: 10117 - DNA, 121 bp, Artificial Sequence
  Description of Artificial Sequence: Synthetic probe
ttgttggaagtcatatttcttcaagccgtccaaataccgcaatgaccagaaaggaaagctycagtgaagtaagacttccaccattcgtgtgagacgggttgcgtggaattgtgatccttgc

SEQ ID NO: 10118 - DNA, 121 bp, Artificial Sequence
  Description of Artificial Sequence: Synthetic probe
ttagcacttgctagtgttgctttaagaaataatctgagtgccaagacacttatgggtggcrtggtttcatttttgcagcaagatatactgtgcaataggtaggcaacaatttctacattcc

SEQ ID NO: 10119 - DNA, 121 bp, Artificial Sequence
  Description of Artificial Sequence: Synthetic probe
tccagacacttcaaattggtgaacacaaacaagttagtacggatcaaccatcatatgtagrgaggcatgcaggagcttacaaatttggcagcagtagtgagggcatccttcccgttccggc

SEQ ID NO: 10120 - DNA, 121 bp, Artificial Sequence
  Description of Artificial Sequence: Synthetic probe
cagcagcaacccaattcctaccctttcatcatttcctcataccttcaagcaaggagccacrgaccaatgtctcacactcgtctgctctatttccaagcccaccaaaacaatgccaaatttc

SEQ ID NO: 10121 - DNA, 121 bp, Artificial Sequence
  Description of Artificial Sequence: Synthetic probe
atgtttgggttccgtggacacaacaacaacagcattatgattctgctcctgaagaagtgtragagcgatccatgcatcgtgatctgcatccagaccatcagaagtcatcagttaatccaaa

SEQ ID NO: 10122 - DNA, 121 bp, Artificial Sequence
  Description of Artificial Sequence: Synthetic probe
tggtttgttcctagaaccggctctaaatatgctttgagatgaactggagttgcacgtttaygttgcagtcacattcatctgattcacatttcattcagctcaagtacagaatacatcgtgt

SEQ ID NO: 10123 - DNA, 121 bp, Artificial Sequence
  Description of Artificial Sequence: Synthetic probe
gtactgtagtactgaaagcgtgtctccagcgagccaaatttcttcaaatttctgggttacrcaggcatagtatcaaatatcttgtccgttaaactatttaaccgaaaatcctagcggatcc

SEQ ID NO: 10124 - DNA, 121 bp, Artificial Sequence
  Description of Artificial Sequence: Synthetic probe
atcattgcagccactgagaaggatgtggagacataaaagacgagggcgtttgcattcaacrcatgtgaaatacgaaggtaatgcggtgattttcagtgagtttattgaaggtggaagttca

SEQ ID NO: 10125 - DNA, 201 bp, Artificial Sequence
  Description of Artificial Sequence: Synthetic probe
tggcctatgcggtggctcggtcaaagcggtggaggttccttcctcacgccgtccgatcttagggatcctattcttgggaagccaaaacttccgtcttggawcccctagccatcaaagacggcagtacgcggaggactcggaacggcggcggtgccacctcgccggcgagagcaacacggacggtacgcgcacgtcggccac

SEQ ID NO: 10126 - DNA, 121 bp, Artificial Sequence
  Description of Artificial Sequence: Synthetic probe
ggccaaggctacaatagcctccttaaaaccatcacacatgcttgtttttattattaagcgyccaccacgaggtctcactcacacacgaaaagaaactaattttaacccgacgcactaatta

SEQ ID NO: 10127 - DNA, 121 bp, Artificial Sequence
  Description of Artificial Sequence: Synthetic probe
ttccgatatacaaaataatccactgaaatatcctaaagtaaacaaggcctaatcggggtasgccacaagaaacaatgcggacgccaaagagaagccggtggagacaggcagaggaaagtca

SEQ ID NO: 10128 - DNA, 121 bp, Artificial Sequence
  Description of Artificial Sequence: Synthetic probe
tctaaagaattctccttaacctcttccacagatacctcagcctcttcctctaagggatttycactgacatcttttgaagcaaaatcaggatcgtcatccaaggccttctcctcaagttcat

SEQ ID NO: 10129 - DNA, 121 bp, Artificial Sequence
  Description of Artificial Sequence: Synthetic probe
aaggagtgaatggagatgttaaacagttcactgtgcagatcaaaagggatcatgcaatatraagtttacagtagatacatgtagattcggcttggctcaggactgtataaatatgtttgac

SEQ ID NO: 10130 - DNA, 121 bp, Artificial Sequence
  Description of Artificial Sequence: Synthetic probe
gctgttgagttcttgcaagcagttcccgctagcagaattcaaagaccatgcttttaccgtktcttcacttgtagagacaatataatcaccagaggggctccaacacagtgaatcaacatgc

SEQ ID NO: 10131 - DNA, 121 bp, Artificial Sequence
  Description of Artificial Sequence: Synthetic probe
gaactgggcagtcttcaaacatctggcatcacctttacagcatttcaaagttgcacgcgasgagacgaggacacgaaatatatatcatcagcctgacgtgcttctctggcattctgaatag

SEQ ID NO: 10132 - DNA, 121 bp, Artificial Sequence
  Description of Artificial Sequence: Synthetic probe
acctgctgttaatgaggttgagggcgaagttgcctgtggtgttgttgaaacggaacaagtrataataggagatgatggtgagggggatttgcatgatggccatgcggatgttgctgtctca

SEQ ID NO: 10133 - DNA, 121 bp, Artificial Sequence
  Description of Artificial Sequence: Synthetic probe
gtgaatctcagatccgactctttggttcaagttcccagatccgaaaatcatttgctaggaygatgtatgaaaaaaattcttatctcatgaaattttctgtaccatgcaaattgttccacca

SEQ ID NO: 10134 - DNA, 121 bp, Artificial Sequence
  Description of Artificial Sequence: Synthetic probe
atgctacaggtaaacatgtcaacgataagcaagtgcaacgctgctagcacgtgacgccaayaggtaaactaatagtactaaaactggataggtcttaaaacggcgttgttgctccttccac

SEQ ID NO: 10135 - DNA, 121 bp, Artificial Sequence
  Description of Artificial Sequence: Synthetic probe
cacttgttattattggaaaagaatttagaattcaattgtttgccaaaatttcctccatttycatctccctatggcaatggaaagggtgaggaaaccataaagactcagatctgtgcccact

SEQ ID NO: 10136 - DNA, 121 bp, Artificial Sequence
  Description of Artificial Sequence: Synthetic probe
aattttaagtagcactgcataaatcgtcatttctttgatatgtttaatcttctgttgataytgatcacataccgttgtaggttaccaggataacagatagaggaactgattgtgttagagt

SEQ ID NO: 10137 - DNA, 201 bp, Artificial Sequence
  Description of Artificial Sequence: Synthetic probe
tgagctgatgatattgcatagattcgcaagaaattgggctctccagtgcacaaccaagattgggtgtccggtagtcaatctgcctaaaatatgctgcatcrggtgctgtcgggcaggagcactggcctcttgagcagatgccataccccccacatgcagttgggtaattgcagtactctaattggaacaaatcatgtgcta

SEQ ID NO: 10138 - DNA, 201 bp, Artificial Sequence
  Description of Artificial Sequence: Synthetic probe
tttgcacagcccttgcagcacgcacaaggcaagcacacagaccaagtatatatggagcaggcaactggtactacttggcaaccaaacccaaaccaagaggracatggcaataggggtcatcgtcatgaacttgctatgcccacttgtggccgtcctgatggtcgtcgttatggtgagcgccggcgacgaggcagcgttgct

SEQ ID NO: 10139 - DNA, 201 bp, Artificial Sequence
  Description of Artificial Sequence: Synthetic probe
catatatggaaaatatatgctctaaattatttacgatttctgcaacagctatagtttttcagatgtattttagttatctttgctatgtctcaccagtgtaytgactacaatatgactgctacttctagtcatacgccaatgaaaatgaataatttttggttctcctaccttgttgggtgctatgtacatttatctattttt

SEQ ID NO: 10140 - DNA, 201 bp, Artificial Sequence
  Description of Artificial Sequence: Synthetic probe
ttttccaagaaccataatatgtatttcctccgtctcaaaatacatgttgcgggtaattcagccaaattttgacaaatatgtgtgactggggggagtagtayaatgatgccgtgggaatttgcagcaccaagtgttgcagcatcggaactgcatgcatgttagggagggccgaggggccggatcgcgtccggaagaacatta

SEQ ID NO: 10141 - DNA, 121 bp, Artificial Sequence
  Description of Artificial Sequence: Synthetic probe
gaagatgactccatggtgctcctcaaatatactacgttacaagaagttaaatacatgaaaratagtgcatattcaacaaaatcatgatatctgctgcatgcttagtcaaagtacgaaccaa

SEQ ID NO: 10142 - DNA, 121 bp, Artificial Sequence
  Description of Artificial Sequence: Synthetic probe
agcgagcgacatgagtgtcccggcgatcttcgcggctccagacgtgttcttcaccttcagyggttccatcctcagcacgacggcaatgaggaaggtgagcactggagagaggttgatgaaa

SEQ ID NO: 10143 - DNA, 121 bp, Artificial Sequence
  Description of Artificial Sequence: Synthetic probe
agtaggaagctaacctagcactgataccatgtcaggaatatgcaacttgtattcctccggrggccaaatgcaatatataatacaggtacatgtggaaatatacaggaaaaccccctaacaa

SEQ ID NO: 10144 - DNA, 121 bp, Artificial Sequence
  Description of Artificial Sequence: Synthetic probe
tttaattcaataactcccctcttctttgatgttggaataggcacaggaatagatggttcakgtacaattacttcaggtatagcttgtttaggaggagtccaatcttcataattcttgctta

SEQ ID NO: 10145 - DNA, 121 bp, Artificial Sequence
  Description of Artificial Sequence: Synthetic probe
atggaagacatgatgtcgtcacctgtggagggatcggtatctaagaggaaaatgattggtyccctgattgtggatgtggggatagttggcactagtgcaatatcttgctttgtggtcattc

SEQ ID NO: 10146 - DNA, 121 bp, Artificial Sequence
  Description of Artificial Sequence: Synthetic probe
tcatccagcttagcattgagttcttcattttcttgtggtgagaaggagttcaccttcttcmaatttgatctatccacctgccactaggcatggttatcttgcatattgtctagcagctgct

SEQ ID NO: 10147 - DNA, 121 bp, Artificial Sequence
  Description of Artificial Sequence: Synthetic probe
aggctcaaagaaagcacgcagactctagaggcagtgacagaaattaagctcaacataccaygcaatctttgaagttaccatgcatatgcatgatgaactgcaccttaatcttccagcactc

SEQ ID NO: 10148 - DNA, 121 bp, Artificial Sequence
  Description of Artificial Sequence: Synthetic probe
atcatatcaggaagattgtctaccccagaggcagtgattgttgtaaatactggaagtcatrgaaagagtatgcttttctcccggagatcatcttatcagcagatactatctttggagaaag

SEQ ID NO: 10149 - DNA, 121 bp, Artificial Sequence
  Description of Artificial Sequence: Synthetic probe
aaagaatgtgagcatgcctacccaggaacatcttcttcgtgacatcaagtttctctatgaygcgctcctctgcccatatacgatgcatctctataagccagaacaaattcatgatcaggcc

SEQ ID NO: 10150 - DNA, 121 bp, Artificial Sequence
  Description of Artificial Sequence: Synthetic probe
ctgagcatgtatgatatttcatctttgccaagtgtatgtatgcatgtatctgcttctcgcygactagtagaaaacttcactgaatctccattttcatcttggcttagtgtatgtatgtagc

SEQ ID NO: 10151 - DNA, 121 bp, Artificial Sequence
  Description of Artificial Sequence: Synthetic probe
caattgttaaatataaatatactgcctaacctcttatcatcaagtgagcggagcactcatyagactgttgcttcactacttccatagttcacaattattgctatatcggtggattattcct

SEQ ID NO: 10152 - DNA, 121 bp, Artificial Sequence
  Description of Artificial Sequence: Synthetic probe
ctgataatactatgagatactatgtagcattgatggcagtagttcatggagatcatcaccrtctaccccgaaaagaatttcatctaatttcaggaagtagaagacttgcaccaagatacct

SEQ ID NO: 10153 - DNA, 121 bp, Artificial Sequence
  Description of Artificial Sequence: Synthetic probe
agatgaaaacatgactacactgacagggtaccaacagaacatttagcatatccacaaagcrgaaggccttttgttctataatctcaaataccctgtagttagccaccaatcaatacttaac

SEQ ID NO: 10154 - DNA, 201 bp, Artificial Sequence
  Description of Artificial Sequence: Synthetic probe
gtgcagttcaagatcttcaagccaagatcatattacagcgtgcagttcaagatcctgaatatttgaattctgaaaagctagagatatcggacaaggcatgyttacatcagatgagtcaacacaagaaaaggtatattcaaaacatggattgtctgatttcccgacggtcgtgatctacaccattgagatcgctaccaacgt

SEQ ID NO: 10155 - DNA, 121 bp, Artificial Sequence
  Description of Artificial Sequence: Synthetic probe
ttgccattaggtcatgtcatgtagacatgcatgctacgctagcccgcacgaagtttggtcytttagccaccaccatcgccagccacagtacaggagtcacacccagaggtcaaaaggcaga

SEQ ID NO: 10156 - DNA, 121 bp, Artificial Sequence
  Description of Artificial Sequence: Synthetic probe
tatataatcagtccaaggcccacggcaaacgttacctgtaacatgattggaacaaaatcakgtaattattacgcaagtgaccaactagggtatgctgcatgctactgaaatcaagattttg

SEQ ID NO: 10157 - DNA, 121 bp, Artificial Sequence
  Description of Artificial Sequence: Synthetic probe
tgcattgtcgccagcttccttgtgcttcctctgcttcttcaacatagacttatcggcattyccatccatgagatgttcgtactcttctagacttgcaaatggagttgagccgctctttcca

SEQ ID NO: 10158 - DNA, 121 bp, Artificial Sequence
  Description of Artificial Sequence: Synthetic probe
ggagtacagtttctaggttgcatttttggtgcatatgttgttgctgcatcacagctcaaaragctgagatctttttctgatattattgacatagcatcaaagtcaaaataggccagttgtc

SEQ ID NO: 10159 - DNA, 121 bp, Artificial Sequence
  Description of Artificial Sequence: Synthetic probe
gctctgccaaaacatgctaatcctgccatccttgtttctgaccttaagaagaaggctgatkcacttgacaggttggtttgctgacaaccccctgatgtgatgtttcgtgcctcctgtgtct

SEQ ID NO: 10160 - DNA, 121 bp, Artificial Sequence
  Description of Artificial Sequence: Synthetic probe
aactattccacgaaatcaataggagataatgtgatttagtgagttggcagttgataccttytgttctgttgaaagatctaaaaactggaaggtaagagcacatgataatgcttgtttgatt

SEQ ID NO: 10161 - DNA, 121 bp, Artificial Sequence
  Description of Artificial Sequence: Synthetic probe
ggcagcagcaagcagtttaggtgtgaagtgtgtgttgcttagcttctttttgtccagaccyaatttgactcagtcaacaagaagttagctttttaccattgtagattgcggtattgtttta

SEQ ID NO: 10162 - DNA, 201 bp, Artificial Sequence
  Description of Artificial Sequence: Synthetic probe
cctgtacacacttacataggcatgttatcactacgaggtgctattgaatttgcaacgtgaatgatttgtctccctgaaaataatcttataaggtctttggytgacttgcgccatggcatgtctacagggaggttcacgcggaagtaagtgaggcaaggcataaggcttcaacgatgaaatctcggcgacaagagcaggagt

SEQ ID NO: 10163 - DNA, 201 bp, Artificial Sequence
  Description of Artificial Sequence: Synthetic probe
ataccagatgaagaatagcactagtaaaatttacagacatgctgcccaagttcagttcagtgggcaactttttaccagattagaataaataaaatgcctcrgtaagggcaatgaactcacatctaactggggactctcttcgttgtcggtgatggcgatccctagctgctcagacaagtactggaattccatctgctcggc

SEQ ID NO: 10164 - DNA, 201 bp, Artificial Sequence
  Description of Artificial Sequence: Synthetic probe
tgtttcaagtttttttccagatcataaatttgcataggcaactagtatagtactatacctaaaatgttgataactcaactcgttcattaattcattcaatrgcacttcacagaaatgttagtacacttgagctgtcccccttgagatggtaatagtctggccatattcatgagcaccttcatttggatccagcagtagaca

SEQ ID NO: 10165 - DNA, 201 bp, Artificial Sequence
  Description of Artificial Sequence: Synthetic probe
aattcgcccatcacctcttctaagctttggataccactcttccatccttcctccacaacctgattgtagcgttcatgcttaagccacatattttcataacraaacggtcgttcagctccaccaccatgcagccagtccaaccgcttgatagtaattaacagacaacaatggtccgatgatgtagtctgaacatgacatact

SEQ ID NO: 10166 - DNA, 201 bp, Artificial Sequence
  Description of Artificial Sequence: Synthetic probe
tctgaagctggagtgccggtgcaagggcgagctcgccctggcgcaccgggactgtgccctgaaatggttcggcatcaagggcaacggcaactgcgacgtgygcggccacgacgtgctcaacctccctgtcactctccgccgggtccgcgacaacgttcctccgccgctaccaccgtctcctgctgctgctgctgcggctgc

SEQ ID NO: 10167 - DNA, 121 bp, Artificial Sequence
  Description of Artificial Sequence: Synthetic probe
ggaacaaggggcgtagtggaagtcgctgttggaggaggagaagccgttgatgcagttttcrtagtccgagtaggccgcctcgtcgccgccatcacggccgccgcggtccaaggtgatgccg

SEQ ID NO: 10168 - DNA, 121 bp, Artificial Sequence
  Description of Artificial Sequence: Synthetic probe
aaggtataagtcgtcaccaagagctgatttggatgcaacagattacccaaagttgcaattytttctcatggttggttgttcatggaaaatgccttatgacagacaaccttgcaaacaagag

SEQ ID NO: 10169 - DNA, 201 bp, Artificial Sequence
  Description of Artificial Sequence: Synthetic probe
acaatgtgattctcaacctgcataaatgttcacccatggatgactcacttgaacagaataatgagtgatgattgcaacacagtttgaacccatcaaggggyttctttatcttaataaatactttaccttttgacagagtatagcaagatcccttggagcaatatttaaacctacagcaaagaaaagcacatgtgttaatgt

SEQ ID NO: 10170 - DNA, 121 bp, Artificial Sequence
  Description of Artificial Sequence: Synthetic probe
gagctaaggagttacagctccgagggcggtacaatacaacactttaacattggtaagtttrtcagccaaaacctccttgatctccctcagaatcatgcacagtggggacatgtcttcagca

SEQ ID NO: 10171 - DNA, 121 bp, Artificial Sequence
  Description of Artificial Sequence: Synthetic probe
ttcttgcttattttagccattaattcctcagcttccttgggagtcctattcctgaaaacayaatcagcacaactatctaggtatgtcctagattcttcagttagtccattataaaatatat

SEQ ID NO: 10172 - DNA, 121 bp, Artificial Sequence
  Description of Artificial Sequence: Synthetic probe
caagaactaaccaacataccaaatgtttacaatacctatggatccaacaaccaatgatgarctcattctgacgggcttcagtagggaactgctcagcttccgcaaatcctcaccacaaacg

SEQ ID NO: 10173 - DNA, 121 bp, Artificial Sequence
  Description of Artificial Sequence: Synthetic probe
aagtaatgggattattgcccagcatgtagaggacaccggaggtacttttccgatcatccayatcgccggccatgtctgaatcactgtaccccgtcagcttctcttctccatctgccgtgta

SEQ ID NO: 10174 - DNA, 121 bp, Artificial Sequence
  Description of Artificial Sequence: Synthetic probe
cttcaacagatgatttggccctccgttcctgcactagcccgtgaaactccgacagcgacaygtggctcgctccaacgttcctaggcagggaagggggttagggtgggaggtatagtaagga

SEQ ID NO: 10175 - DNA, 121 bp, Artificial Sequence
  Description of Artificial Sequence: Synthetic probe
cgcaatttacttgagatagagctttcagcactagaggtaattctactgtccttgtcctcgytatatgctattgcatctccagtgagataatcatatagagtaaatgagcggtgacgttcag

SEQ ID NO: 10176 - DNA, 121 bp, Artificial Sequence
  Description of Artificial Sequence: Synthetic probe
cttcatgttagttccgttgctgttctcctaccagtatgttcagttgctctcatgatttccytcaacggtgctccaggtattttctcttccagcttttgtcgttgcatatcgtttcgggagt

SEQ ID NO: 10177 - DNA, 121 bp, Artificial Sequence
  Description of Artificial Sequence: Synthetic probe
ttctttttgtctaaactttctatttttttgttcctgttatcatgaatataactaagcatgraccttataaaagttactgacagatttatctttgatatgatatgttgtttatctgttgttt

SEQ ID NO: 10178 - DNA, 121 bp, Artificial Sequence
  Description of Artificial Sequence: Synthetic probe
tgcaacactttctcgtcctgaatttccccgattgatataggttggtccagatattgtatgkttcccttttagttagcatgcctattcaaatacataatgtattaggaagcttccaaggtac

SEQ ID NO: 10179 - DNA, 121 bp, Artificial Sequence
  Description of Artificial Sequence: Synthetic probe
ggatatactgggaggtaaatatacgatgctcctgttctgttaccatgcttacatttatgaytgcattctcgtatataacgctatcctcgtatagaatgctttagataacctttcagattga

SEQ ID NO: 10180 - DNA, 121 bp, Artificial Sequence
  Description of Artificial Sequence: Synthetic probe
agcagagccaggaaacctaaactcataggtgtccatgcagaagggaatcttaaggaaaaarggctcgctaaaatagtgtttcatttagggatacgaaagaaaagcctattggcggatggtc

SEQ ID NO: 10181 - DNA, 121 bp, Artificial Sequence
  Description of Artificial Sequence: Synthetic probe
gaaaatctattttgagcaatgcaagcctaaactccacttagccaaatgcatatagatgatrgactccactatactaccatagtatcacttgccaatacaattcaaatgtattgacccttgt

SEQ ID NO: 10182 - DNA, 121 bp, Artificial Sequence
  Description of Artificial Sequence: Synthetic probe
atacaatggccctccctgaactgtttgctgtcccccagctgacgcaacttgattcataggygactaagaatacaaagaagaatcaagaattcatcagtgcagtttcatatttttctgacca

SEQ ID NO: 10183 - DNA, 121 bp, Artificial Sequence
  Description of Artificial Sequence: Synthetic probe
ctgatcctcaaagacggcctctgttaaattttatggctgtaacggaagatggacccatgtytttaagagcaaccaacaccgaaggagaaataaagaccaaagagtacatctttcagaggct

SEQ ID NO: 10184 - DNA, 121 bp, Artificial Sequence
  Description of Artificial Sequence: Synthetic probe
tcccaaagggctatagaatgcaggatggcagcattgtatgcagggttccctggtaatttcyattatttctcttacaatttgcctttcattgttatccctgtgttggttaattttttttatg

SEQ ID NO: 10185 - DNA, 121 bp, Artificial Sequence
  Description of Artificial Sequence: Synthetic probe
ccgtactcgggaaggccgcctacctcctccgcgatacactattgccgttgattccccggargcctgctctttccaagatcttcctctctccggcggctgtcagcagcgccttcacggagtt

SEQ ID NO: 10186 - DNA, 201 bp, Artificial Sequence
  Description of Artificial Sequence: Synthetic probe
gcgaaactgaccgtaaggcacgcgtcaaagaagtacatcataataatagagcctcaagcatgctacttgcattttgcatcagcttattgaaaatcttactytgttattgctgtgctcaaatgcatatcactacgtcaaggtagaggtttaatggcactctaaagtccatcttaaataagaaacactgttatttactgtcca

SEQ ID NO: 10187 - DNA, 201 bp, Artificial Sequence
  Description of Artificial Sequence: Synthetic probe
gacagcagcagcgccggggcagatccgttcggggacttcctggcgggcggtgaagaggacgcttttttcgtagccggggtccagggattgcagggttcagytgttgccggcaccagcagtgttggagccgacgaccacagtttcttcaatggagtgggtggcagtaatgccagttcgcagctggaccagggaactagtaca

SEQ ID NO: 10188 - DNA, 201 bp, Artificial Sequence
  Description of Artificial Sequence: Synthetic probe
acatgtgctagtatatattattatacaatatccaaaagataatggtgtggtatgaatcaaagcggacccagatagatacacagacatgtagggcctacagrcacgtatagcgaattgattgacgatttaacatgtagcatgcatgtgcatatacagttgctcgcttaacttaagactttctagttccaattgtaacaaggt

SEQ ID NO: 10189 - DNA, 121 bp, Artificial Sequence
  Description of Artificial Sequence: Synthetic probe
gaacatcaagagcttttgcttctcagtgtgccggccaaacataaagttgtcagtgtaaagrtaaacatcatagggcctacgagacatgctctcgcatccacctagaagcacaacaaactct

SEQ ID NO: 10190 - DNA, 121 bp, Artificial Sequence
  Description of Artificial Sequence: Synthetic probe
ttttgaagttggagactgggtgcgcttgaaacctagtattggtagtagacctacttatgaytggaacagtgttgggaaaatagcatagcagtggtccatagtattcaggactctggttact

SEQ ID NO: 10191 - DNA, 121 bp, Artificial Sequence
  Description of Artificial Sequence: Synthetic probe
taatgtctcacttgtttctgcaaaaagtgcaacactaccacctatcctcaatgctatggaratatacttggtgaaaccaataactgaggttgcaactgatcttggagatggtatgaattta

SEQ ID NO: 10192 - DNA, 201 bp, Artificial Sequence
  Description of Artificial Sequence: Synthetic probe
gagagcctaaaaaactgaaaaaccaatttccctttgcagaccagtttgctaatgttccgatgtctccaatccccgtgtacacgatattcttacatctcatygccccgttatcttctcctctatttgtgtgctatatgaatgaacaatgtggcttcgttatcaacttccgtgaagatggagtggcatatttataggggggaa

SEQ ID NO: 10193 - DNA, 121 bp, Artificial Sequence
  Description of Artificial Sequence: Synthetic probe
tttctcaagctcacgcgacagccaactgccacaatgtgctattgtgtgtatccaatactargtagcttcccaatataagtagactccaacctcttacgagtcgtaatccttcaaagttcaa

SEQ ID NO: 10194 - DNA, 121 bp, Artificial Sequence
  Description of Artificial Sequence: Synthetic probe
ccctttcttgtctttctctgaggtggacttccttgtctcttgtgttgtttgttggcatctyctaacaatatttgatagacatgaaagtttagttccctaaaatattagacagaaattgcat

SEQ ID NO: 10195 - DNA, 201 bp, Artificial Sequence
  Description of Artificial Sequence: Synthetic probe
ggagaaagaaggcagactctgaatgtcttgcagttcactatcaacatgtatgcagctgaatggaaagaggtgctcttgaagaagccaacgaatgtatccayacgtattgctacctgggaggcaccacctatagattgggtcctcatcaacactgatgatgcgttcctgatagaccaagcaagaggtggatggggagctgta

SEQ ID NO: 10196 - DNA, 121 bp, Artificial Sequence
  Description of Artificial Sequence: Synthetic probe
gggactggccattggaagcgcaactgccccaagtatttggcggacaagaaggccggcaagkcaaacaaaggtatatgtgatatacatgttattgatgtgtacttgactagtactcgcagta

SEQ ID NO: 10197 - DNA, 201 bp, Artificial Sequence
  Description of Artificial Sequence: Synthetic probe
gtgtgtgggctgttacttggacgtccatggcagcatgatcagaatgttactcatgctgggagagcaaatacatattattttctgcatgatggcaaacaacrgactttaaaacctatgcaggatgatcaattaaagtctgatgttgaaatggtggtacacaaggagaagtttcgcaaggctaagccaaaatctgggctagct

SEQ ID NO: 10198 - DNA, 201 bp, Artificial Sequence
  Description of Artificial Sequence: Synthetic probe
cttcacggggtcttgaaggacccatctcgccattccttggcaacctcactggcctgttgcgtcttgatatgtcccgcaactcgctgtctggtggcctaccrcttgagttggtgcagtccaccagcatcatcgtcattgacgttagtttcaaccgcctgacaggaggcctgagtgagctgccttctacagcccccgtgcagc

SEQ ID NO: 10199 - DNA, 121 bp, Artificial Sequence
  Description of Artificial Sequence: Synthetic probe
gcctttgtaacatcacctttgctttcagttttgttcatgttgcttatgagcgccttcttgrcattacctttgctttcagtttcgtgcatgtatagctgcctcagaatctccatagcctcca

SEQ ID NO: 10200 - DNA, 201 bp, Artificial Sequence
  Description of Artificial Sequence: Synthetic probe
agagaggccggtcaatcaacaaactctagtatacgcaatctatgcctcatgcatgctgcataacatagtcatagatatggaggatgatgcagccatgccgrgtcttgaggaagggaagtactgccaggatgtgcgccagttagcaagtgaggatgctgtcagggcaagggatatgttgtcgcaatacttcttgaccagcag

SEQ ID NO: 10201 - DNA, 201 bp, Artificial Sequence
  Description of Artificial Sequence: Synthetic probe
ggttgtacgtgacagcctttctgagaatggcttcaagagattctctcgtcccatggctcttctcaagctgtgccgctttaagccatatactcttcttaacraggaacacactaagagcatgtgcatagatggcgcgagctgtctcaattgagcctcgtttcttgcattcctcagcatcagcaacccatgttcgcttccggt

SEQ ID NO: 10202 - DNA, 121 bp, Artificial Sequence
  Description of Artificial Sequence: Synthetic probe
taaccccgcataggcgctaagtggggtagagcgcagcgtcttttggagcaataaaaacaayttctcatgtaattatggccaatgtgttcataacttgacatagtaatattgtggtttcttc

SEQ ID NO: 10203 - DNA, 121 bp, Artificial Sequence
  Description of Artificial Sequence: Synthetic probe
ggtggaagcctcgtgattgacttgacaagctcacttcagtcatggtcgtccatgggtggcyccatgcagtcgcttggtggaaccgtggatgcttcattgaaggtccctttcccttcttgta

SEQ ID NO: 10204 - DNA, 201 bp, Artificial Sequence
  Description of Artificial Sequence: Synthetic probe
atctactgaaattgggtgcatcaaaccagcacatgcacattagatacttcttttacctactgcaaattttcatcgtgtatagcctgactttaggttccacrtcgctgaattaccatttaatcaagataactcgcttacagtcaattagccaagcaaccttctctagtcaagtgcgtaggcaaagttcccaattcgtcggca

SEQ ID NO: 10205 - DNA, 121 bp, Artificial Sequence
  Description of Artificial Sequence: Synthetic probe
aatcattagctgctacgcttgttgagagttctaaaaaggagtcggttgctcttgttccatytgatattgcaagattgacacagagattttatccgcttttcaattcttcactatttcctca

SEQ ID NO: 10206 - DNA, 121 bp, Artificial Sequence
  Description of Artificial Sequence: Synthetic probe
acaacatggttttcacgatagaaaaagggaagattttattcttgaatgaaggaaatacttytaaaattgaggaagcaaggacttacagatatgtcaaagcagagagttggcctatggcgtt

SEQ ID NO: 10207 - DNA, 121 bp, Artificial Sequence
  Description of Artificial Sequence: Synthetic probe
gaagcacgtccagcgatgaatcaacaccctggaagcaagagggcgtcagacattgggaacraaaaaacagcgtatccagtttcaccccattagctaaactggcaagcaaggcttctcactt

SEQ ID NO: 10208 - DNA, 121 bp, Artificial Sequence
  Description of Artificial Sequence: Synthetic probe
tgaatctttagtgattgagatcagaacacaaagttagatgcaagcagattacttaggcacraatgattagttccagcagtttaggtacaaagagaaaaattacaccttgatattcctatca

SEQ ID NO: 10209 - DNA, 201 bp, Artificial Sequence
  Description of Artificial Sequence: Synthetic probe
aatagtgtaacttgaactaacagtgcatgctaatacacaacatagcacagaaggattccaagatacgaacgcctcacataataagattacagcaagccacrggggacttgccatctcaaacaagcaatgatatggagatcgtgtgaccaatcaagggtgtgactgcatctagaagagcatgactttctttccattaaagta

SEQ ID NO: 10210 - DNA, 121 bp, Artificial Sequence
  Description of Artificial Sequence: Synthetic probe
tgtaactgtaaccagtgatgcatatgatttctgatgcaatatcacaaatagagctttgttytacgaattacttgcatgattcaaaatgttggagaataatttttagcagctgttgtcaaat

SEQ ID NO: 10211 - DNA, 201 bp, Artificial Sequence
  Description of Artificial Sequence: Synthetic probe
cgggtcaacaaccagttaagcgacggcagcaccaaccttgtcagatacgttgcgtccctgcacttgctcctaccatggatcaatcagaaaattgtgcgtcygcttcccatgaactactccctttgtcagataacaaccaaggcgacgggagcatcaacattgtcagtcagatacattgcattcctgcacctcgttcctgcc

SEQ ID NO: 10212 - DNA, 201 bp, Artificial Sequence
  Description of Artificial Sequence: Synthetic probe
atggcaagttacaaaaggctccgtctggactcctctgctgctagagcagaattgactgctgcaactgaaactgatgacagcgaagaagtggagatattacrcaaagaagctgaagccgcagaatctaaagctctggaactcaaaacattgtataatctccaaccggatggcgatgaatatacatttcagcctgtagttcct

SEQ ID NO: 10213 - DNA, 121 bp, Artificial Sequence
  Description of Artificial Sequence: Synthetic probe
acagttgctgaacatgggtttgtaaaggtggtatcgtactgtaattaggattaaacttcaragaaaaattatatatgcctgaaccattaagtgccttatagcctatacaccacttagtgca

SEQ ID NO: 10214 - DNA, 121 bp, Artificial Sequence
  Description of Artificial Sequence: Synthetic probe
gccgaccagaagcctgaaagggatggcaccttatgaaacgtggcggaataagacaccaagkgttgattatctccgcaccttcggttgcgtagcacatatgaagatcaccggccctggcatc

SEQ ID NO: 10215 - DNA, 121 bp, Artificial Sequence
  Description of Artificial Sequence: Synthetic probe
actacagtgtgaccatggaaatcccacacaggcagtgggactgaactagctgctatacagractctccatcatcagtctgctgcgggcaatttccccacatccacagggcaccaagactgt

SEQ ID NO: 10216 - DNA, 201 bp, Artificial Sequence
  Description of Artificial Sequence: Synthetic probe
tagaagcaacttcagctattgctatcataccttgcagctcacatgtcgtgcctagatcagcttctgcatcttccttttgcttttggtagtgtgaatggaaktagggtagtaataggaactaatttgtgtactctttcgtgaatgaaatcacgtactgtagtccttcttaaactacaaaaggtgtgcaggacaattattgat

SEQ ID NO: 10217 - DNA, 121 bp, Artificial Sequence
  Description of Artificial Sequence: Synthetic probe
ctagtgtttttagggtctccaagatcagcttgctaattgcatcacccacccatcagttgaygatcacgcatatatgtatgtatgtatagcagtgccttcttggatacactatactgttcgg

SEQ ID NO: 10218 - DNA, 121 bp, Artificial Sequence
  Description of Artificial Sequence: Synthetic probe
taggatccaacaatataaaagacacactgccgtctaaacagtactgaaacactgcttgtgygtatctctgatgacaattttatcgtcctcatgtttatagaataacaattttaccatcacc

SEQ ID NO: 10219 - DNA, 201 bp, Artificial Sequence
  Description of Artificial Sequence: Synthetic probe
agttttctaccacttaggtgtagcaatctgcctgtactcacatgactcactatgtgactgtaggtagcccaaaagctttatgaagggatcagtctttcttyagaacaagcaacaggcttaataacgtacctcagaacagatgggtattatgtaggtaccatcctactttaagttgatgaccaaagtagtctttctattcat

SEQ ID NO: 10220 - DNA, 201 bp, Artificial Sequence
  Description of Artificial Sequence: Synthetic probe
caaaacatagggacttgaatatggaaaactagtttgtggaaaggagaagaaatagctgacatacactgggtgaactgagacgtgccaacagagcatcataytctgtctgcatcttagagaggcgcttggagagccgcttaacttcctcagacacatcaaccatgtcagccaaaggtagatatgcctccaaaccctcatcag

SEQ ID NO: 10221 - DNA, 201 bp, Artificial Sequence
  Description of Artificial Sequence: Synthetic probe
atttctagaactttctgggagtacagaggtttgttcgtgcacatcaattttgtcgcgaagcacaatggcaagaagacactcttttttgccgagatagaggrtcgtggacagggtggcaaggagatgttggaagtacgttgttgcattcctttggaatcgttatgtcaaggtaacccatgtatgctggaagaattctgtcca

SEQ ID NO: 10222 - DNA, 201 bp, Artificial Sequence
  Description of Artificial Sequence: Synthetic probe
gaatagaatctctctactctcaagcgttggtctcccagcagcacacaaccaaagtagcatcagctctctatatctctgctcgtcatatccctctgaaaaargcagtagtacagtaccgacttctctccgtgctcaattacaacagcatcatgcccgtgatggccttgtacacattgccagtgccagcctcaactttgtcag

SEQ ID NO: 10223 - DNA, 201 bp, Artificial Sequence
  Description of Artificial Sequence: Synthetic probe
tatccatgattgcattgtaaaacaaaggttcagagctatactgtaattataaacataccagcattatgataagaacttgtgagttcaatctaaataccggraatggacactattttatgcagtatgttaaataaatctggttacataacagttgtaccatccgaggcgcttaaaaatcagttaagcctctaattaaataat

SEQ ID NO: 10224 - DNA, 201 bp, Artificial Sequence
  Description of Artificial Sequence: Synthetic probe
gccaaccacctccagcggaggagtaatccgcccatgccatgactggggccgacacccaaggtttcctcgtgctaaagggatgaacccaggtcatctccacrtgtcatcgtccgacgacgaggtgctacatgggcgtcaagttggaggttgtggcccacctgaacccatctggaccccgatcaaggcccgcctgcgccgctg

SEQ ID NO: 10225 - DNA, 201 bp, Artificial Sequence
  Description of Artificial Sequence: Synthetic probe
gaatcgggtaactaccaccgacgccgtccttcatgacacgctcaaccatgacctcaagctttcctgcatcgtggtggcacggtcgtctctggtggtggtgragggaacggtgcgctggcgaggcggactgccagcaacaccttcaactggagctgacatctctcaggatactatcttcaccagcaacctggctctgatacc

SEQ ID NO: 10226 - DNA, 201 bp, Artificial Sequence
  Description of Artificial Sequence: Synthetic probe
gttgttacagccccatttaccgacagcaatcctcttaacagcaacctttcaagcaaagcatctgtcagggaaaccaaatagcagggggagctttttctatracagtctgacaacataagatatcgcttacatgaagatcaatgttggaatcaacaataacagggcactttccaccgagctccagagcaaccggggttagat

SEQ ID NO: 10227 - DNA, 201 bp, Artificial Sequence
  Description of Artificial Sequence: Synthetic probe
ttcttaatagcaacagtttcacctgtctccaaacatttagcctgcaaaaaggtcacatgagataaattttccaagtatgcacacaagtatataggtagtcrcaggaaaattcattaaggttatatagaatatccaaaacttgtagagagttggcttaagacacagaaacaaacaatggtcaagaagggagttggctgccta

SEQ ID NO: 10228 - DNA, 201 bp, Artificial Sequence
  Description of Artificial Sequence: Synthetic probe
tgaggttgcaatgaaaatatgggtttttcctctaccttgcatttgaacgtcattccagcatcatagttgaacatgatggaaactagtgaccttgaaggagsggctaggtatcagacaggacaccaccgttggagatcgttgcccacagtgttagtggaaagacgacttacatagtctctgatctatgtaagaatggagaga

SEQ ID NO: 10229 - DNA, 201 bp, Artificial Sequence
  Description of Artificial Sequence: Synthetic probe
ttttggctcttggtaccgtgcaggcttacacgctgcggtgtttagcccgtatccgaatttttaagatctggcggacggagataattggggtaacatggttrcaccaaattttagtttgcaaacattaaatgctttttagtagggatgaactttatagacattatagataacgtgagattgagaagatccgtgagatcagtg

SEQ ID NO: 10230 - DNA, 201 bp, Artificial Sequence
  Description of Artificial Sequence: Synthetic probe
gtatcccacaagagctggggaacaaacctagaagatatgtaaggatgtagctagctaaacttcaaagtagaagagaggcgcaagtagaggcgttaagtatrcacgatactggatcaacctacaaggttggggttgcatacaaatgaagagaggcgtaagtagagacgttaattatgcacgagagttgacttatgagtttag

SEQ ID NO: 10231 - DNA, 201 bp, Artificial Sequence
  Description of Artificial Sequence: Synthetic probe
caactgatcctaagattaatccagattcaattcaaaaggaagctaaacaagaggaagttgctcctggagttgagtcagaagataaaaagttcttggatagyatcttcgccttaatgcggaaggaggaaacattttctggacaggtcaagttgatgcagtggattcttcagataaataatgtgacaattcttagctggtaag

SEQ ID NO: 10232 - DNA, 201 bp, Artificial Sequence
  Description of Artificial Sequence: Synthetic probe
tccaactgggttctagtaggtagcaacctctagagatcaggtgcaatgagatcaggtgcaagacaatggcttttccctgaacagttaatttgccagtggtrgcctccgagtgcttgtccctgcaactccctgaacaggcagagaacaggcagagggagttgcagggacaatggcttttccctgaacaggtgcaggaacgaa

SEQ ID NO: 10233 - DNA, 201 bp, Artificial Sequence
  Description of Artificial Sequence: Synthetic probe
gccccaatgcccagtaggctgctacattttccaactccattagtgtccaatcatgccgttgcttcgtcagagttatactaaccatgaagcttccctgtgaytgagacccaagctgttgcctgcaactgcaatgctactcatcagtttcttgtttagtccctcccagctgtccatgttcacctgagtactacgctgtgctgg

SEQ ID NO: 10234 - DNA, 201 bp, Artificial Sequence
  Description of Artificial Sequence: Synthetic probe
atcacgagtaagagaatcggtgcaatatattgacagtctcattaccggaattttgaggacagagcattaacgatgatgctccaagtccaggacattgcagragctcgttgtacatcaaattctgattaaaaacagcagtaagatagctgaatggaacatttcagtcaagatacatggcatacgaatcacatcaagcaatat

SEQ ID NO: 10235 - DNA, 201 bp, Artificial Sequence
  Description of Artificial Sequence: Synthetic probe
ccacggtcttgtgcagggtcaccaggagcccctgcttgggccggatcattatgtcccaggcaaagacgatacagagaggcttgtcctggtggaggctgtaygtgctggagcgtggcatcgctaggtcattgtcgctgggacttgtcaccacgtataccttgccatccctgccgccgatggcgttgcggccggccaaaccct

SEQ ID NO: 10236 - DNA, 201 bp, Artificial Sequence
  Description of Artificial Sequence: Synthetic probe
tgcacggagagttgtggtgcccagaaaaaccacgtgagttttccaatataatcgttgtgtgctgcatggtgcataacatagtgatagacatggagggtaargctgtggaggaggattacgtaccaaacagttgcgacgtgaagtatagtcaggaagctgcggaggaggaatacataccagatgagaattctgtcaggataa

SEQ ID NO: 10237 - DNA, 201 bp, Artificial Sequence
  Description of Artificial Sequence: Synthetic probe
catggccctgtagtaacacctaacttcccaaccgattgttgcattgaatttagctttctagaataggtatgtaattggaccttgaaaattgaattgtcatrtcttgtaagtaagtacatatccattaacttcattatgttttcatgtagtagtgctgaatttcaagagaagcctctgttcccaatgcagatctagttaagg

SEQ ID NO: 10238 - DNA, 121 bp, Artificial Sequence
  Description of Artificial Sequence: Synthetic probe
tgtctttagcagatttccaatgttatcagacaagtttgatggtggtacctggacctccacrgtttcatcaacaagtggctccttgatcacagtgaggtcgcactcaatcacgaggcagtca

SEQ ID NO: 10239 - DNA, 201 bp, Artificial Sequence
  Description of Artificial Sequence: Synthetic probe
tattatttgttggcccgttgcagcgcacgggtattgtgctagtggtaactagaacgagtcacgtgcatggggatgcaaacccatggcttctgtttgtaatractgcttcaagtgtagaattagtaggatttaggatgatatccccattctagatttactggtaggagaaagttaagggcttcagggttacaagattgggtt

SEQ ID NO: 10240 - DNA, 201 bp, Artificial Sequence
  Description of Artificial Sequence: Synthetic probe
ctgttctcagtttcagaaggctgcatgacttgcaccgctccatctttatcagatgctcgtccagactttcttttcttaaaaacatgactgtcctgatcgcygtcttcgtcggtaggaacttcattggtgtcatccaaggcagctggagattgacttgcacaagcaccgttctcaatgcgggctgcttgagtactggactct

SEQ ID NO: 10241 - DNA, 201 bp, Artificial Sequence
  Description of Artificial Sequence: Synthetic probe
agattatcatgtagatctacataaaggtagcatgagaggtcttaatctttattacttactcaagtagaagactaggtttgagtaaacagaagattttgttytgcttgacataaattgcgcagaggtatgcaggttaccttttccaacgaacggccttgatagattgcctcaggcgtgctttctttctccttcatttttact

SEQ ID NO: 10242 - DNA, 201 bp, Artificial Sequence
  Description of Artificial Sequence: Synthetic probe
caggatgaatgtaagatgctaagaagagtaaggcactgatgccttgtaaaagatcatcacatgctattaagcatcaaccaccaaggtcaagacttcagagmagcactagtccatcggatatgttgctctaggcaacttgaatgtgatgatctaattagcacatgatgacgtctaattagctatgttcacgaaataactttt

SEQ ID NO: 10243 - DNA, 201 bp, Artificial Sequence
  Description of Artificial Sequence: Synthetic probe
gcaaatggttggagaggcggtaaaagtaggttgcttatcagttcttgcctctttgagaaaattctgcatgcagtttcaagtgacagtcttgtaccgtccgyagggaggtttgctaattgcagaggtcatgtcagccaagggatatagagttcaaccactcccaagggtcccacgccatgatattgtccaggttgccttaag

SEQ ID NO: 10244 - DNA, 201 bp, Artificial Sequence
  Description of Artificial Sequence: Synthetic probe
atgtctaaccttacaattttccttgccaacatttctggatttcttaacttggaacacctctgtaacacgagtgttgatatacttggatatttttggctgtyctgggttccgaagcccattgcttggcctagatccatatgttaagtatcaaattccttatatcaaagcaaaagaaaacatcaatatgcataattagagcag

SEQ ID NO: 10245 - DNA, 201 bp, Artificial Sequence
  Description of Artificial Sequence: Synthetic probe
caatcaaggttattgagtcgtcacataaatgtcattagggcatccagcctcttcacttgaccggatatttcctatcctgtccacattctgagtcagtttgyttctgctcccacttcggttcactgtagtcaccttctacgtattctaagatatgttcgtggcacaatttctcgtcgtcttttctttcctcgttacaacttc

SEQ ID NO: 10246 - DNA, 201 bp, Artificial Sequence
  Description of Artificial Sequence: Synthetic probe
ccacaggtaagttaacaaaaaagctcaagtgctccgaagggcaaaattaagtcatgtttatggaaagagtcaaggtgctaacaaaaatacctaatcaggartaactaattaatgtaacaggatatgcattggcagtgggtaaaacagtaacaggagtacatacaagactcccaagggacatgaaatggatacatggataat

SEQ ID NO: 10247 - DNA, 201 bp, Artificial Sequence
  Description of Artificial Sequence: Synthetic probe
gccagacagtgtttcgcaaagagttccactcggccgaggcggtgagggagtataccctctctaggtcagagacaacacggattgtggacctgtagggagargagagtcaggagaccttagtggacgtaccagtccagggtacccattatgccaataccggggttcctccaagaccatgttggcatcccatcgtggaaacta

SEQ ID NO: 10248 - DNA, 201 bp, Artificial Sequence
  Description of Artificial Sequence: Synthetic probe
gtgtacaaaaaatgtataaggataaatttaacactaacttagcttaaaaggggttaaatgtggcagaaaccattaatgtgagtttagggtgaaattcgctyttgagaaaaaagttgatgctttaggagcagctgggttgaactgggccaattaagaaatagtataacttggctacttaggaacctctatagcgtttggaaa

SEQ ID NO: 10249 - DNA, 201 bp, Artificial Sequence
  Description of Artificial Sequence: Synthetic probe
ggttaatatgctagtactactgctatataaccaactctcagacatgcttccatatatgcttctaataacactgctgctagtagtaagtggatagatagctrggacagtgacgccagtactcttttggagcagttgtaggctgacctcacatgaaccttgcagggtaataaggggagctgctgagggtgagctccagggagg

SEQ ID NO: 10250 - DNA, 201 bp, Artificial Sequence
  Description of Artificial Sequence: Synthetic probe
gttatctgatgcaaatgactgacatgaatacattatgtgcgttgtgtgtctttgctactgggtttatcatcactagttactgcttatttgatcattgcaartgagtaaattgaaatagaatgcgttctttttccctgcaatttgcatttcttagtttgtccgggggtttcatggcctagctagcgctggcactaacacaat

SEQ ID NO: 10251 - DNA, 201 bp, Artificial Sequence
  Description of Artificial Sequence: Synthetic probe
ttactcaggaatcagaaaatcaaaattgttctgtataacaggttactcactggattttactgcctcgccctatgtataatcacttagatagcctaaattcrtctcagcatcatcggcaagagtgccatcatccaatacatcatctgaatcttcgcttggatcactgaaatctgaaaatcctatgggttacttcagagtaga

SEQ ID NO: 10252 - DNA, 201 bp, Artificial Sequence
  Description of Artificial Sequence: Synthetic probe
actttaagcaaagagaatgttgatacttaccgaaataaggttcactgcgtcttcacttgctgagggaaccacttccgcaagatgtatgctttcagactgtygagacatgtagaagttaaacatcaattgctcctaatatctgaattagagaaaaggttactaaatgattctacctgaggaaactgaaaattgatagatgct

SEQ ID NO: 10253 - DNA, 201 bp, Artificial Sequence
  Description of Artificial Sequence: Synthetic probe
acagtacgtgcatggagtgtcttactttccaacacgtacagtgtatacatacgcgtaactacttctaccatgatgattacgctgtacaatggcagtaagcsttgcagcaacccaaaacccttcccgtgctccggacaaaatcatcagcaaccaattagctagcacctcagaaaaaagacacgactggcttagctactccag

SEQ ID NO: 10254 - DNA, 201 bp, Artificial Sequence
  Description of Artificial Sequence: Synthetic probe
caaaataacacatcatgcaagaacagtggatgaacacaatgtaccaagttcagtgaccagctatactgatggcataggtcactgaagcatgagcatctttkgtacaaaggaaaccttaatggcattaatatggacacagaacctttcagcatagctatgatggtctagattttcagttactgcatgctctgtaaaaacgac

SEQ ID NO: 10255 - DNA, 201 bp, Artificial Sequence
  Description of Artificial Sequence: Synthetic probe
agctatcacgaggaatattgaaaaccacattgttctccaaatagctcacaatgaacacgtcacccattcacacttgatcctgtcaatacaaaatctctctrcatctacagtttgattgctacactattggcttgctactttctagattcaccatgatcataaagagtggcaacagcctctaggcactagagccgtccatgg

SEQ ID NO: 10256 - DNA, 201 bp, Artificial Sequence
  Description of Artificial Sequence: Synthetic probe
tatacggaagttaccagtgacagttcctagcggtgcagccatcaattttatgaaaaaaaatgttttatgtgccacaagattatacatttgactcacattcygaaaccaaaactataatgcatgtccttatggagttttacaatctttggagtatgtatatttaaatgttggtggtgtcttaaacacagcaacccacattcg

SEQ ID NO: 10257 - DNA, 201 bp, Artificial Sequence
  Description of Artificial Sequence: Synthetic probe
ctctgacagggaagaaagattgtggccatgctgagtgcaaggaagctgagattgatgattggttgcttcagtttgcagagctgttccgaaaccaggttggrattgatgctgatgcacatctggaccttcatgaattgggaatggagctgtgttccgaagcgcttgaggaaacggtgaccagcgaggaggcccaatcctttt

SEQ ID NO: 10258 - DNA, 201 bp, Artificial Sequence
  Description of Artificial Sequence: Synthetic probe
cacttgacaccggcacccttcgccaatcgcgttttcgcccctcacctgccctttcgccaatcgcgttttcgcctctcacctgataccgccttttccctccygttaggttttttcctttccctccgtctccgacggcgctctctcgctcctccctatctgctgcttccgttaatggtggagaagaaagcccgattttcggcc

SEQ ID NO: 10259 - DNA, 121 bp, Artificial Sequence
  Description of Artificial Sequence: Synthetic probe
attgggccttgttgtcactgtgtctatgtgcaataatcaatgattctagttggcgctgatrtagcctctgccactttcacaatttctatggattattgctgattaccctaactgattccag

SEQ ID NO: 10260 - DNA, 201 bp, Artificial Sequence
  Description of Artificial Sequence: Synthetic probe
ttggttgtatccagacatgttcatagaaaattatgaggaaatatactgcataggagaataagactagcgctctttcttttcttctacatacaaacctcaaraaatttctcggccctctcgtcgcttaatttgccacatctctttatccaattcctgcaaaccaatcgcattcttccagagacgtaaagcaatctccctcaa

SEQ ID NO: 10261 - DNA, 121 bp, Artificial Sequence
  Description of Artificial Sequence: Synthetic probe
agaagatgataaggcctatgcaagcatgattgcagaggttctggttcctgagtttaaggargaaattgggctccctgaggttgaggttgaggttgaacatctgacaaaatttgttaataat

SEQ ID NO: 10262 - DNA, 201 bp, Artificial Sequence
  Description of Artificial Sequence: Synthetic probe
agatcatcctgtaggctgacgacactcaccaacgcaaaagttcagcttcatggacattgacgtagctcaagtttcccctggaagcaagtttaagtgctgtytttttctttatgttttagactgcgggatagcacgaaatagtctgccgttcttgcctggatatgccctggtgttggtgttgcaacacgcagcatagttcgt

SEQ ID NO: 10263 - DNA, 201 bp, Artificial Sequence
  Description of Artificial Sequence: Synthetic probe
cgcagtctctcctgcgttgcccccgctgcgtaagaattagaacctcctctggcttaattagcctgcttctatacatgctcgtccctgtcggcattaattcycaccgatgaaacgttatggaatctgtcaaacttgcagcgccaatgacgccggagtcgccagctccgacggcggagcccaccgtgaccacgccgccgagca

SEQ ID NO: 10264 - DNA, 201 bp, Artificial Sequence
  Description of Artificial Sequence: Synthetic probe
tgatctattagctgctgaattttttaaccagagaccttgtggaaatgcgttattgtcttttcttgaccagaacaatgaaagcttctgtaggctatagctgraccaaagccaatgcagagccgtcagggggcgtactacatgtagtaattctaccataattgccgcttgtacgctggaggtgccaactaaatggtgatgcag

SEQ ID NO: 10265 - DNA, 201 bp, Artificial Sequence
  Description of Artificial Sequence: Synthetic probe
ttcttcttcctaccggcctgtatattttgaggcagagaaagctggctaagaagagagagaggagattattgttgcctctctccatgtaaggttgtttggtwgtgataggtttcccttatattgtggttattcttgactaaacggaatccacattcttggcttgtttagcacacatctgacagttcgtaggcctctgctgcc

SEQ ID NO: 10266 - DNA, 201 bp, Artificial Sequence
  Description of Artificial Sequence: Synthetic probe
gaagaccgggctgctgctagatagcttcaagacatcagtcgtctcgcgcaccgacgaaaagatcaatgtgagattgtaaactccgctaaggcgtgttaagytgaagttgtccatatctgtaaacaaagttctttaagtttcccggtcacgtcagtttatacagacttttctcttcaacttaagtagtaggactgtaggaca

SEQ ID NO: 10267 - DNA, 201 bp, Artificial Sequence
  Description of Artificial Sequence: Synthetic probe
cgaccggttggtgactggcgaatgatgaagattccaagtatacgtttgattggccttcgtttcctagttcctagtacgacgtgaaacgtgttcaacgaggyaaaaaaaagagatggcccgtcttcttggctgacttgcacgggtccccgtcacaaatcccatccacacggcacggacgatggatccaccggcctcatcggt

SEQ ID NO: 10268 - DNA, 201 bp, Artificial Sequence
  Description of Artificial Sequence: Synthetic probe
tcatgatcatcaccagatgcaaccccatcgccgggccgcccagtggaggttttattgttgaggatacggcgtacaataagcttccgacgcttaccagcacrgcgcgtagaggtggtggtgcagattgcgaggtggttgcgtaggtgtgtggtgcctgaccggctagttgctgtgagctgcttcttgcagtggttacagatg

SEQ ID NO: 10269 - DNA, 201 bp, Artificial Sequence
  Description of Artificial Sequence: Synthetic probe
catcagaaacagcaatagatgaagtcgttagtggcggttgcacgagcacatgcctacaaacatcaagagttagatggtcatcaagcaagagcagcaccgaygattccttaggatccagcagctggttgtccaagttgatgcaaagtttcggactccattgtggaaataattatggtgttgaggttgtggcaggagttggga

SEQ ID NO: 10270 - DNA, 201 bp, Artificial Sequence
  Description of Artificial Sequence: Synthetic probe
attgggtaccgccagacattgtgggaaactgcatatgatggacagtcaagtgagaccaatggacaaattctggagttcaatcaatgcatcatgataagaaytacagaaaaatagcaaacaatagtcatcaagtattagaaaaaaacatttgcttttgacagtatcaaagtgcaactaacatatgcacattggttcctagag

SEQ ID NO: 10271 - DNA, 201 bp, Artificial Sequence
  Description of Artificial Sequence: Synthetic probe
gtggcggacatgctcgctggcccgcccggggagaaccccatagtgacatcgcttggcccgcctaggcccagtgggatgaacttgttggtaccgctgaagcyggaaggagaggcgccgaggctggagagcatgcagccgagcgggttgtcggcggtgtcgtcggagaacatcctgaggtgcgggctcttgatgtctggcgca

SEQ ID NO: 10272 - DNA, 201 bp, Artificial Sequence
  Description of Artificial Sequence: Synthetic probe
ggtaactatccctgattccacttcttacctagcaggggcagaccttttagtttatgttttgcacggtgtcctttacacctgtgtactgagttgtgcaatgytttgcatcttcaatgtagacaatccaagatgaaatggtcagtgccatgcgcgaagataggagcctgggttgctctgaacttagcaggtatggttcggtcc

SEQ ID NO: 10273 - DNA, 201 bp, Artificial Sequence
  Description of Artificial Sequence: Synthetic probe
atggagcacatttcctgtgaaattcacacccaattatgtgcactgttttggtaatgccattgtggatgccatctttgcattgcatatggtgagatgctgcyggatgcagcagtagcactgaaaggctgaaggtttggccattgtttatagagccaagggaaaaaagggttttctgcaagtggatgtgtagatcagtgagtg

SEQ ID NO: 10274 - DNA, 201 bp, Artificial Sequence
  Description of Artificial Sequence: Synthetic probe
gacaacttggtatcggattcaggaccatcctcctgctccatgtcttccagcactgacatctgtggaagataagcttgggaaaattcaggaatccttgctgrctctgtgcaacacgcagactatcatgtgtgatgaccagaagaaacttgctgccgacagaaggctctctctgtcaaggttcaaggttgacagcctcttcgg

SEQ ID NO: 10275 - DNA, 201 bp, Artificial Sequence
  Description of Artificial Sequence: Synthetic probe
ctccgggtgcttgagcgcggcacctacctcgtcggctctaaccttgagaaggtggtcaagcccaacgtcttgttcctacggcagtgcggcctaatggattscgatattgccaagatctgcgtctctaggtcaaggatcctgactgccaaacccggacgcgtccaagcaatggtggcgtgcgccgaaagtataggtgtgccc

SEQ ID NO: 10276 - DNA, 201 bp, Artificial Sequence
  Description of Artificial Sequence: Synthetic probe
cattctaattctatcagtaaatctcagagaaacatttgcattctgcaatagatgaaagatgcaactcatcatcagcggcatttgcttagcaagcactgacragacaccaccgagttgcccatagtttccttgaactaaaatatcttgcagcatgtacaaaagagaaccaactctttatacaatctatggcttacccccaaa

SEQ ID NO: 10277 - DNA, 201 bp, Artificial Sequence
  Description of Artificial Sequence: Synthetic probe
gccctattgcacatgaacataacatccaagtgcatctggagcccatgcatctcatcagtcatcagcaaatatgagcaatttagtaacacaatgctgctgcraactcaagtctgaatcatcaatggcaattgaacatcacacatcccattccaatgtcagatttggaattcattgttctctactacactgaattcaaaatct

SEQ ID NO: 10278 - DNA, 201 bp, Artificial Sequence
  Description of Artificial Sequence: Synthetic probe
gaaggggatagcataaatgatatacccagttattggacatttttatgtagtatatggttgaattgtttggtggtgtcaatttaagtgttgtaagcgtcctstagctacaccgaagtaacactgtcatggctatcacttgtatctatttcaagggccatgttacttaagttgccctcatgtattttcaggaaagcgtggaat

SEQ ID NO: 10279 - DNA, 201 bp, Artificial Sequence
  Description of Artificial Sequence: Synthetic probe
gtttgaaacatttttgcttctaatccttgcaatgctactttacattggagaatatagagttacttggtggggaatttagctgcgcccttgattccatgaayggtattcttgaccccatacatcaaaattgacaccttgctgctatgatctactcgttgaaacgctttaatgtagacaagcggcatactagattattcctgg

SEQ ID NO: 10280 - DNA, 201 bp, Artificial Sequence
  Description of Artificial Sequence: Synthetic probe
gccattttgcgtttgaagttcagatagtcaatttttgaagaaaaaaattacagtactcacatcaaagtgctcgttgcggagagggtagttgatgtccgtcrcagtccagcaggattcagaaataaaatctctatacaccggggcagcggcgctggacgcctctgtgagtggcgaggcggctgttaccgatgcggtgtggat

SEQ ID NO: 10281 - DNA, 201 bp, Artificial Sequence
  Description of Artificial Sequence: Synthetic probe
ggacatgagatagtaggtggaaaccgcataccacagtacaacattctataccatgttacatgtttcctaaagttaaatcatatgaatcctgcttattgackccactagcctatacttgtgcatcagtgcattgcgaagctaacagcacataagaaaagggagtcttatttttattactgcaaggaggataaaaatcttaaa

SEQ ID NO: 10282 - DNA, 201 bp, Artificial Sequence
  Description of Artificial Sequence: Synthetic probe
taagacgatcttcatcttacccgggcctgtatcgcccaaagtgatttccactcttttatccgatcaacagtatctaaattactacggccaccagatgtgcyactagaagtgtagaacgatccagttcttgctagattatacgccgaactgatagaatatataccaaattttgcatgtggccaggatacaaaattaaattca

SEQ ID NO: 10283 - DNA, 201 bp, Artificial Sequence
  Description of Artificial Sequence: Synthetic probe
tagtggtgttcatgtcctgctgaatctgtaacggtctggtaaataggtgtaactagatcacgttggtttctgaaattaaatggagggtttgctctgaactygttgatgattgtcaggtgtgccgttcgggaagaactcgcgtgagccgaggtaccgcatggagttccacactattggctcgccgtaccacccggtgagtat

SEQ ID NO: 10284 - DNA, 201 bp, Artificial Sequence
  Description of Artificial Sequence: Synthetic probe
cagatcctggttggcctactataaaaatttagtaaagaggcctaaatgtgcaactctcaagttcagggaccaaactggcttacatgacaaatttagtgacrtatggtgcaacttcacctacataggcacaagtaggcctttaaatagaagctgtgttacacgaagggtgccaaaaactttaaccaatactaggaaagcatg

SEQ ID NO: 10285 - DNA, 201 bp, Artificial Sequence
  Description of Artificial Sequence: Synthetic probe
agcatgaaaggagacctagagacagcaatgctcacctcggcatctgagaacctgaacgtcttcttcaagtagtccactctggcagcgatctccttctcgcygaggaatgcgacagcttgcaaggcatatctgagcatcccagaactgcggggcacacctagaccttcagcgcaggccaccatcgcccgtacacgctccggg

SEQ ID NO: 10286 - DNA, 201 bp, Artificial Sequence
  Description of Artificial Sequence: Synthetic probe
acatcgcccattctacagtgattgaagaagtccccgttcctgccgtgaataagttctgcacagattaatgaagagaatattagtgagacagtgtgttgctygtgaatttcaactcaggagaaacaaaaacatatgcttgttaggcattgacaaaattgggttgcagaaatactaggcgagaagttataaaaatggaagtga

SEQ ID NO: 10287 - DNA, 121 bp, Artificial Sequence
  Description of Artificial Sequence: Synthetic probe
cgaccattgaagtaaccacatgacggcctagattatgctgagattagacgtgatcgcagakaatgctcggggattgcgtgtgcacgccaaaccgatggcacccacccaacagcagtagaga

SEQ ID NO: 10288 - DNA, 201 bp, Artificial Sequence
  Description of Artificial Sequence: Synthetic probe
ttgcacaagaaggctggttctgatcttgttgtagcttggagggacatagccacctaatttactattggcagcaaacatgaaagcttgcctaaaccaagggyttcttgcgaggttgaaaggcagacctacaacaaatacaatgaaaacacgggattgcttaaaatttaaagaatctacgtaaaatgaaacatgttgcatgat

SEQ ID NO: 10289 - DNA, 201 bp, Artificial Sequence
  Description of Artificial Sequence: Synthetic probe
cgcaaaccctcttttaccaggcaatgatcaaagcaactcagggtacatacaataatactgtcccaaaggctgagatgtgtctttgggaagaacagtggttrtcttgtgcaagtcaattaggtcagtgggaagtattggctgattttggaaaaggtgtggagaattatgatattcttttagactgcctctggaaggtgcctg

SEQ ID NO: 10290 - DNA, 201 bp, Artificial Sequence
  Description of Artificial Sequence: Synthetic probe
ctagtgctgtccatttctgttagtttatggcctcggtttggttggattaggctgtgaaatgtccctgttctgcactagacaatctttcagttggtaaggcracaatcctttgttattgttggccaattattttagcggttgctctgcctaaggtatcatcagctcttcaagttgacgtctgtgtctcccagatctgtcctg

SEQ ID NO: 10291 - DNA, 201 bp, Artificial Sequence
  Description of Artificial Sequence: Synthetic probe
atcgtgaagtaagctccttatgactctccaacaaatatcatttgttaatttctgaatgctttgtctgtgtgcacatatgctgctatcatgaatgtctcagyctaccttttacttaaatgatggtcttctgaccttgtgtattattctggaattcaagaactcatttgcatgtacgtattgctagtgccagcgaaggtgaac

SEQ ID NO: 10292 - DNA, 201 bp, Artificial Sequence
  Description of Artificial Sequence: Synthetic probe
ttgtttggtctgacaagttcatctcaccttcactatgctcaaacctctggttcatagagacatctgcatcctagcttagactttcatatcgcagttccaamttgtttcttctgctaatgcagtccttttcttctgtttttagctattggtggattggactaaaggaaagaatctcatcatttcaagtgctgctcataatgc

SEQ ID NO: 10293 - DNA, 201 bp, Artificial Sequence
  Description of Artificial Sequence: Synthetic probe
gccattcaccacgccgtgaagctaagcaaatcaaatccatccacaatcgcatgatgaaagtatcctacactgttgttaccttgatgcactcggcagcagcragtagatcgctcagttgcctcttcttaatcgtttcaacatgcctctactccacctctatgacaacaatggaaccaatgtgaatatgccaataacacatca

SEQ ID NO: 10294 - DNA, 201 bp, Artificial Sequence
  Description of Artificial Sequence: Synthetic probe
ccaaatagagaagtaaccgccgcacgagtgaacctataaattttcatcggttactactatgtttacggttattatagttatccacatgtaaccgtctctgsctgtacttataattaaccctgtatgcatcttacttttttattgtacaccttgcatgtggtttatacagaatatcagcagaagtgctacttacattgctaa

SEQ ID NO: 10295 - DNA, 201 bp, Artificial Sequence
  Description of Artificial Sequence: Synthetic probe
gacaggccattcggacgtctttggtgggatgaaacagttccaacggttttgacaagagcaaagccgcacaaccaggtcagtatggacatatcgtggtgttytgcaaacaatgttttgctgatcctattttctttactctcgctgtaatggatctgaatgttccgcttgtagaaaatcttgcacccgggtcaagacagagtg

SEQ ID NO: 10296 - DNA, 201 bp, Artificial Sequence
  Description of Artificial Sequence: Synthetic probe
atcaaagttcccttccgtgccttgcgtcttttgtttattgaaggttgctttgcttttaggcttcactgaagatcaccagtcctcttgcaattatctggaartctttcagccttgttttctttgcggtaagttgattctcatgtacagaaatataatctgtcaaacactcatagctgtagaagcttggatgatcttgttaac

SEQ ID NO: 10297 - DNA, 201 bp, Artificial Sequence
  Description of Artificial Sequence: Synthetic probe
gttgggccaggggtggagcgtcccatgtagtctaggttctggcgtgggctatctttattcaatctttctcggttcgtttagctggctcatacaacgattgrcaacgctcttctatttatattaatgcccttagtagaattatatgccaatttgtatttgtgccgaatttaatttgttatattgcggtgtgaagctgtttga

SEQ ID NO: 10298 - DNA, 201 bp, Artificial Sequence
  Description of Artificial Sequence: Synthetic probe
aacatgtcagcaagacctcaattttggatgattttgcattttacgagaaccgacaaaagttgatgcaggaaaagagagcaaagcaacaagtgcttcaaggmcaggcaagtgttatatccatatattagagcgctctggttgacaatttaagaacttcacgagcaccagttattgtatataggtcctgatgcatgcatgcta

SEQ ID NO: 10299 - DNA, 201 bp, Artificial Sequence
  Description of Artificial Sequence: Synthetic probe
attcattttgcttgctaaattttcccagtacttatattggggtcacatggttgacaaccatttcctttatttggagatgcagaatcagaagggcagttgargaggagcagaaagctgttccatcttgttgctttgtgtgtgtctgtttttcaggatggatgaatcggcaactgtatattagtattcgtgaacgtattgaat

SEQ ID NO: 10300 - DNA, 201 bp, Artificial Sequence
  Description of Artificial Sequence: Synthetic probe
aacgcggctcttctcttcaaacatgagtgccaagaatgccgtgagattctacgaagctattctgctaccgcgtattcgtaatgacataaagcacaacaagmgactccattttgcactttatcaggctatgaaaaaatccctctacaagcctgctgcctttttcaagggaattttgctgccaatctgtcaggtagttctctt

SEQ ID NO: 10301 - DNA, 201 bp, Artificial Sequence
  Description of Artificial Sequence: Synthetic probe
ttatctcttcatccttggaagcaaactgctgaactacttctttttctacatcttttacaaagcctttgacgactgagtacgtcacgaatgttgagaaatcraccatggtattgacatcgtcccacaaggagtccatctcatcaacgatgattaactcatcaccatctgaagaaggttcaccctgaataatagcatatccgt

SEQ ID NO: 10302 - DNA, 201 bp, Artificial Sequence
  Description of Artificial Sequence: Synthetic probe
tcggtggaaaattagtggtgggatagaaattgcttattttcttggagcatatacaatgcaagaactcttaactcgggtgatggtttttatatcttgtagcrcctagctaggcaagggtttatgtctatattgcaaaaggtgtttttcaaacaaccaagaggatccaagcgtcggccgagcatcctcctccagcttaggcag

SEQ ID NO: 10303 - DNA, 201 bp, Artificial Sequence
  Description of Artificial Sequence: Synthetic probe
ctaaacaaagcaaagctagtacgggtttgagaattcagatccacttagcatatacagtggagatagcgctaactaacgttgccatgagcagaacatccatwctaaatgggaaatgggagttcagggcagcgccgtacgtaccacagtaataggcaggcgagcaggagggtcgcgtgtggcaacatggaacgccagcttcgt

SEQ ID NO: 10304 - DNA, 201 bp, Artificial Sequence
  Description of Artificial Sequence: Synthetic probe
acttgcttagcagaagaacatggttgttgcacggagaccatgctacttgttgtcacttttcgtcactcaacttggctatggttgttaggcacatttagtgyctcacatgtgtgaattagttcctttgtgtgtgttttgtgttcatactaaatttggttatcaccccatgcgactaatcttcttcatggaatttgcagatac

SEQ ID NO: 10305 - DNA, 201 bp, Artificial Sequence
  Description of Artificial Sequence: Synthetic probe
ttccgcctcaaacatgtcctgcgcacgcacaccggcgccgcgaacgacagctcctaccgttgcgtgtttcaggaggaggacgacgaggggaacgtcgggawcaacctcagcaaggacctgatgatcatcgccggcaagtccctggaggccaacatcaccaggatcgggccactcgtcttgcaggtctccgagcagcttctc

SEQ ID NO: 10306 - DNA, 201 bp, Artificial Sequence
  Description of Artificial Sequence: Synthetic probe
ctcgttcaaagtaacataaactagggctaagtggatacaaaatccaacaaagtaatacgtagctttatgggccattattttggatggtatccttcggactycggttgtctggtatatgtagagagaaagtgcatagtgcaagctggacgcgcattgaaaatgcatgttagagaccaacatggattaactcattgcgtgcaa

SEQ ID NO: 10307 - DNA, 201 bp, Artificial Sequence
  Description of Artificial Sequence: Synthetic probe
atataggctacgtcacaatgaagagggcggggagcttccactttttgattgctttaatatttagacgctgcaaaactcataaacagtggagacgttaataygaattcaaacttaccattaacattcagcaacatgaatatcacaacgaatatccacaggtaccacctaaatggaaaaaaggcatagcaagggtaaaactgt

SEQ ID NO: 10308 - DNA, 201 bp, Artificial Sequence
  Description of Artificial Sequence: Synthetic probe
tacttcttttcagctagcagcaatctcccttcacatctttcagcctcgtcatgaagcaatcgcagcattctgtccttctctgcctggatccaagggcggtyaggctcagaccactgcctcggagtaccatgaagggcaacgcggagattattgctagtgtggcaaacataattggctatcccgttgatcacagcatgatca

SEQ ID NO: 10309 - DNA, 201 bp, Artificial Sequence
  Description of Artificial Sequence: Synthetic probe
aacgctccgatgaacgatcaagatcagcaaaaccaccaccagcagcgtgccaaccccgccacagaaagcatggatcctgagaggattgtccggaatgcctycgccgccgcccaatccgaggcgccggccgccgagtccaggggaacaagcaaccacgagcagcagtcacgcgtcttccgcgccgtgccctcttcagagcct

SEQ ID NO: 10310 - DNA, 201 bp, Artificial Sequence
  Description of Artificial Sequence: Synthetic probe
tagccgtgacgactcttcgggatacaaattatcagaaccaaataagagaagacgtaactggctgaggtgtattggcttgatcaattaatgttgtagtccgrgttttgcaatattggtagatttatccagttaattaatgtactgctcacctcaggggcggacccaaaatgagccaagccccaggctggcatttgtgtttaa

SEQ ID NO: 10311 - DNA, 201 bp, Artificial Sequence
  Description of Artificial Sequence: Synthetic probe
gaagagctgacaagcacaaccatgtaaacgaaaaggaagatgcaacgaaatctgactggaaatggtacttggggaagctgaattccctagattaggtattyaataacatctcgctggactcagctggaaaattcttctccttctggtctagaacataggttgaataaaaaattcagatgacataaaagcacaacacgctgc

SEQ ID NO: 10312 - DNA, 201 bp, Artificial Sequence
  Description of Artificial Sequence: Synthetic probe
gggagccaagtgtgtctggaatttcaccagacaaagaattctctgcaagattaaggtcaactaggctgttgcacaaaccaatttctggatgtattgacccytccactgcattgtgctgcaaatgcaggtacgacaattgcttcagattgccaatctgtgtagggatttggccagagaatctgttgttggaagcatccagct

SEQ ID NO: 10313 - DNA, 201 bp, Artificial Sequence
  Description of Artificial Sequence: Synthetic probe
cacacttgtatgcccagtgcccagtgctcgggcttgctgaagtggtagcagcaagaaccaacgcgagagccacaactggtactgtcttcatcgctacgacmgcatgacctgaaaacaatatataattagaaggaaaattcaagtaatctaaagactgtaaatgaaacatgctaaactgacattttgcacagttgttggaag

SEQ ID NO: 10314 - DNA, 201 bp, Artificial Sequence
  Description of Artificial Sequence: Synthetic probe
cgtactctaagcatgaataaatgttattttgatgcattttgccaatgtgtgtgtcataatgaaaacaaagaggaagtggaaggacaaagaaaatgcatacyggcagttgtaacaccttaattagttttgacagctctttcttaagttgaacgtgaagattcttgggtgtcgtcagttttttcatcccttcagaacaaaatc

SEQ ID NO: 10315 - DNA, 201 bp, Artificial Sequence
  Description of Artificial Sequence: Synthetic probe
gctaagaatagatgcagccatggaccgaaatagatgcaggttcataatcaaaggtacgttttatcccatgcgcttgcatttcctctactattgtgtaatgytcctttgggctaacaaatcctaaaaaccctctgaacaagcaaaactggtgtaaatatacccttagatgagtttaacaactgtttagctagcacgtggact

SEQ ID NO: 10316 - DNA, 201 bp, Artificial Sequence
  Description of Artificial Sequence: Synthetic probe
tgtgtactaaatacatgatttttggaggaaggggccaacactcagtcaaacagcttttggatttgaatgccagcatacttagcactttcattattgaatgygtatgtctgaatacaaaattaccccgaaaagttagtgaaaaatcatatgcatttcatagagctgcaaggtgaaaactcgggcccaaaattgtactagtaa

SEQ ID NO: 10317 - DNA, 201 bp, Artificial Sequence
  Description of Artificial Sequence: Synthetic probe
agttttgtttgttcacttgacatggctacttataggcttgttttgttgcatagatcagtggtcaggtcagagcatatggttgattcaacaattttgatacyctgtcgtttccgtccgtgcttatcctgaagtagacaggctaagtagtgttcacaagtacttaatacttcacattgtacttagttacacatgttgacatgt

SEQ ID NO: 10318 - DNA, 201 bp, Artificial Sequence
  Description of Artificial Sequence: Synthetic probe
cgcgaacaagttccttgcggagtggttcgcatcccagcaggttccacaagaggcaccggacaaagcagcacatgtacatgaacatggcgaggtcggcttcrtcatccgtctgtgcgcgaacgacctgtgcggccgccaggagacgaggcctcacgagttcaggagatgctctgtctgtacaatggtgaattactgctcgcg

SEQ ID NO: 10319 - DNA, 201 bp, Artificial Sequence
  Description of Artificial Sequence: Synthetic probe
gggcagcggcaacgttccagtgcacatgcacaatgggcgtggaacatcaccatgttcgtatatgctctgaagatgaaagagacaccagatccatgagttcyggccaccggagtcggagaagtaggatctaaaccgctcccgccaccggagtcatgggagttgccggattgaagcactctggtcatggtactcaagggagac

SEQ ID NO: 10320 - DNA, 201 bp, Artificial Sequence
  Description of Artificial Sequence: Synthetic probe
ggcactgcattcttgcggggagcagcaactccatttccaatgttaaaaaaaatgaaattaggaatggtggaatgggaggagtgggagtgggagcagcaagygctagccatgccccgtttggaggagattctgctcgcagggtgtaaactgaggcgtgttcctcctgggcttggctccaatgcgagggctctgaaaaagctg

SEQ ID NO: 10321 - DNA, 201 bp, Artificial Sequence
  Description of Artificial Sequence: Synthetic probe
agaagtcaagaaaagctattttggcaagtctccatgaattgtcaacaaaagctctgcgctgcctcggttttgcatacaaggaagatcttggagaatttgcracatatgatggtgaattccatcctgctcacaagcttttgctggatccagccaattatgcggcaattgagacagacctgatatttgttggtcttgctggcc

SEQ ID NO: 10322 - DNA, 201 bp, Artificial Sequence
  Description of Artificial Sequence: Synthetic probe
gagatcagctttgccgtgttccggccctattgacacacggcaaaggatgggggcaacggcagcgacaattttttccgtagtgtattttatattacatgctraattaaaatcacatagacaaattttcccgtagtgtatcttacattacaatgtttagtttgtcttcttggtgcagacggctttgaacccttgtctgaagtt

SEQ ID NO: 10323 - DNA, 121 bp, Artificial Sequence
  Description of Artificial Sequence: Synthetic probe
aaactgactcagatctccctgaatccattttgttctcttcaacaggagacaccttactgtyacgatgactatccacctgatcatccatgcacaggtttatgagctcattaagctgggtccc

SEQ ID NO: 10324 - DNA, 201 bp, Artificial Sequence
  Description of Artificial Sequence: Synthetic probe
tacagcagctagcaatagttcatcacgagaagtaaagagaaaacgaaggtggaagtacctgaattaacaggaatttagcgatgcgtaaggtccctgtctayttctttagatacagtcaatgaacaaagcattggctgccgaattcatgtttccgtgtctatttctttggagcatgcatgtttgattatgcgaccacttggt

SEQ ID NO: 10325 - DNA, 201 bp, Artificial Sequence
  Description of Artificial Sequence: Synthetic probe
tacaaataacaaacaaacaaacaggaatagattcaacagcactactgcaaacaaatagtatcacatggtcaaatagaattgagtcgttgctcaagacatgyatacaacaaataaaacattgctcaaaacatgtgtagagcaaatgatatgttaccactaccaacctctgaggttcaagtgtgaaccctacctttcagcagt

SEQ ID NO: 10326 - DNA, 121 bp, Artificial Sequence
  Description of Artificial Sequence: Synthetic probe
aactgaagtactgatccttaaatatatgaccaaataaaagtaggaggtgcatcatttacaragtgatgtatggaaatacagcatgtcaggctatgagacatgcctgggagagaatttagga

SEQ ID NO: 10327 - DNA, 201 bp, Artificial Sequence
  Description of Artificial Sequence: Synthetic probe
atggttttggccagggacatagtgcacgttgtgcatgtgatcccagaggagagtattcagcgatgactataaggtttctaaaacataagtgtagcgtcaaycgggctgatcgtggcgaaattcagtgcgtaatacggggagcgcatgccgattagccagatgtgcatgcgcaaactgaccaagtatatacatggaaaaaca

SEQ ID NO: 10328 - DNA, 201 bp, Artificial Sequence
  Description of Artificial Sequence: Synthetic probe
agaatgctgtcatccttttccaggattatagtatagaaccccttgtagtccagatgtacaaagttggacctggaaaagaattatcaaagtgtaaaatagakatgttaagtgagttgtaaagagatgttaatacatgatattgaggggaaactaaagaattaacaaactgattcagctcacctccagttatacaccataggg

SEQ ID NO: 10329 - DNA, 121 bp, Artificial Sequence
  Description of Artificial Sequence: Synthetic probe
gggtagtcctgatgatggtgagatcgttgtggatggggaaagcattcctgataccaaggarggaagaagagcaacagtaaaaatctagcatggacaagatgaagaaaagaaccagggcaag

SEQ ID NO: 10330 - DNA, 201 bp, Artificial Sequence
  Description of Artificial Sequence: Synthetic probe
tgaatttgtgcattgccattaatttgtttgctagcgataaactgataatataagattgttgatctggtataactgcataagggcatgctggcaaggatcakaagtcccctcatacgaggattagcattagggagatatctatattgacacttagcgcattctgctgctctatttttttaatatggatggttgtgactacac

SEQ ID NO: 10331 - DNA, 201 bp, Artificial Sequence
  Description of Artificial Sequence: Synthetic probe
cttgcatgttctcttcccactcccactcctcccattcccccatttcaactaggatcatactctgcaatcttggaaaaccaacaaaaatctgggatgaaggytgttgatagtcactattgggctgcacaaattcaggtccaacttgcttgattgccgaagcggtcttgaccactaggtactccaaacaagggagttgacaca

SEQ ID NO: 10332 - DNA, 201 bp, Artificial Sequence
  Description of Artificial Sequence: Synthetic probe
atcctcacagttggatgagcaaggtttccttcccggctgaccttaaagatctccatgccattcagaagagcatcagtagccgcagaacctgctgaagactyggaaccgagctgaacccaaagagtctccatctgcggcgagccaacatcaaggaagtcctcatgaaaagccttgttcttccccccagccctcgcaaacaca

SEQ ID NO: 10333 - DNA, 201 bp, Artificial Sequence
  Description of Artificial Sequence: Synthetic probe
gtaggtaaaaaggatttggctttgaacgtgtcgcaggcggtaagcttggtctcctgaagaagggtgatagagggcttaagttcagttagttcagctagaayttctttgcacttggcagaatcatttaggccacggatgttccatgaaccgatgagaaaggatagattaggcatgggtaacgtgtagttcaccttggagggt

SEQ ID NO: 10334 - DNA, 201 bp, Artificial Sequence
  Description of Artificial Sequence: Synthetic probe
gtgcatttttcattggcattcacccatttcatgttaatttttaactcctccgttcaaaacacttcaaatacaaacacttgctcttctagtataaacagcaytatatatggcataattgatgttattaaattcacggtgcaaagtacttgtcagggatatggtttcttaacacaaaatgttacttcactggtttagtacaaa

SEQ ID NO: 10335 - DNA, 201 bp, Artificial Sequence
  Description of Artificial Sequence: Synthetic probe
cgaccgtcgctgctcccccggtcgtaacttggccggtggccatgttggcgagccaggagtcgtctcttctatccccgaggatcacgccctgcccttggaaygtgccagccccgccgcccatcggcatcggcgtgctgtccggtgtggcgtccgtgaacgtcatccccggcatcatagtcggcatctccgtgccaggcatcg

SEQ ID NO: 10336 - DNA, 201 bp, Artificial Sequence
  Description of Artificial Sequence: Synthetic probe
ggcactattgacggccaaggtagtgtgtggtgggacatgtggaagaagggtacattgccattcacaagaccccatctacttgagctcatggactcatcagrtgctattgtctccaatgtggtcttccaggattcgccattctggaacatccatccagtttattgcaggtgaggatagccagatagttctctagaccaaaat

SEQ ID NO: 10337 - DNA, 201 bp, Artificial Sequence
  Description of Artificial Sequence: Synthetic probe
aacaaaacgcgatgtcggcaactcgttgatccaagagaaaaagagggagagttggagagatctgtgtaaatcaacagacatagattaacaagatactaccytcctctcttgacggcgagcttccgtgaaacatgatgacggccggtatatttggaaagctatccataagtcgtttggcataggtaggttatatagtatgtt

SEQ ID NO: 10338 - DNA, 201 bp, Artificial Sequence
  Description of Artificial Sequence: Synthetic probe
gttaaatcgtcttcctttttcatcagaatatttggtgcctttgcgaagaaaacttcctttaatatctgattcctaagttcttttttgcatggcacaaaatkatcatttttaggatgaaatttgaaaggtttccagattgtagcttgcactatttaccaaactagctaaccctacactacttgcatgactgtttcttaattc

SEQ ID NO: 10339 - DNA, 201 bp, Artificial Sequence
  Description of Artificial Sequence: Synthetic probe
ggtgaaagtctctggcgggtctcaggcgaggttgggtttgctagatggatccggtgtctctggtgggtctcccgttgaaggaaagtttttgacgcgaatcytttttactaagatgcagcaaaagcgtgccagattgtagcaaaaacgggataaatgtagaaaaagcagaatgaaaggcatgaaggaaagaatggaccggtg

SEQ ID NO: 10340 - DNA, 201 bp, Artificial Sequence
  Description of Artificial Sequence: Synthetic probe
tttaggaaagctagcagggagcagagtaatggattgaatcctcgccttacacttgactcactacactcaacaaatttctttatcactggttctacatattkacttcatacattcatgatgatattacaaatagaaaactatttaagggtcttttctgtgacttgattacatatctttgctaatttttattgtgaagcttta

SEQ ID NO: 10341 - DNA, 201 bp, Artificial Sequence
  Description of Artificial Sequence: Synthetic probe
gatctgaagttgcaaggataaacttgttgctgtttttcttgctgatcccagacactccgagcttgcgcaagtgggtgagctccttgagctcttctaggaargcctccgtccctgaagcactgacattcacaacaccaagcgtgtgcaatgccgtcaatttcccgatccctggaggaacctcaacaccaaccagttgacgac

SEQ ID NO: 10342 - DNA, 201 bp, Artificial Sequence
  Description of Artificial Sequence: Synthetic probe
taaaagagacggtccacctgtagctactggttccacagaaacttcagcgtcaaagttagaggttcctgtaactcctgtcttggtgacaacttcactcacargagaaactctttctgcaagtcctggaagagttgtagcctcaataacaagggaacctaaccgtccacaatccatttcaacagtagattcattcacaagaga

SEQ ID NO: 10343 - DNA, 201 bp, Artificial Sequence
  Description of Artificial Sequence: Synthetic probe
tatccctagagagagtgaggtgaaacgtgtgggtgtgggtgtgggtgtgggtgtgggtgctagaaaaaagttgccatcattacccaataattcaacgtggrtgctctgccccaagcactcaaacagggaaacaggagccgagccagccagccagcaagacagagagagacatacattgtgagaagggctaggaccagagac

SEQ ID NO: 10344 - DNA, 201 bp, Artificial Sequence
  Description of Artificial Sequence: Synthetic probe
ttgttaacaagaccttcacggttcacgttcctgttggacatcaggcaacacacctcaatctgatagtgagtgggtagcccacgtcaatttgaaagtgagtkacatagttggatatgaactactttaggtaagtaaactagtccgaaagaaattcagtcctgatctgagatgagttcctttgattatgggagcgtgacgacg

SEQ ID NO: 10345 - DNA, 201 bp, Artificial Sequence
  Description of Artificial Sequence: Synthetic probe
tgtaggagtatattcagttttaaggtatttaaggtaaaaatcaacaagctgaatgttaatcaaataaaattgcatgctgatatatttttataccatccagytttgatttacccctatgatattccttgcctttttaagcagatcaaatctagcatgtaattttgatgtttggatggtcctgatacccatactgaggagtat

SEQ ID NO: 10346 - DNA, 201 bp, Artificial Sequence
  Description of Artificial Sequence: Synthetic probe
cagcttgctctttttcgtggtgcgggctgaagcaatgacctgcatgagctgtgtaatttcggcttctttatagcaactgggttgaccttaagtctctacarcttcagacacatgaatcgcgaggataaatacttttgtggtgcgttatacatcttctcctttcttttcttttgctcttccattttctttccactcacccag

SEQ ID NO: 10347 - DNA, 201 bp, Artificial Sequence
  Description of Artificial Sequence: Synthetic probe
ttgtcctgttgccttttgaactattgttaacttgctgttctgaatgcagctaacatatatttcagtgatttgacaacatggtagcatcgcttaatgtttargatatactagcatatgcataaatctgacattttaaatgtgagacatctccaattaatcacagcaaaatgtatgtcaatacagaaaacacagaggcgaata

SEQ ID NO: 10348 - DNA, 201 bp, Artificial Sequence
  Description of Artificial Sequence: Synthetic probe
cctggcgtccatacttaaatttgaagagaggatattttcgttgtggatgtgtggggatgagttagattccgctatgttgtgtataaatagagctcctggayaatctaataatagaagtgaaggattaggtcctagttaggctcaagatcagtagcgcgcatgcatgcatcacaccattggtaaaagataagtgtcagttac

SEQ ID NO: 10349 - DNA, 201 bp, Artificial Sequence
  Description of Artificial Sequence: Synthetic probe
ccactcttgagtagtctcacacttccggggtgtcataacgtgactgattttggaattgctgaattgggacatgcacataagttgagtctttggccattgaktgttgtcgtggggtctctcagcaagctgtgcagggtgttaccaagtcaactcactactccactcgcacttcggacactattatggacttgttgagtgtcg

SEQ ID NO: 10350 - DNA, 201 bp, Artificial Sequence
  Description of Artificial Sequence: Synthetic probe
acgtgttgaagatctggattagctttatgcgttgaaggggagaggtgaagaggaaccatcgttggagcatgcagggttgcagagtatgcttattttggcgygagaaaatctaatcggagaaaattatcaccaactaaaaaatcgtggtgacgtacgtgaaggctggcaaggcatcagcaagaaaatagactagtctggatc

SEQ ID NO: 10351 - DNA, 201 bp, Artificial Sequence
  Description of Artificial Sequence: Synthetic probe
caaaagcggatcaaacggctaaaaacgagcaggatggaagatcggacggttgggaatgcggatcgtgggagagctccctcttgtcccacttttaatatccytaatatgtaatcatattgaataaaattgttcacaattagctgacctatctatagcagttctagaattgaaattcactattgccttcttcagagtttagac

SEQ ID NO: 10352 - DNA, 201 bp, Artificial Sequence
  Description of Artificial Sequence: Synthetic probe
attacaactctccatatggactgaaaattaaggcacaggcaaacatcatctatagttatgtatctacagatttgggtagatgtgttcagcgtttgatatargcaagggccccacagcttttcatctgcaaactcccaggaaagggggacatatccagtgaaactgttgaatctgtgcacccaatgcacccatgctacacct

SEQ ID NO: 10353 - DNA, 201 bp, Artificial Sequence
  Description of Artificial Sequence: Synthetic probe
ctgcgaagtagtgacagacagcagaagcttgagcacattctggaacaatatgtggccacaaaacagaatttgttagcatgaattattggctggagagtgcyggacaagcattaaggtgagactataaacaggtagcggtttccacacagaaaaaaatgcatccgaccgacacgaattggttgagcttgcactaggctaggc

SEQ ID NO: 10354 - DNA, 201 bp, Artificial Sequence
  Description of Artificial Sequence: Synthetic probe
tactaattggcgtgtttcgtagttgagtgagcacacctgaacttgtttccctctctagaatgaacagatggatgagctttctttaggtgataggcttcacracgctgcttgagcagttcgtcttttttcttttataatccatttgagcatatcgctctctagcagcattgcctcttaatttttccggatctgtaggtgttg

SEQ ID NO: 10355 - DNA, 201 bp, Artificial Sequence
  Description of Artificial Sequence: Synthetic probe
acagaacctagcggcgacctcgccccggaactgaggaagaggagcccaagcataccaccatgctggctgcaaaaccaaatcaagggtttaaatctgggagyatcaggataaccgatttgaaggagaaatggggtgaataacaccggggttgcaccaggattcagagccaacattgatcgccctcggcggcggaccggcggt

SEQ ID NO: 10356 - DNA, 201 bp, Artificial Sequence
  Description of Artificial Sequence: Synthetic probe
atttctatgaaattaaaaaacgccactgcaacttttaactttgaaaaaatgccactgcaaatatgtgtatctttggtagatgccattacaccctctttcaragcatatactagtcattatatgtcgtatttctagccatatatacgtacacgtggtgggctccactagaattagcaaaaaacgtatagaatatttgcaacg

SEQ ID NO: 10357 - DNA, 201 bp, Artificial Sequence
  Description of Artificial Sequence: Synthetic probe
cagtgacttggccacatttgcacttggtgctattcaggtgcgtaactagacagatcctttttgtgtgtcttagtagttcgcgttaagttgctgacagcatktatcatcaggttcttgccactggagttacaacctggttagtggacagagctggccgacggatcctacttactgtaagctccttctccctgtgaaaccagt

SEQ ID NO: 10358 - DNA, 201 bp, Artificial Sequence
  Description of Artificial Sequence: Synthetic probe
aggactccattccatcagagatgatcagtagtagctaggctgtcattcctacagtattacaggttagcaacggcagatgagatgctcctgcacatcatacytactacataggctgcggctgcactcgtgctaccatggcaggaaaaggtatatcctgggctatactatggtggttacaaacacaagaggcctccatcatgg

SEQ ID NO: 10359 - DNA, 201 bp, Artificial Sequence
  Description of Artificial Sequence: Synthetic probe
tgcgaacttctttcctgtatttcagcaacaactatggaattttgcacaaaggacaacagctttaccttttgggcgtggtgcgtttactttagctacaactyacactctgttgacagaggtaggagttcatactggtgtgccattatatctgggattgttgatacttgtattttgtccaacattttagcgctcctggcgctc

SEQ ID NO: 10360 - DNA, 201 bp, Artificial Sequence
  Description of Artificial Sequence: Synthetic probe
agtgtgcggcagaagcttgttctagcggtgagaactctccagtgttttatgcagccaatgctggcagtgaacatgagaacgttgaagataacgattctgaragaagtagtatcacttcaaattcgtgtgctggtgataatgaccgggatgagaaccttcaagatgagtcatcctgctctaattttgatggcaaaactgttc

SEQ ID NO: 10361 - DNA, 201 bp, Artificial Sequence
  Description of Artificial Sequence: Synthetic probe
tctgtagtgttttaattactcgggatgttttataactcctttttgagtaattccaattggtactgtttcttatcggcgatgtctatgcggtagaatttttmcaggattttacaaatagtataataccggtagtgaattatttaagttctagctctagtagagatctctacttttggttaatagttttcctagcgccaaatc

SEQ ID NO: 10362 - DNA, 201 bp, Artificial Sequence
  Description of Artificial Sequence: Synthetic probe
aaagtaacaaaggagacagtgtaaataaaccatttaaaaaacatagcaaagcaacgtacaaagccaaccatagatcaatgttgcaacaactatttacctcytcatcaggacgattaccagttacagtaaatacccttctttcaacaacttcccgatactcctgccggattgattctctcaatacctgcatcagagggtaac

SEQ ID NO: 10363 - DNA, 201 bp, Artificial Sequence
  Description of Artificial Sequence: Synthetic probe
gtgagaactgtgagcatctacagttgagtaaaacacaattctaacacggagtgaactgggcaatgattcagcttgacatactctaaaatgaacatcaaacmagccagccaatgctgctactcttgttctatcccggttgatcggcaatgaaacctgtgctctaacttcttggatctcttcaacagttgctgtcaagcaatc

SEQ ID NO: 10364 - DNA, 201 bp, Artificial Sequence
  Description of Artificial Sequence: Synthetic probe
gcagggttagagtgtcacctgaagaagaatgtctgcgtaggtgtttgcctttattgcaccaagcacaggtaatgcgatcccatacagaataagattggacrcctgcattttttttgtcagataagaagatattttttcctttaaaaatccagcaaagaaagaattcaaaagatggccatgcatggattgggtactagtact

SEQ ID NO: 10365 - DNA, 201 bp, Artificial Sequence
  Description of Artificial Sequence: Synthetic probe
cctagggcaccgaccttccgatgccggcctccggcggctcccctgccgacaacttaggtcatcggtgatgagggggtcgttggatccacgtgtgtggatarttttagtctaaagtagattcgtttttaggctgctcatcgtcttggcttcggggacgacgatgacgatgctgaattaattttctccagatttggagatcgg

SEQ ID NO: 10366 - DNA, 201 bp, Artificial Sequence
  Description of Artificial Sequence: Synthetic probe
tgcagtggtcatgggcgatgccactgcctcatttgcctgacgcttcagtcaggccacatggtacacttgggccagcctcaacagagccatgtgtcgtcatytccacctcaccccactccgtgaagtcattcgcatctcttggggtctcggtctagagcaagcaaaggaagtcggataaaccatttagggaggagtcaggat

SEQ ID NO: 10367 - DNA, 201 bp, Artificial Sequence
  Description of Artificial Sequence: Synthetic probe
tctcttttgcaagggtaggacacacttcttggcatcaagtttcaaggatggacggtggtgatgatagttttgctgatattgtccaccactgtggcatgttytatgtcctcacaataaaaggggtacttttttccttggacttctgcggaccacacaaaccaaaaagggaagtcgtcatcgccgaggacgataataagttac

SEQ ID NO: 10368 - DNA, 201 bp, Artificial Sequence
  Description of Artificial Sequence: Synthetic probe
caaactaattaactaaatatattaacattgtaattctgtattatgtaggctaaacaggtttgcccaagacagcaatattctcaagtcaaacaaatagtgcrcaaaattgtaagttccttctatgaaacctccgatatgttcagtaatctacaaacaaaaatgagatttccgattgcatatgaaaagcttgtatcttcttat

SEQ ID NO: 10369 - DNA, 201 bp, Artificial Sequence
  Description of Artificial Sequence: Synthetic probe
ccatgaataagaaactagttaagacaaataacagataaaacgaaagcatttgttttacagaagagacggacaaagaacaaatagtaataaaaaacacttgygctggagacagtacttttaattatgcaaccaaagatcttttcttttaaaaaaaatgtaagaacagctattcccacgctcacacgagacaaagatcacagt

SEQ ID NO: 10370 - DNA, 121 bp, Artificial Sequence
  Description of Artificial Sequence: Synthetic probe
ttttctcctcagttttagctctactagctctagcaagatcatcttttaaaatctgttcggragtcataggttttagaccaattttctttccatcatgcataagagaatagtgattagtttt

SEQ ID NO: 10371 - DNA, 121 bp, Artificial Sequence
  Description of Artificial Sequence: Synthetic probe
atggctctgaatatgatcccccaaatgtttcaagagccatgtgagaaacacttcagctttytattttaaaaaggtaatctaccttttgattgcaagtatgttggcaagataaaagtacctt

SEQ ID NO: 10372 - DNA, 121 bp, Artificial Sequence
  Description of Artificial Sequence: Synthetic probe
agctcctcccttaccatctacattaccacacctctaccaacatcttctcttcaagctccaycactgcgctacagccatcacctccataacacagatgcccaactacttcactactgccggc

SEQ ID NO: 10373 - DNA, 201 bp, Artificial Sequence
  Description of Artificial Sequence: Synthetic probe
atacatggtaaatgcatgtgtacacaaatggtttacttgctaactaaagatggttttccttgggagctatctaccacatttatgcgttgacaattgcggcrtaaatattttcaaatagcaaactcagttgcaataattcatgcggtgaaataccaaagtacaaaatggagcaggagggtaaatataatttaatctgcatct

SEQ ID NO: 10374 - DNA, 121 bp, Artificial Sequence
  Description of Artificial Sequence: Synthetic probe
gatcctacttcatgggccaagctaggttattgagtgcgcaggtacatcttctctctagcgyggccggtctcaccgtacaacatcagcagtagtgagtacaaatgctgctcctcccccttct

SEQ ID NO: 10375 - DNA, 121 bp, Artificial Sequence
  Description of Artificial Sequence: Synthetic probe
acctatagttactgctgaagcctggatactggacagttctgcaagggtagctgccacttcmacgatgctaagctgcatgtctggttgcttcaacattgctttgttttcaatatgctttatt

SEQ ID NO: 10376 - DNA, 201 bp, Artificial Sequence
  Description of Artificial Sequence: Synthetic probe
tgatgatattaatgttctcatgatctctaagaaatctgtaataggatcaggatattgcctaaactggcttggctataatgctgctaatgtggtacatcagrctaatctaaagtggagaactcttcacaatgaatttaaatgctgccaaaatagagataccaaaacacgtagactaattaataagtgccaactattcaaaat

SEQ ID NO: 10377 - DNA, 121 bp, Artificial Sequence
  Description of Artificial Sequence: Synthetic probe
atcacttgcttcatagttctccatgtaataattgggggtcaccttcttcttgccttgtacrcacaagattatcccaccaatgcaatgcatacccatcaaattcagaagatgctaacttaat

SEQ ID NO: 10378 - DNA, 121 bp, Artificial Sequence
  Description of Artificial Sequence: Synthetic probe
gtagtgtgctagcgttccgagctcgcgatttgggaagttgggaagcgaagcgggtgagagrcgcttggatagttggactgggaagccagcgtccgggtgcccctatactccgctcgctgcg

SEQ ID NO: 10379 - DNA, 201 bp, Artificial Sequence
  Description of Artificial Sequence: Synthetic probe
gcaaagtttgaaaaaaggagagggtgaacagggagagacaagatgtttatttcacatggagatagacttcaatatgcatgcaaatgcacagctagactagytaggtctggggaagaatctgttttgaattggagatgatcagcagcctgtgtggtcagtgagtgaatactactccagctagtactgatcagtgtacctcct

SEQ ID NO: 10380 - DNA, 201 bp, Artificial Sequence
  Description of Artificial Sequence: Synthetic probe
gcgccagcaagtggtggggctagccttgaccctactgaggagaagttcttatttggggatgatgaggatagcaactggggagctttgttgaaaggagacarcaaccatggtaattctgttgataatgataactttggtggtgctttgccatcagtgcagagtgggaggtggagtgcccttatgcaagaaacactacagcct

SEQ ID NO: 10381 - DNA, 201 bp, Artificial Sequence
  Description of Artificial Sequence: Synthetic probe
agctaaccttcagggatcacttgagctccatgttgagaagagggaagggcttaaagtggaagagctgagggacatcaatggtctccgtgggttactcaaamtaaaaggtctagaaaatgtttcaagctatgaagaagcctgcaaagctgagttgaataagaaaccatatcttcaatctctgaatctggaatggagctctgc

SEQ ID NO: 10382 - DNA, 201 bp, Artificial Sequence
  Description of Artificial Sequence: Synthetic probe
acgcagcccccaggaaccctagaccccctccacaccttgcgccgtagccccttccttcatctgccttcctgcacatccccggatgccagcgccttagacaygccatggcaccatctccggcctgccgtgtacctacaaggacgagaaggccacgtcgccccgcaccggtcgttgctgtgcactaggaggagacgccatgct

SEQ ID NO: 10383 - DNA, 201 bp, Artificial Sequence
  Description of Artificial Sequence: Synthetic probe
tggatacatcagtcagattaaggattcagtgtaactacagaaggccaacgaattattagcagcaatctaacagaacgggacacatactgcaatagttgttytctgcgcaaggatctttggagactcgtacagtggcctaagcacctcaggcacactccaggcctacagaaaacaataatttagaaattcatgtctccgaag

SEQ ID NO: 10384 - DNA, 201 bp, Artificial Sequence
  Description of Artificial Sequence: Synthetic probe
atcttcgtccatcttcgtccaccgaaaccatcttccctttcatggtcgcctcactcctccaaatcacattcccgtgactgctgtcctcaccaaaatccatytgaaaactgcaagaaacatcaaatcaaaagaaatatcaaccatcttggcgagcagtaaaaaacactacatccaaatttctagatgtggagcacatggtta

SEQ ID NO: 10385 - DNA, 201 bp, Artificial Sequence
  Description of Artificial Sequence: Synthetic probe
tagtagagtaaaggaattcgtcgtgctgaactgtccgtatggccgggtcgtccctgcatgtagtactacatagcctcgggaagggggctctaggtcacttrcaatggcaggagtacaggctgtgagccagctgatccaaggctggctctgcgtctttcttctcgctcgctttgcagtttgcactgccaccacacatgcaaa

SEQ ID NO: 10386 - DNA, 201 bp, Artificial Sequence
  Description of Artificial Sequence: Synthetic probe
ctaactgggagttccagcttacaaggcgattctcattttctggtggcctgatgtctatgttatatggaaataaagcagatagtctgtcatccaactcctcmtcatcatcaaggtccatatccataattcttgagccgaggagcagaactggcccttcaagcttggtcagtagcttttcaaacaaaagatacatttttgggg

SEQ ID NO: 10387 - DNA, 201 bp, Artificial Sequence
  Description of Artificial Sequence: Synthetic probe
tgtccctaatccatttcattctcttccagaatgcctttcagattgcgttcttcttctggatactggtaagcgcgatgctgtatatcaggtcgtttatgaawtgcactcagttaggacgccatgcatggctgaccgtctgatcgcaacattgtttgcctacttccgttgtagatcacatatggattcaattcatgcatcatg

SEQ ID NO: 10388 - DNA, 201 bp, Artificial Sequence
  Description of Artificial Sequence: Synthetic probe
cctttgggtgaccaacagcaagaggaaacgaaatcatgtgccacccggaatcacagctgcgtgcggtggtgtggggtggggtgagaatggttctggaagaraggagactgcggtgtccctgctggaagaagagacggcggccggaaaaagaggcggcggagagggcctccactccatctggaggtcgtctagcattgagaa

SEQ ID NO: 10389 - DNA, 201 bp, Artificial Sequence
  Description of Artificial Sequence: Synthetic probe
tccaacttctcttcctccccaagtccgacctccctaacttattctcctcctatcagcacctccattgcaccattctaactagcttcctgagcaacaatccrtgcggagcagcaatcaagcctcatatggcgcaccttgcaacatgaggtggctacccccacacagagcaacagagtgcggcctcctgccacctaggtgact

SEQ ID NO: 10390 - DNA, 201 bp, Artificial Sequence
  Description of Artificial Sequence: Synthetic probe
tctacatgttcctgctcttgcatcatgcactaaaggctctccgtggccctgcaacaaagtcggcaatccgggttctcgcacggcgtccccatcatgcgacyggccggggaagcaagctgcattcacgccatcccatgactacaccggcaccgaaaaggacttcattgccaccttccgctaccagcaccaccacgacaagct

SEQ ID NO: 10391 - DNA, 201 bp, Artificial Sequence
  Description of Artificial Sequence: Synthetic probe
atgcaacctacggctacaacacaggtactaaaattatctttacatagaatgttaccacatattgttaattggcgacatgttattctgaagaaaagcagggrtgcaacaactgatttgatttgtatcacaggcaacaagacaaggcaaaggcatttgatcctgtctcagtagacaacatagacatagttgatgactgggtag

SEQ ID NO: 10392 - DNA, 201 bp, Artificial Sequence
  Description of Artificial Sequence: Synthetic probe
ctccctccgtgccattgcctccgatacctgaggattttgacaagtgggggaagcactccttgtctcagcgcactagctccatcaacagaaacctgtgcgtraacaatgccagtggatgaactgtgaaaattgttgctgcttaattgccagtagtagagactaaagagtgataatattatctgctttttacaggtacaatgc

SEQ ID NO: 10393 - DNA, 201 bp, Artificial Sequence
  Description of Artificial Sequence: Synthetic probe
aagcctgacatatatgtagattttcatgaaaaatagaaagctacaagtatttttcctgaaagaagcaaccactggaattcagtcacccatagggacaccgrtgaaagtggaattgacttaaaggagtgtccatgttgcataaaatcacttgtgcgccactaaggacaaggtgctatggcatcattttttacacaaagcaca

SEQ ID NO: 10394 - DNA, 201 bp, Artificial Sequence
  Description of Artificial Sequence: Synthetic probe
aacttatgtgaccaattaaatctgaaaaatggtactcatgtgaatggctgaaactgaaaagggaagggagtgccctcttatattttatcagtgtactctarcaatctttagaaaggccatatttggtattgcataatttgacacgatagatactaattgactgtattacatgttgaaaaaaatcatgaaaaggttcaagaa

SEQ ID NO: 10395 - DNA, 121 bp, Artificial Sequence
  Description of Artificial Sequence: Synthetic probe
ttctagttttcactgataaaaaacacgtagagcagagggcaagaagaaaacaatgcatttyatcgctccataagcatagaaatttgtgtgacttcacctatgaaactcttttgtcaactgt

SEQ ID NO: 10396 - DNA, 201 bp, Artificial Sequence
  Description of Artificial Sequence: Synthetic probe
tcagcctgttggtatactatgtcgtcacaccccttttattttcatttatgttggacctgctgaacgaacagttaaccggagtttagtatcatttttaaggmtttgccatgtgtttgttcattatgatttcagtctggcatggcgagcagcttggacacactgtgtgggcaagcctacggagcaaagcagtacaatcttctt

SEQ ID NO: 10397 - DNA, 201 bp, Artificial Sequence
  Description of Artificial Sequence: Synthetic probe
cgtgactgagcaacgatccgtggagttagcatacgagtggtgctgaagtttacatcttattccactgcgtattttcagatcatgtttgagtgtgctaattycccaacatctttgccactattgcggtgggttgttaggtgtagaatacaaaattgcgtcagtcttagcgaagccctgtgcaccgcttaatgattgcatagt

SEQ ID NO: 10398 - DNA, 201 bp, Artificial Sequence
  Description of Artificial Sequence: Synthetic probe
aaaggatattagcatcttacatttgcctcactcctgatagaggatgtaagtgccattgactacagtttaggatgcatttaatgaggacatgaaatggcacrgtactattgtttgaataacatacaatgcaaaatattggcatacatcataggaaggataatgctaagcagttcagttagcagaaacacttcatgctattac

SEQ ID NO: 10399 - DNA, 201 bp, Artificial Sequence
  Description of Artificial Sequence: Synthetic probe
catgcatggccggactctataaattaaggtagggacagtaacccggagacatatgcatggacatgtatttgtttaatgtgtagtatacgctctagttaaamccctcctgacaggcatcagtgcagcaaacactgggatggtttgcaaagcaggaggtacacgtaccatacccccctgaagcttgctcccgcgaccaggagg

SEQ ID NO: 10400 - DNA, 201 bp, Artificial Sequence
  Description of Artificial Sequence: Synthetic probe
tattcggtgccaatcatatatattgtcaaaacggcggatactgctggcgaaatctaagtggaaatagtagactgatccagccaaagaccattcttcaaggracaacctaggcgggagtagttaacttattcagtgaaagaaggtgcatgcttcaaggaactacctaggatgcttgggatgtccatggacgactcatggtgc

SEQ ID NO: 10401 - DNA, 201 bp, Artificial Sequence
  Description of Artificial Sequence: Synthetic probe
ggtcactgcattttcttcagatttccacatacaagataccaattactagtttaacctttattgttttaatgaaaattgcttgcttgtccctgttaatcctrtatttctaactctaaacactgattatctatgtatgtacaactgatgacagataatgcgcttctttacaaatcctaggaagcctatgattctggctgttgc

SEQ ID NO: 10402 - DNA, 201 bp, Artificial Sequence
  Description of Artificial Sequence: Synthetic probe
cagcgactctctcgctgtcttgtttgggtgagacatcaaccatctttgcctggccactgctatcaacatgggtaagccctggctgagcctccccgagtgcrgaagtgggctggactggttgctggggagggactggttgcaggggaggacttgagcccaaaggactggatgaaggagattcaccaaatattgattccattt

SEQ ID NO: 10403 - DNA, 201 bp, Artificial Sequence
  Description of Artificial Sequence: Synthetic probe
ttttttggataaaacaaatgagtaactcaccgaattctgatatggagatccatttgtatactggagctcctccgccatcccctgaatcattcaaatcatcytggctgtcagcaaaccgggatagtgagctactggaagatcctttggagaaacagcgcatggcgcgagaagctttaaccaagtcagacactgcaaggacct

SEQ ID NO: 10404 - DNA, 201 bp, Artificial Sequence
  Description of Artificial Sequence: Synthetic probe
agagcaaaattttggaaatctacaactttacgatttcgctgaaaaatctatcatatttggagtcagttttagcactaaactcggcttgaccataaattgamatggaaactcaaaaggctgacccacttgcagcgctaacgcggcaactccagacagtcggcacggccgttaacggcaggtgtgggacccaccacttgacgc

SEQ ID NO: 10405 - DNA, 201 bp, Artificial Sequence
  Description of Artificial Sequence: Synthetic probe
ttattctatccagagtaactgagcaaatgctgtccagaacctgaagtgcttctttttcatcaagttcctgacaaggggaaatttaagttaatctgaaacasaaaatcaattaacattgctcccacaataatttaattgggaaacatatatcagatcccattagaaaagtatacctctacaatgacgtctgagagtttcttt

SEQ ID NO: 10406 - DNA, 201 bp, Artificial Sequence
  Description of Artificial Sequence: Synthetic probe
acacgtctgccaccttaccgttatcctggacgcagttacactgctggactgggatttgatgaccagacaagggagttcaaggtggtgaggttgatcaatgrctataaccatgaaaaggaggcggttatgtgtgatgtgtacacaccgggagctgattgttggaggccagcggctagagaagtacccttcgggctgttgcag

SEQ ID NO: 10407 - DNA, 201 bp, Artificial Sequence
  Description of Artificial Sequence: Synthetic probe
gctctatttgaacttggacgtatatcaaggctcggcttgcgaaactttaaactaacccccttcattgtggatggaattttggtccctccaaaacctttgtycaaatatcttgggaaaattagaatgagaggaactctaccaggccgttggcaatcattgtcaggatcagaagcgatgcaacccttttcatctaacaaactg

SEQ ID NO: 10408 - DNA, 201 bp, Artificial Sequence
  Description of Artificial Sequence: Synthetic probe
accatataaaatctaacttgttattaacgacatcatttagatgtactctacaagtttagtagaagaccagatccagctgtgtacctttagttcaaacttcyaccgaacatgacccaatcaaaagaatactgtaaaatcatctgaaataatacacataactgtgcaaactggtaatcacgacaccagaacagctaagctcaa

SEQ ID NO: 10409 - DNA, 201 bp, Artificial Sequence
  Description of Artificial Sequence: Synthetic probe
accaacatttacaccacccccacagcaattatatctagagaacacaataacacgtcacccaaaaagttacacagccgcaggcaaagttgctaaagcaacayaaaaccttgcctgtataataaaaataccactgaatttatctaggcctgtttgaagggaagaccaatatactttagttgcacagcaacataaacctaggcc

SEQ ID NO: 10410 - DNA, 201 bp, Artificial Sequence
  Description of Artificial Sequence: Synthetic probe
cttactttcaactccctagcttgctcatttaattccgcgttgcaactgactaggctaaattcttctagcaatggcggaaagccatctttaggaagcgagcrgagtttagtacaatgcccaagtagtattttcctgagagacagaaggcgatgtaacccttgagggagggtttgcagagaataacagtgttggaattccagt

SEQ ID NO: 10411 - DNA, 201 bp, Artificial Sequence
  Description of Artificial Sequence: Synthetic probe
ctccacattccccaacacctctattgccaccgccctggagctctactattgtcgttgttctgcaccatcacgcaacaccgcccgaccacaagctctccatytcccggcctctctccctgcaacacctccccgacagccctgacccttggcgtcttgttccccttgtacgactactatctcggatgcaacctcttctccctc

SEQ ID NO: 10412 - DNA, 201 bp, Artificial Sequence
  Description of Artificial Sequence: Synthetic probe
ttactgataatatgcccaagtattattgttcctcaactgaactgtttagtaacttcaggtctgttaagatccgtccctacgtgttgtacatttatgtttcrcacggtaagtgtattttcctggctatctgagatatgttgttttcctgggactttgtcaactctttgcttttatttgtatactcgctctatctttgtaact

SEQ ID NO: 10413 - DNA, 201 bp, Artificial Sequence
  Description of Artificial Sequence: Synthetic probe
ttcatgcgtttccctgtggaggtctagcagagaatctactgcttgtagttccgcaccactgcatgctttattctatatactagcagaaggacaaatttgcrtggtctgatctatttaatgtgggacctgcatatctgtatttcttaacatgatttgtctcctgtatttaccacagccagtaagactcactgtttgtgccga

SEQ ID NO: 10414 - DNA, 121 bp, Artificial Sequence
  Description of Artificial Sequence: Synthetic probe
tggtgctcgtcggtgcacgcctgaacatgtccagaagcgtccttcttcagtaaccgagccrccctgccaatctctatacatgttcagaacctaatagcccagtttcgttcgtcagctaaca

SEQ ID NO: 10415 - DNA, 201 bp, Artificial Sequence
  Description of Artificial Sequence: Synthetic probe
tattcttgactaaatggaatccacattcttggcttgtttagcacacatctgacagttcataggcctctgttgcccagtatacgtctatatactttagtctyttctgaagtgctggaagaaataccatcattttttgggctccagtgttgtgcgagtagataatctccaatgttcttttgggtacagaggcttgtgttctct

SEQ ID NO: 10416 - DNA, 201 bp, Artificial Sequence
  Description of Artificial Sequence: Synthetic probe
gacgcacgaccggagcctgcgccgggtgaaaaccttgtctttgacacacggccggagccagcagcagcgacatccatggatgtcgtcatcttcttggagasgttgttatggtggcatgatcctctcctcccagtgttcctgccccgagggaaaccattaggttcaattcttctggatcggacaatgatgacactatgcgcc

SEQ ID NO: 10417 - DNA, 201 bp, Artificial Sequence
  Description of Artificial Sequence: Synthetic probe
ctggaatcatcattcggagctggggtggagcatttaatattagtgaggtgtcaaggcttaacaggggtcctccatcttccctcgtccctcaaggtactacraattggccggtgccatggattgacatctctggaatctcgctcgggagagctcctgtccttggagatgcttgtgcttctacaatgctgtaccctgtcatcc

SEQ ID NO: 10418 - DNA, 121 bp, Artificial Sequence
  Description of Artificial Sequence: Synthetic probe
attttgagccgagttacttctcataaataacggccaagtttcaccctttcaatagctgatrtctgttcactctcacttaatgtgaaacttaggcatcacagaaataaaaaaaatggttaaa

SEQ ID NO: 10419 - DNA, 201 bp, Artificial Sequence
  Description of Artificial Sequence: Synthetic probe
agggtcatagcaagatttttaccggcagccgtgcctccccaattcgccgcaggtactaaaagtgggataaacagcgcgaccagccctggccgaccacctayggcgaaggaggccgccaccaccatgacccattgtatcaagacaaattccgatcttttattttgtctagactttaaaactaaataaccgaatgaaatggat

SEQ ID NO: 10420 - DNA, 201 bp, Artificial Sequence
  Description of Artificial Sequence: Synthetic probe
agagccatctgcaatttactgtctccttattaatcaatccttgaaaatagcacccgtgaatcggcagagagagcccaaggatttcacaaacctcttggtgrgcagaccttcggcagcgctccgtctgcctcgcgaggcggattttcttcaacacgtacctgcaaccaaatcacgagcatacagacgacgtcaaccaaagcc

SEQ ID NO: 10421 - DNA, 201 bp, Artificial Sequence
  Description of Artificial Sequence: Synthetic probe
tgacaatgctaattgatcgtcagtatatgcgtggagacaaagctggctcactgccccaaccgcccaactgattcttaacaccttttagtgtggttcaaatytttataaagtgtaatgtaatgtgacgcctctctataagaaaagacaccccgaaagttgtccatgatctgattgcagaattctttgtcagtgttttcaatt

SEQ ID NO: 10422 - DNA, 201 bp, Artificial Sequence
  Description of Artificial Sequence: Synthetic probe
gcaatgttatggcaccaaatttaattcattggagatgcaaatttcagatgagactagcaaagggagtagctcgtaactgcactaaagtgttgttgaaaaaraattctagcttggtatccatttctaaattaccgctccataatttgagacaaataactttacattactgaaatacagaaaagaaatatcatgcaaaacata

SEQ ID NO: 10423 - DNA, 201 bp, Artificial Sequence
  Description of Artificial Sequence: Synthetic probe
tttctggaggcatcggggacaggaggaggaggccctcggagggccccggtgggagctccctgttctcggtgcagcctggagcgcgtgacggcaatggggcrgagtttcttatgagtgataggatgggcaggagcgacaggaacgggcttgcacgtcagcagtcgtcggactggctcgcacagggcgctgatgggcttattg

SEQ ID NO: 10424 - DNA, 201 bp, Artificial Sequence
  Description of Artificial Sequence: Synthetic probe
atggaatataagagtctgcaatagttttgacatagttttgttaaagtattgtcacctagcagttttttgttcttctgggaggtttcaactgtacaattagygtgtattcttttcatggtcatgctctttatttcaattgcagataccgtacattcctggaatatctatgctcaagatcttgaaggatatcaaagtgaagga

SEQ ID NO: 10425 - DNA, 201 bp, Artificial Sequence
  Description of Artificial Sequence: Synthetic probe
attgtccaaatatgttggtgaagcttatccaaaaggtgtgcgtgccgtttattgtaccggcggaaaagatatagaggaaccaggcgctgattttggtttgrcagtagttatttccgctgctagacgcagcccacaaaacttctggtatgttttctgacttgcgtctgttacctctatgttataaggaaattaccttgttta

SEQ ID NO: 10426 - DNA, 201 bp, Artificial Sequence
  Description of Artificial Sequence: Synthetic probe
tggctgtgcaggtgcagattcttttcctttttcaagagagccaaaagtaaggtatccgccaaatttggggcaaagaacacgagatataaagcccctgttgytcatcaccagtcctatgatcggcacctgtttttcctaattcaatattcaaataaaagacaatgtgaactaggaaacctgctaaagcacctgagaaataaa

SEQ ID NO: 10427 - DNA, 201 bp, Artificial Sequence
  Description of Artificial Sequence: Synthetic probe
cccggggtggacggcaacgatggggatttctatttccaacctaagccatgggcttgtgcaccgagagagcactatgggagcgatggggattgggggccatrgggaggaagaggggcctggatccttcggggcgtccaccgctttgaccgcctctcggtgaaaacaaaaggccacagaacgaaccgcgtaaccagtgacctt

SEQ ID NO: 10428 - DNA, 201 bp, Artificial Sequence
  Description of Artificial Sequence: Synthetic probe
accatgctttttcaaggtgctccgagccaccgaccctctcatagtcatgcatcatccctccttccaatcataggtaccattcttctcagagaggcattttkaagagatcatctccccgcgagaaggcaatttccaagatttcttccagtggtcctgattagggtgcagcgagggagctggtcgtgaaggtcctaatagcac

SEQ ID NO: 10429 - DNA, 201 bp, Artificial Sequence
  Description of Artificial Sequence: Synthetic probe
acaatatcaattgataaaaacatgtataattgcattgaagatgaaaagcagtagcaatattgtacatggaaaaacaatttcggcttttttgggcacaagcrtgtaaaataaaaaaattgggtacatcaaatatgacggatcaagaacagaccataaattgtttcacaagcaaataaactattatagaaagaagcacataaa

SEQ ID NO: 10430 - DNA, 201 bp, Artificial Sequence
  Description of Artificial Sequence: Synthetic probe
ctcacacggtcacatgggtcctggtctactaaacagtgtcctagactggtttgaccacaccacttcctgcatcagtccacatacatacccttcaagttctmctttaaatctcatgctctccctccctcttcactctcatccttatgctcttgcagtacacctttcatctttctcctcaaaacatcaacaccaaagcttgtt

SEQ ID NO: 10431 - DNA, 201 bp, Artificial Sequence
  Description of Artificial Sequence: Synthetic probe
acgtggaggcctccacgacaaggctggaagcaaattcagaggcggcacttttggactgctgtttcaaggatgagtatgtggcgttcgctggcgcttcggayggatccataatgaggtaaaattaggctcgtggaatctacataatcgcaactggcatgtgctagatgtaatgaagcccaactgaattctttctgtcatttc

SEQ ID NO: 10432 - DNA, 201 bp, Artificial Sequence
  Description of Artificial Sequence: Synthetic probe
aggcatataacatactattgccattttcttctttggattcatcaagctctgactcagattctgaagatgaagaagacccatcactgcccttcttggatacrtcagagctcacagcagagcccatggacacatcaaagcaatctgattgattttggggctttctttgtgccatcatatcttccgcgttaggctctgtagatg

SEQ ID NO: 10433 - DNA, 201 bp, Artificial Sequence
  Description of Artificial Sequence: Synthetic probe
ggacgaactgccccagcgtcccatcccggtccagatcagggtttttctcatggtcgttcaggtacgtgatggcatcgttcctgaacctgaaaatctcacgratcatgtgccagaagctaggactgagcacattgctcttctgcgccaacagccccgacacgccgctgcggctgccccactcccacctgcggccgtcgccgg

SEQ ID NO: 10434 - DNA, 201 bp, Artificial Sequence
  Description of Artificial Sequence: Synthetic probe
tgtgcactgtcgccttggagtaaattgagatgaagcaagccagattatatcataaataacagcgagagttcacattcaaggtagctacaactgcaagccgyaagatgattgtagaatttcgtttggcaccgccatggtcatggacatgtagtaaaattcagatcagacatgcactgtgtttagggataacaacagaaaaga

SEQ ID NO: 10435 - DNA, 121 bp, Artificial Sequence
  Description of Artificial Sequence: Synthetic probe
ccgtcagtcacctccaggaaccagcagcaactccaccttgtgctctgataccatgttggtyccaggggaaaatttctggatgggctggtcccttggacctccacaccctctaatatatata

SEQ ID NO: 10436 - DNA, 201 bp, Artificial Sequence
  Description of Artificial Sequence: Synthetic probe
tcccttgcaaaagccctagtttacaagaacatgccctgcactttcatataaaatggatcaagggtctatactttgttctgtaacaaagcattcacaattgycccctatcatttctaccatatagaaattaagatatcctctttttattattaacggggaattggtgaatgagcgatggggtcacagtccttccccctccta

SEQ ID NO: 10437 - DNA, 201 bp, Artificial Sequence
  Description of Artificial Sequence: Synthetic probe
ccggacggagcgagtagtaatactcttacccacaaagaagagagttctattgatccaatctgtacagctcaggcgttatttattccgatgttgcgtcttayctttgacaatggtgtgctgtaatgaaaaaacttagttgcagtactttgaataaacaatggcttatcttgttataacaaatcacaagaaaatgaagatagc

SEQ ID NO: 10438 - DNA, 201 bp, Artificial Sequence
  Description of Artificial Sequence: Synthetic probe
gtattcagccgctaccatgtccgaagacatagatgcaggcagattcggctctatcagattcttccattttttgtaaatgggatcagtggaagacgcttggytttacttcaaaggactaatatgatacacatgttctttctttttcccatctgcatgctagagcgccaggtattggcatgtgagatgtggccaagattttct

SEQ ID NO: 10439 - DNA, 201 bp, Artificial Sequence
  Description of Artificial Sequence: Synthetic probe
aataactaaagcagaaagaaagcgcactggaaatacttttctcacatatatgcaacaagctccaccagtgcaactataaaagcatagagtacagaagcctmttacatgaactcctagatcttcaaattgaatgtagcatcagtaatctcaaacacccgttcgttgaagacccatttgcctgagacacatgacagattagtc

SEQ ID NO: 10440 - DNA, 201 bp, Artificial Sequence
  Description of Artificial Sequence: Synthetic probe
ggcggtactacaaccaggggtaataataacaaaggcacaaatagaagtactagtgacagcaaccctaataggagaactacctactttgtcagatccagcartggcaacacaacctaaagcaacacctgtggtggcatcgggtacagtggaggtgacgcttgatgtgccaagacatggagccgtgggggaaacacgaccatg

SEQ ID NO: 10441 - DNA, 201 bp, Artificial Sequence
  Description of Artificial Sequence: Synthetic probe
ttataagcccttctctttcatacaaaaaagtaacttatcctttctttgagatgcaacaccctgtccatttgatgtatctacagtactgctgtgctaaaaamatgttttcatgcttttcaaagaacataattcagatgtctgaaatcagttcgttggatcattctctaacttatataactttcctgtcaggcttgccaagat

SEQ ID NO: 10442 - DNA, 201 bp, Artificial Sequence
  Description of Artificial Sequence: Synthetic probe
tcataatcactggcggaatcgtatccaccatcctcaagagcaatcatcacacgagaggaggcacaatcacgtgaaaagtgaccaagtccaccacatttgcrgcactgaatttggctggacttgcccgtagatgccatggaggatgcaacactcgggactgatcccgtagtagtctttcgtgcagcaaacggaggtggtgta

SEQ ID NO: 10443 - DNA, 201 bp, Artificial Sequence
  Description of Artificial Sequence: Synthetic probe
agctaggggtaccagagcaataaatcatttgtgttacttaattagacaaaatgaacagagttcttgcattgaataaaaaagttgtacacaaatcatcagcraccaagtaatagaaaaagaaaggaacaaaatataacagtagatctttccttttatctactttgtagttgatgagttcttcacaggacattttttctgatt

SEQ ID NO: 10444 - DNA, 201 bp, Artificial Sequence
  Description of Artificial Sequence: Synthetic probe
cttgaaagattttgcgttgcacgttctccagaatctacatacccagatcctgtgaagcctgtgatcttttccagtttggtcccaatacacgagttccaacmgcataaattgtgctagtacgacatgtgcaataactgattagtggttgtctagtagctgttggtgccttcatcttatgtttcctgtcacttctattgccaa

SEQ ID NO: 10445 - DNA, 201 bp, Artificial Sequence
  Description of Artificial Sequence: Synthetic probe
tttgcatctaatttgaagtccattatggtgcatttcatgtattcataaaccaccagcacacaaatgcaagacaaagatgaacttacagtactcaccaagcyattttttgagaagttgtcatggctgtaaataatcttgcaatagaacaggataactagcatcagtggcattcccaatttcggatctgatgctccaagaata

SEQ ID NO: 10446 - DNA, 201 bp, Artificial Sequence
  Description of Artificial Sequence: Synthetic probe
ataactcaagaccatatgtcatatcctgagatgcaaggactgcatacaatgtgtactcaacctctcaaagtgcattttagaccatgctaaaagatttccgrtacttgttttataactatccacatatgctaattacaatgtgactaccattggtatccgcaatgcaaatatccagcactaacattaatattcagatgaact

SEQ ID NO: 10447 - DNA, 201 bp, Artificial Sequence
  Description of Artificial Sequence: Synthetic probe
acggtgagtgatgatgtggatgatgaatttgcagacctctacgaagtgaagtggacttcattgatgataccacctctcacgatcatcatggtcaaccttgktgccattgctgttggcttcagccgcacaatttacagcacaattccgcaatggagcaagcttcttggtggagtgtttttcagcttctgggtgcttgcccat

SEQ ID NO: 10448 - DNA, 201 bp, Artificial Sequence
  Description of Artificial Sequence: Synthetic probe
atacctgaatcaaacaaacattcgttgttgtgtatcaaaacataatagttcacaaatgataaaaacaaagaaaaagctacaagaaagagggagagaggcaratgagctaggattcagggcatttcaggttacaggtgtaaaacgatcaagcaggcgatataaagtagaactttaccggcctagcgagcataaatggacgat

SEQ ID NO: 10449 - DNA, 201 bp, Artificial Sequence
  Description of Artificial Sequence: Synthetic probe
tttggttctgactttcatgaaatgtagaacatgatgatcagtgagtggtgaaaagtatcggtaaaagaagagagcaaagcccacggctatgcaaagttttrtacggcgaacaggtcagcttagtctatctgatggtagatatctgtctgactcaaggaacaagttgcatgacgggtttaatgagaagaagcgaaccaggta

SEQ ID NO: 10450 - DNA, 201 bp, Artificial Sequence
  Description of Artificial Sequence: Synthetic probe
gtacagggaaattctcaccacttgattcagccaaaaaaaagaagacaatgatatcctacagagtaaccgattaatcaactgcacaacccaattatacattrcagacagcgcaggagtgttgagtgacctaccgccaacaccgactcccgtctaatagttgtaaagatataaagttatagcaatccgaaatatcatgattat

SEQ ID NO: 10451 - DNA, 201 bp, Artificial Sequence
  Description of Artificial Sequence: Synthetic probe
atcatcaacaccattcagtgacctttgaaagctctccacctgaatgtttttcggaaatcctcaacgatttgacacaccatatgcatgaaaacatgaagaayttaattcacacataaaacaaatatatctcagtgtgcgaaaggatcattaattagtacttctctccaaaataacaattttagcaattatgatttaaaagat

SEQ ID NO: 10452 - DNA, 201 bp, Artificial Sequence
  Description of Artificial Sequence: Synthetic probe
aatattgttgctaagctcaagttttctctctgctcttcgcatgatgacctgcaccatttcaaataaaaagaaaatctcaggaacaacttaattgaggaagwaatagtaacgggagtcagagttttgacctcttcaattgtgcgctgtgataccaaatttattgataatacatgattcaactgtccaatgcggtgagtacgc

SEQ ID NO: 10453 - DNA, 201 bp, Artificial Sequence
  Description of Artificial Sequence: Synthetic probe
agggcaaatagctagtgacatctcatggcagcagcttatagtgacagatattcacctaaatatcaaaaacatgtgcaatcagctcagtaacaaatcacgaytacctatctatacactgtgttgtgcacctcgtaaattctggagcatattcatgaatggtgttcacaaattgcaacttgcactgtgcagagccagacgcta

SEQ ID NO: 10454 - DNA, 201 bp, Artificial Sequence
  Description of Artificial Sequence: Synthetic probe
tcgtactagcactataaaaccttttttattttttcagatccccaatgtggcgcgcaatctcaggaacaaaagcaacgcgatcatccgtctcattctcatcyaggccttggcggcggcggcggcgggcggcacgaagaagtgctgcgacacgatgcggcgctggatcttgcccgtggctgtctttggcaggtcgtcggcgat

SEQ ID NO: 10455 - DNA, 201 bp, Artificial Sequence
  Description of Artificial Sequence: Synthetic probe
cgcaacgcagcagctgccttttttctttcctttttgagcagcgtatttttatccactagactttcggagatatacggggatttggcgttcacccaatactytccaatcttctaaaatactttccctaaaaatactctatcttaaagaaaagttttcaatctagacaaaaacttgaaggatttgtaggaatatgtcgggatt

SEQ ID NO: 10456 - DNA, 201 bp, Artificial Sequence
  Description of Artificial Sequence: Synthetic probe
tcagtatgaagcgactggttaaattgtcaattatataacggcaacataaagaaataataggcgagtgatttgcttaagcgtgattctccaaatgattcccraaagagttagagaactttattagttctaataactgtaagtgggatactactgcacatgaaaattttgaattaagaatgcagaaggtttaagggaagaggt

SEQ ID NO: 10457 - DNA, 201 bp, Artificial Sequence
  Description of Artificial Sequence: Synthetic probe
tctgcgatccgaggtccagagcctatacctgaccaccaaccaacaaaagatcttgcactttagtggcgctttcgctttccaaataggtgttgctatgcacratatgatcctcccctgacacaacatacggtaggtgtccttggcagagtatatacctgactcctctcatgtccagctgaatttatcctcttcctcctcgtc

SEQ ID NO: 10458 - DNA, 201 bp, Artificial Sequence
  Description of Artificial Sequence: Synthetic probe
agatcttaagtatgcatcatacgatccgatttccaacagaaaaaggcggatgcttgcacaaatctagagctacttgaatgattcatcataggacgctactrtagtactactactaagatactaccagtatgcaccatgccacctatgtgcagctagcagtgtacaaaaatagcatgataacattctgactaaaactccaac

SEQ ID NO: 10459 - DNA, 201 bp, Artificial Sequence
  Description of Artificial Sequence: Synthetic probe
tgcttgtgccagcctggagtacttggaccatataatttctgcaaatggagtggccacagaccctcgtaagactgacgccatggtgaattggcctcagccayctatagtgactgagctgcgaggatttcttggactaacgggctactacaggaagtttgtgcgcaactacgcaacaattgcccggccactgacaaacatgtt

SEQ ID NO: 10460 - DNA, 201 bp, Artificial Sequence
  Description of Artificial Sequence: Synthetic probe
gttttctgcaatgttcaaaagtggttgcacgaatcttgaagtcggattggacgacccatgataagccatagacgtctaacactatatggagtttgttttcygctgatcaaacagctatgcgagccgtattaaagaaaaggatgggtcagctggtgcgactcgttgttgtggccaagaatccactcgtcggtaccgctgagc

SEQ ID NO: 10461 - DNA, 201 bp, Artificial Sequence
  Description of Artificial Sequence: Synthetic probe
gaggcagttttatgcgcccctggtaatgctggtattgctcaatctggagatgcggtctgcatatcggacttggacatctccaatggtgatgctgttatatygttctgccaaaagaggggagtgggaatggtggtagtgggtcctgaagttcctcttgttgcgggtcttgcgaatgaccttgtcaaagctgggatactaacc

SEQ ID NO: 10462 - DNA, 201 bp, Artificial Sequence
  Description of Artificial Sequence: Synthetic probe
gcgcgagcgacgcacttgatgtccgcgcggaggaagcgcggcaatgaacagagaagctctgtcttgcgagcttcagcgaggaggaagaggacagcgactaygatcagttcctacaccaggtaggcttgccgtggactggggcactgacttggtcgtcgggggcaccggtgactgagagcgacatggacgtctctcttggga

SEQ ID NO: 10463 - DNA, 201 bp, Artificial Sequence
  Description of Artificial Sequence: Synthetic probe
ctacagtgatactctgtcctgaaggattgcccaacatatacaccgatatacacaacctataatttgtttactgtattagcacagtccatggtttagagctytcttcaaaatagtatcatgcataatgcttttgacttggtgtaatattttttgtcgtgcatttcagttctcaagacaacatgatttgcgagattacatcta

SEQ ID NO: 10464 - DNA, 201 bp, Artificial Sequence
  Description of Artificial Sequence: Synthetic probe
attcgccacagcgccgcgggcaccgtcccacggagcatgttcttgaacagggccagcttcttcagatggctgagctgactgaactccggcggtatcgtccyggagaggctgttgttctggagctggagctcaaccaagtcccggcatctcccgatttctggtggaattgtcccagaaacggcattgtctgccatggagaac

SEQ ID NO: 10465 - DNA, 121 bp, Artificial Sequence
  Description of Artificial Sequence: Synthetic probe
ataactaaatatggacgtaagaggaatgcaaagcactgttgccagagcagtatacactacytacattaataataatccagatcactcacagtaccaaaagtaggggtgttcttgtgaacta

SEQ ID NO: 10466 - DNA, 201 bp, Artificial Sequence
  Description of Artificial Sequence: Synthetic probe
aatgattggtatgatgatactgggtcctgccagcctgccctgtctgatgaaagtcagtcgcgttcacatttatttccatagcattatttacattggtaaargacagatgattagctctctacagtcattattttgtcatcctcagccaatatcagtgagtcattattttgtcaggatacaagcaatgccactctggaagtt

SEQ ID NO: 10467 - DNA, 121 bp, Artificial Sequence
  Description of Artificial Sequence: Synthetic probe
catcatgtgcattgtgcgctccaagctgagaacagtaatttgatctcctgtagggttatargcgaacaatgatcacgagcaagatacctgctgcaaagagatccatggagcggtttgtgtt

SEQ ID NO: 10468 - DNA, 201 bp, Artificial Sequence
  Description of Artificial Sequence: Synthetic probe
agaacaattcggtgatggcaaagcactgggacaaacaggaagataaccaaacaagcattagaatgtatgagactcaccaggactctctggctgacataaaratcctcaagcttatttgcccagaaggatgcagtttgatcccttagatccattttacttgtactgtccatcttactatcttgaaccaccttaggattttct

SEQ ID NO: 10469 - DNA, 201 bp, Artificial Sequence
  Description of Artificial Sequence: Synthetic probe
actgtagaaaattgtagtaggttaccttcacataagtgttccaaacatcatcttctacagtgatcatattcttctcatcatcccatccaaatccactctgrgaaagcatcttgttgacgatagcataatgtttgtcaaaagtcttgctcctagagatgatattatcctttgtaacctcaagctgacacttctctctcactt

SEQ ID NO: 10470 - DNA, 201 bp, Artificial Sequence
  Description of Artificial Sequence: Synthetic probe
tctgtcctgtcacaactgctctgtgagaagagactggtcggcccttgaactgcttggaatccatagtttgcctcaaagaagcctgccttggcacagattgytcatacccatctgaggggggtccttcagcattcattttctttgaccagccctgagatgccatctcaaaatcaccattggatacagtattttggtcatctg

SEQ ID NO: 10471 - DNA, 201 bp, Artificial Sequence
  Description of Artificial Sequence: Synthetic probe
tagccacatagcatgcaaaacagcaagcactgttgttgcaatggaggtaatataagattgccccacttcacggctacgatatatctgcatgaactgggcgycctcaatgatcttctctctatcaccctaaaaaaggcatcactgaagtcatactcaaacctggaatcacttgcaaaaaacatcataattgacctccacctg

SEQ ID NO: 10472 - DNA, 201 bp, Artificial Sequence
  Description of Artificial Sequence: Synthetic probe
aggtgtcatgttctgtcctttccaactgtctgaagatgaggttgagatgcagtttgccaccaatcatcttggtattgtctcttaactgtcagcaacacttraaacagacgatatcaatgctaaatatcctgatactaacatttgtttcactccttatgttcaatcaggtcactttctactgaccaaccttctcattgataa

SEQ ID NO: 10473 - DNA, 201 bp, Artificial Sequence
  Description of Artificial Sequence: Synthetic probe
gaagaaagcattcttgtggtgaagtagtagccggaggagaataaagaggaagccgcccgctcgcctgcctcatgtacccagatcagttacagtgaaaattkaattagtagatgaccagaagagtcgtgctgagaagatgataggtgcgcatgccatagcccaaacaccatgaaataaaaatgctagacgcattattggaac

SEQ ID NO: 10474 - DNA, 201 bp, Artificial Sequence
  Description of Artificial Sequence: Synthetic probe
tgaaattctgtctccccagccccaagcgagcgctaaccatcaaatgtatagtttttgtggtgacgcagcaggtgatatggggttagagaatgaaaggaaartactgtgatgacaacactgcatatgcatggcatgcccgaacaaattcgcctgttatgccagaactcagcttgtttccgcgtggccaatgatcatattgta

SEQ ID NO: 10475 - DNA, 121 bp, Artificial Sequence
  Description of Artificial Sequence: Synthetic probe
atgcaacttaatatatcttgcatagtgaagttgggtgttgggttatttccctgttctataytagatcaacatccacggttgaaacttgaatgaatgtatctacaatctgtttgaagatggc

SEQ ID NO: 10476 - DNA, 201 bp, Artificial Sequence
  Description of Artificial Sequence: Synthetic probe
attagaggatcccaggttctcccctcctctctctaattttaatggcatctagctcatgcatttcttggatacacatgtatgtgatttttgaaaatggcttrcctccatcgcctcctcgcccagtgagttcctcctccccaacctgacgattcatgcacactgtactgctgccagccagctgtgggcgtggttcaggtaacg

SEQ ID NO: 10477 - DNA, 201 bp, Artificial Sequence
  Description of Artificial Sequence: Synthetic probe
cattgtgtttggctttgaatttatttggtctgtaaacttaatatttattcatttctaaacatttatttgattgtatgtgaactatgccgaatgtttagctrtgttctagtttgatttctagaaaaaaaaagtttactcctctaagtttaggggatcggtagtaaatttactcgtctaagttttactcatcggtttagtcct

SEQ ID NO: 10478 - DNA, 201 bp, Artificial Sequence
  Description of Artificial Sequence: Synthetic probe
gctctcctttttctaacctttgccccataatatttttcctcctttttcttccccctcgctagtattctaccgttcgctccactgccagctttgcccgttgycccgcactctcgcttcacggacgaatgctgcctgtggctggtctgcccagatcctagttgctgccatctgcttgcttcatctgccatcattcttcctcac

SEQ ID NO: 10479 - DNA, 201 bp, Artificial Sequence
  Description of Artificial Sequence: Synthetic probe
cttttgtttgtgtggtccatctccacttaatagcggtacttagatgaatggtggtgttggtgcttctctcattcgtgcgacactataactgactaatgctyttctgatattgccatgtggaagttgttgtttccgctagtacttcttatggattagttatcgggcaaatttttgttggaaacattgttatttatgtggcag

SEQ ID NO: 10480 - DNA, 121 bp, Artificial Sequence
  Description of Artificial Sequence: Synthetic probe
gatcggcggcttccggccatccgaagtcctcaatgtaagtactatatatcatccacactgratatcaacctctctcaacgaaacgtactacgtacacaggttcagttatcatcagaatata

SEQ ID NO: 10481 - DNA, 121 bp, Artificial Sequence
  Description of Artificial Sequence: Synthetic probe
tagtgtacatgcgaagaagagtacaatctaaattacttttactagtacgtgccaaaaagtkatatcaatgatgatttgtagtgtacgttggaggcttcaggttggaggctgctaggaattt

SEQ ID NO: 10482 - DNA, 121 bp, Artificial Sequence
  Description of Artificial Sequence: Synthetic probe
ttcatgtctcaaataataaacacggtgtgactaatctgtgtactcaggtactgatatgctragaacttatgctgatggtctttgtaatatccaaaatcttaatttcattgtactgtaacta

SEQ ID NO: 10483 - DNA, 201 bp, Artificial Sequence
  Description of Artificial Sequence: Synthetic probe
tcattaaaaatcttgttatttctacaaagccataacgaccaaataatggcaagcgttcccacccaaagagttcatatctagaaactctaaaagaaacctcytcttcatttctgcccttcattggtctccacaccatttcggcagagagaaacttcactcttcttctttttctgagcttcactgctattaccaagaggataa

SEQ ID NO: 10484 - DNA, 121 bp, Artificial Sequence
  Description of Artificial Sequence: Synthetic probe
gttcgttttcttaccgcttttcaacttatttgtcatgctatctgcctgggagacaatcttygaaactgagaatcctgcttcctcaaaaattgatgccctctcatggacgagggagctcctg

SEQ ID NO: 10485 - DNA, 201 bp, Artificial Sequence
  Description of Artificial Sequence: Synthetic probe
gccagccagtggccacactttgaggaaagctctcggtccccgtctgtggcttcagattacccactaaccatggggaggtatcccgtgtaatttacacggtrtaaaaaaaaccacgcaataaggactctgccagatgccaatcaggatctcttacaaaataaaattccaggagcacaactcaatcttgaatgaagaagaaaa

SEQ ID NO: 10486 - DNA, 201 bp, Artificial Sequence
  Description of Artificial Sequence: Synthetic probe
tagcagcttgagtagtaacttgtgttgtattccttcagttagcttttgagtggccataaacctgaggctttgttggtctgtctttatgatgagaggatttyctagcagataatgtcgccacttcttcaaagcttccaatattgccagtgcttccttgacataaacagactgtgctgctgctttaggccctaaactcttgct

SEQ ID NO: 10487 - DNA, 201 bp, Artificial Sequence
  Description of Artificial Sequence: Synthetic probe
gatccatacaataacaaaaagagtggcaaaccacaatgctctcacatcacgagaatacagtatgactcttaagtacaacttagtgctaaacaaattcacaytgcttacagcaagttgtgcttgaaaacgctaaacaaaagtgtgcttgaatacgctaaacacaaacatagcaaagttctgataaacgatacggaggatcca

SEQ ID NO: 10488 - DNA, 121 bp, Artificial Sequence
  Description of Artificial Sequence: Synthetic probe
aaagagacggcataatggttatgcactacattcccatcttcttcctcctattcttgacttycttctgcaaatccgatgaccagcttacacatgcaaagccactcacccacagcgatacact

SEQ ID NO: 10489 - DNA, 201 bp, Artificial Sequence
  Description of Artificial Sequence: Synthetic probe
gaaaccccacatatcatcaaatcccatttacatgtaacaaacaatatcccaaaggatggaaactatatccagatcttatcgggaaagtagcaggccgtagratttttttgctgtcacaagtgtgaattgtgcatgtagtttctagcaggtttctaagatgaaaaccaagactttgtactacaacctccaactacacagatg

SEQ ID NO: 10490 - DNA, 201 bp, Artificial Sequence
  Description of Artificial Sequence: Synthetic probe
taaaagaaatctgtgttttgttagtcatattcactctagttctattagcatttcatcagtacacgcacaatctatgctttgcttttagcacaatacacttyccttgacaacttgaataaacttatctgaagtaaaccttttcaaatatgtcaattgaataacacaggtcctcttgtccctatatattttgtgtattccaaa

SEQ ID NO: 10491 - DNA, 201 bp, Artificial Sequence
  Description of Artificial Sequence: Synthetic probe
tctatctttcccaggacgaacgatttgtcataaaaacactgagaaaaagtgaactgaaggtatggctctcaagatagcttatgagagtgtagtttttctgyttatcacgtggatgaatcatcattacatttacaaccaggacaatgaataaaatgagctttaccaaaaataaaactgacttaatatctttgttgagtgata

SEQ ID NO: 10492 - DNA, 201 bp, Artificial Sequence
  Description of Artificial Sequence: Synthetic probe
ctagctccatagtttccatattccatataatggttatttctacaggtaaaagtgtgggtagatttttgtgaccacatgaaacataaaaaggaagccactawtttttgtgtttccgtaatggcgtagatacctcacatgtggagcttgggcaggcaaactgttttgcatctttatgatcataaactacctcgtatggtgcct

SEQ ID NO: 10493 - DNA, 201 bp, Artificial Sequence
  Description of Artificial Sequence: Synthetic probe
ccgagctagggttgaggaggcatggagatggccatggccgttttgtgggtaagaagaggggaaggagaggaatatgcttgctactggttgctttaaggacrgagaggggggaggcacaggctcggcatgggcgatcgctagccagggagggtgatcacgtgcaaggggaaagaagagaaacaggagccggcttggtttgca

SEQ ID NO: 10494 - DNA, 201 bp, Artificial Sequence
  Description of Artificial Sequence: Synthetic probe
aagcaagcaactattttactacaagtaaaaggacctagaagtaccatataatctataacttaggaagacctattgttcaaatcggtacttattcttcttgyttgtttcttctcattgttaagtttagcttcaattatctttattcttccctttcatcgcatgcatcgtgatattttctttttcatgatcttaacttctatg

SEQ ID NO: 10495 - DNA, 201 bp, Artificial Sequence
  Description of Artificial Sequence: Synthetic probe
aacaacaacgccatgcatatcgtcctcgtgcaggagtcgtctaaaggtacctacctgcaatttttatccatcgccaacaacaacgctcatgagctgtttgytttcagggatcataggactcgcagatgtaccctggtttttttccttcctgttgttagtaatgttgcattgagaggcttcttgtgatatctacacacgcat

SEQ ID NO: 10496 - DNA, 201 bp, Artificial Sequence
  Description of Artificial Sequence: Synthetic probe
gtatacctttttctttctcagtagttacttgccaaccactttagaaactagcaacggaccgcacataaggctttgacctacatttttttttgaacaagacyttgacctacataagtctcacctttttgatggtacaattacaaacgctctacatggataggatagtgtaaaactctttccaaattgctgctcaagtacatg

SEQ ID NO: 10497 - DNA, 121 bp, Artificial Sequence
  Description of Artificial Sequence: Synthetic probe
ttgttcatgtcattcttgcagcttggagaaaactttgcggaactactcttgtctaaccacyggtgacagcattatggtggcatataacaacaagaaatactatattgacatagttgaaaca

SEQ ID NO: 10498 - DNA, 201 bp, Artificial Sequence
  Description of Artificial Sequence: Synthetic probe
aaagggttagtttctaagcttgtccaatatagacagtaacgagacattatggcaaatatcgtactagagcttcccattccactgtatcttcctagaaaatytctccacaaatcaagagatttgtgacgcttcagttgaagggattgaaatgtttcttcgtaaattttattgcaaattttaagagtatctctagcaaacacc

SEQ ID NO: 10499 - DNA, 201 bp, Artificial Sequence
  Description of Artificial Sequence: Synthetic probe
cttcttcaacatcagcagactgacggaggattccttctaccttgacacctacaaacagagtgttgttccgctcgttactgaactgcgagatcttaaaatgkcatgcttctgcatggtttctttcaatgtgcaccagtaaaatatgacataaatttaaacttagtgcaaagtcagtctagataatgtactgattaatgataa

SEQ ID NO: 10500 - DNA, 201 bp, Artificial Sequence
  Description of Artificial Sequence: Synthetic probe
ctgcttcggcccaagatactggttcgttgcgccatttactgtttctcgttcttcgtcgctttcccctctctgccgagagaaacagcagagcatgtcccctyccgccatcgtcatcctcgtcatctcacgcctcccgtgtgctccttccccctccccatatacctgcgccacacccagaaccctagccccaattacccctag

SEQ ID NO: 10501 - DNA, 121 bp, Artificial Sequence
  Description of Artificial Sequence: Synthetic probe
tgaccgacgcttcttcagcgaagaacggatcggaacaggaggggaagacgacgacatagtrggggatcagactgacattggcatcagcctgaaccggtggcgtgacaaattcagtgaactg

SEQ ID NO: 10502 - DNA, 201 bp, Artificial Sequence
  Description of Artificial Sequence: Synthetic probe
gtgatctaagggcaagcaccaccaaacatgcagcaagcacacatctaaccgccccaccctacacgccaatagaaccaactaaacatgaagcagggaactawctaccgagcaggcatttgaccaaacacctgaagggcgactgaaaacaataccgtagaccaagaccgatcgcacgagcagacgagatcgtagaagaaggag

SEQ ID NO: 10503 - DNA, 201 bp, Artificial Sequence
  Description of Artificial Sequence: Synthetic probe
aaattccaatacaatggcaagtatacttcctagtctttctgagctcaagctactcgggcatggaaaagagattcatggcttctccttaagaagtggacttkaccagagcaagtttctagggagcgcgttcatagacttctacagtagacaaggattcataaggaagtcagaaactttatttgagctcatgccaaagacaga

SEQ ID NO: 10504 - DNA, 201 bp, Artificial Sequence
  Description of Artificial Sequence: Synthetic probe
tacccaaccacgtagctcatcttcaaaggatttttgcccaagatgtactccatctgacattaagtagtaaatcataaccaggagtccagatgacagtcacyataccaagatattcagatattcaaatgcaagaaatgtacctgagtccttgcaaaactgcgaagaacctcaaccgagtagaaatgggggccacaataccac

SEQ ID NO: 10505 - DNA, 201 bp, Artificial Sequence
  Description of Artificial Sequence: Synthetic probe
gctagtgcggaagtgctaaaacagacaaagttgttgacctccccaacctttgcttcaaaccctaaaattttgggaccatggcatgatttgctggatcttcrtggcagcctataatactgtgtaaaggtcggaaagcaagagaagcactatgagtagattacttgctgcatgaatccctcttgtgagattttaatatagttg

SEQ ID NO: 10506 - DNA, 121 bp, Artificial Sequence
  Description of Artificial Sequence: Synthetic probe
tttgagttcctaagttgctgaccatcaaatccatgtccgctcatgattctgacctccgtgygacttttcaaacgacattcatataatctgttgtaaactagaaataactttcttacatgaa

SEQ ID NO: 10507 - DNA, 201 bp, Artificial Sequence
  Description of Artificial Sequence: Synthetic probe
gaggataccgcctagggatgcgactgagccgtccaagaacacggcgagggcgtcctcacatagtgcgttgtcagcgagggggtcgtctaggccggtgatcytcagggtgagggacgcagagggggaggcatctaggaacgcattgagggcatcgtcgcagagggcgttgtctaggccattgattatcggatgaccccgaag

SEQ ID NO: 10508 - DNA, 201 bp, Artificial Sequence
  Description of Artificial Sequence: Synthetic probe
ttatatagagcagaaagcagctcatggagcatgtcgggattgcttgtgatacagccttgatcaacacttcacgccccacagagcttaattttttctaacaycagcccagtgcaataactcaacaactattcctactagaaacaaaaatgaatcaataatctaagttagcatctctttccttgaactcagttatcccaagtc

SEQ ID NO: 10509 - DNA, 201 bp, Artificial Sequence
  Description of Artificial Sequence: Synthetic probe
tgttttgagaaggaacagctggtaactgaattcttttttcaaatgtcagttaaccgaattcttggacaggggaatggggaatatatttctcggagccaaaygcgcgcgcacgcgaccaacaggtggggtccagtcactcggtggtgcccacctgccataggtagcaagagatacactactccacacgtacaattgctagcc

SEQ ID NO: 10510 - DNA, 201 bp, Artificial Sequence
  Description of Artificial Sequence: Synthetic probe
tcttgctgcctgcctgagacctcaaacgtatgtgtagagcctgtaacacggaatacatgttcagaaatgaaacgtcttgcggttaaaggactgagcaagaytattttgtagtactctatcatggtgcaccgatgccctgtttgcacttaaatttatttgagggagtagaattgtctggccttgagtgtcagtaacagtggt

SEQ ID NO: 10511 - DNA, 201 bp, Artificial Sequence
  Description of Artificial Sequence: Synthetic probe
cagaaggaggcatcatttctcatgatgatcctaaacatctctatactaactcttccagggacaagaaatagaaggccatctaccaaatacaataccattcycttgtagctttgatgacaacaactcattaccaggttatataagtgatgaccatcatactagtaattattttgcaaagataaagtaggagccaacttgtgg

SEQ ID NO: 10512 - DNA, 201 bp, Artificial Sequence
  Description of Artificial Sequence: Synthetic probe
cttctagccatttcccctacaagttgcctttttatttggatatgctatctgagagtccaaacatagcttgtagagggatgtcatattaaagaatgctgcaraacaatctgcgtaccaattgatgaatgcatgttatctacttgcttttccagtttccttgatcgtcattcttctgtgttctaaaaggtagccccatgttgt

SEQ ID NO: 10513 - DNA, 201 bp, Artificial Sequence
  Description of Artificial Sequence: Synthetic probe
tatgatagcgatgcaatgctagcaagatggtccagccaggaacaagctcgctaatatatcacatgccaagaggtcgtggtgtgcgttgttgatatattggmaagccgacgcatgtgcgacgcggatgctggtgcgtgaccaccaggtcgttgggtggcggcaaggggaggaggaagggaaaggcagaagcacaccggagtt

SEQ ID NO: 10514 - DNA, 121 bp, Artificial Sequence
  Description of Artificial Sequence: Synthetic probe
gaccactacaatcaaatttaactaagaaaaaaactgaaacataacccacaagcttcttcargtaattctgacacactaaagtttatttggtaatgaaaataacttacacccacatttctat

SEQ ID NO: 10515 - DNA, 201 bp, Artificial Sequence
  Description of Artificial Sequence: Synthetic probe
atatccaccatcacatccccggtgtgacgtccgcagctcattcagacggtccaggagaatgagtctcacattgttgtcactctgcgatgagagcagctcamagtatgtgttggcagcagcgcgcacagcagtgggcgccgaggagagcgacacaagggcacccgcacactcatacacaacagctgtgctgggagaagagag

SEQ ID NO: 10516 - DNA, 121 bp, Artificial Sequence
  Description of Artificial Sequence: Synthetic probe
tgtgatttcctcattgtacagctccaaaaatgtgaccttgacactgtactcagtattctgyctctccagtgtatcaaatatctgcttaacagctctgggtatgaccccagcatctgaaggt

SEQ ID NO: 10517 - DNA, 121 bp, Artificial Sequence
  Description of Artificial Sequence: Synthetic probe
gttctgccgtatgtttgaaggatgcagagccacataaacatgatccgcatttcatttccgyagcactcactctacgagatcaaccagacgaagccaggggcgctagcacgcggagccaagt

SEQ ID NO: 10518 - DNA, 201 bp, Artificial Sequence
  Description of Artificial Sequence: Synthetic probe
ttgctccaggaaaataaaaaggtgacgagaacacacacccctacgctccctttattccacctccctttacccctaatataggtcaaaatgtccagcatcakcttagatgcattttttaaccccagaacatgtaacagaaccaagtggacctacaataacttatgtagagtcaagatccttggttcataagcaccaaaactt

SEQ ID NO: 10519 - DNA, 201 bp, Artificial Sequence
  Description of Artificial Sequence: Synthetic probe
tcggagccttaagcacatctctgcaagtgaggcaacattgttaatctcttcctccgtcgcttcttcctggacttggacatcaacaatttcttttattggcytcttcttcaactcttcaagaaagtaattggatagactctgctttaaacctgactcgtcactagataaaataggcttctttctgaggagcatctctaacag

SEQ ID NO: 10520 - DNA, 201 bp, Artificial Sequence
  Description of Artificial Sequence: Synthetic probe
cctcaacagcgacgcacgtcgcgaggtcgtcgccgagatggcctccatggccaaagcagcaatcttatgtgtgcaggaaacaaagctagcctccattagcractttgatgcaattggcatcgcagggccttctagacgtgattttgttttcctaccagcttcaggcacgaggggtggcatcgctgttttttgggacgcttc

SEQ ID NO: 10521 - DNA, 201 bp, Artificial Sequence
  Description of Artificial Sequence: Synthetic probe
ttgcaactttgctctttggaatgctagtgtggatatagtttgcccggtcctagtgttcccactggccctttacagagcgtttttctttcttgtagatgatrtttaggctgggtattctgtgcatgattagaagcaaaggacagtatttgagtttggactaatactttaccccaggtgacattgctgctatacggtcactag

SEQ ID NO: 10522 - DNA, 121 bp, Artificial Sequence
  Description of Artificial Sequence: Synthetic probe
atgtataaagcacaagaagacctcataaaggtggcaaagcagtacggagtaaaattgacartgtttcatggaagaggtggaacggttggcagaggaggtggccccagtcatcttgctatat

SEQ ID NO: 10523 - DNA, 201 bp, Artificial Sequence
  Description of Artificial Sequence: Synthetic probe
ctgcacagcacacttatatggactcttcgggtaccaacttgatgaattatccaagtggtggcatgggacttgcataccgtaggcaagcataaactggaagygtgtggtgatcgctcgcaccgcctgattgctcatctccattcgtttgtaaactcgctgccagcatctgtttgtggttaggctacgagcttggagaaatag

SEQ ID NO: 10524 - DNA, 201 bp, Artificial Sequence
  Description of Artificial Sequence: Synthetic probe
cttattagctacttttacacaggaacgacataaaacctgcgcatgcatgtgagccaggtcaactaaactcgcaccctgatcaatgttaagaggatagaacrtgcatatgcatggcttcgctgcaaacgtacggagcaccgacgcattcacaaaaactccagatcatgccacatgcactgaggaacccatacatgtatctgt

SEQ ID NO: 10525 - DNA, 201 bp, Artificial Sequence
  Description of Artificial Sequence: Synthetic probe
tatttaatcctctcctagaggttaacccttgaggttgcaataaaaagtagaccatgagaaaaaagcaggatttagcaaatagtcaccaaccttatcaagtytttgtccttggcttttattaattgtcattgcataggaaagacgaactggatattttcggcattgaagtgtaaagggccacttggtggatcgtgcatttag

SEQ ID NO: 10526 - DNA, 201 bp, Artificial Sequence
  Description of Artificial Sequence: Synthetic probe
aaaaacaacctacatgagacttcaaaatcatatatcacagaaatttccatagagaagagaagaactcaccacacttcattgcttcagcaattgagaccacmgacgcacgcatgagttgatttgtatgccatgatcactggtcttgttatcattaatgtcgtgccaatgtgtaggccttggacagaagctctacctctctgg

SEQ ID NO: 10527 - DNA, 201 bp, Artificial Sequence
  Description of Artificial Sequence: Synthetic probe
aagagaaccgtggcatattggggactcagactgcccaagatcgtactagaagcccattatcagataggactaatctttcagaagttctagctgccccagcrccagaaatcagtgggaaatggaagtgccccagcaaaggcaagccctacgtagcccctccaatgaaacagctgcggttggaacaatggctgcgccgagcga

SEQ ID NO: 10528 - DNA, 201 bp, Artificial Sequence
  Description of Artificial Sequence: Synthetic probe
atgactgctctcccggtgcttctccagttggatatggaacgctgaaacacttgctgatttgccctgctttagtgtcgtatttttggatataactaaccgcyattatctgtggctttcctatttctgttaaccgcttgtttgttcttgggcagtcatgtataaaggttgcacttgactttgtttctccggaaaatgtacaag

SEQ ID NO: 10529 - DNA, 201 bp, Artificial Sequence
  Description of Artificial Sequence: Synthetic probe
agattgcatctggctactacgctggtagctctgcgaatccgccgctccgtacgagggaatgccgaacttccccattttcccactgttggcgttaacctgtyctgttgcgatcttcagctgctgaacctcgtccctcagtctgtcgttcagtgctgcatgcagacaaggaacgggttacaaacttgcaatattgctaacaga

SEQ ID NO: 10530 - DNA, 201 bp, Artificial Sequence
  Description of Artificial Sequence: Synthetic probe
attccagttcaacggaaaatgattttctgcaaaggaatattaaacaaaaacccatgttcaatttactccgcttcataagatcacttgttgctctctgcaargttcagagttcatcaaagttctgaaggcgcgggcgctgctttgtctgggcccgaactgggagcccaacaacactctgtatccacgatagagctcaagccc

SEQ ID NO: 10531 - DNA, 121 bp, Artificial Sequence
  Description of Artificial Sequence: Synthetic probe
ccttccagcatgttggtagaaagaagaaggtcagtgaggttcgggaggaagtcccctattscagatggcaatggaccatgcagcatattcgctgtcaaggccaactgttgcagtgaagaga

SEQ ID NO: 10532 - DNA, 121 bp, Artificial Sequence
  Description of Artificial Sequence: Synthetic probe
acacaccgaggcctacaataacggttgatcctttaagatgttgctgatggagcaaatacaygctactagctgattgactctgaagtgcaaaaatatgttgagacttaagcatccagaggat

SEQ ID NO: 10533 - DNA, 201 bp, Artificial Sequence
  Description of Artificial Sequence: Synthetic probe
tttcaaaaaaattagtggtatggacgcaaataagaaacaagcttgcaaagcaagcacgagaaatgctaatacgaaataaggaaaatgaaatactccctccrtcccaaaataagtgacttggatttgtctagattcgtatgtatctagccttgttttagtgtgagatacatccgaatttacacaaatgcaagtcacttattt

SEQ ID NO: 10534 - DNA, 201 bp, Artificial Sequence
  Description of Artificial Sequence: Synthetic probe
tgcattgtttgagtatttgcccgttcaagcttcttcaccgatcatataatatttcaaaggagctagtcagctgagcccggggccctggcttcgccactggyaccgtggtgatgtcgttggttggtgtggcgagagtctgcccatcggcggcgacatccagagcgagtgtactgtcacagctacgcgaatatgttggacgaa

SEQ ID NO: 10535 - DNA, 201 bp, Artificial Sequence
  Description of Artificial Sequence: Synthetic probe
atatgtagagagtagaagcaacgattgggatacaagtggttagaccaagaatggatcaaagggacattttgcaagacatttgcacattcaccatggaactkatccaacaaccatgataaatagcaggcgtctaaatcaacaaagaatctgagcttttgtaactatctatgaagactacaaagtcataacagcatctctaac

SEQ ID NO: 10536 - DNA, 121 bp, Artificial Sequence
  Description of Artificial Sequence: Synthetic probe
attatcatcacagcaaactctaaggaagttgattgacttccctgttctcagaatcctctgygcaagcaccggagaaatgaaagttggtagcatatcagactgaataaggtatccttcccgc

SEQ ID NO: 10537 - DNA, 121 bp, Artificial Sequence
  Description of Artificial Sequence: Synthetic probe
gaactcgccgaacacatcctccaattctccttcaagcacccagctccggaccatttcaaayagtggtgagcacacccgccgcagcaagcggcccatgaaatcttgaaccatgggatcccca

SEQ ID NO: 10538 - DNA, 201 bp, Artificial Sequence
  Description of Artificial Sequence: Synthetic probe
agctcaatcacaatccttggcagccaaaccctttgtcagacaatcagcaatctgatgccccgtgctcacataatagattttgataataccagcatctagcytctctttaatgaagaatctgtcaatctcaacgtgatttgtcctatcatgttggactggattattttctatgcagattgctgacttgttatcacaccatac

SEQ ID NO: 10539 - DNA, 121 bp, Artificial Sequence
  Description of Artificial Sequence: Synthetic probe
gggcattttggctcatgtcttttacatgtctgcaaagtttcataaataaaaatcgtatttkgtgtcctacaagaaaaaaacagcgctgtatagagcgatttttggggctgaaatttgctta

SEQ ID NO: 10540 - DNA, 121 bp, Artificial Sequence
  Description of Artificial Sequence: Synthetic probe
agaagaaaaactgtcaacttctccaagtatagtgaggtccggagccaagaactatataaaycacagggaacctaattagtcccagatctcatcacagcctctgagtcaggagagaaaattg

SEQ ID NO: 10541 - DNA, 201 bp, Artificial Sequence
  Description of Artificial Sequence: Synthetic probe
ctgaagcagaatatgttgtggactgtggaggaacaactaatagttccaaatccaaatctgaagcagaatctgggcaaaagaaatgttgaagagagtgttcrttgctgttttctccaaccagttgaaactggctgttagtactaaatggtgtatgcattcggttcataattaacactattgagcatgctttcctggtttgac

SEQ ID NO: 10542 - DNA, 121 bp, Artificial Sequence
  Description of Artificial Sequence: Synthetic probe
cctgcattcacgaattcccgacgacattagtccaagaatccaagtaaacgccctttgaatytgtgatcagaggaaaaggcccaccttgtaccgatgatagaagtcgtttgttgtatctggg

SEQ ID NO: 10543 - DNA, 121 bp, Artificial Sequence
  Description of Artificial Sequence: Synthetic probe
aatggtgccggtttcttggaggagcagttggacatccaggatcttgcttcagcaatcaatrgtgacttgagtgcacatgcagagggtgatgttgtagtggaagaagaatcaattgatgctg

SEQ ID NO: 10544 - DNA, 121 bp, Artificial Sequence
  Description of Artificial Sequence: Synthetic probe
gcatcgcccagaatgtcatgcgggcgcgggcaccacgtccggtattggcgctcgttgtttygtcggaggcactctcgcccgggtggtactgtggcaaggacaggtccatgatgctgggctt

SEQ ID NO: 10545 - DNA, 121 bp, Artificial Sequence
  Description of Artificial Sequence: Synthetic probe
aaacagagcagaggaggagaagaaggtggatttttagtccaaattgtatgtaaatgcggtyttcctgtggcgggtggcgagacgacaacaccgagaatgtttgttttgtttatgggcggag

SEQ ID NO: 10546 - DNA, 121 bp, Artificial Sequence
  Description of Artificial Sequence: Synthetic probe
gtccagcgcctcaatcacctcctccgcctacacactgaattttctgaaaccaatcaatagragaaactttcgggaaccggctgaaccggactcgggggtaagtgtcggcgtccggggatct

SEQ ID NO: 10547 - DNA, 121 bp, Artificial Sequence
  Description of Artificial Sequence: Synthetic probe
atgttgtgcataatgtgctccctaatattgtcccagatgacaataactcaaatatgagcgmggaaatcctaggtaaagttttatccctgtacatgaccatgcacttgataaatgagctagt

SEQ ID NO: 10548 - DNA, 121 bp, Artificial Sequence
  Description of Artificial Sequence: Synthetic probe
tcaagcggagaattctagacttcgcagagacctactcatcaaatgaataatgggcgcaccscagaatcatgtgagttgtttttttaagtaatcttttccctaaaatacgtcaatacatctg

SEQ ID NO: 10549 - DNA, 121 bp, Artificial Sequence
  Description of Artificial Sequence: Synthetic probe
ggtgatggtcttcaggtgtaatgccacttcctctgatgatagttgcaacttcttgctcaartctatcattgcactgttgacaccgaagggcctgaggacaggaatttgctgtgaggctgtt

SEQ ID NO: 10550 - DNA, 121 bp, Artificial Sequence
  Description of Artificial Sequence: Synthetic probe
tgccagctaattgagatccaaccaaacactactctgggcttcttattttaataagggcagrgtattaaatacaccctaattaacctcaccttggtatctccaactattatccagaccgtca

SEQ ID NO: 10551 - DNA, 121 bp, Artificial Sequence
  Description of Artificial Sequence: Synthetic probe
ggtgtggcagcccatttgttactggggaaggcagcagcatggcggagaggcgcagaatgtyagccgaggaaagcatgcgcttgctgttgagcagcgagacggcttcaggttccacggaggg

SEQ ID NO: 10552 - DNA, 121 bp, Artificial Sequence
  Description of Artificial Sequence: Synthetic probe
gttgttttatctgcggcgtagatctgaattcagaaaccgtatgtctgttatctgtgcatarcttgccccatcctctttcattcctgcttcccgcgcttctctctcttacatgtgagccgat

SEQ ID NO: 10553 - DNA, 121 bp, Artificial Sequence
  Description of Artificial Sequence: Synthetic probe
agtagcatgtgctggggtagcgccatgtgcataaagtaagggagccacatatgctgcaacsaaacaaagtgaaagatacaactgattagctcttgccatgtctcttaattcaggctagaaa

SEQ ID NO: 10554 - DNA, 121 bp, Artificial Sequence
  Description of Artificial Sequence: Synthetic probe
agctctcagctcctcgtagctaatatcccccgtaatgtcacaaggaccactgagcgtgaaraacaaacgaaattattaagtgcacaataaacatcgtaaaatgcctagaggaactctagag

SEQ ID NO: 10555 - DNA, 121 bp, Artificial Sequence
  Description of Artificial Sequence: Synthetic probe
ctatttttgcctcagctttgcctctatctctcctaggcttatgtcgtgcatagcatgattmagcgctaggcgttttgctgttgcctagcgaagacatccccttctttaaccatggccatgc

SEQ ID NO: 10556 - DNA, 121 bp, Artificial Sequence
  Description of Artificial Sequence: Synthetic probe
ttggaaacaaatggatgttttctaaattatttggattcagttcggcatgcaatttgttggytttttagggtcttcctagagtccatctatgatgtttagcaacacaataggtatatgtttt

SEQ ID NO: 10557 - DNA, 121 bp, Artificial Sequence
  Description of Artificial Sequence: Synthetic probe
acaaactgtaacaacccatcaatgtcttcacattgagaaataaacaatgccagacagaacrgacggaaaatgttgcagtccaatcatgtggacaatgactcacagggcaggttgtgtttat

SEQ ID NO: 10558 - DNA, 121 bp, Artificial Sequence
  Description of Artificial Sequence: Synthetic probe
aggttcttgtacaccccggtctcgtcctacacagaccaagacgtacacgcgagtgcagcargaacgcatcaacgacagtacatgcaaaggaccaagcaagcagatcgggagcaagaagaag

SEQ ID NO: 10559 - DNA, 201 bp, Artificial Sequence
  Description of Artificial Sequence: Synthetic probe
tatgcttgaattactacctgggggtaattaattaaccacgagttgatggctctgcgggacgaccaaattgattcatgatgattgttaaataaggtgcagcyacaaacacgtcacggcctgaagctctgtggcagggtgcagggcacagacgttaactctgttcacagccagtcactgatcacacttgctagttgctaccaa

SEQ ID NO: 10560 - DNA, 121 bp, Artificial Sequence
  Description of Artificial Sequence: Synthetic probe
gaaagttggtcttctaacttgagtcttcctttacaggttggttcggctctgaagaaactaytcaacgagggtctagtcaagcgtgaagacctgttcatcacctctaagctatggtagtttg

SEQ ID NO: 10561 - DNA, 121 bp, Artificial Sequence
  Description of Artificial Sequence: Synthetic probe
tacatatgtgtgtaagcatgggttgctaagttttgtaggcatttgttgctgagtagtgtartatccgttgctgcaaaagctaatagaagaaggcatttgttgcctgaaacttctgtgtgtt

SEQ ID NO: 10562 - DNA, 121 bp, Artificial Sequence
  Description of Artificial Sequence: Synthetic probe
tttacatttggggtctgctactctattccccaaagtgtgctactcaagtctatgtaactcyttttgtaattgttaatgaaatcatgacataattctttttgttgtaacttcttgtcgggaa

SEQ ID NO: 10563 - DNA, 121 bp, Artificial Sequence
  Description of Artificial Sequence: Synthetic probe
gtagttttttggtagagaaagaataactggctcttctcttacaatccgtatgcaacttacmgtatccatgagataatccatcatttttttggcattcatcatgaccacagcatcagcacga

SEQ ID NO: 10564 - DNA, 121 bp, Artificial Sequence
  Description of Artificial Sequence: Synthetic probe
atgatgatatgccttcaggtacgatagtaaaagatgacacaagtggattggaagtgatgaraggggaaactatcattgaggacctgaaaaaggacgccggggaggaagaagtcataccgga

SEQ ID NO: 10565 - DNA, 121 bp, Artificial Sequence
  Description of Artificial Sequence: Synthetic probe
ttctgccctatatatggtcatggtaacatacagtgcatgtcaaccgaaagattgtgcatgraagagtaacatgaagagcacaatgcaatcaaaaacagaccaatggtctttctcccacgaa

SEQ ID NO: 10566 - DNA, 121 bp, Artificial Sequence
  Description of Artificial Sequence: Synthetic probe
gcggtcttgaagcagatgcttgcaagtggcagtgacccagatgtcgtcacttttaacactytgatatctgggttatgccgggaaggccgtctccaagaggctgagcgtctgttgagggagg

SEQ ID NO: 10567 - DNA, 121 bp, Artificial Sequence
  Description of Artificial Sequence: Synthetic probe
ttagctgaatgcaagaaaatctacactcaagccatttgccagtattcaataaccaatacarcaattccagagcaaaaaaatccaaggccaaaaataaatgcgtagtaaagcaaaaaagagt

SEQ ID NO: 10568 - DNA, 121 bp, Artificial Sequence
  Description of Artificial Sequence: Synthetic probe
tcctgaagcaacgtcactacctggggaaatgtccccgtctcacgcaactcctctgaagtcrcatgtttgactgaaaaagcatgacaaagtttatcatacttgattgtatatagacaaagca

SEQ ID NO: 10569 - DNA, 121 bp, Artificial Sequence
  Description of Artificial Sequence: Synthetic probe
agtcatctcatccatgtgtgatgccacatggacggacggatcagatggtggaacaaacaaygaaatccagctgaaatgtcaaatttgaaagaattccataacacgacatgtgttctatcct

SEQ ID NO: 10570 - DNA, 201 bp, Artificial Sequence
  Description of Artificial Sequence: Synthetic probe
acgtgtgtcctcgctggtcggtggccgctgcctcgtggctgaaaggccccatcctcgcagtggcgtgctagtgcagggcaataaaacaggagaacgaatcmcccaaaaatcatcatggtccagcgatctgacgttcacgactcgcctgatccagcgacctgagccgcgccgccttcaccgggggctgaggaagctagactg

SEQ ID NO: 10571 - DNA, 121 bp, Artificial Sequence
  Description of Artificial Sequence: Synthetic probe
ggagtgttagctgatagataaatcgccactgtcatcctaccaaggagttaatagtataaamctaccactttgaagatgcaatttaccaaatggtatcacactacgtttttgggatagaaat

SEQ ID NO: 10572 - DNA, 121 bp, Artificial Sequence
  Description of Artificial Sequence: Synthetic probe
caaatgcagtgaaatacaatgatttgggctacgtgcaaagtgtaggctatgatctacaacrctaacataagttctgcaaagaggatacaaatgcagtgcttgaaaagcagctggagtaact

SEQ ID NO: 10573 - DNA, 121 bp, Artificial Sequence
  Description of Artificial Sequence: Synthetic probe
aatgaaacatggcattgtatataccaatcttgcagcaaaaccatcaagtcatttttcttamtaattaaaaattggctatgttgagtgttgacaaaactggctctagataatgaattacctc

SEQ ID NO: 10574 - DNA, 121 bp, Artificial Sequence
  Description of Artificial Sequence: Synthetic probe
caaacagccccatttctgcttttcgtgcatgcaaaaagaaaaacatgcccaaacgggctgycattcatggcggcctgtatgaggctgggccaaaaattggatgcagcctacgaaacaggcc

SEQ ID NO: 10575 - DNA, 121 bp, Artificial Sequence
  Description of Artificial Sequence: Synthetic probe
tcggctccgcatcgttccaaacaatagaggttaacttccgtggtctgcgtttggagcctamaagtatgaagattttcaaatattttcatccaagtagtattattagtggtcgtatttgaga

SEQ ID NO: 10576 - DNA, 121 bp, Artificial Sequence
  Description of Artificial Sequence: Synthetic probe
attaaatgaagatggtgcccacctatttctcaaatgcaaggaagtcagaagagtatggagyttactggggttggaggatttctgtgatcgcttgagtacgtacagcactgccgaatcagta

SEQ ID NO: 10577 - DNA, 121 bp, Artificial Sequence
  Description of Artificial Sequence: Synthetic probe
ctgcaaggtgaaaatgtgcaagcataacctgacgactgaggtgcgaaatttacaagatgtygcatgaacctccagaaggaaagaagctttatccctcttctgattgcagttgggcaggagc

SEQ ID NO: 10578 - DNA, 121 bp, Artificial Sequence
  Description of Artificial Sequence: Synthetic probe
gacatgggaaagggaggataatgctaactatttccatgtcgtcggatccactgccagatartagacgcatgaaccggtgactcccaaatcaagtagcaacaccagcgaactgtcttgcctg

SEQ ID NO: 10579 - DNA, 121 bp, Artificial Sequence
  Description of Artificial Sequence: Synthetic probe
gctcatcatttaactggttcgtgaatggttgcaacagagatgctggtctgcacattggtartgcagcggtaacagcaggatgagcttgatgttgccgtctgtcatctatccccaggtcaat

SEQ ID NO: 10580 - DNA, 121 bp, Artificial Sequence
  Description of Artificial Sequence: Synthetic probe
gcttctcatctcgcatgcccttcacatggctaatggagggccagtacactgccccgttackgtgcaaaggatctccgtatggttggccgtggacggcgctggccacatgcaccctcgtcca

SEQ ID NO: 10581 - DNA, 121 bp, Artificial Sequence
  Description of Artificial Sequence: Synthetic probe
atgtttttgaaccacatacccacaacagaaactactacgagtactcgcgttacaacagtcrgccatacaggggcagtgaccgaacctcatccaaagaagttcagagagatacagtacatag

SEQ ID NO: 10582 - DNA, 121 bp, Artificial Sequence
  Description of Artificial Sequence: Synthetic probe
gtctgcttcctttgcaactgcttagtgacgatagaggagggaagggctctggcctctggcracgcctccacttgggattgtggccacaactgagaagtgggatctgagtggagcccttgcg

SEQ ID NO: 10583 - DNA, 121 bp, Artificial Sequence
  Description of Artificial Sequence: Synthetic probe
gggcggccggcaatggtggcaagagcatcgggcagaaaatcggcggcgacgggctcaaggyggcgggggagtgggagaggatggggcgctggagaggatggacagggccacagggggtctc

SEQ ID NO: 10584 - DNA, 201 bp, Artificial Sequence
  Description of Artificial Sequence: Synthetic probe
gcttggactcctcccaaatcagagtcatttttcctgctttgcttagactcctcttccccaaccttctgaccttccgcaccactagaaaatcccctgtttcrtctgcatcagtggtgaggctgccgctaagttcttgtgtggagtgtgctccaccaacgatagtgattccttgtagtgttcattcatccaaatcgcctgtgg

SEQ ID NO: 10585 - DNA, 121 bp, Artificial Sequence
  Description of Artificial Sequence: Synthetic probe
ggccaagataattgcaggggaaactgcctcgctgccctccaaaattttgcagcacctcgtmcatgtccaagtgggcgcacgcaacagggaaggccatgcacttgtcagtattggtcttcaa

SEQ ID NO: 10586 - DNA, 121 bp, Artificial Sequence
  Description of Artificial Sequence: Synthetic probe
tgttgctcctcccaagacacacttgactttagttgtcatgatacattattgatactgtacractttgatcaagttagctatataaatgcttcgttttgttatgctttgatcagtactgaat

SEQ ID NO: 10587 - DNA, 201 bp, Artificial Sequence
  Description of Artificial Sequence: Synthetic probe
gcctagttgatttctgttatacctcagggaggaagtcttttgactctgctattgacgactccataagcaccttaacagctacttcgtcaccattttctagygtgccataataaacagtaccgaaacctccttttccaacgattgttttgaagtcgtttgttatgtgcttcagctctgcatacgtgaaccgtctgatgtcaa

SEQ ID NO: 10588 - DNA, 121 bp, Artificial Sequence
  Description of Artificial Sequence: Synthetic probe
caagctaaaggcttagaacatcatgtagtagaatgctacaataggttgcttattttatatyccaggagattatgtagtaaaatgctacaatagcttgcttatttatatttccgaacatgta

SEQ ID NO: 10589 - DNA, 121 bp, Artificial Sequence
  Description of Artificial Sequence: Synthetic probe
taaaagttccagttgaatgcaaacacatcggcgcaatgcatatataacaaaaggtaactayacagaccatgaattcaacacgtgcactggaagaccgtgaggccaggctaggagatcgcca

SEQ ID NO: 10590 - DNA, 121 bp, Artificial Sequence
  Description of Artificial Sequence: Synthetic probe
cagttctgaacttcttaattcctcactcaaatgtatatgtactggatgtcacagaaaaggytaattaatctcagaagcaatagcatacctctgaattgtgtcaatatattcagcagttaat

SEQ ID NO: 10591 - DNA, 121 bp, Artificial Sequence
  Description of Artificial Sequence: Synthetic probe
taggcaacaacattttgaatggataatatactcatttgaccactcccaaaggccagcgatyccaaacgtgctcgttatgacattaagtctagcagtactaccaactattgtgaggctacat

SEQ ID NO: 10592 - DNA, 121 bp, Artificial Sequence
  Description of Artificial Sequence: Synthetic probe
gctagccagcgcgagtaccagaaaactgaagccggtgacgatggcgaatgaggaggccatrgaggcgctggccagagcgagctcgccgaggtgccccacgaacatcacggagatcatctgg

SEQ ID NO: 10593 - DNA, 121 bp, Artificial Sequence
  Description of Artificial Sequence: Synthetic probe
acccccaggccacggatgggaaaaaggaactgctacaacgtttaacttgcttcgtgtgatrcagatctactgaaattgcaaaaccatgatttgggatcaatcaaccctgacacctatgttt

SEQ ID NO: 10594 - DNA, 121 bp, Artificial Sequence
  Description of Artificial Sequence: Synthetic probe
tgcacggaaatcaaccgcctttggataaaatgattcagaataatgattggaaacaaaagtycagaaaaatcaaatggatatctcaaatatatgaatgtttgctggtagatatagcaaatag

SEQ ID NO: 10595 - DNA, 121 bp, Artificial Sequence
  Description of Artificial Sequence: Synthetic probe
accacaatgccttttgcactgcatagtttctccatagcacaagcaactgaggattgggggycggcgaacaaggcgagatgtgcaaggcctcttggaaacggaccactgcgcggaggagaga

SEQ ID NO: 10596 - DNA, 121 bp, Artificial Sequence
  Description of Artificial Sequence: Synthetic probe
cctaataatcagaagctagcatcacgaccgtacgaattgggaaaatacattgcaatttttygccacagctcagatcaagatcatagacaagataaattgattttccaatttgatattcact

SEQ ID NO: 10597 - DNA, 121 bp, Artificial Sequence
  Description of Artificial Sequence: Synthetic probe
agcccgccgggacacagtgggattagcgggatcttagggaatgaaacaattggatccagcrggacccggcaaactaccgcgtcagtacaactccggctgaacggcctagagtctagtagct

SEQ ID NO: 10598 - DNA, 121 bp, Artificial Sequence
  Description of Artificial Sequence: Synthetic probe
tggctggtggtgaccaagggaatggatggatcgtgaccggcggtgctatataaaggctggygggaaaggaggaatggttggtctgagtttcatggccgcttctcccgcgcatacgcatgca

SEQ ID NO: 10599 - DNA, 121 bp, Artificial Sequence
  Description of Artificial Sequence: Synthetic probe
cgtgacaattagctcccgttaatctcgcggaaatacttttacaacctggcagctgattcgygtcaagcatgcagcccctgatgatgaatggccgcattgcctgtactactactatacacag

SEQ ID NO: 10600 - DNA, 121 bp, Artificial Sequence
  Description of Artificial Sequence: Synthetic probe
gcgagtaggagtcacactgctatactttgattccgcctattgatcaatggagccaggaaamgcggagattctctttggagatatcaggcacgctttggcgggcatcatttgagttggatct

SEQ ID NO: 10601 - DNA, 121 bp, Artificial Sequence
  Description of Artificial Sequence: Synthetic probe
gctctcaatgagaagcttgcaaaatcattgcttttagttttggtaatctattttttcttcrtattgtaattgatggctttttctctaatagcctctaaatatcatctttcttatgtcgtac

SEQ ID NO: 10602 - DNA, 121 bp, Artificial Sequence
  Description of Artificial Sequence: Synthetic probe
tgttttctcaggcgccttgatcaaacaaccatctgcctttccttgtggattaaattccttytgaatacatgaataagaaaatagttatgtgacggatcatgagcgttcctctttccctgaa

SEQ ID NO: 10603 - DNA, 121 bp, Artificial Sequence
  Description of Artificial Sequence: Synthetic probe
gtttcttgctcgtcaggttcaagagaatggggatgaattggagaagatataagctgattgygcaacagtatgaccgaccactcatattttctatgagtaactgaattaggagatatatgtg

SEQ ID NO: 10604 - DNA, 121 bp, Artificial Sequence
  Description of Artificial Sequence: Synthetic probe
aatgaaagtaatatgagattcctatcttattatatgattggagtgctgttttgttccttgygtttcagactccatggttggacatgattgtgttgagaatcggatcatttgaccacaacat

SEQ ID NO: 10605 - DNA, 121 bp, Artificial Sequence
  Description of Artificial Sequence: Synthetic probe
gatttatgtgtacaagccgtagtagtgaagaaaatggagggagaagaaagaaagagatgtracacgggaatagatcacatccgagagccggccatgccattagatagatccgctccgagtc

SEQ ID NO: 10606 - DNA, 121 bp, Artificial Sequence
  Description of Artificial Sequence: Synthetic probe
tagattgtttcgtctactgctgtactatataccaagaggacgagcacttccaatgaaaagrccaggaaagcagtcattagccatcaattttgacagagtagatccaacacaccatctgttc

SEQ ID NO: 10607 - DNA, 121 bp, Artificial Sequence
  Description of Artificial Sequence: Synthetic probe
aatgggagaagccaagaaatagccaacttcagcaaaaatccaagatctgacaccatgaaaygcacttaccatcgggatgcccagcgccttgagatcactttcagtcatgtgacgtagggcc

SEQ ID NO: 10608 - DNA, 121 bp, Artificial Sequence
  Description of Artificial Sequence: Synthetic probe
aacggtaaaaagagtagactttgtacactctcctgacgaactggaaattaatggatgatgrctttccaacttaaagactgcccatacggtacaagcatacactcgcactacagaacgcaag

SEQ ID NO: 10609 - DNA, 121 bp, Artificial Sequence
  Description of Artificial Sequence: Synthetic probe
tacgcggatagaagacgaataagtggaggaggggacagcaaagtgcaatgcctctgttttrgttttgttcccgttcaatttcagcacaagataacaacgatcctatttgttgtatgacctc

SEQ ID NO: 10610 - DNA, 201 bp, Artificial Sequence
  Description of Artificial Sequence: Synthetic probe
gtatatcatgcatttagttgagacaatattaactgaaagtaagtgtccgcgacaaactaataaattctaaagctccacagtgaaacggtaaacagctgtarcatctgggccgtggtgattggtttcattcatggtgctgtgccgaatcgtgcaatgagcattgaagttgatccgtttaggtccatggtggtgctgtcatgc

SEQ ID NO: 10611 - DNA, 121 bp, Artificial Sequence
  Description of Artificial Sequence: Synthetic probe
caagccgggcggcgccgacgacggcgaggaggacacgttcgctgagctgtacgaggtgcgstggagcttcctgatggtgcctccggtgaccatcatgatgctaaacgcggtggcgatggct

SEQ ID NO: 10612 - DNA, 121 bp, Artificial Sequence
  Description of Artificial Sequence: Synthetic probe
tccaaacagctggtttcaaataatgcgcaacaggtactgaatcaaaacaatcagtaagtaktggaaaatgaaaaggttcctaggaggactcaccttgaagctgacgccttgcaacacatgc

SEQ ID NO: 10613 - DNA, 121 bp, Artificial Sequence
  Description of Artificial Sequence: Synthetic probe
cgtgcaacaaaacgagaatgaggtggacacttgagctccatgagmgttttgtggaggctctagcaaatctcggaggaccggaaagtagggtgcccctctagttcaatttcagagaagtttg

SEQ ID NO: 10614 - DNA, 121 bp, Artificial Sequence
  Description of Artificial Sequence: Synthetic probe
tacagcaactgtcatactcataccagtggaagctgctccagcaaattataagcataagaaktgctccacaaggagcaatacgataaagggaaactgaacaagggaggaactgatggcacaa

SEQ ID NO: 10615 - DNA, 201 bp, Artificial Sequence
  Description of Artificial Sequence: Synthetic probe
cacacgccgccggattagtgcgcggcacgaccataccgccgcactgcacggcctaccttcacacctcacagtattccttcgcttgaaggtaaatgtattgycatgttcttctaatttgaagattgcaatgttgtaaatttattttgttcaagtttgatcggttttagaattgtagtcatctcgctataattaccaacgtgc

SEQ ID NO: 10616 - DNA, 121 bp, Artificial Sequence
  Description of Artificial Sequence: Synthetic probe
gggcgggcgcggtgtgttaccgcgccaagtttcctagtatctaaaaaagaggagcgtgttmtgttttctgtcaccgatgcactccgttggttttctttcgtccaacttcccattccaccgg

SEQ ID NO: 10617 - DNA, 121 bp, Artificial Sequence
  Description of Artificial Sequence: Synthetic probe
  modified_base (114)..(114): a, c, t, g, unknown or other
tgcaccgtttaatttcccagcgagatgatcttcatttaaatttcaaatttctcagtttacrgtgtctgatctgtgcgatggtgttcaaaactgaaaagggtgtctaatctgtangacggta

SEQ ID NO: 10618 - DNA, 117 bp, Artificial Sequence
  Description of Artificial Sequence: Synthetic probe
gattctgttgtaggcacaggaaaccaacatggacacacttgagcacctcagcyccagggtagtttcttcccaaggagaaatctaccatctctgcaatcgttccttcagcccagtgct

SEQ ID NO: 10619 - DNA, 201 bp, Artificial Sequence
  Description of Artificial Sequence: Synthetic probe
acatggttgatatagcaaaagcacttgccaggcctgcttcatacacaactaagtactttggatgtgagcttggggcacaatcaaaatttgatgagaagacwggaatctccttggttaatggtgcccatgacacttcaaagctggctggtcttcttgagaacttcatcaagaagtatgtccagtgctatggatgtggcaatc

SEQ ID NO: 10620 - DNA, 201 bp, Artificial Sequence
  Description of Artificial Sequence: Synthetic probe
tgatgaggcgttgggtgatcctaattggaaggctgctatggatgaggagttttctgctctcttgcgtaataatacgtggcactttgtttctactagttctrggaggaacatcacagattgtaaatgggtctatacggtcaaacagtttgatggtactattgacaggtacaaggccagacttgttgaaaaggggttcaagta

SEQ ID NO: 10621 - DNA, 121 bp, Artificial Sequence
  Description of Artificial Sequence: Synthetic probe
caacctgagccaagaatccagctcctgagcccctgacagcacctgtctggtcccgtgcgaygaaaccccagcctccagtaccaaattcctcagagaaagccccatcggtgttaattttgat

SEQ ID NO: 10622 - DNA, 121 bp, Artificial Sequence
  Description of Artificial Sequence: Synthetic probe
agctggcgaacaacgtctagttcttcaatctggaagcatcattgaaatgtgagtttgaaaycagcgagaggttctccaaaaaagagagcgtagagagcaaaaatgggtaagtacataaact

SEQ ID NO: 10623 - DNA, 201 bp, Artificial Sequence
  Description of Artificial Sequence: Synthetic probe
ctgaggatctttttgcctgatgtgcgcaacagtgggctactccattgattgatctgcttacatggtatatcttggctcctagaggcttcattagattctgkcagtggatggcttgccttcttatctcccaaagcatatcctggttcctccctcctgcatctgctattgcttttgctaggttgattgagtcagtgaaaaaga

SEQ ID NO: 10624 - DNA, 201 bp, Artificial Sequence
  Description of Artificial Sequence: Synthetic probe
acatcttcttgcaccagagcactggtggacgtgtgattccctatctggcctaactggcaattatcacactttatcacctatacatctaacacagttcactsatctcccgtgatcagatccatgggcacgtacatcgccattgacatggatgggtcctccttaaatcggtcttcttcagcacatttctcagcagtcaaaaac

SEQ ID NO: 10625 - DNA, 201 bp, Artificial Sequence
  Description of Artificial Sequence: Synthetic probe
ccttgctagttcttccggaagctttgtcacggaatggcgtgaatgtgcatgcctgaacctcaagtacttgaggtgcaatagatttcctatgccggcaaggycatcatctttcagctgcccgcactcgtcaaagtccagcacacgcaggacccggaactccgacagagatgggatcttggcattacgcccgaagacatggag

SEQ ID NO: 10626 - DNA, 121 bp, Artificial Sequence
  Description of Artificial Sequence: Synthetic probe
gttcctcggcctctgcatcctcggatgcacacagccaaatttattacttattagcataaartgcaatcattacagttcaaggatctgagagggttgatacacaccaatcatttgaataaaa

SEQ ID NO: 10627 - DNA, 119 bp, Artificial Sequence
  Description of Artificial Sequence: Synthetic probe
gtgtctgagttggtgtgcgttcagataaatccaactctggttgatgtagcgtgaggaactygtggctgtgaacacatggcgatattgtattattgtgggtgcgtggatgaacaggtagg

SEQ ID NO: 10628 - DNA, 121 bp, Artificial Sequence
  Description of Artificial Sequence: Synthetic probe
tttagtttgcgttggaattgtcttcttactctcttgtatccatccaaaaaagtaaagctayagcgtcagagaaaattgctggattaaagttaaaggcaaagagaaactttggataagtaac

SEQ ID NO: 10629 - DNA, 201 bp, Artificial Sequence
  Description of Artificial Sequence: Synthetic probe
ggcgctagtagctgcccagctactagctcgtcagctccttggttttgggggaggtagttgcgcgcgtcgtgaatggggcgagcgagtgtgcgtgcgaggartttataggagaaggggtgaagtaggtggtgggggctcacctattatttggacgtattgagttcagtgcagagctgacagtagtttgtccaaagaagggct

SEQ ID NO: 10630 - DNA, 121 bp, Artificial Sequence
  Description of Artificial Sequence: Synthetic probe
ggttctttcaagagactaggtagatgagatgatagacaaattggcttgtccatcttttcargcatggacctctaaactttggctggtgtcgccagaactgaagaatggctggaacccaaaa

SEQ ID NO: 10631 - DNA, 121 bp, Artificial Sequence
  Description of Artificial Sequence: Synthetic probe
gttatattggttgtacatatggggttgaagatataggacgtgatctctcacggatctcttrtacaagtttttaagatatattttttaatgttttactgcatggtgtactattcacttgcta

SEQ ID NO: 10632 - DNA, 201 bp, Artificial Sequence
  Description of Artificial Sequence: Synthetic probe
atccatgattctatgaagatcaagagtgttatcagatcatcggtaaaataaatccaaatgttagctaagtaattttctgagacatacttgctatattgcartgaaccaagagagctaagtttttcattaattctgaaatatatatccgcacgtgggattgctgcaataagctgtaaaaattaagaaaacaaagtcaagtac

SEQ ID NO: 10633 - DNA, 121 bp, Artificial Sequence
  Description of Artificial Sequence: Synthetic probe
attctggttcatctaacaacttcattagtgataaacttgcgtcacaactacaaggagtgcygcaactacctgaaccagtgagggtgcaagtggccgttggtggagtcctccaaggacattc

SEQ ID NO: 10634 - DNA, 201 bp, Artificial Sequence
  Description of Artificial Sequence: Synthetic probe
ggtgagggattcacgctggattctgaggcggtctcggctagacattgctttcggaggctgaactgatttgttctcctccgctggaggggcataggccgacrcgttggtgtgaatgctcgcgctagcaggttgctggatcaaattactctgctgcacagctgatgtagctgactcgtgcgcaccagacagactgtcttgttg

SEQ ID NO: 10635 - DNA, 121 bp, Artificial Sequence
  Description of Artificial Sequence: Synthetic probe
  modified_base (66)..(66): a, c, t, g, unknown or other
gtcacaagacttgcactagcatgcaccaggaaaagaccaactgataggctgtctatgagcratgtngtagctgagatgaacaagataaaggctcattgtgctgtagaagtaattagggaat

SEQ ID NO: 10636 - DNA, 201 bp, Artificial Sequence
  Description of Artificial Sequence: Synthetic probe
tggctgatgttaatctgcaagagtacttgacaaaggagtatatccatactggtaaggatctttggagattcccactttcccctgaaagatcatcaaagttmtatttacagtgtagttggagtagacattctactgtcattgtacctatagagcatgattttgtaccacaataacactagcacttgaccattattttcagaa

SEQ ID NO: 10637 - DNA, 201 bp, Artificial Sequence
  Description of Artificial Sequence: Synthetic probe
tgtacaatttgcgtttcacgatagagattgaattcatatttacagcgctaactagatatatccctctaatcaagaaagaagattggaagtttgttctgggrtattcaaaggttgtagtaaggtgaatgcatttagatggattaccttgtccatatgatttcataagagtaatacactttctgaccatgtgtctgtaattcc

SEQ ID NO: 10638 - DNA, 121 bp, Artificial Sequence
  Description of Artificial Sequence: Synthetic probe
tgagaaacgtgcagggggatcaaatgccgacaccggctgctctctggatcacatgcacgcrgactgtactaaaatactttaaatatgttcaattcagattacaaaattatgagtagactag

SEQ ID NO: 10639 - DNA, 121 bp, Artificial Sequence
  Description of Artificial Sequence: Synthetic probe
atttcctcggatttctggaagtacaagcgtagcacccagatacctcgcaatgactacagcrtcagcaatctgcaaacaaagggtagtagaaaatcagaagctggttttttgttcagtcaac

SEQ ID NO: 10640 - DNA, 201 bp, Artificial Sequence
  Description of Artificial Sequence: Synthetic probe
aactctgctgcatgctctgcccgcccgcgcggctgtggcttagctagcacaaatgggccagtaccgtgatagctcccaccaaccaaagattatatgggctrggcctggagagattagcagaacatctctctgcgacagtacagtatcattttcatgggcatcttttttttttctaaaatgaaactgcttatttctctcttt

SEQ ID NO: 10641 - DNA, 121 bp, Artificial Sequence
  Description of Artificial Sequence: Synthetic probe
gagtacgatttgtaagatactaagatgtcactgtctgaaattttggctgtattcaacaaawtggggggccttgagcttgaacgcctcttacagattgatagaatctactagcatttttttc

SEQ ID NO: 10642 - DNA, 121 bp, Artificial Sequence
  Description of Artificial Sequence: Synthetic probe
aaatcgcaatctgagagcgtaggatacacagttagtggagagtagcaaactcagcttctaratgactatgaacaaaaaagggaaaacataaaacaaatcgccagaaattatcagcttcagt

SEQ ID NO: 10643 - DNA, 201 bp, Artificial Sequence
  Description of Artificial Sequence: Synthetic probe
taacgatattctgttgtggtatattaacacgcaaccgagccgaggccaaggtatcgttaatcccagaaacttaatatggtatcagagctgctcttccaacytagctgctgaaactcgccgccgccgccgtcgcaagccctcttgccaccgccgccgccgccaagatccaatacaccaaacaaaccgtcgttgtcgcagcct

SEQ ID NO: 10644 - DNA, 201 bp, Artificial Sequence
  Description of Artificial Sequence: Synthetic probe
ctctctctctctctctcactcacatacataaacgcacacacatggatggccagcatttgggcagaattagtggtactgtgtggggaactggggatggacartgtgttgtgattttgaatatagcccctccacagggcagccacacaaagtgctgctctgagagaatggaccagcagtgtgaccacacaaacatgccctagt

SEQ ID NO: 10645 - DNA, 201 bp, Artificial Sequence
  Description of Artificial Sequence: Synthetic probe
ttgaggagagggatagttgcaacacaatgctgtagatgtagacattttggtcttgatccgtggattccgagagatggaattaggcttctgatgacatcccrcgtgggcattgtgtgtacacaagagttgcagagcaaattgacccgattatggcacagtgtgatgcatagctcattcgggataacttgatggttgtagatg

SEQ ID NO: 10646 - DNA, 201 bp, Artificial Sequence
  Description of Artificial Sequence: Synthetic probe
agcttatctgagccaaagtcaaagtagataaactcatcatccaacaagccatccaaacgataactttgcagcagaggcaagcatgcagttgatctagaatsttgaataattaggcatggtatcattactgttttattgaactttgacccactaactatccacttatccagtgagacacaagcaaccatttgcagctacaaa

SEQ ID NO: 10647 - DNA, 121 bp, Artificial Sequence
  Description of Artificial Sequence: Synthetic probe
cagcctgtgaaaacagaggaatggctgctgtgaagccactgaaaaagcgccatatgtctaycttcattactaaccagcaagatcttgaaagaacatcctggaaaatctatctggaccaagt

SEQ ID NO: 10648 - DNA, 201 bp, Artificial Sequence
  Description of Artificial Sequence: Synthetic probe
atgtgaacttcagtttgctactaaccaacatgtatataacagtctgattttgaacatgtatttagacgttgttactctttcttcgggaggtagtatattgrgggcgtggaatcttcctgatggacagatgatctgggaaaccaatatgcagacttccacagaatcaaaatcgttgctgcatgttttggtttgtattggaaa

SEQ ID NO: 10649 - DNA, 201 bp, Artificial Sequence
  Description of Artificial Sequence: Synthetic probe
tcagcacggtacagatcaccacatcggacatcactagttcgtaggaaaattatttaggaaataaagagagagaggtttgattggattcaacccaggtgcarcttcaggttggtgaagaggaggacgtcgtcgctagagtcggtggagagcagcagcttgagggagacagtggacagagcagcaggcagcaggtggcgttgc

SEQ ID NO: 10650 - DNA, 121 bp, Artificial Sequence
  Description of Artificial Sequence: Synthetic probe
agattgttcatttaacttaaggtgatgatgtactatgtgaatcccctttgttgtccgtygtaacctgacagccggatgcattagttggacacataattttgcataaaatgccgtagaaatc

SEQ ID NO: 10651 - DNA, 201 bp, Artificial Sequence
  Description of Artificial Sequence: Synthetic probe
gttaacttgggcaattattagctggtcaagcttgtctgtggacttgggacttgagagacagatggtccatggccagcctcttccatgtggaaatcaggcaktctatctagtctccgagctggtaccgcatgagcattatttactcgtttttttccttaacacgcaccaaaatgcgctgtctttggtggatcatgccaattt

SEQ ID NO: 10652 - DNA, 121 bp, Artificial Sequence
  Description of Artificial Sequence: Synthetic probe
ctagctatttgcagcaacatcgtcgcgtttcgtccatttccggggaaagacgtcgcacagkggctatcaaccccaagttaacagggggacttccagcaggaatttcaaacataaccagcct

SEQ ID NO: 10653 - DNA, 121 bp, Artificial Sequence
  Description of Artificial Sequence: Synthetic probe
aagaaagccatgattttaatgctggattttagtaaagcttttgacattgtttcctgagatrctcttttctctatcatgcgggctagaggttttgatgacagatggatcatgtggatggaag

SEQ ID NO: 10654 - DNA, 201 bp, Artificial Sequence
  Description of Artificial Sequence: Synthetic probe
cacttgacttgtgtagttctgaatcttaagctcagaattattccatgaactgcctgttaattgttacctttgcgaaataatttccaactataattaattcmactcatctattcgtatgattggcaccagtccagttattagcgaaatgcaaaaatagtttggcaagtattggaaggagtcgtacttagcgaattgcatacc

SEQ ID NO: 10655 - DNA, 121 bp, Artificial Sequence
  Description of Artificial Sequence: Synthetic probe
gtgtcaccagcaggttccagagaaacacagttacaaaaacgtgctacaagtcttggacacyccgaatgctgcacagtatgtgatgtccgcctctcacggttttcacccctctgatttgttc

SEQ ID NO: 10656 - DNA, 201 bp, Artificial Sequence
  Description of Artificial Sequence: Synthetic probe
gggtggagataactcacatgttgaccgacgcgatgatggcccggcagctccgtttgtttctgctttctactagggctttctcttcttggcttgggtcgtgrcggcgatctcaaaatagatgagggttcttcggtctcagcttcaagctggatactgaaactattcttcggaccatctgtttatgagtagtacttccaagaa

SEQ ID NO: 10657 - DNA, 201 bp, Artificial Sequence
  Description of Artificial Sequence: Synthetic probe
tctatagaaagtggcaacaaagggatgacaggtgcaggcaagtggaaatacagaaacatgccccaagtacttacaatctcagttgacgccctttggaagaygctactgcttctgggtctgaaaattagtgacggcaaatcagatcaaaataccgcggtatatagtctccttttaggaaacactgaatgaataaaataattg

SEQ ID NO: 10658 - DNA, 201 bp, Artificial Sequence
  Description of Artificial Sequence: Synthetic probe
atggtggatttagactgatggaaaatgctggaaatgctatgggcagcacagaaatttataatcctgatggtgaagttgtgatgtgtaattaccaaggatgyaacaagcgaacccagggaaatacagtgtactgcaaagtccacagcggtgcttcaaaggcatgtatggttgaaggttgtaccaagggtgcacatggaggca

SEQ ID NO: 10659 - DNA, 201 bp, Artificial Sequence
  Description of Artificial Sequence: Synthetic probe
gattttcatgcctgtagcagccacagcttcagtaaagtccaaatcagtaggaagaatgtgagtcctagcattatctggttggatatatattgtttctttakcagcatattgtggccacatttctttgatcgcaggaacaactttctcaatgagatattctctcataactgtcctattcacaataatagttttggtttctag

SEQ ID NO: 10660 - DNA, 121 bp, Artificial Sequence
  Description of Artificial Sequence: Synthetic probe
taactcacgttctaatgtttatacacacacggtccaacattcaacagagatgccacttcayctcaaagactagactagtgagaggaaggaatatcacctttataagttgtgtgtggcctcc

SEQ ID NO: 10661 - DNA, 201 bp, Artificial Sequence
  Description of Artificial Sequence: Synthetic probe
tgcaagcagaaagaaaaatgagaacttacaggggagggcagtccattcggagatacatactgtttagataaaaagctcttctatatccttcctctaagtakatctgagctacggtattgaggattggtgcgttgcgggattacagtattggaatttcactggaatttctcagcgaaaaggggtgagttgacttggacagtg

SEQ ID NO: 10662 - DNA, 119 bp, Artificial Sequence
  Description of Artificial Sequence: Synthetic probe
gaaaatatagtgcaaatacaatataacaaaagcttaaataccatagggaggaactggcatyggtggcccatgaccgggataaccagctggagggtacgttgtagggtgttgcgaatacc

SEQ ID NO: 10663 - DNA, 201 bp, Artificial Sequence
  Description of Artificial Sequence: Synthetic probe
aacacaagacgcaatcgcagaacgtgcgcacaagattggggcaaagatgggtattggtcctgcactcctgcgacctgtgtgcaggttagctcggtgtggtyttcttgttggaaagaacttgttgaggcgaaaaagattccaccctttcatcaagcttcgcactgcaaaatcggcgcataattgatgccatcatatggatcc

SEQ ID NO: 10664 - DNA, 121 bp, Artificial Sequence
  Description of Artificial Sequence: Synthetic probe
ttctcccaggaaatggatactgtattaccgatgacgctcgcgggtttcagtcgttcgtgcraatgcctcccagttgggctactcatctatcttctctctttaccaaccaaaatcagggccc

SEQ ID NO: 10665 - DNA, 201 bp, Artificial Sequence
  Description of Artificial Sequence: Synthetic probe
tccagcatcatacggttccagtccactagacattgggcttgtagtacgaatagattttcttccacagcagtgaacgagatttcccttgctggattccacgmtgcatgcattgagctctttagcgactgcatactgaaggatttggacgtaagtacctttgcagccgctaaccacttaacttcaggccacctcctgatctct

SEQ ID NO: 10666 - DNA, 121 bp, Artificial Sequence
  Description of Artificial Sequence: Synthetic probe
gacacagcccacagtttatcttgagtttgatctttgttcttgggttggctcttcaagttgragcagggtctcaaatttggagtattggtactgaatgaactactgagtgtgtcagctacgc

SEQ ID NO: 10667 - DNA, 121 bp, Artificial Sequence
  Description of Artificial Sequence: Synthetic probe
acgctgaagggcatggctgaggtgaagttgaactgcctgacgctgccgacgccaatgccgyctgctccctcgacagggtgggcgctggcgacgatgtggggagcaaccttgggggccaggt

SEQ ID NO: 10668 - DNA, 121 bp, Artificial Sequence
  Description of Artificial Sequence: Synthetic probe
gaatgccgttgatcttgcaaaggccctcctggagaaatctgaaggcaaggtgaggttgacyggcctaggtgcccgtgacagtctccgtctggaggctgggctttgcctgtatggcaacgac

SEQ ID NO: 10669 - DNA, 121 bp, Artificial Sequence
  Description of Artificial Sequence: Synthetic probe
ccaaggtgatatcaaagctctgcagaagaacttatctgccaaagagctgctatatcagcaycagcacaacaaaagaatgagctgccctgcaatggcacaattgctctcgaataccctgtac

SEQ ID NO: 10670 - DNA, 121 bp, Artificial Sequence
  Description of Artificial Sequence: Synthetic probe
gagcgtgagtgaagaacgtataaagcagaaccttgatgtttatggctggtcaattccagakgacttgtttgcgaagttctctgagattaagcagactaggctgctcatgggcaacttcatc

SEQ ID NO: 10671 - DNA, 121 bp, Artificial Sequence
  Description of Artificial Sequence: Synthetic probe
aaggtccccgaccccgagtccaccgacaaccccgagttcaagatcgtcctcaccatcatcmgggacggcctcaagaccgacgtcaggaggtaccgcaagatgaaggagaggctcgtcggcg

SEQ ID NO: 10672 - DNA, 121 bp, Artificial Sequence
  Description of Artificial Sequence: Synthetic probe
tcttgacacaagacttctccgtgcaatgatcaccaagggtgtgatcgagccaatctctgaygtttttgtcaatctggtcaatgctgacttcactgcaaagcagaggggcattcgcatcagc

SEQ ID NO: 10673 - DNA, 121 bp, Artificial Sequence
  Description of Artificial Sequence: Synthetic probe
tctaagaggcaaggtctcaaagttggaggatcaactgaggaaggccaagaagaaaatgggmgaagaaaacatccaaaaggctgtgaagaccgcgttagatgctgcagaagctgcgctctcg

SEQ ID NO: 10674 - DNA, 121 bp, Artificial Sequence
  Description of Artificial Sequence: Synthetic probe
ttctgtttactttagattcttcgttttagtattggctgcaattatcatttcggtgctctgyaagacatggtattactggagaagtgcactcaaatccctctcctcggggacgacgaatggc

SEQ ID NO: 10675 - DNA, 121 bp, Artificial Sequence
  Description of Artificial Sequence: Synthetic probe
ttgcagctcccttaggtttgccagccttcttcgtgggtttgcttagttcttcttcatcgtygtcatcctcatcctcatcttcttcctcatcatcatcctcgtcatcatcatcctcatcatc

SEQ ID NO: 10676 - DNA, 121 bp, Artificial Sequence
  Description of Artificial Sequence: Synthetic probe
caacaagtcgccaaacgatccgttccctgcagaatggggagttggttcaatatttggtggygagtgcgagaagcgcgggatgcttatcagggtcgctggggatagcatcatgctgtcaccc

SEQ ID NO: 10677 - DNA, 121 bp, Artificial Sequence
  Description of Artificial Sequence: Synthetic probe
caagaaggttctcgaggaagtctccatcctccagtccaagcggctccggaacaaggtggcyggcttcaccacccacctgatgcgccgtatccagcgcggccccgtccgcggcatatcgctc

SEQ ID NO: 10678 - DNA, 121 bp, Artificial Sequence
  Description of Artificial Sequence: Synthetic probe
tgaatccagcgacggtgatgacagctctgaatctgatgatgagagtgatgacgaggaggaygaggaaacgcccaagaagccagagtctggaaagaagagagcagcagggagcgtgttgaag

SEQ ID NO: 10679 - DNA, 121 bp, Artificial Sequence
  Description of Artificial Sequence: Synthetic probe
taacttgcatggtctgtttgggaggcagtcgggtaccactgctggttactcctactccgcygcgaacaagaacaaggctgtggactgggaggagaacactctgtatgactacttgcttaat

SEQ ID NO: 10680 - DNA, 121 bp, Artificial Sequence
  Description of Artificial Sequence: Synthetic probe
ccatgcttggtcaaagggtctgaaaactgggatgtactatttaagaacacgggcagcagcygatgctatcaagtttacagtggataccggttttctgaaggtgaatggggacactgctgcc

SEQ ID NO: 10681 - DNA, 121 bp, Artificial Sequence
  Description of Artificial Sequence: Synthetic probe
atgttgtccaaaacaattcgaggtcgcacgcttgcctgctatcaggtgtgtttattggtamtgtgaaagttctagcgagactttcatttggaattagcgggccaaaagaagtagccatgaa

SEQ ID NO: 10682 - DNA, 121 bp, Artificial Sequence
  Description of Artificial Sequence: Synthetic probe
gtcactatccaaagtaaagcggtgatacattcctgcaggcaaaacaatcatgccccccttyttcactgctacacggatccactgttcgttttcatccctcaaatcaaagtatccactgccc

SEQ ID NO: 10683 - DNA, 121 bp, Artificial Sequence
  Description of Artificial Sequence: Synthetic probe
tcctagctccaaaatcttgacgaaaatttaggacttgctagcaatgttgctggacagccartccaggccttcgtacaatccttcacctgttgtagcacaagtgctctggatgtaccagtgt

SEQ ID NO: 10684 - DNA, 121 bp, Artificial Sequence
  Description of Artificial Sequence: Synthetic probe
acgagactcttgagatattctgcattgctaggccctgtactctgaaccatcttagagaaarcaccttcctcattgctcagaagatgctcaggagtgtcaaattcctcaatctgcccagaac

SEQ ID NO: 10685 - DNA, 121 bp, Artificial Sequence
  Description of Artificial Sequence: Synthetic probe
gccgtggttctaccagcacgcgcagacagcgcttgacaagggcgagttcgtggagtacatycccacgaggcagtactaccatcgccacaccaggtgcctctactgggagggcaagctcatc

SEQ ID NO: 10686 - DNA, 121 bp, Artificial Sequence
  Description of Artificial Sequence: Synthetic probe
acgtcgtctatgcgctcaagcgccagggccgcaccctctacggcttcggcggctagattcyggtgtcctcgtcttcgtcgccgacgcctgcagcagattccgatgtttaaagttctctgtt

SEQ ID NO: 10687 - DNA, 121 bp, Artificial Sequence
  Description of Artificial Sequence: Synthetic probe
gagcgtcgagacctacaagatctacatcttcaaggtgctgaagcaggtgcaccccgacatmggcatctcctccaaggccatgtccatcatgaactccttcatcaacgacatcttcgagaag

SEQ ID NO: 10688 - DNA, 121 bp, Artificial Sequence
  Description of Artificial Sequence: Synthetic probe
aaagcagcagcaagatgctctaccgaagcatgctaatcctgtcctccttgtttctgacatmaagaaaaaggctgaagcggttgacaggttctgcaaaccgattatgaccaagccaaagcca

SEQ ID NO: 10689 - DNA, 121 bp, Artificial Sequence
  Description of Artificial Sequence: Synthetic probe
cggctggatggacaaggccttcaagtgggtgatcaagaagaacgatggcggcatcaccacrgaggcggcgtacccctacacaggcaaaaagggcaagtgccagacgggcaagccggtcgcc

SEQ ID NO: 10690 - DNA, 121 bp, Artificial Sequence
  Description of Artificial Sequence: Synthetic probe
catcaagccccagaccgaccgctgggtcttccccgagaccaagactggcatcattgtcctygccgagggtcgcctgatgaaccttgggtgcgccactggccaccccagcttcgtcatgtcc

SEQ ID NO: 10691 - DNA, 121 bp, Artificial Sequence
  Description of Artificial Sequence: Synthetic probe
gatggatatggagatgatgtcattattcatggccaaagaacgatatgagcatgagtggagmaagatattcatggaagcaggatttactaattacaaaattcagtctaccctaggtctcaga

SEQ ID NO: 10692 - DNA, 121 bp, Artificial Sequence
  Description of Artificial Sequence: Synthetic probe
ccttgctgctgcgaaggtgttcttagcttcaggcaagaaggttaaagttcccacttttctygtccctgcaacacaaaaggtgtggatggatgtatatggcctcaccgtaccaggatcagac

SEQ ID NO: 10693 - DNA, 121 bp, Artificial Sequence
  Description of Artificial Sequence: Synthetic probe
tgctggtcttggcgaatatatttccggtgctattatgtttgaggagactctttatcagtcwactacagatggcaagacatttgttgactgcttgaaggaccagaatatcatgcctggtatc

SEQ ID NO: 10694 - DNA, 121 bp, Artificial Sequence
  Description of Artificial Sequence: Synthetic probe
accgcctgaggcaactactactactactctactgaagttctttgctgcaatcacttatcarcaactgcttaattaaccttttcatgtactaatcaatccatgttatagagcgagcttgttc

SEQ ID NO: 10695 - DNA, 121 bp, Artificial Sequence
  Description of Artificial Sequence: Synthetic probe
cgacttcaagatcaagctcgccagcagctgctacgtctggttcggcgaccactacacctayttcgaccaggagatcagcggcaccatctcctacggcgccatctccaacctctccggcatc

SEQ ID NO: 10696 - DNA, 121 bp, Artificial Sequence
  Description of Artificial Sequence: Synthetic probe
aggccaacgctgccgtctgcgacaaccgtgccgactatatgttctgggacattgtgcatgrcacccaggccatcgctaagaagggcgctgccatcatcttctctgccccagtggaggaggg

SEQ ID NO: 10697 - DNA, 121 bp, Artificial Sequence
  Description of Artificial Sequence: Synthetic probe
gtttctaagccctcatatgtctattttggtcaatctgggacttaagtttgctctactcgtytggttgagtaacctgtgggctttgcatctgcttggcgtaccgcatgatatatgcaagtga

SEQ ID NO: 10698 - DNA, 121 bp, Artificial Sequence
  Description of Artificial Sequence: Synthetic probe
gaaggggactgaagtgttgcagcgatgggctgacacagagaagcctaggaaatttgtgctrcgcgatctggtgctcccaagcgacggtttgttttgccggagctatccttggccgaagtgg

SEQ ID NO: 10699 - DNA, 121 bp, Artificial Sequence
  Description of Artificial Sequence: Synthetic probe
tagcttttcttggcgatgttttcctttgtatctttgcgctggggagaggccgatctacagytggtccttggccttcttgcgccttcctcttacctccagtttggaggcccgctttgcggtc

SEQ ID NO: 10700 - DNA, 121 bp, Artificial Sequence
  Description of Artificial Sequence: Synthetic probe
ggtgaagctaatgttcttgtactcgacagtttcaacattaaatccgatggtggggatggtrgtgacgatctcgccgagcttgagcttgtagaggatggtggtcttaccggcggcatcgaga

SEQ ID NO: 10701 - DNA, 121 bp, Artificial Sequence
  Description of Artificial Sequence: Synthetic probe
agagttcttgagagtgaccagttgtgcatactttatccaaggctatggtttaacggaaacrttgggacctagcacagttggttaccctgatgacatgtccctggttggaactgtcggtgtc

SEQ ID NO: 10702 - DNA, 121 bp, Artificial Sequence
  Description of Artificial Sequence: Synthetic probe
agagaatttccatcctcgtagaaatccacagagatcttctggtcatactcacattctcttytctccaagtaccgcattgcttcttgctctttttctagaccaccattgacacaataagcaa

SEQ ID NO: 10703 - DNA, 121 bp, Artificial Sequence
  Description of Artificial Sequence: Synthetic probe
cttgatggaatcaaacactcagttaagggatatgttccaaaatccagaatttcttcgccakatgacatccccagaggcgttgcagcaattactctcattccagcagacactatcatcacag

SEQ ID NO: 10704 - DNA, 121 bp, Artificial Sequence
  Description of Artificial Sequence: Synthetic probe
gtatttgttggtgtcatattggtggatgggaccctgtatgaattacctgagtttagtaccycaaatgttttattcttgtagcagatgattttgtgtcatctttttgatgagtggaactcat

SEQ ID NO: 10705 - DNA, 121 bp, Artificial Sequence
  Description of Artificial Sequence: Synthetic probe
agtgttccatcttcggacgaccatcctgccggcggaggaggacatgccggctatcatgtcragcttcaagaagttcaacgactcattcatggagcagtaccaagattactccaagctgtga

SEQ ID NO: 10706 - DNA, 121 bp, Artificial Sequence
  Description of Artificial Sequence: Synthetic probe
gggcagtatagtgaatgctacattctattcggcctgtccaaggaatgacctccttactgayggtacctttgcactcgttgagaagctaaatggtaaggattgggttcctgtctatgatgac

SEQ ID NO: 10707 - DNA, 121 bp, Artificial Sequence
  Description of Artificial Sequence: Synthetic probe
cgatgacatgcttggaggggttttcgccttcagtgaagaaggttgaacttactatactggratagataatggaaaacagttgccacaacattcggtgtgcaatattatgtagaaaatggtg

SEQ ID NO: 10708 - DNA, 121 bp, Artificial Sequence
  Description of Artificial Sequence: Synthetic probe
tttaaagcagtatgttgtcgctgatccagagatcaaggaggaggtagttgatggctcactygaattccttatcctcgctagcgatggactgtgggatgttgtcagtaacgatgaagctgtt

SEQ ID NO: 10709 - DNA, 121 bp, Artificial Sequence
  Description of Artificial Sequence: Synthetic probe
aggaagcaaggaaggaagaaggtgaagatggcacaccatgcatatgcatttgtttttgccygcgtccctgcttagggtccagctgtgtaccatgcatttagtcttttatgcttgtaggccg

SEQ ID NO: 10710 - DNA, 121 bp, Artificial Sequence
  Description of Artificial Sequence: Synthetic probe
actggtctccaagttgtacgaagttgtgcctcctatccttactgagttaggcaaggtaaaraacccatggcctaacgttgatgctcacagcggagttttgctcaaccactttggattagtt

SEQ ID NO: 10711 - DNA, 121 bp, Artificial Sequence
  Description of Artificial Sequence: Synthetic probe
gggctggatgttcagcaggtctctcttgtcattaactatgatctcccgaataatcgtgagytgtacatccatcgcattggtcgctctgggcgttttgggcgcaagggtgtggcgatcaact

SEQ ID NO: 10712 - DNA, 121 bp, Artificial Sequence
  Description of Artificial Sequence: Synthetic probe
ttatggtctgcatagatgaatctgcatcttttctgagatatggttatttgtcgcgggatartgtagccaccgcgaggaaagaagttatgacactgtgcagagaagtcaggccccatgcgct

SEQ ID NO: 10713 - DNA, 121 bp, Artificial Sequence
  Description of Artificial Sequence: Synthetic probe
ctacagctctgtcttcccagtacttgcctggctggctgttgtggttgtaactggagatctkaaattctgtttaggttgcccgacttatttacagttgagaaatttgtagatgctgcgcttg

SEQ ID NO: 10714 - DNA, 121 bp, Artificial Sequence
  Description of Artificial Sequence: Synthetic probe
atcgatgccgttcttcccttcgcagccgaacagcaccgagaggcgctcacggttactgggmgtcctgacacggtggatgcacggcggcacccttccgttagtgacgaccgtgaacacctcg

SEQ ID NO: 10715 - DNA, 121 bp, Artificial Sequence
  Description of Artificial Sequence: Synthetic probe
cggtatcgagactgttggaggagtcatgaccaagctgatccccaggaacactgtcatcccmaccaagaagtcacaggttttcaccacctaccaggaccagcagaccaccgtctccatccag

SEQ ID NO: 10716 - DNA, 121 bp, Artificial Sequence
  Description of Artificial Sequence: Synthetic probe
agccgtctggtacaccagcctcgccgtctgcttcaggttatcgtcctcgctgtcctgagcraccttgtcgcggagctccttgatgatggggtgcctggggttgatctcgaggacccgcttg

SEQ ID NO: 10717 - DNA, 201 bp, Artificial Sequence
  Description of Artificial Sequence: Synthetic probe
gagtctgaacaaaataaaggggggagagctggttgacctgtcggtgcaggagctcgtagattgcatgtcggcggatccattccggtcaccatgcacaaccrgttcccctgacaacgccctcgactggatcaaatccaaagagggactgctcaccgcgtccgaatacccgtatgttgccaagagaggaaagtgtgcgacatc

SEQ ID NO: 10718 - DNA, 201 bp, Artificial Sequence
  Description of Artificial Sequence: Synthetic probe
cgatttgctgtgcaagctcacgggtgggagcaaggaccaaggcctggcactcaaccaaaccatagtcaagctgttgcaagattccagagcagaaggtagcygtctttcctgttccagattgtgcttgctgaataacatcaagccccttgcagaaaggaacaatacccctttgctggatggctgaaggcttctcaaaaccat

SEQ ID NO: 10719 - DNA, 201 bp, Artificial Sequence
  Description of Artificial Sequence: Synthetic probe
tgcatcttaccccattgacaccgtccgcagaaggatgatgatgacctctggagaagccgtcaagtacaagagctcattcgatgctttccagcagatcctgragaaggagggtgctaagtccctcttcaagggtgctggtgccaacatcctccgtgccattgctggtgctggtgtgctttctggctatgaccagcttcagat

SEQ ID NO: 10720 - DNA, 201 bp, Artificial Sequence
  Description of Artificial Sequence: Synthetic probe
tacagatgacgcctccctcggggatggcgcgcaccgggaggacgttgccgacggagagcgtggcgcggcgtccgcagtagacgaattgtccggtgtacatkccctcggcggcgacgaagagctccttctggtgcttgtacctgaacgggtggcggaaggtcaccttggccaacggcgcgccacgccccgggtcgtggatga

SEQ ID NO: 10721 - DNA, 201 bp, Artificial Sequence
  Description of Artificial Sequence: Synthetic probe
ccggcttcggaggacagaagcaaattagcagcagcccgcctcgccaaatcccaattcagagagcttgaggtgtgcctcagcatagtcagcaaagaaagcaycctcatccgcggcatatttgtccacaagggggcggaaggccgggtcagtcaggaggaccttgtcggttggcaactgaagaaggccttccttctcacccgt

SEQ ID NO: 10722 - DNA, 201 bp, Artificial Sequence
  Description of Artificial Sequence: Synthetic probe
ggagagagtattaacgacaaggatcgctgcccaggctgcaagggtgagaaggttcttcaggagaagaaggttctggaggttcatgttgagaaggggatgcracacaaccagaagatcaccttccctggagaagctgatgaagcgcctgatactgttactggagacattgtattcgtcgtccagcagaaggaacacccgaag

SEQ ID NO: 10723 - DNA, 201 bp, Artificial Sequence
  Description of Artificial Sequence: Synthetic probe
ttcttggggtaaagtcgcatacagacgcgacgattgtcaccgttctcatggtcgacaacaacgtcagtggactgcaggttcaaaaagatgatgtctggtaygacgtcccttgtccgactgacccccacgcattgctcatcttcgtgggagacaataccgaggtgatcagcaacggggctttcaaggcctcggtgcaccgcg

SEQ ID NO: 10724 - DNA, 201 bp, Artificial Sequence
  Description of Artificial Sequence: Synthetic probe
ctttatcggtctcagcatcaaccaccagtttcatcacagacttctcctgtcgtttggatatgctgttcttcattggattgaaacttgatgtgtagacaagratgtcattcttggcttcctccagagcctcttgttcgctgagacccacaacagatagtggcggaatgcagaacacagcacaaggtacatctttgtgatcag

SEQ ID NO: 10725 - DNA, 201 bp, Artificial Sequence
  Description of Artificial Sequence: Synthetic probe
ctcacgtgattgggctgccaaggggccgatgcttctcggtgtgaaagcagtgatttccaagagctttgagcggatccacagaagcaacttggtgggaatgrgaatcatcccgctctgcttcaaagctggggaagatgctgattcacttggccttactggacatgagcggttcaccattaacctgcctaccgaagtcagtga

SEQ ID NO: 10726 - DNA, 201 bp, Artificial Sequence
  Description of Artificial Sequence: Synthetic probe
tgatcactcaaggtgctgatccagtagttgtggctgaggatgggaaggtgaaaacattccctgtgatcctattgcccaaggagaagcttgttgacactaayggtgcaggtgatgcttttgttggaggcttcctatctcagttggttcaagggaagagcattgaggacagcgtaaagggaggttgctacggagcaaatgtta

SEQ ID NO: 10727 - DNA, 201 bp, Artificial Sequence
  Description of Artificial Sequence: Synthetic probe
tgctgatgataagggagatcaactgaaggatgatgatgatgctcagctattacagcaggcactggcaatgtcaatggacgagggagcttcaggagctgcakctgtggctgatgccgctatggcggaagctgctgcagatgatcaggatttggcattggctcttcaaatgtctgtccaggatgcagagatgtctggtcaatc

SEQ ID NO: 10728 - DNA, 201 bp, Artificial Sequence
  Description of Artificial Sequence: Synthetic probe
cattacatccattcaccgctggagtgtttgttgcaatgatgatggctcagatcgaggtcctcagaaagaagggccactcgtattcagagatcatcaacgaragtgtgatcgagtctgtcgactccctgaacccattcatgcatgctcgaggggtggcattcatggttgataactgctccacgacagcccgcttagggtcaa

SEQ ID NO: 10729 - DNA, 201 bp, Artificial Sequence
  Description of Artificial Sequence: Synthetic probe
tttttggttgtactcctggaaatacagaggcaaccactttagaagcaagcagaaaccctatgaggcgccaggttgctaatccaacaaggcctgcaagaacrctgacctctttgacccgtgctgtgaggagaggtggtgaaaatgcaggagccgatggcaatgtgaactctaacgacttctcaacaaagttactccatcttg

SEQ ID NO: 10730 - DNA, 201 bp, Artificial Sequence
  Description of Artificial Sequence: Synthetic probe
ggaagttgggctctgcagtctctgaaggagcgttggccagtgatgctgtggtgttcaagtacctcgaccatgtccaagcttatccaaacgtggatagttcytgcatcgccaccgttgctttcgtgcatacatgaaatatacgtgtatcctttccctaacttatcaaacctgtgagtaacaatgtatccctggacagctgtt

SEQ ID NO: 10731 - DNA, 201 bp, Artificial Sequence
  Description of Artificial Sequence: Synthetic probe
aaggctgcttttgacgaggctgagaaaaagaagcaagaggaggatgctaacaaagctagtgaggatgatgacttggacgatgaggatgctgatgacaaccrcgaggataaggatgagaaggctgtgtccgatgatgaggatcaatctgacgacgagaagcaccacgatgagctctagatggccaggatgaacaaggccgcc

SEQ ID NO: 10732 - DNA, 201 bp, Artificial Sequence
  Description of Artificial Sequence: Synthetic probe
atgtcattttcgggcttgctctgggttacaagtcagttatcatcccaattttcgctattgctgtcagcatttacgtcagcttctctattgctgccatgtayggcattgcaatggctgctcttggcatgctaagcacaatggcaactggtcttgccatcgatgcttatggccccattagtgacaatgctggtggaattgctg

SEQ ID NO: 10733 - DNA, 121 bp, Artificial Sequence
  Description of Artificial Sequence: Synthetic probe
gtgaagcacgaacagaagctggactgtggtggtggctatgtcaagttgcttgggggtgatstcaaccagaagaaattcggtggagacacaccttacagcattatgtttggaccagatatct

SEQ ID NO: 10734 - DNA, 201 bp, Artificial Sequence
  Description of Artificial Sequence: Synthetic probe
aagaggagcaatgacaaacagcttaagatagaacatgaattatgtcagagggtcatggcccatctccaagacgggaaagatgtacgtttaggagaatggaraactcttgaaattgagatcttgaataccttccagctgctgaccgcgaagccagttgtttatttggtgaacatgagtgagaaggactacctgcggaaaaag

SEQ ID NO: 10735 - DNA, 201 bp, Artificial Sequence
  Description of Artificial Sequence: Synthetic probe
catctgggttaatgctcttgcagagttccttgccattgaagaagtcctgaagcaactgctgaaccctgggaattctagtggaaccaccaacaaggacaacrtcgtgtacagtgctcttgtccatctttgcatccctaaggcacttctccactggctccatgcacttcctgaagaggtccatgttgagctcctcaaacctgg

SEQ ID NO: 10736 - DNA, 201 bp, Artificial Sequence
  Description of Artificial Sequence: Synthetic probe
aggggcttgactggctgtccaacaacattgccaacaaggcttgaagcatctcggcaggggcttctgtatatctggataagctggatattcggactaatacmgcctttacgtattataaactacatagtcttgacagatactttgggattgttctgggaaaagataaagctctttgtcaaagagctagctatcagattgttt

SEQ ID NO: 10737 - DNA, 201 bp, Artificial Sequence
  Description of Artificial Sequence: Synthetic probe
gatcagccttgaccttcatcccaccagtgatgcgcacaagggtttccctcccagacaagtcagtcacatgaatgaaggtgtcattgaaggatgcaaagacrtgagcaacaccaaagacatgctctccttcacggacagccggtccaagggtgatgttctcctccttgggctccctggtcttcctcttcgacatggttgcgt

SEQ ID NO: 10738 - DNA, 201 bp, Artificial Sequence
  Description of Artificial Sequence: Synthetic probe
gggcccagtggaccactcagcaccagcacctgcagcagcagctcctgctcaaccggcaacggcaccaaagaaggcaaagaagtgaagatctgacgtttaaktgttctgtttactgagtgaaatctgtttggtctttagctgaattttgaagtatgaactgttttgttcagtatttaagcatctttatccctgataccttgg

SEQ ID NO: 10739 - DNA, 201 bp, Artificial Sequence
  Description of Artificial Sequence: Synthetic probe
tctcatggggaagtgaagctgtgacccgcaagacccgtctcctggatgttgtttacaatgcgtcgaacaatgagcttgttcgaacacagaccctcgtgaaraatgctattgtgcaagttgatgctgcccccttcaagggttggtatctgacgcactatggcgtggacattggtcggaagaagaaagctcctgctgctgcca

SEQ ID NO: 10740 - DNA, 121 bp, Artificial Sequence
  Description of Artificial Sequence: Synthetic probe
agagatttccttctctgttgtcttctcagtccacagggagatagggtaactgatgaactcrgaatgcttcttgatcagatccttgatgcggcgctcctcaaggtactccatctggtcgtcc

SEQ ID NO: 10741 - DNA, 121 bp, Artificial Sequence
  Description of Artificial Sequence: Synthetic probe
gcatgccttggatatctcctttttcatctctttcaaatccagatgttttggctgaggtctyggttagtttgctatcagtgtattccagaaaccatagttttggtaacaacctggtgattag

SEQ ID NO: 10742 - DNA, 121 bp, Artificial Sequence
  Description of Artificial Sequence: Synthetic probe
gtgcatgatctccaactccaccagtgttgttgaggtcttctcccgcatcgaccacaagttygacctgatgtacgccaagcgtgccttcgtccactggtacgtgggtgagggtatggaggag

SEQ ID NO: 10743 - DNA, 121 bp, Artificial Sequence
  Description of Artificial Sequence: Synthetic probe
cagaggcactcctggagattggagccacatcattaagcagattgggatgtttactttcacygggctcaacagtgatcaagtagccttcatgaggcaggaattccacatttacatgacatct

SEQ ID NO: 10744 - DNA, 121 bp, Artificial Sequence
  Description of Artificial Sequence: Synthetic probe
cttttcagcctaatgggcaggctccaatttcgagcaccgataagccagtcaaacctgtagygagagcgaacggcatagatgtggctacgttttcaactcctcggagactagagactgatga

SEQ ID NO: 10745 - DNA, 121 bp, Artificial Sequence
  Description of Artificial Sequence: Synthetic probe
ggcacatagtttttattgaatctgtatgtgccatgttacctctgttttgtgtttacaaatraactgaaccagacacgtgcttgttcacgtggtggtgcgtctagtttcaggccgagtgatc

SEQ ID NO: 10746 - DNA, 121 bp, Artificial Sequence
  Description of Artificial Sequence: Synthetic probe
gctaggatcagcacggatggcagcatgaaccttcttgtaaatttcttccatttcatcagcygaaatacccttcttgatgtactcactgaagtggctctggaacttctcaggttcctcctca

SEQ ID NO: 10747 - DNA, 121 bp, Artificial Sequence
  Description of Artificial Sequence: Synthetic probe
caccgagctgatcgggaacacgccgctggtgtacctcaacacggtcacccatggctgcgtygcgcgcgtcgccgccaagctcgagtccatggagccctgctccagcgtcaaggacaggatt

SEQ ID NO: 10748 - DNA, 121 bp, Artificial Sequence
  Description of Artificial Sequence: Synthetic probe
taatgccattgctgggaggcacactcctggtacattcactaaccagatgcagacatcattyagcgagccacgccttcttatcctgactgaccccaggactgaccatcagcccatcaaggag

SEQ ID NO: 10749 - DNA, 121 bp, Artificial Sequence
  Description of Artificial Sequence: Synthetic probe
gccgaacatggagaacatggcgaggcggccgttcttgagctccttaaccttgagctccgcraaggcctctgggtcgtcggccaaaccgagggggtcgaagctgccaccggggtagagaggg

SEQ ID NO: 10750 - DNA, 121 bp, Artificial Sequence
  Description of Artificial Sequence: Synthetic probe
ttctccaacaccagcgaacacagagaaaccaccatgggccttggcaacattgttgatcagytccatgataaggacagttttacccactcctgcaccaccgaaaagaccaattttcccaccc

SEQ ID NO: 10751 - DNA, 121 bp, Artificial Sequence
  Description of Artificial Sequence: Synthetic probe
tggtgagctcaagcagacactggatttgggcagtacaggtcttcttccattggaggtgagrtttttacatgacccatcaaaggacactggctatgttggttgtgctttaacaagcaacatg

SEQ ID NO: 10752 - DNA, 121 bp, Artificial Sequence
  Description of Artificial Sequence: Synthetic probe
gcctgcaagtttgacaagtccaaaattgctgctcaagtcaagaatttcagtacggttgctrttgacgaagaccaaattgcggctaaccttgtgaaacatggcccacttgcaattggcatca

SEQ ID NO: 10753 - DNA, 121 bp, Artificial Sequence
  Description of Artificial Sequence: Synthetic probe
ctcggccaccatgatgatgtttgcaaggatgctgcagggattcacttggatgaagcttcckggcatcgacactattgatctccaggagagcaagattggacttgctctagctgaaccactg

SEQ ID NO: 10754 - DNA, 121 bp, Artificial Sequence
  Description of Artificial Sequence: Synthetic probe
agtccaacaggtgctgagtgctggatggagagagggcttaaatgtggcatgtgaaaacgcrctcggtcgatatgacgcaactgcttacaacacgatactaaggaacgcgagaccaaaaggt

SEQ ID NO: 10755 - DNA, 121 bp, Artificial Sequence
  Description of Artificial Sequence: Synthetic probe
gaagccatcaaacccttcaattgagcttggtcctgagttcaagaaggttgccagtttcctkgcccgattcaaatcaatccccagcatcgttgagcttgacagcttgaaggtctctggtgat

SEQ ID NO: 10756 - DNA, 121 bp, Artificial Sequence
  Description of Artificial Sequence: Synthetic probe
ggctgctgccaagaagaaatgagtggctcattgtctgacgcctagcagcagttttagttcmaatcattctttggtgaatcttagtatatcctatgttttgatcttggttgtgttactctta

SEQ ID NO: 10757 - DNA, 121 bp, Artificial Sequence
  Description of Artificial Sequence: Synthetic probe
cgtcatgtgcggcgccaacttcaaggtggacgccttcaccaagatcaactccatgccccgygtcggcagcgccaccaactgggccgccacctgggacgaagccgccatctagtctagctga

SEQ ID NO: 10758 - DNA, 121 bp, Artificial Sequence
  Description of Artificial Sequence: Synthetic probe
aaaggagctaaagttattattgatgcaaacacaggccgttctaggggctatggatttgttmgattcggagatgataaggacaaatctcattcaatgactgaaatgaacggcgtatattgct

SEQ ID NO: 10759 - DNA, 121 bp, Artificial Sequence
  Description of Artificial Sequence: Synthetic probe
gatgatgaggggactctgttgttggtatgttcctggagtagtagcctctgtatgtctgtarctaatttcagtcgttgtgttgtactagctgcatcagccatgttacatctgtcgaaatgat

SEQ ID NO: 10760 - DNA, 121 bp, Artificial Sequence
  Description of Artificial Sequence: Synthetic probe
ccaaggctgacaaggccacttagagatatcgttgctgtttatctatgtttgctaccgtgcycgtctctagattattgcacctcatggacatgtattccagtatggatgtcgtttttggttg

SEQ ID NO: 10761 - DNA, 121 bp, Artificial Sequence
  Description of Artificial Sequence: Synthetic probe
gtcatttcacaaagtcggactagagtcaagctcaacagggtcttctttccccgctgattcygccaagcccgttcccttggctgtggtttcgctggatagtagacagggacagtgggaatct

SEQ ID NO: 10762 - DNA, 121 bp, Artificial Sequence
  Description of Artificial Sequence: Synthetic probe
gaatgctgcagcaggtgggggtactgtggcaccggcggcgactactgtggctctgggtgcsagagcggcccgtgctacgtagccaagcttcgcggtcgcgtagcaggcgcggtcaccgacg

SEQ ID NO: 10763 - DNA, 121 bp, Artificial Sequence
  Description of Artificial Sequence: Synthetic probe
cgacatggccgtgtacaccaagatcttcgtcaagttccccaagaagttctggcccgagggmaaaggcagggagttcttcctctacgcgagcagcaggagaggctactacggagtatggcag

SEQ ID NO: 10764 - DNA, 121 bp, Artificial Sequence
  Description of Artificial Sequence: Synthetic probe
tattgagggcatcaagaagttcgagaccctgtcttacctgccaccactctcagaggaggcyctcctgaagcagatcgacttcttgatccgctccaagtgggttccttgcctcgagttcagc

SEQ ID NO: 10765 - DNA, 121 bp, Artificial Sequence
  Description of Artificial Sequence: Synthetic probe
ctgcttgttggaagacatctacagaaaccctggaccactccaatttgaaggaccaggtgcygattccaagcccatttcactgtgcgttgaggatcaagactacatgggcaggatcaagaaa

SEQ ID NO: 10766 - DNA, 121 bp, Artificial Sequence
  Description of Artificial Sequence: Synthetic probe
tttgggccttcctgcataccagtattattgtttggttttctgagtcctatatatcttcggrtatcgaacatcgtttaataatatgaaacttgtgctttcataataccgtagtagttttttg

SEQ ID NO: 10767 - DNA, 121 bp, Artificial Sequence
  Description of Artificial Sequence: Synthetic probe
aacacgaaggtaaatggtgaagaatctggaggacatgatgatgaactgatttcaaggctcrtgatacttgggcattgcaaagagaaggaactagctgtcaagatactcaaaaccatcaagt

SEQ ID NO: 10768 - DNA, 121 bp, Artificial Sequence
  Description of Artificial Sequence: Synthetic probe
tgataagatgaaggagctggagggcatctgcaacccgatcatcgccaagatgtaccagggygctggtgctgaaatgcccggtgggatggacgaggatgttccagccagtgctgccggcggc

SEQ ID NO: 10769 - DNA, 121 bp, Artificial Sequence
  Description of Artificial Sequence: Synthetic probe
cttgcaaagtgggatcagtacatgaagttcaaaagagggcagtcgagcaatgagctagatygatatttgaaagaagatttgacacctcgaaaagaggaagttgatattttagaatggtgga

SEQ ID NO: 10770 - DNA, 121 bp, Artificial Sequence
  Description of Artificial Sequence: Synthetic probe
gcgagctcctgctgagctccaacccggtacacaagaagataccggtgctcatccacaacgrcgtgcccgtctgcgagtccaacctcatcgtggagtacctcgacgaggcgttcgccgccgc

SEQ ID NO: 10771 - DNA, 121 bp, Artificial Sequence
  Description of Artificial Sequence: Synthetic probe
cacgacgacatggaagttttctacagcctgtgtccttttcttgtgaatcctgggttttacrgtatagccgatcgtttgtttgctgtacacccagtgtagcataaaacactgcttctatgtg

SEQ ID NO: 10772 - DNA, 121 bp, Artificial Sequence
  Description of Artificial Sequence: Synthetic probe
ggttttcatcaaactgggtgctgataaggatgctttgaagaagaaagaaaatgctgaacgygatgagcgtgctaagaagtctgtgagcatcaacgagttcctgaaacctgctgaaggagaa

SEQ ID NO: 10773 - DNA, 121 bp, Artificial Sequence
  Description of Artificial Sequence: Synthetic probe
gagcttacctgagtgccttgaacaagatgtccagttttatcggcgccataaacgccagcarcgaagcaccggagaccataagcgttcagagctcagaatgatcgtcgacatcccttgtcgc

SEQ ID NO: 10774 - DNA, 121 bp, Artificial Sequence
  Description of Artificial Sequence: Synthetic probe
agtcctggaccagccacttaccaattataaccaggatgcctatcgtcttcagttgaagctkttcctttatgaagtgaagcaacaacagttgctttctgggatccggagttatctaaaatta

SEQ ID NO: 10775 - DNA, 121 bp, Artificial Sequence
  Description of Artificial Sequence: Synthetic probe
ggccacggatctagttggcagagggattgatattgagcgtgtcaacattgtgataaactaygacatgcctgactcagctgatacatacctgcacagggttggaagggctggtcgtttcggc

SEQ ID NO: 10776 - DNA, 121 bp, Artificial Sequence
  Description of Artificial Sequence: Synthetic probe
aattgcgtctgtatcaaggatgatggagcgtttggaaactagaggaagtagtagaacaagygatagcccaacatcatctacttctgaagtttgccccactgcagaaccaagcaatgagagg

SEQ ID NO: 10777 - DNA, 121 bp, Artificial Sequence
  Description of Artificial Sequence: Synthetic probe
tttcctcttagtaacctcgactccttcccatcaattccattcttcagatctaaatctgctmggatggacggtacagctccacagatacccgctcagaacgaagagaagctggtgctgaaga

SEQ ID NO: 10778 - DNA, 121 bp, Artificial Sequence
  Description of Artificial Sequence: Synthetic probe
ttaatgaaggcagagtgttgaccaacggcatagcaatgccttgtattaaacggtgtctatygagtagtaaagcatggcatgttgtaaaagagaaagttcatcatccttattttgtgcaagg

SEQ ID NO: 10779 - DNA, 121 bp, Artificial Sequence
  Description of Artificial Sequence: Synthetic probe
caggtggatggggtgaagactatctttctagtgacaatggggaatatattgatagcggtargcctaatgctgtgaccacctcatgggcaatgttggctttaatttatgctggacaggttga

SEQ ID NO: 10780 - DNA, 121 bp, Artificial Sequence
  Description of Artificial Sequence: Synthetic probe
aaatacagaaaaccaaggacaagactgcctcaaagtagagaacttgtttgaaactgaattkagaggctgttatgtaaacaaggaaatatttttgtggatggtgatcatgaatggttttagt

SEQ ID NO: 10781 - DNA, 121 bp, Artificial Sequence
  Description of Artificial Sequence: Synthetic probe
atccacccatctcaaaccatgcatcgttgtgacatacatcatgtccctccgaatgcaaatyatcctcgtaatttgcatgtcttttcatttgtttcagttcatatgattccttaagtttcca

SEQ ID NO: 10782 - DNA, 121 bp, Artificial Sequence
  Description of Artificial Sequence: Synthetic probe
gctagccagcaatgggagcgttggggccacaaaccttgctaaggccacaccagcaaccttyccacatggactcgacagggagcatggaccgccacactcgacaggcaaagccgaggaagcc

SEQ ID NO: 10783 - DNA, 121 bp, Artificial Sequence
  Description of Artificial Sequence: Synthetic probe
gcagtgtataaatatgggatacaaagtacagtctcgaccgtatgtgtctcctcaaggcagrgaaaggaaaaaatcaagcaccgatacactggtttgccggccacgcagcacgcaaagctgg

SEQ ID NO: 10784 - DNA, 121 bp, Artificial Sequence
  Description of Artificial Sequence: Synthetic probe
ccccatctctggatttgagggtgataacatgattgagaggtccaccaaccttgactggtayaagggccctaccctgcttgaggcgctcgaccagatcaatgagcccaagagaccctcagac

SEQ ID NO: 10785 - DNA, 121 bp, Artificial Sequence
  Description of Artificial Sequence: Synthetic probe
gaatactagaacatggtaagagaggatattatgatatcccatataccctaacggcaggcamatttcagatggttctgaaaagctcaggtaagggcgtaaccgttgacatgcccgcctcatt

SEQ ID NO: 10786 - DNA, 121 bp, Artificial Sequence
  Description of Artificial Sequence: Synthetic probe
tcaaacaatattgtgagatggagagccatgaagagaaggcacataagctgatgatgcagarcaaaatcaacgacactaaggatgtcatgaagaagagagcgagtgagcttgataaaatcag

SEQ ID NO: 10787 - DNA, 121 bp, Artificial Sequence
  Description of Artificial Sequence: Synthetic probe
cccagctctgtgcaggaagatggaggtcccatactgcattgttaagggaaaatcacgcctyggatcgattgttcacaagaagacctcctctgttctttgcctgaccactgtcaagaacgag

SEQ ID NO: 10788 - DNA, 121 bp, Artificial Sequence
  Description of Artificial Sequence: Synthetic probe
aatctccagctgagttcccaacttctcctcggcagccttctcagccttgacacggagcttygccagctgctttcgcctgtcatacgcaaccttggccttctccttcctcttctcctccagc

SEQ ID NO: 10789 - DNA, 121 bp, Artificial Sequence
  Description of Artificial Sequence: Synthetic probe
ctgacataccacttaaatcgcatactcctcttgtgtacttgtctccgcttcttgaaggcaytgtcatggattcgagatagtaagagcggcatgccttgatcagcagagaagatgcaatttt

SEQ ID NO: 10790 - DNA, 121 bp, Artificial Sequence
  Description of Artificial Sequence: Synthetic probe
aatcgaccatgttgagaagaagctgtcacagatgatcctggacaagaaattctcagggacyctggatcagggcgctggttgcctcatcatcttcgaggactccaagaccgaggcgatcttc

SEQ ID NO: 10791 - DNA, 121 bp, Artificial Sequence
  Description of Artificial Sequence: Synthetic probe
ctaaaccgacaatgctgcgtattcttcagggacaatcatcggttgttcatgtccgcataaracgccatgcaatgaatgatatgcctaaatcggatgaggatgtttcaaaatggtgtaaaga

SEQ ID NO: 10792 - DNA, 121 bp, Artificial Sequence
  Description of Artificial Sequence: Synthetic probe
ttggtgaagaaagcatatgcttatatccacaggaatggctacaaaacaaagttgatggccrctgccgtacggaacaagcaagatgtatttagccttgtggggattgattacatcatcgctc

SEQ ID NO: 10793 - DNA, 121 bp, Artificial Sequence
  Description of Artificial Sequence: Synthetic probe
gcttctagtgtggaggggaaacattgcgaatgctatcagcacaatccaagctaacaaggtkactgaagatggtgggcaggggatgcaaggattgatgatccgctgatttgatgggagtccc

SEQ ID NO: 10794 - DNA, 121 bp, Artificial Sequence
  Description of Artificial Sequence: Synthetic probe
cgagtgtcatatacgctgacacggttggtgatttgggatatgcttcagagctaggaaattrtgcagagtacagtggggctcccaaagaggaggaggttttgcagtatgctagagtggtttt

SEQ ID NO: 10795 - DNA, 121 bp, Artificial Sequence
  Description of Artificial Sequence: Synthetic probe
acatattggaaaccatatgtcgtcagatcgagtaataataaccgtaggcaggcatgtctcyttcagatcggatgcacgttcaggctttgtcatgcatgcatgtagtgtgcggtcttctcat

SEQ ID NO: 10796 - DNA, 121 bp, Artificial Sequence
  Description of Artificial Sequence: Synthetic probe
tgttgcatgtgaaagagagttcttgtctgttcttgatggtaactgccgaacgccaattgckgcatatgcttatcgtgatagcaatgggaattgttcattccgtgggctattggcttcacca

SEQ ID NO: 10797 - DNA, 121 bp, Artificial Sequence
  Description of Artificial Sequence: Synthetic probe
gaacctcctcctaacgtcttcactgagatgctgagcccagacagtgttaagagtacgaagrccacgaggagtcttcacgtaggcaacaagtccaacaataacaattggtggtgtctcaaca

SEQ ID NO: 10798 - DNA, 121 bp, Artificial Sequence
  Description of Artificial Sequence: Synthetic probe
gtaggacgcgacctaccctcgctccttgtacttctcgggcacatcaagcatgcatgggccytggaaattttatttgaacgtttaaataaatctcctacttgttccacccttctttaaatta

SEQ ID NO: 10799 - DNA, 121 bp, Artificial Sequence
  Description of Artificial Sequence: Synthetic probe
ctcagagaaccaaggtttagccgaacatgaaataggaatacagtatttaaaccacagaacyagatcattgcttgcacgtttcaacagtctccagcaacaagagcaatgcgcatgaacagaa

SEQ ID NO: 10800 - DNA, 121 bp, Artificial Sequence
  Description of Artificial Sequence: Synthetic probe
caccagagaaagttcatcccaaattatggaagggtgtgcggaagggatttgtaccgattgrccgtgtagcaattgaacggaggaagcttagcaaggataggacagtagatgagcacaaaaa

SEQ ID NO: 10801 - DNA, 121 bp, Artificial Sequence
  Description of Artificial Sequence: Synthetic probe
tctggtgtgctctttactgcttaaagcttgattgttctggaaaccattcttatgtaacgcyttatgagtttggagccaattagacgctgcaaattttccttgtttacctggagattgccgt

SEQ ID NO: 10802 - DNA, 121 bp, Artificial Sequence
  Description of Artificial Sequence: Synthetic probe
acctggtgtttttgtcttgtttccaccagtagcacggagcttaatgtgcagagcagtgatmccaagctccttgcatcttacagcaacatcctgagatgcaagcatggctgcataaggggat

SEQ ID NO: 10803 - DNA, 121 bp, Artificial Sequence
  Description of Artificial Sequence: Synthetic probe
accatcatgcccaaggatatccagctcgcccgccgcatccgtggggagagggcgtagagtrcgttgtagtgtccgacctgggagttaggaaagtttgcctgttcgtatctgagtgcgtgct

SEQ ID NO: 10804 - DNA, 121 bp, Artificial Sequence
  Description of Artificial Sequence: Synthetic probe
actccttcatcatcaacgtcggcgacatcgtccaggtgtggagcaacgacaggtacgagarcgcggagcacagggtgtcggtgaactcccagaaggagaggttctccatgccctacttctt

SEQ ID NO: 10805 - DNA, 21 bp, Artificial Sequence
  Description of Artificial Sequence: Synthetic primer
cgcggagcaaataagatcagc

SEQ ID NO: 10806 - DNA, 21 bp, Artificial Sequence
  Description of Artificial Sequence: Synthetic primer
ccagcagacgatggtaggttg

SEQ ID NO: 10807 - DNA, 21 bp, Artificial Sequence
  Description of Artificial Sequence: Synthetic primer
gaggctgtctcctggcaatag

SEQ ID NO: 10808 - DNA, 23 bp, Artificial Sequence
  Description of Artificial Sequence: Synthetic primer
atcgctaattactgccgatcacg

SEQ ID NO: 10809 - DNA, 20 bp, Artificial Sequence
  Description of Artificial Sequence: Synthetic primer
atgctaaaggcgaagggcat

SEQ ID NO: 10810 - DNA, 27 bp, Artificial Sequence
  Description of Artificial Sequence: Synthetic primer
attagcagagggctctagtaaagaaca

SEQ ID NO: 10811 - DNA, 25 bp, Artificial Sequence
  Description of Artificial Sequence: Synthetic primer
tgtaagaggctttagtcccagattg

SEQ ID NO: 10812 - DNA, 28 bp, Artificial Sequence
  Description of Artificial Sequence: Synthetic primer
acggagatgaagtaatctacggtaattc

SEQ ID NO: 10813 - DNA, 28 bp, Artificial Sequence
  Description of Artificial Sequence: Synthetic primer
agggataaatctggactacagagtaagg

SEQ ID NO: 10814 - DNA, 21 bp, Artificial Sequence
  Description of Artificial Sequence: Synthetic primer
ccatcaacagcccggattctc

SEQ ID NO: 10815 - DNA, 21 bp, Artificial Sequence
  Description of Artificial Sequence: Synthetic primer
gtactgactctgcgctggatg

SEQ ID NO: 10816 - DNA, 23 bp, Artificial Sequence
  Description of Artificial Sequence: Synthetic primer
gtcagaatgccaggtacatctct

SEQ ID NO: 10817 - DNA, 29 bp, Artificial Sequence
  Description of Artificial Sequence: Synthetic primer
gaacacacatctaagtaatccatttggag

SEQ ID NO: 10818 - DNA, 20 bp, Artificial Sequence
  Description of Artificial Sequence: Synthetic primer
tccggcgtctctcttctctc

SEQ ID NO: 10819 - DNA, 21 bp, Artificial Sequence
  Description of Artificial Sequence: Synthetic primer
ctcttccctcaccctcctctt

SEQ ID NO: 10820 - DNA, 22 bp, Artificial Sequence
  Description of Artificial Sequence: Synthetic primer
gtggaggtggaacgaaaattcc

SEQ ID NO: 10821 - DNA, 25 bp, Artificial Sequence
  Description of Artificial Sequence: Synthetic primer
gctaggatccattgcatgtctaaca

SEQ ID NO: 10822 - DNA, 27 bp, Artificial Sequence
  Description of Artificial Sequence: Synthetic primer
tgagatcatatcagaggaagatgaagc

SEQ ID NO: 10823 - DNA, 24 bp, Artificial Sequence
  Description of Artificial Sequence: Synthetic primer
caggtctgcaaatgcataactgaa

SEQ ID NO: 10824 - DNA, 21 bp, Artificial Sequence
  Description of Artificial Sequence: Synthetic primer
gtcaactatgttggcggccta

SEQ ID NO: 10825 - DNA, 23 bp, Artificial Sequence
  Description of Artificial Sequence: Synthetic primer
gtggttgtgaactccactcttgt

SEQ ID NO: 10826 - DNA, 27 bp, Artificial Sequence
  Description of Artificial Sequence: Synthetic primer
caaggccaccattaaataacttccaaa

SEQ ID NO: 10827 - DNA, 25 bp, Artificial Sequence
  Description of Artificial Sequence: Synthetic primer
atgcactatcctcaaagcattacga

SEQ ID NO: 10828 - DNA, 21 bp, Artificial Sequence
  Description of Artificial Sequence: Synthetic primer
caccactcagacggttctctt

SEQ ID NO: 10829 - DNA, 28 bp, Artificial Sequence
  Description of Artificial Sequence: Synthetic primer
agtatataagcagactgtgcatgaagtt

SEQ ID NO: 10830 - DNA, 21 bp, Artificial Sequence
  Description of Artificial Sequence: Synthetic primer
catctgggttggtgtccatcg

SEQ ID NO: 10831 - DNA, 28 bp, Artificial Sequence
  Description of Artificial Sequence: Synthetic primer
tcaaagtactctacgattctaggtgaca

SEQ ID NO: 10832 - DNA, 28 bp, Artificial Sequence
  Description of Artificial Sequence: Synthetic primer
tctgtgaaatcaaaccaaagggtgatat

SEQ ID NO: 10833 - DNA, 23 bp, Artificial Sequence
  Description of Artificial Sequence: Synthetic primer
tgaacctgcacactaaaaggagt

SEQ ID NO: 10834 - DNA, 24 bp, Artificial Sequence
  Description of Artificial Sequence: Synthetic primer
cccgccacaaaaacattgttaaga

SEQ ID NO: 10835 - DNA, 21 bp, Artificial Sequence
  Description of Artificial Sequence: Synthetic primer
gcccagctagctgttcatcat

SEQ ID NO: 10836 - DNA, 22 bp, Artificial Sequence
  Description of Artificial Sequence: Synthetic primer
gatggttccagtgcagaagtga

SEQ ID NO: 10837 - DNA, 24 bp, Artificial Sequence
  Description of Artificial Sequence: Synthetic primer
agtttgccaagtatagcaactcct

SEQ ID NO: 10838 - DNA, 27 bp, Artificial Sequence
  Description of Artificial Sequence: Synthetic primer
tgggataggacagatcaacaaaacaat

SEQ ID NO: 10839 - DNA, 23 bp, Artificial Sequence
  Description of Artificial Sequence: Synthetic primer
ctgggaggagggaagtgaaaaag

SEQ ID NO: 10840 - DNA, 23 bp, Artificial Sequence
  Description of Artificial Sequence: Synthetic primer
caccgccattccattcatgaaag

SEQ ID NO: 10841 - DNA, 23 bp, Artificial Sequence
  Description of Artificial Sequence: Synthetic primer
ccaagaccggtatagctatgcag

SEQ ID NO: 10842 - DNA, 26 bp, Artificial Sequence
  Description of Artificial Sequence: Synthetic primer
aggcgatggattttgttttagaacag

SEQ ID NO: 10843 - DNA, 26 bp, Artificial Sequence
  Description of Artificial Sequence: Synthetic primer
tgcaggagcaccactgatatataaac

SEQ ID NO: 10844 - DNA, 22 bp, Artificial Sequence
  Description of Artificial Sequence: Synthetic primer
tgcacctgagatgaatgcattg

SEQ ID NO: 10845 - DNA, 23 bp, Artificial Sequence
  Description of Artificial Sequence: Synthetic primer
ttagtgcccgctttgtatgtttg

SEQ ID NO: 10846 - DNA, 24 bp, Artificial Sequence
  Description of Artificial Sequence: Synthetic primer
aaaacatggctatgcagttctcag

SEQ ID NO: 10847 - DNA, 26 bp, Artificial Sequence
  Description of Artificial Sequence: Synthetic primer
ggccttgaaaattttgttcacggtat

SEQ ID NO: 10848 - DNA, 21 bp, Artificial Sequence
  Description of Artificial Sequence: Synthetic primer
tcagattcaggcgttgcctag

SEQ ID NO: 10849 - DNA, 25 bp, Artificial Sequence
  Description of Artificial Sequence: Synthetic primer
gtgactccccatattcagcatacaa

SEQ ID NO: 10850 - DNA, 24 bp, Artificial Sequence
  Description of Artificial Sequence: Synthetic primer
gggattaggaagacaagggatcaa

SEQ ID NO: 10851 - DNA, 29 bp, Artificial Sequence
  Description of Artificial Sequence: Synthetic primer
agagaattacaagtgataatggtcggaaa

SEQ ID NO: 10852 - DNA, 21 bp, Artificial Sequence
  Description of Artificial Sequence: Synthetic primer
atgccattgcagctcaacaaa

SEQ ID NO: 10853 - DNA, 21 bp, Artificial Sequence
  Description of Artificial Sequence: Synthetic primer
ctccctctgcacttgcatgta

SEQ ID NO: 10854 - DNA, 30 bp, Artificial Sequence
  Description of Artificial Sequence: Synthetic primer
tttcttctctgctatgtttaaatacatgcg

SEQ ID NO: 10855 - DNA, 26 bp, Artificial Sequence
  Description of Artificial Sequence: Synthetic primer
ctggaggaacagttatgggtaaacaa

SEQ ID NO: 10856 - DNA, 22 bp, Artificial Sequence
  Description of Artificial Sequence: Synthetic primer
ccaaacgaaggtacgcattcag

SEQ ID NO: 10857 - DNA, 28 bp, Artificial Sequence
  Description of Artificial Sequence: Synthetic primer
ttcttcctggtgaagttaaacaatctgt

SEQ ID NO: 10858 - DNA, 26 bp, Artificial Sequence
  Description of Artificial Sequence: Synthetic primer
atgaaacggagggagtacatatcaag

SEQ ID NO: 10859 - DNA, 28 bp, Artificial Sequence
  Description of Artificial Sequence: Synthetic primer
catatgattcctgctggtatgtcctatt

SEQ ID NO: 10860 - DNA, 21 bp, Artificial Sequence
  Description of Artificial Sequence: Synthetic primer
ctccgcttgctctccttgatt

SEQ ID NO: 10861 - DNA, 23 bp, Artificial Sequence
  Description of Artificial Sequence: Synthetic primer
gtagtagcaactcatgcaaggtg

SEQ ID NO: 10862 - DNA, 23 bp, Artificial Sequence
  Description of Artificial Sequence: Synthetic primer
ggtggctcttacctgagtttctt

SEQ ID NO: 10863 - DNA, 23 bp, Artificial Sequence
  Description of Artificial Sequence: Synthetic primer
acccgagatctcccatgatgtta

SEQ ID NO: 10864 - DNA, 24 bp, Artificial Sequence
  Description of Artificial Sequence: Synthetic primer
ccaaatggatttggagagcagtca

SEQ ID NO: 10865 - DNA, 24 bp, Artificial Sequence
  Description of Artificial Sequence: Synthetic primer
ggcgcctcttggatttgtacatta

SEQ ID NO: 10866 - DNA, 27 bp, Artificial Sequence
  Description of Artificial Sequence: Synthetic primer
atttttgtgtctttcccactctgaatg

SEQ ID NO: 10867 - DNA, 28 bp, Artificial Sequence
  Description of Artificial Sequence: Synthetic primer
aaaggtaaatcctgtagtttgtgagctg

SEQ ID NO: 10868 - DNA, 21 bp, Artificial Sequence
  Description of Artificial Sequence: Synthetic primer
ggccacgctaacacacataca

SEQ ID NO: 10869 - DNA, 21 bp, Artificial Sequence
  Description of Artificial Sequence: Synthetic primer
gaactgcccgttggacaagat

SEQ ID NO: 10870 - DNA, 19 bp, Artificial Sequence
  Description of Artificial Sequence: Synthetic primer
gccaccacgttgttcttgc

SEQ ID NO: 10871 - DNA, 27 bp, Artificial Sequence
  Description of Artificial Sequence: Synthetic primer
gtaggataaagggctaggcatgtaatt

SEQ ID NO: 10872 - DNA, 28 bp, Artificial Sequence
  Description of Artificial Sequence: Synthetic primer
tttggatgactataatactacggacgag

SEQ ID NO: 10873 - DNA, 21 bp, Artificial Sequence
  Description of Artificial Sequence: Synthetic primer
gggagagcctgtgtacgattt

SEQ ID NO: 10874 - DNA, 21 bp, Artificial Sequence
  Description of Artificial Sequence: Synthetic primer
ggagtgagcttgccaaggtaa

SEQ ID NO: 10875 - DNA, 26 bp, Artificial Sequence
  Description of Artificial Sequence: Synthetic primer
acttgtgtcaaaaacttacagcatgt

SEQ ID NO: 10876 - DNA, 21 bp, Artificial Sequence
  Description of Artificial Sequence: Synthetic primer
catcatgcatgccacatggac

SEQ ID NO: 10877 - DNA, 28 bp, Artificial Sequence
  Description of Artificial Sequence: Synthetic primer
gtgttgttgtctgttacaagactatgtt

SEQ ID NO: 10878 - DNA, 26 bp, Artificial Sequence
  Description of Artificial Sequence: Synthetic primer
aaacagagtttgtcaatcagaaggga

SEQ ID NO: 10879 - DNA, 22 bp, Artificial Sequence
  Description of Artificial Sequence: Synthetic primer
ggattagtaggccgaagcttcc

SEQ ID NO: 10880 - DNA, 27 bp, Artificial Sequence
  Description of Artificial Sequence: Synthetic primer
ccaattctccttgtcatctgatgcata

SEQ ID NO: 10881 - DNA, 22 bp, Artificial Sequence
  Description of Artificial Sequence: Synthetic primer
gcaggatccgttctacatcgtc

SEQ ID NO: 10882 - DNA, 28 bp, Artificial Sequence
  Description of Artificial Sequence: Synthetic primer
gctcttaatctagagttcataccctcca

SEQ ID NO: 10883 - DNA, 27 bp, Artificial Sequence
  Description of Artificial Sequence: Synthetic primer
tcttgtctaaccaacatctctgaaacc

SEQ ID NO: 10884 - DNA, 21 bp, Artificial Sequence
  Description of Artificial Sequence: Synthetic primer
cctactgccctgcatatgacc

SEQ ID NO: 10885 - DNA, 28 bp, Artificial Sequence
  Description of Artificial Sequence: Synthetic primer
ttgacctgtttatctgaacattgaatcg

SEQ ID NO: 10886 - DNA, 24 bp, Artificial Sequence
  Description of Artificial Sequence: Synthetic primer
ggtgtattgtatgctactgaggct

SEQ ID NO: 10887 - DNA, 21 bp, Artificial Sequence
  Description of Artificial Sequence: Synthetic primer
agcagaattctgttcggcatg

SEQ ID NO: 10888 - DNA, 25 bp, Artificial Sequence
  Description of Artificial Sequence: Synthetic primer
gctattgcctgcacattatcagaaa

SEQ ID NO: 10889 - DNA, 26 bp, Artificial Sequence
  Description of Artificial Sequence: Synthetic primer
catgctccggtatgtttccaaatttt

SEQ ID NO: 10890 - DNA, 28 bp, Artificial Sequence
  Description of Artificial Sequence: Synthetic primer
tgtcttccttacgatttttcatgtaggg

SEQ ID NO: 10891 - DNA, 23 bp, Artificial Sequence
  Description of Artificial Sequence: Synthetic primer
agctggatcttacaacacacaca

SEQ ID NO: 10892 - DNA, 21 bp, Artificial Sequence
  Description of Artificial Sequence: Synthetic primer
cagccccacgtcaacattttc

SEQ ID NO: 10893 - DNA, 23 bp, Artificial Sequence
  Description of Artificial Sequence: Synthetic primer
tttctgggaaattgtacgtgtgc

SEQ ID NO: 10894 - DNA, 21 bp, Artificial Sequence
  Description of Artificial Sequence: Synthetic primer
actccagattccgggatgcta

SEQ ID NO: 10895 - DNA, 21 bp, Artificial Sequence
  Description of Artificial Sequence: Synthetic primer
atgaactccatgaagcggtgt

SEQ ID NO: 10896 - DNA, 21 bp, Artificial Sequence
  Description of Artificial Sequence: Synthetic primer
cgtggcggagaaaatactcca

SEQ ID NO: 10897 - DNA, 28 bp, Artificial Sequence
  Description of Artificial Sequence: Synthetic primer
gctccaataggatctaatgtttcaagtg

SEQ ID NO: 10898 - DNA, 22 bp, Artificial Sequence
  Description of Artificial Sequence: Synthetic primer
gtgattggcaccgcctctaata

SEQ ID NO: 10899 - DNA, 28 bp, Artificial Sequence
  Description of Artificial Sequence: Synthetic primer
gaatatccatcaacaagagaagcatacg

SEQ ID NO: 10900 - DNA, 28 bp, Artificial Sequence
  Description of Artificial Sequence: Synthetic primer
aaaaagaaaacgtacatcaacagaagca

SEQ ID NO: 10901 - DNA, 28 bp, Artificial Sequence
  Description of Artificial Sequence: Synthetic primer
gtcctcaccaattattattacaccacct

SEQ ID NO: 10902 - DNA, 21 bp, Artificial Sequence
  Description of Artificial Sequence: Synthetic primer
cgcaaggtctcccatgtatct

SEQ ID NO: 10903 - DNA, 18 bp, Artificial Sequence
  Description of Artificial Sequence: Synthetic primer
gggcgggtgaaaggtagc

SEQ ID NO: 10904 - DNA, 27 bp, Artificial Sequence
  Description of Artificial Sequence: Synthetic primer
acttccaattgaatcaggtactcatct

SEQ ID NO: 10905 - DNA, 23 bp, Artificial Sequence
  Description of Artificial Sequence: Synthetic primer
ctactagtagcaggactgcagga

SEQ ID NO: 10906 - DNA, 28 bp, Artificial Sequence
  Description of Artificial Sequence: Synthetic primer
agacatgctttagcaactgagtattctt

SEQ ID NO: 10907 - DNA, 28 bp, Artificial Sequence
  Description of Artificial Sequence: Synthetic primer
ggagacaagcagttttacttgattgatt

SEQ ID NO: 10908 - DNA, 27 bp, Artificial Sequence
  Description of Artificial Sequence: Synthetic primer
tagaatcttgcagcacatacttagtgt

SEQ ID NO: 10909 - DNA, 24 bp, Artificial Sequence
  Description of Artificial Sequence: Synthetic primer
tcaatccaagtaggctgttcttgt

SEQ ID NO: 10910 - DNA, 25 bp, Artificial Sequence
  Description of Artificial Sequence: Synthetic primer
agacgaattaagcatgcaaatgcaa

SEQ ID NO: 10911 - DNA, 23 bp, Artificial Sequence
  Description of Artificial Sequence: Synthetic primer
gaaaaaccacctgtgccagaatc

SEQ ID NO: 10912 - DNA, 29 bp, Artificial Sequence
  Description of Artificial Sequence: Synthetic primer
attcaatatttggttctgggatagctctt

SEQ ID NO: 10913 - DNA, 27 bp, Artificial Sequence
  Description of Artificial Sequence: Synthetic primer
gggattcagcttatcagttgaaacaat

SEQ ID NO: 10914 - DNA, 24 bp, Artificial Sequence
  Description of Artificial Sequence: Synthetic primer
agatttagagagatgcgcaaacca

SEQ ID NO: 10915 - DNA, 28 bp, Artificial Sequence
  Description of Artificial Sequence: Synthetic primer
cttttgactcatacaaagcatactgctc

SEQ ID NO: 10916 - DNA, 24 bp, Artificial Sequence
  Description of Artificial Sequence: Synthetic primer
ccttgcatatagcggtgtcagtta

SEQ ID NO: 10917 - DNA, 26 bp, Artificial Sequence
  Description of Artificial Sequence: Synthetic primer
tgccttcaaacgataaatctaagcca

SEQ ID NO: 10918 - DNA, 23 bp, Artificial Sequence
  Description of Artificial Sequence: Synthetic primer
tgactgtgaagctagtagatggc

SEQ ID NO: 10919 - DNA, 28 bp, Artificial Sequence
  Description of Artificial Sequence: Synthetic primer
acttttatgttgtaccgtctgatgatgt

SEQ ID NO: 10920 - DNA, 26 bp, Artificial Sequence
  Description of Artificial Sequence: Synthetic primer
cattggtaataccgacgtaccgtaat

SEQ ID NO: 10921 - DNA, 21 bp, Artificial Sequence
  Description of Artificial Sequence: Synthetic primer
gggttaggactgagcagtgac

SEQ ID NO: 10922 - DNA, 19 bp, Artificial Sequence
  Description of Artificial Sequence: Synthetic primer
gtggcggtcggtataggag

SEQ ID NO: 10923 - DNA, 21 bp, Artificial Sequence
  Description of Artificial Sequence: Synthetic primer
ctggaaggagaggacagtgac

SEQ ID NO: 10924 - DNA, 24 bp, Artificial Sequence
  Description of Artificial Sequence: Synthetic primer
ctgctggattccactgaataatgc

SEQ ID NO: 10925 - DNA, 25 bp, Artificial Sequence
  Description of Artificial Sequence: Synthetic primer
aactcattacatcactcacctccca

SEQ ID NO: 10926 - DNA, 21 bp, Artificial Sequence
  Description of Artificial Sequence: Synthetic primer
ggagcgagaaggcataccttg

SEQ ID NO: 10927 - DNA, 21 bp, Artificial Sequence
  Description of Artificial Sequence: Synthetic primer
cagatggatccagtgcaggaa

SEQ ID NO: 10928 - DNA, 28 bp, Artificial Sequence
  Description of Artificial Sequence: Synthetic primer
aatggaacaactaactttgagcttatgg

SEQ ID NO: 10929 - DNA, 21 bp, Artificial Sequence
  Description of Artificial Sequence: Synthetic primer
acgatgtgttggttggagtca

SEQ ID NO: 10930 - DNA, 24 bp, Artificial Sequence
  Description of Artificial Sequence: Synthetic primer
agggcaaaaggaaacataccatca

SEQ ID NO: 10931 - DNA, 26 bp, Artificial Sequence
  Description of Artificial Sequence: Synthetic primer
tgtaactcaacatcttcacacacaca

SEQ ID NO: 10932 - DNA, 25 bp, Artificial Sequence
  Description of Artificial Sequence: Synthetic primer
cttcaaacttcatcatccagccctt

SEQ ID NO: 10933 - DNA, 27 bp, Artificial Sequence
  Description of Artificial Sequence: Synthetic primer
agaatattgattaggtcagtccccact

SEQ ID NO: 10934 - DNA, 19 bp, Artificial Sequence
  Description of Artificial Sequence: Synthetic primer
ggcatccaagccagtggtt

SEQ ID NO: 10935 - DNA, 24 bp, Artificial Sequence
  Description of Artificial Sequence: Synthetic primer
accaaaatgctggataaactagcg

SEQ ID NO: 10936 - DNA, 24 bp, Artificial Sequence
  Description of Artificial Sequence: Synthetic primer
ctgctatagccctgactacagtac

SEQ ID NO: 10937 - DNA, 28 bp, Artificial Sequence
  Description of Artificial Sequence: Synthetic primer
atttttctcaatgtagctaacacgaagc

SEQ ID NO: 10938 - DNA, 21 bp, Artificial Sequence
  Description of Artificial Sequence: Synthetic primer
ccaccgctgaagtgatctcaa

SEQ ID NO: 10939 - DNA, 25 bp, Artificial Sequence
  Description of Artificial Sequence: Synthetic primer
gttgcatgagaagagacgatcagaa

SEQ ID NO: 10940 - DNA, 28 bp, Artificial Sequence
  Description of Artificial Sequence: Synthetic primer
agctatcagaaagcataatcagtgagaa

SEQ ID NO: 10941 - DNA, 21 bp, Artificial Sequence
  Description of Artificial Sequence: Synthetic primer
tgcaggcttgatcttctagca

SEQ ID NO: 10942 - DNA, 24 bp, Artificial Sequence
  Description of Artificial Sequence: Synthetic primer
tactctcataagggagagctgcaa

SEQ ID NO: 10943 - DNA, 22 bp, Artificial Sequence
  Description of Artificial Sequence: Synthetic primer
gccttcaaatccttgactccca

SEQ ID NO: 10944 - DNA, 25 bp, Artificial Sequence
  Description of Artificial Sequence: Synthetic primer
catcttctaattcggatgctccaca

SEQ ID NO: 10945 - DNA, 26 bp, Artificial Sequence
  Description of Artificial Sequence: Synthetic primer
taaaaatatggccacatgcagcatag

SEQ ID NO: 10946 - DNA, 25 bp, Artificial Sequence
  Description of Artificial Sequence: Synthetic primer
gatggatcaagtgcagctacttaga

SEQ ID NO: 10947 - DNA, 28 bp, Artificial Sequence
  Description of Artificial Sequence: Synthetic primer
tgtattcgtagacaccattattctcacg

SEQ ID NO: 10948 - DNA, 25 bp, Artificial Sequence
  Description of Artificial Sequence: Synthetic primer
atgctggcttgctaataatcactct

SEQ ID NO: 10949 - DNA, 21 bp, Artificial Sequence
  Description of Artificial Sequence: Synthetic primer
ggactgagccactgtcaagtc

SEQ ID NO: 10950 - DNA, 28 bp, Artificial Sequence
  Description of Artificial Sequence: Synthetic primer
tcgctatgctaagtccatatctcaaagt

SEQ ID NO: 10951 - DNA, 25 bp, Artificial Sequence
  Description of Artificial Sequence: Synthetic primer
aggagagactctgccaattcacata

SEQ ID NO: 10952 - DNA, 25 bp, Artificial Sequence
  Description of Artificial Sequence: Synthetic primer
tggttttgacattacgtgatgcttg

SEQ ID NO: 10953 - DNA, 23 bp, Artificial Sequence
  Description of Artificial Sequence: Synthetic primer
gtctggactgaaactcacttgct

SEQ ID NO: 10954 - DNA, 21 bp, Artificial Sequence
  Description of Artificial Sequence: Synthetic primer
gggacctggacaacagtgatg

SEQ ID NO: 10955 - DNA, 28 bp, Artificial Sequence
  Description of Artificial Sequence: Synthetic primer
tcctatctgcttgacagatttctgaaag

SEQ ID NO: 10956 - DNA, 21 bp, Artificial Sequence
  Description of Artificial Sequence: Synthetic primer
gcctctgctcaggtgaagaat

SEQ ID NO: 10957 - DNA, 29 bp, Artificial Sequence
  Description of Artificial Sequence: Synthetic primer
aaatgagtataatgtacagcaagccagaa

SEQ ID NO: 10958 - DNA, 22 bp, Artificial Sequence
  Description of Artificial Sequence: Synthetic primer
gcaggacacgacttgtacaaac

SEQ ID NO: 10959 - DNA, 24 bp, Artificial Sequence
  Description of Artificial Sequence: Synthetic primer
tgttaccagatcaaggaaggatgc

SEQ ID NO: 10960 - DNA, 22 bp, Artificial Sequence
  Description of Artificial Sequence: Synthetic primer
gggtggttcagaagcagagtag

SEQ ID NO: 10961 - DNA, 28 bp, Artificial Sequence
  Description of Artificial Sequence: Synthetic primer
aaaatgccaagactagataatagacggt

SEQ ID NO: 10962 - DNA, 28 bp, Artificial Sequence
  Description of Artificial Sequence: Synthetic primer
acccacaatatgtactatggagtcaaag

SEQ ID NO: 10963 - DNA, 28 bp, Artificial Sequence
  Description of Artificial Sequence: Synthetic primer
tgatggtagagtacaacatatagcacga

SEQ ID NO: 10964 - DNA, 19 bp, Artificial Sequence
  Description of Artificial Sequence: Synthetic primer
atggtccagtgcaggaggt

SEQ ID NO: 10965 - DNA, 29 bp, Artificial Sequence
  Description of Artificial Sequence: Synthetic primer
tagcctgaaaagcaatttatattgagtgg

SEQ ID NO: 10966 - DNA, 26 bp, Artificial Sequence
  Description of Artificial Sequence: Synthetic primer
agtgcagatcatacttcttgattcgt

SEQ ID NO: 10967 - DNA, 27 bp, Artificial Sequence
  Description of Artificial Sequence: Synthetic primer
ttctcagatgttacagaaatgaagcca

SEQ ID NO: 10968 - DNA, 28 bp, Artificial Sequence
  Description of Artificial Sequence: Synthetic primer
agcagaaattgcattatgagaaacacaa

SEQ ID NO: 10969 - DNA, 22 bp, Artificial Sequence
  Description of Artificial Sequence: Synthetic primer
aagaaatgcttgctcgctgaaa

SEQ ID NO: 10970 - DNA, 25 bp, Artificial Sequence
  Description of Artificial Sequence: Synthetic primer
tgcaaggagtatcatcagtaacagc

SEQ ID NO: 10971 - DNA, 26 bp, Artificial Sequence
  Description of Artificial Sequence: Synthetic primer
gcatatcttatgaatctccgtgggaa

SEQ ID NO: 10972 - DNA, 22 bp, Artificial Sequence
  Description of Artificial Sequence: Synthetic primer
gatggcatggaggctaggattt

SEQ ID NO: 10973 - DNA, 21 bp, Artificial Sequence
  Description of Artificial Sequence: Synthetic primer
ataccaaccaggcacagtcat

SEQ ID NO: 10974 - DNA, 22 bp, Artificial Sequence
  Description of Artificial Sequence: Synthetic primer
gtcaacgccaactccaagaaat

SEQ ID NO: 10975 - DNA, 20 bp, Artificial Sequence
  Description of Artificial Sequence: Synthetic primer
gtcctgtgctggcatgttga

SEQ ID NO: 10976 - DNA, 19 bp, Artificial Sequence
  Description of Artificial Sequence: Synthetic primer
ttcagccgcggatctcaaa

SEQ ID NO: 10977 - DNA, 27 bp, Artificial Sequence
  Description of Artificial Sequence: Synthetic primer
gttgtttctttatttccccttctccag

SEQ ID NO: 10978 - DNA, 27 bp, Artificial Sequence
  Description of Artificial Sequence: Synthetic primer
aacagaacaccagggttacatatactc

SEQ ID NO: 10979 - DNA, 25 bp, Artificial Sequence
  Description of Artificial Sequence: Synthetic primer
gagctcgtcgtaagcttttctatca

SEQ ID NO: 10980 - DNA, 28 bp, Artificial Sequence
  Description of Artificial Sequence: Synthetic primer
ggttaagtgatgtccttatcatgacctt

SEQ ID NO: 10981 - DNA, 24 bp, Artificial Sequence
  Description of Artificial Sequence: Synthetic primer
actgtgcaagatgttctgatctgg

SEQ ID NO: 10982 - DNA, 18 bp, Artificial Sequence
  Description of Artificial Sequence: Synthetic primer
cgagtccgcctcagaggt

SEQ ID NO: 10983 - DNA, 24 bp, Artificial Sequence
  Description of Artificial Sequence: Synthetic primer
agtgtatctgtatgtggtccatgc

SEQ ID NO: 10984 - DNA, 21 bp, Artificial Sequence
  Description of Artificial Sequence: Synthetic primer
ggccaagtggacgctaacata

SEQ ID NO: 10985 - DNA, 27 bp, Artificial Sequence
  Description of Artificial Sequence: Synthetic primer
agtctactggttacttgatacgtacga

SEQ ID NO: 10986 - DNA, 19 bp, Artificial Sequence
  Description of Artificial Sequence: Synthetic primer
tgcaggtgaactcgtgagc

SEQ ID NO: 10987 - DNA, 28 bp, Artificial Sequence
  Description of Artificial Sequence: Synthetic primer
agtatacaccgtatctaccaaataagcc

SEQ ID NO: 10988 - DNA, 27 bp, Artificial Sequence
  Description of Artificial Sequence: Synthetic primer
aggaacgtgagaaattgcacataaaac

SEQ ID NO: 10989 - DNA, 28 bp, Artificial Sequence
  Description of Artificial Sequence: Synthetic primer
agctacaaacctacacttcattaagcat

SEQ ID NO: 10990 - DNA, 21 bp, Artificial Sequence
  Description of Artificial Sequence: Synthetic primer
cccaagctacagcaggaactc

SEQ ID NO: 10991 - DNA, 21 bp, Artificial Sequence
  Description of Artificial Sequence: Synthetic primer
acagtgtgggtggagaagaca

SEQ ID NO: 10992 - DNA, 20 bp, Artificial Sequence
  Description of Artificial Sequence: Synthetic primer
tgttgggtcaagccaccatt

SEQ ID NO: 10993 - DNA, 25 bp, Artificial Sequence
  Description of Artificial Sequence: Synthetic primer
tgtcatttccaacaaactcggttac

SEQ ID NO: 10994 - DNA, 23 bp, Artificial Sequence
  Description of Artificial Sequence: Synthetic primer
ccatgtcagcatggaacctatca

SEQ ID NO: 10995 - DNA, 26 bp, Artificial Sequence
  Description of Artificial Sequence: Synthetic primer
tggttgagttgactgcataatttcca

SEQ ID NO: 10996 - DNA, 26 bp, Artificial Sequence
  Description of Artificial Sequence: Synthetic primer
gaaggttgtaccttagcatagtcaga

SEQ ID NO: 10997 - DNA, 26 bp, Artificial Sequence
  Description of Artificial Sequence: Synthetic primer
caagagtggtttgcaactaaacatga

SEQ ID NO: 10998 - DNA, 25 bp, Artificial Sequence
  Description of Artificial Sequence: Synthetic primer
acgattttcttcacttgtgagatgc

SEQ ID NO: 10999 - DNA, 21 bp, Artificial Sequence
  Description of Artificial Sequence: Synthetic primer
gtcctttgcaagtcggtcaag

SEQ ID NO: 11000 - DNA, 25 bp, Artificial Sequence
  Description of Artificial Sequence: Synthetic primer
gctgatatctcttcatttgggcaga

SEQ ID NO: 11001 - DNA, 27 bp, Artificial Sequence
  Description of Artificial Sequence: Synthetic primer
cttggtcggaaatttatcagtgagtcc

SEQ ID NO: 11002 - DNA, 25 bp, Artificial Sequence
  Description of Artificial Sequence: Synthetic primer
aacagaggaacacacatcaggtaag

SEQ ID NO: 11003 - DNA, 21 bp, Artificial Sequence
  Description of Artificial Sequence: Synthetic primer
tcgcgatgccacagtagattc

SEQ ID NO: 11004 - DNA, 23 bp, Artificial Sequence
  Description of Artificial Sequence: Synthetic primer
gcaacatggaccggatcaatcta

SEQ ID NO: 11005 - DNA, 26 bp, Artificial Sequence
  Description of Artificial Sequence: Synthetic primer
ccacctgtagcttctttggatatgaa

SEQ ID NO: 11006 - DNA, 26 bp, Artificial Sequence
  Description of Artificial Sequence: Synthetic primer
aagctaaaacatgttcaggttggtac

SEQ ID NO: 11007 - DNA, 19 bp, Artificial Sequence
  Description of Artificial Sequence: Synthetic primer
ccttctggcctggtgttca

SEQ ID NO: 11008 - DNA, 27 bp, Artificial Sequence
  Description of Artificial Sequence: Synthetic primer
aagttttgatacctaccaacaacagtg

SEQ ID NO: 11009 - DNA, 19 bp, Artificial Sequence
  Description of Artificial Sequence: Synthetic primer
cagttggactgcgtgctac

SEQ ID NO: 11010 - DNA, 19 bp, Artificial Sequence
  Description of Artificial Sequence: Synthetic primer
cgccaccggaagctaatcc

SEQ ID NO: 11011 - DNA, 27 bp, Artificial Sequence
  Description of Artificial Sequence: Synthetic primer
ctgcacaatgacatatccgtcaatagg

SEQ ID NO: 11012 - DNA, 21 bp, Artificial Sequence
  Description of Artificial Sequence: Synthetic primer
gccgtcttctcaaggtctgtc

SEQ ID NO: 11013 - DNA, 24 bp, Artificial Sequence
  Description of Artificial Sequence: Synthetic primer
tgtcacaatgtgcttctaaatggg

SEQ ID NO: 11014 - DNA, 29 bp, Artificial Sequence
  Description of Artificial Sequence: Synthetic primer
gtttctcgttcattccaatttcctaaagt

SEQ ID NO: 11015 - DNA, 24 bp, Artificial Sequence
  Description of Artificial Sequence: Synthetic primer
gtttccaattctaccaagggcatc

SEQ ID NO: 11016 - DNA, 28 bp, Artificial Sequence
  Description of Artificial Sequence: Synthetic primer
agacacatggaaactttgtaagatagca

SEQ ID NO: 11017 - DNA, 27 bp, Artificial Sequence
  Description of Artificial Sequence: Synthetic primer
atgtatgccgtttaaaatgtcgtttca

SEQ ID NO: 11018 - DNA, 26 bp, Artificial Sequence
  Description of Artificial Sequence: Synthetic primer
catatgtactacgttcttacggctga

SEQ ID NO: 11019 - DNA, 23 bp, Artificial Sequence
  Description of Artificial Sequence: Synthetic primer
gggacgttgtaccctgtactatg

SEQ ID NO: 11020 - DNA, 29 bp, Artificial Sequence
  Description of Artificial Sequence: Synthetic primer
catcgctatagggtaatcaataccaacat

SEQ ID NO: 11021 - DNA, 28 bp, Artificial Sequence
  Description of Artificial Sequence: Synthetic primer
tgtttttcaggagtagtggtacttccta

SEQ ID NO: 11022 - DNA, 26 bp, Artificial Sequence
  Description of Artificial Sequence: Synthetic primer
aaagatgcttgccataacaaacaagt

SEQ ID NO: 11023 - DNA, 30 bp, Artificial Sequence
  Description of Artificial Sequence: Synthetic primer
ttggcattagaaactgtaaataaaccaact

SEQ ID NO: 11024 - DNA, 21 bp, Artificial Sequence
  Description of Artificial Sequence: Synthetic primer
aagtggtccatctttggcagt

SEQ ID NO: 11025 - DNA, 27 bp, Artificial Sequence
  Description of Artificial Sequence: Synthetic primer
attcagccgaattattaaaaccaggag

SEQ ID NO: 11026 - DNA, 18 bp, Artificial Sequence
  Description of Artificial Sequence: Synthetic primer
cggcggcttgaccatgtt

SEQ ID NO: 11027 - DNA, 22 bp, Artificial Sequence
  Description of Artificial Sequence: Synthetic primer
caccccattgaagagcacctta

SEQ ID NO: 11028 - DNA, 26 bp, Artificial Sequence
  Description of Artificial Sequence: Synthetic primer
gaggatggatgcaaatcttgagatga

SEQ ID NO: 11029 - DNA, 25 bp, Artificial Sequence
  Description of Artificial Sequence: Synthetic primer
gtattcacctccctttaccactctc

SEQ ID NO: 11030 - DNA, 25 bp, Artificial Sequence
  Description of Artificial Sequence: Synthetic primer
catgtagttgcagttagcacatagc

SEQ ID NO: 11031 - DNA, 28 bp, Artificial Sequence
  Description of Artificial Sequence: Synthetic primer
tcttacgagtattgctttactgacagtg

SEQ ID NO: 11032 - DNA, 24 bp, Artificial Sequence
  Description of Artificial Sequence: Synthetic primer
cgagcaatggagggatgaattagt

SEQ ID NO: 11033 - DNA, 21 bp, Artificial Sequence
  Description of Artificial Sequence: Synthetic primer
caatcagatcaccgtccccaa

SEQ ID NO: 11034 - DNA, 28 bp, Artificial Sequence
  Description of Artificial Sequence: Synthetic primer
tacttgacatcatttcagtacacatccc

SEQ ID NO: 11035 - DNA, 27 bp, Artificial Sequence
  Description of Artificial Sequence: Synthetic primer
cattgtttccatgcgaattagagtcat

SEQ ID NO: 11036 - DNA, 24 bp, Artificial Sequence
  Description of Artificial Sequence: Synthetic primer
aaaaactggacgaggccaattact

SEQ ID NO: 11037 - DNA, 24 bp, Artificial Sequence
  Description of Artificial Sequence: Synthetic primer
atggctactagactgcaaaagctg

SEQ ID NO: 11038 - DNA, 27 bp, Artificial Sequence
  Description of Artificial Sequence: Synthetic primer
cgctatgctaagtccatatctcaaagg

SEQ ID NO: 11039 - DNA, 21 bp, Artificial Sequence
  Description of Artificial Sequence: Synthetic primer
gacacaaggtgaagcacactc

SEQ ID NO: 11040 - DNA, 28 bp, Artificial Sequence
  Description of Artificial Sequence: Synthetic primer
caagtttttcagtcaccctacagtttac

SEQ ID NO: 11041 - DNA, 21 bp, Artificial Sequence
  Description of Artificial Sequence: Synthetic primer
gagggcaacacgtgaactctt

SEQ ID NO: 11042 - DNA, 26 bp, Artificial Sequence
  Description of Artificial Sequence: Synthetic primer
ggtgttttcgtttcgcttgattttag

SEQ ID NO: 11043 - DNA, 25 bp, Artificial Sequence
  Description of Artificial Sequence: Synthetic primer
tacaagaagcagtttctgaggtcat

SEQ ID NO: 11044 - DNA, 21 bp, Artificial Sequence
  Description of Artificial Sequence: Synthetic primer
gactgggagggtggatacttc

SEQ ID NO: 11045 - DNA, 28 bp, Artificial Sequence
  Description of Artificial Sequence: Synthetic primer
aattccactatttcacactggttttctg

SEQ ID NO: 11046 - DNA, 22 bp, Artificial Sequence
  Description of Artificial Sequence: Synthetic primer
gcaaacgccaatcagaacagtg

SEQ ID NO: 11047 - DNA, 27 bp, Artificial Sequence
  Description of Artificial Sequence: Synthetic primer
cagtatttgacgatcactagaccagat

SEQ ID NO: 11048 - DNA, 22 bp, Artificial Sequence
  Description of Artificial Sequence: Synthetic primer
agtgcagggaatacacgtagtg

SEQ ID NO: 11049 - DNA, 21 bp, Artificial Sequence
  Description of Artificial Sequence: Synthetic primer
gtaggttgtgctttgcacagt

SEQ ID NO: 11050 - DNA, 22 bp, Artificial Sequence
  Description of Artificial Sequence: Synthetic primer
ggcgtgcaaccatacatgtatc

SEQ ID NO: 11051 - DNA, 28 bp, Artificial Sequence
  Description of Artificial Sequence: Synthetic primer
aacgatttgttcaaaccatagttccaat

SEQ ID NO: 11052 - DNA, 21 bp, Artificial Sequence
  Description of Artificial Sequence: Synthetic primer
cgccaggttctgctacttgaa

SEQ ID NO: 11053 - DNA, 30 bp, Artificial Sequence
  Description of Artificial Sequence: Synthetic primer
ggtaaggaacatgatgaatggctcatataa

SEQ ID NO: 11054 - DNA, 28 bp, Artificial Sequence
  Description of Artificial Sequence: Synthetic primer
tgaattgaccaaacttgaaaccatttga

SEQ ID NO: 11055 - DNA, 23 bp, Artificial Sequence
  Description of Artificial Sequence: Synthetic primer
cgtcggtagcattgatgttcttc

SEQ ID NO: 11056 - DNA, 22 bp, Artificial Sequence
  Description of Artificial Sequence: Synthetic primer
ctccatggagttaggacgttcg

SEQ ID NO: 11057 - DNA, 28 bp, Artificial Sequence
  Description of Artificial Sequence: Synthetic primer
attttcaatgacagaaattggcatcaac

SEQ ID NO: 11058 - DNA, 23 bp, Artificial Sequence
  Description of Artificial Sequence: Synthetic primer
agaggaatcagcaaggcatcttt

SEQ ID NO: 11059 - DNA, 28 bp, Artificial Sequence
  Description of Artificial Sequence: Synthetic primer
tgagacaaattgataccctaccttacac

SEQ ID NO: 11060 - DNA, 27 bp, Artificial Sequence
  Description of Artificial Sequence: Synthetic primer
tcctgtttcatcttcaattctttgtcg

SEQ ID NO: 11061 - DNA, 23 bp, Artificial Sequence
  Description of Artificial Sequence: Synthetic primer
agattcatcttaaccgcatccca

SEQ ID NO: 11062 - DNA, 27 bp, Artificial Sequence
  Description of Artificial Sequence: Synthetic primer
gggtggtataactcttgaaatgtctgc

SEQ ID NO: 11063 - DNA, 26 bp, Artificial Sequence
  Description of Artificial Sequence: Synthetic primer
caatctagccaatgaactggaggtaa

SEQ ID NO: 11064 - DNA, 21 bp, Artificial Sequence
  Description of Artificial Sequence: Synthetic primer
cgcaggatagagccatggaag

SEQ ID NO: 11065 - DNA, 26 bp, Artificial Sequence
  Description of Artificial Sequence: Synthetic primer
cccggatctgtcatatacccaatatc

SEQ ID NO: 11066 - DNA, 21 bp, Artificial Sequence
  Description of Artificial Sequence: Synthetic primer
gctcaacatcaccaacagctt

SEQ ID NO: 11067 - DNA, 21 bp, Artificial Sequence
  Description of Artificial Sequence: Synthetic primer
tggcacgcctgatgagttaaa

SEQ ID NO: 11068 - DNA, 22 bp, Artificial Sequence
  Description of Artificial Sequence: Synthetic primer
ggacagaggcagcgtctaatac

SEQ ID NO: 11069 - DNA, 27 bp, Artificial Sequence
  Description of Artificial Sequence: Synthetic primer
tcaaacaccatctaagttacaactcct

SEQ ID NO: 11070 - DNA, 24 bp, Artificial Sequence
  Description of Artificial Sequence: Synthetic primer
acagaacaggaagagtacatcgga

SEQ ID NO: 11071 - DNA, 24 bp, Artificial Sequence
  Description of Artificial Sequence: Synthetic primer
agtgttagtaacttgtggcactct

SEQ ID NO: 11072 - DNA, 24 bp, Artificial Sequence
  Description of Artificial Sequence: Synthetic primer
catcccagccagacttcaaatctt

SEQ ID NO: 11073 - DNA, 27 bp, Artificial Sequence
  Description of Artificial Sequence: Synthetic primer
ttatttgcatttgttgcagatctcctt

SEQ ID NO: 11074 - DNA, 27 bp, Artificial Sequence
  Description of Artificial Sequence: Synthetic primer
tatagtgtgcaacaagtgaaccattct

SEQ ID NO: 11075 - DNA, 25 bp, Artificial Sequence
  Description of Artificial Sequence: Synthetic primer
agaggttttctatatcgctctgcac

SEQ ID NO: 11076 - DNA, 25 bp, Artificial Sequence
  Description of Artificial Sequence: Synthetic primer
tgaccttcaaatacagctagggatg

SEQ ID NO: 11077 - DNA, 21 bp, Artificial Sequence
  Description of Artificial Sequence: Synthetic primer
gcagatcagcaaatgcttgcc

SEQ ID NO: 11078 - DNA, 28 bp, Artificial Sequence
  Description of Artificial Sequence: Synthetic primer
tgaacctccatatattttgcacactttg

SEQ ID NO: 11079 - DNA, 24 bp, Artificial Sequence
  Description of Artificial Sequence: Synthetic primer
catgcatgtgctctaccgtttaag

SEQ ID NO: 11080 - DNA, 28 bp, Artificial Sequence
  Description of Artificial Sequence: Synthetic primer
gattatttcttgaaattctacggcgaca

SEQ ID NO: 11081 - DNA, 22 bp, Artificial Sequence
  Description of Artificial Sequence: Synthetic primer
ccaagagcatcaagtcactggt

SEQ ID NO: 11082 - DNA, 26 bp, Artificial Sequence
  Description of Artificial Sequence: Synthetic primer
actttacaatcccttctaacagcaca

SEQ ID NO: 11083 - DNA, 20 bp, Artificial Sequence
  Description of Artificial Sequence: Synthetic primer
gcttgctggcatgaagtgtg

SEQ ID NO: 11084 - DNA, 27 bp, Artificial Sequence
  Description of Artificial Sequence: Synthetic primer
agttgagtaccgataatgttgtcaagt

SEQ ID NO: 11085 - DNA, 25 bp, Artificial Sequence
  Description of Artificial Sequence: Synthetic primer
atacaacatggaatggaaggaggga

SEQ ID NO: 11086 - DNA, 28 bp, Artificial Sequence
  Description of Artificial Sequence: Synthetic primer
accagaaagacttcaaatttagggcata

SEQ ID NO: 11087 - DNA, 22 bp, Artificial Sequence
  Description of Artificial Sequence: Synthetic primer
ctgcagtgaagaacacacggta

SEQ ID NO: 11088 - DNA, 21 bp, Artificial Sequence
  Description of Artificial Sequence: Synthetic primer
cttgctggtccaggaaggatc

SEQ ID NO: 11089 - DNA, 21 bp, Artificial Sequence
  Description of Artificial Sequence: Synthetic primer
cgcgactgagaagatgatgct

SEQ ID NO: 11090 - DNA, 28 bp, Artificial Sequence
  Description of Artificial Sequence: Synthetic primer
gtgttctttgttcttgcactaagttagc

SEQ ID NO: 11091 - DNA, 24 bp, Artificial Sequence
  Description of Artificial Sequence: Synthetic primer
ctttacccgctcttaccatgacac

SEQ ID NO: 11092 - DNA, 23 bp, Artificial Sequence
  Description of Artificial Sequence: Synthetic primer
acatgtgataggtacaggccttg

SEQ ID NO: 11093 - DNA, 21 bp, Artificial Sequence
  Description of Artificial Sequence: Synthetic primer
ccccgggaacctgctcatata

SEQ ID NO: 11094 - DNA, 23 bp, Artificial Sequence
  Description of Artificial Sequence: Synthetic primer
atcatcacctcctctcaaccgat

SEQ ID NO: 11095 - DNA, 25 bp, Artificial Sequence
  Description of Artificial Sequence: Synthetic primer
gtcccatcactcatggaaaagagat

SEQ ID NO: 11096 - DNA, 23 bp, Artificial Sequence
  Description of Artificial Sequence: Synthetic primer
agtttttcatgatcgggtcgaca

SEQ ID NO: 11097 - DNA, 23 bp, Artificial Sequence
  Description of Artificial Sequence: Synthetic primer
gatactgttgttgcggtggatac

SEQ ID NO: 11098 - DNA, 24 bp, Artificial Sequence
  Description of Artificial Sequence: Synthetic primer
cggatagcctaatatcgaccgtct

SEQ ID NO: 11099 - DNA, 21 bp, Artificial Sequence
  Description of Artificial Sequence: Synthetic primer
aaaccaccgatgagagcgatg

SEQ ID NO: 11100 - DNA, 24 bp, Artificial Sequence
  Description of Artificial Sequence: Synthetic primer
caatgagaatcatagctggcactg

SEQ ID NO: 11101 - DNA, 24 bp, Artificial Sequence
  Description of Artificial Sequence: Synthetic primer
catcctctcagttgcaaacctttt

SEQ ID NO: 11102 - DNA, 22 bp, Artificial Sequence
  Description of Artificial Sequence: Synthetic primer
acagcttcccactgaaagaaga

SEQ ID NO: 11103 - DNA, 21 bp, Artificial Sequence
  Description of Artificial Sequence: Synthetic primer
ctgcgagaagctcttctgtcc

SEQ ID NO: 11104 - DNA, 21 bp, Artificial Sequence
  Description of Artificial Sequence: Synthetic primer
catccgtgcaaacagcatcag

SEQ ID NO: 11105 - DNA, 23 bp, Artificial Sequence
  Description of Artificial Sequence: Synthetic primer
tatcagagctcccagagttctgt

SEQ ID NO: 11106 - DNA, 28 bp, Artificial Sequence
  Description of Artificial Sequence: Synthetic primer
tcacatacttgatgttatcttcacgaca

SEQ ID NO: 11107 - DNA, 22 bp, Artificial Sequence
  Description of Artificial Sequence: Synthetic primer
gcgatagctgttgctctgaaga

SEQ ID NO: 11108 - DNA, 21 bp, Artificial Sequence
  Description of Artificial Sequence: Synthetic primer
gcccgatcctcagctacagta

SEQ ID NO: 11109 - DNA, 21 bp, Artificial Sequence
  Description of Artificial Sequence: Synthetic primer
aatcagacagcacggacatgg

SEQ ID NO: 11110 - DNA, 19 bp, Artificial Sequence
  Description of Artificial Sequence: Synthetic primer
cgatcccttcgctctcctg

SEQ ID NO: 11111 - DNA, 23 bp, Artificial Sequence
  Description of Artificial Sequence: Synthetic primer
gctgctaatgaacgggtgaaaaa

SEQ ID NO: 11112 - DNA, 23 bp, Artificial Sequence
  Description of Artificial Sequence: Synthetic primer
agccagtcagtgtaacttttggt

SEQ ID NO: 11113 - DNA, 20 bp, Artificial Sequence
  Description of Artificial Sequence: Synthetic primer
gtgggtatacgttggtgcga

SEQ ID NO: 11114 - DNA, 25 bp, Artificial Sequence
  Description of Artificial Sequence: Synthetic primer
ttttcagtgcgaaagtagacatgac

SEQ ID NO: 11115 - DNA, 25 bp, Artificial Sequence
  Description of Artificial Sequence: Synthetic primer
gtgcttcaaataccatccatccaga

SEQ ID NO: 11116 - DNA, 27 bp, Artificial Sequence
  Description of Artificial Sequence: Synthetic primer
tcggtcgttatctttgctagtattgtg

SEQ ID NO: 11117 - DNA, 21 bp, Artificial Sequence
  Description of Artificial Sequence: Synthetic primer
ggcaagcaggaactctgattc

SEQ ID NO: 11118 - DNA, 29 bp, Artificial Sequence
  Description of Artificial Sequence: Synthetic primer
catttataagctgaaaccccaaaagaaca

SEQ ID NO: 11119 - DNA, 21 bp, Artificial Sequence
  Description of Artificial Sequence: Synthetic primer
attcttcctgtcgagggtgtc

SEQ ID NO: 11120 - DNA, 28 bp, Artificial Sequence
  Description of Artificial Sequence: Synthetic primer
aggaaatgttggaaatgacaagattgtt

SEQ ID NO: 11121 - DNA, 24 bp, Artificial Sequence
  Description of Artificial Sequence: Synthetic primer
aggttaaattttctcggtggccaa

SEQ ID NO: 11122 - DNA, 28 bp, Artificial Sequence
  Description of Artificial Sequence: Synthetic primer
gtgtcatactgtgggaactatgtacatt

SEQ ID NO: 11123 - DNA, 21 bp, Artificial Sequence
  Description of Artificial Sequence: Synthetic primer
atgaaggcatgggcaaagtca

SEQ ID NO: 11124 - DNA, 23 bp, Artificial Sequence
  Description of Artificial Sequence: Synthetic primer
gccatctccataggaaaccaaac

SEQ ID NO: 11125 - DNA, 21 bp, Artificial Sequence
  Description of Artificial Sequence: Synthetic primer
gagaaggccactcacctcaag

SEQ ID NO: 11126 - DNA, 23 bp, Artificial Sequence
  Description of Artificial Sequence: Synthetic primer
gcgccaaacctcaagatattgga

SEQ ID NO: 11127 - DNA, 27 bp, Artificial Sequence
  Description of Artificial Sequence: Synthetic primer
agataattgaggatcccaaggacctta

SEQ ID NO: 11128 - DNA, 28 bp, Artificial Sequence
  Description of Artificial Sequence: Synthetic primer
tgagaataagtgatttcaaacgtgcaca

SEQ ID NO: 11129 - DNA, 25 bp, Artificial Sequence
  Description of Artificial Sequence: Synthetic primer
atgaaggtgacattttcttgccatt

SEQ ID NO: 11130 - DNA, 27 bp, Artificial Sequence
  Description of Artificial Sequence: Synthetic primer
tctcatttcatttctcgggatgatagc

SEQ ID NO: 11131 - DNA, 30 bp, Artificial Sequence
  Description of Artificial Sequence: Synthetic primer
aaataaaggcacaagtactttcaactgatc

SEQ ID NO: 11132 - DNA, 19 bp, Artificial Sequence
  Description of Artificial Sequence: Synthetic primer
aggttctgccagaggacga

SEQ ID NO: 11133 - DNA, 21 bp, Artificial Sequence
  Description of Artificial Sequence: Synthetic primer
gtctgaggtgcttgcaattgg

SEQ ID NO: 11134 - DNA, 21 bp, Artificial Sequence
  Description of Artificial Sequence: Synthetic primer
cgcttctccaggtctaggttc

SEQ ID NO: 11135 - DNA, 19 bp, Artificial Sequence
  Description of Artificial Sequence: Synthetic primer
ccaggcgataccaagctga

SEQ ID NO: 11136 - DNA, 24 bp, Artificial Sequence
  Description of Artificial Sequence: Synthetic primer
aggaaaatccagcagcattacttg

SEQ ID NO: 11137 - DNA, 28 bp, Artificial Sequence
  Description of Artificial Sequence: Synthetic primer
tacattatcagcataagtagagggagga

SEQ ID NO: 11138 - DNA, 19 bp, Artificial Sequence
  Description of Artificial Sequence: Synthetic primer
atcaagcaggtccgggtct

SEQ ID NO: 11139 - DNA, 27 bp, Artificial Sequence
  Description of Artificial Sequence: Synthetic primer
cagatttcctcagataaaggctcatcc

SEQ ID NO: 11140 - DNA, 22 bp, Artificial Sequence
  Description of Artificial Sequence: Synthetic primer
accgtttgttctccagcagtat

SEQ ID NO: 11141 - DNA, 22 bp, Artificial Sequence
  Description of Artificial Sequence: Synthetic primer
agtatcgaggagactggtgcaa

SEQ ID NO: 11142 - DNA, 21 bp, Artificial Sequence
  Description of Artificial Sequence: Synthetic primer
tgcaattgacgctaggaagga

SEQ ID NO: 11143 - DNA, 22 bp, Artificial Sequence
  Description of Artificial Sequence: Synthetic primer
gaagcgagttgagtgagtttgc

SEQ ID NO: 11144 - DNA, 21 bp, Artificial Sequence
  Description of Artificial Sequence: Synthetic primer
aacccagagcttttgagcgtt

SEQ ID NO: 11145 - DNA, 27 bp, Artificial Sequence
  Description of Artificial Sequence: Synthetic primer
agcaatcgcatatagatcattcgatca

SEQ ID NO: 11146 - DNA, 24 bp, Artificial Sequence
  Description of Artificial Sequence: Synthetic primer
tatggagactttggattgatgcct

SEQ ID NO: 11147 - DNA, 21 bp, Artificial Sequence
  Description of Artificial Sequence: Synthetic primer
gaagttgagtgatcgcaccca

SEQ ID NO: 11148 - DNA, 26 bp, Artificial Sequence
  Description of Artificial Sequence: Synthetic primer
tcacggaaaatgaatgtaaacccaga

SEQ ID NO: 11149 - DNA, 19 bp, Artificial Sequence
  Description of Artificial Sequence: Synthetic primer
gcagtgcaatccccgaact

SEQ ID NO: 11150 - DNA, 21 bp, Artificial Sequence
  Description of Artificial Sequence: Synthetic primer
ccggtttcagctactgacgat

SEQ ID NO: 11151 - DNA, 28 bp, Artificial Sequence
  Description of Artificial Sequence: Synthetic primer
gtcacgattgttggtacttatttcttgc

SEQ ID NO: 11152 - DNA, 19 bp, Artificial Sequence
  Description of Artificial Sequence: Synthetic primer
gcagccaaccaagctgtac

SEQ ID NO: 11153 - DNA, 23 bp, Artificial Sequence
  Description of Artificial Sequence: Synthetic primer
ctgttgaactggacgatagacac

SEQ ID NO: 11154 - DNA, 23 bp, Artificial Sequence
  Description of Artificial Sequence: Synthetic primer
cctttggtgggttcatgatgaga

SEQ ID NO: 11155 - DNA, 25 bp, Artificial Sequence
  Description of Artificial Sequence: Synthetic primer
cgagctaaagatacaaatggcctga

SEQ ID NO: 11156 - DNA, 21 bp, Artificial Sequence
  Description of Artificial Sequence: Synthetic primer
gtgacgggaaacgtgacaaac

SEQ ID NO: 11157 - DNA, 25 bp, Artificial Sequence
  Description of Artificial Sequence: Synthetic primer
gagtccagatattcgcaagactgtt

SEQ ID NO: 11158 - DNA, 22 bp, Artificial Sequence
  Description of Artificial Sequence: Synthetic primer
cgtgcagcattttggacaatga

SEQ ID NO: 11159 - DNA, 28 bp, Artificial Sequence
  Description of Artificial Sequence: Synthetic primer
aagagataaacatggtcttgggttaaca

SEQ ID NO: 11160 - DNA, 21 bp, Artificial Sequence
  Description of Artificial Sequence: Synthetic primer
ttccgaatcacttccgcttgg

SEQ ID NO: 11161 - DNA, 26 bp, Artificial Sequence
  Description of Artificial Sequence: Synthetic primer
ttttgctacccctgatttccatagtt

SEQ ID NO: 11162 - DNA, 28 bp, Artificial Sequence
  Description of Artificial Sequence: Synthetic primer
cccgtctgtagatctcttacaatcaaat

SEQ ID NO: 11163 - DNA, 26 bp, Artificial Sequence
  Description of Artificial Sequence: Synthetic primer
ccgaataacatctgcacgaaagattt

SEQ ID NO: 11164 - DNA, 22 bp, Artificial Sequence
  Description of Artificial Sequence: Synthetic primer
cattgacgatccttccatccga

SEQ ID NO: 11165 - DNA, 21 bp, Artificial Sequence
  Description of Artificial Sequence: Synthetic primer
gagtggatgacatggctgtcg

SEQ ID NO: 11166 - DNA, 21 bp, Artificial Sequence
  Description of Artificial Sequence: Synthetic primer
aagttgggcgagcatgagatt

SEQ ID NO: 11167 - DNA, 21 bp, Artificial Sequence
  Description of Artificial Sequence: Synthetic primer
tgtggtggctgctgttattct

SEQ ID NO: 11168 - DNA, 25 bp, Artificial Sequence
  Description of Artificial Sequence: Synthetic primer
gcccaatttaacctgaagacaaacg

SEQ ID NO: 11169 - DNA, 28 bp, Artificial Sequence
  Description of Artificial Sequence: Synthetic primer
tattgatgattcactaagattggacggt

SEQ ID NO: 11170 - DNA, 26 bp, Artificial Sequence
  Description of Artificial Sequence: Synthetic primer
ggattagtgatgtctgcaaggatgat

SEQ ID NO: 11171 - DNA, 28 bp, Artificial Sequence
  Description of Artificial Sequence: Synthetic primer
tgatgatccatatgaatcaccagtgaat

SEQ ID NO: 11172 - DNA, 23 bp, Artificial Sequence
  Description of Artificial Sequence: Synthetic primer
ggacatcatgcagaacaactacc

SEQ ID NO: 11173 - DNA, 21 bp, Artificial Sequence
  Description of Artificial Sequence: Synthetic primer
ctccaatggcccttccaactt

SEQ ID NO: 11174 - DNA, 25 bp, Artificial Sequence
  Description of Artificial Sequence: Synthetic primer
ctccaggtaccattttgtgacctaa

SEQ ID NO: 11175 - DNA, 21 bp, Artificial Sequence
  Description of Artificial Sequence: Synthetic primer
atcattcagccgtaccctcca

SEQ ID NO: 11176 - DNA, 26 bp, Artificial Sequence
  Description of Artificial Sequence: Synthetic primer
tgtaacagaatcctcagccaatttca

SEQ ID NO: 11177 - DNA, 24 bp, Artificial Sequence
  Description of Artificial Sequence: Synthetic primer
tcttcaacacttctctccgctaac

SEQ ID NO: 11178 - DNA, 22 bp, Artificial Sequence
  Description of Artificial Sequence: Synthetic primer
gtcgtgcgtgtcaacaagtaag

SEQ ID NO: 11179 - DNA, 25 bp, Artificial Sequence
  Description of Artificial Sequence: Synthetic primer
tcaagatcctcattctggatgaagc

SEQ ID NO: 11180 - DNA, 22 bp, Artificial Sequence
  Description of Artificial Sequence: Synthetic primer
tggtctgtgatgtagctacgtg

SEQ ID NO: 11181 - DNA, 28 bp, Artificial Sequence
  Description of Artificial Sequence: Synthetic primer
tgacaatggagatgataccagagaaaag

SEQ ID NO: 11182 - DNA, 23 bp, Artificial Sequence
  Description of Artificial Sequence: Synthetic primer
acagacttactactgcggttgaa

SEQ ID NO: 11183 - DNA, 21 bp, Artificial Sequence
  Description of Artificial Sequence: Synthetic primer
ctagctcttccctcgcaatgg

SEQ ID NO: 11184 - DNA, 22 bp, Artificial Sequence
  Description of Artificial Sequence: Synthetic primer
gcagtcccagttcaagtgaatc

SEQ ID NO: 11185 - DNA, 22 bp, Artificial Sequence
  Description of Artificial Sequence: Synthetic primer
agaatggcacgcagaaaagttt

SEQ ID NO: 11186 - DNA, 21 bp, Artificial Sequence
  Description of Artificial Sequence: Synthetic primer
cctcgtcaccgatgcttagtt

SEQ ID NO: 11187 - DNA, 27 bp, Artificial Sequence
  Description of Artificial Sequence: Synthetic primer
gaggatgaaagtcatgtacggtacatt

SEQ ID NO: 11188 - DNA, 28 bp, Artificial Sequence
  Description of Artificial Sequence: Synthetic primer
tcgtttcaatcaacaaattagcttaggt

SEQ ID NO: 11189 - DNA, 19 bp, Artificial Sequence
  Description of Artificial Sequence: Synthetic primer
tgctggaacaccgaccttg

SEQ ID NO: 11190 - DNA, 27 bp, Artificial Sequence
  Description of Artificial Sequence: Synthetic primer
tgcaaacttatcaaactagatgccact

SEQ ID NO: 11191 - DNA, 23 bp, Artificial Sequence
  Description of Artificial Sequence: Synthetic primer
agccaactacgaggaaaatggat

SEQ ID NO: 11192 - DNA, 27 bp, Artificial Sequence
  Description of Artificial Sequence: Synthetic primer
gggaatccccatttctcttatgtatgg

SEQ ID NO: 11193 - DNA, 19 bp, Artificial Sequence
  Description of Artificial Sequence: Synthetic primer
cggaattcccgggatcgtg

SEQ ID NO: 11194 - DNA, 28 bp, Artificial Sequence
  Description of Artificial Sequence: Synthetic primer
cgcgttcttttggacctaaattatacca

SEQ ID NO: 11195 - DNA, 22 bp, Artificial Sequence
  Description of Artificial Sequence: Synthetic primer
gcaaaccattccacggaaactg

SEQ ID NO: 11196 - DNA, 27 bp, Artificial Sequence
  Description of Artificial Sequence: Synthetic primer
tgtatcacaggctaaaaactacactcc

SEQ ID NO: 11197 - DNA, 27 bp, Artificial Sequence
  Description of Artificial Sequence: Synthetic primer
agcaacaataataggcctacaaaacga

SEQ ID NO: 11198 - DNA, 21 bp, Artificial Sequence
  Description of Artificial Sequence: Synthetic primer
accacaacatgcttagaggct

SEQ ID NO: 11199 - DNA, 22 bp, Artificial Sequence
  Description of Artificial Sequence: Synthetic primer
agtgtaccacatgagggcaaaa

SEQ ID NO: 11200 - DNA, 25 bp, Artificial Sequence
  Description of Artificial Sequence: Synthetic primer
gcgtggcaatcttggtagtctataa

SEQ ID NO: 11201 - DNA, 25 bp, Artificial Sequence
  Description of Artificial Sequence: Synthetic primer
cgaggctcttcaagaagaaaagaag

SEQ ID NO: 11202 - DNA, 21 bp, Artificial Sequence
  Description of Artificial Sequence: Synthetic primer
tcaaaatggtccgcggagaaa

SEQ ID NO: 11203 - DNA, 22 bp, Artificial Sequence
  Description of Artificial Sequence: Synthetic primer
accttttccgagttttgtcgct

SEQ ID NO: 11204 - DNA, 25 bp, Artificial Sequence
  Description of Artificial Sequence: Synthetic primer
gggtgactatgtgttggacttagaa

SEQ ID NO: 11205 - DNA, 23 bp, Artificial Sequence
  Description of Artificial Sequence: Synthetic primer
ggctgctctcggtctaaatacag

SEQ ID NO: 11206 - DNA, 26 bp, Artificial Sequence
  Description of Artificial Sequence: Synthetic primer
gagatcagtaactatgctgggatgtt

SEQ ID NO: 11207 - DNA, 23 bp, Artificial Sequence
  Description of Artificial Sequence: Synthetic primer
atactatgtgcctctcctgcaga

SEQ ID NO: 11208 - DNA, 21 bp, Artificial Sequence
  Description of Artificial Sequence: Synthetic primer
ctgctgctcgagattctcaca

SEQ ID NO: 11209 - DNA, 21 bp, Artificial Sequence
  Description of Artificial Sequence: Synthetic primer
atgctgcgcgaggaatttgta

SEQ ID NO: 11210 - DNA, 22 bp, Artificial Sequence
  Description of Artificial Sequence: Synthetic primer
tccttaagggcttgctgtactg

SEQ ID NO: 11211 - DNA, 25 bp, Artificial Sequence
  Description of Artificial Sequence: Synthetic primer
gacttggctgttcacaattgtagtt

SEQ ID NO: 11212 - DNA, 22 bp, Artificial Sequence
  Description of Artificial Sequence: Synthetic primer
accaccaccatgacaaacagtc

SEQ ID NO: 11213 - DNA, 27 bp, Artificial Sequence
  Description of Artificial Sequence: Synthetic primer
tcagttgacattctctttttgctgaca

SEQ ID NO: 11214 - DNA, 25 bp, Artificial Sequence
  Description of Artificial Sequence: Synthetic primer
ttcagttcagtctgccatttctttg

SEQ ID NO: 11215 - DNA, 24 bp, Artificial Sequence
  Description of Artificial Sequence: Synthetic primer
aatgtcccttgccagagagaattt

SEQ ID NO: 11216 - DNA, 21 bp, Artificial Sequence
  Description of Artificial Sequence: Synthetic primer
tctcggaggatcttcgacgtt

SEQ ID NO: 11217 - DNA, 26 bp, Artificial Sequence
  Description of Artificial Sequence: Synthetic primer
aagattgtagctcttaaagaggcgat

SEQ ID NO: 11218 - DNA, 27 bp, Artificial Sequence
  Description of Artificial Sequence: Synthetic primer
tcttaatacaatggctgatgccttcaa

SEQ ID NO: 11219 - DNA, 21 bp, Artificial Sequence
  Description of Artificial Sequence: Synthetic primer
gccaagttaggctgccaaatg

SEQ ID NO: 11220 - DNA, 21 bp, Artificial Sequence
  Description of Artificial Sequence: Synthetic primer
accttcgatctgtgcggacta

SEQ ID NO: 11221 - DNA, 21 bp, Artificial Sequence
  Description of Artificial Sequence: Synthetic primer
atgaacccgctcttcaccatc

SEQ ID NO: 11222 - DNA, 21 bp, Artificial Sequence
  Description of Artificial Sequence: Synthetic primer
ccgggtatcaccaggaagact

SEQ ID NO: 11223 - DNA, 27 bp, Artificial Sequence
  Description of Artificial Sequence: Synthetic primer
gaacagttctttcaagcttccagaaat

SEQ ID NO: 11224 - DNA, 28 bp, Artificial Sequence
  Description of Artificial Sequence: Synthetic primer
tgaatcaactttgaatgttgttgctgtt

SEQ ID NO: 11225 - DNA, 28 bp, Artificial Sequence
  Description of Artificial Sequence: Synthetic primer
acagtacagagaacgtaagaacaaagaa

SEQ ID NO: 11226 - DNA, 21 bp, Artificial Sequence
  Description of Artificial Sequence: Synthetic primer
ggatccagttgtttgcgtgtc

SEQ ID NO: 11227 - DNA, 23 bp, Artificial Sequence
  Description of Artificial Sequence: Synthetic primer
gagattggtgttcctttcgctgt

SEQ ID NO: 11228 - DNA, 21 bp, Artificial Sequence
  Description of Artificial Sequence: Synthetic primer
cgggatcttgcacatccaaac

SEQ ID NO: 11229 - DNA, 26 bp, Artificial Sequence
  Description of Artificial Sequence: Synthetic primer
cacagtaaaggttttatgtgggcaat

SEQ ID NO: 11230 - DNA, 22 bp, Artificial Sequence
  Description of Artificial Sequence: Synthetic primer
tacggatcaccactttcagcat

SEQ ID NO: 11231 - DNA, 21 bp, Artificial Sequence
  Description of Artificial Sequence: Synthetic primer
ctcctaggcaggctgaaagat

SEQ ID NO: 11232 - DNA, 21 bp, Artificial Sequence
  Description of Artificial Sequence: Synthetic primer
cagcctcatgaccctttggat

SEQ ID NO: 11233 - DNA, 27 bp, Artificial Sequence
  Description of Artificial Sequence: Synthetic primer
ccccaattgcaaaaatgatcgaagtta

SEQ ID NO: 11234 - DNA, 26 bp, Artificial Sequence
  Description of Artificial Sequence: Synthetic primer
tctcattcatttcagtttgacatggg

SEQ ID NO: 11235 - DNA, 19 bp, Artificial Sequence
  Description of Artificial Sequence: Synthetic primer
cgggagagagcctagcctt

SEQ ID NO: 11236 - DNA, 21 bp, Artificial Sequence
  Description of Artificial Sequence: Synthetic primer
gtgtttccggatgaggaggag

SEQ ID NO: 11237 - DNA, 26 bp, Artificial Sequence
  Description of Artificial Sequence: Synthetic primer
aaaacagagcagaaagtaaaggtggt

SEQ ID NO: 11238 - DNA, 27 bp, Artificial Sequence
  Description of Artificial Sequence: Synthetic primer
tctaaggtttctggttacaaggaagac

SEQ ID NO: 11239 - DNA, 21 bp, Artificial Sequence
  Description of Artificial Sequence: Synthetic primer
tgccatctcatgccgaatagc

SEQ ID NO: 11240 - DNA, 28 bp, Artificial Sequence
  Description of Artificial Sequence: Synthetic primer
tatatttatcacgactgctccaattcct

SEQ ID NO: 11241 - DNA, 23 bp, Artificial Sequence
  Description of Artificial Sequence: Synthetic primer
ttcacaaagtgtcactctagcct

SEQ ID NO: 11242 - DNA, 23 bp, Artificial Sequence
  Description of Artificial Sequence: Synthetic primer
gagaatcaatccggcaggagtac

SEQ ID NO: 11243 - DNA, 21 bp, Artificial Sequence
  Description of Artificial Sequence: Synthetic primer
ttgttgctgcatctgcctgta

SEQ ID NO: 11244 - DNA, 26 bp, Artificial Sequence
  Description of Artificial Sequence: Synthetic primer
ctcttagcatgtgatctcgtagcaaa

SEQ ID NO: 11245 - DNA, 21 bp, Artificial Sequence
  Description of Artificial Sequence: Synthetic primer
gttgtgctcggttggataagg

SEQ ID NO: 11246 - DNA, 24 bp, Artificial Sequence
  Description of Artificial Sequence: Synthetic primer
gccctaacagattcagaacgttca

SEQ ID NO: 11247 - DNA, 27 bp, Artificial Sequence
  Description of Artificial Sequence: Synthetic primer
gaaatccgtaagaagattgagaagtgg

SEQ ID NO: 11248 - DNA, 27 bp, Artificial Sequence
  Description of Artificial Sequence: Synthetic primer
ggcctggcgattccaaaaatatatatc

SEQ ID NO: 11249 - DNA, 27 bp, Artificial Sequence
  Description of Artificial Sequence: Synthetic primer
aaggagaagtacatacaagttggcaat

SEQ ID NO: 11250 - DNA, 22 bp, Artificial Sequence
  Description of Artificial Sequence: Synthetic primer
agatgctcatccatcaaggcaa

SEQ ID NO: 11251 - DNA, 22 bp, Artificial Sequence
  Description of Artificial Sequence: Synthetic primer
ggaatagaatcgctccgtgcaa

SEQ ID NO: 11252 - DNA, 21 bp, Artificial Sequence
  Description of Artificial Sequence: Synthetic primer
agaaacagagggtcgccattg

SEQ ID NO: 11253 - DNA, 21 bp, Artificial Sequence
  Description of Artificial Sequence: Synthetic primer
tgaagtaccctttccgcaaca

SEQ ID NO: 11254 - DNA, 24 bp, Artificial Sequence
  Description of Artificial Sequence: Synthetic primer
tcaggctgaataaatccacaggtt

SEQ ID NO: 11255 - DNA, 21 bp, Artificial Sequence
  Description of Artificial Sequence: Synthetic primer
gaagaagcctcagcggaaatc

SEQ ID NO: 11256 - DNA, 28 bp, Artificial Sequence
  Description of Artificial Sequence: Synthetic primer
aggaaatgtaactaacaaggagtgaacc

SEQ ID NO: 11257 - DNA, 21 bp, Artificial Sequence
  Description of Artificial Sequence: Synthetic primer
cgtccctagctccccataagt

SEQ ID NO: 11258 - DNA, 21 bp, Artificial Sequence
  Description of Artificial Sequence: Synthetic primer
tgtagtcgctgccacttatgc

SEQ ID NO: 11259 - DNA, 21 bp, Artificial Sequence
  Description of Artificial Sequence: Synthetic primer
ggcgtcatgaagcctgtttac

SEQ ID NO: 11260 - DNA, 19 bp, Artificial Sequence
  Description of Artificial Sequence: Synthetic primer
ctggtgctcgtccagagtc

SEQ ID NO: 11261 - DNA, 21 bp, Artificial Sequence
  Description of Artificial Sequence: Synthetic primer
cgcggcttccataatgaagtg

SEQ ID NO: 11262 - DNA, 23 bp, Artificial Sequence
  Description of Artificial Sequence: Synthetic primer
ttggacgtgaagctgtttcattt

SEQ ID NO: 11263 - DNA, 21 bp, Artificial Sequence
  Description of Artificial Sequence: Synthetic primer
tcgcaaacctatcgacgatgg

SEQ ID NO: 11264 - DNA, 23 bp, Artificial Sequence
  Description of Artificial Sequence: Synthetic primer
tcactggccgatgttacattcat

SEQ ID NO: 11265 - DNA, 20 bp, Artificial Sequence
  Description of Artificial Sequence: Synthetic primer
cgcaacggaggtgaagatcg

SEQ ID NO: 11266 - DNA, 26 bp, Artificial Sequence
  Description of Artificial Sequence: Synthetic primer
aaggacgttgaaatcttttgctttga

SEQ ID NO: 11267 - DNA, 29 bp, Artificial Sequence
  Description of Artificial Sequence: Synthetic primer
gatttgtattatacataaacgggatgcgt

SEQ ID NO: 11268 - DNA, 28 bp, Artificial Sequence
  Description of Artificial Sequence: Synthetic primer
cctaaatgatccagtgtgaatcaaaact

SEQ ID NO: 11269 - DNA, 28 bp, Artificial Sequence
  Description of Artificial Sequence: Synthetic primer
gagttggaggacagctatacacataaaa

SEQ ID NO: 11270 - DNA, 21 bp, Artificial Sequence
  Description of Artificial Sequence: Synthetic primer
gtcaatggttgcgtacggttc

SEQ ID NO: 11271 - DNA, 19 bp, Artificial Sequence
  Description of Artificial Sequence: Synthetic primer
gaggcgagttgagctagcg

SEQ ID NO: 11272 - DNA, 22 bp, Artificial Sequence
  Description of Artificial Sequence: Synthetic primer
gggacagcagagtcttgttacc

SEQ ID NO: 11273 - DNA, 19 bp, Artificial Sequence
  Description of Artificial Sequence: Synthetic primer
ccgggatcggaatggtgtc

SEQ ID NO: 11274 - DNA, 21 bp, Artificial Sequence
  Description of Artificial Sequence: Synthetic primer
agcacaaggtgggagaaatgc

SEQ ID NO: 11275 - DNA, 22 bp, Artificial Sequence
  Description of Artificial Sequence: Synthetic primer
cttttcagccttggacttgtgg

SEQ ID NO: 11276 - DNA, 22 bp, Artificial Sequence
  Description of Artificial Sequence: Synthetic primer
ttgaaggttttggaggctttgc

SEQ ID NO: 11277 - DNA, 21 bp, Artificial Sequence
  Description of Artificial Sequence: Synthetic primer
gggtccagctggatgagaatg

SEQ ID NO: 11278 - DNA, 21 bp, Artificial Sequence
  Description of Artificial Sequence: Synthetic primer
ccagtgaactcaggctgtttg

SEQ ID NO: 11279 - DNA, 19 bp, Artificial Sequence
  Description of Artificial Sequence: Synthetic primer
gggatccaagagcgcatgt

SEQ ID NO: 11280 - DNA, 28 bp, Artificial Sequence
  Description of Artificial Sequence: Synthetic primer
gcttttactaaactaatggcaacaagca

SEQ ID NO: 11281 - DNA, 21 bp, Artificial Sequence
  Description of Artificial Sequence: Synthetic primer
gcgtgaagtccactcttccag

SEQ ID NO: 11282 - DNA, 21 bp, Artificial Sequence
  Description of Artificial Sequence: Synthetic primer
gacacccagttcatagcgaca

SEQ ID NO: 11283 - DNA, 21 bp, Artificial Sequence
  Description of Artificial Sequence: Synthetic primer
caagcgaggaatccgactcat

SEQ ID NO: 11284 - DNA, 21 bp, Artificial Sequence
  Description of Artificial Sequence: Synthetic primer
tgccacttctcacagacgaat

SEQ ID NO: 11285 - DNA, 21 bp, Artificial Sequence
  Description of Artificial Sequence: Synthetic primer
gcgcatcctgcactgatgata

SEQ ID NO: 11286 - DNA, 27 bp, Artificial Sequence
  Description of Artificial Sequence: Synthetic primer
taggtgcaatcaatcatatgtctctgc

SEQ ID NO: 11287 - DNA, 25 bp, Artificial Sequence
  Description of Artificial Sequence: Synthetic primer
ccctgctgtagttgaaaagatggag

SEQ ID NO: 11288 - DNA, 21 bp, Artificial Sequence
  Description of Artificial Sequence: Synthetic primer
aacgagactggacgttcacac

SEQ ID NO: 11289 - DNA, 22 bp, Artificial Sequence
  Description of Artificial Sequence: Synthetic primer
tttcgtcgtccctagagaagtg

SEQ ID NO: 11290 - DNA, 21 bp, Artificial Sequence
  Description of Artificial Sequence: Synthetic primer
ctctttgcgaagaggcagaca

SEQ ID NO: 11291 - DNA, 21 bp, Artificial Sequence
  Description of Artificial Sequence: Synthetic primer
gttccaaaaaggtgtgctgct

SEQ ID NO: 11292 - DNA, 27 bp, Artificial Sequence
  Description of Artificial Sequence: Synthetic primer
actctgaaggaaaagatcaaggagatc

SEQ ID NO: 11293 - DNA, 19 bp, Artificial Sequence
  Description of Artificial Sequence: Synthetic primer
gcagcccctgctgatccta

SEQ ID NO: 11294 - DNA, 21 bp, Artificial Sequence
  Description of Artificial Sequence: Synthetic primer
ccgggatgtcaatcctagctt

SEQ ID NO: 11295 - DNA, 21 bp, Artificial Sequence
  Description of Artificial Sequence: Synthetic primer
cctcacactttgcccagtctc

SEQ ID NO: 11296 - DNA, 21 bp, Artificial Sequence
  Description of Artificial Sequence: Synthetic primer
ccatcttttagcgtcccgtga

SEQ ID NO: 11297 - DNA, 21 bp, Artificial Sequence
  Description of Artificial Sequence: Synthetic primer
tgatctgtccacctgctgttg

SEQ ID NO: 11298 - DNA, 21 bp, Artificial Sequence
  Description of Artificial Sequence: Synthetic primer
tgctgatgttgtgactgctct

SEQ ID NO: 11299 - DNA, 21 bp, Artificial Sequence
  Description of Artificial Sequence: Synthetic primer
cgagtctctctcagtcaggtg

SEQ ID NO: 11300 - DNA, 19 bp, Artificial Sequence
  Description of Artificial Sequence: Synthetic primer
aggaatggcagtcggaagg

SEQ ID NO: 11301 - DNA, 21 bp, Artificial Sequence
  Description of Artificial Sequence: Synthetic primer
aagccacacggatctccttac

SEQ ID NO: 11302 - DNA, 19 bp, Artificial Sequence
  Description of Artificial Sequence: Synthetic primer
gctctcgatacgcgaccac

SEQ ID NO: 11303 - DNA, 23 bp, Artificial Sequence
  Description of Artificial Sequence: Synthetic primer
cagtgggacaaacttcatccaga

SEQ ID NO: 11304 - DNA, 23 bp, Artificial Sequence
  Description of Artificial Sequence: Synthetic primer
ctgatcagcttagcatgaagcgt

SEQ ID NO: 11305 - DNA, 25 bp, Artificial Sequence
  Description of Artificial Sequence: Synthetic primer
catgggtccattgatcttgaattgg

SEQ ID NO: 11306 - DNA, 21 bp, Artificial Sequence
  Description of Artificial Sequence: Synthetic primer
ccgtgcaagctatcaggatct

SEQ ID NO: 11307 - DNA, 22 bp, Artificial Sequence
  Description of Artificial Sequence: Synthetic primer
cccgtgaaaatcatgccaacaa

SEQ ID NO: 11308 - DNA, 21 bp, Artificial Sequence
  Description of Artificial Sequence: Synthetic primer
catggtgacgttttcccctct

SEQ ID NO: 11309 - DNA, 23 bp, Artificial Sequence
  Description of Artificial Sequence: Synthetic primer
taactgtacttcaggaccgtgtg

SEQ ID NO: 11310 - DNA, 26 bp, Artificial Sequence
  Description of Artificial Sequence: Synthetic primer
gaacccaatgtcgcgaagtatataag

SEQ ID NO: 11311 - DNA, 25 bp, Artificial Sequence
  Description of Artificial Sequence: Synthetic primer
gaaacaagaaaccgagtcttccaaa

SEQ ID NO: 11312 - DNA, 23 bp, Artificial Sequence
  Description of Artificial Sequence: Synthetic primer
acgaagtccacatgctagacatt

SEQ ID NO: 11313 - DNA, 25 bp, Artificial Sequence
  Description of Artificial Sequence: Synthetic primer
tgaggaaaaaggtggatttgtttcg

SEQ ID NO: 11314 - DNA, 19 bp, Artificial Sequence
  Description of Artificial Sequence: Synthetic primer
agcgacaagagggtgcttc

SEQ ID NO: 11315 - DNA, 28 bp, Artificial Sequence
  Description of Artificial Sequence: Synthetic primer
gaattataggactggttcgtggtttttc

SEQ ID NO: 11316 - DNA, 23 bp, Artificial Sequence
  Description of Artificial Sequence: Synthetic primer
gggcttgctttcttaagtgaacg

SEQ ID NO: 11317 - DNA, 19 bp, Artificial Sequence
  Description of Artificial Sequence: Synthetic primer
caacggtaatggccacggt

SEQ ID NO: 11318 - DNA, 18 bp, Artificial Sequence
  Description of Artificial Sequence: Synthetic primer
ggcgcccaaagcatgcta

SEQ ID NO: 11319 - DNA, 21 bp, Artificial Sequence
  Description of Artificial Sequence: Synthetic primer
tgctcattgacggatgttgct

SEQ ID NO: 11320 - DNA, 24 bp, Artificial Sequence
  Description of Artificial Sequence: Synthetic primer
agacatttacagcttagggctgat

SEQ ID NO: 11321 - DNA, 25 bp, Artificial Sequence
  Description of Artificial Sequence: Synthetic primer
acatgactctcccatacctaaagga

SEQ ID NO: 11322 - DNA, 22 bp, Artificial Sequence
  Description of Artificial Sequence: Synthetic primer
caaactttggcttcactgagca

SEQ ID NO: 11323 - DNA, 21 bp, Artificial Sequence
  Description of Artificial Sequence: Synthetic primer
atcgtagtgaactggcgcatt

SEQ ID NO: 11324 - DNA, 21 bp, Artificial Sequence
  Description of Artificial Sequence: Synthetic primer
atagcctgcacaactgcagaa

SEQ ID NO: 11325 - DNA, 26 bp, Artificial Sequence
  Description of Artificial Sequence: Synthetic primer
caagtcgatccaattcagcttcaatt

SEQ ID NO: 11326 - DNA, 22 bp, Artificial Sequence
  Description of Artificial Sequence: Synthetic primer
tgtctgttttcgaccaaaccct

SEQ ID NO: 11327 - DNA, 27 bp, Artificial Sequence
  Description of Artificial Sequence: Synthetic primer
tcatcaaaaacccaaatcccaacaaac

SEQ ID NO: 11328 - DNA, 27 bp, Artificial Sequence
  Description of Artificial Sequence: Synthetic primer
ttgatgccagaaagaaaatacaagagg

SEQ ID NO: 11329 - DNA, 23 bp, Artificial Sequence
  Description of Artificial Sequence: Synthetic primer
ccaccgattccatcaagaacaca

SEQ ID NO: 11330 - DNA, 24 bp, Artificial Sequence
  Description of Artificial Sequence: Synthetic primer
gccattttgcttcacgcaaagata

SEQ ID NO: 11331 - DNA, 21 bp, Artificial Sequence
  Description of Artificial Sequence: Synthetic primer
gacggtgaatacgctccttgg

SEQ ID NO: 11332 - DNA, 21 bp, Artificial Sequence
  Description of Artificial Sequence: Synthetic primer
ctcaacttctcccttgcccat

SEQ ID NO: 11333 - DNA, 25 bp, Artificial Sequence
  Description of Artificial Sequence: Synthetic primer
ggactttgcttttattctgggtcgt

SEQ ID NO: 11334 - DNA, 22 bp, Artificial Sequence
  Description of Artificial Sequence: Synthetic primer
gatggatcactcggagacatgc

SEQ ID NO: 11335 - DNA, 19 bp, Artificial Sequence
  Description of Artificial Sequence: Synthetic primer
ctgctgctgagcatccttg

SEQ ID NO: 11336 - DNA, 21 bp, Artificial Sequence
  Description of Artificial Sequence: Synthetic primer
agtatggtgccaccgtgaatt

SEQ ID NO: 11337 - DNA, 21 bp, Artificial Sequence
  Description of Artificial Sequence: Synthetic primer
cagcatgtgtgtgtctctgct

SEQ ID NO: 11338 - DNA, 24 bp, Artificial Sequence
  Description of Artificial Sequence: Synthetic primer
actgttgacgcgaatctttcgata

SEQ ID NO: 11339 - DNA, 27 bp, Artificial Sequence
  Description of Artificial Sequence: Synthetic primer
caaagctgttaacactattgattggca

SEQ ID NO: 11340 - DNA, 20 bp, Artificial Sequence
  Description of Artificial Sequence: Synthetic primer
aaaccacaagtcgcccatcc

SEQ ID NO: 11341 - DNA, 26 bp, Artificial Sequence
  Description of Artificial Sequence: Synthetic primer
agtacctgatcagtgtttctttgagg

SEQ ID NO: 11342 - DNA, 21 bp, Artificial Sequence
  Description of Artificial Sequence: Synthetic primer
cttcagcacggcttccataga

SEQ ID NO: 11343 - DNA, 27 bp, Artificial Sequence
  Description of Artificial Sequence: Synthetic primer
attaccctagcaagttgaaagaatggt

SEQ ID NO: 11344 - DNA, 21 bp, Artificial Sequence
  Description of Artificial Sequence: Synthetic primer
cttgctgcaatgcgtcaactc

SEQ ID NO: 11345 - DNA, 21 bp, Artificial Sequence
  Description of Artificial Sequence: Synthetic primer
gccatcttcgagttcgaccag

SEQ ID NO: 11346 - DNA, 25 bp, Artificial Sequence
  Description of Artificial Sequence: Synthetic primer
gaagtacttgcttgtacacccagat

SEQ ID NO: 11347 - DNA, 22 bp, Artificial Sequence
  Description of Artificial Sequence: Synthetic primer
cggtaccaaagagcagctaagt

SEQ ID NO: 11348 - DNA, 23 bp, Artificial Sequence
  Description of Artificial Sequence: Synthetic primer
cactcacagtctctaacccacaa

SEQ ID NO: 11349 - DNA, 28 bp, Artificial Sequence
  Description of Artificial Sequence: Synthetic primer
agcaactgaagagatatgagagagtagt

SEQ ID NO: 11350 - DNA, 23 bp, Artificial Sequence
  Description of Artificial Sequence: Synthetic primer
cgatatccggtttgcgtagatgg

SEQ ID NO: 11351 - DNA, 19 bp, Artificial Sequence
  Description of Artificial Sequence: Synthetic primer
ccaatgtcacggcggaaga

SEQ ID NO: 11352 - DNA, 22 bp, Artificial Sequence
  Description of Artificial Sequence: Synthetic primer
gaacagaatgaagatggcgctt

SEQ ID NO: 11353 - DNA, 28 bp, Artificial Sequence
  Description of Artificial Sequence: Synthetic primer
cgtgtcctcttctgttggtatatgtaat

SEQ ID NO: 11354 - DNA, 19 bp, Artificial Sequence
  Description of Artificial Sequence: Synthetic primer
gtttcgagcaagtgcgtgt

SEQ ID NO: 11355 - DNA, 25 bp, Artificial Sequence
  Description of Artificial Sequence: Synthetic primer
ctgaaggacatcaaactgagactgt

SEQ ID NO: 11356 - DNA, 19 bp, Artificial Sequence
  Description of Artificial Sequence: Synthetic primer
ggctacgggcaatatggct

SEQ ID NO: 11357 - DNA, 23 bp, Artificial Sequence
  Description of Artificial Sequence: Synthetic primer
tctgcaacaatccgatgacaaag

SEQ ID NO: 11358 - DNA, 21 bp, Artificial Sequence
  Description of Artificial Sequence: Synthetic primer
aaagccgcttactgggtactg

SEQ ID NO: 11359 - DNA, 19 bp, Artificial Sequence
  Description of Artificial Sequence: Synthetic primer
cagcgtgtgagtcgacctg

SEQ ID NO: 11360 - DNA, 26 bp, Artificial Sequence
  Description of Artificial Sequence: Synthetic primer
ccttacatacccagtcaatggatcac

SEQ ID NO: 11361 - DNA, 25 bp, Artificial Sequence
  Description of Artificial Sequence: Synthetic primer
ttcccctggtacatctgatattcct

SEQ ID NO: 11362 - DNA, 24 bp, Artificial Sequence
  Description of Artificial Sequence: Synthetic primer
ggacgcctcgatgaccttataatt

SEQ ID NO: 11363 - DNA, 24 bp, Artificial Sequence
  Description of Artificial Sequence: Synthetic primer
gagtgaactgttgtagtccttggt

SEQ ID NO: 11364 - DNA, 21 bp, Artificial Sequence
  Description of Artificial Sequence: Synthetic primer
gcaacagctactttggtgggt

SEQ ID NO: 11365 - DNA, 21 bp, Artificial Sequence
  Description of Artificial Sequence: Synthetic primer
gcctctggaggaggtctacat

SEQ ID NO: 11366 - DNA, 23 bp, Artificial Sequence
  Description of Artificial Sequence: Synthetic primer
ccacggaataagaattggcctga

SEQ ID NO: 11367 - DNA, 23 bp, Artificial Sequence
  Description of Artificial Sequence: Synthetic primer
aaaggattgctacaccaacaacg

SEQ ID NO: 11368 - DNA, 22 bp, Artificial Sequence
  Description of Artificial Sequence: Synthetic primer
gggactggaataccacaggttc

SEQ ID NO: 11369 - DNA, 23 bp, Artificial Sequence
  Description of Artificial Sequence: Synthetic primer
cgcttagtatttccgggaggttt

SEQ ID NO: 11370 - DNA, 19 bp, Artificial Sequence
  Description of Artificial Sequence: Synthetic primer
atgatggcccaagggagga

SEQ ID NO: 11371 - DNA, 22 bp, Artificial Sequence
  Description of Artificial Sequence: Synthetic primer
ccaactccttgatgatgcatgg

SEQ ID NO: 11372 - DNA, 27 bp, Artificial Sequence
  Description of Artificial Sequence: Synthetic primer
gtggacctctaggagagatcttaacaa

SEQ ID NO: 11373 - DNA, 23 bp, Artificial Sequence
  Description of Artificial Sequence: Synthetic primer
ggagcccattacgagttctatca

SEQ ID NO: 11374 - DNA, 22 bp, Artificial Sequence
  Description of Artificial Sequence: Synthetic primer
ggacaaccgaaaggttttgctt

SEQ ID NO: 11375 - DNA, 22 bp, Artificial Sequence
  Description of Artificial Sequence: Synthetic primer
tgacatgtacatcggcgattca

SEQ ID NO: 11376 - DNA, 26 bp, Artificial Sequence
  Description of Artificial Sequence: Synthetic primer
gcatccaatgttttacacatcaaccg

SEQ ID NO: 11377 - DNA, 22 bp, Artificial Sequence
  Description of Artificial Sequence: Synthetic primer
gtcgaagtctgccacccaaata

SEQ ID NO: 11378 - DNA, 21 bp, Artificial Sequence
  Description of Artificial Sequence: Synthetic primer
ccgagtgggaggagttcaaga

SEQ ID NO: 11379 - DNA, 21 bp, Artificial Sequence
  Description of Artificial Sequence: Synthetic primer
ccttgaatgccagcgatgcta

SEQ ID NO: 11380 - DNA, 21 bp, Artificial Sequence
  Description of Artificial Sequence: Synthetic primer
aagaggcgatcaattggctca

SEQ ID NO: 11381 - DNA, 27 bp, Artificial Sequence
  Description of Artificial Sequence: Synthetic primer
tggtgtgtacatattactgatgttggg

SEQ ID NO: 11382 - DNA, 23 bp, Artificial Sequence
  Description of Artificial Sequence: Synthetic primer
ccagcttcgtcagatgaagatgt

SEQ ID NO: 11383 - DNA, 23 bp, Artificial Sequence
  Description of Artificial Sequence: Synthetic primer
aagaaatccgttgctggcaaaag

SEQ ID NO: 11384 - DNA, 27 bp, Artificial Sequence
  Description of Artificial Sequence: Synthetic primer
ctagttcttgttctactgtcctgttca

SEQ ID NO: 11385 - DNA, 25 bp, Artificial Sequence
  Description of Artificial Sequence: Synthetic primer
ggtatatgaccagctgactgaacaa

SEQ ID NO: 11386 - DNA, 20 bp, Artificial Sequence
  Description of Artificial Sequence: Synthetic primer
cagaagccctgaacagctct

SEQ ID NO: 11387 - DNA, 25 bp, Artificial Sequence
  Description of Artificial Sequence: Synthetic primer
acggcaaaggttaatggatcttctg

SEQ ID NO: 11388 - DNA, 22 bp, Artificial Sequence
  Description of Artificial Sequence: Synthetic primer
tcgaagctacagttgttgtgga

SEQ ID NO: 11389 - DNA, 24 bp, Artificial Sequence
  Description of Artificial Sequence: Synthetic primer
tgtaaggaggagatcgttcagcta

SEQ ID NO: 11390 - DNA, 25 bp, Artificial Sequence
  Description of Artificial Sequence: Synthetic primer
ccatatgaaagtcaccaatgatgcc

SEQ ID NO: 11391 - DNA, 22 bp, Artificial Sequence
  Description of Artificial Sequence: Synthetic primer
ccaggcccttatcttcgttacc

SEQ ID NO: 11392 - DNA, 24 bp, Artificial Sequence
  Description of Artificial Sequence: Synthetic primer
gggattggataagaagcttgctca

SEQ ID NO: 11393 - DNA, 25 bp, Artificial Sequence
  Description of Artificial Sequence: Synthetic primer
tctatggttactccagttctttggc

SEQ ID NO: 11394 - DNA, 28 bp, Artificial Sequence
  Description of Artificial Sequence: Synthetic primer
tcgaatcaaacgatcggcataaatatga

SEQ ID NO: 11395 - DNA, 27 bp, Artificial Sequence
  Description of Artificial Sequence: Synthetic primer
gagatagatgcagcgttggattttaag

SEQ ID NO: 11396 - DNA, 21 bp, Artificial Sequence
  Description of Artificial Sequence: Synthetic primer
caagctgcaggtactgaatgc

SEQ ID NO: 11397 - DNA, 27 bp, Artificial Sequence
  Description of Artificial Sequence: Synthetic primer
ggatgagcttacaataaccagtgaaag

SEQ ID NO: 11398 - DNA, 26 bp, Artificial Sequence
  Description of Artificial Sequence: Synthetic primer
ctccgtcccaaaataagtgacttgag

SEQ ID NO: 11399 - DNA, 18 bp, Artificial Sequence
  Description of Artificial Sequence: Synthetic primer
gatgctcgccgagttccg

SEQ ID NO: 11400 - DNA, 27 bp, Artificial Sequence
  Description of Artificial Sequence: Synthetic primer
cacgttcatcattttcctcggattaca

SEQ ID NO: 11401 - DNA, 20 bp, Artificial Sequence
  Description of Artificial Sequence: Synthetic primer
ccagacgcaagatgtcatcc

SEQ ID NO: 11402 - DNA, 28 bp, Artificial Sequence
  Description of Artificial Sequence: Synthetic primer
tttcagggaactgtatggatatcttgtt

SEQ ID NO: 11403 - DNA, 19 bp, Artificial Sequence
  Description of Artificial Sequence: Synthetic primer
gctgggcaagctctctcac

SEQ ID NO: 11404 - DNA, 20 bp, Artificial Sequence
  Description of Artificial Sequence: Synthetic primer
gacggagagattggctgctg

SEQ ID NO: 11405 - DNA, 26 bp, Artificial Sequence
  Description of Artificial Sequence: Synthetic primer
aactgggttaccggagataagtaaac

SEQ ID NO: 11406 - DNA, 19 bp, Artificial Sequence
  Description of Artificial Sequence: Synthetic primer
cccctcttgtccccctgaa

SEQ ID NO: 11407 - DNA, 21 bp, Artificial Sequence
  Description of Artificial Sequence: Synthetic primer
cgtatagcgcctacagctctc

SEQ ID NO: 11408 - DNA, 26 bp, Artificial Sequence
  Description of Artificial Sequence: Synthetic primer
tacttagatccaacttcaaccgatgc

SEQ ID NO: 11409 - DNA, 21 bp, Artificial Sequence
  Description of Artificial Sequence: Synthetic primer
actaccaagtatgccgtgtgg

SEQ ID NO: 11410 - DNA, 28 bp, Artificial Sequence
  Description of Artificial Sequence: Synthetic primer
aattctttctatctgccaatgtatgcac

SEQ ID NO: 11411 - DNA, 27 bp, Artificial Sequence
  Description of Artificial Sequence: Synthetic primer
aatgacctctttgatctccttgatctg

SEQ ID NO: 11412 - DNA, 21 bp, Artificial Sequence
  Description of Artificial Sequence: Synthetic primer
ctaggagaagcgcgagtgaat

SEQ ID NO: 11413 - DNA, 26 bp, Artificial Sequence
  Description of Artificial Sequence: Synthetic primer
ccattaaagctttatctgaggagcga

SEQ ID NO: 11414 - DNA, 25 bp, Artificial Sequence
  Description of Artificial Sequence: Synthetic primer
gttccataggacttcggagtcaatt

SEQ ID NO: 11415 - DNA, 21 bp, Artificial Sequence
  Description of Artificial Sequence: Synthetic primer
ggttcaagaggccgtctcttc

SEQ ID NO: 11416 - DNA, 24 bp, Artificial Sequence
  Description of Artificial Sequence: Synthetic primer
gaatctcctcttgccaaaaatggt

SEQ ID NO: 11417 - DNA, 19 bp, Artificial Sequence
  Description of Artificial Sequence: Synthetic primer
accaccaccagatcctgct

SEQ ID NO: 11418 - DNA, 25 bp, Artificial Sequence
  Description of Artificial Sequence: Synthetic primer
atagtgaagccagtatcgacagtca

SEQ ID NO: 11419 - DNA, 19 bp, Artificial Sequence
  Description of Artificial Sequence: Synthetic primer
ggatcccgaggcggagtat

SEQ ID NO: 11420 - DNA, 20 bp, Artificial Sequence
  Description of Artificial Sequence: Synthetic primer
ctctgtccagccaagctttg

SEQ ID NO: 11421 - DNA, 21 bp, Artificial Sequence
  Description of Artificial Sequence: Synthetic primer
gggagaaatccggaagcactg

SEQ ID NO: 11422 - DNA, 26 bp, Artificial Sequence
  Description of Artificial Sequence: Synthetic primer
ctccagagctaaaacctgatgttttg

SEQ ID NO: 11423 - DNA, 28 bp, Artificial Sequence
  Description of Artificial Sequence: Synthetic primer
tcctttcattgacattgccaatattcag

SEQ ID NO: 11424 - DNA, 24 bp, Artificial Sequence
  Description of Artificial Sequence: Synthetic primer
agaacagctctacaatggtctcac

SEQ ID NO: 11425 - DNA, 23 bp, Artificial Sequence
  Description of Artificial Sequence: Synthetic primer
gacatgctaacaggcgaaaagga

SEQ ID NO: 11426 - DNA, 21 bp, Artificial Sequence
  Description of Artificial Sequence: Synthetic primer
tcgaagcctcgaaaagtcctg

SEQ ID NO: 11427 - DNA, 27 bp, Artificial Sequence
  Description of Artificial Sequence: Synthetic primer
ctggtgtgactgcatgtatattagctt

SEQ ID NO: 11428 - DNA, 22 bp, Artificial Sequence
  Description of Artificial Sequence: Synthetic primer
gtctcaccatatgcaccacgaa

SEQ ID NO: 11429 - DNA, 26 bp, Artificial Sequence
  Description of Artificial Sequence: Synthetic primer
aaaataaacttcaacaccaggaaggc

SEQ ID NO: 11430 - DNA, 28 bp, Artificial Sequence
  Description of Artificial Sequence: Synthetic primer
cttgttgcttcaattacaagaggtttgc

SEQ ID NO: 11431 - DNA, 21 bp, Artificial Sequence
  Description of Artificial Sequence: Synthetic primer
attttcctcctcgccaaggtt

SEQ ID NO: 11432 - DNA, 21 bp, Artificial Sequence
  Description of Artificial Sequence: Synthetic primer
atgtggttggaacaacacacg

SEQ ID NO: 11433 - DNA, 25 bp, Artificial Sequence
  Description of Artificial Sequence: Synthetic primer
tggagtttgataagcaagaggagaa

SEQ ID NO: 11434 - DNA, 21 bp, Artificial Sequence
  Description of Artificial Sequence: Synthetic primer
ggcacgagggcttgaatttac

SEQ ID NO: 11435 - DNA, 21 bp, Artificial Sequence
  Description of Artificial Sequence: Synthetic primer
gcagcaggtttcccatcttca

SEQ ID NO: 11436 - DNA, 23 bp, Artificial Sequence
  Description of Artificial Sequence: Synthetic primer
gaggactgaactgaaccaggatc

SEQ ID NO: 11437 - DNA, 25 bp, Artificial Sequence
  Description of Artificial Sequence: Synthetic primer
tcgattattgctttcctgatgtgtg

SEQ ID NO: 11438 - DNA, 22 bp, Artificial Sequence
  Description of Artificial Sequence: Synthetic primer
ccgaaggtaaccaagcaactca

SEQ ID NO: 11439 - DNA, 26 bp, Artificial Sequence
  Description of Artificial Sequence: Synthetic primer
atgcatgctataccaataatccacct

SEQ ID NO: 11440 - DNA, 19 bp, Artificial Sequence
  Description of Artificial Sequence: Synthetic primer
caccacccccatggttgtc

SEQ ID NO: 11441 - DNA, 22 bp, Artificial Sequence
  Description of Artificial Sequence: Synthetic primer
agcccattttcaacagcatgtg

SEQ ID NO: 11442 - DNA, 26 bp, Artificial Sequence
  Description of Artificial Sequence: Synthetic primer
tgctgttattccatcttaatgcttgc

SEQ ID NO: 11443 - DNA, 21 bp, Artificial Sequence
  Description of Artificial Sequence: Synthetic primer
tgggaagtgcttatcgatgcg

SEQ ID NO: 11444 - DNA, 21 bp, Artificial Sequence
  Description of Artificial Sequence: Synthetic primer
gtcgccgttccttacaagtga

SEQ ID NO: 11445 - DNA, 19 bp, Artificial Sequence
  Description of Artificial Sequence: Synthetic primer
cgcagttcgtgctgatggg

SEQ ID NO: 11446 - DNA, 24 bp, Artificial Sequence
  Description of Artificial Sequence: Synthetic primer
cccttctggaacatcgagtttacg

SEQ ID NO: 11447 - DNA, 22 bp, Artificial Sequence
  Description of Artificial Sequence: Synthetic primer
aggaccaaacaccaacttggtt

SEQ ID NO: 11448 - DNA, 19 bp, Artificial Sequence
  Description of Artificial Sequence: Synthetic primer
cgtgcagtcccacaaggag

SEQ ID NO: 11449 - DNA, 25 bp, Artificial Sequence
  Description of Artificial Sequence: Synthetic primer
ccaagtaattcctttaaagctcgca

SEQ ID NO: 11450 - DNA, 28 bp, Artificial Sequence
  Description of Artificial Sequence: Synthetic primer
gtccatcattggatcatatgttgattgc

SEQ ID NO: 11451 - DNA, 21 bp, Artificial Sequence
  Description of Artificial Sequence: Synthetic primer
atgggagacctgcagtgaagt

SEQ ID NO: 11452 - DNA, 21 bp, Artificial Sequence
  Description of Artificial Sequence: Synthetic primer
cttgctcgatggccagcttat

SEQ ID NO: 11453 - DNA, 28 bp, Artificial Sequence
  Description of Artificial Sequence: Synthetic primer
tgaatttctggagacattctcaaaggaa

SEQ ID NO: 11454 - DNA, 27 bp, Artificial Sequence
  Description of Artificial Sequence: Synthetic primer
tttcttgtgccgtgatttgaaatcaat

SEQ ID NO: 11455 - DNA, 19 bp, Artificial Sequence
  Description of Artificial Sequence: Synthetic primer
tggaggtggagggtacacg

SEQ ID NO: 11456 - DNA, 26 bp, Artificial Sequence
  Description of Artificial Sequence: Synthetic primer
agatagacacaaaggtttcttctgct

SEQ ID NO: 11457 - DNA, 21 bp, Artificial Sequence
  Description of Artificial Sequence: Synthetic primer
gaggatgtagaacaggcccat

SEQ ID NO: 11458 - DNA, 21 bp, Artificial Sequence
  Description of Artificial Sequence: Synthetic primer
ggcctcgatgttcttcccttc

SEQ ID NO: 11459 - DNA, 24 bp, Artificial Sequence
  Description of Artificial Sequence: Synthetic primer
gcagactactgaacaacctgaacc

SEQ ID NO: 11460 - DNA, 21 bp, Artificial Sequence
  Description of Artificial Sequence: Synthetic primer
aagatggcagtctccctctcc

SEQ ID NO: 11461 - DNA, 20 bp, Artificial Sequence
  Description of Artificial Sequence: Synthetic primer
cgtgaggtagcaaggaaggg

SEQ ID NO: 11462 - DNA, 22 bp, Artificial Sequence
  Description of Artificial Sequence: Synthetic primer
gaccttgcctccttcgcctata

SEQ ID NO: 11463 - DNA, 21 bp, Artificial Sequence
  Description of Artificial Sequence: Synthetic primer
gccacgcagtacagttttcct

SEQ ID NO: 11464 - DNA, 21 bp, Artificial Sequence
  Description of Artificial Sequence: Synthetic primer
ttcaccagggatgaacatggg

SEQ ID NO: 11465 - DNA, 23 bp, Artificial Sequence
  Description of Artificial Sequence: Synthetic primer
gcaagtatcacgtgaacaaaggc

SEQ ID NO: 11466 - DNA, 21 bp, Artificial Sequence
  Description of Artificial Sequence: Synthetic primer
gctggactgagccacactaat

SEQ ID NO: 11467 - DNA, 26 bp, Artificial Sequence
  Description of Artificial Sequence: Synthetic primer
gatcttgatcatgaatggagctcaca

SEQ ID NO: 11468 - DNA, 23 bp, Artificial Sequence
  Description of Artificial Sequence: Synthetic primer
tgttacgagtgacactggagatc

SEQ ID NO: 11469 - DNA, 25 bp, Artificial Sequence
  Description of Artificial Sequence: Synthetic primer
aatgagaaccttaggaagctggaac

SEQ ID NO: 11470 - DNA, 23 bp, Artificial Sequence
  Description of Artificial Sequence: Synthetic primer
gcagcagagagcccttttactaa

SEQ ID NO: 11471 - DNA, 21 bp, Artificial Sequence
  Description of Artificial Sequence: Synthetic primer
ccaacaaattggctgagctga

SEQ ID NO: 11472 - DNA, 22 bp, Artificial Sequence
  Description of Artificial Sequence: Synthetic primer
gtctgcaaaagcgaactctgat

SEQ ID NO: 11473 - DNA, 28 bp, Artificial Sequence
  Description of Artificial Sequence: Synthetic primer
tcaacttgttcaactcctgatactatgg

SEQ ID NO: 11474 - DNA, 25 bp, Artificial Sequence
  Description of Artificial Sequence: Synthetic primer
tctagtgacacagatgatgacgatg

SEQ ID NO: 11475 - DNA, 28 bp, Artificial Sequence
  Description of Artificial Sequence: Synthetic primer
ttgtctcattgtttcaggttttatggag

SEQ ID NO: 11476 - DNA, 28 bp, Artificial Sequence
  Description of Artificial Sequence: Synthetic primer
agggaacctacaaacaaaaatagtcagt

SEQ ID NO: 11477 - DNA, 29 bp, Artificial Sequence
  Description of Artificial Sequence: Synthetic primer
gggtatcgatacaaatgcagtaattttcg

SEQ ID NO: 11478 - DNA, 23 bp, Artificial Sequence
  Description of Artificial Sequence: Synthetic primer
gcgagctttccaagagcttgata

SEQ ID NO: 11479 - DNA, 21 bp, Artificial Sequence
  Description of Artificial Sequence: Synthetic primer
gctggacacacgtagacaact

SEQ ID NO: 11480 - DNA, 21 bp, Artificial Sequence
  Description of Artificial Sequence: Synthetic primer
gagatggacgccgactaagac

SEQ ID NO: 11481 - DNA, 27 bp, Artificial Sequence
  Description of Artificial Sequence: Synthetic primer
tgcaaccattttctttgtgtcatatct

SEQ ID NO: 11482 - DNA, 22 bp, Artificial Sequence
  Description of Artificial Sequence: Synthetic primer
gaaagggtaaccctgctaacga

SEQ ID NO: 11483 - DNA, 21 bp, Artificial Sequence
  Description of Artificial Sequence: Synthetic primer
cattcggaggtggagctacag

SEQ ID NO: 11484 - DNA, 21 bp, Artificial Sequence
  Description of Artificial Sequence: Synthetic primer
gggacggcattctttcctctg

SEQ ID NO: 11485 - DNA, 27 bp, Artificial Sequence
  Description of Artificial Sequence: Synthetic primer
tggtgactgatataacatgaccatacc

SEQ ID NO: 11486 - DNA, 26 bp, Artificial Sequence
  Description of Artificial Sequence: Synthetic primer
gctaagatgactgctgaaattggaga

SEQ ID NO: 11487 - DNA, 21 bp, Artificial Sequence
  Description of Artificial Sequence: Synthetic primer
ttgtcagaatgaacgcgctga

SEQ ID NO: 11488 - DNA, 25 bp, Artificial Sequence
  Description of Artificial Sequence: Synthetic primer
cgtcaccaagtttacatcctcctag

SEQ ID NO: 11489 - DNA, 27 bp, Artificial Sequence
  Description of Artificial Sequence: Synthetic primer
tcaacaaaccaaccaatatggaagtct

SEQ ID NO: 11490 - DNA, 27 bp, Artificial Sequence
  Description of Artificial Sequence: Synthetic primer
gcgattcaacttttcacttttctccat

SEQ ID NO: 11491 - DNA, 21 bp, Artificial Sequence
  Description of Artificial Sequence: Synthetic primer
gatcacggcgcagtttcattg

SEQ ID NO: 11492 - DNA, 22 bp, Artificial Sequence
  Description of Artificial Sequence: Synthetic primer
ccactctgctgagcaaggtaat

SEQ ID NO: 11493 - DNA, 29 bp, Artificial Sequence
  Description of Artificial Sequence: Synthetic primer
gttagctggttaataagtagtttgctggt

SEQ ID NO: 11494 - DNA, 23 bp, Artificial Sequence
  Description of Artificial Sequence: Synthetic primer
gaaagaatcggaatgcaggaagc

SEQ ID NO: 11495 - DNA, 19 bp, Artificial Sequence
  Description of Artificial Sequence: Synthetic primer
cagaagggcgtctcgttca

SEQ ID NO: 11496 - DNA, 19 bp, Artificial Sequence
  Description of Artificial Sequence: Synthetic primer
ggctagcaaatcggacgag

SEQ ID NO: 11497 - DNA, 25 bp, Artificial Sequence
  Description of Artificial Sequence: Synthetic primer
cattatataggtcgagctacacgca

SEQ ID NO: 11498 - DNA, 20 bp, Artificial Sequence
  Description of Artificial Sequence: Synthetic primer
ctgagaccggtccggatcta

SEQ ID NO: 11499 - DNA, 21 bp, Artificial Sequence
  Description of Artificial Sequence: Synthetic primer
gagtcggatgacgaagaggag

SEQ ID NO: 11500 - DNA, 22 bp, Artificial Sequence
  Description of Artificial Sequence: Synthetic primer
cattctgtccaaagaggacggt

SEQ ID NO: 11501 - DNA, 19 bp, Artificial Sequence
  Description of Artificial Sequence: Synthetic primer
caagcgcgcttaccacatt

SEQ ID NO: 11502 - DNA, 21 bp, Artificial Sequence
  Description of Artificial Sequence: Synthetic primer
catgtgctcaacacctaccca

SEQ ID NO: 11503 - DNA, 24 bp, Artificial Sequence
  Description of Artificial Sequence: Synthetic primer
caccaacacagaaagtacaaggtc

SEQ ID NO: 11504 - DNA, 22 bp, Artificial Sequence
  Description of Artificial Sequence: Synthetic primer
gagcccatcaaagacaccagtc

SEQ ID NO: 11505 - DNA, 21 bp, Artificial Sequence
  Description of Artificial Sequence: Synthetic primer
caacttctctaccccggagga

SEQ ID NO: 11506 - DNA, 24 bp, Artificial Sequence
  Description of Artificial Sequence: Synthetic primer
gaggaaattggagttgagcacctt

SEQ ID NO: 11507 - DNA, 22 bp, Artificial Sequence
  Description of Artificial Sequence: Synthetic primer
gcaaagcggactattcgacatt

SEQ ID NO: 11508 - DNA, 28 bp, Artificial Sequence
  Description of Artificial Sequence: Synthetic primer
accttgagaaataaacaccatcggttaa

SEQ ID NO: 11509 - DNA, 27 bp, Artificial Sequence
  Description of Artificial Sequence: Synthetic primer
gctggtaccacatcatttcgaataaag

SEQ ID NO: 11510 - DNA, 23 bp, Artificial Sequence
  Description of Artificial Sequence: Synthetic primer
cttaggtcagagcacatgaggac

SEQ ID NO: 11511 - DNA, 25 bp, Artificial Sequence
  Description of Artificial Sequence: Synthetic primer
tccacaggaagaaatgcaaatgaga

SEQ ID NO: 11512 - DNA, 22 bp, Artificial Sequence
  Description of Artificial Sequence: Synthetic primer
aggaggaggcacaataggtagg

SEQ ID NO: 11513 - DNA, 24 bp, Artificial Sequence
  Description of Artificial Sequence: Synthetic primer
accactggctttcattagtgactc

SEQ ID NO: 11514 - DNA, 23 bp, Artificial Sequence
  Description of Artificial Sequence: Synthetic primer
cactgtaattagcttggccagca

SEQ ID NO: 11515 - DNA, 23 bp, Artificial Sequence
  Description of Artificial Sequence: Synthetic primer
tgatgccatggaggaatggacta

SEQ ID NO: 11516 - DNA, 21 bp, Artificial Sequence
  Description of Artificial Sequence: Synthetic primer
atcatctgcgcagtctaagcc

SEQ ID NO: 11517 - DNA, 21 bp, Artificial Sequence
  Description of Artificial Sequence: Synthetic primer
agagctgcaggacatgatcaa

SEQ ID NO: 11518 - DNA, 28 bp, Artificial Sequence
  Description of Artificial Sequence: Synthetic primer
catctactcaagaattgaagaccatcct

SEQ ID NO: 11519 - DNA, 21 bp, Artificial Sequence
  Description of Artificial Sequence: Synthetic primer
ccaacacctctgcagtacctc

SEQ ID NO: 11520 - DNA, 22 bp, Artificial Sequence
  Description of Artificial Sequence: Synthetic primer
aaacaccaagccaccatcatca

SEQ ID NO: 11521 - DNA, 23 bp, Artificial Sequence
  Description of Artificial Sequence: Synthetic primer
tgatccatccatccatcagtcca

SEQ ID NO: 11522 - DNA, 21 bp, Artificial Sequence
  Description of Artificial Sequence: Synthetic primer
gcagctgatgaacatcttggg

SEQ ID NO: 11523 - DNA, 21 bp, Artificial Sequence
  Description of Artificial Sequence: Synthetic primer
ccgttgcaatgagagcattgt

SEQ ID NO: 11524 - DNA, 23 bp, Artificial Sequence
  Description of Artificial Sequence: Synthetic primer
aataggcatttaacagccggcaa

SEQ ID NO: 11525 - DNA, 23 bp, Artificial Sequence
  Description of Artificial Sequence: Synthetic primer
ggatgatgacgtcgtcgatatgg

SEQ ID NO: 11526 - DNA, 21 bp, Artificial Sequence
  Description of Artificial Sequence: Synthetic primer
ccagcatctcacagcagtttc

SEQ ID NO: 11527 - DNA, 23 bp, Artificial Sequence
  Description of Artificial Sequence: Synthetic primer
cgacaatatcaccattgccttcc

SEQ ID NO: 11528 - DNA, 28 bp, Artificial Sequence
  Description of Artificial Sequence: Synthetic primer
acatcctcatctgatttaggcatatcac

SEQ ID NO: 11529 - DNA, 27 bp, Artificial Sequence
  Description of Artificial Sequence: Synthetic primer
gcttaatcaatttgtcatcgtcagtct

SEQ ID NO: 11530 - DNA, 21 bp, Artificial Sequence
  Description of Artificial Sequence: Synthetic primer
gtatccggctcgatttgtcgt

SEQ ID NO: 11531 - DNA, 21 bp, Artificial Sequence
  Description of Artificial Sequence: Synthetic primer
gatgccggtgtggatgatgaa

SEQ ID NO: 11532 - DNA, 21 bp, Artificial Sequence
  Description of Artificial Sequence: Synthetic primer
ttgtccttctccctggcgata

SEQ ID NO: 11533 - DNA, 21 bp, Artificial Sequence
  Description of Artificial Sequence: Synthetic primer
agtcagcggacccagatatcc

SEQ ID NO: 11534 - DNA, 22 bp, Artificial Sequence
  Description of Artificial Sequence: Synthetic primer
aggaagtgttcagcagatgctt

SEQ ID NO: 11535 - DNA, 19 bp, Artificial Sequence
  Description of Artificial Sequence: Synthetic primer
cccggctgttcctacagtc

SEQ ID NO: 11536 - DNA, 21 bp, Artificial Sequence
  Description of Artificial Sequence: Synthetic primer
ctggtctcagtgctgtgatgt

SEQ ID NO: 11537 - DNA, 21 bp, Artificial Sequence
  Description of Artificial Sequence: Synthetic primer
ccccttgccgacattatttgc

SEQ ID NO: 11538 - DNA, 25 bp, Artificial Sequence
  Description of Artificial Sequence: Synthetic primer
tggttcccttgttttaaagcatgtg

SEQ ID NO: 11539 - DNA, 27 bp, Artificial Sequence
  Description of Artificial Sequence: Synthetic primer
cctcgttctcatgtgcaatacattttt

SEQ ID NO: 11540 - DNA, 19 bp, Artificial Sequence
  Description of Artificial Sequence: Synthetic primer
cttggcgttcctgcagatg

SEQ ID NO: 11541 - DNA, 21 bp, Artificial Sequence
  Description of Artificial Sequence: Synthetic primer
tgctgcagctgtagttatcgc

SEQ ID NO: 11542 - DNA, 22 bp, Artificial Sequence
  Description of Artificial Sequence: Synthetic primer
caggttggtgtcctcaaagaga

SEQ ID NO: 11543 - DNA, 18 bp, Artificial Sequence
  Description of Artificial Sequence: Synthetic primer
gccatctgggaccgtgtt

SEQ ID NO: 11544 - DNA, 21 bp, Artificial Sequence
  Description of Artificial Sequence: Synthetic primer
caccctgttgacttctggcaa

SEQ ID NO: 11545 - DNA, 28 bp, Artificial Sequence
  Description of Artificial Sequence: Synthetic primer
agttaaagaggttacacaaaacacttcg

SEQ ID NO: 11546 - DNA, 28 bp, Artificial Sequence
  Description of Artificial Sequence: Synthetic primer
gtgcatagaatacttgtaagtgaacagc

SEQ ID NO: 11547 - DNA, 21 bp, Artificial Sequence
  Description of Artificial Sequence: Synthetic primer
agagcttctccaggtaggcaa

SEQ ID NO: 11548 - DNA, 21 bp, Artificial Sequence
  Description of Artificial Sequence: Synthetic primer
cgcttccaatcatctcaggca

SEQ ID NO: 11549 - DNA, 21 bp, Artificial Sequence
  Description of Artificial Sequence: Synthetic primer
ggactacaggagcggattacc

SEQ ID NO: 11550 - DNA, 19 bp, Artificial Sequence
  Description of Artificial Sequence: Synthetic primer
ctcgctacctcggttcact

SEQ ID NO: 11551 - DNA, 19 bp, Artificial Sequence
  Description of Artificial Sequence: Synthetic primer
gctggaagtctggcgactg

SEQ ID NO: 11552 - DNA, 24 bp, Artificial Sequence
  Description of Artificial Sequence: Synthetic primer
ctcagtgaggatgacaagttgacg

SEQ ID NO: 11553 - DNA, 26 bp, Artificial Sequence
  Description of Artificial Sequence: Synthetic primer
ccagttcaattgcctattctctgaac

SEQ ID NO: 11554 - DNA, 21 bp, Artificial Sequence
  Description of Artificial Sequence: Synthetic primer
cactgcctcctgccatttcta

SEQ ID NO: 11555 - DNA, 29 bp, Artificial Sequence
  Description of Artificial Sequence: Synthetic primer
gtaattacttagatgatgctctctctgct

SEQ ID NO: 11556 - DNA, 20 bp, Artificial Sequence
  Description of Artificial Sequence: Synthetic primer
gaggagtttggcatcagcgt

SEQ ID NO: 11557 - DNA, 20 bp, Artificial Sequence
  Description of Artificial Sequence: Synthetic primer
cagcaagtgaccttctgcac

SEQ ID NO: 11558 - DNA, 21 bp, Artificial Sequence
  Description of Artificial Sequence: Synthetic primer
agtcctcaccctgctagtctg

SEQ ID NO: 11559 - DNA, 21 bp, Artificial Sequence
  Description of Artificial Sequence: Synthetic primer
gtcctcaaggaggccaatgtt

SEQ ID NO: 11560 - DNA, 24 bp, Artificial Sequence
  Description of Artificial Sequence: Synthetic primer
gtcaattgtattgagccccatcct

SEQ ID NO: 11561 - DNA, 26 bp, Artificial Sequence
  Description of Artificial Sequence: Synthetic primer
gagtagatttggcctccctcatattt

SEQ ID NO: 11562 - DNA, 22 bp, Artificial Sequence
  Description of Artificial Sequence: Synthetic primer
gctcgtgtactcgttcctgtac

SEQ ID NO: 11563 - DNA, 19 bp, Artificial Sequence
  Description of Artificial Sequence: Synthetic primer
ctcgacccaccacctcttg

SEQ ID NO: 11564 - DNA, 21 bp, Artificial Sequence
  Description of Artificial Sequence: Synthetic primer
cgatgcaaccaagggttctga

SEQ ID NO: 11565 - DNA, 19 bp, Artificial Sequence
  Description of Artificial Sequence: Synthetic primer
ctcgctacctcggttcaca

SEQ ID NO: 11566 - DNA, 21 bp, Artificial Sequence
  Description of Artificial Sequence: Synthetic primer
atggtgctccagaacgacatc

SEQ ID NO: 11567 - DNA, 21 bp, Artificial Sequence
  Description of Artificial Sequence: Synthetic primer
gatgtcggaatcgccttcctc

SEQ ID NO: 11568 - DNA, 21 bp, Artificial Sequence
  Description of Artificial Sequence: Synthetic primer
caaggtgtactctccggcaac

SEQ ID NO: 11569 - DNA, 21 bp, Artificial Sequence
  Description of Artificial Sequence: Synthetic primer
ctgcctctggtaagccagtag

SEQ ID NO: 11570 - DNA, 21 bp, Artificial Sequence
  Description of Artificial Sequence: Synthetic primer
ccgatttcccccagacttctt

SEQ ID NO: 11571 - DNA, 21 bp, Artificial Sequence
  Description of Artificial Sequence: Synthetic primer
gcaagatctggcctagcagtg

SEQ ID NO: 11572 - DNA, 22 bp, Artificial Sequence
  Description of Artificial Sequence: Synthetic primer
ttgtttccatgggcgtgtattc

SEQ ID NO: 11573 - DNA, 22 bp, Artificial Sequence
  Description of Artificial Sequence: Synthetic primer
gaaaaccctcctgaagtgaacg

SEQ ID NO: 11574 - DNA, 21 bp, Artificial Sequence
  Description of Artificial Sequence: Synthetic primer
aatgttggtcatgcctgcttg

SEQ ID NO: 11575 - DNA, 28 bp, Artificial Sequence
  Description of Artificial Sequence: Synthetic primer
aaggtgtcaagatccaagctatacatac

SEQ ID NO: 11576 - DNA, 24 bp, Artificial Sequence
  Description of Artificial Sequence: Synthetic primer
agaatcctttaagctgtcggacac

SEQ ID NO: 11577 - DNA, 21 bp, Artificial Sequence
  Description of Artificial Sequence: Synthetic primer
aggtagcatcgctgaaacgtg

SEQ ID NO: 11578 - DNA, 25 bp, Artificial Sequence
  Description of Artificial Sequence: Synthetic primer
aggaaaagtttggacttacacctga

SEQ ID NO: 11579 - DNA, 19 bp, Artificial Sequence
  Description of Artificial Sequence: Synthetic primer
tcgatcaggtcgagtgcca

SEQ ID NO: 11580 - DNA, 24 bp, Artificial Sequence
  Description of Artificial Sequence: Synthetic primer
cccttggatccaagtcgattttcg

SEQ ID NO: 11581 - DNA, 28 bp, Artificial Sequence
  Description of Artificial Sequence: Synthetic primer
gacaaatccttcagattatgtagaggca

SEQ ID NO: 11582 - DNA, 28 bp, Artificial Sequence
  Description of Artificial Sequence: Synthetic primer
atgttcttgacaattgatgttgatgacc

SEQ ID NO: 11583 - DNA, 21 bp, Artificial Sequence
  Description of Artificial Sequence: Synthetic primer
ggtcgccgaggtcatttacaa

SEQ ID NO: 11584 - DNA, 23 bp, Artificial Sequence
  Description of Artificial Sequence: Synthetic primer
ttctaaggatacccacctgttgc

SEQ ID NO: 11585 - DNA, 19 bp, Artificial Sequence
  Description of Artificial Sequence: Synthetic primer
ggatctggtccgggttctt

SEQ ID NO: 11586 - DNA, 23 bp, Artificial Sequence
  Description of Artificial Sequence: Synthetic primer
gcactctactatgtcaccggaaa

SEQ ID NO: 11587 - DNA, 28 bp, Artificial Sequence
  Description of Artificial Sequence: Synthetic primer
cgcttctgcattatattcagattcatca

SEQ ID NO: 11588 - DNA, 24 bp, Artificial Sequence
  Description of Artificial Sequence: Synthetic primer
gacaactgcaatgatgctggtaga

SEQ ID NO: 11589 - DNA, 26 bp, Artificial Sequence
  Description of Artificial Sequence: Synthetic primer
gggctcaatcctcttatgtttacctt

SEQ ID NO: 11590 - DNA, 21 bp, Artificial Sequence
  Description of Artificial Sequence: Synthetic primer
atcaacggaaaggacctctcg

SEQ ID NO: 11591 - DNA, 21 bp, Artificial Sequence
  Description of Artificial Sequence: Synthetic primer
ataccaggtgtctggcgagta

SEQ ID NO: 11592 - DNA, 23 bp, Artificial Sequence
  Description of Artificial Sequence: Synthetic primer
gaatgcaagaattgcggacattg

SEQ ID NO: 11593 - DNA, 21 bp, Artificial Sequence
  Description of Artificial Sequence: Synthetic primer
gcctgtgtacacatgacttcg

SEQ ID NO: 11594 - DNA, 21 bp, Artificial Sequence
  Description of Artificial Sequence: Synthetic primer
gggttcttgtacaccctcgtc

SEQ ID NO: 11595 - DNA, 26 bp, Artificial Sequence
  Description of Artificial Sequence: Synthetic primer
ggaactgatcaacatactttcgttgc

SEQ ID NO: 11596 - DNA, 27 bp, Artificial Sequence
  Description of Artificial Sequence: Synthetic primer
agctggagaaatatacttggaatcctg

SEQ ID NO: 11597 - DNA, 24 bp, Artificial Sequence
  Description of Artificial Sequence: Synthetic primer
gctctcaagatcatttcagggctt

SEQ ID NO: 11598 - DNA, 24 bp, Artificial Sequence
  Description of Artificial Sequence: Synthetic primer
gtgtggtaggcttacttcacgaaa

SEQ ID NO: 11599 - DNA, 26 bp, Artificial Sequence
  Description of Artificial Sequence: Synthetic primer
ttcagtttttgcaacctcaatagctt

SEQ ID NO: 11600 - DNA, 28 bp, Artificial Sequence
  Description of Artificial Sequence: Synthetic primer
gtggatattgatacactactagcttccg

SEQ ID NO: 11601 - DNA, 21 bp, Artificial Sequence
  Description of Artificial Sequence: Synthetic primer
cccatggacacccttcttcct

SEQ ID NO: 11602 - DNA, 26 bp, Artificial Sequence
  Description of Artificial Sequence: Synthetic primer
ctttctttgctgattcatacccactc

SEQ ID NO: 11603 - DNA, 21 bp, Artificial Sequence
  Description of Artificial Sequence: Synthetic primer
gatgagatgcaagcagttgcg

SEQ ID NO: 11604 - DNA, 21 bp, Artificial Sequence
  Description of Artificial Sequence: Synthetic primer
gcgtttgttgtgcgaactgaa

SEQ ID NO: 11605 - DNA, 21 bp, Artificial Sequence
  Description of Artificial Sequence: Synthetic primer
gttggctgcagttaactgctt

SEQ ID NO: 11606 - DNA, 28 bp, Artificial Sequence
  Description of Artificial Sequence: Synthetic primer
ctttgaggattttgtgaagaaccacttt

SEQ ID NO: 11607 - DNA, 28 bp, Artificial Sequence
  Description of Artificial Sequence: Synthetic primer
gaatcaatctgtggaagaacaccataga

SEQ ID NO: 11608 - DNA, 23 bp, Artificial Sequence
  Description of Artificial Sequence: Synthetic primer
actggtatttcttcagccgagtc

SEQ ID NO: 11609 - DNA, 22 bp, Artificial Sequence
  Description of Artificial Sequence: Synthetic primer
tcgctatctcgccatttcaaca

SEQ ID NO: 11610 - DNA, 22 bp, Artificial Sequence
  Description of Artificial Sequence: Synthetic primer
tgctacagccattgcatcatct

SEQ ID NO: 11611 - DNA, 27 bp, Artificial Sequence
  Description of Artificial Sequence: Synthetic primer
aatcattcttcgacccacttaacaaga

SEQ ID NO: 11612 - DNA, 27 bp, Artificial Sequence
  Description of Artificial Sequence: Synthetic primer
gttgtctgaatacacactggacaattt

SEQ ID NO: 11613 - DNA, 22 bp, Artificial Sequence
  Description of Artificial Sequence: Synthetic primer
tggtggcctgtcaaatgatgtt

SEQ ID NO: 11614 - DNA, 28 bp, Artificial Sequence
  Description of Artificial Sequence: Synthetic primer
tccttttgttagatcagacgatgaatga

SEQ ID NO: 11615 - DNA, 21 bp, Artificial Sequence
  Description of Artificial Sequence: Synthetic primer
cccgtacttgaacgtgctgta

SEQ ID NO: 11616 - DNA, 27 bp, Artificial Sequence
  Description of Artificial Sequence: Synthetic primer
gctcacgttattaacatcaaactggca

SEQ ID NO: 11617 - DNA, 23 bp, Artificial Sequence
  Description of Artificial Sequence: Synthetic primer
tgctggatacggtcagtactaca

SEQ ID NO: 11618 - DNA, 23 bp, Artificial Sequence
  Description of Artificial Sequence: Synthetic primer
cgctgccaatttgtttcttgtgg

SEQ ID NO: 11619 - DNA, 23 bp, Artificial Sequence
  Description of Artificial Sequence: Synthetic primer
gattggttcctcttctggtccaa

SEQ ID NO: 11620 - DNA, 21 bp, Artificial Sequence
  Description of Artificial Sequence: Synthetic primer
gatcagggtgggcgaatactc

SEQ ID NO: 11621 - DNA, 21 bp, Artificial Sequence
  Description of Artificial Sequence: Synthetic primer
tgagttctgggacatgaacgc

SEQ ID NO: 11622 - DNA, 21 bp, Artificial Sequence
  Description of Artificial Sequence: Synthetic primer
ggttcgcggagggtatttcaa

SEQ ID NO: 11623 - DNA, 21 bp, Artificial Sequence
  Description of Artificial Sequence: Synthetic primer
gttcaacaatgccacgagcac

SEQ ID NO: 11624 - DNA, 21 bp, Artificial Sequence
  Description of Artificial Sequence: Synthetic primer
tacaacatgccctgtcccaga

SEQ ID NO: 11625 - DNA, 28 bp, Artificial Sequence
  Description of Artificial Sequence: Synthetic primer
acaagaaggcaaaacaatttacgatctc

SEQ ID NO: 11626 - DNA, 24 bp, Artificial Sequence
  Description of Artificial Sequence: Synthetic primer
aggattaaccaggtacttgcaaca

SEQ ID NO: 11627 - DNA, 26 bp, Artificial Sequence
  Description of Artificial Sequence: Synthetic primer
agtctatgattctgcttatgccatgt

SEQ ID NO: 11628 - DNA, 19 bp, Artificial Sequence
  Description of Artificial Sequence: Synthetic primer
gttgctgctcatgcgtcac

SEQ ID NO: 11629 - DNA, 27 bp, Artificial Sequence
  Description of Artificial Sequence: Synthetic primer
aatgcttggattggatgtgatatttgg

SEQ ID NO: 11630 - DNA, 22 bp, Artificial Sequence
  Description of Artificial Sequence: Synthetic primer
tggtttcgtgagaacctcaaca

SEQ ID NO: 11631 - DNA, 21 bp, Artificial Sequence
  Description of Artificial Sequence: Synthetic primer
tgaaggtctctaccggtcctg

SEQ ID NO: 11632 - DNA, 21 bp, Artificial Sequence
  Description of Artificial Sequence: Synthetic primer
tcctctccacgaccaagacaa

SEQ ID NO: 11633 - DNA, 23 bp, Artificial Sequence
  Description of Artificial Sequence: Synthetic primer
ccctgctgaaatcatcgtgaatg

SEQ ID NO: 11634 - DNA, 22 bp, Artificial Sequence
  Description of Artificial Sequence: Synthetic primer
tggcagtagcaacaacattgac

SEQ ID NO: 11635 - DNA, 21 bp, Artificial Sequence
  Description of Artificial Sequence: Synthetic primer
gtgaagctgctgagctctcaa

SEQ ID NO: 11636 - DNA, 23 bp, Artificial Sequence
  Description of Artificial Sequence: Synthetic primer
tgacctcctcagagagactgatg

SEQ ID NO: 11637 - DNA, 21 bp, Artificial Sequence
  Description of Artificial Sequence: Synthetic primer
ccattcctgtatgccactcgt

SEQ ID NO: 11638 - DNA, 26 bp, Artificial Sequence
  Description of Artificial Sequence: Synthetic primer
aaggtggtgatgatctgtatgaagtg

SEQ ID NO: 11639 - DNA, 23 bp, Artificial Sequence
  Description of Artificial Sequence: Synthetic primer
ccgttagggaagaggatggagaa

SEQ ID NO: 11640 - DNA, 21 bp, Artificial Sequence
  Description of Artificial Sequence: Synthetic primer
ttcagattgctgccgactcac

SEQ ID NO: 11641 - DNA, 26 bp, Artificial Sequence
  Description of Artificial Sequence: Synthetic primer
gctcttgtccatcttatcttctccag

SEQ ID NO: 11642 - DNA, 27 bp, Artificial Sequence
  Description of Artificial Sequence: Synthetic primer
gggcatcaagttcagagagtaaaattc

SEQ ID NO: 11643 - DNA, 21 bp, Artificial Sequence
  Description of Artificial Sequence: Synthetic primer
cgctgtacctgtcgatgaacg

SEQ ID NO: 11644 - DNA, 25 bp, Artificial Sequence
  Description of Artificial Sequence: Synthetic primer
caaaagcatggctttctgaaaacaa

SEQ ID NO: 11645 - DNA, 23 bp, Artificial Sequence
  Description of Artificial Sequence: Synthetic primer
agcctcagaagcacatgtgttag

SEQ ID NO: 11646 - DNA, 21 bp, Artificial Sequence
  Description of Artificial Sequence: Synthetic primer
cggaagagtcgtctccaatgt

SEQ ID NO: 11647 - DNA, 21 bp, Artificial Sequence
  Description of Artificial Sequence: Synthetic primer
agacatgcaagagcggcttaa

SEQ ID NO: 11648 - DNA, 26 bp, Artificial Sequence
  Description of Artificial Sequence: Synthetic primer
tagagaatgcctcagttttgtactcc

SEQ ID NO: 11649 - DNA, 21 bp, Artificial Sequence
  Description of Artificial Sequence: Synthetic primer
gttcgagttcccagactcagg

SEQ ID NO: 11650 - DNA, 21 bp, Artificial Sequence
  Description of Artificial Sequence: Synthetic primer
cagggttgtggatgaaggcta

SEQ ID NO: 11651 - DNA, 21 bp, Artificial Sequence
  Description of Artificial Sequence: Synthetic primer
gacgaacggagtcctatgtcc

SEQ ID NO: 11652 - DNA, 21 bp, Artificial Sequence
  Description of Artificial Sequence: Synthetic primer
gttggtttggtgtagcagacg

SEQ ID NO: 11653 - DNA, 21 bp, Artificial Sequence
  Description of Artificial Sequence: Synthetic primer
caatgccgtcatgaagggcta

SEQ ID NO: 11654 - DNA, 22 bp, Artificial Sequence
  Description of Artificial Sequence: Synthetic primer
gttcttcaccatcgcaagcttc

SEQ ID NO: 11655 - DNA, 23 bp, Artificial Sequence
  Description of Artificial Sequence: Synthetic primer
gttgcaaggttgaggaatcatcc

SEQ ID NO: 11656 - DNA, 21 bp, Artificial Sequence
  Description of Artificial Sequence: Synthetic primer
gagcaggctctgttctcagtt

SEQ ID NO: 11657 - DNA, 22 bp, Artificial Sequence
  Description of Artificial Sequence: Synthetic primer
aatgacgacgaggactctgatg

SEQ ID NO: 11658 - DNA, 23 bp, Artificial Sequence
  Description of Artificial Sequence: Synthetic primer
ggagataggaacaggacatcgag

SEQ ID NO: 11659 - DNA, 20 bp, Artificial Sequence
  Description of Artificial Sequence: Synthetic primer
gggagtgccactcaacaaag

SEQ ID NO: 11660 - DNA, 25 bp, Artificial Sequence
  Description of Artificial Sequence: Synthetic primer
tcgaaaaatgaaggcagttctcttg

SEQ ID NO: 11661 - DNA, 25 bp, Artificial Sequence
  Description of Artificial Sequence: Synthetic primer
agaaagcaatcctgaacctttcact

SEQ ID NO: 11662 - DNA, 22 bp, Artificial Sequence
  Description of Artificial Sequence: Synthetic primer
ggttgcaatcctgctaggatca

SEQ ID NO: 11663 - DNA, 23 bp, Artificial Sequence
  Description of Artificial Sequence: Synthetic primer
tctaccgaaccgatcaaaagagg

SEQ ID NO: 11664 - DNA, 25 bp, Artificial Sequence
  Description of Artificial Sequence: Synthetic primer
tccaacagatttggagatgaaccat

SEQ ID NO: 11665 - DNA, 22 bp, Artificial Sequence
  Description of Artificial Sequence: Synthetic primer
ttggtggctgttcaaatgactg

SEQ ID NO: 11666 - DNA, 24 bp, Artificial Sequence
  Description of Artificial Sequence: Synthetic primer
ggtccaaatggtagcatctactct

SEQ ID NO: 11667 - DNA, 23 bp, Artificial Sequence
  Description of Artificial Sequence: Synthetic primer
gtctctgacagtatcacgcgatg

SEQ ID NO: 11668 - DNA, 26 bp, Artificial Sequence
  Description of Artificial Sequence: Synthetic primer
tgtggaaagaatgaaccaatcgaaga

SEQ ID NO: 11669 - DNA, 21 bp, Artificial Sequence
  Description of Artificial Sequence: Synthetic primer
aggaggattggactgcagtca

SEQ ID NO: 11670 - DNA, 28 bp, Artificial Sequence
  Description of Artificial Sequence: Synthetic primer
tgaatacaacaacagtgaaaggaaaaca

SEQ ID NO: 11671 - DNA, 23 bp, Artificial Sequence
  Description of Artificial Sequence: Synthetic primer
tgatttgctttgttgggacatgg

SEQ ID NO: 11672 - DNA, 22 bp, Artificial Sequence
  Description of Artificial Sequence: Synthetic primer
tgtaaagcccggttggaagaaa

SEQ ID NO: 11673 - DNA, 23 bp, Artificial Sequence
  Description of Artificial Sequence: Synthetic primer
aagaagcatgtgacgcattcatg

SEQ ID NO: 11674 - DNA, 26 bp, Artificial Sequence
  Description of Artificial Sequence: Synthetic primer
accgatctgcatatgagattattgct

SEQ ID NO: 11675 - DNA, 22 bp, Artificial Sequence
  Description of Artificial Sequence: Synthetic primer
agcacccaatgtatagcagagg

SEQ ID NO: 11676 - DNA, 21 bp, Artificial Sequence
  Description of Artificial Sequence: Synthetic primer
ggatgaccgtagtcctgggaa

SEQ ID NO: 11677 - DNA, 21 bp, Artificial Sequence
  Description of Artificial Sequence: Synthetic primer
ggtgacggtgtgctgattctt

SEQ ID NO: 11678 - DNA, 21 bp, Artificial Sequence
  Description of Artificial Sequence: Synthetic primer
tgccatctcaaaaagcgttgc

SEQ ID NO: 11679 - DNA, 25 bp, Artificial Sequence
  Description of Artificial Sequence: Synthetic primer
gatataaaatccagctacggtgtgc

SEQ ID NO: 11680 - DNA, 23 bp, Artificial Sequence
  Description of Artificial Sequence: Synthetic primer
gagcatacatcttgccaacatgg

SEQ ID NO: 11681 - DNA, 23 bp, Artificial Sequence
  Description of Artificial Sequence: Synthetic primer
aatatcacggagctgtagcagtc

SEQ ID NO: 11682 - DNA, 26 bp, Artificial Sequence
  Description of Artificial Sequence: Synthetic primer
tctcacataactaccacaagcaaagg

SEQ ID NO: 11683 - DNA, 26 bp, Artificial Sequence
  Description of Artificial Sequence: Synthetic primer
gctattgccttaccactaactctctt

SEQ ID NO: 11684 - DNA, 22 bp, Artificial Sequence
  Description of Artificial Sequence: Synthetic primer
cgtccttatggtggtgttctgt

SEQ ID NO: 11685 - DNA, 22 bp, Artificial Sequence
  Description of Artificial Sequence: Synthetic primer
agtgtcctaaccatgggcatag

SEQ ID NO: 11686 - DNA, 22 bp, Artificial Sequence
  Description of Artificial Sequence: Synthetic primer
caagttcgtcaagttcgacgtg

SEQ ID NO: 11687 - DNA, 23 bp, Artificial Sequence
  Description of Artificial Sequence: Synthetic primer
ccccactctcaaattgtacaacg

SEQ ID NO: 11688 - DNA, 21 bp, Artificial Sequence
  Description of Artificial Sequence: Synthetic primer
gctgacgttggatacaactgc

SEQ ID NO: 11689 - DNA, 26 bp, Artificial Sequence
  Description of Artificial Sequence: Synthetic primer
tggagtccagaaaaattggatcaaac

SEQ ID NO: 11690 - DNA, 28 bp, Artificial Sequence
  Description of Artificial Sequence: Synthetic primer
aaagggaatatataagggaactcgatgc

SEQ ID NO: 11691 - DNA, 21 bp, Artificial Sequence
  Description of Artificial Sequence: Synthetic primer
ccaccacttgccttcttcagg

SEQ ID NO: 11692 - DNA, 21 bp, Artificial Sequence
  Description of Artificial Sequence: Synthetic primer
gttcttgaggagcgtcttggt

SEQ ID NO: 11693 - DNA, 23 bp, Artificial Sequence
  Description of Artificial Sequence: Synthetic primer
tattcctggtgtcaggttcaagg

SEQ ID NO: 11694 - DNA, 21 bp, Artificial Sequence
  Description of Artificial Sequence: Synthetic primer
gcgttctcctggttggttatg

SEQ ID NO: 11695 - DNA, 22 bp, Artificial Sequence
  Description of Artificial Sequence: Synthetic primer
gccgagtacaccaagaagatcg

SEQ ID NO: 11696 - DNA, 26 bp, Artificial Sequence
  Description of Artificial Sequence: Synthetic primer
cctcatcaagatatacttccccgtca

SEQ ID NO: 11697 - DNA, 21 bp, Artificial Sequence
  Description of Artificial Sequence: Synthetic primer
cctgaccttgtcaccatccac

SEQ ID NO: 11698 - DNA, 21 bp, Artificial Sequence
  Description of Artificial Sequence: Synthetic primer
gttgatgcccctgacgatttc

SEQ ID NO: 11699 - DNA, 18 bp, Artificial Sequence
  Description of Artificial Sequence: Synthetic primer
ggtgacgacgctgctctg

SEQ ID NO: 11700 - DNA, 23 bp, Artificial Sequence
  Description of Artificial Sequence: Synthetic primer
cctggatggagtgctacatagtc

SEQ ID NO: 11701 - DNA, 28 bp, Artificial Sequence
  Description of Artificial Sequence: Synthetic primer
tcctaacacaaccttacttccgaacata

SEQ ID NO: 11702 - DNA, 24 bp, Artificial Sequence
  Description of Artificial Sequence: Synthetic primer
taacaatggcatagagcgaaaacc

SEQ ID NO: 11703 - DNA, 22 bp, Artificial Sequence
  Description of Artificial Sequence: Synthetic primer
acctcctggattcatgatggga

SEQ ID NO: 11704 - DNA, 28 bp, Artificial Sequence
  Description of Artificial Sequence: Synthetic primer
aaagattagaagctgaaccaagaagaca

SEQ ID NO: 11705 - DNA, 21 bp, Artificial Sequence
  Description of Artificial Sequence: Synthetic primer
actggctggagtacaggaaga

SEQ ID NO: 11706 - DNA, 22 bp, Artificial Sequence
  Description of Artificial Sequence: Synthetic primer
gagtttgtggcgatgatgaagg

SEQ ID NO: 11707 - DNA, 22 bp, Artificial Sequence
  Description of Artificial Sequence: Synthetic primer
cactctctcaactgcctctctg

SEQ ID NO: 11708 - DNA, 23 bp, Artificial Sequence
  Description of Artificial Sequence: Synthetic primer
tgatacggatcatctgctccaat

SEQ ID NO: 11709 - DNA, 21 bp, Artificial Sequence
  Description of Artificial Sequence: Synthetic primer
tagcattgggagatgctggaa

SEQ ID NO: 11710 - DNA, 22 bp, Artificial Sequence
  Description of Artificial Sequence: Synthetic primer
tacattgcctctctctccctct

SEQ ID NO: 11711 - DNA, 24 bp, Artificial Sequence
  Description of Artificial Sequence: Synthetic primer
cgatccttgatcaagctgttgttg

SEQ ID NO: 11712 - DNA, 28 bp, Artificial Sequence
  Description of Artificial Sequence: Synthetic primer
acatgaaccaattcaaatgaaatcgaca

SEQ ID NO: 11713 - DNA, 22 bp, Artificial Sequence
  Description of Artificial Sequence: Synthetic primer
ggctacaaagtcgtggagaagg

SEQ ID NO: 11714 - DNA, 21 bp, Artificial Sequence
  Description of Artificial Sequence: Synthetic primer
gggcgatgagcgaactactag

SEQ ID NO: 11715 - DNA, 22 bp, Artificial Sequence
  Description of Artificial Sequence: Synthetic primer
tgcccaagcttgagaagattgt

SEQ ID NO: 11716 - DNA, 21 bp, Artificial Sequence
  Description of Artificial Sequence: Synthetic primer
cagccaatcaaggagtctgct

SEQ ID NO: 11717 - DNA, 22 bp, Artificial Sequence
  Description of Artificial Sequence: Synthetic primer
tcttaagctgaagagggagcag

SEQ ID NO: 11718 - DNA, 21 bp, Artificial Sequence
  Description of Artificial Sequence: Synthetic primer
ttcctcggaaagcgcattgaa

SEQ ID NO: 11719 - DNA, 23 bp, Artificial Sequence
  Description of Artificial Sequence: Synthetic primer
cccgtcaagtcttcactgaagaa

SEQ ID NO: 11720 - DNA, 28 bp, Artificial Sequence
  Description of Artificial Sequence: Synthetic primer
gattgtgaaatcatgggctatgacatac

SEQ ID NO: 11721 - DNA, 27 bp, Artificial Sequence
  Description of Artificial Sequence: Synthetic primer
taaggctctcaggatcctcaataatct

SEQ ID NO: 11722 - DNA, 21 bp, Artificial Sequence
  Description of Artificial Sequence: Synthetic primer
taacgcatgcaaatgcgaaga

SEQ ID NO: 11723 - DNA, 25 bp, Artificial Sequence
  Description of Artificial Sequence: Synthetic primer
gggatttccaggaaaacaatggtac

SEQ ID NO: 11724 - DNA, 23 bp, Artificial Sequence
  Description of Artificial Sequence: Synthetic primer
agccctgcgtgtggactatataa

SEQ ID NO: 11725 - DNA, 19 bp, Artificial Sequence
  Description of Artificial Sequence: Synthetic primer
ggaggcgcttgcattcttg

SEQ ID NO: 11726 - DNA, 22 bp, Artificial Sequence
  Description of Artificial Sequence: Synthetic primer
gtcgccttgcacataatgcttg

SEQ ID NO: 11727 - DNA, 23 bp, Artificial Sequence
  Description of Artificial Sequence: Synthetic primer
acatcgaacatcacctccgtcta

SEQ ID NO: 11728 - DNA, 26 bp, Artificial Sequence
  Description of Artificial Sequence: Synthetic primer
gcccattaattagtacctgaaggtca

SEQ ID NO: 11729 - DNA, 25 bp, Artificial Sequence
  Description of Artificial Sequence: Synthetic primer
tcaatgctggaggtttaacttccat

SEQ ID NO: 11730 - DNA, 18 bp, Artificial Sequence
  Description of Artificial Sequence: Synthetic primer
ccatcccgtgcgcagaac

SEQ ID NO: 11731 - DNA, 25 bp, Artificial Sequence
  Description of Artificial Sequence: Synthetic primer
tcaaattggtgtcttttggctttgc

SEQ ID NO: 11732 - DNA, 21 bp, Artificial Sequence
  Description of Artificial Sequence: Synthetic primer
caattcaccaccgcgatacga

SEQ ID NO: 11733 - DNA, 22 bp, Artificial Sequence
  Description of Artificial Sequence: Synthetic primer
ggcaattcccatgtctgcaaat

SEQ ID NO: 11734 - DNA, 26 bp, Artificial Sequence
  Description of Artificial Sequence: Synthetic primer
tgagagaaacttatggctagagcaga

SEQ ID NO: 11735 - DNA, 21 bp, Artificial Sequence
  Description of Artificial Sequence: Synthetic primer
ctcgtggaccactccatcatc

SEQ ID NO: 11736 - DNA, 28 bp, Artificial Sequence
  Description of Artificial Sequence: Synthetic primer
ggaaaagtaatatcggctgttcttcatc

SEQ ID NO: 11737 - DNA, 22 bp, Artificial Sequence
  Description of Artificial Sequence: Synthetic primer
gctctaaaccaccaggtgttct

SEQ ID NO: 11738 - DNA, 19 bp, Artificial Sequence
  Description of Artificial Sequence: Synthetic primer
gaagctgctggtgcttgac

SEQ ID NO: 11739 - DNA, 18 bp, Artificial Sequence
  Description of Artificial Sequence: Synthetic primer
ccgccaccgctgaatcac

SEQ ID NO: 11740 - DNA, 28 bp, Artificial Sequence
  Description of Artificial Sequence: Synthetic primer
tcatataaatcacaaagcttaccaagcg

SEQ ID NO: 11741 - DNA, 27 bp, Artificial Sequence
  Description of Artificial Sequence: Synthetic primer
cagaaatttccaactgttgcaaagact

SEQ ID NO: 11742 - DNA, 27 bp, Artificial Sequence
  Description of Artificial Sequence: Synthetic primer
tatctggtgcgtgtatgtgatttttca

SEQ ID NO: 11743 - DNA, 21 bp, Artificial Sequence
  Description of Artificial Sequence: Synthetic primer
atcactatggcttcacgacga

SEQ ID NO: 11744 - DNA, 28 bp, Artificial Sequence
  Description of Artificial Sequence: Synthetic primer
aacgtccataacgaacatattttgtgat

SEQ ID NO: 11745 - DNA, 22 bp, Artificial Sequence
  Description of Artificial Sequence: Synthetic primer
aagggcagagctatagacacct

SEQ ID NO: 11746 - DNA, 24 bp, Artificial Sequence
  Description of Artificial Sequence: Synthetic primer
gtgccagggccttacagtatttat

SEQ ID NO: 11747 - DNA, 21 bp, Artificial Sequence
  Description of Artificial Sequence: Synthetic primer
gacagggccctggaactaatt

SEQ ID NO: 11748 - DNA, 21 bp, Artificial Sequence
  Description of Artificial Sequence: Synthetic primer
gagctcagcctgcatgatctt

SEQ ID NO: 11749 - DNA, 24 bp, Artificial Sequence
  Description of Artificial Sequence: Synthetic primer
agcttagctgttgatggtagactg

SEQ ID NO: 11750 - DNA, 19 bp, Artificial Sequence
  Description of Artificial Sequence: Synthetic primer
gtttcggcacaacgtagcg

SEQ ID NO: 11751 - DNA, 21 bp, Artificial Sequence
  Description of Artificial Sequence: Synthetic primer
gtaacgaggcaaagggtccaa

SEQ ID NO: 11752 - DNA, 23 bp, Artificial Sequence
  Description of Artificial Sequence: Synthetic primer
gccatcatgaatgtagtctggct

SEQ ID NO: 11753 - DNA, 22 bp, Artificial Sequence
  Description of Artificial Sequence: Synthetic primer
ggtgcggtagtttctcgagaat

SEQ ID NO: 11754 - DNA, 24 bp, Artificial Sequence
  Description of Artificial Sequence: Synthetic primer
gtggctggtattcccaagacaata

SEQ ID NO: 11755 - DNA, 18 bp, Artificial Sequence
  Description of Artificial Sequence: Synthetic primer
ctgagatggtgcggctga

SEQ ID NO: 11756 - DNA, 20 bp, Artificial Sequence
  Description of Artificial Sequence: Synthetic primer
ccagtcagtgcttcctgctt

SEQ ID NO: 11757 - DNA, 21 bp, Artificial Sequence
  Description of Artificial Sequence: Synthetic primer
gattgccgtgtcatagagcct

SEQ ID NO: 11758 - DNA, 21 bp, Artificial Sequence
  Description of Artificial Sequence: Synthetic primer
tggagctgctggaccttctat

SEQ ID NO: 11759 - DNA, 26 bp, Artificial Sequence
  Description of Artificial Sequence: Synthetic primer
cactacgaatagtcagactgctactg

SEQ ID NO: 11760 - DNA, 21 bp, Artificial Sequence
  Description of Artificial Sequence: Synthetic primer
ggcacccctattctctcatcg

SEQ ID NO: 11761 - DNA, 21 bp, Artificial Sequence
  Description of Artificial Sequence: Synthetic primer
tttgaccgggagtttatgcca

SEQ ID NO: 11762 - DNA, 23 bp, Artificial Sequence
  Description of Artificial Sequence: Synthetic primer
catgtagtcacaaggcttggatg

SEQ ID NO: 11763 - DNA, 26 bp, Artificial Sequence
  Description of Artificial Sequence: Synthetic primer
gggcagcatatattgcatgttttagt

SEQ ID NO: 11764 - DNA, 23 bp, Artificial Sequence
  Description of Artificial Sequence: Synthetic primer
gggtgtctacaatcccaagaagc

SEQ ID NO: 11765 - DNA, 24 bp, Artificial Sequence
  Description of Artificial Sequence: Synthetic primer
aaaatttaaaggaactggcgagca

SEQ ID NO: 11766 - DNA, 27 bp, Artificial Sequence
  Description of Artificial Sequence: Synthetic primer
gatacatatgctacaagaagacaggct

SEQ ID NO: 11767 - DNA, 23 bp, Artificial Sequence
  Description of Artificial Sequence: Synthetic primer
tggaattgtaagctgtgctcaga

SEQ ID NO: 11768 - DNA, 27 bp, Artificial Sequence
  Description of Artificial Sequence: Synthetic primer
gaaaatggacacagatcctaacgtgaa

SEQ ID NO: 11769 - DNA, 21 bp, Artificial Sequence
  Description of Artificial Sequence: Synthetic primer
tctagcaccacgtatgcggta

SEQ ID NO: 11770 - DNA, 27 bp, Artificial Sequence
  Description of Artificial Sequence: Synthetic primer
gtgttgtttgagaccagtagattttga

SEQ ID NO: 11771 - DNA, 21 bp, Artificial Sequence
  Description of Artificial Sequence: Synthetic primer
cgtcatgaacgcctgagaact

SEQ ID NO: 11772 - DNA, 28 bp, Artificial Sequence
  Description of Artificial Sequence: Synthetic primer
aaagtgctgaaagagttggatatagagt

SEQ ID NO: 11773 - DNA, 23 bp, Artificial Sequence
  Description of Artificial Sequence: Synthetic primer
attcaggatggtgtcttccttgt

SEQ ID NO: 11774 - DNA, 21 bp, Artificial Sequence
  Description of Artificial Sequence: Synthetic primer
gggatcgttcatggtctcgtc

SEQ ID NO: 11775 - DNA, 22 bp, Artificial Sequence
  Description of Artificial Sequence: Synthetic primer
tccttctgcatcgagatgaagc

SEQ ID NO: 11776 - DNA, 22 bp, Artificial Sequence
  Description of Artificial Sequence: Synthetic primer
ggcatcgtcgctgatagtatcc

SEQ ID NO: 11777 - DNA, 27 bp, Artificial Sequence
  Description of Artificial Sequence: Synthetic primer
agggtcatctgtatttgaacagtttct

SEQ ID NO: 11778 - DNA, 22 bp, Artificial Sequence
  Description of Artificial Sequence: Synthetic primer
cacatggcgtctatcacacatg

SEQ ID NO: 11779 - DNA, 20 bp, Artificial Sequence
  Description of Artificial Sequence: Synthetic primer
ctttgcccctgggactagga

SEQ ID NO: 11780 - DNA, 25 bp, Artificial Sequence
  Description of Artificial Sequence: Synthetic primer
tctgaggttggaaatgagaatgcaa

SEQ ID NO: 11781 - DNA, 24 bp, Artificial Sequence
  Description of Artificial Sequence: Synthetic primer
aaagagcactcttcatgtggaaca

SEQ ID NO: 11782 - DNA, 21 bp, Artificial Sequence
  Description of Artificial Sequence: Synthetic primer
ggtatttccccaaggcccttt

SEQ ID NO: 11783 - DNA, 21 bp, Artificial Sequence
  Description of Artificial Sequence: Synthetic primer
ggcaaccatttggcagagttc

SEQ ID NO: 11784 - DNA, 21 bp, Artificial Sequence
  Description of Artificial Sequence: Synthetic primer
caggactgctcgaatctggtc

SEQ ID NO: 11785 - DNA, 26 bp, Artificial Sequence
  Description of Artificial Sequence: Synthetic primer
tctcatcttgaagttccccatactga

SEQ ID NO: 11786 - DNA, 28 bp, Artificial Sequence
  Description of Artificial Sequence: Synthetic primer
gggaagttgtcaaaattgataacaaagc

SEQ ID NO: 11787 - DNA, 26 bp, Artificial Sequence
  Description of Artificial Sequence: Synthetic primer
cggctgtacataaataaatcacgtgt

SEQ ID NO: 11788 - DNA, 27 bp, Artificial Sequence
  Description of Artificial Sequence: Synthetic primer
cctattccgagaactaggattgagaca

SEQ ID NO: 11789 - DNA, 26 bp, Artificial Sequence
  Description of Artificial Sequence: Synthetic primer
gctttaataaattttgcctgcagcct

SEQ ID NO: 11790 - DNA, 25 bp, Artificial Sequence
  Description of Artificial Sequence: Synthetic primer
gaaccgtttgacatcggagatgtat

SEQ ID NO: 11791 - DNA, 21 bp, Artificial Sequence
  Description of Artificial Sequence: Synthetic primer
gtccactcagcttcactcacg

SEQ ID NO: 11792 - DNA, 25 bp, Artificial Sequence
  Description of Artificial Sequence: Synthetic primer
cttcaaacttgttctctgctgtcac

SEQ ID NO: 11793 - DNA, 25 bp, Artificial Sequence
  Description of Artificial Sequence: Synthetic primer
gcctggttttcacttgtattgttct

SEQ ID NO: 11794 - DNA, 24 bp, Artificial Sequence
  Description of Artificial Sequence: Synthetic primer
gtttctacaccgtttcaacttgcc

SEQ ID NO: 11795 - DNA, 21 bp, Artificial Sequence
  Description of Artificial Sequence: Synthetic primer
cacgccgtatccaagattgct

SEQ ID NO: 11796 - DNA, 24 bp, Artificial Sequence
  Description of Artificial Sequence: Synthetic primer
aactggtggagaaagtcagaatcg

SEQ ID NO: 11797 - DNA, 23 bp, Artificial Sequence
  Description of Artificial Sequence: Synthetic primer
gctaaaaagcaccgacctaaaca

SEQ ID NO: 11798 - DNA, 22 bp, Artificial Sequence
  Description of Artificial Sequence: Synthetic primer
tgcagcagttgttgtgaacaag

SEQ ID NO: 11799 - DNA, 21 bp, Artificial Sequence
  Description of Artificial Sequence: Synthetic primer
cgacaggagctaccatcaagg

SEQ ID NO: 11800 - DNA, 22 bp, Artificial Sequence
  Description of Artificial Sequence: Synthetic primer
gggatgctattcagcgatgagt

SEQ ID NO: 11801 - DNA, 25 bp, Artificial Sequence
  Description of Artificial Sequence: Synthetic primer
gttcaagacagaatcaatggcctca

SEQ ID NO: 11802 - DNA, 26 bp, Artificial Sequence
  Description of Artificial Sequence: Synthetic primer
ttgtttgctgaacctaactaaggagt

SEQ ID NO: 11803 - DNA, 27 bp, Artificial Sequence
  Description of Artificial Sequence: Synthetic primer
acacattgaagagcaagagaatcaaag

SEQ ID NO: 11804 - DNA, 22 bp, Artificial Sequence
  Description of Artificial Sequence: Synthetic primer
ccagactcacgagaacttggaa

SEQ ID NO: 11805 - DNA, 23 bp, Artificial Sequence
  Description of Artificial Sequence: Synthetic primer
atatgttgttaagcgaccgggat

SEQ ID NO: 11806 - DNA, 24 bp, Artificial Sequence
  Description of Artificial Sequence: Synthetic primer
ggcttcaaaggtgaagaaacttgt

SEQ ID NO: 11807 - DNA, 24 bp, Artificial Sequence
  Description of Artificial Sequence: Synthetic primer
tcccggatgattgatttgttacct

SEQ ID NO: 11808 - DNA, 22 bp, Artificial Sequence
  Description of Artificial Sequence: Synthetic primer
ggtcaggagatccagttttgct

SEQ ID NO: 11809 - DNA, 26 bp, Artificial Sequence
  Description of Artificial Sequence: Synthetic primer
aattcattagggacctcatgtacgtc

SEQ ID NO: 11810 - DNA, 21 bp, Artificial Sequence
  Description of Artificial Sequence: Synthetic primer
acgcttttgccctcctttagt

SEQ ID NO: 11811 - DNA, 21 bp, Artificial Sequence
  Description of Artificial Sequence: Synthetic primer
gagcccatccccatcatgaaa

SEQ ID NO: 11812 - DNA, 28 bp, Artificial Sequence
  Description of Artificial Sequence: Synthetic primer
atgttaagattaagagcattgctgttgt

SEQ ID NO: 11813 - DNA, 21 bp, Artificial Sequence
  Description of Artificial Sequence: Synthetic primer
agagaacgagtcggtgctttt

SEQ ID NO: 11814 - DNA, 18 bp, Artificial Sequence
  Description of Artificial Sequence: Synthetic primer
catgctgggccaccgaag

SEQ ID NO: 11815 - DNA, 28 bp, Artificial Sequence
  Description of Artificial Sequence: Synthetic primer
gaaaattatcaccctgtcatacggctta

SEQ ID NO: 11816 - DNA, 25 bp, Artificial Sequence
  Description of Artificial Sequence: Synthetic primer
gtgcttggtggatgtagatataccc

SEQ ID NO: 11817 - DNA, 21 bp, Artificial Sequence
  Description of Artificial Sequence: Synthetic primer
cgcgtggtttctccttgtttt

SEQ ID NO: 11818 - DNA, 28 bp, Artificial Sequence
  Description of Artificial Sequence: Synthetic primer
ggtgctgttacatggagattctttaaac

SEQ ID NO: 11819 - DNA, 21 bp, Artificial Sequence
  Description of Artificial Sequence: Synthetic primer
agtgtactacgtcgcactgac

SEQ ID NO: 11820 - DNA, 28 bp, Artificial Sequence
  Description of Artificial Sequence: Synthetic primer
cattcatacaactgttgtacttgctcat

SEQ ID NO: 11821 - DNA, 28 bp, Artificial Sequence
  Description of Artificial Sequence: Synthetic primer
gataaagaggataatggtacaaggagca

SEQ ID NO: 11822 - DNA, 21 bp, Artificial Sequence
  Description of Artificial Sequence: Synthetic primer
cttagacttgcagcaggtgga

SEQ ID NO: 11823 - DNA, 24 bp, Artificial Sequence
  Description of Artificial Sequence: Synthetic primer
tacgagcaatcagatagtccgttg

SEQ ID NO: 11824 - DNA, 22 bp, Artificial Sequence
  Description of Artificial Sequence: Synthetic primer
ggcctggaatctgcatacagaa

SEQ ID NO: 11825 - DNA, 19 bp, Artificial Sequence
  Description of Artificial Sequence: Synthetic primer
ggaggatgtcgccacacag

SEQ ID NO: 11826 - DNA, 23 bp, Artificial Sequence
  Description of Artificial Sequence: Synthetic primer
ttagaatgaagctcagggagacg

SEQ ID NO: 11827 - DNA, 28 bp, Artificial Sequence
  Description of Artificial Sequence: Synthetic primer
tcttttattatttccttgggcactgatg

SEQ ID NO: 11828 - DNA, 23 bp, Artificial Sequence
  Description of Artificial Sequence: Synthetic primer
ctgatggcaagggatgagttttg

SEQ ID NO: 11829 - DNA, 19 bp, Artificial Sequence
  Description of Artificial Sequence: Synthetic primer
cgaggacacggtgtgtgac

SEQ ID NO: 11830 - DNA, 24 bp, Artificial Sequence
  Description of Artificial Sequence: Synthetic primer
agacgcgattcaagaagtctttca

SEQ ID NO: 11831 - DNA, 25 bp, Artificial Sequence
  Description of Artificial Sequence: Synthetic primer
gggatccaggtaagcataaaatcca

SEQ ID NO: 11832 - DNA, 22 bp, Artificial Sequence
  Description of Artificial Sequence: Synthetic primer
cgcatacctgacaaccatgaca

SEQ ID NO: 11833 - DNA, 27 bp, Artificial Sequence
  Description of Artificial Sequence: Synthetic primer
tccaagtcttggaaaacagaaaatgac

SEQ ID NO: 11834 - DNA, 25 bp, Artificial Sequence
  Description of Artificial Sequence: Synthetic primer
aactcacacattttctgacttggtg

SEQ ID NO: 11835 - DNA, 23 bp, Artificial Sequence
  Description of Artificial Sequence: Synthetic primer
tgtgccaatggagattctagagg

SEQ ID NO: 11836 - DNA, 27 bp, Artificial Sequence
  Description of Artificial Sequence: Synthetic primer
tgaaggtaagctttgtatcagcaaaga

SEQ ID NO: 11837 - DNA, 27 bp, Artificial Sequence
  Description of Artificial Sequence: Synthetic primer
gccatttttgaactcaaagaacaagca

SEQ ID NO: 11838 - DNA, 24 bp, Artificial Sequence
  Description of Artificial Sequence: Synthetic primer
cgtttacttctttttcgccgtttg

SEQ ID NO: 11839 - DNA, 19 bp, Artificial Sequence
  Description of Artificial Sequence: Synthetic primer
tgctgtcgacggtgaacac

SEQ ID NO: 11840 - DNA, 25 bp, Artificial Sequence
  Description of Artificial Sequence: Synthetic primer
gctgagcggttgatgaatgataaat

SEQ ID NO: 11841 - DNA, 21 bp, Artificial Sequence
  Description of Artificial Sequence: Synthetic primer
gatgccagcaagagagcatca

SEQ ID NO: 11842 - DNA, 28 bp, Artificial Sequence
  Description of Artificial Sequence: Synthetic primer
tacagaaacgaaacatttgacagaagtg

SEQ ID NO: 11843 - DNA, 21 bp, Artificial Sequence
  Description of Artificial Sequence: Synthetic primer
ccgagatagctgtcgccattt

SEQ ID NO: 11844 - DNA, 21 bp, Artificial Sequence
  Description of Artificial Sequence: Synthetic primer
gagttggcctggaactagctt

SEQ ID NO: 11845 - DNA, 28 bp, Artificial Sequence
  Description of Artificial Sequence: Synthetic primer
tagttctagattttcttggtttgctgga

SEQ ID NO: 11846 - DNA, 27 bp, Artificial Sequence
  Description of Artificial Sequence: Synthetic primer
gatcttgtataccagtctcggtaacag

SEQ ID NO: 11847 - DNA, 21 bp, Artificial Sequence
  Description of Artificial Sequence: Synthetic primer
cctcgagctaacagtcttggt

SEQ ID NO: 11848 - DNA, 25 bp, Artificial Sequence
  Description of Artificial Sequence: Synthetic primer
tccaaacaaaaacactactgccaga

SEQ ID NO: 11849 - DNA, 22 bp, Artificial Sequence
  Description of Artificial Sequence: Synthetic primer
cgcttctggctggtaacaagat

SEQ ID NO: 11850 - DNA, 27 bp, Artificial Sequence
  Description of Artificial Sequence: Synthetic primer
acaactgatggctcatactgttctttt

SEQ ID NO: 11851 - DNA, 27 bp, Artificial Sequence
  Description of Artificial Sequence: Synthetic primer
tgaggaaggctctttgtataggttatg

SEQ ID NO: 11852 - DNA, 25 bp, Artificial Sequence
  Description of Artificial Sequence: Synthetic primer
gtatgcacctcatgatctctacctg

SEQ ID NO: 11853 - DNA, 24 bp, Artificial Sequence
  Description of Artificial Sequence: Synthetic primer
tattacaaggtcgtcatcccccta

SEQ ID NO: 11854 - DNA, 21 bp, Artificial Sequence
  Description of Artificial Sequence: Synthetic primer
cgtgcctttcctgcttcttct

SEQ ID NO: 11855 - DNA, 21 bp, Artificial Sequence
  Description of Artificial Sequence: Synthetic primer
tcatggcctgtttctccacat

SEQ ID NO: 11856 - DNA, 21 bp, Artificial Sequence
  Description of Artificial Sequence: Synthetic primer
gactgcaagctcaacgaggaa

SEQ ID NO: 11857 - DNA, 21 bp, Artificial Sequence
  Description of Artificial Sequence: Synthetic primer
gagatgaggcaacttcaccct

SEQ ID NO: 11858 - DNA, 24 bp, Artificial Sequence
  Description of Artificial Sequence: Synthetic primer
ggacagattgtgaagatgagccaa

SEQ ID NO: 11859 - DNA, 21 bp, Artificial Sequence
  Description of Artificial Sequence: Synthetic primer
atgcctctggaatctgtggtg

SEQ ID NO: 11860 - DNA, 21 bp, Artificial Sequence
  Description of Artificial Sequence: Synthetic primer
cagacggttccttctggatcg

SEQ ID NO: 11861 - DNA, 22 bp, Artificial Sequence
  Description of Artificial Sequence: Synthetic primer
ggcaccattggtgaaccttttt

SEQ ID NO: 11862 - DNA, 21 bp, Artificial Sequence
  Description of Artificial Sequence: Synthetic primer
gcttttcgccgacacacatac

SEQ ID NO: 11863 - DNA, 23 bp, Artificial Sequence
  Description of Artificial Sequence: Synthetic primer
aagttcatcgagtcagggttctc

SEQ ID NO: 11864 - DNA, 23 bp, Artificial Sequence
  Description of Artificial Sequence: Synthetic primer
aagacccagaacaatgagctcag

SEQ ID NO: 11865 - DNA, 21 bp, Artificial Sequence
  Description of Artificial Sequence: Synthetic primer
gcaggcacttccagttctaca

SEQ ID NO: 11866 - DNA, 21 bp, Artificial Sequence
  Description of Artificial Sequence: Synthetic primer
ggatctctagccatggcctct

SEQ ID NO: 11867 - DNA, 26 bp, Artificial Sequence
  Description of Artificial Sequence: Synthetic primer
tgctgatattgatggcttaaacttgc

SEQ ID NO: 11868 - DNA, 25 bp, Artificial Sequence
  Description of Artificial Sequence: Synthetic primer
acttgttaaggttcgtgaagatcca

SEQ ID NO: 11869 - DNA, 21 bp, Artificial Sequence
  Description of Artificial Sequence: Synthetic primer
tgtgggtatagccgcatagac

SEQ ID NO: 11870 - DNA, 23 bp, Artificial Sequence
  Description of Artificial Sequence: Synthetic primer
atgccgaatacaacaagaacgag

SEQ ID NO: 11871 - DNA, 26 bp, Artificial Sequence
  Description of Artificial Sequence: Synthetic primer
ggcacagaaaaacattgtagatcaca

SEQ ID NO: 11872 - DNA, 28 bp, Artificial Sequence
  Description of Artificial Sequence: Synthetic primer
cactatcatgaatttcttccgcatacca

SEQ ID NO: 11873 - DNA, 18 bp, Artificial Sequence
  Description of Artificial Sequence: Synthetic primer
caagtgagccggcctgtg

SEQ ID NO: 11874 - DNA, 23 bp, Artificial Sequence
  Description of Artificial Sequence: Synthetic primer
ggaaggaagccactagacagttc

SEQ ID NO: 11875 - DNA, 26 bp, Artificial Sequence
  Description of Artificial Sequence: Synthetic primer
gccacgtactactgatttgtagactg

SEQ ID NO: 11876 - DNA, 24 bp, Artificial Sequence
  Description of Artificial Sequence: Synthetic primer
tggtttcagccatttgttagcact

SEQ ID NO: 11877 - DNA, 21 bp, Artificial Sequence
  Description of Artificial Sequence: Synthetic primer
caattggagcgacgaggattg

SEQ ID NO: 11878 - DNA, 24 bp, Artificial Sequence
  Description of Artificial Sequence: Synthetic primer
aaaccctggtctaagtttgtcact

SEQ ID NO: 11879 - DNA, 27 bp, Artificial Sequence
  Description of Artificial Sequence: Synthetic primer
caggatatcaacaaggaagtagagcat

SEQ ID NO: 11880 - DNA, 19 bp, Artificial Sequence
  Description of Artificial Sequence: Synthetic primer
ctttggctggtgagcatcg

SEQ ID NO: 11881 - DNA, 27 bp, Artificial Sequence
  Description of Artificial Sequence: Synthetic primer
aaaacatattctgccacaacacttcat

SEQ ID NO: 11882 - DNA, 21 bp, Artificial Sequence
  Description of Artificial Sequence: Synthetic primer
gaagatcataggcacccgtgt

SEQ ID NO: 11883 - DNA, 22 bp, Artificial Sequence
  Description of Artificial Sequence: Synthetic primer
caagaaagatatgcggccctca

SEQ ID NO: 11884 - DNA, 25 bp, Artificial Sequence
  Description of Artificial Sequence: Synthetic primer
ggtaaacgaggagatgtcacgatac

SEQ ID NO: 11885 - DNA, 26 bp, Artificial Sequence
  Description of Artificial Sequence: Synthetic primer
ccaaagcacttggttcagacgatata

SEQ ID NO: 11886 - DNA, 22 bp, Artificial Sequence
  Description of Artificial Sequence: Synthetic primer
gcatgctaatgcacattgttcg

SEQ ID NO: 11887 - DNA, 22 bp, Artificial Sequence
  Description of Artificial Sequence: Synthetic primer
gcaatgggaagactggatgagg

SEQ ID NO: 11888 - DNA, 21 bp, Artificial Sequence
  Description of Artificial Sequence: Synthetic primer
ccctctcagtacggtggtctt

SEQ ID NO: 11889 - DNA, 22 bp, Artificial Sequence
  Description of Artificial Sequence: Synthetic primer
gcatttgttcgctcaagcttgt

SEQ ID NO: 11890 - DNA, 23 bp, Artificial Sequence
  Description of Artificial Sequence: Synthetic primer
ggattgcccagaaggaaaggtaa

SEQ ID NO: 11891 - DNA, 21 bp, Artificial Sequence
  Description of Artificial Sequence: Synthetic primer
cctgactaagacccggctttc

SEQ ID NO: 11892 - DNA, 21 bp, Artificial Sequence
  Description of Artificial Sequence: Synthetic primer
gagctcactagccctggatga

SEQ ID NO: 11893 - DNA, 21 bp, Artificial Sequence
  Description of Artificial Sequence: Synthetic primer
gcttcatgaagaaccggactg

SEQ ID NO: 11894 - DNA, 27 bp, Artificial Sequence
  Description of Artificial Sequence: Synthetic primer
actttcagaagagagatcacacttgaa

SEQ ID NO: 11895 - DNA, 28 bp, Artificial Sequence
  Description of Artificial Sequence: Synthetic primer
gaggcatactcttgcttttacagaaagg

SEQ ID NO: 11896 - DNA, 27 bp, Artificial Sequence
  Description of Artificial Sequence: Synthetic primer
tagttaattttggagctagcctgatgg

SEQ ID NO: 11897 - DNA, 21 bp, Artificial Sequence
  Description of Artificial Sequence: Synthetic primer
gtgcttcaggatcgatgggat

SEQ ID NO: 11898 - DNA, 24 bp, Artificial Sequence
  Description of Artificial Sequence: Synthetic primer
tgggatgataacctacctcgatcc

SEQ ID NO: 11899 - DNA, 19 bp, Artificial Sequence
  Description of Artificial Sequence: Synthetic primer
gtggtcaggtcgaaggaac

SEQ ID NO: 11900 - DNA, 23 bp, Artificial Sequence
  Description of Artificial Sequence: Synthetic primer
gaagaggagatcatcgcagagac

SEQ ID NO: 11901 - DNA, 28 bp, Artificial Sequence
  Description of Artificial Sequence: Synthetic primer
taagttgaaggctcattttgaagagaac

SEQ ID NO: 11902 - DNA, 21 bp, Artificial Sequence
  Description of Artificial Sequence: Synthetic primer
gcaataaacccgtccccagtt

SEQ ID NO: 11903 - DNA, 21 bp, Artificial Sequence
  Description of Artificial Sequence: Synthetic primer
ttgcagcaggcttcgcatata

SEQ ID NO: 11904 - DNA, 28 bp, Artificial Sequence
  Description of Artificial Sequence: Synthetic primer
tagaaggagcaaccatatataggaggat

SEQ ID NO: 11905 - DNA, 24 bp, Artificial Sequence
  Description of Artificial Sequence: Synthetic primer
tgaactggctgcctacttatttcg

SEQ ID NO: 11906 - DNA, 18 bp, Artificial Sequence
  Description of Artificial Sequence: Synthetic primer
ggcgtcggaccgagatga

SEQ ID NO: 11907 - DNA, 27 bp, Artificial Sequence
  Description of Artificial Sequence: Synthetic primer
agaaaagacagcaagtgtttgttatgc

SEQ ID NO: 11908 - DNA, 26 bp, Artificial Sequence
  Description of Artificial Sequence: Synthetic primer
tgcaagaattggttagaaggaaaagc

SEQ ID NO: 11909 - DNA, 19 bp, Artificial Sequence
  Description of Artificial Sequence: Synthetic primer
ggatggcaggcaaaccatg

SEQ ID NO: 11910 - DNA, 26 bp, Artificial Sequence
  Description of Artificial Sequence: Synthetic primer
tccattactagatccaatgacaagcc

SEQ ID NO: 11911 - DNA, 28 bp, Artificial Sequence
  Description of Artificial Sequence: Synthetic primer
agatgtagaggaatgctcttgaagtaga

SEQ ID NO: 11912 - DNA, 25 bp, Artificial Sequence
  Description of Artificial Sequence: Synthetic primer
actgtcaaatttggattcagtgcag

SEQ ID NO: 11913 - DNA, 22 bp, Artificial Sequence
  Description of Artificial Sequence: Synthetic primer
acaatgcaacccatgatagcga

SEQ ID NO: 11914 - DNA, 22 bp, Artificial Sequence
  Description of Artificial Sequence: Synthetic primer
aaaggaagtaggcacgggtaaa

SEQ ID NO: 11915 - DNA, 21 bp, Artificial Sequence
  Description of Artificial Sequence: Synthetic primer
ggcgagagaagtagtcgacct

SEQ ID NO: 11916 - DNA, 19 bp, Artificial Sequence
  Description of Artificial Sequence: Synthetic primer
gatgcagaggctgctcagg

SEQ ID NO: 11917 - DNA, 18 bp, Artificial Sequence
  Description of Artificial Sequence: Synthetic primer
gcggtcagggtctcgaaa

SEQ ID NO: 11918 - DNA, 25 bp, Artificial Sequence
  Description of Artificial Sequence: Synthetic primer
gaatacattgacctcaaagccagtc

SEQ ID NO: 11919 - DNA, 21 bp, Artificial Sequence
  Description of Artificial Sequence: Synthetic primer
cctattgccagccttcctgtt

SEQ ID NO: 11920 - DNA, 28 bp, Artificial Sequence
  Description of Artificial Sequence: Synthetic primer
tcgagttattcttggattgcattacaga

SEQ ID NO: 11921 - DNA, 21 bp, Artificial Sequence
  Description of Artificial Sequence: Synthetic primer
atcttcaggaaggcaatgcca

SEQ ID NO: 11922 - DNA, 21 bp, Artificial Sequence
  Description of Artificial Sequence: Synthetic primer
gcaaacttccccagttacgga

SEQ ID NO: 11923 - DNA, 24 bp, Artificial Sequence
  Description of Artificial Sequence: Synthetic primer
ctgagatgaaatcatacgcggtca

SEQ ID NO: 11924 - DNA, 22 bp, Artificial Sequence
  Description of Artificial Sequence: Synthetic primer
gaccctcttgtggagggatttt

SEQ ID NO: 11925 - DNA, 21 bp, Artificial Sequence
  Description of Artificial Sequence: Synthetic primer
tgacgatcacgcttgcttctt

SEQ ID NO: 11926 - DNA, 28 bp, Artificial Sequence
  Description of Artificial Sequence: Synthetic primer
agcttctcaattattgtacgattaacgc

SEQ ID NO: 11927 - DNA, 21 bp, Artificial Sequence
  Description of Artificial Sequence: Synthetic primer
cacactcgtcatcgaccacaa

SEQ ID NO: 11928 - DNA, 27 bp, Artificial Sequence
  Description of Artificial Sequence: Synthetic primer
gtatttgatgcggcaataaaggtggta

SEQ ID NO: 11929 - DNA, 23 bp, Artificial Sequence
  Description of Artificial Sequence: Synthetic primer
gacctcgtgaaaatatggtcgca

SEQ ID NO: 11930 - DNA, 19 bp, Artificial Sequence
  Description of Artificial Sequence: Synthetic primer
ggcatggacttctcgaggt

SEQ ID NO: 11931 - DNA, 26 bp, Artificial Sequence
  Description of Artificial Sequence: Synthetic primer
ctggtcaagtttcaaacaatcacagc

SEQ ID NO: 11932 - DNA, 21 bp, Artificial Sequence
  Description of Artificial Sequence: Synthetic primer
ggacttgctgagatggttggt

SEQ ID NO: 11933 - DNA, 26 bp, Artificial Sequence
  Description of Artificial Sequence: Synthetic primer
gaggctgcagttattatatctggtct

SEQ ID NO: 11934 - DNA, 22 bp, Artificial Sequence
  Description of Artificial Sequence: Synthetic primer
gggagacgtcctccaaaagatt

SEQ ID NO: 11935 - DNA, 21 bp, Artificial Sequence
  Description of Artificial Sequence: Synthetic primer
ccattccgggaactggaaact

SEQ ID NO: 11936 - DNA, 21 bp, Artificial Sequence
  Description of Artificial Sequence: Synthetic primer
ttaaccttgcagtgcctcgac

SEQ ID NO: 11937 - DNA, 22 bp, Artificial Sequence
  Description of Artificial Sequence: Synthetic primer
ccgtttggtctggttctgaaac

SEQ ID NO: 11938 - DNA, 22 bp, Artificial Sequence
  Description of Artificial Sequence: Synthetic primer
ccggaaaacatccgaggaaatg

SEQ ID NO: 11939 - DNA, 22 bp, Artificial Sequence
  Description of Artificial Sequence: Synthetic primer
cgggatggaccaccaatcatta

SEQ ID NO: 11940 - DNA, 21 bp, Artificial Sequence
  Description of Artificial Sequence: Synthetic primer
gaactgcccttcaatcttgcg

SEQ ID NO: 11941 - DNA, 27 bp, Artificial Sequence
  Description of Artificial Sequence: Synthetic primer
aaggcaaaatcagacaacagataggat

SEQ ID NO: 11942 - DNA, 23 bp, Artificial Sequence
  Description of Artificial Sequence: Synthetic primer
gacatcaggagtgtatgcaccga

SEQ ID NO: 11943 - DNA, 28 bp, Artificial Sequence
  Description of Artificial Sequence: Synthetic primer
actcgaattatacgtggaaaacaaatcg

SEQ ID NO: 11944 - DNA, 22 bp, Artificial Sequence
  Description of Artificial Sequence: Synthetic primer
gactgcaccagtcttggttaca

SEQ ID NO: 11945 - DNA, 24 bp, Artificial Sequence
  Description of Artificial Sequence: Synthetic primer
gacatcaagtccaccaacattctc

SEQ ID NO: 11946 - DNA, 21 bp, Artificial Sequence
  Description of Artificial Sequence: Synthetic primer
ccagcagccaacctgaatctt

SEQ ID NO: 11947 - DNA, 21 bp, Artificial Sequence
  Description of Artificial Sequence: Synthetic primer
gggtcggtcaaacaaagcatg

SEQ ID NO: 11948 - DNA, 23 bp, Artificial Sequence
  Description of Artificial Sequence: Synthetic primer
cacttttacttgctaagccggtt

SEQ ID NO: 11949 - DNA, 24 bp, Artificial Sequence
  Description of Artificial Sequence: Synthetic primer
gtgaggactgtgaaggtcactaat

SEQ ID NO: 11950 - DNA, 25 bp, Artificial Sequence
  Description of Artificial Sequence: Synthetic primer
gctgctatatgcctacttcaggaaa

SEQ ID NO: 11951 - DNA, 28 bp, Artificial Sequence
  Description of Artificial Sequence: Synthetic primer
aattctcaactccaaacactaaaacagg

SEQ ID NO: 11952 - DNA, 21 bp, Artificial Sequence
  Description of Artificial Sequence: Synthetic primer
ggtgcacccatataggccttc

SEQ ID NO: 11953 - DNA, 22 bp, Artificial Sequence
  Description of Artificial Sequence: Synthetic primer
gggacaggaagtaacagtccag

SEQ ID NO: 11954 - DNA, 28 bp, Artificial Sequence
  Description of Artificial Sequence: Synthetic primer
gtgagtacaacgcgatttcatataatga

SEQ ID NO: 11955 - DNA, 21 bp, Artificial Sequence
  Description of Artificial Sequence: Synthetic primer
gtgaagcgcgtgtatcaggaa

SEQ ID NO: 11956 - DNA, 21 bp, Artificial Sequence
  Description of Artificial Sequence: Synthetic primer
ttcgagagtctggtggagaca

SEQ ID NO: 11957 - DNA, 24 bp, Artificial Sequence
  Description of Artificial Sequence: Synthetic primer
cgaaaggatgaatttgtggactgg

SEQ ID NO: 11958 - DNA, 21 bp, Artificial Sequence
  Description of Artificial Sequence: Synthetic primer
ctcgggcttttgctcttgcta

SEQ ID NO: 11959 - DNA, 25 bp, Artificial Sequence
  Description of Artificial Sequence: Synthetic primer
tcagctgttatagaaccagatgcaa

SEQ ID NO: 11960 - DNA, 28 bp, Artificial Sequence
  Description of Artificial Sequence: Synthetic primer
ctgtgtatccactactcgagaaattctt

SEQ ID NO: 11961 - DNA, 21 bp, Artificial Sequence
  Description of Artificial Sequence: Synthetic primer
cttacggtctgggtgctatca

SEQ ID NO: 11962 - DNA, 21 bp, Artificial Sequence
  Description of Artificial Sequence: Synthetic primer
ggtggtgctgaccagttcata

SEQ ID NO: 11963 - DNA, 23 bp, Artificial Sequence
  Description of Artificial Sequence: Synthetic primer
cttgatttcatcctggacccaga

SEQ ID NO: 11964 - DNA, 21 bp, Artificial Sequence
  Description of Artificial Sequence: Synthetic primer
gttgcctcgcgacttggtata

SEQ ID NO: 11965 - DNA, 21 bp, Artificial Sequence
  Description of Artificial Sequence: Synthetic primer
atccgtgtcattgcccatact

SEQ ID NO: 11966 - DNA, 21 bp, Artificial Sequence
  Description of Artificial Sequence: Synthetic primer
cgccataagaggaggaagctg

SEQ ID NO: 11967 - DNA, 27 bp, Artificial Sequence
  Description of Artificial Sequence: Synthetic primer
gtgaagaaaacaatccggtatttccat

SEQ ID NO: 11968 - DNA, 18 bp, Artificial Sequence
  Description of Artificial Sequence: Synthetic primer
gaaccctccggtcgctga

SEQ ID NO: 11969 - DNA, 23 bp, Artificial Sequence
  Description of Artificial Sequence: Synthetic primer
tgaggacacgaaagctgattcaa

SEQ ID NO: 11970 - DNA, 25 bp, Artificial Sequence
  Description of Artificial Sequence: Synthetic primer
ggaattctcgcaagaggagaaggta

SEQ ID NO: 11971 - DNA, 26 bp, Artificial Sequence
  Description of Artificial Sequence: Synthetic primer
gatgagctcaacaactttgctgattc

SEQ ID NO: 11972 - DNA, 22 bp, Artificial Sequence
  Description of Artificial Sequence: Synthetic primer
gaacctcaccatggtggactac

SEQ ID NO: 11973 - DNA, 19 bp, Artificial Sequence
  Description of Artificial Sequence: Synthetic primer
ccctccttgcgctgatctg

SEQ ID NO: 11974 - DNA, 23 bp, Artificial Sequence
  Description of Artificial Sequence: Synthetic primer
atccaagtactcaagctgcaggt

SEQ ID NO: 11975 - DNA, 27 bp, Artificial Sequence
  Description of Artificial Sequence: Synthetic primer
tcctgaagtgccatgtatgttttatgt

SEQ ID NO: 11976 - DNA, 20 bp, Artificial Sequence
  Description of Artificial Sequence: Synthetic primer
gcacggccaacgattgaatt

SEQ ID NO: 11977 - DNA, 19 bp, Artificial Sequence
  Description of Artificial Sequence: Synthetic primer
ggcaaagatgcagccactt

SEQ ID NO: 11978 - DNA, 22 bp, Artificial Sequence
  Description of Artificial Sequence: Synthetic primer
tgtcggtcgaaagcacattaac

SEQ ID NO: 11979 - DNA, 22 bp, Artificial Sequence
  Description of Artificial Sequence: Synthetic primer
tctggacgacatcctcatcttg

SEQ ID NO: 11980 - DNA, 24 bp, Artificial Sequence
  Description of Artificial Sequence: Synthetic primer
catcacctcaatgatcttgtccgt

SEQ ID NO: 11981 - DNA, 22 bp, Artificial Sequence
  Description of Artificial Sequence: Synthetic primer
gcattctggcaagatctgcaaa

SEQ ID NO: 11982 - DNA, 23 bp, Artificial Sequence
  Description of Artificial Sequence: Synthetic primer
acgatattgaagctgaagttggc

SEQ ID NO: 11983 - DNA, 23 bp, Artificial Sequence
  Description of Artificial Sequence: Synthetic primer
gggttcagcaattgttgtcatgg

SEQ ID NO: 11984 - DNA, 27 bp, Artificial Sequence
  Description of Artificial Sequence: Synthetic primer
gaattcgagtttcatgtcgtgtattca

SEQ ID NO: 11985 - DNA, 22 bp, Artificial Sequence
  Description of Artificial Sequence: Synthetic primer
tctccttacacgttggctttcc

SEQ ID NO: 11986 - DNA, 22 bp, Artificial Sequence
  Description of Artificial Sequence: Synthetic primer
gttccccgaggttgatcttgtt

SEQ ID NO: 11987 - DNA, 24 bp, Artificial Sequence
  Description of Artificial Sequence: Synthetic primer
actggacaatctcaacccgtaaag

SEQ ID NO: 11988 - DNA, 24 bp, Artificial Sequence
  Description of Artificial Sequence: Synthetic primer
gggtagtactctacgagatcctca

SEQ ID NO: 11989 - DNA, 21 bp, Artificial Sequence
  Description of Artificial Sequence: Synthetic primer
attcagtccctgctgtgtgat

SEQ ID NO: 11990 - DNA, 26 bp, Artificial Sequence
  Description of Artificial Sequence: Synthetic primer
cacttagctgacggtctttatatcgg

SEQ ID NO: 11991 - DNA, 21 bp, Artificial Sequence
  Description of Artificial Sequence: Synthetic primer
tgcctgaggactaccatgtga

SEQ ID NO: 11992 - DNA, 21 bp, Artificial Sequence
  Description of Artificial Sequence: Synthetic primer
catcgggttccttgaacaagc

SEQ ID NO: 11993 - DNA, 21 bp, Artificial Sequence
  Description of Artificial Sequence: Synthetic primer
accggttcaattgctggtgag

SEQ ID NO: 11994 - DNA, 26 bp, Artificial Sequence
  Description of Artificial Sequence: Synthetic primer
cagatgatgggaaaatgaaaggcatc

SEQ ID NO: 11995 - DNA, 22 bp, Artificial Sequence
  Description of Artificial Sequence: Synthetic primer
tagcctaacttgctgcttctcc

SEQ ID NO: 11996 - DNA, 21 bp, Artificial Sequence
  Description of Artificial Sequence: Synthetic primer
aaggtgggtcagggtttatcc

SEQ ID NO: 11997 - DNA, 21 bp, Artificial Sequence
  Description of Artificial Sequence: Synthetic primer
cagagggagggcttcagtttt

SEQ ID NO: 11998 - DNA, 21 bp, Artificial Sequence
  Description of Artificial Sequence: Synthetic primer
ctgcaaggtggaggagtctac

SEQ ID NO: 11999 - DNA, 25 bp, Artificial Sequence
  Description of Artificial Sequence: Synthetic primer
gtccgacaaattcgagaatgctatg

SEQ ID NO: 12000 - DNA, 25 bp, Artificial Sequence
  Description of Artificial Sequence: Synthetic primer
gcaagagtgcaaagtacagtttgtt

SEQ ID NO: 12001 - DNA, 21 bp, Artificial Sequence
  Description of Artificial Sequence: Synthetic primer
gtgtgggtctgttcggatttg

SEQ ID NO: 12002 - DNA, 27 bp, Artificial Sequence
  Description of Artificial Sequence: Synthetic primer
tcatagtactactaggcaatagccaca

SEQ ID NO: 12003 - DNA, 24 bp, Artificial Sequence
  Description of Artificial Sequence: Synthetic primer
gatctctccctactgacttacgga

SEQ ID NO: 12004 - DNA, 25 bp, Artificial Sequence
  Description of Artificial Sequence: Synthetic primer
cttttgtcaacacatctgacggaga

SEQ ID NO: 12005 - DNA, 21 bp, Artificial Sequence
  Description of Artificial Sequence: Synthetic primer
tcctgcgagtgcaaaatcatc

SEQ ID NO: 12006 - DNA, 22 bp, Artificial Sequence
  Description of Artificial Sequence: Synthetic primer
aaaaactgtccgtatggcgaac

SEQ ID NO: 12007 - DNA, 22 bp, Artificial Sequence
  Description of Artificial Sequence: Synthetic primer
caattgatacagtcggcaccgt

SEQ ID NO: 12008 - DNA, 21 bp, Artificial Sequence
  Description of Artificial Sequence: Synthetic primer
atgccgttgactggtacaact

SEQ ID NO: 12009 - DNA, 21 bp, Artificial Sequence
  Description of Artificial Sequence: Synthetic primer
ctgatgctgacaagggtgagg

SEQ ID NO: 12010 - DNA, 21 bp, Artificial Sequence
  Description of Artificial Sequence: Synthetic primer
gaaatagtagccccgggcatc

SEQ ID NO: 12011 - DNA, 23 bp, Artificial Sequence
  Description of Artificial Sequence: Synthetic primer
agtgaagtgcagtttaagccctt

SEQ ID NO: 12012 - DNA, 21 bp, Artificial Sequence
  Description of Artificial Sequence: Synthetic primer
ggtgcgtatcttctccttgct

SEQ ID NO: 12013 - DNA, 21 bp, Artificial Sequence
  Description of Artificial Sequence: Synthetic primer
gggctcaggataggaaggaga

SEQ ID NO: 12014 - DNA, 23 bp, Artificial Sequence
  Description of Artificial Sequence: Synthetic primer
ccctaaattccttcctcgaacgg

SEQ ID NO: 12015 - DNA, 23 bp, Artificial Sequence
  Description of Artificial Sequence: Synthetic primer
tgtggtggacttaataccatggc

SEQ ID NO: 12016 - DNA, 23 bp, Artificial Sequence
  Description of Artificial Sequence: Synthetic primer
accagaagacacagctgcaataa

SEQ ID NO: 12017 - DNA, 24 bp, Artificial Sequence
  Description of Artificial Sequence: Synthetic primer
ttcttcctttttggccaacacttt

SEQ ID NO: 12018 - DNA, 28 bp, Artificial Sequence
  Description of Artificial Sequence: Synthetic primer
acttgccgatgaggtatatcaagataac

SEQ ID NO: 12019 - DNA, 24 bp, Artificial Sequence
  Description of Artificial Sequence: Synthetic primer
gtccgagagattgctaggatgtac

SEQ ID NO: 12020 - DNA, 29 bp, Artificial Sequence
  Description of Artificial Sequence: Synthetic primer
ttgtccgctaaggtatgattgatttacat

SEQ ID NO: 12021 - DNA, 28 bp, Artificial Sequence
  Description of Artificial Sequence: Synthetic primer
tgatttagagaaattccagaaggaggtt

SEQ ID NO: 12022 - DNA, 27 bp, Artificial Sequence
  Description of Artificial Sequence: Synthetic primer
caatgcaactgattcagtatactcagc

SEQ ID NO: 12023 - DNA, 26 bp, Artificial Sequence
  Description of Artificial Sequence: Synthetic primer
accaggagaggaagtataaagagctt

SEQ ID NO: 12024 - DNA, 22 bp, Artificial Sequence
  Description of Artificial Sequence: Synthetic primer
cgcaagcagcggttcatatatc

SEQ ID NO: 12025 - DNA, 22 bp, Artificial Sequence
  Description of Artificial Sequence: Synthetic primer
cccaagcctacttggttgaaac

SEQ ID NO: 12026 - DNA, 23 bp, Artificial Sequence
  Description of Artificial Sequence: Synthetic primer
tggagaagtcgatggagattgtc

SEQ ID NO: 12027 - DNA, 21 bp, Artificial Sequence
  Description of Artificial Sequence: Synthetic primer
ctgtccagcactatccggatc

SEQ ID NO: 12028 - DNA, 22 bp, Artificial Sequence
  Description of Artificial Sequence: Synthetic primer
catcttcttcggagcttgatgc

SEQ ID NO: 12029 - DNA, 20 bp, Artificial Sequence
  Description of Artificial Sequence: Synthetic primer
cgacgattgagagccacctt

SEQ ID NO: 12030 - DNA, 25 bp, Artificial Sequence
  Description of Artificial Sequence: Synthetic primer
tggactgaggatgtgatctatctct

SEQ ID NO: 12031 - DNA, 28 bp, Artificial Sequence
  Description of Artificial Sequence: Synthetic primer
gatgaacaacttccatctagtatgtgct

SEQ ID NO: 12032 - DNA, 24 bp, Artificial Sequence
  Description of Artificial Sequence: Synthetic primer
aaactggtgattactggtcccaga

SEQ ID NO: 12033 - DNA, 28 bp, Artificial Sequence
  Description of Artificial Sequence: Synthetic primer
ttttagttaggatatggtgctccagttc

SEQ ID NO: 12034 - DNA, 22 bp, Artificial Sequence
  Description of Artificial Sequence: Synthetic primer
cagtaccactattcgtccgctt

SEQ ID NO: 12035 - DNA, 24 bp, Artificial Sequence
  Description of Artificial Sequence: Synthetic primer
tcgtgtctctattgggtttagtgc

SEQ ID NO: 12036 - DNA, 21 bp, Artificial Sequence
  Description of Artificial Sequence: Synthetic primer
ggccccattacaagtctgcta

SEQ ID NO: 12037 - DNA, 24 bp, Artificial Sequence
  Description of Artificial Sequence: Synthetic primer
tgctcgacttctttttctcatgga

SEQ ID NO: 12038 - DNA, 21 bp, Artificial Sequence
  Description of Artificial Sequence: Synthetic primer
gttgccgggtctcttttgttg

SEQ ID NO: 12039 - DNA, 23 bp, Artificial Sequence
  Description of Artificial Sequence: Synthetic primer
gcctgttacctcaacaatggagt

SEQ ID NO: 12040 - DNA, 21 bp, Artificial Sequence
  Description of Artificial Sequence: Synthetic primer
cacgggcatacgaggtaatca

SEQ ID NO: 12041 - DNA, 24 bp, Artificial Sequence
  Description of Artificial Sequence: Synthetic primer
cagccaacgaagaaactagtgatg

SEQ ID NO: 12042 - DNA, 23 bp, Artificial Sequence
  Description of Artificial Sequence: Synthetic primer
atactaaacctaacccgcaggga

SEQ ID NO: 12043 - DNA, 28 bp, Artificial Sequence
  Description of Artificial Sequence: Synthetic primer
acttgattagtcttctgaatagctccac

SEQ ID NO: 12044 - DNA, 25 bp, Artificial Sequence
  Description of Artificial Sequence: Synthetic primer
agattttcctatgggatctcaaggc

SEQ ID NO: 12045 - DNA, 21 bp, Artificial Sequence
  Description of Artificial Sequence: Synthetic primer
atcaggctttctgcggaagag

SEQ ID NO: 12046 - DNA, 24 bp, Artificial Sequence
  Description of Artificial Sequence: Synthetic primer
ccatcaaaaagctgaggtcgtatg

SEQ ID NO: 12047 - DNA, 25 bp, Artificial Sequence
  Description of Artificial Sequence: Synthetic primer
cttaagcctgtcatcatcacgtttg

SEQ ID NO: 12048 - DNA, 28 bp, Artificial Sequence
  Description of Artificial Sequence: Synthetic primer
tcctacccttatatttttagagccgtca

SEQ ID NO: 12049 - DNA, 24 bp, Artificial Sequence
  Description of Artificial Sequence: Synthetic primer
tgcctgctttaagacctttgtgta

SEQ ID NO: 12050 - DNA, 24 bp, Artificial Sequence
  Description of Artificial Sequence: Synthetic primer
caggataaattgccttctggaggt

SEQ ID NO: 12051 - DNA, 21 bp, Artificial Sequence
  Description of Artificial Sequence: Synthetic primer
tgatgctagttgcgcaagtga

SEQ ID NO: 12052 - DNA, 23 bp, Artificial Sequence
  Description of Artificial Sequence: Synthetic primer
gggtcaaaggtgaagcagataca

SEQ ID NO: 12053 - DNA, 22 bp, Artificial Sequence
  Description of Artificial Sequence: Synthetic primer
cccgtcttgctatcgttcttca

SEQ ID NO: 12054 - DNA, 27 bp, Artificial Sequence
  Description of Artificial Sequence: Synthetic primer
gggattggtttatttttctccatgtcc

SEQ ID NO: 12055 - DNA, 28 bp, Artificial Sequence
  Description of Artificial Sequence: Synthetic primer
caaatgacttgcttcatctacagaagag

SEQ ID NO: 12056 - DNA, 23 bp, Artificial Sequence
  Description of Artificial Sequence: Synthetic primer
atcaatgccgtaatcccatgtca

SEQ ID NO: 12057 - DNA, 28 bp, Artificial Sequence
  Description of Artificial Sequence: Synthetic primer
gatgatcggagattactggaacttcatt

SEQ ID NO: 12058 - DNA, 22 bp, Artificial Sequence
  Description of Artificial Sequence: Synthetic primer
gacaccagttcatacggtcgag

SEQ ID NO: 12059 - DNA, 22 bp, Artificial Sequence
  Description of Artificial Sequence: Synthetic primer
gggcttgtaaaccaatccccaa

SEQ ID NO: 12060 - DNA, 21 bp, Artificial Sequence
  Description of Artificial Sequence: Synthetic primer
gctgaagcgtcacacagatgt

SEQ ID NO: 12061 - DNA, 21 bp, Artificial Sequence
  Description of Artificial Sequence: Synthetic primer
ggagcctcagggttgatcttt

SEQ ID NO: 12062 - DNA, 26 bp, Artificial Sequence
  Description of Artificial Sequence: Synthetic primer
ggatagtgccttgataatggactcat

SEQ ID NO: 12063 - DNA, 28 bp, Artificial Sequence
  Description of Artificial Sequence: Synthetic primer
tcaacaagattgtatactccagtgcaat

SEQ ID NO: 12064 - DNA, 28 bp, Artificial Sequence
  Description of Artificial Sequence: Synthetic primer
aagaggttacttattcttattcggccaa

SEQ ID NO: 12065 - DNA, 21 bp, Artificial Sequence
  Description of Artificial Sequence: Synthetic primer
gaaggagtgcctggaggagta

SEQ ID NO: 12066 - DNA, 23 bp, Artificial Sequence
  Description of Artificial Sequence: Synthetic primer
aagaatcatgtgaggaggacacc

SEQ ID NO: 12067 - DNA, 19 bp, Artificial Sequence
  Description of Artificial Sequence: Synthetic primer
ccgggatgggaggcatatc

SEQ ID NO: 12068 - DNA, 21 bp, Artificial Sequence
  Description of Artificial Sequence: Synthetic primer
atttgccgttcctctgcagaa

SEQ ID NO: 12069 - DNA, 23 bp, Artificial Sequence
  Description of Artificial Sequence: Synthetic primer
tgctttagatgcggagcactatc

SEQ ID NO: 12070 - DNA, 27 bp, Artificial Sequence
  Description of Artificial Sequence: Synthetic primer
tgatgtatcaatcctcaagaactctgc

SEQ ID NO: 12071 - DNA, 26 bp, Artificial Sequence
  Description of Artificial Sequence: Synthetic primer
gcatgacaactgcttctttaagaaga

SEQ ID NO: 12072 - DNA, 23 bp, Artificial Sequence
  Description of Artificial Sequence: Synthetic primer
ccatctttggccactccattaac

SEQ ID NO: 12073 - DNA, 25 bp, Artificial Sequence
  Description of Artificial Sequence: Synthetic primer
cagaagaagagtatatgcaggcaca

SEQ ID NO: 12074 - DNA, 25 bp, Artificial Sequence
  Description of Artificial Sequence: Synthetic primer
tatgcaccacctttgcaatatcatg

SEQ ID NO: 12075 - DNA, 21 bp, Artificial Sequence
  Description of Artificial Sequence: Synthetic primer
tcaggagactctgcggttgta

SEQ ID NO: 12076 - DNA, 21 bp, Artificial Sequence
  Description of Artificial Sequence: Synthetic primer
actctccagtgtccacaactg

SEQ ID NO: 12077 - DNA, 28 bp, Artificial Sequence
  Description of Artificial Sequence: Synthetic primer
cccacttctaaaaatgagcaggatatgg

SEQ ID NO: 12078 - DNA, 27 bp, Artificial Sequence
  Description of Artificial Sequence: Synthetic primer
gggctagagcctgtcattaattatgaa

SEQ ID NO: 12079 - DNA, 21 bp, Artificial Sequence
  Description of Artificial Sequence: Synthetic primer
cgcgcagcaggatcatcaata

SEQ ID NO: 12080 - DNA, 21 bp, Artificial Sequence
  Description of Artificial Sequence: Synthetic primer
tatactggagcagggtgcatc

SEQ ID NO: 12081 - DNA, 21 bp, Artificial Sequence
  Description of Artificial Sequence: Synthetic primer
cggccgatcaccagtattagg

SEQ ID NO: 12082 - DNA, 24 bp, Artificial Sequence
  Description of Artificial Sequence: Synthetic primer
tgtcttcctttggttatcctagcc

SEQ ID NO: 12083 - DNA, 21 bp, Artificial Sequence
  Description of Artificial Sequence: Synthetic primer
caacggagggacattcgctat

SEQ ID NO: 12084 - DNA, 21 bp, Artificial Sequence
  Description of Artificial Sequence: Synthetic primer
ctgagaggctcgtggacattt

SEQ ID NO: 12085 - DNA, 25 bp, Artificial Sequence
  Description of Artificial Sequence: Synthetic primer
actgaattattcctgtgtgcaccaa

SEQ ID NO: 12086 - DNA, 28 bp, Artificial Sequence
  Description of Artificial Sequence: Synthetic primer
gtcctcatcttgtgaactaacccataaa

SEQ ID NO: 12087 - DNA, 20 bp, Artificial Sequence
  Description of Artificial Sequence: Synthetic primer
ttcgaggagcacaactgcaa

SEQ ID NO: 12088 - DNA, 25 bp, Artificial Sequence
  Description of Artificial Sequence: Synthetic primer
aggttagtcttgacaatgggatggt

SEQ ID NO: 12089 - DNA, 23 bp, Artificial Sequence
  Description of Artificial Sequence: Synthetic primer
agattgcgtaacttctgtccagt

SEQ ID NO: 12090 - DNA, 21 bp, Artificial Sequence
  Description of Artificial Sequence: Synthetic primer
ccaaagccaattcatgcgaca

SEQ ID NO: 12091 - DNA, 22 bp, Artificial Sequence
  Description of Artificial Sequence: Synthetic primer
cgaactcgatctggctgtacat

SEQ ID NO: 12092 - DNA, 21 bp, Artificial Sequence
  Description of Artificial Sequence: Synthetic primer
ctggagatcagacgcctctct

SEQ ID NO: 12093 - DNA, 22 bp, Artificial Sequence
  Description of Artificial Sequence: Synthetic primer
cgtttggatgaagcacaggatt

SEQ ID NO: 12094 - DNA, 25 bp, Artificial Sequence
  Description of Artificial Sequence: Synthetic primer
gaagaggatgaagagtctgacgaag

SEQ ID NO: 12095 - DNA, 23 bp, Artificial Sequence
  Description of Artificial Sequence: Synthetic primer
catgactgtcgccatagagttca

SEQ ID NO: 12096 - DNA, 23 bp, Artificial Sequence
  Description of Artificial Sequence: Synthetic primer
gaaaacacaagtgtagcctctgc

SEQ ID NO: 12097 - DNA, 22 bp, Artificial Sequence
  Description of Artificial Sequence: Synthetic primer
ctggctgtagatgaaccacagt

SEQ ID NO: 12098 - DNA, 27 bp, Artificial Sequence
  Description of Artificial Sequence: Synthetic primer
cgcccatgtcttctttatagcataact

SEQ ID NO: 12099 - DNA, 24 bp, Artificial Sequence
  Description of Artificial Sequence: Synthetic primer
ctcatccgctgattcttcaacatc

SEQ ID NO: 12100 - DNA, 21 bp, Artificial Sequence
  Description of Artificial Sequence: Synthetic primer
cctcggtcacagcaattgcta

SEQ ID NO: 12101 - DNA, 28 bp, Artificial Sequence
  Description of Artificial Sequence: Synthetic primer
gggatgtcagttagaattgcaaataagt

SEQ ID NO: 12102 - DNA, 22 bp, Artificial Sequence
  Description of Artificial Sequence: Synthetic primer
attgcatcagccctgactctag

SEQ ID NO: 12103 - DNA, 26 bp, Artificial Sequence
  Description of Artificial Sequence: Synthetic primer
ccaaggaatttgaaacggaactgaag

SEQ ID NO: 12104 - DNA, 24 bp, Artificial Sequence
  Description of Artificial Sequence: Synthetic primer
caggacaagagaaaggtacctctg

SEQ ID NO: 12105 - DNA, 22 bp, Artificial Sequence
  Description of Artificial Sequence: Synthetic primer
gggaacgtgatgaagagttgga

SEQ ID NO: 12106 - DNA, 23 bp, Artificial Sequence
  Description of Artificial Sequence: Synthetic primer
actggaactgctctaacatctgc

SEQ ID NO: 12107 - DNA, 21 bp, Artificial Sequence
  Description of Artificial Sequence: Synthetic primer
agtcgcaggtctagatggtga

SEQ ID NO: 12108 - DNA, 26 bp, Artificial Sequence
  Description of Artificial Sequence: Synthetic primer
ggtgccgttttatttatcatacacga

SEQ ID NO: 12109 - DNA, 23 bp, Artificial Sequence
  Description of Artificial Sequence: Synthetic primer
tatctcggctcttgtacgccata

SEQ ID NO: 12110 - DNA, 27 bp, Artificial Sequence
  Description of Artificial Sequence: Synthetic primer
aatcagaacctaagcatcaaccttgtt

SEQ ID NO: 12111 - DNA, 21 bp, Artificial Sequence
  Description of Artificial Sequence: Synthetic primer
gctgaggctgctaattagcac

SEQ ID NO: 12112 - DNA, 26 bp, Artificial Sequence
  Description of Artificial Sequence: Synthetic primer
gtagttgtagttccagtagacaggga

SEQ ID NO: 12113 - DNA, 21 bp, Artificial Sequence
  Description of Artificial Sequence: Synthetic primer
gatctccgcgttagagtcagg

SEQ ID NO: 12114 - DNA, 24 bp, Artificial Sequence
  Description of Artificial Sequence: Synthetic primer
aaaatcatacgcacacagagtgct

SEQ ID NO: 12115 - DNA, 21 bp, Artificial Sequence
  Description of Artificial Sequence: Synthetic primer
caagatgagtgccgaagcaat

SEQ ID NO: 12116 - DNA, 21 bp, Artificial Sequence
  Description of Artificial Sequence: Synthetic primer
cagctcctcaacatggacacc

SEQ ID NO: 12117 - DNA, 21 bp, Artificial Sequence
  Description of Artificial Sequence: Synthetic primer
acagccaaagttggaggatct

SEQ ID NO: 12118 - DNA, 27 bp, Artificial Sequence
  Description of Artificial Sequence: Synthetic primer
cagaccttatgtccatcttctctgatg

SEQ ID NO: 12119 - DNA, 28 bp, Artificial Sequence
  Description of Artificial Sequence: Synthetic primer
gctggaagattaccttcttaaacttggt

SEQ ID NO: 12120 - DNA, 21 bp, Artificial Sequence
  Description of Artificial Sequence: Synthetic primer
gggagcccctgattttcatca

SEQ ID NO: 12121 - DNA, 24 bp, Artificial Sequence
  Description of Artificial Sequence: Synthetic primer
gacctgacaggctcgagatttatt

SEQ ID NO: 12122 - DNA, 23 bp, Artificial Sequence
  Description of Artificial Sequence: Synthetic primer
ctctgccaggaactgagctaaag

SEQ ID NO: 12123 - DNA, 19 bp, Artificial Sequence
  Description of Artificial Sequence: Synthetic primer
ttgcggatctgtccctgct

SEQ ID NO: 12124 - DNA, 21 bp, Artificial Sequence
  Description of Artificial Sequence: Synthetic primer
atgtgatgccgtggagactac

SEQ ID NO: 12125 - DNA, 25 bp, Artificial Sequence
  Description of Artificial Sequence: Synthetic primer
gtagcagatagacttgaatgacgct

SEQ ID NO: 12126 - DNA, 25 bp, Artificial Sequence
  Description of Artificial Sequence: Synthetic primer
tgtcaattcttcttggcgtactgaa

SEQ ID NO: 12127 - DNA, 25 bp, Artificial Sequence
  Description of Artificial Sequence: Synthetic primer
cctacaaaacaaaatcggcattccc

SEQ ID NO: 12128 - DNA, 23 bp, Artificial Sequence
  Description of Artificial Sequence: Synthetic primer
gacggcatgtagggtctgtaaat

SEQ ID NO: 12129 - DNA, 28 bp, Artificial Sequence
  Description of Artificial Sequence: Synthetic primer
ccccttcctaatataaaatggatttgcc

SEQ ID NO: 12130 - DNA, 23 bp, Artificial Sequence
  Description of Artificial Sequence: Synthetic primer
gaccattcaacttgggtaaccct

SEQ ID NO: 12131 - DNA, 27 bp, Artificial Sequence
  Description of Artificial Sequence: Synthetic primer
tcagctgagaaatttagtatgggctac

SEQ ID NO: 12132 - DNA, 26 bp, Artificial Sequence
  Description of Artificial Sequence: Synthetic primer
ttagggagtgtgatcttcaacaaacc

SEQ ID NO: 12133 - DNA, 26 bp, Artificial Sequence
  Description of Artificial Sequence: Synthetic primer
atttcgtacacaggaaactcttgagg

SEQ ID NO: 12134 - DNA, 26 bp, Artificial Sequence
  Description of Artificial Sequence: Synthetic primer
accagacaaaactgataaacattgcc

SEQ ID NO: 12135 - DNA, 23 bp, Artificial Sequence
  Description of Artificial Sequence: Synthetic primer
gggatcgacagagtgcttctaaa

SEQ ID NO: 12136 - DNA, 23 bp, Artificial Sequence
  Description of Artificial Sequence: Synthetic primer
ttttgtgcagttcggtatcttgg

SEQ ID NO: 12137 - DNA, 21 bp, Artificial Sequence
  Description of Artificial Sequence: Synthetic primer
caaggatcgagaacgtcgaca

SEQ ID NO: 12138 - DNA, 26 bp, Artificial Sequence
  Description of Artificial Sequence: Synthetic primer
acatttttcaccttcttagcatgacc

SEQ ID NO: 12139 - DNA, 26 bp, Artificial Sequence
  Description of Artificial Sequence: Synthetic primer
caatgtagaagtactgggtagggttg

SEQ ID NO: 12140 - DNA, 23 bp, Artificial Sequence
  Description of Artificial Sequence: Synthetic primer
aagggcatcaatggaggatttct

SEQ ID NO: 12141 - DNA, 21 bp, Artificial Sequence
  Description of Artificial Sequence: Synthetic primer
ggccatgctgaccctaattga

SEQ ID NO: 12142 - DNA, 23 bp, Artificial Sequence
  Description of Artificial Sequence: Synthetic primer
tcatcggacgaagaagttgaagc

SEQ ID NO: 12143 - DNA, 22 bp, Artificial Sequence
  Description of Artificial Sequence: Synthetic primer
gctgttcatgcagtggttgaag

SEQ ID NO: 12144 - DNA, 28 bp, Artificial Sequence
  Description of Artificial Sequence: Synthetic primer
tgataaagtgtgaagagcctttttctga

SEQ ID NO: 12145 - DNA, 21 bp, Artificial Sequence
  Description of Artificial Sequence: Synthetic primer
cgatgtgcctgcctactttcc

SEQ ID NO: 12146 - DNA, 21 bp, Artificial Sequence
  Description of Artificial Sequence: Synthetic primer
cttgcatgggtggaccttctt

SEQ ID NO: 12147 - DNA, 25 bp, Artificial Sequence
  Description of Artificial Sequence: Synthetic primer
gggtgtctgtaatcatgcttttcac

SEQ ID NO: 12148 - DNA, 22 bp, Artificial Sequence
  Description of Artificial Sequence: Synthetic primer
tcaagtattgagcccggtacca

SEQ ID NO: 12149 - DNA, 27 bp, Artificial Sequence
  Description of Artificial Sequence: Synthetic primer
tattcaacttgctacactgatgatggt

SEQ ID NO: 12150 - DNA, 28 bp, Artificial Sequence
  Description of Artificial Sequence: Synthetic primer
ggaaggttcagaatcttaaaacatgagc

SEQ ID NO: 12151 - DNA, 26 bp, Artificial Sequence
  Description of Artificial Sequence: Synthetic primer
agaaaatgataatgggacacacacga

SEQ ID NO: 12152 - DNA, 20 bp, Artificial Sequence
  Description of Artificial Sequence: Synthetic primer
gaggatatgggcatcccgaa

SEQ ID NO: 12153 - DNA, 24 bp, Artificial Sequence
  Description of Artificial Sequence: Synthetic primer
cagatcaagacgtatgtgggtgat

SEQ ID NO: 12154 - DNA, 28 bp, Artificial Sequence
  Description of Artificial Sequence: Synthetic primer
tggacacaatatacattgctaaaaaggc

SEQ ID NO: 12155 - DNA, 21 bp, Artificial Sequence
  Description of Artificial Sequence: Synthetic primer
cttcagcaaccgccttctctt

SEQ ID NO: 12156 - DNA, 21 bp, Artificial Sequence
  Description of Artificial Sequence: Synthetic primer
ggtgctgtcagggagctattc

SEQ ID NO: 12157 - DNA, 27 bp, Artificial Sequence
  Description of Artificial Sequence: Synthetic primer
ctactactactaccaatactgccacca

SEQ ID NO: 12158 - DNA, 24 bp, Artificial Sequence
  Description of Artificial Sequence: Synthetic primer
gttgcggtgtaactggctctatat

SEQ ID NO: 12159 - DNA, 27 bp, Artificial Sequence
  Description of Artificial Sequence: Synthetic primer
ctgttttctttcagaggaggaagttga

SEQ ID NO: 12160 - DNA, 25 bp, Artificial Sequence
  Description of Artificial Sequence: Synthetic primer
caccaaaagcagatgatgctctatg

SEQ ID NO: 12161 - DNA, 21 bp, Artificial Sequence
  Description of Artificial Sequence: Synthetic primer
gcacatcatccaccacctctt

SEQ ID NO: 12162 - DNA, 21 bp, Artificial Sequence
  Description of Artificial Sequence: Synthetic primer
gttgttccagtcactgcagga

SEQ ID NO: 12163 - DNA, 28 bp, Artificial Sequence
  Description of Artificial Sequence: Synthetic primer
acccaatttcctcaaaattcttcaactg

SEQ ID NO: 12164 - DNA, 26 bp, Artificial Sequence
  Description of Artificial Sequence: Synthetic primer
ggcggagaagcttgctaaaaatattg

SEQ ID NO: 12165 - DNA, 28 bp, Artificial Sequence
  Description of Artificial Sequence: Synthetic primer
ggtgcgatattctgatactatagcagtt

SEQ ID NO: 12166 - DNA, 25 bp, Artificial Sequence
  Description of Artificial Sequence: Synthetic primer
caaactataaggacactggcctgtt

SEQ ID NO: 12167 - DNA, 28 bp, Artificial Sequence
  Description of Artificial Sequence: Synthetic primer
ggtctgtacttataaaccatctttgcca

SEQ ID NO: 12168 - DNA, 25 bp, Artificial Sequence
  Description of Artificial Sequence: Synthetic primer
agtcctcttagcatacggaactaca

SEQ ID NO: 12169 - DNA, 21 bp, Artificial Sequence
  Description of Artificial Sequence: Synthetic primer
tgccgaagcaaatgtcctgaa

SEQ ID NO: 12170 - DNA, 21 bp, Artificial Sequence
  Description of Artificial Sequence: Synthetic primer
cttctgctgccttttgcatgg

SEQ ID NO: 12171 - DNA, 22 bp, Artificial Sequence
  Description of Artificial Sequence: Synthetic primer
ggtcaagatgattagggccact

SEQ ID NO: 12172 - DNA, 19 bp, Artificial Sequence
  Description of Artificial Sequence: Synthetic primer
ggagcgcaacatcaacgtg

SEQ ID NO: 12173 - DNA, 21 bp, Artificial Sequence
  Description of Artificial Sequence: Synthetic primer
cagatcccctcccaagactcc

SEQ ID NO: 12174 - DNA, 27 bp, Artificial Sequence
  Description of Artificial Sequence: Synthetic primer
ctttcaccatgtttaccaatctgctag

SEQ ID NO: 12175 - DNA, 21 bp, Artificial Sequence
  Description of Artificial Sequence: Synthetic primer
ccggccaagaaacattcgatg

SEQ ID NO: 12176 - DNA, 21 bp, Artificial Sequence
  Description of Artificial Sequence: Synthetic primer
cgcatccagcctaagcaaatc

SEQ ID NO: 12177 - DNA, 25 bp, Artificial Sequence
  Description of Artificial Sequence: Synthetic primer
gagcgatgaagtctgctgataatgt

SEQ ID NO: 12178 - DNA, 28 bp, Artificial Sequence
  Description of Artificial Sequence: Synthetic primer
tatccagctttattattgccttgatcca

SEQ ID NO: 12179 - DNA, 24 bp, Artificial Sequence
  Description of Artificial Sequence: Synthetic primer
ggagctaatattggctcaaccaac

SEQ ID NO: 12180 - DNA, 28 bp, Artificial Sequence
  Description of Artificial Sequence: Synthetic primer
tattgatagcaaattagttgtcgttgcg

SEQ ID NO: 12181 - DNA, 27 bp, Artificial Sequence
  Description of Artificial Sequence: Synthetic primer
tctctcaagtactttgaaactgctctt

SEQ ID NO: 12182 - DNA, 23 bp, Artificial Sequence
  Description of Artificial Sequence: Synthetic primer
cgacgatgatccatttagagcct

SEQ ID NO: 12183 - DNA, 25 bp, Artificial Sequence
  Description of Artificial Sequence: Synthetic primer
tcagtctgttggatacaatgctgtt

SEQ ID NO: 12184 - DNA, 21 bp, Artificial Sequence
  Description of Artificial Sequence: Synthetic primer
tcggctttggtaattcgtgga

SEQ ID NO: 12185 - DNA, 22 bp, Artificial Sequence
  Description of Artificial Sequence: Synthetic primer
tacggagcctaccctttctacg

SEQ ID NO: 12186 - DNA, 24 bp, Artificial Sequence
  Description of Artificial Sequence: Synthetic primer
cggtgatacaatcacgatcgatgt

SEQ ID NO: 12187 - DNA, 21 bp, Artificial Sequence
  Description of Artificial Sequence: Synthetic primer
tccccaagttcgtcaaagctg

SEQ ID NO: 12188 - DNA, 21 bp, Artificial Sequence
  Description of Artificial Sequence: Synthetic primer
cgctgagtcactggtatcgtt

SEQ ID NO: 12189 - DNA, 21 bp, Artificial Sequence
  Description of Artificial Sequence: Synthetic primer
cacagatcctgcggttgattc

SEQ ID NO: 12190 - DNA, 21 bp, Artificial Sequence
  Description of Artificial Sequence: Synthetic primer
agagcatgttcctgctactgg

SEQ ID NO: 12191 - DNA, 21 bp, Artificial Sequence
  Description of Artificial Sequence: Synthetic primer
gagacctgcatgcagatggat

SEQ ID NO: 12192 - DNA, 21 bp, Artificial Sequence
  Description of Artificial Sequence: Synthetic primer
caagaccacgaccactgatga

SEQ ID NO: 12193 - DNA, 22 bp, Artificial Sequence
  Description of Artificial Sequence: Synthetic primer
gcagggcttgtagtggtacaat

SEQ ID NO: 12194 - DNA, 22 bp, Artificial Sequence
  Description of Artificial Sequence: Synthetic primer
gtgcgaatcacttggacatcac

SEQ ID NO: 12195 - DNA, 21 bp, Artificial Sequence
  Description of Artificial Sequence: Synthetic primer
gccaggaaactcgggttacac

SEQ ID NO: 12196 - DNA, 21 bp, Artificial Sequence
  Description of Artificial Sequence: Synthetic primer
gcacagccgaaaatgcctaag

SEQ ID NO: 12197 - DNA, 24 bp, Artificial Sequence
  Description of Artificial Sequence: Synthetic primer
agagctgtatatggaggttttgct

SEQ ID NO: 12198 - DNA, 21 bp, Artificial Sequence
  Description of Artificial Sequence: Synthetic primer
gctagcagtcgcaatgagcta

SEQ ID NO: 12199 - DNA, 23 bp, Artificial Sequence
  Description of Artificial Sequence: Synthetic primer
ctgagggaaacgatgggatcaac

SEQ ID NO: 12200 - DNA, 21 bp, Artificial Sequence
  Description of Artificial Sequence: Synthetic primer
taatcgtgcctttgacgacga

SEQ ID NO: 12201 - DNA, 20 bp, Artificial Sequence
  Description of Artificial Sequence: Synthetic primer
aatgggagcaagcccatcca

SEQ ID NO: 12202 - DNA, 26 bp, Artificial Sequence
  Description of Artificial Sequence: Synthetic primer
tgctctgttctgtgttttaagttctg

SEQ ID NO: 12203 - DNA, 25 bp, Artificial Sequence
  Description of Artificial Sequence: Synthetic primer
gaaggaatggaggttaacggaaatg

SEQ ID NO: 12204 - DNA, 22 bp, Artificial Sequence
  Description of Artificial Sequence: Synthetic primer
tagagacattgtgcgcgatctc

SEQ ID NO: 12205 - DNA, 21 bp, Artificial Sequence
  Description of Artificial Sequence: Synthetic primer
caatctggccttggacgagaa

SEQ ID NO: 12206 - DNA, 21 bp, Artificial Sequence
  Description of Artificial Sequence: Synthetic primer
atggatggctgcaccacatta

SEQ ID NO: 12207 - DNA, 24 bp, Artificial Sequence
  Description of Artificial Sequence: Synthetic primer
ccacatgatgttgaggctgattac

SEQ ID NO: 12208 - DNA, 22 bp, Artificial Sequence
  Description of Artificial Sequence: Synthetic primer
cagggccttcagtattgcaatg

SEQ ID NO: 12209 - DNA, 26 bp, Artificial Sequence
  Description of Artificial Sequence: Synthetic primer
accaacaattacagcttgaacttgtc

SEQ ID NO: 12210 - DNA, 19 bp, Artificial Sequence
  Description of Artificial Sequence: Synthetic primer
cccgtcaagaaccccttcg

SEQ ID NO: 12211 - DNA, 18 bp, Artificial Sequence
  Description of Artificial Sequence: Synthetic primer
gacgccgtcgccatcaag

SEQ ID NO: 12212 - DNA, 23 bp, Artificial Sequence
  Description of Artificial Sequence: Synthetic primer
actcatgaggatgctatgaaggc

SEQ ID NO: 12213 - DNA, 27 bp, Artificial Sequence
  Description of Artificial Sequence: Synthetic primer
tgagttcttaccgaagatgcatacttt

SEQ ID NO: 12214 - DNA, 26 bp, Artificial Sequence
  Description of Artificial Sequence: Synthetic primer
aagcaagtctagcaaacatagggaat

SEQ ID NO: 12215 - DNA, 22 bp, Artificial Sequence
  Description of Artificial Sequence: Synthetic primer
gagctacgtcactgctagttgt

SEQ ID NO: 12216 - DNA, 21 bp, Artificial Sequence
  Description of Artificial Sequence: Synthetic primer
gtcgaccaaatgggcaacttc

SEQ ID NO: 12217 - DNA, 28 bp, Artificial Sequence
  Description of Artificial Sequence: Synthetic primer
actcttgtcaaatactcaaccttccaat

SEQ ID NO: 12218 - DNA, 28 bp, Artificial Sequence
  Description of Artificial Sequence: Synthetic primer
cttcttccttatcttcctccacatttgt

SEQ ID NO: 12219 - DNA, 24 bp, Artificial Sequence
  Description of Artificial Sequence: Synthetic primer
ccagtccatggttgacagatgatt

SEQ ID NO: 12220 - DNA, 23 bp, Artificial Sequence
  Description of Artificial Sequence: Synthetic primer
gcagctccgatagaaacatcacc

SEQ ID NO: 12221 - DNA, 28 bp, Artificial Sequence
  Description of Artificial Sequence: Synthetic primer
acatttaatttctcaatgcaggcaatcg

SEQ ID NO: 12222 - DNA, 29 bp, Artificial Sequence
  Description of Artificial Sequence: Synthetic primer
cgatcttctttgagttgtcttcaatttca

SEQ ID NO: 12223 - DNA, 19 bp, Artificial Sequence
  Description of Artificial Sequence: Synthetic primer
aagttcgttcaggcgcaca

SEQ ID NO: 12224 - DNA, 23 bp, Artificial Sequence
  Description of Artificial Sequence: Synthetic primer
aatcggcatccatgtcattcagg

SEQ ID NO: 12225 - DNA, 21 bp, Artificial Sequence
  Description of Artificial Sequence: Synthetic primer
catccaagtgggtgccctaaa

SEQ ID NO: 12226 - DNA, 21 bp, Artificial Sequence
  Description of Artificial Sequence: Synthetic primer
ccagccatcagaagccatgta

SEQ ID NO: 12227 - DNA, 21 bp, Artificial Sequence
  Description of Artificial Sequence: Synthetic primer
ggttagaaggaccaagcgtgt

SEQ ID NO: 12228 - DNA, 25 bp, Artificial Sequence
  Description of Artificial Sequence: Synthetic primer
acagattgctggtatgaaggagtac

SEQ ID NO: 12229 - DNA, 26 bp, Artificial Sequence
  Description of Artificial Sequence: Synthetic primer
tccttcaataatcaaggtgcaacatg

SEQ ID NO: 12230 - DNA, 23 bp, Artificial Sequence
  Description of Artificial Sequence: Synthetic primer
cgcatagcttcttccattacagc

SEQ ID NO: 12231 - DNA, 21 bp, Artificial Sequence
  Description of Artificial Sequence: Synthetic primer
cgttcgcagagctcattgagt

SEQ ID NO: 12232 - DNA, 19 bp, Artificial Sequence
  Description of Artificial Sequence: Synthetic primer
accatcgtgctctgggagt

SEQ ID NO: 12233 - DNA, 24 bp, Artificial Sequence
  Description of Artificial Sequence: Synthetic primer
aaaacgccttagtgatcttccatg

SEQ ID NO: 12234 - DNA, 19 bp, Artificial Sequence
  Description of Artificial Sequence: Synthetic primer
cgggattgctccgatccaa

SEQ ID NO: 12235 - DNA, 21 bp, Artificial Sequence
  Description of Artificial Sequence: Synthetic primer
cccaggaggtggagaaacttt

SEQ ID NO: 12236 - DNA, 21 bp, Artificial Sequence
  Description of Artificial Sequence: Synthetic primer
cgcacttccttggacactttg

SEQ ID NO: 12237 - DNA, 21 bp, Artificial Sequence
  Description of Artificial Sequence: Synthetic primer
ggtgtgtttgatgccctcaag

SEQ ID NO: 12238 - DNA, 26 bp, Artificial Sequence
  Description of Artificial Sequence: Synthetic primer
tcgtatgtaggaaactgttccgctta

SEQ ID NO: 12239 - DNA, 18 bp, Artificial Sequence
  Description of Artificial Sequence: Synthetic primer
ccttggcgagctggctag

SEQ ID NO: 12240 - DNA, 27 bp, Artificial Sequence
  Description of Artificial Sequence: Synthetic primer
aaaagagcgataaacggttaaaggaga

SEQ ID NO: 12241 - DNA, 24 bp, Artificial Sequence
  Description of Artificial Sequence: Synthetic primer
caggcagatagataaagcccaaca

SEQ ID NO: 12242 - DNA, 23 bp, Artificial Sequence
  Description of Artificial Sequence: Synthetic primer
agtattcaacttgtcgctgagca

SEQ ID NO: 12243 - DNA, 23 bp, Artificial Sequence
  Description of Artificial Sequence: Synthetic primer
tcttctcgatctcctccttgctc

SEQ ID NO: 12244 - DNA, 23 bp, Artificial Sequence
  Description of Artificial Sequence: Synthetic primer
ccaaagggattccctaagcttgt

SEQ ID NO: 12245 - DNA, 21 bp, Artificial Sequence
  Description of Artificial Sequence: Synthetic primer
tcgggccagatcttgttgaat

SEQ ID NO: 12246 - DNA, 22 bp, Artificial Sequence
  Description of Artificial Sequence: Synthetic primer
ctgctgctgttgttgctgtatt

SEQ ID NO: 12247 - DNA, 23 bp, Artificial Sequence
  Description of Artificial Sequence: Synthetic primer
cacggcagtcataccagtatgaa

SEQ ID NO: 12248 - DNA, 20 bp, Artificial Sequence
  Description of Artificial Sequence: Synthetic primer
catggatcaagcgagtccga

SEQ ID NO: 12249 - DNA, 21 bp, Artificial Sequence
  Description of Artificial Sequence: Synthetic primer
actggcatcagtgaggaggat

SEQ ID NO: 12250 - DNA, 25 bp, Artificial Sequence
  Description of Artificial Sequence: Synthetic primer
gccgcatgattgtaaatacatccaa

SEQ ID NO: 12251 - DNA, 26 bp, Artificial Sequence
  Description of Artificial Sequence: Synthetic primer
aatagtgtacacgttattgtgggaga

SEQ ID NO: 12252 - DNA, 28 bp, Artificial Sequence
  Description of Artificial Sequence: Synthetic primer
cctctagtgccacaagattaacaaaagg

SEQ ID NO: 12253 - DNA, 22 bp, Artificial Sequence
  Description of Artificial Sequence: Synthetic primer
gcaatggcactgcctaatcaat

SEQ ID NO: 12254 - DNA, 21 bp, Artificial Sequence
  Description of Artificial Sequence: Synthetic primer
cggcgcaaactacttcatctg

SEQ ID NO: 12255 - DNA, 21 bp, Artificial Sequence
  Description of Artificial Sequence: Synthetic primer
actggtgacagagagctggag

SEQ ID NO: 12256 - DNA, 21 bp, Artificial Sequence
  Description of Artificial Sequence: Synthetic primer
tccagctccttttccgagatg

SEQ ID NO: 12257 - DNA, 22 bp, Artificial Sequence
  Description of Artificial Sequence: Synthetic primer
ggcgattgtcaaaaagctttcg

SEQ ID NO: 12258 - DNA, 21 bp, Artificial Sequence
  Description of Artificial Sequence: Synthetic primer
gactacctcgtgccaggaaag

SEQ ID NO: 12259 - DNA, 21 bp, Artificial Sequence
  Description of Artificial Sequence: Synthetic primer
agaagcatgtggctcagcttt

SEQ ID NO: 12260 - DNA, 22 bp, Artificial Sequence
  Description of Artificial Sequence: Synthetic primer
aagacgagatcagagcaatggt

SEQ ID NO: 12261 - DNA, 22 bp, Artificial Sequence
  Description of Artificial Sequence: Synthetic primer
acaggtgtaacagcaaaggaca

SEQ ID NO: 12262 - DNA, 21 bp, Artificial Sequence
  Description of Artificial Sequence: Synthetic primer
tgtcatgcgtggaagatcagg

SEQ ID NO: 12263 - DNA, 21 bp, Artificial Sequence
  Description of Artificial Sequence: Synthetic primer
ttgtcattggtgctcaagcct

SEQ ID NO: 12264 - DNA, 21 bp, Artificial Sequence
  Description of Artificial Sequence: Synthetic primer
ccagatcctgacggagaacat

SEQ ID NO: 12265 - DNA, 19 bp, Artificial Sequence
  Description of Artificial Sequence: Synthetic primer
acatgaagacgcccgactg

SEQ ID NO: 12266 - DNA, 22 bp, Artificial Sequence
  Description of Artificial Sequence: Synthetic primer
tttgtgcctcccaaaccataca

SEQ ID NO: 12267 - DNA, 21 bp, Artificial Sequence
  Description of Artificial Sequence: Synthetic primer
gtcctcgtcgtagagctcgta

SEQ ID NO: 12268 - DNA, 21 bp, Artificial Sequence
  Description of Artificial Sequence: Synthetic primer
ggataaccgtgggaagcacaa

SEQ ID NO: 12269 - DNA, 28 bp, Artificial Sequence
  Description of Artificial Sequence: Synthetic primer
gctgaccttatagttacacagcttttct

SEQ ID NO: 12270 - DNA, 23 bp, Artificial Sequence
  Description of Artificial Sequence: Synthetic primer
aggtatcacaatgctgacagctc

SEQ ID NO: 12271 - DNA, 21 bp, Artificial Sequence
  Description of Artificial Sequence: Synthetic primer
atgacgacatggccggtattt

SEQ ID NO: 12272 - DNA, 24 bp, Artificial Sequence
  Description of Artificial Sequence: Synthetic primer
gggactctgttccattactgaaga

SEQ ID NO: 12273 - DNA, 20 bp, Artificial Sequence
  Description of Artificial Sequence: Synthetic primer
ggacgaaaccacttggctga

SEQ ID NO: 12274 - DNA, 21 bp, Artificial Sequence
  Description of Artificial Sequence: Synthetic primer
gcgacaaggaagattgtgagg

SEQ ID NO: 12275 - DNA, 22 bp, Artificial Sequence
  Description of Artificial Sequence: Synthetic primer
caggagttggtgctggtattga

SEQ ID NO: 12276 - DNA, 21 bp, Artificial Sequence
  Description of Artificial Sequence: Synthetic primer
ggaatcaccgttcggtttgtt

SEQ ID NO: 12277 - DNA, 19 bp, Artificial Sequence
  Description of Artificial Sequence: Synthetic primer
cggcgatctgtcgtcttgc

SEQ ID NO: 12278 - DNA, 26 bp, Artificial Sequence
  Description of Artificial Sequence: Synthetic primer
tattcatcaactacacccagacagac

SEQ ID NO: 12279 - DNA, 27 bp, Artificial Sequence
  Description of Artificial Sequence: Synthetic primer
tcttgcagattacaacatccagaaaga

SEQ ID NO: 12280 - DNA, 27 bp, Artificial Sequence
  Description of Artificial Sequence: Synthetic primer
ccagcaaacgattactgaataaatgct

SEQ ID NO: 12281 - DNA, 18 bp, Artificial Sequence
  Description of Artificial Sequence: Synthetic primer
tcttgcaccccatcagca

SEQ ID NO: 12282 - DNA, 22 bp, Artificial Sequence
  Description of Artificial Sequence: Synthetic primer
cggttgagcagatgtacacaga

SEQ ID NO: 12283 - DNA, 18 bp, Artificial Sequence
  Description of Artificial Sequence: Synthetic primer
gagaaggtcgcggcactc

SEQ ID NO: 12284 - DNA, 21 bp, Artificial Sequence
  Description of Artificial Sequence: Synthetic primer
ggcttctccttcccccttcta

SEQ ID NO: 12285 - DNA, 21 bp, Artificial Sequence
  Description of Artificial Sequence: Synthetic primer
ggcgtttcgggaactgttttg

SEQ ID NO: 12286 - DNA, 21 bp, Artificial Sequence
  Description of Artificial Sequence: Synthetic primer
ggtggtagctttgacccactc

SEQ ID NO: 12287 - DNA, 27 bp, Artificial Sequence
  Description of Artificial Sequence: Synthetic primer
acaagtgggttgaataacaacaagaga

SEQ ID NO: 12288 - DNA, 21 bp, Artificial Sequence
  Description of Artificial Sequence: Synthetic primer
atgacctctgttcctcagtgc

SEQ ID NO: 12289 - DNA, 25 bp, Artificial Sequence
  Description of Artificial Sequence: Synthetic primer
cgtgcctgcagatgaagttattcta

SEQ ID NO: 12290 - DNA, 22 bp, Artificial Sequence
  Description of Artificial Sequence: Synthetic primer
tggttgcttcacaagaattggc

SEQ ID NO: 12291 - DNA, 23 bp, Artificial Sequence
  Description of Artificial Sequence: Synthetic primer
aagagaaagcatccaagctagca

SEQ ID NO: 12292 - DNA, 23 bp, Artificial Sequence
  Description of Artificial Sequence: Synthetic primer
gctagagattgccttggtgatcc

SEQ ID NO: 12293 - DNA, 22 bp, Artificial Sequence
  Description of Artificial Sequence: Synthetic primer
gggtggttggtgatatttgtcg

SEQ ID NO: 12294 - DNA, 23 bp, Artificial Sequence
  Description of Artificial Sequence: Synthetic primer
agcatcggacttatgtcgatctt

SEQ ID NO: 12295 - DNA, 21 bp, Artificial Sequence
  Description of Artificial Sequence: Synthetic primer
tcgagtagcttcagcgtctcc

SEQ ID NO: 12296 - DNA, 21 bp, Artificial Sequence
  Description of Artificial Sequence: Synthetic primer
gccctatgcagatggtaccag

SEQ ID NO: 12297 - DNA, 22 bp, Artificial Sequence
  Description of Artificial Sequence: Synthetic primer
agaagatgaacgtggtgttcct

SEQ ID NO: 12298 - DNA, 21 bp, Artificial Sequence
  Description of Artificial Sequence: Synthetic primer
gctccgctccaagtacaagat

SEQ ID NO: 12299 - DNA, 27 bp, Artificial Sequence
  Description of Artificial Sequence: Synthetic primer
ggatgacagagatacacctttgttcac

SEQ ID NO: 12300 - DNA, 22 bp, Artificial Sequence
  Description of Artificial Sequence: Synthetic primer
tctccccaacaaaggaaatggg

SEQ ID NO: 12301 - DNA, 27 bp, Artificial Sequence
  Description of Artificial Sequence: Synthetic primer
attcacttctgagatagcaggcaattt

SEQ ID NO: 12302 - DNA, 21 bp, Artificial Sequence
  Description of Artificial Sequence: Synthetic primer
catgagcctccggaactcaat

SEQ ID NO: 12303 - DNA, 22 bp, Artificial Sequence
  Description of Artificial Sequence: Synthetic primer
cgatgaattggctcctctcaca

SEQ ID NO: 12304 - DNA, 22 bp, Artificial Sequence
  Description of Artificial Sequence: Synthetic primer
tttcccttgaggtttctggtga

SEQ ID NO: 12305 - DNA, 21 bp, Artificial Sequence
  Description of Artificial Sequence: Synthetic primer
gcaggcatcgttcgattcttt

SEQ ID NO: 12306 - DNA, 27 bp, Artificial Sequence
  Description of Artificial Sequence: Synthetic primer
agatgaatgaaacagaacatggctagt

SEQ ID NO: 12307 - DNA, 21 bp, Artificial Sequence
  Description of Artificial Sequence: Synthetic primer
gacggcatgtgatgcaagaac

SEQ ID NO: 12308 - DNA, 24 bp, Artificial Sequence
  Description of Artificial Sequence: Synthetic primer
gccataatagggtagatgttgcga

SEQ ID NO: 12309 - DNA, 21 bp, Artificial Sequence
  Description of Artificial Sequence: Synthetic primer
gacagttctcccttgcagagc

SEQ ID NO: 12310 - DNA, 27 bp, Artificial Sequence
  Description of Artificial Sequence: Synthetic primer
ccatgtatcatttcacagtgcaatagc

SEQ ID NO: 12311 - DNA, 21 bp, Artificial Sequence
  Description of Artificial Sequence: Synthetic primer
gaggtgtatcggtgtgcgtta

SEQ ID NO: 12312 - DNA, 21 bp, Artificial Sequence
  Description of Artificial Sequence: Synthetic primer
atgctgctatcacggatgctt

SEQ ID NO: 12313 - DNA, 24 bp, Artificial Sequence
  Description of Artificial Sequence: Synthetic primer
tctcttcctctctcgatcgtatcc

SEQ ID NO: 12314 - DNA, 21 bp, Artificial Sequence
  Description of Artificial Sequence: Synthetic primer
cgtgtagggttcaacctccat

SEQ ID NO: 12315 - DNA, 21 bp, Artificial Sequence
  Description of Artificial Sequence: Synthetic primer
gtcgtaaccacggctcctatc

SEQ ID NO: 12316 - DNA, 26 bp, Artificial Sequence
  Description of Artificial Sequence: Synthetic primer
tgagcttgcagatgtagtaagatcat

SEQ ID NO: 12317 - DNA, 25 bp, Artificial Sequence
  Description of Artificial Sequence: Synthetic primer
gtggtgtctgctcagttatttgatt

SEQ ID NO: 12318 - DNA, 22 bp, Artificial Sequence
  Description of Artificial Sequence: Synthetic primer
cagctggttgaagccatagttg

SEQ ID NO: 12319 - DNA, 27 bp, Artificial Sequence
  Description of Artificial Sequence: Synthetic primer
acaccacattgcaatgcaagaattatt

SEQ ID NO: 12320 - DNA, 28 bp, Artificial Sequence
  Description of Artificial Sequence: Synthetic primer
acaaccagacatcctatcaattaagctg

SEQ ID NO: 12321 - DNA, 22 bp, Artificial Sequence
  Description of Artificial Sequence: Synthetic primer
ctacaggccatcgcatcatttc

SEQ ID NO: 12322 - DNA, 25 bp, Artificial Sequence
  Description of Artificial Sequence: Synthetic primer
tgataggaagtctaggcggtagaga

SEQ ID NO: 12323 - DNA, 27 bp, Artificial Sequence
  Description of Artificial Sequence: Synthetic primer
ctatgaacaacgcattacccgattttt

SEQ ID NO: 12324 - DNA, 23 bp, Artificial Sequence
  Description of Artificial Sequence: Synthetic primer
tcgatttgtatctccgtgctgtt

SEQ ID NO: 12325 - DNA, 21 bp, Artificial Sequence
  Description of Artificial Sequence: Synthetic primer
tgcaaaaacttggagcggtac

SEQ ID NO: 12326 - DNA, 19 bp, Artificial Sequence
  Description of Artificial Sequence: Synthetic primer
aaatgctctggccgagagg

SEQ ID NO: 12327 - DNA, 18 bp, Artificial Sequence
  Description of Artificial Sequence: Synthetic primer
aggcgactacgcgctctt

SEQ ID NO: 12328 - DNA, 26 bp, Artificial Sequence
  Description of Artificial Sequence: Synthetic primer
cacttgtccaaaaagtagtggagagt

SEQ ID NO: 12329 - DNA, 22 bp, Artificial Sequence
  Description of Artificial Sequence: Synthetic primer
tgaaaccagtggatgaatcgca

SEQ ID NO: 12330 - DNA, 24 bp, Artificial Sequence
  Description of Artificial Sequence: Synthetic primer
aactggaacaacttccatgaaagc

SEQ ID NO: 12331 - DNA, 28 bp, Artificial Sequence
  Description of Artificial Sequence: Synthetic primer
gaagttattggaagtgacttaggtttgc

SEQ ID NO: 12332 - DNA, 21 bp, Artificial Sequence
  Description of Artificial Sequence: Synthetic primer
gcttctgcatctctagcaggt

SEQ ID NO: 12333 - DNA, 24 bp, Artificial Sequence
  Description of Artificial Sequence: Synthetic primer
tgctttcagcaagagcaatttgaa

SEQ ID NO: 12334 - DNA, 28 bp, Artificial Sequence
  Description of Artificial Sequence: Synthetic primer
caaaggaaatggtgaagaatggtgaatt

SEQ ID NO: 12335 - DNA, 21 bp, Artificial Sequence
  Description of Artificial Sequence: Synthetic primer
gcgagaactcccacaaaggtt

SEQ ID NO: 12336 - DNA, 21 bp, Artificial Sequence
  Description of Artificial Sequence: Synthetic primer
cttgtccttcctgcgaggtac

SEQ ID NO: 12337 - DNA, 28 bp, Artificial Sequence
  Description of Artificial Sequence: Synthetic primer
agaatgtcagacatacaccacataacaa

SEQ ID NO: 12338 - DNA, 21 bp, Artificial Sequence
  Description of Artificial Sequence: Synthetic primer
gcacaggaagaggcataggtc

SEQ ID NO: 12339 - DNA, 20 bp, Artificial Sequence
  Description of Artificial Sequence: Synthetic primer
acctgaacctcctcctcagc

SEQ ID NO: 12340 - DNA, 22 bp, Artificial Sequence
  Description of Artificial Sequence: Synthetic primer
ttgtggcacaaatgaccctgag

SEQ ID NO: 12341 - DNA, 28 bp, Artificial Sequence
  Description of Artificial Sequence: Synthetic primer
ataaaaattgcaagttgcttctttcgac

SEQ ID NO: 12342 - DNA, 19 bp, Artificial Sequence
  Description of Artificial Sequence: Synthetic primer
gccgacgactgcatgtagc

SEQ ID NO: 12343 - DNA, 27 bp, Artificial Sequence
  Description of Artificial Sequence: Synthetic primer
cgttgatgagagcatttacatccctat

SEQ ID NO: 12344 - DNA, 21 bp, Artificial Sequence
  Description of Artificial Sequence: Synthetic primer
caagaagaagggtgcgacgta

SEQ ID NO: 12345 - DNA, 21 bp, Artificial Sequence
  Description of Artificial Sequence: Synthetic primer
ccacttcagactgggaaggtt

SEQ ID NO: 12346 - DNA, 21 bp, Artificial Sequence
  Description of Artificial Sequence: Synthetic primer
cagcagcgttgattcccatct

SEQ ID NO: 12347 - DNA, 23 bp, Artificial Sequence
  Description of Artificial Sequence: Synthetic primer
gtgatgcacatctttgtccactt

SEQ ID NO: 12348 - DNA, 25 bp, Artificial Sequence
  Description of Artificial Sequence: Synthetic primer
aacaaaggagcttgaacatcagaac

SEQ ID NO: 12349 - DNA, 21 bp, Artificial Sequence
  Description of Artificial Sequence: Synthetic primer
ccttttggcccatccattgtt

SEQ ID NO: 12350 - DNA, 29 bp, Artificial Sequence
  Description of Artificial Sequence: Synthetic primer
agttccctttttcctatttttggttcaag

SEQ ID NO: 12351 - DNA, 24 bp, Artificial Sequence
  Description of Artificial Sequence: Synthetic primer
ccaggacaatgagaaatctgcaca

SEQ ID NO: 12352 - DNA, 28 bp, Artificial Sequence
  Description of Artificial Sequence: Synthetic primer
atcactagaaaagataggtgtcgacaca

SEQ ID NO: 12353 - DNA, 30 bp, Artificial Sequence
  Description of Artificial Sequence: Synthetic primer
cgaaaaaccttctcatttagatatcctggt

SEQ ID NO: 12354 - DNA, 21 bp, Artificial Sequence
  Description of Artificial Sequence: Synthetic primer
agatccgtgcaccatcttctg

SEQ ID NO: 12355 - DNA, 28 bp, Artificial Sequence
  Description of Artificial Sequence: Synthetic primer
aaacaacaaataagactctgacagctct

SEQ ID NO: 12356 - DNA, 21 bp, Artificial Sequence
  Description of Artificial Sequence: Synthetic primer
gtcgaagatgatcgccgactt

SEQ ID NO: 12357 - DNA, 24 bp, Artificial Sequence
  Description of Artificial Sequence: Synthetic primer
tacatctcgaagctgttgggtttc

SEQ ID NO: 12358 - DNA, 23 bp, Artificial Sequence
  Description of Artificial Sequence: Synthetic primer
ctgagcagttgcaaaaccaaatg

SEQ ID NO: 12359 - DNA, 21 bp, Artificial Sequence
  Description of Artificial Sequence: Synthetic primer
ctggattcctgcagggtaaca

SEQ ID NO: 12360 - DNA, 19 bp, Artificial Sequence
  Description of Artificial Sequence: Synthetic primer
caatcccggctggcaattc

SEQ ID NO: 12361 - DNA, 26 bp, Artificial Sequence
  Description of Artificial Sequence: Synthetic primer
ctctttcatttggcttatcagcggta

SEQ ID NO: 12362 - DNA, 19 bp, Artificial Sequence
  Description of Artificial Sequence: Synthetic primer
cggctctggatcaccagtc

SEQ ID NO: 12363 - DNA, 19 bp, Artificial Sequence
  Description of Artificial Sequence: Synthetic primer
agtacacccccgagcagta

SEQ ID NO: 12364 - DNA, 30 bp, Artificial Sequence
  Description of Artificial Sequence: Synthetic primer
cttgttttaagtagtagtagtcggtagctt

SEQ ID NO: 12365 - DNA, 19 bp, Artificial Sequence
  Description of Artificial Sequence: Synthetic primer
cgtcgtcggtctgtaccat

SEQ ID NO: 12366 - DNA, 21 bp, Artificial Sequence
  Description of Artificial Sequence: Synthetic primer
cgtaggaaagggcatcaggat

SEQ ID NO: 12367 - DNA, 21 bp, Artificial Sequence
  Description of Artificial Sequence: Synthetic primer
tttctgtgttggcgccttttt

SEQ ID NO: 12368 - DNA, 28 bp, Artificial Sequence
  Description of Artificial Sequence: Synthetic primer
gggagcctaaaatctagtactagttgga

SEQ ID NO: 12369 - DNA, 21 bp, Artificial Sequence
  Description of Artificial Sequence: Synthetic primer
ggaggcgaaagcagatgatga

SEQ ID NO: 12370 - DNA, 21 bp, Artificial Sequence
  Description of Artificial Sequence: Synthetic primer
ggtccaacttcttcacttcgc

SEQ ID NO: 12371 - DNA, 25 bp, Artificial Sequence
  Description of Artificial Sequence: Synthetic primer
ttcaaacctcatcatattgctgctg

SEQ ID NO: 12372 - DNA, 26 bp, Artificial Sequence
  Description of Artificial Sequence: Synthetic primer
tgtctttagatagcatagcacagtcg

SEQ ID NO: 12373 - DNA, 22 bp, Artificial Sequence
  Description of Artificial Sequence: Synthetic primer
catcttacaggctccaagcaca

SEQ ID NO: 12374 - DNA, 24 bp, Artificial Sequence
  Description of Artificial Sequence: Synthetic primer
gaggtccccttgaccttattaacc

SEQ ID NO: 12375 - DNA, 25 bp, Artificial Sequence
  Description of Artificial Sequence: Synthetic primer
acatcaccaaagacatgttccaact

SEQ ID NO: 12376 - DNA, 22 bp, Artificial Sequence
  Description of Artificial Sequence: Synthetic primer
cattgcagcagctgatgaatga

SEQ ID NO: 12377 - DNA, 22 bp, Artificial Sequence
  Description of Artificial Sequence: Synthetic primer
agagctagttgcccattgatgt

SEQ ID NO: 12378 - DNA, 25 bp, Artificial Sequence
  Description of Artificial Sequence: Synthetic primer
ggaaacaaaaaggactgacggagta

SEQ ID NO: 12379 - DNA, 22 bp, Artificial Sequence
  Description of Artificial Sequence: Synthetic primer
ggctctcatgtggacacaatca

SEQ ID NO: 12380 - DNA, 28 bp, Artificial Sequence
  Description of Artificial Sequence: Synthetic primer
aaataacacaaatttacagggacggttt

SEQ ID NO: 12381 - DNA, 24 bp, Artificial Sequence
  Description of Artificial Sequence: Synthetic primer
cgggtagatggcaatgatactctt

SEQ ID NO: 12382 - DNA, 26 bp, Artificial Sequence
  Description of Artificial Sequence: Synthetic primer
gcgaaagaaataacaccaggaaactt

SEQ ID NO: 12383 - DNA, 25 bp, Artificial Sequence
  Description of Artificial Sequence: Synthetic primer
gatccccaaggctgataagaagaag

SEQ ID NO: 12384 - DNA, 28 bp, Artificial Sequence
  Description of Artificial Sequence: Synthetic primer
tggaaattgatagtcttgaagagcaatg

SEQ ID NO: 12385 - DNA, 30 bp, Artificial Sequence
  Description of Artificial Sequence: Synthetic primer
tgctagttatgccttttagcaattatactg

SEQ ID NO: 12386 - DNA, 22 bp, Artificial Sequence
  Description of Artificial Sequence: Synthetic primer
cttggccgcaaactacctctta

SEQ ID NO: 12387 - DNA, 23 bp, Artificial Sequence
  Description of Artificial Sequence: Synthetic primer
caccgatttgattgttgatggct

SEQ ID NO: 12388 - DNA, 21 bp, Artificial Sequence
  Description of Artificial Sequence: Synthetic primer
cggcaaacctgttcaggaaga

SEQ ID NO: 12389 - DNA, 21 bp, Artificial Sequence
  Description of Artificial Sequence: Synthetic primer
gggaagatgctcaacgaggag

SEQ ID NO: 12390 - DNA, 24 bp, Artificial Sequence
  Description of Artificial Sequence: Synthetic primer
ttcctactgatatttggtgggctt

SEQ ID NO: 12391 - DNA, 28 bp, Artificial Sequence
  Description of Artificial Sequence: Synthetic primer
tctgtgagagaagctaagaaatcgaaaa

SEQ ID NO: 12392 - DNA, 21 bp, Artificial Sequence
  Description of Artificial Sequence: Synthetic primer
aacgggaaaagggtaccttcc

SEQ ID NO: 12393 - DNA, 26 bp, Artificial Sequence
  Description of Artificial Sequence: Synthetic primer
ggcattaaatgatgacagagttgtcg

SEQ ID NO: 12394 - DNA, 23 bp, Artificial Sequence
  Description of Artificial Sequence: Synthetic primer
gagatttagtgatagcgctgcga

SEQ ID NO: 12395 - DNA, 23 bp, Artificial Sequence
  Description of Artificial Sequence: Synthetic primer
tatgagccagcagtgtatatggc

SEQ ID NO: 12396 - DNA, 25 bp, Artificial Sequence
  Description of Artificial Sequence: Synthetic primer
atccttggtaaaggactctggttca

SEQ ID NO: 12397 - DNA, 21 bp, Artificial Sequence
  Description of Artificial Sequence: Synthetic primer
caacaaggtctgcctcaaggg

SEQ ID NO: 12398 - DNA, 25 bp, Artificial Sequence
  Description of Artificial Sequence: Synthetic primer
gaattctggtaacaaggagggagtg

SEQ ID NO: 12399 - DNA, 27 bp, Artificial Sequence
  Description of Artificial Sequence: Synthetic primer
actggaagtaaaatcaggtgactttgt

SEQ ID NO: 12400 - DNA, 22 bp, Artificial Sequence
  Description of Artificial Sequence: Synthetic primer
ctgcttggctgtggtgtttcta

SEQ ID NO: 12401 - DNA, 21 bp, Artificial Sequence
  Description of Artificial Sequence: Synthetic primer
gacgacgccgatatcggatac

SEQ ID NO: 12402 - DNA, 21 bp, Artificial Sequence
  Description of Artificial Sequence: Synthetic primer
gcgcatacctgttatcgtgct

SEQ ID NO: 12403 - DNA, 19 bp, Artificial Sequence
  Description of Artificial Sequence: Synthetic primer
gactggtgaccaggcacag

SEQ ID NO: 12404 - DNA, 23 bp, Artificial Sequence
  Description of Artificial Sequence: Synthetic primer
acatctaggagaagcgagtcctt

SEQ ID NO: 12405 - DNA, 26 bp, Artificial Sequence
  Description of Artificial Sequence: Synthetic primer
tcgatgaagtcaacctttctgtttcg

SEQ ID NO: 12406 - DNA, 24 bp, Artificial Sequence
  Description of Artificial Sequence: Synthetic primer
aaaggaggctttcttttccgaaac

SEQ ID NO: 12407 - DNA, 24 bp, Artificial Sequence
  Description of Artificial Sequence: Synthetic primer
ggaggtgcttaggtacaggttttt

SEQ ID NO: 12408 - DNA, 24 bp, Artificial Sequence
  Description of Artificial Sequence: Synthetic primer
gttattggtctcaagcagggaaag

SEQ ID NO: 12409 - DNA, 21 bp, Artificial Sequence
  Description of Artificial Sequence: Synthetic primer
acggctcatatgacagaagca

SEQ ID NO: 12410 - DNA, 21 bp, Artificial Sequence
  Description of Artificial Sequence: Synthetic primer
cgtcggcaactcgttatcctc

SEQ ID NO: 12411 - DNA, 22 bp, Artificial Sequence
  Description of Artificial Sequence: Synthetic primer
agcacattatgttgtggaggga

SEQ ID NO: 12412 - DNA, 21 bp, Artificial Sequence
  Description of Artificial Sequence: Synthetic primer
cgacttgcccaaaatcgtgag

SEQ ID NO: 12413 - DNA, 25 bp, Artificial Sequence
  Description of Artificial Sequence: Synthetic primer
cctccacatttagcatcctaacctg

SEQ ID NO: 12414 - DNA, 28 bp, Artificial Sequence
  Description of Artificial Sequence: Synthetic primer
aaagggaactagctatccaaaactgttc

SEQ ID NO: 12415 - DNA, 24 bp, Artificial Sequence
  Description of Artificial Sequence: Synthetic primer
gcttgtcgaggtttgtgatcaaag

SEQ ID NO: 12416 - DNA, 21 bp, Artificial Sequence
  Description of Artificial Sequence: Synthetic primer
cctgcagtggagaacttgaca

SEQ ID NO: 12417 - DNA, 22 bp, Artificial Sequence
  Description of Artificial Sequence: Synthetic primer
gagcagctcttgcctcttctaa

SEQ ID NO: 12418 - DNA, 29 bp, Artificial Sequence
  Description of Artificial Sequence: Synthetic primer
acaacagtatatgaaaatggaatggagga

SEQ ID NO: 12419 - DNA, 21 bp, Artificial Sequence
  Description of Artificial Sequence: Synthetic primer
ccccaggtgaaaaacgctaca

SEQ ID NO: 12420 - DNA, 25 bp, Artificial Sequence
  Description of Artificial Sequence: Synthetic primer
cagaagaaggtcacaggccatatag

SEQ ID NO: 12421 - DNA, 24 bp, Artificial Sequence
  Description of Artificial Sequence: Synthetic primer
taccaccagacatatgggttgtca

SEQ ID NO: 12422 - DNA, 29 bp, Artificial Sequence
  Description of Artificial Sequence: Synthetic primer
agacaaacccaaatcaattatttctggac

SEQ ID NO: 12423 - DNA, 26 bp, Artificial Sequence
  Description of Artificial Sequence: Synthetic primer
ggaaaaagtggaggacatatggaacc

SEQ ID NO: 12424 - DNA, 27 bp, Artificial Sequence
  Description of Artificial Sequence: Synthetic primer
ctgttagtgaagagatggagaagcttg

SEQ ID NO: 12425 - DNA, 23 bp, Artificial Sequence
  Description of Artificial Sequence: Synthetic primer
aatacatgtagaccacgcctctc

SEQ ID NO: 12426 - DNA, 21 bp, Artificial Sequence
  Description of Artificial Sequence: Synthetic primer
gtataaggaacgctgggccat

SEQ ID NO: 12427 - DNA, 21 bp, Artificial Sequence
  Description of Artificial Sequence: Synthetic primer
cggtggactcgaactctcttc

SEQ ID NO: 12428 - DNA, 26 bp, Artificial Sequence
  Description of Artificial Sequence: Synthetic primer
tgcagatatttatgctggattcaggt

SEQ ID NO: 12429 - DNA, 21 bp, Artificial Sequence
  Description of Artificial Sequence: Synthetic primer
gaatgcttggccaacaagtgg

SEQ ID NO: 12430 - DNA, 21 bp, Artificial Sequence
  Description of Artificial Sequence: Synthetic primer
ttgctctgcggaaagcttgta

SEQ ID NO: 12431 - DNA, 21 bp, Artificial Sequence
  Description of Artificial Sequence: Synthetic primer
gactgcaaggtgatgctcctc

SEQ ID NO: 12432 - DNA, 22 bp, Artificial Sequence
  Description of Artificial Sequence: Synthetic primer
gcagaagggaaggcatcctatt

SEQ ID NO: 12433 - DNA, 19 bp, Artificial Sequence
  Description of Artificial Sequence: Synthetic primer
cgtggccacgattcgagaa

SEQ ID NO: 12434 - DNA, 25 bp, Artificial Sequence
  Description of Artificial Sequence: Synthetic primer
agatggtcttaattcatgagcgtgt

SEQ ID NO: 12435 - DNA, 21 bp, Artificial Sequence
  Description of Artificial Sequence: Synthetic primer
cgagaacactgaatgcaggct

SEQ ID NO: 12436 - DNA, 25 bp, Artificial Sequence
  Description of Artificial Sequence: Synthetic primer
taggatgaaagctgtcccagaaaat

SEQ ID NO: 12437 - DNA, 23 bp, Artificial Sequence
  Description of Artificial Sequence: Synthetic primer
tcaggagaagcaagtacttccac

SEQ ID NO: 12438 - DNA, 23 bp, Artificial Sequence
  Description of Artificial Sequence: Synthetic primer
acttcttggcattcttcctcgac

SEQ ID NO: 12439 - DNA, 21 bp, Artificial Sequence
  Description of Artificial Sequence: Synthetic primer
gttgatggaaaggcagctgag

SEQ ID NO: 12440 - DNA, 21 bp, Artificial Sequence
  Description of Artificial Sequence: Synthetic primer
gcgagatgcctgactctcaag

SEQ ID NO: 12441 - DNA, 23 bp, Artificial Sequence
  Description of Artificial Sequence: Synthetic primer
gcatatgtgagaaggtctgtgct

SEQ ID NO: 12442 - DNA, 24 bp, Artificial Sequence
  Description of Artificial Sequence: Synthetic primer
tgtgattagaagggaaactccagt

SEQ ID NO: 12443 - DNA, 23 bp, Artificial Sequence
  Description of Artificial Sequence: Synthetic primer
gcaaactacgcagggtattgttc

SEQ ID NO: 12444 - DNA, 21 bp, Artificial Sequence
  Description of Artificial Sequence: Synthetic primer
cacatggcacaaggcctactt

SEQ ID NO: 12445 - DNA, 27 bp, Artificial Sequence
  Description of Artificial Sequence: Synthetic primer
gggccagatataaagagtatcgtcttc

SEQ ID NO: 12446 - DNA, 23 bp, Artificial Sequence
  Description of Artificial Sequence: Synthetic primer
cagacttcgagatgatggaagca

SEQ ID NO: 12447 - DNA, 26 bp, Artificial Sequence
  Description of Artificial Sequence: Synthetic primer
ggtcacttgatgtgtaagtggatagc

SEQ ID NO: 12448 - DNA, 27 bp, Artificial Sequence
  Description of Artificial Sequence: Synthetic primer
gctgttcatttcatggcatcgaataat

SEQ ID NO: 12449 - DNA, 18 bp, Artificial Sequence
  Description of Artificial Sequence: Synthetic primer
gtgcagggcatgacgaca

SEQ ID NO: 12450 - DNA, 22 bp, Artificial Sequence
  Description of Artificial Sequence: Synthetic primer
tcctcaagatcttcctcgcagt

SEQ ID NO: 12451 - DNA, 21 bp, Artificial Sequence
  Description of Artificial Sequence: Synthetic primer
ctgaggtcagtccaggaggaa

SEQ ID NO: 12452 - DNA, 21 bp, Artificial Sequence
  Description of Artificial Sequence: Synthetic primer
aatgtgcatgggcatatggga

SEQ ID NO: 12453 - DNA, 18 bp, Artificial Sequence
  Description of Artificial Sequence: Synthetic primer
ggtcgcggcttccaagat

SEQ ID NO: 12454 - DNA, 23 bp, Artificial Sequence
  Description of Artificial Sequence: Synthetic primer
cgaggctgatgaggactaatgat

SEQ ID NO: 12455 - DNA, 22 bp, Artificial Sequence
  Description of Artificial Sequence: Synthetic primer
aagggttcactggaggaagaga

SEQ ID NO: 12456 - DNA, 22 bp, Artificial Sequence
  Description of Artificial Sequence: Synthetic primer
tcgagatactccgtggttggta

SEQ ID NO: 12457 - DNA, 25 bp, Artificial Sequence
  Description of Artificial Sequence: Synthetic primer
ttactctgagaggctgatgactctg

SEQ ID NO: 12458 - DNA, 21 bp, Artificial Sequence
  Description of Artificial Sequence: Synthetic primer
cacggtccatcatctggatct

SEQ ID NO: 12459 - DNA, 19 bp, Artificial Sequence
  Description of Artificial Sequence: Synthetic primer
gctggctcgcgatttagtt

SEQ ID NO: 12460 - DNA, 30 bp, Artificial Sequence
  Description of Artificial Sequence: Synthetic primer
ttgtggttggtctgtaaatgtctttatagt

SEQ ID NO: 12461 - DNA, 21 bp, Artificial Sequence
  Description of Artificial Sequence: Synthetic primer
gtttgttaccagggtggaagc

SEQ ID NO: 12462 - DNA, 21 bp, Artificial Sequence
  Description of Artificial Sequence: Synthetic primer
atggagttcttcccagacacc

SEQ ID NO: 12463 - DNA, 21 bp, Artificial Sequence
  Description of Artificial Sequence: Synthetic primer
gcaatgatcggtatgccagga

SEQ ID NO: 12464 - DNA, 22 bp, Artificial Sequence
  Description of Artificial Sequence: Synthetic primer
ggaggtggagtcatctgaagag

SEQ ID NO: 12465 - DNA, 22 bp, Artificial Sequence
  Description of Artificial Sequence: Synthetic primer
cgtcatgaatccacagaatggc

SEQ ID NO: 12466 - DNA, 21 bp, Artificial Sequence
  Description of Artificial Sequence: Synthetic primer
cactgggcttcttctcctcct

SEQ ID NO: 12467 - DNA, 21 bp, Artificial Sequence
  Description of Artificial Sequence: Synthetic primer
cagactcggatggtgagaacc

SEQ ID NO: 12468 - DNA, 27 bp, Artificial Sequence
  Description of Artificial Sequence: Synthetic primer
tatttcgatcaacatgccaaagatgag

SEQ ID NO: 12469 - DNA, 25 bp, Artificial Sequence
  Description of Artificial Sequence: Synthetic primer
gggaagagtgaggagaaagaaagtg

SEQ ID NO: 12470 - DNA, 21 bp, Artificial Sequence
  Description of Artificial Sequence: Synthetic primer
cattcgaccctgcaactgaag

SEQ ID NO: 12471 - DNA, 24 bp, Artificial Sequence
  Description of Artificial Sequence: Synthetic primer
cagctgtggttctgaattattgcc

SEQ ID NO: 12472 - DNA, 21 bp, Artificial Sequence
  Description of Artificial Sequence: Synthetic primer
acttgggtggaagcctaaggt

SEQ ID NO: 12473 - DNA, 21 bp, Artificial Sequence
  Description of Artificial Sequence: Synthetic primer
ccgtcatccatccctcaagtt

SEQ ID NO: 12474 - DNA, 24 bp, Artificial Sequence
  Description of Artificial Sequence: Synthetic primer
gtcagaccacacaaatgaagtcca

SEQ ID NO: 12475 - DNA, 18 bp, Artificial Sequence
  Description of Artificial Sequence: Synthetic primer
cgaggtgcccgtcacaat

SEQ ID NO: 12476 - DNA, 25 bp, Artificial Sequence
  Description of Artificial Sequence: Synthetic primer
cttccattctaagaactgcgaaagc

SEQ ID NO: 12477 - DNA, 22 bp, Artificial Sequence
  Description of Artificial Sequence: Synthetic primer
tttgggcaaggcattatttgct

SEQ ID NO: 12478 - DNA, 28 bp, Artificial Sequence
  Description of Artificial Sequence: Synthetic primer
agtggtccaaagtacttatagcctgtat

SEQ ID NO: 12479 - DNA, 22 bp, Artificial Sequence
  Description of Artificial Sequence: Synthetic primer
ctgttcttgatgctgctccttc

SEQ ID NO: 12480 - DNA, 23 bp, Artificial Sequence
  Description of Artificial Sequence: Synthetic primer
tcggtgtctcttatctgagaggt

SEQ ID NO: 12481 - DNA, 21 bp, Artificial Sequence
  Description of Artificial Sequence: Synthetic primer
acacgttgactgagctagtcg

SEQ ID NO: 12482 - DNA, 28 bp, Artificial Sequence
  Description of Artificial Sequence: Synthetic primer
gatcaattttccagaggaacagaaagtg

SEQ ID NO: 12483 - DNA, 27 bp, Artificial Sequence
  Description of Artificial Sequence: Synthetic primer
atgttgcacatttcccacttttacttc

SEQ ID NO: 12484 - DNA, 20 bp, Artificial Sequence
  Description of Artificial Sequence: Synthetic primer
agtggataccggtggaggaa

SEQ ID NO: 12485 - DNA, 27 bp, Artificial Sequence
  Description of Artificial Sequence: Synthetic primer
acaacgtctttcgggattattcttctg

SEQ ID NO: 12486 - DNA, 21 bp, Artificial Sequence
  Description of Artificial Sequence: Synthetic primer
agcacacacacagcctaactc

SEQ ID NO: 12487 - DNA, 21 bp, Artificial Sequence
  Description of Artificial Sequence: Synthetic primer
atgtggatgcgtcgacgatac

SEQ ID NO: 12488 - DNA, 21 bp, Artificial Sequence
  Description of Artificial Sequence: Synthetic primer
gtgctgtggatcttgaaccct

SEQ ID NO: 12489 - DNA, 21 bp, Artificial Sequence
  Description of Artificial Sequence: Synthetic primer
gggacgatggttgaagttgga

SEQ ID NO: 12490 - DNA, 21 bp, Artificial Sequence
  Description of Artificial Sequence: Synthetic primer
gcggaactgcatcactgaatg

SEQ ID NO: 12491 - DNA, 23 bp, Artificial Sequence
  Description of Artificial Sequence: Synthetic primer
aggcaacaaatttgtcgtagctg

SEQ ID NO: 12492 - DNA, 22 bp, Artificial Sequence
  Description of Artificial Sequence: Synthetic primer
ctgctatagaggccggattcat

SEQ ID NO: 12493 - DNA, 19 bp, Artificial Sequence
  Description of Artificial Sequence: Synthetic primer
agactgtgcggcacctaaa

SEQ ID NO: 12494 - DNA, 27 bp, Artificial Sequence
  Description of Artificial Sequence: Synthetic primer
tcatctccatgcacatagatacgagaa

SEQ ID NO: 12495 - DNA, 24 bp, Artificial Sequence
  Description of Artificial Sequence: Synthetic primer
tgttcttgtcgctttgttgtttga

SEQ ID NO: 12496 - DNA, 21 bp, Artificial Sequence
  Description of Artificial Sequence: Synthetic primer
aaatgtttccgcccatgtcag

SEQ ID NO: 12497 - DNA, 21 bp, Artificial Sequence
  Description of Artificial Sequence: Synthetic primer
tggctgctggagttctgatag

SEQ ID NO: 12498 - DNA, 20 bp, Artificial Sequence
  Description of Artificial Sequence: Synthetic primer
cagcagcacaactgacgttt

SEQ ID NO: 12499 - DNA, 27 bp, Artificial Sequence
  Description of Artificial Sequence: Synthetic primer
gaagagaatgaaggaacaaaagcgcta

SEQ ID NO: 12500 - DNA, 26 bp, Artificial Sequence
  Description of Artificial Sequence: Synthetic primer
tgaagcagttgtaatctcctgagaaa

SEQ ID NO: 12501 - DNA, 21 bp, Artificial Sequence
  Description of Artificial Sequence: Synthetic primer
aagcgcggaagccatttattc

SEQ ID NO: 12502 - DNA, 27 bp, Artificial Sequence
  Description of Artificial Sequence: Synthetic primer
tggtaaatagagcaaagcaaaacatgg

SEQ ID NO: 12503 - DNA, 26 bp, Artificial Sequence
  Description of Artificial Sequence: Synthetic primer
ctaacgaagaacatactcagccgtat

SEQ ID NO: 12504 - DNA, 25 bp, Artificial Sequence
  Description of Artificial Sequence: Synthetic primer
caattgttccatcggagcgaatcta

SEQ ID NO: 12505 - DNA, 22 bp, Artificial Sequence
  Description of Artificial Sequence: Synthetic primer
acccctggttcttgaagaactt

SEQ ID NO: 12506 - DNA, 23 bp, Artificial Sequence
  Description of Artificial Sequence: Synthetic primer
tcatacataagggcagccaaagg

SEQ ID NO: 12507 - DNA, 24 bp, Artificial Sequence
  Description of Artificial Sequence: Synthetic primer
caacctgggaaagaagatgatggc

SEQ ID NO: 12508 - DNA, 22 bp, Artificial Sequence
  Description of Artificial Sequence: Synthetic primer
cgagactccaatacgcctttct

SEQ ID NO: 12509 - DNA, 26 bp, Artificial Sequence
  Description of Artificial Sequence: Synthetic primer
aacaccagactatttcctgtgatgtg

SEQ ID NO: 12510 - DNA, 27 bp, Artificial Sequence
  Description of Artificial Sequence: Synthetic primer
tgacccgacaaaaataacaaaggatct

SEQ ID NO: 12511 - DNA, 27 bp, Artificial Sequence
  Description of Artificial Sequence: Synthetic primer
caagctttgagctgcttaagagtatag

SEQ ID NO: 12512 - DNA, 21 bp, Artificial Sequence
  Description of Artificial Sequence: Synthetic primer
attgtgctgcaaccagaccat

SEQ ID NO: 12513 - DNA, 27 bp, Artificial Sequence
  Description of Artificial Sequence: Synthetic primer
ggaaaaggcgatattaaagaagacgtg

SEQ ID NO: 12514 - DNA, 24 bp, Artificial Sequence
  Description of Artificial Sequence: Synthetic primer
tctcatcagttatcagtggcaacc

SEQ ID NO: 12515 - DNA, 24 bp, Artificial Sequence
  Description of Artificial Sequence: Synthetic primer
ccacataacaagtcttgcagtgtt

SEQ ID NO: 12516 - DNA, 21 bp, Artificial Sequence
  Description of Artificial Sequence: Synthetic primer
ccctgggctttgatgaaggtt

SEQ ID NO: 12517 - DNA, 26 bp, Artificial Sequence
  Description of Artificial Sequence: Synthetic primer
tactgttgcaaagccagttactatct

SEQ ID NO: 12518 - DNA, 22 bp, Artificial Sequence
  Description of Artificial Sequence: Synthetic primer
caccgattgcccacgatattct

SEQ ID NO: 12519 - DNA, 23 bp, Artificial Sequence
  Description of Artificial Sequence: Synthetic primer
cgctgctcaatcaggctatgtta

SEQ ID NO: 12520 - DNA, 27 bp, Artificial Sequence
  Description of Artificial Sequence: Synthetic primer
tccattcatatatttggtgatgtgcct

SEQ ID NO: 12521 - DNA, 20 bp, Artificial Sequence
  Description of Artificial Sequence: Synthetic primer
gtgatcacggaccagtggac

SEQ ID NO: 12522 - DNA, 18 bp, Artificial Sequence
  Description of Artificial Sequence: Synthetic primer
tgtccgggctcttcttcg

SEQ ID NO: 12523 - DNA, 21 bp, Artificial Sequence
  Description of Artificial Sequence: Synthetic primer
gaggaatggcgcaatcttgtc

SEQ ID NO: 12524 - DNA, 22 bp, Artificial Sequence
  Description of Artificial Sequence: Synthetic primer
ccaagtgagcagacgatgcata

SEQ ID NO: 12525 - DNA, 24 bp, Artificial Sequence
  Description of Artificial Sequence: Synthetic primer
aagaagatgcgcttaacaagctac

SEQ ID NO: 12526 - DNA, 21 bp, Artificial Sequence
  Description of Artificial Sequence: Synthetic primer
agcccagagctgaagtctttg

SEQ ID NO: 12527 - DNA, 21 bp, Artificial Sequence
  Description of Artificial Sequence: Synthetic primer
tttggacttgttacgcagggt

SEQ ID NO: 12528 - DNA, 21 bp, Artificial Sequence
  Description of Artificial Sequence: Synthetic primer
catcatcgacgatgtccacca

SEQ ID NO: 12529 - DNA, 27 bp, Artificial Sequence
  Description of Artificial Sequence: Synthetic primer
gctgaagaggatgaaagatttgtgaaa

SEQ ID NO: 12530 - DNA, 27 bp, Artificial Sequence
  Description of Artificial Sequence: Synthetic primer
tgttgctctcagcaatcatttattgac

SEQ ID NO: 12531 - DNA, 22 bp, Artificial Sequence
  Description of Artificial Sequence: Synthetic primer
gccagaagaaggctgtgaagat

SEQ ID NO: 12532 - DNA, 26 bp, Artificial Sequence
  Description of Artificial Sequence: Synthetic primer
aatttgcgagttatggaacttcgtct

SEQ ID NO: 12533 - DNA, 21 bp, Artificial Sequence
  Description of Artificial Sequence: Synthetic primer
gtcgtagctcgagaagtccac

SEQ ID NO: 12534 - DNA, 21 bp, Artificial Sequence
  Description of Artificial Sequence: Synthetic primer
gagctcgccacgtatcttcac

SEQ ID NO: 12535 - DNA, 18 bp, Artificial Sequence
  Description of Artificial Sequence: Synthetic primer
catctccggcagcatcgt

SEQ ID NO: 12536 - DNA, 21 bp, Artificial Sequence
  Description of Artificial Sequence: Synthetic primer
cagtccccaaccttccctttc

SEQ ID NO: 12537 - DNA, 26 bp, Artificial Sequence
  Description of Artificial Sequence: Synthetic primer
tggttctgtcatctgatgttaaacct

SEQ ID NO: 12538 - DNA, 27 bp, Artificial Sequence
  Description of Artificial Sequence: Synthetic primer
ccaaggctgcatagaacagtataaagg

SEQ ID NO: 12539 - DNA, 21 bp, Artificial Sequence
  Description of Artificial Sequence: Synthetic primer
ggagggctgatgtacactctc

SEQ ID NO: 12540 - DNA, 19 bp, Artificial Sequence
  Description of Artificial Sequence: Synthetic primer
caagcccaggtgctgatga

SEQ ID NO: 12541 - DNA, 25 bp, Artificial Sequence
  Description of Artificial Sequence: Synthetic primer
aaacaagctgaaattgtcttgacca

SEQ ID NO: 12542 - DNA, 28 bp, Artificial Sequence
  Description of Artificial Sequence: Synthetic primer
tggatgtagaagagctaaagatgaatgg

SEQ ID NO: 12543 - DNA, 25 bp, Artificial Sequence
  Description of Artificial Sequence: Synthetic primer
gctcgacatcaattttggtagcttt

SEQ ID NO: 12544 - DNA, 23 bp, Artificial Sequence
  Description of Artificial Sequence: Synthetic primer
cctctccgttctggatattggtg

SEQ ID NO: 12545 - DNA, 21 bp, Artificial Sequence
  Description of Artificial Sequence: Synthetic primer
ccgggaccgtgaatcatatgc

SEQ ID NO: 12546 - DNA, 23 bp, Artificial Sequence
  Description of Artificial Sequence: Synthetic primer
gctgagggttatgagcgtctaaa

SEQ ID NO: 12547 - DNA, 22 bp, Artificial Sequence
  Description of Artificial Sequence: Synthetic primer
tcccagtatttggcatctgcat

SEQ ID NO: 12548 - DNA, 27 bp, Artificial Sequence
  Description of Artificial Sequence: Synthetic primer
cacaaattttagtgatctcatgagcca

SEQ ID NO: 12549 - DNA, 21 bp, Artificial Sequence
  Description of Artificial Sequence: Synthetic primer
gggcacatcgtcatcgatcaa

SEQ ID NO: 12550 - DNA, 21 bp, Artificial Sequence
  Description of Artificial Sequence: Synthetic primer
gcattagcagagcagctctga

SEQ ID NO: 12551 - DNA, 21 bp, Artificial Sequence
  Description of Artificial Sequence: Synthetic primer
aagactccaggagggaagctc

SEQ ID NO: 12552 - DNA, 27 bp, Artificial Sequence
  Description of Artificial Sequence: Synthetic primer
gttttgatttggtttttccgaggttga

SEQ ID NO: 12553 - DNA, 22 bp, Artificial Sequence
  Description of Artificial Sequence: Synthetic primer
ccatgatctccgcctttgaatg

SEQ ID NO: 12554 - DNA, 21 bp, Artificial Sequence
  Description of Artificial Sequence: Synthetic primer
catccccgactacatcctcag

SEQ ID NO: 12555 - DNA, 19 bp, Artificial Sequence
  Description of Artificial Sequence: Synthetic primer
ccatgccacagcacgctaa

SEQ ID NO: 12556 - DNA, 23 bp, Artificial Sequence
  Description of Artificial Sequence: Synthetic primer
cactaacagaagatgccgacaca

SEQ ID NO: 12557 - DNA, 19 bp, Artificial Sequence
  Description of Artificial Sequence: Synthetic primer
acccgtgaatccggtgttg

SEQ ID NO: 12558 - DNA, 20 bp, Artificial Sequence
  Description of Artificial Sequence: Synthetic primer
tccttgaggaggagcttggg

SEQ ID NO: 12559 - DNA, 24 bp, Artificial Sequence
  Description of Artificial Sequence: Synthetic primer
tatctctgtttttgccgtggttga

SEQ ID NO: 12560 - DNA, 24 bp, Artificial Sequence
  Description of Artificial Sequence: Synthetic primer
gtcatcagtctacaagcacattgc

SEQ ID NO: 12561 - DNA, 22 bp, Artificial Sequence
  Description of Artificial Sequence: Synthetic primer
tagcccttccatcaacatcctg

SEQ ID NO: 12562 - DNA, 22 bp, Artificial Sequence
  Description of Artificial Sequence: Synthetic primer
cgcaacgcccttgtttatttct

SEQ ID NO: 12563 - DNA, 21 bp, Artificial Sequence
  Description of Artificial Sequence: Synthetic primer
atctgcagagcggaatccttc

SEQ ID NO: 12564 - DNA, 25 bp, Artificial Sequence
  Description of Artificial Sequence: Synthetic primer
gtcagttttgctgaaccgaattaca

SEQ ID NO: 12565 - DNA, 24 bp, Artificial Sequence
  Description of Artificial Sequence: Synthetic primer
ttttgcagatttctccttcatgcg

SEQ ID NO: 12566 - DNA, 23 bp, Artificial Sequence
  Description of Artificial Sequence: Synthetic primer
gactaccttaagctcaagagcga

SEQ ID NO: 12567 - DNA, 27 bp, Artificial Sequence
  Description of Artificial Sequence: Synthetic primer
tccaatgttgtaatgttaaccctgact

SEQ ID NO: 12568 - DNA, 22 bp, Artificial Sequence
  Description of Artificial Sequence: Synthetic primer
aatcttacacgagcaggttccc

SEQ ID NO: 12569 - DNA, 27 bp, Artificial Sequence
  Description of Artificial Sequence: Synthetic primer
acagaaagaagttactgtacagcatca

SEQ ID NO: 12570 - DNA, 25 bp, Artificial Sequence
  Description of Artificial Sequence: Synthetic primer
gggactcccgttatatagagctctt

SEQ ID NO: 12571 - DNA, 18 bp, Artificial Sequence
  Description of Artificial Sequence: Synthetic primer
agcgctgtgcaacggttt

SEQ ID NO: 12572 - DNA, 29 bp, Artificial Sequence
  Description of Artificial Sequence: Synthetic primer
catgcatgtaatttcgttgaatgacaaaa

SEQ ID NO: 12573 - DNA, 27 bp, Artificial Sequence
  Description of Artificial Sequence: Synthetic primer
ttatgcatgagcaagattacaatgagg

SEQ ID NO: 12574 - DNA, 25 bp, Artificial Sequence
  Description of Artificial Sequence: Synthetic primer
gtgccgtacaaataatcgcaaaaga

SEQ ID NO: 12575 - DNA, 22 bp, Artificial Sequence
  Description of Artificial Sequence: Synthetic primer
gttctcgtactccaccaggatc

SEQ ID NO: 12576 - DNA, 27 bp, Artificial Sequence
  Description of Artificial Sequence: Synthetic primer
tttcttaaggcaaaacaatgggtttca

SEQ ID NO: 12577 - DNA, 21 bp, Artificial Sequence
  Description of Artificial Sequence: Synthetic primer
caaggtcctagcgtcggagta

SEQ ID NO: 12578 - DNA, 22 bp, Artificial Sequence
  Description of Artificial Sequence: Synthetic primer
ctcatgaaactccgcgtctgta

SEQ ID NO: 12579 - DNA, 25 bp, Artificial Sequence
  Description of Artificial Sequence: Synthetic primer
gtcaacctgtggaggatttctacaa

SEQ ID NO: 12580 - DNA, 21 bp, Artificial Sequence
  Description of Artificial Sequence: Synthetic primer
cccaagttcggcgaaatcatc

SEQ ID NO: 12581 - DNA, 23 bp, Artificial Sequence
  Description of Artificial Sequence: Synthetic primer
catcttcaactgagagcctggtt

SEQ ID NO: 12582 - DNA, 28 bp, Artificial Sequence
  Description of Artificial Sequence: Synthetic primer
aaaatatatagctcgtagcatgatgcca

SEQ ID NO: 12583 - DNA, 23 bp, Artificial Sequence
  Description of Artificial Sequence: Synthetic primer
agttacaatacagtgcccctcag

SEQ ID NO: 12584 - DNA, 28 bp, Artificial Sequence
  Description of Artificial Sequence: Synthetic primer
caaggattcgaaatcagatcattttcct

SEQ ID NO: 12585 - DNA, 28 bp, Artificial Sequence
  Description of Artificial Sequence: Synthetic primer
actgttcttgacatatattcagggtgac

SEQ ID NO: 12586 - DNA, 22 bp, Artificial Sequence
  Description of Artificial Sequence: Synthetic primer
gggcaagacagctctacttttg

SEQ ID NO: 12587 - DNA, 22 bp, Artificial Sequence
  Description of Artificial Sequence: Synthetic primer
tttagacggagatttgggcagt

SEQ ID NO: 12588 - DNA, 28 bp, Artificial Sequence
  Description of Artificial Sequence: Synthetic primer
aaaggctaaatgatattgttggaagtgc

SEQ ID NO: 12589 - DNA, 21 bp, Artificial Sequence
  Description of Artificial Sequence: Synthetic primer
ctcttccccgacaagctcatg

SEQ ID NO: 12590 - DNA, 24 bp, Artificial Sequence
  Description of Artificial Sequence: Synthetic primer
catttcgtatatggccagccattc

SEQ ID NO: 12591 - DNA, 21 bp, Artificial Sequence
  Description of Artificial Sequence: Synthetic primer
agtgatcttctggcagggtca

SEQ ID NO: 12592 - DNA, 21 bp, Artificial Sequence
  Description of Artificial Sequence: Synthetic primer
caccggactttggagatggtg

SEQ ID NO: 12593 - DNA, 21 bp, Artificial Sequence
  Description of Artificial Sequence: Synthetic primer
gaacgtcaacgcctggaaatg

SEQ ID NO: 12594 - DNA, 21 bp, Artificial Sequence
  Description of Artificial Sequence: Synthetic primer
ctgataaccaccccgttccac

SEQ ID NO: 12595 - DNA, 19 bp, Artificial Sequence
  Description of Artificial Sequence: Synthetic primer
ggctgatggtcaggtggtt

SEQ ID NO: 12596 - DNA, 24 bp, Artificial Sequence
  Description of Artificial Sequence: Synthetic primer
aaaggcaagaaagagcttccaatg

SEQ ID NO: 12597 - DNA, 21 bp, Artificial Sequence
  Description of Artificial Sequence: Synthetic primer
agccggtatggatgaccagta

SEQ ID NO: 12598 - DNA, 22 bp, Artificial Sequence
  Description of Artificial Sequence: Synthetic primer
caagccgaaccagaattcgatg

SEQ ID NO: 12599 - DNA, 21 bp, Artificial Sequence
  Description of Artificial Sequence: Synthetic primer
ctggaagctcagaccacagaa

SEQ ID NO: 12600 - DNA, 28 bp, Artificial Sequence
  Description of Artificial Sequence: Synthetic primer
tctgaattcaatcattaacacacatgcc

SEQ ID NO: 12601 - DNA, 26 bp, Artificial Sequence
  Description of Artificial Sequence: Synthetic primer
ctccataagtggctaagacacgtaaa

SEQ ID NO: 12602 - DNA, 19 bp, Artificial Sequence
  Description of Artificial Sequence: Synthetic primer
tcggaatgcctccgtggta

SEQ ID NO: 12603 - DNA, 21 bp, Artificial Sequence
  Description of Artificial Sequence: Synthetic primer
cgagtactccgaggacctcaa

SEQ ID NO: 12604 - DNA, 22 bp, Artificial Sequence
  Description of Artificial Sequence: Synthetic primer
gacagcgtttattttccgcgaa

SEQ ID NO: 12605 - DNA, 19 bp, Artificial Sequence
  Description of Artificial Sequence: Synthetic primer
cacctgctggtccttcgtc

SEQ ID NO: 12606 - DNA, 28 bp, Artificial Sequence
  Description of Artificial Sequence: Synthetic primer
gtcctggtttctatatgtctgaattgct

SEQ ID NO: 12607 - DNA, 22 bp, Artificial Sequence
  Description of Artificial Sequence: Synthetic primer
cagtggaagcactttcaaccac

SEQ ID NO: 12608 - DNA, 21 bp, Artificial Sequence
  Description of Artificial Sequence: Synthetic primer
caactgcgttgggtaggagat

SEQ ID NO: 12609 - DNA, 25 bp, Artificial Sequence
  Description of Artificial Sequence: Synthetic primer
gtgctgagtctgtttttggtgatac

SEQ ID NO: 12610 - DNA, 23 bp, Artificial Sequence
  Description of Artificial Sequence: Synthetic primer
cttcagatcccaagacagtgtcg

SEQ ID NO: 12611 - DNA, 21 bp, Artificial Sequence
  Description of Artificial Sequence: Synthetic primer
cgcttggccctacctaattga

SEQ ID NO: 12612 - DNA, 28 bp, Artificial Sequence
  Description of Artificial Sequence: Synthetic primer
tattgaagatagtacgtcaccttagctg

SEQ ID NO: 12613 - DNA, 21 bp, Artificial Sequence
  Description of Artificial Sequence: Synthetic primer
acggaaagtcagatcccgagt

SEQ ID NO: 12614 - DNA, 26 bp, Artificial Sequence
  Description of Artificial Sequence: Synthetic primer
ggtgcactccttgactacctatctat

SEQ ID NO: 12615 - DNA, 21 bp, Artificial Sequence
  Description of Artificial Sequence: Synthetic primer
ctcccttcacagctagctcct

SEQ ID NO: 12616 - DNA, 24 bp, Artificial Sequence
  Description of Artificial Sequence: Synthetic primer
cgagcaaatattaagctcctgcca

SEQ ID NO: 12617 - DNA, 21 bp, Artificial Sequence
  Description of Artificial Sequence: Synthetic primer
ctagcggctggatcgagaaag

SEQ ID NO: 12618 - DNA, 21 bp, Artificial Sequence
  Description of Artificial Sequence: Synthetic primer
tatcctcgagggagtccttgt

SEQ ID NO: 12619 - DNA, 22 bp, Artificial Sequence
  Description of Artificial Sequence: Synthetic primer
atgtggatgcacatccttgtct

SEQ ID NO: 12620 - DNA, 25 bp, Artificial Sequence
  Description of Artificial Sequence: Synthetic primer
agcagagagccaagatccatataag

SEQ ID NO: 12621 - DNA, 21 bp, Artificial Sequence
  Description of Artificial Sequence: Synthetic primer
gttcaggaggtcaggcatgtg

SEQ ID NO: 12622 - DNA, 23 bp, Artificial Sequence
  Description of Artificial Sequence: Synthetic primer
cgagcagctctataggaacttgt

SEQ ID NO: 12623 - DNA, 22 bp, Artificial Sequence
  Description of Artificial Sequence: Synthetic primer
tcgaatcccctgatggagttct

SEQ ID NO: 12624 - DNA, 24 bp, Artificial Sequence
  Description of Artificial Sequence: Synthetic primer
tctctgctgctgttattctctgtt

SEQ ID NO: 12625 - DNA, 28 bp, Artificial Sequence
  Description of Artificial Sequence: Synthetic primer
cacatcttgatccacagatccttaaaca

SEQ ID NO: 12626 - DNA, 27 bp, Artificial Sequence
  Description of Artificial Sequence: Synthetic primer
ggttcctctcgtactaggttgaattac

SEQ ID NO: 12627 - DNA, 28 bp, Artificial Sequence
  Description of Artificial Sequence: Synthetic primer
tatgggagaaaatgatcaaaaagagctg

SEQ ID NO: 12628 - DNA, 20 bp, Artificial Sequence
  Description of Artificial Sequence: Synthetic primer
ctagagcgtcatccgaaggc

SEQ ID NO: 12629 - DNA, 18 bp, Artificial Sequence
  Description of Artificial Sequence: Synthetic primer
gtcctgggcgtgttcctg

SEQ ID NO: 12630 - DNA, 21 bp, Artificial Sequence
  Description of Artificial Sequence: Synthetic primer
ctgtctccgttcgtcgactac

SEQ ID NO: 12631 - DNA, 26 bp, Artificial Sequence
  Description of Artificial Sequence: Synthetic primer
ctctatcctggagaagacatggaaac

SEQ ID NO: 12632 - DNA, 25 bp, Artificial Sequence
  Description of Artificial Sequence: Synthetic primer
ctctaagcatgatgtagaccccatt

SEQ ID NO: 12633 - DNA, 25 bp, Artificial Sequence
  Description of Artificial Sequence: Synthetic primer
gcagatcagcaagaagaagaagttt

SEQ ID NO: 12634 - DNA, 21 bp, Artificial Sequence
  Description of Artificial Sequence: Synthetic primer
agtccactggcattaatgggt

SEQ ID NO: 12635 - DNA, 21 bp, Artificial Sequence
  Description of Artificial Sequence: Synthetic primer
aaggaccccaatgccactatt

SEQ ID NO: 12636 - DNA, 18 bp, Artificial Sequence
  Description of Artificial Sequence: Synthetic primer
cgctcggtctctctccga

SEQ ID NO: 12637 - DNA, 23 bp, Artificial Sequence
  Description of Artificial Sequence: Synthetic primer
gacaagaatgacagaccctacca

SEQ ID NO: 12638 - DNA, 28 bp, Artificial Sequence
  Description of Artificial Sequence: Synthetic primer
caatgatgtaactcgacgttttattcca

SEQ ID NO: 12639 - DNA, 20 bp, Artificial Sequence
  Description of Artificial Sequence: Synthetic primer
ccagggaacccgatgctaag

SEQ ID NO: 12640 - DNA, 21 bp, Artificial Sequence
  Description of Artificial Sequence: Synthetic primer
taggatgccagtctgttccct

SEQ ID NO: 12641 - DNA, 22 bp, Artificial Sequence
  Description of Artificial Sequence: Synthetic primer
cattcctttggcgtccaccata

SEQ ID NO: 12642 - DNA, 23 bp, Artificial Sequence
  Description of Artificial Sequence: Synthetic primer
gggatgttataattccgcccaac

SEQ ID NO: 12643 - DNA, 28 bp, Artificial Sequence
  Description of Artificial Sequence: Synthetic primer
catcagtattagatttcaggttttgcca

SEQ ID NO: 12644 - DNA, 25 bp, Artificial Sequence
  Description of Artificial Sequence: Synthetic primer
agaagaccaatggagcatgtatgaa

SEQ ID NO: 12645 - DNA, 25 bp, Artificial Sequence
  Description of Artificial Sequence: Synthetic primer
ggagttcttcttgagattggcaatg

SEQ ID NO: 12646 - DNA, 23 bp, Artificial Sequence
  Description of Artificial Sequence: Synthetic primer
ccagctgggctaacttagtacac

SEQ ID NO: 12647 - DNA, 22 bp, Artificial Sequence
  Description of Artificial Sequence: Synthetic primer
ggttcagtaattgttgcgcgaa

SEQ ID NO: 12648 - DNA, 21 bp, Artificial Sequence
  Description of Artificial Sequence: Synthetic primer
gcagaccacctgcaacaattt

SEQ ID NO: 12649 - DNA, 24 bp, Artificial Sequence
  Description of Artificial Sequence: Synthetic primer
agcaaagcatatacagtcctgctc

SEQ ID NO: 12650 - DNA, 21 bp, Artificial Sequence
  Description of Artificial Sequence: Synthetic primer
cgatacgagcctgtgaaggtt

SEQ ID NO: 12651 - DNA, 21 bp, Artificial Sequence
  Description of Artificial Sequence: Synthetic primer
gaacagcccgaaagtcagtcc

SEQ ID NO: 12652 - DNA, 27 bp, Artificial Sequence
  Description of Artificial Sequence: Synthetic primer
atttcatatgtgatcccaactttgagc

SEQ ID NO: 12653 - DNA, 21 bp, Artificial Sequence
  Description of Artificial Sequence: Synthetic primer
ctccctcttcgacacctgcta

SEQ ID NO: 12654 - DNA, 21 bp, Artificial Sequence
  Description of Artificial Sequence: Synthetic primer
acaacagggttgccaagttga

SEQ ID NO: 12655 - DNA, 21 bp, Artificial Sequence
  Description of Artificial Sequence: Synthetic primer
gagcagggtcaggttcatgat

SEQ ID NO: 12656 - DNA, 22 bp, Artificial Sequence
  Description of Artificial Sequence: Synthetic primer
tgacttgctgaagctcaacaac

SEQ ID NO: 12657 - DNA, 25 bp, Artificial Sequence
  Description of Artificial Sequence: Synthetic primer
gcaggaaatgttggaatgacagatt

SEQ ID NO: 12658 - DNA, 23 bp, Artificial Sequence
  Description of Artificial Sequence: Synthetic primer
ttggccaacaaccttaagaaccc

SEQ ID NO: 12659 - DNA, 18 bp, Artificial Sequence
  Description of Artificial Sequence: Synthetic primer
aagccaagtcggcttgtc

SEQ ID NO: 12660 - DNA, 25 bp, Artificial Sequence
  Description of Artificial Sequence: Synthetic primer
aggaaacaaaaaggaagtgctctca

SEQ ID NO: 12661 - DNA, 23 bp, Artificial Sequence
  Description of Artificial Sequence: Synthetic primer
actagcgttctgcttaagcatca

SEQ ID NO: 12662 - DNA, 21 bp, Artificial Sequence
  Description of Artificial Sequence: Synthetic primer
gttgcccattcaggtctgaac

SEQ ID NO: 12663 - DNA, 23 bp, Artificial Sequence
  Description of Artificial Sequence: Synthetic primer
cagccgtatgatcaggaaaacga

SEQ ID NO: 12664 - DNA, 22 bp, Artificial Sequence
  Description of Artificial Sequence: Synthetic primer
tgtcaccaaagaggaccaatgt

SEQ ID NO: 12665 - DNA, 21 bp, Artificial Sequence
  Description of Artificial Sequence: Synthetic primer
gtcaccaaaggtgtgctgact

SEQ ID NO: 12666 - DNA, 24 bp, Artificial Sequence
  Description of Artificial Sequence: Synthetic primer
agcaaagaagagcacatatatggg

SEQ ID NO: 12667 - DNA, 19 bp, Artificial Sequence
  Description of Artificial Sequence: Synthetic primer
aagagctcgtagggcagga

SEQ ID NO: 12668 - DNA, 28 bp, Artificial Sequence
  Description of Artificial Sequence: Synthetic primer
ctgtcacttgaatttcagtttctcactg

SEQ ID NO: 12669 - DNA, 26 bp, Artificial Sequence
  Description of Artificial Sequence: Synthetic primer
aagaagagtgacaagtcagttatgct

SEQ ID NO: 12670 - DNA, 21 bp, Artificial Sequence
  Description of Artificial Sequence: Synthetic primer
ggcttttggtgcttgaagcag

SEQ ID NO: 12671 - DNA, 21 bp, Artificial Sequence
  Description of Artificial Sequence: Synthetic primer
tatcttctgcaccgagtgcat

SEQ ID NO: 12672 - DNA, 21 bp, Artificial Sequence
  Description of Artificial Sequence: Synthetic primer
ctgcagcttgctccaactttg

SEQ ID NO: 12673 - DNA, 21 bp, Artificial Sequence
  Description of Artificial Sequence: Synthetic primer
atcatggccatcatccaggag

SEQ ID NO: 12674 - DNA, 28 bp, Artificial Sequence
  Description of Artificial Sequence: Synthetic primer
agggcaaaaagttcaatcgataaaatgt

SEQ ID NO: 12675 - DNA, 21 bp, Artificial Sequence
  Description of Artificial Sequence: Synthetic primer
cgacgagggccttcttgtatc

SEQ ID NO: 12676 - DNA, 21 bp, Artificial Sequence
  Description of Artificial Sequence: Synthetic primer
cttcgaccaggtcggatagac

SEQ ID NO: 12677 - DNA, 26 bp, Artificial Sequence
  Description of Artificial Sequence: Synthetic primer
catggatatgatgaggagaccatgag

SEQ ID NO: 12678 - DNA, 22 bp, Artificial Sequence
  Description of Artificial Sequence: Synthetic primer
gcattccctgaagcaaaagctc

SEQ ID NO: 12679 - DNA, 21 bp, Artificial Sequence
  Description of Artificial Sequence: Synthetic primer
gccttgccatcctttcaactt

SEQ ID NO: 12680 - DNA, 22 bp, Artificial Sequence
  Description of Artificial Sequence: Synthetic primer
gaacatactcgggatgctgctc

SEQ ID NO: 12681 - DNA, 22 bp, Artificial Sequence
  Description of Artificial Sequence: Synthetic primer
tgcatgaaccgtgagcacaata

SEQ ID NO: 12682 - DNA, 21 bp, Artificial Sequence
  Description of Artificial Sequence: Synthetic primer
ccctactgggtgcaactcttc

SEQ ID NO: 12683 - DNA, 26 bp, Artificial Sequence
  Description of Artificial Sequence: Synthetic primer
ggtcttgaggttcattttgttgacac

SEQ ID NO: 12684 - DNA, 24 bp, Artificial Sequence
  Description of Artificial Sequence: Synthetic primer
aagatcttaccgcctccaatttcc

SEQ ID NO: 12685 - DNA, 28 bp, Artificial Sequence
  Description of Artificial Sequence: Synthetic primer
tcggtagaactaatggtgaaatggaaaa

SEQ ID NO: 12686 - DNA, 21 bp, Artificial Sequence
  Description of Artificial Sequence: Synthetic primer
gatggctcgttcaagccaaag

SEQ ID NO: 12687 - DNA, 22 bp, Artificial Sequence
  Description of Artificial Sequence: Synthetic primer
cagtgctacacgtcaccaacta

SEQ ID NO: 12688 - DNA, 21 bp, Artificial Sequence
  Description of Artificial Sequence: Synthetic primer
acattccaagactgtgaagcg

SEQ ID NO: 12689 - DNA, 25 bp, Artificial Sequence
  Description of Artificial Sequence: Synthetic primer
tagttctggtctcttattgggctca

SEQ ID NO: 12690 - DNA, 18 bp, Artificial Sequence
  Description of Artificial Sequence: Synthetic primer
cgtggccaccgtcaacag

SEQ ID NO: 12691 - DNA, 21 bp, Artificial Sequence
  Description of Artificial Sequence: Synthetic primer
cactccgaagtatctgcccat

SEQ ID NO: 12692 - DNA, 26 bp, Artificial Sequence
  Description of Artificial Sequence: Synthetic primer
taccgttaactatgtctgcaggtcta

SEQ ID NO: 12693 - DNA, 21 bp, Artificial Sequence
  Description of Artificial Sequence: Synthetic primer
ctccgacctctcccatttctc

SEQ ID NO: 12694 - DNA, 26 bp, Artificial Sequence
  Description of Artificial Sequence: Synthetic primer
tttagtaagaggtggctgctactttt

SEQ ID NO: 12695 - DNA, 24 bp, Artificial Sequence
  Description of Artificial Sequence: Synthetic primer
aggccaccagatttcagaagatag

SEQ ID NO: 12696 - DNA, 21 bp, Artificial Sequence
  Description of Artificial Sequence: Synthetic primer
agttatcggttgttgcttggc

SEQ ID NO: 12697 - DNA, 28 bp, Artificial Sequence
  Description of Artificial Sequence: Synthetic primer
accttcatcgtcagattgtaaattttgc

SEQ ID NO: 12698 - DNA, 23 bp, Artificial Sequence
  Description of Artificial Sequence: Synthetic primer
cctccggcttaacatctgaactt

SEQ ID NO: 12699 - DNA, 29 bp, Artificial Sequence
  Description of Artificial Sequence: Synthetic primer
gcagtttgtaagtttgctttgatctactc

SEQ ID NO: 12700 - DNA, 28 bp, Artificial Sequence
  Description of Artificial Sequence: Synthetic primer
aaggcttcagtctttggtgaaaattatg

SEQ ID NO: 12701 - DNA, 21 bp, Artificial Sequence
  Description of Artificial Sequence: Synthetic primer
ggaaggaccgcactacagttg

SEQ ID NO: 12702 - DNA, 21 bp, Artificial Sequence
  Description of Artificial Sequence: Synthetic primer
tacgcgtgccttagcaatttc

SEQ ID NO: 12703 - DNA, 23 bp, Artificial Sequence
  Description of Artificial Sequence: Synthetic primer
gagcacacacttgttgcgaatac

SEQ ID NO: 12704 - DNA, 21 bp, Artificial Sequence
  Description of Artificial Sequence: Synthetic primer
cacctggacatcgagacgatc

SEQ ID NO: 12705 - DNA, 22 bp, Artificial Sequence
  Description of Artificial Sequence: Synthetic primer
ttgttctagggtagcacggttc

SEQ ID NO: 12706 - DNA, 22 bp, Artificial Sequence
  Description of Artificial Sequence: Synthetic primer
cctcctatgtggctatgggtga

SEQ ID NO: 12707 - DNA, 30 bp, Artificial Sequence
  Description of Artificial Sequence: Synthetic primer
tgtttgtttatttgttcacgagtacgtaga

SEQ ID NO: 12708 - DNA, 23 bp, Artificial Sequence
  Description of Artificial Sequence: Synthetic primer
gtgagggagataaagtgggatgc

SEQ ID NO: 12709 - DNA, 21 bp, Artificial Sequence
  Description of Artificial Sequence: Synthetic primer
gaagtccaagcccgtgtacaa

SEQ ID NO: 12710 - DNA, 26 bp, Artificial Sequence
  Description of Artificial Sequence: Synthetic primer
agacatatgtgaaggatttggagacg

SEQ ID NO: 12711 - DNA, 24 bp, Artificial Sequence
  Description of Artificial Sequence: Synthetic primer
gggaccatcttgggatactctttt

SEQ ID NO: 12712 - DNA, 21 bp, Artificial Sequence
  Description of Artificial Sequence: Synthetic primer
aatttgcatcgtccaaacgca

SEQ ID NO: 12713 - DNA, 23 bp, Artificial Sequence
  Description of Artificial Sequence: Synthetic primer
gcgaaccatctcaaaactagcca

SEQ ID NO: 12714 - DNA, 28 bp, Artificial Sequence
  Description of Artificial Sequence: Synthetic primer
tatctactgttattttgttcctggtggt

SEQ ID NO: 12715 - DNA, 25 bp, Artificial Sequence
  Description of Artificial Sequence: Synthetic primer
gggagataaaggagaagctcaagaa

SEQ ID NO: 12716 - DNA, 23 bp, Artificial Sequence
  Description of Artificial Sequence: Synthetic primer
tgtcaggagagctgttgaaaagg

SEQ ID NO: 12717 - DNA, 24 bp, Artificial Sequence
  Description of Artificial Sequence: Synthetic primer
agtacaacaattcatcagcgcttg

SEQ ID NO: 12718 - DNA, 23 bp, Artificial Sequence
  Description of Artificial Sequence: Synthetic primer
tttagcatgtgactcggatcagt

SEQ ID NO: 12719 - DNA, 21 bp, Artificial Sequence
  Description of Artificial Sequence: Synthetic primer
aaaccagggctagaaatggca

SEQ ID NO: 12720 - DNA, 23 bp, Artificial Sequence
  Description of Artificial Sequence: Synthetic primer
actgcgagatatttgcaaccttg

SEQ ID NO: 12721 - DNA, 21 bp, Artificial Sequence
  Description of Artificial Sequence: Synthetic primer
ggtcttgctcccatggacaat

SEQ ID NO: 12722 - DNA, 24 bp, Artificial Sequence
  Description of Artificial Sequence: Synthetic primer
aaaccctggtctaagtttgtcaca

SEQ ID NO: 12723 - DNA, 21 bp, Artificial Sequence
  Description of Artificial Sequence: Synthetic primer
cctgtatgcagacacagcaca

SEQ ID NO: 12724 - DNA, 23 bp, Artificial Sequence
  Description of Artificial Sequence: Synthetic primer
tctgaaaatctgtcgatggcctt

SEQ ID NO: 12725 - DNA, 23 bp, Artificial Sequence
  Description of Artificial Sequence: Synthetic primer
gtccgagttcatcagtcaccttg

SEQ ID NO: 12726 - DNA, 29 bp, Artificial Sequence
  Description of Artificial Sequence: Synthetic primer
gaattcgctaacgaacaaaggtaatagat

SEQ ID NO: 12727 - DNA, 27 bp, Artificial Sequence
  Description of Artificial Sequence: Synthetic primer
tgccgtgcctagtattattacatatcc

SEQ ID NO: 12728 - DNA, 21 bp, Artificial Sequence
  Description of Artificial Sequence: Synthetic primer
tcctccgcaacagatcatgag

SEQ ID NO: 12729 - DNA, 21 bp, Artificial Sequence
  Description of Artificial Sequence: Synthetic primer
acaatgcggtaccagagttga

SEQ ID NO: 12730 - DNA, 25 bp, Artificial Sequence
  Description of Artificial Sequence: Synthetic primer
tgaagcgttgtttgagaatcattgc

SEQ ID NO: 12731 - DNA, 25 bp, Artificial Sequence
  Description of Artificial Sequence: Synthetic primer
catcagaatacttcactggctttgc

SEQ ID NO: 12732 - DNA, 23 bp, Artificial Sequence
  Description of Artificial Sequence: Synthetic primer
ctgcccatcagaagtcgatagtt

SEQ ID NO: 12733 - DNA, 24 bp, Artificial Sequence
  Description of Artificial Sequence: Synthetic primer
ggagtatgcgtgaaacttcgaaag

SEQ ID NO: 12734 - DNA, 23 bp, Artificial Sequence
  Description of Artificial Sequence: Synthetic primer
acagactacaacgatgcattgga

SEQ ID NO: 12735 - DNA, 21 bp, Artificial Sequence
  Description of Artificial Sequence: Synthetic primer
aagttcattgtcggagacggt

SEQ ID NO: 12736 - DNA, 23 bp, Artificial Sequence
  Description of Artificial Sequence: Synthetic primer
gcttggagctcagtctagtttgt

SEQ ID NO: 12737 - DNA, 22 bp, Artificial Sequence
  Description of Artificial Sequence: Synthetic primer
cacgaggatgtgcaccttcata

SEQ ID NO: 12738 - DNA, 24 bp, Artificial Sequence
  Description of Artificial Sequence: Synthetic primer
tcgatcacagcctcatctacatct

SEQ ID NO: 12739 - DNA, 27 bp, Artificial Sequence
  Description of Artificial Sequence: Synthetic primer
atctgttctcaagacatcatgctttcc

SEQ ID NO: 12740 - DNA, 29 bp, Artificial Sequence
  Description of Artificial Sequence: Synthetic primer
gcaatttgaaggatttctttactgttgga

SEQ ID NO: 12741 - DNA, 23 bp, Artificial Sequence
  Description of Artificial Sequence: Synthetic primer
ataatctcagatgagccccgaga

SEQ ID NO: 12742 - DNA, 23 bp, Artificial Sequence
  Description of Artificial Sequence: Synthetic primer
gagtctgcaatcttggagcagat

SEQ ID NO: 12743 - DNA, 21 bp, Artificial Sequence
  Description of Artificial Sequence: Synthetic primer
ggaaacagaaggcgttgtgtc

SEQ ID NO: 12744 - DNA, 28 bp, Artificial Sequence
  Description of Artificial Sequence: Synthetic primer
gtatggtgctgaactatgtcattgttct

SEQ ID NO: 12745 - DNA, 22 bp, Artificial Sequence
  Description of Artificial Sequence: Synthetic primer
agcattcctgacacaatctcct

SEQ ID NO: 12746 - DNA, 28 bp, Artificial Sequence
  Description of Artificial Sequence: Synthetic primer
acaaacggtaacagtgttataccaatct

SEQ ID NO: 12747 - DNA, 27 bp, Artificial Sequence
  Description of Artificial Sequence: Synthetic primer
gatttcttcttcactgttcttgctctg

SEQ ID NO: 12748 - DNA, 24 bp, Artificial Sequence
  Description of Artificial Sequence: Synthetic primer
cagatcagtggacgagacatacaa

SEQ ID NO: 12749 - DNA, 26 bp, Artificial Sequence
  Description of Artificial Sequence: Synthetic primer
gagaatagctacaacctgttcactgt

SEQ ID NO: 12750 - DNA, 27 bp, Artificial Sequence
  Description of Artificial Sequence: Synthetic primer
aatccctgagttcttcatcagatttct

SEQ ID NO: 12751 - DNA, 21 bp, Artificial Sequence
  Description of Artificial Sequence: Synthetic primer
caggtgcttgaggatgtcctg

SEQ ID NO: 12752 - DNA, 25 bp, Artificial Sequence
  Description of Artificial Sequence: Synthetic primer
tctgggatagggattgttctcatct

SEQ ID NO: 12753 - DNA, 20 bp, Artificial Sequence
  Description of Artificial Sequence: Synthetic primer
tatcggcctctactgcacct

SEQ ID NO: 12754 - DNA, 21 bp, Artificial Sequence
  Description of Artificial Sequence: Synthetic primer
ggcagagctacaaccttcgag

SEQ ID NO: 12755 - DNA, 25 bp, Artificial Sequence
  Description of Artificial Sequence: Synthetic primer
tcacaaagtttttgagcaggatgtg

SEQ ID NO: 12756 - DNA, 27 bp, Artificial Sequence
  Description of Artificial Sequence: Synthetic primer
aattataggactggttcgtggttttca

SEQ ID NO: 12757 - DNA, 28 bp, Artificial Sequence
  Description of Artificial Sequence: Synthetic primer
atgagagctagctttgagcatataagac

SEQ ID NO: 12758 - DNA, 21 bp, Artificial Sequence
  Description of Artificial Sequence: Synthetic primer
atgttgtcttcagcgacgcta

SEQ ID NO: 12759 - DNA, 25 bp, Artificial Sequence
  Description of Artificial Sequence: Synthetic primer
cgtatcagaaggcaattgaaccaac

SEQ ID NO: 12760 - DNA, 22 bp, Artificial Sequence
  Description of Artificial Sequence: Synthetic primer
tgaagacggctgacacaatgaa

SEQ ID NO: 12761 - DNA, 21 bp, Artificial Sequence
  Description of Artificial Sequence: Synthetic primer
caggagcgaacagtgatgacc

SEQ ID NO: 12762 - DNA, 19 bp, Artificial Sequence
  Description of Artificial Sequence: Synthetic primer
gccatggcgtgagatgtgt

SEQ ID NO: 12763 - DNA, 22 bp, Artificial Sequence
  Description of Artificial Sequence: Synthetic primer
ttttcgagagcaccatgaacct

SEQ ID NO: 12764 - DNA, 21 bp, Artificial Sequence
  Description of Artificial Sequence: Synthetic primer
aagcggcatcttccagaatcg

SEQ ID NO: 12765 - DNA, 21 bp, Artificial Sequence
  Description of Artificial Sequence: Synthetic primer
accaatcaagctgcacagaaa

SEQ ID NO: 12766 - DNA, 21 bp, Artificial Sequence
  Description of Artificial Sequence: Synthetic primer
ctcgagtgggagaacccttct

SEQ ID NO: 12767 - DNA, 22 bp, Artificial Sequence
  Description of Artificial Sequence: Synthetic primer
ggtactggcaccacaggattag

SEQ ID NO: 12768 - DNA, 24 bp, Artificial Sequence
  Description of Artificial Sequence: Synthetic primer
gcatggatctgattatgcaagggt

SEQ ID NO: 12769 - DNA, 21 bp, Artificial Sequence
  Description of Artificial Sequence: Synthetic primer
acaatgggtggctagtttgga

SEQ ID NO: 12770 - DNA, 21 bp, Artificial Sequence
  Description of Artificial Sequence: Synthetic primer
ggcgatccatccccaaatcag

SEQ ID NO: 12771 - DNA, 22 bp, Artificial Sequence
  Description of Artificial Sequence: Synthetic primer
cttcctccaccaagactaccct

SEQ ID NO: 12772 - DNA, 25 bp, Artificial Sequence
  Description of Artificial Sequence: Synthetic primer
aaaaatacttgggaagcttgctgaa

SEQ ID NO: 12773 - DNA, 28 bp, Artificial Sequence
  Description of Artificial Sequence: Synthetic primer
tttgttttgagtcaatgacaagttccat

SEQ ID NO: 12774 - DNA, 22 bp, Artificial Sequence
  Description of Artificial Sequence: Synthetic primer
gagaccatgcgaacgagagtag

SEQ ID NO: 12775 - DNA, 26 bp, Artificial Sequence
  Description of Artificial Sequence: Synthetic primer
gtgactatacgatctggatccaggta

SEQ ID NO: 12776 - DNA, 23 bp, Artificial Sequence
  Description of Artificial Sequence: Synthetic primer
tgcttgcatagcatacatgagga

SEQ ID NO: 12777 - DNA, 26 bp, Artificial Sequence
  Description of Artificial Sequence: Synthetic primer
acaagtctgtgattgaagaagagctg

SEQ ID NO: 12778 - DNA, 18 bp, Artificial Sequence
  Description of Artificial Sequence: Synthetic primer
gatggcacccgtgggttc

SEQ ID NO: 12779 - DNA, 18 bp, Artificial Sequence
  Description of Artificial Sequence: Synthetic primer
ctcggcgacgccatcttc

SEQ ID NO: 12780 - DNA, 23 bp, Artificial Sequence
  Description of Artificial Sequence: Synthetic primer
gtggttgctaccaacaacactga

SEQ ID NO: 12781 - DNA, 22 bp, Artificial Sequence
  Description of Artificial Sequence: Synthetic primer
tccatgtgtggagacagagaca

SEQ ID NO: 12782 - DNA, 19 bp, Artificial Sequence
  Description of Artificial Sequence: Synthetic primer
ggatccccggacagaactt

SEQ ID NO: 12783 - DNA, 18 bp, Artificial Sequence
  Description of Artificial Sequence: Synthetic primer
agtgttcccgagcactcc

SEQ ID NO: 12784 - DNA, 22 bp, Artificial Sequence
  Description of Artificial Sequence: Synthetic primer
gggaaatcttcggacgggttat

SEQ ID NO: 12785 - DNA, 21 bp, Artificial Sequence
  Description of Artificial Sequence: Synthetic primer
tctgccacacaaaaggatgga

SEQ ID NO: 12786 - DNA, 25 bp, Artificial Sequence
  Description of Artificial Sequence: Synthetic primer
caggaaaagaatcagttcccaaacc

SEQ ID NO: 12787 - DNA, 25 bp, Artificial Sequence
  Description of Artificial Sequence: Synthetic primer
cgtaggataattagtagcgcatcgt

SEQ ID NO: 12788 - DNA, 21 bp, Artificial Sequence
  Description of Artificial Sequence: Synthetic primer
gtggcaggaaaaccgactagg

SEQ ID NO: 12789 - DNA, 26 bp, Artificial Sequence
  Description of Artificial Sequence: Synthetic primer
gggtgtactagtttatcttcgtggac

SEQ ID NO: 12790 - DNA, 28 bp, Artificial Sequence
  Description of Artificial Sequence: Synthetic primer
gtgtccaagttaacaatttgggtcattt

SEQ ID NO: 12791 - DNA, 21 bp, Artificial Sequence
  Description of Artificial Sequence: Synthetic primer
gtagttatgctgcccctggag

SEQ ID NO: 12792 - DNA, 25 bp, Artificial Sequence
  Description of Artificial Sequence: Synthetic primer
agagcatttgttgtacatgagcttg

SEQ ID NO: 12793 - DNA, 24 bp, Artificial Sequence
  Description of Artificial Sequence: Synthetic primer
tcacacggatcaaactcttcgaaa

SEQ ID NO: 12794 - DNA, 24 bp, Artificial Sequence
  Description of Artificial Sequence: Synthetic primer
ggcatatcatcttcagcttctgct

SEQ ID NO: 12795 - DNA, 26 bp, Artificial Sequence
  Description of Artificial Sequence: Synthetic primer
atccttagtctgactgaacaatgcaa

SEQ ID NO: 12796 - DNA, 20 bp, Artificial Sequence
  Description of Artificial Sequence: Synthetic primer
ctgtacaggagtcgtgcagt

SEQ ID NO: 12797 - DNA, 22 bp, Artificial Sequence
  Description of Artificial Sequence: Synthetic primer
cacgctcatgaaccacagtaga

SEQ ID NO: 12798 - DNA, 22 bp, Artificial Sequence
  Description of Artificial Sequence: Synthetic primer
ccgacgacacatttcggtaaag

SEQ ID NO: 12799 - DNA, 23 bp, Artificial Sequence
  Description of Artificial Sequence: Synthetic primer
ctgtgctagagaagatgggcatg

SEQ ID NO: 12800 - DNA, 26 bp, Artificial Sequence
  Description of Artificial Sequence: Synthetic primer
tagctagctagctgcttctttcttca

SEQ ID NO: 12801 - DNA, 21 bp, Artificial Sequence
  Description of Artificial Sequence: Synthetic primer
aaggccggcaagaagtagatt

SEQ ID NO: 12802 - DNA, 27 bp, Artificial Sequence
  Description of Artificial Sequence: Synthetic primer
tgcttcaaatccagagtctacattctc

SEQ ID NO: 12803 - DNA, 21 bp, Artificial Sequence
  Description of Artificial Sequence: Synthetic primer
gcctctcctgtttcgtatccc

SEQ ID NO: 12804 - DNA, 19 bp, Artificial Sequence
  Description of Artificial Sequence: Synthetic primer
actccgacctgacggacat

SEQ ID NO: 12805 - DNA, 25 bp, Artificial Sequence
  Description of Artificial Sequence: Synthetic primer
caaacttcttcaatggcccttcatt

SEQ ID NO: 12806 - DNA, 19 bp, Artificial Sequence
  Description of Artificial Sequence: Synthetic primer
gcagaatgcctgagccgat

SEQ ID NO: 12807 - DNA, 20 bp, Artificial Sequence
  Description of Artificial Sequence: Synthetic primer
cctatgctgctggcatttcc

SEQ ID NO: 12808 - DNA, 27 bp, Artificial Sequence
  Description of Artificial Sequence: Synthetic primer
ctgatctcagactcgatcaagatgatg

SEQ ID NO: 12809 - DNA, 23 bp, Artificial Sequence
  Description of Artificial Sequence: Synthetic primer
acagttgcttgagagagctcttg

SEQ ID NO: 12810 - DNA, 22 bp, Artificial Sequence
  Description of Artificial Sequence: Synthetic primer
tatacgctgaggcatctacggt

SEQ ID NO: 12811 - DNA, 21 bp, Artificial Sequence
  Description of Artificial Sequence: Synthetic primer
aagacctctggcagacatcgt

SEQ ID NO: 12812 - DNA, 21 bp, Artificial Sequence
  Description of Artificial Sequence: Synthetic primer
ggcgtctgcttattcctccag

SEQ ID NO: 12813 - DNA, 21 bp, Artificial Sequence
  Description of Artificial Sequence: Synthetic primer
catcaacctgagggagcagag

SEQ ID NO: 12814 - DNA, 23 bp, Artificial Sequence
  Description of Artificial Sequence: Synthetic primer
tttgtcggtgtcatctgagtgat

SEQ ID NO: 12815 - DNA, 25 bp, Artificial Sequence
  Description of Artificial Sequence: Synthetic primer
aaccatcaccagagtaaccacaaaa

SEQ ID NO: 12816 - DNA, 21 bp, Artificial Sequence
  Description of Artificial Sequence: Synthetic primer
tcctcaggagggagcataaga

SEQ ID NO: 12817 - DNA, 26 bp, Artificial Sequence
  Description of Artificial Sequence: Synthetic primer
tacagaaagtaaagcgtactccagtc

SEQ ID NO: 12818 - DNA, 21 bp, Artificial Sequence
  Description of Artificial Sequence: Synthetic primer
cagattcgccggaagatggtt

SEQ ID NO: 12819 - DNA, 22 bp, Artificial Sequence
  Description of Artificial Sequence: Synthetic primer
ttctgcgatccatgtcatacga

SEQ ID NO: 12820 - DNA, 21 bp, Artificial Sequence
  Description of Artificial Sequence: Synthetic primer
cgtcgctatctcggactcgta

SEQ ID NO: 12821 - DNA, 22 bp, Artificial Sequence
  Description of Artificial Sequence: Synthetic primer
caatagattgccgcatctgctc

SEQ ID NO: 12822 - DNA, 27 bp, Artificial Sequence
  Description of Artificial Sequence: Synthetic primer
cattcagatgtagtacttgcccataca

SEQ ID NO: 12823 - DNA, 21 bp, Artificial Sequence
  Description of Artificial Sequence: Synthetic primer
tttaatgccgatgcagatgcc

SEQ ID NO: 12824 - DNA, 19 bp, Artificial Sequence
  Description of Artificial Sequence: Synthetic primer
ccaccgttggcgatgaaag

SEQ ID NO: 12825 - DNA, 22 bp, Artificial Sequence
  Description of Artificial Sequence: Synthetic primer
catcaacggtgagaacgtgtca

SEQ ID NO: 12826 - DNA, 22 bp, Artificial Sequence
  Description of Artificial Sequence: Synthetic primer
caggagcagcagattctctaca

SEQ ID NO: 12827 - DNA, 21 bp, Artificial Sequence
  Description of Artificial Sequence: Synthetic primer
gctcccacgggaatcagtatc

SEQ ID NO: 12828 - DNA, 26 bp, Artificial Sequence
  Description of Artificial Sequence: Synthetic primer
gtctgctaggattccaaagaagatgt

SEQ ID NO: 12829 - DNA, 26 bp, Artificial Sequence
  Description of Artificial Sequence: Synthetic primer
aatctgacacggtatgtaaaccaatg

SEQ ID NO: 12830 - DNA, 22 bp, Artificial Sequence
  Description of Artificial Sequence: Synthetic primer
caggattacagcctcacgatgt

SEQ ID NO: 12831 - DNA, 21 bp, Artificial Sequence
  Description of Artificial Sequence: Synthetic primer
ctcatcgccaacaaggtcatc

SEQ ID NO: 12832 - DNA, 20 bp, Artificial Sequence
  Description of Artificial Sequence: Synthetic primer
tcgaaaccttctgggccaaa

SEQ ID NO: 12833 - DNA, 21 bp, Artificial Sequence
  Description of Artificial Sequence: Synthetic primer
ggccttcctggaagagtgaag

SEQ ID NO: 12834 - DNA, 24 bp, Artificial Sequence
  Description of Artificial Sequence: Synthetic primer
gagtctaggacgttcttcaacctt

SEQ ID NO: 12835 - DNA, 24 bp, Artificial Sequence
  Description of Artificial Sequence: Synthetic primer
gggtatgacgacgaagataagacc

SEQ ID NO: 12836 - DNA, 18 bp, Artificial Sequence
  Description of Artificial Sequence: Synthetic primer
caggacatgctcgtgcca

SEQ ID NO: 12837 - DNA, 22 bp, Artificial Sequence
  Description of Artificial Sequence: Synthetic primer
gcttctcgaggagtacaacacg

SEQ ID NO: 12838 - DNA, 23 bp, Artificial Sequence
  Description of Artificial Sequence: Synthetic primer
agaaaggctgcagcatcattcat

SEQ ID NO: 12839 - DNA, 21 bp, Artificial Sequence
  Description of Artificial Sequence: Synthetic primer
cttggtcttgtccgacacctg

SEQ ID NO: 12840 - DNA, 28 bp, Artificial Sequence
  Description of Artificial Sequence: Synthetic primer
aacaagaacctcaaatgaacctgaagta

SEQ ID NO: 12841 - DNA, 24 bp, Artificial Sequence
  Description of Artificial Sequence: Synthetic primer
ctcaaacttcagctgagaagatgc

SEQ ID NO: 12842 - DNA, 20 bp, Artificial Sequence
  Description of Artificial Sequence: Synthetic primer
atgtggacgcgtccacgata

SEQ ID NO: 12843 - DNA, 23 bp, Artificial Sequence
  Description of Artificial Sequence: Synthetic primer
cgggattcactggctataacctt

SEQ ID NO: 12844 - DNA, 22 bp, Artificial Sequence
  Description of Artificial Sequence: Synthetic primer
ctcaacccaagggtgctaatct

SEQ ID NO: 12845 - DNA, 21 bp, Artificial Sequence
  Description of Artificial Sequence: Synthetic primer
gtactcgccgtggactttgaa

SEQ ID NO: 12846 - DNA, 26 bp, Artificial Sequence
  Description of Artificial Sequence: Synthetic primer
gctttgtgatgtttggtttacaacct

SEQ ID NO: 12847 - DNA, 22 bp, Artificial Sequence
  Description of Artificial Sequence: Synthetic primer
gatccctgtcaccatgattggc

SEQ ID NO: 12848 - DNA, 25 bp, Artificial Sequence
  Description of Artificial Sequence: Synthetic primer
gagaagagaaaggatcggtaagctg

SEQ ID NO: 12849 - DNA, 25 bp, Artificial Sequence
  Description of Artificial Sequence: Synthetic primer
tggaaagaagtttgaagagttccgt

SEQ ID NO: 12850 - DNA, 25 bp, Artificial Sequence
  Description of Artificial Sequence: Synthetic primer
gagagaaaatggcacaaagaacctc

SEQ ID NO: 12851 - DNA, 24 bp, Artificial Sequence
  Description of Artificial Sequence: Synthetic primer
cttcatgtcaaactacagcccaca

SEQ ID NO: 12852 - DNA, 23 bp, Artificial Sequence
  Description of Artificial Sequence: Synthetic primer
ttggcacacatgtcaagaagaag

SEQ ID NO: 12853 - DNA, 25 bp, Artificial Sequence
  Description of Artificial Sequence: Synthetic primer
caattgttcctgtccatcctctttg

SEQ ID NO: 12854 - DNA, 23 bp, Artificial Sequence
  Description of Artificial Sequence: Synthetic primer
tcaaccttgacctcaagaagggt

SEQ ID NO: 12855 - DNA, 20 bp, Artificial Sequence
  Description of Artificial Sequence: Synthetic primer
gccaaggtgcttgacgtgta

SEQ ID NO: 12856 - DNA, 24 bp, Artificial Sequence
  Description of Artificial Sequence: Synthetic primer
agaataagctgtttgcacaagcac

SEQ ID NO: 12857 - DNA, 29 bp, Artificial Sequence
  Description of Artificial Sequence: Synthetic primer
tgctttatctagaattcctcgacaagttt

SEQ ID NO: 12858 - DNA, 26 bp, Artificial Sequence
  Description of Artificial Sequence: Synthetic primer
gtagcaacagtctactcagtagcaaa

SEQ ID NO: 12859 - DNA, 27 bp, Artificial Sequence
  Description of Artificial Sequence: Synthetic primer
atcaatgggtacattatctctcctcct

SEQ ID NO: 12860 - DNA, 22 bp, Artificial Sequence
  Description of Artificial Sequence: Synthetic primer
gcattcgggtatggttcgtact

SEQ ID NO: 12861 - DNA, 21 bp, Artificial Sequence
  Description of Artificial Sequence: Synthetic primer
catgtctcgccgctatgacag

SEQ ID NO: 12862 - DNA, 28 bp, Artificial Sequence
  Description of Artificial Sequence: Synthetic primer
cacttataaagaccaattcgcttcaacg

SEQ ID NO: 12863 - DNA, 21 bp, Artificial Sequence
  Description of Artificial Sequence: Synthetic primer
gtgccgcctgttgtttcattt

SEQ ID NO: 12864 - DNA, 27 bp, Artificial Sequence
  Description of Artificial Sequence: Synthetic primer
gggtgtcaagtcctatgagaaactatc

SEQ ID NO: 12865 - DNA, 22 bp, Artificial Sequence
  Description of Artificial Sequence: Synthetic primer
cttggtctggaaagatgaggca

SEQ ID NO: 12866 - DNA, 25 bp, Artificial Sequence
  Description of Artificial Sequence: Synthetic primer
cgcacacgcacaaactatatattgc

SEQ ID NO: 12867 - DNA, 20 bp, Artificial Sequence
  Description of Artificial Sequence: Synthetic primer
ccagcagacagggtatgcac

SEQ ID NO: 12868 - DNA, 20 bp, Artificial Sequence
  Description of Artificial Sequence: Synthetic primer
tctgcctcgccatcaacaat

SEQ ID NO: 12869 - DNA, 22 bp, Artificial Sequence
  Description of Artificial Sequence: Synthetic primer
gttgggtggtgtcaaaggagac

SEQ ID NO: 12870 - DNA, 23 bp, Artificial Sequence
  Description of Artificial Sequence: Synthetic primer
aaccacacacttaagagagctca

SEQ ID NO: 12871 - DNA, 28 bp, Artificial Sequence
  Description of Artificial Sequence: Synthetic primer
cgttacaccagatggattcctttattct

SEQ ID NO: 12872 - DNA, 21 bp, Artificial Sequence
  Description of Artificial Sequence: Synthetic primer
cacctcgagcaccttgagaag

SEQ ID NO: 12873 - DNA, 26 bp, Artificial Sequence
  Description of Artificial Sequence: Synthetic primer
cgatgtcagcaaagttcattgtatca

SEQ ID NO: 12874 - DNA, 28 bp, Artificial Sequence
  Description of Artificial Sequence: Synthetic primer
caattcattcagtggagatacttcaagc

SEQ ID NO: 12875 - DNA, 25 bp, Artificial Sequence
  Description of Artificial Sequence: Synthetic primer
cagatccatagacctcaggtttcag

SEQ ID NO: 12876 - DNA, 21 bp, Artificial Sequence
  Description of Artificial Sequence: Synthetic primer
acaaacatgcacgcaggtttc

SEQ ID NO: 12877 - DNA, 25 bp, Artificial Sequence
  Description of Artificial Sequence: Synthetic primer
ctttgaacttgacaagcctgacttc

SEQ ID NO: 12878 - DNA, 23 bp, Artificial Sequence
  Description of Artificial Sequence: Synthetic primer
cagttcctcgacaccaagtacat

SEQ ID NO: 12879 - DNA, 21 bp, Artificial Sequence
  Description of Artificial Sequence: Synthetic primer
ggctgtcgcgacgatatacac

SEQ ID NO: 12880 - DNA, 21 bp, Artificial Sequence
  Description of Artificial Sequence: Synthetic primer
atccccaacaacgtgaagtcg

SEQ ID NO: 12881 - DNA, 22 bp, Artificial Sequence
  Description of Artificial Sequence: Synthetic primer
ccctgatggatggatggatgtg

SEQ ID NO: 12882 - DNA, 21 bp, Artificial Sequence
  Description of Artificial Sequence: Synthetic primer
gttgttgcttgagcgctcttg

SEQ ID NO: 12883 - DNA, 22 bp, Artificial Sequence
  Description of Artificial Sequence: Synthetic primer
gtgatcctggtggagttcatcc

SEQ ID NO: 12884 - DNA, 26 bp, Artificial Sequence
  Description of Artificial Sequence: Synthetic primer
aacaccattctggttttgaagacaaa

SEQ ID NO: 12885 - DNA, 21 bp, Artificial Sequence
  Description of Artificial Sequence: Synthetic primer
tcgactgctacgtgagcaatg

SEQ ID NO: 12886 - DNA, 24 bp, Artificial Sequence
  Description of Artificial Sequence: Synthetic primer
gaatgtaggcagttgctttttccc

SEQ ID NO: 12887 - DNA, 21 bp, Artificial Sequence
  Description of Artificial Sequence: Synthetic primer
gtagctgcaatgaccgtgcta

SEQ ID NO: 12888 - DNA, 22 bp, Artificial Sequence
  Description of Artificial Sequence: Synthetic primer
cagtcgagaggccattggttag

SEQ ID NO: 12889 - DNA, 21 bp, Artificial Sequence
  Description of Artificial Sequence: Synthetic primer
aaggcaacaccttcatggact

SEQ ID NO: 12890 - DNA, 24 bp, Artificial Sequence
  Description of Artificial Sequence: Synthetic primer
ctctgatagtgtgggagaatctcg

SEQ ID NO: 12891 - DNA, 26 bp, Artificial Sequence
  Description of Artificial Sequence: Synthetic primer
atgttattgctctcagctatctccag

SEQ ID NO: 12892 - DNA, 26 bp, Artificial Sequence
  Description of Artificial Sequence: Synthetic primer
tcgtatatgacgtgacagatagggaa

SEQ ID NO: 12893 - DNA, 26 bp, Artificial Sequence
  Description of Artificial Sequence: Synthetic primer
taagatagtaggttatgtcgccctca

SEQ ID NO: 12894 - DNA, 20 bp, Artificial Sequence
  Description of Artificial Sequence: Synthetic primer
cggagtgggtcaagaacgac

SEQ ID NO: 12895 - DNA, 24 bp, Artificial Sequence
  Description of Artificial Sequence: Synthetic primer
caagagaaggcgactgaactagaa

SEQ ID NO: 12896 - DNA, 21 bp, Artificial Sequence
  Description of Artificial Sequence: Synthetic primer
gcagtgtgtgcgcttcattac

SEQ ID NO: 12897 - DNA, 22 bp, Artificial Sequence
  Description of Artificial Sequence: Synthetic primer
gctggcgatgtcagatcagtaa

SEQ ID NO: 12898 - DNA, 21 bp, Artificial Sequence
  Description of Artificial Sequence: Synthetic primer
ggaaatccggcaaaagttggt

SEQ ID NO: 12899 - DNA, 28 bp, Artificial Sequence
  Description of Artificial Sequence: Synthetic primer
agttgatttgaattctagcttgccaaaa

SEQ ID NO: 12900 - DNA, 22 bp, Artificial Sequence
  Description of Artificial Sequence: Synthetic primer
gccagcaacagtgggatgtata

SEQ ID NO: 12901 - DNA, 27 bp, Artificial Sequence
  Description of Artificial Sequence: Synthetic primer
accaaggtaaatgactcgaaatcatca

SEQ ID NO: 12902 - DNA, 22 bp, Artificial Sequence
  Description of Artificial Sequence: Synthetic primer
agaaggcggacacaaatgatga

SEQ ID NO: 12903 - DNA, 24 bp, Artificial Sequence
  Description of Artificial Sequence: Synthetic primer
gttgggtgatagcacacatgaatg

SEQ ID NO: 12904 - DNA, 20 bp, Artificial Sequence
  Description of Artificial Sequence: Synthetic primer
gatgcctttgaaggcggaac

SEQ ID NO: 12905 - DNA, 21 bp, Artificial Sequence
  Description of Artificial Sequence: Synthetic primer
aggaccagattgtgcccaaag

SEQ ID NO: 12906 - DNA, 24 bp, Artificial Sequence
  Description of Artificial Sequence: Synthetic primer
gatcggtaattgttggttccaagg

SEQ ID NO: 12907 - DNA, 28 bp, Artificial Sequence
  Description of Artificial Sequence: Synthetic primer
ggatcccgatcctaaaaatcctattgaa

SEQ ID NO: 12908 - DNA, 28 bp, Artificial Sequence
  Description of Artificial Sequence: Synthetic primer
caaaagggaaggtggatatattcattgg

SEQ ID NO: 12909 - DNA, 21 bp, Artificial Sequence
  Description of Artificial Sequence: Synthetic primer
ggtgccgcagtacttcatcat

SEQ ID NO: 12910 - DNA, 18 bp, Artificial Sequence
  Description of Artificial Sequence: Synthetic primer
tgtcggcggagcttcttt

SEQ ID NO: 12911 - DNA, 21 bp, Artificial Sequence
  Description of Artificial Sequence: Synthetic primer
tgaccgtcatcttctggtcct

SEQ ID NO: 12912 - DNA, 24 bp, Artificial Sequence
  Description of Artificial Sequence: Synthetic primer
gggaaggtggacagtacacagata

SEQ ID NO: 12913 - DNA, 24 bp, Artificial Sequence
  Description of Artificial Sequence: Synthetic primer
cccaaggttatctggtctcttgtt

SEQ ID NO: 12914 - DNA, 22 bp, Artificial Sequence
  Description of Artificial Sequence: Synthetic primer
tagaacgcctgatagtgaaccg

SEQ ID NO: 12915 - DNA, 24 bp, Artificial Sequence
  Description of Artificial Sequence: Synthetic primer
gtccagatattcgcaagactgtcg

SEQ ID NO: 12916 - DNA, 18 bp, Artificial Sequence
  Description of Artificial Sequence: Synthetic primer
gaggcggctcggaatgag

SEQ ID NO: 12917 - DNA, 24 bp, Artificial Sequence
  Description of Artificial Sequence: Synthetic primer
tggacccaacaatgaggaatcaaa

SEQ ID NO: 12918 - DNA, 24 bp, Artificial Sequence
  Description of Artificial Sequence: Synthetic primer
gaagcatcaggattcagggagttt

SEQ ID NO: 12919 - DNA, 23 bp, Artificial Sequence
  Description of Artificial Sequence: Synthetic primer
accggaacactagctaagaatgc

SEQ ID NO: 12920 - DNA, 21 bp, Artificial Sequence
  Description of Artificial Sequence: Synthetic primer
aatgatgccagtcacacaagc

SEQ ID NO: 12921 - DNA, 21 bp, Artificial Sequence
  Description of Artificial Sequence: Synthetic primer
cctcaggctcgatgacacttc

SEQ ID NO: 12922 - DNA, 25 bp, Artificial Sequence
  Description of Artificial Sequence: Synthetic primer
ttttcatcctgattccgtgctatca

SEQ ID NO: 12923 - DNA, 23 bp, Artificial Sequence
  Description of Artificial Sequence: Synthetic primer
cgacaattgcggaggttcaaatt

SEQ ID NO: 12924 - DNA, 20 bp, Artificial Sequence
  Description of Artificial Sequence: Synthetic primer
catcatcccgggcttcatgt

SEQ ID NO: 12925 - DNA, 22 bp, Artificial Sequence
  Description of Artificial Sequence: Synthetic primer
ggaatacgtcagggagaccttc

SEQ ID NO: 12926 - DNA, 25 bp, Artificial Sequence
  Description of Artificial Sequence: Synthetic primer
cgtaggaacattcttgtaagtcagc

SEQ ID NO: 12927 - DNA, 21 bp, Artificial Sequence
  Description of Artificial Sequence: Synthetic primer
gctgtcatggtcacttgtgct

SEQ ID NO: 12928 - DNA, 24 bp, Artificial Sequence
  Description of Artificial Sequence: Synthetic primer
aaaacacagcaaagctaacactgt

SEQ ID NO: 12929 - DNA, 21 bp, Artificial Sequence
  Description of Artificial Sequence: Synthetic primer
gctgctcgaccttcttcttca

SEQ ID NO: 12930 - DNA, 30 bp, Artificial Sequence
  Description of Artificial Sequence: Synthetic primer
tgataaaaatgagtcagaagaacaaagctc

SEQ ID NO: 12931 - DNA, 23 bp, Artificial Sequence
  Description of Artificial Sequence: Synthetic primer
ccagaattaggcaccatgtcact

SEQ ID NO: 12932 - DNA, 27 bp, Artificial Sequence
  Description of Artificial Sequence: Synthetic primer
cgagctctgaatgtctggtttactatc

SEQ ID NO: 12933 - DNA, 22 bp, Artificial Sequence
  Description of Artificial Sequence: Synthetic primer
gcttcctccaagagagagatgg

SEQ ID NO: 12934 - DNA, 21 bp, Artificial Sequence
  Description of Artificial Sequence: Synthetic primer
gttgagatgcgatttgccgat

SEQ ID NO: 12935 - DNA, 25 bp, Artificial Sequence
  Description of Artificial Sequence: Synthetic primer
aaactgaagcttaaggccgtataca

SEQ ID NO: 12936 - DNA, 22 bp, Artificial Sequence
  Description of Artificial Sequence: Synthetic primer
aacgcaaggaggagtgatctag

SEQ ID NO: 12937 - DNA, 21 bp, Artificial Sequence
  Description of Artificial Sequence: Synthetic primer
tttacccagggtaccgcaaag

SEQ ID NO: 12938 - DNA, 24 bp, Artificial Sequence
  Description of Artificial Sequence: Synthetic primer
aaaatcaggttctgagctcaagtg

SEQ ID NO: 12939 - DNA, 22 bp, Artificial Sequence
  Description of Artificial Sequence: Synthetic primer
tgcaatgtgcaacacaccagta

SEQ ID NO: 12940 - DNA, 25 bp, Artificial Sequence
  Description of Artificial Sequence: Synthetic primer
gaaaccatagagctggaaaatctgc

SEQ ID NO: 12941 - DNA, 21 bp, Artificial Sequence
  Description of Artificial Sequence: Synthetic primer
ccgccagtactccgatatgtg

SEQ ID NO: 12942 - DNA, 28 bp, Artificial Sequence
  Description of Artificial Sequence: Synthetic primer
gctcatgttttatccagtgaacaggtat

SEQ ID NO: 12943 - DNA, 28 bp, Artificial Sequence
  Description of Artificial Sequence: Synthetic primer
tggttcttcttaaaggtgttgataagca

SEQ ID NO: 12944 - DNA, 25 bp, Artificial Sequence
  Description of Artificial Sequence: Synthetic primer
ttgtcccaagttactttgaaggtga

SEQ ID NO: 12945 - DNA, 28 bp, Artificial Sequence
  Description of Artificial Sequence: Synthetic primer
ttgggatagagatggcttgattaaagag

SEQ ID NO: 12946 - DNA, 22 bp, Artificial Sequence
  Description of Artificial Sequence: Synthetic primer
cgcacatcaagctgggaagtta

SEQ ID NO: 12947 - DNA, 28 bp, Artificial Sequence
  Description of Artificial Sequence: Synthetic primer
cttctgtgattcaatcctgtcctttact

SEQ ID NO: 12948 - DNA, 22 bp, Artificial Sequence
  Description of Artificial Sequence: Synthetic primer
gcctgacattcaaggacgtcaa

SEQ ID NO: 12949 - DNA, 19 bp, Artificial Sequence
  Description of Artificial Sequence: Synthetic primer
cggagtcaaagcggtcctc

SEQ ID NO: 12950 - DNA, 27 bp, Artificial Sequence
  Description of Artificial Sequence: Synthetic primer
tcgtgacagtaacgataaggagaattt

SEQ ID NO: 12951 - DNA, 23 bp, Artificial Sequence
  Description of Artificial Sequence: Synthetic primer
acaagacggaggagcttatcttg

SEQ ID NO: 12952 - DNA, 21 bp, Artificial Sequence
  Description of Artificial Sequence: Synthetic primer
tgacgttccaggattcgaacc

SEQ ID NO: 12953 - DNA, 26 bp, Artificial Sequence
  Description of Artificial Sequence: Synthetic primer
ctttctcctccactaaatccttcgtt

SEQ ID NO: 12954 - DNA, 22 bp, Artificial Sequence
  Description of Artificial Sequence: Synthetic primer
ggacctcaagccagagaatgtt

SEQ ID NO: 12955 - DNA, 25 bp, Artificial Sequence
  Description of Artificial Sequence: Synthetic primer
gggttcattcgttgagtagacatcg

SEQ ID NO: 12956 - DNA, 27 bp, Artificial Sequence
  Description of Artificial Sequence: Synthetic primer
tcacttctgaggtgatatcagtctcaa

SEQ ID NO: 12957 - DNA, 23 bp, Artificial Sequence
  Description of Artificial Sequence: Synthetic primer
cccttaaaaaggttcaggaggca

SEQ ID NO: 12958 - DNA, 28 bp, Artificial Sequence
  Description of Artificial Sequence: Synthetic primer
agttgcatccacactattagaatgatct

SEQ ID NO: 12959 - DNA, 22 bp, Artificial Sequence
  Description of Artificial Sequence: Synthetic primer
cgctaagtctcgttcaaagctc

SEQ ID NO: 12960 - DNA, 27 bp, Artificial Sequence
  Description of Artificial Sequence: Synthetic primer
ccgattaatcaggaggacattcatgtg

SEQ ID NO: 12961 - DNA, 25 bp, Artificial Sequence
  Description of Artificial Sequence: Synthetic primer
tcaggatctttacaaggaagctgga

SEQ ID NO: 12962 - DNA, 21 bp, Artificial Sequence
  Description of Artificial Sequence: Synthetic primer
agccagagcaattttgcttcc

SEQ ID NO: 12963 - DNA, 26 bp, Artificial Sequence
  Description of Artificial Sequence: Synthetic primer
cgaaagttgatctgaagccagatttt

SEQ ID NO: 12964 - DNA, 28 bp, Artificial Sequence
  Description of Artificial Sequence: Synthetic primer
gaaaatcccggtcttaatgatacctcag

SEQ ID NO: 12965 - DNA, 27 bp, Artificial Sequence
  Description of Artificial Sequence: Synthetic primer
tcgggaacatttgttgatagtttgtga

SEQ ID NO: 12966 - DNA, 23 bp, Artificial Sequence
  Description of Artificial Sequence: Synthetic primer
tacacacaaggtgctcaacttct

SEQ ID NO: 12967 - DNA, 26 bp, Artificial Sequence
  Description of Artificial Sequence: Synthetic primer
cttgtaaaggagtgcatagatttggg

SEQ ID NO: 12968 - DNA, 29 bp, Artificial Sequence
  Description of Artificial Sequence: Synthetic primer
ttttctttttctgccggatagattcattt

SEQ ID NO: 12969 - DNA, 21 bp, Artificial Sequence
  Description of Artificial Sequence: Synthetic primer
ggagatcgtcgccaaccatta

SEQ ID NO: 12970 - DNA, 28 bp, Artificial Sequence
  Description of Artificial Sequence: Synthetic primer
atgaaacggcttattttcgaatgttact

SEQ ID NO: 12971 - DNA, 21 bp, Artificial Sequence
  Description of Artificial Sequence: Synthetic primer
ggatcctgccctacgtgtact

SEQ ID NO: 12972 - DNA, 29 bp, Artificial Sequence
  Description of Artificial Sequence: Synthetic primer
cctcgtaggtattgtttagataggaagag

SEQ ID NO: 12973 - DNA, 26 bp, Artificial Sequence
  Description of Artificial Sequence: Synthetic primer
aggaattcaccttatcaagcatgcaa

SEQ ID NO: 12974 - DNA, 21 bp, Artificial Sequence
  Description of Artificial Sequence: Synthetic primer
agccagtcccatcttctttgg

SEQ ID NO: 12975 - DNA, 21 bp, Artificial Sequence
  Description of Artificial Sequence: Synthetic primer
atggtggagtgtgaagggttg

SEQ ID NO: 12976 - DNA, 21 bp, Artificial Sequence
  Description of Artificial Sequence: Synthetic primer
gtcgtcgtcgtcgttgtaaga

SEQ ID NO: 12977 - DNA, 21 bp, Artificial Sequence
  Description of Artificial Sequence: Synthetic primer
ctgctggaagtgattgccaac

SEQ ID NO: 12978 - DNA, 25 bp, Artificial Sequence
  Description of Artificial Sequence: Synthetic primer
tattcttgcatattcaggtggcaac

SEQ ID NO: 12979 - DNA, 21 bp, Artificial Sequence
  Description of Artificial Sequence: Synthetic primer
aacagagccccatgttgagtt

SEQ ID NO: 12980 - DNA, 25 bp, Artificial Sequence
  Description of Artificial Sequence: Synthetic primer
tcgaaaacttcgcttgatagactgg

SEQ ID NO: 12981 - DNA, 21 bp, Artificial Sequence
  Description of Artificial Sequence: Synthetic primer
aagaatggatgggcacaagca

SEQ ID NO: 12982 - DNA, 21 bp, Artificial Sequence
  Description of Artificial Sequence: Synthetic primer
caagcgttgtcaatgggctag

SEQ ID NO: 12983 - DNA, 27 bp, Artificial Sequence
  Description of Artificial Sequence: Synthetic primer
cttgcttcttgagctatactgttttcc

SEQ ID NO: 12984 - DNA, 29 bp, Artificial Sequence
  Description of Artificial Sequence: Synthetic primer
tgctactcagatcacatactttctctact

SEQ ID NO: 12985 - DNA, 28 bp, Artificial Sequence
  Description of Artificial Sequence: Synthetic primer
catcgtttctaccatactgatctggcta

SEQ ID NO: 12986 - DNA, 28 bp, Artificial Sequence
  Description of Artificial Sequence: Synthetic primer
aagctgaagctgaaaccatattatttcc

SEQ ID NO: 12987 - DNA, 23 bp, Artificial Sequence
  Description of Artificial Sequence: Synthetic primer
gggcttgggagatgtaaaaggat

SEQ ID NO: 12988 - DNA, 21 bp, Artificial Sequence
  Description of Artificial Sequence: Synthetic primer
gttcgtctagggcaccatgat

SEQ ID NO: 12989 - DNA, 21 bp, Artificial Sequence
  Description of Artificial Sequence: Synthetic primer
gattcgttagtcgccgcacta

SEQ ID NO: 12990 - DNA, 21 bp, Artificial Sequence
  Description of Artificial Sequence: Synthetic primer
ggaggcacactgggaaattct

SEQ ID NO: 12991 - DNA, 18 bp, Artificial Sequence
  Description of Artificial Sequence: Synthetic primer
gtgcgtgggcatctccaa

SEQ ID NO: 12992 - DNA, 29 bp, Artificial Sequence
  Description of Artificial Sequence: Synthetic primer
tggcatattggcattcagcttatttattc

SEQ ID NO: 12993 - DNA, 27 bp, Artificial Sequence
  Description of Artificial Sequence: Synthetic primer
tcgacgtatacaactcaaattaaggca

SEQ ID NO: 12994 - DNA, 23 bp, Artificial Sequence
  Description of Artificial Sequence: Synthetic primer
ctcaatatatccccgaggaggca

SEQ ID NO: 12995 - DNA, 28 bp, Artificial Sequence
  Description of Artificial Sequence: Synthetic primer
actgaaggaccaaagatatacaggatac

SEQ ID NO: 12996 - DNA, 23 bp, Artificial Sequence
  Description of Artificial Sequence: Synthetic primer
cctttcatcagcaaagcaggaag

SEQ ID NO: 12997 - DNA, 23 bp, Artificial Sequence
  Description of Artificial Sequence: Synthetic primer
caaccttttgaggttcggattgc

SEQ ID NO: 12998 - DNA, 29 bp, Artificial Sequence
  Description of Artificial Sequence: Synthetic primer
cttgtcaagtagattcggacttatttcca

SEQ ID NO: 12999 - DNA, 21 bp, Artificial Sequence
  Description of Artificial Sequence: Synthetic primer
gtcctaagcctgttcgtggtc

SEQ ID NO: 13000 - DNA, 23 bp, Artificial Sequence
  Description of Artificial Sequence: Synthetic primer
gtgccgacgtgaaaaatgtgtat

SEQ ID NO: 13001 - DNA, 24 bp, Artificial Sequence
  Description of Artificial Sequence: Synthetic primer
tgaaagttgattgcacatcgcatc

SEQ ID NO: 13002 - DNA, 28 bp, Artificial Sequence
  Description of Artificial Sequence: Synthetic primer
tactacattgactacaacaacaacctga

SEQ ID NO: 13003 - DNA, 23 bp, Artificial Sequence
  Description of Artificial Sequence: Synthetic primer
tgtccaggttggagacatcgata

SEQ ID NO: 13004 - DNA, 27 bp, Artificial Sequence
  Description of Artificial Sequence: Synthetic primer
aacaggaaatgtgatgtgtacagctat

SEQ ID NO: 13005 - DNA, 19 bp, Artificial Sequence
  Description of Artificial Sequence: Synthetic primer
gaggtgtacgcggtggatt

SEQ ID NO: 13006 - DNA, 21 bp, Artificial Sequence
  Description of Artificial Sequence: Synthetic primer
cggagacaagaggtggttcaa

SEQ ID NO: 13007 - DNA, 27 bp, Artificial Sequence
  Description of Artificial Sequence: Synthetic primer
tagcttcaaagtcataatcgactgcat

SEQ ID NO: 13008 - DNA, 26 bp, Artificial Sequence
  Description of Artificial Sequence: Synthetic primer
tgacttgctttctcttcagtctgaac

SEQ ID NO: 13009 - DNA, 23 bp, Artificial Sequence
  Description of Artificial Sequence: Synthetic primer
gaaagtgttcagcacatgtgcag

SEQ ID NO: 13010 - DNA, 25 bp, Artificial Sequence
  Description of Artificial Sequence: Synthetic primer
cgattattatggttgcagcagcatt

SEQ ID NO: 13011 - DNA, 21 bp, Artificial Sequence
  Description of Artificial Sequence: Synthetic primer
ttcctcatgcacaccctcttc

SEQ ID NO: 13012 - DNA, 22 bp, Artificial Sequence
  Description of Artificial Sequence: Synthetic primer
agtctcttttctccctgcctca

SEQ ID NO: 13013 - DNA, 23 bp, Artificial Sequence
  Description of Artificial Sequence: Synthetic primer
cgaggcctccgtgttattttagt

SEQ ID NO: 13014 - DNA, 22 bp, Artificial Sequence
  Description of Artificial Sequence: Synthetic primer
gtctgacaccgaatgcacaaag

SEQ ID NO: 13015 - DNA, 23 bp, Artificial Sequence
  Description of Artificial Sequence: Synthetic primer
attggtttggtggtggtgtaatg

SEQ ID NO: 13016 - DNA, 21 bp, Artificial Sequence
  Description of Artificial Sequence: Synthetic primer
ggcatgggtttagtgctgact

SEQ ID NO: 13017 - DNA, 26 bp, Artificial Sequence
  Description of Artificial Sequence: Synthetic primer
tcctatccgttagtgcattttgaaga

SEQ ID NO: 13018 - DNA, 21 bp, Artificial Sequence
  Description of Artificial Sequence: Synthetic primer
cccatacaccctggtgatagc

SEQ ID NO: 13019 - DNA, 21 bp, Artificial Sequence
  Description of Artificial Sequence: Synthetic primer
gtgcaatcagcagcgagaaag

SEQ ID NO: 13020 - DNA, 23 bp, Artificial Sequence
  Description of Artificial Sequence: Synthetic primer
ctgtctatgtcgacaacggactt

SEQ ID NO: 13021 - DNA, 22 bp, Artificial Sequence
  Description of Artificial Sequence: Synthetic primer
tctgacacgttgtggttgcata

SEQ ID NO: 13022 - DNA, 27 bp, Artificial Sequence
  Description of Artificial Sequence: Synthetic primer
tcggttgataattactcaggtcaacaa

SEQ ID NO: 13023 - DNA, 25 bp, Artificial Sequence
  Description of Artificial Sequence: Synthetic primer
agtaccaacagctctgttcatcaaa

SEQ ID NO: 13024 - DNA, 25 bp, Artificial Sequence
  Description of Artificial Sequence: Synthetic primer
gccacacaacaaaatgagtttcctg

SEQ ID NO: 13025 - DNA, 28 bp, Artificial Sequence
  Description of Artificial Sequence: Synthetic primer
acgagttttagaacatgggaaaaacaat

SEQ ID NO: 13026 - DNA, 21 bp, Artificial Sequence
  Description of Artificial Sequence: Synthetic primer
ttctagggcactcccaacaac

SEQ ID NO: 13027 - DNA, 18 bp, Artificial Sequence
  Description of Artificial Sequence: Synthetic primer
agccggacgagcatgtca

SEQ ID NO: 13028 - DNA, 27 bp, Artificial Sequence
  Description of Artificial Sequence: Synthetic primer
catttatggcgttgatgttatgcttga

SEQ ID NO: 13029 - DNA, 22 bp, Artificial Sequence
  Description of Artificial Sequence: Synthetic primer
ccatctgactctgcagggaatg

SEQ ID NO: 13030 - DNA, 21 bp, Artificial Sequence
  Description of Artificial Sequence: Synthetic primer
ccttgccctctggcctataag

SEQ ID NO: 13031 - DNA, 21 bp, Artificial Sequence
  Description of Artificial Sequence: Synthetic primer
ggtaagccgcaacctgatcaa

SEQ ID NO: 13032 - DNA, 25 bp, Artificial Sequence
  Description of Artificial Sequence: Synthetic primer
cacgggaggagaaaatttcttcttg

SEQ ID NO: 13033 - DNA, 28 bp, Artificial Sequence
  Description of Artificial Sequence: Synthetic primer
tagtgttcccttactgctttgtctaatg

SEQ ID NO: 13034 - DNA, 24 bp, Artificial Sequence
  Description of Artificial Sequence: Synthetic primer
gagaatactctgtgggaagcaaca

SEQ ID NO: 13035 - DNA, 26 bp, Artificial Sequence
  Description of Artificial Sequence: Synthetic primer
ggatgtgtagcgtgtctctatagaac

SEQ ID NO: 13036 - DNA, 21 bp, Artificial Sequence
  Description of Artificial Sequence: Synthetic primer
gatgtgaccgaagagatggca

SEQ ID NO: 13037 - DNA, 27 bp, Artificial Sequence
  Description of Artificial Sequence: Synthetic primer
acttattaggtcagatatcagcagtcg

SEQ ID NO: 13038 - DNA, 25 bp, Artificial Sequence
  Description of Artificial Sequence: Synthetic primer
tctatctgatgcagctgttgttagt

SEQ ID NO: 13039 - DNA, 24 bp, Artificial Sequence
  Description of Artificial Sequence: Synthetic primer
gatattctgggttttccacctgct

SEQ ID NO: 13040 - DNA, 26 bp, Artificial Sequence
  Description of Artificial Sequence: Synthetic primer
ccaggagggaaacttttaaccatctg

SEQ ID NO: 13041 - DNA, 27 bp, Artificial Sequence
  Description of Artificial Sequence: Synthetic primer
aaggaacgaatttgttatacgccttca

SEQ ID NO: 13042 - DNA, 23 bp, Artificial Sequence
  Description of Artificial Sequence: Synthetic primer
gtgctcaagtacaagaagatggc

SEQ ID NO: 13043 - DNA, 21 bp, Artificial Sequence
  Description of Artificial Sequence: Synthetic primer
gcgggtttgattggaaggatg

SEQ ID NO: 13044 - DNA, 21 bp, Artificial Sequence
  Description of Artificial Sequence: Synthetic primer
cgtcatccggaaaaggaagga

SEQ ID NO: 13045 - DNA, 22 bp, Artificial Sequence
  Description of Artificial Sequence: Synthetic primer
ccacggcatctcaagtctactg

SEQ ID NO: 13046 - DNA, 21 bp, Artificial Sequence
  Description of Artificial Sequence: Synthetic primer
gtcttctaggccccgaaactc

SEQ ID NO: 13047 - DNA, 21 bp, Artificial Sequence
  Description of Artificial Sequence: Synthetic primer
aaccgaggatggcttcctttc

SEQ ID NO: 13048 - DNA, 23 bp, Artificial Sequence
  Description of Artificial Sequence: Synthetic primer
ccttaagagctggaagaggccta

SEQ ID NO: 13049 - DNA, 21 bp, Artificial Sequence
  Description of Artificial Sequence: Synthetic primer
aactgttgagggcccctacta

SEQ ID NO: 13050 - DNA, 21 bp, Artificial Sequence
  Description of Artificial Sequence: Synthetic primer
ctggctcgtggttgatgtaga

SEQ ID NO: 13051 - DNA, 21 bp, Artificial Sequence
  Description of Artificial Sequence: Synthetic primer
gtgctctcagccctaggattc

SEQ ID NO: 13052 - DNA, 24 bp, Artificial Sequence
  Description of Artificial Sequence: Synthetic primer
acatagctagcttaactgccgttc

SEQ ID NO: 13053 - DNA, 23 bp, Artificial Sequence
  Description of Artificial Sequence: Synthetic primer
ccttctctgcctcatcttgatct

SEQ ID NO: 13054 - DNA, 21 bp, Artificial Sequence
  Description of Artificial Sequence: Synthetic primer
ggattatagcgcctgctttcg

SEQ ID NO: 13055 - DNA, 23 bp, Artificial Sequence
  Description of Artificial Sequence: Synthetic primer
ggacccgatcgcgttttctatta

SEQ ID NO: 13056 - DNA, 25 bp, Artificial Sequence
  Description of Artificial Sequence: Synthetic primer
catggtaagcgagacaggtaaacat

SEQ ID NO: 13057 - DNA, 21 bp, Artificial Sequence
  Description of Artificial Sequence: Synthetic primer
cgtgaacagcgtttcgatcaa

SEQ ID NO: 13058 - DNA, 21 bp, Artificial Sequence
  Description of Artificial Sequence: Synthetic primer
caacaagaagaggtgcccatg

SEQ ID NO: 13059 - DNA, 26 bp, Artificial Sequence
  Description of Artificial Sequence: Synthetic primer
aagaggaggaagtgtaccttcaaaac

SEQ ID NO: 13060 - DNA, 22 bp, Artificial Sequence
  Description of Artificial Sequence: Synthetic primer
cccccggaagcataactgttta

SEQ ID NO: 13061 - DNA, 21 bp, Artificial Sequence
  Description of Artificial Sequence: Synthetic primer
ctgtgcaacacccagtacatg

SEQ ID NO: 13062 - DNA, 21 bp, Artificial Sequence
  Description of Artificial Sequence: Synthetic primer
cgccgagtgctctatgtagac

SEQ ID NO: 13063 - DNA, 19 bp, Artificial Sequence
  Description of Artificial Sequence: Synthetic primer
gaggaagcctctggacgag

SEQ ID NO: 13064 - DNA, 28 bp, Artificial Sequence
  Description of Artificial Sequence: Synthetic primer
ctgcttcctatcttccattgatcttcat

SEQ ID NO: 13065 - DNA, 21 bp, Artificial Sequence
  Description of Artificial Sequence: Synthetic primer
aaattgtgggttcagcatggg

SEQ ID NO: 13066 - DNA, 25 bp, Artificial Sequence
  Description of Artificial Sequence: Synthetic primer
ggaattaaccctgggaagaactctg

SEQ ID NO: 13067 - DNA, 19 bp, Artificial Sequence
  Description of Artificial Sequence: Synthetic primer
cagcaggtggtggatgtgt

SEQ ID NO: 13068 - DNA, 23 bp, Artificial Sequence
  Description of Artificial Sequence: Synthetic primer
catgggcatcatcataggagctg

SEQ ID NO: 13069 - DNA, 21 bp, Artificial Sequence
  Description of Artificial Sequence: Synthetic primer
cgcagttacaaaggaggctgt

SEQ ID NO: 13070 - DNA, 21 bp, Artificial Sequence
  Description of Artificial Sequence: Synthetic primer
gtgtaccgcaacttgctctca

SEQ ID NO: 13071 - DNA, 21 bp, Artificial Sequence
  Description of Artificial Sequence: Synthetic primer
tggagctttcatcagtgggaa

SEQ ID NO: 13072 - DNA, 27 bp, Artificial Sequence
  Description of Artificial Sequence: Synthetic primer
tttgttgtgaagggcaatgttatttca

SEQ ID NO: 13073 - DNA, 21 bp, Artificial Sequence
  Description of Artificial Sequence: Synthetic primer
ctgcaagcagcaataggtgtt

SEQ ID NO: 13074 - DNA, 27 bp, Artificial Sequence
  Description of Artificial Sequence: Synthetic primer
ggtcagatatacagggtttcctgaagt

SEQ ID NO: 13075 - DNA, 21 bp, Artificial Sequence
  Description of Artificial Sequence: Synthetic primer
gacgttgaggtgtggtcacag

SEQ ID NO: 13076 - DNA, 21 bp, Artificial Sequence
  Description of Artificial Sequence: Synthetic primer
gcttaccctcagacagggaag

SEQ ID NO: 13077 - DNA, 26 bp, Artificial Sequence
  Description of Artificial Sequence: Synthetic primer
gttctcaactgcttatgcctttgttg

SEQ ID NO: 13078 - DNA, 21 bp, Artificial Sequence
  Description of Artificial Sequence: Synthetic primer
ccccatgggatcagtcagtca

SEQ ID NO: 13079 - DNA, 22 bp, Artificial Sequence
  Description of Artificial Sequence: Synthetic primer
aaggttccttcagggacatcag

SEQ ID NO: 13080 - DNA, 22 bp, Artificial Sequence
  Description of Artificial Sequence: Synthetic primer
caaaggccttggaagaagcatt

SEQ ID NO: 13081 - DNA, 25 bp, Artificial Sequence
  Description of Artificial Sequence: Synthetic primer
cacagaacaggcttatacagaccaa

SEQ ID NO: 13082 - DNA, 20 bp, Artificial Sequence
  Description of Artificial Sequence: Synthetic primer
gcacaggcagattggcaatg

SEQ ID NO: 13083 - DNA, 26 bp, Artificial Sequence
  Description of Artificial Sequence: Synthetic primer
gtgaaagaatgtgttggacatgagag

SEQ ID NO: 13084 - DNA, 21 bp, Artificial Sequence
  Description of Artificial Sequence: Synthetic primer
cagccttgtctgcctctgtag

SEQ ID NO: 13085 - DNA, 21 bp, Artificial Sequence
  Description of Artificial Sequence: Synthetic primer
cggtccttcactctcagacca

SEQ ID NO: 13086 - DNA, 23 bp, Artificial Sequence
  Description of Artificial Sequence: Synthetic primer
gtggccttgctgaacattatgga

SEQ ID NO: 13087 - DNA, 21 bp, Artificial Sequence
  Description of Artificial Sequence: Synthetic primer
ctatgctgccatctggcttcc

SEQ ID NO: 13088 - DNA, 21 bp, Artificial Sequence
  Description of Artificial Sequence: Synthetic primer
ctcaggtggagatcctcccat

SEQ ID NO: 13089 - DNA, 22 bp, Artificial Sequence
  Description of Artificial Sequence: Synthetic primer
aggctctgaacttgaagcttcc

SEQ ID NO: 13090 - DNA, 21 bp, Artificial Sequence
  Description of Artificial Sequence: Synthetic primer
ctcattcagaacgggcaggtt

SEQ ID NO: 13091 - DNA, 21 bp, Artificial Sequence
  Description of Artificial Sequence: Synthetic primer
gctgtgcgacaacttcaacaa

SEQ ID NO: 13092 - DNA, 25 bp, Artificial Sequence
  Description of Artificial Sequence: Synthetic primer
agctggtcttaagaactccgttatc

SEQ ID NO: 13093 - DNA, 24 bp, Artificial Sequence
  Description of Artificial Sequence: Synthetic primer
tctacagaataggtaccagcgtca

SEQ ID NO: 13094 - DNA, 21 bp, Artificial Sequence
  Description of Artificial Sequence: Synthetic primer
ctctctcggtgttcaccacag

SEQ ID NO: 13095 - DNA, 26 bp, Artificial Sequence
  Description of Artificial Sequence: Synthetic primer
gtccactgggatcataagttgtatgc

SEQ ID NO: 13096 - DNA, 22 bp, Artificial Sequence
  Description of Artificial Sequence: Synthetic primer
actgggaaaaatgctggcattg

SEQ ID NO: 13097 - DNA, 24 bp, Artificial Sequence
  Description of Artificial Sequence: Synthetic primer
tgtcaaggatgggttactggataa

SEQ ID NO: 13098 - DNA, 21 bp, Artificial Sequence
  Description of Artificial Sequence: Synthetic primer
gaaccttctgaccagagccaa

SEQ ID NO: 13099 - DNA, 22 bp, Artificial Sequence
  Description of Artificial Sequence: Synthetic primer
gtcggtgtccacagcaaagtaa

SEQ ID NO: 13100 - DNA, 22 bp, Artificial Sequence
  Description of Artificial Sequence: Synthetic primer
gatcacacctgttggttctgct

SEQ ID NO: 13101 - DNA, 21 bp, Artificial Sequence
  Description of Artificial Sequence: Synthetic primer
catttcccctggaacgttggt

SEQ ID NO: 13102 - DNA, 23 bp, Artificial Sequence
  Description of Artificial Sequence: Synthetic primer
gcaggtcggcagctaaaagaata

SEQ ID NO: 13103 - DNA, 20 bp, Artificial Sequence
  Description of Artificial Sequence: Synthetic primer
gaggtggagaccaaggtgtc

SEQ ID NO: 13104 - DNA, 21 bp, Artificial Sequence
  Description of Artificial Sequence: Synthetic primer
tacgtcgtcacctccatgatc

SEQ ID NO: 13105 - DNA, 28 bp, Artificial Sequence
  Description of Artificial Sequence: Synthetic primer
aaaggtttcatggaagaacactcttact

SEQ ID NO: 13106 - DNA, 24 bp, Artificial Sequence
  Description of Artificial Sequence: Synthetic primer
acaaggacgacgacattatcttct

SEQ ID NO: 13107 - DNA, 19 bp, Artificial Sequence
  Description of Artificial Sequence: Synthetic primer
ctgctcctggccatgtctg

SEQ ID NO: 13108 - DNA, 23 bp, Artificial Sequence
  Description of Artificial Sequence: Synthetic primer
gatgtctccaagaaagacgccaa

SEQ ID NO: 13109 - DNA, 27 bp, Artificial Sequence
  Description of Artificial Sequence: Synthetic primer
atcattttgttgtgtgatactgtggag

SEQ ID NO: 13110 - DNA, 21 bp, Artificial Sequence
  Description of Artificial Sequence: Synthetic primer
atgccgtttccccctcttcta

SEQ ID NO: 13111 - DNA, 28 bp, Artificial Sequence
  Description of Artificial Sequence: Synthetic primer
atataaaatcatccaagacagcggtagt

SEQ ID NO: 13112 - DNA, 20 bp, Artificial Sequence
  Description of Artificial Sequence: Synthetic primer
gcttgagaggattgcacggt

SEQ ID NO: 13113 - DNA, 24 bp, Artificial Sequence
  Description of Artificial Sequence: Synthetic primer
gaagacgacaaagagttcccgtat

SEQ ID NO: 13114 - DNA, 28 bp, Artificial Sequence
  Description of Artificial Sequence: Synthetic primer
aatattgacttttcctgtacttcacgca

SEQ ID NO: 13115 - DNA, 22 bp, Artificial Sequence
  Description of Artificial Sequence: Synthetic primer
atctttgagatcacgccttccc

SEQ ID NO: 13116 - DNA, 28 bp, Artificial Sequence
  Description of Artificial Sequence: Synthetic primer
gcatcatgttgatagagatcttcttgga

SEQ ID NO: 13117 - DNA, 21 bp, Artificial Sequence
  Description of Artificial Sequence: Synthetic primer
cagtggaggagagcatggttg

SEQ ID NO: 13118 - DNA, 25 bp, Artificial Sequence
  Description of Artificial Sequence: Synthetic primer
acaattcctggaattactggaaggt

SEQ ID NO: 13119 - DNA, 22 bp, Artificial Sequence
  Description of Artificial Sequence: Synthetic primer
gcagctgagaaagccgtaaaag

SEQ ID NO: 13120 - DNA, 22 bp, Artificial Sequence
  Description of Artificial Sequence: Synthetic primer
ccttcaggcgtgtgatcaaaac

SEQ ID NO: 13121 - DNA, 21 bp, Artificial Sequence
  Description of Artificial Sequence: Synthetic primer
ccgccgatagtctgtttcagg

SEQ ID NO: 13122 - DNA, 22 bp, Artificial Sequence
  Description of Artificial Sequence: Synthetic primer
gctcaaggaacaagcattccag

SEQ ID NO: 13123 - DNA, 26 bp, Artificial Sequence
  Description of Artificial Sequence: Synthetic primer
ccatatgaatttgtgcacagaacagc

SEQ ID NO: 13124 - DNA, 19 bp, Artificial Sequence
  Description of Artificial Sequence: Synthetic primer
agctcttgtgctcctcgtg

SEQ ID NO: 13125 - DNA, 21 bp, Artificial Sequence
  Description of Artificial Sequence: Synthetic primer
ccccgtcttcagaatctggtg

SEQ ID NO: 13126 - DNA, 23 bp, Artificial Sequence
  Description of Artificial Sequence: Synthetic primer
taataacttgctggtggctgacg

SEQ ID NO: 13127 - DNA, 27 bp, Artificial Sequence
  Description of Artificial Sequence: Synthetic primer
tgagggtcctttgtataaaagttgagg

SEQ ID NO: 13128 - DNA, 26 bp, Artificial Sequence
  Description of Artificial Sequence: Synthetic primer
tagagtctgtttaagtcttgggcact

SEQ ID NO: 13129 - DNA, 18 bp, Artificial Sequence
  Description of Artificial Sequence: Synthetic primer
gtggatggagcgctacgg

SEQ ID NO: 13130 - DNA, 21 bp, Artificial Sequence
  Description of Artificial Sequence: Synthetic primer
tgtaaagctgctgctccttgg

SEQ ID NO: 13131 - DNA, 19 bp, Artificial Sequence
  Description of Artificial Sequence: Synthetic primer
ccatgcatggttcgctcct

SEQ ID NO: 13132 - DNA, 28 bp, Artificial Sequence
  Description of Artificial Sequence: Synthetic primer
tctacacgtccgattataatttctcgct

SEQ ID NO: 13133 - DNA, 23 bp, Artificial Sequence
  Description of Artificial Sequence: Synthetic primer
catcatgcccatccctcatttga

SEQ ID NO: 13134 - DNA, 22 bp, Artificial Sequence
  Description of Artificial Sequence: Synthetic primer
cacaggtgagcagcttcaaatt

SEQ ID NO: 13135 - DNA, 23 bp, Artificial Sequence
  Description of Artificial Sequence: Synthetic primer
gcgtactttctccagagatcgag

SEQ ID NO: 13136 - DNA, 22 bp, Artificial Sequence
  Description of Artificial Sequence: Synthetic primer
tcctcgaagctatcgacagtct

SEQ ID NO: 13137 - DNA, 24 bp, Artificial Sequence
  Description of Artificial Sequence: Synthetic primer
gtatcgtgcaccgaacaattttgg

SEQ ID NO: 13138 - DNA, 26 bp, Artificial Sequence
  Description of Artificial Sequence: Synthetic primer
aaaatactgggcatttcatcacttcc

SEQ ID NO: 13139 - DNA, 19 bp, Artificial Sequence
  Description of Artificial Sequence: Synthetic primer
catggttgctgcctacacc

SEQ ID NO: 13140 - DNA, 27 bp, Artificial Sequence
  Description of Artificial Sequence: Synthetic primer
gcatggcatccttataagattcttcag

SEQ ID NO: 13141 - DNA, 26 bp, Artificial Sequence
  Description of Artificial Sequence: Synthetic primer
ttttggttggactcaaactttgttgt

SEQ ID NO: 13142 - DNA, 19 bp, Artificial Sequence
  Description of Artificial Sequence: Synthetic primer
cgatccacaacgccgattt

SEQ ID NO: 13143 - DNA, 28 bp, Artificial Sequence
  Description of Artificial Sequence: Synthetic primer
ggtttcttctattcatcacgtcttcttc

SEQ ID NO: 13144 - DNA, 21 bp, Artificial Sequence
  Description of Artificial Sequence: Synthetic primer
ctgagaaggctgggtccttac

SEQ ID NO: 13145 - DNA, 21 bp, Artificial Sequence
  Description of Artificial Sequence: Synthetic primer
aacaccaacagggtcagcttc

SEQ ID NO: 13146 - DNA, 26 bp, Artificial Sequence
  Description of Artificial Sequence: Synthetic primer
cggtcatacaaagaacagaacttcac

SEQ ID NO: 13147 - DNA, 21 bp, Artificial Sequence
  Description of Artificial Sequence: Synthetic primer
ccaagaagtagagcgctccag

SEQ ID NO: 13148 - DNA, 25 bp, Artificial Sequence
  Description of Artificial Sequence: Synthetic primer
ctttgtaactttggtggatggtgtt

SEQ ID NO: 13149 - DNA, 21 bp, Artificial Sequence
  Description of Artificial Sequence: Synthetic primer
ctggaggcagcgaggataaag

SEQ ID NO: 13150 - DNA, 21 bp, Artificial Sequence
  Description of Artificial Sequence: Synthetic primer
ctacatgacgccgacgaaatc

SEQ ID NO: 13151 - DNA, 27 bp, Artificial Sequence
  Description of Artificial Sequence: Synthetic primer
gtcttggcagaatttgtagattccatt

SEQ ID NO: 13152 - DNA, 24 bp, Artificial Sequence
  Description of Artificial Sequence: Synthetic primer
gggcgacaatgagatgaatctagt

SEQ ID NO: 13153 - DNA, 21 bp, Artificial Sequence
  Description of Artificial Sequence: Synthetic primer
gcgtgaatgctcaaaaagcca

SEQ ID NO: 13154 - DNA, 21 bp, Artificial Sequence
  Description of Artificial Sequence: Synthetic primer
ttgcccagaaaagtcgtccac

SEQ ID NO: 13155 - DNA, 22 bp, Artificial Sequence
  Description of Artificial Sequence: Synthetic primer
gcagcagcacacaaattactga

SEQ ID NO: 13156 - DNA, 22 bp, Artificial Sequence
  Description of Artificial Sequence: Synthetic primer
gctgaatcgcgttcgagtttag

SEQ ID NO: 13157 - DNA, 28 bp, Artificial Sequence
  Description of Artificial Sequence: Synthetic primer
catcagattaacattatccacagggact

SEQ ID NO: 13158 - DNA, 22 bp, Artificial Sequence
  Description of Artificial Sequence: Synthetic primer
aggtgttactgggtactcctct

SEQ ID NO: 13159 - DNA, 21 bp, Artificial Sequence
  Description of Artificial Sequence: Synthetic primer
gggtgtgtttgtagcatcagc

SEQ ID NO: 13160 - DNA, 21 bp, Artificial Sequence
  Description of Artificial Sequence: Synthetic primer
ctctgatggtggttgggacac

SEQ ID NO: 13161 - DNA, 24 bp, Artificial Sequence
  Description of Artificial Sequence: Synthetic primer
gtaaccacaggctagaaaccaaac

SEQ ID NO: 13162 - DNA, 21 bp, Artificial Sequence
  Description of Artificial Sequence: Synthetic primer
gtcggtttccctttgggttct

SEQ ID NO: 13163 - DNA, 21 bp, Artificial Sequence
  Description of Artificial Sequence: Synthetic primer
gcttagaggagccgtacagga

SEQ ID NO: 13164 - DNA, 23 bp, Artificial Sequence
  Description of Artificial Sequence: Synthetic primer
ccagggcgtaattgagatgtact

SEQ ID NO: 13165 - DNA, 18 bp, Artificial Sequence
  Description of Artificial Sequence: Synthetic primer
gcgaccgtgtctatcgtg

SEQ ID NO: 13166 - DNA, 27 bp, Artificial Sequence
  Description of Artificial Sequence: Synthetic primer
gatttgagtgcttcggatttaatcaac

SEQ ID NO: 13167 - DNA, 22 bp, Artificial Sequence
  Description of Artificial Sequence: Synthetic primer
tttctcaggttgcagttcttgc

SEQ ID NO: 13168 - DNA, 25 bp, Artificial Sequence
  Description of Artificial Sequence: Synthetic primer
aacgtcgaagtctactgattcttgg

SEQ ID NO: 13169 - DNA, 24 bp, Artificial Sequence
  Description of Artificial Sequence: Synthetic primer
gctgtattgtcaactcctgcacta

SEQ ID NO: 13170 - DNA, 28 bp, Artificial Sequence
  Description of Artificial Sequence: Synthetic primer
agaggaacaatcagcatataatcaagcc

SEQ ID NO: 13171 - DNA, 23 bp, Artificial Sequence
  Description of Artificial Sequence: Synthetic primer
caattagcggcggtggtttaatt

SEQ ID NO: 13172 - DNA, 21 bp, Artificial Sequence
  Description of Artificial Sequence: Synthetic primer
attgcaatcaagcctgtccgt

SEQ ID NO: 13173 - DNA, 21 bp, Artificial Sequence
  Description of Artificial Sequence: Synthetic primer
ccgcaatgatctgaagacgtg

SEQ ID NO: 13174 - DNA, 27 bp, Artificial Sequence
  Description of Artificial Sequence: Synthetic primer
cctagcctgtataaatacatgcgaaca

SEQ ID NO: 13175 - DNA, 27 bp, Artificial Sequence
  Description of Artificial Sequence: Synthetic primer
tcaccaaatatgttgtgtaccttctcg

SEQ ID NO: 13176 - DNA, 20 bp, Artificial Sequence
  Description of Artificial Sequence: Synthetic primer
ccgaaaccgcaaaactgctg

SEQ ID NO: 13177 - DNA, 20 bp, Artificial Sequence
  Description of Artificial Sequence: Synthetic primer
ggctttgccacggtctgtta

SEQ ID NO: 13178 - DNA, 25 bp, Artificial Sequence
  Description of Artificial Sequence: Synthetic primer
tatgaacccccatgctttttgtctg

SEQ ID NO: 13179 - DNA, 21 bp, Artificial Sequence
  Description of Artificial Sequence: Synthetic primer
ggtatgtgacgacgtgtccaa

SEQ ID NO: 13180 - DNA, 25 bp, Artificial Sequence
  Description of Artificial Sequence: Synthetic primer
cactgtatcgtggagcaagagtatt

SEQ ID NO: 13181 - DNA, 21 bp, Artificial Sequence
  Description of Artificial Sequence: Synthetic primer
cccgacggacgactatgatct

SEQ ID NO: 13182 - DNA, 26 bp, Artificial Sequence
  Description of Artificial Sequence: Synthetic primer
ttcatgatcaagatcttgggatttgc

SEQ ID NO: 13183 - DNA, 21 bp, Artificial Sequence
  Description of Artificial Sequence: Synthetic primer
aacttgagcaaggaggcactc

SEQ ID NO: 13184 - DNA, 21 bp, Artificial Sequence
  Description of Artificial Sequence: Synthetic primer
cgaaaagcaccacctcctctg

SEQ ID NO: 13185 - DNA, 25 bp, Artificial Sequence
  Description of Artificial Sequence: Synthetic primer
agtcagaagatttggctcaaatgga

SEQ ID NO: 13186 - DNA, 22 bp, Artificial Sequence
  Description of Artificial Sequence: Synthetic primer
tcaaccccaagaatgtgctttg

SEQ ID NO: 13187 - DNA, 27 bp, Artificial Sequence
  Description of Artificial Sequence: Synthetic primer
ggagaagattgatcagattgctgatgt

SEQ ID NO: 13188 - DNA, 26 bp, Artificial Sequence
  Description of Artificial Sequence: Synthetic primer
tcatggcagatacgcaatgttattgt

SEQ ID NO: 13189 - DNA, 21 bp, Artificial Sequence
  Description of Artificial Sequence: Synthetic primer
cttacgtcgagagcagctcag

SEQ ID NO: 13190 - DNA, 21 bp, Artificial Sequence
  Description of Artificial Sequence: Synthetic primer
ccgaccgtgatcaagaaggtg

SEQ ID NO: 13191 - DNA, 19 bp, Artificial Sequence
  Description of Artificial Sequence: Synthetic primer
gacttcacgcacctcacca

SEQ ID NO: 13192 - DNA, 21 bp, Artificial Sequence
  Description of Artificial Sequence: Synthetic primer
tttgccagctttgggtctttg

SEQ ID NO: 13193 - DNA, 21 bp, Artificial Sequence
  Description of Artificial Sequence: Synthetic primer
tcttcgacaacgcctactacg

SEQ ID NO: 13194 - DNA, 21 bp, Artificial Sequence
  Description of Artificial Sequence: Synthetic primer
ggcaccatgttggaagctttg

SEQ ID NO: 13195 - DNA, 24 bp, Artificial Sequence
  Description of Artificial Sequence: Synthetic primer
catacgaagtgaatgctgttggac

SEQ ID NO: 13196 - DNA, 23 bp, Artificial Sequence
  Description of Artificial Sequence: Synthetic primer
cttggacactcacaatcattggc

SEQ ID NO: 13197 - DNA, 22 bp, Artificial Sequence
  Description of Artificial Sequence: Synthetic primer
gggaggaagcaccttttgtttt

SEQ ID NO: 13198 - DNA, 25 bp, Artificial Sequence
  Description of Artificial Sequence: Synthetic primer
ggatacgaaaactatgcctggaatg

SEQ ID NO: 13199 - DNA, 22 bp, Artificial Sequence
  Description of Artificial Sequence: Synthetic primer
cgaatagtggatgggcggttat

SEQ ID NO: 13200 - DNA, 21 bp, Artificial Sequence
  Description of Artificial Sequence: Synthetic primer
gtgatggttgcagctccaatt

SEQ ID NO: 13201 - DNA, 21 bp, Artificial Sequence
  Description of Artificial Sequence: Synthetic primer
gtcctccttgccatgggattc

SEQ ID NO: 13202 - DNA, 22 bp, Artificial Sequence
  Description of Artificial Sequence: Synthetic primer
actgtaaccatttcacggctga

SEQ ID NO: 13203 - DNA, 23 bp, Artificial Sequence
  Description of Artificial Sequence: Synthetic primer
tacgagatggtcgacatcgactt

SEQ ID NO: 13204 - DNA, 22 bp, Artificial Sequence
  Description of Artificial Sequence: Synthetic primer
ggaagactggattccacatggg

SEQ ID NO: 13205 - DNA, 22 bp, Artificial Sequence
  Description of Artificial Sequence: Synthetic primer
gatatggatcatcaggccacca

SEQ ID NO: 13206 - DNA, 19 bp, Artificial Sequence
  Description of Artificial Sequence: Synthetic primer
cgcaaggtcactgctggaa

SEQ ID NO: 13207 - DNA, 24 bp, Artificial Sequence
  Description of Artificial Sequence: Synthetic primer
gatcatcgacgatcttgtgtctgt

SEQ ID NO: 13208 - DNA, 18 bp, Artificial Sequence
  Description of Artificial Sequence: Synthetic primer
gagatccaggccgacgtg

SEQ ID NO: 13209 - DNA, 27 bp, Artificial Sequence
  Description of Artificial Sequence: Synthetic primer
gattgaatgctcctctaattacttgcc

SEQ ID NO: 13210 - DNA, 30 bp, Artificial Sequence
  Description of Artificial Sequence: Synthetic primer
agcaaatggaaaatgaaaaagaatgaaagc

SEQ ID NO: 13211 - DNA, 21 bp, Artificial Sequence
  Description of Artificial Sequence: Synthetic primer
caaccaaccagtgtgacctgt

SEQ ID NO: 13212 - DNA, 22 bp, Artificial Sequence
  Description of Artificial Sequence: Synthetic primer
ggaggagtgatgcgctaagcta

SEQ ID NO: 13213 - DNA, 26 bp, Artificial Sequence
  Description of Artificial Sequence: Synthetic primer
atgccctaaaagagattgttgtgaag

SEQ ID NO: 13214 - DNA, 19 bp, Artificial Sequence
  Description of Artificial Sequence: Synthetic primer
gagcaacgctagcgttctg

SEQ ID NO: 13215 - DNA, 26 bp, Artificial Sequence
  Description of Artificial Sequence: Synthetic primer
gatccatcgatcgatcgaaatcattg

SEQ ID NO: 13216 - DNA, 24 bp, Artificial Sequence
  Description of Artificial Sequence: Synthetic primer
tggtggaaaatctacctctgggtt

SEQ ID NO: 13217 - DNA, 26 bp, Artificial Sequence
  Description of Artificial Sequence: Synthetic primer
agttcttgagtttgtcggttataggt

SEQ ID NO: 13218 - DNA, 27 bp, Artificial Sequence
  Description of Artificial Sequence: Synthetic primer
gccgatgtgtgtataaactacaaaacc

SEQ ID NO: 13219 - DNA, 18 bp, Artificial Sequence
  Description of Artificial Sequence: Synthetic primer
cccgctggtgaacaacga

SEQ ID NO: 13220 - DNA, 23 bp, Artificial Sequence
  Description of Artificial Sequence: Synthetic primer
ccccggaaaagactaacgaatca

SEQ ID NO: 13221 - DNA, 18 bp, Artificial Sequence
  Description of Artificial Sequence: Synthetic primer
ccttgcgcatcccgacaa

SEQ ID NO: 13222 - DNA, 21 bp, Artificial Sequence
  Description of Artificial Sequence: Synthetic primer
cgagcacaaagatgcgttcat

SEQ ID NO: 13223 - DNA, 21 bp, Artificial Sequence
  Description of Artificial Sequence: Synthetic primer
cattcgttgtgcgggttcaag

SEQ ID NO: 13224 - DNA, 21 bp, Artificial Sequence
  Description of Artificial Sequence: Synthetic primer
tcatctcacccaaaagagcca

SEQ ID NO: 13225 - DNA, 26 bp, Artificial Sequence
  Description of Artificial Sequence: Synthetic primer
tgtactgagacagcttgaagctattc

SEQ ID NO: 13226 - DNA, 22 bp, Artificial Sequence
  Description of Artificial Sequence: Synthetic primer
ggaagccttgctgatctctctc

SEQ ID NO: 13227 - DNA, 21 bp, Artificial Sequence
  Description of Artificial Sequence: Synthetic primer
ttgagactcccagtgaaccgt

SEQ ID NO: 13228 - DNA, 28 bp, Artificial Sequence
  Description of Artificial Sequence: Synthetic primer
actccaataaacttctttagacgtttgc

SEQ ID NO: 13229 - DNA, 21 bp, Artificial Sequence
  Description of Artificial Sequence: Synthetic primer
gcagcgaaactgaaggctatg

SEQ ID NO: 13230 - DNA, 19 bp, Artificial Sequence
  Description of Artificial Sequence: Synthetic primer
agatggccaggtggtctca

SEQ ID NO: 13231 - DNA, 22 bp, Artificial Sequence
  Description of Artificial Sequence: Synthetic primer
ccgtggcatgacagttcaattt

SEQ ID NO: 13232 - DNA, 27 bp, Artificial Sequence
  Description of Artificial Sequence: Synthetic primer
tcctttggagttctagtaaatcttggc

SEQ ID NO: 13233 - DNA, 30 bp, Artificial Sequence
  Description of Artificial Sequence: Synthetic primer
cgttcaaagatataggatgcatggtaatca

SEQ ID NO: 13234 - DNA, 21 bp, Artificial Sequence
  Description of Artificial Sequence: Synthetic primer
atatggacgcagagcctgagt

SEQ ID NO: 13235 - DNA, 21 bp, Artificial Sequence
  Description of Artificial Sequence: Synthetic primer
cggtgaggagcaatgaggatg

SEQ ID NO: 13236 - DNA, 21 bp, Artificial Sequence
  Description of Artificial Sequence: Synthetic primer
gggatgaaatgcaaggtggtg

SEQ ID NO: 13237 - DNA, 21 bp, Artificial Sequence
  Description of Artificial Sequence: Synthetic primer
gagctgatggagcaaaggcta

SEQ ID NO: 13238 - DNA, 27 bp, Artificial Sequence
  Description of Artificial Sequence: Synthetic primer
acagtacactactcgatcaactttcaa

SEQ ID NO: 13239 - DNA, 24 bp, Artificial Sequence
  Description of Artificial Sequence: Synthetic primer
tggattttgctctgaggaaatgtg

SEQ ID NO: 13240 - DNA, 21 bp, Artificial Sequence
  Description of Artificial Sequence: Synthetic primer
taggatcatcagccagtgacg

SEQ ID NO: 13241 - DNA, 24 bp, Artificial Sequence
  Description of Artificial Sequence: Synthetic primer
ggatttgtgctgctgaacatcaac

SEQ ID NO: 13242 - DNA, 23 bp, Artificial Sequence
  Description of Artificial Sequence: Synthetic primer
gattcctgtattcgacgtggaca

SEQ ID NO: 13243 - DNA, 22 bp, Artificial Sequence
  Description of Artificial Sequence: Synthetic primer
tgcacagctcatgcgaaaattg

SEQ ID NO: 13244 - DNA, 27 bp, Artificial Sequence
  Description of Artificial Sequence: Synthetic primer
cgtcagagttagaaatctcaagttggt

SEQ ID NO: 13245 - DNA, 23 bp, Artificial Sequence
  Description of Artificial Sequence: Synthetic primer
ctgtgtttcttttcggccttcct

SEQ ID NO: 13246 - DNA, 21 bp, Artificial Sequence
  Description of Artificial Sequence: Synthetic primer
ggttttggacaccgtgtgtac

SEQ ID NO: 13247 - DNA, 24 bp, Artificial Sequence
  Description of Artificial Sequence: Synthetic primer
gcaagctctctgactagctatacc

SEQ ID NO: 13248 - DNA, 22 bp, Artificial Sequence
  Description of Artificial Sequence: Synthetic primer
gcagacgattggatttggcaac

SEQ ID NO: 13249 - DNA, 28 bp, Artificial Sequence
  Description of Artificial Sequence: Synthetic primer
cagtctatcctattcttgaaaggtgcat

SEQ ID NO: 13250 - DNA, 20 bp, Artificial Sequence
  Description of Artificial Sequence: Synthetic primer
caactagcggtttcgctgag

SEQ ID NO: 13251 - DNA, 28 bp, Artificial Sequence
  Description of Artificial Sequence: Synthetic primer
tgtataactgttgcactcctatgtatcc

SEQ ID NO: 13252 - DNA, 23 bp, Artificial Sequence
  Description of Artificial Sequence: Synthetic primer
aaggaacgcaggctattctgaac

SEQ ID NO: 13253 - DNA, 21 bp, Artificial Sequence
  Description of Artificial Sequence: Synthetic primer
ggactcatggtcggagatgga

SEQ ID NO: 13254 - DNA, 21 bp, Artificial Sequence
  Description of Artificial Sequence: Synthetic primer
gctgttgtcagttgaggcaga

SEQ ID NO: 13255 - DNA, 28 bp, Artificial Sequence
  Description of Artificial Sequence: Synthetic primer
tgattaatggtagtatgtgaccgtttca

SEQ ID NO: 13256 - DNA, 22 bp, Artificial Sequence
  Description of Artificial Sequence: Synthetic primer
aagatggccaaaaacctcgaga

SEQ ID NO: 13257 - DNA, 24 bp, Artificial Sequence
  Description of Artificial Sequence: Synthetic primer
gaaatagttctagcaggacgggtt

SEQ ID NO: 13258 - DNA, 28 bp, Artificial Sequence
  Description of Artificial Sequence: Synthetic primer
aagtaggtgttcgatgctaagaaacaaa

SEQ ID NO: 13259 - DNA, 26 bp, Artificial Sequence
  Description of Artificial Sequence: Synthetic primer
acatcatgcatacaaaatgaggccta

SEQ ID NO: 13260 - DNA, 24 bp, Artificial Sequence
  Description of Artificial Sequence: Synthetic primer
aacatccggatgattacacaggat

SEQ ID NO: 13261 - DNA, 25 bp, Artificial Sequence
  Description of Artificial Sequence: Synthetic primer
ggcgttttggaagcagaagaataag

SEQ ID NO: 13262 - DNA, 24 bp, Artificial Sequence
  Description of Artificial Sequence: Synthetic primer
aggactgtccattggatacaaagc

SEQ ID NO: 13263 - DNA, 26 bp, Artificial Sequence
  Description of Artificial Sequence: Synthetic primer
gaagcagatgcttcagaagattgaag

SEQ ID NO: 13264 - DNA, 27 bp, Artificial Sequence
  Description of Artificial Sequence: Synthetic primer
ttctgtagaaggctgtttcattatcgt

SEQ ID NO: 13265 - DNA, 21 bp, Artificial Sequence
  Description of Artificial Sequence: Synthetic primer
agatgttgtctccgttgacga

SEQ ID NO: 13266 - DNA, 23 bp, Artificial Sequence
  Description of Artificial Sequence: Synthetic primer
acgtgagcgatgagtcttactct

SEQ ID NO: 13267 - DNA, 21 bp, Artificial Sequence
  Description of Artificial Sequence: Synthetic primer
gaccgggattatgggtggatc

SEQ ID NO: 13268 - DNA, 28 bp, Artificial Sequence
  Description of Artificial Sequence: Synthetic primer
taaaactagtatgtggtaccgcggaata

SEQ ID NO: 13269 - DNA, 25 bp, Artificial Sequence
  Description of Artificial Sequence: Synthetic primer
tcatctaccattttgactgggaact

SEQ ID NO: 13270 - DNA, 27 bp, Artificial Sequence
  Description of Artificial Sequence: Synthetic primer
aaacagaattttgctaacgtctcatgt

SEQ ID NO: 13271 - DNA, 24 bp, Artificial Sequence
  Description of Artificial Sequence: Synthetic primer
tcacataagaccgatccaactcaa

SEQ ID NO: 13272 - DNA, 21 bp, Artificial Sequence
  Description of Artificial Sequence: Synthetic primer
ttgcaggtcatcatcacgatc

SEQ ID NO: 13273 - DNA, 22 bp, Artificial Sequence
  Description of Artificial Sequence: Synthetic primer
ccagtttgcataggcactgtga

SEQ ID NO: 13274 - DNA, 19 bp, Artificial Sequence
  Description of Artificial Sequence: Synthetic primer
ctgaacgaaccggagctga

SEQ ID NO: 13275 - DNA, 22 bp, Artificial Sequence
  Description of Artificial Sequence: Synthetic primer
ctgaaattgctgcgaggtttgg

SEQ ID NO: 13276 - DNA, 24 bp, Artificial Sequence
  Description of Artificial Sequence: Synthetic primer
atcaagaaagtggccaaagaagga

SEQ ID NO: 13277 - DNA, 27 bp, Artificial Sequence
  Description of Artificial Sequence: Synthetic primer
tcaacccgaactatgtcatcgattaac

SEQ ID NO: 13278 - DNA, 24 bp, Artificial Sequence
  Description of Artificial Sequence: Synthetic primer
cattgcggaatcatcaaggtttca

SEQ ID NO: 13279 - DNA, 21 bp, Artificial Sequence
  Description of Artificial Sequence: Synthetic primer
gagtaggcattcccaccgaaa

SEQ ID NO: 13280 - DNA, 26 bp, Artificial Sequence
  Description of Artificial Sequence: Synthetic primer
gatgcaaagctatccactatttggtt

SEQ ID NO: 13281 - DNA, 21 bp, Artificial Sequence
  Description of Artificial Sequence: Synthetic primer
cagaggctttccggatccttg

SEQ ID NO: 13282 - DNA, 28 bp, Artificial Sequence
  Description of Artificial Sequence: Synthetic primer
catcaggaataaacgtgtagaagtttcc

SEQ ID NO: 13283 - DNA, 23 bp, Artificial Sequence
  Description of Artificial Sequence: Synthetic primer
gctcctcctccagcaacattatt

SEQ ID NO: 13284 - DNA, 26 bp, Artificial Sequence
  Description of Artificial Sequence: Synthetic primer
aaagatgatagtagctgccgagaaat

SEQ ID NO: 13285 - DNA, 21 bp, Artificial Sequence
  Description of Artificial Sequence: Synthetic primer
cgatatcggagagtggcaacc

SEQ ID NO: 13286 - DNA, 24 bp, Artificial Sequence
  Description of Artificial Sequence: Synthetic primer
ccttcccaagataccatcattcgg

SEQ ID NO: 13287 - DNA, 25 bp, Artificial Sequence
  Description of Artificial Sequence: Synthetic primer
gtgtaatcctgatccagttccatgc

SEQ ID NO: 13288 - DNA, 21 bp, Artificial Sequence
  Description of Artificial Sequence: Synthetic primer
ggagttcgaacacgaggttga

SEQ ID NO: 13289 - DNA, 28 bp, Artificial Sequence
  Description of Artificial Sequence: Synthetic primer
tctggtactaacctattaacaagatgcc

SEQ ID NO: 13290 - DNA, 21 bp, Artificial Sequence
  Description of Artificial Sequence: Synthetic primer
ccttatccgtgccaaacaacc

SEQ ID NO: 13291 - DNA, 22 bp, Artificial Sequence
  Description of Artificial Sequence: Synthetic primer
gggtctctctctgaggccttta

SEQ ID NO: 13292 - DNA, 23 bp, Artificial Sequence
  Description of Artificial Sequence: Synthetic primer
tttcgcttgagaagatcctcgat

SEQ ID NO: 13293 - DNA, 28 bp, Artificial Sequence
  Description of Artificial Sequence: Synthetic primer
tgttcagctctttgataagaaatgcttt

SEQ ID NO: 13294 - DNA, 24 bp, Artificial Sequence
  Description of Artificial Sequence: Synthetic primer
cggttggcgttaaacaagaaatgg

SEQ ID NO: 13295 - DNA, 19 bp, Artificial Sequence
  Description of Artificial Sequence: Synthetic primer
gctccaagtgggccttcaa

SEQ ID NO: 13296 - DNA, 21 bp, Artificial Sequence
  Description of Artificial Sequence: Synthetic primer
gcatcaaggtactccggagtt

SEQ ID NO: 13297 - DNA, 28 bp, Artificial Sequence
  Description of Artificial Sequence: Synthetic primer
taagcataccgaccataactttaaggtg

SEQ ID NO: 13298 - DNA, 27 bp, Artificial Sequence
  Description of Artificial Sequence: Synthetic primer
aagtctacatacaggtttctcaatgcc

SEQ ID NO: 13299 - DNA, 22 bp, Artificial Sequence
  Description of Artificial Sequence: Synthetic primer
tcgccacatgagaaatggatca

SEQ ID NO: 13300 - DNA, 21 bp, Artificial Sequence
  Description of Artificial Sequence: Synthetic primer
tatggtggcgatggctaccta

SEQ ID NO: 13301 - DNA, 22 bp, Artificial Sequence
  Description of Artificial Sequence: Synthetic primer
caagagcttaccatcggtggat

SEQ ID NO: 13302 - DNA, 21 bp, Artificial Sequence
  Description of Artificial Sequence: Synthetic primer
ccctgtcacgttttgctgatg

SEQ ID NO: 13303 - DNA, 28 bp, Artificial Sequence
  Description of Artificial Sequence: Synthetic primer
gtaaaatttggaaaagcctttggactga

SEQ ID NO: 13304 - DNA, 21 bp, Artificial Sequence
  Description of Artificial Sequence: Synthetic primer
gccgtgaaagctggaatcatt

SEQ ID NO: 13305 - DNA, 28 bp, Artificial Sequence
  Description of Artificial Sequence: Synthetic primer
ctgatcttggtcaaatatacaacaggga

SEQ ID NO: 13306 - DNA, 18 bp, Artificial Sequence
  Description of Artificial Sequence: Synthetic primer
gacgacctcgagctcacc

SEQ ID NO: 13307 - DNA, 22 bp, Artificial Sequence
  Description of Artificial Sequence: Synthetic primer
taagctgtggctgcttcaagat

SEQ ID NO: 13308 - DNA, 21 bp, Artificial Sequence
  Description of Artificial Sequence: Synthetic primer
atacctcttcgaggagcccat

SEQ ID NO: 13309 - DNA, 22 bp, Artificial Sequence
  Description of Artificial Sequence: Synthetic primer
gccatcatatgtgcactttggt

SEQ ID NO: 13310 - DNA, 26 bp, Artificial Sequence
  Description of Artificial Sequence: Synthetic primer
catcctggaatgtagcatctctgaat

SEQ ID NO: 13311 - DNA, 21 bp, Artificial Sequence
  Description of Artificial Sequence: Synthetic primer
cgtgtgggagtatctgagggt

SEQ ID NO: 13312 - DNA, 19 bp, Artificial Sequence
  Description of Artificial Sequence: Synthetic primer
cacttcccgacacctccac

SEQ ID NO: 13313 - DNA, 23 bp, Artificial Sequence
  Description of Artificial Sequence: Synthetic primer
caggcggaggaaaaattcggata

SEQ ID NO: 13314 - DNA, 24 bp, Artificial Sequence
  Description of Artificial Sequence: Synthetic primer
cgttccttggcatcagttatgttg

SEQ ID NO: 13315 - DNA, 22 bp, Artificial Sequence
  Description of Artificial Sequence: Synthetic primer
cagttacccgtcatttccgtgt

SEQ ID NO: 13316 - DNA, 24 bp, Artificial Sequence
  Description of Artificial Sequence: Synthetic primer
ctagtgctgctgctaaggtttttg

SEQ ID NO: 13317 - DNA, 25 bp, Artificial Sequence
  Description of Artificial Sequence: Synthetic primer
ggtgcgaactgttgttatagtcatc

SEQ ID NO: 13318 - DNA, 18 bp, Artificial Sequence
  Description of Artificial Sequence: Synthetic primer
ggtgccggcatgtacact

SEQ ID NO: 13319 - DNA, 23 bp, Artificial Sequence
  Description of Artificial Sequence: Synthetic primer
catggtgtgatcgcattctttgg

SEQ ID NO: 13320 - DNA, 26 bp, Artificial Sequence
  Description of Artificial Sequence: Synthetic primer
ggagtagagattctggcatttgtttc

SEQ ID NO: 13321 - DNA, 21 bp, Artificial Sequence
  Description of Artificial Sequence: Synthetic primer
ggaaggaggtgaaccttggac

SEQ ID NO: 13322 - DNA, 29 bp, Artificial Sequence
  Description of Artificial Sequence: Synthetic primer
tgttactagatttggagaccaattttgtg

SEQ ID NO: 13323 - DNA, 21 bp, Artificial Sequence
  Description of Artificial Sequence: Synthetic primer
cgagagccccttcaagttcac

SEQ ID NO: 13324 - DNA, 24 bp, Artificial Sequence
  Description of Artificial Sequence: Synthetic primer
tatgtattttgtccagcaggcgaa

SEQ ID NO: 13325 - DNA, 22 bp, Artificial Sequence
  Description of Artificial Sequence: Synthetic primer
gtcaaaccccgctgctaatgta

SEQ ID NO: 13326 - DNA, 21 bp, Artificial Sequence
  Description of Artificial Sequence: Synthetic primer
gtctggacctggactacgaca

SEQ ID NO: 13327 - DNA, 28 bp, Artificial Sequence
  Description of Artificial Sequence: Synthetic primer
taggatttttggtgtagcaagttactca

SEQ ID NO: 13328 - DNA, 21 bp, Artificial Sequence
  Description of Artificial Sequence: Synthetic primer
cacgaacaagctcgactggat

SEQ ID NO: 13329 - DNA, 18 bp, Artificial Sequence
  Description of Artificial Sequence: Synthetic primer
cagcagctgcagagcgta

SEQ ID NO: 13330 - DNA, 28 bp, Artificial Sequence
  Description of Artificial Sequence: Synthetic primer
aatagcatagcttctatatttgcctgga

SEQ ID NO: 13331 - DNA, 21 bp, Artificial Sequence
  Description of Artificial Sequence: Synthetic primer
gatggcccctgagctcataag

SEQ ID NO: 13332 - DNA, 29 bp, Artificial Sequence
  Description of Artificial Sequence: Synthetic primer
agagggagggaagataatctatgtatacg

SEQ ID NO: 13333 - DNA, 25 bp, Artificial Sequence
  Description of Artificial Sequence: Synthetic primer
gcatatggagattcacaggcaaaat

SEQ ID NO: 13334 - DNA, 21 bp, Artificial Sequence
  Description of Artificial Sequence: Synthetic primer
accttggcaacttctttggca

SEQ ID NO: 13335 - DNA, 28 bp, Artificial Sequence
  Description of Artificial Sequence: Synthetic primer
tcctcctcattatacttgtctactgtct

SEQ ID NO: 13336 - DNA, 26 bp, Artificial Sequence
  Description of Artificial Sequence: Synthetic primer
ccaagcaaaagtgcaaggaattaact

SEQ ID NO: 13337 - DNA, 21 bp, Artificial Sequence
  Description of Artificial Sequence: Synthetic primer
ctgccgaatttgcacctcatc

SEQ ID NO: 13338 - DNA, 20 bp, Artificial Sequence
  Description of Artificial Sequence: Synthetic primer
ccaagcgtctcagaatgcct

SEQ ID NO: 13339 - DNA, 23 bp, Artificial Sequence
  Description of Artificial Sequence: Synthetic primer
cccagctccattctacctgtttg

SEQ ID NO: 13340 - DNA, 21 bp, Artificial Sequence
  Description of Artificial Sequence: Synthetic primer
ggtgctttacttggcgagtga

SEQ ID NO: 13341 - DNA, 20 bp, Artificial Sequence
  Description of Artificial Sequence: Synthetic primer
tacacctgctgtgacggaga

SEQ ID NO: 13342 - DNA, 25 bp, Artificial Sequence
  Description of Artificial Sequence: Synthetic primer
agacatcgctcagtacattgtatcc

SEQ ID NO: 13343 - DNA, 23 bp, Artificial Sequence
  Description of Artificial Sequence: Synthetic primer
agcaaatctgcttggagctatca

SEQ ID NO: 13344 - DNA, 21 bp, Artificial Sequence
  Description of Artificial Sequence: Synthetic primer
gccagcttaatctgagcctga

SEQ ID NO: 13345 - DNA, 21 bp, Artificial Sequence
  Description of Artificial Sequence: Synthetic primer
gagaagccctgaagttcgcaa

SEQ ID NO: 13346 - DNA, 26 bp, Artificial Sequence
  Description of Artificial Sequence: Synthetic primer
actaatagcaatcagtggtcatgagg

SEQ ID NO: 13347 - DNA, 21 bp, Artificial Sequence
  Description of Artificial Sequence: Synthetic primer
tgctacttcgttgaggctgtg

SEQ ID NO: 13348 - DNA, 22 bp, Artificial Sequence
  Description of Artificial Sequence: Synthetic primer
agtcggaagcccagtacactta

SEQ ID NO: 13349 - DNA, 23 bp, Artificial Sequence
  Description of Artificial Sequence: Synthetic primer
tggactcattccacctctctaca

SEQ ID NO: 13350 - DNA, 21 bp, Artificial Sequence
  Description of Artificial Sequence: Synthetic primer
gcgaagaagactgagggtgaa

SEQ ID NO: 13351 - DNA, 21 bp, Artificial Sequence
  Description of Artificial Sequence: Synthetic primer
aggatcgacatgtaggcctct

SEQ ID NO: 13352 - DNA, 27 bp, Artificial Sequence
  Description of Artificial Sequence: Synthetic primer
acttgcttttgaactcctatttcctga

SEQ ID NO: 13353 - DNA, 24 bp, Artificial Sequence
  Description of Artificial Sequence: Synthetic primer
cctctactggattgtgagagatgg

SEQ ID NO: 13354 - DNA, 20 bp, Artificial Sequence
  Description of Artificial Sequence: Synthetic primer
gcttttgggagggactttgc

SEQ ID NO: 13355 - DNA, 28 bp, Artificial Sequence
  Description of Artificial Sequence: Synthetic primer
ttcacatcacacatgcttttatgatagg

SEQ ID NO: 13356 - DNA, 23 bp, Artificial Sequence
  Description of Artificial Sequence: Synthetic primer
gcaaaattgttgatgtcgtggga

SEQ ID NO: 13357 - DNA, 29 bp, Artificial Sequence
  Description of Artificial Sequence: Synthetic primer
tctattacttgtgcaagatactgtcatgt

SEQ ID NO: 13358 - DNA, 21 bp, Artificial Sequence
  Description of Artificial Sequence: Synthetic primer
taggtcgcgctcaaggaaaat

SEQ ID NO: 13359 - DNA, 21 bp, Artificial Sequence
  Description of Artificial Sequence: Synthetic primer
gaggagaacgtcacccttgga

SEQ ID NO: 13360 - DNA, 21 bp, Artificial Sequence
  Description of Artificial Sequence: Synthetic primer
ctcaccgactcacaactgcat

SEQ ID NO: 13361 - DNA, 22 bp, Artificial Sequence
  Description of Artificial Sequence: Synthetic primer
cgcatctcctgtttgttatggc

SEQ ID NO: 13362 - DNA, 21 bp, Artificial Sequence
  Description of Artificial Sequence: Synthetic primer
ctcaagtccaagttcgcggat

SEQ ID NO: 13363 - DNA, 22 bp, Artificial Sequence
  Description of Artificial Sequence: Synthetic primer
actacggtgccacaagatgatg

SEQ ID NO: 13364 - DNA, 21 bp, Artificial Sequence
  Description of Artificial Sequence: Synthetic primer
cagaacgtcagggtcgtcttc

SEQ ID NO: 13365 - DNA, 22 bp, Artificial Sequence
  Description of Artificial Sequence: Synthetic primer
aatggatggtttggaactggct

SEQ ID NO: 13366 - DNA, 23 bp, Artificial Sequence
  Description of Artificial Sequence: Synthetic primer
tggataaggatgcacagaaggtt

SEQ ID NO: 13367 - DNA, 23 bp, Artificial Sequence
  Description of Artificial Sequence: Synthetic primer
actgaaatcgtttgctcacttgg

SEQ ID NO: 13368 - DNA, 24 bp, Artificial Sequence
  Description of Artificial Sequence: Synthetic primer
ggctatgagtttcaatttcgagca

SEQ ID NO: 13369 - DNA, 22 bp, Artificial Sequence
  Description of Artificial Sequence: Synthetic primer
tgcgttgtggacatttcatcct

SEQ ID NO: 13370 - DNA, 21 bp, Artificial Sequence
  Description of Artificial Sequence: Synthetic primer
gtccacacggagactcatgac

SEQ ID NO: 13371 - DNA, 22 bp, Artificial Sequence
  Description of Artificial Sequence: Synthetic primer
ggcgtccatcttctgctgatat

SEQ ID NO: 13372 - DNA, 20 bp, Artificial Sequence
  Description of Artificial Sequence: Synthetic primer
gcgacgaaggtaaagtgcga

SEQ ID NO: 13373 - DNA, 24 bp, Artificial Sequence
  Description of Artificial Sequence: Synthetic primer
aatagccatcaaggactagtgctg

SEQ ID NO: 13374 - DNA, 27 bp, Artificial Sequence
  Description of Artificial Sequence: Synthetic primer
tgattatgaccattggagctacattca

SEQ ID NO: 13375 - DNA, 23 bp, Artificial Sequence
  Description of Artificial Sequence: Synthetic primer
ggcctgaagaagcactttcgata

SEQ ID NO: 13376 - DNA, 27 bp, Artificial Sequence
  Description of Artificial Sequence: Synthetic primer
gctgctgctacttaaagtttgtacaga

SEQ ID NO: 13377 - DNA, 21 bp, Artificial Sequence
  Description of Artificial Sequence: Synthetic primer
ggtccaagttccggtcattct

SEQ ID NO: 13378 - DNA, 24 bp, Artificial Sequence
  Description of Artificial Sequence: Synthetic primer
tctgatcctgattcagtcctggaa

SEQ ID NO: 13379 - DNA, 22 bp, Artificial Sequence
  Description of Artificial Sequence: Synthetic primer
ttccctgggagatgaaaatgct

SEQ ID NO: 13380 - DNA, 22 bp, Artificial Sequence
  Description of Artificial Sequence: Synthetic primer
aataagcggcactgccatgtta

SEQ ID NO: 13381 - DNA, 23 bp, Artificial Sequence
  Description of Artificial Sequence: Synthetic primer
accaaccagtatgcaattgggaa

SEQ ID NO: 13382 - DNA, 21 bp, Artificial Sequence
  Description of Artificial Sequence: Synthetic primer
gcgcctgcaaggtaatgattt

SEQ ID NO: 13383 - DNA, 20 bp, Artificial Sequence
  Description of Artificial Sequence: Synthetic primer
tcaccgtcgagaagctcatc

SEQ ID NO: 13384 - DNA, 21 bp, Artificial Sequence
  Description of Artificial Sequence: Synthetic primer
ccgcaaccaaatccaatggac

SEQ ID NO: 13385 - DNA, 21 bp, Artificial Sequence
  Description of Artificial Sequence: Synthetic primer
ggaaagctctcctgcagaagt

SEQ ID NO: 13386 - DNA, 21 bp, Artificial Sequence
  Description of Artificial Sequence: Synthetic primer
cggaagttgaatgacgccaag

SEQ ID NO: 13387 - DNA, 22 bp, Artificial Sequence
  Description of Artificial Sequence: Synthetic primer
tcagacatgcatgaaaggctca

SEQ ID NO: 13388 - DNA, 28 bp, Artificial Sequence
  Description of Artificial Sequence: Synthetic primer
cagctttatgttctgaacaagatgtgtt

SEQ ID NO: 13389 - DNA, 25 bp, Artificial Sequence
  Description of Artificial Sequence: Synthetic primer
gcattgcttctcgtttactagactg

SEQ ID NO: 13390 - DNA, 23 bp, Artificial Sequence
  Description of Artificial Sequence: Synthetic primer
ggtttacagcaattacacagcca

SEQ ID NO: 13391 - DNA, 23 bp, Artificial Sequence
  Description of Artificial Sequence: Synthetic primer
agtagtcgacctcggctattaca

SEQ ID NO: 13392 - DNA, 25 bp, Artificial Sequence
  Description of Artificial Sequence: Synthetic primer
tgagctctgatgatgttgacaagtt

SEQ ID NO: 13393 - DNA, 21 bp, Artificial Sequence
  Description of Artificial Sequence: Synthetic primer
cagattgcacgtccggttatg

SEQ ID NO: 13394 - DNA, 24 bp, Artificial Sequence
  Description of Artificial Sequence: Synthetic primer
cgactcatcgaagtcagaatcctc

SEQ ID NO: 13395 - DNA, 20 bp, Artificial Sequence
  Description of Artificial Sequence: Synthetic primer
tctcctggcggtctttgaga

SEQ ID NO: 13396 - DNA, 25 bp, Artificial Sequence
  Description of Artificial Sequence: Synthetic primer
cttattgagttctatgctccctggt

SEQ ID NO: 13397 - DNA, 26 bp, Artificial Sequence
  Description of Artificial Sequence: Synthetic primer
cttcctctagatcctttgcttcctct

SEQ ID NO: 13398 - DNA, 28 bp, Artificial Sequence
  Description of Artificial Sequence: Synthetic primer
agtgtggtgagaattcttacatttttgg

SEQ ID NO: 13399 - DNA, 22 bp, Artificial Sequence
  Description of Artificial Sequence: Synthetic primer
ggtgacaaatctggtagctgga

SEQ ID NO: 13400 - DNA, 21 bp, Artificial Sequence
  Description of Artificial Sequence: Synthetic primer
atggctggaactggatgttct

SEQ ID NO: 13401 - DNA, 22 bp, Artificial Sequence
  Description of Artificial Sequence: Synthetic primer
ttgcaaaaccctaccatgatgc

SEQ ID NO: 13402 - DNA, 21 bp, Artificial Sequence
  Description of Artificial Sequence: Synthetic primer
ggtcttcagttttgccgagga

SEQ ID NO: 13403 - DNA, 24 bp, Artificial Sequence
  Description of Artificial Sequence: Synthetic primer
gaggacgagcgaggttaattatgt

SEQ ID NO: 13404 - DNA, 22 bp, Artificial Sequence
  Description of Artificial Sequence: Synthetic primer
ggatgctagagctgccatagaa

SEQ ID NO: 13405 - DNA, 28 bp, Artificial Sequence
  Description of Artificial Sequence: Synthetic primer
ggtggaaatcactcgatgaaataaatcg

SEQ ID NO: 13406 - DNA, 27 bp, Artificial Sequence
  Description of Artificial Sequence: Synthetic primer
gagattgactatcttgtagtggatgct

SEQ ID NO: 13407 - DNA, 24 bp, Artificial Sequence
  Description of Artificial Sequence: Synthetic primer
gtccaagcttatagagccacgtag

SEQ ID NO: 13408 - DNA, 26 bp, Artificial Sequence
  Description of Artificial Sequence: Synthetic primer
tgcacacaccatgtatactatcgatt

SEQ ID NO: 13409 - DNA, 22 bp, Artificial Sequence
  Description of Artificial Sequence: Synthetic primer
tccatcaatggccttgtgaaca

SEQ ID NO: 13410 - DNA, 26 bp, Artificial Sequence
  Description of Artificial Sequence: Synthetic primer
tgttttctcaagttgtgagggtttca

SEQ ID NO: 13411 - DNA, 23 bp, Artificial Sequence
  Description of Artificial Sequence: Synthetic primer
tgccactgtcaacatcattttcc

SEQ ID NO: 13412 - DNA, 26 bp, Artificial Sequence
  Description of Artificial Sequence: Synthetic primer
tccagatagatagcttccaaaccaga

SEQ ID NO: 13413 - DNA, 28 bp, Artificial Sequence
  Description of Artificial Sequence: Synthetic primer
aaggagacaatataatatgtggccaagt

SEQ ID NO: 13414 - DNA, 21 bp, Artificial Sequence
  Description of Artificial Sequence: Synthetic primer
gtggagtccaagttcgacgac

SEQ ID NO: 13415 - DNA, 22 bp, Artificial Sequence
  Description of Artificial Sequence: Synthetic primer
tgcagaagttcttgggaagtca

SEQ ID NO: 13416 - DNA, 21 bp, Artificial Sequence
  Description of Artificial Sequence: Synthetic primer
gctcctgcagctgagtctaat

SEQ ID NO: 13417 - DNA, 26 bp, Artificial Sequence
  Description of Artificial Sequence: Synthetic primer
gattccttcttgatctatgccctcct

SEQ ID NO: 13418 - DNA, 27 bp, Artificial Sequence
  Description of Artificial Sequence: Synthetic primer
gtttggaatttactggatgcacagaga

SEQ ID NO: 13419 - DNA, 25 bp, Artificial Sequence
  Description of Artificial Sequence: Synthetic primer
gctttgaggaactcgtactgaagat

SEQ ID NO: 13420 - DNA, 21 bp, Artificial Sequence
  Description of Artificial Sequence: Synthetic primer
catcgttgctctcgtcacaga

SEQ ID NO: 13421 - DNA, 22 bp, Artificial Sequence
  Description of Artificial Sequence: Synthetic primer
gggcatatctggctatctggga

SEQ ID NO: 13422 - DNA, 24 bp, Artificial Sequence
  Description of Artificial Sequence: Synthetic primer
gctgctcttcttagacagacagac

SEQ ID NO: 13423 - DNA, 27 bp, Artificial Sequence
  Description of Artificial Sequence: Synthetic primer
actggtgttacagatcattcatcttgt

SEQ ID NO: 13424 - DNA, 21 bp, Artificial Sequence
  Description of Artificial Sequence: Synthetic primer
accgacaagcagagctgaatt

SEQ ID NO: 13425 - DNA, 23 bp, Artificial Sequence
  Description of Artificial Sequence: Synthetic primer
tcaccatttgggttcacaagtca

SEQ ID NO: 13426 - DNA, 22 bp, Artificial Sequence
  Description of Artificial Sequence: Synthetic primer
gagcagtgcaacaccaactgta

SEQ ID NO: 13427 - DNA, 21 bp, Artificial Sequence
  Description of Artificial Sequence: Synthetic primer
gcgccacactcaagagatacc

SEQ ID NO: 13428 - DNA, 28 bp, Artificial Sequence
  Description of Artificial Sequence: Synthetic primer
ggtgtacaagaatatatcgaagctgcaa

SEQ ID NO: 13429 - DNA, 21 bp, Artificial Sequence
  Description of Artificial Sequence: Synthetic primer
ccacatggagctgaggaagaa

SEQ ID NO: 13430 - DNA, 21 bp, Artificial Sequence
  Description of Artificial Sequence: Synthetic primer
agtcgtggcagatggagatga

SEQ ID NO: 13431 - DNA, 27 bp, Artificial Sequence
  Description of Artificial Sequence: Synthetic primer
catggaccgatactagtgtaactgtca

SEQ ID NO: 13432 - DNA, 21 bp, Artificial Sequence
  Description of Artificial Sequence: Synthetic primer
ggtcaagacggactggatcat

SEQ ID NO: 13433 - DNA, 27 bp, Artificial Sequence
  Description of Artificial Sequence: Synthetic primer
aaagaatatacaccaccttgctcatct

SEQ ID NO: 13434 - DNA, 19 bp, Artificial Sequence
  Description of Artificial Sequence: Synthetic primer
ccacagcacctgtgttgtc

SEQ ID NO: 13435 - DNA, 24 bp, Artificial Sequence
  Description of Artificial Sequence: Synthetic primer
aaggaaaaagagctttccggtgaa

SEQ ID NO: 13436 - DNA, 22 bp, Artificial Sequence
  Description of Artificial Sequence: Synthetic primer
ttgacggtgatgaactgctaca

SEQ ID NO: 13437 - DNA, 22 bp, Artificial Sequence
  Description of Artificial Sequence: Synthetic primer
ggaagcgatccagagaatgagg

SEQ ID NO: 13438 - DNA, 25 bp, Artificial Sequence
  Description of Artificial Sequence: Synthetic primer
gttgtgcaatgaccatgagatgaaa

SEQ ID NO: 13439 - DNA, 21 bp, Artificial Sequence
  Description of Artificial Sequence: Synthetic primer
tcagttcaaggagctgcagat

SEQ ID NO: 13440 - DNA, 21 bp, Artificial Sequence
  Description of Artificial Sequence: Synthetic primer
aaccggaggtacaacacagtt

SEQ ID NO: 13441 - DNA, 22 bp, Artificial Sequence
  Description of Artificial Sequence: Synthetic primer
cgttctgggttcatctactggt

SEQ ID NO: 13442 - DNA, 22 bp, Artificial Sequence
  Description of Artificial Sequence: Synthetic primer
gtactactacgtccgcaacgac

SEQ ID NO: 13443 - DNA, 21 bp, Artificial Sequence
  Description of Artificial Sequence: Synthetic primer
aggaatatccgatggctgctc

SEQ ID NO: 13444 - DNA, 27 bp, Artificial Sequence
  Description of Artificial Sequence: Synthetic primer
taaacccatacagattatttcgttcgc

SEQ ID NO: 13445 - DNA, 28 bp, Artificial Sequence
  Description of Artificial Sequence: Synthetic primer
tatgacatcagaaattacacagctttgc

SEQ ID NO: 13446 - DNA, 19 bp, Artificial Sequence
  Description of Artificial Sequence: Synthetic primer
ggtgctggagcctggacta

SEQ ID NO: 13447 - DNA, 23 bp, Artificial Sequence
  Description of Artificial Sequence: Synthetic primer
gtagaagacttcagtgcgcaaac

SEQ ID NO: 13448 - DNA, 22 bp, Artificial Sequence
  Description of Artificial Sequence: Synthetic primer
gtcaacccgatgatggtcaatc

SEQ ID NO: 13449 - DNA, 25 bp, Artificial Sequence
  Description of Artificial Sequence: Synthetic primer
ccttattgtagcttggccaaaaagt

SEQ ID NO: 13450 - DNA, 21 bp, Artificial Sequence
  Description of Artificial Sequence: Synthetic primer
caagtctggaccgtcgttgta

SEQ ID NO: 13451 - DNA, 22 bp, Artificial Sequence
  Description of Artificial Sequence: Synthetic primer
atcccttcctaacaaagcgact

SEQ ID NO: 13452 - DNA, 22 bp, Artificial Sequence
  Description of Artificial Sequence: Synthetic primer
accaaccatctcctgtgctgta

SEQ ID NO: 13453 - DNA, 25 bp, Artificial Sequence
  Description of Artificial Sequence: Synthetic primer
gttggaccagatgttgaagtattgg

SEQ ID NO: 13454 - DNA, 21 bp, Artificial Sequence
  Description of Artificial Sequence: Synthetic primer
cgcagatgctggaagtcttgt

SEQ ID NO: 13455 - DNA, 23 bp, Artificial Sequence
  Description of Artificial Sequence: Synthetic primer
ccgataagacatacacccctgac

SEQ ID NO: 13456 - DNA, 21 bp, Artificial Sequence
  Description of Artificial Sequence: Synthetic primer
ggagctaaagtgaggcaccat

SEQ ID NO: 13457 - DNA, 21 bp, Artificial Sequence
  Description of Artificial Sequence: Synthetic primer
cgaagaggctcaagaccatgt

SEQ ID NO: 13458 - DNA, 21 bp, Artificial Sequence
  Description of Artificial Sequence: Synthetic primer
gaggtgggcagttgtgtaaca

SEQ ID NO: 13459 - DNA, 21 bp, Artificial Sequence
  Description of Artificial Sequence: Synthetic primer
gtttcaaggaccaccatgcct

SEQ ID NO: 13460 - DNA, 26 bp, Artificial Sequence
  Description of Artificial Sequence: Synthetic primer
gtctaatggccttattacaagcagca

SEQ ID NO: 13461 - DNA, 22 bp, Artificial Sequence
  Description of Artificial Sequence: Synthetic primer
gtgggctgagctagagatcatg

SEQ ID NO: 13462 - DNA, 21 bp, Artificial Sequence
  Description of Artificial Sequence: Synthetic primer
ctgcacacaatgggtggatct

SEQ ID NO: 13463 - DNA, 22 bp, Artificial Sequence
  Description of Artificial Sequence: Synthetic primer
cttgtttagtgactgcccacca

SEQ ID NO: 13464 - DNA, 21 bp, Artificial Sequence
  Description of Artificial Sequence: Synthetic primer
cctcgattgctcgatttgctt

SEQ ID NO: 13465 - DNA, 24 bp, Artificial Sequence
  Description of Artificial Sequence: Synthetic primer
catgacactccaatacctcaagga

SEQ ID NO: 13466 - DNA, 24 bp, Artificial Sequence
  Description of Artificial Sequence: Synthetic primer
ggagattatggacatgatgccagt

SEQ ID NO: 13467 - DNA, 26 bp, Artificial Sequence
  Description of Artificial Sequence: Synthetic primer
cacattccccatgaaatcatcctact

SEQ ID NO: 13468 - DNA, 21 bp, Artificial Sequence
  Description of Artificial Sequence: Synthetic primer
tggactaccgttacccggtat

SEQ ID NO: 13469 - DNA, 29 bp, Artificial Sequence
  Description of Artificial Sequence: Synthetic primer
tgaagagattgaaaacatgctgcagaata

SEQ ID NO: 13470 - DNA, 21 bp, Artificial Sequence
  Description of Artificial Sequence: Synthetic primer
ggttcgagctgctggaactta

SEQ ID NO: 13471 - DNA, 22 bp, Artificial Sequence
  Description of Artificial Sequence: Synthetic primer
tgcagtagcattcaagtcctgt

SEQ ID NO: 13472 - DNA, 18 bp, Artificial Sequence
  Description of Artificial Sequence: Synthetic primer
ggcagtcactgctgcatg

SEQ ID NO: 13473 - DNA, 23 bp, Artificial Sequence
  Description of Artificial Sequence: Synthetic primer
accttccgtccaaaggttaaaga

SEQ ID NO: 13474 - DNA, 21 bp, Artificial Sequence
  Description of Artificial Sequence: Synthetic primer
cccgactcatatccgtggttg

SEQ ID NO: 13475 - DNA, 22 bp, Artificial Sequence
  Description of Artificial Sequence: Synthetic primer
gagggtagccatgttctcatca

SEQ ID NO: 13476 - DNA, 21 bp, Artificial Sequence
  Description of Artificial Sequence: Synthetic primer
gaactgctcagggtcttcctt

SEQ ID NO: 13477 - DNA, 24 bp, Artificial Sequence
  Description of Artificial Sequence: Synthetic primer
tgctgatttacgatggtttgcatt

SEQ ID NO: 13478 - DNA, 21 bp, Artificial Sequence
  Description of Artificial Sequence: Synthetic primer
gcctggacatgaagtatcgct

SEQ ID NO: 13479 - DNA, 27 bp, Artificial Sequence
  Description of Artificial Sequence: Synthetic primer
atgatggtaaaactggatgtctcacaa

SEQ ID NO: 13480 - DNA, 24 bp, Artificial Sequence
  Description of Artificial Sequence: Synthetic primer
ggaaagctgtccaggaattctacc

SEQ ID NO: 13481 - DNA, 23 bp, Artificial Sequence
  Description of Artificial Sequence: Synthetic primer
caagtacaccttggatgcctttc

SEQ ID NO: 13482 - DNA, 21 bp, Artificial Sequence
  Description of Artificial Sequence: Synthetic primer
gtcgccagatgctcagatcac

SEQ ID NO: 13483 - DNA, 21 bp, Artificial Sequence
  Description of Artificial Sequence: Synthetic primer
atctatgtaaggcccctgggt

SEQ ID NO: 13484 - DNA, 23 bp, Artificial Sequence
  Description of Artificial Sequence: Synthetic primer
gaagctggttggtatgggttttg

SEQ ID NO: 13485 - DNA, 21 bp, Artificial Sequence
  Description of Artificial Sequence: Synthetic primer
aacctgtgattgagagcgagt

SEQ ID NO: 13486 - DNA, 27 bp, Artificial Sequence
  Description of Artificial Sequence: Synthetic primer
taggtattacatatgtgtctgccatgc

SEQ ID NO: 13487 - DNA, 21 bp, Artificial Sequence
  Description of Artificial Sequence: Synthetic primer
gaggacacccccaatttcgtc

SEQ ID NO: 13488 - DNA, 27 bp, Artificial Sequence
  Description of Artificial Sequence: Synthetic primer
caaggatgatccatctttgaagcctat

SEQ ID NO: 13489 - DNA, 21 bp, Artificial Sequence
  Description of Artificial Sequence: Synthetic primer
gcgtggaaagtggtctcttca

SEQ ID NO: 13490 - DNA, 22 bp, Artificial Sequence
  Description of Artificial Sequence: Synthetic primer
gtcggaagaactcagtagggtt

SEQ ID NO: 13491 - DNA, 24 bp, Artificial Sequence
  Description of Artificial Sequence: Synthetic primer
tcctctttcgccatccaaaaattg

SEQ ID NO: 13492 - DNA, 21 bp, Artificial Sequence
  Description of Artificial Sequence: Synthetic primer
ctggttagcagtcagcctgag

SEQ ID NO: 13493 - DNA, 21 bp, Artificial Sequence
  Description of Artificial Sequence: Synthetic primer
ctgcccaaaggcgaatttctg

SEQ ID NO: 13494 - DNA, 28 bp, Artificial Sequence
  Description of Artificial Sequence: Synthetic primer
aaggatgtgtacctgtcatgaaaaagaa

SEQ ID NO: 13495 - DNA, 28 bp, Artificial Sequence
  Description of Artificial Sequence: Synthetic primer
cgtcgaccttaaattttgttgttaccat

SEQ ID NO: 13496 - DNA, 24 bp, Artificial Sequence
  Description of Artificial Sequence: Synthetic primer
gttatttacgctggtgtacctcct

SEQ ID NO: 13497 - DNA, 21 bp, Artificial Sequence
  Description of Artificial Sequence: Synthetic primer
ccgtcctttgcctgtgaatga

SEQ ID NO: 13498 - DNA, 21 bp, Artificial Sequence
  Description of Artificial Sequence: Synthetic primer
cttttccgattttggcgcaag

SEQ ID NO: 13499 - DNA, 24 bp, Artificial Sequence
  Description of Artificial Sequence: Synthetic primer
gagctgttaaaaagactgcagtcc

SEQ ID NO: 13500 - DNA, 27 bp, Artificial Sequence
  Description of Artificial Sequence: Synthetic primer
tacaatgtcagacaaagaaccagtacc

SEQ ID NO: 13501 - DNA, 21 bp, Artificial Sequence
  Description of Artificial Sequence: Synthetic primer
cctccggagatacaaccgtct

SEQ ID NO: 13502 - DNA, 24 bp, Artificial Sequence
  Description of Artificial Sequence: Synthetic primer
ggatggtcttgtcgacttcaaaga

SEQ ID NO: 13503 - DNA, 25 bp, Artificial Sequence
  Description of Artificial Sequence: Synthetic primer
gttggtgtattcttattgcgcagat

SEQ ID NO: 13504 - DNA, 22 bp, Artificial Sequence
  Description of Artificial Sequence: Synthetic primer
tgatgcaggtacgtggcattta

SEQ ID NO: 13505 - DNA, 21 bp, Artificial Sequence
  Description of Artificial Sequence: Synthetic primer
caggttctacatcggcctcac

SEQ ID NO: 13506 - DNA, 21 bp, Artificial Sequence
  Description of Artificial Sequence: Synthetic primer
tgccatccatccatccatgtg

SEQ ID NO: 13507 - DNA, 21 bp, Artificial Sequence
  Description of Artificial Sequence: Synthetic primer
gctcaatagacacgtgtgcga

SEQ ID NO: 13508 - DNA, 25 bp, Artificial Sequence
  Description of Artificial Sequence: Synthetic primer
tcaaacaggttgacatagcaattcc

SEQ ID NO: 13509 - DNA, 27 bp, Artificial Sequence
  Description of Artificial Sequence: Synthetic primer
cgaacagggaacttgtcatcttttaga

SEQ ID NO: 13510 - DNA, 26 bp, Artificial Sequence
  Description of Artificial Sequence: Synthetic primer
acagttgtggaagaaataagcgatct

SEQ ID NO: 13511 - DNA, 24 bp, Artificial Sequence
  Description of Artificial Sequence: Synthetic primer
ggtactccagaagccattaagctc

SEQ ID NO: 13512 - DNA, 28 bp, Artificial Sequence
  Description of Artificial Sequence: Synthetic primer
agctagttgatatggaaacgagctattt

SEQ ID NO: 13513 - DNA, 21 bp, Artificial Sequence
  Description of Artificial Sequence: Synthetic primer
cgatttggacgacgaagtcag

SEQ ID NO: 13514 - DNA, 22 bp, Artificial Sequence
  Description of Artificial Sequence: Synthetic primer
cccgcaccaagatcttgagtat

SEQ ID NO: 13515 - DNA, 19 bp, Artificial Sequence
  Description of Artificial Sequence: Synthetic primer
tcccaatctggtcgtccgt

SEQ ID NO: 13516 - DNA, 25 bp, Artificial Sequence
  Description of Artificial Sequence: Synthetic primer
ggttctacaagtctgttcttccagt

SEQ ID NO: 13517 - DNA, 27 bp, Artificial Sequence
  Description of Artificial Sequence: Synthetic primer
cggtattgcactgatgttttcgattac

SEQ ID NO: 13518 - DNA, 23 bp, Artificial Sequence
  Description of Artificial Sequence: Synthetic primer
gctacgttttgtagcggatcaaa

SEQ ID NO: 13519 - DNA, 21 bp, Artificial Sequence
  Description of Artificial Sequence: Synthetic primer
ctgctgctgatgcaaggttac

SEQ ID NO: 13520 - DNA, 26 bp, Artificial Sequence
  Description of Artificial Sequence: Synthetic primer
tctctgtttcagtgaaaaactcctgt

SEQ ID NO: 13521 - DNA, 21 bp, Artificial Sequence
  Description of Artificial Sequence: Synthetic primer
gtccagggtgaccagagaact

SEQ ID NO: 13522 - DNA, 23 bp, Artificial Sequence
  Description of Artificial Sequence: Synthetic primer
gctcagggtatgagaatggtgtg

SEQ ID NO: 13523 - DNA, 24 bp, Artificial Sequence
  Description of Artificial Sequence: Synthetic primer
ccgttcttgagggtggataatctt

SEQ ID NO: 13524 - DNA, 27 bp, Artificial Sequence
  Description of Artificial Sequence: Synthetic primer
ccaattttctcatgctttggagacatc

SEQ ID NO: 13525 - DNA, 26 bp, Artificial Sequence
  Description of Artificial Sequence: Synthetic primer
attcgatgatgatagcttgtaagcga

SEQ ID NO: 13526 - DNA, 25 bp, Artificial Sequence
  Description of Artificial Sequence: Synthetic primer
cctccttattagctaacagcatgcc

SEQ ID NO: 13527 - DNA, 24 bp, Artificial Sequence
  Description of Artificial Sequence: Synthetic primer
gggtccaacaaaagtgaggatgag

SEQ ID NO: 13528 - DNA, 23 bp, Artificial Sequence
  Description of Artificial Sequence: Synthetic primer
gacactagagccattgctgaaca

SEQ ID NO: 13529 - DNA, 19 bp, Artificial Sequence
  Description of Artificial Sequence: Synthetic primer
ggatggtcgacaggaagcg

SEQ ID NO: 13530 - DNA, 23 bp, Artificial Sequence
  Description of Artificial Sequence: Synthetic primer
tgcatctgagtcagtagcagtac

SEQ ID NO: 13531 - DNA, 20 bp, Artificial Sequence
  Description of Artificial Sequence: Synthetic primer
ctccgccagatcgggatcta

SEQ ID NO: 13532 - DNA, 21 bp, Artificial Sequence
  Description of Artificial Sequence: Synthetic primer
gagcctcggcgaagcatatta

SEQ ID NO: 13533 - DNA, 21 bp, Artificial Sequence
  Description of Artificial Sequence: Synthetic primer
tctctgcagtcagagccatca

SEQ ID NO: 13534 - DNA, 25 bp, Artificial Sequence
  Description of Artificial Sequence: Synthetic primer
ccttgtaaaggacgattcatgcttc

SEQ ID NO: 13535 - DNA, 21 bp, Artificial Sequence
  Description of Artificial Sequence: Synthetic primer
gctcatgagtgggagaagcat

SEQ ID NO: 13536 - DNA, 28 bp, Artificial Sequence
  Description of Artificial Sequence: Synthetic primer
acaataacaggagctctacatatcatgc

SEQ ID NO: 13537 - DNA, 26 bp, Artificial Sequence
  Description of Artificial Sequence: Synthetic primer
gtgtttggtcttagaacatctggctt

SEQ ID NO: 13538 - DNA, 23 bp, Artificial Sequence
  Description of Artificial Sequence: Synthetic primer
ccaccaccaccattcacaaaatg

SEQ ID NO: 13539 - DNA, 22 bp, Artificial Sequence
  Description of Artificial Sequence: Synthetic primer
acgtgatcctagtgcactgttg

SEQ ID NO: 13540 - DNA, 21 bp, Artificial Sequence
  Description of Artificial Sequence: Synthetic primer
gctgcctgaaaacgtacaacg

SEQ ID NO: 13541 - DNA, 21 bp, Artificial Sequence
  Description of Artificial Sequence: Synthetic primer
ggcgtcaaacaactgagcaag

SEQ ID NO: 13542 - DNA, 24 bp, Artificial Sequence
  Description of Artificial Sequence: Synthetic primer
gcagactactgaacaacctgaaca

SEQ ID NO: 13543 - DNA, 22 bp, Artificial Sequence
  Description of Artificial Sequence: Synthetic primer
ccttaaagagcttgcaactgct

SEQ ID NO: 13544 - DNA, 23 bp, Artificial Sequence
  Description of Artificial Sequence: Synthetic primer
ccaacgacacaatcaagcttgac

SEQ ID NO: 13545 - DNA, 28 bp, Artificial Sequence
  Description of Artificial Sequence: Synthetic primer
tgttttaaagttttgcctgatgctatgt

SEQ ID NO: 13546 - DNA, 21 bp, Artificial Sequence
  Description of Artificial Sequence: Synthetic primer
aggcacccatacccttacgaa

SEQ ID NO: 13547 - DNA, 28 bp, Artificial Sequence
  Description of Artificial Sequence: Synthetic primer
acaattaccattgcactgacattagatc

SEQ ID NO: 13548 - DNA, 24 bp, Artificial Sequence
  Description of Artificial Sequence: Synthetic primer
gttttgtggctgttatggatggga

SEQ ID NO: 13549 - DNA, 21 bp, Artificial Sequence
  Description of Artificial Sequence: Synthetic primer
ataccctgaggtggctgtgaa

SEQ ID NO: 13550 - DNA, 22 bp, Artificial Sequence
  Description of Artificial Sequence: Synthetic primer
aaaatttgtcggaggcctggta

SEQ ID NO: 13551 - DNA, 22 bp, Artificial Sequence
  Description of Artificial Sequence: Synthetic primer
gggtgagaaactggatgttgga

SEQ ID NO: 13552 - DNA, 26 bp, Artificial Sequence
  Description of Artificial Sequence: Synthetic primer
gggacgaaatcaagatgccatattag

SEQ ID NO: 13553 - DNA, 19 bp, Artificial Sequence
  Description of Artificial Sequence: Synthetic primer
gaccacccaggccattgtc

SEQ ID NO: 13554 - DNA, 24 bp, Artificial Sequence
  Description of Artificial Sequence: Synthetic primer
ggtttgcacttggaaacatgattg

SEQ ID NO: 13555 - DNA, 21 bp, Artificial Sequence
  Description of Artificial Sequence: Synthetic primer
atttgggccacttcgaggatt

SEQ ID NO: 13556 - DNA, 21 bp, Artificial Sequence
  Description of Artificial Sequence: Synthetic primer
gttccagtatgtcagcaccct

SEQ ID NO: 13557 - DNA, 25 bp, Artificial Sequence
  Description of Artificial Sequence: Synthetic primer
agaaagctgagtgaagcaaagattg

SEQ ID NO: 13558 - DNA, 27 bp, Artificial Sequence
  Description of Artificial Sequence: Synthetic primer
ccacatgaagtgtttctgagttaccat

SEQ ID NO: 13559 - DNA, 21 bp, Artificial Sequence
  Description of Artificial Sequence: Synthetic primer
gtgagggtattgccaagtgct

SEQ ID NO: 13560 - DNA, 24 bp, Artificial Sequence
  Description of Artificial Sequence: Synthetic primer
agaacctgaagaaaacagccactc

SEQ ID NO: 13561 - DNA, 23 bp, Artificial Sequence
  Description of Artificial Sequence: Synthetic primer
taatgtagcatcatggagtgcga

SEQ ID NO: 13562 - DNA, 28 bp, Artificial Sequence
  Description of Artificial Sequence: Synthetic primer
cattggtagaagtttgttatttcgtcgt

SEQ ID NO: 13563 - DNA, 27 bp, Artificial Sequence
  Description of Artificial Sequence: Synthetic primer
atttttgatttaggatctgcacagctt

SEQ ID NO: 13564 - DNA, 22 bp, Artificial Sequence
  Description of Artificial Sequence: Synthetic primer
cattgctaagtggcctcttgtg

SEQ ID NO: 13565 - DNA, 27 bp, Artificial Sequence
  Description of Artificial Sequence: Synthetic primer
gaaacatgatgtcaaagtttgcacaac

SEQ ID NO: 13566 - DNA, 18 bp, Artificial Sequence
  Description of Artificial Sequence: Synthetic primer
ggaccatgcgccttggat

SEQ ID NO: 13567 - DNA, 27 bp, Artificial Sequence
  Description of Artificial Sequence: Synthetic primer
ttctactccgtacatttctactgttgg

SEQ ID NO: 13568 - DNA, 26 bp, Artificial Sequence
  Description of Artificial Sequence: Synthetic primer
agatacccaagacgtaattgtagctc

SEQ ID NO: 13569 - DNA, 22 bp, Artificial Sequence
  Description of Artificial Sequence: Synthetic primer
gttgacattgagccagacgaga

SEQ ID NO: 13570 - DNA, 22 bp, Artificial Sequence
  Description of Artificial Sequence: Synthetic primer
gctggagacttcctcagtcttg

SEQ ID NO: 13571 - DNA, 18 bp, Artificial Sequence
  Description of Artificial Sequence: Synthetic primer
gtggacgctccaagtgag

SEQ ID NO: 13572 - DNA, 21 bp, Artificial Sequence
  Description of Artificial Sequence: Synthetic primer
caccctggatcaagcacatcc

SEQ ID NO: 13573 - DNA, 27 bp, Artificial Sequence
  Description of Artificial Sequence: Synthetic primer
tatcatcagggtcatcttcctcttagc

SEQ ID NO: 13574 - DNA, 20 bp, Artificial Sequence
  Description of Artificial Sequence: Synthetic primer
ggcacccatggttctgagag

SEQ ID NO: 13575 - DNA, 27 bp, Artificial Sequence
  Description of Artificial Sequence: Synthetic primer
ttcaaaatacaggagagaatgacccat

SEQ ID NO: 13576 - DNA, 23 bp, Artificial Sequence
  Description of Artificial Sequence: Synthetic primer
acttagccctcctcgatgagatt

SEQ ID NO: 13577 - DNA, 28 bp, Artificial Sequence
  Description of Artificial Sequence: Synthetic primer
tgttgttctttttagactcctgattcca

SEQ ID NO: 13578 - DNA, 27 bp, Artificial Sequence
  Description of Artificial Sequence: Synthetic primer
ggacgttgattacctccattcttctac

SEQ ID NO: 13579 - DNA, 23 bp, Artificial Sequence
  Description of Artificial Sequence: Synthetic primer
cccgaataactgacaactgacga

SEQ ID NO: 13580 - DNA, 19 bp, Artificial Sequence
  Description of Artificial Sequence: Synthetic primer
cagcagctgcagctactgg

SEQ ID NO: 13581 - DNA, 21 bp, Artificial Sequence
  Description of Artificial Sequence: Synthetic primer
atcatcaagtcggagccagca

SEQ ID NO: 13582 - DNA, 21 bp, Artificial Sequence
  Description of Artificial Sequence: Synthetic primer
gtttcggcaccgaatttcgat

SEQ ID NO: 13583 - DNA, 21 bp, Artificial Sequence
  Description of Artificial Sequence: Synthetic primer
tcactgctgtagaagcaccag

SEQ ID NO: 13584 - DNA, 28 bp, Artificial Sequence
  Description of Artificial Sequence: Synthetic primer
agtgtttacgtttgtttttgttgttgtc

SEQ ID NO: 13585 - DNA, 21 bp, Artificial Sequence
  Description of Artificial Sequence: Synthetic primer
gtgggcattcaccttcgtcat

SEQ ID NO: 13586 - DNA, 22 bp, Artificial Sequence
  Description of Artificial Sequence: Synthetic primer
gcacacaaataagtctgcctgt

SEQ ID NO: 13587 - DNA, 25 bp, Artificial Sequence
  Description of Artificial Sequence: Synthetic primer
cagaagcaacatgatgaacaggatg

SEQ ID NO: 13588 - DNA, 22 bp, Artificial Sequence
  Description of Artificial Sequence: Synthetic primer
cctttgagccaatcaagcctgt

SEQ ID NO: 13589 - DNA, 21 bp, Artificial Sequence
  Description of Artificial Sequence: Synthetic primer
gaagacagcaacccttctcct

SEQ ID NO: 13590 - DNA, 21 bp, Artificial Sequence
  Description of Artificial Sequence: Synthetic primer
ggcatctattccaagcccaac

SEQ ID NO: 13591 - DNA, 27 bp, Artificial Sequence
  Description of Artificial Sequence: Synthetic primer
gtgttgtaataagttgactgctacgtg

SEQ ID NO: 13592 - DNA, 21 bp, Artificial Sequence
  Description of Artificial Sequence: Synthetic primer
tttcagcaccgcctcaaagag

SEQ ID NO: 13593 - DNA, 24 bp, Artificial Sequence
  Description of Artificial Sequence: Synthetic primer
ggattttaaagggttggtgggatc

SEQ ID NO: 13594 - DNA, 29 bp, Artificial Sequence
  Description of Artificial Sequence: Synthetic primer
atggttaaagggattgagtttgcttaaga

SEQ ID NO: 13595 - DNA, 22 bp, Artificial Sequence
  Description of Artificial Sequence: Synthetic primer
cacaagatggaaatgctgctga

SEQ ID NO: 13596 - DNA, 26 bp, Artificial Sequence
  Description of Artificial Sequence: Synthetic primer
cctatctcttctcttacccgtcttgt

SEQ ID NO: 13597 - DNA, 21 bp, Artificial Sequence
  Description of Artificial Sequence: Synthetic primer
gaagctgacgccagactatga

SEQ ID NO: 13598 - DNA, 23 bp, Artificial Sequence
  Description of Artificial Sequence: Synthetic primer
tttgatgtggttcgagccatagt

SEQ ID NO: 13599 - DNA, 22 bp, Artificial Sequence
  Description of Artificial Sequence: Synthetic primer
agagctgtgagtgaaagggaag

SEQ ID NO: 13600 - DNA, 21 bp, Artificial Sequence
  Description of Artificial Sequence: Synthetic primer
cttctgggagagcatgctgtg

SEQ ID NO: 13601 - DNA, 25 bp, Artificial Sequence
  Description of Artificial Sequence: Synthetic primer
gcttgaagaacaacaaagagctgag

SEQ ID NO: 13602 - DNA, 23 bp, Artificial Sequence
  Description of Artificial Sequence: Synthetic primer
aagtcgatctggagtccaacaag

SEQ ID NO: 13603 - DNA, 21 bp, Artificial Sequence
  Description of Artificial Sequence: Synthetic primer
ggcatctgcatagccatctgt

SEQ ID NO: 13604 - DNA, 23 bp, Artificial Sequence
  Description of Artificial Sequence: Synthetic primer
ggcacggtatacgtactagatcg

SEQ ID NO: 13605 - DNA, 22 bp, Artificial Sequence
  Description of Artificial Sequence: Synthetic primer
cgaggagttgaaggctgaaagg

SEQ ID NO: 13606 - DNA, 25 bp, Artificial Sequence
  Description of Artificial Sequence: Synthetic primer
catcaacacgctgtacatagtatgc

SEQ ID NO: 13607 - DNA, 25 bp, Artificial Sequence
  Description of Artificial Sequence: Synthetic primer
cgaaaaggttttatgtgccgattgg

SEQ ID NO: 13608 - DNA, 21 bp, Artificial Sequence
  Description of Artificial Sequence: Synthetic primer
caagtgttggtgatgcagagg

SEQ ID NO: 13609 - DNA, 21 bp, Artificial Sequence
  Description of Artificial Sequence: Synthetic primer
gcaagcccgagaggtactaat

SEQ ID NO: 13610 - DNA, 23 bp, Artificial Sequence
  Description of Artificial Sequence: Synthetic primer
acacttactaatgaggcggcatg

SEQ ID NO: 13611 - DNA, 27 bp, Artificial Sequence
  Description of Artificial Sequence: Synthetic primer
agcgaataatattctacagggatggtc

SEQ ID NO: 13612 - DNA, 19 bp, Artificial Sequence
  Description of Artificial Sequence: Synthetic primer
tcggcccgaactacctcat

SEQ ID NO: 13613 - DNA, 21 bp, Artificial Sequence
  Description of Artificial Sequence: Synthetic primer
cgctggattttggcagactac

SEQ ID NO: 13614 - DNA, 21 bp, Artificial Sequence
  Description of Artificial Sequence: Synthetic primer
ttccagacgcaagatgtgatc

SEQ ID NO: 13615 - DNA, 19 bp, Artificial Sequence
  Description of Artificial Sequence: Synthetic primer
ggagggcacggacatggta

SEQ ID NO: 13616 - DNA, 27 bp, Artificial Sequence
  Description of Artificial Sequence: Synthetic primer
aattctattgttactgctagggctgga

SEQ ID NO: 13617 - DNA, 21 bp, Artificial Sequence
  Description of Artificial Sequence: Synthetic primer
caagaagtagagccgctccag

SEQ ID NO: 13618 - DNA, 23 bp, Artificial Sequence
  Description of Artificial Sequence: Synthetic primer
gtttatcttccgcagtttgctca

SEQ ID NO: 13619 - DNA, 22 bp, Artificial Sequence
  Description of Artificial Sequence: Synthetic primer
ggacagtggtgttgatcagctt

SEQ ID NO: 13620 - DNA, 21 bp, Artificial Sequence
  Description of Artificial Sequence: Synthetic primer
ggaggtaacagacggtgcaat

SEQ ID NO: 13621 - DNA, 23 bp, Artificial Sequence
  Description of Artificial Sequence: Synthetic primer
cccgacgggatcttcaagataaa

SEQ ID NO: 13622 - DNA, 28 bp, Artificial Sequence
  Description of Artificial Sequence: Synthetic primer
agtcaaattgaaattgtcttggataccg

SEQ ID NO: 13623 - DNA, 21 bp, Artificial Sequence
  Description of Artificial Sequence: Synthetic primer
gctgataaatggcgaccgaaa

SEQ ID NO: 13624 - DNA, 29 bp, Artificial Sequence
  Description of Artificial Sequence: Synthetic primer
ttagagagatccttgaaaaggagaagaag

SEQ ID NO: 13625 - DNA, 18 bp, Artificial Sequence
  Description of Artificial Sequence: Synthetic primer
acgaccctgaacggtgct

SEQ ID NO: 13626 - DNA, 22 bp, Artificial Sequence
  Description of Artificial Sequence: Synthetic primer
caatcgactccaagcctaatgc

SEQ ID NO: 13627 - DNA, 24 bp, Artificial Sequence
  Description of Artificial Sequence: Synthetic primer
gtcttcgggtacgacatcaactac

SEQ ID NO: 13628 - DNA, 21 bp, Artificial Sequence
  Description of Artificial Sequence: Synthetic primer
tggttcaaagcgggttcaact

SEQ ID NO: 13629 - DNA, 21 bp, Artificial Sequence
  Description of Artificial Sequence: Synthetic primer
aggtccatgctttgcttcctg

SEQ ID NO: 13630 - DNA, 21 bp, Artificial Sequence
  Description of Artificial Sequence: Synthetic primer
catatcgaagctgccagggat

SEQ ID NO: 13631 - DNA, 24 bp, Artificial Sequence
  Description of Artificial Sequence: Synthetic primer
gtgaacctggtgccatgtttattc

SEQ ID NO: 13632 - DNA, 23 bp, Artificial Sequence
  Description of Artificial Sequence: Synthetic primer
ccgatgtaaccaaaccactcctg

SEQ ID NO: 13633 - DNA, 27 bp, Artificial Sequence
  Description of Artificial Sequence: Synthetic primer
gtaatgccacttctggaaatagttcgt

SEQ ID NO: 13634 - DNA, 24 bp, Artificial Sequence
  Description of Artificial Sequence: Synthetic primer
gctgtttctgtgatattcctgcga

SEQ ID NO: 13635 - DNA, 21 bp, Artificial Sequence
  Description of Artificial Sequence: Synthetic primer
ccctttggcacccttttcatc

SEQ ID NO: 13636 - DNA, 23 bp, Artificial Sequence
  Description of Artificial Sequence: Synthetic primer
ccaaaggtagaggagttggttgc

SEQ ID NO: 13637 - DNA, 21 bp, Artificial Sequence
  Description of Artificial Sequence: Synthetic primer
tgatccttttcgccactggtc

SEQ ID NO: 13638 - DNA, 23 bp, Artificial Sequence
  Description of Artificial Sequence: Synthetic primer
ggaactccatgtctgagaagctc

SEQ ID NO: 13639 - DNA, 21 bp, Artificial Sequence
  Description of Artificial Sequence: Synthetic primer
atgacttgcttgcatgtgacg

SEQ ID NO: 13640 - DNA, 21 bp, Artificial Sequence
  Description of Artificial Sequence: Synthetic primer
gggagagcttggatttggtca

SEQ ID NO: 13641 - DNA, 28 bp, Artificial Sequence
  Description of Artificial Sequence: Synthetic primer
ttatttggaatctgcttatcgtgttcct

SEQ ID NO: 13642 - DNA, 25 bp, Artificial Sequence
  Description of Artificial Sequence: Synthetic primer
gaacgacagctgattgaaggatttc

SEQ ID NO: 13643 - DNA, 26 bp, Artificial Sequence
  Description of Artificial Sequence: Synthetic primer
cactgaacatgcatgtattgatggaa

SEQ ID NO: 13644 - DNA, 21 bp, Artificial Sequence
  Description of Artificial Sequence: Synthetic primer
gactgcattcggtggtgaaga

SEQ ID NO: 13645 - DNA, 27 bp, Artificial Sequence
  Description of Artificial Sequence: Synthetic primer
aaggaattgactgatatggaagatcgt

SEQ ID NO: 13646 - DNA, 23 bp, Artificial Sequence
  Description of Artificial Sequence: Synthetic primer
gcaaagccccattcatcttactg

SEQ ID NO: 13647 - DNA, 22 bp, Artificial Sequence
  Description of Artificial Sequence: Synthetic primer
cacagccaagcttgagcaaatt

SEQ ID NO: 13648 - DNA, 21 bp, Artificial Sequence
  Description of Artificial Sequence: Synthetic primer
cctatggctatggtggtggtc

SEQ ID NO: 13649 - DNA, 24 bp, Artificial Sequence
  Description of Artificial Sequence: Synthetic primer
gtgagcagcatctttcaatagcag

SEQ ID NO: 13650 - DNA, 23 bp, Artificial Sequence
  Description of Artificial Sequence: Synthetic primer
tgtggcagtaaggttaggctaag

SEQ ID NO: 13651 - DNA, 24 bp, Artificial Sequence
  Description of Artificial Sequence: Synthetic primer
aggcactatgagggatttcattgg

SEQ ID NO: 13652 - DNA, 25 bp, Artificial Sequence
  Description of Artificial Sequence: Synthetic primer
gggcaatataagtatggtggcaaaa

SEQ ID NO: 13653 - DNA, 21 bp, Artificial Sequence
  Description of Artificial Sequence: Synthetic primer
tcctatgttgacgaggctgga

SEQ ID NO: 13654 - DNA, 25 bp, Artificial Sequence
  Description of Artificial Sequence: Synthetic primer
aaagctttggaagctgagaagaatg

SEQ ID NO: 13655 - DNA, 19 bp, Artificial Sequence
  Description of Artificial Sequence: Synthetic primer
caatgcgtggagctagcga

SEQ ID NO: 13656 - DNA, 28 bp, Artificial Sequence
  Description of Artificial Sequence: Synthetic primer
tgctaggtttatagaagctgtgaaaagt

SEQ ID NO: 13657 - DNA, 23 bp, Artificial Sequence
  Description of Artificial Sequence: Synthetic primer
cagccggagttatccatagtgac

SEQ ID NO: 13658 - DNA, 22 bp, Artificial Sequence
  Description of Artificial Sequence: Synthetic primer
agtgaagaagcagcacttaggg

SEQ ID NO: 13659 - DNA, 21 bp, Artificial Sequence
  Description of Artificial Sequence: Synthetic primer
atcttcccacgaccgacacta

SEQ ID NO: 13660 - DNA, 28 bp, Artificial Sequence
  Description of Artificial Sequence: Synthetic primer
gaaagagtactatttcaaggctgatcgt

SEQ ID NO: 13661 - DNA, 22 bp, Artificial Sequence
  Description of Artificial Sequence: Synthetic primer
caagcatagaccgctcagagat

SEQ ID NO: 13662 - DNA, 22 bp, Artificial Sequence
  Description of Artificial Sequence: Synthetic primer
cgaaaataacttccaccgtgct

SEQ ID NO: 13663 - DNA, 26 bp, Artificial Sequence
  Description of Artificial Sequence: Synthetic primer
ctttgtcggattgcaaagggaataat

SEQ ID NO: 13664 - DNA, 21 bp, Artificial Sequence
  Description of Artificial Sequence: Synthetic primer
gtgggatcctcttacgctgaa

SEQ ID NO: 13665 - DNA, 21 bp, Artificial Sequence
  Description of Artificial Sequence: Synthetic primer
ctcctgtgcagggaaatccag

SEQ ID NO: 13666 - DNA, 23 bp, Artificial Sequence
  Description of Artificial Sequence: Synthetic primer
cagaccttcagcatccaaactgt

SEQ ID NO: 13667 - DNA, 21 bp, Artificial Sequence
  Description of Artificial Sequence: Synthetic primer
gaatgaaggttccccagctga

SEQ ID NO: 13668 - DNA, 21 bp, Artificial Sequence
  Description of Artificial Sequence: Synthetic primer
taatgctggtcgaggagctca

SEQ ID NO: 13669 - DNA, 21 bp, Artificial Sequence
  Description of Artificial Sequence: Synthetic primer
caagatccggcgttcaatcaa

SEQ ID NO: 13670 - DNA, 24 bp, Artificial Sequence
  Description of Artificial Sequence: Synthetic primer
tcttcattccctgttacaaagggt

SEQ ID NO: 13671 - DNA, 28 bp, Artificial Sequence
  Description of Artificial Sequence: Synthetic primer
gatgaacatttttgaccttaaggaatgg

SEQ ID NO: 13672 - DNA, 25 bp, Artificial Sequence
  Description of Artificial Sequence: Synthetic primer
gcctgaggttgatatcagtgatgaa

SEQ ID NO: 13673 - DNA, 24 bp, Artificial Sequence
  Description of Artificial Sequence: Synthetic primer
tctagtccggtaacccttctaagt

SEQ ID NO: 13674 - DNA, 28 bp, Artificial Sequence
  Description of Artificial Sequence: Synthetic primer
ggaaatctgttaatatgaaccctcaacc

SEQ ID NO: 13675 - DNA, 23 bp, Artificial Sequence
  Description of Artificial Sequence: Synthetic primer
cgcttcctctgtaaagatgtgga

SEQ ID NO: 13676 - DNA, 21 bp, Artificial Sequence
  Description of Artificial Sequence: Synthetic primer
gagggcaggacccatcttatc

SEQ ID NO: 13677 - DNA, 21 bp, Artificial Sequence
  Description of Artificial Sequence: Synthetic primer
gaggagaccgagaagtcgttc

SEQ ID NO: 13678 - DNA, 21 bp, Artificial Sequence
  Description of Artificial Sequence: Synthetic primer
gcggaggcggctttattaatg

SEQ ID NO: 13679 - DNA, 27 bp, Artificial Sequence
  Description of Artificial Sequence: Synthetic primer
tagaaaatctgttcgaggagaactcaa

SEQ ID NO: 13680 - DNA, 24 bp, Artificial Sequence
  Description of Artificial Sequence: Synthetic primer
cctcagataagtccagtgagaagg

SEQ ID NO: 13681 - DNA, 22 bp, Artificial Sequence
  Description of Artificial Sequence: Synthetic primer
tcgtgatgcctatcggaagaaa

SEQ ID NO: 13682 - DNA, 24 bp, Artificial Sequence
  Description of Artificial Sequence: Synthetic primer
aatgggtgttcgcaaagtcaaaat

SEQ ID NO: 13683 - DNA, 21 bp, Artificial Sequence
  Description of Artificial Sequence: Synthetic primer
ccgttgacgcaacttttcgtg

SEQ ID NO: 13684 - DNA, 28 bp, Artificial Sequence
  Description of Artificial Sequence: Synthetic primer
acaaacaatagttgtaggtagacacaca

SEQ ID NO: 13685 - DNA, 22 bp, Artificial Sequence
  Description of Artificial Sequence: Synthetic primer
cggactatttgggttgcttgtc

SEQ ID NO: 13686 - DNA, 19 bp, Artificial Sequence
  Description of Artificial Sequence: Synthetic primer
gctgcttcgaaggcagaag

SEQ ID NO: 13687 - DNA, 27 bp, Artificial Sequence
  Description of Artificial Sequence: Synthetic primer
cttggaattttgttctcctacactgtc

SEQ ID NO: 13688 - DNA, 27 bp, Artificial Sequence
  Description of Artificial Sequence: Synthetic primer
ctgaggttgttaatccgagaaaaacat

SEQ ID NO: 13689 - DNA, 23 bp, Artificial Sequence
  Description of Artificial Sequence: Synthetic primer
ggaaaacagctgatgggacaatt

SEQ ID NO: 13690 - DNA, 26 bp, Artificial Sequence
  Description of Artificial Sequence: Synthetic primer
ctaagaaggatgataacagggaggca

SEQ ID NO: 13691 - DNA, 21 bp, Artificial Sequence
  Description of Artificial Sequence: Synthetic primer
cagcagtagctggttctcctc

SEQ ID NO: 13692 - DNA, 28 bp, Artificial Sequence
  Description of Artificial Sequence: Synthetic primer
cagctaggcagtgattcttctaaaacat

SEQ ID NO: 13693 - DNA, 26 bp, Artificial Sequence
  Description of Artificial Sequence: Synthetic primer
gtgatagagaacccaaatgacatccg

SEQ ID NO: 13694 - DNA, 25 bp, Artificial Sequence
  Description of Artificial Sequence: Synthetic primer
gctccctcttttgaaaatggagtca

SEQ ID NO: 13695 - DNA, 26 bp, Artificial Sequence
  Description of Artificial Sequence: Synthetic primer
tacctgcgacagaagtagtagatacg

SEQ ID NO: 13696 - DNA, 22 bp, Artificial Sequence
  Description of Artificial Sequence: Synthetic primer
gattctgactgccatcctttgc

SEQ ID NO: 13697 - DNA, 19 bp, Artificial Sequence
  Description of Artificial Sequence: Synthetic primer
cgcgaaatccttccgggtt

SEQ ID NO: 13698 - DNA, 21 bp, Artificial Sequence
  Description of Artificial Sequence: Synthetic primer
tcacctcatcgattgggttgc

SEQ ID NO: 13699 - DNA, 21 bp, Artificial Sequence
  Description of Artificial Sequence: Synthetic primer
tgctgtaccagttgcagaagc

SEQ ID NO: 13700 - DNA, 22 bp, Artificial Sequence
  Description of Artificial Sequence: Synthetic primer
caagcagtgcctgtgacatttt

SEQ ID NO: 13701 - DNA, 23 bp, Artificial Sequence
  Description of Artificial Sequence: Synthetic primer
aaggaacatgtgaacgttgtggt

SEQ ID NO: 13702 - DNA, 21 bp, Artificial Sequence
  Description of Artificial Sequence: Synthetic primer
cccttcccctctgttcgtatg

SEQ ID NO: 13703 - DNA, 21 bp, Artificial Sequence
  Description of Artificial Sequence: Synthetic primer
cccagcaatagccttgcagaa

SEQ ID NO: 13704 - DNA, 21 bp, Artificial Sequence
  Description of Artificial Sequence: Synthetic primer
agttgccatcaatgaggcagt

SEQ ID NO: 13705 - DNA, 21 bp, Artificial Sequence
  Description of Artificial Sequence: Synthetic primer
gccacctcacactttcgatca

SEQ ID NO: 13706 - DNA, 22 bp, Artificial Sequence
  Description of Artificial Sequence: Synthetic primer
ctgcagtggatcacctcaaatg

SEQ ID NO: 13707 - DNA, 21 bp, Artificial Sequence
  Description of Artificial Sequence: Synthetic primer
catgcaagcgtcattggttgg

SEQ ID NO: 13708 - DNA, 26 bp, Artificial Sequence
  Description of Artificial Sequence: Synthetic primer
tctatcccttcattcccttctctttg

SEQ ID NO: 13709 - DNA, 22 bp, Artificial Sequence
  Description of Artificial Sequence: Synthetic primer
gcaggaatgcaaaaactgagca

SEQ ID NO: 13710 - DNA, 23 bp, Artificial Sequence
  Description of Artificial Sequence: Synthetic primer
aagctcgatcctggaatccagta

SEQ ID NO: 13711 - DNA, 23 bp, Artificial Sequence
  Description of Artificial Sequence: Synthetic primer
gctgggaatatgacttggtgcaa

SEQ ID NO: 13712 - DNA, 21 bp, Artificial Sequence
  Description of Artificial Sequence: Synthetic primer
ggaacgactgcatctccatca

SEQ ID NO: 13713 - DNA, 23 bp, Artificial Sequence
  Description of Artificial Sequence: Synthetic primer
cttctttttcccctgtggaacct

SEQ ID NO: 13714 - DNA, 21 bp, Artificial Sequence
  Description of Artificial Sequence: Synthetic primer
gaaggtgaggtacgacacgct

SEQ ID NO: 13715 - DNA, 21 bp, Artificial Sequence
  Description of Artificial Sequence: Synthetic primer
atccgtttgcttcctccttgt

SEQ ID NO: 13716 - DNA, 21 bp, Artificial Sequence
  Description of Artificial Sequence: Synthetic primer
tcaacactcatgctcccactc

SEQ ID NO: 13717 - DNA, 18 bp, Artificial Sequence
  Description of Artificial Sequence: Synthetic primer
gcccagtgccagttttgt

SEQ ID NO: 13718 - DNA, 21 bp, Artificial Sequence
  Description of Artificial Sequence: Synthetic primer
cctcatggttgcaccccttta

SEQ ID NO: 13719 - DNA, 21 bp, Artificial Sequence
  Description of Artificial Sequence: Synthetic primer
ggtgctgttccagtccatcag

SEQ ID NO: 13720 - DNA, 22 bp, Artificial Sequence
  Description of Artificial Sequence: Synthetic primer
ctgagggagatgtttggactga

SEQ ID NO: 13721 - DNA, 28 bp, Artificial Sequence
  Description of Artificial Sequence: Synthetic primer
acaggataagttttgatttaagccttgc

SEQ ID NO: 13722 - DNA, 21 bp, Artificial Sequence
  Description of Artificial Sequence: Synthetic primer
aacttgttcaggaagcgctca

SEQ ID NO: 13723 - DNA, 21 bp, Artificial Sequence
  Description of Artificial Sequence: Synthetic primer
tgctgtgaagcagtattgggt

SEQ ID NO: 13724 - DNA, 28 bp, Artificial Sequence
  Description of Artificial Sequence: Synthetic primer
tgttgtacttccgaagttatccataacc

SEQ ID NO: 13725 - DNA, 18 bp, Artificial Sequence
  Description of Artificial Sequence: Synthetic primer
gcgcaaggtgcactctga

SEQ ID NO: 13726 - DNA, 22 bp, Artificial Sequence
  Description of Artificial Sequence: Synthetic primer
gggctatccaaacacttccaga

SEQ ID NO: 13727 - DNA, 21 bp, Artificial Sequence
  Description of Artificial Sequence: Synthetic primer
gcattaccggcagacagatgt

SEQ ID NO: 13728 - DNA, 26 bp, Artificial Sequence
  Description of Artificial Sequence: Synthetic primer
caaatgaaaagtgcgatgtttacagc

SEQ ID NO: 13729 - DNA, 21 bp, Artificial Sequence
  Description of Artificial Sequence: Synthetic primer
gaccgcaatggccaattcatc

SEQ ID NO: 13730 - DNA, 21 bp, Artificial Sequence
  Description of Artificial Sequence: Synthetic primer
ccgtagcgtgtttgcagattg

SEQ ID NO: 13731 - DNA, 21 bp, Artificial Sequence
  Description of Artificial Sequence: Synthetic primer
tggctaatggaggcatgttgt

SEQ ID NO: 13732 - DNA, 21 bp, Artificial Sequence
  Description of Artificial Sequence: Synthetic primer
gattgctttgcctcctggaga

SEQ ID NO: 13733 - DNA, 21 bp, Artificial Sequence
  Description of Artificial Sequence: Synthetic primer
cacacacctgctcttcacatg

SEQ ID NO: 13734 - DNA, 21 bp, Artificial Sequence
  Description of Artificial Sequence: Synthetic primer
agtcgacgaaggatcttcacg

SEQ ID NO: 13735 - DNA, 23 bp, Artificial Sequence
  Description of Artificial Sequence: Synthetic primer
gtcaggctagtttcagatgtcct

SEQ ID NO: 13736 - DNA, 18 bp, Artificial Sequence
  Description of Artificial Sequence: Synthetic primer
tgctgagcgggtcacctt

SEQ ID NO: 13737 - DNA, 21 bp, Artificial Sequence
  Description of Artificial Sequence: Synthetic primer
gcagctaggaagccagtttgt

SEQ ID NO: 13738 - DNA, 30 bp, Artificial Sequence
  Description of Artificial Sequence: Synthetic primer
ttctgtctcactattttccttttgtctatt

SEQ ID NO: 13739 - DNA, 22 bp, Artificial Sequence
  Description of Artificial Sequence: Synthetic primer
gtgatgcgataacacgggaaac

SEQ ID NO: 13740 - DNA, 29 bp, Artificial Sequence
  Description of Artificial Sequence: Synthetic primer
ttggtagttatcttctgaactcattggag

SEQ ID NO: 13741 - DNA, 23 bp, Artificial Sequence
  Description of Artificial Sequence: Synthetic primer
aggcttcaaccctgaatctgatg

SEQ ID NO: 13742 - DNA, 28 bp, Artificial Sequence
  Description of Artificial Sequence: Synthetic primer
agatgacatcattggtattcttgacact

SEQ ID NO: 13743 - DNA, 21 bp, Artificial Sequence
  Description of Artificial Sequence: Synthetic primer
gtgcagaacttaaggcgacga

SEQ ID NO: 13744 - DNA, 21 bp, Artificial Sequence
  Description of Artificial Sequence: Synthetic primer
tggatgggaagatccgtttgt

SEQ ID NO: 13745 - DNA, 22 bp, Artificial Sequence
  Description of Artificial Sequence: Synthetic primer
tatgtgcttggaattggaggct

SEQ ID NO: 13746 - DNA, 21 bp, Artificial Sequence
  Description of Artificial Sequence: Synthetic primer
ctgaatcggcgccttcataag

SEQ ID NO: 13747 - DNA, 19 bp, Artificial Sequence
  Description of Artificial Sequence: Synthetic primer
ggcagcgacatgaacctgt

SEQ ID NO: 13748 - DNA, 23 bp, Artificial Sequence
  Description of Artificial Sequence: Synthetic primer
cttgtagacgcagaggacgtaag

SEQ ID NO: 13749 - DNA, 23 bp, Artificial Sequence
  Description of Artificial Sequence: Synthetic primer
tgactgatacaaatagccgcgtt

SEQ ID NO: 13750 - DNA, 21 bp, Artificial Sequence
  Description of Artificial Sequence: Synthetic primer
gttgacatcgtccccgttgtt

SEQ ID NO: 13751 - DNA, 28 bp, Artificial Sequence
  Description of Artificial Sequence: Synthetic primer
gcaagtgatacttatgatccttcacgtt

SEQ ID NO: 13752 - DNA, 28 bp, Artificial Sequence
  Description of Artificial Sequence: Synthetic primer
tgcagagtgtgaatcaaagttaattacg

SEQ ID NO: 13753 - DNA, 21 bp, Artificial Sequence
  Description of Artificial Sequence: Synthetic primer
gaagggtacaagcacctggag

SEQ ID NO: 13754 - DNA, 26 bp, Artificial Sequence
  Description of Artificial Sequence: Synthetic primer
ggatcgaacaaagtacgagtctactg

SEQ ID NO: 13755 - DNA, 22 bp, Artificial Sequence
  Description of Artificial Sequence: Synthetic primer
ggtgagcagagttctcctgatt

SEQ ID NO: 13756 - DNA, 27 bp, Artificial Sequence
  Description of Artificial Sequence: Synthetic primer
cttaagccttttggatggtacactttc

SEQ ID NO: 13757 - DNA, 26 bp, Artificial Sequence
  Description of Artificial Sequence: Synthetic primer
gagatgatgggattggtaaaaaggga

SEQ ID NO: 13758 - DNA, 22 bp, Artificial Sequence
  Description of Artificial Sequence: Synthetic primer
agtctgatgtactaccggctga

SEQ ID NO: 13759 - DNA, 21 bp, Artificial Sequence
  Description of Artificial Sequence: Synthetic primer
cgggaagcttcctgaagttct

SEQ ID NO: 13760 - DNA, 25 bp, Artificial Sequence
  Description of Artificial Sequence: Synthetic primer
ctaccatagaacctggtctgattcc

SEQ ID NO: 13761 - DNA, 25 bp, Artificial Sequence
  Description of Artificial Sequence: Synthetic primer
tcgataatttttctcccctccccta

SEQ ID NO: 13762 - DNA, 23 bp, Artificial Sequence
  Description of Artificial Sequence: Synthetic primer
gtgattgaccacaacttcttggg

SEQ ID NO: 13763 - DNA, 23 bp, Artificial Sequence
  Description of Artificial Sequence: Synthetic primer
gggacaccatggatctgatttcg

SEQ ID NO: 13764 - DNA, 21 bp, Artificial Sequence
  Description of Artificial Sequence: Synthetic primer
tccagcactgcaaccattcat

SEQ ID NO: 13765 - DNA, 22 bp, Artificial Sequence
  Description of Artificial Sequence: Synthetic primer
catgatcacacaggcgtctgaa

SEQ ID NO: 13766 - DNA, 23 bp, Artificial Sequence
  Description of Artificial Sequence: Synthetic primer
gggcactgtaactgaagtgaact

SEQ ID NO: 13767 - DNA, 20 bp, Artificial Sequence
  Description of Artificial Sequence: Synthetic primer
catgggccattggctactct

SEQ ID NO: 13768 - DNA, 22 bp, Artificial Sequence
  Description of Artificial Sequence: Synthetic primer
aagggcacaactgaagaagctg

SEQ ID NO: 13769 - DNA, 23 bp, Artificial Sequence
  Description of Artificial Sequence: Synthetic primer
ggaattgcatgacattccgttgt

SEQ ID NO: 13770 - DNA, 21 bp, Artificial Sequence
  Description of Artificial Sequence: Synthetic primer
agccacaccaagccatatgtc

SEQ ID NO: 13771 - DNA, 23 bp, Artificial Sequence
  Description of Artificial Sequence: Synthetic primer
gctacgtttaccagaaggcctac

SEQ ID NO: 13772 - DNA, 22 bp, Artificial Sequence
  Description of Artificial Sequence: Synthetic primer
cattgagaaggaccatgcacac

SEQ ID NO: 13773 - DNA, 21 bp, Artificial Sequence
  Description of Artificial Sequence: Synthetic primer
cgctggctacaatcagatggg

SEQ ID NO: 13774 - DNA, 27 bp, Artificial Sequence
  Description of Artificial Sequence: Synthetic primer
tcccaaaaactttacagaagtggaaga

SEQ ID NO: 13775 - DNA, 23 bp, Artificial Sequence
  Description of Artificial Sequence: Synthetic primer
gggcttcactatggagacaatgg

SEQ ID NO: 13776 - DNA, 21 bp, Artificial Sequence
  Description of Artificial Sequence: Synthetic primer
cgtctgcttggcttcaaagtt

SEQ ID NO: 13777 - DNA, 24 bp, Artificial Sequence
  Description of Artificial Sequence: Synthetic primer
aagcttcatggatgctatgttgtg

SEQ ID NO: 13778 - DNA, 21 bp, Artificial Sequence
  Description of Artificial Sequence: Synthetic primer
ttcctccatcccccatttctg

SEQ ID NO: 13779 - DNA, 21 bp, Artificial Sequence
  Description of Artificial Sequence: Synthetic primer
gcctacccagacgagatcatg

SEQ ID NO: 13780 - DNA, 22 bp, Artificial Sequence
  Description of Artificial Sequence: Synthetic primer
agcagcacctccgttataatcc

SEQ ID NO: 13781 - DNA, 24 bp, Artificial Sequence
  Description of Artificial Sequence: Synthetic primer
gaacgatcgtcctctaaaggaagg

SEQ ID NO: 13782 - DNA, 28 bp, Artificial Sequence
  Description of Artificial Sequence: Synthetic primer
tctgaaagagcaaacaaataaactggaa

SEQ ID NO: 13783 - DNA, 23 bp, Artificial Sequence
  Description of Artificial Sequence: Synthetic primer
catgaatgattggattgcccgat

SEQ ID NO: 13784 - DNA, 22 bp, Artificial Sequence
  Description of Artificial Sequence: Synthetic primer
cctggagcgaagattcagcata

SEQ ID NO: 13785 - DNA, 23 bp, Artificial Sequence
  Description of Artificial Sequence: Synthetic primer
aaacacatgacaacctggaacac

SEQ ID NO: 13786 - DNA, 27 bp, Artificial Sequence
  Description of Artificial Sequence: Synthetic primer
tgtccatgtgaagtagtattctggttt

SEQ ID NO: 13787 - DNA, 26 bp, Artificial Sequence
  Description of Artificial Sequence: Synthetic primer
tattggatcatcctcaccttcaggtt

SEQ ID NO: 13788 - DNA, 22 bp, Artificial Sequence
  Description of Artificial Sequence: Synthetic primer
aggataaatgccctgcttggaa

SEQ ID NO: 13789 - DNA, 23 bp, Artificial Sequence
  Description of Artificial Sequence: Synthetic primer
ctggattccttctagttgctgct

SEQ ID NO: 13790 - DNA, 23 bp, Artificial Sequence
  Description of Artificial Sequence: Synthetic primer
aaggaagagagaagcatctagcg

SEQ ID NO: 13791 - DNA, 21 bp, Artificial Sequence
  Description of Artificial Sequence: Synthetic primer
atttcccaaatgctgcaccga

SEQ ID NO: 13792 - DNA, 24 bp, Artificial Sequence
  Description of Artificial Sequence: Synthetic primer
gggtgttagcatacccaatgatgg

SEQ ID NO: 13793 - DNA, 23 bp, Artificial Sequence
  Description of Artificial Sequence: Synthetic primer
tgaaacaggaccttcactactgg

SEQ ID NO: 13794 - DNA, 21 bp, Artificial Sequence
  Description of Artificial Sequence: Synthetic primer
gcaaagcttcgcgttgagtag

SEQ ID NO: 13795 - DNA, 23 bp, Artificial Sequence
  Description of Artificial Sequence: Synthetic primer
gacacttactttggccaagaggt

SEQ ID NO: 13796 - DNA, 25 bp, Artificial Sequence
  Description of Artificial Sequence: Synthetic primer
ctgaaagctttcaagggctacattg

SEQ ID NO: 13797 - DNA, 25 bp, Artificial Sequence
  Description of Artificial Sequence: Synthetic primer
caaaagcaaagccagatgtagaacc

SEQ ID NO: 13798 - DNA, 23 bp, Artificial Sequence
  Description of Artificial Sequence: Synthetic primer
accctctggacaagtttcagcta

SEQ ID NO: 13799 - DNA, 24 bp, Artificial Sequence
  Description of Artificial Sequence: Synthetic primer
gtgtgaagaacgttttgacaaccg

SEQ ID NO: 13800 - DNA, 26 bp, Artificial Sequence
  Description of Artificial Sequence: Synthetic primer
cgagttatggtctggaatttcaacct

SEQ ID NO: 13801 - DNA, 20 bp, Artificial Sequence
  Description of Artificial Sequence: Synthetic primer
cgctgctacggatgaacaag

SEQ ID NO: 13802 - DNA, 24 bp, Artificial Sequence
  Description of Artificial Sequence: Synthetic primer
gattatccatgtgtgctgcttgtt

SEQ ID NO: 13803 - DNA, 25 bp, Artificial Sequence
  Description of Artificial Sequence: Synthetic primer
ctattttatcagccaagtccgcaag

SEQ ID NO: 13804 - DNA, 23 bp, Artificial Sequence
  Description of Artificial Sequence: Synthetic primer
cctgcaaagtcaagaagctggta

SEQ ID NO: 13805 - DNA, 22 bp, Artificial Sequence
  Description of Artificial Sequence: Synthetic primer
aggaataaatgacacgcggtct

SEQ ID NO: 13806 - DNA, 26 bp, Artificial Sequence
  Description of Artificial Sequence: Synthetic primer
ggcaaatgttgttcttccttttgaac

SEQ ID NO: 13807 - DNA, 21 bp, Artificial Sequence
  Description of Artificial Sequence: Synthetic primer
gacggcttcctgtacatgact

SEQ ID NO: 13808 - DNA, 28 bp, Artificial Sequence
  Description of Artificial Sequence: Synthetic primer
tggtacacttctagcaattggaactatt

SEQ ID NO: 13809 - DNA, 28 bp, Artificial Sequence
  Description of Artificial Sequence: Synthetic primer
accctgtccaacttttgtaaattctaac

SEQ ID NO: 13810 - DNA, 26 bp, Artificial Sequence
  Description of Artificial Sequence: Synthetic primer
cctagtgagaaggcagtaaataccac

SEQ ID NO: 13811 - DNA, 22 bp, Artificial Sequence
  Description of Artificial Sequence: Synthetic primer
ggagcaagctaggagtgctatg

SEQ ID NO: 13812 - DNA, 21 bp, Artificial Sequence
  Description of Artificial Sequence: Synthetic primer
ttggaggagctctaccgacaa

SEQ ID NO: 13813 - DNA, 21 bp, Artificial Sequence
  Description of Artificial Sequence: Synthetic primer
tccatgttctggaccgttcct

SEQ ID NO: 13814 - DNA, 22 bp, Artificial Sequence
  Description of Artificial Sequence: Synthetic primer
gcgacagaatgatccatagcct

SEQ ID NO: 13815 - DNA, 21 bp, Artificial Sequence
  Description of Artificial Sequence: Synthetic primer
aaggagggcaacaagtacctc

SEQ ID NO: 13816 - DNA, 22 bp, Artificial Sequence
  Description of Artificial Sequence: Synthetic primer
ttggctcctgaggaaaaaggaa

SEQ ID NO: 13817 - DNA, 29 bp, Artificial Sequence
  Description of Artificial Sequence: Synthetic primer
acctctacaagtaagatagttgcaagttt

SEQ ID NO: 13818 - DNA, 21 bp, Artificial Sequence
  Description of Artificial Sequence: Synthetic primer
gcgccgaagctatcatgaaac

SEQ ID NO: 13819 - DNA, 28 bp, Artificial Sequence
  Description of Artificial Sequence: Synthetic primer
acagatgacaatctcctgttattcaagt

SEQ ID NO: 13820 - DNA, 28 bp, Artificial Sequence
  Description of Artificial Sequence: Synthetic primer
tcacaagctcgtagtaatattcgaatga

SEQ ID NO: 13821 - DNA, 27 bp, Artificial Sequence
  Description of Artificial Sequence: Synthetic primer
aagtgtatatgcaaagactggctttgg

SEQ ID NO: 13822 - DNA, 23 bp, Artificial Sequence
  Description of Artificial Sequence: Synthetic primer
tgtatttgccatcatcagcgaca

SEQ ID NO: 13823 - DNA, 21 bp, Artificial Sequence
  Description of Artificial Sequence: Synthetic primer
aactggagagcctcaagagga

SEQ ID NO: 13824 - DNA, 21 bp, Artificial Sequence
  Description of Artificial Sequence: Synthetic primer
tctccatctactccgtcgaca

SEQ ID NO: 13825 - DNA, 27 bp, Artificial Sequence
  Description of Artificial Sequence: Synthetic primer
tcttgcgtaagaaatttgatgggatga

SEQ ID NO: 13826 - DNA, 22 bp, Artificial Sequence
  Description of Artificial Sequence: Synthetic primer
gtgcatagtgaaggtgcagaca

SEQ ID NO: 13827 - DNA, 23 bp, Artificial Sequence
  Description of Artificial Sequence: Synthetic primer
gtgaactatatgacgcccgagat

SEQ ID NO: 13828 - DNA, 21 bp, Artificial Sequence
  Description of Artificial Sequence: Synthetic primer
ccccaagagcttccacatgtt

SEQ ID NO: 13829 - DNA, 21 bp, Artificial Sequence
  Description of Artificial Sequence: Synthetic primer
aattggtggcgtgtgaactct

SEQ ID NO: 13830 - DNA, 26 bp, Artificial Sequence
  Description of Artificial Sequence: Synthetic primer
cacacggaatcagacatctctaaagt

SEQ ID NO: 13831 - DNA, 27 bp, Artificial Sequence
  Description of Artificial Sequence: Synthetic primer
agtaagtcttacacaacaacccacaaa

SEQ ID NO: 13832 - DNA, 23 bp, Artificial Sequence
  Description of Artificial Sequence: Synthetic primer
ggagctcctttagatgacccatt

SEQ ID NO: 13833 - DNA, 27 bp, Artificial Sequence
  Description of Artificial Sequence: Synthetic primer
atttgatgccttggaagttattgaacc

SEQ ID NO: 13834 - DNA, 21 bp, Artificial Sequence
  Description of Artificial Sequence: Synthetic primer
gtgcgctagtcatggcatcta

SEQ ID NO: 13835 - DNA, 26 bp, Artificial Sequence
  Description of Artificial Sequence: Synthetic primer
gcaattcatcgactcagtctacaaga

SEQ ID NO: 13836 - DNA, 28 bp, Artificial Sequence
  Description of Artificial Sequence: Synthetic primer
tgagtggtatcaaaaattcactgacgtt

SEQ ID NO: 13837 - DNA, 19 bp, Artificial Sequence
  Description of Artificial Sequence: Synthetic primer
ccaggatcgacgacatccg

SEQ ID NO: 13838 - DNA, 25 bp, Artificial Sequence
  Description of Artificial Sequence: Synthetic primer
cattccttgacccacttctgagtag

SEQ ID NO: 13839 - DNA, 27 bp, Artificial Sequence
  Description of Artificial Sequence: Synthetic primer
caacaggtttccaagcaagaacatatt

SEQ ID NO: 13840 - DNA, 28 bp, Artificial Sequence
  Description of Artificial Sequence: Synthetic primer
ctcgacggttaagttaaatgtttcagag

SEQ ID NO: 13841 - DNA, 27 bp, Artificial Sequence
  Description of Artificial Sequence: Synthetic primer
tggtactgcttacaattagtagcttga

SEQ ID NO: 13842 - DNA, 26 bp, Artificial Sequence
  Description of Artificial Sequence: Synthetic primer
agccaagaaatggcatattgattgtt

SEQ ID NO: 13843 - DNA, 27 bp, Artificial Sequence
  Description of Artificial Sequence: Synthetic primer
aacgtctcctaaaccagttacttgttg

SEQ ID NO: 13844 - DNA, 21 bp, Artificial Sequence
  Description of Artificial Sequence: Synthetic primer
tttatggtcctggctggaagc

SEQ ID NO: 13845 - DNA, 26 bp, Artificial Sequence
  Description of Artificial Sequence: Synthetic primer
caaggttttaggaaagaactgcatga

SEQ ID NO: 13846 - DNA, 21 bp, Artificial Sequence
  Description of Artificial Sequence: Synthetic primer
ttcaagacggtcgttctagcg

SEQ ID NO: 13847 - DNA, 22 bp, Artificial Sequence
  Description of Artificial Sequence: Synthetic primer
attgacacaagcggaatccatg

SEQ ID NO: 13848 - DNA, 23 bp, Artificial Sequence
  Description of Artificial Sequence: Synthetic primer
ggccagaggaaggatactacatc

SEQ ID NO: 13849 - DNA, 19 bp, Artificial Sequence
  Description of Artificial Sequence: Synthetic primer
catgccgaaccagcagtcc

SEQ ID NO: 13850 - DNA, 28 bp, Artificial Sequence
  Description of Artificial Sequence: Synthetic primer
aactgcataacttgtattgtacccttga

SEQ ID NO: 13851 - DNA, 22 bp, Artificial Sequence
  Description of Artificial Sequence: Synthetic primer
gatgcgggtcaggaaacttgta

SEQ ID NO: 13852 - DNA, 25 bp, Artificial Sequence
  Description of Artificial Sequence: Synthetic primer
aagtctgatctccgtcatcttgtag

SEQ ID NO: 13853 - DNA, 21 bp, Artificial Sequence
  Description of Artificial Sequence: Synthetic primer
ccgactgctgatcgagtgaag

SEQ ID NO: 13854 - DNA, 24 bp, Artificial Sequence
  Description of Artificial Sequence: Synthetic primer
agggattcatcgaagggacataca

SEQ ID NO: 13855 - DNA, 22 bp, Artificial Sequence
  Description of Artificial Sequence: Synthetic primer
ctcactacatccagtcctggct

SEQ ID NO: 13856 - DNA, 18 bp, Artificial Sequence
  Description of Artificial Sequence: Synthetic primer
tctcaccgcaacccatgt

SEQ ID NO: 13857 - DNA, 22 bp, Artificial Sequence
  Description of Artificial Sequence: Synthetic primer
gtatgcgcttgctgcaactatg

SEQ ID NO: 13858 - DNA, 25 bp, Artificial Sequence
  Description of Artificial Sequence: Synthetic primer
aagggaaagaagccgttcaatatcg

SEQ ID NO: 13859 - DNA, 25 bp, Artificial Sequence
  Description of Artificial Sequence: Synthetic primer
gttgtttctgaccaattgttccagt

SEQ ID NO: 13860 - DNA, 26 bp, Artificial Sequence
  Description of Artificial Sequence: Synthetic primer
tgaaaagaggtgtttcgaccattagt

SEQ ID NO: 13861 - DNA, 21 bp, Artificial Sequence
  Description of Artificial Sequence: Synthetic primer
aaaccgaggccaatgaaactg

SEQ ID NO: 13862 - DNA, 22 bp, Artificial Sequence
  Description of Artificial Sequence: Synthetic primer
ggacttttcctgcacaggtttt

SEQ ID NO: 13863 - DNA, 23 bp, Artificial Sequence
  Description of Artificial Sequence: Synthetic primer
tcaatctctgaaccacgcaaaga

SEQ ID NO: 13864 - DNA, 23 bp, Artificial Sequence
  Description of Artificial Sequence: Synthetic primer
cttctgaaccctgtccgtttttg

SEQ ID NO: 13865 - DNA, 24 bp, Artificial Sequence
  Description of Artificial Sequence: Synthetic primer
gcagcacaaactcaagagaaatgc

SEQ ID NO: 13866 - DNA, 22 bp, Artificial Sequence
  Description of Artificial Sequence: Synthetic primer
gaggctccacagcatgtatacc

SEQ ID NO: 13867 - DNA, 21 bp, Artificial Sequence
  Description of Artificial Sequence: Synthetic primer
ttcctgcctcgggcattttaa

SEQ ID NO: 13868 - DNA, 21 bp, Artificial Sequence
  Description of Artificial Sequence: Synthetic primer
gatcttcctcaggcttctcgt

SEQ ID NO: 13869 - DNA, 21 bp, Artificial Sequence
  Description of Artificial Sequence: Synthetic primer
gacgcatactggcgtgtatgt

SEQ ID NO: 13870 - DNA, 25 bp, Artificial Sequence
  Description of Artificial Sequence: Synthetic primer
ccttcattgcattcttgaagagcaa

SEQ ID NO: 13871 - DNA, 22 bp, Artificial Sequence
  Description of Artificial Sequence: Synthetic primer
aggtattgcagagcttgtaccc

SEQ ID NO: 13872 - DNA, 23 bp, Artificial Sequence
  Description of Artificial Sequence: Synthetic primer
gatacattgatgaaccgcatccc

SEQ ID NO: 13873 - DNA, 21 bp, Artificial Sequence
  Description of Artificial Sequence: Synthetic primer
gctgctgaagtcgtcttcctc

SEQ ID NO: 13874 - DNA, 23 bp, Artificial Sequence
  Description of Artificial Sequence: Synthetic primer
taagccctatgcagatggtacct

SEQ ID NO: 13875 - DNA, 25 bp, Artificial Sequence
  Description of Artificial Sequence: Synthetic primer
gtcaagaggtagtatgagtgagcat

SEQ ID NO: 13876 - DNA, 22 bp, Artificial Sequence
  Description of Artificial Sequence: Synthetic primer
gaccagtcgtcattacattcgc

SEQ ID NO: 13877 - DNA, 21 bp, Artificial Sequence
  Description of Artificial Sequence: Synthetic primer
aatgtctttgctcgtcgaggt

SEQ ID NO: 13878 - DNA, 26 bp, Artificial Sequence
  Description of Artificial Sequence: Synthetic primer
cgagcactttagagatggaaatgttc

SEQ ID NO: 13879 - DNA, 26 bp, Artificial Sequence
  Description of Artificial Sequence: Synthetic primer
cttgatgttaactgtcaggtgttgtt

SEQ ID NO: 13880 - DNA, 22 bp, Artificial Sequence
  Description of Artificial Sequence: Synthetic primer
tccgtggactgtggtatacaga

SEQ ID NO: 13881 - DNA, 24 bp, Artificial Sequence
  Description of Artificial Sequence: Synthetic primer
aagaatcctttggaaactgcttgg

SEQ ID NO: 13882 - DNA, 24 bp, Artificial Sequence
  Description of Artificial Sequence: Synthetic primer
tacttggtggattgactcagtcag

SEQ ID NO: 13883 - DNA, 26 bp, Artificial Sequence
  Description of Artificial Sequence: Synthetic primer
gcagaaacatatcacattcctccaag

SEQ ID NO: 13884 - DNA, 19 bp, Artificial Sequence
  Description of Artificial Sequence: Synthetic primer
agaggccctcaagcactca

SEQ ID NO: 13885 - DNA, 24 bp, Artificial Sequence
  Description of Artificial Sequence: Synthetic primer
tctatgagattgcaagcacgaact

SEQ ID NO: 13886 - DNA, 27 bp, Artificial Sequence
  Description of Artificial Sequence: Synthetic primer
tcaaggatcattggtattgacctgaat

SEQ ID NO: 13887 - DNA, 25 bp, Artificial Sequence
  Description of Artificial Sequence: Synthetic primer
tttgaaaatttgagtcggctcaaga

SEQ ID NO: 13888 - DNA, 21 bp, Artificial Sequence
  Description of Artificial Sequence: Synthetic primer
gcagcgtagatgacctgatcc

SEQ ID NO: 13889 - DNA, 21 bp, Artificial Sequence
  Description of Artificial Sequence: Synthetic primer
ggtcaatcctccttgcctcat

SEQ ID NO: 13890 - DNA, 28 bp, Artificial Sequence
  Description of Artificial Sequence: Synthetic primer
tattttggaaacggagggagtagaaaaa

SEQ ID NO: 13891 - DNA, 24 bp, Artificial Sequence
  Description of Artificial Sequence: Synthetic primer
agcaatgttcagatgcttcagtcc

SEQ ID NO: 13892 - DNA, 22 bp, Artificial Sequence
  Description of Artificial Sequence: Synthetic primer
ctttctgctgtcttgggtgttg

SEQ ID NO: 13893 - DNA, 29 bp, Artificial Sequence
  Description of Artificial Sequence: Synthetic primer
agataagaaatcttctcaccgcagtacta

SEQ ID NO: 13894 - DNA, 22 bp, Artificial Sequence
  Description of Artificial Sequence: Synthetic primer
agcagcagcatgacataggaaa

SEQ ID NO: 13895 - DNA, 21 bp, Artificial Sequence
  Description of Artificial Sequence: Synthetic primer
ttgcaagtcaaagggtgtcca

SEQ ID NO: 13896 - DNA, 21 bp, Artificial Sequence
  Description of Artificial Sequence: Synthetic primer
ttgaaccaaaagctggcacag

SEQ ID NO: 13897 - DNA, 23 bp, Artificial Sequence
  Description of Artificial Sequence: Synthetic primer
attgtcctcggtggaagataagg

SEQ ID NO: 13898 - DNA, 27 bp, Artificial Sequence
  Description of Artificial Sequence: Synthetic primer
taaccttgaccaatcctatcagtaagc

SEQ ID NO: 13899 - DNA, 26 bp, Artificial Sequence
  Description of Artificial Sequence: Synthetic primer
gctgtatgacaaatcggtggaaatac

SEQ ID NO: 13900 - DNA, 27 bp, Artificial Sequence
  Description of Artificial Sequence: Synthetic primer
atgaacttcagcctccatatttgttgt

SEQ ID NO: 13901 - DNA, 21 bp, Artificial Sequence
  Description of Artificial Sequence: Synthetic primer
caccgggttgctagttgctat

SEQ ID NO: 13902 - DNA, 25 bp, Artificial Sequence
  Description of Artificial Sequence: Synthetic primer
gcatcatgaaccaaccaaggagata

SEQ ID NO: 13903 - DNA, 26 bp, Artificial Sequence
  Description of Artificial Sequence: Synthetic primer
aatactttccgtgttctttgctgatg

SEQ ID NO: 13904 - DNA, 21 bp, Artificial Sequence
  Description of Artificial Sequence: Synthetic primer
tactgactgtagagccgcttg

SEQ ID NO: 13905 - DNA, 28 bp, Artificial Sequence
  Description of Artificial Sequence: Synthetic primer
ttgctttcttgctttctttttcttctgt

SEQ ID NO: 13906 - DNA, 23 bp, Artificial Sequence
  Description of Artificial Sequence: Synthetic primer
acccatgagtcacatcggataga

SEQ ID NO: 13907 - DNA, 26 bp, Artificial Sequence
  Description of Artificial Sequence: Synthetic primer
ggcgacgtgaaactatatgttgaaga

SEQ ID NO: 13908 - DNA, 22 bp, Artificial Sequence
  Description of Artificial Sequence: Synthetic primer
atatgcagacccgaatctggtt

SEQ ID NO: 13909 - DNA, 27 bp, Artificial Sequence
  Description of Artificial Sequence: Synthetic primer
aggcccaaccaatttttcattagaaga

SEQ ID NO: 13910 - DNA, 28 bp, Artificial Sequence
  Description of Artificial Sequence: Synthetic primer
tgtacttcatcgatgctacacaacatag

SEQ ID NO: 13911 - DNA, 27 bp, Artificial Sequence
  Description of Artificial Sequence: Synthetic primer
gatgatgagctggatataccagaacct

SEQ ID NO: 13912 - DNA, 26 bp, Artificial Sequence
  Description of Artificial Sequence: Synthetic primer
accagaaggatcaacatttctctgat

SEQ ID NO: 13913 - DNA, 25 bp, Artificial Sequence
  Description of Artificial Sequence: Synthetic primer
gttttgatctggatactgccaacaa

SEQ ID NO: 13914 - DNA, 18 bp, Artificial Sequence
  Description of Artificial Sequence: Synthetic primer
cgagcaccccctttcctg

SEQ ID NO: 13915 - DNA, 24 bp, Artificial Sequence
  Description of Artificial Sequence: Synthetic primer
acgtgaagggatactttgtttggt

SEQ ID NO: 13916 - DNA, 28 bp, Artificial Sequence
  Description of Artificial Sequence: Synthetic primer
aggaagagatccattacaagaaaagaca

SEQ ID NO: 13917 - DNA, 30 bp, Artificial Sequence
  Description of Artificial Sequence: Synthetic primer
gactccaaccatctaattctaaaagaggat

SEQ ID NO: 13918 - DNA, 21 bp, Artificial Sequence
  Description of Artificial Sequence: Synthetic primer
gagtgtacgccattggtgatg

SEQ ID NO: 13919 - DNA, 28 bp, Artificial Sequence
  Description of Artificial Sequence: Synthetic primer
tgtttcagcagttatgagttgtgtatct

SEQ ID NO: 13920 - DNA, 27 bp, Artificial Sequence
  Description of Artificial Sequence: Synthetic primer
cacaaacaggttcagataaacactagc

SEQ ID NO: 13921 - DNA, 21 bp, Artificial Sequence
  Description of Artificial Sequence: Synthetic primer
acgtggacatcaggttcaaca

SEQ ID NO: 13922 - DNA, 18 bp, Artificial Sequence
  Description of Artificial Sequence: Synthetic primer
tgctcgccgagttccagt

SEQ ID NO: 13923 - DNA, 23 bp, Artificial Sequence
  Description of Artificial Sequence: Synthetic primer
ctggtcaacccgtagagatatcg

SEQ ID NO: 13924 - DNA, 23 bp, Artificial Sequence
  Description of Artificial Sequence: Synthetic primer
tactcatggcagagttctttggg

SEQ ID NO: 13925 - DNA, 25 bp, Artificial Sequence
  Description of Artificial Sequence: Synthetic primer
ttcgacaggacacacattttcaaag

SEQ ID NO: 13926 - DNA, 22 bp, Artificial Sequence
  Description of Artificial Sequence: Synthetic primer
acagggccaaagtgattttgga

SEQ ID NO: 13927 - DNA, 25 bp, Artificial Sequence
  Description of Artificial Sequence: Synthetic primer
tgaaatccatgaggaaaatgccatg

SEQ ID NO: 13928 - DNA, 21 bp, Artificial Sequence
  Description of Artificial Sequence: Synthetic primer
gactggttcccccttgacaac

SEQ ID NO: 13929 - DNA, 25 bp, Artificial Sequence
  Description of Artificial Sequence: Synthetic primer
ctgcatttatgtgcatctggatctt

SEQ ID NO: 13930 - DNA, 24 bp, Artificial Sequence
  Description of Artificial Sequence: Synthetic primer
ggttaactagagctagtgcccatt

SEQ ID NO: 13931 - DNA, 23 bp, Artificial Sequence
  Description of Artificial Sequence: Synthetic primer
catgatgctcttagtgcgacgta

SEQ ID NO: 13932 - DNA, 21 bp, Artificial Sequence
  Description of Artificial Sequence: Synthetic primer
aagaacgccgaagagtggatg

SEQ ID NO: 13933 - DNA, 22 bp, Artificial Sequence
  Description of Artificial Sequence: Synthetic primer
caagacgccgtcaagtttacag

SEQ ID NO: 13934 - DNA, 23 bp, Artificial Sequence
  Description of Artificial Sequence: Synthetic primer
gtaaacctgatatgcacgaagcg

SEQ ID NO: 13935 - DNA, 19 bp, Artificial Sequence
  Description of Artificial Sequence: Synthetic primer
gcagcagaagtgcaaggtc

SEQ ID NO: 13936 - DNA, 23 bp, Artificial Sequence
  Description of Artificial Sequence: Synthetic primer
tggcattttgaacagctaagagc

SEQ ID NO: 13937 - DNA, 22 bp, Artificial Sequence
  Description of Artificial Sequence: Synthetic primer
gcacaactgcaaagggaaaatg

SEQ ID NO: 13938 - DNA, 21 bp, Artificial Sequence
  Description of Artificial Sequence: Synthetic primer
tggagggtctcgtcaacacta

SEQ ID NO: 13939 - DNA, 24 bp, Artificial Sequence
  Description of Artificial Sequence: Synthetic primer
ctacgacaggcgtaggtcatacta

SEQ ID NO: 13940 - DNA, 28 bp, Artificial Sequence
  Description of Artificial Sequence: Synthetic primer
tttcttgatcagtatcagtagtggtagc

SEQ ID NO: 13941 - DNA, 25 bp, Artificial Sequence
  Description of Artificial Sequence: Synthetic primer
tgttacctgggatgttgagagagat

SEQ ID NO: 13942 - DNA, 21 bp, Artificial Sequence
  Description of Artificial Sequence: Synthetic primer
gcgctagactctgtgtccatg

SEQ ID NO: 13943 - DNA, 18 bp, Artificial Sequence
  Description of Artificial Sequence: Synthetic primer
gagctggacgccgtcatc

SEQ ID NO: 13944 - DNA, 22 bp, Artificial Sequence
  Description of Artificial Sequence: Synthetic primer
gccggagcaaaggttagagtag

SEQ ID NO: 13945 - DNA, 25 bp, Artificial Sequence
  Description of Artificial Sequence: Synthetic primer
gaagggatccacaagttagagaagc

SEQ ID NO: 13946 - DNA, 21 bp, Artificial Sequence
  Description of Artificial Sequence: Synthetic primer
ctttgacggtgcctctgtgta

SEQ ID NO: 13947 - DNA, 25 bp, Artificial Sequence
  Description of Artificial Sequence: Synthetic primer
tggagggcttaaaccattttgatga

SEQ ID NO: 13948 - DNA, 20 bp, Artificial Sequence
  Description of Artificial Sequence: Synthetic primer
gctcacggttcaaggagaca

SEQ ID NO: 13949 - DNA, 21 bp, Artificial Sequence
  Description of Artificial Sequence: Synthetic primer
gagtcggatgacgacgagaac

SEQ ID NO: 13950 - DNA, 21 bp, Artificial Sequence
  Description of Artificial Sequence: Synthetic primer
gcaagatcttcagcaggcagt

SEQ ID NO: 13951 - DNA, 22 bp, Artificial Sequence
  Description of Artificial Sequence: Synthetic primer
acaaaggagctgcaaaggaatg

SEQ ID NO: 13952 - DNA, 21 bp, Artificial Sequence
  Description of Artificial Sequence: Synthetic primer
gggtactggcactacaagagc

SEQ ID NO: 13953 - DNA, 21 bp, Artificial Sequence
  Description of Artificial Sequence: Synthetic primer
tactccccttcaggagcatcg

SEQ ID NO: 13954 - DNA, 23 bp, Artificial Sequence
  Description of Artificial Sequence: Synthetic primer
ccatgcatatggagggttctttg

SEQ ID NO: 13955 - DNA, 27 bp, Artificial Sequence
  Description of Artificial Sequence: Synthetic primer
gttgtatgtccatgatccatcctttct

SEQ ID NO: 13956 - DNA, 21 bp, Artificial Sequence
  Description of Artificial Sequence: Synthetic primer
ctgtcggcactcatggttcaa

SEQ ID NO: 13957 - DNA, 22 bp, Artificial Sequence
  Description of Artificial Sequence: Synthetic primer
tgatggcctcgtcaactaagtc

SEQ ID NO: 13958 - DNA, 27 bp, Artificial Sequence
  Description of Artificial Sequence: Synthetic primer
attcagtgttctgtttctcttgtcatg

SEQ ID NO: 13959 - DNA, 27 bp, Artificial Sequence
  Description of Artificial Sequence: Synthetic primer
ggattaggttttgttagtgatggatgc

SEQ ID NO: 13960 - DNA, 22 bp, Artificial Sequence
  Description of Artificial Sequence: Synthetic primer
gcaggttgcataaagagtccct

SEQ ID NO: 13961 - DNA, 23 bp, Artificial Sequence
  Description of Artificial Sequence: Synthetic primer
gactgctgatgcaattgagatcg

SEQ ID NO: 13962 - DNA, 24 bp, Artificial Sequence
  Description of Artificial Sequence: Synthetic primer
tacaaggcgcattttgttgatctt

SEQ ID NO: 13963 - DNA, 23 bp, Artificial Sequence
  Description of Artificial Sequence: Synthetic primer
tgatatccgtttatggccagcag

SEQ ID NO: 13964 - DNA, 28 bp, Artificial Sequence
  Description of Artificial Sequence: Synthetic primer
cttgaagacaagattaaagagctgaagg

SEQ ID NO: 13965 - DNA, 26 bp, Artificial Sequence
  Description of Artificial Sequence: Synthetic primer
agcatttgaccaccatacacttatca

SEQ ID NO: 13966 - DNA, 24 bp, Artificial Sequence
  Description of Artificial Sequence: Synthetic primer
ctgtgggaatgatgcttgcataat

SEQ ID NO: 13967 - DNA, 24 bp, Artificial Sequence
  Description of Artificial Sequence: Synthetic primer
ggtatatgcggagaagtatgcaga

SEQ ID NO: 13968 - DNA, 22 bp, Artificial Sequence
  Description of Artificial Sequence: Synthetic primer
cggtgtacctcttgtgggtatt

SEQ ID NO: 13969 - DNA, 21 bp, Artificial Sequence
  Description of Artificial Sequence: Synthetic primer
gctgaatgagctgaaggctgt

SEQ ID NO: 13970 - DNA, 21 bp, Artificial Sequence
  Description of Artificial Sequence: Synthetic primer
gagcgcagggttgcaatttat

SEQ ID NO: 13971 - DNA, 21 bp, Artificial Sequence
  Description of Artificial Sequence: Synthetic primer
cacggttcctgtctgttgttc

SEQ ID NO: 13972 - DNA, 21 bp, Artificial Sequence
  Description of Artificial Sequence: Synthetic primer
aagttggcaaaaccctaaccg

SEQ ID NO: 13973 - DNA, 21 bp, Artificial Sequence
  Description of Artificial Sequence: Synthetic primer
gaccgtcaacaaatcggacca

SEQ ID NO: 13974 - DNA, 24 bp, Artificial Sequence
  Description of Artificial Sequence: Synthetic primer
ctgacaagcggctatcttgaaaag

SEQ ID NO: 13975 - DNA, 24 bp, Artificial Sequence
  Description of Artificial Sequence: Synthetic primer
tctgcccatatgatttcccattga

SEQ ID NO: 13976 - DNA, 23 bp, Artificial Sequence
  Description of Artificial Sequence: Synthetic primer
aaaacaaccagccactaaacctg

SEQ ID NO: 13977 - DNA, 28 bp, Artificial Sequence
  Description of Artificial Sequence: Synthetic primer
aacaactgaaaggtattggtgaaaagag

SEQ ID NO: 13978 - DNA, 24 bp, Artificial Sequence
  Description of Artificial Sequence: Synthetic primer
taatgaggatgagtactggcagca

SEQ ID NO: 13979 - DNA, 22 bp, Artificial Sequence
  Description of Artificial Sequence: Synthetic primer
tcctgttttggcagtgttgcta

SEQ ID NO: 13980 - DNA, 24 bp, Artificial Sequence
  Description of Artificial Sequence: Synthetic primer
gaggacttcccaaatgatccatct

SEQ ID NO: 13981 - DNA, 26 bp, Artificial Sequence
  Description of Artificial Sequence: Synthetic primer
gtctcagttgcttttgtgtacttctg

SEQ ID NO: 13982 - DNA, 27 bp, Artificial Sequence
  Description of Artificial Sequence: Synthetic primer
aatcagaaagtacatgtcatcagcact

SEQ ID NO: 13983 - DNA, 22 bp, Artificial Sequence
  Description of Artificial Sequence: Synthetic primer
tcaagtcacaagcactgcatga

SEQ ID NO: 13984 - DNA, 25 bp, Artificial Sequence
  Description of Artificial Sequence: Synthetic primer
tccatctatggatacttcagccact

SEQ ID NO: 13985 - DNA, 21 bp, Artificial Sequence
  Description of Artificial Sequence: Synthetic primer
aggaagaaatctccgcctgga

SEQ ID NO: 13986 - DNA, 23 bp, Artificial Sequence
  Description of Artificial Sequence: Synthetic primer
tggaacagggaatgtgcttaagg

SEQ ID NO: 13987 - DNA, 23 bp, Artificial Sequence
  Description of Artificial Sequence: Synthetic primer
gctggcgtcgtgtggatttaata

SEQ ID NO: 13988 - DNA, 22 bp, Artificial Sequence
  Description of Artificial Sequence: Synthetic primer
acatcctaagattccgcagctc

SEQ ID NO: 13989 - DNA, 21 bp, Artificial Sequence
  Description of Artificial Sequence: Synthetic primer
gggagcagcatttgtaccaga

SEQ ID NO: 13990 - DNA, 20 bp, Artificial Sequence
  Description of Artificial Sequence: Synthetic primer
ggagcttcaacaagggcttc

SEQ ID NO: 13991 - DNA, 21 bp, Artificial Sequence
  Description of Artificial Sequence: Synthetic primer
catccggaggaagatcaccat

SEQ ID NO: 13992 - DNA, 19 bp, Artificial Sequence
  Description of Artificial Sequence: Synthetic primer
tgcgccttgctattgttgg

SEQ ID NO: 13993 - DNA, 23 bp, Artificial Sequence
  Description of Artificial Sequence: Synthetic primer
cgggacctgaaggtccaattatc

SEQ ID NO: 13994 - DNA, 23 bp, Artificial Sequence
  Description of Artificial Sequence: Synthetic primer
acagaagtctttcaggactgcac

SEQ ID NO: 13995 - DNA, 25 bp, Artificial Sequence
  Description of Artificial Sequence: Synthetic primer
tgcttgtgcctcctttcataatttc

SEQ ID NO: 13996 - DNA, 22 bp, Artificial Sequence
  Description of Artificial Sequence: Synthetic primer
tgatggaaccatcagggtcttc

SEQ ID NO: 13997 - DNA, 21 bp, Artificial Sequence
  Description of Artificial Sequence: Synthetic primer
tggaccttcaagctgattccc

SEQ ID NO: 13998 - DNA, 24 bp, Artificial Sequence
  Description of Artificial Sequence: Synthetic primer
tggtggattgggtatatcagctca

SEQ ID NO: 13999 - DNA, 21 bp, Artificial Sequence
  Description of Artificial Sequence: Synthetic primer
ctgattctgatgctgcccgtt

SEQ ID NO: 14000 - DNA, 23 bp, Artificial Sequence
  Description of Artificial Sequence: Synthetic primer
ctcaacctgagcatatcccaacc

SEQ ID NO: 14001 - DNA, 21 bp, Artificial Sequence
  Description of Artificial Sequence: Synthetic primer
ccagagcatggatgacctgaa

SEQ ID NO: 14002 - DNA, 23 bp, Artificial Sequence
  Description of Artificial Sequence: Synthetic primer
gcaaacaccaacaagctactcat

SEQ ID NO: 14003 - DNA, 21 bp, Artificial Sequence
  Description of Artificial Sequence: Synthetic primer
tcaagaccagccttctgtgac

SEQ ID NO: 14004 - DNA, 27 bp, Artificial Sequence
  Description of Artificial Sequence: Synthetic primer
agtcttttggccccaaatatttcattt

SEQ ID NO: 14005 - DNA, 26 bp, Artificial Sequence
  Description of Artificial Sequence: Synthetic primer
gttgtcatattttgccattgctgaga

SEQ ID NO: 14006 - DNA, 21 bp, Artificial Sequence
  Description of Artificial Sequence: Synthetic primer
gagctcattccggtggaagat

SEQ ID NO: 14007 - DNA, 22 bp, Artificial Sequence
  Description of Artificial Sequence: Synthetic primer
agcttcatatccgcgttttgtg

SEQ ID NO: 14008 - DNA, 19 bp, Artificial Sequence
  Description of Artificial Sequence: Synthetic primer
cgagcaaggctcgatgtgt

SEQ ID NO: 14009 - DNA, 21 bp, Artificial Sequence
  Description of Artificial Sequence: Synthetic primer
ctacacggtcatcgtgcagaa

SEQ ID NO: 14010 - DNA, 24 bp, Artificial Sequence
  Description of Artificial Sequence: Synthetic primer
tgtgatgagttccttcagagtcag

SEQ ID NO: 14011 - DNA, 28 bp, Artificial Sequence
  Description of Artificial Sequence: Synthetic primer
agtactattccatcaaatcaaccagtcg

SEQ ID NO: 14012 - DNA, 23 bp, Artificial Sequence
  Description of Artificial Sequence: Synthetic primer
caagcattagtgcttccaagtgt

SEQ ID NO: 14013 - DNA, 21 bp, Artificial Sequence
  Description of Artificial Sequence: Synthetic primer
gaggtgttctatgacgtcggt

SEQ ID NO: 14014 - DNA, 21 bp, Artificial Sequence
  Description of Artificial Sequence: Synthetic primer
gtggcatgtttgaccagagga

SEQ ID NO: 14015 - DNA, 19 bp, Artificial Sequence
  Description of Artificial Sequence: Synthetic primer
cagtcgctcacctgctgat

SEQ ID NO: 14016 - DNA, 19 bp, Artificial Sequence
  Description of Artificial Sequence: Synthetic primer
tacggcgtgatcaccaacg

SEQ ID NO: 14017 - DNA, 21 bp, Artificial Sequence
  Description of Artificial Sequence: Synthetic primer
cggcacgaggtaggaagatag

SEQ ID NO: 14018 - DNA, 21 bp, Artificial Sequence
  Description of Artificial Sequence: Synthetic primer
ttgattgactaggtgcctgct

SEQ ID NO: 14019 - DNA, 27 bp, Artificial Sequence
  Description of Artificial Sequence: Synthetic primer
tgatggtgctactcagtttctagaaga

SEQ ID NO: 14020 - DNA, 23 bp, Artificial Sequence
  Description of Artificial Sequence: Synthetic primer
caagtactcatctagcacccgtt

SEQ ID NO: 14021 - DNA, 21 bp, Artificial Sequence
  Description of Artificial Sequence: Synthetic primer
gacctgctgctctccactcta

SEQ ID NO: 14022 - DNA, 19 bp, Artificial Sequence
  Description of Artificial Sequence: Synthetic primer
accaacccctcgctcttct

SEQ ID NO: 14023 - DNA, 21 bp, Artificial Sequence
  Description of Artificial Sequence: Synthetic primer
catcccagctttggtgcaaaa

SEQ ID NO: 14024 - DNA, 22 bp, Artificial Sequence
  Description of Artificial Sequence: Synthetic primer
ccttgttgcattagccagctac

SEQ ID NO: 14025 - DNA, 22 bp, Artificial Sequence
  Description of Artificial Sequence: Synthetic primer
gtctgctgctccaataggttct

SEQ ID NO: 14026 - DNA, 23 bp, Artificial Sequence
  Description of Artificial Sequence: Synthetic primer
aaaaacagtgtacgtgtgtcgag

SEQ ID NO: 14027 - DNA, 21 bp, Artificial Sequence
  Description of Artificial Sequence: Synthetic primer
aagctatactttgccccgctt

SEQ ID NO: 14028 - DNA, 21 bp, Artificial Sequence
  Description of Artificial Sequence: Synthetic primer
gttcttcgcagttggcttgtt

SEQ ID NO: 14029 - DNA, 25 bp, Artificial Sequence
  Description of Artificial Sequence: Synthetic primer
atggagcaattcctccaagtctaat

SEQ ID NO: 14030 - DNA, 21 bp, Artificial Sequence
  Description of Artificial Sequence: Synthetic primer
cacctcgatgtcgactcatca

SEQ ID NO: 14031 - DNA, 26 bp, Artificial Sequence
  Description of Artificial Sequence: Synthetic primer
acgttgtgaggatatgtaatggaaca

SEQ ID NO: 14032 - DNA, 25 bp, Artificial Sequence
  Description of Artificial Sequence: Synthetic primer
gtgttatctctcctcgaccaacaat

SEQ ID NO: 14033 - DNA, 21 bp, Artificial Sequence
  Description of Artificial Sequence: Synthetic primer
ggcaagatcaccgggatgtta

SEQ ID NO: 14034 - DNA, 22 bp, Artificial Sequence
  Description of Artificial Sequence: Synthetic primer
acatggcgttaagttgaaaggg

SEQ ID NO: 14035 - DNA, 21 bp, Artificial Sequence
  Description of Artificial Sequence: Synthetic primer
cgtccacatagtggcagagtc

SEQ ID NO: 14036 - DNA, 28 bp, Artificial Sequence
  Description of Artificial Sequence: Synthetic primer
gtgagactgagaattcttccaagttcag

SEQ ID NO: 14037 - DNA, 25 bp, Artificial Sequence
  Description of Artificial Sequence: Synthetic primer
gatgtgtacagtttcggagttgttc

SEQ ID NO: 14038 - DNA, 21 bp, Artificial Sequence
  Description of Artificial Sequence: Synthetic primer
ttcccaggcttgtcttcgatg

SEQ ID NO: 14039 - DNA, 22 bp, Artificial Sequence
  Description of Artificial Sequence: Synthetic primer
acaaaaagacgggatgcatgag

SEQ ID NO: 14040 - DNA, 22 bp, Artificial Sequence
  Description of Artificial Sequence: Synthetic primer
tctgggtgtcaccagactgtta

SEQ ID NO: 14041 - DNA, 26 bp, Artificial Sequence
  Description of Artificial Sequence: Synthetic primer
ggccattattgataggaggtgttagt

SEQ ID NO: 14042 - DNA, 19 bp, Artificial Sequence
  Description of Artificial Sequence: Synthetic primer
cgaccgcctccagatcatg

SEQ ID NO: 14043 - DNA, 24 bp, Artificial Sequence
  Description of Artificial Sequence: Synthetic primer
cgctatagcttgcttgtgcttttt

SEQ ID NO: 14044 - DNA, 26 bp, Artificial Sequence
  Description of Artificial Sequence: Synthetic primer
aagtgaaagttcgtctcaacatccat

SEQ ID NO: 14045 - DNA, 21 bp, Artificial Sequence
  Description of Artificial Sequence: Synthetic primer
tggttcagcactggtggagta

SEQ ID NO: 14046 - DNA, 21 bp, Artificial Sequence
  Description of Artificial Sequence: Synthetic primer
ttgatttgcccgaggaggatg

SEQ ID NO: 14047 - DNA, 26 bp, Artificial Sequence
  Description of Artificial Sequence: Synthetic primer
tgcataatctttatttggccctgatg

SEQ ID NO: 14048 - DNA, 23 bp, Artificial Sequence
  Description of Artificial Sequence: Synthetic primer
agaaagctgggatgttctgtctt

SEQ ID NO: 14049 - DNA, 22 bp, Artificial Sequence
  Description of Artificial Sequence: Synthetic primer
agtgtccagcagctctacaaat

SEQ ID NO: 14050 - DNA, 22 bp, Artificial Sequence
  Description of Artificial Sequence: Synthetic primer
cccatttcagcctatgcacatg

SEQ ID NO: 14051 - DNA, 28 bp, Artificial Sequence
  Description of Artificial Sequence: Synthetic primer
aagaacatttggtagagatagagcacct

SEQ ID NO: 14052 - DNA, 23 bp, Artificial Sequence
  Description of Artificial Sequence: Synthetic primer
gtaccgggtcttcgtcgttaatt

SEQ ID NO: 14053 - DNA, 19 bp, Artificial Sequence
  Description of Artificial Sequence: Synthetic primer
aggtgctgcagttctccaa

SEQ ID NO: 14054 - DNA, 20 bp, Artificial Sequence
  Description of Artificial Sequence: Synthetic primer
gaatgccgtcttcggtgaca

SEQ ID NO: 14055 - DNA, 26 bp, Artificial Sequence
  Description of Artificial Sequence: Synthetic primer
aaggaaaatgttgaatcagctgcaat

SEQ ID NO: 14056 - DNA, 23 bp, Artificial Sequence
  Description of Artificial Sequence: Synthetic primer
gacacattttcatccgagccatc

SEQ ID NO: 14057 - DNA, 28 bp, Artificial Sequence
  Description of Artificial Sequence: Synthetic primer
ttctcgagagattatgctacaagtgaag

SEQ ID NO: 14058 - DNA, 25 bp, Artificial Sequence
  Description of Artificial Sequence: Synthetic primer
tcttgtagatgttcttcctgcttgc

SEQ ID NO: 14059 - DNA, 27 bp, Artificial Sequence
  Description of Artificial Sequence: Synthetic primer
aaaggagaagtatgaaatgctagctgt

SEQ ID NO: 14060 - DNA, 21 bp, Artificial Sequence
  Description of Artificial Sequence: Synthetic primer
gtccactggatcacctccatg

SEQ ID NO: 14061 - DNA, 23 bp, Artificial Sequence
  Description of Artificial Sequence: Synthetic primer
ttgtgctcccatttcttgtgaag

SEQ ID NO: 14062 - DNA, 27 bp, Artificial Sequence
  Description of Artificial Sequence: Synthetic primer
tactgcaatacattggaagatgatcct

SEQ ID NO: 14063 - DNA, 21 bp, Artificial Sequence
  Description of Artificial Sequence: Synthetic primer
agccacgcaagctaaaaggtt

SEQ ID NO: 14064 - DNA, 25 bp, Artificial Sequence
  Description of Artificial Sequence: Synthetic primer
ccaaagcaatagaagacgcaaactc

SEQ ID NO: 14065 - DNA, 21 bp, Artificial Sequence
  Description of Artificial Sequence: Synthetic primer
caggctcgtatgtctgtgagg

SEQ ID NO: 14066 - DNA, 19 bp, Artificial Sequence
  Description of Artificial Sequence: Synthetic primer
aaggcggcctatctgcatt

SEQ ID NO: 14067 - DNA, 21 bp, Artificial Sequence
  Description of Artificial Sequence: Synthetic primer
tgaaagcctttgccctgatct

SEQ ID NO: 14068 - DNA, 23 bp, Artificial Sequence
  Description of Artificial Sequence: Synthetic primer
ggtgctaacttggttcctcttgt

SEQ ID NO: 14069 - DNA, 21 bp, Artificial Sequence
  Description of Artificial Sequence: Synthetic primer
actcctgtggcacaaatcact

SEQ ID NO: 14070 - DNA, 26 bp, Artificial Sequence
  Description of Artificial Sequence: Synthetic primer
tatatccagtatggaccaaagatcgc

SEQ ID NO: 14071 - DNA, 25 bp, Artificial Sequence
  Description of Artificial Sequence: Synthetic primer
cctttagaagatgggacagttccct

SEQ ID NO: 14072 - DNA, 21 bp, Artificial Sequence
  Description of Artificial Sequence: Synthetic primer
caacgagaaggtgcagctcta

SEQ ID NO: 14073 - DNA, 20 bp, Artificial Sequence
  Description of Artificial Sequence: Synthetic primer
cagggaacagcaaggtggtg

SEQ ID NO: 14074 - DNA, 25 bp, Artificial Sequence
  Description of Artificial Sequence: Synthetic primer
catcttagcctttcctggtattgga

SEQ ID NO: 14075 - DNA, 24 bp, Artificial Sequence
  Description of Artificial Sequence: Synthetic primer
tcctcagagtccatataccagctt

SEQ ID NO: 14076 - DNA, 25 bp, Artificial Sequence
  Description of Artificial Sequence: Synthetic primer
cagcatgatacaaaaatcgcaaacc

SEQ ID NO: 14077 - DNA, 23 bp, Artificial Sequence
  Description of Artificial Sequence: Synthetic primer
tgaaagctttatcagacctggca

SEQ ID NO: 14078 - DNA, 22 bp, Artificial Sequence
  Description of Artificial Sequence: Synthetic primer
cgttattgtcgcccttgagaac

SEQ ID NO: 14079 - DNA, 27 bp, Artificial Sequence
  Description of Artificial Sequence: Synthetic primer
aagagaaaagagatcaggatcttctgg

SEQ ID NO: 14080 - DNA, 21 bp, Artificial Sequence
  Description of Artificial Sequence: Synthetic primer
gttcctgagcaatggatgcct

SEQ ID NO: 14081 - DNA, 24 bp, Artificial Sequence
  Description of Artificial Sequence: Synthetic primer
cgaaactttatagctcgtcgtcgt

SEQ ID NO: 14082 - DNA, 21 bp, Artificial Sequence
  Description of Artificial Sequence: Synthetic primer
ctgctcactctgcagaagacg

SEQ ID NO: 14083 - DNA, 23 bp, Artificial Sequence
  Description of Artificial Sequence: Synthetic primer
tgaaggttcctgctcttgctaaa

SEQ ID NO: 14084 - DNA, 21 bp, Artificial Sequence
  Description of Artificial Sequence: Synthetic primer
tacctttggaccgactttccg

SEQ ID NO: 14085 - DNA, 27 bp, Artificial Sequence
  Description of Artificial Sequence: Synthetic primer
cgagaaagagtttgcagtactaaacca

SEQ ID NO: 14086 - DNA, 24 bp, Artificial Sequence
  Description of Artificial Sequence: Synthetic primer
acgtaacaagatcatcagacgaca

SEQ ID NO: 14087 - DNA, 22 bp, Artificial Sequence
  Description of Artificial Sequence: Synthetic primer
ttaacacagatccagggccaga

SEQ ID NO: 14088 - DNA, 24 bp, Artificial Sequence
  Description of Artificial Sequence: Synthetic primer
cccgtacgacagtagtttctgttg

SEQ ID NO: 14089 - DNA, 26 bp, Artificial Sequence
  Description of Artificial Sequence: Synthetic primer
tttttctttcctttcccccattgaac

SEQ ID NO: 14090 - DNA, 26 bp, Artificial Sequence
  Description of Artificial Sequence: Synthetic primer
tctagtttgaccaatggctcttcttt

SEQ ID NO: 14091 - DNA, 21 bp, Artificial Sequence
  Description of Artificial Sequence: Synthetic primer
gaagggcaacagggtcatgtg

SEQ ID NO: 14092 - DNA, 23 bp, Artificial Sequence
  Description of Artificial Sequence: Synthetic primer
gaccggtcaggatattcctcctt

SEQ ID NO: 14093 - DNA, 24 bp, Artificial Sequence
  Description of Artificial Sequence: Synthetic primer
taacacaaggatcagcttcaagca

SEQ ID NO: 14094 - DNA, 24 bp, Artificial Sequence
  Description of Artificial Sequence: Synthetic primer
ggacgagatcatgaggtcctattc

SEQ ID NO: 14095 - DNA, 23 bp, Artificial Sequence
  Description of Artificial Sequence: Synthetic primer
agaaagtggatcctcaaaaggct

SEQ ID NO: 14096 - DNA, 22 bp, Artificial Sequence
  Description of Artificial Sequence: Synthetic primer
aaaatgatgttgctgctgccaa

SEQ ID NO: 14097 - DNA, 22 bp, Artificial Sequence
  Description of Artificial Sequence: Synthetic primer
gtagttccagattcccgggtct

SEQ ID NO: 14098 - DNA, 28 bp, Artificial Sequence
  Description of Artificial Sequence: Synthetic primer
aagtcaatcttgacaatctctggtgaat

SEQ ID NO: 14099 - DNA, 21 bp, Artificial Sequence
  Description of Artificial Sequence: Synthetic primer
tgtgcaacgcacagtgaaaaa

SEQ ID NO: 14100 - DNA, 28 bp, Artificial Sequence
  Description of Artificial Sequence: Synthetic primer
tgagttcactctcattctgaaatctcaa

SEQ ID NO: 14101 - DNA, 22 bp, Artificial Sequence
  Description of Artificial Sequence: Synthetic primer
tgtcttcaacctcgtcagactc

SEQ ID NO: 14102 - DNA, 21 bp, Artificial Sequence
  Description of Artificial Sequence: Synthetic primer
atcctctcgcagaatgctgtg

SEQ ID NO: 14103 - DNA, 25 bp, Artificial Sequence
  Description of Artificial Sequence: Synthetic primer
ttgaacaaactacgtgaaacactcg

SEQ ID NO: 14104 - DNA, 27 bp, Artificial Sequence
  Description of Artificial Sequence: Synthetic primer
tatcatggagtagaggtcttgtacagt

SEQ ID NO: 14105 - DNA, 23 bp, Artificial Sequence
  Description of Artificial Sequence: Synthetic primer
gaagtttgccttcactggactgt

SEQ ID NO: 14106 - DNA, 21 bp, Artificial Sequence
  Description of Artificial Sequence: Synthetic primer
ccagtaggctgtccctgaatc

SEQ ID NO: 14107 - DNA, 28 bp, Artificial Sequence
  Description of Artificial Sequence: Synthetic primer
tcttcttgtatctcgaggaatgaatctg

SEQ ID NO: 14108 - DNA, 21 bp, Artificial Sequence
  Description of Artificial Sequence: Synthetic primer
gtcttggagctgccacatact

SEQ ID NO: 14109 - DNA, 21 bp, Artificial Sequence
  Description of Artificial Sequence: Synthetic primer
gggaacaaaacaggctagtgc

SEQ ID NO: 14110 - DNA, 25 bp, Artificial Sequence
  Description of Artificial Sequence: Synthetic primer
caattgggtttcattaatgcagggt

SEQ ID NO: 14111 - DNA, 23 bp, Artificial Sequence
  Description of Artificial Sequence: Synthetic primer
gcatttcttttgctgggtttgac

SEQ ID NO: 14112 - DNA, 19 bp, Artificial Sequence
  Description of Artificial Sequence: Synthetic primer
gtggcatcgcattggtgct

SEQ ID NO: 14113 - DNA, 22 bp, Artificial Sequence
  Description of Artificial Sequence: Synthetic primer
ctaagattatggcggtcccagt

SEQ ID NO: 14114 - DNA, 28 bp, Artificial Sequence
  Description of Artificial Sequence: Synthetic primer
gataataattaagtgccgagcttgttcc

SEQ ID NO: 14115 - DNA, 28 bp, Artificial Sequence
  Description of Artificial Sequence: Synthetic primer
gttttgataaaattcgacatggacaggt

SEQ ID NO: 14116 - DNA, 20 bp, Artificial Sequence
  Description of Artificial Sequence: Synthetic primer
agaaggccactgtgacagag

SEQ ID NO: 14117 - DNA, 23 bp, Artificial Sequence
  Description of Artificial Sequence: Synthetic primer
ccatggtggtttgtctccatcaa

SEQ ID NO: 14118 - DNA, 21 bp, Artificial Sequence
  Description of Artificial Sequence: Synthetic primer
agcggaaggctcaaactcttg

SEQ ID NO: 14119 - DNA, 25 bp, Artificial Sequence
  Description of Artificial Sequence: Synthetic primer
gttactccattgtcgattggtttgg

SEQ ID NO: 14120 - DNA, 24 bp, Artificial Sequence
  Description of Artificial Sequence: Synthetic primer
tgtcacggtatgtgtcactattgt

SEQ ID NO: 14121 - DNA, 21 bp, Artificial Sequence
  Description of Artificial Sequence: Synthetic primer
ctcgctgctgtgtggtttact

SEQ ID NO: 14122 - DNA, 27 bp, Artificial Sequence
  Description of Artificial Sequence: Synthetic primer
tgcatttcacaattaccatctcacttc

SEQ ID NO: 14123 - DNA, 21 bp, Artificial Sequence
  Description of Artificial Sequence: Synthetic primer
caaagcactcaaggtgagctg

SEQ ID NO: 14124 - DNA, 21 bp, Artificial Sequence
  Description of Artificial Sequence: Synthetic primer
catgaacccaaatgcacgcaa

SEQ ID NO: 14125 - DNA, 29 bp, Artificial Sequence
  Description of Artificial Sequence: Synthetic primer
tattgtggaatacttgtgctttatcgttg

SEQ ID NO: 14126 - DNA, 24 bp, Artificial Sequence
  Description of Artificial Sequence: Synthetic primer
gatagatgagaaagcggaggtgtt

SEQ ID NO: 14127 - DNA, 21 bp, Artificial Sequence
  Description of Artificial Sequence: Synthetic primer
gagccatagacgtctgcctag

SEQ ID NO: 14128 - DNA, 22 bp, Artificial Sequence
  Description of Artificial Sequence: Synthetic primer
cttggtctgatcagtctgcctt

SEQ ID NO: 14129 - DNA, 25 bp, Artificial Sequence
  Description of Artificial Sequence: Synthetic primer
aatgctcttcaggaatccatggaat

SEQ ID NO: 14130 - DNA, 21 bp, Artificial Sequence
  Description of Artificial Sequence: Synthetic primer
caacaggctgaagctggtcaa

SEQ ID NO: 14131 - DNA, 26 bp, Artificial Sequence
  Description of Artificial Sequence: Synthetic primer
tatgttgccgttaatgccatcgtata

SEQ ID NO: 14132 - DNA, 25 bp, Artificial Sequence
  Description of Artificial Sequence: Synthetic primer
tctagaactagcaagggcagaaaat

SEQ ID NO: 14133 - DNA, 22 bp, Artificial Sequence
  Description of Artificial Sequence: Synthetic primer
taagcaaagagggcatccttgg

SEQ ID NO: 14134 - DNA, 21 bp, Artificial Sequence
  Description of Artificial Sequence: Synthetic primer
cagaagcaggagtcctagcaa

SEQ ID NO: 14135 - DNA, 20 bp, Artificial Sequence
  Description of Artificial Sequence: Synthetic primer
ggaggttcttggtgcagtgg

SEQ ID NO: 14136 - DNA, 21 bp, Artificial Sequence
  Description of Artificial Sequence: Synthetic primer
ctgtgccactaagacaggctt

SEQ ID NO: 14137 - DNA, 24 bp, Artificial Sequence
  Description of Artificial Sequence: Synthetic primer
cagaggaatctgaggaatcggatc

SEQ ID NO: 14138 - DNA, 25 bp, Artificial Sequence
  Description of Artificial Sequence: Synthetic primer
ccgctgtgtcatccatacagattaa

SEQ ID NO: 14139 - DNA, 21 bp, Artificial Sequence
  Description of Artificial Sequence: Synthetic primer
ctacctgaccctgttcacgtc

SEQ ID NO: 14140 - DNA, 19 bp, Artificial Sequence
  Description of Artificial Sequence: Synthetic primer
aggcttcttcctgctgcga

SEQ ID NO: 14141 - DNA, 21 bp, Artificial Sequence
  Description of Artificial Sequence: Synthetic primer
gtacgcgcccatgaagaagaa

SEQ ID NO: 14142 - DNA, 23 bp, Artificial Sequence
  Description of Artificial Sequence: Synthetic primer
gttcttgggtacgaggtaaaccc

SEQ ID NO: 14143 - DNA, 23 bp, Artificial Sequence
  Description of Artificial Sequence: Synthetic primer
ctggaaagattccgtgaggatgg

SEQ ID NO: 14144 - DNA, 24 bp, Artificial Sequence
  Description of Artificial Sequence: Synthetic primer
acaggagatcagacgtatctcagt

SEQ ID NO: 14145 - DNA, 24 bp, Artificial Sequence
  Description of Artificial Sequence: Synthetic primer
gggatccttcttttcgaaatgctt

SEQ ID NO: 14146 - DNA, 21 bp, Artificial Sequence
  Description of Artificial Sequence: Synthetic primer
catgcttgctcctgctgaaga

SEQ ID NO: 14147 - DNA, 21 bp, Artificial Sequence
  Description of Artificial Sequence: Synthetic primer
ctcatcttcaacgaccgcttc

SEQ ID NO: 14148 - DNA, 23 bp, Artificial Sequence
  Description of Artificial Sequence: Synthetic primer
aactatggaatgctgcagatcct

SEQ ID NO: 14149 - DNA, 21 bp, Artificial Sequence
  Description of Artificial Sequence: Synthetic primer
ggtccttccactcagctcatc

SEQ ID NO: 14150 - DNA, 21 bp, Artificial Sequence
  Description of Artificial Sequence: Synthetic primer
tcaatgtttctggaggcggaa

SEQ ID NO: 14151 - DNA, 21 bp, Artificial Sequence
  Description of Artificial Sequence: Synthetic primer
cattgtcgtcaaccctgttgc

SEQ ID NO: 14152 - DNA, 21 bp, Artificial Sequence
  Description of Artificial Sequence: Synthetic primer
caagttttggcctgggctttg

SEQ ID NO: 14153 - DNA, 22 bp, Artificial Sequence
  Description of Artificial Sequence: Synthetic primer
ggccagatatctgtgggactca

SEQ ID NO: 14154 - DNA, 21 bp, Artificial Sequence
  Description of Artificial Sequence: Synthetic primer
tgccatctggtatgcgtatgt

SEQ ID NO: 14155 - DNA, 21 bp, Artificial Sequence
  Description of Artificial Sequence: Synthetic primer
tattggcggcataagagcagt

SEQ ID NO: 14156 - DNA, 22 bp, Artificial Sequence
  Description of Artificial Sequence: Synthetic primer
gtctaaccgcttaacccacctt

SEQ ID NO: 14157 - DNA, 21 bp, Artificial Sequence
  Description of Artificial Sequence: Synthetic primer
gagaggtgaggagacttgctg

SEQ ID NO: 14158 - DNA, 21 bp, Artificial Sequence
  Description of Artificial Sequence: Synthetic primer
cggccgaagagttgttctgtt

SEQ ID NO: 14159 - DNA, 19 bp, Artificial Sequence
  Description of Artificial Sequence: Synthetic primer
ggctcgcgaaaggagtgta

SEQ ID NO: 14160 - DNA, 22 bp, Artificial Sequence
  Description of Artificial Sequence: Synthetic primer
ccgatggcgacctatcctttag

SEQ ID NO: 14161 - DNA, 19 bp, Artificial Sequence
  Description of Artificial Sequence: Synthetic primer
gataaggccgggctaccca

SEQ ID NO: 14162 - DNA, 23 bp, Artificial Sequence
  Description of Artificial Sequence: Synthetic primer
tcaattctgctgaagcttgttgc

SEQ ID NO: 14163 - DNA, 23 bp, Artificial Sequence
  Description of Artificial Sequence: Synthetic primer
attgctgttgctacagagaaggg

SEQ ID NO: 14164 - DNA, 21 bp, Artificial Sequence
  Description of Artificial Sequence: Synthetic primer
gagccatcaatgcgctgaatg

SEQ ID NO: 14165 - DNA, 21 bp, Artificial Sequence
  Description of Artificial Sequence: Synthetic primer
gttttcttcagcctgcatgcc

SEQ ID NO: 14166 - DNA, 27 bp, Artificial Sequence
  Description of Artificial Sequence: Synthetic primer
gtgagtgaatcataggttcttgatggc

SEQ ID NO: 14167 - DNA, 25 bp, Artificial Sequence
  Description of Artificial Sequence: Synthetic primer
gcagccacaactatctgttgaaatt

SEQ ID NO: 14168 - DNA, 23 bp, Artificial Sequence
  Description of Artificial Sequence: Synthetic primer
aatgggagcactatcggaaaaca

SEQ ID NO: 14169 - DNA, 19 bp, Artificial Sequence
  Description of Artificial Sequence: Synthetic primer
gtggagtttccccggacag

SEQ ID NO: 14170 - DNA, 21 bp, Artificial Sequence
  Description of Artificial Sequence: Synthetic primer
gtcaacccgatgatggtcaac

SEQ ID NO: 14171 - DNA, 24 bp, Artificial Sequence
  Description of Artificial Sequence: Synthetic primer
gccattatcttctcacccatcgtt

SEQ ID NO: 14172 - DNA, 22 bp, Artificial Sequence
  Description of Artificial Sequence: Synthetic primer
tgttccatagccagcttgttgt

SEQ ID NO: 14173 - DNA, 24 bp, Artificial Sequence
  Description of Artificial Sequence: Synthetic primer
ctgtgatccttcttacttgcccaa

SEQ ID NO: 14174 - DNA, 21 bp, Artificial Sequence
  Description of Artificial Sequence: Synthetic primer
tccatgtccaacgacaccaaa

SEQ ID NO: 14175 - DNA, 25 bp, Artificial Sequence
  Description of Artificial Sequence: Synthetic primer
agtcttgtcgaactttgagagacag

SEQ ID NO: 14176 - DNA, 28 bp, Artificial Sequence
  Description of Artificial Sequence: Synthetic primer
gcataatacctgcctttgaacaagaaat

SEQ ID NO: 14177 - DNA, 25 bp, Artificial Sequence
  Description of Artificial Sequence: Synthetic primer
aacacaggtgaatactttgccatga

SEQ ID NO: 14178 - DNA, 23 bp, Artificial Sequence
  Description of Artificial Sequence: Synthetic primer
gtgttcagcttctcacagatgga

SEQ ID NO: 14179 - DNA, 28 bp, Artificial Sequence
  Description of Artificial Sequence: Synthetic primer
gctttaactttcatcaggatcggtattc

SEQ ID NO: 14180 - DNA, 24 bp, Artificial Sequence
  Description of Artificial Sequence: Synthetic primer
aagagcctaattctttgcagcaag

SEQ ID NO: 14181 - DNA, 21 bp, Artificial Sequence
  Description of Artificial Sequence: Synthetic primer
cactgacggctcaaagtttgt

SEQ ID NO: 14182 - DNA, 21 bp, Artificial Sequence
  Description of Artificial Sequence: Synthetic primer
aagtctggtccgttcccattc

SEQ ID NO: 14183 - DNA, 25 bp, Artificial Sequence
  Description of Artificial Sequence: Synthetic primer
tcaagaggcttgagaagatcaagga

SEQ ID NO: 14184 - DNA, 28 bp, Artificial Sequence
  Description of Artificial Sequence: Synthetic primer
aaaaggtggtgaatgggaaattgataaa

SEQ ID NO: 14185 - DNA, 30 bp, Artificial Sequence
  Description of Artificial Sequence: Synthetic primer
cccgtttctgaaaatgcggtaaaatttata

SEQ ID NO: 14186 - DNA, 20 bp, Artificial Sequence
  Description of Artificial Sequence: Synthetic primer
ctgttcgggctgtttcactg

SEQ ID NO: 14187 - DNA, 21 bp, Artificial Sequence
  Description of Artificial Sequence: Synthetic primer
cacaaaaggctaaccctccga

SEQ ID NO: 14188 - DNA, 27 bp, Artificial Sequence
  Description of Artificial Sequence: Synthetic primer
gaagaaatatactacaaacgggcccaa

SEQ ID NO: 14189 - DNA, 23 bp, Artificial Sequence
  Description of Artificial Sequence: Synthetic primer
tctggtgagcatgaatcatcgag

SEQ ID NO: 14190 - DNA, 24 bp, Artificial Sequence
  Description of Artificial Sequence: Synthetic primer
tgtcacgcaaacagcttacaatag

SEQ ID NO: 14191 - DNA, 27 bp, Artificial Sequence
  Description of Artificial Sequence: Synthetic primer
tgtaggtgaactagtactccctcattt

SEQ ID NO: 14192 - DNA, 26 bp, Artificial Sequence
  Description of Artificial Sequence: Synthetic primer
gttacagctacatggagatgaacacg

SEQ ID NO: 14193 - DNA, 21 bp, Artificial Sequence
  Description of Artificial Sequence: Synthetic primer
ctgtcgatgcatgcaaaggtg

SEQ ID NO: 14194 - DNA, 22 bp, Artificial Sequence
  Description of Artificial Sequence: Synthetic primer
ttgatcgtgtcccagttccttt

SEQ ID NO: 14195 - DNA, 23 bp, Artificial Sequence
  Description of Artificial Sequence: Synthetic primer
gtttattgggttggatgccgaga

SEQ ID NO: 14196 - DNA, 27 bp, Artificial Sequence
  Description of Artificial Sequence: Synthetic primer
ggctaaaaatatgcatgcttgatgttg

SEQ ID NO: 14197 - DNA, 25 bp, Artificial Sequence
  Description of Artificial Sequence: Synthetic primer
cagtgtttatcctcatacccatggt

SEQ ID NO: 14198 - DNA, 21 bp, Artificial Sequence
  Description of Artificial Sequence: Synthetic primer
gatcgaggcgcactacaagag

SEQ ID NO: 14199 - DNA, 21 bp, Artificial Sequence
  Description of Artificial Sequence: Synthetic primer
gactctctgggcacggaatac

SEQ ID NO: 14200 - DNA, 19 bp, Artificial Sequence
  Description of Artificial Sequence: Synthetic primer
agatggccaggtggtctcg

SEQ ID NO: 14201 - DNA, 22 bp, Artificial Sequence
  Description of Artificial Sequence: Synthetic primer
actctggttatagcagctggtg

SEQ ID NO: 14202 - DNA, 21 bp, Artificial Sequence
  Description of Artificial Sequence: Synthetic primer
aagacagcaacctccttctcg

SEQ ID NO: 14203 - DNA, 28 bp, Artificial Sequence
  Description of Artificial Sequence: Synthetic primer
atgaatttgagagagtcaatgggaatca

SEQ ID NO: 14204 - DNA, 21 bp, Artificial Sequence
  Description of Artificial Sequence: Synthetic primer
accaaccatccaagccatcac

SEQ ID NO: 14205 - DNA, 28 bp, Artificial Sequence
  Description of Artificial Sequence: Synthetic primer
gaaggtttacatatactcaagtggcagt

SEQ ID NO: 14206 - DNA, 28 bp, Artificial Sequence
  Description of Artificial Sequence: Synthetic primer
gttacaacctacaaagaagactagacct

SEQ ID NO: 14207 - DNA, 24 bp, Artificial Sequence
  Description of Artificial Sequence: Synthetic primer
ggaatgaagatctaaccaggctct

SEQ ID NO: 14208 - DNA, 21 bp, Artificial Sequence
  Description of Artificial Sequence: Synthetic primer
atggacgtggtgctaacagaa

SEQ ID NO: 14209 - DNA, 19 bp, Artificial Sequence
  Description of Artificial Sequence: Synthetic primer
ggacctccggcctagtctt

SEQ ID NO: 14210 - DNA, 28 bp, Artificial Sequence
  Description of Artificial Sequence: Synthetic primer
ctgagataatggaagaattcacgactca

SEQ ID NO: 14211 - DNA, 23 bp, Artificial Sequence
  Description of Artificial Sequence: Synthetic primer
gggagaggctatatcaaacagca

SEQ ID NO: 14212 - DNA, 28 bp, Artificial Sequence
  Description of Artificial Sequence: Synthetic primer
tatcttgctatggaagctggttatatgg

SEQ ID NO: 14213 - DNA, 21 bp, Artificial Sequence
  Description of Artificial Sequence: Synthetic primer
aagcatgctatctcgccaggt

SEQ ID NO: 14214 - DNA, 23 bp, Artificial Sequence
  Description of Artificial Sequence: Synthetic primer
ccagccaacttagtctgttcagt

SEQ ID NO: 14215 - DNA, 21 bp, Artificial Sequence
  Description of Artificial Sequence: Synthetic primer
gtccggtggcaatgttgtttg

SEQ ID NO: 14216 - DNA, 23 bp, Artificial Sequence
  Description of Artificial Sequence: Synthetic primer
gcgaactgaataccatgaaggtg

SEQ ID NO: 14217 - DNA, 21 bp, Artificial Sequence
  Description of Artificial Sequence: Synthetic primer
tctccagcatgtcctggaagt

SEQ ID NO: 14218 - DNA, 23 bp, Artificial Sequence
  Description of Artificial Sequence: Synthetic primer
ccactccttcagctcattgaggt

SEQ ID NO: 14219 - DNA, 21 bp, Artificial Sequence
  Description of Artificial Sequence: Synthetic primer
tctggagtttgacaggcaaga

SEQ ID NO: 14220 - DNA, 25 bp, Artificial Sequence
  Description of Artificial Sequence: Synthetic primer
cattgatgagcttcacctgaaagga

SEQ ID NO: 14221 - DNA, 24 bp, Artificial Sequence
  Description of Artificial Sequence: Synthetic primer
cgatatgaagaagctggaggagtc

SEQ ID NO: 14222 - DNA, 23 bp, Artificial Sequence
  Description of Artificial Sequence: Synthetic primer
ccatcctctgattccaacaggtg

SEQ ID NO: 14223 - DNA, 23 bp, Artificial Sequence
  Description of Artificial Sequence: Synthetic primer
acttgtcctctcttacaggatgc

SEQ ID NO: 14224 - DNA, 21 bp, Artificial Sequence
  Description of Artificial Sequence: Synthetic primer
tgtgcactactaccacggcta

SEQ ID NO: 14225 - DNA, 28 bp, Artificial Sequence
  Description of Artificial Sequence: Synthetic primer
accgaagatacactttcttaatgctctt

SEQ ID NO: 14226 - DNA, 25 bp, Artificial Sequence
  Description of Artificial Sequence: Synthetic primer
acataattcaaactcgtggtgttcg

SEQ ID NO: 14227 - DNA, 22 bp, Artificial Sequence
  Description of Artificial Sequence: Synthetic primer
cctatttggtgttgaggcaggt

SEQ ID NO: 14228 - DNA, 25 bp, Artificial Sequence
  Description of Artificial Sequence: Synthetic primer
gtttctctccgacaacaggattcat

SEQ ID NO: 14229 - DNA, 27 bp, Artificial Sequence
  Description of Artificial Sequence: Synthetic primer
acagcagcaaagaagttactttaagag

SEQ ID NO: 14230 - DNA, 23 bp, Artificial Sequence
  Description of Artificial Sequence: Synthetic primer
acgagtgccgaaagaaaaacatt

SEQ ID NO: 14231 - DNA, 28 bp, Artificial Sequence
  Description of Artificial Sequence: Synthetic primer
acaataacaggagctctacatatcaacc

SEQ ID NO: 14232 - DNA, 21 bp, Artificial Sequence
  Description of Artificial Sequence: Synthetic primer
gcgaacttgcctgacgagtta

SEQ ID NO: 14233 - DNA, 21 bp, Artificial Sequence
  Description of Artificial Sequence: Synthetic primer
catgtccaatgctcaggccta

SEQ ID NO: 14234 - DNA, 18 bp, Artificial Sequence
  Description of Artificial Sequence: Synthetic primer
gacggttggcgacgagta

SEQ ID NO: 14235 - DNA, 27 bp, Artificial Sequence
  Description of Artificial Sequence: Synthetic primer
tagagtagtacttgattgtgcgacttc

SEQ ID NO: 14236 - DNA, 28 bp, Artificial Sequence
  Description of Artificial Sequence: Synthetic primer
caaatcatgtggattttctttgggtcat

SEQ ID NO: 14237 - DNA, 22 bp, Artificial Sequence
  Description of Artificial Sequence: Synthetic primer
agtgccccaagaagtccttcta

SEQ ID NO: 14238 - DNA, 21 bp, Artificial Sequence
  Description of Artificial Sequence: Synthetic primer
ccctgatggacaagcaaggaa

SEQ ID NO: 14239 - DNA, 22 bp, Artificial Sequence
  Description of Artificial Sequence: Synthetic primer
tactcgacaactccagcaatga

SEQ ID NO: 14240 - DNA, 24 bp, Artificial Sequence
  Description of Artificial Sequence: Synthetic primer
tgaaatcaaagcatggagctctgt

SEQ ID NO: 14241 - DNA, 21 bp, Artificial Sequence
  Description of Artificial Sequence: Synthetic primer
gggacgtacagatgcaacctt

SEQ ID NO: 14242 - DNA, 21 bp, Artificial Sequence
  Description of Artificial Sequence: Synthetic primer
acaatcgacccaatgtccaca

SEQ ID NO: 14243 - DNA, 24 bp, Artificial Sequence
  Description of Artificial Sequence: Synthetic primer
gcacagtacaatgctagtcagcta

SEQ ID NO: 14244 - DNA, 23 bp, Artificial Sequence
  Description of Artificial Sequence: Synthetic primer
agaagttcgtgttcatcgcagag

SEQ ID NO: 14245 - DNA, 27 bp, Artificial Sequence
  Description of Artificial Sequence: Synthetic primer
tgaccaaactatctcacagaaacaact

SEQ ID NO: 14246 - DNA, 21 bp, Artificial Sequence
  Description of Artificial Sequence: Synthetic primer
cgtctcggcctaaatgtcgtc

SEQ ID NO: 14247 - DNA, 24 bp, Artificial Sequence
  Description of Artificial Sequence: Synthetic primer
ctctgcatggcactgacaactata

SEQ ID NO: 14248 - DNA, 20 bp, Artificial Sequence
  Description of Artificial Sequence: Synthetic primer
cgcaccaaggtgttcgagat

SEQ ID NO: 14249 - DNA, 21 bp, Artificial Sequence
  Description of Artificial Sequence: Synthetic primer
aaacttcgcagcacgaatcac

SEQ ID NO: 14250 - DNA, 22 bp, Artificial Sequence
  Description of Artificial Sequence: Synthetic primer
cttcaagtgcaacagctgctac

SEQ ID NO: 14251 - DNA, 22 bp, Artificial Sequence
  Description of Artificial Sequence: Synthetic primer
catggatgtcgatgtggaggaa

SEQ ID NO: 14252 - DNA, 23 bp, Artificial Sequence
  Description of Artificial Sequence: Synthetic primer
tcgatcctgtatgcttctcaacc

SEQ ID NO: 14253 - DNA, 24 bp, Artificial Sequence
  Description of Artificial Sequence: Synthetic primer
agcacagaagctgtttactagcaa

SEQ ID NO: 14254 - DNA, 21 bp, Artificial Sequence
  Description of Artificial Sequence: Synthetic primer
ctccggcagtctgcctagata

SEQ ID NO: 14255 - DNA, 24 bp, Artificial Sequence
  Description of Artificial Sequence: Synthetic primer
ggtcgccattttatgactgctact

SEQ ID NO: 14256 - DNA, 24 bp, Artificial Sequence
  Description of Artificial Sequence: Synthetic primer
gaaatgtagaaatcaaccgcgtgt

SEQ ID NO: 14257 - DNA, 21 bp, Artificial Sequence
  Description of Artificial Sequence: Synthetic primer
cttgacttgttgccgcattca

SEQ ID NO: 14258 - DNA, 21 bp, Artificial Sequence
  Description of Artificial Sequence: Synthetic primer
gccgcagacttgcaaatcaat

SEQ ID NO: 14259 - DNA, 21 bp, Artificial Sequence
  Description of Artificial Sequence: Synthetic primer
agatgaagcgtgatgcgacaa

SEQ ID NO: 14260 - DNA, 20 bp, Artificial Sequence
  Description of Artificial Sequence: Synthetic primer
cagcagcacaactgacgttc

SEQ ID NO: 14261 - DNA, 21 bp, Artificial Sequence
  Description of Artificial Sequence: Synthetic primer
cattgctcaggcttgaaaggc

SEQ ID NO: 14262 - DNA, 23 bp, Artificial Sequence
  Description of Artificial Sequence: Synthetic primer
ccaacgctacccgactataatcc

SEQ ID NO: 14263 - DNA, 24 bp, Artificial Sequence
  Description of Artificial Sequence: Synthetic primer
gcaggagaacttcttgaaattgct

SEQ ID NO: 14264 - DNA, 28 bp, Artificial Sequence
  Description of Artificial Sequence: Synthetic primer
aaatatgcatgtagatgaagaggaggat

SEQ ID NO: 14265 - DNA, 22 bp, Artificial Sequence
  Description of Artificial Sequence: Synthetic primer
ccctgctccttctgaacttcat

SEQ ID NO: 14266 - DNA, 21 bp, Artificial Sequence
  Description of Artificial Sequence: Synthetic primer
ctcgggttgctacttccaact

SEQ ID NO: 14267 - DNA, 23 bp, Artificial Sequence
  Description of Artificial Sequence: Synthetic primer
gctgggatgcttcagtatgatgg

SEQ ID NO: 14268 - DNA, 27 bp, Artificial Sequence
  Description of Artificial Sequence: Synthetic primer
tctgaagatgtacaacacctacaagga

SEQ ID NO: 14269 - DNA, 21 bp, Artificial Sequence
  Description of Artificial Sequence: Synthetic primer
caggagagctttgaggagctg

SEQ ID NO: 14270 - DNA, 24 bp, Artificial Sequence
  Description of Artificial Sequence: Synthetic primer
ggacgaggtgagattcatatcgag

SEQ ID NO: 14271 - DNA, 21 bp, Artificial Sequence
  Description of Artificial Sequence: Synthetic primer
cgtgaacggtgtttccggata

SEQ ID NO: 14272 - DNA, 18 bp, Artificial Sequence
  Description of Artificial Sequence: Synthetic primer
ctgagcgcgtcaccttgg

SEQ ID NO: 14273 - DNA, 28 bp, Artificial Sequence
  Description of Artificial Sequence: Synthetic primer
aataaagcatgatcatgaccatcgtcag

SEQ ID NO: 14274 - DNA, 21 bp, Artificial Sequence
  Description of Artificial Sequence: Synthetic primer
gcgctgtcgtaggtaaacaga

SEQ ID NO: 14275 - DNA, 19 bp, Artificial Sequence
  Description of Artificial Sequence: Synthetic primer
cttcgactgggagctcacc

SEQ ID NO: 14276 - DNA, 21 bp, Artificial Sequence
  Description of Artificial Sequence: Synthetic primer
cgagagttgctaaccgcaaca

SEQ ID NO: 14277 - DNA, 21 bp, Artificial Sequence
  Description of Artificial Sequence: Synthetic primer
taccggcccaaaacctgacta

SEQ ID NO: 14278 - DNA, 21 bp, Artificial Sequence
  Description of Artificial Sequence: Synthetic primer
ctgggttcgaacgctactgtt

SEQ ID NO: 14279 - DNA, 21 bp, Artificial Sequence
  Description of Artificial Sequence: Synthetic primer
cgccctgtgcttaaacatgtg

SEQ ID NO: 14280 - DNA, 28 bp, Artificial Sequence
  Description of Artificial Sequence: Synthetic primer
ggtcacatatcacttcccaacttctatt

SEQ ID NO: 14281 - DNA, 19 bp, Artificial Sequence
  Description of Artificial Sequence: Synthetic primer
tcgaccatggagagcctca

SEQ ID NO: 14282 - DNA, 27 bp, Artificial Sequence
  Description of Artificial Sequence: Synthetic primer
tgaaatgaatggcgataaggaagaaac

SEQ ID NO: 14283 - DNA, 24 bp, Artificial Sequence
  Description of Artificial Sequence: Synthetic primer
ggctacggatactgatgaatgacg

SEQ ID NO: 14284 - DNA, 26 bp, Artificial Sequence
  Description of Artificial Sequence: Synthetic primer
aaagaagcattacattgccacattct

SEQ ID NO: 14285 - DNA, 27 bp, Artificial Sequence
  Description of Artificial Sequence: Synthetic primer
ccttgatacaggtaaagcttctcatcc

SEQ ID NO: 14286 - DNA, 26 bp, Artificial Sequence
  Description of Artificial Sequence: Synthetic primer
ggttgcttatcaacctctctttgttt

SEQ ID NO: 14287 - DNA, 25 bp, Artificial Sequence
  Description of Artificial Sequence: Synthetic primer
actactaagcttcatccaagttggc

SEQ ID NO: 14288 - DNA, 21 bp, Artificial Sequence
  Description of Artificial Sequence: Synthetic primer
ttccggtgatcaactcgtctg

SEQ ID NO: 14289 - DNA, 21 bp, Artificial Sequence
  Description of Artificial Sequence: Synthetic primer
ctagggcgcttcacttttctg

SEQ ID NO: 14290 - DNA, 28 bp, Artificial Sequence
  Description of Artificial Sequence: Synthetic primer
aactcacatctatgctttatttcctgct

SEQ ID NO: 14291 - DNA, 24 bp, Artificial Sequence
  Description of Artificial Sequence: Synthetic primer
tgaggatatgcatgcatttgttcg

SEQ ID NO: 14292 - DNA, 21 bp, Artificial Sequence
  Description of Artificial Sequence: Synthetic primer
gattgcgacagagtcctggtc

SEQ ID NO: 14293 - DNA, 21 bp, Artificial Sequence
  Description of Artificial Sequence: Synthetic primer
atgcctgctctgaaccaactg

SEQ ID NO: 14294 - DNA, 23 bp, Artificial Sequence
  Description of Artificial Sequence: Synthetic primer
ccatctgaaggagcagaacttgt

SEQ ID NO: 14295 - DNA, 18 bp, Artificial Sequence
  Description of Artificial Sequence: Synthetic primer
atctggcagggcgacgaa

SEQ ID NO: 14296 - DNA, 18 bp, Artificial Sequence
  Description of Artificial Sequence: Synthetic primer
gctggagccgcaatgatg

SEQ ID NO: 14297 - DNA, 18 bp, Artificial Sequence
  Description of Artificial Sequence: Synthetic primer
cctcgccaagctgctacg

SEQ ID NO: 14298 - DNA, 28 bp, Artificial Sequence
  Description of Artificial Sequence: Synthetic primer
aacactgtttgttttggtcctttatgat

SEQ ID NO: 14299 - DNA, 21 bp, Artificial Sequence
  Description of Artificial Sequence: Synthetic primer
cgttgaagaggaggagggttt

SEQ ID NO: 14300 - DNA, 26 bp, Artificial Sequence
  Description of Artificial Sequence: Synthetic primer
gagtactcttacgttaacgctccttt

SEQ ID NO: 14301 - DNA, 18 bp, Artificial Sequence
  Description of Artificial Sequence: Synthetic primer
caggtcgccgtgtggttc

SEQ ID NO: 14302 - DNA, 19 bp, Artificial Sequence
  Description of Artificial Sequence: Synthetic primer
gcaatacctgctgcggtga

SEQ ID NO: 14303 - DNA, 21 bp, Artificial Sequence
  Description of Artificial Sequence: Synthetic primer
cccgcttgcgatgaattcaat

SEQ ID NO: 14304 - DNA, 24 bp, Artificial Sequence
  Description of Artificial Sequence: Synthetic primer
aagctcatcttggctgagaatgaa

SEQ ID NO: 14305 - DNA, 27 bp, Artificial Sequence
  Description of Artificial Sequence: Synthetic primer
tggtagaccagtattccatatgaaggt

SEQ ID NO: 14306 - DNA, 21 bp, Artificial Sequence
  Description of Artificial Sequence: Synthetic primer
tgatctctgccacgatgagtg

SEQ ID NO: 14307 - DNA, 19 bp, Artificial Sequence
  Description of Artificial Sequence: Synthetic primer
atacgagggctccgaggat

SEQ ID NO: 14308 - DNA, 23 bp, Artificial Sequence
  Description of Artificial Sequence: Synthetic primer
aatgccttctcagcagttcaaag

SEQ ID NO: 14309 - DNA, 27 bp, Artificial Sequence
  Description of Artificial Sequence: Synthetic primer
acaaaaaccaatccccaatttgatcag

SEQ ID NO: 14310 - DNA, 19 bp, Artificial Sequence
  Description of Artificial Sequence: Synthetic primer
accccctcctctctctctc

SEQ ID NO: 14311 - DNA, 21 bp, Artificial Sequence
  Description of Artificial Sequence: Synthetic primer
attggccgcttcccctatatt

SEQ ID NO: 14312 - DNA, 21 bp, Artificial Sequence
  Description of Artificial Sequence: Synthetic primer
tcttacagccgtctaaacgca

SEQ ID NO: 14313 - DNA, 25 bp, Artificial Sequence
  Description of Artificial Sequence: Synthetic primer
ggtagagaagatggttgaagaagca

SEQ ID NO: 14314 - DNA, 30 bp, Artificial Sequence
  Description of Artificial Sequence: Synthetic primer
catgtacaagctttgttattacaggttcgt

SEQ ID NO: 14315 - DNA, 21 bp, Artificial Sequence
  Description of Artificial Sequence: Synthetic primer
acgccctgtgtactctaggtt

SEQ ID NO: 14316 - DNA, 21 bp, Artificial Sequence
  Description of Artificial Sequence: Synthetic primer
catgtccagcttctggatggt

SEQ ID NO: 14317 - DNA, 22 bp, Artificial Sequence
  Description of Artificial Sequence: Synthetic primer
gtgacggcaattccaagagaaa

SEQ ID NO: 14318 - DNA, 19 bp, Artificial Sequence
  Description of Artificial Sequence: Synthetic primer
cagcgctgacctgcatcta

SEQ ID NO: 14319 - DNA, 19 bp, Artificial Sequence
  Description of Artificial Sequence: Synthetic primer
agctgttgacccgttggga

SEQ ID NO: 14320 - DNA, 23 bp, Artificial Sequence
  Description of Artificial Sequence: Synthetic primer
aaagactccgattcagcatgtca

SEQ ID NO: 14321 - DNA, 26 bp, Artificial Sequence
  Description of Artificial Sequence: Synthetic primer
ctgaagtctagcatcatcagaaccaa

SEQ ID NO: 14322 - DNA, 24 bp, Artificial Sequence
  Description of Artificial Sequence: Synthetic primer
cggagaacatgctggtcgttaata

SEQ ID NO: 14323 - DNA, 21 bp, Artificial Sequence
  Description of Artificial Sequence: Synthetic primer
aagcggatgcatcagttcatg

SEQ ID NO: 14324 - DNA, 22 bp, Artificial Sequence
  Description of Artificial Sequence: Synthetic primer
taccatcatgtttggcggagtt

SEQ ID NO: 14325 - DNA, 26 bp, Artificial Sequence
  Description of Artificial Sequence: Synthetic primer
aactggatgaaagaattgatgccatg

SEQ ID NO: 14326 - DNA, 28 bp, Artificial Sequence
  Description of Artificial Sequence: Synthetic primer
tagatatattgtgctgctacattgtcca

SEQ ID NO: 14327 - DNA, 21 bp, Artificial Sequence
  Description of Artificial Sequence: Synthetic primer
catggtcgaggccaaggtaaa

SEQ ID NO: 14328 - DNA, 22 bp, Artificial Sequence
  Description of Artificial Sequence: Synthetic primer
accataactatccgcggcatac

SEQ ID NO: 14329 - DNA, 26 bp, Artificial Sequence
  Description of Artificial Sequence: Synthetic primer
ccagatagtgtagattcatgggcttt

SEQ ID NO: 14330 - DNA, 24 bp, Artificial Sequence
  Description of Artificial Sequence: Synthetic primer
cacctccatggcttataaacatgc

SEQ ID NO: 14331 - DNA, 22 bp, Artificial Sequence
  Description of Artificial Sequence: Synthetic primer
ctggtgtgccacgagttatttc

SEQ ID NO: 14332 - DNA, 21 bp, Artificial Sequence
  Description of Artificial Sequence: Synthetic primer
gctgcatgctcatgacatgtt

SEQ ID NO: 14333 - DNA, 20 bp, Artificial Sequence
  Description of Artificial Sequence: Synthetic primer
ccggactcaacgacaagctc

SEQ ID NO: 14334 - DNA, 21 bp, Artificial Sequence
  Description of Artificial Sequence: Synthetic primer
tcgtccagtacagctagctga

SEQ ID NO: 14335 - DNA, 22 bp, Artificial Sequence
  Description of Artificial Sequence: Synthetic primer
gattactctgaagcccggtgag

SEQ ID NO: 14336 - DNA, 21 bp, Artificial Sequence
  Description of Artificial Sequence: Synthetic primer
gatgcctggctccatcaacaa

SEQ ID NO: 14337 - DNA, 27 bp, Artificial Sequence
  Description of Artificial Sequence: Synthetic primer
ggagagatagttcatagcaaaagcatg

SEQ ID NO: 14338 - DNA, 21 bp, Artificial Sequence
  Description of Artificial Sequence: Synthetic primer
agagatgcccacggtagcata

SEQ ID NO: 14339 - DNA, 23 bp, Artificial Sequence
  Description of Artificial Sequence: Synthetic primer
tgattggccagtgaatcacacat

SEQ ID NO: 14340 - DNA, 22 bp, Artificial Sequence
  Description of Artificial Sequence: Synthetic primer
actctggagttgatggccagta

SEQ ID NO: 14341 - DNA, 22 bp, Artificial Sequence
  Description of Artificial Sequence: Synthetic primer
cactagccgttatgccattggt

SEQ ID NO: 14342 - DNA, 21 bp, Artificial Sequence
  Description of Artificial Sequence: Synthetic primer
gatgctaccatcgagcacctt

SEQ ID NO: 14343 - DNA, 19 bp, Artificial Sequence
  Description of Artificial Sequence: Synthetic primer
gaccgttcctgagcacctg

SEQ ID NO: 14344 - DNA, 23 bp, Artificial Sequence
  Description of Artificial Sequence: Synthetic primer
ctgaccttaagaagaaggccgaa

SEQ ID NO: 14345 - DNA, 23 bp, Artificial Sequence
  Description of Artificial Sequence: Synthetic primer
tgattatgaagggccaccttgtt

SEQ ID NO: 14346 - DNA, 23 bp, Artificial Sequence
  Description of Artificial Sequence: Synthetic primer
tgaatgtgatgccaccctagttt

SEQ ID NO: 14347 - DNA, 18 bp, Artificial Sequence
  Description of Artificial Sequence: Synthetic primer
acggtcgacaaggccatg

SEQ ID NO: 14348 - DNA, 25 bp, Artificial Sequence
  Description of Artificial Sequence: Synthetic primer
gtttctctcggtgcttttatcatcc

SEQ ID NO: 14349 - DNA, 22 bp, Artificial Sequence
  Description of Artificial Sequence: Synthetic primer
gatgggcagccttgcatagata

SEQ ID NO: 14350 - DNA, 24 bp, Artificial Sequence
  Description of Artificial Sequence: Synthetic primer
aatgtgatgttctgggtgacttgg

SEQ ID NO: 14351 - DNA, 25 bp, Artificial Sequence
  Description of Artificial Sequence: Synthetic primer
gactcttctgaccgtggttctattg

SEQ ID NO: 14352 - DNA, 23 bp, Artificial Sequence
  Description of Artificial Sequence: Synthetic primer
tgtgtcgatactcgttgtgaagg

SEQ ID NO: 14353 - DNA, 21 bp, Artificial Sequence
  Description of Artificial Sequence: Synthetic primer
atacaccggatactcgctcct

SEQ ID NO: 14354 - DNA, 24 bp, Artificial Sequence
  Description of Artificial Sequence: Synthetic primer
tcatctcaccttactggaccagat

SEQ ID NO: 14355 - DNA, 20 bp, Artificial Sequence
  Description of Artificial Sequence: Synthetic primer
tcaaagtcaccggtcgcgta

SEQ ID NO: 14356 - DNA, 21 bp, Artificial Sequence
  Description of Artificial Sequence: Synthetic primer
tgaagtgagtacccagcagga

SEQ ID NO: 14357 - DNA, 23 bp, Artificial Sequence
  Description of Artificial Sequence: Synthetic primer
gaaggtacaccgacgacagattt

SEQ ID NO: 14358 - DNA, 21 bp, Artificial Sequence
  Description of Artificial Sequence: Synthetic primer
acctcttctaccaggacgcat

SEQ ID NO: 14359 - DNA, 21 bp, Artificial Sequence
  Description of Artificial Sequence: Synthetic primer
gctgaatgtccaggacccatt

SEQ ID NO: 14360 - DNA, 25 bp, Artificial Sequence
  Description of Artificial Sequence: Synthetic primer
tgggaggactagtgattgaatttgg

SEQ ID NO: 14361 - DNA, 21 bp, Artificial Sequence
  Description of Artificial Sequence: Synthetic primer
cggtcttgttcagcctgttgt

SEQ ID NO: 14362 - DNA, 22 bp, Artificial Sequence
  Description of Artificial Sequence: Synthetic primer
gagaaggctgccaagaaacatg

SEQ ID NO: 14363 - DNA, 25 bp, Artificial Sequence
  Description of Artificial Sequence: Synthetic primer
agaaggtgatgattcctactcaggt

SEQ ID NO: 14364 - DNA, 21 bp, Artificial Sequence
  Description of Artificial Sequence: Synthetic primer
tcctgcagcacagaagtttgt

SEQ ID NO: 14365 - DNA, 22 bp, Artificial Sequence
  Description of Artificial Sequence: Synthetic primer
agtttttgacgtggtacagcct

SEQ ID NO: 14366 - DNA, 21 bp, Artificial Sequence
  Description of Artificial Sequence: Synthetic primer
aaaaagaggtggcgtcacatg

SEQ ID NO: 14367 - DNA, 21 bp, Artificial Sequence
  Description of Artificial Sequence: Synthetic primer
tgaggccccagatctgttctt

SEQ ID NO: 14368 - DNA, 23 bp, Artificial Sequence
  Description of Artificial Sequence: Synthetic primer
aatctggaggtggatgactccaa

SEQ ID NO: 14369 - DNA, 27 bp, Artificial Sequence
  Description of Artificial Sequence: Synthetic primer
acaaatgatattcttcgacaggtcgag

SEQ ID NO: 14370 - DNA, 25 bp, Artificial Sequence
  Description of Artificial Sequence: Synthetic primer
gcagagattttgttttcctccactg

SEQ ID NO: 14371 - DNA, 27 bp, Artificial Sequence
  Description of Artificial Sequence: Synthetic primer
ttttgactctagaagatatgcccagtt

SEQ ID NO: 14372 - DNA, 27 bp, Artificial Sequence
  Description of Artificial Sequence: Synthetic primer
gaatagtgctctggctctgtgtataac

SEQ ID NO: 14373 - DNA, 21 bp, Artificial Sequence
  Description of Artificial Sequence: Synthetic primer
cggcctttcctatgttggtga

SEQ ID NO: 14374 - DNA, 27 bp, Artificial Sequence
  Description of Artificial Sequence: Synthetic primer
acgtcaaagaggagaattgctaaaaac

SEQ ID NO: 14375 - DNA, 21 bp, Artificial Sequence
  Description of Artificial Sequence: Synthetic primer
acactgcaatgctgcaagcta

SEQ ID NO: 14376 - DNA, 23 bp, Artificial Sequence
  Description of Artificial Sequence: Synthetic primer
ggtacagctgcaatcaagactgt

SEQ ID NO: 14377 - DNA, 23 bp, Artificial Sequence
  Description of Artificial Sequence: Synthetic primer
tctaaacgctgaggtagtcatgc

SEQ ID NO: 14378 - DNA, 24 bp, Artificial Sequence
  Description of Artificial Sequence: Synthetic primer
atgcagtagagatcaccctgaaga

SEQ ID NO: 14379 - DNA, 22 bp, Artificial Sequence
  Description of Artificial Sequence: Synthetic primer
aggtgctattgctgtaccaagg

SEQ ID NO: 14380 - DNA, 28 bp, Artificial Sequence
  Description of Artificial Sequence: Synthetic primer
tatccatgaaatgtatccttctcttccg

SEQ ID NO: 14381 - DNA, 28 bp, Artificial Sequence
  Description of Artificial Sequence: Synthetic primer
tgaacctccctcaaattttgtatgaaga

SEQ ID NO: 14382 - DNA, 21 bp, Artificial Sequence
  Description of Artificial Sequence: Synthetic primer
caggtcgatgaaagctgctca

SEQ ID NO: 14383 - DNA, 25 bp, Artificial Sequence
  Description of Artificial Sequence: Synthetic primer
gttgcacgatatggttacaaggatg

SEQ ID NO: 14384 - DNA, 21 bp, Artificial Sequence
  Description of Artificial Sequence: Synthetic primer
atggctcctccattcttcgtg

SEQ ID NO: 14385 - DNA, 21 bp, Artificial Sequence
  Description of Artificial Sequence: Synthetic primer
accaaagacttgaagcctcgt

SEQ ID NO: 14386 - DNA, 22 bp, Artificial Sequence
  Description of Artificial Sequence: Synthetic primer
ctttactgaggagctgcttgga

SEQ ID NO: 14387 - DNA, 22 bp, Artificial Sequence
  Description of Artificial Sequence: Synthetic primer
ccgcttgacatgaagaggctat

SEQ ID NO: 14388 - DNA, 21 bp, Artificial Sequence
  Description of Artificial Sequence: Synthetic primer
cctggagacgagggagatagc

SEQ ID NO: 14389 - DNA, 22 bp, Artificial Sequence
  Description of Artificial Sequence: Synthetic primer
gacctcatcaagtacgggttcc

SEQ ID NO: 14390 - DNA, 18 bp, Artificial Sequence
  Description of Artificial Sequence: Synthetic primer
ccgcatccatggctacgc

SEQ ID NO: 14391 - DNA, 24 bp, Artificial Sequence
  Description of Artificial Sequence: Synthetic primer
ctggtcgactgtgacactctatac

SEQ ID NO: 14392 - DNA, 21 bp, Artificial Sequence
  Description of Artificial Sequence: Synthetic primer
gcaatgcggaggtcgacaata

SEQ ID NO: 14393 - DNA, 21 bp, Artificial Sequence
  Description of Artificial Sequence: Synthetic primer
gttcaggtttaccccaatgcg

SEQ ID NO: 14394 - DNA, 21 bp, Artificial Sequence
  Description of Artificial Sequence: Synthetic primer
aatgtgtcgttgacgctaggg

SEQ ID NO: 14395 - DNA, 21 bp, Artificial Sequence
  Description of Artificial Sequence: Synthetic primer
tactcagatgcgtacgccatg

SEQ ID NO: 14396 - DNA, 22 bp, Artificial Sequence
  Description of Artificial Sequence: Synthetic primer
tgtcattgtctgttgggtcaga

SEQ ID NO: 14397 - DNA, 21 bp, Artificial Sequence
  Description of Artificial Sequence: Synthetic primer
cactggattcagcgctttctc

SEQ ID NO: 14398 - DNA, 18 bp, Artificial Sequence
  Description of Artificial Sequence: Synthetic primer
ggttcgcagagctgctca

SEQ ID NO: 14399 - DNA, 19 bp, Artificial Sequence
  Description of Artificial Sequence: Synthetic primer
ctctcaggtttgcgacagc

SEQ ID NO: 14400 - DNA, 24 bp, Artificial Sequence
  Description of Artificial Sequence: Synthetic primer
tggaagtcggaaagatgaagcttt

SEQ ID NO: 14401 - DNA, 20 bp, Artificial Sequence
  Description of Artificial Sequence: Synthetic primer
cctgaatggtcggcaaacga

SEQ ID NO: 14402 - DNA, 21 bp, Artificial Sequence
  Description of Artificial Sequence: Synthetic primer
ctggcaatgagctacaaggca

SEQ ID NO: 14403 - DNA, 23 bp, Artificial Sequence
  Description of Artificial Sequence: Synthetic primer
tctcctgatggacggtatgttct

SEQ ID NO: 14404 - DNA, 21 bp, Artificial Sequence
  Description of Artificial Sequence: Synthetic primer
gcgacccttggacagattttg

SEQ ID NO: 14405 - DNA, 21 bp, Artificial Sequence
  Description of Artificial Sequence: Synthetic primer
ctgagcacgccaattgtagtc

SEQ ID NO: 14406 - DNA, 26 bp, Artificial Sequence
  Description of Artificial Sequence: Synthetic primer
gctctacttgaggatgggattaatgt

SEQ ID NO: 14407 - DNA, 21 bp, Artificial Sequence
  Description of Artificial Sequence: Synthetic primer
gattagggcccttctggcttg

SEQ ID NO: 14408 - DNA, 26 bp, Artificial Sequence
  Description of Artificial Sequence: Synthetic primer
gggcacctgtaactccaatagtttta

SEQ ID NO: 14409 - DNA, 21 bp, Artificial Sequence
  Description of Artificial Sequence: Synthetic primer
tgactcaccagtatgccccat

SEQ ID NO: 14410 - DNA, 23 bp, Artificial Sequence
  Description of Artificial Sequence: Synthetic primer
acagaatggctgccaagtcatta

SEQ ID NO: 14411 - DNA, 21 bp, Artificial Sequence
  Description of Artificial Sequence: Synthetic primer
cgtatgttccgcagacggtta

SEQ ID NO: 14412 - DNA, 22 bp, Artificial Sequence
  Description of Artificial Sequence: Synthetic primer
ccaggccgatgacatagagaat

SEQ ID NO: 14413 - DNA, 21 bp, Artificial Sequence
  Description of Artificial Sequence: Synthetic primer
ctgccgatgcgcatttagttg

SEQ ID NO: 14414 - DNA, 25 bp, Artificial Sequence
  Description of Artificial Sequence: Synthetic primer
gagatggtgctgcttgagaattaca

SEQ ID NO: 14415 - DNA, 28 bp, Artificial Sequence
  Description of Artificial Sequence: Synthetic primer
actcaccaagactacatcacatttttgt

SEQ ID NO: 14416 - DNA, 21 bp, Artificial Sequence
  Description of Artificial Sequence: Synthetic primer
cgagaaggcctcatgcatttc

SEQ ID NO: 14417 - DNA, 22 bp, Artificial Sequence
  Description of Artificial Sequence: Synthetic primer
caaacccgcaatactacacagc

SEQ ID NO: 14418 - DNA, 23 bp, Artificial Sequence
  Description of Artificial Sequence: Synthetic primer
acgagctaaaatttctcggtcca

SEQ ID NO: 14419 - DNA, 28 bp, Artificial Sequence
  Description of Artificial Sequence: Synthetic primer
cacaatgaaaataatgcaagaagaggca

SEQ ID NO: 14420 - DNA, 23 bp, Artificial Sequence
  Description of Artificial Sequence: Synthetic primer
ggttggtgaccttgttgaggtaa

SEQ ID NO: 14421 - DNA, 26 bp, Artificial Sequence
  Description of Artificial Sequence: Synthetic primer
agatgcacatccattagctcaagaag

SEQ ID NO: 14422 - DNA, 21 bp, Artificial Sequence
  Description of Artificial Sequence: Synthetic primer
cagggcgacctcgtatagatg

SEQ ID NO: 14423 - DNA, 21 bp, Artificial Sequence
  Description of Artificial Sequence: Synthetic primer
tcctacaggcttgcctcaaga

SEQ ID NO: 14424 - DNA, 21 bp, Artificial Sequence
  Description of Artificial Sequence: Synthetic primer
gaggaactgccgagctattca

SEQ ID NO: 14425 - DNA, 24 bp, Artificial Sequence
  Description of Artificial Sequence: Synthetic primer
gctgtatattccaccgaaatggtg

SEQ ID NO: 14426 - DNA, 21 bp, Artificial Sequence
  Description of Artificial Sequence: Synthetic primer
cagcagggtgttcgattccaa

SEQ ID NO: 14427 - DNA, 24 bp, Artificial Sequence
  Description of Artificial Sequence: Synthetic primer
ggagcatcagcaatgaaagctatg

SEQ ID NO: 14428 - DNA, 19 bp, Artificial Sequence
  Description of Artificial Sequence: Synthetic primer
gaaatccccaaccctgcgt

SEQ ID NO: 14429 - DNA, 24 bp, Artificial Sequence
  Description of Artificial Sequence: Synthetic primer
gatttgatgtgctgcagtgatgat

SEQ ID NO: 14430 - DNA, 21 bp, Artificial Sequence
  Description of Artificial Sequence: Synthetic primer
accattgccgtgcatactttc

SEQ ID NO: 14431 - DNA, 23 bp, Artificial Sequence
  Description of Artificial Sequence: Synthetic primer
agcttagtagcttgaaccaacgg

SEQ ID NO: 14432 - DNA, 28 bp, Artificial Sequence
  Description of Artificial Sequence: Synthetic primer
tttgatgggaaattaaagcagctagaag

SEQ ID NO: 14433 - DNA, 21 bp, Artificial Sequence
  Description of Artificial Sequence: Synthetic primer
ggccgtgactcttgtttcagt

SEQ ID NO: 14434 - DNA, 21 bp, Artificial Sequence
  Description of Artificial Sequence: Synthetic primer
tgcacctgatgaccttcatgg

SEQ ID NO: 14435 - DNA, 23 bp, Artificial Sequence
  Description of Artificial Sequence: Synthetic primer
agtagctgcattgatcgaatcct

SEQ ID NO: 14436 - DNA, 22 bp, Artificial Sequence
  Description of Artificial Sequence: Synthetic primer
tcgacattgtctccctcgcata

SEQ ID NO: 14437 - DNA, 25 bp, Artificial Sequence
  Description of Artificial Sequence: Synthetic primer
tccaaagtacctcagcttcttgatg

SEQ ID NO: 14438 - DNA, 25 bp, Artificial Sequence
  Description of Artificial Sequence: Synthetic primer
cagagaataggcgatctgtgtatcc

SEQ ID NO: 14439 - DNA, 26 bp, Artificial Sequence
  Description of Artificial Sequence: Synthetic primer
ccgtcgatcccaataaggatatcatt

SEQ ID NO: 14440 - DNA, 23 bp, Artificial Sequence
  Description of Artificial Sequence: Synthetic primer
gctacatatcccaaggtcccaga

SEQ ID NO: 14441 - DNA, 19 bp, Artificial Sequence
  Description of Artificial Sequence: Synthetic primer
acgagctgtccgagagcta

SEQ ID NO: 14442 - DNA, 24 bp, Artificial Sequence
  Description of Artificial Sequence: Synthetic primer
cgaacacaggactgtataaaccga

SEQ ID NO: 14443 - DNA, 22 bp, Artificial Sequence
  Description of Artificial Sequence: Synthetic primer
ggacgatccatgaatacgccaa

SEQ ID NO: 14444 - DNA, 21 bp, Artificial Sequence
  Description of Artificial Sequence: Synthetic primer
gatcaaccctgtcttgccaac

SEQ ID NO: 14445 - DNA, 26 bp, Artificial Sequence
  Description of Artificial Sequence: Synthetic primer
gactggcactttattgagtctagacg

SEQ ID NO: 14446 - DNA, 21 bp, Artificial Sequence
  Description of Artificial Sequence: Synthetic primer
cccaagcaaacgaggtgtagg

SEQ ID NO: 14447 - DNA, 22 bp, Artificial Sequence
  Description of Artificial Sequence: Synthetic primer
acgcaggaacaagtaagcttct

SEQ ID NO: 14448 - DNA, 23 bp, Artificial Sequence
  Description of Artificial Sequence: Synthetic primer
tgcaagcaattaactgtgcaaca

SEQ ID NO: 14449 - DNA, 21 bp, Artificial Sequence
  Description of Artificial Sequence: Synthetic primer
ccagggctcttcatcttctcc

SEQ ID NO: 14450 - DNA, 22 bp, Artificial Sequence
  Description of Artificial Sequence: Synthetic primer
tttgcagcctgtgagagaaaca

SEQ ID NO: 14451 - DNA, 21 bp, Artificial Sequence
  Description of Artificial Sequence: Synthetic primer
cacaggcaggcagctatatcc

SEQ ID NO: 14452 - DNA, 22 bp, Artificial Sequence
  Description of Artificial Sequence: Synthetic primer
gaacaatacatggtgccccctt

SEQ ID NO: 14453 - DNA, 23 bp, Artificial Sequence
  Description of Artificial Sequence: Synthetic primer
cctacaagctttgacatggcttc

SEQ ID NO: 14454 - DNA, 24 bp, Artificial Sequence
  Description of Artificial Sequence: Synthetic primer
tggacttctcggaccattgtttag

SEQ ID NO: 14455 - DNA, 24 bp, Artificial Sequence
  Description of Artificial Sequence: Synthetic primer
gtgacttgctctaccgagatctct

SEQ ID NO: 14456 - DNA, 28 bp, Artificial Sequence
  Description of Artificial Sequence: Synthetic primer
ctatcacagagttatatggtgagttccg

SEQ ID NO: 14457 - DNA, 26 bp, Artificial Sequence
  Description of Artificial Sequence: Synthetic primer
acgaaagaaaaatcaggtgcttgatg

SEQ ID NO: 14458 - DNA, 25 bp, Artificial Sequence
  Description of Artificial Sequence: Synthetic primer
tgcaatttttgtcaaagccgttact

SEQ ID NO: 14459 - DNA, 24 bp, Artificial Sequence
  Description of Artificial Sequence: Synthetic primer
agcaggatgatgagtatcttgcag

SEQ ID NO: 14460 - DNA, 22 bp, Artificial Sequence
  Description of Artificial Sequence: Synthetic primer
gggaagacgctttttgagatcc

SEQ ID NO: 14461 - DNA, 26 bp, Artificial Sequence
  Description of Artificial Sequence: Synthetic primer
tcatttttgggtggaggatagatctg

SEQ ID NO: 14462 - DNA, 23 bp, Artificial Sequence
  Description of Artificial Sequence: Synthetic primer
gcacccgtatttcaacagagaag

SEQ ID NO: 14463 - DNA, 21 bp, Artificial Sequence
  Description of Artificial Sequence: Synthetic primer
ggacaggtacggcttaactgc

SEQ ID NO: 14464 - DNA, 24 bp, Artificial Sequence
  Description of Artificial Sequence: Synthetic primer
ccttttccgagatacgagttcaca

SEQ ID NO: 14465 - DNA, 22 bp, Artificial Sequence
  Description of Artificial Sequence: Synthetic primer
gggatttcacgcttgctgattt

SEQ ID NO: 14466 - DNA, 26 bp, Artificial Sequence
  Description of Artificial Sequence: Synthetic primer
aagtaggacagtaggaacacatctct

SEQ ID NO: 14467 - DNA, 28 bp, Artificial Sequence
  Description of Artificial Sequence: Synthetic primer
ctgtttggaaattctggagagtatgttg

SEQ ID NO: 14468 - DNA, 21 bp, Artificial Sequence
  Description of Artificial Sequence: Synthetic primer
gcgagagtcaaggagatcacg

SEQ ID NO: 14469 - DNA, 30 bp, Artificial Sequence
  Description of Artificial Sequence: Synthetic primer
gatgatatgaaggcttcttaatgctatact

SEQ ID NO: 14470 - DNA, 22 bp, Artificial Sequence
  Description of Artificial Sequence: Synthetic primer
tagagtgagccttctccttcca

SEQ ID NO: 14471 - DNA, 22 bp, Artificial Sequence
  Description of Artificial Sequence: Synthetic primer
cgttgtgatcgcagtcatcttc

SEQ ID NO: 14472 - DNA, 21 bp, Artificial Sequence
  Description of Artificial Sequence: Synthetic primer
aactctgtcacaggttgcagt

SEQ ID NO: 14473 - DNA, 23 bp, Artificial Sequence
  Description of Artificial Sequence: Synthetic primer
ccaatctcgagccgacaaacata

SEQ ID NO: 14474 - DNA, 20 bp, Artificial Sequence
  Description of Artificial Sequence: Synthetic primer
ctcactggcgtgttgatcct

SEQ ID NO: 14475 - DNA, 21 bp, Artificial Sequence
  Description of Artificial Sequence: Synthetic primer
tgcaactgttgttagcacgga

SEQ ID NO: 14476 - DNA, 23 bp, Artificial Sequence
  Description of Artificial Sequence: Synthetic primer
gaaggtgatgcattggaagctag

SEQ ID NO: 14477 - DNA, 24 bp, Artificial Sequence
  Description of Artificial Sequence: Synthetic primer
tcgatgatcgatgacgagagtttt

SEQ ID NO: 14478 - DNA, 21 bp, Artificial Sequence
  Description of Artificial Sequence: Synthetic primer
gtggagctgcttcttcaggtt

SEQ ID NO: 14479 - DNA, 25 bp, Artificial Sequence
  Description of Artificial Sequence: Synthetic primer
aagagcgctatgcaaattctgatgt

SEQ ID NO: 14480 - DNA, 26 bp, Artificial Sequence
  Description of Artificial Sequence: Synthetic primer
cctataaaggcagaagtatccggatg

SEQ ID NO: 14481 - DNA, 21 bp, Artificial Sequence
  Description of Artificial Sequence: Synthetic primer
caagtccctcgactcatccct

SEQ ID NO: 14482 - DNA, 21 bp, Artificial Sequence
  Description of Artificial Sequence: Synthetic primer
acccctgtcttgcaacacttt

SEQ ID NO: 14483 - DNA, 21 bp, Artificial Sequence
  Description of Artificial Sequence: Synthetic primer
gttttcgcagacgctcaagtg

SEQ ID NO: 14484 - DNA, 22 bp, Artificial Sequence
  Description of Artificial Sequence: Synthetic primer
gcggttgaatttgacaccgtac

SEQ ID NO: 14485 - DNA, 27 bp, Artificial Sequence
  Description of Artificial Sequence: Synthetic primer
aaagttgaatatggtttacgaggttgg

SEQ ID NO: 14486 - DNA, 21 bp, Artificial Sequence
  Description of Artificial Sequence: Synthetic primer
cgtcccagtttcgtaatgtcg

SEQ ID NO: 14487 - DNA, 23 bp, Artificial Sequence
  Description of Artificial Sequence: Synthetic primer
ccagaggaagaaggatcgttcat

SEQ ID NO: 14488 - DNA, 27 bp, Artificial Sequence
  Description of Artificial Sequence: Synthetic primer
gtgatccagatagaccctaggaatacg

SEQ ID NO: 14489 - DNA, 26 bp, Artificial Sequence
  Description of Artificial Sequence: Synthetic primer
ctggacaaaggcgctaaaatatatgc

SEQ ID NO: 14490 - DNA, 28 bp, Artificial Sequence
  Description of Artificial Sequence: Synthetic primer
cactcttaactttcctaaaacgaccaag

SEQ ID NO: 14491 - DNA, 26 bp, Artificial Sequence
  Description of Artificial Sequence: Synthetic primer
aggaaatcagttgagaagtcatctgg

SEQ ID NO: 14492 - DNA, 22 bp, Artificial Sequence
  Description of Artificial Sequence: Synthetic primer
tccttcgtttccgagtacccta

SEQ ID NO: 14493 - DNA, 21 bp, Artificial Sequence
  Description of Artificial Sequence: Synthetic primer
gccgcattgtcactctcgata

SEQ ID NO: 14494 - DNA, 21 bp, Artificial Sequence
  Description of Artificial Sequence: Synthetic primer
gtgcccagtccttggatttca

SEQ ID NO: 14495 - DNA, 21 bp, Artificial Sequence
  Description of Artificial Sequence: Synthetic primer
gggaaaagcacttcgaagctg

SEQ ID NO: 14496 - DNA, 21 bp, Artificial Sequence
  Description of Artificial Sequence: Synthetic primer
ctgctgttcaagtaccccagt

SEQ ID NO: 14497 - DNA, 21 bp, Artificial Sequence
  Description of Artificial Sequence: Synthetic primer
gagatgagcaagctcgagcaa

SEQ ID NO: 14498 - DNA, 18 bp, Artificial Sequence
  Description of Artificial Sequence: Synthetic primer
tcatcgcttcccccttca

SEQ ID NO: 14499 - DNA, 19 bp, Artificial Sequence
  Description of Artificial Sequence: Synthetic primer
ctaggcaggctgtgacgtt

SEQ ID NO: 14500 - DNA, 18 bp, Artificial Sequence
  Description of Artificial Sequence: Synthetic primer
tgggttccctgcctggag

SEQ ID NO: 14501 - DNA, 23 bp, Artificial Sequence
  Description of Artificial Sequence: Synthetic primer
tggtaaaggtggagcaacaatca

SEQ ID NO: 14502 - DNA, 28 bp, Artificial Sequence
  Description of Artificial Sequence: Synthetic primer
aagggctgaagtatctgatatagcaatt

SEQ ID NO: 14503 - DNA, 24 bp, Artificial Sequence
  Description of Artificial Sequence: Synthetic primer
ccaaagtcattgatcaccctctct

SEQ ID NO: 14504 - DNA, 21 bp, Artificial Sequence
  Description of Artificial Sequence: Synthetic primer
tggaacggcatgaagtcttcg

SEQ ID NO: 14505 - DNA, 19 bp, Artificial Sequence
  Description of Artificial Sequence: Synthetic primer
cggtccgtgtcgatgaatg

SEQ ID NO: 14506 - DNA, 23 bp, Artificial Sequence
  Description of Artificial Sequence: Synthetic primer
cagttcctgcatcagccttatct

SEQ ID NO: 14507 - DNA, 27 bp, Artificial Sequence
  Description of Artificial Sequence: Synthetic primer
tatttctcattgataactgggcggttc

SEQ ID NO: 14508 - DNA, 21 bp, Artificial Sequence
  Description of Artificial Sequence: Synthetic primer
gttcctctgcgaaactgtgac

SEQ ID NO: 14509 - DNA, 21 bp, Artificial Sequence
  Description of Artificial Sequence: Synthetic primer
ctgccagctcaagacacttca

SEQ ID NO: 14510 - DNA, 23 bp, Artificial Sequence
  Description of Artificial Sequence: Synthetic primer
ggtactggacaatgtggaagctc

SEQ ID NO: 14511 - DNA, 22 bp, Artificial Sequence
  Description of Artificial Sequence: Synthetic primer
gtctctgctgaggacaagacaa

SEQ ID NO: 14512 - DNA, 22 bp, Artificial Sequence
  Description of Artificial Sequence: Synthetic primer
gtccttgacgtcgctactttga

SEQ ID NO: 14513 - DNA, 21 bp, Artificial Sequence
  Description of Artificial Sequence: Synthetic primer
ggctcttgcccttcaagaaag

SEQ ID NO: 14514 - DNA, 22 bp, Artificial Sequence
  Description of Artificial Sequence: Synthetic primer
cgctctgctttcctaggaagaa

SEQ ID NO: 14515 - DNA, 23 bp, Artificial Sequence
  Description of Artificial Sequence: Synthetic primer
gcgaacactggattgttgaatga

SEQ ID NO: 14516 - DNA, 28 bp, Artificial Sequence
  Description of Artificial Sequence: Synthetic primer
ttgtagttgaggttggaggtattgaaat

SEQ ID NO: 14517 - DNA, 28 bp, Artificial Sequence
  Description of Artificial Sequence: Synthetic primer
acttttcgcatctaagcttagacataag

SEQ ID NO: 14518 - DNA, 21 bp, Artificial Sequence
  Description of Artificial Sequence: Synthetic primer
aaggccgagcacaaattgttc

SEQ ID NO: 14519 - DNA, 24 bp, Artificial Sequence
  Description of Artificial Sequence: Synthetic primer
acaaattcaactgtggctcagttc

SEQ ID NO: 14520 - DNA, 28 bp, Artificial Sequence
  Description of Artificial Sequence: Synthetic primer
tcaatgaattctgtatcaatccctgtct

SEQ ID NO: 14521 - DNA, 27 bp, Artificial Sequence
  Description of Artificial Sequence: Synthetic primer
gcgtcaacctaacaagatttaactcag

SEQ ID NO: 14522 - DNA, 25 bp, Artificial Sequence
  Description of Artificial Sequence: Synthetic primer
agaaaatacaccaactgaacgatgg

SEQ ID NO: 14523 - DNA, 22 bp, Artificial Sequence
  Description of Artificial Sequence: Synthetic primer
cgggttgaagactaaggatggt

SEQ ID NO: 14524 - DNA, 28 bp, Artificial Sequence
  Description of Artificial Sequence: Synthetic primer
tcaagtaaagttagacacagaaacccat

SEQ ID NO: 14525 - DNA, 23 bp, Artificial Sequence
  Description of Artificial Sequence: Synthetic primer
ggtgtttgaactcagcctcatct

SEQ ID NO: 14526 - DNA, 22 bp, Artificial Sequence
  Description of Artificial Sequence: Synthetic primer
gggtttctggctaaaactggct

SEQ ID NO: 14527 - DNA, 26 bp, Artificial Sequence
  Description of Artificial Sequence: Synthetic primer
caatggaaacatatcaggaagggcta

SEQ ID NO: 14528 - DNA, 25 bp, Artificial Sequence
  Description of Artificial Sequence: Synthetic primer
gagggtaagctggagagaaacaaaa

SEQ ID NO: 14529 - DNA, 25 bp, Artificial Sequence
  Description of Artificial Sequence: Synthetic primer
tgttttgcaataacagacgaggttt

SEQ ID NO: 14530 - DNA, 25 bp, Artificial Sequence
  Description of Artificial Sequence: Synthetic primer
cttgacatgatacatgccactcctt

SEQ ID NO: 14531 - DNA, 23 bp, Artificial Sequence
  Description of Artificial Sequence: Synthetic primer
cagggacctggttattttggact

SEQ ID NO: 14532 - DNA, 21 bp, Artificial Sequence
  Description of Artificial Sequence: Synthetic primer
ccttcctggacgagaatgcag

SEQ ID NO: 14533 - DNA, 21 bp, Artificial Sequence
  Description of Artificial Sequence: Synthetic primer
agaccatgaaaaggctgttgc

SEQ ID NO: 14534 - DNA, 21 bp, Artificial Sequence
  Description of Artificial Sequence: Synthetic primer
tggaggtgtaggtctcaccat

SEQ ID NO: 14535 - DNA, 21 bp, Artificial Sequence
  Description of Artificial Sequence: Synthetic primer
ggtggcttgtgaggatgatga

SEQ ID NO: 14536 - DNA, 27 bp, Artificial Sequence
  Description of Artificial Sequence: Synthetic primer
acgttcagtagtactagtagtagcgtt

SEQ ID NO: 14537 - DNA, 21 bp, Artificial Sequence
  Description of Artificial Sequence: Synthetic primer
cttccaatcgcttccctacac

SEQ ID NO: 14538 - DNA, 22 bp, Artificial Sequence
  Description of Artificial Sequence: Synthetic primer
ggcttagcagcttgtggtgtta

SEQ ID NO: 14539 - DNA, 22 bp, Artificial Sequence
  Description of Artificial Sequence: Synthetic primer
gtactgtcactcaggtggagga

SEQ ID NO: 14540 - DNA, 26 bp, Artificial Sequence
  Description of Artificial Sequence: Synthetic primer
tatcttgggaatcgttattgttggct

SEQ ID NO: 14541 - DNA, 23 bp, Artificial Sequence
  Description of Artificial Sequence: Synthetic primer
gtgtcaaattgggtctgatgtcc

SEQ ID NO: 14542 - DNA, 18 bp, Artificial Sequence
  Description of Artificial Sequence: Synthetic primer
gcccgagtgcctcaagag

SEQ ID NO: 14543 - DNA, 23 bp, Artificial Sequence
  Description of Artificial Sequence: Synthetic primer
gttgtgtctgaagaaaggatcgc

SEQ ID NO: 14544 - DNA, 28 bp, Artificial Sequence
  Description of Artificial Sequence: Synthetic primer
ctgttgtacttgtatcctatggaactgt

SEQ ID NO: 14545 - DNA, 19 bp, Artificial Sequence
  Description of Artificial Sequence: Synthetic primer
ggtggctgaggtagtggag

SEQ ID NO: 14546 - DNA, 21 bp, Artificial Sequence
  Description of Artificial Sequence: Synthetic primer
agtgatatttcgctgggcact

SEQ ID NO: 14547 - DNA, 24 bp, Artificial Sequence
  Description of Artificial Sequence: Synthetic primer
tgtaattgttgtctttgcctccca

SEQ ID NO: 14548 - DNA, 28 bp, Artificial Sequence
  Description of Artificial Sequence: Synthetic primer
cagaaaatgtgctccttgataacaagtt

SEQ ID NO: 14549 - DNA, 21 bp, Artificial Sequence
  Description of Artificial Sequence: Synthetic primer
gtacgtgtgatgccctagcag

SEQ ID NO: 14550 - DNA, 26 bp, Artificial Sequence
  Description of Artificial Sequence: Synthetic primer
tcttcttcaggcttctcatggatatt

SEQ ID NO: 14551 - DNA, 22 bp, Artificial Sequence
  Description of Artificial Sequence: Synthetic primer
cggcgtgatggccttaaatttg

SEQ ID NO: 14552 - DNA, 21 bp, Artificial Sequence
  Description of Artificial Sequence: Synthetic primer
cgggaggctttctgttgtttg

SEQ ID NO: 14553 - DNA, 25 bp, Artificial Sequence
  Description of Artificial Sequence: Synthetic primer
acactgttgtataggatcctcttcg

SEQ ID NO: 14554 - DNA, 21 bp, Artificial Sequence
  Description of Artificial Sequence: Synthetic primer
gtggtcgagcctctacagcta

SEQ ID NO: 14555 - DNA, 24 bp, Artificial Sequence
  Description of Artificial Sequence: Synthetic primer
taagtttggcatgcaatgatcgag

SEQ ID NO: 14556 - DNA, 23 bp, Artificial Sequence
  Description of Artificial Sequence: Synthetic primer
aatttgagaggtggaaggttgga

SEQ ID NO: 14557 - DNA, 21 bp, Artificial Sequence
  Description of Artificial Sequence: Synthetic primer
ctgtagacgacggtgacgatg

SEQ ID NO: 14558 - DNA, 21 bp, Artificial Sequence
  Description of Artificial Sequence: Synthetic primer
gatacacggacatcctggcaa

SEQ ID NO: 14559 - DNA, 21 bp, Artificial Sequence
  Description of Artificial Sequence: Synthetic primer
aagtggatcgacgttgcaatg

SEQ ID NO: 14560 - DNA, 21 bp, Artificial Sequence
  Description of Artificial Sequence: Synthetic primer
ggcaagcatagcagcatcttc

SEQ ID NO: 14561 - DNA, 24 bp, Artificial Sequence
  Description of Artificial Sequence: Synthetic primer
gggatcacgttcattcaaggaaaa

SEQ ID NO: 14562 - DNA, 21 bp, Artificial Sequence
  Description of Artificial Sequence: Synthetic primer
ctcaaggcatccttcaaggca

SEQ ID NO: 14563 - DNA, 21 bp, Artificial Sequence
  Description of Artificial Sequence: Synthetic primer
catgactgcggtagccaatct

SEQ ID NO: 14564 - DNA, 26 bp, Artificial Sequence
  Description of Artificial Sequence: Synthetic primer
gatcgaattaaagataaggcgcctgt

SEQ ID NO: 14565 - DNA, 21 bp, Artificial Sequence
  Description of Artificial Sequence: Synthetic primer
gattctgccgatggagtgctt

SEQ ID NO: 14566 - DNA, 26 bp, Artificial Sequence
  Description of Artificial Sequence: Synthetic primer
tatctaagctcatgtcctcacctttg

SEQ ID NO: 14567 - DNA, 21 bp, Artificial Sequence
  Description of Artificial Sequence: Synthetic primer
cttagtgccggttggaggaag

SEQ ID NO: 14568 - DNA, 21 bp, Artificial Sequence
  Description of Artificial Sequence: Synthetic primer
cccaaaacctggtcctgaact

SEQ ID NO: 14569 - DNA, 21 bp, Artificial Sequence
  Description of Artificial Sequence: Synthetic primer
ttcttccaggacttgcttcca

SEQ ID NO: 14570 - DNA, 21 bp, Artificial Sequence
  Description of Artificial Sequence: Synthetic primer
caactacggcaagctccctac

SEQ ID NO: 14571 - DNA, 23 bp, Artificial Sequence
  Description of Artificial Sequence: Synthetic primer
aagatccgtgtggaagacatcat

SEQ ID NO: 14572 - DNA, 24 bp, Artificial Sequence
  Description of Artificial Sequence: Synthetic primer
gcgactttgatatggaaagctctg

SEQ ID NO: 14573 - DNA, 24 bp, Artificial Sequence
  Description of Artificial Sequence: Synthetic primer
caagcaaacgtgatctggagaaaa

SEQ ID NO: 14574 - DNA, 23 bp, Artificial Sequence
  Description of Artificial Sequence: Synthetic primer
aaaagggtcgtgctggataatgg

SEQ ID NO: 14575 - DNA, 21 bp, Artificial Sequence
  Description of Artificial Sequence: Synthetic primer
tgcttacctcctggcgatcta

SEQ ID NO: 14576 - DNA, 21 bp, Artificial Sequence
  Description of Artificial Sequence: Synthetic primer
catcaggagcaagggcatgag

SEQ ID NO: 14577 - DNA, 20 bp, Artificial Sequence
  Description of Artificial Sequence: Synthetic primer
gttgaagtgcagtgcagagc

SEQ ID NO: 14578 - DNA, 21 bp, Artificial Sequence
  Description of Artificial Sequence: Synthetic primer
gccgatttcaagcagttcctt

SEQ ID NO: 14579 - DNA, 21 bp, Artificial Sequence
  Description of Artificial Sequence: Synthetic primer
gcctttggcgtcatcctactt

SEQ ID NO: 14580 - DNA, 22 bp, Artificial Sequence
  Description of Artificial Sequence: Synthetic primer
cattcgctgctacatctgaagg

SEQ ID NO: 14581 - DNA, 25 bp, Artificial Sequence
  Description of Artificial Sequence: Synthetic primer
aatcaagttgacccatccacattca

SEQ ID NO: 14582 - DNA, 20 bp, Artificial Sequence
  Description of Artificial Sequence: Synthetic primer
ggcaggagtatcgggaagtc

SEQ ID NO: 14583 - DNA, 21 bp, Artificial Sequence
  Description of Artificial Sequence: Synthetic primer
actcttaccctcagcgtggtt

SEQ ID NO: 14584 - DNA, 21 bp, Artificial Sequence
  Description of Artificial Sequence: Synthetic primer
gagctgagaggcctatcccaa

SEQ ID NO: 14585 - DNA, 21 bp, Artificial Sequence
  Description of Artificial Sequence: Synthetic primer
cgtggagcattcgtttcaagc

SEQ ID NO: 14586 - DNA, 21 bp, Artificial Sequence
  Description of Artificial Sequence: Synthetic primer
cctgtcttggtggtgttggag

SEQ ID NO: 14587 - DNA, 21 bp, Artificial Sequence
  Description of Artificial Sequence: Synthetic primer
gaggtggttcgacagggatac

SEQ ID NO: 14588 - DNA, 25 bp, Artificial Sequence
  Description of Artificial Sequence: Synthetic primer
agacaaatctgctcctgtgtacatt

SEQ ID NO: 14589 - DNA, 28 bp, Artificial Sequence
  Description of Artificial Sequence: Synthetic primer
agaagatatacgcaattggtggttatgc

SEQ ID NO: 14590 - DNA, 21 bp, Artificial Sequence
  Description of Artificial Sequence: Synthetic primer
acaacgaccacaagctctgtt

SEQ ID NO: 14591 - DNA, 23 bp, Artificial Sequence
  Description of Artificial Sequence: Synthetic primer
agcactgttgatgtgagctatgt

SEQ ID NO: 14592 - DNA, 23 bp, Artificial Sequence
  Description of Artificial Sequence: Synthetic primer
attaggaaagcggcacataccag

SEQ ID NO: 14593 - DNA, 25 bp, Artificial Sequence
  Description of Artificial Sequence: Synthetic primer
ctcataccagggataccagttagtg

SEQ ID NO: 14594 - DNA, 21 bp, Artificial Sequence
  Description of Artificial Sequence: Synthetic primer
gccactattgccttgcaagag

SEQ ID NO: 14595 - DNA, 21 bp, Artificial Sequence
  Description of Artificial Sequence: Synthetic primer
ctcgactgcaggaaggtcaat

SEQ ID NO: 14596 - DNA, 27 bp, Artificial Sequence
  Description of Artificial Sequence: Synthetic primer
tctttttcatcagatagcttggagagg

SEQ ID NO: 14597 - DNA, 21 bp, Artificial Sequence
  Description of Artificial Sequence: Synthetic primer
ggaggtgaggagggtgaagaa

SEQ ID NO: 14598 - DNA, 21 bp, Artificial Sequence
  Description of Artificial Sequence: Synthetic primer
ctggccagtgttgttcattgc

SEQ ID NO: 14599 - DNA, 28 bp, Artificial Sequence
  Description of Artificial Sequence: Synthetic primer
attcttttccatggcattcttgagtaag

SEQ ID NO: 14600 - DNA, 25 bp, Artificial Sequence
  Description of Artificial Sequence: Synthetic primer
cctttaactggtggaggaatgacag

SEQ ID NO: 14601 - DNA, 22 bp, Artificial Sequence
  Description of Artificial Sequence: Synthetic primer
caaggcgaggcctaatttgaag

SEQ ID NO: 14602 - DNA, 27 bp, Artificial Sequence
  Description of Artificial Sequence: Synthetic primer
tcatggccttcattcacccatatattg

SEQ ID NO: 14603 - DNA, 30 bp, Artificial Sequence
  Description of Artificial Sequence: Synthetic primer
ttgtaatttttctagactccagagctagat

SEQ ID NO: 14604 - DNA, 27 bp, Artificial Sequence
  Description of Artificial Sequence: Synthetic primer
tcgcatacagtgtattatagtgcaagt

SEQ ID NO: 14605 - DNA, 27 bp, Artificial Sequence
  Description of Artificial Sequence: Synthetic primer
gaatatgttcattcgcaaggagtgatc

SEQ ID NO: 14606 - DNA, 23 bp, Artificial Sequence
  Description of Artificial Sequence: Synthetic primer
ggtggaagaaaatgctgatgagg

SEQ ID NO: 14607 - DNA, 19 bp, Artificial Sequence
  Description of Artificial Sequence: Synthetic primer
ttctcccaaatcggcgtca

SEQ ID NO: 14608 - DNA, 23 bp, Artificial Sequence
  Description of Artificial Sequence: Synthetic primer
ctcaaaacaagcatcaccacctc

SEQ ID NO: 14609 - DNA, 25 bp, Artificial Sequence
  Description of Artificial Sequence: Synthetic primer
atacattggtcgagcaggtatctga

SEQ ID NO: 14610 - DNA, 23 bp, Artificial Sequence
  Description of Artificial Sequence: Synthetic primer
gaaagcatagtagcacagtgcag

SEQ ID NO: 14611 - DNA, 21 bp, Artificial Sequence
  Description of Artificial Sequence: Synthetic primer
ttccgcatgtctcccttgttc

SEQ ID NO: 14612 - DNA, 21 bp, Artificial Sequence
  Description of Artificial Sequence: Synthetic primer
gtccctgatcctgtgctccta

SEQ ID NO: 14613 - DNA, 28 bp, Artificial Sequence
  Description of Artificial Sequence: Synthetic primer
ctttactgttggtcatggtgaatcaaat

SEQ ID NO: 14614 - DNA, 21 bp, Artificial Sequence
  Description of Artificial Sequence: Synthetic primer
ccggacaaggagctatggaag

SEQ ID NO: 14615 - DNA, 22 bp, Artificial Sequence
  Description of Artificial Sequence: Synthetic primer
gatctttgtgtgggtgtatgcg

SEQ ID NO: 14616 - DNA, 22 bp, Artificial Sequence
  Description of Artificial Sequence: Synthetic primer
gtgatgtcgacatcgtggatct

SEQ ID NO: 14617 - DNA, 24 bp, Artificial Sequence
  Description of Artificial Sequence: Synthetic primer
agtcttctcatgctttgaaactgc

SEQ ID NO: 14618 - DNA, 21 bp, Artificial Sequence
  Description of Artificial Sequence: Synthetic primer
attgcggctgtccagaatcat

SEQ ID NO: 14619 - DNA, 24 bp, Artificial Sequence
  Description of Artificial Sequence: Synthetic primer
gatattccagatgagcacaaggca

SEQ ID NO: 14620 - DNA, 24 bp, Artificial Sequence
  Description of Artificial Sequence: Synthetic primer
cgaggagcagaaatccttatacca

SEQ ID NO: 14621 - DNA, 22 bp, Artificial Sequence
  Description of Artificial Sequence: Synthetic primer
aagcacatagctaagggcgaaa

SEQ ID NO: 14622 - DNA, 24 bp, Artificial Sequence
  Description of Artificial Sequence: Synthetic primer
tctcctctaggataaccgctgatc

SEQ ID NO: 14623 - DNA, 18 bp, Artificial Sequence
  Description of Artificial Sequence: Synthetic primer
gttcctgggcgacctcca

SEQ ID NO: 14624 - DNA, 27 bp, Artificial Sequence
  Description of Artificial Sequence: Synthetic primer
aattcgtgttttctacttttcccagtg

SEQ ID NO: 14625 - DNA, 25 bp, Artificial Sequence
  Description of Artificial Sequence: Synthetic primer
ccagggacctgtagattatgtgaag

SEQ ID NO: 14626 - DNA, 30 bp, Artificial Sequence
  Description of Artificial Sequence: Synthetic primer
ccttaattatatcaaggtggtaccctcagt

SEQ ID NO: 14627 - DNA, 23 bp, Artificial Sequence
  Description of Artificial Sequence: Synthetic primer
gtatgtccccagaggtagaggat

SEQ ID NO: 14628 - DNA, 21 bp, Artificial Sequence
  Description of Artificial Sequence: Synthetic primer
gggaaaaatgtcgtcggtcca

SEQ ID NO: 14629 - DNA, 23 bp, Artificial Sequence
  Description of Artificial Sequence: Synthetic primer
tcaagctgcctcgtgacatatag

SEQ ID NO: 14630 - DNA, 27 bp, Artificial Sequence
  Description of Artificial Sequence: Synthetic primer
accaggtttacaaatagaagccaaatg

SEQ ID NO: 14631 - DNA, 21 bp, Artificial Sequence
  Description of Artificial Sequence: Synthetic primer
gcgatcacttggttggtgatg

SEQ ID NO: 14632 - DNA, 22 bp, Artificial Sequence
  Description of Artificial Sequence: Synthetic primer
tgacctatggtgtgcgtaagaa

SEQ ID NO: 14633 - DNA, 21 bp, Artificial Sequence
  Description of Artificial Sequence: Synthetic primer
tttgctgaccttatcccgctt

SEQ ID NO: 14634 - DNA, 23 bp, Artificial Sequence
  Description of Artificial Sequence: Synthetic primer
atggtaacaagtgcgaatggatg

SEQ ID NO: 14635 - DNA, 21 bp, Artificial Sequence
  Description of Artificial Sequence: Synthetic primer
gatcgcgcagaaatgtggatt

SEQ ID NO: 14636 - DNA, 28 bp, Artificial Sequence
  Description of Artificial Sequence: Synthetic primer
tttgcgcttaatctactagctgtaaaag

SEQ ID NO: 14637 - DNA, 28 bp, Artificial Sequence
  Description of Artificial Sequence: Synthetic primer
accattttgacatttgtttacacaaggt

SEQ ID NO: 14638 - DNA, 25 bp, Artificial Sequence
  Description of Artificial Sequence: Synthetic primer
ggcaaagtgtttcttctggtctaac

SEQ ID NO: 14639 - DNA, 21 bp, Artificial Sequence
  Description of Artificial Sequence: Synthetic primer
gaaacacccaaatgctgccat

SEQ ID NO: 14640 - DNA, 27 bp, Artificial Sequence
  Description of Artificial Sequence: Synthetic primer
ttgtcaaaatgtctccgataacagtct

SEQ ID NO: 14641 - DNA, 28 bp, Artificial Sequence
  Description of Artificial Sequence: Synthetic primer
aatcttggtagtcagtccttaagctact

SEQ ID NO: 14642 - DNA, 28 bp, Artificial Sequence
  Description of Artificial Sequence: Synthetic primer
acaaagagagcatataccaaatctgtcg

SEQ ID NO: 14643 - DNA, 28 bp, Artificial Sequence
  Description of Artificial Sequence: Synthetic primer
acagtcatatcttacatttgttcacagc

SEQ ID NO: 14644 - DNA, 21 bp, Artificial Sequence
  Description of Artificial Sequence: Synthetic primer
agacattccgtgtcctggaag

SEQ ID NO: 14645 - DNA, 27 bp, Artificial Sequence
  Description of Artificial Sequence: Synthetic primer
aagatgctgctatcctgaaacaaaaca

SEQ ID NO: 14646 - DNA, 23 bp, Artificial Sequence
  Description of Artificial Sequence: Synthetic primer
aaagacaggctacgatgtgatgc

SEQ ID NO: 14647 - DNA, 21 bp, Artificial Sequence
  Description of Artificial Sequence: Synthetic primer
cgggatgtaatgtctgctggt

SEQ ID NO: 14648 - DNA, 21 bp, Artificial Sequence
  Description of Artificial Sequence: Synthetic primer
ccatcgctcgaggagatcatt

SEQ ID NO: 14649 - DNA, 21 bp, Artificial Sequence
  Description of Artificial Sequence: Synthetic primer
tggtggcaagatgaagaaggg

SEQ ID NO: 14650 - DNA, 21 bp, Artificial Sequence
  Description of Artificial Sequence: Synthetic primer
gactgccatggacattggaga

SEQ ID NO: 14651 - DNA, 21 bp, Artificial Sequence
  Description of Artificial Sequence: Synthetic primer
taactcaaccctgcgagagga

SEQ ID NO: 14652 - DNA, 19 bp, Artificial Sequence
  Description of Artificial Sequence: Synthetic primer
gctggccatcgtctctctc

SEQ ID NO: 14653 - DNA, 26 bp, Artificial Sequence
  Description of Artificial Sequence: Synthetic primer
gatgtgccattctcttacacacaaaa

SEQ ID NO: 14654 - DNA, 21 bp, Artificial Sequence
  Description of Artificial Sequence: Synthetic primer
actctgggtctgcaactttca

SEQ ID NO: 14655 - DNA, 24 bp, Artificial Sequence
  Description of Artificial Sequence: Synthetic primer
gcaggaaagacagatacagaggtt

SEQ ID NO: 14656 - DNA, 24 bp, Artificial Sequence
  Description of Artificial Sequence: Synthetic primer
cttgcggagaagaagataccttcc

SEQ ID NO: 14657 - DNA, 28 bp, Artificial Sequence
  Description of Artificial Sequence: Synthetic primer
cactagtgactggttttgcaaagatatg

SEQ ID NO: 14658 - DNA, 22 bp, Artificial Sequence
  Description of Artificial Sequence: Synthetic primer
gccacctactacaatgcactgg

SEQ ID NO: 14659 - DNA, 19 bp, Artificial Sequence
  Description of Artificial Sequence: Synthetic primer
ggtcaagaagcccgctgtc

SEQ ID NO: 14660 - DNA, 21 bp, Artificial Sequence
  Description of Artificial Sequence: Synthetic primer
cactttgcatgcagtggttgg

SEQ ID NO: 14661 - DNA, 28 bp, Artificial Sequence
  Description of Artificial Sequence: Synthetic primer
tcgactctgagatggaatttaagagaga

SEQ ID NO: 14662 - DNA, 21 bp, Artificial Sequence
  Description of Artificial Sequence: Synthetic primer
gaaagcttgcatgttgcgtgt

SEQ ID NO: 14663 - DNA, 28 bp, Artificial Sequence
  Description of Artificial Sequence: Synthetic primer
gcagtattttgtttgtttcttacttcgc

SEQ ID NO: 14664 - DNA, 30 bp, Artificial Sequence
  Description of Artificial Sequence: Synthetic primer
catcaaaatttaatattggtcggaggaagt

SEQ ID NO: 14665 - DNA, 21 bp, Artificial Sequence
  Description of Artificial Sequence: Synthetic primer
tcgctacggcggtagatctta

SEQ ID NO: 14666 - DNA, 28 bp, Artificial Sequence
  Description of Artificial Sequence: Synthetic primer
agaaatctgtgggagcttatacctaatg

SEQ ID NO: 14667 - DNA, 23 bp, Artificial Sequence
  Description of Artificial Sequence: Synthetic primer
gaagcactgactgggatgatgat

SEQ ID NO: 14668 - DNA, 29 bp, Artificial Sequence
  Description of Artificial Sequence: Synthetic primer
taatctatcttgtggaaagctttttgagg

SEQ ID NO: 14669 - DNA, 25 bp, Artificial Sequence
  Description of Artificial Sequence: Synthetic primer
ttatgaagtggttgagggttcagag

SEQ ID NO: 14670 - DNA, 20 bp, Artificial Sequence
  Description of Artificial Sequence: Synthetic primer
gcatggcaaaggaggctttc

SEQ ID NO: 14671 - DNA, 21 bp, Artificial Sequence
  Description of Artificial Sequence: Synthetic primer
ctccaccttcggtgacttcaa

SEQ ID NO: 14672 - DNA, 20 bp, Artificial Sequence
  Description of Artificial Sequence: Synthetic primer
gtttgtctgcgtggtgcttt

SEQ ID NO: 14673 - DNA, 21 bp, Artificial Sequence
  Description of Artificial Sequence: Synthetic primer
caaaatgctgctgcggaaaac

SEQ ID NO: 14674 - DNA, 28 bp, Artificial Sequence
  Description of Artificial Sequence: Synthetic primer
tatgaaaagatggctaagcagaaaagga

SEQ ID NO: 14675 - DNA, 22 bp, Artificial Sequence
  Description of Artificial Sequence: Synthetic primer
aggagtgcctcaagaagtttca

SEQ ID NO: 14676 - DNA, 26 bp, Artificial Sequence
  Description of Artificial Sequence: Synthetic primer
gatcaacaacaactttggaacacttg

SEQ ID NO: 14677 - DNA, 22 bp, Artificial Sequence
  Description of Artificial Sequence: Synthetic primer
cctgaatgcagctgcagagata

SEQ ID NO: 14678 - DNA, 22 bp, Artificial Sequence
  Description of Artificial Sequence: Synthetic primer
gttcaagtgcagcaactgaaga

SEQ ID NO: 14679 - DNA, 24 bp, Artificial Sequence
  Description of Artificial Sequence: Synthetic primer
ggaagcaggaaactagccaaaatt

SEQ ID NO: 14680 - DNA, 21 bp, Artificial Sequence
  Description of Artificial Sequence: Synthetic primer
cttccagttctgagccccaag

SEQ ID NO: 14681 - DNA, 22 bp, Artificial Sequence
  Description of Artificial Sequence: Synthetic primer
cttgaaaaacaaggcctggcat

SEQ ID NO: 14682 - DNA, 23 bp, Artificial Sequence
  Description of Artificial Sequence: Synthetic primer
aaccagattcccagagagatccc

SEQ ID NO: 14683 - DNA, 26 bp, Artificial Sequence
  Description of Artificial Sequence: Synthetic primer
catatttctagccatgtcctgtcacc

SEQ ID NO: 14684 - DNA, 24 bp, Artificial Sequence
  Description of Artificial Sequence: Synthetic primer
ggcgagcattttgtagaaatccaa

SEQ ID NO: 14685 - DNA, 26 bp, Artificial Sequence
  Description of Artificial Sequence: Synthetic primer
gttcttcctcgagcaatttacgttct

SEQ ID NO: 14686 - DNA, 22 bp, Artificial Sequence
  Description of Artificial Sequence: Synthetic primer
tctggtgcaatgcgtagttttc

SEQ ID NO: 14687 - DNA, 21 bp, Artificial Sequence
  Description of Artificial Sequence: Synthetic primer
gttgtgccgacgtgattttgg

SEQ ID NO: 14688 - DNA, 21 bp, Artificial Sequence
  Description of Artificial Sequence: Synthetic primer
acgttctcaacgtaccagctt

SEQ ID NO: 14689 - DNA, 21 bp, Artificial Sequence
  Description of Artificial Sequence: Synthetic primer
cctgggacaatgggaagaact

SEQ ID NO: 14690 - DNA, 24 bp, Artificial Sequence
  Description of Artificial Sequence: Synthetic primer
gaaggaggacaactctccatcaat

SEQ ID NO: 14691 - DNA, 21 bp, Artificial Sequence
  Description of Artificial Sequence: Synthetic primer
ccctctgccaaagtaacacca

SEQ ID NO: 14692 - DNA, 21 bp, Artificial Sequence
  Description of Artificial Sequence: Synthetic primer
caacatgggaccttcgacaca

SEQ ID NO: 14693 - DNA, 25 bp, Artificial Sequence
  Description of Artificial Sequence: Synthetic primer
tcggacactttctaagctgtagttc

SEQ ID NO: 14694 - DNA, 21 bp, Artificial Sequence
  Description of Artificial Sequence: Synthetic primer
ggtgatcaccaagccgattga

SEQ ID NO: 14695 - DNA, 21 bp, Artificial Sequence
  Description of Artificial Sequence: Synthetic primer
aaccttgtgcgtgtagacgag

SEQ ID NO: 14696 - DNA, 21 bp, Artificial Sequence
  Description of Artificial Sequence: Synthetic primer
gggatgctagtgtaggcagag

SEQ ID NO: 14697 - DNA, 20 bp, Artificial Sequence
  Description of Artificial Sequence: Synthetic primer
cagcactcatggtcgtctcc

SEQ ID NO: 14698 - DNA, 23 bp, Artificial Sequence
  Description of Artificial Sequence: Synthetic primer
aagcccagactatgtccttgagt

SEQ ID NO: 14699 - DNA, 22 bp, Artificial Sequence
  Description of Artificial Sequence: Synthetic primer
ggacgatgctgctgaaatttcg

SEQ ID NO: 14700 - DNA, 26 bp, Artificial Sequence
  Description of Artificial Sequence: Synthetic primer
cgtcatgttctactgctgaatctagg

SEQ ID NO: 14701 - DNA, 22 bp, Artificial Sequence
  Description of Artificial Sequence: Synthetic primer
gcgctaagatatgcctctgtga

SEQ ID NO: 14702 - DNA, 24 bp, Artificial Sequence
  Description of Artificial Sequence: Synthetic primer
ggcaagaacaacctgatcaagaag

SEQ ID NO: 14703 - DNA, 28 bp, Artificial Sequence
  Description of Artificial Sequence: Synthetic primer
ttagtaatcagaaagcagttgagctagt

SEQ ID NO: 14704 - DNA, 21 bp, Artificial Sequence
  Description of Artificial Sequence: Synthetic primer
gctgcagaaattgccaaccat

SEQ ID NO: 14705 - DNA, 19 bp, Artificial Sequence
  Description of Artificial Sequence: Synthetic primer
cgtgatggctctgtgagca

SEQ ID NO: 14706 - DNA, 28 bp, Artificial Sequence
  Description of Artificial Sequence: Synthetic primer
agtcagcccatccatctgtattaatagt

SEQ ID NO: 14707 - DNA, 23 bp, Artificial Sequence
  Description of Artificial Sequence: Synthetic primer
ctgatacattggaccctgcactg

SEQ ID NO: 14708 - DNA, 27 bp, Artificial Sequence
  Description of Artificial Sequence: Synthetic primer
catatacatgactcgtaatggcaggat

SEQ ID NO: 14709 - DNA, 28 bp, Artificial Sequence
  Description of Artificial Sequence: Synthetic primer
agtgatgaactgtttgacaatttgttct

SEQ ID NO: 14710 - DNA, 21 bp, Artificial Sequence
  Description of Artificial Sequence: Synthetic primer
cctggtagcagcactatgcaa

SEQ ID NO: 14711 - DNA, 19 bp, Artificial Sequence
  Description of Artificial Sequence: Synthetic primer
ttggtgtgcacgagtgcaa

SEQ ID NO: 14712 - DNA, 25 bp, Artificial Sequence
  Description of Artificial Sequence: Synthetic primer
aacaggatatagccatgctgtgttt

SEQ ID NO: 14713 - DNA, 21 bp, Artificial Sequence
  Description of Artificial Sequence: Synthetic primer
gagcgttggaaatggcaagag

SEQ ID NO: 14714 - DNA, 21 bp, Artificial Sequence
  Description of Artificial Sequence: Synthetic primer
cttgtcctgtccggaataggg

SEQ ID NO: 14715 - DNA, 27 bp, Artificial Sequence
  Description of Artificial Sequence: Synthetic primer
aatgataaccttgaaaagctccctact

SEQ ID NO: 14716 - DNA, 22 bp, Artificial Sequence
  Description of Artificial Sequence: Synthetic primer
gagaagatggcaaacacactgg

SEQ ID NO: 14717 - DNA, 25 bp, Artificial Sequence
  Description of Artificial Sequence: Synthetic primer
aaccttctaatctccaaggctaagg

SEQ ID NO: 14718 - DNA, 21 bp, Artificial Sequence
  Description of Artificial Sequence: Synthetic primer
cacttcaacagcaaggcctct

SEQ ID NO: 14719 - DNA, 26 bp, Artificial Sequence
  Description of Artificial Sequence: Synthetic primer
ggtaagcaggaaattagggcaataca

SEQ ID NO: 14720 - DNA, 21 bp, Artificial Sequence
  Description of Artificial Sequence: Synthetic primer
gggaaatggttttgcccaact

SEQ ID NO: 14721 - DNA, 27 bp, Artificial Sequence
  Description of Artificial Sequence: Synthetic primer
actggctagtagttgtaatttcaacct

SEQ ID NO: 14722 - DNA, 24 bp, Artificial Sequence
  Description of Artificial Sequence: Synthetic primer
gtccactgaagaaaccccaaagaa

SEQ ID NO: 14723 - DNA, 25 bp, Artificial Sequence
  Description of Artificial Sequence: Synthetic primer
gaattgccgtagccctttctaatct

SEQ ID NO: 14724 - DNA, 23 bp, Artificial Sequence
  Description of Artificial Sequence: Synthetic primer
catgaaagtaaaagctgcggcaa

SEQ ID NO: 14725 - DNA, 23 bp, Artificial Sequence
  Description of Artificial Sequence: Synthetic primer
catgacgatctacatggaacggt

SEQ ID NO: 14726 - DNA, 22 bp, Artificial Sequence
  Description of Artificial Sequence: Synthetic primer
cgaggtgctggattacgatacc

SEQ ID NO: 14727 - DNA, 27 bp, Artificial Sequence
  Description of Artificial Sequence: Synthetic primer
aacaaatttgctgctactgtatggtga

SEQ ID NO: 14728 - DNA, 22 bp, Artificial Sequence
  Description of Artificial Sequence: Synthetic primer
caaggtcgccatcatcaacatc

SEQ ID NO: 14729 - DNA, 22 bp, Artificial Sequence
  Description of Artificial Sequence: Synthetic primer
gatctccttgctcctggtgaac

SEQ ID NO: 14730 - DNA, 28 bp, Artificial Sequence
  Description of Artificial Sequence: Synthetic primer
ctggagtagtgacacatataacccaatt

SEQ ID NO: 14731 - DNA, 26 bp, Artificial Sequence
  Description of Artificial Sequence: Synthetic primer
ggcatgtcgaatctacttaagtctgc

SEQ ID NO: 14732 - DNA, 25 bp, Artificial Sequence
  Description of Artificial Sequence: Synthetic primer
agctttccagacaactcaaatgatg

SEQ ID NO: 14733 - DNA, 26 bp, Artificial Sequence
  Description of Artificial Sequence: Synthetic primer
cattgcttcagaatcaccaggaaaaa

SEQ ID NO: 14734 - DNA, 27 bp, Artificial Sequence
  Description of Artificial Sequence: Synthetic primer
agaattatggtagatcccctttcatcc

SEQ ID NO: 14735 - DNA, 21 bp, Artificial Sequence
  Description of Artificial Sequence: Synthetic primer
gcatggttttggtgctcagtt

SEQ ID NO: 14736 - DNA, 22 bp, Artificial Sequence
  Description of Artificial Sequence: Synthetic primer
gcaagaaggaagatccatccga

SEQ ID NO: 14737 - DNA, 21 bp, Artificial Sequence
  Description of Artificial Sequence: Synthetic primer
ggccaaggagaacatgttgga

SEQ ID NO: 14738 - DNA, 24 bp, Artificial Sequence
  Description of Artificial Sequence: Synthetic primer
tacatctggctgtaggagactagg

SEQ ID NO: 14739 - DNA, 18 bp, Artificial Sequence
  Description of Artificial Sequence: Synthetic primer
gggcatgctgaacagagc

SEQ ID NO: 14740 - DNA, 22 bp, Artificial Sequence
  Description of Artificial Sequence: Synthetic primer
accgtttctgaactccaggaag

SEQ ID NO: 14741 - DNA, 26 bp, Artificial Sequence
  Description of Artificial Sequence: Synthetic primer
tcatatgcatcaggatcagaagatgg

SEQ ID NO: 14742 - DNA, 21 bp, Artificial Sequence
  Description of Artificial Sequence: Synthetic primer
caaatgggctttgaccgtgac

SEQ ID NO: 14743 - DNA, 22 bp, Artificial Sequence
  Description of Artificial Sequence: Synthetic primer
cttaggcgggcctttctattct

SEQ ID NO: 14744 - DNA, 21 bp, Artificial Sequence
  Description of Artificial Sequence: Synthetic primer
tattggcgattggctctgctg

SEQ ID NO: 14745 - DNA, 25 bp, Artificial Sequence
  Description of Artificial Sequence: Synthetic primer
tgtcaacatcttgaaagaacacagg

SEQ ID NO: 14746 - DNA, 23 bp, Artificial Sequence
  Description of Artificial Sequence: Synthetic primer
tgcaactttacccctgatgagtt

SEQ ID NO: 14747 - DNA, 21 bp, Artificial Sequence
  Description of Artificial Sequence: Synthetic primer
ctcagcacagacttctcggat

SEQ ID NO: 14748 - DNA, 21 bp, Artificial Sequence
  Description of Artificial Sequence: Synthetic primer
tcagcttctcatgtccgtcct

SEQ ID NO: 14749 - DNA, 21 bp, Artificial Sequence
  Description of Artificial Sequence: Synthetic primer
catttggtgcaagaggctgaa

SEQ ID NO: 14750 - DNA, 21 bp, Artificial Sequence
  Description of Artificial Sequence: Synthetic primer
attagaaagcgcctgctaccc

SEQ ID NO: 14751 - DNA, 27 bp, Artificial Sequence
  Description of Artificial Sequence: Synthetic primer
gtgtaccacacagttttataagttgcc

SEQ ID NO: 14752 - DNA, 21 bp, Artificial Sequence
  Description of Artificial Sequence: Synthetic primer
aagcaatggatgggatttggc

SEQ ID NO: 14753 - DNA, 21 bp, Artificial Sequence
  Description of Artificial Sequence: Synthetic primer
tgggtccagcctgaagaagat

SEQ ID NO: 14754 - DNA, 22 bp, Artificial Sequence
  Description of Artificial Sequence: Synthetic primer
ctgccagaaatattggccgagt

SEQ ID NO: 14755 - DNA, 25 bp, Artificial Sequence
  Description of Artificial Sequence: Synthetic primer
cgccaaagaaataggaaagtcagtt

SEQ ID NO: 14756 - DNA, 26 bp, Artificial Sequence
  Description of Artificial Sequence: Synthetic primer
tttgtctggtccttgatggacatatc

SEQ ID NO: 14757 - DNA, 22 bp, Artificial Sequence
  Description of Artificial Sequence: Synthetic primer
tcctgctcaaagcaaccccata

SEQ ID NO: 14758 - DNA, 24 bp, Artificial Sequence
  Description of Artificial Sequence: Synthetic primer
ggattgctgccaaatatggatgag

SEQ ID NO: 14759 - DNA, 21 bp, Artificial Sequence
  Description of Artificial Sequence: Synthetic primer
gtgggagaccgaagactgaag

SEQ ID NO: 14760 - DNA, 21 bp, Artificial Sequence
  Description of Artificial Sequence: Synthetic primer
ggagattgggtttccattggc

SEQ ID NO: 14761 - DNA, 21 bp, Artificial Sequence
  Description of Artificial Sequence: Synthetic primer
gggtgtcctgcatactgacaa

SEQ ID NO: 14762 - DNA, 23 bp, Artificial Sequence
  Description of Artificial Sequence: Synthetic primer
agagagaatgagaagtcgggtca

SEQ ID NO: 14763 - DNA, 22 bp, Artificial Sequence
  Description of Artificial Sequence: Synthetic primer
gcgtacaacatgtccaacatcc

SEQ ID NO: 14764 - DNA, 21 bp, Artificial Sequence
  Description of Artificial Sequence: Synthetic primer
tcgcaagggtactatctcgct

SEQ ID NO: 14765 - DNA, 21 bp, Artificial Sequence
  Description of Artificial Sequence: Synthetic primer
atatgccttcagaagcggaca

SEQ ID NO: 14766 - DNA, 28 bp, Artificial Sequence
  Description of Artificial Sequence: Synthetic primer
tcaaatcttcttttggcttcagaaacat

SEQ ID NO: 14767 - DNA, 27 bp, Artificial Sequence
  Description of Artificial Sequence: Synthetic primer
agattccctggattaggtactcaaaga

SEQ ID NO: 14768 - DNA, 22 bp, Artificial Sequence
  Description of Artificial Sequence: Synthetic primer
cgatctcatgttggcaatctcg

SEQ ID NO: 14769 - DNA, 25 bp, Artificial Sequence
  Description of Artificial Sequence: Synthetic primer
agaggacacattatcccaaaagtcc

SEQ ID NO: 14770 - DNA, 21 bp, Artificial Sequence
  Description of Artificial Sequence: Synthetic primer
cacagggtgaggctaagagtg

SEQ ID NO: 14771 - DNA, 27 bp, Artificial Sequence
  Description of Artificial Sequence: Synthetic primer
tcaaataaagctcattcccatgtctct

SEQ ID NO: 14772 - DNA, 19 bp, Artificial Sequence
  Description of Artificial Sequence: Synthetic primer
ctagccacggtcgagttca

SEQ ID NO: 14773 - DNA, 21 bp, Artificial Sequence
  Description of Artificial Sequence: Synthetic primer
cagagccgaaggtgctttcat

SEQ ID NO: 14774 - DNA, 24 bp, Artificial Sequence
  Description of Artificial Sequence: Synthetic primer
cgcgaccaaaagagatccattttt

SEQ ID NO: 14775 - DNA, 22 bp, Artificial Sequence
  Description of Artificial Sequence: Synthetic primer
acatctaggttcggaagagcac

SEQ ID NO: 14776 - DNA, 23 bp, Artificial Sequence
  Description of Artificial Sequence: Synthetic primer
agagagtgagagatcttctgcct

SEQ ID NO: 14777 - DNA, 27 bp, Artificial Sequence
  Description of Artificial Sequence: Synthetic primer
aaaatcagagatttgcagatcgtttgg

SEQ ID NO: 14778 - DNA, 21 bp, Artificial Sequence
  Description of Artificial Sequence: Synthetic primer
ctcgtcaggaagttcgtggtc

SEQ ID NO: 14779 - DNA, 25 bp, Artificial Sequence
  Description of Artificial Sequence: Synthetic primer
ttcccttgggatcagaaacaaaaac

SEQ ID NO: 14780 - DNA, 24 bp, Artificial Sequence
  Description of Artificial Sequence: Synthetic primer
ttctctcagggaaaaggcttcaaa

SEQ ID NO: 14781 - DNA, 21 bp, Artificial Sequence
  Description of Artificial Sequence: Synthetic primer
cagggtcagacaacagcttct

SEQ ID NO: 14782 - DNA, 24 bp, Artificial Sequence
  Description of Artificial Sequence: Synthetic primer
ttctctcaacccaatgacgaagat

SEQ ID NO: 14783 - DNA, 22 bp, Artificial Sequence
  Description of Artificial Sequence: Synthetic primer
gccttcatgttcgtcaactgga

SEQ ID NO: 14784 - DNA, 19 bp, Artificial Sequence
  Description of Artificial Sequence: Synthetic primer
cacaccgtcgccattctgt

SEQ ID NO: 14785 - DNA, 21 bp, Artificial Sequence
  Description of Artificial Sequence: Synthetic primer
gcggtgttgaaggaagttctg

SEQ ID NO: 14786 - DNA, 21 bp, Artificial Sequence
  Description of Artificial Sequence: Synthetic primer
ctcgtcgttagcaagtggtgt

SEQ ID NO: 14787 - DNA, 21 bp, Artificial Sequence
  Description of Artificial Sequence: Synthetic primer
gaccatcctccttggatcgag

SEQ ID NO: 14788 - DNA, 28 bp, Artificial Sequence
  Description of Artificial Sequence: Synthetic primer
tggattaaacagttgacaaacaagttga

SEQ ID NO: 14789 - DNA, 21 bp, Artificial Sequence
  Description of Artificial Sequence: Synthetic primer
tggtgctggacataggactga

SEQ ID NO: 14790 - DNA, 26 bp, Artificial Sequence
  Description of Artificial Sequence: Synthetic primer
gtacttctgcaggttgtactcatttg

SEQ ID NO: 14791 - DNA, 26 bp, Artificial Sequence
  Description of Artificial Sequence: Synthetic primer
agacaaaactgctatagtgcatgttg

SEQ ID NO: 14792 - DNA, 21 bp, Artificial Sequence
  Description of Artificial Sequence: Synthetic primer
ccacctctgccatcttccaat

SEQ ID NO: 14793 - DNA, 27 bp, Artificial Sequence
  Description of Artificial Sequence: Synthetic primer
gaggttatacaacaatacatccttgcg

SEQ ID NO: 14794 - DNA, 22 bp, Artificial Sequence
  Description of Artificial Sequence: Synthetic primer
taagaagatgggccgtgtgttt

SEQ ID NO: 14795 - DNA, 24 bp, Artificial Sequence
  Description of Artificial Sequence: Synthetic primer
atgccaggtgtaggaataaagagg

SEQ ID NO: 14796 - DNA, 21 bp, Artificial Sequence
  Description of Artificial Sequence: Synthetic primer
atcggaggagacggtgtttca

SEQ ID NO: 14797 - DNA, 21 bp, Artificial Sequence
  Description of Artificial Sequence: Synthetic primer
tatcagcatgaaggcctccag

SEQ ID NO: 14798 - DNA, 21 bp, Artificial Sequence
  Description of Artificial Sequence: Synthetic primer
gtacaggcaataaccgctcca

SEQ ID NO: 14799 - DNA, 21 bp, Artificial Sequence
  Description of Artificial Sequence: Synthetic primer
aaagccctgggatcatgttcg

SEQ ID NO: 14800 - DNA, 22 bp, Artificial Sequence
  Description of Artificial Sequence: Synthetic primer
gattggtatgtcaagcgtgctg

SEQ ID NO: 14801 - DNA, 21 bp, Artificial Sequence
  Description of Artificial Sequence: Synthetic primer
ggtagcgagacgtcaaacaca

SEQ ID NO: 14802 - DNA, 26 bp, Artificial Sequence
  Description of Artificial Sequence: Synthetic primer
atggatctaaatgcttttctgtgcaa

SEQ ID NO: 14803 - DNA, 24 bp, Artificial Sequence
  Description of Artificial Sequence: Synthetic primer
ctgaacggcaatatccggaaaaac

SEQ ID NO: 14804 - DNA, 22 bp, Artificial Sequence
  Description of Artificial Sequence: Synthetic primer
acctgatcacacgtacctgagt

SEQ ID NO: 14805 - DNA, 27 bp, Artificial Sequence
  Description of Artificial Sequence: Synthetic primer
aatttccttgtctacttgctttcttgg

SEQ ID NO: 14806 - DNA, 19 bp, Artificial Sequence
  Description of Artificial Sequence: Synthetic primer
cagatcgccagccctaaga

SEQ ID NO: 14807 - DNA, 21 bp, Artificial Sequence
  Description of Artificial Sequence: Synthetic primer
caccggtcctgttatttgcca

SEQ ID NO: 14808 - DNA, 21 bp, Artificial Sequence
  Description of Artificial Sequence: Synthetic primer
cagcagcaccgtgagtactaa

SEQ ID NO: 14809 - DNA, 22 bp, Artificial Sequence
  Description of Artificial Sequence: Synthetic primer
gctcgcaaactgataggagcta

SEQ ID NO: 14810 - DNA, 24 bp, Artificial Sequence
  Description of Artificial Sequence: Synthetic primer
gcttgtgtcaatctcagtgcatac

SEQ ID NO: 14811 - DNA, 28 bp, Artificial Sequence
  Description of Artificial Sequence: Synthetic primer
gcctgtattaactaggtatggtgtcaat

SEQ ID NO: 14812 - DNA, 26 bp, Artificial Sequence
  Description of Artificial Sequence: Synthetic primer
gattacccttttcttaggcttaccca

SEQ ID NO: 14813 - DNA, 28 bp, Artificial Sequence
  Description of Artificial Sequence: Synthetic primer
ctgacccttagagtaggtaccaattttt

SEQ ID NO: 14814 - DNA, 23 bp, Artificial Sequence
  Description of Artificial Sequence: Synthetic primer
gtgattgaggctgattctgagga

SEQ ID NO: 14815 - DNA, 24 bp, Artificial Sequence
  Description of Artificial Sequence: Synthetic primer
agttaatccacggtagtactccct

SEQ ID NO: 14816 - DNA, 26 bp, Artificial Sequence
  Description of Artificial Sequence: Synthetic primer
cacttataggcaacttgatgctctcc

SEQ ID NO: 14817 - DNA, 23 bp, Artificial Sequence
  Description of Artificial Sequence: Synthetic primer
gttgggtgcggaatttctgaaac

SEQ ID NO: 14818 - DNA, 21 bp, Artificial Sequence
  Description of Artificial Sequence: Synthetic primer
gaagacgccatcaacgcaatc

SEQ ID NO: 14819 - DNA, 22 bp, Artificial Sequence
  Description of Artificial Sequence: Synthetic primer
gctggctaggtttccaaacctt

SEQ ID NO: 14820 - DNA, 28 bp, Artificial Sequence
  Description of Artificial Sequence: Synthetic primer
gtttctgaaagaaagtaaaagggcttct

SEQ ID NO: 14821 - DNA, 19 bp, Artificial Sequence
  Description of Artificial Sequence: Synthetic primer
gtggttcaacgagccctct

SEQ ID NO: 14822 - DNA, 27 bp, Artificial Sequence
  Description of Artificial Sequence: Synthetic primer
ggtgtggcattattctgacaaagagta

SEQ ID NO: 14823 - DNA, 21 bp, Artificial Sequence
  Description of Artificial Sequence: Synthetic primer
gctcctggttcatgtcgatgg

SEQ ID NO: 14824 - DNA, 21 bp, Artificial Sequence
  Description of Artificial Sequence: Synthetic primer
caagccggagtacagcatcat

SEQ ID NO: 14825 - DNA, 23 bp, Artificial Sequence
  Description of Artificial Sequence: Synthetic primer
aagaacgaggcagagatctctcc

SEQ ID NO: 14826 - DNA, 21 bp, Artificial Sequence
  Description of Artificial Sequence: Synthetic primer
ggactttcagccaggcgaata

SEQ ID NO: 14827 - DNA, 25 bp, Artificial Sequence
  Description of Artificial Sequence: Synthetic primer
gaacaaggatgttaaggtcattggg

SEQ ID NO: 14828 - DNA, 24 bp, Artificial Sequence
  Description of Artificial Sequence: Synthetic primer
cactacactgtggatgttgttgtc

SEQ ID NO: 14829 - DNA, 23 bp, Artificial Sequence
  Description of Artificial Sequence: Synthetic primer
agatttctgaagttggtgcggaa

SEQ ID NO: 14830 - DNA, 22 bp, Artificial Sequence
  Description of Artificial Sequence: Synthetic primer
cgatctatcttgcgctgaaagc

SEQ ID NO: 14831 - DNA, 21 bp, Artificial Sequence
  Description of Artificial Sequence: Synthetic primer
agcaccctcagttaggacctc

SEQ ID NO: 14832 - DNA, 26 bp, Artificial Sequence
  Description of Artificial Sequence: Synthetic primer
aactgttccatgtacaaaatggttgc

SEQ ID NO: 14833 - DNA, 21 bp, Artificial Sequence
  Description of Artificial Sequence: Synthetic primer
agagctgtaagggcgttaacc

SEQ ID NO: 14834 - DNA, 21 bp, Artificial Sequence
  Description of Artificial Sequence: Synthetic primer
ctgggatcttcaccacgaact

SEQ ID NO: 14835 - DNA, 22 bp, Artificial Sequence
  Description of Artificial Sequence: Synthetic primer
ggatgaccggttggtgaactaa

SEQ ID NO: 14836 - DNA, 21 bp, Artificial Sequence
  Description of Artificial Sequence: Synthetic primer
taccgacttctttcgccaacg

SEQ ID NO: 14837 - DNA, 24 bp, Artificial Sequence
  Description of Artificial Sequence: Synthetic primer
gggttccagttggaaaacaatctc

SEQ ID NO: 14838 - DNA, 19 bp, Artificial Sequence
  Description of Artificial Sequence: Synthetic primer
ccatcaagccagcgatcgt

SEQ ID NO: 14839 - DNA, 27 bp, Artificial Sequence
  Description of Artificial Sequence: Synthetic primer
agccattctttatgtcttctcggtatt

SEQ ID NO: 14840 - DNA, 21 bp, Artificial Sequence
  Description of Artificial Sequence: Synthetic primer
cgccgtctctcgtcatatgaa

SEQ ID NO: 14841 - DNA, 22 bp, Artificial Sequence
  Description of Artificial Sequence: Synthetic primer
tattcgtacttcccgatgccaa

SEQ ID NO: 14842 - DNA, 22 bp, Artificial Sequence
  Description of Artificial Sequence: Synthetic primer
aaaaccttgtggttctgaagcc

SEQ ID NO: 14843 - DNA, 21 bp, Artificial Sequence
  Description of Artificial Sequence: Synthetic primer
caacggtcggagaaccagtta

SEQ ID NO: 14844 - DNA, 26 bp, Artificial Sequence
  Description of Artificial Sequence: Synthetic primer
gaacaagaagattcaggaagccaatc

SEQ ID NO: 14845 - DNA, 27 bp, Artificial Sequence
  Description of Artificial Sequence: Synthetic primer
aaatcctccatatactgcagtcaagtt

SEQ ID NO: 14846 - DNA, 21 bp, Artificial Sequence
  Description of Artificial Sequence: Synthetic primer
attgcatcgactgacctctcc

SEQ ID NO: 14847 - DNA, 28 bp, Artificial Sequence
  Description of Artificial Sequence: Synthetic primer
acgaaagacgaaaagcattttgttatgt

SEQ ID NO: 14848 - DNA, 24 bp, Artificial Sequence
  Description of Artificial Sequence: Synthetic primer
tggttttatagtggtgtcccctca

SEQ ID NO: 14849 - DNA, 23 bp, Artificial Sequence
  Description of Artificial Sequence: Synthetic primer
cgtgtagcgtagagagagcaaag

SEQ ID NO: 14850 - DNA, 25 bp, Artificial Sequence
  Description of Artificial Sequence: Synthetic primer
gttgatctagccgatggtctcatac

SEQ ID NO: 14851 - DNA, 25 bp, Artificial Sequence
  Description of Artificial Sequence: Synthetic primer
atcacaacagggatagtacttgcat

SEQ ID NO: 14852 - DNA, 26 bp, Artificial Sequence
  Description of Artificial Sequence: Synthetic primer
gctgatattgcttctaccctaaggga

SEQ ID NO: 14853 - DNA, 22 bp, Artificial Sequence
  Description of Artificial Sequence: Synthetic primer
accagatcgtcgtcctctctaa

SEQ ID NO: 14854 - DNA, 26 bp, Artificial Sequence
  Description of Artificial Sequence: Synthetic primer
ccattcacagagtgagaagaagatgg

SEQ ID NO: 14855 - DNA, 22 bp, Artificial Sequence
  Description of Artificial Sequence: Synthetic primer
gcttacattggtcagcatgacg

SEQ ID NO: 14856 - DNA, 26 bp, Artificial Sequence
  Description of Artificial Sequence: Synthetic primer
agacttcttttctcttggcaggtaaa

SEQ ID NO: 14857 - DNA, 27 bp, Artificial Sequence
  Description of Artificial Sequence: Synthetic primer
aattttacaggtgcagatttgagtgac

SEQ ID NO: 14858 - DNA, 21 bp, Artificial Sequence
  Description of Artificial Sequence: Synthetic primer
acaattacctcaccagcgtgt

SEQ ID NO: 14859 - DNA, 21 bp, Artificial Sequence
  Description of Artificial Sequence: Synthetic primer
ctctgtcgcgaaaagcgaaag

SEQ ID NO: 14860 - DNA, 26 bp, Artificial Sequence
  Description of Artificial Sequence: Synthetic primer
tggagggagattagagacttgtttga

SEQ ID NO: 14861 - DNA, 26 bp, Artificial Sequence
  Description of Artificial Sequence: Synthetic primer
tggagtcatatcaaggaagtaccaag

SEQ ID NO: 14862 - DNA, 21 bp, Artificial Sequence
  Description of Artificial Sequence: Synthetic primer
ggtttcaccgttggccaagta

SEQ ID NO: 14863 - DNA, 25 bp, Artificial Sequence
  Description of Artificial Sequence: Synthetic primer
gaccagtggaaacaagaggatgtac

SEQ ID NO: 14864 - DNA, 22 bp, Artificial Sequence
  Description of Artificial Sequence: Synthetic primer
ctagcggtaccgaaggaaggta

SEQ ID NO: 14865 - DNA, 22 bp, Artificial Sequence
  Description of Artificial Sequence: Synthetic primer
cacaaccgtttgggctctcata

SEQ ID NO: 14866 - DNA, 21 bp, Artificial Sequence
  Description of Artificial Sequence: Synthetic primer
acgttcaagtatccacgcctt

SEQ ID NO: 14867 - DNA, 23 bp, Artificial Sequence
  Description of Artificial Sequence: Synthetic primer
acagttccagatgagaagaggga

SEQ ID NO: 14868 - DNA, 21 bp, Artificial Sequence
  Description of Artificial Sequence: Synthetic primer
tcgctatggaggaaatcagca

SEQ ID NO: 14869 - DNA, 28 bp, Artificial Sequence
  Description of Artificial Sequence: Synthetic primer
caaaaagccatgtcaataacagagaagc

SEQ ID NO: 14870 - DNA, 27 bp, Artificial Sequence
  Description of Artificial Sequence: Synthetic primer
aaagctatagatgcatactctcccttg

SEQ ID NO: 14871 - DNA, 21 bp, Artificial Sequence
  Description of Artificial Sequence: Synthetic primer
acgtgcagatggaacacttcg

SEQ ID NO: 14872 - DNA, 21 bp, Artificial Sequence
  Description of Artificial Sequence: Synthetic primer
gtgagccacgtgaaaggacaa

SEQ ID NO: 14873 - DNA, 21 bp, Artificial Sequence
  Description of Artificial Sequence: Synthetic primer
ccatcacactcagaagagcca

SEQ ID NO: 14874 - DNA, 23 bp, Artificial Sequence
  Description of Artificial Sequence: Synthetic primer
acgagcaataccttcaacctacc

SEQ ID NO: 14875 - DNA, 23 bp, Artificial Sequence
  Description of Artificial Sequence: Synthetic primer
caaccgaggagattgaagtgcat

SEQ ID NO: 14876 - DNA, 24 bp, Artificial Sequence
  Description of Artificial Sequence: Synthetic primer
tgtcaactcctgcaagaaagagat

SEQ ID NO: 14877 - DNA, 21 bp, Artificial Sequence
  Description of Artificial Sequence: Synthetic primer
gaagaggacccaacctccttc

SEQ ID NO: 14878 - DNA, 22 bp, Artificial Sequence
  Description of Artificial Sequence: Synthetic primer
gctgatgaggagactggtcttg

SEQ ID NO: 14879 - DNA, 21 bp, Artificial Sequence
  Description of Artificial Sequence: Synthetic primer
ggacatggaattcgaggctca

SEQ ID NO: 14880 - DNA, 22 bp, Artificial Sequence
  Description of Artificial Sequence: Synthetic primer
ctcagtttgtgctaggttggga

SEQ ID NO: 14881 - DNA, 27 bp, Artificial Sequence
  Description of Artificial Sequence: Synthetic primer
tcataaatgtgtcgatgtcgactatca

SEQ ID NO: 14882 - DNA, 23 bp, Artificial Sequence
  Description of Artificial Sequence: Synthetic primer
gaacagagagctccaaacaatgc

SEQ ID NO: 14883 - DNA, 21 bp, Artificial Sequence
  Description of Artificial Sequence: Synthetic primer
cagtcactacagttcgtggca

SEQ ID NO: 14884 - DNA, 29 bp, Artificial Sequence
  Description of Artificial Sequence: Synthetic primer
gctgtaaatcttcctacacatacatacct

SEQ ID NO: 14885 - DNA, 21 bp, Artificial Sequence
  Description of Artificial Sequence: Synthetic primer
ccagtgtccaacctcaaagca

SEQ ID NO: 14886 - DNA, 23 bp, Artificial Sequence
  Description of Artificial Sequence: Synthetic primer
gcagctgaagaatttggaggtca

SEQ ID NO: 14887 - DNA, 21 bp, Artificial Sequence
  Description of Artificial Sequence: Synthetic primer
caggaagctgcagattcttgg

SEQ ID NO: 14888 - DNA, 21 bp, Artificial Sequence
  Description of Artificial Sequence: Synthetic primer
gatttcgtgccaaaacgcgat

SEQ ID NO: 14889 - DNA, 21 bp, Artificial Sequence
  Description of Artificial Sequence: Synthetic primer
gcgccatacagcttgttcaaa

SEQ ID NO: 14890 - DNA, 24 bp, Artificial Sequence
  Description of Artificial Sequence: Synthetic primer
cagcaggagtttgaacagtcttac

SEQ ID NO: 14891 - DNA, 27 bp, Artificial Sequence
  Description of Artificial Sequence: Synthetic primer
gagcattatgagaaacaaagtgagtcg

SEQ ID NO: 14892 - DNA, 23 bp, Artificial Sequence
  Description of Artificial Sequence: Synthetic primer
ggcattacggtatctgtttcacg

SEQ ID NO: 14893 - DNA, 23 bp, Artificial Sequence
  Description of Artificial Sequence: Synthetic primer
gctaaatgaggaaatgcgaggct

SEQ ID NO: 14894 - DNA, 21 bp, Artificial Sequence
  Description of Artificial Sequence: Synthetic primer
ggaagaagatgatggcaccga

SEQ ID NO: 14895 - DNA, 28 bp, Artificial Sequence
  Description of Artificial Sequence: Synthetic primer
catcggaagaagatgatttactcctcaa

SEQ ID NO: 14896 - DNA, 21 bp, Artificial Sequence
  Description of Artificial Sequence: Synthetic primer
gagggtggaggaggtgatgat

SEQ ID NO: 14897 - DNA, 22 bp, Artificial Sequence
  Description of Artificial Sequence: Synthetic primer
cgaagttgaccttgatcgcatt

SEQ ID NO: 14898 - DNA, 22 bp, Artificial Sequence
  Description of Artificial Sequence: Synthetic primer
cttgttcacgttgtcactagcg

SEQ ID NO: 14899 - DNA, 21 bp, Artificial Sequence
  Description of Artificial Sequence: Synthetic primer
gggagctgactgttgtgttct

SEQ ID NO: 14900 - DNA, 21 bp, Artificial Sequence
  Description of Artificial Sequence: Synthetic primer
gatgcagcggacatggattca

SEQ ID NO: 14901 - DNA, 23 bp, Artificial Sequence
  Description of Artificial Sequence: Synthetic primer
gaagaccatcaagtgggacaaca

SEQ ID NO: 14902 - DNA, 25 bp, Artificial Sequence
  Description of Artificial Sequence: Synthetic primer
ctcaatcataaatggtggagccctt

SEQ ID NO: 14903 - DNA, 21 bp, Artificial Sequence
  Description of Artificial Sequence: Synthetic primer
tagccacacgtgcatgcaata

SEQ ID NO: 14904 - DNA, 21 bp, Artificial Sequence
  Description of Artificial Sequence: Synthetic primer
agtgcaaactgccaaaggaca

SEQ ID NO: 14905 - DNA, 26 bp, Artificial Sequence
  Description of Artificial Sequence: Synthetic primer
tatccaccattgacgttatgaactcg

SEQ ID NO: 14906 - DNA, 26 bp, Artificial Sequence
  Description of Artificial Sequence: Synthetic primer
tatgtcctccttcaaccatgagtatg

SEQ ID NO: 14907 - DNA, 23 bp, Artificial Sequence
  Description of Artificial Sequence: Synthetic primer
agatgaggacctcattcctgctt

SEQ ID NO: 14908 - DNA, 26 bp, Artificial Sequence
  Description of Artificial Sequence: Synthetic primer
catttttctggaagctgcaaagagaa

SEQ ID NO: 14909 - DNA, 21 bp, Artificial Sequence
  Description of Artificial Sequence: Synthetic primer
gacatgtcttccacgcagact

SEQ ID NO: 14910 - DNA, 21 bp, Artificial Sequence
  Description of Artificial Sequence: Synthetic primer
ctcgacaagcactcctcatgt

SEQ ID NO: 14911 - DNA, 22 bp, Artificial Sequence
  Description of Artificial Sequence: Synthetic primer
acacacgtgattggttcattcg

SEQ ID NO: 14912 - DNA, 24 bp, Artificial Sequence
  Description of Artificial Sequence: Synthetic primer
caaccctcggctgttcattttaag

SEQ ID NO: 14913 - DNA, 24 bp, Artificial Sequence
  Description of Artificial Sequence: Synthetic primer
tgcctgccatagcctattatactg

SEQ ID NO: 14914 - DNA, 21 bp, Artificial Sequence
  Description of Artificial Sequence: Synthetic primer
ccggcggagaactacttcatc

SEQ ID NO: 14915 - DNA, 21 bp, Artificial Sequence
  Description of Artificial Sequence: Synthetic primer
caaggcaaggatgctcactgt

SEQ ID NO: 14916 - DNA, 25 bp, Artificial Sequence
  Description of Artificial Sequence: Synthetic primer
ctcactgattgtcctgatctgtagc

SEQ ID NO: 14917 - DNA, 22 bp, Artificial Sequence
  Description of Artificial Sequence: Synthetic primer
ctggctgactttggaatggcta

SEQ ID NO: 14918 - DNA, 21 bp, Artificial Sequence
  Description of Artificial Sequence: Synthetic primer
gagttggcacgagcatgatct

SEQ ID NO: 14919 - DNA, 21 bp, Artificial Sequence
  Description of Artificial Sequence: Synthetic primer
cgacgatggatggatgctgac

SEQ ID NO: 14920 - DNA, 26 bp, Artificial Sequence
  Description of Artificial Sequence: Synthetic primer
aatatggtctagatatctcccagcct

SEQ ID NO: 14921 - DNA, 26 bp, Artificial Sequence
  Description of Artificial Sequence: Synthetic primer
gtccttgccacttagtaagcttactc

SEQ ID NO: 14922 - DNA, 27 bp, Artificial Sequence
  Description of Artificial Sequence: Synthetic primer
tgaaggaaataattagtgctgcggtta

SEQ ID NO: 14923 - DNA, 22 bp, Artificial Sequence
  Description of Artificial Sequence: Synthetic primer
tcgtggtcactgaaagatgaca

SEQ ID NO: 14924 - DNA, 25 bp, Artificial Sequence
  Description of Artificial Sequence: Synthetic primer
aatctttcaaggtgcctgaacttct

SEQ ID NO: 14925 - DNA, 22 bp, Artificial Sequence
  Description of Artificial Sequence: Synthetic primer
ccccaactgatatcgaggaagg

SEQ ID NO: 14926 - DNA, 25 bp, Artificial Sequence
  Description of Artificial Sequence: Synthetic primer
caggcaagagtttgcgtattatagc

SEQ ID NO: 14927 - DNA, 21 bp, Artificial Sequence
  Description of Artificial Sequence: Synthetic primer
tcttgcgacatcaaggtctcc

SEQ ID NO: 14928 - DNA, 21 bp, Artificial Sequence
  Description of Artificial Sequence: Synthetic primer
caggagcctccttgtcttctt

SEQ ID NO: 14929 - DNA, 26 bp, Artificial Sequence
  Description of Artificial Sequence: Synthetic primer
ctactaatgaaatggtgagcgtttgc

SEQ ID NO: 14930 - DNA, 28 bp, Artificial Sequence
  Description of Artificial Sequence: Synthetic primer
ttgtggagggatcatataattcactacc

SEQ ID NO: 14931 - DNA, 21 bp, Artificial Sequence
  Description of Artificial Sequence: Synthetic primer
aaccagaggcggaacttcttt

SEQ ID NO: 14932 - DNA, 21 bp, Artificial Sequence
  Description of Artificial Sequence: Synthetic primer
agcgagctcctaaggatgtct

SEQ ID NO: 14933 - DNA, 21 bp, Artificial Sequence
  Description of Artificial Sequence: Synthetic primer
acgaaaagtgtcacgcctgat

SEQ ID NO: 14934 - DNA, 23 bp, Artificial Sequence
  Description of Artificial Sequence: Synthetic primer
ctgacaatgggatacccaaggaa

SEQ ID NO: 14935 - DNA, 27 bp, Artificial Sequence
  Description of Artificial Sequence: Synthetic primer
tacctttttacaaatggttggcgaaat

SEQ ID NO: 14936 - DNA, 19 bp, Artificial Sequence
  Description of Artificial Sequence: Synthetic primer
tcaccgtctcgacagtcgt

SEQ ID NO: 14937 - DNA, 21 bp, Artificial Sequence
  Description of Artificial Sequence: Synthetic primer
ggagtgctttcggcttcagtt

SEQ ID NO: 14938 - DNA, 24 bp, Artificial Sequence
  Description of Artificial Sequence: Synthetic primer
ccatcaagtcgagataatgctggt

SEQ ID NO: 14939 - DNA, 23 bp, Artificial Sequence
  Description of Artificial Sequence: Synthetic primer
gcatcacgaggtgaattggaatc

SEQ ID NO: 14940 - DNA, 21 bp, Artificial Sequence
  Description of Artificial Sequence: Synthetic primer
gttgcacacggtgagactctt

SEQ ID NO: 14941 - DNA, 24 bp, Artificial Sequence
  Description of Artificial Sequence: Synthetic primer
ccacatccttgacagtacacaaga

SEQ ID NO: 14942 - DNA, 23 bp, Artificial Sequence
  Description of Artificial Sequence: Synthetic primer
gtgctcaagcattaacacgtctc

SEQ ID NO: 14943 - DNA, 21 bp, Artificial Sequence
  Description of Artificial Sequence: Synthetic primer
ctggatgggcgtgaaatgttt

SEQ ID NO: 14944 - DNA, 24 bp, Artificial Sequence
  Description of Artificial Sequence: Synthetic primer
gtatcttctccctgccagagactt

SEQ ID NO: 14945 - DNA, 21 bp, Artificial Sequence
  Description of Artificial Sequence: Synthetic primer
cggtggcattgaacttggttt

SEQ ID NO: 14946 - DNA, 22 bp, Artificial Sequence
  Description of Artificial Sequence: Synthetic primer
cccttaccatctcctgaccatg

SEQ ID NO: 14947 - DNA, 22 bp, Artificial Sequence
  Description of Artificial Sequence: Synthetic primer
agcctttgtaaaagcacgtctc

SEQ ID NO: 14948 - DNA, 21 bp, Artificial Sequence
  Description of Artificial Sequence: Synthetic primer
cccgggatgaaccagcaaata

SEQ ID NO: 14949 - DNA, 27 bp, Artificial Sequence
  Description of Artificial Sequence: Synthetic primer
aagtgcatattgttcttgtctccatcg

SEQ ID NO: 14950 - DNA, 27 bp, Artificial Sequence
  Description of Artificial Sequence: Synthetic primer
tcccaaaggaatcaaatcttgagaagc

SEQ ID NO: 14951 - DNA, 22 bp, Artificial Sequence
  Description of Artificial Sequence: Synthetic primer
atgatctcaatgtgcctcgtga

SEQ ID NO: 14952 - DNA, 26 bp, Artificial Sequence
  Description of Artificial Sequence: Synthetic primer
taggctttttcaaggagtacaaggaa

SEQ ID NO: 14953 - DNA, 22 bp, Artificial Sequence
  Description of Artificial Sequence: Synthetic primer
aggcttagcagacaagtctgag

SEQ ID NO: 14954 - DNA, 21 bp, Artificial Sequence
  Description of Artificial Sequence: Synthetic primer
cgttccaaacctttccccaaa

SEQ ID NO: 14955 - DNA, 26 bp, Artificial Sequence
  Description of Artificial Sequence: Synthetic primer
agaaattggagtttgtttgagcacat

SEQ ID NO: 14956 - DNA, 21 bp, Artificial Sequence
  Description of Artificial Sequence: Synthetic primer
gtccaaggctcttctgcattc

SEQ ID NO: 14957 - DNA, 24 bp, Artificial Sequence
  Description of Artificial Sequence: Synthetic primer
tgaaaaggatgatcccacaagacc

SEQ ID NO: 14958 - DNA, 21 bp, Artificial Sequence
  Description of Artificial Sequence: Synthetic primer
aacatcctgaaggtcgacctg

SEQ ID NO: 14959 - DNA, 27 bp, Artificial Sequence
  Description of Artificial Sequence: Synthetic primer
cattgagaacctacatcagtttggttg

SEQ ID NO: 14960 - DNA, 23 bp, Artificial Sequence
  Description of Artificial Sequence: Synthetic primer
gcttctcatggaggaaacgacag

SEQ ID NO: 14961 - DNA, 25 bp, Artificial Sequence
  Description of Artificial Sequence: Synthetic primer
gtttggtcgggaaatttagaccttc

SEQ ID NO: 14962 - DNA, 21 bp, Artificial Sequence
  Description of Artificial Sequence: Synthetic primer
ttttgatggctggagttggca

SEQ ID NO: 14963 - DNA, 28 bp, Artificial Sequence
  Description of Artificial Sequence: Synthetic primer
ccatgaccaaattgctcaaattatcact

SEQ ID NO: 14964 - DNA, 28 bp, Artificial Sequence
  Description of Artificial Sequence: Synthetic primer
tatgtcgagtagctgtatcttcgtaatg

SEQ ID NO: 14965 - DNA, 21 bp, Artificial Sequence
  Description of Artificial Sequence: Synthetic primer
gaagctggcccaaaatttggt

SEQ ID NO: 14966 - DNA, 23 bp, Artificial Sequence
  Description of Artificial Sequence: Synthetic primer
ttcaagagtccatttcgcagcta

SEQ ID NO: 14967 - DNA, 25 bp, Artificial Sequence
  Description of Artificial Sequence: Synthetic primer
caactatttgaaggttgtcccatcg

SEQ ID NO: 14968 - DNA, 21 bp, Artificial Sequence
  Description of Artificial Sequence: Synthetic primer
cgtgccgttctcagagatcaa

SEQ ID NO: 14969 - DNA, 21 bp, Artificial Sequence
  Description of Artificial Sequence: Synthetic primer
gagataactgccatccctgct

SEQ ID NO: 14970 - DNA, 23 bp, Artificial Sequence
  Description of Artificial Sequence: Synthetic primer
agagacctccttctgattctcca

SEQ ID NO: 14971 - DNA, 23 bp, Artificial Sequence
  Description of Artificial Sequence: Synthetic primer
gaccaatggctcgagctaaaaag

SEQ ID NO: 14972 - DNA, 21 bp, Artificial Sequence
  Description of Artificial Sequence: Synthetic primer
ctggcgatagcaaatgttggg

SEQ ID NO: 14973 - DNA, 21 bp, Artificial Sequence
  Description of Artificial Sequence: Synthetic primer
gtgcagaagcaaccctgatga

SEQ ID NO: 14974 - DNA, 21 bp, Artificial Sequence
  Description of Artificial Sequence: Synthetic primer
ggctgttggatatggacggat

SEQ ID NO: 14975 - DNA, 21 bp, Artificial Sequence
  Description of Artificial Sequence: Synthetic primer
gttgcatcggctttggtttct

SEQ ID NO: 14976 - DNA, 28 bp, Artificial Sequence
  Description of Artificial Sequence: Synthetic primer
gtgccaaagttatttactccaagtatgc

SEQ ID NO: 14977 - DNA, 22 bp, Artificial Sequence
  Description of Artificial Sequence: Synthetic primer
aggacgctgtagaaaagagtgg

SEQ ID NO: 14978 - DNA, 22 bp, Artificial Sequence
  Description of Artificial Sequence: Synthetic primer
ggtaagtaaccatggcgtcgag

SEQ ID NO: 14979 - DNA, 23 bp, Artificial Sequence
  Description of Artificial Sequence: Synthetic primer
gtggctgcatgtgtactagtacg

SEQ ID NO: 14980 - DNA, 23 bp, Artificial Sequence
  Description of Artificial Sequence: Synthetic primer
tgtgtttgtgatgttagcagcca

SEQ ID NO: 14981 - DNA, 22 bp, Artificial Sequence
  Description of Artificial Sequence: Synthetic primer
tgcgcgtgaaggaatttccata

SEQ ID NO: 14982 - DNA, 24 bp, Artificial Sequence
  Description of Artificial Sequence: Synthetic primer
acgtctgaagcgcttagtctatac

SEQ ID NO: 14983 - DNA, 27 bp, Artificial Sequence
  Description of Artificial Sequence: Synthetic primer
tcttatctgctcctattttcctttggt

SEQ ID NO: 14984 - DNA, 21 bp, Artificial Sequence
  Description of Artificial Sequence: Synthetic primer
acaggtctgcccagtaagact

SEQ ID NO: 14985 - DNA, 19 bp, Artificial Sequence
  Description of Artificial Sequence: Synthetic primer
cccagttcgcctgaacctc

SEQ ID NO: 14986 - DNA, 22 bp, Artificial Sequence
  Description of Artificial Sequence: Synthetic primer
cctgctggaaaagttgtttggg

SEQ ID NO: 14987 - DNA, 23 bp, Artificial Sequence
  Description of Artificial Sequence: Synthetic primer
tctatctttccaaacggccagac

SEQ ID NO: 14988 - DNA, 28 bp, Artificial Sequence
  Description of Artificial Sequence: Synthetic primer
ctcctgaagaaagaacggttaaaagaga

SEQ ID NO: 14989 - DNA, 21 bp, Artificial Sequence
  Description of Artificial Sequence: Synthetic primer
gggagaattgccgtggatcag

SEQ ID NO: 14990 - DNA, 23 bp, Artificial Sequence
  Description of Artificial Sequence: Synthetic primer
tgctggtaagtttcaaagaccca

SEQ ID NO: 14991 - DNA, 21 bp, Artificial Sequence
  Description of Artificial Sequence: Synthetic primer
ggccacctaagccatatgcag

SEQ ID NO: 14992 - DNA, 22 bp, Artificial Sequence
  Description of Artificial Sequence: Synthetic primer
gggtgtacctgtttaacaacgc

SEQ ID NO: 14993 - DNA, 25 bp, Artificial Sequence
  Description of Artificial Sequence: Synthetic primer
gctccaaacatgatacctgctgata

SEQ ID NO: 14994 - DNA, 22 bp, Artificial Sequence
  Description of Artificial Sequence: Synthetic primer
attgttccctgttggtgtcacg

SEQ ID NO: 14995 - DNA, 21 bp, Artificial Sequence
  Description of Artificial Sequence: Synthetic primer
ctcccaattcgggagggtaac

SEQ ID NO: 14996 - DNA, 21 bp, Artificial Sequence
  Description of Artificial Sequence: Synthetic primer
cagtaagtgcctcctagccat

SEQ ID NO: 14997 - DNA, 23 bp, Artificial Sequence
  Description of Artificial Sequence: Synthetic primer
gggtttgactccctttgtgtttg

SEQ ID NO: 14998 - DNA, 21 bp, Artificial Sequence
  Description of Artificial Sequence: Synthetic primer
cacagatctgcaagcattggg

SEQ ID NO: 14999 - DNA, 27 bp, Artificial Sequence
  Description of Artificial Sequence: Synthetic primer
aagcttagaattcatgcaactagtcca

SEQ ID NO: 15000 - DNA, 25 bp, Artificial Sequence
  Description of Artificial Sequence: Synthetic primer
ccagccacaagaagtttctcttttt

SEQ ID NO: 15001 - DNA, 28 bp, Artificial Sequence
  Description of Artificial Sequence: Synthetic primer
tgcctattgctcaagaatatgtttgatc

SEQ ID NO: 15002 - DNA, 19 bp, Artificial Sequence
  Description of Artificial Sequence: Synthetic primer
ctttatcccgccgacgaca

SEQ ID NO: 15003 - DNA, 23 bp, Artificial Sequence
  Description of Artificial Sequence: Synthetic primer
gtatgaagctgtcgaaggaggat

SEQ ID NO: 15004 - DNA, 21 bp, Artificial Sequence
  Description of Artificial Sequence: Synthetic primer
gtcaccgagcagactctgaag

SEQ ID NO: 15005 - DNA, 21 bp, Artificial Sequence
  Description of Artificial Sequence: Synthetic primer
ccgcttctgccgatcaaaatg

SEQ ID NO: 15006 - DNA, 26 bp, Artificial Sequence
  Description of Artificial Sequence: Synthetic primer
acaactatgatggagaacagagtgac

SEQ ID NO: 15007 - DNA, 26 bp, Artificial Sequence
  Description of Artificial Sequence: Synthetic primer
cgagagttgatttcaagcaagtctgt

SEQ ID NO: 15008 - DNA, 26 bp, Artificial Sequence
  Description of Artificial Sequence: Synthetic primer
caatgcagttctgatcacctttagag

SEQ ID NO: 15009 - DNA, 21 bp, Artificial Sequence
  Description of Artificial Sequence: Synthetic primer
gagagcggaaagcttgttgac

SEQ ID NO: 15010 - DNA, 18 bp, Artificial Sequence
  Description of Artificial Sequence: Synthetic primer
cagtggcgaacggcaatg

SEQ ID NO: 15011 - DNA, 21 bp, Artificial Sequence
  Description of Artificial Sequence: Synthetic primer
gaccgacacccagtcctagaa

SEQ ID NO: 15012 - DNA, 26 bp, Artificial Sequence
  Description of Artificial Sequence: Synthetic primer
cagctcgtgatgatgtcttattgcta

SEQ ID NO: 15013 - DNA, 21 bp, Artificial Sequence
  Description of Artificial Sequence: Synthetic primer
tctgttggtatcccagcactc

SEQ ID NO: 15014 - DNA, 22 bp, Artificial Sequence
  Description of Artificial Sequence: Synthetic primer
ggactagagctagtgacatggc

SEQ ID NO: 15015 - DNA, 24 bp, Artificial Sequence
  Description of Artificial Sequence: Synthetic primer
aataaccttgcgaactccaactga

SEQ ID NO: 15016 - DNA, 22 bp, Artificial Sequence
  Description of Artificial Sequence: Synthetic primer
ggaggcatactcttgctctgac

SEQ ID NO: 15017 - DNA, 21 bp, Artificial Sequence
  Description of Artificial Sequence: Synthetic primer
agtcaagtgtgacggcaaaga

SEQ ID NO: 15018 - DNA, 21 bp, Artificial Sequence
  Description of Artificial Sequence: Synthetic primer
tgaagtggagcaggaagcatc

SEQ ID NO: 15019 - DNA, 22 bp, Artificial Sequence
  Description of Artificial Sequence: Synthetic primer
gaagcagcgcacgatacaagta

SEQ ID NO: 15020 - DNA, 21 bp, Artificial Sequence
  Description of Artificial Sequence: Synthetic primer
atctcagcagttgctgcactc

SEQ ID NO: 15021 - DNA, 19 bp, Artificial Sequence
  Description of Artificial Sequence: Synthetic primer
gccagcaggcataactgtc

SEQ ID NO: 15022 - DNA, 24 bp, Artificial Sequence
  Description of Artificial Sequence: Synthetic primer
gataatgatcgacaagtgggtgct

SEQ ID NO: 15023 - DNA, 21 bp, Artificial Sequence
  Description of Artificial Sequence: Synthetic primer
gaccaggtgtcacaagagagc

SEQ ID NO: 15024 - DNA, 26 bp, Artificial Sequence
  Description of Artificial Sequence: Synthetic primer
ctgaaagagactactggtgacaagtt

SEQ ID NO: 15025 - DNA, 28 bp, Artificial Sequence
  Description of Artificial Sequence: Synthetic primer
tgggtaaaaattgtcgtattcaatgtcg

SEQ ID NO: 15026 - DNA, 21 bp, Artificial Sequence
  Description of Artificial Sequence: Synthetic primer
ggagcctgctggtacaataga

SEQ ID NO: 15027 - DNA, 23 bp, Artificial Sequence
  Description of Artificial Sequence: Synthetic primer
atttcccatgtccttttcagcga

SEQ ID NO: 15028 - DNA, 26 bp, Artificial Sequence
  Description of Artificial Sequence: Synthetic primer
gtgtctctccagacttgatagtcctt

SEQ ID NO: 15029 - DNA, 23 bp, Artificial Sequence
  Description of Artificial Sequence: Synthetic primer
cctccatacaaaaccaaggagca

SEQ ID NO: 15030 - DNA, 23 bp, Artificial Sequence
  Description of Artificial Sequence: Synthetic primer
agcgtgaaggatttcaaggagtt

SEQ ID NO: 15031 - DNA, 23 bp, Artificial Sequence
  Description of Artificial Sequence: Synthetic primer
tgagtatctgtccacagggaagt

SEQ ID NO: 15032 - DNA, 23 bp, Artificial Sequence
  Description of Artificial Sequence: Synthetic primer
tgtctatcctgaagcaactggag

SEQ ID NO: 15033 - DNA, 19 bp, Artificial Sequence
  Description of Artificial Sequence: Synthetic primer
cgagatacggaccgagctg

SEQ ID NO: 15034 - DNA, 22 bp, Artificial Sequence
  Description of Artificial Sequence: Synthetic primer
ggcaggtcatgttgaccacata

SEQ ID NO: 15035 - DNA, 22 bp, Artificial Sequence
  Description of Artificial Sequence: Synthetic primer
cagtgttgcttcatccacgtga

SEQ ID NO: 15036 - DNA, 21 bp, Artificial Sequence
  Description of Artificial Sequence: Synthetic primer
aactggcaaatccctgaaagc

SEQ ID NO: 15037 - DNA, 21 bp, Artificial Sequence
  Description of Artificial Sequence: Synthetic primer
ctgtacattttcccggccgta

SEQ ID NO: 15038 - DNA, 23 bp, Artificial Sequence
  Description of Artificial Sequence: Synthetic primer
aataatctccattcgccctggga

SEQ ID NO: 15039 - DNA, 21 bp, Artificial Sequence
  Description of Artificial Sequence: Synthetic primer
aaccctggaattcaactggca

SEQ ID NO: 15040 - DNA, 24 bp, Artificial Sequence
  Description of Artificial Sequence: Synthetic primer
atgctgatgatgtttctacgatgc

SEQ ID NO: 15041 - DNA, 26 bp, Artificial Sequence
  Description of Artificial Sequence: Synthetic primer
gttagtggaataagatcgcagcaaca

SEQ ID NO: 15042 - DNA, 23 bp, Artificial Sequence
  Description of Artificial Sequence: Synthetic primer
agagacaaccccaagttcttcat

SEQ ID NO: 15043 - DNA, 24 bp, Artificial Sequence
  Description of Artificial Sequence: Synthetic primer
aaggataaccaaagggtagaaggg

SEQ ID NO: 15044 - DNA, 21 bp, Artificial Sequence
  Description of Artificial Sequence: Synthetic primer
ctttcatgccgcaagaaggtt

SEQ ID NO: 15045 - DNA, 22 bp, Artificial Sequence
  Description of Artificial Sequence: Synthetic primer
gggtatctatggcctaggaacg

SEQ ID NO: 15046 - DNA, 25 bp, Artificial Sequence
  Description of Artificial Sequence: Synthetic primer
tttcaacacaactgatcaagccttt

SEQ ID NO: 15047 - DNA, 25 bp, Artificial Sequence
  Description of Artificial Sequence: Synthetic primer
gtccttgaacttcagagcaaacgta

SEQ ID NO: 15048 - DNA, 21 bp, Artificial Sequence
  Description of Artificial Sequence: Synthetic primer
cagggattccggaactgaaga

SEQ ID NO: 15049 - DNA, 23 bp, Artificial Sequence
  Description of Artificial Sequence: Synthetic primer
ggaaggtgcttctgaagaacaac

SEQ ID NO: 15050 - DNA, 22 bp, Artificial Sequence
  Description of Artificial Sequence: Synthetic primer
gagatgtagccacccaatgcaa

SEQ ID NO: 15051 - DNA, 24 bp, Artificial Sequence
  Description of Artificial Sequence: Synthetic primer
acctggaggatgctgtaaaatacg

SEQ ID NO: 15052 - DNA, 28 bp, Artificial Sequence
  Description of Artificial Sequence: Synthetic primer
acttgttcatgtgaaattgagcataacc

SEQ ID NO: 15053 - DNA, 25 bp, Artificial Sequence
  Description of Artificial Sequence: Synthetic primer
ggcataaatgtcatgattgttgcac

SEQ ID NO: 15054 - DNA, 22 bp, Artificial Sequence
  Description of Artificial Sequence: Synthetic primer
caagcgtgtgaatggattccaa

SEQ ID NO: 15055 - DNA, 19 bp, Artificial Sequence
  Description of Artificial Sequence: Synthetic primer
ctgctcatgacgctgtcct

SEQ ID NO: 15056 - DNA, 22 bp, Artificial Sequence
  Description of Artificial Sequence: Synthetic primer
ttcttcggatctagcagcatgt

SEQ ID NO: 15057 - DNA, 21 bp, Artificial Sequence
  Description of Artificial Sequence: Synthetic primer
caactcagcaccatgcaagtg

SEQ ID NO: 15058 - DNA, 21 bp, Artificial Sequence
  Description of Artificial Sequence: Synthetic primer
tatatgctctggcgcaccatg

SEQ ID NO: 15059 - DNA, 28 bp, Artificial Sequence
  Description of Artificial Sequence: Synthetic primer
cgagtatgatatgaggatcaagagaagc

SEQ ID NO: 15060 - DNA, 21 bp, Artificial Sequence
  Description of Artificial Sequence: Synthetic primer
aaccagtcagtcatgtccgtt

SEQ ID NO: 15061 - DNA, 26 bp, Artificial Sequence
  Description of Artificial Sequence: Synthetic primer
tgttcttcatcttctctgcgtattca

SEQ ID NO: 15062 - DNA, 28 bp, Artificial Sequence
  Description of Artificial Sequence: Synthetic primer
gatctctcgattaatacaccacttctca

SEQ ID NO: 15063 - DNA, 28 bp, Artificial Sequence
  Description of Artificial Sequence: Synthetic primer
ggcaaatgtttgagatcactatacaagc

SEQ ID NO: 15064 - DNA, 29 bp, Artificial Sequence
  Description of Artificial Sequence: Synthetic primer
tctcttcttactacataatttgtggctga

SEQ ID NO: 15065 - DNA, 25 bp, Artificial Sequence
  Description of Artificial Sequence: Synthetic primer
cctaggtgtgataaatccgttctcc

SEQ ID NO: 15066 - DNA, 21 bp, Artificial Sequence
  Description of Artificial Sequence: Synthetic primer
ggcacatctcttgcaatgctt

SEQ ID NO: 15067 - DNA, 25 bp, Artificial Sequence
  Description of Artificial Sequence: Synthetic primer
tcttgcttctattcgctagctttga

SEQ ID NO: 15068 - DNA, 23 bp, Artificial Sequence
  Description of Artificial Sequence: Synthetic primer
gctggcagatacgtcacatatcg

SEQ ID NO: 15069 - DNA, 25 bp, Artificial Sequence
  Description of Artificial Sequence: Synthetic primer
cagcgaagtactagatcagctcaat

SEQ ID NO: 15070 - DNA, 26 bp, Artificial Sequence
  Description of Artificial Sequence: Synthetic primer
tatttggttcacctttcaccagaact

SEQ ID NO: 15071 - DNA, 21 bp, Artificial Sequence
  Description of Artificial Sequence: Synthetic primer
gagcgtagacaggctgaagac

SEQ ID NO: 15072 - DNA, 28 bp, Artificial Sequence
  Description of Artificial Sequence: Synthetic primer
caaacggttaccggaagtaaatgtaaaa

SEQ ID NO: 15073 - DNA, 21 bp, Artificial Sequence
  Description of Artificial Sequence: Synthetic primer
gccggagtcgaagaaacatga

SEQ ID NO: 15074 - DNA, 23 bp, Artificial Sequence
  Description of Artificial Sequence: Synthetic primer
ggatgcatgggaagatgttgatc

SEQ ID NO: 15075 - DNA, 23 bp, Artificial Sequence
  Description of Artificial Sequence: Synthetic primer
gattctgtcatcgtccactctgg

SEQ ID NO: 15076 - DNA, 26 bp, Artificial Sequence
  Description of Artificial Sequence: Synthetic primer
caaacttctctttcaactccatctcc

SEQ ID NO: 15077 - DNA, 24 bp, Artificial Sequence
  Description of Artificial Sequence: Synthetic primer
gttcaagagatgcacaaggatgac

SEQ ID NO: 15078 - DNA, 28 bp, Artificial Sequence
  Description of Artificial Sequence: Synthetic primer
aaaatcatgggttatgacatgcctaaag

SEQ ID NO: 15079 - DNA, 22 bp, Artificial Sequence
  Description of Artificial Sequence: Synthetic primer
tactgcacctcctctgatgagt

SEQ ID NO: 15080 - DNA, 21 bp, Artificial Sequence
  Description of Artificial Sequence: Synthetic primer
cgcggttctattcgcatcaaa

SEQ ID NO: 15081 - DNA, 22 bp, Artificial Sequence
  Description of Artificial Sequence: Synthetic primer
ccctctggctatgagtttggaa

SEQ ID NO: 15082 - DNA, 21 bp, Artificial Sequence
  Description of Artificial Sequence: Synthetic primer
acaaacacctgcgattcctgt

SEQ ID NO: 15083 - DNA, 21 bp, Artificial Sequence
  Description of Artificial Sequence: Synthetic primer
ggacgagccaggaaatgtcaa

SEQ ID NO: 15084 - DNA, 19 bp, Artificial Sequence
  Description of Artificial Sequence: Synthetic primer
cagttcggcaaggttgcca

SEQ ID NO: 15085 - DNA, 20 bp, Artificial Sequence
  Description of Artificial Sequence: Synthetic primer
caccatggacaagtggttcg

SEQ ID NO: 15086 - DNA, 24 bp, Artificial Sequence
  Description of Artificial Sequence: Synthetic primer
caaggtcgtacaggacttgattct

SEQ ID NO: 15087 - DNA, 23 bp, Artificial Sequence
  Description of Artificial Sequence: Synthetic primer
ctggcattctccaactgttttcc

SEQ ID NO: 15088 - DNA, 21 bp, Artificial Sequence
  Description of Artificial Sequence: Synthetic primer
ggtatcggaacagctgcaagt

SEQ ID NO: 15089 - DNA, 23 bp, Artificial Sequence
  Description of Artificial Sequence: Synthetic primer
gacaatctcaaaggtcagcttgc

SEQ ID NO: 15090 - DNA, 28 bp, Artificial Sequence
  Description of Artificial Sequence: Synthetic primer
gcatgtcaatgcctcaagtattatcaat

SEQ ID NO: 15091 - DNA, 21 bp, Artificial Sequence
  Description of Artificial Sequence: Synthetic primer
ctgttgcaacaccaagaccaa

SEQ ID NO: 15092 - DNA, 25 bp, Artificial Sequence
  Description of Artificial Sequence: Synthetic primer
ggtatccaactatcaggaggacaga

SEQ ID NO: 15093 - DNA, 23 bp, Artificial Sequence
  Description of Artificial Sequence: Synthetic primer
gccccatgagattgagaatctgt

SEQ ID NO: 15094 - DNA, 28 bp, Artificial Sequence
  Description of Artificial Sequence: Synthetic primer
acattgcattgtatagttttggacttgt

SEQ ID NO: 15095 - DNA, 27 bp, Artificial Sequence
  Description of Artificial Sequence: Synthetic primer
gcgaagtaactcaagtagctaatggat

SEQ ID NO: 15096 - DNA, 27 bp, Artificial Sequence
  Description of Artificial Sequence: Synthetic primer
agaatcttgaagattagcagggtacca

SEQ ID NO: 15097 - DNA, 20 bp, Artificial Sequence
  Description of Artificial Sequence: Synthetic primer
cactcacgggtgtacgtgtc

SEQ ID NO: 15098 - DNA, 26 bp, Artificial Sequence
  Description of Artificial Sequence: Synthetic primer
acttgtatacacaaaacgcatgcgta

SEQ ID NO: 15099 - DNA, 27 bp, Artificial Sequence
  Description of Artificial Sequence: Synthetic primer
aacatatgctagtactactgctagtcg

SEQ ID NO: 15100 - DNA, 21 bp, Artificial Sequence
  Description of Artificial Sequence: Synthetic primer
ctcacctcattgatccgctct

SEQ ID NO: 15101 - DNA, 24 bp, Artificial Sequence
  Description of Artificial Sequence: Synthetic primer
aaaccaaccatcttaccttcagga

SEQ ID NO: 15102 - DNA, 30 bp, Artificial Sequence
  Description of Artificial Sequence: Synthetic primer
gagagctagatagtcaatttatggacaaga

SEQ ID NO: 15103 - DNA, 21 bp, Artificial Sequence
  Description of Artificial Sequence: Synthetic primer
caggagctgcatctgcaaaga

SEQ ID NO: 15104 - DNA, 26 bp, Artificial Sequence
  Description of Artificial Sequence: Synthetic primer
ttagttgaatttgatttgtgcaccga

SEQ ID NO: 15105 - DNA, 29 bp, Artificial Sequence
  Description of Artificial Sequence: Synthetic primer
actctctgtatggtactcaataaattggc

SEQ ID NO: 15106 - DNA, 28 bp, Artificial Sequence
  Description of Artificial Sequence: Synthetic primer
tcacattatgaagtcattttggagttgg

SEQ ID NO: 15107 - DNA, 23 bp, Artificial Sequence
  Description of Artificial Sequence: Synthetic primer
cgcgattcctcttttgataggca

SEQ ID NO: 15108 - DNA, 19 bp, Artificial Sequence
  Description of Artificial Sequence: Synthetic primer
atagatgtgtgccgagcga

SEQ ID NO: 15109 - DNA, 25 bp, Artificial Sequence
  Description of Artificial Sequence: Synthetic primer
cggaaatacctgaaagaaacacctg

SEQ ID NO: 15110 - DNA, 21 bp, Artificial Sequence
  Description of Artificial Sequence: Synthetic primer
gcagatacagaggcgatgcaa

SEQ ID NO: 15111 - DNA, 22 bp, Artificial Sequence
  Description of Artificial Sequence: Synthetic primer
ggagaatgcgcaaacagagatc

SEQ ID NO: 15112 - DNA, 22 bp, Artificial Sequence
  Description of Artificial Sequence: Synthetic primer
gggattacgaagtggctgtcat

SEQ ID NO: 15113 - DNA, 19 bp, Artificial Sequence
  Description of Artificial Sequence: Synthetic primer
caactactcggcagcgtct

SEQ ID NO: 15114 - DNA, 22 bp, Artificial Sequence
  Description of Artificial Sequence: Synthetic primer
gggaacgacaaggttacttgga

SEQ ID NO: 15115 - DNA, 26 bp, Artificial Sequence
  Description of Artificial Sequence: Synthetic primer
tctcaaaatcctagggaagagcatac

SEQ ID NO: 15116 - DNA, 21 bp, Artificial Sequence
  Description of Artificial Sequence: Synthetic primer
ggctctcttggactgactagc

SEQ ID NO: 15117 - DNA, 25 bp, Artificial Sequence
  Description of Artificial Sequence: Synthetic primer
tgagaagtagaagtgctacaatggc

SEQ ID NO: 15118 - DNA, 22 bp, Artificial Sequence
  Description of Artificial Sequence: Synthetic primer
tctccttcctcctgaagtacca

SEQ ID NO: 15119 - DNA, 26 bp, Artificial Sequence
  Description of Artificial Sequence: Synthetic primer
ctcttacacctcatatgcctagcaaa

SEQ ID NO: 15120 - DNA, 23 bp, Artificial Sequence
  Description of Artificial Sequence: Synthetic primer
tgtgtttttctgcacgagtacct

SEQ ID NO: 15121 - DNA, 22 bp, Artificial Sequence
  Description of Artificial Sequence: Synthetic primer
tcgctttgaagctgcttgtact

SEQ ID NO: 15122 - DNA, 22 bp, Artificial Sequence
  Description of Artificial Sequence: Synthetic primer
gatggtccagtgcagtattgct

SEQ ID NO: 15123 - DNA, 22 bp, Artificial Sequence
  Description of Artificial Sequence: Synthetic primer
cctagaggacgacttccatccc

SEQ ID NO: 15124 - DNA, 25 bp, Artificial Sequence
  Description of Artificial Sequence: Synthetic primer
cataagatgcatatgcttgcaggtt

SEQ ID NO: 15125 - DNA, 22 bp, Artificial Sequence
  Description of Artificial Sequence: Synthetic primer
tgcttatgctgttcttggtgct

SEQ ID NO: 15126 - DNA, 26 bp, Artificial Sequence
  Description of Artificial Sequence: Synthetic primer
attccaaacatgatcatggaccaaag

SEQ ID NO: 15127 - DNA, 26 bp, Artificial Sequence
  Description of Artificial Sequence: Synthetic primer
aatcggtaattcgttgtatgcctacg

SEQ ID NO: 15128 - DNA, 21 bp, Artificial Sequence
  Description of Artificial Sequence: Synthetic primer
gccagccagctaaaacagtct

SEQ ID NO: 15129 - DNA, 22 bp, Artificial Sequence
  Description of Artificial Sequence: Synthetic primer
ggacaacatcgcaaactgaaca

SEQ ID NO: 15130 - DNA, 28 bp, Artificial Sequence
  Description of Artificial Sequence: Synthetic primer
cagagatcattcaggtattttcttgcac

SEQ ID NO: 15131 - DNA, 27 bp, Artificial Sequence
  Description of Artificial Sequence: Synthetic primer
aatagtcaaaattactggcagcacaat

SEQ ID NO: 15132 - DNA, 23 bp, Artificial Sequence
  Description of Artificial Sequence: Synthetic primer
atggccgatctgactaataagca

SEQ ID NO: 15133 - DNA, 24 bp, Artificial Sequence
  Description of Artificial Sequence: Synthetic primer
actgcgtcttcctggagtagataa

SEQ ID NO: 15134 - DNA, 30 bp, Artificial Sequence
  Description of Artificial Sequence: Synthetic primer
aattgcaagtggtaaaattgatgtaaacca

SEQ ID NO: 15135 - DNA, 21 bp, Artificial Sequence
  Description of Artificial Sequence: Synthetic primer
tgcaaaccctgaaagacatgc

SEQ ID NO: 15136 - DNA, 23 bp, Artificial Sequence
  Description of Artificial Sequence: Synthetic primer
tgatgacagcacccactttatca

SEQ ID NO: 15137 - DNA, 25 bp, Artificial Sequence
  Description of Artificial Sequence: Synthetic primer
gtggaggtatttttcaggttagtgc

SEQ ID NO: 15138 - DNA, 21 bp, Artificial Sequence
  Description of Artificial Sequence: Synthetic primer
gaacatcgctgagccttgagt

SEQ ID NO: 15139 - DNA, 23 bp, Artificial Sequence
  Description of Artificial Sequence: Synthetic primer
gttccctctgtagacaacacctg

SEQ ID NO: 15140 - DNA, 22 bp, Artificial Sequence
  Description of Artificial Sequence: Synthetic primer
ggcactgattcgcattgagaac

SEQ ID NO: 15141 - DNA, 28 bp, Artificial Sequence
  Description of Artificial Sequence: Synthetic primer
atcttgaagattccgattgtaaatgcag

SEQ ID NO: 15142 - DNA, 27 bp, Artificial Sequence
  Description of Artificial Sequence: Synthetic primer
cacctaaaatttaaagtaccacgcact

SEQ ID NO: 15143 - DNA, 27 bp, Artificial Sequence
  Description of Artificial Sequence: Synthetic primer
ctgatactttcaggtttctgatgatgc

SEQ ID NO: 15144 - DNA, 27 bp, Artificial Sequence
  Description of Artificial Sequence: Synthetic primer
attggagtaaataagtgccagttctca

SEQ ID NO: 15145 - DNA, 24 bp, Artificial Sequence
  Description of Artificial Sequence: Synthetic primer
atcattgaatggatgtgaggtgct

SEQ ID NO: 15146 - DNA, 22 bp, Artificial Sequence
  Description of Artificial Sequence: Synthetic primer
tgccgcagaatacacaaaatgg

SEQ ID NO: 15147 - DNA, 22 bp, Artificial Sequence
  Description of Artificial Sequence: Synthetic primer
gcaacagcagcagtatctctga

SEQ ID NO: 15148 - DNA, 21 bp, Artificial Sequence
  Description of Artificial Sequence: Synthetic primer
atggatccagtgcagacatgg

SEQ ID NO: 15149 - DNA, 25 bp, Artificial Sequence
  Description of Artificial Sequence: Synthetic primer
agtaatggtacttctgatgttggct

SEQ ID NO: 15150 - DNA, 25 bp, Artificial Sequence
  Description of Artificial Sequence: Synthetic primer
gtttattcagggtttgcaaacatgc

SEQ ID NO: 15151 - DNA, 28 bp, Artificial Sequence
  Description of Artificial Sequence: Synthetic primer
tgcaaatattgcctgatctacaattgtc

SEQ ID NO: 15152 - DNA, 23 bp, Artificial Sequence
  Description of Artificial Sequence: Synthetic primer
caaacataacgccggttcattca

SEQ ID NO: 15153 - DNA, 21 bp, Artificial Sequence
  Description of Artificial Sequence: Synthetic primer
cagtgcaggaactgaagctgt

SEQ ID NO: 15154 - DNA, 28 bp, Artificial Sequence
  Description of Artificial Sequence: Synthetic primer
ttgcaaaagagaaaacatgacaaaaggt

SEQ ID NO: 15155 - DNA, 21 bp, Artificial Sequence
  Description of Artificial Sequence: Synthetic primer
gcggccagtaagctgttacta

SEQ ID NO: 15156 - DNA, 23 bp, Artificial Sequence
  Description of Artificial Sequence: Synthetic primer
ccacatctctccctgcactagta

SEQ ID NO: 15157 - DNA, 28 bp, Artificial Sequence
  Description of Artificial Sequence: Synthetic primer
atatgtgtcaaatgattaccaggttgtg

SEQ ID NO: 15158 - DNA, 26 bp, Artificial Sequence
  Description of Artificial Sequence: Synthetic primer
tgacccttatcaaccatatcgtctct

SEQ ID NO: 15159 - DNA, 21 bp, Artificial Sequence
  Description of Artificial Sequence: Synthetic primer
cggatcccttagacacagcaa

SEQ ID NO: 15160 - DNA, 26 bp, Artificial Sequence
  Description of Artificial Sequence: Synthetic primer
agtgcagttacacacaatagaagtgg

SEQ ID NO: 15161 - DNA, 27 bp, Artificial Sequence
  Description of Artificial Sequence: Synthetic primer
aacacgaccttagtatttggtgaattg

SEQ ID NO: 15162 - DNA, 27 bp, Artificial Sequence
  Description of Artificial Sequence: Synthetic primer
acttggttcactgaaatacacttcaac

SEQ ID NO: 15163 - DNA, 25 bp, Artificial Sequence
  Description of Artificial Sequence: Synthetic primer
acttggtgttctaaggatcaccttt

SEQ ID NO: 15164 - DNA, 29 bp, Artificial Sequence
  Description of Artificial Sequence: Synthetic primer
tgcagcatgttatcctaattgtcattagt

SEQ ID NO: 15165 - DNA, 28 bp, Artificial Sequence
  Description of Artificial Sequence: Synthetic primer
tccagcataaagattgtacttcatgttc

SEQ ID NO: 15166 - DNA, 24 bp, Artificial Sequence
  Description of Artificial Sequence: Synthetic primer
cacatcctttcaacgttgtcctac

SEQ ID NO: 15167 - DNA, 26 bp, Artificial Sequence
  Description of Artificial Sequence: Synthetic primer
agcagaacctaattgcatagcaacaa

SEQ ID NO: 15168 - DNA, 23 bp, Artificial Sequence
  Description of Artificial Sequence: Synthetic primer
acatctacccatccagacgatcc

SEQ ID NO: 15169 - DNA, 27 bp, Artificial Sequence
  Description of Artificial Sequence: Synthetic primer
aaatgaggtagtgcagttgatgtacaa

SEQ ID NO: 15170 - DNA, 22 bp, Artificial Sequence
  Description of Artificial Sequence: Synthetic primer
cagtattgccaaagctggaacg

SEQ ID NO: 15171 - DNA, 21 bp, Artificial Sequence
  Description of Artificial Sequence: Synthetic primer
agtgcagacgctaggagttca

SEQ ID NO: 15172 - DNA, 27 bp, Artificial Sequence
  Description of Artificial Sequence: Synthetic primer
ataagaaattgccgaacagttcatcac

SEQ ID NO: 15173 - DNA, 19 bp, Artificial Sequence
  Description of Artificial Sequence: Synthetic primer
gatccacccgaaccggtac

SEQ ID NO: 15174 - DNA, 21 bp, Artificial Sequence
  Description of Artificial Sequence: Synthetic primer
ccggtcgtggttccataaagg

SEQ ID NO: 15175 - DNA, 21 bp, Artificial Sequence
  Description of Artificial Sequence: Synthetic primer
ccgtccccagcaaacaaaatg

SEQ ID NO: 15176 - DNA, 25 bp, Artificial Sequence
  Description of Artificial Sequence: Synthetic primer
aaaagtaaagttagtgggacctgga

SEQ ID NO: 15177 - DNA, 28 bp, Artificial Sequence
  Description of Artificial Sequence: Synthetic primer
agatgtaatcttcagcagaggttatgtt

SEQ ID NO: 15178 - DNA, 27 bp, Artificial Sequence
  Description of Artificial Sequence: Synthetic primer
atccatcgctaacttttgcttgtaaca

SEQ ID NO: 15179 - DNA, 27 bp, Artificial Sequence
  Description of Artificial Sequence: Synthetic primer
cagaagcatcctattaattcacaccct

SEQ ID NO: 15180 - DNA, 21 bp, Artificial Sequence
  Description of Artificial Sequence: Synthetic primer
cagcgtgctgatgaagaacat

SEQ ID NO: 15181 - DNA, 22 bp, Artificial Sequence
  Description of Artificial Sequence: Synthetic primer
aggcaggacaagtcatatgtgc

SEQ ID NO: 15182 - DNA, 21 bp, Artificial Sequence
  Description of Artificial Sequence: Synthetic primer
gcagggtcttacatggctctc

SEQ ID NO: 15183 - DNA, 26 bp, Artificial Sequence
  Description of Artificial Sequence: Synthetic primer
ggtgtctcttgaaacaacaatttgct

SEQ ID NO: 15184 - DNA, 19 bp, Artificial Sequence
  Description of Artificial Sequence: Synthetic primer
ttttactgccaccgcgtga

SEQ ID NO: 15185 - DNA, 23 bp, Artificial Sequence
  Description of Artificial Sequence: Synthetic primer
tgtgtttctttaccactgtgctg

SEQ ID NO: 15186 - DNA, 26 bp, Artificial Sequence
  Description of Artificial Sequence: Synthetic primer
cgcttaatacctgatatagctggagt

SEQ ID NO: 15187 - DNA, 20 bp, Artificial Sequence
  Description of Artificial Sequence: Synthetic primer
agtgcagtttcctggatggg

SEQ ID NO: 15188 - DNA, 22 bp, Artificial Sequence
  Description of Artificial Sequence: Synthetic primer
attctacctcggtcttccttgc

SEQ ID NO: 15189 - DNA, 25 bp, Artificial Sequence
  Description of Artificial Sequence: Synthetic primer
gggaagcgacatgtacaaaatagga

SEQ ID NO: 15190 - DNA, 21 bp, Artificial Sequence
  Description of Artificial Sequence: Synthetic primer
aatcgcacccgagattcagtc

SEQ ID NO: 15191 - DNA, 25 bp, Artificial Sequence
  Description of Artificial Sequence: Synthetic primer
gcactaaggtcaccttccattactt

SEQ ID NO: 15192 - DNA, 21 bp, Artificial Sequence
  Description of Artificial Sequence: Synthetic primer
cgcgacacagtctctatgcag

SEQ ID NO: 15193 - DNA, 25 bp, Artificial Sequence
  Description of Artificial Sequence: Synthetic primer
tgctagctttgaattaatgcggaaa

SEQ ID NO: 15194 - DNA, 26 bp, Artificial Sequence
  Description of Artificial Sequence: Synthetic primer
agatggttgcttgagaatgattacca

SEQ ID NO: 15195 - DNA, 27 bp, Artificial Sequence
  Description of Artificial Sequence: Synthetic primer
atccaagtgatccttcatacttcatgt

SEQ ID NO: 15196 - DNA, 27 bp, Artificial Sequence
  Description of Artificial Sequence: Synthetic primer
tctgcaagcataaagtgatgtctagag

SEQ ID NO: 15197 - DNA, 27 bp, Artificial Sequence
  Description of Artificial Sequence: Synthetic primer
gttcacattaggattggaagctctgaa

SEQ ID NO: 15198 - DNA, 26 bp, Artificial Sequence
  Description of Artificial Sequence: Synthetic primer
agtaaatacatacaaaggtgcggact

SEQ ID NO: 15199 - DNA, 21 bp, Artificial Sequence
  Description of Artificial Sequence: Synthetic primer
gtacgacgggcaactcttgta

SEQ ID NO: 15200 - DNA, 27 bp, Artificial Sequence
  Description of Artificial Sequence: Synthetic primer
gcatctcaaaattccagtgattgactc

SEQ ID NO: 15201 - DNA, 21 bp, Artificial Sequence
  Description of Artificial Sequence: Synthetic primer
gctcggcaatccttgcaaatt

SEQ ID NO: 15202 - DNA, 27 bp, Artificial Sequence
  Description of Artificial Sequence: Synthetic primer
tgttttatggttttgtgattgtgtcct

SEQ ID NO: 15203 - DNA, 23 bp, Artificial Sequence
  Description of Artificial Sequence: Synthetic primer
cttcgttgaagcagacgactacc

SEQ ID NO: 15204 - DNA, 21 bp, Artificial Sequence
  Description of Artificial Sequence: Synthetic primer
ccgccgtaggtcatcatagag

SEQ ID NO: 15205 - DNA, 21 bp, Artificial Sequence
  Description of Artificial Sequence: Synthetic primer
ggtgacattcttcggaggctt

SEQ ID NO: 15206 - DNA, 26 bp, Artificial Sequence
  Description of Artificial Sequence: Synthetic primer
cctaaaccttaaatctagaccagcga

SEQ ID NO: 15207 - DNA, 22 bp, Artificial Sequence
  Description of Artificial Sequence: Synthetic primer
cttagtcccttggtacctccac

SEQ ID NO: 15208 - DNA, 21 bp, Artificial Sequence
  Description of Artificial Sequence: Synthetic primer
ctctcctccttcgtcctctgc

SEQ ID NO: 15209 - DNA, 21 bp, Artificial Sequence
  Description of Artificial Sequence: Synthetic primer
gcgacgacattcttccaacca

SEQ ID NO: 15210 - DNA, 28 bp, Artificial Sequence
  Description of Artificial Sequence: Synthetic primer
ccaggtctcatgaatctagttactacct

SEQ ID NO: 15211 - DNA, 19 bp, Artificial Sequence
  Description of Artificial Sequence: Synthetic primer
gcatcaacagctggccaga

SEQ ID NO: 15212 - DNA, 24 bp, Artificial Sequence
  Description of Artificial Sequence: Synthetic primer
ctgcccttttcttccctactactc

SEQ ID NO: 15213 - DNA, 22 bp, Artificial Sequence
  Description of Artificial Sequence: Synthetic primer
agctggaggaagaagaggatgg

SEQ ID NO: 15214 - DNA, 29 bp, Artificial Sequence
  Description of Artificial Sequence: Synthetic primer
agaaaaacaaacctatagcaaaaacagca

SEQ ID NO: 15215 - DNA, 26 bp, Artificial Sequence
  Description of Artificial Sequence: Synthetic primer
gcagcagattctccttctcaattttt

SEQ ID NO: 15216 - DNA, 23 bp, Artificial Sequence
  Description of Artificial Sequence: Synthetic primer
acctttggtttagaggctcctca

SEQ ID NO: 15217 - DNA, 21 bp, Artificial Sequence
  Description of Artificial Sequence: Synthetic primer
agtcaagggcaagcaattggt

SEQ ID NO: 15218 - DNA, 21 bp, Artificial Sequence
  Description of Artificial Sequence: Synthetic primer
cacgcacgtttcaagtgctac

SEQ ID NO: 15219 - DNA, 21 bp, Artificial Sequence
  Description of Artificial Sequence: Synthetic primer
gctggcctgttccattaatgc

SEQ ID NO: 15220 - DNA, 28 bp, Artificial Sequence
  Description of Artificial Sequence: Synthetic primer
gaacttacagcccatgtaaaaagcaaaa

SEQ ID NO: 15221 - DNA, 26 bp, Artificial Sequence
  Description of Artificial Sequence: Synthetic primer
ctgtaaaacacatgtacccagcaaat

SEQ ID NO: 15222 - DNA, 25 bp, Artificial Sequence
  Description of Artificial Sequence: Synthetic primer
agttgtgaccatctatgagtgaagc

SEQ ID NO: 15223 - DNA, 22 bp, Artificial Sequence
  Description of Artificial Sequence: Synthetic primer
ccaagaagtccttcagctgctc

SEQ ID NO: 15224 - DNA, 21 bp, Artificial Sequence
  Description of Artificial Sequence: Synthetic primer
cgtgaggaagcagctgttttt

SEQ ID NO: 15225 - DNA, 23 bp, Artificial Sequence
  Description of Artificial Sequence: Synthetic primer
ctgcatagtcttcagcgaggtac

SEQ ID NO: 15226 - DNA, 27 bp, Artificial Sequence
  Description of Artificial Sequence: Synthetic primer
aagaacagtggcaagaacaaaaagatc

SEQ ID NO: 15227 - DNA, 22 bp, Artificial Sequence
  Description of Artificial Sequence: Synthetic primer
gccagcactgctcaattatagc

SEQ ID NO: 15228 - DNA, 22 bp, Artificial Sequence
  Description of Artificial Sequence: Synthetic primer
ggtcattcattaaagcgcgcat

SEQ ID NO: 15229 - DNA, 28 bp, Artificial Sequence
  Description of Artificial Sequence: Synthetic primer
atcgtagtgtaaaaggtatgttctgtcg

SEQ ID NO: 15230 - DNA, 20 bp, Artificial Sequence
  Description of Artificial Sequence: Synthetic primer
aactgggcaaggcgcaaata

SEQ ID NO: 15231 - DNA, 21 bp, Artificial Sequence
  Description of Artificial Sequence: Synthetic primer
cagctgtgtccatagcacgaa

SEQ ID NO: 15232 - DNA, 23 bp, Artificial Sequence
  Description of Artificial Sequence: Synthetic primer
aattgcacaaaggcgctaaaagt

SEQ ID NO: 15233 - DNA, 24 bp, Artificial Sequence
  Description of Artificial Sequence: Synthetic primer
tcatgaatcgggtatccgtactgt

SEQ ID NO: 15234 - DNA, 24 bp, Artificial Sequence
  Description of Artificial Sequence: Synthetic primer
accagtgcagccagtaatattacg

SEQ ID NO: 15235 - DNA, 21 bp, Artificial Sequence
  Description of Artificial Sequence: Synthetic primer
cctcttctccgctctcatcct

SEQ ID NO: 15236 - DNA, 25 bp, Artificial Sequence
  Description of Artificial Sequence: Synthetic primer
aaatcagaatcacacaacctccagt

SEQ ID NO: 15237 - DNA, 21 bp, Artificial Sequence
  Description of Artificial Sequence: Synthetic primer
agtgcaggagtcttgaaacgc

SEQ ID NO: 15238 - DNA, 21 bp, Artificial Sequence
  Description of Artificial Sequence: Synthetic primer
cacttcccctctttgtagcgt

SEQ ID NO: 15239 - DNA, 21 bp, Artificial Sequence
  Description of Artificial Sequence: Synthetic primer
gatggatctagtgcaggcagt

SEQ ID NO: 15240 - DNA, 23 bp, Artificial Sequence
  Description of Artificial Sequence: Synthetic primer
gcgtagttagattgtgggtgaca

SEQ ID NO: 15241 - DNA, 25 bp, Artificial Sequence
  Description of Artificial Sequence: Synthetic primer
tgttggttaacatttacaccggttg

SEQ ID NO: 15242 - DNA, 27 bp, Artificial Sequence
  Description of Artificial Sequence: Synthetic primer
ttggcccttctatataagatcctctga

SEQ ID NO: 15243 - DNA, 26 bp, Artificial Sequence
  Description of Artificial Sequence: Synthetic primer
atttaagaagctactgaaggcgtcat

SEQ ID NO: 15244 - DNA, 23 bp, Artificial Sequence
  Description of Artificial Sequence: Synthetic primer
agtgcaggtaactgctattgtcc

SEQ ID NO: 15245 - DNA, 24 bp, Artificial Sequence
  Description of Artificial Sequence: Synthetic primer
tccatgaccgagatcaatgattgg

SEQ ID NO: 15246 - DNA, 22 bp, Artificial Sequence
  Description of Artificial Sequence: Synthetic primer
agctccgtcgtcatcctgatta

SEQ ID NO: 15247 - DNA, 23 bp, Artificial Sequence
  Description of Artificial Sequence: Synthetic primer
cagtgaaatgatgctccccaatg

SEQ ID NO: 15248 - DNA, 26 bp, Artificial Sequence
  Description of Artificial Sequence: Synthetic primer
caaagaccaacagtacagaggcttat

SEQ ID NO: 15249 - DNA, 25 bp, Artificial Sequence
  Description of Artificial Sequence: Synthetic primer
cacaactacgtcaagcttcatcaga

SEQ ID NO: 15250 - DNA, 28 bp, Artificial Sequence
  Description of Artificial Sequence: Synthetic primer
gttagcagtacatggtattgatgttagc

SEQ ID NO: 15251 - DNA, 22 bp, Artificial Sequence
  Description of Artificial Sequence: Synthetic primer
atggattccagtgcaggtatgt

SEQ ID NO: 15252 - DNA, 27 bp, Artificial Sequence
  Description of Artificial Sequence: Synthetic primer
gttacaacgcctctttaacattccaat

SEQ ID NO: 15253 - DNA, 21 bp, Artificial Sequence
  Description of Artificial Sequence: Synthetic primer
agcgttggcaatgtggatgta

SEQ ID NO: 15254 - DNA, 19 bp, Artificial Sequence
  Description of Artificial Sequence: Synthetic primer
ctggaggtgagctggtctg

SEQ ID NO: 15255 - DNA, 26 bp, Artificial Sequence
  Description of Artificial Sequence: Synthetic primer
catcaaaatacccgaaaccactatgc

SEQ ID NO: 15256 - DNA, 28 bp, Artificial Sequence
  Description of Artificial Sequence: Synthetic primer
gaaattggcagtcttaagaaaactgaga

SEQ ID NO: 15257 - DNA, 22 bp, Artificial Sequence
  Description of Artificial Sequence: Synthetic primer
gtgcagcccagctacaacaata

SEQ ID NO: 15258 - DNA, 21 bp, Artificial Sequence
  Description of Artificial Sequence: Synthetic primer
cacccaaggttggtttttcgc

SEQ ID NO: 15259 - DNA, 21 bp, Artificial Sequence
  Description of Artificial Sequence: Synthetic primer
gacgtcctgccaagttctctg

SEQ ID NO: 15260 - DNA, 21 bp, Artificial Sequence
  Description of Artificial Sequence: Synthetic primer
cctgtccatgggtttgacgat

SEQ ID NO: 15261 - DNA, 22 bp, Artificial Sequence
  Description of Artificial Sequence: Synthetic primer
gtgcaattattctggccacagg

SEQ ID NO: 15262 - DNA, 21 bp, Artificial Sequence
  Description of Artificial Sequence: Synthetic primer
gcagcaatgtgcaccatcttt

SEQ ID NO: 15263 - DNA, 22 bp, Artificial Sequence
  Description of Artificial Sequence: Synthetic primer
ggtgcagtctacgagttctgac

SEQ ID NO: 15264 - DNA, 24 bp, Artificial Sequence
  Description of Artificial Sequence: Synthetic primer
gtcagggtcatatcttgtcctggt

SEQ ID NO: 15265 - DNA, 27 bp, Artificial Sequence
  Description of Artificial Sequence: Synthetic primer
cgcattgatttaaccatacaacacaac

SEQ ID NO: 15266 - DNA, 26 bp, Artificial Sequence
  Description of Artificial Sequence: Synthetic primer
ccacatagcaaattagcaccacaatg

SEQ ID NO: 15267 - DNA, 20 bp, Artificial Sequence
  Description of Artificial Sequence: Synthetic primer
agtagttcgtcggcaggtac

SEQ ID NO: 15268 - DNA, 21 bp, Artificial Sequence
  Description of Artificial Sequence: Synthetic primer
tgatgatgaaaccaccgggtt

SEQ ID NO: 15269 - DNA, 21 bp, Artificial Sequence
  Description of Artificial Sequence: Synthetic primer
aagctcgccagtgatttggta

SEQ ID NO: 15270 - DNA, 27 bp, Artificial Sequence
  Description of Artificial Sequence: Synthetic primer
gtgcagatacataagtgagcacttaca

SEQ ID NO: 15271 - DNA, 21 bp, Artificial Sequence
  Description of Artificial Sequence: Synthetic primer
ccctcctcgtccatggaacta

SEQ ID NO: 15272 - DNA, 23 bp, Artificial Sequence
  Description of Artificial Sequence: Synthetic primer
cctaggtcacagtgctactgaac

SEQ ID NO: 15273 - DNA, 27 bp, Artificial Sequence
  Description of Artificial Sequence: Synthetic primer
tcagcaactagtacatgatgactgaat

SEQ ID NO: 15274 - DNA, 23 bp, Artificial Sequence
  Description of Artificial Sequence: Synthetic primer
ctgcaagggatcaaggatcaaag

SEQ ID NO: 15275 - DNA, 24 bp, Artificial Sequence
  Description of Artificial Sequence: Synthetic primer
cgctaatctgataggtggtttcca

SEQ ID NO: 15276 - DNA, 25 bp, Artificial Sequence
  Description of Artificial Sequence: Synthetic primer
gagctgaaagttgggtctagagaaa

SEQ ID NO: 15277 - DNA, 22 bp, Artificial Sequence
  Description of Artificial Sequence: Synthetic primer
aggtccaaccagctattcaagc

SEQ ID NO: 15278 - DNA, 21 bp, Artificial Sequence
  Description of Artificial Sequence: Synthetic primer
gcgtcttctcccgtctaagaa

SEQ ID NO: 15279 - DNA, 21 bp, Artificial Sequence
  Description of Artificial Sequence: Synthetic primer
gcaggagcaggttggattctc

SEQ ID NO: 15280 - DNA, 23 bp, Artificial Sequence
  Description of Artificial Sequence: Synthetic primer
tcccgcaagactaaaaatccaca

SEQ ID NO: 15281 - DNA, 22 bp, Artificial Sequence
  Description of Artificial Sequence: Synthetic primer
ggaaatgggacgttgtagctga

SEQ ID NO: 15282 - DNA, 28 bp, Artificial Sequence
  Description of Artificial Sequence: Synthetic primer
acaaagaaagctcaggaatttaattggc

SEQ ID NO: 15283 - DNA, 22 bp, Artificial Sequence
  Description of Artificial Sequence: Synthetic primer
tgcaattctacggaccaaagca

SEQ ID NO: 15284 - DNA, 22 bp, Artificial Sequence
  Description of Artificial Sequence: Synthetic primer
cctctaccaccatctgctttgg

SEQ ID NO: 15285 - DNA, 26 bp, Artificial Sequence
  Description of Artificial Sequence: Synthetic primer
tctccaacttgcagttctcaaaatga

SEQ ID NO: 15286 - DNA, 25 bp, Artificial Sequence
  Description of Artificial Sequence: Synthetic primer
agaacaatgggcaaaacatcaaagg

SEQ ID NO: 15287 - DNA, 24 bp, Artificial Sequence
  Description of Artificial Sequence: Synthetic primer
gcaaggtttgagaattcagaccca

SEQ ID NO: 15288 - DNA, 25 bp, Artificial Sequence
  Description of Artificial Sequence: Synthetic primer
ccgaaatactgacaaactaccagca

SEQ ID NO: 15289 - DNA, 23 bp, Artificial Sequence
  Description of Artificial Sequence: Synthetic primer
cgaatgcccaagagatacacaga

SEQ ID NO: 15290 - DNA, 28 bp, Artificial Sequence
  Description of Artificial Sequence: Synthetic primer
tcatcaacttgtagaagctaattgtgtg

SEQ ID NO: 15291 - DNA, 24 bp, Artificial Sequence
  Description of Artificial Sequence: Synthetic primer
gatccataagcaagccaaaaccaa

SEQ ID NO: 15292 - DNA, 21 bp, Artificial Sequence
  Description of Artificial Sequence: Synthetic primer
ggaagtttcatcacggcgaag

SEQ ID NO: 15293 - DNA, 28 bp, Artificial Sequence
  Description of Artificial Sequence: Synthetic primer
ctttgagcgatagaatatgcttgttcac

SEQ ID NO: 15294 - DNA, 21 bp, Artificial Sequence
  Description of Artificial Sequence: Synthetic primer
ctggacaacctcatccctgtt

SEQ ID NO: 15295 - DNA, 28 bp, Artificial Sequence
  Description of Artificial Sequence: Synthetic primer
tgtttattgacaggatatttgtggaggt

SEQ ID NO: 15296 - DNA, 26 bp, Artificial Sequence
  Description of Artificial Sequence: Synthetic primer
gttctaggtgcagaaagggataaagc

SEQ ID NO: 15297 - DNA, 21 bp, Artificial Sequence
  Description of Artificial Sequence: Synthetic primer
cgtgcgtcatatcctctggat

SEQ ID NO: 15298 - DNA, 26 bp, Artificial Sequence
  Description of Artificial Sequence: Synthetic primer
agctccaaacctctctagtttttacg

SEQ ID NO: 15299 - DNA, 21 bp, Artificial Sequence
  Description of Artificial Sequence: Synthetic primer
tctactgtcacccaggcagag

SEQ ID NO: 15300 - DNA, 23 bp, Artificial Sequence
  Description of Artificial Sequence: Synthetic primer
agtgcaggtaaggaaagagctag

SEQ ID NO: 15301 - DNA, 23 bp, Artificial Sequence
  Description of Artificial Sequence: Synthetic primer
ttgaacacaagatcagggtcagt

SEQ ID NO: 15302 - DNA, 25 bp, Artificial Sequence
  Description of Artificial Sequence: Synthetic primer
tcagcacatgaattgttcaacatcg

SEQ ID NO: 15303 - DNA, 28 bp, Artificial Sequence
  Description of Artificial Sequence: Synthetic primer
accagcactaatcatatagcagctaatt

SEQ ID NO: 15304 - DNA, 28 bp, Artificial Sequence
  Description of Artificial Sequence: Synthetic primer
caaatcagctctctatcgtctcttacat

SEQ ID NO: 15305 - DNA, 25 bp, Artificial Sequence
  Description of Artificial Sequence: Synthetic primer
gtcagtaccacaagacaaaaatggc

SEQ ID NO: 15306 - DNA, 23 bp, Artificial Sequence
  Description of Artificial Sequence: Synthetic primer
tgccccagattgttcacaacata

SEQ ID NO: 15307 - DNA, 25 bp, Artificial Sequence
  Description of Artificial Sequence: Synthetic primer
cctggtttggtaccttagtagcaat

SEQ ID NO: 15308 - DNA, 22 bp, Artificial Sequence
  Description of Artificial Sequence: Synthetic primer
cattctttctgccggagcttac

SEQ ID NO: 15309 - DNA, 26 bp, Artificial Sequence
  Description of Artificial Sequence: Synthetic primer
agtgttattatattgctcaggaccgt

SEQ ID NO: 15310 - DNA, 26 bp, Artificial Sequence
  Description of Artificial Sequence: Synthetic primer
ggagtgctagaatctgatatgccttt

SEQ ID NO: 15311 - DNA, 25 bp, Artificial Sequence
  Description of Artificial Sequence: Synthetic primer
aaggtccttcaagtctgactctttc

SEQ ID NO: 15312 - DNA, 21 bp, Artificial Sequence
  Description of Artificial Sequence: Synthetic primer
caaagtactcggcggtcatct

SEQ ID NO: 15313 - DNA, 27 bp, Artificial Sequence
  Description of Artificial Sequence: Synthetic primer
gggcatttcttccaatccaagtaaaaa

SEQ ID NO: 15314 - DNA, 28 bp, Artificial Sequence
  Description of Artificial Sequence: Synthetic primer
tgagatgcttttgagaaatacagagaga

SEQ ID NO: 15315 - DNA, 27 bp, Artificial Sequence
  Description of Artificial Sequence: Synthetic primer
tctagaatgtatgcaacagaaaggtga

SEQ ID NO: 15316 - DNA, 22 bp, Artificial Sequence
  Description of Artificial Sequence: Synthetic primer
atgtacctgggaattcccctca

SEQ ID NO: 15317 - DNA, 22 bp, Artificial Sequence
  Description of Artificial Sequence: Synthetic primer
cagcttcccagagaaatcccat

SEQ ID NO: 15318 - DNA, 25 bp, Artificial Sequence
  Description of Artificial Sequence: Synthetic primer
ggatgcacatgttggcttgagtata

SEQ ID NO: 15319 - DNA, 19 bp, Artificial Sequence
  Description of Artificial Sequence: Synthetic primer
ggagttcccggacctcaag

SEQ ID NO: 15320 - DNA, 24 bp, Artificial Sequence
  Description of Artificial Sequence: Synthetic primer
actagacatgtctgactcggaaga

SEQ ID NO: 15321 - DNA, 21 bp, Artificial Sequence
  Description of Artificial Sequence: Synthetic primer
cagtgcagatcacccatgctt

SEQ ID NO: 15322 - DNA, 23 bp, Artificial Sequence
  Description of Artificial Sequence: Synthetic primer
agcacacgtacaagaataatgcg

SEQ ID NO: 15323 - DNA, 21 bp, Artificial Sequence
  Description of Artificial Sequence: Synthetic primer
ggtggaaccctatcttgcctt

SEQ ID NO: 15324 - DNA, 19 bp, Artificial Sequence
  Description of Artificial Sequence: Synthetic primer
gacagcgaggtcccttgtg

SEQ ID NO: 15325 - DNA, 27 bp, Artificial Sequence
  Description of Artificial Sequence: Synthetic primer
tttacttaggttttcctcttgtgttgc

SEQ ID NO: 15326 - DNA, 27 bp, Artificial Sequence
  Description of Artificial Sequence: Synthetic primer
atcttaaaacagtagccgtctatagcc

SEQ ID NO: 15327 - DNA, 22 bp, Artificial Sequence
  Description of Artificial Sequence: Synthetic primer
agcccgcttaaattaggcagat

SEQ ID NO: 15328 - DNA, 22 bp, Artificial Sequence
  Description of Artificial Sequence: Synthetic primer
caactttcaggcctgtggaaag

SEQ ID NO: 15329 - DNA, 27 bp, Artificial Sequence
  Description of Artificial Sequence: Synthetic primer
actgtattattccaaaaggatgtcgca

SEQ ID NO: 15330 - DNA, 21 bp, Artificial Sequence
  Description of Artificial Sequence: Synthetic primer
cttgcttctccaggtcatcca

SEQ ID NO: 15331 - DNA, 28 bp, Artificial Sequence
  Description of Artificial Sequence: Synthetic primer
agattgcctatactagttaatggctcag

SEQ ID NO: 15332 - DNA, 21 bp, Artificial Sequence
  Description of Artificial Sequence: Synthetic primer
ccaactgaggctaagcttggg

SEQ ID NO: 15333 - DNA, 21 bp, Artificial Sequence
  Description of Artificial Sequence: Synthetic primer
cgtacaaacgcaacgagcttc

SEQ ID NO: 15334 - DNA, 22 bp, Artificial Sequence
  Description of Artificial Sequence: Synthetic primer
gtgctgcaccccaaatagaaaa

SEQ ID NO: 15335 - DNA, 28 bp, Artificial Sequence
  Description of Artificial Sequence: Synthetic primer
ctacaaaactgctgacttccataactcc

SEQ ID NO: 15336 - DNA, 28 bp, Artificial Sequence
  Description of Artificial Sequence: Synthetic primer
aaaaactacaggcataaaaggagagaga

SEQ ID NO: 15337 - DNA, 26 bp, Artificial Sequence
  Description of Artificial Sequence: Synthetic primer
tgctaccatgctgtgatactacattt

SEQ ID NO: 15338 - DNA, 28 bp, Artificial Sequence
  Description of Artificial Sequence: Synthetic primer
cttgagcagaggactactgaacatattt

SEQ ID NO: 15339 - DNA, 26 bp, Artificial Sequence
  Description of Artificial Sequence: Synthetic primer
gcatacgaacttctccatgaattcct

SEQ ID NO: 15340 - DNA, 24 bp, Artificial Sequence
  Description of Artificial Sequence: Synthetic primer
tccaacggtcacatatatttccca

SEQ ID NO: 15341 - DNA, 21 bp, Artificial Sequence
  Description of Artificial Sequence: Synthetic primer
atgagcagtgccaccactaag

SEQ ID NO: 15342 - DNA, 27 bp, Artificial Sequence
  Description of Artificial Sequence: Synthetic primer
agtatggacacacagagtaaattgcat

SEQ ID NO: 15343 - DNA, 21 bp, Artificial Sequence
  Description of Artificial Sequence: Synthetic primer
gattcaacagacaccgggtca

SEQ ID NO: 15344 - DNA, 19 bp, Artificial Sequence
  Description of Artificial Sequence: Synthetic primer
gcgtactgccagctttgac

SEQ ID NO: 15345 - DNA, 23 bp, Artificial Sequence
  Description of Artificial Sequence: Synthetic primer
gtgaaagtgagttgccatgcaag

SEQ ID NO: 15346 - DNA, 21 bp, Artificial Sequence
  Description of Artificial Sequence: Synthetic primer
tacgcagtaacgccacatctg

SEQ ID NO: 15347 - DNA, 21 bp, Artificial Sequence
  Description of Artificial Sequence: Synthetic primer
cttccatctgcggttccttca

SEQ ID NO: 15348 - DNA, 21 bp, Artificial Sequence
  Description of Artificial Sequence: Synthetic primer
cctaaacaaacgctgcacgtc

SEQ ID NO: 15349 - DNA, 26 bp, Artificial Sequence
  Description of Artificial Sequence: Synthetic primer
aatccttcttcatcaacgttggagac

SEQ ID NO: 15350 - DNA, 25 bp, Artificial Sequence
  Description of Artificial Sequence: Synthetic primer
tggctctgtccacatcatagaaaaa

SEQ ID NO: 15351 - DNA, 21 bp, Artificial Sequence
  Description of Artificial Sequence: Synthetic primer
gcatgctaaggcgtagtggtt

SEQ ID NO: 15352 - DNA, 28 bp, Artificial Sequence
  Description of Artificial Sequence: Synthetic primer
acctagaagctatctcaagttgatctcg

SEQ ID NO: 15353 - DNA, 28 bp, Artificial Sequence
  Description of Artificial Sequence: Synthetic primer
acatgtactctagttacttcctttgcat

SEQ ID NO: 15354 - DNA, 28 bp, Artificial Sequence
  Description of Artificial Sequence: Synthetic primer
gtaatagtttcaggcagttcagacaaac

SEQ ID NO: 15355 - DNA, 25 bp, Artificial Sequence
  Description of Artificial Sequence: Synthetic primer
ccaccacgaagtagtagtagtaggg

SEQ ID NO: 15356 - DNA, 27 bp, Artificial Sequence
  Description of Artificial Sequence: Synthetic primer
agacagatggacaaaagcaactaatca

SEQ ID NO: 15357 - DNA, 21 bp, Artificial Sequence
  Description of Artificial Sequence: Synthetic primer
ctcggactgcgttttcctctt

SEQ ID NO: 15358 - DNA, 28 bp, Artificial Sequence
  Description of Artificial Sequence: Synthetic primer
aatgctatcctaaatgattatggctgct

SEQ ID NO: 15359 - DNA, 21 bp, Artificial Sequence
  Description of Artificial Sequence: Synthetic primer
agtgcaggaagagcattgctt

SEQ ID NO: 15360 - DNA, 27 bp, Artificial Sequence
  Description of Artificial Sequence: Synthetic primer
ctcttctgagagatcaaaaacctgtga

SEQ ID NO: 15361 - DNA, 22 bp, Artificial Sequence
  Description of Artificial Sequence: Synthetic primer
agcggtaagtcgttgctacttt

SEQ ID NO: 15362 - DNA, 28 bp, Artificial Sequence
  Description of Artificial Sequence: Synthetic primer
tgttccattgttcactattaaactcacg

SEQ ID NO: 15363 - DNA, 22 bp, Artificial Sequence
  Description of Artificial Sequence: Synthetic primer
tttaacatgaagcacgcagagg

SEQ ID NO: 15364 - DNA, 26 bp, Artificial Sequence
  Description of Artificial Sequence: Synthetic primer
aatatccaactaagtgagcatgcaac

SEQ ID NO: 15365 - DNA, 24 bp, Artificial Sequence
  Description of Artificial Sequence: Synthetic primer
catgcagacacgatttgatgtctt

SEQ ID NO: 15366 - DNA, 28 bp, Artificial Sequence
  Description of Artificial Sequence: Synthetic primer
agatgttttctgggttagaatgatttgc

SEQ ID NO: 15367 - DNA, 21 bp, Artificial Sequence
  Description of Artificial Sequence: Synthetic primer
gaagagaggcgctgctctatg

SEQ ID NO: 15368 - DNA, 21 bp, Artificial Sequence
  Description of Artificial Sequence: Synthetic primer
actgtccggtttcttgtgtgg

SEQ ID NO: 15369 - DNA, 22 bp, Artificial Sequence
  Description of Artificial Sequence: Synthetic primer
cagagccaatttgcaggacttc

SEQ ID NO: 15370 - DNA, 21 bp, Artificial Sequence
  Description of Artificial Sequence: Synthetic primer
cgcagaacgtcgggatatctc

SEQ ID NO: 15371 - DNA, 27 bp, Artificial Sequence
  Description of Artificial Sequence: Synthetic primer
agatttctcaaagaataccacgactgc

SEQ ID NO: 15372 - DNA, 27 bp, Artificial Sequence
  Description of Artificial Sequence: Synthetic primer
gccagtggtagatgggaattataagaa

SEQ ID NO: 15373 - DNA, 27 bp, Artificial Sequence
  Description of Artificial Sequence: Synthetic primer
ctcttatgtggtgtctaatcatgcagt

SEQ ID NO: 15374 - DNA, 26 bp, Artificial Sequence
  Description of Artificial Sequence: Synthetic primer
gagatagctgccaaggaaagaaaaac

SEQ ID NO: 15375 - DNA, 28 bp, Artificial Sequence
  Description of Artificial Sequence: Synthetic primer
agttagggtaattttcacggcaatatca

SEQ ID NO: 15376 - DNA, 26 bp, Artificial Sequence
  Description of Artificial Sequence: Synthetic primer
gcaacttcaagttcggttgggtaata

SEQ ID NO: 15377 - DNA, 21 bp, Artificial Sequence
  Description of Artificial Sequence: Synthetic primer
atccagtgcagccatgaaatg

SEQ ID NO: 15378 - DNA, 24 bp, Artificial Sequence
  Description of Artificial Sequence: Synthetic primer
tgttttcattgccatctacacgga

SEQ ID NO: 15379 - DNA, 21 bp, Artificial Sequence
  Description of Artificial Sequence: Synthetic primer
ccctcttagggaacacctcct

SEQ ID NO: 15380 - DNA, 26 bp, Artificial Sequence
  Description of Artificial Sequence: Synthetic primer
ataaagactgacgaaacagcaaactg

SEQ ID NO: 15381 - DNA, 28 bp, Artificial Sequence
  Description of Artificial Sequence: Synthetic primer
aaaataaggtacttacggcacaaaaact

SEQ ID NO: 15382 - DNA, 28 bp, Artificial Sequence
  Description of Artificial Sequence: Synthetic primer
tctctttgctaatcagtctgacaaacag

SEQ ID NO: 15383 - DNA, 28 bp, Artificial Sequence
  Description of Artificial Sequence: Synthetic primer
gtgaaatactgtattgcaacatgtcagt

SEQ ID NO: 15384 - DNA, 25 bp, Artificial Sequence
  Description of Artificial Sequence: Synthetic primer
tcagaggtacaaacgtacagctcta

SEQ ID NO: 15385 - DNA, 26 bp, Artificial Sequence
  Description of Artificial Sequence: Synthetic primer
acctccaacaaacattagaagtgtga

SEQ ID NO: 15386 - DNA, 28 bp, Artificial Sequence
  Description of Artificial Sequence: Synthetic primer
gactctttcagccttgtcaaaaggtata

SEQ ID NO: 15387 - DNA, 21 bp, Artificial Sequence
  Description of Artificial Sequence: Synthetic primer
ggcaagacggctattggtagt

SEQ ID NO: 15388 - DNA, 21 bp, Artificial Sequence
  Description of Artificial Sequence: Synthetic primer
ttacaaaaccctggcccactt

SEQ ID NO: 15389 - DNA, 23 bp, Artificial Sequence
  Description of Artificial Sequence: Synthetic primer
ctcacaggactagctagcctgta

SEQ ID NO: 15390 - DNA, 29 bp, Artificial Sequence
  Description of Artificial Sequence: Synthetic primer
agcagcacatactgtataatcatttgcta

SEQ ID NO: 15391 - DNA, 28 bp, Artificial Sequence
  Description of Artificial Sequence: Synthetic primer
gactgattaccattgtttaagcttgagg

SEQ ID NO: 15392 - DNA, 25 bp, Artificial Sequence
  Description of Artificial Sequence: Synthetic primer
caacacctgaatctgatgggaatga

SEQ ID NO: 15393 - DNA, 25 bp, Artificial Sequence
  Description of Artificial Sequence: Synthetic primer
caggatgaccagtgtagccaaaata

SEQ ID NO: 15394 - DNA, 24 bp, Artificial Sequence
  Description of Artificial Sequence: Synthetic primer
cagtgcaggtacttttccaggtaa

SEQ ID NO: 15395 - DNA, 23 bp, Artificial Sequence
  Description of Artificial Sequence: Synthetic primer
atccattcttggtgtggtgacaa

SEQ ID NO: 15396 - DNA, 23 bp, Artificial Sequence
  Description of Artificial Sequence: Synthetic primer
aatgctggatgatcctttgcatg

SEQ ID NO: 15397 - DNA, 23 bp, Artificial Sequence
  Description of Artificial Sequence: Synthetic primer
ttggtgtactttagcatgctgga

SEQ ID NO: 15398 - DNA, 28 bp, Artificial Sequence
  Description of Artificial Sequence: Synthetic primer
tctaaattgctatccatttgtcctaggc

SEQ ID NO: 15399 - DNA, 28 bp, Artificial Sequence
  Description of Artificial Sequence: Synthetic primer
ccaaaccaatccaacactaaagtttctt

SEQ ID NO: 15400 - DNA, 24 bp, Artificial Sequence
  Description of Artificial Sequence: Synthetic primer
taaacatactcccatgggacgtct

SEQ ID NO: 15401 - DNA, 24 bp, Artificial Sequence
  Description of Artificial Sequence: Synthetic primer
cctaaggatacgatgggatcatgc

SEQ ID NO: 15402 - DNA, 29 bp, Artificial Sequence
  Description of Artificial Sequence: Synthetic primer
aagcagataagttcacaatagcaaatgtt

SEQ ID NO: 15403 - DNA, 21 bp, Artificial Sequence
  Description of Artificial Sequence: Synthetic primer
aaaaatccgggaggcactcaa

SEQ ID NO: 15404 - DNA, 27 bp, Artificial Sequence
  Description of Artificial Sequence: Synthetic primer
aagaagctcctatggttcatacgatca

SEQ ID NO: 15405 - DNA, 24 bp, Artificial Sequence
  Description of Artificial Sequence: Synthetic primer
gcgcacatataattccctaagggt

SEQ ID NO: 15406 - DNA, 22 bp, Artificial Sequence
  Description of Artificial Sequence: Synthetic primer
agcccttctcagagttgatgtg

SEQ ID NO: 15407 - DNA, 28 bp, Artificial Sequence
  Description of Artificial Sequence: Synthetic primer
cacactctttggagatacaccatacatt

SEQ ID NO: 15408 - DNA, 22 bp, Artificial Sequence
  Description of Artificial Sequence: Synthetic primer
gctttcaatctgcttcccagtc

SEQ ID NO: 15409 - DNA, 25 bp, Artificial Sequence
  Description of Artificial Sequence: Synthetic primer
gtacatatcctggagctagtagcca

SEQ ID NO: 15410 - DNA, 21 bp, Artificial Sequence
  Description of Artificial Sequence: Synthetic primer
ggagcaggtcctttgcttctt

SEQ ID NO: 15411 - DNA, 22 bp, Artificial Sequence
  Description of Artificial Sequence: Synthetic primer
cgcaatagatggtgtctgagca

SEQ ID NO: 15412 - DNA, 21 bp, Artificial Sequence
  Description of Artificial Sequence: Synthetic primer
agcttgtgactcaaacgctca

SEQ ID NO: 15413 - DNA, 21 bp, Artificial Sequence
  Description of Artificial Sequence: Synthetic primer
cgatcgtccaggacttcctct

SEQ ID NO: 15414 - DNA, 22 bp, Artificial Sequence
  Description of Artificial Sequence: Synthetic primer
gtctgacggaaaacttcgggtt

SEQ ID NO: 15415 - DNA, 25 bp, Artificial Sequence
  Description of Artificial Sequence: Synthetic primer
gggcttgaaacttgttcctcatact

SEQ ID NO: 15416 - DNA, 25 bp, Artificial Sequence
  Description of Artificial Sequence: Synthetic primer
gtcgtcgtctagactttactcatcg

SEQ ID NO: 15417 - DNA, 21 bp, Artificial Sequence
  Description of Artificial Sequence: Synthetic primer
agaatgagtcggctggcattc

SEQ ID NO: 15418 - DNA, 22 bp, Artificial Sequence
  Description of Artificial Sequence: Synthetic primer
agtgcaggactaaggacatacc

SEQ ID NO: 15419 - DNA, 21 bp, Artificial Sequence
  Description of Artificial Sequence: Synthetic primer
ggcggaggtggtatccttttt

SEQ ID NO: 15420 - DNA, 22 bp, Artificial Sequence
  Description of Artificial Sequence: Synthetic primer
tcgtccatctcctacttcgtca

SEQ ID NO: 15421 - DNA, 24 bp, Artificial Sequence
  Description of Artificial Sequence: Synthetic primer
atgcaaagacttcaattccagggt

SEQ ID NO: 15422 - DNA, 22 bp, Artificial Sequence
  Description of Artificial Sequence: Synthetic primer
ggtgagcaagcctgtgaatgta

SEQ ID NO: 15423 - DNA, 28 bp, Artificial Sequence
  Description of Artificial Sequence: Synthetic primer
ttctggagaatttcttgtccttttcatg

SEQ ID NO: 15424 - DNA, 28 bp, Artificial Sequence
  Description of Artificial Sequence: Synthetic primer
ttcaagctcgcattatagatgatacacg

SEQ ID NO: 15425 - DNA, 23 bp, Artificial Sequence
  Description of Artificial Sequence: Synthetic primer
cagtgcagaaagcagttatgagc

SEQ ID NO: 15426 - DNA, 28 bp, Artificial Sequence
  Description of Artificial Sequence: Synthetic primer
tatctgcctcttcatctcttaaatggtt

SEQ ID NO: 15427 - DNA, 21 bp, Artificial Sequence
  Description of Artificial Sequence: Synthetic primer
aacaaatcctgcgctatgtgc

SEQ ID NO: 15428 - DNA, 24 bp, Artificial Sequence
  Description of Artificial Sequence: Synthetic primer
gctacctactgtttgctacatcgt

SEQ ID NO: 15429 - DNA, 21 bp, Artificial Sequence
  Description of Artificial Sequence: Synthetic primer
tccatggcagctggagtagta

SEQ ID NO: 15430 - DNA, 22 bp, Artificial Sequence
  Description of Artificial Sequence: Synthetic primer
gccatggatcagagcttcttct

SEQ ID NO: 15431 - DNA, 28 bp, Artificial Sequence
  Description of Artificial Sequence: Synthetic primer
tctaacttagaatgtatggtgcaggtac

SEQ ID NO: 15432 - DNA, 26 bp, Artificial Sequence
  Description of Artificial Sequence: Synthetic primer
gcataagaaaccacaaaatctgcagt

SEQ ID NO: 15433 - DNA, 21 bp, Artificial Sequence
  Description of Artificial Sequence: Synthetic primer
agtgcagtgagctactgaagg

SEQ ID NO: 15434 - DNA, 22 bp, Artificial Sequence
  Description of Artificial Sequence: Synthetic primer
tgcagcacacagaggtatacac

SEQ ID NO: 15435 - DNA, 21 bp, Artificial Sequence
  Description of Artificial Sequence: Synthetic primer
gcaggagagaaaggtgtcgtc

SEQ ID NO: 15436 - DNA, 28 bp, Artificial Sequence
  Description of Artificial Sequence: Synthetic primer
actcctactgatgaaataatccatggca

SEQ ID NO: 15437 - DNA, 21 bp, Artificial Sequence
  Description of Artificial Sequence: Synthetic primer
atcagcttccctgtccacgta

SEQ ID NO: 15438 - DNA, 22 bp, Artificial Sequence
  Description of Artificial Sequence: Synthetic primer
agcggcattttgtgccttacta

SEQ ID NO: 15439 - DNA, 21 bp, Artificial Sequence
  Description of Artificial Sequence: Synthetic primer
cttcccacacaatccagcagt

SEQ ID NO: 15440 - DNA, 27 bp, Artificial Sequence
  Description of Artificial Sequence: Synthetic primer
aaataaaatcttggctgtcactcatgc

SEQ ID NO: 15441 - DNA, 22 bp, Artificial Sequence
  Description of Artificial Sequence: Synthetic primer
cagtgcaggatccaagaaaagg

SEQ ID NO: 15442 - DNA, 29 bp, Artificial Sequence
  Description of Artificial Sequence: Synthetic primer
tgatactgttgcaaacaaattcttgtagt

SEQ ID NO: 15443 - DNA, 26 bp, Artificial Sequence
  Description of Artificial Sequence: Synthetic primer
ttagaggactcactagagttgctctc

SEQ ID NO: 15444 - DNA, 20 bp, Artificial Sequence
  Description of Artificial Sequence: Synthetic primer
cagacaccagacgctcactg

SEQ ID NO: 15445 - DNA, 21 bp, Artificial Sequence
  Description of Artificial Sequence: Synthetic primer
gcgcaagttccgagttggata

SEQ ID NO: 15446 - DNA, 25 bp, Artificial Sequence
  Description of Artificial Sequence: Synthetic primer
tattctacactgttccaagggacca

SEQ ID NO: 15447 - DNA, 25 bp, Artificial Sequence
  Description of Artificial Sequence: Synthetic primer
gcaaacttacaaatgcgacgaacta

SEQ ID NO: 15448 - DNA, 21 bp, Artificial Sequence
  Description of Artificial Sequence: Synthetic primer
acagccaccaaagcctctatt

SEQ ID NO: 15449 - DNA, 27 bp, Artificial Sequence
  Description of Artificial Sequence: Synthetic primer
actgtgtatggtttcttgttatttgcc

SEQ ID NO: 15450 - DNA, 22 bp, Artificial Sequence
  Description of Artificial Sequence: Synthetic primer
aagacgtagaggaggctcgtaa

SEQ ID NO: 15451 - DNA, 21 bp, Artificial Sequence
  Description of Artificial Sequence: Synthetic primer
ccacagcttgctgatcttgtg

SEQ ID NO: 15452 - DNA, 21 bp, Artificial Sequence
  Description of Artificial Sequence: Synthetic primer
cagcagcatcatcagcctaga

SEQ ID NO: 15453 - DNA, 21 bp, Artificial Sequence
  Description of Artificial Sequence: Synthetic primer
tgcaggagtgctatgcatctc

SEQ ID NO: 15454 - DNA, 26 bp, Artificial Sequence
  Description of Artificial Sequence: Synthetic primer
attttgacctcttaattccccttccc

SEQ ID NO: 15455 - DNA, 22 bp, Artificial Sequence
  Description of Artificial Sequence: Synthetic primer
gggagctttgtaggaacatcca

SEQ ID NO: 15456 - DNA, 21 bp, Artificial Sequence
  Description of Artificial Sequence: Synthetic primer
ggtgtctggtttgtggacgaa

SEQ ID NO: 15457 - DNA, 27 bp, Artificial Sequence
  Description of Artificial Sequence: Synthetic primer
gccattgttataagagcgatacaaacg

SEQ ID NO: 15458 - DNA, 23 bp, Artificial Sequence
  Description of Artificial Sequence: Synthetic primer
cctccaaagtgagaagatccagt

SEQ ID NO: 15459 - DNA, 22 bp, Artificial Sequence
  Description of Artificial Sequence: Synthetic primer
accacgctttaattccacgtca

SEQ ID NO: 15460 - DNA, 27 bp, Artificial Sequence
  Description of Artificial Sequence: Synthetic primer
aaaaactaaacaagtacctgcagaagc

SEQ ID NO: 15461 - DNA, 28 bp, Artificial Sequence
  Description of Artificial Sequence: Synthetic primer
cgtacacgtaatttatcttcagcacttt

SEQ ID NO: 15462 - DNA, 21 bp, Artificial Sequence
  Description of Artificial Sequence: Synthetic primer
tttcttgcgcgctcgtaattt

SEQ ID NO: 15463 - DNA, 25 bp, Artificial Sequence
  Description of Artificial Sequence: Synthetic primer
gtttcagaatctttgagtggtccgt

SEQ ID NO: 15464 - DNA, 27 bp, Artificial Sequence
  Description of Artificial Sequence: Synthetic primer
cggaaatcatgtggagtagaaaggatt

SEQ ID NO: 15465 - DNA, 26 bp, Artificial Sequence
  Description of Artificial Sequence: Synthetic primer
atatgttaactgtggagtgctactgc

SEQ ID NO: 15466 - DNA, 21 bp, Artificial Sequence
  Description of Artificial Sequence: Synthetic primer
tccatgatgagtgcccagatg

SEQ ID NO: 15467 - DNA, 28 bp, Artificial Sequence
  Description of Artificial Sequence: Synthetic primer
tgttctaccaagctattttgcgaactaa

SEQ ID NO: 15468 - DNA, 21 bp, Artificial Sequence
  Description of Artificial Sequence: Synthetic primer
cctagactggccaacacgttt

SEQ ID NO: 15469 - DNA, 23 bp, Artificial Sequence
  Description of Artificial Sequence: Synthetic primer
cacgattttcacacgacatcaca

SEQ ID NO: 15470 - DNA, 21 bp, Artificial Sequence
  Description of Artificial Sequence: Synthetic primer
acgcctatgcagaacttcgtt

SEQ ID NO: 15471 - DNA, 21 bp, Artificial Sequence
  Description of Artificial Sequence: Synthetic primer
cagtagccgttagaccctctg

SEQ ID NO: 15472 - DNA, 24 bp, Artificial Sequence
  Description of Artificial Sequence: Synthetic primer
cgattgaatggcatttcttcaggt

SEQ ID NO: 15473 - DNA, 20 bp, Artificial Sequence
  Description of Artificial Sequence: Synthetic primer
gctgccctcttccatcttgt

SEQ ID NO: 15474 - DNA, 23 bp, Artificial Sequence
  Description of Artificial Sequence: Synthetic primer
gatggatcccagtgcagatttca

SEQ ID NO: 15475 - DNA, 21 bp, Artificial Sequence
  Description of Artificial Sequence: Synthetic primer
ccctcaatgctcgtcacactt

SEQ ID NO: 15476 - DNA, 24 bp, Artificial Sequence
  Description of Artificial Sequence: Synthetic primer
atggtgcagtgcgttaaatccata

SEQ ID NO: 15477 - DNA, 21 bp, Artificial Sequence
  Description of Artificial Sequence: Synthetic primer
gacctccgatctccccaaaaa

SEQ ID NO: 15478 - DNA, 21 bp, Artificial Sequence
  Description of Artificial Sequence: Synthetic primer
tcagcagctgaatggtgatgt

SEQ ID NO: 15479 - DNA, 25 bp, Artificial Sequence
  Description of Artificial Sequence: Synthetic primer
acacaaagcacaactgcaattatct

SEQ ID NO: 15480 - DNA, 26 bp, Artificial Sequence
  Description of Artificial Sequence: Synthetic primer
tgtgaggattgtgtctctgaatggta

SEQ ID NO: 15481 - DNA, 23 bp, Artificial Sequence
  Description of Artificial Sequence: Synthetic primer
gcaacttggtggaggcttttaat

SEQ ID NO: 15482 - DNA, 28 bp, Artificial Sequence
  Description of Artificial Sequence: Synthetic primer
ttctataggttgttgtcatgacacatgc

SEQ ID NO: 15483 - DNA, 21 bp, Artificial Sequence
  Description of Artificial Sequence: Synthetic primer
aagaagaccacaagctctgct

SEQ ID NO: 15484 - DNA, 22 bp, Artificial Sequence
  Description of Artificial Sequence: Synthetic primer
tacgtccaatgtcccttgccta

SEQ ID NO: 15485 - DNA, 27 bp, Artificial Sequence
  Description of Artificial Sequence: Synthetic primer
atactgtctatagcaaacttccacgtc

SEQ ID NO: 15486 - DNA, 21 bp, Artificial Sequence
  Description of Artificial Sequence: Synthetic primer
cttggcttaactgggcatgag

SEQ ID NO: 15487 - DNA, 21 bp, Artificial Sequence
  Description of Artificial Sequence: Synthetic primer
caagctgggtggaggtacaaa

SEQ ID NO: 15488 - DNA, 21 bp, Artificial Sequence
  Description of Artificial Sequence: Synthetic primer
gagggatctgccagaccctaa

SEQ ID NO: 15489 - DNA, 21 bp, Artificial Sequence
  Description of Artificial Sequence: Synthetic primer
gaaggccgccaaataggtgaa

SEQ ID NO: 15490 - DNA, 24 bp, Artificial Sequence
  Description of Artificial Sequence: Synthetic primer
acttgatgtacattcgctgtgaga

SEQ ID NO: 15491 - DNA, 21 bp, Artificial Sequence
  Description of Artificial Sequence: Synthetic primer
ggagctcttgatgaccccttc

SEQ ID NO: 15492 - DNA, 25 bp, Artificial Sequence
  Description of Artificial Sequence: Synthetic primer
atggtccagtgcagtataatctagc

SEQ ID NO: 15493 - DNA, 21 bp, Artificial Sequence
  Description of Artificial Sequence: Synthetic primer
gttgccgtttccatcaagtcg

SEQ ID NO: 15494 - DNA, 28 bp, Artificial Sequence
  Description of Artificial Sequence: Synthetic primer
accaatagatggcaatgcaaacttaaga

SEQ ID NO: 15495 - DNA, 19 bp, Artificial Sequence
  Description of Artificial Sequence: Synthetic primer
catggcgcggtctgattct

SEQ ID NO: 15496 - DNA, 28 bp, Artificial Sequence
  Description of Artificial Sequence: Synthetic primer
ctgtaggcagtcaaaggaaaaactagta

SEQ ID NO: 15497 - DNA, 21 bp, Artificial Sequence
  Description of Artificial Sequence: Synthetic primer
gtctgtgcagctgatccatga

SEQ ID NO: 15498 - DNA, 21 bp, Artificial Sequence
  Description of Artificial Sequence: Synthetic primer
ggcattgcagctgcttttcat

SEQ ID NO: 15499 - DNA, 28 bp, Artificial Sequence
  Description of Artificial Sequence: Synthetic primer
agccgattctcttctcaaatttatcagt

SEQ ID NO: 15500 - DNA, 26 bp, Artificial Sequence
  Description of Artificial Sequence: Synthetic primer
acttgtttatgacaaccacgaaaagg

SEQ ID NO: 15501 - DNA, 21 bp, Artificial Sequence
  Description of Artificial Sequence: Synthetic primer
gatctgctcatctgcactgga

SEQ ID NO: 15502 - DNA, 23 bp, Artificial Sequence
  Description of Artificial Sequence: Synthetic primer
tcttctgttgagagtgttgctgt

SEQ ID NO: 15503 - DNA, 22 bp, Artificial Sequence
  Description of Artificial Sequence: Synthetic primer
gcactcgccagcatgtattact

SEQ ID NO: 15504 - DNA, 25 bp, Artificial Sequence
  Description of Artificial Sequence: Synthetic primer
atgcaaagatcctgtccaaagtcaa

SEQ ID NO: 15505 - DNA, 22 bp, Artificial Sequence
  Description of Artificial Sequence: Synthetic primer
gcatccacgctgatagagagag

SEQ ID NO: 15506 - DNA, 27 bp, Artificial Sequence
  Description of Artificial Sequence: Synthetic primer
actttaaacgtcgttagcaaacaatga

SEQ ID NO: 15507 - DNA, 21 bp, Artificial Sequence
  Description of Artificial Sequence: Synthetic primer
gatggatcccagtgcagaacc

SEQ ID NO: 15508 - DNA, 28 bp, Artificial Sequence
  Description of Artificial Sequence: Synthetic primer
atgtgagtacacaaagaactagttttgc

SEQ ID NO: 15509 - DNA, 21 bp, Artificial Sequence
  Description of Artificial Sequence: Synthetic primer
gggattcacttctgtcccctt

SEQ ID NO: 15510 - DNA, 28 bp, Artificial Sequence
  Description of Artificial Sequence: Synthetic primer
ttgaatatcggcatcaccttttaatgct

SEQ ID NO: 15511 - DNA, 27 bp, Artificial Sequence
  Description of Artificial Sequence: Synthetic primer
agccacgacagaccataaaataaaaac

SEQ ID NO: 15512 - DNA, 28 bp, Artificial Sequence
  Description of Artificial Sequence: Synthetic primer
tcaaaatgatgttaagtgcagatgcatg

SEQ ID NO: 15513 - DNA, 28 bp, Artificial Sequence
  Description of Artificial Sequence: Synthetic primer
atgtgtcacattaagcttgatgatctcc

SEQ ID NO: 15514 - DNA, 23 bp, Artificial Sequence
  Description of Artificial Sequence: Synthetic primer
ggatcgctaggtcagggctatta

SEQ ID NO: 15515 - DNA, 21 bp, Artificial Sequence
  Description of Artificial Sequence: Synthetic primer
aggatgaaccggatttgcaag

SEQ ID NO: 15516 - DNA, 22 bp, Artificial Sequence
  Description of Artificial Sequence: Synthetic primer
ggcggttccatcttcagatttg

SEQ ID NO: 15517 - DNA, 23 bp, Artificial Sequence
  Description of Artificial Sequence: Synthetic primer
ccaacatgttcttggtcagtacg

SEQ ID NO: 15518 - DNA, 28 bp, Artificial Sequence
  Description of Artificial Sequence: Synthetic primer
acatgtatttcagcccagtaaattcaag

SEQ ID NO: 15519 - DNA, 25 bp, Artificial Sequence
  Description of Artificial Sequence: Synthetic primer
gatggatctagtgcagaccaaatct

SEQ ID NO: 15520 - DNA, 28 bp, Artificial Sequence
  Description of Artificial Sequence: Synthetic primer
tgtcccaatctgaataattgatcccaaa

SEQ ID NO: 15521 - DNA, 28 bp, Artificial Sequence
  Description of Artificial Sequence: Synthetic primer
ttttcatgatagcaccattacttgcttt

SEQ ID NO: 15522 - DNA, 25 bp, Artificial Sequence
  Description of Artificial Sequence: Synthetic primer
aaacgaaacgggatgtgatgacata

SEQ ID NO: 15523 - DNA, 28 bp, Artificial Sequence
  Description of Artificial Sequence: Synthetic primer
accaaagcaaaaatagaaataggtggct

SEQ ID NO: 15524 - DNA, 27 bp, Artificial Sequence
  Description of Artificial Sequence: Synthetic primer
gatttgttaggaaagaataacggcctt

SEQ ID NO: 15525 - DNA, 25 bp, Artificial Sequence
  Description of Artificial Sequence: Synthetic primer
ctccatgtccagacacttcaaattg

SEQ ID NO: 15526 - DNA, 27 bp, Artificial Sequence
  Description of Artificial Sequence: Synthetic primer
agcatccatattggcctataaaagagg

SEQ ID NO: 15527 - DNA, 21 bp, Artificial Sequence
  Description of Artificial Sequence: Synthetic primer
ggagtccagtgcagcaagtaa

SEQ ID NO: 15528 - DNA, 21 bp, Artificial Sequence
  Description of Artificial Sequence: Synthetic primer
ggatccagtgcagaacagagt

SEQ ID NO: 15529 - DNA, 26 bp, Artificial Sequence
  Description of Artificial Sequence: Synthetic primer
agtactgtagtactgaaagcgtgtct

SEQ ID NO: 15530 - DNA, 21 bp, Artificial Sequence
  Description of Artificial Sequence: Synthetic primer
ctgttagattgggccccacat

SEQ ID NO: 15531 - DNA, 20 bp, Artificial Sequence
  Description of Artificial Sequence: Synthetic primer
ctcacgccgtccgatcttag

SEQ ID NO: 15532 - DNA, 21 bp, Artificial Sequence
  Description of Artificial Sequence: Synthetic primer
atttccggccaaggctacaat

SEQ ID NO: 15533 - DNA, 25 bp, Artificial Sequence
  Description of Artificial Sequence: Synthetic primer
aaaacatttcgggattatcccctca

SEQ ID NO: 15534 - DNA, 21 bp, Artificial Sequence
  Description of Artificial Sequence: Synthetic primer
ccacgttcaggttgtccttct

SEQ ID NO: 15535 - DNA, 28 bp, Artificial Sequence
  Description of Artificial Sequence: Synthetic primer
tgtgttatggtttacaaaggagtgaatg

SEQ ID NO: 15536 - DNA, 21 bp, Artificial Sequence
  Description of Artificial Sequence: Synthetic primer
atgaaacttgttcccgctgct

SEQ ID NO: 15537 - DNA, 23 bp, Artificial Sequence
  Description of Artificial Sequence: Synthetic primer
ggacgaagactagcacagaactg

SEQ ID NO: 15538 - DNA, 25 bp, Artificial Sequence
  Description of Artificial Sequence: Synthetic primer
agtcttgaacctgctgttaatgagg

SEQ ID NO: 15539 - DNA, 28 bp, Artificial Sequence
  Description of Artificial Sequence: Synthetic primer
acttattttgtgaatctcagatccgact

SEQ ID NO: 15540 - DNA, 23 bp, Artificial Sequence
  Description of Artificial Sequence: Synthetic primer
ccatgtcgtgggtactgtacaaa

SEQ ID NO: 15541 - DNA, 25 bp, Artificial Sequence
  Description of Artificial Sequence: Synthetic primer
cccagagtgaagaatcttggttttc

SEQ ID NO: 15542 - DNA, 27 bp, Artificial Sequence
  Description of Artificial Sequence: Synthetic primer
aagtagcactgcataaatcgtcatttc

SEQ ID NO: 15543 - DNA, 25 bp, Artificial Sequence
  Description of Artificial Sequence: Synthetic primer
gggatagccatgagctgatgatatt

SEQ ID NO: 15544 - DNA, 26 bp, Artificial Sequence
  Description of Artificial Sequence: Synthetic primer
agcacacagaccaagtatatatggag

SEQ ID NO: 15545 - DNA, 28 bp, Artificial Sequence
  Description of Artificial Sequence: Synthetic primer
acgatttctgcaacagctatagtttttc

SEQ ID NO: 15546 - DNA, 22 bp, Artificial Sequence
  Description of Artificial Sequence: Synthetic primer
cggtgatgctgttttccaagaa

SEQ ID NO: 15547 - DNA, 27 bp, Artificial Sequence
  Description of Artificial Sequence: Synthetic primer
atttcttggtatcagaactcacaacca

SEQ ID NO: 15548 - DNA, 21 bp, Artificial Sequence
  Description of Artificial Sequence: Synthetic primer
gtcaacggcaaacccttgtag

SEQ ID NO: 15549 - DNA, 19 bp, Artificial Sequence
  Description of Artificial Sequence: Synthetic primer
cagtgcagcgacgaagttg

SEQ ID NO: 15550 - DNA, 27 bp, Artificial Sequence
  Description of Artificial Sequence: Synthetic primer
ttgccttctcgttaagacatttcttag

SEQ ID NO: 15551 - DNA, 21 bp, Artificial Sequence
  Description of Artificial Sequence: Synthetic primer
gcgtctgttcccttcatcctg

SEQ ID NO: 15552 - DNA, 23 bp, Artificial Sequence
  Description of Artificial Sequence: Synthetic primer
cagggatagctcttacctgggtt

SEQ ID NO: 15553 - DNA, 23 bp, Artificial Sequence
  Description of Artificial Sequence: Synthetic primer
gtggaaccaaggctcaaagaaag

SEQ ID NO: 15554 - DNA, 24 bp, Artificial Sequence
  Description of Artificial Sequence: Synthetic primer
gcaagacaatctctctgctactga

SEQ ID NO: 15555 - DNA, 23 bp, Artificial Sequence
  Description of Artificial Sequence: Synthetic primer
gatggatcaagtgcaggctaaca

SEQ ID NO: 15556 - DNA, 28 bp, Artificial Sequence
  Description of Artificial Sequence: Synthetic primer
aatattacagtccagtccagagagaaag

SEQ ID NO: 15557 - DNA, 28 bp, Artificial Sequence
  Description of Artificial Sequence: Synthetic primer
gcgtcaaatagtgtggaaacaattgtta

SEQ ID NO: 15558 - DNA, 26 bp, Artificial Sequence
  Description of Artificial Sequence: Synthetic primer
aaggtttaatagttgtgccagcacat

SEQ ID NO: 15559 - DNA, 28 bp, Artificial Sequence
  Description of Artificial Sequence: Synthetic primer
ttccgagatacagaagatgaaaacatga

SEQ ID NO: 15560 - DNA, 27 bp, Artificial Sequence
  Description of Artificial Sequence: Synthetic primer
agtcctattcatttgtgcagttcaaga

SEQ ID NO: 15561 - DNA, 21 bp, Artificial Sequence
  Description of Artificial Sequence: Synthetic primer
gcagtcacagcgatgtgtttt

SEQ ID NO: 15562 - DNA, 26 bp, Artificial Sequence
  Description of Artificial Sequence: Synthetic primer
caccagctttggctgcatatataatc

SEQ ID NO: 15563 - DNA, 25 bp, Artificial Sequence
  Description of Artificial Sequence: Synthetic primer
gttgatcctgactgttttggtctct

SEQ ID NO: 15564 - DNA, 26 bp, Artificial Sequence
  Description of Artificial Sequence: Synthetic primer
agtagccatactacggagtacagttt

SEQ ID NO: 15565 - DNA, 21 bp, Artificial Sequence
  Description of Artificial Sequence: Synthetic primer
atggattcagtgcagtggagt

SEQ ID NO: 15566 - DNA, 22 bp, Artificial Sequence
  Description of Artificial Sequence: Synthetic primer
tggcatcccatgattcaactgt

SEQ ID NO: 15567 - DNA, 28 bp, Artificial Sequence
  Description of Artificial Sequence: Synthetic primer
tgtttccagctttttgtaattgtgatcc

SEQ ID NO: 15568 - DNA, 28 bp, Artificial Sequence
  Description of Artificial Sequence: Synthetic primer
cacttacataggcatgttatcactacga

SEQ ID NO: 15569 - DNA, 27 bp, Artificial Sequence
  Description of Artificial Sequence: Synthetic primer
tgtcctgaaaaacaacataccagatga

SEQ ID NO: 15570 - DNA, 22 bp, Artificial Sequence
  Description of Artificial Sequence: Synthetic primer
tgctgtgcctgcattatgtttc

SEQ ID NO: 15571 - DNA, 21 bp, Artificial Sequence
  Description of Artificial Sequence: Synthetic primer
gcctaattcgcccatcacctc

SEQ ID NO: 15572 - DNA, 21 bp, Artificial Sequence
  Description of Artificial Sequence: Synthetic primer
gagtggttctgaagctggagt

SEQ ID NO: 15573 - DNA, 19 bp, Artificial Sequence
  Description of Artificial Sequence: Synthetic primer
ggtggttctcgctggaaca

SEQ ID NO: 15574 - DNA, 21 bp, Artificial Sequence
  Description of Artificial Sequence: Synthetic primer
tgctgctggcacttatactgc

SEQ ID NO: 15575 - DNA, 21 bp, Artificial Sequence
  Description of Artificial Sequence: Synthetic primer
ccacaaggagctccaacaatg

SEQ ID NO: 15576 - DNA, 21 bp, Artificial Sequence
  Description of Artificial Sequence: Synthetic primer
gcagcaatggcatgagctaag

SEQ ID NO: 15577 - DNA, 25 bp, Artificial Sequence
  Description of Artificial Sequence: Synthetic primer
agccattaattcctcagcttccttg

SEQ ID NO: 15578 - DNA, 28 bp, Artificial Sequence
  Description of Artificial Sequence: Synthetic primer
caagtggaaaataatccacaacaccatt

SEQ ID NO: 15579 - DNA, 21 bp, Artificial Sequence
  Description of Artificial Sequence: Synthetic primer
agctcagagccacaatcttct

SEQ ID NO: 15580 - DNA, 21 bp, Artificial Sequence
  Description of Artificial Sequence: Synthetic primer
ggtgctcctgctcatgaacaa

SEQ ID NO: 15581 - DNA, 22 bp, Artificial Sequence
  Description of Artificial Sequence: Synthetic primer
ccagtgcagtgacctatcttgt

SEQ ID NO: 15582 - DNA, 26 bp, Artificial Sequence
  Description of Artificial Sequence: Synthetic primer
gctggcattatcctcttcatgttagt

SEQ ID NO: 15583 - DNA, 27 bp, Artificial Sequence
  Description of Artificial Sequence: Synthetic primer
ggaatgttaatggcagtgatatcgttc

SEQ ID NO: 15584 - DNA, 21 bp, Artificial Sequence
  Description of Artificial Sequence: Synthetic primer
ggtggatggtgcaacactttc

SEQ ID NO: 15585 - DNA, 25 bp, Artificial Sequence
  Description of Artificial Sequence: Synthetic primer
actgggaggtaaatatacgatgctc

SEQ ID NO: 15586 - DNA, 24 bp, Artificial Sequence
  Description of Artificial Sequence: Synthetic primer
gctcaggttcagagagaaaaactg

SEQ ID NO: 15587 - DNA, 28 bp, Artificial Sequence
  Description of Artificial Sequence: Synthetic primer
aggaaaatctattttgagcaatgcaagc

SEQ ID NO: 15588 - DNA, 23 bp, Artificial Sequence
  Description of Artificial Sequence: Synthetic primer
agattgaggcccttggtgtgata

SEQ ID NO: 15589 - DNA, 24 bp, Artificial Sequence
  Description of Artificial Sequence: Synthetic primer
cgatcaagtcaacatggagtagca

SEQ ID NO: 15590 - DNA, 23 bp, Artificial Sequence
  Description of Artificial Sequence: Synthetic primer
gatccaagtgagtattggcgaca

SEQ ID NO: 15591 - DNA, 27 bp, Artificial Sequence
  Description of Artificial Sequence: Synthetic primer
gttttctcatccccttttcttttcctg

SEQ ID NO: 15592 - DNA, 21 bp, Artificial Sequence
  Description of Artificial Sequence: Synthetic primer
acagcaactgaagcgaaactg

SEQ ID NO: 15593 - DNA, 20 bp, Artificial Sequence
  Description of Artificial Sequence: Synthetic primer
gtgcagtggagtgtcttcgg

SEQ ID NO: 15594 - DNA, 21 bp, Artificial Sequence
  Description of Artificial Sequence: Synthetic primer
ccattccacccacatgtgcta

SEQ ID NO: 15595 - DNA, 22 bp, Artificial Sequence
  Description of Artificial Sequence: Synthetic primer
gtgcagcaagaacatcaagagc

SEQ ID NO: 15596 - DNA, 22 bp, Artificial Sequence
  Description of Artificial Sequence: Synthetic primer
caggaaaagcttgtggaaggtc

SEQ ID NO: 15597 - DNA, 28 bp, Artificial Sequence
  Description of Artificial Sequence: Synthetic primer
tgtcaattatttgtccagcattgtacat

SEQ ID NO: 15598 - DNA, 24 bp, Artificial Sequence
  Description of Artificial Sequence: Synthetic primer
catgctgtacatggagagcctaaa

SEQ ID NO: 15599 - DNA, 24 bp, Artificial Sequence
  Description of Artificial Sequence: Synthetic primer
gcctcttgtgttgtgtctgatttc

SEQ ID NO: 15600 - DNA, 21 bp, Artificial Sequence
  Description of Artificial Sequence: Synthetic primer
ggcaccatcgtcaatccagtt

SEQ ID NO: 15601 - DNA, 24 bp, Artificial Sequence
  Description of Artificial Sequence: Synthetic primer
agaaagaaggcagactctgaatgt

SEQ ID NO: 15602 - DNA, 21 bp, Artificial Sequence
  Description of Artificial Sequence: Synthetic primer
cctaagtctgacaccgagtgc

SEQ ID NO: 15603 - DNA, 21 bp, Artificial Sequence
  Description of Artificial Sequence: Synthetic primer
aatgtgttgccattggaggtg

SEQ ID NO: 15604 - DNA, 21 bp, Artificial Sequence
  Description of Artificial Sequence: Synthetic primer
gggtcttgaaggacccatctc

SEQ ID NO: 15605 - DNA, 23 bp, Artificial Sequence
  Description of Artificial Sequence: Synthetic primer
ccctcctgatataggcatcactg

SEQ ID NO: 15606 - DNA, 22 bp, Artificial Sequence
  Description of Artificial Sequence: Synthetic primer
gaagtacctgcaggaagagagg

SEQ ID NO: 15607 - DNA, 23 bp, Artificial Sequence
  Description of Artificial Sequence: Synthetic primer
gccatcagatgaggttgtacgtg

SEQ ID NO: 15608 - DNA, 21 bp, Artificial Sequence
  Description of Artificial Sequence: Synthetic primer
ccacgtaggtacccgtctaac

SEQ ID NO: 15609 - DNA, 22 bp, Artificial Sequence
  Description of Artificial Sequence: Synthetic primer
aagcctcgtgattgacttgaca

SEQ ID NO: 15610 - DNA, 21 bp, Artificial Sequence
  Description of Artificial Sequence: Synthetic primer
gatccatccaagtgcccacat

SEQ ID NO: 15611 - DNA, 21 bp, Artificial Sequence
  Description of Artificial Sequence: Synthetic primer
ctgcgaagttacagcccaaga

SEQ ID NO: 15612 - DNA, 25 bp, Artificial Sequence
  Description of Artificial Sequence: Synthetic primer
attttgtaggttgtagcatcccgtt

SEQ ID NO: 15613 - DNA, 21 bp, Artificial Sequence
  Description of Artificial Sequence: Synthetic primer
ctgaacaagaactggcaccca

SEQ ID NO: 15614 - DNA, 25 bp, Artificial Sequence
  Description of Artificial Sequence: Synthetic primer
gtaaccaaggacctcctgaatcttt

SEQ ID NO: 15615 - DNA, 28 bp, Artificial Sequence
  Description of Artificial Sequence: Synthetic primer
aacttgaactaacagtgcatgctaatac

SEQ ID NO: 15616 - DNA, 28 bp, Artificial Sequence
  Description of Artificial Sequence: Synthetic primer
cctgttccttatgtactttatccccttg

SEQ ID NO: 15617 - DNA, 21 bp, Artificial Sequence
  Description of Artificial Sequence: Synthetic primer
ggactttccttaaccgggtca

SEQ ID NO: 15618 - DNA, 21 bp, Artificial Sequence
  Description of Artificial Sequence: Synthetic primer
cggccatggcaagttacaaaa

SEQ ID NO: 15619 - DNA, 28 bp, Artificial Sequence
  Description of Artificial Sequence: Synthetic primer
tttaggattgagttacagttgctgaaca

SEQ ID NO: 15620 - DNA, 21 bp, Artificial Sequence
  Description of Artificial Sequence: Synthetic primer
gtccttgccgtacactacgat

SEQ ID NO: 15621 - DNA, 21 bp, Artificial Sequence
  Description of Artificial Sequence: Synthetic primer
tgcagctaccacatgctcatt

SEQ ID NO: 15622 - DNA, 27 bp, Artificial Sequence
  Description of Artificial Sequence: Synthetic primer
aagtgaagcaacagaaattagaagcaa

SEQ ID NO: 15623 - DNA, 24 bp, Artificial Sequence
  Description of Artificial Sequence: Synthetic primer
gcaaccagagttaccaccacttat

SEQ ID NO: 15624 - DNA, 28 bp, Artificial Sequence
  Description of Artificial Sequence: Synthetic primer
ggatccaacaatataaaagacacactgc

SEQ ID NO: 15625 - DNA, 23 bp, Artificial Sequence
  Description of Artificial Sequence: Synthetic primer
cacttaggtgtagcaatctgcct

SEQ ID NO: 15626 - DNA, 26 bp, Artificial Sequence
  Description of Artificial Sequence: Synthetic primer
tgcatcatcaacaaaacatagggact

SEQ ID NO: 15627 - DNA, 28 bp, Artificial Sequence
  Description of Artificial Sequence: Synthetic primer
gatttctagaactttctgggagtacaga

SEQ ID NO: 15628 - DNA, 24 bp, Artificial Sequence
  Description of Artificial Sequence: Synthetic primer
tgcagacaaagccgaatagaatct

SEQ ID NO: 15629 - DNA, 28 bp, Artificial Sequence
  Description of Artificial Sequence: Synthetic primer
atccatgattgcattgtaaaacaaaggt

SEQ ID NO: 15630 - DNA, 20 bp, Artificial Sequence
  Description of Artificial Sequence: Synthetic primer
cctccagcggaggagtaatc

SEQ ID NO: 15631 - DNA, 21 bp, Artificial Sequence
  Description of Artificial Sequence: Synthetic primer
gtccgcatcagaatcgggtaa

SEQ ID NO: 15632 - DNA, 22 bp, Artificial Sequence
  Description of Artificial Sequence: Synthetic primer
ccgttgttacagccccatttac

SEQ ID NO: 15633 - DNA, 25 bp, Artificial Sequence
  Description of Artificial Sequence: Synthetic primer
tgtaacgcttatcctgaagaacctt

SEQ ID NO: 15634 - DNA, 21 bp, Artificial Sequence
  Description of Artificial Sequence: Synthetic primer
aggaacacctgaggttgcaat

SEQ ID NO: 15635 - DNA, 23 bp, Artificial Sequence
  Description of Artificial Sequence: Synthetic primer
caaacaggattttggctcttggt

SEQ ID NO: 15636 - DNA, 26 bp, Artificial Sequence
  Description of Artificial Sequence: Synthetic primer
tccatagtaatgtatcccacaagagc

SEQ ID NO: 15637 - DNA, 28 bp, Artificial Sequence
  Description of Artificial Sequence: Synthetic primer
ttcaaaaggaagctaaacaagaggaagt

SEQ ID NO: 15638 - DNA, 23 bp, Artificial Sequence
  Description of Artificial Sequence: Synthetic primer
agtttactggtccaactgggttc

SEQ ID NO: 15639 - DNA, 21 bp, Artificial Sequence
  Description of Artificial Sequence: Synthetic primer
gcccagtaggctgctacattt

SEQ ID NO: 15640 - DNA, 28 bp, Artificial Sequence
  Description of Artificial Sequence: Synthetic primer
tgacagtctaatcacgagtaagagaatc

SEQ ID NO: 15641 - DNA, 21 bp, Artificial Sequence
  Description of Artificial Sequence: Synthetic primer
gcttgggccggatcattatgt

SEQ ID NO: 15642 - DNA, 21 bp, Artificial Sequence
  Description of Artificial Sequence: Synthetic primer
ctaggacggagatgcttgcac

SEQ ID NO: 15643 - DNA, 21 bp, Artificial Sequence
  Description of Artificial Sequence: Synthetic primer
aacaactgatcatggccctgt

SEQ ID NO: 15644 - DNA, 25 bp, Artificial Sequence
  Description of Artificial Sequence: Synthetic primer
cctttaaccttgaatgccacatctg

SEQ ID NO: 15645 - DNA, 28 bp, Artificial Sequence
  Description of Artificial Sequence: Synthetic primer
aaatttattatttgttggcccgttgcag

SEQ ID NO: 15646 - DNA, 22 bp, Artificial Sequence
  Description of Artificial Sequence: Synthetic primer
gcgaccactgttctcagtttca

SEQ ID NO: 15647 - DNA, 28 bp, Artificial Sequence
  Description of Artificial Sequence: Synthetic primer
agatctacataaaggtagcatgagaggt

SEQ ID NO: 15648 - DNA, 27 bp, Artificial Sequence
  Description of Artificial Sequence: Synthetic primer
aaagcttccaggatgaatgtaagatgc

SEQ ID NO: 15649 - DNA, 21 bp, Artificial Sequence
  Description of Artificial Sequence: Synthetic primer
cttgtttctcgctccgcaaat

SEQ ID NO: 15650 - DNA, 28 bp, Artificial Sequence
  Description of Artificial Sequence: Synthetic primer
aatgtctaaccttacaattttccttgcc

SEQ ID NO: 15651 - DNA, 27 bp, Artificial Sequence
  Description of Artificial Sequence: Synthetic primer
tagacacctagcacaatcaaggttatt

SEQ ID NO: 15652 - DNA, 24 bp, Artificial Sequence
  Description of Artificial Sequence: Synthetic primer
gcatgcaatatcccacaggtaagt

SEQ ID NO: 15653 - DNA, 21 bp, Artificial Sequence
  Description of Artificial Sequence: Synthetic primer
cttgttgggccagacagtgtt

SEQ ID NO: 15654 - DNA, 21 bp, Artificial Sequence
  Description of Artificial Sequence: Synthetic primer
gtgtgaccgtatttccggtgt

SEQ ID NO: 15655 - DNA, 28 bp, Artificial Sequence
  Description of Artificial Sequence: Synthetic primer
taccggttaatatgctagtactactgct

SEQ ID NO: 15656 - DNA, 26 bp, Artificial Sequence
  Description of Artificial Sequence: Synthetic primer
tgaatacattatgtgcgttgtgtgtc

SEQ ID NO: 15657 - DNA, 21 bp, Artificial Sequence
  Description of Artificial Sequence: Synthetic primer
agcacttgccagcttactcag

SEQ ID NO: 15658 - DNA, 28 bp, Artificial Sequence
  Description of Artificial Sequence: Synthetic primer
aagcaaagagaatgttgatacttaccga

SEQ ID NO: 15659 - DNA, 24 bp, Artificial Sequence
  Description of Artificial Sequence: Synthetic primer
acagtacagtacagtacgtgcatg

SEQ ID NO: 15660 - DNA, 23 bp, Artificial Sequence
  Description of Artificial Sequence: Synthetic primer
gctggcacacacacaaaataaca

SEQ ID NO: 15661 - DNA, 28 bp, Artificial Sequence
  Description of Artificial Sequence: Synthetic primer
agtccaaaattaaaagctatcacgagga

SEQ ID NO: 15662 - DNA, 25 bp, Artificial Sequence
  Description of Artificial Sequence: Synthetic primer
ttgtagccagccatatatacggaag

SEQ ID NO: 15663 - DNA, 23 bp, Artificial Sequence
  Description of Artificial Sequence: Synthetic primer
gttgctgaacaaagcactctgac

SEQ ID NO: 15664 - DNA, 23 bp, Artificial Sequence
  Description of Artificial Sequence: Synthetic primer
cgttccaccatatcacttgacac

SEQ ID NO: 15665 - DNA, 22 bp, Artificial Sequence
  Description of Artificial Sequence: Synthetic primer
catgttgtgtgcgtcaagtcat

SEQ ID NO: 15666 - DNA, 26 bp, Artificial Sequence
  Description of Artificial Sequence: Synthetic primer
gggttcacgatattttggttgtatcc

SEQ ID NO: 15667 - DNA, 22 bp, Artificial Sequence
  Description of Artificial Sequence: Synthetic primer
ttacgcaccaaatgcgattgtt

SEQ ID NO: 15668 - DNA, 23 bp, Artificial Sequence
  Description of Artificial Sequence: Synthetic primer
ctcatggagatcatcctgtaggc

SEQ ID NO: 15669 - DNA, 21 bp, Artificial Sequence
  Description of Artificial Sequence: Synthetic primer
ccccgctgcgtaagaattaga

SEQ ID NO: 15670 - DNA, 28 bp, Artificial Sequence
  Description of Artificial Sequence: Synthetic primer
cttccattgttgatctattagctgctga

SEQ ID NO: 15671 - DNA, 24 bp, Artificial Sequence
  Description of Artificial Sequence: Synthetic primer
ggcctgtatattttgaggcagaga

SEQ ID NO: 15672 - DNA, 21 bp, Artificial Sequence
  Description of Artificial Sequence: Synthetic primer
gggctgctgctagatagcttc

SEQ ID NO: 15673 - DNA, 21 bp, Artificial Sequence
  Description of Artificial Sequence: Synthetic primer
gttggtgactggcgaatgatg

SEQ ID NO: 15674 - DNA, 25 bp, Artificial Sequence
  Description of Artificial Sequence: Synthetic primer
gtgtggtatcgttgtcatgatcatc

SEQ ID NO: 15675 - DNA, 23 bp, Artificial Sequence
  Description of Artificial Sequence: Synthetic primer
ttcaaccaccagaagcatcagaa

SEQ ID NO: 15676 - DNA, 21 bp, Artificial Sequence
  Description of Artificial Sequence: Synthetic primer
gagccttcagattgggtaccg

SEQ ID NO: 15677 - DNA, 22 bp, Artificial Sequence
  Description of Artificial Sequence: Synthetic primer
gggagaaccccatagtgacatc

SEQ ID NO: 15678 - DNA, 27 bp, Artificial Sequence
  Description of Artificial Sequence: Synthetic primer
gcagaccttttagtttatgttttgcac

SEQ ID NO: 15679 - DNA, 21 bp, Artificial Sequence
  Description of Artificial Sequence: Synthetic primer
aagtgcccaaatggagcacat

SEQ ID NO: 15680 - DNA, 23 bp, Artificial Sequence
  Description of Artificial Sequence: Synthetic primer
caacgttgacaacttggtatcgg

SEQ ID NO: 15681 - DNA, 19 bp, Artificial Sequence
  Description of Artificial Sequence: Synthetic primer
gctcctcagggaacctcct

SEQ ID NO: 15682 - DNA, 29 bp, Artificial Sequence
  Description of Artificial Sequence: Synthetic primer
cagtgcagtcacattctaattctatcagt

SEQ ID NO: 15683 - DNA, 21 bp, Artificial Sequence
  Description of Artificial Sequence: Synthetic primer
catctggagcccatgcatctc

SEQ ID NO: 15684 - DNA, 28 bp, Artificial Sequence
  Description of Artificial Sequence: Synthetic primer
acccagttattggacatttttatgtagt

SEQ ID NO: 15685 - DNA, 28 bp, Artificial Sequence
  Description of Artificial Sequence: Synthetic primer
gttgggttccttttattggaagtttgaa

SEQ ID NO: 15686 - DNA, 24 bp, Artificial Sequence
  Description of Artificial Sequence: Synthetic primer
cccttgtgaaacaagattgccatt

SEQ ID NO: 15687 - DNA, 24 bp, Artificial Sequence
  Description of Artificial Sequence: Synthetic primer
tgattatgaccgaggaggacatga

SEQ ID NO: 15688 - DNA, 25 bp, Artificial Sequence
  Description of Artificial Sequence: Synthetic primer
tggacaatcctccataagacgatct

SEQ ID NO: 15689 - DNA, 27 bp, Artificial Sequence
  Description of Artificial Sequence: Synthetic primer
ctgttacttcaggaaagtgtttagtgg

SEQ ID NO: 15690 - DNA, 24 bp, Artificial Sequence
  Description of Artificial Sequence: Synthetic primer
gtccttcccaaatcaaccaacaga

SEQ ID NO: 15691 - DNA, 22 bp, Artificial Sequence
  Description of Artificial Sequence: Synthetic primer
tcctcagcatgaaaggagacct

SEQ ID NO: 15692 - DNA, 22 bp, Artificial Sequence
  Description of Artificial Sequence: Synthetic primer
cgttcctgccgtgaataagttc

SEQ ID NO: 15693 - DNA, 22 bp, Artificial Sequence
  Description of Artificial Sequence: Synthetic primer
cgcacgacagagttttgggata

SEQ ID NO: 15694 - DNA, 21 bp, Artificial Sequence
  Description of Artificial Sequence: Synthetic primer
ctcttgcacaagaaggctggt

SEQ ID NO: 15695 - DNA, 21 bp, Artificial Sequence
  Description of Artificial Sequence: Synthetic primer
caggcgcaaaccctcttttac

SEQ ID NO: 15696 - DNA, 21 bp, Artificial Sequence
  Description of Artificial Sequence: Synthetic primer
agcacctagtgctgtccattt

SEQ ID NO: 15697 - DNA, 26 bp, Artificial Sequence
  Description of Artificial Sequence: Synthetic primer
tgctatcgtgaagtaagctccttatg

SEQ ID NO: 15698 - DNA, 26 bp, Artificial Sequence
  Description of Artificial Sequence: Synthetic primer
atttgcttgtgttttgtttggtctga

SEQ ID NO: 15699 - DNA, 21 bp, Artificial Sequence
  Description of Artificial Sequence: Synthetic primer
cgccgtgaagctaagcaaatc

SEQ ID NO: 15700 - DNA, 26 bp, Artificial Sequence
  Description of Artificial Sequence: Synthetic primer
tcatgcaccaaatagagaagtaaccg

SEQ ID NO: 15701 - DNA, 21 bp, Artificial Sequence
  Description of Artificial Sequence: Synthetic primer
ggacgtctttggtgggatgaa

SEQ ID NO: 15702 - DNA, 22 bp, Artificial Sequence
  Description of Artificial Sequence: Synthetic primer
cgtgccttgcgtcttttgttta

SEQ ID NO: 15703 - DNA, 21 bp, Artificial Sequence
  Description of Artificial Sequence: Synthetic primer
ggagcgtcccatgtagtctag

SEQ ID NO: 15704 - DNA, 26 bp, Artificial Sequence
  Description of Artificial Sequence: Synthetic primer
ggtcaaggattttcaaggaacatgtc

SEQ ID NO: 15705 - DNA, 27 bp, Artificial Sequence
  Description of Artificial Sequence: Synthetic primer
tggaagatcaagcaggtattcattttg

SEQ ID NO: 15706 - DNA, 21 bp, Artificial Sequence
  Description of Artificial Sequence: Synthetic primer
aacgcggctcttctcttcaaa

SEQ ID NO: 15707 - DNA, 23 bp, Artificial Sequence
  Description of Artificial Sequence: Synthetic primer
ggtgcagcaaccttatctcttca

SEQ ID NO: 15708 - DNA, 25 bp, Artificial Sequence
  Description of Artificial Sequence: Synthetic primer
ccattaagtgtaatgctcggtggaa

SEQ ID NO: 15709 - DNA, 25 bp, Artificial Sequence
  Description of Artificial Sequence: Synthetic primer
agctagtacgggtttgagaattcag

SEQ ID NO: 15710 - DNA, 25 bp, Artificial Sequence
  Description of Artificial Sequence: Synthetic primer
atgaagaggaaacttgcttagcaga

SEQ ID NO: 15711 - DNA, 21 bp, Artificial Sequence
  Description of Artificial Sequence: Synthetic primer
gttccgcctcaaacatgtcct

SEQ ID NO: 15712 - DNA, 21 bp, Artificial Sequence
  Description of Artificial Sequence: Synthetic primer
caatgtccctcattccctcgt

SEQ ID NO: 15713 - DNA, 27 bp, Artificial Sequence
  Description of Artificial Sequence: Synthetic primer
aatataggctacgtcacaatgaagagg

SEQ ID NO: 15714 - DNA, 25 bp, Artificial Sequence
  Description of Artificial Sequence: Synthetic primer
agttacttcttttcagctagcagca

SEQ ID NO: 15715 - DNA, 24 bp, Artificial Sequence
  Description of Artificial Sequence: Synthetic primer
gatcaagatcagcaaaaccaccac

SEQ ID NO: 15716 - DNA, 21 bp, Artificial Sequence
  Description of Artificial Sequence: Synthetic primer
gtgtagccgtgacgactcttc

SEQ ID NO: 15717 - DNA, 21 bp, Artificial Sequence
  Description of Artificial Sequence: Synthetic primer
ccagtgcagagaagagctgac

SEQ ID NO: 15718 - DNA, 26 bp, Artificial Sequence
  Description of Artificial Sequence: Synthetic primer
gttgagtgaattcagcatcaaaaggg

SEQ ID NO: 15719 - DNA, 23 bp, Artificial Sequence
  Description of Artificial Sequence: Synthetic primer
gtagttcccactgtcacacttgt

SEQ ID NO: 15720 - DNA, 28 bp, Artificial Sequence
  Description of Artificial Sequence: Synthetic primer
tgttattttgatgcattttgccaatgtg

SEQ ID NO: 15721 - DNA, 27 bp, Artificial Sequence
  Description of Artificial Sequence: Synthetic primer
acactgcggccatatatatatgctaag

SEQ ID NO: 15722 - DNA, 21 bp, Artificial Sequence
  Description of Artificial Sequence: Synthetic primer
gggccaacactcagtcaaaca

SEQ ID NO: 15723 - DNA, 26 bp, Artificial Sequence
  Description of Artificial Sequence: Synthetic primer
agttttgtttgttcacttgacatggc

SEQ ID NO: 15724 - DNA, 21 bp, Artificial Sequence
  Description of Artificial Sequence: Synthetic primer
cgaacaagttccttgcggagt

SEQ ID NO: 15725 - DNA, 21 bp, Artificial Sequence
  Description of Artificial Sequence: Synthetic primer
ctatcattagggcagcggcaa

SEQ ID NO: 15726 - DNA, 21 bp, Artificial Sequence
  Description of Artificial Sequence: Synthetic primer
cgtgttggcactgcattcttg

SEQ ID NO: 15727 - DNA, 23 bp, Artificial Sequence
  Description of Artificial Sequence: Synthetic primer
tgtgccgttagatgagaagtcaa

SEQ ID NO: 15728 - DNA, 21 bp, Artificial Sequence
  Description of Artificial Sequence: Synthetic primer
cagagatcagctttgccgtgt

SEQ ID NO: 15729 - DNA, 27 bp, Artificial Sequence
  Description of Artificial Sequence: Synthetic primer
gtcatatgtctaacactgcattgcaac

SEQ ID NO: 15730 - DNA, 26 bp, Artificial Sequence
  Description of Artificial Sequence: Synthetic primer
cttgaatcctattacagcagctagca

SEQ ID NO: 15731 - DNA, 28 bp, Artificial Sequence
  Description of Artificial Sequence: Synthetic primer
acaaacaaacaggaatagattcaacagc

SEQ ID NO: 15732 - DNA, 28 bp, Artificial Sequence
  Description of Artificial Sequence: Synthetic primer
tggcatagaatcaatgactacaactgaa

SEQ ID NO: 15733 - DNA, 21 bp, Artificial Sequence
  Description of Artificial Sequence: Synthetic primer
agcgcaattgatggttttggc

SEQ ID NO: 15734 - DNA, 22 bp, Artificial Sequence
  Description of Artificial Sequence: Synthetic primer
ggatgccacagaaagaatgctg

SEQ ID NO: 15735 - DNA, 25 bp, Artificial Sequence
  Description of Artificial Sequence: Synthetic primer
agaagaagaagagcatgaagggtag

SEQ ID NO: 15736 - DNA, 21 bp, Artificial Sequence
  Description of Artificial Sequence: Synthetic primer
acgtggtgtggtgaatttgtg

SEQ ID NO: 15737 - DNA, 21 bp, Artificial Sequence
  Description of Artificial Sequence: Synthetic primer
cggcatagcttgcatgttctc

SEQ ID NO: 15738 - DNA, 22 bp, Artificial Sequence
  Description of Artificial Sequence: Synthetic primer
cagttggatgagcaaggtttcc

SEQ ID NO: 15739 - DNA, 22 bp, Artificial Sequence
  Description of Artificial Sequence: Synthetic primer
gaggaaactggtcgcagttagt

SEQ ID NO: 15740 - DNA, 27 bp, Artificial Sequence
  Description of Artificial Sequence: Synthetic primer
atatgtgcatttttcattggcattcac

SEQ ID NO: 15741 - DNA, 19 bp, Artificial Sequence
  Description of Artificial Sequence: Synthetic primer
ctcccccggtcgtaacttg

SEQ ID NO: 15742 - DNA, 22 bp, Artificial Sequence
  Description of Artificial Sequence: Synthetic primer
gcaggtgagaatggcactattg

SEQ ID NO: 15743 - DNA, 21 bp, Artificial Sequence
  Description of Artificial Sequence: Synthetic primer
gagctccaacaaaacgcgatg

SEQ ID NO: 15744 - DNA, 27 bp, Artificial Sequence
  Description of Artificial Sequence: Synthetic primer
ggatgtagctagcaacatgttaaatcg

SEQ ID NO: 15745 - DNA, 21 bp, Artificial Sequence
  Description of Artificial Sequence: Synthetic primer
ggtggagctctggtgaaagtc

SEQ ID NO: 15746 - DNA, 24 bp, Artificial Sequence
  Description of Artificial Sequence: Synthetic primer
cagggagcagagtaatggattgaa

SEQ ID NO: 15747 - DNA, 25 bp, Artificial Sequence
  Description of Artificial Sequence: Synthetic primer
ccaaatggacaagatctgaagttgc

SEQ ID NO: 15748 - DNA, 26 bp, Artificial Sequence
  Description of Artificial Sequence: Synthetic primer
attcatttaaaagagacggtccacct

SEQ ID NO: 15749 - DNA, 25 bp, Artificial Sequence
  Description of Artificial Sequence: Synthetic primer
aactgccatgcatcataatatccct

SEQ ID NO: 15750 - DNA, 25 bp, Artificial Sequence
  Description of Artificial Sequence: Synthetic primer
attgttaacaagaccttcacggttc

SEQ ID NO: 15751 - DNA, 26 bp, Artificial Sequence
  Description of Artificial Sequence: Synthetic primer
cactgcattccaatgtaactgtagga

SEQ ID NO: 15752 - DNA, 28 bp, Artificial Sequence
  Description of Artificial Sequence: Synthetic primer
tagtacaatattgcagcttgctcttttt

SEQ ID NO: 15753 - DNA, 23 bp, Artificial Sequence
  Description of Artificial Sequence: Synthetic primer
gctctttctctttgtcctgttgc

SEQ ID NO: 15754 - DNA, 22 bp, Artificial Sequence
  Description of Artificial Sequence: Synthetic primer
actgatatgcctggcgtccata

SEQ ID NO: 15755 - DNA, 22 bp, Artificial Sequence
  Description of Artificial Sequence: Synthetic primer
cacaccccactcttgagtagtc

SEQ ID NO: 15756 - DNA, 26 bp, Artificial Sequence
  Description of Artificial Sequence: Synthetic primer
atgcatacgtgttgaagatctggatt

SEQ ID NO: 15757 - DNA, 21 bp, Artificial Sequence
  Description of Artificial Sequence: Synthetic primer
gatccggtgcaggatcaaaag

SEQ ID NO: 15758 - DNA, 28 bp, Artificial Sequence
  Description of Artificial Sequence: Synthetic primer
actctccatatggactgaaaattaaggc

SEQ ID NO: 15759 - DNA, 23 bp, Artificial Sequence
  Description of Artificial Sequence: Synthetic primer
tgtggataacgactgcgaagtag

SEQ ID NO: 15760 - DNA, 26 bp, Artificial Sequence
  Description of Artificial Sequence: Synthetic primer
gaactcacctttactaattggcgtgt

SEQ ID NO: 15761 - DNA, 19 bp, Artificial Sequence
  Description of Artificial Sequence: Synthetic primer
gcccaagcataccaccatg

SEQ ID NO: 15762 - DNA, 25 bp, Artificial Sequence
  Description of Artificial Sequence: Synthetic primer
aaaaacgccactgcaacttttaact

SEQ ID NO: 15763 - DNA, 21 bp, Artificial Sequence
  Description of Artificial Sequence: Synthetic primer
gcacttggtgctattcaggtg

SEQ ID NO: 15764 - DNA, 28 bp, Artificial Sequence
  Description of Artificial Sequence: Synthetic primer
ccgaaaaataatactttgcaggactcca

SEQ ID NO: 15765 - DNA, 23 bp, Artificial Sequence
  Description of Artificial Sequence: Synthetic primer
tcatgattgtctttgctgcgaac

SEQ ID NO: 15766 - DNA, 21 bp, Artificial Sequence
  Description of Artificial Sequence: Synthetic primer
agaagcttgttctagcggtga

SEQ ID NO: 15767 - DNA, 28 bp, Artificial Sequence
  Description of Artificial Sequence: Synthetic primer
tggctttctgtagtgttttaattactcg

SEQ ID NO: 15768 - DNA, 25 bp, Artificial Sequence
  Description of Artificial Sequence: Synthetic primer
gtcccaaagtaacaaaggagacagt

SEQ ID NO: 15769 - DNA, 21 bp, Artificial Sequence
  Description of Artificial Sequence: Synthetic primer
acggaactgtgagaactgtga

SEQ ID NO: 15770 - DNA, 22 bp, Artificial Sequence
  Description of Artificial Sequence: Synthetic primer
gctgattgatctggcagggtta

SEQ ID NO: 15771 - DNA, 20 bp, Artificial Sequence
  Description of Artificial Sequence: Synthetic primer
ctcccctgccgacaacttag

SEQ ID NO: 15772 - DNA, 24 bp, Artificial Sequence
  Description of Artificial Sequence: Synthetic primer
ggtaaaatttccagcccttccatg

SEQ ID NO: 15773 - DNA, 24 bp, Artificial Sequence
  Description of Artificial Sequence: Synthetic primer
acagatggaaagcgactctctttt

SEQ ID NO: 15774 - DNA, 28 bp, Artificial Sequence
  Description of Artificial Sequence: Synthetic primer
ctgtattatgtaggctaaacaggtttgc

SEQ ID NO: 15775 - DNA, 28 bp, Artificial Sequence
  Description of Artificial Sequence: Synthetic primer
aacgaaagcatttgttttacagaagaga

SEQ ID NO: 15776 - DNA, 22 bp, Artificial Sequence
  Description of Artificial Sequence: Synthetic primer
cggtgcagcaacaatctgattc

SEQ ID NO: 15777 - DNA, 24 bp, Artificial Sequence
  Description of Artificial Sequence: Synthetic primer
caaaacaaccgcgaatatgatggg

SEQ ID NO: 15778 - DNA, 23 bp, Artificial Sequence
  Description of Artificial Sequence: Synthetic primer
tcttttggacaactccagcaaca

SEQ ID NO: 15779 - DNA, 28 bp, Artificial Sequence
  Description of Artificial Sequence: Synthetic primer
tacatggtaaatgcatgtgtacacaaat

SEQ ID NO: 15780 - DNA, 21 bp, Artificial Sequence
  Description of Artificial Sequence: Synthetic primer
ggatggagacagccatggatt

SEQ ID NO: 15781 - DNA, 28 bp, Artificial Sequence
  Description of Artificial Sequence: Synthetic primer
tttgctaccaagagtaatatggaaggtt

SEQ ID NO: 15782 - DNA, 27 bp, Artificial Sequence
  Description of Artificial Sequence: Synthetic primer
ataggatcaggatattgcctaaactgg

SEQ ID NO: 15783 - DNA, 28 bp, Artificial Sequence
  Description of Artificial Sequence: Synthetic primer
agtgcagtttatcatagagagaacgaat

SEQ ID NO: 15784 - DNA, 23 bp, Artificial Sequence
  Description of Artificial Sequence: Synthetic primer
aatcagcgatctgatcggagtag

SEQ ID NO: 15785 - DNA, 27 bp, Artificial Sequence
  Description of Artificial Sequence: Synthetic primer
acagggagagacaagatgtttatttca

SEQ ID NO: 15786 - DNA, 20 bp, Artificial Sequence
  Description of Artificial Sequence: Synthetic primer
gggctagccttgaccctact

SEQ ID NO: 15787 - DNA, 21 bp, Artificial Sequence
  Description of Artificial Sequence: Synthetic primer
tggtcggctagctaaccttca

SEQ ID NO: 15788 - DNA, 21 bp, Artificial Sequence
  Description of Artificial Sequence: Synthetic primer
cccctccttatccccaagcta

SEQ ID NO: 15789 - DNA, 24 bp, Artificial Sequence
  Description of Artificial Sequence: Synthetic primer
atcacatgtcgtggatacatcagt

SEQ ID NO: 15790 - DNA, 21 bp, Artificial Sequence
  Description of Artificial Sequence: Synthetic primer
gtccaccgaaaccatcttcgt

SEQ ID NO: 15791 - DNA, 27 bp, Artificial Sequence
  Description of Artificial Sequence: Synthetic primer
actagtagagtaaaggaattcgtcgtg

SEQ ID NO: 15792 - DNA, 23 bp, Artificial Sequence
  Description of Artificial Sequence: Synthetic primer
cttctaactgggagttccagctt

SEQ ID NO: 15793 - DNA, 22 bp, Artificial Sequence
  Description of Artificial Sequence: Synthetic primer
ggccaaggcttataatgtccct

SEQ ID NO: 15794 - DNA, 21 bp, Artificial Sequence
  Description of Artificial Sequence: Synthetic primer
gatgtgcctttgggtgaccaa

SEQ ID NO: 15795 - DNA, 21 bp, Artificial Sequence
  Description of Artificial Sequence: Synthetic primer
ctccttcgcctccaacttctc

SEQ ID NO: 15796 - DNA, 24 bp, Artificial Sequence
  Description of Artificial Sequence: Synthetic primer
ttcgccactaactctctacatgtt

SEQ ID NO: 15797 - DNA, 23 bp, Artificial Sequence
  Description of Artificial Sequence: Synthetic primer
acctttgttcaatgcaacctacg

SEQ ID NO: 15798 - DNA, 21 bp, Artificial Sequence
  Description of Artificial Sequence: Synthetic primer
attgcctccgatacctgagga

SEQ ID NO: 15799 - DNA, 29 bp, Artificial Sequence
  Description of Artificial Sequence: Synthetic primer
ctccactagattatttaagaagcctgaca

SEQ ID NO: 15800 - DNA, 24 bp, Artificial Sequence
  Description of Artificial Sequence: Synthetic primer
aatggctgaaactgaaaagggaag

SEQ ID NO: 15801 - DNA, 21 bp, Artificial Sequence
  Description of Artificial Sequence: Synthetic primer
aagcatgtgttgcaaggcatt

SEQ ID NO: 15802 - DNA, 23 bp, Artificial Sequence
  Description of Artificial Sequence: Synthetic primer
tggtttcagcctgttggtatact

SEQ ID NO: 15803 - DNA, 25 bp, Artificial Sequence
  Description of Artificial Sequence: Synthetic primer
catatgtttcctttcgtgactgagc

SEQ ID NO: 15804 - DNA, 28 bp, Artificial Sequence
  Description of Artificial Sequence: Synthetic primer
aggatattagcatcttacatttgcctca

SEQ ID NO: 15805 - DNA, 22 bp, Artificial Sequence
  Description of Artificial Sequence: Synthetic primer
catgcatggccggactctataa

SEQ ID NO: 15806 - DNA, 25 bp, Artificial Sequence
  Description of Artificial Sequence: Synthetic primer
ggtgaaaaggagggtcaattattcg

SEQ ID NO: 15807 - DNA, 22 bp, Artificial Sequence
  Description of Artificial Sequence: Synthetic primer
aggatccacctatatggtcgca

SEQ ID NO: 15808 - DNA, 21 bp, Artificial Sequence
  Description of Artificial Sequence: Synthetic primer
cgactctctcgctgtcttgtt

SEQ ID NO: 15809 - DNA, 28 bp, Artificial Sequence
  Description of Artificial Sequence: Synthetic primer
tggataaaacaaatgagtaactcaccga

SEQ ID NO: 15810 - DNA, 26 bp, Artificial Sequence
  Description of Artificial Sequence: Synthetic primer
caccactttgagagcaaaattttgga

SEQ ID NO: 15811 - DNA, 28 bp, Artificial Sequence
  Description of Artificial Sequence: Synthetic primer
agcagcttctcttttattctatccagag

SEQ ID NO: 15812 - DNA, 23 bp, Artificial Sequence
  Description of Artificial Sequence: Synthetic primer
gcaattacacgtctgccacctta

SEQ ID NO: 15813 - DNA, 24 bp, Artificial Sequence
  Description of Artificial Sequence: Synthetic primer
ccagtgcagatgctctatttgaac

SEQ ID NO: 15814 - DNA, 27 bp, Artificial Sequence
  Description of Artificial Sequence: Synthetic primer
acaagtttagtagaagaccagatccag

SEQ ID NO: 15815 - DNA, 26 bp, Artificial Sequence
  Description of Artificial Sequence: Synthetic primer
cacccccacagcaattatatctagag

SEQ ID NO: 15816 - DNA, 25 bp, Artificial Sequence
  Description of Artificial Sequence: Synthetic primer
cgtaaaccagggtagcttactttca

SEQ ID NO: 15817 - DNA, 21 bp, Artificial Sequence
  Description of Artificial Sequence: Synthetic primer
cgagccaacaactccacattc

SEQ ID NO: 15818 - DNA, 28 bp, Artificial Sequence
  Description of Artificial Sequence: Synthetic primer
tcctcaactgaactgtttagtaacttca

SEQ ID NO: 15819 - DNA, 27 bp, Artificial Sequence
  Description of Artificial Sequence: Synthetic primer
ttattttatgttcatgcgtttccctgt

SEQ ID NO: 15820 - DNA, 23 bp, Artificial Sequence
  Description of Artificial Sequence: Synthetic primer
cccaggacagtattggccatatt

SEQ ID NO: 15821 - DNA, 30 bp, Artificial Sequence
  Description of Artificial Sequence: Synthetic primer
tggttattcttgactaaatggaatccacat

SEQ ID NO: 15822 - DNA, 21 bp, Artificial Sequence
  Description of Artificial Sequence: Synthetic primer
gaaaaccttgtctccgacgca

SEQ ID NO: 15823 - DNA, 23 bp, Artificial Sequence
  Description of Artificial Sequence: Synthetic primer
tcaagtggcatctctggaatcat

SEQ ID NO: 15824 - DNA, 29 bp, Artificial Sequence
  Description of Artificial Sequence: Synthetic primer
ttgcaaagtgattagaaaacctatcctga

SEQ ID NO: 15825 - DNA, 18 bp, Artificial Sequence
  Description of Artificial Sequence: Synthetic primer
ccgtgcctccccaattcg

SEQ ID NO: 15826 - DNA, 21 bp, Artificial Sequence
  Description of Artificial Sequence: Synthetic primer
ccgagcaatcagagccatctg

SEQ ID NO: 15827 - DNA, 28 bp, Artificial Sequence
  Description of Artificial Sequence: Synthetic primer
acaatgctaattgatcgtcagtatatgc

SEQ ID NO: 15828 - DNA, 22 bp, Artificial Sequence
  Description of Artificial Sequence: Synthetic primer
cgtaacggtggcaatgttatgg

SEQ ID NO: 15829 - DNA, 21 bp, Artificial Sequence
  Description of Artificial Sequence: Synthetic primer
gaggttccaggctgtttctgg

SEQ ID NO: 15830 - DNA, 26 bp, Artificial Sequence
  Description of Artificial Sequence: Synthetic primer
ttggtccatggaatataagagtctgc

SEQ ID NO: 15831 - DNA, 28 bp, Artificial Sequence
  Description of Artificial Sequence: Synthetic primer
atggaattgtccaaatatgttggtgaag

SEQ ID NO: 15832 - DNA, 22 bp, Artificial Sequence
  Description of Artificial Sequence: Synthetic primer
ctgtgcaggtgcagattctttt

SEQ ID NO: 15833 - DNA, 26 bp, Artificial Sequence
  Description of Artificial Sequence: Synthetic primer
gggatttctatttccaacctaagcca

SEQ ID NO: 15834 - DNA, 21 bp, Artificial Sequence
  Description of Artificial Sequence: Synthetic primer
acaccacccttgtttggaacc

SEQ ID NO: 15835 - DNA, 28 bp, Artificial Sequence
  Description of Artificial Sequence: Synthetic primer
aattgcattgaagatgaaaagcagtagc

SEQ ID NO: 15836 - DNA, 21 bp, Artificial Sequence
  Description of Artificial Sequence: Synthetic primer
ttttccaagcagcctgtcctc

SEQ ID NO: 15837 - DNA, 22 bp, Artificial Sequence
  Description of Artificial Sequence: Synthetic primer
cgacaaggctggaagcaaattc

SEQ ID NO: 15838 - DNA, 26 bp, Artificial Sequence
  Description of Artificial Sequence: Synthetic primer
atgactttggctcaaggcatataaca

SEQ ID NO: 15839 - DNA, 19 bp, Artificial Sequence
  Description of Artificial Sequence: Synthetic primer
ccatcccggtccagatcag

SEQ ID NO: 15840 - DNA, 25 bp, Artificial Sequence
  Description of Artificial Sequence: Synthetic primer
gttactgaagatcaacgtgtgcact

SEQ ID NO: 15841 - DNA, 21 bp, Artificial Sequence
  Description of Artificial Sequence: Synthetic primer
agctccagcacttggtgattc

SEQ ID NO: 15842 - DNA, 22 bp, Artificial Sequence
  Description of Artificial Sequence: Synthetic primer
cattcccttgcaaaagccctag

SEQ ID NO: 15843 - DNA, 24 bp, Artificial Sequence
  Description of Artificial Sequence: Synthetic primer
ggacggagcgagtagtaatactct

SEQ ID NO: 15844 - DNA, 21 bp, Artificial Sequence
  Description of Artificial Sequence: Synthetic primer
cgtattcagccgctaccatgt

SEQ ID NO: 15845 - DNA, 25 bp, Artificial Sequence
  Description of Artificial Sequence: Synthetic primer
cagaaagaaagcgcactggaaatac

SEQ ID NO: 15846 - DNA, 28 bp, Artificial Sequence
  Description of Artificial Sequence: Synthetic primer
acaaaggcacaaatagaagtactagtga

SEQ ID NO: 15847 - DNA, 28 bp, Artificial Sequence
  Description of Artificial Sequence: Synthetic primer
tcatagtgttgttgttataagcccttct

SEQ ID NO: 15848 - DNA, 28 bp, Artificial Sequence
  Description of Artificial Sequence: Synthetic primer
gccaaagtatcttcatcataatcactgg

SEQ ID NO: 15849 - DNA, 27 bp, Artificial Sequence
  Description of Artificial Sequence: Synthetic primer
gggtaccagagcaataaatcatttgtg

SEQ ID NO: 15850 - DNA, 23 bp, Artificial Sequence
  Description of Artificial Sequence: Synthetic primer
tgtgaagcctgtgatcttttcca

SEQ ID NO: 15851 - DNA, 27 bp, Artificial Sequence
  Description of Artificial Sequence: Synthetic primer
gtgagtagtgtcattagcattttgcat

SEQ ID NO: 15852 - DNA, 28 bp, Artificial Sequence
  Description of Artificial Sequence: Synthetic primer
actcaagaccatatgtcatatcctgaga

SEQ ID NO: 15853 - DNA, 23 bp, Artificial Sequence
  Description of Artificial Sequence: Synthetic primer
tcaaagacggtgagtgatgatgt

SEQ ID NO: 15854 - DNA, 27 bp, Artificial Sequence
  Description of Artificial Sequence: Synthetic primer
atgcacgtttgtaatacctgaatcaaa

SEQ ID NO: 15855 - DNA, 26 bp, Artificial Sequence
  Description of Artificial Sequence: Synthetic primer
atatgcccatcctcttcctattttgg

SEQ ID NO: 15856 - DNA, 24 bp, Artificial Sequence
  Description of Artificial Sequence: Synthetic primer
aggaacagaggtacagggaaattc

SEQ ID NO: 15857 - DNA, 25 bp, Artificial Sequence
  Description of Artificial Sequence: Synthetic primer
ctccacctgaatgtttttcggaaat

SEQ ID NO: 15858 - DNA, 26 bp, Artificial Sequence
  Description of Artificial Sequence: Synthetic primer
ttgttgctaagctcaagttttctctc

SEQ ID NO: 15859 - DNA, 28 bp, Artificial Sequence
  Description of Artificial Sequence: Synthetic primer
tgctaaatttagagggcaaatagctagt

SEQ ID NO: 15860 - DNA, 24 bp, Artificial Sequence
  Description of Artificial Sequence: Synthetic primer
acacacccatggttgattattcgt

SEQ ID NO: 15861 - DNA, 25 bp, Artificial Sequence
  Description of Artificial Sequence: Synthetic primer
tttttctttcctttttgagcagcgt

SEQ ID NO: 15862 - DNA, 26 bp, Artificial Sequence
  Description of Artificial Sequence: Synthetic primer
cgacaaacacagagttcagtatgaag

SEQ ID NO: 15863 - DNA, 22 bp, Artificial Sequence
  Description of Artificial Sequence: Synthetic primer
gatccgaggtccagagcctata

SEQ ID NO: 15864 - DNA, 26 bp, Artificial Sequence
  Description of Artificial Sequence: Synthetic primer
catcatacgatccgatttccaacaga

SEQ ID NO: 15865 - DNA, 23 bp, Artificial Sequence
  Description of Artificial Sequence: Synthetic primer
caagtgttactttgcttgtgcca

SEQ ID NO: 15866 - DNA, 26 bp, Artificial Sequence
  Description of Artificial Sequence: Synthetic primer
tgttttctgcaatgttcaaaagtggt

SEQ ID NO: 15867 - DNA, 23 bp, Artificial Sequence
  Description of Artificial Sequence: Synthetic primer
tcaccttcttgtgaggcagtttt

SEQ ID NO: 15868 - DNA, 19 bp, Artificial Sequence
  Description of Artificial Sequence: Synthetic primer
gagcgacgcacttgatgtc

SEQ ID NO: 15869 - DNA, 26 bp, Artificial Sequence
  Description of Artificial Sequence: Synthetic primer
cactacagtgatactctgtcctgaag

SEQ ID NO: 15870 - DNA, 21 bp, Artificial Sequence
  Description of Artificial Sequence: Synthetic primer
actcctccatgtcaggcattc

SEQ ID NO: 15871 - DNA, 25 bp, Artificial Sequence
  Description of Artificial Sequence: Synthetic primer
aaaaacggagctatttcctctctct

SEQ ID NO: 15872 - DNA, 23 bp, Artificial Sequence
  Description of Artificial Sequence: Synthetic primer
ccctgtctgatgaaagtcagtcg

SEQ ID NO: 15873 - DNA, 26 bp, Artificial Sequence
  Description of Artificial Sequence: Synthetic primer
ttttctgaccgggtacagtcaataat

SEQ ID NO: 15874 - DNA, 25 bp, Artificial Sequence
  Description of Artificial Sequence: Synthetic primer
agcttttagaacaattcggtgatgg

SEQ ID NO: 15875 - DNA, 27 bp, Artificial Sequence
  Description of Artificial Sequence: Synthetic primer
agtaggttaccttcacataagtgttcc

SEQ ID NO: 15876 - DNA, 21 bp, Artificial Sequence
  Description of Artificial Sequence: Synthetic primer
cagtgcagtgttctgtcctgt

SEQ ID NO: 15877 - DNA, 26 bp, Artificial Sequence
  Description of Artificial Sequence: Synthetic primer
ttattagccacatagcatgcaaaaca

SEQ ID NO: 15878 - DNA, 25 bp, Artificial Sequence
  Description of Artificial Sequence: Synthetic primer
cagtttgccaccaatcatcttggta

SEQ ID NO: 15879 - DNA, 21 bp, Artificial Sequence
  Description of Artificial Sequence: Synthetic primer
aggacggtagtggaagaaagc

SEQ ID NO: 15880 - DNA, 21 bp, Artificial Sequence
  Description of Artificial Sequence: Synthetic primer
gcgagcgctaaccatcaaatg

SEQ ID NO: 15881 - DNA, 22 bp, Artificial Sequence
  Description of Artificial Sequence: Synthetic primer
ctgcaaagtggcaggaaaacat

SEQ ID NO: 15882 - DNA, 24 bp, Artificial Sequence
  Description of Artificial Sequence: Synthetic primer
gctctcaattagaggatcccaggt

SEQ ID NO: 15883 - DNA, 21 bp, Artificial Sequence
  Description of Artificial Sequence: Synthetic primer
tgaaccctgcattgtgtttgg

SEQ ID NO: 15884 - DNA, 21 bp, Artificial Sequence
  Description of Artificial Sequence: Synthetic primer
gaggacacggctctccttttt

SEQ ID NO: 15885 - DNA, 26 bp, Artificial Sequence
  Description of Artificial Sequence: Synthetic primer
cagcaagttgcgattacttttgtttg

SEQ ID NO: 15886 - DNA, 21 bp, Artificial Sequence
  Description of Artificial Sequence: Synthetic primer
ctgagttccttccggcctatg

SEQ ID NO: 15887 - DNA, 28 bp, Artificial Sequence
  Description of Artificial Sequence: Synthetic primer
atgttacttttctggatattgctggtct

SEQ ID NO: 15888 - DNA, 26 bp, Artificial Sequence
  Description of Artificial Sequence: Synthetic primer
aaaagacattgcttcagatgtgtgtt

SEQ ID NO: 15889 - DNA, 28 bp, Artificial Sequence
  Description of Artificial Sequence: Synthetic primer
tctacaaagccataacgaccaaataatg

SEQ ID NO: 15890 - DNA, 28 bp, Artificial Sequence
  Description of Artificial Sequence: Synthetic primer
attctaagtacatgaattcgctctgtct

SEQ ID NO: 15891 - DNA, 21 bp, Artificial Sequence
  Description of Artificial Sequence: Synthetic primer
agtggccacactttgaggaaa

SEQ ID NO: 15892 - DNA, 28 bp, Artificial Sequence
  Description of Artificial Sequence: Synthetic primer
tggtgtaatcaaattctagcagcttgag

SEQ ID NO: 15893 - DNA, 28 bp, Artificial Sequence
  Description of Artificial Sequence: Synthetic primer
tccatacaataacaaaaagagtggcaaa

SEQ ID NO: 15894 - DNA, 23 bp, Artificial Sequence
  Description of Artificial Sequence: Synthetic primer
accaaagagacggcataatggtt

SEQ ID NO: 15895 - DNA, 22 bp, Artificial Sequence
  Description of Artificial Sequence: Synthetic primer
tgaagcatcatgatcacccgaa

SEQ ID NO: 15896 - DNA, 27 bp, Artificial Sequence
  Description of Artificial Sequence: Synthetic primer
tctattagcatttcatcagtacacgca

SEQ ID NO: 15897 - DNA, 22 bp, Artificial Sequence
  Description of Artificial Sequence: Synthetic primer
atctttcccaggacgaacgatt

SEQ ID NO: 15898 - DNA, 24 bp, Artificial Sequence
  Description of Artificial Sequence: Synthetic primer
ttgctgtcaaagtactagctccat

SEQ ID NO: 15899 - DNA, 21 bp, Artificial Sequence
  Description of Artificial Sequence: Synthetic primer
agatgtccgagctagggttga

SEQ ID NO: 15900 - DNA, 28 bp, Artificial Sequence
  Description of Artificial Sequence: Synthetic primer
ggcaaaagcaagcaactattttactaca

SEQ ID NO: 15901 - DNA, 21 bp, Artificial Sequence
  Description of Artificial Sequence: Synthetic primer
ccaacaacaacgccatgcata

SEQ ID NO: 15902 - DNA, 22 bp, Artificial Sequence
  Description of Artificial Sequence: Synthetic primer
ccgagtgcccacaaagtatacc

SEQ ID NO: 15903 - DNA, 27 bp, Artificial Sequence
  Description of Artificial Sequence: Synthetic primer
cttgactggtattgtcttggtatgagt

SEQ ID NO: 15904 - DNA, 22 bp, Artificial Sequence
  Description of Artificial Sequence: Synthetic primer
cagtgcagtggaaagggttagt

SEQ ID NO: 15905 - DNA, 21 bp, Artificial Sequence
  Description of Artificial Sequence: Synthetic primer
atcagcagactgacggaggat

SEQ ID NO: 15906 - DNA, 21 bp, Artificial Sequence
  Description of Artificial Sequence: Synthetic primer
ccaagatactggttcgttgcg

SEQ ID NO: 15907 - DNA, 22 bp, Artificial Sequence
  Description of Artificial Sequence: Synthetic primer
caaagatgaccgacgcttcttc

SEQ ID NO: 15908 - DNA, 25 bp, Artificial Sequence
  Description of Artificial Sequence: Synthetic primer
tctttagcaagcagtgatctaaggg

SEQ ID NO: 15909 - DNA, 27 bp, Artificial Sequence
  Description of Artificial Sequence: Synthetic primer
gtcaaaaccaaattccaatacaatggc

SEQ ID NO: 15910 - DNA, 22 bp, Artificial Sequence
  Description of Artificial Sequence: Synthetic primer
ggtaatgctttccgtacccaac

SEQ ID NO: 15911 - DNA, 21 bp, Artificial Sequence
  Description of Artificial Sequence: Synthetic primer
gtgctagtgcggaagtgctaa

SEQ ID NO: 15912 - DNA, 23 bp, Artificial Sequence
  Description of Artificial Sequence: Synthetic primer
ccagtgcaggtatttgcaaatca

SEQ ID NO: 15913 - DNA, 21 bp, Artificial Sequence
  Description of Artificial Sequence: Synthetic primer
gactgagccgtccaagaacac

SEQ ID NO: 15914 - DNA, 28 bp, Artificial Sequence
  Description of Artificial Sequence: Synthetic primer
agcctacttggttatatagagcagaaag

SEQ ID NO: 15915 - DNA, 28 bp, Artificial Sequence
  Description of Artificial Sequence: Synthetic primer
ctttgtgttttgttttgagaaggaacag

SEQ ID NO: 15916 - DNA, 24 bp, Artificial Sequence
  Description of Artificial Sequence: Synthetic primer
ttctagttgatcctcttgctgcct

SEQ ID NO: 15917 - DNA, 28 bp, Artificial Sequence
  Description of Artificial Sequence: Synthetic primer
gatcatgtatgagtacaaaccagaagga

SEQ ID NO: 15918 - DNA, 22 bp, Artificial Sequence
  Description of Artificial Sequence: Synthetic primer
agccttctagccatttccccta

SEQ ID NO: 15919 - DNA, 28 bp, Artificial Sequence
  Description of Artificial Sequence: Synthetic primer
gccactttccatacatatatgatagcga

SEQ ID NO: 15920 - DNA, 24 bp, Artificial Sequence
  Description of Artificial Sequence: Synthetic primer
aggagacattggaccactacaatc

SEQ ID NO: 15921 - DNA, 24 bp, Artificial Sequence
  Description of Artificial Sequence: Synthetic primer
acatccatcaccatatccaccatc

SEQ ID NO: 15922 - DNA, 25 bp, Artificial Sequence
  Description of Artificial Sequence: Synthetic primer
atatctcctctggtgcaagaagatc

SEQ ID NO: 15923 - DNA, 26 bp, Artificial Sequence
  Description of Artificial Sequence: Synthetic primer
aactagtttgttctgccgtatgtttg

SEQ ID NO: 15924 - DNA, 24 bp, Artificial Sequence
  Description of Artificial Sequence: Synthetic primer
actttcattgacttgctccaggaa

SEQ ID NO: 15925 - DNA, 21 bp, Artificial Sequence
  Description of Artificial Sequence: Synthetic primer
ctttcttcacctcggagcctt

SEQ ID NO: 15926 - DNA, 20 bp, Artificial Sequence
  Description of Artificial Sequence: Synthetic primer
ccatggccaaagcagcaatc

SEQ ID NO: 15927 - DNA, 24 bp, Artificial Sequence
  Description of Artificial Sequence: Synthetic primer
tttgctctttggaatgctagtgtg

SEQ ID NO: 15928 - DNA, 22 bp, Artificial Sequence
  Description of Artificial Sequence: Synthetic primer
agtgcagcgtggcaaatgtata

SEQ ID NO: 15929 - DNA, 21 bp, Artificial Sequence
  Description of Artificial Sequence: Synthetic primer
cagacatcatcgtgtgactgc

SEQ ID NO: 15930 - DNA, 28 bp, Artificial Sequence
  Description of Artificial Sequence: Synthetic primer
aaagtgcgaagtttcagagagcttatta

SEQ ID NO: 15931 - DNA, 24 bp, Artificial Sequence
  Description of Artificial Sequence: Synthetic primer
caagcgcacggatatttaatcctc

SEQ ID NO: 15932 - DNA, 25 bp, Artificial Sequence
  Description of Artificial Sequence: Synthetic primer
cactggcttgaaagaaaaacaacct

SEQ ID NO: 15933 - DNA, 21 bp, Artificial Sequence
  Description of Artificial Sequence: Synthetic primer
agagaaccgtggcatattggg

SEQ ID NO: 15934 - DNA, 26 bp, Artificial Sequence
  Description of Artificial Sequence: Synthetic primer
ttgaaggtatgatatgactgctctcc

SEQ ID NO: 15935 - DNA, 21 bp, Artificial Sequence
  Description of Artificial Sequence: Synthetic primer
cgccaggagagattgcatctg

SEQ ID NO: 15936 - DNA, 25 bp, Artificial Sequence
  Description of Artificial Sequence: Synthetic primer
atatggcaaagattccagttcaacg

SEQ ID NO: 15937 - DNA, 22 bp, Artificial Sequence
  Description of Artificial Sequence: Synthetic primer
tctgatgcattgcctagtgagt

SEQ ID NO: 15938 - DNA, 28 bp, Artificial Sequence
  Description of Artificial Sequence: Synthetic primer
actacaaacttaaaactcaacacaccga

SEQ ID NO: 15939 - DNA, 26 bp, Artificial Sequence
  Description of Artificial Sequence: Synthetic primer
agtggtatggacgcaaataagaaaca

SEQ ID NO: 15940 - DNA, 24 bp, Artificial Sequence
  Description of Artificial Sequence: Synthetic primer
gcattgtttgagtatttgcccgtt

SEQ ID NO: 15941 - DNA, 25 bp, Artificial Sequence
  Description of Artificial Sequence: Synthetic primer
acgaactcgtgctcaaatatgtaga

SEQ ID NO: 15942 - DNA, 21 bp, Artificial Sequence
  Description of Artificial Sequence: Synthetic primer
agcctcagcccaaccattatc

SEQ ID NO: 15943 - DNA, 21 bp, Artificial Sequence
  Description of Artificial Sequence: Synthetic primer
ctgcccaacgatgaagaactc

SEQ ID NO: 15944 - DNA, 26 bp, Artificial Sequence
  Description of Artificial Sequence: Synthetic primer
catcttgtcacaagctcaatcacaat

SEQ ID NO: 15945 - DNA, 23 bp, Artificial Sequence
  Description of Artificial Sequence: Synthetic primer
aattaacactgggcattttggct

SEQ ID NO: 15946 - DNA, 28 bp, Artificial Sequence
  Description of Artificial Sequence: Synthetic primer
aaactgtcaacttctccaagtatagtga

SEQ ID NO: 15947 - DNA, 26 bp, Artificial Sequence
  Description of Artificial Sequence: Synthetic primer
gtgtgttccaaaatctgaagcagaat

SEQ ID NO: 15948 - DNA, 27 bp, Artificial Sequence
  Description of Artificial Sequence: Synthetic primer
aggtatccatattcatgtcggttatcc

SEQ ID NO: 15949 - DNA, 21 bp, Artificial Sequence
  Description of Artificial Sequence: Synthetic primer
tagcaatggtgccggtttctt

SEQ ID NO: 15950 - DNA, 19 bp, Artificial Sequence
  Description of Artificial Sequence: Synthetic primer
ggcatcgcccagaatgtca

SEQ ID NO: 15951 - DNA, 21 bp, Artificial Sequence
  Description of Artificial Sequence: Synthetic primer
aaggaggcagggctaagtcaa

SEQ ID NO: 15952 - DNA, 25 bp, Artificial Sequence
  Description of Artificial Sequence: Synthetic primer
tagtgcagctttgatctagcaaaga

SEQ ID NO: 15953 - DNA, 24 bp, Artificial Sequence
  Description of Artificial Sequence: Synthetic primer
tgttgtgcataatgtgctccctaa

SEQ ID NO: 15954 - DNA, 28 bp, Artificial Sequence
  Description of Artificial Sequence: Synthetic primer
tctgattctcttagcttgttaacttccc

SEQ ID NO: 15955 - DNA, 21 bp, Artificial Sequence
  Description of Artificial Sequence: Synthetic primer
ctgaggttgggatggatccag

SEQ ID NO: 15956 - DNA, 26 bp, Artificial Sequence
  Description of Artificial Sequence: Synthetic primer
ggtaataggattcaagacatgtgcca

SEQ ID NO: 15957 - DNA, 21 bp, Artificial Sequence
  Description of Artificial Sequence: Synthetic primer
gtgtaccgatcctggagtgga

SEQ ID NO: 15958 - DNA, 24 bp, Artificial Sequence
  Description of Artificial Sequence: Synthetic primer
cagggtggataaagaggtgaatct

SEQ ID NO: 15959 - DNA, 19 bp, Artificial Sequence
  Description of Artificial Sequence: Synthetic primer
gggtagcgccatgtgcata

SEQ ID NO: 15960 - DNA, 22 bp, Artificial Sequence
  Description of Artificial Sequence: Synthetic primer
ctccgacatcctcttcctcctt

SEQ ID NO: 15961 - DNA, 21 bp, Artificial Sequence
  Description of Artificial Sequence: Synthetic primer
gccatgccccaggttaaaaag

SEQ ID NO: 15962 - DNA, 26 bp, Artificial Sequence
  Description of Artificial Sequence: Synthetic primer
agtcagcttaacgtttggaaacaaat

SEQ ID NO: 15963 - DNA, 26 bp, Artificial Sequence
  Description of Artificial Sequence: Synthetic primer
tacagcctgaaaagcaaggaaataga

SEQ ID NO: 15964 - DNA, 21 bp, Artificial Sequence
  Description of Artificial Sequence: Synthetic primer
gttcttgtacaccccggtctc

SEQ ID NO: 15965 - DNA, 28 bp, Artificial Sequence
  Description of Artificial Sequence: Synthetic primer
cgtccttcttatcagtccactaatatgc

SEQ ID NO: 15966 - DNA, 28 bp, Artificial Sequence
  Description of Artificial Sequence: Synthetic primer
agcgtttctaagtatgattgaaagttgg

SEQ ID NO: 15967 - DNA, 23 bp, Artificial Sequence
  Description of Artificial Sequence: Synthetic primer
tgtgtgtcaggttgaagcacata

SEQ ID NO: 15968 - DNA, 23 bp, Artificial Sequence
  Description of Artificial Sequence: Synthetic primer
ccttatgggatattgcctccctt

SEQ ID NO: 15969 - DNA, 29 bp, Artificial Sequence
  Description of Artificial Sequence: Synthetic primer
aacattaagatcagattgcgacttgaaat

SEQ ID NO: 15970 - DNA, 21 bp, Artificial Sequence
  Description of Artificial Sequence: Synthetic primer
cctgggcctgagatgatgatg

SEQ ID NO: 15971 - DNA, 28 bp, Artificial Sequence
  Description of Artificial Sequence: Synthetic primer
catatccaggttatcttgttcgtttctg

SEQ ID NO: 15972 - DNA, 19 bp, Artificial Sequence
  Description of Artificial Sequence: Synthetic primer
cagtgcagcacaggcaatg

SEQ ID NO: 15973 - DNA, 27 bp, Artificial Sequence
  Description of Artificial Sequence: Synthetic primer
gatagtgcagaaagattagctgaatgc

SEQ ID NO: 15974 - DNA, 21 bp, Artificial Sequence
  Description of Artificial Sequence: Synthetic primer
ttctcctgaagcaacgtcact

SEQ ID NO: 15975 - DNA, 21 bp, Artificial Sequence
  Description of Artificial Sequence: Synthetic primer
caatgagggcttggttgcaga

SEQ ID NO: 15976 - DNA, 19 bp, Artificial Sequence
  Description of Artificial Sequence: Synthetic primer
gctagcgacgtgtgtcctc

SEQ ID NO: 15977 - DNA, 21 bp, Artificial Sequence
  Description of Artificial Sequence: Synthetic primer
ccagtgcaggaggattctcaa

SEQ ID NO: 15978 - DNA, 26 bp, Artificial Sequence
  Description of Artificial Sequence: Synthetic primer
atctagtgcagagtggatacaaatgc

SEQ ID NO: 15979 - DNA, 27 bp, Artificial Sequence
  Description of Artificial Sequence: Synthetic primer
aggcttctacatggaagtaacatatcc

SEQ ID NO: 15980 - DNA, 21 bp, Artificial Sequence
  Description of Artificial Sequence: Synthetic primer
caaccgatgcatgcagacaac

SEQ ID NO: 15981 - DNA, 22 bp, Artificial Sequence
  Description of Artificial Sequence: Synthetic primer
tgcttgcatcgtccttgcatta

SEQ ID NO: 15982 - DNA, 26 bp, Artificial Sequence
  Description of Artificial Sequence: Synthetic primer
agtgcaggagattaaatgaagatggt

SEQ ID NO: 15983 - DNA, 25 bp, Artificial Sequence
  Description of Artificial Sequence: Synthetic primer
actctggtcactggtgtttatgttc

SEQ ID NO: 15984 - DNA, 24 bp, Artificial Sequence
  Description of Artificial Sequence: Synthetic primer
agtgcagatagctaatgacatggg

SEQ ID NO: 15985 - DNA, 27 bp, Artificial Sequence
  Description of Artificial Sequence: Synthetic primer
tgtcatgttcctactgtcttaaacact

SEQ ID NO: 15986 - DNA, 22 bp, Artificial Sequence
  Description of Artificial Sequence: Synthetic primer
gtcatcttctccgttgccagat

SEQ ID NO: 15987 - DNA, 27 bp, Artificial Sequence
  Description of Artificial Sequence: Synthetic primer
actgtaagtacttctgaaatcggaagg

SEQ ID NO: 15988 - DNA, 26 bp, Artificial Sequence
  Description of Artificial Sequence: Synthetic primer
actgaatcacatcagtcaggaatcca

SEQ ID NO: 15989 - DNA, 18 bp, Artificial Sequence
  Description of Artificial Sequence: Synthetic primer
caggatgtgggctcggaa

SEQ ID NO: 15990 - DNA, 26 bp, Artificial Sequence
  Description of Artificial Sequence: Synthetic primer
tctctgattcatagatgcttggactc

SEQ ID NO: 15991 - DNA, 27 bp, Artificial Sequence
  Description of Artificial Sequence: Synthetic primer
atcaataagaggttgaacttcaatgcg

SEQ ID NO: 15992 - DNA, 22 bp, Artificial Sequence
  Description of Artificial Sequence: Synthetic primer
cagttttgttgctcctcccaag

SEQ ID NO: 15993 - DNA, 26 bp, Artificial Sequence
  Description of Artificial Sequence: Synthetic primer
aagcaatgatttggcctagttgattt

SEQ ID NO: 15994 - DNA, 25 bp, Artificial Sequence
  Description of Artificial Sequence: Synthetic primer
cagtgtcaatatggagctgtaacct

SEQ ID NO: 15995 - DNA, 23 bp, Artificial Sequence
  Description of Artificial Sequence: Synthetic primer
ccacctcaaaggctcaaactgta

SEQ ID NO: 15996 - DNA, 22 bp, Artificial Sequence
  Description of Artificial Sequence: Synthetic primer
tttttccgagatctcacacgca

SEQ ID NO: 15997 - DNA, 27 bp, Artificial Sequence
  Description of Artificial Sequence: Synthetic primer
agaaacaaggaagcagttattttaggc

SEQ ID NO: 15998 - DNA, 21 bp, Artificial Sequence
  Description of Artificial Sequence: Synthetic primer
gcaggcaagagcgtaagtaca

SEQ ID NO: 15999 - DNA, 27 bp, Artificial Sequence
  Description of Artificial Sequence: Synthetic primer
atgaacttgattttatcgcgagaactg

SEQ ID NO: 16000 - DNA, 29 bp, Artificial Sequence
  Description of Artificial Sequence: Synthetic primer
gacatccgaattacaaatgttgtttatgc

SEQ ID NO: 16001 - DNA, 25 bp, Artificial Sequence
  Description of Artificial Sequence: Synthetic primer
gggatctttttagacctctctagcc

SEQ ID NO: 16002 - DNA, 26 bp, Artificial Sequence
  Description of Artificial Sequence: Synthetic primer
tccagagaaaattaatcgcattgctc

SEQ ID NO: 16003 - DNA, 21 bp, Artificial Sequence
  Description of Artificial Sequence: Synthetic primer
gatgcaggtgggatggatttg

SEQ ID NO: 16004 - DNA, 18 bp, Artificial Sequence
  Description of Artificial Sequence: Synthetic primer
ctggctggtggtgaccaa

SEQ ID NO: 16005 - DNA, 21 bp, Artificial Sequence
  Description of Artificial Sequence: Synthetic primer
aacaccctgttgcgtgatctc

SEQ ID NO: 16006 - DNA, 26 bp, Artificial Sequence
  Description of Artificial Sequence: Synthetic primer
tttcggctaaagtatttgcgagtagg

SEQ ID NO: 16007 - DNA, 28 bp, Artificial Sequence
  Description of Artificial Sequence: Synthetic primer
tatcccaccatctacataaccaaatgga

SEQ ID NO: 16008 - DNA, 21 bp, Artificial Sequence
  Description of Artificial Sequence: Synthetic primer
gtgccatcgccataatttgcg

SEQ ID NO: 16009 - DNA, 28 bp, Artificial Sequence
  Description of Artificial Sequence: Synthetic primer
gtgaacataacactcatagtttcttgct

SEQ ID NO: 16010 - DNA, 26 bp, Artificial Sequence
  Description of Artificial Sequence: Synthetic primer
caaacggttatcaagaaattcaagcg

SEQ ID NO: 16011 - DNA, 24 bp, Artificial Sequence
  Description of Artificial Sequence: Synthetic primer
ctgtatgtgtcagccactattcca

SEQ ID NO: 16012 - DNA, 22 bp, Artificial Sequence
  Description of Artificial Sequence: Synthetic primer
cacacactttgaacctgggaac

SEQ ID NO: 16013 - DNA, 21 bp, Artificial Sequence
  Description of Artificial Sequence: Synthetic primer
agatgacgaatgggagaagcc

SEQ ID NO: 16014 - DNA, 25 bp, Artificial Sequence
  Description of Artificial Sequence: Synthetic primer
caatatgtaacggagattggaccct

SEQ ID NO: 16015 - DNA, 27 bp, Artificial Sequence
  Description of Artificial Sequence: Synthetic primer
tctcctcacaaatgctcatgaaaaatc

SEQ ID NO: 16016 - DNA, 28 bp, Artificial Sequence
  Description of Artificial Sequence: Synthetic primer
tgccattggtatatcttgcatttagttg

SEQ ID NO: 16017 - DNA, 21 bp, Artificial Sequence
  Description of Artificial Sequence: Synthetic primer
cagggtctcctcaaggtgatc

SEQ ID NO: 16018 - DNA, 27 bp, Artificial Sequence
  Description of Artificial Sequence: Synthetic primer
cgtttaaagatgcacttgaatacacca

SEQ ID NO: 16019 - DNA, 22 bp, Artificial Sequence
  Description of Artificial Sequence: Synthetic primer
cgtgcaacaaaacgagaatgag

SEQ ID NO: 16020 - DNA, 27 bp, Artificial Sequence
  Description of Artificial Sequence: Synthetic primer
ccgctatagtgattagttccttgaaga

SEQ ID NO: 16021 - DNA, 19 bp, Artificial Sequence
  Description of Artificial Sequence: Synthetic primer
cacggcctaccttcacacc

SEQ ID NO: 16022 - DNA, 29 bp, Artificial Sequence
  Description of Artificial Sequence: Synthetic primer
ttcctttccaatctttaatttgtcatccg

SEQ ID NO: 16023 - DNA, 26 bp, Artificial Sequence
  Description of Artificial Sequence: Synthetic primer
aatttcccagcgagatgatcttcatt

SEQ ID NO: 16024 - DNA, 24 bp, Artificial Sequence
  Description of Artificial Sequence: Synthetic primer
gattctgttgtaggcacaggaaac

SEQ ID NO: 16025 - DNA, 27 bp, Artificial Sequence
  Description of Artificial Sequence: Synthetic primer
atcgtcaacatggttgatatagcaaaa

SEQ ID NO: 16026 - DNA, 24 bp, Artificial Sequence
  Description of Artificial Sequence: Synthetic primer
ggtgaaccagaaacagttgatgag

SEQ ID NO: 16027 - DNA, 21 bp, Artificial Sequence
  Description of Artificial Sequence: Synthetic primer
gtcccaacctgagccaagaat

SEQ ID NO: 16028 - DNA, 26 bp, Artificial Sequence
  Description of Artificial Sequence: Synthetic primer
agaagtaatcactgtccaaagacacc

SEQ ID NO: 16029 - DNA, 21 bp, Artificial Sequence
  Description of Artificial Sequence: Synthetic primer
ggctcagaccctgaggatctt

SEQ ID NO: 16030 - DNA, 26 bp, Artificial Sequence
  Description of Artificial Sequence: Synthetic primer
cctagacaatttggcaacatcttctt

SEQ ID NO: 16031 - DNA, 22 bp, Artificial Sequence
  Description of Artificial Sequence: Synthetic primer
ccttgctagttcttccggaagc

SEQ ID NO: 16032 - DNA, 27 bp, Artificial Sequence
  Description of Artificial Sequence: Synthetic primer
gtaatgtaatacgaagagagcaggctt

SEQ ID NO: 16033 - DNA, 26 bp, Artificial Sequence
  Description of Artificial Sequence: Synthetic primer
accttcgttacacagaaaacaagatg

SEQ ID NO: 16034 - DNA, 22 bp, Artificial Sequence
  Description of Artificial Sequence: Synthetic primer
ccagtgcagcactttagtttgc

SEQ ID NO: 16035 - DNA, 21 bp, Artificial Sequence
  Description of Artificial Sequence: Synthetic primer
cttgatgtgtgggcgctagta

SEQ ID NO: 16036 - DNA, 21 bp, Artificial Sequence
  Description of Artificial Sequence: Synthetic primer
cagtgcagtctttgctgcttg

SEQ ID NO: 16037 - DNA, 21 bp, Artificial Sequence
  Description of Artificial Sequence: Synthetic primer
gtatggccattgcttgggaga

SEQ ID NO: 16038 - DNA, 28 bp, Artificial Sequence
  Description of Artificial Sequence: Synthetic primer
aagatcaagagtgttatcagatcatcgg

SEQ ID NO: 16039 - DNA, 24 bp, Artificial Sequence
  Description of Artificial Sequence: Synthetic primer
aatgaggctgtttggcagaataca

SEQ ID NO: 16040 - DNA, 21 bp, Artificial Sequence
  Description of Artificial Sequence: Synthetic primer
cgtttgttgggtgagggattc

SEQ ID NO: 16041 - DNA, 27 bp, Artificial Sequence
  Description of Artificial Sequence: Synthetic primer
agttacatgtactctgtcacaagactt

SEQ ID NO: 16042 - DNA, 21 bp, Artificial Sequence
  Description of Artificial Sequence: Synthetic primer
gttctcaccagtggctgatgt

SEQ ID NO: 16043 - DNA, 23 bp, Artificial Sequence
  Description of Artificial Sequence: Synthetic primer
tgggaagtctgtacaatttgcgt

SEQ ID NO: 16044 - DNA, 22 bp, Artificial Sequence
  Description of Artificial Sequence: Synthetic primer
accaggaactgtgagaaacgtg

SEQ ID NO: 16045 - DNA, 26 bp, Artificial Sequence
  Description of Artificial Sequence: Synthetic primer
ttgcattatttctccagaaacgtacc

SEQ ID NO: 16046 - DNA, 22 bp, Artificial Sequence
  Description of Artificial Sequence: Synthetic primer
agcgaggtggtactaaactctg

SEQ ID NO: 16047 - DNA, 26 bp, Artificial Sequence
  Description of Artificial Sequence: Synthetic primer
agtgcagatatagtgcagttatccag

SEQ ID NO: 16048 - DNA, 24 bp, Artificial Sequence
  Description of Artificial Sequence: Synthetic primer
agtgcagaaatcgcaatctgagag

SEQ ID NO: 16049 - DNA, 25 bp, Artificial Sequence
  Description of Artificial Sequence: Synthetic primer
ctccctcctctccttgtaacgatat

SEQ ID NO: 16050 - DNA, 28 bp, Artificial Sequence
  Description of Artificial Sequence: Synthetic primer
atatctctctctctctctctctcactca

SEQ ID NO: 16051 - DNA, 25 bp, Artificial Sequence
  Description of Artificial Sequence: Synthetic primer
tcaatctgttgaggagagggatagt

SEQ ID NO: 16052 - DNA, 27 bp, Artificial Sequence
  Description of Artificial Sequence: Synthetic primer
tcttcactcaagagtacacagcttatc

SEQ ID NO: 16053 - DNA, 21 bp, Artificial Sequence
  Description of Artificial Sequence: Synthetic primer
atgtcaaaagcgccctgttca

SEQ ID NO: 16054 - DNA, 27 bp, Artificial Sequence
  Description of Artificial Sequence: Synthetic primer
atgtgaacttcagtttgctactaacca

SEQ ID NO: 16055 - DNA, 22 bp, Artificial Sequence
  Description of Artificial Sequence: Synthetic primer
agtttcagcacggtacagatca

SEQ ID NO: 16056 - DNA, 30 bp, Artificial Sequence
  Description of Artificial Sequence: Synthetic primer
tgttcatttaacttaaggtgatgatgtact

SEQ ID NO: 16057 - DNA, 21 bp, Artificial Sequence
  Description of Artificial Sequence: Synthetic primer
gaagaagcagctgggcagtta

SEQ ID NO: 16058 - DNA, 25 bp, Artificial Sequence
  Description of Artificial Sequence: Synthetic primer
gtgcagctatttatctgtccagaga

SEQ ID NO: 16059 - DNA, 25 bp, Artificial Sequence
  Description of Artificial Sequence: Synthetic primer
gcaggcaactttatgtatgcaatgg

SEQ ID NO: 16060 - DNA, 28 bp, Artificial Sequence
  Description of Artificial Sequence: Synthetic primer
tgtatattgctatgcacttgacttgtgt

SEQ ID NO: 16061 - DNA, 28 bp, Artificial Sequence
  Description of Artificial Sequence: Synthetic primer
attatttgatgatgcagacttttcgtgt

SEQ ID NO: 16062 - DNA, 24 bp, Artificial Sequence
  Description of Artificial Sequence: Synthetic primer
ctccttttcagggtggagataact

SEQ ID NO: 16063 - DNA, 27 bp, Artificial Sequence
  Description of Artificial Sequence: Synthetic primer
ctgagcatctatagaaagtggcaacaa

SEQ ID NO: 16064 - DNA, 27 bp, Artificial Sequence
  Description of Artificial Sequence: Synthetic primer
tcaatgaagtatgaaggagatggtgga

SEQ ID NO: 16065 - DNA, 26 bp, Artificial Sequence
  Description of Artificial Sequence: Synthetic primer
tgcagtattctgattttcatgcctgt

SEQ ID NO: 16066 - DNA, 21 bp, Artificial Sequence
  Description of Artificial Sequence: Synthetic primer
agctatttcgtagcgtccagt

SEQ ID NO: 16067 - DNA, 21 bp, Artificial Sequence
  Description of Artificial Sequence: Synthetic primer
ggcactctgcaagcagaaaga

SEQ ID NO: 16068 - DNA, 25 bp, Artificial Sequence
  Description of Artificial Sequence: Synthetic primer
gcagcggataaaggatcaacaaatt

SEQ ID NO: 16069 - DNA, 22 bp, Artificial Sequence
  Description of Artificial Sequence: Synthetic primer
ggcaaagatgggtattggtcct

SEQ ID NO: 16070 - DNA, 22 bp, Artificial Sequence
  Description of Artificial Sequence: Synthetic primer
cgaaaagggtagccttgttgct

SEQ ID NO: 16071 - DNA, 21 bp, Artificial Sequence
  Description of Artificial Sequence: Synthetic primer
caagtgccctccagcatcata

SEQ ID NO: 16072 - DNA, 21 bp, Artificial Sequence
  Description of Artificial Sequence: Synthetic primer
attaaaggcggtcatgggtga

SEQ ID NO: 16073 - DNA, 25 bp, Artificial Sequence
  Description of Artificial Sequence: Synthetic primer
cacttctctacatcgaggaactcaa

SEQ ID NO: 16074 - DNA, 23 bp, Artificial Sequence
  Description of Artificial Sequence: Synthetic primer
ctgttccatcagagaatgccgtt

SEQ ID NO: 16075 - DNA, 21 bp, Artificial Sequence
  Description of Artificial Sequence: Synthetic primer
cgtgaccactccaagatctgc

SEQ ID NO: 16076 - DNA, 24 bp, Artificial Sequence
  Description of Artificial Sequence: Synthetic primer
gatgggtcacagtgtacttccaaa

SEQ ID NO: 16077 - DNA, 21 bp, Artificial Sequence
  Description of Artificial Sequence: Synthetic primer
cgaggaggagttcgagaagtc

SEQ ID NO: 16078 - DNA, 24 bp, Artificial Sequence
  Description of Artificial Sequence: Synthetic primer
tgaaagtgacctatgcatctgcaa

SEQ ID NO: 16079 - DNA, 25 bp, Artificial Sequence
  Description of Artificial Sequence: Synthetic primer
ctgatctaagaggcaaggtctcaaa

SEQ ID NO: 16080 - DNA, 21 bp, Artificial Sequence
  Description of Artificial Sequence: Synthetic primer
acaagccggtgttttggaaga

SEQ ID NO: 16081 - DNA, 26 bp, Artificial Sequence
  Description of Artificial Sequence: Synthetic primer
caacctggtggagataagttctactg

SEQ ID NO: 16082 - DNA, 21 bp, Artificial Sequence
  Description of Artificial Sequence: Synthetic primer
atcatcggagagacacgtgga

SEQ ID NO: 16083 - DNA, 21 bp, Artificial Sequence
  Description of Artificial Sequence: Synthetic primer
catgaccctcgacttccacac

SEQ ID NO: 16084 - DNA, 24 bp, Artificial Sequence
  Description of Artificial Sequence: Synthetic primer
gtgatgatgacagcgatgatgact

SEQ ID NO: 16085 - DNA, 21 bp, Artificial Sequence
  Description of Artificial Sequence: Synthetic primer
gccacaagcaaggtcctaact

SEQ ID NO: 16086 - DNA, 21 bp, Artificial Sequence
  Description of Artificial Sequence: Synthetic primer
ttccatgcttggtcaaagggt

SEQ ID NO: 16087 - DNA, 22 bp, Artificial Sequence
  Description of Artificial Sequence: Synthetic primer
aggccgtgagtgctgttataag

SEQ ID NO: 16088 - DNA, 23 bp, Artificial Sequence
  Description of Artificial Sequence: Synthetic primer
agaaatcatggtgggaccaaagg

SEQ ID NO: 16089 - DNA, 22 bp, Artificial Sequence
  Description of Artificial Sequence: Synthetic primer
ccaacccaatccctaggtatcc

SEQ ID NO: 16090 - DNA, 23 bp, Artificial Sequence
  Description of Artificial Sequence: Synthetic primer
tcctgcaacttactttcttccct

SEQ ID NO: 16091 - DNA, 19 bp, Artificial Sequence
  Description of Artificial Sequence: Synthetic primer
tgtacgcctccaaggagga

SEQ ID NO: 16092 - DNA, 19 bp, Artificial Sequence
  Description of Artificial Sequence: Synthetic primer
ccatggacgtcgtctatgc

SEQ ID NO: 16093 - DNA, 18 bp, Artificial Sequence
  Description of Artificial Sequence: Synthetic primer
gtccaagacggcgtccaa

SEQ ID NO: 16094 - DNA, 21 bp, Artificial Sequence
  Description of Artificial Sequence: Synthetic primer
gcagaggcctggctatttgag

SEQ ID NO: 16095 - DNA, 19 bp, Artificial Sequence
  Description of Artificial Sequence: Synthetic primer
ggtggactgcgacacactc

SEQ ID NO: 16096 - DNA, 18 bp, Artificial Sequence
  Description of Artificial Sequence: Synthetic primer
ggcctggagacctaccct

SEQ ID NO: 16097 - DNA, 21 bp, Artificial Sequence
  Description of Artificial Sequence: Synthetic primer
ctggcgtagacgtactccaaa

SEQ ID NO: 16098 - DNA, 28 bp, Artificial Sequence
  Description of Artificial Sequence: Synthetic primer
gattgaccgagtttatattggttcttgc

SEQ ID NO: 16099 - DNA, 23 bp, Artificial Sequence
  Description of Artificial Sequence: Synthetic primer
ttggacaacacggaagttaaccg

SEQ ID NO: 16100 - DNA, 22 bp, Artificial Sequence
  Description of Artificial Sequence: Synthetic primer
aaatcgactgtgcatacggcat

SEQ ID NO: 16101 - DNA, 21 bp, Artificial Sequence
  Description of Artificial Sequence: Synthetic primer
ctccgtcacctcctacacctt

SEQ ID NO: 16102 - DNA, 19 bp, Artificial Sequence
  Description of Artificial Sequence: Synthetic primer
cctcggatggcttgaggtg

SEQ ID NO: 16103 - DNA, 22 bp, Artificial Sequence
  Description of Artificial Sequence: Synthetic primer
cagtgcaatatggtcgtggaga

SEQ ID NO: 16104 - DNA, 21 bp, Artificial Sequence
  Description of Artificial Sequence: Synthetic primer
gatttgctggtcggtgctact

SEQ ID NO: 16105 - DNA, 21 bp, Artificial Sequence
  Description of Artificial Sequence: Synthetic primer
ttggtttgaggtgttcgcatg

SEQ ID NO: 16106 - DNA, 20 bp, Artificial Sequence
  Description of Artificial Sequence: Synthetic primer
ctgacctccgacatcccaaa

SEQ ID NO: 16107 - DNA, 22 bp, Artificial Sequence
  Description of Artificial Sequence: Synthetic primer
cgtctccgcctactaatctctg

SEQ ID NO: 16108 - DNA, 26 bp, Artificial Sequence
  Description of Artificial Sequence: Synthetic primer
ggatacgaaaactaatacacccgtca

SEQ ID NO: 16109 - DNA, 27 bp, Artificial Sequence
  Description of Artificial Sequence: Synthetic primer
tacttaacatgaacccaaatgcacgta

SEQ ID NO: 16110 - DNA, 21 bp, Artificial Sequence
  Description of Artificial Sequence: Synthetic primer
ctctgctgagacgatgacgat

SEQ ID NO: 16111 - DNA, 22 bp, Artificial Sequence
  Description of Artificial Sequence: Synthetic primer
gttccaggatcagggtttggtc

SEQ ID NO: 16112 - DNA, 24 bp, Artificial Sequence
  Description of Artificial Sequence: Synthetic primer
tccaacttcaggaagggcagtata

SEQ ID NO: 16113 - DNA, 21 bp, Artificial Sequence
  Description of Artificial Sequence: Synthetic primer
ggacaacgatgacatgcttgg

SEQ ID NO: 16114 - DNA, 22 bp, Artificial Sequence
  Description of Artificial Sequence: Synthetic primer
tggtggtgttcttgctgtttct

SEQ ID NO: 16115 - DNA, 24 bp, Artificial Sequence
  Description of Artificial Sequence: Synthetic primer
tcgacatacatgccgtcataaact

SEQ ID NO: 16116 - DNA, 22 bp, Artificial Sequence
  Description of Artificial Sequence: Synthetic primer
tgccaaagggagtttgcactta

SEQ ID NO: 16117 - DNA, 24 bp, Artificial Sequence
  Description of Artificial Sequence: Synthetic primer
ggtggttcaacccgtgttctaata

SEQ ID NO: 16118 - DNA, 22 bp, Artificial Sequence
  Description of Artificial Sequence: Synthetic primer
gatgaatgctcctgctggttct

SEQ ID NO: 16119 - DNA, 22 bp, Artificial Sequence
  Description of Artificial Sequence: Synthetic primer
tcggtttttgatagcgtcagga

SEQ ID NO: 16120 - DNA, 21 bp, Artificial Sequence
  Description of Artificial Sequence: Synthetic primer
gctgagatcgatgccgttctt

SEQ ID NO: 16121 - DNA, 23 bp, Artificial Sequence
  Description of Artificial Sequence: Synthetic primer
ccaaagatatcctcctcctggac

SEQ ID NO: 16122 - DNA, 21 bp, Artificial Sequence
  Description of Artificial Sequence: Synthetic primer
gggtcaggaaggttgaaccca

SEQ ID NO: 16123 - DNA, 23 bp, Artificial Sequence
  Description of Artificial Sequence: Synthetic primer
cgacagtggagagtctgaacaaa

SEQ ID NO: 16124 - DNA, 19 bp, Artificial Sequence
  Description of Artificial Sequence: Synthetic primer
gcctggcactcaaccaaac

SEQ ID NO: 16125 - DNA, 21 bp, Artificial Sequence
  Description of Artificial Sequence: Synthetic primer
ggtgcaggtcttgcatcttac

SEQ ID NO: 16126 - DNA, 20 bp, Artificial Sequence
  Description of Artificial Sequence: Synthetic primer
gttacagatgacgcctccct

SEQ ID NO: 16127 - DNA, 21 bp, Artificial Sequence
  Description of Artificial Sequence: Synthetic primer
cctcgccaaatcccaattcag

SEQ ID NO: 16128 - DNA, 22 bp, Artificial Sequence
  Description of Artificial Sequence: Synthetic primer
ctgcaagggtgagaaggttctt

SEQ ID NO: 16129 - DNA, 20 bp, Artificial Sequence
  Description of Artificial Sequence: Synthetic primer
gcatacagacgcgacgattg

SEQ ID NO: 16130 - DNA, 24 bp, Artificial Sequence
  Description of Artificial Sequence: Synthetic primer
ccaagtactttatcggtctcagca

SEQ ID NO: 16131 - DNA, 21 bp, Artificial Sequence
  Description of Artificial Sequence: Synthetic primer
aatatgggagtggcagctcac

SEQ ID NO: 16132 - DNA, 23 bp, Artificial Sequence
  Description of Artificial Sequence: Synthetic primer
aggattgctgtgatcactcaagg

SEQ ID NO: 16133 - DNA, 27 bp, Artificial Sequence
  Description of Artificial Sequence: Synthetic primer
gaaggatgatgatgatgctcagctatt

SEQ ID NO: 16134 - DNA, 22 bp, Artificial Sequence
  Description of Artificial Sequence: Synthetic primer
aggtgatcttggcccattacat

SEQ ID NO: 16135 - DNA, 28 bp, Artificial Sequence
  Description of Artificial Sequence: Synthetic primer
tttatttcgtgtttttggttgtactcct

SEQ ID NO: 16136 - DNA, 24 bp, Artificial Sequence
  Description of Artificial Sequence: Synthetic primer
tcaatcaaaggaagttgggctctg

SEQ ID NO: 16137 - DNA, 23 bp, Artificial Sequence
  Description of Artificial Sequence: Synthetic primer
gcttttgacgaggctgagaaaaa

SEQ ID NO: 16138 - DNA, 23 bp, Artificial Sequence
  Description of Artificial Sequence: Synthetic primer
ggtgctgccactaatgtcatttt

SEQ ID NO: 16139 - DNA, 22 bp, Artificial Sequence
  Description of Artificial Sequence: Synthetic primer
gataagacccttgtgctgcagt

SEQ ID NO: 16140 - DNA, 24 bp, Artificial Sequence
  Description of Artificial Sequence: Synthetic primer
ttgagaagcaaatgaagaggagca

SEQ ID NO: 16141 - DNA, 22 bp, Artificial Sequence
  Description of Artificial Sequence: Synthetic primer
gtcctgaagcaactgctgaacc

SEQ ID NO: 16142 - DNA, 24 bp, Artificial Sequence
  Description of Artificial Sequence: Synthetic primer
ctacctctggtgagggtttgtatg

SEQ ID NO: 16143 - DNA, 20 bp, Artificial Sequence
  Description of Artificial Sequence: Synthetic primer
ccttgaccttcatcccacca

SEQ ID NO: 16144 - DNA, 19 bp, Artificial Sequence
  Description of Artificial Sequence: Synthetic primer
ccagtggaccactcagcac

SEQ ID NO: 16145 - DNA, 21 bp, Artificial Sequence
  Description of Artificial Sequence: Synthetic primer
aagacccgtctcctggatgtt

SEQ ID NO: 16146 - DNA, 24 bp, Artificial Sequence
  Description of Artificial Sequence: Synthetic primer
ccctcctcagtatccttcttctcc

SEQ ID NO: 16147 - DNA, 22 bp, Artificial Sequence
  Description of Artificial Sequence: Synthetic primer
ggtcgtctttgagtaccctgtg

SEQ ID NO: 16148 - DNA, 19 bp, Artificial Sequence
  Description of Artificial Sequence: Synthetic primer
aaggtccagagggctgtgt

SEQ ID NO: 16149 - DNA, 21 bp, Artificial Sequence
  Description of Artificial Sequence: Synthetic primer
gaaggccatggctgataggat

SEQ ID NO: 16150 - DNA, 28 bp, Artificial Sequence
  Description of Artificial Sequence: Synthetic primer
ggaggaatatttttctgtcagatttggc

SEQ ID NO: 16151 - DNA, 29 bp, Artificial Sequence
  Description of Artificial Sequence: Synthetic primer
tttctacattttatcatgagtctgttggc

SEQ ID NO: 16152 - DNA, 24 bp, Artificial Sequence
  Description of Artificial Sequence: Synthetic primer
cagcttcttgaggttgtacctctt

SEQ ID NO: 16153 - DNA, 19 bp, Artificial Sequence
  Description of Artificial Sequence: Synthetic primer
caaaaccgcttgctcacga

SEQ ID NO: 16154 - DNA, 22 bp, Artificial Sequence
  Description of Artificial Sequence: Synthetic primer
tgctcagtacactggtgctaat

SEQ ID NO: 16155 - DNA, 18 bp, Artificial Sequence
  Description of Artificial Sequence: Synthetic primer
ggtgacgatggcctgcat

SEQ ID NO: 16156 - DNA, 23 bp, Artificial Sequence
  Description of Artificial Sequence: Synthetic primer
cactctgcttctcaccaagctta

SEQ ID NO: 16157 - DNA, 23 bp, Artificial Sequence
  Description of Artificial Sequence: Synthetic primer
gtccaggatggtctctatggaag

SEQ ID NO: 16158 - DNA, 19 bp, Artificial Sequence
  Description of Artificial Sequence: Synthetic primer
cttgccaaagtgggtggct

SEQ ID NO: 16159 - DNA, 21 bp, Artificial Sequence
  Description of Artificial Sequence: Synthetic primer
ggttgtccagggatctcactc

SEQ ID NO: 16160 - DNA, 21 bp, Artificial Sequence
  Description of Artificial Sequence: Synthetic primer
gatgagggactccgagcaaag

SEQ ID NO: 16161 - DNA, 21 bp, Artificial Sequence
  Description of Artificial Sequence: Synthetic primer
caccttggtggatggctatgt

SEQ ID NO: 16162 - DNA, 23 bp, Artificial Sequence
  Description of Artificial Sequence: Synthetic primer
ctgccaagaagaaatgagtggct

SEQ ID NO: 16163 - DNA, 19 bp, Artificial Sequence
  Description of Artificial Sequence: Synthetic primer
ttcgagcaccccatgaacc

SEQ ID NO: 16164 - DNA, 27 bp, Artificial Sequence
  Description of Artificial Sequence: Synthetic primer
tgatgttactgacgaaatgttgatgga

SEQ ID NO: 16165 - DNA, 22 bp, Artificial Sequence
  Description of Artificial Sequence: Synthetic primer
cggtggtgatgatgacgatgat

SEQ ID NO: 16166 - DNA, 21 bp, Artificial Sequence
  Description of Artificial Sequence: Synthetic primer
caaggctgacaaggccactta

SEQ ID NO: 16167 - DNA, 21 bp, Artificial Sequence
  Description of Artificial Sequence: Synthetic primer
ggtatttcacttgcgcccgta

SEQ ID NO: 16168 - DNA, 19 bp, Artificial Sequence
  Description of Artificial Sequence: Synthetic primer
aacgaatgctgcagcaggt

SEQ ID NO: 16169 - DNA, 18 bp, Artificial Sequence
  Description of Artificial Sequence: Synthetic primer
ttcaagccacagctgcct

SEQ ID NO: 16170 - DNA, 18 bp, Artificial Sequence
  Description of Artificial Sequence: Synthetic primer
cttggcagcgtgagcaac

SEQ ID NO: 16171 - DNA, 21 bp, Artificial Sequence
  Description of Artificial Sequence: Synthetic primer
tgtctagcgtcgacttgagag

SEQ ID NO: 16172 - DNA, 21 bp, Artificial Sequence
  Description of Artificial Sequence: Synthetic primer
cctccacgtcaaggactacaa

SEQ ID NO: 16173 - DNA, 28 bp, Artificial Sequence
  Description of Artificial Sequence: Synthetic primer
gaatgtttctcgatgaactccttaatgc

SEQ ID NO: 16174 - DNA, 19 bp, Artificial Sequence
  Description of Artificial Sequence: Synthetic primer
ccatcacctggctcgacaa

SEQ ID NO: 16175 - DNA, 27 bp, Artificial Sequence
  Description of Artificial Sequence: Synthetic primer
agaggtttctgttcagtcatagagaga

SEQ ID NO: 16176 - DNA, 21 bp, Artificial Sequence
  Description of Artificial Sequence: Synthetic primer
catcaagggcctgagctacga

SEQ ID NO: 16177 - DNA, 26 bp, Artificial Sequence
  Description of Artificial Sequence: Synthetic primer
taccctcctgtattcaaatgtcaagc

SEQ ID NO: 16178 - DNA, 29 bp, Artificial Sequence
  Description of Artificial Sequence: Synthetic primer
ccactaagaaggaaatgatgaggttttca

SEQ ID NO: 16179 - DNA, 23 bp, Artificial Sequence
  Description of Artificial Sequence: Synthetic primer
gcttacctgagtgccttgaacaa

SEQ ID NO: 16180 - DNA, 27 bp, Artificial Sequence
  Description of Artificial Sequence: Synthetic primer
atgatgaactattttcgtatgcatgcc

SEQ ID NO: 16181 - DNA, 27 bp, Artificial Sequence
  Description of Artificial Sequence: Synthetic primer
gatctagttggcagagggattgatatt

SEQ ID NO: 16182 - DNA, 26 bp, Artificial Sequence
  Description of Artificial Sequence: Synthetic primer
ggttctgaagtgagacgagaagttaa

SEQ ID NO: 16183 - DNA, 21 bp, Artificial Sequence
  Description of Artificial Sequence: Synthetic primer
ccctgcatcagctgttgaaga

SEQ ID NO: 16184 - DNA, 21 bp, Artificial Sequence
  Description of Artificial Sequence: Synthetic primer
aaggcagagtgttgaccaacg

SEQ ID NO: 16185 - DNA, 28 bp, Artificial Sequence
  Description of Artificial Sequence: Synthetic primer
gtgcttctatcaggaaatcatgcaaatt

SEQ ID NO: 16186 - DNA, 21 bp, Artificial Sequence
  Description of Artificial Sequence: Synthetic primer
gatcatccgtgctttcctggt

SEQ ID NO: 16187 - DNA, 21 bp, Artificial Sequence
  Description of Artificial Sequence: Synthetic primer
ctcaaccattgcggcaagaaa

SEQ ID NO: 16188 - DNA, 24 bp, Artificial Sequence
  Description of Artificial Sequence: Synthetic primer
acatgcatgaagatggatggatcg

SEQ ID NO: 16189 - DNA, 22 bp, Artificial Sequence
  Description of Artificial Sequence: Synthetic primer
gtagcaagccagactccaaaag

SEQ ID NO: 16190 - DNA, 18 bp, Artificial Sequence
  Description of Artificial Sequence: Synthetic primer
ccctgacaaggtgccgtt

SEQ ID NO: 16191 - DNA, 28 bp, Artificial Sequence
  Description of Artificial Sequence: Synthetic primer
tttttctttacaccggaactatgaaacc

SEQ ID NO: 16192 - DNA, 27 bp, Artificial Sequence
  Description of Artificial Sequence: Synthetic primer
caaggaaaatgtaacagtgcaacaagt

SEQ ID NO: 16193 - DNA, 21 bp, Artificial Sequence
  Description of Artificial Sequence: Synthetic primer
cagctggttgtcatcgctcat

SEQ ID NO: 16194 - DNA, 22 bp, Artificial Sequence
  Description of Artificial Sequence: Synthetic primer
tcaacaaaactgatggcacgga

SEQ ID NO: 16195 - DNA, 27 bp, Artificial Sequence
  Description of Artificial Sequence: Synthetic primer
gtaggtcgaatgagaagaagattacca

SEQ ID NO: 16196 - DNA, 23 bp, Artificial Sequence
  Description of Artificial Sequence: Synthetic primer
cagagatgatcgagttgccaatc

SEQ ID NO: 16197 - DNA, 27 bp, Artificial Sequence
  Description of Artificial Sequence: Synthetic primer
caacagtgattattcccgaagattctc

SEQ ID NO: 16198 - DNA, 23 bp, Artificial Sequence
  Description of Artificial Sequence: Synthetic primer
ggtgacccagagatagatgaagc

SEQ ID NO: 16199 - DNA, 22 bp, Artificial Sequence
  Description of Artificial Sequence: Synthetic primer
tgtcattgtcagtcggcatact

SEQ ID NO: 16200 - DNA, 22 bp, Artificial Sequence
  Description of Artificial Sequence: Synthetic primer
catatacgctgacacggttggt

SEQ ID NO: 16201 - DNA, 21 bp, Artificial Sequence
  Description of Artificial Sequence: Synthetic primer
caattaccagcaaggcatggc

SEQ ID NO: 16202 - DNA, 28 bp, Artificial Sequence
  Description of Artificial Sequence: Synthetic primer
tgacgacaaaatgatggagtatctatcc

SEQ ID NO: 16203 - DNA, 25 bp, Artificial Sequence
  Description of Artificial Sequence: Synthetic primer
ccagttcttgtagaacctcctccta

SEQ ID NO: 16204 - DNA, 19 bp, Artificial Sequence
  Description of Artificial Sequence: Synthetic primer
agaagaccccactcgtgct

SEQ ID NO: 16205 - DNA, 24 bp, Artificial Sequence
  Description of Artificial Sequence: Synthetic primer
tccacaattcagactcagagaacc

SEQ ID NO: 16206 - DNA, 28 bp, Artificial Sequence
  Description of Artificial Sequence: Synthetic primer
gctgatgagatgaataactacctgttgt

SEQ ID NO: 16207 - DNA, 24 bp, Artificial Sequence
  Description of Artificial Sequence: Synthetic primer
cacctggaagtatgagtctaccac

SEQ ID NO: 16208 - DNA, 21 bp, Artificial Sequence
  Description of Artificial Sequence: Synthetic primer
cagaacgtgcaagagccctaa

SEQ ID NO: 16209 - DNA, 20 bp, Artificial Sequence
  Description of Artificial Sequence: Synthetic primer
tcaccatcatgcccaaggat

SEQ ID NO: 16210 - DNA, 20 bp, Artificial Sequence
  Description of Artificial Sequence: Synthetic primer
atcatcaacgtcggcgacat

SEQ ID NO: 16211 - DNA, 26 bp, Artificial Sequence
  Description of Artificial Sequence: Synthetic primer
aaccctgtaacaaaatgtacttcgga

SEQ ID NO: 16212 - DNA, 27 bp, Artificial Sequence
  Description of Artificial Sequence: Synthetic primer
tgacatggtgtattttcaaggagttca

SEQ ID NO: 16213 - DNA, 22 bp, Artificial Sequence
  Description of Artificial Sequence: Synthetic primer
catgtgcatctggcatctgttc

SEQ ID NO: 16214 - DNA, 22 bp, Artificial Sequence
  Description of Artificial Sequence: Synthetic primer
gcaggagaggaggaataactgg

SEQ ID NO: 16215 - DNA, 22 bp, Artificial Sequence
  Description of Artificial Sequence: Synthetic primer
acgaagcctcatatggcatcat

SEQ ID NO: 16216 - DNA, 28 bp, Artificial Sequence
  Description of Artificial Sequence: Synthetic primer
acctgtcaaatatggtatagcttgcatt

SEQ ID NO: 16217 - DNA, 21 bp, Artificial Sequence
  Description of Artificial Sequence: Synthetic primer
gcaacagtttggtgcaaaacg

SEQ ID NO: 16218 - DNA, 24 bp, Artificial Sequence
  Description of Artificial Sequence: Synthetic primer
gacaatcgctaaacagatctgctc

SEQ ID NO: 16219 - DNA, 21 bp, Artificial Sequence
  Description of Artificial Sequence: Synthetic primer
aagagattggctcggctactg

SEQ ID NO: 16220 - DNA, 29 bp, Artificial Sequence
  Description of Artificial Sequence: Synthetic primer
acattactttcatactctgttctaagcct

SEQ ID NO: 16221 - DNA, 21 bp, Artificial Sequence
  Description of Artificial Sequence: Synthetic primer
gatcgtaaaatgcccccgact

SEQ ID NO: 16222 - DNA, 21 bp, Artificial Sequence
  Description of Artificial Sequence: Synthetic primer
gcctcacgcacttgatggata

SEQ ID NO: 16223 - DNA, 25 bp, Artificial Sequence
  Description of Artificial Sequence: Synthetic primer
gataaacatcactctcctctctcgt

SEQ ID NO: 16224 - DNA, 22 bp, Artificial Sequence
  Description of Artificial Sequence: Synthetic primer
tgcaggtctcagatgcttcttt

SEQ ID NO: 16225 - DNA, 24 bp, Artificial Sequence
  Description of Artificial Sequence: Synthetic primer
tcctcttctactctgcttcctcaa

SEQ ID NO: 16226 - DNA, 28 bp, Artificial Sequence
  Description of Artificial Sequence: Synthetic primer
gtgtaggtcattgtttgttttggatgat

SEQ ID NO: 16227 - DNA, 21 bp, Artificial Sequence
  Description of Artificial Sequence: Synthetic primer
caggaaaacaatcccctgcac

SEQ ID NO: 16228 - DNA, 21 bp, Artificial Sequence
  Description of Artificial Sequence: Synthetic primer
cttcctcttcgtgcggatcac

SEQ ID NO: 16229 - DNA, 23 bp, Artificial Sequence
  Description of Artificial Sequence: Synthetic primer
gtggattatgcagaagcaccaga

SEQ ID NO: 16230 - DNA, 21 bp, Artificial Sequence
  Description of Artificial Sequence: Synthetic primer
cagtttgctcggcagttgatg

SEQ ID NO: 16231 - DNA, 27 bp, Artificial Sequence
  Description of Artificial Sequence: Synthetic primer
ccacatcttcattgcagcatagttaag

SEQ ID NO: 16232 - DNA, 24 bp, Artificial Sequence
  Description of Artificial Sequence: Synthetic primer
aggaagtgcttcaagctctagatc

SEQ ID NO: 16233 - DNA, 25 bp, Artificial Sequence
  Description of Artificial Sequence: Synthetic primer
gctttccagattggtcatagtgtca

SEQ ID NO: 16234 - DNA, 27 bp, Artificial Sequence
  Description of Artificial Sequence: Synthetic primer
gaaggagaagaagctttttgatgatcc

SEQ ID NO: 16235 - DNA, 23 bp, Artificial Sequence
  Description of Artificial Sequence: Synthetic primer
agaagaggaagattgccatgagc

SEQ ID NO: 16236 - DNA, 26 bp, Artificial Sequence
  Description of Artificial Sequence: Synthetic primer
caaacctatgacaacatccatggaga

SEQ ID NO: 16237 - DNA, 21 bp, Artificial Sequence
  Description of Artificial Sequence: Synthetic primer
gttcctgactctgaggcgatg

SEQ ID NO: 16238 - DNA, 28 bp, Artificial Sequence
  Description of Artificial Sequence: Synthetic primer
tgttgtactaaaccaagcaacaaaatca

SEQ ID NO: 16239 - DNA, 22 bp, Artificial Sequence
  Description of Artificial Sequence: Synthetic primer
agtttgtgacatgtgcacacag

SEQ ID NO: 16240 - DNA, 22 bp, Artificial Sequence
  Description of Artificial Sequence: Synthetic primer
caatacttaaacgcaggcccaa

SEQ ID NO: 16241 - DNA, 22 bp, Artificial Sequence
  Description of Artificial Sequence: Synthetic primer
ccttctcctcccttcctctacc

SEQ ID NO: 16242 - DNA, 25 bp, Artificial Sequence
  Description of Artificial Sequence: Synthetic primer
atctaattgcatttgtaggcatggg

SEQ ID NO: 16243 - DNA, 24 bp, Artificial Sequence
  Description of Artificial Sequence: Synthetic primer
aaccacattagttacgcttctcca

SEQ ID NO: 16244 - DNA, 24 bp, Artificial Sequence
  Description of Artificial Sequence: Synthetic primer
tggaactggtgatacatcctcttg

SEQ ID NO: 16245 - DNA, 26 bp, Artificial Sequence
  Description of Artificial Sequence: Synthetic primer
caaacgttgaaagaaaactgacatgc

SEQ ID NO: 16246 - DNA, 22 bp, Artificial Sequence
  Description of Artificial Sequence: Synthetic primer
gtggtggcagcactagttcata

SEQ ID NO: 16247 - DNA, 22 bp, Artificial Sequence
  Description of Artificial Sequence: Synthetic primer
ggacttccagagcttccttgtg

SEQ ID NO: 16248 - DNA, 26 bp, Artificial Sequence
  Description of Artificial Sequence: Synthetic primer
agctagtaaatccggagtatcctacc

SEQ ID NO: 16249 - DNA, 27 bp, Artificial Sequence
  Description of Artificial Sequence: Synthetic primer
gctgcacacttaagttccatatttctt

SEQ ID NO: 16250 - DNA, 25 bp, Artificial Sequence
  Description of Artificial Sequence: Synthetic primer
acaaccaactgactcagcaatagaa

SEQ ID NO: 16251 - DNA, 22 bp, Artificial Sequence
  Description of Artificial Sequence: Synthetic primer
gggaaagaccctaaaggtgctg

SEQ ID NO: 16252 - DNA, 23 bp, Artificial Sequence
  Description of Artificial Sequence: Synthetic primer
tcagaatgctctaatgggacagc

SEQ ID NO: 16253 - DNA, 21 bp, Artificial Sequence
  Description of Artificial Sequence: Synthetic primer
ctgggtcaccgctgatttgaa

SEQ ID NO: 16254 - DNA, 19 bp, Artificial Sequence
  Description of Artificial Sequence: Synthetic primer
tcgttgaccggtcagactc

SEQ ID NO: 16255 - DNA, 24 bp, Artificial Sequence
  Description of Artificial Sequence: Synthetic primer
tccagacgtgtttctgttatgtct

SEQ ID NO: 16256 - DNA, 28 bp, Artificial Sequence
  Description of Artificial Sequence: Synthetic primer
accctgactattagcatcaaagttatga

SEQ ID NO: 16257 - DNA, 28 bp, Artificial Sequence
  Description of Artificial Sequence: Synthetic primer
agccaggtgatgtagtactctataatgt

SEQ ID NO: 16258 - DNA, 21 bp, Artificial Sequence
  Description of Artificial Sequence: Synthetic primer
gctcctgtacgaacccgattt

SEQ ID NO: 16259 - DNA, 19 bp, Artificial Sequence
  Description of Artificial Sequence: Synthetic primer
gcatagccctcgtcctctc

SEQ ID NO: 16260 - DNA, 26 bp, Artificial Sequence
  Description of Artificial Sequence: Synthetic primer
tcaagaacttctccaatgatcaggtt

SEQ ID NO: 16261 - DNA, 28 bp, Artificial Sequence
  Description of Artificial Sequence: Synthetic primer
tgaaagctaatatgagagcatccaactt

SEQ ID NO: 16262 - DNA, 21 bp, Artificial Sequence
  Description of Artificial Sequence: Synthetic primer
tcacttctctctcgctacgtg

SEQ ID NO: 16263 - DNA, 26 bp, Artificial Sequence
  Description of Artificial Sequence: Synthetic primer
agttctatcatggccttgttgttttc

SEQ ID NO: 16264 - DNA, 28 bp, Artificial Sequence
  Description of Artificial Sequence: Synthetic primer
agataatccaagttgatgatatgccaga

SEQ ID NO: 16265 - DNA, 21 bp, Artificial Sequence
  Description of Artificial Sequence: Synthetic primer
agtgtgttaacagcctgcgat

SEQ ID NO: 16266 - DNA, 28 bp, Artificial Sequence
  Description of Artificial Sequence: Synthetic primer
aagacaaatgttgtttcaagttgtacct

SEQ ID NO: 16267 - DNA, 28 bp, Artificial Sequence
  Description of Artificial Sequence: Synthetic primer
tgctaaattgtttattttgctgggacaa

SEQ ID NO: 16268 - DNA, 26 bp, Artificial Sequence
  Description of Artificial Sequence: Synthetic primer
acatattaccgaagcaaagtagctgt

SEQ ID NO: 16269 - DNA, 28 bp, Artificial Sequence
  Description of Artificial Sequence: Synthetic primer
gctcgtttccaggtaattaattactcgt

SEQ ID NO: 16270 - DNA, 19 bp, Artificial Sequence
  Description of Artificial Sequence: Synthetic primer
tttgtcccacacccaggtt

SEQ ID NO: 16271 - DNA, 27 bp, Artificial Sequence
  Description of Artificial Sequence: Synthetic primer
tcagaacagcaaactcggattatatgt

SEQ ID NO: 16272 - DNA, 23 bp, Artificial Sequence
  Description of Artificial Sequence: Synthetic primer
gcaagatgcttccttgctgtaaa

SEQ ID NO: 16273 - DNA, 27 bp, Artificial Sequence
  Description of Artificial Sequence: Synthetic primer
acttaatttgttggtgaactgagaagc

SEQ ID NO: 16274 - DNA, 24 bp, Artificial Sequence
  Description of Artificial Sequence: Synthetic primer
tggtgatgcatgtgtcatatttcg

SEQ ID NO: 16275 - DNA, 22 bp, Artificial Sequence
  Description of Artificial Sequence: Synthetic primer
taagtggccaagaagaggcatg

SEQ ID NO: 16276 - DNA, 21 bp, Artificial Sequence
  Description of Artificial Sequence: Synthetic primer
gagagcgagtacgacagcttc

SEQ ID NO: 16277 - DNA, 24 bp, Artificial Sequence
  Description of Artificial Sequence: Synthetic primer
agtctgatggagaaaaatgcacca

SEQ ID NO: 16278 - DNA, 21 bp, Artificial Sequence
  Description of Artificial Sequence: Synthetic primer
ctgaaacccctctcctcccaa

SEQ ID NO: 16279 - DNA, 21 bp, Artificial Sequence
  Description of Artificial Sequence: Synthetic primer
tcccagaggtgtatcggatga

SEQ ID NO: 16280 - DNA, 23 bp, Artificial Sequence
  Description of Artificial Sequence: Synthetic primer
ttggagcgaaacatcattggaga

SEQ ID NO: 16281 - DNA, 21 bp, Artificial Sequence
  Description of Artificial Sequence: Synthetic primer
aggctgaccgagaaggaagtt

SEQ ID NO: 16282 - DNA, 23 bp, Artificial Sequence
  Description of Artificial Sequence: Synthetic primer
ccgatcttattctccatgcctgt

SEQ ID NO: 16283 - DNA, 21 bp, Artificial Sequence
  Description of Artificial Sequence: Synthetic primer
tttttgacgggtgagcaggac

SEQ ID NO: 16284 - DNA, 26 bp, Artificial Sequence
  Description of Artificial Sequence: Synthetic primer
cctccgatccatattacttgtcgttg

SEQ ID NO: 16285 - DNA, 21 bp, Artificial Sequence
  Description of Artificial Sequence: Synthetic primer
agatatgggcgtggaatccga

SEQ ID NO: 16286 - DNA, 25 bp, Artificial Sequence
  Description of Artificial Sequence: Synthetic primer
aaaagcagaaaattatgtcctggca

SEQ ID NO: 16287 - DNA, 24 bp, Artificial Sequence
  Description of Artificial Sequence: Synthetic primer
actacatgttcagtatgcaacgga

SEQ ID NO: 16288 - DNA, 27 bp, Artificial Sequence
  Description of Artificial Sequence: Synthetic primer
ccttgctgaagcttcatctatacagtt

SEQ ID NO: 16289 - DNA, 26 bp, Artificial Sequence
  Description of Artificial Sequence: Synthetic primer
cgagcttcaggataaatctactaggc

SEQ ID NO: 16290 - DNA, 27 bp, Artificial Sequence
  Description of Artificial Sequence: Synthetic primer
gtcactgtttgttctaagtttctgagc

SEQ ID NO: 16291 - DNA, 26 bp, Artificial Sequence
  Description of Artificial Sequence: Synthetic primer
tgagcaaatgatgcagacaaaagaat

SEQ ID NO: 16292 - DNA, 28 bp, Artificial Sequence
  Description of Artificial Sequence: Synthetic primer
tgcagacagtaccactatgtttaaacaa

SEQ ID NO: 16293 - DNA, 19 bp, Artificial Sequence
  Description of Artificial Sequence: Synthetic primer
ctcctcttcctgcggatgc

SEQ ID NO: 16294 - DNA, 24 bp, Artificial Sequence
  Description of Artificial Sequence: Synthetic primer
ttgtgcctacaaatcaagctcaac

SEQ ID NO: 16295 - DNA, 25 bp, Artificial Sequence
  Description of Artificial Sequence: Synthetic primer
cggtttatgcgttgaattaatgcag

SEQ ID NO: 16296 - DNA, 21 bp, Artificial Sequence
  Description of Artificial Sequence: Synthetic primer
cacaccgagtgttgctttgtt

SEQ ID NO: 16297 - DNA, 21 bp, Artificial Sequence
  Description of Artificial Sequence: Synthetic primer
gttctctagccccagaagcag

SEQ ID NO: 16298 - DNA, 24 bp, Artificial Sequence
  Description of Artificial Sequence: Synthetic primer
atcagatggatcagtcacaagacc

SEQ ID NO: 16299 - DNA, 28 bp, Artificial Sequence
  Description of Artificial Sequence: Synthetic primer
caataggattagagttgtggttgtttgc

SEQ ID NO: 16300 - DNA, 21 bp, Artificial Sequence
  Description of Artificial Sequence: Synthetic primer
tacatgggcagtcacatcctg

SEQ ID NO: 16301 - DNA, 21 bp, Artificial Sequence
  Description of Artificial Sequence: Synthetic primer
aaggctgggtccgagtatctc

SEQ ID NO: 16302 - DNA, 25 bp, Artificial Sequence
  Description of Artificial Sequence: Synthetic primer
aaaccatgagcacgacaatgtattt

SEQ ID NO: 16303 - DNA, 26 bp, Artificial Sequence
  Description of Artificial Sequence: Synthetic primer
ggattaactggaaaataggccatggt

SEQ ID NO: 16304 - DNA, 28 bp, Artificial Sequence
  Description of Artificial Sequence: Synthetic primer
agctagtgcagttaagaacttagtaagc

SEQ ID NO: 16305 - DNA, 24 bp, Artificial Sequence
  Description of Artificial Sequence: Synthetic primer
tgcattctgggtttgtagatctgt

SEQ ID NO: 16306 - DNA, 21 bp, Artificial Sequence
  Description of Artificial Sequence: Synthetic primer
acggctacagtcccgtttaag

SEQ ID NO: 16307 - DNA, 23 bp, Artificial Sequence
  Description of Artificial Sequence: Synthetic primer
tcagttcgtgattttctgtccga

SEQ ID NO: 16308 - DNA, 21 bp, Artificial Sequence
  Description of Artificial Sequence: Synthetic primer
ctcggtgaagcagttggatgt

SEQ ID NO: 16309 - DNA, 18 bp, Artificial Sequence
  Description of Artificial Sequence: Synthetic primer
gtcgtgcccccacagatg

SEQ ID NO: 16310 - DNA, 24 bp, Artificial Sequence
  Description of Artificial Sequence: Synthetic primer
tcatcaggttcttgcagttttcct

SEQ ID NO: 16311 - DNA, 27 bp, Artificial Sequence
  Description of Artificial Sequence: Synthetic primer
actcgtagtttgatttactgggagttc

SEQ ID NO: 16312 - DNA, 23 bp, Artificial Sequence
  Description of Artificial Sequence: Synthetic primer
ttcccaggaaatgaatcgtggaa

SEQ ID NO: 16313 - DNA, 22 bp, Artificial Sequence
  Description of Artificial Sequence: Synthetic primer
gccttcctgcaagaattcaacc

SEQ ID NO: 16314 - DNA, 25 bp, Artificial Sequence
  Description of Artificial Sequence: Synthetic primer
aaaggcaggaataagttgcatgaag

SEQ ID NO: 16315 - DNA, 25 bp, Artificial Sequence
  Description of Artificial Sequence: Synthetic primer
tgctgcaaactactacttggaaaga

SEQ ID NO: 16316 - DNA, 22 bp, Artificial Sequence
  Description of Artificial Sequence: Synthetic primer
caggcatgtggtcatgttcatc

SEQ ID NO: 16317 - DNA, 25 bp, Artificial Sequence
  Description of Artificial Sequence: Synthetic primer
aaagaacgaagagaacatgttgctg

SEQ ID NO: 16318 - DNA, 25 bp, Artificial Sequence
  Description of Artificial Sequence: Synthetic primer
tataaagacggtgaactccgtcaca

SEQ ID NO: 16319 - DNA, 22 bp, Artificial Sequence
  Description of Artificial Sequence: Synthetic primer
cttgccatgtgatttggccttt

SEQ ID NO: 16320 - DNA, 21 bp, Artificial Sequence
  Description of Artificial Sequence: Synthetic primer
cttaattgacgggcaccgtga

SEQ ID NO: 16321 - DNA, 24 bp, Artificial Sequence
  Description of Artificial Sequence: Synthetic primer
gaggacgagaacaactcaatctct

SEQ ID NO: 16322 - DNA, 25 bp, Artificial Sequence
  Description of Artificial Sequence: Synthetic primer
agtatgcacttagcagtttaaccca

SEQ ID NO: 16323 - DNA, 25 bp, Artificial Sequence
  Description of Artificial Sequence: Synthetic primer
ccagctccacagctattattagctt

SEQ ID NO: 16324 - DNA, 27 bp, Artificial Sequence
  Description of Artificial Sequence: Synthetic primer
aagtcacagaatgtcccttatgatgaa

SEQ ID NO: 16325 - DNA, 24 bp, Artificial Sequence
  Description of Artificial Sequence: Synthetic primer
ccaacagcaaggcttgttactaga

SEQ ID NO: 16326 - DNA, 26 bp, Artificial Sequence
  Description of Artificial Sequence: Synthetic primer
tgatgatattaggccatacggcgata

SEQ ID NO: 16327 - DNA, 21 bp, Artificial Sequence
  Description of Artificial Sequence: Synthetic primer
caagggtagggtggagtgaga

SEQ ID NO: 16328 - DNA, 28 bp, Artificial Sequence
  Description of Artificial Sequence: Synthetic primer
tcgtcttcttttacaatccttatgcagt

SEQ ID NO: 16329 - DNA, 26 bp, Artificial Sequence
  Description of Artificial Sequence: Synthetic primer
gttagtactgctgctttgtcattctg

SEQ ID NO: 16330 - DNA, 28 bp, Artificial Sequence
  Description of Artificial Sequence: Synthetic primer
gggctctattcgttgttaatcaatttcc

SEQ ID NO: 16331 - DNA, 24 bp, Artificial Sequence
  Description of Artificial Sequence: Synthetic primer
tgctacagactctctaaaggaggt

SEQ ID NO: 16332 - DNA, 22 bp, Artificial Sequence
  Description of Artificial Sequence: Synthetic primer
cgacaggcattttaggaccgta

SEQ ID NO: 16333 - DNA, 28 bp, Artificial Sequence
  Description of Artificial Sequence: Synthetic primer
acaatggacaatgtgggtatgtagtaat

SEQ ID NO: 16334 - DNA, 26 bp, Artificial Sequence
  Description of Artificial Sequence: Synthetic primer
cccttagggtaccttttgctagaaga

SEQ ID NO: 16335 - DNA, 22 bp, Artificial Sequence
  Description of Artificial Sequence: Synthetic primer
caaacgtagctccttgccaatg

SEQ ID NO: 16336 - DNA, 21 bp, Artificial Sequence
  Description of Artificial Sequence: Synthetic primer
aaaattcagtgggcgaccaga

SEQ ID NO: 16337 - DNA, 26 bp, Artificial Sequence
  Description of Artificial Sequence: Synthetic primer
tggaaagcgacacatatacatggatt

SEQ ID NO: 16338 - DNA, 25 bp, Artificial Sequence
  Description of Artificial Sequence: Synthetic primer
caagcgcaattctcacaaaattcag

SEQ ID NO: 16339 - DNA, 26 bp, Artificial Sequence
  Description of Artificial Sequence: Synthetic primer
tttgtagtttagggtatggccaatct

SEQ ID NO: 16340 - DNA, 27 bp, Artificial Sequence
  Description of Artificial Sequence: Synthetic primer
ggacctggtagaattaactggattgaa

SEQ ID NO: 16341 - DNA, 28 bp, Artificial Sequence
  Description of Artificial Sequence: Synthetic primer
aattaaatgcttatgtgcctagaaggtg

SEQ ID NO: 16342 - DNA, 26 bp, Artificial Sequence
  Description of Artificial Sequence: Synthetic primer
tagagtaaaatgcaccgaaggtccta

SEQ ID NO: 16343 - DNA, 28 bp, Artificial Sequence
  Description of Artificial Sequence: Synthetic primer
gctcattgcttgtttaaagtcagctatc

SEQ ID NO: 16344 - DNA, 28 bp, Artificial Sequence
  Description of Artificial Sequence: Synthetic primer
agttcaatagattttggaagctttgtcc

SEQ ID NO: 16345 - DNA, 25 bp, Artificial Sequence
  Description of Artificial Sequence: Synthetic primer
attcttcagaatcaaatgcgcaaca

SEQ ID NO: 16346 - DNA, 27 bp, Artificial Sequence
  Description of Artificial Sequence: Synthetic primer
atgatggtcaattgacaagagtatgct

SEQ ID NO: 16347 - DNA, 22 bp, Artificial Sequence
  Description of Artificial Sequence: Synthetic primer
aaatgcaaagcaaggagactgg

SEQ ID NO: 16348 - DNA, 23 bp, Artificial Sequence
  Description of Artificial Sequence: Synthetic primer
ctacacaattgaccggagaagca

SEQ ID NO: 16349 - DNA, 23 bp, Artificial Sequence
  Description of Artificial Sequence: Synthetic primer
ctaggtgatggcagaagatttgc

SEQ ID NO: 16350 - DNA, 26 bp, Artificial Sequence
  Description of Artificial Sequence: Synthetic primer
cccaagggaatgataccaaaatcaga

SEQ ID NO: 16351 - DNA, 25 bp, Artificial Sequence
  Description of Artificial Sequence: Synthetic primer
tgtttcgtttccagtgtgaattctg

SEQ ID NO: 16352 - DNA, 21 bp, Artificial Sequence
  Description of Artificial Sequence: Synthetic primer
agtgtcatctgctcacatggt

SEQ ID NO: 16353 - DNA, 28 bp, Artificial Sequence
  Description of Artificial Sequence: Synthetic primer
gcatagctgcatggttattttgttagat

SEQ ID NO: 16354 - DNA, 28 bp, Artificial Sequence
  Description of Artificial Sequence: Synthetic primer
tccatcgtaggtgtatgtgtttcataat

SEQ ID NO: 16355 - DNA, 21 bp, Artificial Sequence
  Description of Artificial Sequence: Synthetic primer
gcagggtctgcaacatgaatt

SEQ ID NO: 16356 - DNA, 21 bp, Artificial Sequence
  Description of Artificial Sequence: Synthetic primer
aaaagcatccatcggtgcaca

SEQ ID NO: 16357 - DNA, 23 bp, Artificial Sequence
  Description of Artificial Sequence: Synthetic primer
cagacatgtcaattgcatccaca

SEQ ID NO: 16358 - DNA, 25 bp, Artificial Sequence
  Description of Artificial Sequence: Synthetic primer
agagagaaaaaggtgatctgaagca

SEQ ID NO: 16359 - DNA, 25 bp, Artificial Sequence
  Description of Artificial Sequence: Synthetic primer
cgtttgccttgagactgataaactg

SEQ ID NO: 16360 - DNA, 21 bp, Artificial Sequence
  Description of Artificial Sequence: Synthetic primer
acctccccataatgtgctgac

SEQ ID NO: 16361 - DNA, 28 bp, Artificial Sequence
  Description of Artificial Sequence: Synthetic primer
ccgatgataacgaaggaatatatgcagt

SEQ ID NO: 16362 - DNA, 22 bp, Artificial Sequence
  Description of Artificial Sequence: Synthetic primer
gcgtttctggcatagaccatgt

SEQ ID NO: 16363 - DNA, 29 bp, Artificial Sequence
  Description of Artificial Sequence: Synthetic primer
gactggagagtaaaacagatatacgtcac

SEQ ID NO: 16364 - DNA, 28 bp, Artificial Sequence
  Description of Artificial Sequence: Synthetic primer
tctctaaacagaaggcatataaatcgca

SEQ ID NO: 16365 - DNA, 21 bp, Artificial Sequence
  Description of Artificial Sequence: Synthetic primer
aatgcacttgtacaacgccaa

SEQ ID NO: 16366 - DNA, 21 bp, Artificial Sequence
  Description of Artificial Sequence: Synthetic primer
aaccggaaaggcctgatgttt

SEQ ID NO: 16367 - DNA, 26 bp, Artificial Sequence
  Description of Artificial Sequence: Synthetic primer
ggaatatggttcgtggaactaccttt

SEQ ID NO: 16368 - DNA, 27 bp, Artificial Sequence
  Description of Artificial Sequence: Synthetic primer
tcattagatctttcaagcatacagggt

SEQ ID NO: 16369 - DNA, 28 bp, Artificial Sequence
  Description of Artificial Sequence: Synthetic primer
acctcctagtagtacaagttactggatt

SEQ ID NO: 16370 - DNA, 23 bp, Artificial Sequence
  Description of Artificial Sequence: Synthetic primer
agtgccttatcaactccagtcac

SEQ ID NO: 16371 - DNA, 25 bp, Artificial Sequence
  Description of Artificial Sequence: Synthetic primer
gaggaatcccatgaactgtagtagc

SEQ ID NO: 16372 - DNA, 26 bp, Artificial Sequence
  Description of Artificial Sequence: Synthetic primer
ctagtatgctttctctgaacttgcct

SEQ ID NO: 16373 - DNA, 26 bp, Artificial Sequence
  Description of Artificial Sequence: Synthetic primer
cgcacaaatgttcaaatgacttactg

SEQ ID NO: 16374 - DNA, 25 bp, Artificial Sequence
  Description of Artificial Sequence: Synthetic primer
ggtaaaacctgtaccgtgatcttct

SEQ ID NO: 16375 - DNA, 25 bp, Artificial Sequence
  Description of Artificial Sequence: Synthetic primer
tttttatggaaaagggtcagctgtc

SEQ ID NO: 16376 - DNA, 28 bp, Artificial Sequence
  Description of Artificial Sequence: Synthetic primer
ccgtttaactgagaagttgacttgaaca

SEQ ID NO: 16377 - DNA, 25 bp, Artificial Sequence
  Description of Artificial Sequence: Synthetic primer
atactaaatctggctaggcacttgg

SEQ ID NO: 16378 - DNA, 23 bp, Artificial Sequence
  Description of Artificial Sequence: Synthetic primer
cataaaagcaggtagtggcactg

SEQ ID NO: 16379 - DNA, 23 bp, Artificial Sequence
  Description of Artificial Sequence: Synthetic primer
agtagtatcttgcacacgtctcg

SEQ ID NO: 16380 - DNA, 22 bp, Artificial Sequence
  Description of Artificial Sequence: Synthetic primer
ccatggcacaaggtactcctag

SEQ ID NO: 16381 - DNA, 23 bp, Artificial Sequence
  Description of Artificial Sequence: Synthetic primer
gacaaaggtcttccaacaacagg

SEQ ID NO: 16382 - DNA, 22 bp, Artificial Sequence
  Description of Artificial Sequence: Synthetic primer
ggtgacgatttccatgcatgtt

SEQ ID NO: 16383 - DNA, 22 bp, Artificial Sequence
  Description of Artificial Sequence: Synthetic primer
agagcttgggatttgcttgtcc

SEQ ID NO: 16384 - DNA, 25 bp, Artificial Sequence
  Description of Artificial Sequence: Synthetic primer
aaagcaggtgagacaaacactaaac

SEQ ID NO: 16385 - DNA, 28 bp, Artificial Sequence
  Description of Artificial Sequence: Synthetic primer
atttagtggaatgtatagactggacgac

SEQ ID NO: 16386 - DNA, 24 bp, Artificial Sequence
  Description of Artificial Sequence: Synthetic primer
acttcctcatagggatgtcactgt

SEQ ID NO: 16387 - DNA, 22 bp, Artificial Sequence
  Description of Artificial Sequence: Synthetic primer
tggtgaaaccgagaatgcgtta

SEQ ID NO: 16388 - DNA, 26 bp, Artificial Sequence
  Description of Artificial Sequence: Synthetic primer
atgtcactgcatattctgtcttcatg

SEQ ID NO: 16389 - DNA, 22 bp, Artificial Sequence
  Description of Artificial Sequence: Synthetic primer
cctagcacacaatgcacagaac

SEQ ID NO: 16390 - DNA, 23 bp, Artificial Sequence
  Description of Artificial Sequence: Synthetic primer
gcgggcctaaattaggagatagg

SEQ ID NO: 16391 - DNA, 28 bp, Artificial Sequence
  Description of Artificial Sequence: Synthetic primer
cctttaaagcatattcatggagggcata

SEQ ID NO: 16392 - DNA, 26 bp, Artificial Sequence
  Description of Artificial Sequence: Synthetic primer
catatgtgtgcctttggacttctaca

SEQ ID NO: 16393 - DNA, 24 bp, Artificial Sequence
  Description of Artificial Sequence: Synthetic primer
gggtattcacaaggtaaggtaggg

SEQ ID NO: 16394 - DNA, 28 bp, Artificial Sequence
  Description of Artificial Sequence: Synthetic primer
gtcctgatttattccctattgtcaggtt

SEQ ID NO: 16395 - DNA, 27 bp, Artificial Sequence
  Description of Artificial Sequence: Synthetic primer
acaagtcaatggatccaaaggaattca

SEQ ID NO: 16396 - DNA, 21 bp, Artificial Sequence
  Description of Artificial Sequence: Synthetic primer
aattttgatgccgtcgtcacc

SEQ ID NO: 16397 - DNA, 27 bp, Artificial Sequence
  Description of Artificial Sequence: Synthetic primer
tggagaacttaatcggatgggatattc

SEQ ID NO: 16398 - DNA, 22 bp, Artificial Sequence
  Description of Artificial Sequence: Synthetic primer
aaccacaagttactgctcctgt

SEQ ID NO: 16399 - DNA, 22 bp, Artificial Sequence
  Description of Artificial Sequence: Synthetic primer
tattggtgactaccgagtggct

SEQ ID NO: 16400 - DNA, 24 bp, Artificial Sequence
  Description of Artificial Sequence: Synthetic primer
ggcacctgtagtctagtacaactc

SEQ ID NO: 16401 - DNA, 25 bp, Artificial Sequence
  Description of Artificial Sequence: Synthetic primer
ccagcgggtcttgaaatatgataac

SEQ ID NO: 16402 - DNA, 26 bp, Artificial Sequence
  Description of Artificial Sequence: Synthetic primer
agctttagagtgtctgaatcaggaac

SEQ ID NO: 16403 - DNA, 28 bp, Artificial Sequence
  Description of Artificial Sequence: Synthetic primer
agtggtacctcggtctaattattttcag

SEQ ID NO: 16404 - DNA, 28 bp, Artificial Sequence
  Description of Artificial Sequence: Synthetic primer
acactcttgatttcctcagtggataaaa

SEQ ID NO: 16405 - DNA, 21 bp, Artificial Sequence
  Description of Artificial Sequence: Synthetic primer
aagatgcgacaaacggaggtc

SEQ ID NO: 16406 - DNA, 25 bp, Artificial Sequence
  Description of Artificial Sequence: Synthetic primer
agatcaactcgtcttctttggcaat

SEQ ID NO: 16407 - DNA, 30 bp, Artificial Sequence
  Description of Artificial Sequence: Synthetic primer
acagtcaaacaagaaattaatcaaggatgc

SEQ ID NO: 16408 - DNA, 26 bp, Artificial Sequence
  Description of Artificial Sequence: Synthetic primer
ccttgcagctgttaaagcatatagtg

SEQ ID NO: 16409 - DNA, 27 bp, Artificial Sequence
  Description of Artificial Sequence: Synthetic primer
tgttatatgaaccttggaaatgcaagc

SEQ ID NO: 16410 - DNA, 21 bp, Artificial Sequence
  Description of Artificial Sequence: Synthetic primer
atcatgcgctgagacatccag

SEQ ID NO: 16411 - DNA, 25 bp, Artificial Sequence
  Description of Artificial Sequence: Synthetic primer
accacttctgacaatgtaatgcatg

SEQ ID NO: 16412 - DNA, 22 bp, Artificial Sequence
  Description of Artificial Sequence: Synthetic primer
acaacgcatttagctcttgctg

SEQ ID NO: 16413 - DNA, 22 bp, Artificial Sequence
  Description of Artificial Sequence: Synthetic primer
atctcctagtagcgtctggtga

SEQ ID NO: 16414 - DNA, 21 bp, Artificial Sequence
  Description of Artificial Sequence: Synthetic primer
ccttagctgctgcatctgttg

SEQ ID NO: 16415 - DNA, 21 bp, Artificial Sequence
  Description of Artificial Sequence: Synthetic primer
atggccgcctgatagtcagta

SEQ ID NO: 16416 - DNA, 20 bp, Artificial Sequence
  Description of Artificial Sequence: Synthetic primer
gttgggcgttgtaacgttgg

SEQ ID NO: 16417 - DNA, 25 bp, Artificial Sequence
  Description of Artificial Sequence: Synthetic primer
tgagatgtgcaagttcatcctatgg

SEQ ID NO: 16418 - DNA, 28 bp, Artificial Sequence
  Description of Artificial Sequence: Synthetic primer
gtcatattccaactcgtacttgtagcat

SEQ ID NO: 16419 - DNA, 25 bp, Artificial Sequence
  Description of Artificial Sequence: Synthetic primer
caattgaggtgtgttcaacagtctt

SEQ ID NO: 16420 - DNA, 21 bp, Artificial Sequence
  Description of Artificial Sequence: Synthetic primer
tcccgaagggtcaatacttgg

SEQ ID NO: 16421 - DNA, 21 bp, Artificial Sequence
  Description of Artificial Sequence: Synthetic primer
tgtccggaaaccagttgtctg

SEQ ID NO: 16422 - DNA, 26 bp, Artificial Sequence
  Description of Artificial Sequence: Synthetic primer
cgcagatttcttggtcatgaattgtc

SEQ ID NO: 16423 - DNA, 23 bp, Artificial Sequence
  Description of Artificial Sequence: Synthetic primer
ccagtgcaggtttacacattagc

SEQ ID NO: 16424 - DNA, 21 bp, Artificial Sequence
  Description of Artificial Sequence: Synthetic primer
acgggccacgtacacatttta

SEQ ID NO: 16425 - DNA, 29 bp, Artificial Sequence
  Description of Artificial Sequence: Synthetic primer
aggacgtatatttctgtcttaatgtctct

SEQ ID NO: 16426 - DNA, 28 bp, Artificial Sequence
  Description of Artificial Sequence: Synthetic primer
agctccactgctcttgttattttagaaa

SEQ ID NO: 16427 - DNA, 28 bp, Artificial Sequence
  Description of Artificial Sequence: Synthetic primer
tacatgatagcactagtttgaagcagat

SEQ ID NO: 16428 - DNA, 22 bp, Artificial Sequence
  Description of Artificial Sequence: Synthetic primer
gcagcttagtccagaaactcct

SEQ ID NO: 16429 - DNA, 29 bp, Artificial Sequence
  Description of Artificial Sequence: Synthetic primer
ccggtggttaaaacattcttatgcataaa

SEQ ID NO: 16430 - DNA, 27 bp, Artificial Sequence
  Description of Artificial Sequence: Synthetic primer
aatagtatgatttttgatggccaaccg

SEQ ID NO: 16431 - DNA, 21 bp, Artificial Sequence
  Description of Artificial Sequence: Synthetic primer
taattcgtgcgagccattcgt

SEQ ID NO: 16432 - DNA, 28 bp, Artificial Sequence
  Description of Artificial Sequence: Synthetic primer
tacagactacatacgtgaacaatgatcg

SEQ ID NO: 16433 - DNA, 28 bp, Artificial Sequence
  Description of Artificial Sequence: Synthetic primer
acctagagatcaaagtttttctggaagt

SEQ ID NO: 16434 - DNA, 22 bp, Artificial Sequence
  Description of Artificial Sequence: Synthetic primer
caccaactctcaccttcaaagc

SEQ ID NO: 16435 - DNA, 21 bp, Artificial Sequence
  Description of Artificial Sequence: Synthetic primer
gcaacgtatgtcaccttggct

SEQ ID NO: 16436 - DNA, 24 bp, Artificial Sequence
  Description of Artificial Sequence: Synthetic primer
tttatatgcggtgcagacaaactg

SEQ ID NO: 16437 - DNA, 25 bp, Artificial Sequence
  Description of Artificial Sequence: Synthetic primer
agctgcacggtatgaatgtaagatt

SEQ ID NO: 16438 - DNA, 26 bp, Artificial Sequence
  Description of Artificial Sequence: Synthetic primer
tctacagtagatgagagaaggaccag

SEQ ID NO: 16439 - DNA, 21 bp, Artificial Sequence
  Description of Artificial Sequence: Synthetic primer
tgcctcttacgcacctaccta

SEQ ID NO: 16440 - DNA, 28 bp, Artificial Sequence
  Description of Artificial Sequence: Synthetic primer
tgtagtaggattgtatatgatggcagga

SEQ ID NO: 16441 - DNA, 28 bp, Artificial Sequence
  Description of Artificial Sequence: Synthetic primer
tgttattcttgttctatggctctgttgt

SEQ ID NO: 16442 - DNA, 21 bp, Artificial Sequence
  Description of Artificial Sequence: Synthetic primer
tgctgtcctgaaggaatgtgg

SEQ ID NO: 16443 - DNA, 23 bp, Artificial Sequence
  Description of Artificial Sequence: Synthetic primer
aagaagcacttgctttcatacgg

SEQ ID NO: 16444 - DNA, 27 bp, Artificial Sequence
  Description of Artificial Sequence: Synthetic primer
tgatatgtcttcggacttgatgtttgt

SEQ ID NO: 16445 - DNA, 24 bp, Artificial Sequence
  Description of Artificial Sequence: Synthetic primer
actaggcagaagtactagcttgga

SEQ ID NO: 16446 - DNA, 23 bp, Artificial Sequence
  Description of Artificial Sequence: Synthetic primer
tggatctgtgttttccatgcgta

SEQ ID NO: 16447 - DNA, 24 bp, Artificial Sequence
  Description of Artificial Sequence: Synthetic primer
gacgtttaagctcttggatttgct

SEQ ID NO: 16448 - DNA, 19 bp, Artificial Sequence
  Description of Artificial Sequence: Synthetic primer
ccctgcacgctccttacat

SEQ ID NO: 16449 - DNA, 21 bp, Artificial Sequence
  Description of Artificial Sequence: Synthetic primer
cctgccgctagcaattgttac

SEQ ID NO: 16450 - DNA, 27 bp, Artificial Sequence
  Description of Artificial Sequence: Synthetic primer
ctgaaaaggaagagagtatcagtcagt

SEQ ID NO: 16451 - DNA, 25 bp, Artificial Sequence
  Description of Artificial Sequence: Synthetic primer
catttcagacctgaagaagcatctg

SEQ ID NO: 16452 - DNA, 19 bp, Artificial Sequence
  Description of Artificial Sequence: Synthetic primer
ggtgggaggcgaggataac

SEQ ID NO: 16453 - DNA, 19 bp, Artificial Sequence
  Description of Artificial Sequence: Synthetic primer
cgtggatcgcctgtcatca

SEQ ID NO: 16454 - DNA, 27 bp, Artificial Sequence
  Description of Artificial Sequence: Synthetic primer
actgttaattttcatggcatagtcagc

SEQ ID NO: 16455 - DNA, 26 bp, Artificial Sequence
  Description of Artificial Sequence: Synthetic primer
catcgtagttgtctgcaagatgaaag

SEQ ID NO: 16456 - DNA, 27 bp, Artificial Sequence
  Description of Artificial Sequence: Synthetic primer
agctagcctattgtatttatgggcttt

SEQ ID NO: 16457 - DNA, 21 bp, Artificial Sequence
  Description of Artificial Sequence: Synthetic primer
accaatggacctttcagtgga

SEQ ID NO: 16458 - DNA, 26 bp, Artificial Sequence
  Description of Artificial Sequence: Synthetic primer
accacaaggattttgatgtcactgta

SEQ ID NO: 16459 - DNA, 23 bp, Artificial Sequence
  Description of Artificial Sequence: Synthetic primer
ggtataaagggcccaaaagctca

SEQ ID NO: 16460 - DNA, 28 bp, Artificial Sequence
  Description of Artificial Sequence: Synthetic primer
agctcatatttctctagcctttgaatct

SEQ ID NO: 16461 - DNA, 27 bp, Artificial Sequence
  Description of Artificial Sequence: Synthetic primer
gccaggtatataaaagggtagccttac

SEQ ID NO: 16462 - DNA, 22 bp, Artificial Sequence
  Description of Artificial Sequence: Synthetic primer
cacaagctccaaggagaaggtt

SEQ ID NO: 16463 - DNA, 25 bp, Artificial Sequence
  Description of Artificial Sequence: Synthetic primer
ggattaggttgtggcgatatgattg

SEQ ID NO: 16464 - DNA, 25 bp, Artificial Sequence
  Description of Artificial Sequence: Synthetic primer
tgataaacaataccacaaccctgga

SEQ ID NO: 16465 - DNA, 25 bp, Artificial Sequence
  Description of Artificial Sequence: Synthetic primer
agacaaataagcaccgatgttgatg

SEQ ID NO: 16466 - DNA, 27 bp, Artificial Sequence
  Description of Artificial Sequence: Synthetic primer
aggcacaagagaatcaacttaaggaaa

SEQ ID NO: 16467 - DNA, 21 bp, Artificial Sequence
  Description of Artificial Sequence: Synthetic primer
gagactagacgtccggaacga

SEQ ID NO: 16468 - DNA, 26 bp, Artificial Sequence
  Description of Artificial Sequence: Synthetic primer
attgcaggattcacattacattggtt

SEQ ID NO: 16469 - DNA, 24 bp, Artificial Sequence
  Description of Artificial Sequence: Synthetic primer
agtagaactagtatgcaccacagc

SEQ ID NO: 16470 - DNA, 22 bp, Artificial Sequence
  Description of Artificial Sequence: Synthetic primer
cgtctctcataggcggctacta

SEQ ID NO: 16471 - DNA, 21 bp, Artificial Sequence
  Description of Artificial Sequence: Synthetic primer
ctcaatgtgaatcgcgcgatc

SEQ ID NO: 16472 - DNA, 26 bp, Artificial Sequence
  Description of Artificial Sequence: Synthetic primer
agaaaatccatttcgctggtgatcta

SEQ ID NO: 16473 - DNA, 21 bp, Artificial Sequence
  Description of Artificial Sequence: Synthetic primer
ctaacaggtccagagcatgcc

SEQ ID NO: 16474 - DNA, 22 bp, Artificial Sequence
  Description of Artificial Sequence: Synthetic primer
agtattttgctttggcccgtac

SEQ ID NO: 16475 - DNA, 23 bp, Artificial Sequence
  Description of Artificial Sequence: Synthetic primer
gaggtgcttagcaaaactgaaca

SEQ ID NO: 16476 - DNA, 28 bp, Artificial Sequence
  Description of Artificial Sequence: Synthetic primer
aaatgctaactactatcggtgccttaat

SEQ ID NO: 16477 - DNA, 22 bp, Artificial Sequence
  Description of Artificial Sequence: Synthetic primer
gcagatcattgcgtacagttcc

SEQ ID NO: 16478 - DNA, 26 bp, Artificial Sequence
  Description of Artificial Sequence: Synthetic primer
agtctatgtgctgtcatagcaacaaa

SEQ ID NO: 16479 - DNA, 22 bp, Artificial Sequence
  Description of Artificial Sequence: Synthetic primer
ggccatgattcttcccctgatc

SEQ ID NO: 16480 - DNA, 25 bp, Artificial Sequence
  Description of Artificial Sequence: Synthetic primer
ttcttgcgaaacttataagcccatg

SEQ ID NO: 16481 - DNA, 25 bp, Artificial Sequence
  Description of Artificial Sequence: Synthetic primer
ctctcgtgatagtctaaaccactcg

SEQ ID NO: 16482 - DNA, 28 bp, Artificial Sequence
  Description of Artificial Sequence: Synthetic primer
agacgttggatcaaaagtgaatcctaaa

SEQ ID NO: 16483 - DNA, 27 bp, Artificial Sequence
  Description of Artificial Sequence: Synthetic primer
atgtgtgttttattgttttgggctgaa

SEQ ID NO: 16484 - DNA, 21 bp, Artificial Sequence
  Description of Artificial Sequence: Synthetic primer
aaaacagcgggcagctaattg

SEQ ID NO: 16485 - DNA, 22 bp, Artificial Sequence
  Description of Artificial Sequence: Synthetic primer
attactcctgcacaagcctgat

SEQ ID NO: 16486 - DNA, 23 bp, Artificial Sequence
  Description of Artificial Sequence: Synthetic primer
gcttagcaagcgagactaactca

SEQ ID NO: 16487 - DNA, 28 bp, Artificial Sequence
  Description of Artificial Sequence: Synthetic primer
actacatccttttaagtcgcattctttg

SEQ ID NO: 16488 - DNA, 24 bp, Artificial Sequence
  Description of Artificial Sequence: Synthetic primer
ccgtctgattttggtagacaagga

SEQ ID NO: 16489 - DNA, 19 bp, Artificial Sequence
  Description of Artificial Sequence: Synthetic primer
gctgcaatccctgtgtggt

SEQ ID NO: 16490 - DNA, 23 bp, Artificial Sequence
  Description of Artificial Sequence: Synthetic primer
gtctcaggataggatggttggtc

SEQ ID NO: 16491 - DNA, 26 bp, Artificial Sequence
  Description of Artificial Sequence: Synthetic primer
ggaagcaaaggaatgctctcattttt

SEQ ID NO: 16492 - DNA, 27 bp, Artificial Sequence
  Description of Artificial Sequence: Synthetic primer
agacaatagaacactcatggaactcat

SEQ ID NO: 16493 - DNA, 21 bp, Artificial Sequence
  Description of Artificial Sequence: Synthetic primer
ttggaaatttgccctcggaca

SEQ ID NO: 16494 - DNA, 21 bp, Artificial Sequence
  Description of Artificial Sequence: Synthetic primer
atgatcagaggatggccgtca

SEQ ID NO: 16495 - DNA, 21 bp, Artificial Sequence
  Description of Artificial Sequence: Synthetic primer
tagaaccgacatctgggcaca

SEQ ID NO: 16496 - DNA, 22 bp, Artificial Sequence
  Description of Artificial Sequence: Synthetic primer
cctgctacactagagccaatgc

SEQ ID NO: 16497 - DNA, 26 bp, Artificial Sequence
  Description of Artificial Sequence: Synthetic primer
accatttgatctttcagcatacaacc

SEQ ID NO: 16498 - DNA, 26 bp, Artificial Sequence
  Description of Artificial Sequence: Synthetic primer
gagaatcatcatttgtgcatcaccat

SEQ ID NO: 16499 - DNA, 22 bp, Artificial Sequence
  Description of Artificial Sequence: Synthetic primer
cgggagggttattagtgaagcg

SEQ ID NO: 16500 - DNA, 21 bp, Artificial Sequence
  Description of Artificial Sequence: Synthetic primer
gctccgtgtagtccttgtcat

SEQ ID NO: 16501 - DNA, 28 bp, Artificial Sequence
  Description of Artificial Sequence: Synthetic primer
cagaacacacatgatgtctagaagaaca

SEQ ID NO: 16502 - DNA, 25 bp, Artificial Sequence
  Description of Artificial Sequence: Synthetic primer
ccaacattgcaaatcaagactacca

SEQ ID NO: 16503 - DNA, 23 bp, Artificial Sequence
  Description of Artificial Sequence: Synthetic primer
acgaagaagaatttccccagtgt

SEQ ID NO: 16504 - DNA, 25 bp, Artificial Sequence
  Description of Artificial Sequence: Synthetic primer
ggatacagctaaggctagaactgag

SEQ ID NO: 16505 - DNA, 21 bp, Artificial Sequence
  Description of Artificial Sequence: Synthetic primer
atccccttaccggctgatctc

SEQ ID NO: 16506 - DNA, 22 bp, Artificial Sequence
  Description of Artificial Sequence: Synthetic primer
agaggatcctcactgtttgctc

SEQ ID NO: 16507 - DNA, 24 bp, Artificial Sequence
  Description of Artificial Sequence: Synthetic primer
gagcttattccacgaaagcaaaga

SEQ ID NO: 16508 - DNA, 23 bp, Artificial Sequence
  Description of Artificial Sequence: Synthetic primer
agcattctctatgctgtcagctt

SEQ ID NO: 16509 - DNA, 23 bp, Artificial Sequence
  Description of Artificial Sequence: Synthetic primer
tgcagcatctccaggatttagtc

SEQ ID NO: 16510 - DNA, 23 bp, Artificial Sequence
  Description of Artificial Sequence: Synthetic primer
ctctcgctgacaaggaaagagat

SEQ ID NO: 16511 - DNA, 28 bp, Artificial Sequence
  Description of Artificial Sequence: Synthetic primer
tcgtagaagatgcttagtatccttccat

SEQ ID NO: 16512 - DNA, 26 bp, Artificial Sequence
  Description of Artificial Sequence: Synthetic primer
ggaaatggtgcctcttcaacttaatt

SEQ ID NO: 16513 - DNA, 21 bp, Artificial Sequence
  Description of Artificial Sequence: Synthetic primer
ttggtgctgatggtgatggtt

SEQ ID NO: 16514 - DNA, 23 bp, Artificial Sequence
  Description of Artificial Sequence: Synthetic primer
ggacatcaagcgcaaggttctta

SEQ ID NO: 16515 - DNA, 27 bp, Artificial Sequence
  Description of Artificial Sequence: Synthetic primer
ggtacacggtttcaattatccaaaagg

SEQ ID NO: 16516 - DNA, 21 bp, Artificial Sequence
  Description of Artificial Sequence: Synthetic primer
actggtacgaccgttctgtca

SEQ ID NO: 16517 - DNA, 25 bp, Artificial Sequence
  Description of Artificial Sequence: Synthetic primer
actagctagttggtgtggtagtttg

SEQ ID NO: 16518 - DNA, 22 bp, Artificial Sequence
  Description of Artificial Sequence: Synthetic primer
ggtggaatcgagctgaatccat

SEQ ID NO: 16519 - DNA, 23 bp, Artificial Sequence
  Description of Artificial Sequence: Synthetic primer
aaaattccaaggcgcatatctcc

SEQ ID NO: 16520 - DNA, 22 bp, Artificial Sequence
  Description of Artificial Sequence: Synthetic primer
caccaggcttactaccggtaga

SEQ ID NO: 16521 - DNA, 25 bp, Artificial Sequence
  Description of Artificial Sequence: Synthetic primer
ggaatgttgttgaaataacccgaca

SEQ ID NO: 16522 - DNA, 29 bp, Artificial Sequence
  Description of Artificial Sequence: Synthetic primer
atgcaaatccagatggatgattacaatac

SEQ ID NO: 16523 - DNA, 25 bp, Artificial Sequence
  Description of Artificial Sequence: Synthetic primer
aagctacaaggcatggattaatcct

SEQ ID NO: 16524 - DNA, 26 bp, Artificial Sequence
  Description of Artificial Sequence: Synthetic primer
gcgcttaagctacagtatcaagtttc

SEQ ID NO: 16525 - DNA, 21 bp, Artificial Sequence
  Description of Artificial Sequence: Synthetic primer
cacggtctggctactctgaag

SEQ ID NO: 16526 - DNA, 23 bp, Artificial Sequence
  Description of Artificial Sequence: Synthetic primer
cgagttttgaaatcaccgcatcc

SEQ ID NO: 16527 - DNA, 21 bp, Artificial Sequence
  Description of Artificial Sequence: Synthetic primer
gtgacacaggccatcaggaaa

SEQ ID NO: 16528 - DNA, 28 bp, Artificial Sequence
  Description of Artificial Sequence: Synthetic primer
gcatggtcttcagtaatggttttaatgc

SEQ ID NO: 16529 - DNA, 21 bp, Artificial Sequence
  Description of Artificial Sequence: Synthetic primer
gaggatctcctcagcaccaga

SEQ ID NO: 16530 - DNA, 21 bp, Artificial Sequence
  Description of Artificial Sequence: Synthetic primer
agtcctgtacgtagccgttca

SEQ ID NO: 16531 - DNA, 22 bp, Artificial Sequence
  Description of Artificial Sequence: Synthetic primer
accaactcagcacaacactctt

SEQ ID NO: 16532 - DNA, 21 bp, Artificial Sequence
  Description of Artificial Sequence: Synthetic primer
tgagggagggtatgaggaagc

SEQ ID NO: 16533 - DNA, 27 bp, Artificial Sequence
  Description of Artificial Sequence: Synthetic primer
gctagtcacctatctgaacagaaggta

SEQ ID NO: 16534 - DNA, 20 bp, Artificial Sequence
  Description of Artificial Sequence: Synthetic primer
gcaccactatcccctccaat

SEQ ID NO: 16535 - DNA, 27 bp, Artificial Sequence
  Description of Artificial Sequence: Synthetic primer
caacaaatacagggacaaactggtagt

SEQ ID NO: 16536 - DNA, 22 bp, Artificial Sequence
  Description of Artificial Sequence: Synthetic primer
gcaactggaggaactgaatggt

SEQ ID NO: 16537 - DNA, 26 bp, Artificial Sequence
  Description of Artificial Sequence: Synthetic primer
gatgaaagttaggagaggactagtcg

SEQ ID NO: 16538 - DNA, 24 bp, Artificial Sequence
  Description of Artificial Sequence: Synthetic primer
tgatgtacttcgcctgtactttgc

SEQ ID NO: 16539 - DNA, 22 bp, Artificial Sequence
  Description of Artificial Sequence: Synthetic primer
tggtatgaagaaggctgggaac

SEQ ID NO: 16540 - DNA, 26 bp, Artificial Sequence
  Description of Artificial Sequence: Synthetic primer
gcatcagttcatgtcaaactttgtcg

SEQ ID NO: 16541 - DNA, 24 bp, Artificial Sequence
  Description of Artificial Sequence: Synthetic primer
aaatacagcagaggcaatatccct

SEQ ID NO: 16542 - DNA, 21 bp, Artificial Sequence
  Description of Artificial Sequence: Synthetic primer
catgctggtctgtgcttcctt

SEQ ID NO: 16543 - DNA, 21 bp, Artificial Sequence
  Description of Artificial Sequence: Synthetic primer
ccgaactcttaagcaggccat

SEQ ID NO: 16544 - DNA, 21 bp, Artificial Sequence
  Description of Artificial Sequence: Synthetic primer
gacggttttgcagttcaaggg

SEQ ID NO: 16545 - DNA, 24 bp, Artificial Sequence
  Description of Artificial Sequence: Synthetic primer
gttcaggcttgaagttgaagagag

SEQ ID NO: 16546 - DNA, 21 bp, Artificial Sequence
  Description of Artificial Sequence: Synthetic primer
agctccatgcgcttaactgat

SEQ ID NO: 16547 - DNA, 21 bp, Artificial Sequence
  Description of Artificial Sequence: Synthetic primer
cgttccggcagttgacatact

SEQ ID NO: 16548 - DNA, 23 bp, Artificial Sequence
  Description of Artificial Sequence: Synthetic primer
ccaccaccttctaacatgtttgc

SEQ ID NO: 16549 - DNA, 21 bp, Artificial Sequence
  Description of Artificial Sequence: Synthetic primer
cgcagctctctctgcatactg

SEQ ID NO: 16550 - DNA, 19 bp, Artificial Sequence
  Description of Artificial Sequence: Synthetic primer
aggattgcctttgcgcagt

SEQ ID NO: 16551 - DNA, 23 bp, Artificial Sequence
  Description of Artificial Sequence: Synthetic primer
ccacatcctcttctgctcatcaa

SEQ ID NO: 16552 - DNA, 28 bp, Artificial Sequence
  Description of Artificial Sequence: Synthetic primer
acgtacaaacagagtgagtattgtttca

SEQ ID NO: 16553 - DNA, 24 bp, Artificial Sequence
  Description of Artificial Sequence: Synthetic primer
gctatccactccaagtatcaggtt

SEQ ID NO: 16554 - DNA, 27 bp, Artificial Sequence
  Description of Artificial Sequence: Synthetic primer
tgttaagcatagtagttcaagctcgac

SEQ ID NO: 16555 - DNA, 28 bp, Artificial Sequence
  Description of Artificial Sequence: Synthetic primer
gcaagctctaaatacaagaagctgtaaa

SEQ ID NO: 16556 - DNA, 22 bp, Artificial Sequence
  Description of Artificial Sequence: Synthetic primer
cgggtgcacataacaaatgctt

SEQ ID NO: 16557 - DNA, 26 bp, Artificial Sequence
  Description of Artificial Sequence: Synthetic primer
ataaccaatagcaccacaaagtatgc

SEQ ID NO: 16558 - DNA, 21 bp, Artificial Sequence
  Description of Artificial Sequence: Synthetic primer
ctcgtcgtccatcttctccag

SEQ ID NO: 16559 - DNA, 24 bp, Artificial Sequence
  Description of Artificial Sequence: Synthetic primer
tccagctctgattattccacatcc

SEQ ID NO: 16560 - DNA, 23 bp, Artificial Sequence
  Description of Artificial Sequence: Synthetic primer
gcgaggaggatcttcctctagtt

SEQ ID NO: 16561 - DNA, 24 bp, Artificial Sequence
  Description of Artificial Sequence: Synthetic primer
cgtagagaatttggctgggattca

SEQ ID NO: 16562 - DNA, 25 bp, Artificial Sequence
  Description of Artificial Sequence: Synthetic primer
ggaaaactctgatggtggatatcct

SEQ ID NO: 16563 - DNA, 22 bp, Artificial Sequence
  Description of Artificial Sequence: Synthetic primer
agcaaatgtccacaggtacaca

SEQ ID NO: 16564 - DNA, 23 bp, Artificial Sequence
  Description of Artificial Sequence: Synthetic primer
tatcatgagaaacggtggcacga

SEQ ID NO: 16565 - DNA, 27 bp, Artificial Sequence
  Description of Artificial Sequence: Synthetic primer
atagtttgtagatccgaatctggtgaa

SEQ ID NO: 16566 - DNA, 21 bp, Artificial Sequence
  Description of Artificial Sequence: Synthetic primer
gtcaccctgagcaaggaacag

SEQ ID NO: 16567 - DNA, 28 bp, Artificial Sequence
  Description of Artificial Sequence: Synthetic primer
aattacagaagaattagttgccacttcc

SEQ ID NO: 16568 - DNA, 28 bp, Artificial Sequence
  Description of Artificial Sequence: Synthetic primer
aacacatggattcagtaatgatttcagc

SEQ ID NO: 16569 - DNA, 21 bp, Artificial Sequence
  Description of Artificial Sequence: Synthetic primer
gtagcactcgacgctatctgc

SEQ ID NO: 16570 - DNA, 19 bp, Artificial Sequence
  Description of Artificial Sequence: Synthetic primer
tcaggttgtcgacgtcgtt

SEQ ID NO: 16571 - DNA, 23 bp, Artificial Sequence
  Description of Artificial Sequence: Synthetic primer
aaaacgacgtgacaatctaaggc

SEQ ID NO: 16572 - DNA, 25 bp, Artificial Sequence
  Description of Artificial Sequence: Synthetic primer
ctcaacctgtaaacctttgtttgct

SEQ ID NO: 16573 - DNA, 21 bp, Artificial Sequence
  Description of Artificial Sequence: Synthetic primer
cagtcgaagaggccaatccat

SEQ ID NO: 16574 - DNA, 24 bp, Artificial Sequence
  Description of Artificial Sequence: Synthetic primer
gcacaatacatgggtgagaacctt

SEQ ID NO: 16575 - DNA, 21 bp, Artificial Sequence
  Description of Artificial Sequence: Synthetic primer
gatgttgatctgccgccttct

SEQ ID NO: 16576 - DNA, 21 bp, Artificial Sequence
  Description of Artificial Sequence: Synthetic primer
tcgccagcttcataagaccaa

SEQ ID NO: 16577 - DNA, 21 bp, Artificial Sequence
  Description of Artificial Sequence: Synthetic primer
tattctggaccaagcggatcg

SEQ ID NO: 16578 - DNA, 19 bp, Artificial Sequence
  Description of Artificial Sequence: Synthetic primer
cctggagcttgagcttccc

SEQ ID NO: 16579 - DNA, 24 bp, Artificial Sequence
  Description of Artificial Sequence: Synthetic primer
acaaacatgaaaggaggttaccgt

SEQ ID NO: 16580 - DNA, 28 bp, Artificial Sequence
  Description of Artificial Sequence: Synthetic primer
agtctaatgacactttcccctttacaat

SEQ ID NO: 16581 - DNA, 21 bp, Artificial Sequence
  Description of Artificial Sequence: Synthetic primer
ccgacattgtgccatttgagc

SEQ ID NO: 16582 - DNA, 22 bp, Artificial Sequence
  Description of Artificial Sequence: Synthetic primer
cgttacaatggtggatgccttc

SEQ ID NO: 16583 - DNA, 25 bp, Artificial Sequence
  Description of Artificial Sequence: Synthetic primer
aattccaccatggcaaagtttacag

SEQ ID NO: 16584 - DNA, 26 bp, Artificial Sequence
  Description of Artificial Sequence: Synthetic primer
acactaatcttgaccatggaatggaa

SEQ ID NO: 16585 - DNA, 28 bp, Artificial Sequence
  Description of Artificial Sequence: Synthetic primer
aagaattgtttgattccctctaaggtca

SEQ ID NO: 16586 - DNA, 25 bp, Artificial Sequence
  Description of Artificial Sequence: Synthetic primer
aagacacagaaagttcgtatcccaa

SEQ ID NO: 16587 - DNA, 25 bp, Artificial Sequence
  Description of Artificial Sequence: Synthetic primer
tcaaaatctaatctgggtggtcctc

SEQ ID NO: 16588 - DNA, 25 bp, Artificial Sequence
  Description of Artificial Sequence: Synthetic primer
cttcccttattcgtgagaactcgat

SEQ ID NO: 16589 - DNA, 26 bp, Artificial Sequence
  Description of Artificial Sequence: Synthetic primer
aacttgtcagacacctattatgtggt

SEQ ID NO: 16590 - DNA, 22 bp, Artificial Sequence
  Description of Artificial Sequence: Synthetic primer
tcgaggcgctctattgatcttc

SEQ ID NO: 16591 - DNA, 27 bp, Artificial Sequence
  Description of Artificial Sequence: Synthetic primer
gctgtatgatgactcgagaagagagta

SEQ ID NO: 16592 - DNA, 21 bp, Artificial Sequence
  Description of Artificial Sequence: Synthetic primer
ggcctacttcacgctcatctc

SEQ ID NO: 16593 - DNA, 21 bp, Artificial Sequence
  Description of Artificial Sequence: Synthetic primer
ctctgtctcgttgaggcactt

SEQ ID NO: 16594 - DNA, 19 bp, Artificial Sequence
  Description of Artificial Sequence: Synthetic primer
atcccgacaccaaggtcgt

SEQ ID NO: 16595 - DNA, 20 bp, Artificial Sequence
  Description of Artificial Sequence: Synthetic primer
cactctttgttgccctgagc

SEQ ID NO: 16596 - DNA, 25 bp, Artificial Sequence
  Description of Artificial Sequence: Synthetic primer
tctttcactagctagaatcccctga

SEQ ID NO: 16597 - DNA, 24 bp, Artificial Sequence
  Description of Artificial Sequence: Synthetic primer
tcaacttcagactgtagagacagc

SEQ ID NO: 16598 - DNA, 24 bp, Artificial Sequence
  Description of Artificial Sequence: Synthetic primer
gggtcatcaagaaatgggagatca

SEQ ID NO: 16599 - DNA, 21 bp, Artificial Sequence
  Description of Artificial Sequence: Synthetic primer
gtaaacacaaggcccatggct

SEQ ID NO: 16600 - DNA, 26 bp, Artificial Sequence
  Description of Artificial Sequence: Synthetic primer
gtatacctttttaccctttcgggtga

SEQ ID NO: 16601 - DNA, 21 bp, Artificial Sequence
  Description of Artificial Sequence: Synthetic primer
agagaggagccatgcattgtg

SEQ ID NO: 16602 - DNA, 24 bp, Artificial Sequence
  Description of Artificial Sequence: Synthetic primer
tgaagaaatagtgcggactaccaa

SEQ ID NO: 16603 - DNA, 24 bp, Artificial Sequence
  Description of Artificial Sequence: Synthetic primer
gctacgcacctaccttcttcttac

SEQ ID NO: 16604 - DNA, 21 bp, Artificial Sequence
  Description of Artificial Sequence: Synthetic primer
tacacatgctgctggaattgc

SEQ ID NO: 16605 - DNA, 21 bp, Artificial Sequence
  Description of Artificial Sequence: Synthetic primer
aaaactgcaccgacaaagctg

SEQ ID NO: 16606 - DNA, 21 bp, Artificial Sequence
  Description of Artificial Sequence: Synthetic primer
cactcacagagcacactccaa

SEQ ID NO: 16607 - DNA, 27 bp, Artificial Sequence
  Description of Artificial Sequence: Synthetic primer
aaatcagacatattattggaccgggaa

SEQ ID NO: 16608 - DNA, 21 bp, Artificial Sequence
  Description of Artificial Sequence: Synthetic primer
ctgagccgatgggagtcatac

SEQ ID NO: 16609 - DNA, 21 bp, Artificial Sequence
  Description of Artificial Sequence: Synthetic primer
tcagcgcacaagaaattggtc

SEQ ID NO: 16610 - DNA, 21 bp, Artificial Sequence
  Description of Artificial Sequence: Synthetic primer
cttcctcagcatttccaggca

SEQ ID NO: 16611 - DNA, 22 bp, Artificial Sequence
  Description of Artificial Sequence: Synthetic primer
gcgctacggaatgtaacaggta

SEQ ID NO: 16612 - DNA, 24 bp, Artificial Sequence
  Description of Artificial Sequence: Synthetic primer
tgcctttgaggtaactgtgaagtt

SEQ ID NO: 16613 - DNA, 21 bp, Artificial Sequence
  Description of Artificial Sequence: Synthetic primer
aagaccaagtgcatcgcctac

SEQ ID NO: 16614 - DNA, 21 bp, Artificial Sequence
  Description of Artificial Sequence: Synthetic primer
tctacccatgatgcagtggtg

SEQ ID NO: 16615 - DNA, 26 bp, Artificial Sequence
  Description of Artificial Sequence: Synthetic primer
gaaagtactaactggaggatcttcgg

SEQ ID NO: 16616 - DNA, 19 bp, Artificial Sequence
  Description of Artificial Sequence: Synthetic primer
ggagcggacgaatttcctg

SEQ ID NO: 16617 - DNA, 24 bp, Artificial Sequence
  Description of Artificial Sequence: Synthetic primer
ccagaaaggatggtaacaaaaccg

SEQ ID NO: 16618 - DNA, 21 bp, Artificial Sequence
  Description of Artificial Sequence: Synthetic primer
aggctgtagtgtctcgtgatg

SEQ ID NO: 16619 - DNA, 21 bp, Artificial Sequence
  Description of Artificial Sequence: Synthetic primer
gacttgtgggatccagggtac

SEQ ID NO: 16620 - DNA, 23 bp, Artificial Sequence
  Description of Artificial Sequence: Synthetic primer
acgtaaatgcctcttgacactca

SEQ ID NO: 16621 - DNA, 28 bp, Artificial Sequence
  Description of Artificial Sequence: Synthetic primer
tgtatctgatctggtatgtatccttcgt

SEQ ID NO: 16622 - DNA, 22 bp, Artificial Sequence
  Description of Artificial Sequence: Synthetic primer
gcaacttctgggattccagctt

SEQ ID NO: 16623 - DNA, 21 bp, Artificial Sequence
  Description of Artificial Sequence: Synthetic primer
ccagctccctcgtgaagaaat

SEQ ID NO: 16624 - DNA, 21 bp, Artificial Sequence
  Description of Artificial Sequence: Synthetic primer
tgtcatgccttgcgtacagaa

SEQ ID NO: 16625 - DNA, 23 bp, Artificial Sequence
  Description of Artificial Sequence: Synthetic primer
cgtcaaattaaggtgcagagagc

SEQ ID NO: 16626 - DNA, 21 bp, Artificial Sequence
  Description of Artificial Sequence: Synthetic primer
ttcccagcttcgtgtttcact

SEQ ID NO: 16627 - DNA, 21 bp, Artificial Sequence
  Description of Artificial Sequence: Synthetic primer
gacctccaccaccacttgtag

SEQ ID NO: 16628 - DNA, 22 bp, Artificial Sequence
  Description of Artificial Sequence: Synthetic primer
acaaacggaaccataagccatg

SEQ ID NO: 16629 - DNA, 23 bp, Artificial Sequence
  Description of Artificial Sequence: Synthetic primer
caacaccgaaatcagcaaccttt

SEQ ID NO: 16630 - DNA, 28 bp, Artificial Sequence
  Description of Artificial Sequence: Synthetic primer
tcatacactatgtagccaacaagatcat

SEQ ID NO: 16631 - DNA, 28 bp, Artificial Sequence
  Description of Artificial Sequence: Synthetic primer
agaaacggagacaaagatgatagagatg

SEQ ID NO: 16632 - DNA, 27 bp, Artificial Sequence
  Description of Artificial Sequence: Synthetic primer
ccaatgcaacacataatagatccaaca

SEQ ID NO: 16633 - DNA, 22 bp, Artificial Sequence
  Description of Artificial Sequence: Synthetic primer
cggctcaaactgtgacaggtta

SEQ ID NO: 16634 - DNA, 18 bp, Artificial Sequence
  Description of Artificial Sequence: Synthetic primer
tgcttgacggcctccatg

SEQ ID NO: 16635 - DNA, 21 bp, Artificial Sequence
  Description of Artificial Sequence: Synthetic primer
ggaacttccctgggagacaga

SEQ ID NO: 16636 - DNA, 22 bp, Artificial Sequence
  Description of Artificial Sequence: Synthetic primer
caagtgccatggaaactaaggg

SEQ ID NO: 16637 - DNA, 26 bp, Artificial Sequence
  Description of Artificial Sequence: Synthetic primer
acagtcttgcaggctatatttacgat

SEQ ID NO: 16638 - DNA, 26 bp, Artificial Sequence
  Description of Artificial Sequence: Synthetic primer
gcaagtatagcaacaccatcatcctt

SEQ ID NO: 16639 - DNA, 19 bp, Artificial Sequence
  Description of Artificial Sequence: Synthetic primer
ggttctgcgagctccagtt

SEQ ID NO: 16640 - DNA, 24 bp, Artificial Sequence
  Description of Artificial Sequence: Synthetic primer
cgccctatattcttcagagggaat

SEQ ID NO: 16641 - DNA, 27 bp, Artificial Sequence
  Description of Artificial Sequence: Synthetic primer
tcttgacatcttaggaacagaccagtt

SEQ ID NO: 16642 - DNA, 21 bp, Artificial Sequence
  Description of Artificial Sequence: Synthetic primer
cttgcttggaccgaagtggtt

SEQ ID NO: 16643 - DNA, 28 bp, Artificial Sequence
  Description of Artificial Sequence: Synthetic primer
ccaacaatgtaagagacaaacgaagaaa

SEQ ID NO: 16644 - DNA, 22 bp, Artificial Sequence
  Description of Artificial Sequence: Synthetic primer
caactgaatctgggcgacatct

SEQ ID NO: 16645 - DNA, 28 bp, Artificial Sequence
  Description of Artificial Sequence: Synthetic primer
ccactattatgtttcagtgtcggtactc

SEQ ID NO: 16646 - DNA, 27 bp, Artificial Sequence
  Description of Artificial Sequence: Synthetic primer
agcgtcatgttaatgatacctataggg

SEQ ID NO: 16647 - DNA, 25 bp, Artificial Sequence
  Description of Artificial Sequence: Synthetic primer
gagtagttgtggatggaaacctgat

SEQ ID NO: 16648 - DNA, 21 bp, Artificial Sequence
  Description of Artificial Sequence: Synthetic primer
tctccagatcccttacagcgt

SEQ ID NO: 16649 - DNA, 21 bp, Artificial Sequence
  Description of Artificial Sequence: Synthetic primer
ttggctattaccccgactggt

SEQ ID NO: 16650 - DNA, 21 bp, Artificial Sequence
  Description of Artificial Sequence: Synthetic primer
gcttgtgcatccttctggaac

SEQ ID NO: 16651 - DNA, 29 bp, Artificial Sequence
  Description of Artificial Sequence: Synthetic primer
tcatacatttctcacaaagacacagtagt

SEQ ID NO: 16652 - DNA, 27 bp, Artificial Sequence
  Description of Artificial Sequence: Synthetic primer
ctggtcttatagaaaaacgtccagtca

SEQ ID NO: 16653 - DNA, 21 bp, Artificial Sequence
  Description of Artificial Sequence: Synthetic primer
aaccttctcccaagccatcac

SEQ ID NO: 16654 - DNA, 21 bp, Artificial Sequence
  Description of Artificial Sequence: Synthetic primer
cgatagcggtgaaacggacaa

SEQ ID NO: 16655 - DNA, 28 bp, Artificial Sequence
  Description of Artificial Sequence: Synthetic primer
ttttacttccagcatgaacttgaatcag

SEQ ID NO: 16656 - DNA, 21 bp, Artificial Sequence
  Description of Artificial Sequence: Synthetic primer
tcacaggcatgacaggtgttg

SEQ ID NO: 16657 - DNA, 21 bp, Artificial Sequence
  Description of Artificial Sequence: Synthetic primer
attcctggatctcccttggca

SEQ ID NO: 16658 - DNA, 21 bp, Artificial Sequence
  Description of Artificial Sequence: Synthetic primer
ctctccactatctggccgtca

SEQ ID NO: 16659 - DNA, 23 bp, Artificial Sequence
  Description of Artificial Sequence: Synthetic primer
cttgttggcaatgttttgaagcg

SEQ ID NO: 16660 - DNA, 21 bp, Artificial Sequence
  Description of Artificial Sequence: Synthetic primer
cggacacggaaatcctcttca

SEQ ID NO: 16661 - DNA, 21 bp, Artificial Sequence
  Description of Artificial Sequence: Synthetic primer
attgcatgctcatccggagtg

SEQ ID NO: 16662 - DNA, 28 bp, Artificial Sequence
  Description of Artificial Sequence: Synthetic primer
ctcattgaaaaactgctgggtgtattag

SEQ ID NO: 16663 - DNA, 21 bp, Artificial Sequence
  Description of Artificial Sequence: Synthetic primer
ccaactttgacacccgtctcc

SEQ ID NO: 16664 - DNA, 21 bp, Artificial Sequence
  Description of Artificial Sequence: Synthetic primer
tgatgtaaagatgccgtgcca

SEQ ID NO: 16665 - DNA, 28 bp, Artificial Sequence
  Description of Artificial Sequence: Synthetic primer
acaaccaaatcacaagctatcaaaacat

SEQ ID NO: 16666 - DNA, 23 bp, Artificial Sequence
  Description of Artificial Sequence: Synthetic primer
cgtgaagaaataaaggcgaccga

SEQ ID NO: 16667 - DNA, 27 bp, Artificial Sequence
  Description of Artificial Sequence: Synthetic primer
cagttcccacagattattactctgact

SEQ ID NO: 16668 - DNA, 21 bp, Artificial Sequence
  Description of Artificial Sequence: Synthetic primer
ctatggcgagctgaccaagtg

SEQ ID NO: 16669 - DNA, 21 bp, Artificial Sequence
  Description of Artificial Sequence: Synthetic primer
cgttcctgtcacagagatgcc

SEQ ID NO: 16670 - DNA, 27 bp, Artificial Sequence
  Description of Artificial Sequence: Synthetic primer
gggtagcaagtagaggattaagtgatg

SEQ ID NO: 16671 - DNA, 30 bp, Artificial Sequence
  Description of Artificial Sequence: Synthetic primer
acgatagtaattacggataaattggacctt

SEQ ID NO: 16672 - DNA, 25 bp, Artificial Sequence
  Description of Artificial Sequence: Synthetic primer
atttcgttcctgcagaatacaagga

SEQ ID NO: 16673 - DNA, 19 bp, Artificial Sequence
  Description of Artificial Sequence: Synthetic primer
tttgcagattcgcgatcgg

SEQ ID NO: 16674 - DNA, 27 bp, Artificial Sequence
  Description of Artificial Sequence: Synthetic primer
tgcaatgcagtatttcacaaaactcaa

SEQ ID NO: 16675 - DNA, 25 bp, Artificial Sequence
  Description of Artificial Sequence: Synthetic primer
tccagtacgaaacccaaggttaatt

SEQ ID NO: 16676 - DNA, 21 bp, Artificial Sequence
  Description of Artificial Sequence: Synthetic primer
agcagaatccgcgtctttcag

SEQ ID NO: 16677 - DNA, 21 bp, Artificial Sequence
  Description of Artificial Sequence: Synthetic primer
gcttgtcagccttgatagcct

SEQ ID NO: 16678 - DNA, 26 bp, Artificial Sequence
  Description of Artificial Sequence: Synthetic primer
gctgctgtggcttatttataagaagg

SEQ ID NO: 16679 - DNA, 22 bp, Artificial Sequence
  Description of Artificial Sequence: Synthetic primer
ctcgtcaaaatctccgagggtt

SEQ ID NO: 16680 - DNA, 21 bp, Artificial Sequence
  Description of Artificial Sequence: Synthetic primer
agagaagtactggaggttccc

SEQ ID NO: 16681 - DNA, 25 bp, Artificial Sequence
  Description of Artificial Sequence: Synthetic primer
cactcaggatatggtaagagaaggg

SEQ ID NO: 16682 - DNA, 21 bp, Artificial Sequence
  Description of Artificial Sequence: Synthetic primer
taaaagacacgtccagcgctt

SEQ ID NO: 16683 - DNA, 26 bp, Artificial Sequence
  Description of Artificial Sequence: Synthetic primer
cctaagctggattcataacgatccat

SEQ ID NO: 16684 - DNA, 27 bp, Artificial Sequence
  Description of Artificial Sequence: Synthetic primer
cccaccagatgttttattcaagagttc

SEQ ID NO: 16685 - DNA, 21 bp, Artificial Sequence
  Description of Artificial Sequence: Synthetic primer
ccttcaagcttcagcccttgt

SEQ ID NO: 16686 - DNA, 28 bp, Artificial Sequence
  Description of Artificial Sequence: Synthetic primer
agctcttcagtactcaattggaagaaaa

SEQ ID NO: 16687 - DNA, 21 bp, Artificial Sequence
  Description of Artificial Sequence: Synthetic primer
ctgccctgaacaatgttcgtc

SEQ ID NO: 16688 - DNA, 22 bp, Artificial Sequence
  Description of Artificial Sequence: Synthetic primer
aacatcgtcttccagcagaagc

SEQ ID NO: 16689 - DNA, 22 bp, Artificial Sequence
  Description of Artificial Sequence: Synthetic primer
acaaagcaccagaaggtgatct

SEQ ID NO: 16690 - DNA, 28 bp, Artificial Sequence
  Description of Artificial Sequence: Synthetic primer
tcatatctactacatgctagcttgatgc

SEQ ID NO: 16691 - DNA, 21 bp, Artificial Sequence
  Description of Artificial Sequence: Synthetic primer
gctgttacccacacacacaca

SEQ ID NO: 16692 - DNA, 25 bp, Artificial Sequence
  Description of Artificial Sequence: Synthetic primer
accatcccaaacttaacttctggag

SEQ ID NO: 16693 - DNA, 22 bp, Artificial Sequence
  Description of Artificial Sequence: Synthetic primer
gcatagaaatgctcacgggtac

SEQ ID NO: 16694 - DNA, 24 bp, Artificial Sequence
  Description of Artificial Sequence: Synthetic primer
gctggaattatgacttctggccat

SEQ ID NO: 16695 - DNA, 23 bp, Artificial Sequence
  Description of Artificial Sequence: Synthetic primer
tgacaggtgacatagtagccctt

SEQ ID NO: 16696 - DNA, 21 bp, Artificial Sequence
  Description of Artificial Sequence: Synthetic primer
caaatgctgtgttggtggcaa

SEQ ID NO: 16697 - DNA, 21 bp, Artificial Sequence
  Description of Artificial Sequence: Synthetic primer
gaagacgacacctgagggttt

SEQ ID NO: 16698 - DNA, 24 bp, Artificial Sequence
  Description of Artificial Sequence: Synthetic primer
ggttttagcaactcctagcacatg

SEQ ID NO: 16699 - DNA, 24 bp, Artificial Sequence
  Description of Artificial Sequence: Synthetic primer
agacatcatccacagttaccccta

SEQ ID NO: 16700 - DNA, 26 bp, Artificial Sequence
  Description of Artificial Sequence: Synthetic primer
acacctatgtaaaatgggtggtcttg

SEQ ID NO: 16701 - DNA, 21 bp, Artificial Sequence
  Description of Artificial Sequence: Synthetic primer
atccgcctcgagaatcctctt

SEQ ID NO: 16702 - DNA, 21 bp, Artificial Sequence
  Description of Artificial Sequence: Synthetic primer
tgcaatgttcttccgcaactc

SEQ ID NO: 16703 - DNA, 26 bp, Artificial Sequence
  Description of Artificial Sequence: Synthetic primer
tgacacggtatcacaactccaataac

SEQ ID NO: 16704 - DNA, 21 bp, Artificial Sequence
  Description of Artificial Sequence: Synthetic primer
catccgctccctgtcattcag

SEQ ID NO: 16705 - DNA, 25 bp, Artificial Sequence
  Description of Artificial Sequence: Synthetic primer
caaagagttgcctacactgaagaag

SEQ ID NO: 16706 - DNA, 29 bp, Artificial Sequence
  Description of Artificial Sequence: Synthetic primer
tcgtaggagtaaatgtatacccttttcac

SEQ ID NO: 16707 - DNA, 21 bp, Artificial Sequence
  Description of Artificial Sequence: Synthetic primer
agttcactgccatgttcagga

SEQ ID NO: 16708 - DNA, 19 bp, Artificial Sequence
  Description of Artificial Sequence: Synthetic primer
cattgtggcgctgatgctg

SEQ ID NO: 16709 - DNA, 24 bp, Artificial Sequence
  Description of Artificial Sequence: Synthetic primer
agtacttgtctgcttccttgatgg

SEQ ID NO: 16710 - DNA, 24 bp, Artificial Sequence
  Description of Artificial Sequence: Synthetic primer
tggtgttgtttctgcttattgctc

SEQ ID NO: 16711 - DNA, 26 bp, Artificial Sequence
  Description of Artificial Sequence: Synthetic primer
cctcacacaaattctaccaacgtttg

SEQ ID NO: 16712 - DNA, 21 bp, Artificial Sequence
  Description of Artificial Sequence: Synthetic primer
cgaattgcgactgtgctcatg

SEQ ID NO: 16713 - DNA, 23 bp, Artificial Sequence
  Description of Artificial Sequence: Synthetic primer
acttctgttacagggagcaacat

SEQ ID NO: 16714 - DNA, 28 bp, Artificial Sequence
  Description of Artificial Sequence: Synthetic primer
tgatcaggtggttcaatatcttgatgtc

SEQ ID NO: 16715 - DNA, 21 bp, Artificial Sequence
  Description of Artificial Sequence: Synthetic primer
cttctaggccctccttggttg

SEQ ID NO: 16716 - DNA, 21 bp, Artificial Sequence
  Description of Artificial Sequence: Synthetic primer
aacccattgcacgcaaaactc

SEQ ID NO: 16717 - DNA, 21 bp, Artificial Sequence
  Description of Artificial Sequence: Synthetic primer
ttctgttcacctgctgctagt

SEQ ID NO: 16718 - DNA, 28 bp, Artificial Sequence
  Description of Artificial Sequence: Synthetic primer
tgatgtctaagatcttgcggatatcatc

SEQ ID NO: 16719 - DNA, 21 bp, Artificial Sequence
  Description of Artificial Sequence: Synthetic primer
ttgatctcatcgaccgcctct

SEQ ID NO: 16720 - DNA, 27 bp, Artificial Sequence
  Description of Artificial Sequence: Synthetic primer
ccatcattccggttatcaaaaacaaca

SEQ ID NO: 16721 - DNA, 27 bp, Artificial Sequence
  Description of Artificial Sequence: Synthetic primer
agatcaaaaattaaacagcggtacagc

SEQ ID NO: 16722 - DNA, 21 bp, Artificial Sequence
  Description of Artificial Sequence: Synthetic primer
gcgtactcctttttgctcctc

SEQ ID NO: 16723 - DNA, 22 bp, Artificial Sequence
  Description of Artificial Sequence: Synthetic primer
gtaatcctcctcctcctcttgc

SEQ ID NO: 16724 - DNA, 21 bp, Artificial Sequence
  Description of Artificial Sequence: Synthetic primer
tcctagcacatgtgggcaaat

SEQ ID NO: 16725 - DNA, 28 bp, Artificial Sequence
  Description of Artificial Sequence: Synthetic primer
tgcagagaaagctaacagcataataagt

SEQ ID NO: 16726 - DNA, 27 bp, Artificial Sequence
  Description of Artificial Sequence: Synthetic primer
aatttccgatcaatgttaacacactcc

SEQ ID NO: 16727 - DNA, 21 bp, Artificial Sequence
  Description of Artificial Sequence: Synthetic primer
ccgctacaaaacagtgttcgc

SEQ ID NO: 16728 - DNA, 22 bp, Artificial Sequence
  Description of Artificial Sequence: Synthetic primer
acacagggtaatgcaagttccc

SEQ ID NO: 16729 - DNA, 25 bp, Artificial Sequence
  Description of Artificial Sequence: Synthetic primer
tttgttcctcagactttgattgctc

SEQ ID NO: 16730 - DNA, 24 bp, Artificial Sequence
  Description of Artificial Sequence: Synthetic primer
caagaacctcgaagctaatgtgtg

SEQ ID NO: 16731 - DNA, 27 bp, Artificial Sequence
  Description of Artificial Sequence: Synthetic primer
gctgatatcacaaaagtgttgacatgc

SEQ ID NO: 16732 - DNA, 26 bp, Artificial Sequence
  Description of Artificial Sequence: Synthetic primer
gcaccctcattacaggagattaaaac

SEQ ID NO: 16733 - DNA, 25 bp, Artificial Sequence
  Description of Artificial Sequence: Synthetic primer
acatactactgataggccaatcacc

SEQ ID NO: 16734 - DNA, 25 bp, Artificial Sequence
  Description of Artificial Sequence: Synthetic primer
gcagtacattatggtgttgtgagtg

SEQ ID NO: 16735 - DNA, 21 bp, Artificial Sequence
  Description of Artificial Sequence: Synthetic primer
atgaggtttcccgtcgacaac

SEQ ID NO: 16736 - DNA, 28 bp, Artificial Sequence
  Description of Artificial Sequence: Synthetic primer
ctctacccatgaggtacaatgtattctg

SEQ ID NO: 16737 - DNA, 24 bp, Artificial Sequence
  Description of Artificial Sequence: Synthetic primer
tctgatccgttccttatggacatg

SEQ ID NO: 16738 - DNA, 23 bp, Artificial Sequence
  Description of Artificial Sequence: Synthetic primer
gtgtaccctcctcctatcacatg

SEQ ID NO: 16739 - DNA, 28 bp, Artificial Sequence
  Description of Artificial Sequence: Synthetic primer
cgtcggaagatatgtctggaatatttga

SEQ ID NO: 16740 - DNA, 28 bp, Artificial Sequence
  Description of Artificial Sequence: Synthetic primer
gctgtgttgatatagactgcataatctg

SEQ ID NO: 16741 - DNA, 22 bp, Artificial Sequence
  Description of Artificial Sequence: Synthetic primer
ttccgaaggactggtctctttg

SEQ ID NO: 16742 - DNA, 27 bp, Artificial Sequence
  Description of Artificial Sequence: Synthetic primer
cctgggtcttctaacaaaacaagaatc

SEQ ID NO: 16743 - DNA, 21 bp, Artificial Sequence
  Description of Artificial Sequence: Synthetic primer
ggaattcccgggatgatctgg

SEQ ID NO: 16744 - DNA, 22 bp, Artificial Sequence
  Description of Artificial Sequence: Synthetic primer
ggaggagagcaaatcacaggtt

SEQ ID NO: 16745 - DNA, 21 bp, Artificial Sequence
  Description of Artificial Sequence: Synthetic primer
tgctggaggaaatgccttcat

SEQ ID NO: 16746 - DNA, 21 bp, Artificial Sequence
  Description of Artificial Sequence: Synthetic primer
cctcatcgtcgtgacacctag

SEQ ID NO: 16747 - DNA, 28 bp, Artificial Sequence
  Description of Artificial Sequence: Synthetic primer
tgcaacataaagtaagctcctcatttga

SEQ ID NO: 16748 - DNA, 25 bp, Artificial Sequence
  Description of Artificial Sequence: Synthetic primer
actggatgttcctgtagtattggac

SEQ ID NO: 16749 - DNA, 19 bp, Artificial Sequence
  Description of Artificial Sequence: Synthetic primer
agaaggtcgagcagctgag

SEQ ID NO: 16750 - DNA, 24 bp, Artificial Sequence
  Description of Artificial Sequence: Synthetic primer
agacggttctgtcaatgaattcca

SEQ ID NO: 16751 - DNA, 21 bp, Artificial Sequence
  Description of Artificial Sequence: Synthetic primer
ctcatgaacctgtcccagtcc

SEQ ID NO: 16752 - DNA, 21 bp, Artificial Sequence
  Description of Artificial Sequence: Synthetic primer
gcttcatcagtcacaccacct

SEQ ID NO: 16753 - DNA, 28 bp, Artificial Sequence
  Description of Artificial Sequence: Synthetic primer
tcaggtttacaagctcttagatgtacaa

SEQ ID NO: 16754 - DNA, 23 bp, Artificial Sequence
  Description of Artificial Sequence: Synthetic primer
cctgtttcagcctttggatcatg

SEQ ID NO: 16755 - DNA, 27 bp, Artificial Sequence
  Description of Artificial Sequence: Synthetic primer
acaagaacaatctcatttctgcaaact

SEQ ID NO: 16756 - DNA, 24 bp, Artificial Sequence
  Description of Artificial Sequence: Synthetic primer
gccagcactctttgatgcttttag

SEQ ID NO: 16757 - DNA, 22 bp, Artificial Sequence
  Description of Artificial Sequence: Synthetic primer
tctggcttctcgtaaacaaggg

SEQ ID NO: 16758 - DNA, 22 bp, Artificial Sequence
  Description of Artificial Sequence: Synthetic primer
aggaaaaacaagcgaactggtc

SEQ ID NO: 16759 - DNA, 29 bp, Artificial Sequence
  Description of Artificial Sequence: Synthetic primer
acatattataacccctaaagcagaagagc

SEQ ID NO: 16760 - DNA, 22 bp, Artificial Sequence
  Description of Artificial Sequence: Synthetic primer
aacatgccctcttttcttgctc

SEQ ID NO: 16761 - DNA, 26 bp, Artificial Sequence
  Description of Artificial Sequence: Synthetic primer
attctcaaagaaacatcaccgtggta

SEQ ID NO: 16762 - DNA, 22 bp, Artificial Sequence
  Description of Artificial Sequence: Synthetic primer
gcacgcacaccttccttttatt

SEQ ID NO: 16763 - DNA, 23 bp, Artificial Sequence
  Description of Artificial Sequence: Synthetic primer
gggttacagtggttgctcatagc

SEQ ID NO: 16764 - DNA, 26 bp, Artificial Sequence
  Description of Artificial Sequence: Synthetic primer
gagagtttcttactggccatgtatgt

SEQ ID NO: 16765 - DNA, 21 bp, Artificial Sequence
  Description of Artificial Sequence: Synthetic primer
ggaaaagacgcctgcactgta

SEQ ID NO: 16766 - DNA, 21 bp, Artificial Sequence
  Description of Artificial Sequence: Synthetic primer
ccagaaatgtgcggaagcatg

SEQ ID NO: 16767 - DNA, 21 bp, Artificial Sequence
  Description of Artificial Sequence: Synthetic primer
catcggaaacatgtccacagc

SEQ ID NO: 16768 - DNA, 27 bp, Artificial Sequence
  Description of Artificial Sequence: Synthetic primer
agtattatacatctaccatccgcacga

SEQ ID NO: 16769 - DNA, 28 bp, Artificial Sequence
  Description of Artificial Sequence: Synthetic primer
gtttacgaaagaagacatcaaggaactt

SEQ ID NO: 16770 - DNA, 24 bp, Artificial Sequence
  Description of Artificial Sequence: Synthetic primer
gtccgcattgttttcatcgtatcc

SEQ ID NO: 16771 - DNA, 27 bp, Artificial Sequence
  Description of Artificial Sequence: Synthetic primer
cggctagatacaaggtattccaacttt

SEQ ID NO: 16772 - DNA, 19 bp, Artificial Sequence
  Description of Artificial Sequence: Synthetic primer
agaccgaccacatgagctg

SEQ ID NO: 16773 - DNA, 26 bp, Artificial Sequence
  Description of Artificial Sequence: Synthetic primer
accaaatcaggaattttgtgccatag

SEQ ID NO: 16774 - DNA, 24 bp, Artificial Sequence
  Description of Artificial Sequence: Synthetic primer
ctgggaaatcctattggtgaaggt

SEQ ID NO: 16775 - DNA, 22 bp, Artificial Sequence
  Description of Artificial Sequence: Synthetic primer
accagagggtatggaaccagat

SEQ ID NO: 16776 - DNA, 28 bp, Artificial Sequence
  Description of Artificial Sequence: Synthetic primer
ctggttataagcaacagagatacttgct

SEQ ID NO: 16777 - DNA, 23 bp, Artificial Sequence
  Description of Artificial Sequence: Synthetic primer
tcacacgcctcagaggagaaata

SEQ ID NO: 16778 - DNA, 25 bp, Artificial Sequence
  Description of Artificial Sequence: Synthetic primer
ggagagaaaaacaagcatggatagg

SEQ ID NO: 16779 - DNA, 21 bp, Artificial Sequence
  Description of Artificial Sequence: Synthetic primer
catcgccagttctgcttacca

SEQ ID NO: 16780 - DNA, 18 bp, Artificial Sequence
  Description of Artificial Sequence: Synthetic primer
gtggccgccataagggtt

SEQ ID NO: 16781 - DNA, 21 bp, Artificial Sequence
  Description of Artificial Sequence: Synthetic primer
cacaacatcgcccttttcctc

SEQ ID NO: 16782 - DNA, 24 bp, Artificial Sequence
  Description of Artificial Sequence: Synthetic primer
ccaaggacaggcaattttcagatg

SEQ ID NO: 16783 - DNA, 21 bp, Artificial Sequence
  Description of Artificial Sequence: Synthetic primer
ggttagctcatgcttcttggc

SEQ ID NO: 16784 - DNA, 21 bp, Artificial Sequence
  Description of Artificial Sequence: Synthetic primer
gtgacaccggagaattaagcg

SEQ ID NO: 16785 - DNA, 18 bp, Artificial Sequence
  Description of Artificial Sequence: Synthetic primer
gtcgaacggtccggacac

SEQ ID NO: 16786 - DNA, 23 bp, Artificial Sequence
  Description of Artificial Sequence: Synthetic primer
cttgctgtttgcctacagaaagg

SEQ ID NO: 16787 - DNA, 22 bp, Artificial Sequence
  Description of Artificial Sequence: Synthetic primer
gcaactcaagaacgggaacatc

SEQ ID NO: 16788 - DNA, 24 bp, Artificial Sequence
  Description of Artificial Sequence: Synthetic primer
cagagctgtgaacaattgcctatc

SEQ ID NO: 16789 - DNA, 21 bp, Artificial Sequence
  Description of Artificial Sequence: Synthetic primer
gttccgcaccttggcaataag

SEQ ID NO: 16790 - DNA, 23 bp, Artificial Sequence
  Description of Artificial Sequence: Synthetic primer
cagatatgcgggataagtttcgc

SEQ ID NO: 16791 - DNA, 21 bp, Artificial Sequence
  Description of Artificial Sequence: Synthetic primer
cattgttggccgatcatggga

SEQ ID NO: 16792 - DNA, 19 bp, Artificial Sequence
  Description of Artificial Sequence: Synthetic primer
cgtatagcgcccacagaac

SEQ ID NO: 16793 - DNA, 23 bp, Artificial Sequence
  Description of Artificial Sequence: Synthetic primer
ggtgcttttgccattatcttggg

SEQ ID NO: 16794 - DNA, 22 bp, Artificial Sequence
  Description of Artificial Sequence: Synthetic primer
tatatggtccagggagcaaggg

SEQ ID NO: 16795 - DNA, 21 bp, Artificial Sequence
  Description of Artificial Sequence: Synthetic primer
tgaagggcctcttcccaagat

SEQ ID NO: 16796 - DNA, 22 bp, Artificial Sequence
  Description of Artificial Sequence: Synthetic primer
caggcaaacacgtatgatgagc

SEQ ID NO: 16797 - DNA, 24 bp, Artificial Sequence
  Description of Artificial Sequence: Synthetic primer
agaacttgaaaatgtcgagtggga

SEQ ID NO: 16798 - DNA, 21 bp, Artificial Sequence
  Description of Artificial Sequence: Synthetic primer
ctcccagcgcatctttaccaa

SEQ ID NO: 16799 - DNA, 19 bp, Artificial Sequence
  Description of Artificial Sequence: Synthetic primer
gagggaaggtggtgcagga

SEQ ID NO: 16800 - DNA, 21 bp, Artificial Sequence
  Description of Artificial Sequence: Synthetic primer
cgaggcgcagataacagtgta

SEQ ID NO: 16801 - DNA, 22 bp, Artificial Sequence
  Description of Artificial Sequence: Synthetic primer
actgcccagtacagactagacc

SEQ ID NO: 16802 - DNA, 20 bp, Artificial Sequence
  Description of Artificial Sequence: Synthetic primer
gggatcgagcttgcagatgg

SEQ ID NO: 16803 - DNA, 21 bp, Artificial Sequence
  Description of Artificial Sequence: Synthetic primer
cacaccttatgcagctagcct

SEQ ID NO: 16804 - DNA, 27 bp, Artificial Sequence
  Description of Artificial Sequence: Synthetic primer
ttcataataaatactccctccgtccca

SEQ ID NO: 16805 - DNA, 19 bp, Artificial Sequence
  Description of Artificial Sequence: Synthetic primer
catctccagcaggccagtc

SEQ ID NO: 16806 - DNA, 27 bp, Artificial Sequence
  Description of Artificial Sequence: Synthetic primer
acatcgtcttcaaatcaatagggtctt

SEQ ID NO: 16807 - DNA, 18 bp, Artificial Sequence
  Description of Artificial Sequence: Synthetic primer
cgccaacatctgcgcaat

SEQ ID NO: 16808 - DNA, 24 bp, Artificial Sequence
  Description of Artificial Sequence: Synthetic primer
ccggtaggcatattgtcttcactt

SEQ ID NO: 16809 - DNA, 20 bp, Artificial Sequence
  Description of Artificial Sequence: Synthetic primer
cttagtcgcctgccctgaac

SEQ ID NO: 16810 - DNA, 24 bp, Artificial Sequence
  Description of Artificial Sequence: Synthetic primer
ttgcaggatagaatcacgcaatct

SEQ ID NO: 16811 - DNA, 21 bp, Artificial Sequence
  Description of Artificial Sequence: Synthetic primer
acacgaccgaaattgcatctc

SEQ ID NO: 16812 - DNA, 22 bp, Artificial Sequence
  Description of Artificial Sequence: Synthetic primer
caacgcccggtcgataattact

SEQ ID NO: 16813 - DNA, 21 bp, Artificial Sequence
  Description of Artificial Sequence: Synthetic primer
ccatcttgcacaagacaacgc

SEQ ID NO: 16814 - DNA, 28 bp, Artificial Sequence
  Description of Artificial Sequence: Synthetic primer
ccatccatggttcagaaatagtttttcc

SEQ ID NO: 16815 - DNA, 23 bp, Artificial Sequence
  Description of Artificial Sequence: Synthetic primer
tgggtctatgctcttgtcaatcg

SEQ ID NO: 16816 - DNA, 25 bp, Artificial Sequence
  Description of Artificial Sequence: Synthetic primer
tgtcctcacgaaatcatccattacc

SEQ ID NO: 16817 - DNA, 23 bp, Artificial Sequence
  Description of Artificial Sequence: Synthetic primer
ccggaaggcaaatatgtcgtaga

SEQ ID NO: 16818 - DNA, 22 bp, Artificial Sequence
  Description of Artificial Sequence: Synthetic primer
gactgtacaacagcatcttggc

SEQ ID NO: 16819 - DNA, 21 bp, Artificial Sequence
  Description of Artificial Sequence: Synthetic primer
ctgcacttctgggagatcagg

SEQ ID NO: 16820 - DNA, 21 bp, Artificial Sequence
  Description of Artificial Sequence: Synthetic primer
cgggttcggttaccatgcata

SEQ ID NO: 16821 - DNA, 22 bp, Artificial Sequence
  Description of Artificial Sequence: Synthetic primer
tgtcattcacccgaatctgtca

SEQ ID NO: 16822 - DNA, 23 bp, Artificial Sequence
  Description of Artificial Sequence: Synthetic primer
ccaatcatctatgttgcgagcga

SEQ ID NO: 16823 - DNA, 21 bp, Artificial Sequence
  Description of Artificial Sequence: Synthetic primer
ctgttgctaacagcgccattt

SEQ ID NO: 16824 - DNA, 26 bp, Artificial Sequence
  Description of Artificial Sequence: Synthetic primer
gaagtgattgtgggatggttctctac

SEQ ID NO: 16825 - DNA, 21 bp, Artificial Sequence
  Description of Artificial Sequence: Synthetic primer
accgtgctatagtcactgctg

SEQ ID NO: 16826 - DNA, 30 bp, Artificial Sequence
  Description of Artificial Sequence: Synthetic primer
ttctgcatcttgacagaaatatatgatggt

SEQ ID NO: 16827 - DNA, 21 bp, Artificial Sequence
  Description of Artificial Sequence: Synthetic primer
gaagctagcatgcatgcaagg

SEQ ID NO: 16828 - DNA, 27 bp, Artificial Sequence
  Description of Artificial Sequence: Synthetic primer
tgaagatacacaattcatgcacagaac

SEQ ID NO: 16829 - DNA, 26 bp, Artificial Sequence
  Description of Artificial Sequence: Synthetic primer
agagagaccttgctgataataatccg

SEQ ID NO: 16830 - DNA, 22 bp, Artificial Sequence
  Description of Artificial Sequence: Synthetic primer
cccgcaatccgtttactgcata

SEQ ID NO: 16831 - DNA, 22 bp, Artificial Sequence
  Description of Artificial Sequence: Synthetic primer
cgatccgctattgcagtgaatg

SEQ ID NO: 16832 - DNA, 27 bp, Artificial Sequence
  Description of Artificial Sequence: Synthetic primer
tggattttcagagacaagatctccaaa

SEQ ID NO: 16833 - DNA, 23 bp, Artificial Sequence
  Description of Artificial Sequence: Synthetic primer
cagacctcttcagtttcctttgc

SEQ ID NO: 16834 - DNA, 26 bp, Artificial Sequence
  Description of Artificial Sequence: Synthetic primer
tggcatactccctgatattatcctgt

SEQ ID NO: 16835 - DNA, 23 bp, Artificial Sequence
  Description of Artificial Sequence: Synthetic primer
cctcataaacttctggccacgta

SEQ ID NO: 16836 - DNA, 25 bp, Artificial Sequence
  Description of Artificial Sequence: Synthetic primer
acgtctcaagctcgtctcaaatatg

SEQ ID NO: 16837 - DNA, 28 bp, Artificial Sequence
  Description of Artificial Sequence: Synthetic primer
cgaacaaagttcccaaatattcaagtca

SEQ ID NO: 16838 - DNA, 28 bp, Artificial Sequence
  Description of Artificial Sequence: Synthetic primer
gcatatgcttgggattatataccgtgat

SEQ ID NO: 16839 - DNA, 24 bp, Artificial Sequence
  Description of Artificial Sequence: Synthetic primer
cagagacaacatgcattgcaaaac

SEQ ID NO: 16840 - DNA, 25 bp, Artificial Sequence
  Description of Artificial Sequence: Synthetic primer
ctgccactctaatgatctcctcaag

SEQ ID NO: 16841 - DNA, 22 bp, Artificial Sequence
  Description of Artificial Sequence: Synthetic primer
acaacgcatactaccagaacct

SEQ ID NO: 16842 - DNA, 26 bp, Artificial Sequence
  Description of Artificial Sequence: Synthetic primer
agggtccgtaaaatcgattttcatca

SEQ ID NO: 16843 - DNA, 24 bp, Artificial Sequence
  Description of Artificial Sequence: Synthetic primer
actgacagtgttattggtgaaggt

SEQ ID NO: 16844 - DNA, 21 bp, Artificial Sequence
  Description of Artificial Sequence: Synthetic primer
cctgacgtcaggaagttggac

SEQ ID NO: 16845 - DNA, 26 bp, Artificial Sequence
  Description of Artificial Sequence: Synthetic primer
tcctgtcaactttgaaagcaatgttt

SEQ ID NO: 16846 - DNA, 28 bp, Artificial Sequence
  Description of Artificial Sequence: Synthetic primer
tgtttcatcatctactggaggttacttg

SEQ ID NO: 16847 - DNA, 21 bp, Artificial Sequence
  Description of Artificial Sequence: Synthetic primer
tgagaccagctggaactctga

SEQ ID NO: 16848 - DNA, 21 bp, Artificial Sequence
  Description of Artificial Sequence: Synthetic primer
ttcacgaaatgcgacaaacgc

SEQ ID NO: 16849 - DNA, 24 bp, Artificial Sequence
  Description of Artificial Sequence: Synthetic primer
gaagatcaagaagctcctcgacat

SEQ ID NO: 16850 - DNA, 21 bp, Artificial Sequence
  Description of Artificial Sequence: Synthetic primer
cattcatcatcgcgcacacac

SEQ ID NO: 16851 - DNA, 20 bp, Artificial Sequence
  Description of Artificial Sequence: Synthetic primer
gcgttgaggttgttggtcac

SEQ ID NO: 16852 - DNA, 25 bp, Artificial Sequence
  Description of Artificial Sequence: Synthetic primer
ggcgataaggtagtagtacacacaa

SEQ ID NO: 16853 - DNA, 21 bp, Artificial Sequence
  Description of Artificial Sequence: Synthetic primer
actcgcgcagagattgttcaa

SEQ ID NO: 16854 - DNA, 21 bp, Artificial Sequence
  Description of Artificial Sequence: Synthetic primer
caggaagctcagcttcacctt

SEQ ID NO: 16855 - DNA, 26 bp, Artificial Sequence
  Description of Artificial Sequence: Synthetic primer
atctcttttcgatccattccaaggat

SEQ ID NO: 16856 - DNA, 21 bp, Artificial Sequence
  Description of Artificial Sequence: Synthetic primer
aatgttcctgtacaggccact

SEQ ID NO: 16857 - DNA, 21 bp, Artificial Sequence
  Description of Artificial Sequence: Synthetic primer
ccaacctcgccatcatcatca

SEQ ID NO: 16858 - DNA, 28 bp, Artificial Sequence
  Description of Artificial Sequence: Synthetic primer
ggctttcagggtagcctataactaattt

SEQ ID NO: 16859 - DNA, 25 bp, Artificial Sequence
  Description of Artificial Sequence: Synthetic primer
aataaagaaatgcagcagcaccttg

SEQ ID NO: 16860 - DNA, 21 bp, Artificial Sequence
  Description of Artificial Sequence: Synthetic primer
agaaagctcgtcagctatcgt

SEQ ID NO: 16861 - DNA, 20 bp, Artificial Sequence
  Description of Artificial Sequence: Synthetic primer
tgaggtacgacggcatgttg

SEQ ID NO: 16862 - DNA, 28 bp, Artificial Sequence
  Description of Artificial Sequence: Synthetic primer
tcctctaccaggattgacaatatgtact

SEQ ID NO: 16863 - DNA, 23 bp, Artificial Sequence
  Description of Artificial Sequence: Synthetic primer
ggttcttctttgtatggccagga

SEQ ID NO: 16864 - DNA, 28 bp, Artificial Sequence
  Description of Artificial Sequence: Synthetic primer
cagagtttggccagtttattaacgaaaa

SEQ ID NO: 16865 - DNA, 27 bp, Artificial Sequence
  Description of Artificial Sequence: Synthetic primer
caacactgaaactaaaactgctcgatt

SEQ ID NO: 16866 - DNA, 23 bp, Artificial Sequence
  Description of Artificial Sequence: Synthetic primer
accgacatctatggacatctcct

SEQ ID NO: 16867 - DNA, 24 bp, Artificial Sequence
  Description of Artificial Sequence: Synthetic primer
gaggctggaaaagtagtaacacca

SEQ ID NO: 16868 - DNA, 21 bp, Artificial Sequence
  Description of Artificial Sequence: Synthetic primer
agcaatggtgatggagatggc

SEQ ID NO: 16869 - DNA, 28 bp, Artificial Sequence
  Description of Artificial Sequence: Synthetic primer
tggaggattttctattcggatgtacaaa

SEQ ID NO: 16870 - DNA, 26 bp, Artificial Sequence
  Description of Artificial Sequence: Synthetic primer
acttagcgaaaagaatatccgagagg

SEQ ID NO: 16871 - DNA, 21 bp, Artificial Sequence
  Description of Artificial Sequence: Synthetic primer
gtcatcgagcggaaccttctg

SEQ ID NO: 16872 - DNA, 21 bp, Artificial Sequence
  Description of Artificial Sequence: Synthetic primer
gagttgtttaagcgcgccttc

SEQ ID NO: 16873 - DNA, 21 bp, Artificial Sequence
  Description of Artificial Sequence: Synthetic primer
cctggaggccttcttcatcac

SEQ ID NO: 16874 - DNA, 22 bp, Artificial Sequence
  Description of Artificial Sequence: Synthetic primer
aactgataccagccttccagag

SEQ ID NO: 16875 - DNA, 23 bp, Artificial Sequence
  Description of Artificial Sequence: Synthetic primer
ccggatgctcatagcaatttcac

SEQ ID NO: 16876 - DNA, 21 bp, Artificial Sequence
  Description of Artificial Sequence: Synthetic primer
cgtcaaccttgcatagctcct

SEQ ID NO: 16877 - DNA, 22 bp, Artificial Sequence
  Description of Artificial Sequence: Synthetic primer
cctcttgtaaatgccgcttcac

SEQ ID NO: 16878 - DNA, 21 bp, Artificial Sequence
  Description of Artificial Sequence: Synthetic primer
acgcggtttttgaaggtacac

SEQ ID NO: 16879 - DNA, 22 bp, Artificial Sequence
  Description of Artificial Sequence: Synthetic primer
tgggaccgtctgagactgataa

SEQ ID NO: 16880 - DNA, 27 bp, Artificial Sequence
  Description of Artificial Sequence: Synthetic primer
tgaaatttctcatcgtcttctacggtt

SEQ ID NO: 16881 - DNA, 24 bp, Artificial Sequence
  Description of Artificial Sequence: Synthetic primer
cgtgggtttgtgtgtgttaagcta

SEQ ID NO: 16882 - DNA, 28 bp, Artificial Sequence
  Description of Artificial Sequence: Synthetic primer
tcactagataatgatagcattcccacca

SEQ ID NO: 16883 - DNA, 26 bp, Artificial Sequence
  Description of Artificial Sequence: Synthetic primer
tgatccagttatcaaaagctcatccc

SEQ ID NO: 16884 - DNA, 24 bp, Artificial Sequence
  Description of Artificial Sequence: Synthetic primer
cagtccactcatccctagtttgtt

SEQ ID NO: 16885 - DNA, 27 bp, Artificial Sequence
  Description of Artificial Sequence: Synthetic primer
gtttatggcttctggaagtatgtttcg

SEQ ID NO: 16886 - DNA, 21 bp, Artificial Sequence
  Description of Artificial Sequence: Synthetic primer
tctgctagaacaccccagaca

SEQ ID NO: 16887 - DNA, 24 bp, Artificial Sequence
  Description of Artificial Sequence: Synthetic primer
tgacaaacgagcctcattattccc

SEQ ID NO: 16888 - DNA, 28 bp, Artificial Sequence
  Description of Artificial Sequence: Synthetic primer
tctctataggttgtttagtgcatgttgt

SEQ ID NO: 16889 - DNA, 22 bp, Artificial Sequence
  Description of Artificial Sequence: Synthetic primer
gccgagcatttgacaagatgat

SEQ ID NO: 16890 - DNA, 23 bp, Artificial Sequence
  Description of Artificial Sequence: Synthetic primer
cttggagcatgtacatgtgaagc

SEQ ID NO: 16891 - DNA, 26 bp, Artificial Sequence
  Description of Artificial Sequence: Synthetic primer
ccttcattcctgctagaatccaagtc

SEQ ID NO: 16892 - DNA, 23 bp, Artificial Sequence
  Description of Artificial Sequence: Synthetic primer
tcaatgctctcggttacagatcc

SEQ ID NO: 16893 - DNA, 21 bp, Artificial Sequence
  Description of Artificial Sequence: Synthetic primer
gcacacttggtggaccaaaac

SEQ ID NO: 16894 - DNA, 21 bp, Artificial Sequence
  Description of Artificial Sequence: Synthetic primer
ccccaggcagcacatttctta

SEQ ID NO: 16895 - DNA, 23 bp, Artificial Sequence
  Description of Artificial Sequence: Synthetic primer
acaactttctcttagcgcatggt

SEQ ID NO: 16896 - DNA, 21 bp, Artificial Sequence
  Description of Artificial Sequence: Synthetic primer
gtgagggaggaattcaatgcg

SEQ ID NO: 16897 - DNA, 22 bp, Artificial Sequence
  Description of Artificial Sequence: Synthetic primer
gctgctcttggtcaagtcaagt

SEQ ID NO: 16898 - DNA, 28 bp, Artificial Sequence
  Description of Artificial Sequence: Synthetic primer
ggaaacaacaacagtaacatcaacaact

SEQ ID NO: 16899 - DNA, 27 bp, Artificial Sequence
  Description of Artificial Sequence: Synthetic primer
ttagcacattacagaaaaggaaacacg

SEQ ID NO: 16900 - DNA, 23 bp, Artificial Sequence
  Description of Artificial Sequence: Synthetic primer
gggaggattttgacgacgaatca

SEQ ID NO: 16901 - DNA, 28 bp, Artificial Sequence
  Description of Artificial Sequence: Synthetic primer
gggtacttgtcatatttcgttacagacg

SEQ ID NO: 16902 - DNA, 22 bp, Artificial Sequence
  Description of Artificial Sequence: Synthetic primer
tgccctactcgactaagaatcc

SEQ ID NO: 16903 - DNA, 23 bp, Artificial Sequence
  Description of Artificial Sequence: Synthetic primer
cgaagtcagcagagcaaatgttg

SEQ ID NO: 16904 - DNA, 19 bp, Artificial Sequence
  Description of Artificial Sequence: Synthetic primer
gatcatcccgaggcacctg

SEQ ID NO: 16905 - DNA, 19 bp, Artificial Sequence
  Description of Artificial Sequence: Synthetic primer
acgaggtcgggtacgacaa

SEQ ID NO: 16906 - DNA, 21 bp, Artificial Sequence
  Description of Artificial Sequence: Synthetic primer
ttgaagtcctccctgatgacg

SEQ ID NO: 16907 - DNA, 21 bp, Artificial Sequence
  Description of Artificial Sequence: Synthetic primer
atcatcagacgccttgggaga

SEQ ID NO: 16908 - DNA, 21 bp, Artificial Sequence
  Description of Artificial Sequence: Synthetic primer
ttgtcactagcgcagattcgt

SEQ ID NO: 16909 - DNA, 22 bp, Artificial Sequence
  Description of Artificial Sequence: Synthetic primer
ttggtgttaccccaaggaaaga

SEQ ID NO: 16910 - DNA, 24 bp, Artificial Sequence
  Description of Artificial Sequence: Synthetic primer
tcttcaaggacagttactgatccg

SEQ ID NO: 16911 - DNA, 28 bp, Artificial Sequence
  Description of Artificial Sequence: Synthetic primer
tcaccaggtttggattttcaatttgaat

SEQ ID NO: 16912 - DNA, 18 bp, Artificial Sequence
  Description of Artificial Sequence: Synthetic primer
agtgggagcttcgcgtca

SEQ ID NO: 16913 - DNA, 25 bp, Artificial Sequence
  Description of Artificial Sequence: Synthetic primer
tcaaggtattcagcaacattatgcg

SEQ ID NO: 16914 - DNA, 21 bp, Artificial Sequence
  Description of Artificial Sequence: Synthetic primer
gtaggttcagtgcgtgctttc

SEQ ID NO: 16915 - DNA, 23 bp, Artificial Sequence
  Description of Artificial Sequence: Synthetic primer
tttgcccgacgttgaattattgt

SEQ ID NO: 16916 - DNA, 22 bp, Artificial Sequence
  Description of Artificial Sequence: Synthetic primer
cctggcttttggatgtcgagaa

SEQ ID NO: 16917 - DNA, 28 bp, Artificial Sequence
  Description of Artificial Sequence: Synthetic primer
cactcaatctcagaatttcagagcctaa

SEQ ID NO: 16918 - DNA, 22 bp, Artificial Sequence
  Description of Artificial Sequence: Synthetic primer
caaaacaggcctcattgtccaa

SEQ ID NO: 16919 - DNA, 26 bp, Artificial Sequence
  Description of Artificial Sequence: Synthetic primer
ccagattttctcatacacctgtgagc

SEQ ID NO: 16920 - DNA, 25 bp, Artificial Sequence
  Description of Artificial Sequence: Synthetic primer
ccagtggcaagacgtaattgatcta

SEQ ID NO: 16921 - DNA, 28 bp, Artificial Sequence
  Description of Artificial Sequence: Synthetic primer
tcagcttcatgacagcatatggaattta

SEQ ID NO: 16922 - DNA, 23 bp, Artificial Sequence
  Description of Artificial Sequence: Synthetic primer
tgtccttgacgtcatcagactca

SEQ ID NO: 16923 - DNA, 19 bp, Artificial Sequence
  Description of Artificial Sequence: Synthetic primer
cccgaggttggtcatgacg

SEQ ID NO: 16924 - DNA, 21 bp, Artificial Sequence
  Description of Artificial Sequence: Synthetic primer
ggcagaaggagataccggttg

SEQ ID NO: 16925 - DNA, 21 bp, Artificial Sequence
  Description of Artificial Sequence: Synthetic primer
ccgggatgtccacttcaagaa

SEQ ID NO: 16926 - DNA, 21 bp, Artificial Sequence
  Description of Artificial Sequence: Synthetic primer
tcaaccaccttccgtcttcag

SEQ ID NO: 16927 - DNA, 25 bp, Artificial Sequence
  Description of Artificial Sequence: Synthetic primer
gcatgtatagatgcatggactggaa

SEQ ID NO: 16928 - DNA, 27 bp, Artificial Sequence
  Description of Artificial Sequence: Synthetic primer
tggaatgaacaccaccttcagatattt

SEQ ID NO: 16929 - DNA, 22 bp, Artificial Sequence
  Description of Artificial Sequence: Synthetic primer
gtggtggttgaactcatgatcg

SEQ ID NO: 16930 - DNA, 23 bp, Artificial Sequence
  Description of Artificial Sequence: Synthetic primer
ggtcagatgacaaggctcatcaa

SEQ ID NO: 16931 - DNA, 22 bp, Artificial Sequence
  Description of Artificial Sequence: Synthetic primer
tctttgggatgcaccctctatg

SEQ ID NO: 16932 - DNA, 22 bp, Artificial Sequence
  Description of Artificial Sequence: Synthetic primer
tgattccgttcagctgggtcta

SEQ ID NO: 16933 - DNA, 21 bp, Artificial Sequence
  Description of Artificial Sequence: Synthetic primer
ccatgagcagccagaactttc

SEQ ID NO: 16934 - DNA, 23 bp, Artificial Sequence
  Description of Artificial Sequence: Synthetic primer
ggattccacgaacaaagggattt

SEQ ID NO: 16935 - DNA, 20 bp, Artificial Sequence
  Description of Artificial Sequence: Synthetic primer
cctgcccaccatcttcagtc

SEQ ID NO: 16936 - DNA, 28 bp, Artificial Sequence
  Description of Artificial Sequence: Synthetic primer
tcaacaattcaaccatacaaatggactt

SEQ ID NO: 16937 - DNA, 21 bp, Artificial Sequence
  Description of Artificial Sequence: Synthetic primer
ctgttggcagtccatcaggaa

SEQ ID NO: 16938 - DNA, 25 bp, Artificial Sequence
  Description of Artificial Sequence: Synthetic primer
gggctttaagcaggttgatttgaat

SEQ ID NO: 16939 - DNA, 24 bp, Artificial Sequence
  Description of Artificial Sequence: Synthetic primer
tccaggcatatttcaccttgaagt

SEQ ID NO: 16940 - DNA, 29 bp, Artificial Sequence
  Description of Artificial Sequence: Synthetic primer
ttgtataaaacgatagttcaacagtgcga

SEQ ID NO: 16941 - DNA, 21 bp, Artificial Sequence
  Description of Artificial Sequence: Synthetic primer
tcgtctacacgcacaaggttc

SEQ ID NO: 16942 - DNA, 24 bp, Artificial Sequence
  Description of Artificial Sequence: Synthetic primer
acaatgtggatgcatagcacagta

SEQ ID NO: 16943 - DNA, 25 bp, Artificial Sequence
  Description of Artificial Sequence: Synthetic primer
tgaaatggagggagtacataacagc

SEQ ID NO: 16944 - DNA, 21 bp, Artificial Sequence
  Description of Artificial Sequence: Synthetic primer
tcgccacttcatcggagtttc

SEQ ID NO: 16945 - DNA, 22 bp, Artificial Sequence
  Description of Artificial Sequence: Synthetic primer
ttgctctctctttctcgcaact

SEQ ID NO: 16946 - DNA, 21 bp, Artificial Sequence
  Description of Artificial Sequence: Synthetic primer
tgaagttgctgcaggagaacc

SEQ ID NO: 16947 - DNA, 24 bp, Artificial Sequence
  Description of Artificial Sequence: Synthetic primer
tgggtgtaaacatgaaagggatgt

SEQ ID NO: 16948 - DNA, 21 bp, Artificial Sequence
  Description of Artificial Sequence: Synthetic primer
ctgggactgttgctcttcgtg

SEQ ID NO: 16949 - DNA, 18 bp, Artificial Sequence
  Description of Artificial Sequence: Synthetic primer
tcacgccttgcgtctgaa

SEQ ID NO: 16950 - DNA, 21 bp, Artificial Sequence
  Description of Artificial Sequence: Synthetic primer
atacttcggaggcgagagtgt

SEQ ID NO: 16951 - DNA, 27 bp, Artificial Sequence
  Description of Artificial Sequence: Synthetic primer
gcgagctgtattggtgatgttgtatta

SEQ ID NO: 16952 - DNA, 23 bp, Artificial Sequence
  Description of Artificial Sequence: Synthetic primer
gctgtagttctttccaagtgcct

SEQ ID NO: 16953 - DNA, 21 bp, Artificial Sequence
  Description of Artificial Sequence: Synthetic primer
ttgaaccccactccatcagtg

SEQ ID NO: 16954 - DNA, 21 bp, Artificial Sequence
  Description of Artificial Sequence: Synthetic primer
ggtctgaagaggaagccgatg

SEQ ID NO: 16955 - DNA, 23 bp, Artificial Sequence
  Description of Artificial Sequence: Synthetic primer
gggagacaacattctggatgtgg

SEQ ID NO: 16956 - DNA, 21 bp, Artificial Sequence
  Description of Artificial Sequence: Synthetic primer
ggcgactgaggagcttattgg

SEQ ID NO: 16957 - DNA, 23 bp, Artificial Sequence
  Description of Artificial Sequence: Synthetic primer
agtgcaagaagttttcgaatggc

SEQ ID NO: 16958 - DNA, 21 bp, Artificial Sequence
  Description of Artificial Sequence: Synthetic primer
caaccatgtagaacgcctgct

SEQ ID NO: 16959 - DNA, 21 bp, Artificial Sequence
  Description of Artificial Sequence: Synthetic primer
tcggtgtcgtagttggtttgt

SEQ ID NO: 16960 - DNA, 21 bp, Artificial Sequence
  Description of Artificial Sequence: Synthetic primer
ctccaggcaggcatagagaga

SEQ ID NO: 16961 - DNA, 28 bp, Artificial Sequence
  Description of Artificial Sequence: Synthetic primer
tcgccaactttttaagatacagaaacag

SEQ ID NO: 16962 - DNA, 27 bp, Artificial Sequence
  Description of Artificial Sequence: Synthetic primer
gggacaatagtcctaagaaaatcacca

SEQ ID NO: 16963 - DNA, 19 bp, Artificial Sequence
  Description of Artificial Sequence: Synthetic primer
cagaagagcctggacctga

SEQ ID NO: 16964 - DNA, 28 bp, Artificial Sequence
  Description of Artificial Sequence: Synthetic primer
tcacataattattccagtcaggtaccac

SEQ ID NO: 16965 - DNA, 21 bp, Artificial Sequence
  Description of Artificial Sequence: Synthetic primer
gcaccagcctcgtagtacttg

SEQ ID NO: 16966 - DNA, 21 bp, Artificial Sequence
  Description of Artificial Sequence: Synthetic primer
atcttcaccagctgattgcct

SEQ ID NO: 16967 - DNA, 23 bp, Artificial Sequence
  Description of Artificial Sequence: Synthetic primer
ggatctgctgctgatacacaagt

SEQ ID NO: 16968 - DNA, 21 bp, Artificial Sequence
  Description of Artificial Sequence: Synthetic primer
tgtggaaggagcagatcgact

SEQ ID NO: 16969 - DNA, 26 bp, Artificial Sequence
  Description of Artificial Sequence: Synthetic primer
actttcaaatgtacagggtgtagctc

SEQ ID NO: 16970 - DNA, 22 bp, Artificial Sequence
  Description of Artificial Sequence: Synthetic primer
ccttgtcaccactcagaagctc

SEQ ID NO: 16971 - DNA, 21 bp, Artificial Sequence
  Description of Artificial Sequence: Synthetic primer
gcgactgaggagcttattgct

SEQ ID NO: 16972 - DNA, 21 bp, Artificial Sequence
  Description of Artificial Sequence: Synthetic primer
agcctagcctttcctccagta

SEQ ID NO: 16973 - DNA, 21 bp, Artificial Sequence
  Description of Artificial Sequence: Synthetic primer
caagagcgtgcacatgaaacc

SEQ ID NO: 16974 - DNA, 26 bp, Artificial Sequence
  Description of Artificial Sequence: Synthetic primer
cttggaaataatcctgcaaggttgac

SEQ ID NO: 16975 - DNA, 21 bp, Artificial Sequence
  Description of Artificial Sequence: Synthetic primer
ggcaacaaaccaactcctcct

SEQ ID NO: 16976 - DNA, 21 bp, Artificial Sequence
  Description of Artificial Sequence: Synthetic primer
acattgcagtaccatcaggca

SEQ ID NO: 16977 - DNA, 21 bp, Artificial Sequence
  Description of Artificial Sequence: Synthetic primer
gggcagagctcattgtcatca

SEQ ID NO: 16978 - DNA, 21 bp, Artificial Sequence
  Description of Artificial Sequence: Synthetic primer
gcagcagctgctccttagtat

SEQ ID NO: 16979 - DNA, 27 bp, Artificial Sequence
  Description of Artificial Sequence: Synthetic primer
gcacgcacatacataaaccaaatatga

SEQ ID NO: 16980 - DNA, 22 bp, Artificial Sequence
  Description of Artificial Sequence: Synthetic primer
gcaagatggcaacactgagcta

SEQ ID NO: 16981 - DNA, 24 bp, Artificial Sequence
  Description of Artificial Sequence: Synthetic primer
gcttcttcgagcaaaaaccatgtg

SEQ ID NO: 16982 - DNA, 27 bp, Artificial Sequence
  Description of Artificial Sequence: Synthetic primer
actatcctctacagagctacgcaataa

SEQ ID NO: 16983 - DNA, 22 bp, Artificial Sequence
  Description of Artificial Sequence: Synthetic primer
tcatctcctccctctcgagatc

SEQ ID NO: 16984 - DNA, 21 bp, Artificial Sequence
  Description of Artificial Sequence: Synthetic primer
cgcatcgaccatttcgtcaat

SEQ ID NO: 16985 - DNA, 21 bp, Artificial Sequence
  Description of Artificial Sequence: Synthetic primer
agcactcttgggaaggacact

SEQ ID NO: 16986 - DNA, 23 bp, Artificial Sequence
  Description of Artificial Sequence: Synthetic primer
ccgaaccacaaagaagtacatcg

SEQ ID NO: 16987 - DNA, 27 bp, Artificial Sequence
  Description of Artificial Sequence: Synthetic primer
cgactgtcatgacaagaaccaattcta

SEQ ID NO: 16988 - DNA, 23 bp, Artificial Sequence
  Description of Artificial Sequence: Synthetic primer
acagagggataagccatgtcaag

SEQ ID NO: 16989 - DNA, 22 bp, Artificial Sequence
  Description of Artificial Sequence: Synthetic primer
ccctgtttacgttcaggagtct

SEQ ID NO: 16990 - DNA, 21 bp, Artificial Sequence
  Description of Artificial Sequence: Synthetic primer
atgaagccaagcaacagttcg

SEQ ID NO: 16991 - DNA, 21 bp, Artificial Sequence
  Description of Artificial Sequence: Synthetic primer
tctcctagctccacctcgatc

SEQ ID NO: 16992 - DNA, 23 bp, Artificial Sequence
  Description of Artificial Sequence: Synthetic primer
aggcaggaagttgatggaatcag

SEQ ID NO: 16993 - DNA, 21 bp, Artificial Sequence
  Description of Artificial Sequence: Synthetic primer
ataaattgcaacccgcggact

SEQ ID NO: 16994 - DNA, 19 bp, Artificial Sequence
  Description of Artificial Sequence: Synthetic primer
ggcccatctgtcgttctgg

SEQ ID NO: 16995 - DNA, 23 bp, Artificial Sequence
  Description of Artificial Sequence: Synthetic primer
tccacattgtcaacctcatcaca

SEQ ID NO: 16996 - DNA, 23 bp, Artificial Sequence
  Description of Artificial Sequence: Synthetic primer
catatccttccactgcatcgtct

SEQ ID NO: 16997 - DNA, 27 bp, Artificial Sequence
  Description of Artificial Sequence: Synthetic primer
gcagtaatagcttcccaactttttaca

SEQ ID NO: 16998 - DNA, 28 bp, Artificial Sequence
  Description of Artificial Sequence: Synthetic primer
gggagattagtaagtagctatgctccat

SEQ ID NO: 16999 - DNA, 25 bp, Artificial Sequence
  Description of Artificial Sequence: Synthetic primer
gggtcaaaagaactttgctaaggag

SEQ ID NO: 17000 - DNA, 21 bp, Artificial Sequence
  Description of Artificial Sequence: Synthetic primer
cgttggttgagccagcatttt

SEQ ID NO: 17001 - DNA, 27 bp, Artificial Sequence
  Description of Artificial Sequence: Synthetic primer
aggcaatttaaagatccagacttgaca

SEQ ID NO: 17002 - DNA, 21 bp, Artificial Sequence
  Description of Artificial Sequence: Synthetic primer
ctcaaggcgtccgagatcaaa

SEQ ID NO: 17003 - DNA, 22 bp, Artificial Sequence
  Description of Artificial Sequence: Synthetic primer
cgatctcaatcatctgcacacc

SEQ ID NO: 17004 - DNA, 26 bp, Artificial Sequence
  Description of Artificial Sequence: Synthetic primer
cctgttaactgaaatttgaagggcaa

SEQ ID NO: 17005 - DNA, 21 bp, Artificial Sequence
  Description of Artificial Sequence: Synthetic primer
tgcgtgtgtatagggccaaag

SEQ ID NO: 17006 - DNA, 21 bp, Artificial Sequence
  Description of Artificial Sequence: Synthetic primer
agcagcccactccagaactta

SEQ ID NO: 17007 - DNA, 23 bp, Artificial Sequence
  Description of Artificial Sequence: Synthetic primer
catagatggtgtcgttgtttccg

SEQ ID NO: 17008 - DNA, 24 bp, Artificial Sequence
  Description of Artificial Sequence: Synthetic primer
cccagcagaactttgaaggatagt

SEQ ID NO: 17009 - DNA, 28 bp, Artificial Sequence
  Description of Artificial Sequence: Synthetic primer
tgacttctttcagccataatgttttcag

SEQ ID NO: 17010 - DNA, 22 bp, Artificial Sequence
  Description of Artificial Sequence: Synthetic primer
agcttttggactgtgtggtttc

SEQ ID NO: 17011 - DNA, 26 bp, Artificial Sequence
  Description of Artificial Sequence: Synthetic primer
aggtagttatgacaagggcattgttc

SEQ ID NO: 17012 - DNA, 22 bp, Artificial Sequence
  Description of Artificial Sequence: Synthetic primer
gtctgctccaatgtccttcaag

SEQ ID NO: 17013 - DNA, 25 bp, Artificial Sequence
  Description of Artificial Sequence: Synthetic primer
cttgaagggaagtgttttgttctcc

SEQ ID NO: 17014 - DNA, 25 bp, Artificial Sequence
  Description of Artificial Sequence: Synthetic primer
caacttctaggcctcccttttcttc

SEQ ID NO: 17015 - DNA, 26 bp, Artificial Sequence
  Description of Artificial Sequence: Synthetic primer
cgtgtcataaatgatgtgccattcaa

SEQ ID NO: 17016 - DNA, 21 bp, Artificial Sequence
  Description of Artificial Sequence: Synthetic primer
caggcacctccagtcgtattc

SEQ ID NO: 17017 - DNA, 20 bp, Artificial Sequence
  Description of Artificial Sequence: Synthetic primer
cccatcgaattccactgggt

SEQ ID NO: 17018 - DNA, 27 bp, Artificial Sequence
  Description of Artificial Sequence: Synthetic primer
agctaggaaagcatgtttttcttagtg

SEQ ID NO: 17019 - DNA, 18 bp, Artificial Sequence
  Description of Artificial Sequence: Synthetic primer
cccacaacctgcatgcca

SEQ ID NO: 17020 - DNA, 22 bp, Artificial Sequence
  Description of Artificial Sequence: Synthetic primer
gttgcaaacttccaatgttgcg

SEQ ID NO: 17021 - DNA, 21 bp, Artificial Sequence
  Description of Artificial Sequence: Synthetic primer
gctaaagtaccagccgtcgat

SEQ ID NO: 17022 - DNA, 21 bp, Artificial Sequence
  Description of Artificial Sequence: Synthetic primer
cccatggcaatcctagtctcg

SEQ ID NO: 17023 - DNA, 27 bp, Artificial Sequence
  Description of Artificial Sequence: Synthetic primer
agtttacagatgtacatatggagcaca

SEQ ID NO: 17024 - DNA, 30 bp, Artificial Sequence
  Description of Artificial Sequence: Synthetic primer
aaccatattgatcatcacaaaaagtccaat

SEQ ID NO: 17025 - DNA, 21 bp, Artificial Sequence
  Description of Artificial Sequence: Synthetic primer
gaaagcgagaatggctgcatc

SEQ ID NO: 17026 - DNA, 26 bp, Artificial Sequence
  Description of Artificial Sequence: Synthetic primer
gggacattatatccattccagcattg

SEQ ID NO: 17027 - DNA, 28 bp, Artificial Sequence
  Description of Artificial Sequence: Synthetic primer
gcaagaaagtgaaaagaatctagaccga

SEQ ID NO: 17028 - DNA, 21 bp, Artificial Sequence
  Description of Artificial Sequence: Synthetic primer
taatctgcgctccatgctgag

SEQ ID NO: 17029 - DNA, 24 bp, Artificial Sequence
  Description of Artificial Sequence: Synthetic primer
gcgataagcctttaccagttcttg

SEQ ID NO: 17030 - DNA, 28 bp, Artificial Sequence
  Description of Artificial Sequence: Synthetic primer
agttttacacgtctagtttcttctcagc

SEQ ID NO: 17031 - DNA, 26 bp, Artificial Sequence
  Description of Artificial Sequence: Synthetic primer
acatgtttagcctgtttcattgtgtc

SEQ ID NO: 17032 - DNA, 26 bp, Artificial Sequence
  Description of Artificial Sequence: Synthetic primer
catcatcttctctctttggcgtttac

SEQ ID NO: 17033 - DNA, 22 bp, Artificial Sequence
  Description of Artificial Sequence: Synthetic primer
tgaaggaagtgcagactatgcg

SEQ ID NO: 17034 - DNA, 21 bp, Artificial Sequence
  Description of Artificial Sequence: Synthetic primer
tgtcagccttttcctctctgc

SEQ ID NO: 17035 - DNA, 21 bp, Artificial Sequence
  Description of Artificial Sequence: Synthetic primer
gcctgcacacctatcctgaat

SEQ ID NO: 17036 - DNA, 27 bp, Artificial Sequence
  Description of Artificial Sequence: Synthetic primer
tctgaaaggagacatgattcttccatt

SEQ ID NO: 17037 - DNA, 25 bp, Artificial Sequence
  Description of Artificial Sequence: Synthetic primer
tgttgtttcaaaaaggactccttcg

SEQ ID NO: 17038 - DNA, 23 bp, Artificial Sequence
  Description of Artificial Sequence: Synthetic primer
actgcctgttcttcttcttgaca

SEQ ID NO: 17039 - DNA, 21 bp, Artificial Sequence
  Description of Artificial Sequence: Synthetic primer
tccatatacaccggtcagggt

SEQ ID NO: 17040 - DNA, 23 bp, Artificial Sequence
  Description of Artificial Sequence: Synthetic primer
cctctcttgagtgaccctgtttc

SEQ ID NO: 17041 - DNA, 22 bp, Artificial Sequence
  Description of Artificial Sequence: Synthetic primer
caggcaggagcatagaagctag

SEQ ID NO: 17042 - DNA, 19 bp, Artificial Sequence
  Description of Artificial Sequence: Synthetic primer
gatccgtctaggccaccca

SEQ ID NO: 17043 - DNA, 24 bp, Artificial Sequence
  Description of Artificial Sequence: Synthetic primer
acagaaaagactgctcaaccatca

SEQ ID NO: 17044 - DNA, 23 bp, Artificial Sequence
  Description of Artificial Sequence: Synthetic primer
gcagagaatggaactgcataagc

SEQ ID NO: 17045 - DNA, 21 bp, Artificial Sequence
  Description of Artificial Sequence: Synthetic primer
aaaccctggtgtagcatgtcc

SEQ ID NO: 17046 - DNA, 26 bp, Artificial Sequence
  Description of Artificial Sequence: Synthetic primer
catcacgtccatgattgagcttaaat

SEQ ID NO: 17047 - DNA, 25 bp, Artificial Sequence
  Description of Artificial Sequence: Synthetic primer
gagaaggtgaggaatatgactgagg

SEQ ID NO: 17048 - DNA, 28 bp, Artificial Sequence
  Description of Artificial Sequence: Synthetic primer
acttttgaacaaactcgtaaatctctcg

SEQ ID NO: 17049 - DNA, 18 bp, Artificial Sequence
  Description of Artificial Sequence: Synthetic primer
agcggcacaccgtagatg

SEQ ID NO: 17050 - DNA, 21 bp, Artificial Sequence
  Description of Artificial Sequence: Synthetic primer
ccacattgccgaaaccaagtg

SEQ ID NO: 17051 - DNA, 23 bp, Artificial Sequence
  Description of Artificial Sequence: Synthetic primer
actgcaagtcttcaagttcagga

SEQ ID NO: 17052 - DNA, 22 bp, Artificial Sequence
  Description of Artificial Sequence: Synthetic primer
cccttgtcccgatctatggatg

SEQ ID NO: 17053 - DNA, 25 bp, Artificial Sequence
  Description of Artificial Sequence: Synthetic primer
tctttgtcggtcctcttattaagca

SEQ ID NO: 17054 - DNA, 21 bp, Artificial Sequence
  Description of Artificial Sequence: Synthetic primer
ggaggccgtaacttggttgat

SEQ ID NO: 17055 - DNA, 23 bp, Artificial Sequence
  Description of Artificial Sequence: Synthetic primer
ttctaaggtccctgcaatggtac

SEQ ID NO: 17056 - DNA, 21 bp, Artificial Sequence
  Description of Artificial Sequence: Synthetic primer
cccagctagacactcaaagcg

SEQ ID NO: 17057 - DNA, 24 bp, Artificial Sequence
  Description of Artificial Sequence: Synthetic primer
acacggacatcctcaaacatttct

SEQ ID NO: 17058 - DNA, 21 bp, Artificial Sequence
  Description of Artificial Sequence: Synthetic primer
gtgaaggacctgcccatcaaa

SEQ ID NO: 17059 - DNA, 21 bp, Artificial Sequence
  Description of Artificial Sequence: Synthetic primer
catgtgcacaaccttctccac

SEQ ID NO: 17060 - DNA, 23 bp, Artificial Sequence
  Description of Artificial Sequence: Synthetic primer
gcattcaagatgatgccaaggat

SEQ ID NO: 17061 - DNA, 28 bp, Artificial Sequence
  Description of Artificial Sequence: Synthetic primer
tctgctcaaatgatagtacataccctct

SEQ ID NO: 17062 - DNA, 21 bp, Artificial Sequence
  Description of Artificial Sequence: Synthetic primer
acatgaagcagggcatgctta

SEQ ID NO: 17063 - DNA, 27 bp, Artificial Sequence
  Description of Artificial Sequence: Synthetic primer
ccacatagcacactatagtttggagtt

SEQ ID NO: 17064 - DNA, 25 bp, Artificial Sequence
  Description of Artificial Sequence: Synthetic primer
agatgctttccttttctgcactaga

SEQ ID NO: 17065 - DNA, 20 bp, Artificial Sequence
  Description of Artificial Sequence: Synthetic primer
tgtaccaggagagcataccg

SEQ ID NO: 17066 - DNA, 24 bp, Artificial Sequence
  Description of Artificial Sequence: Synthetic primer
cccctttctctagaaacggatcac

SEQ ID NO: 17067 - DNA, 22 bp, Artificial Sequence
  Description of Artificial Sequence: Synthetic primer
gtatgggtccatgtttgaggct

SEQ ID NO: 17068 - DNA, 21 bp, Artificial Sequence
  Description of Artificial Sequence: Synthetic primer
ctcctcggtgctggattcatc

SEQ ID NO: 17069 - DNA, 19 bp, Artificial Sequence
  Description of Artificial Sequence: Synthetic primer
ctgacgcggagtcgaagag

SEQ ID NO: 17070 - DNA, 24 bp, Artificial Sequence
  Description of Artificial Sequence: Synthetic primer
ggacatactgacaacctcatctgc

SEQ ID NO: 17071 - DNA, 23 bp, Artificial Sequence
  Description of Artificial Sequence: Synthetic primer
tggtccgataacctcacttttgc

SEQ ID NO: 17072 - DNA, 21 bp, Artificial Sequence
  Description of Artificial Sequence: Synthetic primer
ggaatccttccgagctctgat

SEQ ID NO: 17073 - DNA, 21 bp, Artificial Sequence
  Description of Artificial Sequence: Synthetic primer
gggatttgcgatggacgaagt

SEQ ID NO: 17074 - DNA, 24 bp, Artificial Sequence
  Description of Artificial Sequence: Synthetic primer
caacccccataacaaaaacatccc

SEQ ID NO: 17075 - DNA, 22 bp, Artificial Sequence
  Description of Artificial Sequence: Synthetic primer
cagcggcaccaggtaaataaaa

SEQ ID NO: 17076 - DNA, 24 bp, Artificial Sequence
  Description of Artificial Sequence: Synthetic primer
acaatgactagctagtggctcaag

SEQ ID NO: 17077 - DNA, 23 bp, Artificial Sequence
  Description of Artificial Sequence: Synthetic primer
agcatggctaaaattgcctcttc

SEQ ID NO: 17078 - DNA, 28 bp, Artificial Sequence
  Description of Artificial Sequence: Synthetic primer
cagtgcttcaactaaggagattttctct

SEQ ID NO: 17079 - DNA, 23 bp, Artificial Sequence
  Description of Artificial Sequence: Synthetic primer
cgcttcatcagacgagaacaaac

SEQ ID NO: 17080 - DNA, 21 bp, Artificial Sequence
  Description of Artificial Sequence: Synthetic primer
tgttcttccatgtccggatcg

SEQ ID NO: 17081 - DNA, 28 bp, Artificial Sequence
  Description of Artificial Sequence: Synthetic primer
acagagtgtttatattccagtctgacat

SEQ ID NO: 17082 - DNA, 24 bp, Artificial Sequence
  Description of Artificial Sequence: Synthetic primer
ccgtataacggtcgatttgtctct

SEQ ID NO: 17083 - DNA, 22 bp, Artificial Sequence
  Description of Artificial Sequence: Synthetic primer
acttgcgtttcttcttgttgcg

SEQ ID NO: 17084 - DNA, 27 bp, Artificial Sequence
  Description of Artificial Sequence: Synthetic primer
gtcttcagtatctgagcctctattcct

SEQ ID NO: 17085 - DNA, 21 bp, Artificial Sequence
  Description of Artificial Sequence: Synthetic primer
actttgacgtcaccgtctctg

SEQ ID NO: 17086 - DNA, 27 bp, Artificial Sequence
  Description of Artificial Sequence: Synthetic primer
acctcacatcaaatcaactctatgaca

SEQ ID NO: 17087 - DNA, 25 bp, Artificial Sequence
  Description of Artificial Sequence: Synthetic primer
accagaaaacccttttgtgtgaatc

SEQ ID NO: 17088 - DNA, 23 bp, Artificial Sequence
  Description of Artificial Sequence: Synthetic primer
gggtgttgagaaaatcaggagca

SEQ ID NO: 17089 - DNA, 22 bp, Artificial Sequence
  Description of Artificial Sequence: Synthetic primer
tccagtagagcgttgtctcaag

SEQ ID NO: 17090 - DNA, 28 bp, Artificial Sequence
  Description of Artificial Sequence: Synthetic primer
caaattcaaaggaactcaaaacatcacg

SEQ ID NO: 17091 - DNA, 22 bp, Artificial Sequence
  Description of Artificial Sequence: Synthetic primer
actggaggacattcaggtcctt

SEQ ID NO: 17092 - DNA, 19 bp, Artificial Sequence
  Description of Artificial Sequence: Synthetic primer
cacatgggcaccagtgaca

SEQ ID NO: 17093 - DNA, 25 bp, Artificial Sequence
  Description of Artificial Sequence: Synthetic primer
agtctgatgctttattcagtggctt

SEQ ID NO: 17094 - DNA, 18 bp, Artificial Sequence
  Description of Artificial Sequence: Synthetic primer
acgcgacgaccatgactc

SEQ ID NO: 17095 - DNA, 23 bp, Artificial Sequence
  Description of Artificial Sequence: Synthetic primer
gctcttaatgtcactgggttggt

SEQ ID NO: 17096 - DNA, 21 bp, Artificial Sequence
  Description of Artificial Sequence: Synthetic primer
tcacttgcttgtgttcagcag

SEQ ID NO: 17097 - DNA, 22 bp, Artificial Sequence
  Description of Artificial Sequence: Synthetic primer
ggcaggcaaattgtcaatgtcc

SEQ ID NO: 17098 - DNA, 21 bp, Artificial Sequence
  Description of Artificial Sequence: Synthetic primer
cactggcaagttgcagaaagg

SEQ ID NO: 17099 - DNA, 25 bp, Artificial Sequence
  Description of Artificial Sequence: Synthetic primer
acagctgagaaggaacaattcaact

SEQ ID NO: 17100 - DNA, 21 bp, Artificial Sequence
  Description of Artificial Sequence: Synthetic primer
tggcatcaacaccacacttgt

SEQ ID NO: 17101 - DNA, 26 bp, Artificial Sequence
  Description of Artificial Sequence: Synthetic primer
agctagactactaagaggacacaaga

SEQ ID NO: 17102 - DNA, 19 bp, Artificial Sequence
  Description of Artificial Sequence: Synthetic primer
gcctgatggcagattccga

SEQ ID NO: 17103 - DNA, 26 bp, Artificial Sequence
  Description of Artificial Sequence: Synthetic primer
attaaggtaaccaagtgttgcatagc

SEQ ID NO: 17104 - DNA, 24 bp, Artificial Sequence
  Description of Artificial Sequence: Synthetic primer
ttttgaatcagtgcatcacaagca

SEQ ID NO: 17105 - DNA, 21 bp, Artificial Sequence
  Description of Artificial Sequence: Synthetic primer
atcgacctgaagctgaagctg

SEQ ID NO: 17106 - DNA, 26 bp, Artificial Sequence
  Description of Artificial Sequence: Synthetic primer
gcagctccaagtattatgttaatgcg

SEQ ID NO: 17107 - DNA, 29 bp, Artificial Sequence
  Description of Artificial Sequence: Synthetic primer
tcagtcattttcttgattttctcaactgg

SEQ ID NO: 17108 - DNA, 25 bp, Artificial Sequence
  Description of Artificial Sequence: Synthetic primer
accgagtctctagatatacaagcct

SEQ ID NO: 17109 - DNA, 24 bp, Artificial Sequence
  Description of Artificial Sequence: Synthetic primer
aaggatgattttggcagcattgat

SEQ ID NO: 17110 - DNA, 23 bp, Artificial Sequence
  Description of Artificial Sequence: Synthetic primer
gagctcggtgatgcatattcaac

SEQ ID NO: 17111 - DNA, 28 bp, Artificial Sequence
  Description of Artificial Sequence: Synthetic primer
actttatatatcgtacaccttgatcgca

SEQ ID NO: 17112 - DNA, 25 bp, Artificial Sequence
  Description of Artificial Sequence: Synthetic primer
cagaagagaaacggttgtcaacaaa

SEQ ID NO: 17113 - DNA, 21 bp, Artificial Sequence
  Description of Artificial Sequence: Synthetic primer
cttccccatgctcctttcttc

SEQ ID NO: 17114 - DNA, 30 bp, Artificial Sequence
  Description of Artificial Sequence: Synthetic primer
acatcagacaaatccttctttttctacctt

SEQ ID NO: 17115 - DNA, 22 bp, Artificial Sequence
  Description of Artificial Sequence: Synthetic primer
aatattaacaccccaggtgcca

SEQ ID NO: 17116 - DNA, 22 bp, Artificial Sequence
  Description of Artificial Sequence: Synthetic primer
ctcttgacgaaggctgtcatct

SEQ ID NO: 17117 - DNA, 29 bp, Artificial Sequence
  Description of Artificial Sequence: Synthetic primer
agtatccagttagcttgacatcatgattt

SEQ ID NO: 17118 - DNA, 21 bp, Artificial Sequence
  Description of Artificial Sequence: Synthetic primer
aaggtcaccttcttggacgac

SEQ ID NO: 17119 - DNA, 21 bp, Artificial Sequence
  Description of Artificial Sequence: Synthetic primer
tctcttggaacggaacggaac

SEQ ID NO: 17120 - DNA, 18 bp, Artificial Sequence
  Description of Artificial Sequence: Synthetic primer
cacgacgtgctccgcttc

SEQ ID NO: 17121 - DNA, 23 bp, Artificial Sequence
  Description of Artificial Sequence: Synthetic primer
gcctgtccaagaagttgaacatt

SEQ ID NO: 17122 - DNA, 21 bp, Artificial Sequence
  Description of Artificial Sequence: Synthetic primer
caggatagtgcccctcatctg

SEQ ID NO: 17123 - DNA, 25 bp, Artificial Sequence
  Description of Artificial Sequence: Synthetic primer
ccacctacgagccataaaactgtat

SEQ ID NO: 17124 - DNA, 25 bp, Artificial Sequence
  Description of Artificial Sequence: Synthetic primer
gcatctagtttcgaactcttgacca

SEQ ID NO: 17125 - DNA, 21 bp, Artificial Sequence
  Description of Artificial Sequence: Synthetic primer
caagatcactccgcaatcgct

SEQ ID NO: 17126 - DNA, 21 bp, Artificial Sequence
  Description of Artificial Sequence: Synthetic primer
gtcgacgtgccgaacaatatc

SEQ ID NO: 17127 - DNA, 27 bp, Artificial Sequence
  Description of Artificial Sequence: Synthetic primer
tgttcggtgtagatagatttgatgcaa

SEQ ID NO: 17128 - DNA, 21 bp, Artificial Sequence
  Description of Artificial Sequence: Synthetic primer
cttgtgtttccgcttctgctt

SEQ ID NO: 17129 - DNA, 22 bp, Artificial Sequence
  Description of Artificial Sequence: Synthetic primer
tgtccaaccatggtgtcttcat

SEQ ID NO: 17130 - DNA, 22 bp, Artificial Sequence
  Description of Artificial Sequence: Synthetic primer
gggtctgatgaagccaagagat

SEQ ID NO: 17131 - DNA, 18 bp, Artificial Sequence
  Description of Artificial Sequence: Synthetic primer
ctgcaagccccaaccttg

SEQ ID NO: 17132 - DNA, 23 bp, Artificial Sequence
  Description of Artificial Sequence: Synthetic primer
tctgaaatggattgaccagctct

SEQ ID NO: 17133 - DNA, 26 bp, Artificial Sequence
  Description of Artificial Sequence: Synthetic primer
gctgacactgtctctactgtaaatcc

SEQ ID NO: 17134 - DNA, 25 bp, Artificial Sequence
  Description of Artificial Sequence: Synthetic primer
gcatagagcacaatggatacgttga

SEQ ID NO: 17135 - DNA, 24 bp, Artificial Sequence
  Description of Artificial Sequence: Synthetic primer
acaaagggcggcttaaatatcatg

SEQ ID NO: 17136 - DNA, 20 bp, Artificial Sequence
  Description of Artificial Sequence: Synthetic primer
tgtcagtggaatgcctcagc

SEQ ID NO: 17137 - DNA, 21 bp, Artificial Sequence
  Description of Artificial Sequence: Synthetic primer
cgcagtcaatggagctacctg

SEQ ID NO: 17138 - DNA, 26 bp, Artificial Sequence
  Description of Artificial Sequence: Synthetic primer
gcatactgaaaaactgaacattgcca

SEQ ID NO: 17139 - DNA, 27 bp, Artificial Sequence
  Description of Artificial Sequence: Synthetic primer
catatacggatggtgattttacaggga

SEQ ID NO: 17140 - DNA, 21 bp, Artificial Sequence
  Description of Artificial Sequence: Synthetic primer
gtgatgtgtgcgctatgtgtc

SEQ ID NO: 17141 - DNA, 21 bp, Artificial Sequence
  Description of Artificial Sequence: Synthetic primer
cttgtcatacgccgacgtctc

SEQ ID NO: 17142 - DNA, 30 bp, Artificial Sequence
  Description of Artificial Sequence: Synthetic primer
aagttctttccttcaattgttttacctttt

SEQ ID NO: 17143 - DNA, 21 bp, Artificial Sequence
  Description of Artificial Sequence: Synthetic primer
aactggacactgggtgacttg

SEQ ID NO: 17144 - DNA, 21 bp, Artificial Sequence
  Description of Artificial Sequence: Synthetic primer
atgtccctcaggaactccatg

SEQ ID NO: 17145 - DNA, 30 bp, Artificial Sequence
  Description of Artificial Sequence: Synthetic primer
aatcatgtgaaaaatgtgacaacatctctt

SEQ ID NO: 17146 - DNA, 21 bp, Artificial Sequence
  Description of Artificial Sequence: Synthetic primer
gcctgcagaacccaacttttt

SEQ ID NO: 17147 - DNA, 21 bp, Artificial Sequence
  Description of Artificial Sequence: Synthetic primer
ccgctttgagaagtacatgcc

SEQ ID NO: 17148 - DNA, 30 bp, Artificial Sequence
  Description of Artificial Sequence: Synthetic primer
aaaaactttgcgaatataagctacaattct

SEQ ID NO: 17149 - DNA, 21 bp, Artificial Sequence
  Description of Artificial Sequence: Synthetic primer
ctccactttcttctcgccact

SEQ ID NO: 17150 - DNA, 22 bp, Artificial Sequence
  Description of Artificial Sequence: Synthetic primer
tcaaggtactccagaattgcca

SEQ ID NO: 17151 - DNA, 23 bp, Artificial Sequence
  Description of Artificial Sequence: Synthetic primer
accgtatccttgatcacaaacct

SEQ ID NO: 17152 - DNA, 21 bp, Artificial Sequence
  Description of Artificial Sequence: Synthetic primer
aacgcatacggtaccatggtt

SEQ ID NO: 17153 - DNA, 23 bp, Artificial Sequence
  Description of Artificial Sequence: Synthetic primer
agcagaggacatcaacgacaatt

SEQ ID NO: 17154 - DNA, 23 bp, Artificial Sequence
  Description of Artificial Sequence: Synthetic primer
caccactccccttgtcattgtaa

SEQ ID NO: 17155 - DNA, 25 bp, Artificial Sequence
  Description of Artificial Sequence: Synthetic primer
catacatttttctccacctcgctga

SEQ ID NO: 17156 - DNA, 24 bp, Artificial Sequence
  Description of Artificial Sequence: Synthetic primer
ggtctaaaactcgaatctgtcgga

SEQ ID NO: 17157 - DNA, 27 bp, Artificial Sequence
  Description of Artificial Sequence: Synthetic primer
atctattttccttccctttctgcttct

SEQ ID NO: 17158 - DNA, 24 bp, Artificial Sequence
  Description of Artificial Sequence: Synthetic primer
tgaccatctgagtatgcagtaacc

SEQ ID NO: 17159 - DNA, 26 bp, Artificial Sequence
  Description of Artificial Sequence: Synthetic primer
cattaagcaaccaaggcataaacaga

SEQ ID NO: 17160 - DNA, 21 bp, Artificial Sequence
  Description of Artificial Sequence: Synthetic primer
cactgcaaagcttccacatga

SEQ ID NO: 17161 - DNA, 25 bp, Artificial Sequence
  Description of Artificial Sequence: Synthetic primer
cgaatcctcatcgtaactagttgcc

SEQ ID NO: 17162 - DNA, 24 bp, Artificial Sequence
  Description of Artificial Sequence: Synthetic primer
agagattacggaggaggatatccg

SEQ ID NO: 17163 - DNA, 25 bp, Artificial Sequence
  Description of Artificial Sequence: Synthetic primer
gtgatcttgttgtgcaacttaaggg

SEQ ID NO: 17164 - DNA, 21 bp, Artificial Sequence
  Description of Artificial Sequence: Synthetic primer
gaacgatccgtgctgtgcata

SEQ ID NO: 17165 - DNA, 22 bp, Artificial Sequence
  Description of Artificial Sequence: Synthetic primer
aagactagctgagttcatcgca

SEQ ID NO: 17166 - DNA, 28 bp, Artificial Sequence
  Description of Artificial Sequence: Synthetic primer
gtggaagacctgataacttctgagaaaa

SEQ ID NO: 17167 - DNA, 25 bp, Artificial Sequence
  Description of Artificial Sequence: Synthetic primer
tcctgtttctctgagacagcttgta

SEQ ID NO: 17168 - DNA, 22 bp, Artificial Sequence
  Description of Artificial Sequence: Synthetic primer
aagacccttgtacaaagcacca

SEQ ID NO: 17169 - DNA, 28 bp, Artificial Sequence
  Description of Artificial Sequence: Synthetic primer
gtgcatttaaacgcaagtgagtatatgt

SEQ ID NO: 17170 - DNA, 24 bp, Artificial Sequence
  Description of Artificial Sequence: Synthetic primer
gcattctgtatcctctttgtcagc

SEQ ID NO: 17171 - DNA, 21 bp, Artificial Sequence
  Description of Artificial Sequence: Synthetic primer
gcactctctccatgtcaaagc

SEQ ID NO: 17172 - DNA, 28 bp, Artificial Sequence
  Description of Artificial Sequence: Synthetic primer
gtcgtacatgtcaaaagatttcagttca

SEQ ID NO: 17173 - DNA, 27 bp, Artificial Sequence
  Description of Artificial Sequence: Synthetic primer
gagttctagcattaggattgcacaatt

SEQ ID NO: 17174 - DNA, 21 bp, Artificial Sequence
  Description of Artificial Sequence: Synthetic primer
tcagtgtctccccacatggat

SEQ ID NO: 17175 - DNA, 22 bp, Artificial Sequence
  Description of Artificial Sequence: Synthetic primer
aggatgtcgagtagctcagttg

SEQ ID NO: 17176 - DNA, 26 bp, Artificial Sequence
  Description of Artificial Sequence: Synthetic primer
cctcccgaagccatattgtaaatttg

SEQ ID NO: 17177 - DNA, 21 bp, Artificial Sequence
  Description of Artificial Sequence: Synthetic primer
cgggagtcatattgtggagca

SEQ ID NO: 17178 - DNA, 28 bp, Artificial Sequence
  Description of Artificial Sequence: Synthetic primer
ttgtcataaggaacaaaagcttctatgg

SEQ ID NO: 17179 - DNA, 21 bp, Artificial Sequence
  Description of Artificial Sequence: Synthetic primer
caacaaccctgcttcgactga

SEQ ID NO: 17180 - DNA, 26 bp, Artificial Sequence
  Description of Artificial Sequence: Synthetic primer
ggaatgattcagggtatttctgctgt

SEQ ID NO: 17181 - DNA, 25 bp, Artificial Sequence
  Description of Artificial Sequence: Synthetic primer
tctggaatgaacatagagtggaagc

SEQ ID NO: 17182 - DNA, 24 bp, Artificial Sequence
  Description of Artificial Sequence: Synthetic primer
caccgactgacgacatttttcttc

SEQ ID NO: 17183 - DNA, 25 bp, Artificial Sequence
  Description of Artificial Sequence: Synthetic primer
acagggaggacactttgtgtttatc

SEQ ID NO: 17184 - DNA, 21 bp, Artificial Sequence
  Description of Artificial Sequence: Synthetic primer
gagatgagcaaagctgatggc

SEQ ID NO: 17185 - DNA, 19 bp, Artificial Sequence
  Description of Artificial Sequence: Synthetic primer
gagccccaggagatcactc

SEQ ID NO: 17186 - DNA, 24 bp, Artificial Sequence
  Description of Artificial Sequence: Synthetic primer
tgttcacccattggagattccaaa

SEQ ID NO: 17187 - DNA, 21 bp, Artificial Sequence
  Description of Artificial Sequence: Synthetic primer
ggttctcttcgtcctccttgc

SEQ ID NO: 17188 - DNA, 21 bp, Artificial Sequence
  Description of Artificial Sequence: Synthetic primer
tgccgcctaatcacatcagtt

SEQ ID NO: 17189 - DNA, 21 bp, Artificial Sequence
  Description of Artificial Sequence: Synthetic primer
tttagttcaggcatgcgcaca

SEQ ID NO: 17190 - DNA, 21 bp, Artificial Sequence
  Description of Artificial Sequence: Synthetic primer
gtcgggagacattgccaatga

SEQ ID NO: 17191 - DNA, 28 bp, Artificial Sequence
  Description of Artificial Sequence: Synthetic primer
gcaataacggaatgcaaactgatagaat

SEQ ID NO: 17192 - DNA, 23 bp, Artificial Sequence
  Description of Artificial Sequence: Synthetic primer
caatgccttggcctttgttaaga

SEQ ID NO: 17193 - DNA, 23 bp, Artificial Sequence
  Description of Artificial Sequence: Synthetic primer
tccttgtccagctggactagtta

SEQ ID NO: 17194 - DNA, 21 bp, Artificial Sequence
  Description of Artificial Sequence: Synthetic primer
cttttcgcagtcaacctccca

SEQ ID NO: 17195 - DNA, 22 bp, Artificial Sequence
  Description of Artificial Sequence: Synthetic primer
agggattagacagtgccatgac

SEQ ID NO: 17196 - DNA, 22 bp, Artificial Sequence
  Description of Artificial Sequence: Synthetic primer
gcctcactgcaaaaagtgacat

SEQ ID NO: 17197 - DNA, 21 bp, Artificial Sequence
  Description of Artificial Sequence: Synthetic primer
gagagcttgaccgaactccag

SEQ ID NO: 17198 - DNA, 21 bp, Artificial Sequence
  Description of Artificial Sequence: Synthetic primer
ccaccccattgactcttggtc

SEQ ID NO: 17199 - DNA, 25 bp, Artificial Sequence
  Description of Artificial Sequence: Synthetic primer
gatgaagaaaaggcatcacacaaga

SEQ ID NO: 17200 - DNA, 22 bp, Artificial Sequence
  Description of Artificial Sequence: Synthetic primer
cagcattcagtgtctctcaagc

SEQ ID NO: 17201 - DNA, 21 bp, Artificial Sequence
  Description of Artificial Sequence: Synthetic primer
agacccccaactccaagttga

SEQ ID NO: 17202 - DNA, 28 bp, Artificial Sequence
  Description of Artificial Sequence: Synthetic primer
cgaccagagtcaggaagaatataaccta

SEQ ID NO: 17203 - DNA, 22 bp, Artificial Sequence
  Description of Artificial Sequence: Synthetic primer
atacccgataacaccagaggca

SEQ ID NO: 17204 - DNA, 21 bp, Artificial Sequence
  Description of Artificial Sequence: Synthetic primer
gaaattcccctcctcaatgcg

SEQ ID NO: 17205 - DNA, 25 bp, Artificial Sequence
  Description of Artificial Sequence: Synthetic primer
caacttcgctgaaatctgaacctac

SEQ ID NO: 17206 - DNA, 29 bp, Artificial Sequence
  Description of Artificial Sequence: Synthetic primer
agcatcacctactgcttgattaattaact

SEQ ID NO: 17207 - DNA, 21 bp, Artificial Sequence
  Description of Artificial Sequence: Synthetic primer
cgaaacaacaaggtccctcca

SEQ ID NO: 17208 - DNA, 27 bp, Artificial Sequence
  Description of Artificial Sequence: Synthetic primer
ttccctcaacaacataaataacttccg

SEQ ID NO: 17209 - DNA, 25 bp, Artificial Sequence
  Description of Artificial Sequence: Synthetic primer
agcgacatctttatccatgagaagg

SEQ ID NO: 17210 - DNA, 18 bp, Artificial Sequence
  Description of Artificial Sequence: Synthetic primer
ccccggcagagtgatcca

SEQ ID NO: 17211 - DNA, 21 bp, Artificial Sequence
  Description of Artificial Sequence: Synthetic primer
cacattgacgggaaggtggag

SEQ ID NO: 17212 - DNA, 28 bp, Artificial Sequence
  Description of Artificial Sequence: Synthetic primer
gatgatccaaatagacccaatcggtatt

SEQ ID NO: 17213 - DNA, 24 bp, Artificial Sequence
  Description of Artificial Sequence: Synthetic primer
ggcttgataatgggagactactcg

SEQ ID NO: 17214 - DNA, 28 bp, Artificial Sequence
  Description of Artificial Sequence: Synthetic primer
tgaatttcacacctttgaatttgctaca

SEQ ID NO: 17215 - DNA, 27 bp, Artificial Sequence
  Description of Artificial Sequence: Synthetic primer
actccggataacacctagttactcttt

SEQ ID NO: 17216 - DNA, 23 bp, Artificial Sequence
  Description of Artificial Sequence: Synthetic primer
cttttcgtgcagatgttattcgg

SEQ ID NO: 17217 - DNA, 21 bp, Artificial Sequence
  Description of Artificial Sequence: Synthetic primer
gttcaacacagccttgggaga

SEQ ID NO: 17218 - DNA, 24 bp, Artificial Sequence
  Description of Artificial Sequence: Synthetic primer
tcttgtttggtactcgagaactcc

SEQ ID NO: 17219 - DNA, 23 bp, Artificial Sequence
  Description of Artificial Sequence: Synthetic primer
gctgttgttcgtacagggatctg

SEQ ID NO: 17220 - DNA, 23 bp, Artificial Sequence
  Description of Artificial Sequence: Synthetic primer
gcagttccagtctttaggaaggg

SEQ ID NO: 17221 - DNA, 22 bp, Artificial Sequence
  Description of Artificial Sequence: Synthetic primer
tctgatccatcaaagtggcgtt

SEQ ID NO: 17222 - DNA, 28 bp, Artificial Sequence
  Description of Artificial Sequence: Synthetic primer
ccaaatgtgtcatctccaaatgtcaaat

SEQ ID NO: 17223 - DNA, 22 bp, Artificial Sequence
  Description of Artificial Sequence: Synthetic primer
tgttgcgtactcatttcctcct

SEQ ID NO: 17224 - DNA, 29 bp, Artificial Sequence
  Description of Artificial Sequence: Synthetic primer
tcagataaagaagcgttcaatctaatcgt

SEQ ID NO: 17225 - DNA, 24 bp, Artificial Sequence
  Description of Artificial Sequence: Synthetic primer
cctgcaagcctatacaaaccaaac

SEQ ID NO: 17226 - DNA, 21 bp, Artificial Sequence
  Description of Artificial Sequence: Synthetic primer
agctgcgtttgttcccttcaa

SEQ ID NO: 17227 - DNA, 21 bp, Artificial Sequence
  Description of Artificial Sequence: Synthetic primer
gtggaggtgctgaggaatcag

SEQ ID NO: 17228 - DNA, 24 bp, Artificial Sequence
  Description of Artificial Sequence: Synthetic primer
accgtgaattgataaccgtagtcg

SEQ ID NO: 17229 - DNA, 23 bp, Artificial Sequence
  Description of Artificial Sequence: Synthetic primer
gagcgtagaaagtttcctagcct

SEQ ID NO: 17230 - DNA, 21 bp, Artificial Sequence
  Description of Artificial Sequence: Synthetic primer
aggcgaactcacagcattcac

SEQ ID NO: 17231 - DNA, 21 bp, Artificial Sequence
  Description of Artificial Sequence: Synthetic primer
tcacgagaactgcctccaaga

SEQ ID NO: 17232 - DNA, 23 bp, Artificial Sequence
  Description of Artificial Sequence: Synthetic primer
gggttggagaaaccatggtttca

SEQ ID NO: 17233 - DNA, 28 bp, Artificial Sequence
  Description of Artificial Sequence: Synthetic primer
gaaaaagctcaggaattctttaccagtt

SEQ ID NO: 17234 - DNA, 22 bp, Artificial Sequence
  Description of Artificial Sequence: Synthetic primer
cggtaccattagaaagcgcctt

SEQ ID NO: 17235 - DNA, 21 bp, Artificial Sequence
  Description of Artificial Sequence: Synthetic primer
actactgcgactcgtcgatac

SEQ ID NO: 17236 - DNA, 24 bp, Artificial Sequence
  Description of Artificial Sequence: Synthetic primer
ccaagcttgcaacagattttcagg

SEQ ID NO: 17237 - DNA, 22 bp, Artificial Sequence
  Description of Artificial Sequence: Synthetic primer
gccaggtttgctccagaagata

SEQ ID NO: 17238 - DNA, 19 bp, Artificial Sequence
  Description of Artificial Sequence: Synthetic primer
cggactgaggcctatctcg

SEQ ID NO: 17239 - DNA, 25 bp, Artificial Sequence
  Description of Artificial Sequence: Synthetic primer
gcttttcagagtgtggaggtattga

SEQ ID NO: 17240 - DNA, 25 bp, Artificial Sequence
  Description of Artificial Sequence: Synthetic primer
ccacagaataaaacagcaacgactc

SEQ ID NO: 17241 - DNA, 23 bp, Artificial Sequence
  Description of Artificial Sequence: Synthetic primer
cccttggaacgtctctcgttaag

SEQ ID NO: 17242 - DNA, 22 bp, Artificial Sequence
  Description of Artificial Sequence: Synthetic primer
gccaaagatggatgcaagtgtt

SEQ ID NO: 17243 - DNA, 24 bp, Artificial Sequence
  Description of Artificial Sequence: Synthetic primer
ctgaagtcgtcgtcgttgtaattc

SEQ ID NO: 17244 - DNA, 30 bp, Artificial Sequence
  Description of Artificial Sequence: Synthetic primer
gactcggtaattaacaattgaggtactact

SEQ ID NO: 17245 - DNA, 21 bp, Artificial Sequence
  Description of Artificial Sequence: Synthetic primer
ggttcttcctcctcccctaca

SEQ ID NO: 17246 - DNA, 28 bp, Artificial Sequence
  Description of Artificial Sequence: Synthetic primer
tgtcaagtatgactcaatcagaaattgc

SEQ ID NO: 17247 - DNA, 22 bp, Artificial Sequence
  Description of Artificial Sequence: Synthetic primer
aggcagtcctttgatagtgtgt

SEQ ID NO: 17248 - DNA, 20 bp, Artificial Sequence
  Description of Artificial Sequence: Synthetic primer
tggtctcaaaccctccgaag

SEQ ID NO: 17249 - DNA, 21 bp, Artificial Sequence
  Description of Artificial Sequence: Synthetic primer
ggtctggttagcagcatggaa

SEQ ID NO: 17250 - DNA, 25 bp, Artificial Sequence
  Description of Artificial Sequence: Synthetic primer
cccatggaacccatgctatcttatc

SEQ ID NO: 17251 - DNA, 22 bp, Artificial Sequence
  Description of Artificial Sequence: Synthetic primer
tccttctgtggcctaaactttg

SEQ ID NO: 17252 - DNA, 27 bp, Artificial Sequence
  Description of Artificial Sequence: Synthetic primer
tgctataatatacccgttcttgcaaca

SEQ ID NO: 17253 - DNA, 28 bp, Artificial Sequence
  Description of Artificial Sequence: Synthetic primer
tgtcccaatatagacagtatgtccatct

SEQ ID NO: 17254 - DNA, 23 bp, Artificial Sequence
  Description of Artificial Sequence: Synthetic primer
cagaacgtgaggtgcctatacat

SEQ ID NO: 17255 - DNA, 26 bp, Artificial Sequence
  Description of Artificial Sequence: Synthetic primer
ggtaactcgagtgtttctggaaacag

SEQ ID NO: 17256 - DNA, 18 bp, Artificial Sequence
  Description of Artificial Sequence: Synthetic primer
ctcccgtctcggcctaaa

SEQ ID NO: 17257 - DNA, 21 bp, Artificial Sequence
  Description of Artificial Sequence: Synthetic primer
aattctgctcgaccccacaaa

SEQ ID NO: 17258 - DNA, 28 bp, Artificial Sequence
  Description of Artificial Sequence: Synthetic primer
cttccgaaatctcgaaattacaagatgt

SEQ ID NO: 17259 - DNA, 22 bp, Artificial Sequence
  Description of Artificial Sequence: Synthetic primer
agacatcactaggctgcaaaca

SEQ ID NO: 17260 - DNA, 21 bp, Artificial Sequence
  Description of Artificial Sequence: Synthetic primer
cattgcacattgcttcacacg

SEQ ID NO: 17261 - DNA, 22 bp, Artificial Sequence
  Description of Artificial Sequence: Synthetic primer
ggtgaggaaggtcatgtagctg

SEQ ID NO: 17262 - DNA, 21 bp, Artificial Sequence
  Description of Artificial Sequence: Synthetic primer
aatggccggtttgcaaaacaa

SEQ ID NO: 17263 - DNA, 21 bp, Artificial Sequence
  Description of Artificial Sequence: Synthetic primer
ctcacatggtctgggttggtg

SEQ ID NO: 17264 - DNA, 21 bp, Artificial Sequence
  Description of Artificial Sequence: Synthetic primer
accagtttgcctgtaatggct

SEQ ID NO: 17265 - DNA, 21 bp, Artificial Sequence
  Description of Artificial Sequence: Synthetic primer
gctttgcactcatggttggac

SEQ ID NO: 17266 - DNA, 21 bp, Artificial Sequence
  Description of Artificial Sequence: Synthetic primer
aagttggacaccttcccttcc

SEQ ID NO: 17267 - DNA, 24 bp, Artificial Sequence
  Description of Artificial Sequence: Synthetic primer
atatcgatctcggatgacgtgaac

SEQ ID NO: 17268 - DNA, 21 bp, Artificial Sequence
  Description of Artificial Sequence: Synthetic primer
ctccagatcggcgtcaagtac

SEQ ID NO: 17269 - DNA, 21 bp, Artificial Sequence
  Description of Artificial Sequence: Synthetic primer
ggagggtgctcattcaattgc

SEQ ID NO: 17270 - DNA, 27 bp, Artificial Sequence
  Description of Artificial Sequence: Synthetic primer
gttcatatcatctgcagcttggtttac

SEQ ID NO: 17271 - DNA, 23 bp, Artificial Sequence
  Description of Artificial Sequence: Synthetic primer
catcctgatgtaccccttctcac

SEQ ID NO: 17272 - DNA, 25 bp, Artificial Sequence
  Description of Artificial Sequence: Synthetic primer
gcggatgattcacttcataggtaca

SEQ ID NO: 17273 - DNA, 25 bp, Artificial Sequence
  Description of Artificial Sequence: Synthetic primer
cctaccacatcgacacacaagtaat

SEQ ID NO: 17274 - DNA, 25 bp, Artificial Sequence
  Description of Artificial Sequence: Synthetic primer
ggcttaacctttagaacaacatccc

SEQ ID NO: 17275 - DNA, 25 bp, Artificial Sequence
  Description of Artificial Sequence: Synthetic primer
gcagttacgggatgatctattgtca

SEQ ID NO: 17276 - DNA, 27 bp, Artificial Sequence
  Description of Artificial Sequence: Synthetic primer
atgaggaagcttcatcgtctttattct

SEQ ID NO: 17277 - DNA, 25 bp, Artificial Sequence
  Description of Artificial Sequence: Synthetic primer
tttttaagggcagaagttcttgacg

SEQ ID NO: 17278 - DNA, 22 bp, Artificial Sequence
  Description of Artificial Sequence: Synthetic primer
tgaaggtcagacacaaccatca

SEQ ID NO: 17279 - DNA, 22 bp, Artificial Sequence
  Description of Artificial Sequence: Synthetic primer
aggttcgtcaatcgtcaattgc

SEQ ID NO: 17280 - DNA, 21 bp, Artificial Sequence
  Description of Artificial Sequence: Synthetic primer
gagttgctggacaacctcaga

SEQ ID NO: 17281 - DNA, 21 bp, Artificial Sequence
  Description of Artificial Sequence: Synthetic primer
ccacaaccctggaatgcatct

SEQ ID NO: 17282 - DNA, 21 bp, Artificial Sequence
  Description of Artificial Sequence: Synthetic primer
aatggtggtaccagacggcta

SEQ ID NO: 17283 - DNA, 24 bp, Artificial Sequence
  Description of Artificial Sequence: Synthetic primer
gcttccatgaatatcttgccccaa

SEQ ID NO: 17284 - DNA, 22 bp, Artificial Sequence
  Description of Artificial Sequence: Synthetic primer
tgttctccctctgctgttttct

SEQ ID NO: 17285 - DNA, 21 bp, Artificial Sequence
  Description of Artificial Sequence: Synthetic primer
ggtacactatgggcatgtgct

SEQ ID NO: 17286 - DNA, 25 bp, Artificial Sequence
  Description of Artificial Sequence: Synthetic primer
ggtttatcactgcttagctttctgg

SEQ ID NO: 17287 - DNA, 21 bp, Artificial Sequence
  Description of Artificial Sequence: Synthetic primer
ttagggcatccgaaaggaagc

SEQ ID NO: 17288 - DNA, 27 bp, Artificial Sequence
  Description of Artificial Sequence: Synthetic primer
tgataatacatgacccagttctcttgc

SEQ ID NO: 17289 - DNA, 21 bp, Artificial Sequence
  Description of Artificial Sequence: Synthetic primer
cgcatcggtcatctgaaatgc

SEQ ID NO: 17290 - DNA, 21 bp, Artificial Sequence
  Description of Artificial Sequence: Synthetic primer
cttgcatgcggtgacgttatt

SEQ ID NO: 17291 - DNA, 21 bp, Artificial Sequence
  Description of Artificial Sequence: Synthetic primer
cgatggcattcaaggaacagc

SEQ ID NO: 17292 - DNA, 22 bp, Artificial Sequence
  Description of Artificial Sequence: Synthetic primer
aggcctgcttacagatgctttt

SEQ ID NO: 17293 - DNA, 21 bp, Artificial Sequence
  Description of Artificial Sequence: Synthetic primer
tgctgcaactgtagtcctctt

SEQ ID NO: 17294 - DNA, 21 bp, Artificial Sequence
  Description of Artificial Sequence: Synthetic primer
tagtagctgtgctgccacatc

SEQ ID NO: 17295 - DNA, 25 bp, Artificial Sequence
  Description of Artificial Sequence: Synthetic primer
ggaagccgtacaagttgtatactgg

SEQ ID NO: 17296 - DNA, 21 bp, Artificial Sequence
  Description of Artificial Sequence: Synthetic primer
aacctgaggaaatgcatggct

SEQ ID NO: 17297 - DNA, 24 bp, Artificial Sequence
  Description of Artificial Sequence: Synthetic primer
agcatgccattatgaagtaaccca

SEQ ID NO: 17298 - DNA, 22 bp, Artificial Sequence
  Description of Artificial Sequence: Synthetic primer
atatatgggttggtcgggatcg

SEQ ID NO: 17299 - DNA, 21 bp, Artificial Sequence
  Description of Artificial Sequence: Synthetic primer
atcaagttggccacgtagtcc

SEQ ID NO: 17300 - DNA, 27 bp, Artificial Sequence
  Description of Artificial Sequence: Synthetic primer
gtgccaagaggatggtaagaagaaata

SEQ ID NO: 17301 - DNA, 19 bp, Artificial Sequence
  Description of Artificial Sequence: Synthetic primer
atctttccgagggcgagac

SEQ ID NO: 17302 - DNA, 20 bp, Artificial Sequence
  Description of Artificial Sequence: Synthetic primer
tcctggtggagaaggtggag

SEQ ID NO: 17303 - DNA, 25 bp, Artificial Sequence
  Description of Artificial Sequence: Synthetic primer
ggtggaattgtattgcagattctgg

SEQ ID NO: 17304 - DNA, 22 bp, Artificial Sequence
  Description of Artificial Sequence: Synthetic primer
tcacaaaggcacgcttatcatg

SEQ ID NO: 17305 - DNA, 18 bp, Artificial Sequence
  Description of Artificial Sequence: Synthetic primer
cggccgcgtacagtcttt

SEQ ID NO: 17306 - DNA, 28 bp, Artificial Sequence
  Description of Artificial Sequence: Synthetic primer
actctccaactgatgtaattgcatatca

SEQ ID NO: 17307 - DNA, 26 bp, Artificial Sequence
  Description of Artificial Sequence: Synthetic primer
tgaatcccattcttttcttccttccc

SEQ ID NO: 17308 - DNA, 28 bp, Artificial Sequence
  Description of Artificial Sequence: Synthetic primer
acagaacaagattccaaacattcacatc

SEQ ID NO: 17309 - DNA, 27 bp, Artificial Sequence
  Description of Artificial Sequence: Synthetic primer
gcagaatattgacaagcaaactgaaca

SEQ ID NO: 17310 - DNA, 22 bp, Artificial Sequence
  Description of Artificial Sequence: Synthetic primer
ggtgaaggttggtgatcactga

SEQ ID NO: 17311 - DNA, 21 bp, Artificial Sequence
  Description of Artificial Sequence: Synthetic primer
aaggaagggccataagtgcaa

SEQ ID NO: 17312 - DNA, 18 bp, Artificial Sequence
  Description of Artificial Sequence: Synthetic primer
cttgacggcgtcggtgta

SEQ ID NO: 17313 - DNA, 28 bp, Artificial Sequence
  Description of Artificial Sequence: Synthetic primer
acaccaattcagaatccaatatatccgt

SEQ ID NO: 17314 - DNA, 21 bp, Artificial Sequence
  Description of Artificial Sequence: Synthetic primer
ccggcacaaaggatttcactc

SEQ ID NO: 17315 - DNA, 24 bp, Artificial Sequence
  Description of Artificial Sequence: Synthetic primer
ttgtgtatcttgggagtacccact

SEQ ID NO: 17316 - DNA, 24 bp, Artificial Sequence
  Description of Artificial Sequence: Synthetic primer
ctccagactacagaaaccacagag

SEQ ID NO: 17317 - DNA, 22 bp, Artificial Sequence
  Description of Artificial Sequence: Synthetic primer
ccacaactccccaaggttgtat

SEQ ID NO: 17318 - DNA, 27 bp, Artificial Sequence
  Description of Artificial Sequence: Synthetic primer
ggaaagattactctgtggagaacaaga

SEQ ID NO: 17319 - DNA, 28 bp, Artificial Sequence
  Description of Artificial Sequence: Synthetic primer
tggtgatggtttacttcttgaagctaat

SEQ ID NO: 17320 - DNA, 26 bp, Artificial Sequence
  Description of Artificial Sequence: Synthetic primer
cagcaagggattcatcgagatcttaa

SEQ ID NO: 17321 - DNA, 21 bp, Artificial Sequence
  Description of Artificial Sequence: Synthetic primer
gactacgaaacgcctgatggg

SEQ ID NO: 17322 - DNA, 21 bp, Artificial Sequence
  Description of Artificial Sequence: Synthetic primer
catgcacgagacgacgaatct

SEQ ID NO: 17323 - DNA, 21 bp, Artificial Sequence
  Description of Artificial Sequence: Synthetic primer
gcagaggatgaaagcgatgct

SEQ ID NO: 17324 - DNA, 21 bp, Artificial Sequence
  Description of Artificial Sequence: Synthetic primer
atcatgtccgatgccgagttc

SEQ ID NO: 17325 - DNA, 21 bp, Artificial Sequence
  Description of Artificial Sequence: Synthetic primer
gaacaccatggacctcacagg

SEQ ID NO: 17326 - DNA, 28 bp, Artificial Sequence
  Description of Artificial Sequence: Synthetic primer
tctctttctttgtcgaagagttgcataa

SEQ ID NO: 17327 - DNA, 21 bp, Artificial Sequence
  Description of Artificial Sequence: Synthetic primer
atacataggtgccccatgacc

SEQ ID NO: 17328 - DNA, 25 bp, Artificial Sequence
  Description of Artificial Sequence: Synthetic primer
gcaattactcgtacgaaatctgcac

SEQ ID NO: 17329 - DNA, 21 bp, Artificial Sequence
  Description of Artificial Sequence: Synthetic primer
agcacgtgtgactttgtttcc

SEQ ID NO: 17330 - DNA, 24 bp, Artificial Sequence
  Description of Artificial Sequence: Synthetic primer
gccgatagacaagcatgagtatca

SEQ ID NO: 17331 - DNA, 21 bp, Artificial Sequence
  Description of Artificial Sequence: Synthetic primer
ccaaatgcattcacggaacct

SEQ ID NO: 17332 - DNA, 23 bp, Artificial Sequence
  Description of Artificial Sequence: Synthetic primer
tgttcttgcacgagtccctattg

SEQ ID NO: 17333 - DNA, 21 bp, Artificial Sequence
  Description of Artificial Sequence: Synthetic primer
ccagcgaggtatgtggtcaaa

SEQ ID NO: 17334 - DNA, 21 bp, Artificial Sequence
  Description of Artificial Sequence: Synthetic primer
cagctgccggtagtaacctag

SEQ ID NO: 17335 - DNA, 28 bp, Artificial Sequence
  Description of Artificial Sequence: Synthetic primer
ccacctttcaggtatatatggcatcttt

SEQ ID NO: 17336 - DNA, 20 bp, Artificial Sequence
  Description of Artificial Sequence: Synthetic primer
gagcaccacgttcagcttca

SEQ ID NO: 17337 - DNA, 21 bp, Artificial Sequence
  Description of Artificial Sequence: Synthetic primer
ctttggtgccgtggcttctta

SEQ ID NO: 17338 - DNA, 21 bp, Artificial Sequence
  Description of Artificial Sequence: Synthetic primer
tctttagcacctgaaggccat

SEQ ID NO: 17339 - DNA, 21 bp, Artificial Sequence
  Description of Artificial Sequence: Synthetic primer
ctgaaggaaaccaggcttcgt

SEQ ID NO: 17340 - DNA, 22 bp, Artificial Sequence
  Description of Artificial Sequence: Synthetic primer
cctttgttcagtgcggatgatg

SEQ ID NO: 17341 - DNA, 21 bp, Artificial Sequence
  Description of Artificial Sequence: Synthetic primer
cttcaaggccatcccgaagac

SEQ ID NO: 17342 - DNA, 27 bp, Artificial Sequence
  Description of Artificial Sequence: Synthetic primer
aatccttctccctcaaggttcttagta

SEQ ID NO: 17343 - DNA, 25 bp, Artificial Sequence
  Description of Artificial Sequence: Synthetic primer
ggcagattttgttttatgcattggg

SEQ ID NO: 17344 - DNA, 28 bp, Artificial Sequence
  Description of Artificial Sequence: Synthetic primer
tttacctcagaagatacagtactccctt

SEQ ID NO: 17345 - DNA, 24 bp, Artificial Sequence
  Description of Artificial Sequence: Synthetic primer
tttgaaccaaccattgctatacgg

SEQ ID NO: 17346 - DNA, 25 bp, Artificial Sequence
  Description of Artificial Sequence: Synthetic primer
gagtacaaccctacgtccagtattg

SEQ ID NO: 17347 - DNA, 26 bp, Artificial Sequence
  Description of Artificial Sequence: Synthetic primer
agtccgataatccacttgttcctatc

SEQ ID NO: 17348 - DNA, 21 bp, Artificial Sequence
  Description of Artificial Sequence: Synthetic primer
aaaccccaaagcactgctacc

SEQ ID NO: 17349 - DNA, 21 bp, Artificial Sequence
  Description of Artificial Sequence: Synthetic primer
agttttctcatcctccgccat

SEQ ID NO: 17350 - DNA, 21 bp, Artificial Sequence
  Description of Artificial Sequence: Synthetic primer
cctcgatcatgatcccgaacc

SEQ ID NO: 17351 - DNA, 21 bp, Artificial Sequence
  Description of Artificial Sequence: Synthetic primer
gatcagttcgaggaccaccac

SEQ ID NO: 17352 - DNA, 21 bp, Artificial Sequence
  Description of Artificial Sequence: Synthetic primer
gctctggcctgatagtgtcaa

SEQ ID NO: 17353 - DNA, 22 bp, Artificial Sequence
  Description of Artificial Sequence: Synthetic primer
aaacaccaggatccccatttca

SEQ ID NO: 17354 - DNA, 26 bp, Artificial Sequence
  Description of Artificial Sequence: Synthetic primer
gcaagtgcccacaaataaaatggtta

SEQ ID NO: 17355 - DNA, 28 bp, Artificial Sequence
  Description of Artificial Sequence: Synthetic primer
agaaagatcaactattgttgcacctgaa

SEQ ID NO: 17356 - DNA, 26 bp, Artificial Sequence
  Description of Artificial Sequence: Synthetic primer
cagtaaatagtttgtggaacccaagc

SEQ ID NO: 17357 - DNA, 22 bp, Artificial Sequence
  Description of Artificial Sequence: Synthetic primer
ggacacccttcgtcttcaactc

SEQ ID NO: 17358 - DNA, 21 bp, Artificial Sequence
  Description of Artificial Sequence: Synthetic primer
aaaagtacgcgatgggctgat

SEQ ID NO: 17359 - DNA, 23 bp, Artificial Sequence
  Description of Artificial Sequence: Synthetic primer
tcgtgctatgcagtcttgctatt

SEQ ID NO: 17360 - DNA, 21 bp, Artificial Sequence
  Description of Artificial Sequence: Synthetic primer
gggtcttgtcttccgtactgg

SEQ ID NO: 17361 - DNA, 23 bp, Artificial Sequence
  Description of Artificial Sequence: Synthetic primer
ccctgttgttcttgaggaaacca

SEQ ID NO: 17362 - DNA, 21 bp, Artificial Sequence
  Description of Artificial Sequence: Synthetic primer
agtatggcgatccttcgcaac

SEQ ID NO: 17363 - DNA, 21 bp, Artificial Sequence
  Description of Artificial Sequence: Synthetic primer
gatagcacctgaagcagcact

SEQ ID NO: 17364 - DNA, 22 bp, Artificial Sequence
  Description of Artificial Sequence: Synthetic primer
ccttcctgctttcagttttccg

SEQ ID NO: 17365 - DNA, 21 bp, Artificial Sequence
  Description of Artificial Sequence: Synthetic primer
gaacctgtctctgcccattcc

SEQ ID NO: 17366 - DNA, 21 bp, Artificial Sequence
  Description of Artificial Sequence: Synthetic primer
cacacctcgtgcacaaccata

SEQ ID NO: 17367 - DNA, 26 bp, Artificial Sequence
  Description of Artificial Sequence: Synthetic primer
agacaatgcaagtgcgaaaatatagg

SEQ ID NO: 17368 - DNA, 24 bp, Artificial Sequence
  Description of Artificial Sequence: Synthetic primer
gttgccttggaataacctcaagag

SEQ ID NO: 17369 - DNA, 21 bp, Artificial Sequence
  Description of Artificial Sequence: Synthetic primer
aaatggcaacaggacgtttcg

SEQ ID NO: 17370 - DNA, 23 bp, Artificial Sequence
  Description of Artificial Sequence: Synthetic primer
tctgtcatatgggcatctatggc

SEQ ID NO: 17371 - DNA, 20 bp, Artificial Sequence
  Description of Artificial Sequence: Synthetic primer
ggtcaccacaccctcgtaac

SEQ ID NO: 17372 - DNA, 26 bp, Artificial Sequence
  Description of Artificial Sequence: Synthetic primer
ccttttctcttagtcatcatgctcca

SEQ ID NO: 17373 - DNA, 27 bp, Artificial Sequence
  Description of Artificial Sequence: Synthetic primer
tgatgatccaaaactgtaggaaactgt

SEQ ID NO: 17374 - DNA, 18 bp, Artificial Sequence
  Description of Artificial Sequence: Synthetic primer
cgtcggcgtcaggaagtg

SEQ ID NO: 17375 - DNA, 21 bp, Artificial Sequence
  Description of Artificial Sequence: Synthetic primer
ctttgctaggccattcgcttc

SEQ ID NO: 17376 - DNA, 21 bp, Artificial Sequence
  Description of Artificial Sequence: Synthetic primer
taaaccgcgcacgaattgatc

SEQ ID NO: 17377 - DNA, 25 bp, Artificial Sequence
  Description of Artificial Sequence: Synthetic primer
cgtcgccacagacatatatatagcc

SEQ ID NO: 17378 - DNA, 18 bp, Artificial Sequence
  Description of Artificial Sequence: Synthetic primer
ccacggtcacgtcgaacc

SEQ ID NO: 17379 - DNA, 20 bp, Artificial Sequence
  Description of Artificial Sequence: Synthetic primer
atggtcatgtccagggagga

SEQ ID NO: 17380 - DNA, 19 bp, Artificial Sequence
  Description of Artificial Sequence: Synthetic primer
cgccagggcctacaactaa

SEQ ID NO: 17381 - DNA, 22 bp, Artificial Sequence
  Description of Artificial Sequence: Synthetic primer
tgcctaagcatctctgtagcac

SEQ ID NO: 17382 - DNA, 19 bp, Artificial Sequence
  Description of Artificial Sequence: Synthetic primer
catgtgcatgcccttggtg

SEQ ID NO: 17383 - DNA, 20 bp, Artificial Sequence
  Description of Artificial Sequence: Synthetic primer
aggaagatgcggccttcaag

SEQ ID NO: 17384 - DNA, 28 bp, Artificial Sequence
  Description of Artificial Sequence: Synthetic primer
tgtgaatataaccttacctagcaacact

SEQ ID NO: 17385 - DNA, 22 bp, Artificial Sequence
  Description of Artificial Sequence: Synthetic primer
tggtgagagtgtacacaaagcc

SEQ ID NO: 17386 - DNA, 25 bp, Artificial Sequence
  Description of Artificial Sequence: Synthetic primer
acatttaagctcaattggctgaggt

SEQ ID NO: 17387 - DNA, 21 bp, Artificial Sequence
  Description of Artificial Sequence: Synthetic primer
gaggcttttcttcggtccgat

SEQ ID NO: 17388 - DNA, 22 bp, Artificial Sequence
  Description of Artificial Sequence: Synthetic primer
tccatcctccatcctcaaacag

SEQ ID NO: 17389 - DNA, 22 bp, Artificial Sequence
  Description of Artificial Sequence: Synthetic primer
gcctcttgaagtttccggaaca

SEQ ID NO: 17390 - DNA, 28 bp, Artificial Sequence
  Description of Artificial Sequence: Synthetic primer
tcccttggagttattccactaatgaaaa

SEQ ID NO: 17391 - DNA, 21 bp, Artificial Sequence
  Description of Artificial Sequence: Synthetic primer
cccctcctgaactctaagctg

SEQ ID NO: 17392 - DNA, 21 bp, Artificial Sequence
  Description of Artificial Sequence: Synthetic primer
tgagggactcgagggtattca

SEQ ID NO: 17393 - DNA, 26 bp, Artificial Sequence
  Description of Artificial Sequence: Synthetic primer
gctgcgacggaaattttatatagctt

SEQ ID NO: 17394 - DNA, 21 bp, Artificial Sequence
  Description of Artificial Sequence: Synthetic primer
ccttcgagcctggtgtctatg

SEQ ID NO: 17395 - DNA, 23 bp, Artificial Sequence
  Description of Artificial Sequence: Synthetic primer
tcgactgtgaaccaactatagcc

SEQ ID NO: 17396 - DNA, 25 bp, Artificial Sequence
  Description of Artificial Sequence: Synthetic primer
gcgttccattacgaagtacttgttc

SEQ ID NO: 17397 - DNA, 27 bp, Artificial Sequence
  Description of Artificial Sequence: Synthetic primer
tcaaactactattttgcctctctacgg

SEQ ID NO: 17398 - DNA, 22 bp, Artificial Sequence
  Description of Artificial Sequence: Synthetic primer
aggagcttgaattcacgatgga

SEQ ID NO: 17399 - DNA, 24 bp, Artificial Sequence
  Description of Artificial Sequence: Synthetic primer
aaacagaaaacaagggctcaagtg

SEQ ID NO: 17400 - DNA, 21 bp, Artificial Sequence
  Description of Artificial Sequence: Synthetic primer
tgctgctcaaacacttcagga

SEQ ID NO: 17401 - DNA, 24 bp, Artificial Sequence
  Description of Artificial Sequence: Synthetic primer
gacctctacaagtactctgatgcc

SEQ ID NO: 17402 - DNA, 21 bp, Artificial Sequence
  Description of Artificial Sequence: Synthetic primer
tgcttctttagcagagccctt

SEQ ID NO: 17403 - DNA, 26 bp, Artificial Sequence
  Description of Artificial Sequence: Synthetic primer
agttccaagactattgaacggctatt

SEQ ID NO: 17404 - DNA, 28 bp, Artificial Sequence
  Description of Artificial Sequence: Synthetic primer
acagtcaaattacaatagccatacacct

SEQ ID NO: 17405 - DNA, 21 bp, Artificial Sequence
  Description of Artificial Sequence: Synthetic primer
ctgccttcgcttgatgtgttt

SEQ ID NO: 17406 - DNA, 24 bp, Artificial Sequence
  Description of Artificial Sequence: Synthetic primer
gccagaacaatcacaagcagtatt

SEQ ID NO: 17407 - DNA, 25 bp, Artificial Sequence
  Description of Artificial Sequence: Synthetic primer
gctttgtgatctgtatgagaacgac

SEQ ID NO: 17408 - DNA, 23 bp, Artificial Sequence
  Description of Artificial Sequence: Synthetic primer
cctctgttttcccctgaatctcc

SEQ ID NO: 17409 - DNA, 21 bp, Artificial Sequence
  Description of Artificial Sequence: Synthetic primer
gatctcccgcctcgtgaaatt

SEQ ID NO: 17410 - DNA, 27 bp, Artificial Sequence
  Description of Artificial Sequence: Synthetic primer
actagcagctctctgaataacttcatc

SEQ ID NO: 17411 - DNA, 22 bp, Artificial Sequence
  Description of Artificial Sequence: Synthetic primer
gccttctcaacttggctatgtg

SEQ ID NO: 17412 - DNA, 19 bp, Artificial Sequence
  Description of Artificial Sequence: Synthetic primer
gcggcggtggagaagttat

SEQ ID NO: 17413 - DNA, 20 bp, Artificial Sequence
  Description of Artificial Sequence: Synthetic primer
gcaggtggatcctggttgat

SEQ ID NO: 17414 - DNA, 21 bp, Artificial Sequence
  Description of Artificial Sequence: Synthetic primer
gcggtagaatgcctcgatagt

SEQ ID NO: 17415 - DNA, 22 bp, Artificial Sequence
  Description of Artificial Sequence: Synthetic primer
cgcgcatgcaaaactaaaacag

SEQ ID NO: 17416 - DNA, 24 bp, Artificial Sequence
  Description of Artificial Sequence: Synthetic primer
gccacagatttgtatccaggattg

SEQ ID NO: 17417 - DNA, 21 bp, Artificial Sequence
  Description of Artificial Sequence: Synthetic primer
ctgtttcaggtgttgccatgt

SEQ ID NO: 17418 - DNA, 25 bp, Artificial Sequence
  Description of Artificial Sequence: Synthetic primer
gaaaaacaaaggaggatttccctgt

SEQ ID NO: 17419 - DNA, 22 bp, Artificial Sequence
  Description of Artificial Sequence: Synthetic primer
tctgaactctgaaggagacggt

SEQ ID NO: 17420 - DNA, 22 bp, Artificial Sequence
  Description of Artificial Sequence: Synthetic primer
aagttcagggcaagaattgcac

SEQ ID NO: 17421 - DNA, 21 bp, Artificial Sequence
  Description of Artificial Sequence: Synthetic primer
aagcaagcccaatatggcaac

SEQ ID NO: 17422 - DNA, 23 bp, Artificial Sequence
  Description of Artificial Sequence: Synthetic primer
gcattgcatgaggctgatatagg

SEQ ID NO: 17423 - DNA, 21 bp, Artificial Sequence
  Description of Artificial Sequence: Synthetic primer
ccatctctttttggccgttgt

SEQ ID NO: 17424 - DNA, 24 bp, Artificial Sequence
  Description of Artificial Sequence: Synthetic primer
accttgcaaatctcatccatcaca

SEQ ID NO: 17425 - DNA, 22 bp, Artificial Sequence
  Description of Artificial Sequence: Synthetic primer
ggactttttcacgactcctggt

SEQ ID NO: 17426 - DNA, 26 bp, Artificial Sequence
  Description of Artificial Sequence: Synthetic primer
gccagggataaaaatgctgcaaatta

SEQ ID NO: 17427 - DNA, 21 bp, Artificial Sequence
  Description of Artificial Sequence: Synthetic primer
ggtgcgatcccacttgtagat

SEQ ID NO: 17428 - DNA, 28 bp, Artificial Sequence
  Description of Artificial Sequence: Synthetic primer
ccattcttttgcttagaaaaccacatga

SEQ ID NO: 17429 - DNA, 22 bp, Artificial Sequence
  Description of Artificial Sequence: Synthetic primer
gacctttggcaaattcgtggaa

SEQ ID NO: 17430 - DNA, 27 bp, Artificial Sequence
  Description of Artificial Sequence: Synthetic primer
agataagtaggagtgaactaccccttt

SEQ ID NO: 17431 - DNA, 28 bp, Artificial Sequence
  Description of Artificial Sequence: Synthetic primer
ttcttcatttttcatcaacttcttggct

SEQ ID NO: 17432 - DNA, 23 bp, Artificial Sequence
  Description of Artificial Sequence: Synthetic primer
acttctggttagagcttgcgtag

SEQ ID NO: 17433 - DNA, 28 bp, Artificial Sequence
  Description of Artificial Sequence: Synthetic primer
caacttcagttgttgaattgctatcaga

SEQ ID NO: 17434 - DNA, 25 bp, Artificial Sequence
  Description of Artificial Sequence: Synthetic primer
actctagcgaaaccaagtatgaagg

SEQ ID NO: 17435 - DNA, 23 bp, Artificial Sequence
  Description of Artificial Sequence: Synthetic primer
tgccataattttcttgcgactcc

SEQ ID NO: 17436 - DNA, 22 bp, Artificial Sequence
  Description of Artificial Sequence: Synthetic primer
ggaggcgagcaatgaatcatct

SEQ ID NO: 17437 - DNA, 24 bp, Artificial Sequence
  Description of Artificial Sequence: Synthetic primer
aacccaggtagcagaacagtattt

SEQ ID NO: 17438 - DNA, 22 bp, Artificial Sequence
  Description of Artificial Sequence: Synthetic primer
catgactgttcttgcagcttgg

SEQ ID NO: 17439 - DNA, 21 bp, Artificial Sequence
  Description of Artificial Sequence: Synthetic primer
aatgagcgaatactgcagcct

SEQ ID NO: 17440 - DNA, 21 bp, Artificial Sequence
  Description of Artificial Sequence: Synthetic primer
ggcagggtcaacgagatatgg

SEQ ID NO: 17441 - DNA, 27 bp, Artificial Sequence
  Description of Artificial Sequence: Synthetic primer
gttgaaatgggactaaagagtcctgaa

SEQ ID NO: 17442 - DNA, 26 bp, Artificial Sequence
  Description of Artificial Sequence: Synthetic primer
gtaggcaatcgatctactagaacagg

SEQ ID NO: 17443 - DNA, 24 bp, Artificial Sequence
  Description of Artificial Sequence: Synthetic primer
tgatggagagaaaaggaagatgct

SEQ ID NO: 17444 - DNA, 24 bp, Artificial Sequence
  Description of Artificial Sequence: Synthetic primer
gtcatcaaatggtgaagcgttgat

SEQ ID NO: 17445 - DNA, 21 bp, Artificial Sequence
  Description of Artificial Sequence: Synthetic primer
acaagttgcaaggttgcatgg

SEQ ID NO: 17446 - DNA, 28 bp, Artificial Sequence
  Description of Artificial Sequence: Synthetic primer
ctaattaagttagtctttggtgctagcg

SEQ ID NO: 17447 - DNA, 21 bp, Artificial Sequence
  Description of Artificial Sequence: Synthetic primer
tgcacgctcgacctatcatac

SEQ ID NO: 17448 - DNA, 21 bp, Artificial Sequence
  Description of Artificial Sequence: Synthetic primer
ggtgaacaagtcactgtcgct

SEQ ID NO: 17449 - DNA, 24 bp, Artificial Sequence
  Description of Artificial Sequence: Synthetic primer
agatcattcagagctgatgtacgc

SEQ ID NO: 17450 - DNA, 26 bp, Artificial Sequence
  Description of Artificial Sequence: Synthetic primer
gttaacttcctttttggtgtgcaact

SEQ ID NO: 17451 - DNA, 27 bp, Artificial Sequence
  Description of Artificial Sequence: Synthetic primer
cagacaaaacttttgaattgcatcgac

SEQ ID NO: 17452 - DNA, 21 bp, Artificial Sequence
  Description of Artificial Sequence: Synthetic primer
cttgttcactatgccggtgct

SEQ ID NO: 17453 - DNA, 21 bp, Artificial Sequence
  Description of Artificial Sequence: Synthetic primer
gctattcaagcccaaatggca

SEQ ID NO: 17454 - DNA, 21 bp, Artificial Sequence
  Description of Artificial Sequence: Synthetic primer
gcagagctcgcagattatgga

SEQ ID NO: 17455 - DNA, 24 bp, Artificial Sequence
  Description of Artificial Sequence: Synthetic primer
acttgcgcccataaaagtcaaaaa

SEQ ID NO: 17456 - DNA, 26 bp, Artificial Sequence
  Description of Artificial Sequence: Synthetic primer
tcacttcttaagcaacaggtttctga

SEQ ID NO: 17457 - DNA, 23 bp, Artificial Sequence
  Description of Artificial Sequence: Synthetic primer
agaaatcagcagtcaaaggcaac

SEQ ID NO: 17458 - DNA, 23 bp, Artificial Sequence
  Description of Artificial Sequence: Synthetic primer
tcaatggagattggagaaaggca

SEQ ID NO: 17459 - DNA, 21 bp, Artificial Sequence
  Description of Artificial Sequence: Synthetic primer
gcagctccaattgggactctt

SEQ ID NO: 17460 - DNA, 23 bp, Artificial Sequence
  Description of Artificial Sequence: Synthetic primer
tcatggcatctggagattcatcg

SEQ ID NO: 17461 - DNA, 25 bp, Artificial Sequence
  Description of Artificial Sequence: Synthetic primer
cgattcctgacatggatacctttga

SEQ ID NO: 17462 - DNA, 18 bp, Artificial Sequence
  Description of Artificial Sequence: Synthetic primer
ccacagatgccgtgatgc

SEQ ID NO: 17463 - DNA, 22 bp, Artificial Sequence
  Description of Artificial Sequence: Synthetic primer
accttctgggaagcagaactca

SEQ ID NO: 17464 - DNA, 22 bp, Artificial Sequence
  Description of Artificial Sequence: Synthetic primer
aaaccttgcacacctaaaaggc

SEQ ID NO: 17465 - DNA, 21 bp, Artificial Sequence
  Description of Artificial Sequence: Synthetic primer
ttctatcgtcggccatgatgc

SEQ ID NO: 17466 - DNA, 27 bp, Artificial Sequence
  Description of Artificial Sequence: Synthetic primer
cgagtcaaatcatggaagtctcaaaga

SEQ ID NO: 17467 - DNA, 21 bp, Artificial Sequence
  Description of Artificial Sequence: Synthetic primer
gagtgcaaggaatgtccccat

SEQ ID NO: 17468 - DNA, 23 bp, Artificial Sequence
  Description of Artificial Sequence: Synthetic primer
tccagcattcggtttctcctatg

SEQ ID NO: 17469 - DNA, 21 bp, Artificial Sequence
  Description of Artificial Sequence: Synthetic primer
attgccgaatatgctctcgct

SEQ ID NO: 17470 - DNA, 21 bp, Artificial Sequence
  Description of Artificial Sequence: Synthetic primer
tcgttatccgcagaagacaca

SEQ ID NO: 17471 - DNA, 28 bp, Artificial Sequence
  Description of Artificial Sequence: Synthetic primer
agactagtacagttcttgctaccactaa

SEQ ID NO: 17472 - DNA, 26 bp, Artificial Sequence
  Description of Artificial Sequence: Synthetic primer
ccaatccttagcacaaacaagagttt

SEQ ID NO: 17473 - DNA, 25 bp, Artificial Sequence
  Description of Artificial Sequence: Synthetic primer
ggcagaatagaccccttttcttttg

SEQ ID NO: 17474 - DNA, 21 bp, Artificial Sequence
  Description of Artificial Sequence: Synthetic primer
gcagcctgaccacgttcaata

SEQ ID NO: 17475 - DNA, 22 bp, Artificial Sequence
  Description of Artificial Sequence: Synthetic primer
ggacctagcgacagcgaataat

SEQ ID NO: 17476 - DNA, 22 bp, Artificial Sequence
  Description of Artificial Sequence: Synthetic primer
catgtgctgtccaatcttcgag

SEQ ID NO: 17477 - DNA, 22 bp, Artificial Sequence
  Description of Artificial Sequence: Synthetic primer
ctgcagaaacacgcaacttagc

SEQ ID NO: 17478 - DNA, 21 bp, Artificial Sequence
  Description of Artificial Sequence: Synthetic primer
tgtcctcagacttgtcgcttg

SEQ ID NO: 17479 - DNA, 21 bp, Artificial Sequence
  Description of Artificial Sequence: Synthetic primer
catgaagcacctgtcagcaag

SEQ ID NO: 17480 - DNA, 26 bp, Artificial Sequence
  Description of Artificial Sequence: Synthetic primer
ggataattgaagagcagttctgtgga

SEQ ID NO: 17481 - DNA, 21 bp, Artificial Sequence
  Description of Artificial Sequence: Synthetic primer
cgccgaatggcaagtaagagt

SEQ ID NO: 17482 - DNA, 21 bp, Artificial Sequence
  Description of Artificial Sequence: Synthetic primer
gaagttgccgaactcgaccat

SEQ ID NO: 17483 - DNA, 25 bp, Artificial Sequence
  Description of Artificial Sequence: Synthetic primer
gcaagttctgaatagcaacctcatc

SEQ ID NO: 17484 - DNA, 18 bp, Artificial Sequence
  Description of Artificial Sequence: Synthetic primer
tgtccccgtcgtcgttct

SEQ ID NO: 17485 - DNA, 24 bp, Artificial Sequence
  Description of Artificial Sequence: Synthetic primer
gaaaccaatgagcatttccaggag

SEQ ID NO: 17486 - DNA, 23 bp, Artificial Sequence
  Description of Artificial Sequence: Synthetic primer
ttctttccagcaccctcatactt

SEQ ID NO: 17487 - DNA, 21 bp, Artificial Sequence
  Description of Artificial Sequence: Synthetic primer
ctgggccatcaaaagtggaca

SEQ ID NO: 17488 - DNA, 25 bp, Artificial Sequence
  Description of Artificial Sequence: Synthetic primer
gggcataactccccctattcatatc

SEQ ID NO: 17489 - DNA, 21 bp, Artificial Sequence
  Description of Artificial Sequence: Synthetic primer
ctgacgcattccaaagctcaa

SEQ ID NO: 17490 - DNA, 21 bp, Artificial Sequence
  Description of Artificial Sequence: Synthetic primer
ctggtagtaggtcgtcttccg

SEQ ID NO: 17491 - DNA, 25 bp, Artificial Sequence
  Description of Artificial Sequence: Synthetic primer
caaacattacaaacatgtgcaggga

SEQ ID NO: 17492 - DNA, 26 bp, Artificial Sequence
  Description of Artificial Sequence: Synthetic primer
actcgttatctaaacttgcagaacca

SEQ ID NO: 17493 - DNA, 21 bp, Artificial Sequence
  Description of Artificial Sequence: Synthetic primer
caagctgccgccatagtagtc

SEQ ID NO: 17494 - DNA, 25 bp, Artificial Sequence
  Description of Artificial Sequence: Synthetic primer
gaaggatattgcagaagcagcctta

SEQ ID NO: 17495 - DNA, 29 bp, Artificial Sequence
  Description of Artificial Sequence: Synthetic primer
ggacttcatcagaaggattttgattttgc

SEQ ID NO: 17496 - DNA, 24 bp, Artificial Sequence
  Description of Artificial Sequence: Synthetic primer
ggattcttcgtgtggtctttcctc

SEQ ID NO: 17497 - DNA, 21 bp, Artificial Sequence
  Description of Artificial Sequence: Synthetic primer
cacccgtcctcctttatggat

SEQ ID NO: 17498 - DNA, 25 bp, Artificial Sequence
  Description of Artificial Sequence: Synthetic primer
cagaaaggccaccactaaatcttct

SEQ ID NO: 17499 - DNA, 27 bp, Artificial Sequence
  Description of Artificial Sequence: Synthetic primer
agccaaacagttaactgacaatcatac

SEQ ID NO: 17500 - DNA, 26 bp, Artificial Sequence
  Description of Artificial Sequence: Synthetic primer
agccatttgccagtacatatttgttc

SEQ ID NO: 17501 - DNA, 21 bp, Artificial Sequence
  Description of Artificial Sequence: Synthetic primer
ttgctttttctccccgacgtt

SEQ ID NO: 17502 - DNA, 25 bp, Artificial Sequence
  Description of Artificial Sequence: Synthetic primer
agactaggctagtagcattgcaatt

SEQ ID NO: 17503 - DNA, 21 bp, Artificial Sequence
  Description of Artificial Sequence: Synthetic primer
caaccctaatgctgtggcaga

SEQ ID NO: 17504 - DNA, 21 bp, Artificial Sequence
  Description of Artificial Sequence: Synthetic primer
catcatcacaagcagggatgc

SEQ ID NO: 17505 - DNA, 21 bp, Artificial Sequence
  Description of Artificial Sequence: Synthetic primer
gcgtgcctgttgaagaatgag

SEQ ID NO: 17506 - DNA, 22 bp, Artificial Sequence
  Description of Artificial Sequence: Synthetic primer
tctgccttgcctcgaggtatta

SEQ ID NO: 17507 - DNA, 19 bp, Artificial Sequence
  Description of Artificial Sequence: Synthetic primer
gggaaggaggtcgactggt

SEQ ID NO: 17508 - DNA, 25 bp, Artificial Sequence
  Description of Artificial Sequence: Synthetic primer
gcccctggagctgttgtaaattata

SEQ ID NO: 17509 - DNA, 25 bp, Artificial Sequence
  Description of Artificial Sequence: Synthetic primer
aaaagaagggagcaatgtgctaaaa

SEQ ID NO: 17510 - DNA, 26 bp, Artificial Sequence
  Description of Artificial Sequence: Synthetic primer
cctcttgaggaggacttaagttcaat

SEQ ID NO: 17511 - DNA, 25 bp, Artificial Sequence
  Description of Artificial Sequence: Synthetic primer
agtgtcgtataattgtgaactccca

SEQ ID NO: 17512 - DNA, 26 bp, Artificial Sequence
  Description of Artificial Sequence: Synthetic primer
ctttgccataaaactgtaaccgtttg

SEQ ID NO: 17513 - DNA, 22 bp, Artificial Sequence
  Description of Artificial Sequence: Synthetic primer
acaatctgcccgtcagaatagt

SEQ ID NO: 17514 - DNA, 21 bp, Artificial Sequence
  Description of Artificial Sequence: Synthetic primer
gctgtttgtgaacaagaccca

SEQ ID NO: 17515 - DNA, 29 bp, Artificial Sequence
  Description of Artificial Sequence: Synthetic primer
cctgacaatatgacttatgaggaactaca

SEQ ID NO: 17516 - DNA, 18 bp, Artificial Sequence
  Description of Artificial Sequence: Synthetic primer
atcagcatgctgcctggt

SEQ ID NO: 17517 - DNA, 27 bp, Artificial Sequence
  Description of Artificial Sequence: Synthetic primer
ccaccaaaggtagtaagtaacgatacc

SEQ ID NO: 17518 - DNA, 21 bp, Artificial Sequence
  Description of Artificial Sequence: Synthetic primer
ctctgctacaaccacgagctg

SEQ ID NO: 17519 - DNA, 25 bp, Artificial Sequence
  Description of Artificial Sequence: Synthetic primer
gaatgtcaatctgcttctcaagctc

SEQ ID NO: 17520 - DNA, 21 bp, Artificial Sequence
  Description of Artificial Sequence: Synthetic primer
ttgggtctcgggtacaatcca

SEQ ID NO: 17521 - DNA, 21 bp, Artificial Sequence
  Description of Artificial Sequence: Synthetic primer
tggacggatgatcgatcccat

SEQ ID NO: 17522 - DNA, 27 bp, Artificial Sequence
  Description of Artificial Sequence: Synthetic primer
gtccttgaatatagcctgtgggtatag

SEQ ID NO: 17523 - DNA, 22 bp, Artificial Sequence
  Description of Artificial Sequence: Synthetic primer
tgatgggcatcgtttaaagcac

SEQ ID NO: 17524 - DNA, 21 bp, Artificial Sequence
  Description of Artificial Sequence: Synthetic primer
ttgttccctgttggtgtcaca

SEQ ID NO: 17525 - DNA, 28 bp, Artificial Sequence
  Description of Artificial Sequence: Synthetic primer
gatcatgatgcttgagaatcaacatagc

SEQ ID NO: 17526 - DNA, 22 bp, Artificial Sequence
  Description of Artificial Sequence: Synthetic primer
agaaaatccatgtaggcgctga

SEQ ID NO: 17527 - DNA, 22 bp, Artificial Sequence
  Description of Artificial Sequence: Synthetic primer
gttcgtaccacgggagaagatt

SEQ ID NO: 17528 - DNA, 22 bp, Artificial Sequence
  Description of Artificial Sequence: Synthetic primer
tgcaccagattttgacatgtcc

SEQ ID NO: 17529 - DNA, 23 bp, Artificial Sequence
  Description of Artificial Sequence: Synthetic primer
gtactacgtcgaccttctcaacc

SEQ ID NO: 17530 - DNA, 23 bp, Artificial Sequence
  Description of Artificial Sequence: Synthetic primer
acaattctgaacaaggccttcct

SEQ ID NO: 17531 - DNA, 25 bp, Artificial Sequence
  Description of Artificial Sequence: Synthetic primer
tttcgatcaacatgccaaagatgaa

SEQ ID NO: 17532 - DNA, 26 bp, Artificial Sequence
  Description of Artificial Sequence: Synthetic primer
tgccaacatacagtagaagtgctatt

SEQ ID NO: 17533 - DNA, 21 bp, Artificial Sequence
  Description of Artificial Sequence: Synthetic primer
gcgctggacagctcaaatatc

SEQ ID NO: 17534 - DNA, 28 bp, Artificial Sequence
  Description of Artificial Sequence: Synthetic primer
attgatgtctaagtacagcagtatctcg

SEQ ID NO: 17535 - DNA, 21 bp, Artificial Sequence
  Description of Artificial Sequence: Synthetic primer
gcacccatactaaagccacca

SEQ ID NO: 17536 - DNA, 21 bp, Artificial Sequence
  Description of Artificial Sequence: Synthetic primer
gcggaagtcagtgaccatgag

SEQ ID NO: 17537 - DNA, 25 bp, Artificial Sequence
  Description of Artificial Sequence: Synthetic primer
ccagctaccagtaaattgtccttga

SEQ ID NO: 17538 - DNA, 19 bp, Artificial Sequence
  Description of Artificial Sequence: Synthetic primer
gcacaccatctgcacgtca

SEQ ID NO: 17539 - DNA, 22 bp, Artificial Sequence
  Description of Artificial Sequence: Synthetic primer
cgagcctcagctgaatacatgg

SEQ ID NO: 17540 - DNA, 23 bp, Artificial Sequence
  Description of Artificial Sequence: Synthetic primer
gcagtcgatgaaatagtggagca

SEQ ID NO: 17541 - DNA, 22 bp, Artificial Sequence
  Description of Artificial Sequence: Synthetic primer
cttccctctccaatagcgacca

SEQ ID NO: 17542 - DNA, 21 bp, Artificial Sequence
  Description of Artificial Sequence: Synthetic primer
atccttgctgggagggtatcc

SEQ ID NO: 17543 - DNA, 21 bp, Artificial Sequence
  Description of Artificial Sequence: Synthetic primer
cgatttcccctgctcttcctg

SEQ ID NO: 17544 - DNA, 24 bp, Artificial Sequence
  Description of Artificial Sequence: Synthetic primer
tggtgtagatcggatattcgtgtg

SEQ ID NO: 17545 - DNA, 23 bp, Artificial Sequence
  Description of Artificial Sequence: Synthetic primer
accgtgagaccaaatactgaact

SEQ ID NO: 17546 - DNA, 27 bp, Artificial Sequence
  Description of Artificial Sequence: Synthetic primer
gcaatggcagactttgtatctatcatg

SEQ ID NO: 17547 - DNA, 24 bp, Artificial Sequence
  Description of Artificial Sequence: Synthetic primer
aagatgtccctgtactgggagtaa

SEQ ID NO: 17548 - DNA, 24 bp, Artificial Sequence
  Description of Artificial Sequence: Synthetic primer
tcgtttagtgccagagtgaaattg

SEQ ID NO: 17549 - DNA, 26 bp, Artificial Sequence
  Description of Artificial Sequence: Synthetic primer
tgtactaccagccgtttgtaactaaa

SEQ ID NO: 17550 - DNA, 21 bp, Artificial Sequence
  Description of Artificial Sequence: Synthetic primer
cctccacctcaggcaaagaaa

SEQ ID NO: 17551 - DNA, 23 bp, Artificial Sequence
  Description of Artificial Sequence: Synthetic primer
aggtgcgttgttaagcttactca

SEQ ID NO: 17552 - DNA, 21 bp, Artificial Sequence
  Description of Artificial Sequence: Synthetic primer
ctcacggacacgtgaagtcaa

SEQ ID NO: 17553 - DNA, 27 bp, Artificial Sequence
  Description of Artificial Sequence: Synthetic primer
gctgaagattgtgatgttcgacataag

SEQ ID NO: 17554 - DNA, 21 bp, Artificial Sequence
  Description of Artificial Sequence: Synthetic primer
gaagtccccagagttgggaag

SEQ ID NO: 17555 - DNA, 24 bp, Artificial Sequence
  Description of Artificial Sequence: Synthetic primer
gtcgaataacccatttgcagtagc

SEQ ID NO: 17556 - DNA, 24 bp, Artificial Sequence
  Description of Artificial Sequence: Synthetic primer
tcatctagacacttgtcgaaaggg

SEQ ID NO: 17557 - DNA, 26 bp, Artificial Sequence
  Description of Artificial Sequence: Synthetic primer
cattgagctgtattgccggatttatt

SEQ ID NO: 17558 - DNA, 21 bp, Artificial Sequence
  Description of Artificial Sequence: Synthetic primer
tggtcgctgttggattccaat

SEQ ID NO: 17559 - DNA, 25 bp, Artificial Sequence
  Description of Artificial Sequence: Synthetic primer
accttcccatggaagaagaattgtt

SEQ ID NO: 17560 - DNA, 23 bp, Artificial Sequence
  Description of Artificial Sequence: Synthetic primer
gaactcgtgctctagcttatggt

SEQ ID NO: 17561 - DNA, 19 bp, Artificial Sequence
  Description of Artificial Sequence: Synthetic primer
gaggaagggcttgctcgtc

SEQ ID NO: 17562 - DNA, 29 bp, Artificial Sequence
  Description of Artificial Sequence: Synthetic primer
tctcgatccaacattcgactaataagatc

SEQ ID NO: 17563 - DNA, 23 bp, Artificial Sequence
  Description of Artificial Sequence: Synthetic primer
gctgttctggttacattgtaccg

SEQ ID NO: 17564 - DNA, 23 bp, Artificial Sequence
  Description of Artificial Sequence: Synthetic primer
caacggaaggaagtacaaatggg

SEQ ID NO: 17565 - DNA, 26 bp, Artificial Sequence
  Description of Artificial Sequence: Synthetic primer
tcagctcttgtgactgacatacctta

SEQ ID NO: 17566 - DNA, 19 bp, Artificial Sequence
  Description of Artificial Sequence: Synthetic primer
ctgctgctggctttgaagg

SEQ ID NO: 17567 - DNA, 28 bp, Artificial Sequence
  Description of Artificial Sequence: Synthetic primer
gctacaaggtgatgtaactatgtatcca

SEQ ID NO: 17568 - DNA, 25 bp, Artificial Sequence
  Description of Artificial Sequence: Synthetic primer
ataaccattttaagcagggaaacgg

SEQ ID NO: 17569 - DNA, 21 bp, Artificial Sequence
  Description of Artificial Sequence: Synthetic primer
gcatgccgttctctgttcttg

SEQ ID NO: 17570 - DNA, 26 bp, Artificial Sequence
  Description of Artificial Sequence: Synthetic primer
gtgtacaattccataaatcaccgcat

SEQ ID NO: 17571 - DNA, 23 bp, Artificial Sequence
  Description of Artificial Sequence: Synthetic primer
ttagaggagcagatccagaagca

SEQ ID NO: 17572 - DNA, 24 bp, Artificial Sequence
  Description of Artificial Sequence: Synthetic primer
ggtaccatcaagatggagttggat

SEQ ID NO: 17573 - DNA, 28 bp, Artificial Sequence
  Description of Artificial Sequence: Synthetic primer
tgacaggttagcctaatcatatgaagga

SEQ ID NO: 17574 - DNA, 23 bp, Artificial Sequence
  Description of Artificial Sequence: Synthetic primer
gctatccatgttgccatcatctg

SEQ ID NO: 17575 - DNA, 21 bp, Artificial Sequence
  Description of Artificial Sequence: Synthetic primer
ctttcactgccaactgttgcg

SEQ ID NO: 17576 - DNA, 21 bp, Artificial Sequence
  Description of Artificial Sequence: Synthetic primer
cagattttgcgagcgaaggtg

SEQ ID NO: 17577 - DNA, 24 bp, Artificial Sequence
  Description of Artificial Sequence: Synthetic primer
agtgttacaatggcaaccacaaaa

SEQ ID NO: 17578 - DNA, 21 bp, Artificial Sequence
  Description of Artificial Sequence: Synthetic primer
agtggttcctgaagccaaacg

SEQ ID NO: 17579 - DNA, 19 bp, Artificial Sequence
  Description of Artificial Sequence: Synthetic primer
cagcggcatgttggtctcc

SEQ ID NO: 17580 - DNA, 23 bp, Artificial Sequence
  Description of Artificial Sequence: Synthetic primer
agcaaaacaccttcagcaaactg

SEQ ID NO: 17581 - DNA, 21 bp, Artificial Sequence
  Description of Artificial Sequence: Synthetic primer
agctcaaacatgcaactgcca

SEQ ID NO: 17582 - DNA, 21 bp, Artificial Sequence
  Description of Artificial Sequence: Synthetic primer
cagatcaagtacgcacagcag

SEQ ID NO: 17583 - DNA, 26 bp, Artificial Sequence
  Description of Artificial Sequence: Synthetic primer
ctcaagatgagcaacctgcataaaat

SEQ ID NO: 17584 - DNA, 24 bp, Artificial Sequence
  Description of Artificial Sequence: Synthetic primer
agtgatacactctaaccctaggct

SEQ ID NO: 17585 - DNA, 21 bp, Artificial Sequence
  Description of Artificial Sequence: Synthetic primer
agctgtcttcctccttgttcc

SEQ ID NO: 17586 - DNA, 30 bp, Artificial Sequence
  Description of Artificial Sequence: Synthetic primer
gcttgtatacctagtatcagccaagttaat

SEQ ID NO: 17587 - DNA, 24 bp, Artificial Sequence
  Description of Artificial Sequence: Synthetic primer
gacagcttcttctcaacatggtca

SEQ ID NO: 17588 - DNA, 24 bp, Artificial Sequence
  Description of Artificial Sequence: Synthetic primer
tgtcagattggcctgggaatatag

SEQ ID NO: 17589 - DNA, 26 bp, Artificial Sequence
  Description of Artificial Sequence: Synthetic primer
gtattgtaccccactaatttgccatc

SEQ ID NO: 17590 - DNA, 26 bp, Artificial Sequence
  Description of Artificial Sequence: Synthetic primer
tgctcccatatatcatcatacgaagc

SEQ ID NO: 17591 - DNA, 28 bp, Artificial Sequence
  Description of Artificial Sequence: Synthetic primer
agctctttattgtctacaagcttaggtt

SEQ ID NO: 17592 - DNA, 21 bp, Artificial Sequence
  Description of Artificial Sequence: Synthetic primer
agcgacacaaactttgctcaa

SEQ ID NO: 17593 - DNA, 22 bp, Artificial Sequence
  Description of Artificial Sequence: Synthetic primer
agcgtgcttgtagataagctca

SEQ ID NO: 17594 - DNA, 25 bp, Artificial Sequence
  Description of Artificial Sequence: Synthetic primer
agctgtttacagaaccacttgttca

SEQ ID NO: 17595 - DNA, 25 bp, Artificial Sequence
  Description of Artificial Sequence: Synthetic primer
ccgttcttctggagtaactgtaaca

SEQ ID NO: 17596 - DNA, 24 bp, Artificial Sequence
  Description of Artificial Sequence: Synthetic primer
ccatactcatcaacacgctcactt

SEQ ID NO: 17597 - DNA, 23 bp, Artificial Sequence
  Description of Artificial Sequence: Synthetic primer
ctttcatcgcccagttgatcttg

SEQ ID NO: 17598 - DNA, 24 bp, Artificial Sequence
  Description of Artificial Sequence: Synthetic primer
gataattgtgggcagcagatcttg

SEQ ID NO: 17599 - DNA, 24 bp, Artificial Sequence
  Description of Artificial Sequence: Synthetic primer
tgttcagacaagtatcttggccat

SEQ ID NO: 17600 - DNA, 22 bp, Artificial Sequence
  Description of Artificial Sequence: Synthetic primer
tcgacctcatcctcctcctaaa

SEQ ID NO: 17601 - DNA, 28 bp, Artificial Sequence
  Description of Artificial Sequence: Synthetic primer
tccactaagcaccatcaatcaaaagtta

SEQ ID NO: 17602 - DNA, 25 bp, Artificial Sequence
  Description of Artificial Sequence: Synthetic primer
cgtagccatcattgtcatgcaattc

SEQ ID NO: 17603 - DNA, 28 bp, Artificial Sequence
  Description of Artificial Sequence: Synthetic primer
caatttgcatctctttttgagctttgag

SEQ ID NO: 17604 - DNA, 24 bp, Artificial Sequence
  Description of Artificial Sequence: Synthetic primer
gtgctaggctacttctgtgatcag

SEQ ID NO: 17605 - DNA, 20 bp, Artificial Sequence
  Description of Artificial Sequence: Synthetic primer
ccattactagcgccgtcctg

SEQ ID NO: 17606 - DNA, 26 bp, Artificial Sequence
  Description of Artificial Sequence: Synthetic primer
cgccatagttacttccaatgacttct

SEQ ID NO: 17607 - DNA, 23 bp, Artificial Sequence
  Description of Artificial Sequence: Synthetic primer
ggttacagcttccaaccaagtct

SEQ ID NO: 17608 - DNA, 28 bp, Artificial Sequence
  Description of Artificial Sequence: Synthetic primer
tgggtcagaaatctttaatgttaaggca

SEQ ID NO: 17609 - DNA, 29 bp, Artificial Sequence
  Description of Artificial Sequence: Synthetic primer
catctccttcaaactcttcaacctcatta

SEQ ID NO: 17610 - DNA, 21 bp, Artificial Sequence
  Description of Artificial Sequence: Synthetic primer
ccggccaaagggtattgactc

SEQ ID NO: 17611 - DNA, 28 bp, Artificial Sequence
  Description of Artificial Sequence: Synthetic primer
acctccacggtactcttttattaaaact

SEQ ID NO: 17612 - DNA, 22 bp, Artificial Sequence
  Description of Artificial Sequence: Synthetic primer
ctcctctttcttcggttcccaa

SEQ ID NO: 17613 - DNA, 22 bp, Artificial Sequence
  Description of Artificial Sequence: Synthetic primer
tgcagtacaacatgtcaccaca

SEQ ID NO: 17614 - DNA, 27 bp, Artificial Sequence
  Description of Artificial Sequence: Synthetic primer
gccaaaataactaaccccttgagattg

SEQ ID NO: 17615 - DNA, 21 bp, Artificial Sequence
  Description of Artificial Sequence: Synthetic primer
gccttgcaactgctggttatg

SEQ ID NO: 17616 - DNA, 21 bp, Artificial Sequence
  Description of Artificial Sequence: Synthetic primer
catgggctctcccctttcttg

SEQ ID NO: 17617 - DNA, 21 bp, Artificial Sequence
  Description of Artificial Sequence: Synthetic primer
ttgagggactcgatgatccac

SEQ ID NO: 17618 - DNA, 27 bp, Artificial Sequence
  Description of Artificial Sequence: Synthetic primer
gcaatacatctgacagttgaaaggatc

SEQ ID NO: 17619 - DNA, 28 bp, Artificial Sequence
  Description of Artificial Sequence: Synthetic primer
atgaatgaacctgttgtttcactttctt

SEQ ID NO: 17620 - DNA, 19 bp, Artificial Sequence
  Description of Artificial Sequence: Synthetic primer
taccaagctcgtggccttc

SEQ ID NO: 17621 - DNA, 25 bp, Artificial Sequence
  Description of Artificial Sequence: Synthetic primer
agaggaaatcacagaatcccaaact

SEQ ID NO: 17622 - DNA, 22 bp, Artificial Sequence
  Description of Artificial Sequence: Synthetic primer
cccctcttggctaccacaaaat

SEQ ID NO: 17623 - DNA, 20 bp, Artificial Sequence
  Description of Artificial Sequence: Synthetic primer
catcgaggtctgccagctag

SEQ ID NO: 17624 - DNA, 22 bp, Artificial Sequence
  Description of Artificial Sequence: Synthetic primer
cctcaagctggatgagaaggtc

SEQ ID NO: 17625 - DNA, 21 bp, Artificial Sequence
  Description of Artificial Sequence: Synthetic primer
cttctcagcagttcccccaat

SEQ ID NO: 17626 - DNA, 27 bp, Artificial Sequence
  Description of Artificial Sequence: Synthetic primer
cctaaaatatagttcaaggtcgtccct

SEQ ID NO: 17627 - DNA, 21 bp, Artificial Sequence
  Description of Artificial Sequence: Synthetic primer
caagcctcgagcatcttctga

SEQ ID NO: 17628 - DNA, 19 bp, Artificial Sequence
  Description of Artificial Sequence: Synthetic primer
ctcccccaactgtgcagac

SEQ ID NO: 17629 - DNA, 27 bp, Artificial Sequence
  Description of Artificial Sequence: Synthetic primer
tggaacttcttggtttatgcattcaga

SEQ ID NO: 17630 - DNA, 23 bp, Artificial Sequence
  Description of Artificial Sequence: Synthetic primer
ggaaaaccctgacgaatccatgt

SEQ ID NO: 17631 - DNA, 24 bp, Artificial Sequence
  Description of Artificial Sequence: Synthetic primer
agctcctgaactatttaccactgc

SEQ ID NO: 17632 - DNA, 21 bp, Artificial Sequence
  Description of Artificial Sequence: Synthetic primer
agggagtgaagatctgccatg

SEQ ID NO: 17633 - DNA, 25 bp, Artificial Sequence
  Description of Artificial Sequence: Synthetic primer
cttttctttcttcttctgctgatgc

SEQ ID NO: 17634 - DNA, 21 bp, Artificial Sequence
  Description of Artificial Sequence: Synthetic primer
tccggagtgtatccaaacgtg

SEQ ID NO: 17635 - DNA, 27 bp, Artificial Sequence
  Description of Artificial Sequence: Synthetic primer
cctgggctattacttagttatgtacgc

SEQ ID NO: 17636 - DNA, 22 bp, Artificial Sequence
  Description of Artificial Sequence: Synthetic primer
ggttaacgtggccgagtaattg

SEQ ID NO: 17637 - DNA, 21 bp, Artificial Sequence
  Description of Artificial Sequence: Synthetic primer
gttgatcttgttgcccacgaa

SEQ ID NO: 17638 - DNA, 21 bp, Artificial Sequence
  Description of Artificial Sequence: Synthetic primer
cgatccgatctcgactgtcaa

SEQ ID NO: 17639 - DNA, 19 bp, Artificial Sequence
  Description of Artificial Sequence: Synthetic primer
gctcatcacacagcaccaa

SEQ ID NO: 17640 - DNA, 21 bp, Artificial Sequence
  Description of Artificial Sequence: Synthetic primer
cttggagctgtggttggagac

SEQ ID NO: 17641 - DNA, 21 bp, Artificial Sequence
  Description of Artificial Sequence: Synthetic primer
cgcaagagtatgaccccagag

SEQ ID NO: 17642 - DNA, 21 bp, Artificial Sequence
  Description of Artificial Sequence: Synthetic primer
caaggaacatcatggcgagga

SEQ ID NO: 17643 - DNA, 23 bp, Artificial Sequence
  Description of Artificial Sequence: Synthetic primer
ccattgtagtgctccagaaggat

SEQ ID NO: 17644 - DNA, 28 bp, Artificial Sequence
  Description of Artificial Sequence: Synthetic primer
tttcaagcaattggcaacaagaattaga

SEQ ID NO: 17645 - DNA, 19 bp, Artificial Sequence
  Description of Artificial Sequence: Synthetic primer
accgttgttgatggcaagg

SEQ ID NO: 17646 - DNA, 22 bp, Artificial Sequence
  Description of Artificial Sequence: Synthetic primer
tcagctactgaacgtgctttct

SEQ ID NO: 17647 - DNA, 21 bp, Artificial Sequence
  Description of Artificial Sequence: Synthetic primer
tctgaagtcgaaggttgctga

SEQ ID NO: 17648 - DNA, 25 bp, Artificial Sequence
  Description of Artificial Sequence: Synthetic primer
aggcaattgtgagatcttcaaagca

SEQ ID NO: 17649 - DNA, 21 bp, Artificial Sequence
  Description of Artificial Sequence: Synthetic primer
accaaggacaacaacctcctg

SEQ ID NO: 17650 - DNA, 22 bp, Artificial Sequence
  Description of Artificial Sequence: Synthetic primer
ccagatgagtactcgtggagga

SEQ ID NO: 17651 - DNA, 21 bp, Artificial Sequence
  Description of Artificial Sequence: Synthetic primer
tcgatggcttggaacaggtac

SEQ ID NO: 17652 - DNA, 21 bp, Artificial Sequence
  Description of Artificial Sequence: Synthetic primer
tgcgactcagaacaacgagtt

SEQ ID NO: 17653 - DNA, 24 bp, Artificial Sequence
  Description of Artificial Sequence: Synthetic primer
agctgggttagatgaagaccaatc

SEQ ID NO: 17654 - DNA, 21 bp, Artificial Sequence
  Description of Artificial Sequence: Synthetic primer
ccagaagttcgtgaccaaggg

SEQ ID NO: 17655 - DNA, 21 bp, Artificial Sequence
  Description of Artificial Sequence: Synthetic primer
caaggcggtgttcttgcaaat

SEQ ID NO: 17656 - DNA, 24 bp, Artificial Sequence
  Description of Artificial Sequence: Synthetic primer
caacttattgcactacaccttggc

SEQ ID NO: 17657 - DNA, 21 bp, Artificial Sequence
  Description of Artificial Sequence: Synthetic primer
gaagaaacacagctgctggac

SEQ ID NO: 17658 - DNA, 26 bp, Artificial Sequence
  Description of Artificial Sequence: Synthetic primer
gaccacatgcatgatactattttgcg

SEQ ID NO: 17659 - DNA, 28 bp, Artificial Sequence
  Description of Artificial Sequence: Synthetic primer
catcagcaaattcaatacaagtaagggt

SEQ ID NO: 17660 - DNA, 25 bp, Artificial Sequence
  Description of Artificial Sequence: Synthetic primer
cgtgtctcatctggatcaaatcctg

SEQ ID NO: 17661 - DNA, 22 bp, Artificial Sequence
  Description of Artificial Sequence: Synthetic primer
tcctctcaggaaaggaagctga

SEQ ID NO: 17662 - DNA, 22 bp, Artificial Sequence
  Description of Artificial Sequence: Synthetic primer
ctcaagacaaagctgagcggaa

SEQ ID NO: 17663 - DNA, 26 bp, Artificial Sequence
  Description of Artificial Sequence: Synthetic primer
tcaggaacttcactacatagcaaagg

SEQ ID NO: 17664 - DNA, 21 bp, Artificial Sequence
  Description of Artificial Sequence: Synthetic primer
ggaaggttgatgatgcagcca

SEQ ID NO: 17665 - DNA, 25 bp, Artificial Sequence
  Description of Artificial Sequence: Synthetic primer
ctcttcaccatagtccttgacaaca

SEQ ID NO: 17666 - DNA, 21 bp, Artificial Sequence
  Description of Artificial Sequence: Synthetic primer
gatggcccatgcattgacaag

SEQ ID NO: 17667 - DNA, 21 bp, Artificial Sequence
  Description of Artificial Sequence: Synthetic primer
tccttgtgcctgacgaaggta

SEQ ID NO: 17668 - DNA, 27 bp, Artificial Sequence
  Description of Artificial Sequence: Synthetic primer
tcattggaaacacgataatccaagttc

SEQ ID NO: 17669 - DNA, 25 bp, Artificial Sequence
  Description of Artificial Sequence: Synthetic primer
tcaattattaacaggcggctgatga

SEQ ID NO: 17670 - DNA, 21 bp, Artificial Sequence
  Description of Artificial Sequence: Synthetic primer
ggagaagtagaccaggttcgc

SEQ ID NO: 17671 - DNA, 21 bp, Artificial Sequence
  Description of Artificial Sequence: Synthetic primer
ctggtcatcacgtcccagatc

SEQ ID NO: 17672 - DNA, 23 bp, Artificial Sequence
  Description of Artificial Sequence: Synthetic primer
cacaaatgatggcaacctacctg

SEQ ID NO: 17673 - DNA, 20 bp, Artificial Sequence
  Description of Artificial Sequence: Synthetic primer
catacttcgccatggcgtac

SEQ ID NO: 17674 - DNA, 22 bp, Artificial Sequence
  Description of Artificial Sequence: Synthetic primer
acataggtccatcccactgtca

SEQ ID NO: 17675 - DNA, 22 bp, Artificial Sequence
  Description of Artificial Sequence: Synthetic primer
tgctttaacagcctcttcgttg

SEQ ID NO: 17676 - DNA, 23 bp, Artificial Sequence
  Description of Artificial Sequence: Synthetic primer
gctgctagaccggaagcttatag

SEQ ID NO: 17677 - DNA, 21 bp, Artificial Sequence
  Description of Artificial Sequence: Synthetic primer
gcctaggtacgagccctacaa

SEQ ID NO: 17678 - DNA, 22 bp, Artificial Sequence
  Description of Artificial Sequence: Synthetic primer
cttcgtggtggtcagtaagtgt

SEQ ID NO: 17679 - DNA, 22 bp, Artificial Sequence
  Description of Artificial Sequence: Synthetic primer
gatgttctgggaagctcttgga

SEQ ID NO: 17680 - DNA, 23 bp, Artificial Sequence
  Description of Artificial Sequence: Synthetic primer
agaaggtctccagcttgtattcc

SEQ ID NO: 17681 - DNA, 21 bp, Artificial Sequence
  Description of Artificial Sequence: Synthetic primer
tctcggtgttcttgctttccg

SEQ ID NO: 17682 - DNA, 28 bp, Artificial Sequence
  Description of Artificial Sequence: Synthetic primer
catctacatattacctcgaactgatccc

SEQ ID NO: 17683 - DNA, 20 bp, Artificial Sequence
  Description of Artificial Sequence: Synthetic primer
gatttcctagccgccgaagc

SEQ ID NO: 17684 - DNA, 21 bp, Artificial Sequence
  Description of Artificial Sequence: Synthetic primer
cgcgttacccatgagatccag

SEQ ID NO: 17685 - DNA, 21 bp, Artificial Sequence
  Description of Artificial Sequence: Synthetic primer
ctcaagctgcttaccagcgaa

SEQ ID NO: 17686 - DNA, 27 bp, Artificial Sequence
  Description of Artificial Sequence: Synthetic primer
tgtgaagaaaaatgcattcccaaagat

SEQ ID NO: 17687 - DNA, 26 bp, Artificial Sequence
  Description of Artificial Sequence: Synthetic primer
tccgagaatccgtattttgaagacaa

SEQ ID NO: 17688 - DNA, 22 bp, Artificial Sequence
  Description of Artificial Sequence: Synthetic primer
tggctttgtagccttgaaggtc

SEQ ID NO: 17689 - DNA, 20 bp, Artificial Sequence
  Description of Artificial Sequence: Synthetic primer
gagcggagttcacatccaca

SEQ ID NO: 17690 - DNA, 22 bp, Artificial Sequence
  Description of Artificial Sequence: Synthetic primer
tgatcttggagtcggtgatctg

SEQ ID NO: 17691 - DNA, 27 bp, Artificial Sequence
  Description of Artificial Sequence: Synthetic primer
gaagtagcaactttaaccgaacatagc

SEQ ID NO: 17692 - DNA, 19 bp, Artificial Sequence
  Description of Artificial Sequence: Synthetic primer
cttgcccggagcaaagttg

SEQ ID NO: 17693 - DNA, 28 bp, Artificial Sequence
  Description of Artificial Sequence: Synthetic primer
ccaaaggcaagagattcaagattatcca

SEQ ID NO: 17694 - DNA, 24 bp, Artificial Sequence
  Description of Artificial Sequence: Synthetic primer
cgcatggtcactggagataatctt

SEQ ID NO: 17695 - DNA, 26 bp, Artificial Sequence
  Description of Artificial Sequence: Synthetic primer
tcatacaaagtcagcgagtcttttcc

SEQ ID NO: 17696 - DNA, 25 bp, Artificial Sequence
  Description of Artificial Sequence: Synthetic primer
ctttaacagttgacctgggagaaga

SEQ ID NO: 17697 - DNA, 22 bp, Artificial Sequence
  Description of Artificial Sequence: Synthetic primer
cgttcccgttacacaacttgag

SEQ ID NO: 17698 - DNA, 23 bp, Artificial Sequence
  Description of Artificial Sequence: Synthetic primer
gggagacagaacaaacttgtgtg

SEQ ID NO: 17699 - DNA, 19 bp, Artificial Sequence
  Description of Artificial Sequence: Synthetic primer
aagaagctcagccgctcct

SEQ ID NO: 17700 - DNA, 26 bp, Artificial Sequence
  Description of Artificial Sequence: Synthetic primer
agagatcaagttgttaggtgatggtg

SEQ ID NO: 17701 - DNA, 21 bp, Artificial Sequence
  Description of Artificial Sequence: Synthetic primer
cccgatagagacggtttgcct

SEQ ID NO: 17702 - DNA, 28 bp, Artificial Sequence
  Description of Artificial Sequence: Synthetic primer
acaaacaatccctaaagtttcatccaag

SEQ ID NO: 17703 - DNA, 19 bp, Artificial Sequence
  Description of Artificial Sequence: Synthetic primer
gactccactccctcgagca

SEQ ID NO: 17704 - DNA, 21 bp, Artificial Sequence
  Description of Artificial Sequence: Synthetic primer
ctgacgttctttccgatgctg

SEQ ID NO: 17705 - DNA, 22 bp, Artificial Sequence
  Description of Artificial Sequence: Synthetic primer
cccatagagtatgccaccgttc

SEQ ID NO: 17706 - DNA, 24 bp, Artificial Sequence
  Description of Artificial Sequence: Synthetic primer
gcctggtacatctgaactgctaat

SEQ ID NO: 17707 - DNA, 22 bp, Artificial Sequence
  Description of Artificial Sequence: Synthetic primer
gccttataccttccggacttgc

SEQ ID NO: 17708 - DNA, 21 bp, Artificial Sequence
  Description of Artificial Sequence: Synthetic primer
gtgtggttgaggatcgtaggg

SEQ ID NO: 17709 - DNA, 21 bp, Artificial Sequence
  Description of Artificial Sequence: Synthetic primer
atgcggagctagatgcttcag

SEQ ID NO: 17710 - DNA, 27 bp, Artificial Sequence
  Description of Artificial Sequence: Synthetic primer
acccaaaccttgtaaaacatctagtga

SEQ ID NO: 17711 - DNA, 21 bp, Artificial Sequence
  Description of Artificial Sequence: Synthetic primer
atcaagaagcatctggcgttg

SEQ ID NO: 17712 - DNA, 28 bp, Artificial Sequence
  Description of Artificial Sequence: Synthetic primer
tcctacgggacataagctctatctaatt

SEQ ID NO: 17713 - DNA, 24 bp, Artificial Sequence
  Description of Artificial Sequence: Synthetic primer
tcttctggtgatgaaacaaactgc

SEQ ID NO: 17714 - DNA, 21 bp, Artificial Sequence
  Description of Artificial Sequence: Synthetic primer
tgacaccggtagtcctcatgc

SEQ ID NO: 17715 - DNA, 24 bp, Artificial Sequence
  Description of Artificial Sequence: Synthetic primer
gtgaatcctcccatttgcatgaag

SEQ ID NO: 17716 - DNA, 23 bp, Artificial Sequence
  Description of Artificial Sequence: Synthetic primer
acactcatactcctttgcaccaa

SEQ ID NO: 17717 - DNA, 26 bp, Artificial Sequence
  Description of Artificial Sequence: Synthetic primer
tttttaagttatgagcaaccggaagg

SEQ ID NO: 17718 - DNA, 28 bp, Artificial Sequence
  Description of Artificial Sequence: Synthetic primer
tgaatctggagtgttaactatgggtaag

SEQ ID NO: 17719 - DNA, 21 bp, Artificial Sequence
  Description of Artificial Sequence: Synthetic primer
gccaataatggtgccagtcca

SEQ ID NO: 17720 - DNA, 26 bp, Artificial Sequence
  Description of Artificial Sequence: Synthetic primer
tgcacgatgaaatagaagagaacact

SEQ ID NO: 17721 - DNA, 22 bp, Artificial Sequence
  Description of Artificial Sequence: Synthetic primer
acagggagttggtggaatagtg

SEQ ID NO: 17722 - DNA, 27 bp, Artificial Sequence
  Description of Artificial Sequence: Synthetic primer
catcttctatggcttcccagtaacatt

SEQ ID NO: 17723 - DNA, 28 bp, Artificial Sequence
  Description of Artificial Sequence: Synthetic primer
gaaatatgttttgcatgttcagtgaagc

SEQ ID NO: 17724 - DNA, 21 bp, Artificial Sequence
  Description of Artificial Sequence: Synthetic primer
aagcggatatgcccctgtatc

SEQ ID NO: 17725 - DNA, 19 bp, Artificial Sequence
  Description of Artificial Sequence: Synthetic primer
ctccagtgctaagggcaca

SEQ ID NO: 17726 - DNA, 21 bp, Artificial Sequence
  Description of Artificial Sequence: Synthetic primer
gcgtggtgcatagattggaaa

SEQ ID NO: 17727 - DNA, 21 bp, Artificial Sequence
  Description of Artificial Sequence: Synthetic primer
cacactcaccaatgtggcaag

SEQ ID NO: 17728 - DNA, 18 bp, Artificial Sequence
  Description of Artificial Sequence: Synthetic primer
gaccaggctcgacctgag

SEQ ID NO: 17729 - DNA, 24 bp, Artificial Sequence
  Description of Artificial Sequence: Synthetic primer
ggtcctttcacagtattccctcct

SEQ ID NO: 17730 - DNA, 21 bp, Artificial Sequence
  Description of Artificial Sequence: Synthetic primer
tttccctgcaaaccaccagtt

SEQ ID NO: 17731 - DNA, 21 bp, Artificial Sequence
  Description of Artificial Sequence: Synthetic primer
gtggtggcagagggaaatcaa

SEQ ID NO: 17732 - DNA, 28 bp, Artificial Sequence
  Description of Artificial Sequence: Synthetic primer
aacaacatgttcatttttgtaccacaca

SEQ ID NO: 17733 - DNA, 20 bp, Artificial Sequence
  Description of Artificial Sequence: Synthetic primer
gcacagtggctacgattggg

SEQ ID NO: 17734 - DNA, 28 bp, Artificial Sequence
  Description of Artificial Sequence: Synthetic primer
tccagttttatgctgcttaacttcttct

SEQ ID NO: 17735 - DNA, 21 bp, Artificial Sequence
  Description of Artificial Sequence: Synthetic primer
tttctggagggtcaagttggg

SEQ ID NO: 17736 - DNA, 26 bp, Artificial Sequence
  Description of Artificial Sequence: Synthetic primer
gtcccaaactcttcatctttgtcatc

SEQ ID NO: 17737 - DNA, 28 bp, Artificial Sequence
  Description of Artificial Sequence: Synthetic primer
cgattaaatctgttggtgggattactca

SEQ ID NO: 17738 - DNA, 22 bp, Artificial Sequence
  Description of Artificial Sequence: Synthetic primer
gcctcattgccaactacaatgg

SEQ ID NO: 17739 - DNA, 22 bp, Artificial Sequence
  Description of Artificial Sequence: Synthetic primer
aaagtcggttggtaaggaggga

SEQ ID NO: 17740 - DNA, 22 bp, Artificial Sequence
  Description of Artificial Sequence: Synthetic primer
gaccgttcaccttgtccaaatc

SEQ ID NO: 17741 - DNA, 24 bp, Artificial Sequence
  Description of Artificial Sequence: Synthetic primer
acaaaaccctgctatagtcactgt

SEQ ID NO: 17742 - DNA, 19 bp, Artificial Sequence
  Description of Artificial Sequence: Synthetic primer
gtgcgatgcaatggtggtg

SEQ ID NO: 17743 - DNA, 28 bp, Artificial Sequence
  Description of Artificial Sequence: Synthetic primer
gctcatatgcatgaagaaccaagaaatt

SEQ ID NO: 17744 - DNA, 21 bp, Artificial Sequence
  Description of Artificial Sequence: Synthetic primer
atgatcctcgcgattgtggtg

SEQ ID NO: 17745 - DNA, 19 bp, Artificial Sequence
  Description of Artificial Sequence: Synthetic primer
cctctcctccgaggagcaa

SEQ ID NO: 17746 - DNA, 21 bp, Artificial Sequence
  Description of Artificial Sequence: Synthetic primer
cctcggacttctccctagctt

SEQ ID NO: 17747 - DNA, 22 bp, Artificial Sequence
  Description of Artificial Sequence: Synthetic primer
ctcgcttgctatgtacattgcc

SEQ ID NO: 17748 - DNA, 18 bp, Artificial Sequence
  Description of Artificial Sequence: Synthetic primer
agcagctcgcggaggata

SEQ ID NO: 17749 - DNA, 21 bp, Artificial Sequence
  Description of Artificial Sequence: Synthetic primer
ggcattgtcgtttgtcacctc

SEQ ID NO: 17750 - DNA, 21 bp, Artificial Sequence
  Description of Artificial Sequence: Synthetic primer
gatcacggagaagctcacctg

SEQ ID NO: 17751 - DNA, 21 bp, Artificial Sequence
  Description of Artificial Sequence: Synthetic primer
atgggaagaccactcatgacg

SEQ ID NO: 17752 - DNA, 28 bp, Artificial Sequence
  Description of Artificial Sequence: Synthetic primer
ccagcttaaccttttgttgatgattagt

SEQ ID NO: 17753 - DNA, 27 bp, Artificial Sequence
  Description of Artificial Sequence: Synthetic primer
cgatcagccttatcatttacactgtca

SEQ ID NO: 17754 - DNA, 21 bp, Artificial Sequence
  Description of Artificial Sequence: Synthetic primer
gcccttctcttctcaagctca

SEQ ID NO: 17755 - DNA, 21 bp, Artificial Sequence
  Description of Artificial Sequence: Synthetic primer
ttctcctccagttccttgtcg

SEQ ID NO: 17756 - DNA, 23 bp, Artificial Sequence
  Description of Artificial Sequence: Synthetic primer
aagccacttcagaaaagcttgag

SEQ ID NO: 17757 - DNA, 28 bp, Artificial Sequence
  Description of Artificial Sequence: Synthetic primer
agaaaactaccattcaataactggcctt

SEQ ID NO: 17758 - DNA, 27 bp, Artificial Sequence
  Description of Artificial Sequence: Synthetic primer
ccaaagataacaacccttgctttttca

SEQ ID NO: 17759 - DNA, 21 bp, Artificial Sequence
  Description of Artificial Sequence: Synthetic primer
caatgtgcttaacccggaagc

SEQ ID NO: 17760 - DNA, 21 bp, Artificial Sequence
  Description of Artificial Sequence: Synthetic primer
ttggtttggaatgtgcgatgc

SEQ ID NO: 17761 - DNA, 24 bp, Artificial Sequence
  Description of Artificial Sequence: Synthetic primer
ggactgttttgtaagggttcctct

SEQ ID NO: 17762 - DNA, 24 bp, Artificial Sequence
  Description of Artificial Sequence: Synthetic primer
agcactgttaacctatcaccacac

SEQ ID NO: 17763 - DNA, 22 bp, Artificial Sequence
  Description of Artificial Sequence: Synthetic primer
ctcgtccattgaaaagcactcc

SEQ ID NO: 17764 - DNA, 26 bp, Artificial Sequence
  Description of Artificial Sequence: Synthetic primer
catcatccatcatgccatcaaattcc

SEQ ID NO: 17765 - DNA, 21 bp, Artificial Sequence
  Description of Artificial Sequence: Synthetic primer
cttcttgtgccttggaggttg

SEQ ID NO: 17766 - DNA, 21 bp, Artificial Sequence
  Description of Artificial Sequence: Synthetic primer
accagagtcctcatggatcct

SEQ ID NO: 17767 - DNA, 22 bp, Artificial Sequence
  Description of Artificial Sequence: Synthetic primer
gtccaggatgatgcaagcctaa

SEQ ID NO: 17768 - DNA, 19 bp, Artificial Sequence
  Description of Artificial Sequence: Synthetic primer
gcagtccagtgaaccgtca

SEQ ID NO: 17769 - DNA, 22 bp, Artificial Sequence
  Description of Artificial Sequence: Synthetic primer
gcttccggttgaagatctcgat

SEQ ID NO: 17770 - DNA, 18 bp, Artificial Sequence
  Description of Artificial Sequence: Synthetic primer
ctagcttcgcctcgctct

SEQ ID NO: 17771 - DNA, 21 bp, Artificial Sequence
  Description of Artificial Sequence: Synthetic primer
aacgactacttcgacctcgtg

SEQ ID NO: 17772 - DNA, 25 bp, Artificial Sequence
  Description of Artificial Sequence: Synthetic primer
gcgagtttactaaatgaccatccac

SEQ ID NO: 17773 - DNA, 29 bp, Artificial Sequence
  Description of Artificial Sequence: Synthetic primer
aagcaaataacaaaattgaagccttcgag

SEQ ID NO: 17774 - DNA, 23 bp, Artificial Sequence
  Description of Artificial Sequence: Synthetic primer
ccagcacatcgtttaaaatcgga

SEQ ID NO: 17775 - DNA, 23 bp, Artificial Sequence
  Description of Artificial Sequence: Synthetic primer
gaatctgatgctgttggatggtg

SEQ ID NO: 17776 - DNA, 22 bp, Artificial Sequence
  Description of Artificial Sequence: Synthetic primer
gaacagggagttggacaggtag

SEQ ID NO: 17777 - DNA, 28 bp, Artificial Sequence
  Description of Artificial Sequence: Synthetic primer
ggtatacatatttgtaacagtggccaca

SEQ ID NO: 17778 - DNA, 24 bp, Artificial Sequence
  Description of Artificial Sequence: Synthetic primer
tgaacaattaccatgtgcggtttt

SEQ ID NO: 17779 - DNA, 22 bp, Artificial Sequence
  Description of Artificial Sequence: Synthetic primer
cgcctgatttcgatgtcacaaa

SEQ ID NO: 17780 - DNA, 21 bp, Artificial Sequence
  Description of Artificial Sequence: Synthetic primer
gctcaactccatgaagtccct

SEQ ID NO: 17781 - DNA, 26 bp, Artificial Sequence
  Description of Artificial Sequence: Synthetic primer
ggatctcctgcaaacccgtaatatag

SEQ ID NO: 17782 - DNA, 25 bp, Artificial Sequence
  Description of Artificial Sequence: Synthetic primer
tgagcctttgaccaacctatagaag

SEQ ID NO: 17783 - DNA, 25 bp, Artificial Sequence
  Description of Artificial Sequence: Synthetic primer
atcacacctacacgaaacagaaagg

SEQ ID NO: 17784 - DNA, 21 bp, Artificial Sequence
  Description of Artificial Sequence: Synthetic primer
ccaccgtttgccaacttttcc

SEQ ID NO: 17785 - DNA, 30 bp, Artificial Sequence
  Description of Artificial Sequence: Synthetic primer
gccctccataatcaatatatctacagctac

SEQ ID NO: 17786 - DNA, 28 bp, Artificial Sequence
  Description of Artificial Sequence: Synthetic primer
ggctacacacgttctattcttgttctta

SEQ ID NO: 17787 - DNA, 26 bp, Artificial Sequence
  Description of Artificial Sequence: Synthetic primer
gctaccctcaatccatcttctatacc

SEQ ID NO: 17788 - DNA, 22 bp, Artificial Sequence
  Description of Artificial Sequence: Synthetic primer
cggccatgcttggaattatgaa

SEQ ID NO: 17789 - DNA, 28 bp, Artificial Sequence
  Description of Artificial Sequence: Synthetic primer
aggactgaagaccatacaaaattgaaac

SEQ ID NO: 17790 - DNA, 23 bp, Artificial Sequence
  Description of Artificial Sequence: Synthetic primer
agtcactatacccagcccagtat

SEQ ID NO: 17791 - DNA, 26 bp, Artificial Sequence
  Description of Artificial Sequence: Synthetic primer
aatagatccaaggagaacttcagagc

SEQ ID NO: 17792 - DNA, 27 bp, Artificial Sequence
  Description of Artificial Sequence: Synthetic primer
ggcagaaaagaattacaaactaaacgc

SEQ ID NO: 17793 - DNA, 26 bp, Artificial Sequence
  Description of Artificial Sequence: Synthetic primer
gaccttgcttctttcctcaaagattt

SEQ ID NO: 17794 - DNA, 26 bp, Artificial Sequence
  Description of Artificial Sequence: Synthetic primer
gatgattgagggaatgtagatgcaac

SEQ ID NO: 17795 - DNA, 21 bp, Artificial Sequence
  Description of Artificial Sequence: Synthetic primer
gacggcgtagttcctgttctt

SEQ ID NO: 17796 - DNA, 21 bp, Artificial Sequence
  Description of Artificial Sequence: Synthetic primer
tgtcgagactatggagccgaa

SEQ ID NO: 17797 - DNA, 21 bp, Artificial Sequence
  Description of Artificial Sequence: Synthetic primer
gccgcccttctctaacatctt

SEQ ID NO: 17798 - DNA, 21 bp, Artificial Sequence
  Description of Artificial Sequence: Synthetic primer
gacgtgcaacatcaaagccat

SEQ ID NO: 17799 - DNA, 24 bp, Artificial Sequence
  Description of Artificial Sequence: Synthetic primer
ggaatgtttggtggatgactccag

SEQ ID NO: 17800 - DNA, 22 bp, Artificial Sequence
  Description of Artificial Sequence: Synthetic primer
acatctctcgaactgacccaac

SEQ ID NO: 17801 - DNA, 22 bp, Artificial Sequence
  Description of Artificial Sequence: Synthetic primer
ctgtctctcccgtcagaagatc

SEQ ID NO: 17802 - DNA, 26 bp, Artificial Sequence
  Description of Artificial Sequence: Synthetic primer
ggacccaactttattacttcctcaca

SEQ ID NO: 17803 - DNA, 21 bp, Artificial Sequence
  Description of Artificial Sequence: Synthetic primer
ctcggtgttctccctgatgac

SEQ ID NO: 17804 - DNA, 22 bp, Artificial Sequence
  Description of Artificial Sequence: Synthetic primer
tctggtgttcagtgatggtcaa

SEQ ID NO: 17805 - DNA, 26 bp, Artificial Sequence
  Description of Artificial Sequence: Synthetic primer
ttgctggagatctctcgctttattag

SEQ ID NO: 17806 - DNA, 26 bp, Artificial Sequence
  Description of Artificial Sequence: Synthetic primer
cctttgggttcacaaattctgtaacg

SEQ ID NO: 17807 - DNA, 26 bp, Artificial Sequence
  Description of Artificial Sequence: Synthetic primer
gaggttccattctccatgatcctatc

SEQ ID NO: 17808 - DNA, 22 bp, Artificial Sequence
  Description of Artificial Sequence: Synthetic primer
gtggaacaacaggtacacacca

SEQ ID NO: 17809 - DNA, 25 bp, Artificial Sequence
  Description of Artificial Sequence: Synthetic primer
aaacgttcgggtttcatgttgtatt

SEQ ID NO: 17810 - DNA, 21 bp, Artificial Sequence
  Description of Artificial Sequence: Synthetic primer
cttgccagaggctggtttctt

SEQ ID NO: 17811 - DNA, 27 bp, Artificial Sequence
  Description of Artificial Sequence: Synthetic primer
tctatctgtgataaggacatccaggag

SEQ ID NO: 17812 - DNA, 21 bp, Artificial Sequence
  Description of Artificial Sequence: Synthetic primer
ttctggcttctcgcagtgtag

SEQ ID NO: 17813 - DNA, 28 bp, Artificial Sequence
  Description of Artificial Sequence: Synthetic primer
agaaacctataagtgcatgcataattcg

SEQ ID NO: 17814 - DNA, 21 bp, Artificial Sequence
  Description of Artificial Sequence: Synthetic primer
cctccccttgggcattattgg

SEQ ID NO: 17815 - DNA, 28 bp, Artificial Sequence
  Description of Artificial Sequence: Synthetic primer
aagctaaacgatacacttcagtacagat

SEQ ID NO: 17816 - DNA, 21 bp, Artificial Sequence
  Description of Artificial Sequence: Synthetic primer
gaggttgccgatcatctccac

SEQ ID NO: 17817 - DNA, 21 bp, Artificial Sequence
  Description of Artificial Sequence: Synthetic primer
cctcgtcaaggagttccagtg

SEQ ID NO: 17818 - DNA, 28 bp, Artificial Sequence
  Description of Artificial Sequence: Synthetic primer
gccatcgcgtatattctaaatcaaatgt

SEQ ID NO: 17819 - DNA, 19 bp, Artificial Sequence
  Description of Artificial Sequence: Synthetic primer
gacttgcataaccgcgcaa

SEQ ID NO: 17820 - DNA, 25 bp, Artificial Sequence
  Description of Artificial Sequence: Synthetic primer
ggtagcatttagcagctttactgtg

SEQ ID NO: 17821 - DNA, 19 bp, Artificial Sequence
  Description of Artificial Sequence: Synthetic primer
cctccccttccgtctccta

SEQ ID NO: 17822 - DNA, 22 bp, Artificial Sequence
  Description of Artificial Sequence: Synthetic primer
cgtcaccttcatgttcgagtcc

SEQ ID NO: 17823 - DNA, 28 bp, Artificial Sequence
  Description of Artificial Sequence: Synthetic primer
cttggatctttgaccgatgattataagc

SEQ ID NO: 17824 - DNA, 20 bp, Artificial Sequence
  Description of Artificial Sequence: Synthetic primer
atggcacccacatgacacct

SEQ ID NO: 17825 - DNA, 27 bp, Artificial Sequence
  Description of Artificial Sequence: Synthetic primer
ctcgactttagaggttccttctgtatc

SEQ ID NO: 17826 - DNA, 24 bp, Artificial Sequence
  Description of Artificial Sequence: Synthetic primer
cctgtaactttgctagcatagcca

SEQ ID NO: 17827 - DNA, 24 bp, Artificial Sequence
  Description of Artificial Sequence: Synthetic primer
acgctttataccacaaaccctaca

SEQ ID NO: 17828 - DNA, 21 bp, Artificial Sequence
  Description of Artificial Sequence: Synthetic primer
cgatggcggctgatgtttatc

SEQ ID NO: 17829 - DNA, 22 bp, Artificial Sequence
  Description of Artificial Sequence: Synthetic primer
actcaaacatagttccgtggca

SEQ ID NO: 17830 - DNA, 22 bp, Artificial Sequence
  Description of Artificial Sequence: Synthetic primer
aggaagcccgtcagaaagagta

SEQ ID NO: 17831 - DNA, 21 bp, Artificial Sequence
  Description of Artificial Sequence: Synthetic primer
tcggaatgcctcctcgatatg

SEQ ID NO: 17832 - DNA, 22 bp, Artificial Sequence
  Description of Artificial Sequence: Synthetic primer
ttttagtcacagcaagcagcac

SEQ ID NO: 17833 - DNA, 20 bp, Artificial Sequence
  Description of Artificial Sequence: Synthetic primer
cgagttggccaggatgtcag

SEQ ID NO: 17834 - DNA, 27 bp, Artificial Sequence
  Description of Artificial Sequence: Synthetic primer
aaatttttctggacagagggagtacat

SEQ ID NO: 17835 - DNA, 21 bp, Artificial Sequence
  Description of Artificial Sequence: Synthetic primer
caacgactcatctggttacgc

SEQ ID NO: 17836 - DNA, 25 bp, Artificial Sequence
  Description of Artificial Sequence: Synthetic primer
ggatgcaagaagctgaaagaacttt

SEQ ID NO: 17837 - DNA, 22 bp, Artificial Sequence
  Description of Artificial Sequence: Synthetic primer
cccggttcaagttcaggaaagg

SEQ ID NO: 17838 - DNA, 22 bp, Artificial Sequence
  Description of Artificial Sequence: Synthetic primer
cagagaatgtccctggtaccac

SEQ ID NO: 17839 - DNA, 25 bp, Artificial Sequence
  Description of Artificial Sequence: Synthetic primer
ccatgtagtaagaccagagtaccca

SEQ ID NO: 17840 - DNA, 28 bp, Artificial Sequence
  Description of Artificial Sequence: Synthetic primer
cgagctccaatgttttgttgtaattcag

SEQ ID NO: 17841 - DNA, 21 bp, Artificial Sequence
  Description of Artificial Sequence: Synthetic primer
ctccacactatccctcgcatg

SEQ ID NO: 17842 - DNA, 28 bp, Artificial Sequence
  Description of Artificial Sequence: Synthetic primer
agatcgacttaatgcagaaagaaatgtg

SEQ ID NO: 17843 - DNA, 21 bp, Artificial Sequence
  Description of Artificial Sequence: Synthetic primer
ctaccgatgtggtaccccctt

SEQ ID NO: 17844 - DNA, 26 bp, Artificial Sequence
  Description of Artificial Sequence: Synthetic primer
ctgtttgttgccctgttatttcttct

SEQ ID NO: 17845 - DNA, 21 bp, Artificial Sequence
  Description of Artificial Sequence: Synthetic primer
ctactgtggcagcatctgctt

SEQ ID NO: 17846 - DNA, 21 bp, Artificial Sequence
  Description of Artificial Sequence: Synthetic primer
cagggtaagcccttccaagac

SEQ ID NO: 17847 - DNA, 24 bp, Artificial Sequence
  Description of Artificial Sequence: Synthetic primer
tgtctgaaggaccatctcagaatg

SEQ ID NO: 17848 - DNA, 22 bp, Artificial Sequence
  Description of Artificial Sequence: Synthetic primer
ccactcgcaagaaccaagtgta

SEQ ID NO: 17849 - DNA, 21 bp, Artificial Sequence
  Description of Artificial Sequence: Synthetic primer
cagcagaagatgagccgctta

SEQ ID NO: 17850 - DNA, 21 bp, Artificial Sequence
  Description of Artificial Sequence: Synthetic primer
ccgcagtttgtcttggtcact

SEQ ID NO: 17851 - DNA, 28 bp, Artificial Sequence
  Description of Artificial Sequence: Synthetic primer
ctactgcaatcatccgtatttcacaatg

SEQ ID NO: 17852 - DNA, 22 bp, Artificial Sequence
  Description of Artificial Sequence: Synthetic primer
aaaactcttaccggaacaagcg

SEQ ID NO: 17853 - DNA, 26 bp, Artificial Sequence
  Description of Artificial Sequence: Synthetic primer
cacaaagttttcttcacttggcaaac

SEQ ID NO: 17854 - DNA, 24 bp, Artificial Sequence
  Description of Artificial Sequence: Synthetic primer
tgagtaatcatggtggcctttcat

SEQ ID NO: 17855 - DNA, 29 bp, Artificial Sequence
  Description of Artificial Sequence: Synthetic primer
gcttataagagaaacagtctaactatggg

SEQ ID NO: 17856 - DNA, 21 bp, Artificial Sequence
  Description of Artificial Sequence: Synthetic primer
gatgcccatcgaaccgaagag

SEQ ID NO: 17857 - DNA, 24 bp, Artificial Sequence
  Description of Artificial Sequence: Synthetic primer
gaatcagcaacgttgatggtagtt

SEQ ID NO: 17858 - DNA, 26 bp, Artificial Sequence
  Description of Artificial Sequence: Synthetic primer
gtcagtgttttcttggtatcctaagc

SEQ ID NO: 17859 - DNA, 18 bp, Artificial Sequence
  Description of Artificial Sequence: Synthetic primer
cagctcgccgaggttgag

SEQ ID NO: 17860 - DNA, 25 bp, Artificial Sequence
  Description of Artificial Sequence: Synthetic primer
actcatgtttgatgtcgttcaacag

SEQ ID NO: 17861 - DNA, 28 bp, Artificial Sequence
  Description of Artificial Sequence: Synthetic primer
tgatgactgatcttatgaattggtcgaa

SEQ ID NO: 17862 - DNA, 22 bp, Artificial Sequence
  Description of Artificial Sequence: Synthetic primer
agggcataaaacagtagccagt

SEQ ID NO: 17863 - DNA, 21 bp, Artificial Sequence
  Description of Artificial Sequence: Synthetic primer
ggccagatcagatcacttgct

SEQ ID NO: 17864 - DNA, 25 bp, Artificial Sequence
  Description of Artificial Sequence: Synthetic primer
gcacaaaacaagtagtccgatcatc

SEQ ID NO: 17865 - DNA, 23 bp, Artificial Sequence
  Description of Artificial Sequence: Synthetic primer
agagaaaggcttcttgcttctgt

SEQ ID NO: 17866 - DNA, 26 bp, Artificial Sequence
  Description of Artificial Sequence: Synthetic primer
aggattgttatgtggcaaatttgctc

SEQ ID NO: 17867 - DNA, 25 bp, Artificial Sequence
  Description of Artificial Sequence: Synthetic primer
cgaatcttaggcaaccatttgcaat

SEQ ID NO: 17868 - DNA, 21 bp, Artificial Sequence
  Description of Artificial Sequence: Synthetic primer
tgtgttctcaaaccctgcaca

SEQ ID NO: 17869 - DNA, 21 bp, Artificial Sequence
  Description of Artificial Sequence: Synthetic primer
gttgcctcatcaacagcaagc

SEQ ID NO: 17870 - DNA, 22 bp, Artificial Sequence
  Description of Artificial Sequence: Synthetic primer
ggctaccgactactagctggtt

SEQ ID NO: 17871 - DNA, 24 bp, Artificial Sequence
  Description of Artificial Sequence: Synthetic primer
ctgctcatcactcactacactcaa

SEQ ID NO: 17872 - DNA, 18 bp, Artificial Sequence
  Description of Artificial Sequence: Synthetic primer
cggattccagggcatggg

SEQ ID NO: 17873 - DNA, 28 bp, Artificial Sequence
  Description of Artificial Sequence: Synthetic primer
cactggtaagttctgaagcaaattttgt

SEQ ID NO: 17874 - DNA, 22 bp, Artificial Sequence
  Description of Artificial Sequence: Synthetic primer
tccgctcatgttctcgttcaat

SEQ ID NO: 17875 - DNA, 23 bp, Artificial Sequence
  Description of Artificial Sequence: Synthetic primer
gcggaatgaatcgaatgacactc

SEQ ID NO: 17876 - DNA, 21 bp, Artificial Sequence
  Description of Artificial Sequence: Synthetic primer
gacgacggctcctctagagta

SEQ ID NO: 17877 - DNA, 23 bp, Artificial Sequence
  Description of Artificial Sequence: Synthetic primer
actcctcagcatcatacttggac

SEQ ID NO: 17878 - DNA, 21 bp, Artificial Sequence
  Description of Artificial Sequence: Synthetic primer
agccaacctctactgcaatgg

SEQ ID NO: 17879 - DNA, 26 bp, Artificial Sequence
  Description of Artificial Sequence: Synthetic primer
gcaaactggaacctatcaaagagaga

SEQ ID NO: 17880 - DNA, 23 bp, Artificial Sequence
  Description of Artificial Sequence: Synthetic primer
tcaaaacctcctcatcacaacca

SEQ ID NO: 17881 - DNA, 24 bp, Artificial Sequence
  Description of Artificial Sequence: Synthetic primer
atcctcccaggctacaaaatacat

SEQ ID NO: 17882 - DNA, 23 bp, Artificial Sequence
  Description of Artificial Sequence: Synthetic primer
agtctccgatacatttgatggca

SEQ ID NO: 17883 - DNA, 27 bp, Artificial Sequence
  Description of Artificial Sequence: Synthetic primer
agtctcatttttggaatggtcttcact

SEQ ID NO: 17884 - DNA, 27 bp, Artificial Sequence
  Description of Artificial Sequence: Synthetic primer
tcgatatgcactttgtacactgaaatg

SEQ ID NO: 17885 - DNA, 28 bp, Artificial Sequence
  Description of Artificial Sequence: Synthetic primer
catcaatgctgaggatatatgcatgttc

SEQ ID NO: 17886 - DNA, 22 bp, Artificial Sequence
  Description of Artificial Sequence: Synthetic primer
ctaagcaggcatctgtaatgcg

SEQ ID NO: 17887 - DNA, 30 bp, Artificial Sequence
  Description of Artificial Sequence: Synthetic primer
gggtaagttcattttcatttctaacagcat

SEQ ID NO: 17888 - DNA, 24 bp, Artificial Sequence
  Description of Artificial Sequence: Synthetic primer
tgtcaactatttcaccatgaccga

SEQ ID NO: 17889 - DNA, 26 bp, Artificial Sequence
  Description of Artificial Sequence: Synthetic primer
actttgatcaattttcggaccaagtt

SEQ ID NO: 17890 - DNA, 25 bp, Artificial Sequence
  Description of Artificial Sequence: Synthetic primer
acaacccaggtgaaattttattgcc

SEQ ID NO: 17891 - DNA, 28 bp, Artificial Sequence
  Description of Artificial Sequence: Synthetic primer
cactccatgaatctgaatatgcaaggat

SEQ ID NO: 17892 - DNA, 19 bp, Artificial Sequence
  Description of Artificial Sequence: Synthetic primer
cttcgccaaagctgctgac

SEQ ID NO: 17893 - DNA, 21 bp, Artificial Sequence
  Description of Artificial Sequence: Synthetic primer
attccgacaccttcaatcagc

SEQ ID NO: 17894 - DNA, 25 bp, Artificial Sequence
  Description of Artificial Sequence: Synthetic primer
accaatactgcaagcaattgttctg

SEQ ID NO: 17895 - DNA, 23 bp, Artificial Sequence
  Description of Artificial Sequence: Synthetic primer
aggctaggaatttggagaaacga

SEQ ID NO: 17896 - DNA, 26 bp, Artificial Sequence
  Description of Artificial Sequence: Synthetic primer
cattctcctcaaatatatcgcaggca

SEQ ID NO: 17897 - DNA, 22 bp, Artificial Sequence
  Description of Artificial Sequence: Synthetic primer
gggcttgtctagaaacggaagg

SEQ ID NO: 17898 - DNA, 19 bp, Artificial Sequence
  Description of Artificial Sequence: Synthetic primer
ttggagaccatcgggcatc

SEQ ID NO: 17899 - DNA, 24 bp, Artificial Sequence
  Description of Artificial Sequence: Synthetic primer
gcacttccagataatgcaaatggg

SEQ ID NO: 17900 - DNA, 27 bp, Artificial Sequence
  Description of Artificial Sequence: Synthetic primer
ggtaagtacagtacccaactaacactt

SEQ ID NO: 17901 - DNA, 25 bp, Artificial Sequence
  Description of Artificial Sequence: Synthetic primer
gctcccctaataactccactcaaaa

SEQ ID NO: 17902 - DNA, 25 bp, Artificial Sequence
  Description of Artificial Sequence: Synthetic primer
ctgagcacattggaataatcgagga

SEQ ID NO: 17903 - DNA, 23 bp, Artificial Sequence
  Description of Artificial Sequence: Synthetic primer
gcatatctcagaagtcggtaggg

SEQ ID NO: 17904 - DNA, 22 bp, Artificial Sequence
  Description of Artificial Sequence: Synthetic primer
ccaattgcttcttcctcgcaat

SEQ ID NO: 17905 - DNA, 21 bp, Artificial Sequence
  Description of Artificial Sequence: Synthetic primer
ttcagggagtccctcttgcta

SEQ ID NO: 17906 - DNA, 23 bp, Artificial Sequence
  Description of Artificial Sequence: Synthetic primer
accggataccgacagttatggaa

SEQ ID NO: 17907 - DNA, 21 bp, Artificial Sequence
  Description of Artificial Sequence: Synthetic primer
cgctgaaatgtggcaaacgaa

SEQ ID NO: 17908 - DNA, 29 bp, Artificial Sequence
  Description of Artificial Sequence: Synthetic primer
tgatcagaaaaacaattgtcgaaatgaca

SEQ ID NO: 17909 - DNA, 21 bp, Artificial Sequence
  Description of Artificial Sequence: Synthetic primer
ggagtatcagcaggtctccag

SEQ ID NO: 17910 - DNA, 23 bp, Artificial Sequence
  Description of Artificial Sequence: Synthetic primer
cctccttgctccaataccaaact

SEQ ID NO: 17911 - DNA, 21 bp, Artificial Sequence
  Description of Artificial Sequence: Synthetic primer
cttcttgccatcctcctgctc

SEQ ID NO: 17912 - DNA, 23 bp, Artificial Sequence
  Description of Artificial Sequence: Synthetic primer
cgggaaacatgttttggacgttt

SEQ ID NO: 17913 - DNA, 22 bp, Artificial Sequence
  Description of Artificial Sequence: Synthetic primer
agcaggtgaaatgcaagctaac

SEQ ID NO: 17914 - DNA, 25 bp, Artificial Sequence
  Description of Artificial Sequence: Synthetic primer
ccattacaggcaatgatgaaagacc

SEQ ID NO: 17915 - DNA, 28 bp, Artificial Sequence
  Description of Artificial Sequence: Synthetic primer
agccaaaggcatcatggataaaaataaa

SEQ ID NO: 17916 - DNA, 28 bp, Artificial Sequence
  Description of Artificial Sequence: Synthetic primer
aactaaaatgctgacatgctgaaatcaa

SEQ ID NO: 17917 - DNA, 21 bp, Artificial Sequence
  Description of Artificial Sequence: Synthetic primer
cctatacgagagaggcctcct

SEQ ID NO: 17918 - DNA, 28 bp, Artificial Sequence
  Description of Artificial Sequence: Synthetic primer
gaaagacatcatacagacgatcaacaag

SEQ ID NO: 17919 - DNA, 22 bp, Artificial Sequence
  Description of Artificial Sequence: Synthetic primer
ctccaaagctatgcaacagcag

SEQ ID NO: 17920 - DNA, 28 bp, Artificial Sequence
  Description of Artificial Sequence: Synthetic primer
tcaacaggctgcataaatgatatctcaa

SEQ ID NO: 17921 - DNA, 24 bp, Artificial Sequence
  Description of Artificial Sequence: Synthetic primer
agttgactgatgaggaggttgatg

SEQ ID NO: 17922 - DNA, 24 bp, Artificial Sequence
  Description of Artificial Sequence: Synthetic primer
gctatcgagaagtagcagttcgag

SEQ ID NO: 17923 - DNA, 27 bp, Artificial Sequence
  Description of Artificial Sequence: Synthetic primer
tcctactcagacttgcatgtagaaaat

SEQ ID NO: 17924 - DNA, 21 bp, Artificial Sequence
  Description of Artificial Sequence: Synthetic primer
tatgtcgccttgctggtttct

SEQ ID NO: 17925 - DNA, 26 bp, Artificial Sequence
  Description of Artificial Sequence: Synthetic primer
tgtgatggatctatgacatcttgacg

SEQ ID NO: 17926 - DNA, 21 bp, Artificial Sequence
  Description of Artificial Sequence: Synthetic primer
aatggtctgcggttcgttctc

SEQ ID NO: 17927 - DNA, 22 bp, Artificial Sequence
  Description of Artificial Sequence: Synthetic primer
ttgtagcagtcgaggttgatcc

SEQ ID NO: 17928 - DNA, 20 bp, Artificial Sequence
  Description of Artificial Sequence: Synthetic primer
gcaaatagtgctccgcatcc

SEQ ID NO: 17929 - DNA, 22 bp, Artificial Sequence
  Description of Artificial Sequence: Synthetic primer
acacaacacaccacctaggatc

SEQ ID NO: 17930 - DNA, 28 bp, Artificial Sequence
  Description of Artificial Sequence: Synthetic primer
cgtcacaactggagttgaaattacaaaa

SEQ ID NO: 17931 - DNA, 21 bp, Artificial Sequence
  Description of Artificial Sequence: Synthetic primer
agcaacagctagactcaagcc

SEQ ID NO: 17932 - DNA, 26 bp, Artificial Sequence
  Description of Artificial Sequence: Synthetic primer
tcaaacaaaatcttgtgggctggata

SEQ ID NO: 17933 - DNA, 25 bp, Artificial Sequence
  Description of Artificial Sequence: Synthetic primer
ggaattggtaaatggtagtggcgat

SEQ ID NO: 17934 - DNA, 21 bp, Artificial Sequence
  Description of Artificial Sequence: Synthetic primer
tatcacaacccatgtgctgga

SEQ ID NO: 17935 - DNA, 27 bp, Artificial Sequence
  Description of Artificial Sequence: Synthetic primer
ccaggtctaagagccttattcattcat

SEQ ID NO: 17936 - DNA, 26 bp, Artificial Sequence
  Description of Artificial Sequence: Synthetic primer
tggaagatgagtgtactgttagcttg

SEQ ID NO: 17937 - DNA, 21 bp, Artificial Sequence
  Description of Artificial Sequence: Synthetic primer
gtggtccacagagatgccaat

SEQ ID NO: 17938 - DNA, 23 bp, Artificial Sequence
  Description of Artificial Sequence: Synthetic primer
agctaaatccttgacgactcctc

SEQ ID NO: 17939 - DNA, 21 bp, Artificial Sequence
  Description of Artificial Sequence: Synthetic primer
tatggtcccgttccaatccct

SEQ ID NO: 17940 - DNA, 22 bp, Artificial Sequence
  Description of Artificial Sequence: Synthetic primer
gggtgtcgtctttatggttcgg

SEQ ID NO: 17941 - DNA, 22 bp, Artificial Sequence
  Description of Artificial Sequence: Synthetic primer
gcttgctctgtcacatcacatg

SEQ ID NO: 17942 - DNA, 28 bp, Artificial Sequence
  Description of Artificial Sequence: Synthetic primer
tttttctgatccactcaaagttgttagg

SEQ ID NO: 17943 - DNA, 26 bp, Artificial Sequence
  Description of Artificial Sequence: Synthetic primer
aactgaccaattcatcaatgcaaact

SEQ ID NO: 17944 - DNA, 25 bp, Artificial Sequence
  Description of Artificial Sequence: Synthetic primer
acaccaatggtacaagtacactaca

SEQ ID NO: 17945 - DNA, 26 bp, Artificial Sequence
  Description of Artificial Sequence: Synthetic primer
gatgatagcccagcagaataacaaag

SEQ ID NO: 17946 - DNA, 22 bp, Artificial Sequence
  Description of Artificial Sequence: Synthetic primer
acatgcacgtacctacgtatgc

SEQ ID NO: 17947 - DNA, 21 bp, Artificial Sequence
  Description of Artificial Sequence: Synthetic primer
ctgattctccgacgatggctt

SEQ ID NO: 17948 - DNA, 23 bp, Artificial Sequence
  Description of Artificial Sequence: Synthetic primer
ggtgatcctaccacctgacaatt

SEQ ID NO: 17949 - DNA, 26 bp, Artificial Sequence
  Description of Artificial Sequence: Synthetic primer
cctcacatgctacaagatttttcgat

SEQ ID NO: 17950 - DNA, 22 bp, Artificial Sequence
  Description of Artificial Sequence: Synthetic primer
cctcactctgatggtggtcttc

SEQ ID NO: 17951 - DNA, 25 bp, Artificial Sequence
  Description of Artificial Sequence: Synthetic primer
ccgaacatgtaaacacaacttgtga

SEQ ID NO: 17952 - DNA, 21 bp, Artificial Sequence
  Description of Artificial Sequence: Synthetic primer
cgagtggcattggtgtcatca

SEQ ID NO: 17953 - DNA, 26 bp, Artificial Sequence
  Description of Artificial Sequence: Synthetic primer
cacagctctggtcatttagattgatg

SEQ ID NO: 17954 - DNA, 25 bp, Artificial Sequence
  Description of Artificial Sequence: Synthetic primer
gcatgtctggaaagatcatcaggta

SEQ ID NO: 17955 - DNA, 22 bp, Artificial Sequence
  Description of Artificial Sequence: Synthetic primer
gtttgtgcatgtgagtgagagc

SEQ ID NO: 17956 - DNA, 24 bp, Artificial Sequence
  Description of Artificial Sequence: Synthetic primer
agaaacttgcagaggattcctcat

SEQ ID NO: 17957 - DNA, 21 bp, Artificial Sequence
  Description of Artificial Sequence: Synthetic primer
gcggatgatcctctccctaac

SEQ ID NO: 17958 - DNA, 27 bp, Artificial Sequence
  Description of Artificial Sequence: Synthetic primer
catccgttggcagtttttattaaccat

SEQ ID NO: 17959 - DNA, 22 bp, Artificial Sequence
  Description of Artificial Sequence: Synthetic primer
tgtgggtgatgaacttctccag

SEQ ID NO: 17960 - DNA, 28 bp, Artificial Sequence
  Description of Artificial Sequence: Synthetic primer
acttgagctgtagtagtactagcagtag

SEQ ID NO: 17961 - DNA, 21 bp, Artificial Sequence
  Description of Artificial Sequence: Synthetic primer
ccgtgcagaagtgctacatcg

SEQ ID NO: 17962 - DNA, 21 bp, Artificial Sequence
  Description of Artificial Sequence: Synthetic primer
tttcccagctgtgatttccct

SEQ ID NO: 17963 - DNA, 26 bp, Artificial Sequence
  Description of Artificial Sequence: Synthetic primer
ttcgacacattacaacagaggaaaca

SEQ ID NO: 17964 - DNA, 19 bp, Artificial Sequence
  Description of Artificial Sequence: Synthetic primer
cagtccacgcgtccactag

SEQ ID NO: 17965 - DNA, 28 bp, Artificial Sequence
  Description of Artificial Sequence: Synthetic primer
tcaataactaagcaaaacaccaaaggtt

SEQ ID NO: 17966 - DNA, 27 bp, Artificial Sequence
  Description of Artificial Sequence: Synthetic primer
agaaaactgttgttgaacaggaaatgg

SEQ ID NO: 17967 - DNA, 21 bp, Artificial Sequence
  Description of Artificial Sequence: Synthetic primer
tctcacacatgaagcccaaca

SEQ ID NO: 17968 - DNA, 19 bp, Artificial Sequence
  Description of Artificial Sequence: Synthetic primer
tttctgaagccgcgagacc

SEQ ID NO: 17969 - DNA, 24 bp, Artificial Sequence
  Description of Artificial Sequence: Synthetic primer
tccacatcaggaccaacatactga

SEQ ID NO: 17970 - DNA, 21 bp, Artificial Sequence
  Description of Artificial Sequence: Synthetic primer
ccaatcccctgatccttcgac

SEQ ID NO: 17971 - DNA, 23 bp, Artificial Sequence
  Description of Artificial Sequence: Synthetic primer
agagcaatcagttctggtggaaa

SEQ ID NO: 17972 - DNA, 25 bp, Artificial Sequence
  Description of Artificial Sequence: Synthetic primer
ggcaacttaacaatagaaccacagg

SEQ ID NO: 17973 - DNA, 24 bp, Artificial Sequence
  Description of Artificial Sequence: Synthetic primer
cacacaaaatttcggaacaggctt

SEQ ID NO: 17974 - DNA, 28 bp, Artificial Sequence
  Description of Artificial Sequence: Synthetic primer
ccatggatgatcttatcgattctcttgt
